United States Patent Application Publication US 2007/0134655 A1 - sequence listing, part 11

SEQ ID NO: 402524 - RNA, 24 nt, Human
cugaggcaggagaauggcgugaac

SEQ ID NO: 402525 - RNA, 24 nt, Human
cugaggcaggagaauggcgugaau

SEQ ID NO: 402526 - RNA, 24 nt, Human
cugaggcaggagaauggcucgaac

SEQ ID NO: 402527 - RNA, 24 nt, Human
cugaggcaggagaauggcuggaac

SEQ ID NO: 402528 - RNA, 24 nt, Human
cugaggcaggagaauggcuugaac

SEQ ID NO: 402529 - RNA, 24 nt, Human
cugaggcaggagaauggggagaac

SEQ ID NO: 402530 - RNA, 24 nt, Human
cugaggcaggagaaugguaugaac

SEQ ID NO: 402531 - RNA, 24 nt, Human
cugaggcaggagaauggugcgaac

SEQ ID NO: 402532 - RNA, 20 nt, Human
cugaggcaggagaauggugu

SEQ ID NO: 402533 - RNA, 24 nt, Human
cugaggcaggagaauggugugaac

SEQ ID NO: 402534 - RNA, 24 nt, Human
cugaggcaggagaaugguguggac

SEQ ID NO: 402535 - RNA, 24 nt, Human
cugaggcaggagaauguggugaac

SEQ ID NO: 402536 - RNA, 24 nt, Human
cugaggcaggagaauuacuugaac

SEQ ID NO: 402537 - RNA, 24 nt, Human
cugaggcaggagaauuccuugaac

SEQ ID NO: 402538 - RNA, 24 nt, Human
cugaggcaggagaauucuuugaac

SEQ ID NO: 402539 - RNA, 24 nt, Human
cugaggcaggagaauugauugaac

SEQ ID NO: 402540 - RNA, 24 nt, Human
cugaggcaggagaauugcaugaac

SEQ ID NO: 402541 - RNA, 24 nt, Human
cugaggcaggagaauugcgugaau

SEQ ID NO: 402542 - RNA, 22 nt, Human
cugaggcaggagaauugcugaa

SEQ ID NO: 402543 - RNA, 22 nt, Human
cugaggcaggagaauugcuuga

SEQ ID NO: 402544 - RNA, 23 nt, Human
cugaggcaggagaauugcuugaa

SEQ ID NO: 402545 - RNA, 24 nt, Human
cugaggcaggagaauugcuugaac

SEQ ID NO: 402546 - RNA, 24 nt, Human
cugaggcaggagaauugcuugaau

SEQ ID NO: 402547 - RNA, 24 nt, Human
cugaggcaggagaauugcuugagc

SEQ ID NO: 402548 - RNA, 24 nt, Human
cugaggcaggagaauugguugaac

SEQ ID NO: 402549 - RNA, 22 nt, Human
cugaggcaggagaauuguuuga

SEQ ID NO: 402550 - RNA, 24 nt, Human
cugaggcaggagaauuguuugaac

SEQ ID NO: 402551 - RNA, 24 nt, Human
cugaggcaggagacucgcuugaac

SEQ ID NO: 402552 - RNA, 24 nt, Human
cugaggcaggagacuggcgugaac

SEQ ID NO: 402553 - RNA, 24 nt, Human
cugaggcaggagaguagcgugaac

SEQ ID NO: 402554 - RNA, 24 nt, Human
cugaggcaggagagucacuugaac

SEQ ID NO: 402555 - RNA, 23 nt, Human
cugaggcaggagagugcuugaac

SEQ ID NO: 402556 - RNA, 24 nt, Human
cugaggcaggagaguggugugaac

SEQ ID NO: 402557 - RNA, 23 nt, Human
cugaggcaggagaucgcuggaac

SEQ ID NO: 402558 - RNA, 24 nt, Human
cugaggcaggagauucgccugaac

SEQ ID NO: 402559 - RNA, 24 nt, Human
cugaggcaggagauucgcuugaac

SEQ ID NO: 402560 - RNA, 24 nt, Human
cugaggcaggagcauugcuugaac

SEQ ID NO: 402561 - RNA, 32 nt, Human
cugaggcaggaggaucaccugaggucaggagu

SEQ ID NO: 402562 - RNA, 23 nt, Human
cugaggcaggaggaucacgugag

SEQ ID NO: 402563 - RNA, 24 nt, Human
cugaggcaggaggaucacgugagc

SEQ ID NO: 402564 - RNA, 24 nt, Human
cugaggcaggaggaucacuugaac

SEQ ID NO: 402565 - RNA, 32 nt, Human
cugaggcaggaggaucacuugaggucaggagu

SEQ ID NO: 402566 - RNA, 32 nt, Human
cugaggcaggaggaucauuugaggucaggagu

SEQ ID NO: 402567 - RNA, 24 nt, Human
cugaggcaggaggaucgcuugaac

SEQ ID NO: 402568 - RNA, 24 nt, Human
cugaggcaggaggauggcgugaac

SEQ ID NO: 402569 - RNA, 24 nt, Human
cugaggcaggaggauggugugaac

SEQ ID NO: 402570 - RNA, 24 nt, Human
cugaggcaggaggauugcucgaac

SEQ ID NO: 402571 - RNA, 32 nt, Human
cugaggcaggaggugcagcguguggagugaga

SEQ ID NO: 402572 - RNA, 32 nt, Human
cugaggcaggcagagcauuugaggucaggagu

SEQ ID NO: 402573 - RNA, 32 nt, Human
cugaggcaggcagaucacaugaggucaggagu

SEQ ID NO: 402574 - RNA, 32 nt, Human
cugaggcaggcagaucaccugaggccaggagu

SEQ ID NO: 402575 - RNA, 32 nt, Human
cugaggcaggcagaucaccugaggucaggagu

SEQ ID NO: 402576 - RNA, 32 nt, Human
cugaggcaggcagaucaccugaggucgggagc

SEQ ID NO: 402577 - RNA, 32 nt, Human
cugaggcaggcagaucaccugauaucaagagu

SEQ ID NO: 402578 - RNA, 22 nt, Human
cugaggcaggcagaucaccugg

SEQ ID NO: 402579 - RNA, 32 nt, Human
cugaggcaggcagaucaccuggggucaggagu

SEQ ID NO: 402580 - RNA, 24 nt, Human
cugaggcaggcagaucacgagguc

SEQ ID NO: 402581 - RNA, 32 nt, Human
cugaggcaggcagaucacgaggucaggaguuc

SEQ ID NO: 402582 - RNA, 26 nt, Human
cugaggcaggcagaucacgugagguc

SEQ ID NO: 402583 - RNA, 32 nt, Human
cugaggcaggcagaucacgugaggucaggagu

SEQ ID NO: 402584 - RNA, 23 nt, Human
cugaggcaggcagaucacuuagg

SEQ ID NO: 402585 - RNA, 32 nt, Human
cugaggcaggcagaucacuugaggucaggagu

SEQ ID NO: 402586 - RNA, 32 nt, Human
cugaggcaggcagaucagcugaggucaggagu

SEQ ID NO: 402587 - RNA, 32 nt, Human
cugaggcaggcagaucaucugaggucaggagu

SEQ ID NO: 402588 - RNA, 32 nt, Human
cugaggcaggcagaucaucugaggucaggcgu

SEQ ID NO: 402589 - RNA, 24 nt, Human
cugaggcaggcagaucaugagguc

SEQ ID NO: 402590 - RNA, 32 nt, Human
cugaggcaggcagaucaugaggucaagagauc

SEQ ID NO: 402591 - RNA, 32 nt, Human
cugaggcaggccaaucaccugaggucgggagu

SEQ ID NO: 402592 - RNA, 21 nt, Human
cugaggcaggccacccagguc

SEQ ID NO: 402593 - RNA, 32 nt, Human
cugaggcaggcggacacuugagcccagggguu

SEQ ID NO: 402594 - RNA, 24 nt, Human
cugaggcaggcggauagcaugagc

SEQ ID NO: 402595 - RNA, 24 nt, Human
cugaggcaggcggaucacaagguc

SEQ ID NO: 402596 - RNA, 24 nt, Human
cugaggcaggcggaucacaggguc

SEQ ID NO: 402597 - RNA, 32 nt, Human
cugaggcaggcggaucaccugaagucagaagu

SEQ ID NO: 402598 - RNA, 32 nt, Human
cugaggcaggcggaucaccugaggucaggagu

SEQ ID NO: 402599 - RNA, 32 nt, Human
cugaggcaggcggaucaccugaggucgggagu

SEQ ID NO: 402600 - RNA, 24 nt, Human
cugaggcaggcggaucacgagguc

SEQ ID NO: 402601 - RNA, 32 nt, Human
cugaggcaggcggaucacuugaggucaggagu

SEQ ID NO: 402602 - RNA, 24 nt, Human
cugaggcaggcggaucaugagguc

SEQ ID NO: 402603 - RNA, 32 nt, Human
cugaggcaggcgggucaccugaggucaggagu

SEQ ID NO: 402604 - RNA, 32 nt, Human
cugaggcaggcugaucacuugaggucaggagu

SEQ ID NO: 402605 - RNA, 23 nt, Human
cugaggcagggaaguccccaggc

SEQ ID NO: 402606 - RNA, 32 nt, Human
cugaggcagggugagggggcaagggacauacc

SEQ ID NO: 402607 - RNA, 32 nt, Human
cugaggcagggugggagccugggcugggcuca

SEQ ID NO: 402608 - RNA, 32 nt, Human
cugaggcaggguggggacacccacgggugagc

SEQ ID NO: 402609 - RNA, 32 nt, Human
cugaggcagguagcucaccugagucaggagcu

SEQ ID NO: 402610 - RNA, 24 nt, Human
cugaggcaggucgaucacgagguc

SEQ ID NO: 402611 - RNA, 18 nt, Human
cugaggcagguggaucac

SEQ ID NO: 402612 - RNA, 24 nt, Human
cugaggcagguggaucacaagguc

SEQ ID NO: 402613 - RNA, 32 nt, Human
cugaggcagguggaucaccugaggucagcagu

SEQ ID NO: 402614 - RNA, 32 nt, Human
cugaggcagguggaucaccugaggucaggaau

SEQ ID NO: 402615 - RNA, 32 nt, Human
cugaggcagguggaucaccugaggucaggagu

SEQ ID NO: 402616 - RNA, 32 nt, Human
cugaggcagguggaucaccugaggucgggagu

SEQ ID NO: 402617 - RNA, 32 nt, Human
cugaggcagguggaucaccugagguuaggagu

SEQ ID NO: 402618 - RNA, 24 nt, Human
cugaggcagguggaucacgagguc

SEQ ID NO: 402619 - RNA, 21 nt, Human
cugaggcagguggaucacugg

SEQ ID NO: 402620 - RNA, 32 nt, Human
cugaggcagguggaucacuugaggucaggagc

SEQ ID NO: 402621 - RNA, 32 nt, Human
cugaggcagguggaucacuugaggucaggagu

SEQ ID NO: 402622 - RNA, 32 nt, Human
cugaggcagguggaucauuugaggucaggagu

SEQ ID NO: 402623 - RNA, 18 nt, Human
cugaggcagguggaucgc

SEQ ID NO: 402624 - RNA, 32 nt, Human
cugaggcagguggaucgccugaggucaggagu

SEQ ID NO: 402625 - RNA, 32 nt, Human
cugaggcagguggauugccugaggucaguagu

SEQ ID NO: 402626 - RNA, 32 nt, Human
cugaggcagguggcucacuugaggucaggaau

SEQ ID NO: 402627 - RNA, 32 nt, Human
cugaggcaguaagucccuuggcauuacugcuu

SEQ ID NO: 402628 - RNA, 24 nt, Human
cugaggcaguagaauggcaugaac

SEQ ID NO: 402629 - RNA, 32 nt, Human
cugaggcagucuguccuugagacuaacaaagu

SEQ ID NO: 402630 - RNA, 32 nt, Human
cugaggcaguggggaagacagagcagaaugag

SEQ ID NO: 402631 - RNA, 32 nt, Human
cugaggcauagagcagauaagaaaaugaaugu

SEQ ID NO: 402632 - RNA, 23 nt, Human
cugaggcaucggccaguccaggc

SEQ ID NO: 402633 - RNA, 32 nt, Human
cugaggccaagaguucaagaccaacuuggaca

SEQ ID NO: 402634 - RNA, 20 nt, Human
cugaggccaauccaggggga

SEQ ID NO: 402635 - RNA, 32 nt, Human
cugaggccacacagcuuguaaguggccaacca

SEQ ID NO: 402636 - RNA, 32 nt, Human
cugaggccacccagaggcagcagagcauucag

SEQ ID NO: 402637 - RNA, 32 nt, Human
cugaggccaccuggccccaccugcuccucagg

SEQ ID NO: 402638 - RNA, 32 nt, Human
cugaggccacgagcuccuggguagcugugauc

SEQ ID NO: 402639 - RNA, 32 nt, Human
cugaggccacugcacccuuucucggggaagau

SEQ ID NO: 402640 - RNA, 32 nt, Human
cugaggccacugcuauuucccaagagaagagc

SEQ ID NO: 402641 - RNA, 32 nt, Human
cugaggccagaaguucgagaccagccuuggcc

SEQ ID NO: 402642 - RNA, 32 nt, Human
cugaggccagaucauacagggucuccaaugca

SEQ ID NO: 402643 - RNA, 20 nt, Human
cugaggccagccccgagcca

SEQ ID NO: 402644 - RNA, 32 nt, Human
cugaggccagccuccuggaagcugaccuuaaa

SEQ ID NO: 402645 - RNA, 32 nt, Human
cugaggccagcgucacacucccucucugcucu

SEQ ID NO: 402646 - RNA, 21 nt, Human
cugaggccaggaauucaagac

SEQ ID NO: 402647 - RNA, 32 nt, Human
cugaggccaggaauucaagaccaaccuggcca

SEQ ID NO: 402648 - RNA, 21 nt, Human
cugaggccaggaguucaagac

SEQ ID NO: 402649 - RNA, 32 nt, Human
cugaggccaggaguucaagaccagccugacca

SEQ ID NO: 402650 - RNA, 32 nt, Human
cugaggccaggaguucaagaccagccuggcca

SEQ ID NO: 402651 - RNA, 32 nt, Human
cugaggccaggaguucaagaccagccuggcua

SEQ ID NO: 402652 - RNA, 32 nt, Human
cugaggccaggaguucacaaccagccugguca

SEQ ID NO: 402653 - RNA, 32 nt, Human
cugaggccaggaguucgagaccagccugccaa

SEQ ID NO: 402654 - RNA, 32 nt, Human
cugaggccaggaguucgagaccagccuggcca

SEQ ID NO: 402655 - RNA, 32 nt, Human
cugaggccaggaguucgagaccagccuggcua

SEQ ID NO: 402656 - RNA, 32 nt, Human
cugaggccaggaguucgagaccagccuggcug

SEQ ID NO: 402657 - RNA, 32 nt, Human
cugaggccaggaguucgagaccagccugggca

SEQ ID NO: 402658 - RNA, 32 nt, Human
cugaggccaggaguuugacaccagccugggca

SEQ ID NO: 402659 - RNA, 32 nt, Human
cugaggccagggaagguggaggaaggaagcca

SEQ ID NO: 402660 - RNA, 32 nt, Human
cugaggccagggguuugagaccagccugagca

SEQ ID NO: 402661 - RNA, 32 nt, Human
cugaggccauggaugaaggccuacucgggaag

SEQ ID NO: 402662 - RNA, 32 nt, Human
cugaggcccacugucuaccuugccagauccuc

SEQ ID NO: 402663 - RNA, 19 nt, Human
cugaggccccagcuucccu

SEQ ID NO: 402664 - RNA, 32 nt, Human
cugaggccccaggcacacgcuggguccugucc

SEQ ID NO: 402665 - RNA, 32 nt, Human
cugaggccccggcccccgccccugggacgccg

SEQ ID NO: 402666 - RNA, 32 nt, Human
cugaggcccgggcgcuggcugcagcucacguc

SEQ ID NO: 402667 - RNA, 32 nt, Human
cugaggcccggggaguugggggcagccaggau

SEQ ID NO: 402668 - RNA, 32 nt, Human
cugaggcccucaccagaagcucaucagaagca

SEQ ID NO: 402669 - RNA, 32 nt, Human
cugaggcccugauccgggcgggccuucaggau

SEQ ID NO: 402670 - RNA, 32 nt, Human
cugaggcccuggguccuggugcuggaaggcag

SEQ ID NO: 402671 - RNA, 32 nt, Human
cugaggccgaugcuaaggagauagugucucga

SEQ ID NO: 402672 - RNA, 32 nt, Human
cugaggccggcagaucacuugaggucaggagu

SEQ ID NO: 402673 - RNA, 32 nt, Human
cugaggccgggaauuugagaccagcccggaca

SEQ ID NO: 402674 - RNA, 32 nt, Human
cugaggccgguggaucaccugggaucaggagu

SEQ ID NO: 402675 - RNA, 32 nt, Human
cugaggccucgucuccugauaggaccauguau

SEQ ID NO: 402676 - RNA, 18 nt, Human
cugaggccucuggaccca

SEQ ID NO: 402677 - RNA, 32 nt, Human
cugaggccugagugaguguuuggccgaggccu

SEQ ID NO: 402678 - RNA, 32 nt, Human
cugaggccuggacccacccaucuuugucccug

SEQ ID NO: 402679 - RNA, 32 nt, Human
cugaggccuguccccucaguucccaggugcca

SEQ ID NO: 402680 - RNA, 32 nt, Human
cugaggccuguggaggaggugaguguagccag

SEQ ID NO: 402681 - RNA, 32 nt, Human
cugaggccuucucaaacuuuacucuaagucuc

SEQ ID NO: 402682 - RNA, 32 nt, Human
cugaggccuuugcccuugcuuugcgggucagu

SEQ ID NO: 402683 - RNA, 32 nt, Human
cugaggccuuugcugugaacugcaguguuuca

SEQ ID NO: 402684 - RNA, 32 nt, Human
cugaggcgaguggaucaccugaggucaggagu

SEQ ID NO: 402685 - RNA, 32 nt, Human
cugaggcgaguggaucacuugaggucaggagu

SEQ ID NO: 402686 - RNA, 32 nt, Human
cugaggcgcacacccaugcagccccugauguu

SEQ ID NO: 402687 - RNA, 32 nt, Human
cugaggcgccgggaccggcugcagagacaggc

SEQ ID NO: 402688 - RNA, 32 nt, Human
cugaggcgcguggaucaccugaggucagaagu

SEQ ID NO: 402689 - RNA, 32 nt, Human
cugaggcggauggaucaccugaggucaggagu

SEQ ID NO: 402690 - RNA, 32 nt, Human
cugaggcggauggaucacuugaggucagggga

SEQ ID NO: 402691 - RNA, 32 nt, Human
cugaggcggcauggaucucagcgagcuggaga

SEQ ID NO: 402692 - RNA, 22 nt, Human
cugaggcggccggaucacaagg

SEQ ID NO: 402693 - RNA, 32 nt, Human
cugaggcggcgcugugugugugaagcguaccu

SEQ ID NO: 402694 - RNA, 32 nt, Human
cugaggcggcugggccuagggugcagcgggcg

SEQ ID NO: 402695 - RNA, 24 nt, Human
cugaggcgggagaauagcaugaac

SEQ ID NO: 402696 - RNA, 24 nt, Human
cugaggcgggagaauggcgugaac

SEQ ID NO: 402697 - RNA, 24 nt, Human
cugaggcgggaggaucacaagguc

SEQ ID NO: 402698 - RNA, 22 nt, Human
cugaggcgggaggaucacuuga

SEQ ID NO: 402699 - RNA, 32 nt, Human
cugaggcgggaugaucaccugaggucaggagu

SEQ ID NO: 402700 - RNA, 32 nt, Human
cugaggcgggcaaaacacuugaggucagacgu

SEQ ID NO: 402701 - RNA, 21 nt, Human
cugaggcgggcagaucacaag

SEQ ID NO: 402702 - RNA, 24 nt, Human
cugaggcgggcagaucacaagguc

SEQ ID NO: 402703 - RNA, 32 nt, Human
cugaggcgggcagaucaccugagaucgggagu

SEQ ID NO: 402704 - RNA, 32 nt, Human
cugaggcgggcagaucaccugaggccaggagu

SEQ ID NO: 402705 - RNA, 32 nt, Human
cugaggcgggcagaucaccugaggucaagagu

SEQ ID NO: 402706 - RNA, 32 nt, Human
cugaggcgggcagaucaccugaggucaggagu

SEQ ID NO: 402707 - RNA, 24 nt, Human
cugaggcgggcagaucacgagguc

SEQ ID NO: 402708 - RNA, 24 nt, Human
cugaggcgggcagaucacuugaga

SEQ ID NO: 402709 - RNA, 32 nt, Human
cugaggcgggcagaucaucugaggucaggagu

SEQ ID NO: 402710 - RNA, 32 nt, Human
cugaggcgggcagauugcuugaggucaggagu

SEQ ID NO: 402711 - RNA, 32 nt, Human
cugaggcgggcccugugcugggggugguagaa

SEQ ID NO: 402712 - RNA, 32 nt, Human
cugaggcgggcggaacaccugaggucaggugu

SEQ ID NO: 402713 - RNA, 32 nt, Human
cugaggcgggcggauagcuugaggucaggagu

SEQ ID NO: 402714 - RNA, 24 nt, Human
cugaggcgggcggaucacaagguc

SEQ ID NO: 402715 - RNA, 24 nt, Human
cugaggcgggcggaucaccagguc

SEQ ID NO: 402716 - RNA, 32 nt, Human
cugaggcgggcggaucaccugaggucaagagu

SEQ ID NO: 402717 - RNA, 32 nt, Human
cugaggcgggcggaucaccugaggucaggagu

SEQ ID NO: 402718 - RNA, 32 nt, Human
cugaggcgggcggaucaccugaggucgggagu

SEQ ID NO: 402719 - RNA, 32 nt, Human
cugaggcgggcggaucaccugagguugggagu

SEQ ID NO: 402720 - RNA, 32 nt, Human
cugaggcgggcggaucaccugagucaggaguu

SEQ ID NO: 402721 - RNA, 24 nt, Human
cugaggcgggcggaucacgagguc

SEQ ID NO: 402722 - RNA, 24 nt, Human
cugaggcgggcggaucacuagguc

SEQ ID NO: 402723 - RNA, 24 nt, Human
cugaggcggggagaucacaagguc

SEQ ID NO: 402724 - RNA, 24 nt, Human
cugaggcggguagaucacaagguc

SEQ ID NO: 402725 - RNA, 24 nt, Human
cugaggcgggugaaucacgagguc

SEQ ID NO: 402726 - RNA, 24 nt, Human
cugaggcggguggaucacaagcuc

SEQ ID NO: 402727 - RNA, 24 nt, Human
cugaggcggguggaucacaagguc

SEQ ID NO: 402728 - RNA, 32 nt, Human
cugaggcggguggaucaccugaggccaggugu

SEQ ID NO: 402729 - RNA, 32 nt, Human
cugaggcggguggaucaccugaggucaggagc

SEQ ID NO: 402730 - RNA, 32 nt, Human
cugaggcggguggaucaccugaggucaggagu

SEQ ID NO: 402731 - RNA, 32 nt, Human
cugaggcggguggaucaccugaggucaggauu

SEQ ID NO: 402732 - RNA, 32 nt, Human
cugaggcggguggaucaccugaggucgggagu

SEQ ID NO: 402733 - RNA, 32 nt, Human
cugaggcggguggaucaccugagguuaggagu

SEQ ID NO: 402734 - RNA, 24 nt, Human
cugaggcggguggaucacgagguc

SEQ ID NO: 402735 - RNA, 24 nt, Human
cugaggcggguggaucacuagguc

SEQ ID NO: 402736 - RNA, 32 nt, Human
cugaggcggguggaucacuugaggucagaagu

SEQ ID NO: 402737 - RNA, 32 nt, Human
cugaggcggguggaucacuugaggucaggagu

SEQ ID NO: 402738 - RNA, 32 nt, Human
cugaggcgggugggucaccugagguugggagu

SEQ ID NO: 402739 - RNA, 32 nt, Human
cugaggcggguugaucaccugaggucaggagu

SEQ ID NO: 402740 - RNA, 32 nt, Human
cugaggcuacagcugcuaucacaugccgaacu

SEQ ID NO: 402741 - RNA, 32 nt, Human
cugaggcuaggaguucgagaccagcuugggca

SEQ ID NO: 402742 - RNA, 32 nt, Human
cugaggcuaggaguugcagaccagccuggcca

SEQ ID NO: 402743 - RNA, 32 nt, Human
cugaggcucaaggaauuucgagguagaacaau

SEQ ID NO: 402744 - RNA, 20 nt, Human
cugaggcucagcccugagcu

SEQ ID NO: 402745 - RNA, 32 nt, Human
cugaggcucagguugucauuugcucaaaucac

SEQ ID NO: 402746 - RNA, 32 nt, Human
cugaggcucaucugccuucuccuggucacccu

SEQ ID NO: 402747 - RNA, 32 nt, Human
cugaggcuccacugaagcuauggcauaauuug

SEQ ID NO: 402748 - RNA, 32 nt, Human
cugaggcugauggagcugccuccagggcuagg

SEQ ID NO: 402749 - RNA, 32 nt, Human
cugaggcugcacaggccagggcucgggcaugu

SEQ ID NO: 402750 - RNA, 17 nt, Human
cugaggcugccccggcc

SEQ ID NO: 402751 - RNA, 32 nt, Human
cugaggcugcgaggugggaccugcugcugugc

SEQ ID NO: 402752 - RNA, 32 nt, Human
cugaggcuggacaauggugugaacccaggagg

SEQ ID NO: 402753 - RNA, 20 nt, Human
cugaggcuggagugcaguga

SEQ ID NO: 402754 - RNA, 20 nt, Human
cugaggcuggagugcagugg

SEQ ID NO: 402755 - RNA, 32 nt, Human
cugaggcuggcagaucacuugaggucaggagu

SEQ ID NO: 402756 - RNA, 32 nt, Human
cugaggcuggcguaucaccugagguugggagu

SEQ ID NO: 402757 - RNA, 32 nt, Human
cugaggcugggcagaggugggugagaagaggg

SEQ ID NO: 402758 - RNA, 32 nt, Human
cugaggcugggccugacccugcuccuuacccc

SEQ ID NO: 402759 - RNA, 32 nt, Human
cugaggcugggggaucaccugaggucaggagu

SEQ ID NO: 402760 - RNA, 32 nt, Human
cugaggcuggguuuggugcauguggguugagg

SEQ ID NO: 402761 - RNA, 32 nt, Human
cugaggcugucucagaugaaugcaguugagag

SEQ ID NO: 402762 - RNA, 32 nt, Human
cugaggcuguggucacagcggagguguggagc

SEQ ID NO: 402763 - RNA, 32 nt, Human
cugaggcugugucacuggcauguccuuaaccu

SEQ ID NO: 402764 - RNA, 32 nt, Human
cugaggcuguuuuuggcuguuuucccucugcu

SEQ ID NO: 402765 - RNA, 32 nt, Human
cugaggcuucacugcagcggccuccacccacc

SEQ ID NO: 402766 - RNA, 32 nt, Human
cugaggcuucuccccucucaacuugcuguuga

SEQ ID NO: 402767 - RNA, 32 nt, Human
cugaggcuugcuuggcuuguguccaugcuuaa

SEQ ID NO: 402768 - RNA, 32 nt, Human
cugaggcuugugccacugggccuuucugauuu

SEQ ID NO: 402769 - RNA, 32 nt, Human
cugaggcuuuucucccccucuuaaugccuuug

SEQ ID NO: 402770 - RNA, 32 nt, Human
cugagggaaacagcuggcaaugugacaaaagu

SEQ ID NO: 402771 - RNA, 32 nt, Human
cugagggaaaggcucguagcugguggguuccg

SEQ ID NO: 402772 - RNA, 32 nt, Human
cugagggaacaucaguggcccuccagucaggu

SEQ ID NO: 402773 - RNA, 32 nt, Human
cugagggaaccaggauuccucccuccuaccag

SEQ ID NO: 402774 - RNA, 22 nt, Human
cugagggaagaugccuaguaga

SEQ ID NO: 402775 - RNA, 22 nt, Human
cugagggaagggacgcaggguc

SEQ ID NO: 402776 - RNA, 32 nt, Human
cugagggaagggaggaaggggcggggagagcg

SEQ ID NO: 402777 - RNA, 32 nt, Human
cugagggaaggugagggagugggaagggggau

SEQ ID NO: 402778 - RNA, 32 nt, Human
cugagggaagucugccuggugaggcuggcagg

SEQ ID NO: 402779 - RNA, 20 nt, Human
cugagggaccaacugggccc

SEQ ID NO: 402780 - RNA, 32 nt, Human
cugagggaccugacuuccccugcuccaggccu

SEQ ID NO: 402781 - RNA, 32 nt, Human
cugagggacuccuguguacuucacaucacuga

SEQ ID NO: 402782 - RNA, 32 nt, Human
cugagggacugugccugcugugcacucacagc

SEQ ID NO: 402783 - RNA, 32 nt, Human
cugagggagagggagaggggacccgaggcuga

SEQ ID NO: 402784 - RNA, 32 nt, Human
cugagggagauggugacaaguucaaggccugc

SEQ ID NO: 402785 - RNA, 32 nt, Human
cugagggagaugguggcagggccauucuuugu

SEQ ID NO: 402786 - RNA, 32 nt, Human
cugagggagccagaccucuggcccagaaagcc

SEQ ID NO: 402787 - RNA, 24 nt, Human
cugagggaggagaauggcgugaac

SEQ ID NO: 402788 - RNA, 32 nt, Human
cugagggaggcagaagaaagaaauccaagccu

SEQ ID NO: 402789 - RNA, 32 nt, Human
cugagggaggcggaucacuugaggucaggagu

SEQ ID NO: 402790 - RNA, 32 nt, Human
cugagggagggagaggaggggagccaagacac

SEQ ID NO: 402791 - RNA, 32 nt, Human
cugagggaggggagugggagucucagcaaucu

SEQ ID NO: 402792 - RNA, 32 nt, Human
cugagggaggggcaggagagcagugaggagcu

SEQ ID NO: 402793 - RNA, 32 nt, Human
cugagggaggggcgcuggccacaugucacuga

SEQ ID NO: 402794 - RNA, 32 nt, Human
cugagggagugaggugccaugacagcagccac

SEQ ID NO: 402795 - RNA, 32 nt, Human
cugagggagugggcacgugagcacauaauggc

SEQ ID NO: 402796 - RNA, 32 nt, Human
cugagggagugggcaugugagcacauaauggc

SEQ ID NO: 402797 - RNA, 19 nt, Human
cugagggauagagccugag

SEQ ID NO: 402798 - RNA, 32 nt, Human
cugagggauggaaaguucuuccugcuaugaau

SEQ ID NO: 402799 - RNA, 22 nt, Human
cugagggcacacaagggccaga

SEQ ID NO: 402800 - RNA, 32 nt, Human
cugagggcacacacaguggagagagcacagga

SEQ ID NO: 402801 - RNA, 30 nt, Human
cugagggcacucgcuuugcuccugucagua

SEQ ID NO: 402802 - RNA, 32 nt, Human
cugagggcagaagaaauugcuagaagucagaa

SEQ ID NO: 402803 - RNA, 32 nt, Human
cugagggcagccauguucuguaccaaaaacag

SEQ ID NO: 402804 - RNA, 32 nt, Human
cugagggcaggagucugagaccagccuggcca

SEQ ID NO: 402805 - RNA, 32 nt, Human
cugagggcaggcagaggguagacacacagcca

SEQ ID NO: 402806 - RNA, 32 nt, Human
cugagggcaggcgggcagcugcagggaggaga

SEQ ID NO: 402807 - RNA, 32 nt, Human
cugagggcaucaucuuccucaucugggaggcc

SEQ ID NO: 402808 - RNA, 20 nt, Human
cugagggccaggagcagcag

SEQ ID NO: 402809 - RNA, 32 nt, Human
cugagggcccuauaggcccaccuugcuggaaa

SEQ ID NO: 402810 - RNA, 32 nt, Human
cugagggcgggaaaggguggucacugggucag

SEQ ID NO: 402811 - RNA, 32 nt, Human
cugagggcuaaauugggaucucagccugcccu

SEQ ID NO: 402812 - RNA, 32 nt, Human
cugagggcuagaggacagagaaagagaauaga

SEQ ID NO: 402813 - RNA, 21 nt, Human
cugagggcucauccugggcca

SEQ ID NO: 402814 - RNA, 32 nt, Human
cugagggcuccucgggaauggaaagggcuucu

SEQ ID NO: 402815 - RNA, 32 nt, Human
cugagggcuccugggaggccugugggagccuc

SEQ ID NO: 402816 - RNA, 20 nt, Human
cugagggcuggaggagggca

SEQ ID NO: 402817 - RNA, 30 nt, Human
cugagggcuggcagaugugagggcaggaca

SEQ ID NO: 402818 - RNA, 32 nt, Human
cugagggcuggcagaugugagggcaggacacc

SEQ ID NO: 402819 - RNA, 32 nt, Human
cugagggcugugccaggaugacugucucaugc

SEQ ID NO: 402820 - RNA, 32 nt, Human
cugagggcugugucacaggccauguucacuua

SEQ ID NO: 402821 - RNA, 32 nt, Human
cugaggggaagagaggaaggaggggcgggcuc

SEQ ID NO: 402822 - RNA, 32 nt, Human
cugaggggaaggcauugcucuaccucucccug

SEQ ID NO: 402823 - RNA, 32 nt, Human
cugaggggaccaggaugggagaaugaggagua

SEQ ID NO: 402824 - RNA, 32 nt, Human
cugaggggagcucagaucagaucuaucaucac

SEQ ID NO: 402825 - RNA, 32 nt, Human
cugaggggaggcaccuccaggcaggccaggcu

SEQ ID NO: 402826 - RNA, 32 nt, Human
cugaggggcaccugggcuaggggcuugggacu

SEQ ID NO: 402827 - RNA, 32 nt, Human
cugaggggccaaggucaagaccaaccuccauc

SEQ ID NO: 402828 - RNA, 32 nt, Human
cugaggggcccaggagcaccucauguuuucug

SEQ ID NO: 402829 - RNA, 32 nt, Human
cugaggggcggggcguguagccagccaggugc

SEQ ID NO: 402830 - RNA, 32 nt, Human
cugaggggcugcagcuggggauagggggccca

SEQ ID NO: 402831 - RNA, 32 nt, Human
cugagggggaggcgcagggucaggaggggagg

SEQ ID NO: 402832 - RNA, 22 nt, Human
cugagggguagaaggggccaga

SEQ ID NO: 402833 - RNA, 32 nt, Human
cugaggggucuugggggcucuaggccggccac

SEQ ID NO: 402834 - RNA, 32 nt, Human
cugaggggugcauuaaggaaacuaaaagcacc

SEQ ID NO: 402835 - RNA, 32 nt, Human
cugaggguacgugccaucaucucuccagccca

SEQ ID NO: 402836 - RNA, 32 nt, Human
cugaggguagcugcuuugcugaagaccucaca

SEQ ID NO: 402837 - RNA, 17 nt, Human
cugagggucacuccaag

SEQ ID NO: 402838 - RNA, 31 nt, Human
cugagggucauucaucccaugcccaguuccc

SEQ ID NO: 402839 - RNA, 32 nt, Human
cugaggguccucaggguggaggacagguuugg

SEQ ID NO: 402840 - RNA, 32 nt, Human
cugaggguccugcugcuggccccaccaaauac

SEQ ID NO: 402841 - RNA, 19 nt, Human
cugagggucucuggccccg

SEQ ID NO: 402842 - RNA, 32 nt, Human
cugagggucugucucauccugcagcuggacag

SEQ ID NO: 402843 - RNA, 32 nt, Human
cugagggugaagauggaugacagaugcuaccc

SEQ ID NO: 402844 - RNA, 32 nt, Human
cugagggugagguguggaagggacagggggag

SEQ ID NO: 402845 - RNA, 32 nt, Human
cugagggugcagccagggcacagcagcggcgg

SEQ ID NO: 402846 - RNA, 32 nt, Human
cugagggugcuguccccaccucugguggaaag

SEQ ID NO: 402847 - RNA, 32 nt, Human
cugagggugggauggagaagagggcacugcug

SEQ ID NO: 402848 - RNA, 32 nt, Human
cugaggguggggaagcgcagggccaagcgcgc

SEQ ID NO: 402849 - RNA, 32 nt, Human
cugaggguggggagggagagagagggagggag

SEQ ID NO: 402850 - RNA, 32 nt, Human
cugagggugggggagagagaggcguggucccc

SEQ ID NO: 402851 - RNA, 32 nt, Human
cugaggguuaagaccuuagaacugggucuagc

SEQ ID NO: 402852 - RNA, 32 nt, Human
cugaggguuaggcuggagugacaguuuccgcc

SEQ ID NO: 402853 - RNA, 32 nt, Human
cugaggguucugccuagagagcucccacagaa

SEQ ID NO: 402854 - RNA, 32 nt, Human
cugaggguugacugacuggagagcucaagugc

SEQ ID NO: 402855 - RNA, 32 nt, Human
cugaggguuuugcuuuggauuuuucauaccua

SEQ ID NO: 402856 - RNA, 32 nt, Human
cugagguaacugucauuagaaaagguuucuua

SEQ ID NO: 402857 - RNA, 32 nt, Human
cugagguaaggaguuugagaccagccuggcca

SEQ ID NO: 402858 - RNA, 32 nt, Human
cugagguacagaggaagugauguccuugacaa

SEQ ID NO: 402859 - RNA, 32 nt, Human
cugagguagcuugaccugcuuucaccuggaau

SEQ ID NO: 402860 - RNA, 24 nt, Human
cugagguaggagaauggcgugaac

SEQ ID NO: 402861 - RNA, 32 nt, Human
cugagguaggcagaucacuugaggucaggagu

SEQ ID NO: 402862 - RNA, 32 nt, Human
cugagguagggaguucgagaccagccugacca

SEQ ID NO: 402863 - RNA, 32 nt, Human
cugagguagguggaaaaccugaggucaggagu

SEQ ID NO: 402864 - RNA, 32 nt, Human
cugagguagguggaucaccugaggucaggagu

SEQ ID NO: 402865 - RNA, 31 nt, Human
cugagguaguuucaguccaucacaguucauc

SEQ ID NO: 402866 - RNA, 32 nt, Human
cugagguauaucugcugccuuagaagacacaa

SEQ ID NO: 402867 - RNA, 32 nt, Human
cugaggucaagaaaugagauagugggagcaaa

SEQ ID NO: 402868 - RNA, 21 nt, Human
cugaggucaagaguucaagac

SEQ ID NO: 402869 - RNA, 32 nt, Human
cugaggucaagaguucaagaccagccugacca

SEQ ID NO: 402870 - RNA, 32 nt, Human
cugaggucaagaguucaagaccagccugacga

SEQ ID NO: 402871 - RNA, 32 nt, Human
cugaggucaagaguucaagaccagccuggcca

SEQ ID NO: 402872 - RNA, 32 nt, Human
cugaggucaagaguucaagaccggccuggcca

SEQ ID NO: 402873 - RNA, 32 nt, Human
cugaggucaagaguucgagaccagccuagcua

SEQ ID NO: 402874 - RNA, 32 nt, Human
cugaggucaagaguucgagaccagccugacca

SEQ ID NO: 402875 - RNA, 32 nt, Human
cugaggucaagaguuugagaccagccuggcca

SEQ ID NO: 402876 - RNA, 32 nt, Human
cugaggucaauaguucgagaccagccuggcca

SEQ ID NO: 402877 - RNA, 32 nt, Human
cugaggucacaaguucaagaccagccuggcaa

SEQ ID NO: 402878 - RNA, 32 nt, Human
cugaggucacccuggagguagcagguaagagc

SEQ ID NO: 402879 - RNA, 21 nt, Human
cugaggucacgaguucaagac

SEQ ID NO: 402880 - RNA, 32 nt, Human
cugaggucacgaguucaagaccagccuggcca

SEQ ID NO: 402881 - RNA, 32 nt, Human
cugaggucacgaguucgagaccagccugacca

SEQ ID NO: 402882 - RNA, 32 nt, Human
cugaggucacugcaaccuccaccucccggguu

SEQ ID NO: 402883 - RNA, 21 nt, Human
cugaggucagaaguucaagac

SEQ ID NO: 402884 - RNA, 32 nt, Human
cugaggucagaaguucaagaccagccuggcca

SEQ ID NO: 402885 - RNA, 32 nt, Human
cugaggucagaaguucaagaccagccuggcuc

SEQ ID NO: 402886 - RNA, 32 nt, Human
cugaggucagaaguucaagaccauccuggcua

SEQ ID NO: 402887 - RNA, 32 nt, Human
cugaggucagaaguuugagaccagccugacca

SEQ ID NO: 402888 - RNA, 32 nt, Human
cugaggucagaaguuugagaccagccuggcca

SEQ ID NO: 402889 - RNA, 32 nt, Human
cugaggucagaauuucgagaccagccuggcca

SEQ ID NO: 402890 - RNA, 32 nt, Human
cugaggucagcagcucccagacuccuuugccc

SEQ ID NO: 402891 - RNA, 32 nt, Human
cugaggucagcaguccaagaccacccuggcca

SEQ ID NO: 402892 - RNA, 32 nt, Human
cugaggucagcaguuaaagaccagccugacca

SEQ ID NO: 402893 - RNA, 32 nt, Human
cugaggucagcaguucaaaaucagccuggcca

SEQ ID NO: 402894 - RNA, 21 nt, Human
cugaggucagcaguucaagac

SEQ ID NO: 402895 - RNA, 32 nt, Human
cugaggucagcaguucaagaccagccugacca

SEQ ID NO: 402896 - RNA, 32 nt, Human
cugaggucagcaguucgagaccagccuggcca

SEQ ID NO: 402897 - RNA, 32 nt, Human
cugaggucagcaguucgagaccagccugguca

SEQ ID NO: 402898 - RNA, 32 nt, Human
cugaggucagcaguuugagaccagccuggcca

SEQ ID NO: 402899 - RNA, 32 nt, Human
cugaggucaggaaucgaaaaccagccugacca

SEQ ID NO: 402900 - RNA, 21 nt, Human
cugaggucaggaauucaagac

SEQ ID NO: 402901 - RNA, 32 nt, Human
cugaggucaggaauucaagaccacccuggcca

SEQ ID NO: 402902 - RNA, 32 nt, Human
cugaggucaggaauucaagaccagccuggcca

SEQ ID NO: 402903 - RNA, 21 nt, Human
cugaggucaggaauuugagac

SEQ ID NO: 402904 - RNA, 32 nt, Human
cugaggucaggaauuugagaccagccuggcca

SEQ ID NO: 402905 - RNA, 21 nt, Human
cugaggucaggacuucaagac

SEQ ID NO: 402906 - RNA, 32 nt, Human
cugaggucaggacuucaagaccagccuggcca

SEQ ID NO: 402907 - RNA, 32 nt, Human
cugaggucaggagaucaagaccagccuggcca

SEQ ID NO: 402908 - RNA, 32 nt, Human
cugaggucaggagaucgagaccagccuggcca

SEQ ID NO: 402909 - RNA, 21 nt, Human
cugaggucaggagcucaagac

SEQ ID NO: 402910 - RNA, 32 nt, Human
cugaggucaggagcucaagaccagccugacca

SEQ ID NO: 402911 - RNA, 32 nt, Human
cugaggucaggagcucaagaccagccuggcua

SEQ ID NO: 402912 - RNA, 32 nt, Human
cugaggucaggagcuccagaccagccuggcca

SEQ ID NO: 402913 - RNA, 32 nt, Human
cugaggucaggagcucgagaccagccuggcca

SEQ ID NO: 402914 - RNA, 32 nt, Human
cugaggucaggagcucgagaccagccuggccg

SEQ ID NO: 402915 - RNA, 21 nt, Human
cugaggucaggaguccaagac

SEQ ID NO: 402916 - RNA, 32 nt, Human
cugaggucaggaguccaagaccagccuggcca

SEQ ID NO: 402917 - RNA, 32 nt, Human
cugaggucaggaguuaaacaccagccugacaa

SEQ ID NO: 402918 - RNA, 32 nt, Human
cugaggucaggaguuaaagaccagccuggcca

SEQ ID NO: 402919 - RNA, 32 nt, Human
cugaggucaggaguuagagaccagccugggcc

SEQ ID NO: 402920 - RNA, 32 nt, Human
cugaggucaggaguucaaaaccagccuggcca

SEQ ID NO: 402921 - RNA, 20 nt, Human
cugaggucaggaguucaaga

SEQ ID NO: 402922 - RNA, 21 nt, Human
cugaggucaggaguucaagac

SEQ ID NO: 402923 - RNA, 32 nt, Human
cugaggucaggaguucaagaccaaccugacua

SEQ ID NO: 402924 - RNA, 32 nt, Human
cugaggucaggaguucaagaccaaucugacua

SEQ ID NO: 402925 - RNA, 32 nt, Human
cugaggucaggaguucaagaccagccuagcca

SEQ ID NO: 402926 - RNA, 32 nt, Human
cugaggucaggaguucaagaccagccucaaca

SEQ ID NO: 402927 - RNA, 32 nt, Human
cugaggucaggaguucaagaccagccugacca

SEQ ID NO: 402928 - RNA, 32 nt, Human
cugaggucaggaguucaagaccagccugaccc

SEQ ID NO: 402929 - RNA, 32 nt, Human
cugaggucaggaguucaagaccagccugccca

SEQ ID NO: 402930 - RNA, 32 nt, Human
cugaggucaggaguucaagaccagccuggcca

SEQ ID NO: 402931 - RNA, 32 nt, Human
cugaggucaggaguucaagaccagccuggccg

SEQ ID NO: 402932 - RNA, 32 nt, Human
cugaggucaggaguucaagaccagccuggcua

SEQ ID NO: 402933 - RNA, 32 nt, Human
cugaggucaggaguucaagaccagccugguca

SEQ ID NO: 402934 - RNA, 32 nt, Human
cugaggucaggaguucaagaccagccugucca

SEQ ID NO: 402935 - RNA, 32 nt, Human
cugaggucaggaguucaagaccagccuugcca

SEQ ID NO: 402936 - RNA, 32 nt, Human
cugaggucaggaguucaagaccagcuuggcca

SEQ ID NO: 402937 - RNA, 32 nt, Human
cugaggucaggaguucaagaccagucuggcca

SEQ ID NO: 402938 - RNA, 32 nt, Human
cugaggucaggaguucaagaccauccuggcca

SEQ ID NO: 402939 - RNA, 32 nt, Human
cugaggucaggaguucaauaccagccuggcca

SEQ ID NO: 402940 - RNA, 32 nt, Human
cugaggucaggaguucacgaccagccuggcca

SEQ ID NO: 402941 - RNA, 32 nt, Human
cugaggucaggaguucaggaccagccugacca

SEQ ID NO: 402942 - RNA, 32 nt, Human
cugaggucaggaguuccagaccagccuggcca

SEQ ID NO: 402943 - RNA, 32 nt, Human
cugaggucaggaguucgaaaccagccugacca

SEQ ID NO: 402944 - RNA, 32 nt, Human
cugaggucaggaguucgaaaccagccuggcca

SEQ ID NO: 402945 - RNA, 32 nt, Human
cugaggucaggaguucgaaaccagccuuccca

SEQ ID NO: 402946 - RNA, 20 nt, Human
cugaggucaggaguucgaga

SEQ ID NO: 402947 - RNA, 21 nt, Human
cugaggucaggaguucgagac

SEQ ID NO: 402948 - RNA, 32 nt, Human
cugaggucaggaguucgagaccagccucaaca

SEQ ID NO: 402949 - RNA, 32 nt, Human
cugaggucaggaguucgagaccagccucgcca

SEQ ID NO: 402950 - RNA, 32 nt, Human
cugaggucaggaguucgagaccagccugacca

SEQ ID NO: 402951 - RNA, 32 nt, Human
cugaggucaggaguucgagaccagccugaucg

SEQ ID NO: 402952 - RNA, 32 nt, Human
cugaggucaggaguucgagaccagccugccua

SEQ ID NO: 402953 - RNA, 32 nt, Human
cugaggucaggaguucgagaccagccuggcca

SEQ ID NO: 402954 - RNA, 32 nt, Human
cugaggucaggaguucgagaccagccuggcua

SEQ ID NO: 402955 - RNA, 32 nt, Human
cugaggucaggaguucgagaccagccugggag

SEQ ID NO: 402956 - RNA, 32 nt, Human
cugaggucaggaguucgagaccagccugguca

SEQ ID NO: 402957 - RNA, 32 nt, Human
cugaggucaggaguucgagaccagcuuagcca

SEQ ID NO: 402958 - RNA, 32 nt, Human
cugaggucaggaguucgcaaccagccuggcca

SEQ ID NO: 402959 - RNA, 32 nt, Human
cugaggucaggaguucuagaccagccugacca

SEQ ID NO: 402960 - RNA, 32 nt, Human
cugaggucaggaguucuagaccagccugaccg

SEQ ID NO: 402961 - RNA, 32 nt, Human
cugaggucaggaguucuagaccagccuggcca

SEQ ID NO: 402962 - RNA, 32 nt, Human
cugaggucaggaguucuagaccagccugggca

SEQ ID NO: 402963 - RNA, 32 nt, Human
cugaggucaggaguuggagaccagccugacca

SEQ ID NO: 402964 - RNA, 32 nt, Human
cugaggucaggaguuggagaccagccuggcca

SEQ ID NO: 402965 - RNA, 21 nt, Human
cugaggucaggaguuuaagac

SEQ ID NO: 402966 - RNA, 32 nt, Human
cugaggucaggaguuuaagaccagccugacca

SEQ ID NO: 402967 - RNA, 32 nt, Human
cugaggucaggaguuuaagaccagccuggcca

SEQ ID NO: 402968 - RNA, 32 nt, Human
cugaggucaggaguuugaaaccagccuggcca

SEQ ID NO: 402969 - RNA, 32 nt, Human
cugaggucaggaguuugagaccagccuagaca

SEQ ID NO: 402970 - RNA, 32 nt, Human
cugaggucaggaguuugagaccagccuaguca

SEQ ID NO: 402971 - RNA, 32 nt, Human
cugaggucaggaguuugagaccagccucacca

SEQ ID NO: 402972 - RNA, 32 nt, Human
cugaggucaggaguuugagaccagccuccugg

SEQ ID NO: 402973 - RNA, 32 nt, Human
cugaggucaggaguuugagaccagccucgcca

SEQ ID NO: 402974 - RNA, 32 nt, Human
cugaggucaggaguuugagaccagccugacau

SEQ ID NO: 402975 - RNA, 32 nt, Human
cugaggucaggaguuugagaccagccugacca

SEQ ID NO: 402976 - RNA, 32 nt, Human
cugaggucaggaguuugagaccagccugccca

SEQ ID NO: 402977 - RNA, 32 nt, Human
cugaggucaggaguuugagaccagccuggaca

SEQ ID NO: 402978 - RNA, 32 nt, Human
cugaggucaggaguuugagaccagccuggcca

SEQ ID NO: 402979 - RNA, 32 nt, Human
cugaggucaggaguuugagaccagccuggcua

SEQ ID NO: 402980 - RNA, 32 nt, Human
cugaggucaggaguuugagaccagccugggca

SEQ ID NO: 402981 - RNA, 32 nt, Human
cugaggucaggaguuugagaccagccugguca

SEQ ID NO: 402982 - RNA, 32 nt, Human
cugaggucaggaguuugagaccagccuugaca

SEQ ID NO: 402983 - RNA, 32 nt, Human
cugaggucaggaguuugagaccagcuuggcca

SEQ ID NO: 402984 - RNA, 32 nt, Human
cugaggucaggaguuugauaccagccugacca

SEQ ID NO: 402985 - RNA, 32 nt, Human
cugaggucaggaguuugauaccagccuggcca

SEQ ID NO: 402986 - RNA, 32 nt, Human
cugaggucaggaguuugugaccagccugacca

SEQ ID NO: 402987 - RNA, 32 nt, Human
cugaggucaggaguuugugaccagccuggcca

SEQ ID NO: 402988 - RNA, 32 nt, Human
cugaggucaggaguuuuagaccagccuggcca

SEQ ID NO: 402989 - RNA, 32 nt, Human
cugaggucaggauuuugagaccagccugacca

SEQ ID NO: 402990 - RNA, 32 nt, Human
cugaggucaggcaaucugcccaccucagccuc

SEQ ID NO: 402991 - RNA, 21 nt, Human
cugaggucaggcguucaagac

SEQ ID NO: 402992 - RNA, 32 nt, Human
cugaggucaggcguucaagaccagccuggcca

SEQ ID NO: 402993 - RNA, 32 nt, Human
cugaggucaggcguucaauaccagccuggcca

SEQ ID NO: 402994 - RNA, 32 nt, Human
cugaggucaggcguuugagaccagccuggcca

SEQ ID NO: 402995 - RNA, 32 nt, Human
cugaggucaggggcucaagaccagccuggcca

SEQ ID NO: 402996 - RNA, 21 nt, Human
cugaggucagggguucaagac

SEQ ID NO: 402997 - RNA, 32 nt, Human
cugaggucagggguucaagaccagccuggcca

SEQ ID NO: 402998 - RNA, 32 nt, Human
cugaggucagggguuccagaccagccuggcca

SEQ ID NO: 402999 - RNA, 32 nt, Human
cugaggucagggguucgacaccagccuggcca

SEQ ID NO: 403000 - RNA, 32 nt, Human
cugaggucagggguucgagaccagccuggcca

SEQ ID NO: 403001 - RNA, 32 nt, Human
cugaggucaguaguucaagaccacccuggcca

SEQ ID NO: 403002 - RNA, 32 nt, Human
cugaggucaugaguucgagaccagccuggcca

SEQ ID NO: 403003 - RNA, 32 nt, Human
cugagguccagccaccaccaggcugagcagug

SEQ ID NO: 403004 - RNA, 32 nt, Human
cugaggucccugcaagugcacagggaggagag

SEQ ID NO: 403005 - RNA, 32 nt, Human
cugagguccggaguucgagaccagccuggcca

SEQ ID NO: 403006 - RNA, 32 nt, Human
cugagguccugggaaggacaugaauuuugggg

SEQ ID NO: 403007 - RNA, 32 nt, Human
cugaggucgaaaguuugagaccagccuggccc

SEQ ID NO: 403008 - RNA, 32 nt, Human
cugaggucggaaguucgagaccagccugacca

SEQ ID NO: 403009 - RNA, 32 nt, Human
cugaggucggcggacugccugaggucaggaau

SEQ ID NO: 403010 - RNA, 24 nt, Human
cugaggucggcggaucacaggguc

SEQ ID NO: 403011 - RNA, 32 nt, Human
cugaggucgggaauucgagaccagccugacca

SEQ ID NO: 403012 - RNA, 32 nt, Human
cugaggucgggagcgcgagaccagccugacca

SEQ ID NO: 403013 - RNA, 32 nt, Human
cugaggucgggagcucgagaccagccugacca

SEQ ID NO: 403014 - RNA, 21 nt, Human
cugaggucgggaguucaagac

SEQ ID NO: 403015 - RNA, 32 nt, Human
cugaggucgggaguucaagaccagccugacca

SEQ ID NO: 403016 - RNA, 32 nt, Human
cugaggucgggaguucaagaccagccugauga

SEQ ID NO: 403017 - RNA, 32 nt, Human
cugaggucgggaguucaagaccagccuggcca

SEQ ID NO: 403018 - RNA, 32 nt, Human
cugaggucgggaguucacaaccagccugacca

SEQ ID NO: 403019 - RNA, 32 nt, Human
cugaggucgggaguuccagaccagccuggcca

SEQ ID NO: 403020 - RNA, 32 nt, Human
cugaggucgggaguucgaaaccagccugacca

SEQ ID NO: 403021 - RNA, 32 nt, Human
cugaggucgggaguucgagaccagccugacca

SEQ ID NO: 403022 - RNA, 32 nt, Human
cugaggucgggaguucgagaccagccuggcca

SEQ ID NO: 403023 - RNA, 32 nt, Human
cugaggucgggaguucgagaccagccuuacca

SEQ ID NO: 403024 - RNA, 32 nt, Human
cugaggucgggaguucuagaccagccugacca

SEQ ID NO: 403025 - RNA, 32 nt, Human
cugaggucgggaguuggagaccagccugacca

SEQ ID NO: 403026 - RNA, 32 nt, Human
cugaggucgggaguuugagaccagccugacca

SEQ ID NO: 403027 - RNA, 32 nt, Human
cugaggucgggaguuugagaccagccuggcca

SEQ ID NO: 403028 - RNA, 32 nt, Human
cugaggucgggauuuugagaccagccugacca

SEQ ID NO: 403029 - RNA, 32 nt, Human
cugaggucuagaaaggaggaguugagagcagg

SEQ ID NO: 403030 - RNA, 32 nt, Human
cugaggucucucuuggccuggaagaauaacac

SEQ ID NO: 403031 - RNA, 32 nt, Human
cugaggucucuuccagcccucagucugagguu

SEQ ID NO: 403032 - RNA, 32 nt, Human
cugaggucuggaguucaagaccagccuggcca

SEQ ID NO: 403033 - RNA, 32 nt, Human
cugaggucuggaguuugagaccagccuggcca

SEQ ID NO: 403034 - RNA, 32 nt, Human
cugaggucuuccaugacuugccuagucuccca

SEQ ID NO: 403035 - RNA, 32 nt, Human
cugaggugaauagcagucacagagccaucaaa

SEQ ID NO: 403036 - RNA, 32 nt, Human
cugaggugacagccucacagggucugguacca

SEQ ID NO: 403037 - RNA, 32 nt, Human
cugaggugagagaucuuuugagcccaggaauu

SEQ ID NO: 403038 - RNA, 32 nt, Human
cugaggugaggaguucaagaccagccugccca

SEQ ID NO: 403039 - RNA, 24 nt, Human
cugaggugaguggauuacaagguc

SEQ ID NO: 403040 - RNA, 32 nt, Human
cugaggugcagcaugucuagacugggagcccu

SEQ ID NO: 403041 - RNA, 32 nt, Human
cugaggugccccucuguccuccagcagggcac

SEQ ID NO: 403042 - RNA, 32 nt, Human
cugagguggacggaucaccugaggucaggagu

SEQ ID NO: 403043 - RNA, 24 nt, Human
cugagguggacggaucacgagguc

SEQ ID NO: 403044 - RNA, 32 nt, Human
cugagguggacggaucauuugaggucaggagu

SEQ ID NO: 403045 - RNA, 32 nt, Human
cugagguggcuucucauuaaccccuuaggacu

SEQ ID NO: 403046 - RNA, 23 nt, Human
cugaggugggagaaucgcuugag

SEQ ID NO: 403047 - RNA, 32 nt, Human
cugaggugggaggaucaccugaggucgggagu

SEQ ID NO: 403048 - RNA, 24 nt, Human
cugaggugggaggaucacuugaga

SEQ ID NO: 403049 - RNA, 23 nt, Human
cugaggugggaggaucgcuugag

SEQ ID NO: 403050 - RNA, 24 nt, Human
cugaggugggcaaaucacaagguc

SEQ ID NO: 403051 - RNA, 32 nt, Human
cugaggugggcaaaucaccugaggucaggagu

SEQ ID NO: 403052 - RNA, 24 nt, Human
cugaggugggcagaucacaagguc

SEQ ID NO: 403053 - RNA, 24 nt, Human
cugaggugggcagaucaccugaga

SEQ ID NO: 403054 - RNA, 32 nt, Human
cugaggugggcagaucaccugagaucgggagu

SEQ ID NO: 403055 - RNA, 32 nt, Human
cugaggugggcagaucaccugaggucaggaau

SEQ ID NO: 403056 - RNA, 32 nt, Human
cugaggugggcagaucaccugagguugggagu

SEQ ID NO: 403057 - RNA, 24 nt, Human
cugaggugggcagaucacgagguc

SEQ ID NO: 403058 - RNA, 32 nt, Human
cugaggugggcagaucacuugaggucaggagu

SEQ ID NO: 403059 - RNA, 32 nt, Human
cugaggugggcagaucaguugaggucaggagu

SEQ ID NO: 403060 - RNA, 32 nt, Human
cugaggugggcauaucaccugaggucagcagu

SEQ ID NO: 403061 - RNA, 24 nt, Human
cugaggugggcgaaucacaagguc

SEQ ID NO: 403062 - RNA, 32 nt, Human
cugaggugggcgcaucaccugaggucaggagu

SEQ ID NO: 403063 - RNA, 24 nt, Human
cugaggugggcggaucacaaguuc

SEQ ID NO: 403064 - RNA, 32 nt, Human
cugaggugggcggaucaccugaggucaggagc

SEQ ID NO: 403065 - RNA, 32 nt, Human
cugaggugggcggaucaccugaggucaggagu

SEQ ID NO: 403066 - RNA, 32 nt, Human
cugaggugggcggaucaccugaguucaggagu

SEQ ID NO: 403067 - RNA, 24 nt, Human
cugaggugggcggaucacgagguc

SEQ ID NO: 403068 - RNA, 32 nt, Human
cugaggugggcggaucacuugaggucaggagu

SEQ ID NO: 403069 - RNA, 32 nt, Human
cugagguggggaaagcaagcaccuacaugaca

SEQ ID NO: 403070 - RNA, 24 nt, Human
cugagguggguggaucacaagguc

SEQ ID NO: 403071 - RNA, 23 nt, Human
cugagguggguggaucacagguc

SEQ ID NO: 403072 - RNA, 24 nt, Human
cugagguggguggaucaccagguc

SEQ ID NO: 403073 - RNA, 32 nt, Human
cugagguggguggaucaccugaagucagaagu

SEQ ID NO: 403074 - RNA, 32 nt, Human
cugagguggguggaucaccugagaccagcuug

SEQ ID NO: 403075 - RNA, 32 nt, Human
cugagguggguggaucaccugaggucaggagc

SEQ ID NO: 403076 - RNA, 32 nt, Human
cugagguggguggaucaccugaggucaggagu

SEQ ID NO: 403077 - RNA, 32 nt, Human
cugagguggguggaucacuugaggucaggagc

SEQ ID NO: 403078 - RNA, 32 nt, Human
cugagguggguggaucacuugaggucaggagu

SEQ ID NO: 403079 - RNA, 32 nt, Human
cugagguggguggaucagcugaggucaggagu

SEQ ID NO: 403080 - RNA, 32 nt, Human
cugagguggguggaucaucugaggucaggagu

SEQ ID NO: 403081 - RNA, 32 nt, Human
cugagguggguggaucgccugaggucgggggu

SEQ ID NO: 403082 - RNA, 31 nt, Human
cugagguggguggaugccgaggugaguggau

SEQ ID NO: 403083 - RNA, 32 nt, Human
cugagguggguggauuacuugaggucaggagu

SEQ ID NO: 403084 - RNA, 32 nt, Human
cugagguggguggauugccugaggucaggagu

SEQ ID NO: 403085 - RNA, 32 nt, Human
cugagguggguguaucaccugaaguccggagu

SEQ ID NO: 403086 - RNA, 32 nt, Human
cugagguggguguaucaccugaggucgggagu

SEQ ID NO: 403087 - RNA, 32 nt, Human
cugagguggguguaucacuugaggucaggagu

SEQ ID NO: 403088 - RNA, 32 nt, Human
cugaggugguaggaggacgacccuggaaaugg

SEQ ID NO: 403089 - RNA, 32 nt, Human
cugaggugguaggaucaccugaggucaggagu

SEQ ID NO: 403090 - RNA, 32 nt, Human
cugagguggugaggagagacugaaggcuuugc

SEQ ID NO: 403091 - RNA, 22 nt, Human
cugagguguacauaguccuucc

SEQ ID NO: 403092 - RNA, 32 nt, Human
cugaggugucaaguccugccuuuccuuucauc

SEQ ID NO: 403093 - RNA, 32 nt, Human
cugagguguccuggaaaggccuggaaggugca

SEQ ID NO: 403094 - RNA, 31 nt, Human
cugagguguuagaaaacuugaucuguggugu

SEQ ID NO: 403095 - RNA, 32 nt, Human
cugagguuaagaguucaagaccagccuggcca

SEQ ID NO: 403096 - RNA, 32 nt, Human
cugagguuacaggcaccaugagccaggacacc

SEQ ID NO: 403097 - RNA, 32 nt, Human
cugagguuagaaguuugagaccagccuggcca

SEQ ID NO: 403098 - RNA, 32 nt, Human
cugagguuaggacuucaagaccagccuggcca

SEQ ID NO: 403099 - RNA, 32 nt, Human
cugagguuaggaguucaagaccagccugauca

SEQ ID NO: 403100 - RNA, 32 nt, Human
cugagguuaggaguucaagaccagccuggcca

SEQ ID NO: 403101 - RNA, 32 nt, Human
cugagguuaggaguuccagaccagccuggcca

SEQ ID NO: 403102 - RNA, 32 nt, Human
cugagguuaggaguucgagaccagccugacca

SEQ ID NO: 403103 - RNA, 32 nt, Human
cugagguuaggaguucgagaccagccugccca

SEQ ID NO: 403104 - RNA, 32 nt, Human
cugagguuaggaguucgagaccagccuggcca

SEQ ID NO: 403105 - RNA, 32 nt, Human
cugagguuaggaguuugagaccagccugacca

SEQ ID NO: 403106 - RNA, 32 nt, Human
cugagguuaggaguuugagaccagccuggcca

SEQ ID NO: 403107 - RNA, 32 nt, Human
cugagguuagugugcuuggaggcugcaggacg

SEQ ID NO: 403108 - RNA, 32 nt, Human
cugagguucugcuguugaguccuggguggcug

SEQ ID NO: 403109 - RNA, 32 nt, Human
cugagguugcagugagcugagaucaggcacuu

SEQ ID NO: 403110 - RNA, 32 nt, Human
cugagguuggcgacugucuacacuccuccccc

SEQ ID NO: 403111 - RNA, 32 nt, Human
cugagguugggaguuaaagaccagccugaccg

SEQ ID NO: 403112 - RNA, 32 nt, Human
cugagguugggaguucaagaccagccugacca

SEQ ID NO: 403113 - RNA, 32 nt, Human
cugagguugggaguucaagaccagccuggcca

SEQ ID NO: 403114 - RNA, 32 nt, Human
cugagguugggaguucaagaccagccugguca

SEQ ID NO: 403115 - RNA, 32 nt, Human
cugagguugggaguucgagaccagccugacca

SEQ ID NO: 403116 - RNA, 32 nt, Human
cugagguugggaguucgaggccagccugacca

SEQ ID NO: 403117 - RNA, 32 nt, Human
cugagguugggauuugcuguguuccugggcag

SEQ ID NO: 403118 - RNA, 32 nt, Human
cugagguuggggucaaugccuccugggcaccc

SEQ ID NO: 403119 - RNA, 32 nt, Human
cugagguugguucagaggccagccugcauagc

SEQ ID NO: 403120 - RNA, 32 nt, Human
cugagguuuaccuggaucuggcuacugaggcu

SEQ ID NO: 403121 - RNA, 32 nt, Human
cugagguuuuagaagcuaggaggcaggaaaau

SEQ ID NO: 403122 - RNA, 32 nt, Human
cugaguaaacacucaauaaauggugauuguua

SEQ ID NO: 403123 - RNA, 31 nt, Human
cugaguaaaggagacacucagaugcuacuca

SEQ ID NO: 403124 - RNA, 22 nt, Human
cugaguaacauggugaaacccc

SEQ ID NO: 403125 - RNA, 32 nt, Human
cugaguaacauggugaaaccccaucucuacga

SEQ ID NO: 403126 - RNA, 21 nt, Human
cugaguaacugggacuacagg

SEQ ID NO: 403127 - RNA, 32 nt, Human
cugaguacaguacucuuugucauuucauauug

SEQ ID NO: 403128 - RNA, 32 nt, Human
cugaguacaguccuggggguaaggggaugaca

SEQ ID NO: 403129 - RNA, 32 nt, Human
cugaguaccauccuggaugaaucuagaaggua

SEQ ID NO: 403130 - RNA, 32 nt, Human
cugaguaccucuccaccauccuccagucguug

SEQ ID NO: 403131 - RNA, 32 nt, Human
cugaguaccugacuucucaggacugacaccua

SEQ ID NO: 403132 - RNA, 21 nt, Human
cugaguaccugggacuacagg

SEQ ID NO: 403133 - RNA, 32 nt, Human
cugaguacugagaacccagaggacagagccca

SEQ ID NO: 403134 - RNA, 32 nt, Human
cugaguacugagccacugugcccaggcugugg

SEQ ID NO: 403135 - RNA, 32 nt, Human
cugaguacugccucaucugcugugcugugcug

SEQ ID NO: 403136 - RNA, 32 nt, Human
cugaguagagaccacaccacugcacuccugcc

SEQ ID NO: 403137 - RNA, 21 nt, Human
cugaguagaugggacuacagg

SEQ ID NO: 403138 - RNA, 21 nt, Human
cugaguagccgggacuacagg

SEQ ID NO: 403139 - RNA, 21 nt, Human
cugaguagcuaggacuacagg

SEQ ID NO: 403140 - RNA, 21 nt, Human
cugaguagcuaggacugcagg

SEQ ID NO: 403141 - RNA, 21 nt, Human
cugaguagcuaggacuguagg

SEQ ID NO: 403142 - RNA, 21 nt, Human
cugaguagcugagacuacagg

SEQ ID NO: 403143 - RNA, 32 nt, Human
cugaguagcugcagaggccuuggguccaggcu

SEQ ID NO: 403144 - RNA, 21 nt, Human
cugaguagcugcgacuacagg

SEQ ID NO: 403145 - RNA, 21 nt, Human
cugaguagcuggaacuacagg

SEQ ID NO: 403146 - RNA, 20 nt, Human
cugaguagcuggaacugcag

SEQ ID NO: 403147 - RNA, 21 nt, Human
cugaguagcugggaccacagg

SEQ ID NO: 403148 - RNA, 21 nt, Human
cugaguagcugggaccauagg

SEQ ID NO: 403149 - RNA, 21 nt, Human
cugaguagcugggacgacagg

SEQ ID NO: 403150 - RNA, 21 nt, Human
cugaguagcugggacuaaagg

SEQ ID NO: 403151 - RNA, 20 nt, Human
cugaguagcugggacuacag

SEQ ID NO: 403152 - RNA, 21 nt, Human
cugaguagcugggacuacagg

SEQ ID NO: 403153 - RNA, 21 nt, Human
cugaguagcugggacuagagg

SEQ ID NO: 403154 - RNA, 21 nt, Human
cugaguagcugggacuauagg

SEQ ID NO: 403155 - RNA, 20 nt, Human
cugaguagcugggacugcag

SEQ ID NO: 403156 - RNA, 21 nt, Human
cugaguagcugggacugcagg

SEQ ID NO: 403157 - RNA, 21 nt, Human
cugaguagcugggaguacagg

SEQ ID NO: 403158 - RNA, 21 nt, Human
cugaguagcugggaucacagg

SEQ ID NO: 403159 - RNA, 21 nt, Human
cugaguagcugggauuacagg

SEQ ID NO: 403160 - RNA, 21 nt, Human
cugaguagcugggauugcagg

SEQ ID NO: 403161 - RNA, 21 nt, Human
cugaguagcuggggcuacagg

SEQ ID NO: 403162 - RNA, 32 nt, Human
cugaguaggaaggcaucuccugacuuucacuc

SEQ ID NO: 403163 - RNA, 32 nt, Human
cugaguagguggacaaauauccucacuuucua

SEQ ID NO: 403164 - RNA, 32 nt, Human
cugaguaguuaucacugugucugccucuguua

SEQ ID NO: 403165 - RNA, 32 nt, Human
cugaguaguuucagcaguuucaaaugacugag

SEQ ID NO: 403166 - RNA, 32 nt, Human
cugagucaaggugggagcagggucgguagcuu

SEQ ID NO: 403167 - RNA, 32 nt, Human
cugagucacagccaccuccccaccuccccgca

SEQ ID NO: 403168 - RNA, 32 nt, Human
cugagucaccacugacuguugcccugggcaua

SEQ ID NO: 403169 - RNA, 32 nt, Human
cugagucacccgaggagguggcagugcaagac

SEQ ID NO: 403170 - RNA, 20 nt, Human
cugagucacggucugugagg

SEQ ID NO: 403171 - RNA, 32 nt, Human
cugagucacuugucuaaaaaguagccucaggu

SEQ ID NO: 403172 - RNA, 32 nt, Human
cugagucagaaacucuggaauagggcccccgc

SEQ ID NO: 403173 - RNA, 32 nt, Human
cugagucaggacaccuggcuucuugaaaaguu

SEQ ID NO: 403174 - RNA, 32 nt, Human
cugagucaggagguugaggcugcagugagcua

SEQ ID NO: 403175 - RNA, 32 nt, Human
cugagucauagaggauacagacuugcccaaag

SEQ ID NO: 403176 - RNA, 32 nt, Human
cugagucauuuaguagcugccugggugaucaa

SEQ ID NO: 403177 - RNA, 32 nt, Human
cugagucauuuauuuuccuuagcuuuuuccac

SEQ ID NO: 403178 - RNA, 32 nt, Human
cugagucauuuugccaaugucgucuucaguuu

SEQ ID NO: 403179 - RNA, 32 nt, Human
cugaguccaaacccuugugccucccaguucuu

SEQ ID NO: 403180 - RNA, 32 nt, Human
cugaguccaggaggucgaggcugcagugagcc

SEQ ID NO: 403181 - RNA, 21 nt, Human
cugaguccauauacuugucua

SEQ ID NO: 403182 - RNA, 32 nt, Human
cugagucccacacauucucugagaccacagca

SEQ ID NO: 403183 - RNA, 32 nt, Human
cugagucccaggcugagccucagucucccucc

SEQ ID NO: 403184 - RNA, 23 nt, Human
cugaguccccaaaccugcacuag

SEQ ID NO: 403185 - RNA, 22 nt, Human
cugagucccucacagagacuca

SEQ ID NO: 403186 - RNA, 32 nt, Human
cugaguccgacaaccauugggguggggcugca

SEQ ID NO: 403187 - RNA, 32 nt, Human
cugaguccggagcagacugagccaccuaagag

SEQ ID NO: 403188 - RNA, 32 nt, Human
cugaguccuaucucucucugauguuccccagu

SEQ ID NO: 403189 - RNA, 32 nt, Human
cugaguccucaggugacuggggacuuggaacc

SEQ ID NO: 403190 - RNA, 32 nt, Human
cugaguccuccacucgcaucucccuccccugc

SEQ ID NO: 403191 - RNA, 32 nt, Human
cugaguccucugcaugaguucugcaccccaag

SEQ ID NO: 403192 - RNA, 32 nt, Human
cugaguccugggugccguauguguaugcggca

SEQ ID NO: 403193 - RNA, 32 nt, Human
cugaguccuugaaucacuagguuuugcuaucu

SEQ ID NO: 403194 - RNA, 32 nt, Human
cugagucgcacagucucucccacccgaaugcc

SEQ ID NO: 403195 - RNA, 32 nt, Human
cugagucgggauggagcugccugcugugaacc

SEQ ID NO: 403196 - RNA, 32 nt, Human
cugagucgggcggaucacaugaggucaggagu

SEQ ID NO: 403197 - RNA, 32 nt, Human
cugagucgggcuggagaagcugggcagccugg

SEQ ID NO: 403198 - RNA, 32 nt, Human
cugagucuaagaguuugagaccagccugggca

SEQ ID NO: 403199 - RNA, 32 nt, Human
cugagucucacgcugcagcccagagcuaggac

SEQ ID NO: 403200 - RNA, 32 nt, Human
cugagucucccaggacccccuuuggagaugcc

SEQ ID NO: 403201 - RNA, 32 nt, Human
cugagucucccaggcccccuugaucuguaccc

SEQ ID NO: 403202 - RNA, 32 nt, Human
cugagucuccucuucugcuccuagccaccagu

SEQ ID NO: 403203 - RNA, 32 nt, Human
cugagucucguggccgccccuggaccagugau

SEQ ID NO: 403204 - RNA, 32 nt, Human
cugagucucugccucugccucucccuuccaag

SEQ ID NO: 403205 - RNA, 32 nt, Human
cugagucugcgguucucgccugggcagucuug

SEQ ID NO: 403206 - RNA, 32 nt, Human
cugagucuggcccagcagaggcugcaacugga

SEQ ID NO: 403207 - RNA, 32 nt, Human
cugagucugggacuucugccuccauggcuggu

SEQ ID NO: 403208 - RNA, 32 nt, Human
cugagucugggcuccgcaccucccuggggacc

SEQ ID NO: 403209 - RNA, 32 nt, Human
cugagucugguccauugcuaccccaauucucu

SEQ ID NO: 403210 - RNA, 32 nt, Human
cugagucugugagcuucuuacauggcuccaaa

SEQ ID NO: 403211 - RNA, 32 nt, Human
cugagucuguggacacuguggaaagcuuugaa

SEQ ID NO: 403212 - RNA, 32 nt, Human
cugagucuucuccaagcaaaacaacuccacuu

SEQ ID NO: 403213 - RNA, 32 nt, Human
cugagucuuggcacgaguguccuggccaggac

SEQ ID NO: 403214 - RNA, 32 nt, Human
cugagucuuggugagcagacaugggaauccga

SEQ ID NO: 403215 - RNA, 32 nt, Human
cugagucuuguccuugccugauucccaucugc

SEQ ID NO: 403216 - RNA, 32 nt, Human
cugagucuuuauuuggaaaaugguuuccagcu

SEQ ID NO: 403217 - RNA, 32 nt, Human
cugagucuuuuucugucuauccaucuguuuau

SEQ ID NO: 403218 - RNA, 32 nt, Human
cugagugacguaggcucugagauagcugucca

SEQ ID NO: 403219 - RNA, 32 nt, Human
cugagugacuggagacagggaugauggagagu

SEQ ID NO: 403220 - RNA, 32 nt, Human
cugagugagccagcugggcuccugggucuagu

SEQ ID NO: 403221 - RNA, 32 nt, Human
cugagugagccccagcccgccccugcaguucc

SEQ ID NO: 403222 - RNA, 32 nt, Human
cugagugaggagugcccaggagagauggugaa

SEQ ID NO: 403223 - RNA, 32 nt, Human
cugagugaugcaugagguagguguuccgagua

SEQ ID NO: 403224 - RNA, 32 nt, Human
cugagugaugcaugagguagguguucugagua

SEQ ID NO: 403225 - RNA, 32 nt, Human
cugagugcacacaccacaguguaaauuaugcc

SEQ ID NO: 403226 - RNA, 32 nt, Human
cugagugcaccaggcuguacccguuagauccu

SEQ ID NO: 403227 - RNA, 32 nt, Human
cugagugcagugagccaagaccaugccauuac

SEQ ID NO: 403228 - RNA, 32 nt, Human
cugagugcaguggcagaaucauagcucagugc

SEQ ID NO: 403229 - RNA, 32 nt, Human
cugagugccagcaucuuccagcaccagaggag

SEQ ID NO: 403230 - RNA, 32 nt, Human
cugagugcccagggugucuccucugcccagag

SEQ ID NO: 403231 - RNA, 32 nt, Human
cugagugccccagggagggcaggcugggugag

SEQ ID NO: 403232 - RNA, 32 nt, Human
cugagugccgguccccuggacccacuguuguu

SEQ ID NO: 403233 - RNA, 32 nt, Human
cugagugccuggcuuugugagacacuguacaa

SEQ ID NO: 403234 - RNA, 32 nt, Human
cugagugccuguccccuggacccacuguuguc

SEQ ID NO: 403235 - RNA, 32 nt, Human
cugagugccuuuuucuccuuaaggaggccugc

SEQ ID NO: 403236 - RNA, 32 nt, Human
cugagugcgguggcuuacaccuguaaucccag

SEQ ID NO: 403237 - RNA, 32 nt, Human
cugagugcuacuugaagauauguagagauucc

SEQ ID NO: 403238 - RNA, 32 nt, Human
cugagugcugcacaucaugggcucugucugug

SEQ ID NO: 403239 - RNA, 32 nt, Human
cugagugcugggaggaggcugcaguacuccug

SEQ ID NO: 403240 - RNA, 32 nt, Human
cugagugcuguggcucacaccuguaaucccag

SEQ ID NO: 403241 - RNA, 32 nt, Human
cugaguggaagagagcgcagcccggccaccgg

SEQ ID NO: 403242 - RNA, 32 nt, Human
cugaguggagccaggcuggcccagagcugaga

SEQ ID NO: 403243 - RNA, 32 nt, Human
cugaguggagggagccacugagcacagcaagg

SEQ ID NO: 403244 - RNA, 32 nt, Human
cugaguggauggaucacuugaggucaggaguu

SEQ ID NO: 403245 - RNA, 32 nt, Human
cugaguggccacugccaagcugcggggaaggg

SEQ ID NO: 403246 - RNA, 17 nt, Human
cugaguggcccuggaca

SEQ ID NO: 403247 - RNA, 32 nt, Human
cugaguggccuggaacuuguuuaaaguguuua

SEQ ID NO: 403248 - RNA, 32 nt, Human
cugaguggcugccaaggcacucacagaaucau

SEQ ID NO: 403249 - RNA, 21 nt, Human
cugaguggcugggacugcagg

SEQ ID NO: 403250 - RNA, 32 nt, Human
cugaguggcugggacugcaggagcaugccauc

SEQ ID NO: 403251 - RNA, 32 nt, Human
cugagugggaugaccgcuugagcccaggauuu

SEQ ID NO: 403252 - RNA, 32 nt, Human
cugagugggccggggaggcugggagccggcgg

SEQ ID NO: 403253 - RNA, 32 nt, Human
cugagugggcugggaucucguguccucaaagu

SEQ ID NO: 403254 - RNA, 32 nt, Human
cugaguggggagagguugggcagugagugagg

SEQ ID NO: 403255 - RNA, 32 nt, Human
cugaguggggcagaucacuugaggucaggagu

SEQ ID NO: 403256 - RNA, 32 nt, Human
cugagugggugggccaccuccugcggcaggua

SEQ ID NO: 403257 - RNA, 32 nt, Human
cugaguggucaggagccaguuucuccagcccc

SEQ ID NO: 403258 - RNA, 32 nt, Human
cugaguguccggcacacagaagacauuagaga

SEQ ID NO: 403259 - RNA, 32 nt, Human
cugagugucggcaucagcacugagcuagacau

SEQ ID NO: 403260 - RNA, 32 nt, Human
cugagugugaugaagguguauguugggaggga

SEQ ID NO: 403261 - RNA, 32 nt, Human
cugagugugcacaagcagugaagaggauccag

SEQ ID NO: 403262 - RNA, 32 nt, Human
cugagugugccuguaaucucagcacuuugagg

SEQ ID NO: 403263 - RNA, 32 nt, Human
cugaguguggugaguggagcauuuucccuggc

SEQ ID NO: 403264 - RNA, 32 nt, Human
cugaguguggugcuggggaaggcaugugcuug

SEQ ID NO: 403265 - RNA, 32 nt, Human
cugagugugguggcgcaugccuguaaucccag

SEQ ID NO: 403266 - RNA, 32 nt, Human
cugagugugguggcucacaccuguaaucccag

SEQ ID NO: 403267 - RNA, 32 nt, Human
cugagugugguggcucaugccuguaaucccag

SEQ ID NO: 403268 - RNA, 32 nt, Human
cugagugugguggcucaugccuguaauuccag

SEQ ID NO: 403269 - RNA, 32 nt, Human
cugagugugugaagacagggagagccaggccc

SEQ ID NO: 403270 - RNA, 32 nt, Human
cugaguguuggagcuuggcugaagacauguuu

SEQ ID NO: 403271 - RNA, 32 nt, Human
cugaguguuugcugugcuccaggcucaguaca

SEQ ID NO: 403272 - RNA, 32 nt, Human
cugaguguuuuuauuaauuacuuuuuggcuau

SEQ ID NO: 403273 - RNA, 32 nt, Human
cugaguuaaagcaguuuacuagacucagcuug

SEQ ID NO: 403274 - RNA, 32 nt, Human
cugaguuaucuagaugaucccugagauuugaa

SEQ ID NO: 403275 - RNA, 18 nt, Human
cugaguucaaagcaggug

SEQ ID NO: 403276 - RNA, 32 nt, Human
cugaguucaagaccagccugggcaacguggug

SEQ ID NO: 403277 - RNA, 32 nt, Human
cugaguucaagcaauccuucugucucagucuc

SEQ ID NO: 403278 - RNA, 32 nt, Human
cugaguucaagcaguccuccugcuucaacaua

SEQ ID NO: 403279 - RNA, 32 nt, Human
cugaguucaagccauucuccuaccucagccuc

SEQ ID NO: 403280 - RNA, 32 nt, Human
cugaguucaagucauucuccugccucagccuc

SEQ ID NO: 403281 - RNA, 32 nt, Human
cugaguucaagugauuccugugccucagucuc

SEQ ID NO: 403282 - RNA, 32 nt, Human
cugaguucacgccauucuacugccucagccuc

SEQ ID NO: 403283 - RNA, 32 nt, Human
cugaguucacgugcuaaagucauuucacugua

SEQ ID NO: 403284 - RNA, 32 nt, Human
cugaguucaggaguucaagaccagccuggcca

SEQ ID NO: 403285 - RNA, 32 nt, Human
cugaguucaggaguucgagaccagccuggcca

SEQ ID NO: 403286 - RNA, 32 nt, Human
cugaguucaggaguucgagaccagccugggcg

SEQ ID NO: 403287 - RNA, 32 nt, Human
cugaguucaggaguuugagaccagccugggca

SEQ ID NO: 403288 - RNA, 32 nt, Human
cugaguuccagaaaaaucaacuacauuaaaau

SEQ ID NO: 403289 - RNA, 32 nt, Human
cugaguuccagagagggaggacccuggggugg

SEQ ID NO: 403290 - RNA, 32 nt, Human
cugaguucccacucaccuguguagagugccau

SEQ ID NO: 403291 - RNA, 32 nt, Human
cugaguuccggggugcaaugggggagggaggg

SEQ ID NO: 403292 - RNA, 32 nt, Human
cugaguuccuaaugcucagaacauggaugaga

SEQ ID NO: 403293 - RNA, 32 nt, Human
cugaguuccucccuccugggaagcuggguugg

SEQ ID NO: 403294 - RNA, 32 nt, Human
cugaguucgagaccagccuaaccaacauggag

SEQ ID NO: 403295 - RNA, 32 nt, Human
cugaguucgggaguucaagaccagccugacca

SEQ ID NO: 403296 - RNA, 32 nt, Human
cugaguucuaacuccuugguugcuuaaaagua

SEQ ID NO: 403297 - RNA, 32 nt, Human
cugaguucuggaccuacccccacgugguguaa

SEQ ID NO: 403298 - RNA, 32 nt, Human
cugaguucuggucaaagaaagaaaguuuagaa

SEQ ID NO: 403299 - RNA, 32 nt, Human
cugaguugaugggaccaacagggcuuugcucc

SEQ ID NO: 403300 - RNA, 32 nt, Human
cugaguugggcagaucaccugagaucaggagu

SEQ ID NO: 403301 - RNA, 32 nt, Human
cugaguugggcggaucacuugaggucaggaau

SEQ ID NO: 403302 - RNA, 32 nt, Human
cugaguuggguacagggcuggggaggaaucag

SEQ ID NO: 403303 - RNA, 31 nt, Human
cugaguuggguggaaggugcugagagugugg

SEQ ID NO: 403304 - RNA, 32 nt, Human
cugaguuuagagucugcaaggcuugacaacca

SEQ ID NO: 403305 - RNA, 32 nt, Human
cugaguuuccaaaaucaaagauuugaccuuaa

SEQ ID NO: 403306 - RNA, 32 nt, Human
cugaguuuccccuggccaaggcugcagacaag

SEQ ID NO: 403307 - RNA, 32 nt, Human
cugaguuuccuugucucuacaaaggaguuagu

SEQ ID NO: 403308 - RNA, 32 nt, Human
cugaguuucgcuguuccagucuggaccucuuu

SEQ ID NO: 403309 - RNA, 31 nt, Human
cugaguuugaaggauguuuauauaggguagg

SEQ ID NO: 403310 - RNA, 32 nt, Human
cugaguuugcgggacugcccugagaugcuaca

SEQ ID NO: 403311 - RNA, 32 nt, Human
cugaguuugguucauuuauuccagcugcaaua

SEQ ID NO: 403312 - RNA, 32 nt, Human
cugaguuuguacaggcaaguccugggcugggu

SEQ ID NO: 403313 - RNA, 32 nt, Human
cugaguuuguagaaaguggcagaugcuguucu

SEQ ID NO: 403314 - RNA, 32 nt, Human
cugaguuuucagagugugaggaagggagggac

SEQ ID NO: 403315 - RNA, 32 nt, Human
cugaguuuugacuccaaucagugauaccagac

SEQ ID NO: 403316 - RNA, 32 nt, Human
cugaguuuugccaaauguuaaagggagaagag

SEQ ID NO: 403317 - RNA, 32 nt, Human
cugauaaaggaaugacuagaguaguacaccua

SEQ ID NO: 403318 - RNA, 32 nt, Human
cugauaaaggacagagugaaccucaagggguu

SEQ ID NO: 403319 - RNA, 32 nt, Human
cugauaaauauucacacuugaaccauaguuac

SEQ ID NO: 403320 - RNA, 32 nt, Human
cugauaacuggugaagccuacagccauccgcc

SEQ ID NO: 403321 - RNA, 32 nt, Human
cugauaagaacccaggguggagagggagacuc

SEQ ID NO: 403322 - RNA, 23 nt, Human
cugcccuguugcucugcccugca

SEQ ID NO: 403323 - RNA, 31 nt, Human
cugcccuguuggcagaggccugugucugugc

SEQ ID NO: 403324 - RNA, 32 nt, Human
cugcccuuaauugacacuccuauuuauuucau

SEQ ID NO: 403325 - RNA, 26 nt, Human
cugcccuuaucaaccugggucccuca

SEQ ID NO: 403326 - RNA, 18 nt, Human
cugcccuucacugggcca

SEQ ID NO: 403327 - RNA, 32 nt, Human
cugcccuuccaaggagcuucugcugcugcucc

SEQ ID NO: 403328 - RNA, 32 nt, Human
cugcccuuccugggcccugccucuccaugccu

SEQ ID NO: 403329 - RNA, 18 nt, Human
cugcccuuccugucucca

SEQ ID NO: 403330 - RNA, 32 nt, Human
cugcccuucgcuucuguccucccuggcuucuc

SEQ ID NO: 403331 - RNA, 32 nt, Human
cugcccuucgcuugaggcaaaaggacucuugu

SEQ ID NO: 403332 - RNA, 32 nt, Human
cugcccuucuccacuccucucuuggauccgcc

SEQ ID NO: 403333 - RNA, 32 nt, Human
cugcccuucuccccacucccaucugauuuacu

SEQ ID NO: 403334 - RNA, 32 nt, Human
cugcccuucuccguuccagccuggacagagaa

SEQ ID NO: 403335 - RNA, 32 nt, Human
cugcccuucucuccucccucucaucccagaga

SEQ ID NO: 403336 - RNA, 32 nt, Human
cugcccuucucuugcugccuccugggcagggc

SEQ ID NO: 403337 - RNA, 32 nt, Human
cugcccuucugcccucuccccucccugccccu

SEQ ID NO: 403338 - RNA, 19 nt, Human
cugcccuucugcugagcca

SEQ ID NO: 403339 - RNA, 32 nt, Human
cugcccuucuuugcacgaagccuggccucuug

SEQ ID NO: 403340 - RNA, 32 nt, Human
cugcccuugcuggcccugcccuucccacaggu

SEQ ID NO: 403341 - RNA, 19 nt, Human
cugcccuuggcccugcaag

SEQ ID NO: 403342 - RNA, 32 nt, Human
cugcccuuggucguuccugagugugggccaag

SEQ ID NO: 403343 - RNA, 27 nt, Human
cugcccuuuagucguuuuuguuuugua

SEQ ID NO: 403344 - RNA, 32 nt, Human
cugcccuuucucuccgcuccagccucucccca

SEQ ID NO: 403345 - RNA, 32 nt, Human
cugcccuuucugaaaaggaccccacaggugau

SEQ ID NO: 403346 - RNA, 23 nt, Human
cugccgaacccuccucucacagg

SEQ ID NO: 403347 - RNA, 32 nt, Human
cugccgaagagguggagccaggcaggggccac

SEQ ID NO: 403348 - RNA, 18 nt, Human
cugccgacaccugggcca

SEQ ID NO: 403349 - RNA, 32 nt, Human
cugccgacucccagcccggccaaaaagacaaa

SEQ ID NO: 403350 - RNA, 18 nt, Human
cugccgacucucccgggc

SEQ ID NO: 403351 - RNA, 32 nt, Human
cugccgagcagccaaggcccuguccuuucuug

SEQ ID NO: 403352 - RNA, 32 nt, Human
cugccgagcaggcuccugccaucccccauggg

SEQ ID NO: 403353 - RNA, 32 nt, Human
cugccgagccucugccuccacucucauucaga

SEQ ID NO: 403354 - RNA, 21 nt, Human
cugccgaggcccacugggcca

SEQ ID NO: 403355 - RNA, 20 nt, Human
cugccgaggcuucugggcca

SEQ ID NO: 403356 - RNA, 32 nt, Human
cugccgaguagcugggauuacaggcaugcgcc

SEQ ID NO: 403357 - RNA, 20 nt, Human
cugccgcaugguccugggcc

SEQ ID NO: 403358 - RNA, 24 nt, Human
cugccgcccaaacuggagugcagu

SEQ ID NO: 403359 - RNA, 32 nt, Human
cugccgcccaaacuggagugcaguggcacaau

SEQ ID NO: 403360 - RNA, 32 nt, Human
cugccgcccacacugcagcagccacauccaua

SEQ ID NO: 403361 - RNA, 24 nt, Human
cugccgcccaggcgggagugcagu

SEQ ID NO: 403362 - RNA, 32 nt, Human
cugccgcccaggcgggagugcaguggcagugg

SEQ ID NO: 403363 - RNA, 23 nt, Human
cugccgcccaggcuagagugcag

SEQ ID NO: 403364 - RNA, 24 nt, Human
cugccgcccaggcuagagugcagu

SEQ ID NO: 403365 - RNA, 32 nt, Human
cugccgcccaggcuagagugcaguggcacgac

SEQ ID NO: 403366 - RNA, 24 nt, Human
cugccgcccaggcuggacugcagu

SEQ ID NO: 403367 - RNA, 32 nt, Human
cugccgcccaggcuggacugcagugacacaau

SEQ ID NO: 403368 - RNA, 24 nt, Human
cugccgcccaggcuggagugcagu

SEQ ID NO: 403369 - RNA, 32 nt, Human
cugccgcccaggcuggagugcaguggcgcgau

SEQ ID NO: 403370 - RNA, 17 nt, Human
cugccgccccucgggcc

SEQ ID NO: 403371 - RNA, 18 nt, Human
cugccgccccuugggcua

SEQ ID NO: 403372 - RNA, 20 nt, Human
cugccgcccgagcccggguc

SEQ ID NO: 403373 - RNA, 32 nt, Human
cugccgcccggauccccgccuccugggcggau

SEQ ID NO: 403374 - RNA, 21 nt, Human
cugccgcccgggacccgggcu

SEQ ID NO: 403375 - RNA, 18 nt, Human
cugccgcccucccgggcc

SEQ ID NO: 403376 - RNA, 32 nt, Human
cugccgcccugccgcccugccgcccugccgcc

SEQ ID NO: 403377 - RNA, 32 nt, Human
cugccgcccugccuggcacccacgcuggcucu

SEQ ID NO: 403378 - RNA, 32 nt, Human
cugccgcccugugggagccgcagagccugacg

SEQ ID NO: 403379 - RNA, 22 nt, Human
cugccgccgacaccgccgggcc

SEQ ID NO: 403380 - RNA, 22 nt, Human
cugccgccgccgccaccgccac

SEQ ID NO: 403381 - RNA, 18 nt, Human
cugccgccgccgccgccg

SEQ ID NO: 403382 - RNA, 23 nt, Human
cugccgccuaccccgcccgccac

SEQ ID NO: 403383 - RNA, 20 nt, Human
cugccgccuccuccugggcu

SEQ ID NO: 403384 - RNA, 19 nt, Human
cugccgccucgccgcggcc

SEQ ID NO: 403385 - RNA, 18 nt, Human
cugccgccucuccgagcu

SEQ ID NO: 403386 - RNA, 32 nt, Human
cugccgccucucgccucacgcccccagagaag

SEQ ID NO: 403387 - RNA, 32 nt, Human
cugccgccucuugggacugggggugacggauu

SEQ ID NO: 403388 - RNA, 17 nt, Human
cugccgccugcugggcc

SEQ ID NO: 403389 - RNA, 32 nt, Human
cugccgccugggaaucaggauuccuucuuccc

SEQ ID NO: 403390 - RNA, 21 nt, Human
cugccgccugggccccgggcc

SEQ ID NO: 403391 - RNA, 32 nt, Human
cugccgccugggcugucagcacuuuggcagca

SEQ ID NO: 403392 - RNA, 20 nt, Human
cugccgccugguucugagcc

SEQ ID NO: 403393 - RNA, 19 nt, Human
cugccgcgagcucgggcca

SEQ ID NO: 403394 - RNA, 21 nt, Human
cugccgcgccguccucgaguu

SEQ ID NO: 403395 - RNA, 20 nt, Human
cugccgcgccucggcuccug

SEQ ID NO: 403396 - RNA, 32 nt, Human
cugccgcgcuccugccuccugccccagcaggu

SEQ ID NO: 403397 - RNA, 32 nt, Human
cugccgcggaggcagcggcggcagcggcucuc

SEQ ID NO: 403398 - RNA, 20 nt, Human
cugccgcggccccucgggcu

SEQ ID NO: 403399 - RNA, 20 nt, Human
cugccgcggcgccuugaguc

SEQ ID NO: 403400 - RNA, 32 nt, Human
cugccgcggggcucucugggccgguucccugc

SEQ ID NO: 403401 - RNA, 19 nt, Human
cugccgcgggucccgggcc

SEQ ID NO: 403402 - RNA, 20 nt, Human
cugccgcggucgcuccgagc

SEQ ID NO: 403403 - RNA, 20 nt, Human
cugccgcgugcgccugggcc

SEQ ID NO: 403404 - RNA, 21 nt, Human
cugccgcguuaguuccgagcu

SEQ ID NO: 403405 - RNA, 23 nt, Human
cugccgcguuccgcgccccggcc

SEQ ID NO: 403406 - RNA, 18 nt, Human
cugccgcuacccucggcc

SEQ ID NO: 403407 - RNA, 19 nt, Human
cugccgcuaucgccuggcc

SEQ ID NO: 403408 - RNA, 19 nt, Human
cugccgcucaccuugugcu

SEQ ID NO: 403409 - RNA, 20 nt, Human
cugccgcuccaccgcagcca

SEQ ID NO: 403410 - RNA, 23 nt, Human
cugccgcuccccaccccugagcc

SEQ ID NO: 403411 - RNA, 21 nt, Human
cugccgcucccgccccgggcu

SEQ ID NO: 403412 - RNA, 17 nt, Human
cugccgcucccggagcc

SEQ ID NO: 403413 - RNA, 19 nt, Human
cugccgcucccuccagcca

SEQ ID NO: 403414 - RNA, 20 nt, Human
cugccgcuccgaacugagcc

SEQ ID NO: 403415 - RNA, 17 nt, Human
cugccgcucgagggacc

SEQ ID NO: 403416 - RNA, 18 nt, Human
cugccgcucgaguagcca

SEQ ID NO: 403417 - RNA, 21 nt, Human
cugccgcucgcugccccgggc

SEQ ID NO: 403418 - RNA, 16 nt, Human
cugccgcucggccagc

SEQ ID NO: 403419 - RNA, 20 nt, Human
cugccgcucgggaagaggcg

SEQ ID NO: 403420 - RNA, 20 nt, Human
cugccgcucgggacugagcc

SEQ ID NO: 403421 - RNA, 18 nt, Human
cugccgcucuccuggggc

SEQ ID NO: 403422 - RNA, 32 nt, Human
cugccgcucucuggcccuaagugcugagcugc

SEQ ID NO: 403423 - RNA, 16 nt, Human
cugccgcucugcagcc

SEQ ID NO: 403424 - RNA, 32 nt, Human
cugccgcugaaggccccagucuggacucucug

SEQ ID NO: 403425 - RNA, 32 nt, Human
cugccgcugagagggccucuccccugcagcaa

SEQ ID NO: 403426 - RNA, 21 nt, Human
cugccgcugagggcccgagcc

SEQ ID NO: 403427 - RNA, 32 nt, Human
cugccgcugcaagucugagcugccucagcugu

SEQ ID NO: 403428 - RNA, 19 nt, Human
cugccgcugcaugcggcca

SEQ ID NO: 403429 - RNA, 19 nt, Human
cugccgcugccacacugcc

SEQ ID NO: 403430 - RNA, 23 nt, Human
cugccgcugccaugcuuugaguc

SEQ ID NO: 403431 - RNA, 20 nt, Human
cugccgcugccgggcgggcc

SEQ ID NO: 403432 - RNA, 19 nt, Human
cugccgcugccucaggcua

SEQ ID NO: 403433 - RNA, 32 nt, Human
cugccgcugcgcagcgggaaggaagcuaagau

SEQ ID NO: 403434 - RNA, 21 nt, Human
cugccgcuggaacuccggguc

SEQ ID NO: 403435 - RNA, 18 nt, Human
cugccgcuggcccugggc

SEQ ID NO: 403436 - RNA, 19 nt, Human
cugccgcuggcuuugggcu

SEQ ID NO: 403437 - RNA, 24 nt, Human
cugccgcugugugggccugggcua

SEQ ID NO: 403438 - RNA, 32 nt, Human
cugccgcuucaaucuccugggcucaaaugauc

SEQ ID NO: 403439 - RNA, 21 nt, Human
cugccgcuuccaccugggcca

SEQ ID NO: 403440 - RNA, 19 nt, Human
cugccgcuugcaccugcag

SEQ ID NO: 403441 - RNA, 17 nt, Human
cugccgcuugccuugcc

SEQ ID NO: 403442 - RNA, 19 nt, Human
cugccgcuugcucuaugcc

SEQ ID NO: 403443 - RNA, 20 nt, Human
cugccgcuuguccuuguguc

SEQ ID NO: 403444 - RNA, 32 nt, Human
cugccggaaagaggagcggcaggagggggcgu

SEQ ID NO: 403445 - RNA, 32 nt, Human
cugccggagaccucccuucccugggccccuuc

SEQ ID NO: 403446 - RNA, 32 nt, Human
cugccggagagaaggggaggaggacuccagcu

SEQ ID NO: 403447 - RNA, 32 nt, Human
cugccggagccgugguggcagccccgggagga

SEQ ID NO: 403448 - RNA, 32 nt, Human
cugccggaggagccccaccuucugcuacuauu

SEQ ID NO: 403449 - RNA, 19 nt, Human
cugccggaggcugcuccug

SEQ ID NO: 403450 - RNA, 32 nt, Human
cugccggaggcugggcuuccuccucuguucuu

SEQ ID NO: 403451 - RNA, 20 nt, Human
cugccggaugccccgaggcg

SEQ ID NO: 403452 - RNA, 32 nt, Human
cugccggcacaguggaccuggcccaacccuca

SEQ ID NO: 403453 - RNA, 16 nt, Human
cugccggcaccgagcu

SEQ ID NO: 403454 - RNA, 32 nt, Human
cugccggcaccucugaucaagugccuagaggg

SEQ ID NO: 403455 - RNA, 32 nt, Human
cugccggcaucuggaggggaggcugggcugca

SEQ ID NO: 403456 - RNA, 32 nt, Human
cugccggcccaccugcagcccggacgccugcc

SEQ ID NO: 403457 - RNA, 32 nt, Human
cugccggcccagcugcaggggcuuaacagaag

SEQ ID NO: 403458 - RNA, 32 nt, Human
cugccggccccuaggacagagcagggaccuca

SEQ ID NO: 403459 - RNA, 19 nt, Human
cugccggccucccgggcca

SEQ ID NO: 403460 - RNA, 20 nt, Human
cugccggcgccaccugggcc

SEQ ID NO: 403461 - RNA, 17 nt, Human
cugccggcgccucgguc

SEQ ID NO: 403462 - RNA, 20 nt, Human
cugccggcgccuugucugca

SEQ ID NO: 403463 - RNA, 16 nt, Human
cugccggcggggcagu

SEQ ID NO: 403464 - RNA, 32 nt, Human
cugccggcucccgcccagccuguguggaaagg

SEQ ID NO: 403465 - RNA, 17 nt, Human
cugccggcuccuugagc

SEQ ID NO: 403466 - RNA, 17 nt, Human
cugccggcucgugggcc

SEQ ID NO: 403467 - RNA, 20 nt, Human
cugccggcugcgcucgggcc

SEQ ID NO: 403468 - RNA, 22 nt, Human
cugccgggaccuccagccugca

SEQ ID NO: 403469 - RNA, 32 nt, Human
cugccgggaccugaggccuccacuggcgacuu

SEQ ID NO: 403470 - RNA, 20 nt, Human
cugccgggacucaccgagcu

SEQ ID NO: 403471 - RNA, 32 nt, Human
cugccgggacuggagcgcgccguccgccgcgg

SEQ ID NO: 403472 - RNA, 32 nt, Human
cugccgggagcugcuccuaugauggaguugug

SEQ ID NO: 403473 - RNA, 32 nt, Human
cugccgggaucuuccaggaggaaagcgaaguu

SEQ ID NO: 403474 - RNA, 18 nt, Human
cugccgggcaggucacug

SEQ ID NO: 403475 - RNA, 23 nt, Human
cugccgggcaggucacugugcug

SEQ ID NO: 403476 - RNA, 32 nt, Human
cugccgggcuaaggcgugcagagcaggcgagg

SEQ ID NO: 403477 - RNA, 20 nt, Human
cugccgggcugccccgagcc

SEQ ID NO: 403478 - RNA, 17 nt, Human
cugccgggcugccucug

SEQ ID NO: 403479 - RNA, 32 nt, Human
cugccggggaggaggaggaggaggaagaggag

SEQ ID NO: 403480 - RNA, 32 nt, Human
cugccggggccagggcugccauggucuccuug

SEQ ID NO: 403481 - RNA, 20 nt, Human
cugccgggggccuugucucc

SEQ ID NO: 403482 - RNA, 31 nt, Human
cugccggguguuugcugcacagcaggcuccg

SEQ ID NO: 403483 - RNA, 32 nt, Human
cugccggguuucucccugcggcuccuggguug

SEQ ID NO: 403484 - RNA, 19 nt, Human
cugccggucaccuugagcu

SEQ ID NO: 403485 - RNA, 16 nt, Human
cugccgguccccgagc

SEQ ID NO: 403486 - RNA, 18 nt, Human
cugccgguggcccgagcc

SEQ ID NO: 403487 - RNA, 32 nt, Human
cugccgguuucuccaguucuggggacaguggu

SEQ ID NO: 403488 - RNA, 32 nt, Human
cugccguacucgggcgcgaccugcuggugcgc

SEQ ID NO: 403489 - RNA, 32 nt, Human
cugccgucagccagcagagagagggagcugca

SEQ ID NO: 403490 - RNA, 32 nt, Human
cugccgucauccaggcuggacaguucagugau

SEQ ID NO: 403491 - RNA, 17 nt, Human
cugccguccauagcagg

SEQ ID NO: 403492 - RNA, 32 nt, Human
cugccgucccaccacacguggccucugcgccc

SEQ ID NO: 403493 - RNA, 32 nt, Human
cugccguccccgcugcugugcauuggguuaaa

SEQ ID NO: 403494 - RNA, 32 nt, Human
cugccguccuucucuugcacugccuucugcgc

SEQ ID NO: 403495 - RNA, 19 nt, Human
cugccgucgccgccgccgc

SEQ ID NO: 403496 - RNA, 20 nt, Human
cugccgucggucuccgggcc

SEQ ID NO: 403497 - RNA, 19 nt, Human
cugccgucucucccgggcu

SEQ ID NO: 403498 - RNA, 32 nt, Human
cugccgucugacuugagucccugcugcugcag

SEQ ID NO: 403499 - RNA, 32 nt, Human
cugccgucuguggagccucugggcggccuucu

SEQ ID NO: 403500 - RNA, 19 nt, Human
cugccgucuuccucgagcu

SEQ ID NO: 403501 - RNA, 32 nt, Human
cugccgugcaucucccugugcccucuugcugc

SEQ ID NO: 403502 - RNA, 23 nt, Human
cugccgugccggacccccgagcc

SEQ ID NO: 403503 - RNA, 31 nt, Human
cugccgugccucucugaggucaggcugugcu

SEQ ID NO: 403504 - RNA, 30 nt, Human
cugccgugcuagcaaucagggagacuccgu

SEQ ID NO: 403505 - RNA, 32 nt, Human
cugccguggaguuugcugggggagacacaugu

SEQ ID NO: 403506 - RNA, 32 nt, Human
cugccgugggccugagaccaaggcccccgggc

SEQ ID NO: 403507 - RNA, 22 nt, Human
cugccgugggcucucauugcca

SEQ ID NO: 403508 - RNA, 32 nt, Human
cugccguguauuuccuccccagggaguggggc

SEQ ID NO: 403509 - RNA, 22 nt, Human
cugccgugucaggccucgagcc

SEQ ID NO: 403510 - RNA, 32 nt, Human
cugccguguucuguuucucucugaccgccggu

SEQ ID NO: 403511 - RNA, 32 nt, Human
cugccguguugucaguuuccugaggccucccc

SEQ ID NO: 403512 - RNA, 19 nt, Human
cugccguguugucugggcu

SEQ ID NO: 403513 - RNA, 32 nt, Human
cugccguucaugguggucuuucagguuaucuu

SEQ ID NO: 403514 - RNA, 32 nt, Human
cugccguuccaacuugcccaucagagacccgg

SEQ ID NO: 403515 - RNA, 19 nt, Human
cugccguucgccgccggcc

SEQ ID NO: 403516 - RNA, 20 nt, Human
cugccguugggcuccggguc

SEQ ID NO: 403517 - RNA, 19 nt, Human
cugccguugucacaggcca

SEQ ID NO: 403518 - RNA, 32 nt, Human
cugccguuguguuaguggcauccaggucuccg

SEQ ID NO: 403519 - RNA, 20 nt, Human
cugccguuugccacucucca

SEQ ID NO: 403520 - RNA, 23 nt, Human
cugccguuugccacucuccagca

SEQ ID NO: 403521 - RNA, 22 nt, Human
cugccguuugccgcugccggcc

SEQ ID NO: 403522 - RNA, 32 nt, Human
cugccuaaaguccucaaucagccucuccaacu

SEQ ID NO: 403523 - RNA, 32 nt, Human
cugccuaacagugccucacaaggcuugggggc

SEQ ID NO: 403524 - RNA, 32 nt, Human
cugccuaacauggugaaaccccgucuccacua

SEQ ID NO: 403525 - RNA, 32 nt, Human
cugccuaagacugucuuaccuuauguuaagga

SEQ ID NO: 403526 - RNA, 32 nt, Human
cugccuaaggacuucuuuaauuuuggaauuuu

SEQ ID NO: 403527 - RNA, 32 nt, Human
cugccuaaggguggugaugguggggagugguu

SEQ ID NO: 403528 - RNA, 19 nt, Human
cugccuaaggucagcauca

SEQ ID NO: 403529 - RNA, 32 nt, Human
cugccuaauuuucucacccacauucgcugaag

SEQ ID NO: 403530 - RNA, 32 nt, Human
cugccuacacccagguaucuuucacagccagu

SEQ ID NO: 403531 - RNA, 32 nt, Human
cugccuacagagugccuggcacuugggacuuc

SEQ ID NO: 403532 - RNA, 32 nt, Human
cugccuaccugaggagcuuucuuuggaaacca

SEQ ID NO: 403533 - RNA, 20 nt, Human
cugccuaccugccugagcca

SEQ ID NO: 403534 - RNA, 32 nt, Human
cugccuacgaugugccugggggccugggcuga

SEQ ID NO: 403535 - RNA, 32 nt, Human
cugccuagcaagugaagaucuguugagaaacu

SEQ ID NO: 403536 - RNA, 19 nt, Human
cugccuagccaggcuggca

SEQ ID NO: 403537 - RNA, 32 nt, Human
cugccuagccugggcuggaguccuugcuuugc

SEQ ID NO: 403538 - RNA, 32 nt, Human
cugccuaggaugacgcugcggcuucugguggc

SEQ ID NO: 403539 - RNA, 20 nt, Human
cugccuaggcauccagcuca

SEQ ID NO: 403540 - RNA, 32 nt, Human
cugccuaggccgcagcagcauuuccuuccuaa

SEQ ID NO: 403541 - RNA, 20 nt, Human
cugccuaggugccugugcug

SEQ ID NO: 403542 - RNA, 32 nt, Human
cugccuauagccccagcuacuugggaggcuga

SEQ ID NO: 403543 - RNA, 32 nt, Human
cugccuaucacacgcagccaucagcccacaaa

SEQ ID NO: 403544 - RNA, 23 nt, Human
cugccuaucugaggaccuguacc

SEQ ID NO: 403545 - RNA, 32 nt, Human
cugccuaucuggaccccugccuagguggaugg

SEQ ID NO: 403546 - RNA, 32 nt, Human
cugccuaucuucugccuuucacuugcauccaa

SEQ ID NO: 403547 - RNA, 32 nt, Human
cugccuaugauguugaggaaguucuauaaguu

SEQ ID NO: 403548 - RNA, 32 nt, Human
cugccuauuacuguauucucuacuucuaaaua

SEQ ID NO: 403549 - RNA, 20 nt, Human
cugccuauugcagagcagca

SEQ ID NO: 403550 - RNA, 32 nt, Human
cugccuauugggaagaacauggcuucaaggau

SEQ ID NO: 403551 - RNA, 32 nt, Human
cugccucaaaccaccccucccccagaugguac

SEQ ID NO: 403552 - RNA, 32 nt, Human
cugccucaacaucuaucucugcugccaaugua

SEQ ID NO: 403553 - RNA, 32 nt, Human
cugccucaacaucuuccgagugggcuacgaug

SEQ ID NO: 403554 - RNA, 22 nt, Human
cugccucaacucugucuccagg

SEQ ID NO: 403555 - RNA, 32 nt, Human
cugccucaagaaggggcucagagcagagacuu

SEQ ID NO: 403556 - RNA, 32 nt, Human
cugccucaagcagauaagguggaauccacaac

SEQ ID NO: 403557 - RNA, 23 nt, Human
cugccucaaggucccucccgagg

SEQ ID NO: 403558 - RNA, 32 nt, Human
cugccucacaacaaccuccuuggacucagcuu

SEQ ID NO: 403559 - RNA, 24 nt, Human
cugccucacaacagccuccacagg

SEQ ID NO: 403560 - RNA, 32 nt, Human
cugccucacaacauggcaaguacaguacuuug

SEQ ID NO: 403561 - RNA, 23 nt, Human
cugccucacacagccucuucagg

SEQ ID NO: 403562 - RNA, 24 nt, Human
cugccucacacuggccucucuagg

SEQ ID NO: 403563 - RNA, 22 nt, Human
cugccucacagcagacucucca

SEQ ID NO: 403564 - RNA, 22 nt, Human
cugccucacagcggacucucca

SEQ ID NO: 403565 - RNA, 32 nt, Human
cugccucacagcugugcgagcucugcccuccu

SEQ ID NO: 403566 - RNA, 32 nt, Human
cugccucacagcuuuaucuuuguauuugcccc

SEQ ID NO: 403567 - RNA, 23 nt, Human
cugccucacaguggacccuccag

SEQ ID NO: 403568 - RNA, 32 nt, Human
cugccucaccaucauccucccuuccucaucau

SEQ ID NO: 403569 - RNA, 21 nt, Human
cugccucaccgucugccuugc

SEQ ID NO: 403570 - RNA, 31 nt, Human
cugccucaccucucugggccaguuuccccau

SEQ ID NO: 403571 - RNA, 32 nt, Human
cugccucaccuugccgcugggagcccaggcuc

SEQ ID NO: 403572 - RNA, 18 nt, Human
cugccucacucccgagcu

SEQ ID NO: 403573 - RNA, 32 nt, Human
cugccucacucgccuuccgccugcuggacgcu

SEQ ID NO: 403574 - RNA, 32 nt, Human
cugccucacugcaccugccaaggcugcccugg

SEQ ID NO: 403575 - RNA, 19 nt, Human
cugccucacugcugggcca

SEQ ID NO: 403576 - RNA, 32 nt, Human
cugccucacuugcuuccgccuccuggacaaua

SEQ ID NO: 403577 - RNA, 32 nt, Human
cugccucagaacugucucuccugggcccagca

SEQ ID NO: 403578 - RNA, 32 nt, Human
cugccucagacuccugaguaucugggaccaca

SEQ ID NO: 403579 - RNA, 32 nt, Human
cugccucagaucuccuaccucuccuuaagucu

SEQ ID NO: 403580 - RNA, 22 nt, Human
cugccucagcauccaccccgca

SEQ ID NO: 403581 - RNA, 21 nt, Human
cugccucagccacgcuuucca

SEQ ID NO: 403582 - RNA, 32 nt, Human
cugccucagccaguggcacaggagacuccaag

SEQ ID NO: 403583 - RNA, 21 nt, Human
cugccucagcccagcucugca

SEQ ID NO: 403584 - RNA, 20 nt, Human
cugccucagccccacuccag

SEQ ID NO: 403585 - RNA, 27 nt, Human
cugccucagccgggguccgucuuagca

SEQ ID NO: 403586 - RNA, 24 nt, Human
cugccucagccucccaagcuuuca

SEQ ID NO: 403587 - RNA, 20 nt, Human
cugccucagccuccuaaagu

SEQ ID NO: 403588 - RNA, 32 nt, Human
cugccucagccuccuauauagcagagaacaga

SEQ ID NO: 403589 - RNA, 20 nt, Human
cugccucagccugcugagua

SEQ ID NO: 403590 - RNA, 24 nt, Human
cugccucagccuuugcacauggua

SEQ ID NO: 403591 - RNA, 32 nt, Human
cugccucagcuacucaagaggcugaggcagga

SEQ ID NO: 403592 - RNA, 32 nt, Human
cugccucagcuacucaggaggcugagguagua

SEQ ID NO: 403593 - RNA, 32 nt, Human
cugccucagcuacucgggaggcugaggcaaga

SEQ ID NO: 403594 - RNA, 20 nt, Human
cugccucagcuccauuuugc

SEQ ID NO: 403595 - RNA, 21 nt, Human
cugccucagcuccugucuugc

SEQ ID NO: 403596 - RNA, 32 nt, Human
cugccucagcucucacagcagugucuuccccg

SEQ ID NO: 403597 - RNA, 32 nt, Human
cugccucagcugugaucucugcaugucuaaca

SEQ ID NO: 403598 - RNA, 32 nt, Human
cugccucagcuguguggccaugugggggcagc

SEQ ID NO: 403599 - RNA, 32 nt, Human
cugccucaggagaaagaauagucuucauguuu

SEQ ID NO: 403600 - RNA, 26 nt, Human
cugccucaggcuccaaaauugcucag

SEQ ID NO: 403601 - RNA, 32 nt, Human
cugccucagggugcaaaugccaaccaagauuc

SEQ ID NO: 403602 - RNA, 18 nt, Human
cugccucagucugggcca

SEQ ID NO: 403603 - RNA, 24 nt, Human
cugccucagucuuuucugacuggc

SEQ ID NO: 403604 - RNA, 32 nt, Human
cugccucaguuaccuuacuuugcccauggguc

SEQ ID NO: 403605 - RNA, 32 nt, Human
cugccucauccucugugccugauagcccuggu

SEQ ID NO: 403606 - RNA, 20 nt, Human
cugccucauccugccuuagu

SEQ ID NO: 403607 - RNA, 32 nt, Human
cugccucaugcagucugacccacccagugagg

SEQ ID NO: 403608 - RNA, 32 nt, Human
cugccucaugccacuauuguggaucaccggcc

SEQ ID NO: 403609 - RNA, 32 nt, Human
cugccucauugccaccuccaccugcaggaagg

SEQ ID NO: 403610 - RNA, 32 nt, Human
cugccucauugucuuguuagaucucugcuuag

SEQ ID NO: 403611 - RNA, 32 nt, Human
cugccuccaaagugcugggauuacaggcccga

SEQ ID NO: 403612 - RNA, 32 nt, Human
cugccuccaaggacacagaaggaugccaguug

SEQ ID NO: 403613 - RNA, 32 nt, Human
cugccuccaccacccccaucuacugauagcca

SEQ ID NO: 403614 - RNA, 32 nt, Human
cugccuccacccuccuccucuucaccaggugc

SEQ ID NO: 403615 - RNA, 32 nt, Human
cugccuccagaagagaugcagagagcuguggg

SEQ ID NO: 403616 - RNA, 18 nt, Human
cugccuccagggcuccug

SEQ ID NO: 403617 - RNA, 32 nt, Human
cugccuccauccugguuuccccaaagccccag

SEQ ID NO: 403618 - RNA, 32 nt, Human
cugccuccaucuuuccaagcaccggggcgaaa

SEQ ID NO: 403619 - RNA, 32 nt, Human
cugccucccaaggugcuggauuacagguguaa

SEQ ID NO: 403620 - RNA, 32 nt, Human
cugccucccacggaaaagauaaggucuucuga

SEQ ID NO: 403621 - RNA, 32 nt, Human
cugccucccacugacccagacccacuuccucc

SEQ ID NO: 403622 - RNA, 21 nt, Human
cugccucccagaacugugaca

SEQ ID NO: 403623 - RNA, 32 nt, Human
cugccucccagagcaaggcuccugucacucca

SEQ ID NO: 403624 - RNA, 24 nt, Human
cugccucccagccuucucuccagg

SEQ ID NO: 403625 - RNA, 32 nt, Human
cugccucccagcucaguauuuaaacaucaucu

SEQ ID NO: 403626 - RNA, 18 nt, Human
cugccucccaggcaggug

SEQ ID NO: 403627 - RNA, 32 nt, Human
cugccucccaggggcauuuccaugacuugcag

SEQ ID NO: 403628 - RNA, 32 nt, Human
cugccucccaucuggcccuuuggacaacuggc

SEQ ID NO: 403629 - RNA, 32 nt, Human
cugccuccccaaagugcugggauuacaggcgu

SEQ ID NO: 403630 - RNA, 32 nt, Human
cugccuccccacccuccccauggcccacccau

SEQ ID NO: 403631 - RNA, 18 nt, Human
cugccuccccagcaugcu

SEQ ID NO: 403632 - RNA, 31 nt, Human
cugccuccccaguuguccacagcaggggccu

SEQ ID NO: 403633 - RNA, 18 nt, Human
cugccuccccauuccuug

SEQ ID NO: 403634 - RNA, 19 nt, Human
cugccucccccaguccuua

SEQ ID NO: 403635 - RNA, 32 nt, Human
cugccuccccucccccgacccuccugccuucc

SEQ ID NO: 403636 - RNA, 32 nt, Human
cugccuccccuccucagaaugccagcaacaac

SEQ ID NO: 403637 - RNA, 32 nt, Human
cugccuccccuccucccguccaccccagaggg

SEQ ID NO: 403638 - RNA, 32 nt, Human
cugccuccccugcagccagggucugggcaggg

SEQ ID NO: 403639 - RNA, 31 nt, Human
cugccuccccuuccucgcccuguguccucuc

SEQ ID NO: 403640 - RNA, 32 nt, Human
cugccuccccuuccucuucuuguuuuggugaa

SEQ ID NO: 403641 - RNA, 16 nt, Human
cugccuccccuuccuu

SEQ ID NO: 403642 - RNA, 32 nt, Human
cugccuccccuucucccugccuccagaauguu

SEQ ID NO: 403643 - RNA, 32 nt, Human
cugccucccgauggaagaucugauggacgugg

SEQ ID NO: 403644 - RNA, 21 nt, Human
cugccucccggcacuguggca

SEQ ID NO: 403645 - RNA, 32 nt, Human
cugccucccuaaguugcugggauuacaggugu

SEQ ID NO: 403646 - RNA, 21 nt, Human
cugccucccucccagcuugca

SEQ ID NO: 403647 - RNA, 32 nt, Human
cugccucccuccggcagcaccagcacgaguga

SEQ ID NO: 403648 - RNA, 32 nt, Human
cugccucccuccuuuccaucuuggugucuucc

SEQ ID NO: 403649 - RNA, 32 nt, Human
cugccucccucugcugucaccuugcucagcca

SEQ ID NO: 403650 - RNA, 32 nt, Human
cugccucccugaaacccaucagccuggauggu

SEQ ID NO: 403651 - RNA, 32 nt, Human
cugccucccugccugcuucgcccuggacucgu

SEQ ID NO: 403652 - RNA, 32 nt, Human
cugccucccuggccuccauccaugcagacaag

SEQ ID NO: 403653 - RNA, 18 nt, Human
cugccucccugggauuuu

SEQ ID NO: 403654 - RNA, 32 nt, Human
cugccucccuuaccccuccccuccacuucgcu

SEQ ID NO: 403655 - RNA, 32 nt, Human
cugccucccuucuuauucuuccuugcugcacg

SEQ ID NO: 403656 - RNA, 32 nt, Human
cugccucccuuucuuccuuccuuuuuaaaauu

SEQ ID NO: 403657 - RNA, 26 nt, Human
cugccucccuuucuuucugccuuuca

SEQ ID NO: 403658 - RNA, 32 nt, Human
cugccuccgaguagcugggacuacagguguga

SEQ ID NO: 403659 - RNA, 32 nt, Human
cugccuccgccacccuccuggaauauggccua

SEQ ID NO: 403660 - RNA, 32 nt, Human
cugccuccgccagccugugagcuguuuccaug

SEQ ID NO: 403661 - RNA, 32 nt, Human
cugccuccgcccguguguccgucaagggugcc

SEQ ID NO: 403662 - RNA, 21 nt, Human
cugccuccgucgcggcuccug

SEQ ID NO: 403663 - RNA, 32 nt, Human
cugccuccguuucccuagcccugggccugugc

SEQ ID NO: 403664 - RNA, 32 nt, Human
cugccuccuaaagugcugggauucugggccuu

SEQ ID NO: 403665 - RNA, 32 nt, Human
cugccuccuaggcuggaagccauggucccgaa

SEQ ID NO: 403666 - RNA, 32 nt, Human
cugccuccucaagugggucccugaucuccaag

SEQ ID NO: 403667 - RNA, 32 nt, Human
cugccuccucaguucugcaaguaguuuaguag

SEQ ID NO: 403668 - RNA, 18 nt, Human
cugccuccuccacucagc

SEQ ID NO: 403669 - RNA, 19 nt, Human
cugccuccucccugcucua

SEQ ID NO: 403670 - RNA, 32 nt, Human
cugccuccucccuugaccacagccugguuuac

SEQ ID NO: 403671 - RNA, 32 nt, Human
cugccuccucccuuuucccuccccacauuuug

SEQ ID NO: 403672 - RNA, 32 nt, Human
cugccuccuccucccuuucucccuugugggga

SEQ ID NO: 403673 - RNA, 32 nt, Human
cugccuccuccuccuccaccugcucuccuccc

SEQ ID NO: 403674 - RNA, 32 nt, Human
cugccuccuccuccuccucuuggcucuauugg

SEQ ID NO: 403675 - RNA, 32 nt, Human
cugccuccuccuggcugaagcuguuugucagg

SEQ ID NO: 403676 - RNA, 21 nt, Human
cugccuccucuaaggcaggug

SEQ ID NO: 403677 - RNA, 32 nt, Human
cugccuccucuaccccaggaggcucuuaucuc

SEQ ID NO: 403678 - RNA, 32 nt, Human
cugccuccucuccaguggugaagacccagccu

SEQ ID NO: 403679 - RNA, 25 nt, Human
cugccuccucuccccaccagcacca

SEQ ID NO: 403680 - RNA, 18 nt, Human
cugccuccucuccugcaa

SEQ ID NO: 403681 - RNA, 32 nt, Human
cugccuccugaaggaagcccuccuggacugcu

SEQ ID NO: 403682 - RNA, 32 nt, Human
cugccuccugcaagguggaggguggggcuugg

SEQ ID NO: 403683 - RNA, 32 nt, Human
cugccuccugcaggaugacuuagaaaucuagu

SEQ ID NO: 403684 - RNA, 19 nt, Human
cugccuccugccggcuccu

SEQ ID NO: 403685 - RNA, 32 nt, Human
cugccuccugccuccccugccugccuccugcc

SEQ ID NO: 403686 - RNA, 32 nt, Human
cugccuccugccuccccugccugccugggacc

SEQ ID NO: 403687 - RNA, 24 nt, Human
cugccuccugccuuuucuuuugua

SEQ ID NO: 403688 - RNA, 32 nt, Human
cugccuccuggaacuccuggcucaaucgaucc

SEQ ID NO: 403689 - RNA, 22 nt, Human
cugccuccuggccagcugccca

SEQ ID NO: 403690 - RNA, 32 nt, Human
cugccuccuggccucaggaucucccuggggca

SEQ ID NO: 403691 - RNA, 32 nt, Human
cugccuccugggagaaggagcuuucaaggagu

SEQ ID NO: 403692 - RNA, 32 nt, Human
cugccuccugggagcccagaacuugcaguaac

SEQ ID NO: 403693 - RNA, 32 nt, Human
cugccuccugggcuauuccucuccacccagaa

SEQ ID NO: 403694 - RNA, 20 nt, Human
cugccuccuucacauuuccu

SEQ ID NO: 403695 - RNA, 19 nt, Human
cugccuccuuccugagcca

SEQ ID NO: 403696 - RNA, 32 nt, Human
cugccuccuugccucccugccucccucccucc

SEQ ID NO: 403697 - RNA, 17 nt, Human
cugccuccuuucuucug

SEQ ID NO: 403698 - RNA, 32 nt, Human
cugccuccuuugagggacugggggacuugggg

SEQ ID NO: 403699 - RNA, 32 nt, Human
cugccucgagguuaugaucuagcaccagcauu

SEQ ID NO: 403700 - RNA, 22 nt, Human
cugccucgcaauugccuuugua

SEQ ID NO: 403701 - RNA, 19 nt, Human
cugccucgcgcccguagcc

SEQ ID NO: 403702 - RNA, 18 nt, Human
cugccucggaggcugcug

SEQ ID NO: 403703 - RNA, 32 nt, Human
cugccucggcaaccccgggcccugagggcagg

SEQ ID NO: 403704 - RNA, 24 nt, Human
cugccucggccuugcgccugugua

SEQ ID NO: 403705 - RNA, 32 nt, Human
cugccucggccuuucaaagugcugggauuaca

SEQ ID NO: 403706 - RNA, 32 nt, Human
cugccucgggcagaggagggcuacccuggggc

SEQ ID NO: 403707 - RNA, 23 nt, Human
cugccucggggccaccccuugca

SEQ ID NO: 403708 - RNA, 32 nt, Human
cugccucggggcgcagcgcugaggucacccug

SEQ ID NO: 403709 - RNA, 32 nt, Human
cugccucgugagccucccagagcccaggccuc

SEQ ID NO: 403710 - RNA, 32 nt, Human
cugccucuaagcugcucuaaaguccagacuau

SEQ ID NO: 403711 - RNA, 32 nt, Human
cugccucuacccaaccagggccccggggccug

SEQ ID NO: 403712 - RNA, 32 nt, Human
cugccucuacugucucuccauagcccuggugg

SEQ ID NO: 403713 - RNA, 32 nt, Human
cugccucuagcugagugccuccuggguuuccu

SEQ ID NO: 403714 - RNA, 32 nt, Human
cugccucuaguccccaaggccucucucugccu

SEQ ID NO: 403715 - RNA, 32 nt, Human
cugccucuagugcagaccagagccuugcagag

SEQ ID NO: 403716 - RNA, 32 nt, Human
cugccucucaaaggccugcacgggccuggccu

SEQ ID NO: 403717 - RNA, 32 nt, Human
cugccucucaacaaccucuuuggacucagugc

SEQ ID NO: 403718 - RNA, 32 nt, Human
cugccucuccacugcuagauggaaccuggaau

SEQ ID NO: 403719 - RNA, 32 nt, Human
cugccucucccuaacacaggaguuggagggag

SEQ ID NO: 403720 - RNA, 32 nt, Human
cugccucucccugggcucugcagccauggcaa

SEQ ID NO: 403721 - RNA, 32 nt, Human
cugccucuccgccaccuccaccgcggcuuauc

SEQ ID NO: 403722 - RNA, 32 nt, Human
cugccucuccucucugggacaggcugggaccu

SEQ ID NO: 403723 - RNA, 32 nt, Human
cugccucuccugggcauggcuguuagcuguuc

SEQ ID NO: 403724 - RNA, 32 nt, Human
cugccucucucccaacauguuuccagcaagua

SEQ ID NO: 403725 - RNA, 32 nt, Human
cugccucucuggggagaugcuggaggucucgg

SEQ ID NO: 403726 - RNA, 32 nt, Human
cugccucucuucaaccccacaggccagagugc

SEQ ID NO: 403727 - RNA, 18 nt, Human
cugccucucuuccgaguc

SEQ ID NO: 403728 - RNA, 32 nt, Human
cugccucugcacccccucccacccccagcaca

SEQ ID NO: 403729 - RNA, 32 nt, Human
cugccucugcccacccuuccccaggccucugc

SEQ ID NO: 403730 - RNA, 19 nt, Human
cugccucugcccugggcca

SEQ ID NO: 403731 - RNA, 32 nt, Human
cugccucugccucauauucuuguuaggccagg

SEQ ID NO: 403732 - RNA, 32 nt, Human
cugccucugccucuacuaacuuccuuugucuc

SEQ ID NO: 403733 - RNA, 32 nt, Human
cugccucugccugggcugcagccgcacuaagc

SEQ ID NO: 403734 - RNA, 20 nt, Human
cugccucugccuggggucuu

SEQ ID NO: 403735 - RNA, 32 nt, Human
cugccucugcuccucugcccuucuuauagcca

SEQ ID NO: 403736 - RNA, 32 nt, Human
cugccucugcugcacacacaggcaccagcagg

SEQ ID NO: 403737 - RNA, 32 nt, Human
cugccucugcugccccauaccccacacacuca

SEQ ID NO: 403738 - RNA, 22 nt, Human
cugccucugcuuccagcuuugu

SEQ ID NO: 403739 - RNA, 23 nt, Human
cugccucugcuuccagcuuugua

SEQ ID NO: 403740 - RNA, 19 nt, Human
cugccucugcuugcugcug

SEQ ID NO: 403741 - RNA, 32 nt, Human
cugccucugggaacugggacagugggagagac

SEQ ID NO: 403742 - RNA, 32 nt, Human
cugccucugggagcuuuggcgucugugacuaa

SEQ ID NO: 403743 - RNA, 32 nt, Human
cugccucuggggaagagagggaagagaaagca

SEQ ID NO: 403744 - RNA, 32 nt, Human
cugccucuggggcuuuucugaagaaacccacc

SEQ ID NO: 403745 - RNA, 32 nt, Human
cugccucuggggucgagggucuggguggaagg

SEQ ID NO: 403746 - RNA, 21 nt, Human
cugccucugguuccugcauca

SEQ ID NO: 403747 - RNA, 32 nt, Human
cugccucuguaggcuccaccucugggggcagg

SEQ ID NO: 403748 - RNA, 32 nt, Human
cugccucugucgcccaggcuggagugcagugg

SEQ ID NO: 403749 - RNA, 21 nt, Human
cugccucuguucucagcguca

SEQ ID NO: 403750 - RNA, 32 nt, Human
cugccucuuaagucucaugcugccucacauag

SEQ ID NO: 403751 - RNA, 32 nt, Human
cugccucuuacccguaaaaccccaacuucucu

SEQ ID NO: 403752 - RNA, 25 nt, Human
cugccucuuagacuucugcuuucca

SEQ ID NO: 403753 - RNA, 32 nt, Human
cugccucuuccucgacguucucuccccuucuc

SEQ ID NO: 403754 - RNA, 32 nt, Human
cugccucuuccugccucuccccacccugccca

SEQ ID NO: 403755 - RNA, 31 nt, Human
cugccucuucggcugccuguguuuaaccucc

SEQ ID NO: 403756 - RNA, 32 nt, Human
cugccucuucggcugccuguguuuaaccucca

SEQ ID NO: 403757 - RNA, 32 nt, Human
cugccucuucuccccacccauccuggcgggcg

SEQ ID NO: 403758 - RNA, 19 nt, Human
cugccucuucugcaagcua

SEQ ID NO: 403759 - RNA, 32 nt, Human
cugccucuuucccuccuccucucccucccucc

SEQ ID NO: 403760 - RNA, 21 nt, Human
cugccucuuucuccuuuccag

SEQ ID NO: 403761 - RNA, 32 nt, Human
cugccucuuuuccaacucuucuuccaacacaa

SEQ ID NO: 403762 - RNA, 27 nt, Human
cugccucuuuucuccugucccuccagg

SEQ ID NO: 403763 - RNA, 32 nt, Human
cugccugaacccaggaggcagagguugcggug

SEQ ID NO: 403764 - RNA, 32 nt, Human
cugccugaagagcagaggugaggaccugggac

SEQ ID NO: 403765 - RNA, 32 nt, Human
cugccugaauguaaccugcuagcucuccgaag

SEQ ID NO: 403766 - RNA, 22 nt, Human
cugccugacaaggucagcauca

SEQ ID NO: 403767 - RNA, 32 nt, Human
cugccugacacugagccccaccucuccaaguc

SEQ ID NO: 403768 - RNA, 32 nt, Human
cugccugacagugacaaugacaucccaguuac

SEQ ID NO: 403769 - RNA, 32 nt, Human
cugccugaccaacaugcugaaacccagucucu

SEQ ID NO: 403770 - RNA, 32 nt, Human
cugccugaccaacauggugaaaccccgucucu

SEQ ID NO: 403771 - RNA, 32 nt, Human
cugccugacccaccucagagccugcuuugcau

SEQ ID NO: 403772 - RNA, 22 nt, Human
cugccugacccacuguugcaga

SEQ ID NO: 403773 - RNA, 18 nt, Human
cugccugacuccuuggag

SEQ ID NO: 403774 - RNA, 32 nt, Human
cugccugacuuaggagucagagcccggcaggg

SEQ ID NO: 403775 - RNA, 17 nt, Human
cugccugagagcaggug

SEQ ID NO: 403776 - RNA, 32 nt, Human
cugccugagccaaacccagucuugucaauagc

SEQ ID NO: 403777 - RNA, 32 nt, Human
cugccugagcuuccuuccccagcuuugcugcc

SEQ ID NO: 403778 - RNA, 32 nt, Human
cugccugaggagcuccaggccugggugcggga

SEQ ID NO: 403779 - RNA, 32 nt, Human
cugccugaguagcugggacuacaggcaugcac

SEQ ID NO: 403780 - RNA, 20 nt, Human
cugccugagucccucgagcc

SEQ ID NO: 403781 - RNA, 32 nt, Human
cugccugauccugccccugccugaccccgcca

SEQ ID NO: 403782 - RNA, 32 nt, Human
cugccugauggugccugugcuugggggagcuu

SEQ ID NO: 403783 - RNA, 32 nt, Human
cugccugcaccccgguccucagccugggcucc

SEQ ID NO: 403784 - RNA, 32 nt, Human
cugccugcacccugcccauggggaagauugua

SEQ ID NO: 403785 - RNA, 21 nt, Human
cugccugcaccuuccugcggc

SEQ ID NO: 403786 - RNA, 20 nt, Human
cugccugcacucccuggccu

SEQ ID NO: 403787 - RNA, 22 nt, Human
cugccugcacugcgguugucca

SEQ ID NO: 403788 - RNA, 32 nt, Human
cugccugcacuuccgcagccagcacgcuccac

SEQ ID NO: 403789 - RNA, 32 nt, Human
cugccugcagaagucccaagacccuagugaaa

SEQ ID NO: 403790 - RNA, 32 nt, Human
cugccugcagaggcgcccuuuucagcugcugc

SEQ ID NO: 403791 - RNA, 19 nt, Human
cugccugcagccugggcca

SEQ ID NO: 403792 - RNA, 32 nt, Human
cugccugccaauggcccugaauccagcuuagg

SEQ ID NO: 403793 - RNA, 23 nt, Human
cugccugccagcggccugcccug

SEQ ID NO: 403794 - RNA, 23 nt, Human
cugccugccagcuucugccuuca

SEQ ID NO: 403795 - RNA, 32 nt, Human
cugccugcccacaucccugccuccuggaaucc

SEQ ID NO: 403796 - RNA, 19 nt, Human
cugccugcccaccccgugc

SEQ ID NO: 403797 - RNA, 20 nt, Human
cugccugcccagacuagcug

SEQ ID NO: 403798 - RNA, 19 nt, Human
cugccugcccagccaugcu

SEQ ID NO: 403799 - RNA, 23 nt, Human
cugccugcccagucccuucacug

SEQ ID NO: 403800 - RNA, 22 nt, Human
cugccugcccaucucagugcug

SEQ ID NO: 403801 - RNA, 19 nt, Human
cugccugccccacauuucc

SEQ ID NO: 403802 - RNA, 20 nt, Human
cugccugccccacugugcug

SEQ ID NO: 403803 - RNA, 32 nt, Human
cugccugcccccgccccugccuccucucgcug

SEQ ID NO: 403804 - RNA, 32 nt, Human
cugccugcccccucccccuucuccugggaccc

SEQ ID NO: 403805 - RNA, 32 nt, Human
cugccugccccugagaugcggaaagggucaga

SEQ ID NO: 403806 - RNA, 20 nt, Human
cugccugcccgccaccgugc

SEQ ID NO: 403807 - RNA, 32 nt, Human
cugccugcccgcccgcucacacgcucacccgc

SEQ ID NO: 403808 - RNA, 23 nt, Human
cugccugcccuccagacugucug

SEQ ID NO: 403809 - RNA, 23 nt, Human
cugccugcccucugccgaugcug

SEQ ID NO: 403810 - RNA, 32 nt, Human
cugccugcccugccccuccagggggccaugag

SEQ ID NO: 403811 - RNA, 22 nt, Human
cugccugcccugcccugugcug

SEQ ID NO: 403812 - RNA, 32 nt, Human
cugccugcccugccuacugagaagacuaccgg

SEQ ID NO: 403813 - RNA, 21 nt, Human
cugccugcccuggccuugcug

SEQ ID NO: 403814 - RNA, 19 nt, Human
cugccugcccuguccuucc

SEQ ID NO: 403815 - RNA, 19 nt, Human
cugccugcccuucuaggaa

SEQ ID NO: 403816 - RNA, 32 nt, Human
cugccugccgccgccgccuccaccauuguaua

SEQ ID NO: 403817 - RNA, 22 nt, Human
cugccugccgccugccugccug

SEQ ID NO: 403818 - RNA, 32 nt, Human
cugccugccgcugcaccugccugccgcugcag

SEQ ID NO: 403819 - RNA, 24 nt, Human
cugccugccggggguuccugcagc

SEQ ID NO: 403820 - RNA, 32 nt, Human
cugccugccuccaugggaucugucuuuauauu

SEQ ID NO: 403821 - RNA, 23 nt, Human
cugccugccucccucccugucug

SEQ ID NO: 403822 - RNA, 32 nt, Human
cugccugccuccgucucuuucucccucagauc

SEQ ID NO: 403823 - RNA, 18 nt, Human
cugccugccuccugcagg

SEQ ID NO: 403824 - RNA, 32 nt, Human
cugccugccucggggacacuagugacaguaua

SEQ ID NO: 403825 - RNA, 32 nt, Human
cugccugccucuguaggcuccaccucuggggg

SEQ ID NO: 403826 - RNA, 24 nt, Human
cugccugccugcaucacugcacug

SEQ ID NO: 403827 - RNA, 32 nt, Human
cugccugccugccucuccaccacaugcuuuuu

SEQ ID NO: 403828 - RNA, 32 nt, Human
cugccugccugccugccugccugccugccugu

SEQ ID NO: 403829 - RNA, 32 nt, Human
cugccugccugccugccugccugccugucugc

SEQ ID NO: 403830 - RNA, 23 nt, Human
cugccugccugcggccugcccug

SEQ ID NO: 403831 - RNA, 22 nt, Human
cugccugccugcggccugucug

SEQ ID NO: 403832 - RNA, 32 nt, Human
cugccugccuggaaagaugagaacacuguugc

SEQ ID NO: 403833 - RNA, 21 nt, Human
cugccugccuggcccacgcug

SEQ ID NO: 403834 - RNA, 22 nt, Human
cugccugccuugccuuggggca

SEQ ID NO: 403835 - RNA, 32 nt, Human
cugccugcgccugagcagugcugaggagaugc

SEQ ID NO: 403836 - RNA, 21 nt, Human
cugccugcggcgucccugugc

SEQ ID NO: 403837 - RNA, 32 nt, Human
cugccugcgguuuuguguauguguguaugugu

SEQ ID NO: 403838 - RNA, 22 nt, Human
cugccugcuacgcaccgugcug

SEQ ID NO: 403839 - RNA, 32 nt, Human
cugccugcucaagugggucccugaccccugug

SEQ ID NO: 403840 - RNA, 22 nt, Human
cugccugcucaccccugggcug

SEQ ID NO: 403841 - RNA, 21 nt, Human
cugccugcucccauccugugu

SEQ ID NO: 403842 - RNA, 20 nt, Human
cugccugcuccuccuguguu

SEQ ID NO: 403843 - RNA, 21 nt, Human
cugccugcucucccugcguug

SEQ ID NO: 403844 - RNA, 19 nt, Human
cugccugcucugugccgug

SEQ ID NO: 403845 - RNA, 19 nt, Human
cugccugcugcccugacca

SEQ ID NO: 403846 - RNA, 19 nt, Human
cugccugcugcccugagcc

SEQ ID NO: 403847 - RNA, 32 nt, Human
cugccugcugcuauugcaauucccaggaucuc

SEQ ID NO: 403848 - RNA, 32 nt, Human
cugccugcugggagguuaggucggggcugccc

SEQ ID NO: 403849 - RNA, 18 nt, Human
cugccugcuguugagcca

SEQ ID NO: 403850 - RNA, 32 nt, Human
cugccugcuguugcagccuggcuggguuuauu

SEQ ID NO: 403851 - RNA, 32 nt, Human
cugccugcuguuggcaacccuccuggacuagg

SEQ ID NO: 403852 - RNA, 17 nt, Human
cugccugcuucccguaa

SEQ ID NO: 403853 - RNA, 17 nt, Human
cugccugcuucgcccug

SEQ ID NO: 403854 - RNA, 32 nt, Human
cugccugcuucucacccagcugccucggcgcu

SEQ ID NO: 403855 - RNA, 32 nt, Human
cugccugcuucucccaucccugccuucuggcc

SEQ ID NO: 403856 - RNA, 31 nt, Human
cugccugcuucucgccugccugugucugcug

SEQ ID NO: 403857 - RNA, 21 nt, Human
cugccuggaacaccagcagca

SEQ ID NO: 403858 - RNA, 32 nt, Human
cugccuggaaccuggcucgugcugugaccaga

SEQ ID NO: 403859 - RNA, 19 nt, Human
cugccuggaaucaucacca

SEQ ID NO: 403860 - RNA, 21 nt, Human
cugccuggaaucccagcacca

SEQ ID NO: 403861 - RNA, 32 nt, Human
cugccuggaauccgaagguggaggacaggcag

SEQ ID NO: 403862 - RNA, 32 nt, Human
cugccuggacaucagucuggaagcugugcauu

SEQ ID NO: 403863 - RNA, 32 nt, Human
cugccuggacccagaugcucccagaaucaaua

SEQ ID NO: 403864 - RNA, 22 nt, Human
cugccuggacccugggcugcca

SEQ ID NO: 403865 - RNA, 32 nt, Human
cugccuggacccugggcugccagaugcaggaa

SEQ ID NO: 403866 - RNA, 17 nt, Human
cugccuggaccugcagg

SEQ ID NO: 403867 - RNA, 32 nt, Human
cugccuggacuuuugcgauggacucuuugggg

SEQ ID NO: 403868 - RNA, 32 nt, Human
cugccuggagaaaagugucugcuccuagccaa

SEQ ID NO: 403869 - RNA, 32 nt, Human
cugccuggagaagggagagauucagguccucc

SEQ ID NO: 403870 - RNA, 32 nt, Human
cugccuggagaccagugggcccagggggaagg

SEQ ID NO: 403871 - RNA, 32 nt, Human
cugccuggagccaggcacagggacaggucccc

SEQ ID NO: 403872 - RNA, 32 nt, Human
cugccuggagcguuucuagcaagugagagaga

SEQ ID NO: 403873 - RNA, 32 nt, Human
cugccuggagcuguuuaauuuggagcuucccg

SEQ ID NO: 403874 - RNA, 20 nt, Human
cugccuggagcuguuuccau

SEQ ID NO: 403875 - RNA, 32 nt, Human
cugccuggaggcaggaaggagaggcagggcag

SEQ ID NO: 403876 - RNA, 21 nt, Human
cugccuggaggcccugagcca

SEQ ID NO: 403877 - RNA, 32 nt, Human
cugccuggaggcucuguauuugcucccgugga

SEQ ID NO: 403878 - RNA, 32 nt, Human
cugccuggagggcagggagugggagccaauga

SEQ ID NO: 403879 - RNA, 32 nt, Human
cugccuggagugacccugggcggggaccccug

SEQ ID NO: 403880 - RNA, 32 nt, Human
cugccuggagugcugugcuguguuuaaucagg

SEQ ID NO: 403881 - RNA, 32 nt, Human
cugccuggaugaggaccggcagagggaggaag

SEQ ID NO: 403882 - RNA, 32 nt, Human
cugccuggcaacauuuauauuucuuauucaga

SEQ ID NO: 403883 - RNA, 22 nt, Human
cugccuggcaagcccaguauca

SEQ ID NO: 403884 - RNA, 16 nt, Human
cugccuggcaccagca

SEQ ID NO: 403885 - RNA, 18 nt, Human
cugccuggcacugagcca

SEQ ID NO: 403886 - RNA, 18 nt, Human
cugccuggcagaagauca

SEQ ID NO: 403887 - RNA, 32 nt, Human
cugccuggcauuggcccuguggccaucuuccc

SEQ ID NO: 403888 - RNA, 32 nt, Human
cugccuggccaacaugaugaaacccugucucu

SEQ ID NO: 403889 - RNA, 32 nt, Human
cugccuggccaacauggugaaaccccaucucu

SEQ ID NO: 403890 - RNA, 24 nt, Human
cugccuggccaagcagcagcauca

SEQ ID NO: 403891 - RNA, 18 nt, Human
cugccuggcccagguaca

SEQ ID NO: 403892 - RNA, 20 nt, Human
cugccuggcccauagacauc

SEQ ID NO: 403893 - RNA, 20 nt, Human
cugccuggccccuggccauc

SEQ ID NO: 403894 - RNA, 19 nt, Human
cugccuggccccuuaacau

SEQ ID NO: 403895 - RNA, 19 nt, Human
cugccuggcccgcuccauc

SEQ ID NO: 403896 - RNA, 19 nt, Human
cugccuggcccuccccaca

SEQ ID NO: 403897 - RNA, 17 nt, Human
cugccuggcccugcuca

SEQ ID NO: 403898 - RNA, 18 nt, Human
cugccuggcccugggcca

SEQ ID NO: 403899 - RNA, 17 nt, Human
cugccuggccgcccauc

SEQ ID NO: 403900 - RNA, 20 nt, Human
cugccuggccucuagcuuca

SEQ ID NO: 403901 - RNA, 30 nt, Human
cugccuggccucucccucgugcuccucaag

SEQ ID NO: 403902 - RNA, 30 nt, Human
cugccuggccucuccucacuccuggcaccc

SEQ ID NO: 403903 - RNA, 18 nt, Human
cugccuggccucugcuca

SEQ ID NO: 403904 - RNA, 20 nt, Human
cugccuggccuucagcccca

SEQ ID NO: 403905 - RNA, 17 nt, Human
cugccuggccuugagcc

SEQ ID NO: 403906 - RNA, 19 nt, Human
cugccuggcgcucuggcca

SEQ ID NO: 403907 - RNA, 32 nt, Human
cugccuggcgggccccaugcacccaacggcgc

SEQ ID NO: 403908 - RNA, 22 nt, Human
cugccuggcuagucccugccug

SEQ ID NO: 403909 - RNA, 17 nt, Human
cugccuggcucagccuc

SEQ ID NO: 403910 - RNA, 20 nt, Human
cugccuggcucccacacagc

SEQ ID NO: 403911 - RNA, 21 nt, Human
cugccuggcucccuaggaauc

SEQ ID NO: 403912 - RNA, 21 nt, Human
cugccuggcucccugucuuca

SEQ ID NO: 403913 - RNA, 22 nt, Human
cugccuggcucccugucuucau

SEQ ID NO: 403914 - RNA, 23 nt, Human
cugccuggcucccuuucucagca

SEQ ID NO: 403915 - RNA, 18 nt, Human
cugccuggcuccggcauc

SEQ ID NO: 403916 - RNA, 19 nt, Human
cugccuggcuccugcccca

SEQ ID NO: 403917 - RNA, 32 nt, Human
cugccuggcuccugccccaagugccuugcuuu

SEQ ID NO: 403918 - RNA, 19 nt, Human
cugccuggcucugauauca

SEQ ID NO: 403919 - RNA, 32 nt, Human
cugccuggcugacugccuugcuagaaacauaa

SEQ ID NO: 403920 - RNA, 21 nt, Human
cugccuggcugacuuacagca

SEQ ID NO: 403921 - RNA, 19 nt, Human
cugccuggcugagcacauc

SEQ ID NO: 403922 - RNA, 19 nt, Human
cugccuggcugcgagcaca

SEQ ID NO: 403923 - RNA, 21 nt, Human
cugccuggcuggcuccgggcc

SEQ ID NO: 403924 - RNA, 20 nt, Human
cugccuggcuguccugccca

SEQ ID NO: 403925 - RNA, 21 nt, Human
cugccuggcuucaaagcuuca

SEQ ID NO: 403926 - RNA, 32 nt, Human
cugccugggaaacaggcuucauucagcacagc

SEQ ID NO: 403927 - RNA, 32 nt, Human
cugccugggaacacgugugcacaugcgcacuc

SEQ ID NO: 403928 - RNA, 32 nt, Human
cugccugggaaccugggcugugaguccugcuc

SEQ ID NO: 403929 - RNA, 24 nt, Human
cugccugggacuuccccagcauua

SEQ ID NO: 403930 - RNA, 17 nt, Human
cugccugggcagcaaca

SEQ ID NO: 403931 - RNA, 32 nt, Human
cugccugggcaggccauguuggggagacucca

SEQ ID NO: 403932 - RNA, 32 nt, Human
cugccugggcaguucuagggcuggagggcagg

SEQ ID NO: 403933 - RNA, 18 nt, Human
cugccugggcccagcauc

SEQ ID NO: 403934 - RNA, 32 nt, Human
cugccugggcccucccugucgucccaaagccc

SEQ ID NO: 403935 - RNA, 32 nt, Human
cugccuggggaacugugaggccagcuauauca

SEQ ID NO: 403936 - RNA, 20 nt, Human
cugccuggggaggcaaauca

SEQ ID NO: 403937 - RNA, 32 nt, Human
cugccuggggcccaaguugcagugagcagggu

SEQ ID NO: 403938 - RNA, 22 nt, Human
cugccuggggccucggcugccu

SEQ ID NO: 403939 - RNA, 32 nt, Human
cugccuggggcuggcccugcucagacaaaucu

SEQ ID NO: 403940 - RNA, 32 nt, Human
cugccugggucagauaguggccagcaggccag

SEQ ID NO: 403941 - RNA, 20 nt, Human
cugccugggucuucagcuca

SEQ ID NO: 403942 - RNA, 32 nt, Human
cugccuggguguuacauggcccagggaaccca

SEQ ID NO: 403943 - RNA, 18 nt, Human
cugccuggucaaccauca

SEQ ID NO: 403944 - RNA, 32 nt, Human
cugccuggucagaacaagccccgaggugcaga

SEQ ID NO: 403945 - RNA, 17 nt, Human
cugccuggugagcauca

SEQ ID NO: 403946 - RNA, 19 nt, Human
cugccuggugcccagcaca

SEQ ID NO: 403947 - RNA, 32 nt, Human
cugccugguggagggagccgugggcgugggga

SEQ ID NO: 403948 - RNA, 32 nt, Human
cugccugguguguccucagcucccagggcugc

SEQ ID NO: 403949 - RNA, 32 nt, Human
cugccugguuuuaagauucucagucuguugcc

SEQ ID NO: 403950 - RNA, 20 nt, Human
cugccuguaccaggcugccu

SEQ ID NO: 403951 - RNA, 32 nt, Human
cugccuguauauguuuugugaaaugguccugu

SEQ ID NO: 403952 - RNA, 32 nt, Human
cugccugucagccucuugccuccuaaacgugu

SEQ ID NO: 403953 - RNA, 21 nt, Human
cugccuguccagagcugacca

SEQ ID NO: 403954 - RNA, 32 nt, Human
cugccuguccagccuggcucccuuccugggcc

SEQ ID NO: 403955 - RNA, 32 nt, Human
cugccugucccaggacccuaugguaaugaaca

SEQ ID NO: 403956 - RNA, 32 nt, Human
cugccuguccccaucccacagagggcaaggag

SEQ ID NO: 403957 - RNA, 32 nt, Human
cugccugucuuggggguugguggaggguggag

SEQ ID NO: 403958 - RNA, 32 nt, Human
cugccugugagcagucccucuggaaagaaaca

SEQ ID NO: 403959 - RNA, 32 nt, Human
cugccugugcacugcaagcugugucuacucag

SEQ ID NO: 403960 - RNA, 32 nt, Human
cugccugugcaggauccggagcccagcagcac

SEQ ID NO: 403961 - RNA, 32 nt, Human
cugccugugcaucuucucgcacugagauuuug

SEQ ID NO: 403962 - RNA, 21 nt, Human
cugccugugcccgcugcgcug

SEQ ID NO: 403963 - RNA, 32 nt, Human
cugccugugcucagguccucagcuccauggga

SEQ ID NO: 403964 - RNA, 24 nt, Human
cugccugugcucugccucgggcca

SEQ ID NO: 403965 - RNA, 21 nt, Human
cugccuguggagcuccugugc

SEQ ID NO: 403966 - RNA, 32 nt, Human
cugccuguggccaugacccugccucucccagg

SEQ ID NO: 403967 - RNA, 21 nt, Human
cugccuguggcccccgagcca

SEQ ID NO: 403968 - RNA, 32 nt, Human
cugccugugggaugucagcguucugguaucug

SEQ ID NO: 403969 - RNA, 32 nt, Human
cugccuguggguccccauugcccagcuuuugc

SEQ ID NO: 403970 - RNA, 32 nt, Human
cugccugugggucucaauugcccagcuccggc

SEQ ID NO: 403971 - RNA, 32 nt, Human
cugccugugggucuucauugcccagcuccugc

SEQ ID NO: 403972 - RNA, 21 nt, Human
cugccugugguuuucagcuca

SEQ ID NO: 403973 - RNA, 32 nt, Human
cugccugugucacccugucccacugaggucag

SEQ ID NO: 403974 - RNA, 32 nt, Human
cugccuguguccaugucagacuuugagcugau

SEQ ID NO: 403975 - RNA, 32 nt, Human
cugccuguguccuguguuccccacagggagag

SEQ ID NO: 403976 - RNA, 23 nt, Human
cugccugugugcccuucuccagg

SEQ ID NO: 403977 - RNA, 32 nt, Human
cugccugugugugcuguggcuuugaacuguaa

SEQ ID NO: 403978 - RNA, 21 nt, Human
cugccugugugugugcaagug

SEQ ID NO: 403979 - RNA, 20 nt, Human
cugccuguugaguagcauca

SEQ ID NO: 403980 - RNA, 32 nt, Human
cugccuguuuccuccaccuccacccccacccc

SEQ ID NO: 403981 - RNA, 32 nt, Human
cugccuguuuccuccccaccagccuccucccc

SEQ ID NO: 403982 - RNA, 32 nt, Human
cugccuguuucuucccccuccucuaagcuacu

SEQ ID NO: 403983 - RNA, 31 nt, Human
cugccuuacagcuagagcaagaguguguaau

SEQ ID NO: 403984 - RNA, 32 nt, Human
cugccuuagucucaguuugugugucuuaauua

SEQ ID NO: 403985 - RNA, 28 nt, Human
cugccuuauaauguagaugagcaacucu

SEQ ID NO: 403986 - RNA, 24 nt, Human
cugccuuaucuaaaucaccagaga

SEQ ID NO: 403987 - RNA, 24 nt, Human
cugccuuaucucugugcaccaaga

SEQ ID NO: 403988 - RNA, 21 nt, Human
cugccuuaucuuaaccaagga

SEQ ID NO: 403989 - RNA, 32 nt, Human
cugccuuaucuugccccucuaccuggcucugu

SEQ ID NO: 403990 - RNA, 32 nt, Human
cugccuuaugucccuuccuuguggacuucaca

SEQ ID NO: 403991 - RNA, 17 nt, Human
cugccuucaaacaggug

SEQ ID NO: 403992 - RNA, 32 nt, Human
cugccuucaaucaucccuccucuugcaggucu

SEQ ID NO: 403993 - RNA, 32 nt, Human
cugccuucaaucuucagggacugcagggaaga

SEQ ID NO: 403994 - RNA, 32 nt, Human
cugccuucaggaaauggacaggucaguuuguu

SEQ ID NO: 403995 - RNA, 23 nt, Human
cugccuucaggacucugccuuca

SEQ ID NO: 403996 - RNA, 32 nt, Human
cugccuucaugaagaaaagacagaggcagaaa

SEQ ID NO: 403997 - RNA, 32 nt, Human
cugccuucaugcccaggacaccagcugggucc

SEQ ID NO: 403998 - RNA, 32 nt, Human
cugccuuccaacuaccacucucccagauguga

SEQ ID NO: 403999 - RNA, 32 nt, Human
cugccuuccagccacaucgccugagauugaca

SEQ ID NO: 404000 - RNA, 32 nt, Human
cugccuuccccaagcauccagccuggggaugg

SEQ ID NO: 404001 - RNA, 21 nt, Human
cugccuucccgcgcuccggug

SEQ ID NO: 404002 - RNA, 32 nt, Human
cugccuucccuucacaccuuccugccccagau

SEQ ID NO: 404003 - RNA, 32 nt, Human
cugccuuccuacccucucuaauggccccucca

SEQ ID NO: 404004 - RNA, 32 nt, Human
cugccuuccuagcagauguggugagcccaucc

SEQ ID NO: 404005 - RNA, 22 nt, Human
cugccuuccugcuucugggcua

SEQ ID NO: 404006 - RNA, 32 nt, Human
cugccuuccugugcccagaaaggaaggggcua

SEQ ID NO: 404007 - RNA, 32 nt, Human
cugccuucgcguugcuggggugcagugagacu

SEQ ID NO: 404008 - RNA, 32 nt, Human
cugccuucuaguuuuuagucucagaccagacc

SEQ ID NO: 404009 - RNA, 32 nt, Human
cugccuucucaaggaguccacagucuggagga

SEQ ID NO: 404010 - RNA, 32 nt, Human
cugccuucuccuccauuucucugcucagaagg

SEQ ID NO: 404011 - RNA, 32 nt, Human
cugccuucuccucucugggccuuuguuuccuu

SEQ ID NO: 404012 - RNA, 32 nt, Human
cugccuucucggaucggauccagcacauccag

SEQ ID NO: 404013 - RNA, 32 nt, Human
cugccuucucguggcccugugugagcacaugu

SEQ ID NO: 404014 - RNA, 32 nt, Human
cugccuucucuccuggcaggcgcugccuuuuc

SEQ ID NO: 404015 - RNA, 32 nt, Human
cugccuucucuucaucccaacauuccugaugu

SEQ ID NO: 404016 - RNA, 32 nt, Human
cugccuucugaccuuuuccuugauucaacaaa

SEQ ID NO: 404017 - RNA, 32 nt, Human
cugccuucugaugcuggacuggccuugcuucu

SEQ ID NO: 404018 - RNA, 24 nt, Human
cugccuucugcccucugcccugca

SEQ ID NO: 404019 - RNA, 19 nt, Human
cugccuucugcccuggguc

SEQ ID NO: 404020 - RNA, 18 nt, Human
cugccuucuguccuggcc

SEQ ID NO: 404021 - RNA, 32 nt, Human
cugccuucuguggagcauggcacccacaggcu

SEQ ID NO: 404022 - RNA, 23 nt, Human
cugccuucuuccucccuccacgg

SEQ ID NO: 404023 - RNA, 20 nt, Human
cugccuucuuguuccagcua

SEQ ID NO: 404024 - RNA, 23 nt, Human
cugccuugaccacuuuccccagg

SEQ ID NO: 404025 - RNA, 18 nt, Human
cugccuugacccugcagg

SEQ ID NO: 404026 - RNA, 19 nt, Human
cugccuugauucagcauca

SEQ ID NO: 404027 - RNA, 24 nt, Human
cugccuugauuucccucucccagg

SEQ ID NO: 404028 - RNA, 25 nt, Human
cugccuugcacaggcccuucccagg

SEQ ID NO: 404029 - RNA, 22 nt, Human
cugccuugcaucguuccgaguc

SEQ ID NO: 404030 - RNA, 32 nt, Human
cugccuugcccaggggugggauggcacugaag

SEQ ID NO: 404031 - RNA, 18 nt, Human
cugccuugccggccccug

SEQ ID NO: 404032 - RNA, 32 nt, Human
cugccuuggagacagaaugacagcuguggcaa

SEQ ID NO: 404033 - RNA, 32 nt, Human
cugccuuggagcacgcauugcugguggcagga

SEQ ID NO: 404034 - RNA, 19 nt, Human
cugccuuggcaucccaaag

SEQ ID NO: 404035 - RNA, 23 nt, Human
cugccuuggccuccuggcugcuu

SEQ ID NO: 404036 - RNA, 20 nt, Human
cugccuuggccuggccuugu

SEQ ID NO: 404037 - RNA, 32 nt, Human
cugccuuggcugcuacagcuuuuucacuccac

SEQ ID NO: 404038 - RNA, 21 nt, Human
cugccuuggcuuucugaugca

SEQ ID NO: 404039 - RNA, 32 nt, Human
cugccuugggcccagcccuggccucuggcuua

SEQ ID NO: 404040 - RNA, 19 nt, Human
cugccuuggucccugagcc

SEQ ID NO: 404041 - RNA, 28 nt, Human
cugccuuggugggcaguucugccuucca

SEQ ID NO: 404042 - RNA, 32 nt, Human
cugccuuguacccugagcugcaucaccuccua

SEQ ID NO: 404043 - RNA, 32 nt, Human
cugccuugucagccucugacccucaucucuca

SEQ ID NO: 404044 - RNA, 18 nt, Human
cugccuuguccuggcaag

SEQ ID NO: 404045 - RNA, 32 nt, Human
cugccuugugaguggccugcugccucaccucc

SEQ ID NO: 404046 - RNA, 20 nt, Human
cugccuuguguccugagcca

SEQ ID NO: 404047 - RNA, 19 nt, Human
cugccuuguuuccugccag

SEQ ID NO: 404048 - RNA, 32 nt, Human
cugccuuguuuggccucacuguaucccaccca

SEQ ID NO: 404049 - RNA, 32 nt, Human
cugccuuuaaaauccuuccucuuucuuccucc

SEQ ID NO: 404050 - RNA, 32 nt, Human
cugccuuucaaagcucucucccccaugaccca

SEQ ID NO: 404051 - RNA, 23 nt, Human
cugccuuucauaaucaccaggga

SEQ ID NO: 404052 - RNA, 23 nt, Human
cugccuuucauugcaacacggug

SEQ ID NO: 404053 - RNA, 32 nt, Human
cugccuuucccaaagugguuagguuuggaaaa

SEQ ID NO: 404054 - RNA, 19 nt, Human
cugccuuucccacucucca

SEQ ID NO: 404055 - RNA, 17 nt, Human
cugccuuucccugcagg

SEQ ID NO: 404056 - RNA, 24 nt, Human
cugccuuuccgcggccuccgcgaa

SEQ ID NO: 404057 - RNA, 32 nt, Human
cugccuuuccucuaucagagaaguugauccau

SEQ ID NO: 404058 - RNA, 32 nt, Human
cugccuuuccugggggcaaaaggggcaggugg

SEQ ID NO: 404059 - RNA, 32 nt, Human
cugccuuucucuuccuccaucaggcccuguau

SEQ ID NO: 404060 - RNA, 32 nt, Human
cugccuuucuggcagcaggcaggaagccgcaa

SEQ ID NO: 404061 - RNA, 32 nt, Human
cugccuuugaagcgcagcccucuguggcccgc

SEQ ID NO: 404062 - RNA, 32 nt, Human
cugccuuugagcagggagucucacauguuuaa

SEQ ID NO: 404063 - RNA, 32 nt, Human
cugccuuugagcuucuccucugcuccaacaga

SEQ ID NO: 404064 - RNA, 32 nt, Human
cugccuuugcaccccuucccccaaacccuauc

SEQ ID NO: 404065 - RNA, 32 nt, Human
cugccuuugcauccuguccuccagccacccuu

SEQ ID NO: 404066 - RNA, 32 nt, Human
cugccuuugccugguccuccagguugcugggg

SEQ ID NO: 404067 - RNA, 25 nt, Human
cugccuuugcuuuuaucgcuuugca

SEQ ID NO: 404068 - RNA, 32 nt, Human
cugccuuuggacugcucugacuuuagcaucag

SEQ ID NO: 404069 - RNA, 32 nt, Human
cugccuuugguaucaucuuccucuguccuuac

SEQ ID NO: 404070 - RNA, 32 nt, Human
cugccuuugugagccuccgggagcagguaacc

SEQ ID NO: 404071 - RNA, 32 nt, Human
cugccuuuguuaggcagauuuggaggggaggc

SEQ ID NO: 404072 - RNA, 32 nt, Human
cugccuuuucauuuucaucuuuucuugcugcu

SEQ ID NO: 404073 - RNA, 32 nt, Human
cugccuuuuccucugugacaugccugccugcc

SEQ ID NO: 404074 - RNA, 19 nt, Human
cugccuuuucuccggguca

SEQ ID NO: 404075 - RNA, 20 nt, Human
cugccuuuugccuccugcaa

SEQ ID NO: 404076 - RNA, 31 nt, Human
cugccuuuugucucuggguuuuguucucagc

SEQ ID NO: 404077 - RNA, 32 nt, Human
cugccuuuuucaccaccucuaauuucagcuuc

SEQ ID NO: 404078 - RNA, 32 nt, Human
cugcgaaagagcagaaaacaggaccaggaaca

SEQ ID NO: 404079 - RNA, 32 nt, Human
cugcgaacagccauugcacuccagccugggca

SEQ ID NO: 404080 - RNA, 32 nt, Human
cugcgaacauucuugcacacaugcccugguac

SEQ ID NO: 404081 - RNA, 32 nt, Human
cugcgaacucuugaacaccauacuuuagcaau

SEQ ID NO: 404082 - RNA, 32 nt, Human
cugcgaaggggcccugaacggccgucgcccuc

SEQ ID NO: 404083 - RNA, 32 nt, Human
cugcgaaguaaucugcaaucucuuuuguucuu

SEQ ID NO: 404084 - RNA, 20 nt, Human
cugcgaaguccgcggcugcc

SEQ ID NO: 404085 - RNA, 32 nt, Human
cugcgaauagccacugcacuccagccugggca

SEQ ID NO: 404086 - RNA, 32 nt, Human
cugcgaccagagacuggaggugacccuugccc

SEQ ID NO: 404087 - RNA, 32 nt, Human
cugcgacccacugucuuuggaauccaccccag

SEQ ID NO: 404088 - RNA, 32 nt, Human
cugcgacccuggaagcgggagccgccgcgagc

SEQ ID NO: 404089 - RNA, 32 nt, Human
cugcgaccucccugcccugccgccacaugcag

SEQ ID NO: 404090 - RNA, 32 nt, Human
cugcgacggggucuccaugagcacagaggcug

SEQ ID NO: 404091 - RNA, 32 nt, Human
cugcgacucuuagaacacuugcuuugaaggau

SEQ ID NO: 404092 - RNA, 32 nt, Human
cugcgagaaaacuugcaugugugcacaaagau

SEQ ID NO: 404093 - RNA, 24 nt, Human
cugcgagacauggcaaaacccugu

SEQ ID NO: 404094 - RNA, 16 nt, Human
cugcgagacccaaggc

SEQ ID NO: 404095 - RNA, 21 nt, Human
cugcgagacuucaggccgcuu

SEQ ID NO: 404096 - RNA, 32 nt, Human
cugcgagagagggagacacccggaggagcagg

SEQ ID NO: 404097 - RNA, 32 nt, Human
cugcgagagcuuccagugaccuucuuugccca

SEQ ID NO: 404098 - RNA, 32 nt, Human
cugcgagaggugcucaucaucaugcccauuuu

SEQ ID NO: 404099 - RNA, 32 nt, Human
cugcgagcacugaaaccuacuuagucuuuccc

SEQ ID NO: 404100 - RNA, 32 nt, Human
cugcgagccaggauuccugauccagagacaac

SEQ ID NO: 404101 - RNA, 23 nt, Human
cugcgagcccggccccugcuguu

SEQ ID NO: 404102 - RNA, 32 nt, Human
cugcgagccugcacucacuucauccucagcag

SEQ ID NO: 404103 - RNA, 23 nt, Human
cugcgagcuuggccccucugcug

SEQ ID NO: 404104 - RNA, 32 nt, Human
cugcgagggccccagccagggcagcuuucagg

SEQ ID NO: 404105 - RNA, 32 nt, Human
cugcgagggccucaaggagcagaggaaggggc

SEQ ID NO: 404106 - RNA, 32 nt, Human
cugcgaggggaaggaaaagggaggcagcgcga

SEQ ID NO: 404107 - RNA, 32 nt, Human
cugcgaggggcugugcugugccaggggaggcc

SEQ ID NO: 404108 - RNA, 32 nt, Human
cugcgagguuucuucucaucaccagcucagcu

SEQ ID NO: 404109 - RNA, 32 nt, Human
cugcgagucugggaacagaucuguuuuucacu

SEQ ID NO: 404110 - RNA, 32 nt, Human
cugcgagugguuucuugugcacuggcaccaag

SEQ ID NO: 404111 - RNA, 32 nt, Human
cugcgauacagcccuggagcucagucagccac

SEQ ID NO: 404112 - RNA, 32 nt, Human
cugcgaucacgugccugggaggaggagcugag

SEQ ID NO: 404113 - RNA, 32 nt, Human
cugcgaucucagcucacugcaaccuccgccuc

SEQ ID NO: 404114 - RNA, 32 nt, Human
cugcgcaaaaugcagccucuaagagcuggagg

SEQ ID NO: 404115 - RNA, 32 nt, Human
cugcgcaaaauguggaggaaaauucauuacca

SEQ ID NO: 404116 - RNA, 32 nt, Human
cugcgcaaaggguuucaccaaggauggagaaa

SEQ ID NO: 404117 - RNA, 24 nt, Human
cugcgcaacauggcgaaaccccgu

SEQ ID NO: 404118 - RNA, 32 nt, Human
cugcgcaacauggcgaaaccccgucucuacaa

SEQ ID NO: 404119 - RNA, 32 nt, Human
cugcgcacacacagcagucugucacgaggcug

SEQ ID NO: 404120 - RNA, 21 nt, Human
cugcgcaccaaggaauggaga

SEQ ID NO: 404121 - RNA, 32 nt, Human
cugcgcacugccuguuccuccugggugucacu

SEQ ID NO: 404122 - RNA, 24 nt, Human
cugcgcagaccagcuucugcagga

SEQ ID NO: 404123 - RNA, 22 nt, Human
cugcgcagcccggggauggaga

SEQ ID NO: 404124 - RNA, 32 nt, Human
cugcgcagccugggaggaggcguggauccugg

SEQ ID NO: 404125 - RNA, 31 nt, Human
cugcgcaggagagucagagggggaagaguua

SEQ ID NO: 404126 - RNA, 32 nt, Human
cugcgcaggcgcggaccaaagcgaucucuucu

SEQ ID NO: 404127 - RNA, 32 nt, Human
cugcgcagggccagugccuggcauguguccca

SEQ ID NO: 404128 - RNA, 32 nt, Human
cugcgcagucaccauggcgaugcauuucaucu

SEQ ID NO: 404129 - RNA, 32 nt, Human
cugcgcagugaagaaaaugaguagcagcucau

SEQ ID NO: 404130 - RNA, 32 nt, Human
cugcgcaugcaagcccugcuguguggcugucg

SEQ ID NO: 404131 - RNA, 32 nt, Human
cugcgccaaugccccugccucuagugcacucc

SEQ ID NO: 404132 - RNA, 32 nt, Human
cugcgccacaguuugguccagaggagggagga

SEQ ID NO: 404133 - RNA, 19 nt, Human
cugcgccaccgcgcuccag

SEQ ID NO: 404134 - RNA, 32 nt, Human
cugcgccaccgcgcuccagccugggugacaga

SEQ ID NO: 404135 - RNA, 32 nt, Human
cugcgccacggcacuccagccugggcgacaga

SEQ ID NO: 404136 - RNA, 32 nt, Human
cugcgccacugcacuccagccugggcaacaga

SEQ ID NO: 404137 - RNA, 32 nt, Human
cugcgccacugcacuccagucugggacaacag

SEQ ID NO: 404138 - RNA, 32 nt, Human
cugcgccaucuccaucagagcugcaucucucu

SEQ ID NO: 404139 - RNA, 32 nt, Human
cugcgccauggacgagccacccuucagcgagg

SEQ ID NO: 404140 - RNA, 32 nt, Human
cugcgccauugcacuccagcccgggcaacaag

SEQ ID NO: 404141 - RNA, 32 nt, Human
cugcgcccaaugggcccuccgucuggccuccc

SEQ ID NO: 404142 - RNA, 32 nt, Human
cugcgcccacuaucaucccugcuccagcugcc

SEQ ID NO: 404143 - RNA, 32 nt, Human
cugcgcccagccauuaugaaugucaauauuga

SEQ ID NO: 404144 - RNA, 19 nt, Human
cugcgcccccauccucuca

SEQ ID NO: 404145 - RNA, 32 nt, Human
cugcgccccucaggccagcaguugagguccau

SEQ ID NO: 404146 - RNA, 17 nt, Human
cugcgccccuccgagua

SEQ ID NO: 404147 - RNA, 18 nt, Human
cugcgccccucgccccag

SEQ ID NO: 404148 - RNA, 32 nt, Human
cugcgccccugcccagcgugcucugggugcuc

SEQ ID NO: 404149 - RNA, 17 nt, Human
cugcgccccuggcuggg

SEQ ID NO: 404150 - RNA, 32 nt, Human
cugcgcccgcagcucugugggccccgcaccca

SEQ ID NO: 404151 - RNA, 32 nt, Human
cugcgcccgcgccuccccuugcgcaccguggc

SEQ ID NO: 404152 - RNA, 32 nt, Human
cugcgcccuagugccccugcugggcaguggcg

SEQ ID NO: 404153 - RNA, 32 nt, Human
cugcgcccucgccucagaccucucgggcgagc

SEQ ID NO: 404154 - RNA, 32 nt, Human
cugcgcccucuccuauaaagcagacgccgcgc

SEQ ID NO: 404155 - RNA, 32 nt, Human
cugcgcccugcacuucguacuuuccgagaguu

SEQ ID NO: 404156 - RNA, 32 nt, Human
cugcgcccugggacagcggagagauggcuucu

SEQ ID NO: 404157 - RNA, 18 nt, Human
cugcgcccugggcuccag

SEQ ID NO: 404158 - RNA, 32 nt, Human
cugcgcccuuaacugcauccagccuggggcug

SEQ ID NO: 404159 - RNA, 19 nt, Human
cugcgccgcccgcgccccg

SEQ ID NO: 404160 - RNA, 32 nt, Human
cugcgccggaaggaggcuguuagcgugcugga

SEQ ID NO: 404161 - RNA, 32 nt, Human
cugcgccggagcaggggcauggucuaguggcc

SEQ ID NO: 404162 - RNA, 32 nt, Human
cugcgccgucccucguuccauggcccaguccu

SEQ ID NO: 404163 - RNA, 32 nt, Human
cugcgccgucuccccaguccccaaaccccagu

SEQ ID NO: 404164 - RNA, 32 nt, Human
cugcgccuaagcugggccacaaccgccaguca

SEQ ID NO: 404165 - RNA, 18 nt, Human
cugcgccucacccuccag

SEQ ID NO: 404166 - RNA, 32 nt, Human
cugcgccuccacuaugcucucccuccgugucc

SEQ ID NO: 404167 - RNA, 32 nt, Human
cugcgccuccacugcagugccugggcuccccu

SEQ ID NO: 404168 - RNA, 32 nt, Human
cugcgccuccugucauuucccugcugggcucu

SEQ ID NO: 404169 - RNA, 32 nt, Human
cugcgccucucgucguggccuccuggacucaa

SEQ ID NO: 404170 - RNA, 32 nt, Human
cugcgccugccugauguuguuucuuuauuccu

SEQ ID NO: 404171 - RNA, 32 nt, Human
cugcgccugccuggcugccugugcaggugccc

SEQ ID NO: 404172 - RNA, 19 nt, Human
cugcgccugcugccuccag

SEQ ID NO: 404173 - RNA, 32 nt, Human
cugcgccugcugccuccagcccugaggauggc

SEQ ID NO: 404174 - RNA, 32 nt, Human
cugcgccuguaaucccagcacuuugggaggcc

SEQ ID NO: 404175 - RNA, 32 nt, Human
cugcgccuguaaucccagcuacccaggaggcu

SEQ ID NO: 404176 - RNA, 20 nt, Human
cugcgccuucugggucucug

SEQ ID NO: 404177 - RNA, 32 nt, Human
cugcgcgaggguguaggaaggaaagcccagga

SEQ ID NO: 404178 - RNA, 18 nt, Human
cugcgcgcagcccgggcc

SEQ ID NO: 404179 - RNA, 19 nt, Human
cugcgcgcccgccucggcc

SEQ ID NO: 404180 - RNA, 32 nt, Human
cugcgcgccgcgggcacuucuccugggcucuc

SEQ ID NO: 404181 - RNA, 32 nt, Human
cugcgcgccggguccuggaggccgaggccgcu

SEQ ID NO: 404182 - RNA, 31 nt, Human
cugcgcgccuacgcgggaccuguguccgaaa

SEQ ID NO: 404183 - RNA, 20 nt, Human
cugcgcgccucgcuugagcu

SEQ ID NO: 404184 - RNA, 32 nt, Human
cugcgcggaggcugcuacacacaugcagaagu

SEQ ID NO: 404185 - RNA, 32 nt, Human
cugcgcggcauggaggguggugugaguuccuc

SEQ ID NO: 404186 - RNA, 32 nt, Human
cugcgcggccucucccccaacucugcucuguu

SEQ ID NO: 404187 - RNA, 26 nt, Human
cugcgcuaguucggccucugccgcug

SEQ ID NO: 404188 - RNA, 32 nt, Human
cugcgcucaggugauccuccagcuucagcuac

SEQ ID NO: 404189 - RNA, 32 nt, Human
cugcgcucauuucauccucuggcuuccucacu

SEQ ID NO: 404190 - RNA, 32 nt, Human
cugcgcuccaagaaaugccuggagucucacgc

SEQ ID NO: 404191 - RNA, 32 nt, Human
cugcgcuccagccuggacaacacagugagacu

SEQ ID NO: 404192 - RNA, 32 nt, Human
cugcgcuccagccuggcagacagagggaagau

SEQ ID NO: 404193 - RNA, 32 nt, Human
cugcgcuccagccugggcaacagagcgagacu

SEQ ID NO: 404194 - RNA, 32 nt, Human
cugcgcuccagccugggcaacagagugagacu

SEQ ID NO: 404195 - RNA, 32 nt, Human
cugcgcuccagccugggcgacagagugguauu

SEQ ID NO: 404196 - RNA, 32 nt, Human
cugcgcuccagccugggugacagagugagacu

SEQ ID NO: 404197 - RNA, 32 nt, Human
cugcgcucccuggagcgagcuggugaggaggg

SEQ ID NO: 404198 - RNA, 32 nt, Human
cugcgcucuccgccgcgcucuaccuccauuag

SEQ ID NO: 404199 - RNA, 32 nt, Human
cugcgcucucucccuucuccccucaccccgcc

SEQ ID NO: 404200 - RNA, 32 nt, Human
cugcgcugcacuccucugcccuggggccaccu

SEQ ID NO: 404201 - RNA, 32 nt, Human
cugcgcugcagaggcacuccacccugggcacg

SEQ ID NO: 404202 - RNA, 32 nt, Human
cugcgcugcagccugggcaacacagugagacc

SEQ ID NO: 404203 - RNA, 32 nt, Human
cugcgcugcgcagggcgcuaggaggcauuguc

SEQ ID NO: 404204 - RNA, 18 nt, Human
cugcgcugcgcuccggcc

SEQ ID NO: 404205 - RNA, 32 nt, Human
cugcgcugcuccuggcucacagcgcuccgggc

SEQ ID NO: 404206 - RNA, 32 nt, Human
cugcgcugggaggggugggggcggugccauug

SEQ ID NO: 404207 - RNA, 32 nt, Human
cugcgcugggcgcgcggaggccuaggcgggaa

SEQ ID NO: 404208 - RNA, 32 nt, Human
cugcgcugggcugaagggagggaaaggcggcu

SEQ ID NO: 404209 - RNA, 32 nt, Human
cugcgcugggugcugaggccacugcugucaau

SEQ ID NO: 404210 - RNA, 32 nt, Human
cugcgcuuccuugaguguggcuucccacuuuu

SEQ ID NO: 404211 - RNA, 32 nt, Human
cugcggaaagcaggccaggggucuccacaggg

SEQ ID NO: 404212 - RNA, 32 nt, Human
cugcggaaaucaacagccccagagccacuugg

SEQ ID NO: 404213 - RNA, 32 nt, Human
cugcggaagacagggccccugugucauaguca

SEQ ID NO: 404214 - RNA, 32 nt, Human
cugcggacaccagcuccucucuccgccgucac

SEQ ID NO: 404215 - RNA, 26 nt, Human
cugcggacuccauggcccuuccugga

SEQ ID NO: 404216 - RNA, 32 nt, Human
cugcggagagcagcagcagagcugaguaauga

SEQ ID NO: 404217 - RNA, 32 nt, Human
cugcggagagugaguggagagaggagaggcaa

SEQ ID NO: 404218 - RNA, 32 nt, Human
cugcggagccauccugaggcuuugacaucuau

SEQ ID NO: 404219 - RNA, 32 nt, Human
cugcggagcuuuccaccucgccugccuugggc

SEQ ID NO: 404220 - RNA, 32 nt, Human
cugcggaggagaagcaggaggagggaggagga

SEQ ID NO: 404221 - RNA, 19 nt, Human
cugcggaggauggcaggug

SEQ ID NO: 404222 - RNA, 18 nt, Human
cugcggaggcaacggcag

SEQ ID NO: 404223 - RNA, 32 nt, Human
cugcggaguauuccugggcauggugcugggca

SEQ ID NO: 404224 - RNA, 32 nt, Human
cugcggagucauaucucauucaugcugcagcc

SEQ ID NO: 404225 - RNA, 32 nt, Human
cugcggagugcgcugcgccgcccagcccuguc

SEQ ID NO: 404226 - RNA, 32 nt, Human
cugcggauggugcugcuguccccagccucucu

SEQ ID NO: 404227 - RNA, 32 nt, Human
cugcggcagagcccaggcuggggaagugaacu

SEQ ID NO: 404228 - RNA, 18 nt, Human
cugcggcaggacugcaga

SEQ ID NO: 404229 - RNA, 32 nt, Human
cugcggcaggcagagcuggugggggcaggggu

SEQ ID NO: 404230 - RNA, 32 nt, Human
cugcggcaggcggaucacuugaggucaggagu

SEQ ID NO: 404231 - RNA, 32 nt, Human
cugcggcagugcaggggugcuugcugagauga

SEQ ID NO: 404232 - RNA, 32 nt, Human
cugcggcagugcugggguggcaccaggugggc

SEQ ID NO: 404233 - RNA, 19 nt, Human
cugcggccaccggccggca

SEQ ID NO: 404234 - RNA, 32 nt, Human
cugcggccacugcaggaccuggaggugggacu

SEQ ID NO: 404235 - RNA, 32 nt, Human
cugcggccacugcaugugagagaauccugcaa

SEQ ID NO: 404236 - RNA, 32 nt, Human
cugcggccagggaggugcggagcagcuucgga

SEQ ID NO: 404237 - RNA, 22 nt, Human
cugcggccagucccuggugccc

SEQ ID NO: 404238 - RNA, 32 nt, Human
cugcggcccaauccaaggugggguggaagcuu

SEQ ID NO: 404239 - RNA, 32 nt, Human
cugcggcccagcgagcggcccagaugcaggcc

SEQ ID NO: 404240 - RNA, 24 nt, Human
cugcggcccggggcuggagcgcag

SEQ ID NO: 404241 - RNA, 32 nt, Human
cugcggcccuagcgacccucaggcuucuuccc

SEQ ID NO: 404242 - RNA, 32 nt, Human
cugcggcccuggaaagcgauggagguggcggc

SEQ ID NO: 404243 - RNA, 18 nt, Human
cugcggccgcccugggcc

SEQ ID NO: 404244 - RNA, 32 nt, Human
cugcggccucaaacuccggggcucaggcaguc

SEQ ID NO: 404245 - RNA, 32 nt, Human
cugcggccucaaacuccugggcucaagugauc

SEQ ID NO: 404246 - RNA, 32 nt, Human
cugcggccuccaccaaccccgcggcccagacc

SEQ ID NO: 404247 - RNA, 32 nt, Human
cugcggccucccaagcagcagcaacagcagcc

SEQ ID NO: 404248 - RNA, 32 nt, Human
cugcggccugcccugcaugcaggauggcccug

SEQ ID NO: 404249 - RNA, 32 nt, Human
cugcggccugcucucaggguggggugacuauu

SEQ ID NO: 404250 - RNA, 32 nt, Human
cugcggccuuucucaucuccuuuuccugcguu

SEQ ID NO: 404251 - RNA, 19 nt, Human
cugcggcgcaggcacucca

SEQ ID NO: 404252 - RNA, 18 nt, Human
cugcggcgccggcuccug

SEQ ID NO: 404253 - RNA, 32 nt, Human
cugcggcgccgggcauuucuccgcagcucggc

SEQ ID NO: 404254 - RNA, 20 nt, Human
cugcggcgcggggcaaggug

SEQ ID NO: 404255 - RNA, 32 nt, Human
cugcggcgggcggaucaccugaggucaggagu

SEQ ID NO: 404256 - RNA, 32 nt, Human
cugcggcggggcuguccucgcggacugacugg

SEQ ID NO: 404257 - RNA, 32 nt, Human
cugcggcgggguagaggcggaggcggagucga

SEQ ID NO: 404258 - RNA, 19 nt, Human
cugcggcuccacugaguca

SEQ ID NO: 404259 - RNA, 32 nt, Human
cugcggcuccaggacuuucugcagaaugugcc

SEQ ID NO: 404260 - RNA, 32 nt, Human
cugcggcuccauccucggcuccugggcaccgu

SEQ ID NO: 404261 - RNA, 32 nt, Human
cugcggcuccgaaagggucagaggguacccga

SEQ ID NO: 404262 - RNA, 19 nt, Human
cugcggcuccgcugggcca

SEQ ID NO: 404263 - RNA, 19 nt, Human
cugcggcuccuccugcagg

SEQ ID NO: 404264 - RNA, 32 nt, Human
cugcggcucuuggagaaagcgugagcaggggg

SEQ ID NO: 404265 - RNA, 23 nt, Human
cugcggcugcagaggcgcugcag

SEQ ID NO: 404266 - RNA, 18 nt, Human
cugcggcugcuccgggcu

SEQ ID NO: 404267 - RNA, 32 nt, Human
cugcggcugcuccugcucacaauaaagccggg

SEQ ID NO: 404268 - RNA, 19 nt, Human
cugcggcugcuucgaguca

SEQ ID NO: 404269 - RNA, 32 nt, Human
cugcggcugugccucuuccuccccaugcugac

SEQ ID NO: 404270 - RNA, 32 nt, Human
cugcggcuguggcaaggccuguuucugcgcug

SEQ ID NO: 404271 - RNA, 22 nt, Human
cugcggcuguugccgccgggcu

SEQ ID NO: 404272 - RNA, 32 nt, Human
cugcggcuucugugcgaggcugggcagccagc

SEQ ID NO: 404273 - RNA, 22 nt, Human
cugcggcuuguugaggugcaau

SEQ ID NO: 404274 - RNA, 32 nt, Human
cugcgggaagcagggacaguggagagggcgcu

SEQ ID NO: 404275 - RNA, 32 nt, Human
cugcgggaaguuaagaggcaccagaggacagu

SEQ ID NO: 404276 - RNA, 32 nt, Human
cugcgggaaugagggagucagauaaagaacaa

SEQ ID NO: 404277 - RNA, 32 nt, Human
cugcgggacacacagacacgccuacgauuaga

SEQ ID NO: 404278 - RNA, 21 nt, Human
cugcgggacccuccccggcag

SEQ ID NO: 404279 - RNA, 32 nt, Human
cugcgggagagggcgagcaugaacuggcccgg

SEQ ID NO: 404280 - RNA, 32 nt, Human
cugcgggagauuuaaaccugcaagaaaggagg

SEQ ID NO: 404281 - RNA, 32 nt, Human
cugcgggagccacaggaagugaagagcuuccg

SEQ ID NO: 404282 - RNA, 32 nt, Human
cugcgggaggagaccugguccaggaucaagga

SEQ ID NO: 404283 - RNA, 32 nt, Human
cugcgggaggcaggggaugcaugggugucccc

SEQ ID NO: 404284 - RNA, 32 nt, Human
cugcgggaguacuggguccugagggagagcug

SEQ ID NO: 404285 - RNA, 32 nt, Human
cugcgggagucagacagccuagaaccgucgug

SEQ ID NO: 404286 - RNA, 32 nt, Human
cugcgggcagagcacagcgccgccgcggcccu

SEQ ID NO: 404287 - RNA, 32 nt, Human
cugcgggcccagcuccugccucccaguggccu

SEQ ID NO: 404288 - RNA, 20 nt, Human
cugcgggcgagcagcaggug

SEQ ID NO: 404289 - RNA, 24 nt, Human
cugcgggcguccugggaagggaga

SEQ ID NO: 404290 - RNA, 32 nt, Human
cugcgggcuaggcagccaggagcucuguccgc

SEQ ID NO: 404291 - RNA, 32 nt, Human
cugcgggcuccccucaggcucugcuucgugac

SEQ ID NO: 404292 - RNA, 20 nt, Human
cugcgggcuccucugcauca

SEQ ID NO: 404293 - RNA, 32 nt, Human
cugcgggcuccuggcugcuggagcugagcggg

SEQ ID NO: 404294 - RNA, 32 nt, Human
cugcgggcugggaacucucguccucggucccc

SEQ ID NO: 404295 - RNA, 32 nt, Human
cugcgggcuugcugggggagaacucuaacugu

SEQ ID NO: 404296 - RNA, 32 nt, Human
cugcggggauccagagcgcacagggagugcac

SEQ ID NO: 404297 - RNA, 32 nt, Human
cugcggggcccugaugcccccacccaccucgg

SEQ ID NO: 404298 - RNA, 22 nt, Human
cugcggggcgguagcuccggcg

SEQ ID NO: 404299 - RNA, 32 nt, Human
cugcggggcuggcucgacccagcuugaggucu

SEQ ID NO: 404300 - RNA, 32 nt, Human
cugcgggggaggaggagggucugaagguggga

SEQ ID NO: 404301 - RNA, 32 nt, Human
cugcgggggccuuggagcuccugcucuucucc

SEQ ID NO: 404302 - RNA, 32 nt, Human
cugcggguggacuggcccgcugccucggagag

SEQ ID NO: 404303 - RNA, 31 nt, Human
cugcggguuggccucgggccugucucucucu

SEQ ID NO: 404304 - RNA, 32 nt, Human
cugcgguacugaggaagcggcaggaggagaug

SEQ ID NO: 404305 - RNA, 32 nt, Human
cugcggucacacacacggucucagucacguga

SEQ ID NO: 404306 - RNA, 19 nt, Human
cugcggucagcugcgucca

SEQ ID NO: 404307 - RNA, 32 nt, Human
cugcggucgagaguuugagaccagcuugacca

SEQ ID NO: 404308 - RNA, 32 nt, Human
cugcggucggagugggagggccagucugcacc

SEQ ID NO: 404309 - RNA, 32 nt, Human
cugcggucguucccucggcuguggaccgggcg

SEQ ID NO: 404310 - RNA, 32 nt, Human
cugcggucuuuuuacucguucuaucugaugag

SEQ ID NO: 404311 - RNA, 24 nt, Human
cugcggugaaguugaggcuuauaa

SEQ ID NO: 404312 - RNA, 32 nt, Human
cugcggugagcuaugaucgcgccacugcacuc

SEQ ID NO: 404313 - RNA, 32 nt, Human
cugcggugagggugugagccccgggcugaugg

SEQ ID NO: 404314 - RNA, 32 nt, Human
cugcggugaucugacuuuaauuuaccacgacu

SEQ ID NO: 404315 - RNA, 32 nt, Human
cugcgguggcugcugcuccacccuggacucug

SEQ ID NO: 404316 - RNA, 32 nt, Human
cugcggugggacuccggagcagcguacaccgc

SEQ ID NO: 404317 - RNA, 32 nt, Human
cugcggugucugcugcuacucuccgagcuucg

SEQ ID NO: 404318 - RNA, 32 nt, Human
cugcgguuaaaguggcuggaguggagucuugg

SEQ ID NO: 404319 - RNA, 32 nt, Human
cugcgguucaaaaguacgaucacucaggaagg

SEQ ID NO: 404320 - RNA, 32 nt, Human
cugcgguuccaggagaacuguuugugccccuu

SEQ ID NO: 404321 - RNA, 32 nt, Human
cugcgguugucaaggauucagagcagauguga

SEQ ID NO: 404322 - RNA, 32 nt, Human
cugcguaagaagaaauauauguggugaaaugu

SEQ ID NO: 404323 - RNA, 32 nt, Human
cugcguacaaacauccaaaaguucaacaacac

SEQ ID NO: 404324 - RNA, 32 nt, Human
cugcguccaacagccugugacucuucccugga

SEQ ID NO: 404325 - RNA, 22 nt, Human
cugcgucccaaccugccucuca

SEQ ID NO: 404326 - RNA, 18 nt, Human
cugcgucccccuucgguc

SEQ ID NO: 404327 - RNA, 20 nt, Human
cugcguccccugccccggcc

SEQ ID NO: 404328 - RNA, 32 nt, Human
cugcgucccgcgucuggguucucagcuauuuc

SEQ ID NO: 404329 - RNA, 32 nt, Human
cugcguccucagggaaggcagaagggcaggca

SEQ ID NO: 404330 - RNA, 32 nt, Human
cugcguccuccccuccccggcccucccacagc

SEQ ID NO: 404331 - RNA, 32 nt, Human
cugcguccugcaggagcauugcgcuuaaacua

SEQ ID NO: 404332 - RNA, 32 nt, Human
cugcguccuucggucucugcucccgggacccg

SEQ ID NO: 404333 - RNA, 32 nt, Human
cugcgucguucuguccuuccgaacgcacacuu

SEQ ID NO: 404334 - RNA, 32 nt, Human
cugcgucucccucucugcagccuguguaagcu

SEQ ID NO: 404335 - RNA, 32 nt, Human
cugcgucuuaggagccugggaaagcacuucga

SEQ ID NO: 404336 - RNA, 32 nt, Human
cugcgucuucucucaauuccagucaucucagu

SEQ ID NO: 404337 - RNA, 32 nt, Human
cugcgugaauauacuaaaaagcauugaauggc

SEQ ID NO: 404338 - RNA, 32 nt, Human
cugcgugagaccagaaagcugggagcccugcg

SEQ ID NO: 404339 - RNA, 32 nt, Human
cugcgugagggggcagaggcgagguggaggcg

SEQ ID NO: 404340 - RNA, 32 nt, Human
cugcgugagucuuauuuauucucugaaacaca

SEQ ID NO: 404341 - RNA, 32 nt, Human
cugcgugcacacuggcugaaugcauuaguuaa

SEQ ID NO: 404342 - RNA, 32 nt, Human
cugcgugcacguccagccugaccgguugauua

SEQ ID NO: 404343 - RNA, 32 nt, Human
cugcgugcccugcugucaccgcggagcugaag

SEQ ID NO: 404344 - RNA, 32 nt, Human
cugcgugccuccugccugucugaguccaaccu

SEQ ID NO: 404345 - RNA, 20 nt, Human
cugcgugccucgccccgggc

SEQ ID NO: 404346 - RNA, 32 nt, Human
cugcgugccugggggccgugucccuguccagg

SEQ ID NO: 404347 - RNA, 32 nt, Human
cugcgugcucccuccagacucccuggcugcgg

SEQ ID NO: 404348 - RNA, 21 nt, Human
cugcgugcugcugccgggcca

SEQ ID NO: 404349 - RNA, 23 nt, Human
cugcguggccuggggcugccgug

SEQ ID NO: 404350 - RNA, 32 nt, Human
cugcguggcugcagccaaaacaaagaacuggg

SEQ ID NO: 404351 - RNA, 32 nt, Human
cugcgugggacccucuucucuggaaaccuaau

SEQ ID NO: 404352 - RNA, 32 nt, Human
cugcgugggcagggcugcagugggguccaggu

SEQ ID NO: 404353 - RNA, 32 nt, Human
cugcguggucaccaaccgauucgaccaguuau

SEQ ID NO: 404354 - RNA, 32 nt, Human
cugcguggucgcugccuccugcagaguggcca

SEQ ID NO: 404355 - RNA, 32 nt, Human
cugcguggugagugagggggagagagaagaga

SEQ ID NO: 404356 - RNA, 32 nt, Human
cugcguggugcugucccaugucacuugaacug

SEQ ID NO: 404357 - RNA, 32 nt, Human
cugcgugucaguuugugucugucucggggaau

SEQ ID NO: 404358 - RNA, 32 nt, Human
cugcgugugaaaagcugugauuucauuucuua

SEQ ID NO: 404359 - RNA, 32 nt, Human
cugcgugugcgguacuguggaggcggcggggc

SEQ ID NO: 404360 - RNA, 32 nt, Human
cugcguguggguaugaccucugccugguggcu

SEQ ID NO: 404361 - RNA, 32 nt, Human
cugcguguggucagacccaauuacacuguggc

SEQ ID NO: 404362 - RNA, 32 nt, Human
cugcgugugguggcucacaccuguaaucccaa

SEQ ID NO: 404363 - RNA, 32 nt, Human
cugcgugugguggcucaugccuguaaucccaa

SEQ ID NO: 404364 - RNA, 19 nt, Human
cugcgugugguuuuggcaa

SEQ ID NO: 404365 - RNA, 32 nt, Human
cugcgugugugaacagaaacaggccugccgau

SEQ ID NO: 404366 - RNA, 32 nt, Human
cugcguuauggacgccaagggaagaaauacaa

SEQ ID NO: 404367 - RNA, 32 nt, Human
cugcguuccuccuuuccccucuccuuuggaua

SEQ ID NO: 404368 - RNA, 32 nt, Human
cugcguucuccucaucugccucuuccugggcg

SEQ ID NO: 404369 - RNA, 23 nt, Human
cugcguugcccaggcuggucuca

SEQ ID NO: 404370 - RNA, 32 nt, Human
cugcguuggaaagacugaagaggcuggagugc

SEQ ID NO: 404371 - RNA, 32 nt, Human
cugcguuggcugcccaacugcucugucccccg

SEQ ID NO: 404372 - RNA, 31 nt, Human
cugcguuggcuucucccuggggacggggcuc

SEQ ID NO: 404373 - RNA, 32 nt, Human
cugcguugucccauccagccuccacucguguc

SEQ ID NO: 404374 - RNA, 32 nt, Human
cugcguuguggccgugaagugggagcucuccu

SEQ ID NO: 404375 - RNA, 20 nt, Human
cugcguuuccccguuuccau

SEQ ID NO: 404376 - RNA, 32 nt, Human
cugcguuuccucacucucacauaccagcgggc

SEQ ID NO: 404377 - RNA, 32 nt, Human
cugcuaaaaauaagaaaaauuagccaggagug

SEQ ID NO: 404378 - RNA, 32 nt, Human
cugcuaaaaauacaaaaacuagccaggcaugg

SEQ ID NO: 404379 - RNA, 32 nt, Human
cugcuaaaaauacaaaaauagcugggcguggu

SEQ ID NO: 404380 - RNA, 32 nt, Human
cugcuaaaaauacaaaaauuagccagaugugg

SEQ ID NO: 404381 - RNA, 32 nt, Human
cugcuaaaaauacaaaaauuagccaggcaugg

SEQ ID NO: 404382 - RNA, 32 nt, Human
cugcuaaaaauacaaaaauuagccgggcgugg

SEQ ID NO: 404383 - RNA, 32 nt, Human
cugcuaaaaauacaaaaauuagccgggugugg

SEQ ID NO: 404384 - RNA, 32 nt, Human
cugcuaaaaauacaaaaauuagcugggcuugg

SEQ ID NO: 404385 - RNA, 32 nt, Human
cugcuaaaaauacaaaaauuagcugggugcag

SEQ ID NO: 404386 - RNA, 32 nt, Human
cugcuaaaaauacaaaaauuagcugggugugg

SEQ ID NO: 404387 - RNA, 32 nt, Human
cugcuaaaaauacaaaauuagcugggcguggu

SEQ ID NO: 404388 - RNA, 32 nt, Human
cugcuaaaaauacaaaauuuagcugggcaugg

SEQ ID NO: 404389 - RNA, 29 nt, Human
cugcuaaaaauacaaaauuuagcugggua

SEQ ID NO: 404390 - RNA, 32 nt, Human
cugcuaaaacugaagcaccacugugugagcaa

SEQ ID NO: 404391 - RNA, 32 nt, Human
cugcuaaacauccuacaauccccaguucagcc

SEQ ID NO: 404392 - RNA, 32 nt, Human
cugcuaaagugggaagaaggagaacuugaagc

SEQ ID NO: 404393 - RNA, 32 nt, Human
cugcuaaauagggcuccucucuccucucucuc

SEQ ID NO: 404394 - RNA, 32 nt, Human
cugcuaacagccagagugucccagaagcuuuu

SEQ ID NO: 404395 - RNA, 32 nt, Human
cugcuaacagcccagcacccagauaaagccag

SEQ ID NO: 404396 - RNA, 32 nt, Human
cugcuaacagccgccuguauguuucaauaaau

SEQ ID NO: 404397 - RNA, 32 nt, Human
cugcuaacaucacuccaguuuagauggaucuu

SEQ ID NO: 404398 - RNA, 32 nt, Human
cugcuaaccccaaauauuaauagaauugguuu

SEQ ID NO: 404399 - RNA, 32 nt, Human
cugcuaacccuggaaucaaguucacaaccauu

SEQ ID NO: 404400 - RNA, 32 nt, Human
cugcuaaccucuuggaauucacugaaccagcu

SEQ ID NO: 404401 - RNA, 32 nt, Human
cugcuaacgaucucugugacucugugccaaac

SEQ ID NO: 404402 - RNA, 32 nt, Human
cugcuaacgggcuuguguucugcuccauacuu

SEQ ID NO: 404403 - RNA, 20 nt, Human
cugcuaagaccaucacugaa

SEQ ID NO: 404404 - RNA, 22 nt, Human
cugcuaagagcuaaacuaacaa

SEQ ID NO: 404405 - RNA, 32 nt, Human
cugcuaagaggaagaagauguagggagguauu

SEQ ID NO: 404406 - RNA, 32 nt, Human
cugcuaagauaguggcuuuggagguucuggaa

SEQ ID NO: 404407 - RNA, 32 nt, Human
cugcuaagcacccagcagguuggggccuggga

SEQ ID NO: 404408 - RNA, 32 nt, Human
cugcuaagcuuggauuuaacugaaucauauau

SEQ ID NO: 404409 - RNA, 32 nt, Human
cugcuaaggaagagaaagcccaugugugcaca

SEQ ID NO: 404410 - RNA, 32 nt, Human
cugcuaaggcagcaaagauggaggaagaguca

SEQ ID NO: 404411 - RNA, 32 nt, Human
cugcuaagggcuuccaaacauugccugcaccc

SEQ ID NO: 404412 - RNA, 32 nt, Human
cugcuaaucugucaaccugucuugggcagaaa

SEQ ID NO: 404413 - RNA, 32 nt, Human
cugcuaaugccaccacuaccccugccaucacu

SEQ ID NO: 404414 - RNA, 31 nt, Human
cugcuaauggcaucaucaccucuggcucuuc

SEQ ID NO: 404415 - RNA, 32 nt, Human
cugcuaauuuuucugccaaaaguauucuaauu

SEQ ID NO: 404416 - RNA, 32 nt, Human
cugcuacaacauucuaauaaaggcucauuuaa

SEQ ID NO: 404417 - RNA, 32 nt, Human
cugcuacaaggcucugaguguuugucccucac

SEQ ID NO: 404418 - RNA, 32 nt, Human
cugcuacacauccucgugcuuuuuaccucagu

SEQ ID NO: 404419 - RNA, 32 nt, Human
cugcuacacucgucccccuccugccucaucuu

SEQ ID NO: 404420 - RNA, 32 nt, Human
cugcuacagcuccagccccuccugggccuccc

SEQ ID NO: 404421 - RNA, 32 nt, Human
cugcuacagcuucuuggcuggcucugaaggcu

SEQ ID NO: 404422 - RNA, 22 nt, Human
cugcuacaggaccaccugcugc

SEQ ID NO: 404423 - RNA, 32 nt, Human
cugcuacaggcgcaagcagccaccuucugcag

SEQ ID NO: 404424 - RNA, 32 nt, Human
cugcuacauaauuugggugaaguuuccuucug

SEQ ID NO: 404425 - RNA, 32 nt, Human
cugcuacauguagggcaaucugucuuuaagua

SEQ ID NO: 404426 - RNA, 32 nt, Human
cugcuacauuucuugguucccugacugggaaa

SEQ ID NO: 404427 - RNA, 32 nt, Human
cugcuaccaaaacacuagacagugccaagugc

SEQ ID NO: 404428 - RNA, 32 nt, Human
cugcuaccacaguaaccagcagaccuccagga

SEQ ID NO: 404429 - RNA, 32 nt, Human
cugcuaccaccaggacacagugaggagguggu

SEQ ID NO: 404430 - RNA, 22 nt, Human
cugcuaccccaguuccaucugu

SEQ ID NO: 404431 - RNA, 32 nt, Human
cugcuaccgggcuacaaacccaggcagggugg

SEQ ID NO: 404432 - RNA, 32 nt, Human
cugcuaccucgcgcuaggccagcuccaggagg

SEQ ID NO: 404433 - RNA, 32 nt, Human
cugcuaccuguucuugggccucaggcucugca

SEQ ID NO: 404434 - RNA, 31 nt, Human
cugcuacucaaaauguccuguugaagaggga

SEQ ID NO: 404435 - RNA, 32 nt, Human
cugcuacucccaggguaaggggauacacauuu

SEQ ID NO: 404436 - RNA, 23 nt, Human
cugcuacucuguccuuacugcug

SEQ ID NO: 404437 - RNA, 32 nt, Human
cugcuacugauucuuaguuugcuuugauauuu

SEQ ID NO: 404438 - RNA, 32 nt, Human
cugcuacugcccagguuaaccugcacuuugca

SEQ ID NO: 404439 - RNA, 32 nt, Human
cugcuacugcugccgcugcugcucuguggcca

SEQ ID NO: 404440 - RNA, 32 nt, Human
cugcuacuggaugccaucauuggcccccgacu

SEQ ID NO: 404441 - RNA, 32 nt, Human
cugcuacugggcuuuacauggugacagacauu

SEQ ID NO: 404442 - RNA, 32 nt, Human
cugcuacuggugcugcucaccgucuuccuccu

SEQ ID NO: 404443 - RNA, 32 nt, Human
cugcuacuuggaaggcugagacaggaaaauug

SEQ ID NO: 404444 - RNA, 32 nt, Human
cugcuacuuuggggaguugauggccaggaaag

SEQ ID NO: 404445 - RNA, 32 nt, Human
cugcuagaaauacaaaaauuggcugggcgcgg

SEQ ID NO: 404446 - RNA, 32 nt, Human
cugcuagaacagucucauagcugcaguucagc

SEQ ID NO: 404447 - RNA, 32 nt, Human
cugcuagaagugaaagagacacaucagaccua

SEQ ID NO: 404448 - RNA, 32 nt, Human
cugcuagaccaaggagcccuucugcuggcccu

SEQ ID NO: 404449 - RNA, 32 nt, Human
cugcuagacucccuccuccuccaaaucugggc

SEQ ID NO: 404450 - RNA, 32 nt, Human
cugcuagagcccagaccuggugaggacaggcc

SEQ ID NO: 404451 - RNA, 32 nt, Human
cugcuagaucaguauguguccaugacugaccc

SEQ ID NO: 404452 - RNA, 32 nt, Human
cugcuagcagaugcuccuccccuggaccauug

SEQ ID NO: 404453 - RNA, 32 nt, Human
cugcuagcagccaggcuguggagaggaggcgg

SEQ ID NO: 404454 - RNA, 32 nt, Human
cugcuagcaggaggcaccuggccuccgcuggu

SEQ ID NO: 404455 - RNA, 21 nt, Human
cugcuagccccaggccuuuca

SEQ ID NO: 404456 - RNA, 32 nt, Human
cugcuagcccuaggaaggccaggagcccagua

SEQ ID NO: 404457 - RNA, 32 nt, Human
cugcuagccucaaccuccuggggcaggggacg

SEQ ID NO: 404458 - RNA, 21 nt, Human
cugcuagcugccccccgagcc

SEQ ID NO: 404459 - RNA, 32 nt, Human
cugcuaggcauaauuaucaaaaauucauuuuu

SEQ ID NO: 404460 - RNA, 32 nt, Human
cugcuaggcccagguguauugugauuauuuga

SEQ ID NO: 404461 - RNA, 24 nt, Human
cugcuagggaaccccucacugcca

SEQ ID NO: 404462 - RNA, 32 nt, Human
cugcuaguccucaugcaacucaguccccagaa

SEQ ID NO: 404463 - RNA, 32 nt, Human
cugcuagucuaugggguccuuacaaagacauu

SEQ ID NO: 404464 - RNA, 32 nt, Human
cugcuagugggguggugcuggggaagguugac

SEQ ID NO: 404465 - RNA, 32 nt, Human
cugcuaguuagaaagguuuggagggaugacuu

SEQ ID NO: 404466 - RNA, 32 nt, Human
cugcuauaaacacagacccccuugucuuugcc

SEQ ID NO: 404467 - RNA, 32 nt, Human
cugcuauaucaauuuguguagauaugucuguc

SEQ ID NO: 404468 - RNA, 32 nt, Human
cugcuaucaguggggaaaauggaggcccaaga

SEQ ID NO: 404469 - RNA, 32 nt, Human
cugcuauccuccccuuggaaucuaccgccacu

SEQ ID NO: 404470 - RNA, 22 nt, Human
cugcuauccugccucugggcca

SEQ ID NO: 404471 - RNA, 32 nt, Human
cugcuaucucuagaggcaagucugccacgaga

SEQ ID NO: 404472 - RNA, 32 nt, Human
cugcuaucugcagcuccuaggugcuuuccuca

SEQ ID NO: 404473 - RNA, 32 nt, Human
cugcuaugaaaggaauaaaaccuacacacaag

SEQ ID NO: 404474 - RNA, 32 nt, Human
cugcuaugcagggggagagcacaggacuggcc

SEQ ID NO: 404475 - RNA, 32 nt, Human
cugcuaugggagaagcaggcuggggcuugaag

SEQ ID NO: 404476 - RNA, 32 nt, Human
cugcuaugucucucuucugucuuauucucaag

SEQ ID NO: 404477 - RNA, 18 nt, Human
cugcuauuaucagcauca

SEQ ID NO: 404478 - RNA, 32 nt, Human
cugcuauuaugauguuuugcaaaggaaaauaa

SEQ ID NO: 404479 - RNA, 32 nt, Human
cugcuauucauuuugccugaugccaucauuuu

SEQ ID NO: 404480 - RNA, 32 nt, Human
cugcuauugaagaacuucccaaaacuucuuua

SEQ ID NO: 404481 - RNA, 32 nt, Human
cugcuauugacuucucugaauugaagauuuac

SEQ ID NO: 404482 - RNA, 32 nt, Human
cugcuauugcucccaagggcucagagaaggcg

SEQ ID NO: 404483 - RNA, 32 nt, Human
cugcuauuggugauuucugcugccuuuuacuc

SEQ ID NO: 404484 - RNA, 32 nt, Human
cugcuauuucccaagcuggagugcaguggugc

SEQ ID NO: 404485 - RNA, 32 nt, Human
cugcuauuuucauccuccuugugguugcuuuu

SEQ ID NO: 404486 - RNA, 32 nt, Human
cugcucaaacaggccaucagcauccgggacca

SEQ ID NO: 404487 - RNA, 32 nt, Human
cugcucaacaggcguuauuccuaaaguggcuu

SEQ ID NO: 404488 - RNA, 32 nt, Human
cugcucaaccucuugcaggagggagcacacga

SEQ ID NO: 404489 - RNA, 32 nt, Human
cugcucaaggagugggaaguggggcuauaggc

SEQ ID NO: 404490 - RNA, 32 nt, Human
cugcucaagugggucccugaccccugugccuc

SEQ ID NO: 404491 - RNA, 32 nt, Human
cugcucaaguuuucuuugaaaaggagggcugg

SEQ ID NO: 404492 - RNA, 32 nt, Human
cugcucaaucugacugguauagcaggacaguu

SEQ ID NO: 404493 - RNA, 32 nt, Human
cugcucaaugaccgccaggaacugaccugcug

SEQ ID NO: 404494 - RNA, 32 nt, Human
cugcucaauggacacccccagcccagacccgu

SEQ ID NO: 404495 - RNA, 32 nt, Human
cugcucacaagccuguuccuucuuccauugua

SEQ ID NO: 404496 - RNA, 21 nt, Human
cugcucacaccugggccucuc

SEQ ID NO: 404497 - RNA, 32 nt, Human
cugcucacagcccagcaguaugagauauucuc

SEQ ID NO: 404498 - RNA, 32 nt, Human
cugcucacagccuucuacauggugcuacugcu

SEQ ID NO: 404499 - RNA, 32 nt, Human
cugcucaccacagccuggagagggcacaccac

SEQ ID NO: 404500 - RNA, 32 nt, Human
cugcucaccacugucuuccuggguuugcagcu

SEQ ID NO: 404501 - RNA, 32 nt, Human
cugcucaccaggccuagaacaccagaagucgg

SEQ ID NO: 404502 - RNA, 23 nt, Human
cugcucacccaucugugcaggug

SEQ ID NO: 404503 - RNA, 18 nt, Human
cugcucaccccugccuca

SEQ ID NO: 404504 - RNA, 32 nt, Human
cugcucacccgccucuugccccuucuaggggc

SEQ ID NO: 404505 - RNA, 22 nt, Human
cugcucacccuucugucuugca

SEQ ID NO: 404506 - RNA, 32 nt, Human
cugcucaccgcaaccuccgccucccagguuca

SEQ ID NO: 404507 - RNA, 32 nt, Human
cugcucaccgcaaccuccgccuuccagguuca

SEQ ID NO: 404508 - RNA, 32 nt, Human
cugcucaccuccucugcccucuacccuccugu

SEQ ID NO: 404509 - RNA, 32 nt, Human
cugcucaccugggccacccucucuccaggacu

SEQ ID NO: 404510 - RNA, 32 nt, Human
cugcucacgaguucagggcuccugggcggccg

SEQ ID NO: 404511 - RNA, 32 nt, Human
cugcucacggggacccgcucaggcuggaggcc

SEQ ID NO: 404512 - RNA, 32 nt, Human
cugcucacggguauuaaagaacuccgcguugu

SEQ ID NO: 404513 - RNA, 21 nt, Human
cugcucacgucucugccgccu

SEQ ID NO: 404514 - RNA, 32 nt, Human
cugcucacuacaaccucugccucccagguuca

SEQ ID NO: 404515 - RNA, 32 nt, Human
cugcucacuagccuggcuccaugagguccuuu

SEQ ID NO: 404516 - RNA, 32 nt, Human
cugcucacucucugcugaccuccggcucccug

SEQ ID NO: 404517 - RNA, 32 nt, Human
cugcucacucuuuuccugcucccaggcucgcc

SEQ ID NO: 404518 - RNA, 32 nt, Human
cugcucacugacaucuuaauugccugcagaaa

SEQ ID NO: 404519 - RNA, 32 nt, Human
cugcucacugcaaccuccgccucccagguuca

SEQ ID NO: 404520 - RNA, 32 nt, Human
cugcucacugcaaccuccgccucccggguuca

SEQ ID NO: 404521 - RNA, 32 nt, Human
cugcucacugcaaccucugccuccuggguuua

SEQ ID NO: 404522 - RNA, 32 nt, Human
cugcucacugcaagcucagccucucggguuca

SEQ ID NO: 404523 - RNA, 32 nt, Human
cugcucacugcaagcuccgccaucuggguuca

SEQ ID NO: 404524 - RNA, 32 nt, Human
cugcucacugcaagcuccgccucccggguuca

SEQ ID NO: 404525 - RNA, 32 nt, Human
cugcucacugcaagcuccgccuccuggguuca

SEQ ID NO: 404526 - RNA, 32 nt, Human
cugcucacugcagccuccaccuccugggcuca

SEQ ID NO: 404527 - RNA, 32 nt, Human
cugcucacugcucacacgcugccuccucagca

SEQ ID NO: 404528 - RNA, 32 nt, Human
cugcucacuguaaccucugccuccuggguuca

SEQ ID NO: 404529 - RNA, 32 nt, Human
cugcucagaaacuacaauccucagagugaaau

SEQ ID NO: 404530 - RNA, 19 nt, Human
cugcucagaagagcaggug

SEQ ID NO: 404531 - RNA, 32 nt, Human
cugcucagaagccagaacacagcaccugugac

SEQ ID NO: 404532 - RNA, 32 nt, Human
cugcucagaauuuggagggagggagcaguacc

SEQ ID NO: 404533 - RNA, 32 nt, Human
cugcucagacaggaacugcaggacagaagugg

SEQ ID NO: 404534 - RNA, 18 nt, Human
cugcucagaggucaggaa

SEQ ID NO: 404535 - RNA, 32 nt, Human
cugcucagcaaaugucagcagguccagaagca

SEQ ID NO: 404536 - RNA, 32 nt, Human
cugcucagcaccauuucauucuggaccuggga

SEQ ID NO: 404537 - RNA, 32 nt, Human
cugcucagccaagaaggagcgggguggcgcag

SEQ ID NO: 404538 - RNA, 30 nt, Human
cugcucagcuuccagucagaaaggacagug

SEQ ID NO: 404539 - RNA, 32 nt, Human
cugcucagcuucuucuuucauucuaauccuug

SEQ ID NO: 404540 - RNA, 32 nt, Human
cugcucaggagacugaggcaggagaaucacuu

SEQ ID NO: 404541 - RNA, 32 nt, Human
cugcucaggaggcugaggcaggagaaucgcuu

SEQ ID NO: 404542 - RNA, 32 nt, Human
cugcucaggaggcugaggcaggagaauggcgu

SEQ ID NO: 404543 - RNA, 32 nt, Human
cugcucaggaggcugaggcaggagaauugauu

SEQ ID NO: 404544 - RNA, 32 nt, Human
cugcucaggaggcugaggcaggagaauugcuu

SEQ ID NO: 404545 - RNA, 32 nt, Human
cugcucaggagugggcucagagucuagcaaau

SEQ ID NO: 404546 - RNA, 32 nt, Human
cugcucaggccccuucagcuacugccacuucg

SEQ ID NO: 404547 - RNA, 32 nt, Human
cugcucaggccuucucucuggcugccaguugu

SEQ ID NO: 404548 - RNA, 32 nt, Human
cugcucaggcuggagugcaguggugcaaucac

SEQ ID NO: 404549 - RNA, 32 nt, Human
cugcucaggcugggaggcagagggcacaaacc

SEQ ID NO: 404550 - RNA, 32 nt, Human
cugcucaggggaggggagggaucaggcgauga

SEQ ID NO: 404551 - RNA, 32 nt, Human
cugcucaguagagacucacucagcauuaugac

SEQ ID NO: 404552 - RNA, 32 nt, Human
cugcucagucauuuuggagaaauaacaauuuu

SEQ ID NO: 404553 - RNA, 32 nt, Human
cugcucagucgcaggcuccagaugucugcuuc

SEQ ID NO: 404554 - RNA, 32 nt, Human
cugcucagugagagcagugaaagcuaacagcu

SEQ ID NO: 404555 - RNA, 32 nt, Human
cugcucagugaugcuggaaguccuucgcgucu

SEQ ID NO: 404556 - RNA, 32 nt, Human
cugcucagugcaaccucugccucccaggauca

SEQ ID NO: 404557 - RNA, 32 nt, Human
cugcucaguucgccaaggacuuuuccauugac

SEQ ID NO: 404558 - RNA, 32 nt, Human
cugcucaucaaauugcugugauagugaauuau

SEQ ID NO: 404559 - RNA, 32 nt, Human
cugcucaucccuccuucuuuaguaucuuuacg

SEQ ID NO: 404560 - RNA, 32 nt, Human
cugcucaucugaccacugggcaccuuagugcc

SEQ ID NO: 404561 - RNA, 32 nt, Human
cugcucaugaggagccuuaguggagauuccag

SEQ ID NO: 404562 - RNA, 31 nt, Human
cugcucauggcagaggaagcagcuguguucg

SEQ ID NO: 404563 - RNA, 32 nt, Human
cugcucauuuuaaaagcacuucuucuuguauu

SEQ ID NO: 404564 - RNA, 32 nt, Human
cugcuccaaaacucgcccaggucuccagcucu

SEQ ID NO: 404565 - RNA, 32 nt, Human
cugcuccaaaucaaggucuccgccucuuagaa

SEQ ID NO: 404566 - RNA, 32 nt, Human
cugcuccaacgaggaaaacccauuuuugacgu

SEQ ID NO: 404567 - RNA, 24 nt, Human
cugcuccaacuaucaauagucagg

SEQ ID NO: 404568 - RNA, 32 nt, Human
cugcuccaacuuccugcugacagggggcuuag

SEQ ID NO: 404569 - RNA, 32 nt, Human
cugcuccaagaagaugggaggaaggggagccc

SEQ ID NO: 404570 - RNA, 21 nt, Human
cugcuccaagaaggaagcagu

SEQ ID NO: 404571 - RNA, 32 nt, Human
cugcuccaauaccaccaccuuguccacuccca

SEQ ID NO: 404572 - RNA, 32 nt, Human
cugcuccacauccaggcagccugggugaccac

SEQ ID NO: 404573 - RNA, 23 nt, Human
cugcuccaccguggagguccagg

SEQ ID NO: 404574 - RNA, 32 nt, Human
cugcuccaccuucucucucugcccucaccucu

SEQ ID NO: 404575 - RNA, 27 nt, Human
cugcuccacugccuuccucuagugcag

SEQ ID NO: 404576 - RNA, 32 nt, Human
cugcuccacugucugcagcccagauccuguug

SEQ ID NO: 404577 - RNA, 21 nt, Human
cugcuccagaaguugccuugu

SEQ ID NO: 404578 - RNA, 32 nt, Human
cugcuccagagacaaagguggggagggugcug

SEQ ID NO: 404579 - RNA, 23 nt, Human
cugcuccagcagccgggccugca

SEQ ID NO: 404580 - RNA, 32 nt, Human
cugcuccagcaguccccaccacaggccccguu

SEQ ID NO: 404581 - RNA, 23 nt, Human
cugcuccagcaugagcucuugua

SEQ ID NO: 404582 - RNA, 21 nt, Human
cugcuccagccuuggccucuc

SEQ ID NO: 404583 - RNA, 22 nt, Human
cugcuccagcuccagaccuugu

SEQ ID NO: 404584 - RNA, 22 nt, Human
cugcuccagcugccaacuuugc

SEQ ID NO: 404585 - RNA, 32 nt, Human
cugcuccaggaaauugccaagcauuuugauga

SEQ ID NO: 404586 - RNA, 28 nt, Human
cugcuccaggaagcugccuccucugggc

SEQ ID NO: 404587 - RNA, 32 nt, Human
cugcuccaggacugcuaugagagucccuucau

SEQ ID NO: 404588 - RNA, 32 nt, Human
cugcuccaggaggcccagccuguguggcccug

SEQ ID NO: 404589 - RNA, 21 nt, Human
cugcuccaggcacagugcagg

SEQ ID NO: 404590 - RNA, 32 nt, Human
cugcuccaggcaggucagagcagugcaggggg

SEQ ID NO: 404591 - RNA, 32 nt, Human
cugcuccaggccauggcacuccuauccugguu

SEQ ID NO: 404592 - RNA, 32 nt, Human
cugcuccaggcucacucccaaaacagacccag

SEQ ID NO: 404593 - RNA, 23 nt, Human
cugcuccaggcuguagccgcagg

SEQ ID NO: 404594 - RNA, 32 nt, Human
cugcuccagggaggcuuuagccccaagaaggu

SEQ ID NO: 404595 - RNA, 22 nt, Human
cugcuccaggugauagugcggg

SEQ ID NO: 404596 - RNA, 32 nt, Human
cugcuccaggugggagaugugcgcgugucucc

SEQ ID NO: 404597 - RNA, 32 nt, Human
cugcuccagguuuuuguugaaauguggcuuca

SEQ ID NO: 404598 - RNA, 32 nt, Human
cugcuccagucaccccggccucuugcaagaga

SEQ ID NO: 404599 - RNA, 32 nt, Human
cugcuccagugucaucucugcaaagaaggucc

SEQ ID NO: 404600 - RNA, 32 nt, Human
cugcuccauaucuguuucaauuuuaagaaagc

SEQ ID NO: 404601 - RNA, 32 nt, Human
cugcuccaucacaaccuccuuccccaggaaaa

SEQ ID NO: 404602 - RNA, 32 nt, Human
cugcuccaucacugcugagccucuccccaucu

SEQ ID NO: 404603 - RNA, 20 nt, Human
cugcuccaucagggaugcag

SEQ ID NO: 404604 - RNA, 32 nt, Human
cugcuccaucagggaugcagugggcggaacua

SEQ ID NO: 404605 - RNA, 28 nt, Human
cugcucccaagugcaaccucugucugac

SEQ ID NO: 404606 - RNA, 32 nt, Human
cugcucccaaucaugcaggucuccacugcugc

SEQ ID NO: 404607 - RNA, 32 nt, Human
cugcucccacugucuguguucuccucacuguu

SEQ ID NO: 404608 - RNA, 32 nt, Human
cugcucccagagaccuugccacacugaaucuc

SEQ ID NO: 404609 - RNA, 32 nt, Human
cugcucccagagaccuugccacacugaauguc

SEQ ID NO: 404610 - RNA, 32 nt, Human
cugcucccagcaaccucuacauccaggaauga

SEQ ID NO: 404611 - RNA, 32 nt, Human
cugcucccagcccccuccuccuggggcccuca

SEQ ID NO: 404612 - RNA, 32 nt, Human
cugcucccagccgccccaggaccucccagcuc

SEQ ID NO: 404613 - RNA, 32 nt, Human
cugcucccaggagccagugacaugaggugcag

SEQ ID NO: 404614 - RNA, 32 nt, Human
cugcucccaggccaguaagggaaauagaaaaa

SEQ ID NO: 404615 - RNA, 32 nt, Human
cugcucccagugcuguccccaggcugcaguuc

SEQ ID NO: 404616 - RNA, 21 nt, Human
cugcucccaucgucccgagcc

SEQ ID NO: 404617 - RNA, 32 nt, Human
cugcuccccagagggcugccugcugugcacuu

SEQ ID NO: 404618 - RNA, 32 nt, Human
cugcuccccagcccauggacaggagauccugg

SEQ ID NO: 404619 - RNA, 32 nt, Human
cugcuccccagcccggggcaggggcgggggcc

SEQ ID NO: 404620 - RNA, 32 nt, Human
cugcuccccaggcuugagugagugugugccug

SEQ ID NO: 404621 - RNA, 32 nt, Human
cugcuccccaguagcugcaaccacaggugcac

SEQ ID NO: 404622 - RNA, 32 nt, Human
cugcucccccagggcagcaccauguggccccu

SEQ ID NO: 404623 - RNA, 19 nt, Human
cugcuccccccucagcauc

SEQ ID NO: 404624 - RNA, 32 nt, Human
cugcucccccuccaccuuccaccaugagugga

SEQ ID NO: 404625 - RNA, 32 nt, Human
cugcucccccuucaccuuccgccuuuacugua

SEQ ID NO: 404626 - RNA, 32 nt, Human
cugcuccccgccgucugcucccucuccacucu

SEQ ID NO: 404627 - RNA, 32 nt, Human
cugcuccccucaggcccguccugcugccauuc

SEQ ID NO: 404628 - RNA, 32 nt, Human
cugcuccccugagauucguccuucagccccau

SEQ ID NO: 404629 - RNA, 32 nt, Human
cugcuccccugcccucagagcucugcugagga

SEQ ID NO: 404630 - RNA, 32 nt, Human
cugcuccccugggaccuccugucucacccucu

SEQ ID NO: 404631 - RNA, 32 nt, Human
cugcucccgaacugcugaccucagaucaucug

SEQ ID NO: 404632 - RNA, 32 nt, Human
cugcucccgccccuugcugugugggcucaauc

SEQ ID NO: 404633 - RNA, 32 nt, Human
cugcucccggaaaugcaaaugagacuccugga

SEQ ID NO: 404634 - RNA, 32 nt, Human
cugcucccgggcucacucaaggagacugcggc

SEQ ID NO: 404635 - RNA, 32 nt, Human
cugcucccuaacccuacccucacuuucguccc

SEQ ID NO: 404636 - RNA, 32 nt, Human
cugcucccuaaccuuucgccgaauggggcaga

SEQ ID NO: 404637 - RNA, 32 nt, Human
cugcucccucauggcaccuccacgcaaacagc

SEQ ID NO: 404638 - RNA, 32 nt, Human
cugcucccucauucucuccccaccacucucuu

SEQ ID NO: 404639 - RNA, 32 nt, Human
cugcucccuccagaauggaacucaagcugguu

SEQ ID NO: 404640 - RNA, 32 nt, Human
cugcucccuccagguguccaccugguaugggc

SEQ ID NO: 404641 - RNA, 32 nt, Human
cugcucccucuccauagccagcuccucaggcc

SEQ ID NO: 404642 - RNA, 32 nt, Human
cugcucccucugauccuccaucagggccagau

SEQ ID NO: 404643 - RNA, 32 nt, Human
cugcucccugcaaccuccaccucccggguuca

SEQ ID NO: 404644 - RNA, 32 nt, Human
cugcucccugcucccggcucugaggcugcccc

SEQ ID NO: 404645 - RNA, 32 nt, Human
cugcucccugggaggcaggcuccagaagcacc

SEQ ID NO: 404646 - RNA, 32 nt, Human
cugcucccugguguaauucucguguccaagaa

SEQ ID NO: 404647 - RNA, 32 nt, Human
cugcucccuguauuaugugaacagucuuauuc

SEQ ID NO: 404648 - RNA, 32 nt, Human
cugcucccuucccuccguuccuuucggacccu

SEQ ID NO: 404649 - RNA, 32 nt, Human
cugcucccuuucucccucucuuccucccucuu

SEQ ID NO: 404650 - RNA, 32 nt, Human
cugcucccuuucuccucacuggccuuucuuuc

SEQ ID NO: 404651 - RNA, 32 nt, Human
cugcuccgaggagcuggccugauguccucggg

SEQ ID NO: 404652 - RNA, 21 nt, Human
cugcuccgcgugcguagcagu

SEQ ID NO: 404653 - RNA, 32 nt, Human
cugcuccggagggagaggugagcucagggcag

SEQ ID NO: 404654 - RNA, 21 nt, Human
cugcuccggccgucguuugca

SEQ ID NO: 404655 - RNA, 24 nt, Human
cugcuccggccuccggggccuugc

SEQ ID NO: 404656 - RNA, 16 nt, Human
cugcuccgggcuccug

SEQ ID NO: 404657 - RNA, 32 nt, Human
cugcuccguggacugcagucggcaugccagga

SEQ ID NO: 404658 - RNA, 17 nt, Human
cugcuccguggcuccug

SEQ ID NO: 404659 - RNA, 32 nt, Human
cugcuccuacagccggcgauccacucccggcu

SEQ ID NO: 404660 - RNA, 32 nt, Human
cugcuccuaccugcagcacccccagcuccgac

SEQ ID NO: 404661 - RNA, 32 nt, Human
cugcuccuagaggcccagccucugugacuccg

SEQ ID NO: 404662 - RNA, 32 nt, Human
cugcuccuagccugugcucugccagcagcaca

SEQ ID NO: 404663 - RNA, 32 nt, Human
cugcuccuaucucuccaaaccccauacccuuc

SEQ ID NO: 404664 - RNA, 32 nt, Human
cugcuccucacacugcagcugcugggccgugg

SEQ ID NO: 404665 - RNA, 32 nt, Human
cugcuccucagaauccuggugccuugaaguuc

SEQ ID NO: 404666 - RNA, 32 nt, Human
cugcuccucaugggaagaugucucagagccuu

SEQ ID NO: 404667 - RNA, 32 nt, Human
cugcuccuccacuauaagucuaauguucugac

SEQ ID NO: 404668 - RNA, 32 nt, Human
cugcuccuccagcugcugcaccugccucuccg

SEQ ID NO: 404669 - RNA, 18 nt, Human
cugcuccuccccugagcc

SEQ ID NO: 404670 - RNA, 32 nt, Human
cugcuccuccgagccuuugagaaggaucgcuu

SEQ ID NO: 404671 - RNA, 18 nt, Human
cugcuccuccuaucccau

SEQ ID NO: 404672 - RNA, 32 nt, Human
cugcuccuccuccucugacucggaaccugaag

SEQ ID NO: 404673 - RNA, 32 nt, Human
cugcuccuccugccuugucugccuggcaaguu

SEQ ID NO: 404674 - RNA, 32 nt, Human
cugcuccuccugggcauuggcuccagcggagu

SEQ ID NO: 404675 - RNA, 32 nt, Human
cugcuccuccuuggacaguugcagcacucaaa

SEQ ID NO: 404676 - RNA, 32 nt, Human
cugcuccucgccuggcucuugauguccaagga

SEQ ID NO: 404677 - RNA, 32 nt, Human
cugcuccucuacucagccgaugcucggguuuc

SEQ ID NO: 404678 - RNA, 32 nt, Human
cugcuccucuacucuugggucgagaucccuuu

SEQ ID NO: 404679 - RNA, 32 nt, Human
cugcuccucuacuggugaugggcuaauaaagc

SEQ ID NO: 404680 - RNA, 32 nt, Human
cugcuccucuaggcuggccccuuguccacccc

SEQ ID NO: 404681 - RNA, 32 nt, Human
cugcuccucucggccccuccuccugggccgcc

SEQ ID NO: 404682 - RNA, 32 nt, Human
cugcuccucucuguccugccucaggccuaaga

SEQ ID NO: 404683 - RNA, 32 nt, Human
cugcuccucugagcuucuccugcuccucucug

SEQ ID NO: 404684 - RNA, 32 nt, Human
cugcuccucugcaaccugccccucuuuuucuu

SEQ ID NO: 404685 - RNA, 32 nt, Human
cugcuccucugccacugaugcccugucagucc

SEQ ID NO: 404686 - RNA, 32 nt, Human
cugcuccucugccccgaaaccacuggcuggcc

SEQ ID NO: 404687 - RNA, 32 nt, Human
cugcuccucuucacccugaccccucugcagga

SEQ ID NO: 404688 - RNA, 32 nt, Human
cugcuccugaaugacuacuggguacauaacga

SEQ ID NO: 404689 - RNA, 32 nt, Human
cugcuccugcagcagucccaugccccacacuc

SEQ ID NO: 404690 - RNA, 32 nt, Human
cugcuccugcagcagucccgugccccacacuc

SEQ ID NO: 404691 - RNA, 32 nt, Human
cugcuccugcagcgcccugcacagcucugcuc

SEQ ID NO: 404692 - RNA, 32 nt, Human
cugcuccugcagcugccuuuucugccaucagc

SEQ ID NO: 404693 - RNA, 32 nt, Human
cugcuccugccugcauguucucucuguuguug

SEQ ID NO: 404694 - RNA, 32 nt, Human
cugcuccugccugcccuggcccugaggcucca

SEQ ID NO: 404695 - RNA, 32 nt, Human
cugcuccugccuggcgcucuggccaggcucgg

SEQ ID NO: 404696 - RNA, 19 nt, Human
cugcuccugcgccccgggc

SEQ ID NO: 404697 - RNA, 32 nt, Human
cugcuccugcuccuccccuucgggcccccucc

SEQ ID NO: 404698 - RNA, 32 nt, Human
cugcuccugcucucucuccuccagcgacccua

SEQ ID NO: 404699 - RNA, 32 nt, Human
cugcuccugcugcagggacacugagcuggcua

SEQ ID NO: 404700 - RNA, 32 nt, Human
cugcuccugcuggcacuucgcuucuguggccu

SEQ ID NO: 404701 - RNA, 23 nt, Human
cugcuccuggcuaaccccagcaa

SEQ ID NO: 404702 - RNA, 32 nt, Human
cugcuccugucacagaccacacaugucugaau

SEQ ID NO: 404703 - RNA, 32 nt, Human
cugcuccugugaggacaacagccugggccucg

SEQ ID NO: 404704 - RNA, 32 nt, Human
cugcuccuguggccuccagccucagcgaccga

SEQ ID NO: 404705 - RNA, 32 nt, Human
cugcuccuuacccagcaucuggaguacaggac

SEQ ID NO: 404706 - RNA, 32 nt, Human
cugcuccuucacccucacccugaggccccagg

SEQ ID NO: 404707 - RNA, 32 nt, Human
cugcuccuucacugcugacccagaggggcugc

SEQ ID NO: 404708 - RNA, 32 nt, Human
cugcuccuucaugugaucccagggggcagaga

SEQ ID NO: 404709 - RNA, 32 nt, Human
cugcuccuuccuccucuagguccaggccccag

SEQ ID NO: 404710 - RNA, 21 nt, Human
cugcuccuuccugggcccuca

SEQ ID NO: 404711 - RNA, 32 nt, Human
cugcuccuugcagccaugcuccugggcaaccc

SEQ ID NO: 404712 - RNA, 32 nt, Human
cugcuccuugcagccggaagcaguaaguggua

SEQ ID NO: 404713 - RNA, 32 nt, Human
cugcuccuugcguaccacagggauuaauccug

SEQ ID NO: 404714 - RNA, 32 nt, Human
cugcuccuugggccugcagggacucaagaucc

SEQ ID NO: 404715 - RNA, 23 nt, Human
cugcuccuugugcagcucuggua

SEQ ID NO: 404716 - RNA, 16 nt, Human
cugcucgcgccgugcc

SEQ ID NO: 404717 - RNA, 32 nt, Human
cugcucgcuguucccauguccucucuccagcu

SEQ ID NO: 404718 - RNA, 32 nt, Human
cugcucggaaggcugaagcaggggaauggcgu

SEQ ID NO: 404719 - RNA, 32 nt, Human
cugcucggacacucaacaugggggugggugca

SEQ ID NO: 404720 - RNA, 32 nt, Human
cugcucggaggcagaggcagcaagaggcggcg

SEQ ID NO: 404721 - RNA, 32 nt, Human
cugcucggagugaacaggcggccaggaaagaa

SEQ ID NO: 404722 - RNA, 32 nt, Human
cugcucgggaggcagaggcaggagaauggcgu

SEQ ID NO: 404723 - RNA, 32 nt, Human
cugcucgggaggcuaaggcaggagaauugcuu

SEQ ID NO: 404724 - RNA, 32 nt, Human
cugcucgggaggcugagcaggaggauggcuug

SEQ ID NO: 404725 - RNA, 32 nt, Human
cugcucgggaggcugaggcaggagaauagcau

SEQ ID NO: 404726 - RNA, 32 nt, Human
cugcucgggaggcugaggcaggagaaucacuu

SEQ ID NO: 404727 - RNA, 32 nt, Human
cugcucgggaggcugaggcaggagaaucgcuu

SEQ ID NO: 404728 - RNA, 32 nt, Human
cugcucgggaggcugaggcaggagaaucucuu

SEQ ID NO: 404729 - RNA, 32 nt, Human
cugcucgggaggcugaggcaggagaauggcau

SEQ ID NO: 404730 - RNA, 32 nt, Human
cugcucgggaggcugaggcaggagaauggugu

SEQ ID NO: 404731 - RNA, 32 nt, Human
cugcucgggaggcugaggcaggagaauugcuu

SEQ ID NO: 404732 - RNA, 32 nt, Human
cugcucgggaggcugaggcaggagaauuguug

SEQ ID NO: 404733 - RNA, 32 nt, Human
cugcucgggaggcugaggcaggggaaucgcuu

SEQ ID NO: 404734 - RNA, 32 nt, Human
cugcucgggagggugaggcaggagaauggcau

SEQ ID NO: 404735 - RNA, 32 nt, Human
cugcucgggagguugaugcaggagaaucacuu

SEQ ID NO: 404736 - RNA, 32 nt, Human
cugcucgggggaagcccagugggauuugcauc

SEQ ID NO: 404737 - RNA, 32 nt, Human
cugcucggugcuggugaacaccucuugcaggc

SEQ ID NO: 404738 - RNA, 32 nt, Human
cugcucguggacugugcuggugcaucacggau

SEQ ID NO: 404739 - RNA, 32 nt, Human
cugcucguucuugccgagggugcagugguggc

SEQ ID NO: 404740 - RNA, 32 nt, Human
cugcucuacacacuggugucuccugcggaagg

SEQ ID NO: 404741 - RNA, 32 nt, Human
cugcucuacaucuggccucugccaauggaaau

SEQ ID NO: 404742 - RNA, 32 nt, Human
cugcucuacugcuuccccuccugucuccaguu

SEQ ID NO: 404743 - RNA, 21 nt, Human
cugcucuagcagcaaggcagu

SEQ ID NO: 404744 - RNA, 24 nt, Human
cugcucuagccgcugcucaggcca

SEQ ID NO: 404745 - RNA, 24 nt, Human
cugcucuagcugcccacagaugcc

SEQ ID NO: 404746 - RNA, 22 nt, Human
cugcucuagcugccgucaguca

SEQ ID NO: 404747 - RNA, 20 nt, Human
cugcucuagcuugagcagcu

SEQ ID NO: 404748 - RNA, 24 nt, Human
cugcucuaggaccugggccucuca

SEQ ID NO: 404749 - RNA, 32 nt, Human
cugcucuagggaaaccuucaaaagcaauaaaa

SEQ ID NO: 404750 - RNA, 32 nt, Human
cugcucuauuucuuucuccuugcccucugaaa

SEQ ID NO: 404751 - RNA, 32 nt, Human
cugcucucaaacuccugaccucaggugauccg

SEQ ID NO: 404752 - RNA, 32 nt, Human
cugcucucaagugauccuccugccucagccuc

SEQ ID NO: 404753 - RNA, 32 nt, Human
cugcucucagagccagaaaaugcugacagccu

SEQ ID NO: 404754 - RNA, 32 nt, Human
cugcucucagagguggaagagcaaggcuggaa

SEQ ID NO: 404755 - RNA, 32 nt, Human
cugcucucagcagccaccggggauggaggaac

SEQ ID NO: 404756 - RNA, 32 nt, Human
cugcucucagcaguuugaucgauggacuaagg

SEQ ID NO: 404757 - RNA, 23 nt, Human
cugcucucagcuugugccuugua

SEQ ID NO: 404758 - RNA, 32 nt, Human
cugcucuccagccugagcgacagagcgagacu

SEQ ID NO: 404759 - RNA, 32 nt, Human
cugcucuccagccuggguggcagagcgagacc

SEQ ID NO: 404760 - RNA, 23 nt, Human
cugcucuccaguaccugcugcug

SEQ ID NO: 404761 - RNA, 32 nt, Human
cugcucuccaguaccugcugcugaucuguuuc

SEQ ID NO: 404762 - RNA, 32 nt, Human
cugcucuccauagcaagguucuagggcucuuc

SEQ ID NO: 404763 - RNA, 32 nt, Human
cugcucucccagagggaaggucuugcuguuug

SEQ ID NO: 404764 - RNA, 32 nt, Human
cugcucuccccaggauggggucagaggagaca

SEQ ID NO: 404765 - RNA, 32 nt, Human
cugcucucccgaggaagaugcucugcaggaaa

SEQ ID NO: 404766 - RNA, 32 nt, Human
cugcucuccuucuuaagaagggugggaggcac

SEQ ID NO: 404767 - RNA, 22 nt, Human
cugcucuccuugcccugggcca

SEQ ID NO: 404768 - RNA, 32 nt, Human
cugcucucgaacuccugaccucaggugaucca

SEQ ID NO: 404769 - RNA, 32 nt, Human
cugcucucgaacuccugaccucaucguccacc

SEQ ID NO: 404770 - RNA, 32 nt, Human
cugcucucgaacuccugaccucaugauccgcc

SEQ ID NO: 404771 - RNA, 32 nt, Human
cugcucucggcaccuggggcuccaugcuuacc

SEQ ID NO: 404772 - RNA, 32 nt, Human
cugcucucgugccauuugagaggcugcugccc

SEQ ID NO: 404773 - RNA, 32 nt, Human
cugcucucuacccagcccaucuugccuccaug

SEQ ID NO: 404774 - RNA, 32 nt, Human
cugcucucucaacaucacauacagcuucagcu

SEQ ID NO: 404775 - RNA, 32 nt, Human
cugcucucucaugaaacaagagcuagaaacuc

SEQ ID NO: 404776 - RNA, 32 nt, Human
cugcucucuccacuucucugcuuauauugucu

SEQ ID NO: 404777 - RNA, 32 nt, Human
cugcucucuccucucucagucucuccuuuucu

SEQ ID NO: 404778 - RNA, 32 nt, Human
cugcucucucucugaagucugcuuucugagag

SEQ ID NO: 404779 - RNA, 32 nt, Human
cugcucucuggccaacggcuucacaccuuccc

SEQ ID NO: 404780 - RNA, 32 nt, Human
cugcucucuggccuccagccucccagcagcau

SEQ ID NO: 404781 - RNA, 32 nt, Human
cugcucucugugggucuaugagucagcagcaa

SEQ ID NO: 404782 - RNA, 32 nt, Human
cugcucucuucucuccccucugucccucuuca

SEQ ID NO: 404783 - RNA, 32 nt, Human
cugcucucuugccacacugaaggcuagagaag

SEQ ID NO: 404784 - RNA, 18 nt, Human
cugcucucuuggggacuu

SEQ ID NO: 404785 - RNA, 23 nt, Human
cugcucugacccucugcccugca

SEQ ID NO: 404786 - RNA, 32 nt, Human
cugcucugacccuuggccucaggcuuggcccu

SEQ ID NO: 404787 - RNA, 24 nt, Human
cugcucugacugcguccuccccag

SEQ ID NO: 404788 - RNA, 32 nt, Human
cugcucugagaggcacuucacucacaggccug

SEQ ID NO: 404789 - RNA, 32 nt, Human
cugcucugagcaccuccacaccccacugccuc

SEQ ID NO: 404790 - RNA, 21 nt, Human
cugcucugagcccuuccccag

SEQ ID NO: 404791 - RNA, 32 nt, Human
cugcucugagccucacagccgggaggugacag

SEQ ID NO: 404792 - RNA, 22 nt, Human
cugcucugagccugcccagggg

SEQ ID NO: 404793 - RNA, 22 nt, Human
cugcucugagcucucucuugca

SEQ ID NO: 404794 - RNA, 32 nt, Human
cugcucugaggguggguccaggcagacaugug

SEQ ID NO: 404795 - RNA, 32 nt, Human
cugcucugaguauuuaguaaccaacacugcgu

SEQ ID NO: 404796 - RNA, 32 nt, Human
cugcucugaucacuacgugcugugaagggcac

SEQ ID NO: 404797 - RNA, 32 nt, Human
cugcucugaugccgaaggggaggcagaaagug

SEQ ID NO: 404798 - RNA, 32 nt, Human
cugcucugcaaccuuucucuucucacgggucu

SEQ ID NO: 404799 - RNA, 23 nt, Human
cugcucugcagcacacccguggg

SEQ ID NO: 404800 - RNA, 22 nt, Human
cugcucugccacugccccaggg

SEQ ID NO: 404801 - RNA, 22 nt, Human
cugcucugccagcccgcugagg

SEQ ID NO: 404802 - RNA, 24 nt, Human
cugcucugccaguccagcugaggg

SEQ ID NO: 404803 - RNA, 32 nt, Human
cugcucugcccaggagguggcguccagcaguc

SEQ ID NO: 404804 - RNA, 24 nt, Human
cugcucugccccuagcuccagggg

SEQ ID NO: 404805 - RNA, 32 nt, Human
cugcucugccggggucaucuccugggucaucg

SEQ ID NO: 404806 - RNA, 32 nt, Human
cugcucugccuccugaggcagguuuucagaga

SEQ ID NO: 404807 - RNA, 31 nt, Human
cugcucugccucucugaaccucgguuucuuc

SEQ ID NO: 404808 - RNA, 22 nt, Human
cugcucugccugagcaucaggg

SEQ ID NO: 404809 - RNA, 32 nt, Human
cugcucugcggaguuccucuucccagcgaagg

SEQ ID NO: 404810 - RNA, 32 nt, Human
cugcucugcuacaccagggcugccucaggcca

SEQ ID NO: 404811 - RNA, 19 nt, Human
cugcucugcucccgggcua

SEQ ID NO: 404812 - RNA, 22 nt, Human
cugcucugcucgccucggauca

SEQ ID NO: 404813 - RNA, 19 nt, Human
cugcucugcugccccggcc

SEQ ID NO: 404814 - RNA, 22 nt, Human
cugcucugcugccugcccgggg

SEQ ID NO: 404815 - RNA, 22 nt, Human
cugcucugcugccuguccuggg

SEQ ID NO: 404816 - RNA, 32 nt, Human
cugcucuggaagagaggcaguagcaaagagau

SEQ ID NO: 404817 - RNA, 32 nt, Human
cugcucuggaagccaaggugggaggauugucu

SEQ ID NO: 404818 - RNA, 32 nt, Human
cugcucuggacugaaagugaugcaucaugacg

SEQ ID NO: 404819 - RNA, 32 nt, Human
cugcucuggagaggcagggugggauagggaac

SEQ ID NO: 404820 - RNA, 32 nt, Human
cugcucuggagggagugagcaggaugcuguga

SEQ ID NO: 404821 - RNA, 32 nt, Human
cugcucuggagugggggagguugguggaccau

SEQ ID NO: 404822 - RNA, 32 nt, Human
cugcucuggauagcagauccgcuggcucccag

SEQ ID NO: 404823 - RNA, 32 nt, Human
cugcucuggccaaaccuucucucugcugacug

SEQ ID NO: 404824 - RNA, 32 nt, Human
cugcucuggcuuuugccuucuugaugccagcc

SEQ ID NO: 404825 - RNA, 32 nt, Human
cugcucugggagguguuggaguucacuguuga

SEQ ID NO: 404826 - RNA, 32 nt, Human
cugcucugggcccuggccuccuucccuucuug

SEQ ID NO: 404827 - RNA, 32 nt, Human
cugcucugggcugugaagggguggagcaggca

SEQ ID NO: 404828 - RNA, 22 nt, Human
cugcucuggggccagcccaggg

SEQ ID NO: 404829 - RNA, 20 nt, Human
cugcucugggggugucuggg

SEQ ID NO: 404830 - RNA, 25 nt, Human
cugcucuggguggccucugccuugc

SEQ ID NO: 404831 - RNA, 32 nt, Human
cugcucuggucccuccaaaagccgacgaaucc

SEQ ID NO: 404832 - RNA, 32 nt, Human
cugcucuggugugugaaggucgguggguuaac

SEQ ID NO: 404833 - RNA, 19 nt, Human
cugcucuguccucugugaa

SEQ ID NO: 404834 - RNA, 32 nt, Human
cugcucuguccucugugaacacacaggaggcc

SEQ ID NO: 404835 - RNA, 32 nt, Human
cugcucugucuacauuuauuuguacccacacg

SEQ ID NO: 404836 - RNA, 32 nt, Human
cugcucugucugcgacaccaagauccagcugg

SEQ ID NO: 404837 - RNA, 32 nt, Human
cugcucugugccguggcuuucucaguuagucc

SEQ ID NO: 404838 - RNA, 22 nt, Human
cugcucugugcuccccacucca

SEQ ID NO: 404839 - RNA, 22 nt, Human
cugcucuguguuugggccucuc

SEQ ID NO: 404840 - RNA, 32 nt, Human
cugcucuguucucccucuacauuucucugcag

SEQ ID NO: 404841 - RNA, 32 nt, Human
cugcucuguucuucccccuccuuaggccccag

SEQ ID NO: 404842 - RNA, 23 nt, Human
cugcucuucagcuccugcuccca

SEQ ID NO: 404843 - RNA, 32 nt, Human
cugcucuuccacccuuuuccucuuccgcugug

SEQ ID NO: 404844 - RNA, 32 nt, Human
cugcucuucccccacauuaauaccuuuuccuu

SEQ ID NO: 404845 - RNA, 32 nt, Human
cugcucuucugcguuaagugggagacaauguc

SEQ ID NO: 404846 - RNA, 32 nt, Human
cugcucuucuuccuccaauccugggucucagu

SEQ ID NO: 404847 - RNA, 32 nt, Human
cugcucuucuucgccuccuuuauuuaauucau

SEQ ID NO: 404848 - RNA, 32 nt, Human
cugcucuugaacuccugaccucagguaaucca

SEQ ID NO: 404849 - RNA, 32 nt, Human
cugcucuugaacuccugaccucagguaaucga

SEQ ID NO: 404850 - RNA, 32 nt, Human
cugcucuugaacuccugaccucaggugauccg

SEQ ID NO: 404851 - RNA, 32 nt, Human
cugcucuugaagguguauuacaucagguuuuc

SEQ ID NO: 404852 - RNA, 20 nt, Human
cugcucuugcaucugggcca

SEQ ID NO: 404853 - RNA, 32 nt, Human
cugcucuugcccagggagcaucccuucucucu

SEQ ID NO: 404854 - RNA, 32 nt, Human
cugcucuugggaacagccagaguaagauugga

SEQ ID NO: 404855 - RNA, 32 nt, Human
cugcucuuuccacuugcccuguguucuuuccc

SEQ ID NO: 404856 - RNA, 32 nt, Human
cugcucuuucugccucugggcucauguaucug

SEQ ID NO: 404857 - RNA, 32 nt, Human
cugcucuuuggcgcaguacuccaggcuauaga

SEQ ID NO: 404858 - RNA, 32 nt, Human
cugcucuuuucccaucuuuccaauacuuucuu

SEQ ID NO: 404859 - RNA, 32 nt, Human
cugcucuuuuucugcugucacugucaaucugc

SEQ ID NO: 404860 - RNA, 19 nt, Human
cugcugaaaaauucagcaa

SEQ ID NO: 404861 - RNA, 32 nt, Human
cugcugaaacaccucccaggggcuccaccugu

SEQ ID NO: 404862 - RNA, 32 nt, Human
cugcugaaaccaggaauccaggucaggcccga

SEQ ID NO: 404863 - RNA, 23 nt, Human
cugcugaaacucucguugaguca

SEQ ID NO: 404864 - RNA, 23 nt, Human
cugcugaaacuuguuccaccuca

SEQ ID NO: 404865 - RNA, 32 nt, Human
cugcugaagaacauguugcucaaggagaugcc

SEQ ID NO: 404866 - RNA, 32 nt, Human
cugcugaagacugacggggcccaggguccgcu

SEQ ID NO: 404867 - RNA, 32 nt, Human
cugcugaagccaucuccuugccgacaaacaca

SEQ ID NO: 404868 - RNA, 22 nt, Human
cugcugaagcccugcugaguca

SEQ ID NO: 404869 - RNA, 32 nt, Human
cugcugaaggcugugguggaccgggcuggauc

SEQ ID NO: 404870 - RNA, 32 nt, Human
cugcugaaguaaagcagaaaguacugcauagu

SEQ ID NO: 404871 - RNA, 32 nt, Human
cugcugaaucugucuguucaguuugucaagga

SEQ ID NO: 404872 - RNA, 32 nt, Human
cugcugaauggcggagcuaaaauagcuauaac

SEQ ID NO: 404873 - RNA, 32 nt, Human
cugcugaaugugccgcugacucagcugugcug

SEQ ID NO: 404874 - RNA, 32 nt, Human
cugcugacaaacccuucuuaguuccuucaauu

SEQ ID NO: 404875 - RNA, 32 nt, Human
cugcugacaaauaauuccugagguucuccaca

SEQ ID NO: 404876 - RNA, 32 nt, Human
cugcugacacuggauucaugaaccagggggau

SEQ ID NO: 404877 - RNA, 32 nt, Human
cugcugacagguuugguggcacugcugguuac

SEQ ID NO: 404878 - RNA, 32 nt, Human
cugcugaccagaaauguugccccuaaguucuu

SEQ ID NO: 404879 - RNA, 32 nt, Human
cugcugaccaugugugaagaccagccucacag

SEQ ID NO: 404880 - RNA, 32 nt, Human
cugcugacccaggguuuccccuuccccuuccc

SEQ ID NO: 404881 - RNA, 19 nt, Human
cugcugacccccugggcca

SEQ ID NO: 404882 - RNA, 18 nt, Human
cugcugaccccugagcca

SEQ ID NO: 404883 - RNA, 32 nt, Human
cugcugaccuccagcaccccgcacuugcucau

SEQ ID NO: 404884 - RNA, 32 nt, Human
cugcugaccucggcugcuccucucacagaccc

SEQ ID NO: 404885 - RNA, 32 nt, Human
cugcugaccuugcugggaacacucugaggaca

SEQ ID NO: 404886 - RNA, 23 nt, Human
cugcugacgagucccuuccugga

SEQ ID NO: 404887 - RNA, 32 nt, Human
cugcugacguacuguggauguagaguauaaaa

SEQ ID NO: 404888 - RNA, 21 nt, Human
cugcugacuaaacacuuucaa

SEQ ID NO: 404889 - RNA, 32 nt, Human
cugcugacuucugcccuucaccccugucauuc

SEQ ID NO: 404890 - RNA, 32 nt, Human
cugcugacuugcaguuuaaggggaaucuauuc

SEQ ID NO: 404891 - RNA, 32 nt, Human
cugcugacuuuccuaaccaaaacaacuuccuu

SEQ ID NO: 404892 - RNA, 32 nt, Human
cugcugagacccuucccagggaggagccaccc

SEQ ID NO: 404893 - RNA, 32 nt, Human
cugcugagcagcccggcucuuaacagagaugc

SEQ ID NO: 404894 - RNA, 32 nt, Human
cugcugagcaggagggagaggaaggggguccu

SEQ ID NO: 404895 - RNA, 21 nt, Human
cugcugagccgcccccgggcc

SEQ ID NO: 404896 - RNA, 18 nt, Human
cugcugagcugggucuuc

SEQ ID NO: 404897 - RNA, 32 nt, Human
cugcugaggaagaccaaagcagcacucguugc

SEQ ID NO: 404898 - RNA, 32 nt, Human
cugcugaggaaggauaggcuguggaaauuagg

SEQ ID NO: 404899 - RNA, 23 nt, Human
cugcugaggaccccgcugagcca

SEQ ID NO: 404900 - RNA, 31 nt, Human
cugcugaggagaccuggugcagggacuaauc

SEQ ID NO: 404901 - RNA, 32 nt, Human
cugcugaggaggaggaagaggacacugaaggc

SEQ ID NO: 404902 - RNA, 32 nt, Human
cugcugaggcggagacugcagugagcugagau

SEQ ID NO: 404903 - RNA, 32 nt, Human
cugcugagggaccuuggagagcucaggauggc

SEQ ID NO: 404904 - RNA, 32 nt, Human
cugcugagguggagacugcagugagcugagau

SEQ ID NO: 404905 - RNA, 32 nt, Human
cugcugagguucuagaauagaagggcugccaa

SEQ ID NO: 404906 - RNA, 32 nt, Human
cugcugaguagcugggacuacaggcacaugcc

SEQ ID NO: 404907 - RNA, 32 nt, Human
cugcugaguagcugggauugcagguguguacc

SEQ ID NO: 404908 - RNA, 22 nt, Human
cugcugagucaacccaauaguu

SEQ ID NO: 404909 - RNA, 32 nt, Human
cugcugaguuacugaaagaccuuuuggaccac

SEQ ID NO: 404910 - RNA, 32 nt, Human
cugcugaguucccuuguucuagcuagcagcac

SEQ ID NO: 404911 - RNA, 32 nt, Human
cugcugaguucugcgggaguuugcugagcaac

SEQ ID NO: 404912 - RNA, 32 nt, Human
cugcugauaaagccucagguccagauaaagau

SEQ ID NO: 404913 - RNA, 32 nt, Human
cugcugaucacucuuucaugccuguguaucca

SEQ ID NO: 404914 - RNA, 19 nt, Human
cugcugaucucccugagcc

SEQ ID NO: 404915 - RNA, 32 nt, Human
cugcugaucugugccacugaacuccaguucuu

SEQ ID NO: 404916 - RNA, 18 nt, Human
cugcugauguccugacca

SEQ ID NO: 404917 - RNA, 32 nt, Human
cugcugauguuggggugaaaccaccuggagug

SEQ ID NO: 404918 - RNA, 32 nt, Human
cugcugauuccucagaauggcuucuggaccuu

SEQ ID NO: 404919 - RNA, 32 nt, Human
cugcugauuguacuuuccccuccugagccccg

SEQ ID NO: 404920 - RNA, 32 nt, Human
cugcugcaaaacuccaggcuucccaggguugg

SEQ ID NO: 404921 - RNA, 32 nt, Human
cugcugcaacacuuagggcuugagagcaccug

SEQ ID NO: 404922 - RNA, 32 nt, Human
cugcugcaacaucuucuccuccaggaaggcuu

SEQ ID NO: 404923 - RNA, 32 nt, Human
cugcugcaacccugacagccgucucccaggcc

SEQ ID NO: 404924 - RNA, 32 nt, Human
cugcugcaacuaagucagcaacacaguuucuc

SEQ ID NO: 404925 - RNA, 32 nt, Human
cugcugcaagagccauaacuuugaggcauuuu

SEQ ID NO: 404926 - RNA, 32 nt, Human
cugcugcaaucaaggugguucuggugcggggg

SEQ ID NO: 404927 - RNA, 20 nt, Human
cugcugcacacgcuagcaua

SEQ ID NO: 404928 - RNA, 32 nt, Human
cugcugcaccaccaccaucaccacgcuccccu

SEQ ID NO: 404929 - RNA, 32 nt, Human
cugcugcaccacugcccugccuucgggcugcu

SEQ ID NO: 404930 - RNA, 32 nt, Human
cugcugcacugcccuccgcccuucccugacac

SEQ ID NO: 404931 - RNA, 32 nt, Human
cugcugcagacccucgggaucgucgcuggaaa

SEQ ID NO: 404932 - RNA, 32 nt, Human
cugcugcagagggagccuguguuugcaaaacc

SEQ ID NO: 404933 - RNA, 32 nt, Human
cugcugcagcacgccugugcucugugcuugcc

SEQ ID NO: 404934 - RNA, 32 nt, Human
cugcugcagcccagggcucucugggcagcuga

SEQ ID NO: 404935 - RNA, 32 nt, Human
cugcugcagccccguguuggccaugucgucac

SEQ ID NO: 404936 - RNA, 19 nt, Human
cugcugcagcuccugggcc

SEQ ID NO: 404937 - RNA, 22 nt, Human
cugcugcaggaacccugggcca

SEQ ID NO: 404938 - RNA, 32 nt, Human
cugcugcaggcaggaaggcaugugaguguacg

SEQ ID NO: 404939 - RNA, 32 nt, Human
cugcugcagggagggcagaggcauugcugaga

SEQ ID NO: 404940 - RNA, 32 nt, Human
cugcugcagggccuuccugccuggacagaguu

SEQ ID NO: 404941 - RNA, 32 nt, Human
cugcugcagggugcugccugagggguccuggg

SEQ ID NO: 404942 - RNA, 32 nt, Human
cugcugcaggucacacagcaaugcagcucagg

SEQ ID NO: 404943 - RNA, 20 nt, Human
cugcugcaguaacugagcca

SEQ ID NO: 404944 - RNA, 32 nt, Human
cugcugcaguacggagccucaggcggacagau

SEQ ID NO: 404945 - RNA, 19 nt, Human
cugcugcagucccgggaca

SEQ ID NO: 404946 - RNA, 32 nt, Human
cugcugcaguguggggcugaccccaaugcugc

SEQ ID NO: 404947 - RNA, 32 nt, Human
cugcugcauacacugaagggccacgaaguaca

SEQ ID NO: 404948 - RNA, 19 nt, Human
cugcugcaucgaguccuua

SEQ ID NO: 404949 - RNA, 32 nt, Human
cugcugcaugucuggagggaccaaggaaagug

SEQ ID NO: 404950 - RNA, 24 nt, Human
cugcugcaugugugcccugagcca

SEQ ID NO: 404951 - RNA, 20 nt, Human
cugcugcauuccccaucugu

SEQ ID NO: 404952 - RNA, 22 nt, Human
cugcugccaccgccgccgccac

SEQ ID NO: 404953 - RNA, 32 nt, Human
cugcugccaccucaugccccuccuggcaugau

SEQ ID NO: 404954 - RNA, 32 nt, Human
cugcugccaccucuccugggccuguguccuuu

SEQ ID NO: 404955 - RNA, 32 nt, Human
cugcugccaccucuuguucucucccccguucc

SEQ ID NO: 404956 - RNA, 32 nt, Human
cugcugccaccugcgccagcccuaccuuccac

SEQ ID NO: 404957 - RNA, 20 nt, Human
cugcugccagacacugcgac

SEQ ID NO: 404958 - RNA, 32 nt, Human
cugcugccagaucucccagcuguacagggcug

SEQ ID NO: 404959 - RNA, 32 nt, Human
cugcugccagccugugucugugcagucccccu

SEQ ID NO: 404960 - RNA, 18 nt, Human
cugcugccagcggggcag

SEQ ID NO: 404961 - RNA, 21 nt, Human
cugcugccaggcaccaugaca

SEQ ID NO: 404962 - RNA, 32 nt, Human
cugcugccaguucuggcucaaauguggcacaa

SEQ ID NO: 404963 - RNA, 21 nt, Human
cugcugccauacauuguaaca

SEQ ID NO: 404964 - RNA, 32 nt, Human
cugcugccauacucccccuuggcucccccugu

SEQ ID NO: 404965 - RNA, 21 nt, Human
cugcugccaucugccccggcu

SEQ ID NO: 404966 - RNA, 24 nt, Human
cugcugcccaagcuggaguggcag

SEQ ID NO: 404967 - RNA, 32 nt, Human
cugcugcccaagcuggaguggcaguggcauga

SEQ ID NO: 404968 - RNA, 21 nt, Human
cugcugcccaauaaaccuguc

SEQ ID NO: 404969 - RNA, 24 nt, Human
cugcugcccaaucuccaucuguca

SEQ ID NO: 404970 - RNA, 32 nt, Human
cugcugcccaccaauggagaaucccaauguug

SEQ ID NO: 404971 - RNA, 32 nt, Human
cugcugcccacccucugcucccugggaugggc

SEQ ID NO: 404972 - RNA, 18 nt, Human
cugcugcccaccugugac

SEQ ID NO: 404973 - RNA, 19 nt, Human
cugcugcccagagaccuua

SEQ ID NO: 404974 - RNA, 22 nt, Human
cugcugcccaggaguggccagu

SEQ ID NO: 404975 - RNA, 24 nt, Human
cugcugcccaggcuagagugcagu

SEQ ID NO: 404976 - RNA, 32 nt, Human
cugcugcccaggcuagagugcaguggcgugau

SEQ ID NO: 404977 - RNA, 32 nt, Human
cugcugcccaggcuggaaugcaguggugccau

SEQ ID NO: 404978 - RNA, 24 nt, Human
cugcugcccaggcuggaguacagu

SEQ ID NO: 404979 - RNA, 32 nt, Human
cugcugcccaggcuggaguacagugaugugau

SEQ ID NO: 404980 - RNA, 32 nt, Human
cugcugcccaggcuggaguacaguggcacaau

SEQ ID NO: 404981 - RNA, 24 nt, Human
cugcugcccaggcuggagugcagu

SEQ ID NO: 404982 - RNA, 32 nt, Human
cugcugcccaggcuggagugcaguggcacgau

SEQ ID NO: 404983 - RNA, 32 nt, Human
cugcugcccaggcuggagugcaguggugcaau

SEQ ID NO: 404984 - RNA, 19 nt, Human
cugcugcccaggcugugca

SEQ ID NO: 404985 - RNA, 20 nt, Human
cugcugcccaggcugugcag

SEQ ID NO: 404986 - RNA, 21 nt, Human
cugcugcccagggaagcgcag

SEQ ID NO: 404987 - RNA, 22 nt, Human
cugcugcccaggggcuuccagu

SEQ ID NO: 404988 - RNA, 32 nt, Human
cugcugcccagguuggagugcaguggcacgau

SEQ ID NO: 404989 - RNA, 19 nt, Human
cugcugccccagccugaca

SEQ ID NO: 404990 - RNA, 20 nt, Human
cugcugcccccagcuggagg

SEQ ID NO: 404991 - RNA, 22 nt, Human
cugcugccccccgacaugugac

SEQ ID NO: 404992 - RNA, 32 nt, Human
cugcugcccccugccacacagggggccgggcc

SEQ ID NO: 404993 - RNA, 23 nt, Human
cugcugccccgugggcugugcca

SEQ ID NO: 404994 - RNA, 32 nt, Human
cugcugccccuaccuguuccugaggccucauu

SEQ ID NO: 404995 - RNA, 23 nt, Human
cugcugccccucccagccugcca

SEQ ID NO: 404996 - RNA, 32 nt, Human
cugcugccccucccucucucucccucucucuc

SEQ ID NO: 404997 - RNA, 31 nt, Human
cugcugccccuugcuuugccuguguuugcug

SEQ ID NO: 404998 - RNA, 32 nt, Human
cugcugcccgagagcagggaccagaaccugcc

SEQ ID NO: 404999 - RNA, 23 nt, Human
cugcugcccgcuccccggcgcca

SEQ ID NO: 405000 - RNA, 19 nt, Human
cugcugcccggcucgggcc

SEQ ID NO: 405001 - RNA, 32 nt, Human
cugcugcccgggggucuccuucaggcucuuug

SEQ ID NO: 405002 - RNA, 19 nt, Human
cugcugcccuccacgugca

SEQ ID NO: 405003 - RNA, 32 nt, Human
cugcugcccucccccuccucuccaccaucguc

SEQ ID NO: 405004 - RNA, 32 nt, Human
cugcugcccuccuccuggccucccagguuuca

SEQ ID NO: 405005 - RNA, 32 nt, Human
cugcugcccuccugucgagaaugacugccagg

SEQ ID NO: 405006 - RNA, 21 nt, Human
cugcugcccugaccugaguca

SEQ ID NO: 405007 - RNA, 32 nt, Human
cugcugcccugagcagagucaucaugucuucu

SEQ ID NO: 405008 - RNA, 32 nt, Human
cugcugcccugagcccuuccuucaggccagca

SEQ ID NO: 405009 - RNA, 31 nt, Human
cugcugcccuucucugggcauguucugaaug

SEQ ID NO: 405010 - RNA, 32 nt, Human
cugcugcccuugacuggugcucaggggaccac

SEQ ID NO: 405011 - RNA, 21 nt, Human
cugcugcccuuuacugugaca

SEQ ID NO: 405012 - RNA, 21 nt, Human
cugcugccgacuaacugugca

SEQ ID NO: 405013 - RNA, 32 nt, Human
cugcugccgcugccuccuccuggguaaggggc

SEQ ID NO: 405014 - RNA, 19 nt, Human
cugcugccggaccugagcc

SEQ ID NO: 405015 - RNA, 32 nt, Human
cugcugccuagcaauuuccaucuuagccacac

SEQ ID NO: 405016 - RNA, 23 nt, Human
cugcugccuaggcugagugcagu

SEQ ID NO: 405017 - RNA, 32 nt, Human
cugcugccucaacuuccugggcucaagugacc

SEQ ID NO: 405018 - RNA, 22 nt, Human
cugcugccucagcuccaagaca

SEQ ID NO: 405019 - RNA, 20 nt, Human
cugcugccucccacugaaca

SEQ ID NO: 405020 - RNA, 32 nt, Human
cugcugccuccccuaagaaucuuccuugcccu

SEQ ID NO: 405021 - RNA, 32 nt, Human
cugcugccuccccugcagccagggucugggca

SEQ ID NO: 405022 - RNA, 19 nt, Human
cugcugccuccccugugac

SEQ ID NO: 405023 - RNA, 22 nt, Human
cugcugccucggaacugugaca

SEQ ID NO: 405024 - RNA, 32 nt, Human
cugcugccucucggagaggcacgagggucccg

SEQ ID NO: 405025 - RNA, 32 nt, Human
cugcugccucucucccuccacucagcucccag

SEQ ID NO: 405026 - RNA, 20 nt, Human
cugcugccucuggcaagaca

SEQ ID NO: 405027 - RNA, 32 nt, Human
cugcugccugcaccugccccagggcacagagu

SEQ ID NO: 405028 - RNA, 18 nt, Human
cugcugccugcccgggcu

SEQ ID NO: 405029 - RNA, 32 nt, Human
cugcugccugccgccaucaugucuacugcaaa

SEQ ID NO: 405030 - RNA, 20 nt, Human
cugcugccugccgccgugac

SEQ ID NO: 405031 - RNA, 20 nt, Human
cugcugccugcggcuggaca

SEQ ID NO: 405032 - RNA, 19 nt, Human
cugcugccugcuccagaca

SEQ ID NO: 405033 - RNA, 19 nt, Human
cugcugccugcuuugugca

SEQ ID NO: 405034 - RNA, 20 nt, Human
cugcugccuggaccuauaca

SEQ ID NO: 405035 - RNA, 18 nt, Human
cugcugccuggcaugaca

SEQ ID NO: 405036 - RNA, 32 nt, Human
cugcugccuggugucuugcugaucaucacccu

SEQ ID NO: 405037 - RNA, 32 nt, Human
cugcugccuucccacaacauuaaacucuccuu

SEQ ID NO: 405038 - RNA, 24 nt, Human
cugcugccuuccugcugugaggug

SEQ ID NO: 405039 - RNA, 32 nt, Human
cugcugccuucuccuccauuucucugcucaga

SEQ ID NO: 405040 - RNA, 20 nt, Human
cugcugccuugcuucagcca

SEQ ID NO: 405041 - RNA, 32 nt, Human
cugcugccuuucuagccugcccaggaugcagg

SEQ ID NO: 405042 - RNA, 32 nt, Human
cugcugcgaucuguucuucugccgcucugucu

SEQ ID NO: 405043 - RNA, 32 nt, Human
cugcugcgaugccucugccucaucucacacug

SEQ ID NO: 405044 - RNA, 31 nt, Human
cugcugcgcaguucucccauccugggacggc

SEQ ID NO: 405045 - RNA, 32 nt, Human
cugcugcgccuugagcagcugugucuuguccc

SEQ ID NO: 405046 - RNA, 32 nt, Human
cugcugcgcgcagcuggcugggcucaggcgcg

SEQ ID NO: 405047 - RNA, 32 nt, Human
cugcugcggaggcgaagccaggaagcgcugcu

SEQ ID NO: 405048 - RNA, 32 nt, Human
cugcugcggcccaagagucacugugaaggacc

SEQ ID NO: 405049 - RNA, 23 nt, Human
cugcugcggcccagccccgagcc

SEQ ID NO: 405050 - RNA, 17 nt, Human
cugcugcggccccgggc

SEQ ID NO: 405051 - RNA, 19 nt, Human
cugcugcggccgggcucug

SEQ ID NO: 405052 - RNA, 23 nt, Human
cugcugcggcgcggcgaggcgag

SEQ ID NO: 405053 - RNA, 20 nt, Human
cugcugcggcugugggcgag

SEQ ID NO: 405054 - RNA, 32 nt, Human
cugcugcguggaggcagccaugggaaggagcc

SEQ ID NO: 405055 - RNA, 21 nt, Human
cugcugcguguucgcgggcca

SEQ ID NO: 405056 - RNA, 18 nt, Human
cugcugcuacccaagcca

SEQ ID NO: 405057 - RNA, 19 nt, Human
cugcugcuaccucgcgcua

SEQ ID NO: 405058 - RNA, 20 nt, Human
cugcugcuacuacccgagcc

SEQ ID NO: 405059 - RNA, 20 nt, Human
cugcugcuacucuccgagcu

SEQ ID NO: 405060 - RNA, 20 nt, Human
cugcugcuacucuguagcca

SEQ ID NO: 405061 - RNA, 22 nt, Human
cugcugcuagcugccuugggcc

SEQ ID NO: 405062 - RNA, 18 nt, Human
cugcugcuaggcgagcca

SEQ ID NO: 405063 - RNA, 32 nt, Human
cugcugcuagggccuccagccagggcaugucu

SEQ ID NO: 405064 - RNA, 20 nt, Human
cugcugcuauucuccgagcu

SEQ ID NO: 405065 - RNA, 20 nt, Human
cugcugcucacaccugggcc

SEQ ID NO: 405066 - RNA, 18 nt, Human
cugcugcucaccucagcu

SEQ ID NO: 405067 - RNA, 20 nt, Human
cugcugcucacucugaucca

SEQ ID NO: 405068 - RNA, 18 nt, Human
cugcugcucacucuggcc

SEQ ID NO: 405069 - RNA, 32 nt, Human
cugcugcucaggcuggagugcaguggugcaau

SEQ ID NO: 405070 - RNA, 17 nt, Human
cugcugcucaucgaguc

SEQ ID NO: 405071 - RNA, 20 nt, Human
cugcugcuccaaugggucca

SEQ ID NO: 405072 - RNA, 20 nt, Human
cugcugcuccaccacgggcc

SEQ ID NO: 405073 - RNA, 17 nt, Human
cugcugcuccacgagcu

SEQ ID NO: 405074 - RNA, 32 nt, Human
cugcugcucccaggcuggggcugugcugcagg

SEQ ID NO: 405075 - RNA, 22 nt, Human
cugcugcucccucagacugggg

SEQ ID NO: 405076 - RNA, 20 nt, Human
cugcugcuccgccugcguca

SEQ ID NO: 405077 - RNA, 32 nt, Human
cugcugcuccuccuccuuucccagcccgccgc

SEQ ID NO: 405078 - RNA, 19 nt, Human
cugcugcuccuccugagcc

SEQ ID NO: 405079 - RNA, 21 nt, Human
cugcugcuccugcccccaccu

SEQ ID NO: 405080 - RNA, 22 nt, Human
cugcugcuccugcuccuggguu

SEQ ID NO: 405081 - RNA, 32 nt, Human
cugcugcuccugcucucccucucccuccucca

SEQ ID NO: 405082 - RNA, 18 nt, Human
cugcugcuccugcuggcc

SEQ ID NO: 405083 - RNA, 32 nt, Human
cugcugcuccuuccucugacccugacucugcc

SEQ ID NO: 405084 - RNA, 19 nt, Human
cugcugcucgccagaagcc

SEQ ID NO: 405085 - RNA, 21 nt, Human
cugcugcucgccccgucguua

SEQ ID NO: 405086 - RNA, 20 nt, Human
cugcugcucgcucaccugcc

SEQ ID NO: 405087 - RNA, 18 nt, Human
cugcugcucggccggccg

SEQ ID NO: 405088 - RNA, 19 nt, Human
cugcugcucggcuggacca

SEQ ID NO: 405089 - RNA, 22 nt, Human
cugcugcucggguucugaggca

SEQ ID NO: 405090 - RNA, 18 nt, Human
cugcugcucgucgcgccg

SEQ ID NO: 405091 - RNA, 19 nt, Human
cugcugcucgucucaggcu

SEQ ID NO: 405092 - RNA, 20 nt, Human
cugcugcucucauggugcca

SEQ ID NO: 405093 - RNA, 32 nt, Human
cugcugcucucugauccuaaagccugagcuag

SEQ ID NO: 405094 - RNA, 32 nt, Human
cugcugcucugaggggagaggggugggucucc

SEQ ID NO: 405095 - RNA, 32 nt, Human
cugcugcucugggaaccaccucucugcucucc

SEQ ID NO: 405096 - RNA, 20 nt, Human
cugcugcucugggagggcca

SEQ ID NO: 405097 - RNA, 20 nt, Human
cugcugcucuguuuugggcc

SEQ ID NO: 405098 - RNA, 17 nt, Human
cugcugcucuuggagcc

SEQ ID NO: 405099 - RNA, 32 nt, Human
cugcugcugaaggugucugcacacaucaccga

SEQ ID NO: 405100 - RNA, 32 nt, Human
cugcugcugaccugaucaccucuggcuuuguc

SEQ ID NO: 405101 - RNA, 23 nt, Human
cugcugcugacucugugcagcug

SEQ ID NO: 405102 - RNA, 32 nt, Human
cugcugcugacucugugcagcugcgcaccugu

SEQ ID NO: 405103 - RNA, 23 nt, Human
cugcugcugcaccuccugggcca

SEQ ID NO: 405104 - RNA, 17 nt, Human
cugcugcugcaggagcc

SEQ ID NO: 405105 - RNA, 32 nt, Human
cugcugcugcaggagcccccaggcgagguucg

SEQ ID NO: 405106 - RNA, 17 nt, Human
cugcugcugcaugagcu

SEQ ID NO: 405107 - RNA, 17 nt, Human
cugcugcugcccaagcc

SEQ ID NO: 405108 - RNA, 18 nt, Human
cugcugcugcccugcgcu

SEQ ID NO: 405109 - RNA, 18 nt, Human
cugcugcugccuccagcu

SEQ ID NO: 405110 - RNA, 32 nt, Human
cugcugcugccuggauccugaugcugagacaa

SEQ ID NO: 405111 - RNA, 32 nt, Human
cugcugcugccuggccacugcucccuaagcca

SEQ ID NO: 405112 - RNA, 32 nt, Human
cugcugcugccuguagccagggugaccagugg

SEQ ID NO: 405113 - RNA, 18 nt, Human
cugcugcugcgggaguca

SEQ ID NO: 405114 - RNA, 17 nt, Human
cugcugcugcggggcca

SEQ ID NO: 405115 - RNA, 18 nt, Human
cugcugcugcucccggcc

SEQ ID NO: 405116 - RNA, 32 nt, Human
cugcugcugcucccuuccuucuucuguccugu

SEQ ID NO: 405117 - RNA, 32 nt, Human
cugcugcugcugcugccugcggcccggggcug

SEQ ID NO: 405118 - RNA, 32 nt, Human
cugcugcugcugcugcucagggcuucgugccc

SEQ ID NO: 405119 - RNA, 32 nt, Human
cugcugcugcugcugcucgucgcgccggggca

SEQ ID NO: 405120 - RNA, 32 nt, Human
cugcugcugcugcugcugcuaaucuucagggc

SEQ ID NO: 405121 - RNA, 32 nt, Human
cugcugcugcugcugcugcugcaaacuguacu

SEQ ID NO: 405122 - RNA, 32 nt, Human
cugcugcugcugguuuucauccaguugggaaa

SEQ ID NO: 405123 - RNA, 32 nt, Human
cugcugcugcuguauacacuugagugcuccca

SEQ ID NO: 405124 - RNA, 32 nt, Human
cugcugcugcuuccgguggccccuggggugga

SEQ ID NO: 405125 - RNA, 20 nt, Human
cugcugcugcuucugaggca

SEQ ID NO: 405126 - RNA, 19 nt, Human
cugcugcugcuuggaguua

SEQ ID NO: 405127 - RNA, 20 nt, Human
cugcugcuggccucuggguc

SEQ ID NO: 405128 - RNA, 16 nt, Human
cugcugcuggcgagcc

SEQ ID NO: 405129 - RNA, 23 nt, Human
cugcugcuggcggcacucgggcc

SEQ ID NO: 405130 - RNA, 19 nt, Human
cugcugcuggcuguggcua

SEQ ID NO: 405131 - RNA, 19 nt, Human
cugcugcuguccuguggcc

SEQ ID NO: 405132 - RNA, 19 nt, Human
cugcugcugugugaagcca

SEQ ID NO: 405133 - RNA, 22 nt, Human
cugcugcuuagaacuguggaca

SEQ ID NO: 405134 - RNA, 32 nt, Human
cugcugcuucagccuaccucucccucugcuga

SEQ ID NO: 405135 - RNA, 19 nt, Human
cugcugcuuccagggagcc

SEQ ID NO: 405136 - RNA, 19 nt, Human
cugcugcuucccuggcgcu

SEQ ID NO: 405137 - RNA, 18 nt, Human
cugcugcuuccugaagcc

SEQ ID NO: 405138 - RNA, 32 nt, Human
cugcugcuucuccaagcuuucagacaagaaug

SEQ ID NO: 405139 - RNA, 20 nt, Human
cugcugcuucugcccgagcc

SEQ ID NO: 405140 - RNA, 32 nt, Human
cugcugcuucugcugcuucuccagaaaauccc

SEQ ID NO: 405141 - RNA, 18 nt, Human
cugcugcuugcaucagcc

SEQ ID NO: 405142 - RNA, 19 nt, Human
cugcugcuugccagacaca

SEQ ID NO: 405143 - RNA, 19 nt, Human
cugcugcuugcugucgcca

SEQ ID NO: 405144 - RNA, 20 nt, Human
cugcugcuugcuucccgucc

SEQ ID NO: 405145 - RNA, 20 nt, Human
cugcugcuugcuucuaggca

SEQ ID NO: 405146 - RNA, 32 nt, Human
cugcugcuugguggugccagccccuuguccac

SEQ ID NO: 405147 - RNA, 19 nt, Human
cugcugcuuguccccagcc

SEQ ID NO: 405148 - RNA, 17 nt, Human
cugcugcuugucccgcc

SEQ ID NO: 405149 - RNA, 19 nt, Human
cugcugcuuguccuguuca

SEQ ID NO: 405150 - RNA, 32 nt, Human
cugcugcuugugguagaaauugcugccacagc

SEQ ID NO: 405151 - RNA, 20 nt, Human
cugcugcuuguucugauguu

SEQ ID NO: 405152 - RNA, 18 nt, Human
cugcugcuuucgcagcca

SEQ ID NO: 405153 - RNA, 17 nt, Human
cugcugcuuucugagcc

SEQ ID NO: 405154 - RNA, 19 nt, Human
cugcugcuuugcagaguca

SEQ ID NO: 405155 - RNA, 32 nt, Human
cugcugcuuuugcugcucaugcugcuuguugu

SEQ ID NO: 405156 - RNA, 32 nt, Human
cugcugcuuuuugccugugccugcugggaagu

SEQ ID NO: 405157 - RNA, 32 nt, Human
cugcuggaaaaauuaucuauuucuccauuacc

SEQ ID NO: 405158 - RNA, 32 nt, Human
cugcuggaaagccacacgcggcagaggagagc

SEQ ID NO: 405159 - RNA, 32 nt, Human
cugcuggaaaucucccccuuggcacagccaga

SEQ ID NO: 405160 - RNA, 22 nt, Human
cugcuggaacugcugggcgagg

SEQ ID NO: 405161 - RNA, 32 nt, Human
cugcuggaagacagugaggacuucaaucuuuc

SEQ ID NO: 405162 - RNA, 32 nt, Human
cugcuggaagagguggagaagcuguuagaaca

SEQ ID NO: 405163 - RNA, 32 nt, Human
cugcuggacaacaagcccgaccaccacuuccu

SEQ ID NO: 405164 - RNA, 32 nt, Human
cugcuggacaagggguaggagcugcuggaaca

SEQ ID NO: 405165 - RNA, 32 nt, Human
cugcuggaccacaugacaccagucccauucuu

SEQ ID NO: 405166 - RNA, 32 nt, Human
cugcuggacucacagccuugacuuuaauccuc

SEQ ID NO: 405167 - RNA, 32 nt, Human
cugcuggacuugaggcagagccugcagcagcu

SEQ ID NO: 405168 - RNA, 32 nt, Human
cugcuggagagggagaggcugcuggaagaggu

SEQ ID NO: 405169 - RNA, 32 nt, Human
cugcuggagagggagaggcugcuggacgaggu

SEQ ID NO: 405170 - RNA, 32 nt, Human
cugcuggagagggggccccgggcgcgaggcgg

SEQ ID NO: 405171 - RNA, 32 nt, Human
cugcuggagaugggguucuuaccaggaugggc

SEQ ID NO: 405172 - RNA, 32 nt, Human
cugcuggagccagcgaggggugccugcagccg

SEQ ID NO: 405173 - RNA, 32 nt, Human
cugcuggagccaggccuuccuccugggcgccu

SEQ ID NO: 405174 - RNA, 17 nt, Human
cugcuggagccccgagc

SEQ ID NO: 405175 - RNA, 32 nt, Human
cugcuggaggaugggacagcugugcugggucu

SEQ ID NO: 405176 - RNA, 32 nt, Human
cugcuggaggcccugguguugggaacagcugc

SEQ ID NO: 405177 - RNA, 32 nt, Human
cugcuggagggcccugaacccugcacugcgug

SEQ ID NO: 405178 - RNA, 32 nt, Human
cugcuggagguggagucaggugccucccagcc

SEQ ID NO: 405179 - RNA, 20 nt, Human
cugcuggagguggggcgagg

SEQ ID NO: 405180 - RNA, 32 nt, Human
cugcuggagugucugggauugguagcucucuc

SEQ ID NO: 405181 - RNA, 24 nt, Human
cugcuggauaaccagacugugaca

SEQ ID NO: 405182 - RNA, 32 nt, Human
cugcuggaugcagcagcggcugggcuuggucc

SEQ ID NO: 405183 - RNA, 22 nt, Human
cugcuggaugugcugugcaggu

SEQ ID NO: 405184 - RNA, 32 nt, Human
cugcuggcaaacccaguuccugccucagccag

SEQ ID NO: 405185 - RNA, 32 nt, Human
cugcuggcaauuuggggguggggagggggagg

SEQ ID NO: 405186 - RNA, 32 nt, Human
cugcuggcacuucuccccucccuggcccuucu

SEQ ID NO: 405187 - RNA, 32 nt, Human
cugcuggcagccccaagggaucugccauuugu

SEQ ID NO: 405188 - RNA, 32 nt, Human
cugcuggcagccuggggaaggagccaguuuuu

SEQ ID NO: 405189 - RNA, 32 nt, Human
cugcuggcaggaacugaccaguucuguccuug

SEQ ID NO: 405190 - RNA, 32 nt, Human
cugcuggcagggaaacugucuuccuuuucucc

SEQ ID NO: 405191 - RNA, 32 nt, Human
cugcuggcaucgccugcuuucucuccaguggc

SEQ ID NO: 405192 - RNA, 32 nt, Human
cugcuggcauguuguauucaagaguggcagaa

SEQ ID NO: 405193 - RNA, 32 nt, Human
cugcuggccaaccuggcucagggggacagccu

SEQ ID NO: 405194 - RNA, 32 nt, Human
cugcuggccacacugcacuagcaaguuugcca

SEQ ID NO: 405195 - RNA, 32 nt, Human
cugcuggccacugucgaugagaggcaggcucc

SEQ ID NO: 405196 - RNA, 19 nt, Human
cugcuggccaggcccgagg

SEQ ID NO: 405197 - RNA, 19 nt, Human
cugcuggccagugagaggc

SEQ ID NO: 405198 - RNA, 22 nt, Human
cugcuggcccaggucccugugc

SEQ ID NO: 405199 - RNA, 18 nt, Human
cugcuggccgcccugagc

SEQ ID NO: 405200 - RNA, 32 nt, Human
cugcuggccggagcuguagcugugcugguggc

SEQ ID NO: 405201 - RNA, 32 nt, Human
cugcuggccuagaagcagagugcacccucgug

SEQ ID NO: 405202 - RNA, 22 nt, Human
cugcuggccucagcuccggguu

SEQ ID NO: 405203 - RNA, 32 nt, Human
cugcuggccucggugggcucugacugcggggc

SEQ ID NO: 405204 - RNA, 32 nt, Human
cugcuggccuggagaccagggugccugcgggc

SEQ ID NO: 405205 - RNA, 23 nt, Human
cugcuggccuugcugcagaagug

SEQ ID NO: 405206 - RNA, 31 nt, Human
cugcuggcgagggagagaugggugggccaug

SEQ ID NO: 405207 - RNA, 32 nt, Human
cugcuggcggauagcaagacucuguggaguuu

SEQ ID NO: 405208 - RNA, 32 nt, Human
cugcuggcucaaagcugggacuacaugaaagu

SEQ ID NO: 405209 - RNA, 32 nt, Human
cugcuggcucaggggcaucccaccuccgggcu

SEQ ID NO: 405210 - RNA, 21 nt, Human
cugcuggcucuccugugguca

SEQ ID NO: 405211 - RNA, 20 nt, Human
cugcuggcucuucugcccaa

SEQ ID NO: 405212 - RNA, 32 nt, Human
cugcuggcucuucuucugaaucuuauguucau

SEQ ID NO: 405213 - RNA, 32 nt, Human
cugcuggcucuuuccugccacugccaacacga

SEQ ID NO: 405214 - RNA, 32 nt, Human
cugcuggcugagaaggagguguguggcuccgg

SEQ ID NO: 405215 - RNA, 32 nt, Human
cugcuggcugccucucugcuccaccuugugac

SEQ ID NO: 405216 - RNA, 32 nt, Human
cugcuggcuggaggggaugcagggguagugua

SEQ ID NO: 405217 - RNA, 32 nt, Human
cugcuggcuggcagaggagaaggcagucguuu

SEQ ID NO: 405218 - RNA, 32 nt, Human
cugcuggcuggcgugcgugaacagguguggac

SEQ ID NO: 405219 - RNA, 24 nt, Human
cugcuggcuguguccaugcaggug

SEQ ID NO: 405220 - RNA, 32 nt, Human
cugcuggcuuggccucaaggugccuccacccc

SEQ ID NO: 405221 - RNA, 32 nt, Human
cugcugggaaacagcaaucuuccuuaauagca

SEQ ID NO: 405222 - RNA, 32 nt, Human
cugcugggaagggaagggaauggggagaaggg

SEQ ID NO: 405223 - RNA, 32 nt, Human
cugcugggacuccggcccugcguccgcucagc

SEQ ID NO: 405224 - RNA, 32 nt, Human
cugcugggagagauggagaagcuagaaggcaa

SEQ ID NO: 405225 - RNA, 32 nt, Human
cugcugggaguuuucugccacacagauuugcg

SEQ ID NO: 405226 - RNA, 32 nt, Human
cugcugggcaagugccgccagggccgggaccc

SEQ ID NO: 405227 - RNA, 24 nt, Human
cugcugggcaggccccgucuccag

SEQ ID NO: 405228 - RNA, 18 nt, Human
cugcugggccccgagcca

SEQ ID NO: 405229 - RNA, 20 nt, Human
cugcugggccccuccuccau

SEQ ID NO: 405230 - RNA, 17 nt, Human
cugcugggcccugagcu

SEQ ID NO: 405231 - RNA, 32 nt, Human
cugcugggccggaaggugguggucguacgcug

SEQ ID NO: 405232 - RNA, 32 nt, Human
cugcugggccuuggaagagagaggguccuggc

SEQ ID NO: 405233 - RNA, 32 nt, Human
cugcugggcgagcagggcaggugcaggccgcc

SEQ ID NO: 405234 - RNA, 32 nt, Human
cugcugggcucaagcaauccaccuggcugggc

SEQ ID NO: 405235 - RNA, 32 nt, Human
cugcugggcuccaagcccugggccaggcugcc

SEQ ID NO: 405236 - RNA, 32 nt, Human
cugcuggggaaagggagagggcccuauaagcc

SEQ ID NO: 405237 - RNA, 32 nt, Human
cugcuggggaagcccuguguucccagggcuuu

SEQ ID NO: 405238 - RNA, 32 nt, Human
cugcuggggaggcagagacccugcaauggcca

SEQ ID NO: 405239 - RNA, 32 nt, Human
cugcuggggaggcugaaguaggaggaucauuu

SEQ ID NO: 405240 - RNA, 32 nt, Human
cugcuggggaggcugaggcaggagaauggcug

SEQ ID NO: 405241 - RNA, 32 nt, Human
cugcuggggagguggagacgggugccgggaga

SEQ ID NO: 405242 - RNA, 32 nt, Human
cugcuggggauggugccagcugugccuuggcu

SEQ ID NO: 405243 - RNA, 32 nt, Human
cugcuggggccccacaggugaggcagaacagc

SEQ ID NO: 405244 - RNA, 32 nt, Human
cugcuggggcccugcuuguuggccugaccccu

SEQ ID NO: 405245 - RNA, 32 nt, Human
cugcuggggccuccacaccugccucaucacgg

SEQ ID NO: 405246 - RNA, 32 nt, Human
cugcugggggaugucugacuagcucucaugga

SEQ ID NO: 405247 - RNA, 32 nt, Human
cugcugggguaccuggaugagcacacagaaga

SEQ ID NO: 405248 - RNA, 32 nt, Human
cugcuggguagagaacacagaggacagggcau

SEQ ID NO: 405249 - RNA, 32 nt, Human
cugcugggucaccaggagaauggacccuuccu

SEQ ID NO: 405250 - RNA, 32 nt, Human
cugcugggucaccaggagaauggacgcuuccu

SEQ ID NO: 405251 - RNA, 32 nt, Human
cugcuggguccuggggagaugcaggcucuguu

SEQ ID NO: 405252 - RNA, 32 nt, Human
cugcugggugaggggcacccagcuccagaggc

SEQ ID NO: 405253 - RNA, 32 nt, Human
cugcuggguggugcuuucucuugcacaccacu

SEQ ID NO: 405254 - RNA, 32 nt, Human
cugcuggguuagcuuuccacagacauaaauau

SEQ ID NO: 405255 - RNA, 32 nt, Human
cugcuggguuuccugacuguagccacaucucu

SEQ ID NO: 405256 - RNA, 32 nt, Human
cugcuggguuuugccagaaugaagacaccgug

SEQ ID NO: 405257 - RNA, 32 nt, Human
cugcugguauuagcucugccuccuuuuggguc

SEQ ID NO: 405258 - RNA, 32 nt, Human
cugcuggucacuggucuuggucuggaguuaua

SEQ ID NO: 405259 - RNA, 32 nt, Human
cugcuggucccaggucggcacacacauccuca

SEQ ID NO: 405260 - RNA, 19 nt, Human
cugcugguccugugucaca

SEQ ID NO: 405261 - RNA, 32 nt, Human
cugcugguccuugcaggcaaagcuacagccag

SEQ ID NO: 405262 - RNA, 32 nt, Human
cugcuggucucgaacuccuuaccucaggugau

SEQ ID NO: 405263 - RNA, 32 nt, Human
cugcuggucucugccaucaucaccgucagccu

SEQ ID NO: 405264 - RNA, 32 nt, Human
cugcuggucucuucucuccucuuccauaagaa

SEQ ID NO: 405265 - RNA, 20 nt, Human
cugcuggucuuucugaguca

SEQ ID NO: 405266 - RNA, 21 nt, Human
cugcuggugaacuccaucuca

SEQ ID NO: 405267 - RNA, 32 nt, Human
cugcuggugcaguccagccuaguacugacacc

SEQ ID NO: 405268 - RNA, 32 nt, Human
cugcuggugcugcugcucgucauccuggccag

SEQ ID NO: 405269 - RNA, 32 nt, Human
cugcuggugcugcugcugcugcugcugcccac

SEQ ID NO: 405270 - RNA, 32 nt, Human
cugcugguggccacaugggugcugguggcagg

SEQ ID NO: 405271 - RNA, 32 nt, Human
cugcuggugggagcaggaaggagcagugcccc

SEQ ID NO: 405272 - RNA, 32 nt, Human
cugcugguguccuccaggccugggugggcggg

SEQ ID NO: 405273 - RNA, 32 nt, Human
cugcugguguguggggucaguuccagcagaug

SEQ ID NO: 405274 - RNA, 32 nt, Human
cugcugguuccaggaccucgcuuuccaucugu

SEQ ID NO: 405275 - RNA, 17 nt, Human
cugcugguuccccgagc

SEQ ID NO: 405276 - RNA, 21 nt, Human
cugcugguugcugagcaagug

SEQ ID NO: 405277 - RNA, 23 nt, Human
cugcugguugcugagcaagugua

SEQ ID NO: 405278 - RNA, 32 nt, Human
cugcugguuguagguccuuggcuggucgggcc

SEQ ID NO: 405279 - RNA, 32 nt, Human
cugcugguuucugugcgggcucuugucaggau

SEQ ID NO: 405280 - RNA, 20 nt, Human
cugcuguacaagcccagcaa

SEQ ID NO: 405281 - RNA, 32 nt, Human
cugcuguacaucuuauuuauuuucuccagagg

SEQ ID NO: 405282 - RNA, 23 nt, Human
cugcuguaguccuuucugccuug

SEQ ID NO: 405283 - RNA, 32 nt, Human
cugcuguauaaauaacaacuugaacaugaaau

SEQ ID NO: 405284 - RNA, 32 nt, Human
cugcugucacagucucauuuguucuuccaacu

SEQ ID NO: 405285 - RNA, 31 nt, Human
cugcugucacucaaugauggggagcccuacc

SEQ ID NO: 405286 - RNA, 32 nt, Human
cugcugucacugagcgggacucaggccaagag

SEQ ID NO: 405287 - RNA, 32 nt, Human
cugcugucacugucucucuccugcugccuugu

SEQ ID NO: 405288 - RNA, 32 nt, Human
cugcugucagaagucucugggcuccaacuggu

SEQ ID NO: 405289 - RNA, 32 nt, Human
cugcugucagaccuucuuccacagcaaaugag

SEQ ID NO: 405290 - RNA, 32 nt, Human
cugcugucagugcuuuccagucucagcauggu

SEQ ID NO: 405291 - RNA, 32 nt, Human
cugcugucauugucacaggaugccauucucca

SEQ ID NO: 405292 - RNA, 24 nt, Human
cugcugucauuucuccacuugcca

SEQ ID NO: 405293 - RNA, 32 nt, Human
cugcugucauuucuuggggccucucaagaggc

SEQ ID NO: 405294 - RNA, 23 nt, Human
cugcuguccaacauccagcgcug

SEQ ID NO: 405295 - RNA, 32 nt, Human
cugcuguccacagauaaaccagugccauuaga

SEQ ID NO: 405296 - RNA, 23 nt, Human
cugcuguccaccaggcagcugug

SEQ ID NO: 405297 - RNA, 32 nt, Human
cugcuguccagcuucccaggugcaguggguug

SEQ ID NO: 405298 - RNA, 18 nt, Human
cugcuguccaguccccag

SEQ ID NO: 405299 - RNA, 23 nt, Human
cugcuguccaucaaggcccugug

SEQ ID NO: 405300 - RNA, 19 nt, Human
cugcuguccccacugcuca

SEQ ID NO: 405301 - RNA, 32 nt, Human
cugcugucccuuguacaguuuucugucacugg

SEQ ID NO: 405302 - RNA, 20 nt, Human
cugcuguccuaugugcaggu

SEQ ID NO: 405303 - RNA, 32 nt, Human
cugcuguccucagaggaggaggaggaggaggc

SEQ ID NO: 405304 - RNA, 32 nt, Human
cugcuguccuccuugccuucucccucuucucu

SEQ ID NO: 405305 - RNA, 32 nt, Human
cugcuguccugggaugccucuccagccacugg

SEQ ID NO: 405306 - RNA, 21 nt, Human
cugcuguccuguccccgagcc

SEQ ID NO: 405307 - RNA, 32 nt, Human
cugcugucucagagccaucuggaugagugucc

SEQ ID NO: 405308 - RNA, 22 nt, Human
cugcugucucaugucuugguca

SEQ ID NO: 405309 - RNA, 32 nt, Human
cugcugucucccaugauggugugguacagcga

SEQ ID NO: 405310 - RNA, 32 nt, Human
cugcugucucuccgcuccgccaccccgaaccc

SEQ ID NO: 405311 - RNA, 18 nt, Human
cugcugucucuuggggcu

SEQ ID NO: 405312 - RNA, 32 nt, Human
cugcugugaaaagugaagguugcccuguggag

SEQ ID NO: 405313 - RNA, 32 nt, Human
cugcugugaacugcuuucccucggaauguuuc

SEQ ID NO: 405314 - RNA, 32 nt, Human
cugcugugaagacccaauuaaagcuuucacau

SEQ ID NO: 405315 - RNA, 32 nt, Human
cugcugugaaguuaacauugccaggacgauuc

SEQ ID NO: 405316 - RNA, 32 nt, Human
cugcugugaauaaacacagaaguggagcuggg

SEQ ID NO: 405317 - RNA, 32 nt, Human
cugcugugaccaccccagcugcagagucagug

SEQ ID NO: 405318 - RNA, 31 nt, Human
cugcugugaccccagcaccuuccucaggaug

SEQ ID NO: 405319 - RNA, 32 nt, Human
cugcugugaccuucauucauucccaggagaag

SEQ ID NO: 405320 - RNA, 32 nt, Human
cugcugugacgcuucucggugcggaugcagug

SEQ ID NO: 405321 - RNA, 31 nt, Human
cugcugugacuuccuccugccaggggauuug

SEQ ID NO: 405322 - RNA, 32 nt, Human
cugcugugagcagaugcuuccacccccgagau

SEQ ID NO: 405323 - RNA, 32 nt, Human
cugcugugagccaccugccuguggagugcuga

SEQ ID NO: 405324 - RNA, 32 nt, Human
cugcugugagccuggcaucgccaugggcacug

SEQ ID NO: 405325 - RNA, 32 nt, Human
cugcugugagcucuggccgcugccuuccaggg

SEQ ID NO: 405326 - RNA, 32 nt, Human
cugcugugaucacucuggaggcuggucagucu

SEQ ID NO: 405327 - RNA, 32 nt, Human
cugcugugcaccugacggcuccugcaggugug

SEQ ID NO: 405328 - RNA, 32 nt, Human
cugcugugcacugcagccguucccaggcagug

SEQ ID NO: 405329 - RNA, 32 nt, Human
cugcugugcagaggagggauacacuuaggggc

SEQ ID NO: 405330 - RNA, 32 nt, Human
cugcugugcccagccuccauguuuuaauauca

SEQ ID NO: 405331 - RNA, 32 nt, Human
cugcugugcccaggacguggguucagcguggg

SEQ ID NO: 405332 - RNA, 18 nt, Human
cugcugugcccccgagcu

SEQ ID NO: 405333 - RNA, 18 nt, Human
cugcugugcccucgggcu

SEQ ID NO: 405334 - RNA, 32 nt, Human
cugcugugccuucaguacccagccagguucuc

SEQ ID NO: 405335 - RNA, 32 nt, Human
cugcugugccuuucuggcaggguuuugugggg

SEQ ID NO: 405336 - RNA, 32 nt, Human
cugcugugcguucugagggagggagaccucgg

SEQ ID NO: 405337 - RNA, 30 nt, Human
cugcugugcuagcaaucagcgagacuccau

SEQ ID NO: 405338 - RNA, 30 nt, Human
cugcugugcuagcaaucagcgagacuccgu

SEQ ID NO: 405339 - RNA, 30 nt, Human
cugcugugcuagcaaucagugagacuccgu

SEQ ID NO: 405340 - RNA, 32 nt, Human
cugcugugcuccuguggcagugauggggccug

SEQ ID NO: 405341 - RNA, 32 nt, Human
cugcugugcucucccuucucgccaucauacug

SEQ ID NO: 405342 - RNA, 32 nt, Human
cugcugugcucuggaaaguaacugcagccacc

SEQ ID NO: 405343 - RNA, 32 nt, Human
cugcugugcugagacuguggccuggucuuggu

SEQ ID NO: 405344 - RNA, 32 nt, Human
cugcugugcuuccagagguggcgugaugccuc

SEQ ID NO: 405345 - RNA, 32 nt, Human
cugcuguggagcuaggugcuucccccuucccc

SEQ ID NO: 405346 - RNA, 32 nt, Human
cugcuguggcaaagauggccacgcugguguuu

SEQ ID NO: 405347 - RNA, 32 nt, Human
cugcuguggccacccagugcucugccuaccug

SEQ ID NO: 405348 - RNA, 32 nt, Human
cugcuguggccccaacccuuccucccucccca

SEQ ID NO: 405349 - RNA, 32 nt, Human
cugcuguggccuccagcuuggcugguuuugca

SEQ ID NO: 405350 - RNA, 32 nt, Human
cugcuguggcugcucagcugccuccuuuuacc

SEQ ID NO: 405351 - RNA, 32 nt, Human
cugcugugggcccaggacaggaggcugagaag

SEQ ID NO: 405352 - RNA, 32 nt, Human
cugcugugggcccucuggaauugugcuccuca

SEQ ID NO: 405353 - RNA, 32 nt, Human
cugcugugggccugaugcugccauggucccug

SEQ ID NO: 405354 - RNA, 24 nt, Human
cugcuguggggucugcccuggcca

SEQ ID NO: 405355 - RNA, 32 nt, Human
cugcuguggugaggauucagcaagauaaucca

SEQ ID NO: 405356 - RNA, 32 nt, Human
cugcuguguccucagcuggguggagaagaggc

SEQ ID NO: 405357 - RNA, 32 nt, Human
cugcugugucgcccaacacuucccagggugcu

SEQ ID NO: 405358 - RNA, 22 nt, Human
cugcugugucugcccuggggca

SEQ ID NO: 405359 - RNA, 29 nt, Human
cugcugugucuguguguugugggggaagg

SEQ ID NO: 405360 - RNA, 32 nt, Human
cugcugugugccaggcuuugugcugagugcug

SEQ ID NO: 405361 - RNA, 20 nt, Human
cugcuguuaaaguugcaggu

SEQ ID NO: 405362 - RNA, 26 nt, Human
cugcuguuaaccaugcugugcaugug

SEQ ID NO: 405363 - RNA, 19 nt, Human
cugcuguuaacccgugagg

SEQ ID NO: 405364 - RNA, 21 nt, Human
cugcuguuacugcuuugauca

SEQ ID NO: 405365 - RNA, 32 nt, Human
cugcuguuacuuuucugcuaccacuauuuuug

SEQ ID NO: 405366 - RNA, 20 nt, Human
cugcuguuaucguuuagcca

SEQ ID NO: 405367 - RNA, 19 nt, Human
cugcuguuaugcagagcca

SEQ ID NO: 405368 - RNA, 32 nt, Human
cugcuguucaaucaagagucuugguagauaag

SEQ ID NO: 405369 - RNA, 32 nt, Human
cugcuguucaccauucauuccagaccugggcc

SEQ ID NO: 405370 - RNA, 20 nt, Human
cugcuguucagcaacagcca

SEQ ID NO: 405371 - RNA, 17 nt, Human
cugcuguucaggagcca

SEQ ID NO: 405372 - RNA, 24 nt, Human
cugcuguuccagccucugcaggug

SEQ ID NO: 405373 - RNA, 21 nt, Human
cugcuguuccaguucugguca

SEQ ID NO: 405374 - RNA, 21 nt, Human
cugcuguucccaggccaccug

SEQ ID NO: 405375 - RNA, 17 nt, Human
cugcuguuccgugagcc

SEQ ID NO: 405376 - RNA, 20 nt, Human
cugcuguucgcuucgucagc

SEQ ID NO: 405377 - RNA, 32 nt, Human
cugcuguucuccacuucucaccugccauccac

SEQ ID NO: 405378 - RNA, 22 nt, Human
cugcuguucuucccccugggcc

SEQ ID NO: 405379 - RNA, 32 nt, Human
cugcuguugauagcaggaaaccaccugcuggg

SEQ ID NO: 405380 - RNA, 32 nt, Human
cugcuguugcccagcuggacagcuagaguuau

SEQ ID NO: 405381 - RNA, 20 nt, Human
cugcuguugcccguucuucc

SEQ ID NO: 405382 - RNA, 32 nt, Human
cugcuguugccucccuucucaggcuggugcug

SEQ ID NO: 405383 - RNA, 32 nt, Human
cugcuguugcuacccaaauuuucauuucucca

SEQ ID NO: 405384 - RNA, 32 nt, Human
cugcuguugcugccaccuaccuucccugcuuu

SEQ ID NO: 405385 - RNA, 20 nt, Human
cugcuguugcuucugggcca

SEQ ID NO: 405386 - RNA, 19 nt, Human
cugcuguuggcaugagcca

SEQ ID NO: 405387 - RNA, 19 nt, Human
cugcuguuggccgaggcca

SEQ ID NO: 405388 - RNA, 20 nt, Human
cugcuguuggcugcaccagg

SEQ ID NO: 405389 - RNA, 32 nt, Human
cugcuguuggcugcgccagggugcggcucccu

SEQ ID NO: 405390 - RNA, 19 nt, Human
cugcuguuuccauggguua

SEQ ID NO: 405391 - RNA, 32 nt, Human
cugcuguuucugcugggacgucugacuccagu

SEQ ID NO: 405392 - RNA, 20 nt, Human
cugcuguuugccacccagcc

SEQ ID NO: 405393 - RNA, 20 nt, Human
cugcuguuugccccucaguc

SEQ ID NO: 405394 - RNA, 19 nt, Human
cugcuguuugcucugaucc

SEQ ID NO: 405395 - RNA, 32 nt, Human
cugcuguuugguucuucuccauccucaauuuu

SEQ ID NO: 405396 - RNA, 19 nt, Human
cugcuguuugguuuggcca

SEQ ID NO: 405397 - RNA, 21 nt, Human
cugcuguuuguucugcaagug

SEQ ID NO: 405398 - RNA, 32 nt, Human
cugcuguuuugguuguugcugcuggaaagcaa

SEQ ID NO: 405399 - RNA, 32 nt, Human
cugcuuaaaaauacugaauuuaccuucacaaa

SEQ ID NO: 405400 - RNA, 32 nt, Human
cugcuuaaacucaagauggaaaguccagucca

SEQ ID NO: 405401 - RNA, 32 nt, Human
cugcuuaaagaaugcccuuuaugaugcacuga

SEQ ID NO: 405402 - RNA, 24 nt, Human
cugcuuaaagugaggaguucaaga

SEQ ID NO: 405403 - RNA, 32 nt, Human
cugcuuaaccuuucagcuucuccaggccccca

SEQ ID NO: 405404 - RNA, 24 nt, Human
cugcuuaagcucaggaguuugaga

SEQ ID NO: 405405 - RNA, 21 nt, Human
cugcuuaagcuggcccacaaa

SEQ ID NO: 405406 - RNA, 32 nt, Human
cugcuuacacuuucucuccaucaccaaauccu

SEQ ID NO: 405407 - RNA, 32 nt, Human
cugcuuacauauaguguguauguauguauaua

SEQ ID NO: 405408 - RNA, 32 nt, Human
cugcuuaccagccuggcuggccgugcucuggg

SEQ ID NO: 405409 - RNA, 32 nt, Human
cugcuuacccggccuggcugcugacaggcguu

SEQ ID NO: 405410 - RNA, 32 nt, Human
cugcuuacgcccagauuuucuucaaucacauc

SEQ ID NO: 405411 - RNA, 21 nt, Human
cugcuuacucugcccugggcc

SEQ ID NO: 405412 - RNA, 32 nt, Human
cugcuuacuguccugccuucuaaccacccuuu

SEQ ID NO: 405413 - RNA, 32 nt, Human
cugcuuagagcccuuaaaaagacuugaaaguu

SEQ ID NO: 405414 - RNA, 20 nt, Human
cugcuuagcccggcgggcgc

SEQ ID NO: 405415 - RNA, 21 nt, Human
cugcuuagcugccuugagcua

SEQ ID NO: 405416 - RNA, 32 nt, Human
cugcuuaggcuguacugcaguggcgcgauccc

SEQ ID NO: 405417 - RNA, 24 nt, Human
cugcuuaggugcacagcuguucaa

SEQ ID NO: 405418 - RNA, 32 nt, Human
cugcuuauauuuggccacuaaguggccuccua

SEQ ID NO: 405419 - RNA, 32 nt, Human
cugcuuauggccugggugucauggcacagcuu

SEQ ID NO: 405420 - RNA, 32 nt, Human
cugcuuauuaagaugauucauuucauuuccac

SEQ ID NO: 405421 - RNA, 32 nt, Human
cugcuuauuggauccugacaucaggaauagcu

SEQ ID NO: 405422 - RNA, 32 nt, Human
cugcuuauuuauacuagcguaggcaacacuug

SEQ ID NO: 405423 - RNA, 32 nt, Human
cugcuucaagcuauucucccaccucauccucc

SEQ ID NO: 405424 - RNA, 32 nt, Human
cugcuucaauauguuauucaauguuaauguuu

SEQ ID NO: 405425 - RNA, 32 nt, Human
cugcuucacccccaacuuggcuggagaagaaa

SEQ ID NO: 405426 - RNA, 22 nt, Human
cugcuucacccucccucucagg

SEQ ID NO: 405427 - RNA, 32 nt, Human
cugcuucagauggaaaagggaggcaggguggg

SEQ ID NO: 405428 - RNA, 32 nt, Human
cugcuucagauuuugcuuuuguucguuuugcc

SEQ ID NO: 405429 - RNA, 22 nt, Human
cugcuucagccuuucccugugc

SEQ ID NO: 405430 - RNA, 32 nt, Human
cugcuucagcugcgagccugacagacauggga

SEQ ID NO: 405431 - RNA, 21 nt, Human
cugcuucaggcccccgccuug

SEQ ID NO: 405432 - RNA, 20 nt, Human
cugcuucaggcugcugagca

SEQ ID NO: 405433 - RNA, 32 nt, Human
cugcuucauaucucucccuucuuuaccuucau

SEQ ID NO: 405434 - RNA, 32 nt, Human
cugcuucauccagacagcccagggugacuuug

SEQ ID NO: 405435 - RNA, 32 nt, Human
cugcuucauccaggaggggccucaggaagagg

SEQ ID NO: 405436 - RNA, 32 nt, Human
cugcuucaucccucucaaguauggcucagcua

SEQ ID NO: 405437 - RNA, 20 nt, Human
cugcuucauccucagcagca

SEQ ID NO: 405438 - RNA, 32 nt, Human
cugcuucaugccaaggcugggcuuuggguccc

SEQ ID NO: 405439 - RNA, 32 nt, Human
cugcuuccaaagugcccgccgugagugagcuc

SEQ ID NO: 405440 - RNA, 32 nt, Human
cugcuuccaauuuucuggaauacaugaaauau

SEQ ID NO: 405441 - RNA, 32 nt, Human
cugcuuccaccaggguggaggcuucuaggucu

SEQ ID NO: 405442 - RNA, 20 nt, Human
cugcuuccacguggcugcca

SEQ ID NO: 405443 - RNA, 24 nt, Human
cugcuuccagcccuuccccccgca

SEQ ID NO: 405444 - RNA, 32 nt, Human
cugcuuccagccucuggugccaacacaguugc

SEQ ID NO: 405445 - RNA, 32 nt, Human
cugcuuccagugggccugggcccaggacugga

SEQ ID NO: 405446 - RNA, 28 nt, Human
cugcuuccauguggcuuuuccuuuugua

SEQ ID NO: 405447 - RNA, 32 nt, Human
cugcuuccauuucuccccaccucacucucacc

SEQ ID NO: 405448 - RNA, 32 nt, Human
cugcuucccacugugcacccgcccagagaagc

SEQ ID NO: 405449 - RNA, 32 nt, Human
cugcuucccagaggagcagcucuccccaggca

SEQ ID NO: 405450 - RNA, 32 nt, Human
cugcuucccagccagaaacagcagggagcugc

SEQ ID NO: 405451 - RNA, 32 nt, Human
cugcuuccccuagggugauauuuccuuccucc

SEQ ID NO: 405452 - RNA, 32 nt, Human
cugcuuccccuucaccauuccccacauucugc

SEQ ID NO: 405453 - RNA, 32 nt, Human
cugcuucccucaucacaccacacucacaugca

SEQ ID NO: 405454 - RNA, 32 nt, Human
cugcuucccuggaagcuucaggaagcucagcc

SEQ ID NO: 405455 - RNA, 18 nt, Human
cugcuucccuucagucuc

SEQ ID NO: 405456 - RNA, 32 nt, Human
cugcuuccucaagcucuucugcuagugcccug

SEQ ID NO: 405457 - RNA, 32 nt, Human
cugcuuccugcugccgcucugcagccuggacc

SEQ ID NO: 405458 - RNA, 32 nt, Human
cugcuuccuggaaauuggagcacacagucagg

SEQ ID NO: 405459 - RNA, 32 nt, Human
cugcuuccuggaccagaugcaagacugucucc

SEQ ID NO: 405460 - RNA, 32 nt, Human
cugcuuccugggcauagccauggaacccugcc

SEQ ID NO: 405461 - RNA, 32 nt, Human
cugcuuccuuagucggaaguguuuucaacuaa

SEQ ID NO: 405462 - RNA, 18 nt, Human
cugcuuccuucagcauca

SEQ ID NO: 405463 - RNA, 32 nt, Human
cugcuuccuuucucucuccugccucuccucug

SEQ ID NO: 405464 - RNA, 21 nt, Human
cugcuucgcaggcuccgagcc

SEQ ID NO: 405465 - RNA, 32 nt, Human
cugcuucgcaguaaaguuuccagccugggccc

SEQ ID NO: 405466 - RNA, 32 nt, Human
cugcuucuaagaucagugcuugagacauguug

SEQ ID NO: 405467 - RNA, 32 nt, Human
cugcuucuacccacuuuuauuuuucccaggag

SEQ ID NO: 405468 - RNA, 32 nt, Human
cugcuucuacuccuucuuccugggcaaggaac

SEQ ID NO: 405469 - RNA, 32 nt, Human
cugcuucuagucaaagcuuucucucuagugau

SEQ ID NO: 405470 - RNA, 32 nt, Human
cugcuucucaacaaccucuuuggacucagugc

SEQ ID NO: 405471 - RNA, 20 nt, Human
cugcuucucagccccgggcc

SEQ ID NO: 405472 - RNA, 32 nt, Human
cugcuucucagucaugaacguggccauggccc

SEQ ID NO: 405473 - RNA, 32 nt, Human
cugcuucuccaucuccacuguggacucucagc

SEQ ID NO: 405474 - RNA, 18 nt, Human
cugcuucuccccugggcu

SEQ ID NO: 405475 - RNA, 32 nt, Human
cugcuucuccccugggcugcugugggcugggu

SEQ ID NO: 405476 - RNA, 19 nt, Human
cugcuucuccucugcuugu

SEQ ID NO: 405477 - RNA, 32 nt, Human
cugcuucugccaggaccacaccgagggugccc

SEQ ID NO: 405478 - RNA, 21 nt, Human
cugcuucugcgccagaguguu

SEQ ID NO: 405479 - RNA, 32 nt, Human
cugcuucugcuccagccccuuugccucugucc

SEQ ID NO: 405480 - RNA, 32 nt, Human
cugcuucuggaaaccucugccugcugcccugg

SEQ ID NO: 405481 - RNA, 32 nt, Human
cugcuucuggagaggccccaggaagcuuccaa

SEQ ID NO: 405482 - RNA, 32 nt, Human
cugcuucuggcugaguguguuuccugucacca

SEQ ID NO: 405483 - RNA, 32 nt, Human
cugcuucugggagaccucggggaguuuuugcu

SEQ ID NO: 405484 - RNA, 32 nt, Human
cugcuucuggugaggccucaggaagcuuccac

SEQ ID NO: 405485 - RNA, 32 nt, Human
cugcuucugguuuuuaguuugccuuugaauuu

SEQ ID NO: 405486 - RNA, 32 nt, Human
cugcuucuguaauccuagcuaguugggaggcu

SEQ ID NO: 405487 - RNA, 32 nt, Human
cugcuucuguggaagugagcaugguugggcag

SEQ ID NO: 405488 - RNA, 32 nt, Human
cugcuucuuccaccaucccuucgacuuaguuu

SEQ ID NO: 405489 - RNA, 32 nt, Human
cugcuucuuccucucucugccuaaggguggug

SEQ ID NO: 405490 - RNA, 32 nt, Human
cugcuucuuccugggcugucauccccucaucc

SEQ ID NO: 405491 - RNA, 32 nt, Human
cugcuucuucuccagcuuggaaaaacaauagg

SEQ ID NO: 405492 - RNA, 32 nt, Human
cugcuucuuuauagucccuucccuuuuuauua

SEQ ID NO: 405493 - RNA, 24 nt, Human
cugcuugaaaccaggaguuugaga

SEQ ID NO: 405494 - RNA, 24 nt, Human
cugcuugaacccaggaggaggagg

SEQ ID NO: 405495 - RNA, 24 nt, Human
cugcuugaacccaggaggcagagg

SEQ ID NO: 405496 - RNA, 32 nt, Human
cugcuugaacccaggaggcagagguugcagug

SEQ ID NO: 405497 - RNA, 24 nt, Human
cugcuugaacccaggagguggagg

SEQ ID NO: 405498 - RNA, 24 nt, Human
cugcuugaacccaggaguucaaga

SEQ ID NO: 405499 - RNA, 24 nt, Human
cugcuugaacucaggaguucaaga

SEQ ID NO: 405500 - RNA, 24 nt, Human
cugcuugaagccagaaguucaaga

SEQ ID NO: 405501 - RNA, 32 nt, Human
cugcuugacaacaucugagugcagccguuuga

SEQ ID NO: 405502 - RNA, 20 nt, Human
cugcuugaccacuggcccag

SEQ ID NO: 405503 - RNA, 32 nt, Human
cugcuugagagggaagaagggguguuuagcau

SEQ ID NO: 405504 - RNA, 24 nt, Human
cugcuugagcccaggaggucaagg

SEQ ID NO: 405505 - RNA, 24 nt, Human
cugcuugagcccaggagguggagg

SEQ ID NO: 405506 - RNA, 24 nt, Human
cugcuugagcccaggaguucaaga

SEQ ID NO: 405507 - RNA, 32 nt, Human
cugcuugagcccaggaguucaagaccagccug

SEQ ID NO: 405508 - RNA, 24 nt, Human
cugcuugagcccaggaguucaggg

SEQ ID NO: 405509 - RNA, 24 nt, Human
cugcuugagcccaggaguuugaga

SEQ ID NO: 405510 - RNA, 32 nt, Human
cugcuugagcucaggagguugaggcugcagag

SEQ ID NO: 405511 - RNA, 20 nt, Human
cugcuugagcucaggaguuc

SEQ ID NO: 405512 - RNA, 24 nt, Human
cugcuugagcucaggaguucgaga

SEQ ID NO: 405513 - RNA, 24 nt, Human
cugcuugaggccaggaguuugaga

SEQ ID NO: 405514 - RNA, 24 nt, Human
cugcuugaggccgggaguuggaga

SEQ ID NO: 405515 - RNA, 32 nt, Human
cugcuugagggagggaauagaaaggggcaggg

SEQ ID NO: 405516 - RNA, 32 nt, Human
cugcuugagggcugauagcucugccuuacccu

SEQ ID NO: 405517 - RNA, 24 nt, Human
cugcuugaguccaggaauuugaga

SEQ ID NO: 405518 - RNA, 32 nt, Human
cugcuugauccucagauguggagggagguagg

SEQ ID NO: 405519 - RNA, 20 nt, Human
cugcuugauugcccuggcca

SEQ ID NO: 405520 - RNA, 32 nt, Human
cugcuugcagucuccaauguaggcaguguaaa

SEQ ID NO: 405521 - RNA, 18 nt, Human
cugcuugcagucugcaag

SEQ ID NO: 405522 - RNA, 32 nt, Human
cugcuugcauucauccccuccuccucaucucu

SEQ ID NO: 405523 - RNA, 32 nt, Human
cugcuugccauccugccagaacaggcccucaa

SEQ ID NO: 405524 - RNA, 32 nt, Human
cugcuugccugauguguguaucaucgguggga

SEQ ID NO: 405525 - RNA, 32 nt, Human
cugcuugccugggaggcuacacuuuccuuucc

SEQ ID NO: 405526 - RNA, 21 nt, Human
cugcuugcuagagaacuguga

SEQ ID NO: 405527 - RNA, 32 nt, Human
cugcuugcugccgccgcgcuccugggugauca

SEQ ID NO: 405528 - RNA, 32 nt, Human
cugcuugcugccugcccugcccuccgaugcag

SEQ ID NO: 405529 - RNA, 32 nt, Human
cugcuugcugccugucugcuuuccuugguggc

SEQ ID NO: 405530 - RNA, 32 nt, Human
cugcuugcugcucuccuugcuuggcauagccu

SEQ ID NO: 405531 - RNA, 32 nt, Human
cugcuugcugggacagucaccaggguuggggg

SEQ ID NO: 405532 - RNA, 32 nt, Human
cugcuugcugucugagaugaggguuccuaaac

SEQ ID NO: 405533 - RNA, 18 nt, Human
cugcuugcugucugcaag

SEQ ID NO: 405534 - RNA, 32 nt, Human
cugcuugcuguugccucacgccaggccccguc

SEQ ID NO: 405535 - RNA, 21 nt, Human
cugcuugcuuccucccuuccc

SEQ ID NO: 405536 - RNA, 32 nt, Human
cugcuuggaaguggccuccccaggugccuuug

SEQ ID NO: 405537 - RNA, 32 nt, Human
cugcuuggagguggcugaguugggggcccuag

SEQ ID NO: 405538 - RNA, 32 nt, Human
cugcuuggauggcugaggcaggagaaucgcuu

SEQ ID NO: 405539 - RNA, 32 nt, Human
cugcuuggcacagucucugccugcuugcucuc

SEQ ID NO: 405540 - RNA, 32 nt, Human
cugcuuggcacccugcgagcaccagcucccuu

SEQ ID NO: 405541 - RNA, 32 nt, Human
cugcuuggccagaccuuggcugugccuccugc

SEQ ID NO: 405542 - RNA, 22 nt, Human
cugcuuggcccccacagcacug

SEQ ID NO: 405543 - RNA, 32 nt, Human
cugcuugggacccucugggcaugcagcagcag

SEQ ID NO: 405544 - RNA, 32 nt, Human
cugcuugggaggcacagguccugggacaugaa

SEQ ID NO: 405545 - RNA, 32 nt, Human
cugcuugggaggcagaggcaggagaauugcuu

SEQ ID NO: 405546 - RNA, 32 nt, Human
cugcuugggaggcugaggcagagaauugcuug

SEQ ID NO: 405547 - RNA, 32 nt, Human
cugcuugggaggcugaggcaggagaaucacuu

SEQ ID NO: 405548 - RNA, 32 nt, Human
cugcuugggaggcugaggcaggagaaucgcuu

SEQ ID NO: 405549 - RNA, 32 nt, Human
cugcuugggaggcugaggcaggagaauggcuu

SEQ ID NO: 405550 - RNA, 32 nt, Human
cugcuugggaggcugaggcaggagaauucguu

SEQ ID NO: 405551 - RNA, 32 nt, Human
cugcuugggaggcugagggcaggagaauugcu

SEQ ID NO: 405552 - RNA, 32 nt, Human
cugcuugggaggcugagguaggaggaucacuu

SEQ ID NO: 405553 - RNA, 32 nt, Human
cugcuugggaggcugaggugaggaucacuuga

SEQ ID NO: 405554 - RNA, 32 nt, Human
cugcuugggaggcugaggugggaggaucacuu

SEQ ID NO: 405555 - RNA, 32 nt, Human
cugcuugggaggcugagguugcaggaucgcuu

SEQ ID NO: 405556 - RNA, 32 nt, Human
cugcuugggauguguucuuuggcagcuuguga

SEQ ID NO: 405557 - RNA, 32 nt, Human
cugcuugggcgccgugcgguggugacugagcu

SEQ ID NO: 405558 - RNA, 32 nt, Human
cugcuugggcuucauccuccucagaucuucug

SEQ ID NO: 405559 - RNA, 32 nt, Human
cugcuuggggaggaagacgaagaggcacugca

SEQ ID NO: 405560 - RNA, 22 nt, Human
cugcuuggggcccacagcacug

SEQ ID NO: 405561 - RNA, 32 nt, Human
cugcuuggggccucuuucuggaaaccagauca

SEQ ID NO: 405562 - RNA, 32 nt, Human
cugcuuggucaagguuugugccccacuacaga

SEQ ID NO: 405563 - RNA, 32 nt, Human
cugcuugguuucuggggaggccuccggaagcu

SEQ ID NO: 405564 - RNA, 32 nt, Human
cugcuugucaucugcaugucuacucagcauuu

SEQ ID NO: 405565 - RNA, 32 nt, Human
cugcuugucccuggcugugcugccucaggcac

SEQ ID NO: 405566 - RNA, 32 nt, Human
cugcuuguccuucagcccaugcccagcagaua

SEQ ID NO: 405567 - RNA, 32 nt, Human
cugcuugucuguuccugacucugguucucacu

SEQ ID NO: 405568 - RNA, 32 nt, Human
cugcuugugcaggagccuguguacacagggcc

SEQ ID NO: 405569 - RNA, 32 nt, Human
cugcuugugcuuccagcuuaagggacaggcac

SEQ ID NO: 405570 - RNA, 32 nt, Human
cugcuuguguugcucagagucacggaaucugu

SEQ ID NO: 405571 - RNA, 32 nt, Human
cugcuuguguuggagugcagagggugcacaga

SEQ ID NO: 405572 - RNA, 32 nt, Human
cugcuuguuacauuuuucucccuuuucuuggg

SEQ ID NO: 405573 - RNA, 32 nt, Human
cugcuuguucucucaccccuaacccuaguagu

SEQ ID NO: 405574 - RNA, 32 nt, Human
cugcuuguuggccugaccccucccucaccagg

SEQ ID NO: 405575 - RNA, 30 nt, Human
cugcuuguuuuuauaaauacauuuuauugg

SEQ ID NO: 405576 - RNA, 32 nt, Human
cugcuuuaaaacaaaaccaaacaaaacuuuaa

SEQ ID NO: 405577 - RNA, 23 nt, Human
cugcuuuaaccaccccaucugca

SEQ ID NO: 405578 - RNA, 22 nt, Human
cugcuuuaagccucugucuuca

SEQ ID NO: 405579 - RNA, 32 nt, Human
cugcuuuaaguaauaugguagccacauuuuga

SEQ ID NO: 405580 - RNA, 32 nt, Human
cugcuuuagaagcuucucccuccuggugauua

SEQ ID NO: 405581 - RNA, 24 nt, Human
cugcuuuagccuccuauguuugca

SEQ ID NO: 405582 - RNA, 32 nt, Human
cugcuuuagggaggcucuggcaggagguccuc

SEQ ID NO: 405583 - RNA, 32 nt, Human
cugcuuuauauaaaccuuacauuuauauagug

SEQ ID NO: 405584 - RNA, 32 nt, Human
cugcuuuaucucuccuugcucuucucaccucu

SEQ ID NO: 405585 - RNA, 32 nt, Human
cugcuuuauugucucugugacugaaaguuaga

SEQ ID NO: 405586 - RNA, 32 nt, Human
cugcuuucaagcaccacacccacccagaugac

SEQ ID NO: 405587 - RNA, 28 nt, Human
cugcuuucaagugcuggaacauuaaguu

SEQ ID NO: 405588 - RNA, 32 nt, Human
cugcuuucagccccaccuggacagaggcuuac

SEQ ID NO: 405589 - RNA, 32 nt, Human
cugcuuucaugcugucaguagggaugaucaug

SEQ ID NO: 405590 - RNA, 32 nt, Human
cugcuuuccacuguggguaccuggugaucagg

SEQ ID NO: 405591 - RNA, 32 nt, Human
cugcuuuccagggauguguccagugcccuggg

SEQ ID NO: 405592 - RNA, 32 nt, Human
cugcuuucccaggagggugaagauggugcugu

SEQ ID NO: 405593 - RNA, 32 nt, Human
cugcuuuccccagggugacaucguagccaaau

SEQ ID NO: 405594 - RNA, 32 nt, Human
cugcuuuccccugaccuccacugacaucuacg

SEQ ID NO: 405595 - RNA, 32 nt, Human
cugcuuucccucagcacucuugcccuuugagg

SEQ ID NO: 405596 - RNA, 18 nt, Human
cugcuuucccuccgagcc

SEQ ID NO: 405597 - RNA, 20 nt, Human
cugcuuucccucuccugccu

SEQ ID NO: 405598 - RNA, 32 nt, Human
cugcuuuccgugucuucaguucuguccaagcc

SEQ ID NO: 405599 - RNA, 32 nt, Human
cugcuuuccuacucuccuuuuaucucacucua

SEQ ID NO: 405600 - RNA, 32 nt, Human
cugcuuuccucaauguguucuucacccgugag

SEQ ID NO: 405601 - RNA, 32 nt, Human
cugcuuuccuccucccugacugcccagcgagc

SEQ ID NO: 405602 - RNA, 20 nt, Human
cugcuuuccugaugcucugg

SEQ ID NO: 405603 - RNA, 23 nt, Human
cugcuuuccuguggacucuggug

SEQ ID NO: 405604 - RNA, 32 nt, Human
cugcuuuccuuuccuuuacucaaugccguccu

SEQ ID NO: 405605 - RNA, 32 nt, Human
cugcuuucgacgagaaagacccuucggugaga

SEQ ID NO: 405606 - RNA, 32 nt, Human
cugcuuucuaagccagugagguugaggugaga

SEQ ID NO: 405607 - RNA, 21 nt, Human
cugcuuucucacucagcauca

SEQ ID NO: 405608 - RNA, 32 nt, Human
cugcuuucucagacccucaucugucaccccca

SEQ ID NO: 405609 - RNA, 32 nt, Human
cugcuuucuccccucccuucuugacucucugu

SEQ ID NO: 405610 - RNA, 32 nt, Human
cugcuuucuccucuaaaucuuggucucuuguu

SEQ ID NO: 405611 - RNA, 32 nt, Human
cugcuuucuccucugugccauccacucccacc

SEQ ID NO: 405612 - RNA, 32 nt, Human
cugcuuucucuuguuugugcuuuugcuguuuc

SEQ ID NO: 405613 - RNA, 32 nt, Human
cugcuuucucuuucucuuucucugugucucag

SEQ ID NO: 405614 - RNA, 32 nt, Human
cugcuuucugcauucuucucuccacaugccuc

SEQ ID NO: 405615 - RNA, 32 nt, Human
cugcuuucuggggaacaguaagguucaggcca

SEQ ID NO: 405616 - RNA, 32 nt, Human
cugcuuucuuaagaccaguuguucacacuuug

SEQ ID NO: 405617 - RNA, 32 nt, Human
cugcuuucuucuggaaguucagaaggaaaccu

SEQ ID NO: 405618 - RNA, 32 nt, Human
cugcuuucuuucuccuucuacuaugcuggauc

SEQ ID NO: 405619 - RNA, 32 nt, Human
cugcuuucuuugcuuucucuucucaccuuugg

SEQ ID NO: 405620 - RNA, 32 nt, Human
cugcuuugacccccagacuuugcuccaucuau

SEQ ID NO: 405621 - RNA, 22 nt, Human
cugcuuugaccgaaugcucugg

SEQ ID NO: 405622 - RNA, 32 nt, Human
cugcuuugcagugguuucagaggcagaucuga

SEQ ID NO: 405623 - RNA, 21 nt, Human
cugcuuugcauccucuccagg

SEQ ID NO: 405624 - RNA, 32 nt, Human
cugcuuugcauucuucaaaaccauuccugaua

SEQ ID NO: 405625 - RNA, 19 nt, Human
cugcuuugcugccgagcca

SEQ ID NO: 405626 - RNA, 24 nt, Human
cugcuuugcugccuucccuuugca

SEQ ID NO: 405627 - RNA, 32 nt, Human
cugcuuugcuuggugguagggcaggagagcaa

SEQ ID NO: 405628 - RNA, 32 nt, Human
cugcuuuggaaaacauauuuucucugugcuag

SEQ ID NO: 405629 - RNA, 32 nt, Human
cugcuuuggagcaaaucucuucuguuuagaga

SEQ ID NO: 405630 - RNA, 32 nt, Human
cugcuuuggaggguaaaguggggaagaaaucg

SEQ ID NO: 405631 - RNA, 21 nt, Human
cugcuuuggccuuuccuugua

SEQ ID NO: 405632 - RNA, 32 nt, Human
cugcuuuggggagggggaggggagaguaucau

SEQ ID NO: 405633 - RNA, 32 nt, Human
cugcuuugggggaaucuccuccccuaccacca

SEQ ID NO: 405634 - RNA, 32 nt, Human
cugcuuugucuccucuauccugggcuuuuguu

SEQ ID NO: 405635 - RNA, 32 nt, Human
cugcuuuguggacaccgcaggaaguuccucgg

SEQ ID NO: 405636 - RNA, 32 nt, Human
cugcuuuguguuccucucccagcuccaucucu

SEQ ID NO: 405637 - RNA, 32 nt, Human
cugcuuuguuuauccccucuuaguaccugcag

SEQ ID NO: 405638 - RNA, 32 nt, Human
cugcuuuuaauacaccacuucuuucuuucugc

SEQ ID NO: 405639 - RNA, 32 nt, Human
cugcuuuucaaaagcagaguacugcagggucg

SEQ ID NO: 405640 - RNA, 32 nt, Human
cugcuuuucaucugagucaccauuuacuccaa

SEQ ID NO: 405641 - RNA, 32 nt, Human
cugcuuuuccaaaacugguacuuacgugaacu

SEQ ID NO: 405642 - RNA, 32 nt, Human
cugcuuuuccacccucacccuucauucuucua

SEQ ID NO: 405643 - RNA, 32 nt, Human
cugcuuuuccucaaccuuuccuaccagauucc

SEQ ID NO: 405644 - RNA, 32 nt, Human
cugcuuuuccucagauccguucuuucucugug

SEQ ID NO: 405645 - RNA, 32 nt, Human
cugcuuuuccuccaggcuguucugguguccgc

SEQ ID NO: 405646 - RNA, 32 nt, Human
cugcuuuucucccaccccuccuagcaccccca

SEQ ID NO: 405647 - RNA, 32 nt, Human
cugcuuuucucccuccccuuccuuccugcagg

SEQ ID NO: 405648 - RNA, 32 nt, Human
cugcuuuucuuucugcuucaaacacacaguuc

SEQ ID NO: 405649 - RNA, 32 nt, Human
cugcuuuugagccucagaccccagggcagcau

SEQ ID NO: 405650 - RNA, 32 nt, Human
cugcuuuugagugagauggucccagaggccug

SEQ ID NO: 405651 - RNA, 32 nt, Human
cugcuuuugccuggccgcccuagccgcuggcu

SEQ ID NO: 405652 - RNA, 32 nt, Human
cugcuuuuucaaauucuugcuggucuuagcag

SEQ ID NO: 405653 - RNA, 32 nt, Human
cugcuuuuucagcuucuccaucgccugccuuc

SEQ ID NO: 405654 - RNA, 32 nt, Human
cugcuuuuuccucuccccacuggccuaaaugg

SEQ ID NO: 405655 - RNA, 32 nt, Human
cugcuuuuucuuucuuucuuccccuuuuccaa

SEQ ID NO: 405656 - RNA, 32 nt, Human
cugcuuuuugggauaucuaacugcuaaggagg

SEQ ID NO: 405657 - RNA, 23 nt, Human
cuggaaaaaaucacacugucagg

SEQ ID NO: 405658 - RNA, 32 nt, Human
cuggaaaaaccugggcagugggaggcucagcu

SEQ ID NO: 405659 - RNA, 32 nt, Human
cuggaaaaaugagagaagugggaaagaagcaa

SEQ ID NO: 405660 - RNA, 21 nt, Human
cuggaaaacaccccucugcug

SEQ ID NO: 405661 - RNA, 22 nt, Human
cuggaaaacaccuugucugcau

SEQ ID NO: 405662 - RNA, 32 nt, Human
cuggaaaaccagccauuccuccucccugcagu

SEQ ID NO: 405663 - RNA, 32 nt, Human
cuggaaaagaugaccagacucccaccgcccag

SEQ ID NO: 405664 - RNA, 32 nt, Human
cuggaaaagcagcccccauuuccucggguacc

SEQ ID NO: 405665 - RNA, 21 nt, Human
cuggaaaagcugggguaguug

SEQ ID NO: 405666 - RNA, 21 nt, Human
cuggaaaaggagcuucaguau

SEQ ID NO: 405667 - RNA, 32 nt, Human
cuggaaaaggcucuuguugcuguaauuuagag

SEQ ID NO: 405668 - RNA, 23 nt, Human
cuggaaaaguauccagagucuca

SEQ ID NO: 405669 - RNA, 21 nt, Human
cuggaaaaguugugccugagu

SEQ ID NO: 405670 - RNA, 32 nt, Human
cuggaaaauggugccugguucacagcucccgu

SEQ ID NO: 405671 - RNA, 32 nt, Human
cuggaaaauguggugaaauccugucucuauuu

SEQ ID NO: 405672 - RNA, 18 nt, Human
cuggaaacaacucuggca

SEQ ID NO: 405673 - RNA, 32 nt, Human
cuggaaacaagaaaguucugcuuagcagaaau

SEQ ID NO: 405674 - RNA, 32 nt, Human
cuggaaacacccuuccggaacccuucggggaa

SEQ ID NO: 405675 - RNA, 32 nt, Human
cuggaaacagcccagcucucucaaaaaggguc

SEQ ID NO: 405676 - RNA, 21 nt, Human
cuggaaaccaagccccacugc

SEQ ID NO: 405677 - RNA, 18 nt, Human
cuggaaaccaccaccaaa

SEQ ID NO: 405678 - RNA, 32 nt, Human
cuggaaaccaugagccucauggauuccaggca

SEQ ID NO: 405679 - RNA, 22 nt, Human
cuggaaacccagcuccacccug

SEQ ID NO: 405680 - RNA, 32 nt, Human
cuggaaaccuuaaucuccugaaguuaagucaa

SEQ ID NO: 405681 - RNA, 19 nt, Human
cuggaaacggagcauucca

SEQ ID NO: 405682 - RNA, 25 nt, Human
cuggaaacggauggccucuacgcug

SEQ ID NO: 405683 - RNA, 24 nt, Human
cuggaaagaacccuucccugcagu

SEQ ID NO: 405684 - RNA, 32 nt, Human
cuggaaagagauuggagagggagaagaagagg

SEQ ID NO: 405685 - RNA, 32 nt, Human
cuggaaagagggaagacuugauccucagcccc

SEQ ID NO: 405686 - RNA, 32 nt, Human
cuggaaagagugagaaccugggagugaaaggg

SEQ ID NO: 405687 - RNA, 32 nt, Human
cuggaaagauaauagaauagcugauucuuaca

SEQ ID NO: 405688 - RNA, 19 nt, Human
cuggaaagauccaggugga

SEQ ID NO: 405689 - RNA, 32 nt, Human
cuggaaagcaggcccaggaaugacagacaggg

SEQ ID NO: 405690 - RNA, 32 nt, Human
cuggaaagccccucccuuccuguccuucugug

SEQ ID NO: 405691 - RNA, 32 nt, Human
cuggaaagccugggcggguggauugggacccc

SEQ ID NO: 405692 - RNA, 32 nt, Human
cuggaaagcugaggugggagaaucgcuugagu

SEQ ID NO: 405693 - RNA, 32 nt, Human
cuggaaaggacacucagagcagcuccaagaca

SEQ ID NO: 405694 - RNA, 31 nt, Human
cuggaaaggcacuugccucugcacuuuucua

SEQ ID NO: 405695 - RNA, 32 nt, Human
cuggaaaggcucuggaacugaagguuccaggu

SEQ ID NO: 405696 - RNA, 32 nt, Human
cuggaaagucugcugcuucuccaagcuuucag

SEQ ID NO: 405697 - RNA, 19 nt, Human
cuggaaagugauugccaua

SEQ ID NO: 405698 - RNA, 22 nt, Human
cuggaaagugccaucuuuugaa

SEQ ID NO: 405699 - RNA, 32 nt, Human
cuggaaaguucugcaaggccucagcuacagaa

SEQ ID NO: 405700 - RNA, 32 nt, Human
cuggaaaguuugaacagucagcagaagaaaca

SEQ ID NO: 405701 - RNA, 32 nt, Human
cuggaaaguuugcagaaguggaaggagcagaa

SEQ ID NO: 405702 - RNA, 32 nt, Human
cuggaaauaacaugugagaaguacuuagaaua

SEQ ID NO: 405703 - RNA, 32 nt, Human
cuggaaaucauauugaaugauauuucuauauc

SEQ ID NO: 405704 - RNA, 32 nt, Human
cuggaaauccacccagcucugugucccagcag

SEQ ID NO: 405705 - RNA, 32 nt, Human
cuggaaaucggcugggcauggaagcacaugcc

SEQ ID NO: 405706 - RNA, 32 nt, Human
cuggaaaucuaaguucauacugguuuaauuaa

SEQ ID NO: 405707 - RNA, 21 nt, Human
cuggaaaugaccuggggcuuu

SEQ ID NO: 405708 - RNA, 32 nt, Human
cuggaaaugagguugugggguguaaagggaag

SEQ ID NO: 405709 - RNA, 32 nt, Human
cuggaaaugccucugggcugcugugcaaaagc

SEQ ID NO: 405710 - RNA, 32 nt, Human
cuggaaauucuuuggaauaauugaugacaucu

SEQ ID NO: 405711 - RNA, 32 nt, Human
cuggaaauugcugcuggagccuggugaagugu

SEQ ID NO: 405712 - RNA, 32 nt, Human
cuggaaauuuucuuuggggcagagaagagcau

SEQ ID NO: 405713 - RNA, 23 nt, Human
cuggaacaagccuucuucuguug

SEQ ID NO: 405714 - RNA, 21 nt, Human
cuggaacacaggccagggagg

SEQ ID NO: 405715 - RNA, 32 nt, Human
cuggaacacuaaugaggaaacugcacuguuuu

SEQ ID NO: 405716 - RNA, 32 nt, Human
cuggaacacugccuuaacaccugggcuaaguc

SEQ ID NO: 405717 - RNA, 21 nt, Human
cuggaacagccccacuggagu

SEQ ID NO: 405718 - RNA, 32 nt, Human
cuggaacaggaucaagcaggcccaggguguau

SEQ ID NO: 405719 - RNA, 32 nt, Human
cuggaacaggccugggcacuugugcacccaug

SEQ ID NO: 405720 - RNA, 32 nt, Human
cuggaacauccugggauauaacaacuggaugc

SEQ ID NO: 405721 - RNA, 32 nt, Human
cuggaacauccuuguucucugccaggaugcag

SEQ ID NO: 405722 - RNA, 32 nt, Human
cuggaacaugccacuugguuggaagauggaug

SEQ ID NO: 405723 - RNA, 32 nt, Human
cuggaacauggaggcccugcccggggcugggg

SEQ ID NO: 405724 - RNA, 28 nt, Human
cuggaaccaagugcugaacucucacauc

SEQ ID NO: 405725 - RNA, 32 nt, Human
cuggaaccacugcgccgccuggagguggcagc

SEQ ID NO: 405726 - RNA, 32 nt, Human
cuggaaccagcaggaggaaacaugggggauac

SEQ ID NO: 405727 - RNA, 32 nt, Human
cuggaaccagggagguagagguugcagugagc

SEQ ID NO: 405728 - RNA, 22 nt, Human
cuggaacccaacaguucaugga

SEQ ID NO: 405729 - RNA, 32 nt, Human
cuggaacccagaaggucaaggcugcaaugagc

SEQ ID NO: 405730 - RNA, 32 nt, Human
cuggaacccagaagguggagguugcagugagc

SEQ ID NO: 405731 - RNA, 32 nt, Human
cuggaacccaggaggcaaagguugcagugagc

SEQ ID NO: 405732 - RNA, 32 nt, Human
cuggaacccaggaggcagaggucgcagugagu

SEQ ID NO: 405733 - RNA, 32 nt, Human
cuggaacccaggagguggagguugcagugagc

SEQ ID NO: 405734 - RNA, 20 nt, Human
cuggaaccccacagaucacc

SEQ ID NO: 405735 - RNA, 20 nt, Human
cuggaacccccgcacccacc

SEQ ID NO: 405736 - RNA, 32 nt, Human
cuggaaccccucuucaguguaggaagucugaa

SEQ ID NO: 405737 - RNA, 32 nt, Human
cuggaacccggaagcggcagcgcggcgcgacc

SEQ ID NO: 405738 - RNA, 32 nt, Human
cuggaacccggaagguggagguugcagugagc

SEQ ID NO: 405739 - RNA, 32 nt, Human
cuggaacccgggaggcagagguugcagugagc

SEQ ID NO: 405740 - RNA, 32 nt, Human
cuggaacccgggaggcggagguugccgugagu

SEQ ID NO: 405741 - RNA, 32 nt, Human
cuggaacccgggaggcggauguugcggugagc

SEQ ID NO: 405742 - RNA, 32 nt, Human
cuggaacccgggagguagaggcugcagugagc

SEQ ID NO: 405743 - RNA, 32 nt, Human
cuggaacccgggagguggagguuguggugagc

SEQ ID NO: 405744 - RNA, 32 nt, Human
cuggaacccucugagcaacuugcucugaccua

SEQ ID NO: 405745 - RNA, 32 nt, Human
cuggaacccugccucaucuguuccugccagac

SEQ ID NO: 405746 - RNA, 32 nt, Human
cuggaacccuggaagggagggaggcccauggg

SEQ ID NO: 405747 - RNA, 32 nt, Human
cuggaaccucaggccuagacuagguugccuuu

SEQ ID NO: 405748 - RNA, 32 nt, Human
cuggaaccucuucuuccccucuuccagagcuu

SEQ ID NO: 405749 - RNA, 21 nt, Human
cuggaaccugagccagguggg

SEQ ID NO: 405750 - RNA, 32 nt, Human
cuggaaccugccugcucccucucccagaccag

SEQ ID NO: 405751 - RNA, 32 nt, Human
cuggaaccugggaaguggaagcugcagugagc

SEQ ID NO: 405752 - RNA, 32 nt, Human
cuggaaccugggagccggaggcugcagugagc

SEQ ID NO: 405753 - RNA, 32 nt, Human
cuggaaccugggaggcggagguugcagugaac

SEQ ID NO: 405754 - RNA, 32 nt, Human
cuggaaccugggagguggaggcugcagugaac

SEQ ID NO: 405755 - RNA, 32 nt, Human
cuggaaccugggauguggagguugcagugagc

SEQ ID NO: 405756 - RNA, 22 nt, Human
cuggaacgcuggccucccugca

SEQ ID NO: 405757 - RNA, 32 nt, Human
cuggaacgugagccaggaggcccggaccggcc

SEQ ID NO: 405758 - RNA, 32 nt, Human
cuggaacguguuccuaucacucuggcugguug

SEQ ID NO: 405759 - RNA, 26 nt, Human
cuggaacuaaccaguccuugauguug

SEQ ID NO: 405760 - RNA, 26 nt, Human
cuggaacucaccaguccuugauguug

SEQ ID NO: 405761 - RNA, 32 nt, Human
cuggaacucacucucagccacagggagcugca

SEQ ID NO: 405762 - RNA, 32 nt, Human
cuggaacucaggaggcagagguugcagugagc

SEQ ID NO: 405763 - RNA, 32 nt, Human
cuggaacucaggccuuucucuccugguccuga

SEQ ID NO: 405764 - RNA, 32 nt, Human
cuggaacuccagaagcagaauccuuugcuaaa

SEQ ID NO: 405765 - RNA, 32 nt, Human
cuggaacuccauagaaugauguuugcaaacca

SEQ ID NO: 405766 - RNA, 21 nt, Human
cuggaacucccagacguccca

SEQ ID NO: 405767 - RNA, 32 nt, Human
cuggaacucugaguccuccuaugaaccucugu

SEQ ID NO: 405768 - RNA, 32 nt, Human
cuggaacugcaacuccagcguccucagcaccc

SEQ ID NO: 405769 - RNA, 21 nt, Human
cuggaacugcagcccacggcg

SEQ ID NO: 405770 - RNA, 22 nt, Human
cuggaacugcugaggucccacc

SEQ ID NO: 405771 - RNA, 32 nt, Human
cuggaacugcuggcuggguugcugcuggucau

SEQ ID NO: 405772 - RNA, 20 nt, Human
cuggaacuguuugggaccuu

SEQ ID NO: 405773 - RNA, 22 nt, Human
cuggaacuuaaguuauaccuua

SEQ ID NO: 405774 - RNA, 32 nt, Human
cuggaacuuccagauucagagaaucugauuua

SEQ ID NO: 405775 - RNA, 32 nt, Human
cuggaacuucugccuccaccucgcuggggagc

SEQ ID NO: 405776 - RNA, 22 nt, Human
cuggaagaaaaaggagcgcagg

SEQ ID NO: 405777 - RNA, 19 nt, Human
cuggaagaaaaggacugca

SEQ ID NO: 405778 - RNA, 23 nt, Human
cuggaagaaacuuuggcuguagg

SEQ ID NO: 405779 - RNA, 32 nt, Human
cuggaagaaagcaacaaagauugagaagccau

SEQ ID NO: 405780 - RNA, 32 nt, Human
cuggaagaacaacagggaagacauccaucauu

SEQ ID NO: 405781 - RNA, 32 nt, Human
cuggaagaagagccccuccuuccuucaagcca

SEQ ID NO: 405782 - RNA, 23 nt, Human
cuggaagaagggcucuagggagg

SEQ ID NO: 405783 - RNA, 32 nt, Human
cuggaagaaguuaagacucuuggaggggcgcg

SEQ ID NO: 405784 - RNA, 32 nt, Human
cuggaagacagagaaaacuugccuuucaguau

SEQ ID NO: 405785 - RNA, 19 nt, Human
cuggaagaccuggaggaag

SEQ ID NO: 405786 - RNA, 23 nt, Human
cuggaagacuaugugcacugaag

SEQ ID NO: 405787 - RNA, 32 nt, Human
cuggaagacuccaaggccgcuugucuuugaga

SEQ ID NO: 405788 - RNA, 32 nt, Human
cuggaagacuuggccuuccgcucugacgcagg

SEQ ID NO: 405789 - RNA, 32 nt, Human
cuggaagagaaacaauaaauagagacuuuagc

SEQ ID NO: 405790 - RNA, 32 nt, Human
cuggaagagaaggaacagggagcagagagacc

SEQ ID NO: 405791 - RNA, 32 nt, Human
cuggaagagcagcuccagguagggggccaugu

SEQ ID NO: 405792 - RNA, 32 nt, Human
cuggaagagccaagucauccacucaggucuuc

SEQ ID NO: 405793 - RNA, 32 nt, Human
cuggaagagcuagaccgcaggagccgcgccgu

SEQ ID NO: 405794 - RNA, 32 nt, Human
cuggaagaggaggaggaggagaggcggcgggg

SEQ ID NO: 405795 - RNA, 21 nt, Human
cuggaagaggccgcccugcag

SEQ ID NO: 405796 - RNA, 32 nt, Human
cuggaagaggcggcagaggcaacaguguuuag

SEQ ID NO: 405797 - RNA, 32 nt, Human
cuggaagagggagggauccuccccagggccuc

SEQ ID NO: 405798 - RNA, 32 nt, Human
cuggaagaucacuugaaccugggaagcagagu

SEQ ID NO: 405799 - RNA, 32 nt, Human
cuggaagaugcaucuaaugagcuaaacagcau

SEQ ID NO: 405800 - RNA, 32 nt, Human
cuggaagauguggggugcugggugagaggcau

SEQ ID NO: 405801 - RNA, 32 nt, Human
cuggaagauguuuuaagaagcauuuuaaaugu

SEQ ID NO: 405802 - RNA, 32 nt, Human
cuggaagauuuugguguugguggagaauacaa

SEQ ID NO: 405803 - RNA, 32 nt, Human
cuggaagcaaagugccuaucagcagcguugcg

SEQ ID NO: 405804 - RNA, 24 nt, Human
cuggaagcacaauuaggucaggga

SEQ ID NO: 405805 - RNA, 32 nt, Human
cuggaagcacacuggcuaucugcggaaggacu

SEQ ID NO: 405806 - RNA, 24 nt, Human
cuggaagcacauugcugagggagg

SEQ ID NO: 405807 - RNA, 32 nt, Human
cuggaagcagcaagaggaaccaguagcugugg

SEQ ID NO: 405808 - RNA, 32 nt, Human
cuggaagcagcacaucauuagcuuuaugacug

SEQ ID NO: 405809 - RNA, 32 nt, Human
cuggaagcaggugcuacaacaugugaggcauu

SEQ ID NO: 405810 - RNA, 24 nt, Human
cuggaagcauuuguuucuacuuug

SEQ ID NO: 405811 - RNA, 20 nt, Human
cuggaagccaaggugggagg

SEQ ID NO: 405812 - RNA, 21 nt, Human
cuggaagccagaggccaugga

SEQ ID NO: 405813 - RNA, 32 nt, Human
cuggaagccagccagggcacugcccggcccgu

SEQ ID NO: 405814 - RNA, 19 nt, Human
cuggaagccagcugggcca

SEQ ID NO: 405815 - RNA, 32 nt, Human
cuggaagccaggggacuccagccugggcgggg

SEQ ID NO: 405816 - RNA, 21 nt, Human
cuggaagcccaaaggacucug

SEQ ID NO: 405817 - RNA, 24 nt, Human
cuggaagcccagccccuacugcug

SEQ ID NO: 405818 - RNA, 18 nt, Human
cuggaagcccaggacugc

SEQ ID NO: 405819 - RNA, 24 nt, Human
cuggaagcccaugaaccaucgcug

SEQ ID NO: 405820 - RNA, 22 nt, Human
cuggaagccccgcagccacugc

SEQ ID NO: 405821 - RNA, 26 nt, Human
cuggaagccccuuuguucuucuguug

SEQ ID NO: 405822 - RNA, 21 nt, Human
cuggaagccgagcgcccccuc

SEQ ID NO: 405823 - RNA, 24 nt, Human
cuggaagccucccaacuauucuug

SEQ ID NO: 405824 - RNA, 19 nt, Human
cuggaagccucccccacgc

SEQ ID NO: 405825 - RNA, 23 nt, Human
cuggaagccuccgguagcugcug

SEQ ID NO: 405826 - RNA, 24 nt, Human
cuggaagccucuguccucuuguug

SEQ ID NO: 405827 - RNA, 18 nt, Human
cuggaagccugcacucca

SEQ ID NO: 405828 - RNA, 32 nt, Human
cuggaagccugcacuccagcuucgaguggaac

SEQ ID NO: 405829 - RNA, 22 nt, Human
cuggaagccuucucugacugcu

SEQ ID NO: 405830 - RNA, 21 nt, Human
cuggaagcgcauccggggagg

SEQ ID NO: 405831 - RNA, 32 nt, Human
cuggaagcgguacuguaucucucuccaaggcc

SEQ ID NO: 405832 - RNA, 32 nt, Human
cuggaagcuaauggccuguugcuccugacaga

SEQ ID NO: 405833 - RNA, 32 nt, Human
cuggaagcuacaccaagcuucagagugguccu

SEQ ID NO: 405834 - RNA, 22 nt, Human
cuggaagcuccagcugcugcug

SEQ ID NO: 405835 - RNA, 32 nt, Human
cuggaagcugaugaaaggauugaauaauggag

SEQ ID NO: 405836 - RNA, 22 nt, Human
cuggaagcugcccuuuguucug

SEQ ID NO: 405837 - RNA, 32 nt, Human
cuggaagcuggagaggaugaugaagaagacga

SEQ ID NO: 405838 - RNA, 23 nt, Human
cuggaagcugggucucuuuguug

SEQ ID NO: 405839 - RNA, 32 nt, Human
cuggaagcuguggcucacaccuguaaucccag

SEQ ID NO: 405840 - RNA, 32 nt, Human
cuggaagcugugggggaaggaguugacaggug

SEQ ID NO: 405841 - RNA, 32 nt, Human
cuggaagcuucaucugcccaaaggagucugcc

SEQ ID NO: 405842 - RNA, 32 nt, Human
cuggaaggaaacacgcggaucugaacagcagu

SEQ ID NO: 405843 - RNA, 32 nt, Human
cuggaaggaagcuucccuguuggagaaaucac

SEQ ID NO: 405844 - RNA, 32 nt, Human
cuggaaggagaaagauguggaguggagaaaau

SEQ ID NO: 405845 - RNA, 32 nt, Human
cuggaaggagagaaggaagcgggaagugugcu

SEQ ID NO: 405846 - RNA, 32 nt, Human
cuggaaggaguauggcccugccuacaccuuga

SEQ ID NO: 405847 - RNA, 32 nt, Human
cuggaaggagugaacaagagccaggagaccag

SEQ ID NO: 405848 - RNA, 32 nt, Human
cuggaaggauagccucgcuucccaggugcagc

SEQ ID NO: 405849 - RNA, 24 nt, Human
cuggaaggcagaaguugcagugag

SEQ ID NO: 405850 - RNA, 24 nt, Human
cuggaaggcagagauugcagugag

SEQ ID NO: 405851 - RNA, 20 nt, Human
cuggaaggcagagguugcag

SEQ ID NO: 405852 - RNA, 23 nt, Human
cuggaaggcagagguugcaguga

SEQ ID NO: 405853 - RNA, 24 nt, Human
cuggaaggcagagguugcagugag

SEQ ID NO: 405854 - RNA, 32 nt, Human
cuggaaggcaucugcaacuccaaguccaugca

SEQ ID NO: 405855 - RNA, 24 nt, Human
cuggaaggcggagguugcagugag

SEQ ID NO: 405856 - RNA, 18 nt, Human
cuggaaggcucacaggca

SEQ ID NO: 405857 - RNA, 32 nt, Human
cuggaaggcucugcagagaugacugggcuggg

SEQ ID NO: 405858 - RNA, 32 nt, Human
cuggaaggcugagguggguggaucaccugaag

SEQ ID NO: 405859 - RNA, 32 nt, Human
cuggaaggcuggugcuacucuuccugccuuag

SEQ ID NO: 405860 - RNA, 32 nt, Human
cuggaaggcuuagaugcauuggcuccauccaa

SEQ ID NO: 405861 - RNA, 32 nt, Human
cuggaagggaaaggaaggaaccuggggucauu

SEQ ID NO: 405862 - RNA, 32 nt, Human
cuggaagggaaaggggaggaagauggagggag

SEQ ID NO: 405863 - RNA, 32 nt, Human
cuggaagggagguggagguccaguaagggccu

SEQ ID NO: 405864 - RNA, 32 nt, Human
cuggaagggccugaggauuacagugaaacuga

SEQ ID NO: 405865 - RNA, 32 nt, Human
cuggaagggcugggagggagagcccugggagc

SEQ ID NO: 405866 - RNA, 32 nt, Human
cuggaaggggagacagagguggaggguggcac

SEQ ID NO: 405867 - RNA, 17 nt, Human
cuggaaggggagcggug

SEQ ID NO: 405868 - RNA, 32 nt, Human
cuggaaggguggaaggagagaguggccagaac

SEQ ID NO: 405869 - RNA, 21 nt, Human
cuggaagguccuuccugcagu

SEQ ID NO: 405870 - RNA, 24 nt, Human
cuggaaggucgcugcccagggagg

SEQ ID NO: 405871 - RNA, 32 nt, Human
cuggaaggugccugcaggacugugagugaugu

SEQ ID NO: 405872 - RNA, 32 nt, Human
cuggaagguggaagagcagguaacaucagagc

SEQ ID NO: 405873 - RNA, 24 nt, Human
cuggaagguggaaguugcagugag

SEQ ID NO: 405874 - RNA, 32 nt, Human
cuggaagucaccuuuggcaagcuguaugcuug

SEQ ID NO: 405875 - RNA, 22 nt, Human
cuggaaguccagcacccaggga

SEQ ID NO: 405876 - RNA, 21 nt, Human
cuggaaguccagccucuauug

SEQ ID NO: 405877 - RNA, 32 nt, Human
cuggaaguccccgggagccucuccuugccugg

SEQ ID NO: 405878 - RNA, 23 nt, Human
cuggaagucuagagucuuuguug

SEQ ID NO: 405879 - RNA, 32 nt, Human
cuggaagucuucacacuggaguugcuguucca

SEQ ID NO: 405880 - RNA, 32 nt, Human
cuggaagugcaugguccaucaugggcgggagg

SEQ ID NO: 405881 - RNA, 32 nt, Human
cuggaagugcaugucuguguucuggcuccgau

SEQ ID NO: 405882 - RNA, 32 nt, Human
cuggaagugcccagaaugggaggcacggaagc

SEQ ID NO: 405883 - RNA, 32 nt, Human
cuggaaguggagaggauccuucugcuuuaauc

SEQ ID NO: 405884 - RNA, 32 nt, Human
cuggaagugggauuugaaaugcagccaagaag

SEQ ID NO: 405885 - RNA, 32 nt, Human
cuggaagugguggugcauaccuguagucccag

SEQ ID NO: 405886 - RNA, 29 nt, Human
cuggaaguguuacuggugccuggaacuga

SEQ ID NO: 405887 - RNA, 18 nt, Human
cuggaaguuagcacucua

SEQ ID NO: 405888 - RNA, 31 nt, Human
cuggaaguugagagagcaaauaaagaccuga

SEQ ID NO: 405889 - RNA, 32 nt, Human
cuggaaguuguuggaccagcaggguugguuga

SEQ ID NO: 405890 - RNA, 32 nt, Human
cuggaauaaccagucaagguagugucagaaga

SEQ ID NO: 405891 - RNA, 32 nt, Human
cuggaauacuaucaaacuaccagcaaugaauu

SEQ ID NO: 405892 - RNA, 32 nt, Human
cuggaauagaguggacugaggaagaugcggcc

SEQ ID NO: 405893 - RNA, 32 nt, Human
cuggaauagugaguugggaggauggggagaca

SEQ ID NO: 405894 - RNA, 32 nt, Human
cuggaauaugaagagacaugagauggugguag

SEQ ID NO: 405895 - RNA, 32 nt, Human
cuggaauaugggaaaauuaauuugggcuuagu

SEQ ID NO: 405896 - RNA, 32 nt, Human
cuggaaucauuuucuuucucucugccagggac

SEQ ID NO: 405897 - RNA, 32 nt, Human
cuggaauccaguuucaggauuaagggagggcu

SEQ ID NO: 405898 - RNA, 32 nt, Human
cuggaaucccaaggccagacagccuggaguuu

SEQ ID NO: 405899 - RNA, 23 nt, Human
cuggaauccuggauaacugcagg

SEQ ID NO: 405900 - RNA, 32 nt, Human
cuggaauccuggcagggauuccugucaaggac

SEQ ID NO: 405901 - RNA, 32 nt, Human
cuggaauccuggccagaugaggacccucuccg

SEQ ID NO: 405902 - RNA, 25 nt, Human
cuggaaucuauuggugcugcugcau

SEQ ID NO: 405903 - RNA, 32 nt, Human
cuggaaucucugggacauuuuugaggcauuug

SEQ ID NO: 405904 - RNA, 32 nt, Human
cuggaaucugaccuuacucuagcaggaguuuu

SEQ ID NO: 405905 - RNA, 32 nt, Human
cuggaaucuuccagauuucaguguuuuaaaau

SEQ ID NO: 405906 - RNA, 24 nt, Human
cuggaaugacgcgguccagggagg

SEQ ID NO: 405907 - RNA, 22 nt, Human
cuggaaugaucaacucauucca

SEQ ID NO: 405908 - RNA, 32 nt, Human
cuggaaugcaaagaagguggaaggaaaggauc

SEQ ID NO: 405909 - RNA, 32 nt, Human
cuggaaugcaauggcucacugcagccucaacc

SEQ ID NO: 405910 - RNA, 21 nt, Human
cuggaaugcacagcucaggga

SEQ ID NO: 405911 - RNA, 32 nt, Human
cuggaaugcagugacaucaucacagcucacug

SEQ ID NO: 405912 - RNA, 32 nt, Human
cuggaauggaaaccacuuacauuguucuacaa

SEQ ID NO: 405913 - RNA, 32 nt, Human
cuggaauggaaaggagaauucagguuaaagug

SEQ ID NO: 405914 - RNA, 32 nt, Human
cuggaaugggcgggaguggcagaagaguugug

SEQ ID NO: 405915 - RNA, 18 nt, Human
cuggaauggggcacucca

SEQ ID NO: 405916 - RNA, 32 nt, Human
cuggaaugggugucccagcaagagaugcugga

SEQ ID NO: 405917 - RNA, 21 nt, Human
cuggaaugugcauuccugcca

SEQ ID NO: 405918 - RNA, 30 nt, Human
cuggaaugugccagacucugaggcacccag

SEQ ID NO: 405919 - RNA, 18 nt, Human
cuggaauguguccauuga

SEQ ID NO: 405920 - RNA, 22 nt, Human
cuggaauuacaagcaugagcca

SEQ ID NO: 405921 - RNA, 22 nt, Human
cuggaauuacaggcaugagcca

SEQ ID NO: 405922 - RNA, 22 nt, Human
cuggaauuacaggccugagcca

SEQ ID NO: 405923 - RNA, 22 nt, Human
cuggaauuacaggcgugagcca

SEQ ID NO: 405924 - RNA, 22 nt, Human
cuggaauuacuggcaugagcca

SEQ ID NO: 405925 - RNA, 32 nt, Human
cuggaauuaguuggcagagaaaaugcugccua

SEQ ID NO: 405926 - RNA, 22 nt, Human
cuggaauuccaaagugaccuua

SEQ ID NO: 405927 - RNA, 18 nt, Human
cugggaccccggggccac

SEQ ID NO: 405928 - RNA, 32 nt, Human
cugggacccgggcuuugaagccaccuccaggg

SEQ ID NO: 405929 - RNA, 32 nt, Human
cugggacccucaccccaugucauucauucagu

SEQ ID NO: 405930 - RNA, 32 nt, Human
cugggacccuccaggagccccgggauugaagg

SEQ ID NO: 405931 - RNA, 24 nt, Human
cugggacccucccgcagaguccca

SEQ ID NO: 405932 - RNA, 32 nt, Human
cugggacccucuccacagaggggauguggucc

SEQ ID NO: 405933 - RNA, 32 nt, Human
cugggacccuuuccuuccuucccuggcuugua

SEQ ID NO: 405934 - RNA, 22 nt, Human
cugggaccgcaggcacacauca

SEQ ID NO: 405935 - RNA, 20 nt, Human
cugggaccgccacuacaaca

SEQ ID NO: 405936 - RNA, 18 nt, Human
cugggaccgccaguugca

SEQ ID NO: 405937 - RNA, 32 nt, Human
cugggaccgggagacagcccacaggccagagu

SEQ ID NO: 405938 - RNA, 19 nt, Human
cugggaccuauacagaaca

SEQ ID NO: 405939 - RNA, 32 nt, Human
cugggaccucaagggccuucugucagccuugc

SEQ ID NO: 405940 - RNA, 32 nt, Human
cugggaccuccggacugggaggggagcagagu

SEQ ID NO: 405941 - RNA, 32 nt, Human
cugggaccucgagggaacucucugcuugaugc

SEQ ID NO: 405942 - RNA, 32 nt, Human
cugggaccugagcucuggagggcaggccaccu

SEQ ID NO: 405943 - RNA, 32 nt, Human
cugggaccugcagcucugccuuugcuggcugg

SEQ ID NO: 405944 - RNA, 32 nt, Human
cugggaccuggccauccucugccagucagauu

SEQ ID NO: 405945 - RNA, 32 nt, Human
cugggaccugggacagcagcugggagaccuga

SEQ ID NO: 405946 - RNA, 32 nt, Human
cugggaccuguaaucccagcuacuugggaggc

SEQ ID NO: 405947 - RNA, 32 nt, Human
cugggaccugucguaacagucacccacucugc

SEQ ID NO: 405948 - RNA, 32 nt, Human
cugggaccuucccagucuccccagaguccgug

SEQ ID NO: 405949 - RNA, 32 nt, Human
cugggaccuugauccugccugcccggccgccc

SEQ ID NO: 405950 - RNA, 32 nt, Human
cugggacgcaguugggagugcaaagggcuggc

SEQ ID NO: 405951 - RNA, 22 nt, Human
cugggacgcuccucccuccaca

SEQ ID NO: 405952 - RNA, 18 nt, Human
cugggacggcccaaaagg

SEQ ID NO: 405953 - RNA, 18 nt, Human
cugggacggcgggugcgg

SEQ ID NO: 405954 - RNA, 32 nt, Human
cugggacggcugagcugggcagcuggaagugg

SEQ ID NO: 405955 - RNA, 32 nt, Human
cugggacgggagguggagaguuugcagagccg

SEQ ID NO: 405956 - RNA, 32 nt, Human
cugggacgggugagaguuuaagagcaccucau

SEQ ID NO: 405957 - RNA, 19 nt, Human
cugggacuaagccaaggga

SEQ ID NO: 405958 - RNA, 19 nt, Human
cugggacuacaccaccaca

SEQ ID NO: 405959 - RNA, 32 nt, Human
cugggacuacaggcacccaccaugaugccagg

SEQ ID NO: 405960 - RNA, 22 nt, Human
cugggacuacaggcacgagcca

SEQ ID NO: 405961 - RNA, 22 nt, Human
cugggacuacaggcaugagcca

SEQ ID NO: 405962 - RNA, 22 nt, Human
cugggacuacaggcgugagcca

SEQ ID NO: 405963 - RNA, 32 nt, Human
cugggacuacaggugugcgcacaugccaggcu

SEQ ID NO: 405964 - RNA, 32 nt, Human
cugggacuacaguuucgugugccaccaugccu

SEQ ID NO: 405965 - RNA, 32 nt, Human
cugggacuagaggcacgcaccaccgcgccuuu

SEQ ID NO: 405966 - RNA, 17 nt, Human
cugggacuagcacagca

SEQ ID NO: 405967 - RNA, 32 nt, Human
cugggacuagcacagcaucacuucuaccacuu

SEQ ID NO: 405968 - RNA, 31 nt, Human
cugggacucaauaauacacuugggaauauuc

SEQ ID NO: 405969 - RNA, 20 nt, Human
cugggacucagaacccaaca

SEQ ID NO: 405970 - RNA, 32 nt, Human
cugggacucuggaagcugcuucccuacuggga

SEQ ID NO: 405971 - RNA, 32 nt, Human
cugggacugagacccaggccuggcaggaccgu

SEQ ID NO: 405972 - RNA, 32 nt, Human
cugggacugcagcuucgccagguggccuuccu

SEQ ID NO: 405973 - RNA, 22 nt, Human
cugggacugcaggcaugagcca

SEQ ID NO: 405974 - RNA, 32 nt, Human
cugggacugcagggguguuccaccacacccag

SEQ ID NO: 405975 - RNA, 32 nt, Human
cugggacugcaggugcaugcacuaccaugccc

SEQ ID NO: 405976 - RNA, 32 nt, Human
cugggacugcucucgcuccggcugccacucuc

SEQ ID NO: 405977 - RNA, 32 nt, Human
cugggacugggagugucugcuccucugagcca

SEQ ID NO: 405978 - RNA, 32 nt, Human
cugggacuguaaacaugacagccgcacuucac

SEQ ID NO: 405979 - RNA, 32 nt, Human
cugggacuguuggacagcaucuacccaaccca

SEQ ID NO: 405980 - RNA, 32 nt, Human
cugggacuguuguuugcccagccugggcugca

SEQ ID NO: 405981 - RNA, 32 nt, Human
cugggacuuccuggauccuccucuucuuauaa

SEQ ID NO: 405982 - RNA, 32 nt, Human
cugggacuucuuucuuuuucacuuaauuuuaa

SEQ ID NO: 405983 - RNA, 32 nt, Human
cugggacuugacuugcuaccaacaacugcugu

SEQ ID NO: 405984 - RNA, 32 nt, Human
cugggagaaaacuuagcaaauccaucagcagg

SEQ ID NO: 405985 - RNA, 32 nt, Human
cugggagaaaccaaggcugaagagucagguug

SEQ ID NO: 405986 - RNA, 26 nt, Human
cugggagaacagagcaucugcugcug

SEQ ID NO: 405987 - RNA, 32 nt, Human
cugggagaacuccaaugcugaauggagaaggg

SEQ ID NO: 405988 - RNA, 23 nt, Human
cugggagaaggaggcuacaguga

SEQ ID NO: 405989 - RNA, 32 nt, Human
cugggagaaggcgggcuuccugccuggagcug

SEQ ID NO: 405990 - RNA, 20 nt, Human
cugggagaaggcugcagcca

SEQ ID NO: 405991 - RNA, 19 nt, Human
cugggagaaggucuccaag

SEQ ID NO: 405992 - RNA, 32 nt, Human
cugggagaagugaccucuuuauuuuugaagau

SEQ ID NO: 405993 - RNA, 32 nt, Human
cugggagacagaaaacauguuucccuacaccu

SEQ ID NO: 405994 - RNA, 32 nt, Human
cugggagacagagcuacagcugggacagcucc

SEQ ID NO: 405995 - RNA, 23 nt, Human
cugggagacagagguugcaauga

SEQ ID NO: 405996 - RNA, 21 nt, Human
cugggagacagagguugcagu

SEQ ID NO: 405997 - RNA, 24 nt, Human
cugggagacagagguugcagugag

SEQ ID NO: 405998 - RNA, 32 nt, Human
cugggagaccgaggaagggggauugauugagg

SEQ ID NO: 405999 - RNA, 24 nt, Human
cugggagacggagguugcagugag

SEQ ID NO: 406000 - RNA, 32 nt, Human
cugggagacgggagucaagauggcuugguuuc

SEQ ID NO: 406001 - RNA, 32 nt, Human
cugggagagaacacagggagccagccgugggc

SEQ ID NO: 406002 - RNA, 32 nt, Human
cugggagagagcaagagaggaccuugggcccc

SEQ ID NO: 406003 - RNA, 32 nt, Human
cugggagagauggacucuguccucagcaacac

SEQ ID NO: 406004 - RNA, 32 nt, Human
cugggagagccaguccacggagccaaagcugg

SEQ ID NO: 406005 - RNA, 32 nt, Human
cugggagaggaagagagcaggacaaggcagac

SEQ ID NO: 406006 - RNA, 32 nt, Human
cugggagagggagauagcacuggagaaggucc

SEQ ID NO: 406007 - RNA, 17 nt, Human
cugggagagggaggaag

SEQ ID NO: 406008 - RNA, 32 nt, Human
cugggagaggguguugaguucacugugccagc

SEQ ID NO: 406009 - RNA, 32 nt, Human
cugggagaucagugagccuuuuguagucuucc

SEQ ID NO: 406010 - RNA, 23 nt, Human
cugggagauggaaguugcaguga

SEQ ID NO: 406011 - RNA, 24 nt, Human
cugggagauggagauugcagugag

SEQ ID NO: 406012 - RNA, 24 nt, Human
cugggagauggagguugcagugag

SEQ ID NO: 406013 - RNA, 23 nt, Human
cugggagauuccuaaggaaucau

SEQ ID NO: 406014 - RNA, 21 nt, Human
cugggagcaaaaacuagaaug

SEQ ID NO: 406015 - RNA, 32 nt, Human
cugggagcaaagcgcugagggagcucgguacg

SEQ ID NO: 406016 - RNA, 32 nt, Human
cugggagcaaaguggccugaaaccagagaaaa

SEQ ID NO: 406017 - RNA, 31 nt, Human
cugggagcacaaugcccacaucaucuuaaga

SEQ ID NO: 406018 - RNA, 24 nt, Human
cugggagcaccugucuguugcaga

SEQ ID NO: 406019 - RNA, 32 nt, Human
cugggagcacuggggcgggauccugccacagu

SEQ ID NO: 406020 - RNA, 32 nt, Human
cugggagcagcacugaaagaauuugaacugac

SEQ ID NO: 406021 - RNA, 32 nt, Human
cugggagcagcccagacccuccugaggagcag

SEQ ID NO: 406022 - RNA, 23 nt, Human
cugggagcaggaaauagcuccca

SEQ ID NO: 406023 - RNA, 21 nt, Human
cugggagcaggccuuccuccc

SEQ ID NO: 406024 - RNA, 32 nt, Human
cugggagcauaaaggugaccugaaggaugucc

SEQ ID NO: 406025 - RNA, 25 nt, Human
cugggagcaucauucuccugcuuug

SEQ ID NO: 406026 - RNA, 19 nt, Human
cugggagccauuccugcua

SEQ ID NO: 406027 - RNA, 20 nt, Human
cugggagcccagagcugcug

SEQ ID NO: 406028 - RNA, 32 nt, Human
cugggagccgagauagaagcuccugucgccgc

SEQ ID NO: 406029 - RNA, 32 nt, Human
cugggagccggaggggcugaaagggaaaugga

SEQ ID NO: 406030 - RNA, 24 nt, Human
cugggagccugagagcacugucug

SEQ ID NO: 406031 - RNA, 32 nt, Human
cugggagccugagccccacaccugccgggcag

SEQ ID NO: 406032 - RNA, 32 nt, Human
cugggagccuggccucagcaaggggccuuccu

SEQ ID NO: 406033 - RNA, 32 nt, Human
cugggagccuuucccacccccuucccugcuga

SEQ ID NO: 406034 - RNA, 22 nt, Human
cugggagcgaccagcagcccca

SEQ ID NO: 406035 - RNA, 32 nt, Human
cugggagcgcuaugggagacuggggcuuauuu

SEQ ID NO: 406036 - RNA, 32 nt, Human
cugggagcguagccacgucugcuccaaggugg

SEQ ID NO: 406037 - RNA, 32 nt, Human
cugggagcguuccuggcccccuccagugcaaa

SEQ ID NO: 406038 - RNA, 32 nt, Human
cugggagcucaagugauccuccugccucaguc

SEQ ID NO: 406039 - RNA, 21 nt, Human
cugggagcucagacuuagcug

SEQ ID NO: 406040 - RNA, 20 nt, Human
cugggagcucaggcugcugc

SEQ ID NO: 406041 - RNA, 32 nt, Human
cugggagcuccugguuagcaagugagaucucu

SEQ ID NO: 406042 - RNA, 23 nt, Human
cugggagcucguuaacuaugcug

SEQ ID NO: 406043 - RNA, 32 nt, Human
cugggagcucugacucagggaggccugaaacc

SEQ ID NO: 406044 - RNA, 32 nt, Human
cugggagcucugcuuugcauucccuuuauaaa

SEQ ID NO: 406045 - RNA, 22 nt, Human
cugggagcugaggcuccuguug

SEQ ID NO: 406046 - RNA, 28 nt, Human
cugggagcugcuggugcugcugcugcug

SEQ ID NO: 406047 - RNA, 32 nt, Human
cugggagcuggcaggguccuuccagacagucu

SEQ ID NO: 406048 - RNA, 32 nt, Human
cugggagcugggcaaggagauccucccguggc

SEQ ID NO: 406049 - RNA, 32 nt, Human
cugggagcugucaccuccacuccuaggcuuuu

SEQ ID NO: 406050 - RNA, 32 nt, Human
cugggagcugugaaagggaucccuguccuugg

SEQ ID NO: 406051 - RNA, 32 nt, Human
cugggagcuguggacgggagucaccagguggu

SEQ ID NO: 406052 - RNA, 32 nt, Human
cugggagcuuccaagcccuugagguccagcug

SEQ ID NO: 406053 - RNA, 31 nt, Human
cugggagcuucucuugggccugcugggucug

SEQ ID NO: 406054 - RNA, 21 nt, Human
cugggagcuuggccucuggcu

SEQ ID NO: 406055 - RNA, 32 nt, Human
cugggaggaaaacugagaccuccugguacccg

SEQ ID NO: 406056 - RNA, 32 nt, Human
cugggaggacgccagcccaggccaggucaccc

SEQ ID NO: 406057 - RNA, 32 nt, Human
cugggaggacguggagaggacagugaacuucc

SEQ ID NO: 406058 - RNA, 23 nt, Human
cugggaggagacauugucuucag

SEQ ID NO: 406059 - RNA, 32 nt, Human
cugggaggagagaagaaagcggggauggugca

SEQ ID NO: 406060 - RNA, 32 nt, Human
cugggaggaggaugagauccgcagggaccgag

SEQ ID NO: 406061 - RNA, 32 nt, Human
cugggaggagggaaggaggaaugagaaagcgg

SEQ ID NO: 406062 - RNA, 32 nt, Human
cugggaggagguggaggaggaggaagaggaga

SEQ ID NO: 406063 - RNA, 32 nt, Human
cugggaggaguguuugcacuguggaaauuggu

SEQ ID NO: 406064 - RNA, 24 nt, Human
cugggaggcaaagguugcagugag

SEQ ID NO: 406065 - RNA, 23 nt, Human
cugggaggcaaagguugcgguga

SEQ ID NO: 406066 - RNA, 32 nt, Human
cugggaggcaacagcggggucugcagacaccc

SEQ ID NO: 406067 - RNA, 32 nt, Human
cugggaggcaacagcggggucugcagacgccc

SEQ ID NO: 406068 - RNA, 24 nt, Human
cugggaggcagaaguugcagugag

SEQ ID NO: 406069 - RNA, 24 nt, Human
cugggaggcagagauugcagugag

SEQ ID NO: 406070 - RNA, 20 nt, Human
cugggaggcagagcuugcag

SEQ ID NO: 406071 - RNA, 23 nt, Human
cugggaggcagagcuugcaguga

SEQ ID NO: 406072 - RNA, 24 nt, Human
cugggaggcagagcuugcagugag

SEQ ID NO: 406073 - RNA, 21 nt, Human
cugggaggcagagggugcagu

SEQ ID NO: 406074 - RNA, 24 nt, Human
cugggaggcagagguuacaaugag

SEQ ID NO: 406075 - RNA, 24 nt, Human
cugggaggcagagguuacagugag

SEQ ID NO: 406076 - RNA, 20 nt, Human
cugggaggcagagguugcag

SEQ ID NO: 406077 - RNA, 21 nt, Human
cugggaggcagagguugcagu

SEQ ID NO: 406078 - RNA, 22 nt, Human
cugggaggcagagguugcagug

SEQ ID NO: 406079 - RNA, 23 nt, Human
cugggaggcagagguugcaguga

SEQ ID NO: 406080 - RNA, 24 nt, Human
cugggaggcagagguugcagugag

SEQ ID NO: 406081 - RNA, 23 nt, Human
cugggaggcagagguugcuguga

SEQ ID NO: 406082 - RNA, 24 nt, Human
cugggaggcagagguugcugugag

SEQ ID NO: 406083 - RNA, 32 nt, Human
cugggaggcagagguuguagcgagccaagauc

SEQ ID NO: 406084 - RNA, 24 nt, Human
cugggaggcagagguuucagugag

SEQ ID NO: 406085 - RNA, 23 nt, Human
cugggaggcagaguuugccguga

SEQ ID NO: 406086 - RNA, 24 nt, Human
cugggaggcagauguugcagugag

SEQ ID NO: 406087 - RNA, 32 nt, Human
cugggaggcaggaagaccacggcggaggagaa

SEQ ID NO: 406088 - RNA, 32 nt, Human
cugggaggcaggcaggcaugcaugugggccuc

SEQ ID NO: 406089 - RNA, 32 nt, Human
cugggaggcagguuuggaggcugcagugggac

SEQ ID NO: 406090 - RNA, 22 nt, Human
cugggaggcaucugcuacaguc

SEQ ID NO: 406091 - RNA, 32 nt, Human
cugggaggccaaggagagagaaucacuugagg

SEQ ID NO: 406092 - RNA, 32 nt, Human
cugggaggccaaggcaaaagaaucacuugagc

SEQ ID NO: 406093 - RNA, 32 nt, Human
cugggaggccaaggcagguggaucaccugagg

SEQ ID NO: 406094 - RNA, 32 nt, Human
cugggaggccaaggcagguggaucacuugagg

SEQ ID NO: 406095 - RNA, 32 nt, Human
cugggaggcccaggcagguggaucgccugagg

SEQ ID NO: 406096 - RNA, 19 nt, Human
cugggaggccccugugagg

SEQ ID NO: 406097 - RNA, 32 nt, Human
cugggaggccgagaagaacuugcgugugcugg

SEQ ID NO: 406098 - RNA, 32 nt, Human
cugggaggccgaggcaggaggaucccuuuagc

SEQ ID NO: 406099 - RNA, 32 nt, Human
cugggaggccgaggcaggcagauuauuugagc

SEQ ID NO: 406100 - RNA, 32 nt, Human
cugggaggccgaggcaggcggaucacgagguc

SEQ ID NO: 406101 - RNA, 32 nt, Human
cugggaggccgaggcagguggaucacucugag

SEQ ID NO: 406102 - RNA, 32 nt, Human
cugggaggccgaggcagguggaucacuugagg

SEQ ID NO: 406103 - RNA, 32 nt, Human
cugggaggccgaggcgggaagaucacuugagg

SEQ ID NO: 406104 - RNA, 32 nt, Human
cugggaggccgaggcgggcagaucacuugaga

SEQ ID NO: 406105 - RNA, 32 nt, Human
cugggaggccgaggcggguggaucaccugagg

SEQ ID NO: 406106 - RNA, 32 nt, Human
cugggaggccgagguggguggaucaugagguc

SEQ ID NO: 406107 - RNA, 32 nt, Human
cugggaggccuugaacccucagccucuuccuu

SEQ ID NO: 406108 - RNA, 24 nt, Human
cugggaggcgaagauugcagugag

SEQ ID NO: 406109 - RNA, 24 nt, Human
cugggaggcgaagguugcagugag

SEQ ID NO: 406110 - RNA, 32 nt, Human
cugggaggcgcuguggauggcagcggggcgcu

SEQ ID NO: 406111 - RNA, 24 nt, Human
cugggaggcggaaguugcagugag

SEQ ID NO: 406112 - RNA, 24 nt, Human
cugggaggcggagaguacagugag

SEQ ID NO: 406113 - RNA, 23 nt, Human
cugggaggcggagauugcaguga

SEQ ID NO: 406114 - RNA, 24 nt, Human
cugggaggcggagauugcagugag

SEQ ID NO: 406115 - RNA, 23 nt, Human
cugggaggcggagcuuacaguga

SEQ ID NO: 406116 - RNA, 23 nt, Human
cugggaggcggagcuugcaauga

SEQ ID NO: 406117 - RNA, 21 nt, Human
cugggaggcggagcuugcagu

SEQ ID NO: 406118 - RNA, 24 nt, Human
cugggaggcggagcuugcagugag

SEQ ID NO: 406119 - RNA, 24 nt, Human
cugggaggcggagcuugcggugag

SEQ ID NO: 406120 - RNA, 32 nt, Human
cugggaggcggaggagguugcagugaacugag

SEQ ID NO: 406121 - RNA, 24 nt, Human
cugggaggcggaggcugcagugag

SEQ ID NO: 406122 - RNA, 24 nt, Human
cugggaggcggagguugcaaugag

SEQ ID NO: 406123 - RNA, 24 nt, Human
cugggaggcggagguugcagcgag

SEQ ID NO: 406124 - RNA, 21 nt, Human
cugggaggcggagguugcagu

SEQ ID NO: 406125 - RNA, 22 nt, Human
cugggaggcggagguugcagug

SEQ ID NO: 406126 - RNA, 23 nt, Human
cugggaggcggagguugcaguga

SEQ ID NO: 406127 - RNA, 24 nt, Human
cugggaggcggagguugcagugag

SEQ ID NO: 406128 - RNA, 24 nt, Human
cugggaggcggagguugccgugag

SEQ ID NO: 406129 - RNA, 24 nt, Human
cugggaggcggagguugcggugag

SEQ ID NO: 406130 - RNA, 24 nt, Human
cugggaggcggagguugcugugag

SEQ ID NO: 406131 - RNA, 32 nt, Human
cugggaggcuacacuuuccuuuccagaagacu

SEQ ID NO: 406132 - RNA, 32 nt, Human
cugggaggcucugaggcaacagugggggccug

SEQ ID NO: 406133 - RNA, 32 nt, Human
cugggaggcugaggaaggagaaucgcuugaag

SEQ ID NO: 406134 - RNA, 32 nt, Human
cugggaggcugaggcaggagaaucacuugaac

SEQ ID NO: 406135 - RNA, 32 nt, Human
cugggaggcugaggcaggagaaucauuugcau

SEQ ID NO: 406136 - RNA, 32 nt, Human
cugggaggcugaggcaggagaaucgcuugaac

SEQ ID NO: 406137 - RNA, 32 nt, Human
cugggaggcugaggcaggagaaucucuugaaa

SEQ ID NO: 406138 - RNA, 32 nt, Human
cugggaggcugaggcaggagaauggcgugaac

SEQ ID NO: 406139 - RNA, 32 nt, Human
cugggaggcugaggcaggagaauugcuggaac

SEQ ID NO: 406140 - RNA, 32 nt, Human
cugggaggcugaggcaggagaauugcuugaac

SEQ ID NO: 406141 - RNA, 32 nt, Human
cugggaggcugaggcaggaggaucacuugagc

SEQ ID NO: 406142 - RNA, 32 nt, Human
cugggaggcugaggcaggaggaucacuugagg

SEQ ID NO: 406143 - RNA, 32 nt, Human
cugggaggcugaggcgggagaaucaccugagc

SEQ ID NO: 406144 - RNA, 32 nt, Human
cugggaggcugaggcggguggaucacgagguc

SEQ ID NO: 406145 - RNA, 32 nt, Human
cugggaggcugaggcggguggaucacuugaag

SEQ ID NO: 406146 - RNA, 32 nt, Human
cugggaggcugaggugggagaaucgcuuaacc

SEQ ID NO: 406147 - RNA, 32 nt, Human
cugggaggcugcagagggugcugggagccccu

SEQ ID NO: 406148 - RNA, 32 nt, Human
cugggaggcugcuggauaggagaggggucacg

SEQ ID NO: 406149 - RNA, 32 nt, Human
cugggagggaagggaauggagcucuggguuug

SEQ ID NO: 406150 - RNA, 32 nt, Human
cugggagggagggagagaacauucagcagcag

SEQ ID NO: 406151 - RNA, 32 nt, Human
cugggagggcagcagggcuacccugagcugag

SEQ ID NO: 406152 - RNA, 32 nt, Human
cugggagggcaggcaggcaaaggggagaccag

SEQ ID NO: 406153 - RNA, 32 nt, Human
cugggagggcggagguugcagugagccaggau

SEQ ID NO: 406154 - RNA, 32 nt, Human
cugggagggcuggccaugagguccccacuuuc

SEQ ID NO: 406155 - RNA, 32 nt, Human
cugggaggggagagaagagaaggagggaagga

SEQ ID NO: 406156 - RNA, 32 nt, Human
cugggaggggcugaguguacuugguggaggca

SEQ ID NO: 406157 - RNA, 32 nt, Human
cugggaggggcugugaggggcuggcaccucag

SEQ ID NO: 406158 - RNA, 32 nt, Human
cugggagggggaggaggaggagcucacacccu

SEQ ID NO: 406159 - RNA, 32 nt, Human
cugggagggugaggaugcaugagccaugauua

SEQ ID NO: 406160 - RNA, 24 nt, Human
cugggagguagaaguugcagugag

SEQ ID NO: 406161 - RNA, 24 nt, Human
cugggagguagagguugcagugag

SEQ ID NO: 406162 - RNA, 32 nt, Human
cugggagguccaggcugcaaugagccaagauc

SEQ ID NO: 406163 - RNA, 32 nt, Human
cugggaggugaguuagacagcccaggggacca

SEQ ID NO: 406164 - RNA, 24 nt, Human
cugggagguggaaguugcagugag

SEQ ID NO: 406165 - RNA, 24 nt, Human
cugggagguggagauugcagugag

SEQ ID NO: 406166 - RNA, 23 nt, Human
cugggagguggagcuugcaguga

SEQ ID NO: 406167 - RNA, 24 nt, Human
cugggagguggagcuugcagugag

SEQ ID NO: 406168 - RNA, 24 nt, Human
cugggagguggaggcuacagugag

SEQ ID NO: 406169 - RNA, 23 nt, Human
cugggagguggaggcugcaguga

SEQ ID NO: 406170 - RNA, 24 nt, Human
cugggagguggaggcugcagugag

SEQ ID NO: 406171 - RNA, 24 nt, Human
cugggagguggagguugcaaugag

SEQ ID NO: 406172 - RNA, 24 nt, Human
cugggagguggagguugcagcgag

SEQ ID NO: 406173 - RNA, 32 nt, Human
cugggagguggagguugcagcgagccaagauc

SEQ ID NO: 406174 - RNA, 21 nt, Human
cugggagguggagguugcagu

SEQ ID NO: 406175 - RNA, 23 nt, Human
cugggagguggagguugcaguga

SEQ ID NO: 406176 - RNA, 24 nt, Human
cugggagguggagguugcagugag

SEQ ID NO: 406177 - RNA, 32 nt, Human
cugggagguugaagcagaauugcuugaaccca

SEQ ID NO: 406178 - RNA, 32 nt, Human
cugggaguauuuccuccaccuggagggaggca

SEQ ID NO: 406179 - RNA, 23 nt, Human
cugggagucacaaaccugcucug

SEQ ID NO: 406180 - RNA, 32 nt, Human
cugggagucacacagcuccuguguagccgccu

SEQ ID NO: 406181 - RNA, 17 nt, Human
cugggaguccagggagg

SEQ ID NO: 406182 - RNA, 32 nt, Human
cugggagucccuccuagacuccugggccccau

SEQ ID NO: 406183 - RNA, 18 nt, Human
cugggagucgggggccac

SEQ ID NO: 406184 - RNA, 24 nt, Human
cugggagucugcagcuuccuguug

SEQ ID NO: 406185 - RNA, 32 nt, Human
cugggagucugccuguugcaggacgcacuagc

SEQ ID NO: 406186 - RNA, 32 nt, Human
cugggagugagcagggcagggugggggcaggg

SEQ ID NO: 406187 - RNA, 32 nt, Human
cugggagugaggcggcggaggagccaggugag

SEQ ID NO: 406188 - RNA, 32 nt, Human
cugggagugcuaugggagacuggggucuauuu

SEQ ID NO: 406189 - RNA, 26 nt, Human
cugggaguggaaucccugucuccaca

SEQ ID NO: 406190 - RNA, 32 nt, Human
cugggaguggcuggcccugcuggcccugccuc

SEQ ID NO: 406191 - RNA, 32 nt, Human
cugggagugguggcauaggccuguaauuccag

SEQ ID NO: 406192 - RNA, 32 nt, Human
cugggagugguggcucaugccuguaaucccag

SEQ ID NO: 406193 - RNA, 32 nt, Human
cugggagugguggcucaugccuguaaucccug

SEQ ID NO: 406194 - RNA, 32 nt, Human
cugggagugguggugcaugccuguaaucccag

SEQ ID NO: 406195 - RNA, 32 nt, Human
cugggaguuacuuagaauucaugaagauuuua

SEQ ID NO: 406196 - RNA, 32 nt, Human
cugggaguuggagauuugaagccagucaucuc

SEQ ID NO: 406197 - RNA, 32 nt, Human
cugggaguuugagaccagccugggcaacauag

SEQ ID NO: 406198 - RNA, 32 nt, Human
cugggauaagcagcucagucacaggcagaaga

SEQ ID NO: 406199 - RNA, 21 nt, Human
cugggauaagcugcccuggca

SEQ ID NO: 406200 - RNA, 32 nt, Human
cugggauagacugaggcuuugggugugucugu

SEQ ID NO: 406201 - RNA, 32 nt, Human
cugggauaggggcagaggaggcgaggaggccg

SEQ ID NO: 406202 - RNA, 32 nt, Human
cugggauauggcugcccaggagacagaccacu

SEQ ID NO: 406203 - RNA, 32 nt, Human
cugggaucaagaaggggacagcgccaccucuu

SEQ ID NO: 406204 - RNA, 32 nt, Human
cugggaucaagcaauccuuccaccuugcccuc

SEQ ID NO: 406205 - RNA, 22 nt, Human
cugggaucacagacgugagcca

SEQ ID NO: 406206 - RNA, 22 nt, Human
cugggaucacaggcaugaacca

SEQ ID NO: 406207 - RNA, 22 nt, Human
cugggaucacaggcaugagcca

SEQ ID NO: 406208 - RNA, 22 nt, Human
cugggaucacaggcgugagcca

SEQ ID NO: 406209 - RNA, 32 nt, Human
cugggaucacaggugucagccauugcacccag

SEQ ID NO: 406210 - RNA, 31 nt, Human
cugggaucaccaaggauuguuggagagucca

SEQ ID NO: 406211 - RNA, 32 nt, Human
cugggaucacccaccugaugguggugacuugu

SEQ ID NO: 406212 - RNA, 32 nt, Human
cugggaucacccaugagaugugagugaggaag

SEQ ID NO: 406213 - RNA, 18 nt, Human
cugggaucaccccacuca

SEQ ID NO: 406214 - RNA, 32 nt, Human
cugggaucacugggacacugucuuaugaaggu

SEQ ID NO: 406215 - RNA, 32 nt, Human
cugggaucaggcaacccucucaccucagccuc

SEQ ID NO: 406216 - RNA, 32 nt, Human
cugggaucaggcccaagaauuugcauuuuuaa

SEQ ID NO: 406217 - RNA, 32 nt, Human
cugggaucauagaugccugccaccacacccga

SEQ ID NO: 406218 - RNA, 32 nt, Human
cugggauccagcgagcgacaugguaaugagcu

SEQ ID NO: 406219 - RNA, 32 nt, Human
cugggaucccagggggagggugcagaugaggg

SEQ ID NO: 406220 - RNA, 32 nt, Human
cugggaucgagcccuucucccugcaggugucc

SEQ ID NO: 406221 - RNA, 32 nt, Human
cugggaucggaggccgugagccucccgccccu

SEQ ID NO: 406222 - RNA, 32 nt, Human
cugggaucgguggcucaugccuguaauccuag

SEQ ID NO: 406223 - RNA, 32 nt, Human
cugggaucucaaggagcuuuaaagucuuaaug

SEQ ID NO: 406224 - RNA, 32 nt, Human
cugggaucucaucaucauccuuagucaagcag

SEQ ID NO: 406225 - RNA, 32 nt, Human
cugggaucucgaggcggggccucugccggacc

SEQ ID NO: 406226 - RNA, 32 nt, Human
cugggaucucuacuaggaugcuggcagcccag

SEQ ID NO: 406227 - RNA, 32 nt, Human
cugggaucucuuccuuuuucauuaaagacaau

SEQ ID NO: 406228 - RNA, 32 nt, Human
cugggaugaaaguacacuugaacucuuuuuac

SEQ ID NO: 406229 - RNA, 32 nt, Human
cugggaugagcccgccugagugccccacagca

SEQ ID NO: 406230 - RNA, 32 nt, Human
cugggaugagugccagccugagccugcauggu

SEQ ID NO: 406231 - RNA, 32 nt, Human
cugggaugcaggaacaaaagaaggaaauguug

SEQ ID NO: 406232 - RNA, 24 nt, Human
cugggaugccucaugagucacuga

SEQ ID NO: 406233 - RNA, 32 nt, Human
cugggaugccucgggcccucagugcagguucg

SEQ ID NO: 406234 - RNA, 32 nt, Human
cugggaugcgcaagacuccacagcagcagagg

SEQ ID NO: 406235 - RNA, 32 nt, Human
cugggaugcucaggggacagagaggcagaggg

SEQ ID NO: 406236 - RNA, 31 nt, Human
cugggaugcuuucucccugccauugucucuu

SEQ ID NO: 406237 - RNA, 32 nt, Human
cugggauggaaagagaguugauugaaucccgg

SEQ ID NO: 406238 - RNA, 32 nt, Human
cugggauggauggccugguucaucugcaucag

SEQ ID NO: 406239 - RNA, 32 nt, Human
cugggauggcugcuucccaacuccaccuccag

SEQ ID NO: 406240 - RNA, 32 nt, Human
cugggaugggaggcuuacauggugaugccugu

SEQ ID NO: 406241 - RNA, 32 nt, Human
cugggaugggauccccaaagcuguggcaaaau

SEQ ID NO: 406242 - RNA, 23 nt, Human
cugggaugggggaugcaucugca

SEQ ID NO: 406243 - RNA, 24 nt, Human
cugggaugguccuggacccuugaa

SEQ ID NO: 406244 - RNA, 31 nt, Human
cugggaugucaacugccuacagauguuuauu

SEQ ID NO: 406245 - RNA, 32 nt, Human
cugggaugugcauccugcucccugaacccuuc

SEQ ID NO: 406246 - RNA, 22 nt, Human
cugggauuacaaacauaagcca

SEQ ID NO: 406247 - RNA, 22 nt, Human
cugggauuacaagcaccagcca

SEQ ID NO: 406248 - RNA, 22 nt, Human
cugggauuacaagcauaagcca

SEQ ID NO: 406249 - RNA, 22 nt, Human
cugggauuacaagcaugagcca

SEQ ID NO: 406250 - RNA, 22 nt, Human
cugggauuacaagcgugagcca

SEQ ID NO: 406251 - RNA, 22 nt, Human
cugggauuacagacacgagcca

SEQ ID NO: 406252 - RNA, 22 nt, Human
cugggauuacagacaugaacca

SEQ ID NO: 406253 - RNA, 22 nt, Human
cugggauuacagacaugagcca

SEQ ID NO: 406254 - RNA, 22 nt, Human
cugggauuacagacgugagcca

SEQ ID NO: 406255 - RNA, 32 nt, Human
cugggauuacagccacugcacccagccuaauc

SEQ ID NO: 406256 - RNA, 22 nt, Human
cugggauuacaggcacaaacca

SEQ ID NO: 406257 - RNA, 22 nt, Human
cugggauuacaggcaccagcca

SEQ ID NO: 406258 - RNA, 22 nt, Human
cugggauuacaggcacgagcca

SEQ ID NO: 406259 - RNA, 32 nt, Human
cugggauuacaggcacgugacaccaggcccag

SEQ ID NO: 406260 - RNA, 22 nt, Human
cugggauuacaggcaucagcca

SEQ ID NO: 406261 - RNA, 22 nt, Human
cugggauuacaggcaugaacca

SEQ ID NO: 406262 - RNA, 21 nt, Human
cugggauuacaggcaugacca

SEQ ID NO: 406263 - RNA, 22 nt, Human
cugggauuacaggcaugaccca

SEQ ID NO: 406264 - RNA, 19 nt, Human
cugggauuacaggcaugag

SEQ ID NO: 406265 - RNA, 20 nt, Human
cugggauuacaggcaugagc

SEQ ID NO: 406266 - RNA, 22 nt, Human
cugggauuacaggcaugagcca

SEQ ID NO: 406267 - RNA, 22 nt, Human
cugggauuacaggcaugagcua

SEQ ID NO: 406268 - RNA, 22 nt, Human
cugggauuacaggccugagcca

SEQ ID NO: 406269 - RNA, 22 nt, Human
cugggauuacaggcgcaaacca

SEQ ID NO: 406270 - RNA, 22 nt, Human
cugggauuacaggcgcaagcca

SEQ ID NO: 406271 - RNA, 19 nt, Human
cugggauuacaggcgcgag

SEQ ID NO: 406272 - RNA, 22 nt, Human
cugggauuacaggcgcgagcca

SEQ ID NO: 406273 - RNA, 22 nt, Human
cugggauuacaggcguaagcca

SEQ ID NO: 406274 - RNA, 22 nt, Human
cugggauuacaggcgugaacca

SEQ ID NO: 406275 - RNA, 19 nt, Human
cugggauuacaggcgugag

SEQ ID NO: 406276 - RNA, 22 nt, Human
cugggauuacaggcgugagcca

SEQ ID NO: 406277 - RNA, 22 nt, Human
cugggauuacaggcuuaagcca

SEQ ID NO: 406278 - RNA, 32 nt, Human
cugggauuacaggcuucagccaccacacccag

SEQ ID NO: 406279 - RNA, 22 nt, Human
cugggauuacaggcuugagcca

SEQ ID NO: 406280 - RNA, 19 nt, Human
cugggauuacaggugugag

SEQ ID NO: 406281 - RNA, 22 nt, Human
cugggauuacagucaugagcca

SEQ ID NO: 406282 - RNA, 22 nt, Human
cugggauuaccagcauaagcca

SEQ ID NO: 406283 - RNA, 22 nt, Human
cugggauuaccggcaugagcca

SEQ ID NO: 406284 - RNA, 22 nt, Human
cugggauuacgggcaugagcca

SEQ ID NO: 406285 - RNA, 19 nt, Human
cugggauuacgggcgugag

SEQ ID NO: 406286 - RNA, 22 nt, Human
cugggauuacuagcaugagcca

SEQ ID NO: 406287 - RNA, 22 nt, Human
cugggauuacuggcaugagcca

SEQ ID NO: 406288 - RNA, 19 nt, Human
cugggauuauaggcgugag

SEQ ID NO: 406289 - RNA, 32 nt, Human
cugggauuccacccucagagucagaugcccuu

SEQ ID NO: 406290 - RNA, 22 nt, Human
cugggauuccaggcaugagcca

SEQ ID NO: 406291 - RNA, 19 nt, Human
cugggauuccaggcgugag

SEQ ID NO: 406292 - RNA, 21 nt, Human
cugggauucccacgcccacca

SEQ ID NO: 406293 - RNA, 19 nt, Human
cugggauuccugggcccuu

SEQ ID NO: 406294 - RNA, 22 nt, Human
cugggauugcaggcaugagcca

SEQ ID NO: 406295 - RNA, 32 nt, Human
cugggauugcaggugcaugccaccaugccugg

SEQ ID NO: 406296 - RNA, 32 nt, Human
cugggauugcaggugcgagccaccggguccag

SEQ ID NO: 406297 - RNA, 32 nt, Human
cugggauugccuggguucccuuuggagaagaa

SEQ ID NO: 406298 - RNA, 32 nt, Human
cugggauugggaagaugauuacucacaccugg

SEQ ID NO: 406299 - RNA, 32 nt, Human
cugggauuguugggaauucucucccuaauuca

SEQ ID NO: 406300 - RNA, 23 nt, Human
cugggauuuacaggcaugagcca

SEQ ID NO: 406301 - RNA, 19 nt, Human
cugggauuuccugggcuuu

SEQ ID NO: 406302 - RNA, 18 nt, Human
cugggauuucugacaaca

SEQ ID NO: 406303 - RNA, 32 nt, Human
cugggcaaaaagggcaaaacuccgucucaaaa

SEQ ID NO: 406304 - RNA, 32 nt, Human
cugggcaaaauggugaaaccaugucucuacaa

SEQ ID NO: 406305 - RNA, 32 nt, Human
cugggcaaacauuugaguauucuuggucuucc

SEQ ID NO: 406306 - RNA, 32 nt, Human
cugggcaaacuacucccuacuuaagggaauag

SEQ ID NO: 406307 - RNA, 32 nt, Human
cugggcaaaggguuuucaggaugaggagguca

SEQ ID NO: 406308 - RNA, 32 nt, Human
cugggcaacaacccuaggucaggagguucugu

SEQ ID NO: 406309 - RNA, 32 nt, Human
cugggcaacaagagcaagacucugucucaaaa

SEQ ID NO: 406310 - RNA, 21 nt, Human
cugggcaacacagcaagaccc

SEQ ID NO: 406311 - RNA, 24 nt, Human
cugggcaacacagcaagacccauc

SEQ ID NO: 406312 - RNA, 32 nt, Human
cugggcaacacagcaagacccaucucuacaag

SEQ ID NO: 406313 - RNA, 22 nt, Human
cugggcaacacagcaagacccu

SEQ ID NO: 406314 - RNA, 24 nt, Human
cugggcaacacagcaagacccugu

SEQ ID NO: 406315 - RNA, 24 nt, Human
cugggcaacacaguaagacccugu

SEQ ID NO: 406316 - RNA, 32 nt, Human
cugggcaacacgaugaaaccccaucucuacua

SEQ ID NO: 406317 - RNA, 24 nt, Human
cugggcaacacgaugaaacuccgu

SEQ ID NO: 406318 - RNA, 20 nt, Human
cugggcaacacggugaaacc

SEQ ID NO: 406319 - RNA, 22 nt, Human
cugggcaacacggugaaacccc

SEQ ID NO: 406320 - RNA, 32 nt, Human
cugggcaacacggugaaaccccaucucuauua

SEQ ID NO: 406321 - RNA, 24 nt, Human
cugggcaacacggugaaaccccgu

SEQ ID NO: 406322 - RNA, 32 nt, Human
cugggcaacacggugaaaccccgucucuacua

SEQ ID NO: 406323 - RNA, 18 nt, Human
cugggcaacagagcaagg

SEQ ID NO: 406324 - RNA, 24 nt, Human
cugggcaacagagugaaacccugu

SEQ ID NO: 406325 - RNA, 32 nt, Human
cugggcaacagagugaaaccugucccuguuuu

SEQ ID NO: 406326 - RNA, 32 nt, Human
cugggcaacagcuuggcagccgugcggagccc

SEQ ID NO: 406327 - RNA, 23 nt, Human
cugggcaacaggcaaaacccugu

SEQ ID NO: 406328 - RNA, 24 nt, Human
cugggcaacauaaugagacccugu

SEQ ID NO: 406329 - RNA, 21 nt, Human
cugggcaacauaaugagaccu

SEQ ID NO: 406330 - RNA, 24 nt, Human
cugggcaacauagcaaaacccugu

SEQ ID NO: 406331 - RNA, 21 nt, Human
cugggcaacauagcaaaaccu

SEQ ID NO: 406332 - RNA, 24 nt, Human
cugggcaacauagcaaaauccugu

SEQ ID NO: 406333 - RNA, 21 nt, Human
cugggcaacauagcaagaccc

SEQ ID NO: 406334 - RNA, 24 nt, Human
cugggcaacauagcaagaccccgu

SEQ ID NO: 406335 - RNA, 24 nt, Human
cugggcaacauagcaagacccugu

SEQ ID NO: 406336 - RNA, 24 nt, Human
cugggcaacauagcgagacccugu

SEQ ID NO: 406337 - RNA, 24 nt, Human
cugggcaacauaguaagacccugu

SEQ ID NO: 406338 - RNA, 24 nt, Human
cugggcaacauagugaaacccugu

SEQ ID NO: 406339 - RNA, 32 nt, Human
cugggcaacauagugaaacccugucucuacua

SEQ ID NO: 406340 - RNA, 32 nt, Human
cugggcaacauagugaaaccgucuccacaaau

SEQ ID NO: 406341 - RNA, 30 nt, Human
cugggcaacauagugaaaccuggucucugc

SEQ ID NO: 406342 - RNA, 22 nt, Human
cugggcaacauagugaagcccc

SEQ ID NO: 406343 - RNA, 20 nt, Human
cugggcaacauagugagacc

SEQ ID NO: 406344 - RNA, 22 nt, Human
cugggcaacauagugagacccc

SEQ ID NO: 406345 - RNA, 24 nt, Human
cugggcaacauagugagacccugu

SEQ ID NO: 406346 - RNA, 21 nt, Human
cugggcaacauagugagaccu

SEQ ID NO: 406347 - RNA, 24 nt, Human
cugggcaacauagugagaccuugu

SEQ ID NO: 406348 - RNA, 24 nt, Human
cugggcaacauagugauaccuugu

SEQ ID NO: 406349 - RNA, 20 nt, Human
cugggcaacaugaugaaacc

SEQ ID NO: 406350 - RNA, 22 nt, Human
cugggcaacaugaugaaacccc

SEQ ID NO: 406351 - RNA, 32 nt, Human
cugggcaacaugaugaaaccccaucuccacug

SEQ ID NO: 406352 - RNA, 24 nt, Human
cugggcaacauggagaaaccccgu

SEQ ID NO: 406353 - RNA, 32 nt, Human
cugggcaacauggagaaaccccguuucuacua

SEQ ID NO: 406354 - RNA, 32 nt, Human
cugggcaacauggagagaccccuguucugcca

SEQ ID NO: 406355 - RNA, 32 nt, Human
cugggcaacauggagagaccccuucucuacua

SEQ ID NO: 406356 - RNA, 22 nt, Human
cugggcaacauggcaaaaaccc

SEQ ID NO: 406357 - RNA, 32 nt, Human
cugggcaacauggcaaaaacccaccucuacaa

SEQ ID NO: 406358 - RNA, 22 nt, Human
cugggcaacauggcaaaacacc

SEQ ID NO: 406359 - RNA, 24 nt, Human
cugggcaacauggcaaaacaccgu

SEQ ID NO: 406360 - RNA, 32 nt, Human
cugggcaacauggcaaaacaccgucucuacaa

SEQ ID NO: 406361 - RNA, 20 nt, Human
cugggcaacauggcaaaacc

SEQ ID NO: 406362 - RNA, 21 nt, Human
cugggcaacauggcaaaaccc

SEQ ID NO: 406363 - RNA, 22 nt, Human
cugggcaacauggcaaaacccc

SEQ ID NO: 406364 - RNA, 32 nt, Human
cugggcaacauggcaaaaccccaucucuacaa

SEQ ID NO: 406365 - RNA, 32 nt, Human
cugggcaacauggcaaaaccccauuucuacaa

SEQ ID NO: 406366 - RNA, 24 nt, Human
cugggcaacauggcaaaacccugu

SEQ ID NO: 406367 - RNA, 32 nt, Human
cugggcaacauggcaaaacccugucucuacaa

SEQ ID NO: 406368 - RNA, 32 nt, Human
cugggcaacauggcaaaacccuguuucuacac

SEQ ID NO: 406369 - RNA, 32 nt, Human
cugggcaacauggcaaaacucagucuguacaa

SEQ ID NO: 406370 - RNA, 31 nt, Human
cugggcaacauggcaaaacuuugucucucuu

SEQ ID NO: 406371 - RNA, 24 nt, Human
cugggcaacauggcaaaauccugu

SEQ ID NO: 406372 - RNA, 32 nt, Human
cugggcaacauggcaaaauccugucucuauaa

SEQ ID NO: 406373 - RNA, 32 nt, Human
cugggcaacauggcaaaugccgucucugcaaa

SEQ ID NO: 406374 - RNA, 21 nt, Human
cugggcaacauggcaagaccc

SEQ ID NO: 406375 - RNA, 22 nt, Human
cugggcaacauggcaagacccc

SEQ ID NO: 406376 - RNA, 24 nt, Human
cugggcaacauggcaagacccugu

SEQ ID NO: 406377 - RNA, 32 nt, Human
cugggcaacauggcaagacccugucucuacua

SEQ ID NO: 406378 - RNA, 32 nt, Human
cugggcaacauggcaagacccugucucuuuaa

SEQ ID NO: 406379 - RNA, 32 nt, Human
cugggcaacauggccagaccuccucucuacaa

SEQ ID NO: 406380 - RNA, 21 nt, Human
cugggcaacauggcgaaaacc

SEQ ID NO: 406381 - RNA, 25 nt, Human
cugggcaacauggcgaaaacccauc

SEQ ID NO: 406382 - RNA, 32 nt, Human
cugggcaacauggcgaaaacccaucucuacaa

SEQ ID NO: 406383 - RNA, 20 nt, Human
cugggcaacauggcgaaacc

SEQ ID NO: 406384 - RNA, 21 nt, Human
cugggcaacauggcgaaaccc

SEQ ID NO: 406385 - RNA, 22 nt, Human
cugggcaacauggcgaaacccc

SEQ ID NO: 406386 - RNA, 32 nt, Human
cugggcaacauggcgaaaccccauuucuacua

SEQ ID NO: 406387 - RNA, 24 nt, Human
cugggcaacauggcgaaaccccgu

SEQ ID NO: 406388 - RNA, 22 nt, Human
cugggcaacauggcgaaacccu

SEQ ID NO: 406389 - RNA, 32 nt, Human
cugggcaacauggcgaaacccuaucucuacaa

SEQ ID NO: 406390 - RNA, 24 nt, Human
cugggcaacauggcgaaacccugu

SEQ ID NO: 406391 - RNA, 30 nt, Human
cugggcaacauggcgaaacccugucuccac

SEQ ID NO: 406392 - RNA, 32 nt, Human
cugggcaacauggcgaaacccugucucuacua

SEQ ID NO: 406393 - RNA, 32 nt, Human
cugggcaacauggcgagaccccaucucuacua

SEQ ID NO: 406394 - RNA, 24 nt, Human
cugggcaacauggcgagacccugu

SEQ ID NO: 406395 - RNA, 32 nt, Human
cugggcaacauggcgagacccugucucuacaa

SEQ ID NO: 406396 - RNA, 32 nt, Human
cugggcaacauggcgagauccugucucugcaa

SEQ ID NO: 406397 - RNA, 32 nt, Human
cugggcaacauggcgaggccucugucucuaca

SEQ ID NO: 406398 - RNA, 20 nt, Human
cugggcaacauggcuaaacc

SEQ ID NO: 406399 - RNA, 24 nt, Human
cugggcaacauggcuaaaccccgu

SEQ ID NO: 406400 - RNA, 32 nt, Human
cugggcaacauggcuaaaccccgucucuacaa

SEQ ID NO: 406401 - RNA, 32 nt, Human
cugggcaacauggggaaaccccagcucuacaa

SEQ ID NO: 406402 - RNA, 32 nt, Human
cugggcaacauggggaaacuccaucucuacaa

SEQ ID NO: 406403 - RNA, 32 nt, Human
cugggcaacauggggagacccagucucuacaa

SEQ ID NO: 406404 - RNA, 32 nt, Human
cugggcaacaugguaaaacccugucucuacca

SEQ ID NO: 406405 - RNA, 32 nt, Human
cugggcaacaugguaaaacucugucucucuaa

SEQ ID NO: 406406 - RNA, 32 nt, Human
cugggcaacaugguaagaccccuucucuaccc

SEQ ID NO: 406407 - RNA, 20 nt, Human
cugggcaacauggugaaacc

SEQ ID NO: 406408 - RNA, 21 nt, Human
cugggcaacauggugaaaccc

SEQ ID NO: 406409 - RNA, 24 nt, Human
cugggcaacauggugaaacccagu

SEQ ID NO: 406410 - RNA, 32 nt, Human
cugggcaacauggugaaacccaguuucuacaa

SEQ ID NO: 406411 - RNA, 22 nt, Human
cugggcaacauggugaaacccc

SEQ ID NO: 406412 - RNA, 32 nt, Human
cugggcaacauggugaaaccccagcucuccua

SEQ ID NO: 406413 - RNA, 32 nt, Human
cugggcaacauggugaaaccccaucuccacca

SEQ ID NO: 406414 - RNA, 30 nt, Human
cugggcaacauggugaaaccccaucucuac

SEQ ID NO: 406415 - RNA, 32 nt, Human
cugggcaacauggugaaaccccaucucuacaa

SEQ ID NO: 406416 - RNA, 32 nt, Human
cugggcaacauggugaaaccccaucucuacua

SEQ ID NO: 406417 - RNA, 24 nt, Human
cugggcaacauggugaaaccccgu

SEQ ID NO: 406418 - RNA, 32 nt, Human
cugggcaacauggugaaaccccguccccacug

SEQ ID NO: 406419 - RNA, 32 nt, Human
cugggcaacauggugaaaccccgucucuacca

SEQ ID NO: 406420 - RNA, 32 nt, Human
cugggcaacauggugaaaccccgucucuaccc

SEQ ID NO: 406421 - RNA, 32 nt, Human
cugggcaacauggugaaaccccgucucuacua

SEQ ID NO: 406422 - RNA, 32 nt, Human
cugggcaacauggugaaaccccugucucuaca

SEQ ID NO: 406423 - RNA, 32 nt, Human
cugggcaacauggugaaaccccuucucuacua

SEQ ID NO: 406424 - RNA, 24 nt, Human
cugggcaacauggugaaacccggu

SEQ ID NO: 406425 - RNA, 24 nt, Human
cugggcaacauggugaaacccguc

SEQ ID NO: 406426 - RNA, 32 nt, Human
cugggcaacauggugaaacccgucucuaccaa

SEQ ID NO: 406427 - RNA, 22 nt, Human
cugggcaacauggugaaacccu

SEQ ID NO: 406428 - RNA, 32 nt, Human
cugggcaacauggugaaacccuaucuccguga

SEQ ID NO: 406429 - RNA, 24 nt, Human
cugggcaacauggugaaacccugu

SEQ ID NO: 406430 - RNA, 32 nt, Human
cugggcaacauggugaaacccugucgguacaa

SEQ ID NO: 406431 - RNA, 32 nt, Human
cugggcaacauggugaaacccugucucaaaaa

SEQ ID NO: 406432 - RNA, 28 nt, Human
cugggcaacauggugaaacccugucucu

SEQ ID NO: 406433 - RNA, 32 nt, Human
cugggcaacauggugaaacccugucucuacca

SEQ ID NO: 406434 - RNA, 32 nt, Human
cugggcaacauggugaaacccugucucuacua

SEQ ID NO: 406435 - RNA, 32 nt, Human
cugggcaacauggugaaacccugucucuacug

SEQ ID NO: 406436 - RNA, 32 nt, Human
cugggcaacauggugaaacccugucuuuacaa

SEQ ID NO: 406437 - RNA, 32 nt, Human
cugggcaacauggugaaacccuguuucuacaa

SEQ ID NO: 406438 - RNA, 32 nt, Human
cugggcaacauggugaaacccuguuucuauaa

SEQ ID NO: 406439 - RNA, 21 nt, Human
cugggcaacauggugaaaccu

SEQ ID NO: 406440 - RNA, 22 nt, Human
cugggcaacauggugaaaccuc

SEQ ID NO: 406441 - RNA, 32 nt, Human
cugggcaacauggugaaaccucaucucuacaa

SEQ ID NO: 406442 - RNA, 24 nt, Human
cugggcaacauggugaaaccucgu

SEQ ID NO: 406443 - RNA, 32 nt, Human
cugggcaacauggugaaaccucgucucuacua

SEQ ID NO: 406444 - RNA, 32 nt, Human
cugggcaacauggugaaaccugucucuacaaa

SEQ ID NO: 406445 - RNA, 24 nt, Human
cugggcaacauggugaaaccuugu

SEQ ID NO: 406446 - RNA, 32 nt, Human
cugggcaacauggugaaaccuugucucuacau

SEQ ID NO: 406447 - RNA, 32 nt, Human
cugggcaacauggugaaaccuugucucuacua

SEQ ID NO: 406448 - RNA, 24 nt, Human
cugggcaacauggugaaacuccgu

SEQ ID NO: 406449 - RNA, 32 nt, Human
cugggcaacauggugaaacugucucuaucaaa

SEQ ID NO: 406450 - RNA, 21 nt, Human
cugggcaacauggugaaagcc

SEQ ID NO: 406451 - RNA, 24 nt, Human
cugggcaacauggugaaagcccgu

SEQ ID NO: 406452 - RNA, 32 nt, Human
cugggcaacauggugaaagcccgucucuaccg

SEQ ID NO: 406453 - RNA, 20 nt, Human
cugggcaacauggugaaauc

SEQ ID NO: 406454 - RNA, 22 nt, Human
cugggcaacauggugaaauccc

SEQ ID NO: 406455 - RNA, 32 nt, Human
cugggcaacauggugaaaucccaugucuacua

SEQ ID NO: 406456 - RNA, 24 nt, Human
cugggcaacauggugaaaucccgu

SEQ ID NO: 406457 - RNA, 32 nt, Human
cugggcaacauggugaaaucccgucaccacaa

SEQ ID NO: 406458 - RNA, 32 nt, Human
cugggcaacauggugaaauccugccucuaaaa

SEQ ID NO: 406459 - RNA, 24 nt, Human
cugggcaacauggugaaauccugu

SEQ ID NO: 406460 - RNA, 32 nt, Human
cugggcaacauggugaaauccugucucuacca

SEQ ID NO: 406461 - RNA, 22 nt, Human
cugggcaacauggugaagcccc

SEQ ID NO: 406462 - RNA, 32 nt, Human
cugggcaacauggugaagccccaucucuacaa

SEQ ID NO: 406463 - RNA, 31 nt, Human
cugggcaacauggugaagccucauaucuacc

SEQ ID NO: 406464 - RNA, 32 nt, Human
cugggcaacauggugaccucccgucucucucg

SEQ ID NO: 406465 - RNA, 20 nt, Human
cugggcaacauggugagacc

SEQ ID NO: 406466 - RNA, 32 nt, Human
cugggcaacauggugagaccaauugacuguag

SEQ ID NO: 406467 - RNA, 22 nt, Human
cugggcaacauggugagacccc

SEQ ID NO: 406468 - RNA, 32 nt, Human
cugggcaacauggugagaccccaucucuacaa

SEQ ID NO: 406469 - RNA, 32 nt, Human
cugggcaacauggugagaccccaucucuauuu

SEQ ID NO: 406470 - RNA, 24 nt, Human
cugggcaacauggugagaccccgu

SEQ ID NO: 406471 - RNA, 32 nt, Human
cugggcaacauggugagaccccgucucuacaa

SEQ ID NO: 406472 - RNA, 32 nt, Human
cugggcaacauggugagacccucgucucuaca

SEQ ID NO: 406473 - RNA, 24 nt, Human
cugggcaacauggugagacccugu

SEQ ID NO: 406474 - RNA, 32 nt, Human
cugggcaacauggugagacucugccucuacaa

SEQ ID NO: 406475 - RNA, 30 nt, Human
cugggcaacauggugagauuucaucucuac

SEQ ID NO: 406476 - RNA, 32 nt, Human
cugggcaacaugguggaacccugucucuaaaa

SEQ ID NO: 406477 - RNA, 21 nt, Human
cugggcaacccugucucuaca

SEQ ID NO: 406478 - RNA, 32 nt, Human
cugggcaacguagagauccccaucucuaugaa

SEQ ID NO: 406479 - RNA, 22 nt, Human
cugggcaacguggugaaacccc

SEQ ID NO: 406480 - RNA, 32 nt, Human
cugggcaacguggugaaaccccaucucuacaa

SEQ ID NO: 406481 - RNA, 32 nt, Human
cugggcaacguggugaaacccugucucuacua

SEQ ID NO: 406482 - RNA, 32 nt, Human
cugggcaacuggacagaucugggagccagcag

SEQ ID NO: 406483 - RNA, 20 nt, Human
cugggcaagauggugaaacc

SEQ ID NO: 406484 - RNA, 22 nt, Human
cugggcaagauggugaaacccc

SEQ ID NO: 406485 - RNA, 32 nt, Human
cugggcaagauggugaaaccccaucucuacug

SEQ ID NO: 406486 - RNA, 32 nt, Human
cugggcaagcagagagugccugggacaggacu

SEQ ID NO: 406487 - RNA, 25 nt, Human
cugggcaagggguagggcucucugg

SEQ ID NO: 406488 - RNA, 32 nt, Human
cugggcaagucacuuaaccucuuuaggccucc

SEQ ID NO: 406489 - RNA, 20 nt, Human
cugggcaauauagugaaacc

SEQ ID NO: 406490 - RNA, 22 nt, Human
cugggcaauauagugaaacccc

SEQ ID NO: 406491 - RNA, 32 nt, Human
cugggcaauauagugaaaccccaucucuuaaa

SEQ ID NO: 406492 - RNA, 21 nt, Human
cugggcaauauggcaaaaccc

SEQ ID NO: 406493 - RNA, 22 nt, Human
cugggcaauauggcaaaacccc

SEQ ID NO: 406494 - RNA, 32 nt, Human
cugggcaaugcgggaggcagagccaggccucc

SEQ ID NO: 406495 - RNA, 19 nt, Human
cugggcacaagugauccuc

SEQ ID NO: 406496 - RNA, 32 nt, Human
cugggcacagauuccacccaggaacuaaggcu

SEQ ID NO: 406497 - RNA, 32 nt, Human
cugggcacagauucugguggcucccugcuggc

SEQ ID NO: 406498 - RNA, 32 nt, Human
cugggcacaggcugggaucagggcagugagcg

SEQ ID NO: 406499 - RNA, 32 nt, Human
cugggcacauccucuccucucuccuucucucu

SEQ ID NO: 406500 - RNA, 32 nt, Human
cugggcaccaaggaaacuaacagcuuucucaa

SEQ ID NO: 406501 - RNA, 32 nt, Human
cugggcaccacccuccccaggcugggugugga

SEQ ID NO: 406502 - RNA, 24 nt, Human
cugggcaccauggugaaaccucgu

SEQ ID NO: 406503 - RNA, 32 nt, Human
cugggcaccauggugaaaccucgucuuuacca

SEQ ID NO: 406504 - RNA, 22 nt, Human
cugggcaccauggugagacccc

SEQ ID NO: 406505 - RNA, 32 nt, Human
cugggcaccauggugagaccccaucucuauua

SEQ ID NO: 406506 - RNA, 32 nt, Human
cugggcacccaccccauccucuaccugccaca

SEQ ID NO: 406507 - RNA, 19 nt, Human
cugggcacccgguuccagg

SEQ ID NO: 406508 - RNA, 32 nt, Human
cugggcaccgagcuucacccugggugggucuc

SEQ ID NO: 406509 - RNA, 21 nt, Human
cugggcaccuaggauucgagu

SEQ ID NO: 406510 - RNA, 32 nt, Human
cugggcaccugccuggugauauccacaagagc

SEQ ID NO: 406511 - RNA, 32 nt, Human
cugggcaccugcugcaaccaugcagcuacccu

SEQ ID NO: 406512 - RNA, 19 nt, Human
cugggcaccuggauccagg

SEQ ID NO: 406513 - RNA, 32 nt, Human
cugggcaccuggcaccuggccugcagaugcug

SEQ ID NO: 406514 - RNA, 22 nt, Human
cugggcaccuggccucguccgg

SEQ ID NO: 406515 - RNA, 22 nt, Human
cugggcaccuggcugucccagg

SEQ ID NO: 406516 - RNA, 32 nt, Human
cugggcacggugccucaugccuguaaucccag

SEQ ID NO: 406517 - RNA, 32 nt, Human
cugggcacggugccucaugccuguaauccuag

SEQ ID NO: 406518 - RNA, 22 nt, Human
cugggcacguugcuguugcugc

SEQ ID NO: 406519 - RNA, 32 nt, Human
cugggcacucauuucaaaucaugaaaugcuac

SEQ ID NO: 406520 - RNA, 32 nt, Human
cugggcacucuggcucaagccuguaaucccag

SEQ ID NO: 406521 - RNA, 32 nt, Human
cugggcacugaaucagaggagcagaguuauuu

SEQ ID NO: 406522 - RNA, 31 nt, Human
cugggcacugggcugcagguuggagaggcag

SEQ ID NO: 406523 - RNA, 32 nt, Human
cugggcacuguacuuuagccugggcgacagag

SEQ ID NO: 406524 - RNA, 32 nt, Human
cugggcacuguggcucacgccuguaaucucag

SEQ ID NO: 406525 - RNA, 32 nt, Human
cugggcacuguggcucacuccuguaaucucag

SEQ ID NO: 406526 - RNA, 32 nt, Human
cugggcagaagaaucacuugaggauaggaguu

SEQ ID NO: 406527 - RNA, 32 nt, Human
cugggcagaagcaggaggaucauuugagccca

SEQ ID NO: 406528 - RNA, 25 nt, Human
cugggcagacaggcagagggccaga

SEQ ID NO: 406529 - RNA, 32 nt, Human
cugggcagacaggcagagggccagagcagagg

SEQ ID NO: 406530 - RNA, 32 nt, Human
cugggcagacaggcauugagcuggcaggaagu

SEQ ID NO: 406531 - RNA, 32 nt, Human
cugggcagagagcagagggggucaugcaguga

SEQ ID NO: 406532 - RNA, 32 nt, Human
cugggcagagcuggccuggcucugaguggcca

SEQ ID NO: 406533 - RNA, 32 nt, Human
cugggcagagggcagagugaggccaccuggcg

SEQ ID NO: 406534 - RNA, 32 nt, Human
cugggcagaggggagagagggcaggacaggcc

SEQ ID NO: 406535 - RNA, 32 nt, Human
cugggcagagguggaggagacacugaagcgac

SEQ ID NO: 406536 - RNA, 32 nt, Human
cugggcagaguucaucuucuugaccuuuggcc

SEQ ID NO: 406537 - RNA, 32 nt, Human
cugggcagcacugugaaaccaacauuucuuca

SEQ ID NO: 406538 - RNA, 32 nt, Human
cugggcagcagcugugucuggcuuccuuacuu

SEQ ID NO: 406539 - RNA, 24 nt, Human
cugggcagcaugacaaaacccugu

SEQ ID NO: 406540 - RNA, 24 nt, Human
cugggcagcauggugaaacccugu

SEQ ID NO: 406541 - RNA, 32 nt, Human
cugggcagcauggugaaacccuguaucuacaa

SEQ ID NO: 406542 - RNA, 25 nt, Human
cugggcagcauuggugaugcuguau

SEQ ID NO: 406543 - RNA, 32 nt, Human
cugggcagccagggcagccaggacggcaccaa

SEQ ID NO: 406544 - RNA, 22 nt, Human
cugggcagccccaggggccagg

SEQ ID NO: 406545 - RNA, 32 nt, Human
cugggcagccuccuccgauggcccacuccccg

SEQ ID NO: 406546 - RNA, 21 nt, Human
cugggcagccuggcaaaaccc

SEQ ID NO: 406547 - RNA, 32 nt, Human
cugggcagccuggcacaagugaagaagaaggc

SEQ ID NO: 406548 - RNA, 32 nt, Human
cugggcagccugucugggaagggagccaggau

SEQ ID NO: 406549 - RNA, 32 nt, Human
cugggcagcguagucauccacagaucaggaga

SEQ ID NO: 406550 - RNA, 32 nt, Human
cugggcagcuccuucagcguugccugcuuccu

SEQ ID NO: 406551 - RNA, 32 nt, Human
cugggcagcuggaggcgcaggagccugugccc

SEQ ID NO: 406552 - RNA, 32 nt, Human
cugggcagcuucuguuccugcacaacaguuau

SEQ ID NO: 406553 - RNA, 32 nt, Human
cugggcaggaagcuggcugagccccaagaccc

SEQ ID NO: 406554 - RNA, 32 nt, Human
cugggcaggagugcucucaccacgaggcugcu

SEQ ID NO: 406555 - RNA, 32 nt, Human
cugggcaggagugcuggugaggagguggagcc

SEQ ID NO: 406556 - RNA, 32 nt, Human
cugggcaggcuggauguggugguguaccccac

SEQ ID NO: 406557 - RNA, 32 nt, Human
cugggcaggcuucucuguagaaccccaggggc

SEQ ID NO: 406558 - RNA, 32 nt, Human
cugggcagggaugauggcagagccaggcuguu

SEQ ID NO: 406559 - RNA, 32 nt, Human
cugggcagggccuggccugacugagugggauu

SEQ ID NO: 406560 - RNA, 32 nt, Human
cugggcaggggcccugcaccacagcucuccag

SEQ ID NO: 406561 - RNA, 32 nt, Human
cugggcaggggguccaggugggccacacaggg

SEQ ID NO: 406562 - RNA, 32 nt, Human
cugggcagggucuugaggcagccacugugaug

SEQ ID NO: 406563 - RNA, 32 nt, Human
cugggcaggugccccucacacccccaggaugu

SEQ ID NO: 406564 - RNA, 32 nt, Human
cugggcaguaauuggggcaugggaugggcaug

SEQ ID NO: 406565 - RNA, 32 nt, Human
cugggcaguagaggaagaaaugcuagccugga

SEQ ID NO: 406566 - RNA, 32 nt, Human
cugggcagucuccggcgagggcaaggagcggu

SEQ ID NO: 406567 - RNA, 22 nt, Human
cugggcagucuugggggccaga

SEQ ID NO: 406568 - RNA, 20 nt, Human
cugggcagugccagggcuua

SEQ ID NO: 406569 - RNA, 32 nt, Human
cugggcagugccucggacugccucggacagaa

SEQ ID NO: 406570 - RNA, 32 nt, Human
cugggcagugccugugacaacguagagcgcgu

SEQ ID NO: 406571 - RNA, 32 nt, Human
cugggcaguguggaggucguuggagucacuuc

SEQ ID NO: 406572 - RNA, 32 nt, Human
cugggcauaacagcaggagcucauccucugug

SEQ ID NO: 406573 - RNA, 32 nt, Human
cugggcauaguagcucaugccuguaaucccaa

SEQ ID NO: 406574 - RNA, 32 nt, Human
cugggcauaguggcaggcaccuguaaucccag

SEQ ID NO: 406575 - RNA, 32 nt, Human
cugggcauagugguucaugccuguaaucccag

SEQ ID NO: 406576 - RNA, 32 nt, Human
cugggcauaguugcacguaccuguagucccag

SEQ ID NO: 406577 - RNA, 32 nt, Human
cugggcauauccaccaccucccucaccaacau

SEQ ID NO: 406578 - RNA, 22 nt, Human
cugggcaucaggcagggugcag

SEQ ID NO: 406579 - RNA, 32 nt, Human
cugggcaucccagcuaugcagaagcugaagca

SEQ ID NO: 406580 - RNA, 32 nt, Human
cugggcaucccuuugugggugggcagagcccu

SEQ ID NO: 406581 - RNA, 32 nt, Human
cugggcaucgcugaggcccugagcaucccagg

SEQ ID NO: 406582 - RNA, 32 nt, Human
cugggcaucuuccuugacuuacuccucucucc

SEQ ID NO: 406583 - RNA, 32 nt, Human
cugggcaucuucugcacuuucucugcauuugu

SEQ ID NO: 406584 - RNA, 26 nt, Human
cugggcaugacaggagggggaccacu

SEQ ID NO: 406585 - RNA, 32 nt, Human
cugggcaugaugacgggugccuguaaucccag

SEQ ID NO: 406586 - RNA, 32 nt, Human
cugggcaugauggcaggcaccuguaaucccag

SEQ ID NO: 406587 - RNA, 32 nt, Human
cugggcaugauggccccagccuguaaucccag

SEQ ID NO: 406588 - RNA, 32 nt, Human
cugggcaugccuguaaucccagaauuuuggga

SEQ ID NO: 406589 - RNA, 20 nt, Human
cugggcaugcuggggcaugc

SEQ ID NO: 406590 - RNA, 32 nt, Human
cugggcaugcuggggcaugcccauagucccag

SEQ ID NO: 406591 - RNA, 32 nt, Human
cugggcauggaggcucacaccuguaaucccaa

SEQ ID NO: 406592 - RNA, 32 nt, Human
cugggcauggaggcucaugccuguaauccuag

SEQ ID NO: 406593 - RNA, 32 nt, Human
cugggcauggcgguucaugccuguaaucccag

SEQ ID NO: 406594 - RNA, 32 nt, Human
cugggcaugggagagaaacgggcuggggagug

SEQ ID NO: 406595 - RNA, 32 nt, Human
cugggcaugggggcucacaccuguaaucccag

SEQ ID NO: 406596 - RNA, 32 nt, Human
cugggcauggugacucacgccuguaauccccc

SEQ ID NO: 406597 - RNA, 32 nt, Human
cugggcaugguggcaaaugccuguaauaccag

SEQ ID NO: 406598 - RNA, 32 nt, Human
cugggcaugguggcaagagccuguaaucucag

SEQ ID NO: 406599 - RNA, 32 nt, Human
cugggcaugguggcacaugccuguaaucccag

SEQ ID NO: 406600 - RNA, 32 nt, Human
cugggcaugguggcacaugccuguaauccuag

SEQ ID NO: 406601 - RNA, 32 nt, Human
cugggcaugguggcacaugccuguaaucucag

SEQ ID NO: 406602 - RNA, 32 nt, Human
cugggcaugguggcacccaucuguaguccuaa

SEQ ID NO: 406603 - RNA, 32 nt, Human
cugggcaugguggcacgcgccuguaauaccag

SEQ ID NO: 406604 - RNA, 32 nt, Human
cugggcaugguggcaggcaccuguaaucccag

SEQ ID NO: 406605 - RNA, 32 nt, Human
cugggcaugguggcaggcgccuguaaucccag

SEQ ID NO: 406606 - RNA, 32 nt, Human
cugggcaugguggcaguugccuguaauccuag

SEQ ID NO: 406607 - RNA, 32 nt, Human
cugggcaugguggcauauaccuguaaccccaa

SEQ ID NO: 406608 - RNA, 32 nt, Human
cugggcaugguggcaugcgccuguaaucccag

SEQ ID NO: 406609 - RNA, 32 nt, Human
cugggcaugguggcaugugccuguaaucccag

SEQ ID NO: 406610 - RNA, 32 nt, Human
cugggcaugguggccggcgccuguaaucccag

SEQ ID NO: 406611 - RNA, 32 nt, Human
cugggcaugguggcgcacaccuguaaucucag

SEQ ID NO: 406612 - RNA, 32 nt, Human
cugggcaugguggcgcacgccuguaaugccag

SEQ ID NO: 406613 - RNA, 32 nt, Human
cugggcaugguggcgcauaccuguaaucccag

SEQ ID NO: 406614 - RNA, 32 nt, Human
cugggcaugguggcgcaugccuguaaucccag

SEQ ID NO: 406615 - RNA, 32 nt, Human
cugggcaugguggcgcaugccuguaauccuag

SEQ ID NO: 406616 - RNA, 32 nt, Human
cugggcaugguggcgcgugccuguaaucccag

SEQ ID NO: 406617 - RNA, 32 nt, Human
cugggcaugguggcgggcgccuguaaucccag

SEQ ID NO: 406618 - RNA, 32 nt, Human
cugggcaugguggcgggugccuguaaucccag

SEQ ID NO: 406619 - RNA, 32 nt, Human
cugggcaugguggcgugcaccuguaaucccag

SEQ ID NO: 406620 - RNA, 32 nt, Human
cugggcaugguggcucacaccuguaaucacug

SEQ ID NO: 406621 - RNA, 32 nt, Human
cugggcaugguggcucacaccuguaaucccaa

SEQ ID NO: 406622 - RNA, 32 nt, Human
cugggcaugguggcucacaccuguaaucccag

SEQ ID NO: 406623 - RNA, 32 nt, Human
cugggcaugguggcucacaccuguaaucucag

SEQ ID NO: 406624 - RNA, 32 nt, Human
cugggcaugguggcucacaccuguaauucuag

SEQ ID NO: 406625 - RNA, 32 nt, Human
cugggcaugguggcucacgccuguaaucccag

SEQ ID NO: 406626 - RNA, 32 nt, Human
cugggcaugguggcucacgccuguaaucucag

SEQ ID NO: 406627 - RNA, 32 nt, Human
cugggcaugguggcucacgccuguaauuccag

SEQ ID NO: 406628 - RNA, 32 nt, Human
cugggcaugguggcucaggccuguaaucccag

SEQ ID NO: 406629 - RNA, 32 nt, Human
cugggcaugguggcucauaccuguaaucccag

SEQ ID NO: 406630 - RNA, 32 nt, Human
cugggcaugguggcucaugacuauaguaguuc

SEQ ID NO: 406631 - RNA, 32 nt, Human
cugggcaugguggcucaugcacaccuguaauc

SEQ ID NO: 406632 - RNA, 32 nt, Human
cugggcaugguggcucaugccuauaaucccag

SEQ ID NO: 406633 - RNA, 32 nt, Human
cugggcaugguggcucaugccuauaguaguuc

SEQ ID NO: 406634 - RNA, 32 nt, Human
cugggcaugguggcucaugccuguaaucccag

SEQ ID NO: 406635 - RNA, 32 nt, Human
cugggcaugguggcucaugccuguaauccuag

SEQ ID NO: 406636 - RNA, 32 nt, Human
cugggcaugguggcucaugccugugaucgcag

SEQ ID NO: 406637 - RNA, 32 nt, Human
cugggcaugguggcuuacgccuguaaucccag

SEQ ID NO: 406638 - RNA, 32 nt, Human
cugggcaugguggcuuaugccuguaaucccag

SEQ ID NO: 406639 - RNA, 32 nt, Human
cugggcaugguggugcacaccuguaaucccag

SEQ ID NO: 406640 - RNA, 32 nt, Human
cugggcaugguggugcaugccuguaaucccag

SEQ ID NO: 406641 - RNA, 32 nt, Human
cugggcaugguggugcaugccuguaauuccag

SEQ ID NO: 406642 - RNA, 32 nt, Human
cugggcaugguggugcgugccuguaaucccag

SEQ ID NO: 406643 - RNA, 32 nt, Human
cugggcaugguggugggcgccuguaaucccag

SEQ ID NO: 406644 - RNA, 32 nt, Human
cugggcaugguggugggugccuguaaucccag

SEQ ID NO: 406645 - RNA, 22 nt, Human
cugggcaugguggugugcugcg

SEQ ID NO: 406646 - RNA, 32 nt, Human
cugggcaugguggugugugccuguaaucccag

SEQ ID NO: 406647 - RNA, 32 nt, Human
cugggcaugguggugugugccuguaaucccgg

SEQ ID NO: 406648 - RNA, 32 nt, Human
cugggcaugguggugugugccuguaaugccag

SEQ ID NO: 406649 - RNA, 32 nt, Human
cugggcauggugguucacaccuguaaucccgg

SEQ ID NO: 406650 - RNA, 32 nt, Human
cugggcauggugguucaugccuguaaucccag

SEQ ID NO: 406651 - RNA, 32 nt, Human
cugggcaugguuuugguugccauuccauaggu

SEQ ID NO: 406652 - RNA, 32 nt, Human
cugggcauguagucccagcuacucgggaggcu

SEQ ID NO: 406653 - RNA, 32 nt, Human
cugggcauguccuggguggauuccuccuuucu

SEQ ID NO: 406654 - RNA, 32 nt, Human
cugggcauguuggcaugcaccuguaaucccag

SEQ ID NO: 406655 - RNA, 32 nt, Human
cugggcauuauggcaggcaccuguaaucccag

SEQ ID NO: 406656 - RNA, 24 nt, Human
cugggcauuuucugccuaugcugg

SEQ ID NO: 406657 - RNA, 32 nt, Human
cugggccaacuacucaaccucucugugccucg

SEQ ID NO: 406658 - RNA, 32 nt, Human
cugggccacagcccugccgcggagcggcggau

SEQ ID NO: 406659 - RNA, 32 nt, Human
cugggccacagcuacuucaucaacugggauaa

SEQ ID NO: 406660 - RNA, 32 nt, Human
cugggccacccacuugcuggacagucugagcc

SEQ ID NO: 406661 - RNA, 32 nt, Human
cugggccacugcaccccaccaggacggcagga

SEQ ID NO: 406662 - RNA, 18 nt, Human
cugggccacugcacucca

SEQ ID NO: 406663 - RNA, 32 nt, Human
cugggccacugcacuccagccuggaugacaga

SEQ ID NO: 406664 - RNA, 32 nt, Human
cugggccagaacugagcgcuguggggagcgcg

SEQ ID NO: 406665 - RNA, 32 nt, Human
cugggccagagaaccaccauuccauaagcagc

SEQ ID NO: 406666 - RNA, 21 nt, Human
cugggccagagccccugcugu

SEQ ID NO: 406667 - RNA, 32 nt, Human
cugggccagcagcagggaggagaggggaaggu

SEQ ID NO: 406668 - RNA, 32 nt, Human
cugggccagcagcugcugugcucaauuucucg

SEQ ID NO: 406669 - RNA, 32 nt, Human
cugggccagcagugucauaggaguggaggggg

SEQ ID NO: 406670 - RNA, 19 nt, Human
cugggccagcccugcagcc

SEQ ID NO: 406671 - RNA, 32 nt, Human
cugggccagccuggcccugcagggcagagcac

SEQ ID NO: 406672 - RNA, 32 nt, Human
cugggccagcuauggggguggcagaggucucu

SEQ ID NO: 406673 - RNA, 32 nt, Human
cugggccagcugccggcacacagcuaggcaga

SEQ ID NO: 406674 - RNA, 32 nt, Human
cugggccagcugguccaggaucugcacggccu

SEQ ID NO: 406675 - RNA, 32 nt, Human
cugggccaggaggagcugaggcugcagacccc

SEQ ID NO: 406676 - RNA, 32 nt, Human
cugggccaggcuucaguucaggccuguugcuu

SEQ ID NO: 406677 - RNA, 32 nt, Human
cugggccagguaaccugagggcaggggagagg

SEQ ID NO: 406678 - RNA, 32 nt, Human
cugggccagucaccccucccccagcccaccca

SEQ ID NO: 406679 - RNA, 32 nt, Human
cugggccaucaacugugaauucucagcaccag

SEQ ID NO: 406680 - RNA, 32 nt, Human
cugggccaugaucugggacuucucggaacccg

SEQ ID NO: 406681 - RNA, 23 nt, Human
cugggcccaaaggcccagggagg

SEQ ID NO: 406682 - RNA, 32 nt, Human
cugggcccaagcaauucucccaccucagccuc

SEQ ID NO: 406683 - RNA, 32 nt, Human
cugggcccaagugauccuuccaccucagucuc

SEQ ID NO: 406684 - RNA, 32 nt, Human
cugggcccacacugcugccuucucccaggacg

SEQ ID NO: 406685 - RNA, 32 nt, Human
cugggcccacagacaggaaaugaccugaccuc

SEQ ID NO: 406686 - RNA, 32 nt, Human
cugggcccacauucugccccaagcagaagcug

SEQ ID NO: 406687 - RNA, 19 nt, Human
cugggcccaccuccucuca

SEQ ID NO: 406688 - RNA, 22 nt, Human
cugggcccagaggcugggcccc

SEQ ID NO: 406689 - RNA, 32 nt, Human
cugggcccagcaccaaggugaugggacucucc

SEQ ID NO: 406690 - RNA, 32 nt, Human
cugggcccaggagcgagccugcagaccgggcg

SEQ ID NO: 406691 - RNA, 32 nt, Human
cugggcccaggaguucgaggugcaguuuggca

SEQ ID NO: 406692 - RNA, 32 nt, Human
cugggcccaggccaggaggggcccugcccaug

SEQ ID NO: 406693 - RNA, 16 nt, Human
cugggcccagugcccu

SEQ ID NO: 406694 - RNA, 32 nt, Human
cugggcccauguuagggucugcauaaugaucc

SEQ ID NO: 406695 - RNA, 32 nt, Human
cugggcccccacccggccuggguaggaugagc

SEQ ID NO: 406696 - RNA, 19 nt, Human
cugggcccccuacccugcc

SEQ ID NO: 406697 - RNA, 32 nt, Human
cugggcccccuucuccauaugccuccaaaaac

SEQ ID NO: 406698 - RNA, 32 nt, Human
cugggcccccuugcuccuccauccucauucuc

SEQ ID NO: 406699 - RNA, 32 nt, Human
cugggccccucaggggaagcugcuaggggaag

SEQ ID NO: 406700 - RNA, 22 nt, Human
cugggccccugacaggcgcugg

SEQ ID NO: 406701 - RNA, 32 nt, Human
cugggccccugccccuuccacccugugcuuag

SEQ ID NO: 406702 - RNA, 32 nt, Human
cugggcccuacagccucacuuccccagccuca

SEQ ID NO: 406703 - RNA, 32 nt, Human
cugggcccucaaggggcaggcggugagccugg

SEQ ID NO: 406704 - RNA, 32 nt, Human
cugggcccuccaggccaagagucucagcuggc

SEQ ID NO: 406705 - RNA, 32 nt, Human
cugggcccuccuuccuccuggugcuaauuugg

SEQ ID NO: 406706 - RNA, 27 nt, Human
cugggcccugcucaccccuuguugcug

SEQ ID NO: 406707 - RNA, 32 nt, Human
cugggcccugcucaccccuuguugcugggcuu

SEQ ID NO: 406708 - RNA, 32 nt, Human
cugggcccugcucccugcccuccugggcagcc

SEQ ID NO: 406709 - RNA, 32 nt, Human
cugggcccugcugcucuagccccagccaccag

SEQ ID NO: 406710 - RNA, 32 nt, Human
cugggcccuguuucccccuccucggcccccga

SEQ ID NO: 406711 - RNA, 32 nt, Human
cugggcccuucccagcagcagaaucuguugag

SEQ ID NO: 406712 - RNA, 32 nt, Human
cugggcccuuggauacucuucucccaucuccc

SEQ ID NO: 406713 - RNA, 32 nt, Human
cugggcccuuggucuggacugaauugcccaag

SEQ ID NO: 406714 - RNA, 32 nt, Human
cugggcccuuucuccugucuccgccacucccu

SEQ ID NO: 406715 - RNA, 32 nt, Human
cugggcccuuucucuuuuuccagccaguuucc

SEQ ID NO: 406716 - RNA, 32 nt, Human
cugggccgacuccuccccuccuggcagucagg

SEQ ID NO: 406717 - RNA, 32 nt, Human
cugggccgcaacuuccgagccucccagggcgc

SEQ ID NO: 406718 - RNA, 16 nt, Human
cugggccgcagugccu

SEQ ID NO: 406719 - RNA, 32 nt, Human
cugggccgcgggucugagggaugaggaggggc

SEQ ID NO: 406720 - RNA, 32 nt, Human
cugggccggcgccgggcgcagcugccucuccg

SEQ ID NO: 406721 - RNA, 32 nt, Human
cugggccgggaucagaugggaagcagaagcuc

SEQ ID NO: 406722 - RNA, 32 nt, Human
cugggccgggcugggagccaggcgggcggcug

SEQ ID NO: 406723 - RNA, 32 nt, Human
cugggccguggggagaagaagcucucauacgc

SEQ ID NO: 406724 - RNA, 32 nt, Human
cugggccuaggccacaggggcagggagaagag

SEQ ID NO: 406725 - RNA, 32 nt, Human
cugggccucagagggccaugagcuuggccagg

SEQ ID NO: 406726 - RNA, 32 nt, Human
cugggccucagugugcccaucuguaaaggggc

SEQ ID NO: 406727 - RNA, 32 nt, Human
cugggccuccaaagcccauccuugggguuccc

SEQ ID NO: 406728 - RNA, 32 nt, Human
cugggccuccacuucagccuagugaacaaaac

SEQ ID NO: 406729 - RNA, 32 nt, Human
cugggccuccagggcgucguaccucugugaga

SEQ ID NO: 406730 - RNA, 32 nt, Human
cugggccuccagguggcuucuuugguugcugg

SEQ ID NO: 406731 - RNA, 32 nt, Human
cugggccuccugacuccuggcccagaguucuu

SEQ ID NO: 406732 - RNA, 32 nt, Human
cugggccucugcagagagaccuccaugcccag

SEQ ID NO: 406733 - RNA, 32 nt, Human
cugggccucugccucauccugacucccccugc

SEQ ID NO: 406734 - RNA, 32 nt, Human
cugggccucugcgugcaaaccccagccucccu

SEQ ID NO: 406735 - RNA, 20 nt, Human
cugggccugagcuugccaca

SEQ ID NO: 406736 - RNA, 32 nt, Human
cugggccugagggacugugccugcugugcacu

SEQ ID NO: 406737 - RNA, 32 nt, Human
cugggccugaggugcgugccucccgggcccuc

SEQ ID NO: 406738 - RNA, 20 nt, Human
cugggccugcacggcugccu

SEQ ID NO: 406739 - RNA, 32 nt, Human
cugggccugcagcucccuucuccugggacuua

SEQ ID NO: 406740 - RNA, 32 nt, Human
cugggccugcccccucuaucuccugauggguu

SEQ ID NO: 406741 - RNA, 32 nt, Human
cugggccugcuccccgcuuccuccccuucagu

SEQ ID NO: 406742 - RNA, 32 nt, Human
cugggccuggcuuuguugaugauggcuuuccu

SEQ ID NO: 406743 - RNA, 32 nt, Human
cugggccugggcugagugguuuacaugucuuc

SEQ ID NO: 406744 - RNA, 32 nt, Human
cugggccuggggacccgagguugggcggggcg

SEQ ID NO: 406745 - RNA, 32 nt, Human
cugggccugggggugaagggaaguguuuauua

SEQ ID NO: 406746 - RNA, 32 nt, Human
cugggccuggugcugcugguggugcugcugcu

SEQ ID NO: 406747 - RNA, 32 nt, Human
cugggccugguggcucuugccuguaauuccag

SEQ ID NO: 406748 - RNA, 32 nt, Human
cugggccugucgaaggaugacagggaugugcu

SEQ ID NO: 406749 - RNA, 32 nt, Human
cugggccuguuuucucccuccugacccugcau

SEQ ID NO: 406750 - RNA, 32 nt, Human
cugggccuucaccaagcaagucccuucagacu

SEQ ID NO: 406751 - RNA, 32 nt, Human
cugggccuuccaccauuuccuccgcgccugag

SEQ ID NO: 406752 - RNA, 32 nt, Human
cugggccuuccaggaugcagggggcuggaccc

SEQ ID NO: 406753 - RNA, 32 nt, Human
cugggccuuccugguccccuccuuggcugcgg

SEQ ID NO: 406754 - RNA, 32 nt, Human
cugggccuucgucuuguucacacugagugucc

SEQ ID NO: 406755 - RNA, 19 nt, Human
cugggccuucuggguuuuu

SEQ ID NO: 406756 - RNA, 24 nt, Human
cugggccuugccgggagggguacu

SEQ ID NO: 406757 - RNA, 32 nt, Human
cugggccuugccuccaugucccaggugagccu

SEQ ID NO: 406758 - RNA, 32 nt, Human
cugggccuugggcuggcugugugaucuugggc

SEQ ID NO: 406759 - RNA, 32 nt, Human
cugggccuuuccagagaacugcagaccucacu

SEQ ID NO: 406760 - RNA, 32 nt, Human
cugggccuuucccuuuuccauucagauaauca

SEQ ID NO: 406761 - RNA, 32 nt, Human
cugggccuuugaggacacagaucagaagaaag

SEQ ID NO: 406762 - RNA, 21 nt, Human
cugggccuuugcacugcaaca

SEQ ID NO: 406763 - RNA, 32 nt, Human
cugggcgaaccagcuccgcuccggaggggucu

SEQ ID NO: 406764 - RNA, 32 nt, Human
cugggcgacaagagcaagacucugucucagaa

SEQ ID NO: 406765 - RNA, 24 nt, Human
cugggcgacacggugaaaccccgu

SEQ ID NO: 406766 - RNA, 32 nt, Human
cugggcgacacggugaaaccccgucccuacua

SEQ ID NO: 406767 - RNA, 32 nt, Human
cugggcgacaggagcaagacucugucucaaaa

SEQ ID NO: 406768 - RNA, 21 nt, Human
cugggcgagcuggugcuggau

SEQ ID NO: 406769 - RNA, 32 nt, Human
cugggcgagguggcucaugccuguaaucucag

SEQ ID NO: 406770 - RNA, 32 nt, Human
cugggcgaguagcugguacuacaggugcgugc

SEQ ID NO: 406771 - RNA, 32 nt, Human
cugggcgaugacgcuccuggcccaggaguggg

SEQ ID NO: 406772 - RNA, 32 nt, Human
cugggcgcaauggcucacgccuguaauccuag

SEQ ID NO: 406773 - RNA, 32 nt, Human
cugggcgcaccuuuagcagguggacuccgugg

SEQ ID NO: 406774 - RNA, 32 nt, Human
cugggcgcagacuucaccuucuggaccuucuc

SEQ ID NO: 406775 - RNA, 32 nt, Human
cugggcgcagcggcucacgccuguaaucccag

SEQ ID NO: 406776 - RNA, 32 nt, Human
cugggcgcaggcuggggacccagauggaauuc

SEQ ID NO: 406777 - RNA, 19 nt, Human
cugggcgcagggggcuacu

SEQ ID NO: 406778 - RNA, 20 nt, Human
cugggcgccaggugcugugc

SEQ ID NO: 406779 - RNA, 32 nt, Human
cugggcgccaugucucacuccuguaauaccag

SEQ ID NO: 406780 - RNA, 21 nt, Human
cugggcgccccaaccgggucc

SEQ ID NO: 406781 - RNA, 22 nt, Human
cugggcgccccucggugcugca

SEQ ID NO: 406782 - RNA, 32 nt, Human
cugggcgcccguucccagcauccuccuuggca

SEQ ID NO: 406783 - RNA, 18 nt, Human
cugggcgccgacugcaga

SEQ ID NO: 406784 - RNA, 28 nt, Human
cugggcgccugggcugccucuucgcggg

SEQ ID NO: 406785 - RNA, 32 nt, Human
cugggcgccuggucaccagggcugcuuuuaac

SEQ ID NO: 406786 - RNA, 32 nt, Human
cugggcgcgauggcucacaccuguaaucccag

SEQ ID NO: 406787 - RNA, 32 nt, Human
cugggcgcgguggcgcaugccuguaaucccag

SEQ ID NO: 406788 - RNA, 32 nt, Human
cugggcgcgguggcucaaaccuguaaucccag

SEQ ID NO: 406789 - RNA, 32 nt, Human
cugggcgcgguggcucacaccuguaaucccag

SEQ ID NO: 406790 - RNA, 32 nt, Human
cugggcgcgguggcucacaccuguaaucucaa

SEQ ID NO: 406791 - RNA, 32 nt, Human
cugggcgcgguggcucacgccuguaaucccag

SEQ ID NO: 406792 - RNA, 32 nt, Human
cugggcgcgguggcucacgccuguaauccuag

SEQ ID NO: 406793 - RNA, 32 nt, Human
cugggcgcgguggcucacuccuguaaucccag

SEQ ID NO: 406794 - RNA, 32 nt, Human
cugggcgcgguggcucaugccuguaaucaauc

SEQ ID NO: 406795 - RNA, 32 nt, Human
cugggcgcgguggcucaugccuguaaucccag

SEQ ID NO: 406796 - RNA, 32 nt, Human
cugggcgcgguggcucuugccuguaaucccag

SEQ ID NO: 406797 - RNA, 32 nt, Human
cugggcgcgguggcuuacaccuguaauuccag

SEQ ID NO: 406798 - RNA, 32 nt, Human
cugggcgcuguggcucacaccuguaaucccaa

SEQ ID NO: 406799 - RNA, 24 nt, Human
cugggcgcuuggagugcaguggug

SEQ ID NO: 406800 - RNA, 32 nt, Human
cugggcggagagaaggagagccggucagauuc

SEQ ID NO: 406801 - RNA, 32 nt, Human
cugggcggaggcggaagcggaaguggcgagaa

SEQ ID NO: 406802 - RNA, 32 nt, Human
cugggcggaggugggguuggucuggaagaagg

SEQ ID NO: 406803 - RNA, 32 nt, Human
cugggcggccauguggacagagcugggagggc

SEQ ID NO: 406804 - RNA, 20 nt, Human
cugggcggccccagagcccc

SEQ ID NO: 406805 - RNA, 32 nt, Human
cugggcggccugcgcagaugggccacagaagg

SEQ ID NO: 406806 - RNA, 32 nt, Human
cugggcggcugaggcaggagaauggcgugaac

SEQ ID NO: 406807 - RNA, 32 nt, Human
cugggcggggcggcuggccgggcagaggggcu

SEQ ID NO: 406808 - RNA, 32 nt, Human
cugggcguaguggcucacaccuguaaucccag

SEQ ID NO: 406809 - RNA, 32 nt, Human
cugggcgucugaggcccugauccgggcgggcc

SEQ ID NO: 406810 - RNA, 18 nt, Human
cugggcgucugggaccuu

SEQ ID NO: 406811 - RNA, 32 nt, Human
cugggcgugauggcgagcgccuguaauccagc

SEQ ID NO: 406812 - RNA, 22 nt, Human
cugggcgugccugugucugcac

SEQ ID NO: 406813 - RNA, 32 nt, Human
cugggcgugcuagagguugcagcaugagacuu

SEQ ID NO: 406814 - RNA, 32 nt, Human
cugggcguggcggcucacgccuguaaucccag

SEQ ID NO: 406815 - RNA, 32 nt, Human
cugggcguggcggcucaugccuguaaucccag

SEQ ID NO: 406816 - RNA, 32 nt, Human
cugggcgugggggcucaugccuguaaucccag

SEQ ID NO: 406817 - RNA, 32 nt, Human
cugggcguggugacucacaccuguaaucccag

SEQ ID NO: 406818 - RNA, 32 nt, Human
cugggcguggugauucacgccuguaaucccag

SEQ ID NO: 406819 - RNA, 32 nt, Human
cugggcgugguggcacacaccuguaaucccag

SEQ ID NO: 406820 - RNA, 32 nt, Human
cugggcgugguggcacacgccuguaaucccag

SEQ ID NO: 406821 - RNA, 32 nt, Human
cugggcgugguggcacauaccuguaaugccag

SEQ ID NO: 406822 - RNA, 32 nt, Human
cugggcgugguggcacaugccuguaaucccag

SEQ ID NO: 406823 - RNA, 32 nt, Human
cugggcgugguggcacgcgccuguaaucccag

SEQ ID NO: 406824 - RNA, 32 nt, Human
cugggcgugguggcacgugccuguaaucccag

SEQ ID NO: 406825 - RNA, 32 nt, Human
cugggcgugguggcaggcaccuguaaucccac

SEQ ID NO: 406826 - RNA, 32 nt, Human
cugggcgugguggcaggcaccuguaaucccag

SEQ ID NO: 406827 - RNA, 32 nt, Human
cugggcgugguggcgagcaccuguaaucucag

SEQ ID NO: 406828 - RNA, 32 nt, Human
cugggcgugguggcgcaugccuguaaucccag

SEQ ID NO: 406829 - RNA, 32 nt, Human
cugggcgugguggcgcaugccuguaauccuag

SEQ ID NO: 406830 - RNA, 32 nt, Human
cugggcgugguggcggacgccuguaaucccag

SEQ ID NO: 406831 - RNA, 32 nt, Human
cugggcgugguggcgggcaccuguaaucccag

SEQ ID NO: 406832 - RNA, 32 nt, Human
cugggcgugguggcgggcgccuguaaucccag

SEQ ID NO: 406833 - RNA, 32 nt, Human
cugggcgugguggcgugcaccuguaaucccag

SEQ ID NO: 406834 - RNA, 32 nt, Human
cugggcgugguggcgugugccuguaaucccag

SEQ ID NO: 406835 - RNA, 32 nt, Human
cugggcgugguggcucacaccuguaaucccag

SEQ ID NO: 406836 - RNA, 32 nt, Human
cugggcgugguggcucacaccuguaauuucag

SEQ ID NO: 406837 - RNA, 32 nt, Human
cugggcgugguggcucaccccuguaaucgcag

SEQ ID NO: 406838 - RNA, 32 nt, Human
cugggcgugguggcucacgccuguaaucccag

SEQ ID NO: 406839 - RNA, 32 nt, Human
cugggcgugguggcucacuccuguaaucccag

SEQ ID NO: 406840 - RNA, 32 nt, Human
cugggcgugguggcucaugccuguaaucccag

SEQ ID NO: 406841 - RNA, 32 nt, Human
cugggcgugguggcucaugccuguaaucccgg

SEQ ID NO: 406842 - RNA, 32 nt, Human
cugggcgugguggcucaugccuguaaucucag

SEQ ID NO: 406843 - RNA, 32 nt, Human
cugggcgugguggcucaugccuguagucccag

SEQ ID NO: 406844 - RNA, 32 nt, Human
cugggcgugguggcucaugccugugauccuag

SEQ ID NO: 406845 - RNA, 32 nt, Human
cugggcgugguggcucucgccuguaaucccag

SEQ ID NO: 406846 - RNA, 32 nt, Human
cugggcgugguggcuuaugccuguaaucccag

SEQ ID NO: 406847 - RNA, 32 nt, Human
cugggcguggugguacaugccuguaaucccag

SEQ ID NO: 406848 - RNA, 32 nt, Human
cugggcgugguggugagugccuguaaucccag

SEQ ID NO: 406849 - RNA, 32 nt, Human
cugggcgugguggugcacaccuguaaucucag

SEQ ID NO: 406850 - RNA, 32 nt, Human
cugggcgugguggugcaugccuguaaucccac

SEQ ID NO: 406851 - RNA, 32 nt, Human
cugggcgugguggugcaugccuguaaucccag

SEQ ID NO: 406852 - RNA, 32 nt, Human
cugggcgugguggugcaugccuguaaucccau

SEQ ID NO: 406853 - RNA, 32 nt, Human
cugggcgugguggugcgcaccuguaaucucag

SEQ ID NO: 406854 - RNA, 32 nt, Human
cugggcguggugguggauaccuguaaucccag

SEQ ID NO: 406855 - RNA, 32 nt, Human
cugggcgugguggugggcaccuguaaucccag

SEQ ID NO: 406856 - RNA, 32 nt, Human
cugggcguggugguggguaccuguaaucccag

SEQ ID NO: 406857 - RNA, 32 nt, Human
cugggcgugguggugggugccuguaaucccag

SEQ ID NO: 406858 - RNA, 32 nt, Human
cugggcguggugguuggcgccuguaaucccag

SEQ ID NO: 406859 - RNA, 32 nt, Human
cugggcguggugguuugcgccuguaaucccag

SEQ ID NO: 406860 - RNA, 32 nt, Human
cugggcgugguugcucacgccuguaaucccag

SEQ ID NO: 406861 - RNA, 32 nt, Human
cugggcguguuggcacacaccuguaaucccag

SEQ ID NO: 406862 - RNA, 32 nt, Human
cugggcguguuggcacgcgccuguaaucccag

SEQ ID NO: 406863 - RNA, 32 nt, Human
cugggcguuugcagaugguguagaagccagcc

SEQ ID NO: 406864 - RNA, 32 nt, Human
cugggcuaaccagcccacagagcucacauucc

SEQ ID NO: 406865 - RNA, 32 nt, Human
cugggcuacaguuacccuccuaccucggcuuc

SEQ ID NO: 406866 - RNA, 32 nt, Human
cugggcuagaccagauuugggggccaggaggg

SEQ ID NO: 406867 - RNA, 32 nt, Human
cugggcuaggaagaggaggugcagcccagacu

SEQ ID NO: 406868 - RNA, 32 nt, Human
cugggcuagggacgaggaaggagcagccacaa

SEQ ID NO: 406869 - RNA, 32 nt, Human
cugggcuagggagguggcuggagcuucugccc

SEQ ID NO: 406870 - RNA, 32 nt, Human
cugggcuauggcuccuuccugguuugggagcc

SEQ ID NO: 406871 - RNA, 32 nt, Human
cugggcuaugggaaguggggaugcagauggcc

SEQ ID NO: 406872 - RNA, 32 nt, Human
cugggcuauuggcugcucccaauccuugcccc

SEQ ID NO: 406873 - RNA, 32 nt, Human
cugggcucaaaugacccaccuaccucagccuc

SEQ ID NO: 406874 - RNA, 32 nt, Human
cugggcucaaaugauccucccaccucagccuc

SEQ ID NO: 406875 - RNA, 32 nt, Human
cugggcucaaaugauccuuccaccucagccuc

SEQ ID NO: 406876 - RNA, 32 nt, Human
cugggcucaacggauccuuccaccucagccuc

SEQ ID NO: 406877 - RNA, 32 nt, Human
cugggcucaagacauccuccugcuucagccuc

SEQ ID NO: 406878 - RNA, 32 nt, Human
cugggcucaagagauccucccacuucagccuc

SEQ ID NO: 406879 - RNA, 32 nt, Human
cugggcucaagagauugucccaccucagccua

SEQ ID NO: 406880 - RNA, 32 nt, Human
cugggcucaagcaacccucccaccucccaugc

SEQ ID NO: 406881 - RNA, 32 nt, Human
cugggcucaagcaacccucccaccuuagccuc

SEQ ID NO: 406882 - RNA, 32 nt, Human
cugggcucaagcaacccucccgccucccugcu

SEQ ID NO: 406883 - RNA, 32 nt, Human
cugggcucaagcaacccugccaccucagccuu

SEQ ID NO: 406884 - RNA, 32 nt, Human
cugggcucaagcaaucagcccaccucugccuc

SEQ ID NO: 406885 - RNA, 32 nt, Human
cugggcucaagcaauccacccaccucugccuc

SEQ ID NO: 406886 - RNA, 32 nt, Human
cugggcucaagcaauccaccugcuucagccuu

SEQ ID NO: 406887 - RNA, 32 nt, Human
cugggcucaagcaauccucacaccucagccuc

SEQ ID NO: 406888 - RNA, 32 nt, Human
cugggcucaagcaauccucccaccucagcccg

SEQ ID NO: 406889 - RNA, 32 nt, Human
cugggcucaagcaauccucccaccucagccua

SEQ ID NO: 406890 - RNA, 32 nt, Human
cugggcucaagcaauccucccaccucagccuc

SEQ ID NO: 406891 - RNA, 32 nt, Human
cugggcucaagcaauccucccaccucccagug

SEQ ID NO: 406892 - RNA, 32 nt, Human
cugggcucaagcaauccucccaccuuggccuc

SEQ ID NO: 406893 - RNA, 32 nt, Human
cugggcucaagcaauccucccaccuuggcuuc

SEQ ID NO: 406894 - RNA, 32 nt, Human
cugggcucaagcaauccucccaccuuggucuc

SEQ ID NO: 406895 - RNA, 32 nt, Human
cugggcucaagcaauccucccacuucagccuc

SEQ ID NO: 406896 - RNA, 32 nt, Human
cugggcucaagcaauccucccgcuucagccuc

SEQ ID NO: 406897 - RNA, 32 nt, Human
cugggcucaagcaauccucccuccucagccuc

SEQ ID NO: 406898 - RNA, 32 nt, Human
cugggcucaagcaauccuccugccucagccuc

SEQ ID NO: 406899 - RNA, 32 nt, Human
cugggcucaagcaauccuccugccucagccuu

SEQ ID NO: 406900 - RNA, 32 nt, Human
cugggcucaagcaauccuccugccucagcuuc

SEQ ID NO: 406901 - RNA, 32 nt, Human
cugggcucaagcaauccuccugccucggccuc

SEQ ID NO: 406902 - RNA, 32 nt, Human
cugggcucaagcaauccuccugccucggcuuc

SEQ ID NO: 406903 - RNA, 32 nt, Human
cugggcucaagcaauccucucaccgcagccuc

SEQ ID NO: 406904 - RNA, 32 nt, Human
cugggcucaagcaauccucucaccucagccuc

SEQ ID NO: 406905 - RNA, 32 nt, Human
cugggcucaagcaauccucucaucuccaccuc

SEQ ID NO: 406906 - RNA, 32 nt, Human
cugggcucaagcaaucugccagccucagccuc

SEQ ID NO: 406907 - RNA, 32 nt, Human
cugggcucaagcaaucugcccgccucugccuc

SEQ ID NO: 406908 - RNA, 32 nt, Human
cugggcucaagcaaucuucccaccucagccuc

SEQ ID NO: 406909 - RNA, 32 nt, Human
cugggcucaagcaauucacucgccucggccuc

SEQ ID NO: 406910 - RNA, 32 nt, Human
cugggcucaagcaauucaucugccucaaccuc

SEQ ID NO: 406911 - RNA, 32 nt, Human
cugggcucaagcaauucucaugucucagccuc

SEQ ID NO: 406912 - RNA, 32 nt, Human
cugggcucaagcaauucucccaccucagccuc

SEQ ID NO: 406913 - RNA, 32 nt, Human
cugggcucaagcaauucuuccaccucagccuc

SEQ ID NO: 406914 - RNA, 32 nt, Human
cugggcucaagcaauucuucugccucagccuc

SEQ ID NO: 406915 - RNA, 32 nt, Human
cugggcucaagcaauugucccuccucagccuc

SEQ ID NO: 406916 - RNA, 32 nt, Human
cugggcucaagcaauuuuccugccuugggccu

SEQ ID NO: 406917 - RNA, 32 nt, Human
cugggcucaagcacucugcccaccucagccuc

SEQ ID NO: 406918 - RNA, 32 nt, Human
cugggcucaagcagucaucccaccucagccuc

SEQ ID NO: 406919 - RNA, 32 nt, Human
cugggcucaagcaguccucccaccccagccuc

SEQ ID NO: 406920 - RNA, 32 nt, Human
cugggcucaagcaguccucccaccucagucuc

SEQ ID NO: 406921 - RNA, 32 nt, Human
cugggcucaagcaguccucccaccuuggccuc

SEQ ID NO: 406922 - RNA, 32 nt, Human
cugggcucaagcagucuacccaccucagccuc

SEQ ID NO: 406923 - RNA, 32 nt, Human
cugggcucaagcaguucucccaccucagccuc

SEQ ID NO: 406924 - RNA, 32 nt, Human
cugggcucaagccauccucccgccacagccuc

SEQ ID NO: 406925 - RNA, 32 nt, Human
cugggcucaagccauccucccuccucagccuc

SEQ ID NO: 406926 - RNA, 32 nt, Human
cugggcucaagccauccuccugccucagccuc

SEQ ID NO: 406927 - RNA, 32 nt, Human
cugggcucaagccuuccucccaccugaaccuc

SEQ ID NO: 406928 - RNA, 32 nt, Human
cugggcucaagcgagccucccaccucggucuu

SEQ ID NO: 406929 - RNA, 32 nt, Human
cugggcucaagcgauccuccacccucagccuc

SEQ ID NO: 406930 - RNA, 32 nt, Human
cugggcucaagcgauccucccaccucagccuc

SEQ ID NO: 406931 - RNA, 32 nt, Human
cugggcucaagcgauccucccaccucagcuuc

SEQ ID NO: 406932 - RNA, 32 nt, Human
cugggcucaagcgauccucccaucucagccuc

SEQ ID NO: 406933 - RNA, 32 nt, Human
cugggcucaagcgauccuccccgcucagccuc

SEQ ID NO: 406934 - RNA, 32 nt, Human
cugggcucaagcgauccucccuccucggccuc

SEQ ID NO: 406935 - RNA, 32 nt, Human
cugggcucaagcgauccucccuucuuggccuc

SEQ ID NO: 406936 - RNA, 32 nt, Human
cugggcucaagcgaucugcccaccucagucuc

SEQ ID NO: 406937 - RNA, 32 nt, Human
cugggcucaagggauccucccaucucagccuc

SEQ ID NO: 406938 - RNA, 32 nt, Human
cugggcucaagggauccucccaucucagcuuc

SEQ ID NO: 406939 - RNA, 32 nt, Human
cugggcucaagggauccugccaccucagcuaa

SEQ ID NO: 406940 - RNA, 32 nt, Human
cugggcucaaguaauccucccaccccagccuc

SEQ ID NO: 406941 - RNA, 32 nt, Human
cugggcucaaguaauccuccugccugagccuc

SEQ ID NO: 406942 - RNA, 32 nt, Human
cugggcucaagugaucaucccaccucagccuc

SEQ ID NO: 406943 - RNA, 32 nt, Human
cugggcucaagugauccucccaccucagccuc

SEQ ID NO: 406944 - RNA, 32 nt, Human
cugggcucaagugauccucccaccucagcuuc

SEQ ID NO: 406945 - RNA, 32 nt, Human
cugggcucaagugauccucccaccucugccuc

SEQ ID NO: 406946 - RNA, 32 nt, Human
cugggcucaagugauccucccacuucaccuuc

SEQ ID NO: 406947 - RNA, 32 nt, Human
cugggcucaagugauccucccgcuucagccuc

SEQ ID NO: 406948 - RNA, 32 nt, Human
cugggcucaagugauccucccuccucagccuc

SEQ ID NO: 406949 - RNA, 32 nt, Human
cugggcucaagugauccuccugccugggccug

SEQ ID NO: 406950 - RNA, 32 nt, Human
cugggcucaagugauccuuccaccucagccuc

SEQ ID NO: 406951 - RNA, 32 nt, Human
cugggcucaagugauucucccaccucagccuc

SEQ ID NO: 406952 - RNA, 32 nt, Human
cugggcucaagugauucucccaccuugaccuc

SEQ ID NO: 406953 - RNA, 32 nt, Human
cugggcucaagugcuucucccaccucagccuc

SEQ ID NO: 406954 - RNA, 32 nt, Human
cugggcucacacaauccuuccaccucagcauc

SEQ ID NO: 406955 - RNA, 32 nt, Human
cugggcucacaccauucuccugccucagccuc

SEQ ID NO: 406956 - RNA, 32 nt, Human
cugggcucacugcaaccuccgccucccugguu

SEQ ID NO: 406957 - RNA, 32 nt, Human
cugggcucacugcaaccuccuccuccuggauu

SEQ ID NO: 406958 - RNA, 32 nt, Human
cugggcucacugcaaccucugccucccggguu

SEQ ID NO: 406959 - RNA, 32 nt, Human
cugggcucagacggcuggcuucugccuacccg

SEQ ID NO: 406960 - RNA, 20 nt, Human
cugggcucagagccagccca

SEQ ID NO: 406961 - RNA, 32 nt, Human
cugggcucagaggcccccggucagccugccca

SEQ ID NO: 406962 - RNA, 32 nt, Human
cugggcucagaugguccuccugccucagcuuc

SEQ ID NO: 406963 - RNA, 26 nt, Human
cugggcucagcaugaguucagggagg

SEQ ID NO: 406964 - RNA, 32 nt, Human
cugggcucagccaagcucccacucaccucauc

SEQ ID NO: 406965 - RNA, 32 nt, Human
cugggcucagccacucccuccagucucaagua

SEQ ID NO: 406966 - RNA, 32 nt, Human
cugggcucaggcaauccuccugccucagccuc

SEQ ID NO: 406967 - RNA, 32 nt, Human
cugggcucaggcgcuucucccaccuuggccuc

SEQ ID NO: 406968 - RNA, 32 nt, Human
cugggcucagggagggagggcgguggacaaua

SEQ ID NO: 406969 - RNA, 32 nt, Human
cugggcucaggugauccucccgccugagccuc

SEQ ID NO: 406970 - RNA, 32 nt, Human
cugggcucaggugauucucccaucucagccuc

SEQ ID NO: 406971 - RNA, 32 nt, Human
cugggcucaugcaauccuccugccuuggccuc

SEQ ID NO: 406972 - RNA, 32 nt, Human
cugggcucaugcugggauugugcagugcuccu

SEQ ID NO: 406973 - RNA, 32 nt, Human
cugggcucaugugauccucccaccucagccuc

SEQ ID NO: 406974 - RNA, 32 nt, Human
cugggcucauucuucuuggcucaccaacccug

SEQ ID NO: 406975 - RNA, 32 nt, Human
cugggcucauugcaaccucugccucccggguu

SEQ ID NO: 406976 - RNA, 32 nt, Human
cugggcuccacuuggcuccucucacuucccag

SEQ ID NO: 406977 - RNA, 21 nt, Human
cugggcuccagagggcacuca

SEQ ID NO: 406978 - RNA, 22 nt, Human
cugggcuccagcagcaucagca

SEQ ID NO: 406979 - RNA, 32 nt, Human
cugggcuccagccauggaggguggacuggaga

SEQ ID NO: 406980 - RNA, 32 nt, Human
cugggcuccagccugggcgacagagugagagu

SEQ ID NO: 406981 - RNA, 32 nt, Human
cugggcuccaggaguggaggcuggucugggcu

SEQ ID NO: 406982 - RNA, 32 nt, Human
cugggcucccacacguccccaaaggagagcag

SEQ ID NO: 406983 - RNA, 21 nt, Human
cugggcucccaccucccgccu

SEQ ID NO: 406984 - RNA, 32 nt, Human
cugggcucccaccucccgccuuccgccgcucu

SEQ ID NO: 406985 - RNA, 32 nt, Human
cugggcucccagagagacccugaguuucaaau

SEQ ID NO: 406986 - RNA, 32 nt, Human
cugggcucccagcacgcucucuccccacaucg

SEQ ID NO: 406987 - RNA, 22 nt, Human
cugggcuccgaggccagcgcca

SEQ ID NO: 406988 - RNA, 32 nt, Human
cugggcuccugccccgccccuggcuagcagcg

SEQ ID NO: 406989 - RNA, 32 nt, Human
cugggcuccuggggcucagccuagugaacugc

SEQ ID NO: 406990 - RNA, 32 nt, Human
cugggcuccugggucuaguggggauuuguaga

SEQ ID NO: 406991 - RNA, 32 nt, Human
cugggcucgagcaauucucccaccucagccua

SEQ ID NO: 406992 - RNA, 32 nt, Human
cugggcucgggugauccucccaccucggccuc

SEQ ID NO: 406993 - RNA, 20 nt, Human
cugggcucuacucccugcag

SEQ ID NO: 406994 - RNA, 32 nt, Human
cugggcucuaggcugaggguccuugaacagac

SEQ ID NO: 406995 - RNA, 32 nt, Human
cugggcucucagggacccccugggucggcuuc

SEQ ID NO: 406996 - RNA, 32 nt, Human
cugggcucuccugaugccgcaggcugggccac

SEQ ID NO: 406997 - RNA, 19 nt, Human
cugggcucucuugggcuuu

SEQ ID NO: 406998 - RNA, 32 nt, Human
cugggcucugccugucuggugccuggaggugu

SEQ ID NO: 406999 - RNA, 32 nt, Human
cugggcucugcugcccuggaccccucuauuua

SEQ ID NO: 407000 - RNA, 32 nt, Human
cugggcucugcuuccuccgccugcugccugga

SEQ ID NO: 407001 - RNA, 32 nt, Human
cugggcucuggccucuacucucuccucccucu

SEQ ID NO: 407002 - RNA, 32 nt, Human
cugggcucugugggcucccccugggcucugug

SEQ ID NO: 407003 - RNA, 32 nt, Human
cugggcugagaacccagcgauaagggggcguu

SEQ ID NO: 407004 - RNA, 32 nt, Human
cugggcugcaccugcaagcucuaugccauucg

SEQ ID NO: 407005 - RNA, 32 nt, Human
cugggcugcagcuugggagagcuccaguaaca

SEQ ID NO: 407006 - RNA, 32 nt, Human
cugggcugcccaggggugugauguggagcugg

SEQ ID NO: 407007 - RNA, 31 nt, Human
cugggcugccucucuaggcuucgcuguucau

SEQ ID NO: 407008 - RNA, 31 nt, Human
cugggcugccucuucgcggggugucccgagc

SEQ ID NO: 407009 - RNA, 32 nt, Human
cugggcugccugggugagaugcuggggccugg

SEQ ID NO: 407010 - RNA, 32 nt, Human
cugggcugccuuguagagaugcagccugccca

SEQ ID NO: 407011 - RNA, 32 nt, Human
cugggcugcgcggccccagccugggcacccug

SEQ ID NO: 407012 - RNA, 32 nt, Human
cugggcugcugcauacugcuaaauggcaccuc

SEQ ID NO: 407013 - RNA, 18 nt, Human
cugggcugcuuggggcuu

SEQ ID NO: 407014 - RNA, 32 nt, Human
cugggcuggagcggcggcgccgccauguccga

SEQ ID NO: 407015 - RNA, 32 nt, Human
cugggcuggaggaggagcuggaagaggccgug

SEQ ID NO: 407016 - RNA, 32 nt, Human
cugggcuggagugagguggaaggauguuugcu

SEQ ID NO: 407017 - RNA, 32 nt, Human
cugggcuggagugcaguggcaugaucucagcu

SEQ ID NO: 407018 - RNA, 32 nt, Human
cugggcuggagugcaguggcccaagcuacgcu

SEQ ID NO: 407019 - RNA, 32 nt, Human
cugggcuggagugcaguggugcaaucaugguu

SEQ ID NO: 407020 - RNA, 32 nt, Human
cugggcuggagugcgauggcaugaucucggcu

SEQ ID NO: 407021 - RNA, 32 nt, Human
cugggcuggcauuggucacaccaggccuaaga

SEQ ID NO: 407022 - RNA, 32 nt, Human
cugggcuggcugcaggcugagcuaaagaggcg

SEQ ID NO: 407023 - RNA, 29 nt, Human
cugggcuggcugcugacgucccccucccu

SEQ ID NO: 407024 - RNA, 32 nt, Human
cugggcuggcuggaacuagccuaagacugaaa

SEQ ID NO: 407025 - RNA, 29 nt, Human
cugggcuggcuguguucauccccgcugca

SEQ ID NO: 407026 - RNA, 32 nt, Human
cugggcugggaacaggaaggggacuaaaaugc

SEQ ID NO: 407027 - RNA, 21 nt, Human
cugggcugggaaccagggagg

SEQ ID NO: 407028 - RNA, 32 nt, Human
cugggcugggaccccucugccuccagggcgcg

SEQ ID NO: 407029 - RNA, 32 nt, Human
cugggcugggagaaggguguuccaggccugug

SEQ ID NO: 407030 - RNA, 32 nt, Human
cugggcugggagaaggugcuugggcuucugcg

SEQ ID NO: 407031 - RNA, 31 nt, Human
cugggcugggagagaagauggggaagugugu

SEQ ID NO: 407032 - RNA, 32 nt, Human
cugggcugggagcaguggcucacaccuguaau

SEQ ID NO: 407033 - RNA, 21 nt, Human
cugggcugggccccagggagg

SEQ ID NO: 407034 - RNA, 32 nt, Human
cugggcugggcugcggaagcucugccugccaa

SEQ ID NO: 407035 - RNA, 32 nt, Human
cugggcugggcuggggcuaggagggcagcagg

SEQ ID NO: 407036 - RNA, 32 nt, Human
cugggcugggcugugaugaagcugagcagagu

SEQ ID NO: 407037 - RNA, 32 nt, Human
cugggcugggcugugguggggugggggacaac

SEQ ID NO: 407038 - RNA, 32 nt, Human
cugggcuggggaggggguagugacaguggcag

SEQ ID NO: 407039 - RNA, 32 nt, Human
cugggcugggggcagagagggagagccggucc

SEQ ID NO: 407040 - RNA, 32 nt, Human
cugggcugggggcgcaccacgugcucacagca

SEQ ID NO: 407041 - RNA, 32 nt, Human
cugggcuggguccucaacauugccaaggugcu

SEQ ID NO: 407042 - RNA, 31 nt, Human
cugggcuggguggagguguggcugggcuggg

SEQ ID NO: 407043 - RNA, 32 nt, Human
cugggcuguagugcacugugcugauccacuaa

SEQ ID NO: 407044 - RNA, 32 nt, Human
cugggcugucccugucccucugcuggggaccg

SEQ ID NO: 407045 - RNA, 32 nt, Human
cugggcugugagaauaguggugaauuugauua

SEQ ID NO: 407046 - RNA, 32 nt, Human
cugggcugugcguccacuggggacuggggaug

SEQ ID NO: 407047 - RNA, 32 nt, Human
cugggcugugcucuccccuguuuacccgaugu

SEQ ID NO: 407048 - RNA, 32 nt, Human
cugggcuguggaggugggcaugugggccccug

SEQ ID NO: 407049 - RNA, 32 nt, Human
cugggcuguggcucagagaccuggggguggag

SEQ ID NO: 407050 - RNA, 32 nt, Human
cugggcuguggcuucaagcuuuggaaacauga

SEQ ID NO: 407051 - RNA, 32 nt, Human
cugggcuguugguggagguuguacugugguac

SEQ ID NO: 407052 - RNA, 32 nt, Human
cugggcuuaagcagucuucccaccucagccuc

SEQ ID NO: 407053 - RNA, 32 nt, Human
cugggcuuaagggauccuucuaccucagccuc

SEQ ID NO: 407054 - RNA, 32 nt, Human
cugggcuuaagugacccucccaccucagucuc

SEQ ID NO: 407055 - RNA, 32 nt, Human
cugggcuuaagugauccucccaccucagucuc

SEQ ID NO: 407056 - RNA, 32 nt, Human
cugggcuuagggaaggagagaccuuauuccaa

SEQ ID NO: 407057 - RNA, 32 nt, Human
cugggcuuauacuagcuccugacuuaggaaga

SEQ ID NO: 407058 - RNA, 32 nt, Human
cugggcuuaugggauccuccugccucagcuuc

SEQ ID NO: 407059 - RNA, 32 nt, Human
cugggcuucaguuuucucaucuguaaaaucag

SEQ ID NO: 407060 - RNA, 32 nt, Human
cugggcuucauacuggccuuccucuacaaugg

SEQ ID NO: 407061 - RNA, 32 nt, Human
cugggcuucccagcucagucuauagcuagcau

SEQ ID NO: 407062 - RNA, 32 nt, Human
cugggcuucucaggcuagagggucugcacaug

SEQ ID NO: 407063 - RNA, 32 nt, Human
cugggcuucuuucuccccagagggcccucugc

SEQ ID NO: 407064 - RNA, 32 nt, Human
cugggcuuggaaggaaaacaccuuuccaaagc

SEQ ID NO: 407065 - RNA, 32 nt, Human
cugggcuuggagcugcucauggagaaagugcc

SEQ ID NO: 407066 - RNA, 32 nt, Human
cugggcuuggcgaggcugcagcgcggccaccg

SEQ ID NO: 407067 - RNA, 32 nt, Human
cugggcuuggcuuauggguacaacuuucagua

SEQ ID NO: 407068 - RNA, 32 nt, Human
cugggcuugguggcucacaccuguaauuccag

SEQ ID NO: 407069 - RNA, 32 nt, Human
cugggcuugguggcucacgccuguaaucccag

SEQ ID NO: 407070 - RNA, 32 nt, Human
cugggcuugguggcucaugccuauaauccuag

SEQ ID NO: 407071 - RNA, 32 nt, Human
cugggcuugguggcuggcgccuguaaucccag

SEQ ID NO: 407072 - RNA, 32 nt, Human
cugggcuuggugguucacaccuguaauccuag

SEQ ID NO: 407073 - RNA, 32 nt, Human
cugggcuugucuguucccuccugagccugagc

SEQ ID NO: 407074 - RNA, 32 nt, Human
cugggcuuuaaugcagaggccauguccuuguc

SEQ ID NO: 407075 - RNA, 32 nt, Human
cugggcuuucaccuugaagcauggucagcagc

SEQ ID NO: 407076 - RNA, 32 nt, Human
cugggcuuucacugcuacccauaucccagccc

SEQ ID NO: 407077 - RNA, 32 nt, Human
cugggcuuugagguagagguugggguuuauga

SEQ ID NO: 407078 - RNA, 32 nt, Human
cugggcuuugggaaguuugcugugcuuuggaa

SEQ ID NO: 407079 - RNA, 32 nt, Human
cuggggaaaggagagaccauggugugaaugua

SEQ ID NO: 407080 - RNA, 18 nt, Human
cuggggaacaacaccugg

SEQ ID NO: 407081 - RNA, 24 nt, Human
cuggggaacauaaugagacccauc

SEQ ID NO: 407082 - RNA, 32 nt, Human
cuggggaagaggacugugugagaggggcgccu

SEQ ID NO: 407083 - RNA, 32 nt, Human
cuggggaagcagcugcagcaggagggagacgg

SEQ ID NO: 407084 - RNA, 32 nt, Human
cuggggaagcaggucucaauucugaauagcca

SEQ ID NO: 407085 - RNA, 21 nt, Human
cuggggaaggaaaacaggcuc

SEQ ID NO: 407086 - RNA, 19 nt, Human
cuggggaaggacugcaaca

SEQ ID NO: 407087 - RNA, 32 nt, Human
cuggggaaggcaucuaacuaguagccugcuac

SEQ ID NO: 407088 - RNA, 32 nt, Human
cuggggaaggcaugugcuuggaggcagcccug

SEQ ID NO: 407089 - RNA, 32 nt, Human
cuggggaagggaggggagacuaugugugagcu

SEQ ID NO: 407090 - RNA, 32 nt, Human
cuggggaagggcccacugccaacucccucugc

SEQ ID NO: 407091 - RNA, 32 nt, Human
cuggggaagugggagggaugugaugcuggaga

SEQ ID NO: 407092 - RNA, 32 nt, Human
cuggggaaguuguguguugugcagucaguaaa

SEQ ID NO: 407093 - RNA, 32 nt, Human
cuggggaauguaacagugggguugugguuggu

SEQ ID NO: 407094 - RNA, 32 nt, Human
cuggggaauucugaggaggaaauaaauugcag

SEQ ID NO: 407095 - RNA, 32 nt, Human
cuggggaauugagacaagccucugccauaguu

SEQ ID NO: 407096 - RNA, 32 nt, Human
cuggggacacaacaaugacugaggcagccugg

SEQ ID NO: 407097 - RNA, 32 nt, Human
cuggggacacaccacucacacgcacagucacc

SEQ ID NO: 407098 - RNA, 32 nt, Human
cuggggacaccaggaucuucuuugugaacccu

SEQ ID NO: 407099 - RNA, 25 nt, Human
cuggggacacggacuucugcugcug

SEQ ID NO: 407100 - RNA, 32 nt, Human
cuggggacagaaguagagaaaacacuuguguc

SEQ ID NO: 407101 - RNA, 32 nt, Human
cuggggacaggaaggagcaggagcuaagcagg

SEQ ID NO: 407102 - RNA, 32 nt, Human
cuggggacaugcugagggccaugguggcuucu

SEQ ID NO: 407103 - RNA, 32 nt, Human
cuggggacaugguccauggugcaacccacagc

SEQ ID NO: 407104 - RNA, 32 nt, Human
cuggggaccacaguccugauguggacgcaggg

SEQ ID NO: 407105 - RNA, 32 nt, Human
cuggggaccagcacagcaccugaagccaugug

SEQ ID NO: 407106 - RNA, 32 nt, Human
cuggggaccaugggcuccaggaucaagcagaa

SEQ ID NO: 407107 - RNA, 32 nt, Human
cuggggacccacccuccuucccuuucugguug

SEQ ID NO: 407108 - RNA, 32 nt, Human
cuggggaccccaaccucagaggcagcuucaag

SEQ ID NO: 407109 - RNA, 32 nt, Human
cuggggaccgcagcagggcugcagucacaucc

SEQ ID NO: 407110 - RNA, 32 nt, Human
cuggggaccucagagauucucuccagcggcag

SEQ ID NO: 407111 - RNA, 32 nt, Human
cuggggaccuggcugaguuuuucccuugccug

SEQ ID NO: 407112 - RNA, 32 nt, Human
cuggggaccuguacacuagcaggaugggucuu

SEQ ID NO: 407113 - RNA, 32 nt, Human
cuggggacuccagauuuuccccaaacuugcuu

SEQ ID NO: 407114 - RNA, 19 nt, Human
cuggggacuccuggguuuu

SEQ ID NO: 407115 - RNA, 32 nt, Human
cuggggacucugcugucccugggcuugcaucc

SEQ ID NO: 407116 - RNA, 32 nt, Human
cuggggacugagcccccaggagggccagcaug

SEQ ID NO: 407117 - RNA, 18 nt, Human
cuggggacugcugagccc

SEQ ID NO: 407118 - RNA, 32 nt, Human
cuggggacuggaggggaacguggagcuccuuc

SEQ ID NO: 407119 - RNA, 32 nt, Human
cuggggacuggcauccuuccacugacuuugau

SEQ ID NO: 407120 - RNA, 32 nt, Human
cuggggagaaacaguagucaaagcuuucugaa

SEQ ID NO: 407121 - RNA, 32 nt, Human
cuggggagaacagcauucgagcugccgggugg

SEQ ID NO: 407122 - RNA, 32 nt, Human
cuggggagaagcaggaugggauugaugggcag

SEQ ID NO: 407123 - RNA, 32 nt, Human
cuggggagacgggguuucgccauguuugccag

SEQ ID NO: 407124 - RNA, 32 nt, Human
cuggggagagaagggugaccaggcgaggaggg

SEQ ID NO: 407125 - RNA, 32 nt, Human
cuggggagagguaggaaggaaccaggcccuca

SEQ ID NO: 407126 - RNA, 32 nt, Human
cuggggagagguggaggcugacagcugagacg

SEQ ID NO: 407127 - RNA, 32 nt, Human
cuggggagagugaaggagucagaaugccuuaa

SEQ ID NO: 407128 - RNA, 32 nt, Human
cuggggagauggaggcugcagugagcuauaau

SEQ ID NO: 407129 - RNA, 32 nt, Human
cuggggagcacucacuucacuugugugggugu

SEQ ID NO: 407130 - RNA, 32 nt, Human
cuggggagccagggauucagaacucacagugc

SEQ ID NO: 407131 - RNA, 32 nt, Human
cuggggagccagggcuaugggagcagcuuuuu

SEQ ID NO: 407132 - RNA, 19 nt, Human
cuggggagcccgggcgccg

SEQ ID NO: 407133 - RNA, 32 nt, Human
cuggggagccggaggcccugcccgacuccuug

SEQ ID NO: 407134 - RNA, 18 nt, Human
cuggggagccugggcccc

SEQ ID NO: 407135 - RNA, 19 nt, Human
cuggggagccuguccuucc

SEQ ID NO: 407136 - RNA, 25 nt, Human
cuggggagcguuggugaugcuguau

SEQ ID NO: 407137 - RNA, 32 nt, Human
cuggggagcuccaaggcugcagccaggagccc

SEQ ID NO: 407138 - RNA, 19 nt, Human
cuggggagcuccugggacc

SEQ ID NO: 407139 - RNA, 32 nt, Human
cuggggagcugcauccuuuugagcuggcugca

SEQ ID NO: 407140 - RNA, 32 nt, Human
cuggggaggaagaggaugagggccucgcuccu

SEQ ID NO: 407141 - RNA, 32 nt, Human
cuggggaggaagaggcuugggcugcagaugca

SEQ ID NO: 407142 - RNA, 32 nt, Human
cuggggaggaggaagcggacagaggaagcugu

SEQ ID NO: 407143 - RNA, 32 nt, Human
cuggggaggaggcggaggcagcggcuggagga

SEQ ID NO: 407144 - RNA, 32 nt, Human
cuggggaggaguccaccaaccuagccacaggg

SEQ ID NO: 407145 - RNA, 32 nt, Human
cuggggaggcagaggugacagugagcugagau

SEQ ID NO: 407146 - RNA, 24 nt, Human
cuggggaggcagagguugcaguga

SEQ ID NO: 407147 - RNA, 32 nt, Human
cuggggaggcagagguugcagugagacaagau

SEQ ID NO: 407148 - RNA, 32 nt, Human
cuggggaggcagagguugcaguggcccgagac

SEQ ID NO: 407149 - RNA, 32 nt, Human
cuggggaggcagaguccucgcguggucuccug

SEQ ID NO: 407150 - RNA, 31 nt, Human
cuggggaggcagcuagauaccaaaccauucu

SEQ ID NO: 407151 - RNA, 32 nt, Human
cuggggaggggcugcuggcaucaaguggguag

SEQ ID NO: 407152 - RNA, 32 nt, Human
cuggggaggggcugguaggagggagggugggc

SEQ ID NO: 407153 - RNA, 32 nt, Human
cuggggagguuagauguguguuucaggcuugg

SEQ ID NO: 407154 - RNA, 32 nt, Human
cuggggagguugggagcugagcuguucucauc

SEQ ID NO: 407155 - RNA, 32 nt, Human
cuggggagucucucaaugccagguugucaccc

SEQ ID NO: 407156 - RNA, 32 nt, Human
cuggggagucugcuggaggccugggauggagu

SEQ ID NO: 407157 - RNA, 32 nt, Human
cuggggagugugaggagaggguggcaucagga

SEQ ID NO: 407158 - RNA, 32 nt, Human
cuggggauaacaguguaacacauuugagaucu

SEQ ID NO: 407159 - RNA, 32 nt, Human
cuggggauaccugccugucaccucagggcauc

SEQ ID NO: 407160 - RNA, 32 nt, Human
cuggggaucaaauuucaacaugagguuugggu

SEQ ID NO: 407161 - RNA, 32 nt, Human
cuggggaucacagaaccugcagauuggaucgu

SEQ ID NO: 407162 - RNA, 32 nt, Human
cuggggaucaccccauuggcugaagaugagac

SEQ ID NO: 407163 - RNA, 32 nt, Human
cuggggaucagggucugggcucugucagccgc

SEQ ID NO: 407164 - RNA, 32 nt, Human
cuggggaucccaggaacccuggucaggugagg

SEQ ID NO: 407165 - RNA, 32 nt, Human
cuggggaucucgcucaccaccaccucccuccg

SEQ ID NO: 407166 - RNA, 32 nt, Human
cuggggaugaggaaauuaauaaagguacaguc

SEQ ID NO: 407167 - RNA, 26 nt, Human
cuggggaugcuuggucucuucugcug

SEQ ID NO: 407168 - RNA, 32 nt, Human
cuggggauggaugcucugaccacagcagcugu

SEQ ID NO: 407169 - RNA, 32 nt, Human
cuggggcaaaaauauaacucuagcuguauuuc

SEQ ID NO: 407170 - RNA, 32 nt, Human
cuggggcaaccaggacuuucucgggcacccaa

SEQ ID NO: 407171 - RNA, 32 nt, Human
cuggggcaacgccucguccugcagagggagcc

SEQ ID NO: 407172 - RNA, 32 nt, Human
cuggggcaaggaaggagccaggauggccuggg

SEQ ID NO: 407173 - RNA, 22 nt, Human
cuggggcacccuggcuggccag

SEQ ID NO: 407174 - RNA, 32 nt, Human
cuggggcacggcagcgucuaagccacaagccg

SEQ ID NO: 407175 - RNA, 20 nt, Human
cuggggcacucugcuggcua

SEQ ID NO: 407176 - RNA, 32 nt, Human
cuggggcacuggagccuggcccccaggacaug

SEQ ID NO: 407177 - RNA, 32 nt, Human
cuggggcacuggcugccuggcugccuccugga

SEQ ID NO: 407178 - RNA, 32 nt, Human
cuggggcagagcaucugugggguggggucuuc

SEQ ID NO: 407179 - RNA, 32 nt, Human
cuggggcagagccuggguggucagaggccggg

SEQ ID NO: 407180 - RNA, 32 nt, Human
cuggggcagagcuggaagaggaaaggucuugg

SEQ ID NO: 407181 - RNA, 32 nt, Human
cuggggcagaggaggaaagcaagaggacagac

SEQ ID NO: 407182 - RNA, 20 nt, Human
cuggggcagagggcgccuga

SEQ ID NO: 407183 - RNA, 32 nt, Human
cuggggcagagugagagcaggaccagcgggca

SEQ ID NO: 407184 - RNA, 31 nt, Human
cuggggcagaugucuccccugccacuccuca

SEQ ID NO: 407185 - RNA, 18 nt, Human
cuggggcagcagcagugg

SEQ ID NO: 407186 - RNA, 32 nt, Human
cuggggcagcaguggacacagagcaugagcgu

SEQ ID NO: 407187 - RNA, 21 nt, Human
cuggggcagccucugggccca

SEQ ID NO: 407188 - RNA, 32 nt, Human
cuggggcagccuggcucagguuuauugauuuu

SEQ ID NO: 407189 - RNA, 32 nt, Human
cuggggcagcucccagccucuucccaugcugg

SEQ ID NO: 407190 - RNA, 32 nt, Human
cuggggcagcuguccccaucaggccaagagcg

SEQ ID NO: 407191 - RNA, 32 nt, Human
cuggggcaggaaggccacugaggccagggaga

SEQ ID NO: 407192 - RNA, 24 nt, Human
cuggggcaggagaauggcaugaac

SEQ ID NO: 407193 - RNA, 23 nt, Human
cuggggcaggaggaucacuugag

SEQ ID NO: 407194 - RNA, 21 nt, Human
cuggggcaggaggaucgcuug

SEQ ID NO: 407195 - RNA, 32 nt, Human
cuggggcaggaggcagcucuucacguucaucc

SEQ ID NO: 407196 - RNA, 32 nt, Human
cuggggcaggcaggaggcagugggcuucaugg

SEQ ID NO: 407197 - RNA, 32 nt, Human
cuggggcaggcagggcagggucugugaagcuu

SEQ ID NO: 407198 - RNA, 32 nt, Human
cuggggcaggccucccucagggccaggggcga

SEQ ID NO: 407199 - RNA, 32 nt, Human
cuggggcagggacugugcugagugucugaggc

SEQ ID NO: 407200 - RNA, 32 nt, Human
cuggggcagggagccagguacagagcagauuu

SEQ ID NO: 407201 - RNA, 32 nt, Human
cuggggcagggccugaggcaagaggugggagg

SEQ ID NO: 407202 - RNA, 32 nt, Human
cuggggcagggggcagcuccucaaguggaacc

SEQ ID NO: 407203 - RNA, 32 nt, Human
cuggggcagguagaucacuugaggucaggaga

SEQ ID NO: 407204 - RNA, 32 nt, Human
cuggggcagguguggcaauggaccacagaaac

SEQ ID NO: 407205 - RNA, 32 nt, Human
cuggggcagugagggaaugggagcagcugugg

SEQ ID NO: 407206 - RNA, 32 nt, Human
cuggggcauccucaucccagggcucucugcug

SEQ ID NO: 407207 - RNA, 31 nt, Human
cuggggcaucuccuucuuaugccaaggggcg

SEQ ID NO: 407208 - RNA, 32 nt, Human
cuggggcaucuggcuggugccugcugccaugg

SEQ ID NO: 407209 - RNA, 32 nt, Human
cuggggcauggagcacgcugcccagcccuggc

SEQ ID NO: 407210 - RNA, 21 nt, Human
cuggggcaugggguaggggug

SEQ ID NO: 407211 - RNA, 20 nt, Human
cuggggccaaacuggagccc

SEQ ID NO: 407212 - RNA, 31 nt, Human
cuggggccaaggcaguauacauuccucugac

SEQ ID NO: 407213 - RNA, 20 nt, Human
cuggggccaaggggcagcag

SEQ ID NO: 407214 - RNA, 32 nt, Human
cuggggccaagugauccucccaccucagccuc

SEQ ID NO: 407215 - RNA, 19 nt, Human
cuggggccacagcccugcc

SEQ ID NO: 407216 - RNA, 32 nt, Human
cuggggccacccuuccuggaacucagagagga

SEQ ID NO: 407217 - RNA, 32 nt, Human
cuggggccaccugagccgcccgccucgucccc

SEQ ID NO: 407218 - RNA, 32 nt, Human
cuggggccaccugcaagccccauuccauuccu

SEQ ID NO: 407219 - RNA, 32 nt, Human
cuggggccaccuuugugcagcuucgaggacag

SEQ ID NO: 407220 - RNA, 32 nt, Human
cuggggccacugcucugccgcggagauaaguc

SEQ ID NO: 407221 - RNA, 32 nt, Human
cuggggccacugcucugcugcggagauaaguc

SEQ ID NO: 407222 - RNA, 32 nt, Human
cuggggccacugcugaccuggcuggaugcauc

SEQ ID NO: 407223 - RNA, 32 nt, Human
cuggggccagccagggcaggagaggugugaaa

SEQ ID NO: 407224 - RNA, 32 nt, Human
cuggggccagggacauccugugcagaagcucu

SEQ ID NO: 407225 - RNA, 32 nt, Human
cuggggccagggguagcugagcuuaaaggccc

SEQ ID NO: 407226 - RNA, 23 nt, Human
cuggggccagggguucagggagg

SEQ ID NO: 407227 - RNA, 32 nt, Human
cuggggccaguucuucuguuucaccuagaauu

SEQ ID NO: 407228 - RNA, 32 nt, Human
cuggggccaugaaggcagaagguuuagccucu

SEQ ID NO: 407229 - RNA, 32 nt, Human
cuggggccauugagcccagccuccagggcccg

SEQ ID NO: 407230 - RNA, 32 nt, Human
cuggggcccagagggaccuugagucagaaaug

SEQ ID NO: 407231 - RNA, 18 nt, Human
cuggggcccagccccaaa

SEQ ID NO: 407232 - RNA, 32 nt, Human
cuggggcccagccugccugccgcaccccugug

SEQ ID NO: 407233 - RNA, 32 nt, Human
cuggggcccaggaaguggggaagaguagguuc

SEQ ID NO: 407234 - RNA, 32 nt, Human
cuggggcccaggagacacggucccaggcacug

SEQ ID NO: 407235 - RNA, 32 nt, Human
cuggggcccaggaggaucugggcugguuuguc

SEQ ID NO: 407236 - RNA, 32 nt, Human
cuggggccccugcggccucuggccccagacug

SEQ ID NO: 407237 - RNA, 18 nt, Human
cuggggcccgggcugcgc

SEQ ID NO: 407238 - RNA, 32 nt, Human
cuggggcccggguguccuccuguggucugaug

SEQ ID NO: 407239 - RNA, 32 nt, Human
cuggggcccucacccuccucuguggucaagau

SEQ ID NO: 407240 - RNA, 23 nt, Human
cuggggcccucccacucuccaca

SEQ ID NO: 407241 - RNA, 32 nt, Human
cuggggcccuggacucugccuuagcucccacc

SEQ ID NO: 407242 - RNA, 32 nt, Human
cuggggcccuggaggaaggagaggucucugag

SEQ ID NO: 407243 - RNA, 22 nt, Human
cuggggcccuguagccaaaagg

SEQ ID NO: 407244 - RNA, 32 nt, Human
cuggggccgacgggcggcaggaaggggcucgg

SEQ ID NO: 407245 - RNA, 18 nt, Human
cuggggccgccagugcgc

SEQ ID NO: 407246 - RNA, 32 nt, Human
cuggggccggaggcggggugugagugggugug

SEQ ID NO: 407247 - RNA, 32 nt, Human
cuggggccucacuuccccuccucccccuuccc

SEQ ID NO: 407248 - RNA, 32 nt, Human
cuggggccuccagccccucacacugcuguucc

SEQ ID NO: 407249 - RNA, 32 nt, Human
cuggggccucccaagagacacagagaugcggg

SEQ ID NO: 407250 - RNA, 32 nt, Human
cuggggccucggauaccugcugcccagagcag

SEQ ID NO: 407251 - RNA, 32 nt, Human
cuggggccucuccuguugaauggcuaggcacc

SEQ ID NO: 407252 - RNA, 32 nt, Human
cuggggccugaggcagggagaaugagaggcca

SEQ ID NO: 407253 - RNA, 32 nt, Human
cuggggccugcagggugccaggaucugggaga

SEQ ID NO: 407254 - RNA, 32 nt, Human
cuggggccugcauaagaaaacuuaucucauua

SEQ ID NO: 407255 - RNA, 21 nt, Human
cuggggccugccgccccggga

SEQ ID NO: 407256 - RNA, 32 nt, Human
cuggggccugcucuucucuggcagaguggccc

SEQ ID NO: 407257 - RNA, 32 nt, Human
cuggggccugcugacugcccagucccggcuuc

SEQ ID NO: 407258 - RNA, 18 nt, Human
cuggggccugggauccuu

SEQ ID NO: 407259 - RNA, 32 nt, Human
cuggggccugugaauaaagcugcagaaccccc

SEQ ID NO: 407260 - RNA, 20 nt, Human
cuggggccugugucagccgc

SEQ ID NO: 407261 - RNA, 32 nt, Human
cuggggccuuccuggcucuggcccagaaagug

SEQ ID NO: 407262 - RNA, 32 nt, Human
cuggggccuucgcaagucugauguuccaggac

SEQ ID NO: 407263 - RNA, 32 nt, Human
cuggggccuuucuucuccuuguaggggucucu

SEQ ID NO: 407264 - RNA, 32 nt, Human
cuggggcgaacagaacuucuuccucccaaaca

SEQ ID NO: 407265 - RNA, 25 nt, Human
cuggggcgaacgagguucagggagg

SEQ ID NO: 407266 - RNA, 32 nt, Human
cuggggcgauguuugcagucaagaccauucuu

SEQ ID NO: 407267 - RNA, 32 nt, Human
cuggggcgcaugaaggugggggugaugccgaa

SEQ ID NO: 407268 - RNA, 32 nt, Human
cuggggcgccgagcggacaggaacgcagcacg

SEQ ID NO: 407269 - RNA, 32 nt, Human
cuggggcgcuacaguaccuggagcugggcagu

SEQ ID NO: 407270 - RNA, 22 nt, Human
cuggggcgcugcuccccacagu

SEQ ID NO: 407271 - RNA, 20 nt, Human
cuggggcggccacgcacucc

SEQ ID NO: 407272 - RNA, 32 nt, Human
cuggggcggcggugcuggagguugcggcggcg

SEQ ID NO: 407273 - RNA, 32 nt, Human
cuggggcggggacuucugucugccuguacuuc

SEQ ID NO: 407274 - RNA, 32 nt, Human
cuggggcggggacuucugucugccugugcucc

SEQ ID NO: 407275 - RNA, 32 nt, Human
cuggggcgggguggucaggagacagauucuag

SEQ ID NO: 407276 - RNA, 32 nt, Human
cuggggcuacagcugcugcugccucuucuaau

SEQ ID NO: 407277 - RNA, 32 nt, Human
cuggggcuacagcuucugccuccucaccuggc

SEQ ID NO: 407278 - RNA, 32 nt, Human
cuggggcuacuggugucagccuggugguagug

SEQ ID NO: 407279 - RNA, 32 nt, Human
cuggggcuagagguggaggaggcaguccuggg

SEQ ID NO: 407280 - RNA, 32 nt, Human
cuggggcuagggucacagccccuaacucauaa

SEQ ID NO: 407281 - RNA, 32 nt, Human
cuggggcuaucccuuuuuaggcccuuaccaug

SEQ ID NO: 407282 - RNA, 23 nt, Human
cuggggcucagaccccuguggga

SEQ ID NO: 407283 - RNA, 20 nt, Human
cuggggcucagcccugagcu

SEQ ID NO: 407284 - RNA, 21 nt, Human
cuggggcucagcucugagcua

SEQ ID NO: 407285 - RNA, 32 nt, Human
cuggggcucaggcuggugugggaugcagccgg

SEQ ID NO: 407286 - RNA, 32 nt, Human
cuggggcuccaacuggguacagccugggugca

SEQ ID NO: 407287 - RNA, 32 nt, Human
cuggggcuccaaugcagcgagcugugcccgag

SEQ ID NO: 407288 - RNA, 32 nt, Human
cuggggcuccccucugagcggcugcggcuccu

SEQ ID NO: 407289 - RNA, 18 nt, Human
cuggggcucccugaguca

SEQ ID NO: 407290 - RNA, 31 nt, Human
cuggggcuccucucugggucccugcucuuuc

SEQ ID NO: 407291 - RNA, 18 nt, Human
cuggggcuccugggauuu

SEQ ID NO: 407292 - RNA, 18 nt, Human
cuggggcucggggccccu

SEQ ID NO: 407293 - RNA, 32 nt, Human
cuggggcucucaccuccacauguggguagaag

SEQ ID NO: 407294 - RNA, 32 nt, Human
cuggggcugacacccaggcccgagcgccugcg

SEQ ID NO: 407295 - RNA, 32 nt, Human
cuggggcugagcuggagguggggaugagagca

SEQ ID NO: 407296 - RNA, 32 nt, Human
cuggggcugagguugggggaggggugggcggc

SEQ ID NO: 407297 - RNA, 32 nt, Human
cuggggcugauguuccagccucguggcguggg

SEQ ID NO: 407298 - RNA, 32 nt, Human
cuggggcugcaagcugcugaagccagggcaug

SEQ ID NO: 407299 - RNA, 18 nt, Human
cuggggcugcaccacaca

SEQ ID NO: 407300 - RNA, 32 nt, Human
cuggggcugccaggaacugcccuucagaaccu

SEQ ID NO: 407301 - RNA, 32 nt, Human
cuggggcugcuccccuaacccuacuuugcuuc

SEQ ID NO: 407302 - RNA, 32 nt, Human
cuggggcuggaaaccauccaucaaggucucua

SEQ ID NO: 407303 - RNA, 32 nt, Human
cuggggcuggcgccuccuccagccuggcaucu

SEQ ID NO: 407304 - RNA, 32 nt, Human
cuggggcugggcagagaggguaagcugaucuc

SEQ ID NO: 407305 - RNA, 32 nt, Human
cuggggcugugggcaggggaccugugugcccc

SEQ ID NO: 407306 - RNA, 32 nt, Human
cuggggcuuagauuucucaggucaugcugccu

SEQ ID NO: 407307 - RNA, 32 nt, Human
cuggggcuucauguguggccugcagucauguu

SEQ ID NO: 407308 - RNA, 32 nt, Human
cuggggcuucugcuuuggccagaccugggcca

SEQ ID NO: 407309 - RNA, 32 nt, Human
cuggggcuucuugggccugagaucuugagaga

SEQ ID NO: 407310 - RNA, 32 nt, Human
cugggggaaaccagcuucuugccagccacagc

SEQ ID NO: 407311 - RNA, 32 nt, Human
cugggggaacagagacuggagauguuugugaa

SEQ ID NO: 407312 - RNA, 32 nt, Human
cugggggaacugcugucccauuuuccacagca

SEQ ID NO: 407313 - RNA, 32 nt, Human
cugggggaagaggaggaggagggccgaucguc

SEQ ID NO: 407314 - RNA, 32 nt, Human
cugggggaagcucggggagaccagguggacug

SEQ ID NO: 407315 - RNA, 32 nt, Human
cugggggaaugguauuccaaguggagggaaca

SEQ ID NO: 407316 - RNA, 32 nt, Human
cugggggacaagcagaaguggaagagaucuuu

SEQ ID NO: 407317 - RNA, 32 nt, Human
cugggggacugaggcugcagugagccaugauu

SEQ ID NO: 407318 - RNA, 32 nt, Human
cugggggagacguuucugccacccugggugau

SEQ ID NO: 407319 - RNA, 32 nt, Human
cugggggagaggaguguggaaggguuggggga

SEQ ID NO: 407320 - RNA, 32 nt, Human
cugggggagagggaagguacagagagcggcaa

SEQ ID NO: 407321 - RNA, 32 nt, Human
cugggggagaggggcgggcgccgcgcugccuu

SEQ ID NO: 407322 - RNA, 32 nt, Human
cugggggagaggguugccagggagacucagcu

SEQ ID NO: 407323 - RNA, 32 nt, Human
cugggggagaugcuguccauguuucuaggggu

SEQ ID NO: 407324 - RNA, 32 nt, Human
cugggggagauggcggggaaagaggcaaggag

SEQ ID NO: 407325 - RNA, 32 nt, Human
cugggggagcagccuggacugcagcucucaga

SEQ ID NO: 407326 - RNA, 32 nt, Human
cugggggagcagcugagggaaagggaauuuaa

SEQ ID NO: 407327 - RNA, 32 nt, Human
cugggggagccaccccucggccauucccucca

SEQ ID NO: 407328 - RNA, 19 nt, Human
cugggggagcggggcgcgg

SEQ ID NO: 407329 - RNA, 32 nt, Human
cugggggaggaggagagaaggaaggggugggg

SEQ ID NO: 407330 - RNA, 32 nt, Human
cugggggaggcaggaagcuccucagauuuucu

SEQ ID NO: 407331 - RNA, 32 nt, Human
cugggggaggcaguggcggcuggaguagguag

SEQ ID NO: 407332 - RNA, 32 nt, Human
cugggggaggcccucugugaaugggucucucc

SEQ ID NO: 407333 - RNA, 32 nt, Human
cugggggaggcugagggugagggaacagccug

SEQ ID NO: 407334 - RNA, 32 nt, Human
cugggggaggggaagggugggucuagacauac

SEQ ID NO: 407335 - RNA, 32 nt, Human
cugggggaggggccuggucacugugaacacau

SEQ ID NO: 407336 - RNA, 32 nt, Human
cugggggaggggcgggggucaccauggccgag

SEQ ID NO: 407337 - RNA, 21 nt, Human
cugggggaggguucagggcag

SEQ ID NO: 407338 - RNA, 32 nt, Human
cugggggauccuggcaucuuuacuggacugga

SEQ ID NO: 407339 - RNA, 32 nt, Human
cugggggauuccuagaagcccuucccagacag

SEQ ID NO: 407340 - RNA, 32 nt, Human
cugggggcacacacaugcaggcggcguggucu

SEQ ID NO: 407341 - RNA, 32 nt, Human
cugggggcagccacccucccgccugucggccc

SEQ ID NO: 407342 - RNA, 32 nt, Human
cugggggcagccagggucgcagugagcccggg

SEQ ID NO: 407343 - RNA, 32 nt, Human
cugggggcagcccuuccccugccuaguccccg

SEQ ID NO: 407344 - RNA, 21 nt, Human
cugggggcagccucuguggga

SEQ ID NO: 407345 - RNA, 21 nt, Human
cugggggcagccugccugcug

SEQ ID NO: 407346 - RNA, 32 nt, Human
cugggggcaggagggcccuaccugauuggugc

SEQ ID NO: 407347 - RNA, 32 nt, Human
cugggggcagggcagcacagggaauauuuuug

SEQ ID NO: 407348 - RNA, 32 nt, Human
cugggggcagggcaggggaggucuggauguga

SEQ ID NO: 407349 - RNA, 32 nt, Human
cugggggcaggguggaguggagggggagcuac

SEQ ID NO: 407350 - RNA, 32 nt, Human
cugggggcaguggcaggagccuuacuuuuguc

SEQ ID NO: 407351 - RNA, 22 nt, Human
cugggggcaugucucuugcugu

SEQ ID NO: 407352 - RNA, 32 nt, Human
cugggggccacagccucugcaugggcccagag

SEQ ID NO: 407353 - RNA, 32 nt, Human
cugggggccacuucuuggccaggucaaaguau

SEQ ID NO: 407354 - RNA, 32 nt, Human
cugggggccaggcuggaggcagggauggggac

SEQ ID NO: 407355 - RNA, 20 nt, Human
cugggggccagggagcagca

SEQ ID NO: 407356 - RNA, 23 nt, Human
cugggggcccagcagagccugcu

SEQ ID NO: 407357 - RNA, 22 nt, Human
cugggggcccagccugccuuug

SEQ ID NO: 407358 - RNA, 21 nt, Human
cugggggcccagcuccggugc

SEQ ID NO: 407359 - RNA, 32 nt, Human
cugggggcccaggauguagauauuguacaaag

SEQ ID NO: 407360 - RNA, 21 nt, Human
cugggggcccgcgggcuggug

SEQ ID NO: 407361 - RNA, 23 nt, Human
cugggggcccggacggcugcugc

SEQ ID NO: 407362 - RNA, 28 nt, Human
cugggggcccuacugcuuccuggugcug

SEQ ID NO: 407363 - RNA, 32 nt, Human
cugggggcccucaggacuaggacagggugagc

SEQ ID NO: 407364 - RNA, 21 nt, Human
cugggggcccuggguacgcug

SEQ ID NO: 407365 - RNA, 25 nt, Human
cugggggcccuguaggcugcuguug

SEQ ID NO: 407366 - RNA, 32 nt, Human
cugggggccgaguccuugaauguggcuucagg

SEQ ID NO: 407367 - RNA, 32 nt, Human
cugggggccgugucccuguccaggccucagag

SEQ ID NO: 407368 - RNA, 32 nt, Human
cugggggccucccagccccggagccucauaga

SEQ ID NO: 407369 - RNA, 32 nt, Human
cugggggccuggaagcugcgagggcccaguga

SEQ ID NO: 407370 - RNA, 32 nt, Human
cugggggccuugagugaaaggcagcaguggga

SEQ ID NO: 407371 - RNA, 32 nt, Human
cugggggcgagcagccuaccagaugucgauuu

SEQ ID NO: 407372 - RNA, 32 nt, Human
cugggggcgagcccuggcgggggccagguccg

SEQ ID NO: 407373 - RNA, 32 nt, Human
cugggggcgcgcccuggauagacagagaagaa

SEQ ID NO: 407374 - RNA, 32 nt, Human
cugggggcggggcaggggcagguguagccucu

SEQ ID NO: 407375 - RNA, 23 nt, Human
cugggggcggugggagccccgcg

SEQ ID NO: 407376 - RNA, 32 nt, Human
cugggggcgugcagcugggcccaggggcugug

SEQ ID NO: 407377 - RNA, 32 nt, Human
cugggggcuagcaguccacugagaacuucaug

SEQ ID NO: 407378 - RNA, 32 nt, Human
cugggggcuccggagagcagcaggaagcacuc

SEQ ID NO: 407379 - RNA, 32 nt, Human
cugggggcucucugggguggucucagcucagu

SEQ ID NO: 407380 - RNA, 21 nt, Human
cugggggcugaggagcagcag

SEQ ID NO: 407381 - RNA, 22 nt, Human
cugggggcugcagccugcucug

SEQ ID NO: 407382 - RNA, 24 nt, Human
cugggggcugccacuugcuggcug

SEQ ID NO: 407383 - RNA, 27 nt, Human
cugggggcugccagucuccuguagcug

SEQ ID NO: 407384 - RNA, 32 nt, Human
cugggggcugccgagccaccaugcuugccuga

SEQ ID NO: 407385 - RNA, 32 nt, Human
cugggggcuggaaguccaagaucaagguguua

SEQ ID NO: 407386 - RNA, 32 nt, Human
cugggggcuggccucagucucugucccaucgc

SEQ ID NO: 407387 - RNA, 32 nt, Human
  misc_feature (31)..(31): n is a, c, g, or u
cugggggcugggaaggagaggccgacccaung

SEQ ID NO: 407388 - RNA, 32 nt, Human
cugggggcugggacuaaagaaauggguguccc

SEQ ID NO: 407389 - RNA, 32 nt, Human
cugggggcuucucaggauuccacagcccaaau

SEQ ID NO: 407390 - RNA, 19 nt, Human
cuggggggccugcugggca

SEQ ID NO: 407391 - RNA, 18 nt, Human
cuggggggcucucaggga

SEQ ID NO: 407392 - RNA, 22 nt, Human
cugggggguauaaauccgggua

SEQ ID NO: 407393 - RNA, 32 nt, Human
cuggggguaaagcccucagaucccaggguaca

SEQ ID NO: 407394 - RNA, 32 nt, Human
cuggggguagaccgggccucaccagcuuccug

SEQ ID NO: 407395 - RNA, 23 nt, Human
cuggggguagacgggcucgaaug

SEQ ID NO: 407396 - RNA, 32 nt, Human
cuggggguagggagaugaagagccaagaugcu

SEQ ID NO: 407397 - RNA, 32 nt, Human
cuggggguaggguggggguggggagaacacuu

SEQ ID NO: 407398 - RNA, 22 nt, Human
cuggggguccgcugccugcugc

SEQ ID NO: 407399 - RNA, 32 nt, Human
cuggggguccuggacgccgccucggcaucccc

SEQ ID NO: 407400 - RNA, 23 nt, Human
cugggggucucagcccacugcug

SEQ ID NO: 407401 - RNA, 32 nt, Human
cugggggucugcaggucacugcagaggagcgg

SEQ ID NO: 407402 - RNA, 32 nt, Human
cugggggugagcacacagcaaaacgggguggg

SEQ ID NO: 407403 - RNA, 32 nt, Human
cugggggugagggagaaggaggagagagccca

SEQ ID NO: 407404 - RNA, 32 nt, Human
cuggggguggacaucugaccccaagggggcug

SEQ ID NO: 407405 - RNA, 32 nt, Human
cuggggguggcgcgcggccaggagcacgcaug

SEQ ID NO: 407406 - RNA, 32 nt, Human
cuggggguggcggcacgguccgggaggugguc

SEQ ID NO: 407407 - RNA, 32 nt, Human
cugggggugggggcggggacagaggaaggaaa

SEQ ID NO: 407408 - RNA, 32 nt, Human
cugggggugggguggaaaaugcuggccaucug

SEQ ID NO: 407409 - RNA, 32 nt, Human
cugggggugggguggggucauggguuuuguug

SEQ ID NO: 407410 - RNA, 32 nt, Human
cugggggugguagcacauaccuguaaucccag

SEQ ID NO: 407411 - RNA, 25 nt, Human
cuggggguucuuucuuccucugcug

SEQ ID NO: 407412 - RNA, 32 nt, Human
cuggggguugggggcugugucucuccaucccu

SEQ ID NO: 407413 - RNA, 32 nt, Human
cuggggguuggggguggugggggucggggccu

SEQ ID NO: 407414 - RNA, 32 nt, Human
cuggggguuuaagcucugccccuuccccauga

SEQ ID NO: 407415 - RNA, 32 nt, Human
cugggguaaaaaggaugaaaguuugagaaugc

SEQ ID NO: 407416 - RNA, 32 nt, Human
cugggguacagguuuggggagggggaagagaa

SEQ ID NO: 407417 - RNA, 32 nt, Human
cugggguagcacauagaaggcacauggcucag

SEQ ID NO: 407418 - RNA, 22 nt, Human
cugggguagcuccugccugcuc

SEQ ID NO: 407419 - RNA, 32 nt, Human
cugggguagggagacaggaaguagcaagcuuc

SEQ ID NO: 407420 - RNA, 32 nt, Human
cugggguagggagcagggcugggcaggcauuc

SEQ ID NO: 407421 - RNA, 32 nt, Human
cugggguagggaggaagagggugccggggaag

SEQ ID NO: 407422 - RNA, 32 nt, Human
cugggguagggugggggcgugcgagguuggau

SEQ ID NO: 407423 - RNA, 32 nt, Human
cugggguauauucaggcucauccacgcagcug

SEQ ID NO: 407424 - RNA, 32 nt, Human
cuggggucaagaaggaaaaugugugugagcau

SEQ ID NO: 407425 - RNA, 21 nt, Human
cuggggucaccuguguccuuu

SEQ ID NO: 407426 - RNA, 21 nt, Human
cuggggucagacugugccccg

SEQ ID NO: 407427 - RNA, 32 nt, Human
cuggggucagagaacccccaccaggaggguga

SEQ ID NO: 407428 - RNA, 25 nt, Human
cuggggucagcagaguucaaaacga

SEQ ID NO: 407429 - RNA, 24 nt, Human
cuggggucaggaaccucagaggag

SEQ ID NO: 407430 - RNA, 24 nt, Human
cuggggucaggaauauuugcaaga

SEQ ID NO: 407431 - RNA, 32 nt, Human
cuggggucaggaggaggcuggcuguagguaaa

SEQ ID NO: 407432 - RNA, 32 nt, Human
cuggggucaggaguucaaaaccagccuggcca

SEQ ID NO: 407433 - RNA, 21 nt, Human
cuggggucaggaguucaagac

SEQ ID NO: 407434 - RNA, 32 nt, Human
cuggggucaggaguucaagaccagccugccca

SEQ ID NO: 407435 - RNA, 32 nt, Human
cuggggucaggaguucgagaccagccugacca

SEQ ID NO: 407436 - RNA, 32 nt, Human
cuggggucaggaguuugagaccagccuggcca

SEQ ID NO: 407437 - RNA, 32 nt, Human
cuggggucaggauuucgagaccagccuggcca

SEQ ID NO: 407438 - RNA, 31 nt, Human
cuggggucagugagagaaaugggaaugguag

SEQ ID NO: 407439 - RNA, 32 nt, Human
cugggguccagcgcugcccccaccucaacucc

SEQ ID NO: 407440 - RNA, 32 nt, Human
cugggguccucauccuccuuguuggucuacuc

SEQ ID NO: 407441 - RNA, 32 nt, Human
cugggguccuccuauucuuuagguuuaauuuu

SEQ ID NO: 407442 - RNA, 32 nt, Human
cugggguccugccucuuucacuugcugaucug

SEQ ID NO: 407443 - RNA, 32 nt, Human
cugggguccuugagacagaggcaggacccucg

SEQ ID NO: 407444 - RNA, 32 nt, Human
cuggggucgccugggccacaggcacagcagcu

SEQ ID NO: 407445 - RNA, 32 nt, Human
cuggggucggggccagugcucuucucggagcu

SEQ ID NO: 407446 - RNA, 32 nt, Human
cuggggucucugagcaguggggagcgggggcu

SEQ ID NO: 407447 - RNA, 32 nt, Human
cuggggucucugcugcauuugugucaucuugu

SEQ ID NO: 407448 - RNA, 32 nt, Human
cuggggucucuuccucuccaggccuugccguc

SEQ ID NO: 407449 - RNA, 32 nt, Human
cuggggucuggcacagaggaggagcucucaaa

SEQ ID NO: 407450 - RNA, 32 nt, Human
cuggggucuggcuaccgcuaggaggcugagca

SEQ ID NO: 407451 - RNA, 32 nt, Human
cuggggugaaggccacugagagccagcaagug

SEQ ID NO: 407452 - RNA, 32 nt, Human
cuggggugagccacagacuacuguagacacgg

SEQ ID NO: 407453 - RNA, 22 nt, Human
cuggggugagggaguuagggag

SEQ ID NO: 407454 - RNA, 32 nt, Human
cuggggugaggguggcacccaggcagcugcau

SEQ ID NO: 407455 - RNA, 32 nt, Human
cuggggugagguggggagggaggcugcagggg

SEQ ID NO: 407456 - RNA, 32 nt, Human
cuggggugccuguagucccagcuacucgggag

SEQ ID NO: 407457 - RNA, 32 nt, Human
cugggguggaaccugguauggagggauuaacu

SEQ ID NO: 407458 - RNA, 32 nt, Human
cugggguggaaguaucuccugaggucaggagu

SEQ ID NO: 407459 - RNA, 32 nt, Human
cugggguggaagugggguaggggaagaggagg

SEQ ID NO: 407460 - RNA, 32 nt, Human
cugggguggcagagggcgagaggcucugugcu

SEQ ID NO: 407461 - RNA, 32 nt, Human
cugggguggccacugcagcaccugccacugcc

SEQ ID NO: 407462 - RNA, 32 nt, Human
cugggguggccccuccuguccucagggaucag

SEQ ID NO: 407463 - RNA, 32 nt, Human
cugggguggccuggcccuccuggcuguugcga

SEQ ID NO: 407464 - RNA, 32 nt, Human
cugggguggcuaggcaggaguggcguggggcc

SEQ ID NO: 407465 - RNA, 20 nt, Human
cuggggugggagaaggaagc

SEQ ID NO: 407466 - RNA, 32 nt, Human
cuggggugggagaaggaagcaggacagagcug

SEQ ID NO: 407467 - RNA, 20 nt, Human
cuggggugggaugaggaggc

SEQ ID NO: 407468 - RNA, 32 nt, Human
cuggggugggcgacagacaggagggcucccug

SEQ ID NO: 407469 - RNA, 32 nt, Human
cugggguggguauaccuggggcuggucuuagg

SEQ ID NO: 407470 - RNA, 31 nt, Human
cugggguggguggaaggggcaggaggguggc

SEQ ID NO: 407471 - RNA, 32 nt, Human
cugggguggugacagugccuggagaaugggug

SEQ ID NO: 407472 - RNA, 32 nt, Human
cuggggugucaccaagcaaggcuaccgcuguc

SEQ ID NO: 407473 - RNA, 32 nt, Human
cuggggugugaggacucugugcacaccuuaga

SEQ ID NO: 407474 - RNA, 32 nt, Human
cugggguucucugugugcaaagcuguccuuuu

SEQ ID NO: 407475 - RNA, 32 nt, Human
cugggguucuguuucaagcucagugcacaccu

SEQ ID NO: 407476 - RNA, 32 nt, Human
cugggguugcaaagucacuggccacauccagc

SEQ ID NO: 407477 - RNA, 32 nt, Human
cugggguuggccuccaucaccuccaggugaug

SEQ ID NO: 407478 - RNA, 32 nt, Human
cugggguugggagcuugggcaggccagcuuca

SEQ ID NO: 407479 - RNA, 17 nt, Human
cugggguuuccugcaag

SEQ ID NO: 407480 - RNA, 20 nt, Human
cugggguuucuggaugggaa

SEQ ID NO: 407481 - RNA, 17 nt, Human
cugggguuugggggaag

SEQ ID NO: 407482 - RNA, 32 nt, Human
cuggguaaaugacuaggugguaagguucugcc

SEQ ID NO: 407483 - RNA, 32 nt, Human
cuggguaaauguggauuaagggaaacaaacau

SEQ ID NO: 407484 - RNA, 32 nt, Human
cuggguaacaggcagagguugaaauaguuuga

SEQ ID NO: 407485 - RNA, 32 nt, Human
cuggguaacaggcagagguuggaacaguuugg

SEQ ID NO: 407486 - RNA, 32 nt, Human
cuggguaacagugguuaccaaugaggcaauac

SEQ ID NO: 407487 - RNA, 24 nt, Human
cuggguaacauggcaaaauccugu

SEQ ID NO: 407488 - RNA, 22 nt, Human
cuggguaacauggugaaauccc

SEQ ID NO: 407489 - RNA, 32 nt, Human
cuggguaacauggugaaaucccauaucuacaa

SEQ ID NO: 407490 - RNA, 32 nt, Human
cuggguaaccaccgaucagcacagcugucccc

SEQ ID NO: 407491 - RNA, 32 nt, Human
cuggguaaccuugagcuauguaugacacaacu

SEQ ID NO: 407492 - RNA, 32 nt, Human
cuggguaacuuccugauguugccauggcauuu

SEQ ID NO: 407493 - RNA, 21 nt, Human
cuggguaauauggcaaaaccc

SEQ ID NO: 407494 - RNA, 32 nt, Human
cuggguaccaaggacacaggcacagcagagcc

SEQ ID NO: 407495 - RNA, 24 nt, Human
cuggguaccugguccccacugcug

SEQ ID NO: 407496 - RNA, 32 nt, Human
cuggguacgcucagggagcaaaccugguuaag

SEQ ID NO: 407497 - RNA, 32 nt, Human
cuggguacuauguagagaagacagcugaggau

SEQ ID NO: 407498 - RNA, 32 nt, Human
cuggguacuuugugggucucucuuucgucggu

SEQ ID NO: 407499 - RNA, 32 nt, Human
cuggguagagggaugggaaggaagggacccuu

SEQ ID NO: 407500 - RNA, 24 nt, Human
cuggguagcagguuccuucuguug

SEQ ID NO: 407501 - RNA, 30 nt, Human
cuggguagccucucugagcugguuuccugc

SEQ ID NO: 407502 - RNA, 21 nt, Human
cuggguagcugggacuacagg

SEQ ID NO: 407503 - RNA, 21 nt, Human
cuggguagcugggauuacagg

SEQ ID NO: 407504 - RNA, 32 nt, Human
cuggguagggcugugcugaggggcugggcggg

SEQ ID NO: 407505 - RNA, 32 nt, Human
cuggguagguaaccuuccccugaaguccugcc

SEQ ID NO: 407506 - RNA, 22 nt, Human
cuggguagucacugccucccca

SEQ ID NO: 407507 - RNA, 32 nt, Human
cuggguagucuaccauuuacuucaccccaagu

SEQ ID NO: 407508 - RNA, 32 nt, Human
cuggguauggugcugggcuguugggagccgaa

SEQ ID NO: 407509 - RNA, 32 nt, Human
cuggguaugguggcacacgccuguaaucccag

SEQ ID NO: 407510 - RNA, 32 nt, Human
cuggguaugguggcacauaccuguagucccag

SEQ ID NO: 407511 - RNA, 32 nt, Human
cuggguaugguggcucaugccaguaauugcag

SEQ ID NO: 407512 - RNA, 32 nt, Human
cuggguaugguggcucaugccuguaaucccag

SEQ ID NO: 407513 - RNA, 32 nt, Human
cuggguauguuuuggaagugagugucacuacu

SEQ ID NO: 407514 - RNA, 32 nt, Human
cuggguauucuuuucaauccaucaaaggcucc

SEQ ID NO: 407515 - RNA, 32 nt, Human
cuggguauuguccuccuacaaggaagauccuc

SEQ ID NO: 407516 - RNA, 32 nt, Human
cugggucaaaggaccagucugcagagggaucc

SEQ ID NO: 407517 - RNA, 32 nt, Human
cugggucacccaggccacaaggccaugguuaa

SEQ ID NO: 407518 - RNA, 32 nt, Human
cugggucagaccugagguuggggaaggcgacu

SEQ ID NO: 407519 - RNA, 22 nt, Human
cugggucagagguguuccaggc

SEQ ID NO: 407520 - RNA, 32 nt, Human
cugggucaggcagcuguugugauuguuaguau

SEQ ID NO: 407521 - RNA, 32 nt, Human
cugggucaggguggggucaaguccagccuuga

SEQ ID NO: 407522 - RNA, 32 nt, Human
cugggucaucugccagccucccuacccccuug

SEQ ID NO: 407523 - RNA, 32 nt, Human
cugggucaugccauccuacaccaaauuccugu

SEQ ID NO: 407524 - RNA, 32 nt, Human
cugggucauuuuuagggugagguguagggggu

SEQ ID NO: 407525 - RNA, 32 nt, Human
cuggguccaagcaauuauugugccucagccuc

SEQ ID NO: 407526 - RNA, 32 nt, Human
cuggguccagccuugaucagugacagcgaagg

SEQ ID NO: 407527 - RNA, 32 nt, Human
cuggguccagcuagcagccacugggaaucaga

SEQ ID NO: 407528 - RNA, 32 nt, Human
cugggucccagcgauucuccugccucagccuc

SEQ ID NO: 407529 - RNA, 32 nt, Human
cugggucccaggagccuuaacaaggcauugag

SEQ ID NO: 407530 - RNA, 32 nt, Human
cugggucccauaacaucagaagugguugccga

SEQ ID NO: 407531 - RNA, 32 nt, Human
cuggguccccaguguucgcugugugugcguuu

SEQ ID NO: 407532 - RNA, 32 nt, Human
cuggguccccaucccuguugugguguauuugu

SEQ ID NO: 407533 - RNA, 32 nt, Human
cuggguccccgaggaggaggggacuggggucc

SEQ ID NO: 407534 - RNA, 32 nt, Human
cuggguccccuccuuucuuucacuuucagccc

SEQ ID NO: 407535 - RNA, 32 nt, Human
cugggucccuccucucaccucucccucgauca

SEQ ID NO: 407536 - RNA, 32 nt, Human
cugggucccugccuacacucguccugccugca

SEQ ID NO: 407537 - RNA, 32 nt, Human
cugggucccugccuccgcucugccccugggug

SEQ ID NO: 407538 - RNA, 32 nt, Human
cugggucccuuaggggccuugccaaggggacc

SEQ ID NO: 407539 - RNA, 32 nt, Human
cugggucccuuucagcggccucuagggcagga

SEQ ID NO: 407540 - RNA, 32 nt, Human
cuggguccgugccagcacaaucugccaaaguu

SEQ ID NO: 407541 - RNA, 32 nt, Human
cuggguccuagucccagcucuuccaugggauc

SEQ ID NO: 407542 - RNA, 32 nt, Human
cuggguccucuucugcccccagugcccuuccc

SEQ ID NO: 407543 - RNA, 32 nt, Human
cuggguccugagggagagcugcagugagaagu

SEQ ID NO: 407544 - RNA, 32 nt, Human
cuggguccuggagccuggaggaggaaugaggu

SEQ ID NO: 407545 - RNA, 32 nt, Human
cuggguccuuucucccuccgucugcuuccuuc

SEQ ID NO: 407546 - RNA, 32 nt, Human
cugggucgauggggucggauucugccaguuuc

SEQ ID NO: 407547 - RNA, 32 nt, Human
cugggucggggacacggugaagaggcuccagc

SEQ ID NO: 407548 - RNA, 32 nt, Human
cugggucggguggaggcugcugggucuguuuc

SEQ ID NO: 407549 - RNA, 32 nt, Human
cugggucgguggcggaggcugaggagaaggag

SEQ ID NO: 407550 - RNA, 32 nt, Human
cugggucuacagcccugagccccuccggcccc

SEQ ID NO: 407551 - RNA, 32 nt, Human
cugggucuagaaugggaacuggagaggacccu

SEQ ID NO: 407552 - RNA, 32 nt, Human
cugggucucagaugcaaccucagaccugauac

SEQ ID NO: 407553 - RNA, 32 nt, Human
cugggucucccgaguggcugggauuauaggcg

SEQ ID NO: 407554 - RNA, 32 nt, Human
cugggucucuuuccuauauaagaaauagaaau

SEQ ID NO: 407555 - RNA, 16 nt, Human
cugggucugcagcagc

SEQ ID NO: 407556 - RNA, 32 nt, Human
cugggucugcguucccuccccugggccugacu

SEQ ID NO: 407557 - RNA, 32 nt, Human
cugggucugcugucugagcagcuccuggcucc

SEQ ID NO: 407558 - RNA, 32 nt, Human
cugggucuggacuggcucuggcggauccccgc

SEQ ID NO: 407559 - RNA, 32 nt, Human
cugggucuggccagggcuuccucaaauacaug

SEQ ID NO: 407560 - RNA, 32 nt, Human
cugggucugguccaggugaggggcagggggca

SEQ ID NO: 407561 - RNA, 32 nt, Human
cugggucuuagagcagcacuguucuuuucccc

SEQ ID NO: 407562 - RNA, 32 nt, Human
cugggucuuagagcauguguguauucagucag

SEQ ID NO: 407563 - RNA, 32 nt, Human
cugggucuuggagacguggagaagaggaaugc

SEQ ID NO: 407564 - RNA, 32 nt, Human
cugggucuuucacccaggcuggagugcagugc

SEQ ID NO: 407565 - RNA, 20 nt, Human
cugggugaaggcuuugcuga

SEQ ID NO: 407566 - RNA, 32 nt, Human
cugggugaauccagcugacauguugugaggac

SEQ ID NO: 407567 - RNA, 32 nt, Human
cugggugacaagagcaagacuccgugucaaaa

SEQ ID NO: 407568 - RNA, 32 nt, Human
cugggugacacuccagccugggugacaaagga

SEQ ID NO: 407569 - RNA, 22 nt, Human
cugggugacagagcaaaacccu

SEQ ID NO: 407570 - RNA, 32 nt, Human
cugggugacagagcgagacuuaucucauaaau

SEQ ID NO: 407571 - RNA, 24 nt, Human
cugggugacauagcaagacccugu

SEQ ID NO: 407572 - RNA, 24 nt, Human
cugggugacauggugagaccuugu

SEQ ID NO: 407573 - RNA, 28 nt, Human
cugggugacauggugagaccuugucucc

SEQ ID NO: 407574 - RNA, 32 nt, Human
cugggugacucagagagggaagagauucagcc

SEQ ID NO: 407575 - RNA, 32 nt, Human
cugggugagauuaaggugcagggccugggggc

SEQ ID NO: 407576 - RNA, 24 nt, Human
cugggugagcuuuaggugcugcac

SEQ ID NO: 407577 - RNA, 32 nt, Human
cugggugaggcggcucacaccuguaaucccag

SEQ ID NO: 407578 - RNA, 32 nt, Human
cugggugagguggcucaugccuguaaucccag

SEQ ID NO: 407579 - RNA, 32 nt, Human
cugggugaguuagugccagauggaauuuaaag

SEQ ID NO: 407580 - RNA, 32 nt, Human
cugggugauacagaaugaauucuacacuuacu

SEQ ID NO: 407581 - RNA, 32 nt, Human
cugggugcaagcaauuauccugccucagccuc

SEQ ID NO: 407582 - RNA, 32 nt, Human
cugggugcaaugcaucacaccuguaaucccag

SEQ ID NO: 407583 - RNA, 32 nt, Human
cugggugcaauggcucacaccuguuaauccca

SEQ ID NO: 407584 - RNA, 32 nt, Human
cugggugcagaggcucauuccuguaaucccag

SEQ ID NO: 407585 - RNA, 17 nt, Human
cugggugcaggcucccu

SEQ ID NO: 407586 - RNA, 32 nt, Human
cugggugcaguggcucacaccuguaauaccag

SEQ ID NO: 407587 - RNA, 32 nt, Human
cugggugcaguggcucacaccuguaaucccag

SEQ ID NO: 407588 - RNA, 32 nt, Human
cugggugcaguggcucacaccuguaauccuag

SEQ ID NO: 407589 - RNA, 32 nt, Human
cugggugcaguggcucacaccuguaaucucaa

SEQ ID NO: 407590 - RNA, 32 nt, Human
cugggugcaguggcucacgccuguaauaucaa

SEQ ID NO: 407591 - RNA, 32 nt, Human
cugggugcaguggcucacgccuguaaucccaa

SEQ ID NO: 407592 - RNA, 32 nt, Human
cugggugcaguggcucacgccuguaaucccag

SEQ ID NO: 407593 - RNA, 32 nt, Human
cugggugcaguggcucaggccuguaaucccaa

SEQ ID NO: 407594 - RNA, 32 nt, Human
cugggugcaguggcucauaccuguaaucccag

SEQ ID NO: 407595 - RNA, 32 nt, Human
cugggugcaguggcucaugcccguaaucucag

SEQ ID NO: 407596 - RNA, 32 nt, Human
cugggugcaguggcucaugccuauaaucccag

SEQ ID NO: 407597 - RNA, 32 nt, Human
cugggugcaguggcucaugccuauaaucuuag

SEQ ID NO: 407598 - RNA, 32 nt, Human
cugggugcaguggcucaugccuguaaucccaa

SEQ ID NO: 407599 - RNA, 32 nt, Human
cugggugcaguggcucaugccuguaaucccag

SEQ ID NO: 407600 - RNA, 32 nt, Human
cugggugcaguggcucaugccuguaauuccaa

SEQ ID NO: 407601 - RNA, 32 nt, Human
cugggugcaguggcucgcaccuguaaucccag

SEQ ID NO: 407602 - RNA, 32 nt, Human
cugggugcaguggcucuugccuguaaucccag

SEQ ID NO: 407603 - RNA, 32 nt, Human
cugggugcagugguauauaccuguagucccag

SEQ ID NO: 407604 - RNA, 32 nt, Human
cugggugcagugguucacaccuguaauugcag

SEQ ID NO: 407605 - RNA, 32 nt, Human
cugggugcauucagucucucugccucugccug

SEQ ID NO: 407606 - RNA, 19 nt, Human
cugggugccagcuucgcca

SEQ ID NO: 407607 - RNA, 32 nt, Human
cugggugcccugcuggagguguggcugacuuu

SEQ ID NO: 407608 - RNA, 32 nt, Human
cugggugcccugggcccugccugcugccgugu

SEQ ID NO: 407609 - RNA, 23 nt, Human
cugggugccgcagaccaaacgcc

SEQ ID NO: 407610 - RNA, 32 nt, Human
cugggugccguggcucacaccuguaaucugag

SEQ ID NO: 407611 - RNA, 32 nt, Human
cugggugccguggcucacgccuguaaucccag

SEQ ID NO: 407612 - RNA, 32 nt, Human
cugggugccgugggucacgccuguaaucccag

SEQ ID NO: 407613 - RNA, 21 nt, Human
cugggugccuccuccuguccu

SEQ ID NO: 407614 - RNA, 32 nt, Human
cugggugccugaagcuauagugcaaugguucc

SEQ ID NO: 407615 - RNA, 32 nt, Human
cugggugccugccuggggcuuggggcucugua

SEQ ID NO: 407616 - RNA, 32 nt, Human
cugggugccuggguccgguggcugcaaagauc

SEQ ID NO: 407617 - RNA, 32 nt, Human
cugggugcgauggcucacgccuguaaucccgg

SEQ ID NO: 407618 - RNA, 32 nt, Human
cugggugcgauggugggugccuguaaucccag

SEQ ID NO: 407619 - RNA, 21 nt, Human
cugggugcgcugcugcugcug

SEQ ID NO: 407620 - RNA, 32 nt, Human
cugggugcgguagcucauaccuguaaucccag

SEQ ID NO: 407621 - RNA, 32 nt, Human
cugggugcggugacucaugccuguaaucccag

SEQ ID NO: 407622 - RNA, 32 nt, Human
cugggugcggugacucgcaccuguaaucccag

SEQ ID NO: 407623 - RNA, 32 nt, Human
cugggugcggugccucaugccuguaaucccag

SEQ ID NO: 407624 - RNA, 32 nt, Human
cugggugcgguggcacaugccuguaaucccag

SEQ ID NO: 407625 - RNA, 32 nt, Human
cugggugcgguggcucacaccuguaaucccag

SEQ ID NO: 407626 - RNA, 32 nt, Human
cugggugcgguggcucacgccuguaaucccaa

SEQ ID NO: 407627 - RNA, 32 nt, Human
cugggugcgguggcucacgccuguaaucccag

SEQ ID NO: 407628 - RNA, 32 nt, Human
cugggugcgguggcucaugcacguaaucccaa

SEQ ID NO: 407629 - RNA, 32 nt, Human
cugggugcgguggcucaugccuguaauccaac

SEQ ID NO: 407630 - RNA, 32 nt, Human
cugggugcgguggcucaugccuguaaucccag

SEQ ID NO: 407631 - RNA, 32 nt, Human
cugggugcgguggcucaugccuguaauccuag

SEQ ID NO: 407632 - RNA, 32 nt, Human
cugggugcgguggcucaugccugugaucccag

SEQ ID NO: 407633 - RNA, 32 nt, Human
cugggugcgguggcucaugucuguaaucccag

SEQ ID NO: 407634 - RNA, 32 nt, Human
cugggugcggugucucacaccuguaaucccag

SEQ ID NO: 407635 - RNA, 32 nt, Human
cugggugcggugucucaugccuguaaucccag

SEQ ID NO: 407636 - RNA, 32 nt, Human
cugggugcuacuuauagacccaaucagaauac

SEQ ID NO: 407637 - RNA, 32 nt, Human
cugggugcucacugggacccuggaaaggucua

SEQ ID NO: 407638 - RNA, 32 nt, Human
cugggugcucauggaaucagcugcugcccugc

SEQ ID NO: 407639 - RNA, 32 nt, Human
cugggugcucccuggaagauggaucuugccuu

SEQ ID NO: 407640 - RNA, 32 nt, Human
cugggugcuccuggcccuaauugugcacccug

SEQ ID NO: 407641 - RNA, 32 nt, Human
cugggugcuguaccaggcagggugcugggcau

SEQ ID NO: 407642 - RNA, 32 nt, Human
cugggugcuguggcucacgccuguaaucccag

SEQ ID NO: 407643 - RNA, 32 nt, Human
cugggugcuguggcucaugccuguaaucccag

SEQ ID NO: 407644 - RNA, 32 nt, Human
cugggugcuuuuccuccaguuugcuggcuggc

SEQ ID NO: 407645 - RNA, 32 nt, Human
cuggguggaaggccaugaaccaggcugucgaa

SEQ ID NO: 407646 - RNA, 32 nt, Human
cuggguggacacuuaggagcugccuggacugc

SEQ ID NO: 407647 - RNA, 32 nt, Human
cuggguggacuuugggaccugcuuugugagcc

SEQ ID NO: 407648 - RNA, 32 nt, Human
cuggguggagagcugacccaggaagggcugca

SEQ ID NO: 407649 - RNA, 32 nt, Human
cuggguggaggaagaagugguggagccucagg

SEQ ID NO: 407650 - RNA, 32 nt, Human
cuggguggaggggccuuugugaggcuggaccc

SEQ ID NO: 407651 - RNA, 32 nt, Human
cuggguggaguggcucauaccuguaaucccag

SEQ ID NO: 407652 - RNA, 32 nt, Human
cuggguggcacugaggugaugaugacacuauu

SEQ ID NO: 407653 - RNA, 32 nt, Human
cuggguggcagaggagauaaacagccaugugc

SEQ ID NO: 407654 - RNA, 24 nt, Human
cuggguggcaugugacaggccuga

SEQ ID NO: 407655 - RNA, 32 nt, Human
cuggguggccccauccuaccaggcccugaggu

SEQ ID NO: 407656 - RNA, 32 nt, Human
cuggguggcccugccauauucuuccucccgcc

SEQ ID NO: 407657 - RNA, 25 nt, Human
cuggguggccgaaaucaccaggguc

SEQ ID NO: 407658 - RNA, 30 nt, Human
cuggguggccucuccaagcccugguggugc

SEQ ID NO: 407659 - RNA, 19 nt, Human
cuggguggcucuggggcca

SEQ ID NO: 407660 - RNA, 32 nt, Human
cuggguggcuuccagacggaccgggcagcccc

SEQ ID NO: 407661 - RNA, 32 nt, Human
cugggugggaaugugacuugagcccagaguga

SEQ ID NO: 407662 - RNA, 32 nt, Human
cugggugggagcggggaguccuggugagaccc

SEQ ID NO: 407663 - RNA, 32 nt, Human
cugggugggaggcugucacacugugguggagg

SEQ ID NO: 407664 - RNA, 17 nt, Human
cugggugggcagagguu

SEQ ID NO: 407665 - RNA, 32 nt, Human
cugggugggcaggacacguggugggggccacu

SEQ ID NO: 407666 - RNA, 32 nt, Human
cugggugggcaggcacccggaggaggagcagc

SEQ ID NO: 407667 - RNA, 18 nt, Human
cugggugggccacaggga

SEQ ID NO: 407668 - RNA, 23 nt, Human
cugggugggcuggggcggaagug

SEQ ID NO: 407669 - RNA, 32 nt, Human
cugggugggcuucaggcuggggcugcagacuc

SEQ ID NO: 407670 - RNA, 32 nt, Human
cuggguggggacugggcugugcccagggccuc

SEQ ID NO: 407671 - RNA, 32 nt, Human
cuggguggggagguguggguucccugggccaa

SEQ ID NO: 407672 - RNA, 21 nt, Human
cuggguggggcagaggccagg

SEQ ID NO: 407673 - RNA, 22 nt, Human
cugggugggggacagagccaga

SEQ ID NO: 407674 - RNA, 32 nt, Human
cugggugggguggggugguucaaauggaugac

SEQ ID NO: 407675 - RNA, 32 nt, Human
cuggguggguagggggcugcuugaguguggcc

SEQ ID NO: 407676 - RNA, 20 nt, Human
cugggugggugaaaggggcc

SEQ ID NO: 407677 - RNA, 32 nt, Human
cugggugggugaggggcgcgcggauccggaga

SEQ ID NO: 407678 - RNA, 32 nt, Human
cuggguggguggggaugccuguuuacacuagc

SEQ ID NO: 407679 - RNA, 32 nt, Human
cuggguggucggccucacaugggaaggagaug

SEQ ID NO: 407680 - RNA, 32 nt, Human
cuggguggugaggcccuguggugaggagcagg

SEQ ID NO: 407681 - RNA, 32 nt, Human
cuggguguaaacuugauuuucuuuauugagau

SEQ ID NO: 407682 - RNA, 32 nt, Human
cuggguguaacggcggaugccuguaaucccag

SEQ ID NO: 407683 - RNA, 32 nt, Human
cuggguguaguggaugccagucuuguugcugu

SEQ ID NO: 407684 - RNA, 32 nt, Human
cuggguguaguggcuuaugccuguaaucccag

SEQ ID NO: 407685 - RNA, 32 nt, Human
cuggguguaguggugcacaccuguaaucccag

SEQ ID NO: 407686 - RNA, 32 nt, Human
cugggugucacguuuucagccaaacaucuaaa

SEQ ID NO: 407687 - RNA, 32 nt, Human
cugggugucgcucuccccuccugcaggucagc

SEQ ID NO: 407688 - RNA, 32 nt, Human
cugggugucugggaacugccucccucaucugu

SEQ ID NO: 407689 - RNA, 32 nt, Human
cugggugucuggugccuggaacagacuucccu

SEQ ID NO: 407690 - RNA, 32 nt, Human
cugggugugagaugggaccaggaaucuuauuu

SEQ ID NO: 407691 - RNA, 32 nt, Human
cugggugugauggcacacaucuauagucccag

SEQ ID NO: 407692 - RNA, 32 nt, Human
cugggugugauggcgcaugccuguaaucccag

SEQ ID NO: 407693 - RNA, 32 nt, Human
cugggugugauggcucacgccuguaaucccag

SEQ ID NO: 407694 - RNA, 32 nt, Human
cugggugugauggcucaugcccauaaucccag

SEQ ID NO: 407695 - RNA, 32 nt, Human
cugggugugaugggcaccgaggccaaccccuc

SEQ ID NO: 407696 - RNA, 32 nt, Human
cugggugugcgaguguccaucuguccacaugg

SEQ ID NO: 407697 - RNA, 32 nt, Human
cugggugugcuggugcaugccuguaaucucag

SEQ ID NO: 407698 - RNA, 22 nt, Human
cugggugugcuggugcuggcgc

SEQ ID NO: 407699 - RNA, 32 nt, Human
cuggguguggaggcucacaccuguaaucucag

SEQ ID NO: 407700 - RNA, 26 nt, Human
cuggguguggcccggugguggugcac

SEQ ID NO: 407701 - RNA, 32 nt, Human
cuggguguggucuccacuggggauugggcccc

SEQ ID NO: 407702 - RNA, 32 nt, Human
cuggguguggugccacaugccuguaauuccag

SEQ ID NO: 407703 - RNA, 32 nt, Human
cugggugugguggcacacaccuguaaucccag

SEQ ID NO: 407704 - RNA, 32 nt, Human
cugggugugguggcacaugccuguaauaucag

SEQ ID NO: 407705 - RNA, 32 nt, Human
cugggugugguggcacaugccuguaaucccag

SEQ ID NO: 407706 - RNA, 32 nt, Human
cugggugugguggcacaugccuguaaucgcag

SEQ ID NO: 407707 - RNA, 32 nt, Human
cugggugugguggcacgugccuguaaucucag

SEQ ID NO: 407708 - RNA, 32 nt, Human
cugggugugguggcgcauaccugugguuccag

SEQ ID NO: 407709 - RNA, 32 nt, Human
cugggugugguggcgcaugccuguaaucccag

SEQ ID NO: 407710 - RNA, 32 nt, Human
cugggugugguggcgcaugccuguaauccuag

SEQ ID NO: 407711 - RNA, 32 nt, Human
cugggugugguggcgcgugccuguaaucccag

SEQ ID NO: 407712 - RNA, 32 nt, Human
cugggugugguggcucacaccuguaaucccag

SEQ ID NO: 407713 - RNA, 32 nt, Human
cugggugugguggcucacgccuguaaucccag

SEQ ID NO: 407714 - RNA, 32 nt, Human
cugggugugguggcucacgccuguaaucccua

SEQ ID NO: 407715 - RNA, 32 nt, Human
cugggugugguggcucacgccuguaauccuag

SEQ ID NO: 407716 - RNA, 32 nt, Human
cugggugugguggcucacgccuguaaucgcgg

SEQ ID NO: 407717 - RNA, 32 nt, Human
cugggugugguggcucauaccuguaaucccag

SEQ ID NO: 407718 - RNA, 32 nt, Human
cugggugugguggcucaugcauguaaucccag

SEQ ID NO: 407719 - RNA, 32 nt, Human
cugggugugguggcucaugccuguaaucccag

SEQ ID NO: 407720 - RNA, 32 nt, Human
cugggugugguggugcaugccuguaaucccag

SEQ ID NO: 407721 - RNA, 32 nt, Human
cugggugugguggugcgugccuguaaucccaa

SEQ ID NO: 407722 - RNA, 32 nt, Human
cuggguguguuggcacgugccuguaaucccag

SEQ ID NO: 407723 - RNA, 32 nt, Human
cuggguguuggggguagugggaggagaacggu

SEQ ID NO: 407724 - RNA, 32 nt, Human
cuggguguuguggugcgcaccuguaauuccag

SEQ ID NO: 407725 - RNA, 32 nt, Human
cuggguguuguucaaaguuucuccccauguga

SEQ ID NO: 407726 - RNA, 32 nt, Human
cuggguuaacaguaaauauacacuuuacauuc

SEQ ID NO: 407727 - RNA, 32 nt, Human
cuggguuaggaacagacggaucagggcuucua

SEQ ID NO: 407728 - RNA, 32 nt, Human
cuggguuauccaggucccauugagugguuuuc

SEQ ID NO: 407729 - RNA, 32 nt, Human
cuggguucaaacaauucucaugccucagccuc

SEQ ID NO: 407730 - RNA, 32 nt, Human
cuggguucaaacaauucuccugccucagccuc

SEQ ID NO: 407731 - RNA, 32 nt, Human
cuggguucaaaccauucuccugccucagccuc

SEQ ID NO: 407732 - RNA, 32 nt, Human
cuggguucaaacgauucuccugccucagccuc

SEQ ID NO: 407733 - RNA, 32 nt, Human
cuggguucaaacgauuguccugccucagccuc

SEQ ID NO: 407734 - RNA, 32 nt, Human
cuggguucaaacucugcauccuucucuaacaa

SEQ ID NO: 407735 - RNA, 32 nt, Human
cuggguucaagaaauccucccaccuugccucc

SEQ ID NO: 407736 - RNA, 32 nt, Human
cuggguucaagaaauucuccugccuuagccuc

SEQ ID NO: 407737 - RNA, 26 nt, Human
cuggguucaagagauccauccuccca

SEQ ID NO: 407738 - RNA, 32 nt, Human
cuggguucaagcaaaucuccugccucagccuc

SEQ ID NO: 407739 - RNA, 32 nt, Human
cuggguucaagcaagucuccugccucagccuc

SEQ ID NO: 407740 - RNA, 32 nt, Human
cuggguucaagcaauccucccaccucggccuc

SEQ ID NO: 407741 - RNA, 32 nt, Human
cuggguucaagcaauccucccaccugugccuc

SEQ ID NO: 407742 - RNA, 32 nt, Human
cuggguucaagcaauccuccugccucagccuc

SEQ ID NO: 407743 - RNA, 32 nt, Human
cuggguucaagcaauccuccugccuuauccuc

SEQ ID NO: 407744 - RNA, 32 nt, Human
cuggguucaagcaauucuaccucagucuccug

SEQ ID NO: 407745 - RNA, 32 nt, Human
cuggguucaagcaauucucaugccucaguccc

SEQ ID NO: 407746 - RNA, 32 nt, Human
cuggguucaagcaauucucaugccucugccuc

SEQ ID NO: 407747 - RNA, 32 nt, Human
cuggguucaagcaauucuccagccucagccuc

SEQ ID NO: 407748 - RNA, 32 nt, Human
cuggguucaagcaauucuccagccucugccuc

SEQ ID NO: 407749 - RNA, 32 nt, Human
cuggguucaagcaauucucccaccucagcugg

SEQ ID NO: 407750 - RNA, 32 nt, Human
cuggguucaagcaauucuccuaccucagccuc

SEQ ID NO: 407751 - RNA, 32 nt, Human
cuggguucaagcaauucuccuaccucagcuuc

SEQ ID NO: 407752 - RNA, 32 nt, Human
cuggguucaagcaauucuccugccgcagccuc

SEQ ID NO: 407753 - RNA, 32 nt, Human
cuggguucaagcaauucuccugccucagccuc

SEQ ID NO: 407754 - RNA, 32 nt, Human
cuggguucaagcaauucuccugccucagcuuc

SEQ ID NO: 407755 - RNA, 32 nt, Human
cuggguucaagcaauucuccugccucaggcuc

SEQ ID NO: 407756 - RNA, 32 nt, Human
cuggguucaagcaauucuccugccuuagccuc

SEQ ID NO: 407757 - RNA, 32 nt, Human
cuggguucaagcaauucuccugucucagccuc

SEQ ID NO: 407758 - RNA, 32 nt, Human
cuggguucaagcaauucuccuucuucagccuc

SEQ ID NO: 407759 - RNA, 32 nt, Human
cuggguucaagcaauucucugccucagccucc

SEQ ID NO: 407760 - RNA, 32 nt, Human
cuggguucaagcaauucucuggggcagcaguu

SEQ ID NO: 407761 - RNA, 32 nt, Human
cuggguucaagcaauucuguggcuucagccuc

SEQ ID NO: 407762 - RNA, 32 nt, Human
cuggguucaagcaauucuucugacucagccuc

SEQ ID NO: 407763 - RNA, 32 nt, Human
cuggguucaagcaauucuucugccucagccuc

SEQ ID NO: 407764 - RNA, 32 nt, Human
cuggguucaagcaauucuucugccucagccuu

SEQ ID NO: 407765 - RNA, 32 nt, Human
cuggguucaagcaauucuugugccucagccuc

SEQ ID NO: 407766 - RNA, 32 nt, Human
cuggguucaagcaauuguccugccccagccuc

SEQ ID NO: 407767 - RNA, 32 nt, Human
cuggguucaagcaauuuuccugccucagccuc

SEQ ID NO: 407768 - RNA, 32 nt, Human
cuggguucaagcaauuuucuugccucagccuc

SEQ ID NO: 407769 - RNA, 32 nt, Human
cuggguucaagcagucuuccugccuuggccuc

SEQ ID NO: 407770 - RNA, 32 nt, Human
cuggguucaagcaguucucccgccucagccuc

SEQ ID NO: 407771 - RNA, 32 nt, Human
cuggguucaagcaguucuccugccucagccuc

SEQ ID NO: 407772 - RNA, 32 nt, Human
cuggguucaagcaguucucgugccgcagccuc

SEQ ID NO: 407773 - RNA, 32 nt, Human
cuggguucaagcaguucucgugccucccugag

SEQ ID NO: 407774 - RNA, 32 nt, Human
cuggguucaagcaguucucuugccucagccuc

SEQ ID NO: 407775 - RNA, 32 nt, Human
cuggguucaagcaguucuuccccaucagccuc

SEQ ID NO: 407776 - RNA, 32 nt, Human
cuggguucaagcauuucuccugccucagccuc

SEQ ID NO: 407777 - RNA, 32 nt, Human
cuggguucaagccauccucccaccucagccuc

SEQ ID NO: 407778 - RNA, 32 nt, Human
cuggguucaagccauucucugccucagccuuc

SEQ ID NO: 407779 - RNA, 32 nt, Human
cuggguucaagcgauccucccacuucagccuu

SEQ ID NO: 407780 - RNA, 32 nt, Human
cuggguucaagcgauccuccugccucagcccc

SEQ ID NO: 407781 - RNA, 32 nt, Human
cuggguucaagcgauucacccaccucagccuc

SEQ ID NO: 407782 - RNA, 32 nt, Human
cuggguucaagcgauuccugugccucggccuu

SEQ ID NO: 407783 - RNA, 32 nt, Human
cuggguucaagcgauucucccaccccagccuc

SEQ ID NO: 407784 - RNA, 32 nt, Human
cuggguucaagcgauucuccuaccucagccuc

SEQ ID NO: 407785 - RNA, 32 nt, Human
cuggguucaagcgauucuccuaccucagcuuc

SEQ ID NO: 407786 - RNA, 32 nt, Human
cuggguucaagcgauucuccugccucugccuc

SEQ ID NO: 407787 - RNA, 32 nt, Human
cuggguucaagcgauucucgugccucagccuc

SEQ ID NO: 407788 - RNA, 32 nt, Human
cuggguucaagcgauucuugugccucaaccuc

SEQ ID NO: 407789 - RNA, 32 nt, Human
cuggguucaagcgauucuugugccucagccuc

SEQ ID NO: 407790 - RNA, 32 nt, Human
cuggguucaagcgcuucuccugccucagccuc

SEQ ID NO: 407791 - RNA, 32 nt, Human
cuggguucaagggauccucccaccucagccuc

SEQ ID NO: 407792 - RNA, 32 nt, Human
cuggguucaagggauccucccgccucagccuc

SEQ ID NO: 407793 - RNA, 32 nt, Human
cuggguucaaguaacccucccaccucagcuuu

SEQ ID NO: 407794 - RNA, 32 nt, Human
cuggguucaaguaauccucccaccucagccuc

SEQ ID NO: 407795 - RNA, 32 nt, Human
cuggguucaaguaauucuccugccucagcuuu

SEQ ID NO: 407796 - RNA, 32 nt, Human
cuggguucaagugacccucccaccucagccuc

SEQ ID NO: 407797 - RNA, 32 nt, Human
cuggguucaagugacucuugugccucagccuc

SEQ ID NO: 407798 - RNA, 32 nt, Human
cuggguucaagugauccucccaccucagcuuc

SEQ ID NO: 407799 - RNA, 32 nt, Human
cuggguucaagugauucucccaccucaaccuc

SEQ ID NO: 407800 - RNA, 32 nt, Human
cuggguucacacacaagcugagaugagaagag

SEQ ID NO: 407801 - RNA, 32 nt, Human
cuggguucacaccauucuccugccucagccuc

SEQ ID NO: 407802 - RNA, 32 nt, Human
cuggguucacaucauucuccugccucagccuc

SEQ ID NO: 407803 - RNA, 32 nt, Human
cuggguucacgcaauucuccugccucagccuc

SEQ ID NO: 407804 - RNA, 32 nt, Human
cuggguucacgccauccuccugccucggccuc

SEQ ID NO: 407805 - RNA, 32 nt, Human
cuggguucacgccauucucccaccucagcuuc

SEQ ID NO: 407806 - RNA, 32 nt, Human
cuggguucacgccauucucccgccucagccuc

SEQ ID NO: 407807 - RNA, 32 nt, Human
cuggguucacgccauucuccugccucagccuc

SEQ ID NO: 407808 - RNA, 32 nt, Human
cuggguucacgccauucuccugccucagcuac

SEQ ID NO: 407809 - RNA, 32 nt, Human
cuggguucacgccauucuccugccucagcuuc

SEQ ID NO: 407810 - RNA, 32 nt, Human
cuggguucacucccacuucauccuggcugaaa

SEQ ID NO: 407811 - RNA, 32 nt, Human
cuggguucacugcaaccuccgccucuuggguu

SEQ ID NO: 407812 - RNA, 32 nt, Human
cuggguucacugcaaccucugccuccagguuc

SEQ ID NO: 407813 - RNA, 32 nt, Human
cuggguucacugcaaccucugccuccugggcu

SEQ ID NO: 407814 - RNA, 32 nt, Human
cuggguucaggcaauucucccaccucagccuc

SEQ ID NO: 407815 - RNA, 32 nt, Human
cuggguucaggugauucuccuaccucagccuc

SEQ ID NO: 407816 - RNA, 32 nt, Human
cuggguucaguauuuccuggcacagcacuuug

SEQ ID NO: 407817 - RNA, 32 nt, Human
cuggguucaugccauucuccugccucagccuc

SEQ ID NO: 407818 - RNA, 32 nt, Human
cuggguucaugccauucuccugccucagucuc

SEQ ID NO: 407819 - RNA, 32 nt, Human
cuggguucaugccauucuccugccucggccuu

SEQ ID NO: 407820 - RNA, 32 nt, Human
cuggguucaugccauucuccugcuucagccuc

SEQ ID NO: 407821 - RNA, 32 nt, Human
cuggguucaugccauuuuccugccucagccuc

SEQ ID NO: 407822 - RNA, 32 nt, Human
cuggguucauuucugcccucaucugcugugca

SEQ ID NO: 407823 - RNA, 32 nt, Human
cuggguuccagcaauucuccugccucagccuc

SEQ ID NO: 407824 - RNA, 32 nt, Human
cuggguuccaucucugucuccagccugcccac

SEQ ID NO: 407825 - RNA, 32 nt, Human
cuggguucgaacgauucuccugccucagccuc

SEQ ID NO: 407826 - RNA, 32 nt, Human
cuggguucgagcgauucuccuaccucagccuc

SEQ ID NO: 407827 - RNA, 32 nt, Human
cuggguucgagugauucuccugccucagccuc

SEQ ID NO: 407828 - RNA, 32 nt, Human
cuggguucgggugauucuccugccucagccuc

SEQ ID NO: 407829 - RNA, 22 nt, Human
cuggguucuagucccugcucug

SEQ ID NO: 407830 - RNA, 32 nt, Human
cuggguucuccccaagacuaaguucuuuccca

SEQ ID NO: 407831 - RNA, 32 nt, Human
cuggguucucugugcugggcaggcucucgugg

SEQ ID NO: 407832 - RNA, 32 nt, Human
cuggguucugcagagcuggagcucgucccugu

SEQ ID NO: 407833 - RNA, 32 nt, Human
cuggguucugugagcagagagguccauccuac

SEQ ID NO: 407834 - RNA, 32 nt, Human
cuggguucuuccacagcacaaacacaccucaa

SEQ ID NO: 407835 - RNA, 32 nt, Human
cuggguucuugggagagaggggaagagucggg

SEQ ID NO: 407836 - RNA, 32 nt, Human
cuggguugaagcaauucuucugccucagccuc

SEQ ID NO: 407837 - RNA, 32 nt, Human
cuggguugaagcgauucuugugccucagcuuc

SEQ ID NO: 407838 - RNA, 32 nt, Human
cuggguuggaaacacuuggcucucucaugagu

SEQ ID NO: 407839 - RNA, 32 nt, Human
cuggguuggcgggcuggcaggcuguagccgag

SEQ ID NO: 407840 - RNA, 32 nt, Human
cuggguugggauuacaggcgugagccaccgcg

SEQ ID NO: 407841 - RNA, 32 nt, Human
cuggguugggcugguggauguggggccuggga

SEQ ID NO: 407842 - RNA, 32 nt, Human
cuggguuggggaggcagggagcuagggcaggg

SEQ ID NO: 407843 - RNA, 32 nt, Human
cuggguugggggcucccuuagccgggccccca

SEQ ID NO: 407844 - RNA, 32 nt, Human
cuggguuggggugcuuucugcccagugggucu

SEQ ID NO: 407845 - RNA, 32 nt, Human
cuggguuggguccuggcgaaacagucuagagg

SEQ ID NO: 407846 - RNA, 32 nt, Human
cuggguuuaagcaauucuccugccucagccuc

SEQ ID NO: 407847 - RNA, 28 nt, Human
cuggguuuaagccauucuccuaccucag

SEQ ID NO: 407848 - RNA, 22 nt, Human
cuggguuuacaggcaugagcca

SEQ ID NO: 407849 - RNA, 32 nt, Human
cuggguuuagucucaauuuugguuaucuuugu

SEQ ID NO: 407850 - RNA, 32 nt, Human
cuggguuucagcaauucuccugccucagccuc

SEQ ID NO: 407851 - RNA, 32 nt, Human
cuggguuucaugagcuuggacagcaaggugga

SEQ ID NO: 407852 - RNA, 32 nt, Human
cuggguuuccuugagugucauauguccuagaa

SEQ ID NO: 407853 - RNA, 32 nt, Human
cuggguuucuagucauccuuuuuaagcugcaa

SEQ ID NO: 407854 - RNA, 32 nt, Human
cuggguuucugacuuuuuauuuggccaaugag

SEQ ID NO: 407855 - RNA, 32 nt, Human
cuggguuugagcaauccucccaccucagccuc

SEQ ID NO: 407856 - RNA, 32 nt, Human
cuggguuugagccucguucugccguuuacuag

SEQ ID NO: 407857 - RNA, 32 nt, Human
cuggguuugggcaguggagaggggacuuggau

SEQ ID NO: 407858 - RNA, 32 nt, Human
cuggguuuguaguggagugggguuguaacuug

SEQ ID NO: 407859 - RNA, 32 nt, Human
cuggguuuuaccacugcacgaccaucuggcuc

SEQ ID NO: 407860 - RNA, 32 nt, Human
cuggguuuuggagccucccuucugccuuggcu

SEQ ID NO: 407861 - RNA, 32 nt, Human
cuggguuuuguagcauuuuuauuaauauggug

SEQ ID NO: 407862 - RNA, 32 nt, Human
cugguaaaaauguucuccccuucuguggauug

SEQ ID NO: 407863 - RNA, 32 nt, Human
cugguaaaacccaggaaguaugcaguacgucu

SEQ ID NO: 407864 - RNA, 32 nt, Human
cugguaaaagccucuauuacgacuguaaguaa

SEQ ID NO: 407865 - RNA, 32 nt, Human
cugguaaaagccucuauuacgacuguuaaguu

SEQ ID NO: 407866 - RNA, 32 nt, Human
cugguaaacccagcugggagguuucuaggcag

SEQ ID NO: 407867 - RNA, 32 nt, Human
cugguaaagcagcggccagggggagccgugag

SEQ ID NO: 407868 - RNA, 32 nt, Human
cugguaaagccgaacuccuaaccucaggugcc

SEQ ID NO: 407869 - RNA, 32 nt, Human
cugguaaauguaggagagaauuaagaaucugu

SEQ ID NO: 407870 - RNA, 32 nt, Human
cugguaacacacaguugugaaaagccaguguu

SEQ ID NO: 407871 - RNA, 21 nt, Human
cugguaacagcuuuuguggga

SEQ ID NO: 407872 - RNA, 21 nt, Human
cugguaacaggauuugcugug

SEQ ID NO: 407873 - RNA, 32 nt, Human
cugguaacaggcugggugcaauggcucacacc

SEQ ID NO: 407874 - RNA, 32 nt, Human
cugguaacauaaaagcaguucaguggcccaga

SEQ ID NO: 407875 - RNA, 32 nt, Human
cugguaacauuuccuuggacauggagcucucu

SEQ ID NO: 407876 - RNA, 32 nt, Human
cugguaaccaucauaguaauaauuguucaaac

SEQ ID NO: 407877 - RNA, 31 nt, Human
cugguaacugcgguuucagccaacacucuuc

SEQ ID NO: 407878 - RNA, 32 nt, Human
cugguaagggcugagccgugggcacaggauac

SEQ ID NO: 407879 - RNA, 32 nt, Human
cugguaaggucaugggggaagggagaugagag

SEQ ID NO: 407880 - RNA, 32 nt, Human
cugguaaguaugugcuuuucuguggggguggg

SEQ ID NO: 407881 - RNA, 32 nt, Human
cugguaagucgcguuccuccccuaccccgccc

SEQ ID NO: 407882 - RNA, 32 nt, Human
cugguaaucccagcuacucagguggcugaggc

SEQ ID NO: 407883 - RNA, 32 nt, Human
cugguaaucccagcuacucaugaggcugaggc

SEQ ID NO: 407884 - RNA, 32 nt, Human
cugguaaugccagcaaccaaucagacaccacc

SEQ ID NO: 407885 - RNA, 32 nt, Human
cugguacagaaggcagaguugguacggcuguc

SEQ ID NO: 407886 - RNA, 32 nt, Human
cugguacaugccaccaggccuggccaaguuuu

SEQ ID NO: 407887 - RNA, 32 nt, Human
cugguaccaaauaguugggauuaccgaagagu

SEQ ID NO: 407888 - RNA, 32 nt, Human
cugguaccaacuccucuauugcaggguauggu

SEQ ID NO: 407889 - RNA, 32 nt, Human
cugguaccaguucuguaccauaugagaaaguu

SEQ ID NO: 407890 - RNA, 32 nt, Human
cugguacccagccugccuaacaagggagaauu

SEQ ID NO: 407891 - RNA, 32 nt, Human
cugguacccaggccuggagcagcgguacaggc

SEQ ID NO: 407892 - RNA, 32 nt, Human
cugguacccuguggggcaaccucuccaguucc

SEQ ID NO: 407893 - RNA, 32 nt, Human
cugguaccuccccuccauuauagcucucuccu

SEQ ID NO: 407894 - RNA, 32 nt, Human
cugguaccucuugcaacucucuucuaaggauc

SEQ ID NO: 407895 - RNA, 32 nt, Human
cugguacgcuggcugcuaccucccucacucuu

SEQ ID NO: 407896 - RNA, 32 nt, Human
cugguacggccuugucuucaggucucgaggcc

SEQ ID NO: 407897 - RNA, 31 nt, Human
cugguacggguggaaugggggugagacacca

SEQ ID NO: 407898 - RNA, 32 nt, Human
cugguacucaggcuggagugcgguggugugau

SEQ ID NO: 407899 - RNA, 32 nt, Human
cugguacucccaggaggcugcgggucgaugcu

SEQ ID NO: 407900 - RNA, 32 nt, Human
cugguacucccccagcccucaguuuucaguca

SEQ ID NO: 407901 - RNA, 32 nt, Human
cugguacucucaguguguucuggucaucuugu

SEQ ID NO: 407902 - RNA, 32 nt, Human
cugguacuggcucuuuucuccucuuuccuugc

SEQ ID NO: 407903 - RNA, 32 nt, Human
cugguacugggugggcaccugggagccacagg

SEQ ID NO: 407904 - RNA, 32 nt, Human
cugguacuuggcucucagccuggaguggcagc

SEQ ID NO: 407905 - RNA, 32 nt, Human
cugguacuuguccacccugccuccucuguucu

SEQ ID NO: 407906 - RNA, 22 nt, Human
cugguagaaggaagagaggcaa

SEQ ID NO: 407907 - RNA, 23 nt, Human
cugguagacaccaagcugcugug

SEQ ID NO: 407908 - RNA, 32 nt, Human
cugguagagacaggguuucaccaugcuagcaa

SEQ ID NO: 407909 - RNA, 32 nt, Human
cugguagagagucggccgggugcacuggcuca

SEQ ID NO: 407910 - RNA, 23 nt, Human
cugguagagccacaucugaugug

SEQ ID NO: 407911 - RNA, 24 nt, Human
cugguagagccugggcuugcugug

SEQ ID NO: 407912 - RNA, 21 nt, Human
cugguagaggcucuagcugug

SEQ ID NO: 407913 - RNA, 32 nt, Human
cugguagcagccugucacuccagacuguccuc

SEQ ID NO: 407914 - RNA, 32 nt, Human
cugguagccauuuaauuccucccccuaccccc

SEQ ID NO: 407915 - RNA, 32 nt, Human
cugguagcugagacugcaugcccagcuccaaa

SEQ ID NO: 407916 - RNA, 32 nt, Human
cugguagcugggauuacagggaaggaaaauag

SEQ ID NO: 407917 - RNA, 32 nt, Human
cugguagcuuccucuucaacagccacuuccgu

SEQ ID NO: 407918 - RNA, 32 nt, Human
cugguaggagagagacaggacagacccgcuuu

SEQ ID NO: 407919 - RNA, 32 nt, Human
cugguaggccgaggcaggagaaucacuugaac

SEQ ID NO: 407920 - RNA, 32 nt, Human
cugguaggcugaugccgcguccacuacuagga

SEQ ID NO: 407921 - RNA, 32 nt, Human
cugguaggguaagggagagggacccugccggu

SEQ ID NO: 407922 - RNA, 32 nt, Human
cugguagggucugccuguuggaaaguguaccu

SEQ ID NO: 407923 - RNA, 32 nt, Human
cugguagugauguauauuuuacauuugucauu

SEQ ID NO: 407924 - RNA, 21 nt, Human
cugguaguuuuuuggcaccuu

SEQ ID NO: 407925 - RNA, 32 nt, Human
cugguauaaaaacaccaaagaaggagguugcu

SEQ ID NO: 407926 - RNA, 21 nt, Human
cugguauaaccucuggcucca

SEQ ID NO: 407927 - RNA, 32 nt, Human
cugguauccagaaaccugaguggacauugggu

SEQ ID NO: 407928 - RNA, 32 nt, Human
cugguaucuuucagaguguaaaguaucuugga

SEQ ID NO: 407929 - RNA, 32 nt, Human
cugguaugagcaggaggaacaaaggaaagggg

SEQ ID NO: 407930 - RNA, 32 nt, Human
cugguaugcuggcaguggugauggugacaaca

SEQ ID NO: 407931 - RNA, 32 nt, Human
cugguaugcuuuccucucuuuuuaaaggaacu

SEQ ID NO: 407932 - RNA, 32 nt, Human
cugguauggcuauucuugaaggccagguuuua

SEQ ID NO: 407933 - RNA, 32 nt, Human
cugguaugugccaggccuacuguaaaccccaa

SEQ ID NO: 407934 - RNA, 32 nt, Human
cugguauguuaacucuuggauuucuccaaggu

SEQ ID NO: 407935 - RNA, 32 nt, Human
cugguauuccugagccucucccagcuccacuu

SEQ ID NO: 407936 - RNA, 18 nt, Human
cugguauucuuggguuuu

SEQ ID NO: 407937 - RNA, 22 nt, Human
cugguauuucuuuugguaucuu

SEQ ID NO: 407938 - RNA, 32 nt, Human
cugguauuugcuuuaacuaccugcugcuugua

SEQ ID NO: 407939 - RNA, 24 nt, Human
cuggucaacauagugaaaccccgu

SEQ ID NO: 407940 - RNA, 32 nt, Human
cuggucaacauagugaaaccccgucucuaaua

SEQ ID NO: 407941 - RNA, 24 nt, Human
cuggucaacaugaugaaacccugu

SEQ ID NO: 407942 - RNA, 32 nt, Human
cuggucaacaugaugaaacccugucuacuaaa

SEQ ID NO: 407943 - RNA, 32 nt, Human
cuggucaacauggcaaaacccugucucuacaa

SEQ ID NO: 407944 - RNA, 25 nt, Human
cuggucaacauggcaaaagcccauc

SEQ ID NO: 407945 - RNA, 32 nt, Human
cuggucaacauggcaaaagcccaucucuacua

SEQ ID NO: 407946 - RNA, 21 nt, Human
cuggucaacauggcgaaaccc

SEQ ID NO: 407947 - RNA, 22 nt, Human
cuggucaacauggcgaaacccc

SEQ ID NO: 407948 - RNA, 32 nt, Human
cuggucaacauggcgaaaccccaucucuacua

SEQ ID NO: 407949 - RNA, 32 nt, Human
cuggucaacauggcgaaaccccaucucuacug

SEQ ID NO: 407950 - RNA, 24 nt, Human
cuggucaacauggcgaaacccugu

SEQ ID NO: 407951 - RNA, 32 nt, Human
cuggucaacauggcgaaacccugucucuacaa

SEQ ID NO: 407952 - RNA, 32 nt, Human
cuggucaacauggcgaaacccugucucuacua

SEQ ID NO: 407953 - RNA, 24 nt, Human
cuggucaacauggcgaaaucccgu

SEQ ID NO: 407954 - RNA, 32 nt, Human
cuggucaacauggcgaaaucccgucucuacua

SEQ ID NO: 407955 - RNA, 21 nt, Human
cuggucaacaugguaaaaccc

SEQ ID NO: 407956 - RNA, 22 nt, Human
cuggucaacaugguaaaacccc

SEQ ID NO: 407957 - RNA, 32 nt, Human
cuggucaacaugguaaaaccccauuucugcua

SEQ ID NO: 407958 - RNA, 21 nt, Human
cuggucaacauggugaaaccc

SEQ ID NO: 407959 - RNA, 32 nt, Human
cuggucaacauggugaaacccagccucuacua

SEQ ID NO: 407960 - RNA, 22 nt, Human
cuggucaacauggugaaacccc

SEQ ID NO: 407961 - RNA, 32 nt, Human
cuggucaacauggugaaaccccaucuccacua

SEQ ID NO: 407962 - RNA, 32 nt, Human
cuggucaacauggugaaaccccaucucuacua

SEQ ID NO: 407963 - RNA, 32 nt, Human
cuggucaacauggugaaacccccuaucuacua

SEQ ID NO: 407964 - RNA, 24 nt, Human
cuggucaacauggugaaaccccgu

SEQ ID NO: 407965 - RNA, 32 nt, Human
cuggucaacauggugaaaccccgucuccacua

SEQ ID NO: 407966 - RNA, 32 nt, Human
cuggucaacauggugaaaccccgucucuacua

SEQ ID NO: 407967 - RNA, 32 nt, Human
cuggucaacauggugaaaccccuucucuacua

SEQ ID NO: 407968 - RNA, 24 nt, Human
cuggucaacauggugaaacccugu

SEQ ID NO: 407969 - RNA, 32 nt, Human
cuggucaacauggugaaacccugucccuacua

SEQ ID NO: 407970 - RNA, 32 nt, Human
cuggucaacauggugaaacccugucucuacua

SEQ ID NO: 407971 - RNA, 32 nt, Human
cuggucaacauggugaaacccugucucuagua

SEQ ID NO: 407972 - RNA, 32 nt, Human
cuggucaacauggugaaacccugucucuccua

SEQ ID NO: 407973 - RNA, 32 nt, Human
cuggucaacauggugaaacccugucucugcua

SEQ ID NO: 407974 - RNA, 32 nt, Human
cuggucaacauggugaaaccuugucucuacua

SEQ ID NO: 407975 - RNA, 32 nt, Human
cuggucaacauggugaaacucugucucuacuc

SEQ ID NO: 407976 - RNA, 32 nt, Human
cuggucaacauggugaaacugugucucuacua

SEQ ID NO: 407977 - RNA, 32 nt, Human
cuggucaacauggugaaaucuugucucuagua

SEQ ID NO: 407978 - RNA, 24 nt, Human
cuggucaacuugguaaaaccccgu

SEQ ID NO: 407979 - RNA, 32 nt, Human
cuggucaacuuggugaaaacacguaucuacua

SEQ ID NO: 407980 - RNA, 32 nt, Human
cuggucaagagcaguguccaugugcguuucug

SEQ ID NO: 407981 - RNA, 32 nt, Human
cuggucaagauggugaaaccccaucucuacua

SEQ ID NO: 407982 - RNA, 32 nt, Human
cuggucaagcuccccucacucuguuuccuggu

SEQ ID NO: 407983 - RNA, 32 nt, Human
cuggucaaggcagaggaggagaggaggaaagg

SEQ ID NO: 407984 - RNA, 22 nt, Human
cuggucaauauggugaaacccc

SEQ ID NO: 407985 - RNA, 32 nt, Human
cuggucaauauggugaaaccccaucucuacua

SEQ ID NO: 407986 - RNA, 32 nt, Human
cuggucacagagucuccugggcacagguuaua

SEQ ID NO: 407987 - RNA, 20 nt, Human
cuggucacagcacccuugaa

SEQ ID NO: 407988 - RNA, 32 nt, Human
cuggucaccaggccacagcccaaggcagagcu

SEQ ID NO: 407989 - RNA, 32 nt, Human
cuggucaccccaggcuugagaacaggugacca

SEQ ID NO: 407990 - RNA, 32 nt, Human
cuggucacccuccaucucugaggguauggggg

SEQ ID NO: 407991 - RNA, 32 nt, Human
cuggucacgggagggaaugaaaaaugccagcg

SEQ ID NO: 407992 - RNA, 25 nt, Human
cuggucacucugcccucugcugcug

SEQ ID NO: 407993 - RNA, 32 nt, Human
cuggucacugacugcuuacucuaccuuagcug

SEQ ID NO: 407994 - RNA, 32 nt, Human
cuggucacugcaaccucugccuccuggguuca

SEQ ID NO: 407995 - RNA, 32 nt, Human
cuggucacugcaguguaccccacuuucccgac

SEQ ID NO: 407996 - RNA, 32 nt, Human
cuggucacugcuggcccuagcauuggacccua

SEQ ID NO: 407997 - RNA, 32 nt, Human
cuggucacuuugaggucucugaagggaagggc

SEQ ID NO: 407998 - RNA, 16 nt, Human
cuggucagaaagggaa

SEQ ID NO: 407999 - RNA, 32 nt, Human
cuggucagaagugugccugucggcggggagag

SEQ ID NO: 408000 - RNA, 32 nt, Human
cuggucagacuggcuggcgugucacucagccg

SEQ ID NO: 408001 - RNA, 32 nt, Human
cuggucagagagaccucauccugcucuuuugu

SEQ ID NO: 408002 - RNA, 32 nt, Human
cuggucagaggagaggaugcugugagggacag

SEQ ID NO: 408003 - RNA, 32 nt, Human
cuggucagcagcacaaagacagagccaggcag

SEQ ID NO: 408004 - RNA, 24 nt, Human
cuggucagcauggcaaaaccccgu

SEQ ID NO: 408005 - RNA, 22 nt, Human
cuggucagcauggugaaacgcc

SEQ ID NO: 408006 - RNA, 32 nt, Human
cuggucagcauggugaaacgccaucccuacua

SEQ ID NO: 408007 - RNA, 32 nt, Human
cuggucagccugcaguaccucuaccuccagga

SEQ ID NO: 408008 - RNA, 30 nt, Human
cuggucagcuugcucagauagaucuguguu

SEQ ID NO: 408009 - RNA, 32 nt, Human
cuggucaggcccaggcugagugagaugagcug

SEQ ID NO: 408010 - RNA, 32 nt, Human
cuggucagggagaacccagcuugggcagagug

SEQ ID NO: 408011 - RNA, 32 nt, Human
cuggucagggcugaguacaguccuggggguaa

SEQ ID NO: 408012 - RNA, 19 nt, Human
cuggucaguagaaagggaa

SEQ ID NO: 408013 - RNA, 32 nt, Human
cuggucaguccugucugaucgaggccucgccu

SEQ ID NO: 408014 - RNA, 32 nt, Human
cuggucauccccucagucuguagcccuuuugu

SEQ ID NO: 408015 - RNA, 32 nt, Human
cuggucauccugagccccuccuggccucaggg

SEQ ID NO: 408016 - RNA, 32 nt, Human
cuggucauccuugggugaccuggagcuggugc

SEQ ID NO: 408017 - RNA, 32 nt, Human
cuggucaugguggcucaugccuauaaucccaa

SEQ ID NO: 408018 - RNA, 32 nt, Human
cuggucauggugguauguaccuguaguuccag

SEQ ID NO: 408019 - RNA, 23 nt, Human
cuggucauugcuggugucuucug

SEQ ID NO: 408020 - RNA, 32 nt, Human
cugguccaccccaggucccugguuugcccacc

SEQ ID NO: 408021 - RNA, 32 nt, Human
cugguccaccccguccugacccccucugccug

SEQ ID NO: 408022 - RNA, 32 nt, Human
cugguccaccucacuccuccaugggcuucuug

SEQ ID NO: 408023 - RNA, 32 nt, Human
cugguccacuccucauccuggugucuucagcu

SEQ ID NO: 408024 - RNA, 20 nt, Human
cugguccacugaaccuggaa

SEQ ID NO: 408025 - RNA, 32 nt, Human
cugguccagaagacagaggguacaacaguggc

SEQ ID NO: 408026 - RNA, 32 nt, Human
cugguccagagagaaagagacagcaccugccc

SEQ ID NO: 408027 - RNA, 20 nt, Human
cugguccagccagggaucuu

SEQ ID NO: 408028 - RNA, 31 nt, Human
cugguccaugcuucugaaccugugucugcca

SEQ ID NO: 408029 - RNA, 19 nt, Human
cugguccauucauuuucca

SEQ ID NO: 408030 - RNA, 32 nt, Human
cuggucccacagauaccacugcugcucccgcc

SEQ ID NO: 408031 - RNA, 32 nt, Human
cuggucccaccaccuggcaucucuccacuccc

SEQ ID NO: 408032 - RNA, 32 nt, Human
cuggucccagaacccaaggggaagacaugcug

SEQ ID NO: 408033 - RNA, 32 nt, Human
cuggucccagcacaccuggaaaguucugcaag

SEQ ID NO: 408034 - RNA, 32 nt, Human
cuggucccagcagguaugggcagguugcuuga

SEQ ID NO: 408035 - RNA, 32 nt, Human
cuggucccagggaggccucucugcccuauggg

SEQ ID NO: 408036 - RNA, 32 nt, Human
cuggucccaucuucugcccgcuccuccaggaa

SEQ ID NO: 408037 - RNA, 23 nt, Human
cugguccccagccccugcuacug

SEQ ID NO: 408038 - RNA, 32 nt, Human
cugguccccaggaagugguggugguugauggc

SEQ ID NO: 408039 - RNA, 32 nt, Human
cugguccccagucucagacucucagcucuuca

SEQ ID NO: 408040 - RNA, 32 nt, Human
cuggucccccuggucugugugcucugagccgu

SEQ ID NO: 408041 - RNA, 18 nt, Human
cugguccccuccaccaaa

SEQ ID NO: 408042 - RNA, 32 nt, Human
cugguccccugccucuacugccggcgccugcg

SEQ ID NO: 408043 - RNA, 32 nt, Human
cugguccccuugagucaucaccagcuucccca

SEQ ID NO: 408044 - RNA, 32 nt, Human
cuggucccuaccucucugcugugucuucaugu

SEQ ID NO: 408045 - RNA, 32 nt, Human
cuggucccucugcacagcuccaaccaacagga

SEQ ID NO: 408046 - RNA, 32 nt, Human
cuggucccugcucuucagugggucaucugugu

SEQ ID NO: 408047 - RNA, 32 nt, Human
cuggucccugcugucccugccuggcugaacga

SEQ ID NO: 408048 - RNA, 32 nt, Human
cuggucccugggaggucacugcuucaaaagga

SEQ ID NO: 408049 - RNA, 32 nt, Human
cuggucccuuuucagcaagauucauguuaucc

SEQ ID NO: 408050 - RNA, 21 nt, Human
cugguccgaggagugugcuca

SEQ ID NO: 408051 - RNA, 32 nt, Human
cugguccgcugcuccccaccuaccagggucgg

SEQ ID NO: 408052 - RNA, 32 nt, Human
cugguccuaagagugaaggaaagcaggcguag

SEQ ID NO: 408053 - RNA, 32 nt, Human
cugguccuacuuccugccccucuccaggccca

SEQ ID NO: 408054 - RNA, 20 nt, Human
cugguccucacaggggccuu

SEQ ID NO: 408055 - RNA, 32 nt, Human
cugguccuccagggcacugacuuugcccuuuu

SEQ ID NO: 408056 - RNA, 32 nt, Human
cugguccugcagauguguagcacuuuguaguu

SEQ ID NO: 408057 - RNA, 32 nt, Human
cugguccugcagccuuucucgccgucagcgcc

SEQ ID NO: 408058 - RNA, 32 nt, Human
cugguccugccucacuggacagccucuccgcg

SEQ ID NO: 408059 - RNA, 32 nt, Human
cugguccugcugcuggcugccucucugcucca

SEQ ID NO: 408060 - RNA, 32 nt, Human
cugguccugcuggcuuugauuucucugggucu

SEQ ID NO: 408061 - RNA, 32 nt, Human
cugguccugcugucuugguuuugucuuggcuc

SEQ ID NO: 408062 - RNA, 32 nt, Human
cugguccugcuguuuccuccagucucacugca

SEQ ID NO: 408063 - RNA, 32 nt, Human
cugguccuggccuggggcagagccuguguguu

SEQ ID NO: 408064 - RNA, 32 nt, Human
cugguccuggcuuuauggaacaccauguuuuu

SEQ ID NO: 408065 - RNA, 32 nt, Human
cugguccugggaaagaaagugggaaaagcuuu

SEQ ID NO: 408066 - RNA, 32 nt, Human
cugguccuuauuuacuccucugccuuccauug

SEQ ID NO: 408067 - RNA, 32 nt, Human
cugguccuuuuuaaacuacuaguuuuaaaaac

SEQ ID NO: 408068 - RNA, 32 nt, Human
cuggucgcacagcuggucaugggugagugugg

SEQ ID NO: 408069 - RNA, 32 nt, Human
cuggucgcgguggcucacaccuguaaucccag

SEQ ID NO: 408070 - RNA, 32 nt, Human
cuggucgggcugggacccuuugccccuuagga

SEQ ID NO: 408071 - RNA, 18 nt, Human
cuggucggggcugucugg

SEQ ID NO: 408072 - RNA, 32 nt, Human
cuggucgggggccugggcuggugcuucauggu

SEQ ID NO: 408073 - RNA, 32 nt, Human
cuggucguggacugugguugggggagguggga

SEQ ID NO: 408074 - RNA, 32 nt, Human
cuggucguugcacuccagccugucgcugugca

SEQ ID NO: 408075 - RNA, 32 nt, Human
cuggucguuggugacagcgaggcuuccgcgcu

SEQ ID NO: 408076 - RNA, 32 nt, Human
cuggucuaagcugcucaagauucaggagacag

SEQ ID NO: 408077 - RNA, 32 nt, Human
cuggucuacauggugaaaccccaucucaacua

SEQ ID NO: 408078 - RNA, 32 nt, Human
cuggucuagucuccuuuuagagaugagaaaac

SEQ ID NO: 408079 - RNA, 32 nt, Human
cuggucuaugaaaaucucuagaugggcuccac

SEQ ID NO: 408080 - RNA, 32 nt, Human
cuggucucaaaacuggccacugccucagccac

SEQ ID NO: 408081 - RNA, 32 nt, Human
cuggucucaaacuccugaccucaaggaucugu

SEQ ID NO: 408082 - RNA, 32 nt, Human
cuggucucaaacuccugaccucaggcaaucug

SEQ ID NO: 408083 - RNA, 32 nt, Human
cuggucucaaacuccugaccucaggcgaucca

SEQ ID NO: 408084 - RNA, 32 nt, Human
cuggucucaaacuccugaccucaggcgauccg

SEQ ID NO: 408085 - RNA, 32 nt, Human
cuggucucaaacuccugagcucaggccaucug

SEQ ID NO: 408086 - RNA, 23 nt, Human
cuggucucaaacuccugggcuca

SEQ ID NO: 408087 - RNA, 32 nt, Human
cuggucucaaacugcugacuucaggugaucca

SEQ ID NO: 408088 - RNA, 32 nt, Human
cuggucucaagcaaucugcccgccucggccuc

SEQ ID NO: 408089 - RNA, 32 nt, Human
cuggucucaagcaguccucccaccucagccuc

SEQ ID NO: 408090 - RNA, 32 nt, Human
cuggucucaagccauucucccaccucuguccu

SEQ ID NO: 408091 - RNA, 18 nt, Human
cuggucucaagcggcaga

SEQ ID NO: 408092 - RNA, 32 nt, Human
cuggucucacugcaaccucuaccucccagguu

SEQ ID NO: 408093 - RNA, 32 nt, Human
cuggucucauccagcagaagcuaucuuaaauc

SEQ ID NO: 408094 - RNA, 32 nt, Human
cuggucuccaacuccugaccucagauggucca

SEQ ID NO: 408095 - RNA, 32 nt, Human
cuggucuccaacuccugaccucaggcgaucca

SEQ ID NO: 408096 - RNA, 32 nt, Human
cuggucuccagaaaaagaacacauacacauau

SEQ ID NO: 408097 - RNA, 18 nt, Human
cuggucuccagaggaccu

SEQ ID NO: 408098 - RNA, 32 nt, Human
cuggucuccagaggaccuugguguuugcucuc

SEQ ID NO: 408099 - RNA, 32 nt, Human
cuggucuccagcuccugagcucaggccaucca

SEQ ID NO: 408100 - RNA, 32 nt, Human
cuggucucccggagccagguggagucucgcuc

SEQ ID NO: 408101 - RNA, 18 nt, Human
cuggucucccuggguuuu

SEQ ID NO: 408102 - RNA, 18 nt, Human
cuggucuccguggcacuu

SEQ ID NO: 408103 - RNA, 32 nt, Human
cuggucuccuccagcuccuucuuucugcaaca

SEQ ID NO: 408104 - RNA, 32 nt, Human
cuggucuccucuagccuguuuguuguggggug

SEQ ID NO: 408105 - RNA, 32 nt, Human
cuggucuccugggagagaggggugagggaugu

SEQ ID NO: 408106 - RNA, 32 nt, Human
cuggucucgaacucccgaccucuggugaucug

SEQ ID NO: 408107 - RNA, 32 nt, Human
cuggucucgaacuccugaccucaaguggucca

SEQ ID NO: 408108 - RNA, 32 nt, Human
cuggucucgaacuccugaccucaaguggucua

SEQ ID NO: 408109 - RNA, 32 nt, Human
cuggucucgaacuccugaccucaggcaaucca

SEQ ID NO: 408110 - RNA, 32 nt, Human
cuggucucgaacuccugaccucaggcgaucca

SEQ ID NO: 408111 - RNA, 27 nt, Human
cuggucucgaacuccugaccucaggug

SEQ ID NO: 408112 - RNA, 32 nt, Human
cuggucucgaacuccugaccucaguugaucca

SEQ ID NO: 408113 - RNA, 32 nt, Human
cuggucucgaacuccugaccucaguugauccg

SEQ ID NO: 408114 - RNA, 32 nt, Human
cuggucucgaacuccugaccucaugagccgcc

SEQ ID NO: 408115 - RNA, 32 nt, Human
cuggucucgaacuccugaccucaugaucugcc

SEQ ID NO: 408116 - RNA, 32 nt, Human
cuggucucgaacuccugaccucaugauuugcc

SEQ ID NO: 408117 - RNA, 32 nt, Human
cuggucucgaacuccugaccucgggauccacc

SEQ ID NO: 408118 - RNA, 32 nt, Human
cuggucucgaacuccugaccucgugauuggcc

SEQ ID NO: 408119 - RNA, 23 nt, Human
cuggucucgaacuccugggcuca

SEQ ID NO: 408120 - RNA, 32 nt, Human
cuggucucgaacucuggaccucagaucuugua

SEQ ID NO: 408121 - RNA, 32 nt, Human
cuggucucgaauuccuggccucaacgaucguc

SEQ ID NO: 408122 - RNA, 32 nt, Human
cuggucucggucugcugacgucagggucagcu

SEQ ID NO: 408123 - RNA, 19 nt, Human
cuggucucgucugggaccu

SEQ ID NO: 408124 - RNA, 32 nt, Human
cuggucucucccaccugguuggaaaugucguu

SEQ ID NO: 408125 - RNA, 18 nt, Human
cuggucucucuagggccu

SEQ ID NO: 408126 - RNA, 32 nt, Human
cuggucucugucccucugccuccccggaagaa

SEQ ID NO: 408127 - RNA, 18 nt, Human
cuggucucuugcgguccu

SEQ ID NO: 408128 - RNA, 18 nt, Human
cuggucucuuggugccuu

SEQ ID NO: 408129 - RNA, 32 nt, Human
cuggucugaaguucugggauguuuucaguuug

SEQ ID NO: 408130 - RNA, 32 nt, Human
cuggucugaaucuggaguaauuaaugccaccc

SEQ ID NO: 408131 - RNA, 19 nt, Human
cuggucugacuuaugcuua

SEQ ID NO: 408132 - RNA, 32 nt, Human
cuggucugagcagcgcuuccagagccagaacu

SEQ ID NO: 408133 - RNA, 32 nt, Human
cuggucugaggggcaacugagucugcgggaga

SEQ ID NO: 408134 - RNA, 32 nt, Human
cuggucugcacuccccugcggccugcugcugg

SEQ ID NO: 408135 - RNA, 32 nt, Human
cuggucugcaucagaggcuggggccuggggcg

SEQ ID NO: 408136 - RNA, 32 nt, Human
cuggucugcugcugcaggcuucaucuaaaacu

SEQ ID NO: 408137 - RNA, 32 nt, Human
cuggucuggaaccccuggccucgggugaucca

SEQ ID NO: 408138 - RNA, 23 nt, Human
cuggucuggaaccccugggcuca

SEQ ID NO: 408139 - RNA, 32 nt, Human
cuggucuggaacuccuggccuccagucauuug

SEQ ID NO: 408140 - RNA, 23 nt, Human
cuggucuggaacuucugaguuca

SEQ ID NO: 408141 - RNA, 32 nt, Human
cuggucuggccuggccguguggugaugaggcu

SEQ ID NO: 408142 - RNA, 32 nt, Human
cuggucuggcugggacuuuccauuucuaaauc

SEQ ID NO: 408143 - RNA, 32 nt, Human
cuggucugggggcagagguggcaugcagggcu

SEQ ID NO: 408144 - RNA, 23 nt, Human
cuggucuuaaacuccugggcuca

SEQ ID NO: 408145 - RNA, 17 nt, Human
cuggucuuagggauuuu

SEQ ID NO: 408146 - RNA, 18 nt, Human
cuggucuucacugacuuu

SEQ ID NO: 408147 - RNA, 18 nt, Human
cuggucuuccaagacuuu

SEQ ID NO: 408148 - RNA, 18 nt, Human
cuggucuucucacacuuu

SEQ ID NO: 408149 - RNA, 19 nt, Human
cuggucuucuggucuccuu

SEQ ID NO: 408150 - RNA, 32 nt, Human
cuggucuucuguacucaggggcuggucuccca

SEQ ID NO: 408151 - RNA, 32 nt, Human
cuggucuugaacccuugaccucaggucaucca

SEQ ID NO: 408152 - RNA, 32 nt, Human
cuggucuugaacuccugaccucaacuggucca

SEQ ID NO: 408153 - RNA, 32 nt, Human
cuggucuugaacuccugaccucaaguggucca

SEQ ID NO: 408154 - RNA, 23 nt, Human
cuggucuugaacuccugggcuca

SEQ ID NO: 408155 - RNA, 32 nt, Human
cuggucuugaacucucgaccucaggaaaccug

SEQ ID NO: 408156 - RNA, 32 nt, Human
cuggucuugaacugggcuuaggcuccacugcc

SEQ ID NO: 408157 - RNA, 32 nt, Human
cuggucuuggacuccugaccucaugcuccacc

SEQ ID NO: 408158 - RNA, 32 nt, Human
cuggucuugggacuucucagccuccauaauca

SEQ ID NO: 408159 - RNA, 32 nt, Human
cuggucuugugaacuccuggccucaggugauc

SEQ ID NO: 408160 - RNA, 32 nt, Human
cuggucuuguggaauugggagcuugggaaugg

SEQ ID NO: 408161 - RNA, 32 nt, Human
cuggucuuuaacuccugaccucagguguucca

SEQ ID NO: 408162 - RNA, 18 nt, Human
cuggucuuuaaugaucuu

SEQ ID NO: 408163 - RNA, 22 nt, Human
cuggucuuuagccccacugcug

SEQ ID NO: 408164 - RNA, 32 nt, Human
cuggucuuuauuccucccucaugagcacaggg

SEQ ID NO: 408165 - RNA, 32 nt, Human
cuggucuuucuccuugacacagacagaagagg

SEQ ID NO: 408166 - RNA, 16 nt, Human
cuggucuuuuguccuu

SEQ ID NO: 408167 - RNA, 18 nt, Human
cuggucuuuuucuaccuu

SEQ ID NO: 408168 - RNA, 24 nt, Human
cuggugaacauggcgaaaccccgu

SEQ ID NO: 408169 - RNA, 32 nt, Human
cuggugaagagacaauucaagccuuagugacu

SEQ ID NO: 408170 - RNA, 32 nt, Human
cuggugaagaggaggaagaagagguguggaca

SEQ ID NO: 408171 - RNA, 32 nt, Human
cuggugaagauguggagaaaagggaacccuua

SEQ ID NO: 408172 - RNA, 20 nt, Human
cuggugaagggacccgggca

SEQ ID NO: 408173 - RNA, 32 nt, Human
cuggugaaguggguggagcaucagcguuugcu

SEQ ID NO: 408174 - RNA, 32 nt, Human
cuggugaaugagagagccccagccugacccaa

SEQ ID NO: 408175 - RNA, 32 nt, Human
cuggugacacguggcuguacauucagcacagc

SEQ ID NO: 408176 - RNA, 32 nt, Human
cuggugacagaacaugcagcaaggggacaucu

SEQ ID NO: 408177 - RNA, 24 nt, Human
cuggugacccagcgaaaccagcuu

SEQ ID NO: 408178 - RNA, 32 nt, Human
cuggugacccuccaagaugccccugcccucag

SEQ ID NO: 408179 - RNA, 32 nt, Human
cuggugaccgagaagagagcagagccacugcc

SEQ ID NO: 408180 - RNA, 32 nt, Human
cuggugaccugggguccugggcugggauagcu

SEQ ID NO: 408181 - RNA, 32 nt, Human
cuggugacuaaggaaggacuacagaggcuuug

SEQ ID NO: 408182 - RNA, 32 nt, Human
cuggugacuagagcuguggccaugaaggugga

SEQ ID NO: 408183 - RNA, 32 nt, Human
cuggugacuaguacauguauuucuccauaagc

SEQ ID NO: 408184 - RNA, 32 nt, Human
cuggugacuauacaguuugaaauacuauuuuu

SEQ ID NO: 408185 - RNA, 32 nt, Human
cuggugacugucccuucgacacggaccugcuu

SEQ ID NO: 408186 - RNA, 32 nt, Human
cuggugagagaggagucagguggccuucccac

SEQ ID NO: 408187 - RNA, 32 nt, Human
cuggugagcuugggccugcucuccuuuccauc

SEQ ID NO: 408188 - RNA, 18 nt, Human
cuggugaggagggcgcag

SEQ ID NO: 408189 - RNA, 32 nt, Human
cuggugagggacugggucauggagacugcagu

SEQ ID NO: 408190 - RNA, 31 nt, Human
cuggugagggcgacugggugggugaagcacc

SEQ ID NO: 408191 - RNA, 32 nt, Human
cuggugagggcuggagccaaggagaacacagu

SEQ ID NO: 408192 - RNA, 32 nt, Human
cuggugaggugcagagagucccucuaguggcc

SEQ ID NO: 408193 - RNA, 32 nt, Human
cuggugagguggaaauuccagcaagaauagag

SEQ ID NO: 408194 - RNA, 32 nt, Human
cuggugagucaccacuucagggcuuuacuccg

SEQ ID NO: 408195 - RNA, 32 nt, Human
cuggugaucucucagcaggccaaggccagaca

SEQ ID NO: 408196 - RNA, 32 nt, Human
cuggugaugguggagggugagagggugccguu

SEQ ID NO: 408197 - RNA, 32 nt, Human
cuggugaugucacaucuuggcagggguggagg

SEQ ID NO: 408198 - RNA, 32 nt, Human
cuggugauguuggaacauuaaugauggaacau

SEQ ID NO: 408199 - RNA, 32 nt, Human
cuggugcaaccagcaagucuuccaguaugaau

SEQ ID NO: 408200 - RNA, 32 nt, Human
cuggugcaccuugcuggcacggugccucagga

SEQ ID NO: 408201 - RNA, 32 nt, Human
cuggugcagacaccaaggcugcccagugguac

SEQ ID NO: 408202 - RNA, 32 nt, Human
cuggugcagcagcaucuugucacugcacaaca

SEQ ID NO: 408203 - RNA, 24 nt, Human
cuggugcagcagccucuggugcug

SEQ ID NO: 408204 - RNA, 32 nt, Human
cuggugcagccuacauggcacaggauauuucc

SEQ ID NO: 408205 - RNA, 32 nt, Human
cuggugcagggacuccagugaguagggcuggu

SEQ ID NO: 408206 - RNA, 32 nt, Human
cuggugcauccuaggucauccaagagugagcg

SEQ ID NO: 408207 - RNA, 32 nt, Human
cuggugcauggaauuggaaccauaggucuuag

SEQ ID NO: 408208 - RNA, 32 nt, Human
cuggugccaaaaaggcuggggaccacugcccu

SEQ ID NO: 408209 - RNA, 32 nt, Human
cuggugccaaagccucgcuuuggguggcccaa

SEQ ID NO: 408210 - RNA, 18 nt, Human
cuggugccaaauggggca

SEQ ID NO: 408211 - RNA, 32 nt, Human
cuggugccaagcucacuccugcuucucucugc

SEQ ID NO: 408212 - RNA, 32 nt, Human
cuggugccacagaucuggagguaugauagguc

SEQ ID NO: 408213 - RNA, 32 nt, Human
cuggugccaccugagcacucagagcugagcga

SEQ ID NO: 408214 - RNA, 32 nt, Human
cuggugccaggguggguguccaugugcacccg

SEQ ID NO: 408215 - RNA, 32 nt, Human
cuggugcccagccugugcccucgcaggucuug

SEQ ID NO: 408216 - RNA, 32 nt, Human
cuggugcccaggcuggagugggcgccaucuug

SEQ ID NO: 408217 - RNA, 32 nt, Human
cuggugcccagguggaggugcaguggggguaa

SEQ ID NO: 408218 - RNA, 32 nt, Human
cuggugcccgagccucucagggccagaccaga

SEQ ID NO: 408219 - RNA, 23 nt, Human
cuggugcccggcccuuggugcug

SEQ ID NO: 408220 - RNA, 22 nt, Human
cuggugcccugcgucccgggau

SEQ ID NO: 408221 - RNA, 32 nt, Human
cuggugccgggaggguggagguagauguaccu

SEQ ID NO: 408222 - RNA, 32 nt, Human
cuggugccuaucugccuggaggcaaaggccug

SEQ ID NO: 408223 - RNA, 32 nt, Human
cuggugccucaggccuuucuccacuccccuug

SEQ ID NO: 408224 - RNA, 32 nt, Human
cuggugccugugugggucagcccagcccucca

SEQ ID NO: 408225 - RNA, 32 nt, Human
cuggugccuugaucuuggacuucccagccucu

SEQ ID NO: 408226 - RNA, 32 nt, Human
cuggugccuuucuucccaccucgcuugccugu

SEQ ID NO: 408227 - RNA, 31 nt, Human
cuggugcgacuucucccugcgcuagcgaggc

SEQ ID NO: 408228 - RNA, 32 nt, Human
cuggugcggcggugcuggagguugcggcggcg

SEQ ID NO: 408229 - RNA, 23 nt, Human
cuggugcguuugggcuuggugug

SEQ ID NO: 408230 - RNA, 32 nt, Human
cuggugcuauucugccaaguuaucgagcuccu

SEQ ID NO: 408231 - RNA, 32 nt, Human
cuggugcucacugggaccccauaugucugcgu

SEQ ID NO: 408232 - RNA, 32 nt, Human
cuggugcucagcuaugucaauggucuuccccc

SEQ ID NO: 408233 - RNA, 20 nt, Human
cuggugcucggucccgggcc

SEQ ID NO: 408234 - RNA, 32 nt, Human
cuggugcucguacacguccugaggcagccgcc

SEQ ID NO: 408235 - RNA, 32 nt, Human
cuggugcugaauaaaggguguugcugucaugg

SEQ ID NO: 408236 - RNA, 32 nt, Human
cuggugcugagccucugcucccaccgggugaa

SEQ ID NO: 408237 - RNA, 32 nt, Human
cuggugcugccucccgcacaaggagaccugga

SEQ ID NO: 408238 - RNA, 32 nt, Human
cuggugcugcugcuggguggcugcuccgggcg

SEQ ID NO: 408239 - RNA, 22 nt, Human
cuggugcugcugguggugcugc

SEQ ID NO: 408240 - RNA, 32 nt, Human
cuggugcuggagcaguuccucacuauccugcc

SEQ ID NO: 408241 - RNA, 32 nt, Human
cuggugcugggcaccaaugagaagcucaucug

SEQ ID NO: 408242 - RNA, 24 nt, Human
cuggugcugugacuccugcugcug

SEQ ID NO: 408243 - RNA, 32 nt, Human
cuggugcuguggauagucuuucccucuccccu

SEQ ID NO: 408244 - RNA, 32 nt, Human
cuggugcuguuagagcacuucugcucugcccu

SEQ ID NO: 408245 - RNA, 32 nt, Human
cuggugcuuagagacuaucaacucccuccuuu

SEQ ID NO: 408246 - RNA, 32 nt, Human
cugguggaagcaugugcagggagaccauauca

SEQ ID NO: 408247 - RNA, 32 nt, Human
cugguggacacccagccccagcucugccugaa

SEQ ID NO: 408248 - RNA, 32 nt, Human
cugguggacaggcugcaucaucccaugaacag

SEQ ID NO: 408249 - RNA, 32 nt, Human
cugguggagcuggugcggcugaaggagcuggc

SEQ ID NO: 408250 - RNA, 32 nt, Human
cugguggaggagcugggcuucucuccaaggac

SEQ ID NO: 408251 - RNA, 32 nt, Human
cugguggaggcggccugucaauucagccuugu

SEQ ID NO: 408252 - RNA, 32 nt, Human
cugguggaggcugcugugggacggucaggcca

SEQ ID NO: 408253 - RNA, 32 nt, Human
cugguggaggggcggcggcuguuccgcguggg

SEQ ID NO: 408254 - RNA, 32 nt, Human
cugguggcaaagcuaucaccauuuaaugucuu

SEQ ID NO: 408255 - RNA, 32 nt, Human
cugguggcacucuccugaccucacgcugccaa

SEQ ID NO: 408256 - RNA, 32 nt, Human
cugguggcagaggccuguaaucccagcuacuu

SEQ ID NO: 408257 - RNA, 32 nt, Human
cugguggcagcuauguuuaagagaccagcguc

SEQ ID NO: 408258 - RNA, 32 nt, Human
cugguggcaggcaccuguaaucccagcuacuu

SEQ ID NO: 408259 - RNA, 32 nt, Human
cugguggcaggcaccuguaaucccagcugccc

SEQ ID NO: 408260 - RNA, 32 nt, Human
cugguggcaguugcagaugagaaaugcuuaca

SEQ ID NO: 408261 - RNA, 32 nt, Human
cugguggccacugcuacagcugguccacagag

SEQ ID NO: 408262 - RNA, 32 nt, Human
cugguggccaggaaguuucagguugaagggaa

SEQ ID NO: 408263 - RNA, 22 nt, Human
cugguggcccccauucuuacca

SEQ ID NO: 408264 - RNA, 32 nt, Human
cugguggcccugcuucuucccauugaaacuac

SEQ ID NO: 408265 - RNA, 32 nt, Human
cugguggcccugugccugggcccugggcugau

SEQ ID NO: 408266 - RNA, 19 nt, Human
cugguggccgccgcugcug

SEQ ID NO: 408267 - RNA, 32 nt, Human
cugguggccggcgccuccuuccucgcguuccg

SEQ ID NO: 408268 - RNA, 32 nt, Human
cugguggccuguacaggcccagcacugguugg

SEQ ID NO: 408269 - RNA, 32 nt, Human
cugguggcgcugaagggaaggagccagugagc

SEQ ID NO: 408270 - RNA, 32 nt, Human
cugguggcuagagagaaaaguagaaaaccaga

SEQ ID NO: 408271 - RNA, 32 nt, Human
cugguggcucaugccuguaauccagcacuuug

SEQ ID NO: 408272 - RNA, 32 nt, Human
cugguggcuggaagccacccugcuuuagauca

SEQ ID NO: 408273 - RNA, 21 nt, Human
cugguggcuggagcaggggug

SEQ ID NO: 408274 - RNA, 32 nt, Human
cugguggcuguauuagcuaggaaagguuugua

SEQ ID NO: 408275 - RNA, 32 nt, Human
cugguggcuguuggcagcagauucaggugccu

SEQ ID NO: 408276 - RNA, 32 nt, Human
cugguggcuuucaaacuucagaccaugaucug

SEQ ID NO: 408277 - RNA, 32 nt, Human
cuggugggaagacagcuggaaaggcugggagg

SEQ ID NO: 408278 - RNA, 32 nt, Human
cuggugggaaggagggagggagggcggugacu

SEQ ID NO: 408279 - RNA, 32 nt, Human
cuggugggagcccgccucgcaccagcugcacc

SEQ ID NO: 408280 - RNA, 32 nt, Human
cuggugggagccucuggcugcaucugugcagc

SEQ ID NO: 408281 - RNA, 32 nt, Human
cuggugggagguaauugaaucauuggggcagu

SEQ ID NO: 408282 - RNA, 32 nt, Human
cuggugggaucugaggcacucucucgaaugcc

SEQ ID NO: 408283 - RNA, 32 nt, Human
cuggugggcaccaagagccaauggaguagacc

SEQ ID NO: 408284 - RNA, 32 nt, Human
cuggugggcaggggccaucuccccacuccgcu

SEQ ID NO: 408285 - RNA, 32 nt, Human
cuggugggccccgggcccucagccucucuugu

SEQ ID NO: 408286 - RNA, 32 nt, Human
cuggugggcggaucgccugagaucaggaguuc

SEQ ID NO: 408287 - RNA, 32 nt, Human
cuggugggcuguucagcuuccugcugcugggg

SEQ ID NO: 408288 - RNA, 32 nt, Human
cugguggggacucaggcugggugcagccucca

SEQ ID NO: 408289 - RNA, 32 nt, Human
cugguggggaggcaggcuggugguggagucau

SEQ ID NO: 408290 - RNA, 32 nt, Human
cugguggggcaguggaggauugaggagauauu

SEQ ID NO: 408291 - RNA, 32 nt, Human
cugguggggccaagggaggcccagggggccga

SEQ ID NO: 408292 - RNA, 32 nt, Human
cugguggggccacuggugggugccagggacag

SEQ ID NO: 408293 - RNA, 32 nt, Human
cuggugggggagaagggggugggugcugcuug

SEQ ID NO: 408294 - RNA, 32 nt, Human
cugguggggucguggggugugaauggugggcg

SEQ ID NO: 408295 - RNA, 32 nt, Human
cugguggggugaguguuagcuggcuaggguug

SEQ ID NO: 408296 - RNA, 32 nt, Human
cugguggguggugggagucugggggacccagc

SEQ ID NO: 408297 - RNA, 32 nt, Human
cuggugggugguguccugaagcugcuggagcc

SEQ ID NO: 408298 - RNA, 32 nt, Human
cuggugguccagccugugaugggcaggccuag

SEQ ID NO: 408299 - RNA, 22 nt, Human
cuggugguccaggcucugguga

SEQ ID NO: 408300 - RNA, 32 nt, Human
cuggugguccuccuccuccucacucuucuugc

SEQ ID NO: 408301 - RNA, 32 nt, Human
cugguggucuagugaguggugccugggaugga

SEQ ID NO: 408302 - RNA, 32 nt, Human
cugguggucugaggacacacagaggguggggg

SEQ ID NO: 408303 - RNA, 32 nt, Human
cugguggugccaaggccuuccucugucuccau

SEQ ID NO: 408304 - RNA, 23 nt, Human
cuggugguucacacaucauccca

SEQ ID NO: 408305 - RNA, 32 nt, Human
cuggugguugccucccguccugggcaggcugc

SEQ ID NO: 408306 - RNA, 32 nt, Human
cuggugguuucugcccugcagaugucuaacac

SEQ ID NO: 408307 - RNA, 32 nt, Human
cugguguauaccauaaccgaugugcuggagcu

SEQ ID NO: 408308 - RNA, 32 nt, Human
cugguguaugcacugcucacggaccccauguu

SEQ ID NO: 408309 - RNA, 32 nt, Human
cugguguauguagcaguucuuaaaucagcagu

SEQ ID NO: 408310 - RNA, 32 nt, Human
cuggugucacauggggccuggccacgcccucc

SEQ ID NO: 408311 - RNA, 32 nt, Human
cuggugucacccaggcuggagugcaguggugu

SEQ ID NO: 408312 - RNA, 32 nt, Human
cuggugucacccuggauaggcaagggauaacu

SEQ ID NO: 408313 - RNA, 32 nt, Human
cuggugucacgccaggaggcuguggcugcugu

SEQ ID NO: 408314 - RNA, 20 nt, Human
cuggugucaggucugucugg

SEQ ID NO: 408315 - RNA, 32 nt, Human
cuggugucauuuggagagaaugcggggcucau

SEQ ID NO: 408316 - RNA, 32 nt, Human
cuggugucauuuucugugaauguggucaggua

SEQ ID NO: 408317 - RNA, 32 nt, Human
cugguguccacacaucgucuuccaucuuugca

SEQ ID NO: 408318 - RNA, 24 nt, Human
cugguguccaggcuggagugcagu

SEQ ID NO: 408319 - RNA, 32 nt, Human
cuggugucccacuccauugucacuaacguccg

SEQ ID NO: 408320 - RNA, 32 nt, Human
cugguguccccagucaagcccaugaagcccau

SEQ ID NO: 408321 - RNA, 19 nt, Human
cuggugucccugucuccau

SEQ ID NO: 408322 - RNA, 32 nt, Human
cugguguccugagacucugcccucuucccaca

SEQ ID NO: 408323 - RNA, 32 nt, Human
cugguguccuuauuaaaaguggagauuuggac

SEQ ID NO: 408324 - RNA, 32 nt, Human
cuggugucucaggagcaggggucugugucuac

SEQ ID NO: 408325 - RNA, 32 nt, Human
cuggugucucuuccucuuccuauaaaggcacu

SEQ ID NO: 408326 - RNA, 32 nt, Human
cuggugucuguagguggacccggucucccaca

SEQ ID NO: 408327 - RNA, 24 nt, Human
cuggugucuucagcuucucugcug

SEQ ID NO: 408328 - RNA, 32 nt, Human
cuggugucuucagcuucucugcugccauguuc

SEQ ID NO: 408329 - RNA, 32 nt, Human
cuggugugagccacugugucuggccagaaaag

SEQ ID NO: 408330 - RNA, 32 nt, Human
cuggugugagggcagaccagggccagguagac

SEQ ID NO: 408331 - RNA, 32 nt, Human
cuggugugcagccuggccaacauggugaaacc

SEQ ID NO: 408332 - RNA, 32 nt, Human
cuggugugcgcuggccuuggccuaguccccag

SEQ ID NO: 408333 - RNA, 32 nt, Human
cuggugugcucaccccucccuagucaccucca

SEQ ID NO: 408334 - RNA, 32 nt, Human
cuggugugcucugacaucaugaccucaaaucu

SEQ ID NO: 408335 - RNA, 32 nt, Human
cugguguggaaccagggagcugugggaagcca

SEQ ID NO: 408336 - RNA, 32 nt, Human
cugguguggaggucgagguggggagggggagg

SEQ ID NO: 408337 - RNA, 32 nt, Human
cuggugugggaggcgauggggguuggguggug

SEQ ID NO: 408338 - RNA, 32 nt, Human
cugguguggggaggcggccgggccaagcgggg

SEQ ID NO: 408339 - RNA, 22 nt, Human
cuggugugucucacacaaugcc

SEQ ID NO: 408340 - RNA, 32 nt, Human
cuggugugucugcagugcagguggcuccugga

SEQ ID NO: 408341 - RNA, 24 nt, Human
cugguguguggagguggcgggagg

SEQ ID NO: 408342 - RNA, 32 nt, Human
cugguguguggccucucuccccucucucuuuu

SEQ ID NO: 408343 - RNA, 32 nt, Human
cugguguguugugauccagggaaugaaaagaa

SEQ ID NO: 408344 - RNA, 19 nt, Human
cugguguuaggugugcaaa

SEQ ID NO: 408345 - RNA, 32 nt, Human
cugguguuccagcugaggcagggggauuuggu

SEQ ID NO: 408346 - RNA, 32 nt, Human
cugguguucccccuauagauucaauuucucca

SEQ ID NO: 408347 - RNA, 32 nt, Human
cugguguucccguucccaucugacaggcucuc

SEQ ID NO: 408348 - RNA, 32 nt, Human
cugguguuccucauuccucccaccuucccgug

SEQ ID NO: 408349 - RNA, 32 nt, Human
cugguguucugcaaaacuuggacaggggcaaa

SEQ ID NO: 408350 - RNA, 32 nt, Human
cugguguucugcagucaucuccccuccuggcg

SEQ ID NO: 408351 - RNA, 32 nt, Human
cugguguugggaacagcugcggggaggguagg

SEQ ID NO: 408352 - RNA, 32 nt, Human
cugguguugucuuucugccaucagagaaggga

SEQ ID NO: 408353 - RNA, 32 nt, Human
cugguguuugguuuuuccaccagccuuuguua

SEQ ID NO: 408354 - RNA, 32 nt, Human
cugguguuuguugagcagaaacagugagucuc

SEQ ID NO: 408355 - RNA, 23 nt, Human
cugguuaacacggugaaaccccg

SEQ ID NO: 408356 - RNA, 32 nt, Human
cugguuaacacggugaaaccccgacucuacua

SEQ ID NO: 408357 - RNA, 32 nt, Human
cugguuaacacggugaaacccugucucuacaa

SEQ ID NO: 408358 - RNA, 22 nt, Human
cugguuaacauggugaaacacc

SEQ ID NO: 408359 - RNA, 32 nt, Human
cugguuaacauggugaaacaccaucucuagua

SEQ ID NO: 408360 - RNA, 24 nt, Human
cugguuaacauggugaaacccugu

SEQ ID NO: 408361 - RNA, 32 nt, Human
cugguuaacauggugaaacccugucuguacua

SEQ ID NO: 408362 - RNA, 32 nt, Human
cugguuaagagucucacuagggccaaggcagg

SEQ ID NO: 408363 - RNA, 32 nt, Human
cugguuaauuccaucaagcucagaguuaaaag

SEQ ID NO: 408364 - RNA, 32 nt, Human
cugguuacacagucuucugggguccaaaucca

SEQ ID NO: 408365 - RNA, 32 nt, Human
cugguuacacuaaccugauacugaccuguuca

SEQ ID NO: 408366 - RNA, 32 nt, Human
cugguuacagcugagaagcccauaccaguauu

SEQ ID NO: 408367 - RNA, 20 nt, Human
cugguuacggcuggcuccug

SEQ ID NO: 408368 - RNA, 32 nt, Human
cugguuacguggacuguggagcuggucucuug

SEQ ID NO: 408369 - RNA, 32 nt, Human
cugguuagggcugaggaccccaagauaggcug

SEQ ID NO: 408370 - RNA, 32 nt, Human
cugguuauuuucaccagcaucucucaacaguc

SEQ ID NO: 408371 - RNA, 32 nt, Human
cugguucaaccccuucuccagaccgugucagc

SEQ ID NO: 408372 - RNA, 32 nt, Human
cugguucacaacagcacaaagugucuuucauu

SEQ ID NO: 408373 - RNA, 32 nt, Human
cugguucacaggcuuagugauggagauaugac

SEQ ID NO: 408374 - RNA, 32 nt, Human
cugguucacauucagcuccagugcaguucaag

SEQ ID NO: 408375 - RNA, 32 nt, Human
cugguucaccucuuuguucucuagacucuuaa

SEQ ID NO: 408376 - RNA, 32 nt, Human
cugguucacugcacccucugccucccagguuc

SEQ ID NO: 408377 - RNA, 22 nt, Human
cugguucacuuacugcacucca

SEQ ID NO: 408378 - RNA, 32 nt, Human
cugguucagagugcucucccaccaccagagac

SEQ ID NO: 408379 - RNA, 32 nt, Human
cugguucagggugguggggugggagcuacuag

SEQ ID NO: 408380 - RNA, 32 nt, Human
cugguucaguggcuugagcucugugagcagcu

SEQ ID NO: 408381 - RNA, 32 nt, Human
cugguucaugccuuugacaagcauuuuugugc

SEQ ID NO: 408382 - RNA, 32 nt, Human
cugguucauguuuucaucaaucuaaggugcaa

SEQ ID NO: 408383 - RNA, 32 nt, Human
cugguuccaguggcagauggggcacuggccag

SEQ ID NO: 408384 - RNA, 32 nt, Human
cugguuccaguucuguagccauucagguccag

SEQ ID NO: 408385 - RNA, 32 nt, Human
cugguuccaguuucacagcuaccugcagaggc

SEQ ID NO: 408386 - RNA, 19 nt, Human
cugguuccccaaccacaga

SEQ ID NO: 408387 - RNA, 32 nt, Human
cugguucccccacaguagguguuuucacauaa

SEQ ID NO: 408388 - RNA, 32 nt, Human
cugguucccugccuuugugccaacccauacuu

SEQ ID NO: 408389 - RNA, 32 nt, Human
cugguucccuggcaggcuggagggcaggagcu

SEQ ID NO: 408390 - RNA, 32 nt, Human
cugguuccuaguuucugauuauucggggaugg

SEQ ID NO: 408391 - RNA, 32 nt, Human
cugguuccucucccuugguuauggccgcuaau

SEQ ID NO: 408392 - RNA, 32 nt, Human
cugguuccugcaacccacuuuuaggucuccca

SEQ ID NO: 408393 - RNA, 32 nt, Human
cugguuccugccaccaccaccuccccaggccg

SEQ ID NO: 408394 - RNA, 32 nt, Human
cugguuccuggcugccugccucuugcacagaa

SEQ ID NO: 408395 - RNA, 32 nt, Human
cugguuccuuucuccccaugccugccuucugc

SEQ ID NO: 408396 - RNA, 32 nt, Human
cugguuccuuucucuuccuucuguaagucagc

SEQ ID NO: 408397 - RNA, 18 nt, Human
cugguucgccggcuucug

SEQ ID NO: 408398 - RNA, 32 nt, Human
cugguucggcucuagggccucagucuggagug

SEQ ID NO: 408399 - RNA, 32 nt, Human
cugguucgucuguguguggugugaccaauggu

SEQ ID NO: 408400 - RNA, 32 nt, Human
cugguucuagucaauucugaaccaccaccccc

SEQ ID NO: 408401 - RNA, 32 nt, Human
cugguucuccauccccauguguuucaggugga

SEQ ID NO: 408402 - RNA, 32 nt, Human
cugguucucccagguggauuuugcuggaauuc

SEQ ID NO: 408403 - RNA, 32 nt, Human
cugguucucccauccauggcaugaggccccga

SEQ ID NO: 408404 - RNA, 32 nt, Human
cugguucucugaggagcgcucaguugcaucug

SEQ ID NO: 408405 - RNA, 18 nt, Human
cugguucucugggguccu

SEQ ID NO: 408406 - RNA, 32 nt, Human
cugguucugcagcuggaccgaccucauucauc

SEQ ID NO: 408407 - RNA, 32 nt, Human
cugguucugcauuccccaccaccucccaggau

SEQ ID NO: 408408 - RNA, 32 nt, Human
cugguucugcuuuccaaugccugcuucccaau

SEQ ID NO: 408409 - RNA, 32 nt, Human
cugguucugggcaggcaguggcaggggcuccc

SEQ ID NO: 408410 - RNA, 32 nt, Human
cugguucuguaacccaguagcugugacguucc

SEQ ID NO: 408411 - RNA, 32 nt, Human
cugguucuguuucccaggcuggagugcagugg

SEQ ID NO: 408412 - RNA, 32 nt, Human
cugguucuuagagaggugcuccagcucuguga

SEQ ID NO: 408413 - RNA, 32 nt, Human
cugguucuuauuucuuuugauucggacgaggu

SEQ ID NO: 408414 - RNA, 32 nt, Human
cugguucuuccucuugggcuuucagcccagac

SEQ ID NO: 408415 - RNA, 32 nt, Human
cugguucuuggcugauguucuguaucuuaaca

SEQ ID NO: 408416 - RNA, 32 nt, Human
cugguugacaucagacccaacccaugaaggcu

SEQ ID NO: 408417 - RNA, 32 nt, Human
cugguugagugggaugauaaugggagaacuua

SEQ ID NO: 408418 - RNA, 32 nt, Human
cugguugcacgcuggggaucccggaccucgau

SEQ ID NO: 408419 - RNA, 32 nt, Human
cugguugcaguugaaaugaccugaaauguagc

SEQ ID NO: 408420 - RNA, 32 nt, Human
cugguugccucggaguuggauccuacagugua

SEQ ID NO: 408421 - RNA, 32 nt, Human
cugguugccuggacacccucucccucugucca

SEQ ID NO: 408422 - RNA, 24 nt, Human
cugguugcuguagcuccugccgga

SEQ ID NO: 408423 - RNA, 32 nt, Human
cugguugcuguuguggagaagguggcguuucc

SEQ ID NO: 408424 - RNA, 32 nt, Human
cugguuggcgucgccuugaaaucccaggccgu

SEQ ID NO: 408425 - RNA, 32 nt, Human
cugguugggaaaugacaccaggaagcccagug

SEQ ID NO: 408426 - RNA, 20 nt, Human
cugguugggaccccacccuc

SEQ ID NO: 408427 - RNA, 32 nt, Human
cugguugggaccccacccuccuaucauggccc

SEQ ID NO: 408428 - RNA, 32 nt, Human
cugguugggagggaaagcauccccguuuuugc

SEQ ID NO: 408429 - RNA, 32 nt, Human
cugguuggucugucugucuguccuuguccuug

SEQ ID NO: 408430 - RNA, 32 nt, Human
cugguuggugcuuuguuuaugguaguaguuuu

SEQ ID NO: 408431 - RNA, 19 nt, Human
cugguugucuuccugccag

SEQ ID NO: 408432 - RNA, 32 nt, Human
cugguugugacagggggcccagagccaccccg

SEQ ID NO: 408433 - RNA, 32 nt, Human
cugguugugguggcacacaccuguaaucccag

SEQ ID NO: 408434 - RNA, 32 nt, Human
cugguuguugggggcuggaggcgggagguccc

SEQ ID NO: 408435 - RNA, 32 nt, Human
cugguuguuuaugcaagagcugguuguuuaaa

SEQ ID NO: 408436 - RNA, 32 nt, Human
cugguuuaagcaucauagccuaugaugauaaa

SEQ ID NO: 408437 - RNA, 32 nt, Human
cugguuuaaguuguucccccucccucugaaaa

SEQ ID NO: 408438 - RNA, 32 nt, Human
cugguuuaaguuguucccccucccucugagaa

SEQ ID NO: 408439 - RNA, 32 nt, Human
cugguuuaaugccaccaacaacuguacaaggu

SEQ ID NO: 408440 - RNA, 32 nt, Human
cugguuuauucucuacgagcuacuucuuagau

SEQ ID NO: 408441 - RNA, 20 nt, Human
cugguuuauuuugggauuuu

SEQ ID NO: 408442 - RNA, 23 nt, Human
cugguuucaaccuccuggccuca

SEQ ID NO: 408443 - RNA, 32 nt, Human
cugguuucaagcaacucuucugccucagcauc

SEQ ID NO: 408444 - RNA, 32 nt, Human
cugguuucaagcaauccuccuaccucagcuuc

SEQ ID NO: 408445 - RNA, 32 nt, Human
cugguuucaagcgauccucccaccucggccuc

SEQ ID NO: 408446 - RNA, 32 nt, Human
cugguuucaagcgauccucccacuucagccuu

SEQ ID NO: 408447 - RNA, 32 nt, Human
cugguuucagcugggggcucucaccagcccuc

SEQ ID NO: 408448 - RNA, 32 nt, Human
cugguuucagggauguggcuguccucagaauc

SEQ ID NO: 408449 - RNA, 18 nt, Human
cugguuuccuggaauguu

SEQ ID NO: 408450 - RNA, 18 nt, Human
cugguuuccuggcagccu

SEQ ID NO: 408451 - RNA, 18 nt, Human
cugguuuccugggauuca

SEQ ID NO: 408452 - RNA, 32 nt, Human
cugguuucucagaauccaaagaucacauauuc

SEQ ID NO: 408453 - RNA, 32 nt, Human
cugguuucucauuccuuaaagcagugguucgc

SEQ ID NO: 408454 - RNA, 32 nt, Human
cugguuucuccacccacaguuccucuuacaga

SEQ ID NO: 408455 - RNA, 32 nt, Human
cugguuucuccauguuggucaggcuggucuca

SEQ ID NO: 408456 - RNA, 32 nt, Human
cugguuucuccucuuggcccuggccuacagac

SEQ ID NO: 408457 - RNA, 32 nt, Human
cugguuucucucccucuccaagcaucuguaag

SEQ ID NO: 408458 - RNA, 19 nt, Human
cugguuucucugggacuuu

SEQ ID NO: 408459 - RNA, 32 nt, Human
cuguggcggcucccaggcccugcccaccuggg

SEQ ID NO: 408460 - RNA, 32 nt, Human
cuguggcggugcaguggcaaaggauccagaua

SEQ ID NO: 408461 - RNA, 18 nt, Human
cuguggcuaaaguuucca

SEQ ID NO: 408462 - RNA, 32 nt, Human
cuguggcuagccacugugcuccagccugggca

SEQ ID NO: 408463 - RNA, 32 nt, Human
cuguggcucaugccaugccaugaagugccuag

SEQ ID NO: 408464 - RNA, 32 nt, Human
cuguggcucauuuugauugaguuccucauuca

SEQ ID NO: 408465 - RNA, 32 nt, Human
cuguggcuccagcugcucaaagacgagccuuc

SEQ ID NO: 408466 - RNA, 32 nt, Human
cuguggcuccaucugcccagcuugccugccuc

SEQ ID NO: 408467 - RNA, 16 nt, Human
cuguggcuccugcagg

SEQ ID NO: 408468 - RNA, 21 nt, Human
cuguggcucucccguugcaga

SEQ ID NO: 408469 - RNA, 32 nt, Human
cuguggcucugaggcccugaauacagaagggu

SEQ ID NO: 408470 - RNA, 32 nt, Human
cuguggcucugaggccuucacuuagagcuguc

SEQ ID NO: 408471 - RNA, 32 nt, Human
cuguggcucuucccuucuguccuccgaggggc

SEQ ID NO: 408472 - RNA, 32 nt, Human
cuguggcugacagggugcuuccuacgguuuuu

SEQ ID NO: 408473 - RNA, 20 nt, Human
cuguggcugagcucacccag

SEQ ID NO: 408474 - RNA, 20 nt, Human
cuguggcugagcuuacccag

SEQ ID NO: 408475 - RNA, 32 nt, Human
cuguggcugagggagagcagcggcggcgggga

SEQ ID NO: 408476 - RNA, 21 nt, Human
cuguggcugaugcggauucag

SEQ ID NO: 408477 - RNA, 21 nt, Human
cuguggcugauuuggucccag

SEQ ID NO: 408478 - RNA, 21 nt, Human
cuguggcugcacuggccccag

SEQ ID NO: 408479 - RNA, 20 nt, Human
cuguggcugcagacucccag

SEQ ID NO: 408480 - RNA, 32 nt, Human
cuguggcugcagcugcugcagcugcugugacc

SEQ ID NO: 408481 - RNA, 32 nt, Human
cuguggcugccuccccuccacggccuccaggg

SEQ ID NO: 408482 - RNA, 32 nt, Human
cuguggcugccugcaccccaggaaaggagggg

SEQ ID NO: 408483 - RNA, 18 nt, Human
cuguggcugccuugggcc

SEQ ID NO: 408484 - RNA, 32 nt, Human
cuguggcugcguuggaaacugacaucaaggaa

SEQ ID NO: 408485 - RNA, 32 nt, Human
cuguggcugcugcugacuagggcugcauggga

SEQ ID NO: 408486 - RNA, 32 nt, Human
cuguggcugcuucuggaagugcuggaagcauc

SEQ ID NO: 408487 - RNA, 20 nt, Human
cuguggcuggcaugccccag

SEQ ID NO: 408488 - RNA, 32 nt, Human
cuguggcugggaagggagacagaggcggcggc

SEQ ID NO: 408489 - RNA, 32 nt, Human
cuguggcugggccuuccucucccuuuaugacg

SEQ ID NO: 408490 - RNA, 32 nt, Human
cuguggcugucauucucccagggcagaacccu

SEQ ID NO: 408491 - RNA, 17 nt, Human
cuguggcuguccuucca

SEQ ID NO: 408492 - RNA, 32 nt, Human
cuguggcuucaguccugcgucugcaccacaca

SEQ ID NO: 408493 - RNA, 32 nt, Human
cuguggcuucagugguguguaagcagguggaa

SEQ ID NO: 408494 - RNA, 32 nt, Human
cuguggcuuccucugugcucuaccuuuuuauu

SEQ ID NO: 408495 - RNA, 32 nt, Human
cuguggcuucuccagccuuucucccucacauc

SEQ ID NO: 408496 - RNA, 32 nt, Human
cuguggcuucuggaccccuccucugccccgca

SEQ ID NO: 408497 - RNA, 32 nt, Human
cuguggcuugcauuuccuacugcuuucuacgu

SEQ ID NO: 408498 - RNA, 32 nt, Human
cuguggcuuggcaguggccccgugacugguga

SEQ ID NO: 408499 - RNA, 32 nt, Human
cuguggcuuuaacugacauauuucuguagcau

SEQ ID NO: 408500 - RNA, 23 nt, Human
cuguggcuuuucuggaauggaau

SEQ ID NO: 408501 - RNA, 32 nt, Human
cugugggaaccacacaucuugccacaacaccc

SEQ ID NO: 408502 - RNA, 18 nt, Human
cugugggaaggggugcag

SEQ ID NO: 408503 - RNA, 32 nt, Human
cugugggaaugagggggucagauaaagaacaa

SEQ ID NO: 408504 - RNA, 32 nt, Human
cugugggaccuggccucaaacucaccaaaucg

SEQ ID NO: 408505 - RNA, 32 nt, Human
cugugggacugaggagcacagagcagagagca

SEQ ID NO: 408506 - RNA, 32 nt, Human
cugugggacugaggagcgcagagcagagagca

SEQ ID NO: 408507 - RNA, 32 nt, Human
cugugggagaccagcggagugggagggagacg

SEQ ID NO: 408508 - RNA, 32 nt, Human
cugugggagagggaagaggaggcugggccucg

SEQ ID NO: 408509 - RNA, 32 nt, Human
cugugggagagggagguggucgggagagugca

SEQ ID NO: 408510 - RNA, 32 nt, Human
cugugggagaggggacacuggaggaguggcug

SEQ ID NO: 408511 - RNA, 32 nt, Human
cugugggaggaaggaggcaggcugugguggga

SEQ ID NO: 408512 - RNA, 32 nt, Human
cugugggaggagaaggggaaguauguuuuggg

SEQ ID NO: 408513 - RNA, 32 nt, Human
cugugggaggccaaggcaggcagaucaccuga

SEQ ID NO: 408514 - RNA, 32 nt, Human
cugugggaggccaaggccagaggauugcuuga

SEQ ID NO: 408515 - RNA, 32 nt, Human
cugugggaggccgaggcaggaggaucacgagg

SEQ ID NO: 408516 - RNA, 18 nt, Human
cugugggaggccggucgg

SEQ ID NO: 408517 - RNA, 32 nt, Human
cugugggaggcggaggcgggaggaucaugagg

SEQ ID NO: 408518 - RNA, 32 nt, Human
cugugggaggcugaggcggguggaucaucuga

SEQ ID NO: 408519 - RNA, 32 nt, Human
cugugggaggcugaggugggaggaucaccuga

SEQ ID NO: 408520 - RNA, 32 nt, Human
cugugggaggcugagguggguggaucaccagg

SEQ ID NO: 408521 - RNA, 32 nt, Human
cugugggagggcccuguagaccacaucagggu

SEQ ID NO: 408522 - RNA, 32 nt, Human
cugugggagggccugccccugcccccaccucc

SEQ ID NO: 408523 - RNA, 32 nt, Human
cugugggagggugagugggugaggccgagccu

SEQ ID NO: 408524 - RNA, 32 nt, Human
cugugggagguggcgggaacagggguguggga

SEQ ID NO: 408525 - RNA, 32 nt, Human
cugugggaguaguucuggagcugagguggaag

SEQ ID NO: 408526 - RNA, 25 nt, Human
cugugggaucaacugcacauccacu

SEQ ID NO: 408527 - RNA, 32 nt, Human
cugugggaugagcuccagcauggggugaggua

SEQ ID NO: 408528 - RNA, 32 nt, Human
cugugggauggggacagcauuccugcacaucc

SEQ ID NO: 408529 - RNA, 32 nt, Human
cugugggauggggcuugggaguugcagugaau

SEQ ID NO: 408530 - RNA, 32 nt, Human
cugugggcaaagugccugccucugaccucauc

SEQ ID NO: 408531 - RNA, 32 nt, Human
cugugggcaacagugucucccgcucuggaaga

SEQ ID NO: 408532 - RNA, 32 nt, Human
cugugggcaaugcuggaggcugugcauccuac

SEQ ID NO: 408533 - RNA, 32 nt, Human
cugugggcaccacuugacuauccaaccugacc

SEQ ID NO: 408534 - RNA, 32 nt, Human
cugugggcagcucgggggcugaaagcugggaa

SEQ ID NO: 408535 - RNA, 32 nt, Human
cugugggcaggaaacgccgccacaggcucugc

SEQ ID NO: 408536 - RNA, 18 nt, Human
cugugggcagguggucag

SEQ ID NO: 408537 - RNA, 32 nt, Human
cugugggcaucaggcuguggggcggcaucccu

SEQ ID NO: 408538 - RNA, 32 nt, Human
cugugggcauggucaaaggcucaaaccuuuau

SEQ ID NO: 408539 - RNA, 21 nt, Human
cugugggccacucgcugcaga

SEQ ID NO: 408540 - RNA, 19 nt, Human
cugugggccgggcgcggug

SEQ ID NO: 408541 - RNA, 32 nt, Human
cugugggccucucuccaggaccacagcugcca

SEQ ID NO: 408542 - RNA, 32 nt, Human
cugugggccuggaagaugggaggaggggcuug

SEQ ID NO: 408543 - RNA, 32 nt, Human
cugugggccuucccauccaccccaccacaacu

SEQ ID NO: 408544 - RNA, 32 nt, Human
cugugggccuuucugucccaccccugucagca

SEQ ID NO: 408545 - RNA, 32 nt, Human
cugugggcggggucuuggggaugaggaggggu

SEQ ID NO: 408546 - RNA, 32 nt, Human
cugugggcuacucagccaggguacagugggag

SEQ ID NO: 408547 - RNA, 32 nt, Human
cugugggcucagaaacugcuagguaaaagaau

SEQ ID NO: 408548 - RNA, 32 nt, Human
cugugggcugaagugcucugagguccuaaaua

SEQ ID NO: 408549 - RNA, 32 nt, Human
cugugggcuggcagggcaaccauaccauacuc

SEQ ID NO: 408550 - RNA, 32 nt, Human
cugugggcuggcugcacuggccucugcggugg

SEQ ID NO: 408551 - RNA, 32 nt, Human
cugugggcuguggucacgugcucccagaagac

SEQ ID NO: 408552 - RNA, 32 nt, Human
cuguggggaagggaggugggcugagagguaga

SEQ ID NO: 408553 - RNA, 32 nt, Human
cuguggggaagggcugaugcagguguggaguc

SEQ ID NO: 408554 - RNA, 19 nt, Human
cuguggggagacacugcag

SEQ ID NO: 408555 - RNA, 32 nt, Human
cuguggggaggaaccauaaacccagcccucac

SEQ ID NO: 408556 - RNA, 32 nt, Human
cuguggggaggaggaggaagaagaggaggagg

SEQ ID NO: 408557 - RNA, 32 nt, Human
cuguggggagugcagggccagauggggacucc

SEQ ID NO: 408558 - RNA, 32 nt, Human
cuguggggauuuccuuccccugcuccaucagc

SEQ ID NO: 408559 - RNA, 32 nt, Human
cuguggggcgggcuucccagggugcucaugcc

SEQ ID NO: 408560 - RNA, 32 nt, Human
cuguggggcugcugcccucuguguuccuacgc

SEQ ID NO: 408561 - RNA, 32 nt, Human
cuguggggcugguacaggaggcucauggaauu

SEQ ID NO: 408562 - RNA, 32 nt, Human
cuguggggcuuggugaguguuucguggccucu

SEQ ID NO: 408563 - RNA, 32 nt, Human
cugugggggaggaggaggggaucgccggggag

SEQ ID NO: 408564 - RNA, 32 nt, Human
cugugggggcaugagggagaaaaggccauugg

SEQ ID NO: 408565 - RNA, 32 nt, Human
cugugggggccaccccuccacccccaccccca

SEQ ID NO: 408566 - RNA, 23 nt, Human
cugugggggcuauacaguuccag

SEQ ID NO: 408567 - RNA, 32 nt, Human
cuguggggguaggccugcugauucagaggguc

SEQ ID NO: 408568 - RNA, 32 nt, Human
cuguggggguauggggcuccagugaguuagcc

SEQ ID NO: 408569 - RNA, 32 nt, Human
cugugggggucagacuccugaggcucucccuu

SEQ ID NO: 408570 - RNA, 32 nt, Human
cuguggggguuuggguuugagggaagggagca

SEQ ID NO: 408571 - RNA, 32 nt, Human
cuguggggucauuacccucugccuccuggaag

SEQ ID NO: 408572 - RNA, 29 nt, Human
cuguggggucuguguguguagugagagug

SEQ ID NO: 408573 - RNA, 32 nt, Human
cuguggggugacgcuucagggcagagcugccu

SEQ ID NO: 408574 - RNA, 32 nt, Human
cuguggggugcugguggagcagcugaugucgu

SEQ ID NO: 408575 - RNA, 32 nt, Human
cugugggguguccugcucacgguuucauggau

SEQ ID NO: 408576 - RNA, 32 nt, Human
cuguggguagagcucagaugaccuagggagaa

SEQ ID NO: 408577 - RNA, 32 nt, Human
cuguggguccacuuccuucaucggccaccuuc

SEQ ID NO: 408578 - RNA, 25 nt, Human
cugugggucccaguccccacugcug

SEQ ID NO: 408579 - RNA, 32 nt, Human
cugugggucucaggaccugggucugggcuggg

SEQ ID NO: 408580 - RNA, 32 nt, Human
cugugggucugcaccagguacuccaggccagc

SEQ ID NO: 408581 - RNA, 32 nt, Human
cugugggucugucggugccgagggcaggaugg

SEQ ID NO: 408582 - RNA, 32 nt, Human
cugugggucuugcucaauacuguucauaccug

SEQ ID NO: 408583 - RNA, 25 nt, Human
cugugggugaauggauguguguuga

SEQ ID NO: 408584 - RNA, 32 nt, Human
cugugggugagccaggccaacauugguguccc

SEQ ID NO: 408585 - RNA, 32 nt, Human
cugugggugagggaagccagaaugacacaaag

SEQ ID NO: 408586 - RNA, 32 nt, Human
cugugggugaugugcugggccccugguucacu

SEQ ID NO: 408587 - RNA, 32 nt, Human
cugugggugcagcucuuccagaaaguauuagg

SEQ ID NO: 408588 - RNA, 32 nt, Human
cuguggguggaggaacugggcacugggagcgu

SEQ ID NO: 408589 - RNA, 32 nt, Human
cuguggguggaggacuccugccuuuccuguuu

SEQ ID NO: 408590 - RNA, 32 nt, Human
cugugggugggcccuuucuccauagucugccg

SEQ ID NO: 408591 - RNA, 32 nt, Human
cuguggguggggaggagggaaggguccucaga

SEQ ID NO: 408592 - RNA, 32 nt, Human
cugugggugggguggagggugaaauucuuggu

SEQ ID NO: 408593 - RNA, 31 nt, Human
cugugggugugggggcccugggugaaugcug

SEQ ID NO: 408594 - RNA, 32 nt, Human
cugugguagacaggcugugacacuaguguugc

SEQ ID NO: 408595 - RNA, 32 nt, Human
cugugguagagcucgggccagcuguaguucau

SEQ ID NO: 408596 - RNA, 32 nt, Human
cugugguaggaggcagggagaguaagacaugc

SEQ ID NO: 408597 - RNA, 32 nt, Human
cugugguagguggaucacuugaggucaggagu

SEQ ID NO: 408598 - RNA, 32 nt, Human
cugugguaguccucccaagcugugcugggaag

SEQ ID NO: 408599 - RNA, 32 nt, Human
cugugguauauacuuucuccuacucuagcaaa

SEQ ID NO: 408600 - RNA, 32 nt, Human
cuguggucaagaguucaagaccagccuggcca

SEQ ID NO: 408601 - RNA, 31 nt, Human
cuguggucaaugucuuccauuucccggaguu

SEQ ID NO: 408602 - RNA, 32 nt, Human
cuguggucacauuucaaaggccagaucuuucc

SEQ ID NO: 408603 - RNA, 32 nt, Human
cuguggucaccuuuguguuagcaagugugugg

SEQ ID NO: 408604 - RNA, 32 nt, Human
cuguggucaggaguuugagaccagccuggcca

SEQ ID NO: 408605 - RNA, 32 nt, Human
cuguggucagguaggcugggcugugaacagca

SEQ ID NO: 408606 - RNA, 32 nt, Human
cuguggucaguguggcugcauagcaguggauu

SEQ ID NO: 408607 - RNA, 32 nt, Human
cugugguccacucaggagguuaacugcaguca

SEQ ID NO: 408608 - RNA, 24 nt, Human
cugugguccaggcaggagugcagu

SEQ ID NO: 408609 - RNA, 22 nt, Human
cuguggucccagcuacucggga

SEQ ID NO: 408610 - RNA, 32 nt, Human
cuguggucccagcuacucgggaggcuuagaca

SEQ ID NO: 408611 - RNA, 32 nt, Human
cuguggucccagcugcucggaaggcugaagca

SEQ ID NO: 408612 - RNA, 32 nt, Human
cuguggucccaucugacucaaaggacauauac

SEQ ID NO: 408613 - RNA, 32 nt, Human
cugugguccuuggggcuuagggagaggaggga

SEQ ID NO: 408614 - RNA, 32 nt, Human
cuguggucgcuggccgagaucgccacgucgga

SEQ ID NO: 408615 - RNA, 32 nt, Human
cuguggucuaacuccaccggcucuuccugcac

SEQ ID NO: 408616 - RNA, 32 nt, Human
cuguggucuaggggaauccugccugccccaug

SEQ ID NO: 408617 - RNA, 32 nt, Human
cuguggucucaagaaauggugaaaugccugag

SEQ ID NO: 408618 - RNA, 23 nt, Human
cuguggucuccagccaccccuac

SEQ ID NO: 408619 - RNA, 32 nt, Human
cuguggucuccucugcaaagcauuuuaauuaa

SEQ ID NO: 408620 - RNA, 32 nt, Human
cuguggucucuagggcucugcagcagcagugg

SEQ ID NO: 408621 - RNA, 32 nt, Human
cuguggucucugcucuggcuguguuucagccc

SEQ ID NO: 408622 - RNA, 32 nt, Human
cuguggucugcauguccauguuugggacauuc

SEQ ID NO: 408623 - RNA, 21 nt, Human
cuguggucugcccacccccca

SEQ ID NO: 408624 - RNA, 32 nt, Human
cuguggucugguguuccagcugaggcaggggg

SEQ ID NO: 408625 - RNA, 32 nt, Human
cuguggucugucaggacugauggccagcagcu

SEQ ID NO: 408626 - RNA, 32 nt, Human
cuguggucuguccucacaugugcacugguaac

SEQ ID NO: 408627 - RNA, 32 nt, Human
cuguggugcagagcuaguuccucuccagcuca

SEQ ID NO: 408628 - RNA, 32 nt, Human
cugugguggaggagaaggaaagguacagggcg

SEQ ID NO: 408629 - RNA, 32 nt, Human
cugugguggcaccauggccuuggcccugcuac

SEQ ID NO: 408630 - RNA, 32 nt, Human
cugugguggccagcuacucaggaggcugaggc

SEQ ID NO: 408631 - RNA, 32 nt, Human
cuguggugggcuccggugcacugugggaugga

SEQ ID NO: 408632 - RNA, 32 nt, Human
cugugguggugaggagagacucuggagcaacc

SEQ ID NO: 408633 - RNA, 32 nt, Human
cuguggugguuccacuuuaauacugaaacacc

SEQ ID NO: 408634 - RNA, 32 nt, Human
cuguggugucauggauagcuggcugucugcca

SEQ ID NO: 408635 - RNA, 32 nt, Human
cugugguguccagcagcauccggcuucauggg

SEQ ID NO: 408636 - RNA, 32 nt, Human
cuguggugucugcuuauuuuuguauuugugcu

SEQ ID NO: 408637 - RNA, 32 nt, Human
cuguggugugaaagguggccagccugguucuc

SEQ ID NO: 408638 - RNA, 32 nt, Human
cugugguuacccacgaggcaguacuuacuauc

SEQ ID NO: 408639 - RNA, 32 nt, Human
cugugguuaguguaauaaaacauguuccuuau

SEQ ID NO: 408640 - RNA, 18 nt, Human
cugugguuauccugcaag

SEQ ID NO: 408641 - RNA, 20 nt, Human
cugugguucaccaccagccc

SEQ ID NO: 408642 - RNA, 32 nt, Human
cugugguugcugcuccccggcuuucacagaca

SEQ ID NO: 408643 - RNA, 31 nt, Human
cugugguuggaggaaagaugagugaagggau

SEQ ID NO: 408644 - RNA, 32 nt, Human
cugugguuuaacuguuuucuuguauauggaua

SEQ ID NO: 408645 - RNA, 32 nt, Human
cugugguuucucuugauuucugaggaucucag

SEQ ID NO: 408646 - RNA, 20 nt, Human
cugugguuuucucugggcca

SEQ ID NO: 408647 - RNA, 32 nt, Human
cugugguuuuguuuccagagaacucagauugc

SEQ ID NO: 408648 - RNA, 32 nt, Human
cuguguaaaccagcaugcugucugccauaaua

SEQ ID NO: 408649 - RNA, 32 nt, Human
cuguguaaaccaguuacuuuccagagaacaaa

SEQ ID NO: 408650 - RNA, 32 nt, Human
cuguguaaagcauguaacuagauauugcuuug

SEQ ID NO: 408651 - RNA, 32 nt, Human
cuguguaacaaaccugcauguucugcacaugg

SEQ ID NO: 408652 - RNA, 32 nt, Human
cuguguaaccaccaccaccuguguaaccacca

SEQ ID NO: 408653 - RNA, 32 nt, Human
cuguguaauuggccugggcugcaugggcugcu

SEQ ID NO: 408654 - RNA, 19 nt, Human
cuguguacacaccaugccc

SEQ ID NO: 408655 - RNA, 32 nt, Human
cuguguacacagaaaccggcaccugccagaca

SEQ ID NO: 408656 - RNA, 32 nt, Human
cuguguacagcaucguucuuugcugaggccuc

SEQ ID NO: 408657 - RNA, 31 nt, Human
cuguguaccagaaucaguuguuggagaaaau

SEQ ID NO: 408658 - RNA, 32 nt, Human
cuguguaccaggcacuguggaaagcaccacau

SEQ ID NO: 408659 - RNA, 32 nt, Human
cuguguaccugacaaaacaccacaucucacuc

SEQ ID NO: 408660 - RNA, 32 nt, Human
cuguguacuuacagggugacccagggaucccu

SEQ ID NO: 408661 - RNA, 32 nt, Human
cuguguacuuugaauuauuuugcaguuaugua

SEQ ID NO: 408662 - RNA, 32 nt, Human
cuguguagacacuaaaaguauuacacaaaauc

SEQ ID NO: 408663 - RNA, 32 nt, Human
cuguguagaguggauugagaaaagaauugggu

SEQ ID NO: 408664 - RNA, 32 nt, Human
cuguguagaugccacuguaaauccagggccua

SEQ ID NO: 408665 - RNA, 32 nt, Human
cuguguagcauccucagugcaaaacccagcuc

SEQ ID NO: 408666 - RNA, 32 nt, Human
cuguguagcuuuguucauugcauuuauuaaac

SEQ ID NO: 408667 - RNA, 32 nt, Human
cuguguaggagcuaaagcaggucuccagggag

SEQ ID NO: 408668 - RNA, 32 nt, Human
cuguguaguuggagggcagggagccugagcca

SEQ ID NO: 408669 - RNA, 32 nt, Human
cuguguauacacacaaacacauauacauaagu

SEQ ID NO: 408670 - RNA, 24 nt, Human
cuguguauauaaauccacaugcac

SEQ ID NO: 408671 - RNA, 32 nt, Human
cuguguauccuuuuuccucuggcucuacacuu

SEQ ID NO: 408672 - RNA, 32 nt, Human
cuguguaucuagcucaagguuuauaacacacc

SEQ ID NO: 408673 - RNA, 32 nt, Human
cuguguaucugcaaagccucugccucagucuc

SEQ ID NO: 408674 - RNA, 18 nt, Human
cuguguaugcccugcaag

SEQ ID NO: 408675 - RNA, 20 nt, Human
cuguguauggaccuguggcu

SEQ ID NO: 408676 - RNA, 32 nt, Human
cuguguauucaaauucaaacagagaugguuug

SEQ ID NO: 408677 - RNA, 20 nt, Human
cuguguauucgccccacuca

SEQ ID NO: 408678 - RNA, 26 nt, Human
cuguguauuuacuuaauuucuuauua

SEQ ID NO: 408679 - RNA, 20 nt, Human
cuguguauuugccccacuca

SEQ ID NO: 408680 - RNA, 32 nt, Human
cugugucaacaacaggaaacuauuuguauuug

SEQ ID NO: 408681 - RNA, 32 nt, Human
cugugucaagaagcauugaaugcugagcggga

SEQ ID NO: 408682 - RNA, 32 nt, Human
cugugucaauggagauggccucugcugacuca

SEQ ID NO: 408683 - RNA, 32 nt, Human
cugugucacacaggcuggagugcaguggcgug

SEQ ID NO: 408684 - RNA, 32 nt, Human
cugugucacaugcagauucucaugcauucacg

SEQ ID NO: 408685 - RNA, 32 nt, Human
cugugucaccaaggcuggagggcaauagcaug

SEQ ID NO: 408686 - RNA, 25 nt, Human
cugugucaccaggauggagugcagu

SEQ ID NO: 408687 - RNA, 32 nt, Human
cugugucaccaggauggagugcaguggcauga

SEQ ID NO: 408688 - RNA, 32 nt, Human
cugugucacccacuccugggugcgugcagacc

SEQ ID NO: 408689 - RNA, 32 nt, Human
cugugucacccagacuggaaugcagugacaca

SEQ ID NO: 408690 - RNA, 32 nt, Human
cugugucacccaggcugccaggcuggagugga

SEQ ID NO: 408691 - RNA, 26 nt, Human
cugugucacccaggcuggagugcagu

SEQ ID NO: 408692 - RNA, 32 nt, Human
cugugucacccaggcuggagugcaguggcaca

SEQ ID NO: 408693 - RNA, 32 nt, Human
cugugucacccaggcuggagugcaguggcgca

SEQ ID NO: 408694 - RNA, 32 nt, Human
cugugucacccaggcuggagugcaguggugca

SEQ ID NO: 408695 - RNA, 26 nt, Human
cugugucaccuaggcuggagugcagu

SEQ ID NO: 408696 - RNA, 32 nt, Human
cugugucaccuaggcuggagugcaguggcaca

SEQ ID NO: 408697 - RNA, 32 nt, Human
cugugucacuccugccacuguuccaccauaga

SEQ ID NO: 408698 - RNA, 32 nt, Human
cugugucacuggcugccuccacucccacuucc

SEQ ID NO: 408699 - RNA, 32 nt, Human
cugugucagcaacagcagcuccaaggacaguu

SEQ ID NO: 408700 - RNA, 32 nt, Human
cugugucagcacaagggacuggcacacacaga

SEQ ID NO: 408701 - RNA, 32 nt, Human
cugugucagcccagcucugccucgcagccccc

SEQ ID NO: 408702 - RNA, 32 nt, Human
cugugucagcuccuacauagcauuagucuuuc

SEQ ID NO: 408703 - RNA, 32 nt, Human
cugugucauccagagcuggagugcagcggcac

SEQ ID NO: 408704 - RNA, 32 nt, Human
cugugucaugcaggcuggagugaagucgugug

SEQ ID NO: 408705 - RNA, 32 nt, Human
cugugucaugcaggcuggagugcaguggcaug

SEQ ID NO: 408706 - RNA, 32 nt, Human
cugugucauugcacuccagccugggcgacaag

SEQ ID NO: 408707 - RNA, 32 nt, Human
cuguguccaaauucagcagaaguggaaugaca

SEQ ID NO: 408708 - RNA, 19 nt, Human
cuguguccacaaaacuacc

SEQ ID NO: 408709 - RNA, 20 nt, Human
cuguguccacagucuccuca

SEQ ID NO: 408710 - RNA, 32 nt, Human
cuguguccacagugauuagccucgucuuucag

SEQ ID NO: 408711 - RNA, 32 nt, Human
cuguguccacuaaaaauacaaaauuagccggg

SEQ ID NO: 408712 - RNA, 32 nt, Human
cuguguccaggucccauccuaaagcuaccuag

SEQ ID NO: 408713 - RNA, 32 nt, Human
cugugucccacccuuccuagcuuugugcccgg

SEQ ID NO: 408714 - RNA, 24 nt, Human
cugugucccaggcuggagugcagu

SEQ ID NO: 408715 - RNA, 32 nt, Human
cugugucccaggcuggagugcaguggcacagu

SEQ ID NO: 408716 - RNA, 32 nt, Human
cugugucccagguuucacagggcucaggguua

SEQ ID NO: 408717 - RNA, 23 nt, Human
cuguguccccaaccaaaaucuca

SEQ ID NO: 408718 - RNA, 18 nt, Human
cuguguccccacagaucu

SEQ ID NO: 408719 - RNA, 21 nt, Human
cuguguccccaccaaaucuca

SEQ ID NO: 408720 - RNA, 18 nt, Human
cuguguccccaccaaauu

SEQ ID NO: 408721 - RNA, 21 nt, Human
cuguguccccacccaaaucuc

SEQ ID NO: 408722 - RNA, 22 nt, Human
cuguguccccacccaaaucuca

SEQ ID NO: 408723 - RNA, 21 nt, Human
cuguguccccacccaagucuc

SEQ ID NO: 408724 - RNA, 21 nt, Human
cuguguccccaccgucuuuca

SEQ ID NO: 408725 - RNA, 22 nt, Human
cuguguccccaccuaaaacuca

SEQ ID NO: 408726 - RNA, 22 nt, Human
cuguguccccacucagaucuca

SEQ ID NO: 408727 - RNA, 20 nt, Human
cuguguccccacuuccucca

SEQ ID NO: 408728 - RNA, 18 nt, Human
cuguguccccagcacuua

SEQ ID NO: 408729 - RNA, 17 nt, Human
cuguguccccagcaucu

SEQ ID NO: 408730 - RNA, 22 nt, Human
cuguguccccauccaaauauca

SEQ ID NO: 408731 - RNA, 32 nt, Human
cuguguccccaucugagggccugguaugcaau

SEQ ID NO: 408732 - RNA, 22 nt, Human
cuguguccccaugcaaaucuca

SEQ ID NO: 408733 - RNA, 20 nt, Human
cuguguccccaugcugccuc

SEQ ID NO: 408734 - RNA, 24 nt, Human
cugugucccccaccuccacccuca

SEQ ID NO: 408735 - RNA, 22 nt, Human
cugugucccccacuuccacuca

SEQ ID NO: 408736 - RNA, 32 nt, Human
cugugucccccaggcuggagugcaguggcaca

SEQ ID NO: 408737 - RNA, 32 nt, Human
cuguguccccucuccuccccugugccagugcc

SEQ ID NO: 408738 - RNA, 22 nt, Human
cuguguccccucugcccccuca

SEQ ID NO: 408739 - RNA, 32 nt, Human
cuguguccccugcagcuccagccccgggcugc

SEQ ID NO: 408740 - RNA, 19 nt, Human
cugugucccuccacugccu

SEQ ID NO: 408741 - RNA, 19 nt, Human
cugugucccugaacaucca

SEQ ID NO: 408742 - RNA, 32 nt, Human
cugugucccugauuuugcugugcaaauauaaa

SEQ ID NO: 408743 - RNA, 32 nt, Human
cugugucccugggggccccugaugcuuucucc

SEQ ID NO: 408744 - RNA, 32 nt, Human
cuguguccgcagcugcugccacucugggcugc

SEQ ID NO: 408745 - RNA, 20 nt, Human
cuguguccucagccauccca

SEQ ID NO: 408746 - RNA, 32 nt, Human
cuguguccuccaccaugcacucaccccuagcc

SEQ ID NO: 408747 - RNA, 32 nt, Human
cuguguccucccaucuauccugucuuuccuuu

SEQ ID NO: 408748 - RNA, 32 nt, Human
cuguguccuccccuccccggcccucccacagc

SEQ ID NO: 408749 - RNA, 20 nt, Human
cuguguccugacaccaccuc

SEQ ID NO: 408750 - RNA, 20 nt, Human
cuguguccugagcacacaag

SEQ ID NO: 408751 - RNA, 22 nt, Human
cuguguccugcccucccaucca

SEQ ID NO: 408752 - RNA, 32 nt, Human
cuguguccuggacggguggacuuagcuaggga

SEQ ID NO: 408753 - RNA, 22 nt, Human
cuguguccuggauuccauucca

SEQ ID NO: 408754 - RNA, 32 nt, Human
cuguguccuucucuuugcaggagaagggacag

SEQ ID NO: 408755 - RNA, 32 nt, Human
cuguguccuucucuuuguucagugaagccaau

SEQ ID NO: 408756 - RNA, 32 nt, Human
cuguguccuugcacuccuaucuggagauauca

SEQ ID NO: 408757 - RNA, 20 nt, Human
cuguguccuuuuaucucuca

SEQ ID NO: 408758 - RNA, 32 nt, Human
cugugucgauacaauaaucgacuugcagaaca

SEQ ID NO: 408759 - RNA, 32 nt, Human
cugugucgcaccuggcaccugcucgggagcgc

SEQ ID NO: 408760 - RNA, 32 nt, Human
cugugucgccaaggcuggagugcaguggugcg

SEQ ID NO: 408761 - RNA, 26 nt, Human
cugugucgcccaagcuagagugcagu

SEQ ID NO: 408762 - RNA, 32 nt, Human
cugugucgcccagacuggagugcagugguggg

SEQ ID NO: 408763 - RNA, 32 nt, Human
cugugucgcccaggcuggagugcaaguggcau

SEQ ID NO: 408764 - RNA, 32 nt, Human
cugugucgcccaggcuggagugcagugagcug

SEQ ID NO: 408765 - RNA, 32 nt, Human
cugugucgcccaggcuggagugcaguggcgug

SEQ ID NO: 408766 - RNA, 32 nt, Human
cugugucgccuaggcuggagugcaguggcgug

SEQ ID NO: 408767 - RNA, 22 nt, Human
cugugucgcugccugggaucuu

SEQ ID NO: 408768 - RNA, 23 nt, Human
cugugucgcuguccccaguccca

SEQ ID NO: 408769 - RNA, 17 nt, Human
cugugucgucccccauc

SEQ ID NO: 408770 - RNA, 32 nt, Human
cugugucuagaggaagccagagacagaaauag

SEQ ID NO: 408771 - RNA, 32 nt, Human
cugugucuaucccugucugugugucucuguua

SEQ ID NO: 408772 - RNA, 32 nt, Human
cugugucucaccagccuggagaugucugcugu

SEQ ID NO: 408773 - RNA, 24 nt, Human
cugugucucaggcuggaguacagu

SEQ ID NO: 408774 - RNA, 32 nt, Human
cugugucucaggcuggaguacaguggugcaau

SEQ ID NO: 408775 - RNA, 32 nt, Human
cugugucuccacacaucuccccauaugcuucc

SEQ ID NO: 408776 - RNA, 32 nt, Human
cugugucuccauccaaaucucaucuuaaauug

SEQ ID NO: 408777 - RNA, 32 nt, Human
cugugucucccaggccacugggugcucucugc

SEQ ID NO: 408778 - RNA, 32 nt, Human
cugugucuccccucagacuggggcucccugag

SEQ ID NO: 408779 - RNA, 32 nt, Human
cugugucuccccucagacugggguuccccaag

SEQ ID NO: 408780 - RNA, 32 nt, Human
cugugucuccccucagccuggggcucccugag

SEQ ID NO: 408781 - RNA, 32 nt, Human
cugugucuccccucaggcuggggcuccuugag

SEQ ID NO: 408782 - RNA, 22 nt, Human
cugugucucugaccccuucuca

SEQ ID NO: 408783 - RNA, 32 nt, Human
cugugucucuucucagggacaggcugguccag

SEQ ID NO: 408784 - RNA, 32 nt, Human
cugugucucuuuauuuaugcugugccauucaa

SEQ ID NO: 408785 - RNA, 32 nt, Human
cugugucugcuccaaauguagacagcaauugu

SEQ ID NO: 408786 - RNA, 32 nt, Human
cugugucugcugguggcugcugaggccuuggu

SEQ ID NO: 408787 - RNA, 32 nt, Human
cugugucugggaacuaccugcccagcuguuuu

SEQ ID NO: 408788 - RNA, 32 nt, Human
cugugucuggguccacacacccuucaggaagg

SEQ ID NO: 408789 - RNA, 32 nt, Human
cugugucugguggugauucucagacaccauca

SEQ ID NO: 408790 - RNA, 20 nt, Human
cugugucugucucccccuca

SEQ ID NO: 408791 - RNA, 32 nt, Human
cugugucuucacucgccccgagguggguggag

SEQ ID NO: 408792 - RNA, 18 nt, Human
cugugucuucuggggucu

SEQ ID NO: 408793 - RNA, 18 nt, Human
cugugugaaacccucuca

SEQ ID NO: 408794 - RNA, 23 nt, Human
cugugugaagauuuuuagcugua

SEQ ID NO: 408795 - RNA, 23 nt, Human
cugugugaaggugaaagugcagu

SEQ ID NO: 408796 - RNA, 32 nt, Human
cugugugaaugagccccaggagcagggcagua

SEQ ID NO: 408797 - RNA, 32 nt, Human
cugugugaccuuaggcuggagugcaauggcau

SEQ ID NO: 408798 - RNA, 32 nt, Human
cugugugacuccaggucccaggaaccuugccu

SEQ ID NO: 408799 - RNA, 32 nt, Human
cugugugagagauucuucauuucugcuuucug

SEQ ID NO: 408800 - RNA, 19 nt, Human
cugugugagaucugugcug

SEQ ID NO: 408801 - RNA, 18 nt, Human
cugugugagcaggguguu

SEQ ID NO: 408802 - RNA, 32 nt, Human
cugugugagccaccacacccagccugggucuc

SEQ ID NO: 408803 - RNA, 32 nt, Human
cugugugagguagcagugggcacuuuucauug

SEQ ID NO: 408804 - RNA, 32 nt, Human
cugugugaucugaucuuuaccuucccuuccuu

SEQ ID NO: 408805 - RNA, 32 nt, Human
cugugugaugcugucuccucuccagggacaag

SEQ ID NO: 408806 - RNA, 32 nt, Human
cugugugauucaguaggguuugagacuuagcu

SEQ ID NO: 408807 - RNA, 32 nt, Human
cugugugcaccaaggcccaucugacccauaua

SEQ ID NO: 408808 - RNA, 22 nt, Human
cugugugcaggcccugccugga

SEQ ID NO: 408809 - RNA, 32 nt, Human
cugugugcagugagcaauuuuugugucagaaa

SEQ ID NO: 408810 - RNA, 32 nt, Human
cugugugcaguggauccacauagcuaauauga

SEQ ID NO: 408811 - RNA, 32 nt, Human
cugugugccaugacauagcaggaaaggccagg

SEQ ID NO: 408812 - RNA, 32 nt, Human
cugugugcccacugaagagaugaagaauaaaa

SEQ ID NO: 408813 - RNA, 32 nt, Human
cugugugccccacuccagccuggggaccccac

SEQ ID NO: 408814 - RNA, 32 nt, Human
cugugugccccagggaaaucguuucaucuuuc

SEQ ID NO: 408815 - RNA, 32 nt, Human
cugugugccuccggaagacaccaccuuucccu

SEQ ID NO: 408816 - RNA, 32 nt, Human
cugugugccugcaccaccccacugccuuccuu

SEQ ID NO: 408817 - RNA, 24 nt, Human
cugugugccugcucccugcugcug

SEQ ID NO: 408818 - RNA, 32 nt, Human
cugugugccugggggaguuuuccucuauacau

SEQ ID NO: 408819 - RNA, 32 nt, Human
cugugugcucagggcacaugcacacagacauu

SEQ ID NO: 408820 - RNA, 32 nt, Human
cugugugcucaguccagcaccauggggaagcg

SEQ ID NO: 408821 - RNA, 32 nt, Human
cugugugcuccuccuuggugccuggccuggca

SEQ ID NO: 408822 - RNA, 32 nt, Human
cugugugcucugcuaccuguucaucagcucua

SEQ ID NO: 408823 - RNA, 32 nt, Human
cugugugcuggcuggacuccucgggacaagcc

SEQ ID NO: 408824 - RNA, 32 nt, Human
cugugugcugugugugccccaggcucuguuga

SEQ ID NO: 408825 - RNA, 20 nt, Human
cuguguggaaugucaccuca

SEQ ID NO: 408826 - RNA, 32 nt, Human
cuguguggagccaccacuccuagccacagcug

SEQ ID NO: 408827 - RNA, 32 nt, Human
cuguguggaggugaguggaguggggcaggugg

SEQ ID NO: 408828 - RNA, 32 nt, Human
cuguguggagugugcuguguacacaucugcuu

SEQ ID NO: 408829 - RNA, 20 nt, Human
cuguguggaugcugcagcug

SEQ ID NO: 408830 - RNA, 32 nt, Human
cuguguggauggagcagcaggagccagugagu

SEQ ID NO: 408831 - RNA, 32 nt, Human
cuguguggcaaaacugccuccuacggcggcuc

SEQ ID NO: 408832 - RNA, 32 nt, Human
cuguguggcaggaagccggcagggaagggccu

SEQ ID NO: 408833 - RNA, 32 nt, Human
cuguguggcauggcucacgccuguaaucccag

SEQ ID NO: 408834 - RNA, 32 nt, Human
cuguguggccaagaagaguugaggaaagauua

SEQ ID NO: 408835 - RNA, 32 nt, Human
cuguguggcccaggcuggagugcaguggcgca

SEQ ID NO: 408836 - RNA, 32 nt, Human
cuguguggcccuuuacagaaaaaguuuucuaa

SEQ ID NO: 408837 - RNA, 32 nt, Human
cuguguggccuagguuggagugcaauggcgca

SEQ ID NO: 408838 - RNA, 32 nt, Human
cuguguggccuucuguaagucccugcccucuc

SEQ ID NO: 408839 - RNA, 32 nt, Human
cuguguggcugccccugccacuccaggcacag

SEQ ID NO: 408840 - RNA, 32 nt, Human
cuguguggcuugcuuccagucuggccuguccu

SEQ ID NO: 408841 - RNA, 32 nt, Human
cugugugggaaaugcugaaagcaccaggagga

SEQ ID NO: 408842 - RNA, 32 nt, Human
cugugugggagaaucacuugagccugggaggu

SEQ ID NO: 408843 - RNA, 32 nt, Human
cugugugggagggcgaggcgggggagccugga

SEQ ID NO: 408844 - RNA, 32 nt, Human
cugugugggagggcgaggcgggggauccugga

SEQ ID NO: 408845 - RNA, 32 nt, Human
cugugugggcuuggugucggugcuccaguucc

SEQ ID NO: 408846 - RNA, 32 nt, Human
cuguguggggaagcaaaaggcaaggguguagu

SEQ ID NO: 408847 - RNA, 32 nt, Human
cugugugggguucagucagccugcugaaauug

SEQ ID NO: 408848 - RNA, 32 nt, Human
cugugugggguugaacucggagccaaaaagug

SEQ ID NO: 408849 - RNA, 32 nt, Human
cuguguggguagagaccauccuuucccugcau

SEQ ID NO: 408850 - RNA, 32 nt, Human
cugugugggugagagaagggacuagacuccua

SEQ ID NO: 408851 - RNA, 19 nt, Human
cuguguggucaacugcagu

SEQ ID NO: 408852 - RNA, 32 nt, Human
cuguguggucugggccagucucugccaugucc

SEQ ID NO: 408853 - RNA, 32 nt, Human
cugugugguguuucaccaacuucggccuaugg

SEQ ID NO: 408854 - RNA, 20 nt, Human
cugugugguugcccgggcca

SEQ ID NO: 408855 - RNA, 32 nt, Human
cugugugguuggucaaggagggaugugaggga

SEQ ID NO: 408856 - RNA, 32 nt, Human
cuguguguaagccugugugaguuguguguaug

SEQ ID NO: 408857 - RNA, 32 nt, Human
cuguguguacauguacaugcauuuuucuaggg

SEQ ID NO: 408858 - RNA, 32 nt, Human
cuguguguagugagugcuucauguguggaaua

SEQ ID NO: 408859 - RNA, 32 nt, Human
cuguguguaguggccucugauugcuugggguu

SEQ ID NO: 408860 - RNA, 32 nt, Human
cuguguguaugacugugugacugugugggagc

SEQ ID NO: 408861 - RNA, 32 nt, Human
cuguguguccugggagcugccugcucccggcc

SEQ ID NO: 408862 - RNA, 32 nt, Human
cugugugucuaugacugugauggguguagcug

SEQ ID NO: 408863 - RNA, 32 nt, Human
cugugugucuucucccccuccucgggugaucc

SEQ ID NO: 408864 - RNA, 19 nt, Human
cugugugucuugggaucuu

SEQ ID NO: 408865 - RNA, 32 nt, Human
cugugugugaagauugggggagaggauguaaa

SEQ ID NO: 408866 - RNA, 32 nt, Human
cugugugugaggaacagucacuacccacuggc

SEQ ID NO: 408867 - RNA, 32 nt, Human
cugugugugcaggcaacguccacccaugcugc

SEQ ID NO: 408868 - RNA, 31 nt, Human
cugugugugcccucugggcucugaguacccc

SEQ ID NO: 408869 - RNA, 32 nt, Human
cugugugugccugggagugaccucacagcugc

SEQ ID NO: 408870 - RNA, 32 nt, Human
cuguguguggaaggcagaagcuagcgguugua

SEQ ID NO: 408871 - RNA, 21 nt, Human
cuguguguggcgggggcgcgg

SEQ ID NO: 408872 - RNA, 32 nt, Human
cuguguguggugaagaccacgccacaccaccc

SEQ ID NO: 408873 - RNA, 19 nt, Human
cuguguguguccugggcca

SEQ ID NO: 408874 - RNA, 32 nt, Human
cugugugugugccucuguuggugaggaugugu

SEQ ID NO: 408875 - RNA, 32 nt, Human
cuguguguguggguauguauguguguauguau

SEQ ID NO: 408876 - RNA, 32 nt, Human
cuguguguguugaccacgucucugcugugaau

SEQ ID NO: 408877 - RNA, 32 nt, Human
cuguguguuaucucugccccacagcagccccu

SEQ ID NO: 408878 - RNA, 32 nt, Human
cuguguguucuuucucuggcauugauuccucu

SEQ ID NO: 408879 - RNA, 32 nt, Human
cuguguguugggauugagucugugccacgugu

SEQ ID NO: 408880 - RNA, 32 nt, Human
cuguguguuugucaucauccucaucucaccau

SEQ ID NO: 408881 - RNA, 32 nt, Human
cuguguuacacaaaguccuuguuuuaacuuag

SEQ ID NO: 408882 - RNA, 32 nt, Human
cuguguuacuagugccugguauguaguaggug

SEQ ID NO: 408883 - RNA, 32 nt, Human
cuguguuagccaggcuggucucgaucuccuga

SEQ ID NO: 408884 - RNA, 32 nt, Human
cuguguucaccaccaccaucagacucaccauu

SEQ ID NO: 408885 - RNA, 20 nt, Human
cuguguucacguggcuccug

SEQ ID NO: 408886 - RNA, 32 nt, Human
cuguguucacugucccauuugagaauucuaag

SEQ ID NO: 408887 - RNA, 32 nt, Human
cuguguucagaaugugguauuggcucuggccc

SEQ ID NO: 408888 - RNA, 32 nt, Human
cuguguucaggauguugaagugcagugucaga

SEQ ID NO: 408889 - RNA, 32 nt, Human
cuguguucaguuaucugguuugagcaaauaaa

SEQ ID NO: 408890 - RNA, 32 nt, Human
cuguguuccagaggaccugaugccaaggggua

SEQ ID NO: 408891 - RNA, 32 nt, Human
cuguguuccugagcuuguccaagucucuuucc

SEQ ID NO: 408892 - RNA, 22 nt, Human
cuguguuccugguccuggguuc

SEQ ID NO: 408893 - RNA, 32 nt, Human
cuguguucuagcgaccacuuguuuuucuuuuu

SEQ ID NO: 408894 - RNA, 22 nt, Human
cuguguucucccaacccuugga

SEQ ID NO: 408895 - RNA, 32 nt, Human
cuguguucucccaggucugggauucuaaguga

SEQ ID NO: 408896 - RNA, 32 nt, Human
cuguguucucccuuuguccucauacagucguc

SEQ ID NO: 408897 - RNA, 32 nt, Human
cuguguucucugaucuaggccuucccagagga

SEQ ID NO: 408898 - RNA, 22 nt, Human
cuguguucugcguuuggucuca

SEQ ID NO: 408899 - RNA, 32 nt, Human
cuguguugaacaaacaggugcuccaggcuuug

SEQ ID NO: 408900 - RNA, 32 nt, Human
cuguguugaacagaugucugucucccuagugu

SEQ ID NO: 408901 - RNA, 32 nt, Human
cuguguugccaaggcuggagugcaggccgcga

SEQ ID NO: 408902 - RNA, 23 nt, Human
cuguguugcccagacaagucuca

SEQ ID NO: 408903 - RNA, 32 nt, Human
cuguguugcccagccugggugucaauaauuau

SEQ ID NO: 408904 - RNA, 32 nt, Human
cuguguugcccagccuggucuugaauugggcu

SEQ ID NO: 408905 - RNA, 32 nt, Human
cuguguugcccaggcuaauaucgaaugcuugg

SEQ ID NO: 408906 - RNA, 25 nt, Human
cuguguugcccaggcuagagugcag

SEQ ID NO: 408907 - RNA, 32 nt, Human
cuguguugcccaggcuagagugcagcagugac

SEQ ID NO: 408908 - RNA, 26 nt, Human
cuguguugcccaggcuagagugcagu

SEQ ID NO: 408909 - RNA, 32 nt, Human
cuguguugcccaggcuagagugcaguggugcc

SEQ ID NO: 408910 - RNA, 32 nt, Human
cuguguugcccaggcuggagugcaaauggcuu

SEQ ID NO: 408911 - RNA, 26 nt, Human
cuguguugcccaggcuggagugcaau

SEQ ID NO: 408912 - RNA, 32 nt, Human
cuguguugcccaggcuggagugcaauggcgca

SEQ ID NO: 408913 - RNA, 26 nt, Human
cuguguugcccaggcuggagugcagu

SEQ ID NO: 408914 - RNA, 32 nt, Human
cuguguugcccaggcuggagugcaguagcuau

SEQ ID NO: 408915 - RNA, 32 nt, Human
cuguguugcccaggcuggagugcaguagugca

SEQ ID NO: 408916 - RNA, 32 nt, Human
cuguguugcccaggcuggagugcaguggccug

SEQ ID NO: 408917 - RNA, 32 nt, Human
cuguguugcccaggcuggagugcaguggugug

SEQ ID NO: 408918 - RNA, 32 nt, Human
cuguguugcccaggcuggagugcgguggcuau

SEQ ID NO: 408919 - RNA, 23 nt, Human
cuguguugcccaggcuggucuca

SEQ ID NO: 408920 - RNA, 32 nt, Human
cuguguugcggaaguucucacugugaacuuua

SEQ ID NO: 408921 - RNA, 32 nt, Human
cuguguugcucaggcuggagugcaguggugug

SEQ ID NO: 408922 - RNA, 18 nt, Human
cuguguugcugggauuuu

SEQ ID NO: 408923 - RNA, 32 nt, Human
cuguguuggaacuagcgagugguggagucucu

SEQ ID NO: 408924 - RNA, 32 nt, Human
cuguguuggccaggcuggucuugaaugccuga

SEQ ID NO: 408925 - RNA, 32 nt, Human
cuguguuggcuacaaaccugcacccugggacc

SEQ ID NO: 408926 - RNA, 32 nt, Human
cuguguugggcaagaccucuucccucugggcc

SEQ ID NO: 408927 - RNA, 32 nt, Human
cuguguugggguguugggggaagcugggcauc

SEQ ID NO: 408928 - RNA, 32 nt, Human
cuguguugguacccucgugugcucugagcuaa

SEQ ID NO: 408929 - RNA, 32 nt, Human
cuguguuguaccacugcacuccagccugggug

SEQ ID NO: 408930 - RNA, 32 nt, Human
cuguguuguccaggcuggagugcaauggugug

SEQ ID NO: 408931 - RNA, 26 nt, Human
cuguguuguccaggcuggagugcagu

SEQ ID NO: 408932 - RNA, 32 nt, Human
cuguguuguccaggcuggagugcaguggugug

SEQ ID NO: 408933 - RNA, 32 nt, Human
cuguguugucucugugccagauguggcaagau

SEQ ID NO: 408934 - RNA, 32 nt, Human
cuguguugugauucccuucucuucaacgguuu

SEQ ID NO: 408935 - RNA, 32 nt, Human
cuguguuguuuucccuggaugaaaauaucagu

SEQ ID NO: 408936 - RNA, 32 nt, Human
cuguguuuauucuucucuuuauuuauuuaagu

SEQ ID NO: 408937 - RNA, 32 nt, Human
cuguguuucagccucaguugguugcaccguua

SEQ ID NO: 408938 - RNA, 22 nt, Human
cuguguuucaggauacuucccu

SEQ ID NO: 408939 - RNA, 32 nt, Human
cuguguuucccaaguauacgcuguucuuucgc

SEQ ID NO: 408940 - RNA, 32 nt, Human
cuguguuucgccacugcacaccagccugggug

SEQ ID NO: 408941 - RNA, 32 nt, Human
cuguguuucucuugauuccgugacacccgguu

SEQ ID NO: 408942 - RNA, 32 nt, Human
cuguguuugaauccaagucaccuguguucucu

SEQ ID NO: 408943 - RNA, 32 nt, Human
cuguguuugcuccccuuccccuuccuucuuug

SEQ ID NO: 408944 - RNA, 32 nt, Human
cuguguuuggcuuccaggaauuacaugaacga

SEQ ID NO: 408945 - RNA, 32 nt, Human
cuguguuuguaguguggaaguuggugacuguu

SEQ ID NO: 408946 - RNA, 23 nt, Human
cuguguuuuaaaaaugauugaaa

SEQ ID NO: 408947 - RNA, 32 nt, Human
cuguguuuuagcuaauguagcauauguaauug

SEQ ID NO: 408948 - RNA, 32 nt, Human
cuguguuuuccucaggggcuguccucagaaca

SEQ ID NO: 408949 - RNA, 19 nt, Human
cuguguuuucugguacuuu

SEQ ID NO: 408950 - RNA, 32 nt, Human
cuguguuuugagccacagaagguugugugugu

SEQ ID NO: 408951 - RNA, 32 nt, Human
cuguuaaaaagaaagugagcaguguuagcuua

SEQ ID NO: 408952 - RNA, 32 nt, Human
cuguuaaaaauacaaaauuagccaggcguggu

SEQ ID NO: 408953 - RNA, 32 nt, Human
cuguuaaaacuuaccugcuaggaaugcuagau

SEQ ID NO: 408954 - RNA, 32 nt, Human
cuguuaaacucauuuauugagucaccuuuuuc

SEQ ID NO: 408955 - RNA, 32 nt, Human
cuguuaaacugagguuggggguuuccagggaa

SEQ ID NO: 408956 - RNA, 32 nt, Human
cuguuaaagauuuaugccagagccuugcagga

SEQ ID NO: 408957 - RNA, 32 nt, Human
cuguuaaagcagcugggagggagucuguaccc

SEQ ID NO: 408958 - RNA, 32 nt, Human
cuguuaacagucugggacauccgguauaguaa

SEQ ID NO: 408959 - RNA, 32 nt, Human
cuguuaacagugcugcaagaacaaagguggag

SEQ ID NO: 408960 - RNA, 32 nt, Human
cuguuaaccaaggagcaaaggaaaguauauuu

SEQ ID NO: 408961 - RNA, 32 nt, Human
cuguuaagcccuugaaauauagcuagugugac

SEQ ID NO: 408962 - RNA, 32 nt, Human
cuguuaaguccucagguuuggcccagauucca

SEQ ID NO: 408963 - RNA, 32 nt, Human
cuguuaauacuuuuguacacucucacuacagu

SEQ ID NO: 408964 - RNA, 32 nt, Human
cuguuaaugcgggcagcaccuacagcaacuug

SEQ ID NO: 408965 - RNA, 32 nt, Human
cuguuacaaaggagaugagguugugggagaac

SEQ ID NO: 408966 - RNA, 24 nt, Human
cuguuacacccguuucgugaagcu

SEQ ID NO: 408967 - RNA, 32 nt, Human
cuguuacagaggucuccagagccuucucucuc

SEQ ID NO: 408968 - RNA, 32 nt, Human
cuguuacagcacucuguucugcuggaccacuu

SEQ ID NO: 408969 - RNA, 32 nt, Human
cuguuacagugcagcagcagugacggaggaaa

SEQ ID NO: 408970 - RNA, 32 nt, Human
cuguuacauauguauacaugugccauguuggu

SEQ ID NO: 408971 - RNA, 32 nt, Human
cuguuacauguagggcaaucugucuuuaagua

SEQ ID NO: 408972 - RNA, 32 nt, Human
cuguuaccagcucugcagaugugcacauaucu

SEQ ID NO: 408973 - RNA, 32 nt, Human
cuguuaccauccuacucccccuucccaagcua

SEQ ID NO: 408974 - RNA, 32 nt, Human
cuguuaccaugaacaaacauugccagaauuaa

SEQ ID NO: 408975 - RNA, 24 nt, Human
cuguuacccagauuggagugcagu

SEQ ID NO: 408976 - RNA, 32 nt, Human
cuguuacccagauuggagugcaguggcgcgau

SEQ ID NO: 408977 - RNA, 32 nt, Human
cuguuacccagcuccuggaggcaguggcugua

SEQ ID NO: 408978 - RNA, 24 nt, Human
cuguuacccaggccggagugcagu

SEQ ID NO: 408979 - RNA, 32 nt, Human
cuguuacccaggccggagugcaguggcgcagu

SEQ ID NO: 408980 - RNA, 32 nt, Human
cuguuacccaggcuagagugcaauggcgugau

SEQ ID NO: 408981 - RNA, 32 nt, Human
cuguuacccaggcuagagugcaguggcgcgau

SEQ ID NO: 408982 - RNA, 24 nt, Human
cuguuacccaggcuagaguguagu

SEQ ID NO: 408983 - RNA, 32 nt, Human
cuguuacccaggcuagaguguaguggcaugau

SEQ ID NO: 408984 - RNA, 24 nt, Human
cuguuacccaggcuccagugcagu

SEQ ID NO: 408985 - RNA, 24 nt, Human
cuguuacccaggcuggaauacagu

SEQ ID NO: 408986 - RNA, 24 nt, Human
cuguuacccaggcuggaaugcagu

SEQ ID NO: 408987 - RNA, 32 nt, Human
cuguuacccaggcuggaaugcaguggcgcaau

SEQ ID NO: 408988 - RNA, 24 nt, Human
cuguuacccaggcuggaggacagu

SEQ ID NO: 408989 - RNA, 32 nt, Human
cuguuacccaggcuggaggacagugaugugau

SEQ ID NO: 408990 - RNA, 22 nt, Human
cuguuacccaggcuggagugca

SEQ ID NO: 408991 - RNA, 24 nt, Human
cuguuacccaggcuggagugcaau

SEQ ID NO: 408992 - RNA, 32 nt, Human
cuguuacccaggcuggagugcaauggagugau

SEQ ID NO: 408993 - RNA, 32 nt, Human
cuguuacccaggcuggagugcaauggcgcaaa

SEQ ID NO: 408994 - RNA, 24 nt, Human
cuguuacccaggcuggagugcagu

SEQ ID NO: 408995 - RNA, 32 nt, Human
cuguuacccaggcuggagugcagugacacaau

SEQ ID NO: 408996 - RNA, 32 nt, Human
cuguuacccaggcuggagugcaguggcaugau

SEQ ID NO: 408997 - RNA, 32 nt, Human
cuguuacccaggcuggagugcagugggugauc

SEQ ID NO: 408998 - RNA, 32 nt, Human
cuguuacccaggcuggagugcaguggugcgau

SEQ ID NO: 408999 - RNA, 32 nt, Human
cuguuacccaggcuggagugcaguggugcuau

SEQ ID NO: 409000 - RNA, 32 nt, Human
cuguuacccaggcuggagugcaguggugugau

SEQ ID NO: 409001 - RNA, 32 nt, Human
cuguuacccaggcuggaguguaguggugccau

SEQ ID NO: 409002 - RNA, 24 nt, Human
cuguuacccaugcuggaguacggu

SEQ ID NO: 409003 - RNA, 32 nt, Human
cuguuacccaugcuggaguacgguggcgagau

SEQ ID NO: 409004 - RNA, 32 nt, Human
cuguuaccccucuccaucuuaccaaguugaaa

SEQ ID NO: 409005 - RNA, 32 nt, Human
cuguuaccuggaccagguagaagugagcuacu

SEQ ID NO: 409006 - RNA, 24 nt, Human
cuguuaccuuuuuguuccuuacca

SEQ ID NO: 409007 - RNA, 32 nt, Human
cuguuacgaggggagaaagugggacuccucca

SEQ ID NO: 409008 - RNA, 32 nt, Human
cuguuacucaacaaaauuuugcagagaugaag

SEQ ID NO: 409009 - RNA, 32 nt, Human
cuguuacucccccucacccacucccuccuucc

SEQ ID NO: 409010 - RNA, 32 nt, Human
cuguuacugugcaucucugggcauggccugug

SEQ ID NO: 409011 - RNA, 32 nt, Human
cuguuacuugaaugccuucccugagggaagag

SEQ ID NO: 409012 - RNA, 21 nt, Human
cuguuacuuucuuucugggca

SEQ ID NO: 409013 - RNA, 22 nt, Human
cuguuagaagaacuugguugcu

SEQ ID NO: 409014 - RNA, 22 nt, Human
cuguuagaucuccuguuuguuu

SEQ ID NO: 409015 - RNA, 32 nt, Human
cuguuagauggaggaauauggugacccacuau

SEQ ID NO: 409016 - RNA, 32 nt, Human
cuguuagauguccucagaagucaguugcaaau

SEQ ID NO: 409017 - RNA, 21 nt, Human
cuguuagcccucagaguccca

SEQ ID NO: 409018 - RNA, 32 nt, Human
cuguuagccuauugcucaagcacuacagaaug

SEQ ID NO: 409019 - RNA, 32 nt, Human
cuguuagccucugagauguguggugugagccc

SEQ ID NO: 409020 - RNA, 32 nt, Human
cuguuagccugauucuacuguacaauguagaa

SEQ ID NO: 409021 - RNA, 32 nt, Human
cuguuagcuaggggaaaggcccugccaauguu

SEQ ID NO: 409022 - RNA, 32 nt, Human
cuguuagcugagagugcgggcaagacauaaac

SEQ ID NO: 409023 - RNA, 32 nt, Human
cuguuagcuguucugccuucugggugagcugg

SEQ ID NO: 409024 - RNA, 32 nt, Human
cuguuaggaaccaggcuacagagcaggaguug

SEQ ID NO: 409025 - RNA, 32 nt, Human
cuguuagucaucugugcuuucuuuaccaacug

SEQ ID NO: 409026 - RNA, 32 nt, Human
cuguuagugccagugagcaauacuguugugca

SEQ ID NO: 409027 - RNA, 32 nt, Human
cuguuauauacccaaugccuagaagaggaccu

SEQ ID NO: 409028 - RNA, 32 nt, Human
cuguuaucaggacuugaggccugagacacagc

SEQ ID NO: 409029 - RNA, 24 nt, Human
cuguuauccaggcuggaaugcggu

SEQ ID NO: 409030 - RNA, 32 nt, Human
cuguuauccaggcuggagugcagaggcacagu

SEQ ID NO: 409031 - RNA, 24 nt, Human
cuguuauccaggcuggugugcagu

SEQ ID NO: 409032 - RNA, 32 nt, Human
cuguuauccaggcuggugugcagugauacaau

SEQ ID NO: 409033 - RNA, 32 nt, Human
cuguuaucucuggugcuggccucugccccucc

SEQ ID NO: 409034 - RNA, 32 nt, Human
cuguuaucugggggagaggaguguggaagggu

SEQ ID NO: 409035 - RNA, 32 nt, Human
cuguuaucuguguccauuuccaaaacuugcac

SEQ ID NO: 409036 - RNA, 32 nt, Human
cuguuaugaacauguguguacaaguauuugug

SEQ ID NO: 409037 - RNA, 32 nt, Human
cuguuaugacacccagaaaugucucaggacgu

SEQ ID NO: 409038 - RNA, 32 nt, Human
cuguuaugucaccuccacaucucagaccaaag

SEQ ID NO: 409039 - RNA, 32 nt, Human
cuguuaugucugcagggcaucaaggggcaggu

SEQ ID NO: 409040 - RNA, 32 nt, Human
cuguuauuaccaggaggaagagaaagaggaca

SEQ ID NO: 409041 - RNA, 32 nt, Human
cuguuauucauuuauccuguacaaucaucugu

SEQ ID NO: 409042 - RNA, 32 nt, Human
cuguuauucccggcgaaggaagugccaaacuc

SEQ ID NO: 409043 - RNA, 32 nt, Human
cuguuauucucaaucuuuauagaaacgauucu

SEQ ID NO: 409044 - RNA, 32 nt, Human
cuguuauugugaugagucuuugguuuaacauc

SEQ ID NO: 409045 - RNA, 32 nt, Human
cuguuauuucucuuuuccuugaucuggagcca

SEQ ID NO: 409046 - RNA, 32 nt, Human
cuguuauuuuccuuccucucuggcagggcacu

SEQ ID NO: 409047 - RNA, 32 nt, Human
cuguuauuuugaaagggcaucuuuugauuuuu

SEQ ID NO: 409048 - RNA, 32 nt, Human
cuguucaaagagacauuuguucaaucucugug

SEQ ID NO: 409049 - RNA, 31 nt, Human
cuguucaacacagcaaugaccaaagcaaccc

SEQ ID NO: 409050 - RNA, 32 nt, Human
cuguucaacaucaccaguucugcccuggcagc

SEQ ID NO: 409051 - RNA, 21 nt, Human
cuguucaacauggcgaaaccc

SEQ ID NO: 409052 - RNA, 22 nt, Human
cuguucaacauggcgaaacccc

SEQ ID NO: 409053 - RNA, 32 nt, Human
cuguucaacauggcgaaaccccauucuaccaa

SEQ ID NO: 409054 - RNA, 32 nt, Human
cuguucaauaagccaaagacccuggugccccg

SEQ ID NO: 409055 - RNA, 32 nt, Human
cuguucaauauggugcccguaaccuccaaagc

SEQ ID NO: 409056 - RNA, 32 nt, Human
cuguucacacacacaguuugagacuccaagcc

SEQ ID NO: 409057 - RNA, 32 nt, Human
cuguucaccggguguccucagagcuguggccu

SEQ ID NO: 409058 - RNA, 32 nt, Human
cuguucacgucucuccccagugggcuccuaag

SEQ ID NO: 409059 - RNA, 32 nt, Human
cuguucacucacuguaaauuuugaggacccag

SEQ ID NO: 409060 - RNA, 32 nt, Human
cuguucacugaccucgaccaagccgcgaccgc

SEQ ID NO: 409061 - RNA, 32 nt, Human
cuguucagacacagccauccuucagugucauc

SEQ ID NO: 409062 - RNA, 32 nt, Human
cuguucagcaaacuaaccagcauucccuacag

SEQ ID NO: 409063 - RNA, 32 nt, Human
cuguucagcaaacuaaccagcauucccuauag

SEQ ID NO: 409064 - RNA, 32 nt, Human
cuguucagccaagagugguggcacgcuugggu

SEQ ID NO: 409065 - RNA, 32 nt, Human
cuguucagcccagcauucagcucuuuggagga

SEQ ID NO: 409066 - RNA, 32 nt, Human
cuguucaggggacagaugcaagcuguggggag

SEQ ID NO: 409067 - RNA, 32 nt, Human
cuguucaguguugcaggaaccuuuucuugggg

SEQ ID NO: 409068 - RNA, 32 nt, Human
cuguucauaugguuuaugaagggaggcaauua

SEQ ID NO: 409069 - RNA, 32 nt, Human
cuguucauccaaguuuuaaguccuccacccug

SEQ ID NO: 409070 - RNA, 32 nt, Human
cuguucauccauucuguucucccuuggggugg

SEQ ID NO: 409071 - RNA, 32 nt, Human
cuguucaucggcuucagccaguucucggacuc

SEQ ID NO: 409072 - RNA, 17 nt, Human
cuguucaucucugcaag

SEQ ID NO: 409073 - RNA, 32 nt, Human
cuguucaugacagcuacuaaccuggagacagu

SEQ ID NO: 409074 - RNA, 32 nt, Human
cuguucaugggagaaaauggcuuaacagucug

SEQ ID NO: 409075 - RNA, 32 nt, Human
cuguuccaaagccagggcuggggcugccaaaa

SEQ ID NO: 409076 - RNA, 32 nt, Human
cuguuccaaucacccacagcaggccugucagu

SEQ ID NO: 409077 - RNA, 32 nt, Human
cuguuccacacguguucacuggagccagguga

SEQ ID NO: 409078 - RNA, 32 nt, Human
cuguuccaccuccccucagacuaucuuucagc

SEQ ID NO: 409079 - RNA, 32 nt, Human
cuguuccacugcacccuggacuauggcaccag

SEQ ID NO: 409080 - RNA, 32 nt, Human
cuguuccacuugcacacacgcacacacucaug

SEQ ID NO: 409081 - RNA, 32 nt, Human
cuguuccacuuguaccuguccagcccugcccu

SEQ ID NO: 409082 - RNA, 32 nt, Human
cuguuccacuuucuuguaaugccugcaccagu

SEQ ID NO: 409083 - RNA, 32 nt, Human
cuguuccagcacccuucucccagcugcauucc

SEQ ID NO: 409084 - RNA, 22 nt, Human
cuguuccagccugcccucuuca

SEQ ID NO: 409085 - RNA, 25 nt, Human
cuguuccagucacauugccaucacu

SEQ ID NO: 409086 - RNA, 22 nt, Human
cuguuccagucacccccuucca

SEQ ID NO: 409087 - RNA, 32 nt, Human
cuguuccauacauaaaaggagagggguuguug

SEQ ID NO: 409088 - RNA, 32 nt, Human
cuguuccauaugcucgcaaucucagcuauuug

SEQ ID NO: 409089 - RNA, 24 nt, Human
cuguuccaucaguugccauccacu

SEQ ID NO: 409090 - RNA, 32 nt, Human
cuguucccaagaagguuuaagcauauguaaca

SEQ ID NO: 409091 - RNA, 32 nt, Human
cuguucccaagccucagaacucuugagcugug

SEQ ID NO: 409092 - RNA, 32 nt, Human
cuguucccagaacaggacgacagugaaaagaa

SEQ ID NO: 409093 - RNA, 32 nt, Human
cuguucccagaagaggccuggggagcagcuuu

SEQ ID NO: 409094 - RNA, 32 nt, Human
cuguucccagccccagccuuucuaagccauug

SEQ ID NO: 409095 - RNA, 31 nt, Human
cuguucccaggcaccaccacagcaggugcug

SEQ ID NO: 409096 - RNA, 22 nt, Human
cuguucccaggcccugccugga

SEQ ID NO: 409097 - RNA, 32 nt, Human
cuguucccaguguauucaacaggucacugaag

SEQ ID NO: 409098 - RNA, 32 nt, Human
cuguucccaucacccaccucuggagcuuacac

SEQ ID NO: 409099 - RNA, 32 nt, Human
cuguucccauccuccacagucucccaucccac

SEQ ID NO: 409100 - RNA, 32 nt, Human
cuguuccccaccccuucccuugcuggccauuc

SEQ ID NO: 409101 - RNA, 32 nt, Human
cuguuccccacccuaccucagcuggggucagg

SEQ ID NO: 409102 - RNA, 24 nt, Human
cuguuccccaggccggagugcagu

SEQ ID NO: 409103 - RNA, 32 nt, Human
cuguuccccaggccggagugcagugguacgau

SEQ ID NO: 409104 - RNA, 32 nt, Human
cuguuccccgacaccaagacccuggcgcagcg

SEQ ID NO: 409105 - RNA, 32 nt, Human
cuguuccccgaccucagacccugggcuuccga

SEQ ID NO: 409106 - RNA, 32 nt, Human
cuguuccccuccacugccaaguccucauuuuc

SEQ ID NO: 409107 - RNA, 32 nt, Human
cuguucccuccaggccuuggucuucaugguaa

SEQ ID NO: 409108 - RNA, 32 nt, Human
cuguucccuccccaaacccuaucccuccuacc

SEQ ID NO: 409109 - RNA, 32 nt, Human
cuguucccuccccuccccuuccuguccuuuca

SEQ ID NO: 409110 - RNA, 32 nt, Human
cuguucccuccccucuuuuguuccucccuaga

SEQ ID NO: 409111 - RNA, 32 nt, Human
cuguucccucccugcugaccugggacagucgc

SEQ ID NO: 409112 - RNA, 32 nt, Human
cuguucccugcagucugugcugugugucuggg

SEQ ID NO: 409113 - RNA, 32 nt, Human
cuguucccugcucccucgcuggcaagccccac

SEQ ID NO: 409114 - RNA, 19 nt, Human
cuguuccgcugcagccccg

SEQ ID NO: 409115 - RNA, 24 nt, Human
cuguuccgggccuuuggcuuugca

SEQ ID NO: 409116 - RNA, 21 nt, Human
cuguuccguuggcccugggcc

SEQ ID NO: 409117 - RNA, 32 nt, Human
cuguuccuaagaccucagguuacccaguguag

SEQ ID NO: 409118 - RNA, 23 nt, Human
cuguuccuagguaugucaccacg

SEQ ID NO: 409119 - RNA, 32 nt, Human
cuguuccuccacugcuugcccauagggcugcc

SEQ ID NO: 409120 - RNA, 32 nt, Human
cuguuccuccuaaaacaauccugacuuuuauu

SEQ ID NO: 409121 - RNA, 32 nt, Human
cuguuccucuccccaucucuauuuuucaacau

SEQ ID NO: 409122 - RNA, 32 nt, Human
cuguuccucuguuccucucuucuccugccccc

SEQ ID NO: 409123 - RNA, 32 nt, Human
cuguuccugaagucugugccccacuucuccau

SEQ ID NO: 409124 - RNA, 32 nt, Human
cuguuccugaggcugcccucuccagucccagg

SEQ ID NO: 409125 - RNA, 32 nt, Human
cuguuccugcauucacccacuggccuuuccca

SEQ ID NO: 409126 - RNA, 32 nt, Human
cuguuccugcgagggccaccuccucaggaaga

SEQ ID NO: 409127 - RNA, 32 nt, Human
cuguuccugcucaucaugaagauccccgcgau

SEQ ID NO: 409128 - RNA, 32 nt, Human
cuguuccuggacugcugcuggcuggcgaggag

SEQ ID NO: 409129 - RNA, 32 nt, Human
cuguuccuguccucccugugcaggguauccug

SEQ ID NO: 409130 - RNA, 32 nt, Human
cuguuccugucuuugcucacacccucacagcu

SEQ ID NO: 409131 - RNA, 32 nt, Human
cuguuccuguuaauguguuucuccccaugguc

SEQ ID NO: 409132 - RNA, 18 nt, Human
cuguuccuuccccgagcc

SEQ ID NO: 409133 - RNA, 32 nt, Human
cuguuccuuccccgagccccugccccggcucc

SEQ ID NO: 409134 - RNA, 32 nt, Human
cuguucgacagucagccgcaucuucuuuugcg

SEQ ID NO: 409135 - RNA, 32 nt, Human
cuguucgcucuccgccccuccuugccucccca

SEQ ID NO: 409136 - RNA, 32 nt, Human
cuguucgcugcccgaguauggagcugcugugu

SEQ ID NO: 409137 - RNA, 32 nt, Human
cuguucggcugguuccugccagcucgaggaca

SEQ ID NO: 409138 - RNA, 32 nt, Human
cuguucgggaggcugaggcaggagaaucacuu

SEQ ID NO: 409139 - RNA, 32 nt, Human
cuguucgggcuggggcauaccuguaccccagc

SEQ ID NO: 409140 - RNA, 32 nt, Human
cuguucggggacccugugagccuucuggccgg

SEQ ID NO: 409141 - RNA, 32 nt, Human
cuguucgugcaguuugcuggguguucccgcug

SEQ ID NO: 409142 - RNA, 32 nt, Human
cuguucgugccugucccugcucugccucccac

SEQ ID NO: 409143 - RNA, 24 nt, Human
cuguucguucugaaugucuucacg

SEQ ID NO: 409144 - RNA, 32 nt, Human
cuguucuaaaaauguuuaaaagaaacucaaua

SEQ ID NO: 409145 - RNA, 27 nt, Human
cuguucuaaauccaguguuugacccuu

SEQ ID NO: 409146 - RNA, 21 nt, Human
cuguucuaagcucugccuugc

SEQ ID NO: 409147 - RNA, 32 nt, Human
cuguucuaaggcaggaaauacaagcaugagca

SEQ ID NO: 409148 - RNA, 32 nt, Human
cuguucuaaugugccauguugcagugaucuga

SEQ ID NO: 409149 - RNA, 32 nt, Human
cuguucuacagucagccgcaucuucuuuugca

SEQ ID NO: 409150 - RNA, 32 nt, Human
cuguucuacaucuggcccuuggagcaggccgg

SEQ ID NO: 409151 - RNA, 32 nt, Human
cuguucuacccguuccaaaagccaauggcugc

SEQ ID NO: 409152 - RNA, 32 nt, Human
cuguucuauaaauaucuauaaauacucauaua

SEQ ID NO: 409153 - RNA, 32 nt, Human
cuguucuauaagguucagguguuuucaaguug

SEQ ID NO: 409154 - RNA, 32 nt, Human
cuguucucagcucugucaucugcagggcuucu

SEQ ID NO: 409155 - RNA, 32 nt, Human
cuguucucagcucugucaucugcggggcuucu

SEQ ID NO: 409156 - RNA, 32 nt, Human
cuguucucauucuccuucccaccaacauccau

SEQ ID NO: 409157 - RNA, 17 nt, Human
cuguucucauucugcaa

SEQ ID NO: 409158 - RNA, 32 nt, Human
cuguucuccacuccugacuucucccagccucg

SEQ ID NO: 409159 - RNA, 32 nt, Human
cuguucuccagaauccaggccaaaaaguucac

SEQ ID NO: 409160 - RNA, 32 nt, Human
cuguucuccaguguaggaacacugcugcuuca

SEQ ID NO: 409161 - RNA, 16 nt, Human
cuguucucccugcagg

SEQ ID NO: 409162 - RNA, 32 nt, Human
cuguucuccggcaucacaaagcagagaaaaca

SEQ ID NO: 409163 - RNA, 32 nt, Human
cuguucuccucaucuccagccucaguaguugg

SEQ ID NO: 409164 - RNA, 32 nt, Human
cuguucuccugcggccucccaggcugggcuuu

SEQ ID NO: 409165 - RNA, 32 nt, Human
cuguucucuaacuguggagugaauggaaauuc

SEQ ID NO: 409166 - RNA, 32 nt, Human
cuguucucuacuccugacuucuccuaggcuug

SEQ ID NO: 409167 - RNA, 24 nt, Human
cuguucucuccaugcccuggguca

SEQ ID NO: 409168 - RNA, 18 nt, Human
cuguucucuccccaguca

SEQ ID NO: 409169 - RNA, 32 nt, Human
cuguucucuccccucacauccuccugcccagc

SEQ ID NO: 409170 - RNA, 19 nt, Human
cuguucucuccuugaguca

SEQ ID NO: 409171 - RNA, 20 nt, Human
cuguucucugcccugcgcca

SEQ ID NO: 409172 - RNA, 19 nt, Human
cuguucucugccuugacca

SEQ ID NO: 409173 - RNA, 32 nt, Human
cuguucucuuccacucuccuugcuacccagaa

SEQ ID NO: 409174 - RNA, 32 nt, Human
cuguucucuuucccugaacucucccccagguu

SEQ ID NO: 409175 - RNA, 32 nt, Human
cuguucucuuucuggaacuccuuuuauucaga

SEQ ID NO: 409176 - RNA, 32 nt, Human
cuguucucuuuuucuagcuuccacaucagcuu

SEQ ID NO: 409177 - RNA, 32 nt, Human
cuguucugaaaccaucugauuggcuuucugag

SEQ ID NO: 409178 - RNA, 32 nt, Human
cuguucugaaagggauggccacaaguucuuuc

SEQ ID NO: 409179 - RNA, 32 nt, Human
cuguucugaaggcaccuccucaccucagaaac

SEQ ID NO: 409180 - RNA, 32 nt, Human
cuguucugagaucucuuuauuccugaauaaug

SEQ ID NO: 409181 - RNA, 32 nt, Human
cuguucugagcugccccuugcccacacacccc

SEQ ID NO: 409182 - RNA, 32 nt, Human
cuguucugcaacuccauccuccugugucacug

SEQ ID NO: 409183 - RNA, 32 nt, Human
cuguucugcuucccuguuccccuccacugcca

SEQ ID NO: 409184 - RNA, 32 nt, Human
cuguucuggaugagagaugagagcagaccggc

SEQ ID NO: 409185 - RNA, 32 nt, Human
cuguucuggcaaggaaggcucacggguucuga

SEQ ID NO: 409186 - RNA, 32 nt, Human
cuguucuguagguuguuucuccauguucuugu

SEQ ID NO: 409187 - RNA, 32 nt, Human
cuguucuguaucuugcucuguuugcuugauac

SEQ ID NO: 409188 - RNA, 23 nt, Human
cuguucuguauuccccauaucca

SEQ ID NO: 409189 - RNA, 32 nt, Human
cuguucugucuucauugacaggauuugcuugu

SEQ ID NO: 409190 - RNA, 32 nt, Human
cuguucugugucugcugcuuuugcuuaagauu

SEQ ID NO: 409191 - RNA, 32 nt, Human
cuguucuguucuguucuccuaauaccaucucg

SEQ ID NO: 409192 - RNA, 32 nt, Human
cuguucuuacugguugacauuuugaucacucu

SEQ ID NO: 409193 - RNA, 24 nt, Human
cuguucuuagcaagaugcgcacug

SEQ ID NO: 409194 - RNA, 26 nt, Human
cuguucuucacacugccccccaugcc

SEQ ID NO: 409195 - RNA, 32 nt, Human
cuguucuucccaacucuccucccuagcuagag

SEQ ID NO: 409196 - RNA, 32 nt, Human
cuguucuuccuauuucuggcugccucagccuu

SEQ ID NO: 409197 - RNA, 32 nt, Human
cuguucuuccucuacguuuauccuggcaugug

SEQ ID NO: 409198 - RNA, 32 nt, Human
cuguucuucucccagccucugcccuccuucug

SEQ ID NO: 409199 - RNA, 32 nt, Human
cuguucuucucuuccuccuucagcacugaauc

SEQ ID NO: 409200 - RNA, 32 nt, Human
cuguucuugaacagauacuaugucuauaacuc

SEQ ID NO: 409201 - RNA, 32 nt, Human
cuguucuugaagcugggcugucucucuccaug

SEQ ID NO: 409202 - RNA, 32 nt, Human
cuguucuugacccaccuccuucaaacucggau

SEQ ID NO: 409203 - RNA, 32 nt, Human
cuguucuugcacugcuauaaagaacuaccuga

SEQ ID NO: 409204 - RNA, 32 nt, Human
cuguucuugguacuguuuccuccucuguuccc

SEQ ID NO: 409205 - RNA, 32 nt, Human
cuguugaacagcuaucacguugaaccacguga

SEQ ID NO: 409206 - RNA, 32 nt, Human
cuguugaacugucuuccaaccugccauggcag

SEQ ID NO: 409207 - RNA, 32 nt, Human
cuguugaacuucuuucuguuaugagaggauuu

SEQ ID NO: 409208 - RNA, 32 nt, Human
cuguugaagcaccuccacagaccugggccggg

SEQ ID NO: 409209 - RNA, 32 nt, Human
cuguugaaucacaacaaaauuagauuuguaca

SEQ ID NO: 409210 - RNA, 32 nt, Human
cuguugacaaguugguuugagggagaaaacuu

SEQ ID NO: 409211 - RNA, 32 nt, Human
cuguugaccaaggagaggucacauucuuuuca

SEQ ID NO: 409212 - RNA, 32 nt, Human
cuguugaccagccugguuucauaccgaaaaga

SEQ ID NO: 409213 - RNA, 24 nt, Human
cuguugaccaggcuggagugaagu

SEQ ID NO: 409214 - RNA, 32 nt, Human
cuguugaccaggcuggagugaaguggugugau

SEQ ID NO: 409215 - RNA, 24 nt, Human
cuguugaccaggcuggagugcagu

SEQ ID NO: 409216 - RNA, 32 nt, Human
cuguugaccaggcuggagugcaguggugagau

SEQ ID NO: 409217 - RNA, 32 nt, Human
cuguugaccaugaauuucuuagcaauaggaau

SEQ ID NO: 409218 - RNA, 23 nt, Human
cuguugacccauuucgugaccua

SEQ ID NO: 409219 - RNA, 32 nt, Human
cuguugacccgcacuuuaaagcuuuuguuugc

SEQ ID NO: 409220 - RNA, 32 nt, Human
cuguugacccuguucaggccucggugaaggcu

SEQ ID NO: 409221 - RNA, 32 nt, Human
cuguugacuagagagacagucuguccuggacc

SEQ ID NO: 409222 - RNA, 32 nt, Human
cuguugacucacuggagggacccugcucaggc

SEQ ID NO: 409223 - RNA, 32 nt, Human
cuguugacucccuguugucauacaugaggcuu

SEQ ID NO: 409224 - RNA, 19 nt, Human
cuguugacugcccccaccu

SEQ ID NO: 409225 - RNA, 21 nt, Human
cuguugagcugguucuccagg

SEQ ID NO: 409226 - RNA, 32 nt, Human
cuguugaggccacccugguggcaccaaagccc

SEQ ID NO: 409227 - RNA, 32 nt, Human
cuguugagggccuggggaaaccauggcaaagu

SEQ ID NO: 409228 - RNA, 32 nt, Human
cuguugagucccugugcaccuucagaaccaca

SEQ ID NO: 409229 - RNA, 32 nt, Human
cuguugagucgagaggaaugagauugggguca

SEQ ID NO: 409230 - RNA, 32 nt, Human
cuguugauagccccagacauacccacagcauu

SEQ ID NO: 409231 - RNA, 32 nt, Human
cuguugaucucaggguacuuucugggauugcu

SEQ ID NO: 409232 - RNA, 32 nt, Human
cuguugaugucacauccuuugacccuggucug

SEQ ID NO: 409233 - RNA, 32 nt, Human
cuguugcaaucagaauaaacucacuucuugcc

SEQ ID NO: 409234 - RNA, 32 nt, Human
cuguugcagacaaugcauaggagugaaugaga

SEQ ID NO: 409235 - RNA, 32 nt, Human
cuguugcagggugugauggagaacaaagcuau

SEQ ID NO: 409236 - RNA, 32 nt, Human
cuguugccaaaauuaauuuacagugccuuacc

SEQ ID NO: 409237 - RNA, 32 nt, Human
cuguugccaaccuaaaacauuucccuuuggaa

SEQ ID NO: 409238 - RNA, 23 nt, Human
cuguugccaaggcuagagcacag

SEQ ID NO: 409239 - RNA, 24 nt, Human
cuguugccaaggcuggaaugcagu

SEQ ID NO: 409240 - RNA, 32 nt, Human
cuguugccaaggcuggaaugcaguggcgagau

SEQ ID NO: 409241 - RNA, 24 nt, Human
cuguugccaaggcuggagugcagu

SEQ ID NO: 409242 - RNA, 32 nt, Human
cuguugccaaggcuggagugcaguggaacgau

SEQ ID NO: 409243 - RNA, 32 nt, Human
cuguugccaccugggcacgcagcacccucaag

SEQ ID NO: 409244 - RNA, 21 nt, Human
cuguugccacuagaauguagu

SEQ ID NO: 409245 - RNA, 32 nt, Human
cuguugccacugcacucuggccugggcaacag

SEQ ID NO: 409246 - RNA, 22 nt, Human
cuguugccagacuggagugcag

SEQ ID NO: 409247 - RNA, 23 nt, Human
cuguugccagacuggagugcagu

SEQ ID NO: 409248 - RNA, 23 nt, Human
cuguugccaggccagagugcagu

SEQ ID NO: 409249 - RNA, 23 nt, Human
cuguugccaggcuagagugcagu

SEQ ID NO: 409250 - RNA, 23 nt, Human
cuguugccaggcuggaaugcagu

SEQ ID NO: 409251 - RNA, 23 nt, Human
cuguugccaggcuggaaugccgu

SEQ ID NO: 409252 - RNA, 23 nt, Human
cuguugccaggcuggagggcagu

SEQ ID NO: 409253 - RNA, 23 nt, Human
cuguugccaggcuggagugcagu

SEQ ID NO: 409254 - RNA, 23 nt, Human
cuguugccaggcuggggugcagu

SEQ ID NO: 409255 - RNA, 32 nt, Human
cuguugccaggggagcacggaggcagaucuga

SEQ ID NO: 409256 - RNA, 22 nt, Human
cuguugccaguauagaugcagu

SEQ ID NO: 409257 - RNA, 32 nt, Human
cuguugccaucagggugcacacagcaggugca

SEQ ID NO: 409258 - RNA, 32 nt, Human
cuguugccauggugaugguguagcccucccac

SEQ ID NO: 409259 - RNA, 24 nt, Human
cuguugcccaagcuggaaugcagu

SEQ ID NO: 409260 - RNA, 24 nt, Human
cuguugcccaagcuggaguacagu

SEQ ID NO: 409261 - RNA, 32 nt, Human
cuguugcccaagcuggaguacaguagugcaau

SEQ ID NO: 409262 - RNA, 24 nt, Human
cuguugcccaagcuggagugaagu

SEQ ID NO: 409263 - RNA, 32 nt, Human
cuguugcccaagcuggagugaagugguacaau

SEQ ID NO: 409264 - RNA, 24 nt, Human
cuguugcccaagcuggagugcagu

SEQ ID NO: 409265 - RNA, 24 nt, Human
cuguugcccaagcuugagggcagu

SEQ ID NO: 409266 - RNA, 24 nt, Human
cuguugcccaagguagagugcagu

SEQ ID NO: 409267 - RNA, 22 nt, Human
cuguugcccaaguuggagugca

SEQ ID NO: 409268 - RNA, 24 nt, Human
cuguugcccaaguuggagugcaau

SEQ ID NO: 409269 - RNA, 32 nt, Human
cuguugcccaaguuggagugcaaucuuggcuc

SEQ ID NO: 409270 - RNA, 24 nt, Human
cuguugcccaaguuggagugcagu

SEQ ID NO: 409271 - RNA, 32 nt, Human
cuguugcccaaguuggagugcaguggcaugau

SEQ ID NO: 409272 - RNA, 32 nt, Human
cuguugcccaaucuuaacauuuuugagcugca

SEQ ID NO: 409273 - RNA, 24 nt, Human
cuguugcccacauuggagugcagu

SEQ ID NO: 409274 - RNA, 32 nt, Human
cuguugcccacauuggagugcaguggcacgau

SEQ ID NO: 409275 - RNA, 24 nt, Human
cuguugcccacgcaggagugcagu

SEQ ID NO: 409276 - RNA, 32 nt, Human
cuguugcccacgcaggagugcaguggcaugcu

SEQ ID NO: 409277 - RNA, 22 nt, Human
cuguugcccagacuagaguaca

SEQ ID NO: 409278 - RNA, 24 nt, Human
cuguugcccagacuagagugcagu

SEQ ID NO: 409279 - RNA, 24 nt, Human
cuguugcccagacuggagugcagu

SEQ ID NO: 409280 - RNA, 32 nt, Human
cuguugcccagacuggagugcaguggcacgau

SEQ ID NO: 409281 - RNA, 32 nt, Human
cuguugcccagacuggagugcaguggcgugau

SEQ ID NO: 409282 - RNA, 32 nt, Human
cuguugcccagacuggagugcagugguguaau

SEQ ID NO: 409283 - RNA, 32 nt, Human
cuguugcccagacuggagugcaguggugugau

SEQ ID NO: 409284 - RNA, 32 nt, Human
cuguugcccagccuggagugcaauggcacaau

SEQ ID NO: 409285 - RNA, 32 nt, Human
cuguugcccagccuggagugcaguggcauuau

SEQ ID NO: 409286 - RNA, 32 nt, Human
cuguugcccagccuggagugcagugugucauc

SEQ ID NO: 409287 - RNA, 23 nt, Human
cuguugcccagcuggagugcagu

SEQ ID NO: 409288 - RNA, 24 nt, Human
cuguugcccaggagggagugcagu

SEQ ID NO: 409289 - RNA, 32 nt, Human
cuguugcccaggagggagugcaguggugcaac

SEQ ID NO: 409290 - RNA, 24 nt, Human
cuguugcccaggauggagugcagu

SEQ ID NO: 409291 - RNA, 32 nt, Human
cuguugcccaggauggagugcaguggugagau

SEQ ID NO: 409292 - RNA, 24 nt, Human
cuguugcccaggcaagagugcagu

SEQ ID NO: 409293 - RNA, 24 nt, Human
cuguugcccaggcaggaguacagu

SEQ ID NO: 409294 - RNA, 24 nt, Human
cuguugcccaggcaguagugcagu

SEQ ID NO: 409295 - RNA, 32 nt, Human
cuguugcccaggcuacagugcaauggcaugau

SEQ ID NO: 409296 - RNA, 23 nt, Human
cuguugcccaggcuagagcgcag

SEQ ID NO: 409297 - RNA, 32 nt, Human
cuguugcccaggcuagagcgcaggggcacaau

SEQ ID NO: 409298 - RNA, 22 nt, Human
cuguugcccaggcuagagugca

SEQ ID NO: 409299 - RNA, 32 nt, Human
cuguugcccaggcuagagugcaauggcacaau

SEQ ID NO: 409300 - RNA, 32 nt, Human
cuguugcccaggcuagagugcacuggugguca

SEQ ID NO: 409301 - RNA, 24 nt, Human
cuguugcccaggcuagagugcagu

SEQ ID NO: 409302 - RNA, 32 nt, Human
cuguugcccaggcuagagugcaguggcaugau

SEQ ID NO: 409303 - RNA, 32 nt, Human
cuguugcccaggcuagagugcaguggugcaau

SEQ ID NO: 409304 - RNA, 32 nt, Human
cuguugcccaggcuccagugcaguggugugau

SEQ ID NO: 409305 - RNA, 32 nt, Human
cuguugcccaggcucuagugcaauggcacgau

SEQ ID NO: 409306 - RNA, 24 nt, Human
cuguugcccaggcugaagugcagu

SEQ ID NO: 409307 - RNA, 32 nt, Human
cuguugcccaggcugaagugcaguggggcgcu

SEQ ID NO: 409308 - RNA, 32 nt, Human
cuguugcccaggcugaagugcaguggugcgau

SEQ ID NO: 409309 - RNA, 32 nt, Human
cuguugcccaggcugaagugcaguggugugau

SEQ ID NO: 409310 - RNA, 24 nt, Human
cuguugcccaggcugaaguguagu

SEQ ID NO: 409311 - RNA, 32 nt, Human
cuguugcccaggcugaaguguaguggcacaau

SEQ ID NO: 409312 - RNA, 32 nt, Human
cuguugcccaggcugagguacaguggcgugau

SEQ ID NO: 409313 - RNA, 24 nt, Human
cuguugcccaggcugcagugcagu

SEQ ID NO: 409314 - RNA, 32 nt, Human
cuguugcccaggcugcagugcaguggugccau

SEQ ID NO: 409315 - RNA, 32 nt, Human
cuguugcccaggcugcagugcaguggugugau

SEQ ID NO: 409316 - RNA, 22 nt, Human
cuguugcccaggcugcuggagu

SEQ ID NO: 409317 - RNA, 27 nt, Human
cuguugcccaggcugcuggagugccgu

SEQ ID NO: 409318 - RNA, 23 nt, Human
cuguugcccaggcuggaauacag

SEQ ID NO: 409319 - RNA, 24 nt, Human
cuguugcccaggcuggaauacagu

SEQ ID NO: 409320 - RNA, 32 nt, Human
cuguugcccaggcuggaauacaguggcacgau

SEQ ID NO: 409321 - RNA, 24 nt, Human
cuguugcccaggcuggaaugcagu

SEQ ID NO: 409322 - RNA, 32 nt, Human
cuguugcccaggcuggaaugcagugauacgau

SEQ ID NO: 409323 - RNA, 32 nt, Human
cuguugcccaggcuggaaugcaguggcacaau

SEQ ID NO: 409324 - RNA, 32 nt, Human
cuguugcccaggcuggaaugcaguggcgugau

SEQ ID NO: 409325 - RNA, 32 nt, Human
cuguugcccaggcuggaaugcagugguacgcu

SEQ ID NO: 409326 - RNA, 32 nt, Human
cuguugcccaggcuggaaugcaguggugugcu

SEQ ID NO: 409327 - RNA, 32 nt, Human
cuguugcccaggcuggacuacaguggcacaau

SEQ ID NO: 409328 - RNA, 24 nt, Human
cuguugcccaggcuggacugcagu

SEQ ID NO: 409329 - RNA, 32 nt, Human
cuguugcccaggcuggacugcaguggcgugau

SEQ ID NO: 409330 - RNA, 24 nt, Human
cuguugcccaggcuggagagcagu

SEQ ID NO: 409331 - RNA, 32 nt, Human
cuguugcccaggcuggagagcaguggcgcgau

SEQ ID NO: 409332 - RNA, 32 nt, Human
cuguugcccaggcuggagagcaguggugcaau

SEQ ID NO: 409333 - RNA, 24 nt, Human
cuguugcccaggcuggagggcagu

SEQ ID NO: 409334 - RNA, 32 nt, Human
cuguugcccaggcuggaguaaagggcaguggc

SEQ ID NO: 409335 - RNA, 22 nt, Human
cuguugcccaggcuggaguaca

SEQ ID NO: 409336 - RNA, 24 nt, Human
cuguugcccaggcuggaguacaau

SEQ ID NO: 409337 - RNA, 32 nt, Human
cuguugcccaggcuggaguacaauggcgugau

SEQ ID NO: 409338 - RNA, 24 nt, Human
cuguugcccaggcuggaguacagu

SEQ ID NO: 409339 - RNA, 32 nt, Human
cuguugcccaggcuggaguacaguggcacaau

SEQ ID NO: 409340 - RNA, 32 nt, Human
cuguugcccaggcuggaguacaguggcacgau

SEQ ID NO: 409341 - RNA, 32 nt, Human
cuguugcccaggcuggaguacaguggcgugau

SEQ ID NO: 409342 - RNA, 32 nt, Human
cuguugcccaggcuggaguacaguggucacug

SEQ ID NO: 409343 - RNA, 32 nt, Human
cuguugcccaggcuggaguacauuggugugau

SEQ ID NO: 409344 - RNA, 32 nt, Human
cuguugcccaggcuggaguacauuugccugau

SEQ ID NO: 409345 - RNA, 24 nt, Human
cuguugcccaggcuggaguauagu

SEQ ID NO: 409346 - RNA, 27 nt, Human
cuguugcccaggcuggaguauaguagu

SEQ ID NO: 409347 - RNA, 32 nt, Human
cuguugcccaggcuggaguauaguagugcagu

SEQ ID NO: 409348 - RNA, 32 nt, Human
cuguugcccaggcuggaguccaguggcauggu

SEQ ID NO: 409349 - RNA, 22 nt, Human
cuguugcccaggcuggagugca

SEQ ID NO: 409350 - RNA, 24 nt, Human
cuguugcccaggcuggagugcaau

SEQ ID NO: 409351 - RNA, 32 nt, Human
cuguugcccaggcuggagugcaaugacacagu

SEQ ID NO: 409352 - RNA, 32 nt, Human
cuguugcccaggcuggagugcaauggcacaau

SEQ ID NO: 409353 - RNA, 32 nt, Human
cuguugcccaggcuggagugcaauggcacauc

SEQ ID NO: 409354 - RNA, 32 nt, Human
cuguugcccaggcuggagugcaauggcacgau

SEQ ID NO: 409355 - RNA, 32 nt, Human
cuguugcccaggcuggagugcaauggcaugau

SEQ ID NO: 409356 - RNA, 32 nt, Human
cuguugcccaggcuggagugcaauggcgcguu

SEQ ID NO: 409357 - RNA, 32 nt, Human
cuguugcccaggcuggagugcaauggugcgau

SEQ ID NO: 409358 - RNA, 32 nt, Human
cuguugcccaggcuggagugcacuggcuugau

SEQ ID NO: 409359 - RNA, 23 nt, Human
cuguugcccaggcuggagugcag

SEQ ID NO: 409360 - RNA, 32 nt, Human
cuguugcccaggcuggagugcagaggugcgau

SEQ ID NO: 409361 - RNA, 32 nt, Human
cuguugcccaggcuggagugcagcggcaugau

SEQ ID NO: 409362 - RNA, 32 nt, Human
cuguugcccaggcuggagugcagggacaccuc

SEQ ID NO: 409363 - RNA, 32 nt, Human
cuguugcccaggcuggagugcaggggcacgau

SEQ ID NO: 409364 - RNA, 32 nt, Human
cuguugcccaggcuggagugcaggggcguaau

SEQ ID NO: 409365 - RNA, 24 nt, Human
cuguugcccaggcuggagugcagu

SEQ ID NO: 409366 - RNA, 32 nt, Human
cuguugcccaggcuggagugcaguagcacgau

SEQ ID NO: 409367 - RNA, 32 nt, Human
cuguugcccaggcuggagugcagucgcacaau

SEQ ID NO: 409368 - RNA, 32 nt, Human
cuguugcccaggcuggagugcagugacgcgau

SEQ ID NO: 409369 - RNA, 32 nt, Human
cuguugcccaggcuggagugcagugacgugau

SEQ ID NO: 409370 - RNA, 32 nt, Human
cuguugcccaggcuggagugcagugaugugau

SEQ ID NO: 409371 - RNA, 26 nt, Human
cuguugcccaggcuggagugcagugg

SEQ ID NO: 409372 - RNA, 32 nt, Human
cuguugcccaggcuggagugcaguggagcaau

SEQ ID NO: 409373 - RNA, 32 nt, Human
cuguugcccaggcuggagugcaguggcacaau

SEQ ID NO: 409374 - RNA, 32 nt, Human
cuguugcccaggcuggagugcaguggcaccau

SEQ ID NO: 409375 - RNA, 32 nt, Human
cuguugcccaggcuggagugcaguggcacgau

SEQ ID NO: 409376 - RNA, 32 nt, Human
cuguugcccaggcuggagugcaguggcaugau

SEQ ID NO: 409377 - RNA, 32 nt, Human
cuguugcccaggcuggagugcaguggcauuau

SEQ ID NO: 409378 - RNA, 32 nt, Human
cuguugcccaggcuggagugcaguggcgaaau

SEQ ID NO: 409379 - RNA, 32 nt, Human
cuguugcccaggcuggagugcaguggcgcaau

SEQ ID NO: 409380 - RNA, 32 nt, Human
cuguugcccaggcuggagugcaguggcgccau

SEQ ID NO: 409381 - RNA, 32 nt, Human
cuguugcccaggcuggagugcaguggcgcgau

SEQ ID NO: 409382 - RNA, 32 nt, Human
cuguugcccaggcuggagugcaguggcgcggu

SEQ ID NO: 409383 - RNA, 32 nt, Human
cuguugcccaggcuggagugcaguggcgcuau

SEQ ID NO: 409384 - RNA, 32 nt, Human
cuguugcccaggcuggagugcaguggcgugau

SEQ ID NO: 409385 - RNA, 32 nt, Human
cuguugcccaggcuggagugcagugggaugau

SEQ ID NO: 409386 - RNA, 32 nt, Human
cuguugcccaggcuggagugcagugguaugau

SEQ ID NO: 409387 - RNA, 32 nt, Human
cuguugcccaggcuggagugcaguggugagau

SEQ ID NO: 409388 - RNA, 32 nt, Human
cuguugcccaggcuggagugcaguggugcaau

SEQ ID NO: 409389 - RNA, 32 nt, Human
cuguugcccaggcuggagugcaguggugccau

SEQ ID NO: 409390 - RNA, 32 nt, Human
cuguugcccaggcuggagugcaguggugcgau

SEQ ID NO: 409391 - RNA, 32 nt, Human
cuguugcccaggcuggagugcaguggugggaa

SEQ ID NO: 409392 - RNA, 32 nt, Human
cuguugcccaggcuggagugcagugguguaau

SEQ ID NO: 409393 - RNA, 32 nt, Human
cuguugcccaggcuggagugcaguggugugau

SEQ ID NO: 409394 - RNA, 32 nt, Human
cuguugcccaggcuggagugcagugucacaau

SEQ ID NO: 409395 - RNA, 32 nt, Human
cuguugcccaggcuggagugcagugucccgau

SEQ ID NO: 409396 - RNA, 32 nt, Human
cuguugcccaggcuggagugcauugaugugau

SEQ ID NO: 409397 - RNA, 22 nt, Human
cuguugcccaggcuggagugcg

SEQ ID NO: 409398 - RNA, 24 nt, Human
cuguugcccaggcuggagugcgau

SEQ ID NO: 409399 - RNA, 32 nt, Human
cuguugcccaggcuggagugcgauggcaugau

SEQ ID NO: 409400 - RNA, 24 nt, Human
cuguugcccaggcuggagugcggu

SEQ ID NO: 409401 - RNA, 32 nt, Human
cuguugcccaggcuggagugcgguggacucuu

SEQ ID NO: 409402 - RNA, 32 nt, Human
cuguugcccaggcuggagugcgguggcaugau

SEQ ID NO: 409403 - RNA, 32 nt, Human
cuguugcccaggcuggagugcgguggugcgau

SEQ ID NO: 409404 - RNA, 32 nt, Human
cuguugcccaggcuggaguguaauggcgccau

SEQ ID NO: 409405 - RNA, 32 nt, Human
cuguugcccaggcuggaguguaauggugcaau

SEQ ID NO: 409406 - RNA, 23 nt, Human
cuguugcccaggcuggaguguag

SEQ ID NO: 409407 - RNA, 24 nt, Human
cuguugcccaggcuggaguguagu

SEQ ID NO: 409408 - RNA, 32 nt, Human
cuguugcccaggcuggaguguagugguaugau

SEQ ID NO: 409409 - RNA, 32 nt, Human
cuguugcccaggcuggaguguaguggugcgau

SEQ ID NO: 409410 - RNA, 32 nt, Human
cuguugcccaggcuggaguguaguggugugau

SEQ ID NO: 409411 - RNA, 32 nt, Human
cuguugcccaggcuggaguguagugguguguu

SEQ ID NO: 409412 - RNA, 32 nt, Human
cuguugcccaggcuggaguucagcggugcaau

SEQ ID NO: 409413 - RNA, 20 nt, Human
cuguugcccaggcuggccug

SEQ ID NO: 409414 - RNA, 24 nt, Human
cuguugcccaggcuggcgugcagu

SEQ ID NO: 409415 - RNA, 32 nt, Human
cuguugcccaggcuggcgugcaguggugcgau

SEQ ID NO: 409416 - RNA, 32 nt, Human
cuguugcccaggcugggugcagcggugcgauc

SEQ ID NO: 409417 - RNA, 24 nt, Human
cuguugcccaggcuguagugcagu

SEQ ID NO: 409418 - RNA, 32 nt, Human
cuguugcccaggcuguagugcaguggugcgau

SEQ ID NO: 409419 - RNA, 32 nt, Human
cuguugcccaggguggagugcagcggugcgau

SEQ ID NO: 409420 - RNA, 24 nt, Human
cuguugcccaggguggagugcagu

SEQ ID NO: 409421 - RNA, 32 nt, Human
cuguugcccaggguggagugcaguggcaugau

SEQ ID NO: 409422 - RNA, 19 nt, Human
cuguugcccagguccugca

SEQ ID NO: 409423 - RNA, 26 nt, Human
cuguugcccagguucuagagugcagu

SEQ ID NO: 409424 - RNA, 24 nt, Human
cuguugcccagguuggagugcagu

SEQ ID NO: 409425 - RNA, 32 nt, Human
cuguugcccagguuggagugcaguggcacgau

SEQ ID NO: 409426 - RNA, 32 nt, Human
cuguugcccagguuggagugcaguggcacuga

SEQ ID NO: 409427 - RNA, 32 nt, Human
cuguugcccagguuggagugcaguggcggggg

SEQ ID NO: 409428 - RNA, 23 nt, Human
cuguugcccagucuggaguacag

SEQ ID NO: 409429 - RNA, 32 nt, Human
cuguugcccagucuggagugcaguggcgcagu

SEQ ID NO: 409430 - RNA, 24 nt, Human
cuguugcccagucuggaguucagu

SEQ ID NO: 409431 - RNA, 24 nt, Human
cuguugcccaugcuggagggcagu

SEQ ID NO: 409432 - RNA, 22 nt, Human
cuguugcccaugcuggagugca

SEQ ID NO: 409433 - RNA, 32 nt, Human
cuguugcccaugcuggagugcaauggcacgau

SEQ ID NO: 409434 - RNA, 32 nt, Human
cuguugcccaugcuggagugcaguggcgugau

SEQ ID NO: 409435 - RNA, 32 nt, Human
cuguugcccaugcuggagugcauuggcacaau

SEQ ID NO: 409436 - RNA, 24 nt, Human
cuguugcccauucuggagugcagu

SEQ ID NO: 409437 - RNA, 32 nt, Human
cuguugcccauucuggagugcaguggugugau

SEQ ID NO: 409438 - RNA, 24 nt, Human
cuguugccccagcuugagugcagu

SEQ ID NO: 409439 - RNA, 25 nt, Human
cuguugccccaggcuggagugcagu

SEQ ID NO: 409440 - RNA, 21 nt, Human
cuguugcccccuucagugcag

SEQ ID NO: 409441 - RNA, 32 nt, Human
cuguugcccgggcuggaguacaauggcaugau

SEQ ID NO: 409442 - RNA, 23 nt, Human
cuguugcccgggcuggagugcag

SEQ ID NO: 409443 - RNA, 32 nt, Human
cuguugcccgggcuggagugcagcggcgugau

SEQ ID NO: 409444 - RNA, 32 nt, Human
cuguugcccgggcuggagugcaguggugugau

SEQ ID NO: 409445 - RNA, 24 nt, Human
cuguugcccucacuagagugcagu

SEQ ID NO: 409446 - RNA, 32 nt, Human
cuguugcccugagugcccacucccaggcccuc

SEQ ID NO: 409447 - RNA, 24 nt, Human
cuguugcccuggcuggacugcagu

SEQ ID NO: 409448 - RNA, 32 nt, Human
cuguugcccuggcuggaguacaguggcaugau

SEQ ID NO: 409449 - RNA, 24 nt, Human
cuguugcccuggcuggaguucagu

SEQ ID NO: 409450 - RNA, 32 nt, Human
cuguugccuagacuggagugcaauggcgugau

SEQ ID NO: 409451 - RNA, 24 nt, Human
cuguugccuaggccagagugcagu

SEQ ID NO: 409452 - RNA, 23 nt, Human
cuguugccuaggcggaguacagu

SEQ ID NO: 409453 - RNA, 32 nt, Human
cuguugccuaggcgggagugcaguggcaucau

SEQ ID NO: 409454 - RNA, 32 nt, Human
cuguugccuaggcuggaggacaguggcacaau

SEQ ID NO: 409455 - RNA, 24 nt, Human
cuguugccuaggcuggaguacagu

SEQ ID NO: 409456 - RNA, 32 nt, Human
cuguugccuaggcuggaguacaguggcaagau

SEQ ID NO: 409457 - RNA, 32 nt, Human
cuguugccuaggcuggaguacaguggccugau

SEQ ID NO: 409458 - RNA, 32 nt, Human
cuguugccuaggcuggaguacaguggugcagu

SEQ ID NO: 409459 - RNA, 32 nt, Human
cuguugccuaggcuggagugaaaguggcgcaa

SEQ ID NO: 409460 - RNA, 24 nt, Human
cuguugccuaggcuggagugcagu

SEQ ID NO: 409461 - RNA, 32 nt, Human
cuguugccuaggcuggagugcagugaggcaau

SEQ ID NO: 409462 - RNA, 32 nt, Human
cuguugccuaggcuggagugcaguggcgcaau

SEQ ID NO: 409463 - RNA, 32 nt, Human
cuguugccuaggcuggagugcaguggcgcgau

SEQ ID NO: 409464 - RNA, 32 nt, Human
cuguugccuaguuuuguacauggaucucauuu

SEQ ID NO: 409465 - RNA, 22 nt, Human
cuguugccuggacaguuacagu

SEQ ID NO: 409466 - RNA, 32 nt, Human
cuguugccugggagcuugguacuuucccucca

SEQ ID NO: 409467 - RNA, 24 nt, Human
cuguugccugggcuggaaugcagu

SEQ ID NO: 409468 - RNA, 32 nt, Human
cuguugccugggcuggagaacaguggcaccau

SEQ ID NO: 409469 - RNA, 24 nt, Human
cuguugccugggcuggagugcagu

SEQ ID NO: 409470 - RNA, 32 nt, Human
cuguugccugggcuggagugcagugccacgau

SEQ ID NO: 409471 - RNA, 32 nt, Human
cuguugccugggcuggagugcaguggcaugau

SEQ ID NO: 409472 - RNA, 32 nt, Human
cuguugccugggcuggagugcaguggcccaag

SEQ ID NO: 409473 - RNA, 32 nt, Human
cuguugccugggcuggagugcaguggcgugau

SEQ ID NO: 409474 - RNA, 32 nt, Human
cuguugccuugaacuccugggcucaagugauc

SEQ ID NO: 409475 - RNA, 32 nt, Human
cuguugccuugacaugucguugcucagugccu

SEQ ID NO: 409476 - RNA, 22 nt, Human
cuguugccuugaccuccuaggc

SEQ ID NO: 409477 - RNA, 32 nt, Human
cuguugccuuucuuuccugcuguccuuuccug

SEQ ID NO: 409478 - RNA, 32 nt, Human
cuguugcgcugcccuggccucggcauucgagg

SEQ ID NO: 409479 - RNA, 18 nt, Human
cuguugcuagaccgagcc

SEQ ID NO: 409480 - RNA, 23 nt, Human
cuguugcuaggcuggagugcagu

SEQ ID NO: 409481 - RNA, 24 nt, Human
cuguugcucaagcuggaguggagu

SEQ ID NO: 409482 - RNA, 32 nt, Human
cuguugcucaagcuggaguggaguggcacgau

SEQ ID NO: 409483 - RNA, 31 nt, Human
cuguugcucaauguuaccacagcaggcuuuc

SEQ ID NO: 409484 - RNA, 32 nt, Human
cuguugcucaggcuggagugcaguggcaccau

SEQ ID NO: 409485 - RNA, 24 nt, Human
cuguugcucaggcuggauugcagu

SEQ ID NO: 409486 - RNA, 32 nt, Human
cuguugcucaggcuggauugcaguggcgugau

SEQ ID NO: 409487 - RNA, 18 nt, Human
cuguugcuccuggccuca

SEQ ID NO: 409488 - RNA, 22 nt, Human
cuguugcucgaagacugugaca

SEQ ID NO: 409489 - RNA, 21 nt, Human
cuguugcucgccuucagguca

SEQ ID NO: 409490 - RNA, 32 nt, Human
cuguugcucgugggugcuguguuuacucuccc

SEQ ID NO: 409491 - RNA, 19 nt, Human
cuguugcucuccuggcgcu

SEQ ID NO: 409492 - RNA, 17 nt, Human
cuguugcucucggagcc

SEQ ID NO: 409493 - RNA, 32 nt, Human
cuguugcucuggaagucagguggguuuccuga

SEQ ID NO: 409494 - RNA, 19 nt, Human
cuguugcucugucccggcu

SEQ ID NO: 409495 - RNA, 24 nt, Human
cuguugcugaggcuggagugcagu

SEQ ID NO: 409496 - RNA, 23 nt, Human
cuguugcugaucuguaguacagu

SEQ ID NO: 409497 - RNA, 32 nt, Human
cuguugcugcaagcucagugaaguggggcacu

SEQ ID NO: 409498 - RNA, 32 nt, Human
cuguugcugcacuccagccugagugacagagu

SEQ ID NO: 409499 - RNA, 32 nt, Human
cuguugcugcacuuccgcuucucucccagcga

SEQ ID NO: 409500 - RNA, 32 nt, Human
cuguugcugcagcucugacuugcuuuuuccug

SEQ ID NO: 409501 - RNA, 17 nt, Human
cuguugcugcgccgagc

SEQ ID NO: 409502 - RNA, 21 nt, Human
cuguugcuggcaucccgagcu

SEQ ID NO: 409503 - RNA, 18 nt, Human
cuguugcugucggaguca

SEQ ID NO: 409504 - RNA, 32 nt, Human
cuguugcugugccugcucacaccugcuccugc

SEQ ID NO: 409505 - RNA, 32 nt, Human
cuguugcuuagguuuagaaacgaggcauguau

SEQ ID NO: 409506 - RNA, 19 nt, Human
cuguugcuucugugagcca

SEQ ID NO: 409507 - RNA, 19 nt, Human
cuguugcuugcccugugcc

SEQ ID NO: 409508 - RNA, 24 nt, Human
cuguugcuugggcugcaaugcagu

SEQ ID NO: 409509 - RNA, 32 nt, Human
cuguuggaaaccugggcagcccucucaguggc

SEQ ID NO: 409510 - RNA, 32 nt, Human
cuguuggaaauuagaaggacagagccaaauau

SEQ ID NO: 409511 - RNA, 32 nt, Human
cuguuggaagcaguagagugcuuccagggagg

SEQ ID NO: 409512 - RNA, 32 nt, Human
cuguuggacaccugccuucucauguggacauc

SEQ ID NO: 409513 - RNA, 22 nt, Human
cuguuggagaugucccgggcca

SEQ ID NO: 409514 - RNA, 32 nt, Human
cuguuggagauuuaagaauucuaccaccuaua

SEQ ID NO: 409515 - RNA, 32 nt, Human
cuguuggagcauggaggagcuggaggagaugg

SEQ ID NO: 409516 - RNA, 32 nt, Human
cuguuggaugcacauaauccauuugcacugca

SEQ ID NO: 409517 - RNA, 32 nt, Human
cuguuggcagaggccugugucugugccacacc

SEQ ID NO: 409518 - RNA, 32 nt, Human
cuguuggcagcgccaucaccauguccuuaaac

SEQ ID NO: 409519 - RNA, 32 nt, Human
cuguuggcaggaacuccaagugcccaggccuc

SEQ ID NO: 409520 - RNA, 32 nt, Human
cuguuggccagacacuaugcugggcagucaag

SEQ ID NO: 409521 - RNA, 24 nt, Human
cuguuggccaggcuggaaugcagu

SEQ ID NO: 409522 - RNA, 32 nt, Human
cuguuggccaggcuggaaugcaguggcacaau

SEQ ID NO: 409523 - RNA, 23 nt, Human
cuguuggccaggcuggagugcag

SEQ ID NO: 409524 - RNA, 24 nt, Human
cuguuggccaggcuggagugcagu

SEQ ID NO: 409525 - RNA, 32 nt, Human
cuguuggccaggcuggagugcaguaaguggca

SEQ ID NO: 409526 - RNA, 32 nt, Human
cuguuggccagguaauugcugcagagggagaa

SEQ ID NO: 409527 - RNA, 32 nt, Human
cuguuggccccagcugcacucgcagggccuuc

SEQ ID NO: 409528 - RNA, 32 nt, Human
cuguuggccgaggacaggauggggcaggacag

SEQ ID NO: 409529 - RNA, 32 nt, Human
cuguuggccucgggggcgcgccgccgcggaga

SEQ ID NO: 409530 - RNA, 32 nt, Human
cuguuggccugccuuuguuccugcagggugca

SEQ ID NO: 409531 - RNA, 32 nt, Human
cuguuggccugucagcaaucccugggaccucu

SEQ ID NO: 409532 - RNA, 32 nt, Human
cuguuggccuugguuugcacagagcggguagg

SEQ ID NO: 409533 - RNA, 32 nt, Human
cuguuggcucccgugucugcugacugagggca

SEQ ID NO: 409534 - RNA, 21 nt, Human
cuguuggcucugcuuugagcu

SEQ ID NO: 409535 - RNA, 32 nt, Human
cuguuggcugcucucccaaguggcccaggcug

SEQ ID NO: 409536 - RNA, 32 nt, Human
cuguuggcuggaagcugcccuuuguucuguac

SEQ ID NO: 409537 - RNA, 32 nt, Human
cuguuggcuuucucuucugcagcaacagguca

SEQ ID NO: 409538 - RNA, 32 nt, Human
cuguugggaaggcaugguugguuuugaaaugu

SEQ ID NO: 409539 - RNA, 32 nt, Human
cuguugggaccaccccaguggagcuccuggag

SEQ ID NO: 409540 - RNA, 32 nt, Human
cuguugggacucaaggacuuugcugcuguuuu

SEQ ID NO: 409541 - RNA, 32 nt, Human
cuguugggagagaccagacggaauccagccuc

SEQ ID NO: 409542 - RNA, 32 nt, Human
cuguugggaggcaguuugcagucuccagggac

SEQ ID NO: 409543 - RNA, 32 nt, Human
cuguugggcccaggucuugagcucuuuuggcu

SEQ ID NO: 409544 - RNA, 32 nt, Human
cuguuggggaccccucguguccccacgccaga

SEQ ID NO: 409545 - RNA, 32 nt, Human
cuguuggggacuugauuucuucucagguuuug

SEQ ID NO: 409546 - RNA, 32 nt, Human
cuguuggggauaccaccuccuggcagagcccu

SEQ ID NO: 409547 - RNA, 32 nt, Human
cuguuggggcagaagagacgggaccagcugcu

SEQ ID NO: 409548 - RNA, 32 nt, Human
cuguuggggccaggauuuucccuggucagaug

SEQ ID NO: 409549 - RNA, 32 nt, Human
cuguuggggccccagccguaguggcuuagagg

SEQ ID NO: 409550 - RNA, 32 nt, Human
cuguuggggcuuccacagcccuccucucccaa

SEQ ID NO: 409551 - RNA, 32 nt, Human
cuguuggggguuucccuguguggaccaugggg

SEQ ID NO: 409552 - RNA, 32 nt, Human
cuguuggguagcggaagagagaucaaagggaa

SEQ ID NO: 409553 - RNA, 31 nt, Human
cuguugggucaguggagaugggugaggagca

SEQ ID NO: 409554 - RNA, 20 nt, Human
cuguugggugcuuccugcaa

SEQ ID NO: 409555 - RNA, 21 nt, Human
cuguuggucccucugaccuca

SEQ ID NO: 409556 - RNA, 32 nt, Human
cuguuggucuuacuaaggauguuuuuaccagc

SEQ ID NO: 409557 - RNA, 32 nt, Human
cuguuggugcaggaauaagggaaaggcccaag

SEQ ID NO: 409558 - RNA, 32 nt, Human
cuguuggugcugcuacugccccggcuggauug

SEQ ID NO: 409559 - RNA, 32 nt, Human
cuguugguggugguagcaagauuucauagggg

SEQ ID NO: 409560 - RNA, 23 nt, Human
cuguuggugucuccuugguccuu

SEQ ID NO: 409561 - RNA, 32 nt, Human
cuguugguugaacuaugcugaagagggaaagu

SEQ ID NO: 409562 - RNA, 32 nt, Human
cuguugguuucugcugguuguagguccuuggc

SEQ ID NO: 409563 - RNA, 32 nt, Human
cuguuguacgagcucccugaaccauuguucag

SEQ ID NO: 409564 - RNA, 32 nt, Human
cuguuguacuucugaaaucagaccugugugaa

SEQ ID NO: 409565 - RNA, 20 nt, Human
cuguuguagcggugagcuga

SEQ ID NO: 409566 - RNA, 32 nt, Human
cuguuguaggggaaugggcuuucaaagaagug

SEQ ID NO: 409567 - RNA, 32 nt, Human
cuguuguaucuauauuucacauguggaaacuu

SEQ ID NO: 409568 - RNA, 22 nt, Human
cuguuguauuuaaugaugguaa

SEQ ID NO: 409569 - RNA, 27 nt, Human
cuguugucacccaggcuggagugcagu

SEQ ID NO: 409570 - RNA, 32 nt, Human
cuguugucacccaggcuggagugcaguggugu

SEQ ID NO: 409571 - RNA, 31 nt, Human
cuguugucagucccugggccugagucccugg

SEQ ID NO: 409572 - RNA, 32 nt, Human
cuguugucauucaaucuagugccuccuugagg

SEQ ID NO: 409573 - RNA, 25 nt, Human
cuguuguccaaggcuggaguguagu

SEQ ID NO: 409574 - RNA, 24 nt, Human
cuguuguccaggauggagugcagu

SEQ ID NO: 409575 - RNA, 32 nt, Human
cuguuguccaggauggagugcagugguugauc

SEQ ID NO: 409576 - RNA, 24 nt, Human
cuguuguccaggcuagagugcagu

SEQ ID NO: 409577 - RNA, 24 nt, Human
cuguuguccaggcuggagggcagu

SEQ ID NO: 409578 - RNA, 22 nt, Human
cuguuguccaggcuggagugca

SEQ ID NO: 409579 - RNA, 24 nt, Human
cuguuguccaggcuggagugcaau

SEQ ID NO: 409580 - RNA, 32 nt, Human
cuguuguccaggcuggagugcaauggcaguug

SEQ ID NO: 409581 - RNA, 23 nt, Human
cuguuguccaggcuggagugcag

SEQ ID NO: 409582 - RNA, 32 nt, Human
cuguuguccaggcuggagugcagcgauauggu

SEQ ID NO: 409583 - RNA, 24 nt, Human
cuguuguccaggcuggagugcagu

SEQ ID NO: 409584 - RNA, 32 nt, Human
cuguuguccaggcuggagugcaguggcaccau

SEQ ID NO: 409585 - RNA, 32 nt, Human
cuguuguccaggcuggagugcaguggcacgaa

SEQ ID NO: 409586 - RNA, 32 nt, Human
cuguugucccagcuguuccguaggcugaggca

SEQ ID NO: 409587 - RNA, 32 nt, Human
cuguuguccccacuaccaucucccucucucag

SEQ ID NO: 409588 - RNA, 32 nt, Human
cuguugucgccuaggcuggagugcaaugaugc

SEQ ID NO: 409589 - RNA, 32 nt, Human
cuguugucucacuccugagggcuccugcagua

SEQ ID NO: 409590 - RNA, 27 nt, Human
cuguugucucccaggcuggagugcagu

SEQ ID NO: 409591 - RNA, 32 nt, Human
cuguugucucccaggcuggagugcaguggcgu

SEQ ID NO: 409592 - RNA, 32 nt, Human
cuguugucucugcucuucccucuccuggcugu

SEQ ID NO: 409593 - RNA, 32 nt, Human
cuguugucugcauucgugcccugggugccucu

SEQ ID NO: 409594 - RNA, 32 nt, Human
cuguugucuuaaugccauuucauuucacaugg

SEQ ID NO: 409595 - RNA, 32 nt, Human
cuguugugauuguuaguauugagcuguugccu

SEQ ID NO: 409596 - RNA, 32 nt, Human
cuguugugcagcuucuccaccuccugguagag

SEQ ID NO: 409597 - RNA, 24 nt, Human
cuguugugcaggcuggagugcagu

SEQ ID NO: 409598 - RNA, 32 nt, Human
cuguugugcaggcuggagugcaguggcacagu

SEQ ID NO: 409599 - RNA, 24 nt, Human
cuguugugcaggcuguagugcagu

SEQ ID NO: 409600 - RNA, 32 nt, Human
cuguuguggggaaaccaccuccauguaaccca

SEQ ID NO: 409601 - RNA, 32 nt, Human
cuguuguguagacugcagacauccauaccuca

SEQ ID NO: 409602 - RNA, 32 nt, Human
cuguugugugugugcaugccuugggcacaaac

SEQ ID NO: 409603 - RNA, 32 nt, Human
cuguuguguuccaugugcuuucaccucugccu

SEQ ID NO: 409604 - RNA, 32 nt, Human
cuguuguguuguggugccauccucuucccagu

SEQ ID NO: 409605 - RNA, 32 nt, Human
cuguuguuaaguggaggaaaguaguuguuaau

SEQ ID NO: 409606 - RNA, 32 nt, Human
cuguuguucagcuaugcuacagaagaggaugu

SEQ ID NO: 409607 - RNA, 32 nt, Human
cuguuguucauugcugcaucccccacaccgag

SEQ ID NO: 409608 - RNA, 32 nt, Human
cuguuguuccuucauauaaugccuugagaaau

SEQ ID NO: 409609 - RNA, 17 nt, Human
cuguuguucuagagcca

SEQ ID NO: 409610 - RNA, 32 nt, Human
cuguuguugcaguccagccuaguacugacacc

SEQ ID NO: 409611 - RNA, 32 nt, Human
cuguuguugcccaggcuggagugcaauagcac

SEQ ID NO: 409612 - RNA, 32 nt, Human
cuguuguugcccaggcuggagugcaauggcac

SEQ ID NO: 409613 - RNA, 32 nt, Human
cuguuguugcccaggcuggagugcaauggcgc

SEQ ID NO: 409614 - RNA, 32 nt, Human
cuguuguugcccaggcuggagugcaauggcgu

SEQ ID NO: 409615 - RNA, 32 nt, Human
cuguuguugcccaggcuggagugcaguggcgu

SEQ ID NO: 409616 - RNA, 32 nt, Human
cuguuguugcugugguggagugaugcaguggg

SEQ ID NO: 409617 - RNA, 32 nt, Human
cuguuguuggagacaugacaaucauuuucauc

SEQ ID NO: 409618 - RNA, 32 nt, Human
cuguuguuggcuggagaggaagguguggggug

SEQ ID NO: 409619 - RNA, 20 nt, Human
cuguuguuggucuggggcca

SEQ ID NO: 409620 - RNA, 32 nt, Human
cuguuguuguucacuuuccucauaaaaauugu

SEQ ID NO: 409621 - RNA, 32 nt, Human
cuguuguuuauggccuuugucuugucccucag

SEQ ID NO: 409622 - RNA, 20 nt, Human
cuguuguuuccugggaucuu

SEQ ID NO: 409623 - RNA, 32 nt, Human
cuguuguuucucaaauaaauguuuaauauuaa

SEQ ID NO: 409624 - RNA, 32 nt, Human
cuguuguuugcugccauuggcaugaaauggcc

SEQ ID NO: 409625 - RNA, 18 nt, Human
cuguuguuuuggggccuu

SEQ ID NO: 409626 - RNA, 32 nt, Human
cuguuuaaagaacuugcucucagagaagcacu

SEQ ID NO: 409627 - RNA, 24 nt, Human
cuguuuaacacggggaaaccccgu

SEQ ID NO: 409628 - RNA, 32 nt, Human
cuguuuaauacugauaaacaaaauguaaaggu

SEQ ID NO: 409629 - RNA, 32 nt, Human
cuguuuacaaaaagcuggccugggagcagaag

SEQ ID NO: 409630 - RNA, 32 nt, Human
cuguuuacacacccugccaaugccuuagcacu

SEQ ID NO: 409631 - RNA, 32 nt, Human
cuguuuacagccuggucuacugaguaagccca

SEQ ID NO: 409632 - RNA, 32 nt, Human
cuguuuacagcuuugaggccuugguggauggg

SEQ ID NO: 409633 - RNA, 32 nt, Human
cuguuuaccaugucagcuucagccugggggcu

SEQ ID NO: 409634 - RNA, 18 nt, Human
cuguuuacuugucuccau

SEQ ID NO: 409635 - RNA, 32 nt, Human
cuguuuacuuucuaucaggaagcaucuccauu

SEQ ID NO: 409636 - RNA, 32 nt, Human
cuguuuagccacauggugagaccguggugaaa

SEQ ID NO: 409637 - RNA, 30 nt, Human
cuguuuagccucuuugguuucuguacaacu

SEQ ID NO: 409638 - RNA, 32 nt, Human
cuguuuagcuuccucuugcuucccaaagauuu

SEQ ID NO: 409639 - RNA, 32 nt, Human
cuguuuagcuucuuccuccauuggaguuuauu

SEQ ID NO: 409640 - RNA, 32 nt, Human
cuguuuaggaaggugaaauacauucacugucu

SEQ ID NO: 409641 - RNA, 32 nt, Human
cuguuuaggaguuagggugaaagagaaaaugu

SEQ ID NO: 409642 - RNA, 32 nt, Human
cuguuuauaaucugaagauauauuucacuuuu

SEQ ID NO: 409643 - RNA, 32 nt, Human
cuguuuaucugaaggcuccuacccagagauuc

SEQ ID NO: 409644 - RNA, 32 nt, Human
cuguuuauucuguuucacccuacuccuccagu

SEQ ID NO: 409645 - RNA, 32 nt, Human
cuguuucaaacuaaagcucccaccucgaacau

SEQ ID NO: 409646 - RNA, 32 nt, Human
cuguuucaccucaggcugaggauguucuggac

SEQ ID NO: 409647 - RNA, 32 nt, Human
cuguuucagagugacucagaagaaaaagaagc

SEQ ID NO: 409648 - RNA, 32 nt, Human
cuguuucagccaugcaaagcaggguauaaaau

SEQ ID NO: 409649 - RNA, 23 nt, Human
cuguuucagcccagcccaucuca

SEQ ID NO: 409650 - RNA, 32 nt, Human
cuguuucagggaguuaaugacacacuugucca

SEQ ID NO: 409651 - RNA, 32 nt, Human
cuguuucaucucccauucaucucccuccuccc

SEQ ID NO: 409652 - RNA, 32 nt, Human
cuguuucauucacaugggauguuuucaauugg

SEQ ID NO: 409653 - RNA, 32 nt, Human
cuguuuccaagaggagguaaggaaguguuuau

SEQ ID NO: 409654 - RNA, 32 nt, Human
cuguuucccaaagcuuauguaagagcuuuucc

SEQ ID NO: 409655 - RNA, 24 nt, Human
cuguuucccaggcugaagugcagu

SEQ ID NO: 409656 - RNA, 32 nt, Human
cuguuucccaggcugaagugcaguggcaugaa

SEQ ID NO: 409657 - RNA, 32 nt, Human
cuguuucccaggcuggagugcacaaacauggc

SEQ ID NO: 409658 - RNA, 24 nt, Human
cuguuucccaggcuggagugcagu

SEQ ID NO: 409659 - RNA, 32 nt, Human
cuguuucccaggcuggagugcaguggcgcuau

SEQ ID NO: 409660 - RNA, 32 nt, Human
cuguuucccaggcuggagugcaguggugggau

SEQ ID NO: 409661 - RNA, 24 nt, Human
cuguuucccaggcuggaguguagu

SEQ ID NO: 409662 - RNA, 32 nt, Human
cuguuucccaggcuggaguguagugauacagu

SEQ ID NO: 409663 - RNA, 24 nt, Human
cuguuucccagguuggaguauagu

SEQ ID NO: 409664 - RNA, 32 nt, Human
cuguuucccuaggagagcacuuggagauggca

SEQ ID NO: 409665 - RNA, 32 nt, Human
cuguuucccugguuuucuuuuguacuccucuc

SEQ ID NO: 409666 - RNA, 32 nt, Human
cuguuuccuaaaggaugugugaacgggagaug

SEQ ID NO: 409667 - RNA, 32 nt, Human
cuguuuccucaagccuaacugaacauguaaaa

SEQ ID NO: 409668 - RNA, 32 nt, Human
cuguuuccucaccuucucuccccuuuccaugc

SEQ ID NO: 409669 - RNA, 32 nt, Human
cuguuuccucaggacucaguccugggcucucu

SEQ ID NO: 409670 - RNA, 32 nt, Human
cuguuuccuccaccuccacccccaccccuuaa

SEQ ID NO: 409671 - RNA, 32 nt, Human
cuguuuccucuccggugcaauccccuguccuu

SEQ ID NO: 409672 - RNA, 32 nt, Human
cuguuuccucuuguugaaugccuuagaacagu

SEQ ID NO: 409673 - RNA, 32 nt, Human
cuguuuccugaacacagaccucuuucuugugc

SEQ ID NO: 409674 - RNA, 32 nt, Human
cuguuuccugagcagugaugugcugcucuucu

SEQ ID NO: 409675 - RNA, 32 nt, Human
cuguuuccugcucucucccucugcauaucuuc

SEQ ID NO: 409676 - RNA, 32 nt, Human
cuguuuccuggccucagagcuuccuggggacc

SEQ ID NO: 409677 - RNA, 20 nt, Human
cuguuuccuuuuccucuccc

SEQ ID NO: 409678 - RNA, 32 nt, Human
cuguuucgaggcagaagccagacuaauuuuca

SEQ ID NO: 409679 - RNA, 32 nt, Human
cuguuucguguguacaguugcugcuguaauuu

SEQ ID NO: 409680 - RNA, 32 nt, Human
cuguuucuagacccucucugaucaaaccagag

SEQ ID NO: 409681 - RNA, 32 nt, Human
cuguuucuaggaucuuucucuccggcaagggg

SEQ ID NO: 409682 - RNA, 32 nt, Human
cuguuucuagguuuagaaguucagaggugacu

SEQ ID NO: 409683 - RNA, 32 nt, Human
cuguuucucaaccuuauccaucauuucugaca

SEQ ID NO: 409684 - RNA, 32 nt, Human
cuguuucuccccuagacucugggccuggccau

SEQ ID NO: 409685 - RNA, 32 nt, Human
cuguuucuccccuccgacuggggcucccugag

SEQ ID NO: 409686 - RNA, 32 nt, Human
cuguuucuccucaguuccccugugcagauggg

SEQ ID NO: 409687 - RNA, 32 nt, Human
cuguuucucucuccuccuuccaccuccccucc

SEQ ID NO: 409688 - RNA, 32 nt, Human
cuguuucucucugagcugagcagccaccaugg

SEQ ID NO: 409689 - RNA, 32 nt, Human
cuguuucugaaagcccuggaucucuuugcacc

SEQ ID NO: 409690 - RNA, 32 nt, Human
cuguuucugcauucugccacgagagcuagguc

SEQ ID NO: 409691 - RNA, 32 nt, Human
cuguuucugccuggucauccugagccccuccu

SEQ ID NO: 409692 - RNA, 32 nt, Human
cuguuucuggaaauguucuuuagaugguggca

SEQ ID NO: 409693 - RNA, 32 nt, Human
cuguuucugggcagugcaggaagucccagccc

SEQ ID NO: 409694 - RNA, 32 nt, Human
cuguuucuucccacccugucuucuccccuagg

SEQ ID NO: 409695 - RNA, 32 nt, Human
cuguuucuucucuuggugaaauaauaaaaugc

SEQ ID NO: 409696 - RNA, 32 nt, Human
cuguuucuucuuugugcuucccgugugccucc

SEQ ID NO: 409697 - RNA, 32 nt, Human
cuguuucuugagccaggucuucuguccaugca

SEQ ID NO: 409698 - RNA, 32 nt, Human
cuguuucuuuuuccuuuuccccuaguucuuac

SEQ ID NO: 409699 - RNA, 32 nt, Human
cuguuugaauggggugaaaaacagcaaaauua

SEQ ID NO: 409700 - RNA, 32 nt, Human
cuguuugacuccacucuuacugccuucuuaau

SEQ ID NO: 409701 - RNA, 30 nt, Human
cuguuugacuccagucuuacugccuucuua

SEQ ID NO: 409702 - RNA, 32 nt, Human
cuguuugacuccagucuuacugccuucuuaau

SEQ ID NO: 409703 - RNA, 32 nt, Human
cuguuugacuucucugcugaagugauuuccag

SEQ ID NO: 409704 - RNA, 32 nt, Human
cuguuugagaggcagaugcugaaggaggagcg

SEQ ID NO: 409705 - RNA, 32 nt, Human
cuguuugagauucucaaaggagcgagcauguc

SEQ ID NO: 409706 - RNA, 32 nt, Human
cuguuugagcaaugcagugccugcugcccgug

SEQ ID NO: 409707 - RNA, 32 nt, Human
cuguuugagcuucgggggagagcccagcacug

SEQ ID NO: 409708 - RNA, 32 nt, Human
cuguuugagcuucuuuuccugaccugaguuuu

SEQ ID NO: 409709 - RNA, 32 nt, Human
cuguuugaggcagaggugauggacuccggggg

SEQ ID NO: 409710 - RNA, 18 nt, Human
cuguuugagucuugcaag

SEQ ID NO: 409711 - RNA, 32 nt, Human
cuguuugcagaugcauuaucagugcaugcaaa

SEQ ID NO: 409712 - RNA, 32 nt, Human
cuguuugcagcacaauauaacuuuacauucuu

SEQ ID NO: 409713 - RNA, 32 nt, Human
cuguuugccacuucauuucauuuccuugagua

SEQ ID NO: 409714 - RNA, 32 nt, Human
cuguuugccaguauugccaucuccuguaaauu

SEQ ID NO: 409715 - RNA, 32 nt, Human
cuguuugccguggcuguccaugaguuuggcca

SEQ ID NO: 409716 - RNA, 32 nt, Human
cuguuugccuuucgugaacacauucuugguaa

SEQ ID NO: 409717 - RNA, 32 nt, Human
cuguuugcucaaucguggucucccucucccuc

SEQ ID NO: 409718 - RNA, 18 nt, Human
cuguuugcucuccugcaa

SEQ ID NO: 409719 - RNA, 32 nt, Human
cuguuugcuggaagauauacaagacuuuugag

SEQ ID NO: 409720 - RNA, 32 nt, Human
cuguuugcugugccauuucucaugccaggagu

SEQ ID NO: 409721 - RNA, 32 nt, Human
cuguuugcuguugcucggagacucgcccugua

SEQ ID NO: 409722 - RNA, 32 nt, Human
cuguuugcuuuugguaaugugauguugauguu

SEQ ID NO: 409723 - RNA, 31 nt, Human
cuguuuggagagacucagccaucaugccaga

SEQ ID NO: 409724 - RNA, 19 nt, Human
cuguuuggaggcacuccag

SEQ ID NO: 409725 - RNA, 32 nt, Human
cuguuuggcccaggccugggccaugacggaug

SEQ ID NO: 409726 - RNA, 24 nt, Human
cuguuuggccucucuauccucucu

SEQ ID NO: 409727 - RNA, 32 nt, Human
cuguuugggaaaauacguugagggagagaaga

SEQ ID NO: 409728 - RNA, 32 nt, Human
cuguuugggaagcagcagucucuccuucagau

SEQ ID NO: 409729 - RNA, 22 nt, Human
cuguuugggagcucucugcaag

SEQ ID NO: 409730 - RNA, 32 nt, Human
cuguuugggaggcugaggcaggaggaucgcuu

SEQ ID NO: 409731 - RNA, 32 nt, Human
cuguuugggaggcugaggcagguggaucaccu

SEQ ID NO: 409732 - RNA, 32 nt, Human
cuguuuggggaucguccuguccauccauguaa

SEQ ID NO: 409733 - RNA, 32 nt, Human
cuguuugggggucuaucucuccaucccucugu

SEQ ID NO: 409734 - RNA, 32 nt, Human
cuguuugggucugaggugcauggaacauucug

SEQ ID NO: 409735 - RNA, 20 nt, Human
cuguuuggucagcugagcca

SEQ ID NO: 409736 - RNA, 32 nt, Human
cuguuugucccauccacucuugaagcugggga

SEQ ID NO: 409737 - RNA, 32 nt, Human
cuguuugucuucauauagaacaggggcuucug

SEQ ID NO: 409738 - RNA, 32 nt, Human
cuguuugucuucuccccaggguucagucccuc

SEQ ID NO: 409739 - RNA, 32 nt, Human
cuguuugucuucuucuccgucuucuucuccug

SEQ ID NO: 409740 - RNA, 32 nt, Human
cuguuugugaagcuacauuacugugugaguug

SEQ ID NO: 409741 - RNA, 32 nt, Human
cuguuugugacuggcccuguccuggcaucagu

SEQ ID NO: 409742 - RNA, 32 nt, Human
cuguuugugcuuaaauggcacagcauuugguc

SEQ ID NO: 409743 - RNA, 32 nt, Human
cuguuuguuccugggagaauucugagcacaga

SEQ ID NO: 409744 - RNA, 32 nt, Human
cuguuuguucucugccuguugccgaccugaug

SEQ ID NO: 409745 - RNA, 32 nt, Human
cuguuuguuuuuaaaaagcaaaucuuucugua

SEQ ID NO: 409746 - RNA, 32 nt, Human
cuguuuuaccuccucccuaaucuuaaauaaca

SEQ ID NO: 409747 - RNA, 32 nt, Human
cuguuuuacuggaccccgccucccagccccag

SEQ ID NO: 409748 - RNA, 32 nt, Human
cuguuuuagagaaagcaccugauuauugugug

SEQ ID NO: 409749 - RNA, 32 nt, Human
cuguuuuaggugagccaugcacacaaugugaa

SEQ ID NO: 409750 - RNA, 32 nt, Human
cuguuuuauaaacugcugcuauuuggaaaccc

SEQ ID NO: 409751 - RNA, 32 nt, Human
cuguuuuaucaucuguagcuucauccuauccg

SEQ ID NO: 409752 - RNA, 32 nt, Human
cuguuuuaugugcacacauuaggcauugagac

SEQ ID NO: 409753 - RNA, 22 nt, Human
cuguuuucaaacacuucacuga

SEQ ID NO: 409754 - RNA, 32 nt, Human
cuguuuucacauuugaacuuuauggguuuugg

SEQ ID NO: 409755 - RNA, 32 nt, Human
cuguuuucagccccucccuggaauagugaguu

SEQ ID NO: 409756 - RNA, 32 nt, Human
cuguuuucagucucuauguguacagcaguauu

SEQ ID NO: 409757 - RNA, 32 nt, Human
cuguuuucauuuccuguuggaaauauuauccu

SEQ ID NO: 409758 - RNA, 32 nt, Human
cuguuuucauuuucacggcugucucacugggg

SEQ ID NO: 409759 - RNA, 32 nt, Human
cuguuuuccagccugggcaauacagugagacc

SEQ ID NO: 409760 - RNA, 32 nt, Human
cuguuuucccugacacaccugaggcagcuucc

SEQ ID NO: 409761 - RNA, 32 nt, Human
cuguuuucccuguagcagauaacagaaccuac

SEQ ID NO: 409762 - RNA, 18 nt, Human
cuguuuuccuggcaucuu

SEQ ID NO: 409763 - RNA, 32 nt, Human
cuguuuuccuuuccucuaaccccucuccucca

SEQ ID NO: 409764 - RNA, 32 nt, Human
cuguuuucucucuguuacacacuaacaucaau

SEQ ID NO: 409765 - RNA, 32 nt, Human
cuguuuucucuuuauuugcuuauauguuaaua

SEQ ID NO: 409766 - RNA, 32 nt, Human
cuguuuucugugugugcccauuuccuugacag

SEQ ID NO: 409767 - RNA, 20 nt, Human
cuguuuucuugccccaguca

SEQ ID NO: 409768 - RNA, 32 nt, Human
cuguuuucuuuccuuuuguuguugguuuuaaa

SEQ ID NO: 409769 - RNA, 32 nt, Human
cuguuuugaacccacagcaguggagauuugua

SEQ ID NO: 409770 - RNA, 32 nt, Human
cuguuuugauuuugcugaagggagagguggug

SEQ ID NO: 409771 - RNA, 22 nt, Human
cuguuuugcacuugccugcaag

SEQ ID NO: 409772 - RNA, 32 nt, Human
cuguuuugcucuaauccuccauuaagcgagca

SEQ ID NO: 409773 - RNA, 32 nt, Human
cuguuuuggaaaggauagccauuagcaugacu

SEQ ID NO: 409774 - RNA, 32 nt, Human
cuguuuuggauguuuugugucucuccagcuac

SEQ ID NO: 409775 - RNA, 26 nt, Human
cuguuuuggcucucagcaccuaccuc

SEQ ID NO: 409776 - RNA, 32 nt, Human
cuguuuuggguucugcauugagccaaauaugu

SEQ ID NO: 409777 - RNA, 32 nt, Human
cuguuuuguauaccccuccccugacccugcuc

SEQ ID NO: 409778 - RNA, 32 nt, Human
cuguuuuguauacuuguuuucaguuuucauuu

SEQ ID NO: 409779 - RNA, 31 nt, Human
cuguuuuguaugucuuuacacuuuaaguaaa

SEQ ID NO: 409780 - RNA, 32 nt, Human
cuguuuugugaaacacacacucugccauuuca

SEQ ID NO: 409781 - RNA, 32 nt, Human
cuguuuuguucuagccacacuggcagcuguua

SEQ ID NO: 409782 - RNA, 32 nt, Human
cuguuuuguucuaguaacaauuuuggaaugaa

SEQ ID NO: 409783 - RNA, 19 nt, Human
cuguuuuguuuuucugcaa

SEQ ID NO: 409784 - RNA, 32 nt, Human
cuguuuuguuuuucuuacccuuuuggacauuu

SEQ ID NO: 409785 - RNA, 32 nt, Human
cuguuuuuaaugugaaggccaagcaggcccug

SEQ ID NO: 409786 - RNA, 32 nt, Human
cuguuuuuaauuuaucacauacaccagaacuu

SEQ ID NO: 409787 - RNA, 32 nt, Human
cuguuuuuacauuuacugaauaagauuugagu

SEQ ID NO: 409788 - RNA, 32 nt, Human
cuguuuuuacuucuuagauuuuuaacuagguu

SEQ ID NO: 409789 - RNA, 32 nt, Human
cuguuuuuaggaaguauccacugcuaaguguu

SEQ ID NO: 409790 - RNA, 32 nt, Human
cuguuuuuaucaguggaggcuaaccuaaaauu

SEQ ID NO: 409791 - RNA, 30 nt, Human
cuguuuuucaauaaaaccagaguugaaggc

SEQ ID NO: 409792 - RNA, 32 nt, Human
cuguuuuuggcugugagacuagcacuaaggau

SEQ ID NO: 409793 - RNA, 32 nt, Human
cuguuuuugugagcccuuacacaggaagauau

SEQ ID NO: 409794 - RNA, 20 nt, Human
cuguuuuuguucuugaguca

SEQ ID NO: 409795 - RNA, 32 nt, Human
cuuaaaaacagugugcaaauggcagcuagagg

SEQ ID NO: 409796 - RNA, 32 nt, Human
cuuaaaaagacacaaguuuucuuuuugaucuc

SEQ ID NO: 409797 - RNA, 32 nt, Human
cuuaaaaagacuugaaaguucacugggacuca

SEQ ID NO: 409798 - RNA, 31 nt, Human
cuuaaaaagagaccuugaacuggaaaggguc

SEQ ID NO: 409799 - RNA, 32 nt, Human
cuuaaaaagcucccugcauucuugccuugccc

SEQ ID NO: 409800 - RNA, 32 nt, Human
cuuaaaaagucauagauuugugcugcugccag

SEQ ID NO: 409801 - RNA, 24 nt, Human
cuuaaaaagugcugggauuaaagg

SEQ ID NO: 409802 - RNA, 32 nt, Human
cuuaaaaagugcugggauuaaaggcgugagcc

SEQ ID NO: 409803 - RNA, 32 nt, Human
cuuaaaaauggugauugaagcaaaauauguaa

SEQ ID NO: 409804 - RNA, 32 nt, Human
cuuaaaacacuugcaaacauuuuauucaguug

SEQ ID NO: 409805 - RNA, 32 nt, Human
cuuaaaacagaccaaaaaugucagcuuucaga

SEQ ID NO: 409806 - RNA, 26 nt, Human
cuuaaaacaugagauuuuucuugcaa

SEQ ID NO: 409807 - RNA, 32 nt, Human
cuuaaaaccagcccaggcaacauggcaaaacc

SEQ ID NO: 409808 - RNA, 32 nt, Human
cuuaaaaccagcugucguuucucccuuagcuu

SEQ ID NO: 409809 - RNA, 32 nt, Human
cuuaaaacugagaacaugaaauaacaaccacu

SEQ ID NO: 409810 - RNA, 32 nt, Human
cuuaaaacuguaacuggccuuucucuuaccuu

SEQ ID NO: 409811 - RNA, 32 nt, Human
cuuaaaacuguacucuggccuacuuuucuauu

SEQ ID NO: 409812 - RNA, 32 nt, Human
cuuaaaagacuccaccaucucccuucucaucu

SEQ ID NO: 409813 - RNA, 32 nt, Human
cuuaaaagagagaccuguauuggagaauauuu

SEQ ID NO: 409814 - RNA, 32 nt, Human
cuuaaaagaguuuguuaaagugaagacuggag

SEQ ID NO: 409815 - RNA, 32 nt, Human
cuuaaaagauacgugccggggccagguguggu

SEQ ID NO: 409816 - RNA, 32 nt, Human
cuuaaaaggaagcgcgagcaccucgagcucag

SEQ ID NO: 409817 - RNA, 32 nt, Human
cuuaaaaggagagaagaaaguguagauaguua

SEQ ID NO: 409818 - RNA, 32 nt, Human
cuuaaaaggcaaacucaugaacagggccagug

SEQ ID NO: 409819 - RNA, 24 nt, Human
cuuaaaaguguuaauaaaaccaga

SEQ ID NO: 409820 - RNA, 32 nt, Human
cuuaaaauacaaauauuagcugggcaugauga

SEQ ID NO: 409821 - RNA, 32 nt, Human
cuuaaaauccagguuguugaaaagacuuugua

SEQ ID NO: 409822 - RNA, 32 nt, Human
cuuaaaauccugcucuggccggauuccagacu

SEQ ID NO: 409823 - RNA, 32 nt, Human
cuuaaaaucggcugcuuccuggacuugccccc

SEQ ID NO: 409824 - RNA, 32 nt, Human
cuuaaaaucucguuuucucuucuuccuucuuu

SEQ ID NO: 409825 - RNA, 32 nt, Human
cuuaaaaugcuuuaguuuccaucagguucaag

SEQ ID NO: 409826 - RNA, 32 nt, Human
cuuaaaauggaggcacaaagcccagcccuguc

SEQ ID NO: 409827 - RNA, 32 nt, Human
cuuaaaauuacuuggcuuuuuccaaaugcuuc

SEQ ID NO: 409828 - RNA, 32 nt, Human
cuuaaacaaaacaaacacaaaaacuuuuaaag

SEQ ID NO: 409829 - RNA, 32 nt, Human
cuuaaacaaagcaguauauaauaacuuuauug

SEQ ID NO: 409830 - RNA, 32 nt, Human
cuuaaacacagguccacguugugucaagaacc

SEQ ID NO: 409831 - RNA, 32 nt, Human
cuuaaacacaugcacauauagguaugacacuu

SEQ ID NO: 409832 - RNA, 32 nt, Human
cuuaaacacaugccucacaaacaucuacuuuc

SEQ ID NO: 409833 - RNA, 32 nt, Human
cuuaaacagaagcagaggcuaauucaguguca

SEQ ID NO: 409834 - RNA, 32 nt, Human
cuuaaacaugauccuucucuccucauucuuca

SEQ ID NO: 409835 - RNA, 32 nt, Human
cuuaaacaugggaggcggagguugcagugagc

SEQ ID NO: 409836 - RNA, 32 nt, Human
cuuaaacauguggcuugcucaguguuuaauug

SEQ ID NO: 409837 - RNA, 32 nt, Human
cuuaaaccaggaaggcagagauugcagugagc

SEQ ID NO: 409838 - RNA, 32 nt, Human
cuuaaaccauuucuaaaccucuaucuuagcag

SEQ ID NO: 409839 - RNA, 32 nt, Human
cuuaaacccaggaggcaaaggcugcagugagc

SEQ ID NO: 409840 - RNA, 32 nt, Human
cuuaaacccaggaggcggagguugcagugagc

SEQ ID NO: 409841 - RNA, 32 nt, Human
cuuaaacccaggaggcggagguugcagugagu

SEQ ID NO: 409842 - RNA, 32 nt, Human
cuuaaacccaggaggcggugguuguaggaagc

SEQ ID NO: 409843 - RNA, 32 nt, Human
cuuaaacccaggagguggagguugaaaugagc

SEQ ID NO: 409844 - RNA, 32 nt, Human
cuuaaacccaggagguggagguugcagugagc

SEQ ID NO: 409845 - RNA, 32 nt, Human
cuuaaacccaggaguucaagaccagccugggu

SEQ ID NO: 409846 - RNA, 32 nt, Human
cuuaaacccaggcggcagagguugcagugagc

SEQ ID NO: 409847 - RNA, 32 nt, Human
cuuaaacccagggcaucaggaugugcuugggc

SEQ ID NO: 409848 - RNA, 32 nt, Human
cuuaaacccagguggcggagguugcagugagc

SEQ ID NO: 409849 - RNA, 32 nt, Human
cuuaaacccgggaggcagaggcugcagagagc

SEQ ID NO: 409850 - RNA, 32 nt, Human
cuuaaacccgggaggcggagguugcagugagc

SEQ ID NO: 409851 - RNA, 32 nt, Human
cuuaaacccgggaggugaaggaugcagugagc

SEQ ID NO: 409852 - RNA, 32 nt, Human
cuuaaacccucuauuuccuaaaauauuguucc

SEQ ID NO: 409853 - RNA, 32 nt, Human
cuuaaacccuggaggcagagguugcagugagc

SEQ ID NO: 409854 - RNA, 32 nt, Human
cuuaaaccuaugugacaaaccgcccauuauuu

SEQ ID NO: 409855 - RNA, 32 nt, Human
cuuaaaccugagaggcagagguuacagugagc

SEQ ID NO: 409856 - RNA, 32 nt, Human
cuuaaaccugagagguggagguuacagugagu

SEQ ID NO: 409857 - RNA, 32 nt, Human
cuuaaaccugagagguggagguugcaguugag

SEQ ID NO: 409858 - RNA, 32 nt, Human
cuuaaaccugggagacggagguugcagugagc

SEQ ID NO: 409859 - RNA, 32 nt, Human
cuuaaaccugggaggcagaggugagcugagau

SEQ ID NO: 409860 - RNA, 32 nt, Human
cuuaaaccugggaggcggagaguacagugagc

SEQ ID NO: 409861 - RNA, 32 nt, Human
cuuaaaccugggagguggagguugcagugacc

SEQ ID NO: 409862 - RNA, 32 nt, Human
cuuaaaccugggauguggagguugcagugaac

SEQ ID NO: 409863 - RNA, 32 nt, Human
cuuaaaccuuguccaccucuugauauuuuagg

SEQ ID NO: 409864 - RNA, 32 nt, Human
cuuaaacuccagaaaaugaagaaaaaugaggu

SEQ ID NO: 409865 - RNA, 32 nt, Human
cuuaaacucgggagguagagguugcagugagc

SEQ ID NO: 409866 - RNA, 32 nt, Human
cuuaaacugcugcagugcucaaggagauggaa

SEQ ID NO: 409867 - RNA, 32 nt, Human
cuuaaacuucaucagaacauucauacgggaga

SEQ ID NO: 409868 - RNA, 32 nt, Human
cuuaaagaaacagcuuucaagugccuuucugc

SEQ ID NO: 409869 - RNA, 32 nt, Human
cuuaaagaacaacagucuuuucuucaggacuc

SEQ ID NO: 409870 - RNA, 32 nt, Human
cuuaaagaauccaaggagacagauguuguauc

SEQ ID NO: 409871 - RNA, 32 nt, Human
cuuaaagacauaaaucacaggugcaaagccau

SEQ ID NO: 409872 - RNA, 32 nt, Human
cuuaaagacucucgagaaaagccacguggggg

SEQ ID NO: 409873 - RNA, 32 nt, Human
cuuaaagagcugggaaccuuugcucaaagcuc

SEQ ID NO: 409874 - RNA, 32 nt, Human
cuuaaagaggcgguuagcaccuauuagacgua

SEQ ID NO: 409875 - RNA, 32 nt, Human
cuuaaagagguuaaagagguggagaaagagaa

SEQ ID NO: 409876 - RNA, 32 nt, Human
cuuaaagaguacauucugccuugcuguaguga

SEQ ID NO: 409877 - RNA, 32 nt, Human
cuuaaagauaugucccagggcaagacaacagg

SEQ ID NO: 409878 - RNA, 32 nt, Human
cuuaaagaugccuuucccaacccuccauucau

SEQ ID NO: 409879 - RNA, 32 nt, Human
cuuaaagcaaacuaagaccagagggaggauua

SEQ ID NO: 409880 - RNA, 32 nt, Human
cuuaaagcaauccugaagaaccagagagcgaa

SEQ ID NO: 409881 - RNA, 32 nt, Human
cuuaaagccccaggauuagauggaugccuuaa

SEQ ID NO: 409882 - RNA, 32 nt, Human
cuuaaagcucacuucaaauucuucuuugagaa

SEQ ID NO: 409883 - RNA, 32 nt, Human
cuuaaagcuucuccugugaacuucuuagggaa

SEQ ID NO: 409884 - RNA, 32 nt, Human
cuuaaagcuucuuguccauggcuuuuguuuga

SEQ ID NO: 409885 - RNA, 32 nt, Human
cuuaaaggagcuauguaacaagcccauauugu

SEQ ID NO: 409886 - RNA, 32 nt, Human
cuuaaaggauucacuagacucagaggcccuuc

SEQ ID NO: 409887 - RNA, 32 nt, Human
cuuaaaggcacaaauucuccuugaagaccuuc

SEQ ID NO: 409888 - RNA, 32 nt, Human
cuuaaaggccaccugcuauacaguuguuaaau

SEQ ID NO: 409889 - RNA, 32 nt, Human
cuuaaagggcaaguagacuuugcaacaugcuc

SEQ ID NO: 409890 - RNA, 32 nt, Human
cuuaaagggcugacuuuaguuccuucauggua

SEQ ID NO: 409891 - RNA, 32 nt, Human
cuuaaagguucugaaguaaaggcuuguuaagu

SEQ ID NO: 409892 - RNA, 32 nt, Human
cuuaaagucuguuuuuagacuucauggucauu

SEQ ID NO: 409893 - RNA, 23 nt, Human
cuuaaagugauucuccugccuca

SEQ ID NO: 409894 - RNA, 32 nt, Human
cuuaaaguggcuuucaacuucaagaugaagga

SEQ ID NO: 409895 - RNA, 32 nt, Human
cuuaaaguuuauaagaggcauauugccuuaaa

SEQ ID NO: 409896 - RNA, 32 nt, Human
cuuaaaucagaacuugcauaagaaagagaaug

SEQ ID NO: 409897 - RNA, 32 nt, Human
cuuaaauccaggaggcaaagguugcagugagc

SEQ ID NO: 409898 - RNA, 32 nt, Human
cuuaaauccaggaggcggagguugcagugagc

SEQ ID NO: 409899 - RNA, 32 nt, Human
cuuaaauccuucugucuuccugacugaaugaa

SEQ ID NO: 409900 - RNA, 32 nt, Human
cuuaaaucuccucuuuggaauucugcugauuc

SEQ ID NO: 409901 - RNA, 32 nt, Human
cuuaaaucugucuucugcucaguuucuggucc

SEQ ID NO: 409902 - RNA, 32 nt, Human
cuuaaaugaccuacaggguugcagugacagua

SEQ ID NO: 409903 - RNA, 32 nt, Human
cuuaaaugacucuucugccucagccucaccaa

SEQ ID NO: 409904 - RNA, 32 nt, Human
cuuaaaugaggugagagugaagagacuagagc

SEQ ID NO: 409905 - RNA, 32 nt, Human
cuuaaaugauaccucauugauauauugcacua

SEQ ID NO: 409906 - RNA, 32 nt, Human
cuuaaaugcccaggcuugaugggauaaaaugu

SEQ ID NO: 409907 - RNA, 32 nt, Human
cuuaaauggaggaucacuugaggccuagccuu

SEQ ID NO: 409908 - RNA, 32 nt, Human
cuuaaauuagcacuaaccuccacuuccuucuc

SEQ ID NO: 409909 - RNA, 32 nt, Human
cuuaaauucccggccuccucuucacuaguagg

SEQ ID NO: 409910 - RNA, 32 nt, Human
cuuaaauucuaauaggacucaggcuuggaagg

SEQ ID NO: 409911 - RNA, 32 nt, Human
cuuaaauuuucuggaauauccauguuucagag

SEQ ID NO: 409912 - RNA, 32 nt, Human
cuuaacaaagccuuugcuuuguuaucaaaugg

SEQ ID NO: 409913 - RNA, 32 nt, Human
cuuaacaaaugagacacauucacugggcaucu

SEQ ID NO: 409914 - RNA, 32 nt, Human
cuuaacaacuccaggagcccugucagcugccc

SEQ ID NO: 409915 - RNA, 32 nt, Human
cuuaacacaaauguguauaugugcacacaggg

SEQ ID NO: 409916 - RNA, 32 nt, Human
cuuaacacacagauuccucuuaaaugccaccu

SEQ ID NO: 409917 - RNA, 32 nt, Human
cuuaacaccuggcaacagucuccccucauccu

SEQ ID NO: 409918 - RNA, 32 nt, Human
cuuaacagauuucugcuggcugcuauuauagg

SEQ ID NO: 409919 - RNA, 32 nt, Human
cuuaacaggaaguuuaguuuguuaugcacuuu

SEQ ID NO: 409920 - RNA, 32 nt, Human
cuuaacaggagggcagagggcaggggacagac

SEQ ID NO: 409921 - RNA, 32 nt, Human
cuuaacaggucuuuaaauugggcaguucugaa

SEQ ID NO: 409922 - RNA, 32 nt, Human
cuuaacauacccucaaacugaggcuuaaagua

SEQ ID NO: 409923 - RNA, 32 nt, Human
cuuaacauaugaaaauccuuaauuucuacugc

SEQ ID NO: 409924 - RNA, 32 nt, Human
cuuaacauauuaucuuguuagauuuguuacca

SEQ ID NO: 409925 - RNA, 32 nt, Human
cuuaacauuaaacucuucuaacuuucuucuuu

SEQ ID NO: 409926 - RNA, 32 nt, Human
cuuaacauugcagcuuucucuccaucugcaga

SEQ ID NO: 409927 - RNA, 32 nt, Human
cuuaacauuucuuccauggccccacaccaugg

SEQ ID NO: 409928 - RNA, 32 nt, Human
cuuaaccaagaaguaaauaugaccucaguguc

SEQ ID NO: 409929 - RNA, 32 nt, Human
cuuaacccaagggagcacaggucccaccucca

SEQ ID NO: 409930 - RNA, 32 nt, Human
cuuaacccagaaccugguggcccaagugcuca

SEQ ID NO: 409931 - RNA, 32 nt, Human
cuuaaccccaggaggacagagacccugaggca

SEQ ID NO: 409932 - RNA, 32 nt, Human
cuuaacccgccugaagcaauagccauggaagu

SEQ ID NO: 409933 - RNA, 32 nt, Human
cuuaaccucuucaagccccaauuuccucaacc

SEQ ID NO: 409934 - RNA, 32 nt, Human
cuuaaccugaugcuaauuuucaggguucucca

SEQ ID NO: 409935 - RNA, 32 nt, Human
cuuaaccugcagcuucguuuaauguagcucuu

SEQ ID NO: 409936 - RNA, 32 nt, Human
cuuaaccugcuguuggccuuugauucugggcc

SEQ ID NO: 409937 - RNA, 32 nt, Human
cuuaaccuuuuauuuccuguccuuccuugaaa

SEQ ID NO: 409938 - RNA, 32 nt, Human
cuuaacucacugcaaccuccgcuucccaggua

SEQ ID NO: 409939 - RNA, 32 nt, Human
cuuaacucaugccaacuccacccuacauggcu

SEQ ID NO: 409940 - RNA, 32 nt, Human
cuuaacucaugccaagcaucucagcuuggggu

SEQ ID NO: 409941 - RNA, 32 nt, Human
cuuaacucugcagcuuucaagcucaucuguua

SEQ ID NO: 409942 - RNA, 31 nt, Human
cuuaacucuucaaaugacuguugaaagagaa

SEQ ID NO: 409943 - RNA, 32 nt, Human
cuuaacugccaagagcagguccuggaguuccc

SEQ ID NO: 409944 - RNA, 32 nt, Human
cuuaacugcuuuguaccacacagcaguagaug

SEQ ID NO: 409945 - RNA, 32 nt, Human
cuuaacuguccacccuuacuaccugugggauc

SEQ ID NO: 409946 - RNA, 32 nt, Human
cuuaacuuagcuguuucccuacuucugugacu

SEQ ID NO: 409947 - RNA, 32 nt, Human
cuuaacuucuggguuugcuauuacaaauccua

SEQ ID NO: 409948 - RNA, 32 nt, Human
cuuaacuugcagaaggcuuguuaacaauuguu

SEQ ID NO: 409949 - RNA, 31 nt, Human
cuuaacuugggguccaucaccccaggggguc

SEQ ID NO: 409950 - RNA, 32 nt, Human
cuuaacuuuucuguaccucuucuguuuuugua

SEQ ID NO: 409951 - RNA, 32 nt, Human
cuuaagaaaaagagguuucaguuggcugauag

SEQ ID NO: 409952 - RNA, 32 nt, Human
cuuaagaaaaaggaaaacacagcuccccagac

SEQ ID NO: 409953 - RNA, 32 nt, Human
cuuaagaaaauacaaaauuaggaacaggccuu

SEQ ID NO: 409954 - RNA, 32 nt, Human
cuuaagaaaaugccuuuuacucagggaaucuc

SEQ ID NO: 409955 - RNA, 32 nt, Human
cuuaagaaaggcugguuaccaucggaguuuac

SEQ ID NO: 409956 - RNA, 32 nt, Human
cuuaagaacacccuugucucagucccacucag

SEQ ID NO: 409957 - RNA, 32 nt, Human
cuuaagaaccaggcaaccucugccuucuuccc

SEQ ID NO: 409958 - RNA, 32 nt, Human
cuuaagaaccauugauuuaauguaauagggaa

SEQ ID NO: 409959 - RNA, 32 nt, Human
cuuaagaagaccucuggcuuuccuggaacaca

SEQ ID NO: 409960 - RNA, 32 nt, Human
cuuaagaagccgccugggucaguggcuacgca

SEQ ID NO: 409961 - RNA, 32 nt, Human
cuuaagaagggacggggccccacgcugcgcac

SEQ ID NO: 409962 - RNA, 32 nt, Human
cuuaagaauaaucacugugaccaacuuacagu

SEQ ID NO: 409963 - RNA, 32 nt, Human
cuuaagaauccuggccgaggucagccuccucc

SEQ ID NO: 409964 - RNA, 32 nt, Human
cuuaagaauucagucuaaauuagcaaccagga

SEQ ID NO: 409965 - RNA, 32 nt, Human
cuuaagaccagccugggcaacauaauaagacc

SEQ ID NO: 409966 - RNA, 32 nt, Human
cuuaagaccagccugggcaacauaaugagacc

SEQ ID NO: 409967 - RNA, 32 nt, Human
cuuaagaccuacuguucuaaagcucugacauu

SEQ ID NO: 409968 - RNA, 32 nt, Human
cuuaagacuguagcgucgacuccugccggaau

SEQ ID NO: 409969 - RNA, 32 nt, Human
cuuaagagcacuaaccccucccugguuugaag

SEQ ID NO: 409970 - RNA, 32 nt, Human
cuuaagaggaagagguuaagcuguaaaguagu

SEQ ID NO: 409971 - RNA, 32 nt, Human
cuuaagaggagauguagaaaaauguguacaau

SEQ ID NO: 409972 - RNA, 32 nt, Human
cuuaagagucauccagcucuugcucagugaag

SEQ ID NO: 409973 - RNA, 32 nt, Human
cuuaagaguccuuucucagcauauuauucugc

SEQ ID NO: 409974 - RNA, 32 nt, Human
cuuaagaguuguggaagagaagaaaaagaaaa

SEQ ID NO: 409975 - RNA, 32 nt, Human
cuuaagaguuugugcccuuaaaccagacuccc

SEQ ID NO: 409976 - RNA, 32 nt, Human
cuuaagauaaagauuguacuugacaguuuagu

SEQ ID NO: 409977 - RNA, 32 nt, Human
cuuaagauaauuaugugaggccacuugguagc

SEQ ID NO: 409978 - RNA, 21 nt, Human
cuuaagaucaggaguucgaga

SEQ ID NO: 409979 - RNA, 32 nt, Human
cuuaagcaaacagugaauucaccuccaccuca

SEQ ID NO: 409980 - RNA, 22 nt, Human
cuuaagcaauccucccaccuua

SEQ ID NO: 409981 - RNA, 32 nt, Human
cuuaagcagguaaagcagucacugugaagaaa

SEQ ID NO: 409982 - RNA, 32 nt, Human
cuuaagccaaaugguguuccaaguugguugcu

SEQ ID NO: 409983 - RNA, 32 nt, Human
cuuaagccacacacauuguugcugcuaugacu

SEQ ID NO: 409984 - RNA, 32 nt, Human
cuuaagcccaccucccccucuuguugccuucg

SEQ ID NO: 409985 - RNA, 32 nt, Human
cuuaagcccagaaggcagagguuguagugagc

SEQ ID NO: 409986 - RNA, 32 nt, Human
cuuaagcccaggaaguugagaccgcagagagc

SEQ ID NO: 409987 - RNA, 32 nt, Human
cuuaagcccaggaauucgaaaucagccuaggc

SEQ ID NO: 409988 - RNA, 32 nt, Human
cuuaagcccaggagacagagguugcagugagc

SEQ ID NO: 409989 - RNA, 32 nt, Human
cuuaagcccaggagcucaagucccaccugggc

SEQ ID NO: 409990 - RNA, 32 nt, Human
cuuaagcccaggagcuuaagaccagccugggc

SEQ ID NO: 409991 - RNA, 32 nt, Human
cuuaagcccaggagguucaggcugcaguaagg

SEQ ID NO: 409992 - RNA, 32 nt, Human
cuuaagcccaggagucugagaccagccugggc

SEQ ID NO: 409993 - RNA, 32 nt, Human
cuuaagcccaggaguucaagaccaaccuggac

SEQ ID NO: 409994 - RNA, 32 nt, Human
cuuaagcccaggaguucaagaccagccugggc

SEQ ID NO: 409995 - RNA, 32 nt, Human
cuuaagcccaggaguucgagaucagccuggac

SEQ ID NO: 409996 - RNA, 32 nt, Human
cuuaagcccaggaguuugagaccagcuugggc

SEQ ID NO: 409997 - RNA, 32 nt, Human
cuuaagcccaggaguuugagucuguaaugcac

SEQ ID NO: 409998 - RNA, 32 nt, Human
cuuaagccccagaaagccaaaaagaacaugua

SEQ ID NO: 409999 - RNA, 32 nt, Human
cuuaagcccgggaggcagaaccugcagugagc

SEQ ID NO: 410000 - RNA, 32 nt, Human
cuuaagccgcagcugcuauagauagcacugcc

SEQ ID NO: 410001 - RNA, 32 nt, Human
cuuaagccugggaggcaauggcugcaguaaac

SEQ ID NO: 410002 - RNA, 32 nt, Human
cuuaagccugggaggcagagguugcagugagc

SEQ ID NO: 410003 - RNA, 32 nt, Human
cuuaagccuuagaacaaagucaugcagaugcc

SEQ ID NO: 410004 - RNA, 32 nt, Human
cuuaagccuuaguaugaaaaacugaggauuua

SEQ ID NO: 410005 - RNA, 32 nt, Human
cuuaagcgacuugccauuugaguuacaucacc

SEQ ID NO: 410006 - RNA, 32 nt, Human
cuuaagcgggcagagguggauugagcacuaug

SEQ ID NO: 410007 - RNA, 21 nt, Human
cuuaagcucaggaguucaagg

SEQ ID NO: 410008 - RNA, 32 nt, Human
cuuaagcucccccagcucuuuccagaaaacau

SEQ ID NO: 410009 - RNA, 32 nt, Human
cuuaagcucucuaauccuccuccucagagugc

SEQ ID NO: 410010 - RNA, 32 nt, Human
cuuaagcugcuggcugggcaaguguucauuga

SEQ ID NO: 410011 - RNA, 32 nt, Human
cuuaagcuuccugagguugcaccagaagcaga

SEQ ID NO: 410012 - RNA, 32 nt, Human
cuuaagcuugcuggaaacugugggaggaugug

SEQ ID NO: 410013 - RNA, 32 nt, Human
cuuaaggaagagacccugugagucugacaaua

SEQ ID NO: 410014 - RNA, 32 nt, Human
cuuaaggaaggaauuaagaaaagggaaaaagc

SEQ ID NO: 410015 - RNA, 32 nt, Human
cuuaaggacugcuucugcccucugccugccag

SEQ ID NO: 410016 - RNA, 32 nt, Human
cuuaaggaugcugagggcauggggccaggacc

SEQ ID NO: 410017 - RNA, 32 nt, Human
cuuaaggccaggaguucaagaccaccuggcca

SEQ ID NO: 410018 - RNA, 32 nt, Human
cuuaaggccaggaguucgagaccagccugggc

SEQ ID NO: 410019 - RNA, 32 nt, Human
cuuaaggccaggaguuugagaccagcuugggc

SEQ ID NO: 410020 - RNA, 20 nt, Human
cuuaaggcugggugcagugg

SEQ ID NO: 410021 - RNA, 32 nt, Human
cuuaagggaaggucaagagggagaugggcaag

SEQ ID NO: 410022 - RNA, 32 nt, Human
cuuaagggacaggcacagcagaggugagagug

SEQ ID NO: 410023 - RNA, 32 nt, Human
cuuaagggaggcggcggcagcgcggcgguggg

SEQ ID NO: 410024 - RNA, 32 nt, Human
cuuaaggggugacuugccugagcucuaucacc

SEQ ID NO: 410025 - RNA, 22 nt, Human
cuuaagggucagugguggaaag

SEQ ID NO: 410026 - RNA, 32 nt, Human
cuuaagggucuguuucucagcaucauggaugc

SEQ ID NO: 410027 - RNA, 32 nt, Human
cuuaaggguguuuuuguuuguuuuaaucagcc

SEQ ID NO: 410028 - RNA, 32 nt, Human
cuuaaggguuacaggcaggcugcacacagcag

SEQ ID NO: 410029 - RNA, 20 nt, Human
cuuaaggguucuguaguguu

SEQ ID NO: 410030 - RNA, 32 nt, Human
cuuaaggguugcauacuuuuauuggaguaaau

SEQ ID NO: 410031 - RNA, 32 nt, Human
cuuaaggucaucuugaaauuugccaaauauau

SEQ ID NO: 410032 - RNA, 19 nt, Human
cuuaaguacccugccucca

SEQ ID NO: 410033 - RNA, 32 nt, Human
cuuaaguaucuuucccuuccuucucuacccuc

SEQ ID NO: 410034 - RNA, 32 nt, Human
cuuaaguauucaacacaaacuuucuaauaucu

SEQ ID NO: 410035 - RNA, 31 nt, Human
cuuaagucaauaaauaaauguaaggaagucc

SEQ ID NO: 410036 - RNA, 32 nt, Human
cuuaagucacccaucuuccaguaagcaguuua

SEQ ID NO: 410037 - RNA, 32 nt, Human
cuuaagucauucucugccugcauccagccccu

SEQ ID NO: 410038 - RNA, 32 nt, Human
cuuaaguccaggaguucaagaccagccugggu

SEQ ID NO: 410039 - RNA, 32 nt, Human
cuuaagucuacaggggcuggugaccucuuuuu

SEQ ID NO: 410040 - RNA, 32 nt, Human
cuuaagucugggagguugaggcugcagugagc

SEQ ID NO: 410041 - RNA, 32 nt, Human
cuuaagugaaggagugggggaggaagaagcau

SEQ ID NO: 410042 - RNA, 32 nt, Human
cuuaaguggcagaauauaauucccaagcuuuu

SEQ ID NO: 410043 - RNA, 32 nt, Human
cuuaaguggucaggaagguaggugcuucccuu

SEQ ID NO: 410044 - RNA, 32 nt, Human
cuuaaguuauugugcucuuuucuguuauguau

SEQ ID NO: 410045 - RNA, 32 nt, Human
cuuaaguuguuccucuguuaucaugccugaau

SEQ ID NO: 410046 - RNA, 26 nt, Human
cuuaauaaauauuuuaucaaaauguc

SEQ ID NO: 410047 - RNA, 32 nt, Human
cuuaauaaauggccucauuugaucaucaugug

SEQ ID NO: 410048 - RNA, 32 nt, Human
cuuaauacuguugccagccccaaagacuguca

SEQ ID NO: 410049 - RNA, 32 nt, Human
cuuaauauacagguaucccagcuuugggcaca

SEQ ID NO: 410050 - RNA, 32 nt, Human
cuuaauaucgacuuucuuuuguaccagguuuu

SEQ ID NO: 410051 - RNA, 32 nt, Human
cuuaauaucugacacuguuacucucauaugca

SEQ ID NO: 410052 - RNA, 32 nt, Human
cuuaauauucuuuaaagggcaugggaauuuag

SEQ ID NO: 410053 - RNA, 32 nt, Human
cuuaaucaaccagcgguuucccagcaggacaa

SEQ ID NO: 410054 - RNA, 32 nt, Human
cuuaaucaaccccagcccauguccccuguuca

SEQ ID NO: 410055 - RNA, 32 nt, Human
cuuaaucaacugcuugaugaaggaggcaaaac

SEQ ID NO: 410056 - RNA, 32 nt, Human
cuuaaucaagagcuggaguucaaugaguccua

SEQ ID NO: 410057 - RNA, 32 nt, Human
cuuaaucacugcauuaauauuugguugcauag

SEQ ID NO: 410058 - RNA, 32 nt, Human
cuuaaucauacaguaagcugaccuggaaauga

SEQ ID NO: 410059 - RNA, 32 nt, Human
cuuaaucauugauccaggaauauuucaaccag

SEQ ID NO: 410060 - RNA, 32 nt, Human
cuuaaucccgggaaagaggaacaggagugcca

SEQ ID NO: 410061 - RNA, 32 nt, Human
cuuaauccuaaaccaaccugugaauggaucau

SEQ ID NO: 410062 - RNA, 31 nt, Human
cuuaauccugagagagaaaauuaaguacugu

SEQ ID NO: 410063 - RNA, 32 nt, Human
cuuaaucggugcuuuauggaggccaguguaac

SEQ ID NO: 410064 - RNA, 32 nt, Human
cuuaaucguggccucccugggguggguggggu

SEQ ID NO: 410065 - RNA, 32 nt, Human
cuuaaucuagggcauguccauuccaaggucuc

SEQ ID NO: 410066 - RNA, 32 nt, Human
cuuaaucuccucuaugcuaucuccucuaaucu

SEQ ID NO: 410067 - RNA, 32 nt, Human
cuuaaucuccucuucuuucauccucagcuuca

SEQ ID NO: 410068 - RNA, 32 nt, Human
cuuaaucugcagcagcucacaggcugggggug

SEQ ID NO: 410069 - RNA, 32 nt, Human
cuuaaucugccuggcguccccucccucugucu

SEQ ID NO: 410070 - RNA, 32 nt, Human
cuuaaucuggaucagacucacccuggacuaau

SEQ ID NO: 410071 - RNA, 32 nt, Human
cuuaaucuugguagugccugccuuugaaacag

SEQ ID NO: 410072 - RNA, 32 nt, Human
cuuaaucuuuaucugcugaauaaaugagucca

SEQ ID NO: 410073 - RNA, 32 nt, Human
cuuaaugaaaagagaacggagaggaggugugg

SEQ ID NO: 410074 - RNA, 32 nt, Human
cuuaaugaaaccaguggaugugcuuaacguaa

SEQ ID NO: 410075 - RNA, 32 nt, Human
cuuaaugaaugcauuuuauuuaucucaauuuu

SEQ ID NO: 410076 - RNA, 32 nt, Human
cuuaaugauuauuuuuauuacuuacuguuguu

SEQ ID NO: 410077 - RNA, 32 nt, Human
cuuaaugcacacauaagacgcccuaagauaac

SEQ ID NO: 410078 - RNA, 32 nt, Human
cuuaaugcucagccacauucccuugcuggaca

SEQ ID NO: 410079 - RNA, 32 nt, Human
cuuaaugcucaucagagaguucauacagggga

SEQ ID NO: 410080 - RNA, 23 nt, Human
cuuaauggacuggacucuugcca

SEQ ID NO: 410081 - RNA, 32 nt, Human
cuuaaugguaaauccuucauuuaaagauagug

SEQ ID NO: 410082 - RNA, 32 nt, Human
cuuaauggucacccuaaaaacacccacauaug

SEQ ID NO: 410083 - RNA, 32 nt, Human
cuuaauguaauucaggacuccaaccaagagga

SEQ ID NO: 410084 - RNA, 32 nt, Human
cuuaauguagauaucuuuaucauucugaauug

SEQ ID NO: 410085 - RNA, 25 nt, Human
cuuaaugucucaaaauaaaaccaga

SEQ ID NO: 410086 - RNA, 32 nt, Human
cuuaauguguguguuuuuacuugcauaucugu

SEQ ID NO: 410087 - RNA, 32 nt, Human
cuuaauguuuucuuuaaauggcucacuuuugu

SEQ ID NO: 410088 - RNA, 32 nt, Human
cuuaauuacaauaucugauauuuuuacagucu

SEQ ID NO: 410089 - RNA, 32 nt, Human
cuuaauuacucaauaaacuugcugguguucug

SEQ ID NO: 410090 - RNA, 32 nt, Human
cuuaauuagagaugauuucuggaacauucagu

SEQ ID NO: 410091 - RNA, 32 nt, Human
cuuaauuaguaaaauauaaucauuuuuaguaa

SEQ ID NO: 410092 - RNA, 32 nt, Human
cuuaauuauagucuggcgugaucauguagaau

SEQ ID NO: 410093 - RNA, 32 nt, Human
cuuaauucaggcucaggcugaagaacugaccc

SEQ ID NO: 410094 - RNA, 32 nt, Human
cuuaauucagucaagacucccuuugggaauuc

SEQ ID NO: 410095 - RNA, 32 nt, Human
cuuaauucaucuaaucccuccuguuugucuca

SEQ ID NO: 410096 - RNA, 32 nt, Human
cuuaauucauuuccuggacaaacuuccuccaa

SEQ ID NO: 410097 - RNA, 30 nt, Human
cuuaauucccaaucccauuccugggcuagc

SEQ ID NO: 410098 - RNA, 32 nt, Human
cuuaauucccauuuaccagcaguuaacucaug

SEQ ID NO: 410099 - RNA, 32 nt, Human
cuuaauuccuguaaucccagcauuuugagagg

SEQ ID NO: 410100 - RNA, 32 nt, Human
cuuaauucucugcaacacuuugaggacauuua

SEQ ID NO: 410101 - RNA, 32 nt, Human
cuuaauugaaauauuugcucucugccauaauu

SEQ ID NO: 410102 - RNA, 32 nt, Human
cuuaauugaaggccaccuucucacagguuuca

SEQ ID NO: 410103 - RNA, 32 nt, Human
cuuaauugagcucuaggguggcugguuaguau

SEQ ID NO: 410104 - RNA, 32 nt, Human
cuuaauugggaaaaggaggaguaagagcaggc

SEQ ID NO: 410105 - RNA, 32 nt, Human
cuuaauuuaagcuuucuagaaagcuuuggaag

SEQ ID NO: 410106 - RNA, 32 nt, Human
cuuaauuucacucaagguucauugggcucugc

SEQ ID NO: 410107 - RNA, 32 nt, Human
cuuaauuucgcuuugugcaucuuccccuccag

SEQ ID NO: 410108 - RNA, 24 nt, Human
cuuaauuugaauaauaaaaccaga

SEQ ID NO: 410109 - RNA, 32 nt, Human
cuuaauuuuaaacugcggaauguggccucugc

SEQ ID NO: 410110 - RNA, 32 nt, Human
cuuaauuuuagccuaaauauuucuccacauuu

SEQ ID NO: 410111 - RNA, 32 nt, Human
cuuaauuuuaugaaccucucccucuucuuccu

SEQ ID NO: 410112 - RNA, 32 nt, Human
cuuaauuuuccucuuggucacucccauucuug

SEQ ID NO: 410113 - RNA, 32 nt, Human
cuuacaaaagauguuuauguccaccauuaucu

SEQ ID NO: 410114 - RNA, 32 nt, Human
cuuacaaacagcuuacaguuacuugggcuacu

SEQ ID NO: 410115 - RNA, 32 nt, Human
cuuacaaacuaaaucagugugcugcuagaggg

SEQ ID NO: 410116 - RNA, 32 nt, Human
cuuacaaacuccagaggccauauucaaaacag

SEQ ID NO: 410117 - RNA, 32 nt, Human
cuuacaaagaccccacagaaguaaaggcaaua

SEQ ID NO: 410118 - RNA, 32 nt, Human
cuuacaaagugcugggaugacaggcaugagcc

SEQ ID NO: 410119 - RNA, 32 nt, Human
cuuacaacucaucaaagcugugagccaguuaa

SEQ ID NO: 410120 - RNA, 32 nt, Human
cuuacaagaggauuguaaaauggaccaaucag

SEQ ID NO: 410121 - RNA, 32 nt, Human
cuuacaagagguggagcaugcagaugagcagg

SEQ ID NO: 410122 - RNA, 32 nt, Human
cuuacaagugagaacaugcaguauuuaguuuu

SEQ ID NO: 410123 - RNA, 32 nt, Human
cuuacaauaagaaagaauauguuugugggaaa

SEQ ID NO: 410124 - RNA, 32 nt, Human
cuuacaauuauuucacaucuguggcaagguaa

SEQ ID NO: 410125 - RNA, 32 nt, Human
cuuacaauuuucccucuucacuugguucuugu

SEQ ID NO: 410126 - RNA, 32 nt, Human
cuuacacaaaccuagauguuauauguauuuuu

SEQ ID NO: 410127 - RNA, 32 nt, Human
cuuacacaaggggugcaggauuugaauucugu

SEQ ID NO: 410128 - RNA, 32 nt, Human
cuuacacacaaacacacauacucccacauacu

SEQ ID NO: 410129 - RNA, 32 nt, Human
cuuacacacaugcacacacaaauaugcacaga

SEQ ID NO: 410130 - RNA, 32 nt, Human
cuuacacacccacacacauacacauuucaugc

SEQ ID NO: 410131 - RNA, 32 nt, Human
cuuacacacgcacuuuaccacccggucauucc

SEQ ID NO: 410132 - RNA, 32 nt, Human
cuuacaccaguaaucccagcacuuugggaggc

SEQ ID NO: 410133 - RNA, 32 nt, Human
cuuacaccaugaucuugaacuuuccagccucc

SEQ ID NO: 410134 - RNA, 32 nt, Human
cuuacacccugggcagccuccuccgauggccc

SEQ ID NO: 410135 - RNA, 32 nt, Human
cuuacacccuugucccacccccagcagcucac

SEQ ID NO: 410136 - RNA, 32 nt, Human
cuuacaccuaccuuuaucaccauucguucaug

SEQ ID NO: 410137 - RNA, 32 nt, Human
cuuacaccuauaaucccagcacuuugggaggc

SEQ ID NO: 410138 - RNA, 32 nt, Human
cuuacaccuguaaccccagcacuuugggaggc

SEQ ID NO: 410139 - RNA, 32 nt, Human
cuuacaccuguaagcccagcacuuugggaggc

SEQ ID NO: 410140 - RNA, 24 nt, Human
cuuacaccuguaaucccaacacuu

SEQ ID NO: 410141 - RNA, 32 nt, Human
cuuacaccuguaaucccaacacuuugggaagc

SEQ ID NO: 410142 - RNA, 32 nt, Human
cuuacaccuguaaucccaaugcuuugggagac

SEQ ID NO: 410143 - RNA, 32 nt, Human
cuuacaccuguaaucccagcacuuugggaggc

SEQ ID NO: 410144 - RNA, 32 nt, Human
cuuacaccuguaaucccaguacuuugggaggc

SEQ ID NO: 410145 - RNA, 32 nt, Human
cuuacaccuguaauccuaguacuuugggaggc

SEQ ID NO: 410146 - RNA, 32 nt, Human
cuuacaccuguaaucgcagcauuuugggaggc

SEQ ID NO: 410147 - RNA, 32 nt, Human
cuuacaccuguaaucugagcgcuuugggaggc

SEQ ID NO: 410148 - RNA, 32 nt, Human
cuuacaccuguaauuccagcacuuugggacgc

SEQ ID NO: 410149 - RNA, 32 nt, Human
cuuacaccuguagucccaggcacuuugggagg

SEQ ID NO: 410150 - RNA, 32 nt, Human
cuuacaccugugaucccagcacuuugggaggc

SEQ ID NO: 410151 - RNA, 32 nt, Human
cuuacacgauggaguugaagaggcagagaaaa

SEQ ID NO: 410152 - RNA, 32 nt, Human
cuuacacugaaauccaaaauagucauguuucu

SEQ ID NO: 410153 - RNA, 32 nt, Human
cuuacacugcauucauuaacaucucaaucuca

SEQ ID NO: 410154 - RNA, 32 nt, Human
cuuacacugugguguccagcagcauccggcuu

SEQ ID NO: 410155 - RNA, 32 nt, Human
cuuacacuguugcaucacaagggacucaccca

SEQ ID NO: 410156 - RNA, 32 nt, Human
cuuacagagaagagaagagggagucagcccau

SEQ ID NO: 410157 - RNA, 32 nt, Human
cuuacagagugcuagccucuuccuucaggacu

SEQ ID NO: 410158 - RNA, 32 nt, Human
cuuacagaugcucucagaacaguuccaagaau

SEQ ID NO: 410159 - RNA, 32 nt, Human
cuuacagcaaacugcagauauggaguuggaac

SEQ ID NO: 410160 - RNA, 32 nt, Human
cuuacagcacagacuagguguugaaggcaggu

SEQ ID NO: 410161 - RNA, 32 nt, Human
cuuacagcauugaggucacacagcuguccucg

SEQ ID NO: 410162 - RNA, 32 nt, Human
cuuacagccagaggaaccagcacuccaucacu

SEQ ID NO: 410163 - RNA, 32 nt, Human
cuuacagccccaauggcccccaaaaagccaga

SEQ ID NO: 410164 - RNA, 32 nt, Human
cuuacagcugggucguaaaaugaacaagccug

SEQ ID NO: 410165 - RNA, 32 nt, Human
cuuacagcuuucucacaugaguugcuucacau

SEQ ID NO: 410166 - RNA, 22 nt, Human
cuuacaggaaccggcagcagcu

SEQ ID NO: 410167 - RNA, 32 nt, Human
cuuacaggaaggaggaggggaagcaguggaug

SEQ ID NO: 410168 - RNA, 32 nt, Human
cuuacaggcccaggacuggagcuuucucuggc

SEQ ID NO: 410169 - RNA, 31 nt, Human
cuuacagggcuaggcaguaccaaaguaacug

SEQ ID NO: 410170 - RNA, 32 nt, Human
cuuacaggugugagccacagugcccagcuuuu

SEQ ID NO: 410171 - RNA, 22 nt, Human
cuuacaguaacccccaccccuu

SEQ ID NO: 410172 - RNA, 32 nt, Human
cuuacagucccugucauauuaccaacagaggc

SEQ ID NO: 410173 - RNA, 32 nt, Human
cuuacagugagcugagauugcgccacuguacu

SEQ ID NO: 410174 - RNA, 16 nt, Human
cuuacaguggguccag

SEQ ID NO: 410175 - RNA, 32 nt, Human
cuuacaguuuauuagcccuugauuucagcuga

SEQ ID NO: 410176 - RNA, 32 nt, Human
cuuacaguuuccauugccaacaacagccaucc

SEQ ID NO: 410177 - RNA, 32 nt, Human
cuuacauagacuuccugaaugugucuucuuca

SEQ ID NO: 410178 - RNA, 32 nt, Human
cuuacaucaccgccacuacugcagcucagugc

SEQ ID NO: 410179 - RNA, 32 nt, Human
cuuacauccccucccuucccccuccucguucc

SEQ ID NO: 410180 - RNA, 32 nt, Human
cuuacaucuaaauuuuguuucuguuaccuaaa

SEQ ID NO: 410181 - RNA, 32 nt, Human
cuuacaucuguaaucccagcacuuugggaggc

SEQ ID NO: 410182 - RNA, 32 nt, Human
cuuacaugagauucucauuuguaggaggaugu

SEQ ID NO: 410183 - RNA, 32 nt, Human
cuuacaugagggugaggaaggagaagcccagc

SEQ ID NO: 410184 - RNA, 31 nt, Human
cuuacauggacuucuuugccuuuuaaagugu

SEQ ID NO: 410185 - RNA, 32 nt, Human
cuuacaugggaucaaauacuugagauuaguac

SEQ ID NO: 410186 - RNA, 32 nt, Human
cuuacaugucaucuuaacaucucuuugaggaa

SEQ ID NO: 410187 - RNA, 32 nt, Human
cuuacauguucccaaaacaaugguguggugaa

SEQ ID NO: 410188 - RNA, 32 nt, Human
cuuacauucuucauguggauguggccaguguc

SEQ ID NO: 410189 - RNA, 32 nt, Human
cuuacauuucccuuggaggguucagagauuaa

SEQ ID NO: 410190 - RNA, 24 nt, Human
cuuacauuuugauuccccccuccc

SEQ ID NO: 410191 - RNA, 32 nt, Human
cuuaccaacaugaugaaaccaucucuucuaaa

SEQ ID NO: 410192 - RNA, 32 nt, Human
cuuaccaacauggagaaaccccaucucuacua

SEQ ID NO: 410193 - RNA, 32 nt, Human
cuuaccaaggggaauguuugccucugccucug

SEQ ID NO: 410194 - RNA, 32 nt, Human
cuuaccaauuuccaaguagaaauuauccauua

SEQ ID NO: 410195 - RNA, 32 nt, Human
cuuaccacacacccuuccugcugcuccucuuc

SEQ ID NO: 410196 - RNA, 32 nt, Human
cuuaccacacauauacauagagaggacugcac

SEQ ID NO: 410197 - RNA, 32 nt, Human
cuuaccacuaaacuguugugcauggugcuuuu

SEQ ID NO: 410198 - RNA, 32 nt, Human
cuuaccacuguuaaaacaacaaaaagacuaaa

SEQ ID NO: 410199 - RNA, 32 nt, Human
cuuaccagagcugaaaaugaaaaagagaacag

SEQ ID NO: 410200 - RNA, 32 nt, Human
cuuaccagaggcauuacugagcuaaaucuuuc

SEQ ID NO: 410201 - RNA, 32 nt, Human
cuuaccagauugccaggacuaagccaucccaa

SEQ ID NO: 410202 - RNA, 32 nt, Human
cuuaccagcccauagccuaccagccugcccuc

SEQ ID NO: 410203 - RNA, 32 nt, Human
cuuaccaggccgcggcuaccccgccguccccc

SEQ ID NO: 410204 - RNA, 32 nt, Human
cuuaccaggcuuuuugucucaguguguucagg

SEQ ID NO: 410205 - RNA, 31 nt, Human
cuuaccauggaaaauuccgagaagacugaag

SEQ ID NO: 410206 - RNA, 32 nt, Human
cuuaccauuuugcuagggugugcaaugcccac

SEQ ID NO: 410207 - RNA, 23 nt, Human
cuuacccaagcuggagugcagug

SEQ ID NO: 410208 - RNA, 32 nt, Human
cuuacccacgaggcuuugcgguggcuguuggc

SEQ ID NO: 410209 - RNA, 32 nt, Human
cuuacccacugccugcccagacuuucuaucca

SEQ ID NO: 410210 - RNA, 23 nt, Human
cuuacccaggcugagugcagugg

SEQ ID NO: 410211 - RNA, 32 nt, Human
cuuacccaugaucuaugauuccaucugaaggg

SEQ ID NO: 410212 - RNA, 32 nt, Human
cuuacccauuacuuggauauuugcuacgaucc

SEQ ID NO: 410213 - RNA, 32 nt, Human
cuuaccccaccccacgcuccagccugacccuc

SEQ ID NO: 410214 - RNA, 32 nt, Human
cuuaccccaccccucagcucagccugguaugg

SEQ ID NO: 410215 - RNA, 32 nt, Human
cuuaccccaguucccaaacacaggaagugauu

SEQ ID NO: 410216 - RNA, 32 nt, Human
cuuacccccagccaccaccugccccgccucgu

SEQ ID NO: 410217 - RNA, 32 nt, Human
cuuaccccucugccccuagccuaggaguguga

SEQ ID NO: 410218 - RNA, 32 nt, Human
cuuaccccugcuggcccuugcaaggcgcgacc

SEQ ID NO: 410219 - RNA, 32 nt, Human
cuuaccccuguaaucccagcacuuugggaggc

SEQ ID NO: 410220 - RNA, 32 nt, Human
cuuacccugccucuguguuucggugagagucu

SEQ ID NO: 410221 - RNA, 32 nt, Human
cuuacccugccuuccugccuccagagucugag

SEQ ID NO: 410222 - RNA, 32 nt, Human
cuuacccugggcuggagaguugguuucagguu

SEQ ID NO: 410223 - RNA, 32 nt, Human
cuuacccuggggugggaacccaggagguggag

SEQ ID NO: 410224 - RNA, 32 nt, Human
cuuacccugucugagccuuacugucuucagug

SEQ ID NO: 410225 - RNA, 32 nt, Human
cuuacccugugccuggccagcgugaugugcag

SEQ ID NO: 410226 - RNA, 32 nt, Human
cuuacccuguucuggaaucgcugccagacugu

SEQ ID NO: 410227 - RNA, 32 nt, Human
cuuacccuuuuggagcuugaagcauaaggaag

SEQ ID NO: 410228 - RNA, 32 nt, Human
cuuaccgaaggggccacccucuggccuccugc

SEQ ID NO: 410229 - RNA, 32 nt, Human
cuuaccuaaaaagguuuagcaauuuggggaua

SEQ ID NO: 410230 - RNA, 32 nt, Human
cuuaccuaaauguuaaccaagcagaggugaca

SEQ ID NO: 410231 - RNA, 32 nt, Human
cuuaccuacaauaacuuuuauuuuggaauuga

SEQ ID NO: 410232 - RNA, 32 nt, Human
cuuaccuacaauauucauuucaaacugcuaaa

SEQ ID NO: 410233 - RNA, 32 nt, Human
cuuaccuauuuccucagauccccagcuuucuc

SEQ ID NO: 410234 - RNA, 32 nt, Human
cuuaccucacauaagccauuugcccacugugc

SEQ ID NO: 410235 - RNA, 32 nt, Human
cuuaccucaccucccuccauuuacauuagggc

SEQ ID NO: 410236 - RNA, 32 nt, Human
cuuaccucagcagcuuccauggcaggcuuguu

SEQ ID NO: 410237 - RNA, 32 nt, Human
cuuaccucauucuuacuauccaaaagccaccu

SEQ ID NO: 410238 - RNA, 32 nt, Human
cuuaccucauuuuucucccaggccuaggagcu

SEQ ID NO: 410239 - RNA, 32 nt, Human
cuuaccucccaaauugcuuuauuguauuaacu

SEQ ID NO: 410240 - RNA, 32 nt, Human
cuuaccucucugacaguuacagugaucuuugu

SEQ ID NO: 410241 - RNA, 32 nt, Human
cuuaccucugccaagagccuccagaugugccu

SEQ ID NO: 410242 - RNA, 32 nt, Human
cuuaccucuucacaacacuugugugcaaagau

SEQ ID NO: 410243 - RNA, 32 nt, Human
cuuaccugacacaagaggaauaagaauggagc

SEQ ID NO: 410244 - RNA, 32 nt, Human
cuuaccugccuguauuugugccccauuuuuaa

SEQ ID NO: 410245 - RNA, 32 nt, Human
cuuaccugcugugcccaccugcucucugucuc

SEQ ID NO: 410246 - RNA, 32 nt, Human
cuuaccuggaggaagaaugugccuucaggcca

SEQ ID NO: 410247 - RNA, 32 nt, Human
cuuaccuggcccagcccugccucccucagcca

SEQ ID NO: 410248 - RNA, 32 nt, Human
cuuaccugggaggcagaggguguuaugggagg

SEQ ID NO: 410249 - RNA, 31 nt, Human
cuuaccuggguggacagcagugaaucuccac

SEQ ID NO: 410250 - RNA, 32 nt, Human
cuuaccuguaggacucaaagggagccaggacc

SEQ ID NO: 410251 - RNA, 32 nt, Human
cuuaccuguagucccagcuacuugggaagcag

SEQ ID NO: 410252 - RNA, 32 nt, Human
cuuaccugugaagcuugaggccacucaaguuc

SEQ ID NO: 410253 - RNA, 32 nt, Human
cuuaccugugcaggucuccugaugcaggucuc

SEQ ID NO: 410254 - RNA, 32 nt, Human
cuuaccuuaccgcuuggacucugguggcuccc

SEQ ID NO: 410255 - RNA, 32 nt, Human
cuuaccuuaccuccgucucauccuuaacucac

SEQ ID NO: 410256 - RNA, 22 nt, Human
cuuaccuucaguggcuagacag

SEQ ID NO: 410257 - RNA, 32 nt, Human
cuuaccuuccuuucucuuuccuaacuuaaaaa

SEQ ID NO: 410258 - RNA, 32 nt, Human
cuuaccuugaacugaaggccacuugaguuggg

SEQ ID NO: 410259 - RNA, 32 nt, Human
cuuaccuuucagacuucauuaaacuuaugacc

SEQ ID NO: 410260 - RNA, 32 nt, Human
cuuaccuuucaucauucauuccuuccuuuaga

SEQ ID NO: 410261 - RNA, 32 nt, Human
cuuacgacccucccugcagggcugggcuuuug

SEQ ID NO: 410262 - RNA, 32 nt, Human
cuuacgaggagacuuggucacugugaaggaga

SEQ ID NO: 410263 - RNA, 32 nt, Human
cuuacgcccaggcuggaaugaaguggcaugau

SEQ ID NO: 410264 - RNA, 32 nt, Human
cuuacgccuauaaucccagcacuuugggaggc

SEQ ID NO: 410265 - RNA, 32 nt, Human
cuuacgccuguaaucccaauacuuugggaggc

SEQ ID NO: 410266 - RNA, 32 nt, Human
cuuacgccuguaaucccagcacuuugagaggc

SEQ ID NO: 410267 - RNA, 32 nt, Human
cuuacgccuguaaucccagcacuuugggacgc

SEQ ID NO: 410268 - RNA, 32 nt, Human
cuuacgccuguaaucccagcacuuugggaggc

SEQ ID NO: 410269 - RNA, 32 nt, Human
cuuacgccuguaaucccagcgcuuugggaggc

SEQ ID NO: 410270 - RNA, 32 nt, Human
cuuacgccuguaaucccaggacuuugggaggc

SEQ ID NO: 410271 - RNA, 32 nt, Human
cuuacgccuguaauccuagcacuuugggaggc

SEQ ID NO: 410272 - RNA, 32 nt, Human
cuuacgccuguaaucucagcacuuugggaggc

SEQ ID NO: 410273 - RNA, 32 nt, Human
cuuacgccuguaauuccagcacuuugggaggc

SEQ ID NO: 410274 - RNA, 32 nt, Human
cuuacgccuguuaucccagcacuuugggaggu

SEQ ID NO: 410275 - RNA, 32 nt, Human
cuuacgcuuguagucccagcacuuugggaggc

SEQ ID NO: 410276 - RNA, 32 nt, Human
cuuacggacugcaaccuucaaauucagcugug

SEQ ID NO: 410277 - RNA, 32 nt, Human
cuuacggaguuucgcucuuauugcccagacua

SEQ ID NO: 410278 - RNA, 32 nt, Human
cuuacggcaauuuagguuucucauuuuucuuu

SEQ ID NO: 410279 - RNA, 32 nt, Human
cuuacgggagcuugguaaugcagguggugaag

SEQ ID NO: 410280 - RNA, 32 nt, Human
cuuacgggagggauggagggaggcaggcuggg

SEQ ID NO: 410281 - RNA, 32 nt, Human
cuuacgugcccccagcccacugccuccaaguc

SEQ ID NO: 410282 - RNA, 32 nt, Human
cuuacguggagagugcacugaccuguagguca

SEQ ID NO: 410283 - RNA, 32 nt, Human
cuuacguucaggcucuccugugcccagagaga

SEQ ID NO: 410284 - RNA, 31 nt, Human
cuuacguucuuucagcaugcuccuuaaaacc

SEQ ID NO: 410285 - RNA, 32 nt, Human
cuuacguuucucauagaugaucaagaguuggc

SEQ ID NO: 410286 - RNA, 32 nt, Human
cuuacuaaaaauacaaaaauuagccaggugug

SEQ ID NO: 410287 - RNA, 32 nt, Human
cuuacuaauagggauguuaaaaguaacaaaac

SEQ ID NO: 410288 - RNA, 32 nt, Human
cuuacuacugcacuccugcuuuugugggaaaa

SEQ ID NO: 410289 - RNA, 32 nt, Human
cuuacuauucaacaaacucucaguuggccccc

SEQ ID NO: 410290 - RNA, 32 nt, Human
cuuacucagcugaugucacagugcagacaucc

SEQ ID NO: 410291 - RNA, 32 nt, Human
cuuacucauccugucugguugcuauguuuaaa

SEQ ID NO: 410292 - RNA, 32 nt, Human
cuuacucaucuucuagccuuaugaccaggaac

SEQ ID NO: 410293 - RNA, 32 nt, Human
cuuacucauguguacacaacuagugagaaucc

SEQ ID NO: 410294 - RNA, 32 nt, Human
cuuacucauucuauaccagcagccagcauaca

SEQ ID NO: 410295 - RNA, 32 nt, Human
cuuacucauugcucucucaucuugccuccagu

SEQ ID NO: 410296 - RNA, 32 nt, Human
cuuacuccaaggcugggcucuacucccauguu

SEQ ID NO: 410297 - RNA, 32 nt, Human
cuuacuccacuucgcuucucugcuccagguuc

SEQ ID NO: 410298 - RNA, 32 nt, Human
cuuacucccagggcuguguaagaaaagucaua

SEQ ID NO: 410299 - RNA, 32 nt, Human
cuuacucccucguacaugcacaaauacacacu

SEQ ID NO: 410300 - RNA, 32 nt, Human
cuuacucccuuccaaucucuguucagugcaaa

SEQ ID NO: 410301 - RNA, 32 nt, Human
cuuacuccgcuccccucuuuucccucccucuc

SEQ ID NO: 410302 - RNA, 32 nt, Human
cuuacuccguagcccaggcuggagugcagugg

SEQ ID NO: 410303 - RNA, 32 nt, Human
cuuacuccguugcccaggcuggaguacaaugg

SEQ ID NO: 410304 - RNA, 21 nt, Human
cuuacuccuccucaaggaguc

SEQ ID NO: 410305 - RNA, 32 nt, Human
cuuacuccuuuuccucuauaaaaccaaaacuu

SEQ ID NO: 410306 - RNA, 32 nt, Human
cuuacucggauggccucccugccccucugcug

SEQ ID NO: 410307 - RNA, 32 nt, Human
cuuacucugcaccuccccacucucuucccauu

SEQ ID NO: 410308 - RNA, 32 nt, Human
cuuacucugcaggguuuaauguaggacaagca

SEQ ID NO: 410309 - RNA, 32 nt, Human
cuuacucugccacuaauuuauuuccuuguugc

SEQ ID NO: 410310 - RNA, 32 nt, Human
cuuacucugucacccaggcuagagugcaaugg

SEQ ID NO: 410311 - RNA, 32 nt, Human
cuuacucugucacccaggcuagagugcagugg

SEQ ID NO: 410312 - RNA, 32 nt, Human
cuuacucugucacccaggcuggagugcaaugg

SEQ ID NO: 410313 - RNA, 32 nt, Human
cuuacucugucacccaggcuggagugcagugg

SEQ ID NO: 410314 - RNA, 32 nt, Human
cuuacucugucacccaggcuguagugcagugg

SEQ ID NO: 410315 - RNA, 32 nt, Human
cuuacucugucgcccaggcuggacugcagugg

SEQ ID NO: 410316 - RNA, 32 nt, Human
cuuacucugucgcccaggcuggaguacaaugg

SEQ ID NO: 410317 - RNA, 32 nt, Human
cuuacucugucgcccaggcuggagugcaguga

SEQ ID NO: 410318 - RNA, 32 nt, Human
cuuacucugucgcccaggcuggagugcagugg

SEQ ID NO: 410319 - RNA, 32 nt, Human
cuuacucugucgcccaggcuggaguguagugg

SEQ ID NO: 410320 - RNA, 32 nt, Human
cuuacucugucucccaggcugcuggagugcag

SEQ ID NO: 410321 - RNA, 32 nt, Human
cuuacucuguugcccaggcuggagugcagggg

SEQ ID NO: 410322 - RNA, 32 nt, Human
cuuacucuguugcccaggcuggagugcagugg

SEQ ID NO: 410323 - RNA, 32 nt, Human
cuuacucuguugcccaggcuggaguguagugg

SEQ ID NO: 410324 - RNA, 32 nt, Human
cuuacucuguuucccaggcuggagugcacaaa

SEQ ID NO: 410325 - RNA, 32 nt, Human
cuuacucuuguuucuccuccgccgaggcacug

SEQ ID NO: 410326 - RNA, 32 nt, Human
cuuacucuuucaauuuuacuggcuccacuguu

SEQ ID NO: 410327 - RNA, 32 nt, Human
cuuacugaguccuaauuuccacuguggccaga

SEQ ID NO: 410328 - RNA, 32 nt, Human
cuuacugaucuuuguauauuacauacaugcuu

SEQ ID NO: 410329 - RNA, 28 nt, Human
cuuacugauuaaaaugucaauguaaucu

SEQ ID NO: 410330 - RNA, 32 nt, Human
cuuacugcaaccuccaccuccuggguucaagu

SEQ ID NO: 410331 - RNA, 32 nt, Human
cuuacugcaaccuccgccuccuggguucaagc

SEQ ID NO: 410332 - RNA, 32 nt, Human
cuuacugcaagcuccgccuccuggguucacgc

SEQ ID NO: 410333 - RNA, 32 nt, Human
cuuacugcaagcucugccuccuggguucaagc

SEQ ID NO: 410334 - RNA, 32 nt, Human
cuuacugcacccucaaccuccugggcucaagc

SEQ ID NO: 410335 - RNA, 32 nt, Human
cuuacugcagccucaaccuccugggcucaggu

SEQ ID NO: 410336 - RNA, 32 nt, Human
cuuacugcaggugggcacccacaugccuaagc

SEQ ID NO: 410337 - RNA, 32 nt, Human
cuuacugcauccaugauccuccugccucagcc

SEQ ID NO: 410338 - RNA, 32 nt, Human
cuuacugcccacagaaccuccagguuccucug

SEQ ID NO: 410339 - RNA, 32 nt, Human
cuuacugcccaggugacuugugcauugcuuua

SEQ ID NO: 410340 - RNA, 32 nt, Human
cuuacuggacuuggcccugccugaugccaagc

SEQ ID NO: 410341 - RNA, 32 nt, Human
cuuacugggauacagauuuuugcucagaaaug

SEQ ID NO: 410342 - RNA, 32 nt, Human
cuuacugggcucaggccacauaauuggacucu

SEQ ID NO: 410343 - RNA, 32 nt, Human
cuuacuggggaaaaggaugggagugggggcuc

SEQ ID NO: 410344 - RNA, 32 nt, Human
cuuacugggggccacgucccaccccucagaua

SEQ ID NO: 410345 - RNA, 21 nt, Human
cuuacuggguugacuggaaag

SEQ ID NO: 410346 - RNA, 32 nt, Human
cuuacuguccaggucacaugcccacaaaguca

SEQ ID NO: 410347 - RNA, 32 nt, Human
cuuacugugcuaguagauuuuaguagauauug

SEQ ID NO: 410348 - RNA, 32 nt, Human
cuuacugugguggugaccagugugcuucuuaa

SEQ ID NO: 410349 - RNA, 32 nt, Human
cuuacuguguguuugcuggagcuuucacucag

SEQ ID NO: 410350 - RNA, 32 nt, Human
cuuacuguuccugagcaugggagggaauagaa

SEQ ID NO: 410351 - RNA, 31 nt, Human
cuuacuguuucacguguaccugugucaucuu

SEQ ID NO: 410352 - RNA, 32 nt, Human
cuuacuuaaaaggcauuaaggaggcauuuacu

SEQ ID NO: 410353 - RNA, 32 nt, Human
cuuacuuaaaccagucccagacaccuagacac

SEQ ID NO: 410354 - RNA, 32 nt, Human
cuuacuuacucccauuuucccuucgauauaug

SEQ ID NO: 410355 - RNA, 32 nt, Human
cuuacuuagcuccuggcagagggugagugggg

SEQ ID NO: 410356 - RNA, 32 nt, Human
cuuacuuaggugugggggaagcaccauaacuu

SEQ ID NO: 410357 - RNA, 22 nt, Human
cuuacuuaguuuuucucuuccu

SEQ ID NO: 410358 - RNA, 32 nt, Human
cuuacuuaucucuguugcuuucugggguccua

SEQ ID NO: 410359 - RNA, 32 nt, Human
cuuacuucacaucuuggucuuccccuagaguu

SEQ ID NO: 410360 - RNA, 32 nt, Human
cuuacuuccgaguagccauauuucaaguguuc

SEQ ID NO: 410361 - RNA, 32 nt, Human
cuuacuuccucuugucccuuuucauaucuugg

SEQ ID NO: 410362 - RNA, 32 nt, Human
cuuacuucuccagcaacacucuucaguacaua

SEQ ID NO: 410363 - RNA, 32 nt, Human
cuuacuucuguuuuaaacuuuggguaccaaac

SEQ ID NO: 410364 - RNA, 32 nt, Human
cuuacuucuuuuucccccuccuccccuccuuu

SEQ ID NO: 410365 - RNA, 32 nt, Human
cuuacuugaaugaaagucugauauuugcugau

SEQ ID NO: 410366 - RNA, 32 nt, Human
cuuacuugaucauuugauggaaucuaggcuaa

SEQ ID NO: 410367 - RNA, 32 nt, Human
cuuacuugccaaggcaagaucuagagggaacc

SEQ ID NO: 410368 - RNA, 32 nt, Human
cuuacuuggcuccagcccuccagcugcagccc

SEQ ID NO: 410369 - RNA, 32 nt, Human
cuuacuugguugcugaacaucuugccaccucc

SEQ ID NO: 410370 - RNA, 32 nt, Human
cuuacuuuacccacuggaagcugcucagcccu

SEQ ID NO: 410371 - RNA, 32 nt, Human
cuuacuuugacccccaggcuggagugcagugg

SEQ ID NO: 410372 - RNA, 21 nt, Human
cuuacuuugaucuguuuguca

SEQ ID NO: 410373 - RNA, 32 nt, Human
cuuacuuuggacuagggguacauucuuacaaa

SEQ ID NO: 410374 - RNA, 32 nt, Human
cuuagaaaaagcuuuccugaaucccucugacg

SEQ ID NO: 410375 - RNA, 32 nt, Human
cuuagaaaacaacagcuauucuaagaaguguc

SEQ ID NO: 410376 - RNA, 32 nt, Human
cuuagaaaaccagcucagcacugccugcuccc

SEQ ID NO: 410377 - RNA, 32 nt, Human
cuuagaaaagccccagcauggccgggcauggu

SEQ ID NO: 410378 - RNA, 32 nt, Human
cuuagaaaagugcaagaagacaggcaugucuu

SEQ ID NO: 410379 - RNA, 32 nt, Human
cuuagaaauacaucugcuuguuuauugagaaa

SEQ ID NO: 410380 - RNA, 32 nt, Human
cuuagaaauuccaggaacacaauuaggauauu

SEQ ID NO: 410381 - RNA, 32 nt, Human
cuuagaacacaaacagaauauugcaaaugcau

SEQ ID NO: 410382 - RNA, 32 nt, Human
cuuagaaccaacaacauuugaagauuuugcag

SEQ ID NO: 410383 - RNA, 32 nt, Human
cuuagaaccugaccagauguggcucggagggg

SEQ ID NO: 410384 - RNA, 32 nt, Human
cuuagaaccuggacagcccgacugccucaacu

SEQ ID NO: 410385 - RNA, 32 nt, Human
cuuagaacgguaagaaaccaugagcacucaca

SEQ ID NO: 410386 - RNA, 32 nt, Human
cuuagaagaagaaagaaagagggaaagagaaa

SEQ ID NO: 410387 - RNA, 32 nt, Human
cuuagaagagugaggccagggaagguggggcg

SEQ ID NO: 410388 - RNA, 32 nt, Human
cuuagaagcacauguacauacauggaccucau

SEQ ID NO: 410389 - RNA, 20 nt, Human
cuuagaagccggaggaaaau

SEQ ID NO: 410390 - RNA, 32 nt, Human
cuuagaagccuccccugacuucacugugcuuc

SEQ ID NO: 410391 - RNA, 32 nt, Human
cuuagaagcugcuaucuugacugagguuuuaa

SEQ ID NO: 410392 - RNA, 32 nt, Human
cuuagaaggagaaagacagagacacaucaggg

SEQ ID NO: 410393 - RNA, 32 nt, Human
cuuagaaggggaugagucagauuuuuacagag

SEQ ID NO: 410394 - RNA, 23 nt, Human
cuuagaauacaucaaagaauuca

SEQ ID NO: 410395 - RNA, 32 nt, Human
cuuagaaugccacagucccccaacccuccaca

SEQ ID NO: 410396 - RNA, 32 nt, Human
cuuagaauuccccucuggagggcuauggccuc

SEQ ID NO: 410397 - RNA, 32 nt, Human
cuuagaauucuucugagugaaguaugagaaaa

SEQ ID NO: 410398 - RNA, 32 nt, Human
cuuagaauucuuuauugguggcccuacuaugg

SEQ ID NO: 410399 - RNA, 32 nt, Human
cuuagacacacagcuggcaagcagcggaaagg

SEQ ID NO: 410400 - RNA, 32 nt, Human
cuuagacacuuugagcaagauuguggcaguuu

SEQ ID NO: 410401 - RNA, 32 nt, Human
cuuagacagcacaacauacccacucggauauc

SEQ ID NO: 410402 - RNA, 20 nt, Human
cuuagacagccccaggguga

SEQ ID NO: 410403 - RNA, 32 nt, Human
cuuagacauaucucucauuuuucauuuuguug

SEQ ID NO: 410404 - RNA, 32 nt, Human
cuuagacauuagugagaaagaaaaagaucgcu

SEQ ID NO: 410405 - RNA, 32 nt, Human
cuuagacauucagagggugaaccaccaucccu

SEQ ID NO: 410406 - RNA, 32 nt, Human
cuuagaccacccagacuagucaaguaucuucu

SEQ ID NO: 410407 - RNA, 32 nt, Human
cuuagaccagcuccugaguucucucucuuucu

SEQ ID NO: 410408 - RNA, 32 nt, Human
cuuagaccagcuucccuucccuucuggggcug

SEQ ID NO: 410409 - RNA, 32 nt, Human
cuuagacccgggaggcagagguugcagugagc

SEQ ID NO: 410410 - RNA, 32 nt, Human
cuuagacgggaggcuguguccgugggugugca

SEQ ID NO: 410411 - RNA, 32 nt, Human
cuuagacuugacuucugugaguuuagaccugc

SEQ ID NO: 410412 - RNA, 32 nt, Human
cuuagagauggaauguaacuuugcuuacaaaa

SEQ ID NO: 410413 - RNA, 32 nt, Human
cuuagagaugggcugaaaguuaaguccaccaa

SEQ ID NO: 410414 - RNA, 32 nt, Human
cuuagagcaguuucguuuucucaguuggaugc

SEQ ID NO: 410415 - RNA, 32 nt, Human
cuuagagccugaguugcuccacaggaauccag

SEQ ID NO: 410416 - RNA, 32 nt, Human
cuuagagccugcuauucuuuuagacauaggga

SEQ ID NO: 410417 - RNA, 32 nt, Human
cuuagaggacaguguuggccuuuggagucggg

SEQ ID NO: 410418 - RNA, 32 nt, Human
cuuagaggccagccuuggacacuugcugcccc

SEQ ID NO: 410419 - RNA, 32 nt, Human
cuuagaggcugcagcacuucauuuuucaguua

SEQ ID NO: 410420 - RNA, 32 nt, Human
cuuagagggagcuguguuuuggugaccucuga

SEQ ID NO: 410421 - RNA, 32 nt, Human
cuuagagguaagaaauagaauuauaauguuac

SEQ ID NO: 410422 - RNA, 32 nt, Human
cuuagaggucgaggcaggcggaucacuugagg

SEQ ID NO: 410423 - RNA, 32 nt, Human
cuuagagucugcagcccagagccacaugcaaa

SEQ ID NO: 410424 - RNA, 32 nt, Human
cuuagaguuaaaggagggggugcuggccaaga

SEQ ID NO: 410425 - RNA, 32 nt, Human
cuuagaguugucuaaguugggugcaaauuuuc

SEQ ID NO: 410426 - RNA, 32 nt, Human
cuuagauaguacagugaguugugacccuccaa

SEQ ID NO: 410427 - RNA, 32 nt, Human
cuuagauaugacacuaaaggcauaauucauua

SEQ ID NO: 410428 - RNA, 32 nt, Human
cuuagauauuggcacacacaaggaacaacugu

SEQ ID NO: 410429 - RNA, 32 nt, Human
cuuagaucauagauuggaccugguuuuguuuu

SEQ ID NO: 410430 - RNA, 32 nt, Human
cuuagaucaugccaccaugccacugcacucca

SEQ ID NO: 410431 - RNA, 32 nt, Human
cuuagaugcauucagugggacagcuuugcugg

SEQ ID NO: 410432 - RNA, 32 nt, Human
cuuagauggaaauguaucuuaugaauagagac

SEQ ID NO: 410433 - RNA, 32 nt, Human
cuuagaugugaugauggauguacaacugcgug

SEQ ID NO: 410434 - RNA, 32 nt, Human
cuuagauguuuucuugcuguuccuugucucuu

SEQ ID NO: 410435 - RNA, 32 nt, Human
cuuagauucccaggaacugggaaaugcaguca

SEQ ID NO: 410436 - RNA, 32 nt, Human
cuuagcaaaugugccauuuucacacaacuucu

SEQ ID NO: 410437 - RNA, 32 nt, Human
cuuagcaaccacagagucagugaccucgucug

SEQ ID NO: 410438 - RNA, 32 nt, Human
cuuagcaagucuugccuuaucuauggagcucg

SEQ ID NO: 410439 - RNA, 32 nt, Human
cuuagcaauaaaugcuuuucuaaugccuuuug

SEQ ID NO: 410440 - RNA, 32 nt, Human
cuuagcacaagaaaccagaucuccucucuccu

SEQ ID NO: 410441 - RNA, 32 nt, Human
cuuagcacaucacugcacacacaguauucuga

SEQ ID NO: 410442 - RNA, 32 nt, Human
cuuagcacaugccucgcguucuucccagaaag

SEQ ID NO: 410443 - RNA, 32 nt, Human
cuuagcaccagcugucccaccuccaggguccu

SEQ ID NO: 410444 - RNA, 31 nt, Human
cuuagcacuuagcacugccuaccucaucaug

SEQ ID NO: 410445 - RNA, 31 nt, Human
cuuagcagaaacuucuuuucauucuuccaaa

SEQ ID NO: 410446 - RNA, 32 nt, Human
cuuagcagccaagaacagcaugucacccagaa

SEQ ID NO: 410447 - RNA, 32 nt, Human
cuuagcagccccgcagcuggugcucugccccg

SEQ ID NO: 410448 - RNA, 32 nt, Human
cuuagcaggagcagauuuuucccagaagcugc

SEQ ID NO: 410449 - RNA, 32 nt, Human
cuuagcaggucuaccagccacagucucugcac

SEQ ID NO: 410450 - RNA, 32 nt, Human
cuuagcauugggaagacagagggcaaggaggc

SEQ ID NO: 410451 - RNA, 32 nt, Human
cuuagccaaggccacaucugggaagaguggag

SEQ ID NO: 410452 - RNA, 32 nt, Human
cuuagccaaucaccaccucauugggugaaagu

SEQ ID NO: 410453 - RNA, 32 nt, Human
cuuagccacaugggaggugcucaguaaaggag

SEQ ID NO: 410454 - RNA, 32 nt, Human
cuuagccaccucuacacauucuaggcuuucug

SEQ ID NO: 410455 - RNA, 32 nt, Human
cuuagccacguguauguauucuuuuugaaaaa

SEQ ID NO: 410456 - RNA, 32 nt, Human
cuuagccagcugggacaggagugggugagggg

SEQ ID NO: 410457 - RNA, 32 nt, Human
cuuagccaggaggccgaggucccucaguccuc

SEQ ID NO: 410458 - RNA, 32 nt, Human
cuuagccaguaaucugcccaugaugaucccug

SEQ ID NO: 410459 - RNA, 32 nt, Human
cuuagccaugugaagguggauuggucgccauc

SEQ ID NO: 410460 - RNA, 32 nt, Human
cuuagcccagcucagggguggggaagaggcga

SEQ ID NO: 410461 - RNA, 32 nt, Human
cuuagcccagcugaccccagacccucuccccu

SEQ ID NO: 410462 - RNA, 32 nt, Human
cuuagcccaguggaccuguggcuucucugagg

SEQ ID NO: 410463 - RNA, 32 nt, Human
cuuagccccagggcacucagaaacccgggcgc

SEQ ID NO: 410464 - RNA, 32 nt, Human
cuuagccccucagaacagggagucccaggacc

SEQ ID NO: 410465 - RNA, 18 nt, Human
cuuagcccgccgcugccg

SEQ ID NO: 410466 - RNA, 32 nt, Human
cuuagcccugagccugcacuuccuguucaggu

SEQ ID NO: 410467 - RNA, 32 nt, Human
cuuagcccugcucacccuagaccuaugcgcuu

SEQ ID NO: 410468 - RNA, 32 nt, Human
cuuagcccuuguaauccuagcacuuugggagg

SEQ ID NO: 410469 - RNA, 32 nt, Human
cuuagccguccaggcuagagugcaguagugcg

SEQ ID NO: 410470 - RNA, 32 nt, Human
cuuagccuccacccuccuccugccacccuugu

SEQ ID NO: 410471 - RNA, 20 nt, Human
cuuagccuccccaacuccca

SEQ ID NO: 410472 - RNA, 32 nt, Human
cuuagccuccuaaagugcugggauuauaggca

SEQ ID NO: 410473 - RNA, 32 nt, Human
cuuagccugcacuccaaccuggcaauuuugcc

SEQ ID NO: 410474 - RNA, 32 nt, Human
cuuagccugccuuagccagggcucagagauga

SEQ ID NO: 410475 - RNA, 32 nt, Human
cuuagccugcugcuacccacugcugaaacucc

SEQ ID NO: 410476 - RNA, 32 nt, Human
cuuagccuggaugcccaccccugcugccgcca

SEQ ID NO: 410477 - RNA, 32 nt, Human
cuuagccugggaacuggcaaugggggagacau

SEQ ID NO: 410478 - RNA, 31 nt, Human
cuuagccugggcgacagagcgagaccacauc

SEQ ID NO: 410479 - RNA, 24 nt, Human
cuuagccugggugacagagugaga

SEQ ID NO: 410480 - RNA, 32 nt, Human
cuuagccugggugacagagugagacccuaucu

SEQ ID NO: 410481 - RNA, 32 nt, Human
cuuagccugguggcaguggugagggagugagg

SEQ ID NO: 410482 - RNA, 32 nt, Human
cuuagccugucaggagcagggagcuugcgggg

SEQ ID NO: 410483 - RNA, 32 nt, Human
cuuagcgagaucugguuguuuaaaagugugua

SEQ ID NO: 410484 - RNA, 32 nt, Human
cuuagcgccacacccauuuaaaugcacaagca

SEQ ID NO: 410485 - RNA, 32 nt, Human
cuuagcuaaucagauugaaggaagacaugugu

SEQ ID NO: 410486 - RNA, 32 nt, Human
cuuagcuacugaggcauagggagaggaaguua

SEQ ID NO: 410487 - RNA, 24 nt, Human
cuuagcucaccgcaaccuccaccu

SEQ ID NO: 410488 - RNA, 32 nt, Human
cuuagcucacuacaaccucugccucccagguu

SEQ ID NO: 410489 - RNA, 32 nt, Human
cuuagcucacuacaacuucugccucccaggcu

SEQ ID NO: 410490 - RNA, 32 nt, Human
cuuagcucacugcaacccccgccucccggguu

SEQ ID NO: 410491 - RNA, 32 nt, Human
cuuagcucacugcaaccuccaccucccagguu

SEQ ID NO: 410492 - RNA, 32 nt, Human
cuuagcucacugcaaccuccaccucccggguu

SEQ ID NO: 410493 - RNA, 32 nt, Human
cuuagcucacugcaaccuccgccuccuggguu

SEQ ID NO: 410494 - RNA, 32 nt, Human
cuuagcucacugcaaccucugcuuccuggguu

SEQ ID NO: 410495 - RNA, 32 nt, Human
cuuagcucacugcaagcuccgccucccagguu

SEQ ID NO: 410496 - RNA, 32 nt, Human
cuuagcucacugcagccuccaccucccaggcu

SEQ ID NO: 410497 - RNA, 32 nt, Human
cuuagcucagagaauaugggguccuuacuugu

SEQ ID NO: 410498 - RNA, 32 nt, Human
cuuagcucucugcaaccucugccucccagguu

SEQ ID NO: 410499 - RNA, 32 nt, Human
cuuagcucugcucucuaguggcuguccccaua

SEQ ID NO: 410500 - RNA, 32 nt, Human
cuuagcucuguggguaggaaggggcccuagaa

SEQ ID NO: 410501 - RNA, 16 nt, Human
cuuagcucuucuugga

SEQ ID NO: 410502 - RNA, 32 nt, Human
cuuagcugaaggccacaccaccagcgaagugc

SEQ ID NO: 410503 - RNA, 32 nt, Human
cuuagcugacucuggugcucucuacagguggc

SEQ ID NO: 410504 - RNA, 32 nt, Human
cuuagcugccaucuugcuuuucuuuggacaac

SEQ ID NO: 410505 - RNA, 19 nt, Human
cuuagcuggagugcggugg

SEQ ID NO: 410506 - RNA, 32 nt, Human
cuuagcuggcccguugguuuucugagcagggg

SEQ ID NO: 410507 - RNA, 29 nt, Human
cuuagcuggcugccaugucuccugccugu

SEQ ID NO: 410508 - RNA, 32 nt, Human
cuuagcugggagaaagagagagcuucuguugc

SEQ ID NO: 410509 - RNA, 32 nt, Human
cuuagcugggcuguaaagaugaaggcaucaaa

SEQ ID NO: 410510 - RNA, 18 nt, Human
cuuagcugggugcagugg

SEQ ID NO: 410511 - RNA, 32 nt, Human
cuuagcugggugugguggugugaucuguaguu

SEQ ID NO: 410512 - RNA, 32 nt, Human
cuuagcugguuugggagcuuugcuuuccaagu

SEQ ID NO: 410513 - RNA, 32 nt, Human
cuuagcugugugacugauuauaggcaaguucu

SEQ ID NO: 410514 - RNA, 32 nt, Human
cuuagcuugggugucccugaaagcagagcuug

SEQ ID NO: 410515 - RNA, 32 nt, Human
cuuagcuuucugucugugaaugucuauauagu

SEQ ID NO: 410516 - RNA, 32 nt, Human
cuuagcuuuggcgcccuggacccacuuucucu

SEQ ID NO: 410517 - RNA, 32 nt, Human
cuuagcuuugguacugacaguuuucuuuugcc

SEQ ID NO: 410518 - RNA, 32 nt, Human
cuuagcuuuucugaauucugcaguauuuucua

SEQ ID NO: 410519 - RNA, 32 nt, Human
cuuaggaaacugaauguaacaaaaacccagga

SEQ ID NO: 410520 - RNA, 32 nt, Human
cuuaggaaaggaguuagggucucagugccucc

SEQ ID NO: 410521 - RNA, 32 nt, Human
cuuaggaacuucuucacugaacucaaggagga

SEQ ID NO: 410522 - RNA, 32 nt, Human
cuuaggaagaccgaggugggcagaucacuuga

SEQ ID NO: 410523 - RNA, 32 nt, Human
cuuaggaagcaguccuugagaaggcauguucc

SEQ ID NO: 410524 - RNA, 32 nt, Human
cuuaggaccccgcagggcggguuuccaggccu

SEQ ID NO: 410525 - RNA, 32 nt, Human
cuuaggacccuccgugaacagaugauagaggg

SEQ ID NO: 410526 - RNA, 32 nt, Human
cuuaggacgccaaugaaaaggaagagaaaaua

SEQ ID NO: 410527 - RNA, 32 nt, Human
cuuaggagcucucacaggauguguucagcaua

SEQ ID NO: 410528 - RNA, 32 nt, Human
cuuaggagcuuuucacacauuucuuucaaaug

SEQ ID NO: 410529 - RNA, 32 nt, Human
cuuaggaggggguggccuugaggcagagccgu

SEQ ID NO: 410530 - RNA, 32 nt, Human
cuuaggagggguaaugguggaguuggcaucuu

SEQ ID NO: 410531 - RNA, 24 nt, Human
cuuaggagguugaggcugcaguga

SEQ ID NO: 410532 - RNA, 32 nt, Human
cuuaggagguugaggcugcagugagcugugcu

SEQ ID NO: 410533 - RNA, 32 nt, Human
cuuaggagguugaggcugggaggaucacuuga

SEQ ID NO: 410534 - RNA, 32 nt, Human
cuuaggagucuugggucggaggacggggcuag

SEQ ID NO: 410535 - RNA, 31 nt, Human
cuuaggauauucuaauugcauuuaaaagaac

SEQ ID NO: 410536 - RNA, 32 nt, Human
cuuaggcaacauagcaagaccccaucucaaaa

SEQ ID NO: 410537 - RNA, 32 nt, Human
cuuaggcaccuugcacaggccuucucguuuau

SEQ ID NO: 410538 - RNA, 32 nt, Human
cuuaggcagcaaccuccacauucccacaggcc

SEQ ID NO: 410539 - RNA, 32 nt, Human
cuuaggcaguucagagagaacaauucuaauaa

SEQ ID NO: 410540 - RNA, 32 nt, Human
cuuaggcauagccauaggugaggacuucucua

SEQ ID NO: 410541 - RNA, 32 nt, Human
cuuaggcauucuaagucacaggaugagacagg

SEQ ID NO: 410542 - RNA, 32 nt, Human
cuuaggcauucuaucuuugcucaaauuguuga

SEQ ID NO: 410543 - RNA, 32 nt, Human
cuuaggcauuggggaguuuuagauggacuaau

SEQ ID NO: 410544 - RNA, 32 nt, Human
cuuaggcauuuuccuguguggcggaauaagaa

SEQ ID NO: 410545 - RNA, 32 nt, Human
cuuaggccccugucauucccacccucacucuu

SEQ ID NO: 410546 - RNA, 32 nt, Human
cuuaggccucccaacuucuccccaggccaagu

SEQ ID NO: 410547 - RNA, 32 nt, Human
cuuaggccugcucuuuacuagggaucuuaugu

SEQ ID NO: 410548 - RNA, 32 nt, Human
cuuaggcgccucuuugggaaaggaaaguggau

SEQ ID NO: 410549 - RNA, 32 nt, Human
cuuaggcuaggaauucaagaccagccuggcca

SEQ ID NO: 410550 - RNA, 32 nt, Human
cuuaggcuccacugcccucacaccucuaggcc

SEQ ID NO: 410551 - RNA, 32 nt, Human
cuuaggcugcagcuugccacuccugggcuggg

SEQ ID NO: 410552 - RNA, 32 nt, Human
cuuaggcuggacacuucucucccucauccguu

SEQ ID NO: 410553 - RNA, 20 nt, Human
cuuaggcuggagugcagugg

SEQ ID NO: 410554 - RNA, 32 nt, Human
cuuaggcuggccagacuucagcuguuccuuug

SEQ ID NO: 410555 - RNA, 32 nt, Human
cuuaggcuggggucccugaggguggggcugug

SEQ ID NO: 410556 - RNA, 31 nt, Human
cuuaggcuuauacaucuacauuuaaaagcau

SEQ ID NO: 410557 - RNA, 22 nt, Human
cuuaggcuuccuucucauuucc

SEQ ID NO: 410558 - RNA, 32 nt, Human
cuuaggcuugaaaggugaagagcaggaauucu

SEQ ID NO: 410559 - RNA, 20 nt, Human
cuuaggcuuugauugcugaa

SEQ ID NO: 410560 - RNA, 32 nt, Human
cuuagggaaauguuagguucagaacuaaagug

SEQ ID NO: 410561 - RNA, 32 nt, Human
cuuagggacagaauuaccccagccucuugagc

SEQ ID NO: 410562 - RNA, 32 nt, Human
cuuagggagcuuccccagcccuaaaggcaccg

SEQ ID NO: 410563 - RNA, 32 nt, Human
cuuagggaggcagaguggaggaagugagagga

SEQ ID NO: 410564 - RNA, 32 nt, Human
cuuagggaggccaaggcgggcagaucaccuga

SEQ ID NO: 410565 - RNA, 32 nt, Human
cuuagggaggcuaagauaggaggaucacuuga

SEQ ID NO: 410566 - RNA, 32 nt, Human
cuuagggaggcugagccagguggagccacuug

SEQ ID NO: 410567 - RNA, 32 nt, Human
cuuagggaggcugaggugggcagaucaccuga

SEQ ID NO: 410568 - RNA, 32 nt, Human
cuuagggaggcugggggaaaagguuagauuuu

SEQ ID NO: 410569 - RNA, 32 nt, Human
cuuagggagggagggaggacauggacagggcc

SEQ ID NO: 410570 - RNA, 19 nt, Human
cuuagggauccacaugcca

SEQ ID NO: 410571 - RNA, 32 nt, Human
cuuagggaugguuccuggaaguggacacauuu

SEQ ID NO: 410572 - RNA, 32 nt, Human
cuuagggcacaagccuuagcaaaugauugauu

SEQ ID NO: 410573 - RNA, 32 nt, Human
cuuagggcaguggaugccgccuuugcuucugu

SEQ ID NO: 410574 - RNA, 32 nt, Human
cuuagggcaucaggaacagugcuacuuacugg

SEQ ID NO: 410575 - RNA, 32 nt, Human
cuuagggccagauuccccucucuaguccccuu

SEQ ID NO: 410576 - RNA, 32 nt, Human
cuuagggcccugggugggcaagucugggcccu

SEQ ID NO: 410577 - RNA, 32 nt, Human
cuuagggccugcuguggaggcagcggcggacg

SEQ ID NO: 410578 - RNA, 32 nt, Human
cuuaggggaaaaggaaccaaauuugggauggu

SEQ ID NO: 410579 - RNA, 32 nt, Human
cuuaggggaggaagaauugucauagagggaag

SEQ ID NO: 410580 - RNA, 32 nt, Human
cuuaggggcagaaacaauccguucacuauuua

SEQ ID NO: 410581 - RNA, 32 nt, Human
cuuaggggugaugaggaagugggagcucaggg

SEQ ID NO: 410582 - RNA, 32 nt, Human
cuuagggguuggagguggcagauaaaagagga

SEQ ID NO: 410583 - RNA, 32 nt, Human
cuuaggguaggggaagugugcugaggugggcc

SEQ ID NO: 410584 - RNA, 32 nt, Human
cuuagggucugucuugcauguauuacaaccag

SEQ ID NO: 410585 - RNA, 32 nt, Human
cuuagggugaaaggaaggcagcuuguauugag

SEQ ID NO: 410586 - RNA, 32 nt, Human
cuuaggguggcugaggcaggcagaucaccugg

SEQ ID NO: 410587 - RNA, 32 nt, Human
cuuaggguguccuccccacagagcagauacuu

SEQ ID NO: 410588 - RNA, 32 nt, Human
cuuagguaaagaagagaaagagaaagcaaauu

SEQ ID NO: 410589 - RNA, 25 nt, Human
cuuagguaaggaauggaaccuuucc

SEQ ID NO: 410590 - RNA, 32 nt, Human
cuuagguacaucuucuuuguauccauugggag

SEQ ID NO: 410591 - RNA, 32 nt, Human
cuuagguaggagugaugccacuuuaaaaggag

SEQ ID NO: 410592 - RNA, 31 nt, Human
cuuagguaguuucaggcuuccagcccagccc

SEQ ID NO: 410593 - RNA, 32 nt, Human
cuuaggucacgaguuugagaccagccugacca

SEQ ID NO: 410594 - RNA, 20 nt, Human
cuuaggucaggaguucgaga

SEQ ID NO: 410595 - RNA, 32 nt, Human
cuuaggucaggaguucgagaccagccuggcca

SEQ ID NO: 410596 - RNA, 32 nt, Human
cuuaggucaggaguuugagaccagccugacca

SEQ ID NO: 410597 - RNA, 32 nt, Human
cuuaggucaggaguuugagaccagccuggcca

SEQ ID NO: 410598 - RNA, 32 nt, Human
cuuagguccagccuguucacacugcaccucag

SEQ ID NO: 410599 - RNA, 32 nt, Human
cuuagguccuuugaccgagguccugcaggugg

SEQ ID NO: 410600 - RNA, 32 nt, Human
cuuaggucucacucaaggggugaugacgggag

SEQ ID NO: 410601 - RNA, 32 nt, Human
cuuaggucuccuccucccgaacucuaaaccug

SEQ ID NO: 410602 - RNA, 32 nt, Human
cuuaggucuuccuguggcucccucucuccugg

SEQ ID NO: 410603 - RNA, 32 nt, Human
cuuaggugaguccuuugcaucucugaggcccu

SEQ ID NO: 410604 - RNA, 32 nt, Human
cuuaggugggcggggcuccugagggagcucca

SEQ ID NO: 410605 - RNA, 32 nt, Human
cuuagguguaauaguauuuaagacugaaagaa

SEQ ID NO: 410606 - RNA, 31 nt, Human
cuuagguguggcuucuuuauauuacugaaac

SEQ ID NO: 410607 - RNA, 32 nt, Human
cuuagguucugcucuguuucuuugccagguga

SEQ ID NO: 410608 - RNA, 32 nt, Human
cuuagguugggacuuaggugggccagaggggc

SEQ ID NO: 410609 - RNA, 32 nt, Human
cuuaguaaauugauacauccauuuuucuuaug

SEQ ID NO: 410610 - RNA, 32 nt, Human
cuuaguaauccaagacagcaaagugacauuaa

SEQ ID NO: 410611 - RNA, 32 nt, Human
cuuaguagaaaucucugaaggcagcagccauc

SEQ ID NO: 410612 - RNA, 32 nt, Human
cuuaguagccugggggauguccagagacuagg

SEQ ID NO: 410613 - RNA, 21 nt, Human
cuuaguagcugggauuacagg

SEQ ID NO: 410614 - RNA, 32 nt, Human
cuuaguaggcagggaaagugagggccucaggg

SEQ ID NO: 410615 - RNA, 32 nt, Human
cuuaguaucaacuggcuaacaauggugaccca

SEQ ID NO: 410616 - RNA, 32 nt, Human
cuuagucacaaaccccacauuauuccaguuug

SEQ ID NO: 410617 - RNA, 32 nt, Human
cuuagucacagagagaaauaagaggagguugu

SEQ ID NO: 410618 - RNA, 32 nt, Human
cuuagucacccagacuagaggucaguggcagg

SEQ ID NO: 410619 - RNA, 32 nt, Human
cuuagucaccccuccaugggccuggugcuaag

SEQ ID NO: 410620 - RNA, 32 nt, Human
cuuagucacugcaggcccaggcgggcaggugg

SEQ ID NO: 410621 - RNA, 32 nt, Human
cuuagucaguguuguguccuccacucaggcug

SEQ ID NO: 410622 - RNA, 32 nt, Human
cuuagucauaccauccaucccuggugaaagag

SEQ ID NO: 410623 - RNA, 32 nt, Human
cuuaguccucaagcucccaaccugcugucccu

SEQ ID NO: 410624 - RNA, 32 nt, Human
cuuaguccucaccucuuccuugucuuuuagau

SEQ ID NO: 410625 - RNA, 32 nt, Human
cuuaguccugcuccuuucaauuccauccugua

SEQ ID NO: 410626 - RNA, 32 nt, Human
cuuagucguuggaggcuggagcgcaauggccc

SEQ ID NO: 410627 - RNA, 32 nt, Human
cuuagucuacgagccaggaugacagggacagc

SEQ ID NO: 410628 - RNA, 32 nt, Human
cuuagucucugugcuccaagaggucaaauuuu

SEQ ID NO: 410629 - RNA, 32 nt, Human
cuuagucuucauuuccauucuucugcccauga

SEQ ID NO: 410630 - RNA, 32 nt, Human
cuuagugaaagcagauccuguacuaggaugug

SEQ ID NO: 410631 - RNA, 32 nt, Human
cuuagugagccagggaaccaggcuccagacca

SEQ ID NO: 410632 - RNA, 32 nt, Human
cuuagugccaggagggcacagcaggggagccc

SEQ ID NO: 410633 - RNA, 21 nt, Human
cuuagugccuuacccuguccu

SEQ ID NO: 410634 - RNA, 32 nt, Human
cuuagugcuaacgucaagaccaaaccuguagg

SEQ ID NO: 410635 - RNA, 32 nt, Human
cuuaguggcaggugccuguaaucccagcuacu

SEQ ID NO: 410636 - RNA, 32 nt, Human
cuuaguggcgggcgccuguaaucacagcuacu

SEQ ID NO: 410637 - RNA, 32 nt, Human
cuuagugggaaagugaggcagggucuugcaga

SEQ ID NO: 410638 - RNA, 32 nt, Human
cuuagugggaucauaauagcagucuucuugcu

SEQ ID NO: 410639 - RNA, 32 nt, Human
cuuagugggcacuucacagagggucauucccu

SEQ ID NO: 410640 - RNA, 32 nt, Human
cuuaguguaccaccccugccuugagcuugugg

SEQ ID NO: 410641 - RNA, 32 nt, Human
cuuagugugcaagaaaagccacugggggaaga

SEQ ID NO: 410642 - RNA, 32 nt, Human
cuuaguuaauggaagacugagagcagaacagg

SEQ ID NO: 410643 - RNA, 32 nt, Human
cuuaguucccccaagggccaguagauccuaaa

SEQ ID NO: 410644 - RNA, 32 nt, Human
cuuaguuggagagaggggugugggaggaagcu

SEQ ID NO: 410645 - RNA, 32 nt, Human
cuuaguuggcagggguucaguccaaauggaag

SEQ ID NO: 410646 - RNA, 32 nt, Human
cuuaguuguguuagagucuuccagcaugggac

SEQ ID NO: 410647 - RNA, 32 nt, Human
cuuaguuucacuguuugccagcacagaccuuu

SEQ ID NO: 410648 - RNA, 32 nt, Human
cuuaguuuccacugccuccugugacgugaggc

SEQ ID NO: 410649 - RNA, 32 nt, Human
cuuaguuucucagacuuguugucuauuaucug

SEQ ID NO: 410650 - RNA, 32 nt, Human
cuuaguuucuugggagcaacagcacguaucag

SEQ ID NO: 410651 - RNA, 32 nt, Human
cuuaguuugcucaaaagaguccugguuauucc

SEQ ID NO: 410652 - RNA, 32 nt, Human
cuuaguuuucauuuuauuguucugugucuugu

SEQ ID NO: 410653 - RNA, 32 nt, Human
cuuaguuuucccucucugucuucauaaugagc

SEQ ID NO: 410654 - RNA, 32 nt, Human
cuuauaaaaagagacacaagagcuugcucucu

SEQ ID NO: 410655 - RNA, 32 nt, Human
cuuauaaaaccagcucuggcauaugacuaaaa

SEQ ID NO: 410656 - RNA, 23 nt, Human
cuuauaaaagagacacaccacau

SEQ ID NO: 410657 - RNA, 32 nt, Human
cuuauaaccuaaaagucuccagucuggggcag

SEQ ID NO: 410658 - RNA, 32 nt, Human
cuuauaaccuguguguuuuccacagucccugc

SEQ ID NO: 410659 - RNA, 32 nt, Human
cuuauaacucacuugucuucauucauaauuuu

SEQ ID NO: 410660 - RNA, 32 nt, Human
cuuauaagaagagacauggggccaggugcagu

SEQ ID NO: 410661 - RNA, 32 nt, Human
cuuauaagaagaggaaaagacacaaggaaugu

SEQ ID NO: 410662 - RNA, 32 nt, Human
cuuauaagaagaggagauuaggucacagacau

SEQ ID NO: 410663 - RNA, 32 nt, Human
cuuauaaucccagcuacucugggggccaaggc

SEQ ID NO: 410664 - RNA, 32 nt, Human
cuuauaaucccagcuacuugggaggcugaggc

SEQ ID NO: 410665 - RNA, 32 nt, Human
cuuauaaugccaccuaucccuguaagcuaaac

SEQ ID NO: 410666 - RNA, 32 nt, Human
cuuauacaacagcaaacccugaugugacauuc

SEQ ID NO: 410667 - RNA, 22 nt, Human
cuuauacaagauaccauuuaca

SEQ ID NO: 410668 - RNA, 23 nt, Human
cuuauacacaugguucucucaua

SEQ ID NO: 410669 - RNA, 24 nt, Human
cuuauacaucucaaacucuucucu

SEQ ID NO: 410670 - RNA, 32 nt, Human
cuuauaccaaaaauagaggugcagagauguug

SEQ ID NO: 410671 - RNA, 32 nt, Human
cuuauacccagaggaaaauacacaccugggga

SEQ ID NO: 410672 - RNA, 32 nt, Human
cuuauacccccagccacucaggaggcugaugc

SEQ ID NO: 410673 - RNA, 32 nt, Human
cuuauaccuguaauccuagcacuuugggaggc

SEQ ID NO: 410674 - RNA, 32 nt, Human
cuuauacucccuucauuaaaucuauuaucugg

SEQ ID NO: 410675 - RNA, 32 nt, Human
cuuauacugcaacugugucuccuaggggacag

SEQ ID NO: 410676 - RNA, 32 nt, Human
cuuauacugccacuucuggacugccuuucaac

SEQ ID NO: 410677 - RNA, 32 nt, Human
cuuauacuuaagugaaaaacauggggaagggg

SEQ ID NO: 410678 - RNA, 32 nt, Human
cuuauacuucaguuguucagucagauuggacc

SEQ ID NO: 410679 - RNA, 32 nt, Human
cuuauagagcugcaaaacacacacaugcguau

SEQ ID NO: 410680 - RNA, 32 nt, Human
cuuauagaugaggcaacugagguucagggaua

SEQ ID NO: 410681 - RNA, 32 nt, Human
cuuauaggaauugacccacaagaaaugaaagc

SEQ ID NO: 410682 - RNA, 32 nt, Human
cuuauaggagaggugggcuccacccacaaaaa

SEQ ID NO: 410683 - RNA, 32 nt, Human
cuuauaggauucaagaaauggaaggaugauuc

SEQ ID NO: 410684 - RNA, 32 nt, Human
cuuauaggugaggacuccauccuccuguucca

SEQ ID NO: 410685 - RNA, 32 nt, Human
cuuauagguugauugcccacaggucaaacugu

SEQ ID NO: 410686 - RNA, 32 nt, Human
cuuauagucagcaacagguauccacggggagg

SEQ ID NO: 410687 - RNA, 32 nt, Human
cuuauaguuuucugaucuguguuagaaguguu

SEQ ID NO: 410688 - RNA, 32 nt, Human
cuuauauaaagagacccagagagcuccaucac

SEQ ID NO: 410689 - RNA, 32 nt, Human
cuuauaucauugugucugagggccagauauga

SEQ ID NO: 410690 - RNA, 32 nt, Human
cuuauaugaauaaaugaaauuacaugccaagg

SEQ ID NO: 410691 - RNA, 32 nt, Human
cuuauaugagugaggcucccagcuugggugug

SEQ ID NO: 410692 - RNA, 32 nt, Human
cuuauaugcugccagccucacccuccacaccu

SEQ ID NO: 410693 - RNA, 32 nt, Human
cuuauauuccaguaggagaaaaagcaaaaaua

SEQ ID NO: 410694 - RNA, 32 nt, Human
cuuauauucugaaaguuauucuucucacuggu

SEQ ID NO: 410695 - RNA, 32 nt, Human
cuuauauuugcagggaagaaagagugacgcac

SEQ ID NO: 410696 - RNA, 32 nt, Human
cuuauauuuuauuagaugauuugcuuccuaua

SEQ ID NO: 410697 - RNA, 32 nt, Human
cuuaucaacuuccucuagguguuuccacucca

SEQ ID NO: 410698 - RNA, 32 nt, Human
cuuaucaaggguugaaggaagggagccauccu

SEQ ID NO: 410699 - RNA, 32 nt, Human
cuuaucaaguggguuuguaguaaugagugcug

SEQ ID NO: 410700 - RNA, 32 nt, Human
cuuaucaauagugccaucauccacugcccuga

SEQ ID NO: 410701 - RNA, 32 nt, Human
cuuaucacauaagagagaugagaaagcuuuua

SEQ ID NO: 410702 - RNA, 32 nt, Human
cuuaucacauggucaaguaccuugccaaauaa

SEQ ID NO: 410703 - RNA, 26 nt, Human
cuuaucaccacccuccucuuuucugc

SEQ ID NO: 410704 - RNA, 32 nt, Human
cuuaucaccucuccccagcaagugcuggaccc

SEQ ID NO: 410705 - RNA, 32 nt, Human
cuuaucacgcgauggcauccacuguggaagga

SEQ ID NO: 410706 - RNA, 32 nt, Human
cuuaucacugcaccucuugccaaagugcgguc

SEQ ID NO: 410707 - RNA, 32 nt, Human
cuuaucagccugggcaacacagugagacucca

SEQ ID NO: 410708 - RNA, 32 nt, Human
cuuaucagggcuaguuuaaacaaauguguaua

SEQ ID NO: 410709 - RNA, 32 nt, Human
cuuaucauaugugcagcacaucaugucucagc

SEQ ID NO: 410710 - RNA, 32 nt, Human
cuuaucauugaaggcaggcccaggacagccug

SEQ ID NO: 410711 - RNA, 32 nt, Human
cuuauccaaauacccaaccugugaagaugaga

SEQ ID NO: 410712 - RNA, 32 nt, Human
cuuauccacaaaguacuccucacuuuucaauu

SEQ ID NO: 410713 - RNA, 32 nt, Human
cuuauccaccugcugaaggccuggcccccuga

SEQ ID NO: 410714 - RNA, 32 nt, Human
cuuauccagauagauccaaagcucaugucucu

SEQ ID NO: 410715 - RNA, 32 nt, Human
cuuaucccagcuccaaagacagucuccagacc

SEQ ID NO: 410716 - RNA, 32 nt, Human
cuuaucccccuccaaaaauaagccauugcaca

SEQ ID NO: 410717 - RNA, 32 nt, Human
cuuauccccuuuuccucugucuuccaaaugcg

SEQ ID NO: 410718 - RNA, 32 nt, Human
cuuaucccuugaauuuucaauauuguggaauc

SEQ ID NO: 410719 - RNA, 32 nt, Human
cuuauccguuaaggcuggaggcacaugugggu

SEQ ID NO: 410720 - RNA, 32 nt, Human
cuuauccuccuuccuggcgggggugggccgug

SEQ ID NO: 410721 - RNA, 32 nt, Human
cuuauccugagccaccuccucuccccgcuugc

SEQ ID NO: 410722 - RNA, 32 nt, Human
cuuauccugcaacuaaccauccuugagcccag

SEQ ID NO: 410723 - RNA, 32 nt, Human
cuuauccuguggaggagguggcuuccagcagg

SEQ ID NO: 410724 - RNA, 32 nt, Human
cuuauccuguucucugaagauguuuugugacc

SEQ ID NO: 410725 - RNA, 32 nt, Human
cuuauccuguucucuuauccuuauccccucca

SEQ ID NO: 410726 - RNA, 32 nt, Human
cuuauccuuugguauacucgggggauugguuc

SEQ ID NO: 410727 - RNA, 32 nt, Human
cuuaucgaauuguuuaaaauuggucagugacu

SEQ ID NO: 410728 - RNA, 32 nt, Human
cuuaucgcaaacugcuggagggugaggagauc

SEQ ID NO: 410729 - RNA, 32 nt, Human
cuuaucggaacaagccccuccuccuggggcug

SEQ ID NO: 410730 - RNA, 32 nt, Human
cuuaucuaaacccagcaaaacagauucaaagc

SEQ ID NO: 410731 - RNA, 32 nt, Human
cuuaucuacccaauugcagccaaccaagugag

SEQ ID NO: 410732 - RNA, 32 nt, Human
cuuaucuauggacauuccaaaacauuuaccau

SEQ ID NO: 410733 - RNA, 32 nt, Human
cuuaucuauuccugaaauucuuuuaugugauu

SEQ ID NO: 410734 - RNA, 32 nt, Human
cuuaucucagcuguacaugcucugccugugga

SEQ ID NO: 410735 - RNA, 32 nt, Human
cuuaucucauuucucaacaguucauugcucaa

SEQ ID NO: 410736 - RNA, 32 nt, Human
cuuaucuccaauaaacaucuauguuaaaucca

SEQ ID NO: 410737 - RNA, 32 nt, Human
cuuaucucccugcacauuggaaaugaauuaca

SEQ ID NO: 410738 - RNA, 32 nt, Human
cuuaucuccgcgccucccuuuucacuucugga

SEQ ID NO: 410739 - RNA, 32 nt, Human
cuuaucucucucuguggcgauggcuaugcuuc

SEQ ID NO: 410740 - RNA, 32 nt, Human
cuuaucucugccuccuuccuccuccuucccag

SEQ ID NO: 410741 - RNA, 32 nt, Human
cuuaucugaaaggacucaagucuuccacugca

SEQ ID NO: 410742 - RNA, 31 nt, Human
cuuaucugacuucucauuuuguaucagaggc

SEQ ID NO: 410743 - RNA, 32 nt, Human
cuuaucugcaucugcugaccucaaccuugacu

SEQ ID NO: 410744 - RNA, 19 nt, Human
cuuaucugcccaucccucu

SEQ ID NO: 410745 - RNA, 32 nt, Human
cuuaucuggaggaggaagagaagcaggagaga

SEQ ID NO: 410746 - RNA, 32 nt, Human
cuuaucuggcugcuuuagcuccagugcuacaa

SEQ ID NO: 410747 - RNA, 32 nt, Human
cuuaucuggcugugcuuuucacuuugggacaa

SEQ ID NO: 410748 - RNA, 32 nt, Human
cuuaucugggcccaaccucuccuuaauaacca

SEQ ID NO: 410749 - RNA, 32 nt, Human
cuuaucugggccuucucacucagggacucucu

SEQ ID NO: 410750 - RNA, 25 nt, Human
cuuaucuggugcauucuccccaccc

SEQ ID NO: 410751 - RNA, 21 nt, Human
cuuaucuguauuuucacuuua

SEQ ID NO: 410752 - RNA, 32 nt, Human
cuuaucugucacugaaaacuuggugaaauuuu

SEQ ID NO: 410753 - RNA, 32 nt, Human
cuuaucugugaugaaguggccugggagcacca

SEQ ID NO: 410754 - RNA, 32 nt, Human
cuuaucuguuuccccuuccuugucagcaucgg

SEQ ID NO: 410755 - RNA, 32 nt, Human
cuuaugaacagcuucagaauucuguagggggu

SEQ ID NO: 410756 - RNA, 32 nt, Human
cuuaugaccagugagaacucucucccuggucu

SEQ ID NO: 410757 - RNA, 32 nt, Human
cuuaugacuccccuccccaacccccucaucua

SEQ ID NO: 410758 - RNA, 32 nt, Human
cuuaugcaaguuggggccaggauaggggaggg

SEQ ID NO: 410759 - RNA, 18 nt, Human
cuuaugcaauaagauaaa

SEQ ID NO: 410760 - RNA, 32 nt, Human
cuuaugcacaauaagcucauuagauucuaguu

SEQ ID NO: 410761 - RNA, 32 nt, Human
cuuaugcacagaacuuguaccauuugaaucug

SEQ ID NO: 410762 - RNA, 32 nt, Human
cuuaugcacaggcuuguguuggggaacuaagg

SEQ ID NO: 410763 - RNA, 32 nt, Human
cuuaugccaucccggcagcgaggcugggcugg

SEQ ID NO: 410764 - RNA, 32 nt, Human
cuuaugccauuuucuacacugugcuucaugag

SEQ ID NO: 410765 - RNA, 32 nt, Human
cuuaugcccacgcuggagugcagugagccgag

SEQ ID NO: 410766 - RNA, 32 nt, Human
cuuaugcccccaccccucccucaacaauauga

SEQ ID NO: 410767 - RNA, 32 nt, Human
cuuaugccuaggagguugaggcugcagugagc

SEQ ID NO: 410768 - RNA, 32 nt, Human
cuuaugccuauaauccuagcacuuugggaggc

SEQ ID NO: 410769 - RNA, 32 nt, Human
cuuaugccuauaauccuagcacuuugggaggu

SEQ ID NO: 410770 - RNA, 18 nt, Human
cuuaugccuguaauccca

SEQ ID NO: 410771 - RNA, 32 nt, Human
cuuaugccuguaaucccacuuugggaggccaa

SEQ ID NO: 410772 - RNA, 32 nt, Human
cuuaugccuguaaucccagcacucugggaggc

SEQ ID NO: 410773 - RNA, 32 nt, Human
cuuaugccuguaaucccagcacuuggggaagc

SEQ ID NO: 410774 - RNA, 32 nt, Human
cuuaugccuguaaucccagcacuuugcaggcc

SEQ ID NO: 410775 - RNA, 32 nt, Human
cuuaugccuguaaucccagcacuuuggaaggc

SEQ ID NO: 410776 - RNA, 32 nt, Human
cuuaugccuguaaucccagcacuuugggaggc

SEQ ID NO: 410777 - RNA, 32 nt, Human
cuuaugccuguaaucccagcacuuugggugac

SEQ ID NO: 410778 - RNA, 32 nt, Human
cuuaugccuguaaucccagcaugcugggaggc

SEQ ID NO: 410779 - RNA, 32 nt, Human
cuuaugccuguaaucccgguacuuugggaggc

SEQ ID NO: 410780 - RNA, 32 nt, Human
cuuaugccuguaaucccugcacuuugggaagc

SEQ ID NO: 410781 - RNA, 32 nt, Human
cuuaugccuguaauccuagaacuuugggaggc

SEQ ID NO: 410782 - RNA, 32 nt, Human
cuuaugccuguaauccuagcgcuuugggaggc

SEQ ID NO: 410783 - RNA, 28 nt, Human
cuuaugccugugucugccccaaauggag

SEQ ID NO: 410784 - RNA, 32 nt, Human
cuuaugcugagauguugaacuuaaacuuuaug

SEQ ID NO: 410785 - RNA, 32 nt, Human
cuuaugcuuguaaucccaacacuuagggaguc

SEQ ID NO: 410786 - RNA, 32 nt, Human
cuuaugcuuguaaucccagaacuuugggaauc

SEQ ID NO: 410787 - RNA, 32 nt, Human
cuuaugcuuguaaucccagcacuuugggaggc

SEQ ID NO: 410788 - RNA, 32 nt, Human
cuuauggaaaaauacacacgcaauagcuagga

SEQ ID NO: 410789 - RNA, 32 nt, Human
cuuauggacucugccuugcuuugcuuauguuu

SEQ ID NO: 410790 - RNA, 32 nt, Human
cuuauggacugagaaagggagaacaugguagg

SEQ ID NO: 410791 - RNA, 32 nt, Human
cuuauggagccccucccauggagcucucuucc

SEQ ID NO: 410792 - RNA, 32 nt, Human
cuuauggagccuggauuuuucccacugcucua

SEQ ID NO: 410793 - RNA, 32 nt, Human
cuuaugggagucuuguauaucuuccaggcaug

SEQ ID NO: 410794 - RNA, 32 nt, Human
cuuaugguagauggcuuccuggaaucaaaaug

SEQ ID NO: 410795 - RNA, 32 nt, Human
cuuaugguagcagauuggggaaaaugaagcag

SEQ ID NO: 410796 - RNA, 32 nt, Human
cuuaugguuguaggauucagggguuaauggaa

SEQ ID NO: 410797 - RNA, 32 nt, Human
cuuauguaaccugucuggugaguuuguuugga

SEQ ID NO: 410798 - RNA, 32 nt, Human
cuuauguagacagugagggcucagggaggcuc

SEQ ID NO: 410799 - RNA, 32 nt, Human
cuuauguagggagggggcaaguaugaaguaag

SEQ ID NO: 410800 - RNA, 32 nt, Human
cuuaugucuaaaacaguggugaugaguaaggc

SEQ ID NO: 410801 - RNA, 32 nt, Human
cuuaugucuguaaucccagcacuuuugagagg

SEQ ID NO: 410802 - RNA, 32 nt, Human
cuuaugugaccccugagggguggggcugugag

SEQ ID NO: 410803 - RNA, 32 nt, Human
cuuaugugccucccccaggcucccugcuuucu

SEQ ID NO: 410804 - RNA, 32 nt, Human
cuuauguguguucugagccucaaaacccccuu

SEQ ID NO: 410805 - RNA, 32 nt, Human
cuuauguuaugcuuuaaucauaaguggaaugg

SEQ ID NO: 410806 - RNA, 32 nt, Human
cuuauguuuaggcacagcuauuuauaggggaa

SEQ ID NO: 410807 - RNA, 32 nt, Human
cuuauguuuugucaccuugcugagcuugcuua

SEQ ID NO: 410808 - RNA, 32 nt, Human
cuuauuaaaauggaaauccuggagaauaguag

SEQ ID NO: 410809 - RNA, 31 nt, Human
cuuauuaaacaaugccauuucuugaccacuu

SEQ ID NO: 410810 - RNA, 32 nt, Human
cuuauuaaggcccacuguuuuacuggggccca

SEQ ID NO: 410811 - RNA, 32 nt, Human
cuuauuaauaaaacacacaaugccuagcuggg

SEQ ID NO: 410812 - RNA, 32 nt, Human
cuuauuacaauaaaauuaguggcacuuuauuc

SEQ ID NO: 410813 - RNA, 32 nt, Human
cuuauuacaucuuuauugugcagacccucucc

SEQ ID NO: 410814 - RNA, 32 nt, Human
cuuauuacccugacaaauaguuuuagacagau

SEQ ID NO: 410815 - RNA, 32 nt, Human
cuuauuagcacugcaaaagcuccugagaauuu

SEQ ID NO: 410816 - RNA, 32 nt, Human
cuuauuagucugugucagauucugagcaauca

SEQ ID NO: 410817 - RNA, 32 nt, Human
cuuauucaaagacuagguuauuuucaacuggg

SEQ ID NO: 410818 - RNA, 32 nt, Human
cuuauucaagcacauacugcauuuuucuuagu

SEQ ID NO: 410819 - RNA, 32 nt, Human
cuuauucagcagcagaguuggugacuuugaca

SEQ ID NO: 410820 - RNA, 32 nt, Human
cuuauucaugcuuucuccuuuuucuaccuuuu

SEQ ID NO: 410821 - RNA, 32 nt, Human
cuuauuccaaaauuaaauggcagcagcagagg

SEQ ID NO: 410822 - RNA, 28 nt, Human
cuuauuccaagugcauuuuucuuauuua

SEQ ID NO: 410823 - RNA, 32 nt, Human
cuuauuccacuucgguagaggauuucuaguuu

SEQ ID NO: 410824 - RNA, 32 nt, Human
cuuauucccaggcuggagugcaaugucgugau

SEQ ID NO: 410825 - RNA, 32 nt, Human
cuuauucccugaggcucccuugacucaggacu

SEQ ID NO: 410826 - RNA, 32 nt, Human
cuuauuccuuaaauuccacucuuuuaacacua

SEQ ID NO: 410827 - RNA, 21 nt, Human
cuuauuccuucucugccucca

SEQ ID NO: 410828 - RNA, 26 nt, Human
cuuauucuauugacagacauggugua

SEQ ID NO: 410829 - RNA, 32 nt, Human
cuuauucucccauuaggcagcugaggaccgag

SEQ ID NO: 410830 - RNA, 32 nt, Human
cuuauucucccauugggcagcugaggaccgag

SEQ ID NO: 410831 - RNA, 32 nt, Human
cuuauucuguaacgguuuguggccaaguuuug

SEQ ID NO: 410832 - RNA, 32 nt, Human
cuuauucugucuggccucgcuuuccuuuugcc

SEQ ID NO: 410833 - RNA, 32 nt, Human
cuuauucuguuaauguaaacuuuugaagaucu

SEQ ID NO: 410834 - RNA, 32 nt, Human
cuuauucuugcagcccaauauggagaugcaga

SEQ ID NO: 410835 - RNA, 32 nt, Human
cuuauugaauacaagcccugaucuuccaucuc

SEQ ID NO: 410836 - RNA, 32 nt, Human
cuuauugaggcccuguaccuucugcugugugu

SEQ ID NO: 410837 - RNA, 31 nt, Human
cuuauugaguaaccuguuuccuacggaaugu

SEQ ID NO: 410838 - RNA, 32 nt, Human
cuuauugauaaauaucugaaacagaaggccaa

SEQ ID NO: 410839 - RNA, 32 nt, Human
cuuauugccaggugaugcugccucucugugga

SEQ ID NO: 410840 - RNA, 32 nt, Human
cuuauugcccaggcuggagugcagugacgagg

SEQ ID NO: 410841 - RNA, 32 nt, Human
cuuauugcccaggcuggagugcaguggcacaa

SEQ ID NO: 410842 - RNA, 32 nt, Human
cuuauugcccaggcuggagugcaguggcguga

SEQ ID NO: 410843 - RNA, 32 nt, Human
cuuauugcugugcucugggcuugggggcggcu

SEQ ID NO: 410844 - RNA, 32 nt, Human
cuuauuggaacaaccacugagcuacggagagc

SEQ ID NO: 410845 - RNA, 32 nt, Human
cuuauuggauuccucucugucuucuuggaguu

SEQ ID NO: 410846 - RNA, 32 nt, Human
cuuauugggccuugccucaggaguuccucugu

SEQ ID NO: 410847 - RNA, 32 nt, Human
cuuauugggccuugccucaggaguugcugguu

SEQ ID NO: 410848 - RNA, 32 nt, Human
cuuauugguagagggcucugaagagccaaaac

SEQ ID NO: 410849 - RNA, 32 nt, Human
cuuauuggugagagagaaaauccgugcauugu

SEQ ID NO: 410850 - RNA, 32 nt, Human
cuuauugguuugccauccuuguucauuacaac

SEQ ID NO: 410851 - RNA, 32 nt, Human
cuuauuguacauguuggaaccaggacaugaga

SEQ ID NO: 410852 - RNA, 32 nt, Human
cuuauugucacacuguguauguuuucagcauu

SEQ ID NO: 410853 - RNA, 32 nt, Human
cuuauuguucugacauuauguaaaggugguau

SEQ ID NO: 410854 - RNA, 18 nt, Human
cuuauuuaaacucuguug

SEQ ID NO: 410855 - RNA, 32 nt, Human
cuuauuuaagagacgcuggagaucucugagga

SEQ ID NO: 410856 - RNA, 32 nt, Human
cuuauuuaagcuucguaccacugcuaucuccc

SEQ ID NO: 410857 - RNA, 32 nt, Human
cuuauuuacaaacccugugaguucuuuuugua

SEQ ID NO: 410858 - RNA, 32 nt, Human
cuuauuuacuaaaaauacaaaaacuuagccgg

SEQ ID NO: 410859 - RNA, 20 nt, Human
cuuauuuauuccuuccagca

SEQ ID NO: 410860 - RNA, 24 nt, Human
cuuauuuauucuacauccuuggca

SEQ ID NO: 410861 - RNA, 32 nt, Human
cuuauuuauugggaugugagccccagggggcc

SEQ ID NO: 410862 - RNA, 32 nt, Human
cuuauuucaaaaagauuucuuauuaccgacua

SEQ ID NO: 410863 - RNA, 32 nt, Human
cuuauuucacagguuauacagcagagcggguu

SEQ ID NO: 410864 - RNA, 22 nt, Human
cuuauuuccaccccccaccccc

SEQ ID NO: 410865 - RNA, 32 nt, Human
cuuauuuccauagccagucaaggauucuaacg

SEQ ID NO: 410866 - RNA, 32 nt, Human
cuuauuuccuucagaaugauccccauccccca

SEQ ID NO: 410867 - RNA, 24 nt, Human
cuuauuucuuuuuuaaggggaaaa

SEQ ID NO: 410868 - RNA, 32 nt, Human
cuuauuugaaggccagcccacacccagcuacu

SEQ ID NO: 410869 - RNA, 32 nt, Human
cuuauuugagauacaugauucucuuagaaucc

SEQ ID NO: 410870 - RNA, 32 nt, Human
cuuauuugcucacacgggguauuuuaggcagg

SEQ ID NO: 410871 - RNA, 32 nt, Human
cuuauuugcucucaggcuuugguuuacaauga

SEQ ID NO: 410872 - RNA, 32 nt, Human
cuuauuuggaaauuguggcugcagagaagaag

SEQ ID NO: 410873 - RNA, 23 nt, Human
cuuauuuggccuucaucuuggca

SEQ ID NO: 410874 - RNA, 32 nt, Human
cuuauuuggggauuuuucuucuagaaaucaaa

SEQ ID NO: 410875 - RNA, 24 nt, Human
cuuauuuguuuagauccuuuugua

SEQ ID NO: 410876 - RNA, 32 nt, Human
cuuauuuuaaaccaaauuuuaauuucuguguc

SEQ ID NO: 410877 - RNA, 32 nt, Human
cuuauuuuaguauacguauaaauaucaguauu

SEQ ID NO: 410878 - RNA, 24 nt, Human
cuuauuuuauuuuauuuucuucaa

SEQ ID NO: 410879 - RNA, 32 nt, Human
cuuauuuuccuccuccuccuuggccuacucaa

SEQ ID NO: 410880 - RNA, 32 nt, Human
cuuauuuugaacaaugcagacaguacuugcca

SEQ ID NO: 410881 - RNA, 32 nt, Human
cuuauuuugcauucucaaugguguuuuuaagg

SEQ ID NO: 410882 - RNA, 32 nt, Human
cuuauuuuuccugucucugucuuccaaccccc

SEQ ID NO: 410883 - RNA, 32 nt, Human
cuucaaaaauaagcccuguagcucuuuacggu

SEQ ID NO: 410884 - RNA, 32 nt, Human
cuucaaacacaacugcuacaacauucuaauaa

SEQ ID NO: 410885 - RNA, 32 nt, Human
cuucaaacaugcccucaggcuuggggaugccc

SEQ ID NO: 410886 - RNA, 32 nt, Human
cuucaaaccagacucugugcugcuucugcuuu

SEQ ID NO: 410887 - RNA, 32 nt, Human
cuucaaacccacccccuuuccuuccagccuuu

SEQ ID NO: 410888 - RNA, 32 nt, Human
cuucaaacuggcgaugucaaggguuccaaguc

SEQ ID NO: 410889 - RNA, 32 nt, Human
cuucaaagccaagguacagggugauaacuugu

SEQ ID NO: 410890 - RNA, 32 nt, Human
cuucaaagccagccugagccacauagugagac

SEQ ID NO: 410891 - RNA, 32 nt, Human
cuucaaagccauugaacccacagagcuguguu

SEQ ID NO: 410892 - RNA, 32 nt, Human
cuucaaaggaagagcaauggcugcagcagcag

SEQ ID NO: 410893 - RNA, 32 nt, Human
cuucaaaggauuuuggaaaagaaacaauaugc

SEQ ID NO: 410894 - RNA, 32 nt, Human
cuucaaaggcagaauuuagagagauugaggau

SEQ ID NO: 410895 - RNA, 32 nt, Human
cuucaaagucaaggucccuugaucccaaaagu

SEQ ID NO: 410896 - RNA, 32 nt, Human
cuucaaagucuuuuuccuucucuccuuccuau

SEQ ID NO: 410897 - RNA, 24 nt, Human
cuucaaagugguucaucuuggucu

SEQ ID NO: 410898 - RNA, 32 nt, Human
cuucaaaguugaguuuucaucuuugacuccaa

SEQ ID NO: 410899 - RNA, 32 nt, Human
cuucaaauaaaucagcuucucuccaagauaaa

SEQ ID NO: 410900 - RNA, 32 nt, Human
cuucaaauauccauauuaaccacuauuuuuca

SEQ ID NO: 410901 - RNA, 23 nt, Human
cuucaaauccaccucguccuucc

SEQ ID NO: 410902 - RNA, 32 nt, Human
cuucaaaugagaucugacagugccccacugcc

SEQ ID NO: 410903 - RNA, 32 nt, Human
cuucaaaugcugugcagccaucuugccucaac

SEQ ID NO: 410904 - RNA, 32 nt, Human
cuucaaauuauugaccuggacaggguccaagu

SEQ ID NO: 410905 - RNA, 32 nt, Human
cuucaaauuggcuauuccucuugcaaaugaac

SEQ ID NO: 410906 - RNA, 32 nt, Human
cuucaacacagcaagcccaaugcacccagcua

SEQ ID NO: 410907 - RNA, 32 nt, Human
cuucaacacagcuggauccucuguguggcagc

SEQ ID NO: 410908 - RNA, 32 nt, Human
cuucaacacuccccucuccaggucacacccuc

SEQ ID NO: 410909 - RNA, 27 nt, Human
cuucaacagcccccuucucuccuuuuu

SEQ ID NO: 410910 - RNA, 32 nt, Human
cuucaacaguggccugaugacacuccugucuu

SEQ ID NO: 410911 - RNA, 32 nt, Human
cuucaaccagggaggcagagguugcagugagc

SEQ ID NO: 410912 - RNA, 32 nt, Human
cuucaacccacuggagucagcaggcccagugc

SEQ ID NO: 410913 - RNA, 32 nt, Human
cuucaacccaggaggcagaggcuacagugagc

SEQ ID NO: 410914 - RNA, 32 nt, Human
cuucaacccauggagaacaagccucaacuaac

SEQ ID NO: 410915 - RNA, 32 nt, Human
cuucaaccucggaggcggagguugcagugagc

SEQ ID NO: 410916 - RNA, 32 nt, Human
cuucaaccugcccuugaaccggggucuggagc

SEQ ID NO: 410917 - RNA, 32 nt, Human
cuucaaccugggagauggagguugcagugagc

SEQ ID NO: 410918 - RNA, 32 nt, Human
cuucaaccugggaggcagagguugcagugagc

SEQ ID NO: 410919 - RNA, 32 nt, Human
cuucaaccugggagguagagguugcagugagc

SEQ ID NO: 410920 - RNA, 32 nt, Human
cuucaaccugggagguugaggcugcagugagc

SEQ ID NO: 410921 - RNA, 32 nt, Human
cuucaacgugagaaggaaaggggccagggguc

SEQ ID NO: 410922 - RNA, 32 nt, Human
cuucaacucccaucuuuccccaagaagucaga

SEQ ID NO: 410923 - RNA, 19 nt, Human
cuucaacuccugggcucaa

SEQ ID NO: 410924 - RNA, 32 nt, Human
cuucaacuccuugguccccuguugucuggguc

SEQ ID NO: 410925 - RNA, 28 nt, Human
cuucaacugagugcugcacaucaugggc

SEQ ID NO: 410926 - RNA, 32 nt, Human
cuucaagaaagcuuccgagguaagaauuuuau

SEQ ID NO: 410927 - RNA, 32 nt, Human
cuucaagaaucagaagaaagccaaggugcugg

SEQ ID NO: 410928 - RNA, 32 nt, Human
cuucaagaaucgaguuacccaccagaacccua

SEQ ID NO: 410929 - RNA, 32 nt, Human
cuucaagaccagccuaggcaacauggugaaac

SEQ ID NO: 410930 - RNA, 32 nt, Human
cuucaagaccagccuggccaacauggugaaac

SEQ ID NO: 410931 - RNA, 32 nt, Human
cuucaagaccuucacugcucugccucagugga

SEQ ID NO: 410932 - RNA, 32 nt, Human
cuucaagagaaagaccagaagagaaggcaaaa

SEQ ID NO: 410933 - RNA, 32 nt, Human
cuucaagagaacacacucagugcuuguuuuua

SEQ ID NO: 410934 - RNA, 32 nt, Human
cuucaagaucauaccacuggacuaagaacuuu

SEQ ID NO: 410935 - RNA, 32 nt, Human
cuucaagaucuggugaaaacacuaucucuugc

SEQ ID NO: 410936 - RNA, 32 nt, Human
cuucaagaugccucuucuaccucuuccaggaa

SEQ ID NO: 410937 - RNA, 32 nt, Human
cuucaagcaaagguccaaaaagacuggagaaa

SEQ ID NO: 410938 - RNA, 32 nt, Human
cuucaagcaagaaaauaagcaguguuguacuu

SEQ ID NO: 410939 - RNA, 32 nt, Human
cuucaagcacaauaaucaucacagacuugagu

SEQ ID NO: 410940 - RNA, 32 nt, Human
cuucaagcauuuucauucugugauuuauauca

SEQ ID NO: 410941 - RNA, 32 nt, Human
cuucaagccuccaaagaccagagggaaggguc

SEQ ID NO: 410942 - RNA, 32 nt, Human
cuucaagcucacugauauuuuccucugcuuga

SEQ ID NO: 410943 - RNA, 32 nt, Human
cuucaagcuggcgggagcaaugguucacauaa

SEQ ID NO: 410944 - RNA, 32 nt, Human
cuucaagcuguacauagggccucccagugcaa

SEQ ID NO: 410945 - RNA, 32 nt, Human
cuucaaggaagacucuacaagcuuuuguucac

SEQ ID NO: 410946 - RNA, 32 nt, Human
cuucaaggacaaacacuggcuggagaaagcca

SEQ ID NO: 410947 - RNA, 32 nt, Human
cuucaaggaggacugaguucucaggggagaac

SEQ ID NO: 410948 - RNA, 21 nt, Human
cuucaagggcagcaagaacga

SEQ ID NO: 410949 - RNA, 32 nt, Human
cuucaagggcaggaagaaggcaggauuaugca

SEQ ID NO: 410950 - RNA, 32 nt, Human
cuucaaggggccugggcugcugcucacgggua

SEQ ID NO: 410951 - RNA, 32 nt, Human
cuucaaggguuccuguggaucucaggaaggca

SEQ ID NO: 410952 - RNA, 32 nt, Human
cuucaagguugucuagagaaguuugccaugug

SEQ ID NO: 410953 - RNA, 32 nt, Human
cuucaaguaaucuagaagaauguggauacucu

SEQ ID NO: 410954 - RNA, 32 nt, Human
cuucaaguagagauucauucuuugagguugaa

SEQ ID NO: 410955 - RNA, 32 nt, Human
cuucaaguauuuuucuauaaucacuuuccccu

SEQ ID NO: 410956 - RNA, 19 nt, Human
cuucuugaagaucuucaga

SEQ ID NO: 410957 - RNA, 32 nt, Human
cuucuugacauccaccaagauaccagacauuu

SEQ ID NO: 410958 - RNA, 32 nt, Human
cuucuugagaaaaagacugcagaaaggagagg

SEQ ID NO: 410959 - RNA, 32 nt, Human
cuucuugagacaccugcugaccucuagccgga

SEQ ID NO: 410960 - RNA, 32 nt, Human
cuucuugagaccugcuuguccaccccaacaug

SEQ ID NO: 410961 - RNA, 32 nt, Human
cuucuugagcuugaggagcuccugggugcaaa

SEQ ID NO: 410962 - RNA, 32 nt, Human
cuucuugauuguaccacugaagguccaggaca

SEQ ID NO: 410963 - RNA, 32 nt, Human
cuucuugcacacccaccucucccugcaccugg

SEQ ID NO: 410964 - RNA, 32 nt, Human
cuucuugccacaucuucucagaagacuuucag

SEQ ID NO: 410965 - RNA, 32 nt, Human
cuucuugccaccugcaaccccaaucucaaucc

SEQ ID NO: 410966 - RNA, 32 nt, Human
cuucuugccaggacauaaaaugauacccuccu

SEQ ID NO: 410967 - RNA, 32 nt, Human
cuucuugccgaccuugaagcagaguugacguu

SEQ ID NO: 410968 - RNA, 32 nt, Human
cuucuugccguuggccuuucugacucuggaau

SEQ ID NO: 410969 - RNA, 32 nt, Human
cuucuugccucaccauuccccuaggcaggccc

SEQ ID NO: 410970 - RNA, 32 nt, Human
cuucuugccugggugcuggccugcccucuccg

SEQ ID NO: 410971 - RNA, 19 nt, Human
cuucuugccuucacuuucc

SEQ ID NO: 410972 - RNA, 32 nt, Human
cuucuugcgcuagucaagguccccgccuggag

SEQ ID NO: 410973 - RNA, 32 nt, Human
cuucuugcggcugaggagaggagcaguucagu

SEQ ID NO: 410974 - RNA, 32 nt, Human
cuucuugcguugauacuuugccccagaaaggc

SEQ ID NO: 410975 - RNA, 32 nt, Human
cuucuugcucaggcuccugaaggguugauucu

SEQ ID NO: 410976 - RNA, 32 nt, Human
cuucuugcuuauuuaaacugugcaagguaaaa

SEQ ID NO: 410977 - RNA, 32 nt, Human
cuucuugcuuugcagacugccugcagccauga

SEQ ID NO: 410978 - RNA, 32 nt, Human
cuucuuggaaggcagggcuggacacugaugga

SEQ ID NO: 410979 - RNA, 32 nt, Human
cuucuuggauguucuuggguuuggaaauaagu

SEQ ID NO: 410980 - RNA, 32 nt, Human
cuucuuggcaaaaauuaaaacaacaacaacaa

SEQ ID NO: 410981 - RNA, 32 nt, Human
cuucuuggcaugccauuguggagggcuuggcc

SEQ ID NO: 410982 - RNA, 22 nt, Human
cuucuuggcccuggcaggcagc

SEQ ID NO: 410983 - RNA, 32 nt, Human
cuucuuggcccuggcccugugcugcccgggca

SEQ ID NO: 410984 - RNA, 24 nt, Human
cuucuuggccucccaacucuuccc

SEQ ID NO: 410985 - RNA, 20 nt, Human
cuucuuggcucggcggcgcu

SEQ ID NO: 410986 - RNA, 16 nt, Human
cuucuugggacaggaa

SEQ ID NO: 410987 - RNA, 32 nt, Human
cuucuugggaggcugaggcaggauugcuugag

SEQ ID NO: 410988 - RNA, 32 nt, Human
cuucuugggaggcugaggugggaggauugcuu

SEQ ID NO: 410989 - RNA, 32 nt, Human
cuucuugggcuggggcguccaucuccuccugc

SEQ ID NO: 410990 - RNA, 32 nt, Human
cuucuuggggaccuugaacacuggagggucau

SEQ ID NO: 410991 - RNA, 20 nt, Human
cuucuuggggcgcagaggcu

SEQ ID NO: 410992 - RNA, 32 nt, Human
cuucuuggggcugcuccgccuccugaccagcc

SEQ ID NO: 410993 - RNA, 32 nt, Human
cuucuugggugaguugcaaguuaaaauuacca

SEQ ID NO: 410994 - RNA, 32 nt, Human
cuucuuggucaccaccucucccaccuuuugug

SEQ ID NO: 410995 - RNA, 32 nt, Human
cuucuuggucacugcacuucauagcccggcau

SEQ ID NO: 410996 - RNA, 32 nt, Human
cuucuuggucucacacuugggacucaaaaaug

SEQ ID NO: 410997 - RNA, 32 nt, Human
cuucuuggucuucuccuucugggccucauggc

SEQ ID NO: 410998 - RNA, 32 nt, Human
cuucuuggugugggaggcagaggugcugacgu

SEQ ID NO: 410999 - RNA, 32 nt, Human
cuucuugguucagagaugcuguaggaguugaa

SEQ ID NO: 411000 - RNA, 32 nt, Human
cuucuugucaacacccucuuaagcagcaccag

SEQ ID NO: 411001 - RNA, 32 nt, Human
cuucuugucaugugagugugguugugaaugau

SEQ ID NO: 411002 - RNA, 32 nt, Human
cuucuuguccuuccucuucucagugcaggagg

SEQ ID NO: 411003 - RNA, 32 nt, Human
cuucuuguguucccgugucugucugucuugca

SEQ ID NO: 411004 - RNA, 32 nt, Human
cuucuuguucgggggugggaaguggccaccgu

SEQ ID NO: 411005 - RNA, 32 nt, Human
cuucuuuaccccucacaauccuugccacagug

SEQ ID NO: 411006 - RNA, 32 nt, Human
cuucuuuacugcuuuuucaucaagugaauauu

SEQ ID NO: 411007 - RNA, 32 nt, Human
cuucuuuaguaaauguuaauuuguuucaaagu

SEQ ID NO: 411008 - RNA, 32 nt, Human
cuucuuuagugccaguccuugugguugaauaa

SEQ ID NO: 411009 - RNA, 32 nt, Human
cuucuuuauuccagcuccuauguucuguguau

SEQ ID NO: 411010 - RNA, 32 nt, Human
cuucuuucaccucccuuauuucuuugcuucuu

SEQ ID NO: 411011 - RNA, 32 nt, Human
cuucuuucacuaacuucuggacuuuccagcuc

SEQ ID NO: 411012 - RNA, 32 nt, Human
cuucuuucauuucugagcccaucuucuguacu

SEQ ID NO: 411013 - RNA, 32 nt, Human
cuucuuucauuucuucuacaacucauacacuc

SEQ ID NO: 411014 - RNA, 32 nt, Human
cuucuuuccacucagggcagauucuggggucu

SEQ ID NO: 411015 - RNA, 32 nt, Human
cuucuuuccagcccuucuccugugugccugcc

SEQ ID NO: 411016 - RNA, 32 nt, Human
cuucuuuccucccucccuuuccugguagccuc

SEQ ID NO: 411017 - RNA, 32 nt, Human
cuucuuuccugccucugauuccgggcugucau

SEQ ID NO: 411018 - RNA, 32 nt, Human
cuucuuucguuuccucgucaaacaucugauug

SEQ ID NO: 411019 - RNA, 20 nt, Human
cuucuuucucaauaccugcc

SEQ ID NO: 411020 - RNA, 32 nt, Human
cuucuuucucacuuccacaucucccccucuau

SEQ ID NO: 411021 - RNA, 24 nt, Human
cuucuuucuccaagcuccccuccu

SEQ ID NO: 411022 - RNA, 24 nt, Human
cuucuuucucccccacaccuaucu

SEQ ID NO: 411023 - RNA, 22 nt, Human
cuucuuucucccuuucccuccu

SEQ ID NO: 411024 - RNA, 32 nt, Human
cuucuuucucucucugcccccaccaagugcgg

SEQ ID NO: 411025 - RNA, 32 nt, Human
cuucuuucucucuuccuccaucauuuucccug

SEQ ID NO: 411026 - RNA, 21 nt, Human
cuucuuucucugucccuuccu

SEQ ID NO: 411027 - RNA, 21 nt, Human
cuucuuucucuucaacccccu

SEQ ID NO: 411028 - RNA, 32 nt, Human
cuucuuucugccccucuuccucccccuccucu

SEQ ID NO: 411029 - RNA, 32 nt, Human
cuucuuucugcugugcugcuucccucccaaac

SEQ ID NO: 411030 - RNA, 32 nt, Human
cuucuuucuuuuccuaaagaaucacggggaga

SEQ ID NO: 411031 - RNA, 32 nt, Human
cuucuuugacccuuaugacugaaagaucauca

SEQ ID NO: 411032 - RNA, 32 nt, Human
cuucuuugaucccagcaucucagucccccucc

SEQ ID NO: 411033 - RNA, 32 nt, Human
cuucuuugcccuuugcagugccacuuauuuag

SEQ ID NO: 411034 - RNA, 32 nt, Human
cuucuuugccuuucuucuuugucuuauuucug

SEQ ID NO: 411035 - RNA, 32 nt, Human
cuucuuugcuucuguuccuccugacccauuac

SEQ ID NO: 411036 - RNA, 32 nt, Human
cuucuuuggacuuggaaggugugcggggacug

SEQ ID NO: 411037 - RNA, 32 nt, Human
cuucuuuggagaggaggauggaagggaggggu

SEQ ID NO: 411038 - RNA, 32 nt, Human
cuucuuuggcuucugguucuuccagcccucau

SEQ ID NO: 411039 - RNA, 32 nt, Human
cuucuuugggcuguggcuugcagaacaaacua

SEQ ID NO: 411040 - RNA, 32 nt, Human
cuucuuuggggaacuggggaaggacugauaag

SEQ ID NO: 411041 - RNA, 32 nt, Human
cuucuuugggguggagagaauuuugagcgcua

SEQ ID NO: 411042 - RNA, 32 nt, Human
cuucuuugugccucuuuucucuccuuaauaag

SEQ ID NO: 411043 - RNA, 32 nt, Human
cuucuuugugguugcccaagguuguuuugcgu

SEQ ID NO: 411044 - RNA, 32 nt, Human
cuucuuuguuguguccucgaauggcagaaaaa

SEQ ID NO: 411045 - RNA, 32 nt, Human
cuucuuuguuuacucugcauacacugaguguu

SEQ ID NO: 411046 - RNA, 21 nt, Human
cuucuuuuaaaagacggucca

SEQ ID NO: 411047 - RNA, 32 nt, Human
cuucuuuuauuuccucugugaaccccuucucu

SEQ ID NO: 411048 - RNA, 32 nt, Human
cuucuuuucacuuuaccagaaaguguucuuua

SEQ ID NO: 411049 - RNA, 23 nt, Human
cuucuuuuccuucuuugcuucuu

SEQ ID NO: 411050 - RNA, 32 nt, Human
cuucuuuucuaggcaauauaaggaaagugauc

SEQ ID NO: 411051 - RNA, 32 nt, Human
cuucuuuucucccagucuccuguucauccauu

SEQ ID NO: 411052 - RNA, 32 nt, Human
cuucuuuucucccaucccgguugcaaucucac

SEQ ID NO: 411053 - RNA, 32 nt, Human
cuucuuuucucucccuuccuucuuccuucagg

SEQ ID NO: 411054 - RNA, 32 nt, Human
cuucuuuucucuucccccagugccuagguugc

SEQ ID NO: 411055 - RNA, 32 nt, Human
cuucuuuucugacuauuuuucagaaucucucu

SEQ ID NO: 411056 - RNA, 32 nt, Human
cuucuuuucugucccaggaggguggguaauuc

SEQ ID NO: 411057 - RNA, 32 nt, Human
cuucuuuucuugccucccugaccagcagacuc

SEQ ID NO: 411058 - RNA, 32 nt, Human
cuucuuuucuuguguuccccaggguuuuggga

SEQ ID NO: 411059 - RNA, 32 nt, Human
cuucuuuuguaggugggaauccagccucuguu

SEQ ID NO: 411060 - RNA, 32 nt, Human
cuucuuuuuauuucuuguccccaguguguacc

SEQ ID NO: 411061 - RNA, 32 nt, Human
cuucuuuuucccccaaccucccccuccugucc

SEQ ID NO: 411062 - RNA, 32 nt, Human
cuucuuuuucccuuugacuucuacagaaaucu

SEQ ID NO: 411063 - RNA, 18 nt, Human
cuucuuuuucucccuacc

SEQ ID NO: 411064 - RNA, 32 nt, Human
cuucuuuuucugcuuucauuuuaauuuuggga

SEQ ID NO: 411065 - RNA, 32 nt, Human
cuugaaaaacacaggauuauaaaauggugccg

SEQ ID NO: 411066 - RNA, 32 nt, Human
cuugaaaacaggagguggagguugcagugagc

SEQ ID NO: 411067 - RNA, 32 nt, Human
cuugaaaauugauauccuguggugcuaaagua

SEQ ID NO: 411068 - RNA, 32 nt, Human
cuugaaaccagccuggccaacguggugagacc

SEQ ID NO: 411069 - RNA, 21 nt, Human
cuugaaaccaggaguucgaga

SEQ ID NO: 411070 - RNA, 32 nt, Human
cuugaaaccaggaguuugagaccagccugagc

SEQ ID NO: 411071 - RNA, 32 nt, Human
cuugaaacccacaggcggagguugcggugggc

SEQ ID NO: 411072 - RNA, 32 nt, Human
cuugaaaccggaaggcagagguugcagugagc

SEQ ID NO: 411073 - RNA, 32 nt, Human
cuugaaaccgggaggcggagguugaggugagc

SEQ ID NO: 411074 - RNA, 32 nt, Human
cuugaaacucagcuugaagauuucagcaaaug

SEQ ID NO: 411075 - RNA, 32 nt, Human
cuugaaacuggaaggcagagguugcagugagc

SEQ ID NO: 411076 - RNA, 32 nt, Human
cuugaaacugggaggcagggguuggagugagc

SEQ ID NO: 411077 - RNA, 32 nt, Human
cuugaaacugggagguggagguugcagugagc

SEQ ID NO: 411078 - RNA, 32 nt, Human
cuugaaacugguuggggaaugaggugauaagc

SEQ ID NO: 411079 - RNA, 32 nt, Human
cuugaaacugucagggucagaggggaaccacc

SEQ ID NO: 411080 - RNA, 24 nt, Human
cuugaaagacauaggaaaauucau

SEQ ID NO: 411081 - RNA, 31 nt, Human
cuugaaagcacuuucugaccuacagaaguug

SEQ ID NO: 411082 - RNA, 32 nt, Human
cuugaaaggagaaagcacggggucgccccaaa

SEQ ID NO: 411083 - RNA, 32 nt, Human
cuugaaauagaugccucacaauucagacaguu

SEQ ID NO: 411084 - RNA, 32 nt, Human
cuugaaaucaucuagacacugcaaccucuugc

SEQ ID NO: 411085 - RNA, 32 nt, Human
cuugaaauccaauugguuucuguuauagcagu

SEQ ID NO: 411086 - RNA, 32 nt, Human
cuugaaaugggaauugagccuguuagaauuaa

SEQ ID NO: 411087 - RNA, 32 nt, Human
cuugaaauucuugcugccagcacagcagucug

SEQ ID NO: 411088 - RNA, 32 nt, Human
cuugaaauugaggagguuaaaaggaagagccu

SEQ ID NO: 411089 - RNA, 32 nt, Human
cuugaaauuuccacuuucaguuccauucauga

SEQ ID NO: 411090 - RNA, 32 nt, Human
cuugaaauuuuaagaaaccagaaacaaauaaa

SEQ ID NO: 411091 - RNA, 32 nt, Human
cuugaacaagguaggcagagguugcagugagc

SEQ ID NO: 411092 - RNA, 32 nt, Human
cuugaacaagucagcaucucugccuuucaaaa

SEQ ID NO: 411093 - RNA, 22 nt, Human
cuugaacacaaaugugcuuccu

SEQ ID NO: 411094 - RNA, 32 nt, Human
cuugaacacacgucuuguucccacccaucggu

SEQ ID NO: 411095 - RNA, 32 nt, Human
cuugaacacagaagguggagguugcagugagc

SEQ ID NO: 411096 - RNA, 32 nt, Human
cuugaacacaggaggcagagguugcagcgagc

SEQ ID NO: 411097 - RNA, 32 nt, Human
cuugaacacaggaggcagagguugcagugagc

SEQ ID NO: 411098 - RNA, 32 nt, Human
cuugaacaccacugugauucuccaaggacgaa

SEQ ID NO: 411099 - RNA, 32 nt, Human
cuugaacacgggaggcagagguugcagugagc

SEQ ID NO: 411100 - RNA, 20 nt, Human
cuugaacacugaagggcagg

SEQ ID NO: 411101 - RNA, 32 nt, Human
cuugaacagagcgggcuucuucauggcugcgu

SEQ ID NO: 411102 - RNA, 32 nt, Human
cuugaacaggggagauggagguugcagugagc

SEQ ID NO: 411103 - RNA, 31 nt, Human
cuugaacaguuucagguuauauuuuaauuuu

SEQ ID NO: 411104 - RNA, 32 nt, Human
cuugaacaucugagcaguuuugugcuuugagc

SEQ ID NO: 411105 - RNA, 32 nt, Human
cuugaacaugagauggggcugaucugaacuua

SEQ ID NO: 411106 - RNA, 26 nt, Human
cuugaacaugguagagguugcaguga

SEQ ID NO: 411107 - RNA, 32 nt, Human
cuugaacauguccaacuuuaagaacuuuaaga

SEQ ID NO: 411108 - RNA, 32 nt, Human
cuugaaccaaggaggcagagguuguaguaagc

SEQ ID NO: 411109 - RNA, 32 nt, Human
cuugaaccaaggagguggagguugcagugagc

SEQ ID NO: 411110 - RNA, 32 nt, Human
cuugaaccaagguggcagagguugcaguaagc

SEQ ID NO: 411111 - RNA, 32 nt, Human
cuugaaccagagagguggagguugcagugaac

SEQ ID NO: 411112 - RNA, 32 nt, Human
cuugaaccaggaaggcagagguugcacugagc

SEQ ID NO: 411113 - RNA, 32 nt, Human
cuugaaccagggaagcggagguugcagugagc

SEQ ID NO: 411114 - RNA, 32 nt, Human
cuugaaccagggaggcagaggcugcggugagc

SEQ ID NO: 411115 - RNA, 32 nt, Human
cuugaaccagggaggcagagguugcagugagc

SEQ ID NO: 411116 - RNA, 32 nt, Human
cuugaaccagggaggcagagguuguggugagc

SEQ ID NO: 411117 - RNA, 32 nt, Human
cuugaaccagggaggcagaguuugcagugaau

SEQ ID NO: 411118 - RNA, 32 nt, Human
cuugaaccagggaggcggagguugcagcaagc

SEQ ID NO: 411119 - RNA, 32 nt, Human
cuugaaccagggaggcggagguugcagugagc

SEQ ID NO: 411120 - RNA, 32 nt, Human
cuugaaccagggagguggagguugcagugagc

SEQ ID NO: 411121 - RNA, 21 nt, Human
cuugaacccaagaggcagagg

SEQ ID NO: 411122 - RNA, 32 nt, Human
cuugaacccaagaggcagaggaugcaaugagc

SEQ ID NO: 411123 - RNA, 22 nt, Human
cuugaacccaagaggcagaggu

SEQ ID NO: 411124 - RNA, 32 nt, Human
cuugaacccaagaggcagagguugcagugaac

SEQ ID NO: 411125 - RNA, 32 nt, Human
cuugaacccaagaggcagaguuugcagugagc

SEQ ID NO: 411126 - RNA, 22 nt, Human
cuugaacccaagaggcggaggu

SEQ ID NO: 411127 - RNA, 32 nt, Human
cuugaacccaagaggcggagguugcagugagc

SEQ ID NO: 411128 - RNA, 32 nt, Human
cuugaacccaagaggcggagguuguggugagc

SEQ ID NO: 411129 - RNA, 32 nt, Human
cuugaacccaagaggucgaggcugcagugagc

SEQ ID NO: 411130 - RNA, 32 nt, Human
cuugaacccaagagguggaggcugaagugagc

SEQ ID NO: 411131 - RNA, 32 nt, Human
cuugaacccaagagguggagguugcggugagc

SEQ ID NO: 411132 - RNA, 32 nt, Human
cuugaacccaccucccugucccuggacucuac

SEQ ID NO: 411133 - RNA, 32 nt, Human
cuugaacccagaaagcggagguugcagugacc

SEQ ID NO: 411134 - RNA, 32 nt, Human
cuugaacccagaagacagguugcagugagcca

SEQ ID NO: 411135 - RNA, 32 nt, Human
cuugaacccagaaggcagagguugcagugagc

SEQ ID NO: 411136 - RNA, 32 nt, Human
cuugaacccagaagguagagguugcagccaag

SEQ ID NO: 411137 - RNA, 32 nt, Human
cuugaacccagaaggugcagguugcagugagc

SEQ ID NO: 411138 - RNA, 32 nt, Human
cuugaacccagauagcagagguugcagugagc

SEQ ID NO: 411139 - RNA, 32 nt, Human
cuugaacccagcagauggagguugcagugagc

SEQ ID NO: 411140 - RNA, 32 nt, Human
cuugaacccagcaggcagagguugcagugagc

SEQ ID NO: 411141 - RNA, 32 nt, Human
cuugaacccagcaggcggagguugcggugagu

SEQ ID NO: 411142 - RNA, 32 nt, Human
cuugaacccagcaguucgagacuugccugggc

SEQ ID NO: 411143 - RNA, 32 nt, Human
cuugaacccaggaagcagagguugcaguaagc

SEQ ID NO: 411144 - RNA, 32 nt, Human
cuugaacccaggaagcagagguugcagugagc

SEQ ID NO: 411145 - RNA, 32 nt, Human
cuugaacccaggaagcagugguugagaucacg

SEQ ID NO: 411146 - RNA, 32 nt, Human
cuugaacccaggaagcggagguugcaaucagc

SEQ ID NO: 411147 - RNA, 32 nt, Human
cuugaacccaggaagcggagguugcagugagc

SEQ ID NO: 411148 - RNA, 32 nt, Human
cuugaacccaggaagcggagguuguggugagc

SEQ ID NO: 411149 - RNA, 32 nt, Human
cuugaacccaggaagcgggguugcagugagcc

SEQ ID NO: 411150 - RNA, 32 nt, Human
cuugaacccaggaaguagaagcuacagugagu

SEQ ID NO: 411151 - RNA, 32 nt, Human
cuugaacccaggaaguagagguugcagugagc

SEQ ID NO: 411152 - RNA, 32 nt, Human
cuugaacccaggaaguggagacugcagugagc

SEQ ID NO: 411153 - RNA, 32 nt, Human
cuugaacccaggaaguggagguugcagugagc

SEQ ID NO: 411154 - RNA, 32 nt, Human
cuugaacccaggaaguggcaguugcagugagc

SEQ ID NO: 411155 - RNA, 32 nt, Human
cuugaacccaggaauucaggcugcaguaagcu

SEQ ID NO: 411156 - RNA, 32 nt, Human
cuugaacccaggacgcagagguugcggugagc

SEQ ID NO: 411157 - RNA, 32 nt, Human
cuugaacccaggagacagagguugcagugagc

SEQ ID NO: 411158 - RNA, 32 nt, Human
cuugaacccaggagacagagguuguagugagc

SEQ ID NO: 411159 - RNA, 32 nt, Human
cuugaacccaggagacagagguuguggugggg

SEQ ID NO: 411160 - RNA, 32 nt, Human
cuugaacccaggagacagggguugcagugagc

SEQ ID NO: 411161 - RNA, 32 nt, Human
cuugaacccaggagacauggguugcagugagc

SEQ ID NO: 411162 - RNA, 32 nt, Human
cuugaacccaggagacgagguugcagugagcc

SEQ ID NO: 411163 - RNA, 32 nt, Human
cuugaacccaggagacggaaguugcagugagc

SEQ ID NO: 411164 - RNA, 32 nt, Human
cuugaacccaggagacggagguugcagugagc

SEQ ID NO: 411165 - RNA, 32 nt, Human
cuugaacccaggagacggagguugcggugagu

SEQ ID NO: 411166 - RNA, 32 nt, Human
cuugaacccaggagacggugguugcagugagc

SEQ ID NO: 411167 - RNA, 32 nt, Human
cuugaacccaggagaggaagguugcaguaagc

SEQ ID NO: 411168 - RNA, 32 nt, Human
cuugaacccaggagauagagguugcaaugagc

SEQ ID NO: 411169 - RNA, 32 nt, Human
cuugaacccaggagauggaaguugcagugagc

SEQ ID NO: 411170 - RNA, 32 nt, Human
cuugaacccaggagauggagauugcaguaggc

SEQ ID NO: 411171 - RNA, 32 nt, Human
cuugaacccaggagauggagguugcagugagc

SEQ ID NO: 411172 - RNA, 32 nt, Human
cuugaacccaggagauggagguugcggugagc

SEQ ID NO: 411173 - RNA, 32 nt, Human
cuugaacccaggagauugagguuguagugagc

SEQ ID NO: 411174 - RNA, 32 nt, Human
cuugaacccaggaggaagagguugcagugagc

SEQ ID NO: 411175 - RNA, 32 nt, Human
cuugaacccaggaggagguggagaucgcagug

SEQ ID NO: 411176 - RNA, 32 nt, Human
cuugaacccaggaggcacagauugcagugagc

SEQ ID NO: 411177 - RNA, 32 nt, Human
cuugaacccaggaggcagaaguugcagugagc

SEQ ID NO: 411178 - RNA, 32 nt, Human
cuugaacccaggaggcagagaucgcagugagu

SEQ ID NO: 411179 - RNA, 32 nt, Human
cuugaacccaggaggcagagauugcagugagc

SEQ ID NO: 411180 - RNA, 32 nt, Human
cuugaacccaggaggcagagauugcggugagc

SEQ ID NO: 411181 - RNA, 32 nt, Human
cuugaacccaggaggcagaggguugcagugag

SEQ ID NO: 411182 - RNA, 32 nt, Human
cuugaacccaggaggcagagguuacaguaaac

SEQ ID NO: 411183 - RNA, 32 nt, Human
cuugaacccaggaggcagagguuacagugagc

SEQ ID NO: 411184 - RNA, 32 nt, Human
cuugaacccaggaggcagagguugcaaugagc

SEQ ID NO: 411185 - RNA, 32 nt, Human
cuugaacccaggaggcagagguugcaguaagc

SEQ ID NO: 411186 - RNA, 32 nt, Human
cuugaacccaggaggcagagguugcagucagc

SEQ ID NO: 411187 - RNA, 32 nt, Human
cuugaacccaggaggcagagguugcagugagc

SEQ ID NO: 411188 - RNA, 32 nt, Human
cuugaacccaggaggcagagguugcagugagu

SEQ ID NO: 411189 - RNA, 32 nt, Human
cuugaacccaggaggcagagguugcagugcac

SEQ ID NO: 411190 - RNA, 32 nt, Human
cuugaacccaggaggcagagguugcagugcgc

SEQ ID NO: 411191 - RNA, 32 nt, Human
cuugaacccaggaggcagagguugcagugggc

SEQ ID NO: 411192 - RNA, 32 nt, Human
cuugaacccaggaggcagagguugcggugagc

SEQ ID NO: 411193 - RNA, 32 nt, Human
cuugaacccaggaggcagagguugcguugagc

SEQ ID NO: 411194 - RNA, 32 nt, Human
cuugaacccaggaggcagagguuggggugagc

SEQ ID NO: 411195 - RNA, 32 nt, Human
cuugaacccaggaggcagagguuguagugagc

SEQ ID NO: 411196 - RNA, 32 nt, Human
cuugaacccaggaggcagaguuugcagucagc

SEQ ID NO: 411197 - RNA, 32 nt, Human
cuugaacccaggaggcagaguuugcagugagc

SEQ ID NO: 411198 - RNA, 32 nt, Human
cuugaacccaggaggcagcuguugcagugagc

SEQ ID NO: 411199 - RNA, 32 nt, Human
cuugaacccaggaggcagugauugcagugagc

SEQ ID NO: 411200 - RNA, 32 nt, Human
cuugaacccaggaggcagugguugcaaugagc

SEQ ID NO: 411201 - RNA, 32 nt, Human
cuugaacccaggaggccgagguugcagugagc

SEQ ID NO: 411202 - RNA, 32 nt, Human
cuugaacccaggaggcgaagguugcaguaaac

SEQ ID NO: 411203 - RNA, 32 nt, Human
cuugaacccaggaggcggaaguugcagugagc

SEQ ID NO: 411204 - RNA, 32 nt, Human
cuugaacccaggaggcggagauugcagugagc

SEQ ID NO: 411205 - RNA, 32 nt, Human
cuugaacccaggaggcggagcuugcagugagc

SEQ ID NO: 411206 - RNA, 32 nt, Human
cuugaacccaggaggcggaggcagaggcugca

SEQ ID NO: 411207 - RNA, 32 nt, Human
cuugaacccaggaggcggaggcugcagugagc

SEQ ID NO: 411208 - RNA, 32 nt, Human
cuugaacccaggaggcggagguagcagugagc

SEQ ID NO: 411209 - RNA, 32 nt, Human
cuugaacccaggaggcggagguaguggugagc

SEQ ID NO: 411210 - RNA, 32 nt, Human
cuugaacccaggaggcggagguuacagugagc

SEQ ID NO: 411211 - RNA, 32 nt, Human
cuugaacccaggaggcggagguugcacugagc

SEQ ID NO: 411212 - RNA, 32 nt, Human
cuugaacccaggaggcggagguugcaguaagc

SEQ ID NO: 411213 - RNA, 32 nt, Human
cuugaacccaggaggcggagguugcagugaac

SEQ ID NO: 411214 - RNA, 32 nt, Human
cuugaacccaggaggcggagguugcagugaga

SEQ ID NO: 411215 - RNA, 32 nt, Human
cuugaacccaggaggcggagguugcagugagc

SEQ ID NO: 411216 - RNA, 32 nt, Human
cuugaacccaggaggcggagguugcagugauc

SEQ ID NO: 411217 - RNA, 32 nt, Human
cuugaacccaggaggcggagguugccgugagc

SEQ ID NO: 411218 - RNA, 32 nt, Human
cuugaacccaggaggcggagguugcggugagc

SEQ ID NO: 411219 - RNA, 32 nt, Human
cuugaacccaggaggcggagguugcggugagu

SEQ ID NO: 411220 - RNA, 32 nt, Human
cuugaacccaggaggcggagguuguagugagc

SEQ ID NO: 411221 - RNA, 32 nt, Human
cuugaacccaggaggcggagguuguggugagc

SEQ ID NO: 411222 - RNA, 32 nt, Human
cuugaacccaggaggcggaguuugcagugagc

SEQ ID NO: 411223 - RNA, 32 nt, Human
cuugaacccaggaggcggggguugcagugagu

SEQ ID NO: 411224 - RNA, 32 nt, Human
cuugaacccaggaggcugagguugcagugagc

SEQ ID NO: 411225 - RNA, 32 nt, Human
cuugaacccaggagguagaagcugcagugagc

SEQ ID NO: 411226 - RNA, 32 nt, Human
cuugaacccaggagguagaaguugcagugagc

SEQ ID NO: 411227 - RNA, 32 nt, Human
cuugaacccaggagguagaggcugcagugagc

SEQ ID NO: 411228 - RNA, 32 nt, Human
cuugaacccaggagguagagguugcagugagc

SEQ ID NO: 411229 - RNA, 32 nt, Human
cuugaacccaggaggugaagguugcagugacc

SEQ ID NO: 411230 - RNA, 32 nt, Human
cuugaacccaggaggugcagguugcagugagc

SEQ ID NO: 411231 - RNA, 32 nt, Human
cuugaacccaggagguggaaguugcuuugagc

SEQ ID NO: 411232 - RNA, 32 nt, Human
cuugaacccaggagguggagauugcagugagc

SEQ ID NO: 411233 - RNA, 32 nt, Human
cuugaacccaggagguggaggaugcagugaac

SEQ ID NO: 411234 - RNA, 32 nt, Human
cuugaacccaggagguggaggcugcggugagc

SEQ ID NO: 411235 - RNA, 32 nt, Human
cuugaacccaggagguggagguagcagugagc

SEQ ID NO: 411236 - RNA, 32 nt, Human
cuugaacccaggagguggagguuacagugagc

SEQ ID NO: 411237 - RNA, 32 nt, Human
cuugaacccaggagguggagguuccagugagc

SEQ ID NO: 411238 - RNA, 32 nt, Human
cuugaacccaggagguggagguugcaagugag

SEQ ID NO: 411239 - RNA, 32 nt, Human
cuugaacccaggagguggagguugcagcaagc

SEQ ID NO: 411240 - RNA, 32 nt, Human
cuugaacccaggagguggagguugcaguaagc

SEQ ID NO: 411241 - RNA, 32 nt, Human
cuugaacccaggagguggagguugcagugaac

SEQ ID NO: 411242 - RNA, 32 nt, Human
cuugaacccaggagguggagguugcagugagc

SEQ ID NO: 411243 - RNA, 32 nt, Human
cuugaacccaggagguggagguugcagugagg

SEQ ID NO: 411244 - RNA, 32 nt, Human
cuugaacccaggagguggagguugcagugagu

SEQ ID NO: 411245 - RNA, 32 nt, Human
cuugaacccaggagguggagguugcagugggc

SEQ ID NO: 411246 - RNA, 32 nt, Human
cuugaacccaggagguggagguugcaguuagc

SEQ ID NO: 411247 - RNA, 32 nt, Human
cuugaacccaggagguggagguugcggugagc

SEQ ID NO: 411248 - RNA, 32 nt, Human
cuugaacccaggagguggagguugcugugagc

SEQ ID NO: 411249 - RNA, 32 nt, Human
cuugaacccaggagguggagguuguagugaga

SEQ ID NO: 411250 - RNA, 32 nt, Human
cuugaacccaggagguggagguuguggugagc

SEQ ID NO: 411251 - RNA, 32 nt, Human
cuugaacccaggagguggaguuugcagugagc

SEQ ID NO: 411252 - RNA, 32 nt, Human
cuugaacccaggaggugggcauugcagugagc

SEQ ID NO: 411253 - RNA, 32 nt, Human
cuugaacccaggagguggggguugcaccgagc

SEQ ID NO: 411254 - RNA, 32 nt, Human
cuugaacccaggagguggugguugcagugagc

SEQ ID NO: 411255 - RNA, 32 nt, Human
cuugaacccaggagguguugcagugaaccaag

SEQ ID NO: 411256 - RNA, 21 nt, Human
cuugaacccaggagguugagg

SEQ ID NO: 411257 - RNA, 32 nt, Human
cuugaacccaggagguugaggcugcagugagu

SEQ ID NO: 411258 - RNA, 32 nt, Human
cuugaacccaggagucagagguuucagugagc

SEQ ID NO: 411259 - RNA, 32 nt, Human
cuugaacccaggagucggagguugcagugagu

SEQ ID NO: 411260 - RNA, 32 nt, Human
cuugaacccaggaguucaagaauagccugggc

SEQ ID NO: 411261 - RNA, 32 nt, Human
cuugaacccaggaguucaagaccagccuggac

SEQ ID NO: 411262 - RNA, 32 nt, Human
cuugaacccaggaguucaagaccagccugggc

SEQ ID NO: 411263 - RNA, 32 nt, Human
cuugaacccaggaguucaagaucagccugggc

SEQ ID NO: 411264 - RNA, 32 nt, Human
cuugaacccaggaguucaagucugcagugagc

SEQ ID NO: 411265 - RNA, 32 nt, Human
cuugaacccaggaguucgagaccagccugggc

SEQ ID NO: 411266 - RNA, 32 nt, Human
cuugaacccaggaguucgagaccauccugggc

SEQ ID NO: 411267 - RNA, 32 nt, Human
cuugaacccaggaguuucagaccaccuuggca

SEQ ID NO: 411268 - RNA, 32 nt, Human
cuugaacccaggaguuugacaucaaccugggc

SEQ ID NO: 411269 - RNA, 21 nt, Human
cuugaacccaggaguuugaga

SEQ ID NO: 411270 - RNA, 32 nt, Human
cuugaacccaggcaguggagguugcagugagc

SEQ ID NO: 411271 - RNA, 32 nt, Human
cuugaacccaggcggcagagguugcagugagu

SEQ ID NO: 411272 - RNA, 32 nt, Human
cuugaacccagggggcagagguugcagugagc

SEQ ID NO: 411273 - RNA, 32 nt, Human
cuugaacccaggggguggagguugcacugagc

SEQ ID NO: 411274 - RNA, 32 nt, Human
cuugaacccagguuguggagguuguagugagc

SEQ ID NO: 411275 - RNA, 32 nt, Human
cuugaacccaguagaggaagguugcaguaagc

SEQ ID NO: 411276 - RNA, 32 nt, Human
cuugaacccaguggcggaggcugcagugagcc

SEQ ID NO: 411277 - RNA, 32 nt, Human
cuugaacccauaaggcagagguugcagugagc

SEQ ID NO: 411278 - RNA, 32 nt, Human
cuugaacccaugaggcggagguugcagugagc

SEQ ID NO: 411279 - RNA, 32 nt, Human
cuugaacccaugagguggagguugcggugagc

SEQ ID NO: 411280 - RNA, 32 nt, Human
cuugaaccccagaggcagagguugcggugagc

SEQ ID NO: 411281 - RNA, 32 nt, Human
cuugaaccccagaggcggagguugcagugagc

SEQ ID NO: 411282 - RNA, 32 nt, Human
cuugaaccccggaggcggagguugcagugagc

SEQ ID NO: 411283 - RNA, 32 nt, Human
cuugaaccccggagguagagguugcagugagc

SEQ ID NO: 411284 - RNA, 22 nt, Human
cuugaacccgagagacggaggu

SEQ ID NO: 411285 - RNA, 32 nt, Human
cuugaacccgagagacggagguugcagugagc

SEQ ID NO: 411286 - RNA, 32 nt, Human
cuugaacccgagaggcggaaguugcagugagc

SEQ ID NO: 411287 - RNA, 32 nt, Human
cuugaacccgagaggcggagcuugcagugagc

SEQ ID NO: 411288 - RNA, 22 nt, Human
cuugaacccgagaggcggaggu

SEQ ID NO: 411289 - RNA, 23 nt, Human
cuugaacccgagaggcggaggug

SEQ ID NO: 411290 - RNA, 32 nt, Human
cuugaacccgagaggcggagguugcagugagc

SEQ ID NO: 411291 - RNA, 22 nt, Human
cuugaacccgagagguggaggu

SEQ ID NO: 411292 - RNA, 32 nt, Human
cuugaacccgagagguggagguugaagugagc

SEQ ID NO: 411293 - RNA, 32 nt, Human
cuugaacccgagagguggagguugcagugaac

SEQ ID NO: 411294 - RNA, 32 nt, Human
cuugaacccgagagguggagguugcagugagc

SEQ ID NO: 411295 - RNA, 32 nt, Human
cuugaacccggaaggcagagguugcagugagc

SEQ ID NO: 411296 - RNA, 32 nt, Human
cuugaacccggaaggcggagguugcagugagc

SEQ ID NO: 411297 - RNA, 32 nt, Human
cuugaacccggaagguggagguuguugcggug

SEQ ID NO: 411298 - RNA, 32 nt, Human
cuugaacccggcaggaagagguugcauugagc

SEQ ID NO: 411299 - RNA, 32 nt, Human
cuugaacccggcaggcagagguugcagugagc

SEQ ID NO: 411300 - RNA, 32 nt, Human
cuugaacccggcgggcagagguugcaguaagc

SEQ ID NO: 411301 - RNA, 32 nt, Human
cuugaacccgggaagcagagguugcagugaca

SEQ ID NO: 411302 - RNA, 32 nt, Human
cuugaacccgggaagcagagguugcagugagc

SEQ ID NO: 411303 - RNA, 32 nt, Human
cuugaacccgggaagcagagguugcggugagc

SEQ ID NO: 411304 - RNA, 32 nt, Human
cuugaacccgggaagcggagguugcagugagc

SEQ ID NO: 411305 - RNA, 32 nt, Human
cuugaacccgggaaguggaggcuggaguaaac

SEQ ID NO: 411306 - RNA, 32 nt, Human
cuugaacccgggaaguggagguugccgugagu

SEQ ID NO: 411307 - RNA, 32 nt, Human
cuugaacccgggagacggagguugcagugagc

SEQ ID NO: 411308 - RNA, 32 nt, Human
cuugaacccgggagacggcgcuugcagugagc

SEQ ID NO: 411309 - RNA, 32 nt, Human
cuugaacccgggagacgggagguuguggugag

SEQ ID NO: 411310 - RNA, 32 nt, Human
cuugaacccgggagaugaagguugcagugagc

SEQ ID NO: 411311 - RNA, 32 nt, Human
cuugaacccgggaggaggagguugcacugagc

SEQ ID NO: 411312 - RNA, 32 nt, Human
cuugaacccgggaggcaaagguugcagugagc

SEQ ID NO: 411313 - RNA, 32 nt, Human
cuugaacccgggaggcaaagguugcgguaagc

SEQ ID NO: 411314 - RNA, 32 nt, Human
cuugaacccgggaggcacagguuccagugggc

SEQ ID NO: 411315 - RNA, 32 nt, Human
cuugaacccgggaggcagaaguugcagugaac

SEQ ID NO: 411316 - RNA, 32 nt, Human
cuugaacccgggaggcagacuuugcagugagc

SEQ ID NO: 411317 - RNA, 32 nt, Human
cuugaacccgggaggcagagauagcagugaac

SEQ ID NO: 411318 - RNA, 32 nt, Human
cuugaacccgggaggcagagauugcaguaagc

SEQ ID NO: 411319 - RNA, 32 nt, Human
cuugaacccgggaggcagaggcugcacucuag

SEQ ID NO: 411320 - RNA, 32 nt, Human
cuugaacccgggaggcagaggcugcagugagc

SEQ ID NO: 411321 - RNA, 32 nt, Human
cuugaacccgggaggcagaggcuguagugagc

SEQ ID NO: 411322 - RNA, 32 nt, Human
cuugaacccgggaggcagagggugcaguaagc

SEQ ID NO: 411323 - RNA, 32 nt, Human
cuugaacccgggaggcagagguaguagugagc

SEQ ID NO: 411324 - RNA, 32 nt, Human
cuugaacccgggaggcagagguggcugugagc

SEQ ID NO: 411325 - RNA, 32 nt, Human
cuugaacccgggaggcagagguuacagugagc

SEQ ID NO: 411326 - RNA, 32 nt, Human
cuugaacccgggaggcagagguuaucgugagc

SEQ ID NO: 411327 - RNA, 32 nt, Human
cuugaacccgggaggcagagguugaagugagc

SEQ ID NO: 411328 - RNA, 32 nt, Human
cuugaacccgggaggcagagguugcagccggc

SEQ ID NO: 411329 - RNA, 32 nt, Human
cuugaacccgggaggcagagguugcaguaagc

SEQ ID NO: 411330 - RNA, 32 nt, Human
cuugaacccgggaggcagagguugcagugagc

SEQ ID NO: 411331 - RNA, 32 nt, Human
cuugaacccgggaggcagagguugcagugagg

SEQ ID NO: 411332 - RNA, 32 nt, Human
cuugaacccgggaggcagagguugcagugagu

SEQ ID NO: 411333 - RNA, 32 nt, Human
cuugaacccgggaggcagagguugcauugagc

SEQ ID NO: 411334 - RNA, 32 nt, Human
cuugaacccgggaggcagagguugcggugagc

SEQ ID NO: 411335 - RNA, 32 nt, Human
cuugaacccgggaggcagagguugcuguaagc

SEQ ID NO: 411336 - RNA, 32 nt, Human
cuugaacccgggaggcagagguuguagugagc

SEQ ID NO: 411337 - RNA, 32 nt, Human
cuugaacccgggaggcagcaguugcagugagc

SEQ ID NO: 411338 - RNA, 32 nt, Human
cuugaacccgggaggcggaaguuucagcgagc

SEQ ID NO: 411339 - RNA, 32 nt, Human
cuugaacccgggaggcggagauugcagugagc

SEQ ID NO: 411340 - RNA, 32 nt, Human
cuugaacccgggaggcggagauugcggugagc

SEQ ID NO: 411341 - RNA, 32 nt, Human
cuugaacccgggaggcggagcuugcagugaac

SEQ ID NO: 411342 - RNA, 32 nt, Human
cuugaacccgggaggcggagcuugcagugagc

SEQ ID NO: 411343 - RNA, 32 nt, Human
cuugaacccgggaggcggaggcugcagugagu

SEQ ID NO: 411344 - RNA, 32 nt, Human
cuugaacccgggaggcggagguuacagugagc

SEQ ID NO: 411345 - RNA, 32 nt, Human
cuugaacccgggaggcggagguuauggagagc

SEQ ID NO: 411346 - RNA, 32 nt, Human
cuugaacccgggaggcggagguucauggggaa

SEQ ID NO: 411347 - RNA, 32 nt, Human
cuugaacccgggaggcggagguuccagugagc

SEQ ID NO: 411348 - RNA, 32 nt, Human
cuugaacccgggaggcggagguugcaguaagc

SEQ ID NO: 411349 - RNA, 32 nt, Human
cuugaacccgggaggcggagguugcagugagc

SEQ ID NO: 411350 - RNA, 32 nt, Human
cuugaacccgggaggcggagguugcagugagg

SEQ ID NO: 411351 - RNA, 32 nt, Human
cuugaacccgggaggcggagguugcaguuagc

SEQ ID NO: 411352 - RNA, 32 nt, Human
cuugaacccgggaggcggagguugcaugagcu

SEQ ID NO: 411353 - RNA, 32 nt, Human
cuugaacccgggaggcggagguugcgacccaa

SEQ ID NO: 411354 - RNA, 32 nt, Human
cuugaacccgggaggcggagguugcggugagc

SEQ ID NO: 411355 - RNA, 32 nt, Human
cuugaacccgggaggcggagguuguagugagc

SEQ ID NO: 411356 - RNA, 32 nt, Human
cuugaacccgggaggcggagguuguggugagc

SEQ ID NO: 411357 - RNA, 32 nt, Human
cuugaacccgggaggcggagguuucagugagc

SEQ ID NO: 411358 - RNA, 32 nt, Human
cuugaacccgggaggcggaguugcggugagcc

SEQ ID NO: 411359 - RNA, 32 nt, Human
cuugaacccgggaggcggaguuugcagugagc

SEQ ID NO: 411360 - RNA, 32 nt, Human
cuugaacccgggaggcggaguuuugccagccu

SEQ ID NO: 411361 - RNA, 32 nt, Human
cuugaacccgggagggagagguugcagugagc

SEQ ID NO: 411362 - RNA, 32 nt, Human
cuugaacccgggagguagaggcugcaaugggc

SEQ ID NO: 411363 - RNA, 32 nt, Human
cuugaacccgggagguagagguugcagugagc

SEQ ID NO: 411364 - RNA, 32 nt, Human
cuugaacccgggagguggagauugcagugagc

SEQ ID NO: 411365 - RNA, 32 nt, Human
cuugaacccgggagguggagccuacagugagu

SEQ ID NO: 411366 - RNA, 32 nt, Human
cuugaacccgggagguggaggcugcaaugagc

SEQ ID NO: 411367 - RNA, 32 nt, Human
cuugaacccgggagguggaggcugcagcgagc

SEQ ID NO: 411368 - RNA, 32 nt, Human
cuugaacccgggagguggaggcugcagugagc

SEQ ID NO: 411369 - RNA, 32 nt, Human
cuugaacccgggagguggaggcugcagugagu

SEQ ID NO: 411370 - RNA, 32 nt, Human
cuugaacccgggagguggaggcugcggugagc

SEQ ID NO: 411371 - RNA, 32 nt, Human
cuugaacccgggagguggaggucgcggugagc

SEQ ID NO: 411372 - RNA, 32 nt, Human
cuugaacccgggagguggagguggagguugca

SEQ ID NO: 411373 - RNA, 32 nt, Human
cuugaacccgggagguggagguggcagugagc

SEQ ID NO: 411374 - RNA, 32 nt, Human
cuugaacccgggagguggagguuacagugagc

SEQ ID NO: 411375 - RNA, 32 nt, Human
cuugaacccgggagguggagguucuagugagc

SEQ ID NO: 411376 - RNA, 32 nt, Human
cuugaacccgggagguggagguugcaaugagc

SEQ ID NO: 411377 - RNA, 32 nt, Human
cuugaacccgggagguggagguugcagcaagc

SEQ ID NO: 411378 - RNA, 32 nt, Human
cuugaacccgggagguggagguugcaguaagc

SEQ ID NO: 411379 - RNA, 32 nt, Human
cuugaacccgggagguggagguugcagugaac

SEQ ID NO: 411380 - RNA, 32 nt, Human
cuugaacccgggagguggagguugcagugagc

SEQ ID NO: 411381 - RNA, 32 nt, Human
cuugaacccgggagguggagguugcagugagg

SEQ ID NO: 411382 - RNA, 32 nt, Human
cuugaacccgggagguggagguugccgugagc

SEQ ID NO: 411383 - RNA, 32 nt, Human
cuugaacccgggagguggagguugccgugagu

SEQ ID NO: 411384 - RNA, 32 nt, Human
cuugaacccgggagguggagguugcgaugagc

SEQ ID NO: 411385 - RNA, 32 nt, Human
cuugaacccgggagguggagguugcggugagc

SEQ ID NO: 411386 - RNA, 32 nt, Human
cuugaacccgggagguggagguuguagcgagc

SEQ ID NO: 411387 - RNA, 32 nt, Human
cuugaacccgggagguggagguuguagugagc

SEQ ID NO: 411388 - RNA, 32 nt, Human
cuugaacccgggagguggcaguugcagggagc

SEQ ID NO: 411389 - RNA, 32 nt, Human
cuugaacccgggaggugggaguuguagugagc

SEQ ID NO: 411390 - RNA, 32 nt, Human
cuugaacccgggagguguagguugcagugagc

SEQ ID NO: 411391 - RNA, 32 nt, Human
cuugaacccgggaguuaaagguugcagugagc

SEQ ID NO: 411392 - RNA, 32 nt, Human
cuugaacccgggaguuggagguugcagugagc

SEQ ID NO: 411393 - RNA, 32 nt, Human
cuugaacccgggaugcagagguugcagugagc

SEQ ID NO: 411394 - RNA, 32 nt, Human
cuugaacccgggcagcggagguugcagugagc

SEQ ID NO: 411395 - RNA, 32 nt, Human
cuugaacccgggggcagaggcugcagugagcc

SEQ ID NO: 411396 - RNA, 32 nt, Human
cuugaacccggguggcagagguugcagugagc

SEQ ID NO: 411397 - RNA, 32 nt, Human
cuugaacccgguaggcagagguugcagugagc

SEQ ID NO: 411398 - RNA, 32 nt, Human
cuugaacccgugaggcagagguugcagugaac

SEQ ID NO: 411399 - RNA, 32 nt, Human
cuugaacccgugaggcggagguuguagugagc

SEQ ID NO: 411400 - RNA, 32 nt, Human
cuugaacccuaaaggcagagguugcagugagc

SEQ ID NO: 411401 - RNA, 32 nt, Human
cuugaacccuggaaguggagguugcagugagc

SEQ ID NO: 411402 - RNA, 32 nt, Human
cuugaacccuggaggcagaggugguagugagc

SEQ ID NO: 411403 - RNA, 32 nt, Human
cuugaacccuggaggcagagguugcaaugagc

SEQ ID NO: 411404 - RNA, 32 nt, Human
cuugaacccuggaggcagagguuguggugagc

SEQ ID NO: 411405 - RNA, 32 nt, Human
cuugaacccuggaggcagagguuguggugagu

SEQ ID NO: 411406 - RNA, 32 nt, Human
cuugaacccuggaggcggagguugcagugagc

SEQ ID NO: 411407 - RNA, 32 nt, Human
cuugaacccuggaggcggagguugcagugagu

SEQ ID NO: 411408 - RNA, 32 nt, Human
cuugaacccuggagguggagguggagguugca

SEQ ID NO: 411409 - RNA, 32 nt, Human
cuugaacccuggagguggagguugcagugagc

SEQ ID NO: 411410 - RNA, 32 nt, Human
cuugaacccuggagguggcgguugcagugagc

SEQ ID NO: 411411 - RNA, 32 nt, Human
cuugaaccgaggaggcgaagguugcagugagc

SEQ ID NO: 411412 - RNA, 32 nt, Human
cuugaaccggggagacggagguugcagugagc

SEQ ID NO: 411413 - RNA, 32 nt, Human
cuugaaccggggaggcagagguugcagugagc

SEQ ID NO: 411414 - RNA, 32 nt, Human
cuugaaccggggaggcagagguugcaguuaag

SEQ ID NO: 411415 - RNA, 32 nt, Human
cuugaaccggggagguggaggcugcagugagc

SEQ ID NO: 411416 - RNA, 32 nt, Human
cuugaaccggggagguggagguugcagugagc

SEQ ID NO: 411417 - RNA, 32 nt, Human
cuugaaccggggaguuggagguugcagugagc

SEQ ID NO: 411418 - RNA, 32 nt, Human
cuugaaccuagaagguggagguugcagugagc

SEQ ID NO: 411419 - RNA, 32 nt, Human
cuugaaccuaggaagugcagguugaagugagc

SEQ ID NO: 411420 - RNA, 32 nt, Human
cuugaaccuaggaggcagaaguugcagugagc

SEQ ID NO: 411421 - RNA, 32 nt, Human
cuugaaccuaggaggcagagguugcagugagc

SEQ ID NO: 411422 - RNA, 32 nt, Human
cuugaaccuaggaggcggagguugcagugagc

SEQ ID NO: 411423 - RNA, 32 nt, Human
cuugaaccuaggaggcggagguugcagugagu

SEQ ID NO: 411424 - RNA, 32 nt, Human
cuugaaccuaggaggggaagguugcagugagc

SEQ ID NO: 411425 - RNA, 21 nt, Human
cuugaaccuaggaggucgagg

SEQ ID NO: 411426 - RNA, 32 nt, Human
cuugaaccuaggaggucgaggcugcagugagc

SEQ ID NO: 411427 - RNA, 32 nt, Human
cuugaaccuaggagguggagguugcagugagc

SEQ ID NO: 411428 - RNA, 32 nt, Human
cuugaaccuaggagguggagguugcauucaac

SEQ ID NO: 411429 - RNA, 21 nt, Human
cuugaaccuaggaguucgaga

SEQ ID NO: 411430 - RNA, 32 nt, Human
cuugaaccucaagcucucucuaaggagcuguu

SEQ ID NO: 411431 - RNA, 32 nt, Human
cuugaaccucagcggcggagguugcagugagu

SEQ ID NO: 411432 - RNA, 32 nt, Human
cuugaaccucggaggcggagguugcagugagc

SEQ ID NO: 411433 - RNA, 32 nt, Human
cuugaaccugagaaguggagguuguggugagc

SEQ ID NO: 411434 - RNA, 32 nt, Human
cuugaaccugagagacggagguugcagggagc

SEQ ID NO: 411435 - RNA, 32 nt, Human
cuugaaccugagaggcagagguuacagugagc

SEQ ID NO: 411436 - RNA, 32 nt, Human
cuugaaccugagaggcagagguugcagugagc

SEQ ID NO: 411437 - RNA, 32 nt, Human
cuugaaccugagaggcggagguugcagugagc

SEQ ID NO: 411438 - RNA, 32 nt, Human
cuugaaccugagaggugagguugcagugagcc

SEQ ID NO: 411439 - RNA, 32 nt, Human
cuugaaccugagagguggagguugcagugagc

SEQ ID NO: 411440 - RNA, 32 nt, Human
cuugaaccugagagguggagguuucagugagc

SEQ ID NO: 411441 - RNA, 32 nt, Human
cuugaaccugcgaggcagagauugcagugagc

SEQ ID NO: 411442 - RNA, 32 nt, Human
cuugaaccuggaaggcagagauugcagugagc

SEQ ID NO: 411443 - RNA, 32 nt, Human
cuugaaccuggaaggcagggguugcagugacc

SEQ ID NO: 411444 - RNA, 32 nt, Human
cuugaaccuggaaggcggagguugcagugagc

SEQ ID NO: 411445 - RNA, 32 nt, Human
cuugaaccuggcaaguguagguugcagugagc

SEQ ID NO: 411446 - RNA, 32 nt, Human
cuugaaccuggcaggcagagguugcagugagc

SEQ ID NO: 411447 - RNA, 32 nt, Human
cuugaaccuggcaggcagaguuugcagugaac

SEQ ID NO: 411448 - RNA, 32 nt, Human
cuugaaccuggcaggcggagguugcagugagc

SEQ ID NO: 411449 - RNA, 32 nt, Human
cuugaaccuggcagguggagguuacagugagc

SEQ ID NO: 411450 - RNA, 32 nt, Human
cuugaaccuggcagguggagguugcagugagu

SEQ ID NO: 411451 - RNA, 32 nt, Human
cuugaaccugggaagcagaggcuacagugagc

SEQ ID NO: 411452 - RNA, 32 nt, Human
cuugaaccugggaagcagagguugcagugagc

SEQ ID NO: 411453 - RNA, 32 nt, Human
cuugaaccugggaagcagaguuugcagugagc

SEQ ID NO: 411454 - RNA, 32 nt, Human
cuugaaccugggaagccgaaguagcagugagc

SEQ ID NO: 411455 - RNA, 32 nt, Human
cuugaaccugggaagucgaggcugcaagugag

SEQ ID NO: 411456 - RNA, 32 nt, Human
cuugaaccugggaagugcagguugcagugagc

SEQ ID NO: 411457 - RNA, 32 nt, Human
cuugaaccugggaaguggaggcugcagugagc

SEQ ID NO: 411458 - RNA, 32 nt, Human
cuugaaccugggagacagaaguuugcagugau

SEQ ID NO: 411459 - RNA, 32 nt, Human
cuugaaccugggagacagagguugcaaugaac

SEQ ID NO: 411460 - RNA, 32 nt, Human
cuugaaccugggagacagagguugcagugagc

SEQ ID NO: 411461 - RNA, 32 nt, Human
cuugaaccugggagacggagguugcagugagc

SEQ ID NO: 411462 - RNA, 32 nt, Human
cuugaaccugggagauggaaguugcagugaac

SEQ ID NO: 411463 - RNA, 32 nt, Human
cuugaaccugggagauggagauugcagugagc

SEQ ID NO: 411464 - RNA, 32 nt, Human
cuugaaccugggagauggaggcugcaguaagc

SEQ ID NO: 411465 - RNA, 32 nt, Human
cuugaaccugggagauggagguugcagagagc

SEQ ID NO: 411466 - RNA, 32 nt, Human
cuugaaccugggagauggggguuguagugagc

SEQ ID NO: 411467 - RNA, 32 nt, Human
cuugaaccugggagcaggagguugcagugagc

SEQ ID NO: 411468 - RNA, 32 nt, Human
cuugaaccugggagccugagguugcagugagc

SEQ ID NO: 411469 - RNA, 32 nt, Human
cuugaaccugggaggagaagguugcagugagc

SEQ ID NO: 411470 - RNA, 32 nt, Human
cuugaaccugggaggaggagguugcagugagc

SEQ ID NO: 411471 - RNA, 32 nt, Human
cuugaaccugggaggcaaagguugcagugagc

SEQ ID NO: 411472 - RNA, 32 nt, Human
cuugaaccugggaggcaaagguugcggugaac

SEQ ID NO: 411473 - RNA, 32 nt, Human
cuugaaccugggaggcagaaguugcagugaaa

SEQ ID NO: 411474 - RNA, 32 nt, Human
cuugaaccugggaggcagaaguugcagugagc

SEQ ID NO: 411475 - RNA, 32 nt, Human
cuugaaccugggaggcagaaguuguggugagc

SEQ ID NO: 411476 - RNA, 32 nt, Human
cuugaaccugggaggcagagauugcagugagc

SEQ ID NO: 411477 - RNA, 32 nt, Human
cuugaaccugggaggcagagggugcaguaagc

SEQ ID NO: 411478 - RNA, 32 nt, Human
cuugaaccugggaggcagagguuacaaugagc

SEQ ID NO: 411479 - RNA, 32 nt, Human
cuugaaccugggaggcagagguuacagugagc

SEQ ID NO: 411480 - RNA, 32 nt, Human
cuugaaccugggaggcagagguugcaaugagc

SEQ ID NO: 411481 - RNA, 32 nt, Human
cuugaaccugggaggcagagguugcagggaac

SEQ ID NO: 411482 - RNA, 32 nt, Human
cuugaaccugggaggcagagguugcaguaagc

SEQ ID NO: 411483 - RNA, 32 nt, Human
cuugaaccugggaggcagagguugcagugaac

SEQ ID NO: 411484 - RNA, 32 nt, Human
cuugaaccugggaggcagagguugcagugagc

SEQ ID NO: 411485 - RNA, 32 nt, Human
cuugaaccugggaggcagagguugcagugagg

SEQ ID NO: 411486 - RNA, 32 nt, Human
cuugaaccugggaggcagagguugcagugauc

SEQ ID NO: 411487 - RNA, 32 nt, Human
cuugaaccugggaggcagagguugccgugagc

SEQ ID NO: 411488 - RNA, 32 nt, Human
cuugaaccugggaggcagagguugcgguaagc

SEQ ID NO: 411489 - RNA, 32 nt, Human
cuugaaccugggaggcagagguuguagcgagc

SEQ ID NO: 411490 - RNA, 32 nt, Human
cuugaaccugggaggcagagguuguagugagc

SEQ ID NO: 411491 - RNA, 32 nt, Human
cuugaaccugggaggcagagguuguggugagc

SEQ ID NO: 411492 - RNA, 32 nt, Human
cuugaaccugggaggcagagguuucagugagc

SEQ ID NO: 411493 - RNA, 32 nt, Human
cuugaaccugggaggcagagucugcagugagc

SEQ ID NO: 411494 - RNA, 32 nt, Human
cuugaaccugggaggcagaguuuacagugagc

SEQ ID NO: 411495 - RNA, 32 nt, Human
cuugaaccugggaggcagaguuugcagugagc

SEQ ID NO: 411496 - RNA, 32 nt, Human
cuugaaccugggaggcagauguugcagugagc

SEQ ID NO: 411497 - RNA, 32 nt, Human
cuugaaccugggaggcagauguuguggugagc

SEQ ID NO: 411498 - RNA, 32 nt, Human
cuugaaccugggaggcagcgguugcaguaagc

SEQ ID NO: 411499 - RNA, 32 nt, Human
cuugaaccugggaggcagggguugcagugagc

SEQ ID NO: 411500 - RNA, 32 nt, Human
cuugaaccugggaggcaguuugcagugagcug

SEQ ID NO: 411501 - RNA, 32 nt, Human
cuugaaccugggaggccaagguugcagugagc

SEQ ID NO: 411502 - RNA, 32 nt, Human
cuugaaccugggaggcgaagguugcagugagc

SEQ ID NO: 411503 - RNA, 32 nt, Human
cuugaaccugggaggcgcagguugcagggagg

SEQ ID NO: 411504 - RNA, 32 nt, Human
cuugaaccugggaggcggaaguugcagugagc

SEQ ID NO: 411505 - RNA, 32 nt, Human
cuugaaccugggaggcggagauugcagugaac

SEQ ID NO: 411506 - RNA, 32 nt, Human
cuugaaccugggaggcggaggagguugcagug

SEQ ID NO: 411507 - RNA, 32 nt, Human
cuugaaccugggaggcggaggcugcagugagc

SEQ ID NO: 411508 - RNA, 32 nt, Human
cuugaaccugggaggcggagguuccagagagc

SEQ ID NO: 411509 - RNA, 32 nt, Human
cuugaaccugggaggcggagguugcaaugagc

SEQ ID NO: 411510 - RNA, 32 nt, Human
cuugaaccugggaggcggagguugcagggagc

SEQ ID NO: 411511 - RNA, 32 nt, Human
cuugaaccugggaggcggagguugcaguaagc

SEQ ID NO: 411512 - RNA, 32 nt, Human
cuugaaccugggaggcggagguugcagugagc

SEQ ID NO: 411513 - RNA, 32 nt, Human
cuugaaccugggaggcggagguugcagugagu

SEQ ID NO: 411514 - RNA, 32 nt, Human
cuugaaccugggaggcggagguugccgugagc

SEQ ID NO: 411515 - RNA, 32 nt, Human
cuugaaccugggaggcggagguugcggucagc

SEQ ID NO: 411516 - RNA, 32 nt, Human
cuugaaccugggaggcggagguugcggugagc

SEQ ID NO: 411517 - RNA, 32 nt, Human
cuugaaccugggaggcggagguugcugugagc

SEQ ID NO: 411518 - RNA, 32 nt, Human
cuugaaccugggaggcggagguuguagugagc

SEQ ID NO: 411519 - RNA, 32 nt, Human
cuugaaccugggaggcggagguuguggugagc

SEQ ID NO: 411520 - RNA, 32 nt, Human
cuugaaccugggaggcggauguugcuugcacu

SEQ ID NO: 411521 - RNA, 32 nt, Human
cuugaaccugggaggcugaaguugcagugagc

SEQ ID NO: 411522 - RNA, 32 nt, Human
cuugaaccugggaggcugagcuugcagugagc

SEQ ID NO: 411523 - RNA, 32 nt, Human
cuugaaccugggagggcggagguugcagugag

SEQ ID NO: 411524 - RNA, 32 nt, Human
cuugaaccugggagguacagguugcagugagc

SEQ ID NO: 411525 - RNA, 32 nt, Human
cuugaaccugggagguagaaguugcagugagc

SEQ ID NO: 411526 - RNA, 32 nt, Human
cuugaaccugggagguagagguugcacugagc

SEQ ID NO: 411527 - RNA, 32 nt, Human
cuugaaccugggagguagagguugcagugagc

SEQ ID NO: 411528 - RNA, 32 nt, Human
cuugaaccugggaggucaaagcggcagugagc

SEQ ID NO: 411529 - RNA, 32 nt, Human
cuugaaccugggaggucaaagcugcagucagc

SEQ ID NO: 411530 - RNA, 32 nt, Human
cuugaaccugggaggucaaggcuccagugaac

SEQ ID NO: 411531 - RNA, 32 nt, Human
cuugaaccugggaggugaagguugcugugggc

SEQ ID NO: 411532 - RNA, 32 nt, Human
cuugaaccugggagguggaagcugcagugagc

SEQ ID NO: 411533 - RNA, 32 nt, Human
cuugaaccugggagguggaaguugcagugagc

SEQ ID NO: 411534 - RNA, 32 nt, Human
cuugaaccugggagguggagacugcagugagc

SEQ ID NO: 411535 - RNA, 32 nt, Human
cuugaaccugggagguggagauugcagugagu

SEQ ID NO: 411536 - RNA, 32 nt, Human
cuugaaccugggagguggaggcagugagcuga

SEQ ID NO: 411537 - RNA, 32 nt, Human
cuugaaccugggagguggaggcuacagugagc

SEQ ID NO: 411538 - RNA, 32 nt, Human
cuugaaccugggagguggaggggaggcugcag

SEQ ID NO: 411539 - RNA, 32 nt, Human
cuugaaccugggagguggagguuacagugagc

SEQ ID NO: 411540 - RNA, 32 nt, Human
cuugaaccugggagguggagguuauagugagc

SEQ ID NO: 411541 - RNA, 32 nt, Human
cuugaaccugggagguggagguugcagcgagc

SEQ ID NO: 411542 - RNA, 32 nt, Human
cuugaaccugggagguggagguugcaguaagc

SEQ ID NO: 411543 - RNA, 32 nt, Human
cuugaaccugggagguggagguugcagugagc

SEQ ID NO: 411544 - RNA, 32 nt, Human
cuugaaccugggagguggagguugcagugagu

SEQ ID NO: 411545 - RNA, 32 nt, Human
cuugaaccugggagguggagguugcagugggc

SEQ ID NO: 411546 - RNA, 32 nt, Human
cuugaaccugggagguggagguugcauugagc

SEQ ID NO: 411547 - RNA, 32 nt, Human
cuugaaccugggagguggagguugcggugagc

SEQ ID NO: 411548 - RNA, 32 nt, Human
cuugaaccugggagguggagguugcugugagc

SEQ ID NO: 411549 - RNA, 32 nt, Human
cuugaaccugggagguggagguuguggugagc

SEQ ID NO: 411550 - RNA, 32 nt, Human
cuugaaccugggagguggagguuguggugagg

SEQ ID NO: 411551 - RNA, 32 nt, Human
cuugaaccugggagguggagguuucagugagc

SEQ ID NO: 411552 - RNA, 32 nt, Human
cuugaaccugggagguggaguugcagugagcc

SEQ ID NO: 411553 - RNA, 32 nt, Human
cuugaaccugggagguggauguugcagugagc

SEQ ID NO: 411554 - RNA, 32 nt, Human
cuugaaccugggaggugggaggcggaggagga

SEQ ID NO: 411555 - RNA, 32 nt, Human
cuugaaccugggagguggggguuucagugagc

SEQ ID NO: 411556 - RNA, 32 nt, Human
cuugaaccugggaggugggguccccaggcuua

SEQ ID NO: 411557 - RNA, 32 nt, Human
cuugaaccugggagguggugguugcagugagc

SEQ ID NO: 411558 - RNA, 32 nt, Human
cuugaaccugggaguuagagguugcagugagc

SEQ ID NO: 411559 - RNA, 32 nt, Human
cuugaaccugggaguuggagguugcagugaaa

SEQ ID NO: 411560 - RNA, 32 nt, Human
cuugaaccugggcggcagagguugcagugagu

SEQ ID NO: 411561 - RNA, 32 nt, Human
cuugaaccuggguggucgaggcugcagugagc

SEQ ID NO: 411562 - RNA, 32 nt, Human
cuugaaccugguaggcagagguugcagugagc

SEQ ID NO: 411563 - RNA, 32 nt, Human
cuugaaccugguaggcagagguuguagugagc

SEQ ID NO: 411564 - RNA, 32 nt, Human
cuugaaccugguagguggagguuucauugagc

SEQ ID NO: 411565 - RNA, 32 nt, Human
cuugaaccuguaaggcggagguugcagugagc

SEQ ID NO: 411566 - RNA, 32 nt, Human
cuugaaccugugagcugggaucgugccacugc

SEQ ID NO: 411567 - RNA, 32 nt, Human
cuugaaccugugaggaagagguugcagugagc

SEQ ID NO: 411568 - RNA, 32 nt, Human
cuugaaccugugaggcagagguugcagugagc

SEQ ID NO: 411569 - RNA, 32 nt, Human
cuugaaccugugggucagagguugcagugaac

SEQ ID NO: 411570 - RNA, 32 nt, Human
cuugaaccuugcuguccaucucucacacaacu

SEQ ID NO: 411571 - RNA, 32 nt, Human
cuugaaccuuggaggcagagguugcagugagc

SEQ ID NO: 411572 - RNA, 32 nt, Human
cuugaacgcgggaggcagagacugcagugagc

SEQ ID NO: 411573 - RNA, 32 nt, Human
cuugaacgugggaggcagaaguugcagugagc

SEQ ID NO: 411574 - RNA, 32 nt, Human
cuugaacgugggaggcagagguugcagugagc

SEQ ID NO: 411575 - RNA, 32 nt, Human
cuugaacgugggaggcagagguugcagugagu

SEQ ID NO: 411576 - RNA, 32 nt, Human
cuugaacgugggaggcggagguugcagcgagc

SEQ ID NO: 411577 - RNA, 32 nt, Human
cuugaacgugggaggcggagguuguagugagc

SEQ ID NO: 411578 - RNA, 32 nt, Human
cuugaacucagaaggcagagguugcaguggaa

SEQ ID NO: 411579 - RNA, 32 nt, Human
cuugaacucagaagguggagguugcagugagg

SEQ ID NO: 411580 - RNA, 32 nt, Human
cuugaacucaggagauggagguuucagugagc

SEQ ID NO: 411581 - RNA, 32 nt, Human
cuugaacucaggaggcagaaguugcgguuagc

SEQ ID NO: 411582 - RNA, 32 nt, Human
cuugaacucaggaggcagaaguuucuguaaac

SEQ ID NO: 411583 - RNA, 32 nt, Human
cuugaacucaggaggcggagguugcggugagc

SEQ ID NO: 411584 - RNA, 32 nt, Human
cuugaacucaggagguggagguugcagugagc

SEQ ID NO: 411585 - RNA, 32 nt, Human
cuugaacucaggagguggagguugcggugagc

SEQ ID NO: 411586 - RNA, 21 nt, Human
cuugaacucaggaguucaaga

SEQ ID NO: 411587 - RNA, 21 nt, Human
cuugaacucaggaguuggaga

SEQ ID NO: 411588 - RNA, 21 nt, Human
cuugaacucaggaguuugaga

SEQ ID NO: 411589 - RNA, 32 nt, Human
cuugaacucagguggcagagguugcagugagc

SEQ ID NO: 411590 - RNA, 32 nt, Human
cuugaacucccagggucccccuacaugugugc

SEQ ID NO: 411591 - RNA, 32 nt, Human
cuugaacuccuggccucaguugagccacugug

SEQ ID NO: 411592 - RNA, 32 nt, Human
cuugaacucgggaggaagagguugcagugagc

SEQ ID NO: 411593 - RNA, 32 nt, Human
cuugaacucgggaggcagagguugcagugagc

SEQ ID NO: 411594 - RNA, 32 nt, Human
cuugaacucgggaggcagagguuucagggagc

SEQ ID NO: 411595 - RNA, 32 nt, Human
cuugaacucgggaggcgaagguugcagugagc

SEQ ID NO: 411596 - RNA, 32 nt, Human
cuugaacucgggaggcggagguugcagugagc

SEQ ID NO: 411597 - RNA, 32 nt, Human
cuugaacucgggaggugaaaguugcagugagc

SEQ ID NO: 411598 - RNA, 32 nt, Human
cuugaacucgggagguggagauugcaguaagc

SEQ ID NO: 411599 - RNA, 32 nt, Human
cuugaacucgggagguggagguggcagugagc

SEQ ID NO: 411600 - RNA, 32 nt, Human
cuugaacucgggagguggagguugcagucagc

SEQ ID NO: 411601 - RNA, 32 nt, Human
cuugaacucgggagguggagguugcagugagc

SEQ ID NO: 411602 - RNA, 32 nt, Human
cuugaacucgggagguggagguugugaugugc

SEQ ID NO: 411603 - RNA, 21 nt, Human
cuugaacucgggaguucgaga

SEQ ID NO: 411604 - RNA, 32 nt, Human
cuugaacucgggugggggagguugcaaugagc

SEQ ID NO: 411605 - RNA, 32 nt, Human
cuugaacugaggagguggagguugcagugagc

SEQ ID NO: 411606 - RNA, 32 nt, Human
cuugaacugaggcagaggcuacagugagugga

SEQ ID NO: 411607 - RNA, 32 nt, Human
cuugaacuggggaggagaagguugcagugagc

SEQ ID NO: 411608 - RNA, 32 nt, Human
cuugaacuggggaggcagagguugcagugaga

SEQ ID NO: 411609 - RNA, 32 nt, Human
cuugaacuggggaggcagagguugcaguggcc

SEQ ID NO: 411610 - RNA, 32 nt, Human
cuugaacuggggaggcagagguugcggugagc

SEQ ID NO: 411611 - RNA, 32 nt, Human
cuugaacuguuuuaucuaaccucucuuuuucu

SEQ ID NO: 411612 - RNA, 32 nt, Human
cuugaacuucuugcaauaguaacugaaugucc

SEQ ID NO: 411613 - RNA, 32 nt, Human
cuugaacuugccucuuuuaccugcugcuucuc

SEQ ID NO: 411614 - RNA, 32 nt, Human
cuugaacuugggaggcagagguuguggugagc

SEQ ID NO: 411615 - RNA, 32 nt, Human
cuugaacuugggaggcagagguuucagugagc

SEQ ID NO: 411616 - RNA, 32 nt, Human
cuugaacuugggaggcggagguugcagugagc

SEQ ID NO: 411617 - RNA, 32 nt, Human
cuugaacuugggagggagagguugcagugagc

SEQ ID NO: 411618 - RNA, 32 nt, Human
cuugaacuugggagggguagguugcagugagc

SEQ ID NO: 411619 - RNA, 32 nt, Human
cuugaacuugggagguggagguugcagugagc

SEQ ID NO: 411620 - RNA, 32 nt, Human
cuugaacuugggagguggagguugcagugggc

SEQ ID NO: 411621 - RNA, 32 nt, Human
cuugaacuugugggguggagguugcagugagc

SEQ ID NO: 411622 - RNA, 32 nt, Human
cuugaagaaagaggagucagcuugcucucuau

SEQ ID NO: 411623 - RNA, 32 nt, Human
cuugaagaacuccugcaucucugcuugcaucu

SEQ ID NO: 411624 - RNA, 32 nt, Human
cuugaagaccugcuguaguuagauaugggcuu

SEQ ID NO: 411625 - RNA, 19 nt, Human
cuugaagagagcucugcuu

SEQ ID NO: 411626 - RNA, 32 nt, Human
cuugaagagauggauagucaagaugcugagau

SEQ ID NO: 411627 - RNA, 32 nt, Human
cuugaagagaugguuuugcugcucuccuugag

SEQ ID NO: 411628 - RNA, 32 nt, Human
cuugaagagcuuccucccucccaaaccugggu

SEQ ID NO: 411629 - RNA, 32 nt, Human
cuugaagauagaggggccauguggaaaucaag

SEQ ID NO: 411630 - RNA, 32 nt, Human
cuugaagaugcugaaacaggagagaaagggga

SEQ ID NO: 411631 - RNA, 32 nt, Human
cuugaagcaacaaagcagccacaguuucagac

SEQ ID NO: 411632 - RNA, 32 nt, Human
cuugaagcauggucagcagcagagagagcaac

SEQ ID NO: 411633 - RNA, 32 nt, Human
cuugaagccaggaggcagagguugcaguuagc

SEQ ID NO: 411634 - RNA, 32 nt, Human
cuugaagccaggaggcggagguugcagugagc

SEQ ID NO: 411635 - RNA, 21 nt, Human
cuugaagccaggaguucaaga

SEQ ID NO: 411636 - RNA, 32 nt, Human
cuugaagccaggaguucaagaccagccuggcc

SEQ ID NO: 411637 - RNA, 32 nt, Human
cuugaagccaggaguuccagaccagccugggc

SEQ ID NO: 411638 - RNA, 32 nt, Human
cuugaagccaggaguuggagaccagccuaggc

SEQ ID NO: 411639 - RNA, 32 nt, Human
cuugaagccaggaguuugagaccagcuuggau

SEQ ID NO: 411640 - RNA, 32 nt, Human
cuugaagccaggaguuugggaccagccugggc

SEQ ID NO: 411641 - RNA, 32 nt, Human
cuugaagccgcggcgaaccucuuccuacccua

SEQ ID NO: 411642 - RNA, 32 nt, Human
cuugaagccgggaggcggaaguuguggugagc

SEQ ID NO: 411643 - RNA, 32 nt, Human
cuugaagccgggagguggggguugcagugagc

SEQ ID NO: 411644 - RNA, 32 nt, Human
cuugaagccuaagguugaaaucaaagagugug

SEQ ID NO: 411645 - RNA, 32 nt, Human
cuugaagccuggaggcggaggcugcacugagc

SEQ ID NO: 411646 - RNA, 32 nt, Human
cuugaagcugggaggcggagguugcagugagc

SEQ ID NO: 411647 - RNA, 32 nt, Human
cuugaagcuucucaaaggcagacacagccgcg

SEQ ID NO: 411648 - RNA, 32 nt, Human
cuugaaggaaccuggucagucuccgguucagc

SEQ ID NO: 411649 - RNA, 32 nt, Human
cuugaaggaauacucacauacaugguuugaaa

SEQ ID NO: 411650 - RNA, 32 nt, Human
cuugaaggacaucuuccuucucaguauacccu

SEQ ID NO: 411651 - RNA, 32 nt, Human
cuugaaggagaaacagccccgguguggagagg

SEQ ID NO: 411652 - RNA, 32 nt, Human
cuugaaggagcagaagguguuugcuagacaaa

SEQ ID NO: 411653 - RNA, 32 nt, Human
cuugaaggcacacacauacacauauuuucagu

SEQ ID NO: 411654 - RNA, 32 nt, Human
cuugaaggccgaggcagguggaucaccugagg

SEQ ID NO: 411655 - RNA, 32 nt, Human
cuugaagggaaagacugggcggagagaaggag

SEQ ID NO: 411656 - RNA, 32 nt, Human
cuugaagggacagcauugccagcugcugcuga

SEQ ID NO: 411657 - RNA, 32 nt, Human
cuugaagggcugggcucuugccuuccuggagu

SEQ ID NO: 411658 - RNA, 32 nt, Human
cuugaaggguauaaagaauuuagaucaugccu

SEQ ID NO: 411659 - RNA, 32 nt, Human
cuugaaggucuaggugcuuuaaccucacauac

SEQ ID NO: 411660 - RNA, 32 nt, Human
cuugaaggucugucuuccaucuggcaccauaa

SEQ ID NO: 411661 - RNA, 32 nt, Human
cuugaagguucagaaccucugcagggaagggg

SEQ ID NO: 411662 - RNA, 32 nt, Human
cuugaaguacuaggaggaaaggugcuuugugu

SEQ ID NO: 411663 - RNA, 32 nt, Human
cuugaaguagacugagaagaauccacgaggug

SEQ ID NO: 411664 - RNA, 32 nt, Human
cuugaaguagggaggaggagguugcagugagc

SEQ ID NO: 411665 - RNA, 32 nt, Human
cuugaagucagcaggaccagaaacccacggga

SEQ ID NO: 411666 - RNA, 32 nt, Human
cuugaagucaucucaagaacaaaagacaacug

SEQ ID NO: 411667 - RNA, 32 nt, Human
cuugaaguccuaaaccacaccucagucacuaa

SEQ ID NO: 411668 - RNA, 32 nt, Human
cuugaauaaagugggugagucuuagaccuauc

SEQ ID NO: 411669 - RNA, 32 nt, Human
cuugaauaaggugaagaauuucacacaacaua

SEQ ID NO: 411670 - RNA, 19 nt, Human
cuugaauacagacaggagg

SEQ ID NO: 411671 - RNA, 32 nt, Human
cuugaauaccaucagaagaaacucagugaagu

SEQ ID NO: 411672 - RNA, 32 nt, Human
cuugaauauaaauaucaggaaucaugcaauua

SEQ ID NO: 411673 - RNA, 32 nt, Human
cuugaauauaggaggcagagguugcagugagc

SEQ ID NO: 411674 - RNA, 32 nt, Human
cuugaaucaacuucuuauuuugcucauaaaac

SEQ ID NO: 411675 - RNA, 32 nt, Human
cuugaaucacauagggagaaacguuauacucc

SEQ ID NO: 411676 - RNA, 32 nt, Human
cuugaaucagggaggcggagguuguggugagc

SEQ ID NO: 411677 - RNA, 32 nt, Human
cuugaaucaucuuggaucugggagaaggaaaa

SEQ ID NO: 411678 - RNA, 32 nt, Human
cuugaauccagaaggcggagguugcagugagc

SEQ ID NO: 411679 - RNA, 32 nt, Human
cuugaauccagcucagugcucuggguggcccc

SEQ ID NO: 411680 - RNA, 32 nt, Human
cuugaauccaggaagcaagcggagguugcagu

SEQ ID NO: 411681 - RNA, 32 nt, Human
cuugaauccaggaagcagagguugcggugagc

SEQ ID NO: 411682 - RNA, 32 nt, Human
cuugaauccaggaggaggagguugcagugagc

SEQ ID NO: 411683 - RNA, 32 nt, Human
cuugaauccaggaggcagaggcuguggugagc

SEQ ID NO: 411684 - RNA, 32 nt, Human
cuugaauccaggaggcagagguugcaaugagc

SEQ ID NO: 411685 - RNA, 32 nt, Human
cuugaauccaggaggcagagguugcagugagu

SEQ ID NO: 411686 - RNA, 32 nt, Human
cuugaauccaggaggcgaagguugcagugagc

SEQ ID NO: 411687 - RNA, 32 nt, Human
cuugaauccaggaggcggagguugcagugaac

SEQ ID NO: 411688 - RNA, 32 nt, Human
cuugaauccaggaggcggagguugcagugagc

SEQ ID NO: 411689 - RNA, 32 nt, Human
cuugaauccaggagguggagguugcagcgagc

SEQ ID NO: 411690 - RNA, 32 nt, Human
cuugaauccaggaguacgagaccacccugggc

SEQ ID NO: 411691 - RNA, 32 nt, Human
cuugaauccaggaguuagaccagccugggcaa

SEQ ID NO: 411692 - RNA, 32 nt, Human
cuugaauccaggaguucaagaccagcaugggg

SEQ ID NO: 411693 - RNA, 32 nt, Human
cuugaauccagguggcggagguugcagugagc

SEQ ID NO: 411694 - RNA, 32 nt, Human
cuugaaucccaggagacagagguugcagugag

SEQ ID NO: 411695 - RNA, 32 nt, Human
cuugaauccccgaggcggagguugcacugagc

SEQ ID NO: 411696 - RNA, 32 nt, Human
cuugaaucccugaggcagagguugcagugagc

SEQ ID NO: 411697 - RNA, 32 nt, Human
cuugaauccgggaggcagagauugcagugggc

SEQ ID NO: 411698 - RNA, 32 nt, Human
cuugaauccgggaggcagagguugcaggagcu

SEQ ID NO: 411699 - RNA, 32 nt, Human
cuugaauccgggaggcggagguugcagugaac

SEQ ID NO: 411700 - RNA, 32 nt, Human
cuugaauccgggaggcggagguugcggugagc

SEQ ID NO: 411701 - RNA, 32 nt, Human
cuugaauccgggagguggagguugcagugagc

SEQ ID NO: 411702 - RNA, 32 nt, Human
cuugaauccgugagguggagguuguagugagu

SEQ ID NO: 411703 - RNA, 32 nt, Human
cuugaauccucuauuaauuacugugugugagc

SEQ ID NO: 411704 - RNA, 32 nt, Human
cuugaauccuggaggcagagguugcagugagc

SEQ ID NO: 411705 - RNA, 32 nt, Human
cuugaauccuuuaacauccaccaggaaguuuu

SEQ ID NO: 411706 - RNA, 32 nt, Human
cuugaaucuaagaagcagagguugcagugagc

SEQ ID NO: 411707 - RNA, 32 nt, Human
cuugaaucuaggaggcagagguugcagugaac

SEQ ID NO: 411708 - RNA, 32 nt, Human
cuugaaucucuuccuguuucccuuaggacgac

SEQ ID NO: 411709 - RNA, 32 nt, Human
cuugaaucugagagauggaggcugcagugagc

SEQ ID NO: 411710 - RNA, 32 nt, Human
cuugaaucugggaggcagagguugcagugagc

SEQ ID NO: 411711 - RNA, 32 nt, Human
cuugaaucugggaggcagagguugcugugagc

SEQ ID NO: 411712 - RNA, 32 nt, Human
cuugaaucugggaggcggagauugcagugagc

SEQ ID NO: 411713 - RNA, 32 nt, Human
cuugaaucugggaggcggagguugcagugagc

SEQ ID NO: 411714 - RNA, 32 nt, Human
cuugaaucugggagguggagguugcagugagc

SEQ ID NO: 411715 - RNA, 32 nt, Human
cuugaaucuguuccuccucgaaugacccugua

SEQ ID NO: 411716 - RNA, 32 nt, Human
cuugaaucuuccgcuuccuccccaccgauuuc

SEQ ID NO: 411717 - RNA, 32 nt, Human
cuugaaugcaauauuuguuuauuccaaaagaa

SEQ ID NO: 411718 - RNA, 32 nt, Human
cuugaaugcuuugccauauucaggacagagac

SEQ ID NO: 411719 - RNA, 32 nt, Human
cuugaauggaaccuacuaaaaagagagaugaa

SEQ ID NO: 411720 - RNA, 32 nt, Human
cuugaaugguggagggaggcaguggggagaaa

SEQ ID NO: 411721 - RNA, 32 nt, Human
cuugaaugugggaggcggagguugcagugagu

SEQ ID NO: 411722 - RNA, 32 nt, Human
cuugaauuagaaacacaaacacugccuuuauu

SEQ ID NO: 411723 - RNA, 32 nt, Human
cuugaauucaggaggcggagguugcagugagc

SEQ ID NO: 411724 - RNA, 32 nt, Human
cuugaauucaggagguggagguugcagugagc

SEQ ID NO: 411725 - RNA, 32 nt, Human
cuugaauucgggagguggagguugcagugagc

SEQ ID NO: 411726 - RNA, 32 nt, Human
cuugaauucuaugcuaagcaggguuccaagua

SEQ ID NO: 411727 - RNA, 21 nt, Human
cuugaauugggaggggggcag

SEQ ID NO: 411728 - RNA, 32 nt, Human
cuugaauuggggaggcggagguugcagugagc

SEQ ID NO: 411729 - RNA, 32 nt, Human
cuugaauuuucauucugccauugacuuggcau

SEQ ID NO: 411730 - RNA, 32 nt, Human
cuugaauuuuucuuccucuccacuucuuagag

SEQ ID NO: 411731 - RNA, 32 nt, Human
cuugacaaagagacgggggugugaacugggca

SEQ ID NO: 411732 - RNA, 32 nt, Human
cuugacaacaacccagcugaggggagcaggca

SEQ ID NO: 411733 - RNA, 32 nt, Human
cuugacaacacaccuuaggaacaugugcuaag

SEQ ID NO: 411734 - RNA, 32 nt, Human
cuugacaacaggcgcauccucccaggccacca

SEQ ID NO: 411735 - RNA, 32 nt, Human
cuugacaacauggugaaaccccaucucuggua

SEQ ID NO: 411736 - RNA, 32 nt, Human
cuugacaacuauucacccuaccucagaucaua

SEQ ID NO: 411737 - RNA, 32 nt, Human
cuugacaacuggaugacuuuugagaacaaaga

SEQ ID NO: 411738 - RNA, 32 nt, Human
cuugacaauugugcuaaugacaaaguugucau

SEQ ID NO: 411739 - RNA, 19 nt, Human
cuugacacagguucugcug

SEQ ID NO: 411740 - RNA, 32 nt, Human
cuugacaccacugaugucgagugugcgggugu

SEQ ID NO: 411741 - RNA, 32 nt, Human
cuugacaccaggaguuagagagcagccugggc

SEQ ID NO: 411742 - RNA, 32 nt, Human
cuugacacugccuccugggagcaucguccugu

SEQ ID NO: 411743 - RNA, 32 nt, Human
cuugacagacucaagagaaacuacccagguau

SEQ ID NO: 411744 - RNA, 32 nt, Human
cuugacagaguuacucuuucagaagcuaaaua

SEQ ID NO: 411745 - RNA, 32 nt, Human
cuugacagaucuuuuucaacucaaauuaaugg

SEQ ID NO: 411746 - RNA, 32 nt, Human
cuugacaggcagcugggcaucagugcagcuga

SEQ ID NO: 411747 - RNA, 32 nt, Human
cuugacagggucuugcucugucauucaggcaa

SEQ ID NO: 411748 - RNA, 32 nt, Human
cuugacaggguuucaccauguuggcuaggaua

SEQ ID NO: 411749 - RNA, 18 nt, Human
cuugacagucagcugggc

SEQ ID NO: 411750 - RNA, 32 nt, Human
cuugacaugguggcucacgccuguaaucccuu

SEQ ID NO: 411751 - RNA, 22 nt, Human
cuugacauguagcuucuucuga

SEQ ID NO: 411752 - RNA, 32 nt, Human
cuugacauuguggguuacauugccagaaaugu

SEQ ID NO: 411753 - RNA, 32 nt, Human
cuugacauuuugauucuccagccugggcaacg

SEQ ID NO: 411754 - RNA, 32 nt, Human
cuugaccaagcaggaagcucagacugguugag

SEQ ID NO: 411755 - RNA, 32 nt, Human
cuugaccagaagcaguuuucgcaagugaugcu

SEQ ID NO: 411756 - RNA, 32 nt, Human
cuugaccagcacugcuucauccaagcugcuga

SEQ ID NO: 411757 - RNA, 32 nt, Human
cuugaccaguacaguucccaugaauucaaggu

SEQ ID NO: 411758 - RNA, 32 nt, Human
cuugaccauccucugacuuccugggccccuag

SEQ ID NO: 411759 - RNA, 32 nt, Human
cuugaccauguuugggcauggaggcuugcccc

SEQ ID NO: 411760 - RNA, 32 nt, Human
cuugaccauuguguggccacacuugcuagauu

SEQ ID NO: 411761 - RNA, 32 nt, Human
cuugacccagaaguccagaagggucaucugcc

SEQ ID NO: 411762 - RNA, 32 nt, Human
cuugacccaggaggcagagguugcagugagcc

SEQ ID NO: 411763 - RNA, 32 nt, Human
cuugacccaggaggcggagguugcggugaccc

SEQ ID NO: 411764 - RNA, 32 nt, Human
cuugacccaggagguggaggucgcagugagcc

SEQ ID NO: 411765 - RNA, 32 nt, Human
cuugacccaggaguucaagaccagccuggcca

SEQ ID NO: 411766 - RNA, 32 nt, Human
cuugaccccaggagguggacauugcagugagc

SEQ ID NO: 411767 - RNA, 32 nt, Human
cuugaccccaggaguucaagaccagccugggc

SEQ ID NO: 411768 - RNA, 32 nt, Human
cuugaccccaggccccugcuucucccucuagg

SEQ ID NO: 411769 - RNA, 32 nt, Human
cuugaccccaggugguggagguugcagugagc

SEQ ID NO: 411770 - RNA, 32 nt, Human
cuugaccccgggagguggaggcugcagugagu

SEQ ID NO: 411771 - RNA, 32 nt, Human
cuugacccugagagguagaggcugcauugagc

SEQ ID NO: 411772 - RNA, 32 nt, Human
cuugacccugauaccugcaccaugcuucaugg

SEQ ID NO: 411773 - RNA, 32 nt, Human
cuugacccugcaggaggagcuuggacuggccc

SEQ ID NO: 411774 - RNA, 32 nt, Human
cuugacccugggagguggagguggcagugagc

SEQ ID NO: 411775 - RNA, 32 nt, Human
cuugacccuuaccaaaccacagagaauccaaa

SEQ ID NO: 411776 - RNA, 32 nt, Human
cuugaccgggagacagagguugcagugagcug

SEQ ID NO: 411777 - RNA, 32 nt, Human
cuugaccgggaugaggcccacagacagguugu

SEQ ID NO: 411778 - RNA, 32 nt, Human
cuugaccguuuaaagcccauguuuucaaagca

SEQ ID NO: 411779 - RNA, 32 nt, Human
cuugaccuaaagucaaaggaccuguguagcau

SEQ ID NO: 411780 - RNA, 31 nt, Human
cuugaccuagauaaauacacuuugagaaauc

SEQ ID NO: 411781 - RNA, 32 nt, Human
cuugaccuaggugcccuuucugcuacaugcaa

SEQ ID NO: 411782 - RNA, 32 nt, Human
cuugaccucaggaggcggagguugcagugagc

SEQ ID NO: 411783 - RNA, 32 nt, Human
cuugaccucuuggcuuuuaccaaaggauguuu

SEQ ID NO: 411784 - RNA, 32 nt, Human
cuugaccugauguaauaaaaacugauaaaagc

SEQ ID NO: 411785 - RNA, 32 nt, Human
cuugaccugcauuccuagaauuucuuuguugc

SEQ ID NO: 411786 - RNA, 20 nt, Human
cuugaccugggaagacgccu

SEQ ID NO: 411787 - RNA, 32 nt, Human
cuugaccuuccagccugccaaguagcugggau

SEQ ID NO: 411788 - RNA, 32 nt, Human
cuugaccuugauaagaggccgccugcacacag

SEQ ID NO: 411789 - RNA, 32 nt, Human
cuugacgaccuuaaaaaggguuagauugacau

SEQ ID NO: 411790 - RNA, 23 nt, Human
cuugacgacuuccccucccacca

SEQ ID NO: 411791 - RNA, 32 nt, Human
cuugacgcuaucucccaucaccucugcuaucc

SEQ ID NO: 411792 - RNA, 32 nt, Human
cuugacgggaagcggagguugcagugagccga

SEQ ID NO: 411793 - RNA, 18 nt, Human
cuugacgguggggcguag

SEQ ID NO: 411794 - RNA, 32 nt, Human
cuugacgucacucaaagacaggccccaauccc

SEQ ID NO: 411795 - RNA, 21 nt, Human
cuugacgucaggaguucgaga

SEQ ID NO: 411796 - RNA, 32 nt, Human
cuugacguuaguaauuguuaaaggaauggcaa

SEQ ID NO: 411797 - RNA, 32 nt, Human
cuugacguuggcuugcuuuggggaugacuguc

SEQ ID NO: 411798 - RNA, 32 nt, Human
cuugacuaagaguagcuugaaggaggcaccau

SEQ ID NO: 411799 - RNA, 32 nt, Human
cuugacuaccuuucaaaaccagcacugugugg

SEQ ID NO: 411800 - RNA, 32 nt, Human
cuugacuauugaaaugcgaaaaauuagauuga

SEQ ID NO: 411801 - RNA, 32 nt, Human
cuugacucaauugauccucccaucucagccuc

SEQ ID NO: 411802 - RNA, 32 nt, Human
cuugacucacugcaacaucugccucccggguu

SEQ ID NO: 411803 - RNA, 32 nt, Human
cuugacucacugcaaccuccaccucccagguu

SEQ ID NO: 411804 - RNA, 32 nt, Human
cuugacucacugcaaccuccgccucacagcuu

SEQ ID NO: 411805 - RNA, 32 nt, Human
cuugacucacugcaaccuccgccucccagguu

SEQ ID NO: 411806 - RNA, 32 nt, Human
cuugacucacugcaaccucugccucccagguu

SEQ ID NO: 411807 - RNA, 32 nt, Human
cuugacucacugcaaccucugccucucggguu

SEQ ID NO: 411808 - RNA, 32 nt, Human
cuugacucacugcaacuucugccacccagguu

SEQ ID NO: 411809 - RNA, 32 nt, Human
cuugacucacugcaaucuccaccucccacagg

SEQ ID NO: 411810 - RNA, 32 nt, Human
cuugacucacugcaauucugccuccuggguuc

SEQ ID NO: 411811 - RNA, 32 nt, Human
cuugacucacugcagccucaaccucccaggcu

SEQ ID NO: 411812 - RNA, 32 nt, Human
cuugacucauccugcaaaccccugccaccccu

SEQ ID NO: 411813 - RNA, 32 nt, Human
cuugacuccaggaggcgcaggcugcagugagc

SEQ ID NO: 411814 - RNA, 32 nt, Human
cuugacuccaggggagaugaccugggggagga

SEQ ID NO: 411815 - RNA, 32 nt, Human
cuugacucccaaagugcugaaauuacaggcau

SEQ ID NO: 411816 - RNA, 32 nt, Human
cuugacuccuugugguuuaugucaucauacau

SEQ ID NO: 411817 - RNA, 32 nt, Human
cuugacucucccuccacccugccuccucgggc

SEQ ID NO: 411818 - RNA, 32 nt, Human
cuugacucugggaacagcugcuacccccaaga

SEQ ID NO: 411819 - RNA, 32 nt, Human
cuugacucugggaagaaaucuucugagcagac

SEQ ID NO: 411820 - RNA, 32 nt, Human
cuugacugccagugaagauggaccugcucuua

SEQ ID NO: 411821 - RNA, 31 nt, Human
cuugacugccucucucuuaccuguucaguuu

SEQ ID NO: 411822 - RNA, 32 nt, Human
cuugacuggcuucaguuccucucagcgcuccu

SEQ ID NO: 411823 - RNA, 32 nt, Human
cuugacugggcuggauggucaagauagccucu

SEQ ID NO: 411824 - RNA, 32 nt, Human
cuugacuguaggagccagaaggggacccaggu

SEQ ID NO: 411825 - RNA, 32 nt, Human
cuugacuguggcauugcacucugcacuguuuc

SEQ ID NO: 411826 - RNA, 32 nt, Human
cuugacugugguucuuuguggcaagauacuuu

SEQ ID NO: 411827 - RNA, 32 nt, Human
cuugacuguuucccuauuccucuccuuagaac

SEQ ID NO: 411828 - RNA, 32 nt, Human
cuugacuucccaaagugcugggauuaugggcg

SEQ ID NO: 411829 - RNA, 32 nt, Human
cuugacuucccaggcucaggcucaggugaucc

SEQ ID NO: 411830 - RNA, 32 nt, Human
cuugacuugcguuagaguguacucugaaacca

SEQ ID NO: 411831 - RNA, 32 nt, Human
cuugacuuguguguguuucugaaguguucgag

SEQ ID NO: 411832 - RNA, 32 nt, Human
cuugacuuuccacaguccugagguucccaaaa

SEQ ID NO: 411833 - RNA, 32 nt, Human
cuugacuuuccaggcccggagcagaaaggcau

SEQ ID NO: 411834 - RNA, 32 nt, Human
cuugacuuuuccccagcaucacaaacagccau

SEQ ID NO: 411835 - RNA, 32 nt, Human
cuugagaaaugagaauguguaaguggauugga

SEQ ID NO: 411836 - RNA, 19 nt, Human
cuugagaagccagcggggc

SEQ ID NO: 411837 - RNA, 32 nt, Human
cuugagaaggguucgcugccaggccuucgagu

SEQ ID NO: 411838 - RNA, 32 nt, Human
cuugagaauaggaggggagaucaaagaagaca

SEQ ID NO: 411839 - RNA, 32 nt, Human
cuugagaaugucccuuccauuucugagaacaa

SEQ ID NO: 411840 - RNA, 32 nt, Human
cuugagacaggccuggccaaccuggugacucu

SEQ ID NO: 411841 - RNA, 32 nt, Human
cuugagacaugggguuuggcugucuugcagga

SEQ ID NO: 411842 - RNA, 32 nt, Human
cuugagacauuuugaaagcagaaggaaaggag

SEQ ID NO: 411843 - RNA, 32 nt, Human
cuugagaccagccugagcaacacagcaagacc

SEQ ID NO: 411844 - RNA, 32 nt, Human
cuugagaccagccugagcaacauggcgaaacc

SEQ ID NO: 411845 - RNA, 32 nt, Human
cuugagaccagccuggccaaaauggugaaacu

SEQ ID NO: 411846 - RNA, 32 nt, Human
cuugagaccagccugggcaacaggcuauuuuu

SEQ ID NO: 411847 - RNA, 32 nt, Human
cuugagaccagccugggcaacauggcaaaaac

SEQ ID NO: 411848 - RNA, 32 nt, Human
cuugagaccagccugggcaacauggugaaacc

SEQ ID NO: 411849 - RNA, 32 nt, Human
cuugagaccagccuggggaacauagugagacc

SEQ ID NO: 411850 - RNA, 32 nt, Human
cuugagaccagccugggugacacagcaagacc

SEQ ID NO: 411851 - RNA, 32 nt, Human
cuugagaccagcuugggcaacauggcaaagcc

SEQ ID NO: 411852 - RNA, 32 nt, Human
cuugagaccaggaaguugaggcugcaaugagc

SEQ ID NO: 411853 - RNA, 21 nt, Human
cuugagaccaggaguucaaga

SEQ ID NO: 411854 - RNA, 32 nt, Human
cuugagaccaggaguucaagaccagccugaga

SEQ ID NO: 411855 - RNA, 32 nt, Human
cuugagaccaggaguucaagaccagccugggc

SEQ ID NO: 411856 - RNA, 21 nt, Human
cuugagaccaggaguucgaga

SEQ ID NO: 411857 - RNA, 32 nt, Human
cuugagaccaggaguucgagaccagccugaga

SEQ ID NO: 411858 - RNA, 32 nt, Human
cuugagaccaggaguucgagaccagccuggcc

SEQ ID NO: 411859 - RNA, 32 nt, Human
cuugagaccaggaguucgagaccagccugggc

SEQ ID NO: 411860 - RNA, 32 nt, Human
cuugagaccaggaguuugagaccagccuaggc

SEQ ID NO: 411861 - RNA, 32 nt, Human
cuugagaccaggaguuugggaccaaccugagc

SEQ ID NO: 411862 - RNA, 32 nt, Human
cuugagaccaggaguuugggaccaggcugggc

SEQ ID NO: 411863 - RNA, 32 nt, Human
cuugagaccauuucaaacuggagagaagcaag

SEQ ID NO: 411864 - RNA, 32 nt, Human
cuugagacucaccaauuucuggccuguucagg

SEQ ID NO: 411865 - RNA, 32 nt, Human
cuugagacugagaguuggaggcugcgaugagc

SEQ ID NO: 411866 - RNA, 32 nt, Human
cuugagacuggagccccgcggugcagggcagu

SEQ ID NO: 411867 - RNA, 32 nt, Human
cuugagacugggaggcagagguugcagugaac

SEQ ID NO: 411868 - RNA, 32 nt, Human
cuugagacuuuguguguaugggggacuuguau

SEQ ID NO: 411869 - RNA, 32 nt, Human
cuugagagaaggcagaggugguccgugggaaa

SEQ ID NO: 411870 - RNA, 32 nt, Human
cuugagagacaccugcaucuauaauccccgcc

SEQ ID NO: 411871 - RNA, 32 nt, Human
cuugagagacacugggacacugucagugcuag

SEQ ID NO: 411872 - RNA, 32 nt, Human
cuugagagagaagggcaggguggucuacucac

SEQ ID NO: 411873 - RNA, 32 nt, Human
cuugagagaguguggcucugucaccaaggcug

SEQ ID NO: 411874 - RNA, 21 nt, Human
cuugagagcccuccucuucua

SEQ ID NO: 411875 - RNA, 32 nt, Human
cuugagagcggcggccagggaggugcggagca

SEQ ID NO: 411876 - RNA, 32 nt, Human
cuugagagcugcggccagggaggugcggagca

SEQ ID NO: 411877 - RNA, 32 nt, Human
cuugagaggaagaggaguccaggcagccacag

SEQ ID NO: 411878 - RNA, 32 nt, Human
cuugagaggacauacuuuuccagccucauggg

SEQ ID NO: 411879 - RNA, 32 nt, Human
cuugagagguugaagcugcagugagcugugau

SEQ ID NO: 411880 - RNA, 32 nt, Human
cuugagagugggagcagagggccaggcaccca

SEQ ID NO: 411881 - RNA, 21 nt, Human
cuugagaucaggaguucaaga

SEQ ID NO: 411882 - RNA, 21 nt, Human
cuugagaucaggaguucgaga

SEQ ID NO: 411883 - RNA, 32 nt, Human
cuugagaucaucccggccaacauagugaaacc

SEQ ID NO: 411884 - RNA, 32 nt, Human
cuugagauccacccuccacagccucccaaacu

SEQ ID NO: 411885 - RNA, 32 nt, Human
cuugagaucggcugaagagagcgggcccaggc

SEQ ID NO: 411886 - RNA, 31 nt, Human
cuugagaugggaggagaacggaaggaaaaca

SEQ ID NO: 411887 - RNA, 32 nt, Human
cuugagauggguccuucagcuugcaguggucc

SEQ ID NO: 411888 - RNA, 32 nt, Human
cuugagcaaacaguugccgcucuccacccccu

SEQ ID NO: 411889 - RNA, 32 nt, Human
cuugagcaagggcaggggucccugagcuguuc

SEQ ID NO: 411890 - RNA, 32 nt, Human
cuugagcaauauagggagacccugucucuaca

SEQ ID NO: 411891 - RNA, 21 nt, Human
cuugagcacaggaguucaaga

SEQ ID NO: 411892 - RNA, 19 nt, Human
cuugagcaccagagagcag

SEQ ID NO: 411893 - RNA, 32 nt, Human
cuugagcagaauaaggagagaccaccgggugc

SEQ ID NO: 411894 - RNA, 32 nt, Human
cuugagcagagcaggggguaccugugggguuc

SEQ ID NO: 411895 - RNA, 32 nt, Human
cuugagcagagcucugcacccagccugcccgc

SEQ ID NO: 411896 - RNA, 32 nt, Human
cuugagcagcccauggcuuagcagaaccccag

SEQ ID NO: 411897 - RNA, 32 nt, Human
cuugagcauacuggcauuuacacagaaaugau

SEQ ID NO: 411898 - RNA, 32 nt, Human
cuugagcaugcuguuacaugcuugacacuuua

SEQ ID NO: 411899 - RNA, 32 nt, Human
cuugagcauggacucccagacugcaggggagc

SEQ ID NO: 411900 - RNA, 32 nt, Human
cuugagccaccgugccuggccucaagcgauuc

SEQ ID NO: 411901 - RNA, 32 nt, Human
cuugagccacuaugcccaaccaccauuaagau

SEQ ID NO: 411902 - RNA, 32 nt, Human
cuugagccacugcgcccggccuagaacccugc

SEQ ID NO: 411903 - RNA, 32 nt, Human
cuugagccacugcgccuggccuggucuagucu

SEQ ID NO: 411904 - RNA, 32 nt, Human
cuugagccagaaguucgagaccagccugagca

SEQ ID NO: 411905 - RNA, 32 nt, Human
cuugagccaggaagguugagguugcagugagc

SEQ ID NO: 411906 - RNA, 32 nt, Human
cuugagccaggaguuugagaccagcccacccg

SEQ ID NO: 411907 - RNA, 32 nt, Human
cuugagccagggaggucaaggcugcagugagc

SEQ ID NO: 411908 - RNA, 32 nt, Human
cuugagccagggagguggaggcuacagugagc

SEQ ID NO: 411909 - RNA, 22 nt, Human
cuugagcccaagaggcagaggu

SEQ ID NO: 411910 - RNA, 32 nt, Human
cuugagcccaagaggcagagguugcaggguca

SEQ ID NO: 411911 - RNA, 22 nt, Human
cuugagcccaagagguagaggu

SEQ ID NO: 411912 - RNA, 32 nt, Human
cuugagcccaagagguagagguugcagugagc

SEQ ID NO: 411913 - RNA, 22 nt, Human
cuugagcccaagagguggaggu

SEQ ID NO: 411914 - RNA, 32 nt, Human
cuugagcccaagagguggagguuacagugagc

SEQ ID NO: 411915 - RNA, 32 nt, Human
cuugagcccaagagguugaggcugcagugagc

SEQ ID NO: 411916 - RNA, 32 nt, Human
cuugagcccaauucaaagcugcagugagcugu

SEQ ID NO: 411917 - RNA, 21 nt, Human
cuugagcccagaaggucgagg

SEQ ID NO: 411918 - RNA, 32 nt, Human
cuugagcccagaagguugaagcugcagugagu

SEQ ID NO: 411919 - RNA, 32 nt, Human
cuugagcccagaaguucgagguugcagugagc

SEQ ID NO: 411920 - RNA, 32 nt, Human
cuugagcccagcaggcagagguugcagugagc

SEQ ID NO: 411921 - RNA, 32 nt, Human
cuugagcccagccuucugacugcauucagccc

SEQ ID NO: 411922 - RNA, 32 nt, Human
cuugagcccaggaagcagagguugcagugagc

SEQ ID NO: 411923 - RNA, 32 nt, Human
cuugagcccaggaagcggagguuacagugagc

SEQ ID NO: 411924 - RNA, 32 nt, Human
cuugagcccaggaagcggagguugcaaugagc

SEQ ID NO: 411925 - RNA, 32 nt, Human
cuugagcccaggaagucaaggcugcagugagc

SEQ ID NO: 411926 - RNA, 32 nt, Human
cuugagcccaggaaguccagaacguagugagc

SEQ ID NO: 411927 - RNA, 32 nt, Human
cuugagcccaggaaguggaggcugcagugacc

SEQ ID NO: 411928 - RNA, 32 nt, Human
cuugagcccaggaaguggagguugcagugagc

SEQ ID NO: 411929 - RNA, 21 nt, Human
cuugagcccaggaaguugagg

SEQ ID NO: 411930 - RNA, 32 nt, Human
cuugagcccaggaaguugaggcugcagugagc

SEQ ID NO: 411931 - RNA, 32 nt, Human
cuugagcccaggaauucaagaccagccugggc

SEQ ID NO: 411932 - RNA, 32 nt, Human
cuugagcccaggaauucaagaccaguccgagc

SEQ ID NO: 411933 - RNA, 32 nt, Human
cuugagcccaggaauucaagacuagccugcac

SEQ ID NO: 411934 - RNA, 32 nt, Human
cuugagcccaggaauucaaguguagccuaggg

SEQ ID NO: 411935 - RNA, 32 nt, Human
cuugagcccaggaauucgagaccagccuaggu

SEQ ID NO: 411936 - RNA, 32 nt, Human
cuugagcccaggaauucgagaccagccugggc

SEQ ID NO: 411937 - RNA, 32 nt, Human
cuugagcccaggaauuggaggcugcagugagc

SEQ ID NO: 411938 - RNA, 32 nt, Human
cuugagcccaggaauuugagaccagccuggac

SEQ ID NO: 411939 - RNA, 32 nt, Human
cuugagcccaggaauuugagaccagccugggc

SEQ ID NO: 411940 - RNA, 32 nt, Human
cuugagcccaggaauuugagguuguagugagc

SEQ ID NO: 411941 - RNA, 32 nt, Human
cuugagcccaggaauuugagucuagccuggac

SEQ ID NO: 411942 - RNA, 32 nt, Human
cuugagcccaggacuucaagaccagccuaggc

SEQ ID NO: 411943 - RNA, 32 nt, Human
cuugagcccaggagauuaagacuguaguauac

SEQ ID NO: 411944 - RNA, 21 nt, Human
cuugagcccaggagauugagg

SEQ ID NO: 411945 - RNA, 32 nt, Human
cuugagcccaggagauugaggcugaggcugca

SEQ ID NO: 411946 - RNA, 32 nt, Human
cuugagcccaggagauugaggcugcagugagc

SEQ ID NO: 411947 - RNA, 32 nt, Human
cuugagcccaggagcucaagaccagccuggac

SEQ ID NO: 411948 - RNA, 32 nt, Human
cuugagcccaggagcucgagaccagcuugguc

SEQ ID NO: 411949 - RNA, 32 nt, Human
cuugagcccaggagcuggagaucagccugggc

SEQ ID NO: 411950 - RNA, 32 nt, Human
cuugagcccaggagcuggaggcugcagugaac

SEQ ID NO: 411951 - RNA, 32 nt, Human
cuugagcccaggaggaggaggcugcagugagc

SEQ ID NO: 411952 - RNA, 32 nt, Human
cuugagcccaggaggcagaggcugcagugagc

SEQ ID NO: 411953 - RNA, 32 nt, Human
cuugagcccaggaggcagagguugcaguaagc

SEQ ID NO: 411954 - RNA, 32 nt, Human
cuugagcccaggaggcagagguugcagugagc

SEQ ID NO: 411955 - RNA, 32 nt, Human
cuugagcccaggaggccaagguugcagugggc

SEQ ID NO: 411956 - RNA, 21 nt, Human
cuugagcccaggaggcggagg

SEQ ID NO: 411957 - RNA, 32 nt, Human
cuugagcccaggaggcggaggcugcagugagc

SEQ ID NO: 411958 - RNA, 32 nt, Human
cuugagcccaggaggcggagguugcagugagc

SEQ ID NO: 411959 - RNA, 32 nt, Human
cuugagcccaggaggcugaggcugcagugcau

SEQ ID NO: 411960 - RNA, 21 nt, Human
cuugagcccaggaggucaagg

SEQ ID NO: 411961 - RNA, 32 nt, Human
cuugagcccaggaggucaaggcugaagugagc

SEQ ID NO: 411962 - RNA, 32 nt, Human
cuugagcccaggaggucaaggcugcagugagc

SEQ ID NO: 411963 - RNA, 21 nt, Human
cuugagcccaggaggucgagg

SEQ ID NO: 411964 - RNA, 32 nt, Human
cuugagcccaggaggucgaggcugcagugagc

SEQ ID NO: 411965 - RNA, 32 nt, Human
cuugagcccaggaggucgaggcugcagugugc

SEQ ID NO: 411966 - RNA, 32 nt, Human
cuugagcccaggaggucgagguugcagugagc

SEQ ID NO: 411967 - RNA, 21 nt, Human
cuugagcccaggaggucuagg

SEQ ID NO: 411968 - RNA, 32 nt, Human
cuugagcccaggaggucuaggcugcagugagc

SEQ ID NO: 411969 - RNA, 21 nt, Human
cuugagcccaggagguggagg

SEQ ID NO: 411970 - RNA, 32 nt, Human
cuugagcccaggagguggaggcugcaaugagc

SEQ ID NO: 411971 - RNA, 32 nt, Human
cuugagcccaggagguggagguugcaaugagc

SEQ ID NO: 411972 - RNA, 32 nt, Human
cuugagcccaggagguggagguugcagugagc

SEQ ID NO: 411973 - RNA, 32 nt, Human
cuugagcccaggagguggagguuucagcgagc

SEQ ID NO: 411974 - RNA, 32 nt, Human
cuugagcccaggagguugaggcugcagugaac

SEQ ID NO: 411975 - RNA, 32 nt, Human
cuugagcccaggagguugaggcugcagugagc

SEQ ID NO: 411976 - RNA, 32 nt, Human
cuugagcccaggagguugaggcugcagugagg

SEQ ID NO: 411977 - RNA, 32 nt, Human
cuugagcccaggaguccaaagccagccugggc

SEQ ID NO: 411978 - RNA, 32 nt, Human
cuugagcccaggagucuaggaccagccuggac

SEQ ID NO: 411979 - RNA, 32 nt, Human
cuugagcccaggagucugagaccagccucggc

SEQ ID NO: 411980 - RNA, 32 nt, Human
cuugagcccaggagucugagaccagccuggcc

SEQ ID NO: 411981 - RNA, 32 nt, Human
cuugagcccaggagucugagaccagccugggc

SEQ ID NO: 411982 - RNA, 32 nt, Human
cuugagcccaggagucugaggcuucagugagu

SEQ ID NO: 411983 - RNA, 32 nt, Human
cuugagcccaggagucugaggcuuuagugauc

SEQ ID NO: 411984 - RNA, 32 nt, Human
cuugagcccaggagucuugagaccagccuggg

SEQ ID NO: 411985 - RNA, 32 nt, Human
cuugagcccaggagugcaaaagcagccugagc

SEQ ID NO: 411986 - RNA, 32 nt, Human
cuugagcccaggagugcaaggcugcaaugagc

SEQ ID NO: 411987 - RNA, 32 nt, Human
cuugagcccaggaguuaagaggcugcagugac

SEQ ID NO: 411988 - RNA, 32 nt, Human
cuugagcccaggaguuagagaccagcccagcc

SEQ ID NO: 411989 - RNA, 32 nt, Human
cuugagcccaggaguuagagaccagccugggc

SEQ ID NO: 411990 - RNA, 32 nt, Human
cuugagcccaggaguucaaaaccagccugggc

SEQ ID NO: 411991 - RNA, 32 nt, Human
cuugagcccaggaguucaacaccagccugagc

SEQ ID NO: 411992 - RNA, 32 nt, Human
cuugagcccaggaguucaacaccagcuugggc

SEQ ID NO: 411993 - RNA, 21 nt, Human
cuugagcccaggaguucaaga

SEQ ID NO: 411994 - RNA, 32 nt, Human
cuugagcccaggaguucaagaacagccugggu

SEQ ID NO: 411995 - RNA, 32 nt, Human
cuugagcccaggaguucaagaccaaccuggug

SEQ ID NO: 411996 - RNA, 32 nt, Human
cuugagcccaggaguucaagaccacccugggc

SEQ ID NO: 411997 - RNA, 32 nt, Human
cuugagcccaggaguucaagaccagccugagc

SEQ ID NO: 411998 - RNA, 32 nt, Human
cuugagcccaggaguucaagaccagccuggac

SEQ ID NO: 411999 - RNA, 32 nt, Human
cuugagcccaggaguucaagaccagccuggga

SEQ ID NO: 412000 - RNA, 32 nt, Human
cuugagcccaggaguucaagaccagccugggc

SEQ ID NO: 412001 - RNA, 32 nt, Human
cuugagcccaggaguucaagaccagcuugggc

SEQ ID NO: 412002 - RNA, 32 nt, Human
cuugagcccaggaguucaagaccagucugggc

SEQ ID NO: 412003 - RNA, 32 nt, Human
cuugagcccaggaguucaagaccggccugagc

SEQ ID NO: 412004 - RNA, 32 nt, Human
cuugagcccaggaguucaagacuagccuaggc

SEQ ID NO: 412005 - RNA, 32 nt, Human
cuugagcccaggaguucaagagcagccugggc

SEQ ID NO: 412006 - RNA, 21 nt, Human
cuugagcccaggaguucaagg

SEQ ID NO: 412007 - RNA, 32 nt, Human
cuugagcccaggaguucaaggccagccugggc

SEQ ID NO: 412008 - RNA, 32 nt, Human
cuugagcccaggaguucaaggcuucagugagc

SEQ ID NO: 412009 - RNA, 32 nt, Human
cuugagcccaggaguucaauaccugucuggga

SEQ ID NO: 412010 - RNA, 32 nt, Human
cuugagcccaggaguucagaaucagccugggc

SEQ ID NO: 412011 - RNA, 21 nt, Human
cuugagcccaggaguucagga

SEQ ID NO: 412012 - RNA, 32 nt, Human
cuugagcccaggaguucaggaccugccugggc

SEQ ID NO: 412013 - RNA, 32 nt, Human
cuugagcccaggaguucaggacuagccugggc

SEQ ID NO: 412014 - RNA, 21 nt, Human
cuugagcccaggaguuccaga

SEQ ID NO: 412015 - RNA, 32 nt, Human
cuugagcccaggaguuccagaccagccugggc

SEQ ID NO: 412016 - RNA, 32 nt, Human
cuugagcccaggaguuccagaccagugugggc

SEQ ID NO: 412017 - RNA, 32 nt, Human
cuugagcccaggaguuccagacuagccugggc

SEQ ID NO: 412018 - RNA, 19 nt, Human
cuugagcccaggaguucga

SEQ ID NO: 412019 - RNA, 32 nt, Human
cuugagcccaggaguucgacaccaaccugagc

SEQ ID NO: 412020 - RNA, 32 nt, Human
cuugagcccaggaguucgacaccagccuggcc

SEQ ID NO: 412021 - RNA, 21 nt, Human
cuugagcccaggaguucgaga

SEQ ID NO: 412022 - RNA, 32 nt, Human
cuugagcccaggaguucgagacaagccugggu

SEQ ID NO: 412023 - RNA, 32 nt, Human
cuugagcccaggaguucgagaccacccugggc

SEQ ID NO: 412024 - RNA, 32 nt, Human
cuugagcccaggaguucgagaccagccggggc

SEQ ID NO: 412025 - RNA, 32 nt, Human
cuugagcccaggaguucgagaccagccugaac

SEQ ID NO: 412026 - RNA, 32 nt, Human
cuugagcccaggaguucgagaccagccuggac

SEQ ID NO: 412027 - RNA, 32 nt, Human
cuugagcccaggaguucgagaccagccugggc

SEQ ID NO: 412028 - RNA, 32 nt, Human
cuugagcccaggaguucgagaccagcuugggc

SEQ ID NO: 412029 - RNA, 32 nt, Human
cuugagcccaggaguucgagaccagucugggc

SEQ ID NO: 412030 - RNA, 32 nt, Human
cuugagcccaggaguucgagacuugccugggc

SEQ ID NO: 412031 - RNA, 32 nt, Human
cuugagcccaggaguucgagaucagccugagc

SEQ ID NO: 412032 - RNA, 32 nt, Human
cuugagcccaggaguucgagauuaaccugggc

SEQ ID NO: 412033 - RNA, 21 nt, Human
cuugagcccaggaguucgagg

SEQ ID NO: 412034 - RNA, 32 nt, Human
cuugagcccaggaguucgaggcugcagcgagc

SEQ ID NO: 412035 - RNA, 32 nt, Human
cuugagcccaggaguucgaggcugcagucagu

SEQ ID NO: 412036 - RNA, 32 nt, Human
cuugagcccaggaguucgaggcugcagugagc

SEQ ID NO: 412037 - RNA, 32 nt, Human
cuugagcccaggaguucgauaccagccugggc

SEQ ID NO: 412038 - RNA, 21 nt, Human
cuugagcccaggaguucggga

SEQ ID NO: 412039 - RNA, 32 nt, Human
cuugagcccaggaguucgggaccagccuggga

SEQ ID NO: 412040 - RNA, 21 nt, Human
cuugagcccaggaguucuaga

SEQ ID NO: 412041 - RNA, 32 nt, Human
cuugagcccaggaguucuagacaagccuggga

SEQ ID NO: 412042 - RNA, 32 nt, Human
cuugagcccaggaguugaaguccagccuaagc

SEQ ID NO: 412043 - RNA, 21 nt, Human
cuugagcccaggaguuggaga

SEQ ID NO: 412044 - RNA, 32 nt, Human
cuugagcccaggaguuggagaccagacugggg

SEQ ID NO: 412045 - RNA, 32 nt, Human
cuugagcccaggaguuggagaccagccuggau

SEQ ID NO: 412046 - RNA, 32 nt, Human
cuugagcccaggaguuggagaccagucuggga

SEQ ID NO: 412047 - RNA, 32 nt, Human
cuugagcccaggaguuggagaccugccugggc

SEQ ID NO: 412048 - RNA, 32 nt, Human
cuugagcccaggaguuggaggccagccugggc

SEQ ID NO: 412049 - RNA, 21 nt, Human
cuugagcccaggaguuuaaga

SEQ ID NO: 412050 - RNA, 32 nt, Human
cuugagcccaggaguuuaagaccagccugggc

SEQ ID NO: 412051 - RNA, 32 nt, Human
cuugagcccaggaguuuaagaccugccugggc

SEQ ID NO: 412052 - RNA, 32 nt, Human
cuugagcccaggaguuugaaaccagccugggc

SEQ ID NO: 412053 - RNA, 32 nt, Human
cuugagcccaggaguuugaaaccagccugggu

SEQ ID NO: 412054 - RNA, 32 nt, Human
cuugagcccaggaguuugaauccauccugggc

SEQ ID NO: 412055 - RNA, 32 nt, Human
cuugagcccaggaguuugacaccagccugggc

SEQ ID NO: 412056 - RNA, 21 nt, Human
cuugagcccaggaguuugaga

SEQ ID NO: 412057 - RNA, 32 nt, Human
cuugagcccaggaguuugagaccaaucuaggc

SEQ ID NO: 412058 - RNA, 32 nt, Human
cuugagcccaggaguuugagaccagcauggaa

SEQ ID NO: 412059 - RNA, 32 nt, Human
cuugagcccaggaguuugagaccagccagggc

SEQ ID NO: 412060 - RNA, 32 nt, Human
cuugagcccaggaguuugagaccagccuaggc

SEQ ID NO: 412061 - RNA, 32 nt, Human
cuugagcccaggaguuugagaccagccuggac

SEQ ID NO: 412062 - RNA, 32 nt, Human
cuugagcccaggaguuugagaccagccuggcc

SEQ ID NO: 412063 - RNA, 32 nt, Human
cuugagcccaggaguuugagaccagccugggc

SEQ ID NO: 412064 - RNA, 32 nt, Human
cuugagcccaggaguuugagaccagccugggu

SEQ ID NO: 412065 - RNA, 32 nt, Human
cuugagcccaggaguuugagaccaggcuaggc

SEQ ID NO: 412066 - RNA, 32 nt, Human
cuugagcccaggaguuugagaccauccugggc

SEQ ID NO: 412067 - RNA, 32 nt, Human
cuugagcccaggaguuugagacuagccuggcc

SEQ ID NO: 412068 - RNA, 32 nt, Human
cuugagcccaggaguuugagacuagccugggc

SEQ ID NO: 412069 - RNA, 32 nt, Human
cuugagcccaggaguuugagaucagccugguc

SEQ ID NO: 412070 - RNA, 32 nt, Human
cuugagcccaggaguuugaggccagacugcac

SEQ ID NO: 412071 - RNA, 32 nt, Human
cuugagcccaggaguuugaggccagccugggc

SEQ ID NO: 412072 - RNA, 32 nt, Human
cuugagcccaggaguuugaggcugcagugaac

SEQ ID NO: 412073 - RNA, 32 nt, Human
cuugagcccaggaguuugaggcugcagugagc

SEQ ID NO: 412074 - RNA, 32 nt, Human
cuugagcccaggaguuugaggcugcagugagu

SEQ ID NO: 412075 - RNA, 32 nt, Human
cuugagcccaggaguuugaggcugcggugagc

SEQ ID NO: 412076 - RNA, 32 nt, Human
cuugagcccaggaguuugagggcagccuggga

SEQ ID NO: 412077 - RNA, 32 nt, Human
cuugagcccaggaguuugaggguacagugugc

SEQ ID NO: 412078 - RNA, 32 nt, Human
cuugagcccaggaguuugagguugcagugagc

SEQ ID NO: 412079 - RNA, 32 nt, Human
cuugagcccaggaguuugagguugcagugcac

SEQ ID NO: 412080 - RNA, 32 nt, Human
cuugagcccaggaguuugaguccagccuggac

SEQ ID NO: 412081 - RNA, 32 nt, Human
cuugagcccaggaguuugcgaccagccugggc

SEQ ID NO: 412082 - RNA, 32 nt, Human
cuugagcccaggaguuuuagacuagccuggac

SEQ ID NO: 412083 - RNA, 32 nt, Human
cuugagcccaggaguuuugaguccagccugaa

SEQ ID NO: 412084 - RNA, 32 nt, Human
cuugagcccaggauuucaaguccagccugggc

SEQ ID NO: 412085 - RNA, 32 nt, Human
cuugagcccaggcgguugaggcugcagugagc

SEQ ID NO: 412086 - RNA, 21 nt, Human
cuugagcccaggcguucgaga

SEQ ID NO: 412087 - RNA, 32 nt, Human
cuugagcccagggguuugaggcugcagugagc

SEQ ID NO: 412088 - RNA, 32 nt, Human
cuugagcccaugaagucaggcugcagugagcu

SEQ ID NO: 412089 - RNA, 32 nt, Human
cuugagccccagggguggaggcugcaaugaac

SEQ ID NO: 412090 - RNA, 32 nt, Human
cuugagccccggaggucgaggcugcagugggc

SEQ ID NO: 412091 - RNA, 32 nt, Human
cuugagcccgagagacagagguugcagugagc

SEQ ID NO: 412092 - RNA, 32 nt, Human
cuugagcccgagagguggagacugcaguaagc

SEQ ID NO: 412093 - RNA, 32 nt, Human
cuugagcccgagagguggaggcuggagugaac

SEQ ID NO: 412094 - RNA, 32 nt, Human
cuugagcccggaaggcagagguugcagugagc

SEQ ID NO: 412095 - RNA, 32 nt, Human
cuugagcccggaaggcggagguugcagugagc

SEQ ID NO: 412096 - RNA, 21 nt, Human
cuugagcccggaaguucgaga

SEQ ID NO: 412097 - RNA, 32 nt, Human
cuugagcccgggaagcagagguugcagugaac

SEQ ID NO: 412098 - RNA, 32 nt, Human
cuugagcccgggaaguggagguugcacugagc

SEQ ID NO: 412099 - RNA, 32 nt, Human
cuugagcccgggaggcagaggcugcagugaac

SEQ ID NO: 412100 - RNA, 32 nt, Human
cuugagcccgggaggcagagguugcagugagc

SEQ ID NO: 412101 - RNA, 32 nt, Human
cuugagcccgggaggcggagguugcagugagc

SEQ ID NO: 412102 - RNA, 32 nt, Human
cuugagcccgggaggucaagguugcagugagu

SEQ ID NO: 412103 - RNA, 32 nt, Human
cuugagcccgggagguugaggcugcagugggg

SEQ ID NO: 412104 - RNA, 32 nt, Human
cuugagcccgggcugugacucccucuuugggg

SEQ ID NO: 412105 - RNA, 32 nt, Human
cuugagcccuagaggucgaggcugcagugagc

SEQ ID NO: 412106 - RNA, 32 nt, Human
cuugagcccuagagguugaggcugcagugagc

SEQ ID NO: 412107 - RNA, 32 nt, Human
cuugagcccuggagaucgaggcugcaguaagc

SEQ ID NO: 412108 - RNA, 32 nt, Human
cuugagcccuggaggucaaggcugcagugagc

SEQ ID NO: 412109 - RNA, 32 nt, Human
cuugagcccuggaguucaaggcugcagugagc

SEQ ID NO: 412110 - RNA, 32 nt, Human
cuugagcccuggaguuggagguugcagugagc

SEQ ID NO: 412111 - RNA, 32 nt, Human
cuugagcccuggcggcagagguugcagugagc

SEQ ID NO: 412112 - RNA, 32 nt, Human
cuugagccgaggggguggggguugcagugagc

SEQ ID NO: 412113 - RNA, 19 nt, Human
cuugagccgcucgcugccg

SEQ ID NO: 412114 - RNA, 32 nt, Human
cuugagccggggaggaggggguugcagugagc

SEQ ID NO: 412115 - RNA, 32 nt, Human
cuugagccggggaggcagagguugcagugagc

SEQ ID NO: 412116 - RNA, 32 nt, Human
cuugagccggggagguggaggcugcagugaac

SEQ ID NO: 412117 - RNA, 32 nt, Human
cuugagccuaagagaucaaggcugcagugagc

SEQ ID NO: 412118 - RNA, 32 nt, Human
cuugagccuaggaagucgaggcugcagugagc

SEQ ID NO: 412119 - RNA, 32 nt, Human
cuugagccuaggaggucgaggcugcaguggga

SEQ ID NO: 412120 - RNA, 32 nt, Human
cuugagccuaggagguugaggcugcagugagc

SEQ ID NO: 412121 - RNA, 32 nt, Human
cuugagccuccucaccccagacuccugacugu

SEQ ID NO: 412122 - RNA, 32 nt, Human
cuugagccucggaggcggagguugcagugagc

SEQ ID NO: 412123 - RNA, 32 nt, Human
cuugagccugagagaugaagguugcagugagc

SEQ ID NO: 412124 - RNA, 18 nt, Human
cuugagccugcagcagcu

SEQ ID NO: 412125 - RNA, 32 nt, Human
cuugagccuggaaaagguugcagugagcugga

SEQ ID NO: 412126 - RNA, 32 nt, Human
cuugagccuggaagacauagguugcaguguaa

SEQ ID NO: 412127 - RNA, 32 nt, Human
cuugagccugggaaguggaggcugcagugagc

SEQ ID NO: 412128 - RNA, 32 nt, Human
cuugagccugggacauugaggcugcagugaac

SEQ ID NO: 412129 - RNA, 32 nt, Human
cuugagccugggagauggagguugcagugagc

SEQ ID NO: 412130 - RNA, 32 nt, Human
cuugagccugggagauugaggcugcacugagc

SEQ ID NO: 412131 - RNA, 32 nt, Human
cuugagccugggagcaaggguugcagugagcu

SEQ ID NO: 412132 - RNA, 32 nt, Human
cuugagccugggagcgcagguugcaaugagcc

SEQ ID NO: 412133 - RNA, 32 nt, Human
cuugagccugggaggaagagguugcagugagc

SEQ ID NO: 412134 - RNA, 32 nt, Human
cuugagccugggaggcagagauugcacugagc

SEQ ID NO: 412135 - RNA, 32 nt, Human
cuugagccugggaggcagaggcugcagugagc

SEQ ID NO: 412136 - RNA, 32 nt, Human
cuugagccugggaggcagagguugcagugagc

SEQ ID NO: 412137 - RNA, 32 nt, Human
cuugagccugggaggcagagguugcugugagc

SEQ ID NO: 412138 - RNA, 32 nt, Human
cuugagccugggaggcggagguugcagugagc

SEQ ID NO: 412139 - RNA, 32 nt, Human
cuugagccugggaggcggggguuguggugagc

SEQ ID NO: 412140 - RNA, 32 nt, Human
cuugagccugggaggucaagccuacagugagc

SEQ ID NO: 412141 - RNA, 32 nt, Human
cuugagccugggaggucaaggcugcaguaagc

SEQ ID NO: 412142 - RNA, 32 nt, Human
cuugagccugggaggucaaggcugcagugaac

SEQ ID NO: 412143 - RNA, 32 nt, Human
cuugagccugggaggucaaggcugcagugagc

SEQ ID NO: 412144 - RNA, 32 nt, Human
cuugagccugggaggucauggcugcagagagc

SEQ ID NO: 412145 - RNA, 32 nt, Human
cuugagccugggaggucgaggcugcagugagc

SEQ ID NO: 412146 - RNA, 32 nt, Human
cuugagccugggaggucgaggcuguagugagc

SEQ ID NO: 412147 - RNA, 32 nt, Human
cuugagccugggagguggaggcuacugugagc

SEQ ID NO: 412148 - RNA, 32 nt, Human
cuugagccugggagguggagguugcacugagu

SEQ ID NO: 412149 - RNA, 32 nt, Human
cuugagccugggagguggagguugcagugagc

SEQ ID NO: 412150 - RNA, 32 nt, Human
cuugagccugggagguggagguugcagugagu

SEQ ID NO: 412151 - RNA, 32 nt, Human
cuugagccugggagguggagguugccagugag

SEQ ID NO: 412152 - RNA, 32 nt, Human
cuugagccugggagguggagguuucagugagc

SEQ ID NO: 412153 - RNA, 32 nt, Human
cuugagccugggagguugaggcugcagugagc

SEQ ID NO: 412154 - RNA, 32 nt, Human
cuugagccugggagguugugguugcagugagc

SEQ ID NO: 412155 - RNA, 32 nt, Human
cuugagccugggaguuugaggcugcagugagc

SEQ ID NO: 412156 - RNA, 32 nt, Human
cuugagccugggaugucaaggcugcagugagc

SEQ ID NO: 412157 - RNA, 21 nt, Human
cuugagccugggcaacagagu

SEQ ID NO: 412158 - RNA, 32 nt, Human
cuugagccugggggacugaggcugcagugagc

SEQ ID NO: 412159 - RNA, 32 nt, Human
cuugagccuguauuaaaggaaucaggccaggc

SEQ ID NO: 412160 - RNA, 32 nt, Human
cuugagccugugaggucgaggcugcagugagc

SEQ ID NO: 412161 - RNA, 32 nt, Human
cuugagccuuggaggcggagguugcagugagc

SEQ ID NO: 412162 - RNA, 32 nt, Human
cuugagccuuggauguuccuguggaccugaca

SEQ ID NO: 412163 - RNA, 32 nt, Human
cuugagcgauucuugugucucagucuuccggg

SEQ ID NO: 412164 - RNA, 32 nt, Human
cuugagcgcggagccgcucaagccacagcucc

SEQ ID NO: 412165 - RNA, 32 nt, Human
cuugagcuagggagguggugcagucagccucg

SEQ ID NO: 412166 - RNA, 21 nt, Human
cuugagcucaagaguucaaga

SEQ ID NO: 412167 - RNA, 21 nt, Human
cuugagcucaggaauuugaga

SEQ ID NO: 412168 - RNA, 21 nt, Human
cuugagcucaggagcuugaga

SEQ ID NO: 412169 - RNA, 32 nt, Human
cuugagcucaggaggcagagguugcagugagc

SEQ ID NO: 412170 - RNA, 32 nt, Human
cuugagcucaggagguugaggcugcagagagu

SEQ ID NO: 412171 - RNA, 32 nt, Human
cuugagcucaggaguccuaaaccagccugggc

SEQ ID NO: 412172 - RNA, 21 nt, Human
cuugagcucaggaguucaaga

SEQ ID NO: 412173 - RNA, 21 nt, Human
cuugagcucaggaguuccaga

SEQ ID NO: 412174 - RNA, 19 nt, Human
cuugagcucaggaguucga

SEQ ID NO: 412175 - RNA, 21 nt, Human
cuugagcucaggaguucuaga

SEQ ID NO: 412176 - RNA, 21 nt, Human
cuugagcucaggaguuugaga

SEQ ID NO: 412177 - RNA, 32 nt, Human
cuugagcucaggaguuuggaccagccugggca

SEQ ID NO: 412178 - RNA, 32 nt, Human
cuugagcucagggggccaaggcugcagugagu

SEQ ID NO: 412179 - RNA, 32 nt, Human
cuugagcucugcaaagaucagagcaggugagc

SEQ ID NO: 412180 - RNA, 32 nt, Human
cuugagcucuuugacucccagaagguacccca

SEQ ID NO: 412181 - RNA, 32 nt, Human
cuugagcugccucugagauuugggcugugcgg

SEQ ID NO: 412182 - RNA, 32 nt, Human
cuugagcugcugcugucacuccuccaccgagg

SEQ ID NO: 412183 - RNA, 32 nt, Human
cuugagcugggaacucaggcuccuggaaaaac

SEQ ID NO: 412184 - RNA, 32 nt, Human
cuugagcugggaguucaagaccagucugagca

SEQ ID NO: 412185 - RNA, 32 nt, Human
cuugagcuggggagauggaggcugcagugagc

SEQ ID NO: 412186 - RNA, 19 nt, Human
cuugagcuggggagugcag

SEQ ID NO: 412187 - RNA, 32 nt, Human
cuugagcuggguggggugaggggugagcagcc

SEQ ID NO: 412188 - RNA, 32 nt, Human
cuugagcuucagcccauuucucuccauuuccu

SEQ ID NO: 412189 - RNA, 32 nt, Human
cuugagcuuggaaguagcacuugcuguagacu

SEQ ID NO: 412190 - RNA, 32 nt, Human
cuugagcuugggaaaucaagguugcagugagc

SEQ ID NO: 412191 - RNA, 32 nt, Human
cuugagcuugggaagucgaggcugcagucagc

SEQ ID NO: 412192 - RNA, 20 nt, Human
cuugagcuuuaaagcauuga

SEQ ID NO: 412193 - RNA, 32 nt, Human
cuugaggaaacugaggcaaagaggagggcagg

SEQ ID NO: 412194 - RNA, 20 nt, Human
cuugaggaaggaccuugcca

SEQ ID NO: 412195 - RNA, 32 nt, Human
cuugaggacaacagggagcaucacuaguucau

SEQ ID NO: 412196 - RNA, 32 nt, Human
cuugaggacacauguccagugggaggugagac

SEQ ID NO: 412197 - RNA, 32 nt, Human
cuugaggacagaaacuugaaaacaaacacaaa

SEQ ID NO: 412198 - RNA, 32 nt, Human
cuugaggacugcuggcuguaaccagggcacau

SEQ ID NO: 412199 - RNA, 32 nt, Human
cuugaggagcuguuguguugaggacccaucaa

SEQ ID NO: 412200 - RNA, 32 nt, Human
cuugaggagcuuucuccugagcuccagucccu

SEQ ID NO: 412201 - RNA, 32 nt, Human
cuugaggaggaaccugucuuuaaagcuguccc

SEQ ID NO: 412202 - RNA, 21 nt, Human
cuugaggaggccgccacggca

SEQ ID NO: 412203 - RNA, 32 nt, Human
cuugaggauagacagauauacacaccacacac

SEQ ID NO: 412204 - RNA, 32 nt, Human
cuugaggcaaaaguugccagcacuuuagauuc

SEQ ID NO: 412205 - RNA, 32 nt, Human
cuugaggcaaagcauucauccuacaucauaaa

SEQ ID NO: 412206 - RNA, 32 nt, Human
cuugaggcacaaaucacuguggggaaacaauu

SEQ ID NO: 412207 - RNA, 32 nt, Human
cuugaggcagauccuggcacuaccucacagcu

SEQ ID NO: 412208 - RNA, 32 nt, Human
cuugaggcagggucucacucuguugaccaggc

SEQ ID NO: 412209 - RNA, 21 nt, Human
cuugaggccagaaguucgaga

SEQ ID NO: 412210 - RNA, 32 nt, Human
cuugaggccagccugggcaacauagugagacc

SEQ ID NO: 412211 - RNA, 32 nt, Human
cuugaggccagcugcuaugccagguggugucu

SEQ ID NO: 412212 - RNA, 32 nt, Human
cuugaggccaggagguugaggcugcagugagc

SEQ ID NO: 412213 - RNA, 32 nt, Human
cuugaggccaggaguauaagagcagccugggc

SEQ ID NO: 412214 - RNA, 32 nt, Human
cuugaggccaggagucccagagcagccugggc

SEQ ID NO: 412215 - RNA, 32 nt, Human
cuugaggccaggagucugagacaagccuaggc

SEQ ID NO: 412216 - RNA, 32 nt, Human
cuugaggccaggaguuaaagagcagccuggcu

SEQ ID NO: 412217 - RNA, 32 nt, Human
cuugaggccaggaguuagagaccagccuggcc

SEQ ID NO: 412218 - RNA, 21 nt, Human
cuugaggccaggaguucaaga

SEQ ID NO: 412219 - RNA, 32 nt, Human
cuugaggccaggaguucaagaccagccagggc

SEQ ID NO: 412220 - RNA, 32 nt, Human
cuugaggccaggaguucaagaccagcccaggc

SEQ ID NO: 412221 - RNA, 32 nt, Human
cuugaggccaggaguucaagaccagccuggcc

SEQ ID NO: 412222 - RNA, 32 nt, Human
cuugaggccaggaguucaagaccagccugggc

SEQ ID NO: 412223 - RNA, 32 nt, Human
cuugaggccaggaguucaagaccagcuuggcc

SEQ ID NO: 412224 - RNA, 32 nt, Human
cuugaggccaggaguucaagaccagucugggc

SEQ ID NO: 412225 - RNA, 32 nt, Human
cuugaggccaggaguucaagaccggccuggcc

SEQ ID NO: 412226 - RNA, 32 nt, Human
cuugaggccaggaguucaagacuagccuggcu

SEQ ID NO: 412227 - RNA, 32 nt, Human
cuugaggccaggaguucaagaucagccugggc

SEQ ID NO: 412228 - RNA, 32 nt, Human
cuugaggccaggaguucaaggccagccuggac

SEQ ID NO: 412229 - RNA, 32 nt, Human
cuugaggccaggaguucaauaucaguuugggc

SEQ ID NO: 412230 - RNA, 32 nt, Human
cuugaggccaggaguucaggaccagccugggc

SEQ ID NO: 412231 - RNA, 32 nt, Human
cuugaggccaggaguucaugacccgccuggcc

SEQ ID NO: 412232 - RNA, 32 nt, Human
cuugaggccaggaguuccagaccagccuggcc

SEQ ID NO: 412233 - RNA, 32 nt, Human
cuugaggccaggaguuccagaccagccugggc

SEQ ID NO: 412234 - RNA, 32 nt, Human
cuugaggccaggaguuccagaccagccugggu

SEQ ID NO: 412235 - RNA, 32 nt, Human
cuugaggccaggaguuccagagcagccugggc

SEQ ID NO: 412236 - RNA, 21 nt, Human
cuugaggccaggaguucgaga

SEQ ID NO: 412237 - RNA, 32 nt, Human
cuugaggccaggaguucgagaacagucuggcc

SEQ ID NO: 412238 - RNA, 32 nt, Human
cuugaggccaggaguucgagaccagccuaguu

SEQ ID NO: 412239 - RNA, 32 nt, Human
cuugaggccaggaguucgagaccagccucagc

SEQ ID NO: 412240 - RNA, 32 nt, Human
cuugaggccaggaguucgagaccagccugaac

SEQ ID NO: 412241 - RNA, 32 nt, Human
cuugaggccaggaguucgagaccagccugagc

SEQ ID NO: 412242 - RNA, 32 nt, Human
cuugaggccaggaguucgagaccagccuggac

SEQ ID NO: 412243 - RNA, 32 nt, Human
cuugaggccaggaguucgagaccagccuggcc

SEQ ID NO: 412244 - RNA, 32 nt, Human
cuugaggccaggaguucgagaccagccugggc

SEQ ID NO: 412245 - RNA, 32 nt, Human
cuugaggccaggaguucgagaccagccugguc

SEQ ID NO: 412246 - RNA, 32 nt, Human
cuugaggccaggaguucgagaccagccuguuc

SEQ ID NO: 412247 - RNA, 32 nt, Human
cuugaggccaggaguucgagaucagccuggcc

SEQ ID NO: 412248 - RNA, 32 nt, Human
cuugaggccaggaguucggguccggccugggc

SEQ ID NO: 412249 - RNA, 32 nt, Human
cuugaggccaggaguucugagaccagccuggc

SEQ ID NO: 412250 - RNA, 32 nt, Human
cuugaggccaggaguugcagaccagccugggu

SEQ ID NO: 412251 - RNA, 32 nt, Human
cuugaggccaggaguuggagaccagccuggcc

SEQ ID NO: 412252 - RNA, 32 nt, Human
cuugaggccaggaguuuaagaccagccugggc

SEQ ID NO: 412253 - RNA, 32 nt, Human
cuugaggccaggaguuuaaggccagccugggc

SEQ ID NO: 412254 - RNA, 32 nt, Human
cuugaggccaggaguuuaaggcuagccugggc

SEQ ID NO: 412255 - RNA, 32 nt, Human
cuugaggccaggaguuugaaaccagccuggcc

SEQ ID NO: 412256 - RNA, 32 nt, Human
cuugaggccaggaguuugaaacuagucugguc

SEQ ID NO: 412257 - RNA, 32 nt, Human
cuugaggccaggaguuugagacaagcuugggc

SEQ ID NO: 412258 - RNA, 32 nt, Human
cuugaggccaggaguuugagaccaaccugggc

SEQ ID NO: 412259 - RNA, 32 nt, Human
cuugaggccaggaguuugagaccaaccugguu

SEQ ID NO: 412260 - RNA, 32 nt, Human
cuugaggccaggaguuugagaccaccuugggc

SEQ ID NO: 412261 - RNA, 32 nt, Human
cuugaggccaggaguuugagaccagccugagu

SEQ ID NO: 412262 - RNA, 32 nt, Human
cuugaggccaggaguuugagaccagccuggca

SEQ ID NO: 412263 - RNA, 32 nt, Human
cuugaggccaggaguuugagaccagccuggcc

SEQ ID NO: 412264 - RNA, 32 nt, Human
cuugaggccaggaguuugagaccagccugggc

SEQ ID NO: 412265 - RNA, 32 nt, Human
cuugaggccaggaguuugagaccagcuugggc

SEQ ID NO: 412266 - RNA, 32 nt, Human
cuugaggccaggaguuugagaccuccugggca

SEQ ID NO: 412267 - RNA, 32 nt, Human
cuugaggccaggaguuugagacuagccuaggc

SEQ ID NO: 412268 - RNA, 32 nt, Human
cuugaggccaggaguuugagacuagccugggc

SEQ ID NO: 412269 - RNA, 32 nt, Human
cuugaggccaggaguuugagaucggccugggc

SEQ ID NO: 412270 - RNA, 32 nt, Human
cuugaggccaggaguuugaggcugcagugagu

SEQ ID NO: 412271 - RNA, 32 nt, Human
cuugaggccaggaguuuguuaccagccugggc

SEQ ID NO: 412272 - RNA, 32 nt, Human
cuugaggccguugcagacuuuggcgcggcucg

SEQ ID NO: 412273 - RNA, 32 nt, Human
cuugaggcugagaggucaagguugcagugagc

SEQ ID NO: 412274 - RNA, 32 nt, Human
cuugaggcugcugccauuuuuccacuuaacca

SEQ ID NO: 412275 - RNA, 32 nt, Human
cuugaggcugggaggcagagguugcagugagc

SEQ ID NO: 412276 - RNA, 32 nt, Human
cuugaggcugggaggcggagguugcagugagc

SEQ ID NO: 412277 - RNA, 32 nt, Human
cuugaggcuguggugugaaagguggccagccu

SEQ ID NO: 412278 - RNA, 32 nt, Human
cuugagggagcacuggcucuguggccaugcuu

SEQ ID NO: 412279 - RNA, 32 nt, Human
cuugagggaggaaguccugggacccagggagg

SEQ ID NO: 412280 - RNA, 32 nt, Human
cuugagggagggcuggaaucugucuucccuga

SEQ ID NO: 412281 - RNA, 32 nt, Human
cuugagggagggcuggggccuccuuguccugg

SEQ ID NO: 412282 - RNA, 18 nt, Human
cuugagggaggggugcag

SEQ ID NO: 412283 - RNA, 32 nt, Human
cuugaggggcaccacuacuccagcccagaagg

SEQ ID NO: 412284 - RNA, 32 nt, Human
cuugaggguagggaggcgggcccagugcagga

SEQ ID NO: 412285 - RNA, 32 nt, Human
cuugagggucuccacugcugccuugggggccu

SEQ ID NO: 412286 - RNA, 32 nt, Human
cuugaggguggaggaugggaagagggagagga

SEQ ID NO: 412287 - RNA, 21 nt, Human
cuugaggucaagaguuugaga

SEQ ID NO: 412288 - RNA, 21 nt, Human
cuugaggucagaaguucgaga

SEQ ID NO: 412289 - RNA, 32 nt, Human
cuugaggucaggaguccaagaccagccuggcc

SEQ ID NO: 412290 - RNA, 21 nt, Human
cuugaggucaggaguucaaga

SEQ ID NO: 412291 - RNA, 19 nt, Human
cuugaggucaggaguucga

SEQ ID NO: 412292 - RNA, 21 nt, Human
cuugaggucaggaguucgaga

SEQ ID NO: 412293 - RNA, 21 nt, Human
cuugaggucaggaguuugaga

SEQ ID NO: 412294 - RNA, 32 nt, Human
cuugaggucaggggaucacaccagccuaacca

SEQ ID NO: 412295 - RNA, 32 nt, Human
cuugaggugaugauaguuggccucuggucuac

SEQ ID NO: 412296 - RNA, 32 nt, Human
cuugagguuugggaccugaagcuccagugugg

SEQ ID NO: 412297 - RNA, 32 nt, Human
cuugaguaauuuggaacccaaaagugaagauc

SEQ ID NO: 412298 - RNA, 22 nt, Human
cuugaguagcugggauuacagg

SEQ ID NO: 412299 - RNA, 32 nt, Human
cuugaguagugacuucuuuggugaggcaagaa

SEQ ID NO: 412300 - RNA, 32 nt, Human
cuugaguauaagaaaugcauaugucacuagaa

SEQ ID NO: 412301 - RNA, 32 nt, Human
cuugagucacacaagcuugauaauauuaaaua

SEQ ID NO: 412302 - RNA, 32 nt, Human
cuugaguccaggaggcggaggcugcagugagc

SEQ ID NO: 412303 - RNA, 32 nt, Human
cuugaguccaggagguugaggcugcagucagc

SEQ ID NO: 412304 - RNA, 32 nt, Human
cuugaguccaggagguugaggcugcagugagc

SEQ ID NO: 412305 - RNA, 32 nt, Human
cuugaguccaggaguccgagaccagccugggc

SEQ ID NO: 412306 - RNA, 21 nt, Human
cuugaguccaggaguucaaga

SEQ ID NO: 412307 - RNA, 32 nt, Human
cuugaguccaggaguucaaggccagccugggc

SEQ ID NO: 412308 - RNA, 32 nt, Human
cuugaguccaggaguucaaggcugcagugagu

SEQ ID NO: 412309 - RNA, 32 nt, Human
cuugaguccaggaguuuaagaccagccuggac

SEQ ID NO: 412310 - RNA, 32 nt, Human
cuugaguccaggaguuugaaaccuaccuaggc

SEQ ID NO: 412311 - RNA, 32 nt, Human
cuugaguccaggaguuugagaccagccuggac

SEQ ID NO: 412312 - RNA, 32 nt, Human
cuugaguccaggaguuugagaccagccugggc

SEQ ID NO: 412313 - RNA, 32 nt, Human
cuugaguccaggaguuugagacuagccugauc

SEQ ID NO: 412314 - RNA, 32 nt, Human
cuugaguccaggaguuugagaugcgccugggc

SEQ ID NO: 412315 - RNA, 32 nt, Human
cuugaguccuggcuuuggcugacccuucuuug

SEQ ID NO: 412316 - RNA, 32 nt, Human
cuugagucuaccuuuggacugccuuccuuggg

SEQ ID NO: 412317 - RNA, 32 nt, Human
cuugagucuagacuguggccacagccucugcc

SEQ ID NO: 412318 - RNA, 32 nt, Human
cuugagucuccagcccacagccaagguggacg

SEQ ID NO: 412319 - RNA, 32 nt, Human
cuugagucuccucucuggauggaauccgcgag

SEQ ID NO: 412320 - RNA, 32 nt, Human
cuugagucugggaggcggagguugcagugagc

SEQ ID NO: 412321 - RNA, 32 nt, Human
cuugagucugggagguggaggcugcagugagc

SEQ ID NO: 412322 - RNA, 32 nt, Human
cuugagucuuccuguuuuuccuguaccggguc

SEQ ID NO: 412323 - RNA, 32 nt, Human
cuugagugaaguuugauacuauccagaaggua

SEQ ID NO: 412324 - RNA, 32 nt, Human
cuugagugagcacucacuggggcuguggcucc

SEQ ID NO: 412325 - RNA, 32 nt, Human
cuugagugcaaccucugcccacuguguucaag

SEQ ID NO: 412326 - RNA, 32 nt, Human
cuugaguggaauuggaugccucuaggagccca

SEQ ID NO: 412327 - RNA, 32 nt, Human
cuugaguggcagcgucuggacuccaggcagcc

SEQ ID NO: 412328 - RNA, 32 nt, Human
cuugagugguuaaauuacugucaugcaaagcg

SEQ ID NO: 412329 - RNA, 32 nt, Human
cuugaguuagauugaaguagaaucagugauag

SEQ ID NO: 412330 - RNA, 21 nt, Human
cuugaguucaggaguucgaga

SEQ ID NO: 412331 - RNA, 32 nt, Human
cuugaguucauagcuugaaaagagaccucaaa

SEQ ID NO: 412332 - RNA, 32 nt, Human
cuugaguugggcuggucacagccuugugaugu

SEQ ID NO: 412333 - RNA, 32 nt, Human
cuugaguuucuccauaugugcauguacaucua

SEQ ID NO: 412334 - RNA, 32 nt, Human
cuugaguuucuugaaggcuuccuggccuccag

SEQ ID NO: 412335 - RNA, 32 nt, Human
cuugauacaugguauccaguuugcauaguauc

SEQ ID NO: 412336 - RNA, 32 nt, Human
cuugauacuaaauuugggacucuuugcugcgg

SEQ ID NO: 412337 - RNA, 19 nt, Human
cuugauacuuucuuuaaaa

SEQ ID NO: 412338 - RNA, 32 nt, Human
cuugauagcuaaauaacuugccauuucuuuau

SEQ ID NO: 412339 - RNA, 32 nt, Human
cuugauagugagugacuucucgugagagaucu

SEQ ID NO: 412340 - RNA, 32 nt, Human
cuugauauaucaucucagaaacuuuccugaau

SEQ ID NO: 412341 - RNA, 32 nt, Human
cuugauauuaagcaugagaaagcucaugcuga

SEQ ID NO: 412342 - RNA, 32 nt, Human
cuugauauugcacagugcacuuauuuuguggc

SEQ ID NO: 412343 - RNA, 32 nt, Human
cuugaucacccaggcuagagugcaguggcgug

SEQ ID NO: 412344 - RNA, 32 nt, Human
cuugaucacgccacugcacuccagccugggug

SEQ ID NO: 412345 - RNA, 32 nt, Human
cuugaucagguuauauuacagucaaagaugau

SEQ ID NO: 412346 - RNA, 32 nt, Human
cuugaucaugcugcaguggguaguucuaagga

SEQ ID NO: 412347 - RNA, 32 nt, Human
cuugaucauggacuggugccuuugcauucaga

SEQ ID NO: 412348 - RNA, 32 nt, Human
cuugaucauggacuuucagccuccagaacuuc

SEQ ID NO: 412349 - RNA, 32 nt, Human
cuugauccaccccuucucccaccccagauccc

SEQ ID NO: 412350 - RNA, 32 nt, Human
cuugaucccaggaauuugagguugcaguaagc

SEQ ID NO: 412351 - RNA, 32 nt, Human
cuugaucccaggaggcggagguugcagugagu

SEQ ID NO: 412352 - RNA, 32 nt, Human
cuugaucccaggaggucgagaccagccugggg

SEQ ID NO: 412353 - RNA, 32 nt, Human
cuugaucccaggaguuugagaccagccugggc

SEQ ID NO: 412354 - RNA, 32 nt, Human
cuugauccgcaauaccgcuugccacauccucu

SEQ ID NO: 412355 - RNA, 32 nt, Human
cuugauccggggagguggaaguugcagugggc

SEQ ID NO: 412356 - RNA, 32 nt, Human
cuugauccugggaggcagagguuguagugagc

SEQ ID NO: 412357 - RNA, 27 nt, Human
cuugauccugggaggucaaggcugcag

SEQ ID NO: 412358 - RNA, 32 nt, Human
cuugaucgugccacugcacuccagccuggggg

SEQ ID NO: 412359 - RNA, 32 nt, Human
cuugaucguguguuucauuuucugccucuuug

SEQ ID NO: 412360 - RNA, 32 nt, Human
cuugaucucaggagguugaggcugcagugaau

SEQ ID NO: 412361 - RNA, 32 nt, Human
cuugaucuccacaauccuuuaucuuaaccuga

SEQ ID NO: 412362 - RNA, 32 nt, Human
cuugaucucucccaccccaucccucuccccag

SEQ ID NO: 412363 - RNA, 32 nt, Human
cuugaucucugacuuccagccuccagaaucac

SEQ ID NO: 412364 - RNA, 32 nt, Human
cuugaucugcagcuucucugaaguuuggaaaa

SEQ ID NO: 412365 - RNA, 32 nt, Human
cuugaucugucgcccaggcuggagugcaguag

SEQ ID NO: 412366 - RNA, 32 nt, Human
cuugaucugucuuucaaaacaauguccccuua

SEQ ID NO: 412367 - RNA, 32 nt, Human
cuugaucuguuacccaggcuggagugcagugg

SEQ ID NO: 412368 - RNA, 32 nt, Human
cuugaucuguucugucuuguggcagggcucua

SEQ ID NO: 412369 - RNA, 32 nt, Human
cuugaucuucaucaacaauuacacucaggaaa

SEQ ID NO: 412370 - RNA, 32 nt, Human
cuugaucuugaacuucucagccuccagaacga

SEQ ID NO: 412371 - RNA, 32 nt, Human
cuugaugaagagucuguuuuuaaucauaaaaa

SEQ ID NO: 412372 - RNA, 32 nt, Human
cuugaugaagccaccagugcccugacagagga

SEQ ID NO: 412373 - RNA, 22 nt, Human
cuugaugaccucuguuucuucc

SEQ ID NO: 412374 - RNA, 32 nt, Human
cuugaugagaagagaccccugcccauccucag

SEQ ID NO: 412375 - RNA, 32 nt, Human
cuugaugagcaugccagcuaugugguagggcc

SEQ ID NO: 412376 - RNA, 32 nt, Human
cuugaugcauaaaaacagcugggcucccuugg

SEQ ID NO: 412377 - RNA, 32 nt, Human
cuugaugccagccugcugcaacagacccuccc

SEQ ID NO: 412378 - RNA, 21 nt, Human
cuugaugccaggaguucaaga

SEQ ID NO: 412379 - RNA, 32 nt, Human
cuugaugccaggaguucaagaccagccugggc

SEQ ID NO: 412380 - RNA, 32 nt, Human
cuugaugccaggaguuccagaccaggcuggcc

SEQ ID NO: 412381 - RNA, 21 nt, Human
cuugaugccaggaguucgaga

SEQ ID NO: 412382 - RNA, 32 nt, Human
cuugaugccaggaguucgagaccagccuggcc

SEQ ID NO: 412383 - RNA, 32 nt, Human
cuugaugccucccggcuuugcagggagaccag

SEQ ID NO: 412384 - RNA, 32 nt, Human
cuugaugcuagcaacuuuccauuucucauggu

SEQ ID NO: 412385 - RNA, 32 nt, Human
cuugaugcuaggggccaggccuccucugugac

SEQ ID NO: 412386 - RNA, 32 nt, Human
cuugaugcucaccucuauauuaguuuauuguu

SEQ ID NO: 412387 - RNA, 32 nt, Human
cuugauggaagugggccaguccugguugucug

SEQ ID NO: 412388 - RNA, 32 nt, Human
cuugauggagaaggaaaaggcuggcaaggugg

SEQ ID NO: 412389 - RNA, 32 nt, Human
cuugauggaucacccccaggaggggaaaaugg

SEQ ID NO: 412390 - RNA, 32 nt, Human
cuugauggcaugcgccuguaaucccagcuacu

SEQ ID NO: 412391 - RNA, 32 nt, Human
cuugaugggagcuucagguucuugccaaagua

SEQ ID NO: 412392 - RNA, 32 nt, Human
cuugaugggcaggcuuggaagggacuucuccc

SEQ ID NO: 412393 - RNA, 32 nt, Human
cuugaugggucaaccuuuguguggcuccuggu

SEQ ID NO: 412394 - RNA, 32 nt, Human
cuugauggugugcaccuguaaucucagcuacu

SEQ ID NO: 412395 - RNA, 32 nt, Human
cuugaugguguugaaauguccaccuucuuaaa

SEQ ID NO: 412396 - RNA, 32 nt, Human
cuugaugugaagaucaaguucagugcuguggg

SEQ ID NO: 412397 - RNA, 32 nt, Human
cuugaugugagcucugggggagugugaaggau

SEQ ID NO: 412398 - RNA, 32 nt, Human
cuugaugugauggugaucaugggcugcucucu

SEQ ID NO: 412399 - RNA, 32 nt, Human
cuugaugugauguggcaggagggcaguggugg

SEQ ID NO: 412400 - RNA, 32 nt, Human
cuugauguguaagugacaugccauaguuuaca

SEQ ID NO: 412401 - RNA, 32 nt, Human
cuugauguuacaugacucuggaacaauaugaa

SEQ ID NO: 412402 - RNA, 32 nt, Human
cuugauguucuucuguguaacaggugaugucc

SEQ ID NO: 412403 - RNA, 32 nt, Human
cuugauuaaauguuagaccacagaaguggaau

SEQ ID NO: 412404 - RNA, 32 nt, Human
cuugauuauaccacugcacuccagccugggug

SEQ ID NO: 412405 - RNA, 32 nt, Human
cuugauucauucuacucugaaaauccaaaggu

SEQ ID NO: 412406 - RNA, 32 nt, Human
cuugauucauucucaugucauucugcacacag

SEQ ID NO: 412407 - RNA, 32 nt, Human
cuugauucauuucucgcccccgucacugauua

SEQ ID NO: 412408 - RNA, 32 nt, Human
cuugauuccucuauugcuggccuuacuugaug

SEQ ID NO: 412409 - RNA, 20 nt, Human
cuugauucuuguuacugccc

SEQ ID NO: 412410 - RNA, 32 nt, Human
cuugauugaggacuucaccccuugauuaaagc

SEQ ID NO: 412411 - RNA, 32 nt, Human
cuugauugcaccacugcacucuagccugggga

SEQ ID NO: 412412 - RNA, 32 nt, Human
cuugauugcugcugcuuaauuugauguaauau

SEQ ID NO: 412413 - RNA, 32 nt, Human
cuugauugggagggcggugggagccaguaaag

SEQ ID NO: 412414 - RNA, 32 nt, Human
cuugauugggggugggaacuccccuugcccug

SEQ ID NO: 412415 - RNA, 32 nt, Human
cuugauugucccuggauggagugcagucaccu

SEQ ID NO: 412416 - RNA, 32 nt, Human
cuugauugugucacugcacuccagccugggca

SEQ ID NO: 412417 - RNA, 32 nt, Human
cuugauugugucacugcacuccagcuugggug

SEQ ID NO: 412418 - RNA, 32 nt, Human
cuugauuuaggagagaauaaagggcuauauaa

SEQ ID NO: 412419 - RNA, 32 nt, Human
cuugauuucuucucuggaggcuuggaaacgcu

SEQ ID NO: 412420 - RNA, 32 nt, Human
cuugauuucuuuaagagugaacauuagacaua

SEQ ID NO: 412421 - RNA, 32 nt, Human
cuugauuugcuaugauaggagccaccuuggcu

SEQ ID NO: 412422 - RNA, 32 nt, Human
cuugauuuuaaguaguuacuguccuagugaau

SEQ ID NO: 412423 - RNA, 32 nt, Human
cuugauuuuccccucuucuccccaccuccacu

SEQ ID NO: 412424 - RNA, 32 nt, Human
cuugauuuucuuucuccucugauuucaguuca

SEQ ID NO: 412425 - RNA, 32 nt, Human
cuugcaaaaugcugggauuacaggcaugagcc

SEQ ID NO: 412426 - RNA, 32 nt, Human
cuugcaaacucuucccaccuccuucacgacac

SEQ ID NO: 412427 - RNA, 32 nt, Human
cuugcaaacuggccauggauggggaagugccc

SEQ ID NO: 412428 - RNA, 32 nt, Human
cuugcaaagugcugggauuccaggugggagcc

SEQ ID NO: 412429 - RNA, 21 nt, Human
cuugcaaauaaucacagauua

SEQ ID NO: 412430 - RNA, 32 nt, Human
cuugcaacaaauucugcaugguccagcgcucc

SEQ ID NO: 412431 - RNA, 31 nt, Human
cuugcaacacaagacccuaggagggaggacg

SEQ ID NO: 412432 - RNA, 32 nt, Human
cuugcaaccagcucuacuggauucuuaucaga

SEQ ID NO: 412433 - RNA, 32 nt, Human
cuugcaaccagcuuuggagaaagcccagcucc

SEQ ID NO: 412434 - RNA, 32 nt, Human
cuugcaaccuuaagaggucaaaauuuggauca

SEQ ID NO: 412435 - RNA, 32 nt, Human
cuugcaacuaccucugugacuaguggagacaa

SEQ ID NO: 412436 - RNA, 32 nt, Human
cuugcaacucaaauaggcuauauuucacaaua

SEQ ID NO: 412437 - RNA, 24 nt, Human
cuugcaacucaucagaaaauucau

SEQ ID NO: 412438 - RNA, 32 nt, Human
cuugcaacuuccuucuccacuaacccaggacu

SEQ ID NO: 412439 - RNA, 32 nt, Human
cuugcaagaccagccaaugaauaaugguaauc

SEQ ID NO: 412440 - RNA, 32 nt, Human
cuugcaagaucuaggaagaggaaggggaggga

SEQ ID NO: 412441 - RNA, 32 nt, Human
cuugcaagccaucacagaauucauauggagag

SEQ ID NO: 412442 - RNA, 32 nt, Human
cuugcaagcccuggaggagcuggaccucggug

SEQ ID NO: 412443 - RNA, 32 nt, Human
cuugcaaggaaaggagauguccagccaaugau

SEQ ID NO: 412444 - RNA, 32 nt, Human
cuugcaaggaggggccuuugagccucaguucu

SEQ ID NO: 412445 - RNA, 24 nt, Human
cuugcaagguggagguuacaguga

SEQ ID NO: 412446 - RNA, 32 nt, Human
cuugcaagguggagguuacagugagcugaaau

SEQ ID NO: 412447 - RNA, 32 nt, Human
cuugcaagguucaguaguggcagaucaugacu

SEQ ID NO: 412448 - RNA, 32 nt, Human
cuugcaaguaccacuccauccagccuugggca

SEQ ID NO: 412449 - RNA, 24 nt, Human
cuugcaaguuuauuuuugcuuccu

SEQ ID NO: 412450 - RNA, 32 nt, Human
cuugcaauccaggcuuuccuuggaaguggcug

SEQ ID NO: 412451 - RNA, 32 nt, Human
cuugcaaucccagcuacuugggacgcugaggu

SEQ ID NO: 412452 - RNA, 32 nt, Human
cuugcaaucccagcuauuugggaggcugaggc

SEQ ID NO: 412453 - RNA, 32 nt, Human
cuugcaaucccagugcuuugggagacugaggc

SEQ ID NO: 412454 - RNA, 32 nt, Human
cuugcacaaaccuagaugguguagcccacuac

SEQ ID NO: 412455 - RNA, 20 nt, Human
cuugcacaaauuguaaugug

SEQ ID NO: 412456 - RNA, 24 nt, Human
cuugcacaacaucagagaguucau

SEQ ID NO: 412457 - RNA, 32 nt, Human
cuugcacacaugcacacagaccacauagcaca

SEQ ID NO: 412458 - RNA, 32 nt, Human
cuugcacacucaccuccaccuucacaggccau

SEQ ID NO: 412459 - RNA, 32 nt, Human
cuugcacagaggcugacccugccuccccucuu

SEQ ID NO: 412460 - RNA, 22 nt, Human
cuugcacagcacugcuaaugua

SEQ ID NO: 412461 - RNA, 32 nt, Human
cuugcacagcaucagagaguucauacuggaga

SEQ ID NO: 412462 - RNA, 24 nt, Human
cuugcacagcaugagauaauucau

SEQ ID NO: 412463 - RNA, 17 nt, Human
cuugcacagccagagga

SEQ ID NO: 412464 - RNA, 32 nt, Human
cuugcacaggguggggcgcgcaguaggaaccu

SEQ ID NO: 412465 - RNA, 32 nt, Human
cuugcaccauugcacuccagccugggcgacaa

SEQ ID NO: 412466 - RNA, 32 nt, Human
cuugcacccaggagguggagguugcagugagc

SEQ ID NO: 412467 - RNA, 21 nt, Human
cuugcacccucuuugcuuccu

SEQ ID NO: 412468 - RNA, 19 nt, Human
cuugcaccgccagcugccg

SEQ ID NO: 412469 - RNA, 32 nt, Human
cuugcaccuauaaucccagcacuuugggaggc

SEQ ID NO: 412470 - RNA, 32 nt, Human
cuugcaccuggccaccuccccugcuucucccu

SEQ ID NO: 412471 - RNA, 32 nt, Human
cuugcaccuguaaucccagcacuuugggaggc

SEQ ID NO: 412472 - RNA, 32 nt, Human
cuugcaccuucccauauuuaugugccuuuugu

SEQ ID NO: 412473 - RNA, 32 nt, Human
cuugcaccuuuucauguacagcauuaaaauuu

SEQ ID NO: 412474 - RNA, 32 nt, Human
cuugcacgccccgcggagcucucuccauggua

SEQ ID NO: 412475 - RNA, 32 nt, Human
cuugcacuaauuaggguuagagaagaccccac

SEQ ID NO: 412476 - RNA, 32 nt, Human
cuugcacuaccagcaggcucucaccagcgcac

SEQ ID NO: 412477 - RNA, 32 nt, Human
cuugcacuacugcacuccagccugggugacag

SEQ ID NO: 412478 - RNA, 32 nt, Human
cuugcacuccagccugggugacagagugagac

SEQ ID NO: 412479 - RNA, 32 nt, Human
cuugcacuccuuugaacuuucuccccacuccu

SEQ ID NO: 412480 - RNA, 32 nt, Human
cuugcacucuugcccauaccaaugugaucguc

SEQ ID NO: 412481 - RNA, 32 nt, Human
cuugcacugaucuuucuccucuccuucuguga

SEQ ID NO: 412482 - RNA, 32 nt, Human
cuugcacugcacaaccuuccuucugcuucucc

SEQ ID NO: 412483 - RNA, 32 nt, Human
cuugcacugccaggcuggcuguagcgacucug

SEQ ID NO: 412484 - RNA, 32 nt, Human
cuugcacuggcuggagaaaggcaggcaguggg

SEQ ID NO: 412485 - RNA, 32 nt, Human
cuugcacugucacccaggcugcuggaguacag

SEQ ID NO: 412486 - RNA, 32 nt, Human
cuugcacugucacccaggcuggagugcagugg

SEQ ID NO: 412487 - RNA, 32 nt, Human
cuugcacugugaggugggggaggugggagagg

SEQ ID NO: 412488 - RNA, 32 nt, Human
cuugcacuguucacccuucacaucaacccugu

SEQ ID NO: 412489 - RNA, 32 nt, Human
cuugcacuucagaggcagacagugucauuaca

SEQ ID NO: 412490 - RNA, 32 nt, Human
cuugcacuugcagccugaagcggagagcacag

SEQ ID NO: 412491 - RNA, 32 nt, Human
cuugcacuuuuaguucaagaaacagugaaguc

SEQ ID NO: 412492 - RNA, 32 nt, Human
cuugcacuuuucucccucccugcccccucucg

SEQ ID NO: 412493 - RNA, 32 nt, Human
cuugcagaaaacgcuuaaccugaguuucauag

SEQ ID NO: 412494 - RNA, 24 nt, Human
cuugcagaacaucagaaaauucau

SEQ ID NO: 412495 - RNA, 32 nt, Human
cuugcagaaccagacagagaaccccacagacu

SEQ ID NO: 412496 - RNA, 24 nt, Human
cuugcagaauaucagaaaauucau

SEQ ID NO: 412497 - RNA, 32 nt, Human
cuugcagacaagugccuucucaauguguccuc

SEQ ID NO: 412498 - RNA, 32 nt, Human
cuugcagacccccagccggggcugaagcacag

SEQ ID NO: 412499 - RNA, 32 nt, Human
cuugcagacgggcuucucccacccccucacgc

SEQ ID NO: 412500 - RNA, 32 nt, Human
cuugcagacugagggcgguggggagaaccagg

SEQ ID NO: 412501 - RNA, 32 nt, Human
cuugcagacuuuuccccaccuuuggggcucgu

SEQ ID NO: 412502 - RNA, 32 nt, Human
cuugcagagcuaggugugugacugccucccuu

SEQ ID NO: 412503 - RNA, 32 nt, Human
cuugcagagguaaaggaggaggggcaggugga

SEQ ID NO: 412504 - RNA, 32 nt, Human
cuugcagagugggauugugggagggauuggca

SEQ ID NO: 412505 - RNA, 32 nt, Human
cuugcagauaaagauccaacaacaucuggauu

SEQ ID NO: 412506 - RNA, 23 nt, Human
cuugcagauuuaaccugucuucu

SEQ ID NO: 412507 - RNA, 32 nt, Human
cuugcagcaauggcuuggauuagauccacuug

SEQ ID NO: 412508 - RNA, 32 nt, Human
cuugcagcagcucugguggcagcuguccuuga

SEQ ID NO: 412509 - RNA, 32 nt, Human
cuugcagcaguggugcaagguccuucccaggg

SEQ ID NO: 412510 - RNA, 32 nt, Human
cuugcagccagccggcgguccagccuggugcc

SEQ ID NO: 412511 - RNA, 32 nt, Human
cuugcagccaugagccucuauuucucauuccu

SEQ ID NO: 412512 - RNA, 21 nt, Human
cuugcagccccacugcuccuu

SEQ ID NO: 412513 - RNA, 22 nt, Human
cuugcagccccccaaacuggga

SEQ ID NO: 412514 - RNA, 19 nt, Human
cuugcagccgccgccgccg

SEQ ID NO: 412515 - RNA, 32 nt, Human
cuugcagccuccagguccgguggggauucugc

SEQ ID NO: 412516 - RNA, 19 nt, Human
cuugcagcugccgccgccg

SEQ ID NO: 412517 - RNA, 32 nt, Human
cuugcagcuggugccauccaugucucacagcc

SEQ ID NO: 412518 - RNA, 32 nt, Human
cuugcagcuuacaucuguccugggcuucccca

SEQ ID NO: 412519 - RNA, 32 nt, Human
cuugcaggaauccugccucccugucaucccag

SEQ ID NO: 412520 - RNA, 24 nt, Human
cuugcaggacaucaggaaauucau

SEQ ID NO: 412521 - RNA, 32 nt, Human
cuugcaggacguuuuccccaaccucuuacacc

SEQ ID NO: 412522 - RNA, 23 nt, Human
cuugcaggagcgggggacugcug

SEQ ID NO: 412523 - RNA, 19 nt, Human
cuugcaggaggcggugcag

SEQ ID NO: 412524 - RNA, 27 nt, Human
cuugcaggagguggagguuguuggugg

SEQ ID NO: 412525 - RNA, 32 nt, Human
cuugcaggagguggagguuguugguggaggag

SEQ ID NO: 412526 - RNA, 22 nt, Human
cuugcaggaugccuuuccuuuu

SEQ ID NO: 412527 - RNA, 32 nt, Human
cuugcaggcccagaaacuagacuugggcauga

SEQ ID NO: 412528 - RNA, 32 nt, Human
cuugcaggcuguaacuucucucgagugccuga

SEQ ID NO: 412529 - RNA, 32 nt, Human
cuugcagggagcaccugucauccaggcagcuc

SEQ ID NO: 412530 - RNA, 21 nt, Human
cuugcagggcauccgggccug

SEQ ID NO: 412531 - RNA, 32 nt, Human
cuugcagggcuggcccugccugcuccugcggc

SEQ ID NO: 412532 - RNA, 23 nt, Human
cuugcagggcuucuggggcguug

SEQ ID NO: 412533 - RNA, 32 nt, Human
cuugcaggggaggccuggcugcagagaggcgg

SEQ ID NO: 412534 - RNA, 23 nt, Human
cuugcaggguggcugaagcccug

SEQ ID NO: 412535 - RNA, 32 nt, Human
cuugcaggucucuuuuuacuagaucauggcug

SEQ ID NO: 412536 - RNA, 23 nt, Human
cuugcaggugucgacugucuucc

SEQ ID NO: 412537 - RNA, 32 nt, Human
cuugcaguaagccgagagaggcaggcggauca

SEQ ID NO: 412538 - RNA, 32 nt, Human
cuugcaguagugccucugucuccucaccugca

SEQ ID NO: 412539 - RNA, 32 nt, Human
cuugcagucagcuucauaccauuuuuaaaguc

SEQ ID NO: 412540 - RNA, 32 nt, Human
cuugcagucccaggagcagaagauaugacggc

SEQ ID NO: 412541 - RNA, 24 nt, Human
cuugcaguccgcuaggugagagga

SEQ ID NO: 412542 - RNA, 32 nt, Human
cuugcaguccuacaacaagugagaggcuugcu

SEQ ID NO: 412543 - RNA, 32 nt, Human
cuugcagucuccagggcaccacagaccccagu

SEQ ID NO: 412544 - RNA, 32 nt, Human
cuugcagucuuuagagccccaggauuuaucuu

SEQ ID NO: 412545 - RNA, 32 nt, Human
cuugcagugagaugcucccagaugcauuuguc

SEQ ID NO: 412546 - RNA, 32 nt, Human
cuugcagugagccgagacugugcuccagccug

SEQ ID NO: 412547 - RNA, 32 nt, Human
cuugcagugagccgagauggcucacagaucaa

SEQ ID NO: 412548 - RNA, 32 nt, Human
cuugcagugagcugagaucgugacacugcacu

SEQ ID NO: 412549 - RNA, 32 nt, Human
cuugcagugagcugagauggcaccacugcacu

SEQ ID NO: 412550 - RNA, 32 nt, Human
cuugcagugagcugagauggcaccacuggacu

SEQ ID NO: 412551 - RNA, 32 nt, Human
cuugcagugagcugagauggcgccacugcacu

SEQ ID NO: 412552 - RNA, 32 nt, Human
cuugcagugagcugagauugcacuccagccug

SEQ ID NO: 412553 - RNA, 32 nt, Human
cuugcagugagcugagauugcgccacugcacu

SEQ ID NO: 412554 - RNA, 32 nt, Human
cuugcagugcuaaaaagcagaucguucucucu

SEQ ID NO: 412555 - RNA, 32 nt, Human
cuugcaguggauucuuggucaggugugcccac

SEQ ID NO: 412556 - RNA, 32 nt, Human
cuugcaguguaauccuggagcguaugcccugu

SEQ ID NO: 412557 - RNA, 24 nt, Human
cuugcaguucaucagagaauucau

SEQ ID NO: 412558 - RNA, 32 nt, Human
cuugcaguucaucagagaauucauacuggaga

SEQ ID NO: 412559 - RNA, 32 nt, Human
cuugcaguucugggaguaaagcucccagcaua

SEQ ID NO: 412560 - RNA, 32 nt, Human
cuugcaucaguuuguuuaacugugaguggcug

SEQ ID NO: 412561 - RNA, 32 nt, Human
cuugcaucgcguuccccgcauccucggguccu

SEQ ID NO: 412562 - RNA, 32 nt, Human
cuugcaucucagaauccuagagaugguugcug

SEQ ID NO: 412563 - RNA, 32 nt, Human
cuugcaucugaauguuuugguggagagaugac

SEQ ID NO: 412564 - RNA, 32 nt, Human
cuugcaugccugggcccaggcccagccucuug

SEQ ID NO: 412565 - RNA, 30 nt, Human
cuugcaugcugcugccacuccugcugcacc

SEQ ID NO: 412566 - RNA, 32 nt, Human
cuugcauggaggcggcgguggcacugaagaga

SEQ ID NO: 412567 - RNA, 32 nt, Human
cuugcauggucacuugagcccacacacacgcu

SEQ ID NO: 412568 - RNA, 32 nt, Human
cuugcauguaaacaucuuccagcaacaaucau

SEQ ID NO: 412569 - RNA, 32 nt, Human
cuugcauguggacugaagcugaccuucgauuc

SEQ ID NO: 412570 - RNA, 32 nt, Human
cuugcauguguauacauacauguaacuucauu

SEQ ID NO: 412571 - RNA, 31 nt, Human
cuugcauucauuuucugacaugcauugucgg

SEQ ID NO: 412572 - RNA, 31 nt, Human
cuugcauucauuuucugacaugcauuguugg

SEQ ID NO: 412573 - RNA, 32 nt, Human
cuugcauuccaggaguggccugugccucccac

SEQ ID NO: 412574 - RNA, 32 nt, Human
cuugcauuccaggggaguuuucuuuugaguag

SEQ ID NO: 412575 - RNA, 32 nt, Human
cuugcauugccugacucugaaaccagaagggc

SEQ ID NO: 412576 - RNA, 32 nt, Human
cuugcauugcuuuccucugagcuuuagugggu

SEQ ID NO: 412577 - RNA, 32 nt, Human
cuugcauuggcaccccuccagccuggaggcca

SEQ ID NO: 412578 - RNA, 32 nt, Human
cuugcauuuuagcagugcauguuucuaauuga

SEQ ID NO: 412579 - RNA, 32 nt, Human
cuugccaacaaacaccagaaauuagaagaggc

SEQ ID NO: 412580 - RNA, 32 nt, Human
cuugccaacacagugaaacccugucucuacua

SEQ ID NO: 412581 - RNA, 32 nt, Human
cuugccaacagcuguacacagguuuguucuaa

SEQ ID NO: 412582 - RNA, 32 nt, Human
cuugccaacauagugaaacccugucuuuacua

SEQ ID NO: 412583 - RNA, 32 nt, Human
cuugccaacauggugaaaccccaucucuacua

SEQ ID NO: 412584 - RNA, 32 nt, Human
cuugccaacauggugaaacccugucucuacua

SEQ ID NO: 412585 - RNA, 32 nt, Human
cuugccaacucuguuccagccuauggcuuuag

SEQ ID NO: 412586 - RNA, 32 nt, Human
cuugccacaacuggaaacacuugaaaggggac

SEQ ID NO: 412587 - RNA, 32 nt, Human
cuugccacagccaacagaaaaaucaaaaugau

SEQ ID NO: 412588 - RNA, 32 nt, Human
cuugccacagucacggggugcaugugcagagg

SEQ ID NO: 412589 - RNA, 32 nt, Human
cuugccacgcuguuguaaaaacccaagucccu

SEQ ID NO: 412590 - RNA, 17 nt, Human
cuugccacguccuguca

SEQ ID NO: 412591 - RNA, 32 nt, Human
cuugccacguucccacgggcuugggggaaaga

SEQ ID NO: 412592 - RNA, 32 nt, Human
cuugccacugcacaccagccugggcaacacag

SEQ ID NO: 412593 - RNA, 32 nt, Human
cuugccacugcacuccagccugggcaacagag

SEQ ID NO: 412594 - RNA, 32 nt, Human
cuugccacugcucuacagccuggaagacagag

SEQ ID NO: 412595 - RNA, 32 nt, Human
cuugccacugcucuccagccugagcgacagag

SEQ ID NO: 412596 - RNA, 32 nt, Human
cuugccacuggucucaaagcugggcagcccau

SEQ ID NO: 412597 - RNA, 32 nt, Human
cuugccacuguacuccagccugaagagcgaga

SEQ ID NO: 412598 - RNA, 32 nt, Human
cuugccacugucccuacccuccaggagugggu

SEQ ID NO: 412599 - RNA, 32 nt, Human
cuugccacugucuccuggcccucucucugauc

SEQ ID NO: 412600 - RNA, 32 nt, Human
cuugccagaggagaugaccaugauuuucagga

SEQ ID NO: 412601 - RNA, 32 nt, Human
cuugccagccucccuggggucuggggaccugc

SEQ ID NO: 412602 - RNA, 21 nt, Human
cuugccagccugacucagauc

SEQ ID NO: 412603 - RNA, 22 nt, Human
cuugccagcggggugggcgcgg

SEQ ID NO: 412604 - RNA, 24 nt, Human
cuugccagcuucccuuuucuccca

SEQ ID NO: 412605 - RNA, 32 nt, Human
cuugccaggaacccaguggccagggagcgugg

SEQ ID NO: 412606 - RNA, 32 nt, Human
cuugccaggaggggaguggcagugaggagggg

SEQ ID NO: 412607 - RNA, 32 nt, Human
cuugccaggccucuccccugcaggacuggcau

SEQ ID NO: 412608 - RNA, 32 nt, Human
cuugccagggagacccccgaaccuuugugcca

SEQ ID NO: 412609 - RNA, 32 nt, Human
cuugccaggucuccuacccacacuggggaaau

SEQ ID NO: 412610 - RNA, 32 nt, Human
cuugccaguaggggcggccgggcagaggcgcc

SEQ ID NO: 412611 - RNA, 32 nt, Human
cuugccagucugaacaguggcagcagagagca

SEQ ID NO: 412612 - RNA, 32 nt, Human
cuugccaucacugguccaggucuucaguuucc

SEQ ID NO: 412613 - RNA, 32 nt, Human
cuugccaucccucccuccaccucccugcaaua

SEQ ID NO: 412614 - RNA, 32 nt, Human
cuugccaugccuacccuucccugucugucugg

SEQ ID NO: 412615 - RNA, 32 nt, Human
cuugccauugcacuccagcugagagugugacc

SEQ ID NO: 412616 - RNA, 23 nt, Human
cuugcccaaacucaggcagcugg

SEQ ID NO: 412617 - RNA, 20 nt, Human
cuugcccaaacuggcagggg

SEQ ID NO: 412618 - RNA, 32 nt, Human
cuugcccaaagucacacagcugaacaguggug

SEQ ID NO: 412619 - RNA, 32 nt, Human
cuugcccaaagucacccagcugaacaguggua

SEQ ID NO: 412620 - RNA, 32 nt, Human
cuugcccaacuaaacccagaacucaaacuuaa

SEQ ID NO: 412621 - RNA, 32 nt, Human
cuugcccaagaguuugagaccagccuggacaa

SEQ ID NO: 412622 - RNA, 32 nt, Human
cuugcccacuggccgcugagcgcccccgagcc

SEQ ID NO: 412623 - RNA, 24 nt, Human
cuugcccagacuggaauacagugg

SEQ ID NO: 412624 - RNA, 27 nt, Human
cuugcccagagcugugcagugcagugg

SEQ ID NO: 412625 - RNA, 32 nt, Human
cuugcccagcacaaaguauuauagaacaaggu

SEQ ID NO: 412626 - RNA, 32 nt, Human
cuugcccagcuggguccaacacuuguucaguu

SEQ ID NO: 412627 - RNA, 32 nt, Human
cuugcccaggauguuguuaaaugcagaucuga

SEQ ID NO: 412628 - RNA, 32 nt, Human
cuugcccaggcagagagagcaggagcggaccg

SEQ ID NO: 412629 - RNA, 32 nt, Human
cuugcccaggcaggaggcuggggugcugugug

SEQ ID NO: 412630 - RNA, 22 nt, Human
cuugcccaggcaggaguacagu

SEQ ID NO: 412631 - RNA, 20 nt, Human
cuugcccaggcuggaguaca

SEQ ID NO: 412632 - RNA, 24 nt, Human
cuugcccaggcuggaguacaaugg

SEQ ID NO: 412633 - RNA, 24 nt, Human
cuugcccaggcuggagugcaaugg

SEQ ID NO: 412634 - RNA, 22 nt, Human
cuugcccaggcuggagugcagu

SEQ ID NO: 412635 - RNA, 24 nt, Human
cuugcccaggcuggagugcagugg

SEQ ID NO: 412636 - RNA, 24 nt, Human
cuugcccaggcuggagugucgugg

SEQ ID NO: 412637 - RNA, 24 nt, Human
cuugcccaggcuuggaguacagug

SEQ ID NO: 412638 - RNA, 22 nt, Human
cuugcccaggcuuuuugcuccu

SEQ ID NO: 412639 - RNA, 23 nt, Human
cuugcccagggccagugccaugg

SEQ ID NO: 412640 - RNA, 22 nt, Human
cuugcccagguagugaucagug

SEQ ID NO: 412641 - RNA, 32 nt, Human
cuugcccagguggcagagccagcuuuggacgc

SEQ ID NO: 412642 - RNA, 22 nt, Human
cuugcccaguaccauccagugg

SEQ ID NO: 412643 - RNA, 32 nt, Human
cuugcccaguaguucuggaggaaggcccggga

SEQ ID NO: 412644 - RNA, 32 nt, Human
cuugcccagucuuccuucaagacuaacucacu

SEQ ID NO: 412645 - RNA, 32 nt, Human
cuugcccauuaucagaaggaaaaagagcagaa

SEQ ID NO: 412646 - RNA, 32 nt, Human
cuugccccacaccaccuucacacccacacaca

SEQ ID NO: 412647 - RNA, 32 nt, Human
cuugccccacccuucaggaguuuccagagacc

SEQ ID NO: 412648 - RNA, 32 nt, Human
cuugccccacugcugugcaaugccuuaggacu

SEQ ID NO: 412649 - RNA, 32 nt, Human
cuugccccagaaguuugagaccagccugggca

SEQ ID NO: 412650 - RNA, 32 nt, Human
cuugccccaggccagguagcaagagagcagcg

SEQ ID NO: 412651 - RNA, 32 nt, Human
cuugccccagucccuucucuccagcuucaugu

SEQ ID NO: 412652 - RNA, 32 nt, Human
cuugcccccacugucaaggccuggucucaucu

SEQ ID NO: 412653 - RNA, 32 nt, Human
cuugcccccaucauuugucucugacaauacuu

SEQ ID NO: 412654 - RNA, 32 nt, Human
cuugccccgaggcugcacuaccacaggaaaua

SEQ ID NO: 412655 - RNA, 32 nt, Human
cuugccccuaaccucagcccgagggucuccag

SEQ ID NO: 412656 - RNA, 32 nt, Human
cuugccccuagagguaguuguuaaugauuuug

SEQ ID NO: 412657 - RNA, 32 nt, Human
cuugccccuaggaaggugaaucugcccuagcc

SEQ ID NO: 412658 - RNA, 32 nt, Human
cuugccccuccaccuggugcccaagccucccg

SEQ ID NO: 412659 - RNA, 32 nt, Human
cuugccccuccaggaagcugcagcgggccugc

SEQ ID NO: 412660 - RNA, 32 nt, Human
cuugccccucccccauuucccucucccccaug

SEQ ID NO: 412661 - RNA, 32 nt, Human
cuugccccugcucccuccaguaguggccccuu

SEQ ID NO: 412662 - RNA, 31 nt, Human
cuugccccuucuccagggccugugccagcuc

SEQ ID NO: 412663 - RNA, 21 nt, Human
cuugccccuuucuccucuccc

SEQ ID NO: 412664 - RNA, 32 nt, Human
cuugcccucacaccccgcugcccaggagccag

SEQ ID NO: 412665 - RNA, 32 nt, Human
cuugcccucagccucugagcuccaggggucag

SEQ ID NO: 412666 - RNA, 32 nt, Human
cuugcccucccaaaguguugggauuauaggca

SEQ ID NO: 412667 - RNA, 32 nt, Human
cuugcccucugccugccucagcugcugccuga

SEQ ID NO: 412668 - RNA, 32 nt, Human
cuugcccucuucucuuuucccuuccuguaccu

SEQ ID NO: 412669 - RNA, 32 nt, Human
cuugcccugauuuacacagcagucacauuccu

SEQ ID NO: 412670 - RNA, 32 nt, Human
cuugcccugccucaguuucuccaucucccugc

SEQ ID NO: 412671 - RNA, 32 nt, Human
cuugcccuggcuuagcugcaggagaagauggc

SEQ ID NO: 412672 - RNA, 32 nt, Human
cuugcccugggccagcccaggauuguacgugg

SEQ ID NO: 412673 - RNA, 32 nt, Human
cuugcccugucacccaggcuggagugcaaugg

SEQ ID NO: 412674 - RNA, 32 nt, Human
cuugcccugucacccaggcugggguacggugg

SEQ ID NO: 412675 - RNA, 32 nt, Human
cuugcccuguuccccaccuccuggcuccaguc

SEQ ID NO: 412676 - RNA, 32 nt, Human
cuugcccuguugcccaggcuggagagcagugg

SEQ ID NO: 412677 - RNA, 32 nt, Human
cuugcccuguugcccaggcuggagugcagugg

SEQ ID NO: 412678 - RNA, 32 nt, Human
cuugcccuuauuguccugcuuucccaaaaaca

SEQ ID NO: 412679 - RNA, 32 nt, Human
cuugcccuugccacacuugaucucaagggcau

SEQ ID NO: 412680 - RNA, 32 nt, Human
cuugcccuuugucccacuagacucuaacccag

SEQ ID NO: 412681 - RNA, 32 nt, Human
cuugccgaaaccagcaugaugcuucaaagagc

SEQ ID NO: 412682 - RNA, 32 nt, Human
cuugccgaaggauuuugcaguccucugucagu

SEQ ID NO: 412683 - RNA, 32 nt, Human
cuugccgacacccgccucuccccacccuuagg

SEQ ID NO: 412684 - RNA, 32 nt, Human
cuugccgaggaaacccaugcaggcuggguccc

SEQ ID NO: 412685 - RNA, 32 nt, Human
cuugccgccuccauaucaucaagcucuggugg

SEQ ID NO: 412686 - RNA, 23 nt, Human
cuugccgcugccucugggguucg

SEQ ID NO: 412687 - RNA, 32 nt, Human
cuugccggccacuccuccagcugccaggggca

SEQ ID NO: 412688 - RNA, 32 nt, Human
cuugccggccagacuucucuccccugcggcuc

SEQ ID NO: 412689 - RNA, 32 nt, Human
cuugccggggcuaaagcggaggaggggaccag

SEQ ID NO: 412690 - RNA, 32 nt, Human
cuugccguagcuuggguuugagugucaagcac

SEQ ID NO: 412691 - RNA, 32 nt, Human
cuugccguccacccucgguccucaugguccca

SEQ ID NO: 412692 - RNA, 32 nt, Human
cuugccguccagccuguccuugguguggggug

SEQ ID NO: 412693 - RNA, 32 nt, Human
cuugccguccuccugaggguaucuggagcuuc

SEQ ID NO: 412694 - RNA, 32 nt, Human
cuugccguggggaccuuggaaaccuggcuuug

SEQ ID NO: 412695 - RNA, 32 nt, Human
cuugccuagauuuaaggccacugugaggagag

SEQ ID NO: 412696 - RNA, 19 nt, Human
cuugccuagccucucccuc

SEQ ID NO: 412697 - RNA, 32 nt, Human
cuugccuagggggcagagggugcaguggcagu

SEQ ID NO: 412698 - RNA, 20 nt, Human
cuugccuagugggccuuccu

SEQ ID NO: 412699 - RNA, 32 nt, Human
cuugccuagugggccuuccuucccaggucgcc

SEQ ID NO: 412700 - RNA, 32 nt, Human
cuugccuaguguaucuuaucccugcacugugu

SEQ ID NO: 412701 - RNA, 32 nt, Human
cuugccuauuuucaucuugcuguuuucuuuuu

SEQ ID NO: 412702 - RNA, 32 nt, Human
cuugccucacuacaaccccugccuccuggguu

SEQ ID NO: 412703 - RNA, 32 nt, Human
cuugccucacugcaacgccugccucucaggcu

SEQ ID NO: 412704 - RNA, 32 nt, Human
cuugccucauuccucuggaauaaaguagcuuu

SEQ ID NO: 412705 - RNA, 32 nt, Human
cuugccuccaaauccuugucucaggccugcau

SEQ ID NO: 412706 - RNA, 32 nt, Human
cuugccuccacaccuuuguccuccaguuuagu

SEQ ID NO: 412707 - RNA, 32 nt, Human
cuugccuccacucaccacaagcugagcaggac

SEQ ID NO: 412708 - RNA, 24 nt, Human
cuugccuccaggaccuugcuuccu

SEQ ID NO: 412709 - RNA, 32 nt, Human
cuugccucccaaagugcuaagauuacagccuc

SEQ ID NO: 412710 - RNA, 32 nt, Human
cuugccucccaaagugcugggauuacaggugu

SEQ ID NO: 412711 - RNA, 32 nt, Human
cuugccucccaaagugcugggauugcaggcau

SEQ ID NO: 412712 - RNA, 32 nt, Human
cuugccuccccacugcagccugcgguccugcc

SEQ ID NO: 412713 - RNA, 32 nt, Human
cuugccuccuccuccuccucuaccuccaguca

SEQ ID NO: 412714 - RNA, 32 nt, Human
cuugccuccugacuagaccagucuucuugcau

SEQ ID NO: 412715 - RNA, 32 nt, Human
cuugccuccugccuccgcgcuuacacacgcac

SEQ ID NO: 412716 - RNA, 32 nt, Human
cuugccuccuguguaaucauuucuugggcccu

SEQ ID NO: 412717 - RNA, 32 nt, Human
cuugccuccuucuuuccucccucucucugggc

SEQ ID NO: 412718 - RNA, 32 nt, Human
cuugccucuccauccuccgaaaaaccccugag

SEQ ID NO: 412719 - RNA, 32 nt, Human
cuugccucugcacuuuucuauauuguucagcu

SEQ ID NO: 412720 - RNA, 32 nt, Human
cuugccucugcucucccuuuguggggacucag

SEQ ID NO: 412721 - RNA, 32 nt, Human
cuugccucuggagaccccagccccagagggcu

SEQ ID NO: 412722 - RNA, 26 nt, Human
cuugccucuucuugaguucuuugcuc

SEQ ID NO: 412723 - RNA, 22 nt, Human
cuugccucuuuuaccugcugcu

SEQ ID NO: 412724 - RNA, 23 nt, Human
cuugccugacacucagacccuca

SEQ ID NO: 412725 - RNA, 32 nt, Human
cuugccugcacccaccaugaggcauggagcag

SEQ ID NO: 412726 - RNA, 32 nt, Human
cuugccugcacuccauccugucugcaacgcug

SEQ ID NO: 412727 - RNA, 32 nt, Human
cuugccugcagcuuuuacuuaacccuguaguu

SEQ ID NO: 412728 - RNA, 32 nt, Human
cuugccugcaguguguguggcagcagcccaug

SEQ ID NO: 412729 - RNA, 32 nt, Human
cuugccugccagcugcucccgagguggccuug

SEQ ID NO: 412730 - RNA, 19 nt, Human
cuugccugcccuccugucu

SEQ ID NO: 412731 - RNA, 32 nt, Human
cuugccugccuaauggucaucuccccaguaga

SEQ ID NO: 412732 - RNA, 31 nt, Human
cuugccugccucugcuugcugcugucccugc

SEQ ID NO: 412733 - RNA, 32 nt, Human
cuugccugcugcagucggagcugguaaacuac

SEQ ID NO: 412734 - RNA, 21 nt, Human
cuugccuggaaugugucccca

SEQ ID NO: 412735 - RNA, 32 nt, Human
cuugccuggcacuuaaaccuugguagaucugg

SEQ ID NO: 412736 - RNA, 32 nt, Human
cuugccuggccugaugaugguggguggguggg

SEQ ID NO: 412737 - RNA, 32 nt, Human
cuugccuggccuggccugaggcucagcagugc

SEQ ID NO: 412738 - RNA, 18 nt, Human
cuugccuggcguucccuc

SEQ ID NO: 412739 - RNA, 32 nt, Human
cuugccuggcucccagggcuaggguuagggcu

SEQ ID NO: 412740 - RNA, 32 nt, Human
cuugccugggcaauguagcaagaccccauucu

SEQ ID NO: 412741 - RNA, 32 nt, Human
cuugccugggcucaagccuggcccuggcccgc

SEQ ID NO: 412742 - RNA, 32 nt, Human
cuugccuggucugcuuucuuccaaguuugccu

SEQ ID NO: 412743 - RNA, 32 nt, Human
cuugccuggugcuuccucccucauuguguugu

SEQ ID NO: 412744 - RNA, 32 nt, Human
cuugccugguuugaaaauuuguuaacaauaca

SEQ ID NO: 412745 - RNA, 32 nt, Human
cuugccuguagucccaacuacuugggaggcug

SEQ ID NO: 412746 - RNA, 32 nt, Human
cuugccugucgaggcaagaggcugcagaggcg

SEQ ID NO: 412747 - RNA, 32 nt, Human
cuugccugucuugugaggucugugccacaagg

SEQ ID NO: 412748 - RNA, 32 nt, Human
cuugccuguggaacauugucugguccuagcug

SEQ ID NO: 412749 - RNA, 32 nt, Human
cuugccuguggaggucgccucuccccagggga

SEQ ID NO: 412750 - RNA, 32 nt, Human
cuugccuguggcccccaggcucccucuguccu

SEQ ID NO: 412751 - RNA, 32 nt, Human
cuugccugugucacacaugagaagacugagac

SEQ ID NO: 412752 - RNA, 32 nt, Human
cuugccuguguggagcucagccugucucuuua

SEQ ID NO: 412753 - RNA, 32 nt, Human
cuugccuguguuucugugagggaggcugcuuu

SEQ ID NO: 412754 - RNA, 32 nt, Human
cuugccuguugccagacuggagugcaguggca

SEQ ID NO: 412755 - RNA, 22 nt, Human
cuugccuuagcuucuuugguca

SEQ ID NO: 412756 - RNA, 32 nt, Human
cuugccuuaggacggggccaggaggccacaca

SEQ ID NO: 412757 - RNA, 32 nt, Human
cuugccuuaggauggggccaggaggccaggca

SEQ ID NO: 412758 - RNA, 32 nt, Human
cuugccuucagcccuggagugggcagagagua

SEQ ID NO: 412759 - RNA, 32 nt, Human
cuugccuuccacccucuguucucccuccuugu

SEQ ID NO: 412760 - RNA, 32 nt, Human
cuugccuucccucuuuuccuccauccaucgug

SEQ ID NO: 412761 - RNA, 32 nt, Human
cuugccuucucccacuuggaccugcucagagc

SEQ ID NO: 412762 - RNA, 32 nt, Human
cuugccuucuucucccccuuccccugugcucc

SEQ ID NO: 412763 - RNA, 32 nt, Human
cuugccuuguauucccuucuucgggauacagc

SEQ ID NO: 412764 - RNA, 32 nt, Human
cuugccuuucccugaggaggugacuucagugu

SEQ ID NO: 412765 - RNA, 20 nt, Human
cuugccuuuccuggccccca

SEQ ID NO: 412766 - RNA, 32 nt, Human
cuugccuuucuuguaagacuuucuaagcgcau

SEQ ID NO: 412767 - RNA, 32 nt, Human
cuugccuuugcaauaccugcauccccagcacu

SEQ ID NO: 412768 - RNA, 19 nt, Human
cuugccuuugcugcugcug

SEQ ID NO: 412769 - RNA, 19 nt, Human
cuugccuuuuuuguuuccu

SEQ ID NO: 412770 - RNA, 21 nt, Human
cuugcgaccagccucauucua

SEQ ID NO: 412771 - RNA, 32 nt, Human
cuugcgccacugacuccuccuucagucggcuu

SEQ ID NO: 412772 - RNA, 32 nt, Human
cuugcgcccucccucugcuccugagaugcuga

SEQ ID NO: 412773 - RNA, 32 nt, Human
cuugcgccuguacucccagcacuuugggaggc

SEQ ID NO: 412774 - RNA, 32 nt, Human
cuugcgcgcacacacacauacaagcgggcacg

SEQ ID NO: 412775 - RNA, 32 nt, Human
cuugcgcuagauguugagaggcugaggggccc

SEQ ID NO: 412776 - RNA, 32 nt, Human
cuugcgcucaggaggcagagguuacagguuac

SEQ ID NO: 412777 - RNA, 32 nt, Human
cuugcgcucugccucgcuugcagccacgcuag

SEQ ID NO: 412778 - RNA, 32 nt, Human
cuugcgcuguugcccaggcucuagugcaaugg

SEQ ID NO: 412779 - RNA, 32 nt, Human
cuugcgcuugccggggaguccugcugccuucc

SEQ ID NO: 412780 - RNA, 32 nt, Human
cuugcggaccaacaggaggacucccagcuuuc

SEQ ID NO: 412781 - RNA, 24 nt, Human
cuugcggacgccggcuguucuucc

SEQ ID NO: 412782 - RNA, 23 nt, Human
cuugcggacucucccuuccuucc

SEQ ID NO: 412783 - RNA, 23 nt, Human
cuugcggacugcugguccccucu

SEQ ID NO: 412784 - RNA, 22 nt, Human
cuugcggaggacgcuuccuucc

SEQ ID NO: 412785 - RNA, 21 nt, Human
cuugcggcaccgcccacccac

SEQ ID NO: 412786 - RNA, 22 nt, Human
cuugcggcauccacgagaccac

SEQ ID NO: 412787 - RNA, 18 nt, Human
cuugcggcccagaaacca

SEQ ID NO: 412788 - RNA, 32 nt, Human
cuugcggcucagcucugguuuccucucccagg

SEQ ID NO: 412789 - RNA, 32 nt, Human
cuugcggcugggauccugggagccggggcacu

SEQ ID NO: 412790 - RNA, 32 nt, Human
cuugcgggccagcuagaguucugggugggcgu

SEQ ID NO: 412791 - RNA, 21 nt, Human
cuugcggucaggaguucgaga

SEQ ID NO: 412792 - RNA, 19 nt, Human
cuugcgguccuccugucuu

SEQ ID NO: 412793 - RNA, 32 nt, Human
cuugcggugagcugagauugcgccacugcacc

SEQ ID NO: 412794 - RNA, 32 nt, Human
cuugcguaggagagcagacacgaggacaugag

SEQ ID NO: 412795 - RNA, 21 nt, Human
cuugcgucaaaaucaggacug

SEQ ID NO: 412796 - RNA, 32 nt, Human
cuugcgugagguacucggguccgucccgacgg

SEQ ID NO: 412797 - RNA, 23 nt, Human
cuugcguuuguaacuguggucua

SEQ ID NO: 412798 - RNA, 32 nt, Human
cuugcuaaauauugagaaacuaaacuacuaag

SEQ ID NO: 412799 - RNA, 32 nt, Human
cuugcuaaccccaccaucacacugccacccug

SEQ ID NO: 412800 - RNA, 32 nt, Human
cuugcuaacuccaggaacagguuuaaguuuuu

SEQ ID NO: 412801 - RNA, 24 nt, Human
cuugcuaagcaucagagaauucau

SEQ ID NO: 412802 - RNA, 32 nt, Human
cuugcuacacagaaauaacaaacacguuauuu

SEQ ID NO: 412803 - RNA, 19 nt, Human
cuugcuacaucucuguuca

SEQ ID NO: 412804 - RNA, 25 nt, Human
cuugcuaccucuugcccuccuuccu

SEQ ID NO: 412805 - RNA, 32 nt, Human
cuugcuacgugacccaggcuggaguguaguag

SEQ ID NO: 412806 - RNA, 32 nt, Human
cuugcuacugaggccaggcugauaggagcuca

SEQ ID NO: 412807 - RNA, 32 nt, Human
cuugcuacugcuucggcuucccggcuaccccc

SEQ ID NO: 412808 - RNA, 32 nt, Human
cuugcuagagucuuccuuugucagccaggcug

SEQ ID NO: 412809 - RNA, 32 nt, Human
cuugcuagcguugcaaagaagggcccagcucc

SEQ ID NO: 412810 - RNA, 32 nt, Human
cuugcuagcugggcaagaaagcagcaguggac

SEQ ID NO: 412811 - RNA, 32 nt, Human
cuugcuaguauguagcauacuaccuggcaugu

SEQ ID NO: 412812 - RNA, 32 nt, Human
cuugcuagugaacgucuacuuaucucaaguuc

SEQ ID NO: 412813 - RNA, 32 nt, Human
cuugcuaucagcugcccuaaacuuuugcugag

SEQ ID NO: 412814 - RNA, 32 nt, Human
cuugcuaugucucccaggcuggagugcagugg

SEQ ID NO: 412815 - RNA, 32 nt, Human
cuugcuauguugcccaggcuagagugcagugg

SEQ ID NO: 412816 - RNA, 32 nt, Human
cuugcucaauggaucccaccccauggaaccca

SEQ ID NO: 412817 - RNA, 32 nt, Human
cuugcucacacugagauucuguguucuccucu

SEQ ID NO: 412818 - RNA, 32 nt, Human
cuugcucacagcaaagccagaaaugcucucuc

SEQ ID NO: 412819 - RNA, 31 nt, Human
cuugcucacagcugugcucugagugccuagc

SEQ ID NO: 412820 - RNA, 31 nt, Human
cuugcucaccucucugggccucagguucuac

SEQ ID NO: 412821 - RNA, 32 nt, Human
cuugcucacggcccgggcugggcugggcaggg

SEQ ID NO: 412822 - RNA, 32 nt, Human
cuugcucacugaucuucaugcacuccagguca

SEQ ID NO: 412823 - RNA, 32 nt, Human
cuugcucacuugcuacuagcaggcgacuuagg

SEQ ID NO: 412824 - RNA, 32 nt, Human
cuugcucagaugaaaggagccagcaaggacag

SEQ ID NO: 412825 - RNA, 32 nt, Human
cuugcucagccccuccaugccugcuuggugca

SEQ ID NO: 412826 - RNA, 32 nt, Human
cuugcucagggucacacagagacucagugggg

SEQ ID NO: 412827 - RNA, 32 nt, Human
cuugcucagguggcagaugccuuuguguuccu

SEQ ID NO: 412828 - RNA, 32 nt, Human
cuugcucaucuaaauaaggaaagacuuggugu

SEQ ID NO: 412829 - RNA, 32 nt, Human
cuugcuccacuaaggcccaagcucuuucucuc

SEQ ID NO: 412830 - RNA, 32 nt, Human
cuugcuccagcccaggcuggagugcaguggca

SEQ ID NO: 412831 - RNA, 32 nt, Human
cuugcuccaucugagaccagagccaagaucug

SEQ ID NO: 412832 - RNA, 32 nt, Human
cuugcucccaagggcccucaccagaggccagg

SEQ ID NO: 412833 - RNA, 32 nt, Human
cuugcucccagcuguaucauggaccugccuuc

SEQ ID NO: 412834 - RNA, 32 nt, Human
cuugcucccaugcugcugucccuucaggcuca

SEQ ID NO: 412835 - RNA, 32 nt, Human
cuugcucccugccuuauccuguguucagacag

SEQ ID NO: 412836 - RNA, 32 nt, Human
cuugcucccuuucucucucuguccuucccuuc

SEQ ID NO: 412837 - RNA, 32 nt, Human
cuugcuccugaugcaguuucugugccauugcu

SEQ ID NO: 412838 - RNA, 32 nt, Human
cuugcuccuggcuuugucugcaauggcagcug

SEQ ID NO: 412839 - RNA, 32 nt, Human
cuugcucgcccaggguggagugcaguggugug

SEQ ID NO: 412840 - RNA, 32 nt, Human
cuugcucggagcccagcacuccugggucucgg

SEQ ID NO: 412841 - RNA, 32 nt, Human
cuugcucuaccacccaggcuggagugcagugg

SEQ ID NO: 412842 - RNA, 32 nt, Human
cuugcucuaucacccaggcuggagugcagugg

SEQ ID NO: 412843 - RNA, 32 nt, Human
cuugcucuaucgcccaggcuggagugcagugg

SEQ ID NO: 412844 - RNA, 32 nt, Human
cuugcucuaucugaaguauucccaccagaguu

SEQ ID NO: 412845 - RNA, 32 nt, Human
cuugcucuauugcccaggcuggagugcagugg

SEQ ID NO: 412846 - RNA, 32 nt, Human
cuugcucucagagucuauaaauaaaagaauau

SEQ ID NO: 412847 - RNA, 32 nt, Human
cuugcucucaggagccuccagcucuuucugga

SEQ ID NO: 412848 - RNA, 32 nt, Human
cuugcucucccaggcuggagugcaguggugua

SEQ ID NO: 412849 - RNA, 32 nt, Human
cuugcucucccccucccucccuuacucuaaca

SEQ ID NO: 412850 - RNA, 32 nt, Human
cuugcucuccccugcccugcugccgccuccca

SEQ ID NO: 412851 - RNA, 32 nt, Human
cuugcucucgcccaggcuggagugcagugggu

SEQ ID NO: 412852 - RNA, 32 nt, Human
cuugcucucucacccaggccugaagugcagug

SEQ ID NO: 412853 - RNA, 32 nt, Human
cuugcucucucacccaggcuggaguguaagug

SEQ ID NO: 412854 - RNA, 32 nt, Human
cuugcucucugacuucucaggacacaggucau

SEQ ID NO: 412855 - RNA, 32 nt, Human
cuugcucugccacccaggcuggagugcagugg

SEQ ID NO: 412856 - RNA, 32 nt, Human
cuugcucugcuccuuucauccucgucuccccu

SEQ ID NO: 412857 - RNA, 23 nt, Human
cuugcucugcuggagugcggugg

SEQ ID NO: 412858 - RNA, 32 nt, Human
cuugcucugcuggagugcgguggugcaaucuc

SEQ ID NO: 412859 - RNA, 32 nt, Human
cuugcucugcuggagugcgguggugcagucuc

SEQ ID NO: 412860 - RNA, 32 nt, Human
cuugcucuggcgcccaggcuggaguacagugg

SEQ ID NO: 412861 - RNA, 32 nt, Human
cuugcucugucacccaggcuagagugcaaugg

SEQ ID NO: 412862 - RNA, 32 nt, Human
cuugcucugucacccaggcuagagugcaguag

SEQ ID NO: 412863 - RNA, 32 nt, Human
cuugcucugucacccaggcuggaaugcagugc

SEQ ID NO: 412864 - RNA, 32 nt, Human
cuugcucugucacccaggcuggaaugcagugg

SEQ ID NO: 412865 - RNA, 32 nt, Human
cuugcucugucacccaggcuggagcguaaugg

SEQ ID NO: 412866 - RNA, 32 nt, Human
cuugcucugucacccaggcuggaguacagugg

SEQ ID NO: 412867 - RNA, 32 nt, Human
cuugcucugucacccaggcuggagugcaaugg

SEQ ID NO: 412868 - RNA, 32 nt, Human
cuugcucugucacccaggcuggagugcaguag

SEQ ID NO: 412869 - RNA, 32 nt, Human
cuugcucugucacccaggcuggagugcaguga

SEQ ID NO: 412870 - RNA, 32 nt, Human
cuugcucugucacccaggcuggagugcagugc

SEQ ID NO: 412871 - RNA, 32 nt, Human
cuugcucugucacccaggcuggagugcagugg

SEQ ID NO: 412872 - RNA, 32 nt, Human
cuugcucugucacccaggcuggagugccaugg

SEQ ID NO: 412873 - RNA, 32 nt, Human
cuugcucugucacccaggcuggagugccgugg

SEQ ID NO: 412874 - RNA, 32 nt, Human
cuugcucugucacccaggcuggagugcgaugg

SEQ ID NO: 412875 - RNA, 32 nt, Human
cuugcucugucacccaggcuggagugcggugg

SEQ ID NO: 412876 - RNA, 32 nt, Human
cuugcucugucacccaggcuggagugcuaugg

SEQ ID NO: 412877 - RNA, 32 nt, Human
cuugcucugucacccaggcuggagugcugugg

SEQ ID NO: 412878 - RNA, 32 nt, Human
cuugcucugucacccaggcuggggcgcaaugg

SEQ ID NO: 412879 - RNA, 32 nt, Human
cuugcucugucacccaggcuugagugcagugg

SEQ ID NO: 412880 - RNA, 32 nt, Human
cuugcucugucccccaggcuggagugcagugg

SEQ ID NO: 412881 - RNA, 32 nt, Human
cuugcucugucgcccaggcuagagugcagugg

SEQ ID NO: 412882 - RNA, 32 nt, Human
cuugcucugucgcccaggcucgagugcagugg

SEQ ID NO: 412883 - RNA, 32 nt, Human
cuugcucugucgcccaggcugcagugcggugg

SEQ ID NO: 412884 - RNA, 32 nt, Human
cuugcucugucgcccaggcuggaaugcagugg

SEQ ID NO: 412885 - RNA, 32 nt, Human
cuugcucugucgcccaggcuggaguacagugg

SEQ ID NO: 412886 - RNA, 32 nt, Human
cuugcucugucgcccaggcuggagugaugagg

SEQ ID NO: 412887 - RNA, 32 nt, Human
cuugcucugucgcccaggcuggagugcagagg

SEQ ID NO: 412888 - RNA, 32 nt, Human
cuugcucugucgcccaggcuggagugcagucg

SEQ ID NO: 412889 - RNA, 32 nt, Human
cuugcucugucgcccaggcuggagugcaguga

SEQ ID NO: 412890 - RNA, 32 nt, Human
cuugcucugucgcccaggcuggagugcagugg

SEQ ID NO: 412891 - RNA, 32 nt, Human
cuugcucugucgcccaggcuggaguucagugg

SEQ ID NO: 412892 - RNA, 32 nt, Human
cuugcucugucgcccaggcuguagugcaaugg

SEQ ID NO: 412893 - RNA, 32 nt, Human
cuugcucugucucccaggcuagagugcaaugg

SEQ ID NO: 412894 - RNA, 32 nt, Human
cuugcucugucucccaggcuggagcguaguaa

SEQ ID NO: 412895 - RNA, 32 nt, Human
cuugcucugucucccaggcuggagugcaggcu

SEQ ID NO: 412896 - RNA, 32 nt, Human
cuugcucugucucccaggcuggagugcaguga

SEQ ID NO: 412897 - RNA, 32 nt, Human
cuugcucugucucccaggcuggagugcagugg

SEQ ID NO: 412898 - RNA, 32 nt, Human
cuugcucugucucccaggcuggagugcuaugg

SEQ ID NO: 412899 - RNA, 32 nt, Human
cuugcucugugacccagguugcagugagccaa

SEQ ID NO: 412900 - RNA, 32 nt, Human
cuugcucuguggcccaggcuggagugcagugg

SEQ ID NO: 412901 - RNA, 32 nt, Human
cuugcucuguggcccaggcuggaguguagugg

SEQ ID NO: 412902 - RNA, 32 nt, Human
cuugcucuguuacccaggcuggagugcagugg

SEQ ID NO: 412903 - RNA, 32 nt, Human
cuugcucuguuacccaggcuggaguguagugg

SEQ ID NO: 412904 - RNA, 32 nt, Human
cuugcucuguugcccaggcuagagugcagugg

SEQ ID NO: 412905 - RNA, 32 nt, Human
cuugcucuguugcccaggcuccagugcagugg

SEQ ID NO: 412906 - RNA, 32 nt, Human
cuugcucuguugcccaggcuggaaugcagugg

SEQ ID NO: 412907 - RNA, 32 nt, Human
cuugcucuguugcccaggcuggaguacauuug

SEQ ID NO: 412908 - RNA, 32 nt, Human
cuugcucuguugcccaggcuggaguccagugg

SEQ ID NO: 412909 - RNA, 32 nt, Human
cuugcucuguugcccaggcuggagugcaaugg

SEQ ID NO: 412910 - RNA, 32 nt, Human
cuugcucuguugcccaggcuggagugcacugg

SEQ ID NO: 412911 - RNA, 32 nt, Human
cuugcucuguugcccaggcuggagugcagcgg

SEQ ID NO: 412912 - RNA, 32 nt, Human
cuugcucuguugcccaggcuggagugcaggga

SEQ ID NO: 412913 - RNA, 32 nt, Human
cuugcucuguugcccaggcuggagugcaguag

SEQ ID NO: 412914 - RNA, 32 nt, Human
cuugcucuguugcccaggcuggagugcagucg

SEQ ID NO: 412915 - RNA, 32 nt, Human
cuugcucuguugcccaggcuggagugcaguga

SEQ ID NO: 412916 - RNA, 32 nt, Human
cuugcucuguugcccaggcuggagugcagugg

SEQ ID NO: 412917 - RNA, 32 nt, Human
cuugcucuguugcccaggcuggagugcggugg

SEQ ID NO: 412918 - RNA, 32 nt, Human
cuugcucuguugcccaggcuggaguguagaga

SEQ ID NO: 412919 - RNA, 32 nt, Human
cuugcucuguugcccaggcuggaguguagugg

SEQ ID NO: 412920 - RNA, 32 nt, Human
cuugcucuguugcccaggcugggugcagcggu

SEQ ID NO: 412921 - RNA, 32 nt, Human
cuugcucuguugcccaggcugguguguaguga

SEQ ID NO: 412922 - RNA, 32 nt, Human
cuugcucuguugccccagcuugagugcagugg

SEQ ID NO: 412923 - RNA, 32 nt, Human
cuugcucuuaggcugagacgccuugauguggc

SEQ ID NO: 412924 - RNA, 32 nt, Human
cuugcucuucucuccccuuugccucccucugc

SEQ ID NO: 412925 - RNA, 32 nt, Human
cuugcucuucugucugucaucuugcaggaugc

SEQ ID NO: 412926 - RNA, 21 nt, Human
cuugcucuuggaaguggugug

SEQ ID NO: 412927 - RNA, 32 nt, Human
cuugcucuuggggcagaagccacccacacuag

SEQ ID NO: 412928 - RNA, 32 nt, Human
cuugcucuuguccuagcuugggaggcuucccc

SEQ ID NO: 412929 - RNA, 32 nt, Human
cuugcucuuguggagcuuagagguuggugggg

SEQ ID NO: 412930 - RNA, 32 nt, Human
cuugcucuuugauagccaccuccuaggaaugg

SEQ ID NO: 412931 - RNA, 32 nt, Human
cuugcugaaaacaggcugggguguugagacac

SEQ ID NO: 412932 - RNA, 32 nt, Human
cuugcugaagagaagaaaaagcgaaagguuuu

SEQ ID NO: 412933 - RNA, 32 nt, Human
cuugcugaagcccagagggcugugggaccaug

SEQ ID NO: 412934 - RNA, 32 nt, Human
cuugcugaaucugucuuuguuucugcacuaau

SEQ ID NO: 412935 - RNA, 32 nt, Human
cuugcugacucuguggacuuugacuucaucau

SEQ ID NO: 412936 - RNA, 32 nt, Human
cuugcugagcccacccgcucucucugggucca

SEQ ID NO: 412937 - RNA, 32 nt, Human
cuugcugaggcccagcccagcccagcauagcc

SEQ ID NO: 412938 - RNA, 32 nt, Human
cuugcugagggcccuggccccaccugcugcca

SEQ ID NO: 412939 - RNA, 32 nt, Human
cuugcugaggggcagggagagcgccucuuccu

SEQ ID NO: 412940 - RNA, 32 nt, Human
cuugcugagucaucaucaucaucaucaucauu

SEQ ID NO: 412941 - RNA, 32 nt, Human
cuugcugauuuagaggcucguaugacacauuc

SEQ ID NO: 412942 - RNA, 32 nt, Human
cuugcugcaaggcucuuccugggaacuaaggg

SEQ ID NO: 412943 - RNA, 32 nt, Human
cuugcugcagccucaaccuccugggcucacgu

SEQ ID NO: 412944 - RNA, 32 nt, Human
cuugcugcagugagacuacauuucugucuaaa

SEQ ID NO: 412945 - RNA, 20 nt, Human
cuugcugcaguucuccuucc

SEQ ID NO: 412946 - RNA, 32 nt, Human
cuugcugcauugagaacaggccagucuugacc

SEQ ID NO: 412947 - RNA, 32 nt, Human
cuugcugcccaggcuggagugcaguggcucaa

SEQ ID NO: 412948 - RNA, 19 nt, Human
cuugcugcccauccuuccu

SEQ ID NO: 412949 - RNA, 32 nt, Human
cuugcugccccacugcagugggucugagugac

SEQ ID NO: 412950 - RNA, 19 nt, Human
cuugcugcccucccuuccc

SEQ ID NO: 412951 - RNA, 23 nt, Human
cuugcugccgugugcuccugccu

SEQ ID NO: 412952 - RNA, 32 nt, Human
cuugcugccuccaggccaggggagcaggagau

SEQ ID NO: 412953 - RNA, 32 nt, Human
cuugcugccuccuccuccuccaccugcucucc

SEQ ID NO: 412954 - RNA, 32 nt, Human
cuugcugccucuccuuucuuccucuugccucg

SEQ ID NO: 412955 - RNA, 32 nt, Human
cuugcugccuggggccugcucucucccaggaa

SEQ ID NO: 412956 - RNA, 32 nt, Human
cuugcugccugggugcccucuccuuugcaccc

SEQ ID NO: 412957 - RNA, 19 nt, Human
cuugcugccuucauccccu

SEQ ID NO: 412958 - RNA, 26 nt, Human
cuugcugccuuuuguugcucugcucu

SEQ ID NO: 412959 - RNA, 32 nt, Human
cuugcugcuagagugggaggagaaagaugucu

SEQ ID NO: 412960 - RNA, 32 nt, Human
cuugcugcucaauccauucccucuggcccagc

SEQ ID NO: 412961 - RNA, 32 nt, Human
cuugcugcucuagccgcugcucaggccacuua

SEQ ID NO: 412962 - RNA, 32 nt, Human
cuugcugcugcgcugcaaaaccauagcagauu

SEQ ID NO: 412963 - RNA, 32 nt, Human
cuugcugcugggaagugguacaaucauguuug

SEQ ID NO: 412964 - RNA, 19 nt, Human
cuugcugcuucuccugccu

SEQ ID NO: 412965 - RNA, 21 nt, Human
cuugcugcuucucuccucucc

SEQ ID NO: 412966 - RNA, 23 nt, Human
cuugcugcuucucuccucuccca

SEQ ID NO: 412967 - RNA, 23 nt, Human
cuugcugcuuuuccuugcuuucu

SEQ ID NO: 412968 - RNA, 32 nt, Human
cuugcugcuuuuucuucuguauuucuagguac

SEQ ID NO: 412969 - RNA, 32 nt, Human
cuugcuggacaguggcuguggugaggaguaug

SEQ ID NO: 412970 - RNA, 32 nt, Human
cuugcuggagcuagaaugagggggaggccgcc

SEQ ID NO: 412971 - RNA, 32 nt, Human
cuugcuggagcugcuggaggcccugggguugg

SEQ ID NO: 412972 - RNA, 18 nt, Human
cuugcuggaggcacaggg

SEQ ID NO: 412973 - RNA, 31 nt, Human
cuugcuggagugucucccagccaaucagggc

SEQ ID NO: 412974 - RNA, 32 nt, Human
cuugcuggcagugcuagccaggaaacagagug

SEQ ID NO: 412975 - RNA, 32 nt, Human
cuugcugggaaaucugucucagugcugguuuu

SEQ ID NO: 412976 - RNA, 32 nt, Human
cuugcugggagggucugcaggagaaccgcagg

SEQ ID NO: 412977 - RNA, 32 nt, Human
cuugcugggauuacaggugugagccaccaugc

SEQ ID NO: 412978 - RNA, 32 nt, Human
cuugcugggugagggcacaccacugccagggg

SEQ ID NO: 412979 - RNA, 32 nt, Human
cuugcuggucacugcaaccucugccuccuggg

SEQ ID NO: 412980 - RNA, 32 nt, Human
cuugcugguucagagccagcugucugaccaca

SEQ ID NO: 412981 - RNA, 32 nt, Human
cuugcuguauugcccaggcuggaguguggugg

SEQ ID NO: 412982 - RNA, 32 nt, Human
cuugcugucaaagaaacaccugagaugaauug

SEQ ID NO: 412983 - RNA, 19 nt, Human
cuugcugucagucacgggg

SEQ ID NO: 412984 - RNA, 32 nt, Human
cuugcugucaucugcauucgugcuucccaccu

SEQ ID NO: 412985 - RNA, 21 nt, Human
cuugcuguccacuccugcccu

SEQ ID NO: 412986 - RNA, 32 nt, Human
cuugcuguccgccugcacugcuuccugguaaa

SEQ ID NO: 412987 - RNA, 32 nt, Human
cuugcugucuacugaauaaauaaaugcaccuu

SEQ ID NO: 412988 - RNA, 32 nt, Human
cuugcugucucacccaggcuggagugcagugg

SEQ ID NO: 412989 - RNA, 32 nt, Human
cuugcugucuccccggcuggagcgcaguggca

SEQ ID NO: 412990 - RNA, 32 nt, Human
cuugcugucucggccuucuuugugcuucucug

SEQ ID NO: 412991 - RNA, 32 nt, Human
cuugcugucugucucauugucuuucucucccc

SEQ ID NO: 412992 - RNA, 32 nt, Human
cuugcugugagugaggaguuuggggaugugag

SEQ ID NO: 412993 - RNA, 32 nt, Human
cuugcugugggaugugccaguguccccaccaa

SEQ ID NO: 412994 - RNA, 32 nt, Human
cuugcugugucacccaggcugccaggcuggag

SEQ ID NO: 412995 - RNA, 32 nt, Human
cuugcugugugaagcgugugguucuccuagaa

SEQ ID NO: 412996 - RNA, 18 nt, Human
cuugcugugugaccugag

SEQ ID NO: 412997 - RNA, 32 nt, Human
cuugcuguguggcccaggcuggagugcagugg

SEQ ID NO: 412998 - RNA, 19 nt, Human
cuugcugugugugacacag

SEQ ID NO: 412999 - RNA, 32 nt, Human
cuugcuguguuccucaagcugcacuuuggggc

SEQ ID NO: 413000 - RNA, 32 nt, Human
cuugcuguguugcccaggcuagagugcagcag

SEQ ID NO: 413001 - RNA, 32 nt, Human
cuugcuguguugcccaggcuggagugcagugg

SEQ ID NO: 413002 - RNA, 32 nt, Human
cuugcuguguugcccaggcuggagugcggugg

SEQ ID NO: 413003 - RNA, 18 nt, Human
cuugcuguucaaagggug

SEQ ID NO: 413004 - RNA, 32 nt, Human
cuugcuguucaucuguugaucuggaggcagga

SEQ ID NO: 413005 - RNA, 32 nt, Human
cuugcuguucccaggcaccaccacagcaggug

SEQ ID NO: 413006 - RNA, 19 nt, Human
cuugcuguucuuucagggu

SEQ ID NO: 413007 - RNA, 18 nt, Human
cuugcuguugguggggua

SEQ ID NO: 413008 - RNA, 21 nt, Human
cuugcuguuguacacagggua

SEQ ID NO: 413009 - RNA, 19 nt, Human
cuugcuguuguaucaaggg

SEQ ID NO: 413010 - RNA, 18 nt, Human
cuugcuguuucaucaggg

SEQ ID NO: 413011 - RNA, 32 nt, Human
cuugcuuaaaagggcgaaacuccaucuuaaaa

SEQ ID NO: 413012 - RNA, 32 nt, Human
cuugcuuaaagaaaaggacagaaguuuaguac

SEQ ID NO: 413013 - RNA, 32 nt, Human
cuugcuuaaaggcacuggccagcaguguguga

SEQ ID NO: 413014 - RNA, 32 nt, Human
cuugcuuaacauccuguugcaugucuagcgug

SEQ ID NO: 413015 - RNA, 32 nt, Human
cuugcuuaccauuguagcccuacuaugccugg

SEQ ID NO: 413016 - RNA, 28 nt, Human
cuugcuuaugacuauugccuguucuuuu

SEQ ID NO: 413017 - RNA, 32 nt, Human
cuugcuucaagggauccucccaccucagccuc

SEQ ID NO: 413018 - RNA, 32 nt, Human
cuugcuucaauugcuuacccacugccugccca

SEQ ID NO: 413019 - RNA, 32 nt, Human
cuugcuucagugaggcagggggcauucacugc

SEQ ID NO: 413020 - RNA, 32 nt, Human
cuugcuucauucuuucaaaaacuacaucuuca

SEQ ID NO: 413021 - RNA, 32 nt, Human
cuugcuuccaccugcaggugcauuugguccuu

SEQ ID NO: 413022 - RNA, 32 nt, Human
cuugcuuccagaaaggguuuuaaagcccaugc

SEQ ID NO: 413023 - RNA, 21 nt, Human
cuugcuucccagcucuucuca

SEQ ID NO: 413024 - RNA, 32 nt, Human
cuugcuuccccuacccccaaccccugccuccu

SEQ ID NO: 413025 - RNA, 32 nt, Human
cuugcuuccugcugucccuccaccuccuguau

SEQ ID NO: 413026 - RNA, 32 nt, Human
cuugcuucucacuggcaguguugagcuuugga

SEQ ID NO: 413027 - RNA, 32 nt, Human
cuugcuucuccuucuccuuccugcuuccacgu

SEQ ID NO: 413028 - RNA, 22 nt, Human
cuugcuucucuuucucuucuca

SEQ ID NO: 413029 - RNA, 32 nt, Human
cuugcuucugcacagacccccuuucccuauaa

SEQ ID NO: 413030 - RNA, 24 nt, Human
cuugcuucuucaguucuuugcuca

SEQ ID NO: 413031 - RNA, 32 nt, Human
cuugcuucuuucuccaggccuggcuccuuauu

SEQ ID NO: 413032 - RNA, 24 nt, Human
cuugcuucuuucuugcuuugacca

SEQ ID NO: 413033 - RNA, 21 nt, Human
cuugcuucuuugcuuuugcuc

SEQ ID NO: 413034 - RNA, 32 nt, Human
cuugcuugaacccgggaggcagagguugcagu

SEQ ID NO: 413035 - RNA, 32 nt, Human
cuugcuuggaggcuggcaagagcuccauuuca

SEQ ID NO: 413036 - RNA, 32 nt, Human
cuugcuuggaugaggaaggaaggaggcaaagg

SEQ ID NO: 413037 - RNA, 32 nt, Human
cuugcuuguauuugguuuauugcaguggucug

SEQ ID NO: 413038 - RNA, 23 nt, Human
cuugcuugucuauuuuuacuuuc

SEQ ID NO: 413039 - RNA, 22 nt, Human
cuugcuuguugcaaugugguag

SEQ ID NO: 413040 - RNA, 32 nt, Human
cuugcuuuaaguguuuguuuguuaucucaguc

SEQ ID NO: 413041 - RNA, 32 nt, Human
cuugcuuuacucuggaaaguguggggauggag

SEQ ID NO: 413042 - RNA, 27 nt, Human
cuugcuuuaggauuugcuuguuuuucu

SEQ ID NO: 413043 - RNA, 32 nt, Human
cuugcuuuauucauccuccaucucaaaaugaa

SEQ ID NO: 413044 - RNA, 32 nt, Human
cuugcuuucaaauaugcuauggagccacaguu

SEQ ID NO: 413045 - RNA, 32 nt, Human
cuugcuuuccauccuggaugucagcuccaugg

SEQ ID NO: 413046 - RNA, 32 nt, Human
cuugcuuucucucucaugccuccugaggcugu

SEQ ID NO: 413047 - RNA, 32 nt, Human
cuugcuuucuucuccugugaugucccaguuuc

SEQ ID NO: 413048 - RNA, 32 nt, Human
cuugcuuucuucuuuccuuuacuccuggcuca

SEQ ID NO: 413049 - RNA, 22 nt, Human
cuugcuuucuuucuugcuuucu

SEQ ID NO: 413050 - RNA, 26 nt, Human
cuugcuuucuuucuuucuugcuuucu

SEQ ID NO: 413051 - RNA, 32 nt, Human
cuugcuuugcccaccuccacucuaauucccau

SEQ ID NO: 413052 - RNA, 25 nt, Human
cuugcuuugcuguuugguguaguaa

SEQ ID NO: 413053 - RNA, 32 nt, Human
cuugcuuugucacccaggcuggaguacagugg

SEQ ID NO: 413054 - RNA, 32 nt, Human
cuugcuuugucacccaggcuggagugcagugg

SEQ ID NO: 413055 - RNA, 32 nt, Human
cuugcuuugucacccaggcuggagugcagugu

SEQ ID NO: 413056 - RNA, 32 nt, Human
cuugcuuugucacccaggcuggagugcugugg

SEQ ID NO: 413057 - RNA, 32 nt, Human
cuugcuuugucgcccaggcuggagcgcagucc

SEQ ID NO: 413058 - RNA, 32 nt, Human
cuugcuuugucgcccaggcuggagugcagugg

SEQ ID NO: 413059 - RNA, 32 nt, Human
cuugcuuuguugcccaggcuggagugcaguag

SEQ ID NO: 413060 - RNA, 32 nt, Human
cuugcuuuguugcccaggcuggaguguggugg

SEQ ID NO: 413061 - RNA, 32 nt, Human
cuugcuuuguuuucccuggcuaacagucuagu

SEQ ID NO: 413062 - RNA, 32 nt, Human
cuugcuuuguuuucccugucaccucccuauua

SEQ ID NO: 413063 - RNA, 32 nt, Human
cuugcuuuucagaacauagggaugaaguaagg

SEQ ID NO: 413064 - RNA, 32 nt, Human
cuugcuuuuucucuggaccauccuggcuggaa

SEQ ID NO: 413065 - RNA, 32 nt, Human
cuugcuuuuuguuuuugccauuguguuuacgu

SEQ ID NO: 413066 - RNA, 24 nt, Human
cuuggaaaaauccagaaagaaaaa

SEQ ID NO: 413067 - RNA, 32 nt, Human
cuuggaaaagagacucauuugcugaugguuca

SEQ ID NO: 413068 - RNA, 32 nt, Human
cuuggaaacugguuuuggcucugaucagcggu

SEQ ID NO: 413069 - RNA, 32 nt, Human
cuuggaaaggaaauucuaacagagaagagcuu

SEQ ID NO: 413070 - RNA, 32 nt, Human
cuuggaaaggcugagacaggaggaucacuuga

SEQ ID NO: 413071 - RNA, 26 nt, Human
cuuggaaaggucacagaaggaaaaua

SEQ ID NO: 413072 - RNA, 32 nt, Human
cuuggaaauggaaucuggggaggcaggaauac

SEQ ID NO: 413073 - RNA, 32 nt, Human
cuuggaacacccugaagagcaacaugggagaa

SEQ ID NO: 413074 - RNA, 24 nt, Human
cuuggaaccaaagaguugcugcac

SEQ ID NO: 413075 - RNA, 32 nt, Human
cuuggaacccaccccaccucccucauuggggg

SEQ ID NO: 413076 - RNA, 32 nt, Human
cuuggaaccgcuucuagagcagucucugcuuu

SEQ ID NO: 413077 - RNA, 32 nt, Human
cuuggaacucccuuuugaccucagucuucucu

SEQ ID NO: 413078 - RNA, 32 nt, Human
cuuggaacuccucaagaaccugaagauuccag

SEQ ID NO: 413079 - RNA, 32 nt, Human
cuuggaacuccucaagaaccugaagauugaga

SEQ ID NO: 413080 - RNA, 32 nt, Human
cuuggaacugucagggucagaggggaaccacc

SEQ ID NO: 413081 - RNA, 32 nt, Human
cuuggaacuugccucuuguccugcuggaaaga

SEQ ID NO: 413082 - RNA, 31 nt, Human
cuuggaagaaagauuucagccaagagacaca

SEQ ID NO: 413083 - RNA, 32 nt, Human
cuuggaagaccaggguggguacauacuggaga

SEQ ID NO: 413084 - RNA, 32 nt, Human
cuuggaagacucuuauccaucugugaaacccu

SEQ ID NO: 413085 - RNA, 32 nt, Human
cuuggaagaggaggaggaggaggagaaggagg

SEQ ID NO: 413086 - RNA, 32 nt, Human
cuuggaagaggaugauaaagaaaaugauaagg

SEQ ID NO: 413087 - RNA, 21 nt, Human
cuuggaagccucuccuguccu

SEQ ID NO: 413088 - RNA, 32 nt, Human
cuuggaaggaagcauaagcuucccauuucaca

SEQ ID NO: 413089 - RNA, 22 nt, Human
cuuggaaggcucccacccaggu

SEQ ID NO: 413090 - RNA, 32 nt, Human
cuuggaaggcugagacaggagaauggcgugaa

SEQ ID NO: 413091 - RNA, 32 nt, Human
cuuggaaggcuggagcuucgggccaaggccca

SEQ ID NO: 413092 - RNA, 24 nt, Human
cuuggaaguccagaaaggaaaaua

SEQ ID NO: 413093 - RNA, 32 nt, Human
cuuggaagugacuguagugaaggucguggaag

SEQ ID NO: 413094 - RNA, 32 nt, Human
cuuggaaguggugugcaguaggaccugcuccc

SEQ ID NO: 413095 - RNA, 32 nt, Human
cuuggaaucuacugccugcuggccaggcuuua

SEQ ID NO: 413096 - RNA, 32 nt, Human
cuuggaauucuaagagccuuggacccgagugu

SEQ ID NO: 413097 - RNA, 32 nt, Human
cuuggaauucucccugccagcacagcagucug

SEQ ID NO: 413098 - RNA, 32 nt, Human
cuuggaauuugagacaaggaaagagcauucuu

SEQ ID NO: 413099 - RNA, 32 nt, Human
cuuggaauuugggauccucuucugucucuuga

SEQ ID NO: 413100 - RNA, 32 nt, Human
cuuggacaaucccuaccuaaucuccagggaua

SEQ ID NO: 413101 - RNA, 32 nt, Human
cuuggacacacuguguuccaccccucguggga

SEQ ID NO: 413102 - RNA, 32 nt, Human
cuuggacacccaacuuugccaccucgaggguc

SEQ ID NO: 413103 - RNA, 32 nt, Human
cuuggacagacuguucucccucuuguuaccug

SEQ ID NO: 413104 - RNA, 32 nt, Human
cuuggacagagaccaggauuuggggcugagcu

SEQ ID NO: 413105 - RNA, 32 nt, Human
cuuggacagggugggagaggggacacaugggu

SEQ ID NO: 413106 - RNA, 16 nt, Human
cuuggacaguagagga

SEQ ID NO: 413107 - RNA, 32 nt, Human
cuuggacaucugauacuuucugcauuccaaag

SEQ ID NO: 413108 - RNA, 32 nt, Human
cuuggacauguggaggugagggaugagaguau

SEQ ID NO: 413109 - RNA, 32 nt, Human
cuuggaccaagcucguuuuauucccuacucua

SEQ ID NO: 413110 - RNA, 32 nt, Human
cuuggaccacugacccucagauuuccagccuu

SEQ ID NO: 413111 - RNA, 18 nt, Human
cuuggaccaguuagauga

SEQ ID NO: 413112 - RNA, 32 nt, Human
cuuggaccaguuugcagagugaagaucaagaa

SEQ ID NO: 413113 - RNA, 21 nt, Human
cuuggaccauauaggcauuga

SEQ ID NO: 413114 - RNA, 32 nt, Human
cuuggacccacaguggagugcugguccgugcu

SEQ ID NO: 413115 - RNA, 32 nt, Human
cuuggacccaggccuugggagggaaugguggg

SEQ ID NO: 413116 - RNA, 32 nt, Human
cuuggacccgggaggcagagguugcagugagc

SEQ ID NO: 413117 - RNA, 32 nt, Human
cuuggacccgggaggcggagguugcagugagc

SEQ ID NO: 413118 - RNA, 32 nt, Human
cuuggacccuccucgucugcaugguaacuccg

SEQ ID NO: 413119 - RNA, 32 nt, Human
cuuggacccuggagguagaggcugcagugagc

SEQ ID NO: 413120 - RNA, 32 nt, Human
cuuggaccgcuucagccugggcugggagcagc

SEQ ID NO: 413121 - RNA, 32 nt, Human
cuuggaccggcggcugaugcaggaugacaacc

SEQ ID NO: 413122 - RNA, 32 nt, Human
cuuggaccuaggagguggagguugcagugagc

SEQ ID NO: 413123 - RNA, 32 nt, Human
cuuggaccuccaggggcuccuggguuggaggg

SEQ ID NO: 413124 - RNA, 32 nt, Human
cuuggaccugggaggcagagguuucagugagc

SEQ ID NO: 413125 - RNA, 32 nt, Human
cuuggaccugggagguggagguugcagugagc

SEQ ID NO: 413126 - RNA, 32 nt, Human
cuuggaccugggagguggagguugcggugagc

SEQ ID NO: 413127 - RNA, 32 nt, Human
cuuggaccuucucaucccagcaaacauccaau

SEQ ID NO: 413128 - RNA, 32 nt, Human
cuuggaccuucuccccuacggcugcuucucag

SEQ ID NO: 413129 - RNA, 32 nt, Human
cuuggaccuucucccuugcuuagaagugccag

SEQ ID NO: 413130 - RNA, 32 nt, Human
cuuggacguacaccuaaucccauggggccucg

SEQ ID NO: 413131 - RNA, 32 nt, Human
cuuggacuacauuucccuugaggcuuuacugg

SEQ ID NO: 413132 - RNA, 32 nt, Human
cuuggacuccaaagguggagguugcaguaagc

SEQ ID NO: 413133 - RNA, 32 nt, Human
cuuggacuccagagguggagguugcaguaagc

SEQ ID NO: 413134 - RNA, 20 nt, Human
cuuggacucccagccugcca

SEQ ID NO: 413135 - RNA, 32 nt, Human
cuuggacuccucucuuugcugaagagacccaa

SEQ ID NO: 413136 - RNA, 21 nt, Human
cuuggacuccugaccccaggu

SEQ ID NO: 413137 - RNA, 32 nt, Human
cuuggacucuccauuccucugccuguacuacc

SEQ ID NO: 413138 - RNA, 32 nt, Human
cuuggacugagccaaggaggcuugggaggccc

SEQ ID NO: 413139 - RNA, 22 nt, Human
cuuggacugaggacaagggcaa

SEQ ID NO: 413140 - RNA, 21 nt, Human
cuuggacuguaguccuucccc

SEQ ID NO: 413141 - RNA, 20 nt, Human
cuuggacuucccagccucca

SEQ ID NO: 413142 - RNA, 21 nt, Human
cuuggacuucuuggaaggcag

SEQ ID NO: 413143 - RNA, 32 nt, Human
cuuggacuugggaggcgguuguugcagugagc

SEQ ID NO: 413144 - RNA, 21 nt, Human
cuuggacuuuguuuucccuuc

SEQ ID NO: 413145 - RNA, 31 nt, Human
cuuggagaacaauauucauuugguuguggag

SEQ ID NO: 413146 - RNA, 22 nt, Human
cuuggagaagcagccccaugaa

SEQ ID NO: 413147 - RNA, 32 nt, Human
cuuggagaaguggaggugugcaugguguguag

SEQ ID NO: 413148 - RNA, 32 nt, Human
cuuggagacaacaugugguucuugacaacucu

SEQ ID NO: 413149 - RNA, 32 nt, Human
cuuggagacacccugccccacccuggcuccac

SEQ ID NO: 413150 - RNA, 22 nt, Human
cuuggagaccccuaaagaaaua

SEQ ID NO: 413151 - RNA, 32 nt, Human
cuuggagacccgugccuuccagauggcuggga

SEQ ID NO: 413152 - RNA, 32 nt, Human
cuuggagacugcuuuucuccagcucugucaac

SEQ ID NO: 413153 - RNA, 32 nt, Human
cuuggagagaagcagugcagggaauggauaug

SEQ ID NO: 413154 - RNA, 32 nt, Human
cuuggagagaggggcuggaggcuggacaggcu

SEQ ID NO: 413155 - RNA, 32 nt, Human
cuuggagagcccaggagcaggggagacaugga

SEQ ID NO: 413156 - RNA, 32 nt, Human
cuuggagagccccagauuggaggcagacagac

SEQ ID NO: 413157 - RNA, 32 nt, Human
cuuggagaggagaauaaaagaaugucuccugg

SEQ ID NO: 413158 - RNA, 32 nt, Human
cuuggagagggguugagagccuccuuuuuggu

SEQ ID NO: 413159 - RNA, 32 nt, Human
cuuggagaguggaucagagagacuaggacagu

SEQ ID NO: 413160 - RNA, 32 nt, Human
cuuggagaucaucuuggccagagugaagaccc

SEQ ID NO: 413161 - RNA, 32 nt, Human
cuuggagaugugggcagaggaagaggacacug

SEQ ID NO: 413162 - RNA, 32 nt, Human
cuuggagcacagacccucccuucagauccgca

SEQ ID NO: 413163 - RNA, 32 nt, Human
cuuggagcagaaucugcuaccugaggcuccag

SEQ ID NO: 413164 - RNA, 32 nt, Human
cuuggagcagccaguaaugacaguguccuaac

SEQ ID NO: 413165 - RNA, 32 nt, Human
cuuggagcagcuccucugcaggcacagccugg

SEQ ID NO: 413166 - RNA, 32 nt, Human
cuuggagcauuaucuuuaguuacuugaagagu

SEQ ID NO: 413167 - RNA, 32 nt, Human
cuuggagccaggaguuugagaccagccugggc

SEQ ID NO: 413168 - RNA, 32 nt, Human
cuuggagcccugccucugagccuggacgggaa

SEQ ID NO: 413169 - RNA, 32 nt, Human
cuuggagccuaugggcuucagaugucuuugcc

SEQ ID NO: 413170 - RNA, 32 nt, Human
cuuggagccuuggucugcagggucccuccuuc

SEQ ID NO: 413171 - RNA, 32 nt, Human
cuuggagcgaagucugccccaguggggauccu

SEQ ID NO: 413172 - RNA, 20 nt, Human
cuuggagcgagggggcgggg

SEQ ID NO: 413173 - RNA, 32 nt, Human
cuuggagcgggccugagagacaaggacaugug

SEQ ID NO: 413174 - RNA, 32 nt, Human
cuuggagcugugugccuguaaucccagcuaac

SEQ ID NO: 413175 - RNA, 32 nt, Human
cuuggaggagagcagcucccacuguggggaca

SEQ ID NO: 413176 - RNA, 32 nt, Human
cuuggaggagauggggacagggcuggagucaa

SEQ ID NO: 413177 - RNA, 32 nt, Human
cuuggaggaggcaccagcgaggaugacguuua

SEQ ID NO: 413178 - RNA, 32 nt, Human
cuuggaggagggcagaggcagugugggcugau

SEQ ID NO: 413179 - RNA, 20 nt, Human
cuuggaggauuaaaacaaca

SEQ ID NO: 413180 - RNA, 20 nt, Human
cuuggaggcagagguugcag

SEQ ID NO: 413181 - RNA, 23 nt, Human
cuuggaggcagagguugcaguga

SEQ ID NO: 413182 - RNA, 24 nt, Human
cuuggaggcagagguugcagugag

SEQ ID NO: 413183 - RNA, 21 nt, Human
cuuggaggccgggugcagugg

SEQ ID NO: 413184 - RNA, 32 nt, Human
cuuggaggcugcuuucuccuuuacuuggaagg

SEQ ID NO: 413185 - RNA, 32 nt, Human
cuuggaggcuggaagggguuaagccagaagug

SEQ ID NO: 413186 - RNA, 32 nt, Human
cuuggaggcugguguggccuugaggagggaag

SEQ ID NO: 413187 - RNA, 32 nt, Human
cuuggaggcugugagguugcagcaaaguuuua

SEQ ID NO: 413188 - RNA, 32 nt, Human
cuuggagggaggaagaaagggagccggcguuc

SEQ ID NO: 413189 - RNA, 32 nt, Human
cuuggagggcaaaggugacaucguggaagacc

SEQ ID NO: 413190 - RNA, 31 nt, Human
cuuggagggcacuucuuucgugguaguucuu

SEQ ID NO: 413191 - RNA, 32 nt, Human
cuuggagggccuccuuggcaaugcauuugaug

SEQ ID NO: 413192 - RNA, 32 nt, Human
cuuggaggggcagaccacuggacaagagcaag

SEQ ID NO: 413193 - RNA, 32 nt, Human
cuuggaggugugcagagaugucuaugcgggcc

SEQ ID NO: 413194 - RNA, 32 nt, Human
cuuggagguuagaagcaagauggaauugguua

SEQ ID NO: 413195 - RNA, 32 nt, Human
cuuggaguauuuaaaugcccauuugccaaaag

SEQ ID NO: 413196 - RNA, 32 nt, Human
cuuggaguccaagguguucugacaaggguggc

SEQ ID NO: 413197 - RNA, 32 nt, Human
cuuggaguccagccccuccagguccuccacag

SEQ ID NO: 413198 - RNA, 32 nt, Human
cuuggagucucuggugggcagagagggauggg

SEQ ID NO: 413199 - RNA, 32 nt, Human
cuuggagucugccaggucaccuuagggcaagg

SEQ ID NO: 413200 - RNA, 32 nt, Human
cuuggaguuacaacagaagcuggggaggugag

SEQ ID NO: 413201 - RNA, 32 nt, Human
cuuggauaacaacugcacuccagccuggauga

SEQ ID NO: 413202 - RNA, 32 nt, Human
cuuggauaacgacugcacuccagccuggauga

SEQ ID NO: 413203 - RNA, 32 nt, Human
cuuggauaagaaggguccuggggaagaagacu

SEQ ID NO: 413204 - RNA, 32 nt, Human
cuuggauaccagcacauuggagggagauagcc

SEQ ID NO: 413205 - RNA, 32 nt, Human
cuuggauaccugauauuuuauuucaagaaaga

SEQ ID NO: 413206 - RNA, 32 nt, Human
cuuggauacucuucucccaucucccuucacag

SEQ ID NO: 413207 - RNA, 25 nt, Human
cuuggauauaccuagauuccauaca

SEQ ID NO: 413208 - RNA, 32 nt, Human
cuuggauccaggcugggcacgguggcucacac

SEQ ID NO: 413209 - RNA, 32 nt, Human
cuuggauccuucagagccucagccacuagcug

SEQ ID NO: 413210 - RNA, 32 nt, Human
cuuggaucucagaauggccuggaaacggaugg

SEQ ID NO: 413211 - RNA, 32 nt, Human
cuuggaucuccugucuuauagauuuuauaucc

SEQ ID NO: 413212 - RNA, 32 nt, Human
cuuggaucucugaggggaaggaacagcaaaag

SEQ ID NO: 413213 - RNA, 32 nt, Human
cuuggaucugcagaugcaggaggcagauauca

SEQ ID NO: 413214 - RNA, 32 nt, Human
cuuggaucuggcuguugaguugacggguuccu

SEQ ID NO: 413215 - RNA, 32 nt, Human
cuuggaucuuuuugcagacuagcuaauuagcu

SEQ ID NO: 413216 - RNA, 32 nt, Human
cuuggaugaggaaggaaggaggcaaaggcacc

SEQ ID NO: 413217 - RNA, 17 nt, Human
cuuggauggagagauga

SEQ ID NO: 413218 - RNA, 32 nt, Human
cuuggauggaugaagucagagaggugggguga

SEQ ID NO: 413219 - RNA, 32 nt, Human
cuuggauggccucaaaagguucuugaacacca

SEQ ID NO: 413220 - RNA, 32 nt, Human
cuuggauggugucuuccucuccucagccgaga

SEQ ID NO: 413221 - RNA, 32 nt, Human
cuuggauguauguuccaaaggguccucauucu

SEQ ID NO: 413222 - RNA, 32 nt, Human
cuuggauuagcucuucauacccaaucagcagu

SEQ ID NO: 413223 - RNA, 32 nt, Human
cuuggauuauucacugccugucacaagccuca

SEQ ID NO: 413224 - RNA, 32 nt, Human
cuuggauucccuuucuuuccuuuuauuuuaaa

SEQ ID NO: 413225 - RNA, 32 nt, Human
cuuggauuccuguugauuaacuucuccauucu

SEQ ID NO: 413226 - RNA, 32 nt, Human
cuuggauucugcggcugaggcuuggggccuuu

SEQ ID NO: 413227 - RNA, 32 nt, Human
cuuggauuucuugguccugccuugccaacugc

SEQ ID NO: 413228 - RNA, 32 nt, Human
cuuggcaaaggcugaggggucagguugggaaa

SEQ ID NO: 413229 - RNA, 32 nt, Human
cuuggcaaaucugccaagcaugucuucaccaa

SEQ ID NO: 413230 - RNA, 24 nt, Human
cuuggcaacacagugagacccugu

SEQ ID NO: 413231 - RNA, 16 nt, Human
cuuggcaacagaguga

SEQ ID NO: 413232 - RNA, 20 nt, Human
cuuggcaacauggugaaacc

SEQ ID NO: 413233 - RNA, 32 nt, Human
cuuggcaacauggugaaaccccaucuccacca

SEQ ID NO: 413234 - RNA, 18 nt, Human
cuuggcaacgggacgcgg

SEQ ID NO: 413235 - RNA, 32 nt, Human
cuuggcaacuccagggcgcuccguucaagaau

SEQ ID NO: 413236 - RNA, 32 nt, Human
cuuggcaagccagcaggcugguacucggaccg

SEQ ID NO: 413237 - RNA, 32 nt, Human
cuuggcaagcccacccuuccuguggccucugu

SEQ ID NO: 413238 - RNA, 21 nt, Human
cuuggcaaugcacuucauaca

SEQ ID NO: 413239 - RNA, 32 nt, Human
cuuggcaaugccaaggucaucgauaccuuccc

SEQ ID NO: 413240 - RNA, 32 nt, Human
cuuggcacacacacauucgugugcucugcugc

SEQ ID NO: 413241 - RNA, 32 nt, Human
cuuggcacagaaguagcugcauaaaagagcac

SEQ ID NO: 413242 - RNA, 32 nt, Human
cuuggcacaggaguuccagaccagccugggca

SEQ ID NO: 413243 - RNA, 32 nt, Human
cuuggcacaggcugccccgagauuccugcgac

SEQ ID NO: 413244 - RNA, 32 nt, Human
cuuggcaccauccuggcuuuuggcagggauga

SEQ ID NO: 413245 - RNA, 32 nt, Human
cuuggcacccaccaacuuccugcacacacugg

SEQ ID NO: 413246 - RNA, 32 nt, Human
cuuggcacccagcuuccauuagaagggaauau

SEQ ID NO: 413247 - RNA, 32 nt, Human
cuuggcacccccuuccucagugcccuaguggc

SEQ ID NO: 413248 - RNA, 32 nt, Human
cuuggcacccggaggcagcggaggcaggcgca

SEQ ID NO: 413249 - RNA, 18 nt, Human
cuuggcaccgccgcuccg

SEQ ID NO: 413250 - RNA, 32 nt, Human
cuuggcaccuauaccuugaauaucugcuauca

SEQ ID NO: 413251 - RNA, 32 nt, Human
cuuggcacucaagcaguccuucugccucagcc

SEQ ID NO: 413252 - RNA, 21 nt, Human
cuuggcacugaugggcacugg

SEQ ID NO: 413253 - RNA, 32 nt, Human
cuuggcacuguacuccaaccuggguaacaggg

SEQ ID NO: 413254 - RNA, 32 nt, Human
cuuggcacuguuagugacagagcccagcaucc

SEQ ID NO: 413255 - RNA, 32 nt, Human
cuuggcacuucccucuguggcucugcucagaa

SEQ ID NO: 413256 - RNA, 18 nt, Human
cuuggcagaagggcccag

SEQ ID NO: 413257 - RNA, 19 nt, Human
cuuggcagaaggggugggg

SEQ ID NO: 413258 - RNA, 32 nt, Human
cuuggcagaauggcuguugaggggcaggcgcu

SEQ ID NO: 413259 - RNA, 32 nt, Human
cuuggcagaggaggaggagucaagggagcagg

SEQ ID NO: 413260 - RNA, 20 nt, Human
cuuggcagaggcaggugugg

SEQ ID NO: 413261 - RNA, 32 nt, Human
cuuggcagaguuuucacaugcuaacuggacua

SEQ ID NO: 413262 - RNA, 32 nt, Human
cuuggcagcagcaucgccucagccuggaguga

SEQ ID NO: 413263 - RNA, 19 nt, Human
cuuggcagcaggggcacag

SEQ ID NO: 413264 - RNA, 16 nt, Human
cuuggcagcaggguga

SEQ ID NO: 413265 - RNA, 32 nt, Human
cuuggcagcccccuguaguugacagguaagcu

SEQ ID NO: 413266 - RNA, 32 nt, Human
cuuggcagccuccuucccuguucaugagaauu

SEQ ID NO: 413267 - RNA, 21 nt, Human
cuuggcagccucuggcggcag

SEQ ID NO: 413268 - RNA, 32 nt, Human
cuuggcagccuggcagagguuugcagacaggc

SEQ ID NO: 413269 - RNA, 32 nt, Human
cuuggcagcucgccaacagguucagucagggg

SEQ ID NO: 413270 - RNA, 17 nt, Human
cuuggcagcugcagccc

SEQ ID NO: 413271 - RNA, 32 nt, Human
cuuggcagcugguacucccccagccagugcua

SEQ ID NO: 413272 - RNA, 19 nt, Human
cuuggcaggacuuggccag

SEQ ID NO: 413273 - RNA, 20 nt, Human
cuuggcaggagagauggugc

SEQ ID NO: 413274 - RNA, 20 nt, Human
cuuggcaggagagcccucag

SEQ ID NO: 413275 - RNA, 18 nt, Human
cuuggcaggauaaugcag

SEQ ID NO: 413276 - RNA, 21 nt, Human
cuuggcaggcaggaggugcgg

SEQ ID NO: 413277 - RNA, 32 nt, Human
cuuggcaggcagggccaacagcagcccccggg

SEQ ID NO: 413278 - RNA, 32 nt, Human
cuuggcaggccugagggccaguggggauccug

SEQ ID NO: 413279 - RNA, 22 nt, Human
cuuggcaggcggccgggcgcag

SEQ ID NO: 413280 - RNA, 20 nt, Human
cuuggcagggccaggcgggg

SEQ ID NO: 413281 - RNA, 19 nt, Human
cuuggcagggcuccugcag

SEQ ID NO: 413282 - RNA, 19 nt, Human
cuuggcagggggcaagcag

SEQ ID NO: 413283 - RNA, 20 nt, Human
cuuggcagggucuaagccag

SEQ ID NO: 413284 - RNA, 19 nt, Human
cuuggcagguccuggccag

SEQ ID NO: 413285 - RNA, 32 nt, Human
cuuggcaggucuggggcaagccuagcacuggg

SEQ ID NO: 413286 - RNA, 18 nt, Human
cuuggcaggugaggggcg

SEQ ID NO: 413287 - RNA, 32 nt, Human
cuuggcaggugaucccaagaccugcagcuuca

SEQ ID NO: 413288 - RNA, 20 nt, Human
cuuggcaggugggggcuuag

SEQ ID NO: 413289 - RNA, 32 nt, Human
cuuggcaguuauagcaggagaacacugucuua

SEQ ID NO: 413290 - RNA, 21 nt, Human
cuuggcaucacagggcagagc

SEQ ID NO: 413291 - RNA, 32 nt, Human
cuuggcaucccccgagggauguauuucggagc

SEQ ID NO: 413292 - RNA, 22 nt, Human
cuuggcaucggagugucagggc

SEQ ID NO: 413293 - RNA, 32 nt, Human
cuuggcaucugcacuccagcccaggacugugg

SEQ ID NO: 413294 - RNA, 32 nt, Human
cuuggcaucugucuugggguccagcccuaccc

SEQ ID NO: 413295 - RNA, 32 nt, Human
cuuggcaucuguggauggcuugaguguuaacu

SEQ ID NO: 413296 - RNA, 32 nt, Human
cuuggcaugauggcucacuccuguaaucccaa

SEQ ID NO: 413297 - RNA, 32 nt, Human
cuuggcauugcaaccuccauuucuagcuccug

SEQ ID NO: 413298 - RNA, 31 nt, Human
cuuggcauuuucaccagacaugcagauuuga

SEQ ID NO: 413299 - RNA, 32 nt, Human
cuuggccaaacagugaaacccuaucucuacua

SEQ ID NO: 413300 - RNA, 19 nt, Human
cuuggccaacauggugaaa

SEQ ID NO: 413301 - RNA, 32 nt, Human
cuuggccaauauagcaagacccugugucuaaa

SEQ ID NO: 413302 - RNA, 22 nt, Human
cuuggccacaagcagggucuga

SEQ ID NO: 413303 - RNA, 32 nt, Human
cuuggccacagcaacacccacugagcacgcug

SEQ ID NO: 413304 - RNA, 32 nt, Human
cuuggccacccacuucucccagccugugucuu

SEQ ID NO: 413305 - RNA, 22 nt, Human
cuuggccacgggaggcugcuga

SEQ ID NO: 413306 - RNA, 24 nt, Human
cuuggccacucacccaagcauugg

SEQ ID NO: 413307 - RNA, 19 nt, Human
cuuggccacuccaggcccu

SEQ ID NO: 413308 - RNA, 32 nt, Human
cuuggccacugcaagcuccaccucccagguuc

SEQ ID NO: 413309 - RNA, 32 nt, Human
cuuggccagagcccuguggccuaggggaaaau

SEQ ID NO: 413310 - RNA, 32 nt, Human
cuuggccagcagcugcccaggacacagugcag

SEQ ID NO: 413311 - RNA, 32 nt, Human
cuuggccagccuggccagccgccgagcagccc

SEQ ID NO: 413312 - RNA, 32 nt, Human
cuuggccagccugugucuccugucuaugacug

SEQ ID NO: 413313 - RNA, 32 nt, Human
cuuggccagcuggugcugcgaauccugccugc

SEQ ID NO: 413314 - RNA, 32 nt, Human
cuuggccagcugguucgagcggugagccgcgc

SEQ ID NO: 413315 - RNA, 32 nt, Human
cuuggccaggaucuuaagggacuuugaaaauu

SEQ ID NO: 413316 - RNA, 32 nt, Human
cuuggccaggugcaguaguucaugcccuguaa

SEQ ID NO: 413317 - RNA, 32 nt, Human
cuuggccaucguguggccgccaccuccgggaa

SEQ ID NO: 413318 - RNA, 22 nt, Human
cuuggccaucuaaacaucauca

SEQ ID NO: 413319 - RNA, 24 nt, Human
cuuggccaucuagcauuccauaca

SEQ ID NO: 413320 - RNA, 24 nt, Human
cuuggccaucuagcauuccaugca

SEQ ID NO: 413321 - RNA, 32 nt, Human
cuuggccaucuucuuccuucgucgucucuccu

SEQ ID NO: 413322 - RNA, 32 nt, Human
cuuggccauggggacgcccucagucuagggau

SEQ ID NO: 413323 - RNA, 24 nt, Human
cuuggccauucccaggaggcuugg

SEQ ID NO: 413324 - RNA, 32 nt, Human
cuuggcccaaguaguugggagguguuggcugc

SEQ ID NO: 413325 - RNA, 32 nt, Human
cuuggcccacugcaaccucugccucccggguu

SEQ ID NO: 413326 - RNA, 32 nt, Human
cuuggcccacugcaaccucugcuuccuagguu

SEQ ID NO: 413327 - RNA, 32 nt, Human
cuuggcccagcccuagcacccuacucacuggu

SEQ ID NO: 413328 - RNA, 32 nt, Human
cuuggcccaggaggcagagguugcagugagcu

SEQ ID NO: 413329 - RNA, 32 nt, Human
cuuggcccaggaguucauaaccagccuggauu

SEQ ID NO: 413330 - RNA, 32 nt, Human
cuuggcccagggccaggcagucgugguugcag

SEQ ID NO: 413331 - RNA, 32 nt, Human
cuuggccccacauuucugcaaacauaaauauu

SEQ ID NO: 413332 - RNA, 32 nt, Human
cuuggccccagcccugcugggcccagaacccu

SEQ ID NO: 413333 - RNA, 32 nt, Human
cuuggccccagcugcccagcaggugccucgau

SEQ ID NO: 413334 - RNA, 32 nt, Human
cuuggcccccagcuacaaugaaaaagaagaau

SEQ ID NO: 413335 - RNA, 21 nt, Human
cuuggcccccucggccacuga

SEQ ID NO: 413336 - RNA, 32 nt, Human
cuuggccccuccaucugggcuccuguggauag

SEQ ID NO: 413337 - RNA, 32 nt, Human
cuuggccccuggcccaggcugugucugcaaga

SEQ ID NO: 413338 - RNA, 32 nt, Human
cuuggccccuugaucaggaucaagcaggcacu

SEQ ID NO: 413339 - RNA, 32 nt, Human
cuuggcccgcugcaggccucaggcaggcgggg

SEQ ID NO: 413340 - RNA, 32 nt, Human
cuuggcccgguggcucaugccuguaaucccag

SEQ ID NO: 413341 - RNA, 32 nt, Human
cuuggcccuaagaauguuuugcacugacagug

SEQ ID NO: 413342 - RNA, 32 nt, Human
cuuggcccuauuuaaggcagauuuuacagagc

SEQ ID NO: 413343 - RNA, 32 nt, Human
cuuggcccuccccucuuucucccccaacccac

SEQ ID NO: 413344 - RNA, 32 nt, Human
cuuggcccucuuccucuccaaagcgccagaac

SEQ ID NO: 413345 - RNA, 32 nt, Human
cuuggcccugcacucucaacaugaguagcgaa

SEQ ID NO: 413346 - RNA, 32 nt, Human
cuuggcccugcucacaccuugauuuuggucuu

SEQ ID NO: 413347 - RNA, 32 nt, Human
cuuggcccuuccgcuccaccagccuggucuga

SEQ ID NO: 413348 - RNA, 32 nt, Human
cuuggcccuuuucacagagguggccuuggagu

SEQ ID NO: 413349 - RNA, 32 nt, Human
cuuggccgagacuaauguguggcccacagcuu

SEQ ID NO: 413350 - RNA, 20 nt, Human
cuuggccgagccgggggcgc

SEQ ID NO: 413351 - RNA, 24 nt, Human
cuuggccgcucuguaagcaucuga

SEQ ID NO: 413352 - RNA, 17 nt, Human
cuuggccgcugcugccg

SEQ ID NO: 413353 - RNA, 32 nt, Human
cuuggccggaagcugcggagaggcucagccac

SEQ ID NO: 413354 - RNA, 22 nt, Human
cuuggccgggcagggggcgggg

SEQ ID NO: 413355 - RNA, 19 nt, Human
cuuggccguggaggcguuu

SEQ ID NO: 413356 - RNA, 22 nt, Human
cuuggccuacacauucuauaca

SEQ ID NO: 413357 - RNA, 32 nt, Human
cuuggccuaggaguucaagaccagccugggcu

SEQ ID NO: 413358 - RNA, 32 nt, Human
cuuggccucaagugaaccagcacuucaugagu

SEQ ID NO: 413359 - RNA, 32 nt, Human
cuuggccucacugcuaaugacuccucacaccc

SEQ ID NO: 413360 - RNA, 32 nt, Human
cuuggccuccacaauccuuuaucuuaaccuga

SEQ ID NO: 413361 - RNA, 32 nt, Human
cuuggccuccaccaccucccacgcuucugaga

SEQ ID NO: 413362 - RNA, 32 nt, Human
cuuggccucccaaagugcgggauuacaagcgu

SEQ ID NO: 413363 - RNA, 32 nt, Human
cuuggccucccaaaugcugggauuacagacau

SEQ ID NO: 413364 - RNA, 32 nt, Human
cuuggccucccaagugcugggauuacaggcgc

SEQ ID NO: 413365 - RNA, 32 nt, Human
cuuggccucccuaagugcugggauuauaggcg

SEQ ID NO: 413366 - RNA, 32 nt, Human
cuuggccucccuaaguguugggauuauaggug

SEQ ID NO: 413367 - RNA, 32 nt, Human
cuuggccuccuaagugcugggauuacaggcgu

SEQ ID NO: 413368 - RNA, 22 nt, Human
cuuggccuccuggcugcuuucu

SEQ ID NO: 413369 - RNA, 32 nt, Human
cuuggccucucaccucagagcugcggaggagc

SEQ ID NO: 413370 - RNA, 32 nt, Human
cuuggccucucagacccagcucagccacggcc

SEQ ID NO: 413371 - RNA, 32 nt, Human
cuuggccucugacucccgucucugugcuugcc

SEQ ID NO: 413372 - RNA, 32 nt, Human
cuuggccugaguaucugugcagguaagucauu

SEQ ID NO: 413373 - RNA, 32 nt, Human
cuuggccugauguuuguccucacaggcaugcc

SEQ ID NO: 413374 - RNA, 32 nt, Human
cuuggccugcagaugcacccuccuggaugaau

SEQ ID NO: 413375 - RNA, 32 nt, Human
cuuggccugcagcaggaggagcagggaucuaa

SEQ ID NO: 413376 - RNA, 32 nt, Human
cuuggccugcaggugcuggagccaccccggca

SEQ ID NO: 413377 - RNA, 32 nt, Human
cuuggccugccugcccgccagccacgcguguc

SEQ ID NO: 413378 - RNA, 32 nt, Human
cuuggccugccuguucuguccuaucuucuuaa

SEQ ID NO: 413379 - RNA, 32 nt, Human
cuuggccugcugugcagugggccuucuguuca

SEQ ID NO: 413380 - RNA, 32 nt, Human
cuuggccuggacaaugaacaggauucaguuuu

SEQ ID NO: 413381 - RNA, 32 nt, Human
cuuggccuggcaguggcuucagagaggaccug

SEQ ID NO: 413382 - RNA, 32 nt, Human
cuuggccuggcgcgguggcucacaccuguaau

SEQ ID NO: 413383 - RNA, 32 nt, Human
cuuggccuguagagacagaccuaggaggcggg

SEQ ID NO: 413384 - RNA, 32 nt, Human
cuuggccuuccagccaugugguaccugcuagg

SEQ ID NO: 413385 - RNA, 32 nt, Human
cuuggccuuccauccucuccccacggcugaug

SEQ ID NO: 413386 - RNA, 32 nt, Human
cuuggccuucuccccucuucugagcuaguugg

SEQ ID NO: 413387 - RNA, 32 nt, Human
cuuggccuugguuccuguuugcacuggcuaca

SEQ ID NO: 413388 - RNA, 32 nt, Human
cuuggcgagccagaacugggaaccccgcggag

SEQ ID NO: 413389 - RNA, 32 nt, Human
cuuggcgcaguggcucacgccuguaaucccag

SEQ ID NO: 413390 - RNA, 32 nt, Human
cuuggcgcauucccacacuccagucuggaucc

SEQ ID NO: 413391 - RNA, 32 nt, Human
cuuggcgcccugagcuaagcaccaggacucac

SEQ ID NO: 413392 - RNA, 32 nt, Human
cuuggcgccgcauccuccucugggcucgcgau

SEQ ID NO: 413393 - RNA, 20 nt, Human
cuuggcggagaggggugugu

SEQ ID NO: 413394 - RNA, 20 nt, Human
cuuggcggcaguaggagcag

SEQ ID NO: 413395 - RNA, 18 nt, Human
cuuggcggcggggugggg

SEQ ID NO: 413396 - RNA, 20 nt, Human
cuuggcgggagaugcuccag

SEQ ID NO: 413397 - RNA, 20 nt, Human
cuuggcgggagggucugcag

SEQ ID NO: 413398 - RNA, 20 nt, Human
cuuggcgggaggguuggacg

SEQ ID NO: 413399 - RNA, 19 nt, Human
cuuggcgggugggcugcag

SEQ ID NO: 413400 - RNA, 18 nt, Human
cuuggcggugaaggucag

SEQ ID NO: 413401 - RNA, 32 nt, Human
cuuggcgucagccucucagguccuccauucac

SEQ ID NO: 413402 - RNA, 32 nt, Human
cuuggcgucaggacacuagggaugaacaugga

SEQ ID NO: 413403 - RNA, 32 nt, Human
cuuggcguccacccugcacagcaucacugaau

SEQ ID NO: 413404 - RNA, 22 nt, Human
cuuggcgugggcgugggcgcgg

SEQ ID NO: 413405 - RNA, 23 nt, Human
cuuggcgugggggcggggcgcgg

SEQ ID NO: 413406 - RNA, 32 nt, Human
cuuggcguggugguucacgccuguaaucccag

SEQ ID NO: 413407 - RNA, 32 nt, Human
cuuggcguuuggcucugugcucucuggccagg

SEQ ID NO: 413408 - RNA, 19 nt, Human
cuuggcuaacauggugaaa

SEQ ID NO: 413409 - RNA, 32 nt, Human
cuuggcuaagaugguccuucugugucuugcaa

SEQ ID NO: 413410 - RNA, 32 nt, Human
cuuggcuaagcaugaguuaagcagcaaaacgc

SEQ ID NO: 413411 - RNA, 32 nt, Human
cuuggcuacaccacucucccagccugugacca

SEQ ID NO: 413412 - RNA, 32 nt, Human
cuuggcuacccaggcaguggugaucuuugaca

SEQ ID NO: 413413 - RNA, 32 nt, Human
cuuggcuauuguccaugcucccagaaucaagc

SEQ ID NO: 413414 - RNA, 32 nt, Human
cuuggcucaagcuguccucuggccucagccuc

SEQ ID NO: 413415 - RNA, 32 nt, Human
cuuggcucaaggcauccucccaccucagcuuc

SEQ ID NO: 413416 - RNA, 32 nt, Human
cuuggcucaagugauucucccaccuuagccuc

SEQ ID NO: 413417 - RNA, 32 nt, Human
cuuggcucacaacugcaaccuccgucucccgg

SEQ ID NO: 413418 - RNA, 32 nt, Human
cuuggcucacagcagccucugccucccggguu

SEQ ID NO: 413419 - RNA, 24 nt, Human
cuuggcucaccacaaccuccaccu

SEQ ID NO: 413420 - RNA, 32 nt, Human
cuuggcucaccacaaccucugccucccggguu

SEQ ID NO: 413421 - RNA, 32 nt, Human
cuuggcucaccacaaccucugccuccuggguu

SEQ ID NO: 413422 - RNA, 20 nt, Human
cuuggcucaccgcaaccucc

SEQ ID NO: 413423 - RNA, 24 nt, Human
cuuggcucaccgcaaccuccaccu

SEQ ID NO: 413424 - RNA, 32 nt, Human
cuuggcucaccgcaaccucugccuaccggguu

SEQ ID NO: 413425 - RNA, 32 nt, Human
cuuggcucaccgcaaccucugccucccugguu

SEQ ID NO: 413426 - RNA, 32 nt, Human
cuuggcucaccgcaaccucugccuccuggguu

SEQ ID NO: 413427 - RNA, 32 nt, Human
cuuggcucaccucaaccucugccucccagguu

SEQ ID NO: 413428 - RNA, 32 nt, Human
cuuggcucacuacaaccucugccucccggguu

SEQ ID NO: 413429 - RNA, 32 nt, Human
cuuggcucacuacaugcuccacugccucccag

SEQ ID NO: 413430 - RNA, 32 nt, Human
cuuggcucacuccaaccuccuccuggguucca

SEQ ID NO: 413431 - RNA, 32 nt, Human
cuuggcucacugaaaccucugccucccgguuc

SEQ ID NO: 413432 - RNA, 32 nt, Human
cuuggcucacugcaaacuccgccuuccagguu

SEQ ID NO: 413433 - RNA, 32 nt, Human
cuuggcucacugcaaacucugccuaccagguu

SEQ ID NO: 413434 - RNA, 32 nt, Human
cuuggcucacugcaaacucugccuuuuggguu

SEQ ID NO: 413435 - RNA, 32 nt, Human
cuuggcucacugcaacauccgccucccggguu

SEQ ID NO: 413436 - RNA, 32 nt, Human
cuuggcucacugcaacaucugacuccuggguu

SEQ ID NO: 413437 - RNA, 32 nt, Human
cuuggcucacugcaaccacugcuuccuggguu

SEQ ID NO: 413438 - RNA, 32 nt, Human
cuuggcucacugcaaccacugucucccggguu

SEQ ID NO: 413439 - RNA, 32 nt, Human
cuuggcucacugcaacccccgccaccuagguu

SEQ ID NO: 413440 - RNA, 32 nt, Human
cuuggcucacugcaacccccgccuccaggguu

SEQ ID NO: 413441 - RNA, 32 nt, Human
cuuggcucacugcaacccucccucccggguuc

SEQ ID NO: 413442 - RNA, 32 nt, Human
cuuggcucacugcaaccucagccucccagguu

SEQ ID NO: 413443 - RNA, 20 nt, Human
cuuggcucacugcaaccucc

SEQ ID NO: 413444 - RNA, 21 nt, Human
cuuggcucacugcaaccucca

SEQ ID NO: 413445 - RNA, 32 nt, Human
cuuugggaggccgaggcgggcagaucacaagg

SEQ ID NO: 413446 - RNA, 32 nt, Human
cuuugggaggccgaggcgggcagaucaccuga

SEQ ID NO: 413447 - RNA, 32 nt, Human
cuuugggaggccgaggcgggcagaucacgagg

SEQ ID NO: 413448 - RNA, 32 nt, Human
cuuugggaggccgaggcgggcagaucacgagu

SEQ ID NO: 413449 - RNA, 32 nt, Human
cuuugggaggccgaggcgggcagaucacuuga

SEQ ID NO: 413450 - RNA, 32 nt, Human
cuuugggaggccgaggcgggcagaucaugagg

SEQ ID NO: 413451 - RNA, 32 nt, Human
cuuugggaggccgagguaggcagaucacgagg

SEQ ID NO: 413452 - RNA, 32 nt, Human
cuuugggaggccgaggugagcagaucaccuga

SEQ ID NO: 413453 - RNA, 32 nt, Human
cuuugggaggccgaggugggaggaucacuuga

SEQ ID NO: 413454 - RNA, 32 nt, Human
cuuugggaggccgaggugggcagaucacaagg

SEQ ID NO: 413455 - RNA, 32 nt, Human
cuuugggaggccgaggugggcagaucacaagu

SEQ ID NO: 413456 - RNA, 32 nt, Human
cuuugggaggccgaggugggcagaucaccgga

SEQ ID NO: 413457 - RNA, 32 nt, Human
cuuugggaggccgaggugggcagaucaccuaa

SEQ ID NO: 413458 - RNA, 32 nt, Human
cuuugggaggccgaggugggcagaucaccuga

SEQ ID NO: 413459 - RNA, 32 nt, Human
cuuugggaggccgaggugggcagaucacgaag

SEQ ID NO: 413460 - RNA, 32 nt, Human
cuuugggaggccgaggugggcagaucacgagg

SEQ ID NO: 413461 - RNA, 32 nt, Human
cuuugggaggccgaggugggcagaucacuuga

SEQ ID NO: 413462 - RNA, 32 nt, Human
cuuugggaggccgaggugggcagaucagcuga

SEQ ID NO: 413463 - RNA, 32 nt, Human
cuuugggaggccgaggugggcagaucaggagg

SEQ ID NO: 413464 - RNA, 32 nt, Human
cuuugggaggccgaggugggcagaucaugagg

SEQ ID NO: 413465 - RNA, 32 nt, Human
cuuugggaggccgaggugggcagaucaugggu

SEQ ID NO: 413466 - RNA, 32 nt, Human
cuuugggaggccgagguuggaggaucacuuga

SEQ ID NO: 413467 - RNA, 32 nt, Human
cuuugggaggccgaugugggcagaucacaagg

SEQ ID NO: 413468 - RNA, 32 nt, Human
cuuugggaggccgugaugggcagaucacuuga

SEQ ID NO: 413469 - RNA, 32 nt, Human
cuuugggaggccuaggcaggcagaucaccuga

SEQ ID NO: 413470 - RNA, 32 nt, Human
cuuugggaggccuaggcgggcagaucaccuga

SEQ ID NO: 413471 - RNA, 32 nt, Human
cuuugggaggccuaggugggcagaucaugagg

SEQ ID NO: 413472 - RNA, 32 nt, Human
cuuugggaggccugaguggauggaucacuuga

SEQ ID NO: 413473 - RNA, 32 nt, Human
cuuugggaggcggaggugagcagaucaccuga

SEQ ID NO: 413474 - RNA, 32 nt, Human
cuuugggaggcuaagacaggcagaucaccuga

SEQ ID NO: 413475 - RNA, 32 nt, Human
cuuugggaggcuaaggcaggcagaucaccuga

SEQ ID NO: 413476 - RNA, 32 nt, Human
cuuugggaggcuaaggcaggcagaucacuuga

SEQ ID NO: 413477 - RNA, 32 nt, Human
cuuugggaggcuaaggugggcagaucacuuga

SEQ ID NO: 413478 - RNA, 32 nt, Human
cuuugggaggcuacggugggcagaucaucuga

SEQ ID NO: 413479 - RNA, 32 nt, Human
cuuugggaggcugaagcaggaggaucacuuga

SEQ ID NO: 413480 - RNA, 32 nt, Human
cuuugggaggcugaagcaggaggauugcuuga

SEQ ID NO: 413481 - RNA, 32 nt, Human
cuuugggaggcugaagcaggcagaucaccuga

SEQ ID NO: 413482 - RNA, 32 nt, Human
cuuugggaggcugaagcggguggaucaccuga

SEQ ID NO: 413483 - RNA, 32 nt, Human
cuuugggaggcugaagcggguggaucaugagg

SEQ ID NO: 413484 - RNA, 32 nt, Human
cuuugggaggcugaagcugaaggaucacuuga

SEQ ID NO: 413485 - RNA, 32 nt, Human
cuuugggaggcugaaguaggaggaucgucuug

SEQ ID NO: 413486 - RNA, 32 nt, Human
cuuugggaggcugaagugggaggaucgcuuga

SEQ ID NO: 413487 - RNA, 32 nt, Human
cuuugggaggcugaagugggcagaucacgagg

SEQ ID NO: 413488 - RNA, 32 nt, Human
cuuugggaggcugaagugggcagauuacuuga

SEQ ID NO: 413489 - RNA, 32 nt, Human
cuuugggaggcugaagugggugaaucacuuga

SEQ ID NO: 413490 - RNA, 32 nt, Human
cuuugggaggcugaaguggguggaucacaagu

SEQ ID NO: 413491 - RNA, 32 nt, Human
cuuugggaggcugaaguggguggaucaccaga

SEQ ID NO: 413492 - RNA, 32 nt, Human
cuuugggaggcugacgugggcagaucaugagg

SEQ ID NO: 413493 - RNA, 32 nt, Human
cuuugggaggcugagaagggcggaucacgagg

SEQ ID NO: 413494 - RNA, 32 nt, Human
cuuugggaggcugagacaggcagaucacuuga

SEQ ID NO: 413495 - RNA, 32 nt, Human
cuuugggaggcugagacaggcggaucacgagg

SEQ ID NO: 413496 - RNA, 32 nt, Human
cuuugggaggcugagacaggcggaucaucuga

SEQ ID NO: 413497 - RNA, 32 nt, Human
cuuugggaggcugagacagguggaucaccuga

SEQ ID NO: 413498 - RNA, 32 nt, Human
cuuugggaggcugagacagguggaucacuuga

SEQ ID NO: 413499 - RNA, 32 nt, Human
cuuugggaggcugagacgggaggaucacauga

SEQ ID NO: 413500 - RNA, 32 nt, Human
cuuugggaggcugagacgggcagaucaccuga

SEQ ID NO: 413501 - RNA, 32 nt, Human
cuuugggaggcugagacgggcggaucacaagg

SEQ ID NO: 413502 - RNA, 32 nt, Human
cuuugggaggcugagacggguggauuaccuga

SEQ ID NO: 413503 - RNA, 32 nt, Human
cuuugggaggcugagaugggaggaucacuuga

SEQ ID NO: 413504 - RNA, 32 nt, Human
cuuugggaggcugagaugggaggaucucuuga

SEQ ID NO: 413505 - RNA, 32 nt, Human
cuuugggaggcugagaugggcagaucacuuga

SEQ ID NO: 413506 - RNA, 32 nt, Human
cuuugggaggcugagcaagguggguggaucac

SEQ ID NO: 413507 - RNA, 32 nt, Human
cuuugggaggcugagcugggcagaucaccuga

SEQ ID NO: 413508 - RNA, 32 nt, Human
cuuugggaggcugaggaaagcagaucacaagg

SEQ ID NO: 413509 - RNA, 32 nt, Human
cuuugggaggcugaggaaggcaaaucacaagg

SEQ ID NO: 413510 - RNA, 32 nt, Human
cuuugggaggcugaggaaggggcaucacuuga

SEQ ID NO: 413511 - RNA, 32 nt, Human
cuuugggaggcugaggacagaggaucacuuga

SEQ ID NO: 413512 - RNA, 32 nt, Human
cuuugggaggcugaggagagcagaucacuuga

SEQ ID NO: 413513 - RNA, 32 nt, Human
cuuugggaggcugaggagggcagaucacuuga

SEQ ID NO: 413514 - RNA, 32 nt, Human
cuuugggaggcugaggaggguggaucacuuga

SEQ ID NO: 413515 - RNA, 32 nt, Human
cuuugggaggcugaggauggaaaaucacuuga

SEQ ID NO: 413516 - RNA, 32 nt, Human
cuuugggaggcugaggcaagaggaucgcuuga

SEQ ID NO: 413517 - RNA, 32 nt, Human
cuuugggaggcugaggcaagaggauuacuuga

SEQ ID NO: 413518 - RNA, 32 nt, Human
cuuugggaggcugaggcaagcggaucauuuga

SEQ ID NO: 413519 - RNA, 32 nt, Human
cuuugggaggcugaggcaaguggaucacuuga

SEQ ID NO: 413520 - RNA, 32 nt, Human
cuuugggaggcugaggcagaaggaucacuuga

SEQ ID NO: 413521 - RNA, 32 nt, Human
cuuugggaggcugaggcagaaggauuaccuga

SEQ ID NO: 413522 - RNA, 32 nt, Human
cuuugggaggcugaggcaggagaaucacuuga

SEQ ID NO: 413523 - RNA, 32 nt, Human
cuuugggaggcugaggcaggaggaggauaacu

SEQ ID NO: 413524 - RNA, 32 nt, Human
cuuugggaggcugaggcaggaggauagcuuga

SEQ ID NO: 413525 - RNA, 32 nt, Human
cuuugggaggcugaggcaggaggaucacucga

SEQ ID NO: 413526 - RNA, 32 nt, Human
cuuugggaggcugaggcaggaggaucacuuga

SEQ ID NO: 413527 - RNA, 32 nt, Human
cuuugggaggcugaggcaggaggaucgcuuga

SEQ ID NO: 413528 - RNA, 32 nt, Human
cuuugggaggcugaggcaggaggauugcuuga

SEQ ID NO: 413529 - RNA, 32 nt, Human
cuuugggaggcugaggcaggaggauuguuuga

SEQ ID NO: 413530 - RNA, 32 nt, Human
cuuugggaggcugaggcaggcagaucacauga

SEQ ID NO: 413531 - RNA, 32 nt, Human
cuuugggaggcugaggcaggcagaucaccuga

SEQ ID NO: 413532 - RNA, 32 nt, Human
cuuugggaggcugaggcaggcagaucacgagg

SEQ ID NO: 413533 - RNA, 32 nt, Human
cuuugggaggcugaggcaggcagaucagcuga

SEQ ID NO: 413534 - RNA, 32 nt, Human
cuuugggaggcugaggcaggcagaucaucuga

SEQ ID NO: 413535 - RNA, 32 nt, Human
cuuugggaggcugaggcaggcagaucaugagg

SEQ ID NO: 413536 - RNA, 32 nt, Human
cuuugggaggcugaggcaggccaaucaccuga

SEQ ID NO: 413537 - RNA, 32 nt, Human
cuuugggaggcugaggcaggcggacacuugag

SEQ ID NO: 413538 - RNA, 32 nt, Human
cuuugggaggcugaggcaggcggaucacaagg

SEQ ID NO: 413539 - RNA, 32 nt, Human
cuuugggaggcugaggcaggcggaucacaggg

SEQ ID NO: 413540 - RNA, 32 nt, Human
cuuugggaggcugaggcaggcggaucaccuga

SEQ ID NO: 413541 - RNA, 32 nt, Human
cuuugggaggcugaggcaggcggaucacgagg

SEQ ID NO: 413542 - RNA, 32 nt, Human
cuuugggaggcugaggcaggcggaucacuuga

SEQ ID NO: 413543 - RNA, 32 nt, Human
cuuugggaggcugaggcaggcggaucaugagg

SEQ ID NO: 413544 - RNA, 32 nt, Human
cuuugggaggcugaggcaggcgggucaccuga

SEQ ID NO: 413545 - RNA, 32 nt, Human
cuuugggaggcugaggcaggcgggucaucuga

SEQ ID NO: 413546 - RNA, 32 nt, Human
cuuugggaggcugaggcaggcugaucacuuga

SEQ ID NO: 413547 - RNA, 32 nt, Human
cuuugggaggcugaggcaggucgaucacgagg

SEQ ID NO: 413548 - RNA, 32 nt, Human
cuuugggaggcugaggcaggugaaucacuugg

SEQ ID NO: 413549 - RNA, 32 nt, Human
cuuugggaggcugaggcagguggaucacaagg

SEQ ID NO: 413550 - RNA, 32 nt, Human
cuuugggaggcugaggcagguggaucacaaug

SEQ ID NO: 413551 - RNA, 32 nt, Human
cuuugggaggcugaggcagguggaucaccuca

SEQ ID NO: 413552 - RNA, 32 nt, Human
cuuugggaggcugaggcagguggaucaccuga

SEQ ID NO: 413553 - RNA, 32 nt, Human
cuuugggaggcugaggcagguggaucacgagg

SEQ ID NO: 413554 - RNA, 32 nt, Human
cuuugggaggcugaggcagguggaucacugga

SEQ ID NO: 413555 - RNA, 32 nt, Human
cuuugggaggcugaggcagguggaucacuuga

SEQ ID NO: 413556 - RNA, 32 nt, Human
cuuugggaggcugaggcagguggaucgccuga

SEQ ID NO: 413557 - RNA, 32 nt, Human
cuuugggaggcugaggcagguggcucacuuga

SEQ ID NO: 413558 - RNA, 32 nt, Human
cuuugggaggcugaggcaggugguucacugga

SEQ ID NO: 413559 - RNA, 32 nt, Human
cuuugggaggcugaggccggaggauugcuuga

SEQ ID NO: 413560 - RNA, 32 nt, Human
cuuugggaggcugaggccggcagaucacuuga

SEQ ID NO: 413561 - RNA, 32 nt, Human
cuuugggaggcugaggccgguggaucaccugg

SEQ ID NO: 413562 - RNA, 32 nt, Human
cuuugggaggcugaggcgagaggaucacuuga

SEQ ID NO: 413563 - RNA, 32 nt, Human
cuuugggaggcugaggcgaguggaucacaagg

SEQ ID NO: 413564 - RNA, 32 nt, Human
cuuugggaggcugaggcgcguggaucaccuga

SEQ ID NO: 413565 - RNA, 32 nt, Human
cuuugggaggcugaggcggauggaucaccuga

SEQ ID NO: 413566 - RNA, 32 nt, Human
cuuugggaggcugaggcggauggaucacgagg

SEQ ID NO: 413567 - RNA, 32 nt, Human
cuuugggaggcugaggcggccggaucacaagg

SEQ ID NO: 413568 - RNA, 32 nt, Human
cuuugggaggcugaggcgggaggaucaauuga

SEQ ID NO: 413569 - RNA, 32 nt, Human
cuuugggaggcugaggcgggaggaucacaagg

SEQ ID NO: 413570 - RNA, 32 nt, Human
cuuugggaggcugaggcgggaggaucgcuuga

SEQ ID NO: 413571 - RNA, 32 nt, Human
cuuugggaggcugaggcgggaggauugcuuga

SEQ ID NO: 413572 - RNA, 32 nt, Human
cuuugggaggcugaggcgggcagaucaacugg

SEQ ID NO: 413573 - RNA, 32 nt, Human
cuuugggaggcugaggcgggcagaucacaaga

SEQ ID NO: 413574 - RNA, 32 nt, Human
cuuugggaggcugaggcgggcagaucacaagg

SEQ ID NO: 413575 - RNA, 32 nt, Human
cuuugggaggcugaggcgggcagaucaccaga

SEQ ID NO: 413576 - RNA, 32 nt, Human
cuuugggaggcugaggcgggcagaucaccuga

SEQ ID NO: 413577 - RNA, 32 nt, Human
cuuugggaggcugaggcgggcagaucacgaag

SEQ ID NO: 413578 - RNA, 32 nt, Human
cuuugggaggcugaggcgggcagaucacgagg

SEQ ID NO: 413579 - RNA, 32 nt, Human
cuuugggaggcugaggcgggcagaucauucaa

SEQ ID NO: 413580 - RNA, 32 nt, Human
cuuugggaggcugaggcgggcgaaucauuuga

SEQ ID NO: 413581 - RNA, 32 nt, Human
cuuugggaggcugaggcgggcggaacaccuga

SEQ ID NO: 413582 - RNA, 32 nt, Human
cuuugggaggcugaggcgggcggaucacaagg

SEQ ID NO: 413583 - RNA, 32 nt, Human
cuuugggaggcugaggcgggcggaucaccuga

SEQ ID NO: 413584 - RNA, 32 nt, Human
cuuugggaggcugaggcgggcggaucacgagg

SEQ ID NO: 413585 - RNA, 32 nt, Human
cuuugggaggcugaggcgggcggaucacuagg

SEQ ID NO: 413586 - RNA, 32 nt, Human
cuuugggaggcugaggcgggcggaucaugagg

SEQ ID NO: 413587 - RNA, 32 nt, Human
cuuugggaggcugaggcggggagaucacaagg

SEQ ID NO: 413588 - RNA, 32 nt, Human
cuuugggaggcugaggcggguagaucacaagg

SEQ ID NO: 413589 - RNA, 32 nt, Human
cuuugggaggcugaggcgggugaaucacgagg

SEQ ID NO: 413590 - RNA, 32 nt, Human
cuuugggaggcugaggcgggugaaucaugagg

SEQ ID NO: 413591 - RNA, 32 nt, Human
cuuugggaggcugaggcggguggaacaccuga

SEQ ID NO: 413592 - RNA, 32 nt, Human
cuuugggaggcugaggcggguggaucaagagg

SEQ ID NO: 413593 - RNA, 32 nt, Human
cuuugggaggcugaggcggguggaucacaagc

SEQ ID NO: 413594 - RNA, 32 nt, Human
cuuugggaggcugaggcggguggaucacaagg

SEQ ID NO: 413595 - RNA, 32 nt, Human
cuuugggaggcugaggcggguggaucaccuaa

SEQ ID NO: 413596 - RNA, 32 nt, Human
cuuugggaggcugaggcggguggaucaccuga

SEQ ID NO: 413597 - RNA, 32 nt, Human
cuuugggaggcugaggcggguggaucacgagg

SEQ ID NO: 413598 - RNA, 32 nt, Human
cuuugggaggcugaggcggguggaucacuagg

SEQ ID NO: 413599 - RNA, 32 nt, Human
cuuugggaggcugaggcggguggaucacuuga

SEQ ID NO: 413600 - RNA, 32 nt, Human
cuuugggaggcugaggcggguggaucaucugg

SEQ ID NO: 413601 - RNA, 32 nt, Human
cuuugggaggcugaggcggguggaucaugagg

SEQ ID NO: 413602 - RNA, 32 nt, Human
cuuugggaggcugaggcggguggaucugcuga

SEQ ID NO: 413603 - RNA, 32 nt, Human
cuuugggaggcugaggcgggugggucaccuga

SEQ ID NO: 413604 - RNA, 32 nt, Human
cuuugggaggcugaggcggguugaucaccuga

SEQ ID NO: 413605 - RNA, 32 nt, Human
cuuugggaggcugaggcggucagaucaccaga

SEQ ID NO: 413606 - RNA, 32 nt, Human
cuuugggaggcugaggcuggagaaucgcuuga

SEQ ID NO: 413607 - RNA, 32 nt, Human
cuuugggaggcugaggcuggagaaucguuuga

SEQ ID NO: 413608 - RNA, 32 nt, Human
cuuugggaggcugaggcuggcagaucacuuga

SEQ ID NO: 413609 - RNA, 32 nt, Human
cuuugggaggcugaggcuggcgaaucaccaga

SEQ ID NO: 413610 - RNA, 32 nt, Human
cuuugggaggcugaggcuggcguaucaccuga

SEQ ID NO: 413611 - RNA, 32 nt, Human
cuuugggaggcugaggcugggggaucaccuga

SEQ ID NO: 413612 - RNA, 32 nt, Human
cuuugggaggcugagggaggcggaucacuuga

SEQ ID NO: 413613 - RNA, 32 nt, Human
cuuugggaggcugaggggguggaucaccugag

SEQ ID NO: 413614 - RNA, 32 nt, Human
cuuugggaggcugagguaggaggaucacguga

SEQ ID NO: 413615 - RNA, 32 nt, Human
cuuugggaggcugagguaggaggaucgcuuga

SEQ ID NO: 413616 - RNA, 32 nt, Human
cuuugggaggcugagguaggaggauugauuga

SEQ ID NO: 413617 - RNA, 32 nt, Human
cuuugggaggcugagguaggcagaucacuuga

SEQ ID NO: 413618 - RNA, 32 nt, Human
cuuugggaggcugagguagguggaucacccaa

SEQ ID NO: 413619 - RNA, 32 nt, Human
cuuugggaggcugagguagguggaucaugagg

SEQ ID NO: 413620 - RNA, 32 nt, Human
cuuugggaggcugaggucaggaguuugagauc

SEQ ID NO: 413621 - RNA, 32 nt, Human
cuuugggaggcugaggugagaggaucgcuuga

SEQ ID NO: 413622 - RNA, 32 nt, Human
cuuugggaggcugaggugagagggucacuuga

SEQ ID NO: 413623 - RNA, 32 nt, Human
cuuugggaggcugaggugaguggauuacaagg

SEQ ID NO: 413624 - RNA, 32 nt, Human
cuuugggaggcugagguggaaggaucgcuuga

SEQ ID NO: 413625 - RNA, 32 nt, Human
cuuugggaggcugagguggacagaucacgagg

SEQ ID NO: 413626 - RNA, 32 nt, Human
cuuugggaggcugagguggacggaucacgagg

SEQ ID NO: 413627 - RNA, 32 nt, Human
cuuugggaggcugaggugggaggaucccuuga

SEQ ID NO: 413628 - RNA, 32 nt, Human
cuuugggaggcugaggugggaggaucgcuuga

SEQ ID NO: 413629 - RNA, 32 nt, Human
cuuugggaggcugaggugggaggauugcuuga

SEQ ID NO: 413630 - RNA, 32 nt, Human
cuuugggaggcugaggugggagggucgcuuga

SEQ ID NO: 413631 - RNA, 32 nt, Human
cuuugggaggcugaggugggcaaaucaccuga

SEQ ID NO: 413632 - RNA, 32 nt, Human
cuuugggaggcugaggugggcagaucaacuga

SEQ ID NO: 413633 - RNA, 32 nt, Human
cuuugggaggcugaggugggcagaucacaagg

SEQ ID NO: 413634 - RNA, 32 nt, Human
cuuugggaggcugaggugggcagaucaccuag

SEQ ID NO: 413635 - RNA, 32 nt, Human
cuuugggaggcugaggugggcagaucaccuga

SEQ ID NO: 413636 - RNA, 32 nt, Human
cuuugggaggcugaggugggcagaucacgaga

SEQ ID NO: 413637 - RNA, 32 nt, Human
cuuugggaggcugaggugggcagaucacgagc

SEQ ID NO: 413638 - RNA, 32 nt, Human
cuuugggaggcugaggugggcagaucacgagg

SEQ ID NO: 413639 - RNA, 32 nt, Human
cuuugggaggcugaggugggcagaucacuuga

SEQ ID NO: 413640 - RNA, 32 nt, Human
cuuugggaggcugaggugggcagaucauuuga

SEQ ID NO: 413641 - RNA, 32 nt, Human
cuuugggaggcugaggugggcaggucauuuga

SEQ ID NO: 413642 - RNA, 32 nt, Human
cuuugggaggcugaggugggcauaucaccuga

SEQ ID NO: 413643 - RNA, 32 nt, Human
cuuugggaggcugaggugggcgaaucacaagg

SEQ ID NO: 413644 - RNA, 32 nt, Human
cuuugggaggcugaggugggcgcaucaccuga

SEQ ID NO: 413645 - RNA, 32 nt, Human
cuuugggaggcugaggugggcggaucaccuga

SEQ ID NO: 413646 - RNA, 32 nt, Human
cuuugggaggcugaggugggcggaucacgagg

SEQ ID NO: 413647 - RNA, 32 nt, Human
cuuugggaggcugaggugggcggaucacuuga

SEQ ID NO: 413648 - RNA, 32 nt, Human
cuuugggaggcugaggugggcggcucacgagg

SEQ ID NO: 413649 - RNA, 32 nt, Human
cuuugggaggcugagguggguagauuacuuga

SEQ ID NO: 413650 - RNA, 32 nt, Human
cuuugggaggcugagguggguggaccacuuga

SEQ ID NO: 413651 - RNA, 32 nt, Human
cuuugggaggcugagguggguggaucacaagg

SEQ ID NO: 413652 - RNA, 32 nt, Human
cuuugggaggcugagguggguggaucacaggu

SEQ ID NO: 413653 - RNA, 32 nt, Human
cuuugggaggcugagguggguggaucaccuaa

SEQ ID NO: 413654 - RNA, 32 nt, Human
cuuugggaggcugagguggguggaucaccuga

SEQ ID NO: 413655 - RNA, 32 nt, Human
cuuugggaggcugagguggguggaucacgagg

SEQ ID NO: 413656 - RNA, 32 nt, Human
cuuugggaggcugagguggguggaucacugga

SEQ ID NO: 413657 - RNA, 32 nt, Human
cuuugggaggcugagguggguggaucacuggg

SEQ ID NO: 413658 - RNA, 32 nt, Human
cuuugggaggcugagguggguggaucacuuga

SEQ ID NO: 413659 - RNA, 32 nt, Human
cuuugggaggcugagguggguggaucaucuga

SEQ ID NO: 413660 - RNA, 32 nt, Human
cuuugggaggcugagguggguggaucaugagg

SEQ ID NO: 413661 - RNA, 32 nt, Human
cuuugggaggcugagguggguggaucaugcgg

SEQ ID NO: 413662 - RNA, 32 nt, Human
cuuugggaggcugagguggguggaucauuuga

SEQ ID NO: 413663 - RNA, 32 nt, Human
cuuugggaggcugagguggguggcuuacaggg

SEQ ID NO: 413664 - RNA, 32 nt, Human
cuuugggaggcugagguggguguaucaccuga

SEQ ID NO: 413665 - RNA, 32 nt, Human
cuuugggaggcugagguggguguaucacuuga

SEQ ID NO: 413666 - RNA, 32 nt, Human
cuuugggaggcugagguggucagaucaccuaa

SEQ ID NO: 413667 - RNA, 32 nt, Human
cuuugggaggcugagucgggaggauagcguga

SEQ ID NO: 413668 - RNA, 32 nt, Human
cuuugggaggcugagucgggcggaucacauga

SEQ ID NO: 413669 - RNA, 32 nt, Human
cuuugggaggcugaguugggcggaucacuuga

SEQ ID NO: 413670 - RNA, 32 nt, Human
cuuugggaggcugaugcgggcggaucacaagg

SEQ ID NO: 413671 - RNA, 32 nt, Human
cuuugggaggcugcagcggguggaucacuuga

SEQ ID NO: 413672 - RNA, 32 nt, Human
cuuugggaggcugcggcaggcggaucacuuga

SEQ ID NO: 413673 - RNA, 32 nt, Human
cuuugggaggcugcggcgggcggaucaccuga

SEQ ID NO: 413674 - RNA, 32 nt, Human
cuuugggaggcuggggcgagaggauugcuuga

SEQ ID NO: 413675 - RNA, 32 nt, Human
cuuugggaggcuggggcgagcggaucaugagg

SEQ ID NO: 413676 - RNA, 32 nt, Human
cuuugggaggcuguggcagguggaucaccuga

SEQ ID NO: 413677 - RNA, 32 nt, Human
cuuugggagggcgaggcuagcagaucacuuga

SEQ ID NO: 413678 - RNA, 32 nt, Human
cuuugggagggggaggcaggcagaucacgacg

SEQ ID NO: 413679 - RNA, 32 nt, Human
cuuugggagggggaggcaggcagaucacgaug

SEQ ID NO: 413680 - RNA, 32 nt, Human
cuuugggagggugaggugggaggaucaccuga

SEQ ID NO: 413681 - RNA, 32 nt, Human
cuuugggagggugggggcagggcgggaucaac

SEQ ID NO: 413682 - RNA, 32 nt, Human
cuuugggagguagaggcaggcagaucacgagg

SEQ ID NO: 413683 - RNA, 32 nt, Human
cuuugggaggucgaggcaggcagaucaccuga

SEQ ID NO: 413684 - RNA, 32 nt, Human
cuuugggaggucgaggcgggcagaucacuuga

SEQ ID NO: 413685 - RNA, 32 nt, Human
cuuugggaggucgagguaggcagaucaccgag

SEQ ID NO: 413686 - RNA, 32 nt, Human
cuuugggaggucgaggugggcagaucaccuga

SEQ ID NO: 413687 - RNA, 32 nt, Human
cuuugggagguggguggaucaccugaggucgg

SEQ ID NO: 413688 - RNA, 32 nt, Human
cuuugggaugcugaagugagaggaucccauga

SEQ ID NO: 413689 - RNA, 32 nt, Human
cuuugggauggacuggaggagcgcagcgucca

SEQ ID NO: 413690 - RNA, 32 nt, Human
cuuugggauucugaggugggaggaucaugagg

SEQ ID NO: 413691 - RNA, 22 nt, Human
cuuugggcaaaggcccccucua

SEQ ID NO: 413692 - RNA, 32 nt, Human
cuuugggcaggggagcucggaggcucaggaug

SEQ ID NO: 413693 - RNA, 21 nt, Human
cuuugggcaucucuucugccu

SEQ ID NO: 413694 - RNA, 32 nt, Human
cuuugggccacuguucaggguacugaccauca

SEQ ID NO: 413695 - RNA, 19 nt, Human
cuuugggccuggucucugc

SEQ ID NO: 413696 - RNA, 32 nt, Human
cuuugggcucagugaagagucuggaguuuauc

SEQ ID NO: 413697 - RNA, 23 nt, Human
cuuugggcugaagcaccccacua

SEQ ID NO: 413698 - RNA, 32 nt, Human
cuuugggcuggcugcccuugcaaagcagcugg

SEQ ID NO: 413699 - RNA, 32 nt, Human
cuuugggcugggauggcaguggggcauaaugg

SEQ ID NO: 413700 - RNA, 18 nt, Human
cuuugggcuggggccaug

SEQ ID NO: 413701 - RNA, 32 nt, Human
cuuugggcugggggccucucuccugggucagg

SEQ ID NO: 413702 - RNA, 32 nt, Human
cuuuggggaaagaauuaggaagggucagaacc

SEQ ID NO: 413703 - RNA, 32 nt, Human
cuuuggggaagagagcucacuccccaugcggg

SEQ ID NO: 413704 - RNA, 21 nt, Human
cuuuggggacacccuccugcc

SEQ ID NO: 413705 - RNA, 32 nt, Human
cuuuggggagaaaaguauucaggaagugggug

SEQ ID NO: 413706 - RNA, 32 nt, Human
cuuuggggaggcagucacaggagugaggugca

SEQ ID NO: 413707 - RNA, 24 nt, Human
cuuuggggauugcauuuccugccu

SEQ ID NO: 413708 - RNA, 32 nt, Human
cuuuggggcccgaggaauuucagaccugaaca

SEQ ID NO: 413709 - RNA, 32 nt, Human
cuuugggggaaaggaaaaggcuuaccaggcug

SEQ ID NO: 413710 - RNA, 32 nt, Human
cuuugggggacaguaagucugggcccagcuuc

SEQ ID NO: 413711 - RNA, 32 nt, Human
cuuugggggaguaagaaugugugugcagaauu

SEQ ID NO: 413712 - RNA, 32 nt, Human
cuuugggggauggagucucaggguggcagagg

SEQ ID NO: 413713 - RNA, 20 nt, Human
cuuuggggggccuccugccu

SEQ ID NO: 413714 - RNA, 32 nt, Human
cuuugggggugcccugggaucccugggguagu

SEQ ID NO: 413715 - RNA, 32 nt, Human
cuuuggggguguucauggggccuggacuugca

SEQ ID NO: 413716 - RNA, 32 nt, Human
cuuuggggguuauuuaaugaaaaacaugcuau

SEQ ID NO: 413717 - RNA, 27 nt, Human
cuuuggggucuucuccaccaccugucu

SEQ ID NO: 413718 - RNA, 32 nt, Human
cuuuggggugggacuugcccugagcuuggagc

SEQ ID NO: 413719 - RNA, 32 nt, Human
cuuugggguuccauuuaggagcuuucuagaaa

SEQ ID NO: 413720 - RNA, 19 nt, Human
cuuugggguuuccugucug

SEQ ID NO: 413721 - RNA, 20 nt, Human
cuuugggguuuugccuguuu

SEQ ID NO: 413722 - RNA, 32 nt, Human
cuuuggguaaacuaaagaaagauaaaguauac

SEQ ID NO: 413723 - RNA, 32 nt, Human
cuuugggucucaauuuugccuucccuaaugaa

SEQ ID NO: 413724 - RNA, 32 nt, Human
cuuugggugagaaguugaagagucgggauaga

SEQ ID NO: 413725 - RNA, 32 nt, Human
cuuuggguggagccaccacuuccaguucugau

SEQ ID NO: 413726 - RNA, 32 nt, Human
cuuuggguggcugaggugagaggaucacuuga

SEQ ID NO: 413727 - RNA, 32 nt, Human
cuuugggugggacucuaagcaguauuugcaga

SEQ ID NO: 413728 - RNA, 32 nt, Human
cuuuggguguaggagggggugggcaggggaca

SEQ ID NO: 413729 - RNA, 32 nt, Human
cuuuggguguccaagagaaaugguuuuugcca

SEQ ID NO: 413730 - RNA, 19 nt, Human
cuuuggguucuuucugccu

SEQ ID NO: 413731 - RNA, 32 nt, Human
cuuugguagcagcucccugccuccagggcuuc

SEQ ID NO: 413732 - RNA, 32 nt, Human
cuuugguagcuggugggacugacgccuucuuc

SEQ ID NO: 413733 - RNA, 32 nt, Human
cuuugguaggcaaaggugggaggaucauuuga

SEQ ID NO: 413734 - RNA, 32 nt, Human
cuuugguaggccaagacaagcagaucacuuga

SEQ ID NO: 413735 - RNA, 32 nt, Human
cuuugguagguguuuugcuauuacagacagug

SEQ ID NO: 413736 - RNA, 32 nt, Human
cuuugguauuaaguggcaauuagaugaaacaa

SEQ ID NO: 413737 - RNA, 32 nt, Human
cuuuggucagcaccugcuuucucagacuugcc

SEQ ID NO: 413738 - RNA, 32 nt, Human
cuuuggucaggaguucaagaccacccuggcca

SEQ ID NO: 413739 - RNA, 32 nt, Human
cuuuggucaguaggaggcuggauuggaguggu

SEQ ID NO: 413740 - RNA, 32 nt, Human
cuuuggucauguugagguacaguuugcauagg

SEQ ID NO: 413741 - RNA, 32 nt, Human
cuuugguccccucacauuuggccagaggcaua

SEQ ID NO: 413742 - RNA, 32 nt, Human
cuuugguccuucuccuaaacccuucaguggcu

SEQ ID NO: 413743 - RNA, 32 nt, Human
cuuuggucuagcuuaagacucuggguggggca

SEQ ID NO: 413744 - RNA, 32 nt, Human
cuuuggucucaaagcaaauugcucugaucaga

SEQ ID NO: 413745 - RNA, 32 nt, Human
cuuuggucuccucuggucuaucagcucccauc

SEQ ID NO: 413746 - RNA, 26 nt, Human
cuuuggucuccuuuccccuccugucu

SEQ ID NO: 413747 - RNA, 32 nt, Human
cuuuggucuggguuguguggcuuuugggggau

SEQ ID NO: 413748 - RNA, 32 nt, Human
cuuuggugagcagcagcccuggggucacagac

SEQ ID NO: 413749 - RNA, 32 nt, Human
cuuuggugcagcucgccagggaugagaggcac

SEQ ID NO: 413750 - RNA, 32 nt, Human
cuuuggugcccaggccaaguagaaugagauga

SEQ ID NO: 413751 - RNA, 32 nt, Human
cuuuggugccugugcuauaagcagcagauuuu

SEQ ID NO: 413752 - RNA, 32 nt, Human
cuuuggugcuucugccuuuaguuuuaggacac

SEQ ID NO: 413753 - RNA, 32 nt, Human
cuuugguggcagcacgcccugccuuguggagc

SEQ ID NO: 413754 - RNA, 32 nt, Human
cuuugguggccccuccccaacuccuuccucuu

SEQ ID NO: 413755 - RNA, 32 nt, Human
cuuugguggucuuccuguggucuucccuuccc

SEQ ID NO: 413756 - RNA, 23 nt, Human
cuuuggugucccccucccaaggg

SEQ ID NO: 413757 - RNA, 32 nt, Human
cuuuggugucucagagaaggagucuaggucuu

SEQ ID NO: 413758 - RNA, 32 nt, Human
cuuuggugucucaguggccucuugcuuauucc

SEQ ID NO: 413759 - RNA, 32 nt, Human
cuuugguucucugcugugccugccuguguccu

SEQ ID NO: 413760 - RNA, 19 nt, Human
cuuugguugcaccuccugc

SEQ ID NO: 413761 - RNA, 32 nt, Human
cuuuguaaauagcaguucacauuuuuccacag

SEQ ID NO: 413762 - RNA, 32 nt, Human
cuuuguaacccagccaccaccaaaaagcaaac

SEQ ID NO: 413763 - RNA, 32 nt, Human
cuuuguaacccaggcuggaaugcaauggcaug

SEQ ID NO: 413764 - RNA, 32 nt, Human
cuuuguaaccucagugcuggggacugaggcga

SEQ ID NO: 413765 - RNA, 32 nt, Human
cuuuguaagaacaccaaccaaccaagguuuaa

SEQ ID NO: 413766 - RNA, 32 nt, Human
cuuuguaauaugccacugugaguacugacauu

SEQ ID NO: 413767 - RNA, 32 nt, Human
cuuuguacaggaaauauugcccaaugacuagu

SEQ ID NO: 413768 - RNA, 32 nt, Human
cuuuguacauucaggagcugcagagaggaaag

SEQ ID NO: 413769 - RNA, 32 nt, Human
cuuuguacccuguuccuuccucugcgcccucc

SEQ ID NO: 413770 - RNA, 32 nt, Human
cuuuguaccugcaagugccaucuuuaaggggg

SEQ ID NO: 413771 - RNA, 32 nt, Human
cuuuguacugccucucccgccuguggccaaag

SEQ ID NO: 413772 - RNA, 32 nt, Human
cuuuguacuuacugcccugccugugacaguug

SEQ ID NO: 413773 - RNA, 32 nt, Human
cuuuguacuucugcuuuuuauucuuccucaag

SEQ ID NO: 413774 - RNA, 32 nt, Human
cuuuguagaagcaggagcaagaguguuuggcu

SEQ ID NO: 413775 - RNA, 32 nt, Human
cuuuguagaugugaaugguacuauucaacgga

SEQ ID NO: 413776 - RNA, 32 nt, Human
cuuuguagccaucaacccgagugcaguuucga

SEQ ID NO: 413777 - RNA, 32 nt, Human
cuuuguaggaagagacacaguccugcagccuc

SEQ ID NO: 413778 - RNA, 21 nt, Human
cuuuguaggcaccuucugcuu

SEQ ID NO: 413779 - RNA, 32 nt, Human
cuuuguagggaaggcccugaugaccaguaacu

SEQ ID NO: 413780 - RNA, 32 nt, Human
cuuuguagggacguggauaaagguggaaacca

SEQ ID NO: 413781 - RNA, 32 nt, Human
cuuuguagguagacggagccacacuacaggca

SEQ ID NO: 413782 - RNA, 32 nt, Human
cuuuguaggucugcccaggguugacuccacca

SEQ ID NO: 413783 - RNA, 32 nt, Human
cuuuguagguucugggcuggguugugggggac

SEQ ID NO: 413784 - RNA, 32 nt, Human
cuuuguagugcuuggcuacucugugauggcag

SEQ ID NO: 413785 - RNA, 32 nt, Human
cuuuguauaaacacauucuuucugguacauuc

SEQ ID NO: 413786 - RNA, 32 nt, Human
cuuuguauguucucugagccuuaguugauuuu

SEQ ID NO: 413787 - RNA, 32 nt, Human
cuuuguauucuauuaagaaauagcuccuaagg

SEQ ID NO: 413788 - RNA, 32 nt, Human
cuuuguauugcaccucagauaaugugcuuuuu

SEQ ID NO: 413789 - RNA, 32 nt, Human
cuuuguauuuaacucuccaugugucauuccua

SEQ ID NO: 413790 - RNA, 32 nt, Human
cuuuguauuuaugacuaaaucuucccauucug

SEQ ID NO: 413791 - RNA, 32 nt, Human
cuuuguauuucucuguuaagcaaagaaauauu

SEQ ID NO: 413792 - RNA, 32 nt, Human
cuuuguauuugcuauuccucaucccagaauca

SEQ ID NO: 413793 - RNA, 32 nt, Human
cuuuguauuuuugcuccuaauuuuggacucag

SEQ ID NO: 413794 - RNA, 22 nt, Human
cuuugucaaaggcaagucucca

SEQ ID NO: 413795 - RNA, 32 nt, Human
cuuugucaaaggcaagucuccacccauaaccg

SEQ ID NO: 413796 - RNA, 32 nt, Human
cuuugucaacccacaagaagagagaugugcag

SEQ ID NO: 413797 - RNA, 31 nt, Human
cuuugucaagugucugcuccacgucaggcac

SEQ ID NO: 413798 - RNA, 32 nt, Human
cuuugucaccaggcuggagugcaguggugcaa

SEQ ID NO: 413799 - RNA, 32 nt, Human
cuuugucacccacgcuggaaugcaguggcggg

SEQ ID NO: 413800 - RNA, 32 nt, Human
cuuugucacccaggccggagugcaguggcaug

SEQ ID NO: 413801 - RNA, 32 nt, Human
cuuugucacccaggcuagagugcaguggcaug

SEQ ID NO: 413802 - RNA, 32 nt, Human
cuuugucacccaggcuagagugcaguggugca

SEQ ID NO: 413803 - RNA, 32 nt, Human
cuuugucacccaggcuggaaugcaguggcaca

SEQ ID NO: 413804 - RNA, 32 nt, Human
cuuugucacccaggcuggaguacaguggcgug

SEQ ID NO: 413805 - RNA, 32 nt, Human
cuuugucacccaggcuggaguauaguggcaca

SEQ ID NO: 413806 - RNA, 32 nt, Human
cuuugucacccaggcuggagugcaauggcaca

SEQ ID NO: 413807 - RNA, 32 nt, Human
cuuugucacccaggcuggagugcaauggcgug

SEQ ID NO: 413808 - RNA, 32 nt, Human
cuuugucacccaggcuggagugcaguggcacg

SEQ ID NO: 413809 - RNA, 32 nt, Human
cuuugucacccaggcuggagugcaguggugug

SEQ ID NO: 413810 - RNA, 32 nt, Human
cuuugucacccaggcuggagugcagugucgug

SEQ ID NO: 413811 - RNA, 32 nt, Human
cuuugucacccaggcuggagugcugugguguu

SEQ ID NO: 413812 - RNA, 32 nt, Human
cuuugucacccaggggcuugcuuugucacgca

SEQ ID NO: 413813 - RNA, 32 nt, Human
cuuugucacccaggguggugugcaguggagcu

SEQ ID NO: 413814 - RNA, 32 nt, Human
cuuugucacccaugcuggaguacaauggcaca

SEQ ID NO: 413815 - RNA, 32 nt, Human
cuuugucaccuaagcuggagugcagugcgcga

SEQ ID NO: 413816 - RNA, 32 nt, Human
cuuugucaccuaggcuggcauguaguggcaug

SEQ ID NO: 413817 - RNA, 32 nt, Human
cuuugucacgcaggcuagagugcaguggcgca

SEQ ID NO: 413818 - RNA, 32 nt, Human
cuuugucacuuugauucccacucugagaaguu

SEQ ID NO: 413819 - RNA, 32 nt, Human
cuuugucagacuccugccggcagcugcccugg

SEQ ID NO: 413820 - RNA, 32 nt, Human
cuuugucagccaggcuggagugcaaugugcaa

SEQ ID NO: 413821 - RNA, 32 nt, Human
cuuugucagccaggcuggagugcagugacacg

SEQ ID NO: 413822 - RNA, 32 nt, Human
cuuugucauuccaccuccucuggucaggcgag

SEQ ID NO: 413823 - RNA, 32 nt, Human
cuuuguccacuggguaaauuauauucauuaug

SEQ ID NO: 413824 - RNA, 32 nt, Human
cuuuguccaguggaauuggugauucugaauug

SEQ ID NO: 413825 - RNA, 32 nt, Human
cuuugucccaucaggacccuccugccuccucu

SEQ ID NO: 413826 - RNA, 32 nt, Human
cuuugucccaugcagaggugcagagauucauu

SEQ ID NO: 413827 - RNA, 32 nt, Human
cuuugucccccaggcuggagugcagugguaca

SEQ ID NO: 413828 - RNA, 32 nt, Human
cuuugucccccaggcuggagugcgauggcagg

SEQ ID NO: 413829 - RNA, 32 nt, Human
cuuugucccuacucucuguucuuacacccccu

SEQ ID NO: 413830 - RNA, 32 nt, Human
cuuugucccugcacucagcccuguggccccuu

SEQ ID NO: 413831 - RNA, 31 nt, Human
cuuuguccucaaagaaauuguugaaaaagaa

SEQ ID NO: 413832 - RNA, 32 nt, Human
cuuuguccucaguaucucuucgggguacaguu

SEQ ID NO: 413833 - RNA, 32 nt, Human
cuuuguccuccaggaggugggggaauguggua

SEQ ID NO: 413834 - RNA, 32 nt, Human
cuuuguccuccuccucuccaccccgccucccc

SEQ ID NO: 413835 - RNA, 32 nt, Human
cuuuguccugguuuccccuugagacuggggau

SEQ ID NO: 413836 - RNA, 32 nt, Human
cuuuguccuugcugcugguggggaagggaagc

SEQ ID NO: 413837 - RNA, 32 nt, Human
cuuugucgcccaggccggagugcaguggugcg

SEQ ID NO: 413838 - RNA, 32 nt, Human
cuuugucgcccaggcuggagcgcagucccgca

SEQ ID NO: 413839 - RNA, 32 nt, Human
cuuugucgcccaggcuggaguacaguggugcg

SEQ ID NO: 413840 - RNA, 32 nt, Human
cuuugucgcccaggcuggagugcaaugcacga

SEQ ID NO: 413841 - RNA, 32 nt, Human
cuuugucgcccaggcuggagugcaauggcgug

SEQ ID NO: 413842 - RNA, 32 nt, Human
cuuugucgcccaggcuggagugcaguggcaca

SEQ ID NO: 413843 - RNA, 32 nt, Human
cuuugucgcccaggcuggagugcaguggcacg

SEQ ID NO: 413844 - RNA, 32 nt, Human
cuuugucgcccaggcuggagugcaguggcagu

SEQ ID NO: 413845 - RNA, 32 nt, Human
cuuugucgcccaggcuggagugcaguggcgug

SEQ ID NO: 413846 - RNA, 32 nt, Human
cuuugucgcccaggcuggagugcaguggugug

SEQ ID NO: 413847 - RNA, 32 nt, Human
cuuugucgcccgggcaggagugcaguggcuca

SEQ ID NO: 413848 - RNA, 32 nt, Human
cuuugucgcccuggcuggagugcaguugcgca

SEQ ID NO: 413849 - RNA, 32 nt, Human
cuuugucgccgccuccccugugugccagcccu

SEQ ID NO: 413850 - RNA, 32 nt, Human
cuuugucuacaccauuaugugcgcugauaagc

SEQ ID NO: 413851 - RNA, 32 nt, Human
cuuugucuaggguucucagaugcuaucugccg

SEQ ID NO: 413852 - RNA, 32 nt, Human
cuuugucucaaaaagaaagaaagaaagaaaga

SEQ ID NO: 413853 - RNA, 32 nt, Human
cuuugucucacagaagacuaggagaaagaucu

SEQ ID NO: 413854 - RNA, 32 nt, Human
cuuugucucacaugauuccagugcaguagugc

SEQ ID NO: 413855 - RNA, 32 nt, Human
cuuugucucaggagcaaaccagccuuggcuuu

SEQ ID NO: 413856 - RNA, 32 nt, Human
cuuugucuccaccuccagcagacucgccuccc

SEQ ID NO: 413857 - RNA, 32 nt, Human
cuuugucucccaauaucacagaaaaauacaug

SEQ ID NO: 413858 - RNA, 32 nt, Human
cuuugucucccaggaaggugugaccucuccuu

SEQ ID NO: 413859 - RNA, 32 nt, Human
cuuugucuccucuuccccaucuaugucccuuu

SEQ ID NO: 413860 - RNA, 32 nt, Human
cuuugucucucccacuucaucucacuguaucc

SEQ ID NO: 413861 - RNA, 32 nt, Human
cuuugucucuucguccagagccuuauguaaga

SEQ ID NO: 413862 - RNA, 32 nt, Human
cuuugucugccacagacacagacagagggagu

SEQ ID NO: 413863 - RNA, 32 nt, Human
cuuugucugcucccaauucaccucguuacucu

SEQ ID NO: 413864 - RNA, 32 nt, Human
cuuugucugcuccucucugcaaugagcuuucu

SEQ ID NO: 413865 - RNA, 32 nt, Human
cuuugucugcuggccugcugggugcuggucua

SEQ ID NO: 413866 - RNA, 32 nt, Human
cuuugucuggcagacagccaacuggucaggua

SEQ ID NO: 413867 - RNA, 32 nt, Human
cuuugucuguccagaucuuuaggauuuuuaga

SEQ ID NO: 413868 - RNA, 32 nt, Human
cuuugucuguggaaggagacagaaggaaauug

SEQ ID NO: 413869 - RNA, 32 nt, Human
cuuugucuucaagaagcucacagucuauugga

SEQ ID NO: 413870 - RNA, 32 nt, Human
cuuugucuucagccucuccaggcaccaucucc

SEQ ID NO: 413871 - RNA, 32 nt, Human
cuuugucuucaucagaaaguucacaugggaga

SEQ ID NO: 413872 - RNA, 26 nt, Human
cuuugucuuucugcagaaaauucuac

SEQ ID NO: 413873 - RNA, 32 nt, Human
cuuugucuuugcucagaaccagcuccacccaa

SEQ ID NO: 413874 - RNA, 31 nt, Human
cuuugucuuugcuucuggccuguguaagcag

SEQ ID NO: 413875 - RNA, 22 nt, Human
cuuugugacaucucacauuuuu

SEQ ID NO: 413876 - RNA, 32 nt, Human
cuuugugacuaucagaaacaccugccaggccu

SEQ ID NO: 413877 - RNA, 32 nt, Human
cuuugugacugcucuacacugcaugucugaca

SEQ ID NO: 413878 - RNA, 32 nt, Human
cuuugugagaaaugccauuacccccagauugc

SEQ ID NO: 413879 - RNA, 32 nt, Human
cuuugugagagccagcccuguaugccaacacc

SEQ ID NO: 413880 - RNA, 19 nt, Human
cuuugugagccuccuucag

SEQ ID NO: 413881 - RNA, 32 nt, Human
cuuugugagcugugagugccuccuguggucuc

SEQ ID NO: 413882 - RNA, 32 nt, Human
cuuugugagcuucaguuuccuguucuauaaca

SEQ ID NO: 413883 - RNA, 32 nt, Human
cuuugugaggaacugaguguguccacguuggg

SEQ ID NO: 413884 - RNA, 32 nt, Human
cuuugugaggcugaggcgaguggaucacuuga

SEQ ID NO: 413885 - RNA, 32 nt, Human
cuuugugaggcugaggugggcagaucacgagg

SEQ ID NO: 413886 - RNA, 32 nt, Human
cuuugugaggggagaugaagcccacagagcug

SEQ ID NO: 413887 - RNA, 32 nt, Human
cuuugugaugcugaaggauacugccggcagca

SEQ ID NO: 413888 - RNA, 32 nt, Human
cuuugugauucucccugcucccuguggacaaa

SEQ ID NO: 413889 - RNA, 32 nt, Human
cuuugugauuuucuacacagaagauuauguca

SEQ ID NO: 413890 - RNA, 32 nt, Human
cuuugugcaauuucuggucaguggcccauauc

SEQ ID NO: 413891 - RNA, 32 nt, Human
cuuugugcacauuuauuuccucccucuacccc

SEQ ID NO: 413892 - RNA, 32 nt, Human
cuuugugcagaguguauaucucugccugggca

SEQ ID NO: 413893 - RNA, 32 nt, Human
cuuugugccagucucuaaguuggcaacuuugg

SEQ ID NO: 413894 - RNA, 32 nt, Human
cuuugugcccuagacuggagugcaauggcgcc

SEQ ID NO: 413895 - RNA, 32 nt, Human
cuuugugccgguagaauaaggaaggaagggag

SEQ ID NO: 413896 - RNA, 32 nt, Human
cuuugugccucuggacuggcaagauguccagg

SEQ ID NO: 413897 - RNA, 32 nt, Human
cuuugugccuggacccagagagugugggacuc

SEQ ID NO: 413898 - RNA, 32 nt, Human
cuuugugccuguagcucauuuuauuaugaccu

SEQ ID NO: 413899 - RNA, 32 nt, Human
cuuugugcuaaugacacuuacauauuucuugc

SEQ ID NO: 413900 - RNA, 32 nt, Human
cuuugugcuccauuacucaagacacugaagac

SEQ ID NO: 413901 - RNA, 32 nt, Human
cuuugugcuguggcagacuggggcuuuggaag

SEQ ID NO: 413902 - RNA, 32 nt, Human
cuuugugcugugugagcauacaagaaaacugc

SEQ ID NO: 413903 - RNA, 32 nt, Human
cuuugugcuuuauuauccuggugacaguuacc

SEQ ID NO: 413904 - RNA, 32 nt, Human
cuuugugcuuuggcguuccaccccuguuguua

SEQ ID NO: 413905 - RNA, 32 nt, Human
cuuuguggagaaaugugucaccucccccaacc

SEQ ID NO: 413906 - RNA, 32 nt, Human
cuuuguggcaugugccuguaaucccagcuauu

SEQ ID NO: 413907 - RNA, 32 nt, Human
cuuuguggcccagggccuggaccagaccauug

SEQ ID NO: 413908 - RNA, 32 nt, Human
cuuuguggcgacauucaggaacagaccauuca

SEQ ID NO: 413909 - RNA, 32 nt, Human
cuuugugggaaagacagaggcgggaggauuga

SEQ ID NO: 413910 - RNA, 32 nt, Human
cuuugugggaaucuguuccucaccauaucauc

SEQ ID NO: 413911 - RNA, 32 nt, Human
cuuugugggacccuccaggugcacagugacag

SEQ ID NO: 413912 - RNA, 32 nt, Human
cuuugugggagggagaggauuguucugagaac

SEQ ID NO: 413913 - RNA, 32 nt, Human
cuuugugggccuacagccuggaaagugccauc

SEQ ID NO: 413914 - RNA, 32 nt, Human
cuuuguggggcugagggagaaucacuugggcu

SEQ ID NO: 413915 - RNA, 32 nt, Human
cuuuguggggucaggacacagagugggaggga

SEQ ID NO: 413916 - RNA, 23 nt, Human
cuuugugggucgcacacauguuu

SEQ ID NO: 413917 - RNA, 32 nt, Human
cuuugugguuucuucugauuuuugccauuggg

SEQ ID NO: 413918 - RNA, 32 nt, Human
cuuugugguuuuaaagacaacugugaaauaaa

SEQ ID NO: 413919 - RNA, 24 nt, Human
cuuugugguuuuuccaaagauguu

SEQ ID NO: 413920 - RNA, 23 nt, Human
cuuugugguuuuuggaauaguuu

SEQ ID NO: 413921 - RNA, 32 nt, Human
cuuuguguaaagugccuacuggaaaugcacug

SEQ ID NO: 413922 - RNA, 32 nt, Human
cuuugugucaucgugagcaugugccccuuccc

SEQ ID NO: 413923 - RNA, 32 nt, Human
cuuugugucuccagcaucuaguacagugccug

SEQ ID NO: 413924 - RNA, 32 nt, Human
cuuugugucuguguccuuguuuaauaucuuaa

SEQ ID NO: 413925 - RNA, 32 nt, Human
cuuugugucuucucucaauuacauagcaauuu

SEQ ID NO: 413926 - RNA, 32 nt, Human
cuuugugugacgaugacccaggcuccaacaag

SEQ ID NO: 413927 - RNA, 32 nt, Human
cuuuguguguuuugagguaggagcaugaucaa

SEQ ID NO: 413928 - RNA, 32 nt, Human
cuuuguguuagcaagugugugguuucaucuau

SEQ ID NO: 413929 - RNA, 32 nt, Human
cuuuguguuuuugugcccuccuggggaccaga

SEQ ID NO: 413930 - RNA, 32 nt, Human
cuuuguuaagcagagucagcagugagguccuc

SEQ ID NO: 413931 - RNA, 32 nt, Human
cuuuguuacagcagcaauggaaaaugaauacu

SEQ ID NO: 413932 - RNA, 32 nt, Human
cuuuguuaccaguucuuccuccuuccucuuuu

SEQ ID NO: 413933 - RNA, 32 nt, Human
cuuuguuacccaggcuggaguacagugguguc

SEQ ID NO: 413934 - RNA, 32 nt, Human
cuuuguuacccaggcuggagugcaguggcaca

SEQ ID NO: 413935 - RNA, 32 nt, Human
cuuuguucagcaauggugugguuggagaguug

SEQ ID NO: 413936 - RNA, 32 nt, Human
cuuuguucaucauuggcccucauuccaagcac

SEQ ID NO: 413937 - RNA, 32 nt, Human
cuuuguuccagccugguuuccugggcugggcu

SEQ ID NO: 413938 - RNA, 32 nt, Human
cuuuguuccugcagggugcagcuccugucugc

SEQ ID NO: 413939 - RNA, 32 nt, Human
cuuuguucuauaucucuucuaagacaguuguu

SEQ ID NO: 413940 - RNA, 32 nt, Human
cuuuguucucaaggaauuugcauucuagaaag

SEQ ID NO: 413941 - RNA, 32 nt, Human
cuuuguucucaccucuaccugucauuccagca

SEQ ID NO: 413942 - RNA, 32 nt, Human
cuuuguucucaggccuuccagguaguccccuu

SEQ ID NO: 413943 - RNA, 32 nt, Human
cuuuguucucugcuuucuuuuucuuggaaaga

SEQ ID NO: 413944 - RNA, 32 nt, Human
cuuuguucuguaacggugccuuuucuuagggu

SEQ ID NO: 413945 - RNA, 32 nt, Human
cuuuguucugucugaggccaggaaguuugacc

SEQ ID NO: 413946 - RNA, 32 nt, Human
cuuuguucuucacuaggccugcauaauacagu

SEQ ID NO: 413947 - RNA, 32 nt, Human
cuuuguucuuccggcccugcugucugccuccc

SEQ ID NO: 413948 - RNA, 21 nt, Human
cuuuguugagaaccacuacua

SEQ ID NO: 413949 - RNA, 32 nt, Human
cuuuguugcagauagucuugccgcaucuuggc

SEQ ID NO: 413950 - RNA, 32 nt, Human
cuuuguugcagcacagucccuggcagagccag

SEQ ID NO: 413951 - RNA, 32 nt, Human
cuuuguugccaggcuggagugcaguggcgcga

SEQ ID NO: 413952 - RNA, 32 nt, Human
cuuuguugcccagacuggagggcaguggcgcg

SEQ ID NO: 413953 - RNA, 32 nt, Human
cuuuguugcccagacuggagugcaguggcaua

SEQ ID NO: 413954 - RNA, 32 nt, Human
cuuuguugcccagaggaugugcaguugucauc

SEQ ID NO: 413955 - RNA, 32 nt, Human
cuuuguugcccaggcuggagcgcaguggggug

SEQ ID NO: 413956 - RNA, 32 nt, Human
cuuuguugcccaggcuggagugcaauggcgca

SEQ ID NO: 413957 - RNA, 32 nt, Human
cuuuguugcccaggcuggagugcaguagcacg

SEQ ID NO: 413958 - RNA, 32 nt, Human
cuuuguugcccaggcuggagugcaguggcacg

SEQ ID NO: 413959 - RNA, 32 nt, Human
cuuuguugcccaggcuggagugcaguggucug

SEQ ID NO: 413960 - RNA, 32 nt, Human
cuuuguugcccaggcuggagugccuuggcgcg

SEQ ID NO: 413961 - RNA, 32 nt, Human
cuuuguugcccaggcuggagugcgguggcgug

SEQ ID NO: 413962 - RNA, 32 nt, Human
cuuuguugcccaggcuggagugcgguggugca

SEQ ID NO: 413963 - RNA, 32 nt, Human
cuuuguugcccaggcuggaguggaguggcgug

SEQ ID NO: 413964 - RNA, 32 nt, Human
cuuuguugcccaggcuggagugugguggggca

SEQ ID NO: 413965 - RNA, 32 nt, Human
cuuuguugcccaggcuggggugcaguggcacg

SEQ ID NO: 413966 - RNA, 23 nt, Human
cuuuguugcccaggcuggucuca

SEQ ID NO: 413967 - RNA, 32 nt, Human
cuuuguugcccaggcugguugaacucccguga

SEQ ID NO: 413968 - RNA, 32 nt, Human
cuuuguugccccuuuucugucaccaaccaacc

SEQ ID NO: 413969 - RNA, 32 nt, Human
cuuuguugcucaggcuggaguacaguggcaua

SEQ ID NO: 413970 - RNA, 32 nt, Human
cuuuguugcuugaagaaaaacaugucuuuuca

SEQ ID NO: 413971 - RNA, 32 nt, Human
cuuuguuggccucuuucugggucucugccugg

SEQ ID NO: 413972 - RNA, 32 nt, Human
cuuuguugggcgcgcacccccucccuuaggug

SEQ ID NO: 413973 - RNA, 32 nt, Human
cuuuguugucauucucaucgcagugcuuuggu

SEQ ID NO: 413974 - RNA, 32 nt, Human
cuuuguugucuaggcuggucuugaacugggcu

SEQ ID NO: 413975 - RNA, 32 nt, Human
cuuuguuuacccccacugcgcuccgacuguga

SEQ ID NO: 413976 - RNA, 32 nt, Human
cuuuguuuccauuuucuuuggcuuugugcaau

SEQ ID NO: 413977 - RNA, 32 nt, Human
cuuuguuucccaggcuggagugcaguggcacg

SEQ ID NO: 413978 - RNA, 20 nt, Human
cuuuguuuccgcggcuccug

SEQ ID NO: 413979 - RNA, 32 nt, Human
cuuuguuuccuccuugucacugaagauugggu

SEQ ID NO: 413980 - RNA, 32 nt, Human
cuuuguuucguuuccucugcugucuucuccag

SEQ ID NO: 413981 - RNA, 22 nt, Human
cuuuguuucuugguccuuggca

SEQ ID NO: 413982 - RNA, 32 nt, Human
cuuuguuugcaucuuaauuacaugucauaacg

SEQ ID NO: 413983 - RNA, 32 nt, Human
cuuuguuugccucuccgucuguuuucccucag

SEQ ID NO: 413984 - RNA, 32 nt, Human
cuuuguuugcuggaggauaagacacugaaaau

SEQ ID NO: 413985 - RNA, 32 nt, Human
cuuuguuugucugaacagguauuuuuauacau

SEQ ID NO: 413986 - RNA, 32 nt, Human
cuuuguuuucauguguaagaaaaggcccauua

SEQ ID NO: 413987 - RNA, 32 nt, Human
cuuuguuuucuaccacaauccuccuccuccuc

SEQ ID NO: 413988 - RNA, 22 nt, Human
cuuuguuuucuuacauauguuu

SEQ ID NO: 413989 - RNA, 32 nt, Human
cuuuguuuugaauauuuguaaguuuuuaagaa

SEQ ID NO: 413990 - RNA, 32 nt, Human
cuuuguuuugagacagagcgucucucucuguu

SEQ ID NO: 413991 - RNA, 32 nt, Human
cuuuguuuugagacggagucucgcucugucau

SEQ ID NO: 413992 - RNA, 32 nt, Human
cuuuguuuugagaugcaguuuaaacucccucu

SEQ ID NO: 413993 - RNA, 32 nt, Human
cuuuguuuugagauggagucuuguucugucac

SEQ ID NO: 413994 - RNA, 32 nt, Human
cuuuguuuugaggcagggucucgcucugucac

SEQ ID NO: 413995 - RNA, 32 nt, Human
cuuuguuuuucacauauaaauagaugauuuca

SEQ ID NO: 413996 - RNA, 22 nt, Human
cuuuguuuuuuaccuucugucu

SEQ ID NO: 413997 - RNA, 32 nt, Human
cuuuuaaaagucacuaaugacugccauucacc

SEQ ID NO: 413998 - RNA, 32 nt, Human
cuuuuaaacagccagcucuuacagcaccuaau

SEQ ID NO: 413999 - RNA, 32 nt, Human
cuuuuaaacccagcuacugaggaggcugaggc

SEQ ID NO: 414000 - RNA, 32 nt, Human
cuuuuaaacuugaucaaauaaaggacaguggg

SEQ ID NO: 414001 - RNA, 32 nt, Human
cuuuuaaagcagggaguggggaaaaguauuuu

SEQ ID NO: 414002 - RNA, 32 nt, Human
cuuuuaaaggaaauuuuggaggaaaauauagc

SEQ ID NO: 414003 - RNA, 32 nt, Human
cuuuuaaauagaagagagagggcccggcacgg

SEQ ID NO: 414004 - RNA, 32 nt, Human
cuuuuaaauauugucuuagccucggcaaacca

SEQ ID NO: 414005 - RNA, 32 nt, Human
cuuuuaaauauuuaaacuagguggugaauggu

SEQ ID NO: 414006 - RNA, 32 nt, Human
cuuuuaaaugggugaaaaaugguaauauaaca

SEQ ID NO: 414007 - RNA, 32 nt, Human
cuuuuaaaugugcugcucuucauuucaagaug

SEQ ID NO: 414008 - RNA, 32 nt, Human
cuuuuaaauguucucucugggagcuucauaua

SEQ ID NO: 414009 - RNA, 32 nt, Human
cuuuuaaauuaugucacuaaacuuuguaugag

SEQ ID NO: 414010 - RNA, 32 nt, Human
cuuuuaaccaaccaccaccaccaccaaaacca

SEQ ID NO: 414011 - RNA, 32 nt, Human
cuuuuaacuauguaauaauguacagaggaagc

SEQ ID NO: 414012 - RNA, 32 nt, Human
cuuuuaacugaaaaugagagacagaagccaca

SEQ ID NO: 414013 - RNA, 32 nt, Human
cuuuuaacuggaaauuuuuaugugaguuuucc

SEQ ID NO: 414014 - RNA, 32 nt, Human
cuuuuaacuguuggacaaaaccauaacuuugu

SEQ ID NO: 414015 - RNA, 18 nt, Human
cuuuuaagaauggcccca

SEQ ID NO: 414016 - RNA, 32 nt, Human
cuuuuaagcuaaaaucacaugcaagaauugac

SEQ ID NO: 414017 - RNA, 32 nt, Human
cuuuuaagcuacaguuccuucucuccauccuu

SEQ ID NO: 414018 - RNA, 32 nt, Human
cuuuuaagcugaugcagaaaauuccaaaauaa

SEQ ID NO: 414019 - RNA, 32 nt, Human
cuuuuaaggcagugugucuuucugagcacugu

SEQ ID NO: 414020 - RNA, 32 nt, Human
cuuuuaagguuccugagggucugccugagagg

SEQ ID NO: 414021 - RNA, 32 nt, Human
cuuuuaauaacaaaagcaugcaguucucugug

SEQ ID NO: 414022 - RNA, 32 nt, Human
cuuuuaaugauacugucuaagaauaaugacgu

SEQ ID NO: 414023 - RNA, 32 nt, Human
cuuuuaauucuuuggagauggcucuucugugu

SEQ ID NO: 414024 - RNA, 32 nt, Human
cuuuuaauugagguauuacuguguaaccauca

SEQ ID NO: 414025 - RNA, 32 nt, Human
cuuuuaauuuuuaauuuugaaaaugaggcccu

SEQ ID NO: 414026 - RNA, 32 nt, Human
cuuuuacagaggagagaauugaggcuucgaga

SEQ ID NO: 414027 - RNA, 32 nt, Human
cuuuuacagugggguugaugauacauuuggaa

SEQ ID NO: 414028 - RNA, 31 nt, Human
cuuuuacaguuucagaccucagcagcuguaa

SEQ ID NO: 414029 - RNA, 32 nt, Human
cuuuuacaguuucagaccucagcagcuguaag

SEQ ID NO: 414030 - RNA, 17 nt, Human
cuuuuaccaacagcauu

SEQ ID NO: 414031 - RNA, 32 nt, Human
cuuuuaccauugcugguugagcucaggcacug

SEQ ID NO: 414032 - RNA, 32 nt, Human
cuuuuaccccuggcagagccaguugcagugca

SEQ ID NO: 414033 - RNA, 32 nt, Human
cuuuuaccgcccaggcuggagugcagugccau

SEQ ID NO: 414034 - RNA, 23 nt, Human
cuuuuaccucguugcacugcuga

SEQ ID NO: 414035 - RNA, 32 nt, Human
cuuuuaccugcagcuuuuccugcuugauauag

SEQ ID NO: 414036 - RNA, 32 nt, Human
cuuuuaccugcucucccucagugaguccucaa

SEQ ID NO: 414037 - RNA, 32 nt, Human
cuuuuaccuguacuguauucuuggucaucuca

SEQ ID NO: 414038 - RNA, 32 nt, Human
cuuuuaccuguuccucuucuccuggccuuucc

SEQ ID NO: 414039 - RNA, 32 nt, Human
cuuuuaccuucugcucuucccuuuuuccugcc

SEQ ID NO: 414040 - RNA, 32 nt, Human
cuuuuaccuuucuccaccauccagagccacaa

SEQ ID NO: 414041 - RNA, 32 nt, Human
cuuuuacgagguaucagcacuuuucuuucauu

SEQ ID NO: 414042 - RNA, 32 nt, Human
cuuuuacucacugcccacuucucaucucuguc

SEQ ID NO: 414043 - RNA, 32 nt, Human
cuuuuacucuuugguuuuaucauuccauuuug

SEQ ID NO: 414044 - RNA, 31 nt, Human
cuuuuacugccuccugggccuucgucuuguu

SEQ ID NO: 414045 - RNA, 32 nt, Human
cuuuuacugccuccugggccuucgucuuguuc

SEQ ID NO: 414046 - RNA, 32 nt, Human
cuuuuacugugugguucccugcuuuuaacaga

SEQ ID NO: 414047 - RNA, 32 nt, Human
cuuuuacuuuuugcauuguccagacuucuuua

SEQ ID NO: 414048 - RNA, 32 nt, Human
cuuuuagaaauccugaagaauucagucuucgu

SEQ ID NO: 414049 - RNA, 32 nt, Human
cuuuuagacucugcuaaaacagugcucuggcu

SEQ ID NO: 414050 - RNA, 32 nt, Human
cuuuuagagacagggucucacuguguugccca

SEQ ID NO: 414051 - RNA, 32 nt, Human
cuuuuagagcaucuauaucugcaaccuguaaa

SEQ ID NO: 414052 - RNA, 32 nt, Human
cuuuuagagccagagggaauuauuuauuaagc

SEQ ID NO: 414053 - RNA, 32 nt, Human
cuuuuagagcccagaaauggcagucaccuuuc

SEQ ID NO: 414054 - RNA, 32 nt, Human
cuuuuagaggcagaggagcggaaggcaguggg

SEQ ID NO: 414055 - RNA, 32 nt, Human
cuuuuagaguccgaccucuggaaauguccaca

SEQ ID NO: 414056 - RNA, 32 nt, Human
cuuuuagcauuugauaugcauuucucagauuc

SEQ ID NO: 414057 - RNA, 32 nt, Human
cuuuuagccacaucugcaaagcagggaugguc

SEQ ID NO: 414058 - RNA, 32 nt, Human
cuuuuagccagccugcggacccagcccucugu

SEQ ID NO: 414059 - RNA, 17 nt, Human
cuuuuagccuucuuuaa

SEQ ID NO: 414060 - RNA, 32 nt, Human
cuuuuagcggucuccccuuagacuggaacccg

SEQ ID NO: 414061 - RNA, 32 nt, Human
cuuuuagcuagauguggcaugcaucugugagc

SEQ ID NO: 414062 - RNA, 32 nt, Human
cuuuuagcucuauacucucuggcuccccucau

SEQ ID NO: 414063 - RNA, 32 nt, Human
cuuuuagcugggguugggggacgggaagagcc

SEQ ID NO: 414064 - RNA, 32 nt, Human
cuuuuagcuuggaaacagucuuccacuaaccu

SEQ ID NO: 414065 - RNA, 32 nt, Human
cuuuuaggaaaaucacuuugucuaacucagaa

SEQ ID NO: 414066 - RNA, 32 nt, Human
cuuuuaggcaugagcuaaucucugauuaccuc

SEQ ID NO: 414067 - RNA, 32 nt, Human
cuuuuaggcucaggacggaaggucaguugcca

SEQ ID NO: 414068 - RNA, 21 nt, Human
cuuuuaggcugggugcagugg

SEQ ID NO: 414069 - RNA, 32 nt, Human
cuuuuagguaagaaauaggcaugaugauaagc

SEQ ID NO: 414070 - RNA, 32 nt, Human
cuuuuagguagaagaggcaauuuuacccuuau

SEQ ID NO: 414071 - RNA, 32 nt, Human
cuuuuaggucacagaaaccucugccugccagg

SEQ ID NO: 414072 - RNA, 32 nt, Human
cuuuuagguggaaggccagaugacagagggcg

SEQ ID NO: 414073 - RNA, 32 nt, Human
cuuuuagguuuucccaggacaggacagucccc

SEQ ID NO: 414074 - RNA, 32 nt, Human
cuuuuaguaacuauagucacuacuuuuuccau

SEQ ID NO: 414075 - RNA, 32 nt, Human
cuuuuaguacaauggaguggcugagccuuuga

SEQ ID NO: 414076 - RNA, 32 nt, Human
cuuuuagugaguggccaggaaaugcuaaaugu

SEQ ID NO: 414077 - RNA, 32 nt, Human
cuuuuaguggagaagagaggaagucagagggu

SEQ ID NO: 414078 - RNA, 32 nt, Human
cuuuuaguuaugaacuacuuccuuccagugca

SEQ ID NO: 414079 - RNA, 32 nt, Human
cuuuuaguuucucuucuuucuaaagaaggcuc

SEQ ID NO: 414080 - RNA, 32 nt, Human
cuuuuauaauaaguugaaaauuucauauaauu

SEQ ID NO: 414081 - RNA, 32 nt, Human
cuuuuauacauuuuagaaucaguguguuacua

SEQ ID NO: 414082 - RNA, 32 nt, Human
cuuuuauacugaagaugccgcacacaaacaau

SEQ ID NO: 414083 - RNA, 32 nt, Human
cuuuuauagacuugauuucaaauucuuaaguu

SEQ ID NO: 414084 - RNA, 32 nt, Human
cuuuuaucaacaugccugucuucaagauccca

SEQ ID NO: 414085 - RNA, 32 nt, Human
cuuuuaucaucuccuccacuguuuccuuuucu

SEQ ID NO: 414086 - RNA, 32 nt, Human
cuuuuaucauuuuaaaugguaggaauuuaagg

SEQ ID NO: 414087 - RNA, 32 nt, Human
cuuuuauccacaaguuccccuggcugaggauu

SEQ ID NO: 414088 - RNA, 32 nt, Human
cuuuuauccuugucccucuuuagucuguguuu

SEQ ID NO: 414089 - RNA, 32 nt, Human
cuuuuauccuuuggagccugggagacucccca

SEQ ID NO: 414090 - RNA, 32 nt, Human
cuuuuaucuccaaauacauaguugucucaaac

SEQ ID NO: 414091 - RNA, 32 nt, Human
cuuuuaucucuuccuuuucaaugaaggccuau

SEQ ID NO: 414092 - RNA, 32 nt, Human
cuuuuaucuuaaccugaacaugugcuuccuau

SEQ ID NO: 414093 - RNA, 32 nt, Human
cuuuuaugagcuguaacacucacccugaaggu

SEQ ID NO: 414094 - RNA, 32 nt, Human
cuuuuaugcugcuucgcuuuucucuaaacaga

SEQ ID NO: 414095 - RNA, 32 nt, Human
cuuuuauggcagugguggagugaggcagggau

SEQ ID NO: 414096 - RNA, 32 nt, Human
cuuuuauggccaucugccaaaucagugcuaac

SEQ ID NO: 414097 - RNA, 32 nt, Human
cuuuuauuaaaaccagucucagauaucauacu

SEQ ID NO: 414098 - RNA, 32 nt, Human
cuuuuauuaccacaguugcugccuccuccaga

SEQ ID NO: 414099 - RNA, 32 nt, Human
cuuuuauuagauucucaaagguucagaauggg

SEQ ID NO: 414100 - RNA, 32 nt, Human
cuuuuauuagccagugaaacacuugcuugcca

SEQ ID NO: 414101 - RNA, 32 nt, Human
cuuuuauuaugcaaauuagcuguggacuucug

SEQ ID NO: 414102 - RNA, 32 nt, Human
cuuuuauucccaagccuccuuggccccaguau

SEQ ID NO: 414103 - RNA, 32 nt, Human
cuuuuauugauugguuuauaugccauucuugu

SEQ ID NO: 414104 - RNA, 32 nt, Human
cuuuuauugcaggaacuguucaucuuaguucc

SEQ ID NO: 414105 - RNA, 22 nt, Human
cuuuuauugcauaugcuaaaca

SEQ ID NO: 414106 - RNA, 32 nt, Human
cuuuuauugcauuggaaagacuggcaaagucu

SEQ ID NO: 414107 - RNA, 32 nt, Human
cuuuuauugcccaggcuggaguguaguggcgc

SEQ ID NO: 414108 - RNA, 32 nt, Human
cuuuuauuucuuucaguuguguguucucauuu

SEQ ID NO: 414109 - RNA, 32 nt, Human
cuuuuauuucuuuccucuguuccucuucccuc

SEQ ID NO: 414110 - RNA, 32 nt, Human
cuuuuauuugugaauuaaagaugcaucgaugg

SEQ ID NO: 414111 - RNA, 32 nt, Human
cuuuuauuuucuuccucuugcuuuuguuaucu

SEQ ID NO: 414112 - RNA, 22 nt, Human
cuuuucaaaagguauccacacu

SEQ ID NO: 414113 - RNA, 32 nt, Human
cuuuucaaccugggugacagaaccagacccug

SEQ ID NO: 414114 - RNA, 19 nt, Human
cuuuucaacuguaggugcu

SEQ ID NO: 414115 - RNA, 32 nt, Human
cuuuucaagccuuccuuccauuguuuuucuuc

SEQ ID NO: 414116 - RNA, 21 nt, Human
cuuuucaaguacuuucugacu

SEQ ID NO: 414117 - RNA, 23 nt, Human
cuuuucaaugcacacaugcuuug

SEQ ID NO: 414118 - RNA, 21 nt, Human
cuuuucaauuccuguguuuug

SEQ ID NO: 414119 - RNA, 32 nt, Human
cuuuucacacaaucucuuuacagcagaaucca

SEQ ID NO: 414120 - RNA, 32 nt, Human
cuuuucacaccaucucagagguugaggagcau

SEQ ID NO: 414121 - RNA, 32 nt, Human
cuuuucacagcacuccuuugccccagagcaga

SEQ ID NO: 414122 - RNA, 32 nt, Human
cuuuucacagcagcgcugggaacgaacgcagg

SEQ ID NO: 414123 - RNA, 32 nt, Human
cuuuucacccaggaggagaggcguggcugagg

SEQ ID NO: 414124 - RNA, 32 nt, Human
cuuuucacgucagcuagguugcaaggauaaua

SEQ ID NO: 414125 - RNA, 32 nt, Human
cuuuucacugaggaggugguggaaggugucgc

SEQ ID NO: 414126 - RNA, 32 nt, Human
cuuuucacugaugacaaauacaaugacuucau

SEQ ID NO: 414127 - RNA, 32 nt, Human
cuuuucacuggaugauguaugagggaauuuua

SEQ ID NO: 414128 - RNA, 32 nt, Human
cuuuucacuuccucuccacaggagccucugca

SEQ ID NO: 414129 - RNA, 32 nt, Human
cuuuucacuuuguugcuaucauccuccuuucu

SEQ ID NO: 414130 - RNA, 32 nt, Human
cuuuucagacacagcagggccccgcgcagccg

SEQ ID NO: 414131 - RNA, 32 nt, Human
cuuuucagccccugacaggccacccccacucc

SEQ ID NO: 414132 - RNA, 32 nt, Human
cuuuucagccugggugccacagcgagacccua

SEQ ID NO: 414133 - RNA, 32 nt, Human
cuuuucagcgaaagccugucuccucacccacc

SEQ ID NO: 414134 - RNA, 32 nt, Human
cuuuucagcuguucuuagggcauuauaaaugg

SEQ ID NO: 414135 - RNA, 32 nt, Human
cuuuucagcuuaguuggucaucuaucacauga

SEQ ID NO: 414136 - RNA, 32 nt, Human
cuuuucaggauacuaaggaaaugguggucaga

SEQ ID NO: 414137 - RNA, 32 nt, Human
cuuuucagguuaggggagaggugacccugagg

SEQ ID NO: 414138 - RNA, 32 nt, Human
cuuuucaguuucucccccuccucuccugaccu

SEQ ID NO: 414139 - RNA, 32 nt, Human
cuuuucaguuugaacucuucuuugccaggugu

SEQ ID NO: 414140 - RNA, 32 nt, Human
cuuuucauccuggucacaugaagacagauggu

SEQ ID NO: 414141 - RNA, 32 nt, Human
cuuuucaucuguaccacacccuggugaaaccu

SEQ ID NO: 414142 - RNA, 32 nt, Human
cuuuucaugaagcacagcugcagcaaagccuu

SEQ ID NO: 414143 - RNA, 32 nt, Human
cuuuucaugcaggaguuacagacacugguuuc

SEQ ID NO: 414144 - RNA, 32 nt, Human
cuuuucauguaaagauaagaucuuuagcuauc

SEQ ID NO: 414145 - RNA, 32 nt, Human
cuuuucauguacaaagcacagaaacaguacau

SEQ ID NO: 414146 - RNA, 32 nt, Human
cuuuucauguguccuuccugagcaccucuagc

SEQ ID NO: 414147 - RNA, 32 nt, Human
cuuuucauucaaccccaugcuggauaaagaag

SEQ ID NO: 414148 - RNA, 32 nt, Human
cuuuuccaaaacugguacuuacgugaacuguu

SEQ ID NO: 414149 - RNA, 32 nt, Human
cuuuuccaaacaguccccugcuuucauguaca

SEQ ID NO: 414150 - RNA, 32 nt, Human
cuuuuccaaauuugucccaacagcccuguaag

SEQ ID NO: 414151 - RNA, 32 nt, Human
cuuuuccacagcugcuucuuuuugcucaaccu

SEQ ID NO: 414152 - RNA, 32 nt, Human
cuuuuccacaguuaacaacacagcuguuacac

SEQ ID NO: 414153 - RNA, 32 nt, Human
cuuuuccaccacugcuuucuaguccuuuaacu

SEQ ID NO: 414154 - RNA, 32 nt, Human
cuuuuccacccaugagacuguacugggagagg

SEQ ID NO: 414155 - RNA, 32 nt, Human
cuuuuccaccgucccugagacugggguugagg

SEQ ID NO: 414156 - RNA, 32 nt, Human
cuuuuccacugaagggugaagacauggcagcc

SEQ ID NO: 414157 - RNA, 32 nt, Human
cuuuuccagaaauacaaugcuagguguuuuga

SEQ ID NO: 414158 - RNA, 32 nt, Human
cuuuuccagaacuauggacaaauugaucagaa

SEQ ID NO: 414159 - RNA, 32 nt, Human
cuuuuccagacuguauggaugugaauggaauc

SEQ ID NO: 414160 - RNA, 32 nt, Human
cuuuuccagagaaagauccugauugucauuua

SEQ ID NO: 414161 - RNA, 32 nt, Human
cuuuuccagauggggaaacugaggcccagaau

SEQ ID NO: 414162 - RNA, 32 nt, Human
cuuuuccagcacaauuacuuccuagagugucu

SEQ ID NO: 414163 - RNA, 32 nt, Human
cuuuuccagcuggaugagaauuugagugcucu

SEQ ID NO: 414164 - RNA, 32 nt, Human
cuuuuccaggcucucuucucucccucucucuc

SEQ ID NO: 414165 - RNA, 32 nt, Human
cuuuuccagggacuuagggggauaggcuuugg

SEQ ID NO: 414166 - RNA, 32 nt, Human
cuuuuccagggugggggagggaaugaauacau

SEQ ID NO: 414167 - RNA, 32 nt, Human
cuuuuccagugcugcugacuucaccccacuug

SEQ ID NO: 414168 - RNA, 32 nt, Human
cuuuuccauagagagggaaagaaacuuugaga

SEQ ID NO: 414169 - RNA, 32 nt, Human
cuuuuccauuucucccuccaucaccaccugcc

SEQ ID NO: 414170 - RNA, 21 nt, Human
cuuuucccaaaguuucugacu

SEQ ID NO: 414171 - RNA, 32 nt, Human
cuuuucccaacaaaagcucacagucuaaucag

SEQ ID NO: 414172 - RNA, 32 nt, Human
cuuuucccaagaggagagaauggcugcugggu

SEQ ID NO: 414173 - RNA, 32 nt, Human
cuuuucccaagccagugagcaagagcauuauu

SEQ ID NO: 414174 - RNA, 32 nt, Human
cuuuucccacacacuggauugugaggcucuua

SEQ ID NO: 414175 - RNA, 32 nt, Human
cuuuucccacagcaguccaccucugcaggcug

SEQ ID NO: 414176 - RNA, 32 nt, Human
cuuuucccaccucuccccugacccccacccca

SEQ ID NO: 414177 - RNA, 32 nt, Human
cuuuucccaccucuuuggauguuuucaccaau

SEQ ID NO: 414178 - RNA, 32 nt, Human
cuuuucccagaaggccucuccuuuucagcaaa

SEQ ID NO: 414179 - RNA, 32 nt, Human
cuuuucccagccacagaaucaggugauggucc

SEQ ID NO: 414180 - RNA, 32 nt, Human
cuuuucccaggggcugugucuccucacuuggu

SEQ ID NO: 414181 - RNA, 32 nt, Human
cuuuucccaucguguagucaagagucugugcc

SEQ ID NO: 414182 - RNA, 32 nt, Human
cuuuucccaucuuuccaauacuuucuugaacu

SEQ ID NO: 414183 - RNA, 32 nt, Human
cuuuuccccaaguacaaccacacccacacuca

SEQ ID NO: 414184 - RNA, 32 nt, Human
cuuuucccccuucccauuucuucccacuuuca

SEQ ID NO: 414185 - RNA, 32 nt, Human
cuuuucccccuucucucucccucucccucucu

SEQ ID NO: 414186 - RNA, 32 nt, Human
cuuuuccccuggcaguggacauggcugcacuc

SEQ ID NO: 414187 - RNA, 32 nt, Human
cuuuuccccuucccugccuguuucugggacuu

SEQ ID NO: 414188 - RNA, 32 nt, Human
cuuuucccuagacugcagccagcggagcccgc

SEQ ID NO: 414189 - RNA, 32 nt, Human
cuuuucccuccaggcaucucugggaaaggacc

SEQ ID NO: 414190 - RNA, 32 nt, Human
cuuuucccucucuggcguccccggcugcuugu

SEQ ID NO: 414191 - RNA, 32 nt, Human
cuuuucccugccacccuucuugucuuuacuuc

SEQ ID NO: 414192 - RNA, 32 nt, Human
cuuuucccugugguucuucauucucagaguag

SEQ ID NO: 414193 - RNA, 32 nt, Human
cuuuucccuuaaaggaaacaacuaauacacau

SEQ ID NO: 414194 - RNA, 32 nt, Human
cuuuucccuucagagcucacacaguggucacc

SEQ ID NO: 414195 - RNA, 32 nt, Human
cuuuucccuuccagacuuugagugucuucccu

SEQ ID NO: 414196 - RNA, 32 nt, Human
cuuuucccuuucuccagucggcccaccuuggg

SEQ ID NO: 414197 - RNA, 32 nt, Human
cuuuuccgauagaaauuucuuaccucauuuuu

SEQ ID NO: 414198 - RNA, 32 nt, Human
cuuuuccuacuucugcccuucccugccacccc

SEQ ID NO: 414199 - RNA, 32 nt, Human
cuuuuccucaaagggagagagugcuauuguag

SEQ ID NO: 414200 - RNA, 32 nt, Human
cuuuuccuccaaaacaaaaauuagaggauuau

SEQ ID NO: 414201 - RNA, 18 nt, Human
cuuuuccucccccucguu

SEQ ID NO: 414202 - RNA, 32 nt, Human
cuuuuccucccucccuuccuucccuccuuccc

SEQ ID NO: 414203 - RNA, 32 nt, Human
cuuuuccucgugagacacgucccacugccuug

SEQ ID NO: 414204 - RNA, 32 nt, Human
cuuuuccucuggcaugguguagacugagacaa

SEQ ID NO: 414205 - RNA, 32 nt, Human
cuuuuccucugugaggagacaagacuuggaga

SEQ ID NO: 414206 - RNA, 32 nt, Human
cuuuuccucuuuuccuuccuccucuuuggaau

SEQ ID NO: 414207 - RNA, 32 nt, Human
cuuuuccugagccuccuuccuccuggauuccu

SEQ ID NO: 414208 - RNA, 32 nt, Human
cuuuuccugcagcucuucagagccacagaccu

SEQ ID NO: 414209 - RNA, 32 nt, Human
cuuuuccugcaugugccaccuccagugggaaa

SEQ ID NO: 414210 - RNA, 32 nt, Human
cuuuuccugcauuaugauaguaucugugugaa

SEQ ID NO: 414211 - RNA, 32 nt, Human
cuuuuccugccagagccaccccuuucccuccu

SEQ ID NO: 414212 - RNA, 18 nt, Human
cuuuuccugccuccuuca

SEQ ID NO: 414213 - RNA, 32 nt, Human
cuuuuccugccuccuucacauuuccuccccag

SEQ ID NO: 414214 - RNA, 32 nt, Human
cuuuuccugccugccugucugccugugaccug

SEQ ID NO: 414215 - RNA, 32 nt, Human
cuuuuccugccugucugcugcuggcucucuuc

SEQ ID NO: 414216 - RNA, 32 nt, Human
cuuuuccugccuguuguuugccuuuugucaac

SEQ ID NO: 414217 - RNA, 32 nt, Human
cuuuuccugguauaaauauucccacugugggc

SEQ ID NO: 414218 - RNA, 32 nt, Human
cuuuuccuguccacugaaaugccugagcagua

SEQ ID NO: 414219 - RNA, 32 nt, Human
cuuuuccuguggccugaccugccugugagugc

SEQ ID NO: 414220 - RNA, 32 nt, Human
cuuuuccuguuccuccucuagguauguagcug

SEQ ID NO: 414221 - RNA, 32 nt, Human
cuuuuccuuccagguucuguuacucacagaag

SEQ ID NO: 414222 - RNA, 32 nt, Human
cuuuuccuuccuuauuccuuccagucagggug

SEQ ID NO: 414223 - RNA, 19 nt, Human
cuuuuccuuuuuucacuuu

SEQ ID NO: 414224 - RNA, 32 nt, Human
cuuuucgaaagccagaggcucgaguuaccccu

SEQ ID NO: 414225 - RNA, 32 nt, Human
cuuuucgagaucuuuucccuugcuaaccggau

SEQ ID NO: 414226 - RNA, 32 nt, Human
cuuuucgcaacauaaucccagcacuuuggaac

SEQ ID NO: 414227 - RNA, 32 nt, Human
cuuuucgccaucuuuugucuuucuguggagcu

SEQ ID NO: 414228 - RNA, 32 nt, Human
cuuuucgccuuuccucucuauauuucgggucg

SEQ ID NO: 414229 - RNA, 32 nt, Human
cuuuucgcggggaacccagcuguuccugcgag

SEQ ID NO: 414230 - RNA, 32 nt, Human
cuuuucggcuacucaaccacuccgcaugcugc

SEQ ID NO: 414231 - RNA, 32 nt, Human
cuuuucguagugacaccagcuguguuggauug

SEQ ID NO: 414232 - RNA, 32 nt, Human
cuuuucgugguuuacaugcaggccaguaacag

SEQ ID NO: 414233 - RNA, 32 nt, Human
cuuuucguuugcugagggucacagaccccaac

SEQ ID NO: 414234 - RNA, 32 nt, Human
cuuuucuaaaaauacaaaaauuagccaaccgu

SEQ ID NO: 414235 - RNA, 32 nt, Human
cuuuucuaaaaauacaaaaauuagccagguau

SEQ ID NO: 414236 - RNA, 26 nt, Human
cuuuucuaaaaauuuuccuaguaaca

SEQ ID NO: 414237 - RNA, 32 nt, Human
cuuuucuaaccguuuucuggauggauuuugua

SEQ ID NO: 414238 - RNA, 32 nt, Human
cuuuucuaacuuucuuccacagaacacaguua

SEQ ID NO: 414239 - RNA, 32 nt, Human
cuuuucuacauacauuauuuucuuaauuguua

SEQ ID NO: 414240 - RNA, 32 nt, Human
cuuuucuaccugcucuauacuuggcacucaau

SEQ ID NO: 414241 - RNA, 32 nt, Human
cuuuucuagaaacaccauucuggaaguuuggc

SEQ ID NO: 414242 - RNA, 24 nt, Human
cuuuucuagucacagauguuuuca

SEQ ID NO: 414243 - RNA, 32 nt, Human
cuuuucuaguuuuaaaaccagaauuggaccuu

SEQ ID NO: 414244 - RNA, 32 nt, Human
cuuuucuauauacuucguuccccgccaaccgc

SEQ ID NO: 414245 - RNA, 32 nt, Human
cuuuucuauuaaaagugggaauuaggagagaa

SEQ ID NO: 414246 - RNA, 32 nt, Human
cuuuucucaaugcaccaagaguagaagcacaa

SEQ ID NO: 414247 - RNA, 32 nt, Human
cuuuucucaauuccucuucauuggcugauuac

SEQ ID NO: 414248 - RNA, 32 nt, Human
cuuuucucauaagggcacuaauccuaucugau

SEQ ID NO: 414249 - RNA, 32 nt, Human
cuuuucuccacugucauaaucucuuuccaucu

SEQ ID NO: 414250 - RNA, 18 nt, Human
cuuuucuccaguuugagc

SEQ ID NO: 414251 - RNA, 32 nt, Human
cuuuucuccaugacacgaggccaguccccagg

SEQ ID NO: 414252 - RNA, 32 nt, Human
cuuuucucccacccucuuuuccaagcuguuuc

SEQ ID NO: 414253 - RNA, 32 nt, Human
cuuuucuccccacuccuccagaaggcauaacc

SEQ ID NO: 414254 - RNA, 32 nt, Human
cuuuucucccucuucuuucuuacuuccauaag

SEQ ID NO: 414255 - RNA, 32 nt, Human
cuuuucuccucccuuccuuucccuucaaagua

SEQ ID NO: 414256 - RNA, 32 nt, Human
cuuuucuccuucaggaacugugaauggcuaga

SEQ ID NO: 414257 - RNA, 32 nt, Human
cuuuucuccuuuuucuucuuuuuaauagucua

SEQ ID NO: 414258 - RNA, 32 nt, Human
cuuuucucguauggggugguuuuugcauuaaa

SEQ ID NO: 414259 - RNA, 32 nt, Human
cuuuucucucaucagguugaucuuuaaauaaa

SEQ ID NO: 414260 - RNA, 32 nt, Human
cuuuucucuccacugacugccugucagcuagu

SEQ ID NO: 414261 - RNA, 32 nt, Human
cuuuucucuccucucuucugccucuuuucacu

SEQ ID NO: 414262 - RNA, 32 nt, Human
cuuuucucuccucugguucucaaccucaacga

SEQ ID NO: 414263 - RNA, 32 nt, Human
cuuuucucucuucagcccccaacccaguggag

SEQ ID NO: 414264 - RNA, 32 nt, Human
cuuuucucugcucuccugaaccuuuaggcuug

SEQ ID NO: 414265 - RNA, 32 nt, Human
cuuuucucuggcacuccaguccagcuugggcc

SEQ ID NO: 414266 - RNA, 32 nt, Human
cuuuucucuggcagacuaucaguguuugccuc

SEQ ID NO: 414267 - RNA, 32 nt, Human
cuuuucucugucuuccaugucuugagaucuca

SEQ ID NO: 414268 - RNA, 32 nt, Human
cuuuucucuguuuuucuuuuccuuccuuuuaa

SEQ ID NO: 414269 - RNA, 32 nt, Human
cuuuucucuucucucuccuccugggaaaagag

SEQ ID NO: 414270 - RNA, 32 nt, Human
cuuuucucuuuacuggaguuuccucuugucca

SEQ ID NO: 414271 - RNA, 32 nt, Human
cuuuucucuuucuccuuagucuucucauagca

SEQ ID NO: 414272 - RNA, 32 nt, Human
cuuuucugaacugggcauucugccuucaacca

SEQ ID NO: 414273 - RNA, 26 nt, Human
cuuuucugaagacuucaguuuuguua

SEQ ID NO: 414274 - RNA, 32 nt, Human
cuuuucugaagagauuguguuagcuccaaagc

SEQ ID NO: 414275 - RNA, 32 nt, Human
cuuuucugaauccugguuccaucaguauaccu

SEQ ID NO: 414276 - RNA, 32 nt, Human
cuuuucugaccuucaaaguccccuguagagac

SEQ ID NO: 414277 - RNA, 32 nt, Human
cuuuucugagaggaaaaggaaaagggaaggga

SEQ ID NO: 414278 - RNA, 32 nt, Human
cuuuucugagcagacguccagagcagagucag

SEQ ID NO: 414279 - RNA, 32 nt, Human
cuuuucugagguucggcucacacugagaucgg

SEQ ID NO: 414280 - RNA, 32 nt, Human
cuuuucugaguguugauggggguuaccagcuu

SEQ ID NO: 414281 - RNA, 32 nt, Human
cuuuucugcagguacuuccucagucuggugcu

SEQ ID NO: 414282 - RNA, 32 nt, Human
cuuuucugcauaguuuuucuucugcuuacuuu

SEQ ID NO: 414283 - RNA, 32 nt, Human
cuuuucugccaucagcuuuguuaccuaacagc

SEQ ID NO: 414284 - RNA, 32 nt, Human
cuuuucugcccaucccccaguaaagaaaaggc

SEQ ID NO: 414285 - RNA, 32 nt, Human
cuuuucugcuaucaccuuccucuugucagaau

SEQ ID NO: 414286 - RNA, 17 nt, Human
cuuuucugcucuuucaa

SEQ ID NO: 414287 - RNA, 32 nt, Human
cuuuucugcugggucugggaggagggaggcug

SEQ ID NO: 414288 - RNA, 32 nt, Human
cuuuucuggaggagggaggugcugugagccua

SEQ ID NO: 414289 - RNA, 32 nt, Human
cuuuucuggccagcuuuuccaggauuuauaaa

SEQ ID NO: 414290 - RNA, 32 nt, Human
cuuuucugguagguucugucugugccaagggc

SEQ ID NO: 414291 - RNA, 32 nt, Human
cuuuucuggucccucuucucuccucaguuucu

SEQ ID NO: 414292 - RNA, 32 nt, Human
cuuuucugguucugcugacccucagucuccug

SEQ ID NO: 414293 - RNA, 22 nt, Human
cuuuucuguaaguuucuauacu

SEQ ID NO: 414294 - RNA, 32 nt, Human
cuuuucuguccuuggccaucucagccuggccu

SEQ ID NO: 414295 - RNA, 32 nt, Human
cuuuucugugcuguugguucccaaaacuagaa

SEQ ID NO: 414296 - RNA, 32 nt, Human
cuuuucugugcuuucuucccugaggcauucuu

SEQ ID NO: 414297 - RNA, 28 nt, Human
cuuuucuguuuucuucucagucuuuuca

SEQ ID NO: 414298 - RNA, 32 nt, Human
cuuuucuuacccugaucuccccagaagccucu

SEQ ID NO: 414299 - RNA, 32 nt, Human
cuuuucuuaccugagacugggccugaagggag

SEQ ID NO: 414300 - RNA, 32 nt, Human
cuuuucuuauucaccuugcuugugcuuaaaca

SEQ ID NO: 414301 - RNA, 32 nt, Human
cuuuucuuauugugauuuauuuccuaauucuu

SEQ ID NO: 414302 - RNA, 32 nt, Human
cuuuucuuccuaguuaugggugguguuuuuag

SEQ ID NO: 414303 - RNA, 32 nt, Human
cuuuucuuccugucuguuccuccccuaauccu

SEQ ID NO: 414304 - RNA, 32 nt, Human
cuuuucuuccuucacaguuuuaucucacaaaa

SEQ ID NO: 414305 - RNA, 32 nt, Human
cuuuucuucuaaucugaauucuugcuucucuc

SEQ ID NO: 414306 - RNA, 32 nt, Human
cuuuucuucucccacuugcucagcagcuuggg

SEQ ID NO: 414307 - RNA, 32 nt, Human
cuuuucuucucccacuugcucagcaguuuggg

SEQ ID NO: 414308 - RNA, 32 nt, Human
cuuuucuucucccgugacuuuacucaucuuau

SEQ ID NO: 414309 - RNA, 32 nt, Human
cuuuucuucucugcuuucuucuuucugccccu

SEQ ID NO: 414310 - RNA, 32 nt, Human
cuuuucuucuuucaaauaaauggcaguuaacu

SEQ ID NO: 414311 - RNA, 32 nt, Human
cuuuucuugccauugaccccaagcucacccca

SEQ ID NO: 414312 - RNA, 32 nt, Human
cuuuucuugcuagggugaguuuauugucccug

SEQ ID NO: 414313 - RNA, 32 nt, Human
cuuuucuuggcguuccugccaggcucucccuc

SEQ ID NO: 414314 - RNA, 32 nt, Human
cuuuucuugguuguaguucucagaauaacuag

SEQ ID NO: 414315 - RNA, 32 nt, Human
cuuuucuuguugaacuucuuggaaaagccacc

SEQ ID NO: 414316 - RNA, 32 nt, Human
cuuuucuuuaggagaacagauuuugagcuauc

SEQ ID NO: 414317 - RNA, 32 nt, Human
cuuuucuuuauucagcauccacaaacauuuag

SEQ ID NO: 414318 - RNA, 32 nt, Human
cuuuucuuuauuuagcauccacaaacauuuag

SEQ ID NO: 414319 - RNA, 32 nt, Human
cuuuucuuucuuguucaauucaucuagauuau

SEQ ID NO: 414320 - RNA, 32 nt, Human
cuuuucuuucuuuccuucuuauuuuguuaugc

SEQ ID NO: 414321 - RNA, 32 nt, Human
cuuuucuuucuuucuucgacagagucucgcug

SEQ ID NO: 414322 - RNA, 24 nt, Human
cuuuucuuugcccucugugcuuug

SEQ ID NO: 414323 - RNA, 32 nt, Human
cuuuucuuuguguuaagagggacuugccucug

SEQ ID NO: 414324 - RNA, 32 nt, Human
cuuuucuuuuucucccauccuuuuuccuuccc

SEQ ID NO: 414325 - RNA, 32 nt, Human
cuuuucuuuuuggcccucccucccucccucuu

SEQ ID NO: 414326 - RNA, 32 nt, Human
cuuuugaaaagagaaaaagaaugaaguaacuu

SEQ ID NO: 414327 - RNA, 32 nt, Human
cuuuugaaaauguaaaauaaaaccaaaaauag

SEQ ID NO: 414328 - RNA, 32 nt, Human
cuuuugaaauccaacuucugugcaaaauuuua

SEQ ID NO: 414329 - RNA, 32 nt, Human
cuuuugaacagcuucgguccccacuaugacag

SEQ ID NO: 414330 - RNA, 19 nt, Human
cuuuugaaccuccaacagg

SEQ ID NO: 414331 - RNA, 32 nt, Human
cuuuugaagaagagaauagcugcccauagcag

SEQ ID NO: 414332 - RNA, 32 nt, Human
cuuuugaagaaucugagucauuucuuacauaa

SEQ ID NO: 414333 - RNA, 32 nt, Human
cuuuugaagagugcauuucaagcugccaaggu

SEQ ID NO: 414334 - RNA, 32 nt, Human
cuuuugaagcuccucauuguucuugagugugc

SEQ ID NO: 414335 - RNA, 32 nt, Human
cuuuugaagcuucaguauaccauguuugcaua

SEQ ID NO: 414336 - RNA, 32 nt, Human
cuuuugaaggaaauggauaaucccagggggug

SEQ ID NO: 414337 - RNA, 32 nt, Human
cuuuugaaggcuccucuuucugcccuucccca

SEQ ID NO: 414338 - RNA, 32 nt, Human
cuuuugaaguaugacaguauuaagucauaaga

SEQ ID NO: 414339 - RNA, 32 nt, Human
cuuuugaauuguuuuuauuguuuucuauuuau

SEQ ID NO: 414340 - RNA, 32 nt, Human
cuuuugaccaacucccugucauuccuaaccua

SEQ ID NO: 414341 - RNA, 32 nt, Human
cuuuugaccauggaauaccaucagccugagga

SEQ ID NO: 414342 - RNA, 32 nt, Human
cuuuugacccaggagggccgcgaggcuggagc

SEQ ID NO: 414343 - RNA, 20 nt, Human
cuuuugaccccguuccuuca

SEQ ID NO: 414344 - RNA, 32 nt, Human
cuuuugacuguaccuuuuucuccaguuacugu

SEQ ID NO: 414345 - RNA, 32 nt, Human
cuuuugagaugggggucuugcucuguugccca

SEQ ID NO: 414346 - RNA, 32 nt, Human
cuuuugagcccucaucaagcucucauugugau

SEQ ID NO: 414347 - RNA, 32 nt, Human
cuuuugaggaagggagggugggcaguggucug

SEQ ID NO: 414348 - RNA, 32 nt, Human
cuuuugaggagggugggacacaacaguacaga

SEQ ID NO: 414349 - RNA, 32 nt, Human
cuuuugaugauacccaucccuccuucauuuuu

SEQ ID NO: 414350 - RNA, 32 nt, Human
cuuuugaugaugucuacagaaaaugcuggcug

SEQ ID NO: 414351 - RNA, 32 nt, Human
cuuuugaugccauugagauucaccucccacaa

SEQ ID NO: 414352 - RNA, 32 nt, Human
cuuuugauggaaaauauguggguggauaguau

SEQ ID NO: 414353 - RNA, 32 nt, Human
cuuuugauugagccuccaccucugggauuuuu

SEQ ID NO: 414354 - RNA, 32 nt, Human
cuuuugauugugucugugcccccuuucuuguc

SEQ ID NO: 414355 - RNA, 32 nt, Human
cuuuugauuuccucuucucucccuucaagccc

SEQ ID NO: 414356 - RNA, 32 nt, Human
cuuuugcaaaacugugugaucuuugugaaagu

SEQ ID NO: 414357 - RNA, 32 nt, Human
cuuuugcacagcaaaaacugcgaggccagaac

SEQ ID NO: 414358 - RNA, 31 nt, Human
cuuuugcacaggcaccagcuaccucagggac

SEQ ID NO: 414359 - RNA, 32 nt, Human
cuuuugcacaguggaagaauuucuccagaaga

SEQ ID NO: 414360 - RNA, 32 nt, Human
cuuuugcacuacaauuuuuggaauccuuuugg

SEQ ID NO: 414361 - RNA, 32 nt, Human
cuuuugcacuugaauuugcaacugaauggauu

SEQ ID NO: 414362 - RNA, 32 nt, Human
cuuuugcagcacucacgccucugacagucuuu

SEQ ID NO: 414363 - RNA, 32 nt, Human
cuuuugcagcauggaucaaacauuggcuuacu

SEQ ID NO: 414364 - RNA, 32 nt, Human
cuuuugccaagaaggaugagacaaaaggccag

SEQ ID NO: 414365 - RNA, 20 nt, Human
cuuuugccacccccucccca

SEQ ID NO: 414366 - RNA, 32 nt, Human
cuuuugccagagagauauucggaggaggggug

SEQ ID NO: 414367 - RNA, 32 nt, Human
cuuuugccaguauuaugcauauauaaguuuac

SEQ ID NO: 414368 - RNA, 32 nt, Human
cuuuugcccacugucugcuaccaggggcucac

SEQ ID NO: 414369 - RNA, 32 nt, Human
cuuuugcccagacuggagugaaguagcaugau

SEQ ID NO: 414370 - RNA, 32 nt, Human
cuuuugcccaggagaaguuuuaccucaguugu

SEQ ID NO: 414371 - RNA, 24 nt, Human
cuuuugcccaggcuggagugcagu

SEQ ID NO: 414372 - RNA, 32 nt, Human
cuuuugcccaggcuggagugcaguggcacaau

SEQ ID NO: 414373 - RNA, 32 nt, Human
cuuuugcccaggcuggagugcaguggcgugau

SEQ ID NO: 414374 - RNA, 32 nt, Human
cuuuugcccaggcuggauggagugcaguggcg

SEQ ID NO: 414375 - RNA, 20 nt, Human
cuuuugccccacccccagca

SEQ ID NO: 414376 - RNA, 32 nt, Human
cuuuugcccccucccuccccucccucucgcuc

SEQ ID NO: 414377 - RNA, 32 nt, Human
cuuuugcccuuugucaucaccaacacaacaga

SEQ ID NO: 414378 - RNA, 32 nt, Human
cuuuugccuaggcuggcgucgagacuugaggc

SEQ ID NO: 414379 - RNA, 32 nt, Human
cuuuugccugcacucuugccugcugcccugag

SEQ ID NO: 414380 - RNA, 32 nt, Human
cuuuugccuguaaucccaacacuuugggagga

SEQ ID NO: 414381 - RNA, 32 nt, Human
cuuuugccuuucuacuuccuggaccccugacc

SEQ ID NO: 414382 - RNA, 32 nt, Human
cuuuugccuuugccagagacagcuccaacuga

SEQ ID NO: 414383 - RNA, 32 nt, Human
cuuuugcuagauagagacaaaauaucagugug

SEQ ID NO: 414384 - RNA, 32 nt, Human
cuuuugcuauggagcaaauccaggaaggcaag

SEQ ID NO: 414385 - RNA, 32 nt, Human
cuuuugcuccuuggauacuuugcagcuuccua

SEQ ID NO: 414386 - RNA, 32 nt, Human
cuuuugcucggcacuucucucuugccugccac

SEQ ID NO: 414387 - RNA, 32 nt, Human
cuuuugcucucaucuugguuuccauauacuau

SEQ ID NO: 414388 - RNA, 32 nt, Human
cuuuugcucucuuccucuuucuccggccaugu

SEQ ID NO: 414389 - RNA, 32 nt, Human
cuuuugcucuuacccaggcugagugcaguggc

SEQ ID NO: 414390 - RNA, 32 nt, Human
cuuuugcucuuuccuuccuuccuucuuccuuc

SEQ ID NO: 414391 - RNA, 32 nt, Human
cuuuugcugcuaccuugaccucaagcccuuca

SEQ ID NO: 414392 - RNA, 32 nt, Human
cuuuugcugcuuuaacauuuucuggauauuaa

SEQ ID NO: 414393 - RNA, 32 nt, Human
cuuuugcugggcucuccagagcugggcuuggc

SEQ ID NO: 414394 - RNA, 32 nt, Human
cuuuugcuuagcaaagggcugacuuuccauug

SEQ ID NO: 414395 - RNA, 32 nt, Human
cuuuugcuugauuuaugaaggcugccauaguu

SEQ ID NO: 414396 - RNA, 32 nt, Human
cuuuugcuuggauucccaucauggccccuuug

SEQ ID NO: 414397 - RNA, 32 nt, Human
cuuuuggaaagaacagaaaccgggaggagacu

SEQ ID NO: 414398 - RNA, 32 nt, Human
cuuuuggaacuucagccauuuccccagguugu

SEQ ID NO: 414399 - RNA, 18 nt, Human
cuuuuggaauuuccuuca

SEQ ID NO: 414400 - RNA, 32 nt, Human
cuuuuggagaagcaaagaguccagaagucuga

SEQ ID NO: 414401 - RNA, 32 nt, Human
cuuuuggagaagcaggagggcauuggcuuaac

SEQ ID NO: 414402 - RNA, 32 nt, Human
cuuuuggagcagggcaggcuggcugcuggcuc

SEQ ID NO: 414403 - RNA, 32 nt, Human
cuuuuggaggccaaggcaggaggaucacuuga

SEQ ID NO: 414404 - RNA, 32 nt, Human
cuuuuggaggcugaggcgggcagaucacuuga

SEQ ID NO: 414405 - RNA, 32 nt, Human
cuuuuggaggcugagguuggaggauugcuuga

SEQ ID NO: 414406 - RNA, 23 nt, Human
cuuuuggauaugcugaacgcaga

SEQ ID NO: 414407 - RNA, 32 nt, Human
cuuuuggauucaugcuuucuggaagguuuaaa

SEQ ID NO: 414408 - RNA, 32 nt, Human
cuuuuggcaacaguguuaaccauauuuuauua

SEQ ID NO: 414409 - RNA, 16 nt, Human
cuuuuggcaccuucag

SEQ ID NO: 414410 - RNA, 23 nt, Human
cuuuuggcaggaaaaccaauaga

SEQ ID NO: 414411 - RNA, 20 nt, Human
cuuuuggcagguacaacaga

SEQ ID NO: 414412 - RNA, 32 nt, Human
cuuuuggcaguauuucuuuacaaauguggcaa

SEQ ID NO: 414413 - RNA, 18 nt, Human
cuuuuggcaguuccucca

SEQ ID NO: 414414 - RNA, 17 nt, Human
cuuuuggcauccguuaa

SEQ ID NO: 414415 - RNA, 32 nt, Human
cuuuuggccaaacccuggaaugugccugcugg

SEQ ID NO: 414416 - RNA, 32 nt, Human
cuuuuggccacuuuaaaaagucuucccucacc

SEQ ID NO: 414417 - RNA, 32 nt, Human
cuuuuggccauggggagaauuugacauuuauu

SEQ ID NO: 414418 - RNA, 17 nt, Human
cuuuuggccuccugcaa

SEQ ID NO: 414419 - RNA, 17 nt, Human
cuuuuggccugauucga

SEQ ID NO: 414420 - RNA, 25 nt, Human
cuuuuggcgaguugccgggcacagg

SEQ ID NO: 414421 - RNA, 32 nt, Human
cuuuuggcgccuucccuuugccguacugggag

SEQ ID NO: 414422 - RNA, 18 nt, Human
cuuuuggcggccucuuca

SEQ ID NO: 414423 - RNA, 32 nt, Human
cuuuuggcguauacugauuccuccaacucucc

SEQ ID NO: 414424 - RNA, 19 nt, Human
cuuuuggcuacaucuucaa

SEQ ID NO: 414425 - RNA, 32 nt, Human
cuuuuggcuccucagagcuggagggggaugcu

SEQ ID NO: 414426 - RNA, 18 nt, Human
cuuuuggcugcuuuucaa

SEQ ID NO: 414427 - RNA, 17 nt, Human
cuuuuggcuuucauuaa

SEQ ID NO: 414428 - RNA, 18 nt, Human
cuuuuggcuuuguuucaa

SEQ ID NO: 414429 - RNA, 32 nt, Human
cuuuugggaacuauuucucuuuauuuauagug

SEQ ID NO: 414430 - RNA, 32 nt, Human
cuuuugggacuguggaagcaucagaugccagc

SEQ ID NO: 414431 - RNA, 32 nt, Human
cuuuugggaggcagagaugggaggauacuuga

SEQ ID NO: 414432 - RNA, 32 nt, Human
cuuuugggauuuuccuaagcagaaagaccuca

SEQ ID NO: 414433 - RNA, 31 nt, Human
cuuuugggcaaagggcuugugucuucagggg

SEQ ID NO: 414434 - RNA, 32 nt, Human
cuuuugggccacugcaaagauuccagccuggg

SEQ ID NO: 414435 - RNA, 32 nt, Human
cuuuuggggauuauacaccucagccgccugag

SEQ ID NO: 414436 - RNA, 32 nt, Human
cuuuuggggauuauuuauaaagaucagacuag

SEQ ID NO: 414437 - RNA, 32 nt, Human
cuuuuggggguuagaaggucagguguggagac

SEQ ID NO: 414438 - RNA, 18 nt, Human
cuuuuggguauuuuucaa

SEQ ID NO: 414439 - RNA, 32 nt, Human
cuuuuggguuuugucuaccucaugugguaccc

SEQ ID NO: 414440 - RNA, 32 nt, Human
cuuuugguaacucuggggagaucaauagauug

SEQ ID NO: 414441 - RNA, 32 nt, Human
cuuuugguaaugugauguugauguucuccccc

SEQ ID NO: 414442 - RNA, 20 nt, Human
cuuuugguauauuccuuuaa

SEQ ID NO: 414443 - RNA, 32 nt, Human
cuuuugguauucuuuuuguuucuuuuauuguu

SEQ ID NO: 414444 - RNA, 32 nt, Human
cuuuuggucaaugucuaggaaaucucuucaga

SEQ ID NO: 414445 - RNA, 17 nt, Human
cuuuuggucccucucaa

SEQ ID NO: 414446 - RNA, 32 nt, Human
cuuuuggucuucaugauaaaucuugcugcugc

SEQ ID NO: 414447 - RNA, 18 nt, Human
cuuuuggugacccuccag

SEQ ID NO: 414448 - RNA, 32 nt, Human
cuuuuggugagcucagcugagauguagaggga

SEQ ID NO: 414449 - RNA, 32 nt, Human
cuuuuggugccuggcugguuugcccagagcca

SEQ ID NO: 414450 - RNA, 32 nt, Human
cuuuuggugcucucaccuuaucuggaagaucu

SEQ ID NO: 414451 - RNA, 32 nt, Human
cuuuugguggccuggggcaugucuugaggccc

SEQ ID NO: 414452 - RNA, 32 nt, Human
cuuuugguuagaacugcaacuucggaguugag

SEQ ID NO: 414453 - RNA, 32 nt, Human
cuuuugguugggacagugguuuuauguagggg

SEQ ID NO: 414454 - RNA, 32 nt, Human
cuuuuguaaaauucacuuguuacuuucagacc

SEQ ID NO: 414455 - RNA, 32 nt, Human
cuuuuguaaauuccuucuuguuacauucuuua

SEQ ID NO: 414456 - RNA, 32 nt, Human
cuuuuguaacgggauuuuuauuuuugcucuuu

SEQ ID NO: 414457 - RNA, 32 nt, Human
cuuuuguaaggcccagggguugcacugagucu

SEQ ID NO: 414458 - RNA, 32 nt, Human
cuuuuguacuggucuccuucucuccuuuccac

SEQ ID NO: 414459 - RNA, 21 nt, Human
cuuuuguagagcuuuuuuccu

SEQ ID NO: 414460 - RNA, 32 nt, Human
cuuuuguagguacuucaccccucaccccauuu

SEQ ID NO: 414461 - RNA, 32 nt, Human
cuuuuguauaauucaauacaugaucaucaagu

SEQ ID NO: 414462 - RNA, 32 nt, Human
cuuuuguaucuauuugacauuuuccauuaaaa

SEQ ID NO: 414463 - RNA, 32 nt, Human
cuuuuguaugauacauaaagugcuugagucua

SEQ ID NO: 414464 - RNA, 32 nt, Human
cuuuuguauucaaaugaaaaugcuuuguacaa

SEQ ID NO: 414465 - RNA, 32 nt, Human
cuuuuguauuuucagaucuccuuggagcagua

SEQ ID NO: 414466 - RNA, 32 nt, Human
cuuuuguauuuuuaguagagacaggguuucac

SEQ ID NO: 414467 - RNA, 32 nt, Human
cuuuuguauuuuuaguagagaugggguuucac

SEQ ID NO: 414468 - RNA, 32 nt, Human
cuuuuguauuuuuaguagagaugggguuuugc

SEQ ID NO: 414469 - RNA, 32 nt, Human
cuuuugucaaaucuuaacauuuugccacuucc

SEQ ID NO: 414470 - RNA, 32 nt, Human
cuuuugucaaaucuuaacauuuugccacuucg

SEQ ID NO: 414471 - RNA, 32 nt, Human
cuuuugucacccaggcuggagugccauggcac

SEQ ID NO: 414472 - RNA, 23 nt, Human
cuuuugucccccaagcuggagua

SEQ ID NO: 414473 - RNA, 32 nt, Human
cuuuugucccccaagcuggaguacaaugacag

SEQ ID NO: 414474 - RNA, 32 nt, Human
cuuuugucgcauuuugcuucacugugaguagc

SEQ ID NO: 414475 - RNA, 32 nt, Human
cuuuugucucagaggacuuugaugcuucaaua

SEQ ID NO: 414476 - RNA, 32 nt, Human
cuuuugucuccacagcaaccagccacugcagg

SEQ ID NO: 414477 - RNA, 32 nt, Human
cuuuugucucucauagcacagagcaggagggg

SEQ ID NO: 414478 - RNA, 32 nt, Human
cuuuugucuguuccagccugcuugcaacccug

SEQ ID NO: 414479 - RNA, 32 nt, Human
cuuuugucuucauugucauaaacaucugcccc

SEQ ID NO: 414480 - RNA, 32 nt, Human
cuuuugugaaaccagaaugagaauucagguuc

SEQ ID NO: 414481 - RNA, 32 nt, Human
cuuuugugacaacagugaagaggggaaaauaa

SEQ ID NO: 414482 - RNA, 32 nt, Human
cuuuugugagccaggaucucagacugccguag

SEQ ID NO: 414483 - RNA, 17 nt, Human
cuuuugugauccuuuaa

SEQ ID NO: 414484 - RNA, 32 nt, Human
cuuuugugcuuuggguuucuuuguugacugaa

SEQ ID NO: 414485 - RNA, 32 nt, Human
cuuuuguggaaaaugaguguguuugcauggaa

SEQ ID NO: 414486 - RNA, 32 nt, Human
cuuuuguggugaggaggacacaggccugggaa

SEQ ID NO: 414487 - RNA, 32 nt, Human
cuuuuguguauaaaucccaaaauauuaaauuu

SEQ ID NO: 414488 - RNA, 32 nt, Human
cuuuuguguauuccauauuggccggccccaag

SEQ ID NO: 414489 - RNA, 32 nt, Human
cuuuuguguuucuguauaacaucgaugacgag

SEQ ID NO: 414490 - RNA, 32 nt, Human
cuuuuguuaaaaauaaaacaaugaguauguuu

SEQ ID NO: 414491 - RNA, 32 nt, Human
cuuuuguuaaguuagcccuuaccauuuagugc

SEQ ID NO: 414492 - RNA, 21 nt, Human
cuuuuguuaaugcuccuccga

SEQ ID NO: 414493 - RNA, 32 nt, Human
cuuuuguuaccugacaugccguagggugagcu

SEQ ID NO: 414494 - RNA, 32 nt, Human
cuuuuguuacugacaguugccuugguccuagc

SEQ ID NO: 414495 - RNA, 32 nt, Human
cuuuuguuaguuucaguaccucagcuaucaac

SEQ ID NO: 414496 - RNA, 32 nt, Human
cuuuuguucguuuugccuucuguccuuggaac

SEQ ID NO: 414497 - RNA, 32 nt, Human
cuuuuguucuauuccccagacuccucauuauu

SEQ ID NO: 414498 - RNA, 32 nt, Human
cuuuuguucucaaaugauaagagagcuaauac

SEQ ID NO: 414499 - RNA, 32 nt, Human
cuuuuguucuguucuucugugugcauuuuaug

SEQ ID NO: 414500 - RNA, 32 nt, Human
cuuuuguugcccaggcuggagugcaacggcgc

SEQ ID NO: 414501 - RNA, 32 nt, Human
cuuuuguugcccaggcuggagugcaaugaugc

SEQ ID NO: 414502 - RNA, 32 nt, Human
cuuuuguugcccaggcuggagugcaauggcgc

SEQ ID NO: 414503 - RNA, 32 nt, Human
cuuuuguugcccaggcuggagugcaauggugc

SEQ ID NO: 414504 - RNA, 32 nt, Human
cuuuuguugcccaggcuggaguguaguggcgc

SEQ ID NO: 414505 - RNA, 32 nt, Human
cuuuuguugcccaggcuggaguucaguggcgu

SEQ ID NO: 414506 - RNA, 32 nt, Human
cuuuuguugcgcaggcuggagugcaauggugc

SEQ ID NO: 414507 - RNA, 32 nt, Human
cuuuuguugcuucauucuuuccuugcuuuguu

SEQ ID NO: 414508 - RNA, 32 nt, Human
cuuuuguugucauucuugugauccuggguggg

SEQ ID NO: 414509 - RNA, 32 nt, Human
cuuuuguuuccuagaagagaucaaagaguggu

SEQ ID NO: 414510 - RNA, 32 nt, Human
cuuuuguuugcccuugaacagggcaguguugu

SEQ ID NO: 414511 - RNA, 32 nt, Human
cuuuuguuuucagcucuggagcacagacuuua

SEQ ID NO: 414512 - RNA, 32 nt, Human
cuuuuguuuucauuugaaguuuugccauuugu

SEQ ID NO: 414513 - RNA, 32 nt, Human
cuuuuuaaacauuugcauuugcuggacaauug

SEQ ID NO: 414514 - RNA, 32 nt, Human
cuuuuuaaaugacugaaugaaguccuucgugg

SEQ ID NO: 414515 - RNA, 32 nt, Human
cuuuuuaaauuucccagggaaggagaccguca

SEQ ID NO: 414516 - RNA, 32 nt, Human
cuuuuuaacugcacuuucuuuauauaaucguu

SEQ ID NO: 414517 - RNA, 32 nt, Human
cuuuuuaagagugccugcauccuccguuugcg

SEQ ID NO: 414518 - RNA, 32 nt, Human
cuuuuuaaguaauguggaagaaaaugguuuau

SEQ ID NO: 414519 - RNA, 19 nt, Human
cuuuuuaaugcucuuucaa

SEQ ID NO: 414520 - RNA, 32 nt, Human
cuuuuuacaaaacuauuuacuguaguguauug

SEQ ID NO: 414521 - RNA, 32 nt, Human
cuuuuuacagaagucagaccugcaccacaguc

SEQ ID NO: 414522 - RNA, 32 nt, Human
cuuuuuacauauauuuguuucauuucugcaga

SEQ ID NO: 414523 - RNA, 32 nt, Human
cuuuuuacuuuuucuuuugcuuuuucucggca

SEQ ID NO: 414524 - RNA, 32 nt, Human
cuuuuuagaggaaauucacucccucguaagca

SEQ ID NO: 414525 - RNA, 31 nt, Human
cuuuuuagcaagagagaaacaagaaugcaag

SEQ ID NO: 414526 - RNA, 32 nt, Human
cuuuuuagcaagagagaaacaagaaugcaagu

SEQ ID NO: 414527 - RNA, 32 nt, Human
cuuuuuagcauuagcugccaaaugacuucaaa

SEQ ID NO: 414528 - RNA, 32 nt, Human
cuuuuuagcauuccuuucugcuuauccuucuu

SEQ ID NO: 414529 - RNA, 32 nt, Human
cuuuuuagccccggcuguggaaagauagugag

SEQ ID NO: 414530 - RNA, 32 nt, Human
cuuuuuaggccaccuccaaggacucuaaaagg

SEQ ID NO: 414531 - RNA, 24 nt, Human
cuuuuuagggccaggcaggugccu

SEQ ID NO: 414532 - RNA, 32 nt, Human
cuuuuuaguaacccuucuuucugaacccaggg

SEQ ID NO: 414533 - RNA, 19 nt, Human
cuuuuuauacccucuggca

SEQ ID NO: 414534 - RNA, 32 nt, Human
cuuuuuaucagccucuggcugcagaagagcag

SEQ ID NO: 414535 - RNA, 32 nt, Human
cuuuuuaucugaauuaucauuuagucaaggua

SEQ ID NO: 414536 - RNA, 32 nt, Human
cuuuuuauucucauuacuucucuuucaguggc

SEQ ID NO: 414537 - RNA, 32 nt, Human
cuuuuucacacagcuaggucuuuucagaagug

SEQ ID NO: 414538 - RNA, 32 nt, Human
cuuuuucacuugaccacccuugcucauugguu

SEQ ID NO: 414539 - RNA, 32 nt, Human
cuuuuucagcaucacuucaccuguggacucuu

SEQ ID NO: 414540 - RNA, 32 nt, Human
cuuuuucaguucccuucuuccuucccucucaa

SEQ ID NO: 414541 - RNA, 28 nt, Human
cuuuuuccaagugcuuguuuuauuuauu

SEQ ID NO: 414542 - RNA, 32 nt, Human
cuuuuuccacacacaagagcucagggauccuc

SEQ ID NO: 414543 - RNA, 32 nt, Human
cuuuuuccacucuugacucacucugagccuuc

SEQ ID NO: 414544 - RNA, 32 nt, Human
cuuuuuccagccuucaguucuagugcacucug

SEQ ID NO: 414545 - RNA, 32 nt, Human
cuuuuuccaggccuccagguugcacauuuauu

SEQ ID NO: 414546 - RNA, 32 nt, Human
cuuuuucccauggcuucauuucuuccucacca

SEQ ID NO: 414547 - RNA, 32 nt, Human
cuuuuuccccuuccaccucucuuugccuguag

SEQ ID NO: 414548 - RNA, 32 nt, Human
cuuuuucccucacuugcaucaauaaagcuucu

SEQ ID NO: 414549 - RNA, 32 nt, Human
cuuuuucccucaguuaguggggagacuagcac

SEQ ID NO: 414550 - RNA, 32 nt, Human
cuuuuucccugagagacuacacugggaaccaa

SEQ ID NO: 414551 - RNA, 32 nt, Human
cuuuuucccuugccaguucccuggugacaguu

SEQ ID NO: 414552 - RNA, 32 nt, Human
cuuuuucccuuucccccuuuauuuuccuccuu

SEQ ID NO: 414553 - RNA, 32 nt, Human
cuuuuucccuuuccuuuccuuucauuuucuuu

SEQ ID NO: 414554 - RNA, 32 nt, Human
cuuuuucccuuuggcccugccccugcugagac

SEQ ID NO: 414555 - RNA, 32 nt, Human
cuuuuuccucaccuuuucaaaugcucgcaacu

SEQ ID NO: 414556 - RNA, 32 nt, Human
cuuuuuccucagcugucuuccaaguauuauuu

SEQ ID NO: 414557 - RNA, 32 nt, Human
cuuuuuccuccccucagaagcuccucucuggc

SEQ ID NO: 414558 - RNA, 32 nt, Human
cuuuuuccuccccuccuccuccucuccaauuc

SEQ ID NO: 414559 - RNA, 32 nt, Human
cuuuuuccuccccuucccucauucuuugccuc

SEQ ID NO: 414560 - RNA, 32 nt, Human
cuuuuuccuccuccuccucucccggccccggc

SEQ ID NO: 414561 - RNA, 32 nt, Human
cuuuuuccugcuagccugucccccucucugga

SEQ ID NO: 414562 - RNA, 32 nt, Human
cuuuuuccuucccaaaccucuauuuuaccucc

SEQ ID NO: 414563 - RNA, 32 nt, Human
cuuuuuccuugcaaauuauaauguuuuugaua

SEQ ID NO: 414564 - RNA, 32 nt, Human
cuuuuuccuuuccugauuccuuguguaugugu

SEQ ID NO: 414565 - RNA, 32 nt, Human
cuuuuuccuuucuucauuuuucugccuggaau

SEQ ID NO: 414566 - RNA, 31 nt, Human
cuuuuucgccucccagggccugugcgaucug

SEQ ID NO: 414567 - RNA, 32 nt, Human
cuuuuucgggacucuguauucccucuugggcu

SEQ ID NO: 414568 - RNA, 32 nt, Human
cuuuuucgguggggaugugaccagcuuugaac

SEQ ID NO: 414569 - RNA, 32 nt, Human
cuuuuucuaaugacuacaccugaaaaguauca

SEQ ID NO: 414570 - RNA, 32 nt, Human
cuuuuucuagucuucauaauuucuucacucaa

SEQ ID NO: 414571 - RNA, 32 nt, Human
cuuuuucucaggacaucucuggcaggugcauu

SEQ ID NO: 414572 - RNA, 32 nt, Human
cuuuuucuccaccucucucaauacauuccuca

SEQ ID NO: 414573 - RNA, 32 nt, Human
cuuuuucucccuccuccucaaguuccuuuuug

SEQ ID NO: 414574 - RNA, 32 nt, Human
cuuuuucucccuucccugaaagggccucuggu

SEQ ID NO: 414575 - RNA, 31 nt, Human
cuuuuucuccucucugagccuuugucuauug

SEQ ID NO: 414576 - RNA, 32 nt, Human
cuuuuucucuaaggcaggaaaggaaagacauu

SEQ ID NO: 414577 - RNA, 32 nt, Human
cuuuuucucuucgccgucuccugcuccucucc

SEQ ID NO: 414578 - RNA, 32 nt, Human
cuuuuucugcgcacucaggucgugacacccca

SEQ ID NO: 414579 - RNA, 32 nt, Human
cuuuuucuggaaaaucagggagacauggguaa

SEQ ID NO: 414580 - RNA, 32 nt, Human
cuuuuucuguagaggcaccacagggagguggg

SEQ ID NO: 414581 - RNA, 32 nt, Human
cuuuuucuguagccaggucuucccaaggauuu

SEQ ID NO: 414582 - RNA, 32 nt, Human
cuuuuucuguauucuccucugaccagagacaa

SEQ ID NO: 414583 - RNA, 18 nt, Human
cuuuuucuguucuuucaa

SEQ ID NO: 414584 - RNA, 32 nt, Human
cuuuuucuuaauggaagaagauauuuaauauc

SEQ ID NO: 414585 - RNA, 32 nt, Human
cuuuuucuuagcaaucuuuucuucaauauacu

SEQ ID NO: 414586 - RNA, 32 nt, Human
cuuuuucuucaaggagcacuagcugcugggga

SEQ ID NO: 414587 - RNA, 32 nt, Human
cuuuuucuucuccuccuccuccuuccuuccuc

SEQ ID NO: 414588 - RNA, 32 nt, Human
cuuuuucuuucucuugcuguuuccuucuucuu

SEQ ID NO: 414589 - RNA, 32 nt, Human
cuuuuucuuugguggcugcaggauuuuugcug

SEQ ID NO: 414590 - RNA, 32 nt, Human
cuuuuucuuuuccccucuaaaccuguuucuga

SEQ ID NO: 414591 - RNA, 32 nt, Human
cuuuuugaaaguugccuuuucucuccacccuu

SEQ ID NO: 414592 - RNA, 32 nt, Human
cuuuuugacagaaauccuaugcagcccaugua

SEQ ID NO: 414593 - RNA, 24 nt, Human
cuuuuugacaguaaacuucugccu

SEQ ID NO: 414594 - RNA, 21 nt, Human
cuuuuugaccuuucccaagga

SEQ ID NO: 414595 - RNA, 32 nt, Human
cuuuuugagacagggucuuacucuugucaccc

SEQ ID NO: 414596 - RNA, 32 nt, Human
cuuuuugagauggagucucgcucucuugacca

SEQ ID NO: 414597 - RNA, 32 nt, Human
cuuuuugagauggagucucgcucugucgccca

SEQ ID NO: 414598 - RNA, 32 nt, Human
cuuuuugagcuuugcaaguuguguacauaaua

SEQ ID NO: 414599 - RNA, 32 nt, Human
cuuuuugcacacacacgaauacaaagagccau

SEQ ID NO: 414600 - RNA, 32 nt, Human
cuuuuugcacacauuacaggugguguguucug

SEQ ID NO: 414601 - RNA, 32 nt, Human
cuuuuugcacaggcugagugcaaugccgugau

SEQ ID NO: 414602 - RNA, 32 nt, Human
cuuuuugcaccacuguucuagccuuuaaugcc

SEQ ID NO: 414603 - RNA, 32 nt, Human
cuuuuugcacucuugugacuaauuucuauaac

SEQ ID NO: 414604 - RNA, 32 nt, Human
cuuuuugcaggcccauggucagcucuggucua

SEQ ID NO: 414605 - RNA, 32 nt, Human
cuuuuugcaucuuaacugcaguuaauuuuccu

SEQ ID NO: 414606 - RNA, 32 nt, Human
cuuuuugcccaggcuggagugcaguggcgcca

SEQ ID NO: 414607 - RNA, 32 nt, Human
cuuuuugcccauauuuacuuccaucuuugggg

SEQ ID NO: 414608 - RNA, 32 nt, Human
cuuuuugccuaggcuggagugcagugguacaa

SEQ ID NO: 414609 - RNA, 32 nt, Human
cuuuuugccugaugccauuuuauugacagaca

SEQ ID NO: 414610 - RNA, 32 nt, Human
cuuuuugcuucaauaaaacaauagcuggcucu

SEQ ID NO: 414611 - RNA, 25 nt, Human
cuuuuugcuuccucaguuuuuauca

SEQ ID NO: 414612 - RNA, 32 nt, Human
cuuuuugcuuugcuuuggguucuugaacaggu

SEQ ID NO: 414613 - RNA, 32 nt, Human
cuuuuuggaacaaguguucagagcagacagaa

SEQ ID NO: 414614 - RNA, 32 nt, Human
cuuuuuggacacacaaauuaucuuaaaacucc

SEQ ID NO: 414615 - RNA, 31 nt, Human
cuuuuuggcaaaggcaucaagcauucaaaga

SEQ ID NO: 414616 - RNA, 31 nt, Human
cuuuuuggccucucugagcaguguuccuuuu

SEQ ID NO: 414617 - RNA, 32 nt, Human
cuuuuuggccugcucuccccagcucuuuucca

SEQ ID NO: 414618 - RNA, 32 nt, Human
cuuuuugggaccaucacugagagucaggaguu

SEQ ID NO: 414619 - RNA, 32 nt, Human
cuuuuugggggugaaauuggcagaugccugag

SEQ ID NO: 414620 - RNA, 32 nt, Human
cuuuuugguguaaaucuggacucuaauucugu

SEQ ID NO: 414621 - RNA, 32 nt, Human
cuuuuuggugucccgacauaccuacgcccccg

SEQ ID NO: 414622 - RNA, 32 nt, Human
cuuuuuggugugcacacacauuucaugugcag

SEQ ID NO: 414623 - RNA, 32 nt, Human
cuuuuugguucuuucagcuaccauaauaaccc

SEQ ID NO: 414624 - RNA, 32 nt, Human
cuuuuuguaacucagcuuaguaaugaagccac

SEQ ID NO: 414625 - RNA, 31 nt, Human
cuuuuuguaagagaugaaaaagaauugacac

SEQ ID NO: 414626 - RNA, 32 nt, Human
cuuuuuguaugaagcaugccucaguuuccuca

SEQ ID NO: 414627 - RNA, 32 nt, Human
cuuuuugucaggacaauuaggauuguaaugcu

SEQ ID NO: 414628 - RNA, 32 nt, Human
cuuuuuguccaccucuccuuuaucucuguuuc

SEQ ID NO: 414629 - RNA, 32 nt, Human
cuuuuugugaugacaagauggcugacagucac

SEQ ID NO: 414630 - RNA, 32 nt, Human
cuuuuugugugugccaauuuuguuaucacauc

SEQ ID NO: 414631 - RNA, 32 nt, Human
cuuuuuguguucagcccagcagucugccuuca

SEQ ID NO: 414632 - RNA, 32 nt, Human
cuuuuuguguuuuuauaacugucaccaguuag

SEQ ID NO: 414633 - RNA, 32 nt, Human
cuuuuuguucagauggggauuugcuaaagguu

SEQ ID NO: 414634 - RNA, 32 nt, Human
cuuuuuguucugccucucaaacuccugaccuc

SEQ ID NO: 414635 - RNA, 23 nt, Human
cuuuuuguucuuagucuuuuucu

SEQ ID NO: 414636 - RNA, 32 nt, Human
cuuuuuguucuuuuucaguuuuuaaccacuuu

SEQ ID NO: 414637 - RNA, 32 nt, Human
cuuuuuguuggggguggggugggggcagagga

SEQ ID NO: 414638 - RNA, 32 nt, Human
cuuuuuguuucugccuagucucugugcccugu

SEQ ID NO: 414639 - RNA, 32 nt, Human
cuuuuuguuuugcccucuggguguuuucuuug

SEQ ID NO: 414640 - RNA, 24 nt, Human
cuuuuuucccaugucuuugcaaua

SEQ ID NO: 414641 - RNA, 22 nt, Human
cuuuuuugauuuugcugacuuu

SEQ ID NO: 414642 - RNA, 23 nt, Human
cuuuuuugggcugggugcagugg

SEQ ID NO: 414643 - RNA, 21 nt, Human
gaaaaaauggcgugccuugug

SEQ ID NO: 414644 - RNA, 32 nt, Human
gaaaaacaaaacaaaaccacaugugaaguguu

SEQ ID NO: 414645 - RNA, 32 nt, Human
gaaaaacaaggcaggauacaaguuucagacaa

SEQ ID NO: 414646 - RNA, 32 nt, Human
gaaaaacacagcccaagaauuucaugaagcau

SEQ ID NO: 414647 - RNA, 32 nt, Human
gaaaaacacaugcuguucccaggccucaagau

SEQ ID NO: 414648 - RNA, 32 nt, Human
gaaaaacacuuuacuacugcagaaggaagaaa

SEQ ID NO: 414649 - RNA, 32 nt, Human
gaaaaacagaacacaaaagagcagagcaccua

SEQ ID NO: 414650 - RNA, 32 nt, Human
gaaaaacagccauaggcccuuucaguggccgg

SEQ ID NO: 414651 - RNA, 32 nt, Human
gaaaaacaggaaaguugggaagcggggguagg

SEQ ID NO: 414652 - RNA, 32 nt, Human
gaaaaacagugguuuucugucccuggaaauga

SEQ ID NO: 414653 - RNA, 32 nt, Human
gaaaaacauagaugggacagguaaaugaaaug

SEQ ID NO: 414654 - RNA, 32 nt, Human
gaaaaacaucauuacuggaaaccuauuaaaca

SEQ ID NO: 414655 - RNA, 32 nt, Human
gaaaaacaugaaaaggagagacuggccuagcc

SEQ ID NO: 414656 - RNA, 32 nt, Human
gaaaaaccaggccauacagagauaggagccga

SEQ ID NO: 414657 - RNA, 32 nt, Human
gaaaaaccauuuugaauaggauggaaucuaac

SEQ ID NO: 414658 - RNA, 32 nt, Human
gaaaaacccucccaggcaucccauaccagcac

SEQ ID NO: 414659 - RNA, 32 nt, Human
gaaaaaccucaccaguuuuacuaucaaagcca

SEQ ID NO: 414660 - RNA, 32 nt, Human
gaaaaaccuccccuucugaggcugcuuuccca

SEQ ID NO: 414661 - RNA, 32 nt, Human
gaaaaaccuggccauuugcugccucuaauucc

SEQ ID NO: 414662 - RNA, 32 nt, Human
gaaaaaccuucucuucagaaaagaagaaaaau

SEQ ID NO: 414663 - RNA, 32 nt, Human
gaaaaacggaggcucagagaggacguggaauu

SEQ ID NO: 414664 - RNA, 32 nt, Human
gaaaaacggguucaaaccccacuucugccacc

SEQ ID NO: 414665 - RNA, 32 nt, Human
gaaaaacuacagccagagguaaggcuggaaau

SEQ ID NO: 414666 - RNA, 32 nt, Human
gaaaaacucaauccucccaugaaaaucaguuc

SEQ ID NO: 414667 - RNA, 32 nt, Human
gaaaaacucaucaccacaugccuucacuccag

SEQ ID NO: 414668 - RNA, 32 nt, Human
gaaaaacucgcucuuggcuuucggcuuggagg

SEQ ID NO: 414669 - RNA, 32 nt, Human
gaaaaacugggagagucaaaagugagcagaag

SEQ ID NO: 414670 - RNA, 32 nt, Human
gaaaaacugguguucugaaauagccuaacauu

SEQ ID NO: 414671 - RNA, 32 nt, Human
gaaaaacuucaauuuugagaauggcaucugua

SEQ ID NO: 414672 - RNA, 32 nt, Human
gaaaaacuucaugcaugaaugagcauucccag

SEQ ID NO: 414673 - RNA, 18 nt, Human
gaaaaacuucucuggaga

SEQ ID NO: 414674 - RNA, 32 nt, Human
gaaaaagaaaacuacaucacauaccaggggag

SEQ ID NO: 414675 - RNA, 23 nt, Human
gaaaaagaaaagaaaccgaugga

SEQ ID NO: 414676 - RNA, 22 nt, Human
gaaaaagaaacaugaagucaug

SEQ ID NO: 414677 - RNA, 32 nt, Human
gaaaaagaaagccuaugggaaauggcugugcu

SEQ ID NO: 414678 - RNA, 32 nt, Human
gaaaaagaaagcuucucucugagcauccagau

SEQ ID NO: 414679 - RNA, 32 nt, Human
gaaaaagaaauguacuuguuaggaaguagcuu

SEQ ID NO: 414680 - RNA, 32 nt, Human
gaaaaagaagaaaauuaggacugauucagaag

SEQ ID NO: 414681 - RNA, 21 nt, Human
gaaaaagacagaagggcccgg

SEQ ID NO: 414682 - RNA, 32 nt, Human
gaaaaagacucugcaugggaauggccugccuu

SEQ ID NO: 414683 - RNA, 32 nt, Human
gaaaaagagagggagaugcagcagcugcugag

SEQ ID NO: 414684 - RNA, 32 nt, Human
gaaaaagagagggagguauggacugggggcca

SEQ ID NO: 414685 - RNA, 32 nt, Human
gaaaaagagagggggaaaaguagaucacuuau

SEQ ID NO: 414686 - RNA, 32 nt, Human
gaaaaagaguugagcaggauucucuuaggcua

SEQ ID NO: 414687 - RNA, 32 nt, Human
gaaaaagauauauucagaaagacagagugaua

SEQ ID NO: 414688 - RNA, 32 nt, Human
gaaaaagauaugguuugugaacuggggcauca

SEQ ID NO: 414689 - RNA, 32 nt, Human
gaaaaagcaaaaaggucuguccguuacuuuug

SEQ ID NO: 414690 - RNA, 31 nt, Human
gaaaaagcacuuuucauuuuuguaaguagau

SEQ ID NO: 414691 - RNA, 21 nt, Human
gaaaaagcaggaggugccagg

SEQ ID NO: 414692 - RNA, 32 nt, Human
gaaaaagcccagaagagaaggaagaggaaagc

SEQ ID NO: 414693 - RNA, 32 nt, Human
gaaaaagccucacagauuugaagaacuggacc

SEQ ID NO: 414694 - RNA, 32 nt, Human
gaaaaagccuuccacccuccugucuggcuuua

SEQ ID NO: 414695 - RNA, 32 nt, Human
gaaaaagcuccagagaccucacagcauuguag

SEQ ID NO: 414696 - RNA, 32 nt, Human
gaaaaagcugacuccauuuuugucccuggcgg

SEQ ID NO: 414697 - RNA, 32 nt, Human
gaaaaagcugggugcagugaaaugauucaugu

SEQ ID NO: 414698 - RNA, 32 nt, Human
gaaaaaggaaaguagaaggcagcugcuggccu

SEQ ID NO: 414699 - RNA, 32 nt, Human
gaaaaaggagaaaagggaaaagcagaaaggaa

SEQ ID NO: 414700 - RNA, 32 nt, Human
gaaaaaggagcugcaugcuucacuggaguuga

SEQ ID NO: 414701 - RNA, 32 nt, Human
gaaaaaggaggcagcaggcaagagaccuggag

SEQ ID NO: 414702 - RNA, 32 nt, Human
gaaaaaggauggacccagcacuccagggagaa

SEQ ID NO: 414703 - RNA, 23 nt, Human
gaaaaaggauuuacuuguugggg

SEQ ID NO: 414704 - RNA, 32 nt, Human
gaaaaaggcccagagcuguggccggacagagu

SEQ ID NO: 414705 - RNA, 32 nt, Human
gaaaaaggccugauuacagaaaaauaccauua

SEQ ID NO: 414706 - RNA, 32 nt, Human
gaaaaagggcugcccauguugugcuacacuau

SEQ ID NO: 414707 - RNA, 32 nt, Human
gaaaaagguuggagcaaggcuuuucacuacuu

SEQ ID NO: 414708 - RNA, 21 nt, Human
gaaaaaguaggcugggcgcgg

SEQ ID NO: 414709 - RNA, 32 nt, Human
gaaaaagucugucagaaccauguacaacaucc

SEQ ID NO: 414710 - RNA, 21 nt, Human
gaaaaagugaaaccagcccgg

SEQ ID NO: 414711 - RNA, 23 nt, Human
gaaaaagugggaauugacagccc

SEQ ID NO: 414712 - RNA, 24 nt, Human
gaaaaaguguaagagaaggccggg

SEQ ID NO: 414713 - RNA, 32 nt, Human
gaaaaaguuauucaggagaguauguugaucuu

SEQ ID NO: 414714 - RNA, 32 nt, Human
gaaaaaguucaacccaggucuuguauccugug

SEQ ID NO: 414715 - RNA, 18 nt, Human
gaaaaaguugcagucuca

SEQ ID NO: 414716 - RNA, 32 nt, Human
gaaaaaguugcccucaagccugaccuggaacc

SEQ ID NO: 414717 - RNA, 32 nt, Human
gaaaaaguuuaaaagaaauucugacagaugac

SEQ ID NO: 414718 - RNA, 32 nt, Human
gaaaaauaaaugccucauaaaugauaguacaa

SEQ ID NO: 414719 - RNA, 32 nt, Human
gaaaaauaagaaguauuacaacagaaaaaccu

SEQ ID NO: 414720 - RNA, 32 nt, Human
gaaaaauacauccaaauaaagacuuuauuauu

SEQ ID NO: 414721 - RNA, 32 nt, Human
gaaaaauaccguuugggaccaggcuggccuag

SEQ ID NO: 414722 - RNA, 32 nt, Human
gaaaaauacuuccuaggccgggcacagugguu

SEQ ID NO: 414723 - RNA, 32 nt, Human
gaaaaauagacccauucauuguguacauucac

SEQ ID NO: 414724 - RNA, 32 nt, Human
gaaaaauagcaacuauucauuuguucacaaca

SEQ ID NO: 414725 - RNA, 32 nt, Human
gaaaaauaggcacagaguaaagacuuguaagu

SEQ ID NO: 414726 - RNA, 32 nt, Human
gaaaaauaucuccacucuccccauuccuguuc

SEQ ID NO: 414727 - RNA, 32 nt, Human
gaaaaauaugaccacacuccagcugggaucac

SEQ ID NO: 414728 - RNA, 32 nt, Human
gaaaaaucacacaggcugggugcaguggcuca

SEQ ID NO: 414729 - RNA, 32 nt, Human
gaaaaaucaguguagaagaauaccucaugugc

SEQ ID NO: 414730 - RNA, 32 nt, Human
gaaaaaucaugcuggagggaagcccuacacau

SEQ ID NO: 414731 - RNA, 32 nt, Human
gaaaaaucauuuucuuugucugagucucuggu

SEQ ID NO: 414732 - RNA, 32 nt, Human
gaaaaauccacccacaaaugaauuaucaggag

SEQ ID NO: 414733 - RNA, 32 nt, Human
gaaaaaucccuaagaccugaccugccuacucc

SEQ ID NO: 414734 - RNA, 32 nt, Human
gaaaaauccuaccaguguaagcaaugucggaa

SEQ ID NO: 414735 - RNA, 32 nt, Human
gaaaaaucuuugucauucugucaguuuuuaaa

SEQ ID NO: 414736 - RNA, 30 nt, Human
gaaaaaugaaaccugaugaaacuccuaugu

SEQ ID NO: 414737 - RNA, 32 nt, Human
gaaaaaugaauagagccucagagagcuguggc

SEQ ID NO: 414738 - RNA, 32 nt, Human
gaaaaaugagaucagaaguggagauguugggg

SEQ ID NO: 414739 - RNA, 32 nt, Human
gaaaaaugaggaugaauaacaaguuuggcaaa

SEQ ID NO: 414740 - RNA, 32 nt, Human
gaaaaaugaggauugccuuccuuguaugcgcu

SEQ ID NO: 414741 - RNA, 32 nt, Human
gaaaaaugagggagagagaaaggguggccacu

SEQ ID NO: 414742 - RNA, 30 nt, Human
gaaaaaugcaggaagaggagggggaaaguu

SEQ ID NO: 414743 - RNA, 31 nt, Human
gaaaaaugcucaaucucagcuaacauuccau

SEQ ID NO: 414744 - RNA, 32 nt, Human
gaaaaauggaaagagaaaaagauggaauaucu

SEQ ID NO: 414745 - RNA, 32 nt, Human
gaaaaauggaagacuugugacgcagacgacag

SEQ ID NO: 414746 - RNA, 32 nt, Human
gaaaaauggagcugccccagugcuccuggacc

SEQ ID NO: 414747 - RNA, 32 nt, Human
gaaaaauggccaaaaaucauccuuuccacuug

SEQ ID NO: 414748 - RNA, 32 nt, Human
gaaaaauggucugucauaaauuauuuccccgg

SEQ ID NO: 414749 - RNA, 32 nt, Human
gaaaaaugucuauuuugaucccuugccuauuu

SEQ ID NO: 414750 - RNA, 32 nt, Human
gaaaaaugucuuugcuccuuggcagcuaccag

SEQ ID NO: 414751 - RNA, 19 nt, Human
gaaaaaugugcaaagccuu

SEQ ID NO: 414752 - RNA, 32 nt, Human
gaaaaaugugcaaaggaaacuauugucucgcu

SEQ ID NO: 414753 - RNA, 32 nt, Human
gaaaaauguuaacauuuuguuccuacagguua

SEQ ID NO: 414754 - RNA, 32 nt, Human
gaaaaauguuccccauugaauuccuguuuuag

SEQ ID NO: 414755 - RNA, 32 nt, Human
gaaaaauguuccccguugaauuccuguuuuag

SEQ ID NO: 414756 - RNA, 32 nt, Human
gaaaaauguuuuguacccaucuggaaaaccaa

SEQ ID NO: 414757 - RNA, 32 nt, Human
gaaaaauuaauguuauuaaauaguuugcaaau

SEQ ID NO: 414758 - RNA, 32 nt, Human
gaaaaauuacucuucuuuaaugcuaaguauug

SEQ ID NO: 414759 - RNA, 32 nt, Human
gaaaaauucaacaaaauccuguuucucagugg

SEQ ID NO: 414760 - RNA, 32 nt, Human
gaaaaauuccagaaauaaaacaauucauaagu

SEQ ID NO: 414761 - RNA, 32 nt, Human
gaaaaauuccaucuucauuacugccuuaugac

SEQ ID NO: 414762 - RNA, 32 nt, Human
gaaaaauuccuaagaaucagaguagaaauaaa

SEQ ID NO: 414763 - RNA, 32 nt, Human
gaaaaauucuaccuucuuuuauggucaaacug

SEQ ID NO: 414764 - RNA, 32 nt, Human
gaaaaauucucaaagccugaaagaaaaucugu

SEQ ID NO: 414765 - RNA, 18 nt, Human
gaaaaauucucucuggga

SEQ ID NO: 414766 - RNA, 32 nt, Human
gaaaaauuggcuagaugugguggugcacgccu

SEQ ID NO: 414767 - RNA, 32 nt, Human
gaaaaauuuccagaugaaaaggcagcuuauuu

SEQ ID NO: 414768 - RNA, 32 nt, Human
gaaaaauuuguaggugagaucaccuccuuugc

SEQ ID NO: 414769 - RNA, 32 nt, Human
gaaaaauuuuggugaguucugcacauuucccc

SEQ ID NO: 414770 - RNA, 22 nt, Human
gaaaacaaaacaaaacaaaaca

SEQ ID NO: 414771 - RNA, 32 nt, Human
gaaaacaaaacaacccagagggcuguguucca

SEQ ID NO: 414772 - RNA, 32 nt, Human
gaaaacaaaacaccacaaaacagacuucacua

SEQ ID NO: 414773 - RNA, 32 nt, Human
gaaaacaaaacucagacucacucuucagucau

SEQ ID NO: 414774 - RNA, 32 nt, Human
gaaaacaaaaugagcggggacacagaaaccaa

SEQ ID NO: 414775 - RNA, 32 nt, Human
gaaaacaaaaugccaguugcauugguuucccc

SEQ ID NO: 414776 - RNA, 32 nt, Human
gaaaacaaacacaucaauaucucuuccaaaug

SEQ ID NO: 414777 - RNA, 32 nt, Human
gaaaacaaagaaguguucaaagagcacagacu

SEQ ID NO: 414778 - RNA, 32 nt, Human
gaaaacaaagaauguuuugagaauguguuaau

SEQ ID NO: 414779 - RNA, 31 nt, Human
gaaaacaaaggcucuuuucagagccauucua

SEQ ID NO: 414780 - RNA, 19 nt, Human
gaaaacaacaaaacaaaca

SEQ ID NO: 414781 - RNA, 32 nt, Human
gaaaacaacuccaguucucugccugcaccaug

SEQ ID NO: 414782 - RNA, 32 nt, Human
gaaaacaagccugagggaggaggcaggaguug

SEQ ID NO: 414783 - RNA, 32 nt, Human
gaaaacaagcugcauggccucucuccagcucu

SEQ ID NO: 414784 - RNA, 32 nt, Human
gaaaacaaggagaccuggggugggugugguug

SEQ ID NO: 414785 - RNA, 32 nt, Human
gaaaacaaggcagcagcgcaccugccaccccu

SEQ ID NO: 414786 - RNA, 32 nt, Human
gaaaacaauuuugccgccccugccuggaaacu

SEQ ID NO: 414787 - RNA, 32 nt, Human
gaaaacacaaaugccuuauuuauacagaagca

SEQ ID NO: 414788 - RNA, 32 nt, Human
gaaaacacacauaugaggaguugcauuauuuu

SEQ ID NO: 414789 - RNA, 32 nt, Human
gaaaacacaggcuuuugcacauccaaugucuc

SEQ ID NO: 414790 - RNA, 32 nt, Human
gaaaacaccaugucauggaguguaggaaagag

SEQ ID NO: 414791 - RNA, 32 nt, Human
gaaaacaccuucauccaggcugggcgaggugg

SEQ ID NO: 414792 - RNA, 32 nt, Human
gaaaacacggaagaagucucuaugagaagagc

SEQ ID NO: 414793 - RNA, 32 nt, Human
gaaaacacuaagaauaaugucacugcaucagu

SEQ ID NO: 414794 - RNA, 32 nt, Human
gaaaacagaaaucugcaucucagccugagacg

SEQ ID NO: 414795 - RNA, 32 nt, Human
gaaaacagaacaucauuagaacaaaggacaga

SEQ ID NO: 414796 - RNA, 32 nt, Human
gaaaacagaacccaaaaggguaagugguuagu

SEQ ID NO: 414797 - RNA, 32 nt, Human
gaaaacagaagcaaaggagagcuugggggugg

SEQ ID NO: 414798 - RNA, 32 nt, Human
gaaaacagacuuguaaaaagcuuagaucauca

SEQ ID NO: 414799 - RNA, 32 nt, Human
gaaaacagaggcugaggcugggcacgguggcu

SEQ ID NO: 414800 - RNA, 17 nt, Human
gaaaacagccccagcca

SEQ ID NO: 414801 - RNA, 31 nt, Human
gaaaacaggaaacuggucaaaggcuccuaca

SEQ ID NO: 414802 - RNA, 32 nt, Human
gaaaacaggagguggagguugcagugagccga

SEQ ID NO: 414803 - RNA, 32 nt, Human
gaaaacaggcugggacaguggugcaugccagu

SEQ ID NO: 414804 - RNA, 32 nt, Human
gaaaacaggcugggcccgguggcucacuccug

SEQ ID NO: 414805 - RNA, 32 nt, Human
gaaaacagugggaugauguauuccaagugcug

SEQ ID NO: 414806 - RNA, 32 nt, Human
gaaaacaguuccucaaauuugaccccaaauuu

SEQ ID NO: 414807 - RNA, 32 nt, Human
gaaaacauaccugcccgcaguuggaguuggac

SEQ ID NO: 414808 - RNA, 32 nt, Human
gaaaacauauccucagcaauuucccaagaaac

SEQ ID NO: 414809 - RNA, 32 nt, Human
gaaaacaucaauauaucaccuaccaucauuuc

SEQ ID NO: 414810 - RNA, 32 nt, Human
gaaaacaucagccauuacauuacuuggcucug

SEQ ID NO: 414811 - RNA, 22 nt, Human
gaaaacaugguagaauuggaga

SEQ ID NO: 414812 - RNA, 32 nt, Human
gaaaacauucaaaaguucacaucccuguuugg

SEQ ID NO: 414813 - RNA, 32 nt, Human
gaaaacauuugauuaucaggacagaguagaag

SEQ ID NO: 414814 - RNA, 20 nt, Human
gaaaacauuugccucagcca

SEQ ID NO: 414815 - RNA, 32 nt, Human
gaaaacauuuuaaaauguguuuucacauuaaa

SEQ ID NO: 414816 - RNA, 32 nt, Human
gaaaaccaaaaccaaacgaaaugucuaaggaa

SEQ ID NO: 414817 - RNA, 32 nt, Human
gaaaaccaaaguguggguagaaaccccaaaug

SEQ ID NO: 414818 - RNA, 32 nt, Human
gaaaaccaaauuuaaaggcaugucuccagugc

SEQ ID NO: 414819 - RNA, 32 nt, Human
gaaaaccaacuaaggacucucaaaccauaccu

SEQ ID NO: 414820 - RNA, 23 nt, Human
gaaaaccaagacagaauugggaa

SEQ ID NO: 414821 - RNA, 32 nt, Human
gaaaaccaagugucagagccccuuccccuugu

SEQ ID NO: 414822 - RNA, 31 nt, Human
gaaaaccaaguguccggauggcaggggccag

SEQ ID NO: 414823 - RNA, 32 nt, Human
gaaaaccaccauauaucauaauucaacagagg

SEQ ID NO: 414824 - RNA, 32 nt, Human
gaaaaccaccucuguuuuccuugcucuauaca

SEQ ID NO: 414825 - RNA, 32 nt, Human
gaaaaccacugcaagccccaaggagccagcug

SEQ ID NO: 414826 - RNA, 32 nt, Human
gaaaaccagccaagcuuuauucacgacacacu

SEQ ID NO: 414827 - RNA, 32 nt, Human
gaaaaccagccaagcuuuauucaggacacacu

SEQ ID NO: 414828 - RNA, 32 nt, Human
gaaaaccagccacugcaaaacuuuauaaucaa

SEQ ID NO: 414829 - RNA, 25 nt, Human
gaaaaccagcggagagagggccggg

SEQ ID NO: 414830 - RNA, 32 nt, Human
gaaaaccagggggaugaguggcuuccauggag

SEQ ID NO: 414831 - RNA, 32 nt, Human
gaaaaccagucuccccuacucuggguggggaa

SEQ ID NO: 414832 - RNA, 32 nt, Human
gaaaaccaucuggggucccuuuuccagucccc

SEQ ID NO: 414833 - RNA, 32 nt, Human
gaaaaccauggacugaauggaccauuuuaugu

SEQ ID NO: 414834 - RNA, 32 nt, Human
gaaaaccauuucagaagccuggauuaaggcaa

SEQ ID NO: 414835 - RNA, 23 nt, Human
gaaaacccaaacaaaacaaaaca

SEQ ID NO: 414836 - RNA, 32 nt, Human
gaaaacccagcccuggcuguuuacucaggcuc

SEQ ID NO: 414837 - RNA, 21 nt, Human
gaaaaccccaagcauuuggaa

SEQ ID NO: 414838 - RNA, 32 nt, Human
gaaaaccccagcccuucucccauggcaggcua

SEQ ID NO: 414839 - RNA, 32 nt, Human
gaaaacccugaauaacuuuaugugccacugag

SEQ ID NO: 414840 - RNA, 32 nt, Human
gaaaacccugccuuaccucucccuucccccua

SEQ ID NO: 414841 - RNA, 32 nt, Human
gaaaacccuggaguggagggaggcucagagau

SEQ ID NO: 414842 - RNA, 32 nt, Human
gaaaaccgcaggccugucgccuaggcggccac

SEQ ID NO: 414843 - RNA, 32 nt, Human
gaaaaccguccaggaagggaggcugcagcccc

SEQ ID NO: 414844 - RNA, 32 nt, Human
gaaaaccuaaacaagccucuugcucaguaaag

SEQ ID NO: 414845 - RNA, 32 nt, Human
gaaaaccuaagccucccucucucuccggcacc

SEQ ID NO: 414846 - RNA, 32 nt, Human
gaaaaccucuauacaggauagccaacaauaaa

SEQ ID NO: 414847 - RNA, 32 nt, Human
gaaaaccugcauccucugggcuuguuaacuug

SEQ ID NO: 414848 - RNA, 32 nt, Human
gaaaaccugccucucauuuuguuuguaaagaa

SEQ ID NO: 414849 - RNA, 32 nt, Human
gaaaaccugccugagcguggauggugcaugca

SEQ ID NO: 414850 - RNA, 32 nt, Human
gaaaaccugcucugcugaugucgaauuccuug

SEQ ID NO: 414851 - RNA, 32 nt, Human
gaaaaccugcuuuguagaugcagagagaagcu

SEQ ID NO: 414852 - RNA, 24 nt, Human
gaaaaccuggugacugauauaguu

SEQ ID NO: 414853 - RNA, 32 nt, Human
gaaaaccuucucccaggagucaaaacccuuug

SEQ ID NO: 414854 - RNA, 32 nt, Human
gaaaaccuuuagagaagaagcugcuggcugag

SEQ ID NO: 414855 - RNA, 32 nt, Human
gaaaacgaaaaccuguucucuccuucauugug

SEQ ID NO: 414856 - RNA, 32 nt, Human
gaaaacgaccgagaccgaagauuggcuacugu

SEQ ID NO: 414857 - RNA, 32 nt, Human
gaaaacgcgccaaguuccccucgguggcggag

SEQ ID NO: 414858 - RNA, 32 nt, Human
gaaaacggaagcaggguucuugccugguagcu

SEQ ID NO: 414859 - RNA, 21 nt, Human
gaaaacggggagagaggagcc

SEQ ID NO: 414860 - RNA, 32 nt, Human
gaaaacggggucuguggcgguacucugaacaa

SEQ ID NO: 414861 - RNA, 32 nt, Human
gaaaacgguaacucaagaggacagaggcuggu

SEQ ID NO: 414862 - RNA, 32 nt, Human
gaaaacuaaacacacacauaaacaguuauaag

SEQ ID NO: 414863 - RNA, 32 nt, Human
gaaaacuaauaugccggcguuuaagccugugc

SEQ ID NO: 414864 - RNA, 32 nt, Human
gaaaacuauuccaggacuaauucuuaaucggc

SEQ ID NO: 414865 - RNA, 32 nt, Human
gaaaacucaagcugcaccauaaagcuaaagga

SEQ ID NO: 414866 - RNA, 32 nt, Human
gaaaacucaaguccgguggaaguggcuggaag

SEQ ID NO: 414867 - RNA, 32 nt, Human
gaaaacucaauaccaucaucucuuaucucuau

SEQ ID NO: 414868 - RNA, 32 nt, Human
gaaaacucacugccuuuaccuacuagaauuuc

SEQ ID NO: 414869 - RNA, 32 nt, Human
gaaaacucagagagggucuucguugcucaguc

SEQ ID NO: 414870 - RNA, 32 nt, Human
gaaaacucaggaguucaagaccagccuaggca

SEQ ID NO: 414871 - RNA, 32 nt, Human
gaaaacuccagccauccuggaguugauauuca

SEQ ID NO: 414872 - RNA, 20 nt, Human
gaaaacucccagcucugcca

SEQ ID NO: 414873 - RNA, 32 nt, Human
gaaaacuccuuugacagagauuugguuuucac

SEQ ID NO: 414874 - RNA, 32 nt, Human
gaaaacucguuuucugcucccuucccucgucc

SEQ ID NO: 414875 - RNA, 32 nt, Human
gaaaacucuagauuuuucucauaucaggugau

SEQ ID NO: 414876 - RNA, 32 nt, Human
gaaaacucuggaauggagaggcuggcgacugg

SEQ ID NO: 414877 - RNA, 32 nt, Human
gaaaacucuucucaagaaaaucuaugugcaga

SEQ ID NO: 414878 - RNA, 32 nt, Human
gaaaacugaagcaccuucccuaaagaaaacuu

SEQ ID NO: 414879 - RNA, 32 nt, Human
gaaaacugaagugcaaucagggccaagaaaaa

SEQ ID NO: 414880 - RNA, 32 nt, Human
gaaaacugaguuaaaagaaaguaggcauuuag

SEQ ID NO: 414881 - RNA, 32 nt, Human
gaaaacugcaguccgggauggcucagucggcc

SEQ ID NO: 414882 - RNA, 32 nt, Human
gaaaacugcugauuuuacauuuuauggcugaa

SEQ ID NO: 414883 - RNA, 32 nt, Human
gaaaacuggaccagagguggaaagauguauuu

SEQ ID NO: 414884 - RNA, 32 nt, Human
gaaaacugggucccgcacagagccaggucccc

SEQ ID NO: 414885 - RNA, 24 nt, Human
gaaaacugguugaaaaugaaguua

SEQ ID NO: 414886 - RNA, 24 nt, Human
gaaaacugguuuuucauguguuuu

SEQ ID NO: 414887 - RNA, 32 nt, Human
gaaaacuguuaucuuuuccugcugugaguuua

SEQ ID NO: 414888 - RNA, 24 nt, Human
gaaaacuguugggaugaugugguu

SEQ ID NO: 414889 - RNA, 32 nt, Human
gaaaacuuaaagaaaggaaggcugggcauugu

SEQ ID NO: 414890 - RNA, 32 nt, Human
gaaaacuuagaagaaaaggcagagacaggcaa

SEQ ID NO: 414891 - RNA, 19 nt, Human
gaaaacuuagccauggaga

SEQ ID NO: 414892 - RNA, 23 nt, Human
gaaaacuugaucugugguguuuu

SEQ ID NO: 414893 - RNA, 24 nt, Human
gaaaacuuguauuaccauggguuu

SEQ ID NO: 414894 - RNA, 24 nt, Human
gaaaacuuguauuauguguguuuu

SEQ ID NO: 414895 - RNA, 32 nt, Human
gaaaagaaaacagacaguuuaguucagaaugg

SEQ ID NO: 414896 - RNA, 32 nt, Human
gaaaagaaaagaaaagaaagaaaggaauuagg

SEQ ID NO: 414897 - RNA, 32 nt, Human
gaaaagaaaagaaagagaaaagaaaagaaaau

SEQ ID NO: 414898 - RNA, 32 nt, Human
gaaaagaaacgaaggaaggaacaagaggagaa

SEQ ID NO: 414899 - RNA, 32 nt, Human
gaaaagaaagauuaaaccuacuuucauaugua

SEQ ID NO: 414900 - RNA, 32 nt, Human
gaaaagaaaggaaugagagggaaaguuuggac

SEQ ID NO: 414901 - RNA, 32 nt, Human
gaaaagaaaggaccagucuucacuuucugcau

SEQ ID NO: 414902 - RNA, 32 nt, Human
gaaaagaaagugccuuauuuuccuucaugguc

SEQ ID NO: 414903 - RNA, 32 nt, Human
gaaaagaaagugguuggucugagguuggagga

SEQ ID NO: 414904 - RNA, 32 nt, Human
gaaaagaacuacgagaggaagcauggcacuug

SEQ ID NO: 414905 - RNA, 25 nt, Human
gaaaagaacuguuuacugcuugaua

SEQ ID NO: 414906 - RNA, 32 nt, Human
gaaaagaagagaaaagaagaagaaaggaaaaa

SEQ ID NO: 414907 - RNA, 32 nt, Human
gaaaagaagaggaggaggagagcgacgggacg

SEQ ID NO: 414908 - RNA, 32 nt, Human
gaaaagaaggaaggaaggaagaaugugcaaga

SEQ ID NO: 414909 - RNA, 32 nt, Human
gaaaagaaggagcaccuugagcuggauggggg

SEQ ID NO: 414910 - RNA, 32 nt, Human
gaaaagaaggaguggaggaagacucuggaacc

SEQ ID NO: 414911 - RNA, 19 nt, Human
gaaaagaaugagaauucua

SEQ ID NO: 414912 - RNA, 32 nt, Human
gaaaagacaacaaaaguaucuucauacuuccu

SEQ ID NO: 414913 - RNA, 32 nt, Human
gaaaagacaacuggcuacaaagaaggauguca

SEQ ID NO: 414914 - RNA, 32 nt, Human
gaaaagacagaaaaggaagaggaaggaaggaa

SEQ ID NO: 414915 - RNA, 32 nt, Human
gaaaagacaucagaguagagaaaaugguuucu

SEQ ID NO: 414916 - RNA, 32 nt, Human
gaaaagaccaaaguggaagaggaagugaaaac

SEQ ID NO: 414917 - RNA, 32 nt, Human
gaaaagacccagccagggcuggcugcuccagc

SEQ ID NO: 414918 - RNA, 32 nt, Human
gaaaagacgcagaacaugaagggacucagaag

SEQ ID NO: 414919 - RNA, 21 nt, Human
gaaaagacugccccaacugua

SEQ ID NO: 414920 - RNA, 32 nt, Human
gaaaagacuugccgcacuucugaguccaaaca

SEQ ID NO: 414921 - RNA, 32 nt, Human
gaaaagagaagaaagcugacucagggauaguu

SEQ ID NO: 414922 - RNA, 32 nt, Human
gaaaagagaaggaccaacaucccccuuucccu

SEQ ID NO: 414923 - RNA, 32 nt, Human
gaaaagagaaucugccaccagaucgaauuucg

SEQ ID NO: 414924 - RNA, 32 nt, Human
gaaaagagagaaagggauaaucaccuggaaga

SEQ ID NO: 414925 - RNA, 32 nt, Human
gaaaagagaggcauaguuauaggaaacuggaa

SEQ ID NO: 414926 - RNA, 32 nt, Human
gaaaagagagguggccuuguaaugaagccuca

SEQ ID NO: 414927 - RNA, 32 nt, Human
gaaaagagauggugcccugggccagguggcug

SEQ ID NO: 414928 - RNA, 32 nt, Human
gaaaagagauuauuuuugccaccuacaucuau

SEQ ID NO: 414929 - RNA, 32 nt, Human
gaaaagagauuuagaguauaacagaaacaagu

SEQ ID NO: 414930 - RNA, 32 nt, Human
gaaaagaggaagaggcugcaauggagcagcac

SEQ ID NO: 414931 - RNA, 32 nt, Human
gaaaagaggaggaggaggaggaagaaagaaaa

SEQ ID NO: 414932 - RNA, 32 nt, Human
gaaaagagggcugagggccuggaggugggcuc

SEQ ID NO: 414933 - RNA, 32 nt, Human
gaaaagagggguaccuguuuucauuugaaaac

SEQ ID NO: 414934 - RNA, 32 nt, Human
gaaaagaucacccaacaccuuugaggcuuaaa

SEQ ID NO: 414935 - RNA, 19 nt, Human
gaaaagaugcugcuuuuga

SEQ ID NO: 414936 - RNA, 31 nt, Human
gaaaagauggaagaaguugccagcaggauca

SEQ ID NO: 414937 - RNA, 32 nt, Human
gaaaagauguuauuucuguggaugcugcugug

SEQ ID NO: 414938 - RNA, 32 nt, Human
gaaaagauuuguaucaaacagaaucagaggca

SEQ ID NO: 414939 - RNA, 32 nt, Human
gaaaagcaaacauaugcacgcacuuuucuugu

SEQ ID NO: 414940 - RNA, 32 nt, Human
gaaaagcaaagacauggaauuuuaaagaguga

SEQ ID NO: 414941 - RNA, 32 nt, Human
gaaaagcaacaggagaagaaucagggcaggaa

SEQ ID NO: 414942 - RNA, 32 nt, Human
gaaaagcaaccaaaaagggaaaaaggacuccu

SEQ ID NO: 414943 - RNA, 32 nt, Human
gaaaagcaaccaugcauuuacuggucaaugcc

SEQ ID NO: 414944 - RNA, 21 nt, Human
gaaaagcaaggagagacucua

SEQ ID NO: 414945 - RNA, 32 nt, Human
gaaaagcaaucagucacaacucaccuagcgac

SEQ ID NO: 414946 - RNA, 32 nt, Human
gaaaagcaauuaggauuaaaaguuuccauuua

SEQ ID NO: 414947 - RNA, 22 nt, Human
gaaaagcacaaccagaccuucu

SEQ ID NO: 414948 - RNA, 19 nt, Human
gaaaagcacacaggcuuua

SEQ ID NO: 414949 - RNA, 32 nt, Human
gaaaagcaccaacaaaugaagcucacuaaaug

SEQ ID NO: 414950 - RNA, 32 nt, Human
gaaaagcacuccggaagaaugaagcuaagaag

SEQ ID NO: 414951 - RNA, 20 nt, Human
gaaaagcacuccuggagcuu

SEQ ID NO: 414952 - RNA, 20 nt, Human
gaaaagcacucucuucucua

SEQ ID NO: 414953 - RNA, 19 nt, Human
gaaaagcacuucugcucua

SEQ ID NO: 414954 - RNA, 21 nt, Human
gaaaagcacuugccaucucug

SEQ ID NO: 414955 - RNA, 21 nt, Human
gaaaagcacuuguucucucug

SEQ ID NO: 414956 - RNA, 32 nt, Human
gaaaagcagaaagagagaguggccggaugggg

SEQ ID NO: 414957 - RNA, 32 nt, Human
gaaaagcagaacaccugaaagccagcaauuuc

SEQ ID NO: 414958 - RNA, 32 nt, Human
gaaaagcagagggagggagggagggggucuuc

SEQ ID NO: 414959 - RNA, 21 nt, Human
gaaaagcagauagacugaaga

SEQ ID NO: 414960 - RNA, 32 nt, Human
gaaaagcagcugguauggguuugggugucaau

SEQ ID NO: 414961 - RNA, 32 nt, Human
gaaaagcagcuguuccuugugccugaggagau

SEQ ID NO: 414962 - RNA, 20 nt, Human
gaaaagcaggaauaacuuua

SEQ ID NO: 414963 - RNA, 19 nt, Human
gaaaagcagucggacucua

SEQ ID NO: 414964 - RNA, 32 nt, Human
gaaaagcauacacuuauuuuauuugaaugcag

SEQ ID NO: 414965 - RNA, 18 nt, Human
gaaaagcaucagaacucu

SEQ ID NO: 414966 - RNA, 32 nt, Human
gaaaagcaugaaaacugagaugcugaagguga

SEQ ID NO: 414967 - RNA, 21 nt, Human
gaaaagcauucauuaauuuua

SEQ ID NO: 414968 - RNA, 20 nt, Human
gaaaagcauuccauauuuua

SEQ ID NO: 414969 - RNA, 19 nt, Human
gaaaagcauucugagcuuu

SEQ ID NO: 414970 - RNA, 20 nt, Human
gaaaagcauuggagcgucug

SEQ ID NO: 414971 - RNA, 32 nt, Human
gaaaagccaaagucuuucugaagaaucugugc

SEQ ID NO: 414972 - RNA, 32 nt, Human
gaaaagccaauccugaauucagaugaaauugc

SEQ ID NO: 414973 - RNA, 32 nt, Human
gaaaagccaccaauucuagaucuugauuugaa

SEQ ID NO: 414974 - RNA, 32 nt, Human
gaaaagccaguauucuuuuauaaaauuaucuu

SEQ ID NO: 414975 - RNA, 32 nt, Human
gaaaagccauauguaucauaaauaucagaugu

SEQ ID NO: 414976 - RNA, 32 nt, Human
gaaaagccaucuuuaauauaguucuucaccac

SEQ ID NO: 414977 - RNA, 32 nt, Human
gaaaagcccacauugcugguuacauguguaaa

SEQ ID NO: 414978 - RNA, 32 nt, Human
gaaaagccgagaacccagggccagcaguggaa

SEQ ID NO: 414979 - RNA, 32 nt, Human
gaaaagccuccgccugcuguguggacuucauc

SEQ ID NO: 414980 - RNA, 32 nt, Human
gaaaagcggagccugugacgugcacuugagaa

SEQ ID NO: 414981 - RNA, 32 nt, Human
gaaaagcggaggaggacgcccaggaggaggcg

SEQ ID NO: 414982 - RNA, 32 nt, Human
gaaaagcuaagcugggacugaggcaugcaagc

SEQ ID NO: 414983 - RNA, 19 nt, Human
gaaaagcuacaggacucua

SEQ ID NO: 414984 - RNA, 32 nt, Human
gaaaagcucacugcugccccagccgggcuucu

SEQ ID NO: 414985 - RNA, 32 nt, Human
gaaaagcucacuggaccagcuaggugacaucc

SEQ ID NO: 414986 - RNA, 32 nt, Human
gaaaagcucgaagguccauguguuuugcaaau

SEQ ID NO: 414987 - RNA, 32 nt, Human
gaaaagcucucacaaagcuuuugagcucauag

SEQ ID NO: 414988 - RNA, 32 nt, Human
gaaaagcugagucuggcuagaccagggcuaug

SEQ ID NO: 414989 - RNA, 32 nt, Human
gaaaagcugauucugguuaucucuuuaaggac

SEQ ID NO: 414990 - RNA, 32 nt, Human
gaaaagcugcaaggucaggcuccuggggcccu

SEQ ID NO: 414991 - RNA, 32 nt, Human
gaaaagcugccaugauucugugguguucuaag

SEQ ID NO: 414992 - RNA, 22 nt, Human
gaaaagcugugugcgacacaga

SEQ ID NO: 414993 - RNA, 32 nt, Human
gaaaagcuguuuuucucacaugugaacagcuu

SEQ ID NO: 414994 - RNA, 32 nt, Human
gaaaagcuuaccuauuuuaaaaagccaaauuu

SEQ ID NO: 414995 - RNA, 16 nt, Human
gaaaagcuucauucca

SEQ ID NO: 414996 - RNA, 26 nt, Human
gaaaagcuugcagaaccagacagaga

SEQ ID NO: 414997 - RNA, 32 nt, Human
gaaaagcuuuguuuguucuuguuuuuaaguuu

SEQ ID NO: 414998 - RNA, 32 nt, Human
gaaaaggaaagaugggggacacuuccagugug

SEQ ID NO: 414999 - RNA, 32 nt, Human
gaaaaggaaaucuagcaugugaggggacuaag

SEQ ID NO: 415000 - RNA, 32 nt, Human
gaaaaggaaaugacacuugagauccuuggaau

SEQ ID NO: 415001 - RNA, 32 nt, Human
gaaaaggaaauggcuuuuauaaacaucuuuua

SEQ ID NO: 415002 - RNA, 32 nt, Human
gaaaaggaaggggauaacucagaggaacagac

SEQ ID NO: 415003 - RNA, 32 nt, Human
gaaaaggaauuuaaaggaaggauagaaaguug

SEQ ID NO: 415004 - RNA, 32 nt, Human
gaaaaggacauuuguguuuuuccuucaauggu

SEQ ID NO: 415005 - RNA, 32 nt, Human
gaaaaggagaaaagguucguuuggaaguauag

SEQ ID NO: 415006 - RNA, 32 nt, Human
gaaaaggagaggaggaagcugaggcaacuuug

SEQ ID NO: 415007 - RNA, 32 nt, Human
gaaaaggaggaaaacuuagaagaaaaggcaga

SEQ ID NO: 415008 - RNA, 32 nt, Human
gaaaaggaggaaggaaggaaaaggugauucgc

SEQ ID NO: 415009 - RNA, 32 nt, Human
gaaaaggaguuaggagaaagaagagcagcuga

SEQ ID NO: 415010 - RNA, 19 nt, Human
gaaaaggaucuaagggaag

SEQ ID NO: 415011 - RNA, 32 nt, Human
gaaaaggaucuguccacuccuggucauuggug

SEQ ID NO: 415012 - RNA, 32 nt, Human
gaaaaggauuucagaugcaugccagguuucca

SEQ ID NO: 415013 - RNA, 32 nt, Human
gaaaaggcaaagcugcaugagacacagccuuc

SEQ ID NO: 415014 - RNA, 32 nt, Human
gaaaaggcacucucguguucuccucacucugu

SEQ ID NO: 415015 - RNA, 32 nt, Human
gaaaaggcaggcaguggacucugccaguauua

SEQ ID NO: 415016 - RNA, 32 nt, Human
gaaaaggcaggcaguguggucacagaccgagg

SEQ ID NO: 415017 - RNA, 32 nt, Human
gaaaaggcauuucucaaccaucucucagcagu

SEQ ID NO: 415018 - RNA, 32 nt, Human
gaaaaggcggcggggcugggcccagcgaggug

SEQ ID NO: 415019 - RNA, 32 nt, Human
gaaaaggcucaggggugagguggagagggaga

SEQ ID NO: 415020 - RNA, 32 nt, Human
gaaaaggcugcagacagucacagggaagugcu

SEQ ID NO: 415021 - RNA, 32 nt, Human
gaaaaggcugcugacaaggcugagggaggacc

SEQ ID NO: 415022 - RNA, 32 nt, Human
gaaaaggcuuaugggccagggggugggaggga

SEQ ID NO: 415023 - RNA, 16 nt, Human
gaaaagggaacaguuu

SEQ ID NO: 415024 - RNA, 31 nt, Human
gaaaagggaacgugguacucacuggaugcac

SEQ ID NO: 415025 - RNA, 32 nt, Human
gaaaagggaagagaugggugugggguggcaau

SEQ ID NO: 415026 - RNA, 32 nt, Human
gaaaagggaaggcaaaaggaaaagagaaaagg

SEQ ID NO: 415027 - RNA, 32 nt, Human
gaaaagggaagggagagaaaaaggagagccuc

SEQ ID NO: 415028 - RNA, 32 nt, Human
gaaaagggaauagaauuuugacucuauauaaa

SEQ ID NO: 415029 - RNA, 32 nt, Human
gaaaagggagagaccuagaaggggcuuggacc

SEQ ID NO: 415030 - RNA, 32 nt, Human
gaaaagggagagacgaaaaggguacaggcuca

SEQ ID NO: 415031 - RNA, 32 nt, Human
gaaaagggagaugagggaucucagggaagccc

SEQ ID NO: 415032 - RNA, 32 nt, Human
gaaaagggaggaaacggcagagccagagagaa

SEQ ID NO: 415033 - RNA, 32 nt, Human
gaaaagggaggcagaggaggcagaggcagagg

SEQ ID NO: 415034 - RNA, 32 nt, Human
gaaaagggauggauguguagcccaucucagga

SEQ ID NO: 415035 - RNA, 32 nt, Human
gaaaagggcagaagagaggcagcagcgugguc

SEQ ID NO: 415036 - RNA, 32 nt, Human
gaaaagggcagacuggaccugcagugauggug

SEQ ID NO: 415037 - RNA, 31 nt, Human
gaaaagggccuggaaagaggggagccaacaa

SEQ ID NO: 415038 - RNA, 32 nt, Human
gaaaagggcucugcagagcuugcacauaaaga

SEQ ID NO: 415039 - RNA, 32 nt, Human
gaaaaggggagggugcagggagaggggaggcg

SEQ ID NO: 415040 - RNA, 32 nt, Human
gaaaaggggagugcuaacugggggagcgagaa

SEQ ID NO: 415041 - RNA, 32 nt, Human
gaaaaggggugcuggaaggaggccccagugga

SEQ ID NO: 415042 - RNA, 32 nt, Human
gaaaaggguuccaccucuccccaaccggaguu

SEQ ID NO: 415043 - RNA, 32 nt, Human
gaaaagguaccugaggaugcagaaguaccuac

SEQ ID NO: 415044 - RNA, 21 nt, Human
gaaaagguccuugacuugaug

SEQ ID NO: 415045 - RNA, 32 nt, Human
gaaaaggucugggaaguaugggggauggugug

SEQ ID NO: 415046 - RNA, 32 nt, Human
gaaaagguggcaugcuaaacagcaaccuugau

SEQ ID NO: 415047 - RNA, 32 nt, Human
gaaaagguggcgaagaggcugccugaagagca

SEQ ID NO: 415048 - RNA, 32 nt, Human
gaaaagguugagaagaucuggggaagagaagg

SEQ ID NO: 415049 - RNA, 32 nt, Human
gaaaagguuuuagaaaaagugaagagcuggaa

SEQ ID NO: 415050 - RNA, 32 nt, Human
gaaaaguaagcaaggggagggaagagagaggu

SEQ ID NO: 415051 - RNA, 32 nt, Human
gaaaaguacugagugaagggcagaaaaagaga

SEQ ID NO: 415052 - RNA, 32 nt, Human
gaaaaguacuuagcugggagugguggcaagcg

SEQ ID NO: 415053 - RNA, 32 nt, Human
gaaaaguacuucaggcugggcacaguggcuca

SEQ ID NO: 415054 - RNA, 32 nt, Human
gaaaaguagccugccuguggcauuuagaggcc

SEQ ID NO: 415055 - RNA, 21 nt, Human
gaaaaguaggaggaggaucug

SEQ ID NO: 415056 - RNA, 32 nt, Human
gaaaaguaguucaaguguacagaaaguggauu

SEQ ID NO: 415057 - RNA, 22 nt, Human
gaaaaguauacaaaacaaaaca

SEQ ID NO: 415058 - RNA, 32 nt, Human
gaaaaguauggagucuggagaaucgcuagacu

SEQ ID NO: 415059 - RNA, 20 nt, Human
gaaaagucacaggagaacuu

SEQ ID NO: 415060 - RNA, 32 nt, Human
gaaaagucaccguagcccacuguggcaucaga

SEQ ID NO: 415061 - RNA, 20 nt, Human
gaaaagucacuuggaacucu

SEQ ID NO: 415062 - RNA, 32 nt, Human
gaaaagucagcaagacccgagauguguaugga

SEQ ID NO: 415063 - RNA, 32 nt, Human
gaaaagucagcccuugacugagggccagauca

SEQ ID NO: 415064 - RNA, 32 nt, Human
gaaaaguccaccuugucuucucucagaaaacc

SEQ ID NO: 415065 - RNA, 32 nt, Human
gaaaaguccgagagaaucaggauggaggccgu

SEQ ID NO: 415066 - RNA, 32 nt, Human
gaaaaguccuguaaggaugaugaauuuagaaa

SEQ ID NO: 415067 - RNA, 32 nt, Human
gaaaagucggcagcagagggaacagggaagaa

SEQ ID NO: 415068 - RNA, 32 nt, Human
gaaaagucuaacuccauuaaaugccuuaaugg

SEQ ID NO: 415069 - RNA, 32 nt, Human
gaaaagucucucucaacaccucguucaugcaa

SEQ ID NO: 415070 - RNA, 23 nt, Human
gaaaagucucuuggggaccucug

SEQ ID NO: 415071 - RNA, 32 nt, Human
gaaaagucuuccaugcacuuccagucucuuuc

SEQ ID NO: 415072 - RNA, 32 nt, Human
gaaaagugacggccaggugcaguggcucacgc

SEQ ID NO: 415073 - RNA, 32 nt, Human
gaaaagugacugcgauucugaagaaccgcugc

SEQ ID NO: 415074 - RNA, 32 nt, Human
gaaaagugacuggaguccagggacaugaugga

SEQ ID NO: 415075 - RNA, 31 nt, Human
gaaaagugacuucaucccuucgguccuaagu

SEQ ID NO: 415076 - RNA, 31 nt, Human
gaaaagugcaguauuuaccuguugaauucag

SEQ ID NO: 415077 - RNA, 32 nt, Human
gaaaagugcuuugcuggaguccuguucucuga

SEQ ID NO: 415078 - RNA, 32 nt, Human
gaaaaguggccaagggccacccccgcugauga

SEQ ID NO: 415079 - RNA, 19 nt, Human
gaaaagugggagacuucug

SEQ ID NO: 415080 - RNA, 23 nt, Human
gaaaagugggcccauaugaagua

SEQ ID NO: 415081 - RNA, 20 nt, Human
gaaaagugguagagccucua

SEQ ID NO: 415082 - RNA, 32 nt, Human
gaaaaguguagggacugagaagggcugcagcc

SEQ ID NO: 415083 - RNA, 32 nt, Human
gaaaaguguccucuggcugaguggccacuagg

SEQ ID NO: 415084 - RNA, 32 nt, Human
gaaaagugucucaaaugcauucuacugcggga

SEQ ID NO: 415085 - RNA, 32 nt, Human
gaaaaguuacaagagaaagaaaggauacaacu

SEQ ID NO: 415086 - RNA, 32 nt, Human
gaaaaguugaagagagaguuugaaugaaggac

SEQ ID NO: 415087 - RNA, 20 nt, Human
gaaaaguugagaggacuuua

SEQ ID NO: 415088 - RNA, 32 nt, Human
gaaaaguugcagaauagaaauagccacacucc

SEQ ID NO: 415089 - RNA, 32 nt, Human
gaaaaguugcucccgagguccaugccccugga

SEQ ID NO: 415090 - RNA, 22 nt, Human
gaaaaguuggcggaggacugua

SEQ ID NO: 415091 - RNA, 32 nt, Human
gaaaaguugggacacugaggugucacagcuuc

SEQ ID NO: 415092 - RNA, 32 nt, Human
gaaaaguugugccugagugcaugagacagaau

SEQ ID NO: 415093 - RNA, 32 nt, Human
gaaaaguugugccugagugcaugagauagaau

SEQ ID NO: 415094 - RNA, 32 nt, Human
gaaaaguuuacaaccugcuuggauuuuugccc

SEQ ID NO: 415095 - RNA, 32 nt, Human
gaaaaguuuucagaaaacugcuauguagauuu

SEQ ID NO: 415096 - RNA, 32 nt, Human
gaaaauaaacauuuuacuguuuuuauggaucc

SEQ ID NO: 415097 - RNA, 32 nt, Human
gaaaauaaaccagccugggcuagaggagaauu

SEQ ID NO: 415098 - RNA, 22 nt, Human
gaaaauaaagauuuagaaacca

SEQ ID NO: 415099 - RNA, 32 nt, Human
gaaaauaaaguguguucugugccugaaaaugg

SEQ ID NO: 415100 - RNA, 32 nt, Human
gaaaauaaaguugagggaaucucuccagauaa

SEQ ID NO: 415101 - RNA, 32 nt, Human
gaaaauaaauguagcuggugggagacuuugua

SEQ ID NO: 415102 - RNA, 32 nt, Human
gaaaauaacacauuuaaguauauaaaaccuau

SEQ ID NO: 415103 - RNA, 20 nt, Human
gaaaauaacuaauaaaccau

SEQ ID NO: 415104 - RNA, 32 nt, Human
gaaaauaacuccuaaauguccaaaaagaacau

SEQ ID NO: 415105 - RNA, 32 nt, Human
gaaaauaacuugacugaauuacacaaggauuc

SEQ ID NO: 415106 - RNA, 32 nt, Human
gaaaauaagccauuagcucagaagaacuuuaa

SEQ ID NO: 415107 - RNA, 32 nt, Human
gaaaauaaggaggaguugucagacaaggacau

SEQ ID NO: 415108 - RNA, 32 nt, Human
gaaaauaaggugggcuucacuggagaaaugga

SEQ ID NO: 415109 - RNA, 26 nt, Human
gaaaauaaugaaguuguagaaaccau

SEQ ID NO: 415110 - RNA, 32 nt, Human
gaaaauacagaauuagccaggcaugguggcac

SEQ ID NO: 415111 - RNA, 32 nt, Human
gaaaauacagagagugaguguguggaagagag

SEQ ID NO: 415112 - RNA, 32 nt, Human
gaaaauacagcuacuucugccuuauggcuagg

SEQ ID NO: 415113 - RNA, 32 nt, Human
gaaaauacuacugcugagcauuuuugaagacu

SEQ ID NO: 415114 - RNA, 32 nt, Human
gaaaauacugaacucugucugagugggauggu

SEQ ID NO: 415115 - RNA, 21 nt, Human
gaaaauacugauguguguuuu

SEQ ID NO: 415116 - RNA, 32 nt, Human
gaaaauagaccagcuuaaugucuucaggaugu

SEQ ID NO: 415117 - RNA, 32 nt, Human
gaaaauagcaaaggaaaucacugugaagaaug

SEQ ID NO: 415118 - RNA, 32 nt, Human
gaaaauagccugcucccagaggaaaagugaau

SEQ ID NO: 415119 - RNA, 32 nt, Human
gaaaauagcuaaaugucauucuccaucucuuu

SEQ ID NO: 415120 - RNA, 32 nt, Human
gaaaauagcuucaucuuaucugccuucuuaug

SEQ ID NO: 415121 - RNA, 32 nt, Human
gaaaauaggacugucagaagcugccaguuauu

SEQ ID NO: 415122 - RNA, 32 nt, Human
gaaaauagguuagaaucuauggcuugauuaaa

SEQ ID NO: 415123 - RNA, 24 nt, Human
gaaaauauaaaaauuagccaggca

SEQ ID NO: 415124 - RNA, 32 nt, Human
gaaaauauagucacaggaaacuacucacguaa

SEQ ID NO: 415125 - RNA, 32 nt, Human
gaaaauaucaaagcauacauuaccucagcugg

SEQ ID NO: 415126 - RNA, 32 nt, Human
gaaaauauccuuuaacucauguaacugaguaa

SEQ ID NO: 415127 - RNA, 32 nt, Human
gaaaauaucguuagcuguaaaaguaauauuau

SEQ ID NO: 415128 - RNA, 32 nt, Human
gaaaauaucuaauagcuaccagaaggagaugc

SEQ ID NO: 415129 - RNA, 32 nt, Human
gaaaauaucugagacaaaauguauacaaauau

SEQ ID NO: 415130 - RNA, 32 nt, Human
gaaaauaugaagucgcaugcacuggauaucua

SEQ ID NO: 415131 - RNA, 32 nt, Human
gaaaauauggugcugaggaguguuaaaguaga

SEQ ID NO: 415132 - RNA, 32 nt, Human
gaaaauauguuuggaauauuccacuauuugca

SEQ ID NO: 415133 - RNA, 32 nt, Human
gaaaauauuuaugaacuauauuucucauugca

SEQ ID NO: 415134 - RNA, 32 nt, Human
gaaaauauuuugcucuugaggacucugacagc

SEQ ID NO: 415135 - RNA, 32 nt, Human
gaaaaucaagggaggaaggaacaagaucaagg

SEQ ID NO: 415136 - RNA, 32 nt, Human
gaaaaucacaggacccgaggaaaaagaaugag

SEQ ID NO: 415137 - RNA, 32 nt, Human
gaaaaucacuacaacaaaugcuaacuucuaau

SEQ ID NO: 415138 - RNA, 32 nt, Human
gaaaaucacucccagucaucccaaaccccuga

SEQ ID NO: 415139 - RNA, 32 nt, Human
gaaaaucacugucacacaauuccaauggauuu

SEQ ID NO: 415140 - RNA, 32 nt, Human
gaaaaucacuuaggaaauggcuuugugauuca

SEQ ID NO: 415141 - RNA, 32 nt, Human
gaaaaucacuugaacccaggaggcagagguug

SEQ ID NO: 415142 - RNA, 32 nt, Human
gaaaaucagccaaggacuaagcuuccauagaa

SEQ ID NO: 415143 - RNA, 32 nt, Human
gaaaaucaggcagucggccuggagucugugcc

SEQ ID NO: 415144 - RNA, 32 nt, Human
gaaaaucaguguucacagagacugccuccacc

SEQ ID NO: 415145 - RNA, 32 nt, Human
gaaaaucauauccugaaucauacugagacuga

SEQ ID NO: 415146 - RNA, 32 nt, Human
gaaaaucauccagaagcacugugauauugugu

SEQ ID NO: 415147 - RNA, 32 nt, Human
gaaaauccaagaggaagaaggaucuacggaua

SEQ ID NO: 415148 - RNA, 32 nt, Human
gaaaauccaaucuacaaacaaaggccauccua

SEQ ID NO: 415149 - RNA, 32 nt, Human
gaaaauccaggaguauccaucugcaguuaugu

SEQ ID NO: 415150 - RNA, 32 nt, Human
gaaaaucccagcugcccuugccugaacugauu

SEQ ID NO: 415151 - RNA, 32 nt, Human
gaaaaucccagggcccuuaagauaugcuguau

SEQ ID NO: 415152 - RNA, 32 nt, Human
gaaaaucccaucacuccagcagcugggaccug

SEQ ID NO: 415153 - RNA, 32 nt, Human
gaaaaucccauguuugcuuuauuuuauuuuaa

SEQ ID NO: 415154 - RNA, 32 nt, Human
gaaaaucccuuuuaaggccaaggaaagcugaa

SEQ ID NO: 415155 - RNA, 32 nt, Human
gaaaauccuaaaccucguacccaaaccugucu

SEQ ID NO: 415156 - RNA, 32 nt, Human
gaaaauccuauugauuucaucucacccauuuc

SEQ ID NO: 415157 - RNA, 32 nt, Human
gaaaauccucacugcacuccagcagaggcuag

SEQ ID NO: 415158 - RNA, 32 nt, Human
gaaaaucgcuugaacccaggaggcagagauug

SEQ ID NO: 415159 - RNA, 32 nt, Human
gaaaaucgcuugaacccgggaggcagagguua

SEQ ID NO: 415160 - RNA, 32 nt, Human
gaaaaucggagucacuuaggaggcagcaugag

SEQ ID NO: 415161 - RNA, 32 nt, Human
gaaaaucggugaggauguugugcucagaaaug

SEQ ID NO: 415162 - RNA, 32 nt, Human
gaaaaucuacccauacucaaguugcacgguca

SEQ ID NO: 415163 - RNA, 32 nt, Human
gaaaaucuagccccgggcacuugccuuggagu

SEQ ID NO: 415164 - RNA, 32 nt, Human
gaaaaucuauucguuagagaaggaugaacagc

SEQ ID NO: 415165 - RNA, 32 nt, Human
gaaaaucuggacaauagauguggacuccaagg

SEQ ID NO: 415166 - RNA, 32 nt, Human
gaaaaucuuagaguaaauuuuagucuuaaagc

SEQ ID NO: 415167 - RNA, 32 nt, Human
gaaaaugaaaguacauuucacagggugggagu

SEQ ID NO: 415168 - RNA, 32 nt, Human
gaaaaugaacugaaggaugccacccagggaga

SEQ ID NO: 415169 - RNA, 21 nt, Human
gaaaaugaacuucugguuuca

SEQ ID NO: 415170 - RNA, 32 nt, Human
gaaaaugaagaguauuuuuaaggagaugguau

SEQ ID NO: 415171 - RNA, 28 nt, Human
gaaaaugaagcugcugccucaaucgacc

SEQ ID NO: 415172 - RNA, 32 nt, Human
gaaaaugaagcuggggacugggugcgucccau

SEQ ID NO: 415173 - RNA, 20 nt, Human
gaaaaugaaggugacuuuca

SEQ ID NO: 415174 - RNA, 22 nt, Human
gaaaaugaauccaaguguuuca

SEQ ID NO: 415175 - RNA, 32 nt, Human
gaaaaugaauccacagcucuacuccagguucu

SEQ ID NO: 415176 - RNA, 22 nt, Human
gaaaaugagcuggagaauuuua

SEQ ID NO: 415177 - RNA, 29 nt, Human
gaaaaugagugagacucaaaauucaacaa

SEQ ID NO: 415178 - RNA, 32 nt, Human
gaaaaugauaaauuuucuguugugcauucaau

SEQ ID NO: 415179 - RNA, 32 nt, Human
gaaaaugauuguuuagcaucuuuacagaugga

SEQ ID NO: 415180 - RNA, 32 nt, Human
gaaaaugcaaugacuggcugggugcaguggcu

SEQ ID NO: 415181 - RNA, 32 nt, Human
gaaaaugcaccacugcacuccagcaugggcaa

SEQ ID NO: 415182 - RNA, 32 nt, Human
gaaaaugcagugaggggagguccucacccagg

SEQ ID NO: 415183 - RNA, 32 nt, Human
gaaaaugcccagaggaaauggaaccauuucac

SEQ ID NO: 415184 - RNA, 32 nt, Human
gaaaaugcccagcguuacuucgaugcccugcu

SEQ ID NO: 415185 - RNA, 32 nt, Human
gaaaaugcccgugaagagaagacugaaugugu

SEQ ID NO: 415186 - RNA, 23 nt, Human
gaaaaugccuccuauuucuggca

SEQ ID NO: 415187 - RNA, 32 nt, Human
gaaaaugcucaucugucaucuucauggaugaa

SEQ ID NO: 415188 - RNA, 32 nt, Human
gaaaaugcugggaccaaagauugggccggguu

SEQ ID NO: 415189 - RNA, 32 nt, Human
gaaaauggagagaaugaagagcgcugugccag

SEQ ID NO: 415190 - RNA, 32 nt, Human
gaaaauggagagcuccagcagcgaugaugagg

SEQ ID NO: 415191 - RNA, 21 nt, Human
gaaaauggagagcuggcuuca

SEQ ID NO: 415192 - RNA, 32 nt, Human
gaaaauggagugaacaggaggcaaagccacgc

SEQ ID NO: 415193 - RNA, 32 nt, Human
gaaaauggcagcaacaugaagcugcccauucc

SEQ ID NO: 415194 - RNA, 31 nt, Human
gaaaauggcccaacggagcacuguauuuccu

SEQ ID NO: 415195 - RNA, 32 nt, Human
gaaaauggcgugaacccgggagguggagcuug

SEQ ID NO: 415196 - RNA, 32 nt, Human
gaaaauggcugcaauuacaacaagaagugaag

SEQ ID NO: 415197 - RNA, 32 nt, Human
gaaaauggcuugaacccgggaggcagagguug

SEQ ID NO: 415198 - RNA, 32 nt, Human
gaaaauggcuuucucagccaggcgugguuacu

SEQ ID NO: 415199 - RNA, 32 nt, Human
gaaaauggugcuggagaccaguauuuaguaaa

SEQ ID NO: 415200 - RNA, 32 nt, Human
gaaaaugguguuuuccucaagaagacuacugg

SEQ ID NO: 415201 - RNA, 32 nt, Human
gaaaauguagcucuuaguuuacacuucaaaga

SEQ ID NO: 415202 - RNA, 22 nt, Human
gaaaauguauggaugaauucug

SEQ ID NO: 415203 - RNA, 32 nt, Human
gaaaaugucccucccuuacccccauccuuaac

SEQ ID NO: 415204 - RNA, 32 nt, Human
gaaaaugugguuucugcuguccuuucucuugg

SEQ ID NO: 415205 - RNA, 32 nt, Human
gaaaauguguagccagacacacacagacauug

SEQ ID NO: 415206 - RNA, 32 nt, Human
gaaaauguuacuuagaaaaucauaaggaagag

SEQ ID NO: 415207 - RNA, 32 nt, Human
gaaaauguucugacagcauuucagcugugagc

SEQ ID NO: 415208 - RNA, 32 nt, Human
gaaaauguugccaguugauggggaagaaagga

SEQ ID NO: 415209 - RNA, 32 nt, Human
gaaaauguuuccuugugccugcuccuguacuu

SEQ ID NO: 415210 - RNA, 32 nt, Human
gaaaauuaaaaggcaaaacaauagacaucugc

SEQ ID NO: 415211 - RNA, 32 nt, Human
gaaaauuacauauuaagguuuugcuggggugc

SEQ ID NO: 415212 - RNA, 32 nt, Human
gaaaauuagaugcagagaauucagagauuucu

SEQ ID NO: 415213 - RNA, 32 nt, Human
gaaaauuaggucugaauucaagagaaaguaug

SEQ ID NO: 415214 - RNA, 32 nt, Human
gaaaauuaguauuuuggauagauuugucaaaa

SEQ ID NO: 415215 - RNA, 32 nt, Human
gaaaauuauagcaacaguacuuaggagaauag

SEQ ID NO: 415216 - RNA, 32 nt, Human
gaaaauuauggacugggacucuucagaaauuc

SEQ ID NO: 415217 - RNA, 32 nt, Human
gaaaauuauuuggaacuuaguaaccaguuguu

SEQ ID NO: 415218 - RNA, 32 nt, Human
gaaaauucaagaaaauaaauguagcugguggg

SEQ ID NO: 415219 - RNA, 32 nt, Human
gaaaauucacauuugaaaaugaaaaugauuac

SEQ ID NO: 415220 - RNA, 32 nt, Human
gaaaauucaguauuuucacaagcuacaaaaac

SEQ ID NO: 415221 - RNA, 32 nt, Human
gaaaauucuaccucuauguccuucaugaggau

SEQ ID NO: 415222 - RNA, 22 nt, Human
gaaaauugaaaauguauaguca

SEQ ID NO: 415223 - RNA, 32 nt, Human
gaaaauugaaagucaucccugauuccuccuuc

SEQ ID NO: 415224 - RNA, 32 nt, Human
gaaaauugaaggagauguuugaugaggaauau

SEQ ID NO: 415225 - RNA, 32 nt, Human
gaaaauugaaggagauguuugauguggaauau

SEQ ID NO: 415226 - RNA, 32 nt, Human
gaaaauugcaccacugugcuugguuuguacuu

SEQ ID NO: 415227 - RNA, 32 nt, Human
gaaaauugcccgguugcugggguccgcgccug

SEQ ID NO: 415228 - RNA, 32 nt, Human
gaaaauugcucuuaaacuuuccuagcuauaag

SEQ ID NO: 415229 - RNA, 32 nt, Human
gaaaauugcuugaacucaggaggcagaaguuu

SEQ ID NO: 415230 - RNA, 32 nt, Human
gaaaauuggaagcaaggaacagcaacagcacc

SEQ ID NO: 415231 - RNA, 32 nt, Human
gaaaauuggacuuaagaugccaugucuuggcu

SEQ ID NO: 415232 - RNA, 32 nt, Human
gaaaauugguuucauuuaacaaaagaucagau

SEQ ID NO: 415233 - RNA, 32 nt, Human
gaaaauuuagcucuggguagcucuuaaaucuu

SEQ ID NO: 415234 - RNA, 32 nt, Human
gaaaauuucccaucuucucauuggccaucagu

SEQ ID NO: 415235 - RNA, 32 nt, Human
gaaaauuugaagcccccaggggugggguggac

SEQ ID NO: 415236 - RNA, 32 nt, Human
gaaaauuugcagcugccagugcuuuccuugug

SEQ ID NO: 415237 - RNA, 32 nt, Human
gaaaauuuggccagacaccguggcucacuccu

SEQ ID NO: 415238 - RNA, 32 nt, Human
gaaacaaaaacacacacgcagaauuaacaauu

SEQ ID NO: 415239 - RNA, 32 nt, Human
gaaacaaaaauauaagaauuauuagcuacuuu

SEQ ID NO: 415240 - RNA, 21 nt, Human
gaaacaaaacaaaacaaaaca

SEQ ID NO: 415241 - RNA, 32 nt, Human
gaaacaaaaggacauuaaugaggaauaagaca

SEQ ID NO: 415242 - RNA, 31 nt, Human
gaaacaaaaguguccagugacagggaauuaa

SEQ ID NO: 415243 - RNA, 32 nt, Human
gaaacaaaccaccauugccugcuggcucuuau

SEQ ID NO: 415244 - RNA, 32 nt, Human
gaaacaaacccaggugucucucaacaagcuac

SEQ ID NO: 415245 - RNA, 32 nt, Human
gaaacaaacuggagaagaagguaggagaaagg

SEQ ID NO: 415246 - RNA, 20 nt, Human
gaaacaaacuuuaucucccu

SEQ ID NO: 415247 - RNA, 32 nt, Human
gaaacaaagcagguugucccacauguauaaaa

SEQ ID NO: 415248 - RNA, 32 nt, Human
gaaacaaaugcuguaauucaaaagcauuugac

SEQ ID NO: 415249 - RNA, 32 nt, Human
gaaacaacaaaccugcgccugcaccgccucug

SEQ ID NO: 415250 - RNA, 32 nt, Human
gaaacaacagaagucuauucaccugugcacua

SEQ ID NO: 415251 - RNA, 32 nt, Human
gaaacaacagcauccgaacugcacugggaacu

SEQ ID NO: 415252 - RNA, 32 nt, Human
gaaacaacagguucaguacauuggcucaguuc

SEQ ID NO: 415253 - RNA, 32 nt, Human
gaaacaaccaccaucgguuaaauuugaugcaa

SEQ ID NO: 415254 - RNA, 32 nt, Human
gaaacaaccauccuagcuuccuagggaagaca

SEQ ID NO: 415255 - RNA, 32 nt, Human
gaaacaagaaggaguuuugaaagggaauagga

SEQ ID NO: 415256 - RNA, 32 nt, Human
gaaacaagagccuuuguaauacugaaccucau

SEQ ID NO: 415257 - RNA, 32 nt, Human
gaaacaagaggaaggguuuggggugggaaagu

SEQ ID NO: 415258 - RNA, 32 nt, Human
gaaacaagagguggaacaugugaaugaaucgu

SEQ ID NO: 415259 - RNA, 32 nt, Human
gaaacaagccaagauggagaugccagcuccag

SEQ ID NO: 415260 - RNA, 32 nt, Human
gaaacaaggaggcacuuccuguaggagcacug

SEQ ID NO: 415261 - RNA, 32 nt, Human
gaaacaaggcaaguugcugaaggauuucuaaa

SEQ ID NO: 415262 - RNA, 32 nt, Human
gaaacaaggcuucucucagccuccccaccagu

SEQ ID NO: 415263 - RNA, 32 nt, Human
gaaacaagggccaggccagcuguggcugcaaa

SEQ ID NO: 415264 - RNA, 32 nt, Human
gaaacaauaagggaaccgucuguuuuuaaaug

SEQ ID NO: 415265 - RNA, 32 nt, Human
gaaacaaucauugcuaaaauacauauucuuaa

SEQ ID NO: 415266 - RNA, 32 nt, Human
gaaacaaugaaguggaaaagaaaacagcuaaa

SEQ ID NO: 415267 - RNA, 32 nt, Human
gaaacaauguggagucucccucugauugguuu

SEQ ID NO: 415268 - RNA, 32 nt, Human
gaaacaauuagcugcccgugacucagcugcca

SEQ ID NO: 415269 - RNA, 21 nt, Human
gaaacacaaaaaugaugugua

SEQ ID NO: 415270 - RNA, 32 nt, Human
gaaacacaagacggcuaaaacucuccaggggc

SEQ ID NO: 415271 - RNA, 32 nt, Human
gaaacacacagcauacagacuuaccccauaga

SEQ ID NO: 415272 - RNA, 32 nt, Human
gaaacacacccgcgcacacagcugcucucuac

SEQ ID NO: 415273 - RNA, 32 nt, Human
gaaacacagcucccauauuugagugugcaugu

SEQ ID NO: 415274 - RNA, 32 nt, Human
gaaacacaggagaggaagaauuuggaaugaaa

SEQ ID NO: 415275 - RNA, 32 nt, Human
gaaacacagugugacggugcccagggaaagaa

SEQ ID NO: 415276 - RNA, 32 nt, Human
gaaacacauaaccaaaaugguuugauucacug

SEQ ID NO: 415277 - RNA, 32 nt, Human
gaaacacaucuucagccuccuccugggccagc

SEQ ID NO: 415278 - RNA, 32 nt, Human
gaaacaccaggcacacaccugcccccagucuc

SEQ ID NO: 415279 - RNA, 32 nt, Human
gaaacaccaugggaguuaacagugcaucuccc

SEQ ID NO: 415280 - RNA, 32 nt, Human
gaaacacccacuguguuuugcucacucccacu

SEQ ID NO: 415281 - RNA, 32 nt, Human
gaaacaccuaaccuugacagaaucaucaccag

SEQ ID NO: 415282 - RNA, 32 nt, Human
gaaacaccugaaugaacuuugaugaaguacag

SEQ ID NO: 415283 - RNA, 21 nt, Human
gaaacacgcccuuguacagga

SEQ ID NO: 415284 - RNA, 24 nt, Human
gaaacacuagaggucaaccuuaca

SEQ ID NO: 415285 - RNA, 32 nt, Human
gaaacacuaggcugacuuagucucccagccua

SEQ ID NO: 415286 - RNA, 21 nt, Human
gaaacacuaggugccugccca

SEQ ID NO: 415287 - RNA, 32 nt, Human
gaaacacucccagggacucuggggagaggcug

SEQ ID NO: 415288 - RNA, 32 nt, Human
gaaacacucuucuagcagcauuauggggacuu

SEQ ID NO: 415289 - RNA, 32 nt, Human
gaaacacugaaaagaaggaaagaugguuaaac

SEQ ID NO: 415290 - RNA, 32 nt, Human
gaaacacugaacaaccuccugcuuuaaacaac

SEQ ID NO: 415291 - RNA, 32 nt, Human
gaaacacugccucccuucagcagguagcucau

SEQ ID NO: 415292 - RNA, 32 nt, Human
gaaacacugccucuguuccuccuugagccugu

SEQ ID NO: 415293 - RNA, 32 nt, Human
gaaacacugcugauuugcugugguguugggug

SEQ ID NO: 415294 - RNA, 32 nt, Human
gaaacacugcuuccugaaacuuccugcuauug

SEQ ID NO: 415295 - RNA, 32 nt, Human
gaaacacuuuacaaccugcucucucucugaag

SEQ ID NO: 415296 - RNA, 19 nt, Human
gaaacagaaagauuggaga

SEQ ID NO: 415297 - RNA, 32 nt, Human
gaaacagaacauagccacccuguuucaucagu

SEQ ID NO: 415298 - RNA, 32 nt, Human
gaaacagaacauagccacccuuuuucaucagu

SEQ ID NO: 415299 - RNA, 32 nt, Human
gaaacagaacucaucaaggaucuagucucucg

SEQ ID NO: 415300 - RNA, 21 nt, Human
gaaacagaagcaaauuucccu

SEQ ID NO: 415301 - RNA, 32 nt, Human
gaaacagacacaacuccaguguggacucccgc

SEQ ID NO: 415302 - RNA, 32 nt, Human
gaaacagagagaaagguguggccucuccacuu

SEQ ID NO: 415303 - RNA, 32 nt, Human
gaaacagagagaccagugaggaggcuucugug

SEQ ID NO: 415304 - RNA, 32 nt, Human
gaaacagaggcagacauagacaugcaccaauu

SEQ ID NO: 415305 - RNA, 32 nt, Human
gaaacagauauagaacaauggaagugacaaca

SEQ ID NO: 415306 - RNA, 32 nt, Human
gaaacagauccagcagugcaaagaacuucuuc

SEQ ID NO: 415307 - RNA, 27 nt, Human
gaaacagaucuuuguaucuugucacca

SEQ ID NO: 415308 - RNA, 32 nt, Human
gaaacagcaagagucucugcaccccacuugga

SEQ ID NO: 415309 - RNA, 32 nt, Human
gaaacagcacagaacacgaggugguccccaug

SEQ ID NO: 415310 - RNA, 32 nt, Human
gaaacagcagcacuauuuuccucuuuucuuaa

SEQ ID NO: 415311 - RNA, 32 nt, Human
gaaacagcaggagaagcggaaaacagagcuug

SEQ ID NO: 415312 - RNA, 32 nt, Human
gaaacagccagcauauuuuauauugccaaagu

SEQ ID NO: 415313 - RNA, 19 nt, Human
gaaacagcccagaucuccu

SEQ ID NO: 415314 - RNA, 32 nt, Human
gaaacagcuacggggaugggacccugggagcu

SEQ ID NO: 415315 - RNA, 32 nt, Human
gaaacagcuaggcagucgccuuuugccaaaau

SEQ ID NO: 415316 - RNA, 32 nt, Human
gaaacaggaaagaagagagggagagagaggaa

SEQ ID NO: 415317 - RNA, 22 nt, Human
gaaacaggagaauagcuugaac

SEQ ID NO: 415318 - RNA, 22 nt, Human
gaaacaggagaaucacuugaac

SEQ ID NO: 415319 - RNA, 22 nt, Human
gaaacaggagaauugcuugaac

SEQ ID NO: 415320 - RNA, 32 nt, Human
gaaacaggaggaaacucagugaccucugccuc

SEQ ID NO: 415321 - RNA, 32 nt, Human
gaaacaggccucgugauucaggagacugaagg

SEQ ID NO: 415322 - RNA, 32 nt, Human
gaaacaggcugaagaaucugggccaguccaga

SEQ ID NO: 415323 - RNA, 31 nt, Human
gaaacagggagaccugggguccuguggauaa

SEQ ID NO: 415324 - RNA, 32 nt, Human
gaaacagggaggguccucgaggaggacacacc

SEQ ID NO: 415325 - RNA, 32 nt, Human
gaaacagggcagcaguggggugaaauuuucuu

SEQ ID NO: 415326 - RNA, 32 nt, Human
gaaacaggugccagggcaggagggggcugggg

SEQ ID NO: 415327 - RNA, 32 nt, Human
gaaacaggugugugugaacugggcacagauug

SEQ ID NO: 415328 - RNA, 32 nt, Human
gaaacaguagcccagagguucaggaagauguu

SEQ ID NO: 415329 - RNA, 32 nt, Human
gaaacagucucgcucugucucccagguuggag

SEQ ID NO: 415330 - RNA, 32 nt, Human
gaaacagugauuaaguuugaucaagccauggu

SEQ ID NO: 415331 - RNA, 32 nt, Human
gaaacagugcagcccaggucccaugggggcag

SEQ ID NO: 415332 - RNA, 32 nt, Human
gaaacagugcaggcucuggagccagacuggcg

SEQ ID NO: 415333 - RNA, 32 nt, Human
gaaacaguggaggcugcugggagccaggccag

SEQ ID NO: 415334 - RNA, 32 nt, Human
gaaacaguucuggcacacaggcagaacacugg

SEQ ID NO: 415335 - RNA, 32 nt, Human
gaaacaguugauaucccucccuuagcaaacag

SEQ ID NO: 415336 - RNA, 16 nt, Human
gaaacaguugcucugu

SEQ ID NO: 415337 - RNA, 32 nt, Human
gaaacaguuucauggaguuuaaguugagugaa

SEQ ID NO: 415338 - RNA, 32 nt, Human
gaaacauaaugcaaucuugcaugugggugggg

SEQ ID NO: 415339 - RNA, 32 nt, Human
gaaacauagagggagagagggagagagccuau

SEQ ID NO: 415340 - RNA, 32 nt, Human
gaaacauagcucagaagaccgaagcacuccuu

SEQ ID NO: 415341 - RNA, 32 nt, Human
gaaacauauaccuuuuucacaucuaggaagaa

SEQ ID NO: 415342 - RNA, 32 nt, Human
gaaacaucacuguggaugacuacuuucacgag

SEQ ID NO: 415343 - RNA, 32 nt, Human
gaaacaucucucucuucuccaagcauaaagga

SEQ ID NO: 415344 - RNA, 32 nt, Human
gaaacaugacccagcuggucagaaagggaaug

SEQ ID NO: 415345 - RNA, 30 nt, Human
gaaacaugacccuugcugccuacaaagaga

SEQ ID NO: 415346 - RNA, 32 nt, Human
gaaacaugacucuuuauugucuguaaaucuaa

SEQ ID NO: 415347 - RNA, 32 nt, Human
gaaacaugaguaaaaguauauguaauguauau

SEQ ID NO: 415348 - RNA, 32 nt, Human
gaaacaugcaagccuuucccucccucuccuuu

SEQ ID NO: 415349 - RNA, 32 nt, Human
gaaacaugccauuuuucagugaagauucuaau

SEQ ID NO: 415350 - RNA, 32 nt, Human
gaaacauguaauccuaaauuuacccucuugaa

SEQ ID NO: 415351 - RNA, 30 nt, Human
gaaacauguggaaugauauugagcugcuaa

SEQ ID NO: 415352 - RNA, 23 nt, Human
gaaacauuaucuccucuuguaca

SEQ ID NO: 415353 - RNA, 32 nt, Human
gaaacauuccuucucccggacagcuggaccca

SEQ ID NO: 415354 - RNA, 32 nt, Human
gaaacauucuggaccuucuuccuugcacuugg

SEQ ID NO: 415355 - RNA, 32 nt, Human
gaaacauugaaagacuuguuacagagggccau

SEQ ID NO: 415356 - RNA, 32 nt, Human
gaaacauuucugagaggaggcuccagccucag

SEQ ID NO: 415357 - RNA, 32 nt, Human
gaaacauuuggcuucagggaaccagacucugu

SEQ ID NO: 415358 - RNA, 32 nt, Human
gaaaccaaaaugauaaauagcuuuaagaaugu

SEQ ID NO: 415359 - RNA, 32 nt, Human
gaaaccaaaccugaagauaccuugaucuugga

SEQ ID NO: 415360 - RNA, 32 nt, Human
gaaaccaaaccugaccugaacuuacacugaua

SEQ ID NO: 415361 - RNA, 32 nt, Human
gaaaccaaaccugcugucaccuugaucuugga

SEQ ID NO: 415362 - RNA, 32 nt, Human
gaaaccaaaguuggaaaagaagaauuguagug

SEQ ID NO: 415363 - RNA, 32 nt, Human
gaaaccaacagggaaacagaacuaucuuuaua

SEQ ID NO: 415364 - RNA, 32 nt, Human
gaaaccaacgcgggaugucagacuucaccaaa

SEQ ID NO: 415365 - RNA, 32 nt, Human
gaaaccaagaagcggauggggaagggagagcu

SEQ ID NO: 415366 - RNA, 32 nt, Human
gaaaccaagcuggauuuugcagugcauauguu

SEQ ID NO: 415367 - RNA, 32 nt, Human
gaaaccaaggcagagcugaggggacagggagg

SEQ ID NO: 415368 - RNA, 21 nt, Human
gaaaccaagguggcuauggcg

SEQ ID NO: 415369 - RNA, 32 nt, Human
gaaaccaauuggaggaaacauaaucuucauuc

SEQ ID NO: 415370 - RNA, 32 nt, Human
gaaaccacacaguucucauuacuguuauuuau

SEQ ID NO: 415371 - RNA, 32 nt, Human
gaaaccacacccuggcccagacugccagcccu

SEQ ID NO: 415372 - RNA, 32 nt, Human
gaaaccacacuucuugaaacagccugggugac

SEQ ID NO: 415373 - RNA, 32 nt, Human
gaaaccacagugauaaccacagugacagccaa

SEQ ID NO: 415374 - RNA, 32 nt, Human
gaaaccacaguggcacagagugcagugccugc

SEQ ID NO: 415375 - RNA, 32 nt, Human
gaaaccaccacccagguucaagcaauuauccu

SEQ ID NO: 415376 - RNA, 32 nt, Human
gaaaccaccgucugccccagacccugacccag

SEQ ID NO: 415377 - RNA, 32 nt, Human
gaaaccaccugacauccacccgcugagcgcac

SEQ ID NO: 415378 - RNA, 19 nt, Human
gaaaccaccuuccuucaug

SEQ ID NO: 415379 - RNA, 32 nt, Human
gaaaccacgucagauacugaguagcuugcuga

SEQ ID NO: 415380 - RNA, 32 nt, Human
gaaaccacugcaacacccaccagcaggugaac

SEQ ID NO: 415381 - RNA, 32 nt, Human
gaaaccagaagguggagguggcagugagccga

SEQ ID NO: 415382 - RNA, 32 nt, Human
gaaaccagaugaucauucugauaaaggaaauu

SEQ ID NO: 415383 - RNA, 32 nt, Human
gaaaccagcagaugcccagcuguagcugugca

SEQ ID NO: 415384 - RNA, 32 nt, Human
gaaaccagccccaguaaucaguaagucaggcu

SEQ ID NO: 415385 - RNA, 32 nt, Human
gaaaccagccugaccaacguggagaaacccca

SEQ ID NO: 415386 - RNA, 32 nt, Human
gaaaccagccuggccaacaaggugagaccccc

SEQ ID NO: 415387 - RNA, 32 nt, Human
gaaaccagccuggccaacguggugagacccug

SEQ ID NO: 415388 - RNA, 32 nt, Human
gaaaccagccugggcaacauagggagacccca

SEQ ID NO: 415389 - RNA, 32 nt, Human
gaaaccagccugggcaacauagugagacccug

SEQ ID NO: 415390 - RNA, 32 nt, Human
gaaaccagccuuuucagcaucucacccauuag

SEQ ID NO: 415391 - RNA, 32 nt, Human
gaaaccagcuaaaucaugacaccuucaauuug

SEQ ID NO: 415392 - RNA, 32 nt, Human
gaaaccaggagggagacugcgagugagugccc

SEQ ID NO: 415393 - RNA, 32 nt, Human
gaaaccaggaggugaggagaccaaggauuagg

SEQ ID NO: 415394 - RNA, 32 nt, Human
gaaaccaggcaucuccuaggaaaaagagcagc

SEQ ID NO: 415395 - RNA, 32 nt, Human
gaaaccagugaauuccguggcuggcacaccac

SEQ ID NO: 415396 - RNA, 32 nt, Human
gaaaccagugggaggaaaugaaguuuucagga

SEQ ID NO: 415397 - RNA, 32 nt, Human
gaaaccaguuauauccauugccacagcaauac

SEQ ID NO: 415398 - RNA, 32 nt, Human
gaaaccauccgcaaccugaggaagucuuuugc

SEQ ID NO: 415399 - RNA, 32 nt, Human
gaaaccaucucaugcucuguggcuccaggguu

SEQ ID NO: 415400 - RNA, 32 nt, Human
gaaaccaucugcccaacuagccucaacugaca

SEQ ID NO: 415401 - RNA, 32 nt, Human
gaaaccaugagacugacagaucugccugaaau

SEQ ID NO: 415402 - RNA, 32 nt, Human
gaaaccaugcagccccuucccuucccuucccu

SEQ ID NO: 415403 - RNA, 31 nt, Human
gaaaccauggcagaaggagagacagagucac

SEQ ID NO: 415404 - RNA, 32 nt, Human
gaaaccaugggggaauccaaagacuugaaguc

SEQ ID NO: 415405 - RNA, 32 nt, Human
gaaaccaugugcuucucauucaguucuggacu

SEQ ID NO: 415406 - RNA, 32 nt, Human
gaaaccauguucaggagcucuguuuguggucc

SEQ ID NO: 415407 - RNA, 32 nt, Human
gaaaccauuuauuuuaaaaaugauuagauugc

SEQ ID NO: 415408 - RNA, 32 nt, Human
gaaacccaaaaaucucaucuuggguguuuuca

SEQ ID NO: 415409 - RNA, 32 nt, Human
gaaacccaacccucuccuguguguucuguuau

SEQ ID NO: 415410 - RNA, 32 nt, Human
gaaacccaagaggcagagguugaguaagcuga

SEQ ID NO: 415411 - RNA, 31 nt, Human
gaaacccaaguguccaucuccaucggaacag

SEQ ID NO: 415412 - RNA, 32 nt, Human
gaaacccacaggcggagguugcggugggcugg

SEQ ID NO: 415413 - RNA, 32 nt, Human
gaaacccacuagucccagcuccugggguggca

SEQ ID NO: 415414 - RNA, 32 nt, Human
gaaacccagaaggcagggguugcagugagcca

SEQ ID NO: 415415 - RNA, 19 nt, Human
gaaacccagcaauuugcug

SEQ ID NO: 415416 - RNA, 32 nt, Human
gaaacccagccuccggcgcacagggaacaugu

SEQ ID NO: 415417 - RNA, 32 nt, Human
gaaacccagggaaccucucugaagugacaccu

SEQ ID NO: 415418 - RNA, 32 nt, Human
gaaacccagggaggggucagcucugcaaaaac

SEQ ID NO: 415419 - RNA, 32 nt, Human
gaaacccagugacaccugucuaggugaagacu

SEQ ID NO: 415420 - RNA, 32 nt, Human
gaaacccaugaucaccccuuugagguagauug

SEQ ID NO: 415421 - RNA, 32 nt, Human
gaaaccccagccccuagggaguuugcucagga

SEQ ID NO: 415422 - RNA, 32 nt, Human
gaaaccccagccugguuuugauggcagcagua

SEQ ID NO: 415423 - RNA, 18 nt, Human
gaaaccccaucucuacua

SEQ ID NO: 415424 - RNA, 32 nt, Human
gaaaccccaucucuacuaaaaauagagaaaaa

SEQ ID NO: 415425 - RNA, 32 nt, Human
gaaaccccaucucuacuagaaguacagagauu

SEQ ID NO: 415426 - RNA, 18 nt, Human
gaaaccccaucucuacug

SEQ ID NO: 415427 - RNA, 18 nt, Human
gaaaccccaucucuauua

SEQ ID NO: 415428 - RNA, 32 nt, Human
gaaaccccaucucuauuauauaagaaauuagc

SEQ ID NO: 415429 - RNA, 32 nt, Human
gaaaccccaucucuuaaagaaaaaguuagcca

SEQ ID NO: 415430 - RNA, 18 nt, Human
gaaaccccaucuuuacua

SEQ ID NO: 415431 - RNA, 18 nt, Human
gaaaccccauuucuacua

SEQ ID NO: 415432 - RNA, 32 nt, Human
gaaaccccauuuuucccaggguaaucaugaaa

SEQ ID NO: 415433 - RNA, 32 nt, Human
gaaacccccauguuggccaggcuggucucaaa

SEQ ID NO: 415434 - RNA, 32 nt, Human
gaaacccccuaaaaauacaaaaauuagccggg

SEQ ID NO: 415435 - RNA, 32 nt, Human
gaaacccccugccccugccucccccagcccgg

SEQ ID NO: 415436 - RNA, 28 nt, Human
gaaacccccugccuucuggccccaucua

SEQ ID NO: 415437 - RNA, 18 nt, Human
gaaaccccgucucuacua

SEQ ID NO: 415438 - RNA, 32 nt, Human
gaaaccccuaaaucgagaccuggcugccuuuu

SEQ ID NO: 415439 - RNA, 32 nt, Human
gaaaccccucccaccuuuacacaugcccaggc

SEQ ID NO: 415440 - RNA, 32 nt, Human
gaaaccccuuucuccuccugcuccuugucccc

SEQ ID NO: 415441 - RNA, 32 nt, Human
gaaacccgggaaguggagguugcagugagcca

SEQ ID NO: 415442 - RNA, 32 nt, Human
gaaacccuacacccucccccuccagggaaugc

SEQ ID NO: 415443 - RNA, 32 nt, Human
gaaacccuaggcagacaccaggccaggcuuga

SEQ ID NO: 415444 - RNA, 18 nt, Human
gaaacccuaucucuacua

SEQ ID NO: 415445 - RNA, 32 nt, Human
gaaacccuauuuucuuuucuccaagaccaugg

SEQ ID NO: 415446 - RNA, 32 nt, Human
gaaacccucuacugccccauaagccaggaaaa

SEQ ID NO: 415447 - RNA, 32 nt, Human
gaaacccucuucuucccuggucuggcucugcu

SEQ ID NO: 415448 - RNA, 32 nt, Human
gaaacccugaaauacaaaaauuagucaggcau

SEQ ID NO: 415449 - RNA, 32 nt, Human
gaaacccugaacccgaguccucagccaugacg

SEQ ID NO: 415450 - RNA, 32 nt, Human
gaaacccugacugucuacagauuccaacuuua

SEQ ID NO: 415451 - RNA, 32 nt, Human
gaaacccugaucccaguggaggcuguaaccca

SEQ ID NO: 415452 - RNA, 32 nt, Human
gaaacccugauguaaagaucagucccaguuau

SEQ ID NO: 415453 - RNA, 32 nt, Human
gaaacccugcauaguguggcugagccucagga

SEQ ID NO: 415454 - RNA, 32 nt, Human
gaaacccugcauucaauguagcugucaauuca

SEQ ID NO: 415455 - RNA, 32 nt, Human
gaaacccuggaccaguggucucacauggugcu

SEQ ID NO: 415456 - RNA, 20 nt, Human
gaaacccugucucuacaaaa

SEQ ID NO: 415457 - RNA, 32 nt, Human
gaaacccuugauagaaacuggaagccugccau

SEQ ID NO: 415458 - RNA, 32 nt, Human
gaaacccuuguuccuuccucuggucauugacg

SEQ ID NO: 415459 - RNA, 32 nt, Human
gaaaccgaaaaacaggcuuguguccuuccauu

SEQ ID NO: 415460 - RNA, 32 nt, Human
gaaaccgaggcugaagcugggaggugagccag

SEQ ID NO: 415461 - RNA, 32 nt, Human
gaaaccggaaggcagagguugcagugagccaa

SEQ ID NO: 415462 - RNA, 32 nt, Human
gaaaccgggaggcggagguugaggugagccga

SEQ ID NO: 415463 - RNA, 17 nt, Human
gaaaccggguaacggcu

SEQ ID NO: 415464 - RNA, 32 nt, Human
gaaaccuacagaaccgacaaaaauuagggugc

SEQ ID NO: 415465 - RNA, 32 nt, Human
gaaaccuagaaucaaacugagauacagauuuc

SEQ ID NO: 415466 - RNA, 32 nt, Human
gaaaccuaggggcacauuggguaauaagagua

SEQ ID NO: 415467 - RNA, 32 nt, Human
gaaaccuauagacgauguuuuaauguaccuuc

SEQ ID NO: 415468 - RNA, 32 nt, Human
gaaaccuauccuccucaccagaagagccugug

SEQ ID NO: 415469 - RNA, 32 nt, Human
gaaaccuaucucugaguuuugggaccaggucg

SEQ ID NO: 415470 - RNA, 32 nt, Human
gaaaccuauuacagccugcagcugugagcuga

SEQ ID NO: 415471 - RNA, 32 nt, Human
gaaaccucagcgugaagggacauaucacugac

SEQ ID NO: 415472 - RNA, 32 nt, Human
gaaaccuccagaggaaucuguuugcuuccuga

SEQ ID NO: 415473 - RNA, 32 nt, Human
gaaaccucugcagcucauucugccacugcaaa

SEQ ID NO: 415474 - RNA, 32 nt, Human
gaaaccucuuuauuucccuccugaggggucuc

SEQ ID NO: 415475 - RNA, 32 nt, Human
gaaaccugaacauggaaaccaccagaacaaga

SEQ ID NO: 415476 - RNA, 32 nt, Human
gaaaccugagaggcagcaccacacaguggaaa

SEQ ID NO: 415477 - RNA, 32 nt, Human
gaaaccugagaugcagugggccaagggguaug

SEQ ID NO: 415478 - RNA, 32 nt, Human
gaaaccugcagccugggcucccggcuacaaca

SEQ ID NO: 415479 - RNA, 32 nt, Human
gaaaccugcuuuguaggggauuauguagacua

SEQ ID NO: 415480 - RNA, 32 nt, Human
gaaaccugggacaucugaacugcuccaugaag

SEQ ID NO: 415481 - RNA, 32 nt, Human
gaaaccugggcagcccucucaguggcuuccua

SEQ ID NO: 415482 - RNA, 32 nt, Human
gaaaccugggcuggagugagguggaaggaugu

SEQ ID NO: 415483 - RNA, 32 nt, Human
gaaaccuggggcuaggggaaaugaaaggaagc

SEQ ID NO: 415484 - RNA, 32 nt, Human
gaaaccuggguccuagucccagcucuuccaug

SEQ ID NO: 415485 - RNA, 32 nt, Human
gaaaccugucucuacaaaaauacaaaaauuag

SEQ ID NO: 415486 - RNA, 32 nt, Human
gaaaccuuauaaaagaaauuauauggcaaggu

SEQ ID NO: 415487 - RNA, 21 nt, Human
gaaaccuuaugaaugcaguga

SEQ ID NO: 415488 - RNA, 32 nt, Human
gaaaccuuccaaugcuucuguugaucucagua

SEQ ID NO: 415489 - RNA, 32 nt, Human
gaaaccuucccaaagcucuccacaucacucuc

SEQ ID NO: 415490 - RNA, 32 nt, Human
gaaaccuugcuguccucaccuccaaggcaggg

SEQ ID NO: 415491 - RNA, 32 nt, Human
gaaaccuugggaacaugaugaaugugaggaaa

SEQ ID NO: 415492 - RNA, 22 nt, Human
gaaaccuugguuucuccauccu

SEQ ID NO: 415493 - RNA, 20 nt, Human
gaaaccuuuacccaugacca

SEQ ID NO: 415494 - RNA, 32 nt, Human
gaaaccuuugcugcugaaaugaggcaaaauga

SEQ ID NO: 415495 - RNA, 32 nt, Human
gaaaccuuugugagacagagaacagggaauua

SEQ ID NO: 415496 - RNA, 24 nt, Human
gaaaccuuuuaccuauuaccuucc

SEQ ID NO: 415497 - RNA, 32 nt, Human
gaaacgaaagaaagcaaagcaaagucagugaa

SEQ ID NO: 415498 - RNA, 32 nt, Human
gaaacgaagaagcagauggagaggucccauua

SEQ ID NO: 415499 - RNA, 32 nt, Human
gaaacgaaguugagaaaaugauuuucccuuug

SEQ ID NO: 415500 - RNA, 32 nt, Human
gaaacgacacaucccagugggauuuccaacac

SEQ ID NO: 415501 - RNA, 32 nt, Human
gaaacgaccccacaggucagguggaggguggg

SEQ ID NO: 415502 - RNA, 32 nt, Human
gaaacgaggcugcaguggugguaguaggaaga

SEQ ID NO: 415503 - RNA, 32 nt, Human
gaaacgaggguuuauuccguugcccacuccgc

SEQ ID NO: 415504 - RNA, 32 nt, Human
gaaacgaugaaccuguaaucacucuggccaaa

SEQ ID NO: 415505 - RNA, 32 nt, Human
gaaacgcaccaugccugcuuccaucuuuugcu

SEQ ID NO: 415506 - RNA, 32 nt, Human
gaaacgcacccauggggcaccugcucucggcc

SEQ ID NO: 415507 - RNA, 32 nt, Human
gaaacgcaggaguccuuccugguagccagcuc

SEQ ID NO: 415508 - RNA, 32 nt, Human
gaaacgcagggucuuguugcaagucuggcuua

SEQ ID NO: 415509 - RNA, 31 nt, Human
gaaacgcaguuuccauggcccaacucacagu

SEQ ID NO: 415510 - RNA, 32 nt, Human
gaaacgccuguauuuaaagggauaguaacucg

SEQ ID NO: 415511 - RNA, 32 nt, Human
gaaacgcuacaucuucucugguugaggggcuu

SEQ ID NO: 415512 - RNA, 32 nt, Human
gaaacgcucaugcacaccuggcugcacaggug

SEQ ID NO: 415513 - RNA, 32 nt, Human
gaaacgcucaugggugcaucccugacgagccc

SEQ ID NO: 415514 - RNA, 32 nt, Human
gaaacgcucccacucccacgggccaucgaggg

SEQ ID NO: 415515 - RNA, 32 nt, Human
gaaacgcugaggcuccagcccuagccagcccu

SEQ ID NO: 415516 - RNA, 32 nt, Human
gaaacgcuuuggugcuuuucuccaguuuucug

SEQ ID NO: 415517 - RNA, 32 nt, Human
gaaacggagcccaucuaaccaaugcccagcac

SEQ ID NO: 415518 - RNA, 25 nt, Human
gaaacggaucaccaaauugaugugu

SEQ ID NO: 415519 - RNA, 32 nt, Human
gaaacggcagaagaaagugccagugcaggaga

SEQ ID NO: 415520 - RNA, 32 nt, Human
gaaacgggaggccauaguuucuaagaaggagg

SEQ ID NO: 415521 - RNA, 32 nt, Human
gaaacgggaggcggagguugcagugagccgaa

SEQ ID NO: 415522 - RNA, 32 nt, Human
gaaacgggguuucaccauguugcucaggcugg

SEQ ID NO: 415523 - RNA, 32 nt, Human
gaaacggucauuuaucaggagccaucuuuauu

SEQ ID NO: 415524 - RNA, 18 nt, Human
gaaacgguggaacaguuu

SEQ ID NO: 415525 - RNA, 32 nt, Human
gaaacguauacuuuaacaacaaaggaauuaca

SEQ ID NO: 415526 - RNA, 32 nt, Human
gaaacgucccuugccacuccccacucucauca

SEQ ID NO: 415527 - RNA, 31 nt, Human
gaaacuaaaagcuuucacucuuagaaacauu

SEQ ID NO: 415528 - RNA, 32 nt, Human
gaaacuaaaaguacauauguauuauacacuug

SEQ ID NO: 415529 - RNA, 32 nt, Human
gaaacuaacuacuaacuagucuuuggaauucg

SEQ ID NO: 415530 - RNA, 32 nt, Human
gaaacuaagagagaauugguacuuuaauuacu

SEQ ID NO: 415531 - RNA, 32 nt, Human
gaaacuaagaucaagacacauguuuggggaua

SEQ ID NO: 415532 - RNA, 32 nt, Human
gaaacuacauaagcaaaccaagcccuaugaac

SEQ ID NO: 415533 - RNA, 32 nt, Human
gaaacuacauagcaugcuuuugcucaaaauag

SEQ ID NO: 415534 - RNA, 21 nt, Human
gaaacuacaugaaugcaguga

SEQ ID NO: 415535 - RNA, 32 nt, Human
gaaacuaccuaaaaggauauguuaucacugga

SEQ ID NO: 415536 - RNA, 32 nt, Human
gaaacuagaaugagagggaagagauagcaugg

SEQ ID NO: 415537 - RNA, 32 nt, Human
gaaacuagaucuucccacagaacacuggggac

SEQ ID NO: 415538 - RNA, 32 nt, Human
gaaacuagcuaccacacccugacuuuacccuu

SEQ ID NO: 415539 - RNA, 32 nt, Human
gaaacuagggaaacuaguucuuugguuaauga

SEQ ID NO: 415540 - RNA, 32 nt, Human
gaaacuaugguucaagaagagaggacggggcu

SEQ ID NO: 415541 - RNA, 32 nt, Human
gaaacuauucuaagaguaacaaaggaaaacaa

SEQ ID NO: 415542 - RNA, 23 nt, Human
gaaacucaaaacugacacuagga

SEQ ID NO: 415543 - RNA, 24 nt, Human
gaaacucaaaauugaacacaguga

SEQ ID NO: 415544 - RNA, 21 nt, Human
gaaacucaagcauuuucacua

SEQ ID NO: 415545 - RNA, 31 nt, Human
gaaacucacagcuacaagggcaggugaggaa

SEQ ID NO: 415546 - RNA, 32 nt, Human
gaaacucacgcugcuccagccugaggcuucca

SEQ ID NO: 415547 - RNA, 32 nt, Human
gaaacucacugcaaaaucaccacgacucuuuc

SEQ ID NO: 415548 - RNA, 32 nt, Human
gaaacucacuucuggcaccugucgagaugcca

SEQ ID NO: 415549 - RNA, 32 nt, Human
gaaacucagauguccaaacuaauuuuaacaaa

SEQ ID NO: 415550 - RNA, 32 nt, Human
gaaacucagccauccuuagagaacuguggugc

SEQ ID NO: 415551 - RNA, 20 nt, Human
gaaacucagucguucaggga

SEQ ID NO: 415552 - RNA, 32 nt, Human
gaaacucaugcaaugccuacaggaagcuuugu

SEQ ID NO: 415553 - RNA, 23 nt, Human
gaaacucaugggauuuguaacca

SEQ ID NO: 415554 - RNA, 21 nt, Human
gaaacucauugaaaacaauga

SEQ ID NO: 415555 - RNA, 32 nt, Human
gaaacuccaauuucucuugcauggagacuccu

SEQ ID NO: 415556 - RNA, 32 nt, Human
gaaacuccaggcaguccucaagaggcugaaga

SEQ ID NO: 415557 - RNA, 32 nt, Human
gaaacuccaguuccuuuccucucuugccucuu

SEQ ID NO: 415558 - RNA, 18 nt, Human
gaaacuccaucucuacua

SEQ ID NO: 415559 - RNA, 32 nt, Human
gaaacuccaucuucaaaacaaaacaaaacaaa

SEQ ID NO: 415560 - RNA, 32 nt, Human
gaaacucccaggagacagcagccuaguuuucg

SEQ ID NO: 415561 - RNA, 32 nt, Human
gaaacuccgucucaaaaacaaagaaggauaua

SEQ ID NO: 415562 - RNA, 32 nt, Human
gaaacuccugaaaaucuugaaauggauuucua

SEQ ID NO: 415563 - RNA, 32 nt, Human
gaaacuccuggagcaacaaagaagagagaaaa

SEQ ID NO: 415564 - RNA, 32 nt, Human
gaaacucuaccuaacagggaacuaucuucaaa

SEQ ID NO: 415565 - RNA, 32 nt, Human
gaaacucucccagagacgaagaaagaguccug

SEQ ID NO: 415566 - RNA, 32 nt, Human
gaaacucucccauccaacaucacccaguggau

SEQ ID NO: 415567 - RNA, 32 nt, Human
gaaacucugaaagucccucccaaaaagaugga

SEQ ID NO: 415568 - RNA, 32 nt, Human
gaaacucugaagauggaucauggccaugacug

SEQ ID NO: 415569 - RNA, 32 nt, Human
gaaacucugcaggccuuccgccugauuauuau

SEQ ID NO: 415570 - RNA, 31 nt, Human
gaaacucuuaucaauaaaaccccaacaucac

SEQ ID NO: 415571 - RNA, 32 nt, Human
gaaacucuucucuccaaaucccaggccuggcu

SEQ ID NO: 415572 - RNA, 32 nt, Human
gaaacugaaggcagaugccucuccuuguuaaa

SEQ ID NO: 415573 - RNA, 32 nt, Human
gaaacugaagggaguuuugcaagugaaaauuu

SEQ ID NO: 415574 - RNA, 32 nt, Human
gaaacugaaguugaggaauagugaagaguuug

SEQ ID NO: 415575 - RNA, 32 nt, Human
gaaacugacagcugucuuccacagccucugau

SEQ ID NO: 415576 - RNA, 32 nt, Human
gaaacugaccaccacccacaacuccgccagug

SEQ ID NO: 415577 - RNA, 32 nt, Human
gaaacugacugcuucagggcucagcuggaaga

SEQ ID NO: 415578 - RNA, 31 nt, Human
gaaacugagaccauccuagccaacaugguga

SEQ ID NO: 415579 - RNA, 19 nt, Human
gaaacugagagcuccuggg

SEQ ID NO: 415580 - RNA, 32 nt, Human
gaaacugagcccagagaccacaagcaaacugg

SEQ ID NO: 415581 - RNA, 32 nt, Human
gaaacugagccuuugcaagcauugaagcccac

SEQ ID NO: 415582 - RNA, 32 nt, Human
gaaacugaggcacaauaggguuaugacuugcu

SEQ ID NO: 415583 - RNA, 32 nt, Human
gaaacugaggcagagagugccguggagugguu

SEQ ID NO: 415584 - RNA, 32 nt, Human
gaaacugcacuccugucuucuggcuucagucu

SEQ ID NO: 415585 - RNA, 32 nt, Human
gaaacugccccugagcucacacauauuuccaa

SEQ ID NO: 415586 - RNA, 32 nt, Human
gaaacugccgcaucugccauauaaaggagaug

SEQ ID NO: 415587 - RNA, 24 nt, Human
gaaacugccuauaucuugccauca

SEQ ID NO: 415588 - RNA, 32 nt, Human
gaaacugcggcaggccgggugcagugucucaa

SEQ ID NO: 415589 - RNA, 32 nt, Human
gaaacugcuagcaaucaugcaauucuucagcu

SEQ ID NO: 415590 - RNA, 22 nt, Human
gaaacugcuauggacauggagg

SEQ ID NO: 415591 - RNA, 32 nt, Human
gaaacugcugagccaugcagggcagccuggug

SEQ ID NO: 415592 - RNA, 32 nt, Human
gaaacuggaaggcagagguugcagugagccaa

SEQ ID NO: 415593 - RNA, 32 nt, Human
gaaacuggaaggcagagguugcagugagccga

SEQ ID NO: 415594 - RNA, 32 nt, Human
gaaacuggacuaacaaugaggccaaagacuuu

SEQ ID NO: 415595 - RNA, 32 nt, Human
gaaacuggagugaaagggaagcaaugcagaaa

SEQ ID NO: 415596 - RNA, 32 nt, Human
gaaacuggccccggaucagagcaggaccuccc

SEQ ID NO: 415597 - RNA, 32 nt, Human
gaaacuggcgcugcugcugccucggcagcacc

SEQ ID NO: 415598 - RNA, 32 nt, Human
gaaacugggaggcagggguuggagugagccag

SEQ ID NO: 415599 - RNA, 32 nt, Human
gaaacugggaggcggagcuugcagugagccga

SEQ ID NO: 415600 - RNA, 32 nt, Human
gaaacugggagguggagguugcagugagccaa

SEQ ID NO: 415601 - RNA, 32 nt, Human
gaaacugggaugaccuggacccugccguaugg

SEQ ID NO: 415602 - RNA, 32 nt, Human
gaaacuggggaagggaaaacaaaccuucaaag

SEQ ID NO: 415603 - RNA, 32 nt, Human
gaaacuggggaaugugucucugccuguaaacu

SEQ ID NO: 415604 - RNA, 21 nt, Human
gaaacuggggucuuccucucc

SEQ ID NO: 415605 - RNA, 32 nt, Human
gaaacuggguuucucauuaaaguuguuuccca

SEQ ID NO: 415606 - RNA, 32 nt, Human
gaaacuggugcagcagaucaugcaaaguaaaa

SEQ ID NO: 415607 - RNA, 32 nt, Human
gaaacuggugccccagcagaucaaagguggga

SEQ ID NO: 415608 - RNA, 32 nt, Human
gaaacugguugugaucacaaagcacaacgaug

SEQ ID NO: 415609 - RNA, 32 nt, Human
gaaacuguauuuuggaagauauuugaaauuau

SEQ ID NO: 415610 - RNA, 32 nt, Human
gaaacuguauuuuuccuuuuguuuucauuuga

SEQ ID NO: 415611 - RNA, 32 nt, Human
gaaacugucugcuuuuugcuauuucugcaguu

SEQ ID NO: 415612 - RNA, 32 nt, Human
gaaacugugaaauaauaaaaguguguugucuu

SEQ ID NO: 415613 - RNA, 32 nt, Human
gaaacugugaugacuuugauuuuugugaaacg

SEQ ID NO: 415614 - RNA, 32 nt, Human
gaaacugugcacguuuuugucccuucaguugc

SEQ ID NO: 415615 - RNA, 32 nt, Human
gaaacuguggcaagagcgucugugcugaacca

SEQ ID NO: 415616 - RNA, 32 nt, Human
gaaacuguggcaccuccacugacagaggcggc

SEQ ID NO: 415617 - RNA, 32 nt, Human
gaaacugugugagcuguccugaccuggacgau

SEQ ID NO: 415618 - RNA, 32 nt, Human
gaaacuguuagaguugggggcucugcuuuuuc

SEQ ID NO: 415619 - RNA, 32 nt, Human
gaaacuguucccaccugcuggagugaaggggc

SEQ ID NO: 415620 - RNA, 32 nt, Human
gaaacuguugaugucacauccuuugacccugg

SEQ ID NO: 415621 - RNA, 22 nt, Human
gaaacuguugauguuugcauca

SEQ ID NO: 415622 - RNA, 32 nt, Human
gaaacuuaacaaucauggcagaaggaccucuu

SEQ ID NO: 415623 - RNA, 22 nt, Human
gaaacuuaagggacaagggcca

SEQ ID NO: 415624 - RNA, 32 nt, Human
gaaacuuacccauucagugcaccaagagcagc

SEQ ID NO: 415625 - RNA, 32 nt, Human
gaaacuuacccugagcaugacugggacacagc

SEQ ID NO: 415626 - RNA, 32 nt, Human
gaaacuuagugugccuuggaaaaggccgcaag

SEQ ID NO: 415627 - RNA, 32 nt, Human
gaaacuuauuucacuuucacacugccuucagg

SEQ ID NO: 415628 - RNA, 32 nt, Human
gaaacuucaaacuaaaccacuaacucaaugaa

SEQ ID NO: 415629 - RNA, 32 nt, Human
gaaacuucaagaaacuucaauaagggaugcau

SEQ ID NO: 415630 - RNA, 32 nt, Human
gaaacuucaagcaaaucuacuucaacacuuca

SEQ ID NO: 415631 - RNA, 32 nt, Human
gaaacuucacauaucacauucuuuuuaucaga

SEQ ID NO: 415632 - RNA, 32 nt, Human
gaaacuucaccucugcugagcccucauucccc

SEQ ID NO: 415633 - RNA, 32 nt, Human
gaaacuucacguggcuacauuguauuuccccc

SEQ ID NO: 415634 - RNA, 32 nt, Human
gaaacuucaguuauuguauugguaacuauaaa

SEQ ID NO: 415635 - RNA, 32 nt, Human
gaaacuuccccauucggugcaccaagagcaac

SEQ ID NO: 415636 - RNA, 32 nt, Human
gaaacuuccuuugagaauugugcgacuucaca

SEQ ID NO: 415637 - RNA, 32 nt, Human
gaaacuucguugccagagaugacugggguuuu

SEQ ID NO: 415638 - RNA, 32 nt, Human
gaaacuucucagaaauuaaucugaaauggcag

SEQ ID NO: 415639 - RNA, 32 nt, Human
gaaacuucuuagggcaaacccaccucccacuc

SEQ ID NO: 415640 - RNA, 32 nt, Human
gaaacuugaacaaagagcggcaauuccacuuc

SEQ ID NO: 415641 - RNA, 32 nt, Human
gaaacuugagagaagagaaguuagugauuccc

SEQ ID NO: 415642 - RNA, 32 nt, Human
gaaacuugaucaggaaagugacacuggucuuu

SEQ ID NO: 415643 - RNA, 32 nt, Human
gaaacuugccccuucccauuucuagagcugga

SEQ ID NO: 415644 - RNA, 32 nt, Human
gaaacuuggacugagcuacugcuggcuuccuu

SEQ ID NO: 415645 - RNA, 32 nt, Human
gaaacuuggcuguagacaucugaagagggugc

SEQ ID NO: 415646 - RNA, 32 nt, Human
gaaacuuguuagaaauacaaauuuuagggccu

SEQ ID NO: 415647 - RNA, 32 nt, Human
gaaacuuuaucaucuuucacuuuugguuuucc

SEQ ID NO: 415648 - RNA, 32 nt, Human
gaaacuuugcuuguuugaaguccuguggauuc

SEQ ID NO: 415649 - RNA, 32 nt, Human
gaaacuuuggugguggucauggaggcaguuuu

SEQ ID NO: 415650 - RNA, 32 nt, Human
gaaacuuuucaaggacaguguauuauaacaau

SEQ ID NO: 415651 - RNA, 32 nt, Human
gaaacuuuucauuuccuguuccuugcuaauua

SEQ ID NO: 415652 - RNA, 32 nt, Human
gaaacuuuuggauguggggcaucauccgcauc

SEQ ID NO: 415653 - RNA, 32 nt, Human
gaaacuuuuguagcaaucuggucuauagacuu

SEQ ID NO: 415654 - RNA, 32 nt, Human
gaaagaaaaacagcauuuuucucuagcagaga

SEQ ID NO: 415655 - RNA, 32 nt, Human
gaaagaaaaaccugcauauuuuguacagaaaa

SEQ ID NO: 415656 - RNA, 32 nt, Human
gaaagaaaaagaaagaaagaaaagaaaagaaa

SEQ ID NO: 415657 - RNA, 32 nt, Human
gaaagaaaaauguaggcaucauagccauucag

SEQ ID NO: 415658 - RNA, 32 nt, Human
gaaagaaaaauuaucuugaauguaguauucaa

SEQ ID NO: 415659 - RNA, 32 nt, Human
gaaagaaaacaaaaccaacaguuaguggaguc

SEQ ID NO: 415660 - RNA, 32 nt, Human
gaaagaaaacacaaagagaaaauaugaacaau

SEQ ID NO: 415661 - RNA, 32 nt, Human
gaaagaaaaucaccagcuucaugcccugaaau

SEQ ID NO: 415662 - RNA, 32 nt, Human
gaaagaaaauggaggaagaggaaguaggaaga

SEQ ID NO: 415663 - RNA, 32 nt, Human
gaaagaaaauuuaggggccaguucucaaggaa

SEQ ID NO: 415664 - RNA, 20 nt, Human
gaaagaaacaggaccccucc

SEQ ID NO: 415665 - RNA, 32 nt, Human
gaaagaaacaugugaguaagugagagagagug

SEQ ID NO: 415666 - RNA, 32 nt, Human
gaaagaaacauucgguaaagaggggaagaugu

SEQ ID NO: 415667 - RNA, 32 nt, Human
gaaagaaacuaaucacagcacagaaguaccuu

SEQ ID NO: 415668 - RNA, 32 nt, Human
gaaagaaacuaccuuuuuauaaugcacaacug

SEQ ID NO: 415669 - RNA, 32 nt, Human
gaaagaaagaaaaagaaagaaagaaaagaaaa

SEQ ID NO: 415670 - RNA, 32 nt, Human
gaaagaaagaaagagaaaagaaaagaaaagca

SEQ ID NO: 415671 - RNA, 32 nt, Human
gaaagaaagaaagaguggguuucagaaguguc

SEQ ID NO: 415672 - RNA, 17 nt, Human
gaaagaaagacuguggu

SEQ ID NO: 415673 - RNA, 32 nt, Human
gaaagaaagaugaccccuuccugaggcccguu

SEQ ID NO: 415674 - RNA, 32 nt, Human
gaaagaaagcaaagcaaagucagugaaagaca

SEQ ID NO: 415675 - RNA, 31 nt, Human
gaaagaaaggaaagaaagaaagacuguaaua

SEQ ID NO: 415676 - RNA, 32 nt, Human
gaaagaaagggaaaagggagaaaaagaaacac

SEQ ID NO: 415677 - RNA, 32 nt, Human
gaaagaaaggggcaaggaaaguaagaagacau

SEQ ID NO: 415678 - RNA, 32 nt, Human
gaaagaaaugauacauuuuccccaaguaaggu

SEQ ID NO: 415679 - RNA, 32 nt, Human
gaaagaaauguaccuucuuucacucugucauc

SEQ ID NO: 415680 - RNA, 32 nt, Human
gaaagaaauuaagguuagcggaucauguacaa

SEQ ID NO: 415681 - RNA, 32 nt, Human
gaaagaacacacuagggagaaacccuaucaau

SEQ ID NO: 415682 - RNA, 32 nt, Human
gaaagaacaguuacuggcagaggaagaggaug

SEQ ID NO: 415683 - RNA, 32 nt, Human
gaaagaacauuauuccgggcgcgguggcucac

SEQ ID NO: 415684 - RNA, 32 nt, Human
gaaagaacguucccaccugccuagccauggga

SEQ ID NO: 415685 - RNA, 32 nt, Human
gaaagaacucaccuuucuggggcucucugaca

SEQ ID NO: 415686 - RNA, 32 nt, Human
gaaagaacucuccaccacggggaaugugaaag

SEQ ID NO: 415687 - RNA, 24 nt, Human
gaaagaacucucccaacccugggg

SEQ ID NO: 415688 - RNA, 32 nt, Human
gaaagaacuuuuagcaagguugugcuuucaaa

SEQ ID NO: 415689 - RNA, 23 nt, Human
gaaagaagaaaagauaauaccca

SEQ ID NO: 415690 - RNA, 32 nt, Human
gaaagaagaacuccaaguuacuggacaccagg

SEQ ID NO: 415691 - RNA, 32 nt, Human
gaaagaagacccuucuauuuagaguagaaaca

SEQ ID NO: 415692 - RNA, 32 nt, Human
gaaagaagagaauccaagggagagggguuggu

SEQ ID NO: 415693 - RNA, 32 nt, Human
gaaagaagagcaaauacaaaagccugaaggaa

SEQ ID NO: 415694 - RNA, 32 nt, Human
gaaagaagagcucagauugaaaggagggagcu

SEQ ID NO: 415695 - RNA, 32 nt, Human
gaaagaagcacaugaacuacagccuggaggug

SEQ ID NO: 415696 - RNA, 32 nt, Human
gaaagaagcaccucacagcuccuuucuagguc

SEQ ID NO: 415697 - RNA, 32 nt, Human
gaaagaagccagugccccaggucaccuaagac

SEQ ID NO: 415698 - RNA, 32 nt, Human
gaaagaagccauugaaaacaaagacauucuuc

SEQ ID NO: 415699 - RNA, 32 nt, Human
gaaagaagcgggccugaacaccaugaucccuu

SEQ ID NO: 415700 - RNA, 32 nt, Human
gaaagaagcuucuagaugcauauuguggggag

SEQ ID NO: 415701 - RNA, 22 nt, Human
gaaagaaggaaauaaaacauca

SEQ ID NO: 415702 - RNA, 32 nt, Human
gaaagaaggaaaugaaugugcauuuuauuaau

SEQ ID NO: 415703 - RNA, 18 nt, Human
gaaagaaggaccucggga

SEQ ID NO: 415704 - RNA, 32 nt, Human
gaaagaaggagaaggaagaagagagaaggaga

SEQ ID NO: 415705 - RNA, 32 nt, Human
gaaagaaggagagaaugagugagugcuugaaa

SEQ ID NO: 415706 - RNA, 32 nt, Human
gaaagaaggcaaggagguaggaagagagggag

SEQ ID NO: 415707 - RNA, 23 nt, Human
gaaagaagggugccacccccucc

SEQ ID NO: 415708 - RNA, 32 nt, Human
gaaagaaguacugaugacuuuucaaaacaaau

SEQ ID NO: 415709 - RNA, 32 nt, Human
gaaagaaguccccagaagaugagcucuguuac

SEQ ID NO: 415710 - RNA, 32 nt, Human
gaaagaaguggggacagagcagaacuuucacc

SEQ ID NO: 415711 - RNA, 32 nt, Human
gaaagaauaaccacugcacuccaaccugggca

SEQ ID NO: 415712 - RNA, 32 nt, Human
gaaagaauaaguuuugguucaaagucaauaau

SEQ ID NO: 415713 - RNA, 32 nt, Human
gaaagaauaccucaggaaaaacaaauacacuu

SEQ ID NO: 415714 - RNA, 32 nt, Human
gaaagaaugacccuggugagugcucuaaguuu

SEQ ID NO: 415715 - RNA, 32 nt, Human
gaaagacaaaacuguuugccauuuuuacuggc

SEQ ID NO: 415716 - RNA, 32 nt, Human
gaaagacaaacgggagagaaaaagaggaaggc

SEQ ID NO: 415717 - RNA, 32 nt, Human
gaaagacaaagaaggaaaagaguaucaaaggc

SEQ ID NO: 415718 - RNA, 32 nt, Human
gaaagacaaauggauucccuuagaaguaagau

SEQ ID NO: 415719 - RNA, 31 nt, Human
gaaagacaagaugcaacuaggaagagacaca

SEQ ID NO: 415720 - RNA, 21 nt, Human
gaaagacaaggaaaccccuga

SEQ ID NO: 415721 - RNA, 32 nt, Human
gaaagacaggcagggaaaagcuuaggcugacc

SEQ ID NO: 415722 - RNA, 32 nt, Human
gaaagacaucacauaccuucagcacuucucac

SEQ ID NO: 415723 - RNA, 32 nt, Human
gaaagacauuuguucucccaaaacugauuacu

SEQ ID NO: 415724 - RNA, 32 nt, Human
gaaagaccagaagaguggacaacuagcaacuu

SEQ ID NO: 415725 - RNA, 32 nt, Human
gaaagaccagagcucuugcaucagggaaacau

SEQ ID NO: 415726 - RNA, 32 nt, Human
gaaagaccauuuuuccuccacugaacuagggu

SEQ ID NO: 415727 - RNA, 32 nt, Human
gaaagacccaggcugcgggacgcggugcaggc

SEQ ID NO: 415728 - RNA, 32 nt, Human
gaaagacccuggcacccgcccgacaccugcgu

SEQ ID NO: 415729 - RNA, 32 nt, Human
gaaagaccucaguacaugcuuugcacucuccu

SEQ ID NO: 415730 - RNA, 32 nt, Human
gaaagacucacugucuacaccaucccucuucc

SEQ ID NO: 415731 - RNA, 32 nt, Human
gaaagacugaagaggcuggagugcaguggcgc

SEQ ID NO: 415732 - RNA, 32 nt, Human
gaaagacugcuccuggugcagggccuuuacca

SEQ ID NO: 415733 - RNA, 32 nt, Human
gaaagacuggcguggcaagcgucgcccugaaa

SEQ ID NO: 415734 - RNA, 32 nt, Human
gaaagacuggcugucuuccuccucacugcauc

SEQ ID NO: 415735 - RNA, 32 nt, Human
gaaagacuguacaaaguauaagucuuagaugu

SEQ ID NO: 415736 - RNA, 32 nt, Human
gaaagacuuacaugguccucaggcauggacag

SEQ ID NO: 415737 - RNA, 32 nt, Human
gaaagagaaaccagguauucugcuacaguuug

SEQ ID NO: 415738 - RNA, 32 nt, Human
gaaagagaaagaauuugcaaccaugaggaaug

SEQ ID NO: 415739 - RNA, 32 nt, Human
gaaagagaaagaauuuguuucacaguuuggau

SEQ ID NO: 415740 - RNA, 32 nt, Human
gaaagagaaagagaaggaaggaaggagaaaga

SEQ ID NO: 415741 - RNA, 32 nt, Human
gaaagagaaaugcaggagccgcggggcucccg

SEQ ID NO: 415742 - RNA, 32 nt, Human
gaaagagaacuccgagugggggucuggccuag

SEQ ID NO: 415743 - RNA, 32 nt, Human
gaaagagaaggaaggaaggagaaagagaagga

SEQ ID NO: 415744 - RNA, 32 nt, Human
gaaagagaagugucuaaaagcuucaaaauguu

SEQ ID NO: 415745 - RNA, 32 nt, Human
gaaagagaaugagagaaagagaaugagagaga

SEQ ID NO: 415746 - RNA, 32 nt, Human
gaaagagacaagaaauccuaguggccucccag

SEQ ID NO: 415747 - RNA, 23 nt, Human
gaaagagacagagugcugagggg

SEQ ID NO: 415748 - RNA, 32 nt, Human
gaaagagacuuagggaaguggaagagaaaggg

SEQ ID NO: 415749 - RNA, 32 nt, Human
gaaagagagaauaugaaagaaagggaaaauuu

SEQ ID NO: 415750 - RNA, 32 nt, Human
gaaagagagacagggucucaccauguugccca

SEQ ID NO: 415751 - RNA, 32 nt, Human
gaaagagagaggaggagggggaaagagcaaac

SEQ ID NO: 415752 - RNA, 32 nt, Human
gaaagagagaucagacugucacugugucuaug

SEQ ID NO: 415753 - RNA, 32 nt, Human
gaaagagaggaagagagaagcaaacauguagg

SEQ ID NO: 415754 - RNA, 32 nt, Human
gaaagagaggagagaaagaaaaagagaguggg

SEQ ID NO: 415755 - RNA, 32 nt, Human
gaaagagaggcggaggggagagagggauuuuc

SEQ ID NO: 415756 - RNA, 32 nt, Human
gaaagagauccaggaagcaugagugcuggaua

SEQ ID NO: 415757 - RNA, 32 nt, Human
gaaagagauccaggucuggagcuggagagaac

SEQ ID NO: 415758 - RNA, 32 nt, Human
gaaagagcaaacacuuuggaaucaaacagagu

SEQ ID NO: 415759 - RNA, 32 nt, Human
gaaagagcaguggcugcaggagaggccuuccc

SEQ ID NO: 415760 - RNA, 32 nt, Human
gaaagagcccagaagcagcccuggcccuguaa

SEQ ID NO: 415761 - RNA, 19 nt, Human
gaaagagcccagccugcca

SEQ ID NO: 415762 - RNA, 32 nt, Human
gaaagagccccuggguggagguugaggccauu

SEQ ID NO: 415763 - RNA, 32 nt, Human
gaaagagccgaguaucuuccagccgcugccuc

SEQ ID NO: 415764 - RNA, 32 nt, Human
gaaagagccuggcaaggcccuguugacuagca

SEQ ID NO: 415765 - RNA, 32 nt, Human
gaaagagccuugaagaccuucagucugacccc

SEQ ID NO: 415766 - RNA, 32 nt, Human
gaaagagcguccauaggagaagugagaauacu

SEQ ID NO: 415767 - RNA, 32 nt, Human
gaaagagcugagccacucuccccauccaggga

SEQ ID NO: 415768 - RNA, 22 nt, Human
gaaagagcuggauuggcugggg

SEQ ID NO: 415769 - RNA, 32 nt, Human
gaaagagcuggcugggggccuugcccaaacca

SEQ ID NO: 415770 - RNA, 32 nt, Human
gaaagagcuuuuagcaagguugugcuuuucau

SEQ ID NO: 415771 - RNA, 23 nt, Human
gaaagaggaagccaaaccugagg

SEQ ID NO: 415772 - RNA, 22 nt, Human
gaaagaggagagccucacggga

SEQ ID NO: 415773 - RNA, 32 nt, Human
gaaagaggaucucuagagucugggagagaaca

SEQ ID NO: 415774 - RNA, 32 nt, Human
gaaagaggauggcuauuucauccacuaaaggu

SEQ ID NO: 415775 - RNA, 23 nt, Human
gaaagaggauuuacagggugggg

SEQ ID NO: 415776 - RNA, 32 nt, Human
gaaagaggcaagaaagaagugcuauguggcga

SEQ ID NO: 415777 - RNA, 32 nt, Human
gaaagaggcacccuuccaucugauuccagcac

SEQ ID NO: 415778 - RNA, 32 nt, Human
gaaagaggccaucucacuagaauaggauauua

SEQ ID NO: 415779 - RNA, 32 nt, Human
gaaagaggcgcaggacgaggaggcagaacccg

SEQ ID NO: 415780 - RNA, 32 nt, Human
gaaagaggcuccagaggagcagugagcucgag

SEQ ID NO: 415781 - RNA, 32 nt, Human
gaaagaggcucuggacagcagaagccuccaag

SEQ ID NO: 415782 - RNA, 32 nt, Human
gaaagaggcuuccucuucucaggaagaagcca

SEQ ID NO: 415783 - RNA, 32 nt, Human
gaaagagggaggaagagagggagggagggagg

SEQ ID NO: 415784 - RNA, 32 nt, Human
gaaagaggggacaggugucagagcagggagaa

SEQ ID NO: 415785 - RNA, 32 nt, Human
gaaagaggggaggagggaggaagaauagagga

SEQ ID NO: 415786 - RNA, 32 nt, Human
gaaagaggggcagaggagggaaggcgacugca

SEQ ID NO: 415787 - RNA, 32 nt, Human
gaaagaggggcugaggccugaacugggccuaa

SEQ ID NO: 415788 - RNA, 32 nt, Human
gaaagaggggcuuggagagggagacagggcca

SEQ ID NO: 415789 - RNA, 32 nt, Human
gaaagagggggaaaggaggaccgaagaggagg

SEQ ID NO: 415790 - RNA, 32 nt, Human
gaaagaggguucccgcuggaggagaagguguu

SEQ ID NO: 415791 - RNA, 32 nt, Human
gaaagagguagugccaaucuccuugcccagau

SEQ ID NO: 415792 - RNA, 32 nt, Human
gaaagaggucgccccaaguggcccagagucgu

SEQ ID NO: 415793 - RNA, 32 nt, Human
gaaagaguacccagaggagccugagcacacuc

SEQ ID NO: 415794 - RNA, 32 nt, Human
gaaagaguacugugugcugagagaccauggca

SEQ ID NO: 415795 - RNA, 32 nt, Human
gaaagaguauggagagaaaaagaggcacaccu

SEQ ID NO: 415796 - RNA, 32 nt, Human
gaaagagucaucugauguaauucucucacuua

SEQ ID NO: 415797 - RNA, 32 nt, Human
gaaagaguccccaugcacuuggaguccaugag

SEQ ID NO: 415798 - RNA, 32 nt, Human
gaaagaguccucccagagcugcaguucgggcc

SEQ ID NO: 415799 - RNA, 32 nt, Human
gaaagagugaauaggcugggcaugguggcuca

SEQ ID NO: 415800 - RNA, 32 nt, Human
gaaagagugauagggagagggagcgaggcugg

SEQ ID NO: 415801 - RNA, 32 nt, Human
gaaagaguuaaagaugaggaagagauauuuuu

SEQ ID NO: 415802 - RNA, 32 nt, Human
gaaagaguuccagagggaggcugaaccugagg

SEQ ID NO: 415803 - RNA, 32 nt, Human
gaaagaguucccaagcuucuaccuuccuuuug

SEQ ID NO: 415804 - RNA, 32 nt, Human
gaaagaguuguuccaaucauguaaccuucugu

SEQ ID NO: 415805 - RNA, 18 nt, Human
gaaagauaaagcuucuga

SEQ ID NO: 415806 - RNA, 32 nt, Human
gaaagauaaagugaaaguuuauuucaggacug

SEQ ID NO: 415807 - RNA, 32 nt, Human
gaaagauaaguuaaauuucaagggggucauau

SEQ ID NO: 415808 - RNA, 32 nt, Human
gaaagauacagcacuccucaugccuuccugga

SEQ ID NO: 415809 - RNA, 32 nt, Human
gaaagauauguugccagcauugugcucagccg

SEQ ID NO: 415810 - RNA, 32 nt, Human
gaaagauauuugaacccgaccugggcaauucc

SEQ ID NO: 415811 - RNA, 32 nt, Human
gaaagaucagguaggcgaaaagaugacaggau

SEQ ID NO: 415812 - RNA, 32 nt, Human
gaaagaucucaaauucaagagacucauggaca

SEQ ID NO: 415813 - RNA, 32 nt, Human
gaaagaucucucucgagcgcaccauaaaccug

SEQ ID NO: 415814 - RNA, 32 nt, Human
gaaagaugaaaccggaggccgggcucacggug

SEQ ID NO: 415815 - RNA, 32 nt, Human
gaaagaugaagagagaugaggcaggacuagca

SEQ ID NO: 415816 - RNA, 32 nt, Human
gaaagaugaauaaagacaaacaugacaaacua

SEQ ID NO: 415817 - RNA, 32 nt, Human
gaaagaugagcuuuuuauucuacuacuuggaa

SEQ ID NO: 415818 - RNA, 24 nt, Human
gaaagaugaggacuuugacuggaa

SEQ ID NO: 415819 - RNA, 32 nt, Human
gaaagaugcaaucuuuuucccaggccccagcc

SEQ ID NO: 415820 - RNA, 32 nt, Human
gaaagaugccuaggaaggaugaggaugacagg

SEQ ID NO: 415821 - RNA, 32 nt, Human
gaaagauggaaagugaaccaaaaaggcuagaa

SEQ ID NO: 415822 - RNA, 32 nt, Human
gaaagauggaggagaaaaagaaaaggaagaaa

SEQ ID NO: 415823 - RNA, 32 nt, Human
gaaagauggcacccucccacccgcaggagugc

SEQ ID NO: 415824 - RNA, 23 nt, Human
gaaagaugguuuuggaacuggaa

SEQ ID NO: 415825 - RNA, 30 nt, Human
gaaagauguccaggucgggcgcggcggcug

SEQ ID NO: 415826 - RNA, 32 nt, Human
gaaagaugugugugugagaguauguaugugug

SEQ ID NO: 415827 - RNA, 32 nt, Human
gaaagauuaaggaucaggauugcaugaaagaa

SEQ ID NO: 415828 - RNA, 32 nt, Human
gaaagauuaggacagacagcugagauggcaga

SEQ ID NO: 415829 - RNA, 32 nt, Human
gaaagauuauuguuugucggccuguguauauu

SEQ ID NO: 415830 - RNA, 32 nt, Human
gaaagauucacgcaagcaucucaccaggauuc

SEQ ID NO: 415831 - RNA, 32 nt, Human
gaaagauucacuguacuaacuacuuucuucag

SEQ ID NO: 415832 - RNA, 32 nt, Human
gaaagauuccagcacugagccgugagccgguc

SEQ ID NO: 415833 - RNA, 32 nt, Human
gaaagauuccaggacagagaugacagaggcuu

SEQ ID NO: 415834 - RNA, 32 nt, Human
gaaagauucucgcuaauggauuuccugcugcu

SEQ ID NO: 415835 - RNA, 32 nt, Human
gaaagauugaaggaugcaauggcaaauauaaa

SEQ ID NO: 415836 - RNA, 32 nt, Human
gaaagauugacuucaaucucaugagaacccug

SEQ ID NO: 415837 - RNA, 32 nt, Human
gaaagauuuacauagccuuacacuucucucua

SEQ ID NO: 415838 - RNA, 32 nt, Human
gaaagcaaagggauuucuggaagcuugaacuu

SEQ ID NO: 415839 - RNA, 32 nt, Human
gaaagcaaauacgagggagacugagagccuca

SEQ ID NO: 415840 - RNA, 32 nt, Human
gaaagcaacucuugccccuccuccucugggca

SEQ ID NO: 415841 - RNA, 32 nt, Human
gaaagcaacuucagguuucaucuugcucuauu

SEQ ID NO: 415842 - RNA, 19 nt, Human
gaaagcaacuuuacugaga

SEQ ID NO: 415843 - RNA, 32 nt, Human
gaaagcaagaacagaaaacgaagccacaggaa

SEQ ID NO: 415844 - RNA, 32 nt, Human
gaaagcaagaggaggaagauaaaugcccggag

SEQ ID NO: 415845 - RNA, 32 nt, Human
gaaagcaagaucaugaaggugugcaaaugauu

SEQ ID NO: 415846 - RNA, 19 nt, Human
gaaagcaagucaccuacca

SEQ ID NO: 415847 - RNA, 32 nt, Human
gaaagcaaugggaagccaugcucugcauacuc

SEQ ID NO: 415848 - RNA, 32 nt, Human
gaaagcacaaauuuaacggcuucacuggacag

SEQ ID NO: 415849 - RNA, 32 nt, Human
gaaagcacaagcuuuuccuguauauuauauuu

SEQ ID NO: 415850 - RNA, 32 nt, Human
gaaagcacagccgugccuggccagacuccauc

SEQ ID NO: 415851 - RNA, 32 nt, Human
gaaagcacaggcugugcugucgaggcgccugc

SEQ ID NO: 415852 - RNA, 24 nt, Human
gaaagcacauauuugggaacucug

SEQ ID NO: 415853 - RNA, 32 nt, Human
gaaagcacccuccaauaaacccaggcuccagg

SEQ ID NO: 415854 - RNA, 32 nt, Human
gaaagcaccuuccuggaggaugugggagggcc

SEQ ID NO: 415855 - RNA, 32 nt, Human
gaaagcacggggccuuucccacccacccucag

SEQ ID NO: 415856 - RNA, 32 nt, Human
gaaagcacuauacauccuauuguuucuuucuu

SEQ ID NO: 415857 - RNA, 32 nt, Human
gaaagcacucagacaugucuguccucacagca

SEQ ID NO: 415858 - RNA, 21 nt, Human
gaaagcacucggagaauugug

SEQ ID NO: 415859 - RNA, 32 nt, Human
gaaagcagaccaacccagcugccuuaccuuau

SEQ ID NO: 415860 - RNA, 32 nt, Human
gaaagcagacuggccagggacuuugcgaucca

SEQ ID NO: 415861 - RNA, 32 nt, Human
gaaagcagagaggcagcucgcuacgugaccau

SEQ ID NO: 415862 - RNA, 32 nt, Human
gaaagcagagcccagacucuuggagcaggugu

SEQ ID NO: 415863 - RNA, 32 nt, Human
gaaagcagaggcauccuugagcuuuaaagcau

SEQ ID NO: 415864 - RNA, 32 nt, Human
gaaagcagcaagccccgggcugugcucaagcc

SEQ ID NO: 415865 - RNA, 32 nt, Human
gaaagcagccuggccaacauagugggacccug

SEQ ID NO: 415866 - RNA, 32 nt, Human
gaaagcagcgaguuggcagagcagggcugcau

SEQ ID NO: 415867 - RNA, 32 nt, Human
gaaagcagcuggugugggaggaaaggcuccau

SEQ ID NO: 415868 - RNA, 32 nt, Human
gaaagcaggagaaaggaaggauuaauugccug

SEQ ID NO: 415869 - RNA, 32 nt, Human
gaaagcaggagagagacugaguggcacauccu

SEQ ID NO: 415870 - RNA, 32 nt, Human
gaaagcaggagguguucucagacuugacccug

SEQ ID NO: 415871 - RNA, 32 nt, Human
gaaagcaggauguggcaguugcagugagaaag

SEQ ID NO: 415872 - RNA, 32 nt, Human
gaaagcaggauuucuuucaugugugaaauguc

SEQ ID NO: 415873 - RNA, 20 nt, Human
gaaagcaguggagguggggg

SEQ ID NO: 415874 - RNA, 21 nt, Human
gaaagcauaacauggguacag

SEQ ID NO: 415875 - RNA, 32 nt, Human
gaaagcauccaaaccacccaaaugaccaaggc

SEQ ID NO: 415876 - RNA, 32 nt, Human
gaaagcaucugaagacaucuaacuuagagucu

SEQ ID NO: 415877 - RNA, 32 nt, Human
gaaagcaucuguguuuauuauacucggguguc

SEQ ID NO: 415878 - RNA, 32 nt, Human
gaaagcaugaacuugcagaacucccucggaga

SEQ ID NO: 415879 - RNA, 32 nt, Human
gaaagcauggcugagagcaacugagggaaagg

SEQ ID NO: 415880 - RNA, 32 nt, Human
gaaagcaugucaggacagagcuguuggauugg

SEQ ID NO: 415881 - RNA, 32 nt, Human
gaaagcaugugugggccaaagcugaauuucca

SEQ ID NO: 415882 - RNA, 32 nt, Human
gaaagcauugaauguucugaucagaugugacu

SEQ ID NO: 415883 - RNA, 32 nt, Human
gaaagcauuguuuuaguccaggcacaguggcu

SEQ ID NO: 415884 - RNA, 32 nt, Human
gaaagcauuuugcaucagccuggagugaacca

SEQ ID NO: 415885 - RNA, 20 nt, Human
gaaagccaaaguacuggacu

SEQ ID NO: 415886 - RNA, 22 nt, Human
gaaagccaagaaacauguuuuc

SEQ ID NO: 415887 - RNA, 32 nt, Human
gaaagccaagagugcaggaugagagcugucug

SEQ ID NO: 415888 - RNA, 32 nt, Human
gaaagccaaggucuggagaagcucccaggaac

SEQ ID NO: 415889 - RNA, 32 nt, Human
gaaagccaagugugagggcugaaagaaugccc

SEQ ID NO: 415890 - RNA, 32 nt, Human
gaaagccaauaugaggccaggugguggcucau

SEQ ID NO: 415891 - RNA, 32 nt, Human
gaaagccaauuauugaccuuccuuccuuccuu

SEQ ID NO: 415892 - RNA, 32 nt, Human
gaaagccacacggagaggccacugugggugaa

SEQ ID NO: 415893 - RNA, 32 nt, Human
gaaagccagaaggagagcccucaccagaaacc

SEQ ID NO: 415894 - RNA, 32 nt, Human
gaaagccagagggacagagggagugagaaaga

SEQ ID NO: 415895 - RNA, 32 nt, Human
gaaagccagccugccuuuuagcacuuggauac

SEQ ID NO: 415896 - RNA, 32 nt, Human
gaaagccagcuauuuugcauuugaaggaauug

SEQ ID NO: 415897 - RNA, 21 nt, Human
gaaagccagcucucuucugaa

SEQ ID NO: 415898 - RNA, 18 nt, Human
gaaagccagcuucccucu

SEQ ID NO: 415899 - RNA, 32 nt, Human
gaaagccaggaagaagaggaagagcaccccca

SEQ ID NO: 415900 - RNA, 32 nt, Human
gaaagccaggagcugugauugacaguagcugu

SEQ ID NO: 415901 - RNA, 32 nt, Human
gaaagccagggcagcuccuuccccagccagga

SEQ ID NO: 415902 - RNA, 32 nt, Human
gaaagccagugcugcuacuuucaugccuugga

SEQ ID NO: 415903 - RNA, 32 nt, Human
gaaagccaucucuuccucugaucuggggucug

SEQ ID NO: 415904 - RNA, 32 nt, Human
gaaagccauggcagauuuccagccuggugaug

SEQ ID NO: 415905 - RNA, 32 nt, Human
gaaagcccagaaccagucccuuuaaugcacuu

SEQ ID NO: 415906 - RNA, 32 nt, Human
gaaagcccaggccgcaggagugggaugcccgu

SEQ ID NO: 415907 - RNA, 32 nt, Human
gaaagccccucagaacugggaaggccagguaa

SEQ ID NO: 415908 - RNA, 32 nt, Human
gaaagccccugggcuuucuuccuuccugaccu

SEQ ID NO: 415909 - RNA, 32 nt, Human
gaaagcccgccuuguugccugcuuugugcuuu

SEQ ID NO: 415910 - RNA, 32 nt, Human
gaaagcccggaggagcgaacagaaggauccuc

SEQ ID NO: 415911 - RNA, 32 nt, Human
gaaagcccgugucugcagaaccccugucagaa

SEQ ID NO: 415912 - RNA, 32 nt, Human
gaaagcccuaucucucugcaggcucgccucug

SEQ ID NO: 415913 - RNA, 32 nt, Human
gaaagcccucauccucaccgccucccgcuucc

SEQ ID NO: 415914 - RNA, 22 nt, Human
gaaagcccucccucccugaacu

SEQ ID NO: 415915 - RNA, 32 nt, Human
gaaagcccugcaggaaguuuaaccugcguguc

SEQ ID NO: 415916 - RNA, 32 nt, Human
gaaagcccuggaacugcuuggcucagaucagc

SEQ ID NO: 415917 - RNA, 32 nt, Human
gaaagcccuguaccaggcagccucugcuccau

SEQ ID NO: 415918 - RNA, 32 nt, Human
gaaagcccuuuuguucugcggcugccagccug

SEQ ID NO: 415919 - RNA, 32 nt, Human
gaaagccgggcggcaguggaggggacagugga

SEQ ID NO: 415920 - RNA, 32 nt, Human
gaaagccuagagaccgccacugugauucaccu

SEQ ID NO: 415921 - RNA, 32 nt, Human
gaaccugggaggcagagguugcgguaagccga

SEQ ID NO: 415922 - RNA, 24 nt, Human
gaaccugggaggcagagguuguag

SEQ ID NO: 415923 - RNA, 32 nt, Human
gaaccugggaggcagagguuguagcgagccaa

SEQ ID NO: 415924 - RNA, 32 nt, Human
gaaccugggaggcagagguuguagugagcuga

SEQ ID NO: 415925 - RNA, 32 nt, Human
gaaccugggaggcagagguuguggugagccaa

SEQ ID NO: 415926 - RNA, 32 nt, Human
gaaccugggaggcagagguuguggugagcuaa

SEQ ID NO: 415927 - RNA, 32 nt, Human
gaaccugggaggcagagguuguggugagcuga

SEQ ID NO: 415928 - RNA, 24 nt, Human
gaaccugggaggcagagguuucag

SEQ ID NO: 415929 - RNA, 32 nt, Human
gaaccugggaggcagagguuucagugagccaa

SEQ ID NO: 415930 - RNA, 24 nt, Human
gaaccugggaggcagagucugcag

SEQ ID NO: 415931 - RNA, 32 nt, Human
gaaccugggaggcagagucugcagugagccga

SEQ ID NO: 415932 - RNA, 32 nt, Human
gaaccugggaggcagaguuuacagugagccga

SEQ ID NO: 415933 - RNA, 24 nt, Human
gaaccugggaggcagaguuugcag

SEQ ID NO: 415934 - RNA, 32 nt, Human
gaaccugggaggcagaguuugcagugagccga

SEQ ID NO: 415935 - RNA, 32 nt, Human
gaaccugggaggcagaguuugcagugagcgga

SEQ ID NO: 415936 - RNA, 24 nt, Human
gaaccugggaggcagauguugcag

SEQ ID NO: 415937 - RNA, 32 nt, Human
gaaccugggaggcagauguugcagugagccga

SEQ ID NO: 415938 - RNA, 32 nt, Human
gaaccugggaggcagauguuguggugagccga

SEQ ID NO: 415939 - RNA, 24 nt, Human
gaaccugggaggcagcgguugcag

SEQ ID NO: 415940 - RNA, 32 nt, Human
gaaccugggaggcagcgguugcaguaagccaa

SEQ ID NO: 415941 - RNA, 24 nt, Human
gaaccugggaggcagggguugcag

SEQ ID NO: 415942 - RNA, 32 nt, Human
gaaccugggaggcagggguugcagugagcuga

SEQ ID NO: 415943 - RNA, 32 nt, Human
gaaccugggaggcaguuugcagugagcugaga

SEQ ID NO: 415944 - RNA, 32 nt, Human
gaaccugggaggccaagguugcagugagccga

SEQ ID NO: 415945 - RNA, 24 nt, Human
gaaccugggaggcgaagguugcag

SEQ ID NO: 415946 - RNA, 32 nt, Human
gaaccugggaggcgaagguugcagugagccaa

SEQ ID NO: 415947 - RNA, 32 nt, Human
gaaccugggaggcgaagguugcagugagcuga

SEQ ID NO: 415948 - RNA, 24 nt, Human
gaaccugggaggcgcagguugcag

SEQ ID NO: 415949 - RNA, 32 nt, Human
gaaccugggaggcgcagguugcagggaggcgg

SEQ ID NO: 415950 - RNA, 24 nt, Human
gaaccugggaggcggaaguugcag

SEQ ID NO: 415951 - RNA, 32 nt, Human
gaaccugggaggcggaaguugcagugagccaa

SEQ ID NO: 415952 - RNA, 32 nt, Human
gaaccugggaggcggaaguugcagugagccga

SEQ ID NO: 415953 - RNA, 32 nt, Human
gaaccugggaggcggaaguugcagugagcuga

SEQ ID NO: 415954 - RNA, 24 nt, Human
gaaccugggaggcggagauugcag

SEQ ID NO: 415955 - RNA, 32 nt, Human
gaaccugggaggcggagauugcagugaaccaa

SEQ ID NO: 415956 - RNA, 32 nt, Human
gaaccugggaggcggagcuuacagugaaccga

SEQ ID NO: 415957 - RNA, 32 nt, Human
gaaccugggaggcggagcuugcaaugaacuga

SEQ ID NO: 415958 - RNA, 32 nt, Human
gaaccugggaggcggagcuugcaguaagccga

SEQ ID NO: 415959 - RNA, 32 nt, Human
gaaccugggaggcggagcuugcagugagccaa

SEQ ID NO: 415960 - RNA, 32 nt, Human
gaaccugggaggcggagcuugcagugagccca

SEQ ID NO: 415961 - RNA, 32 nt, Human
gaaccugggaggcggagcuugcagugagccga

SEQ ID NO: 415962 - RNA, 32 nt, Human
gaaccugggaggcggagcuugcagugagcuga

SEQ ID NO: 415963 - RNA, 32 nt, Human
gaaccugggaggcggaggagguugcagugaac

SEQ ID NO: 415964 - RNA, 24 nt, Human
gaaccugggaggcggaggcugcag

SEQ ID NO: 415965 - RNA, 32 nt, Human
gaaccugggaggcggaggcugcagugagccga

SEQ ID NO: 415966 - RNA, 32 nt, Human
gaaccugggaggcggaggcugcagugagcugg

SEQ ID NO: 415967 - RNA, 24 nt, Human
gaaccugggaggcggagguggcag

SEQ ID NO: 415968 - RNA, 32 nt, Human
gaaccugggaggcggagguuccagagagccaa

SEQ ID NO: 415969 - RNA, 23 nt, Human
gaaccugggaggcggagguugca

SEQ ID NO: 415970 - RNA, 32 nt, Human
gaaccugggaggcggagguugcaaugagccga

SEQ ID NO: 415971 - RNA, 24 nt, Human
gaaccugggaggcggagguugcag

SEQ ID NO: 415972 - RNA, 32 nt, Human
gaaccugggaggcggagguugcagggagcuga

SEQ ID NO: 415973 - RNA, 32 nt, Human
gaaccugggaggcggagguugcaguaagccca

SEQ ID NO: 415974 - RNA, 32 nt, Human
gaaccugggaggcggagguugcagucagccaa

SEQ ID NO: 415975 - RNA, 32 nt, Human
gaaccugggaggcggagguugcagugaaccaa

SEQ ID NO: 415976 - RNA, 32 nt, Human
gaaccugggaggcggagguugcagugagccaa

SEQ ID NO: 415977 - RNA, 32 nt, Human
gaaccugggaggcggagguugcagugagccac

SEQ ID NO: 415978 - RNA, 32 nt, Human
gaaccugggaggcggagguugcagugagccga

SEQ ID NO: 415979 - RNA, 32 nt, Human
gaaccugggaggcggagguugcagugagccgc

SEQ ID NO: 415980 - RNA, 32 nt, Human
gaaccugggaggcggagguugcagugagcgag

SEQ ID NO: 415981 - RNA, 32 nt, Human
gaaccugggaggcggagguugcagugagcgga

SEQ ID NO: 415982 - RNA, 32 nt, Human
gaaccugggaggcggagguugcagugagcuaa

SEQ ID NO: 415983 - RNA, 32 nt, Human
gaaccugggaggcggagguugcagugagcuga

SEQ ID NO: 415984 - RNA, 32 nt, Human
gaaccugggaggcggagguugcagugagucga

SEQ ID NO: 415985 - RNA, 32 nt, Human
gaaccugggaggcggagguugcagugaguuga

SEQ ID NO: 415986 - RNA, 32 nt, Human
gaaccugggaggcggagguugccgugagccga

SEQ ID NO: 415987 - RNA, 24 nt, Human
gaaccugggaggcggagguugcgg

SEQ ID NO: 415988 - RNA, 32 nt, Human
gaaccugggaggcggagguugcggucagcuga

SEQ ID NO: 415989 - RNA, 32 nt, Human
gaaccugggaggcggagguugcggugagcuga

SEQ ID NO: 415990 - RNA, 32 nt, Human
gaaccugggaggcggagguugcugugagcuga

SEQ ID NO: 415991 - RNA, 24 nt, Human
gaaccugggaggcggagguuguag

SEQ ID NO: 415992 - RNA, 32 nt, Human
gaaccugggaggcggagguuguagugagccaa

SEQ ID NO: 415993 - RNA, 32 nt, Human
gaaccugggaggcggagguuguagugagccga

SEQ ID NO: 415994 - RNA, 32 nt, Human
gaaccugggaggcggagguugugaugagccaa

SEQ ID NO: 415995 - RNA, 32 nt, Human
gaaccugggaggcggagguuguggugagccaa

SEQ ID NO: 415996 - RNA, 32 nt, Human
gaaccugggaggcggagguuguggugagccga

SEQ ID NO: 415997 - RNA, 32 nt, Human
gaaccugggaggcggauguugaagugagcuga

SEQ ID NO: 415998 - RNA, 32 nt, Human
gaaccugggaggcggggguuguggugagccgu

SEQ ID NO: 415999 - RNA, 24 nt, Human
gaaccugggaggcugaaguugcag

SEQ ID NO: 416000 - RNA, 32 nt, Human
gaaccugggaggcugaaguugcagugagccga

SEQ ID NO: 416001 - RNA, 32 nt, Human
gaaccugggaggcugagcuugcagugagcuga

SEQ ID NO: 416002 - RNA, 25 nt, Human
gaaccugggagggcggagguugcag

SEQ ID NO: 416003 - RNA, 32 nt, Human
gaaccugggagggcggagguugcagugagcca

SEQ ID NO: 416004 - RNA, 24 nt, Human
gaaccugggagggggagguugcag

SEQ ID NO: 416005 - RNA, 32 nt, Human
gaaccugggagggggagguugccgugagcuga

SEQ ID NO: 416006 - RNA, 24 nt, Human
gaaccugggagguacagguugcag

SEQ ID NO: 416007 - RNA, 32 nt, Human
gaaccugggagguacagguugcagugagccca

SEQ ID NO: 416008 - RNA, 24 nt, Human
gaaccugggagguagaaguugcag

SEQ ID NO: 416009 - RNA, 32 nt, Human
gaaccugggagguagaaguugcagugagccaa

SEQ ID NO: 416010 - RNA, 32 nt, Human
gaaccugggagguagagguugcacugagccga

SEQ ID NO: 416011 - RNA, 24 nt, Human
gaaccugggagguagagguugcag

SEQ ID NO: 416012 - RNA, 32 nt, Human
gaaccugggagguagagguugcagugagccaa

SEQ ID NO: 416013 - RNA, 32 nt, Human
gaaccugggagguagagguugcagugagccga

SEQ ID NO: 416014 - RNA, 32 nt, Human
gaaccugggaggucaaagcggcagugagcuaa

SEQ ID NO: 416015 - RNA, 32 nt, Human
gaaccugggaggucaagauugcagugagcuau

SEQ ID NO: 416016 - RNA, 32 nt, Human
gaaccugggaggugaagguugcugugggccaa

SEQ ID NO: 416017 - RNA, 32 nt, Human
gaaccugggagguggaagcugcagugagccaa

SEQ ID NO: 416018 - RNA, 24 nt, Human
gaaccugggagguggaaguugcag

SEQ ID NO: 416019 - RNA, 32 nt, Human
gaaccugggagguggaaguugcagugagccaa

SEQ ID NO: 416020 - RNA, 32 nt, Human
gaaccugggagguggaaguugcagugagccga

SEQ ID NO: 416021 - RNA, 32 nt, Human
gaaccugggagguggaaguugcagugagcuga

SEQ ID NO: 416022 - RNA, 32 nt, Human
gaaccugggagguggagacugcagugagccga

SEQ ID NO: 416023 - RNA, 24 nt, Human
gaaccugggagguggagauugcag

SEQ ID NO: 416024 - RNA, 32 nt, Human
gaaccugggagguggagauugcagugagccca

SEQ ID NO: 416025 - RNA, 32 nt, Human
gaaccugggagguggagauugcagugagucaa

SEQ ID NO: 416026 - RNA, 24 nt, Human
gaaccugggagguggagcuugcag

SEQ ID NO: 416027 - RNA, 32 nt, Human
gaaccugggagguggagcuugcagugaaccga

SEQ ID NO: 416028 - RNA, 32 nt, Human
gaaccugggagguggagcuugcagugagccga

SEQ ID NO: 416029 - RNA, 32 nt, Human
gaaccugggagguggagcuugcagugagcgga

SEQ ID NO: 416030 - RNA, 32 nt, Human
gaaccugggagguggagcuugcagugagcuga

SEQ ID NO: 416031 - RNA, 32 nt, Human
  misc_feature (24)..(24): n is a, c, g, or u
gaaccugggagguggagcuugcanugagccaa

SEQ ID NO: 416032 - RNA, 32 nt, Human
gaaccugggagguggaggcagugagcugagau

SEQ ID NO: 416033 - RNA, 24 nt, Human
gaaccugggagguggaggcuacag

SEQ ID NO: 416034 - RNA, 32 nt, Human
gaaccugggagguggaggcuacagugagcuga

SEQ ID NO: 416035 - RNA, 32 nt, Human
gaaccugggagguggaggcugcagugaaccga

SEQ ID NO: 416036 - RNA, 32 nt, Human
gaaccugggagguggaggggaggcugcaguga

SEQ ID NO: 416037 - RNA, 32 nt, Human
gaaccugggagguggagguuacagugagccga

SEQ ID NO: 416038 - RNA, 32 nt, Human
gaaccugggagguggagguuauagugagccua

SEQ ID NO: 416039 - RNA, 32 nt, Human
gaaccugggagguggagguugaggugagcuca

SEQ ID NO: 416040 - RNA, 22 nt, Human
gaaccugggagguggagguugc

SEQ ID NO: 416041 - RNA, 23 nt, Human
gaaccugggagguggagguugca

SEQ ID NO: 416042 - RNA, 24 nt, Human
gaaccugggagguggagguugcag

SEQ ID NO: 416043 - RNA, 32 nt, Human
gaaccugggagguggagguugcagcgagccaa

SEQ ID NO: 416044 - RNA, 32 nt, Human
gaaccugggagguggagguugcaguaagccaa

SEQ ID NO: 416045 - RNA, 32 nt, Human
gaaccugggagguggagguugcaguaagcuga

SEQ ID NO: 416046 - RNA, 32 nt, Human
gaaccugggagguggagguugcagugagcaga

SEQ ID NO: 416047 - RNA, 32 nt, Human
gaaccugggagguggagguugcagugagccaa

SEQ ID NO: 416048 - RNA, 32 nt, Human
gaaccugggagguggagguugcagugagccga

SEQ ID NO: 416049 - RNA, 32 nt, Human
gaaccugggagguggagguugcagugagcuga

SEQ ID NO: 416050 - RNA, 32 nt, Human
gaaccugggagguggagguugcagugagcugu

SEQ ID NO: 416051 - RNA, 32 nt, Human
gaaccugggagguggagguugcagugagucga

SEQ ID NO: 416052 - RNA, 32 nt, Human
gaaccugggagguggagguugcagugaguuga

SEQ ID NO: 416053 - RNA, 32 nt, Human
gaaccugggagguggagguugcagugggccaa

SEQ ID NO: 416054 - RNA, 32 nt, Human
gaaccugggagguggagguugcagugggcuaa

SEQ ID NO: 416055 - RNA, 32 nt, Human
gaaccugggagguggagguugcagugggcuga

SEQ ID NO: 416056 - RNA, 32 nt, Human
gaaccugggagguggagguugcauugagccaa

SEQ ID NO: 416057 - RNA, 32 nt, Human
gaaccugggagguggagguugcauugagcuga

SEQ ID NO: 416058 - RNA, 32 nt, Human
gaaccugggagguggagguugcgagaucacac

SEQ ID NO: 416059 - RNA, 24 nt, Human
gaaccugggagguggagguugcgg

SEQ ID NO: 416060 - RNA, 32 nt, Human
gaaccugggagguggagguugcggugagccaa

SEQ ID NO: 416061 - RNA, 32 nt, Human
gaaccugggagguggagguugcggugagccga

SEQ ID NO: 416062 - RNA, 32 nt, Human
gaaccugggagguggagguugcggugagcuga

SEQ ID NO: 416063 - RNA, 32 nt, Human
gaaccugggagguggagguugcugugagcuga

SEQ ID NO: 416064 - RNA, 32 nt, Human
gaaccugggagguggagguuguggugagccaa

SEQ ID NO: 416065 - RNA, 32 nt, Human
gaaccugggagguggagguuguggugaggcga

SEQ ID NO: 416066 - RNA, 24 nt, Human
gaaccugggagguggagguuucag

SEQ ID NO: 416067 - RNA, 32 nt, Human
gaaccugggagguggagguuucagugagccaa

SEQ ID NO: 416068 - RNA, 23 nt, Human
gaaccugggagguggaguugcag

SEQ ID NO: 416069 - RNA, 32 nt, Human
gaaccugggagguggaguugcagugagccgag

SEQ ID NO: 416070 - RNA, 24 nt, Human
gaaccugggagguggauguugcag

SEQ ID NO: 416071 - RNA, 32 nt, Human
gaaccugggagguggauguugcagugagcuga

SEQ ID NO: 416072 - RNA, 24 nt, Human
gaaccugggagguggggguugcag

SEQ ID NO: 416073 - RNA, 32 nt, Human
gaaccugggagguggggguuucagugagcuga

SEQ ID NO: 416074 - RNA, 24 nt, Human
gaaccugggagguggugguugcag

SEQ ID NO: 416075 - RNA, 32 nt, Human
gaaccugggagguggugguugcagugagcuga

SEQ ID NO: 416076 - RNA, 24 nt, Human
gaaccugggagucaaagguugcag

SEQ ID NO: 416077 - RNA, 24 nt, Human
gaaccugggaguuagagguugcag

SEQ ID NO: 416078 - RNA, 32 nt, Human
gaaccugggaguuagagguugcagugagcuga

SEQ ID NO: 416079 - RNA, 24 nt, Human
gaaccugggaguuggagguugcag

SEQ ID NO: 416080 - RNA, 32 nt, Human
gaaccugggaguuggagguugcagugaaacga

SEQ ID NO: 416081 - RNA, 24 nt, Human
gaaccugggauguggagguugcag

SEQ ID NO: 416082 - RNA, 32 nt, Human
gaaccugggauguggagguugcagugagccaa

SEQ ID NO: 416083 - RNA, 24 nt, Human
gaaccugggcggcaaagguugcag

SEQ ID NO: 416084 - RNA, 24 nt, Human
gaaccugggcggcagagguugcag

SEQ ID NO: 416085 - RNA, 32 nt, Human
gaaccugggcggcagagguugcagugagucaa

SEQ ID NO: 416086 - RNA, 32 nt, Human
gaaccugggcggcucuggaggcccagggcagg

SEQ ID NO: 416087 - RNA, 32 nt, Human
gaaccugggcucuucacucaggaaaagagaag

SEQ ID NO: 416088 - RNA, 24 nt, Human
gaaccuggggggcggagguugcag

SEQ ID NO: 416089 - RNA, 24 nt, Human
gaaccuggggggcugagguugcag

SEQ ID NO: 416090 - RNA, 32 nt, Human
gaaccugggugggaaguagggaagaagccgug

SEQ ID NO: 416091 - RNA, 32 nt, Human
gaaccuggguggucgaggcugcagugagccga

SEQ ID NO: 416092 - RNA, 24 nt, Human
gaaccugguaggcagagguugcag

SEQ ID NO: 416093 - RNA, 32 nt, Human
gaaccugguaggcagagguugcagugagccga

SEQ ID NO: 416094 - RNA, 32 nt, Human
gaaccugguaggcagagguuguagugagccga

SEQ ID NO: 416095 - RNA, 32 nt, Human
gaaccugguagguggagguuucauugagccac

SEQ ID NO: 416096 - RNA, 32 nt, Human
gaaccuggucccagcuugaguuccugccuuuc

SEQ ID NO: 416097 - RNA, 32 nt, Human
gaaccugguguccaaucagauccugacauucc

SEQ ID NO: 416098 - RNA, 32 nt, Human
gaaccugguucacccuucauaccagcuccaag

SEQ ID NO: 416099 - RNA, 32 nt, Human
gaaccugguugggcaguaggggagggagggag

SEQ ID NO: 416100 - RNA, 32 nt, Human
gaaccuguaaggcggagguugcagugagccga

SEQ ID NO: 416101 - RNA, 32 nt, Human
gaaccugugaagagcggaagggccaagggacg

SEQ ID NO: 416102 - RNA, 24 nt, Human
gaaccugugaggaagagguugcag

SEQ ID NO: 416103 - RNA, 32 nt, Human
gaaccugugaggaagagguugcagugagcuga

SEQ ID NO: 416104 - RNA, 32 nt, Human
gaaccugugaggcagagguugcagugagccaa

SEQ ID NO: 416105 - RNA, 32 nt, Human
gaaccugugaggcagauccaugacuggcaaca

SEQ ID NO: 416106 - RNA, 32 nt, Human
gaaccugugaggcggagcuugcagggagucga

SEQ ID NO: 416107 - RNA, 24 nt, Human
gaaccugugaggcggagguugcag

SEQ ID NO: 416108 - RNA, 24 nt, Human
gaaccugugagguggagcuugcag

SEQ ID NO: 416109 - RNA, 32 nt, Human
gaaccugugagguggagcuugcagugagccaa

SEQ ID NO: 416110 - RNA, 21 nt, Human
gaaccuguggcaccugucccu

SEQ ID NO: 416111 - RNA, 32 nt, Human
gaaccugugggucagagguugcagugaaccaa

SEQ ID NO: 416112 - RNA, 32 nt, Human
gaaccuguguacgcacacacacauauacauac

SEQ ID NO: 416113 - RNA, 32 nt, Human
gaaccuuacugaaccacuugcagauuccaaaa

SEQ ID NO: 416114 - RNA, 32 nt, Human
gaaccuuauggaagaggacaucaaagaaagaa

SEQ ID NO: 416115 - RNA, 32 nt, Human
gaaccuucaugccuuauuuauuucuaaugggu

SEQ ID NO: 416116 - RNA, 32 nt, Human
gaaccuuccacagcucuccaucacccagugaa

SEQ ID NO: 416117 - RNA, 32 nt, Human
gaaccuuccagccuuuggccuugugguuccuc

SEQ ID NO: 416118 - RNA, 32 nt, Human
gaaccuucccagagcagcagaggcccuucuac

SEQ ID NO: 416119 - RNA, 32 nt, Human
gaaccuucccucuccuuccucucgcagauuac

SEQ ID NO: 416120 - RNA, 32 nt, Human
gaaccuucuagaggaauauaugauuuauucac

SEQ ID NO: 416121 - RNA, 32 nt, Human
gaaccuucucccucguacagcacaggaaccug

SEQ ID NO: 416122 - RNA, 32 nt, Human
gaaccuucuggccaguacuggaaaggggaaug

SEQ ID NO: 416123 - RNA, 32 nt, Human
gaaccuugaaggucaauguauuggacagguca

SEQ ID NO: 416124 - RNA, 32 nt, Human
gaaccuuggaggcagagguugcagugagcuga

SEQ ID NO: 416125 - RNA, 32 nt, Human
gaaccuuggagguggagguuguggugagccau

SEQ ID NO: 416126 - RNA, 32 nt, Human
gaaccuugggucuggagagccaugaagaggga

SEQ ID NO: 416127 - RNA, 32 nt, Human
gaaccuuguaaauaugucuguaauauuaaugc

SEQ ID NO: 416128 - RNA, 32 nt, Human
gaaccuuguagugccaaaaacuuuuuaaaagg

SEQ ID NO: 416129 - RNA, 32 nt, Human
gaaccuuguuuuuguggugaaggauccuaaag

SEQ ID NO: 416130 - RNA, 32 nt, Human
gaaccuuucuacugcugagcuguggccaaggu

SEQ ID NO: 416131 - RNA, 32 nt, Human
gaaccuuuuguggggcucauucacagaagggg

SEQ ID NO: 416132 - RNA, 32 nt, Human
gaacgaaacuccgucucaaaaacaaagaagga

SEQ ID NO: 416133 - RNA, 32 nt, Human
gaacgaaaugucccuuacaagauucuucuauu

SEQ ID NO: 416134 - RNA, 32 nt, Human
gaacgaagccagggguucagaugacacugcug

SEQ ID NO: 416135 - RNA, 32 nt, Human
gaacgaaugccacgugcccucacccagcccgg

SEQ ID NO: 416136 - RNA, 20 nt, Human
gaacgacagcaccacagccc

SEQ ID NO: 416137 - RNA, 32 nt, Human
gaacgagaaggagcaggagcugcgggagacug

SEQ ID NO: 416138 - RNA, 32 nt, Human
gaacgagagcaucuuguucauugccuuuuuca

SEQ ID NO: 416139 - RNA, 32 nt, Human
gaacgagcacagagguuggcuguggguccugg

SEQ ID NO: 416140 - RNA, 32 nt, Human
gaacgagcccuugagcccccuguaccccgccg

SEQ ID NO: 416141 - RNA, 32 nt, Human
gaacgaggaccuggacucagagccagacaggg

SEQ ID NO: 416142 - RNA, 32 nt, Human
gaacgaggcaucaucugcccccggcuacaacu

SEQ ID NO: 416143 - RNA, 32 nt, Human
gaacgagggaacacaagugucuucucauaaga

SEQ ID NO: 416144 - RNA, 32 nt, Human
gaacgagugugggcgcgaggcaggaugacgac

SEQ ID NO: 416145 - RNA, 32 nt, Human
gaacgauaaugcaaagugcuauguucuuggcu

SEQ ID NO: 416146 - RNA, 32 nt, Human
gaacgauauaaauacauuaauaugcucuuucu

SEQ ID NO: 416147 - RNA, 32 nt, Human
gaacgaucacugccuuaccccugcugcugcag

SEQ ID NO: 416148 - RNA, 32 nt, Human
gaacgaugacaucagagauuccgaccuuccug

SEQ ID NO: 416149 - RNA, 32 nt, Human
gaacgauguacacugauguucaucucauaaau

SEQ ID NO: 416150 - RNA, 32 nt, Human
gaacgauugccacccauccaguccauggucca

SEQ ID NO: 416151 - RNA, 32 nt, Human
gaacgcaaagcugagaacauggacguuaauau

SEQ ID NO: 416152 - RNA, 32 nt, Human
gaacgcaagaagggaauagguggucugaacgu

SEQ ID NO: 416153 - RNA, 32 nt, Human
gaacgcacacuggcugucacuaggaagcgcca

SEQ ID NO: 416154 - RNA, 32 nt, Human
gaacgcaccuggccucugcuccaccucaacag

SEQ ID NO: 416155 - RNA, 32 nt, Human
gaacgcacgcccugccccagcccgucucuccg

SEQ ID NO: 416156 - RNA, 32 nt, Human
gaacgcacucagcugcucgagccgccccgggc

SEQ ID NO: 416157 - RNA, 32 nt, Human
gaacgcacugaagacagcucuugguccaaagc

SEQ ID NO: 416158 - RNA, 32 nt, Human
gaacgcacugcacaccuaaggcaaaucccugg

SEQ ID NO: 416159 - RNA, 32 nt, Human
gaacgcagaagcaggaaauggagaguuugucc

SEQ ID NO: 416160 - RNA, 32 nt, Human
gaacgcaggaggcugaggcugcagugaguugu

SEQ ID NO: 416161 - RNA, 32 nt, Human
gaacgcaggcagaucacuugaggucaggaauu

SEQ ID NO: 416162 - RNA, 32 nt, Human
gaacgcagugcugugcggaggccuuaacuuga

SEQ ID NO: 416163 - RNA, 32 nt, Human
gaacgccagagggagggagggaggcaagaagg

SEQ ID NO: 416164 - RNA, 32 nt, Human
gaacgccaugacuguucagaagcacaauacua

SEQ ID NO: 416165 - RNA, 32 nt, Human
gaacgccauucaaccgaacauucuucccaagc

SEQ ID NO: 416166 - RNA, 32 nt, Human
gaacgcccaguuggccggaccugcucagugac

SEQ ID NO: 416167 - RNA, 32 nt, Human
gaacgcccugcggcaccaggugguguugcggc

SEQ ID NO: 416168 - RNA, 32 nt, Human
gaacgccgggaggcgggaggagagggggcugc

SEQ ID NO: 416169 - RNA, 23 nt, Human
gaacgccugaccucaagugaucc

SEQ ID NO: 416170 - RNA, 24 nt, Human
gaacgccugaccucagaugaucca

SEQ ID NO: 416171 - RNA, 32 nt, Human
gaacgccuuccaggaaccuguggacuaggggu

SEQ ID NO: 416172 - RNA, 32 nt, Human
gaacgcgccacuggacacaugaggaagaggcu

SEQ ID NO: 416173 - RNA, 32 nt, Human
gaacgcgggaggcagagacugcagugagccga

SEQ ID NO: 416174 - RNA, 32 nt, Human
gaacgcgggagguggaggauacaaugaacccg

SEQ ID NO: 416175 - RNA, 32 nt, Human
gaacgcuauuuccuaaauauuugcuacacaca

SEQ ID NO: 416176 - RNA, 32 nt, Human
gaacgcuccagcccaggacuucgaggcugcaa

SEQ ID NO: 416177 - RNA, 32 nt, Human
gaacgcucccggcuuggccucggcugaugggc

SEQ ID NO: 416178 - RNA, 32 nt, Human
gaacgcugagcgguggcaugacuugcccgugg

SEQ ID NO: 416179 - RNA, 32 nt, Human
gaacgcugcagcugcacccacccugcuugauc

SEQ ID NO: 416180 - RNA, 32 nt, Human
gaacgcuggcuggggacgaucacaaagccucu

SEQ ID NO: 416181 - RNA, 32 nt, Human
gaacgcugggagaaugcugggagccugcuguu

SEQ ID NO: 416182 - RNA, 32 nt, Human
gaacgcugggcaacauggugaaaccccgucuc

SEQ ID NO: 416183 - RNA, 32 nt, Human
gaacgcuuguagucccagcuacucaggaggcu

SEQ ID NO: 416184 - RNA, 32 nt, Human
gaacggaaggcagaggacagaggcuggacgug

SEQ ID NO: 416185 - RNA, 32 nt, Human
gaacggaagggcccugcucucaagcagugcga

SEQ ID NO: 416186 - RNA, 32 nt, Human
gaacggaagucauccugaaaauaaaaguacag

SEQ ID NO: 416187 - RNA, 32 nt, Human
gaacggaggaagagaaaaauacuucagauaaa

SEQ ID NO: 416188 - RNA, 32 nt, Human
gaacggaugguggugagagggacagaccaggc

SEQ ID NO: 416189 - RNA, 32 nt, Human
gaacggcauaaaaacagaaauuacccaguaaa

SEQ ID NO: 416190 - RNA, 32 nt, Human
gaacggcauaaacugaguguucagcugguguu

SEQ ID NO: 416191 - RNA, 32 nt, Human
gaacggccugaagcaugggggccaggcuguca

SEQ ID NO: 416192 - RNA, 19 nt, Human
gaacggcgccuuugggaag

SEQ ID NO: 416193 - RNA, 32 nt, Human
gaacggcugcuguuucagcuguuggccuuuuc

SEQ ID NO: 416194 - RNA, 32 nt, Human
gaacggcuggacugccugccggcuuagggagg

SEQ ID NO: 416195 - RNA, 32 nt, Human
gaacgggaaggagccccaggagggagagggac

SEQ ID NO: 416196 - RNA, 32 nt, Human
gaacgggaccccuagcuaccacugccuccagg

SEQ ID NO: 416197 - RNA, 32 nt, Human
gaacgggagccguacucaggaggcagaauuca

SEQ ID NO: 416198 - RNA, 32 nt, Human
gaacgggaggcugcaggauggucaagcugacg

SEQ ID NO: 416199 - RNA, 32 nt, Human
gaacgggggaagggcggggugagggaagaaag

SEQ ID NO: 416200 - RNA, 32 nt, Human
gaacggggucaggauggacgaggacgugcuaa

SEQ ID NO: 416201 - RNA, 32 nt, Human
gaacggugcuuugcgcaucgagaccaucgacc

SEQ ID NO: 416202 - RNA, 24 nt, Human
gaacgguggaggcagaggugacag

SEQ ID NO: 416203 - RNA, 32 nt, Human
gaacgguguagacauuucccccaguaugagca

SEQ ID NO: 416204 - RNA, 30 nt, Human
gaacguagccucuuuguguccacuguggaa

SEQ ID NO: 416205 - RNA, 31 nt, Human
gaacguaggaaaccugucgaugcuuacaucu

SEQ ID NO: 416206 - RNA, 31 nt, Human
gaacguaugaacacaucagguugcucagcaa

SEQ ID NO: 416207 - RNA, 32 nt, Human
gaacgucaaggucgugggaaauaaaaggcagu

SEQ ID NO: 416208 - RNA, 32 nt, Human
gaacgucacagcaacaggcgcagggccugccc

SEQ ID NO: 416209 - RNA, 32 nt, Human
gaacgucccacuguccuggccuggagcuaggc

SEQ ID NO: 416210 - RNA, 32 nt, Human
gaacguccucuaugaagaccuucagguuuccu

SEQ ID NO: 416211 - RNA, 32 nt, Human
gaacgucuccaccagcuucccuuccagccgac

SEQ ID NO: 416212 - RNA, 32 nt, Human
gaacgucugaaaugagagugccauguauuucu

SEQ ID NO: 416213 - RNA, 32 nt, Human
gaacgucugggcagccagggaccugcccauuc

SEQ ID NO: 416214 - RNA, 32 nt, Human
gaacgucuguccccugugaugcuggcuguuau

SEQ ID NO: 416215 - RNA, 32 nt, Human
gaacgucuucacuggguggugucagcugggac

SEQ ID NO: 416216 - RNA, 32 nt, Human
gaacgugaauuggacucaacucgaguagcagc

SEQ ID NO: 416217 - RNA, 32 nt, Human
gaacguggaagacaaggcagaagaggcuggcc

SEQ ID NO: 416218 - RNA, 23 nt, Human
gaacguggaggcagagguugcag

SEQ ID NO: 416219 - RNA, 32 nt, Human
gaacguggaggcagagguugcagugagccgag

SEQ ID NO: 416220 - RNA, 32 nt, Human
gaacguggaggcccuguccuagugcugaggac

SEQ ID NO: 416221 - RNA, 24 nt, Human
gaacgugggaggcagaaguugcag

SEQ ID NO: 416222 - RNA, 32 nt, Human
gaacgugggaggcagaaguugcagugagccaa

SEQ ID NO: 416223 - RNA, 24 nt, Human
gaacgugggaggcagagguugcag

SEQ ID NO: 416224 - RNA, 32 nt, Human
gaacgugggaggcagagguugcagugagccga

SEQ ID NO: 416225 - RNA, 32 nt, Human
gaacgugggaggcagagguugcagugagugga

SEQ ID NO: 416226 - RNA, 24 nt, Human
gaacgugggaggcggagguugcag

SEQ ID NO: 416227 - RNA, 32 nt, Human
gaacgugggaggcggagguugcagcgagcuga

SEQ ID NO: 416228 - RNA, 32 nt, Human
gaacgugggaggcggagguugcagugagcuga

SEQ ID NO: 416229 - RNA, 24 nt, Human
gaacgugggaggcggagguuguag

SEQ ID NO: 416230 - RNA, 32 nt, Human
gaacgugggaggcggagguuguagugagccag

SEQ ID NO: 416231 - RNA, 32 nt, Human
gaacgugggaguucagcugcuucucuugccua

SEQ ID NO: 416232 - RNA, 32 nt, Human
gaacgugguuuucauuuauuuuucccucaaaa

SEQ ID NO: 416233 - RNA, 32 nt, Human
gaacguguucacaggcuguuguguggcaauga

SEQ ID NO: 416234 - RNA, 32 nt, Human
gaacguuggagcuguacuaguuguuaaaacgu

SEQ ID NO: 416235 - RNA, 32 nt, Human
gaacguuggugagggagggcagcucugcgccc

SEQ ID NO: 416236 - RNA, 32 nt, Human
gaacuaaacacuccuucuuagcacuuccugug

SEQ ID NO: 416237 - RNA, 32 nt, Human
gaacuaaaccccuggcuuuugugcacacugca

SEQ ID NO: 416238 - RNA, 32 nt, Human
gaacuaaacucccaccuccugauucaggcagc

SEQ ID NO: 416239 - RNA, 32 nt, Human
gaacuaaauaaauaaauauuaaacaccuaaaa

SEQ ID NO: 416240 - RNA, 32 nt, Human
gaacuaacauguaguauuugugcugcugcauu

SEQ ID NO: 416241 - RNA, 32 nt, Human
gaacuaagaagaugccauugcacuccagccug

SEQ ID NO: 416242 - RNA, 23 nt, Human
gaacuaagcaggacaccuggagg

SEQ ID NO: 416243 - RNA, 32 nt, Human
gaacuaaggccuucuaucagacugccuggcca

SEQ ID NO: 416244 - RNA, 32 nt, Human
gaacuaauaaauucaggguggugaugcuuacc

SEQ ID NO: 416245 - RNA, 31 nt, Human
gaacuaaugagaccugugcaggaucacugga

SEQ ID NO: 416246 - RNA, 32 nt, Human
gaacuaauuugguggcaggucuccucugaagg

SEQ ID NO: 416247 - RNA, 32 nt, Human
gaacuacaaccagcucagagcgccagccagag

SEQ ID NO: 416248 - RNA, 32 nt, Human
gaacuacagaaaccuggucucccuaggugucu

SEQ ID NO: 416249 - RNA, 32 nt, Human
gaacuacagaaaccuggucuuuuuggguauug

SEQ ID NO: 416250 - RNA, 32 nt, Human
gaacuacagaaaccugguuuucuugggugaag

SEQ ID NO: 416251 - RNA, 32 nt, Human
gaacuacagaauuguucucucccgcucaagaa

SEQ ID NO: 416252 - RNA, 32 nt, Human
gaacuacagacaccuggucuuccuugguauug

SEQ ID NO: 416253 - RNA, 32 nt, Human
gaacuacagacuccaucuuuucacccaaauca

SEQ ID NO: 416254 - RNA, 32 nt, Human
gaacuacagccaucuaguuucccuggcuuaug

SEQ ID NO: 416255 - RNA, 32 nt, Human
gaacuacagccaucuaguuuccuuggcuuaug

SEQ ID NO: 416256 - RNA, 32 nt, Human
gaacuacaggcacgcaccaccacgcccggcua

SEQ ID NO: 416257 - RNA, 32 nt, Human
gaacuacaggcaugcaccaccaugccuggcua

SEQ ID NO: 416258 - RNA, 32 nt, Human
gaacuacaggcgcccgccaugaugcccggcuc

SEQ ID NO: 416259 - RNA, 32 nt, Human
gaacuacaggugugcaccaccaugccugguuc

SEQ ID NO: 416260 - RNA, 32 nt, Human
gaacuaccauuuccuccccuuagcugcccuug

SEQ ID NO: 416261 - RNA, 23 nt, Human
gaacuaccugauuucugccucca

SEQ ID NO: 416262 - RNA, 32 nt, Human
gaacuaccuucucuucugucaugacccuaucu

SEQ ID NO: 416263 - RNA, 32 nt, Human
gaacuacgggaacaauauucuucaagagaagg

SEQ ID NO: 416264 - RNA, 32 nt, Human
gaacuacuacucacaguuaccacuugggguca

SEQ ID NO: 416265 - RNA, 32 nt, Human
gaacuacucagggaaugaaggugucagaauaa

SEQ ID NO: 416266 - RNA, 24 nt, Human
gaacuacugaccucagcugaucca

SEQ ID NO: 416267 - RNA, 32 nt, Human
gaacuagaccaaugagacuagccuggggcggg

SEQ ID NO: 416268 - RNA, 32 nt, Human
gaacuagccacagaaucauuuguuuuuauguc

SEQ ID NO: 416269 - RNA, 32 nt, Human
gaacuagcccaccuuaucuggcugcuuuagcu

SEQ ID NO: 416270 - RNA, 32 nt, Human
gaacuaggaggcagagguugcagugagccgag

SEQ ID NO: 416271 - RNA, 32 nt, Human
gaacuaggaggguuugccuucucugagaccag

SEQ ID NO: 416272 - RNA, 32 nt, Human
gaacuaggaguccugggagagcugugguggga

SEQ ID NO: 416273 - RNA, 24 nt, Human
gaacuagggaagcggagguugcag

SEQ ID NO: 416274 - RNA, 32 nt, Human
gaacuagggccaggugucccaguggcugcggc

SEQ ID NO: 416275 - RNA, 32 nt, Human
gaacuagggccucuccccuggugaagacccag

SEQ ID NO: 416276 - RNA, 32 nt, Human
gaacuagggcugggguugugggugccucuucu

SEQ ID NO: 416277 - RNA, 32 nt, Human
gaacuagguggacaugccaucccuggucuccu

SEQ ID NO: 416278 - RNA, 32 nt, Human
gaacuagugcagcuuuucauuguguugugugg

SEQ ID NO: 416279 - RNA, 32 nt, Human
gaacuaguucaucaaguagcccaaguaggaga

SEQ ID NO: 416280 - RNA, 32 nt, Human
gaacuaguuuugggaaauguagcccuggguuu

SEQ ID NO: 416281 - RNA, 32 nt, Human
gaacuauaauauauacaguauauggaaggaua

SEQ ID NO: 416282 - RNA, 32 nt, Human
gaacuauagaaaagacagacugugcauuuguu

SEQ ID NO: 416283 - RNA, 32 nt, Human
gaacuauaggcaugugccaccaugcccagcua

SEQ ID NO: 416284 - RNA, 32 nt, Human
gaacuauauccagguguugucaugaaaguaug

SEQ ID NO: 416285 - RNA, 32 nt, Human
gaacuaucaccuguuucaaggacuuugcuagc

SEQ ID NO: 416286 - RNA, 32 nt, Human
gaacuaucagcuccuggcaucuguaaggaugc

SEQ ID NO: 416287 - RNA, 32 nt, Human
gaacuauccacaagucuaauguuuccaugcuu

SEQ ID NO: 416288 - RNA, 24 nt, Human
gaacuaugauagcaccacugcacu

SEQ ID NO: 416289 - RNA, 32 nt, Human
gaacuaugauaguaccacugcacuccagccug

SEQ ID NO: 416290 - RNA, 24 nt, Human
gaacuaugauugcaucacugcacu

SEQ ID NO: 416291 - RNA, 24 nt, Human
gaacuaugauugugccacugcacu

SEQ ID NO: 416292 - RNA, 32 nt, Human
gaacuauggaaagcggaagagcaggucuugau

SEQ ID NO: 416293 - RNA, 32 nt, Human
gaacuauggacagaaggaagccuacuauugug

SEQ ID NO: 416294 - RNA, 21 nt, Human
gaacuauggggcuucugggaa

SEQ ID NO: 416295 - RNA, 32 nt, Human
gaacuaugugccugugagcucuucagagcugg

SEQ ID NO: 416296 - RNA, 32 nt, Human
gaacuaugugcuuuuaaccuuuggaaauacau

SEQ ID NO: 416297 - RNA, 32 nt, Human
gaacuauguugugguugcacagacacggagaa

SEQ ID NO: 416298 - RNA, 32 nt, Human
gaacuauuagguuagugcaaaaguaauugugg

SEQ ID NO: 416299 - RNA, 32 nt, Human
gaacuauuuaucugaguucccucugccggaac

SEQ ID NO: 416300 - RNA, 32 nt, Human
gaacuauuucucuuuauuuauagugucgggcu

SEQ ID NO: 416301 - RNA, 23 nt, Human
gaacucaaagagcacccagaggc

SEQ ID NO: 416302 - RNA, 21 nt, Human
gaacucaaccucaggugaucc

SEQ ID NO: 416303 - RNA, 32 nt, Human
gaacucaacugcuguuuacagugucagauuaa

SEQ ID NO: 416304 - RNA, 32 nt, Human
gaacucaacuggcaaggcugcuuuucugugcu

SEQ ID NO: 416305 - RNA, 24 nt, Human
gaacucaagcccauccaugagaca

SEQ ID NO: 416306 - RNA, 32 nt, Human
gaacucaaggccucugacaaugccaaggccuu

SEQ ID NO: 416307 - RNA, 32 nt, Human
gaacucaaguaacuucaugaauacuacaaacu

SEQ ID NO: 416308 - RNA, 32 nt, Human
gaacucacacaaauggcauuccagagucugcc

SEQ ID NO: 416309 - RNA, 32 nt, Human
gaacucaccaugguguuagcagcuuuuacuag

SEQ ID NO: 416310 - RNA, 32 nt, Human
gaacucaccauugcacuccagccuggaugaca

SEQ ID NO: 416311 - RNA, 32 nt, Human
gaacucaccgccuccccugccugggcacuccc

SEQ ID NO: 416312 - RNA, 32 nt, Human
gaacucacgaagaacauuguggcuguaacaga

SEQ ID NO: 416313 - RNA, 32 nt, Human
gaacucacugaggaauggugacauuugggggc

SEQ ID NO: 416314 - RNA, 32 nt, Human
gaacucacuuccucuuuauaaugagucacuau

SEQ ID NO: 416315 - RNA, 22 nt, Human
gaacucacuucuggaggugcag

SEQ ID NO: 416316 - RNA, 24 nt, Human
gaacucagaaggcagagguugcag

SEQ ID NO: 416317 - RNA, 32 nt, Human
gaacucagaaggcagagguugcaguggaaaaa

SEQ ID NO: 416318 - RNA, 24 nt, Human
gaacucagaaggcggaggcugcag

SEQ ID NO: 416319 - RNA, 32 nt, Human
gaacucagaaggcggaggcugcagugagccga

SEQ ID NO: 416320 - RNA, 32 nt, Human
gaacucagaaggcggagguuccagugagccau

SEQ ID NO: 416321 - RNA, 24 nt, Human
gaacucagaagguggagguugcag

SEQ ID NO: 416322 - RNA, 32 nt, Human
gaacucagaagguggagguugcagugaggcga

SEQ ID NO: 416323 - RNA, 32 nt, Human
gaacucagagagguggcuauugcauugcgcag

SEQ ID NO: 416324 - RNA, 32 nt, Human
gaacucagagucccaguguugagucugggagc

SEQ ID NO: 416325 - RNA, 24 nt, Human
gaacucagcaaggcagacuggcug

SEQ ID NO: 416326 - RNA, 22 nt, Human
gaacucagcaaguggagguugc

SEQ ID NO: 416327 - RNA, 32 nt, Human
gaacucagcagcugccaccgcagcugccuccu

SEQ ID NO: 416328 - RNA, 22 nt, Human
gaacucagccguggccuuggcu

SEQ ID NO: 416329 - RNA, 22 nt, Human
gaacucagccugcacagaggca

SEQ ID NO: 416330 - RNA, 22 nt, Human
gaacucagccugggacuggcug

SEQ ID NO: 416331 - RNA, 32 nt, Human
gaacucagccugggacuggcugggcgagacuc

SEQ ID NO: 416332 - RNA, 21 nt, Human
gaacucagccuugauucacug

SEQ ID NO: 416333 - RNA, 32 nt, Human
gaacucagcuccuccagccccaccucccagca

SEQ ID NO: 416334 - RNA, 32 nt, Human
gaacucagcugaggccuugccuugaggggcag

SEQ ID NO: 416335 - RNA, 24 nt, Human
gaacucaggagacggagguuacag

SEQ ID NO: 416336 - RNA, 32 nt, Human
gaacucaggagacggagguuacagugagucga

SEQ ID NO: 416337 - RNA, 24 nt, Human
gaacucaggagauggagguuucag

SEQ ID NO: 416338 - RNA, 32 nt, Human
gaacucaggagauggagguuucagugagccaa

SEQ ID NO: 416339 - RNA, 24 nt, Human
gaacucaggaggcagaaguugcgg

SEQ ID NO: 416340 - RNA, 23 nt, Human
gaacucaggaggcagagguugca

SEQ ID NO: 416341 - RNA, 32 nt, Human
gaacucaggaggcagagguugcaaugagccaa

SEQ ID NO: 416342 - RNA, 24 nt, Human
gaacucaggaggcagagguugcag

SEQ ID NO: 416343 - RNA, 32 nt, Human
gaacucaggaggcagagguugcagugagccaa

SEQ ID NO: 416344 - RNA, 32 nt, Human
gaacucaggaggcggaaguugcggugagccaa

SEQ ID NO: 416345 - RNA, 32 nt, Human
gaacucaggaggcggagcuugcagugagccga

SEQ ID NO: 416346 - RNA, 24 nt, Human
gaacucaggaggcggaggcugcag

SEQ ID NO: 416347 - RNA, 32 nt, Human
gaacucaggaggcggaggcugcagucaaccaa

SEQ ID NO: 416348 - RNA, 32 nt, Human
gaacucaggaggcggagguugcggugagccga

SEQ ID NO: 416349 - RNA, 32 nt, Human
gaacucaggaggcggagguugcggugagcuga

SEQ ID NO: 416350 - RNA, 24 nt, Human
gaacucaggagguggagguugcag

SEQ ID NO: 416351 - RNA, 32 nt, Human
gaacucaggagguggagguugcagugagcuga

SEQ ID NO: 416352 - RNA, 32 nt, Human
gaacucaggagguggagguugcggugagccaa

SEQ ID NO: 416353 - RNA, 32 nt, Human
gaacucaggaguucaagaccagccugggaaaa

SEQ ID NO: 416354 - RNA, 32 nt, Human
gaacucaggaguucaagaccagccugggcaaa

SEQ ID NO: 416355 - RNA, 32 nt, Human
gaacucaggaguucaagaccagccugggcaac

SEQ ID NO: 416356 - RNA, 32 nt, Human
gaacucaggaguuggagaccagccugggcaac

SEQ ID NO: 416357 - RNA, 32 nt, Human
gaacucaggaguuuaagaccagccugggcaac

SEQ ID NO: 416358 - RNA, 32 nt, Human
gaacucaggaguuuaagaccagccugggcaag

SEQ ID NO: 416359 - RNA, 32 nt, Human
gaacucaggcagccuaguagaggcaguggugg

SEQ ID NO: 416360 - RNA, 32 nt, Human
gaacucagggcacuccacauggggcaaacugc

SEQ ID NO: 416361 - RNA, 24 nt, Human
gaacucaggggguggagguugcag

SEQ ID NO: 416362 - RNA, 32 nt, Human
gaacucaggggguggagguugcagugaguuga

SEQ ID NO: 416363 - RNA, 32 nt, Human
gaacucagguggcagagguugcagugagccga

SEQ ID NO: 416364 - RNA, 32 nt, Human
gaacucaguuuucccauauguaagaugggaaa

SEQ ID NO: 416365 - RNA, 32 nt, Human
gaacucauaagaaaaaucaaugauaaagagau

SEQ ID NO: 416366 - RNA, 32 nt, Human
gaacucaucauaaguacuugcugauggaagaa

SEQ ID NO: 416367 - RNA, 32 nt, Human
gaacucaucauggagaaaaccaaacaaaugcu

SEQ ID NO: 416368 - RNA, 32 nt, Human
gaacucaucauuccagccugggcaacaagagu

SEQ ID NO: 416369 - RNA, 23 nt, Human
gaacucaugaccucaagugaucc

SEQ ID NO: 416370 - RNA, 24 nt, Human
gaacucauggccucaaaugaucca

SEQ ID NO: 416371 - RNA, 32 nt, Human
gaacuccaaccugcacuccagccugggcaaca

SEQ ID NO: 416372 - RNA, 24 nt, Human
gaacuccaaguuaguggauugcag

SEQ ID NO: 416373 - RNA, 32 nt, Human
gaacuccacuacccuuuucccucccagaccac

SEQ ID NO: 416374 - RNA, 32 nt, Human
gaacuccacugaggcaggcugacugcuuaacc

SEQ ID NO: 416375 - RNA, 23 nt, Human
gaacuccagaccucaggugaucc

SEQ ID NO: 416376 - RNA, 24 nt, Human
gaacuccagaccucaggugaucua

SEQ ID NO: 416377 - RNA, 32 nt, Human
gaacuccagcacccaccucccuacucucccuc

SEQ ID NO: 416378 - RNA, 32 nt, Human
gaacuccagcagcucugcacuggguagagcug

SEQ ID NO: 416379 - RNA, 32 nt, Human
gaacuccaggcaggaagcagugcccuggaaaa

SEQ ID NO: 416380 - RNA, 32 nt, Human
gaacuccaguucauucacucaguggcucaucc

SEQ ID NO: 416381 - RNA, 32 nt, Human
gaacuccaucucauucucuccccuccagaaga

SEQ ID NO: 416382 - RNA, 32 nt, Human
gaacuccauuuuggauuuugaaucaagcaaua

SEQ ID NO: 416383 - RNA, 32 nt, Human
gaacucccaaagugcugggauuacaggcguga

SEQ ID NO: 416384 - RNA, 24 nt, Human
gaacucccaaccucaagugaucca

SEQ ID NO: 416385 - RNA, 23 nt, Human
gaacucccaaccucaagugaucu

SEQ ID NO: 416386 - RNA, 23 nt, Human
gaacucccaaccucaggugaucc

SEQ ID NO: 416387 - RNA, 24 nt, Human
gaacucccaaccucaggugaucca

SEQ ID NO: 416388 - RNA, 32 nt, Human
gaacucccagggagcaacagcacacagugugg

SEQ ID NO: 416389 - RNA, 32 nt, Human
gaacucccccagccuacaaccuaggaggugca

SEQ ID NO: 416390 - RNA, 32 nt, Human
gaacucccccuccaggccaucucauuggcugc

SEQ ID NO: 416391 - RNA, 23 nt, Human
gaacucccgaccucaagugaucc

SEQ ID NO: 416392 - RNA, 23 nt, Human
gaacucccgaccucaagugaucu

SEQ ID NO: 416393 - RNA, 23 nt, Human
gaacucccgaccucagguaaucc

SEQ ID NO: 416394 - RNA, 23 nt, Human
gaacucccgaccucaggugaucc

SEQ ID NO: 416395 - RNA, 24 nt, Human
gaacucccgaccucaggugaucca

SEQ ID NO: 416396 - RNA, 23 nt, Human
gaacucccgaccucaggugaucu

SEQ ID NO: 416397 - RNA, 24 nt, Human
gaacucccgaccucaggugaucua

SEQ ID NO: 416398 - RNA, 22 nt, Human
gaacucccgaccuugugaucca

SEQ ID NO: 416399 - RNA, 23 nt, Human
gaacucccgaccuugugauccac

SEQ ID NO: 416400 - RNA, 23 nt, Human
gaacucccgaucucaggugaucc

SEQ ID NO: 416401 - RNA, 24 nt, Human
gaacucccggacucgggugaucca

SEQ ID NO: 416402 - RNA, 27 nt, Human
gaacucccucggagacgcagguugcag

SEQ ID NO: 416403 - RNA, 32 nt, Human
gaacucccucggagacgcagguugcaguggac

SEQ ID NO: 416404 - RNA, 32 nt, Human
gaacucccucuuaagcuuggcuucugggacag

SEQ ID NO: 416405 - RNA, 32 nt, Human
gaacucccugcucuggucugacccucugcacg

SEQ ID NO: 416406 - RNA, 23 nt, Human
gaacuccuaaccucaagugaucc

SEQ ID NO: 416407 - RNA, 24 nt, Human
gaacuccuaaccucaagugaucca

SEQ ID NO: 416408 - RNA, 24 nt, Human
gaacuccuaaccucaggugaucca

SEQ ID NO: 416409 - RNA, 24 nt, Human
gaacuccuaaccucagguuaucca

SEQ ID NO: 416410 - RNA, 24 nt, Human
gaacuccuaaccuccagugaucca

SEQ ID NO: 416411 - RNA, 24 nt, Human
gaacuccuaaccucgggugaucca

SEQ ID NO: 416412 - RNA, 23 nt, Human
gaacuccuagacucaagugaucc

SEQ ID NO: 416413 - RNA, 24 nt, Human
gaacuccuagccucaagcaaucca

SEQ ID NO: 416414 - RNA, 23 nt, Human
gaacuccuagccucaagcgaucc

SEQ ID NO: 416415 - RNA, 23 nt, Human
gaacuccuaggcucaagugaucc

SEQ ID NO: 416416 - RNA, 32 nt, Human
gaacuccuaugcagccugagagaaguucucua

SEQ ID NO: 416417 - RNA, 32 nt, Human
gaacuccucaagggcagagaacugucuuucau

SEQ ID NO: 416418 - RNA, 24 nt, Human
gaacuccucaccucaggugaucca

SEQ ID NO: 416419 - RNA, 32 nt, Human
gaacuccuccuuccucugggcucucuguaaca

SEQ ID NO: 416420 - RNA, 23 nt, Human
gaacuccugaacgcaagugaucc

SEQ ID NO: 416421 - RNA, 24 nt, Human
gaacuccugaacucaaguaaucca

SEQ ID NO: 416422 - RNA, 23 nt, Human
gaacuccugaacucaagugaucc

SEQ ID NO: 416423 - RNA, 24 nt, Human
gaacuccugaacucaagugauuca

SEQ ID NO: 416424 - RNA, 24 nt, Human
gaacuccugacauaagguaaucca

SEQ ID NO: 416425 - RNA, 24 nt, Human
gaacuccugacaucaggugaucca

SEQ ID NO: 416426 - RNA, 22 nt, Human
gaacuccugaccaagugaucca

SEQ ID NO: 416427 - RNA, 22 nt, Human
gaacuccugaccacagguaauc

SEQ ID NO: 416428 - RNA, 24 nt, Human
gaacuccugaccacauguggucca

SEQ ID NO: 416429 - RNA, 23 nt, Human
gaacuccugaccccaaguguucc

SEQ ID NO: 416430 - RNA, 24 nt, Human
gaacuccugaccccaaguuaucca

SEQ ID NO: 416431 - RNA, 21 nt, Human
gaacuccugaccccagauuca

SEQ ID NO: 416432 - RNA, 23 nt, Human
gaacuccugaccccaggugaucc

SEQ ID NO: 416433 - RNA, 22 nt, Human
gaacuccugacccugugaucca

SEQ ID NO: 416434 - RNA, 23 nt, Human
gaacuccugacccugugauccac

SEQ ID NO: 416435 - RNA, 24 nt, Human
gaacuccugaccgcaagugaucca

SEQ ID NO: 416436 - RNA, 24 nt, Human
gaacuccugaccgcagguaaucca

SEQ ID NO: 416437 - RNA, 23 nt, Human
gaacuccugaccucaaacgaucu

SEQ ID NO: 416438 - RNA, 23 nt, Human
gaacuccugaccucaaaugagcc

SEQ ID NO: 416439 - RNA, 23 nt, Human
gaacuccugaccucaacugaucc

SEQ ID NO: 416440 - RNA, 24 nt, Human
gaacuccugaccucaacuggucca

SEQ ID NO: 416441 - RNA, 24 nt, Human
gaacuccugaccucaagcgaucca

SEQ ID NO: 416442 - RNA, 23 nt, Human
gaacuccugaccucaagcgaucu

SEQ ID NO: 416443 - RNA, 23 nt, Human
gaacuccugaccucaaguaaucu

SEQ ID NO: 416444 - RNA, 23 nt, Human
gaacuccugaccucaagugaccc

SEQ ID NO: 416445 - RNA, 21 nt, Human
gaacuccugaccucaagugau

SEQ ID NO: 416446 - RNA, 22 nt, Human
gaacuccugaccucaagugauc

SEQ ID NO: 416447 - RNA, 23 nt, Human
gaacuccugaccucaagugaucc

SEQ ID NO: 416448 - RNA, 24 nt, Human
gaacuccugaccucaagugaucca

SEQ ID NO: 416449 - RNA, 23 nt, Human
gaacuccugaccucaagugaucu

SEQ ID NO: 416450 - RNA, 23 nt, Human
gaacuccugaccucaagugauuu

SEQ ID NO: 416451 - RNA, 23 nt, Human
gaacuccugaccucacacaaucc

SEQ ID NO: 416452 - RNA, 24 nt, Human
gaacuccugaccucagauaaucca

SEQ ID NO: 416453 - RNA, 23 nt, Human
gaacuccugaccucagauaaucu

SEQ ID NO: 416454 - RNA, 24 nt, Human
gaacuccugaccucagaugaccca

SEQ ID NO: 416455 - RNA, 23 nt, Human
gaacuccugaccucagaugaucu

SEQ ID NO: 416456 - RNA, 24 nt, Human
gaacuccugaccucagaugauuca

SEQ ID NO: 416457 - RNA, 24 nt, Human
gaacuccugaccucaggcgaucua

SEQ ID NO: 416458 - RNA, 22 nt, Human
gaacuccugaccucagguaauc

SEQ ID NO: 416459 - RNA, 23 nt, Human
gaacuccugaccucagguaaucc

SEQ ID NO: 416460 - RNA, 24 nt, Human
gaacuccugaccucagguaaucca

SEQ ID NO: 416461 - RNA, 20 nt, Human
gaacuccugaccucagguga

SEQ ID NO: 416462 - RNA, 23 nt, Human
gaacuccugaccucaggugagcc

SEQ ID NO: 416463 - RNA, 24 nt, Human
gaacuccugaccucaggugagcca

SEQ ID NO: 416464 - RNA, 22 nt, Human
gaacuccugaccucaggugauc

SEQ ID NO: 416465 - RNA, 23 nt, Human
gaacuccugaccucaggugaucc

SEQ ID NO: 416466 - RNA, 24 nt, Human
gaacuccugaccucaggugaucca

SEQ ID NO: 416467 - RNA, 23 nt, Human
gaacuccugaccucaggugaucu

SEQ ID NO: 416468 - RNA, 24 nt, Human
gaacuccugaccucaggugaugca

SEQ ID NO: 416469 - RNA, 23 nt, Human
gaacuccugaccucaggugauuc

SEQ ID NO: 416470 - RNA, 24 nt, Human
gaacuccugaccucaggugauuca

SEQ ID NO: 416471 - RNA, 23 nt, Human
gaacuccugaccucaguugaucc

SEQ ID NO: 416472 - RNA, 24 nt, Human
gaacuccugaccucaguugaucca

SEQ ID NO: 416473 - RNA, 21 nt, Human
gaacuccugaccucaugaucc

SEQ ID NO: 416474 - RNA, 22 nt, Human
gaacuccugaccucaugaucca

SEQ ID NO: 416475 - RNA, 23 nt, Human
gaacuccugaccucaugauccac

SEQ ID NO: 416476 - RNA, 32 nt, Human
gaacuccugaccucaugauuugccugccuuug

SEQ ID NO: 416477 - RNA, 22 nt, Human
gaacuccugaccuccugaucca

SEQ ID NO: 416478 - RNA, 22 nt, Human
gaacuccugaccucgggaucca

SEQ ID NO: 416479 - RNA, 22 nt, Human
gaacuccugaccucgugaccca

SEQ ID NO: 416480 - RNA, 23 nt, Human
gaacuccugaccucgugacccac

SEQ ID NO: 416481 - RNA, 22 nt, Human
gaacuccugaccucgugagcca

SEQ ID NO: 416482 - RNA, 20 nt, Human
gaacuccugaccucgugauc

SEQ ID NO: 416483 - RNA, 22 nt, Human
gaacuccugaccucgugaucca

SEQ ID NO: 416484 - RNA, 23 nt, Human
gaacuccugaccucgugauccac

SEQ ID NO: 416485 - RNA, 32 nt, Human
gaacuccugaccucgugauuugccugccuggg

SEQ ID NO: 416486 - RNA, 23 nt, Human
gaacuccugaccugaagcgaucc

SEQ ID NO: 416487 - RNA, 24 nt, Human
gaacuccugaccugaagugaucca

SEQ ID NO: 416488 - RNA, 24 nt, Human
gaacuccugaccugaagugaugca

SEQ ID NO: 416489 - RNA, 24 nt, Human
gaacuccugaccuuaagugaucca

SEQ ID NO: 416490 - RNA, 24 nt, Human
gaacuccugaccuuacgugaucca

SEQ ID NO: 416491 - RNA, 23 nt, Human
gaacuccugaccuuaggugaucc

SEQ ID NO: 416492 - RNA, 24 nt, Human
gaacuccugaccuuaggugaucca

SEQ ID NO: 416493 - RNA, 25 nt, Human
gaacuccugaccuucaggugaucca

SEQ ID NO: 416494 - RNA, 24 nt, Human
gaacuccugaccuuggguaaucca

SEQ ID NO: 416495 - RNA, 23 nt, Human
gaacuccugaccuuggugaucca

SEQ ID NO: 416496 - RNA, 22 nt, Human
gaacuccugaccuugugauaca

SEQ ID NO: 416497 - RNA, 22 nt, Human
gaacuccugaccuugugaucca

SEQ ID NO: 416498 - RNA, 23 nt, Human
gaacuccugaccuugugauccac

SEQ ID NO: 416499 - RNA, 23 nt, Human
gaacuccugacgucaggugaucc

SEQ ID NO: 416500 - RNA, 22 nt, Human
gaacuccugacguggugaucca

SEQ ID NO: 416501 - RNA, 23 nt, Human
gaacuccugacugcaggugaucc

SEQ ID NO: 416502 - RNA, 24 nt, Human
gaacuccugacuucaagugaucca

SEQ ID NO: 416503 - RNA, 24 nt, Human
gaacuccugacuucaggugaccca

SEQ ID NO: 416504 - RNA, 23 nt, Human
gaacuccugacuucaugugaucc

SEQ ID NO: 416505 - RNA, 24 nt, Human
gaacuccugacuugaaaugaucca

SEQ ID NO: 416506 - RNA, 24 nt, Human
gaacuccugacuuuaggugaucca

SEQ ID NO: 416507 - RNA, 23 nt, Human
gaacuccugagcucaagcaaucc

SEQ ID NO: 416508 - RNA, 24 nt, Human
gaacuccugagcucaagcagucca

SEQ ID NO: 416509 - RNA, 21 nt, Human
gaacuccugagcucaagugau

SEQ ID NO: 416510 - RNA, 23 nt, Human
gaacuccugagcucaagugaucc

SEQ ID NO: 416511 - RNA, 24 nt, Human
gaacuccugagcucaagugaucca

SEQ ID NO: 416512 - RNA, 23 nt, Human
gaacuccugagcucaggcaaucc

SEQ ID NO: 416513 - RNA, 24 nt, Human
gaacuccugagcucaggcagucca

SEQ ID NO: 416514 - RNA, 24 nt, Human
gaacuccugagcucaggugaucca

SEQ ID NO: 416515 - RNA, 22 nt, Human
gaacuccugagucaagugaucc

SEQ ID NO: 416516 - RNA, 24 nt, Human
gaacuccugaucucaggcaaucca

SEQ ID NO: 416517 - RNA, 23 nt, Human
gaacuccugauguuaggugaccc

SEQ ID NO: 416518 - RNA, 32 nt, Human
gaacuccugcagccugcacuuccgagagaucc

SEQ ID NO: 416519 - RNA, 32 nt, Human
gaacuccugcauuccaaccagccugggugaca

SEQ ID NO: 416520 - RNA, 24 nt, Human
gaacuccugcccucaggugaucca

SEQ ID NO: 416521 - RNA, 25 nt, Human
gaacuccuggaccucaagugaucua

SEQ ID NO: 416522 - RNA, 23 nt, Human
gaacuccuggacuuagacgaucc

SEQ ID NO: 416523 - RNA, 23 nt, Human
gaacuccuggcaucaagcgaucc

SEQ ID NO: 416524 - RNA, 32 nt, Human
gaacuccuggccauaggugaucugccugccuc

SEQ ID NO: 416525 - RNA, 23 nt, Human
gaacuccuggccuaggugaucca

SEQ ID NO: 416526 - RNA, 23 nt, Human
gaacuccuggccucaagcaaucc

SEQ ID NO: 416527 - RNA, 23 nt, Human
gaacuccuggccucaagcgaucc

SEQ ID NO: 416528 - RNA, 24 nt, Human
gaacuccuggccucaagcgaucca

SEQ ID NO: 416529 - RNA, 23 nt, Human
gaacuccuggccucaagugaccc

SEQ ID NO: 416530 - RNA, 24 nt, Human
gaacuccuggccucaagugaucca

SEQ ID NO: 416531 - RNA, 24 nt, Human
gaacuccuggccucaagugauuca

SEQ ID NO: 416532 - RNA, 24 nt, Human
gaacuccuggccucaggugaucca

SEQ ID NO: 416533 - RNA, 23 nt, Human
gaacuccuggcuacaagugaucc

SEQ ID NO: 416534 - RNA, 32 nt, Human
gaacuccuggcugaucucuuuuacuuaauucu

SEQ ID NO: 416535 - RNA, 23 nt, Human
gaacuccuggcuucaagcgaucc

SEQ ID NO: 416536 - RNA, 23 nt, Human
gaacuccugggaucaagugaucc

SEQ ID NO: 416537 - RNA, 23 nt, Human
gaacuccugggcacaagugaucc

SEQ ID NO: 416538 - RNA, 21 nt, Human
gaacuccugggcccaagugau

SEQ ID NO: 416539 - RNA, 23 nt, Human
gaacuccugggcccaagugaucc

SEQ ID NO: 416540 - RNA, 24 nt, Human
gaacuccugggcucaacugaucca

SEQ ID NO: 416541 - RNA, 23 nt, Human
gaacuccugggcucaagcgaucc

SEQ ID NO: 416542 - RNA, 24 nt, Human
gaacuccugggcucaagcgaucca

SEQ ID NO: 416543 - RNA, 24 nt, Human
gaacuccugggcucaagcggucca

SEQ ID NO: 416544 - RNA, 23 nt, Human
gaacuccugggcucaagugaucc

SEQ ID NO: 416545 - RNA, 32 nt, Human
gaacuccugggcucaagugauccacuugccuu

SEQ ID NO: 416546 - RNA, 24 nt, Human
gaacuccugggcucaaguggucca

SEQ ID NO: 416547 - RNA, 20 nt, Human
gaacuccugggcucaaugau

SEQ ID NO: 416548 - RNA, 23 nt, Human
gaacuccugggcucagaugaucc

SEQ ID NO: 416549 - RNA, 23 nt, Human
gaacuccugggcuuaagugaccc

SEQ ID NO: 416550 - RNA, 23 nt, Human
gaacuccuggucucaagugaucc

SEQ ID NO: 416551 - RNA, 32 nt, Human
gaacuccuggucucuugcgguccuccugucuu

SEQ ID NO: 416552 - RNA, 23 nt, Human
gaacuccugguuucaagcgaucc

SEQ ID NO: 416553 - RNA, 23 nt, Human
gaacuccuguccucagguaaucc

SEQ ID NO: 416554 - RNA, 23 nt, Human
gaacuccugugcucaagugaucc

SEQ ID NO: 416555 - RNA, 24 nt, Human
gaacuccuuaccucaggugaucca

SEQ ID NO: 416556 - RNA, 32 nt, Human
gaacuccuuggcuucuuuacuuaguucaagcc

SEQ ID NO: 416557 - RNA, 32 nt, Human
gaacucgcauggaaggggacaccccacaccgc

SEQ ID NO: 416558 - RNA, 32 nt, Human
gaacucgccagagacugagagcagagaccacu

SEQ ID NO: 416559 - RNA, 32 nt, Human
gaacucgcuucccaggcuucugagagucccgg

SEQ ID NO: 416560 - RNA, 32 nt, Human
gaacucggaaggcugggcaguggagcaaaaug

SEQ ID NO: 416561 - RNA, 32 nt, Human
gaacucggaggcgugcuuccuccacccgccgg

SEQ ID NO: 416562 - RNA, 32 nt, Human
gaacucggcugcggcuccauggucugaguugu

SEQ ID NO: 416563 - RNA, 24 nt, Human
gaacucgggaggaagagguugcag

SEQ ID NO: 416564 - RNA, 32 nt, Human
gaacucgggaggaagagguugcagugagcuga

SEQ ID NO: 416565 - RNA, 24 nt, Human
gaacucgggaggcagagguugcag

SEQ ID NO: 416566 - RNA, 32 nt, Human
gaacucgggaggcagagguugcagugagcuga

SEQ ID NO: 416567 - RNA, 32 nt, Human
gaacucgggaggcagagguugucaugagcuga

SEQ ID NO: 416568 - RNA, 32 nt, Human
gaacucgggaggcagagguuucagggagccaa

SEQ ID NO: 416569 - RNA, 24 nt, Human
gaacucgggaggcgaagguugcag

SEQ ID NO: 416570 - RNA, 32 nt, Human
gaacucgggaggcgaagguugcagugagccga

SEQ ID NO: 416571 - RNA, 32 nt, Human
gaacucgggaggcggagguugcagugagccga

SEQ ID NO: 416572 - RNA, 32 nt, Human
gaacucgggaggcggauguugcagugagccaa

SEQ ID NO: 416573 - RNA, 32 nt, Human
gaacucgggaggugaaaguugcagugagccga

SEQ ID NO: 416574 - RNA, 32 nt, Human
gaacucgggagguggagauugcaguaagccga

SEQ ID NO: 416575 - RNA, 32 nt, Human
gaacucgggagguggagguggcagugagccga

SEQ ID NO: 416576 - RNA, 24 nt, Human
gaacucgggagguggagguugcag

SEQ ID NO: 416577 - RNA, 32 nt, Human
gaacucgggagguggagguugcagucagccaa

SEQ ID NO: 416578 - RNA, 32 nt, Human
gaacucgggagguggagguugcagugagcuga

SEQ ID NO: 416579 - RNA, 32 nt, Human
gaacucgggagguggagguugugaugugcuga

SEQ ID NO: 416580 - RNA, 32 nt, Human
gaacucgggcccugagcuccucacugccgccc

SEQ ID NO: 416581 - RNA, 24 nt, Human
gaacucggggggcagagguugcag

SEQ ID NO: 416582 - RNA, 23 nt, Human
gaacucgggugggggagguugca

SEQ ID NO: 416583 - RNA, 32 nt, Human
gaacucgggugggggagguugcaaugagccga

SEQ ID NO: 416584 - RNA, 32 nt, Human
gaacucgucaggaaggcaggagacaggagacg

SEQ ID NO: 416585 - RNA, 32 nt, Human
gaacucuaaaccugcguguguggcugugcacc

SEQ ID NO: 416586 - RNA, 32 nt, Human
gaacucuacaucuagcaauuucucuuuaaaac

SEQ ID NO: 416587 - RNA, 32 nt, Human
gaacucuaggaaauauggucuuaugcuaggua

SEQ ID NO: 416588 - RNA, 32 nt, Human
gaacucucaagaggagugggagugcgggaguc

SEQ ID NO: 416589 - RNA, 32 nt, Human
gaacucucaggccaagaggagcccugggguga

SEQ ID NO: 416590 - RNA, 32 nt, Human
gaacucucaguucugccuagguguuuuugggg

SEQ ID NO: 416591 - RNA, 32 nt, Human
gaacucuccacccucaucucucugcguauuuc

SEQ ID NO: 416592 - RNA, 32 nt, Human
gaacucuccagugcccuauagcugcaagaguu

SEQ ID NO: 416593 - RNA, 32 nt, Human
gaacucucccaaggccacacagccggugcuag

SEQ ID NO: 416594 - RNA, 21 nt, Human
gaacucucccaccugucuccu

SEQ ID NO: 416595 - RNA, 21 nt, Human
gaacucucuucuccuauccua

SEQ ID NO: 416596 - RNA, 32 nt, Human
gaacucugaauagagacuugaagagugaggaa

SEQ ID NO: 416597 - RNA, 32 nt, Human
gaacucugagcagugcuugaaugaaguuguag

SEQ ID NO: 416598 - RNA, 32 nt, Human
gaacucugcaccuuccuccaccaggagccugg

SEQ ID NO: 416599 - RNA, 32 nt, Human
gaacucugcccaggugugcaggguuuggcuug

SEQ ID NO: 416600 - RNA, 31 nt, Human
gaacucugccucucugcuucuucaucuucuu

SEQ ID NO: 416601 - RNA, 32 nt, Human
gaacucugcuaagcuccgcugcagagacaggc

SEQ ID NO: 416602 - RNA, 32 nt, Human
gaacucugcucacugcaaccuccgccucccag

SEQ ID NO: 416603 - RNA, 32 nt, Human
gaacucuggaagcacugcucucugucagugau

SEQ ID NO: 416604 - RNA, 32 nt, Human
gaacucuggagucugcucaccuuccugccuca

SEQ ID NO: 416605 - RNA, 32 nt, Human
gaacucugggcuggaggcagggagacacugcc

SEQ ID NO: 416606 - RNA, 32 nt, Human
gaacucuguaacccucagcaaguuucauuuuu

SEQ ID NO: 416607 - RNA, 32 nt, Human
gaacucuguaccagcacaauccugccucacug

SEQ ID NO: 416608 - RNA, 32 nt, Human
gaacucugugaaggauggaacuuucagauauc

SEQ ID NO: 416609 - RNA, 32 nt, Human
gaacucuuacaucaagaggucuccaguaccuc

SEQ ID NO: 416610 - RNA, 32 nt, Human
gaacucuuccaaguaauuucacagguggagau

SEQ ID NO: 416611 - RNA, 32 nt, Human
gaacucuucugcacucugagcuggccagcccc

SEQ ID NO: 416612 - RNA, 32 nt, Human
gaacucuucugccauuuuccuccuucacucgu

SEQ ID NO: 416613 - RNA, 24 nt, Human
gaacucuugaccucaggugaucca

SEQ ID NO: 416614 - RNA, 32 nt, Human
gaacucuugaccucaggugauccugagccuca

SEQ ID NO: 416615 - RNA, 24 nt, Human
gaacucuugaccucgggugaucca

SEQ ID NO: 416616 - RNA, 24 nt, Human
gaacucuugacuucagaugaucca

SEQ ID NO: 416617 - RNA, 32 nt, Human
gaacucuugcagaggaaggauuuggaauauuu

SEQ ID NO: 416618 - RNA, 23 nt, Human
gaacucuuggccucaagcgaucc

SEQ ID NO: 416619 - RNA, 23 nt, Human
gaacucuuggccucaaguaaucc

SEQ ID NO: 416620 - RNA, 23 nt, Human
gaacucuuggccucaggugaucc

SEQ ID NO: 416621 - RNA, 23 nt, Human
gaacucuugggcucaagcgaucc

SEQ ID NO: 416622 - RNA, 23 nt, Human
gaacucuugggcucaagugaucc

SEQ ID NO: 416623 - RNA, 32 nt, Human
gaacucuuggugcugguguuuugggcagaaag

SEQ ID NO: 416624 - RNA, 32 nt, Human
gaacucuuguuucuuggggaaggagaggaggg

SEQ ID NO: 416625 - RNA, 32 nt, Human
gaacucuuucaacucugcgcugcccagccuuc

SEQ ID NO: 416626 - RNA, 32 nt, Human
gaacucuuucugagagacugcagcacaccuag

SEQ ID NO: 416627 - RNA, 32 nt, Human
gaacugaaaggcugugaccagccugguggcgc

SEQ ID NO: 416628 - RNA, 32 nt, Human
gaacugaacauguaaaaaguaugggaaacaga

SEQ ID NO: 416629 - RNA, 32 nt, Human
gaacugaagcgcccugaaccccagccuguccg

SEQ ID NO: 416630 - RNA, 32 nt, Human
gaacugaagcuucucagaucagaaaagauaaa

SEQ ID NO: 416631 - RNA, 24 nt, Human
gaacugaaggaugccacccaggga

SEQ ID NO: 416632 - RNA, 32 nt, Human
gaacugaagggccuggccaaccaugugguugu

SEQ ID NO: 416633 - RNA, 32 nt, Human
gaacugacccccucagccccagcccaucaccc

SEQ ID NO: 416634 - RNA, 32 nt, Human
gaacugaccuacugaccugccugcuggcauga

SEQ ID NO: 416635 - RNA, 24 nt, Human
gaacugaccugaguccccuuccaa

SEQ ID NO: 416636 - RNA, 32 nt, Human
gaacugacugaacuagagcuugcagugaagug

SEQ ID NO: 416637 - RNA, 24 nt, Human
gaacugagauugcgccaccgcacu

SEQ ID NO: 416638 - RNA, 32 nt, Human
gaacugagauugugccacuacacuccagccug

SEQ ID NO: 416639 - RNA, 24 nt, Human
gaacugaggagguggagguugcag

SEQ ID NO: 416640 - RNA, 27 nt, Human
gaacugaggagguggagguugcaguga

SEQ ID NO: 416641 - RNA, 32 nt, Human
gaacugaggagguggagguugcagugagccga

SEQ ID NO: 416642 - RNA, 32 nt, Human
gaacugaggccccaggaugacagaacaggaga

SEQ ID NO: 416643 - RNA, 32 nt, Human
gaacugaggccugggugauuuauuuauuggga

SEQ ID NO: 416644 - RNA, 32 nt, Human
gaacugaggggaguagagggagagggcaggug

SEQ ID NO: 416645 - RNA, 32 nt, Human
gaacugaguucccagcaucaucuuauucugaa

SEQ ID NO: 416646 - RNA, 32 nt, Human
gaacugaucuguccuucgugaaacgcaacaaa

SEQ ID NO: 416647 - RNA, 32 nt, Human
gaacugaucuucaugcugagcgacagcccugg

SEQ ID NO: 416648 - RNA, 32 nt, Human
gaacugaugaagcugcagaaccaaugaggugg

SEQ ID NO: 416649 - RNA, 18 nt, Human
gaacugaugaccacccca

SEQ ID NO: 416650 - RNA, 32 nt, Human
gaacugaugcuuaaacacacagguguguugca

SEQ ID NO: 416651 - RNA, 32 nt, Human
gaacugauuugugaucaggaacgauuccaggu

SEQ ID NO: 416652 - RNA, 22 nt, Human
gaacugcaagcuccccucagcc

SEQ ID NO: 416653 - RNA, 32 nt, Human
gaacugcaccuuuaggccaucucagcuugcug

SEQ ID NO: 416654 - RNA, 32 nt, Human
gaacugcagacuccuuuguacucucaaacucc

SEQ ID NO: 416655 - RNA, 32 nt, Human
gaacugcagaugugcgccaccaugcccggcua

SEQ ID NO: 416656 - RNA, 32 nt, Human
gaacugcagcggagcgugugaggugccuggca

SEQ ID NO: 416657 - RNA, 32 nt, Human
gaacugcagcuugaggaauucucuccacaccu

SEQ ID NO: 416658 - RNA, 32 nt, Human
gaacugcaggccaguuccaaagaguguuugcu

SEQ ID NO: 416659 - RNA, 32 nt, Human
gaacugcauaucggaggugguggaggaggagg

SEQ ID NO: 416660 - RNA, 19 nt, Human
gaacugcaugcugcaggug

SEQ ID NO: 416661 - RNA, 32 nt, Human
gaacugcauuaguuaagauuacccagacuugg

SEQ ID NO: 416662 - RNA, 32 nt, Human
gaacugccauccagcuuuggugcaauggcuga

SEQ ID NO: 416663 - RNA, 32 nt, Human
gaacugccggggcuuccagccacccaccccuc

SEQ ID NO: 416664 - RNA, 32 nt, Human
gaacugccugggguacauaugugaacacucca

SEQ ID NO: 416665 - RNA, 32 nt, Human
gaacugcgauaacugagaaacuucuuaccagu

SEQ ID NO: 416666 - RNA, 31 nt, Human
gaacugcucaauaaauguauguggcaugaau

SEQ ID NO: 416667 - RNA, 32 nt, Human
gaacugcucaccacugucuuccuggguuugca

SEQ ID NO: 416668 - RNA, 32 nt, Human
gaacugcucagagcuugagaugaaaugacaua

SEQ ID NO: 416669 - RNA, 31 nt, Human
gaacugcucuacauuuggccugugccagugg

SEQ ID NO: 416670 - RNA, 32 nt, Human
gaacugcucuacauuuggccugugccaguggc

SEQ ID NO: 416671 - RNA, 23 nt, Human
gaacugcugaccucaaguaaucc

SEQ ID NO: 416672 - RNA, 24 nt, Human
gaacugcugaccucaggugaucca

SEQ ID NO: 416673 - RNA, 18 nt, Human
gaacugcugagcuuuaca

SEQ ID NO: 416674 - RNA, 32 nt, Human
gaacugcugauagcccuuacugagggcaaaag

SEQ ID NO: 416675 - RNA, 32 nt, Human
gaacugcugcagcugcugccgccgccggagga

SEQ ID NO: 416676 - RNA, 21 nt, Human
gaacugcugcaugggccggca

SEQ ID NO: 416677 - RNA, 32 nt, Human
gaacugcugcccucccuuccuucuacuuaacu

SEQ ID NO: 416678 - RNA, 32 nt, Human
gaacugcugccugauuccuguguggggagaag

SEQ ID NO: 416679 - RNA, 32 nt, Human
gaacugcugcggcacguggccccuggguugca

SEQ ID NO: 416680 - RNA, 20 nt, Human
gaacugcugcuuguccggca

SEQ ID NO: 416681 - RNA, 24 nt, Human
gaacugcuggccucaagcgaucca

SEQ ID NO: 416682 - RNA, 32 nt, Human
gaacugcuguauucuaacaaauuuacuacacg

SEQ ID NO: 416683 - RNA, 32 nt, Human
gaacugcuuagguaggagugcacugcaguuuc

SEQ ID NO: 416684 - RNA, 32 nt, Human
gaacugcuuccucauuuaacaagguaggaagu

SEQ ID NO: 416685 - RNA, 32 nt, Human
gaacuggaaagucacuucccauagaagcaaaa

SEQ ID NO: 416686 - RNA, 32 nt, Human
gaacuggacagaacugaaacacagcaacacca

SEQ ID NO: 416687 - RNA, 32 nt, Human
gaacuggacccgagggacccagcucaacuuga

SEQ ID NO: 416688 - RNA, 32 nt, Human
gaacuggagagggaggggucugcggucagucg

SEQ ID NO: 416689 - RNA, 32 nt, Human
gaacuggagcccacuccuccucccucucguug

SEQ ID NO: 416690 - RNA, 21 nt, Human
gaacuggagcugccacagggg

SEQ ID NO: 416691 - RNA, 32 nt, Human
gaacuggaggaagcgaagcaucaaggccagag

SEQ ID NO: 416692 - RNA, 32 nt, Human
gaacuggaggccaggaaucuccucacugaaaa

SEQ ID NO: 416693 - RNA, 32 nt, Human
gaacuggagggugagaggaagggugggucugu

SEQ ID NO: 416694 - RNA, 32 nt, Human
gaacuggaugccacagaaagaggaguggucuu

SEQ ID NO: 416695 - RNA, 32 nt, Human
gaacuggcaaggaugcagucagcuguuugcag

SEQ ID NO: 416696 - RNA, 32 nt, Human
gaacuggcagcagccucuacugggcuuuuacu

SEQ ID NO: 416697 - RNA, 22 nt, Human
gaacuggcagugccucuuccaa

SEQ ID NO: 416698 - RNA, 32 nt, Human
gaacuggccagccuucggggccaacucccugg

SEQ ID NO: 416699 - RNA, 32 nt, Human
gaacuggccucugccuuugguuuacucagggu

SEQ ID NO: 416700 - RNA, 32 nt, Human
gaacuggccuggagagaguccuguaccacuca

SEQ ID NO: 416701 - RNA, 32 nt, Human
gaacuggcgaguucaggugggguggggacagc

SEQ ID NO: 416702 - RNA, 32 nt, Human
gaacuggcguagaggcaacagagccaucuaga

SEQ ID NO: 416703 - RNA, 32 nt, Human
gaacuggcucaagcaaucugcccaccucgguc

SEQ ID NO: 416704 - RNA, 22 nt, Human
gaacuggcugggccccugggga

SEQ ID NO: 416705 - RNA, 32 nt, Human
gaacuggcuuuucugagagaugaaucaauaau

SEQ ID NO: 416706 - RNA, 32 nt, Human
gaacugggaaacaggcagagguuggaacaguu

SEQ ID NO: 416707 - RNA, 32 nt, Human
gaacugggagaggaagagagcaggacaaggca

SEQ ID NO: 416708 - RNA, 32 nt, Human
gaacugggaggcagguuuggaggcugcagugg

SEQ ID NO: 416709 - RNA, 32 nt, Human
gaacugggagggaagggugagacggagccgga

SEQ ID NO: 416710 - RNA, 32 nt, Human
gaacugggaguccagggagggagcugaggagc

SEQ ID NO: 416711 - RNA, 32 nt, Human
gaacugggcagacaccccuggagcucagccga

SEQ ID NO: 416712 - RNA, 32 nt, Human
gaacugggccagcuccggucccuuccuuuugg

SEQ ID NO: 416713 - RNA, 32 nt, Human
gaacugggccuggggcuggaggccugggaucc

SEQ ID NO: 416714 - RNA, 32 nt, Human
gaacugggcuagucuagucugccuucuuuccu

SEQ ID NO: 416715 - RNA, 32 nt, Human
gaacugggcucacugcagccuagaccugcugg

SEQ ID NO: 416716 - RNA, 32 nt, Human
gaacuggggaagcagagguuguagugagccga

SEQ ID NO: 416717 - RNA, 32 nt, Human
gaacuggggaagggaaagaaggccugugggcg

SEQ ID NO: 416718 - RNA, 24 nt, Human
gaacuggggaggagaagguugcag

SEQ ID NO: 416719 - RNA, 32 nt, Human
gaacuggggaggagaagguugcagugagccga

SEQ ID NO: 416720 - RNA, 32 nt, Human
gaacuggggaggcagagguugcagugagacaa

SEQ ID NO: 416721 - RNA, 32 nt, Human
gaacuggggaggcagagguugcaguggcccga

SEQ ID NO: 416722 - RNA, 24 nt, Human
gaacuggggaggcagagguugcgg

SEQ ID NO: 416723 - RNA, 32 nt, Human
gaacuggggaggcagagguugcggugagccca

SEQ ID NO: 416724 - RNA, 24 nt, Human
gaacuggggagguagagguuacag

SEQ ID NO: 416725 - RNA, 32 nt, Human
gaacugggguccagagaggccaggucacagag

SEQ ID NO: 416726 - RNA, 32 nt, Human
gaacuggguaacaggcagaggcuggaacaguu

SEQ ID NO: 416727 - RNA, 32 nt, Human
gaacuggguaacaggcagagguuggaacaguu

SEQ ID NO: 416728 - RNA, 32 nt, Human
gaacugggugcacacaugaguggggcagccgg

SEQ ID NO: 416729 - RNA, 32 nt, Human
gaacuggguggccuuugaauugccugcuuucc

SEQ ID NO: 416730 - RNA, 32 nt, Human
gaacuggguguugguguccauggaacuuccuc

SEQ ID NO: 416731 - RNA, 22 nt, Human
gaacuggguucccaugcuuugu

SEQ ID NO: 416732 - RNA, 24 nt, Human
gaacugguauagggcaccuagagg

SEQ ID NO: 416733 - RNA, 32 nt, Human
gaacuggucauagaggaagagcuagaaaucca

SEQ ID NO: 416734 - RNA, 32 nt, Human
gaacuggugacacguggcuguacauucagcac

SEQ ID NO: 416735 - RNA, 24 nt, Human
gaacugguuacuuucugucucugu

SEQ ID NO: 416736 - RNA, 32 nt, Human
gaacugguucaauuccccgcuccugggcuucc

SEQ ID NO: 416737 - RNA, 32 nt, Human
gaacugguuuucauuuuuauaacugguagacu

SEQ ID NO: 416738 - RNA, 32 nt, Human
gaacuguaucugaguaacagaggacagcuguu

SEQ ID NO: 416739 - RNA, 20 nt, Human
gaacuguauuaugugguuuu

SEQ ID NO: 416740 - RNA, 32 nt, Human
gaacugucaccgcuguucccagacacacuuau

SEQ ID NO: 416741 - RNA, 19 nt, Human
gaacugucagugcggagua

SEQ ID NO: 416742 - RNA, 22 nt, Human
gaacugucguucacagcugcgu

SEQ ID NO: 416743 - RNA, 32 nt, Human
gaacugucuaguccugguuugggauuuaucuu

SEQ ID NO: 416744 - RNA, 32 nt, Human
gaacugugagacaauaaacucucauuguuuua

SEQ ID NO: 416745 - RNA, 32 nt, Human
gaacugugagcuucguugauguuagucaaagc

SEQ ID NO: 416746 - RNA, 32 nt, Human
gaacugugcccacugccuuuuccuuugcucug

SEQ ID NO: 416747 - RNA, 32 nt, Human
gaacugugcuuccaaacagaaaucaggaguga

SEQ ID NO: 416748 - RNA, 32 nt, Human
gaacuguggacugauucaguguaaauaaaaac

SEQ ID NO: 416749 - RNA, 32 nt, Human
gaacuguggauggaaaccaaugacagauauca

SEQ ID NO: 416750 - RNA, 32 nt, Human
gaacuguggcaggugggaauaauccugcccuu

SEQ ID NO: 416751 - RNA, 32 nt, Human
gaacuguggggaccuggaggccuccaacgacu

SEQ ID NO: 416752 - RNA, 31 nt, Human
gaacuguggguggauggguggauugccuggg

SEQ ID NO: 416753 - RNA, 32 nt, Human
gaacuguggucucguccaucugcacagccagg

SEQ ID NO: 416754 - RNA, 32 nt, Human
gaacuguggugacuacagguaacugaaaccau

SEQ ID NO: 416755 - RNA, 32 nt, Human
gaacuguguaaaccagcaugcugucugccaua

SEQ ID NO: 416756 - RNA, 32 nt, Human
gaacuguguagugcucuucuuugccauuugca

SEQ ID NO: 416757 - RNA, 32 nt, Human
gaacuguucuuuggaccuaggauucugccgug

SEQ ID NO: 416758 - RNA, 32 nt, Human
gaacuguuucaugcugcuguguuuucaaaagc

SEQ ID NO: 416759 - RNA, 32 nt, Human
gaacuguuuuuauccagcagugaagcucuuga

SEQ ID NO: 416760 - RNA, 20 nt, Human
gaacuuaaaaacugcugcua

SEQ ID NO: 416761 - RNA, 32 nt, Human
gaacuuaaccuuggagugagagcccagggaca

SEQ ID NO: 416762 - RNA, 32 nt, Human
gaacuuaagacauuagauguguggcuauguca

SEQ ID NO: 416763 - RNA, 32 nt, Human
gaacuuaagagggagagcacugugggcaugca

SEQ ID NO: 416764 - RNA, 32 nt, Human
gaacuuaagcucuugcucuuaggcugagacgc

SEQ ID NO: 416765 - RNA, 32 nt, Human
gaacuuaaggauggagccagcucugcauuauc

SEQ ID NO: 416766 - RNA, 32 nt, Human
gaacuuaccaucugaugauauguauguacagc

SEQ ID NO: 416767 - RNA, 19 nt, Human
gaacuuaccucuacuguua

SEQ ID NO: 416768 - RNA, 32 nt, Human
gaacuuagagguggagcaguuggauucugugc

SEQ ID NO: 416769 - RNA, 32 nt, Human
gaacuuagccaagagucugggucuccgggcca

SEQ ID NO: 416770 - RNA, 32 nt, Human
gaacuuagccuccugaacagucuucuucgaaa

SEQ ID NO: 416771 - RNA, 32 nt, Human
gaacuuaggagagaagcacggaggagcccccg

SEQ ID NO: 416772 - RNA, 32 nt, Human
gaacuuaggcuguuacacaacugcuggggucu

SEQ ID NO: 416773 - RNA, 32 nt, Human
gaacuuauacagucucagccacucugcuuuga

SEQ ID NO: 416774 - RNA, 32 nt, Human
gaacuuauagagcuucugcuucccuuucccuu

SEQ ID NO: 416775 - RNA, 23 nt, Human
gaacuuaugaccucaggugaucc

SEQ ID NO: 416776 - RNA, 32 nt, Human
gaacuucaacuuucugauuccaugucuguuag

SEQ ID NO: 416777 - RNA, 32 nt, Human
gaacuucacaggcuagaauggugaaaugaccu

SEQ ID NO: 416778 - RNA, 32 nt, Human
gaacuucagaguauauuaaauuaccuucuuac

SEQ ID NO: 416779 - RNA, 32 nt, Human
gaacuucagaugcuugcagacacuucaugaau

SEQ ID NO: 416780 - RNA, 32 nt, Human
gaacuucagucauccucuuggcaauuugaggg

SEQ ID NO: 416781 - RNA, 32 nt, Human
gaacuucaguuuauaauuggaagagaaauuuu

SEQ ID NO: 416782 - RNA, 32 nt, Human
gaacuuccaggcuuucuaccucgacucucacc

SEQ ID NO: 416783 - RNA, 32 nt, Human
gaacuucccaggagagccagcugggaagcagu

SEQ ID NO: 416784 - RNA, 32 nt, Human
gaacuuccccuuaccuccucucucuggcucgg

SEQ ID NO: 416785 - RNA, 32 nt, Human
gaacuuccguccuguaccugacuccaccucca

SEQ ID NO: 416786 - RNA, 32 nt, Human
gaacuuccuauguuaugguucuuucucuguga

SEQ ID NO: 416787 - RNA, 32 nt, Human
gaacuuccuugugaauccuuccagaaauacuc

SEQ ID NO: 416788 - RNA, 32 nt, Human
gaacuucgaggaaaucaauuucugaugcucca

SEQ ID NO: 416789 - RNA, 32 nt, Human
gaacuucuaaacagcacauccucgagccagcc

SEQ ID NO: 416790 - RNA, 32 nt, Human
gaacuucuaaccccgucccaaaagaggcggug

SEQ ID NO: 416791 - RNA, 32 nt, Human
gaacuucuacagaagcagguugcagugagccg

SEQ ID NO: 416792 - RNA, 32 nt, Human
gaacuucuagccugcuuuauaaucaaucaguu

SEQ ID NO: 416793 - RNA, 32 nt, Human
gaacuucucauggggaagaaguggagggaugc

SEQ ID NO: 416794 - RNA, 32 nt, Human
gaacuucuccaccgaccccgucaccuggauug

SEQ ID NO: 416795 - RNA, 32 nt, Human
gaacuucuccauccuuggcuuugauauuucag

SEQ ID NO: 416796 - RNA, 32 nt, Human
gaacuucucugggaugcugggauucuugccug

SEQ ID NO: 416797 - RNA, 24 nt, Human
gaacuucugaccucaaguggucca

SEQ ID NO: 416798 - RNA, 24 nt, Human
gaacuucugaccucaggugaucca

SEQ ID NO: 416799 - RNA, 24 nt, Human
gaacuucugacgucaagugaucca

SEQ ID NO: 416800 - RNA, 24 nt, Human
gaacuucugaucucaagugaucca

SEQ ID NO: 416801 - RNA, 32 nt, Human
gaacuucugggcaaaucuggaugcuaauugcu

SEQ ID NO: 416802 - RNA, 22 nt, Human
gaacuucugggcucaagcaauu

SEQ ID NO: 416803 - RNA, 23 nt, Human
gaacuucuguagcagagguugca

SEQ ID NO: 416804 - RNA, 32 nt, Human
gaacuucugugugguggcaguacuguggccca

SEQ ID NO: 416805 - RNA, 32 nt, Human
gaacuucuuguccuagaucagccccaaucugu

SEQ ID NO: 416806 - RNA, 32 nt, Human
gaacuugaacugcaggggcagagccagugaau

SEQ ID NO: 416807 - RNA, 32 nt, Human
gaacuugaagaguaagaauaaaaacuaccaaa

SEQ ID NO: 416808 - RNA, 32 nt, Human
gaacuugaagguuaaaccacuagcccauuuca

SEQ ID NO: 416809 - RNA, 32 nt, Human
gaacuugacaagauuagcucaagcagauagag

SEQ ID NO: 416810 - RNA, 32 nt, Human
gaacuugacagguuguguugaugcucuuaguu

SEQ ID NO: 416811 - RNA, 32 nt, Human
gaacuugaccacugccacaccagcccuggggu

SEQ ID NO: 416812 - RNA, 32 nt, Human
gaacuugaggggaaaagaaacaucccagggau

SEQ ID NO: 416813 - RNA, 32 nt, Human
gaacuugaguuggaagaggcaagucuggucuc

SEQ ID NO: 416814 - RNA, 32 nt, Human
gaacuugaucacuugaagcucagaccuauugg

SEQ ID NO: 416815 - RNA, 32 nt, Human
gaacuugcagugagccaagaucgcgccacugc

SEQ ID NO: 416816 - RNA, 32 nt, Human
gaacuugcggugagccgagaucgcaccacugc

SEQ ID NO: 416817 - RNA, 32 nt, Human
gaacuugcucacaacugugacuccucaggucg

SEQ ID NO: 416818 - RNA, 32 nt, Human
gaacuugcugccaaagagaaggcuaaugagga

SEQ ID NO: 416819 - RNA, 31 nt, Human
gaacuugcuguuucuaaacaugcaggcuggu

SEQ ID NO: 416820 - RNA, 32 nt, Human
gaacuugcuuaaggucacacagcuggugagug

SEQ ID NO: 416821 - RNA, 19 nt, Human
gaacuuggacuccugggaa

SEQ ID NO: 416822 - RNA, 32 nt, Human
gaacuuggacuccugggaacauggacaagccc

SEQ ID NO: 416823 - RNA, 32 nt, Human
gaacuuggauggccaggauggggucccgcggc

SEQ ID NO: 416824 - RNA, 32 nt, Human
gaacuuggauguaccugcccccaauccaugaa

SEQ ID NO: 416825 - RNA, 32 nt, Human
gaacuuggauugcaggaaagucaaaguaauau

SEQ ID NO: 416826 - RNA, 32 nt, Human
gaacuuggcacggccagcuugggacccaggac

SEQ ID NO: 416827 - RNA, 32 nt, Human
gaacuuggcagaaacacuacaacauuuucauu

SEQ ID NO: 416828 - RNA, 31 nt, Human
gaacuuggcauuuucugauauagaaaaaggc

SEQ ID NO: 416829 - RNA, 32 nt, Human
gaacuugggaggaucccaccucagccuucgug

SEQ ID NO: 416830 - RNA, 24 nt, Human
gaacuugggaggcagagguugcag

SEQ ID NO: 416831 - RNA, 32 nt, Human
gaacuugggaggcagagguuguggugagccga

SEQ ID NO: 416832 - RNA, 24 nt, Human
gaacuugggaggcagagguuucag

SEQ ID NO: 416833 - RNA, 32 nt, Human
gaacuugggaggcagagguuucagugagccga

SEQ ID NO: 416834 - RNA, 32 nt, Human
gaacuugggaggcggagcuugcggugagccaa

SEQ ID NO: 416835 - RNA, 24 nt, Human
gaacuugggaggcggagguugcag

SEQ ID NO: 416836 - RNA, 32 nt, Human
gaacuugggaggcggagguugcagugagcuaa

SEQ ID NO: 416837 - RNA, 32 nt, Human
gaacuugggagggagagguugcagugagccca

SEQ ID NO: 416838 - RNA, 32 nt, Human
gaacuugggagggguagguugcagugagcuga

SEQ ID NO: 416839 - RNA, 24 nt, Human
gaacuugggagguagagguuacag

SEQ ID NO: 416840 - RNA, 24 nt, Human
gaacuugggagguggagcuuacag

SEQ ID NO: 416841 - RNA, 32 nt, Human
gaacuugggagguggagcuuacagugagccga

SEQ ID NO: 416842 - RNA, 24 nt, Human
gaacuugggagguggagguugcag

SEQ ID NO: 416843 - RNA, 32 nt, Human
gaacuugggagguggagguugcagugagccag

SEQ ID NO: 416844 - RNA, 32 nt, Human
gaacuugggagguggagguugcagugggccga

SEQ ID NO: 416845 - RNA, 32 nt, Human
gaacuugggcgccgggcacacgcccagucccg

SEQ ID NO: 416846 - RNA, 32 nt, Human
gaacuugggggaggacacaaauccagagugca

SEQ ID NO: 416847 - RNA, 32 nt, Human
gaacuuggguucaaggaagauggagaugcguc

SEQ ID NO: 416848 - RNA, 32 nt, Human
gaacuuggguugauuucaauguuaauaaacua

SEQ ID NO: 416849 - RNA, 32 nt, Human
gaacuugguauccuguuuccaucccagccuuc

SEQ ID NO: 416850 - RNA, 32 nt, Human
gaacuuguagugagccaagaucacgccacugc

SEQ ID NO: 416851 - RNA, 32 nt, Human
gaacuuguaucuucucagcaaccuucacuuug

SEQ ID NO: 416852 - RNA, 32 nt, Human
gaacuuguauuuuuguggaugaugaccuuggu

SEQ ID NO: 416853 - RNA, 32 nt, Human
gaacuugucaaauuaaugucuacagugauaug

SEQ ID NO: 416854 - RNA, 32 nt, Human
gaacuugucaaauuacagccaaugagaaaaua

SEQ ID NO: 416855 - RNA, 32 nt, Human
gaacuuguccauaugaauaaaaguuaucgaag

SEQ ID NO: 416856 - RNA, 32 nt, Human
gaacuugucuguguguccagaggaggagucca

SEQ ID NO: 416857 - RNA, 32 nt, Human
gaacuugugaauuuuauuuuuaaggauucacc

SEQ ID NO: 416858 - RNA, 32 nt, Human
gaacuugugaccuucucugagguugcagcggc

SEQ ID NO: 416859 - RNA, 32 nt, Human
gaacuuguggagagacuacaaaguuuugguug

SEQ ID NO: 416860 - RNA, 32 nt, Human
gaacuugugggauggugggguuggcuucccug

SEQ ID NO: 416861 - RNA, 32 nt, Human
gaacuugugggguggagguugcagugagcuga

SEQ ID NO: 416862 - RNA, 32 nt, Human
gaacuuguuucaggaagugugagcacgggccu

SEQ ID NO: 416863 - RNA, 32 nt, Human
gaacuuguuucccuuauccauuuccuuuuuca

SEQ ID NO: 416864 - RNA, 32 nt, Human
gaacuuuaacaucagucauugcacaggagcua

SEQ ID NO: 416865 - RNA, 32 nt, Human
gaacuuuagaaaccacaccuccucgcuguagu

SEQ ID NO: 416866 - RNA, 32 nt, Human
gaacuuuauucccaucaaacacugaccuaauc

SEQ ID NO: 416867 - RNA, 32 nt, Human
gaacuuucaguacuguacuaccacagauugau

SEQ ID NO: 416868 - RNA, 32 nt, Human
gaacuuuccauggcugguggcagagguagaaa

SEQ ID NO: 416869 - RNA, 32 nt, Human
gaacuuuccucacccgccccugcccagacagg

SEQ ID NO: 416870 - RNA, 32 nt, Human
gaacuuuccuccucgggguggggguggggguu

SEQ ID NO: 416871 - RNA, 32 nt, Human
gaacuuuccuuccugucacugugaauacuugg

SEQ ID NO: 416872 - RNA, 32 nt, Human
gaacuuucuaaccuuaagaagaauaggaaagu

SEQ ID NO: 416873 - RNA, 32 nt, Human
gaacuuucuaggcugagucuagugccccuauu

SEQ ID NO: 416874 - RNA, 32 nt, Human
gaacuuucucuacaacccuugggagcgugggg

SEQ ID NO: 416875 - RNA, 32 nt, Human
gaacuuucucugucugucucucucugugucuc

SEQ ID NO: 416876 - RNA, 32 nt, Human
gaacuuucucuuuuuaggaauaccaaaguuuu

SEQ ID NO: 416877 - RNA, 18 nt, Human
gaacuuucuggacuccca

SEQ ID NO: 416878 - RNA, 17 nt, Human
gaacuuucuggauucca

SEQ ID NO: 416879 - RNA, 32 nt, Human
gaacuuucugggauguucucugugccuuggaa

SEQ ID NO: 416880 - RNA, 32 nt, Human
gaacuuucuugagggauagguggacccugaca

SEQ ID NO: 416881 - RNA, 32 nt, Human
gaacuuugaacccauguuaauuuuggacccua

SEQ ID NO: 416882 - RNA, 32 nt, Human
gaacuuugaggccagaggugauccagugauuu

SEQ ID NO: 416883 - RNA, 32 nt, Human
gaacuuugggaggccgaggugaguggauugcu

SEQ ID NO: 416884 - RNA, 32 nt, Human
gaacuuugggaggccuagauggguggaucacu

SEQ ID NO: 416885 - RNA, 32 nt, Human
gaacuuugucucuaauggcuuuugccacaacc

SEQ ID NO: 416886 - RNA, 32 nt, Human
gaacuuugugacugcagaacugacaguugacu

SEQ ID NO: 416887 - RNA, 32 nt, Human
gaacuuuugagugaugacucugagaaguugaa

SEQ ID NO: 416888 - RNA, 22 nt, Human
gaacuuuugcuccaggguccca

SEQ ID NO: 416889 - RNA, 32 nt, Human
gaacuuuuggaaaaucucagagggucuggggc

SEQ ID NO: 416890 - RNA, 32 nt, Human
gaacuuuuucuguugaacaaaauauucacaac

SEQ ID NO: 416891 - RNA, 32 nt, Human
gaacuuuuugcacuagacugauguuguuuuuc

SEQ ID NO: 416892 - RNA, 32 nt, Human
gaagaaaaacaguccgcgacagcuaggcgcgu

SEQ ID NO: 416893 - RNA, 32 nt, Human
gaagaaaaagaaaaagaagaagaaaggcagaa

SEQ ID NO: 416894 - RNA, 32 nt, Human
gaagaaaaagaaguaccacucuggccuggccu

SEQ ID NO: 416895 - RNA, 32 nt, Human
gaagaaaaaggccaaggaguuugaagauuuuu

SEQ ID NO: 416896 - RNA, 32 nt, Human
gaagaaaaaguuaaaaggaaggugaagugcgg

SEQ ID NO: 416897 - RNA, 32 nt, Human
gaagaaaaauuggccgggcaugguggcucaug

SEQ ID NO: 416898 - RNA, 32 nt, Human
gaagaaaacaccucuuagcugugugacugauu

SEQ ID NO: 416899 - RNA, 21 nt, Human
gaagaaaacuuaaacccugug

SEQ ID NO: 416900 - RNA, 32 nt, Human
gaagaaaacuuccaguacccguggaaccccag

SEQ ID NO: 416901 - RNA, 32 nt, Human
gaagaaaagccacccccugcacccuccauagc

SEQ ID NO: 416902 - RNA, 32 nt, Human
gaagaaaagcuucuuugauaaauguggaguuc

SEQ ID NO: 416903 - RNA, 32 nt, Human
gaagaaaaggcagagacaggcaagacagcauc

SEQ ID NO: 416904 - RNA, 32 nt, Human
gaagaaaaguaguucugguauguuucauugau

SEQ ID NO: 416905 - RNA, 32 nt, Human
gaagaaaagugagagcuucagcagaacguguc

SEQ ID NO: 416906 - RNA, 32 nt, Human
gaagaaaauaaauacuguauacuuuuaaauuu

SEQ ID NO: 416907 - RNA, 32 nt, Human
gaagaaaaugucccucccuuacccccauccuu

SEQ ID NO: 416908 - RNA, 32 nt, Human
gaagaaaauguucuuccaguuacuuuccaauu

SEQ ID NO: 416909 - RNA, 32 nt, Human
gaagaaacaaagucaccuuucucuccagugcc

SEQ ID NO: 416910 - RNA, 32 nt, Human
gaagaaacaagccaucuccauccagagcccau

SEQ ID NO: 416911 - RNA, 22 nt, Human
gaagaaacaccucuuacaguca

SEQ ID NO: 416912 - RNA, 32 nt, Human
gaagaaacagaagaacucaugcugccagauag

SEQ ID NO: 416913 - RNA, 32 nt, Human
gaagaaacagaagcggcucaguucaccuugau

SEQ ID NO: 416914 - RNA, 32 nt, Human
gaagaaacagaaggggcucaguucaccuugau

SEQ ID NO: 416915 - RNA, 32 nt, Human
gaagaaacauaugugacaugguauuuuaguaa

SEQ ID NO: 416916 - RNA, 32 nt, Human
gaagaaaccacagaaagaaaacuacagaccuc

SEQ ID NO: 416917 - RNA, 32 nt, Human
gaagaaacgcggcccuguuccagccugucucg

SEQ ID NO: 416918 - RNA, 32 nt, Human
gaagaaacugauuaaagagcuauaccacauaa

SEQ ID NO: 416919 - RNA, 32 nt, Human
gaagaaacugauuuagaaaaugcuagagcuga

SEQ ID NO: 416920 - RNA, 32 nt, Human
gaagaaacuggauagucgagagcccagaguug

SEQ ID NO: 416921 - RNA, 32 nt, Human
gaagaaacuuccaaaaauaucuagguuugucc

SEQ ID NO: 416922 - RNA, 32 nt, Human
gaagaaagaaaggggaagcagugaagaaaggg

SEQ ID NO: 416923 - RNA, 32 nt, Human
gaagaaagaagagaaagguauagcuaacucau

SEQ ID NO: 416924 - RNA, 32 nt, Human
gaagaaagacuccuuuccugcaucuuucauag

SEQ ID NO: 416925 - RNA, 32 nt, Human
gaagaaagaguuccagagggaggcugaaccug

SEQ ID NO: 416926 - RNA, 32 nt, Human
gaagaaagaugggguguccuucugugcugaac

SEQ ID NO: 416927 - RNA, 32 nt, Human
gaagaaagauucacacugcaccaggagacauc

SEQ ID NO: 416928 - RNA, 32 nt, Human
gaagaaagauuguagguggcuuggggaaugug

SEQ ID NO: 416929 - RNA, 28 nt, Human
gaagaaagcagcccccaugucccagcca

SEQ ID NO: 416930 - RNA, 30 nt, Human
gaagaaagcuugcagcuagaaagaguggaa

SEQ ID NO: 416931 - RNA, 32 nt, Human
gaagaaaggaagagaaaugcaaagugugggca

SEQ ID NO: 416932 - RNA, 32 nt, Human
gaagaaaggaagcacaauuggcagguuaucac

SEQ ID NO: 416933 - RNA, 32 nt, Human
gaagaaaggagggggcaagggagaagcugcug

SEQ ID NO: 416934 - RNA, 31 nt, Human
gaagaaagggacuucccuugcccaggggccu

SEQ ID NO: 416935 - RNA, 32 nt, Human
gaagaaagggugacauuuauuuugacaaguuu

SEQ ID NO: 416936 - RNA, 32 nt, Human
gaagaaaggugaacuccuuuucucaagcacuu

SEQ ID NO: 416937 - RNA, 32 nt, Human
gaagaaaguccacccuugguuccuaacuggaa

SEQ ID NO: 416938 - RNA, 31 nt, Human
gaagaaagugagaagauagaguacuggauca

SEQ ID NO: 416939 - RNA, 24 nt, Human
gaagaaauaacucacaaucuuccu

SEQ ID NO: 416940 - RNA, 32 nt, Human
gaagaaauaagaaagaucugcagggaugaaaa

SEQ ID NO: 416941 - RNA, 24 nt, Human
gaagaaauagacaacgaucugccu

SEQ ID NO: 416942 - RNA, 24 nt, Human
gaagaaauauaguagaacccuuug

SEQ ID NO: 416943 - RNA, 32 nt, Human
gaagaaauccauaacacccccaccccaacacc

SEQ ID NO: 416944 - RNA, 32 nt, Human
gaagaaauccaucauaccauuaccucauccug

SEQ ID NO: 416945 - RNA, 32 nt, Human
gaagaaaucuggguggacaagacgcugcaguu

SEQ ID NO: 416946 - RNA, 32 nt, Human
gaagaaaugaaaggaagaggagcuugagaguc

SEQ ID NO: 416947 - RNA, 32 nt, Human
gaagaaaugaacacugguauuagacuuaaaga

SEQ ID NO: 416948 - RNA, 32 nt, Human
gaagaaaugaacagcaaggcugaagacagaga

SEQ ID NO: 416949 - RNA, 22 nt, Human
gaagaaaugaccccaucagcca

SEQ ID NO: 416950 - RNA, 22 nt, Human
gaagaaaugaccccaucggcca

SEQ ID NO: 416951 - RNA, 22 nt, Human
gaagaaaugaccccauuggcca

SEQ ID NO: 416952 - RNA, 32 nt, Human
gaagaaaugcagagccagccugugcugcccac

SEQ ID NO: 416953 - RNA, 32 nt, Human
gaagaaaugcuacugguuuuuaaaaagcaaag

SEQ ID NO: 416954 - RNA, 32 nt, Human
gaagaaauggaauucuggcuccugggucccua

SEQ ID NO: 416955 - RNA, 18 nt, Human
gaagaaauggcggccuug

SEQ ID NO: 416956 - RNA, 32 nt, Human
gaagaaaugggagggagcaggauggagagcag

SEQ ID NO: 416957 - RNA, 32 nt, Human
gaagaaauuagccaagugugguggugcaugcc

SEQ ID NO: 416958 - RNA, 32 nt, Human
gaagaacaaagaauggggauguaaccauacgg

SEQ ID NO: 416959 - RNA, 32 nt, Human
gaagaacaaagucacuuugauuugaagugaga

SEQ ID NO: 416960 - RNA, 32 nt, Human
gaagaacaccaggaaagacagacaggaccagu

SEQ ID NO: 416961 - RNA, 31 nt, Human
gaagaacagagaccugucuggaaaaucgauc

SEQ ID NO: 416962 - RNA, 32 nt, Human
gaagaacagagcaguggcacuggaccuccugu

SEQ ID NO: 416963 - RNA, 32 nt, Human
gaagaacagagccagggaaagaauggugggga

SEQ ID NO: 416964 - RNA, 32 nt, Human
gaagaacagucggcucccaguguggucaugag

SEQ ID NO: 416965 - RNA, 32 nt, Human
gaagaacaucuggaguuggagccgcacaucug

SEQ ID NO: 416966 - RNA, 32 nt, Human
gaagaacauucuuuucaauggagcucaucuuc

SEQ ID NO: 416967 - RNA, 32 nt, Human
gaagaaccagagagaaauggaucccugagcuc

SEQ ID NO: 416968 - RNA, 32 nt, Human
gaagaaccagagaggcucugagaaaccucggg

SEQ ID NO: 416969 - RNA, 32 nt, Human
gaagaaccaggcccaagacuuuaccauucuga

SEQ ID NO: 416970 - RNA, 32 nt, Human
gaagaaccaguccugccaacaucuugaucuug

SEQ ID NO: 416971 - RNA, 32 nt, Human
gaagaaccauacucuuuccacugacaugaucc

SEQ ID NO: 416972 - RNA, 32 nt, Human
gaagaacccaggcgccugagccccagcuccgg

SEQ ID NO: 416973 - RNA, 32 nt, Human
gaagaacccccuucauguucauuaauauucuc

SEQ ID NO: 416974 - RNA, 32 nt, Human
gaagaaccuagaggccugguuugcuuuggugg

SEQ ID NO: 416975 - RNA, 32 nt, Human
gaagaacggaagggagggaaagacaaauuucu

SEQ ID NO: 416976 - RNA, 32 nt, Human
gaagaacguggcgaaaccccguaucuauuauu

SEQ ID NO: 416977 - RNA, 32 nt, Human
gaagaacucgaauuugaugaccaguuugagaa

SEQ ID NO: 416978 - RNA, 23 nt, Human
gaagaacucugaaccagaaguca

SEQ ID NO: 416979 - RNA, 32 nt, Human
gaagaacuggaaccccagcuucccuccagccu

SEQ ID NO: 416980 - RNA, 32 nt, Human
gaagaacuggagaaauaccagcaaagggcugu

SEQ ID NO: 416981 - RNA, 32 nt, Human
gaagaacuggugagccaagggaucaugccgcc

SEQ ID NO: 416982 - RNA, 32 nt, Human
gaagaacuguuuggcaagagagagaaguucga

SEQ ID NO: 416983 - RNA, 32 nt, Human
gaagaacuucauaucugaguaccauuugccau

SEQ ID NO: 416984 - RNA, 32 nt, Human
gaagaacuuucagccaauaaagcuugugcuuc

SEQ ID NO: 416985 - RNA, 32 nt, Human
gaagaagaaagccaggacuggagcagacgacg

SEQ ID NO: 416986 - RNA, 32 nt, Human
gaagaagaaagccaugcuuagaauggugcuuc

SEQ ID NO: 416987 - RNA, 32 nt, Human
gaagaagaagaaaagaaagaaagaaagaaaga

SEQ ID NO: 416988 - RNA, 23 nt, Human
gaagaagaagaaacccagcuuuc

SEQ ID NO: 416989 - RNA, 32 nt, Human
gaagaagaagaagaggaggaggaggaggagga

SEQ ID NO: 416990 - RNA, 32 nt, Human
gaagaagaagaaggaagagcagcagcgucugg

SEQ ID NO: 416991 - RNA, 32 nt, Human
gaagaagaagacgaaggaggaggacacacuuu

SEQ ID NO: 416992 - RNA, 32 nt, Human
gaagaagaagaggaagaaagaacaguagaaaa

SEQ ID NO: 416993 - RNA, 32 nt, Human
gaagaagaagaggaggaggaggaggaggaaga

SEQ ID NO: 416994 - RNA, 32 nt, Human
gaagaagaaggaggaggaggaggaggaggagg

SEQ ID NO: 416995 - RNA, 32 nt, Human
gaagaagaaggaugaagaagaccucuggaucu

SEQ ID NO: 416996 - RNA, 32 nt, Human
gaagaagaagucaggucagcagaaaauuccuc

SEQ ID NO: 416997 - RNA, 32 nt, Human
gaagaagaagugaaauauaaauauguauacau

SEQ ID NO: 416998 - RNA, 32 nt, Human
gaagaagaaugaaguccaggaggagaagggcu

SEQ ID NO: 416999 - RNA, 32 nt, Human
gaagaagacucagcuggugaaggcucaguacu

SEQ ID NO: 417000 - RNA, 32 nt, Human
gaagaagacugaugagacuaggugcuuugcuu

SEQ ID NO: 417001 - RNA, 32 nt, Human
gaagaagagagaggagaagaggaggaggcaga

SEQ ID NO: 417002 - RNA, 32 nt, Human
gaagaagagcuuggugaagaagaaagggguca

SEQ ID NO: 417003 - RNA, 32 nt, Human
gaagaagaggaagaggaaagaaaaggagucag

SEQ ID NO: 417004 - RNA, 32 nt, Human
gaagaagaggaagaggaaagaaagacaaguca

SEQ ID NO: 417005 - RNA, 32 nt, Human
gaagaagaggagaccuaggaaugaccuuguaa

SEQ ID NO: 417006 - RNA, 32 nt, Human
gaagaagaggaggaggaggagaugguggccga

SEQ ID NO: 417007 - RNA, 32 nt, Human
gaagaagaggaggaggaggaggaggaagaaga

SEQ ID NO: 417008 - RNA, 32 nt, Human
gaagaagaggaggaggaggaggaggaggagga

SEQ ID NO: 417009 - RNA, 32 nt, Human
gaagaagaggaugaggaugagauggaagagga

SEQ ID NO: 417010 - RNA, 32 nt, Human
gaagaagaggguggagcaggaggcucucacug

SEQ ID NO: 417011 - RNA, 32 nt, Human
gaagaagaguuugccaggaaacuacaggaaca

SEQ ID NO: 417012 - RNA, 32 nt, Human
gaagaagaucccuaauaugggucaagauccag

SEQ ID NO: 417013 - RNA, 32 nt, Human
gaagaagaucccuauaugggucaagauccaga

SEQ ID NO: 417014 - RNA, 32 nt, Human
gaagaagauggcccagcuccccaagaaagccu

SEQ ID NO: 417015 - RNA, 32 nt, Human
gaagaagauuccaggaagaggaaacaauacgu

SEQ ID NO: 417016 - RNA, 18 nt, Human
gaagaagcaaaccugaua

SEQ ID NO: 417017 - RNA, 32 nt, Human
gaagaagcaagaccaugguggggaagaugugg

SEQ ID NO: 417018 - RNA, 32 nt, Human
gaagaagcaauacccaaccccaccaaagaaaa

SEQ ID NO: 417019 - RNA, 24 nt, Human
gaagaagcagaaggagcaggagca

SEQ ID NO: 417020 - RNA, 32 nt, Human
gaagaagcagaggaacuucucaucuugcugaa

SEQ ID NO: 417021 - RNA, 32 nt, Human
gaagaagcagccgccgcagccccgguggaaac

SEQ ID NO: 417022 - RNA, 32 nt, Human
gaagaagccaagaggucauuuguggucauugu

SEQ ID NO: 417023 - RNA, 32 nt, Human
gaagaagccccgccaccagcagcuucugccau

SEQ ID NO: 417024 - RNA, 32 nt, Human
gaagaagccuucuuuucuuucuucuaugugaa

SEQ ID NO: 417025 - RNA, 32 nt, Human
gaagaagcuaugcugcuucccagccuggcuuc

SEQ ID NO: 417026 - RNA, 32 nt, Human
gaagaagcucccaggcagcaugugggauggac

SEQ ID NO: 417027 - RNA, 32 nt, Human
gaagaagcugagcuauuggaacaggaaauaga

SEQ ID NO: 417028 - RNA, 32 nt, Human
gaagaagcuguucacggugugauaauacucuu

SEQ ID NO: 417029 - RNA, 32 nt, Human
gaagaaggaaaaagacaaaaaggaagucugga

SEQ ID NO: 417030 - RNA, 31 nt, Human
gaagaaggaacgagagaaagagugagaggaa

SEQ ID NO: 417031 - RNA, 32 nt, Human
gaagaaggaagaaggagaaggaagaggaggaa

SEQ ID NO: 417032 - RNA, 32 nt, Human
gaagaaggaagaggaaagggaggaggaggauu

SEQ ID NO: 417033 - RNA, 32 nt, Human
gaagaaggaaguaaggaggaaaaaggaagaau

SEQ ID NO: 417034 - RNA, 32 nt, Human
gaagaaggaaguaggaaggagggaggaggaag

SEQ ID NO: 417035 - RNA, 21 nt, Human
gaagaaggaagugaacccuca

SEQ ID NO: 417036 - RNA, 32 nt, Human
gaagaaggagaucagacagggggagggcugac

SEQ ID NO: 417037 - RNA, 32 nt, Human
gaagaaggaggaagaaagaaggagaaggaaga

SEQ ID NO: 417038 - RNA, 32 nt, Human
gaagaaggaggaggaggaggaggaggaggagg

SEQ ID NO: 417039 - RNA, 32 nt, Human
gaagaaggagggaaggaaguagggaggcaggg

SEQ ID NO: 417040 - RNA, 32 nt, Human
gaagaaggcagugcuggaggugcagguggcau

SEQ ID NO: 417041 - RNA, 32 nt, Human
gaagaaggcuccucucuccaucgcaccccauc

SEQ ID NO: 417042 - RNA, 32 nt, Human
gaagaagggaaagcuuuggcagaaucuuggaa

SEQ ID NO: 417043 - RNA, 32 nt, Human
gaagaagggagaagaaaggugaguuugagcug

SEQ ID NO: 417044 - RNA, 32 nt, Human
gaagaaggggagaggagguugugugggacaag

SEQ ID NO: 417045 - RNA, 32 nt, Human
gaagaaggggcgggguaugggagaagccuccc

SEQ ID NO: 417046 - RNA, 32 nt, Human
gaagaagggugaggacagcaccagacuuagcc

SEQ ID NO: 417047 - RNA, 18 nt, Human
gaagaaggguggagagga

SEQ ID NO: 417048 - RNA, 32 nt, Human
gaagaagguaauucuaacccacacauugucau

SEQ ID NO: 417049 - RNA, 32 nt, Human
gaagaaggucagcaggguucauuuaaauggau

SEQ ID NO: 417050 - RNA, 32 nt, Human
gaagaaggugugggacaagaagaaaggguauu

SEQ ID NO: 417051 - RNA, 32 nt, Human
gaagaaguaggggagaggagaggacucagcgg

SEQ ID NO: 417052 - RNA, 32 nt, Human
gaagaagucacagaucuaaagaggcaagcagu

SEQ ID NO: 417053 - RNA, 32 nt, Human
gaagaagucugaggcagacggugaggguggcc

SEQ ID NO: 417054 - RNA, 32 nt, Human
gaagaagugaugccaccaucucuagccauaau

SEQ ID NO: 417055 - RNA, 32 nt, Human
gaagaaguggggugggacaacagugaaaucua

SEQ ID NO: 417056 - RNA, 32 nt, Human
gaagaaguggggugggacgacagugaaaucua

SEQ ID NO: 417057 - RNA, 32 nt, Human
gaagaaguuaggaggaagaagggggaaaaagg

SEQ ID NO: 417058 - RNA, 32 nt, Human
gaagaaguuccacuuuuugcccaaggucauuc

SEQ ID NO: 417059 - RNA, 32 nt, Human
gaagaaguugaggacggucugccuucccucgu

SEQ ID NO: 417060 - RNA, 32 nt, Human
gaagaaguugccagagguuccacccucugagg

SEQ ID NO: 417061 - RNA, 32 nt, Human
gaagaauaacauccauugucauacagcuccaa

SEQ ID NO: 417062 - RNA, 32 nt, Human
gaagaauacugauguuuaccuguauuugcuuu

SEQ ID NO: 417063 - RNA, 32 nt, Human
gaagaauaucacaauucuaauguaauaauaua

SEQ ID NO: 417064 - RNA, 32 nt, Human
gaagaauaucuuucuagcccucagccacuaca

SEQ ID NO: 417065 - RNA, 32 nt, Human
gaagaaucagccuggcagcagcauugugauua

SEQ ID NO: 417066 - RNA, 32 nt, Human
gaagaaucauucuucuuuuucaugcauuuguc

SEQ ID NO: 417067 - RNA, 32 nt, Human
gaagaauccagagaaaucagagcaggucaaau

SEQ ID NO: 417068 - RNA, 32 nt, Human
gaagaaucccaccucagugaaaugcuacaacu

SEQ ID NO: 417069 - RNA, 32 nt, Human
gaagaaucuacaaccuggagcauuucagguuu

SEQ ID NO: 417070 - RNA, 32 nt, Human
gaagaaucugaccaguaucuugcaguguugac

SEQ ID NO: 417071 - RNA, 32 nt, Human
gaagaaucuuuccuuuguccuguucuaaccua

SEQ ID NO: 417072 - RNA, 32 nt, Human
gaagaaugaaggaggaagaaggcaguagaaag

SEQ ID NO: 417073 - RNA, 32 nt, Human
gaagaaugaccucaccauccagcugcaggcug

SEQ ID NO: 417074 - RNA, 32 nt, Human
gaagaaugagacauugaaaacaugcacagugg

SEQ ID NO: 417075 - RNA, 32 nt, Human
gaagaaugagggugagcagacaucugggcaag

SEQ ID NO: 417076 - RNA, 32 nt, Human
gaagaaugcaaaccaggugaugguuucaaugc

SEQ ID NO: 417077 - RNA, 32 nt, Human
gaagaauggaauuggagauuguagacgugguu

SEQ ID NO: 417078 - RNA, 32 nt, Human
gaagaauggcagacuauugaacagguguauuu

SEQ ID NO: 417079 - RNA, 32 nt, Human
gaagaauggcgaggggagagcagaggagaagg

SEQ ID NO: 417080 - RNA, 32 nt, Human
gaagaaugggaaagagaaagagacagagacug

SEQ ID NO: 417081 - RNA, 32 nt, Human
gaagaauggggugagaggagacaugaggaaag

SEQ ID NO: 417082 - RNA, 32 nt, Human
gaagaauggguagaauaaagauuugauguggu

SEQ ID NO: 417083 - RNA, 32 nt, Human
gaagaauggugccaccacucaagcaacaagcc

SEQ ID NO: 417084 - RNA, 32 nt, Human
gaagaauggugucccauccuugcaagguaaug

SEQ ID NO: 417085 - RNA, 32 nt, Human
gaagaaugugcuccaggaugcuucaguagaaa

SEQ ID NO: 417086 - RNA, 32 nt, Human
gaagaauguugucagaaguagggaguaggcac

SEQ ID NO: 417087 - RNA, 32 nt, Human
gaagaauucacucagaccuucauggcugcaau

SEQ ID NO: 417088 - RNA, 32 nt, Human
gaagaauucuccaaacauuguggacugucucu

SEQ ID NO: 417089 - RNA, 32 nt, Human
gaagaauugaaggcgggaaugcauauggacag

SEQ ID NO: 417090 - RNA, 32 nt, Human
gaagaauuggcaccuuccuagggaaggagacg

SEQ ID NO: 417091 - RNA, 32 nt, Human
gaagaauuggcuuccuuucuugaaagugguga

SEQ ID NO: 417092 - RNA, 20 nt, Human
gaagaauuuucuucuugcca

SEQ ID NO: 417093 - RNA, 32 nt, Human
gaagacaaaaggaagaaagaagaggagaggug

SEQ ID NO: 417094 - RNA, 32 nt, Human
gaagacaaagagauccgauuucccugggacug

SEQ ID NO: 417095 - RNA, 32 nt, Human
gaagacaaaugaagagaaugcauuuugagcau

SEQ ID NO: 417096 - RNA, 32 nt, Human
gaagacaagaccgaaggagcugauggguagag

SEQ ID NO: 417097 - RNA, 32 nt, Human
gaagacaagagaucucugcucaguccuggcug

SEQ ID NO: 417098 - RNA, 32 nt, Human
gaagacaagauccuaauuccugucauuaguga

SEQ ID NO: 417099 - RNA, 32 nt, Human
gaagacaagaugggcaccuacucuacaauucu

SEQ ID NO: 417100 - RNA, 32 nt, Human
gaagacaagucaggccucagaaacccagccaa

SEQ ID NO: 417101 - RNA, 32 nt, Human
gaagacaaguggcugcuaccuucuguuaucgu

SEQ ID NO: 417102 - RNA, 22 nt, Human
gaagacacaaagcauuguugca

SEQ ID NO: 417103 - RNA, 32 nt, Human
gaagacacagagagaagagggccgaggagaga

SEQ ID NO: 417104 - RNA, 32 nt, Human
gaagacacaggccuuccucagcacccguguca

SEQ ID NO: 417105 - RNA, 31 nt, Human
gaagacacaguguccauccucccagauugga

SEQ ID NO: 417106 - RNA, 21 nt, Human
gaagacaccaggacaaugaca

SEQ ID NO: 417107 - RNA, 23 nt, Human
gaagacacgcgcuagaaaucgca

SEQ ID NO: 417108 - RNA, 23 nt, Human
gaagacacugaugagacugagga

SEQ ID NO: 417109 - RNA, 32 nt, Human
gaagacacuuuauucguuuauauugugagaaa

SEQ ID NO: 417110 - RNA, 32 nt, Human
gaagacagaaccuggucuucugauucccugug

SEQ ID NO: 417111 - RNA, 32 nt, Human
gaagacagaacugcucucucugaccuucuuca

SEQ ID NO: 417112 - RNA, 32 nt, Human
gaagacagaagaaugaaagaaguguuuugaaa

SEQ ID NO: 417113 - RNA, 32 nt, Human
gaagacagacccacagcccugcccuugucucu

SEQ ID NO: 417114 - RNA, 32 nt, Human
gaagacagacuggcagggcagcaccuccauag

SEQ ID NO: 417115 - RNA, 32 nt, Human
gaagacagagguggaggcaggagccaguggcu

SEQ ID NO: 417116 - RNA, 32 nt, Human
gaagacagagguggcaggacaaggaagaggac

SEQ ID NO: 417117 - RNA, 32 nt, Human
gaagacagcauuccacagccuggucaggaggg

SEQ ID NO: 417118 - RNA, 32 nt, Human
gaagacagcgggccuggcugggcaucccugug

SEQ ID NO: 417119 - RNA, 19 nt, Human
gaagacagcuguagagcaa

SEQ ID NO: 417120 - RNA, 32 nt, Human
gaagacaggaagaaaggaagagagggaaguaa

SEQ ID NO: 417121 - RNA, 22 nt, Human
gaagacaggagcugcagaacag

SEQ ID NO: 417122 - RNA, 32 nt, Human
gaagacaggcagcauggaaggcaugguggaga

SEQ ID NO: 417123 - RNA, 32 nt, Human
gaagacaggcagccaggggcuguggggagaca

SEQ ID NO: 417124 - RNA, 32 nt, Human
gaagacaggcaguggggcucucacuugggaaa

SEQ ID NO: 417125 - RNA, 32 nt, Human
gaagacaggcuucccuuccuucccccuccuua

SEQ ID NO: 417126 - RNA, 32 nt, Human
gaagacaggucacucuccccuaggcaguuccu

SEQ ID NO: 417127 - RNA, 32 nt, Human
gaagacaguaaauauuaggcugugggcugcug

SEQ ID NO: 417128 - RNA, 32 nt, Human
gaagacaguagaaauuccacugguaaauggcc

SEQ ID NO: 417129 - RNA, 32 nt, Human
gaagacagucaugggaccucagggagccagga

SEQ ID NO: 417130 - RNA, 32 nt, Human
gaagacagugcagccacccagccuuuaccagc

SEQ ID NO: 417131 - RNA, 32 nt, Human
gaagacaguuccaaaccacacacaaagcacaa

SEQ ID NO: 417132 - RNA, 32 nt, Human
gaagacauaaaggaauaaugauacauuaaaau

SEQ ID NO: 417133 - RNA, 32 nt, Human
gaagacauaagaaaaucuuaguaacuaccaga

SEQ ID NO: 417134 - RNA, 19 nt, Human
gaagacaucaaccuccgcc

SEQ ID NO: 417135 - RNA, 32 nt, Human
gaagacaucccacacccccacccagcacacac

SEQ ID NO: 417136 - RNA, 32 nt, Human
gaagacaucuuccuucucugccucggcuuccu

SEQ ID NO: 417137 - RNA, 32 nt, Human
gaagacaugaagcgcugagcugagggacgagg

SEQ ID NO: 417138 - RNA, 32 nt, Human
gaagacauucccaagugccuguccuuauugga

SEQ ID NO: 417139 - RNA, 22 nt, Human
gaagaccaagcccccuccuccu

SEQ ID NO: 417140 - RNA, 31 nt, Human
gaagaccacagcuagacggacaaacagcauu

SEQ ID NO: 417141 - RNA, 31 nt, Human
gaagaccacagcuagauggacaaacagcauu

SEQ ID NO: 417142 - RNA, 32 nt, Human
gaagaccacuaaagagagacaccaagaaugga

SEQ ID NO: 417143 - RNA, 32 nt, Human
gaagaccacugcacaccuucuaguaacacugc

SEQ ID NO: 417144 - RNA, 32 nt, Human
gaagaccagcaguaaguucuguuuuucugugg

SEQ ID NO: 417145 - RNA, 32 nt, Human
gaagaccagcugaggcagaggcugcaaggggu

SEQ ID NO: 417146 - RNA, 32 nt, Human
gaagaccaggguaugggcacuuuugccuucuc

SEQ ID NO: 417147 - RNA, 32 nt, Human
gaagaccagguggcaggucgcaguuggguacc

SEQ ID NO: 417148 - RNA, 32 nt, Human
gaagaccauauuucauagcagacuucaauuuu

SEQ ID NO: 417149 - RNA, 22 nt, Human
gaagaccauuagguggccucca

SEQ ID NO: 417150 - RNA, 25 nt, Human
gaagacccaagcuuucccuccgcca

SEQ ID NO: 417151 - RNA, 32 nt, Human
gaagacccaagugaguuugaaacaccugcucu

SEQ ID NO: 417152 - RNA, 31 nt, Human
gaagacccacguguagccacagcagagucua

SEQ ID NO: 417153 - RNA, 32 nt, Human
gaagacccagcaggaagccaggcugagugagc

SEQ ID NO: 417154 - RNA, 32 nt, Human
gaagacccaucuuaaagcuaaguuuacccaag

SEQ ID NO: 417155 - RNA, 32 nt, Human
gaagacccugcuuaaagggccccacaccacag

SEQ ID NO: 417156 - RNA, 32 nt, Human
gaagaccgaagcacuccuuccccuggcaggca

SEQ ID NO: 417157 - RNA, 32 nt, Human
gaagaccgcguccugaauuucuucacuagagc

SEQ ID NO: 417158 - RNA, 32 nt, Human
gaagaccgggaaaaagggaguacuggagccag

SEQ ID NO: 417159 - RNA, 32 nt, Human
gaagaccggggugacaagcagauacugcugug

SEQ ID NO: 417160 - RNA, 32 nt, Human
gaagaccuagaacauauccucagcaagaaaca

SEQ ID NO: 417161 - RNA, 32 nt, Human
gaagaccuagaagaggaugaggauuucauucc

SEQ ID NO: 417162 - RNA, 32 nt, Human
gaagaccucagggucucagaaaguaggcaggg

SEQ ID NO: 417163 - RNA, 32 nt, Human
gaagaccucccaggucucaguggaacuugcuc

SEQ ID NO: 417164 - RNA, 32 nt, Human
gaagaccuccggcucuugucaggcucuugucu

SEQ ID NO: 417165 - RNA, 32 nt, Human
gaagaccugccaggaagauuaaauggugaagg

SEQ ID NO: 417166 - RNA, 32 nt, Human
gaagaccuggaguucaagauuucugaugagga

SEQ ID NO: 417167 - RNA, 32 nt, Human
gaagaccuggggagcaguggcaggaggagaca

SEQ ID NO: 417168 - RNA, 32 nt, Human
gaagaccuggguggaaagcgguuuggaugaaa

SEQ ID NO: 417169 - RNA, 25 nt, Human
gaagaccuucagguuuccuccuccu

SEQ ID NO: 417170 - RNA, 32 nt, Human
gaagaccuucuagaagagaugauggugggaga

SEQ ID NO: 417171 - RNA, 32 nt, Human
gaagaccuucuggugugggcugggcagcaauu

SEQ ID NO: 417172 - RNA, 32 nt, Human
gaagaccuuuccugccagcuuccagggcucuu

SEQ ID NO: 417173 - RNA, 32 nt, Human
gaagaccuuugucuucuucaucuggcgccggu

SEQ ID NO: 417174 - RNA, 32 nt, Human
gaagacgacagccuggccaaccaagggaaagg

SEQ ID NO: 417175 - RNA, 32 nt, Human
gaagacgagguucugcggagagagaggcucca

SEQ ID NO: 417176 - RNA, 18 nt, Human
gaagacgagugaucugaa

SEQ ID NO: 417177 - RNA, 32 nt, Human
gaagacgaugggcagaggagugacagccgcag

SEQ ID NO: 417178 - RNA, 32 nt, Human
gaagacgcugaggaggaggaggaggcggagga

SEQ ID NO: 417179 - RNA, 32 nt, Human
gaagacgcuuccuggguuugaggaguucagug

SEQ ID NO: 417180 - RNA, 32 nt, Human
gaagacggagcugccccagcuguggcuggggg

SEQ ID NO: 417181 - RNA, 31 nt, Human
gaagacggcaaagguauuggggaucacaugg

SEQ ID NO: 417182 - RNA, 32 nt, Human
gaagacggcacuaggacccagggaaguccccg

SEQ ID NO: 417183 - RNA, 32 nt, Human
gaagacgggagagagguauuuagaugauaagu

SEQ ID NO: 417184 - RNA, 32 nt, Human
gaagacggggaagggaaaagaaacccauagca

SEQ ID NO: 417185 - RNA, 32 nt, Human
gaagacgguaauguucuucuacucacuucaca

SEQ ID NO: 417186 - RNA, 32 nt, Human
gaagacgguguuuugccauguugggcaggcug

SEQ ID NO: 417187 - RNA, 31 nt, Human
gaagacguacuucaucgucaugcagagcguc

SEQ ID NO: 417188 - RNA, 32 nt, Human
gaagacguagucaugcagcacgucagcagcuc

SEQ ID NO: 417189 - RNA, 32 nt, Human
gaagacgucuccccuucucugccucaccuggu

SEQ ID NO: 417190 - RNA, 32 nt, Human
gaagacuaagagucccaugaagugggcaccau

SEQ ID NO: 417191 - RNA, 32 nt, Human
gaagacuacaaaccaccaucuaccaucugcca

SEQ ID NO: 417192 - RNA, 32 nt, Human
gaagacuagccuacuucaucucaggacccgcc

SEQ ID NO: 417193 - RNA, 32 nt, Human
gaagacuaugggguaccugaugaggacaagag

SEQ ID NO: 417194 - RNA, 32 nt, Human
gaagacuauguacagagacugaccucacagac

SEQ ID NO: 417195 - RNA, 18 nt, Human
gaagacucaagccugcca

SEQ ID NO: 417196 - RNA, 32 nt, Human
gaagacucacuggccgaauggcagcaguagau

SEQ ID NO: 417197 - RNA, 32 nt, Human
gaagacucagcaacuccagccucuguagcauu

SEQ ID NO: 417198 - RNA, 32 nt, Human
gaagacucagcaggaacaagguaggcuucaaa

SEQ ID NO: 417199 - RNA, 32 nt, Human
gaagacucagcccagcgaagcucauucccuua

SEQ ID NO: 417200 - RNA, 16 nt, Human
gaagacucagcccgcc

SEQ ID NO: 417201 - RNA, 20 nt, Human
gaagacucaggagucugcca

SEQ ID NO: 417202 - RNA, 32 nt, Human
gaagacucagugccaaggaaaggggcuucuug

SEQ ID NO: 417203 - RNA, 32 nt, Human
gaagacucaucugaaguaucacagacuccuau

SEQ ID NO: 417204 - RNA, 21 nt, Human
gaagacuccccugccucccca

SEQ ID NO: 417205 - RNA, 16 nt, Human
gaagacucgccccacc

SEQ ID NO: 417206 - RNA, 18 nt, Human
gaagacucgcccucgcca

SEQ ID NO: 417207 - RNA, 18 nt, Human
gaagacucuccacugacc

SEQ ID NO: 417208 - RNA, 21 nt, Human
gaagacucuccgccccacgcc

SEQ ID NO: 417209 - RNA, 20 nt, Human
gaagacucuccuugaggcca

SEQ ID NO: 417210 - RNA, 19 nt, Human
gaagacucucugagcgacc

SEQ ID NO: 417211 - RNA, 32 nt, Human
gaagacucucuuuuugcccucgggaaaaagca

SEQ ID NO: 417212 - RNA, 32 nt, Human
gaagacucuggacacugaacugacuuuggaac

SEQ ID NO: 417213 - RNA, 19 nt, Human
gaagacucuuccccugcca

SEQ ID NO: 417214 - RNA, 32 nt, Human
gaagacucuugccuuuuuccugggcaacucua

SEQ ID NO: 417215 - RNA, 20 nt, Human
gaagacucuugcuuccacca

SEQ ID NO: 417216 - RNA, 32 nt, Human
gaagacucuuggccaggcagauggcuucucgg

SEQ ID NO: 417217 - RNA, 32 nt, Human
gaagacugaaagcaagguggcccagugugggg

SEQ ID NO: 417218 - RNA, 32 nt, Human
gaagacugaaguuugaugaagucugguuuaag

SEQ ID NO: 417219 - RNA, 32 nt, Human
gaagacugaauggagcucuguauacauucuag

SEQ ID NO: 417220 - RNA, 32 nt, Human
gaagacugaggcaggagaauggcgugaaccca

SEQ ID NO: 417221 - RNA, 32 nt, Human
gaagacugaggcaggaggaucguuugagcuca

SEQ ID NO: 417222 - RNA, 32 nt, Human
gaagacugaggcuggaggaucgcuugagccca

SEQ ID NO: 417223 - RNA, 32 nt, Human
gaagacugaugccaccaccugaaggcucauga

SEQ ID NO: 417224 - RNA, 32 nt, Human
gaagacugcuagacuuuaggcaaggggaucac

SEQ ID NO: 417225 - RNA, 31 nt, Human
gaagacugcuccugguggccugugcauaggg

SEQ ID NO: 417226 - RNA, 25 nt, Human
gaagacuggaaagagacauaucucu

SEQ ID NO: 417227 - RNA, 32 nt, Human
gaagacuggcuuucggcucacaguuuaaaaug

SEQ ID NO: 417228 - RNA, 32 nt, Human
gaagacugggcaacauauuuaagauuuccagc

SEQ ID NO: 417229 - RNA, 32 nt, Human
gaagacuggggcagcaguuggggaagugucug

SEQ ID NO: 417230 - RNA, 22 nt, Human
gaagacuggggcugaguaguua

SEQ ID NO: 417231 - RNA, 23 nt, Human
gaagacugguuaauuauaaguua

SEQ ID NO: 417232 - RNA, 32 nt, Human
gaagacuguacucugcagccugccuuccuaga

SEQ ID NO: 417233 - RNA, 32 nt, Human
gaagacuguaggcugguuacaucccccuaguu

SEQ ID NO: 417234 - RNA, 32 nt, Human
gaagacugucagaaucauccuccaucacuaga

SEQ ID NO: 417235 - RNA, 32 nt, Human
gaagacuucagcacacaugucagcauugacug

SEQ ID NO: 417236 - RNA, 32 nt, Human
gaagacuuccgguuggucgaggaacugagggu

SEQ ID NO: 417237 - RNA, 32 nt, Human
gaagacuuccucacgguaauggagauuguagu

SEQ ID NO: 417238 - RNA, 32 nt, Human
gaagacuuccuugaauuuccuugacauuuuuc

SEQ ID NO: 417239 - RNA, 32 nt, Human
gaagacuucuuggguaguuuagaucccauguc

SEQ ID NO: 417240 - RNA, 32 nt, Human
gaagacuugacggagccucacuuuaaaaacaa

SEQ ID NO: 417241 - RNA, 32 nt, Human
gaagacuuggccuuuucucugccugcaugucc

SEQ ID NO: 417242 - RNA, 32 nt, Human
gaagacuuggguccuugggucgcaggugggag

SEQ ID NO: 417243 - RNA, 22 nt, Human
gaagacuugucagaccaucaau

SEQ ID NO: 417244 - RNA, 32 nt, Human
gaagacuuuacagauguccucuguaaauagca

SEQ ID NO: 417245 - RNA, 21 nt, Human
gaagacuuuugccuccgucca

SEQ ID NO: 417246 - RNA, 32 nt, Human
gaagacuuuuguuaugaggagcugcagauuag

SEQ ID NO: 417247 - RNA, 32 nt, Human
gaagagaaaagcauaggaaaggaaacaguggu

SEQ ID NO: 417248 - RNA, 32 nt, Human
gaagagaaaagggagucaugcauuuugcuuug

SEQ ID NO: 417249 - RNA, 32 nt, Human
gaagagaaagagaucaggcaacagugauucua

SEQ ID NO: 417250 - RNA, 32 nt, Human
gaagagaaagaggaggagaauuaagaagagga

SEQ ID NO: 417251 - RNA, 32 nt, Human
gaagagaaaggaagagccagcaguucuuucuc

SEQ ID NO: 417252 - RNA, 31 nt, Human
gaagagaaaguguccaguagggcggaggcgg

SEQ ID NO: 417253 - RNA, 32 nt, Human
gaagagaaauggagaauaagcagcacaguguu

SEQ ID NO: 417254 - RNA, 32 nt, Human
gaagagaacaaaaggcaaaggaaggaggaauu

SEQ ID NO: 417255 - RNA, 32 nt, Human
gaagagaacgcgagaagggaagaugggggccg

SEQ ID NO: 417256 - RNA, 32 nt, Human
gaagagaacugugagaauacaggaagccccca

SEQ ID NO: 417257 - RNA, 32 nt, Human
gaagagaagaaaauggaggagaggaggggacu

SEQ ID NO: 417258 - RNA, 23 nt, Human
gaagagaagaccaagcccuggga

SEQ ID NO: 417259 - RNA, 32 nt, Human
gaagagaagagaggagucaacccaggggagca

SEQ ID NO: 417260 - RNA, 32 nt, Human
gaagagaagauugaccaaaccauccaaaugcc

SEQ ID NO: 417261 - RNA, 22 nt, Human
gaagagaagcccagcucuggga

SEQ ID NO: 417262 - RNA, 32 nt, Human
gaagagaaggacaaacuuaaaaggugaaaaga

SEQ ID NO: 417263 - RNA, 16 nt, Human
gaagagaaguugcaga

SEQ ID NO: 417264 - RNA, 32 nt, Human
gaagagaaugugccaauacauugguagauccu

SEQ ID NO: 417265 - RNA, 32 nt, Human
gaagagacaaaggagacuccugagggauuuag

SEQ ID NO: 417266 - RNA, 32 nt, Human
gaagagacaauagcauuagaaauaagugauua

SEQ ID NO: 417267 - RNA, 17 nt, Human
gaagagacaccagagac

SEQ ID NO: 417268 - RNA, 32 nt, Human
gaagagacaggaguggaccaggagagguccag

SEQ ID NO: 417269 - RNA, 32 nt, Human
gaagagacagugugggcugagagcagagggag

SEQ ID NO: 417270 - RNA, 31 nt, Human
gaagagacaucacccaguaggagggaguacg

SEQ ID NO: 417271 - RNA, 32 nt, Human
gaagagacaugcaagcuggcuggagugcagag

SEQ ID NO: 417272 - RNA, 31 nt, Human
gaagagaccauauuuguucgcagaggaagcc

SEQ ID NO: 417273 - RNA, 20 nt, Human
gaagagaccccggcggcggc

SEQ ID NO: 417274 - RNA, 32 nt, Human
gaagagaccccucuccccagugccccacaucu

SEQ ID NO: 417275 - RNA, 19 nt, Human
gaagagaccuugaaaggac

SEQ ID NO: 417276 - RNA, 32 nt, Human
gaagagacggaugaugaacaagcuuuacaucg

SEQ ID NO: 417277 - RNA, 32 nt, Human
gaagagacugacacaagagauguaaaaaggca

SEQ ID NO: 417278 - RNA, 32 nt, Human
gaagagacugcugguaguccucggcaggaagu

SEQ ID NO: 417279 - RNA, 32 nt, Human
gaagagacuucuucccuucaggcuuauuguuu

SEQ ID NO: 417280 - RNA, 32 nt, Human
gaagagagaagaggaagaggaagaggaagaga

SEQ ID NO: 417281 - RNA, 32 nt, Human
gaagagagaaggaggaaaagaagcaguuccug

SEQ ID NO: 417282 - RNA, 32 nt, Human
gaagagagaagggagagggaggaggccggggc

SEQ ID NO: 417283 - RNA, 32 nt, Human
gaagagagaggaagggagaagggagaggaaug

SEQ ID NO: 417284 - RNA, 32 nt, Human
gaagagagaggaagggugagggugaggcgugu

SEQ ID NO: 417285 - RNA, 21 nt, Human
gaagagagaggagaagaggag

SEQ ID NO: 417286 - RNA, 32 nt, Human
gaagagagagggaugagagggagggagaggag

SEQ ID NO: 417287 - RNA, 32 nt, Human
gaagagagagugagaagggggaagcaccagac

SEQ ID NO: 417288 - RNA, 32 nt, Human
gaagagagcaagggauuuccugggacaucugg

SEQ ID NO: 417289 - RNA, 32 nt, Human
gaagagagcacuguggugagguggugagaccg

SEQ ID NO: 417290 - RNA, 21 nt, Human
gaagagagcgcagcccggcca

SEQ ID NO: 417291 - RNA, 32 nt, Human
gaagagagcgugccucagguuacuugaacuug

SEQ ID NO: 417292 - RNA, 32 nt, Human
gaagagagcuccacuuacaaagaacugcuucu

SEQ ID NO: 417293 - RNA, 32 nt, Human
gaagagagcucuauuaaaagaggaauauugca

SEQ ID NO: 417294 - RNA, 32 nt, Human
gaagagaggaagcagccccagggaccaauuuu

SEQ ID NO: 417295 - RNA, 32 nt, Human
gaagagaggacacaucucccaccauuaccaga

SEQ ID NO: 417296 - RNA, 32 nt, Human
gaagagaggagagaccugggagugggagcuca

SEQ ID NO: 417297 - RNA, 32 nt, Human
gaagagaggagaggagagaggcagagagcggu

SEQ ID NO: 417298 - RNA, 32 nt, Human
gaagagaggagcagcaauccugaggggcuggg

SEQ ID NO: 417299 - RNA, 21 nt, Human
gaagagaggcacagacacaga

SEQ ID NO: 417300 - RNA, 32 nt, Human
gaagagaggcagagagggaaagaggcagagaa

SEQ ID NO: 417301 - RNA, 32 nt, Human
gaagagagggaagagaaagcacagagcagaga

SEQ ID NO: 417302 - RNA, 32 nt, Human
gaagagagggagagagaggaaagggaaggaag

SEQ ID NO: 417303 - RNA, 32 nt, Human
gaagagagggaggaggaaaggaaggagagaga

SEQ ID NO: 417304 - RNA, 32 nt, Human
gaagagagggguucuacccacagaucaacugu

SEQ ID NO: 417305 - RNA, 32 nt, Human
gaagagagggugaaagagucgcugcacccagg

SEQ ID NO: 417306 - RNA, 32 nt, Human
gaagagagguuagguaaagagaguuuggagga

SEQ ID NO: 417307 - RNA, 32 nt, Human
gaagagaguagagcucaaaacuggauuaucac

SEQ ID NO: 417308 - RNA, 32 nt, Human
gaagagagugagaggagcaacagugaaaggcc

SEQ ID NO: 417309 - RNA, 32 nt, Human
gaagagagugugaaacaggagccucagauaac

SEQ ID NO: 417310 - RNA, 32 nt, Human
gaagagaguuugaaaguuguauacuguuaaug

SEQ ID NO: 417311 - RNA, 32 nt, Human
gaagagauacacugcauuucccuuuaccaacu

SEQ ID NO: 417312 - RNA, 32 nt, Human
gaagagauagaaggcacagaagaucacagcua

SEQ ID NO: 417313 - RNA, 32 nt, Human
gaagagauagaggaggaggagggggaggaaga

SEQ ID NO: 417314 - RNA, 32 nt, Human
gaagagauauccaggccaggugcaguggcuca

SEQ ID NO: 417315 - RNA, 32 nt, Human
gaagagaucacuucagguggcuuuuguggagg

SEQ ID NO: 417316 - RNA, 32 nt, Human
gaagagaucaggaagagaaggagcagagcaga

SEQ ID NO: 417317 - RNA, 32 nt, Human
gaagagaucauagaaaccagagccuucucccc

SEQ ID NO: 417318 - RNA, 32 nt, Human
gaagagaucuuucugcaacaggauauucuucu

SEQ ID NO: 417319 - RNA, 32 nt, Human
gaagagaugcuacugccuggagacuggggucu

SEQ ID NO: 417320 - RNA, 32 nt, Human
gaagagaugcugucuuggucuuguuggacgag

SEQ ID NO: 417321 - RNA, 32 nt, Human
gaagagaugcugucuuggucuuguuggaggag

SEQ ID NO: 417322 - RNA, 31 nt, Human
gaagagauggagcuggacagagcuguggggg

SEQ ID NO: 417323 - RNA, 32 nt, Human
gaagagaugggaaaaggucaucaaagggcauu

SEQ ID NO: 417324 - RNA, 30 nt, Human
gaagagaugggagccagggcacgauagagc

SEQ ID NO: 417325 - RNA, 32 nt, Human
gaagagaugguuuugcugcucuccuugaggau

SEQ ID NO: 417326 - RNA, 22 nt, Human
gaagagauuucucccucuagca

SEQ ID NO: 417327 - RNA, 32 nt, Human
gaagagcaaaacugaggacaugguugagaaaa

SEQ ID NO: 417328 - RNA, 32 nt, Human
gaagagcaaaggacagguagucuagagagggu

SEQ ID NO: 417329 - RNA, 32 nt, Human
gaagagcaacaacaaacugcuuacgacagguu

SEQ ID NO: 417330 - RNA, 32 nt, Human
gaagagcaacaacagacaggugaccuucuugg

SEQ ID NO: 417331 - RNA, 32 nt, Human
gaagagcaagcagagucaugaccagggacaca

SEQ ID NO: 417332 - RNA, 32 nt, Human
gaagagcaagcuggagaggcugggcaggggcu

SEQ ID NO: 417333 - RNA, 20 nt, Human
gaagagcaauagaaccuuua

SEQ ID NO: 417334 - RNA, 32 nt, Human
gaagagcacagaacaauuucucauuucauauu

SEQ ID NO: 417335 - RNA, 32 nt, Human
gaagagcacagcugcagaucccaggccucugg

SEQ ID NO: 417336 - RNA, 21 nt, Human
gaagagcacuuggagauccua

SEQ ID NO: 417337 - RNA, 21 nt, Human
gaagagcacuuugaaauuuug

SEQ ID NO: 417338 - RNA, 32 nt, Human
gaagagcagaggguacaaguccccgcucacac

SEQ ID NO: 417339 - RNA, 32 nt, Human
gaagagcagaucauuccucucuggccucagcc

SEQ ID NO: 417340 - RNA, 32 nt, Human
gaagagcagcagcauggauggauuuuaugacc

SEQ ID NO: 417341 - RNA, 22 nt, Human
gaagagcagcuccagagcccug

SEQ ID NO: 417342 - RNA, 32 nt, Human
gaagagcagcuggcaugaugacugcuguuuga

SEQ ID NO: 417343 - RNA, 26 nt, Human
gaagagcaggaagggauacacucucc

SEQ ID NO: 417344 - RNA, 32 nt, Human
gaagagcaggaagggauacacucuccagugca

SEQ ID NO: 417345 - RNA, 20 nt, Human
gaagagcaggagggaacucu

SEQ ID NO: 417346 - RNA, 32 nt, Human
gaagagcaggcugcgccaggguuccuggcggg

SEQ ID NO: 417347 - RNA, 32 nt, Human
gaagagcagugaccccagcagagaggggccug

SEQ ID NO: 417348 - RNA, 32 nt, Human
gaagagcagugcuguccaugauguaauggaag

SEQ ID NO: 417349 - RNA, 32 nt, Human
gaagagcaucacagggcauaguuucacaaaag

SEQ ID NO: 417350 - RNA, 20 nt, Human
gaagagcauggggugcucug

SEQ ID NO: 417351 - RNA, 20 nt, Human
gaagagcauucugaccucug

SEQ ID NO: 417352 - RNA, 21 nt, Human
gaagagcauuugggaaagcug

SEQ ID NO: 417353 - RNA, 32 nt, Human
gaagagccacaagaccacacacacagcccuua

SEQ ID NO: 417354 - RNA, 32 nt, Human
gaagagccacagugagggagaucccauccccu

SEQ ID NO: 417355 - RNA, 32 nt, Human
gaagagccaggauaugagaagaugggagaggg

SEQ ID NO: 417356 - RNA, 32 nt, Human
gaagagcccagaaaaucaaggcaaacauuugu

SEQ ID NO: 417357 - RNA, 20 nt, Human
gaagagccccaagcagacua

SEQ ID NO: 417358 - RNA, 32 nt, Human
gaagagcccgcacgaugcagaccucaugccca

SEQ ID NO: 417359 - RNA, 19 nt, Human
gaagagcccuagagcuuug

SEQ ID NO: 417360 - RNA, 32 nt, Human
gaagagcccugcuucccugccuccuccuaccu

SEQ ID NO: 417361 - RNA, 31 nt, Human
gaagagcccuuucagcacuuucucaucugug

SEQ ID NO: 417362 - RNA, 32 nt, Human
gaagagccuaucugucaucgccugaggugccc

SEQ ID NO: 417363 - RNA, 32 nt, Human
gaagagccugcucgggacgucagggcccgggg

SEQ ID NO: 417364 - RNA, 32 nt, Human
gaagagccuucccucauuauugucauucuugg

SEQ ID NO: 417365 - RNA, 21 nt, Human
gaagagcgcucuagacaggac

SEQ ID NO: 417366 - RNA, 32 nt, Human
gaagagcggagagagaaggaagaggcgaugug

SEQ ID NO: 417367 - RNA, 32 nt, Human
gaagagcgggcugaggaaacccagagggacca

SEQ ID NO: 417368 - RNA, 22 nt, Human
gaagagcguacugcagagccua

SEQ ID NO: 417369 - RNA, 32 nt, Human
gaagagcuaaagauccgagaaaaagaagaugc

SEQ ID NO: 417370 - RNA, 32 nt, Human
gaagagcuaccagaugguguucuugaaucuga

SEQ ID NO: 417371 - RNA, 18 nt, Human
gaagagcuccagauggac

SEQ ID NO: 417372 - RNA, 32 nt, Human
gaagagcucccagagauuguagaaagagucca

SEQ ID NO: 417373 - RNA, 20 nt, Human
gaagagcucucggccaccaa

SEQ ID NO: 417374 - RNA, 32 nt, Human
gaagagcugacuccagccuguccaugcacggc

SEQ ID NO: 417375 - RNA, 32 nt, Human
gaagagcugagacauccguuccccuacaagaa

SEQ ID NO: 417376 - RNA, 32 nt, Human
gaagagcugcagcuuugacagugcuuauuuaa

SEQ ID NO: 417377 - RNA, 32 nt, Human
gaagagcugcccggcucacugcagccugguua

SEQ ID NO: 417378 - RNA, 32 nt, Human
gaagagcugccgaagagguggagccaggcagg

SEQ ID NO: 417379 - RNA, 32 nt, Human
gaagagcuggaaaauucucgaagcugcaccgu

SEQ ID NO: 417380 - RNA, 23 nt, Human
gaagagcuggauuauauauuucc

SEQ ID NO: 417381 - RNA, 22 nt, Human
gaagagcuugcccacagacaca

SEQ ID NO: 417382 - RNA, 32 nt, Human
gaagagcuuggaagagcuggggagaggguagg

SEQ ID NO: 417383 - RNA, 32 nt, Human
gaagaggaaagccacguagagugguuggcaug

SEQ ID NO: 417384 - RNA, 32 nt, Human
gaagaggaaagggaggaggaggauuuaucauu

SEQ ID NO: 417385 - RNA, 32 nt, Human
gaagaggaagaggaggaggaggagaccggcag

SEQ ID NO: 417386 - RNA, 32 nt, Human
gaagaggaagcacuccucugaugauuacuacu

SEQ ID NO: 417387 - RNA, 32 nt, Human
gaagaggaagggaggaagggaacagagaggaa

SEQ ID NO: 417388 - RNA, 32 nt, Human
gaagaggaaugagccauauauuggggaaaauc

SEQ ID NO: 417389 - RNA, 24 nt, Human
gaagaggacaaggcccucggcagc

SEQ ID NO: 417390 - RNA, 18 nt, Human
gaagaggacgagguggcg

SEQ ID NO: 417391 - RNA, 32 nt, Human
gaagaggagaauaaggaggagcaggaggaaga

SEQ ID NO: 417392 - RNA, 32 nt, Human
gaagaggagacacagacacagagcaggaggac

SEQ ID NO: 417393 - RNA, 32 nt, Human
gaagaggagaggcagagagggcgcggggaccg

SEQ ID NO: 417394 - RNA, 32 nt, Human
gaagaggagaggguauggggcggcagacccua

SEQ ID NO: 417395 - RNA, 32 nt, Human
gaagaggagaugggaggaaaugcaguuucaug

SEQ ID NO: 417396 - RNA, 32 nt, Human
gaagaggagcaucugcuccagauggaaaaugg

SEQ ID NO: 417397 - RNA, 32 nt, Human
gaagaggagccagccaggucuucauucaaacc

SEQ ID NO: 417398 - RNA, 23 nt, Human
gaagaggagccagcgcccgaggg

SEQ ID NO: 417399 - RNA, 22 nt, Human
gaagaggagccaggaaccgggg

SEQ ID NO: 417400 - RNA, 20 nt, Human
gaagaggagccgcggcgagg

SEQ ID NO: 417401 - RNA, 32 nt, Human
gaagaggagcgugaggagggaggcgaggcaug

SEQ ID NO: 417402 - RNA, 32 nt, Human
gaagaggaggaagaggaugaccugagugagcu

SEQ ID NO: 417403 - RNA, 32 nt, Human
gaagaggaggagaagggaggggguggccuggu

SEQ ID NO: 417404 - RNA, 32 nt, Human
gaagaggaggaggaggaggagaaggaggagag

SEQ ID NO: 417405 - RNA, 32 nt, Human
gaagaggaggaggaggaggaggaagaagaaag

SEQ ID NO: 417406 - RNA, 32 nt, Human
gaagaggaggaggaggaggaggaagcugaaga

SEQ ID NO: 417407 - RNA, 32 nt, Human
gaagaggaggaggaggaggaggaaggggcuug

SEQ ID NO: 417408 - RNA, 32 nt, Human
gaagaggaggaggaggaggaggaggaggagga

SEQ ID NO: 417409 - RNA, 32 nt, Human
gaagaggaggaggaggaggaggcuggguuggg

SEQ ID NO: 417410 - RNA, 32 nt, Human
gaagaggaggaggugggggcuggaggugcugg

SEQ ID NO: 417411 - RNA, 21 nt, Human
gaagaggaggcaccgcggcgg

SEQ ID NO: 417412 - RNA, 32 nt, Human
gaagaggaggcugagagggucaaaagaaaacu

SEQ ID NO: 417413 - RNA, 32 nt, Human
gaagaggaggggauaugacagcucauguuccu

SEQ ID NO: 417414 - RNA, 32 nt, Human
gaagaggaggguggggcccuggaugacuuucc

SEQ ID NO: 417415 - RNA, 19 nt, Human
gaagaggagguucuucggg

SEQ ID NO: 417416 - RNA, 32 nt, Human
gaagaggaguagaagagagccagugaagucag

SEQ ID NO: 417417 - RNA, 32 nt, Human
gaagaggauggcagaggcugcugggccuugga

SEQ ID NO: 417418 - RNA, 22 nt, Human
gaagaggauguggagaacuuug

SEQ ID NO: 417419 - RNA, 32 nt, Human
gaagaggauuauucgggagauugcuggugugg

SEQ ID NO: 417420 - RNA, 32 nt, Human
gaagaggcaagccugcacacacacuuccuguc

SEQ ID NO: 417421 - RNA, 32 nt, Human
gaagaggcagaaaguguggcagaggcacacgu

SEQ ID NO: 417422 - RNA, 32 nt, Human
gaagaggcagaugggggucaaaccacugccuu

SEQ ID NO: 417423 - RNA, 32 nt, Human
gaagaggcagcccccacccacucuguucucgu

SEQ ID NO: 417424 - RNA, 32 nt, Human
gaagaggcaggcacuggcuggcucagcuccac

SEQ ID NO: 417425 - RNA, 32 nt, Human
gaagaggcagggccccugacggaggcuuugcu

SEQ ID NO: 417426 - RNA, 31 nt, Human
gaagaggcagucaaggaggaaggagagacau

SEQ ID NO: 417427 - RNA, 32 nt, Human
gaagaggcaguuguggagggagagggagcaag

SEQ ID NO: 417428 - RNA, 19 nt, Human
gaagaggccaagcuucugg

SEQ ID NO: 417429 - RNA, 32 nt, Human
gaagaggccacuggccaggccucccaggcagg

SEQ ID NO: 417430 - RNA, 32 nt, Human
gaagaggccagugggagaggagaggaggggga

SEQ ID NO: 417431 - RNA, 32 nt, Human
gaagaggccauacugcuccagccggggcuccg

SEQ ID NO: 417432 - RNA, 32 nt, Human
gaagaggcccucagcccucccccggucucaga

SEQ ID NO: 417433 - RNA, 32 nt, Human
gaagaggcccuugagucacagacccacagacg

SEQ ID NO: 417434 - RNA, 32 nt, Human
gaagaggccgaggagugaggcagcagccucua

SEQ ID NO: 417435 - RNA, 20 nt, Human
gaagaggccgcggcuucugg

SEQ ID NO: 417436 - RNA, 32 nt, Human
gaagaggccuucaagcccugcagccuccgacu

SEQ ID NO: 417437 - RNA, 20 nt, Human
gaagaggcgacccaaggcgg

SEQ ID NO: 417438 - RNA, 24 nt, Human
gaagaggcgcccugugaacccugu

SEQ ID NO: 417439 - RNA, 32 nt, Human
gaagaggcucagcauccugcacaugcccuuuc

SEQ ID NO: 417440 - RNA, 32 nt, Human
gaagaggcucuccacuguccacccuaacacau

SEQ ID NO: 417441 - RNA, 19 nt, Human
gaagagggaaggaaagaga

SEQ ID NO: 417442 - RNA, 32 nt, Human
gaagagggacuugcccuaauucaggugaucac

SEQ ID NO: 417443 - RNA, 32 nt, Human
gaagagggagagaagaaagaagaaaaggagaa

SEQ ID NO: 417444 - RNA, 32 nt, Human
gaagagggaggcaggccucuauucaaaggcag

SEQ ID NO: 417445 - RNA, 32 nt, Human
gaagagggagggagggaggagugcugaagauu

SEQ ID NO: 417446 - RNA, 32 nt, Human
gaagagggauagggccagcaaggcagggaucg

SEQ ID NO: 417447 - RNA, 32 nt, Human
gaagagggaucugcaagugcaggguguugguu

SEQ ID NO: 417448 - RNA, 32 nt, Human
gaagagggcagaauccucagcucccaucauug

SEQ ID NO: 417449 - RNA, 31 nt, Human
gaagagggcaggagagaaaaaugaacugcaa

SEQ ID NO: 417450 - RNA, 22 nt, Human
gaagagggccugggccccgugg

SEQ ID NO: 417451 - RNA, 20 nt, Human
gaagagggccuucucggggc

SEQ ID NO: 417452 - RNA, 32 nt, Human
gaagagggcgcgaggguagcagccagagggag

SEQ ID NO: 417453 - RNA, 32 nt, Human
gaagagggcgucugcuggagguuccaggcccc

SEQ ID NO: 417454 - RNA, 20 nt, Human
gaagagggcuggcugcggcg

SEQ ID NO: 417455 - RNA, 32 nt, Human
gaagaggggaaagagaggcagagagggggaag

SEQ ID NO: 417456 - RNA, 22 nt, Human
gaagaggggcagugacccugug

SEQ ID NO: 417457 - RNA, 32 nt, Human
gaagaggggcggccccaccagccccggcugag

SEQ ID NO: 417458 - RNA, 32 nt, Human
gaagaggggcgucaguuuucucuggcucgcuc

SEQ ID NO: 417459 - RNA, 32 nt, Human
gaagaggggcuggagugcggcuggucugcgcu

SEQ ID NO: 417460 - RNA, 32 nt, Human
gaagagggggugaaggccagaggcucggggcu

SEQ ID NO: 417461 - RNA, 32 nt, Human
gaagagggugcugguccugcccuuuugaggcc

SEQ ID NO: 417462 - RNA, 32 nt, Human
gaagaggguggagugggcucugccccacaguc

SEQ ID NO: 417463 - RNA, 32 nt, Human
gaagagguacuuuccuggaauaauugucuacc

SEQ ID NO: 417464 - RNA, 32 nt, Human
gaagagguagccccugaacgcagagccuaaga

SEQ ID NO: 417465 - RNA, 32 nt, Human
gaagaggucaugccugggaggaagggaucguc

SEQ ID NO: 417466 - RNA, 26 nt, Human
gaagaggugacaaccucagucucccu

SEQ ID NO: 417467 - RNA, 32 nt, Human
gaagaggugaugaucucuuuguauaggucaua

SEQ ID NO: 417468 - RNA, 32 nt, Human
gaagaggugcaguggggagaccaggugggaug

SEQ ID NO: 417469 - RNA, 32 nt, Human
gaagaggugccaagccgacccugcugcgagcc

SEQ ID NO: 417470 - RNA, 32 nt, Human
gaagagguggaggaggaggaggaagaggugga

SEQ ID NO: 417471 - RNA, 32 nt, Human
gaagagguggaggaggaggaggaggagguggu

SEQ ID NO: 417472 - RNA, 32 nt, Human
gaagaggugugagcaggauucuucugaaugac

SEQ ID NO: 417473 - RNA, 32 nt, Human
gaagagguguuggggcaggaagugagucucuc

SEQ ID NO: 417474 - RNA, 32 nt, Human
gaagagguucaagugauucuugugccucaggc

SEQ ID NO: 417475 - RNA, 32 nt, Human
gaagagguugagaagacuccugggcuucagcc

SEQ ID NO: 417476 - RNA, 32 nt, Human
gaagagguuuagugcccuccugagugacugcg

SEQ ID NO: 417477 - RNA, 32 nt, Human
gaagagguuugccgucugggcagcccugucgg

SEQ ID NO: 417478 - RNA, 32 nt, Human
gaagaguaaguugaguacaacauguuaugcca

SEQ ID NO: 417479 - RNA, 24 nt, Human
gaagaguaccuggugaacccugug

SEQ ID NO: 417480 - RNA, 21 nt, Human
gaagaguacuuggaaugucug

SEQ ID NO: 417481 - RNA, 32 nt, Human
gaagaguagcuaggcagaugcagagauggaga

SEQ ID NO: 417482 - RNA, 32 nt, Human
gaagaguagcugagccccagagccucucugga

SEQ ID NO: 417483 - RNA, 32 nt, Human
gaagaguaggaaaagagaagggcugcucaggg

SEQ ID NO: 417484 - RNA, 32 nt, Human
gaagaguagggccuccuuccuccccugccugc

SEQ ID NO: 417485 - RNA, 32 nt, Human
gaagaguaggugagcgcuuugcagucacagaa

SEQ ID NO: 417486 - RNA, 32 nt, Human
gaagaguauacucuuugccuuaggauagcgua

SEQ ID NO: 417487 - RNA, 32 nt, Human
gaagaguauuaagaaagaugcucaagucccau

SEQ ID NO: 417488 - RNA, 32 nt, Human
gaagaguccccgauguuuguagaccuuaugug

SEQ ID NO: 417489 - RNA, 32 nt, Human
gaagagucccgcagaauaugcugguaugaugg

SEQ ID NO: 417490 - RNA, 32 nt, Human
gaagaguccucuggggaggaccccaagggccg

SEQ ID NO: 417491 - RNA, 32 nt, Human
gaagaguccugaggggcaacacacaagaacca

SEQ ID NO: 417492 - RNA, 32 nt, Human
gaagagucuccucgccccagagucaucuucgg

SEQ ID NO: 417493 - RNA, 32 nt, Human
gaagagucugcagcauuuguucuccuggcucc

SEQ ID NO: 417494 - RNA, 21 nt, Human
gaagagugaccugccucccca

SEQ ID NO: 417495 - RNA, 32 nt, Human
gaagagugagggugaaggcaagaaguagagca

SEQ ID NO: 417496 - RNA, 32 nt, Human
gaagagugcaucuccagccuaugaaacagcug

SEQ ID NO: 417497 - RNA, 32 nt, Human
gaagagugcggggcccuuccuccuggggacag

SEQ ID NO: 417498 - RNA, 32 nt, Human
gaagaguggaagaugacggagaugcauuuuga

SEQ ID NO: 417499 - RNA, 20 nt, Human
gaagaguggcaugcuucugg

SEQ ID NO: 417500 - RNA, 32 nt, Human
gaagagugggaaggagaggagugagugaagua

SEQ ID NO: 417501 - RNA, 32 nt, Human
gaagaguggucuugaggggguaauaaaccucc

SEQ ID NO: 417502 - RNA, 32 nt, Human
gaagaguucuacuuguggauguuuuuaauuuu

SEQ ID NO: 417503 - RNA, 32 nt, Human
gaagaguugaaagagcuggagacugucuguga

SEQ ID NO: 417504 - RNA, 32 nt, Human
gaagaguugagugaucacgcuggagaugaagg

SEQ ID NO: 417505 - RNA, 32 nt, Human
gaagaguuuaaaagcaugaaacauuucagaag

SEQ ID NO: 417506 - RNA, 32 nt, Human
gaagaguuucuccaccaggcagcaggugaagg

SEQ ID NO: 417507 - RNA, 23 nt, Human
gaagauaaagaguguacaucuuu

SEQ ID NO: 417508 - RNA, 32 nt, Human
gaagauaaaugagcgcagcagagauggagaaa

SEQ ID NO: 417509 - RNA, 32 nt, Human
gaagauaaaugauguaguugaucaguaauccu

SEQ ID NO: 417510 - RNA, 32 nt, Human
gaagauaaguaagcagguacuuaaagcaccug

SEQ ID NO: 417511 - RNA, 32 nt, Human
gaagauaccaacagccuccugaaacucacgag

SEQ ID NO: 417512 - RNA, 32 nt, Human
gaagauaccccuuuucugaggaaugaguuugc

SEQ ID NO: 417513 - RNA, 32 nt, Human
gaagauacucccacaggggcucagcaggagca

SEQ ID NO: 417514 - RNA, 32 nt, Human
gaagauacugucucacagcacuuuguaugaac

SEQ ID NO: 417515 - RNA, 32 nt, Human
gaagauagaguuguuucuuagaacuuuguaau

SEQ ID NO: 417516 - RNA, 32 nt, Human
gaagauauuccaacucaaaaccagccucaugc

SEQ ID NO: 417517 - RNA, 32 nt, Human
gaagaucaagggagucaggccacccaggagca

SEQ ID NO: 417518 - RNA, 32 nt, Human
gaagaucaaguuuguacauacacuaguggcau

SEQ ID NO: 417519 - RNA, 32 nt, Human
gaagaucacgccacugcacuccagccugagug

SEQ ID NO: 417520 - RNA, 32 nt, Human
gaagaucacuugaacccgggaggcagagguug

SEQ ID NO: 417521 - RNA, 32 nt, Human
gaagaucagaaugccagcauggucgagcucua

SEQ ID NO: 417522 - RNA, 32 nt, Human
gaagaucagacugacagagacacacacuagcc

SEQ ID NO: 417523 - RNA, 32 nt, Human
gaagaucagcuauuagaagagaaagaucaguu

SEQ ID NO: 417524 - RNA, 32 nt, Human
gaagaucagucuaagcugccacggugaugaga

SEQ ID NO: 417525 - RNA, 32 nt, Human
gaagauccaagaaggcugagguaagcagucuu

SEQ ID NO: 417526 - RNA, 32 nt, Human
gaagauccaagccaggaagaugggcuugaagc

SEQ ID NO: 417527 - RNA, 32 nt, Human
gaagauccaaguuuaaaauugccugcggaaug

SEQ ID NO: 417528 - RNA, 32 nt, Human
gaagauccaaguuuaaaauugcugcggaaugu

SEQ ID NO: 417529 - RNA, 32 nt, Human
gaagauccagaaccauggcaagaaacuugaca

SEQ ID NO: 417530 - RNA, 32 nt, Human
gaagauccaggaguugaagaccagccugggca

SEQ ID NO: 417531 - RNA, 32 nt, Human
gaagaucccaggcucaagugcaaaaacugcgg

SEQ ID NO: 417532 - RNA, 32 nt, Human
gaagauccccagacuucauagaauacucaggg

SEQ ID NO: 417533 - RNA, 32 nt, Human
gaagauccuaaaacaaaagcucauccauuugc

SEQ ID NO: 417534 - RNA, 32 nt, Human
gaagauccugggcaccuuccagaagcucaaga

SEQ ID NO: 417535 - RNA, 32 nt, Human
gaagauccuucgugaucaccaugcuguucuca

SEQ ID NO: 417536 - RNA, 32 nt, Human
gaagaucgagccacugcacuccagccugggca

SEQ ID NO: 417537 - RNA, 32 nt, Human
gaagaucgcaagucagaguggccggcaggcac

SEQ ID NO: 417538 - RNA, 32 nt, Human
gaagaucgcaccacugcacgcacuccagccug

SEQ ID NO: 417539 - RNA, 32 nt, Human
gaagaucuacacccaucccccuuccucuagcc

SEQ ID NO: 417540 - RNA, 32 nt, Human
gaagaucuacugcucccucucuccacacggag

SEQ ID NO: 417541 - RNA, 32 nt, Human
gaagaucucacuuuccccuugugggguaggaa

SEQ ID NO: 417542 - RNA, 32 nt, Human
gaagaucucgguugcugagugcagggaaggag

SEQ ID NO: 417543 - RNA, 32 nt, Human
gaagaucugauuaagggcuuuucacaauggua

SEQ ID NO: 417544 - RNA, 32 nt, Human
gaagaucugcagagugagaagccagaccauuc

SEQ ID NO: 417545 - RNA, 32 nt, Human
gaagaucugcagcagucuccccaaaucaguga

SEQ ID NO: 417546 - RNA, 32 nt, Human
gaagaucugcagcuauucuuuuacuuaacaug

SEQ ID NO: 417547 - RNA, 32 nt, Human
gaagaucugccuccccaccgccuuuucucacu

SEQ ID NO: 417548 - RNA, 32 nt, Human
gaagaucugcucacuccggaaaaagaaaauga

SEQ ID NO: 417549 - RNA, 32 nt, Human
gaagaucugggagauuguggacgggcugugcu

SEQ ID NO: 417550 - RNA, 32 nt, Human
gaagaucuguaucuagagaggagcaugccaug

SEQ ID NO: 417551 - RNA, 31 nt, Human
gaagaucuuaauaacagauguugaaagaagg

SEQ ID NO: 417552 - RNA, 32 nt, Human
gaagaugaaauggaugauccuggagauucaga

SEQ ID NO: 417553 - RNA, 32 nt, Human
gaagaugacuaucuugcaugcaugagaaugaa

SEQ ID NO: 417554 - RNA, 19 nt, Human
gaagaugacuuccugggaa

SEQ ID NO: 417555 - RNA, 32 nt, Human
gaagaugacuugacccugggagcggaggccac

SEQ ID NO: 417556 - RNA, 32 nt, Human
gaagaugagaaggugaauauaaucaaugccaa

SEQ ID NO: 417557 - RNA, 32 nt, Human
gaagaugagcaggccagugggaggaggggcag

SEQ ID NO: 417558 - RNA, 32 nt, Human
gaagaugagcaucuccccuaacaccaccuacc

SEQ ID NO: 417559 - RNA, 32 nt, Human
gaagaugagcccaggcuaacuuagcacagauc

SEQ ID NO: 417560 - RNA, 29 nt, Human
gaagaugaggcugaagauuggguucaucu

SEQ ID NO: 417561 - RNA, 32 nt, Human
gaagaugaggggaggaaggaggugaggcggua

SEQ ID NO: 417562 - RNA, 32 nt, Human
gaagaugaggugaggaaggaagggguugcugu

SEQ ID NO: 417563 - RNA, 32 nt, Human
gaagaugaucuuuuugccauugccaaggacag

SEQ ID NO: 417564 - RNA, 29 nt, Human
gaagaugaugagacagaggcagagccauu

SEQ ID NO: 417565 - RNA, 32 nt, Human
gaagaugaugaguacuccccuuggggauauga

SEQ ID NO: 417566 - RNA, 29 nt, Human
gaagaugcaaugucagcuauuuaggacag

SEQ ID NO: 417567 - RNA, 32 nt, Human
gaagaugcacagguggcuccugggcuugggcu

SEQ ID NO: 417568 - RNA, 32 nt, Human
gaagaugcagccacccuccuuuacaugucaca

SEQ ID NO: 417569 - RNA, 32 nt, Human
gaagaugcagccccuuccuccagccugagaga

SEQ ID NO: 417570 - RNA, 32 nt, Human
gaagaugccaaaacagaucaggcacagaaagc

SEQ ID NO: 417571 - RNA, 32 nt, Human
gaagaugccauugcacuccagccugggcaaca

SEQ ID NO: 417572 - RNA, 32 nt, Human
gaagaugccucagaaggaagaaauaaaugagu

SEQ ID NO: 417573 - RNA, 32 nt, Human
gaagaugccuguccucuccguggaagacccug

SEQ ID NO: 417574 - RNA, 29 nt, Human
gaagaugcggccggagcccggaggcugcu

SEQ ID NO: 417575 - RNA, 32 nt, Human
gaagaugcuccagcaacacagccugggcccca

SEQ ID NO: 417576 - RNA, 31 nt, Human
gaagaugcuuaguaaaagcuguugaaaggau

SEQ ID NO: 417577 - RNA, 32 nt, Human
gaagaugcuuuggcugccugagguccugcuug

SEQ ID NO: 417578 - RNA, 29 nt, Human
gaagauggaaacacuggagucagaacuga

SEQ ID NO: 417579 - RNA, 32 nt, Human
gaagauggagaaagaggccaucuggguacaac

SEQ ID NO: 417580 - RNA, 29 nt, Human
gaagauggagcacggcacacuccucgccc

SEQ ID NO: 417581 - RNA, 32 nt, Human
gaagauggagucucgcucugucacccaggcug

SEQ ID NO: 417582 - RNA, 29 nt, Human
gaagauggagucuugcucugucaccaggc

SEQ ID NO: 417583 - RNA, 29 nt, Human
gaagauggccacugcccaguugcagagga

SEQ ID NO: 417584 - RNA, 32 nt, Human
gaagauggccuugccuugggguccugcuuguu

SEQ ID NO: 417585 - RNA, 29 nt, Human
gaagauggcggcagugguggagguggagg

SEQ ID NO: 417586 - RNA, 20 nt, Human
gaagauggcggcccgggcgg

SEQ ID NO: 417587 - RNA, 29 nt, Human
gaagauggcggcggccguuccacagcggg

SEQ ID NO: 417588 - RNA, 29 nt, Human
gaagauggcggcggcgcaggaggcggacg

SEQ ID NO: 417589 - RNA, 32 nt, Human
gaagauggcgggaaaagggaucaaagacucag

SEQ ID NO: 417590 - RNA, 29 nt, Human
gaagauggcugcagacaagccugcagauc

SEQ ID NO: 417591 - RNA, 29 nt, Human
gaagauggcugggccucacacgccuugga

SEQ ID NO: 417592 - RNA, 32 nt, Human
gaagauggcuugagcccaggagguggagguug

SEQ ID NO: 417593 - RNA, 32 nt, Human
gaagauggcuugagcccaggagguugaggcug

SEQ ID NO: 417594 - RNA, 32 nt, Human
gaagaugggaacacugguggaggauggaaagg

SEQ ID NO: 417595 - RNA, 32 nt, Human
gaagaugggaagcacagauugcagugaaccga

SEQ ID NO: 417596 - RNA, 32 nt, Human
gaagauggggcccuggcuuuccagggagugca

SEQ ID NO: 417597 - RNA, 32 nt, Human
gaagaugggggcggagacugaagugaccuggc

SEQ ID NO: 417598 - RNA, 32 nt, Human
gaagauggucccaaauuccuugucacucccug

SEQ ID NO: 417599 - RNA, 29 nt, Human
gaagauggucgccaagcaaaggauccgua

SEQ ID NO: 417600 - RNA, 32 nt, Human
gaagaugguggaggacggcgcggaggagcugg

SEQ ID NO: 417601 - RNA, 32 nt, Human
gaagaugguuugagcccaggaggcagaauuug

SEQ ID NO: 417602 - RNA, 32 nt, Human
gaagaugucccauggcuacugaaggggcugcc

SEQ ID NO: 417603 - RNA, 32 nt, Human
gaagaugucccuguagagcagccccagggaag

SEQ ID NO: 417604 - RNA, 32 nt, Human
gaagauguggcaggagaaagaaagaaaacggg

SEQ ID NO: 417605 - RNA, 32 nt, Human
gaagauguguugacagucgugaguguguaucc

SEQ ID NO: 417606 - RNA, 32 nt, Human
gaagauguugaaugagauucacuaugucaaua

SEQ ID NO: 417607 - RNA, 29 nt, Human
gaagauguuucuggugggccugacagggg

SEQ ID NO: 417608 - RNA, 32 nt, Human
gaagauguuuuuaugaagucucuuucugauca

SEQ ID NO: 417609 - RNA, 32 nt, Human
gaagauuaccgaggaaaggaaaagugguaagg

SEQ ID NO: 417610 - RNA, 32 nt, Human
gaagauuaccgcuggccuacugugaagguaga

SEQ ID NO: 417611 - RNA, 32 nt, Human
gaagauuagaagcagugggggucgguggcugu

SEQ ID NO: 417612 - RNA, 32 nt, Human
gaagauuaggcagagugggcaggaagaccagc

SEQ ID NO: 417613 - RNA, 24 nt, Human
gaagauuauuucaugccuccgcca

SEQ ID NO: 417614 - RNA, 32 nt, Human
gaagauucugaccugucugaucaaauaaaggc

SEQ ID NO: 417615 - RNA, 32 nt, Human
gaagauucugucucccuguucccccuccccag

SEQ ID NO: 417616 - RNA, 32 nt, Human
gaagauucuuacucugauucucagcugagcug

SEQ ID NO: 417617 - RNA, 32 nt, Human
gaagauucuuccagauucuagcaauguuuguu

SEQ ID NO: 417618 - RNA, 32 nt, Human
gaagauugcccagggaugauguuauggagaua

SEQ ID NO: 417619 - RNA, 32 nt, Human
gaagauugcuauagagucccugggcuuuaaac

SEQ ID NO: 417620 - RNA, 25 nt, Human
gaagauugcuucucuucucuccucc

SEQ ID NO: 417621 - RNA, 32 nt, Human
gaagauuggcuuuaagaugaaggccugcauuu

SEQ ID NO: 417622 - RNA, 32 nt, Human
gaagauugggagaaaguagcugugggacuugg

SEQ ID NO: 417623 - RNA, 32 nt, Human
gaagauugggccaggugggauuacaggcgcga

SEQ ID NO: 417624 - RNA, 32 nt, Human
gaagauuggguaauuguccuuccuucaguguu

SEQ ID NO: 417625 - RNA, 32 nt, Human
gaagauuuagaggaggaggaggaagugucaga

SEQ ID NO: 417626 - RNA, 32 nt, Human
gaagauuucaaaagcauagggcuguggucucu

SEQ ID NO: 417627 - RNA, 32 nt, Human
gaagauuucauggcugcauccuugccagccga

SEQ ID NO: 417628 - RNA, 32 nt, Human
gaagauuuccuugaaaucuucucaagcucuua

SEQ ID NO: 417629 - RNA, 32 nt, Human
gaagauuuuauuuuacccuugaucuuaacaaa

SEQ ID NO: 417630 - RNA, 32 nt, Human
gaagauuuuugcugcagaaucaguuacaaaca

SEQ ID NO: 417631 - RNA, 32 nt, Human
gaagcaaaaagaggaggaggaagaggagcuca

SEQ ID NO: 417632 - RNA, 32 nt, Human
gaagcaaaaagcaguguuuccuuuguguuuga

SEQ ID NO: 417633 - RNA, 32 nt, Human
gaagcaaaaggaguaagauuuuuaaagacaga

SEQ ID NO: 417634 - RNA, 32 nt, Human
gaagcaaaauguuugcugccaaagacaaauca

SEQ ID NO: 417635 - RNA, 32 nt, Human
gaagcaaacgaaagccccuguucuccaagcaa

SEQ ID NO: 417636 - RNA, 32 nt, Human
gaagcaaagaggaagggaaggcagaaccaggg

SEQ ID NO: 417637 - RNA, 32 nt, Human
gaagcaaagagugagaaagaauaggggcugaa

SEQ ID NO: 417638 - RNA, 32 nt, Human
gaagcaaagccuuggugccugugagcucaucu

SEQ ID NO: 417639 - RNA, 32 nt, Human
gaagcaaaggaauucagggcugggaaaauuua

SEQ ID NO: 417640 - RNA, 32 nt, Human
gaagcaaaggagagcuuggggguggggagaaa

SEQ ID NO: 417641 - RNA, 32 nt, Human
gaagcaaaggcagaggcccuggggugggagca

SEQ ID NO: 417642 - RNA, 21 nt, Human
gaagcaaauuaaacauccuga

SEQ ID NO: 417643 - RNA, 32 nt, Human
gaagcaacaagugugggguuaagcagggagaa

SEQ ID NO: 417644 - RNA, 32 nt, Human
gaagcaacacucugugggucucuggcauuucu

SEQ ID NO: 417645 - RNA, 32 nt, Human
gaagcaacagaagaacgaaagcagggauuuau

SEQ ID NO: 417646 - RNA, 32 nt, Human
gaagcaacgaaaacaaaaugcacagccugaau

SEQ ID NO: 417647 - RNA, 32 nt, Human
gaagcaacuaauucuggugcucaggcugggcu

SEQ ID NO: 417648 - RNA, 32 nt, Human
gaagcaacugcgcugauugaugcgccacagac

SEQ ID NO: 417649 - RNA, 32 nt, Human
gaagcaacuuggaagaggaaagaaaagaaguc

SEQ ID NO: 417650 - RNA, 32 nt, Human
gaagcaagaaagacacugccuccucugaggga

SEQ ID NO: 417651 - RNA, 32 nt, Human
gaagcaagaauggagaguccaaguuugugaua

SEQ ID NO: 417652 - RNA, 21 nt, Human
gaagcaagagaaucgcuugaa

SEQ ID NO: 417653 - RNA, 22 nt, Human
gaagcaagagaaucgcuugaac

SEQ ID NO: 417654 - RNA, 32 nt, Human
gaagcaagagcucagaggggagaggggcuggc

SEQ ID NO: 417655 - RNA, 32 nt, Human
gaagcaagggaguaucagacuaugaugaugcu

SEQ ID NO: 417656 - RNA, 32 nt, Human
gaagcaaggguucuacaaagaggucaaagcua

SEQ ID NO: 417657 - RNA, 32 nt, Human
gaagcaaggugaggagucucuaccuccaugug

SEQ ID NO: 417658 - RNA, 32 nt, Human
gaagcaauauuacucccuccccuacaccaggg

SEQ ID NO: 417659 - RNA, 32 nt, Human
gaagcaaucuagacuguugugaugaguguaug

SEQ ID NO: 417660 - RNA, 32 nt, Human
gaagcaaugccacggcuccaggguuucagaug

SEQ ID NO: 417661 - RNA, 32 nt, Human
gaagcacaaauugcccagaccuaacaaaagcg

SEQ ID NO: 417662 - RNA, 32 nt, Human
gaagcacacaggcuccaugagcugggcggaga

SEQ ID NO: 417663 - RNA, 32 nt, Human
gaagcacagauuaucauaucugucuugcaaau

SEQ ID NO: 417664 - RNA, 32 nt, Human
gaagcacagcaauaggaagucucuccacaaac

SEQ ID NO: 417665 - RNA, 32 nt, Human
gaagcacagcacaggggcucagccugggaucc

SEQ ID NO: 417666 - RNA, 32 nt, Human
gaagcacagcagcaucuucaaacauguacaaa

SEQ ID NO: 417667 - RNA, 18 nt, Human
gaagcacagcuguugggg

SEQ ID NO: 417668 - RNA, 32 nt, Human
gaagcacaggcagcaggaugaggggauacuug

SEQ ID NO: 417669 - RNA, 32 nt, Human
gaagcacaucuggacagcugugcggccuccuu

SEQ ID NO: 417670 - RNA, 32 nt, Human
gaagcacaucuguagcaagauggcugagaaau

SEQ ID NO: 417671 - RNA, 32 nt, Human
gaagcacaucuuaaaggaaugaaguguaaugc

SEQ ID NO: 417672 - RNA, 32 nt, Human
gaagcacaugaacuacagccuggagguggagg

SEQ ID NO: 417673 - RNA, 32 nt, Human
gaagcaccccaccccucugccugcugccugau

SEQ ID NO: 417674 - RNA, 32 nt, Human
gaagcaccccauagggugggcugaguaaccuu

SEQ ID NO: 417675 - RNA, 32 nt, Human
gaagcaccguggcugcuauuaucugcucuccg

SEQ ID NO: 417676 - RNA, 32 nt, Human
gaagcaccucaagccugagcagccuguagaug

SEQ ID NO: 417677 - RNA, 32 nt, Human
gaagcaccuugaucuuugguguccuggacuuc

SEQ ID NO: 417678 - RNA, 32 nt, Human
gaagcacggugcuucugaagguccccagcgca

SEQ ID NO: 417679 - RNA, 32 nt, Human
gaagcacucccaggcucauccugggagcuuuc

SEQ ID NO: 417680 - RNA, 32 nt, Human
gaagcacugcuuucuuuccucaggaccugaug

SEQ ID NO: 417681 - RNA, 32 nt, Human
gaagcacugggucaggugaggucugaggacag

SEQ ID NO: 417682 - RNA, 32 nt, Human
gaagcacuguagcagagacucuggccuuguga

SEQ ID NO: 417683 - RNA, 32 nt, Human
gaagcacugucaucuuccacgucaucuucaca

SEQ ID NO: 417684 - RNA, 32 nt, Human
gaagcagaaagccugcuggggauggugccagc

SEQ ID NO: 417685 - RNA, 21 nt, Human
gaagcagaaauacauauuucc

SEQ ID NO: 417686 - RNA, 21 nt, Human
gaagcagaagaaucgcuugaa

SEQ ID NO: 417687 - RNA, 22 nt, Human
gaagcagaagaaucgcuugaac

SEQ ID NO: 417688 - RNA, 32 nt, Human
gaagcagaaguuagaucccacagucaucaagu

SEQ ID NO: 417689 - RNA, 19 nt, Human
gaagcagaaugaaaccaca

SEQ ID NO: 417690 - RNA, 32 nt, Human
gaagcagacauugucucuacaagcucagagag

SEQ ID NO: 417691 - RNA, 32 nt, Human
gaagcagaccagcccacuacagagccaggcau

SEQ ID NO: 417692 - RNA, 32 nt, Human
gaagcagacccggggguguccucccugcccuc

SEQ ID NO: 417693 - RNA, 19 nt, Human
gaagcagacggcggcgcug

SEQ ID NO: 417694 - RNA, 32 nt, Human
gaagcagagaugggggcucccuauguugccca

SEQ ID NO: 417695 - RNA, 32 nt, Human
gaagcagagcagcgugaggaagauggugcuca

SEQ ID NO: 417696 - RNA, 32 nt, Human
gaagcagagccuggucgugaggaacagccgcc

SEQ ID NO: 417697 - RNA, 32 nt, Human
gaagcagagggagggacugggcagggacugcc

SEQ ID NO: 417698 - RNA, 32 nt, Human
gaagcagauaaauugauaucuuguaccugaaa

SEQ ID NO: 417699 - RNA, 32 nt, Human
gaagcagauauccaaagggugcagccccuuuu

SEQ ID NO: 417700 - RNA, 32 nt, Human
gaagcagaucugaggacaucucugugccaggc

SEQ ID NO: 417701 - RNA, 32 nt, Human
gaagcagaugcugauugggacccauauaccac

SEQ ID NO: 417702 - RNA, 32 nt, Human
gaagcagauuuuaaccccaucuggcagccauu

SEQ ID NO: 417703 - RNA, 28 nt, Human
gaagcagcaagugcugacaucaucacgg

SEQ ID NO: 417704 - RNA, 32 nt, Human
gaagcagcaauucugccacuaccagcagcaac

SEQ ID NO: 417705 - RNA, 32 nt, Human
gaagcagcaccagaacaccaccuacuuccugg

SEQ ID NO: 417706 - RNA, 32 nt, Human
gaagcagcagaggggacuccccaucccgggca

SEQ ID NO: 417707 - RNA, 32 nt, Human
gaagcagcaggaaaugugcauguggguagaga

SEQ ID NO: 417708 - RNA, 32 nt, Human
gaagcagcaucaggacagcagagcagagcccc

SEQ ID NO: 417709 - RNA, 32 nt, Human
gaagcagccaggaguggcuggggaagaaucug

SEQ ID NO: 417710 - RNA, 21 nt, Human
gaagcagccauuucaucacua

SEQ ID NO: 417711 - RNA, 32 nt, Human
gaagcagccuggguguguaaagagauagucau

SEQ ID NO: 417712 - RNA, 32 nt, Human
gaagcagcuauccacaaagcuuccugccccag

SEQ ID NO: 417713 - RNA, 32 nt, Human
gaagcagcuccaggagcgccggcgccggcugg

SEQ ID NO: 417714 - RNA, 32 nt, Human
gaagcagcucuuggaggagaugagcauuuugu

SEQ ID NO: 417715 - RNA, 22 nt, Human
gaagcagcugacaugcuggugg

SEQ ID NO: 417716 - RNA, 20 nt, Human
gaagcagcugagacuguugg

SEQ ID NO: 417717 - RNA, 21 nt, Human
gaagcagcugauccuggaggg

SEQ ID NO: 417718 - RNA, 32 nt, Human
gaagcagcugccgaaagcugcagccuuuccgc

SEQ ID NO: 417719 - RNA, 32 nt, Human
gaagcagcuggcagccuggggcgugcuucagg

SEQ ID NO: 417720 - RNA, 32 nt, Human
gaagcagcuuuuccuacgaucugcauuaugua

SEQ ID NO: 417721 - RNA, 31 nt, Human
gaagcaggaaagggagacaaagacuggcuuc

SEQ ID NO: 417722 - RNA, 32 nt, Human
gaagcaggaaagggagacaaagacuggcuucu

SEQ ID NO: 417723 - RNA, 32 nt, Human
gaagcaggaauacaggacacagcagacccucg

SEQ ID NO: 417724 - RNA, 32 nt, Human
gaagcaggacucagaggaagagcacccugacc

SEQ ID NO: 417725 - RNA, 32 nt, Human
gaagcaggagaaagaugaggacuuugacugga

SEQ ID NO: 417726 - RNA, 22 nt, Human
gaagcaggagaaucacuuaaac

SEQ ID NO: 417727 - RNA, 22 nt, Human
gaagcaggagaaucacuugaac

SEQ ID NO: 417728 - RNA, 32 nt, Human
gaagcaggagaaucacuugaacucaggaggca

SEQ ID NO: 417729 - RNA, 21 nt, Human
gaagcaggagaaucgcuggaa

SEQ ID NO: 417730 - RNA, 22 nt, Human
gaagcaggagaaucgcuggaac

SEQ ID NO: 417731 - RNA, 22 nt, Human
gaagcaggagaaucgcuuaaau

SEQ ID NO: 417732 - RNA, 21 nt, Human
gaagcaggagaaucgcuugaa

SEQ ID NO: 417733 - RNA, 22 nt, Human
gaagcaggagaaucgcuugaac

SEQ ID NO: 417734 - RNA, 21 nt, Human
gaagcaggagaaucgcuugag

SEQ ID NO: 417735 - RNA, 21 nt, Human
gaagcaggagaauugccugaa

SEQ ID NO: 417736 - RNA, 22 nt, Human
gaagcaggagaauugccugaac

SEQ ID NO: 417737 - RNA, 22 nt, Human
gaagcaggagaauugcucaaac

SEQ ID NO: 417738 - RNA, 21 nt, Human
gaagcaggagaauugcucgaa

SEQ ID NO: 417739 - RNA, 22 nt, Human
gaagcaggagaauugcucgaac

SEQ ID NO: 417740 - RNA, 21 nt, Human
gaagcaggagaauugcuugaa

SEQ ID NO: 417741 - RNA, 22 nt, Human
gaagcaggagaauugcuugaac

SEQ ID NO: 417742 - RNA, 32 nt, Human
gaagcaggagagaaggcugggcagaagggcug

SEQ ID NO: 417743 - RNA, 32 nt, Human
gaagcaggagagggggaggaaaaggagaggga

SEQ ID NO: 417744 - RNA, 19 nt, Human
gaagcaggagcaucuucuu

SEQ ID NO: 417745 - RNA, 32 nt, Human
gaagcaggagcccagaccgugggagagccaga

SEQ ID NO: 417746 - RNA, 32 nt, Human
gaagcaggagcugcugaaguugcuggucaacc

SEQ ID NO: 417747 - RNA, 32 nt, Human
gaagcaggaggaaggaaggacuggaaggaaaa

SEQ ID NO: 417748 - RNA, 32 nt, Human
gaagcaggaggaggggaggagagaguggggcu

SEQ ID NO: 417749 - RNA, 32 nt, Human
gaagcaggagguggagaagacccagugaagug

SEQ ID NO: 417750 - RNA, 22 nt, Human
gaagcaggauaaucgcuugaac

SEQ ID NO: 417751 - RNA, 20 nt, Human
gaagcaggcagaucaccuga

SEQ ID NO: 417752 - RNA, 32 nt, Human
gaagcaggccgcagaguagacagcugcuccuu

SEQ ID NO: 417753 - RNA, 32 nt, Human
gaagcaggccuugaugagggugcaugagugua

SEQ ID NO: 417754 - RNA, 31 nt, Human
gaagcaggcgagagagaaacagcuacugcgu

SEQ ID NO: 417755 - RNA, 22 nt, Human
gaagcaggcggaucacgagguc

SEQ ID NO: 417756 - RNA, 32 nt, Human
gaagcagggauaggugggcugcagugacauca

SEQ ID NO: 417757 - RNA, 32 nt, Human
gaagcagggccaaacccucuuccuugucuccc

SEQ ID NO: 417758 - RNA, 32 nt, Human
gaagcagggcccagaggagacccaucaacuca

SEQ ID NO: 417759 - RNA, 32 nt, Human
gaagcagggcuucagcagcuucgacugucuua

SEQ ID NO: 417760 - RNA, 32 nt, Human
gaagcaggggcugaggaacacuuagagggugg

SEQ ID NO: 417761 - RNA, 32 nt, Human
gaagcagggucugcucuuccccuggggaagca

SEQ ID NO: 417762 - RNA, 32 nt, Human
gaagcagggugaagaauggguuggagcaugga

SEQ ID NO: 417763 - RNA, 17 nt, Human
gaagcagggugguggca

SEQ ID NO: 417764 - RNA, 32 nt, Human
gaagcagguauucuuguccaaggaacaggugc

SEQ ID NO: 417765 - RNA, 32 nt, Human
gaagcaggucugggugaaagagcugugaaugg

SEQ ID NO: 417766 - RNA, 32 nt, Human
gaagcaggugaagagcaaccacaaguuuaaau

SEQ ID NO: 417767 - RNA, 32 nt, Human
gaagcaguagagugcuuccagggaggagaaag

SEQ ID NO: 417768 - RNA, 32 nt, Human
gaagcaguagcugagcaccugcccucacauac

SEQ ID NO: 417769 - RNA, 32 nt, Human
gaagcagucaccaaaauccagugagaaacacc

SEQ ID NO: 417770 - RNA, 19 nt, Human
gaagcagucauaccugcuc

SEQ ID NO: 417771 - RNA, 32 nt, Human
gaagcagucugcagacuggagaucccaugacg

SEQ ID NO: 417772 - RNA, 32 nt, Human
gaagcagugggcucuccaggugcagugguuca

SEQ ID NO: 417773 - RNA, 32 nt, Human
gaagcaguucaaggaucuaaagagcaucaagg

SEQ ID NO: 417774 - RNA, 32 nt, Human
gaagcaguuucacaucagucucuccagauagc

SEQ ID NO: 417775 - RNA, 32 nt, Human
gaagcauaaaacacagggagcugguggguugg

SEQ ID NO: 417776 - RNA, 32 nt, Human
gaagcauagcuccagcuggaggguaccuuuua

SEQ ID NO: 417777 - RNA, 32 nt, Human
gaagcauauauggccacaaagcacagaggcuu

SEQ ID NO: 417778 - RNA, 32 nt, Human
gaagcauauugcugaguggugccugaaaauug

SEQ ID NO: 417779 - RNA, 27 nt, Human
gaagcaucaauaaauauuugagaaaug

SEQ ID NO: 417780 - RNA, 32 nt, Human
gaagcaucacccaggcuggcagaucaugguag

SEQ ID NO: 417781 - RNA, 19 nt, Human
gaagcaucgugcauaguuc

SEQ ID NO: 417782 - RNA, 32 nt, Human
gaagcaucuuggugauguagcucuuuucuuca

SEQ ID NO: 417783 - RNA, 32 nt, Human
gaagcaugaacaaauccacaaaaugcccaaga

SEQ ID NO: 417784 - RNA, 32 nt, Human
gaagcaugacagccaccuuggcaccaggagga

SEQ ID NO: 417785 - RNA, 32 nt, Human
gaagcaugagggagggagggaggagggagaaa

SEQ ID NO: 417786 - RNA, 32 nt, Human
gaagcaugcccucccuguccauuugucuuaua

SEQ ID NO: 417787 - RNA, 32 nt, Human
gaagcaugcuagagugaaagaaaaagaaagag

SEQ ID NO: 417788 - RNA, 32 nt, Human
gaagcaugcuagagugaaagaaagagagcacg

SEQ ID NO: 417789 - RNA, 32 nt, Human
gaagcauggauggggaugaaggcacaggcguc

SEQ ID NO: 417790 - RNA, 21 nt, Human
gaagcauggcagcaucugcuu

SEQ ID NO: 417791 - RNA, 32 nt, Human
gaagcauggccugggagcuuggaagggagggg

SEQ ID NO: 417792 - RNA, 32 nt, Human
gaagcauggcgcaccagccucugcaacuagug

SEQ ID NO: 417793 - RNA, 32 nt, Human
gaagcaugggggcaggagcagagcagacacag

SEQ ID NO: 417794 - RNA, 32 nt, Human
gaagcauggucugccuggacugcacuucucua

SEQ ID NO: 417795 - RNA, 30 nt, Human
gaagcaugucggccaccagcguggacaccc

SEQ ID NO: 417796 - RNA, 32 nt, Human
gaagcauuaugaaggccagacuuacucauuuu

SEQ ID NO: 417797 - RNA, 32 nt, Human
gaagcauuccagcaugauuccucagaugcaau

SEQ ID NO: 417798 - RNA, 32 nt, Human
gaagcauuccccuggaaaaccagcacaagaca

SEQ ID NO: 417799 - RNA, 32 nt, Human
gaagcauucugacuucugguuuuuccacccug

SEQ ID NO: 417800 - RNA, 32 nt, Human
gaagcauucuggaagccaugggaacaggagcu

SEQ ID NO: 417801 - RNA, 32 nt, Human
gaagcauuggaaggaauguagcuuuaaaauga

SEQ ID NO: 417802 - RNA, 32 nt, Human
gaagcauugucuguaggccagcacucauccuc

SEQ ID NO: 417803 - RNA, 32 nt, Human
gaagcauuucaccucugaucucagcuucccca

SEQ ID NO: 417804 - RNA, 32 nt, Human
gaagccaaaaggagauucacauaauggcccaa

SEQ ID NO: 417805 - RNA, 32 nt, Human
gaagccaaaaguuaugaaaugcaucagcagug

SEQ ID NO: 417806 - RNA, 32 nt, Human
gaagccaaacaaggagcuuucugcagaaugaa

SEQ ID NO: 417807 - RNA, 32 nt, Human
gaagccaaacagcaagaagcuguuaccacacc

SEQ ID NO: 417808 - RNA, 32 nt, Human
gaagccaagcuggccgagguugcaguccauga

SEQ ID NO: 417809 - RNA, 27 nt, Human
gaagccaaggcaaaaggaucgcuugag

SEQ ID NO: 417810 - RNA, 27 nt, Human
gaagccaaggcaggaagacugcuugaa

SEQ ID NO: 417811 - RNA, 27 nt, Human
gaagccaaggcagguggaucgcuugag

SEQ ID NO: 417812 - RNA, 32 nt, Human
gaagccaagguacagagagcagccuggcccuc

SEQ ID NO: 417813 - RNA, 32 nt, Human
gaagccaaggugggcggaucaccugaggucag

SEQ ID NO: 417814 - RNA, 32 nt, Human
gaagccaauggagggagagggagcgucagaag

SEQ ID NO: 417815 - RNA, 32 nt, Human
gaagccacagaaggaugcagagagagaccaac

SEQ ID NO: 417816 - RNA, 32 nt, Human
gaagccacagaagucaccgaugaaccacugga

SEQ ID NO: 417817 - RNA, 32 nt, Human
gaagccacaugcuggauggcuacaaggggcuc

SEQ ID NO: 417818 - RNA, 32 nt, Human
gaagccaccaacaaugaguacucagagaucaa

SEQ ID NO: 417819 - RNA, 32 nt, Human
gaagccaccacuggcuuucaggcuugggggug

SEQ ID NO: 417820 - RNA, 32 nt, Human
gaagccaccaucaaaacaaaggaugggauacg

SEQ ID NO: 417821 - RNA, 32 nt, Human
gaagccacccaaccucuccaucaccaucccgc

SEQ ID NO: 417822 - RNA, 32 nt, Human
gaagccaccgggaaagcagccagcacaaaggg

SEQ ID NO: 417823 - RNA, 32 nt, Human
gaagccaccucggggugacugagcggaaggcc

SEQ ID NO: 417824 - RNA, 32 nt, Human
gaagccacugccuccccuggcugugccacagc

SEQ ID NO: 417825 - RNA, 19 nt, Human
gaagccacuucuuuuggcu

SEQ ID NO: 417826 - RNA, 32 nt, Human
gaagccacuuugccucuucucccuucaagcac

SEQ ID NO: 417827 - RNA, 32 nt, Human
gaagccagaagccaggggguggggaagagaga

SEQ ID NO: 417828 - RNA, 32 nt, Human
gaagccagaaggaaugaaggccugcagugagg

SEQ ID NO: 417829 - RNA, 32 nt, Human
gaagccagacacaacccugcguacgcugcuca

SEQ ID NO: 417830 - RNA, 32 nt, Human
gaagccagaccaggaaagugaaaggaaaugga

SEQ ID NO: 417831 - RNA, 20 nt, Human
gaagccagaccuggguuggg

SEQ ID NO: 417832 - RNA, 32 nt, Human
gaagccagacgcacaccagcaggaugacaaac

SEQ ID NO: 417833 - RNA, 32 nt, Human
gaagccagaggaccuggagcugcugaugcggc

SEQ ID NO: 417834 - RNA, 22 nt, Human
gaagccagaggcagagguugca

SEQ ID NO: 417835 - RNA, 32 nt, Human
gaagccagaggcagagguugcaaugagccggg

SEQ ID NO: 417836 - RNA, 32 nt, Human
gaagccagagucuuauaacaccucccaagaaa

SEQ ID NO: 417837 - RNA, 32 nt, Human
gaagccagaugcuucaggauuaagaccccaug

SEQ ID NO: 417838 - RNA, 32 nt, Human
gaagccagccccaccagggcugugcugugacu

SEQ ID NO: 417839 - RNA, 32 nt, Human
gaagccagccuaucaccuggcugggugagaag

SEQ ID NO: 417840 - RNA, 32 nt, Human
gaagccagccuggaccauacacugccuggagg

SEQ ID NO: 417841 - RNA, 32 nt, Human
gaagccagccugggcaacaaagugagaccgag

SEQ ID NO: 417842 - RNA, 32 nt, Human
gaagccagccuuucagcaccccuuacccucca

SEQ ID NO: 417843 - RNA, 32 nt, Human
gaagccagcugguaauguauauucaggacuuc

SEQ ID NO: 417844 - RNA, 30 nt, Human
gaagccagcuugcagagagagcaagaacag

SEQ ID NO: 417845 - RNA, 32 nt, Human
gaagccaggacagaggccaggagccagcccug

SEQ ID NO: 417846 - RNA, 32 nt, Human
gaagccaggacgucaggcugaccaacaccuca

SEQ ID NO: 417847 - RNA, 32 nt, Human
gaagccaggagaagaagagggagaaacugucc

SEQ ID NO: 417848 - RNA, 32 nt, Human
gaagccaggagcucaagaacagccugggcaaa

SEQ ID NO: 417849 - RNA, 32 nt, Human
gaagccaggagcucaagagcagccugggcaau

SEQ ID NO: 417850 - RNA, 24 nt, Human
gaagccaggaggcagagguugcag

SEQ ID NO: 417851 - RNA, 32 nt, Human
gaagccaggaggcagagguugcagugagccaa

SEQ ID NO: 417852 - RNA, 32 nt, Human
gaagccaggaggcagagguugcaguuagccca

SEQ ID NO: 417853 - RNA, 32 nt, Human
gaagccaggaggcggagguugcagugagccga

SEQ ID NO: 417854 - RNA, 32 nt, Human
gaagccaggaguucaagaccagccuggccaac

SEQ ID NO: 417855 - RNA, 32 nt, Human
gaagccaggaguuccagaccagccugggcagc

SEQ ID NO: 417856 - RNA, 32 nt, Human
gaagccaggaguucgagaccagccuggguaac

SEQ ID NO: 417857 - RNA, 24 nt, Human
gaagccaggaguuugagaccagcu

SEQ ID NO: 417858 - RNA, 32 nt, Human
gaagccaggaguuugggaccagccugggcaac

SEQ ID NO: 417859 - RNA, 32 nt, Human
gaagccaggccuggccuugccucaguuguauc

SEQ ID NO: 417860 - RNA, 32 nt, Human
gaagccaggcggggugcagacggcugcugauu

SEQ ID NO: 417861 - RNA, 21 nt, Human
gaagccaggcuaacuggguga

SEQ ID NO: 417862 - RNA, 32 nt, Human
gaagccaggcucugugcuucugccuuuaaggc

SEQ ID NO: 417863 - RNA, 32 nt, Human
gaagccagggagaagcauugauugaugugggc

SEQ ID NO: 417864 - RNA, 32 nt, Human
gaagccagggagggagacaggagggcaggagg

SEQ ID NO: 417865 - RNA, 32 nt, Human
gaagccagggccugggacccucuggcugggca

SEQ ID NO: 417866 - RNA, 32 nt, Human
gaagccaggggacuccagccugggcgggguga

SEQ ID NO: 417867 - RNA, 32 nt, Human
gaagccaggggcccugcacucaugccaccugc

SEQ ID NO: 417868 - RNA, 32 nt, Human
gaagccaguaguucaagaccagccugggcaac

SEQ ID NO: 417869 - RNA, 32 nt, Human
gaagccagugagaccacgagccccagaagaac

SEQ ID NO: 417870 - RNA, 32 nt, Human
gaagccagugcacgccagccugggcgacagac

SEQ ID NO: 417871 - RNA, 18 nt, Human
gaagccagugccugugua

SEQ ID NO: 417872 - RNA, 32 nt, Human
gaagccagugccuguguacucacugaaauuga

SEQ ID NO: 417873 - RNA, 30 nt, Human
gaagccaguguggaaucagaacagauaaca

SEQ ID NO: 417874 - RNA, 32 nt, Human
gaagccauacccucccccaucugggggcccug

SEQ ID NO: 417875 - RNA, 32 nt, Human
gaagccauaggagccuccagaugggggcuggc

SEQ ID NO: 417876 - RNA, 32 nt, Human
gaagccauagugucacuuccacacaauuauuu

SEQ ID NO: 417877 - RNA, 32 nt, Human
gaagccaucaccuggcccaugucccuacaaac

SEQ ID NO: 417878 - RNA, 32 nt, Human
gaagccaucccuccucccccaggauccacaug

SEQ ID NO: 417879 - RNA, 32 nt, Human
gaagccaugcagauacccagcauggagaaccc

SEQ ID NO: 417880 - RNA, 24 nt, Human
gaagccaugcagugacacccgcua

SEQ ID NO: 417881 - RNA, 32 nt, Human
gaagccauggccugccugccuuuuggcuuugu

SEQ ID NO: 417882 - RNA, 32 nt, Human
gaagccaugucagcaccacacacugcagcucu

SEQ ID NO: 417883 - RNA, 32 nt, Human
gaagccaugugcauuauccuuuacggacgcag

SEQ ID NO: 417884 - RNA, 32 nt, Human
gaagccauucaguguuuccaucuuggcugagu

SEQ ID NO: 417885 - RNA, 32 nt, Human
gaagcccaagugggugaaucaccugaggucag

SEQ ID NO: 417886 - RNA, 32 nt, Human
gaagcccaaucacuacaaccacuaaccacaac

SEQ ID NO: 417887 - RNA, 32 nt, Human
gaagcccacagaagacagagaaggaacaacua

SEQ ID NO: 417888 - RNA, 32 nt, Human
gaagcccacaguuaaaucagaggucacaaaua

SEQ ID NO: 417889 - RNA, 32 nt, Human
gaagcccaccugcaauuucccaccuccugccc

SEQ ID NO: 417890 - RNA, 32 nt, Human
gaagcccagcagaugggagcaccuggacuugg

SEQ ID NO: 417891 - RNA, 32 nt, Human
gaagcccagccccucaggugcccccacacaca

SEQ ID NO: 417892 - RNA, 21 nt, Human
gaagcccagcuaaagccaaga

SEQ ID NO: 417893 - RNA, 18 nt, Human
gaagcccagcucugggaa

SEQ ID NO: 417894 - RNA, 32 nt, Human
gaagcccaggaggugguguuggcugcagggua

SEQ ID NO: 417895 - RNA, 32 nt, Human
gaagcccagggaggggaagagggugcuccccc

SEQ ID NO: 417896 - RNA, 32 nt, Human
gaagcccagggcuguggagcagccucucuccu

SEQ ID NO: 417897 - RNA, 23 nt, Human
gaagcccaggggcucaggacagg

SEQ ID NO: 417898 - RNA, 32 nt, Human
gaagcccagggugaagacagucacucauccgu

SEQ ID NO: 417899 - RNA, 32 nt, Human
gaagcccagggugggauguuagagggcauagu

SEQ ID NO: 417900 - RNA, 21 nt, Human
gaagcccagucucugagcuga

SEQ ID NO: 417901 - RNA, 32 nt, Human
gaagcccaguguccucagcuucauguccagug

SEQ ID NO: 417902 - RNA, 32 nt, Human
gaagcccaguuggcuggaaccgagaguugguc

SEQ ID NO: 417903 - RNA, 32 nt, Human
gaagcccaguuugcucucugguguuuguuaau

SEQ ID NO: 417904 - RNA, 32 nt, Human
gaagcccauagcccuuucccagccuuuuuggu

SEQ ID NO: 417905 - RNA, 32 nt, Human
gaagcccaugaggaccauuguguggauccaug

SEQ ID NO: 417906 - RNA, 32 nt, Human
gaagcccaugcaggaagcucuugaguuacugu

SEQ ID NO: 417907 - RNA, 21 nt, Human
gaagccccaagcaacuuuccu

SEQ ID NO: 417908 - RNA, 17 nt, Human
gaagccccacuugcccu

SEQ ID NO: 417909 - RNA, 32 nt, Human
gaagccccaggccgcagggggcaaggggccag

SEQ ID NO: 417910 - RNA, 32 nt, Human
gaagccccagguagcaggcuucagagagaaua

SEQ ID NO: 417911 - RNA, 32 nt, Human
gaagccccaucuuucugucuccacgcauggag

SEQ ID NO: 417912 - RNA, 32 nt, Human
gaagcccccagccagggcggggcggcgcagcc

SEQ ID NO: 417913 - RNA, 32 nt, Human
gaagcccccaggcugcgucuggaguggcagag

SEQ ID NO: 417914 - RNA, 24 nt, Human
gaagccccccaccccagcuuuccu

SEQ ID NO: 417915 - RNA, 21 nt, Human
gaagcccccuuugccaucccu

SEQ ID NO: 417916 - RNA, 32 nt, Human
gaagccccuccaucugcccugggguggaggca

SEQ ID NO: 417917 - RNA, 32 nt, Human
gaagccccuccccucucacacugaccuccccc

SEQ ID NO: 417918 - RNA, 32 nt, Human
gaagccccugaccuucuugaauaaccuggaua

SEQ ID NO: 417919 - RNA, 32 nt, Human
gaagccccuggaaggcagaaaaguugggagca

SEQ ID NO: 417920 - RNA, 24 nt, Human
gaagccccuggcauuugcugggga

SEQ ID NO: 417921 - RNA, 32 nt, Human
gaagccccuuccucccuccacuugcucccucu

SEQ ID NO: 417922 - RNA, 32 nt, Human
gaagcccgaccaagcuguccccuuccccugug

SEQ ID NO: 417923 - RNA, 32 nt, Human
gaagcccgaggaacucuuugcuccccugcuuu

SEQ ID NO: 417924 - RNA, 32 nt, Human
gaagcccgcggcagcggcagccuggauccagg

SEQ ID NO: 417925 - RNA, 21 nt, Human
gaagcccguccuccuaugcug

SEQ ID NO: 417926 - RNA, 32 nt, Human
gaagcccgugaagccgucaucuaaguccugcu

SEQ ID NO: 417927 - RNA, 32 nt, Human
gaagcccuaccugacuucccuaggcagguauu

SEQ ID NO: 417928 - RNA, 32 nt, Human
gaagcccuaugacauccucaggcuccccagac

SEQ ID NO: 417929 - RNA, 32 nt, Human
gaagcccucccgccuccugcccacaauggccu

SEQ ID NO: 417930 - RNA, 21 nt, Human
gaagcccucgagguucuggcu

SEQ ID NO: 417931 - RNA, 32 nt, Human
gaagcccucuccucagcuuuacuugcuccccc

SEQ ID NO: 417932 - RNA, 32 nt, Human
gaagcccucugcagucaugagcucugacgcag

SEQ ID NO: 417933 - RNA, 32 nt, Human
gaagcccugcagcuacagcugcuucauucccu

SEQ ID NO: 417934 - RNA, 32 nt, Human
gaagcccugccugcccucugccaccgggcugg

SEQ ID NO: 417935 - RNA, 32 nt, Human
gaagcccugcucaugagaagccuccccuuugc

SEQ ID NO: 417936 - RNA, 32 nt, Human
gaagcccugcuccucuucuccccaccaaggca

SEQ ID NO: 417937 - RNA, 32 nt, Human
gaagcccuggagacagccguugggugagggug

SEQ ID NO: 417938 - RNA, 32 nt, Human
gaagcccugggagcuguggcagcauccucucc

SEQ ID NO: 417939 - RNA, 32 nt, Human
gaagcccuuagacugccaggcacagagucggg

SEQ ID NO: 417940 - RNA, 19 nt, Human
gaagcccuucuaccuuccu

SEQ ID NO: 417941 - RNA, 32 nt, Human
gaagcccuugugugugcaggggugcacauguu

SEQ ID NO: 417942 - RNA, 32 nt, Human
gaagcccuuuuugcucuuucuguucagaugag

SEQ ID NO: 417943 - RNA, 32 nt, Human
gaagccgaagaagaaaauccaguagcacgguu

SEQ ID NO: 417944 - RNA, 32 nt, Human
gaagccgacccaggccugaggggccaggaacu

SEQ ID NO: 417945 - RNA, 32 nt, Human
gaagccgacgugggaggguagcuugaggccag

SEQ ID NO: 417946 - RNA, 25 nt, Human
gaagccgagaccuaaaguugggggg

SEQ ID NO: 417947 - RNA, 32 nt, Human
gaagccgagccgcggcuccuagcggcggcgcc

SEQ ID NO: 417948 - RNA, 32 nt, Human
gaagccgaggcgggcagaucaccugaggucag

SEQ ID NO: 417949 - RNA, 32 nt, Human
gaagccgaggugggcagaucaccugaggccag

SEQ ID NO: 417950 - RNA, 32 nt, Human
gaagccgaggugggcggaucaccugaggucgg

SEQ ID NO: 417951 - RNA, 32 nt, Human
gaagccgagucaggugggucaccugaggucag

SEQ ID NO: 417952 - RNA, 32 nt, Human
gaagccgagucggguggaucaccugaggucag

SEQ ID NO: 417953 - RNA, 32 nt, Human
gaagccgcagcccaaggaggucgucacuugcc

SEQ ID NO: 417954 - RNA, 32 nt, Human
gaagccgcauuuucacgcuggcuggcagugug

SEQ ID NO: 417955 - RNA, 32 nt, Human
gaagccgcucaggcucaagagcaacauggagg

SEQ ID NO: 417956 - RNA, 32 nt, Human
gaagccgcucaggcucaagagcaacauggggg

SEQ ID NO: 417957 - RNA, 32 nt, Human
gaagccgcugccccuugcaccuccucgggccu

SEQ ID NO: 417958 - RNA, 32 nt, Human
gaagccggcccccgcucugcagaagcugcauu

SEQ ID NO: 417959 - RNA, 32 nt, Human
gaagccggcgagggggagccagcagcggcggu

SEQ ID NO: 417960 - RNA, 32 nt, Human
gaagccggcuuuggcccugcggcugcuaccgu

SEQ ID NO: 417961 - RNA, 32 nt, Human
gaagccgggagcggcaggcgggcgagauaagu

SEQ ID NO: 417962 - RNA, 32 nt, Human
gaagccgggaggcggaaguuguggugagccga

SEQ ID NO: 417963 - RNA, 32 nt, Human
gaagccgggaggcucagccugaaaguggcucc

SEQ ID NO: 417964 - RNA, 32 nt, Human
gaagccgggagguggggguugcagugagccga

SEQ ID NO: 417965 - RNA, 32 nt, Human
gaagccgggcagcagaggaguacuugaagugg

SEQ ID NO: 417966 - RNA, 32 nt, Human
gaagccgggcggggccagggggucaaacacgg

SEQ ID NO: 417967 - RNA, 32 nt, Human
gaagccgucgcccguggcagacugccugcuga

SEQ ID NO: 417968 - RNA, 32 nt, Human
gaagccguugccagccugucucugcgcucgcc

SEQ ID NO: 417969 - RNA, 32 nt, Human
gaagccuacagcaacauucugagacugcucca

SEQ ID NO: 417970 - RNA, 32 nt, Human
gaagccuacaucuucuuauucuauuuaggaau

SEQ ID NO: 417971 - RNA, 32 nt, Human
gaagccuacuggcuggaaucagugcuccagca

SEQ ID NO: 417972 - RNA, 32 nt, Human
gaagccuagcagcugcuccauaaaccuagccc

SEQ ID NO: 417973 - RNA, 32 nt, Human
gaagccuagggggugggccgccagucuucagg

SEQ ID NO: 417974 - RNA, 32 nt, Human
gaagccucaaauacaauacuuauuuuauuuau

SEQ ID NO: 417975 - RNA, 32 nt, Human
gaagccucacaagaguggagacauauggacug

SEQ ID NO: 417976 - RNA, 32 nt, Human
gaagccucacugggcugcuaugucucuguauu

SEQ ID NO: 417977 - RNA, 32 nt, Human
gaagccucagacauugccaucggcugugaaag

SEQ ID NO: 417978 - RNA, 32 nt, Human
gaagccucagcucuggacagcugugccuucac

SEQ ID NO: 417979 - RNA, 32 nt, Human
gaagccucagggagcuacaacaucaaguuacg

SEQ ID NO: 417980 - RNA, 32 nt, Human
gaagccuccucagcguggguucuuggaagagg

SEQ ID NO: 417981 - RNA, 32 nt, Human
gaagccucuaucuccucuucacccauaagaaa

SEQ ID NO: 417982 - RNA, 32 nt, Human
gaagccucucugucaucuccccuucccagccc

SEQ ID NO: 417983 - RNA, 32 nt, Human
gaagccucugugcugcucaccugcccaaagcc

SEQ ID NO: 417984 - RNA, 32 nt, Human
gaagccugaaagagagaaaacuccaucggaag

SEQ ID NO: 417985 - RNA, 32 nt, Human
gaagccugaggagccuuccagcucuaagauag

SEQ ID NO: 417986 - RNA, 32 nt, Human
gaagccugaggggaaggaaggaaguacgggcg

SEQ ID NO: 417987 - RNA, 32 nt, Human
gaagccugagucuauuuuggaucuguaaauaa

SEQ ID NO: 417988 - RNA, 32 nt, Human
gaagccugcagcguucacgaagugacauugau

SEQ ID NO: 417989 - RNA, 32 nt, Human
gaagccugcagggaaagccacuggagaguuuu

SEQ ID NO: 417990 - RNA, 32 nt, Human
gaagccugcaucccgcuccccugggccccgac

SEQ ID NO: 417991 - RNA, 32 nt, Human
gaagccugcccuggcccagccuggcugggucu

SEQ ID NO: 417992 - RNA, 32 nt, Human
gaagccugcuucagaagugacugaaacggcau

SEQ ID NO: 417993 - RNA, 32 nt, Human
gaagccuggaaauguugacccucaaagggcau

SEQ ID NO: 417994 - RNA, 32 nt, Human
gaagccuggacucugccccacgcuguggcccu

SEQ ID NO: 417995 - RNA, 32 nt, Human
gaagccuggaggcggaggcugcacugagcuga

SEQ ID NO: 417996 - RNA, 32 nt, Human
gaagccuggaguagggagagcgaguuugggag

SEQ ID NO: 417997 - RNA, 32 nt, Human
gaagccugggaggacgguggcuugccggucug

SEQ ID NO: 417998 - RNA, 32 nt, Human
gaagccugggcugcugggacuggguucauucu

SEQ ID NO: 417999 - RNA, 32 nt, Human
gaagccuggggacugcagcccagggacgaggc

SEQ ID NO: 418000 - RNA, 32 nt, Human
gaagccuggguaaaauuguauuacaugaucuu

SEQ ID NO: 418001 - RNA, 32 nt, Human
gaagccuguaaucccagcuacuugggaggcug

SEQ ID NO: 418002 - RNA, 32 nt, Human
gaagccuguaggagaccuugagccagaggacc

SEQ ID NO: 418003 - RNA, 32 nt, Human
gaagccuguagucccagcuacuccggaggcug

SEQ ID NO: 418004 - RNA, 32 nt, Human
gaagccuguagucccagcuacucgggaggcug

SEQ ID NO: 418005 - RNA, 32 nt, Human
gaagccuguccacccaugcuuggagaggcuug

SEQ ID NO: 418006 - RNA, 32 nt, Human
gaagccugugaugaggcugagauaaagcacag

SEQ ID NO: 418007 - RNA, 32 nt, Human
gaagccugugccacuacauccuggaguuuggc

SEQ ID NO: 418008 - RNA, 32 nt, Human
gaagccuuagagggugacauagcuagaaagug

SEQ ID NO: 418009 - RNA, 32 nt, Human
gaagccuucagguugcugugcaauggaauagu

SEQ ID NO: 418010 - RNA, 32 nt, Human
gaagccuucauuuaaucucugcaguucaucuc

SEQ ID NO: 418011 - RNA, 32 nt, Human
gaagccuugaggucugucaccacccacagcca

SEQ ID NO: 418012 - RNA, 32 nt, Human
gaagccuugugcaaaggucggugcccagcccc

SEQ ID NO: 418013 - RNA, 32 nt, Human
gaagccuugugcaaaugcccuaggggugugcu

SEQ ID NO: 418014 - RNA, 32 nt, Human
gaagccuugugggugugagcagcacccaucca

SEQ ID NO: 418015 - RNA, 31 nt, Human
gaagccuuguuucacugaguuggagagacug

SEQ ID NO: 418016 - RNA, 32 nt, Human
gaagccuuuccaggacccauguguaggcacaa

SEQ ID NO: 418017 - RNA, 32 nt, Human
gaagccuuucuaggaagaggauugcccucaua

SEQ ID NO: 418018 - RNA, 32 nt, Human
gaagccuuucuuuuccauuguuucuggauauu

SEQ ID NO: 418019 - RNA, 32 nt, Human
gaagccuuugaagauuucaguuuguaaguagu

SEQ ID NO: 418020 - RNA, 32 nt, Human
gaagccuuugcacccugggaggaaggaccacc

SEQ ID NO: 418021 - RNA, 32 nt, Human
gaagcgaagccgaaaaaggcagcagcgaagga

SEQ ID NO: 418022 - RNA, 32 nt, Human
gaagcgaccccgggggcagcccgggccguguc

SEQ ID NO: 418023 - RNA, 32 nt, Human
gaagcgagagagcugcugccacugcugcuacc

SEQ ID NO: 418024 - RNA, 32 nt, Human
gaagcgagagaggcaccuuguucuccaagaac

SEQ ID NO: 418025 - RNA, 32 nt, Human
gaagcgagaggaugagaggaggccggcccagc

SEQ ID NO: 418026 - RNA, 32 nt, Human
gaagcgagcacaggcugggguggaugacuuau

SEQ ID NO: 418027 - RNA, 32 nt, Human
gaagcgagggccugguucugaggggucggcuu

SEQ ID NO: 418028 - RNA, 23 nt, Human
gaagcgaguggaucaccugaggu

SEQ ID NO: 418029 - RNA, 32 nt, Human
gaagcgcagccccugugaauaacagguggcuu

SEQ ID NO: 418030 - RNA, 32 nt, Human
gaagcgcagcgcaguggcgagaggagccccuu

SEQ ID NO: 418031 - RNA, 32 nt, Human
gaagcgccgacucccugagucuggaccuccau

SEQ ID NO: 418032 - RNA, 32 nt, Human
gaagcgccuccaaacucacagccucguagagc

SEQ ID NO: 418033 - RNA, 18 nt, Human
gaagcgccugccucccca

SEQ ID NO: 418034 - RNA, 32 nt, Human
gaagcgcgcaccugccaagcaggaugaauaau

SEQ ID NO: 418035 - RNA, 32 nt, Human
gaagcgcggccgcggcggcggcgggcggcgcu

SEQ ID NO: 418036 - RNA, 32 nt, Human
gaagcgcgggacaggcagaugcagugagugag

SEQ ID NO: 418037 - RNA, 32 nt, Human
gaagcgcuacaaagcagccacugugcuuacug

SEQ ID NO: 418038 - RNA, 32 nt, Human
gaagcgcucgccugccccacagccugggccuu

SEQ ID NO: 418039 - RNA, 32 nt, Human
gaagcgcugcuuuugagucucuaccucgauga

SEQ ID NO: 418040 - RNA, 32 nt, Human
gaagcgcugggcggaaguggcuguggcuuugc

SEQ ID NO: 418041 - RNA, 32 nt, Human
gaagcgcuucacuccagguugguagcuucuuu

SEQ ID NO: 418042 - RNA, 32 nt, Human
gaagcggaagcugcagcuggggugggggcagc

SEQ ID NO: 418043 - RNA, 32 nt, Human
gaagcggaauugggagaaaaugaguuauaaug

SEQ ID NO: 418044 - RNA, 32 nt, Human
gaagcggagggcgaggaggagcagaggagcac

SEQ ID NO: 418045 - RNA, 19 nt, Human
gaagcggagggcuccgggc

SEQ ID NO: 418046 - RNA, 19 nt, Human
gaagcggagguugcaguga

SEQ ID NO: 418047 - RNA, 32 nt, Human
gaagcggauuggguccugggccucugugauga

SEQ ID NO: 418048 - RNA, 32 nt, Human
gaagcggcacuggagacccaggaaaaaucucg

SEQ ID NO: 418049 - RNA, 32 nt, Human
gaagcggcaggcggaggcgcgguccgggcgcu

SEQ ID NO: 418050 - RNA, 32 nt, Human
gaagcggccaagugccuggacccagaggcuuu

SEQ ID NO: 418051 - RNA, 23 nt, Human
gaagcggcggucgguggcagggg

SEQ ID NO: 418052 - RNA, 19 nt, Human
gaagcggcugccuccgcca

SEQ ID NO: 418053 - RNA, 32 nt, Human
gaagcgggcgcucuuccagccuggagaaggcu

SEQ ID NO: 418054 - RNA, 23 nt, Human
gaagcgggcggaucaccugaggu

SEQ ID NO: 418055 - RNA, 22 nt, Human
gaagcgggcggaucacgagguc

SEQ ID NO: 418056 - RNA, 32 nt, Human
gaagcggggagagagagcgagcgaaaagcggg

SEQ ID NO: 418057 - RNA, 23 nt, Human
gaagcggguggaucaccugaggu

SEQ ID NO: 418058 - RNA, 27 nt, Human
gaagcgggugucacuuccucucuagua

SEQ ID NO: 418059 - RNA, 32 nt, Human
gaagcgguccugcugggguggguggguguuag

SEQ ID NO: 418060 - RNA, 32 nt, Human
gaagcgucaggacugcagcuccagccucuuca

SEQ ID NO: 418061 - RNA, 32 nt, Human
gaagcgucgccgcaucccccagaagagcgcaa

SEQ ID NO: 418062 - RNA, 32 nt, Human
gaagcgugagccacucagaacucaccaaaaug

SEQ ID NO: 418063 - RNA, 32 nt, Human
gaagcgugauucugcugagugucagugugacc

SEQ ID NO: 418064 - RNA, 32 nt, Human
gaagcguuugcacauccuggccccagaagauu

SEQ ID NO: 418065 - RNA, 32 nt, Human
gaagcguuugucagcccuggagcccagagcgg

SEQ ID NO: 418066 - RNA, 23 nt, Human
gaagcuaaaaccugagcuagaag

SEQ ID NO: 418067 - RNA, 32 nt, Human
gaagcuaaagagauguguagcucacaggggcu

SEQ ID NO: 418068 - RNA, 32 nt, Human
gaagcuaaaguauuguuggaccuaguaaacua

SEQ ID NO: 418069 - RNA, 32 nt, Human
gaagcuaagauggguggaucacuugaggucag

SEQ ID NO: 418070 - RNA, 32 nt, Human
gaagcuaagguacaaagaggccaagagacuua

SEQ ID NO: 418071 - RNA, 32 nt, Human
gaagcuaaggugggaggaucaccugagcucaa

SEQ ID NO: 418072 - RNA, 32 nt, Human
gaagcuacaguagcaauuuugcagugagcaca

SEQ ID NO: 418073 - RNA, 32 nt, Human
gaagcuacagugagccuugauugugucacugc

SEQ ID NO: 418074 - RNA, 20 nt, Human
gaagcuaccggcugcugggg

SEQ ID NO: 418075 - RNA, 32 nt, Human
gaagcuacucgugccauccaggucuccgagcc

SEQ ID NO: 418076 - RNA, 32 nt, Human
gaagcuagaagucccccuugaaugacccccag

SEQ ID NO: 418077 - RNA, 32 nt, Human
gaagcuagagagcuccagcaggggcacagagg

SEQ ID NO: 418078 - RNA, 32 nt, Human
gaagcuagaguccucagcugcagccuucucug

SEQ ID NO: 418079 - RNA, 30 nt, Human
gaagcuagcuugcaaucccaaagucagaag

SEQ ID NO: 418080 - RNA, 32 nt, Human
gaagcuaggaguuugagaccagccugggcaac

SEQ ID NO: 418081 - RNA, 32 nt, Human
gaagcuaugagcauuuaaaaacuguuuacagc

SEQ ID NO: 418082 - RNA, 20 nt, Human
gaagcucaaccccccuauga

SEQ ID NO: 418083 - RNA, 32 nt, Human
gaagcucaaguuggccacccaagucugagaaa

SEQ ID NO: 418084 - RNA, 32 nt, Human
gaagcucacagaaugggcuucuugccugacag

SEQ ID NO: 418085 - RNA, 32 nt, Human
gaagcucacuggccacaauacccaccucugug

SEQ ID NO: 418086 - RNA, 32 nt, Human
gaagcucagagcuggaggugagcuucugaggc

SEQ ID NO: 418087 - RNA, 32 nt, Human
gaagcucagugcagcugcagggugugggguca

SEQ ID NO: 418088 - RNA, 32 nt, Human
gaagcucaguuugccagcauagugccaaagac

SEQ ID NO: 418089 - RNA, 32 nt, Human
gaagcucaucacagcgaaccaggucucucaaa

SEQ ID NO: 418090 - RNA, 32 nt, Human
gaagcucaucugaccuccugacucucagcccu

SEQ ID NO: 418091 - RNA, 32 nt, Human
gaagcucauggacaagguucucagggaaguuu

SEQ ID NO: 418092 - RNA, 32 nt, Human
gaagcuccacugucacccuccaccucuucacc

SEQ ID NO: 418093 - RNA, 32 nt, Human
gaagcuccagacccucuccaccuggucaacau

SEQ ID NO: 418094 - RNA, 32 nt, Human
gaagcuccagaggggcccaggcugcagccugc

SEQ ID NO: 418095 - RNA, 32 nt, Human
gaagcuccagccugaaccauguuuuucacuug

SEQ ID NO: 418096 - RNA, 32 nt, Human
gaagcuccccauccaccuaucugaguaccuga

SEQ ID NO: 418097 - RNA, 32 nt, Human
gaagcucccccucccugcuucccuuggccgag

SEQ ID NO: 418098 - RNA, 24 nt, Human
gaagcuccguaggacuuccccgga

SEQ ID NO: 418099 - RNA, 32 nt, Human
gaagcuccucucugcccugcccuccaguuguc

SEQ ID NO: 418100 - RNA, 21 nt, Human
gaagcucgagccgccuccgcc

SEQ ID NO: 418101 - RNA, 32 nt, Human
gaagcucggacucagucugaucuagcugagcu

SEQ ID NO: 418102 - RNA, 17 nt, Human
gaagcucuaucugggaa

SEQ ID NO: 418103 - RNA, 32 nt, Human
gaagcucucaagugcggagaauucuuugcaca

SEQ ID NO: 418104 - RNA, 32 nt, Human
gaagcucucccugaacauccccaucaucacug

SEQ ID NO: 418105 - RNA, 32 nt, Human
gaagcucuccucuugcccucuucagcuuccgg

SEQ ID NO: 418106 - RNA, 32 nt, Human
gaagcucugaagauccuuucugccauuacgca

SEQ ID NO: 418107 - RNA, 32 nt, Human
gaagcucugaggaugguugcagugaggaagca

SEQ ID NO: 418108 - RNA, 32 nt, Human
gaagcucugcucgcugcuuccaccucaccaug

SEQ ID NO: 418109 - RNA, 32 nt, Human
gaagcucugcugagaugcagacaggaaaauaa

SEQ ID NO: 418110 - RNA, 32 nt, Human
gaagcucugcugucuggggcaagcuuucuuuc

SEQ ID NO: 418111 - RNA, 32 nt, Human
gaagcucuggaaacuuguggguggggcccagg

SEQ ID NO: 418112 - RNA, 24 nt, Human
gaagcucugggccaccucccugga

SEQ ID NO: 418113 - RNA, 19 nt, Human
gaagcucugguggaugcua

SEQ ID NO: 418114 - RNA, 32 nt, Human
gaagcucuguaagaaagaaaaggucagccucc

SEQ ID NO: 418115 - RNA, 32 nt, Human
gaagcucuuccaggaagcagcggcggccccac

SEQ ID NO: 418116 - RNA, 17 nt, Human
gaagcugaaacugggga

SEQ ID NO: 418117 - RNA, 32 nt, Human
gaagcugaaagagacucuggggcacuaaauuc

SEQ ID NO: 418118 - RNA, 25 nt, Human
gaagcugaaaggaugauccugggga

SEQ ID NO: 418119 - RNA, 32 nt, Human
gaagcugaacccagggccuggcuguggucuuc

SEQ ID NO: 418120 - RNA, 32 nt, Human
gaagcugaagaaaaagcgccagugaagaaauc

SEQ ID NO: 418121 - RNA, 17 nt, Human
gaagcugaaggcuggag

SEQ ID NO: 418122 - RNA, 32 nt, Human
gaagcugaagugggaggaucaccugagcucug

SEQ ID NO: 418123 - RNA, 32 nt, Human
gaagcugaccaacacuacagagaucccacacu

SEQ ID NO: 418124 - RNA, 32 nt, Human
gaagcugacuucugaagaugacugccucaccu

SEQ ID NO: 418125 - RNA, 32 nt, Human
gaagcugagacaacauacucuguccauacaua

SEQ ID NO: 418126 - RNA, 17 nt, Human
gaagcugagagcuggag

SEQ ID NO: 418127 - RNA, 32 nt, Human
gaagcugagauggguggaucaccugagcucag

SEQ ID NO: 418128 - RNA, 21 nt, Human
gaagcugaggagggcugggag

SEQ ID NO: 418129 - RNA, 32 nt, Human
gaagcugaggcaggagaaucccuugaaccuga

SEQ ID NO: 418130 - RNA, 32 nt, Human
gaagcugaggcaggaggaucaccugaggucag

SEQ ID NO: 418131 - RNA, 32 nt, Human
gaagcugaggcgggcggaucaccugaggucag

SEQ ID NO: 418132 - RNA, 32 nt, Human
gaagcugaggcugccucuuccuagccacagga

SEQ ID NO: 418133 - RNA, 20 nt, Human
gaagcugagggagcucaggg

SEQ ID NO: 418134 - RNA, 19 nt, Human
gaagcugagggcauugaga

SEQ ID NO: 418135 - RNA, 32 nt, Human
gaagcugagggcgugucagcaggccuuucgau

SEQ ID NO: 418136 - RNA, 24 nt, Human
gaagcugagggcugagaccaaggg

SEQ ID NO: 418137 - RNA, 26 nt, Human
gaagcugaggggcuguguuugagggg

SEQ ID NO: 418138 - RNA, 32 nt, Human
gaagcugaggugagaggaucucuagagcccag

SEQ ID NO: 418139 - RNA, 16 nt, Human
gaagcugaggugggaa

SEQ ID NO: 418140 - RNA, 16 nt, Human
gaagcugaggugggag

SEQ ID NO: 418141 - RNA, 24 nt, Human
gaagcugaggugggaggagugcuu

SEQ ID NO: 418142 - RNA, 24 nt, Human
gaagcugagucccagugcuggggg

SEQ ID NO: 418143 - RNA, 23 nt, Human
gaagcugagugcuguccaggagg

SEQ ID NO: 418144 - RNA, 32 nt, Human
gaagcugauacuucuccuuuugcucacagcug

SEQ ID NO: 418145 - RNA, 32 nt, Human
gaagcugauaggaaaucaccccagggaacccg

SEQ ID NO: 418146 - RNA, 26 nt, Human
gaagcugaugcagcguugccgagggg

SEQ ID NO: 418147 - RNA, 32 nt, Human
gaagcugaugcaggggaaagaaauuaacaacc

SEQ ID NO: 418148 - RNA, 23 nt, Human
gaagcugaugcuguacuuggggg

SEQ ID NO: 418149 - RNA, 32 nt, Human
gaagcugauggggacggagagaggagccaguc

SEQ ID NO: 418150 - RNA, 22 nt, Human
gaagcugauucacuaugggggg

SEQ ID NO: 418151 - RNA, 32 nt, Human
gaagcugcaagcuggggagaucguggaaauga

SEQ ID NO: 418152 - RNA, 24 nt, Human
gaagcugcaggaauauuuaucucc

SEQ ID NO: 418153 - RNA, 25 nt, Human
gaagcugcaggaauauuuaucucca

SEQ ID NO: 418154 - RNA, 22 nt, Human
gaagcugcaggcugcccaggag

SEQ ID NO: 418155 - RNA, 32 nt, Human
gaagcugcaggcuuugccauugugaaccaugg

SEQ ID NO: 418156 - RNA, 32 nt, Human
gaagcugcagugagcagggaucguaccacugc

SEQ ID NO: 418157 - RNA, 32 nt, Human
gaagcugcagugagccaagaucacaccacugc

SEQ ID NO: 418158 - RNA, 32 nt, Human
gaagcugcagugagccaugauugcaccacugc

SEQ ID NO: 418159 - RNA, 32 nt, Human
gaagcugcagugagccgagaucaggccauugc

SEQ ID NO: 418160 - RNA, 32 nt, Human
gaagcugcagugagcuaggaucgugccacugc

SEQ ID NO: 418161 - RNA, 32 nt, Human
gaagcugcagugagcuaugaucacaccacugc

SEQ ID NO: 418162 - RNA, 32 nt, Human
gaagcugcagugagcuaugauugugccacaca

SEQ ID NO: 418163 - RNA, 32 nt, Human
gaagcugcagugagcugugaucgcaccacugc

SEQ ID NO: 418164 - RNA, 32 nt, Human
gaagcugcagugagcugugaucgcaccacugu

SEQ ID NO: 418165 - RNA, 32 nt, Human
gaagcugcagugagguaugguugugccacugc

SEQ ID NO: 418166 - RNA, 32 nt, Human
gaagcugcagugaguugugaucaugccacugu

SEQ ID NO: 418167 - RNA, 32 nt, Human
gaagcugcaguuggaagacccuggaggaugcc

SEQ ID NO: 418168 - RNA, 32 nt, Human
gaagcugcaucgugcuccuccagccugcacug

SEQ ID NO: 418169 - RNA, 32 nt, Human
gaagcugccaccgccuccuccaucucccggag

SEQ ID NO: 418170 - RNA, 32 nt, Human
gaagcugccagggcaggagaggcugcuggaag

SEQ ID NO: 418171 - RNA, 32 nt, Human
gaagcugccaucagggaucuuccccugccccg

SEQ ID NO: 418172 - RNA, 32 nt, Human
gaagcugccaucuccccgccacccgcucgucc

SEQ ID NO: 418173 - RNA, 32 nt, Human
gaagcugcccaggugaccaguccugggagugc

SEQ ID NO: 418174 - RNA, 20 nt, Human
gaagcugcccugcccuggca

SEQ ID NO: 418175 - RNA, 32 nt, Human
gaagcugcccugcugugguuuagcacugcaaa

SEQ ID NO: 418176 - RNA, 32 nt, Human
gaagcugccgccgccucugcccgcccggcgcc

SEQ ID NO: 418177 - RNA, 32 nt, Human
gaagcugccgcuggcugagagaccaugaagaa

SEQ ID NO: 418178 - RNA, 32 nt, Human
gaagcugccuaugcguccccagccugggcuga

SEQ ID NO: 418179 - RNA, 32 nt, Human
gaagcugcggccgccucgcacccggaacaaca

SEQ ID NO: 418180 - RNA, 32 nt, Human
gaagcugcucacugcucacacgcugccuccuc

SEQ ID NO: 418181 - RNA, 32 nt, Human
gaagcugcuccgugcuuguuugcucaccuggg

SEQ ID NO: 418182 - RNA, 32 nt, Human
gaagcugcucugaaaucuccuuuagccaucac

SEQ ID NO: 418183 - RNA, 32 nt, Human
gaagcugcugagccaugggcuacgcgcgggcu

SEQ ID NO: 418184 - RNA, 21 nt, Human
gaagcugcugcagcccugcca

SEQ ID NO: 418185 - RNA, 32 nt, Human
gaagcugcuggcugacugccauguccacgcag

SEQ ID NO: 418186 - RNA, 21 nt, Human
gaagcugcugugacuccagca

SEQ ID NO: 418187 - RNA, 32 nt, Human
gaagcugcuguggcugaugcggauucagaaag

SEQ ID NO: 418188 - RNA, 32 nt, Human
gaagcugcuucaaaucacucuugacuacaugg

SEQ ID NO: 418189 - RNA, 22 nt, Human
gaagcuggaaaacuccuaggaa

SEQ ID NO: 418190 - RNA, 22 nt, Human
gaagcuggaaaaggcaaaggag

SEQ ID NO: 418191 - RNA, 32 nt, Human
gaagcuggaaacacugagcugaguguugaggc

SEQ ID NO: 418192 - RNA, 32 nt, Human
gaagcuggaaggaggaagggaggguaaguggc

SEQ ID NO: 418193 - RNA, 32 nt, Human
gaagcuggacgagucagccacugggaggucua

SEQ ID NO: 418194 - RNA, 32 nt, Human
gaagcuggagagagaggaaccaguugccaagg

SEQ ID NO: 418195 - RNA, 32 nt, Human
gaagcuggagaucacaggcgugucuugucggg

SEQ ID NO: 418196 - RNA, 32 nt, Human
gaagcuggagccaccugcggcucugagaggga

SEQ ID NO: 418197 - RNA, 32 nt, Human
gaagcuggaggcagagauuggagugauacauu

SEQ ID NO: 418198 - RNA, 32 nt, Human
gaagcuggagguguuagacaccagcccccugc

SEQ ID NO: 418199 - RNA, 32 nt, Human
gaagcuggcaucuccccagccauccuaugcag

SEQ ID NO: 418200 - RNA, 32 nt, Human
gaagcuggccacugaaaacuguaagaugguca

SEQ ID NO: 418201 - RNA, 16 nt, Human
gaagcuggccagggaa

SEQ ID NO: 418202 - RNA, 32 nt, Human
gaagcuggcccagggugguggucagcuggguc

SEQ ID NO: 418203 - RNA, 32 nt, Human
gaagcuggccuggguccagggagagaccucgu

SEQ ID NO: 418204 - RNA, 32 nt, Human
gaagcuggcuaaccuccacuuccacauuccag

SEQ ID NO: 418205 - RNA, 17 nt, Human
gaagcuggcucuucuga

SEQ ID NO: 418206 - RNA, 32 nt, Human
gaagcuggcugcccccauuccugcugcugcug

SEQ ID NO: 418207 - RNA, 32 nt, Human
gaagcugggacccugggcuggacuguccuuuc

SEQ ID NO: 418208 - RNA, 32 nt, Human
gaagcugggagagagguaugggacagauucuu

SEQ ID NO: 418209 - RNA, 23 nt, Human
gaagcugggagccaugugggggg

SEQ ID NO: 418210 - RNA, 32 nt, Human
gaagcugggaggagaaggcggcggaaggugga

SEQ ID NO: 418211 - RNA, 32 nt, Human
gaagcugggaggcagaguuuucagugagccaa

SEQ ID NO: 418212 - RNA, 24 nt, Human
gaagcugggaggcggagguugcag

SEQ ID NO: 418213 - RNA, 32 nt, Human
gaagcugggaggcggagguugcagugagccaa

SEQ ID NO: 418214 - RNA, 32 nt, Human
gaagcugggaggucaggugggguggaugauau

SEQ ID NO: 418215 - RNA, 32 nt, Human
gaagcugggauuacaggcaugcgccaccacgc

SEQ ID NO: 418216 - RNA, 32 nt, Human
gaagcugggcaggacaaguaggacaucccugg

SEQ ID NO: 418217 - RNA, 20 nt, Human
gaagcugggccacgagcuga

SEQ ID NO: 418218 - RNA, 32 nt, Human
gaagcugggccaggacaaacagaaguuagaag

SEQ ID NO: 418219 - RNA, 32 nt, Human
gaagcuggggcaugggcucuaggggaaccugg

SEQ ID NO: 418220 - RNA, 20 nt, Human
gaagcugggggcagcugggg

SEQ ID NO: 418221 - RNA, 32 nt, Human
gaagcugguauuucuauuucuuuuggauuuuu

SEQ ID NO: 418222 - RNA, 32 nt, Human
gaagcuggugaaugcaggcucugagcggcucc

SEQ ID NO: 418223 - RNA, 32 nt, Human
gaagcuggugcagccacacagggagugcagcc

SEQ ID NO: 418224 - RNA, 21 nt, Human
gaagcuggugcugcuuggagg

SEQ ID NO: 418225 - RNA, 32 nt, Human
gaagcugguuacuguacgcaaguugagugcca

SEQ ID NO: 418226 - RNA, 32 nt, Human
gaagcuguaacaaccucugcuauuuaaggaga

SEQ ID NO: 418227 - RNA, 17 nt, Human
gaagcuguacuugggaa

SEQ ID NO: 418228 - RNA, 32 nt, Human
gaagcuguauucuggagaucagcuccagguuc

SEQ ID NO: 418229 - RNA, 19 nt, Human
gaagcugucaccacaguuc

SEQ ID NO: 418230 - RNA, 32 nt, Human
gaagcugucauccuaagggaaaaaccuccauc

SEQ ID NO: 418231 - RNA, 32 nt, Human
gaagcuguccccaucucagugucagaccagcc

SEQ ID NO: 418232 - RNA, 32 nt, Human
gaagcugugaaucacaagcucugccucuuucu

SEQ ID NO: 418233 - RNA, 32 nt, Human
gaagcugugagggacccacagauuuuggaaac

SEQ ID NO: 418234 - RNA, 19 nt, Human
gaagcugugggcugugggg

SEQ ID NO: 418235 - RNA, 32 nt, Human
gaagcuguggugagcuguugauugcaccacug

SEQ ID NO: 418236 - RNA, 32 nt, Human
gaagcuguugagguccuaggcaauugaugcag

SEQ ID NO: 418237 - RNA, 31 nt, Human
gaagcuguuugaguaaaccuguugaagagug

SEQ ID NO: 418238 - RNA, 20 nt, Human
gaagcuguuugcagcagcuc

SEQ ID NO: 418239 - RNA, 32 nt, Human
gaagcuuaaaaagguguuuugucuggaacuua

SEQ ID NO: 418240 - RNA, 32 nt, Human
gaagcuuaagaagaaggauaaagggaagcugg

SEQ ID NO: 418241 - RNA, 32 nt, Human
gaagcuuaaucuguauuuacagcugcucccca

SEQ ID NO: 418242 - RNA, 32 nt, Human
gaagcuuacacaucucccucagccucugguuu

SEQ ID NO: 418243 - RNA, 32 nt, Human
gaagcuuacuauaucauuauuauaaguagcau

SEQ ID NO: 418244 - RNA, 32 nt, Human
gaagcuucaacaaaaggcuuaccugguaagaa

SEQ ID NO: 418245 - RNA, 32 nt, Human
gaagcuucagcaucugcugggauaacuggagg

SEQ ID NO: 418246 - RNA, 32 nt, Human
gaagcuucagugagccaugauugcacugucgc

SEQ ID NO: 418247 - RNA, 32 nt, Human
gaagcuucaguuauaaauaguaauuggaguga

SEQ ID NO: 418248 - RNA, 32 nt, Human
gaagcuucaucugaagauguccugggcguuca

SEQ ID NO: 418249 - RNA, 25 nt, Human
gaagcuucaucuguauuuauagcca

SEQ ID NO: 418250 - RNA, 32 nt, Human
gaagcuuccacaaaauuagaaaggacaacagu

SEQ ID NO: 418251 - RNA, 32 nt, Human
gaagcuuccacucacgguggcaggggaagggg

SEQ ID NO: 418252 - RNA, 32 nt, Human
gaagcuucccagccccacuugccugcaggcuu

SEQ ID NO: 418253 - RNA, 32 nt, Human
gaagcuucccugguccccuccuuucuggccau

SEQ ID NO: 418254 - RNA, 32 nt, Human
gaagcuuccgggguggccuccaccuccuggcu

SEQ ID NO: 418255 - RNA, 22 nt, Human
gaagcuuccuccccucucagca

SEQ ID NO: 418256 - RNA, 32 nt, Human
gaagcuuccugaugccucccaagaagcaaaug

SEQ ID NO: 418257 - RNA, 32 nt, Human
gaagcuucuacacacuggaaauucuauuaaga

SEQ ID NO: 418258 - RNA, 32 nt, Human
gaagcuucucucuuaaacuucaucagaacauu

SEQ ID NO: 418259 - RNA, 20 nt, Human
gaagcuucuugaccuccaua

SEQ ID NO: 418260 - RNA, 21 nt, Human
gaagcuugaaguaucaucucu

SEQ ID NO: 418261 - RNA, 32 nt, Human
gaagcuugcauccuugaggcucagggaugaga

SEQ ID NO: 418262 - RNA, 22 nt, Human
gaagcuugccuuugaacuggaa

SEQ ID NO: 418263 - RNA, 32 nt, Human
gaagcuuguuacugagaaggacaguggaggcg

SEQ ID NO: 418264 - RNA, 32 nt, Human
gaagcuuguugaaaacccagacugucuccacg

SEQ ID NO: 418265 - RNA, 32 nt, Human
gaagcuuucucuaagcccuucccaguugcuuc

SEQ ID NO: 418266 - RNA, 32 nt, Human
gaagcuuucugcaaaugcagcaccacugguau

SEQ ID NO: 418267 - RNA, 32 nt, Human
gaagcuuugccauuggcugguggagaaggagg

SEQ ID NO: 418268 - RNA, 32 nt, Human
gaagcuuugugugauauucuuccaaauguagu

SEQ ID NO: 418269 - RNA, 32 nt, Human
gaagcuuuguuucuaaaaguaccuugaaauga

SEQ ID NO: 418270 - RNA, 32 nt, Human
gaagcuuuuccagagcccccaggcuaggaacc

SEQ ID NO: 418271 - RNA, 32 nt, Human
gaagcuuuucuuuggcgauucagugucacaaa

SEQ ID NO: 418272 - RNA, 32 nt, Human
gaagcuuuugcagccggacaggucgcgaagca

SEQ ID NO: 418273 - RNA, 26 nt, Human
gaagcuuuugccagcuauuugggggg

SEQ ID NO: 418274 - RNA, 32 nt, Human
gaagcuuuuugaagagcacauucuccucagug

SEQ ID NO: 418275 - RNA, 32 nt, Human
gaaggaaaaaccacuaagguauuaucugaauu

SEQ ID NO: 418276 - RNA, 32 nt, Human
gaaggaaaaagagcaacagauccagggagcau

SEQ ID NO: 418277 - RNA, 32 nt, Human
gaaggaaaaagcaggaaacugaaggaagcagg

SEQ ID NO: 418278 - RNA, 32 nt, Human
gaaggaaaacauuccaacauuaaccggucacc

SEQ ID NO: 418279 - RNA, 32 nt, Human
gaaggaaaacuaauaaacaaaaagcaguagca

SEQ ID NO: 418280 - RNA, 32 nt, Human
gaaggaaaagaaaugcuaggagaagagccaug

SEQ ID NO: 418281 - RNA, 32 nt, Human
gaaggaaaagacacugcccugcaagguugugc

SEQ ID NO: 418282 - RNA, 32 nt, Human
gaaggaaaagccucugggagcacauucugcug

SEQ ID NO: 418283 - RNA, 32 nt, Human
gaaggaaaaggacggacacaugcugaaaacgg

SEQ ID NO: 418284 - RNA, 22 nt, Human
gaaggaaaaggugcacauuuuc

SEQ ID NO: 418285 - RNA, 32 nt, Human
gaaggaaaagugggcagugcgcacugugggag

SEQ ID NO: 418286 - RNA, 32 nt, Human
gaaggaaaagugggguuggggcuggguggucu

SEQ ID NO: 418287 - RNA, 32 nt, Human
gaaggaaaaugugaaugaaaguagugcuggau

SEQ ID NO: 418288 - RNA, 32 nt, Human
gaaggaaacacacucggcugggcacagugacg

SEQ ID NO: 418289 - RNA, 23 nt, Human
gaaggaaacccugacuccugggg

SEQ ID NO: 418290 - RNA, 32 nt, Human
gaaggaaaccuccagcugaacuuucuaacaau

SEQ ID NO: 418291 - RNA, 32 nt, Human
gaaggaaacgggacccaggggaagaaagcgcu

SEQ ID NO: 418292 - RNA, 32 nt, Human
gaaggaaagaaaagguccagaucagaguucag

SEQ ID NO: 418293 - RNA, 22 nt, Human
gaaggaaagaaaaugcaucuuc

SEQ ID NO: 418294 - RNA, 32 nt, Human
gaaggaaagcggagacccgagcagggguuuua

SEQ ID NO: 418295 - RNA, 32 nt, Human
gaaggaaaggagagaaggcaggaagaaggcaa

SEQ ID NO: 418296 - RNA, 32 nt, Human
gaaggaaagggaggggcccuggaggagaggcu

SEQ ID NO: 418297 - RNA, 32 nt, Human
gaaggaaaguaagccuuuuugucaccucaaua

SEQ ID NO: 418298 - RNA, 32 nt, Human
gaaggaaaugaaacucaccuaucuuucuauca

SEQ ID NO: 418299 - RNA, 32 nt, Human
gaaggaaaugaccacagacagccauguucugg

SEQ ID NO: 418300 - RNA, 32 nt, Human
gaaggaaaugauuuccuaugauucugcuuacu

SEQ ID NO: 418301 - RNA, 32 nt, Human
gaaggaaauguucucaaggucucaggcuauuu

SEQ ID NO: 418302 - RNA, 32 nt, Human
gaaggaacaagaggagaaagcagagauaaaac

SEQ ID NO: 418303 - RNA, 19 nt, Human
gaaggaacauugcagagcu

SEQ ID NO: 418304 - RNA, 32 nt, Human
gaaggaaccagcuaagggucagauuguuuuuc

SEQ ID NO: 418305 - RNA, 32 nt, Human
gaaggaaccaggacccucagagcccagcaucc

SEQ ID NO: 418306 - RNA, 32 nt, Human
gaaggaacgggggaagggcggggugagggaag

SEQ ID NO: 418307 - RNA, 32 nt, Human
gaaggaacuagagugaagaggacaggagccau

SEQ ID NO: 418308 - RNA, 32 nt, Human
gaaggaacugacacauucucucagagcucaag

SEQ ID NO: 418309 - RNA, 32 nt, Human
gaaggaacuggucugcucacacuugcuggcuu

SEQ ID NO: 418310 - RNA, 21 nt, Human
gaaggaagaacagccacagga

SEQ ID NO: 418311 - RNA, 26 nt, Human
gaaggaagaagagaaaacauauuucc

SEQ ID NO: 418312 - RNA, 32 nt, Human
gaaggaagaagagggaagaauccgaccacuuu

SEQ ID NO: 418313 - RNA, 32 nt, Human
gaaggaagagcaagaacauggccacacccacc

SEQ ID NO: 418314 - RNA, 32 nt, Human
gaaggaagaggaaagaaaaauugugcagagag

SEQ ID NO: 418315 - RNA, 32 nt, Human
gaaggaagaggaaagggaggaggaggauuuau

SEQ ID NO: 418316 - RNA, 22 nt, Human
gaaggaagauucagucuccacu

SEQ ID NO: 418317 - RNA, 32 nt, Human
gaaggaagcaagcaucuccgcaucgcauccuc

SEQ ID NO: 418318 - RNA, 22 nt, Human
gaaggaagcacccaucuucacu

SEQ ID NO: 418319 - RNA, 32 nt, Human
gaaggaagcaugaaggaugcacaggucaggcc

SEQ ID NO: 418320 - RNA, 32 nt, Human
gaaggaagcauuccaccuucccccuuucuccc

SEQ ID NO: 418321 - RNA, 32 nt, Human
gaaggaagccaagggagcagugcaauggauuu

SEQ ID NO: 418322 - RNA, 21 nt, Human
gaaggaagcccaugagaggac

SEQ ID NO: 418323 - RNA, 32 nt, Human
gaaggaaggaaaacacaggcagcucuaagugu

SEQ ID NO: 418324 - RNA, 32 nt, Human
gaaggaaggaagagagggaggcgggcaagcag

SEQ ID NO: 418325 - RNA, 32 nt, Human
gaaggaaggaaggaaggaaggaaggaaggaga

SEQ ID NO: 418326 - RNA, 32 nt, Human
gaaggaaggaaggaaggaaggaaggagaaagg

SEQ ID NO: 418327 - RNA, 32 nt, Human
gaaggaaggaagggaggcgcgcugugcgcccc

SEQ ID NO: 418328 - RNA, 32 nt, Human
gaaggaaggaccaggcuuccagcuccucugca

SEQ ID NO: 418329 - RNA, 32 nt, Human
gaaggaaggagaacaggaggaggcaugagcga

SEQ ID NO: 418330 - RNA, 32 nt, Human
gaaggaaggagagggagggggaggauagagcc

SEQ ID NO: 418331 - RNA, 32 nt, Human
gaaggaaggagagguuugccugcuccuacggg

SEQ ID NO: 418332 - RNA, 32 nt, Human
gaaggaaggagggaggaaaggaaggaaaaagg

SEQ ID NO: 418333 - RNA, 32 nt, Human
gaaggaaggaggugguugugcaggauggcgac

SEQ ID NO: 418334 - RNA, 32 nt, Human
gaaggaaggagucccagcaggagcacagcccu

SEQ ID NO: 418335 - RNA, 32 nt, Human
gaaggaagggacagagaaagaagggacagagg

SEQ ID NO: 418336 - RNA, 32 nt, Human
gaaggaagggccaccuucccugaaggacacug

SEQ ID NO: 418337 - RNA, 32 nt, Human
gaaggaaggggaagaggaagggaaaagcgagc

SEQ ID NO: 418338 - RNA, 32 nt, Human
gaaggaaggggagagacaaagggggacugagu

SEQ ID NO: 418339 - RNA, 32 nt, Human
gaaggaaggguaagggaaaggauggggaccac

SEQ ID NO: 418340 - RNA, 32 nt, Human
gaaggaaguaggggaauggaaguggaaggaug

SEQ ID NO: 418341 - RNA, 23 nt, Human
gaaggaagucccgaccuuccugg

SEQ ID NO: 418342 - RNA, 23 nt, Human
gaaggaagugcagggagcccugg

SEQ ID NO: 418343 - RNA, 22 nt, Human
gaaggaaguguaucuucauaca

SEQ ID NO: 418344 - RNA, 26 nt, Human
gaaggaauaaaaauuugaguuucaaa

SEQ ID NO: 418345 - RNA, 32 nt, Human
gaaggaaucauuguccuuucuccaguuuuugu

SEQ ID NO: 418346 - RNA, 32 nt, Human
gaaggaaucucccagggauucacaguucaccc

SEQ ID NO: 418347 - RNA, 32 nt, Human
gaaggaaucugaauguuaagcuuuagcaaaug

SEQ ID NO: 418348 - RNA, 32 nt, Human
gaaggaaugagagagagugaaaaggagagggu

SEQ ID NO: 418349 - RNA, 32 nt, Human
gaaggacaaagggagagggaggugcaggucgc

SEQ ID NO: 418350 - RNA, 32 nt, Human
gaaggacaacaaaggccaauuugccaucacca

SEQ ID NO: 418351 - RNA, 32 nt, Human
gaaggacaacagcaucuucccaaaaccauuga

SEQ ID NO: 418352 - RNA, 32 nt, Human
gaaggacaacuaggaagccacuuggaggggag

SEQ ID NO: 418353 - RNA, 32 nt, Human
gaaggacaagagaaguucuccagggaauugca

SEQ ID NO: 418354 - RNA, 32 nt, Human
gaaggacacggugauggauguacuaugucuga

SEQ ID NO: 418355 - RNA, 32 nt, Human
gaaggacacugacuccucaaccccugugcuca

SEQ ID NO: 418356 - RNA, 32 nt, Human
gaaggacagacggacccaggagggagggcagc

SEQ ID NO: 418357 - RNA, 32 nt, Human
gaaggacagauggacccaggagggagggcagc

SEQ ID NO: 418358 - RNA, 32 nt, Human
gaaggacaggacccucaggaauucagugccuu

SEQ ID NO: 418359 - RNA, 32 nt, Human
gaaggacagugauguggggaggccguggggca

SEQ ID NO: 418360 - RNA, 32 nt, Human
gaaggacaucgggcaggacugacacugugucu

SEQ ID NO: 418361 - RNA, 32 nt, Human
gaaggacaucuucaccgucuccaugaaugaga

SEQ ID NO: 418362 - RNA, 32 nt, Human
gaaggacauggagccugagccagagaaccagc

SEQ ID NO: 418363 - RNA, 32 nt, Human
gaaggacauguaguacccacaucucuaggccu

SEQ ID NO: 418364 - RNA, 32 nt, Human
gaaggaccaaccaguuugggugaacaguggcc

SEQ ID NO: 418365 - RNA, 32 nt, Human
gaaggaccaagccucagcaccccagggcugcg

SEQ ID NO: 418366 - RNA, 32 nt, Human
gaaggacccacuguucuucuguuguacgagcu

SEQ ID NO: 418367 - RNA, 32 nt, Human
gaaggacccagaggggcccagcugaccugucu

SEQ ID NO: 418368 - RNA, 32 nt, Human
gaaggacccucaaaacugccuccuggagucca

SEQ ID NO: 418369 - RNA, 32 nt, Human
gaaggacccuggaaggagggagagcaggcagc

SEQ ID NO: 418370 - RNA, 32 nt, Human
gaaggaccgagaggcgggaggagcagcggcuc

SEQ ID NO: 418371 - RNA, 32 nt, Human
gaaggaccugacucuguguggacgcaaagaua

SEQ ID NO: 418372 - RNA, 32 nt, Human
gaaggaccuggugugccauggcugcaaacagc

SEQ ID NO: 418373 - RNA, 32 nt, Human
gaaggaccuugagauugaugcauuuugagcag

SEQ ID NO: 418374 - RNA, 32 nt, Human
gaaggacgcgaacccuucucugaccccagcuc

SEQ ID NO: 418375 - RNA, 32 nt, Human
gaaggacgugacaggugccgacgccaccgccg

SEQ ID NO: 418376 - RNA, 32 nt, Human
gaaggacuaucggcagugcagcaauaaugaca

SEQ ID NO: 418377 - RNA, 32 nt, Human
gaaggacuccaccgcugcccuccuggaacugc

SEQ ID NO: 418378 - RNA, 32 nt, Human
gaaggacucgguguuguguccaucaucaacgg

SEQ ID NO: 418379 - RNA, 32 nt, Human
gaaggacuggggccacguggagcugcuggagg

SEQ ID NO: 418380 - RNA, 32 nt, Human
gaaggacuucuuugcagggccagugguuucug

SEQ ID NO: 418381 - RNA, 32 nt, Human
gaaggagaaagaggaggagagagaaaaagggc

SEQ ID NO: 418382 - RNA, 32 nt, Human
gaaggagaaaugcagauuauuaccaggaggcu

SEQ ID NO: 418383 - RNA, 32 nt, Human
gaaggagaaccuggggagggugugugggaaga

SEQ ID NO: 418384 - RNA, 32 nt, Human
gaaggagaagcugguggccacagcagaguccu

SEQ ID NO: 418385 - RNA, 32 nt, Human
gaaggagaagcuucuugagauaccaaauaaag

SEQ ID NO: 418386 - RNA, 32 nt, Human
gaaggagaaggaaaaagaaaguaaugccacac

SEQ ID NO: 418387 - RNA, 32 nt, Human
gaaggagacagacagcuggcaguuccucgccu

SEQ ID NO: 418388 - RNA, 32 nt, Human
gaaggagacagugucucccuuugggaaaacua

SEQ ID NO: 418389 - RNA, 32 nt, Human
gaaggagagaaaauggcauccauggauuacag

SEQ ID NO: 418390 - RNA, 32 nt, Human
gaaggagagaaagguggaaggaagggaaggag

SEQ ID NO: 418391 - RNA, 32 nt, Human
gaaggagagacugaggcaaggcaaagugauag

SEQ ID NO: 418392 - RNA, 32 nt, Human
gaaggagagaggcagagagggagagaggcaga

SEQ ID NO: 418393 - RNA, 32 nt, Human
gaaggagagagggaagggucaggguagagaca

SEQ ID NO: 418394 - RNA, 22 nt, Human
gaaggagagcccauaaggggac

SEQ ID NO: 418395 - RNA, 32 nt, Human
gaaggagagcccccuccucaaugauuaccggg

SEQ ID NO: 418396 - RNA, 32 nt, Human
gaaggagagcccuggggauguggagaagccac

SEQ ID NO: 418397 - RNA, 32 nt, Human
gaaggagagcugcacauugagaacaaaggagg

SEQ ID NO: 418398 - RNA, 32 nt, Human
gaaggagagggaggggaccgucaggaagccgc

SEQ ID NO: 418399 - RNA, 32 nt, Human
gaaggagagggagggggaggauagagcccauc

SEQ ID NO: 418400 - RNA, 32 nt, Human
gaaggagaggguggggagggaggcaucuaggg

SEQ ID NO: 418401 - RNA, 32 nt, Human
gaaggagauaucccacauuuaaaguucuuauu

SEQ ID NO: 418402 - RNA, 32 nt, Human
gaaggagaucaagugaaccuucuacaacuccu

SEQ ID NO: 418403 - RNA, 32 nt, Human
gaaggagaucagcaggacgcugcgcacaacau

SEQ ID NO: 418404 - RNA, 32 nt, Human
gaaggagaugauucuuucaagggacacaggca

SEQ ID NO: 418405 - RNA, 32 nt, Human
gaaggagcacaguauccuccuguccaucucgu

SEQ ID NO: 418406 - RNA, 32 nt, Human
gaaggagcaccggguuccugcccagcacugug

SEQ ID NO: 418407 - RNA, 32 nt, Human
gaaggagcacgccugggcugggccccagggag

SEQ ID NO: 418408 - RNA, 32 nt, Human
gaaggagcagggcucuggagggauucgcauuc

SEQ ID NO: 418409 - RNA, 32 nt, Human
gaaggagcauccgugcugcuguggaaaauauc

SEQ ID NO: 418410 - RNA, 32 nt, Human
gaaggagccaauauaucuacuuucauuaagaa

SEQ ID NO: 418411 - RNA, 32 nt, Human
gaaggagccacaccaccugugacuccagcucu

SEQ ID NO: 418412 - RNA, 32 nt, Human
gaaggagccaccagcuggaggaaaggggcucc

SEQ ID NO: 418413 - RNA, 23 nt, Human
gaaggagccagaguacacgcucc

SEQ ID NO: 418414 - RNA, 32 nt, Human
gaaggagcccaggagcagaggaaguagagaga

SEQ ID NO: 418415 - RNA, 32 nt, Human
gaaggagcccagguggcacacgcccagcugcg

SEQ ID NO: 418416 - RNA, 26 nt, Human
gaaggagccguccuccagccccagga

SEQ ID NO: 418417 - RNA, 32 nt, Human
gaaggagccuaagacagaaaugacagaucucu

SEQ ID NO: 418418 - RNA, 32 nt, Human
gaaggagcgccagguccuccuugcuggcaggu

SEQ ID NO: 418419 - RNA, 32 nt, Human
gaaggagcguucgaggaauggaugaggucggg

SEQ ID NO: 418420 - RNA, 32 nt, Human
gaaggagcucucuucuugcuuggcagcuggac

SEQ ID NO: 418421 - RNA, 32 nt, Human
gaaggaggaaaaggugucuugcuggcuugccu

SEQ ID NO: 418422 - RNA, 32 nt, Human
gaaggaggaaccagcaagaccugugggguggg

SEQ ID NO: 418423 - RNA, 32 nt, Human
gaaggaggaagaggaggaggaggaagagggga

SEQ ID NO: 418424 - RNA, 32 nt, Human
gaaggaggacaguggcccaggccacacagcuc

SEQ ID NO: 418425 - RNA, 32 nt, Human
gaaggaggagaaagcaggcgaagcggggccau

SEQ ID NO: 418426 - RNA, 32 nt, Human
gaaggaggagacccacgagggagccggaagga

SEQ ID NO: 418427 - RNA, 32 nt, Human
gaaggaggagacugagugauuaagucacccac

SEQ ID NO: 418428 - RNA, 32 nt, Human
gaaggaggagagacaccgggcccagggcaccc

SEQ ID NO: 418429 - RNA, 32 nt, Human
gaaggaggagccaagacccacacccaggagga

SEQ ID NO: 418430 - RNA, 32 nt, Human
gaaggaggaggaagaggggcagguguagggag

SEQ ID NO: 418431 - RNA, 32 nt, Human
gaaggaggaggaggaggaggaggaggaggggg

SEQ ID NO: 418432 - RNA, 32 nt, Human
gaaggaggaggcggggcugcacugugagcccg

SEQ ID NO: 418433 - RNA, 32 nt, Human
gaaggaggauacauuuguuuguguugcucccc

SEQ ID NO: 418434 - RNA, 32 nt, Human
gaaggaggauugcuugagcucaggaguuugag

SEQ ID NO: 418435 - RNA, 32 nt, Human
gaaggaggcagaagggagagugaugcacgaug

SEQ ID NO: 418436 - RNA, 21 nt, Human
gaaggaggcaggaagggagag

SEQ ID NO: 418437 - RNA, 20 nt, Human
gaaggaggcaggacagaggc

SEQ ID NO: 418438 - RNA, 22 nt, Human
gaaggaggcaggcaugggggac

SEQ ID NO: 418439 - RNA, 21 nt, Human
gaaggaggcagggguugggac

SEQ ID NO: 418440 - RNA, 32 nt, Human
gaaggaggccaucaaggacaaggaggaaccuc

SEQ ID NO: 418441 - RNA, 32 nt, Human
gaaggaggccaucagcaaacugggaagaggac

SEQ ID NO: 418442 - RNA, 31 nt, Human
gaaggaggccuccuugggccuggucccccuu

SEQ ID NO: 418443 - RNA, 32 nt, Human
gaaggaggcuagcuucuagccuggguggccau

SEQ ID NO: 418444 - RNA, 32 nt, Human
gaaggaggcuuaggacuuuccacuccuggcug

SEQ ID NO: 418445 - RNA, 32 nt, Human
gaaggagggaaacugaaaacaccguggccccu

SEQ ID NO: 418446 - RNA, 32 nt, Human
gaaggagggaaaggauguaggcgaaggaggug

SEQ ID NO: 418447 - RNA, 32 nt, Human
gaaggagggaaggagugcuggggagaaggggc

SEQ ID NO: 418448 - RNA, 32 nt, Human
gaaggagggagaccccaaaaagagcagcacag

SEQ ID NO: 418449 - RNA, 32 nt, Human
gacaaggaggcagaggccugagcgaggcggaa

SEQ ID NO: 418450 - RNA, 32 nt, Human
gacaaggaggugggagaggguagcagcauggg

SEQ ID NO: 418451 - RNA, 32 nt, Human
gacaaggaggugggggcagcugaguuagaguc

SEQ ID NO: 418452 - RNA, 32 nt, Human
gacaaggauagagaggaggagggaagaacaaa

SEQ ID NO: 418453 - RNA, 24 nt, Human
gacaaggaugaaggccugaauggg

SEQ ID NO: 418454 - RNA, 32 nt, Human
gacaaggaugacuaaggucagagcaggugacc

SEQ ID NO: 418455 - RNA, 32 nt, Human
gacaaggcaaagcccgcauaauuuuaagacgg

SEQ ID NO: 418456 - RNA, 32 nt, Human
gacaaggcccccugccuuugccucacauaaac

SEQ ID NO: 418457 - RNA, 32 nt, Human
gacaaggcggcggcggcugcugugcugggugc

SEQ ID NO: 418458 - RNA, 32 nt, Human
gacaaggcuauguuucuccuagaaacagguuu

SEQ ID NO: 418459 - RNA, 32 nt, Human
gacaaggcucccccucugacccuuccuguugg

SEQ ID NO: 418460 - RNA, 32 nt, Human
gacaaggcugaccucacugucauuucaggggg

SEQ ID NO: 418461 - RNA, 32 nt, Human
gacaaggcuggacuagcaacugcuagaaaaug

SEQ ID NO: 418462 - RNA, 32 nt, Human
gacaagggaggcaguggcuaguggggugaaca

SEQ ID NO: 418463 - RNA, 32 nt, Human
gacaagggcaagauuauuaagcagcaagagac

SEQ ID NO: 418464 - RNA, 31 nt, Human
gacaagggcuguguugucacagcaggaauag

SEQ ID NO: 418465 - RNA, 32 nt, Human
gacaaggggaaugcaguggugccuggaaacuu

SEQ ID NO: 418466 - RNA, 32 nt, Human
gacaaggguagccagcuuggagucuagcaacu

SEQ ID NO: 418467 - RNA, 32 nt, Human
  misc_feature (31)..(31): n is a, c, g, or u
gacaagggucaagccaggaugggcccaggcnu

SEQ ID NO: 418468 - RNA, 20 nt, Human
gacaagggucuccacugugg

SEQ ID NO: 418469 - RNA, 32 nt, Human
gacaaggucuggauuuguggguguuuucauug

SEQ ID NO: 418470 - RNA, 32 nt, Human
gacaaggucuguggcuuccuggaaaugucacu

SEQ ID NO: 418471 - RNA, 23 nt, Human
gacaaggucuuacccagcccagg

SEQ ID NO: 418472 - RNA, 32 nt, Human
gacaaggugcaggacuccagagaaggccaaau

SEQ ID NO: 418473 - RNA, 32 nt, Human
gacaagguggagggcuggacggccaucaccac

SEQ ID NO: 418474 - RNA, 32 nt, Human
gacaagguggcugcuccagagguggcugagcc

SEQ ID NO: 418475 - RNA, 20 nt, Human
gacaagguuucacuauguug

SEQ ID NO: 418476 - RNA, 32 nt, Human
gacaaguaaagcaauggauggcuucaauaucc

SEQ ID NO: 418477 - RNA, 32 nt, Human
gacaaguacacguguacucacagagggagaga

SEQ ID NO: 418478 - RNA, 32 nt, Human
gacaaguagagaagaacauaagaagaaaaacc

SEQ ID NO: 418479 - RNA, 32 nt, Human
gacaaguaucuagccagucuuugcuacaaguu

SEQ ID NO: 418480 - RNA, 32 nt, Human
gacaagucauuacguuuucauuucucacaacu

SEQ ID NO: 418481 - RNA, 21 nt, Human
gacaaguccguugaggcugcc

SEQ ID NO: 418482 - RNA, 18 nt, Human
gacaagucuccaggcuga

SEQ ID NO: 418483 - RNA, 32 nt, Human
gacaagucuccuacucccaaaacuauuuaagg

SEQ ID NO: 418484 - RNA, 32 nt, Human
gacaagucuucagcccacacccugccagcccc

SEQ ID NO: 418485 - RNA, 32 nt, Human
gacaagugaaugagaugucaccaggauaagac

SEQ ID NO: 418486 - RNA, 32 nt, Human
gacaagugacagcaaagaagguggugaagguu

SEQ ID NO: 418487 - RNA, 22 nt, Human
gacaagugagcagucugugcca

SEQ ID NO: 418488 - RNA, 19 nt, Human
gacaaguguaaagcaugca

SEQ ID NO: 418489 - RNA, 32 nt, Human
gacaaguguaccucugcacucaaugcuggaau

SEQ ID NO: 418490 - RNA, 32 nt, Human
gacaaguucaugucuaauuuugcauuuccagu

SEQ ID NO: 418491 - RNA, 32 nt, Human
gacaaguugggaaugauguggugauuuagaau

SEQ ID NO: 418492 - RNA, 32 nt, Human
gacaaguuguaccuugcccucucuccagcucu

SEQ ID NO: 418493 - RNA, 32 nt, Human
gacaaguuugauggagagagaggcagagacag

SEQ ID NO: 418494 - RNA, 24 nt, Human
gacaauaaaaguuucggaguugaa

SEQ ID NO: 418495 - RNA, 32 nt, Human
gacaauaaaccugcagcguuucaugccacguc

SEQ ID NO: 418496 - RNA, 29 nt, Human
gacaauaaagcaugcacuguaagaacuga

SEQ ID NO: 418497 - RNA, 32 nt, Human
gacaauaacaucacaagcuaaaagccagagaa

SEQ ID NO: 418498 - RNA, 32 nt, Human
gacaauaaggauuuuuauagauauaauuuaau

SEQ ID NO: 418499 - RNA, 32 nt, Human
gacaauagcuguggggaaagaaaaugaguucc

SEQ ID NO: 418500 - RNA, 32 nt, Human
gacaauauuuagaacccaaauuuuggagugcu

SEQ ID NO: 418501 - RNA, 32 nt, Human
gacaaucacaaaucugugagggcugcugguua

SEQ ID NO: 418502 - RNA, 32 nt, Human
gacaaucaccaucugaauuccagaagcccugu

SEQ ID NO: 418503 - RNA, 32 nt, Human
gacaaucagaagagcuaccugcccucugaagc

SEQ ID NO: 418504 - RNA, 32 nt, Human
gacaaucauuguggaagcagaagguugucaug

SEQ ID NO: 418505 - RNA, 32 nt, Human
gacaaucccuuucgucuccuuccuccgcugcu

SEQ ID NO: 418506 - RNA, 32 nt, Human
gacaauccuggguuauccuugugggcucaguu

SEQ ID NO: 418507 - RNA, 32 nt, Human
gacaaucuauuuuguuacuugcacuuguuauu

SEQ ID NO: 418508 - RNA, 16 nt, Human
gacaaucucaggcuga

SEQ ID NO: 418509 - RNA, 32 nt, Human
gacaaucuccaggagaaccuacagauuggaag

SEQ ID NO: 418510 - RNA, 17 nt, Human
gacaaucuggggacuga

SEQ ID NO: 418511 - RNA, 32 nt, Human
gacaaugacaacugauaagggaugcaaaacca

SEQ ID NO: 418512 - RNA, 31 nt, Human
gacaaugaggagacagaaaaagcugcaugau

SEQ ID NO: 418513 - RNA, 32 nt, Human
gacaaugaggagacagaaaaagcugcaugaua

SEQ ID NO: 418514 - RNA, 32 nt, Human
gacaaugagggccacagagaaggugguguuuc

SEQ ID NO: 418515 - RNA, 32 nt, Human
gacaaugauucugucaucaccaucuccaugga

SEQ ID NO: 418516 - RNA, 31 nt, Human
gacaaugauuucacaacuagagggaagcagu

SEQ ID NO: 418517 - RNA, 32 nt, Human
gacaaugcauuuucagggaccagccccaucac

SEQ ID NO: 418518 - RNA, 32 nt, Human
gacaaugccaggaggcuucauugacguuguag

SEQ ID NO: 418519 - RNA, 32 nt, Human
gacaaugccaggauggcaguggaugacuucaa

SEQ ID NO: 418520 - RNA, 32 nt, Human
gacaaugccuggaacauaauagacacuaguua

SEQ ID NO: 418521 - RNA, 32 nt, Human
gacaaugcuggaguuaauucccagggaaggug

SEQ ID NO: 418522 - RNA, 22 nt, Human
gacaauggaaggaugcaggcca

SEQ ID NO: 418523 - RNA, 22 nt, Human
gacaauggaggcagagauugga

SEQ ID NO: 418524 - RNA, 30 nt, Human
gacaauggccucuccaggcuuuucuccugc

SEQ ID NO: 418525 - RNA, 32 nt, Human
gacaauggcgugaaccugggaggcagagcuug

SEQ ID NO: 418526 - RNA, 32 nt, Human
gacaauggcucacaucuguaaucccagcacuu

SEQ ID NO: 418527 - RNA, 32 nt, Human
gacaauggcugcaggaaaucauucaggcggga

SEQ ID NO: 418528 - RNA, 32 nt, Human
gacaauggcuugaaccugggaggcagagguug

SEQ ID NO: 418529 - RNA, 23 nt, Human
gacaaugggaauggccugugcca

SEQ ID NO: 418530 - RNA, 32 nt, Human
gacaaugggcacugauuugauaccauggcacu

SEQ ID NO: 418531 - RNA, 32 nt, Human
gacaaugggcuggcugccacgccccgaccccg

SEQ ID NO: 418532 - RNA, 32 nt, Human
gacaaugggcugggucgcucccauuuggccug

SEQ ID NO: 418533 - RNA, 32 nt, Human
gacaauggguaaaaugucuccagggcauauga

SEQ ID NO: 418534 - RNA, 32 nt, Human
gacaauggugugaacccaggaggcggugcuug

SEQ ID NO: 418535 - RNA, 20 nt, Human
gacaaugugagacucugucu

SEQ ID NO: 418536 - RNA, 29 nt, Human
gacaauguggaccaauuucuucaaacuac

SEQ ID NO: 418537 - RNA, 32 nt, Human
gacaauguugaaugaaugucuggcucagugau

SEQ ID NO: 418538 - RNA, 32 nt, Human
gacaauguugaaugaaugucugggucagugau

SEQ ID NO: 418539 - RNA, 32 nt, Human
gacaauuagcagucucugccucccuuggaaac

SEQ ID NO: 418540 - RNA, 32 nt, Human
gacaauucacacuggggagaaaccuuacaagu

SEQ ID NO: 418541 - RNA, 32 nt, Human
gacaauucagaggcgaggagauucuguaaacu

SEQ ID NO: 418542 - RNA, 32 nt, Human
gacaauucaugcaagaagauauacaaauauua

SEQ ID NO: 418543 - RNA, 17 nt, Human
gacaauucugggugcga

SEQ ID NO: 418544 - RNA, 19 nt, Human
gacaauucuuccaguggaa

SEQ ID NO: 418545 - RNA, 32 nt, Human
gacaauucuucuucuucugauguggcccaggg

SEQ ID NO: 418546 - RNA, 32 nt, Human
gacaauugacccaaucacucuguccaucaaac

SEQ ID NO: 418547 - RNA, 32 nt, Human
gacaauuggagcacaggaauguuaacauguau

SEQ ID NO: 418548 - RNA, 32 nt, Human
gacaauugguguuuacacccucuugucagcaa

SEQ ID NO: 418549 - RNA, 22 nt, Human
gacaauuguauacagaguuaaa

SEQ ID NO: 418550 - RNA, 32 nt, Human
gacaauuguccagguggacugcauguuuauuu

SEQ ID NO: 418551 - RNA, 16 nt, Human
gacaauuuagggcuga

SEQ ID NO: 418552 - RNA, 18 nt, Human
gacaauuuauguaucuga

SEQ ID NO: 418553 - RNA, 32 nt, Human
gacaauuuauuaauuugagaaagucaccuuga

SEQ ID NO: 418554 - RNA, 32 nt, Human
gacacaaaaggccacauacuguaugaacucau

SEQ ID NO: 418555 - RNA, 32 nt, Human
gacacaaagcaaaaaugcucuaaugccaauug

SEQ ID NO: 418556 - RNA, 32 nt, Human
gacacaaagcaggaggccacauaaagacagag

SEQ ID NO: 418557 - RNA, 32 nt, Human
gacacaaaggacacgcauguccagugggcugg

SEQ ID NO: 418558 - RNA, 32 nt, Human
gacacaaauuuucaaguuuacacuucauauag

SEQ ID NO: 418559 - RNA, 32 nt, Human
gacacaacgcggagcggggcugaggggccgcc

SEQ ID NO: 418560 - RNA, 32 nt, Human
gacacaacugcacuccagcuugggcaacaggg

SEQ ID NO: 418561 - RNA, 32 nt, Human
gacacaacugccugcugccuuuccacagcuau

SEQ ID NO: 418562 - RNA, 32 nt, Human
gacacaacugggauugcugagcucaaggguug

SEQ ID NO: 418563 - RNA, 32 nt, Human
gacacaagaauuauacaguuucccucuauaag

SEQ ID NO: 418564 - RNA, 32 nt, Human
gacacaagacucccugcagcugugcuggggua

SEQ ID NO: 418565 - RNA, 32 nt, Human
gacacaagagccucacaugagaaauuaccagu

SEQ ID NO: 418566 - RNA, 32 nt, Human
gacacaagaugcccccuucauucaucaguuac

SEQ ID NO: 418567 - RNA, 22 nt, Human
gacacaagcugcagccuugucc

SEQ ID NO: 418568 - RNA, 32 nt, Human
gacacaaggacugagcuaugggcuccagcuag

SEQ ID NO: 418569 - RNA, 32 nt, Human
gacacaaggagcugcggggcuggagaaggcca

SEQ ID NO: 418570 - RNA, 32 nt, Human
gacacaaguuuaccuauguaacaaaccugcac

SEQ ID NO: 418571 - RNA, 32 nt, Human
gacacaaguuuaccuguauaacaaaccugcac

SEQ ID NO: 418572 - RNA, 32 nt, Human
gacacaauaauuauuugcaaaaugaguaaaca

SEQ ID NO: 418573 - RNA, 32 nt, Human
gacacaauagaugguuuauagacucagcagcc

SEQ ID NO: 418574 - RNA, 32 nt, Human
gacacaaucagacuuaaauaauacggaagaua

SEQ ID NO: 418575 - RNA, 32 nt, Human
gacacaaugcaguuuacuugccucuucauacc

SEQ ID NO: 418576 - RNA, 32 nt, Human
gacacaauggagagguaagacagaccacaaac

SEQ ID NO: 418577 - RNA, 23 nt, Human
gacacaauuuccacaaccuuuca

SEQ ID NO: 418578 - RNA, 32 nt, Human
gacacacaaaacaccugggaaacuggagaaca

SEQ ID NO: 418579 - RNA, 32 nt, Human
gacacacaaaggcaaacagaucugccaucgau

SEQ ID NO: 418580 - RNA, 31 nt, Human
gacacacaagucgcguggguuggagaagcca

SEQ ID NO: 418581 - RNA, 32 nt, Human
gacacacacagucuucacugugcugcagccag

SEQ ID NO: 418582 - RNA, 32 nt, Human
gacacacacaugcacgcaugcuguaugcacuu

SEQ ID NO: 418583 - RNA, 32 nt, Human
gacacacaccuguaaucucagcuacucaggag

SEQ ID NO: 418584 - RNA, 20 nt, Human
gacacacaccuguaguccca

SEQ ID NO: 418585 - RNA, 32 nt, Human
gacacacacgugguucucagugcuagggccgg

SEQ ID NO: 418586 - RNA, 23 nt, Human
gacacacacuggaggcaaacccu

SEQ ID NO: 418587 - RNA, 32 nt, Human
gacacacagacaaucccaacaucacacacugu

SEQ ID NO: 418588 - RNA, 25 nt, Human
gacacacagccuccugacuccagga

SEQ ID NO: 418589 - RNA, 23 nt, Human
gacacacauccaugacacagccu

SEQ ID NO: 418590 - RNA, 23 nt, Human
gacacacauccgugacacagccu

SEQ ID NO: 418591 - RNA, 32 nt, Human
gacacacauucugccuuggauuccuagauuac

SEQ ID NO: 418592 - RNA, 32 nt, Human
gacacaccaaagaagacucugcaucagugaag

SEQ ID NO: 418593 - RNA, 22 nt, Human
gacacaccacaccuacacuccc

SEQ ID NO: 418594 - RNA, 32 nt, Human
gacacaccacaccuaccuugggggaaugccgu

SEQ ID NO: 418595 - RNA, 32 nt, Human
gacacaccagccucucucucuagcaugguggc

SEQ ID NO: 418596 - RNA, 32 nt, Human
gacacacccaggaaggcuuuugaagucaagcc

SEQ ID NO: 418597 - RNA, 32 nt, Human
gacacaccucaguaaagagcaaaggcaacgcc

SEQ ID NO: 418598 - RNA, 32 nt, Human
gacacaccugcccuccccagccagcuccuguc

SEQ ID NO: 418599 - RNA, 32 nt, Human
gacacaccugugcacacaugccuacaggccag

SEQ ID NO: 418600 - RNA, 32 nt, Human
gacacaccuguguuaagaccagcccucugcuu

SEQ ID NO: 418601 - RNA, 32 nt, Human
gacacaccuuuauguauguaacaaaccagcac

SEQ ID NO: 418602 - RNA, 32 nt, Human
gacacacgcccguaaucccagcuacucaggag

SEQ ID NO: 418603 - RNA, 32 nt, Human
gacacacgccuguaaucccagcugcucgggag

SEQ ID NO: 418604 - RNA, 32 nt, Human
gacacacgcggagaggaggagaggcugaggga

SEQ ID NO: 418605 - RNA, 32 nt, Human
gacacacucacacucucaucucuuuccuuggc

SEQ ID NO: 418606 - RNA, 32 nt, Human
gacacacuccuauaauccuagcacuuugggag

SEQ ID NO: 418607 - RNA, 32 nt, Human
gacacacugcugugacugccucuuguuaaugu

SEQ ID NO: 418608 - RNA, 32 nt, Human
gacacagaagaguucaugugcagugauguggg

SEQ ID NO: 418609 - RNA, 22 nt, Human
gacacagaaggcugccgggugg

SEQ ID NO: 418610 - RNA, 32 nt, Human
gacacagaagugaagucugugucugugcacuu

SEQ ID NO: 418611 - RNA, 32 nt, Human
gacacagaauaguuuacacacuguguggggga

SEQ ID NO: 418612 - RNA, 32 nt, Human
gacacagacacaaagcaggaggccacauaaag

SEQ ID NO: 418613 - RNA, 32 nt, Human
gacacagacagcccuggcugaaaggagcacag

SEQ ID NO: 418614 - RNA, 32 nt, Human
gacacagacauggacauggacacagaaaccac

SEQ ID NO: 418615 - RNA, 32 nt, Human
gacacagacuucugagguggcagcgggaggga

SEQ ID NO: 418616 - RNA, 32 nt, Human
gacacagagacacccacccagcacaccagaca

SEQ ID NO: 418617 - RNA, 32 nt, Human
gacacagagacaccucuggcuaccuagaguuc

SEQ ID NO: 418618 - RNA, 32 nt, Human
gacacagagauccccuagguccuggcccaggc

SEQ ID NO: 418619 - RNA, 32 nt, Human
gacacagagcacagcugugcuggaaguguggg

SEQ ID NO: 418620 - RNA, 32 nt, Human
gacacagagcccagagggacagcgcccagagc

SEQ ID NO: 418621 - RNA, 32 nt, Human
gacacagaggcucagagagaauaaccuccauc

SEQ ID NO: 418622 - RNA, 32 nt, Human
gacacagaggggcaguagaggcugcaggcguc

SEQ ID NO: 418623 - RNA, 32 nt, Human
gacacagaugaugagacagaguuuagggugca

SEQ ID NO: 418624 - RNA, 32 nt, Human
gacacagcagcaauaaacuuacaaguaaaauu

SEQ ID NO: 418625 - RNA, 32 nt, Human
gacacagcauaauguuuggcuaaugccaccag

SEQ ID NO: 418626 - RNA, 32 nt, Human
gacacagcaucacaucacacacacagaaauua

SEQ ID NO: 418627 - RNA, 32 nt, Human
gacacagccacuucuggugguuaccacucacc

SEQ ID NO: 418628 - RNA, 32 nt, Human
gacacagccauggcccagccccaaggccaggc

SEQ ID NO: 418629 - RNA, 32 nt, Human
gacacagccucaccagcccaugcucggccaga

SEQ ID NO: 418630 - RNA, 32 nt, Human
gacacagcgccuucccuucaggaguugcgucu

SEQ ID NO: 418631 - RNA, 23 nt, Human
gacacagcuaccucuguuggcau

SEQ ID NO: 418632 - RNA, 32 nt, Human
gacacagcucagcuugcucacgcccagagaga

SEQ ID NO: 418633 - RNA, 17 nt, Human
gacacagcugggucugg

SEQ ID NO: 418634 - RNA, 18 nt, Human
gacacagcuggguucuga

SEQ ID NO: 418635 - RNA, 32 nt, Human
gacacagcuguggaggucacagcugcuccuuu

SEQ ID NO: 418636 - RNA, 32 nt, Human
gacacaggaccagggagggagccccagaggca

SEQ ID NO: 418637 - RNA, 32 nt, Human
gacacaggagaaagccgccuccgcuggaggcc

SEQ ID NO: 418638 - RNA, 32 nt, Human
gacacaggaggaaccccuucucugguugagcu

SEQ ID NO: 418639 - RNA, 32 nt, Human
gacacaggagggcugggcuccacuucauccag

SEQ ID NO: 418640 - RNA, 32 nt, Human
gacacaggaguguugccauguuguccaaacug

SEQ ID NO: 418641 - RNA, 32 nt, Human
gacacaggauccuggccugagaauugagggga

SEQ ID NO: 418642 - RNA, 24 nt, Human
gacacaggcaaaccuuauuacuau

SEQ ID NO: 418643 - RNA, 32 nt, Human
gacacaggccagcuccacaguguugccagagc

SEQ ID NO: 418644 - RNA, 32 nt, Human
gacacaggccuguggucccaggaaaaggucug

SEQ ID NO: 418645 - RNA, 32 nt, Human
gacacaggcuggguuggucugccccucaguca

SEQ ID NO: 418646 - RNA, 32 nt, Human
gacacagggaagcacugcccagccccugccug

SEQ ID NO: 418647 - RNA, 32 nt, Human
gacacagggaucuucugaaguugcuuugaauc

SEQ ID NO: 418648 - RNA, 32 nt, Human
gacacagggcccuaugguccuacugugggugg

SEQ ID NO: 418649 - RNA, 22 nt, Human
gacacagggucucaccauguug

SEQ ID NO: 418650 - RNA, 18 nt, Human
gacacaggguuucaccau

SEQ ID NO: 418651 - RNA, 18 nt, Human
gacacagguccacaggga

SEQ ID NO: 418652 - RNA, 32 nt, Human
gacacaggugagggagguaaugggggagcccu

SEQ ID NO: 418653 - RNA, 18 nt, Human
gacacagucucgcuuugu

SEQ ID NO: 418654 - RNA, 32 nt, Human
gacacauacauccuaaaagcaccacagcagag

SEQ ID NO: 418655 - RNA, 32 nt, Human
gacacauaggacacaggaauuccuggguccuu

SEQ ID NO: 418656 - RNA, 32 nt, Human
gacacauaguaaggagaauggaauaauacaug

SEQ ID NO: 418657 - RNA, 32 nt, Human
gacacauaguaaucucuaaggugcaaaacaca

SEQ ID NO: 418658 - RNA, 32 nt, Human
gacacauauggacacacauauggacacgugug

SEQ ID NO: 418659 - RNA, 32 nt, Human
gacacauauguacguaauuucuccaauguuua

SEQ ID NO: 418660 - RNA, 32 nt, Human
gacacauccuccuaccguccccaaaucccccu

SEQ ID NO: 418661 - RNA, 32 nt, Human
gacacaucuccugagggaucccagaaagaacc

SEQ ID NO: 418662 - RNA, 32 nt, Human
gacacaucucuaguacuuuuugucauaaacaa

SEQ ID NO: 418663 - RNA, 32 nt, Human
gacacaucuggggacagucuccuuccuggagg

SEQ ID NO: 418664 - RNA, 32 nt, Human
gacacaugagcagccccgacaggccuggcucc

SEQ ID NO: 418665 - RNA, 32 nt, Human
gacacaugagcccagccccagcucaccugcca

SEQ ID NO: 418666 - RNA, 32 nt, Human
gacacaugcacacacaucacacccucaaacac

SEQ ID NO: 418667 - RNA, 32 nt, Human
gacacaugccuguaaucccagcaacucaggag

SEQ ID NO: 418668 - RNA, 32 nt, Human
gacacaugccuguagucccagcuacucaggag

SEQ ID NO: 418669 - RNA, 32 nt, Human
gacacaugccuguaguccuagcuacuugggag

SEQ ID NO: 418670 - RNA, 19 nt, Human
gacacauggcaaauguuga

SEQ ID NO: 418671 - RNA, 24 nt, Human
gacacauggccccucccccugcca

SEQ ID NO: 418672 - RNA, 32 nt, Human
gacacauggcugcuuggccugccacguguggg

SEQ ID NO: 418673 - RNA, 32 nt, Human
gacacauguauucucaucugugguccaggccg

SEQ ID NO: 418674 - RNA, 32 nt, Human
gacacauuaauuagcuugauuaauuuagauua

SEQ ID NO: 418675 - RNA, 24 nt, Human
gacacauuuugccuacacuugcua

SEQ ID NO: 418676 - RNA, 26 nt, Human
gacacauuuuuacccuucauucccau

SEQ ID NO: 418677 - RNA, 32 nt, Human
gacaccaaagcaugagcaacaaaaggaagaau

SEQ ID NO: 418678 - RNA, 32 nt, Human
gacaccaaaugagggacauggaaaggggugag

SEQ ID NO: 418679 - RNA, 21 nt, Human
gacaccaaauuaugguguaga

SEQ ID NO: 418680 - RNA, 32 nt, Human
gacaccaaggcaggaggcuaggaggucuacaa

SEQ ID NO: 418681 - RNA, 32 nt, Human
gacaccaaggcuguggucugugcagugaaucg

SEQ ID NO: 418682 - RNA, 32 nt, Human
gacaccaagggcccauuuccuccccucucuac

SEQ ID NO: 418683 - RNA, 32 nt, Human
gacaccaagguggguggaucaccugaggucag

SEQ ID NO: 418684 - RNA, 32 nt, Human
gacaccaaugaaccccagccagccuggacccc

SEQ ID NO: 418685 - RNA, 32 nt, Human
gacaccaaugaaccccagucagccuggacccc

SEQ ID NO: 418686 - RNA, 32 nt, Human
gacaccaauggcccacgaaaucugcuacuccg

SEQ ID NO: 418687 - RNA, 32 nt, Human
gacaccacaauugugccuucugugggccaggc

SEQ ID NO: 418688 - RNA, 32 nt, Human
gacaccacaggggcaccugcaggcugggagac

SEQ ID NO: 418689 - RNA, 32 nt, Human
gacaccacaggugcccuggagcccuuguguga

SEQ ID NO: 418690 - RNA, 32 nt, Human
gacaccaccaacaacagaaagaucagaguuaa

SEQ ID NO: 418691 - RNA, 32 nt, Human
gacaccaccaggcaccucccuaggcaacgcca

SEQ ID NO: 418692 - RNA, 32 nt, Human
gacaccaccaugaccggcuccugcugcggcuc

SEQ ID NO: 418693 - RNA, 32 nt, Human
gacaccaccccuggcugggcuacugggcucag

SEQ ID NO: 418694 - RNA, 32 nt, Human
gacaccaccgacuuccuuucugcgucaccagu

SEQ ID NO: 418695 - RNA, 32 nt, Human
gacaccaccugcccaugcuuccuugaauuagg

SEQ ID NO: 418696 - RNA, 32 nt, Human
gacaccaccugcuugcauucauccccuccucc

SEQ ID NO: 418697 - RNA, 23 nt, Human
gacaccaccugucaaagcugccu

SEQ ID NO: 418698 - RNA, 32 nt, Human
gacaccacgccacugcacuccagccuggguga

SEQ ID NO: 418699 - RNA, 32 nt, Human
gacaccacgugcuccuccuaagccaaaaacau

SEQ ID NO: 418700 - RNA, 32 nt, Human
gacaccacugcacuccaaccuagguaacagag

SEQ ID NO: 418701 - RNA, 32 nt, Human
gacaccacugcacuccagccugggugacagag

SEQ ID NO: 418702 - RNA, 32 nt, Human
gacaccagaaaauucauacucacuaaaacccc

SEQ ID NO: 418703 - RNA, 32 nt, Human
gacaccagaaagucugguggcuuuggucccaa

SEQ ID NO: 418704 - RNA, 32 nt, Human
gacaccagaauggagcgcaggagcagcacgug

SEQ ID NO: 418705 - RNA, 32 nt, Human
gacaccagaggacacacacagugcuguggcuu

SEQ ID NO: 418706 - RNA, 32 nt, Human
gacaccagaucuaugguccaggagauggagag

SEQ ID NO: 418707 - RNA, 32 nt, Human
gacaccagcagauccccaggggcugcugggca

SEQ ID NO: 418708 - RNA, 32 nt, Human
gacaccagccaucaugugccuggaaauuaaac

SEQ ID NO: 418709 - RNA, 32 nt, Human
gacaccagcccuguccuagcccuucaguaaga

SEQ ID NO: 418710 - RNA, 32 nt, Human
gacaccagccugggcaacauagugagaccuug

SEQ ID NO: 418711 - RNA, 32 nt, Human
gacaccagccugggcaacaugguaagaccccu

SEQ ID NO: 418712 - RNA, 32 nt, Human
gacaccagcgucuccggcagccucuuggucau

SEQ ID NO: 418713 - RNA, 32 nt, Human
gacaccagcugaagacuggaaggguggaagga

SEQ ID NO: 418714 - RNA, 32 nt, Human
gacaccaggaagaggacaaacugcauggacuc

SEQ ID NO: 418715 - RNA, 32 nt, Human
gacaccaggaggucagggcacagaggacgugc

SEQ ID NO: 418716 - RNA, 32 nt, Human
gacaccaggaguuagagagcagccugggcaac

SEQ ID NO: 418717 - RNA, 32 nt, Human
gacaccaggccccauguggcccccaggccuuu

SEQ ID NO: 418718 - RNA, 32 nt, Human
gacaccagggagagacagagacagagaugaca

SEQ ID NO: 418719 - RNA, 32 nt, Human
gacaccaggguggguggaucaccugaggucag

SEQ ID NO: 418720 - RNA, 32 nt, Human
gacaccagguuggagaggcaccugccaacuac

SEQ ID NO: 418721 - RNA, 32 nt, Human
gacaccagugaaccccagucagccuggacccc

SEQ ID NO: 418722 - RNA, 24 nt, Human
gacaccagugggcccaggaccugg

SEQ ID NO: 418723 - RNA, 21 nt, Human
gacaccaguucccuacaagca

SEQ ID NO: 418724 - RNA, 22 nt, Human
gacaccauaagccacagccuca

SEQ ID NO: 418725 - RNA, 32 nt, Human
gacaccauagccacugcccccuccccuggaug

SEQ ID NO: 418726 - RNA, 32 nt, Human
gacaccaucacgggcaugcacagcguggaggu

SEQ ID NO: 418727 - RNA, 19 nt, Human
gacaccaucuuuuauucuu

SEQ ID NO: 418728 - RNA, 32 nt, Human
gacaccaugaaaggcugcucuuaacuuugucu

SEQ ID NO: 418729 - RNA, 32 nt, Human
gacaccaugacagcaaaaggacugggacugau

SEQ ID NO: 418730 - RNA, 32 nt, Human
gacaccaugagccaccaccgcugacugacuuu

SEQ ID NO: 418731 - RNA, 32 nt, Human
gacaccaugucccaggacaguguuacuucuuc

SEQ ID NO: 418732 - RNA, 32 nt, Human
gacaccaugucuuccucuuccucucucuucca

SEQ ID NO: 418733 - RNA, 24 nt, Human
gacaccauucauuccugcuccaua

SEQ ID NO: 418734 - RNA, 32 nt, Human
gacaccauuggaccccacccagccuggaucua

SEQ ID NO: 418735 - RNA, 32 nt, Human
gacaccauugucucccuuuaaucuucucuuuu

SEQ ID NO: 418736 - RNA, 32 nt, Human
gacaccauuucaccugagaccaauaggugcac

SEQ ID NO: 418737 - RNA, 23 nt, Human
gacacccaagcuugucacccgcu

SEQ ID NO: 418738 - RNA, 32 nt, Human
gacacccaaugccauccccaagggcuucaugg

SEQ ID NO: 418739 - RNA, 32 nt, Human
gacacccaaugucuacaaucaaaaagauaaua

SEQ ID NO: 418740 - RNA, 32 nt, Human
gacacccacaccccuguauucuccuccgaacc

SEQ ID NO: 418741 - RNA, 32 nt, Human
gacacccacuccuagcccugaggcucgugccc

SEQ ID NO: 418742 - RNA, 32 nt, Human
gacacccacugccucugugaccuugggugggu

SEQ ID NO: 418743 - RNA, 32 nt, Human
gacacccaggagacgcagugucagagcgugug

SEQ ID NO: 418744 - RNA, 21 nt, Human
gacacccaggccacccugccu

SEQ ID NO: 418745 - RNA, 32 nt, Human
gacacccaucaccaccaccaccacggugaccc

SEQ ID NO: 418746 - RNA, 32 nt, Human
gacacccaucuccaccaccacuacggugaccc

SEQ ID NO: 418747 - RNA, 32 nt, Human
gacacccauucaacccuucagacucccuccug

SEQ ID NO: 418748 - RNA, 32 nt, Human
gacaccccacacccccugccugaauggauggg

SEQ ID NO: 418749 - RNA, 32 nt, Human
gacaccccagaucuucucaacuggaaccacga

SEQ ID NO: 418750 - RNA, 32 nt, Human
gacaccccagcugcucuggcaaggaugggcag

SEQ ID NO: 418751 - RNA, 32 nt, Human
gacacccccagaaucccuccccagagacugca

SEQ ID NO: 418752 - RNA, 32 nt, Human
gacacccccagcccggucagagucacacgggg

SEQ ID NO: 418753 - RNA, 32 nt, Human
gacacccccuccuccaccuucaaugcuggggc

SEQ ID NO: 418754 - RNA, 32 nt, Human
gacacccccugggauggcucaaaggagucagg

SEQ ID NO: 418755 - RNA, 32 nt, Human
gacacccccuuacuagcccccaacacacagaa

SEQ ID NO: 418756 - RNA, 32 nt, Human
gacaccccgaguugugcuucaugagaguugga

SEQ ID NO: 418757 - RNA, 32 nt, Human
gacaccccucuccaccccuccugcuuccccag

SEQ ID NO: 418758 - RNA, 32 nt, Human
gacaccccugcacugccuucugggugugccag

SEQ ID NO: 418759 - RNA, 32 nt, Human
gacaccccuuucuccaccugcuccuccuccuc

SEQ ID NO: 418760 - RNA, 32 nt, Human
gacacccgaccacaccagagcgugggagacgg

SEQ ID NO: 418761 - RNA, 23 nt, Human
gacacccgccguuucacccagcc

SEQ ID NO: 418762 - RNA, 17 nt, Human
gacacccgcgcuggcug

SEQ ID NO: 418763 - RNA, 32 nt, Human
gacacccggcaccauucucccuucucucuuuu

SEQ ID NO: 418764 - RNA, 32 nt, Human
gacacccguuccccugcaucaucugucuugcg

SEQ ID NO: 418765 - RNA, 32 nt, Human
gacacccucagccaagggacagugccauccuu

SEQ ID NO: 418766 - RNA, 21 nt, Human
gacacccucuuaacuccggga

SEQ ID NO: 418767 - RNA, 32 nt, Human
gacacccugcuaggcucuguagauggauguau

SEQ ID NO: 418768 - RNA, 32 nt, Human
gacacccuggcuggcccugacugacuguauuc

SEQ ID NO: 418769 - RNA, 32 nt, Human
gacacccugggccuuccuggaagccugcaguu

SEQ ID NO: 418770 - RNA, 32 nt, Human
gacacccuugaagauuuggccugggccaguga

SEQ ID NO: 418771 - RNA, 32 nt, Human
gacacccuuuguaacucucuucuccucccuag

SEQ ID NO: 418772 - RNA, 32 nt, Human
gacaccgaagcagaggauacaggaggauuaaa

SEQ ID NO: 418773 - RNA, 32 nt, Human
gacaccgaauagagagugaauuucaaaggauu

SEQ ID NO: 418774 - RNA, 32 nt, Human
gacaccgaguccuagcuaggcgcucacagaau

SEQ ID NO: 418775 - RNA, 32 nt, Human
gacaccgaugugggauacguucugaguaguug

SEQ ID NO: 418776 - RNA, 32 nt, Human
gacaccgcagcgcuugcccugcgccagggacu

SEQ ID NO: 418777 - RNA, 32 nt, Human
gacaccgcaggcagagguugcucggggccuug

SEQ ID NO: 418778 - RNA, 32 nt, Human
gacaccgcaguucuguucagccaucagaagag

SEQ ID NO: 418779 - RNA, 32 nt, Human
gacaccgcuccuccaggucuccauaauugucu

SEQ ID NO: 418780 - RNA, 17 nt, Human
gacaccgcuggcugcug

SEQ ID NO: 418781 - RNA, 32 nt, Human
gacaccggauuuguuucuuauuccuucacuuu

SEQ ID NO: 418782 - RNA, 32 nt, Human
gacaccggguucacgagcugcccacgcccucu

SEQ ID NO: 418783 - RNA, 32 nt, Human
gacaccggucucugcugaggcucccagccuca

SEQ ID NO: 418784 - RNA, 32 nt, Human
gacaccgugaugagacuggcccccaaggcagc

SEQ ID NO: 418785 - RNA, 32 nt, Human
gacaccguggccuggaggguggcaugguccca

SEQ ID NO: 418786 - RNA, 32 nt, Human
gacaccuaaggggacuuccuuacaacaccuug

SEQ ID NO: 418787 - RNA, 32 nt, Human
gacaccuaagugccuccccaaccagggucugu

SEQ ID NO: 418788 - RNA, 32 nt, Human
gacaccucaaccagaaggaaucuuaacagcaa

SEQ ID NO: 418789 - RNA, 32 nt, Human
gacaccucacagaguggggaggacggaggcug

SEQ ID NO: 418790 - RNA, 20 nt, Human
gacaccuccaccaaaccucc

SEQ ID NO: 418791 - RNA, 22 nt, Human
gacaccucccaaccccacccca

SEQ ID NO: 418792 - RNA, 17 nt, Human
gacaccucccagcgugg

SEQ ID NO: 418793 - RNA, 24 nt, Human
gacaccucccagcgugggacccca

SEQ ID NO: 418794 - RNA, 22 nt, Human
gacaccucccaggggacuguuc

SEQ ID NO: 418795 - RNA, 24 nt, Human
gacaccucccaguguucaccuaca

SEQ ID NO: 418796 - RNA, 32 nt, Human
gacaccuccgagagaguggagggaaaaugugu

SEQ ID NO: 418797 - RNA, 24 nt, Human
gacaccuccucucuggauccucca

SEQ ID NO: 418798 - RNA, 32 nt, Human
gacaccuccuugggacacugggauuauucaua

SEQ ID NO: 418799 - RNA, 32 nt, Human
gacaccucuccucugcugccauacucucccuu

SEQ ID NO: 418800 - RNA, 32 nt, Human
gacaccucugcacucccuugggcagagauggg

SEQ ID NO: 418801 - RNA, 32 nt, Human
gacaccucugcaggauuggcccccaggaucgc

SEQ ID NO: 418802 - RNA, 32 nt, Human
gacaccucuuucucauucauucuccuuuuccc

SEQ ID NO: 418803 - RNA, 32 nt, Human
gacaccugaccuuuugaagcuucauaauucac

SEQ ID NO: 418804 - RNA, 32 nt, Human
gacaccugcaaaauaaguucugccugggcauu

SEQ ID NO: 418805 - RNA, 32 nt, Human
gacaccugcagccuuuggucuccuggaugggc

SEQ ID NO: 418806 - RNA, 32 nt, Human
gacaccugcucuguaacugucuuucccacuga

SEQ ID NO: 418807 - RNA, 32 nt, Human
gacaccugcucuguaacugucuuucccgcuga

SEQ ID NO: 418808 - RNA, 32 nt, Human
gacaccugcuucugauuccacaaggggcuuuu

SEQ ID NO: 418809 - RNA, 32 nt, Human
gacaccuggaaugggagcuuguaacuuuuaca

SEQ ID NO: 418810 - RNA, 32 nt, Human
gacaccuggauaccaaaugcaggaugaggagu

SEQ ID NO: 418811 - RNA, 32 nt, Human
gacaccuggaugacauuucaguacccgcuggc

SEQ ID NO: 418812 - RNA, 32 nt, Human
gacaccuggaugcugcucagcgggcccuguac

SEQ ID NO: 418813 - RNA, 32 nt, Human
gacaccugggccucaggcagagcccagcccug

SEQ ID NO: 418814 - RNA, 19 nt, Human
gacaccugggcugggcugg

SEQ ID NO: 418815 - RNA, 32 nt, Human
gacaccuggucugcccaggccugccucccuuc

SEQ ID NO: 418816 - RNA, 16 nt, Human
gacaccuguaauccca

SEQ ID NO: 418817 - RNA, 32 nt, Human
gacaccuguaaucccagcuacuagggaggcug

SEQ ID NO: 418818 - RNA, 16 nt, Human
gacaccuguaguccca

SEQ ID NO: 418819 - RNA, 32 nt, Human
gacaccuguagucccagcuacuuggagggcag

SEQ ID NO: 418820 - RNA, 32 nt, Human
gacaccuguagucccagcugcuugggaggcug

SEQ ID NO: 418821 - RNA, 32 nt, Human
gacaccuguggacucccuaagagccgcggguu

SEQ ID NO: 418822 - RNA, 32 nt, Human
gacaccuguggucccagcuauucgggaggcug

SEQ ID NO: 418823 - RNA, 32 nt, Human
gacaccuuccagcccuaccaucagcugaaugc

SEQ ID NO: 418824 - RNA, 32 nt, Human
gacaccuucccacaccuguaaucucagcacuu

SEQ ID NO: 418825 - RNA, 32 nt, Human
gacaccuucuucuacuccuacuuccggucccu

SEQ ID NO: 418826 - RNA, 32 nt, Human
gacaccuucuuucugggcucaaguauccugcc

SEQ ID NO: 418827 - RNA, 32 nt, Human
gacaccuugcagcugccgccgccgccaccgag

SEQ ID NO: 418828 - RNA, 32 nt, Human
gacaccuugggccuucuuuuccagucaggugg

SEQ ID NO: 418829 - RNA, 32 nt, Human
gacaccuuguguuuaggaucaucucugcaggu

SEQ ID NO: 418830 - RNA, 32 nt, Human
gacaccuuugaccaaaugccuucuaugguuca

SEQ ID NO: 418831 - RNA, 32 nt, Human
gacacgaacucagguccuuucaucucauccau

SEQ ID NO: 418832 - RNA, 32 nt, Human
gacacgaaugcaccuucucuuugcuaccaaca

SEQ ID NO: 418833 - RNA, 32 nt, Human
gacacgacacucacccggagaaacccagcaag

SEQ ID NO: 418834 - RNA, 32 nt, Human
gacacgagaaaagacaggcuguggauucagug

SEQ ID NO: 418835 - RNA, 32 nt, Human
gacacgagaccuguaagcagguggugagaagu

SEQ ID NO: 418836 - RNA, 32 nt, Human
gacacgaggcacagaaaacaaauaucaaagau

SEQ ID NO: 418837 - RNA, 32 nt, Human
gacacgaguuaaccuauguaacaaaccugcau

SEQ ID NO: 418838 - RNA, 32 nt, Human
gacacgauggcagccaaacugcagcuucaaac

SEQ ID NO: 418839 - RNA, 32 nt, Human
gacacgcagcgcuugcggcaguacaaugcccc

SEQ ID NO: 418840 - RNA, 32 nt, Human
gacacgcaggagguggggaugcgcgugcggcu

SEQ ID NO: 418841 - RNA, 32 nt, Human
gacacgccaagucccguuucgcacucggcuuc

SEQ ID NO: 418842 - RNA, 32 nt, Human
gacacgccccuucggacaugcgcaguguagcc

SEQ ID NO: 418843 - RNA, 32 nt, Human
gacacgcccuacccccuucucuuccaaguuuc

SEQ ID NO: 418844 - RNA, 32 nt, Human
gacacgccuccaccauaugcucauccuuccug

SEQ ID NO: 418845 - RNA, 32 nt, Human
gacacgccuuugaccagaacugcaacauuuca

SEQ ID NO: 418846 - RNA, 32 nt, Human
gacacggcacuucaggcuccacgcacagaauc

SEQ ID NO: 418847 - RNA, 32 nt, Human
gacacggccgcaccugccccaaagcgggccgc

SEQ ID NO: 418848 - RNA, 32 nt, Human
gacacggccguggagcuggagcucccaggaua

SEQ ID NO: 418849 - RNA, 32 nt, Human
gacacgggacaagaacuugggaacugccauac

SEQ ID NO: 418850 - RNA, 32 nt, Human
gacacggggguuucuccacguuggccaggcug

SEQ ID NO: 418851 - RNA, 32 nt, Human
gacacggugaaauccaggucucggguccgauu

SEQ ID NO: 418852 - RNA, 32 nt, Human
gacacggugcugcugcugcacggccuaucgca

SEQ ID NO: 418853 - RNA, 21 nt, Human
gacacgguuugcaaaguugga

SEQ ID NO: 418854 - RNA, 32 nt, Human
gacacgucuucccugugaaaggcacaggaaga

SEQ ID NO: 418855 - RNA, 32 nt, Human
gacacgugaaccaccauugcugggguuccagc

SEQ ID NO: 418856 - RNA, 32 nt, Human
gacacgugagcugaguuugaagaaaaaguuaa

SEQ ID NO: 418857 - RNA, 32 nt, Human
gacacgugccuguagucccagcuacucgggag

SEQ ID NO: 418858 - RNA, 32 nt, Human
gacacgugccuguagucccagcuacucuggag

SEQ ID NO: 418859 - RNA, 32 nt, Human
gacacguggcagccacacucacccagccucuu

SEQ ID NO: 418860 - RNA, 21 nt, Human
gacacgugggcacuggugugg

SEQ ID NO: 418861 - RNA, 32 nt, Human
gacacguggucuguccuucaaggccuccuccg

SEQ ID NO: 418862 - RNA, 32 nt, Human
gacacguguccaugcaccacagacacacccac

SEQ ID NO: 418863 - RNA, 32 nt, Human
gacacguguuuaccuauguagaaaccuucaua

SEQ ID NO: 418864 - RNA, 32 nt, Human
gacacuaacacuaggaaugacagaagucaauc

SEQ ID NO: 418865 - RNA, 32 nt, Human
gacacuaacgaaauaucaaagucauuaaagac

SEQ ID NO: 418866 - RNA, 32 nt, Human
gacacuaaguguccuggcaaggguuucagggu

SEQ ID NO: 418867 - RNA, 32 nt, Human
gacacuacaaaugccagcucucaccagauggc

SEQ ID NO: 418868 - RNA, 32 nt, Human
gacacuacaaguggcccacagggagccuuucg

SEQ ID NO: 418869 - RNA, 32 nt, Human
gacacuacccuuaguuuuaauuuucccugaca

SEQ ID NO: 418870 - RNA, 24 nt, Human
gacacuagaagcaccguggccugg

SEQ ID NO: 418871 - RNA, 20 nt, Human
gacacuagaauccugaccug

SEQ ID NO: 418872 - RNA, 32 nt, Human
gacacuaggaacagcuucaugaguucaguaga

SEQ ID NO: 418873 - RNA, 32 nt, Human
gacacuaggggccuuacauggccaggucucau

SEQ ID NO: 418874 - RNA, 32 nt, Human
gacacucaagcucucuggaaagguucagaaau

SEQ ID NO: 418875 - RNA, 32 nt, Human
gacacucaggcaggcuggcuuagucuuugugc

SEQ ID NO: 418876 - RNA, 32 nt, Human
gacacucaguuguguggggugcugcagucaua

SEQ ID NO: 418877 - RNA, 32 nt, Human
gacacucaucgaggagcuucacugugcgggac

SEQ ID NO: 418878 - RNA, 24 nt, Human
gacacuccaacucuacacagcuca

SEQ ID NO: 418879 - RNA, 32 nt, Human
gacacuccaagaagcugcgggaaggacagcag

SEQ ID NO: 418880 - RNA, 32 nt, Human
gacacuccugccgguaguuuagggccgagacg

SEQ ID NO: 418881 - RNA, 32 nt, Human
gacacucgucgagggccucugcgggacugucu

SEQ ID NO: 418882 - RNA, 32 nt, Human
gacacucucaaaggucuucucggauggaaguc

SEQ ID NO: 418883 - RNA, 32 nt, Human
gacacucucguucugucacccaggcuggagug

SEQ ID NO: 418884 - RNA, 32 nt, Human
gacacucucucugaguagugcuuuaccauuuu

SEQ ID NO: 418885 - RNA, 32 nt, Human
gacacucugcaggagaccaagagaagggggaa

SEQ ID NO: 418886 - RNA, 32 nt, Human
gacacucugucacccaggcuggagugcaaugg

SEQ ID NO: 418887 - RNA, 32 nt, Human
gacacugaaauggauucuuggaaagauucuga

SEQ ID NO: 418888 - RNA, 32 nt, Human
gacacugaagacccucagcuguuuccaucugc

SEQ ID NO: 418889 - RNA, 32 nt, Human
gacacugaauguguguuuuggaaaaauggacu

SEQ ID NO: 418890 - RNA, 32 nt, Human
gacacugacuccucaaccccugugcucagccg

SEQ ID NO: 418891 - RNA, 32 nt, Human
gacacugagcuucaucaggcccucccugggua

SEQ ID NO: 418892 - RNA, 32 nt, Human
gacacugaggauuguggagcugagugacacca

SEQ ID NO: 418893 - RNA, 32 nt, Human
gacacugagggcuccuagccgcagcagacuuc

SEQ ID NO: 418894 - RNA, 32 nt, Human
gacacugagugugacuucuguccuccauuugu

SEQ ID NO: 418895 - RNA, 32 nt, Human
gacacugaucacuaaaugaauggaugaucuac

SEQ ID NO: 418896 - RNA, 32 nt, Human
gacacugaucacugcguccccugcagcagaug

SEQ ID NO: 418897 - RNA, 32 nt, Human
gacacugcagccagggggccagaaggacugac

SEQ ID NO: 418898 - RNA, 32 nt, Human
gacacugcauguugauguugaaucaacugaug

SEQ ID NO: 418899 - RNA, 32 nt, Human
gacacugccacucuccccauuggcaccgcuuc

SEQ ID NO: 418900 - RNA, 32 nt, Human
gacacugccacugauucuccagugcauguugg

SEQ ID NO: 418901 - RNA, 32 nt, Human
gacacugccaucaucaucccaaggcaggcugc

SEQ ID NO: 418902 - RNA, 32 nt, Human
gacacugccccucccccgaccugggcccacac

SEQ ID NO: 418903 - RNA, 32 nt, Human
gacacugcccuccagccugggugacagaguga

SEQ ID NO: 418904 - RNA, 32 nt, Human
gacacugcucaggaagcaguagacccugucag

SEQ ID NO: 418905 - RNA, 32 nt, Human
gacacugcucuuccuacuuccuccucuccugg

SEQ ID NO: 418906 - RNA, 32 nt, Human
gacacugcuggugggagcaggaaggagcagug

SEQ ID NO: 418907 - RNA, 32 nt, Human
gacacuggaaauguucaacuguaguuuuauua

SEQ ID NO: 418908 - RNA, 32 nt, Human
gacacuggaccugccuuggcuucuuugauccc

SEQ ID NO: 418909 - RNA, 32 nt, Human
gacacuggcagcuguggaaaugaaugaggcac

SEQ ID NO: 418910 - RNA, 32 nt, Human
gacacuggccucgggauagccaugggcaagcu

SEQ ID NO: 418911 - RNA, 32 nt, Human
gacacugggaacugggcugucuagccggguau

SEQ ID NO: 418912 - RNA, 32 nt, Human
gacacugggaccccgaucccagccuccacucc

SEQ ID NO: 418913 - RNA, 32 nt, Human
gacacugggaggucagcauguuccacaggugu

SEQ ID NO: 418914 - RNA, 32 nt, Human
gacacugggcaggucaugggucgggggccucc

SEQ ID NO: 418915 - RNA, 32 nt, Human
gacacugggggugggaggcccugcagggaaac

SEQ ID NO: 418916 - RNA, 32 nt, Human
gacacugggguccuuccaucucuggggcccac

SEQ ID NO: 418917 - RNA, 32 nt, Human
gacacugggucugaggcuuuugaggacaguca

SEQ ID NO: 418918 - RNA, 21 nt, Human
gacacuguagaacauaacuca

SEQ ID NO: 418919 - RNA, 32 nt, Human
gacacugucacagcggaugacagacuuucuac

SEQ ID NO: 418920 - RNA, 32 nt, Human
gacacugucaucugcauuuaaucaagacuucu

SEQ ID NO: 418921 - RNA, 32 nt, Human
gacacugucggggcagcuggggccacaagcag

SEQ ID NO: 418922 - RNA, 32 nt, Human
gacacugugggauguuuagcggcagccuuggc

SEQ ID NO: 418923 - RNA, 16 nt, Human
gacacugugggucuga

SEQ ID NO: 418924 - RNA, 32 nt, Human
gacacugugugggcauauggaacagagcaacc

SEQ ID NO: 418925 - RNA, 32 nt, Human
gacacuguuccggacucguaccagccuguuua

SEQ ID NO: 418926 - RNA, 32 nt, Human
gacacuguuccugccagcuccggucuuggaaa

SEQ ID NO: 418927 - RNA, 32 nt, Human
gacacuguugcaugccccagaaagcuuguggu

SEQ ID NO: 418928 - RNA, 32 nt, Human
gacacuuacagauugagcuguaugaauucagc

SEQ ID NO: 418929 - RNA, 32 nt, Human
gacacuuacugauuaauuuuuaacaagguaga

SEQ ID NO: 418930 - RNA, 32 nt, Human
gacacuuagaaaacagauaacagccccuccau

SEQ ID NO: 418931 - RNA, 32 nt, Human
gacacuuagaucuaggaaguuuuuguagaacu

SEQ ID NO: 418932 - RNA, 32 nt, Human
gacacuuaguaagccuagccuuuaaccaucuu

SEQ ID NO: 418933 - RNA, 18 nt, Human
gacacuucaauaaagcua

SEQ ID NO: 418934 - RNA, 32 nt, Human
gacacuuccagagagcugcaccagagaccaac

SEQ ID NO: 418935 - RNA, 32 nt, Human
gacacuucccagcgauuccagccugggcuccg

SEQ ID NO: 418936 - RNA, 21 nt, Human
gacacuucuaucagcaguguu

SEQ ID NO: 418937 - RNA, 32 nt, Human
gacacuucucuccucagacuucaagggcuacc

SEQ ID NO: 418938 - RNA, 32 nt, Human
gacacuuggcgcccuuuuccagccucaauggc

SEQ ID NO: 418939 - RNA, 32 nt, Human
gacacuugggaacuuucagguacucuguacac

SEQ ID NO: 418940 - RNA, 32 nt, Human
gacacuugggguccacaaucccagguccauac

SEQ ID NO: 418941 - RNA, 16 nt, Human
gacacuuggggucugg

SEQ ID NO: 418942 - RNA, 16 nt, Human
gacacuugggguuuga

SEQ ID NO: 418943 - RNA, 32 nt, Human
gacacuugucauuguuaccagcagucuccaaa

SEQ ID NO: 418944 - RNA, 32 nt, Human
gacacuuucuccggacccagcauguaggugcc

SEQ ID NO: 418945 - RNA, 32 nt, Human
gacacuuugccaaggcucuccccucucgcccc

SEQ ID NO: 418946 - RNA, 32 nt, Human
gacacuuuuucuaggcucuaccaauaaaagcc

SEQ ID NO: 418947 - RNA, 32 nt, Human
gacagaaaaauguaagaauuuguuuuuaccau

SEQ ID NO: 418948 - RNA, 32 nt, Human
gacagaaaaaugucaucauauugaaaaauguu

SEQ ID NO: 418949 - RNA, 32 nt, Human
gacagaaaacugcagugaacacaugccaaaac

SEQ ID NO: 418950 - RNA, 32 nt, Human
gacagaaaaggcagaagcuggggcuuucugga

SEQ ID NO: 418951 - RNA, 18 nt, Human
gacagaaaagggaagaga

SEQ ID NO: 418952 - RNA, 32 nt, Human
gacagaaacccuaccuaucugauaagauuagc

SEQ ID NO: 418953 - RNA, 32 nt, Human
gacagaaacccuaccuaucugauaagauuggc

SEQ ID NO: 418954 - RNA, 32 nt, Human
gacagaaagagcgagcgaggagagggagcccg

SEQ ID NO: 418955 - RNA, 32 nt, Human
gacagaaagcaagagaccagagucccgggaaa

SEQ ID NO: 418956 - RNA, 21 nt, Human
gacagaaagcugugccgccac

SEQ ID NO: 418957 - RNA, 32 nt, Human
gacagaaagguuuucagagaaaaagaaauggu

SEQ ID NO: 418958 - RNA, 32 nt, Human
gacagaaauacugaaugacuuuacacuuagga

SEQ ID NO: 418959 - RNA, 32 nt, Human
gacagaacagagaccuccucaccagggcuucc

SEQ ID NO: 418960 - RNA, 32 nt, Human
gacagaaccaggcugagccaggccuccacccc

SEQ ID NO: 418961 - RNA, 32 nt, Human
gacagaacgguugggccuugccggcugucggu

SEQ ID NO: 418962 - RNA, 32 nt, Human
gacagaacugcacuuguagccggagacaacug

SEQ ID NO: 418963 - RNA, 32 nt, Human
gacagaagaaacaagguuuucaguccccacag

SEQ ID NO: 418964 - RNA, 32 nt, Human
gacagaagaagaaaguaaagaggaauggacuu

SEQ ID NO: 418965 - RNA, 32 nt, Human
gacagaagaagggagacaaagcucccuccugu

SEQ ID NO: 418966 - RNA, 32 nt, Human
gacagaagagugagaagcagauggaggagaag

SEQ ID NO: 418967 - RNA, 32 nt, Human
gacagaagauacaagaagggagaggugucugc

SEQ ID NO: 418968 - RNA, 32 nt, Human
gacagaagcaggcuggagguaaggccuuugag

SEQ ID NO: 418969 - RNA, 21 nt, Human
gacagaagccccaggccucca

SEQ ID NO: 418970 - RNA, 32 nt, Human
gacagaagcccuggggcaaccuccucggccac

SEQ ID NO: 418971 - RNA, 32 nt, Human
gacagaaggaaagagaggaagagagaagcaaa

SEQ ID NO: 418972 - RNA, 32 nt, Human
gacagaaggaccgggcagggcuugccuugggg

SEQ ID NO: 418973 - RNA, 32 nt, Human
gacagaaggagagaaggcuggaggcugacagg

SEQ ID NO: 418974 - RNA, 31 nt, Human
gacagaaggggcgguucagccaagacagaug

SEQ ID NO: 418975 - RNA, 32 nt, Human
gacagaagggucuccuuggucauguggcauuu

SEQ ID NO: 418976 - RNA, 32 nt, Human
gacagaagucaugaggaugcaugaauggguaa

SEQ ID NO: 418977 - RNA, 32 nt, Human
gacagaagugaaugggaauggagaggccggcg

SEQ ID NO: 418978 - RNA, 32 nt, Human
gacagaauacuuucuuuccuuccuucaaguac

SEQ ID NO: 418979 - RNA, 32 nt, Human
gacagaauccauacuuaacacucuuuccaaga

SEQ ID NO: 418980 - RNA, 32 nt, Human
gacagaaucucacuccagccugggcaacagaa

SEQ ID NO: 418981 - RNA, 32 nt, Human
gacagaaucucucacugaaacucauggucaug

SEQ ID NO: 418982 - RNA, 32 nt, Human
gacagaaugaugguuguuuuguaucauuugau

SEQ ID NO: 418983 - RNA, 23 nt, Human
gacagaauucuccaaaacaugca

SEQ ID NO: 418984 - RNA, 32 nt, Human
gacagacaacuuuugagagggcagcagacucc

SEQ ID NO: 418985 - RNA, 32 nt, Human
gacagacacacgaccacgcggcgccaccgccc

SEQ ID NO: 418986 - RNA, 32 nt, Human
gacagacacaugauaagccaaacuguuccugc

SEQ ID NO: 418987 - RNA, 32 nt, Human
gacagacagacagacacgcacacacacccauc

SEQ ID NO: 418988 - RNA, 32 nt, Human
gacagacagaccggggauccugccuggcggcg

SEQ ID NO: 418989 - RNA, 32 nt, Human
gacagacagagggagaggagaagagacgcaaa

SEQ ID NO: 418990 - RNA, 32 nt, Human
gacagacagcggggacagggaggccgacacgg

SEQ ID NO: 418991 - RNA, 32 nt, Human
gacagacaggauggacuuccuccggcuauacc

SEQ ID NO: 418992 - RNA, 32 nt, Human
gacagacaggcagacagacgcacggacaagca

SEQ ID NO: 418993 - RNA, 32 nt, Human
gacagacaggcgcuccccgcagcuccgcacgg

SEQ ID NO: 418994 - RNA, 32 nt, Human
gacagacauuucaacaaugauacaguccuguc

SEQ ID NO: 418995 - RNA, 32 nt, Human
gacagaccacccagugcugcaggagacaggcc

SEQ ID NO: 418996 - RNA, 32 nt, Human
gacagacccagccuuugugcucucacccucca

SEQ ID NO: 418997 - RNA, 32 nt, Human
gacagacccaggcuggagucuuggcugugccc

SEQ ID NO: 418998 - RNA, 32 nt, Human
gacagacgccuguaaucccagcuacuugggag

SEQ ID NO: 418999 - RNA, 32 nt, Human
gacagacucuuccccuccucucccucugccuc

SEQ ID NO: 419000 - RNA, 32 nt, Human
gacagacugcagcugcguuacugugcugagag

SEQ ID NO: 419001 - RNA, 32 nt, Human
gacagagacacaucaggggaagauggugaggu

SEQ ID NO: 419002 - RNA, 32 nt, Human
gacagagacagagaaauaagcauuagagaccu

SEQ ID NO: 419003 - RNA, 32 nt, Human
gacagagacagagagagacaaugaggcacaga

SEQ ID NO: 419004 - RNA, 32 nt, Human
gacagagacaucuuggccugucccugccuggg

SEQ ID NO: 419005 - RNA, 32 nt, Human
gacagagacgaggagaggaacaggaagagaga

SEQ ID NO: 419006 - RNA, 32 nt, Human
gacagagacgcuggcuaggccgcccuccccac

SEQ ID NO: 419007 - RNA, 32 nt, Human
gacagagacguacgugagcagauggaaccccc

SEQ ID NO: 419008 - RNA, 32 nt, Human
gacagagacugcagggguccacugugagaggu

SEQ ID NO: 419009 - RNA, 32 nt, Human
gacagagagacagagagaggggaagagagaca

SEQ ID NO: 419010 - RNA, 32 nt, Human
gacagagagagauagagcaggaggucggggca

SEQ ID NO: 419011 - RNA, 32 nt, Human
gacagagagccuccagagagugaacagucuuc

SEQ ID NO: 419012 - RNA, 32 nt, Human
gacagagaggaaggaaggauuggaaaaguccc

SEQ ID NO: 419013 - RNA, 32 nt, Human
gacagagaggaguugccagggaagaagguuug

SEQ ID NO: 419014 - RNA, 32 nt, Human
gacagagaggcagagaagagaccccuuuagaa

SEQ ID NO: 419015 - RNA, 32 nt, Human
gacagagaggcagagagagauagagacagagu

SEQ ID NO: 419016 - RNA, 32 nt, Human
gacagagauccuaugggugagguggagggggu

SEQ ID NO: 419017 - RNA, 32 nt, Human
gacagagcaagacccuguuucaaaaagaaaaa

SEQ ID NO: 419018 - RNA, 32 nt, Human
gacagagcaagaccugucacccugccacccau

SEQ ID NO: 419019 - RNA, 20 nt, Human
gacagagcaagacucugucu

SEQ ID NO: 419020 - RNA, 16 nt, Human
gacagagcaccugggg

SEQ ID NO: 419021 - RNA, 32 nt, Human
gacagagcacgcuucagggauaggagaucaua

SEQ ID NO: 419022 - RNA, 32 nt, Human
gacagagcagagccagggccaggcgcaccagg

SEQ ID NO: 419023 - RNA, 32 nt, Human
gacagagcagagccauggagaauaagcauuga

SEQ ID NO: 419024 - RNA, 32 nt, Human
gacagagcagaggaucuuuccaaccacaucug

SEQ ID NO: 419025 - RNA, 32 nt, Human
gacagagcagcccugcacuguuuucccuccac

SEQ ID NO: 419026 - RNA, 32 nt, Human
gacagagcagggaaacgugcagaggaaauggu

SEQ ID NO: 419027 - RNA, 18 nt, Human
gacagagcagggcaggca

SEQ ID NO: 419028 - RNA, 32 nt, Human
gacagagccacuaggcgaaaaggagagacggg

SEQ ID NO: 419029 - RNA, 32 nt, Human
gacagagccacugcagaggaccagacugggaa

SEQ ID NO: 419030 - RNA, 32 nt, Human
gacagagccccaaacuccucggccucacuggg

SEQ ID NO: 419031 - RNA, 20 nt, Human
gacagagcgagacucugucu

SEQ ID NO: 419032 - RNA, 32 nt, Human
gacagagcuacagcugggacagcuccaagcua

SEQ ID NO: 419033 - RNA, 31 nt, Human
gacagagcugagggucuuuguaggaguugcu

SEQ ID NO: 419034 - RNA, 32 nt, Human
gacagaggaaacugaggcuucagggaggggug

SEQ ID NO: 419035 - RNA, 32 nt, Human
gacagaggcaaaaaucugcuaacucagggggc

SEQ ID NO: 419036 - RNA, 32 nt, Human
gacagaggcggagccuggcaaguguaccaucc

SEQ ID NO: 419037 - RNA, 32 nt, Human
gacagaggcuacaucugcccuagggagguccu

SEQ ID NO: 419038 - RNA, 32 nt, Human
gacagaggcucugaggccuguggcuggacccu

SEQ ID NO: 419039 - RNA, 32 nt, Human
gacagaggcugaugcuggaguggccaguagag

SEQ ID NO: 419040 - RNA, 32 nt, Human
gacagaggcugcagcacccagggaggaacgcc

SEQ ID NO: 419041 - RNA, 32 nt, Human
gacagaggcugcagggcuggggcugggugagg

SEQ ID NO: 419042 - RNA, 32 nt, Human
gacagaggcuuaggccaugagccuccucaaca

SEQ ID NO: 419043 - RNA, 32 nt, Human
gacagagggagaggagaagagacgcaaaagac

SEQ ID NO: 419044 - RNA, 20 nt, Human
gacagagggagcagcugagg

SEQ ID NO: 419045 - RNA, 32 nt, Human
gacagagggagguggacggcagggaucaggga

SEQ ID NO: 419046 - RNA, 32 nt, Human
gacagagggcuggaaacaagacgcuccagaau

SEQ ID NO: 419047 - RNA, 32 nt, Human
gacagagggggaggggaaggagccggaggggc

SEQ ID NO: 419048 - RNA, 32 nt, Human
gacagagggugacaucauaggagcagcucgcu

SEQ ID NO: 419049 - RNA, 20 nt, Human
gacagaguaagacucugucu

SEQ ID NO: 419050 - RNA, 32 nt, Human
gacagagucacccaggcuggagugcaguggug

SEQ ID NO: 419051 - RNA, 18 nt, Human
gacagagucucaaucugu

SEQ ID NO: 419052 - RNA, 32 nt, Human
gacagagucucacucugucacucaggcuggag

SEQ ID NO: 419053 - RNA, 32 nt, Human
gacagagucucacuuugcuucccaggcuggag

SEQ ID NO: 419054 - RNA, 18 nt, Human
gacagagucucagucugu

SEQ ID NO: 419055 - RNA, 18 nt, Human
gacagagucucgcacugu

SEQ ID NO: 419056 - RNA, 32 nt, Human
gacagagucuggguuccagggcugcuuucucc

SEQ ID NO: 419057 - RNA, 32 nt, Human
gacagagucugguucuguuucccaggcuggag

SEQ ID NO: 419058 - RNA, 32 nt, Human
gacagagucuuccucugucuccuaagcuggag

SEQ ID NO: 419059 - RNA, 18 nt, Human
gacagagucuugcucugu

SEQ ID NO: 419060 - RNA, 20 nt, Human
gacagagugagacacugucu

SEQ ID NO: 419061 - RNA, 20 nt, Human
gacagagugagacccugucu

SEQ ID NO: 419062 - RNA, 20 nt, Human
gacagagugagacuccgucu

SEQ ID NO: 419063 - RNA, 20 nt, Human
gacagagugagacucugucu

SEQ ID NO: 419064 - RNA, 32 nt, Human
gacagagugauacccaucaauuuucuauccuu

SEQ ID NO: 419065 - RNA, 32 nt, Human
gacagagugcugaggggcacucuccccugaau

SEQ ID NO: 419066 - RNA, 19 nt, Human
gacagaguggacucugccu

SEQ ID NO: 419067 - RNA, 32 nt, Human
gacagaguggcgaccucgguggucgauugagc

SEQ ID NO: 419068 - RNA, 32 nt, Human
gacagauacugugcacuuacugccucacuuaa

SEQ ID NO: 419069 - RNA, 32 nt, Human
gacagaucacugcagccuccaacuccugggcu

SEQ ID NO: 419070 - RNA, 32 nt, Human
gacagaucagggagaccggggaagaaggagga

SEQ ID NO: 419071 - RNA, 32 nt, Human
gacagaucagggcccaccucccugccagggag

SEQ ID NO: 419072 - RNA, 32 nt, Human
gacagaucccuuccucccuccgacucaaagaa

SEQ ID NO: 419073 - RNA, 32 nt, Human
gacagaucugcaggacagauuuaucuguugaa

SEQ ID NO: 419074 - RNA, 21 nt, Human
gacagaugaagaugaagccca

SEQ ID NO: 419075 - RNA, 32 nt, Human
gacagaugacaucagaagacaccuauuuagaa

SEQ ID NO: 419076 - RNA, 32 nt, Human
gacagaugcccucagaauuggggcaugggagg

SEQ ID NO: 419077 - RNA, 32 nt, Human
gacagaugccuccuggguuuggaagggggaug

SEQ ID NO: 419078 - RNA, 23 nt, Human
gacagauggaccaccaaccugga

SEQ ID NO: 419079 - RNA, 32 nt, Human
gacagauggauguccaguuuacugucugcuuc

SEQ ID NO: 419080 - RNA, 32 nt, Human
gacagaugggccggaugcaauggcucacgucu

SEQ ID NO: 419081 - RNA, 32 nt, Human
gacagauggucauuuagccucuggggugaaau

SEQ ID NO: 419082 - RNA, 32 nt, Human
gacagaugugugucuguccucaggaggugaaa

SEQ ID NO: 419083 - RNA, 32 nt, Human
gacagauucauggaacuuagaguccaauagga

SEQ ID NO: 419084 - RNA, 32 nt, Human
gacagauuggacaacuauaacgacaccucccu

SEQ ID NO: 419085 - RNA, 32 nt, Human
gacagauuuugcccucaaucacaauauuugua

SEQ ID NO: 419086 - RNA, 32 nt, Human
gacagcaaagagacugagagacuguugaucaa

SEQ ID NO: 419087 - RNA, 32 nt, Human
gacagcaacuuccggcugguguccucagagca

SEQ ID NO: 419088 - RNA, 32 nt, Human
gacagcaagcuccuggaacacaagucacaugc

SEQ ID NO: 419089 - RNA, 32 nt, Human
gacagcaaugaggaguuggaaggugcaaaguc

SEQ ID NO: 419090 - RNA, 32 nt, Human
gacagcacaagucugaguugcuguuuggucug

SEQ ID NO: 419091 - RNA, 32 nt, Human
gacagcaccacugcacagagcuuugggaggcu

SEQ ID NO: 419092 - RNA, 32 nt, Human
gacagcaccacugcacuccagccaggaaugag

SEQ ID NO: 419093 - RNA, 32 nt, Human
gacagcaccacugcacuccagccugggugaca

SEQ ID NO: 419094 - RNA, 32 nt, Human
gacagcaccacugcugaggagucugaggacug

SEQ ID NO: 419095 - RNA, 32 nt, Human
gacagcaccauugcaccccagccugagcaaca

SEQ ID NO: 419096 - RNA, 32 nt, Human
gacagcacccugcuggcccuccagggggcccu

SEQ ID NO: 419097 - RNA, 32 nt, Human
gacagcacugcuuccaugcuucauacaucagg

SEQ ID NO: 419098 - RNA, 32 nt, Human
gacagcacugugccuuggucuccagggacccc

SEQ ID NO: 419099 - RNA, 32 nt, Human
gacagcagacaaaaugaaagaaaaugagagca

SEQ ID NO: 419100 - RNA, 32 nt, Human
gacagcagagggcuaggaggcucgggcucagc

SEQ ID NO: 419101 - RNA, 32 nt, Human
gacagcagcaccacuccagccucagagacugc

SEQ ID NO: 419102 - RNA, 32 nt, Human
gacagcagcagugaguccagugaccuccagcu

SEQ ID NO: 419103 - RNA, 32 nt, Human
gacagcagcaugucaccacugcccucacaguc

SEQ ID NO: 419104 - RNA, 32 nt, Human
gacagcagccaagauggggagagaaacgggga

SEQ ID NO: 419105 - RNA, 32 nt, Human
gacagcagccaguacuuuuccuggugaccacc

SEQ ID NO: 419106 - RNA, 23 nt, Human
gacagcagcccuggggcccgcag

SEQ ID NO: 419107 - RNA, 32 nt, Human
gacagcagcccuggugccccagccugcuaggg

SEQ ID NO: 419108 - RNA, 32 nt, Human
gacagcagcuagugaugcugaugcugcugguc

SEQ ID NO: 419109 - RNA, 32 nt, Human
gacagcagcucagcauccuguggcugcacacg

SEQ ID NO: 419110 - RNA, 32 nt, Human
gacagcagcuguccccugugcugguguggcag

SEQ ID NO: 419111 - RNA, 32 nt, Human
gacagcaggaaccuaaaauaucugccaucauc

SEQ ID NO: 419112 - RNA, 32 nt, Human
gacagcaggaacuugagggaaagaugaauaaa

SEQ ID NO: 419113 - RNA, 32 nt, Human
gacagcaggaucaagacaacccguuggagccc

SEQ ID NO: 419114 - RNA, 32 nt, Human
gacagcaggcggaaagauuugaaggaaaacug

SEQ ID NO: 419115 - RNA, 32 nt, Human
gacagcagugcuggcacuuggguguccauggg

SEQ ID NO: 419116 - RNA, 32 nt, Human
gacagcaucccagcuacacagccacucccaga

SEQ ID NO: 419117 - RNA, 32 nt, Human
gacagcaucggaacaauuuccacagcagcagu

SEQ ID NO: 419118 - RNA, 32 nt, Human
gacagcaucuugcucugucucccaggcuggag

SEQ ID NO: 419119 - RNA, 31 nt, Human
gacagcaugcuggccaagggucuucccccac

SEQ ID NO: 419120 - RNA, 30 nt, Human
gacagcauguugcaaucacagauaaaugua

SEQ ID NO: 419121 - RNA, 32 nt, Human
gacagcauugacugguuuacaggcccugcucc

SEQ ID NO: 419122 - RNA, 17 nt, Human
gacagcauugggucugg

SEQ ID NO: 419123 - RNA, 31 nt, Human
gacagccaaguguccagccugacccagagau

SEQ ID NO: 419124 - RNA, 32 nt, Human
gacagccacagcaacagcaacagccccacugc

SEQ ID NO: 419125 - RNA, 32 nt, Human
gacagccacccaggccugguuagugacuccca

SEQ ID NO: 419126 - RNA, 32 nt, Human
gacagccacugccccggcuccagcuccagccc

SEQ ID NO: 419127 - RNA, 32 nt, Human
gacagccaggcaggggguuccagaguggggug

SEQ ID NO: 419128 - RNA, 32 nt, Human
gacagccaggugacuaccaguccuggggacac

SEQ ID NO: 419129 - RNA, 32 nt, Human
gacagccaucagaauucucccacaccaagugc

SEQ ID NO: 419130 - RNA, 32 nt, Human
gacagccaugaagaaggaagcuguagaggugu

SEQ ID NO: 419131 - RNA, 32 nt, Human
gacagccaugaagcuggccagcagcgacacca

SEQ ID NO: 419132 - RNA, 32 nt, Human
gacagccaugcugcuggcacuacagaggccag

SEQ ID NO: 419133 - RNA, 32 nt, Human
gacagcccacccuuguguccacugugaccccu

SEQ ID NO: 419134 - RNA, 32 nt, Human
gacagcccagacacuucccucugugaccauga

SEQ ID NO: 419135 - RNA, 32 nt, Human
gacagccccacaugcaugcacacgcaugcaca

SEQ ID NO: 419136 - RNA, 32 nt, Human
gacagccccgcucccagauguaaagaacgcga

SEQ ID NO: 419137 - RNA, 21 nt, Human
gacagccccuccggcugggug

SEQ ID NO: 419138 - RNA, 32 nt, Human
gacagccccugacaguggccucaaggagcugc

SEQ ID NO: 419139 - RNA, 32 nt, Human
gacagccccuggcagugccaccaccgcagccg

SEQ ID NO: 419140 - RNA, 32 nt, Human
gacagccccuucagccccuucuccccuccccg

SEQ ID NO: 419141 - RNA, 32 nt, Human
gacagcccgcacagcugcccagccugcggaga

SEQ ID NO: 419142 - RNA, 32 nt, Human
gacagcccgggcaguaggaugcagccccagag

SEQ ID NO: 419143 - RNA, 32 nt, Human
gacagcccuccccucaccacucccuaccuugg

SEQ ID NO: 419144 - RNA, 32 nt, Human
gacagcccuggguggcucugucacacagccac

SEQ ID NO: 419145 - RNA, 32 nt, Human
gacagcccuuccaacugugucaucucuucucu

SEQ ID NO: 419146 - RNA, 32 nt, Human
gacagccgccgccucugcauguaccacagccc

SEQ ID NO: 419147 - RNA, 32 nt, Human
gacagccggauaucggggacacugccuuggga

SEQ ID NO: 419148 - RNA, 19 nt, Human
gacagccguuccugccagg

SEQ ID NO: 419149 - RNA, 32 nt, Human
gacagccucacccaccccaccugggcccagcc

SEQ ID NO: 419150 - RNA, 32 nt, Human
gacagccucagggcaucucugagacacagggg

SEQ ID NO: 419151 - RNA, 32 nt, Human
gacagccuccaagacaaauggaagagagaaag

SEQ ID NO: 419152 - RNA, 32 nt, Human
gacagccuccugcaccugugcaagggaacugu

SEQ ID NO: 419153 - RNA, 32 nt, Human
gacagccucugccucugucuccugccacaauc

SEQ ID NO: 419154 - RNA, 32 nt, Human
gacagccugaggccuguccucacucacugucu

SEQ ID NO: 419155 - RNA, 32 nt, Human
gacagccugagguccguccucacucacugucu

SEQ ID NO: 419156 - RNA, 32 nt, Human
gacagccugcagcccuuucugcauggggugcu

SEQ ID NO: 419157 - RNA, 22 nt, Human
gacagccugcccuucauccuca

SEQ ID NO: 419158 - RNA, 22 nt, Human
gacagccugcucugaggcugca

SEQ ID NO: 419159 - RNA, 22 nt, Human
gacagccugcuggcaguccuca

SEQ ID NO: 419160 - RNA, 32 nt, Human
gacagccugcuguguccugucuuuucuccugu

SEQ ID NO: 419161 - RNA, 32 nt, Human
gacagccuggagcuugggcuguggaagauuuc

SEQ ID NO: 419162 - RNA, 16 nt, Human
gacagccuggcucuga

SEQ ID NO: 419163 - RNA, 16 nt, Human
gacagccugggacuga

SEQ ID NO: 419164 - RNA, 32 nt, Human
gacagccuucaucagugcaauguuugcagggu

SEQ ID NO: 419165 - RNA, 32 nt, Human
gacagccuugcaggcugggcucagggacaaag

SEQ ID NO: 419166 - RNA, 32 nt, Human
gacagccuuuaaucccccuccuccccagaagg

SEQ ID NO: 419167 - RNA, 22 nt, Human
gacagcgaugaaccuacccgcc

SEQ ID NO: 419168 - RNA, 24 nt, Human
gacagcgaugacuaucaccuccua

SEQ ID NO: 419169 - RNA, 32 nt, Human
gacagcgauucugagggugacugaggcuacag

SEQ ID NO: 419170 - RNA, 32 nt, Human
gacagcgcagggggaacccagggagcgcgaug

SEQ ID NO: 419171 - RNA, 16 nt, Human
gacagcgcccggccca

SEQ ID NO: 419172 - RNA, 32 nt, Human
gacagcgcccugaccaaccuaaagcuagcucc

SEQ ID NO: 419173 - RNA, 32 nt, Human
gacagcgcugccucucccuugcacucagcucu

SEQ ID NO: 419174 - RNA, 32 nt, Human
gacagcgcuguggaugccggucuggugccggc

SEQ ID NO: 419175 - RNA, 32 nt, Human
gacagcggagagaaccaggcagcccagaaacc

SEQ ID NO: 419176 - RNA, 32 nt, Human
gacagcggcuuccuugauccuugccacccgcg

SEQ ID NO: 419177 - RNA, 32 nt, Human
gacagcggggaaccugggagaccccuccgccc

SEQ ID NO: 419178 - RNA, 17 nt, Human
gacagcggugggucugg

SEQ ID NO: 419179 - RNA, 24 nt, Human
gacagcguggcaugugguguggua

SEQ ID NO: 419180 - RNA, 32 nt, Human
gacagcguuucuggguuaugcauaacuucuca

SEQ ID NO: 419181 - RNA, 32 nt, Human
gacagcuaccugcauuguagaaccuuuucuua

SEQ ID NO: 419182 - RNA, 32 nt, Human
gacagcucaaaccaucuuuggcuacugugccc

SEQ ID NO: 419183 - RNA, 32 nt, Human
gacagcucaccuagcggcaauggcugcagacu

SEQ ID NO: 419184 - RNA, 32 nt, Human
gacagcucaccuagcggcaauggcugcagagg

SEQ ID NO: 419185 - RNA, 32 nt, Human
gacagcucaccuagcggcaauggcugcaggaa

SEQ ID NO: 419186 - RNA, 32 nt, Human
gacagcucaccuagcggcaauggcugcaggcu

SEQ ID NO: 419187 - RNA, 32 nt, Human
gacagcucaccuagcugcaauggcuacagagg

SEQ ID NO: 419188 - RNA, 32 nt, Human
gacagcucaccuagcugcaauggcuacaggcu

SEQ ID NO: 419189 - RNA, 22 nt, Human
gacagcuccauaacaacaugca

SEQ ID NO: 419190 - RNA, 32 nt, Human
gacagcuccggaagugucgugccugaaccccu

SEQ ID NO: 419191 - RNA, 32 nt, Human
gacagcuccguguggagagcuuagccccugga

SEQ ID NO: 419192 - RNA, 32 nt, Human
gacagcucuguagccugacaagaaauaaaacc

SEQ ID NO: 419193 - RNA, 32 nt, Human
gacagcugaacucacaccacacccagcuuaua

SEQ ID NO: 419194 - RNA, 19 nt, Human
gacagcugaggcucagaga

SEQ ID NO: 419195 - RNA, 32 nt, Human
gacagcugaucugucggaaccaggacacaaaa

SEQ ID NO: 419196 - RNA, 32 nt, Human
gacagcugcaccgacuuggagcucuuugagaa

SEQ ID NO: 419197 - RNA, 32 nt, Human
gacagcugcaccucucagcgucuccagcucca

SEQ ID NO: 419198 - RNA, 32 nt, Human
gacagcugcaccugcguuacagacacacccga

SEQ ID NO: 419199 - RNA, 32 nt, Human
gacagcuggaaagagcgcggagccagcgccug

SEQ ID NO: 419200 - RNA, 32 nt, Human
gacagcuggagacagagaucaaacacucaagg

SEQ ID NO: 419201 - RNA, 32 nt, Human
gacagcuggcaguggagccugcuuuauuuagc

SEQ ID NO: 419202 - RNA, 32 nt, Human
gacagcuggcccuacuuuccucccucugcugc

SEQ ID NO: 419203 - RNA, 32 nt, Human
gacagcugggcugugggcaggacaggggacuc

SEQ ID NO: 419204 - RNA, 32 nt, Human
gacagcuggggagagacauggcagggucggag

SEQ ID NO: 419205 - RNA, 32 nt, Human
gacagcuuagauuuagccccaguuccugcacg

SEQ ID NO: 419206 - RNA, 32 nt, Human
gacagcuuccucacaccccugucccacccaca

SEQ ID NO: 419207 - RNA, 32 nt, Human
gacagcuuccugggggcagcacugggcggucg

SEQ ID NO: 419208 - RNA, 32 nt, Human
gacagcuucgcucuuucucuuccugccuuucc

SEQ ID NO: 419209 - RNA, 32 nt, Human
gacagcuucugcucugagaugcauuguuccua

SEQ ID NO: 419210 - RNA, 32 nt, Human
gacagcuugaaaugacauuccaggcaaugccu

SEQ ID NO: 419211 - RNA, 32 nt, Human
gacagcuugagccucaggauucuuguucuucc

SEQ ID NO: 419212 - RNA, 32 nt, Human
gacagcuugcagauggcgcguucucacggugg

SEQ ID NO: 419213 - RNA, 32 nt, Human
gacagcuuuccagagcuuugugcucaggcuac

SEQ ID NO: 419214 - RNA, 32 nt, Human
gacagcuuuccucaaaaagcagaaggagagug

SEQ ID NO: 419215 - RNA, 32 nt, Human
gacaggaaagggaauuccaaggggcaggagga

SEQ ID NO: 419216 - RNA, 23 nt, Human
gacaggaaaucccaagacugcuu

SEQ ID NO: 419217 - RNA, 32 nt, Human
gacaggaacccacaaucaggaggcaacccugg

SEQ ID NO: 419218 - RNA, 32 nt, Human
gacaggaaccucagcccagggugcuggccuuu

SEQ ID NO: 419219 - RNA, 32 nt, Human
gacaggaagaaaacauguccaggccccugguc

SEQ ID NO: 419220 - RNA, 32 nt, Human
gacaggaagaaaggagggaagagcugaugugg

SEQ ID NO: 419221 - RNA, 32 nt, Human
gacaggaagaggagggagagggugacgaacac

SEQ ID NO: 419222 - RNA, 32 nt, Human
gacaggaaggagaagaggcaggugagcagggc

SEQ ID NO: 419223 - RNA, 22 nt, Human
gacaggacaccucccaacccca

SEQ ID NO: 419224 - RNA, 32 nt, Human
gacaggacacuucacaggacacuugagcacag

SEQ ID NO: 419225 - RNA, 32 nt, Human
gacaggacaggaugggacagcaggauagacag

SEQ ID NO: 419226 - RNA, 32 nt, Human
gacaggaccaacacccccacaccccagaggcg

SEQ ID NO: 419227 - RNA, 21 nt, Human
gacaggaccagaucccaggag

SEQ ID NO: 419228 - RNA, 23 nt, Human
gacaggaccccuauguccaggaa

SEQ ID NO: 419229 - RNA, 32 nt, Human
gacaggaccccuauguccaggaaaggggaaaa

SEQ ID NO: 419230 - RNA, 32 nt, Human
gacaggacucgcugccuuucuuucccgucaga

SEQ ID NO: 419231 - RNA, 32 nt, Human
gacaggacuuggaccgcuucagccugggcugg

SEQ ID NO: 419232 - RNA, 18 nt, Human
gacaggacuuuccaggaa

SEQ ID NO: 419233 - RNA, 20 nt, Human
gacaggagaaagagaggcaa

SEQ ID NO: 419234 - RNA, 32 nt, Human
gacaggagaaucaguuuaaagacuuuaaaaau

SEQ ID NO: 419235 - RNA, 32 nt, Human
gacaggagacauggguugaaugcugaaaacau

SEQ ID NO: 419236 - RNA, 32 nt, Human
gacaggagaccagcugccuuugagcagggagu

SEQ ID NO: 419237 - RNA, 32 nt, Human
gacaggagaggaaggagggcaggggcggaguu

SEQ ID NO: 419238 - RNA, 32 nt, Human
gacaggagcugggagcucugcaccacgagcuu

SEQ ID NO: 419239 - RNA, 32 nt, Human
gacaggaggcagcagaaguugcagagaagagu

SEQ ID NO: 419240 - RNA, 32 nt, Human
gacaggagggcugugguguacccuggaggugu

SEQ ID NO: 419241 - RNA, 32 nt, Human
gacaggagugagccaccacaccuggccacucg

SEQ ID NO: 419242 - RNA, 32 nt, Human
gacaggaucagugacccacagcuuuggggaaa

SEQ ID NO: 419243 - RNA, 32 nt, Human
gacaggaucucaggcuggagugcaguggcaca

SEQ ID NO: 419244 - RNA, 32 nt, Human
gacaggaucuugcucugucucccaggcuggag

SEQ ID NO: 419245 - RNA, 32 nt, Human
gacaggaucuuugcaguacaacaccucuaugc

SEQ ID NO: 419246 - RNA, 31 nt, Human
gacaggaugagagugucaggugugcuucgcc

SEQ ID NO: 419247 - RNA, 32 nt, Human
gacaggauuggggugacagcccagggaugcau

SEQ ID NO: 419248 - RNA, 32 nt, Human
gacaggauuucacuauguuggccagguugguc

SEQ ID NO: 419249 - RNA, 21 nt, Human
gacaggcaagcuuccacugca

SEQ ID NO: 419250 - RNA, 18 nt, Human
gacaggcacacacaugca

SEQ ID NO: 419251 - RNA, 19 nt, Human
gacaggcacaugccaccac

SEQ ID NO: 419252 - RNA, 32 nt, Human
gacaggcaccucuucugccuuuacuuggucuc

SEQ ID NO: 419253 - RNA, 32 nt, Human
gacaggcaccuguaaucccagcuacucaggag

SEQ ID NO: 419254 - RNA, 32 nt, Human
gacaggcaccuguaaucccagcuacucgggag

SEQ ID NO: 419255 - RNA, 18 nt, Human
gacaggcacuuagaugca

SEQ ID NO: 419256 - RNA, 17 nt, Human
gacaggcagacacaugc

SEQ ID NO: 419257 - RNA, 32 nt, Human
gacaggcagccugcugccguaugcuucagugg

SEQ ID NO: 419258 - RNA, 32 nt, Human
gacaggcagccuggugccaggccugaaaccag

SEQ ID NO: 419259 - RNA, 18 nt, Human
gacaggcagggagaugca

SEQ ID NO: 419260 - RNA, 20 nt, Human
gacaggcauaaacaagaaca

SEQ ID NO: 419261 - RNA, 32 nt, Human
gacaggcaucuguggagccugggaaaugaccu

SEQ ID NO: 419262 - RNA, 32 nt, Human
gacaggcaugagccaccacgccuggucuauga

SEQ ID NO: 419263 - RNA, 32 nt, Human
gacaggcaugagccaccgcgccuggccccuuc

SEQ ID NO: 419264 - RNA, 32 nt, Human
gacaggcaugagccaccgugcccggccggucc

SEQ ID NO: 419265 - RNA, 32 nt, Human
gacaggcaugagccacgacgcccagccacaag

SEQ ID NO: 419266 - RNA, 20 nt, Human
gacaggcaugugaacaccca

SEQ ID NO: 419267 - RNA, 20 nt, Human
gacaggcauuugugacagca

SEQ ID NO: 419268 - RNA, 32 nt, Human
gacaggccaagaaacuccacaucauaacagcc

SEQ ID NO: 419269 - RNA, 32 nt, Human
gacaggccaguucuccauucugcaggacuauc

SEQ ID NO: 419270 - RNA, 32 nt, Human
gacaggccauucuaauaacagaaacaaacaag

SEQ ID NO: 419271 - RNA, 32 nt, Human
gacaggcccugccugccacccuaggcagggaa

SEQ ID NO: 419272 - RNA, 32 nt, Human
gacaggccgcgcugggacaggugccgguacua

SEQ ID NO: 419273 - RNA, 32 nt, Human
gacaggccucuggccaagagcuuagucaggcu

SEQ ID NO: 419274 - RNA, 32 nt, Human
gacaggccugcaggaaugugcuucauuagcug

SEQ ID NO: 419275 - RNA, 32 nt, Human
gacaggccuggaguuacgcacacugagugccc

SEQ ID NO: 419276 - RNA, 32 nt, Human
gacaggccugggacgggcucucccucacagcc

SEQ ID NO: 419277 - RNA, 32 nt, Human
gacaggccuguccaacacaucucccuuuucca

SEQ ID NO: 419278 - RNA, 32 nt, Human
gacaggccuuucuccaucuucaagagugacac

SEQ ID NO: 419279 - RNA, 32 nt, Human
gacaggccuuucuccuuagaggccagaggugc

SEQ ID NO: 419280 - RNA, 32 nt, Human
gacaggccuuucucucagccucuggaagccac

SEQ ID NO: 419281 - RNA, 32 nt, Human
gacaggcgacagaccugcggcaggaccagagg

SEQ ID NO: 419282 - RNA, 32 nt, Human
gacaggcgaugagacaagaugucagaagcuag

SEQ ID NO: 419283 - RNA, 32 nt, Human
gacaggcgugagccacagcucccagccuaggc

SEQ ID NO: 419284 - RNA, 32 nt, Human
gacaggcgugagccaccgcgcccagccugauu

SEQ ID NO: 419285 - RNA, 32 nt, Human
gacaggcgugagccaccgcgcccggccuauac

SEQ ID NO: 419286 - RNA, 32 nt, Human
gacaggcgugagccaccgcgccgggcccaaua

SEQ ID NO: 419287 - RNA, 32 nt, Human
gacaggcgugagccccugcgcccggccuuugu

SEQ ID NO: 419288 - RNA, 32 nt, Human
gacaggcgugauccaccgugcccagccgggaa

SEQ ID NO: 419289 - RNA, 32 nt, Human
gacaggcguguggggaguucacugugaccuag

SEQ ID NO: 419290 - RNA, 32 nt, Human
gacaggcuaggagagaagggacugggguuacu

SEQ ID NO: 419291 - RNA, 32 nt, Human
gacaggcucagaccugauccuuccucaggagc

SEQ ID NO: 419292 - RNA, 32 nt, Human
gacaggcucaugggagcuggugagagagagca

SEQ ID NO: 419293 - RNA, 32 nt, Human
gacaggcuccuccucucccuccagaagccagg

SEQ ID NO: 419294 - RNA, 21 nt, Human
gacaggcuccugagaaaugca

SEQ ID NO: 419295 - RNA, 21 nt, Human
gacaggcucucuuguauucuu

SEQ ID NO: 419296 - RNA, 32 nt, Human
gacaggcugaggcucaaggaaggugguccuca

SEQ ID NO: 419297 - RNA, 32 nt, Human
gacaggcugguccugaggauacagcugucccg

SEQ ID NO: 419298 - RNA, 32 nt, Human
gacaggcuucuauccacucugccugcgguucg

SEQ ID NO: 419299 - RNA, 31 nt, Human
gacagggaaaggggaacugguuuucagggaa

SEQ ID NO: 419300 - RNA, 32 nt, Human
gacagggaacagcuucaggauacuuccaggag

SEQ ID NO: 419301 - RNA, 32 nt, Human
gacagggaacaugaugggcacugaccuccugu

SEQ ID NO: 419302 - RNA, 32 nt, Human
gacagggaagguggaggaguggauagaacuug

SEQ ID NO: 419303 - RNA, 32 nt, Human
gacagggacaagcauaucuaagaggcugaaca

SEQ ID NO: 419304 - RNA, 32 nt, Human
gacagggagacagggucucacuguguugccua

SEQ ID NO: 419305 - RNA, 32 nt, Human
gacagggagaugggacauucugagggacccgg

SEQ ID NO: 419306 - RNA, 32 nt, Human
gacagggagcugcagaagcucgaggagugggg

SEQ ID NO: 419307 - RNA, 32 nt, Human
gacagggagcugguuggggaggaccagaaauc

SEQ ID NO: 419308 - RNA, 32 nt, Human
gacagggaggauuuaguuauucugcuacuuac

SEQ ID NO: 419309 - RNA, 32 nt, Human
gacagggaggcugagggucagcaagguuaagg

SEQ ID NO: 419310 - RNA, 32 nt, Human
gacagggaggguggaggaguggauagaacuug

SEQ ID NO: 419311 - RNA, 32 nt, Human
gacagggaggguguuuuggguggcauagaggu

SEQ ID NO: 419312 - RNA, 32 nt, Human
gacagggagguugugaugagccaaggucaugc

SEQ ID NO: 419313 - RNA, 32 nt, Human
gacagggcaagugagaccuggugaggguggcu

SEQ ID NO: 419314 - RNA, 32 nt, Human
gacagggcagaggcguccgcugacaaaucacu

SEQ ID NO: 419315 - RNA, 32 nt, Human
gacagggcccaggucagccucagucugcugug

SEQ ID NO: 419316 - RNA, 32 nt, Human
gacagggccggagaaagauggagcagcccggg

SEQ ID NO: 419317 - RNA, 17 nt, Human
gacagggcgaacaagca

SEQ ID NO: 419318 - RNA, 32 nt, Human
gacagggcuagcagaugaagagaggaggacau

SEQ ID NO: 419319 - RNA, 32 nt, Human
gacagggcucagagggcuaggcacggagggaa

SEQ ID NO: 419320 - RNA, 32 nt, Human
gacagggcuggcaggagcagacugccucagcc

SEQ ID NO: 419321 - RNA, 18 nt, Human
gacagggcugggaacagc

SEQ ID NO: 419322 - RNA, 32 nt, Human
gacagggcugucucccccuccaucuggagcuc

SEQ ID NO: 419323 - RNA, 17 nt, Human
gacaggggaagacagca

SEQ ID NO: 419324 - RNA, 32 nt, Human
gacaggggaaguggguccccaggucagcccuu

SEQ ID NO: 419325 - RNA, 23 nt, Human
gacaggggaccaaggucagggcc

SEQ ID NO: 419326 - RNA, 32 nt, Human
gacaggggagagaaugggagaggagcaccucc

SEQ ID NO: 419327 - RNA, 32 nt, Human
gacaggggagugagaagggugcguugcagaau

SEQ ID NO: 419328 - RNA, 19 nt, Human
gacaggggcaagcaggcca

SEQ ID NO: 419329 - RNA, 22 nt, Human
gacaggggcuugccaggucuca

SEQ ID NO: 419330 - RNA, 32 nt, Human
gacagggggagucucuggagguaaagcugguc

SEQ ID NO: 419331 - RNA, 32 nt, Human
gacagggggcaggccagagagagagggcagau

SEQ ID NO: 419332 - RNA, 32 nt, Human
gacaggggucucgcugaacuccuggccuccag

SEQ ID NO: 419333 - RNA, 32 nt, Human
gacaggggugacagacacagagugcccaggua

SEQ ID NO: 419334 - RNA, 32 nt, Human
gacaggguaggaauaugugggagggcugggcu

SEQ ID NO: 419335 - RNA, 32 nt, Human
gacagggucucaacucuguuacccaggcugga

SEQ ID NO: 419336 - RNA, 18 nt, Human
gacagggucucacuaugu

SEQ ID NO: 419337 - RNA, 18 nt, Human
gacagggucucacucugu

SEQ ID NO: 419338 - RNA, 32 nt, Human
gacagggucugcuauagucaccagggagaagc

SEQ ID NO: 419339 - RNA, 32 nt, Human
gacagggucuucuauguugcccaggcugucuu

SEQ ID NO: 419340 - RNA, 32 nt, Human
gacagggucuugacuggagugcaguggugcga

SEQ ID NO: 419341 - RNA, 18 nt, Human
gacagggucuugcucugu

SEQ ID NO: 419342 - RNA, 32 nt, Human
gacagggugaggcucccagacgcuccucgagg

SEQ ID NO: 419343 - RNA, 30 nt, Human
gacagggugagucgcagggcacaguguggg

SEQ ID NO: 419344 - RNA, 32 nt, Human
gacagggugggcuuccugcccuucccucuggg

SEQ ID NO: 419345 - RNA, 31 nt, Human
gacagggugggucucccuuaccaaagagaag

SEQ ID NO: 419346 - RNA, 32 nt, Human
gacaggguguguggcauuguguucuaugccag

SEQ ID NO: 419347 - RNA, 32 nt, Human
gacaggguugcccaggguggagugcaguggca

SEQ ID NO: 419348 - RNA, 20 nt, Human
gacaggguuucaccauguua

SEQ ID NO: 419349 - RNA, 20 nt, Human
gacaggguuucaccauguug

SEQ ID NO: 419350 - RNA, 21 nt, Human
gacaggguuucaccauguugg

SEQ ID NO: 419351 - RNA, 32 nt, Human
gacaggguuucauauuggccagacuggucucg

SEQ ID NO: 419352 - RNA, 32 nt, Human
gacaggguuucaucauguuggccaggaugguc

SEQ ID NO: 419353 - RNA, 32 nt, Human
gacaggguuucaucauguuggccaggaugguu

SEQ ID NO: 419354 - RNA, 32 nt, Human
gacaggguuucaucauguuggccaggcuaguc

SEQ ID NO: 419355 - RNA, 32 nt, Human
gacaggguuucaucauguuggccaggcugguc

SEQ ID NO: 419356 - RNA, 32 nt, Human
gacaggguuucaucauuguuggccaggcuggu

SEQ ID NO: 419357 - RNA, 32 nt, Human
gacaggguuucggguuucaccauguuggccag

SEQ ID NO: 419358 - RNA, 32 nt, Human
gacaggguuuuuaagaaauaauuauucuaauu

SEQ ID NO: 419359 - RNA, 32 nt, Human
gacagguaaguggcagaggugaggggauaagu

SEQ ID NO: 419360 - RNA, 32 nt, Human
gacagguacaaggagaagagauggggacuaug

SEQ ID NO: 419361 - RNA, 32 nt, Human
gacagguacagagagaccagguggccuguucc

SEQ ID NO: 419362 - RNA, 32 nt, Human
gacagguaggaaggaaggaaaggaggaaaggg

SEQ ID NO: 419363 - RNA, 22 nt, Human
gacagguauggaagaauauaca

SEQ ID NO: 419364 - RNA, 18 nt, Human
gacaggucacaaacauca

SEQ ID NO: 419365 - RNA, 17 nt, Human
gacaggucaccuugcag

SEQ ID NO: 419366 - RNA, 32 nt, Human
gacaggucacuuacaggggaugccauucaauc

SEQ ID NO: 419367 - RNA, 32 nt, Human
gacaggucagcccucuguagcucagugucacc

SEQ ID NO: 419368 - RNA, 32 nt, Human
gacaggucauggaauucucauccaccaucgaa

SEQ ID NO: 419369 - RNA, 32 nt, Human
gacagguccacccucaccauccgggucuuuag

SEQ ID NO: 419370 - RNA, 32 nt, Human
gacaggucuagagugauccaucccaccucuaa

SEQ ID NO: 419371 - RNA, 32 nt, Human
gacaggucucuuuccuggaaugcagcccaggc

SEQ ID NO: 419372 - RNA, 32 nt, Human
gacaggucugcgcugagcauugaggaggguau

SEQ ID NO: 419373 - RNA, 32 nt, Human
gacaggucuuuuugccauuccuccaggacauc

SEQ ID NO: 419374 - RNA, 32 nt, Human
gacaggugaacucugguccucugcaccuguuu

SEQ ID NO: 419375 - RNA, 32 nt, Human
gacaggugaaugucacagguccauaagaagga

SEQ ID NO: 419376 - RNA, 31 nt, Human
gacaggugacaccuggauaccaaaugcagga

SEQ ID NO: 419377 - RNA, 32 nt, Human
gacaggugaccuucuuggguugugcuucacaa

SEQ ID NO: 419378 - RNA, 32 nt, Human
gacaggugagggacacucaggagcucauuuuc

SEQ ID NO: 419379 - RNA, 32 nt, Human
gacaggugcagagagagaauaaacugugucua

SEQ ID NO: 419380 - RNA, 32 nt, Human
gacaggugcccgaacacagggucuccaggacg

SEQ ID NO: 419381 - RNA, 32 nt, Human
gacaggugccuguaaucccagcuacucgguag

SEQ ID NO: 419382 - RNA, 32 nt, Human
gacaggugccuguaaucccagcuacuugggag

SEQ ID NO: 419383 - RNA, 32 nt, Human
gacaggugccuguagucccagcuacucgggag

SEQ ID NO: 419384 - RNA, 32 nt, Human
gacagguggcccagcaguugcagcauggugug

SEQ ID NO: 419385 - RNA, 32 nt, Human
gacagguggcgacggcagaggaauaccuucac

SEQ ID NO: 419386 - RNA, 32 nt, Human
gacaggugggagaauggguguaggaggcaggc

SEQ ID NO: 419387 - RNA, 32 nt, Human
gacaggugggcccagugaacuuuuccaguaaa

SEQ ID NO: 419388 - RNA, 32 nt, Human
gacaggugguuccugggguccugagauccagc

SEQ ID NO: 419389 - RNA, 32 nt, Human
gacagguguaaucccuggugcugcaguggacc

SEQ ID NO: 419390 - RNA, 32 nt, Human
gacaggugugagccaccgcccccggccccucg

SEQ ID NO: 419391 - RNA, 32 nt, Human
gacaggugugagccacugcgcccagccugaau

SEQ ID NO: 419392 - RNA, 32 nt, Human
gacaggugugccugugcuccugcccaggagca

SEQ ID NO: 419393 - RNA, 32 nt, Human
gacagguguggacccugagggugcggugguga

SEQ ID NO: 419394 - RNA, 32 nt, Human
gacagguuccagggggugcuuuuggccugcuc

SEQ ID NO: 419395 - RNA, 32 nt, Human
gacagguucuaucaugggugacaccaggagag

SEQ ID NO: 419396 - RNA, 32 nt, Human
gacagguuugcaggaaacccucagaaaggggg

SEQ ID NO: 419397 - RNA, 32 nt, Human
gacaguaaaugucuugcuacauuuuucuauuu

SEQ ID NO: 419398 - RNA, 32 nt, Human
gacaguaauaagaauggaaaagagauauggga

SEQ ID NO: 419399 - RNA, 19 nt, Human
gacaguagcccccuccuua

SEQ ID NO: 419400 - RNA, 32 nt, Human
gacaguagggcucccagguggcugguucucag

SEQ ID NO: 419401 - RNA, 32 nt, Human
gacaguaggggaaagagcugagcuccauucug

SEQ ID NO: 419402 - RNA, 32 nt, Human
gacaguaucacagaucaagaauggaguacgag

SEQ ID NO: 419403 - RNA, 32 nt, Human
gacaguaucccagcuacaacaggacgacaccg

SEQ ID NO: 419404 - RNA, 32 nt, Human
gacagucaaaggacacgagagaaaggaagggg

SEQ ID NO: 419405 - RNA, 32 nt, Human
gacagucacaacaaggacaacaaggacacaac

SEQ ID NO: 419406 - RNA, 25 nt, Human
gacagucacagaggaacaagaucaa

SEQ ID NO: 419407 - RNA, 25 nt, Human
gacagucacggaggaacaagaucaa

SEQ ID NO: 419408 - RNA, 25 nt, Human
gacagucacggaggaagaagaucaa

SEQ ID NO: 419409 - RNA, 32 nt, Human
gacagucacugcaaucucuuuaccaccucccc

SEQ ID NO: 419410 - RNA, 32 nt, Human
gacagucagcagucugcuauuaaguggccuac

SEQ ID NO: 419411 - RNA, 32 nt, Human
gacagucagggugaaacuucuuuugccagaag

SEQ ID NO: 419412 - RNA, 32 nt, Human
gacagucaguguggaggccacaggguacucgc

SEQ ID NO: 419413 - RNA, 31 nt, Human
gacagucaugagagaggaaaacugcaaugac

SEQ ID NO: 419414 - RNA, 32 nt, Human
gacaguccccaaaacagagauugucaggcccc

SEQ ID NO: 419415 - RNA, 32 nt, Human
gacaguccccauuaccggucuaucuuuauaag

SEQ ID NO: 419416 - RNA, 32 nt, Human
gacagucccccaggcugagucaaaagugguuc

SEQ ID NO: 419417 - RNA, 32 nt, Human
gacagucccuucucccuucuuccuucuuccuu

SEQ ID NO: 419418 - RNA, 21 nt, Human
gacaguccggagcuguagcag

SEQ ID NO: 419419 - RNA, 32 nt, Human
gacaguccggguaacauaaugagaccuguccu

SEQ ID NO: 419420 - RNA, 17 nt, Human
gacaguccuggguuuga

SEQ ID NO: 419421 - RNA, 32 nt, Human
gacagucgcagugccauggaggagcccagcag

SEQ ID NO: 419422 - RNA, 32 nt, Human
gacagucgugaggauggcagagcugcugcauu

SEQ ID NO: 419423 - RNA, 32 nt, Human
gacagucuaauguuaaaugagaaaaaucaacu

SEQ ID NO: 419424 - RNA, 32 nt, Human
gacagucuaggaggaggaggagguagggugug

SEQ ID NO: 419425 - RNA, 32 nt, Human
gacagucuauaugauuucauguggcagaccug

SEQ ID NO: 419426 - RNA, 32 nt, Human
gacagucucacagaggaagggcagguguccua

SEQ ID NO: 419427 - RNA, 32 nt, Human
gacagucuccuggacaaggaguuuccagcugc

SEQ ID NO: 419428 - RNA, 32 nt, Human
gacagucucgcaaccagcagccuagacagccc

SEQ ID NO: 419429 - RNA, 32 nt, Human
gacagucucuacgcugugaauauugccuggug

SEQ ID NO: 419430 - RNA, 32 nt, Human
gacagucucucuucauugaguaauguaaauug

SEQ ID NO: 419431 - RNA, 32 nt, Human
gacagucuguuucccaggcuggaguguaguga

SEQ ID NO: 419432 - RNA, 32 nt, Human
gacagugaagcugggugcgguggugcacuccu

SEQ ID NO: 419433 - RNA, 32 nt, Human
gacagugacaacccuuucucuccaguucucca

SEQ ID NO: 419434 - RNA, 32 nt, Human
gacagugacauaaaaggcaauggaauuuucua

SEQ ID NO: 419435 - RNA, 32 nt, Human
gacagugaccaagacacuaacaaaggcuccug

SEQ ID NO: 419436 - RNA, 32 nt, Human
gacagugaccuccacccccgcagcccucuuaa

SEQ ID NO: 419437 - RNA, 32 nt, Human
gacagugaccugcagaugaggacucugaacac

SEQ ID NO: 419438 - RNA, 21 nt, Human
gacagugaccuuccugucuca

SEQ ID NO: 419439 - RNA, 32 nt, Human
gacagugaccuuccugucucagggguugggga

SEQ ID NO: 419440 - RNA, 32 nt, Human
gacagugagaccaccccgcuguggaaacaugg

SEQ ID NO: 419441 - RNA, 32 nt, Human
gacagugagaggauauugagggcuucagcugc

SEQ ID NO: 419442 - RNA, 32 nt, Human
gacagugagccccagaucuccuagcucuggcu

SEQ ID NO: 419443 - RNA, 32 nt, Human
gacagugagcuucuaucccaggcccugcagcc

SEQ ID NO: 419444 - RNA, 32 nt, Human
gacagugaucauucaggguucaucucacugga

SEQ ID NO: 419445 - RNA, 32 nt, Human
gacagugauuaguguugugucaccaauucagg

SEQ ID NO: 419446 - RNA, 32 nt, Human
gacagugcaacaacuggucuccaccaguauuu

SEQ ID NO: 419447 - RNA, 32 nt, Human
gacagugcagagccaggaccagcccggcccau

SEQ ID NO: 419448 - RNA, 32 nt, Human
gacagugcauccagaggaaggcaccuugcuga

SEQ ID NO: 419449 - RNA, 32 nt, Human
gacagugcaugcacuccagccugggcaacaga

SEQ ID NO: 419450 - RNA, 32 nt, Human
gacagugccaccguacucuagccugggcgaca

SEQ ID NO: 419451 - RNA, 32 nt, Human
gacagugccaggagaugcaggaauggcauuau

SEQ ID NO: 419452 - RNA, 32 nt, Human
gacagugccaggaggaagaaggaaggaguccc

SEQ ID NO: 419453 - RNA, 20 nt, Human
gacagugcccagagcaugca

SEQ ID NO: 419454 - RNA, 32 nt, Human
gacagugccugauuugagauggggucccaggu

SEQ ID NO: 419455 - RNA, 32 nt, Human
gacagugccugggaauguacuuauucugcagc

SEQ ID NO: 419456 - RNA, 32 nt, Human
gacagugcggaugcaagagcaccuggccaagc

SEQ ID NO: 419457 - RNA, 32 nt, Human
gacagugcuuugugacagcaguggagcccugu

SEQ ID NO: 419458 - RNA, 32 nt, Human
gacaguggaaaagccuuuauugacuaauugau

SEQ ID NO: 419459 - RNA, 32 nt, Human
gacaguggaaacauucaaagcagaacuucuca

SEQ ID NO: 419460 - RNA, 32 nt, Human
gacaguggaggccucccuuccuucucacagca

SEQ ID NO: 419461 - RNA, 32 nt, Human
gacaguggaguguugcuucucacugaaacagc

SEQ ID NO: 419462 - RNA, 32 nt, Human
gacaguggcccaggccacacagcucacugggc

SEQ ID NO: 419463 - RNA, 32 nt, Human
gacaguggccuccccuuccccucccugcccca

SEQ ID NO: 419464 - RNA, 32 nt, Human
gacaguggcgugcucagggcuugggaaaccca

SEQ ID NO: 419465 - RNA, 32 nt, Human
gacaguggcucacaccuguaaucucagccucc

SEQ ID NO: 419466 - RNA, 32 nt, Human
gacaguggcugcagcaguccaggugcacacua

SEQ ID NO: 419467 - RNA, 32 nt, Human
gacaguggcuucaccuguccuuuagggaagcu

SEQ ID NO: 419468 - RNA, 32 nt, Human
gacaguggggcugaggguuaacaaggaggucu

SEQ ID NO: 419469 - RNA, 32 nt, Human
gacagugggugaggacaggcuucaggcugucu

SEQ ID NO: 419470 - RNA, 32 nt, Human
gacaguggguggucaacagaaaccccaucccu

SEQ ID NO: 419471 - RNA, 22 nt, Human
gacaguggucguggaaguugga

SEQ ID NO: 419472 - RNA, 32 nt, Human
gacagugguucuuaugauguuuucccuuaacu

SEQ ID NO: 419473 - RNA, 32 nt, Human
gacagugucagccuaagccucuggagaugcuu

SEQ ID NO: 419474 - RNA, 32 nt, Human
gacagugucuugcucugucucccaggcuggag

SEQ ID NO: 419475 - RNA, 32 nt, Human
gacagugugagccugcucaccuucauccugcu

SEQ ID NO: 419476 - RNA, 32 nt, Human
gacagugugcaucaccucugggccaaggacaa

SEQ ID NO: 419477 - RNA, 32 nt, Human
gacaguguggccuggggguuugggggugccag

SEQ ID NO: 419478 - RNA, 32 nt, Human
gacaguguguggaggggcaggagcgugaugca

SEQ ID NO: 419479 - RNA, 32 nt, Human
gacaguguugggggaugugaaugaggacaagc

SEQ ID NO: 419480 - RNA, 32 nt, Human
gacaguguuguucaaagacagccuaguaagua

SEQ ID NO: 419481 - RNA, 32 nt, Human
gacaguuacaaaccaggucaccauccucagag

SEQ ID NO: 419482 - RNA, 32 nt, Human
gacaguuacgcuucguccuccaccucucccuc

SEQ ID NO: 419483 - RNA, 32 nt, Human
gacaguuauugacacugaugugcaaugaagug

SEQ ID NO: 419484 - RNA, 32 nt, Human
gacaguucagagcugcccucuccugggcaugg

SEQ ID NO: 419485 - RNA, 32 nt, Human
gacaguucaggccugugucugccuccuuggga

SEQ ID NO: 419486 - RNA, 32 nt, Human
gacaguucuguuacucagcugcagaggccgca

SEQ ID NO: 419487 - RNA, 32 nt, Human
gacaguucuuuguuuggaggcucucuugugca

SEQ ID NO: 419488 - RNA, 32 nt, Human
gacaguugaaccugguggcaguugcagaugag

SEQ ID NO: 419489 - RNA, 32 nt, Human
gacaguugaauaaucaaaaauauuuuauuagg

SEQ ID NO: 419490 - RNA, 32 nt, Human
gacaguuggauggggaggaggcaccauuugcu

SEQ ID NO: 419491 - RNA, 32 nt, Human
gacaguuggccucugugaauauugguauaauu

SEQ ID NO: 419492 - RNA, 32 nt, Human
gacaguuggggaaaggagaaggcccuuuaaag

SEQ ID NO: 419493 - RNA, 32 nt, Human
gacaguugugagccacugcgcccagccccuaa

SEQ ID NO: 419494 - RNA, 32 nt, Human
gacaguuuacuucaagacaggagacauggguu

SEQ ID NO: 419495 - RNA, 32 nt, Human
gacaguuucgucucccugucaauggccucgug

SEQ ID NO: 419496 - RNA, 32 nt, Human
gacaguuucuccuaacuuucugcuuuagcgua

SEQ ID NO: 419497 - RNA, 32 nt, Human
gacaguuucuuagagggcuugucuccuuucua

SEQ ID NO: 419498 - RNA, 32 nt, Human
gacaguuugcauucuugcaacauuaaaccaaa

SEQ ID NO: 419499 - RNA, 32 nt, Human
gacaguuuguauacugacagguccuuccaguc

SEQ ID NO: 419500 - RNA, 32 nt, Human
gacaguuuucuggcaugaacuacugaacuuau

SEQ ID NO: 419501 - RNA, 32 nt, Human
gacaguuuuuguagcuuucuauugagagucag

SEQ ID NO: 419502 - RNA, 32 nt, Human
gacauaaaaaggaaaucugucuucucuucccu

SEQ ID NO: 419503 - RNA, 32 nt, Human
gacauaacagaaaaaggugaaaacacucuccc

SEQ ID NO: 419504 - RNA, 32 nt, Human
gacauaacugcucuggaccucagcuuugcuau

SEQ ID NO: 419505 - RNA, 32 nt, Human
gacauaacugguuugacucuguccaacucugu

SEQ ID NO: 419506 - RNA, 25 nt, Human
gacauaagauaauucuggcugggug

SEQ ID NO: 419507 - RNA, 32 nt, Human
gacauaaguaggugcuucaucuguaagcgcug

SEQ ID NO: 419508 - RNA, 32 nt, Human
gacauaaguuuauccuggacaauuuccauauu

SEQ ID NO: 419509 - RNA, 32 nt, Human
gacauaauauccauuucacauaccauuuuugu

SEQ ID NO: 419510 - RNA, 32 nt, Human
gacauacacaauauaaaucauaugucuucaca

SEQ ID NO: 419511 - RNA, 32 nt, Human
gacauacacacguuaccagacgcuggagcugg

SEQ ID NO: 419512 - RNA, 32 nt, Human
gacauacacaugcacucacauucguacuugca

SEQ ID NO: 419513 - RNA, 32 nt, Human
gacauacaccuggauuuuugcauuucaggggu

SEQ ID NO: 419514 - RNA, 32 nt, Human
gacauacacuucagaagcuccuaaaacagaga

SEQ ID NO: 419515 - RNA, 32 nt, Human
gacauacaguugcaaauacucacugcaagaag

SEQ ID NO: 419516 - RNA, 32 nt, Human
gacauacaguugcaaauacucacugcaugaag

SEQ ID NO: 419517 - RNA, 32 nt, Human
gacauacauagagacagcagaccuggauggug

SEQ ID NO: 419518 - RNA, 32 nt, Human
gacauacaugcugucucagggugaucgugggu

SEQ ID NO: 419519 - RNA, 32 nt, Human
gacauacuagucugcaggaugaauuucauaac

SEQ ID NO: 419520 - RNA, 32 nt, Human
gacauacugaagcuccagccagggggaugggu

SEQ ID NO: 419521 - RNA, 32 nt, Human
gacauacuguauagguugcagaugucuaaggc

SEQ ID NO: 419522 - RNA, 32 nt, Human
gacauacuugaccuugaaaaaucuggggucau

SEQ ID NO: 419523 - RNA, 22 nt, Human
gacauacuuuaacuauugucau

SEQ ID NO: 419524 - RNA, 32 nt, Human
gacauagagagaggggaaggguuggaaaggag

SEQ ID NO: 419525 - RNA, 32 nt, Human
gacauagagagggagaagaagucagagagggu

SEQ ID NO: 419526 - RNA, 32 nt, Human
gacauagauuauacuacuacuaauuuuuggau

SEQ ID NO: 419527 - RNA, 32 nt, Human
gacauagcucucuccugcuaccagucugugcc

SEQ ID NO: 419528 - RNA, 32 nt, Human
gacauagggcagggggccucacugccuuguug

SEQ ID NO: 419529 - RNA, 32 nt, Human
gacauagggguaagguaugggagagguaggug

SEQ ID NO: 419530 - RNA, 32 nt, Human
gacauaguaguucagguggcccaugccuggga

SEQ ID NO: 419531 - RNA, 32 nt, Human
gacauagucuuucucacccuuacuucacucuu

SEQ ID NO: 419532 - RNA, 32 nt, Human
gacauagugugcagagguguaccagggaucau

SEQ ID NO: 419533 - RNA, 32 nt, Human
gacauauacacacacauauauguauguauauu

SEQ ID NO: 419534 - RNA, 32 nt, Human
gacauauacagaauugaagaugauguggggau

SEQ ID NO: 419535 - RNA, 32 nt, Human
gacauauauuaggucagcucuuacuuuugaaa

SEQ ID NO: 419536 - RNA, 32 nt, Human
gacauauauuuuuauaaggugagguaacucag

SEQ ID NO: 419537 - RNA, 32 nt, Human
gacauaugagcagagaccugcaggaaaucggg

SEQ ID NO: 419538 - RNA, 32 nt, Human
gacauaugaugggacugcuuccccuacauuau

SEQ ID NO: 419539 - RNA, 24 nt, Human
gacauauuaaagccuuuauuccau

SEQ ID NO: 419540 - RNA, 32 nt, Human
gacauauuacauaggaauuuagugucaauuuc

SEQ ID NO: 419541 - RNA, 32 nt, Human
gacauauugugagacuuuucaaccuccauaau

SEQ ID NO: 419542 - RNA, 32 nt, Human
gacauauuuucaggauggugcgucaggauauc

SEQ ID NO: 419543 - RNA, 32 nt, Human
gacaucaaacaugcuguacuugcaaugaaguc

SEQ ID NO: 419544 - RNA, 32 nt, Human
gacaucaaagcaucagcucucuggaccuggga

SEQ ID NO: 419545 - RNA, 32 nt, Human
gacaucaaagguugaagagaagacuuaguugc

SEQ ID NO: 419546 - RNA, 32 nt, Human
gacaucaaccucuagacagggaacagcuucag

SEQ ID NO: 419547 - RNA, 32 nt, Human
gacaucaagaagcaggcaggaaaauggaaaaa

SEQ ID NO: 419548 - RNA, 32 nt, Human
gacaucaagggugcgucacagccacagugagg

SEQ ID NO: 419549 - RNA, 32 nt, Human
gacaucacaagaaaacuauaagccaauauucc

SEQ ID NO: 419550 - RNA, 32 nt, Human
gacaucacaggcugugccaacauguggggcga

SEQ ID NO: 419551 - RNA, 32 nt, Human
gacaucaccugagcccccaccuagccauccau

SEQ ID NO: 419552 - RNA, 32 nt, Human
gacaucacgagcuguccaggaggcgggccugg

SEQ ID NO: 419553 - RNA, 32 nt, Human
gacaucacuggcauugcaccugggugugcccc

SEQ ID NO: 419554 - RNA, 32 nt, Human
gacaucacuguugccugcaaggacaccacgug

SEQ ID NO: 419555 - RNA, 21 nt, Human
gacaucacuugaaaggccaga

SEQ ID NO: 419556 - RNA, 32 nt, Human
gacaucagccaaggccacuucgucugaggaag

SEQ ID NO: 419557 - RNA, 32 nt, Human
gacaucagccacuuuuuauauucauguacauu

SEQ ID NO: 419558 - RNA, 32 nt, Human
gacaucagccuccugccagcaguucuugaagc

SEQ ID NO: 419559 - RNA, 32 nt, Human
gacaucagccugagccucuucgcagccucguu

SEQ ID NO: 419560 - RNA, 19 nt, Human
gacaucagcgcaggacguu

SEQ ID NO: 419561 - RNA, 21 nt, Human
gacaucagcguccacccgcua

SEQ ID NO: 419562 - RNA, 32 nt, Human
gacaucagcucuguucaugagugcucagaguc

SEQ ID NO: 419563 - RNA, 32 nt, Human
gacaucagggcaggcuuccuggagcaggaggu

SEQ ID NO: 419564 - RNA, 32 nt, Human
gacaucaucacagcagccuccucacuugggua

SEQ ID NO: 419565 - RNA, 32 nt, Human
gacaucauccccacuaugaucaacaucggcuc

SEQ ID NO: 419566 - RNA, 32 nt, Human
gacaucaucccccagcucugggaguuuccagu

SEQ ID NO: 419567 - RNA, 32 nt, Human
gacaucaugccacugcacuccagccuggggcu

SEQ ID NO: 419568 - RNA, 32 nt, Human
gacauccacaggguagagguugggugugugua

SEQ ID NO: 419569 - RNA, 32 nt, Human
gacauccaccaagauaccagacauuugaguga

SEQ ID NO: 419570 - RNA, 32 nt, Human
gacauccagccaaacucucagucuugccuuaa

SEQ ID NO: 419571 - RNA, 32 nt, Human
gacauccagccccuaguaauacuuaaggcacu

SEQ ID NO: 419572 - RNA, 32 nt, Human
gacauccaggaugaucaggagccuucauuaaa

SEQ ID NO: 419573 - RNA, 32 nt, Human
gacauccagguucccacccaggccuuccuucc

SEQ ID NO: 419574 - RNA, 32 nt, Human
gacauccauacuuauguugucuggaagagcca

SEQ ID NO: 419575 - RNA, 32 nt, Human
gacauccaucuggucugggauuucgggaguua

SEQ ID NO: 419576 - RNA, 32 nt, Human
gacaucccaguuacucaccacacccauagugc

SEQ ID NO: 419577 - RNA, 18 nt, Human
gacauccccugggucgcu

SEQ ID NO: 419578 - RNA, 21 nt, Human
gacaucccggcggccgcgcug

SEQ ID NO: 419579 - RNA, 32 nt, Human
gacaucccuaccccugccucacugccuauuug

SEQ ID NO: 419580 - RNA, 32 nt, Human
gacaucccuguuccuuucuuuccagccugacu

SEQ ID NO: 419581 - RNA, 32 nt, Human
gacauccgcccuggcccucagagcugccccuu

SEQ ID NO: 419582 - RNA, 32 nt, Human
gacauccgcucccucucacacgcugaggggga

SEQ ID NO: 419583 - RNA, 32 nt, Human
gacauccuacacuucaggauuacuugacuauc

SEQ ID NO: 419584 - RNA, 32 nt, Human
gacauccucccccuacacucccucucugagcc

SEQ ID NO: 419585 - RNA, 32 nt, Human
gacauccugauggggaggcagagccaggaagc

SEQ ID NO: 419586 - RNA, 19 nt, Human
gacauccugcacacccuca

SEQ ID NO: 419587 - RNA, 32 nt, Human
gacauccugcagggcucuguagauggauguau

SEQ ID NO: 419588 - RNA, 32 nt, Human
gacauccuggacaccacaggggcaccugcagg

SEQ ID NO: 419589 - RNA, 32 nt, Human
gacauccuggcguacuugaagcaauucaaaac

SEQ ID NO: 419590 - RNA, 32 nt, Human
gacauccugggaacucugggacucacuagauu

SEQ ID NO: 419591 - RNA, 32 nt, Human
gacaucgcgccacugcacuccagccugggcga

SEQ ID NO: 419592 - RNA, 32 nt, Human
gacaucgcgccacugcacuucagccuggacaa

SEQ ID NO: 419593 - RNA, 32 nt, Human
gacaucgcgccauugcacuccagccuggguga

SEQ ID NO: 419594 - RNA, 32 nt, Human
gacaucgcuggcugccccuuugggcggagagg

SEQ ID NO: 419595 - RNA, 30 nt, Human
gacaucggcaacuucgagcuccuguggagg

SEQ ID NO: 419596 - RNA, 32 nt, Human
gacaucgggggcaaguuugcaguggggccgga

SEQ ID NO: 419597 - RNA, 32 nt, Human
gacaucuaaaccccggcgugugcagugcccau

SEQ ID NO: 419598 - RNA, 32 nt, Human
gacaucuaugugaagagcugggugaagggguu

SEQ ID NO: 419599 - RNA, 32 nt, Human
gacaucucccucuccuugcuggcuccaucuuu

SEQ ID NO: 419600 - RNA, 32 nt, Human
gacaucucucuagcccauccauugcuuacagu

SEQ ID NO: 419601 - RNA, 32 nt, Human
gacaucucuggguucugcagcagcacgcaggc

SEQ ID NO: 419602 - RNA, 32 nt, Human
gacaucucuugccuuguccuccgguauguucu

SEQ ID NO: 419603 - RNA, 32 nt, Human
gacaucugaguccuagaccgagauaccagcug

SEQ ID NO: 419604 - RNA, 32 nt, Human
gacaucugcaagccaaggagagaggcugcagg

SEQ ID NO: 419605 - RNA, 32 nt, Human
gacaucugcaccaaggagagucuggacaaagc

SEQ ID NO: 419606 - RNA, 32 nt, Human
gacaucugccuaacgguuuuguuucuuugucu

SEQ ID NO: 419607 - RNA, 32 nt, Human
gacaucugggauccaagcacagcaauuucuuu

SEQ ID NO: 419608 - RNA, 32 nt, Human
gacaucuggguuguuuccaguuuaggauuguu

SEQ ID NO: 419609 - RNA, 16 nt, Human
gacaucuguaauccca

SEQ ID NO: 419610 - RNA, 31 nt, Human
gacaucugucucucuggagugucugucuguc

SEQ ID NO: 419611 - RNA, 32 nt, Human
gacaucugugccucauuccugaucucaagggg

SEQ ID NO: 419612 - RNA, 32 nt, Human
gacaucuguguucuuccugucagcuccacgcc

SEQ ID NO: 419613 - RNA, 32 nt, Human
gacaucuuaguucugaccuuguggaggccgcg

SEQ ID NO: 419614 - RNA, 32 nt, Human
gacaucuucucccucccuugccucagauuuau

SEQ ID NO: 419615 - RNA, 32 nt, Human
gacaucuucucccucccuugccucagggaagu

SEQ ID NO: 419616 - RNA, 32 nt, Human
gacaucuuuccaggaacagcgugaggaggaca

SEQ ID NO: 419617 - RNA, 32 nt, Human
gacaucuuuucuucaagccugccaucaaggac

SEQ ID NO: 419618 - RNA, 32 nt, Human
gacaugaagaucuggcacuggcuuuuugucac

SEQ ID NO: 419619 - RNA, 32 nt, Human
gacaugaagcugcacacauacacccgucuggu

SEQ ID NO: 419620 - RNA, 32 nt, Human
gacaugaaggggagggaggguguggggaugcc

SEQ ID NO: 419621 - RNA, 28 nt, Human
gacaugaaguacccaucucccuucuuug

SEQ ID NO: 419622 - RNA, 32 nt, Human
gacaugaaugggcuggguccugaacagagaau

SEQ ID NO: 419623 - RNA, 20 nt, Human
gacaugagacuccauuuuga

SEQ ID NO: 419624 - RNA, 32 nt, Human
gacaugagaggugcuuuuguuuuggagauucg

SEQ ID NO: 419625 - RNA, 32 nt, Human
gacaugagccacugcaccugcccagcucccca

SEQ ID NO: 419626 - RNA, 32 nt, Human
gacaugagccugcuggccaauacugugcccag

SEQ ID NO: 419627 - RNA, 32 nt, Human
gacaugaggcagcauuuccuccacacuagggu

SEQ ID NO: 419628 - RNA, 32 nt, Human
gacaugaggcaguuccuuccaggugauucugu

SEQ ID NO: 419629 - RNA, 28 nt, Human
gacaugagggcggcccgugcucugcugc

SEQ ID NO: 419630 - RNA, 32 nt, Human
gacaugaggggaggggaaaggacagagguaga

SEQ ID NO: 419631 - RNA, 32 nt, Human
gacaugaggucaagcaaaagaggucagagucc

SEQ ID NO: 419632 - RNA, 32 nt, Human
gacaugaguugcuugcuuuaggucacagugau

SEQ ID NO: 419633 - RNA, 32 nt, Human
gacaugauacagucauguuacagggaauucaa

SEQ ID NO: 419634 - RNA, 32 nt, Human
gacaugaucauagcucacuccagccugaagca

SEQ ID NO: 419635 - RNA, 32 nt, Human
gacaugauccaaacuugauaaaggacaugaaa

SEQ ID NO: 419636 - RNA, 32 nt, Human
gacaugauggcacauggaaugacaaucagcua

SEQ ID NO: 419637 - RNA, 32 nt, Human
gacaugaugugacaaucucgaucgaucaugga

SEQ ID NO: 419638 - RNA, 32 nt, Human
gacaugauuuaacuccaguuugaugaaccucc

SEQ ID NO: 419639 - RNA, 32 nt, Human
gacaugcaacuguuguugaaugaugacagcaa

SEQ ID NO: 419640 - RNA, 32 nt, Human
gacaugcagcauccuucgccccacuccacuca

SEQ ID NO: 419641 - RNA, 32 nt, Human
gacaugcagcguugggaggagcagagccaggg

SEQ ID NO: 419642 - RNA, 32 nt, Human
gacaugcagcuguguguggcaguauuuuagua

SEQ ID NO: 419643 - RNA, 32 nt, Human
gacaugcccauccugacauuguaugcuacgag

SEQ ID NO: 419644 - RNA, 32 nt, Human
gacaugcccauucacuacagccuggaugacaa

SEQ ID NO: 419645 - RNA, 32 nt, Human
gacaugccccaaugcuucuauaugcuaaguga

SEQ ID NO: 419646 - RNA, 32 nt, Human
gacaugccuucucucugcuccucauaauaucc

SEQ ID NO: 419647 - RNA, 32 nt, Human
gacaugccuuucuccacguccgccuccucgac

SEQ ID NO: 419648 - RNA, 32 nt, Human
gacaugcgggagagagaaugagccagagggac

SEQ ID NO: 419649 - RNA, 32 nt, Human
gacaugcgggagccaggagagcacccuucucc

SEQ ID NO: 419650 - RNA, 32 nt, Human
gacaugcgugagugcgugugguggguggagcc

SEQ ID NO: 419651 - RNA, 32 nt, Human
gacaugcucacacacugucacacucacacacu

SEQ ID NO: 419652 - RNA, 32 nt, Human
gacaugcugaugcuucaaggagaaauauuuuc

SEQ ID NO: 419653 - RNA, 32 nt, Human
gacaugcugccuccugccgcggaaccuuccgc

SEQ ID NO: 419654 - RNA, 32 nt, Human
gacaugcugccugaacauacacacgcacaccc

SEQ ID NO: 419655 - RNA, 19 nt, Human
gacaugcuggccucagaga

SEQ ID NO: 419656 - RNA, 32 nt, Human
gacaugcugguguugucauaccacacgacacg

SEQ ID NO: 419657 - RNA, 32 nt, Human
gacaugcuguauuggcuacuccagaaaguagg

SEQ ID NO: 419658 - RNA, 22 nt, Human
gacaugcuucucucuucuucua

SEQ ID NO: 419659 - RNA, 32 nt, Human
gacauggaccugggaggaaggaaggaccuggg

SEQ ID NO: 419660 - RNA, 32 nt, Human
gacauggagacaggcccagagcacagagagag

SEQ ID NO: 419661 - RNA, 32 nt, Human
gacauggagacuccugcccuguuguguauaga

SEQ ID NO: 419662 - RNA, 28 nt, Human
gacauggagagagugacccuggcccuuc

SEQ ID NO: 419663 - RNA, 32 nt, Human
gacauggagcaguucuguggcauaaauaaagg

SEQ ID NO: 419664 - RNA, 28 nt, Human
gacauggaggagaaggacuacagugagg

SEQ ID NO: 419665 - RNA, 32 nt, Human
gacauggaggcagugcuugcauugcuuuguuc

SEQ ID NO: 419666 - RNA, 32 nt, Human
gacauggaugaaacuggaaaccaucauucuca

SEQ ID NO: 419667 - RNA, 28 nt, Human
gacauggaugagaaggaggaggaugagg

SEQ ID NO: 419668 - RNA, 32 nt, Human
gacauggccaacaacauggggcucaggucugu

SEQ ID NO: 419669 - RNA, 28 nt, Human
gacauggcggaggcgauggauuugggca

SEQ ID NO: 419670 - RNA, 32 nt, Human
gacauggcgguugggccugguagcucaggccu

SEQ ID NO: 419671 - RNA, 28 nt, Human
gacauggcucaggagaagauggagcuag

SEQ ID NO: 419672 - RNA, 32 nt, Human
gacauggcuccccucuuacugccuguggggag

SEQ ID NO: 419673 - RNA, 28 nt, Human
gacauggcugcccagugugucacaaagg

SEQ ID NO: 419674 - RNA, 32 nt, Human
gacauggcuugagccccuugaaugucauugcg

SEQ ID NO: 419675 - RNA, 21 nt, Human
gacaugggacaggccugcagg

SEQ ID NO: 419676 - RNA, 32 nt, Human
gacaugggagaaagggaugggagccacagugc

SEQ ID NO: 419677 - RNA, 32 nt, Human
gacaugggcaccucgggaggcccgggcccugc

SEQ ID NO: 419678 - RNA, 32 nt, Human
gacaugggccccaguuuccagacccugacacc

SEQ ID NO: 419679 - RNA, 32 nt, Human
gacauggggacagacuguugcagaucaguauc

SEQ ID NO: 419680 - RNA, 32 nt, Human
gacauggggcuguggcagugggagacaccgca

SEQ ID NO: 419681 - RNA, 32 nt, Human
gacauggggcuguggcagugggagacaccgcg

SEQ ID NO: 419682 - RNA, 32 nt, Human
gacauggugccauccucacaggccuagcucau

SEQ ID NO: 419683 - RNA, 32 nt, Human
gacauggugggccaccugcaucugcagggcau

SEQ ID NO: 419684 - RNA, 32 nt, Human
gacaugguguguggauggggacuugccccaag

SEQ ID NO: 419685 - RNA, 32 nt, Human
gacaugguuagcaaucucaauuucauuuuuga

SEQ ID NO: 419686 - RNA, 32 nt, Human
gacaugguuguucacauuugcugccacggaac

SEQ ID NO: 419687 - RNA, 32 nt, Human
gacauguaagugcuuaaagaaaagaauuuuaa

SEQ ID NO: 419688 - RNA, 32 nt, Human
gacauguagauuuggagauacugugguuugau

SEQ ID NO: 419689 - RNA, 30 nt, Human
gacauguagcucuccaugguccucccucug

SEQ ID NO: 419690 - RNA, 32 nt, Human
gacauguauacaaauucuuccuuaagugaaag

SEQ ID NO: 419691 - RNA, 32 nt, Human
gacaugucagggacguugugcaggauccagga

SEQ ID NO: 419692 - RNA, 32 nt, Human
gacaugucauuuccuaucucccauuugccuuc

SEQ ID NO: 419693 - RNA, 32 nt, Human
gacauguccgaggucacacaacaaagcagcau

SEQ ID NO: 419694 - RNA, 32 nt, Human
gacauguccuucugagcccgguaagagcaaaa

SEQ ID NO: 419695 - RNA, 28 nt, Human
gacaugucgcccucuggucgccuguguc

SEQ ID NO: 419696 - RNA, 32 nt, Human
gacaugucuagggugagaccagugcucagcac

SEQ ID NO: 419697 - RNA, 32 nt, Human
gacaugugacaucuaccucccgaccuaccacc

SEQ ID NO: 419698 - RNA, 32 nt, Human
gacaugugagccacucagaacucaccaaaaug

SEQ ID NO: 419699 - RNA, 32 nt, Human
gacaugugaugggucuccccacgggggcugca

SEQ ID NO: 419700 - RNA, 23 nt, Human
gacaugugauuucuaaaauucca

SEQ ID NO: 419701 - RNA, 28 nt, Human
gacaugugcaggauguccuucaagaagg

SEQ ID NO: 419702 - RNA, 32 nt, Human
gacaugugccuguaaucccagcuacucaggag

SEQ ID NO: 419703 - RNA, 32 nt, Human
gacaugugcugggucuguggggccguggcccg

SEQ ID NO: 419704 - RNA, 32 nt, Human
gacauguggcgcucgggcgagugccuugcaga

SEQ ID NO: 419705 - RNA, 32 nt, Human
gacaugugggcuccccgaagcccagccagaga

SEQ ID NO: 419706 - RNA, 31 nt, Human
gacauguggguggagaagggaggguggccag

SEQ ID NO: 419707 - RNA, 32 nt, Human
gacauguguagcaucaaaacacaaaggcccac

SEQ ID NO: 419708 - RNA, 32 nt, Human
gacaugugugagucaauagccaucgggguccu

SEQ ID NO: 419709 - RNA, 32 nt, Human
gacaugugugcgugugcacacacgcaaguaug

SEQ ID NO: 419710 - RNA, 32 nt, Human
gacauguguggugaaggcuuugcugaagcauc

SEQ ID NO: 419711 - RNA, 32 nt, Human
gacauguuggccaggcugguggugagcuccug

SEQ ID NO: 419712 - RNA, 32 nt, Human
gacauguugguguaaaguuucuccucugcucc

SEQ ID NO: 419713 - RNA, 32 nt, Human
gacauguuuaccagcacacggcucuucuuccc

SEQ ID NO: 419714 - RNA, 32 nt, Human
gacauguuuccccuccucccacccucauuuuc

SEQ ID NO: 419715 - RNA, 32 nt, Human
gacauguuucuggaaguggguggguggguuug

SEQ ID NO: 419716 - RNA, 32 nt, Human
gacauuacacaaaaucagagugcugaguacag

SEQ ID NO: 419717 - RNA, 32 nt, Human
gacauuacagugagcccagauugugccacugc

SEQ ID NO: 419718 - RNA, 32 nt, Human
gacauuagaaucuggaacaaagcaauguuaac

SEQ ID NO: 419719 - RNA, 20 nt, Human
gacauuagcaaagacaugca

SEQ ID NO: 419720 - RNA, 32 nt, Human
gacauuaguagccacuccagcucucuuugggu

SEQ ID NO: 419721 - RNA, 32 nt, Human
gacauuaguguacagcccauguccaagcccag

SEQ ID NO: 419722 - RNA, 32 nt, Human
gacauuagugugaacacaggacagcuucgcuc

SEQ ID NO: 419723 - RNA, 32 nt, Human
gacauucaaugaauuauauucaaugcauuuaa

SEQ ID NO: 419724 - RNA, 32 nt, Human
gacauucaggcagaaagugcuggugcguuuuc

SEQ ID NO: 419725 - RNA, 32 nt, Human
gacauucauguuuagaugauuagcccucuugu

SEQ ID NO: 419726 - RNA, 32 nt, Human
gacauuccaaccaccaccagccagacauuaca

SEQ ID NO: 419727 - RNA, 32 nt, Human
gacauuccaaggaucuaauccaggaaguacuc

SEQ ID NO: 419728 - RNA, 18 nt, Human
gacauuccaccauuguga

SEQ ID NO: 419729 - RNA, 32 nt, Human
gacauuccaguucugcggcccagacggcagaa

SEQ ID NO: 419730 - RNA, 32 nt, Human
gacauuccauuucauguuccacugugauuaac

SEQ ID NO: 419731 - RNA, 32 nt, Human
gacauuccgucuuccuccauguagucccucuu

SEQ ID NO: 419732 - RNA, 32 nt, Human
gacauucgggaggugucuugaggcucagggag

SEQ ID NO: 419733 - RNA, 32 nt, Human
gacauucucaugaguaaccuucugccuucacu

SEQ ID NO: 419734 - RNA, 32 nt, Human
gacauucuccacugaauuuuaacuuuccuuga

SEQ ID NO: 419735 - RNA, 32 nt, Human
gacauucucucuccaucuccccuuucagcggc

SEQ ID NO: 419736 - RNA, 32 nt, Human
gacauucuguucuacacccuccaggaaaugac

SEQ ID NO: 419737 - RNA, 32 nt, Human
gacauucuuaacagggcggcagucuaguguug

SEQ ID NO: 419738 - RNA, 32 nt, Human
gacauucuucauccaccaauguuguacaugua

SEQ ID NO: 419739 - RNA, 32 nt, Human
gacauugacuuccuggaucuuugcggccccag

SEQ ID NO: 419740 - RNA, 32 nt, Human
gacauugagauuguccuuuuccccugaucaaa

SEQ ID NO: 419741 - RNA, 32 nt, Human
gacauugaggcugcagugaacugugauggcac

SEQ ID NO: 419742 - RNA, 32 nt, Human
gacauugauugcugcauuuuaccuucaaaaua

SEQ ID NO: 419743 - RNA, 32 nt, Human
gacauugauuguuccaacacuuguuucuauua

SEQ ID NO: 419744 - RNA, 32 nt, Human
gacauugcaacuggcccugccuguggguccua

SEQ ID NO: 419745 - RNA, 24 nt, Human
gacauugcaaguucacaccuuuca

SEQ ID NO: 419746 - RNA, 32 nt, Human
gacauugcagccgccuaccugcuccagggaag

SEQ ID NO: 419747 - RNA, 32 nt, Human
gacauugcagugagccaagaucgcacccuuac

SEQ ID NO: 419748 - RNA, 32 nt, Human
gacauugccuggguaacagccacugagauccu

SEQ ID NO: 419749 - RNA, 32 nt, Human
gacauugcgagcuuuguggagcuccaggaagc

SEQ ID NO: 419750 - RNA, 32 nt, Human
gacauugcgccacugcacuccagcgcggaaga

SEQ ID NO: 419751 - RNA, 32 nt, Human
gacauugcuaagaugcucuaucuugcucugua

SEQ ID NO: 419752 - RNA, 32 nt, Human
gacauugcucuguaggugagagaggaccauga

SEQ ID NO: 419753 - RNA, 32 nt, Human
gacauugcugagccacacuguuaagucugcuc

SEQ ID NO: 419754 - RNA, 32 nt, Human
gacauugcuggcugaggaucccuagcauaaca

SEQ ID NO: 419755 - RNA, 32 nt, Human
gacauuggacuuucuauuaaauaauuuuuaag

SEQ ID NO: 419756 - RNA, 24 nt, Human
gacauuggagcaccuuccucucca

SEQ ID NO: 419757 - RNA, 32 nt, Human
gacauuggagcaccuuccucuccagccagagg

SEQ ID NO: 419758 - RNA, 32 nt, Human
gacauuggauccuauacugugagagcugguua

SEQ ID NO: 419759 - RNA, 32 nt, Human
gacauuggccuuaguaggcuguauucacugcu

SEQ ID NO: 419760 - RNA, 32 nt, Human
gacauuggcuaucauuugacaagacuaacuuu

SEQ ID NO: 419761 - RNA, 32 nt, Human
gacauugggcgcagaggugggaaagggccuca

SEQ ID NO: 419762 - RNA, 20 nt, Human
gacauuggucucuuguguug

SEQ ID NO: 419763 - RNA, 32 nt, Human
gacauuguaagaggugguggggaccagcuaau

SEQ ID NO: 419764 - RNA, 21 nt, Human
gacauugucagcgagcacaga

SEQ ID NO: 419765 - RNA, 32 nt, Human
gacauugucaggcacggauggcugguccgaag

SEQ ID NO: 419766 - RNA, 32 nt, Human
gacauugucauuauucuuccuccaucuaucug

SEQ ID NO: 419767 - RNA, 32 nt, Human
gacauugugccacccucaauccgacaaucgaa

SEQ ID NO: 419768 - RNA, 32 nt, Human
gacauugugggaccccagaggcuguccugucc

SEQ ID NO: 419769 - RNA, 32 nt, Human
gacauugugucugagccaugcccagccgcugg

SEQ ID NO: 419770 - RNA, 32 nt, Human
gacauuguugcaaauggacacagucuuaaugg

SEQ ID NO: 419771 - RNA, 22 nt, Human
gacauuguuuccucaaggcaga

SEQ ID NO: 419772 - RNA, 32 nt, Human
gacauuuacugaaggagggacauggacaaaac

SEQ ID NO: 419773 - RNA, 32 nt, Human
gacauuuagcuugccagacaucaguuuucaug

SEQ ID NO: 419774 - RNA, 32 nt, Human
gacauuuauccgccuccuuggagaacacagcc

SEQ ID NO: 419775 - RNA, 32 nt, Human
gacauuuauguuucuuuuacauucaugacagc

SEQ ID NO: 419776 - RNA, 32 nt, Human
gacauuuauucacuuccucucauuagauccaa

SEQ ID NO: 419777 - RNA, 32 nt, Human
gacauuucaagaaacacauguguugaccaccu

SEQ ID NO: 419778 - RNA, 31 nt, Human
gacauuucaauaaaauuguuuggaaaauaaa

SEQ ID NO: 419779 - RNA, 32 nt, Human
gacauuucauggguuuuauuuaaucacacccc

SEQ ID NO: 419780 - RNA, 32 nt, Human
gacauuucauuagccaugcaacauggauaugu

SEQ ID NO: 419781 - RNA, 32 nt, Human
gacauuucauuugugccaaaaauauuaaaaau

SEQ ID NO: 419782 - RNA, 32 nt, Human
gacauuuccacauauccucugaaaucuaggug

SEQ ID NO: 419783 - RNA, 32 nt, Human
gacauuucccauagccuugacagugccaggag

SEQ ID NO: 419784 - RNA, 32 nt, Human
gacauuucuacucauccccacacugccuucca

SEQ ID NO: 419785 - RNA, 32 nt, Human
gacauuucucaccucugauuccggcucuccuu

SEQ ID NO: 419786 - RNA, 17 nt, Human
gacauuucuggcucuga

SEQ ID NO: 419787 - RNA, 32 nt, Human
gacauuugaauguaagaaaaccuucucccagg

SEQ ID NO: 419788 - RNA, 32 nt, Human
gacauuugagccacaguuuuuagaucagcacc

SEQ ID NO: 419789 - RNA, 32 nt, Human
gacauuugaucaaccuuuaguuggaauaauaa

SEQ ID NO: 419790 - RNA, 32 nt, Human
gacauuugccaaggaggaaccuaaggaagaua

SEQ ID NO: 419791 - RNA, 29 nt, Human
gacauuugccuuuuugugccuggaucuug

SEQ ID NO: 419792 - RNA, 32 nt, Human
gacauuuggcaggaguuuugacugggguagga

SEQ ID NO: 419793 - RNA, 32 nt, Human
gacauuugggcuggccaacagcagaaaguccc

SEQ ID NO: 419794 - RNA, 32 nt, Human
gacauuuggguuguuucccaucuuuuuguuac

SEQ ID NO: 419795 - RNA, 32 nt, Human
gacauuuguggcagugcugaagggggcauugc

SEQ ID NO: 419796 - RNA, 32 nt, Human
gacauuugugggcaagcagaugacagagguuu

SEQ ID NO: 419797 - RNA, 32 nt, Human
gacauuuguguauccacauucuuaccuuuggu

SEQ ID NO: 419798 - RNA, 32 nt, Human
gacauuuguuuauucuuguaacaaauuaaaac

SEQ ID NO: 419799 - RNA, 32 nt, Human
gacauuuuacagcuucaccaggagaaugugca

SEQ ID NO: 419800 - RNA, 32 nt, Human
gacauuuuagagaguuuccuucuucauucacc

SEQ ID NO: 419801 - RNA, 22 nt, Human
gacauuuucauaugcaauggaa

SEQ ID NO: 419802 - RNA, 32 nt, Human
gacauuuucuaggaagaugguggcagaaaaag

SEQ ID NO: 419803 - RNA, 32 nt, Human
gacauuuucuggaucuccugcaugucaggagc

SEQ ID NO: 419804 - RNA, 32 nt, Human
gacauuuucuuucaugggcaccaaccugcauu

SEQ ID NO: 419805 - RNA, 32 nt, Human
gacauuuugauucuccagccugggcaacggag

SEQ ID NO: 419806 - RNA, 32 nt, Human
gacauuuuguacagugcucuccggugcuguga

SEQ ID NO: 419807 - RNA, 16 nt, Human
gacauuuugugucuga

SEQ ID NO: 419808 - RNA, 32 nt, Human
gaccaaaaaggauggauuucccuggccucucu

SEQ ID NO: 419809 - RNA, 31 nt, Human
gaccaaaagagaccuuguuuucuuugagaag

SEQ ID NO: 419810 - RNA, 32 nt, Human
gaccaaaaucaagugaguaggugaccaguucc

SEQ ID NO: 419811 - RNA, 32 nt, Human
gaccaaaaugaaaccuuuuucucugaagaauc

SEQ ID NO: 419812 - RNA, 32 nt, Human
gaccaaaauggagaaaccccaucucuacuaaa

SEQ ID NO: 419813 - RNA, 32 nt, Human
gaccaaaauggugaaaccccgucucuacuaaa

SEQ ID NO: 419814 - RNA, 32 nt, Human
gaccaaaauggugaaacccugucucuacuaaa

SEQ ID NO: 419815 - RNA, 32 nt, Human
gaccaaaauggugaaaccuccucucuacuaaa

SEQ ID NO: 419816 - RNA, 32 nt, Human
gaccaaacauaggacuguuacagggaagaaaa

SEQ ID NO: 419817 - RNA, 32 nt, Human
gaccaaaccagaaaccuccaauucucaugugg

SEQ ID NO: 419818 - RNA, 32 nt, Human
gaccaaacccucucccuguuggugaccccugu

SEQ ID NO: 419819 - RNA, 32 nt, Human
gaccaaacccuugugacuuuuagguaagaaau

SEQ ID NO: 419820 - RNA, 32 nt, Human
gaccaaacuuggcuccagccauugcggugguu

SEQ ID NO: 419821 - RNA, 22 nt, Human
gaccaaagacuugaccacucaa

SEQ ID NO: 419822 - RNA, 32 nt, Human
gaccaaagauuaguaaccaguuauacccagua

SEQ ID NO: 419823 - RNA, 32 nt, Human
gaccaaaggccgcccccgccugcugggguucc

SEQ ID NO: 419824 - RNA, 32 nt, Human
gaccaaagggguggggauaauggggagcccca

SEQ ID NO: 419825 - RNA, 32 nt, Human
gaccaaauagcaucugguucagugggggccgg

SEQ ID NO: 419826 - RNA, 24 nt, Human
gaccaaaugagaagaaccccgggg

SEQ ID NO: 419827 - RNA, 32 nt, Human
gaccaaaugagcuggagcauguauggaggugc

SEQ ID NO: 419828 - RNA, 32 nt, Human
gaccaaauucugagcugcugagcugcuuacuu

SEQ ID NO: 419829 - RNA, 32 nt, Human
gaccaacaacaacgauguggccauccugcucu

SEQ ID NO: 419830 - RNA, 32 nt, Human
gaccaacaaucaggcucucacaguuguuucuc

SEQ ID NO: 419831 - RNA, 32 nt, Human
gaccaacacagaggagagaaaacaaaaauagc

SEQ ID NO: 419832 - RNA, 32 nt, Human
gaccaacaccucagaccuucugaagcagccca

SEQ ID NO: 419833 - RNA, 32 nt, Human
gaccaacacgcacuugcagggaauggcccagc

SEQ ID NO: 419834 - RNA, 32 nt, Human
gaccaacacggagaaaccccaucucuacuaaa

SEQ ID NO: 419835 - RNA, 32 nt, Human
gaccaacacggagaaaccccgucucuacuaaa

SEQ ID NO: 419836 - RNA, 32 nt, Human
gaccaacacggugaaaccccaucucuacuaaa

SEQ ID NO: 419837 - RNA, 32 nt, Human
gaccaacacggugaaaccccgucucuacuaaa

SEQ ID NO: 419838 - RNA, 32 nt, Human
gaccaacacugcacucaaugagccagccucuc

SEQ ID NO: 419839 - RNA, 32 nt, Human
gaccaacagaacuucacagugacacuggacca

SEQ ID NO: 419840 - RNA, 32 nt, Human
gaccaacagcuggccgaggcucagggauagag

SEQ ID NO: 419841 - RNA, 32 nt, Human
gaccaacaggugcuauuggagugcaaaguguu

SEQ ID NO: 419842 - RNA, 32 nt, Human
gaccaacauagugaaaccccaucucuacuaaa

SEQ ID NO: 419843 - RNA, 32 nt, Human
gaccaacauagugaaaccccaucucuacugaa

SEQ ID NO: 419844 - RNA, 32 nt, Human
gaccaacauagugaaacccccgucucuacuaa

SEQ ID NO: 419845 - RNA, 29 nt, Human
gaccaacauaguuucaccccaucucuacu

SEQ ID NO: 419846 - RNA, 32 nt, Human
gaccaacaugaagaaaccccaucucuacuaaa

SEQ ID NO: 419847 - RNA, 32 nt, Human
gaccaacaugacgaaaccccgucucuacuaaa

SEQ ID NO: 419848 - RNA, 32 nt, Human
gaccaacaugaugaaacccccgucucuacuaa

SEQ ID NO: 419849 - RNA, 22 nt, Human
gaccaacaugaugaaaccccgu

SEQ ID NO: 419850 - RNA, 32 nt, Human
gaccaacaugaugaaaccccgucuguacuaaa

SEQ ID NO: 419851 - RNA, 32 nt, Human
gaccaacaugaugaaaccccguugcuacuaaa

SEQ ID NO: 419852 - RNA, 32 nt, Human
gaccaacaugcugaaacccagucucuacuaaa

SEQ ID NO: 419853 - RNA, 32 nt, Human
gaccaacaugcugaaaccccaucucuauuaga

SEQ ID NO: 419854 - RNA, 32 nt, Human
gaccaacauggagaaaccccaauuguacuaaa

SEQ ID NO: 419855 - RNA, 32 nt, Human
gaccaacauggagaaaccccaucuccacuaaa

SEQ ID NO: 419856 - RNA, 32 nt, Human
gaccaacauggagaaaccccaucucuacuaaa

SEQ ID NO: 419857 - RNA, 32 nt, Human
gaccaacauggagaaaccccaucucucccgaa

SEQ ID NO: 419858 - RNA, 32 nt, Human
gaccaacauggagaaaccccaucuguacuaaa

SEQ ID NO: 419859 - RNA, 32 nt, Human
gaccaacauggagaaaccccauuucuacuaaa

SEQ ID NO: 419860 - RNA, 32 nt, Human
gaccaacauggagaaacccccaucucuacuga

SEQ ID NO: 419861 - RNA, 32 nt, Human
gaccaacauggagaaaccccgucccuacuaaa

SEQ ID NO: 419862 - RNA, 32 nt, Human
gaccaacauggagaaaccccgucucuacuaaa

SEQ ID NO: 419863 - RNA, 32 nt, Human
gaccaacauggagaaaccccgucucuauuggg

SEQ ID NO: 419864 - RNA, 32 nt, Human
gaccaacauggagaaaccccgucucugcuaaa

SEQ ID NO: 419865 - RNA, 32 nt, Human
gaccaacauggagaaaccccgugucuacuaaa

SEQ ID NO: 419866 - RNA, 32 nt, Human
gaccaacauggagaaaccccugucucuguuaa

SEQ ID NO: 419867 - RNA, 32 nt, Human
gaccaacauggagaaacgccaucucuacuaaa

SEQ ID NO: 419868 - RNA, 32 nt, Human
gaccaacauggagaaacuccaucucuacuaaa

SEQ ID NO: 419869 - RNA, 32 nt, Human
gaccaacauggagaaaugccaucucuacuaaa

SEQ ID NO: 419870 - RNA, 32 nt, Human
gaccaacauggauaaaucccaucucuacuaaa

SEQ ID NO: 419871 - RNA, 32 nt, Human
gaccaacauggcgaaaccccaucucuacuaaa

SEQ ID NO: 419872 - RNA, 32 nt, Human
gaccaacauggcgaaaccccauuucuacuaaa

SEQ ID NO: 419873 - RNA, 32 nt, Human
gaccaacauggcgaaaccccgucucuacuaaa

SEQ ID NO: 419874 - RNA, 32 nt, Human
gaccaacauggcgaaaccccgucucuagcaaa

SEQ ID NO: 419875 - RNA, 32 nt, Human
gaccaacaugguaaaaccacaucucuacuaaa

SEQ ID NO: 419876 - RNA, 32 nt, Human
gaccaacauggugaaaaccccaucucuacuaa

SEQ ID NO: 419877 - RNA, 32 nt, Human
gaccaacauggugaaacaccaucucuacuaaa

SEQ ID NO: 419878 - RNA, 32 nt, Human
gaccaacauggugaaacacugucucuacuaaa

SEQ ID NO: 419879 - RNA, 19 nt, Human
gaccaacauggugaaaccc

SEQ ID NO: 419880 - RNA, 20 nt, Human
gaccaacauggugaaacccc

SEQ ID NO: 419881 - RNA, 32 nt, Human
gaccaacauggugaaaccccaucucuacaaaa

SEQ ID NO: 419882 - RNA, 32 nt, Human
gaccaacauggugaaaccccaucucuacgaaa

SEQ ID NO: 419883 - RNA, 32 nt, Human
gaccaacauggugaaaccccaucucuacuaaa

SEQ ID NO: 419884 - RNA, 32 nt, Human
gaccaacauggugaaaccccaucucuacuuaa

SEQ ID NO: 419885 - RNA, 32 nt, Human
gaccaacauggugaaaccccaucuguacuaaa

SEQ ID NO: 419886 - RNA, 32 nt, Human
gaccaacauggugaaaccccaucuuuacugaa

SEQ ID NO: 419887 - RNA, 32 nt, Human
gaccaacauggugaaaccccauuucuacuaaa

SEQ ID NO: 419888 - RNA, 22 nt, Human
gaccaacauggugaaaccccgu

SEQ ID NO: 419889 - RNA, 32 nt, Human
gaccaacauggugaaaccccgucucuacaaaa

SEQ ID NO: 419890 - RNA, 32 nt, Human
gaccaacauggugaaaccccgucucuacuaaa

SEQ ID NO: 419891 - RNA, 32 nt, Human
gaccaacauggugaaaccccgucucuacuaac

SEQ ID NO: 419892 - RNA, 32 nt, Human
gaccaacauggugaaaccccgucuuuauuaaa

SEQ ID NO: 419893 - RNA, 32 nt, Human
gaccaacauggugaaaccccgugucuacuaaa

SEQ ID NO: 419894 - RNA, 32 nt, Human
gaccaacauggugaaaccccguuucuacuaaa

SEQ ID NO: 419895 - RNA, 32 nt, Human
gaccaacauggugaaaccccuucucuacguau

SEQ ID NO: 419896 - RNA, 32 nt, Human
gaccaacauggugaaacccugucucuaccaaa

SEQ ID NO: 419897 - RNA, 32 nt, Human
gaccaacauggugaaacccugucucuacgaaa

SEQ ID NO: 419898 - RNA, 32 nt, Human
gaccaacauggugaaacccugucucuacuaaa

SEQ ID NO: 419899 - RNA, 32 nt, Human
gaccaacauggugaaacccuguuucuacuaaa

SEQ ID NO: 419900 - RNA, 32 nt, Human
gaccaacauggugaaaccucaacucuacuaaa

SEQ ID NO: 419901 - RNA, 32 nt, Human
gaccaacauggugaaaccucaucucuacuaaa

SEQ ID NO: 419902 - RNA, 32 nt, Human
gaccaacauggugaaaccucgucucugcuaaa

SEQ ID NO: 419903 - RNA, 32 nt, Human
gaccaacauggugaaacgccaucucuacuaaa

SEQ ID NO: 419904 - RNA, 32 nt, Human
gaccaacauggugaaacuaugucucuacuaaa

SEQ ID NO: 419905 - RNA, 32 nt, Human
gaccaacauggugaaacuccaucucuacuaaa

SEQ ID NO: 419906 - RNA, 32 nt, Human
gaccaacauggugaaacucuguucuacuaaaa

SEQ ID NO: 419907 - RNA, 32 nt, Human
gaccaacauggugaaagcccguuucuacuaaa

SEQ ID NO: 419908 - RNA, 32 nt, Human
gaccaacauggugaaauccagucucuacuuaa

SEQ ID NO: 419909 - RNA, 32 nt, Human
gaccaacauggugaaaucccgucucuauuaaa

SEQ ID NO: 419910 - RNA, 32 nt, Human
gaccaacauggugaaauccugucucuacuaaa

SEQ ID NO: 419911 - RNA, 32 nt, Human
gaccaacauggugaaaugaaaccccaucucaa

SEQ ID NO: 419912 - RNA, 32 nt, Human
gaccaacauggugagacccugucucuacuaaa

SEQ ID NO: 419913 - RNA, 32 nt, Human
gaccaaccaaccaaguaugccccaaaccaaag

SEQ ID NO: 419914 - RNA, 32 nt, Human
gaccaaccacuuucguaucauaauuucuuuuu

SEQ ID NO: 419915 - RNA, 28 nt, Human
gaccaacccaugguugccucaucagcag

SEQ ID NO: 419916 - RNA, 24 nt, Human
gaccaaccucuuuucaacccauca

SEQ ID NO: 419917 - RNA, 32 nt, Human
gaccaaccugcauucaugcccuuguauccgca

SEQ ID NO: 419918 - RNA, 32 nt, Human
gaccaaccugcucuguccccaaaggacgccug

SEQ ID NO: 419919 - RNA, 32 nt, Human
gaccaaccuggagaaaccccgucucuacuaaa

SEQ ID NO: 419920 - RNA, 32 nt, Human
gaccaaccuggugaaaccccgucucuacaaaa

SEQ ID NO: 419921 - RNA, 32 nt, Human
gaccaacguggagaaaccccaucucuacuaaa

SEQ ID NO: 419922 - RNA, 32 nt, Human
gaccaacguggagaaacccccgucucuacuaa

SEQ ID NO: 419923 - RNA, 32 nt, Human
gaccaacguggagaaaccccgucucuauuaaa

SEQ ID NO: 419924 - RNA, 32 nt, Human
gaccaacguggagaaaccccgucuuuacuaaa

SEQ ID NO: 419925 - RNA, 32 nt, Human
gaccaacguggagaaaugccaucucuacuaaa

SEQ ID NO: 419926 - RNA, 32 nt, Human
gaccaacguggugaaaccccaucucuacuaaa

SEQ ID NO: 419927 - RNA, 32 nt, Human
gaccaacguggugaaaccccgucucuacuaaa

SEQ ID NO: 419928 - RNA, 32 nt, Human
gaccaacguggugaaacccugucucuacugga

SEQ ID NO: 419929 - RNA, 32 nt, Human
gaccaacguggugaaacuccgucucuacuaaa

SEQ ID NO: 419930 - RNA, 32 nt, Human
gaccaacugcaacacugugccugcgagucucc

SEQ ID NO: 419931 - RNA, 32 nt, Human
gaccaacugcggcugcucauggccacuggacc

SEQ ID NO: 419932 - RNA, 32 nt, Human
gaccaacuguaaugauuucacuuuuaucagua

SEQ ID NO: 419933 - RNA, 32 nt, Human
gaccaacuuuuacuucucagaggccauuuaaa

SEQ ID NO: 419934 - RNA, 32 nt, Human
gaccaagaaaauacauuuauuauuugcuaauu

SEQ ID NO: 419935 - RNA, 32 nt, Human
gaccaagaaagagccaucaggccagguaucca

SEQ ID NO: 419936 - RNA, 32 nt, Human
gaccaagaaagcuucuuaucaaaagaagcaca

SEQ ID NO: 419937 - RNA, 32 nt, Human
gaccaagaagagcugguuuaggugagacugga

SEQ ID NO: 419938 - RNA, 32 nt, Human
gaccaagaagucugggcuggguccaguccccg

SEQ ID NO: 419939 - RNA, 32 nt, Human
gaccaagaauuuaccagcugucagaggacugu

SEQ ID NO: 419940 - RNA, 32 nt, Human
gaccaagacuggaguaagaccuuuuaacccug

SEQ ID NO: 419941 - RNA, 32 nt, Human
gaccaagaggcagaagagcagagcagucgggg

SEQ ID NO: 419942 - RNA, 32 nt, Human
gaccaagagguguggaaggaaaagugggguug

SEQ ID NO: 419943 - RNA, 32 nt, Human
gaccaagaguguggaguaaauggugcacccca

SEQ ID NO: 419944 - RNA, 32 nt, Human
gaccaagauggcagguggaggccaggcuuacc

SEQ ID NO: 419945 - RNA, 32 nt, Human
gaccaagcaguggauauugagccugugaaguc

SEQ ID NO: 419946 - RNA, 32 nt, Human
gaccaagccauccugagggcauggacauuguc

SEQ ID NO: 419947 - RNA, 32 nt, Human
gaccaagcccccaguacaagcgcuggggccca

SEQ ID NO: 419948 - RNA, 32 nt, Human
gaccaagccugaccaauauggagaaacccugu

SEQ ID NO: 419949 - RNA, 32 nt, Human
gaccaagccuuguggcaccagcaaucuccaaa

SEQ ID NO: 419950 - RNA, 32 nt, Human
gaccaagcuggaugugaaccagucccagaaca

SEQ ID NO: 419951 - RNA, 32 nt, Human
gaccaagcuggucucuaacuccugggcuuaag

SEQ ID NO: 419952 - RNA, 32 nt, Human
gaccaaggaccccagagcccaccugugugacg

SEQ ID NO: 419953 - RNA, 32 nt, Human
gaccaaggaccuccaaggagguaucuuuccca

SEQ ID NO: 419954 - RNA, 32 nt, Human
gaccaaggcagcaggaaggagaaaggagggaa

SEQ ID NO: 419955 - RNA, 32 nt, Human
gaccaaggcaucugccccaacauggccuugag

SEQ ID NO: 419956 - RNA, 32 nt, Human
gaccaaggggucugagacuuaggcccuggcuc

SEQ ID NO: 419957 - RNA, 32 nt, Human
gaccaaggguguccaaucuuuggcuucccugg

SEQ ID NO: 419958 - RNA, 32 nt, Human
gaccaaggguuuccauguucaaacagucaaca

SEQ ID NO: 419959 - RNA, 32 nt, Human
gaccaagguggugaaaccccaucucuaguuaa

SEQ ID NO: 419960 - RNA, 32 nt, Human
gaccaagguggugaaaccccgucucuacuaaa

SEQ ID NO: 419961 - RNA, 32 nt, Human
gaccaaguacuggagcccagccccagacagcu

SEQ ID NO: 419962 - RNA, 32 nt, Human
gaccaagucccauuagaagagcuguucuuuga

SEQ ID NO: 419963 - RNA, 32 nt, Human
gaccaagugagaagaaucauaagaauauggga

SEQ ID NO: 419964 - RNA, 32 nt, Human
gaccaaguucugcuguuugggugacagugcuu

SEQ ID NO: 419965 - RNA, 32 nt, Human
gaccaauagcaucugugccagagauguacugu

SEQ ID NO: 419966 - RNA, 32 nt, Human
gaccaauaugaugaaaccccgucucuacuaaa

SEQ ID NO: 419967 - RNA, 32 nt, Human
gaccaauauggugaaaccccaucucuacuaaa

SEQ ID NO: 419968 - RNA, 32 nt, Human
gaccaauauggugaaaccccgucucuacuaaa

SEQ ID NO: 419969 - RNA, 32 nt, Human
gaccaauauggugaaaccccuucucuacuaaa

SEQ ID NO: 419970 - RNA, 32 nt, Human
gaccaaucaccaaaugugggaaagcacuacag

SEQ ID NO: 419971 - RNA, 32 nt, Human
gaccaaucagaggcacuuucauuuuucaucug

SEQ ID NO: 419972 - RNA, 32 nt, Human
gaccaaugagacgacuucagcaucuuuuuaaa

SEQ ID NO: 419973 - RNA, 32 nt, Human
gaccaaugauggucaccaaaucagcugcuacu

SEQ ID NO: 419974 - RNA, 32 nt, Human
gaccaaugcccacuuccccuccugggucaccu

SEQ ID NO: 419975 - RNA, 29 nt, Human
gaccaauggcugcuucauccccgacguug

SEQ ID NO: 419976 - RNA, 32 nt, Human
gaccaauguccuuguggucuuugcugcugcuc

SEQ ID NO: 419977 - RNA, 32 nt, Human
gaccaauuacagucuugugccucuccaaauuc

SEQ ID NO: 419978 - RNA, 18 nt, Human
gaccaauucugugacccc

SEQ ID NO: 419979 - RNA, 32 nt, Human
gaccaauugugcuucaggccuccugcagagau

SEQ ID NO: 419980 - RNA, 32 nt, Human
gaccaauuuuaagggaauccaggacagcuuuc

SEQ ID NO: 419981 - RNA, 32 nt, Human
gaccacaacagcccuguccacugugagcucug

SEQ ID NO: 419982 - RNA, 32 nt, Human
gaccacaagacaaccaacagcuggccacguac

SEQ ID NO: 419983 - RNA, 32 nt, Human
gaccacaaucacacaccaccaugcccugcucc

SEQ ID NO: 419984 - RNA, 19 nt, Human
gaccacacaaacccagccu

SEQ ID NO: 419985 - RNA, 32 nt, Human
gaccacacauugcccuuuucucagggaaggaa

SEQ ID NO: 419986 - RNA, 22 nt, Human
gaccacacauuucaaaguugcc

SEQ ID NO: 419987 - RNA, 32 nt, Human
gaccacaccacugcacuccauccugggcaaca

SEQ ID NO: 419988 - RNA, 32 nt, Human
gaccacaccacugcacuccugccugggcaaua

SEQ ID NO: 419989 - RNA, 32 nt, Human
gaccacaccaguguccaugcccagagguucug

SEQ ID NO: 419990 - RNA, 32 nt, Human
gaccacaccauugcacuccagccugggcaaca

SEQ ID NO: 419991 - RNA, 32 nt, Human
gaccacacccaccgcaaccucauccccucagc

SEQ ID NO: 419992 - RNA, 22 nt, Human
gaccacacccagccaaccugcc

SEQ ID NO: 419993 - RNA, 32 nt, Human
gaccacacccagcuaauuuuuguauuuuuagu

SEQ ID NO: 419994 - RNA, 18 nt, Human
gaccacaccccaaugccu

SEQ ID NO: 419995 - RNA, 20 nt, Human
gaccacaccuaaaacugccu

SEQ ID NO: 419996 - RNA, 32 nt, Human
gaccacacgcacuucaggguggaagcuggaag

SEQ ID NO: 419997 - RNA, 32 nt, Human
gaccacacgugucuccuccuccucaucuuagc

SEQ ID NO: 419998 - RNA, 32 nt, Human
gaccacacuccccucccucccuccagcagcuc

SEQ ID NO: 419999 - RNA, 22 nt, Human
gaccacagaccccacaccaggu

SEQ ID NO: 420000 - RNA, 19 nt, Human
gaccacagaugcuccacca

SEQ ID NO: 420001 - RNA, 32 nt, Human
gaccacagcagaaguuauagagcgagaacuua

SEQ ID NO: 420002 - RNA, 32 nt, Human
gaccacagcagcaccuccuccaugcaggccuu

SEQ ID NO: 420003 - RNA, 32 nt, Human
gaccacagcagcccugcgugggcaucaccucc

SEQ ID NO: 420004 - RNA, 31 nt, Human
gaccacagcauguccaucagcucagcagagc

SEQ ID NO: 420005 - RNA, 25 nt, Human
gaccacagccaucccucuccaugcc

SEQ ID NO: 420006 - RNA, 32 nt, Human
gaccacagccaucccucuccaugcccugugug

SEQ ID NO: 420007 - RNA, 32 nt, Human
gaccacagcugcagaucaguucuuagcaauga

SEQ ID NO: 420008 - RNA, 32 nt, Human
gaccacagcugccuccuccuccagagaaugcc

SEQ ID NO: 420009 - RNA, 32 nt, Human
gaccacagcugugaccggcugcuccagaagaa

SEQ ID NO: 420010 - RNA, 32 nt, Human
gaccacaggccuggcuaaauuuugacuuuuug

SEQ ID NO: 420011 - RNA, 21 nt, Human
gaccacaggcgcccaccacca

SEQ ID NO: 420012 - RNA, 32 nt, Human
gaccacaggcgcccaccaccaugcccagauga

SEQ ID NO: 420013 - RNA, 21 nt, Human
gaccacaggcgugcaccacca

SEQ ID NO: 420014 - RNA, 32 nt, Human
gaccacaggcuuguuaccaccaugcucggcuu

SEQ ID NO: 420015 - RNA, 23 nt, Human
gaccacagguguugcuggugacu

SEQ ID NO: 420016 - RNA, 32 nt, Human
gaccacagucucuauccuggggguaaaggggu

SEQ ID NO: 420017 - RNA, 32 nt, Human
gaccacagucuuggcugagaucaaagggauga

SEQ ID NO: 420018 - RNA, 32 nt, Human
gaccacaucacugcagacccagggaccaccga

SEQ ID NO: 420019 - RNA, 32 nt, Human
gaccacauccccaaauuccaucauguccaaaa

SEQ ID NO: 420020 - RNA, 32 nt, Human
gaccacaugacccagaggugcagggagaagcc

SEQ ID NO: 420021 - RNA, 32 nt, Human
gaccacauggagggaaaaagaaaacaauucuu

SEQ ID NO: 420022 - RNA, 32 nt, Human
gaccacauucaucugggcaugccugcaguacu

SEQ ID NO: 420023 - RNA, 32 nt, Human
gaccacauuguacccauuucacagagaaggag

SEQ ID NO: 420024 - RNA, 32 nt, Human
gaccaccaagaugccagcaggauauaccguaa

SEQ ID NO: 420025 - RNA, 32 nt, Human
gaccaccaaucaggaaccuuugcuggaagcuu

SEQ ID NO: 420026 - RNA, 32 nt, Human
gaccaccacacugcaaggacacuugagguacu

SEQ ID NO: 420027 - RNA, 32 nt, Human
gaccaccaccaccaccaccacucaccaccauc

SEQ ID NO: 420028 - RNA, 32 nt, Human
gaccaccagccugggcgcaguggugcuggggg

SEQ ID NO: 420029 - RNA, 32 nt, Human
gaccaccaucaccaagcagaucacgcccuacg

SEQ ID NO: 420030 - RNA, 23 nt, Human
gaccaccauccucagaagccaag

SEQ ID NO: 420031 - RNA, 32 nt, Human
gaccaccaugccaccuccucgccuccucuucu

SEQ ID NO: 420032 - RNA, 32 nt, Human
gaccaccauggagaaaccccgucucuacugaa

SEQ ID NO: 420033 - RNA, 32 nt, Human
gaccacccacaaugcuuugagcuucuuuuaua

SEQ ID NO: 420034 - RNA, 22 nt, Human
gaccacccaggauguuuuccaa

SEQ ID NO: 420035 - RNA, 32 nt, Human
gaccacccaggugggaguguaagauaaccuuc

SEQ ID NO: 420036 - RNA, 32 nt, Human
gaccacccagugccauggccacuuagggcugg

SEQ ID NO: 420037 - RNA, 32 nt, Human
gaccaccccaggagacucaaaggccugcaucu

SEQ ID NO: 420038 - RNA, 32 nt, Human
gaccaccccauucuucucaagcaaggauugcc

SEQ ID NO: 420039 - RNA, 20 nt, Human
gaccaccccggcagccugag

SEQ ID NO: 420040 - RNA, 32 nt, Human
gaccaccccugcaggcauccaaaggagcacac

SEQ ID NO: 420041 - RNA, 32 nt, Human
gaccaccccugcccaccguccaacaccuccca

SEQ ID NO: 420042 - RNA, 32 nt, Human
gaccacccggccacagaaauggcggugggagg

SEQ ID NO: 420043 - RNA, 32 nt, Human
gaccacccugaccaacaugaaaccccgucucu

SEQ ID NO: 420044 - RNA, 32 nt, Human
gaccacccuggcugaaaugacacaccuacucc

SEQ ID NO: 420045 - RNA, 32 nt, Human
gaccacccuuucucccugcccagccagggacu

SEQ ID NO: 420046 - RNA, 22 nt, Human
gaccacccuuugcugggaggaa

SEQ ID NO: 420047 - RNA, 32 nt, Human
gaccaccgccccaccaccuccugggaccacac

SEQ ID NO: 420048 - RNA, 32 nt, Human
gaccaccgcgcuuuccccuccucagccugggc

SEQ ID NO: 420049 - RNA, 17 nt, Human
gaccaccgugggucuga

SEQ ID NO: 420050 - RNA, 32 nt, Human
gaccaccuccuccugcugaaauauuacugcuu

SEQ ID NO: 420051 - RNA, 20 nt, Human
gaccaccucgggggugcuuu

SEQ ID NO: 420052 - RNA, 32 nt, Human
gaccaccugccucuccccaagggagcagacuc

SEQ ID NO: 420053 - RNA, 21 nt, Human
gaccaccuggacugccaucca

SEQ ID NO: 420054 - RNA, 32 nt, Human
gaccaccugucuggacaccacaaagaugccac

SEQ ID NO: 420055 - RNA, 21 nt, Human
gaccaccuguggccucuccaa

SEQ ID NO: 420056 - RNA, 32 nt, Human
gaccaccuuggcaacacagugagacccugucu

SEQ ID NO: 420057 - RNA, 32 nt, Human
gaccaccuuuugaagagcucaaaggagaauau

SEQ ID NO: 420058 - RNA, 17 nt, Human
gaccacgaaagggaguc

SEQ ID NO: 420059 - RNA, 20 nt, Human
gaccacgaccacaccacagg

SEQ ID NO: 420060 - RNA, 32 nt, Human
gaccacgagcuggccuucucucgucugaucgu

SEQ ID NO: 420061 - RNA, 32 nt, Human
gaccacgauuccugaugcauuacugugagaag

SEQ ID NO: 420062 - RNA, 32 nt, Human
gaccacgccacugcacuccagcccgggugaca

SEQ ID NO: 420063 - RNA, 32 nt, Human
gaccacgccauugcacuccagccugggugaca

SEQ ID NO: 420064 - RNA, 32 nt, Human
gaccacgccauugcacuccagcuugggcaaua

SEQ ID NO: 420065 - RNA, 20 nt, Human
gaccacgccccugccugaga

SEQ ID NO: 420066 - RNA, 32 nt, Human
gaccacgcccuuuaaccuagaccugccuguga

SEQ ID NO: 420067 - RNA, 22 nt, Human
gaccacgccgauugcugagagg

SEQ ID NO: 420068 - RNA, 32 nt, Human
gaccacgcucgacuaauuuuuguauuuuuggu

SEQ ID NO: 420069 - RNA, 32 nt, Human
gaccacggagagaaagccgggacuugaggugg

SEQ ID NO: 420070 - RNA, 32 nt, Human
gaccacggcucacauccuccugggugaagaau

SEQ ID NO: 420071 - RNA, 32 nt, Human
gaccacgggaggcccaggugcggagaggaggc

SEQ ID NO: 420072 - RNA, 19 nt, Human
gaccacgggcacccagaga

SEQ ID NO: 420073 - RNA, 19 nt, Human
gaccacggugaaaccccgu

SEQ ID NO: 420074 - RNA, 32 nt, Human
gaccacguggccuccgagcagcucagggcgcc

SEQ ID NO: 420075 - RNA, 32 nt, Human
gaccacgugggaacagccugcagugagcggug

SEQ ID NO: 420076 - RNA, 32 nt, Human
gaccacguugcugcccaggucuggaccucagc

SEQ ID NO: 420077 - RNA, 32 nt, Human
gaccacuacagcuggacgggcaauggcggguc

SEQ ID NO: 420078 - RNA, 32 nt, Human
gaccacuaggagagcggacggaggcggcgccu

SEQ ID NO: 420079 - RNA, 32 nt, Human
gaccacuauacuccagccuggcaacagagcaa

SEQ ID NO: 420080 - RNA, 32 nt, Human
gaccacuaucuacacauuuauuccccaaauac

SEQ ID NO: 420081 - RNA, 32 nt, Human
gaccacucauuucccaucaugacacugcuguu

SEQ ID NO: 420082 - RNA, 32 nt, Human
gaccacuccccuggcacuguuacuugccucug

SEQ ID NO: 420083 - RNA, 32 nt, Human
gaccacucgggccaagaauuccugccuaaaug

SEQ ID NO: 420084 - RNA, 32 nt, Human
gaccacucugccccagcggucgucacagaaag

SEQ ID NO: 420085 - RNA, 31 nt, Human
gaccacugacuucuccugaccugagggcccu

SEQ ID NO: 420086 - RNA, 32 nt, Human
gaccacugcagccuccaccuccuaggcucaag

SEQ ID NO: 420087 - RNA, 32 nt, Human
gaccacugccaaggagccuauccgaauuugua

SEQ ID NO: 420088 - RNA, 32 nt, Human
gaccacugccaaggagccuaucugaauuugua

SEQ ID NO: 420089 - RNA, 32 nt, Human
gaccacugcccgcccauucaccuuauaugccu

SEQ ID NO: 420090 - RNA, 32 nt, Human
gaccacugcccuccagccugggcaauagagca

SEQ ID NO: 420091 - RNA, 32 nt, Human
gaccacugcucaccgacuucagacuccaguuu

SEQ ID NO: 420092 - RNA, 32 nt, Human
gaccacugcucuccagccugggcaacagagua

SEQ ID NO: 420093 - RNA, 29 nt, Human
gaccacuggcugcugaaauacuuuucuug

SEQ ID NO: 420094 - RNA, 32 nt, Human
gaccacugggaggggagugguggacacccagc

SEQ ID NO: 420095 - RNA, 32 nt, Human
gaccacuggggucucccacaagguggggucag

SEQ ID NO: 420096 - RNA, 23 nt, Human
gaccacuguauguuuacuucuca

SEQ ID NO: 420097 - RNA, 32 nt, Human
gaccacuguggacucuaaacugcacuugucuc

SEQ ID NO: 420098 - RNA, 18 nt, Human
gaccacuguucuccagca

SEQ ID NO: 420099 - RNA, 32 nt, Human
gaccacuuaauugcuuuccugccuccuugaaa

SEQ ID NO: 420100 - RNA, 32 nt, Human
gaccacuuauacugucugucugaggcagaaga

SEQ ID NO: 420101 - RNA, 32 nt, Human
gaccacuugcccacccuccugcccaccauaug

SEQ ID NO: 420102 - RNA, 32 nt, Human
gaccacuuggaaauaaaccauuggacagauuu

SEQ ID NO: 420103 - RNA, 32 nt, Human
gaccacuugggcucuguuuucucagcuccaau

SEQ ID NO: 420104 - RNA, 32 nt, Human
gaccacuuggguccccagagcuggggagaugg

SEQ ID NO: 420105 - RNA, 32 nt, Human
gaccacuuugccuuguagcuuuuucuaucuuu

SEQ ID NO: 420106 - RNA, 32 nt, Human
gaccacuuuucccacuaccugcagccuuuuau

SEQ ID NO: 420107 - RNA, 32 nt, Human
gaccagaaacaccucccuucuccaacaaaagg

SEQ ID NO: 420108 - RNA, 32 nt, Human
gaccagaaacucaagagauaggguagccaugu

SEQ ID NO: 420109 - RNA, 32 nt, Human
gaccagaaauuacccacccaaccaggcucagg

SEQ ID NO: 420110 - RNA, 19 nt, Human
gaccagaaccugcuugcug

SEQ ID NO: 420111 - RNA, 32 nt, Human
gaccagaagcagcugcgcuacacggaggaacu

SEQ ID NO: 420112 - RNA, 23 nt, Human
gaccagaagcccagcagaugcca

SEQ ID NO: 420113 - RNA, 32 nt, Human
gaccagaagcugaggcccucucagggaggaga

SEQ ID NO: 420114 - RNA, 32 nt, Human
gaccagaaguagcugggauuuguuugcaaauu

SEQ ID NO: 420115 - RNA, 32 nt, Human
gaccagaagugcugaugaccucagggaaaaag

SEQ ID NO: 420116 - RNA, 32 nt, Human
gaccagaaucccagggacagaggacuggguag

SEQ ID NO: 420117 - RNA, 32 nt, Human
gaccagaaucugccauggcaacaggcuuuaaa

SEQ ID NO: 420118 - RNA, 20 nt, Human
gaccagacaagaaaaggauu

SEQ ID NO: 420119 - RNA, 19 nt, Human
gaccagacaccuguuugau

SEQ ID NO: 420120 - RNA, 20 nt, Human
gaccagacagucaaggugau

SEQ ID NO: 420121 - RNA, 32 nt, Human
gaccagacauuaugggccuggaaguacuauag

SEQ ID NO: 420122 - RNA, 32 nt, Human
gaccagaccagagggaucggaggcucaggccc

SEQ ID NO: 420123 - RNA, 32 nt, Human
gaccagaccugacacacagauaccucacucau

SEQ ID NO: 420124 - RNA, 22 nt, Human
gaccagacgugaugcuggaagg

SEQ ID NO: 420125 - RNA, 32 nt, Human
gaccagacugacugcacaggagcagguggagg

SEQ ID NO: 420126 - RNA, 32 nt, Human
gaccagacugccagccugugccagucugaccu

SEQ ID NO: 420127 - RNA, 32 nt, Human
gaccagacuggcaacauagugagacccugucu

SEQ ID NO: 420128 - RNA, 32 nt, Human
gaccagagacccaguggggaguuaccgucuga

SEQ ID NO: 420129 - RNA, 32 nt, Human
gaccagagagcaccuugcccuuccauggaaac

SEQ ID NO: 420130 - RNA, 32 nt, Human
gaccagagaggaccguucugcuggacgccuac

SEQ ID NO: 420131 - RNA, 32 nt, Human
gaccagagccagccagcagcaaaaagagcaug

SEQ ID NO: 420132 - RNA, 32 nt, Human
gaccagagcgguaucucuggcaccacacuagg

SEQ ID NO: 420133 - RNA, 32 nt, Human
gaccagaggagagcaugagggguggggcuuug

SEQ ID NO: 420134 - RNA, 32 nt, Human
gaccagaggcagcugccaccgugcccucagcc

SEQ ID NO: 420135 - RNA, 32 nt, Human
gaccagaggcuggaguggggguguguuauagc

SEQ ID NO: 420136 - RNA, 32 nt, Human
gaccagagggaggaggccgggagcagcgaccu

SEQ ID NO: 420137 - RNA, 32 nt, Human
gaccagagggcuaguguggggucauggcccau

SEQ ID NO: 420138 - RNA, 32 nt, Human
gaccagaggguaagauggguuauggagauggu

SEQ ID NO: 420139 - RNA, 32 nt, Human
gaccagaggucccuguggcuacaguagcgcag

SEQ ID NO: 420140 - RNA, 32 nt, Human
gaccagagugccaggagcuaauggagccaggc

SEQ ID NO: 420141 - RNA, 32 nt, Human
gaccagaguggaccagcacaccccaggagaga

SEQ ID NO: 420142 - RNA, 32 nt, Human
gaccagagugggcaauggagguggucagaaau

SEQ ID NO: 420143 - RNA, 32 nt, Human
gaccagaugcaacuaauauaucugccaaauug

SEQ ID NO: 420144 - RNA, 32 nt, Human
gaccagaugcuuuugguuguuguauuucacaa

SEQ ID NO: 420145 - RNA, 28 nt, Human
gaccagauguguccugccucaucccuag

SEQ ID NO: 420146 - RNA, 32 nt, Human
gaccagauugccuggguggaaggccaugaacc

SEQ ID NO: 420147 - RNA, 32 nt, Human
gaccagcaaccaggcccugcugcagcuugagg

SEQ ID NO: 420148 - RNA, 32 nt, Human
gaccagcaauuaaaagcaacacuggcucuugc

SEQ ID NO: 420149 - RNA, 32 nt, Human
gaccagcacaguggaggccccaggcaacagag

SEQ ID NO: 420150 - RNA, 32 nt, Human
gaccagcagaacuguaccuguugggcacuuuu

SEQ ID NO: 420151 - RNA, 32 nt, Human
gaccagcagacuaauggggaugagguacuguu

SEQ ID NO: 420152 - RNA, 32 nt, Human
gaccagcagagggagggaucaggcagcagugu

SEQ ID NO: 420153 - RNA, 22 nt, Human
gaccagcagcaagggccgagcg

SEQ ID NO: 420154 - RNA, 32 nt, Human
gaccagcagccugacuugacuuuugaguccua

SEQ ID NO: 420155 - RNA, 32 nt, Human
gaccagcagcgaaaaagcuggccacacacugu

SEQ ID NO: 420156 - RNA, 23 nt, Human
gaccagcagcgacugcggagcga

SEQ ID NO: 420157 - RNA, 21 nt, Human
gaccagcagcggucuagagga

SEQ ID NO: 420158 - RNA, 32 nt, Human
gaccagcaucuccagaccccagccuuucuccu

SEQ ID NO: 420159 - RNA, 32 nt, Human
gaccagcaugguggaacccccaucucuacuaa

SEQ ID NO: 420160 - RNA, 32 nt, Human
gaccagcauguucuccccaaagaccaagauau

SEQ ID NO: 420161 - RNA, 32 nt, Human
gaccagcauguucuccccaaagaccagaauau

SEQ ID NO: 420162 - RNA, 32 nt, Human
gaccagcauuuaaccaaccuaagggcccaaag

SEQ ID NO: 420163 - RNA, 32 nt, Human
gaccagccacagaacuuccucccacuuauccc

SEQ ID NO: 420164 - RNA, 32 nt, Human
gaccagccacugcuccuugggccugcagggac

SEQ ID NO: 420165 - RNA, 18 nt, Human
gaccagccacuguugcug

SEQ ID NO: 420166 - RNA, 32 nt, Human
gaccagccagggaggcagcagaggcuggaacc

SEQ ID NO: 420167 - RNA, 32 nt, Human
gaccagccaucuccauuuuauaaauaagaaaa

SEQ ID NO: 420168 - RNA, 32 nt, Human
gaccagccaucuugcaaccucaccucacagca

SEQ ID NO: 420169 - RNA, 32 nt, Human
gaccagcccagccugcauacuugccacuuggc

SEQ ID NO: 420170 - RNA, 32 nt, Human
gaccagcccagccuggucaacauggcaaaacc

SEQ ID NO: 420171 - RNA, 32 nt, Human
gaccagccccaggccaagcaaaaagaaagccc

SEQ ID NO: 420172 - RNA, 32 nt, Human
gaccagccccugagccucccgggugcuggcag

SEQ ID NO: 420173 - RNA, 32 nt, Human
gaccagccccuggggcuggcagggaggagcuc

SEQ ID NO: 420174 - RNA, 24 nt, Human
gaccagccccuuccaacccaguca

SEQ ID NO: 420175 - RNA, 32 nt, Human
gaccagcccugccucuuucauuuccagaccuu

SEQ ID NO: 420176 - RNA, 32 nt, Human
gaccagccucaacauggagaaaccccaucucu

SEQ ID NO: 420177 - RNA, 32 nt, Human
gaccagccucaacauggagaaaccccgucucu

SEQ ID NO: 420178 - RNA, 32 nt, Human
gaccagccuccacccccacuccagccucagcg

SEQ ID NO: 420179 - RNA, 32 nt, Human
gaccagccuccugggacugugacugcuuuuga

SEQ ID NO: 420180 - RNA, 32 nt, Human
gaccagccucuaccuccagauccagggaggcc

SEQ ID NO: 420181 - RNA, 19 nt, Human
gaccagccuggccaacaua

SEQ ID NO: 420182 - RNA, 32 nt, Human
gaccagccuggccaaccaacauggugaaaccc

SEQ ID NO: 420183 - RNA, 32 nt, Human
gaccagccuggccaaccaacauggugaaaccu

SEQ ID NO: 420184 - RNA, 32 nt, Human
gaccagccuggccaauacaaaaauuagccggg

SEQ ID NO: 420185 - RNA, 19 nt, Human
gaccagccugggaaacaua

SEQ ID NO: 420186 - RNA, 32 nt, Human
gaccagccugggagacagagcauggaaaccua

SEQ ID NO: 420187 - RNA, 19 nt, Human
gaccagccugggcaacaca

SEQ ID NO: 420188 - RNA, 19 nt, Human
gaccagccuggguaacaua

SEQ ID NO: 420189 - RNA, 19 nt, Human
gaccagccugguaccagga

SEQ ID NO: 420190 - RNA, 32 nt, Human
gaccagccuggugccuuggcaucucccaaugg

SEQ ID NO: 420191 - RNA, 32 nt, Human
gaccagccuugcagccuccagguccggugggg

SEQ ID NO: 420192 - RNA, 32 nt, Human
gaccagcggcugaggccaggaugccguccagg

SEQ ID NO: 420193 - RNA, 32 nt, Human
gaccagcuacccacagcaaccaaagagacuuc

SEQ ID NO: 420194 - RNA, 32 nt, Human
gaccagcuaggcucucccaggugcaauguggg

SEQ ID NO: 420195 - RNA, 32 nt, Human
gaccagcuaguuugggagguggcggcagaaua

SEQ ID NO: 420196 - RNA, 21 nt, Human
gaccagcucaaacgggagcca

SEQ ID NO: 420197 - RNA, 19 nt, Human
gaccagcucagagauguua

SEQ ID NO: 420198 - RNA, 23 nt, Human
gaccagcucagccugccucccca

SEQ ID NO: 420199 - RNA, 21 nt, Human
gaccagcucagcgaggagcca

SEQ ID NO: 420200 - RNA, 22 nt, Human
gaccagcucaggacagaugcca

SEQ ID NO: 420201 - RNA, 32 nt, Human
gaccagcucccaguaaaaaccccaggcacuca

SEQ ID NO: 420202 - RNA, 18 nt, Human
gaccagcuccuccaguca

SEQ ID NO: 420203 - RNA, 32 nt, Human
gaccagcugcugcagaagcucagggccagucg

SEQ ID NO: 420204 - RNA, 32 nt, Human
gaccagcugcuggccacauuuccugcuuuauu

SEQ ID NO: 420205 - RNA, 32 nt, Human
gaccagcuggccgcccgcgacucccucaucgc

SEQ ID NO: 420206 - RNA, 32 nt, Human
gaccagcugggcaccauagugagacccuaucu

SEQ ID NO: 420207 - RNA, 32 nt, Human
gaccagcuguagcucauuccagccuguaccuu

SEQ ID NO: 420208 - RNA, 32 nt, Human
gaccagcuucaaggagcggaaggcuggcuuga

SEQ ID NO: 420209 - RNA, 32 nt, Human
gaccagcuucuuuuucuugcaguuacagaugu

SEQ ID NO: 420210 - RNA, 32 nt, Human
gaccagcuuggugaaacccugucucuacuaaa

SEQ ID NO: 420211 - RNA, 32 nt, Human
gaccagcuuguacuugaagaucuagguuuugg

SEQ ID NO: 420212 - RNA, 24 nt, Human
gaccagcuuugcagccagaagcca

SEQ ID NO: 420213 - RNA, 32 nt, Human
gaccaggaaagccgaaggcggagcagcuggag

SEQ ID NO: 420214 - RNA, 32 nt, Human
gaccaggacagaaccacaggcacacacugagg

SEQ ID NO: 420215 - RNA, 32 nt, Human
gaccaggacuacauuucccaagaggcucugcu

SEQ ID NO: 420216 - RNA, 32 nt, Human
gaccaggagcaaugugcagccuccucuccccc

SEQ ID NO: 420217 - RNA, 32 nt, Human
gaccaggagcaucuggaccaucgaccuggccu

SEQ ID NO: 420218 - RNA, 32 nt, Human
gaccaggagccuccauauccugacugaaaacc

SEQ ID NO: 420219 - RNA, 32 nt, Human
gaccaggaggaaccugacucagaugcugaggu

SEQ ID NO: 420220 - RNA, 32 nt, Human
gaccaggaggacagaguuugcuuucauauuuu

SEQ ID NO: 420221 - RNA, 32 nt, Human
gaccaggaggaggaggaggaggaggaggagag

SEQ ID NO: 420222 - RNA, 32 nt, Human
gaccaggagggcccuggaggcccagccacaga

SEQ ID NO: 420223 - RNA, 32 nt, Human
gaccaggagguugaggcugcagugagccguga

SEQ ID NO: 420224 - RNA, 32 nt, Human
gaccaggaguucgagaagagccugggcaacau

SEQ ID NO: 420225 - RNA, 32 nt, Human
gaccaggaguucgaggcugcagugagccgaga

SEQ ID NO: 420226 - RNA, 32 nt, Human
gaccaggaguuugaggcuucagugagcucuaa

SEQ ID NO: 420227 - RNA, 32 nt, Human
gaccaggaucuaguuucuuucucucuacucug

SEQ ID NO: 420228 - RNA, 32 nt, Human
gaccaggaugccaggagcagagacaggguggc

SEQ ID NO: 420229 - RNA, 32 nt, Human
gaccaggcaaaaaguccauuuugugcucagaa

SEQ ID NO: 420230 - RNA, 32 nt, Human
gaccaggcacuuugaggaagggcaguucgugg

SEQ ID NO: 420231 - RNA, 19 nt, Human
gaccaggcaggcaaaggcc

SEQ ID NO: 420232 - RNA, 32 nt, Human
gaccaggcagggcagagacaauggcugcagga

SEQ ID NO: 420233 - RNA, 32 nt, Human
gaccaggcagucucuaaugaauaggcaaggcc

SEQ ID NO: 420234 - RNA, 32 nt, Human
gaccaggccagccccagugacuccaggcucca

SEQ ID NO: 420235 - RNA, 32 nt, Human
gaccaggcccugcuuaccucuguuuugguuuu

SEQ ID NO: 420236 - RNA, 32 nt, Human
gaccaggccuuucauucugggcucgagaccaa

SEQ ID NO: 420237 - RNA, 23 nt, Human
gaccaggcuacuucuccccuccu

SEQ ID NO: 420238 - RNA, 16 nt, Human
gaccaggcucccagag

SEQ ID NO: 420239 - RNA, 32 nt, Human
gaccaggcucuggaccaugcaggaggaaagaa

SEQ ID NO: 420240 - RNA, 27 nt, Human
gaccaggcugccaggcaccaucugcca

SEQ ID NO: 420241 - RNA, 32 nt, Human
gaccaggcugcuccaucuccgcuaagcccagg

SEQ ID NO: 420242 - RNA, 32 nt, Human
gaccaggcugggaggacagagccagcagcugc

SEQ ID NO: 420243 - RNA, 32 nt, Human
gaccaggcuggguuggggguuggguggggcug

SEQ ID NO: 420244 - RNA, 32 nt, Human
gaccaggcuguccuugaccugcagagaugugu

SEQ ID NO: 420245 - RNA, 32 nt, Human
gaccaggcuuccaaugacuaggucaccagguc

SEQ ID NO: 420246 - RNA, 32 nt, Human
gaccaggcuuccagcuccucugcaccagaccu

SEQ ID NO: 420247 - RNA, 32 nt, Human
gaccagggaccaggccagggugcgggcaggca

SEQ ID NO: 420248 - RNA, 17 nt, Human
gaccagggaccaggcug

SEQ ID NO: 420249 - RNA, 22 nt, Human
gaccagggcagcugcacacuua

SEQ ID NO: 420250 - RNA, 20 nt, Human
gaccagggccaugggucuga

SEQ ID NO: 420251 - RNA, 32 nt, Human
gaccagggcccggcgugguggaucaugccugu

SEQ ID NO: 420252 - RNA, 32 nt, Human
gaccagggccgugcccgcaucuuccuaaggca

SEQ ID NO: 420253 - RNA, 32 nt, Human
gaccagggcuggccagccccuuccgcagccuc

SEQ ID NO: 420254 - RNA, 32 nt, Human
gaccagggcuugucuccuccuggacuugggcc

SEQ ID NO: 420255 - RNA, 32 nt, Human
gaccaggggccagccagugucugaccaagguc

SEQ ID NO: 420256 - RNA, 32 nt, Human
gaccaggggcuuguugagagcugagccaugca

SEQ ID NO: 420257 - RNA, 32 nt, Human
gaccagggggagacuccuggccucagccagug

SEQ ID NO: 420258 - RNA, 32 nt, Human
gaccagggguucagaggagacuauuuacccuu

SEQ ID NO: 420259 - RNA, 32 nt, Human
gaccaggguggagcugagaagaggaggaggug

SEQ ID NO: 420260 - RNA, 32 nt, Human
gaccaggguugcugccccaacugcugccacuc

SEQ ID NO: 420261 - RNA, 32 nt, Human
gaccagguagccgaggacagugaggcaugucu

SEQ ID NO: 420262 - RNA, 32 nt, Human
gaccagguaggaggaggagagggaguagaaag

SEQ ID NO: 420263 - RNA, 32 nt, Human
gaccaggucaccgacgaugagggcgcaccugc

SEQ ID NO: 420264 - RNA, 32 nt, Human
gaccaggucccuagguucacaugcccccuaca

SEQ ID NO: 420265 - RNA, 32 nt, Human
gaccaggucucccaucuccuacuuuaugacgc

SEQ ID NO: 420266 - RNA, 32 nt, Human
gaccaggucuuguuucucucucugugcuacca

SEQ ID NO: 420267 - RNA, 32 nt, Human
gaccagguggaggaagucaccuacgacguggc

SEQ ID NO: 420268 - RNA, 32 nt, Human
gaccaggugguggccagagaggcuccaggggc

SEQ ID NO: 420269 - RNA, 32 nt, Human
gaccagguuguggcagaggauucuguguuccu

SEQ ID NO: 420270 - RNA, 32 nt, Human
gaccagucacauagaugaaccaccaacacaaa

SEQ ID NO: 420271 - RNA, 32 nt, Human
gaccagucccugcccauggccaucuggauggu

SEQ ID NO: 420272 - RNA, 32 nt, Human
gaccaguccuuucugggaccucaaugggucac

SEQ ID NO: 420273 - RNA, 32 nt, Human
gaccagucuucaguauaaucucagccagaaaa

SEQ ID NO: 420274 - RNA, 32 nt, Human
gaccagugauuucagcucucacucccuucuca

SEQ ID NO: 420275 - RNA, 32 nt, Human
gaccagugcauccucaagcucugcuccuucag

SEQ ID NO: 420276 - RNA, 32 nt, Human
gaccagugccugccaaccagauguuacugguc

SEQ ID NO: 420277 - RNA, 32 nt, Human
gaccagugcucuucaggaauguggcugcaagc

SEQ ID NO: 420278 - RNA, 32 nt, Human
gaccaguggcaaagaaacuccuuucauuuugu

SEQ ID NO: 420279 - RNA, 32 nt, Human
gaccaguggcugggagccccacacagaugcug

SEQ ID NO: 420280 - RNA, 32 nt, Human
gaccaguguaauagucacagacuugcauccug

SEQ ID NO: 420281 - RNA, 32 nt, Human
gaccaguguugcccgaggaggggccggccugc

SEQ ID NO: 420282 - RNA, 32 nt, Human
gaccaguucugagugagaaucagacuugcccc

SEQ ID NO: 420283 - RNA, 32 nt, Human
gaccaguuggcaaacccaaguaacaaaucagc

SEQ ID NO: 420284 - RNA, 32 nt, Human
gaccaguuugauugaggagcugcacugaucac

SEQ ID NO: 420285 - RNA, 32 nt, Human
gaccaguuugccuccuucccugccuuaaaagc

SEQ ID NO: 420286 - RNA, 32 nt, Human
gaccauaagacauauuuuauguccuuuugcca

SEQ ID NO: 420287 - RNA, 32 nt, Human
gaccauaagacauauuuuauguccuuuugccg

SEQ ID NO: 420288 - RNA, 32 nt, Human
gaccauaccacugcauuccagccugggugaca

SEQ ID NO: 420289 - RNA, 32 nt, Human
gaccauaccagugcauuccagccuggguacac

SEQ ID NO: 420290 - RNA, 32 nt, Human
gaccauacugaccacaaaugauauugucauua

SEQ ID NO: 420291 - RNA, 24 nt, Human
gaccauacuuugagaacccauggg

SEQ ID NO: 420292 - RNA, 32 nt, Human
gaccauagaguccucucucugccucuauccca

SEQ ID NO: 420293 - RNA, 32 nt, Human
gaccauaggagagaugugggaggcucaguucc

SEQ ID NO: 420294 - RNA, 32 nt, Human
gaccauauauggacguggguuggcaauaagag

SEQ ID NO: 420295 - RNA, 32 nt, Human
gaccauauuuacucuuucuaacuuucuuuacu

SEQ ID NO: 420296 - RNA, 32 nt, Human
gaccaucaagugggaagaugugauuugucuug

SEQ ID NO: 420297 - RNA, 32 nt, Human
gaccaucacaugccuccccucaaucacagguu

SEQ ID NO: 420298 - RNA, 32 nt, Human
gaccaucaccucccaguagcaauuugcuuuca

SEQ ID NO: 420299 - RNA, 32 nt, Human
gaccaucaccugcccaccuaagcccacggugc

SEQ ID NO: 420300 - RNA, 32 nt, Human
gaccaucacuacuaauuccagaccauuuccau

SEQ ID NO: 420301 - RNA, 32 nt, Human
gaccaucagccagcaagaguuuggccgcacug

SEQ ID NO: 420302 - RNA, 32 nt, Human
gaccaucauggugaaaccucaucuccgcuaaa

SEQ ID NO: 420303 - RNA, 32 nt, Human
gaccaucauuaaauguguacugugaagagauu

SEQ ID NO: 420304 - RNA, 32 nt, Human
gaccauccaacauuaaaaacugcugauagaag

SEQ ID NO: 420305 - RNA, 32 nt, Human
gaccaucccaggaaguugugggguuggggagg

SEQ ID NO: 420306 - RNA, 32 nt, Human
gaccaucccccaaacucuacucuuauacccag

SEQ ID NO: 420307 - RNA, 32 nt, Human
gaccaucccccuccagccccacugccugccca

SEQ ID NO: 420308 - RNA, 32 nt, Human
gaccauccucacccuguguuugcuuuguucca

SEQ ID NO: 420309 - RNA, 32 nt, Human
gaccauccugcccggaccacagaaggagaguu

SEQ ID NO: 420310 - RNA, 32 nt, Human
gaccauccugguucacccagaauugcaccaaa

SEQ ID NO: 420311 - RNA, 32 nt, Human
gaccaucgacuuggccagugagacugagaaug

SEQ ID NO: 420312 - RNA, 32 nt, Human
gaccaucuaggagaggggagggcagagggggu

SEQ ID NO: 420313 - RNA, 32 nt, Human
gaccaucuagggucaguaccugcugggcuuag

SEQ ID NO: 420314 - RNA, 32 nt, Human
gaccaucucacugccuaccguuuccuuuuucc

SEQ ID NO: 420315 - RNA, 32 nt, Human
gaccaucucguccuuuuuguaucgcggaaacc

SEQ ID NO: 420316 - RNA, 32 nt, Human
gaccaucucugccucugccuuccccugcuccu

SEQ ID NO: 420317 - RNA, 32 nt, Human
gaccaucucuguccccuccacccucacuccau

SEQ ID NO: 420318 - RNA, 32 nt, Human
gaccaucugccagcuucucucguuccgucgau

SEQ ID NO: 420319 - RNA, 32 nt, Human
gaccaugaagaaaaauggggagaaaagaacaa

SEQ ID NO: 420320 - RNA, 32 nt, Human
gaccaugacuaccuucaccuggaacaucaacc

SEQ ID NO: 420321 - RNA, 22 nt, Human
gaccaugagagauaaggacuga

SEQ ID NO: 420322 - RNA, 32 nt, Human
gaccaugagcuucuccuccucauccucccagc

SEQ ID NO: 420323 - RNA, 29 nt, Human
gaccaugaguuggauuccuuuuaagauug

SEQ ID NO: 420324 - RNA, 32 nt, Human
gaccaugcacaguacacauacgugcauacaca

SEQ ID NO: 420325 - RNA, 32 nt, Human
gaccaugcacagugccuggggcggaaggagga

SEQ ID NO: 420326 - RNA, 32 nt, Human
gaccaugcagaucacugucaguggagggaagc

SEQ ID NO: 420327 - RNA, 32 nt, Human
gaccaugcaguggauucugacuggccuucaaa

SEQ ID NO: 420328 - RNA, 32 nt, Human
gaccaugccacugcacuccagccugggcaaca

SEQ ID NO: 420329 - RNA, 32 nt, Human
gaccaugccacugcacuccggccugggugaca

SEQ ID NO: 420330 - RNA, 32 nt, Human
gaccaugccauugcacuccagccugggcgaca

SEQ ID NO: 420331 - RNA, 32 nt, Human
gaccaugccauuggacuccagccugggcaaaa

SEQ ID NO: 420332 - RNA, 32 nt, Human
gaccaugcccacuuaauuuuuguauuuuuagg

SEQ ID NO: 420333 - RNA, 32 nt, Human
gaccaugccuggcuaauuuuguauuuuuagua

SEQ ID NO: 420334 - RNA, 32 nt, Human
gaccaugccugggaauggagccaccacaucca

SEQ ID NO: 420335 - RNA, 29 nt, Human
gaccaugcugcuguucugccccggcugcg

SEQ ID NO: 420336 - RNA, 32 nt, Human
gaccaugcuggaauuggaugauucugcaauuc

SEQ ID NO: 420337 - RNA, 32 nt, Human
gaccaugcugggaauccagaaacagggacccc

SEQ ID NO: 420338 - RNA, 32 nt, Human
gaccauggaaucaccagcuagagguuauggac

SEQ ID NO: 420339 - RNA, 29 nt, Human
gaccauggaauccagagcugaagggggcu

SEQ ID NO: 420340 - RNA, 32 nt, Human
gaccauggcccuggcccuggcccggcgucgcu

SEQ ID NO: 420341 - RNA, 32 nt, Human
gaccauggccugggugguuaagggagugggac

SEQ ID NO: 420342 - RNA, 32 nt, Human
gaccaugggggaguguggugcagaugggcagg

SEQ ID NO: 420343 - RNA, 32 nt, Human
gaccauggggucuuguguuuccaacuucgaag

SEQ ID NO: 420344 - RNA, 32 nt, Human
gaccaugggugaguuacuuaagccaggcucug

SEQ ID NO: 420345 - RNA, 19 nt, Human
gaccauggugaaaccccgu

SEQ ID NO: 420346 - RNA, 32 nt, Human
gaccaugugcugccgcccaaccugcucuagug

SEQ ID NO: 420347 - RNA, 32 nt, Human
gaccaugugcuguccgcaggccuggaugcccu

SEQ ID NO: 420348 - RNA, 32 nt, Human
gaccaugugucaggaaaauugugaacguagau

SEQ ID NO: 420349 - RNA, 32 nt, Human
gaccaugugucugguuucuggccugccacaac

SEQ ID NO: 420350 - RNA, 32 nt, Human
gaccauguucuccacagugucuccaguggaaa

SEQ ID NO: 420351 - RNA, 32 nt, Human
gaccauguuggccaggcuggucucgaacuccc

SEQ ID NO: 420352 - RNA, 32 nt, Human
gaccauguuggccaggcuggucucgaacuccu

SEQ ID NO: 420353 - RNA, 32 nt, Human
gaccauuagcaggcacccaggccugucuuugg

SEQ ID NO: 420354 - RNA, 32 nt, Human
gaccauuauuacuggugcaaaaugaguugaua

SEQ ID NO: 420355 - RNA, 19 nt, Human
gaccauucaggacacaggg

SEQ ID NO: 420356 - RNA, 32 nt, Human
gaccauuccauucaggagcaaagagcaccaug

SEQ ID NO: 420357 - RNA, 32 nt, Human
gaccauuccucaggaaacuuuguugacagcgg

SEQ ID NO: 420358 - RNA, 19 nt, Human
gaccauuccuuucuucaua

SEQ ID NO: 420359 - RNA, 32 nt, Human
gaccauucuauuguguggaugaccacauaaaa

SEQ ID NO: 420360 - RNA, 19 nt, Human
gaccauugaagaaaaggac

SEQ ID NO: 420361 - RNA, 32 nt, Human
gaccauuggcugcgcuaacccccagcccacag

SEQ ID NO: 420362 - RNA, 32 nt, Human
gaccauuggcuucccucaucugaggcguggga

SEQ ID NO: 420363 - RNA, 32 nt, Human
gaccauugugaaaaugaaacgggaugaccuca

SEQ ID NO: 420364 - RNA, 32 nt, Human
gaccauuuagaggugagaugggcagaugagga

SEQ ID NO: 420365 - RNA, 32 nt, Human
gaccauuuauuauaaagcugcaaagaagcugu

SEQ ID NO: 420366 - RNA, 32 nt, Human
gaccauuuccaggagggucuguccccagaugc

SEQ ID NO: 420367 - RNA, 32 nt, Human
gaccauuucccugaugcucugagcuuaugauc

SEQ ID NO: 420368 - RNA, 32 nt, Human
gaccauuuccuaucugccaggcauuuuucuaa

SEQ ID NO: 420369 - RNA, 22 nt, Human
gaccauuuggcaucggcuccug

SEQ ID NO: 420370 - RNA, 24 nt, Human
gaccauuuugagaucauggaggaa

SEQ ID NO: 420371 - RNA, 32 nt, Human
gacccaaaccagacuguccuggcuauccucuc

SEQ ID NO: 420372 - RNA, 32 nt, Human
gacccaaagcguugggauuacaggcaugagcc

SEQ ID NO: 420373 - RNA, 32 nt, Human
gacccaaagcuuaugaaagaagaacagauauc

SEQ ID NO: 420374 - RNA, 32 nt, Human
gacccaaaggaaauagcaguggggaagcauca

SEQ ID NO: 420375 - RNA, 32 nt, Human
gacccaaaggauaagaaagaaaagagagcuca

SEQ ID NO: 420376 - RNA, 32 nt, Human
gacccaaagugcugggauuacaggugugagcc

SEQ ID NO: 420377 - RNA, 25 nt, Human
gacccaaccagcauucccccuggca

SEQ ID NO: 420378 - RNA, 32 nt, Human
gacccaacucaggccuuggugucccuggacug

SEQ ID NO: 420379 - RNA, 32 nt, Human
gacccaacucucuggggugcucaggggcuugg

SEQ ID NO: 420380 - RNA, 25 nt, Human
gacccaacucuuagagggcacauca

SEQ ID NO: 420381 - RNA, 20 nt, Human
gacccaacugaggacaggga

SEQ ID NO: 420382 - RNA, 23 nt, Human
gacccaacuuuccagaccuucca

SEQ ID NO: 420383 - RNA, 32 nt, Human
gacccaagauugugccacugcacuccacccug

SEQ ID NO: 420384 - RNA, 32 nt, Human
gacccaagcaaucccaaccuggugcuagguca

SEQ ID NO: 420385 - RNA, 24 nt, Human
gacccaagcaccacaucaccgcga

SEQ ID NO: 420386 - RNA, 32 nt, Human
gacccaagcccaggaccuucguggagcugcuu

SEQ ID NO: 420387 - RNA, 22 nt, Human
gacccaagcccugaaggccuga

SEQ ID NO: 420388 - RNA, 32 nt, Human
gacccaaggcaucuugaaucccaucuauaaga

SEQ ID NO: 420389 - RNA, 32 nt, Human
gacccaagugaaauucaucuuugaguugauuc

SEQ ID NO: 420390 - RNA, 32 nt, Human
gacccaaucuccaggaaaacaacacucacaua

SEQ ID NO: 420391 - RNA, 32 nt, Human
gacccaaugcacacaaaacaacccuagagugu

SEQ ID NO: 420392 - RNA, 31 nt, Human
gacccaaugccauuacagaaauuccauuaca

SEQ ID NO: 420393 - RNA, 32 nt, Human
gacccaauggugcuggaaaaaguucaucuauu

SEQ ID NO: 420394 - RNA, 32 nt, Human
gacccaauucaucaacuggaaagcaauucuau

SEQ ID NO: 420395 - RNA, 32 nt, Human
gacccacacagaacaggggcugagggcacuga

SEQ ID NO: 420396 - RNA, 32 nt, Human
gacccacaccuguaaucccagcacuuugggag

SEQ ID NO: 420397 - RNA, 32 nt, Human
gacccacaccuugccgugccccggacuacagc

SEQ ID NO: 420398 - RNA, 32 nt, Human
gacccacacucuggacagucugggacauccag

SEQ ID NO: 420399 - RNA, 32 nt, Human
gacccacagaaaaggagcccauggaacacaag

SEQ ID NO: 420400 - RNA, 32 nt, Human
gacccacagaaaggaggcagcacacagagaaa

SEQ ID NO: 420401 - RNA, 32 nt, Human
gacccacagacuccuggucugagcccaauaaa

SEQ ID NO: 420402 - RNA, 32 nt, Human
gacccacagauggcgucaaugugaacaccucu

SEQ ID NO: 420403 - RNA, 32 nt, Human
gacccacagccagcuuuguuucuugaaugugg

SEQ ID NO: 420404 - RNA, 32 nt, Human
gacccacaggcagaguugacacggaaccccaa

SEQ ID NO: 420405 - RNA, 32 nt, Human
gacccacagguggggaaacugaggcaggaaca

SEQ ID NO: 420406 - RNA, 32 nt, Human
gacccacaguggcugccugccuccgggaggga

SEQ ID NO: 420407 - RNA, 32 nt, Human
gacccacaucugcagugggaaugaagcugaag

SEQ ID NO: 420408 - RNA, 32 nt, Human
gacccacaugccauuuguacugaccccaucac

SEQ ID NO: 420409 - RNA, 32 nt, Human
gacccacauggacuaaaggcaaugccaggagc

SEQ ID NO: 420410 - RNA, 32 nt, Human
gacccacauggagaaacgccaucucuacuaaa

SEQ ID NO: 420411 - RNA, 32 nt, Human
gacccaccaagugcuuuucccaagggucuggg

SEQ ID NO: 420412 - RNA, 32 nt, Human
gacccaccacagugugggcaggcaccauccag

SEQ ID NO: 420413 - RNA, 32 nt, Human
gacccaccaccucuugcacucucgcuuuugga

SEQ ID NO: 420414 - RNA, 32 nt, Human
gacccaccauacccuguguauguaugcauguu

SEQ ID NO: 420415 - RNA, 32 nt, Human
gacccacccaacaaucagagacaugucuggug

SEQ ID NO: 420416 - RNA, 16 nt, Human
gacccaccccaccccc

SEQ ID NO: 420417 - RNA, 32 nt, Human
gacccaccccagcugcugcugccacacucgcg

SEQ ID NO: 420418 - RNA, 32 nt, Human
gacccaccccucuacuccucacccucagcaca

SEQ ID NO: 420419 - RNA, 32 nt, Human
gacccaccccucuccagguuaucccagaaaug

SEQ ID NO: 420420 - RNA, 32 nt, Human
gacccaccuccaggaccucaaggaagugacac

SEQ ID NO: 420421 - RNA, 32 nt, Human
gacccaccuggccccuccucugacacagggcu

SEQ ID NO: 420422 - RNA, 32 nt, Human
gacccaccuuacuggccagucugcauccuugc

SEQ ID NO: 420423 - RNA, 32 nt, Human
gacccaccuuucuccccgccagcugcaucaga

SEQ ID NO: 420424 - RNA, 32 nt, Human
gacccacgaccggcuggucacuugcugccacc

SEQ ID NO: 420425 - RNA, 32 nt, Human
gacccacgcagccacccagccucagcacucau

SEQ ID NO: 420426 - RNA, 32 nt, Human
gacccacgccguggagaggaccagccucaggu

SEQ ID NO: 420427 - RNA, 32 nt, Human
gacccacggacuccuggucuggcccaauaaag

SEQ ID NO: 420428 - RNA, 32 nt, Human
gacccacguagacugcagacccugccacggac

SEQ ID NO: 420429 - RNA, 32 nt, Human
gacccacgugcuccagucccagcuccaaaagc

SEQ ID NO: 420430 - RNA, 32 nt, Human
gacccacuauaccuugcauuugcugaguacac

SEQ ID NO: 420431 - RNA, 32 nt, Human
gacccacuccccucacauuccacaggcccaug

SEQ ID NO: 420432 - RNA, 32 nt, Human
gacccacugcauuccagccuggcgacagagca

SEQ ID NO: 420433 - RNA, 32 nt, Human
gacccacuggagccagccccacccuaggcagg

SEQ ID NO: 420434 - RNA, 22 nt, Human
gacccacuggcuucugcucuca

SEQ ID NO: 420435 - RNA, 32 nt, Human
gacccacuguaacuuagccacugaugaaccuu

SEQ ID NO: 420436 - RNA, 32 nt, Human
gacccagaaacuuuaacaaaaauguggcucau

SEQ ID NO: 420437 - RNA, 32 nt, Human
gacccagaaagagggaacaaugaggaccccuc

SEQ ID NO: 420438 - RNA, 32 nt, Human
gacccagaaggugggguuggcagggggagggu

SEQ ID NO: 420439 - RNA, 19 nt, Human
gacccagaccagccaaaga

SEQ ID NO: 420440 - RNA, 22 nt, Human
gacccagaccagucccaacgcc

SEQ ID NO: 420441 - RNA, 19 nt, Human
gacccagacgaggggaugc

SEQ ID NO: 420442 - RNA, 20 nt, Human
gacccagacggucugugugg

SEQ ID NO: 420443 - RNA, 32 nt, Human
gacccagacucaguuccugaauuucugugacc

SEQ ID NO: 420444 - RNA, 22 nt, Human
gacccagacucuaggaagcugg

SEQ ID NO: 420445 - RNA, 32 nt, Human
gacccagagagaaaggaugcaguucccuccug

SEQ ID NO: 420446 - RNA, 21 nt, Human
gacccagagagcuagggcugg

SEQ ID NO: 420447 - RNA, 32 nt, Human
gacccagagagugugggacuccccgcuucauc

SEQ ID NO: 420448 - RNA, 32 nt, Human
gacccagagccccauccugaugaccucacaga

SEQ ID NO: 420449 - RNA, 32 nt, Human
gacccagaggggcagcgcagggcgcagagcac

SEQ ID NO: 420450 - RNA, 21 nt, Human
gacccagaggugccccuuccu

SEQ ID NO: 420451 - RNA, 22 nt, Human
gacccagagguggaggccacgg

SEQ ID NO: 420452 - RNA, 32 nt, Human
gacccagagugccuacccucgccugccugggc

SEQ ID NO: 420453 - RNA, 32 nt, Human
gacccagaugguauuggacacagugccccgcu

SEQ ID NO: 420454 - RNA, 23 nt, Human
gacccagcaacaugcuuuaaccc

SEQ ID NO: 420455 - RNA, 32 nt, Human
gacccagcaacugcuucucucccuucucucuc

SEQ ID NO: 420456 - RNA, 32 nt, Human
gacccagcaccaacauuagcacuugaagaacu

SEQ ID NO: 420457 - RNA, 19 nt, Human
gacccagcagcaucaagcc

SEQ ID NO: 420458 - RNA, 24 nt, Human
gacccagcaggaggacccaacgcu

SEQ ID NO: 420459 - RNA, 32 nt, Human
gacccagcaguuuccucugcucacucuuuucc

SEQ ID NO: 420460 - RNA, 32 nt, Human
gacccagcaucugaguuagguuccagcaugua

SEQ ID NO: 420461 - RNA, 32 nt, Human
gacccagccagccggguccugcuggucccuac

SEQ ID NO: 420462 - RNA, 20 nt, Human
gacccagccagggcuggcug

SEQ ID NO: 420463 - RNA, 32 nt, Human
gacccagccagucucauccagcagguuggguu

SEQ ID NO: 420464 - RNA, 23 nt, Human
gacccagcccagccugagcccca

SEQ ID NO: 420465 - RNA, 32 nt, Human
gacccagcccccauggcuucagaagagcuaca

SEQ ID NO: 420466 - RNA, 32 nt, Human
gacccagcccccauggcuucagaagaggaugg

SEQ ID NO: 420467 - RNA, 32 nt, Human
gacccagcccgagauggaguacgacugugaga

SEQ ID NO: 420468 - RNA, 32 nt, Human
gacccagccgcuggcucccagccuggcugaag

SEQ ID NO: 420469 - RNA, 32 nt, Human
gacccagccuccuguuuaauaggcugagccca

SEQ ID NO: 420470 - RNA, 17 nt, Human
gacccagccuugcacuc

SEQ ID NO: 420471 - RNA, 32 nt, Human
gacccagcucacuggucagccuacacaugucu

SEQ ID NO: 420472 - RNA, 32 nt, Human
gacccagcugccucuuacgguuugguauggga

SEQ ID NO: 420473 - RNA, 32 nt, Human
gacccagcuguagugagguugcagugauugag

SEQ ID NO: 420474 - RNA, 32 nt, Human
gacccaggaagcggagguugcagugagccaag

SEQ ID NO: 420475 - RNA, 32 nt, Human
gacccaggaccagcaacccgcgaccaaucaug

SEQ ID NO: 420476 - RNA, 32 nt, Human
gacccaggacugauguggaccaggaaggacag

SEQ ID NO: 420477 - RNA, 32 nt, Human
gacccaggagccaagagaaggcugaagccagc

SEQ ID NO: 420478 - RNA, 32 nt, Human
gacccaggaggcagagcuugcagugagccgag

SEQ ID NO: 420479 - RNA, 23 nt, Human
gacccaggaggcagagguugcag

SEQ ID NO: 420480 - RNA, 26 nt, Human
gacccaggaggcagagguugcaguga

SEQ ID NO: 420481 - RNA, 32 nt, Human
gacccaggaggcagagguugcagugagccaag

SEQ ID NO: 420482 - RNA, 32 nt, Human
gacccaggaggcggagguugcggugacccucc

SEQ ID NO: 420483 - RNA, 32 nt, Human
gacccaggagguggaggucgcagugagccgag

SEQ ID NO: 420484 - RNA, 32 nt, Human
gacccaggauuuagggucacaugcugcaggca

SEQ ID NO: 420485 - RNA, 32 nt, Human
gacccaggcagcccggguccccgccucccgga

SEQ ID NO: 420486 - RNA, 32 nt, Human
gacccaggcagcccuggugaggccgcaggagu

SEQ ID NO: 420487 - RNA, 32 nt, Human
gacccaggcagugucagcagugaagguucucg

SEQ ID NO: 420488 - RNA, 32 nt, Human
gacccaggcaucuggggagccacagaagucgu

SEQ ID NO: 420489 - RNA, 20 nt, Human
gacccaggcccaagagaccc

SEQ ID NO: 420490 - RNA, 32 nt, Human
gacccaggccuucugggcucugucccccgcac

SEQ ID NO: 420491 - RNA, 32 nt, Human
gacccaggcucugaagauucccagaagccaca

SEQ ID NO: 420492 - RNA, 32 nt, Human
gacccaggcugcgggacgcggugcaggcugcg

SEQ ID NO: 420493 - RNA, 32 nt, Human
gacccagggaaagggaagcaggguaggagucc

SEQ ID NO: 420494 - RNA, 32 nt, Human
gacccagggaacuggagagagcuccagaaagg

SEQ ID NO: 420495 - RNA, 32 nt, Human
gacccagggaaugggcccagggcaggacccua

SEQ ID NO: 420496 - RNA, 32 nt, Human
gacccagggaggucgaugcugcagugagcuau

SEQ ID NO: 420497 - RNA, 32 nt, Human
gacccagggaggugaagugcacagacucggca

SEQ ID NO: 420498 - RNA, 32 nt, Human
gacccaggucugugggguccagccuggcaaaa

SEQ ID NO: 420499 - RNA, 32 nt, Human
gacccaggugaacacgcugacugugaaccugc

SEQ ID NO: 420500 - RNA, 32 nt, Human
gacccaggugacccagcucugugucauuugga

SEQ ID NO: 420501 - RNA, 32 nt, Human
gacccagguggagguaaggaagagucuggugg

SEQ ID NO: 420502 - RNA, 32 nt, Human
gacccagguggcugggguggcagcugaucaug

SEQ ID NO: 420503 - RNA, 32 nt, Human
gacccaggugggggcuccugcagccacugccc

SEQ ID NO: 420504 - RNA, 32 nt, Human
gacccagucacuucucccaguuuagugauaac

SEQ ID NO: 420505 - RNA, 23 nt, Human
gacccagugaacccaaggccuga

SEQ ID NO: 420506 - RNA, 32 nt, Human
gacccaguuucuuguuaauaagugccaacucc

SEQ ID NO: 420507 - RNA, 32 nt, Human
gacccauaacuucaaacaucugccucagagua

SEQ ID NO: 420508 - RNA, 32 nt, Human
gacccauaccuucuccccacagccucugcuga

SEQ ID NO: 420509 - RNA, 32 nt, Human
gacccauaucuggguggagaaugggugaaaag

SEQ ID NO: 420510 - RNA, 19 nt, Human
gacccaucaccccucuggu

SEQ ID NO: 420511 - RNA, 18 nt, Human
gacccaucaccgguccua

SEQ ID NO: 420512 - RNA, 32 nt, Human
gacccaucacuggaagugggauuugaaaugca

SEQ ID NO: 420513 - RNA, 32 nt, Human
gacccaucaucuucucacccacccucauugca

SEQ ID NO: 420514 - RNA, 32 nt, Human
gacccauccccuuuccaguacacacaccugau

SEQ ID NO: 420515 - RNA, 32 nt, Human
gacccauccucccagccagguuucccuccagc

SEQ ID NO: 420516 - RNA, 32 nt, Human
gacccaucucaacuggcccagcaucccaacuu

SEQ ID NO: 420517 - RNA, 32 nt, Human
gacccaucucacccucucucauuccucaaagc

SEQ ID NO: 420518 - RNA, 32 nt, Human
gacccaucucucuugugcuccagacuucauca

SEQ ID NO: 420519 - RNA, 32 nt, Human
gacccaucuuccuccucugccaccccgaucuu

SEQ ID NO: 420520 - RNA, 16 nt, Human
gacccaucuucugcug

SEQ ID NO: 420521 - RNA, 32 nt, Human
gacccaugaggcagaaaaagccaugggcuagc

SEQ ID NO: 420522 - RNA, 32 nt, Human
gacccaugccacacacaaccagucccgaaaau

SEQ ID NO: 420523 - RNA, 32 nt, Human
gacccaugcgccacguccugggugguggaauc

SEQ ID NO: 420524 - RNA, 32 nt, Human
gacccauggaucugaauaaacauguccuugcu

SEQ ID NO: 420525 - RNA, 32 nt, Human
gacccauggcccugugcagggugcagggugag

SEQ ID NO: 420526 - RNA, 18 nt, Human
gacccaugugcuuccuug

SEQ ID NO: 420527 - RNA, 32 nt, Human
gacccauucagaccccagcgcuccggaaagua

SEQ ID NO: 420528 - RNA, 32 nt, Human
gacccauuccuguuccucuccccaccacuacu

SEQ ID NO: 420529 - RNA, 32 nt, Human
gacccauucuaugccugucucucagggauuaa

SEQ ID NO: 420530 - RNA, 23 nt, Human
gacccauucucaguaaugggaga

SEQ ID NO: 420531 - RNA, 32 nt, Human
gacccauugccucuguuggaagacagaggucc

SEQ ID NO: 420532 - RNA, 32 nt, Human
gacccauugggaccagcccacccggaccuaac

SEQ ID NO: 420533 - RNA, 21 nt, Human
gacccauuuacaaccaucacc

SEQ ID NO: 420534 - RNA, 32 nt, Human
gacccauuuccccagccgugucgucuccagga

SEQ ID NO: 420535 - RNA, 32 nt, Human
gacccauuugggcagacacaggccacggaaac

SEQ ID NO: 420536 - RNA, 32 nt, Human
gaccccaaagagaccgccaucauggacgaccu

SEQ ID NO: 420537 - RNA, 32 nt, Human
gaccccaacaccugcaugcuggguccagagcc

SEQ ID NO: 420538 - RNA, 32 nt, Human
gaccccaaccacgguacucaucaccaccacca

SEQ ID NO: 420539 - RNA, 32 nt, Human
gaccccaaccucuaccgcgugggacagagcaa

SEQ ID NO: 420540 - RNA, 32 nt, Human
gaccccaacuccugccugcccacacugugacu

SEQ ID NO: 420541 - RNA, 32 nt, Human
gaccccaacuucucuuugaucucugaaucccc

SEQ ID NO: 420542 - RNA, 18 nt, Human
gaccccaagcucacccca

SEQ ID NO: 420543 - RNA, 20 nt, Human
gaccccaagucccccacccc

SEQ ID NO: 420544 - RNA, 24 nt, Human
gaccccaaguuucugugcauucag

SEQ ID NO: 420545 - RNA, 32 nt, Human
gaccccaauccugaagaucuggacccgguuuc

SEQ ID NO: 420546 - RNA, 32 nt, Human
gaccccaaucugcuugaaaccugacucugcuu

SEQ ID NO: 420547 - RNA, 19 nt, Human
gaccccacaccccuccuug

SEQ ID NO: 420548 - RNA, 32 nt, Human
gaccccacagcaccugggccagaccaacagcu

SEQ ID NO: 420549 - RNA, 20 nt, Human
gaccccacaggacccaggag

SEQ ID NO: 420550 - RNA, 32 nt, Human
gaccccacauccacccucguucaucaucaucu

SEQ ID NO: 420551 - RNA, 32 nt, Human
gaccccaccacugcacuccagccuggaugaca

SEQ ID NO: 420552 - RNA, 32 nt, Human
gaccccaccacuguugccauggugaccaaacu

SEQ ID NO: 420553 - RNA, 32 nt, Human
gaccccaccauugcacuccaguccgggaaaca

SEQ ID NO: 420554 - RNA, 32 nt, Human
gaccccacccaggcacauuagcgaccaggcuu

SEQ ID NO: 420555 - RNA, 32 nt, Human
gaccccaccucccucccugccugccagcccua

SEQ ID NO: 420556 - RNA, 32 nt, Human
gaccccaccugggaaccuuuuucccucaguua

SEQ ID NO: 420557 - RNA, 32 nt, Human
gaccccacgcgcugccccuuccuggccugacc

SEQ ID NO: 420558 - RNA, 20 nt, Human
gaccccacucccugcucuaa

SEQ ID NO: 420559 - RNA, 32 nt, Human
gaccccacucugucccugucaggaggcucugc

SEQ ID NO: 420560 - RNA, 32 nt, Human
gaccccacugccgccacacagagccacacagu

SEQ ID NO: 420561 - RNA, 19 nt, Human
gaccccacuggccaccccu

SEQ ID NO: 420562 - RNA, 32 nt, Human
gaccccagaaaccaggucacauggaccacagu

SEQ ID NO: 420563 - RNA, 20 nt, Human
gaccccagacaacccacccc

SEQ ID NO: 420564 - RNA, 32 nt, Human
gaccccagagaugcuuagagacaggacaccug

SEQ ID NO: 420565 - RNA, 32 nt, Human
gaccccagagcagcauaaaagccagcacugca

SEQ ID NO: 420566 - RNA, 32 nt, Human
gaccccagagggccagaagaacucaccccagu

SEQ ID NO: 420567 - RNA, 32 nt, Human
gaccccagauucacaucauacuugaaguucau

SEQ ID NO: 420568 - RNA, 32 nt, Human
gaccccagcaaaagaaaaauauugcuguaccu

SEQ ID NO: 420569 - RNA, 32 nt, Human
gaccccagccucccugcccauccuuccacugc

SEQ ID NO: 420570 - RNA, 32 nt, Human
gaccccagccuggguggucacuagaggugcug

SEQ ID NO: 420571 - RNA, 20 nt, Human
gaccccagcgacacagcccc

SEQ ID NO: 420572 - RNA, 21 nt, Human
gaccccagcucaacacgcccc

SEQ ID NO: 420573 - RNA, 32 nt, Human
gaccccagcucugguggcgggcagcagcgccg

SEQ ID NO: 420574 - RNA, 32 nt, Human
gaccccaggaggcagagguugaagugagccag

SEQ ID NO: 420575 - RNA, 32 nt, Human
gaccccaggaggcgaagauugcagugagcuga

SEQ ID NO: 420576 - RNA, 32 nt, Human
gaccccaggagguggacauugcagugagccga

SEQ ID NO: 420577 - RNA, 32 nt, Human
gaccccaggaguucaagaccagccugggcaac

SEQ ID NO: 420578 - RNA, 32 nt, Human
gaccccaggcagcagcgagugacaggacgucu

SEQ ID NO: 420579 - RNA, 32 nt, Human
gaccccaggcagcucgagcaugcccugagcuc

SEQ ID NO: 420580 - RNA, 24 nt, Human
gaccccaggccccuucccccagca

SEQ ID NO: 420581 - RNA, 32 nt, Human
gaccccaggcccugugcauguccccaguggag

SEQ ID NO: 420582 - RNA, 32 nt, Human
gaccccaggccuggcuguccgcagggccagga

SEQ ID NO: 420583 - RNA, 32 nt, Human
gaccccagggcuguggggacuugggggacagu

SEQ ID NO: 420584 - RNA, 32 nt, Human
gaccccaggucauuugugaccacacaccuggu

SEQ ID NO: 420585 - RNA, 32 nt, Human
gaccccaggugguggagguugcagugagccaa

SEQ ID NO: 420586 - RNA, 32 nt, Human
gaccccagucaccacauccuucugccugggug

SEQ ID NO: 420587 - RNA, 32 nt, Human
gaccccaguucgccgacuaagcagaagaaaga

SEQ ID NO: 420588 - RNA, 32 nt, Human
gaccccauauccacugguagccaccuccccau

SEQ ID NO: 420589 - RNA, 32 nt, Human
gaccccaucccccagccgaccaguuuccucuc

SEQ ID NO: 420590 - RNA, 17 nt, Human
gaccccauccgcuccua

SEQ ID NO: 420591 - RNA, 32 nt, Human
gaccccaucucagcaaaacaauaaaaauuaac

SEQ ID NO: 420592 - RNA, 24 nt, Human
gaccccaugcuguccccaacagcu

SEQ ID NO: 420593 - RNA, 32 nt, Human
gaccccauggaagacccugaaacacucagcca

SEQ ID NO: 420594 - RNA, 32 nt, Human
gaccccauggggcccagacagagcacaggagc

SEQ ID NO: 420595 - RNA, 20 nt, Human
gaccccaugguccauccccu

SEQ ID NO: 420596 - RNA, 32 nt, Human
gaccccauuagguauggagagcugggaggagg

SEQ ID NO: 420597 - RNA, 32 nt, Human
gaccccauuucucccuccuuuccaacuuccuu

SEQ ID NO: 420598 - RNA, 32 nt, Human
gacccccaaauacauccugcggaaggaauuca

SEQ ID NO: 420599 - RNA, 32 nt, Human
gacccccaacuugcagcugcccaccucacccu

SEQ ID NO: 420600 - RNA, 23 nt, Human
gacccccaagcauccccagcacc

SEQ ID NO: 420601 - RNA, 32 nt, Human
gacccccaagccccacugaggccccuacugag

SEQ ID NO: 420602 - RNA, 32 nt, Human
gacccccaagguagugauggcagcuggugcau

SEQ ID NO: 420603 - RNA, 32 nt, Human
gacccccacagcucccuuccgaggcugcaggg

SEQ ID NO: 420604 - RNA, 32 nt, Human
gacccccaccaccccuccccagccuccugacc

SEQ ID NO: 420605 - RNA, 21 nt, Human
gacccccaccucccacccuga

SEQ ID NO: 420606 - RNA, 32 nt, Human
gacccccagcaugguuagcgcugaccuucauu

SEQ ID NO: 420607 - RNA, 32 nt, Human
gacccccagccccgcuuccuggacccgcaggc

SEQ ID NO: 420608 - RNA, 20 nt, Human
gacccccagcugggaguccc

SEQ ID NO: 420609 - RNA, 17 nt, Human
gacccccaggaacguuc

SEQ ID NO: 420610 - RNA, 21 nt, Human
gacccccaggccgaggguccc

SEQ ID NO: 420611 - RNA, 32 nt, Human
gacccccagguuuuugcgaaccccagaagaga

SEQ ID NO: 420612 - RNA, 21 nt, Human
gacccccaugcuguggugacu

SEQ ID NO: 420613 - RNA, 32 nt, Human
gacccccauggcacacaccugccaacagcacu

SEQ ID NO: 420614 - RNA, 32 nt, Human
gacccccauguaacagauggaggaauugaauc

SEQ ID NO: 420615 - RNA, 22 nt, Human
gaccccccaccccugcuuucgu

SEQ ID NO: 420616 - RNA, 24 nt, Human
gaccccccggagugcugagcuuca

SEQ ID NO: 420617 - RNA, 21 nt, Human
gaccccccggccuccgccugc

SEQ ID NO: 420618 - RNA, 17 nt, Human
gaccccccucacccuga

SEQ ID NO: 420619 - RNA, 21 nt, Human
gacccccgaaccuuugugcca

SEQ ID NO: 420620 - RNA, 18 nt, Human
gacccccgaccuggcccc

SEQ ID NO: 420621 - RNA, 32 nt, Human
gacccccgaggaccuccucuccucgcccugug

SEQ ID NO: 420622 - RNA, 18 nt, Human
gacccccgagggugccca

SEQ ID NO: 420623 - RNA, 32 nt, Human
gacccccgcaccugcccucuggcaccagaugc

SEQ ID NO: 420624 - RNA, 20 nt, Human
gacccccgccaccuguccca

SEQ ID NO: 420625 - RNA, 32 nt, Human
gacccccgccaggggagaccaggcuggcugga

SEQ ID NO: 420626 - RNA, 18 nt, Human
gacccccgccccggcccg

SEQ ID NO: 420627 - RNA, 18 nt, Human
gacccccgcccugcccca

SEQ ID NO: 420628 - RNA, 21 nt, Human
gacccccgccgcagaguccca

SEQ ID NO: 420629 - RNA, 18 nt, Human
gacccccgccgcggcccg

SEQ ID NO: 420630 - RNA, 19 nt, Human
gacccccgcgggcggaccc

SEQ ID NO: 420631 - RNA, 19 nt, Human
gacccccggaacaagccua

SEQ ID NO: 420632 - RNA, 17 nt, Human
gacccccggaagccucc

SEQ ID NO: 420633 - RNA, 19 nt, Human
gacccccggagaugguccc

SEQ ID NO: 420634 - RNA, 21 nt, Human
gacccccggagccgggaccca

SEQ ID NO: 420635 - RNA, 18 nt, Human
gacccccggaggauccca

SEQ ID NO: 420636 - RNA, 19 nt, Human
gacccccggcccgcagccc

SEQ ID NO: 420637 - RNA, 21 nt, Human
gacccccggcccgcagcccca

SEQ ID NO: 420638 - RNA, 18 nt, Human
gacccccggccugccccc

SEQ ID NO: 420639 - RNA, 19 nt, Human
gacccccggcgcgggccca

SEQ ID NO: 420640 - RNA, 17 nt, Human
gacccccgggaagccca

SEQ ID NO: 420641 - RNA, 32 nt, Human
gacccccgggacaagggucugagacccaaagg

SEQ ID NO: 420642 - RNA, 32 nt, Human
gacccccgggacucccgcacacccaggaccgg

SEQ ID NO: 420643 - RNA, 32 nt, Human
gacccccgggagcuugccauccagcugaggaa

SEQ ID NO: 420644 - RNA, 18 nt, Human
gacccccgggauugccca

SEQ ID NO: 420645 - RNA, 20 nt, Human
gacccccgggcgcgggaucc

SEQ ID NO: 420646 - RNA, 21 nt, Human
gacccccggggcggcuuccca

SEQ ID NO: 420647 - RNA, 19 nt, Human
gacccccgggguggccuca

SEQ ID NO: 420648 - RNA, 32 nt, Human
gacccccgguggacagggagagccugagacgc

SEQ ID NO: 420649 - RNA, 32 nt, Human
gacccccgucagcugcuucugcugccuagguu

SEQ ID NO: 420650 - RNA, 19 nt, Human
gacccccuacccacccugg

SEQ ID NO: 420651 - RNA, 32 nt, Human
gacccccuccauccuugacccccaacaccuca

SEQ ID NO: 420652 - RNA, 17 nt, Human
gacccccuccucugcug

SEQ ID NO: 420653 - RNA, 32 nt, Human
gacccccugcagcucaagcaugucugcaggac

SEQ ID NO: 420654 - RNA, 32 nt, Human
gacccccugcagcuucccugaccacgccacug

SEQ ID NO: 420655 - RNA, 19 nt, Human
gacccccugggccggcccg

SEQ ID NO: 420656 - RNA, 32 nt, Human
gacccccuuccccaggcauccccaccuccuac

SEQ ID NO: 420657 - RNA, 32 nt, Human
gacccccuucccgggcugcacuuuggguccag

SEQ ID NO: 420658 - RNA, 32 nt, Human
gacccccuuccuaggaugccccggcuucaguc

SEQ ID NO: 420659 - RNA, 32 nt, Human
gacccccuugaccccucuauuucuguuggcua

SEQ ID NO: 420660 - RNA, 32 nt, Human
gacccccuuuccucagccuccaccugcaggac

SEQ ID NO: 420661 - RNA, 32 nt, Human
gaccccgacaccaggcccugcccaggcuuaug

SEQ ID NO: 420662 - RNA, 32 nt, Human
gaccccgagaagaggccauccuuugugaagcu

SEQ ID NO: 420663 - RNA, 32 nt, Human
gaccccgagagggaggcgaggcgcugcuuguc

SEQ ID NO: 420664 - RNA, 32 nt, Human
gaccccgagaucagugccuaccucuggucuag

SEQ ID NO: 420665 - RNA, 32 nt, Human
gaccccgccggacccggaggcucacagggaac

SEQ ID NO: 420666 - RNA, 32 nt, Human
gaccccgccugggaacaacagucauucuuccu

SEQ ID NO: 420667 - RNA, 32 nt, Human
gaccccgcgcgucauccacacgcagacgcaga

SEQ ID NO: 420668 - RNA, 32 nt, Human
gaccccgcucugaaagccgggggugagugugg

SEQ ID NO: 420669 - RNA, 32 nt, Human
gaccccggcaggcagcagcaugaaauucagcc

SEQ ID NO: 420670 - RNA, 21 nt, Human
gaccccggcuccgcccuggca

SEQ ID NO: 420671 - RNA, 32 nt, Human
gaccccggcuugagguaacagcgcgagcugag

SEQ ID NO: 420672 - RNA, 32 nt, Human
gaccccgggaagggaaggcagccugguuucuc

SEQ ID NO: 420673 - RNA, 32 nt, Human
gaccccgggagguggaggcugcagugaguugu

SEQ ID NO: 420674 - RNA, 32 nt, Human
gaccccgggggugcaggaaggaaguggggccc

SEQ ID NO: 420675 - RNA, 32 nt, Human
gaccccgguugcuagggugugucuccuuggcc

SEQ ID NO: 420676 - RNA, 32 nt, Human
gaccccguagccaccaccacacugcuuccagg

SEQ ID NO: 420677 - RNA, 17 nt, Human
gaccccguccaccuccu

SEQ ID NO: 420678 - RNA, 32 nt, Human
gaccccguggguguccuggacccgcugcucca

SEQ ID NO: 420679 - RNA, 32 nt, Human
gaccccguuccaagugcacugcccggccaagc

SEQ ID NO: 420680 - RNA, 32 nt, Human
gaccccuaaauucuccuccucccccauuuuga

SEQ ID NO: 420681 - RNA, 32 nt, Human
gaccccuaaggcagaacugagaauaaacaugu

SEQ ID NO: 420682 - RNA, 32 nt, Human
gaccccuaguuccacugcacauggcccuccuc

SEQ ID NO: 420683 - RNA, 32 nt, Human
gaccccucaaagcagagccaguagugaucagu

SEQ ID NO: 420684 - RNA, 32 nt, Human
gaccccucacacucaccuagccaccauggaca

SEQ ID NO: 420685 - RNA, 32 nt, Human
gaccccucaccuaggugaugugagucucuugc

SEQ ID NO: 420686 - RNA, 32 nt, Human
gaccccucacuuaggcuuuccucugccacccc

SEQ ID NO: 420687 - RNA, 32 nt, Human
gaccccuccaggugaccggccaccccagggca

SEQ ID NO: 420688 - RNA, 32 nt, Human
gaccccucccauccuucccauuuccuuugaug

SEQ ID NO: 420689 - RNA, 22 nt, Human
gaccccuccccucgugucagcu

SEQ ID NO: 420690 - RNA, 32 nt, Human
gaccccucccugccucccugcccugacacuca

SEQ ID NO: 420691 - RNA, 32 nt, Human
gaccccuccgccaguuuugucuugugaugcca

SEQ ID NO: 420692 - RNA, 32 nt, Human
gaccccuccuuauucuccaauucauguacagu

SEQ ID NO: 420693 - RNA, 32 nt, Human
gaccccuccuucucccucuccugggucgaucc

SEQ ID NO: 420694 - RNA, 24 nt, Human
gaccccucgacuggccacagccca

SEQ ID NO: 420695 - RNA, 19 nt, Human
gaccccucgcucacccugg

SEQ ID NO: 420696 - RNA, 32 nt, Human
gaccccucuaauucucuuacccagaauauuua

SEQ ID NO: 420697 - RNA, 32 nt, Human
gaccccucucccaucccagcagugacugguga

SEQ ID NO: 420698 - RNA, 32 nt, Human
gaccccucuccuccuccuuccucuuggucuca

SEQ ID NO: 420699 - RNA, 32 nt, Human
gaccccucuccucucugcaagagccugccucu

SEQ ID NO: 420700 - RNA, 32 nt, Human
gaccccucuccucugcugccauacucccccuu

SEQ ID NO: 420701 - RNA, 32 nt, Human
gaccccucugccugccccaaccccuuuggagg

SEQ ID NO: 420702 - RNA, 32 nt, Human
gaccccugaccuuuccagcuuuguccuucaga

SEQ ID NO: 420703 - RNA, 32 nt, Human
gaccccugacucuuccagccagaaagauggug

SEQ ID NO: 420704 - RNA, 32 nt, Human
gaccccugacucuugcagccagaaagauggug

SEQ ID NO: 420705 - RNA, 32 nt, Human
gaccccugagcagcucugugaugggaucccag

SEQ ID NO: 420706 - RNA, 32 nt, Human
gaccccugcagccagagguuugcaguggguag

SEQ ID NO: 420707 - RNA, 32 nt, Human
gaccccugcauccuucugccuugggccuccaa

SEQ ID NO: 420708 - RNA, 32 nt, Human
gaccccugcccaggaagaguucacuggucgcu

SEQ ID NO: 420709 - RNA, 32 nt, Human
gaccccugcccaggcucaggcccaugagguau

SEQ ID NO: 420710 - RNA, 32 nt, Human
gaccccugccccucucuggguggagaagcucc

SEQ ID NO: 420711 - RNA, 32 nt, Human
gaccccugcccugcaaagauggggcugaagga

SEQ ID NO: 420712 - RNA, 32 nt, Human
gaccccugcugcagggcagaguucagguccac

SEQ ID NO: 420713 - RNA, 32 nt, Human
gaccccugcugccaccucuccugggccugugu

SEQ ID NO: 420714 - RNA, 32 nt, Human
gaccccuggaacuggcggguauucuggucauu

SEQ ID NO: 420715 - RNA, 32 nt, Human
gaccccuggcaaacugggcacuuggccuaugu

SEQ ID NO: 420716 - RNA, 22 nt, Human
gaccccuggccacccagacccc

SEQ ID NO: 420717 - RNA, 32 nt, Human
gaccccuggcugcuacagcugcgucacagagg

SEQ ID NO: 420718 - RNA, 32 nt, Human
gaccccugggagagggacuuugguagggucau

SEQ ID NO: 420719 - RNA, 32 nt, Human
gaccccugggagaggggcagugagaguuuguu

SEQ ID NO: 420720 - RNA, 32 nt, Human
gaccccugugacuccuggccugggcagguggg

SEQ ID NO: 420721 - RNA, 32 nt, Human
gaccccuguggccccuggccugggcagguggg

SEQ ID NO: 420722 - RNA, 32 nt, Human
gaccccuguucccagcuaggcucuuucccaac

SEQ ID NO: 420723 - RNA, 32 nt, Human
gaccccuguuuccucuuugucuugccccugga

SEQ ID NO: 420724 - RNA, 32 nt, Human
gaccccuuaagggagggaagaggcugggguga

SEQ ID NO: 420725 - RNA, 32 nt, Human
gaccccuucccugagguggcugucuccaugag

SEQ ID NO: 420726 - RNA, 18 nt, Human
gaccccuuccucacccug

SEQ ID NO: 420727 - RNA, 32 nt, Human
gaccccuucuccacccucucccugagcacagg

SEQ ID NO: 420728 - RNA, 32 nt, Human
gaccccuuuccuguaaccugcacuuugggaug

SEQ ID NO: 420729 - RNA, 21 nt, Human
gaccccuuuucccucuugcgu

SEQ ID NO: 420730 - RNA, 32 nt, Human
gacccgaaaugagggagcccagcuggggucuu

SEQ ID NO: 420731 - RNA, 32 nt, Human
gacccgaccccacuacaccacaccuagagccc

SEQ ID NO: 420732 - RNA, 32 nt, Human
gacccgagauaguaccacugcacuccagccug

SEQ ID NO: 420733 - RNA, 32 nt, Human
gacccgagccgauuucucuuggauuuggcuac

SEQ ID NO: 420734 - RNA, 32 nt, Human
gacccgagggccugcugcuuccugguuaagua

SEQ ID NO: 420735 - RNA, 32 nt, Human
gacccgaugcagacuccugaaacagacuacuc

SEQ ID NO: 420736 - RNA, 32 nt, Human
gacccgauuuuccaggugcgucagucaccccu

SEQ ID NO: 420737 - RNA, 32 nt, Human
gacccgcacacacacccacacugcugcccugg

SEQ ID NO: 420738 - RNA, 32 nt, Human
gacccgcacucuuccauguccguagggagacg

SEQ ID NO: 420739 - RNA, 32 nt, Human
gacccgcagccgcggcggcggcggcggcggcg

SEQ ID NO: 420740 - RNA, 32 nt, Human
gacccgcccccuccuuugcuccggaaucucuc

SEQ ID NO: 420741 - RNA, 32 nt, Human
gacccgcccccucgcccccaccccuguguguu

SEQ ID NO: 420742 - RNA, 32 nt, Human
gacccgccgcuuccccuucagccugggaccag

SEQ ID NO: 420743 - RNA, 32 nt, Human
gacccgccguccugcuauccuucgcuuccccc

SEQ ID NO: 420744 - RNA, 32 nt, Human
gacccgccucugccaugaaagccaugcccugg

SEQ ID NO: 420745 - RNA, 22 nt, Human
gacccgccucugugcuccaggg

SEQ ID NO: 420746 - RNA, 32 nt, Human
gacccgccucuuccaccaagacagagacguua

SEQ ID NO: 420747 - RNA, 32 nt, Human
gacccgccugggaacaagggaugaggaggagu

SEQ ID NO: 420748 - RNA, 21 nt, Human
gacccgcgcccgggccugcgg

SEQ ID NO: 420749 - RNA, 32 nt, Human
gacccgcggagucacugcagggaggagagggg

SEQ ID NO: 420750 - RNA, 32 nt, Human
gacccgcguggccaugguuaugguuguggauu

SEQ ID NO: 420751 - RNA, 32 nt, Human
gacccgcuagagagacaccgcagggaaguccu

SEQ ID NO: 420752 - RNA, 25 nt, Human
gacccgcuuggaggccacagccccg

SEQ ID NO: 420753 - RNA, 32 nt, Human
gacccggaacccagaggacgcgacaccaugac

SEQ ID NO: 420754 - RNA, 32 nt, Human
gacccggacucccuuucugccaccccaggcug

SEQ ID NO: 420755 - RNA, 32 nt, Human
gacccggagcagcagcagaggcaggaggacua

SEQ ID NO: 420756 - RNA, 32 nt, Human
gacccggagccgcgguacaggugugguugcuu

SEQ ID NO: 420757 - RNA, 31 nt, Human
gacccggaguuuccucuuucacuggauggag

SEQ ID NO: 420758 - RNA, 32 nt, Human
gacccggauagaaaauggcccugcguuuagcc

SEQ ID NO: 420759 - RNA, 32 nt, Human
gacccggaugcagagucuacagccugacccag

SEQ ID NO: 420760 - RNA, 32 nt, Human
gacccggcccucaaguccuccuauuagggcag

SEQ ID NO: 420761 - RNA, 32 nt, Human
gacccggccgcagaccguucugggcagcucug

SEQ ID NO: 420762 - RNA, 32 nt, Human
gacccggcucuccuggcccuguguugagggua

SEQ ID NO: 420763 - RNA, 32 nt, Human
gacccgggaaauacacacagagccaggagcag

SEQ ID NO: 420764 - RNA, 32 nt, Human
gacccgggaaggcgaggaaggcgaggcgggcg

SEQ ID NO: 420765 - RNA, 32 nt, Human
gacccgggacuccuccuguccugggccgaaug

SEQ ID NO: 420766 - RNA, 21 nt, Human
gacccgggacugacuucggga

SEQ ID NO: 420767 - RNA, 23 nt, Human
gacccgggaggcagagguugcag

SEQ ID NO: 420768 - RNA, 32 nt, Human
gacccgggaggcagagguugcagugagccgag

SEQ ID NO: 420769 - RNA, 26 nt, Human
gacccgggaggcggagguugcaguga

SEQ ID NO: 420770 - RNA, 32 nt, Human
gacccgggaggcggagguugcagugagccaag

SEQ ID NO: 420771 - RNA, 32 nt, Human
gacccgggaggcggagguugcagugagccgag

SEQ ID NO: 420772 - RNA, 26 nt, Human
gacccgggagguggagguugcaguga

SEQ ID NO: 420773 - RNA, 32 nt, Human
gacccgggcugcagcgggggaggaggagacgg

SEQ ID NO: 420774 - RNA, 32 nt, Human
gacccggggcagccucugggugaacagcagcg

SEQ ID NO: 420775 - RNA, 32 nt, Human
gacccggggcccgccucacaccccaguggauu

SEQ ID NO: 420776 - RNA, 32 nt, Human
gacccgggggcaggugcugcagugaggggucu

SEQ ID NO: 420777 - RNA, 32 nt, Human
gacccggguugcuuuuugccucccucuacugc

SEQ ID NO: 420778 - RNA, 32 nt, Human
gacccgguguuccucuugguggcagauaccug

SEQ ID NO: 420779 - RNA, 32 nt, Human
gacccguaaacuucacuggcaggauggcaggg

SEQ ID NO: 420780 - RNA, 23 nt, Human
gacccguccucucacccccagca

SEQ ID NO: 420781 - RNA, 32 nt, Human
gacccguccucugcaaccuccuuucugugccc

SEQ ID NO: 420782 - RNA, 32 nt, Human
gacccgugagccuggccaaggugcugaagacc

SEQ ID NO: 420783 - RNA, 32 nt, Human
gacccgugcccaaucuccucucccucuguugu

SEQ ID NO: 420784 - RNA, 32 nt, Human
gacccgugccuguauauuccacgcuuugcgca

SEQ ID NO: 420785 - RNA, 32 nt, Human
gacccguggacagguuggggauggggugugug

SEQ ID NO: 420786 - RNA, 32 nt, Human
gacccguggggcagccaguccucccagggacu

SEQ ID NO: 420787 - RNA, 32 nt, Human
gacccgugucugcugguugggaaguggagaaa

SEQ ID NO: 420788 - RNA, 32 nt, Human
gacccuaaaugagagauaugucccaggaugga

SEQ ID NO: 420789 - RNA, 32 nt, Human
gacccuaagagcacacugcacagggaaaauug

SEQ ID NO: 420790 - RNA, 32 nt, Human
gacccuacagcccaggcuuuccaggaggagcu

SEQ ID NO: 420791 - RNA, 32 nt, Human
gacccuaccagccugcgggaaggugguauggc

SEQ ID NO: 420792 - RNA, 32 nt, Human
gacccuacccuugugagagucaaggcacagag

SEQ ID NO: 420793 - RNA, 32 nt, Human
gacccuaccuccagaucacccaccucaucagg

SEQ ID NO: 420794 - RNA, 32 nt, Human
gacccuagaccucugcagcccauaccaggucu

SEQ ID NO: 420795 - RNA, 31 nt, Human
gacccuaggagaccugacuggaacuggcucc

SEQ ID NO: 420796 - RNA, 32 nt, Human
gacccuagggagacccgggugugcgccgccug

SEQ ID NO: 420797 - RNA, 32 nt, Human
gacccuagguauccacagcugugacauggggg

SEQ ID NO: 420798 - RNA, 32 nt, Human
gacccuaucucugagcgcugcagccuacuguu

SEQ ID NO: 420799 - RNA, 32 nt, Human
gacccucaaaccuacaccaaccaccuuagaug

SEQ ID NO: 420800 - RNA, 32 nt, Human
gacccucaaacuccucccugaaccucucagga

SEQ ID NO: 420801 - RNA, 32 nt, Human
gacccucaacagagacaggaaaaccugcccgu

SEQ ID NO: 420802 - RNA, 32 nt, Human
gacccucacaccagcaccccuccucaccacca

SEQ ID NO: 420803 - RNA, 32 nt, Human
gacccucacagcucugaauuugcuucuguuau

SEQ ID NO: 420804 - RNA, 32 nt, Human
gacccucaccaggaaccacaucugccagcacc

SEQ ID NO: 420805 - RNA, 32 nt, Human
gacccucaccccagcauagacacacacccccu

SEQ ID NO: 420806 - RNA, 20 nt, Human
gacccucacccccacccugg

SEQ ID NO: 420807 - RNA, 32 nt, Human
gacccucagaagcaguggcagaagcaguagaa

SEQ ID NO: 420808 - RNA, 32 nt, Human
gacccucagaucuucuuuucuaauagccauuu

SEQ ID NO: 420809 - RNA, 32 nt, Human
gacccucaggcaggagggcacugaccacaccc

SEQ ID NO: 420810 - RNA, 32 nt, Human
gacccucagggcccugaaccgucgcucucugg

SEQ ID NO: 420811 - RNA, 31 nt, Human
gacccucagugaagacucuguugaagacuuu

SEQ ID NO: 420812 - RNA, 17 nt, Human
gacccucaguucuggaa

SEQ ID NO: 420813 - RNA, 32 nt, Human
gacccucaucucugggcuacacggugauucag

SEQ ID NO: 420814 - RNA, 32 nt, Human
gacccucauuccagagagggugcugccccaua

SEQ ID NO: 420815 - RNA, 32 nt, Human
gacccuccagagccaggaggccaaggcuguga

SEQ ID NO: 420816 - RNA, 32 nt, Human
gacccuccaguucugccacaggucugccgaug

SEQ ID NO: 420817 - RNA, 32 nt, Human
gacccuccauagcaaccaagagauguuaaaac

SEQ ID NO: 420818 - RNA, 32 nt, Human
gacccuccauuucucccccucacccaugcuga

SEQ ID NO: 420819 - RNA, 32 nt, Human
gacccucccccugccuuccucuugccuuggga

SEQ ID NO: 420820 - RNA, 18 nt, Human
gacccuccccgcaccccc

SEQ ID NO: 420821 - RNA, 32 nt, Human
gacccuccccgcuccccugucauuucaucgcg

SEQ ID NO: 420822 - RNA, 32 nt, Human
gacccucccucugccuccuccaugaaggucuc

SEQ ID NO: 420823 - RNA, 32 nt, Human
gacccucccuucagauccgcagucucuaggua

SEQ ID NO: 420824 - RNA, 32 nt, Human
gacccuccgaaggaagguuuugccgcuggcgc

SEQ ID NO: 420825 - RNA, 32 nt, Human
gacccuccgcccacuuccuucucccuccacca

SEQ ID NO: 420826 - RNA, 32 nt, Human
gacccuccuagccuugaacacacacauguaca

SEQ ID NO: 420827 - RNA, 32 nt, Human
gacccuccuauucuauaaaacucugcauguag

SEQ ID NO: 420828 - RNA, 32 nt, Human
gacccuccuccccucuucccaucccuuccccc

SEQ ID NO: 420829 - RNA, 32 nt, Human
gacccuccuccgaacugccuuacccugcuuau

SEQ ID NO: 420830 - RNA, 32 nt, Human
gacccuccugaacugcacuacaagacacuuug

SEQ ID NO: 420831 - RNA, 32 nt, Human
gacccuccuggaccagccccaggcuccugugc

SEQ ID NO: 420832 - RNA, 32 nt, Human
gacccuccuguugcagccucacucucuacagg

SEQ ID NO: 420833 - RNA, 32 nt, Human
gacccuccuucgcgacggcaaggccugcaccu

SEQ ID NO: 420834 - RNA, 32 nt, Human
gacccucgagggcuuguguccauuuggccuuu

SEQ ID NO: 420835 - RNA, 32 nt, Human
gacccucgguccugugcaccgcuuuggggcac

SEQ ID NO: 420836 - RNA, 32 nt, Human
gacccucuagcaccugaguguugaugaucauu

SEQ ID NO: 420837 - RNA, 32 nt, Human
gacccucuccaucccccacccggcucagaacu

SEQ ID NO: 420838 - RNA, 32 nt, Human
gacccucuccuagucuaacuccugggcgugcu

SEQ ID NO: 420839 - RNA, 32 nt, Human
gacccucuccugggcauugguuccugcuggua

SEQ ID NO: 420840 - RNA, 32 nt, Human
gacccucugccacccucucugccacgcaggac

SEQ ID NO: 420841 - RNA, 32 nt, Human
gacccucugccgcugcuuccaggcugggcagc

SEQ ID NO: 420842 - RNA, 32 nt, Human
gacccucugccuggcaacugccccgucugaga

SEQ ID NO: 420843 - RNA, 21 nt, Human
gacccucugggcccagccuca

SEQ ID NO: 420844 - RNA, 32 nt, Human
gacccucugucccuucccuccuggcccgcugg

SEQ ID NO: 420845 - RNA, 20 nt, Human
gacccucuugcccacccuga

SEQ ID NO: 420846 - RNA, 32 nt, Human
gacccugaagucagagcaggccagccaagcag

SEQ ID NO: 420847 - RNA, 32 nt, Human
gacccugacccgcuucccagacucuaugcugg

SEQ ID NO: 420848 - RNA, 21 nt, Human
gacccugaccgcccacacccc

SEQ ID NO: 420849 - RNA, 22 nt, Human
gacccugaccucaagugaucca

SEQ ID NO: 420850 - RNA, 32 nt, Human
gacccugacucugccugaggccagccugcccg

SEQ ID NO: 420851 - RNA, 32 nt, Human
gacccugagagaggagggaggagggaaccugg

SEQ ID NO: 420852 - RNA, 32 nt, Human
gacccugagcacagccugguaugcgugcgggc

SEQ ID NO: 420853 - RNA, 32 nt, Human
gacccugagccaaguucccugugccuuaggcu

SEQ ID NO: 420854 - RNA, 32 nt, Human
gacccugagccccugagcugcauuuuacggua

SEQ ID NO: 420855 - RNA, 32 nt, Human
gacccugaggcccugaggguggaaguggacac

SEQ ID NO: 420856 - RNA, 32 nt, Human
gacccugaggggauggaguuuucaaguccuuc

SEQ ID NO: 420857 - RNA, 32 nt, Human
gacccugaggggcaguaggacuccaaccgcuu

SEQ ID NO: 420858 - RNA, 32 nt, Human
gacccugaggucaacacagaaaaucaugugcu

SEQ ID NO: 420859 - RNA, 32 nt, Human
gacccugaugggcuggacuugccccuccggua

SEQ ID NO: 420860 - RNA, 32 nt, Human
gacccugcaggaggagcuuggacuggccccag

SEQ ID NO: 420861 - RNA, 32 nt, Human
gacccugcaggcagucagcaccagccucagca

SEQ ID NO: 420862 - RNA, 32 nt, Human
gacccugcagugagugggugugauuuuuguuu

SEQ ID NO: 420863 - RNA, 32 nt, Human
gacccugcauuguggucaggagcacugaaugc

SEQ ID NO: 420864 - RNA, 32 nt, Human
gacccugcccaccugucugccugccccgccug

SEQ ID NO: 420865 - RNA, 32 nt, Human
gacccugccccuggcacggcagugccagcugu

SEQ ID NO: 420866 - RNA, 20 nt, Human
gacccugccgcggcuggcug

SEQ ID NO: 420867 - RNA, 32 nt, Human
gacccugcggccuuccggccuuccgcaguguu

SEQ ID NO: 420868 - RNA, 32 nt, Human
gacccugcuauuuucuccuugugugacuuugg

SEQ ID NO: 420869 - RNA, 32 nt, Human
gacccugcucaaggaggcucaucuggccuccu

SEQ ID NO: 420870 - RNA, 32 nt, Human
gacccugcucaggccaccugccuggcuccugc

SEQ ID NO: 420871 - RNA, 21 nt, Human
gacccugcugaaagcagugua

SEQ ID NO: 420872 - RNA, 32 nt, Human
gacccugcugcugccaagcuguggacccucuc

SEQ ID NO: 420873 - RNA, 32 nt, Human
gacccugcugggacaccaggacaaggaagaca

SEQ ID NO: 420874 - RNA, 32 nt, Human
gacccuggaagagaccguggcuauggaaacgg

SEQ ID NO: 420875 - RNA, 32 nt, Human
gacccuggaaggcaggggacugcgagcugggc

SEQ ID NO: 420876 - RNA, 32 nt, Human
gacccuggaaugggguugguuuggacaccccc

SEQ ID NO: 420877 - RNA, 32 nt, Human
gacccuggagcuuccauucaccugccauccag

SEQ ID NO: 420878 - RNA, 32 nt, Human
gacccuggaggcccccucacacgaaggcugcu

SEQ ID NO: 420879 - RNA, 32 nt, Human
gacccuggaggggcucugaggauagcaaucag

SEQ ID NO: 420880 - RNA, 32 nt, Human
gacccuggagguagaggcugcagugagccaag

SEQ ID NO: 420881 - RNA, 32 nt, Human
gacccuggauggggcuuccagcucagaaccca

SEQ ID NO: 420882 - RNA, 32 nt, Human
gacccuggcacccuccugagccggcgugugcc

SEQ ID NO: 420883 - RNA, 32 nt, Human
gacccuggccaacauggugaaaucccaucuau

SEQ ID NO: 420884 - RNA, 32 nt, Human
gacccuggccuccccuguggccucuuugagug

SEQ ID NO: 420885 - RNA, 32 nt, Human
gacccuggcuccaagccccggccucuauagua

SEQ ID NO: 420886 - RNA, 32 nt, Human
gacccugggaaaugucuacaaaugucuauuuc

SEQ ID NO: 420887 - RNA, 22 nt, Human
gacccugggagagaaggacuga

SEQ ID NO: 420888 - RNA, 32 nt, Human
gacccugggagguggagguggcagugagccga

SEQ ID NO: 420889 - RNA, 32 nt, Human
gacccugggccucaaaggcaagcccugaccuc

SEQ ID NO: 420890 - RNA, 32 nt, Human
gacccugggcugccagaugcaggaagcaucaa

SEQ ID NO: 420891 - RNA, 32 nt, Human
gacccuggggcggacccaggagccaaacucuu

SEQ ID NO: 420892 - RNA, 32 nt, Human
gacccuggugcugccaccugccccuacucaag

SEQ ID NO: 420893 - RNA, 32 nt, Human
gacccugguggugaaaucaaugacagacaaag

SEQ ID NO: 420894 - RNA, 21 nt, Human
gacccuggugguggccagagc

SEQ ID NO: 420895 - RNA, 32 nt, Human
gacccugguucgagcccagggugcgcuucggg

SEQ ID NO: 420896 - RNA, 32 nt, Human
gacccuguaggccgaagggagaaacaagagug

SEQ ID NO: 420897 - RNA, 32 nt, Human
gacccuguccccagggaggacauggcucugag

SEQ ID NO: 420898 - RNA, 32 nt, Human
gacccugugcaggagcagcuccgggugacacg

SEQ ID NO: 420899 - RNA, 32 nt, Human
gacccugugcaucugugcauuuggcaaaaugu

SEQ ID NO: 420900 - RNA, 32 nt, Human
gacccugugcuggccauccuaucucugauucu

SEQ ID NO: 420901 - RNA, 32 nt, Human
gacccuguuccacaguccuguauuccauccua

SEQ ID NO: 420902 - RNA, 20 nt, Human
gacccuguucccucacccug

SEQ ID NO: 420903 - RNA, 32 nt, Human
gacccuguucuaagcucugccuugccaagccc

SEQ ID NO: 420904 - RNA, 32 nt, Human
gacccuguuucccaauuugcccccaaggccua

SEQ ID NO: 420905 - RNA, 32 nt, Human
gacccuuauaguucuaucccagaauggcauca

SEQ ID NO: 420906 - RNA, 32 nt, Human
gacccuucaagcucuguccuuauccauuaccu

SEQ ID NO: 420907 - RNA, 32 nt, Human
gacccuucacagacuuacacauuuacucacca

SEQ ID NO: 420908 - RNA, 22 nt, Human
gacccuucaccuccagaugcca

SEQ ID NO: 420909 - RNA, 32 nt, Human
gacccuucagcuggcucugcccugccagugcc

SEQ ID NO: 420910 - RNA, 32 nt, Human
gacccuucccaaaucugcuccagcaggacuaa

SEQ ID NO: 420911 - RNA, 32 nt, Human
gacccuucccacccucugcaagcuccugagau

SEQ ID NO: 420912 - RNA, 32 nt, Human
gacccuuccccaaauacuaggcucagagcaac

SEQ ID NO: 420913 - RNA, 18 nt, Human
gacccuuccccauccuga

SEQ ID NO: 420914 - RNA, 32 nt, Human
gacccuucccucaagucucaccaguucugcuc

SEQ ID NO: 420915 - RNA, 32 nt, Human
gacccuucccuguugcugucccugcaucucgu

SEQ ID NO: 420916 - RNA, 32 nt, Human
gacccuuccguacuccuggacccccuugaccc

SEQ ID NO: 420917 - RNA, 32 nt, Human
gacccuuccugccugcaccccgguccucagcc

SEQ ID NO: 420918 - RNA, 25 nt, Human
gacccuucuagacaucacugucagc

SEQ ID NO: 420919 - RNA, 32 nt, Human
gacccuucucagaccgaggcgccaccacccca

SEQ ID NO: 420920 - RNA, 32 nt, Human
gacccuucuccaagcaccucagcgcacuugcc

SEQ ID NO: 420921 - RNA, 32 nt, Human
gacccuucuccuuagaaguggaaguaguggag

SEQ ID NO: 420922 - RNA, 32 nt, Human
gacccuucuggugcccuuugggaauaaagcug

SEQ ID NO: 420923 - RNA, 32 nt, Human
gacccuugaacccaggcaguggugggauggga

SEQ ID NO: 420924 - RNA, 32 nt, Human
gacccuugacagccccagccuaggcagauggg

SEQ ID NO: 420925 - RNA, 32 nt, Human
gacccuugaguucuguuggcccacugacuuua

SEQ ID NO: 420926 - RNA, 32 nt, Human
gacccuugcauucacugauaacuuucuggcag

SEQ ID NO: 420927 - RNA, 27 nt, Human
gacccuugccucaccccucccccuggc

SEQ ID NO: 420928 - RNA, 32 nt, Human
gacccuugccucaccccucccccuggccucac

SEQ ID NO: 420929 - RNA, 32 nt, Human
gacccuugccuuccacacuugcaggugucacg

SEQ ID NO: 420930 - RNA, 32 nt, Human
gacccuuggccuguucagcuauuuaucccauc

SEQ ID NO: 420931 - RNA, 32 nt, Human
gacccuuggcugcagggguugcuuccgccacu

SEQ ID NO: 420932 - RNA, 32 nt, Human
gacccuugggcugacagagcagguucucauuu

SEQ ID NO: 420933 - RNA, 32 nt, Human
gacccuuguguaucagcagcauuucugacuga

SEQ ID NO: 420934 - RNA, 32 nt, Human
gacccuuguuucugccaaaaccaugcuaugaa

SEQ ID NO: 420935 - RNA, 32 nt, Human
gacccuuuaacauaggcugccuuaguaacaaa

SEQ ID NO: 420936 - RNA, 32 nt, Human
gacccuuuaauucucacaaccaaccagucaug

SEQ ID NO: 420937 - RNA, 21 nt, Human
gacccuuuagaaaucagccca

SEQ ID NO: 420938 - RNA, 32 nt, Human
gacccuuuccgcccucccuuggaucuccaugu

SEQ ID NO: 420939 - RNA, 32 nt, Human
gacccuuucuccggacccagcauguaggugcc

SEQ ID NO: 420940 - RNA, 32 nt, Human
gacccuuuuccccucacccucugcccuucuaa

SEQ ID NO: 420941 - RNA, 32 nt, Human
gacccuuuucuguccaucagaggacagcugua

SEQ ID NO: 420942 - RNA, 32 nt, Human
gacccuuuugucacaguacagcucuugucuuu

SEQ ID NO: 420943 - RNA, 32 nt, Human
gacccuuuuuggacuagccagaauucuacccu

SEQ ID NO: 420944 - RNA, 32 nt, Human
gaccgaaagucuccugcuuucacugcgguccc

SEQ ID NO: 420945 - RNA, 32 nt, Human
gaccgaacucaagacuggcaagaaauguaaaa

SEQ ID NO: 420946 - RNA, 19 nt, Human
gaccgaagccacccggagg

SEQ ID NO: 420947 - RNA, 32 nt, Human
gaccgaaggaugacacaccagccaucugacca

SEQ ID NO: 420948 - RNA, 32 nt, Human
gaccgaaggggaaaacccgcucucucaggcgc

SEQ ID NO: 420949 - RNA, 32 nt, Human
gaccgaaggggaggaaaggaaaaggauggaca

SEQ ID NO: 420950 - RNA, 32 nt, Human
gaccgacauggagaaaccccaucucuacuaaa

SEQ ID NO: 420951 - RNA, 32 nt, Human
gaccgacaugggcaacaugacaagaccccauc

SEQ ID NO: 420952 - RNA, 32 nt, Human
gaccgaccagccagggcaacacagugagaccc

SEQ ID NO: 420953 - RNA, 32 nt, Human
gaccgacggccgcuggagugcacuggcaugau

SEQ ID NO: 420954 - RNA, 32 nt, Human
gaccgacuucuuucucuuuacccucauuggcg

SEQ ID NO: 420955 - RNA, 32 nt, Human
gacuuucugccuggaguguaugacugcacaug

SEQ ID NO: 420956 - RNA, 32 nt, Human
gacuuucuggccaagcugcacugugugcggca

SEQ ID NO: 420957 - RNA, 32 nt, Human
gacuuucugggaacacagagaccaagagggag

SEQ ID NO: 420958 - RNA, 32 nt, Human
gacuuucugguucauuuuuguuuguuuuguuu

SEQ ID NO: 420959 - RNA, 32 nt, Human
gacuuucuuuggauaugaggguuuugaaaccu

SEQ ID NO: 420960 - RNA, 32 nt, Human
gacuuugaaagccagagauuccuggcgcaggc

SEQ ID NO: 420961 - RNA, 32 nt, Human
gacuuugaacugcucuugcugaagaggcucca

SEQ ID NO: 420962 - RNA, 32 nt, Human
gacuuugacacacauggccaccuuggcacaaa

SEQ ID NO: 420963 - RNA, 27 nt, Human
gacuuugacacauuuuaguuauuuuaa

SEQ ID NO: 420964 - RNA, 32 nt, Human
gacuuugaugucagcaguugcugguaaaauga

SEQ ID NO: 420965 - RNA, 32 nt, Human
gacuuugcaccugucuucaggcugccagggga

SEQ ID NO: 420966 - RNA, 31 nt, Human
gacuuugcacuuugguuacacagaacauugg

SEQ ID NO: 420967 - RNA, 32 nt, Human
gacuuugcagaaccgguccaaggugagaguag

SEQ ID NO: 420968 - RNA, 32 nt, Human
gacuuugcagugagcaaugggucuccacaagu

SEQ ID NO: 420969 - RNA, 32 nt, Human
gacuuugcagugagcugagaucgugccacugc

SEQ ID NO: 420970 - RNA, 32 nt, Human
gacuuugcauaugcuaacuacaaguauaaccu

SEQ ID NO: 420971 - RNA, 32 nt, Human
gacuuugccagauuccuuacauuuguaggugu

SEQ ID NO: 420972 - RNA, 32 nt, Human
gacuuugcuaucucugagaugucugcuacuuc

SEQ ID NO: 420973 - RNA, 32 nt, Human
gacuuugcuaucucugagaugucugcuacuug

SEQ ID NO: 420974 - RNA, 32 nt, Human
gacuuugcucccauuccauacuguuuuuguca

SEQ ID NO: 420975 - RNA, 32 nt, Human
gacuuugcucuccaccaggcagaagaugacag

SEQ ID NO: 420976 - RNA, 32 nt, Human
gacuuugcucuucauuuaaaccaaaaucauau

SEQ ID NO: 420977 - RNA, 32 nt, Human
gacuuugcugacugguaccuggagcagcugaa

SEQ ID NO: 420978 - RNA, 32 nt, Human
gacuuugcuguaauuuuggucuugaggggcgg

SEQ ID NO: 420979 - RNA, 32 nt, Human
gacuuugcuuguuuacuuucugccucagauug

SEQ ID NO: 420980 - RNA, 32 nt, Human
gacuuuggacugcuucagucucugccaucuuc

SEQ ID NO: 420981 - RNA, 32 nt, Human
gacuuuggagccaagaaacacucugugugacu

SEQ ID NO: 420982 - RNA, 32 nt, Human
gacuuuggagccacccacacugggaagacuag

SEQ ID NO: 420983 - RNA, 32 nt, Human
gacuuuggaggacuguugggaaggcauuauug

SEQ ID NO: 420984 - RNA, 32 nt, Human
gacuuugggaggccaaggcgggcagaucaccg

SEQ ID NO: 420985 - RNA, 32 nt, Human
gacuuugggaggccaaggcgggcagaucaccu

SEQ ID NO: 420986 - RNA, 32 nt, Human
gacuuugggaggccgaggcagguggaucacuu

SEQ ID NO: 420987 - RNA, 32 nt, Human
gacuuugggaggcugaggcagguggaucaccu

SEQ ID NO: 420988 - RNA, 32 nt, Human
gacuuugggcagggaaggcgggcgggcggggg

SEQ ID NO: 420989 - RNA, 32 nt, Human
gacuuuggguuguuucugacuuuuggcuauug

SEQ ID NO: 420990 - RNA, 32 nt, Human
gacuuuggugaaaguguaccacucuuuuagaa

SEQ ID NO: 420991 - RNA, 32 nt, Human
gacuuugguggagguaguucuuuggcagcggg

SEQ ID NO: 420992 - RNA, 32 nt, Human
gacuuuguacacugaagaaaagaaaacugcau

SEQ ID NO: 420993 - RNA, 32 nt, Human
gacuuugucuucaagaagcucacagucuauug

SEQ ID NO: 420994 - RNA, 32 nt, Human
gacuuugucuugacuucuagugagaauuauaa

SEQ ID NO: 420995 - RNA, 32 nt, Human
gacuuugugaucauuacagaaaugcuggugua

SEQ ID NO: 420996 - RNA, 32 nt, Human
gacuuugugguuuacccccuucaccuuccagg

SEQ ID NO: 420997 - RNA, 23 nt, Human
gacuuuguuagaugagggaggaa

SEQ ID NO: 420998 - RNA, 32 nt, Human
gacuuuguucucuuccucaccugaaauuaugc

SEQ ID NO: 420999 - RNA, 32 nt, Human
gacuuuuaggcugggugcaguggcucacaccu

SEQ ID NO: 421000 - RNA, 32 nt, Human
gacuuuuauauguacacugaccaugugaugua

SEQ ID NO: 421001 - RNA, 32 nt, Human
gacuuuucaaagaaaauuguacuugaauuauu

SEQ ID NO: 421002 - RNA, 32 nt, Human
gacuuuucaagggggaccacccuaccugucau

SEQ ID NO: 421003 - RNA, 32 nt, Human
gacuuuucagccacaauuacaugucaucauuu

SEQ ID NO: 421004 - RNA, 32 nt, Human
gacuuuucaugccaaaugagacucucugagaa

SEQ ID NO: 421005 - RNA, 32 nt, Human
gacuuuucccacacacuggauugugaggcucu

SEQ ID NO: 421006 - RNA, 32 nt, Human
gacuuuucccgcuguuucucagccucugggau

SEQ ID NO: 421007 - RNA, 32 nt, Human
gacuuuucuacugaucaucauaacucuguauc

SEQ ID NO: 421008 - RNA, 32 nt, Human
gacuuuucuccucugcaauguggguugcuguc

SEQ ID NO: 421009 - RNA, 32 nt, Human
gacuuuucucucuuauaccaacaauaucagaa

SEQ ID NO: 421010 - RNA, 32 nt, Human
gacuuuucugagaaaccaggcuuacaugacuu

SEQ ID NO: 421011 - RNA, 32 nt, Human
gacuuuugaugcccuccuugaaugacuccaau

SEQ ID NO: 421012 - RNA, 32 nt, Human
gacuuuugcaaauuauggagagaggccaucaa

SEQ ID NO: 421013 - RNA, 32 nt, Human
gacuuuugcaucuguauaaaaauaucagugag

SEQ ID NO: 421014 - RNA, 32 nt, Human
gacuuuugcuuccucuacggaggcaaguaaca

SEQ ID NO: 421015 - RNA, 32 nt, Human
gacuuuuggcugcuucggugacccauuguaga

SEQ ID NO: 421016 - RNA, 32 nt, Human
gacuuuuguccuucuuucuuccaaucuguucu

SEQ ID NO: 421017 - RNA, 32 nt, Human
gacuuuuuacaaaggacuucccucauuaaacu

SEQ ID NO: 421018 - RNA, 32 nt, Human
gacuuuuucaacucagcuuuuugagaccugaa

SEQ ID NO: 421019 - RNA, 18 nt, Human
gacuuuuuccuuggcuuu

SEQ ID NO: 421020 - RNA, 17 nt, Human
gacuuuuugacauagca

SEQ ID NO: 421021 - RNA, 32 nt, Human
gacuuuuugagaaaucucgguggaguagugga

SEQ ID NO: 421022 - RNA, 32 nt, Human
gacuuuuugcagcucggcugugccucaucuuc

SEQ ID NO: 421023 - RNA, 20 nt, Human
gacuuuuuuauacaauggaa

SEQ ID NO: 421024 - RNA, 25 nt, Human
gacuuuuuuccccaugagcccucug

SEQ ID NO: 421025 - RNA, 24 nt, Human
gagaaaaaagaaauugguuaugaa

SEQ ID NO: 421026 - RNA, 21 nt, Human
gagaaaaaagugacucaugaa

SEQ ID NO: 421027 - RNA, 32 nt, Human
gagaaaaacaaacagaccaaaugcccaggagc

SEQ ID NO: 421028 - RNA, 32 nt, Human
gagaaaaaccuuauuuucuuuuguaagagcug

SEQ ID NO: 421029 - RNA, 21 nt, Human
gagaaaaagaaauccaggagc

SEQ ID NO: 421030 - RNA, 32 nt, Human
gagaaaaagacaugauaauacaggcaagaugg

SEQ ID NO: 421031 - RNA, 32 nt, Human
gagaaaaagagaugggaacgaggcagaggaaa

SEQ ID NO: 421032 - RNA, 32 nt, Human
gagaaaaagaggaggccaaaaggggcaaggua

SEQ ID NO: 421033 - RNA, 32 nt, Human
gagaaaaagagggagacaggacagcuaagcaa

SEQ ID NO: 421034 - RNA, 32 nt, Human
gagaaaaagauggaagaagaaggugugagugu

SEQ ID NO: 421035 - RNA, 32 nt, Human
gagaaaaagcaacuguauaaaugaauguagag

SEQ ID NO: 421036 - RNA, 32 nt, Human
gagaaaaagcaagggcagcggcauucacacag

SEQ ID NO: 421037 - RNA, 32 nt, Human
gagaaaaagggaaagaaggaaagucgagaggc

SEQ ID NO: 421038 - RNA, 26 nt, Human
gagaaaaagggagggaaggagaaaga

SEQ ID NO: 421039 - RNA, 21 nt, Human
gagaaaaaguggagucaugaa

SEQ ID NO: 421040 - RNA, 32 nt, Human
gagaaaaauuaaagcuaaaauuagcugcaaag

SEQ ID NO: 421041 - RNA, 23 nt, Human
gagaaaacaaaacaaaaggaaca

SEQ ID NO: 421042 - RNA, 21 nt, Human
gagaaaacaaaacaaaccaaa

SEQ ID NO: 421043 - RNA, 32 nt, Human
gagaaaacacaccugagaggggcugcuggcug

SEQ ID NO: 421044 - RNA, 22 nt, Human
gagaaaacagcaccccaaggac

SEQ ID NO: 421045 - RNA, 23 nt, Human
gagaaaacagccagcaggaggag

SEQ ID NO: 421046 - RNA, 32 nt, Human
gagaaaacaugcuucagcuguggagggcacau

SEQ ID NO: 421047 - RNA, 32 nt, Human
gagaaaacauuugcgauggaaaagugacuuug

SEQ ID NO: 421048 - RNA, 32 nt, Human
gagaaaacauuuucucuuuccuccucuugaac

SEQ ID NO: 421049 - RNA, 23 nt, Human
gagaaaacccuaugaguauucca

SEQ ID NO: 421050 - RNA, 21 nt, Human
gagaaaacgaggcuccuucca

SEQ ID NO: 421051 - RNA, 19 nt, Human
gagaaaacuagccagagua

SEQ ID NO: 421052 - RNA, 32 nt, Human
gagaaaacucaggaauucugagucuucccugc

SEQ ID NO: 421053 - RNA, 32 nt, Human
gagaaaacucuucugugccccagugaacaaau

SEQ ID NO: 421054 - RNA, 32 nt, Human
gagaaaacugaggcucaggagggggaguugac

SEQ ID NO: 421055 - RNA, 24 nt, Human
gagaaaacugcaaccaaggaagaa

SEQ ID NO: 421056 - RNA, 32 nt, Human
gagaaaagagccagaaguugaugugggaagaa

SEQ ID NO: 421057 - RNA, 32 nt, Human
gagaaaagagccucagcaagagaguuuugcca

SEQ ID NO: 421058 - RNA, 32 nt, Human
gagaaaagagguggauggagggaagggugagg

SEQ ID NO: 421059 - RNA, 32 nt, Human
gagaaaagagugagaacuaggugugcaagaac

SEQ ID NO: 421060 - RNA, 32 nt, Human
gagaaaagauacuuauguuuugcucaucuaac

SEQ ID NO: 421061 - RNA, 32 nt, Human
gagaaaagcagaacacaucacacagaugccag

SEQ ID NO: 421062 - RNA, 24 nt, Human
gagaaaagcaucugcaaaaugcua

SEQ ID NO: 421063 - RNA, 32 nt, Human
gagaaaagccaagaccuggagcgagcuggagu

SEQ ID NO: 421064 - RNA, 32 nt, Human
gagaaaagcugaaggcuugaaaagaggcaugu

SEQ ID NO: 421065 - RNA, 32 nt, Human
gagaaaagcugcaaauugcucaacuggcauug

SEQ ID NO: 421066 - RNA, 31 nt, Human
gagaaaaggaaacugccuuggauaauggcaa

SEQ ID NO: 421067 - RNA, 32 nt, Human
gagaaaaggacccugagaaggagguugcggcu

SEQ ID NO: 421068 - RNA, 32 nt, Human
gagaaaaggagaaagggagcuuguucuuccca

SEQ ID NO: 421069 - RNA, 32 nt, Human
gagaaaaggagaaguagagauaagggaagggg

SEQ ID NO: 421070 - RNA, 32 nt, Human
gagaaaaggagagagguugagcgagcgagaga

SEQ ID NO: 421071 - RNA, 32 nt, Human
gagaaaaggaggagaacaggagacgagaagga

SEQ ID NO: 421072 - RNA, 32 nt, Human
gagaaaaggcaaccugccuccagccugaaaua

SEQ ID NO: 421073 - RNA, 32 nt, Human
gagaaaagggagcuagggaaggagcaguggac

SEQ ID NO: 421074 - RNA, 23 nt, Human
gagaaaagggaggaaacggcaga

SEQ ID NO: 421075 - RNA, 32 nt, Human
gagaaaaguaaucauuuuaggucuuaaagacu

SEQ ID NO: 421076 - RNA, 32 nt, Human
gagaaaagucuuccaucauaaauuuaacuuca

SEQ ID NO: 421077 - RNA, 32 nt, Human
gagaaaagugugaacccaggaggcggagcuug

SEQ ID NO: 421078 - RNA, 21 nt, Human
gagaaaaguugggacaggagc

SEQ ID NO: 421079 - RNA, 32 nt, Human
gagaaaauaagggcuguguuuucaguuuagac

SEQ ID NO: 421080 - RNA, 32 nt, Human
gagaaaauaauccagucuucacuggguuccca

SEQ ID NO: 421081 - RNA, 32 nt, Human
gagaaaauagugggaaauagaaaagugugugc

SEQ ID NO: 421082 - RNA, 32 nt, Human
gagaaaaugcgggaauccugaaugacaguggg

SEQ ID NO: 421083 - RNA, 32 nt, Human
gagaaaauugggccugauagggugagaaucac

SEQ ID NO: 421084 - RNA, 23 nt, Human
gagaaacaaaaccacaggaggaa

SEQ ID NO: 421085 - RNA, 23 nt, Human
gagaaacaaacaaaacaaacaca

SEQ ID NO: 421086 - RNA, 32 nt, Human
gagaaacaacuagcuggacaauacucaauuca

SEQ ID NO: 421087 - RNA, 32 nt, Human
gagaaacaaguaugcucucagcugguauugaa

SEQ ID NO: 421088 - RNA, 32 nt, Human
gagaaacacauucuuauuaauucuucaccugu

SEQ ID NO: 421089 - RNA, 32 nt, Human
gagaaacagauggucaaguagaugucuguuag

SEQ ID NO: 421090 - RNA, 19 nt, Human
gagaaacagauguugcaga

SEQ ID NO: 421091 - RNA, 32 nt, Human
gagaaacaggaucagaggguggauauagggcu

SEQ ID NO: 421092 - RNA, 32 nt, Human
gagaaacaggcagcagaggaacccaaaggcag

SEQ ID NO: 421093 - RNA, 32 nt, Human
gagaaacauggagcagcgcacgcccaggcgau

SEQ ID NO: 421094 - RNA, 32 nt, Human
gagaaacauuauucaacacugguuacccagug

SEQ ID NO: 421095 - RNA, 32 nt, Human
gagaaaccaaccacaggcacccaagcacuacc

SEQ ID NO: 421096 - RNA, 32 nt, Human
gagaaaccacgugaaaccuacauugcuauguu

SEQ ID NO: 421097 - RNA, 32 nt, Human
gagaaaccagaagaauuccucugaccacuuac

SEQ ID NO: 421098 - RNA, 32 nt, Human
gagaaaccagaaggaugcuacacccaccaucu

SEQ ID NO: 421099 - RNA, 32 nt, Human
gagaaaccagcccugggacacccuaucacagg

SEQ ID NO: 421100 - RNA, 32 nt, Human
gagaaacccacugaucagcuccucaaaaccca

SEQ ID NO: 421101 - RNA, 32 nt, Human
gagaaacccagccagggugucaggggcucagg

SEQ ID NO: 421102 - RNA, 32 nt, Human
gagaaaccccagaccuggauucugaguuuuuc

SEQ ID NO: 421103 - RNA, 17 nt, Human
gagaaaccccucuggga

SEQ ID NO: 421104 - RNA, 32 nt, Human
gagaaacccuaaaucacuccucucuccacuug

SEQ ID NO: 421105 - RNA, 32 nt, Human
gagaaaccuccacccuccccaggucccacauu

SEQ ID NO: 421106 - RNA, 32 nt, Human
gagaaaccuggaagaauauuugcucaacugug

SEQ ID NO: 421107 - RNA, 32 nt, Human
gagaaaccuguggucuagaaccacagcaagaa

SEQ ID NO: 421108 - RNA, 32 nt, Human
gagaaaccuuacaaaugguguggugaggucau

SEQ ID NO: 421109 - RNA, 32 nt, Human
gagaaaccuugagccagaagacccaagcuaag

SEQ ID NO: 421110 - RNA, 17 nt, Human
gagaaacggcgcuggga

SEQ ID NO: 421111 - RNA, 16 nt, Human
gagaaacgggcugggg

SEQ ID NO: 421112 - RNA, 32 nt, Human
gagaaacguccccucaccccaucccucagcca

SEQ ID NO: 421113 - RNA, 23 nt, Human
gagaaacuccuuuaauaccccac

SEQ ID NO: 421114 - RNA, 32 nt, Human
gagaaacucggggccaccuccacuccaugugc

SEQ ID NO: 421115 - RNA, 19 nt, Human
gagaaacugacaccacuca

SEQ ID NO: 421116 - RNA, 32 nt, Human
gagaaacugaggaaccacaguccugguggggg

SEQ ID NO: 421117 - RNA, 18 nt, Human
gagaaacugaguuccuga

SEQ ID NO: 421118 - RNA, 32 nt, Human
gagaaacugcaacaaaaauguccuguggauga

SEQ ID NO: 421119 - RNA, 32 nt, Human
gagaaacugggguggcagggagggagggaggg

SEQ ID NO: 421120 - RNA, 32 nt, Human
gagaaacuuaagcuaaagucuguuauacagaa

SEQ ID NO: 421121 - RNA, 32 nt, Human
gagaaagaaaaaugcuggaacaugcuugaugu

SEQ ID NO: 421122 - RNA, 20 nt, Human
gagaaagaaaagcugaagga

SEQ ID NO: 421123 - RNA, 21 nt, Human
gagaaagaaaaucugaagggc

SEQ ID NO: 421124 - RNA, 32 nt, Human
gagaaagaaagaaagaaagaaagggaaagaug

SEQ ID NO: 421125 - RNA, 32 nt, Human
gagaaagaaagaaagaaagagagagaaagaaa

SEQ ID NO: 421126 - RNA, 18 nt, Human
gagaaagaaagaaagggc

SEQ ID NO: 421127 - RNA, 21 nt, Human
gagaaagaaagccacaaggau

SEQ ID NO: 421128 - RNA, 32 nt, Human
gagaaagaaagugaauaaaucaggaauauaag

SEQ ID NO: 421129 - RNA, 18 nt, Human
gagaaagaacccaagaga

SEQ ID NO: 421130 - RNA, 18 nt, Human
gagaaagaaccucuuucc

SEQ ID NO: 421131 - RNA, 32 nt, Human
gagaaagaacuccucauaggaauacugaagaa

SEQ ID NO: 421132 - RNA, 32 nt, Human
gagaaagaacuuaaagagcuaggaggacagag

SEQ ID NO: 421133 - RNA, 21 nt, Human
gagaaagaacuuucucuucca

SEQ ID NO: 421134 - RNA, 18 nt, Human
gagaaagaagaaaaagga

SEQ ID NO: 421135 - RNA, 23 nt, Human
gagaaagaagaggaggagucaga

SEQ ID NO: 421136 - RNA, 18 nt, Human
gagaaagaagccaaugac

SEQ ID NO: 421137 - RNA, 22 nt, Human
gagaaagaaggccugggagggg

SEQ ID NO: 421138 - RNA, 32 nt, Human
gagaaagaagggagagaaaagguugcaucugc

SEQ ID NO: 421139 - RNA, 20 nt, Human
gagaaagaauccugcuucca

SEQ ID NO: 421140 - RNA, 32 nt, Human
gagaaagaaugagaaagaaaaggaaugcaaga

SEQ ID NO: 421141 - RNA, 32 nt, Human
gagaaagaaugucuuuucgaggcggaggucgu

SEQ ID NO: 421142 - RNA, 18 nt, Human
gagaaagaauuuuuucca

SEQ ID NO: 421143 - RNA, 22 nt, Human
gagaaagaauuuuuuccaagga

SEQ ID NO: 421144 - RNA, 32 nt, Human
gagaaagacacagugggaauugauuauguauu

SEQ ID NO: 421145 - RNA, 32 nt, Human
gagaaagacagagagaaauugaguuccugaca

SEQ ID NO: 421146 - RNA, 32 nt, Human
gagaaagacaggaggaaagagggccaugggag

SEQ ID NO: 421147 - RNA, 32 nt, Human
gagaaagaccaugguuguugcugagaggguaa

SEQ ID NO: 421148 - RNA, 17 nt, Human
gagaaagagaaagaagg

SEQ ID NO: 421149 - RNA, 18 nt, Human
gagaaagagaaagaugga

SEQ ID NO: 421150 - RNA, 22 nt, Human
gagaaagagaaaggaaguggac

SEQ ID NO: 421151 - RNA, 18 nt, Human
gagaaagagaaaucagga

SEQ ID NO: 421152 - RNA, 21 nt, Human
gagaaagagaaaugcaggagc

SEQ ID NO: 421153 - RNA, 21 nt, Human
gagaaagagaacuacuaagga

SEQ ID NO: 421154 - RNA, 20 nt, Human
gagaaagagaagacaagagc

SEQ ID NO: 421155 - RNA, 32 nt, Human
gagaaagagaagcuugucucagaagcuccacc

SEQ ID NO: 421156 - RNA, 32 nt, Human
gagaaagagaaggaaggaaggagaaagagaag

SEQ ID NO: 421157 - RNA, 24 nt, Human
gagaaagagaaggauccccaagga

SEQ ID NO: 421158 - RNA, 16 nt, Human
gagaaagagaauggga

SEQ ID NO: 421159 - RNA, 20 nt, Human
gagaaagagacaaagaggac

SEQ ID NO: 421160 - RNA, 32 nt, Human
gagaaagagagaagaagaaaggaagaggaaag

SEQ ID NO: 421161 - RNA, 18 nt, Human
gagaaagagagagaagga

SEQ ID NO: 421162 - RNA, 17 nt, Human
gagaaagagagagagga

SEQ ID NO: 421163 - RNA, 32 nt, Human
gagaaagagagcaugagagggagcgagacagg

SEQ ID NO: 421164 - RNA, 20 nt, Human
gagaaagagcagcucaggac

SEQ ID NO: 421165 - RNA, 18 nt, Human
gagaaagagccacauccc

SEQ ID NO: 421166 - RNA, 18 nt, Human
gagaaagagccccauccc

SEQ ID NO: 421167 - RNA, 21 nt, Human
gagaaagagccccccaaggau

SEQ ID NO: 421168 - RNA, 21 nt, Human
gagaaagagcucccuccucca

SEQ ID NO: 421169 - RNA, 32 nt, Human
gagaaagaggagaagaagaaugaugagcacaa

SEQ ID NO: 421170 - RNA, 18 nt, Human
gagaaagaggcgcaggac

SEQ ID NO: 421171 - RNA, 21 nt, Human
gagaaagagggcaaucaggac

SEQ ID NO: 421172 - RNA, 32 nt, Human
gagaaagaggugaggauggaaggauggagaaa

SEQ ID NO: 421173 - RNA, 21 nt, Human
gagaaagagucaaccaagggc

SEQ ID NO: 421174 - RNA, 19 nt, Human
gagaaagaguccgcgacca

SEQ ID NO: 421175 - RNA, 19 nt, Human
gagaaagagucuugcucca

SEQ ID NO: 421176 - RNA, 18 nt, Human
gagaaagaguggauuuca

SEQ ID NO: 421177 - RNA, 32 nt, Human
gagaaagauaguugcaaccucaccucccucac

SEQ ID NO: 421178 - RNA, 19 nt, Human
gagaaagaugcucaucaca

SEQ ID NO: 421179 - RNA, 18 nt, Human
gagaaagauuccaaaggc

SEQ ID NO: 421180 - RNA, 18 nt, Human
gagaaagauuccuuccca

SEQ ID NO: 421181 - RNA, 16 nt, Human
gagaaagauucugggg

SEQ ID NO: 421182 - RNA, 32 nt, Human
gagaaagauugguguaaucugcuuuccugucu

SEQ ID NO: 421183 - RNA, 32 nt, Human
gagaaagcaaaaagguuccaagagguacuuuu

SEQ ID NO: 421184 - RNA, 25 nt, Human
gagaaagcaaaacaaaacaauaaca

SEQ ID NO: 421185 - RNA, 32 nt, Human
gagaaagcaaaggugcacuccagacucugggg

SEQ ID NO: 421186 - RNA, 32 nt, Human
gagaaagcacuggaauccaggcuuccagcucc

SEQ ID NO: 421187 - RNA, 19 nt, Human
gagaaagcagaguccucca

SEQ ID NO: 421188 - RNA, 21 nt, Human
gagaaagcaguuuccaaggau

SEQ ID NO: 421189 - RNA, 26 nt, Human
gagaaagcaucugcuccaaggaggga

SEQ ID NO: 421190 - RNA, 32 nt, Human
gagaaagcaugaggauauucccaaugacuaug

SEQ ID NO: 421191 - RNA, 32 nt, Human
gagaaagccacuucuggugguugccagccacc

SEQ ID NO: 421192 - RNA, 32 nt, Human
gagaaagcccacccucucccgcgccccaggaa

SEQ ID NO: 421193 - RNA, 32 nt, Human
gagaaagcccgggcaggagagcacagagccgg

SEQ ID NO: 421194 - RNA, 32 nt, Human
gagaaagcccguaaggagcugaaggaggagcu

SEQ ID NO: 421195 - RNA, 20 nt, Human
gagaaagcccucaguguucu

SEQ ID NO: 421196 - RNA, 32 nt, Human
gagaaagccugcuugcuucuuccuucauuugg

SEQ ID NO: 421197 - RNA, 32 nt, Human
gagaaagccuggcagaggguugggggcuaaga

SEQ ID NO: 421198 - RNA, 32 nt, Human
gagaaagcgcagaugcuagcacaugcccuaau

SEQ ID NO: 421199 - RNA, 32 nt, Human
gagaaagcgccauugcacuccagucuggguga

SEQ ID NO: 421200 - RNA, 32 nt, Human
gagaaagcggcagcagauugugcugccgcagg

SEQ ID NO: 421201 - RNA, 32 nt, Human
gagaaagcuacuuggaaaucuggagcaaacau

SEQ ID NO: 421202 - RNA, 32 nt, Human
gagaaagcucuauccagccugucaccacugcc

SEQ ID NO: 421203 - RNA, 32 nt, Human
gagaaagcugaggaggcuuuggaagagaaggu

SEQ ID NO: 421204 - RNA, 32 nt, Human
gagaaagcugcacucuguugagcuccagggcg

SEQ ID NO: 421205 - RNA, 32 nt, Human
gagaaagcugggcccuacagaaaccuaacgcu

SEQ ID NO: 421206 - RNA, 32 nt, Human
gagaaagcuuugaggaagacuugucugucccc

SEQ ID NO: 421207 - RNA, 32 nt, Human
gagaaaggaaagaggaagggggagcggcgaga

SEQ ID NO: 421208 - RNA, 26 nt, Human
gagaaaggaauaagcucucugugaug

SEQ ID NO: 421209 - RNA, 32 nt, Human
gagaaaggaauguugccuuugagaacugucuu

SEQ ID NO: 421210 - RNA, 18 nt, Human
gagaaaggacccuuccca

SEQ ID NO: 421211 - RNA, 32 nt, Human
gagaaaggaccuaggguggggaagggaggguc

SEQ ID NO: 421212 - RNA, 21 nt, Human
gagaaaggagacaagaugugg

SEQ ID NO: 421213 - RNA, 21 nt, Human
gagaaaggagccccacaucca

SEQ ID NO: 421214 - RNA, 18 nt, Human
gagaaaggagggaguggg

SEQ ID NO: 421215 - RNA, 32 nt, Human
gagaaaggaguaagaauggggauggcaaaggg

SEQ ID NO: 421216 - RNA, 32 nt, Human
gagaaaggagugaaggaggcaggugggaaaug

SEQ ID NO: 421217 - RNA, 32 nt, Human
gagaaaggauuuccuuucuuuuuaaucuucca

SEQ ID NO: 421218 - RNA, 32 nt, Human
gagaaaggauuucugaggagugugugaugugu

SEQ ID NO: 421219 - RNA, 32 nt, Human
gagaaaggcaugaauccaggaggcagagcuug

SEQ ID NO: 421220 - RNA, 18 nt, Human
gagaaaggcugaagggga

SEQ ID NO: 421221 - RNA, 32 nt, Human
gagaaaggcugcaguggccucagugauguaca

SEQ ID NO: 421222 - RNA, 19 nt, Human
gagaaaggcuuccccacca

SEQ ID NO: 421223 - RNA, 19 nt, Human
gagaaagggaauccaagga

SEQ ID NO: 421224 - RNA, 21 nt, Human
gagaaagggaauuucauccca

SEQ ID NO: 421225 - RNA, 23 nt, Human
gagaaagggacaagugaggcagg

SEQ ID NO: 421226 - RNA, 22 nt, Human
gagaaagggagaagacagcaga

SEQ ID NO: 421227 - RNA, 24 nt, Human
gagaaagggagagagggagggaga

SEQ ID NO: 421228 - RNA, 32 nt, Human
gagaaagggagagagggagggagagagaguga

SEQ ID NO: 421229 - RNA, 32 nt, Human
gagaaagggagagagggagggagaggaucgug

SEQ ID NO: 421230 - RNA, 32 nt, Human
gagaaagggcccuggccaggcuggauggaugc

SEQ ID NO: 421231 - RNA, 32 nt, Human
gagaaaggggcuuugggcucugccccucuggc

SEQ ID NO: 421232 - RNA, 19 nt, Human
gagaaagggggccauggac

SEQ ID NO: 421233 - RNA, 21 nt, Human
gagaaaggugagaggaggaga

SEQ ID NO: 421234 - RNA, 32 nt, Human
gagaaagguguuagauguuacggugccuucua

SEQ ID NO: 421235 - RNA, 18 nt, Human
gagaaaguaauuauucca

SEQ ID NO: 421236 - RNA, 32 nt, Human
gagaaaguauuugucucuccaacuugaaaaug

SEQ ID NO: 421237 - RNA, 32 nt, Human
gagaaagucuucauggggugcuagagcaucuu

SEQ ID NO: 421238 - RNA, 32 nt, Human
gagaaagugaaaaugccacucucuccacccca

SEQ ID NO: 421239 - RNA, 32 nt, Human
gagaaagugaacagcauuuguuggaaggugau

SEQ ID NO: 421240 - RNA, 32 nt, Human
gagaaagugagcuaaguugggguggggugagu

SEQ ID NO: 421241 - RNA, 23 nt, Human
gagaaaguggaaggcauggaagc

SEQ ID NO: 421242 - RNA, 20 nt, Human
gagaaaguggagaagguaga

SEQ ID NO: 421243 - RNA, 18 nt, Human
gagaaaguggcucauucc

SEQ ID NO: 421244 - RNA, 32 nt, Human
gagaaaguucacagggaauuggaaauccuugu

SEQ ID NO: 421245 - RNA, 32 nt, Human
gagaaauaagcucagauggaagagauaaacga

SEQ ID NO: 421246 - RNA, 32 nt, Human
gagaaauaagggccuuaauuuguacugucugc

SEQ ID NO: 421247 - RNA, 32 nt, Human
gagaaauaccacaugccagucuucccaggaag

SEQ ID NO: 421248 - RNA, 32 nt, Human
gagaaauaccuuuagaggugacuuuaaggaaa

SEQ ID NO: 421249 - RNA, 19 nt, Human
gagaaauagaaauccaagg

SEQ ID NO: 421250 - RNA, 20 nt, Human
gagaaaucaacaguuccuga

SEQ ID NO: 421251 - RNA, 32 nt, Human
gagaaaucaagugaaggaaggaggcggaguuu

SEQ ID NO: 421252 - RNA, 32 nt, Human
gagaaaucacacucaagcauuaucaagugaag

SEQ ID NO: 421253 - RNA, 22 nt, Human
gagaaaucaugaaugucaugaa

SEQ ID NO: 421254 - RNA, 32 nt, Human
gagaaaucccagggcauuguaccaaggaccua

SEQ ID NO: 421255 - RNA, 32 nt, Human
gagaaaucuccucaaacccagaagguuuaauc

SEQ ID NO: 421256 - RNA, 32 nt, Human
gagaaaugaaguauucccauucccaggcaccu

SEQ ID NO: 421257 - RNA, 32 nt, Human
gagaaaugagugaaugugggugaucugcuuuu

SEQ ID NO: 421258 - RNA, 30 nt, Human
gagaaaugcacuuuucagcuccuguuucag

SEQ ID NO: 421259 - RNA, 32 nt, Human
gagaaaugccaggaucguggcucacagggacc

SEQ ID NO: 421260 - RNA, 32 nt, Human
gagaaaugccuguucagcuacuuugcccaugu

SEQ ID NO: 421261 - RNA, 32 nt, Human
gagaaaugcuacuggcauuuaguggaugaugg

SEQ ID NO: 421262 - RNA, 32 nt, Human
gagaaauggacauggcuggagacuuugagucc

SEQ ID NO: 421263 - RNA, 18 nt, Human
gagaaauggacucaggga

SEQ ID NO: 421264 - RNA, 32 nt, Human
gagaaauggacuucgccugaggcuguuugcca

SEQ ID NO: 421265 - RNA, 32 nt, Human
gagaaauggagcucuguggcuucccacccaaa

SEQ ID NO: 421266 - RNA, 32 nt, Human
gagaaauggcucuguauaaucuauggcuaucc

SEQ ID NO: 421267 - RNA, 32 nt, Human
gagaaaugggaaagaagagggagggagagaga

SEQ ID NO: 421268 - RNA, 32 nt, Human
gagaaaugggguggaauagggaacuguaaugg

SEQ ID NO: 421269 - RNA, 32 nt, Human
gagaaauggucagaaggaacgacaccacagaa

SEQ ID NO: 421270 - RNA, 32 nt, Human
gagaaauguacccuauuauuuccuucauaaag

SEQ ID NO: 421271 - RNA, 32 nt, Human
gagaaauguaguguuucauuuuguaugcauua

SEQ ID NO: 421272 - RNA, 32 nt, Human
gagaaauguggacagagggcuugaagacaugg

SEQ ID NO: 421273 - RNA, 32 nt, Human
gagaaaugugguggaaacaggagugaauaaag

SEQ ID NO: 421274 - RNA, 32 nt, Human
gagaaauuagacuguaccuguguacacuucua

SEQ ID NO: 421275 - RNA, 32 nt, Human
gagaaauuaggggcgggugggaagggauggga

SEQ ID NO: 421276 - RNA, 32 nt, Human
gagaaauucaggcugggugcaguggcucacac

SEQ ID NO: 421277 - RNA, 32 nt, Human
gagaaauuccucuuuaaaugaacaaguaacca

SEQ ID NO: 421278 - RNA, 32 nt, Human
gagaaauuggggacccugaagaaagggggcca

SEQ ID NO: 421279 - RNA, 32 nt, Human
gagaaauuucaaugaaaagaaaagccaaugga

SEQ ID NO: 421280 - RNA, 32 nt, Human
gagaaauuuggugaagaaacaugggaaaaauu

SEQ ID NO: 421281 - RNA, 32 nt, Human
gagaaauuuuguuaccucuauccuggcuugcc

SEQ ID NO: 421282 - RNA, 21 nt, Human
gagaacaaaacaaaacaaaca

SEQ ID NO: 421283 - RNA, 32 nt, Human
gagaacaaaaggcaaaggaaggaggaauucgc

SEQ ID NO: 421284 - RNA, 23 nt, Human
gagaacaaagacacaacauacca

SEQ ID NO: 421285 - RNA, 32 nt, Human
gagaacaacagaaugaaagaaauguaucucug

SEQ ID NO: 421286 - RNA, 32 nt, Human
gagaacaaccugcuggaaagaccugggcagaa

SEQ ID NO: 421287 - RNA, 32 nt, Human
gagaacaagaugaccugggccccgagaaacaa

SEQ ID NO: 421288 - RNA, 32 nt, Human
gagaacaaggaccaccuggguucuccagucuu

SEQ ID NO: 421289 - RNA, 32 nt, Human
gagaacaaggcggcgcuggaggcgugggucag

SEQ ID NO: 421290 - RNA, 32 nt, Human
gagaacaaggucacugaccucugccuacaauc

SEQ ID NO: 421291 - RNA, 19 nt, Human
gagaacacacgagcacgua

SEQ ID NO: 421292 - RNA, 32 nt, Human
gagaacacagaaugagccagcagacuggccag

SEQ ID NO: 421293 - RNA, 32 nt, Human
gagaacacagccgauucaccugagcaggaccu

SEQ ID NO: 421294 - RNA, 32 nt, Human
gagaacacagguuaccuuguucuugaaacacg

SEQ ID NO: 421295 - RNA, 24 nt, Human
gagaacacaguagauguguaguca

SEQ ID NO: 421296 - RNA, 32 nt, Human
gagaacaccaaaacaaaaaguaaaaagcagaa

SEQ ID NO: 421297 - RNA, 32 nt, Human
gagaacaccagagaccucaaauuacuuuguga

SEQ ID NO: 421298 - RNA, 19 nt, Human
gagaacacccaguucuuga

SEQ ID NO: 421299 - RNA, 32 nt, Human
gagaacacccaugaacguuccccaaguucucc

SEQ ID NO: 421300 - RNA, 20 nt, Human
gagaacacgaggaaggcaga

SEQ ID NO: 421301 - RNA, 32 nt, Human
gagaacacguggacacagggaggagaacaaca

SEQ ID NO: 421302 - RNA, 32 nt, Human
gagaacacugaauugccaacgagcaggagagu

SEQ ID NO: 421303 - RNA, 20 nt, Human
gagaacacugugagcauuuu

SEQ ID NO: 421304 - RNA, 32 nt, Human
gagaacacuguggcugaaauauaauuuuucuc

SEQ ID NO: 421305 - RNA, 32 nt, Human
gagaacagaaauauuccuacugucuuuggaaa

SEQ ID NO: 421306 - RNA, 32 nt, Human
gagaacagaagggugacgcugcccagacucac

SEQ ID NO: 421307 - RNA, 32 nt, Human
gagaacagagaagaaaagacacucugaaaaag

SEQ ID NO: 421308 - RNA, 32 nt, Human
gagaacagagcaauggcagcugcugugugagg

SEQ ID NO: 421309 - RNA, 19 nt, Human
gagaacagcaaguuccuga

SEQ ID NO: 421310 - RNA, 32 nt, Human
gagaacagccugagggagguggaggccuguua

SEQ ID NO: 421311 - RNA, 32 nt, Human
gagaacagccuggccaacagacgggagccacu

SEQ ID NO: 421312 - RNA, 23 nt, Human
gagaacagccuucaucuccuccu

SEQ ID NO: 421313 - RNA, 32 nt, Human
gagaacaggaacagaacugagcaggggcaggu

SEQ ID NO: 421314 - RNA, 21 nt, Human
gagaacaggaagaggcggaug

SEQ ID NO: 421315 - RNA, 32 nt, Human
gagaacaggagggaggaggagaugaaagagga

SEQ ID NO: 421316 - RNA, 32 nt, Human
gagaacaggcccugugcaggaccagaaguaau

SEQ ID NO: 421317 - RNA, 32 nt, Human
gagaacaggcugaggggagcugagaggagcug

SEQ ID NO: 421318 - RNA, 31 nt, Human
gagaacaggguggaagaucugggggagcuaa

SEQ ID NO: 421319 - RNA, 24 nt, Human
gagaacaguguagccuggccugua

SEQ ID NO: 421320 - RNA, 32 nt, Human
gagaacagugucaucucuuccuuuguugauaa

SEQ ID NO: 421321 - RNA, 32 nt, Human
gagaacauaagccugcucguaaagcucaaucc

SEQ ID NO: 421322 - RNA, 32 nt, Human
gagaacauagggccaggcacuguggcucaugc

SEQ ID NO: 421323 - RNA, 32 nt, Human
gagaacauauuuccaagacagaggauucuaug

SEQ ID NO: 421324 - RNA, 22 nt, Human
gagaacaucccgcuucugaagc

SEQ ID NO: 421325 - RNA, 23 nt, Human
gagaacauccgcgaaggcuguug

SEQ ID NO: 421326 - RNA, 32 nt, Human
gagaacauccuucucccucagcuggagggagc

SEQ ID NO: 421327 - RNA, 32 nt, Human
gagaacaucugcccuccagccccugaccccaa

SEQ ID NO: 421328 - RNA, 22 nt, Human
gagaacauggucacccaaaagc

SEQ ID NO: 421329 - RNA, 32 nt, Human
gagaacauguguuuucugauaacucacaaccc

SEQ ID NO: 421330 - RNA, 32 nt, Human
gagaacauuaaacuaccagucugguaagcugg

SEQ ID NO: 421331 - RNA, 32 nt, Human
gagaaccaagugaccgacucauuuacaacuga

SEQ ID NO: 421332 - RNA, 32 nt, Human
gagaaccaauucuggagaacagccucacuucu

SEQ ID NO: 421333 - RNA, 32 nt, Human
gagaaccacagaaaaucugccugccagguguu

SEQ ID NO: 421334 - RNA, 32 nt, Human
gagaaccacccuugcuugaggaauucugaagc

SEQ ID NO: 421335 - RNA, 32 nt, Human
gagaaccaccuaccccugacuucuguuuaguc

SEQ ID NO: 421336 - RNA, 32 nt, Human
gagaaccacuggucaggucagcucccagcucc

SEQ ID NO: 421337 - RNA, 32 nt, Human
gagaaccaggagagaugauggugugauuacag

SEQ ID NO: 421338 - RNA, 32 nt, Human
gagaaccaggaggcagagcgggaggguggcau

SEQ ID NO: 421339 - RNA, 32 nt, Human
gagaaccaggggucugugccucuccucauucc

SEQ ID NO: 421340 - RNA, 32 nt, Human
gagaaccaucgagccuguggaaguucuuucuc

SEQ ID NO: 421341 - RNA, 32 nt, Human
gagaacccacaggacaccaaagagagcccacc

SEQ ID NO: 421342 - RNA, 32 nt, Human
gagaacccaccucucccccaagggccucagcc

SEQ ID NO: 421343 - RNA, 32 nt, Human
gagaacccagagcaaugacaccagucuggacu

SEQ ID NO: 421344 - RNA, 32 nt, Human
gagaacccagcucugggaccaagucacuugcu

SEQ ID NO: 421345 - RNA, 32 nt, Human
gagaacccauccagaucccccuucccuucuuc

SEQ ID NO: 421346 - RNA, 32 nt, Human
gagaaccccucagggcagauagcuggcucaga

SEQ ID NO: 421347 - RNA, 32 nt, Human
gagaaccccugccaugcucuggucuguucuga

SEQ ID NO: 421348 - RNA, 32 nt, Human
gagaaccccugccuccgucgcggcuccuggag

SEQ ID NO: 421349 - RNA, 32 nt, Human
gagaacccgcccggaggaagaaggaaggcgcg

SEQ ID NO: 421350 - RNA, 32 nt, Human
gagaacccgggccuuccccucccagugccucc

SEQ ID NO: 421351 - RNA, 32 nt, Human
gagaacccucaccucugaucuggccucuacga

SEQ ID NO: 421352 - RNA, 32 nt, Human
gagaacccugcaaauuuucuuccucauaauug

SEQ ID NO: 421353 - RNA, 32 nt, Human
gagaacccugcaucuugcacuuugggaauaag

SEQ ID NO: 421354 - RNA, 32 nt, Human
gagaacccugugggggcggcugugggggaggu

SEQ ID NO: 421355 - RNA, 32 nt, Human
gagaacccuuccccauuuucauauccuuucuu

SEQ ID NO: 421356 - RNA, 32 nt, Human
gagaaccgaauuugaacacugaccuugucauu

SEQ ID NO: 421357 - RNA, 32 nt, Human
gagaaccgauauagcagugcccagggguagag

SEQ ID NO: 421358 - RNA, 32 nt, Human
gagaaccgcaucacuucauuugcucagaccca

SEQ ID NO: 421359 - RNA, 32 nt, Human
gagaaccgccaggaggcuggagcccagccagg

SEQ ID NO: 421360 - RNA, 32 nt, Human
gagaaccuagaggugguggugcaggugggaau

SEQ ID NO: 421361 - RNA, 19 nt, Human
gagaaccucaagcuccugg

SEQ ID NO: 421362 - RNA, 19 nt, Human
gagaaccucacacgccuga

SEQ ID NO: 421363 - RNA, 21 nt, Human
gagaaccucauccaugccugg

SEQ ID NO: 421364 - RNA, 19 nt, Human
gagaaccuccacccucuga

SEQ ID NO: 421365 - RNA, 32 nt, Human
gagaaccuccacccucugacaccauggucaac

SEQ ID NO: 421366 - RNA, 18 nt, Human
gagaaccugaguucccgg

SEQ ID NO: 421367 - RNA, 32 nt, Human
gagaaccugcaaccguuuccgccuccugcuag

SEQ ID NO: 421368 - RNA, 19 nt, Human
gagaaccugccuuccuaga

SEQ ID NO: 421369 - RNA, 32 nt, Human
gagaaccugcggaaggagaagcuucccaggac

SEQ ID NO: 421370 - RNA, 20 nt, Human
gagaaccugcugcuuccuga

SEQ ID NO: 421371 - RNA, 19 nt, Human
gagaaccuggaguuccuga

SEQ ID NO: 421372 - RNA, 32 nt, Human
gagaaccuguauuuccuucuucaacaaagaag

SEQ ID NO: 421373 - RNA, 19 nt, Human
gagaaccugucccuccuga

SEQ ID NO: 421374 - RNA, 21 nt, Human
gagaaccuuauauuguccuga

SEQ ID NO: 421375 - RNA, 19 nt, Human
gagaaccuucugcuucuga

SEQ ID NO: 421376 - RNA, 20 nt, Human
gagaaccuugggucuggaga

SEQ ID NO: 421377 - RNA, 19 nt, Human
gagaaccuuuccguuccug

SEQ ID NO: 421378 - RNA, 32 nt, Human
gagaacgaccuuucuuucuuuauuucucagcc

SEQ ID NO: 421379 - RNA, 32 nt, Human
gagaacgacucccagaaaauuagccgggcgug

SEQ ID NO: 421380 - RNA, 32 nt, Human
gagaacggagaagaaguuguagcagagggaaa

SEQ ID NO: 421381 - RNA, 32 nt, Human
gagaacggcgugaacccgggaggcggagcuug

SEQ ID NO: 421382 - RNA, 32 nt, Human
gagaacgggaaagagggaggugggaaauagaa

SEQ ID NO: 421383 - RNA, 32 nt, Human
gagaacgggcagacugccuccucaaguggguc

SEQ ID NO: 421384 - RNA, 32 nt, Human
gagaacgggcccagggugcuguggagaucaac

SEQ ID NO: 421385 - RNA, 32 nt, Human
gagaacguggcccagcccuggagggcaggcgg

SEQ ID NO: 421386 - RNA, 32 nt, Human
gagaacuaacccaauauggcaggaagccacug

SEQ ID NO: 421387 - RNA, 16 nt, Human
gagaacuagugaagua

SEQ ID NO: 421388 - RNA, 32 nt, Human
gagaacuauuaacugccuuccuucugugggcu

SEQ ID NO: 421389 - RNA, 20 nt, Human
gagaacucacagcucuggga

SEQ ID NO: 421390 - RNA, 32 nt, Human
gagaacucaccauugcacuccagccuggauga

SEQ ID NO: 421391 - RNA, 32 nt, Human
gagaacucauacuggagagaagcccuauguuu

SEQ ID NO: 421392 - RNA, 32 nt, Human
gagaacucauuuccaacuguacaaccuuuaug

SEQ ID NO: 421393 - RNA, 32 nt, Human
gagaacuccaaacugucccagcagguuugcuu

SEQ ID NO: 421394 - RNA, 32 nt, Human
gagaacucccacuaaaaggugaaaaugcucaa

SEQ ID NO: 421395 - RNA, 32 nt, Human
gagaacucccacuaaaagugaaaaugcucaaa

SEQ ID NO: 421396 - RNA, 32 nt, Human
gagaacuccgaggagagcagggggaguggagg

SEQ ID NO: 421397 - RNA, 32 nt, Human
gagaacucuccccuucuucccucucucauccc

SEQ ID NO: 421398 - RNA, 32 nt, Human
gagaacucucucuucccacuaagugauauaac

SEQ ID NO: 421399 - RNA, 19 nt, Human
gagaacugaauccaaggau

SEQ ID NO: 421400 - RNA, 31 nt, Human
gagaacugacuucucucuuaaaaaguacaga

SEQ ID NO: 421401 - RNA, 32 nt, Human
gagaacugagauggaauucaagagagaagugu

SEQ ID NO: 421402 - RNA, 32 nt, Human
gagaacugaggcugaggguagagggaguaugc

SEQ ID NO: 421403 - RNA, 32 nt, Human
gagaacugagugacccagaagggguggcgaag

SEQ ID NO: 421404 - RNA, 32 nt, Human
gagaacugcacagaggccugguguggacauug

SEQ ID NO: 421405 - RNA, 32 nt, Human
gagaacugccugaacccaggaggcagagguug

SEQ ID NO: 421406 - RNA, 32 nt, Human
gagaacugcugaguuacugaaagaccuuuugg

SEQ ID NO: 421407 - RNA, 32 nt, Human
gagaacugcuucugucucuggagagacagaag

SEQ ID NO: 421408 - RNA, 32 nt, Human
gagaacugcuugaacccaggaggcagagguug

SEQ ID NO: 421409 - RNA, 23 nt, Human
gagaacuggcaaggaugcaguca

SEQ ID NO: 421410 - RNA, 24 nt, Human
gagaacuggcccagagcccuugga

SEQ ID NO: 421411 - RNA, 32 nt, Human
gagaacuggcuggccuuguuuccugagucuga

SEQ ID NO: 421412 - RNA, 32 nt, Human
gagaacuggcuuggugacuuugcuucacuaca

SEQ ID NO: 421413 - RNA, 32 nt, Human
gagaacugggaggaagcuggagaaaagaugcc

SEQ ID NO: 421414 - RNA, 32 nt, Human
gagaacugguuggaguuauggaaaagaugccc

SEQ ID NO: 421415 - RNA, 19 nt, Human
gagaacuguccugcagcug

SEQ ID NO: 421416 - RNA, 32 nt, Human
gagaacugucgggaccaggaagacucauucca

SEQ ID NO: 421417 - RNA, 24 nt, Human
gagaacuuacuaaaggcacuuccu

SEQ ID NO: 421418 - RNA, 17 nt, Human
gagaacuuagcagggug

SEQ ID NO: 421419 - RNA, 32 nt, Human
gagaacuuagcccagagcuagugaacgagccu

SEQ ID NO: 421420 - RNA, 32 nt, Human
gagaacuucuggccuguccucccuggcugcug

SEQ ID NO: 421421 - RNA, 18 nt, Human
gagaacuugaugcaaagu

SEQ ID NO: 421422 - RNA, 22 nt, Human
gagaacuuggcucagggcuccu

SEQ ID NO: 421423 - RNA, 22 nt, Human
gagaacuugguaacgugaagua

SEQ ID NO: 421424 - RNA, 32 nt, Human
gagaacuugguauccaugacuguggaggggcc

SEQ ID NO: 421425 - RNA, 32 nt, Human
gagaacuuggugagcuaugaauuacucucagu

SEQ ID NO: 421426 - RNA, 23 nt, Human
gagaacuuguugcgacauuuccu

SEQ ID NO: 421427 - RNA, 18 nt, Human
gagaacuuucugugagua

SEQ ID NO: 421428 - RNA, 23 nt, Human
gagaacuuugccacaggucuucu

SEQ ID NO: 421429 - RNA, 32 nt, Human
gagaacuuugggccaguagagacgggguuuca

SEQ ID NO: 421430 - RNA, 32 nt, Human
gagaagaaaagccagaaaauuagcuuaaaagc

SEQ ID NO: 421431 - RNA, 32 nt, Human
gagaagaaaauugacaaauacacagagguccu

SEQ ID NO: 421432 - RNA, 17 nt, Human
gagaagaaagauacaga

SEQ ID NO: 421433 - RNA, 32 nt, Human
gagaagaaaucaguggauacuggauuugcucc

SEQ ID NO: 421434 - RNA, 24 nt, Human
gagaagaacaaucgggcccagcca

SEQ ID NO: 421435 - RNA, 25 nt, Human
gagaagaacccuugggccccuggga

SEQ ID NO: 421436 - RNA, 32 nt, Human
gagaagaagaagcagaaggagcaggagcaagg

SEQ ID NO: 421437 - RNA, 32 nt, Human
gagaagaagagaaagaaaagaaaaagaaaaag

SEQ ID NO: 421438 - RNA, 32 nt, Human
gagaagaagaggagauggaggggccaggagcc

SEQ ID NO: 421439 - RNA, 32 nt, Human
gagaagaagauaagcuggaagaggccagggaa

SEQ ID NO: 421440 - RNA, 32 nt, Human
gagaagaaggaaaggcacagguggagaacagu

SEQ ID NO: 421441 - RNA, 32 nt, Human
gagaagaaggaacgagagaaagagugagagga

SEQ ID NO: 421442 - RNA, 32 nt, Human
gagaagaauguucaugcuaauucuucuuacau

SEQ ID NO: 421443 - RNA, 32 nt, Human
gagaagaauucucaucauaguugggagccauu

SEQ ID NO: 421444 - RNA, 32 nt, Human
gagaagacacacuugggacacagugaagacag

SEQ ID NO: 421445 - RNA, 32 nt, Human
gagaagacacuaagggccccacaggcuuguuu

SEQ ID NO: 421446 - RNA, 32 nt, Human
gagaagacauacugcagggcucagugagggag

SEQ ID NO: 421447 - RNA, 32 nt, Human
gagaagacccagcuggaguucaugucgcaaca

SEQ ID NO: 421448 - RNA, 31 nt, Human
gagaagacccgauaagugucacuggauguga

SEQ ID NO: 421449 - RNA, 32 nt, Human
gagaagaccuucuagugagccugggccaggag

SEQ ID NO: 421450 - RNA, 32 nt, Human
gagaagaccuugggccaagaugcuaaauggga

SEQ ID NO: 421451 - RNA, 32 nt, Human
gagaagacuacuccuccaccucuuguggaggg

SEQ ID NO: 421452 - RNA, 32 nt, Human
gagaagacugggcuagggagaaugcagagagg

SEQ ID NO: 421453 - RNA, 24 nt, Human
gagaagacuucaucaugacaggac

SEQ ID NO: 421454 - RNA, 32 nt, Human
gagaagagagagggagauaaaagggggagaca

SEQ ID NO: 421455 - RNA, 32 nt, Human
gagaagagaggagaggagagaggcagagagcg

SEQ ID NO: 421456 - RNA, 32 nt, Human
gagaagagaguuuccacguugucaucauagga

SEQ ID NO: 421457 - RNA, 32 nt, Human
gagaagagcaaagaaguuaaaagagaaguguc

SEQ ID NO: 421458 - RNA, 18 nt, Human
gagaagagcagcacguua

SEQ ID NO: 421459 - RNA, 32 nt, Human
gagaagagccagcccuucccuccuggggucua

SEQ ID NO: 421460 - RNA, 32 nt, Human
gagaagagccugacgcagaggaagcaucugag

SEQ ID NO: 421461 - RNA, 32 nt, Human
gagaagagccugggcaacauagugagacccca

SEQ ID NO: 421462 - RNA, 32 nt, Human
gagaagaggaaccauuugugcagaucaucuag

SEQ ID NO: 421463 - RNA, 32 nt, Human
gagaagaggaagggagcagagagcacugagag

SEQ ID NO: 421464 - RNA, 32 nt, Human
gagaagaggaagggaggaagggaacagagagg

SEQ ID NO: 421465 - RNA, 32 nt, Human
gagaagaggacagaggaugugugggaaagcug

SEQ ID NO: 421466 - RNA, 32 nt, Human
gagaagaggagaaaaauaaaacaaggagggag

SEQ ID NO: 421467 - RNA, 32 nt, Human
gagaagaggagaaaucuguagugagcaaagga

SEQ ID NO: 421468 - RNA, 32 nt, Human
gagaagaggagaaguuuuagaccagagaaacc

SEQ ID NO: 421469 - RNA, 32 nt, Human
gagaagaggagagagaagccagggccgagcgu

SEQ ID NO: 421470 - RNA, 32 nt, Human
gagaagaggagaggcagagagggcgcggggac

SEQ ID NO: 421471 - RNA, 32 nt, Human
gagaagaggaggguagaaaugaaggaaaaauu

SEQ ID NO: 421472 - RNA, 32 nt, Human
gagaagaggcuggccaagccacaguucugacg

SEQ ID NO: 421473 - RNA, 32 nt, Human
gagaagagggaagugaaaagaucuucuuguga

SEQ ID NO: 421474 - RNA, 21 nt, Human
gagaagagggagaggcaggag

SEQ ID NO: 421475 - RNA, 19 nt, Human
gagaagagggccuggugga

SEQ ID NO: 421476 - RNA, 32 nt, Human
gagaagagggcugggcgcuccaugauuuagcc

SEQ ID NO: 421477 - RNA, 32 nt, Human
gagaagaggggcccuuggcugcagagaucagc

SEQ ID NO: 421478 - RNA, 32 nt, Human
gagaagaggggcuggagugcggcuggucugcg

SEQ ID NO: 421479 - RNA, 32 nt, Human
gagaagagggucaucacuauccuccagaaccc

SEQ ID NO: 421480 - RNA, 32 nt, Human
gagaagaguaagaauguagaccagcuuauuga

SEQ ID NO: 421481 - RNA, 32 nt, Human
gagaagaucugccuccacggagccgcuguccc

SEQ ID NO: 421482 - RNA, 32 nt, Human
gagaagaucuggcaccacaccuucuacgauua

SEQ ID NO: 421483 - RNA, 21 nt, Human
gagaagaucuuggaggaccug

SEQ ID NO: 421484 - RNA, 31 nt, Human
gagaagaugaacacggccgaccaggccaggg

SEQ ID NO: 421485 - RNA, 32 nt, Human
gagaagaugaaccagucuucuuccccucacua

SEQ ID NO: 421486 - RNA, 32 nt, Human
gagaagaugccaauguuucauccaccggcugc

SEQ ID NO: 421487 - RNA, 32 nt, Human
gagaagaugccauaaaauaaacaccucccuaa

SEQ ID NO: 421488 - RNA, 31 nt, Human
gagaagaugcggaaggagaauggggaggcga

SEQ ID NO: 421489 - RNA, 22 nt, Human
gagaagauggaccaaggagaga

SEQ ID NO: 421490 - RNA, 32 nt, Human
gagaagaugggagagggaagggggagguguga

SEQ ID NO: 421491 - RNA, 31 nt, Human
gagaagauggguggagaggaugaugaacuca

SEQ ID NO: 421492 - RNA, 31 nt, Human
gagaagauggugcugcggcggcugcuggccg

SEQ ID NO: 421493 - RNA, 32 nt, Human
gagaagauuuaucuugacuuaagacuuggaau

SEQ ID NO: 421494 - RNA, 32 nt, Human
gagaagauuuccaugaaagaauugcagcccug

SEQ ID NO: 421495 - RNA, 32 nt, Human
gagaagcaaaaaugagauccaggcuggagcgg

SEQ ID NO: 421496 - RNA, 32 nt, Human
gagaagcaaucagcugccauccugcccuccag

SEQ ID NO: 421497 - RNA, 32 nt, Human
gagaagcaaugugaaaagcaucaggaaagcug

SEQ ID NO: 421498 - RNA, 32 nt, Human
gagaagcacagcaauaggaagucucuccacaa

SEQ ID NO: 421499 - RNA, 32 nt, Human
gagaagcacagcaauauacauucauaauauac

SEQ ID NO: 421500 - RNA, 32 nt, Human
gagaagcacagcaugcgugccugcacuugccc

SEQ ID NO: 421501 - RNA, 32 nt, Human
gagaagcaccugccagcaacagcuuccuucuu

SEQ ID NO: 421502 - RNA, 19 nt, Human
gagaagcacgauggcucua

SEQ ID NO: 421503 - RNA, 18 nt, Human
gagaagcacucuacucua

SEQ ID NO: 421504 - RNA, 18 nt, Human
gagaagcacucugaauuc

SEQ ID NO: 421505 - RNA, 21 nt, Human
gagaagcacuguugaaauuua

SEQ ID NO: 421506 - RNA, 20 nt, Human
gagaagcacuuugggauucu

SEQ ID NO: 421507 - RNA, 32 nt, Human
gagaagcagagaagaagaaaggagcugaggag

SEQ ID NO: 421508 - RNA, 32 nt, Human
gagaagcagagagcgagagggggaagaggagc

SEQ ID NO: 421509 - RNA, 20 nt, Human
gagaagcagaggcaauucua

SEQ ID NO: 421510 - RNA, 32 nt, Human
gagaagcagcagagagaggcgcuggagcgggc

SEQ ID NO: 421511 - RNA, 19 nt, Human
gagaagcagcaggacuuua

SEQ ID NO: 421512 - RNA, 32 nt, Human
gagaagcagccccugagggagucugcugaggc

SEQ ID NO: 421513 - RNA, 20 nt, Human
gagaagcaggaagagcacug

SEQ ID NO: 421514 - RNA, 20 nt, Human
gagaagcaggagcaacucua

SEQ ID NO: 421515 - RNA, 21 nt, Human
gagaagcaggccaggccuggg

SEQ ID NO: 421516 - RNA, 23 nt, Human
gagaagcaggcuugcaagaaugg

SEQ ID NO: 421517 - RNA, 32 nt, Human
gagaagcagggugggcugcuggcagugcagga

SEQ ID NO: 421518 - RNA, 32 nt, Human
gagaagcagucagugauggaggcugcaagagu

SEQ ID NO: 421519 - RNA, 32 nt, Human
gagaagcagucugaugacagagagaggcucua

SEQ ID NO: 421520 - RNA, 15 nt, Human
gagaagcaucugggg

SEQ ID NO: 421521 - RNA, 21 nt, Human
gagaagcaugcaacaauuaga

SEQ ID NO: 421522 - RNA, 32 nt, Human
gagaagcauggcgcccugcccacccacugcgc

SEQ ID NO: 421523 - RNA, 22 nt, Human
gagaagcauuaaugaaacuuua

SEQ ID NO: 421524 - RNA, 22 nt, Human
gagaagcauucagagggcacug

SEQ ID NO: 421525 - RNA, 18 nt, Human
gagaagcauuccacucug

SEQ ID NO: 421526 - RNA, 22 nt, Human
gagaagcauuugguaagcuuua

SEQ ID NO: 421527 - RNA, 32 nt, Human
gagaagccaaagauguugaccaggaagaucaa

SEQ ID NO: 421528 - RNA, 24 nt, Human
gagaagccaccuucaggccuggga

SEQ ID NO: 421529 - RNA, 32 nt, Human
gagaagccacugugggcaccaccgugggggaa

SEQ ID NO: 421530 - RNA, 32 nt, Human
gagaagccagaggcacuggcugcacuggaccc

SEQ ID NO: 421531 - RNA, 32 nt, Human
gagaagccagcgccucuacaccccagaucccu

SEQ ID NO: 421532 - RNA, 32 nt, Human
gagaagccagggugauagcccagacucugccc

SEQ ID NO: 421533 - RNA, 32 nt, Human
gagaagccaguacuugaaucgcuauauuucua

SEQ ID NO: 421534 - RNA, 32 nt, Human
gagaagccagugcggcagguucacaggcgagg

SEQ ID NO: 421535 - RNA, 32 nt, Human
gagaagccaugcguuccagccuuccacggucc

SEQ ID NO: 421536 - RNA, 32 nt, Human
gagaagccauggaagguugugguuguaaauga

SEQ ID NO: 421537 - RNA, 32 nt, Human
gagaagccauuuuuagcucagagcaacccuua

SEQ ID NO: 421538 - RNA, 32 nt, Human
gagaagcccaggaaauuucuccaccuguguuu

SEQ ID NO: 421539 - RNA, 23 nt, Human
gagaagcccuaggcaaagacugg

SEQ ID NO: 421540 - RNA, 32 nt, Human
gagaagcccucuuuauuuugguaaaugucacu

SEQ ID NO: 421541 - RNA, 32 nt, Human
gagaagccgcuggccuuugccgcuugaaagcu

SEQ ID NO: 421542 - RNA, 17 nt, Human
gagaagccgggaggcuc

SEQ ID NO: 421543 - RNA, 19 nt, Human
gagaagccuacaucuucuu

SEQ ID NO: 421544 - RNA, 32 nt, Human
gagaagccuacaucuucuuauucuauuuagga

SEQ ID NO: 421545 - RNA, 19 nt, Human
gagaagccucccucauucc

SEQ ID NO: 421546 - RNA, 32 nt, Human
gagaagccugauauguaacccaggcggguggg

SEQ ID NO: 421547 - RNA, 32 nt, Human
gagaagccuugcaucaaccucuugggccucag

SEQ ID NO: 421548 - RNA, 32 nt, Human
gagaagccuuucuguugcccugcaaggagcag

SEQ ID NO: 421549 - RNA, 32 nt, Human
gagaagcgcggccuggccuggccuggguggcg

SEQ ID NO: 421550 - RNA, 32 nt, Human
gagaagcgcugguaggagaggcuuuaaggugg

SEQ ID NO: 421551 - RNA, 32 nt, Human
gagaagcggccgcggccagggaacggggcauc

SEQ ID NO: 421552 - RNA, 32 nt, Human
gagaagcuaagcugcagcucguagcugcuacc

SEQ ID NO: 421553 - RNA, 23 nt, Human
gagaagcuaaggcagguggauca

SEQ ID NO: 421554 - RNA, 32 nt, Human
gagaagcuagucuguuuaaaacaggaaguuau

SEQ ID NO: 421555 - RNA, 32 nt, Human
gagaagcuauguuuagcaucuucugucaugag

SEQ ID NO: 421556 - RNA, 32 nt, Human
gagaagcucacucuguguuaggcacaguggug

SEQ ID NO: 421557 - RNA, 32 nt, Human
gagaagcucacuguucacugugcaaagcccca

SEQ ID NO: 421558 - RNA, 32 nt, Human
gagaagcucacuuucaaaauuugauauggaca

SEQ ID NO: 421559 - RNA, 32 nt, Human
gagaagcucagcgcccagccuggggaauuuaa

SEQ ID NO: 421560 - RNA, 32 nt, Human
gagaagcucagcugccuuccuggggcuggucc

SEQ ID NO: 421561 - RNA, 32 nt, Human
gagaagcucugggacuggggcagcagcaaggc

SEQ ID NO: 421562 - RNA, 32 nt, Human
gagaagcucuguuuuugucauucauguacauu

SEQ ID NO: 421563 - RNA, 32 nt, Human
gagaagcugagagaagaggaaaagaggagugg

SEQ ID NO: 421564 - RNA, 32 nt, Human
gagaagcugauccugaaauucauauagaaaug

SEQ ID NO: 421565 - RNA, 32 nt, Human
gagaagcugcagcgacuuuauggaaggagaag

SEQ ID NO: 421566 - RNA, 32 nt, Human
gagaagcugcagcugcaggagugcuugugggc

SEQ ID NO: 421567 - RNA, 32 nt, Human
gagaagcugccugucuacaucagccugggcug

SEQ ID NO: 421568 - RNA, 32 nt, Human
gagaagcugcuggaggagaugcccaaggauca

SEQ ID NO: 421569 - RNA, 32 nt, Human
gagaagcuggacugcagcugguuucaggaacu

SEQ ID NO: 421570 - RNA, 32 nt, Human
gagaagcugggaaguaaggaggugaggugaau

SEQ ID NO: 421571 - RNA, 32 nt, Human
gagaagcuguguuacugaacagccuggugaua

SEQ ID NO: 421572 - RNA, 32 nt, Human
gagaagcuuguugacauuuucuccccuuccuc

SEQ ID NO: 421573 - RNA, 32 nt, Human
gagaagcuuuccugccaaaucaaaggcugaga

SEQ ID NO: 421574 - RNA, 21 nt, Human
gagaaggaaaagccucuggga

SEQ ID NO: 421575 - RNA, 22 nt, Human
gagaaggaaaagugacgaagag

SEQ ID NO: 421576 - RNA, 23 nt, Human
gagaaggaaacgggaguggagag

SEQ ID NO: 421577 - RNA, 32 nt, Human
gagaaggaaagcuucuuucugggcagccagag

SEQ ID NO: 421578 - RNA, 21 nt, Human
gagaaggaaaguacacgggag

SEQ ID NO: 421579 - RNA, 32 nt, Human
gagaaggaagaaacccggacuggaggagguga

SEQ ID NO: 421580 - RNA, 32 nt, Human
gagaaggaagaaagaaaagaaauaagaagaga

SEQ ID NO: 421581 - RNA, 32 nt, Human
gagaaggaagaaaggugaccggcaaagggugg

SEQ ID NO: 421582 - RNA, 32 nt, Human
gagaaggaagagaccaggugggcucugagaca

SEQ ID NO: 421583 - RNA, 32 nt, Human
gagaaggaagaggaaagaaaaauugugcagag

SEQ ID NO: 421584 - RNA, 32 nt, Human
gagaaggaagcauggccugggagcuuggaagg

SEQ ID NO: 421585 - RNA, 32 nt, Human
gagaaggaaggcagcccaggagucagguaugc

SEQ ID NO: 421586 - RNA, 22 nt, Human
gagaaggaaguacccuggggag

SEQ ID NO: 421587 - RNA, 23 nt, Human
gagaaggaauaagacggcaggag

SEQ ID NO: 421588 - RNA, 32 nt, Human
gagaaggaaucugagcagggaucgaucuggcc

SEQ ID NO: 421589 - RNA, 32 nt, Human
gagaaggaaugaccaacagggaaaguaauccu

SEQ ID NO: 421590 - RNA, 32 nt, Human
gagaaggacaagaccuguuuccuugagacuuu

SEQ ID NO: 421591 - RNA, 32 nt, Human
gagaaggacagagagacggacaccucggcccu

SEQ ID NO: 421592 - RNA, 32 nt, Human
gagaaggacaggagguauggggugggggaggg

SEQ ID NO: 421593 - RNA, 23 nt, Human
gagaaggacagggaugcggcgag

SEQ ID NO: 421594 - RNA, 18 nt, Human
gagaaggaccccuuccca

SEQ ID NO: 421595 - RNA, 22 nt, Human
gagaaggacccugggagcucug

SEQ ID NO: 421596 - RNA, 25 nt, Human
gagaaggacccugggagcucuggga

SEQ ID NO: 421597 - RNA, 32 nt, Human
gagaaggacugcacuuagaacugcauuuuggc

SEQ ID NO: 421598 - RNA, 32 nt, Human
gagaaggacugcacuuagaacugcauuuuggu

SEQ ID NO: 421599 - RNA, 32 nt, Human
gagaaggagaaggaagaaggagaggagaagaa

SEQ ID NO: 421600 - RNA, 32 nt, Human
gagaaggagacaccuccuggaggccccagucc

SEQ ID NO: 421601 - RNA, 24 nt, Human
gagaaggagagaaagagacgggag

SEQ ID NO: 421602 - RNA, 18 nt, Human
gagaaggagagaggcaga

SEQ ID NO: 421603 - RNA, 32 nt, Human
gagaaggagcagaaagauguguuuuugcaaag

SEQ ID NO: 421604 - RNA, 18 nt, Human
gagaaggagccaucucca

SEQ ID NO: 421605 - RNA, 24 nt, Human
gagaaggagcugcagaugagggag

SEQ ID NO: 421606 - RNA, 32 nt, Human
gagaaggaggaaccuuuuccuucugcagcccc

SEQ ID NO: 421607 - RNA, 32 nt, Human
gagaaggaggaagacaaaggcaagaaggaaaa

SEQ ID NO: 421608 - RNA, 32 nt, Human
gagaaggaggcacagcaggugccugaagggaa

SEQ ID NO: 421609 - RNA, 21 nt, Human
gagaaggaggcagcgcaggag

SEQ ID NO: 421610 - RNA, 32 nt, Human
gagaaggaggcaggauaccuggagauuugugg

SEQ ID NO: 421611 - RNA, 24 nt, Human
gagaaggaggcccugcugcaggag

SEQ ID NO: 421612 - RNA, 32 nt, Human
gagaaggaggcugggggaucaccagccccaag

SEQ ID NO: 421613 - RNA, 32 nt, Human
gagaaggagggagagagccaaaugucugagua

SEQ ID NO: 421614 - RNA, 32 nt, Human
gagaaggagggagggaaaaggggucaggcaca

SEQ ID NO: 421615 - RNA, 24 nt, Human
gagaaggaggucagugcucaggga

SEQ ID NO: 421616 - RNA, 32 nt, Human
gagaaggagguggaggcaggauggguccuaag

SEQ ID NO: 421617 - RNA, 32 nt, Human
gagaaggagguggggauccgagugcagugaga

SEQ ID NO: 421618 - RNA, 32 nt, Human
gagaaggaguuggaggaggaggaggaggaggc

SEQ ID NO: 421619 - RNA, 32 nt, Human
gagaaggaugaugauaagaacauggcagaaaa

SEQ ID NO: 421620 - RNA, 31 nt, Human
gagaaggauuaugaggagguugguguggauu

SEQ ID NO: 421621 - RNA, 32 nt, Human
gagaaggcaaacugaggcagcaugcacggagg

SEQ ID NO: 421622 - RNA, 19 nt, Human
gagaaggcagaccgaagag

SEQ ID NO: 421623 - RNA, 32 nt, Human
gagaaggcagagagaagaaagcagacaggaaa

SEQ ID NO: 421624 - RNA, 32 nt, Human
gagaaggcagagagcuagcuccucccuuucuu

SEQ ID NO: 421625 - RNA, 21 nt, Human
gagaaggcagaggaggaggga

SEQ ID NO: 421626 - RNA, 32 nt, Human
gagaaggcagcauacugaccaguggcuuuuug

SEQ ID NO: 421627 - RNA, 32 nt, Human
gagaaggcagccuucgaaguccugggcauugg

SEQ ID NO: 421628 - RNA, 21 nt, Human
gagaaggcagucaaguaggaa

SEQ ID NO: 421629 - RNA, 22 nt, Human
gagaaggcaucaaaggagacug

SEQ ID NO: 421630 - RNA, 32 nt, Human
gagaaggccacugguucugugccgcagcacgc

SEQ ID NO: 421631 - RNA, 22 nt, Human
gagaaggcccggaggggcucug

SEQ ID NO: 421632 - RNA, 32 nt, Human
gagaaggcgccaacagcacacagggucagggu

SEQ ID NO: 421633 - RNA, 19 nt, Human
gagaaggcgccagauagga

SEQ ID NO: 421634 - RNA, 18 nt, Human
gagaaggcggagggcucu

SEQ ID NO: 421635 - RNA, 32 nt, Human
gagaaggcggugccgagccccugcugcugcau

SEQ ID NO: 421636 - RNA, 32 nt, Human
gagaaggcguuucgcucuuguugcccaggcug

SEQ ID NO: 421637 - RNA, 32 nt, Human
gagaaggcuaaccugcagcaccagagaaaccu

SEQ ID NO: 421638 - RNA, 32 nt, Human
gagaaggcuacaggcuguguucaaugacacua

SEQ ID NO: 421639 - RNA, 32 nt, Human
gagaaggcugacuggcuggacucauugagcug

SEQ ID NO: 421640 - RNA, 32 nt, Human
gagaaggcuuuugucuuuccuccugcuacgau

SEQ ID NO: 421641 - RNA, 16 nt, Human
gagaagggaaggcaga

SEQ ID NO: 421642 - RNA, 32 nt, Human
gagaagggacuuugcugucagguccaagcccu

SEQ ID NO: 421643 - RNA, 32 nt, Human
gagaagggagacuuccgaggaagauuaggcag

SEQ ID NO: 421644 - RNA, 32 nt, Human
gagaagggagagagagcuagagggacaaagag

SEQ ID NO: 421645 - RNA, 32 nt, Human
gagaagggagagagugggaguuucccagcccg

SEQ ID NO: 421646 - RNA, 32 nt, Human
gagaagggagcacuggcuuugcuuucaucagg

SEQ ID NO: 421647 - RNA, 32 nt, Human
gagaagggagccccaggcuggagcagcaugag

SEQ ID NO: 421648 - RNA, 32 nt, Human
gagaagggaggaggugggggaggagggcucuu

SEQ ID NO: 421649 - RNA, 32 nt, Human
gagaagggaggcaagggaggggcagcagaacc

SEQ ID NO: 421650 - RNA, 32 nt, Human
gagaagggagggaagagagcagaagggaagaa

SEQ ID NO: 421651 - RNA, 32 nt, Human
gagaagggagggaggaagacaggaaggaagga

SEQ ID NO: 421652 - RNA, 22 nt, Human
gagaagggauuucaccauguug

SEQ ID NO: 421653 - RNA, 32 nt, Human
gagaagggcaggggcaggagagggcugcggag

SEQ ID NO: 421654 - RNA, 32 nt, Human
gagaagggcagguguccggagcugucggggug

SEQ ID NO: 421655 - RNA, 22 nt, Human
gagaagggccagaucgcgggag

SEQ ID NO: 421656 - RNA, 32 nt, Human
gagaagggcccggagggugucuccccaagcca

SEQ ID NO: 421657 - RNA, 32 nt, Human
gagaagggccucucccccaacccucagccguu

SEQ ID NO: 421658 - RNA, 32 nt, Human
gagaagggcggcagaggcaguggggcuggcuc

SEQ ID NO: 421659 - RNA, 32 nt, Human
gagaagggcgugaacccgggaagcggagcuug

SEQ ID NO: 421660 - RNA, 32 nt, Human
gagaagggcgugaacccgggaggcggagcuug

SEQ ID NO: 421661 - RNA, 32 nt, Human
gagaagggcugccccgggcccucugguucucg

SEQ ID NO: 421662 - RNA, 19 nt, Human
gagaagggcugggcccugg

SEQ ID NO: 421663 - RNA, 24 nt, Human
gagaagggcuucaggacgcgggag

SEQ ID NO: 421664 - RNA, 32 nt, Human
gagaagggcuucucucccucugccuuuccgcg

SEQ ID NO: 421665 - RNA, 21 nt, Human
gagaaggggagaccgcggcgg

SEQ ID NO: 421666 - RNA, 19 nt, Human
gagaaggggagagcaucua

SEQ ID NO: 421667 - RNA, 32 nt, Human
gagaaggggaggaggacuccagcugggcucgg

SEQ ID NO: 421668 - RNA, 32 nt, Human
gagaaggggaguggaggaagcacgggacugga

SEQ ID NO: 421669 - RNA, 18 nt, Human
gagaaggggccuccccca

SEQ ID NO: 421670 - RNA, 18 nt, Human
gagaaggggccuccucca

SEQ ID NO: 421671 - RNA, 32 nt, Human
gagaagggggaagcaccagacacuuuacagau

SEQ ID NO: 421672 - RNA, 32 nt, Human
gagaagggggagguucacauguuugcagugaa

SEQ ID NO: 421673 - RNA, 23 nt, Human
gagaagggguuucaccacauugg

SEQ ID NO: 421674 - RNA, 32 nt, Human
gagaaggguaauagguuggugcagugaauggg

SEQ ID NO: 421675 - RNA, 22 nt, Human
gagaagggucuagaagcaggag

SEQ ID NO: 421676 - RNA, 22 nt, Human
gagaaggguggaaggugcagga

SEQ ID NO: 421677 - RNA, 32 nt, Human
gagaagggugggaacccgggaggcagagcuug

SEQ ID NO: 421678 - RNA, 17 nt, Human
gagaaggguuuuuggga

SEQ ID NO: 421679 - RNA, 32 nt, Human
gagaagguacagaggccagggagugaaaaugg

SEQ ID NO: 421680 - RNA, 20 nt, Human
gagaagguacccaaagggaa

SEQ ID NO: 421681 - RNA, 32 nt, Human
gagaagguaguugaaggguagggccuuuuauu

SEQ ID NO: 421682 - RNA, 32 nt, Human
gagaaggucccauuccaggucuugcccaaguc

SEQ ID NO: 421683 - RNA, 32 nt, Human
gagaaggucugcagcuucacuccugagccagc

SEQ ID NO: 421684 - RNA, 32 nt, Human
gagaaggugaagaucagucuaagcugccacgg

SEQ ID NO: 421685 - RNA, 32 nt, Human
gagaaggugaggccaguaaccaucucauggga

SEQ ID NO: 421686 - RNA, 32 nt, Human
gagaaggugaucgcucugcucucccaaccccc

SEQ ID NO: 421687 - RNA, 32 nt, Human
gagaagguggagaagagagaagaggaagagga

SEQ ID NO: 421688 - RNA, 32 nt, Human
gagaagguggagaggaggaugggccucaggag

SEQ ID NO: 421689 - RNA, 32 nt, Human
gagaaggugggugggcucagggagaacggcca

SEQ ID NO: 421690 - RNA, 32 nt, Human
gagaagguguauuucacuggugcaauggcuug

SEQ ID NO: 421691 - RNA, 32 nt, Human
gagaagguucagaaagccaguacagagggagu

SEQ ID NO: 421692 - RNA, 32 nt, Human
gagaagguucuugugggcucugggcccauccc

SEQ ID NO: 421693 - RNA, 22 nt, Human
gagaagguuugggagaacuuug

SEQ ID NO: 421694 - RNA, 32 nt, Human
gagaagguuuucuuccuucuguugcucuggaa

SEQ ID NO: 421695 - RNA, 32 nt, Human
gagaaguaaagucagaaagaacgaacagcugu

SEQ ID NO: 421696 - RNA, 32 nt, Human
gagaaguacagaaaggcugggagcagcccaga

SEQ ID NO: 421697 - RNA, 22 nt, Human
gagaaguacuuaccaggacucu

SEQ ID NO: 421698 - RNA, 19 nt, Human
gagaaguaggaagagccug

SEQ ID NO: 421699 - RNA, 32 nt, Human
gagaagucaaaggaacuuuuguuucuccucaa

SEQ ID NO: 421700 - RNA, 32 nt, Human
gagaagucaaguuugaauacagcagcuuaguu

SEQ ID NO: 421701 - RNA, 32 nt, Human
gagaagucacaaaacagcagauuucccaagag

SEQ ID NO: 421702 - RNA, 32 nt, Human
gagaagucaguuggagaaaaugaagaaaaagg

SEQ ID NO: 421703 - RNA, 32 nt, Human
gagaaguccaaggguugcugggagagguugca

SEQ ID NO: 421704 - RNA, 32 nt, Human
gagaaguccaaggguugcugggagagguuggu

SEQ ID NO: 421705 - RNA, 25 nt, Human
gagaaguccugaguacagagacugg

SEQ ID NO: 421706 - RNA, 32 nt, Human
gagaagucgaggaagagagagacggggucaga

SEQ ID NO: 421707 - RNA, 32 nt, Human
gagaagucgggaggggacaggaagggagggcg

SEQ ID NO: 421708 - RNA, 15 nt, Human
gagaagucucuggga

SEQ ID NO: 421709 - RNA, 32 nt, Human
gagaagucucuuuccuggaaugcagcccagac

SEQ ID NO: 421710 - RNA, 16 nt, Human
gagaagucugaggcuc

SEQ ID NO: 421711 - RNA, 32 nt, Human
gagaagugaaacccaagugaaagaguauugcu

SEQ ID NO: 421712 - RNA, 32 nt, Human
gagaagugaagugccuggggucgaaggagcug

SEQ ID NO: 421713 - RNA, 22 nt, Human
gagaagugacaagaugaaggag

SEQ ID NO: 421714 - RNA, 32 nt, Human
gagaagugacaagaugaaggaggacucugagu

SEQ ID NO: 421715 - RNA, 32 nt, Human
gagaagugagggaggaagaaggcagugucccu

SEQ ID NO: 421716 - RNA, 32 nt, Human
gagaagugagucagggcagggcagcugguauc

SEQ ID NO: 421717 - RNA, 32 nt, Human
gagaagugcaaccugcauuucacuuugugguc

SEQ ID NO: 421718 - RNA, 32 nt, Human
gagaagugccagaaagcccggaagcaaggaag

SEQ ID NO: 421719 - RNA, 20 nt, Human
gagaagugccucaucccuga

SEQ ID NO: 421720 - RNA, 32 nt, Human
gagaaguggaaucacuggccugaggucacaug

SEQ ID NO: 421721 - RNA, 32 nt, Human
gagaaguggcaaagacggcagguuggacaucu

SEQ ID NO: 421722 - RNA, 22 nt, Human
gagaagugggaaagaagcaaug

SEQ ID NO: 421723 - RNA, 23 nt, Human
gagaagugggaaguagcuuggga

SEQ ID NO: 421724 - RNA, 32 nt, Human
gagaaguggguggggacagaccagcccuuccc

SEQ ID NO: 421725 - RNA, 32 nt, Human
gagaagugucagcucuggaaccagguggcccu

SEQ ID NO: 421726 - RNA, 32 nt, Human
gagaagugucccagacccauuucgccuugcug

SEQ ID NO: 421727 - RNA, 32 nt, Human
gagaaguguccccaggagguugggggaggagc

SEQ ID NO: 421728 - RNA, 32 nt, Human
gagaaguuacaucugaccuccaugucccuggu

SEQ ID NO: 421729 - RNA, 23 nt, Human
gagaaguucaacaccaaaacugg

SEQ ID NO: 421730 - RNA, 32 nt, Human
gagaaguucaagcucauccauucuuuagacac

SEQ ID NO: 421731 - RNA, 32 nt, Human
gagaaguucccagcagcucaggagaguggcug

SEQ ID NO: 421732 - RNA, 32 nt, Human
gagaaguugaaggguccuugugccaguccucc

SEQ ID NO: 421733 - RNA, 21 nt, Human
gagaaguugaccaaggaagga

SEQ ID NO: 421734 - RNA, 32 nt, Human
gagaaguugcaggguugaguuggucccggcaa

SEQ ID NO: 421735 - RNA, 32 nt, Human
gagaaguugcugauauucaucaguguguuugg

SEQ ID NO: 421736 - RNA, 32 nt, Human
gagaauaaaacaauucggcggccaguguuucc

SEQ ID NO: 421737 - RNA, 18 nt, Human
gagaauaaauccaaagac

SEQ ID NO: 421738 - RNA, 18 nt, Human
gagaauaagaauugcaga

SEQ ID NO: 421739 - RNA, 32 nt, Human
gagaauacucagaacaugaaccucuuuaaagc

SEQ ID NO: 421740 - RNA, 32 nt, Human
gagaauagaggcauguuucagcuaaacacaug

SEQ ID NO: 421741 - RNA, 32 nt, Human
gagaauagaguaugguugauucccagcauuca

SEQ ID NO: 421742 - RNA, 32 nt, Human
gagaauagcgugaacccgggaggcggagcuug

SEQ ID NO: 421743 - RNA, 32 nt, Human
gagaauagcuggaacccgggaggcagagguug

SEQ ID NO: 421744 - RNA, 32 nt, Human
gagaauaggagugacugccagugagcaagagg

SEQ ID NO: 421745 - RNA, 19 nt, Human
gagaauagugcguuccuga

SEQ ID NO: 421746 - RNA, 32 nt, Human
gagaauagugugaacccaggaggcggagcuug

SEQ ID NO: 421747 - RNA, 32 nt, Human
gagaauauaaacacaccuguuuuguuuuucuu

SEQ ID NO: 421748 - RNA, 32 nt, Human
gagaauauacacacccugucaccaucacaucu

SEQ ID NO: 421749 - RNA, 32 nt, Human
gagaauaucuguagugacagcuccugagcacc

SEQ ID NO: 421750 - RNA, 32 nt, Human
gagaauaucuugcuccccuccugagucagccu

SEQ ID NO: 421751 - RNA, 32 nt, Human
gagaauauuggcugcugauuguugccaucacg

SEQ ID NO: 421752 - RNA, 31 nt, Human
gagaaucacagcuaaugaguaacagugcuua

SEQ ID NO: 421753 - RNA, 31 nt, Human
gagaaucacagcucuaauaccuagagugacc

SEQ ID NO: 421754 - RNA, 32 nt, Human
gagaaucacauucagggcaggcuagggacacg

SEQ ID NO: 421755 - RNA, 31 nt, Human
gagaaucacauuucuuuacagguuaaagaca

SEQ ID NO: 421756 - RNA, 32 nt, Human
gagaaucaccugaacccaggaggcagagguug

SEQ ID NO: 421757 - RNA, 32 nt, Human
gagaaucacugcacuagaucacuuuguguuuu

SEQ ID NO: 421758 - RNA, 32 nt, Human
gagaaucacuuagacccgggaggcagagguug

SEQ ID NO: 421759 - RNA, 32 nt, Human
gagaaucacuugaaccagggaggcagaggcug

SEQ ID NO: 421760 - RNA, 32 nt, Human
gagaaucacuugaaccagggaggcagagguug

SEQ ID NO: 421761 - RNA, 32 nt, Human
gagaaucacuugaaccagggaggcagaguuug

SEQ ID NO: 421762 - RNA, 32 nt, Human
gagaaucacuugaaccagggaggcggagguug

SEQ ID NO: 421763 - RNA, 32 nt, Human
gagaaucacuugaacccaggaggcagagauug

SEQ ID NO: 421764 - RNA, 32 nt, Human
gagaaucacuugaacccaggaggcagagguug

SEQ ID NO: 421765 - RNA, 32 nt, Human
gagaaucacuugaacccaggaggcagaguuug

SEQ ID NO: 421766 - RNA, 32 nt, Human
gagaaucacuugaacccaggaggcggaaguug

SEQ ID NO: 421767 - RNA, 32 nt, Human
gagaaucacuugaacccaggaggcggagguug

SEQ ID NO: 421768 - RNA, 32 nt, Human
gagaaucacuugaacccaggagguagagguug

SEQ ID NO: 421769 - RNA, 32 nt, Human
gagaaucacuugaacccgggaggcagagggug

SEQ ID NO: 421770 - RNA, 32 nt, Human
gagaaucacuugaacccgggaggcagagguug

SEQ ID NO: 421771 - RNA, 32 nt, Human
gagaaucacuugaaccggggaggcagagguug

SEQ ID NO: 421772 - RNA, 32 nt, Human
gagaaucacuugaaccugggaggcagagguua

SEQ ID NO: 421773 - RNA, 32 nt, Human
gagaaucacuugaaccugggaggcagagguug

SEQ ID NO: 421774 - RNA, 32 nt, Human
gagaaucacuugaaccugggaggcagagguuu

SEQ ID NO: 421775 - RNA, 32 nt, Human
gagaaucacuugaaccugggaggcagaguuua

SEQ ID NO: 421776 - RNA, 32 nt, Human
gagaaucacuugaacucaggaggcagaaguug

SEQ ID NO: 421777 - RNA, 32 nt, Human
gagaaucacuugaacuggggaggcagagguug

SEQ ID NO: 421778 - RNA, 32 nt, Human
gagaaucacuugaaucagggaggcggagguug

SEQ ID NO: 421779 - RNA, 32 nt, Human
gagaaucacuuggaccugggaggcagagguuu

SEQ ID NO: 421780 - RNA, 32 nt, Human
gagaaucaggaaaauuccuucaacugcauugc

SEQ ID NO: 421781 - RNA, 32 nt, Human
gagaaucagguauuaauggaaagacucaauca

SEQ ID NO: 421782 - RNA, 32 nt, Human
gagaaucaugccacccucaaagccucauccac

SEQ ID NO: 421783 - RNA, 32 nt, Human
gagaaucauuugaacccgggaggcagagguug

SEQ ID NO: 421784 - RNA, 32 nt, Human
gagaaucauuugaaccugggaggcagagguug

SEQ ID NO: 421785 - RNA, 32 nt, Human
gagaauccaucuuuuacuaggagaccagauuc

SEQ ID NO: 421786 - RNA, 32 nt, Human
gagaaucccagaggaggccgugaacuguucug

SEQ ID NO: 421787 - RNA, 25 nt, Human
gagaaucccagcggggccucagaga

SEQ ID NO: 421788 - RNA, 32 nt, Human
gagaaucccugaccccugcccugggccuuaac

SEQ ID NO: 421789 - RNA, 32 nt, Human
gagaaucccuugaacccaggaggcagaaguug

SEQ ID NO: 421790 - RNA, 32 nt, Human
gagaaucccuugaacccaggaggcagagguug

SEQ ID NO: 421791 - RNA, 32 nt, Human
gagaauccgugaccccugcccugggccuuaac

SEQ ID NO: 421792 - RNA, 32 nt, Human
gagaauccucccggaaccucuggauucugacg

SEQ ID NO: 421793 - RNA, 32 nt, Human
gagaauccuucaaaaugcuacacccacauucu

SEQ ID NO: 421794 - RNA, 32 nt, Human
gagaauccuuucucccugccuucuugcccugc

SEQ ID NO: 421795 - RNA, 32 nt, Human
gagaaucgacaaauaggacuguuucuccguuu

SEQ ID NO: 421796 - RNA, 32 nt, Human
gagaaucgccugaacccaggaggcggagcuug

SEQ ID NO: 421797 - RNA, 32 nt, Human
gagaaucgcggccgcagccaucagcccuggag

SEQ ID NO: 421798 - RNA, 32 nt, Human
gagaaucgcgugaacccaggaggcggaggcug

SEQ ID NO: 421799 - RNA, 32 nt, Human
gagaaucgcuugaaacugggaggcagggguug

SEQ ID NO: 421800 - RNA, 32 nt, Human
gagaaucgcuugaaccagggaggcggagguug

SEQ ID NO: 421801 - RNA, 32 nt, Human
gagaaucgcuugaacccaggaggcagaaguug

SEQ ID NO: 421802 - RNA, 32 nt, Human
gagaaucgcuugaacccaggaggcagagauug

SEQ ID NO: 421803 - RNA, 32 nt, Human
gagaaucgcuugaacccaggaggcagagguug

SEQ ID NO: 421804 - RNA, 32 nt, Human
gagaaucgcuugaacccaggaggcggagauug

SEQ ID NO: 421805 - RNA, 32 nt, Human
gagaaucgcuugaacccaggaggcggagcuug

SEQ ID NO: 421806 - RNA, 32 nt, Human
gagaaucgcuugaacccaggaggcggaggcug

SEQ ID NO: 421807 - RNA, 32 nt, Human
gagaaucgcuugaacccaggaggcggagguua

SEQ ID NO: 421808 - RNA, 32 nt, Human
gagaaucgcuugaacccaggaggcggagguug

SEQ ID NO: 421809 - RNA, 32 nt, Human
gagaaucgcuugaacccaggagguagagguug

SEQ ID NO: 421810 - RNA, 32 nt, Human
gagaaucgcuugaacccgggaggcagaaguug

SEQ ID NO: 421811 - RNA, 32 nt, Human
gagaaucgcuugaacccgggaggcagagauug

SEQ ID NO: 421812 - RNA, 32 nt, Human
gagaaucgcuugaacccgggaggcagaggcug

SEQ ID NO: 421813 - RNA, 32 nt, Human
gagaaucgcuugaacccgggaggcagagguag

SEQ ID NO: 421814 - RNA, 32 nt, Human
gagaaucgcuugaacccgggaggcagaggugg

SEQ ID NO: 421815 - RNA, 32 nt, Human
gagaaucgcuugaacccgggaggcagagguug

SEQ ID NO: 421816 - RNA, 32 nt, Human
gagaaucgcuugaaccggggaggcagagguug

SEQ ID NO: 421817 - RNA, 32 nt, Human
gagaaucgcuugaaccuaggaggcagaaguug

SEQ ID NO: 421818 - RNA, 32 nt, Human
gagaaucgcuugaaccugggaggcagaaguug

SEQ ID NO: 421819 - RNA, 32 nt, Human
gagaaucgcuugaaccugggaggcagagguug

SEQ ID NO: 421820 - RNA, 32 nt, Human
gagaaucgcuugaaccugggaggcagauguug

SEQ ID NO: 421821 - RNA, 32 nt, Human
gagaaucgcuugaacucgggaggcagagguug

SEQ ID NO: 421822 - RNA, 32 nt, Human
gagaaucgcuugagacugggaggcagagguug

SEQ ID NO: 421823 - RNA, 32 nt, Human
gagaaucgcuugagccggggaggcagagguug

SEQ ID NO: 421824 - RNA, 32 nt, Human
gagaaucgcuugagccugggaggcagagguug

SEQ ID NO: 421825 - RNA, 32 nt, Human
gagaaucgcuugagcuggagugcaguggugca

SEQ ID NO: 421826 - RNA, 22 nt, Human
gagaaucgggagaaggaggaga

SEQ ID NO: 421827 - RNA, 32 nt, Human
gagaaucguuugaacccaggaggcggagguug

SEQ ID NO: 421828 - RNA, 32 nt, Human
gagaaucguuugaaccugggaggcagagguug

SEQ ID NO: 421829 - RNA, 32 nt, Human
gagaaucguuugaacucaggaggcagagguug

SEQ ID NO: 421830 - RNA, 32 nt, Human
gagaaucuagccuucagccuguccaguguuaa

SEQ ID NO: 421831 - RNA, 32 nt, Human
gagaaucuaggccaccccaaccucuguucccc

SEQ ID NO: 421832 - RNA, 19 nt, Human
gagaaucucauauucccga

SEQ ID NO: 421833 - RNA, 32 nt, Human
gagaaucuccuugaagacacugaggccuacgu

SEQ ID NO: 421834 - RNA, 32 nt, Human
gagaaucucgggaggcagagguugcagugagc

SEQ ID NO: 421835 - RNA, 32 nt, Human
gagaaucucuugaacccaggaggcggagguug

SEQ ID NO: 421836 - RNA, 32 nt, Human
gagaaucucuugaacccgggaggcagagguug

SEQ ID NO: 421837 - RNA, 32 nt, Human
gagaaucucuugaauccaggaggcagaggcug

SEQ ID NO: 421838 - RNA, 32 nt, Human
gagaaucugcuccaaaaagcuggccacaucuc

SEQ ID NO: 421839 - RNA, 32 nt, Human
gagaaucugcugucgccugcagcugcucgccu

SEQ ID NO: 421840 - RNA, 32 nt, Human
gagaaucuggaauucgagaacuuuaaaaauag

SEQ ID NO: 421841 - RNA, 32 nt, Human
gagaaucuggacaaaguaauacucuuguagaa

SEQ ID NO: 421842 - RNA, 17 nt, Human
gagaaucuggaguugaa

SEQ ID NO: 421843 - RNA, 32 nt, Human
gagaaucugguggaugcuggaccuugcugcug

SEQ ID NO: 421844 - RNA, 32 nt, Human
gagaaucugucagccuuggagggaagggaucc

SEQ ID NO: 421845 - RNA, 32 nt, Human
gagaaucuuacaugauuauucgugcaggggca

SEQ ID NO: 421846 - RNA, 32 nt, Human
gagaaugaaacacacacauccacagaaacaga

SEQ ID NO: 421847 - RNA, 32 nt, Human
gagaaugaaaucgggugcaugugacacuaaua

SEQ ID NO: 421848 - RNA, 32 nt, Human
gagaaugaagugaaccgaggaggcagagcuug

SEQ ID NO: 421849 - RNA, 32 nt, Human
gagaaugacacuaaguuucagacuucagggca

SEQ ID NO: 421850 - RNA, 32 nt, Human
gagaaugacagaagcaaaggacuuauuauuaa

SEQ ID NO: 421851 - RNA, 32 nt, Human
gagaaugacagcuguagucauaucugagcaua

SEQ ID NO: 421852 - RNA, 32 nt, Human
gagaaugacauacauccuuuccauuuagcuca

SEQ ID NO: 421853 - RNA, 32 nt, Human
gagaaugacaugaacccaggaggcggagcuug

SEQ ID NO: 421854 - RNA, 32 nt, Human
gagaaugagaaagagagggacagagagauaaa

SEQ ID NO: 421855 - RNA, 32 nt, Human
gagaaugagccaacccauguaccugcugcaac

SEQ ID NO: 421856 - RNA, 32 nt, Human
gagaaugagcuggagcuugagcuggagcagga

SEQ ID NO: 421857 - RNA, 32 nt, Human
gagaaugaggccucgcuguguugcccaggcug

SEQ ID NO: 421858 - RNA, 32 nt, Human
gagaaugauacaguuuagaaauucuagagaag

SEQ ID NO: 421859 - RNA, 29 nt, Human
gagaaugauguggagccaggagaggggau

SEQ ID NO: 421860 - RNA, 32 nt, Human
gagaaugauuggggguuccaaaccacuuucuu

SEQ ID NO: 421861 - RNA, 32 nt, Human
gagaaugauuugaaccuaggaggcagagguug

SEQ ID NO: 421862 - RNA, 32 nt, Human
gagaaugcagagcucuaaucggcuagacugau

SEQ ID NO: 421863 - RNA, 32 nt, Human
gagaaugcagaggcuuuuauucguggacucac

SEQ ID NO: 421864 - RNA, 32 nt, Human
gagaaugcaguggcaugaucacagcucacugc

SEQ ID NO: 421865 - RNA, 32 nt, Human
gagaaugcaguuuccaaguacggcucucaguu

SEQ ID NO: 421866 - RNA, 23 nt, Human
gagaaugcauuuugagcauuuca

SEQ ID NO: 421867 - RNA, 32 nt, Human
gagaaugccacugcacuacagccugggcgaca

SEQ ID NO: 421868 - RNA, 32 nt, Human
gagaaugccaguguuacuccagcaggcaacca

SEQ ID NO: 421869 - RNA, 32 nt, Human
gagaaugccugggggucccucaccuggcuagg

SEQ ID NO: 421870 - RNA, 32 nt, Human
gagaaugcuaacagcacaggauacaguacuuc

SEQ ID NO: 421871 - RNA, 32 nt, Human
gagaaugcucuggggaguacaccaggcucagc

SEQ ID NO: 421872 - RNA, 32 nt, Human
gagaaugcuugccuugcauuugcacauccaga

SEQ ID NO: 421873 - RNA, 29 nt, Human
gagaauggaagagacaaaagaggcuaugu

SEQ ID NO: 421874 - RNA, 32 nt, Human
gagaauggacagguaggaaggaaggaaaggag

SEQ ID NO: 421875 - RNA, 32 nt, Human
gagaauggacagugugucuaaggaugugauuu

SEQ ID NO: 421876 - RNA, 32 nt, Human
gagaauggacauccuggauaugcugggagagg

SEQ ID NO: 421877 - RNA, 32 nt, Human
gagaauggaccgcuuuccagagcccagaagcc

SEQ ID NO: 421878 - RNA, 32 nt, Human
gagaauggagcuguagccucauggacaauaaa

SEQ ID NO: 421879 - RNA, 29 nt, Human
gagaauggaggagcacacagaggcaggcu

SEQ ID NO: 421880 - RNA, 32 nt, Human
gagaauggaggcaggaauugagcugacugagg

SEQ ID NO: 421881 - RNA, 32 nt, Human
gagaauggagucucccucugucaccaaggcug

SEQ ID NO: 421882 - RNA, 32 nt, Human
gagaauggagugaacccgggaggcagagcuug

SEQ ID NO: 421883 - RNA, 32 nt, Human
gagaauggagugaacccgggaggcagagguug

SEQ ID NO: 421884 - RNA, 32 nt, Human
gagaauggcauaaacccaggaggccgagcuga

SEQ ID NO: 421885 - RNA, 32 nt, Human
gagaauggcaugaacccaggaggcagagcuug

SEQ ID NO: 421886 - RNA, 32 nt, Human
gagaauggcaugaacccaggaguuggagcuug

SEQ ID NO: 421887 - RNA, 32 nt, Human
gagaauggcaugaacccgggaggcagagcuug

SEQ ID NO: 421888 - RNA, 32 nt, Human
gagaauggcaugaacccgggaggcagagguug

SEQ ID NO: 421889 - RNA, 32 nt, Human
gagaauggcaugaaccugggaggcagagcuug

SEQ ID NO: 421890 - RNA, 32 nt, Human
gagaauggcaugaacucaggaggcggagcuug

SEQ ID NO: 421891 - RNA, 32 nt, Human
gagaauggccagaacccaggaggcagagcuug

SEQ ID NO: 421892 - RNA, 32 nt, Human
gagaauggccagagagugucucucuagacugg

SEQ ID NO: 421893 - RNA, 32 nt, Human
gagaauggcccaaaccugacauggacaagcau

SEQ ID NO: 421894 - RNA, 32 nt, Human
gagaauggccugaacccgggaggcagagcuug

SEQ ID NO: 421895 - RNA, 32 nt, Human
gagaauggcgggaacccaggaggcagagguug

SEQ ID NO: 421896 - RNA, 32 nt, Human
gagaauggcgugaaccagggaggaggagcuug

SEQ ID NO: 421897 - RNA, 32 nt, Human
gagaauggcgugaacccagcgggaagagguug

SEQ ID NO: 421898 - RNA, 32 nt, Human
gagaauggcgugaacccaggagacggagcuug

SEQ ID NO: 421899 - RNA, 32 nt, Human
gagaauggcgugaacccaggaggaggagcuug

SEQ ID NO: 421900 - RNA, 32 nt, Human
gagaauggcgugaacccaggaggcagagcuug

SEQ ID NO: 421901 - RNA, 32 nt, Human
gagaauggcgugaacccaggaggcagagguug

SEQ ID NO: 421902 - RNA, 32 nt, Human
gagaauggcgugaacccaggaggcggagcugg

SEQ ID NO: 421903 - RNA, 32 nt, Human
gagaauggcgugaacccaggaggcggagcuug

SEQ ID NO: 421904 - RNA, 32 nt, Human
gagaauggcgugaacccaggagguggagcuug

SEQ ID NO: 421905 - RNA, 32 nt, Human
gagaauggcgugaaccccggaggcggagcuug

SEQ ID NO: 421906 - RNA, 32 nt, Human
gagaauggcgugaacccgagaggcggagcuug

SEQ ID NO: 421907 - RNA, 32 nt, Human
gagaauggcgugaacccggcgggaagagguug

SEQ ID NO: 421908 - RNA, 32 nt, Human
gagaauggcgugaacccgggaagcggagcuug

SEQ ID NO: 421909 - RNA, 32 nt, Human
gagaauggcgugaacccgggagacggagcuug

SEQ ID NO: 421910 - RNA, 32 nt, Human
gagaauggcgugaacccgggaggcagaccuug

SEQ ID NO: 421911 - RNA, 32 nt, Human
gagaauggcgugaacccgggaggcagagcuug

SEQ ID NO: 421912 - RNA, 32 nt, Human
gagaauggcgugaacccgggaggcggaacuug

SEQ ID NO: 421913 - RNA, 32 nt, Human
gagaauggcgugaacccgggaggcggagcuug

SEQ ID NO: 421914 - RNA, 32 nt, Human
gagaauggcgugaacccgggaggcggagguug

SEQ ID NO: 421915 - RNA, 32 nt, Human
gagaauggcgugaacccgggaggcggaucuug

SEQ ID NO: 421916 - RNA, 32 nt, Human
gagaauggcgugaacccgggagguggagcuug

SEQ ID NO: 421917 - RNA, 32 nt, Human
gagaauggcgugaacccgggagucgagaucgc

SEQ ID NO: 421918 - RNA, 32 nt, Human
gagaauggcgugaacccgggaguggagcuugc

SEQ ID NO: 421919 - RNA, 32 nt, Human
gagaauggcgugaaccugggaggcagagcuug

SEQ ID NO: 421920 - RNA, 32 nt, Human
gagaauggcgugaauccaggagguggagccug

SEQ ID NO: 421921 - RNA, 32 nt, Human
gagaauggcgugaaucggggaggcagagcuug

SEQ ID NO: 421922 - RNA, 32 nt, Human
gagaauggcgugagcccaggaggcggagcuug

SEQ ID NO: 421923 - RNA, 32 nt, Human
gagaauggcgugaggccaggaggcggagcuug

SEQ ID NO: 421924 - RNA, 22 nt, Human
gagaauggcugggugcugggga

SEQ ID NO: 421925 - RNA, 32 nt, Human
gagaauggcuugaacccaggagacagagguug

SEQ ID NO: 421926 - RNA, 32 nt, Human
gagaauggcuugaacccaggagguggagguug

SEQ ID NO: 421927 - RNA, 32 nt, Human
gagaauggcuugaacccgggaggcagagguug

SEQ ID NO: 421928 - RNA, 32 nt, Human
gagaauggcuugaaccugggaggcagagguug

SEQ ID NO: 421929 - RNA, 32 nt, Human
gagaauggcuugagcccaggaggcagaggcug

SEQ ID NO: 421930 - RNA, 32 nt, Human
gagaauggcuugagcccaggaguucaagaccg

SEQ ID NO: 421931 - RNA, 32 nt, Human
gagaaugggaacaggucaugguucuacuucag

SEQ ID NO: 421932 - RNA, 32 nt, Human
gagaaugggagcccucccugccccaccguccu

SEQ ID NO: 421933 - RNA, 32 nt, Human
gagaauggggaggcaagaucucagggacacca

SEQ ID NO: 421934 - RNA, 32 nt, Human
gagaauggggcugggaagaaagaggcaacacc

SEQ ID NO: 421935 - RNA, 32 nt, Human
gagaauggggcugugaaggucugggagauaac

SEQ ID NO: 421936 - RNA, 32 nt, Human
gagaaugggguccccugcacugaagguccccg

SEQ ID NO: 421937 - RNA, 32 nt, Human
gagaauggggucuugcucugucacccaggcug

SEQ ID NO: 421938 - RNA, 32 nt, Human
gagaauggggugaacccgggaggaagagcuug

SEQ ID NO: 421939 - RNA, 32 nt, Human
gagaaugguaugaauccaggagguggagcuug

SEQ ID NO: 421940 - RNA, 32 nt, Human
gagaauggugcggagcuugcagugagccgaga

SEQ ID NO: 421941 - RNA, 32 nt, Human
gagaauggugugaacccaggaggcacagcuug

SEQ ID NO: 421942 - RNA, 32 nt, Human
gagaauggugugaacccaggaggcagagcuug

SEQ ID NO: 421943 - RNA, 32 nt, Human
gagaauggugugaacccaggaggcggagcuug

SEQ ID NO: 421944 - RNA, 32 nt, Human
gagaauggugugaacccagugagccgagaucg

SEQ ID NO: 421945 - RNA, 32 nt, Human
gagaauggugugaacccccaaggcggagcuug

SEQ ID NO: 421946 - RNA, 32 nt, Human
gagaauggugugaacccgggaagcggagcuug

SEQ ID NO: 421947 - RNA, 32 nt, Human
gagaauggugugaacccgggagcggagguugc

SEQ ID NO: 421948 - RNA, 32 nt, Human
gagaauggugugaacccgggaggcagagcuug

SEQ ID NO: 421949 - RNA, 32 nt, Human
gagaauggugugaacccgggaggcggagcuug

SEQ ID NO: 421950 - RNA, 32 nt, Human
gagaauggugugaacccgggagguggagcuuc

SEQ ID NO: 421951 - RNA, 32 nt, Human
gagaauggugugaacccgggagguggagcuug

SEQ ID NO: 421952 - RNA, 32 nt, Human
gagaauggugugaacccgggcgguggagcuug

SEQ ID NO: 421953 - RNA, 32 nt, Human
gagaaugguguggacccaggaggcagagcuug

SEQ ID NO: 421954 - RNA, 32 nt, Human
gagaaugucccaguagauuagacuucaaccuu

SEQ ID NO: 421955 - RNA, 32 nt, Human
gagaaugucgugaacccgggaggcggagcuug

SEQ ID NO: 421956 - RNA, 32 nt, Human
gagaaugugcaggugcauuucacagagagguc

SEQ ID NO: 421957 - RNA, 32 nt, Human
gagaaugugggauaugguagaggucuuuguuu

SEQ ID NO: 421958 - RNA, 32 nt, Human
gagaauguugacuuagaagcaauagggggcag

SEQ ID NO: 421959 - RNA, 32 nt, Human
gagaauuaagagccucccucccucccucuauc

SEQ ID NO: 421960 - RNA, 32 nt, Human
gagaauuacuuauuucuuuucucuauucucau

SEQ ID NO: 421961 - RNA, 32 nt, Human
gagaauuacuugaacccaggaggcagagaucg

SEQ ID NO: 421962 - RNA, 32 nt, Human
gagaauuagaaaacauguaccuuccucugggc

SEQ ID NO: 421963 - RNA, 32 nt, Human
gagaauuaugguagauuuacauuccaaaggcu

SEQ ID NO: 421964 - RNA, 22 nt, Human
gagaauuauuuauuugccauca

SEQ ID NO: 421965 - RNA, 32 nt, Human
gagaauuauuuuuaauauguaaauucucucaa

SEQ ID NO: 421966 - RNA, 32 nt, Human
gagaauucacaguggaaagaaaagccaugaau

SEQ ID NO: 421967 - RNA, 32 nt, Human
gagaauucacauaggaaagaaaccagaugaag

SEQ ID NO: 421968 - RNA, 32 nt, Human
gagaauucacaugggaauaaaauuccauugcu

SEQ ID NO: 421969 - RNA, 32 nt, Human
gagaauuccaggcucacaaagggagaggagag

SEQ ID NO: 421970 - RNA, 32 nt, Human
gagaauuccucccagugauggucaguauucuu

SEQ ID NO: 421971 - RNA, 32 nt, Human
gagaauucucucuuuuuggggcaaaggucagu

SEQ ID NO: 421972 - RNA, 20 nt, Human
gagaauucuggacagugguc

SEQ ID NO: 421973 - RNA, 32 nt, Human
gagaauucuguggugcuugagaaacagacagu

SEQ ID NO: 421974 - RNA, 32 nt, Human
gagaauugacucacacaaucacaaagcaaagu

SEQ ID NO: 421975 - RNA, 32 nt, Human
gagaauugauugaacccgggaggcagagguug

SEQ ID NO: 421976 - RNA, 32 nt, Human
gagaauugccugaacccaggaggcggagguug

SEQ ID NO: 421977 - RNA, 32 nt, Human
gagaauugcuugaacacgggaggcagagguug

SEQ ID NO: 421978 - RNA, 32 nt, Human
gagaauugcuugaacccaggaggcagagauug

SEQ ID NO: 421979 - RNA, 32 nt, Human
gagaauugcuugaacccaggaggcagagguua

SEQ ID NO: 421980 - RNA, 32 nt, Human
gagaauugcuugaacccaggaggcagagguug

SEQ ID NO: 421981 - RNA, 32 nt, Human
gagaauugcuugaacccaggaggcggaggcag

SEQ ID NO: 421982 - RNA, 32 nt, Human
gagaauugcuugaacccaggaggcggagguag

SEQ ID NO: 421983 - RNA, 32 nt, Human
gagaauugcuugaacccaggaggcggagguug

SEQ ID NO: 421984 - RNA, 32 nt, Human
gagaauugcuugaacccaggaggcggaguuug

SEQ ID NO: 421985 - RNA, 32 nt, Human
gagaauugcuugaacccaggagguagaaguug

SEQ ID NO: 421986 - RNA, 32 nt, Human
gagaauugcuugaacccgggaggcagagguug

SEQ ID NO: 421987 - RNA, 32 nt, Human
gagaauugcuugaacgcgggaggcagagacug

SEQ ID NO: 421988 - RNA, 32 nt, Human
gagaauugcuugaacuggggaggcagagguug

SEQ ID NO: 421989 - RNA, 32 nt, Human
gagaauugcuugaagccagaggcagagguugc

SEQ ID NO: 421990 - RNA, 32 nt, Human
gagaauugcuugaauccaggaggcagagguug

SEQ ID NO: 421991 - RNA, 32 nt, Human
gagaauugcuugagcccaggaggcagagguug

SEQ ID NO: 421992 - RNA, 32 nt, Human
gagaauugcuugagcccgggaggcagaggcug

SEQ ID NO: 421993 - RNA, 32 nt, Human
gagaauugcuugaguccaggaggcagagguuc

SEQ ID NO: 421994 - RNA, 32 nt, Human
gagaauugcuuggacccgggaggcagagguug

SEQ ID NO: 421995 - RNA, 32 nt, Human
gagaauuggagagcaguaaaagacugaagaua

SEQ ID NO: 421996 - RNA, 32 nt, Human
gagaauugguugaacccaggaggcggagguug

SEQ ID NO: 421997 - RNA, 32 nt, Human
gagaauuguuugaacccgggaggcagagguug

SEQ ID NO: 421998 - RNA, 32 nt, Human
gagaauuguuugaagcugggaggcagaguuuu

SEQ ID NO: 421999 - RNA, 32 nt, Human
gagaauuucagaaauugagaacaauuucauaa

SEQ ID NO: 422000 - RNA, 32 nt, Human
gagaauuucuugaacccgggaggcagacuuug

SEQ ID NO: 422001 - RNA, 32 nt, Human
gagaauuuggaauuugaagaagaagaagaggg

SEQ ID NO: 422002 - RNA, 32 nt, Human
gagaauuuuugaaagguagucaaacuucuuuu

SEQ ID NO: 422003 - RNA, 32 nt, Human
gagacaaaaagcugcuccuccuuugaguacug

SEQ ID NO: 422004 - RNA, 32 nt, Human
gagacaaaacccucugcuuccuugggucccuc

SEQ ID NO: 422005 - RNA, 32 nt, Human
gagacaaacccuugaugcuccuugcucggcgu

SEQ ID NO: 422006 - RNA, 32 nt, Human
gagacaaagccgcgucagggggcccggccggg

SEQ ID NO: 422007 - RNA, 32 nt, Human
gagacaaaugaagccacagggaaagugaaaua

SEQ ID NO: 422008 - RNA, 19 nt, Human
gagacaaaugcaguaggca

SEQ ID NO: 422009 - RNA, 32 nt, Human
gagacaaauuuuaacuucuugucuauaguugu

SEQ ID NO: 422010 - RNA, 21 nt, Human
gagacaacacagagacagagg

SEQ ID NO: 422011 - RNA, 32 nt, Human
gagacaaccaaagaagcauuaaggcagguuga

SEQ ID NO: 422012 - RNA, 32 nt, Human
gagacaaccccuccucuucccuggcuggcgca

SEQ ID NO: 422013 - RNA, 32 nt, Human
gagacaaccuuucugucuucagccucugcuau

SEQ ID NO: 422014 - RNA, 32 nt, Human
gagacaacugcacuccagugugggcgugccuu

SEQ ID NO: 422015 - RNA, 32 nt, Human
gagacaacugccacccagccugggccuuccca

SEQ ID NO: 422016 - RNA, 32 nt, Human
gagacaagaagagggaaaguagaaauauucua

SEQ ID NO: 422017 - RNA, 32 nt, Human
gagacaagaaggguuuuccacccuggaaucaa

SEQ ID NO: 422018 - RNA, 32 nt, Human
gagacaagagaaggagagaagagcugcagccc

SEQ ID NO: 422019 - RNA, 23 nt, Human
gagacaagaguuucaccauguug

SEQ ID NO: 422020 - RNA, 32 nt, Human
gagacaagaguuucaccauguuggccaggcug

SEQ ID NO: 422021 - RNA, 32 nt, Human
gagacaagaucucacucuauugcucaggcugg

SEQ ID NO: 422022 - RNA, 32 nt, Human
gagacaagaucuugcucuguugcucagucuag

SEQ ID NO: 422023 - RNA, 32 nt, Human
gagacaagauguggaggugaagacagugauau

SEQ ID NO: 422024 - RNA, 22 nt, Human
gagacaagauuucaccauguug

SEQ ID NO: 422025 - RNA, 22 nt, Human
gagacaagauuucaccguuuug

SEQ ID NO: 422026 - RNA, 22 nt, Human
gagacaagauuucgccauguug

SEQ ID NO: 422027 - RNA, 32 nt, Human
gagacaagccugggcaacauagugagaccuuc

SEQ ID NO: 422028 - RNA, 32 nt, Human
gagacaaggaaaggaaaggaaaggccuggcau

SEQ ID NO: 422029 - RNA, 22 nt, Human
gagacaaggcuuugccauguug

SEQ ID NO: 422030 - RNA, 32 nt, Human
gagacaagggaccugcugucauccccaucugu

SEQ ID NO: 422031 - RNA, 22 nt, Human
gagacaagggaggaaggacaga

SEQ ID NO: 422032 - RNA, 32 nt, Human
gagacaagggucuuaccauguugcccaggcug

SEQ ID NO: 422033 - RNA, 20 nt, Human
gagacaaggucucacuaugu

SEQ ID NO: 422034 - RNA, 22 nt, Human
gagacaaggucucgccauguug

SEQ ID NO: 422035 - RNA, 22 nt, Human
gagacaaggucucuccauguug

SEQ ID NO: 422036 - RNA, 32 nt, Human
gagacaaggucugcccgacccaugucuaugcu

SEQ ID NO: 422037 - RNA, 22 nt, Human
gagacaaggucuugcuauguug

SEQ ID NO: 422038 - RNA, 18 nt, Human
gagacaagguuucaccau

SEQ ID NO: 422039 - RNA, 23 nt, Human
gagacaagguuucaccauauugg

SEQ ID NO: 422040 - RNA, 21 nt, Human
gagacaagguuucaccauguu

SEQ ID NO: 422041 - RNA, 22 nt, Human
gagacaagguuucaccauguua

SEQ ID NO: 422042 - RNA, 22 nt, Human
gagacaagguuucaccauguug

SEQ ID NO: 422043 - RNA, 22 nt, Human
gagacaagguuucacccuguug

SEQ ID NO: 422044 - RNA, 23 nt, Human
gagacaagguuucacccuguugg

SEQ ID NO: 422045 - RNA, 22 nt, Human
gagacaagguuucacuauguug

SEQ ID NO: 422046 - RNA, 22 nt, Human
gagacaagguuucgccauguug

SEQ ID NO: 422047 - RNA, 23 nt, Human
gagacaagguuucgccauguugg

SEQ ID NO: 422048 - RNA, 22 nt, Human
gagacaagguuucgcuauguug

SEQ ID NO: 422049 - RNA, 23 nt, Human
gagacaagguuucgcuauguugg

SEQ ID NO: 422050 - RNA, 22 nt, Human
gagacaagguuuugccauguug

SEQ ID NO: 422051 - RNA, 22 nt, Human
gagacaagguuuugcucuguug

SEQ ID NO: 422052 - RNA, 22 nt, Human
gagacaagguuuugcuguguug

SEQ ID NO: 422053 - RNA, 32 nt, Human
gagacaagucaacauggugaaaccucaucucu

SEQ ID NO: 422054 - RNA, 32 nt, Human
gagacaagugcagcuccuccagcuggagaggc

SEQ ID NO: 422055 - RNA, 30 nt, Human
gagacaaguguucaaacagaaagacgcuug

SEQ ID NO: 422056 - RNA, 31 nt, Human
gagacaauguagcagaauaccaggcagacag

SEQ ID NO: 422057 - RNA, 31 nt, Human
gagacaauguguaccaggacagcagaaagac

SEQ ID NO: 422058 - RNA, 32 nt, Human
gagacacaacacggaaauauugcugcacugcu

SEQ ID NO: 422059 - RNA, 32 nt, Human
gagacacaagaugccagcaccugcucagagga

SEQ ID NO: 422060 - RNA, 32 nt, Human
gagacacaaggaagaaaacacuaguaaccaac

SEQ ID NO: 422061 - RNA, 32 nt, Human
gagacacaaggcaagagacugaaucaucaaag

SEQ ID NO: 422062 - RNA, 32 nt, Human
gagacacaaggcagagagaggagcagaagcag

SEQ ID NO: 422063 - RNA, 16 nt, Human
gagacacagaccccuu

SEQ ID NO: 422064 - RNA, 20 nt, Human
gagacacagagagagacaga

SEQ ID NO: 422065 - RNA, 32 nt, Human
gagacacagaggagucagggccuggacuccug

SEQ ID NO: 422066 - RNA, 32 nt, Human
gagacacagaguucuugcuucuuucugucuac

SEQ ID NO: 422067 - RNA, 32 nt, Human
gagacacagauggaaguggaagcuuuggcaga

SEQ ID NO: 422068 - RNA, 32 nt, Human
gagacacagccugacauacacauaucaucuca

SEQ ID NO: 422069 - RNA, 32 nt, Human
gagacacagccuucuggcugggacugacuugg

SEQ ID NO: 422070 - RNA, 32 nt, Human
gagacacagccuugccccaguuacugcccacc

SEQ ID NO: 422071 - RNA, 32 nt, Human
gagacacaggaaccagacuccccaaaugucuc

SEQ ID NO: 422072 - RNA, 32 nt, Human
gagacacagguaacccagaguggacagugauu

SEQ ID NO: 422073 - RNA, 32 nt, Human
gagacaccaagaagaagcugcgggaaggacag

SEQ ID NO: 422074 - RNA, 18 nt, Human
gagacaccagacagacag

SEQ ID NO: 422075 - RNA, 32 nt, Human
gagacaccagcagguggcugcagugacguuag

SEQ ID NO: 422076 - RNA, 32 nt, Human
gagacaccaguguuuucccaugguuucugggu

SEQ ID NO: 422077 - RNA, 32 nt, Human
gagacaccaguucugccuacaggagugaguuu

SEQ ID NO: 422078 - RNA, 32 nt, Human
gagacaccauguuagucguggcuggucuccaa

SEQ ID NO: 422079 - RNA, 32 nt, Human
gagacaccauuuucuuucuaaacuuuuccaga

SEQ ID NO: 422080 - RNA, 32 nt, Human
gagacacccacuguacaguucucagggcucua

SEQ ID NO: 422081 - RNA, 32 nt, Human
gagacacccagagugggaucccuuccugcagg

SEQ ID NO: 422082 - RNA, 32 nt, Human
gagacaccccuaaaggcucccauuaggucaca

SEQ ID NO: 422083 - RNA, 25 nt, Human
gagacacccucuuuggcccucacua

SEQ ID NO: 422084 - RNA, 32 nt, Human
gagacaccgaagcagaggauacaggaggauua

SEQ ID NO: 422085 - RNA, 32 nt, Human
gagacaccuaguguauggcucaugcccagccu

SEQ ID NO: 422086 - RNA, 22 nt, Human
gagacaccucagagccccgcaa

SEQ ID NO: 422087 - RNA, 32 nt, Human
gagacaccuccaggccguagccugggggcugg

SEQ ID NO: 422088 - RNA, 32 nt, Human
gagacaccuggacccuguaaggcugugagcug

SEQ ID NO: 422089 - RNA, 32 nt, Human
gagacacgcagaccagcugaggaggacaaaga

SEQ ID NO: 422090 - RNA, 32 nt, Human
gagacacgcgagcggggagaccuccaaggcag

SEQ ID NO: 422091 - RNA, 32 nt, Human
gagacacgcgcugucuguuguggugggccucc

SEQ ID NO: 422092 - RNA, 22 nt, Human
gagacacggucccaccauguua

SEQ ID NO: 422093 - RNA, 32 nt, Human
gagacacguggagacuggaugagggcagauga

SEQ ID NO: 422094 - RNA, 32 nt, Human
gagacacucccgcccccaccagacucaagccc

SEQ ID NO: 422095 - RNA, 32 nt, Human
gagacacucugccucugguggcugcagagcaa

SEQ ID NO: 422096 - RNA, 32 nt, Human
gagacacucuggggcuccucauucagugggac

SEQ ID NO: 422097 - RNA, 23 nt, Human
gagacacugaacuuccugagcca

SEQ ID NO: 422098 - RNA, 32 nt, Human
gagacacugauuccaaguccaugugggggcau

SEQ ID NO: 422099 - RNA, 32 nt, Human
gagacacugggcagaaaacagaagaucaucau

SEQ ID NO: 422100 - RNA, 32 nt, Human
gagacacuuagcuucccucucccucauucccg

SEQ ID NO: 422101 - RNA, 32 nt, Human
gagacagaagagaaggaggagggggcagcugg

SEQ ID NO: 422102 - RNA, 32 nt, Human
gagacagaagaggagacacagacacagagcag

SEQ ID NO: 422103 - RNA, 32 nt, Human
gagacagaagccucugcaccuacugugcagaa

SEQ ID NO: 422104 - RNA, 32 nt, Human
gagacagaauguguuucuggucacucauucua

SEQ ID NO: 422105 - RNA, 32 nt, Human
gagacagacacaacaguaucugaaaagaauac

SEQ ID NO: 422106 - RNA, 32 nt, Human
gagacagacagagaaggcagcaggcggccuuu

SEQ ID NO: 422107 - RNA, 32 nt, Human
gagacagacagcaagacacagaggcagagaga

SEQ ID NO: 422108 - RNA, 32 nt, Human
gagacagacgcugaggcggguaggaggagccc

SEQ ID NO: 422109 - RNA, 32 nt, Human
gagacagacuugugguucuucaacagcugugc

SEQ ID NO: 422110 - RNA, 32 nt, Human
gagacagagaaagagagagaauucuuucaagu

SEQ ID NO: 422111 - RNA, 32 nt, Human
gagacagagacacagccauccgccaccaccgc

SEQ ID NO: 422112 - RNA, 32 nt, Human
gagacagagacuggcauuuuccucucccgaag

SEQ ID NO: 422113 - RNA, 23 nt, Human
gagacagagaggcuuugagcugu

SEQ ID NO: 422114 - RNA, 32 nt, Human
gagacagagagggagagagggacagagagaga

SEQ ID NO: 422115 - RNA, 32 nt, Human
gagacagagauccaggcuuucaaggaggagcu

SEQ ID NO: 422116 - RNA, 32 nt, Human
gagacagagcccuccaccccucucacacacac

SEQ ID NO: 422117 - RNA, 32 nt, Human
gagacagagccggggucacuguccuuaagacg

SEQ ID NO: 422118 - RNA, 18 nt, Human
gagacagagccucagcca

SEQ ID NO: 422119 - RNA, 19 nt, Human
gagacagagccucagccug

SEQ ID NO: 422120 - RNA, 32 nt, Human
gagacagagcugguugggaagacauggggagg

SEQ ID NO: 422121 - RNA, 22 nt, Human
gagacagagcuucuccauguug

SEQ ID NO: 422122 - RNA, 32 nt, Human
gagacagaggagaggaaagggaaguaguuugg

SEQ ID NO: 422123 - RNA, 32 nt, Human
gagacagaggcugauggccaggaggaccuaga

SEQ ID NO: 422124 - RNA, 21 nt, Human
gagacagaggcugcauugagc

SEQ ID NO: 422125 - RNA, 23 nt, Human
gagacagagggaagccugagcca

SEQ ID NO: 422126 - RNA, 32 nt, Human
gagacagagggcaaugaugugugcaaguacga

SEQ ID NO: 422127 - RNA, 32 nt, Human
gagacagagggugugauggugggugcugggag

SEQ ID NO: 422128 - RNA, 32 nt, Human
gagacagaggucucgcucugucgcccagguug

SEQ ID NO: 422129 - RNA, 32 nt, Human
gagacagagucacccaggcuggagugcagugg

SEQ ID NO: 422130 - RNA, 20 nt, Human
gagacagagucucacccugu

SEQ ID NO: 422131 - RNA, 20 nt, Human
gagacagagucucacucugu

SEQ ID NO: 422132 - RNA, 18 nt, Human
gagacagaguuucaccau

SEQ ID NO: 422133 - RNA, 22 nt, Human
gagacagaguuucaccauguug

SEQ ID NO: 422134 - RNA, 22 nt, Human
gagacagaguuucacucucguu

SEQ ID NO: 422135 - RNA, 20 nt, Human
gagacagaguuucacucugu

SEQ ID NO: 422136 - RNA, 22 nt, Human
gagacagaguuucacucuuguu

SEQ ID NO: 422137 - RNA, 22 nt, Human
gagacagaguuucauucuuguu

SEQ ID NO: 422138 - RNA, 22 nt, Human
gagacagaguuucgcucuuguu

SEQ ID NO: 422139 - RNA, 23 nt, Human
gagacagaguuucgcuuuuguug

SEQ ID NO: 422140 - RNA, 22 nt, Human
gagacagaguuucgucauguug

SEQ ID NO: 422141 - RNA, 22 nt, Human
gagacagaguuuuaccauguug

SEQ ID NO: 422142 - RNA, 22 nt, Human
gagacagaguuuugccauguug

SEQ ID NO: 422143 - RNA, 22 nt, Human
gagacagaguuuugcuauguug

SEQ ID NO: 422144 - RNA, 22 nt, Human
gagacagaguuuugcuguguug

SEQ ID NO: 422145 - RNA, 32 nt, Human
gagacagaugcuccugccauguuugccacccu

SEQ ID NO: 422146 - RNA, 20 nt, Human
gagacagauggcacccugag

SEQ ID NO: 422147 - RNA, 32 nt, Human
gagacagcaaagcauauuuuuacaucaauuug

SEQ ID NO: 422148 - RNA, 32 nt, Human
gagacagcaccacugcugaggagucugaggac

SEQ ID NO: 422149 - RNA, 32 nt, Human
gagacagcaccgacuucacacauuccugggcu

SEQ ID NO: 422150 - RNA, 32 nt, Human
gagacagcagaggucugaccgccccgcugagg

SEQ ID NO: 422151 - RNA, 32 nt, Human
gagacagccagggagagaggggcaaggagcuc

SEQ ID NO: 422152 - RNA, 32 nt, Human
gagacagcccacccccagccugcaagagaggc

SEQ ID NO: 422153 - RNA, 23 nt, Human
gagacagccuagacacuggcugg

SEQ ID NO: 422154 - RNA, 32 nt, Human
gagacagccugagauauggccucaugggaagg

SEQ ID NO: 422155 - RNA, 32 nt, Human
gagacagcgaugacauuugcucucacagcaga

SEQ ID NO: 422156 - RNA, 22 nt, Human
gagacagcguuucaccauguua

SEQ ID NO: 422157 - RNA, 32 nt, Human
gagacagcuuauuaggcagccugcucuccucu

SEQ ID NO: 422158 - RNA, 32 nt, Human
gagacagcuucagaggauacggggcgcugccu

SEQ ID NO: 422159 - RNA, 32 nt, Human
gagacagcuucucugcaguaaaacacauuugg

SEQ ID NO: 422160 - RNA, 21 nt, Human
gagacaggaaaauagcuugaa

SEQ ID NO: 422161 - RNA, 32 nt, Human
gagacaggaagagacuggugauucaagagaga

SEQ ID NO: 422162 - RNA, 32 nt, Human
gagacaggaaggcagggcgcagugguugaaac

SEQ ID NO: 422163 - RNA, 32 nt, Human
gagacaggacgugucucucuccacgucuucca

SEQ ID NO: 422164 - RNA, 22 nt, Human
gagacaggagaaucacuugaac

SEQ ID NO: 422165 - RNA, 22 nt, Human
gagacaggagaaucacuugaau

SEQ ID NO: 422166 - RNA, 21 nt, Human
gagacaggagaaucgcucgaa

SEQ ID NO: 422167 - RNA, 22 nt, Human
gagacaggagaaucgcucgaac

SEQ ID NO: 422168 - RNA, 22 nt, Human
gagacaggagaaucgcuuaaac

SEQ ID NO: 422169 - RNA, 21 nt, Human
gagacaggagaaucgcuugaa

SEQ ID NO: 422170 - RNA, 22 nt, Human
gagacaggagaaucgcuugaac

SEQ ID NO: 422171 - RNA, 22 nt, Human
gagacaggagaaucgcuugaau

SEQ ID NO: 422172 - RNA, 21 nt, Human
gagacaggagaauugcuugaa

SEQ ID NO: 422173 - RNA, 22 nt, Human
gagacaggagaauugcuugaac

SEQ ID NO: 422174 - RNA, 21 nt, Human
gagacaggagagucgcuugaa

SEQ ID NO: 422175 - RNA, 22 nt, Human
gagacaggagagucgcuugaac

SEQ ID NO: 422176 - RNA, 32 nt, Human
gagacaggaggaguaggaggaggcagggccuc

SEQ ID NO: 422177 - RNA, 21 nt, Human
gagacaggaggaucgcuugaa

SEQ ID NO: 422178 - RNA, 32 nt, Human
gagacaggagucuugccauguugcccaggcug

SEQ ID NO: 422179 - RNA, 32 nt, Human
gagacaggaguuuugcucuguugcccaggcug

SEQ ID NO: 422180 - RNA, 21 nt, Human
gagacaggaucucacuauguu

SEQ ID NO: 422181 - RNA, 22 nt, Human
gagacaggaucucacuauguug

SEQ ID NO: 422182 - RNA, 20 nt, Human
gagacaggaucucacucugu

SEQ ID NO: 422183 - RNA, 22 nt, Human
gagacaggaucucacucuguug

SEQ ID NO: 422184 - RNA, 19 nt, Human
gagacaggauguccauguu

SEQ ID NO: 422185 - RNA, 22 nt, Human
gagacaggauuucaccauguug

SEQ ID NO: 422186 - RNA, 22 nt, Human
gagacaggauuucacuauguug

SEQ ID NO: 422187 - RNA, 22 nt, Human
gagacaggauuucacuguguua

SEQ ID NO: 422188 - RNA, 22 nt, Human
gagacaggauuucaucauguug

SEQ ID NO: 422189 - RNA, 22 nt, Human
gagacaggauuucaucguguug

SEQ ID NO: 422190 - RNA, 22 nt, Human
gagacaggauuucuccauguug

SEQ ID NO: 422191 - RNA, 22 nt, Human
gagacaggauuuuaccauguug

SEQ ID NO: 422192 - RNA, 22 nt, Human
gagacaggauuuuacuguguug

SEQ ID NO: 422193 - RNA, 32 nt, Human
gagacaggcaggagucggaaugcugaaccagc

SEQ ID NO: 422194 - RNA, 32 nt, Human
gagacaggcccaagagaugaagagugagaggg

SEQ ID NO: 422195 - RNA, 32 nt, Human
gagacaggccugaugccaaaggcuuugggcuc

SEQ ID NO: 422196 - RNA, 22 nt, Human
gagacaggcucucaccauguug

SEQ ID NO: 422197 - RNA, 32 nt, Human
gagacaggcucugacucuggcacuuugcucag

SEQ ID NO: 422198 - RNA, 32 nt, Human
gagacagggaauggggcacggagaagguaggu

SEQ ID NO: 422199 - RNA, 32 nt, Human
gagacagggagacagacagagaggcagagaga

SEQ ID NO: 422200 - RNA, 21 nt, Human
gagacagggccucacucuguu

SEQ ID NO: 422201 - RNA, 22 nt, Human
gagacagggccucacucuguug

SEQ ID NO: 422202 - RNA, 32 nt, Human
gagacagggcuggcuccucucgccccuggagc

SEQ ID NO: 422203 - RNA, 22 nt, Human
gagacagggcuucaccauguug

SEQ ID NO: 422204 - RNA, 22 nt, Human
gagacagggcuucacuguguua

SEQ ID NO: 422205 - RNA, 32 nt, Human
gagacaggggagagagaaagacaaagagggga

SEQ ID NO: 422206 - RNA, 26 nt, Human
gagacaggggcacagagagacagagg

SEQ ID NO: 422207 - RNA, 32 nt, Human
gagacaggggcaggggagagacucucucccca

SEQ ID NO: 422208 - RNA, 32 nt, Human
gagacagggggcaggccagagagagagggcag

SEQ ID NO: 422209 - RNA, 32 nt, Human
gagacaggggucucacuauguugcccaaacug

SEQ ID NO: 422210 - RNA, 32 nt, Human
gagacaggggucucccucugucacccaggcug

SEQ ID NO: 422211 - RNA, 32 nt, Human
gagacaggggucuugccaugucgcccaggcug

SEQ ID NO: 422212 - RNA, 23 nt, Human
gagacagggguuucaccacguug

SEQ ID NO: 422213 - RNA, 24 nt, Human
gagacagggguuucaccacguugg

SEQ ID NO: 422214 - RNA, 32 nt, Human
gagacagggguuucaccacguuggccaggcug

SEQ ID NO: 422215 - RNA, 19 nt, Human
gagacagggguuucaccau

SEQ ID NO: 422216 - RNA, 24 nt, Human
gagacagggguuucaccauauugg

SEQ ID NO: 422217 - RNA, 32 nt, Human
gagacagggguuucaccauauuggccaggcug

SEQ ID NO: 422218 - RNA, 32 nt, Human
gagacagggguuucuuccauguugcccaggcu

SEQ ID NO: 422219 - RNA, 22 nt, Human
gagacaggguaucuccauguug

SEQ ID NO: 422220 - RNA, 20 nt, Human
gagacagggucucacacugu

SEQ ID NO: 422221 - RNA, 20 nt, Human
gagacagggucucaccaugu

SEQ ID NO: 422222 - RNA, 22 nt, Human
gagacagggucucaccauguua

SEQ ID NO: 422223 - RNA, 22 nt, Human
gagacagggucucaccauguug

SEQ ID NO: 422224 - RNA, 18 nt, Human
gagacagggucucacuau

SEQ ID NO: 422225 - RNA, 32 nt, Human
gagacagggucucacuauauugcucaggcugg

SEQ ID NO: 422226 - RNA, 22 nt, Human
gagacagggucucacuauguug

SEQ ID NO: 422227 - RNA, 20 nt, Human
gagacagggucucacucugu

SEQ ID NO: 422228 - RNA, 32 nt, Human
gagacagggucucacucugucauccaggcugg

SEQ ID NO: 422229 - RNA, 22 nt, Human
gagacagggucucacucuguua

SEQ ID NO: 422230 - RNA, 22 nt, Human
gagacagggucucacucuguug

SEQ ID NO: 422231 - RNA, 20 nt, Human
gagacagggucucacugugu

SEQ ID NO: 422232 - RNA, 22 nt, Human
gagacagggucucacuguguug

SEQ ID NO: 422233 - RNA, 22 nt, Human
gagacagggucucacuuuguug

SEQ ID NO: 422234 - RNA, 22 nt, Human
gagacagggucucccuguguug

SEQ ID NO: 422235 - RNA, 20 nt, Human
gagacagggucucccuuugu

SEQ ID NO: 422236 - RNA, 22 nt, Human
gagacagggucucgcaguguug

SEQ ID NO: 422237 - RNA, 22 nt, Human
gagacagggucucgccauguug

SEQ ID NO: 422238 - RNA, 20 nt, Human
gagacagggucucgcucugu

SEQ ID NO: 422239 - RNA, 22 nt, Human
gagacagggucucgcucuguug

SEQ ID NO: 422240 - RNA, 22 nt, Human
gagacagggucuggcucuguug

SEQ ID NO: 422241 - RNA, 32 nt, Human
gagacagggucugggucuuucacccaggcugg

SEQ ID NO: 422242 - RNA, 22 nt, Human
gagacagggucugucuuuguua

SEQ ID NO: 422243 - RNA, 32 nt, Human
gagacagggucuguugccuaggcgggagugca

SEQ ID NO: 422244 - RNA, 32 nt, Human
gagacagggucuuaccacauugcucagguugu

SEQ ID NO: 422245 - RNA, 18 nt, Human
gagacagggucuuaccau

SEQ ID NO: 422246 - RNA, 20 nt, Human
gagacagggucuuacucugu

SEQ ID NO: 422247 - RNA, 21 nt, Human
gagacagggucuucuauguug

SEQ ID NO: 422248 - RNA, 22 nt, Human
gagacagggucuugcuauguug

SEQ ID NO: 422249 - RNA, 22 nt, Human
gagacagggucuugcucuguug

SEQ ID NO: 422250 - RNA, 22 nt, Human
gagacagggucuugcuguguua

SEQ ID NO: 422251 - RNA, 22 nt, Human
gagacagggucuugcuguguug

SEQ ID NO: 422252 - RNA, 22 nt, Human
gagacagggucuugcuuuguug

SEQ ID NO: 422253 - RNA, 22 nt, Human
gagacagggucuuucucuguug

SEQ ID NO: 422254 - RNA, 20 nt, Human
gagacagggugucacucugu

SEQ ID NO: 422255 - RNA, 18 nt, Human
gagacaggguuccaccgu

SEQ ID NO: 422256 - RNA, 18 nt, Human
gagacaggguucuguguu

SEQ ID NO: 422257 - RNA, 23 nt, Human
gagacaggguucuuaccauguug

SEQ ID NO: 422258 - RNA, 32 nt, Human
gagacaggguucuuaccauguuggccaggcug

SEQ ID NO: 422259 - RNA, 22 nt, Human
gagacaggguuucacaauguug

SEQ ID NO: 422260 - RNA, 23 nt, Human
gagacaggguuucaccacauugg

SEQ ID NO: 422261 - RNA, 22 nt, Human
gagacaggguuucaccacguug

SEQ ID NO: 422262 - RNA, 23 nt, Human
gagacaggguuucaccacguugg

SEQ ID NO: 422263 - RNA, 22 nt, Human
gagacaggguuucaccagguug

SEQ ID NO: 422264 - RNA, 23 nt, Human
gagacaggguuucaccagguugg

SEQ ID NO: 422265 - RNA, 18 nt, Human
gagacaggguuucaccau

SEQ ID NO: 422266 - RNA, 23 nt, Human
gagacaggguuucaccauauugg

SEQ ID NO: 422267 - RNA, 22 nt, Human
gagacaggguuucaccaucuug

SEQ ID NO: 422268 - RNA, 23 nt, Human
gagacaggguuucaccaucuugg

SEQ ID NO: 422269 - RNA, 20 nt, Human
gagacaggguuucaccaugu

SEQ ID NO: 422270 - RNA, 21 nt, Human
gagacaggguuucaccauguu

SEQ ID NO: 422271 - RNA, 22 nt, Human
gagacaggguuucaccauguua

SEQ ID NO: 422272 - RNA, 22 nt, Human
gagacaggguuucaccauguug

SEQ ID NO: 422273 - RNA, 23 nt, Human
gagacaggguuucaccauguugg

SEQ ID NO: 422274 - RNA, 22 nt, Human
gagacaggguuucaccauuuug

SEQ ID NO: 422275 - RNA, 23 nt, Human
gagacaggguuucaccauuuugg

SEQ ID NO: 422276 - RNA, 21 nt, Human
gagacaggguuucacccuguu

SEQ ID NO: 422277 - RNA, 21 nt, Human
gagacaggguuucaccguguu

SEQ ID NO: 422278 - RNA, 22 nt, Human
gagacaggguuucaccguguua

SEQ ID NO: 422279 - RNA, 22 nt, Human
gagacaggguuucaccguguug

SEQ ID NO: 422280 - RNA, 23 nt, Human
gagacaggguuucaccguguugg

SEQ ID NO: 422281 - RNA, 22 nt, Human
gagacaggguuucacuacguug

SEQ ID NO: 422282 - RNA, 23 nt, Human
gagacaggguuucacuacguugg

SEQ ID NO: 422283 - RNA, 19 nt, Human
gagacaggguuucacuaug

SEQ ID NO: 422284 - RNA, 23 nt, Human
gagacaggguuucacuaugcugg

SEQ ID NO: 422285 - RNA, 20 nt, Human
gagacaggguuucacuaugu

SEQ ID NO: 422286 - RNA, 22 nt, Human
gagacaggguuucacuaugugg

SEQ ID NO: 422287 - RNA, 22 nt, Human
gagacaggguuucacuauguug

SEQ ID NO: 422288 - RNA, 23 nt, Human
gagacaggguuucacuauguugg

SEQ ID NO: 422289 - RNA, 23 nt, Human
gagacaggguuucacucuuuugg

SEQ ID NO: 422290 - RNA, 21 nt, Human
gagacaggguuucacuguguu

SEQ ID NO: 422291 - RNA, 22 nt, Human
gagacaggguuucacuguguua

SEQ ID NO: 422292 - RNA, 22 nt, Human
gagacaggguuucacuguguug

SEQ ID NO: 422293 - RNA, 23 nt, Human
gagacaggguuucacuguguugg

SEQ ID NO: 422294 - RNA, 22 nt, Human
gagacaggguuucaucauguug

SEQ ID NO: 422295 - RNA, 23 nt, Human
gagacaggguuucaucauguugg

SEQ ID NO: 422296 - RNA, 22 nt, Human
gagacaggguuucccuauguug

SEQ ID NO: 422297 - RNA, 22 nt, Human
gagacaggguuucgcaauguug

SEQ ID NO: 422298 - RNA, 23 nt, Human
gagacaggguuucgcaauguugg

SEQ ID NO: 422299 - RNA, 32 nt, Human
gagacaggguuucgccacauugcccaggccca

SEQ ID NO: 422300 - RNA, 18 nt, Human
gagacaggguuucgccau

SEQ ID NO: 422301 - RNA, 23 nt, Human
gagacaggguuucgccauauugg

SEQ ID NO: 422302 - RNA, 22 nt, Human
gagacaggguuucgccauguug

SEQ ID NO: 422303 - RNA, 23 nt, Human
gagacaggguuucgccauguugg

SEQ ID NO: 422304 - RNA, 19 nt, Human
gagacaggguuucuccaug

SEQ ID NO: 422305 - RNA, 20 nt, Human
gagacaggguuucuccaugu

SEQ ID NO: 422306 - RNA, 22 nt, Human
gagacaggguuucuccauguug

SEQ ID NO: 422307 - RNA, 22 nt, Human
gagacaggguuucuccguguug

SEQ ID NO: 422308 - RNA, 20 nt, Human
gagacaggguuuggcugugu

SEQ ID NO: 422309 - RNA, 16 nt, Human
gagacaggguuugugu

SEQ ID NO: 422310 - RNA, 22 nt, Human
gagacaggguuuuaccauguug

SEQ ID NO: 422311 - RNA, 23 nt, Human
gagacaggguuuuaccauguugg

SEQ ID NO: 422312 - RNA, 22 nt, Human
gagacaggguuuugccacguug

SEQ ID NO: 422313 - RNA, 21 nt, Human
gagacaggguuuugccauguu

SEQ ID NO: 422314 - RNA, 22 nt, Human
gagacaggguuuugccauguug

SEQ ID NO: 422315 - RNA, 23 nt, Human
gagacaggguuuugccauguugg

SEQ ID NO: 422316 - RNA, 23 nt, Human
gagacaggguuuugccguguugg

SEQ ID NO: 422317 - RNA, 32 nt, Human
gagacaggguuuugcucuuguugcccagccug

SEQ ID NO: 422318 - RNA, 22 nt, Human
gagacaggguuuuuuguuguug

SEQ ID NO: 422319 - RNA, 32 nt, Human
gagacaggugagaagagggauggccagcacac

SEQ ID NO: 422320 - RNA, 17 nt, Human
gagacaggugcgaagug

SEQ ID NO: 422321 - RNA, 22 nt, Human
gagacagguggaucacgagguc

SEQ ID NO: 422322 - RNA, 32 nt, Human
gagacaggugggccacaugagcccagguauuc

SEQ ID NO: 422323 - RNA, 32 nt, Human
gagacaggugucucucuacguugcccaggcug

SEQ ID NO: 422324 - RNA, 22 nt, Human
gagacagguuucaccacauugg

SEQ ID NO: 422325 - RNA, 17 nt, Human
gagacagguuucaccau

SEQ ID NO: 422326 - RNA, 22 nt, Human
gagacagguuucaccauauugg

SEQ ID NO: 422327 - RNA, 21 nt, Human
gagacagguuucaccauguug

SEQ ID NO: 422328 - RNA, 22 nt, Human
gagacagguuucaccauguugg

SEQ ID NO: 422329 - RNA, 22 nt, Human
gagacagguuuucaccauguua

SEQ ID NO: 422330 - RNA, 22 nt, Human
gagacagguuuucaccauguug

SEQ ID NO: 422331 - RNA, 32 nt, Human
gagacaguaucccaggcugacaagggcuugcc

SEQ ID NO: 422332 - RNA, 32 nt, Human
gagacaguaugagacagagacugagaaaccac

SEQ ID NO: 422333 - RNA, 32 nt, Human
gagacaguauguggucugcagcacuugaaaua

SEQ ID NO: 422334 - RNA, 32 nt, Human
gagacagugaagucaccccguguccuuuuugc

SEQ ID NO: 422335 - RNA, 32 nt, Human
gagacagugauagagacagaggaacaaaaaga

SEQ ID NO: 422336 - RNA, 32 nt, Human
gagacagugccaaccagaccacggucagaauu

SEQ ID NO: 422337 - RNA, 32 nt, Human
gagacagugccaggaggaagaaggaaggaguc

SEQ ID NO: 422338 - RNA, 32 nt, Human
gagacagugucacuuauucuugcugagaaugc

SEQ ID NO: 422339 - RNA, 32 nt, Human
gagacaguguuuagccauguugcccaggcugu

SEQ ID NO: 422340 - RNA, 22 nt, Human
gagacaguguuucaccauguug

SEQ ID NO: 422341 - RNA, 32 nt, Human
gagacaguuagauuuacuuccucuuuucuaau

SEQ ID NO: 422342 - RNA, 32 nt, Human
gagacauaaagugacuguggaaagccuuuuaa

SEQ ID NO: 422343 - RNA, 32 nt, Human
gagacauaaggagagacaaaaacagguuugug

SEQ ID NO: 422344 - RNA, 22 nt, Human
gagacauagagauagagacaga

SEQ ID NO: 422345 - RNA, 32 nt, Human
gagacauagcccugucccccagccuggcaccu

SEQ ID NO: 422346 - RNA, 32 nt, Human
gagacauagcuacaugugaugugcacaugugu

SEQ ID NO: 422347 - RNA, 32 nt, Human
gagacaucaagagagacagacagagacaugaa

SEQ ID NO: 422348 - RNA, 22 nt, Human
gagacaucacaaccuccaacaa

SEQ ID NO: 422349 - RNA, 32 nt, Human
gagacaucacccaguaggagggaguacggucu

SEQ ID NO: 422350 - RNA, 32 nt, Human
gagacaucacgucacccaccagccugggcccg

SEQ ID NO: 422351 - RNA, 32 nt, Human
gagacaucacugccuuuuucucaguugguugu

SEQ ID NO: 422352 - RNA, 32 nt, Human
gagacaucauagagaaaugagaugcuuaccug

SEQ ID NO: 422353 - RNA, 23 nt, Human
gagacaucccuggugccuggaga

SEQ ID NO: 422354 - RNA, 32 nt, Human
gagacauccuuucugaauacuucuugaugggu

SEQ ID NO: 422355 - RNA, 22 nt, Human
gagacaucgcaaccuccaacaa

SEQ ID NO: 422356 - RNA, 32 nt, Human
gagacaucugccucucuggcccucugagauau

SEQ ID NO: 422357 - RNA, 32 nt, Human
gagacaugagccuguagguucaguagguagag

SEQ ID NO: 422358 - RNA, 32 nt, Human
gagacaugaugguggagaauaaggagaguugu

SEQ ID NO: 422359 - RNA, 32 nt, Human
gagacaugcauucuauaaucauguagacacuc

SEQ ID NO: 422360 - RNA, 32 nt, Human
gagacauggaauugaagagcacuagaaacaac

SEQ ID NO: 422361 - RNA, 32 nt, Human
gagacaugggcagcugacacagcagaccuuga

SEQ ID NO: 422362 - RNA, 32 nt, Human
gagacauggggaguuggagcugaaggaggaau

SEQ ID NO: 422363 - RNA, 30 nt, Human
gagacauggugcugucggagcuagcggcgc

SEQ ID NO: 422364 - RNA, 30 nt, Human
gagacaugucugacacaagcgagaguggug

SEQ ID NO: 422365 - RNA, 32 nt, Human
gagacauguuaccucuucauacacuccuauaa

SEQ ID NO: 422366 - RNA, 18 nt, Human
gagacauucucagaugaa

SEQ ID NO: 422367 - RNA, 32 nt, Human
gagacauucugaaucuuagacuuucugagggg

SEQ ID NO: 422368 - RNA, 32 nt, Human
gagacauugcauucuacuacugcucugauggu

SEQ ID NO: 422369 - RNA, 32 nt, Human
gagacauuggucucacuguguugcccagacug

SEQ ID NO: 422370 - RNA, 20 nt, Human
gagacauuuccugugcuaga

SEQ ID NO: 422371 - RNA, 23 nt, Human
gagacauuucuggauccaggcca

SEQ ID NO: 422372 - RNA, 32 nt, Human
gagaccaaaaugucaaaauauaccucaucaga

SEQ ID NO: 422373 - RNA, 19 nt, Human
gagaccaacagauagacag

SEQ ID NO: 422374 - RNA, 24 nt, Human
gagaccaagagagcaaaccagaga

SEQ ID NO: 422375 - RNA, 32 nt, Human
gagaccaagaguucaagaccagccuggccaac

SEQ ID NO: 422376 - RNA, 32 nt, Human
gagaccaagcagagaauaagacagugcggagc

SEQ ID NO: 422377 - RNA, 18 nt, Human
gagaccaaggcaggcaga

SEQ ID NO: 422378 - RNA, 22 nt, Human
gagaccaaggcaggcagaucac

SEQ ID NO: 422379 - RNA, 32 nt, Human
gagaccaaggcggauggaucaccugaggucag

SEQ ID NO: 422380 - RNA, 18 nt, Human
gagaccaaggcgggcaga

SEQ ID NO: 422381 - RNA, 32 nt, Human
gagaccaaggcggguggaucaccugaggucag

SEQ ID NO: 422382 - RNA, 32 nt, Human
gagaccaaggugggcagaucaccugaggucag

SEQ ID NO: 422383 - RNA, 32 nt, Human
gagaccaaggugggcggaucaccugaggucag

SEQ ID NO: 422384 - RNA, 32 nt, Human
gagaccacaccacugcacuccauccugggcaa

SEQ ID NO: 422385 - RNA, 32 nt, Human
gagaccacaccacugcacuccugccugggcaa

SEQ ID NO: 422386 - RNA, 32 nt, Human
gagaccacaccauugcacuccagccugggcaa

SEQ ID NO: 422387 - RNA, 32 nt, Human
gagaccacacuggccuccccuaggagcacguc

SEQ ID NO: 422388 - RNA, 21 nt, Human
gagaccacagaaucagguuuu

SEQ ID NO: 422389 - RNA, 32 nt, Human
gagaccacagcccccggggagaggcggagggg

SEQ ID NO: 422390 - RNA, 23 nt, Human
gagaccacagguguugcugguga

SEQ ID NO: 422391 - RNA, 19 nt, Human
gagaccacgcagccuuccu

SEQ ID NO: 422392 - RNA, 32 nt, Human
gagaccacgccauugcacuccagccuggguga

SEQ ID NO: 422393 - RNA, 32 nt, Human
gagaccacgccauugcacuccagcuugggcaa

SEQ ID NO: 422394 - RNA, 32 nt, Human
gagaccacucaacccccaccuggaaggggcaa

SEQ ID NO: 422395 - RNA, 32 nt, Human
gagaccacugcacuccagccugggcaacagag

SEQ ID NO: 422396 - RNA, 21 nt, Human
gagaccagaaccugcuugcug

SEQ ID NO: 422397 - RNA, 32 nt, Human
gagaccagacuggccaacacagcgagaccccc

SEQ ID NO: 422398 - RNA, 32 nt, Human
gagaccagagcuggccugaaaauuacuggugu

SEQ ID NO: 422399 - RNA, 32 nt, Human
gagaccagagugggaggaaggcggggagucca

SEQ ID NO: 422400 - RNA, 32 nt, Human
gagaccagaucccugucuucugaccuccaaca

SEQ ID NO: 422401 - RNA, 32 nt, Human
gagaccagcagagaucaaauguaacaaagcac

SEQ ID NO: 422402 - RNA, 32 nt, Human
gagaccagcagccuggccaauauggugaaacu

SEQ ID NO: 422403 - RNA, 24 nt, Human
gagaccagcccagccaacauggca

SEQ ID NO: 422404 - RNA, 24 nt, Human
gagaccagccuagccaacauggca

SEQ ID NO: 422405 - RNA, 32 nt, Human
gagaccagccuccuggccaacauggugaaacu

SEQ ID NO: 422406 - RNA, 32 nt, Human
gagaccagccugaccaacaugaugaaaugcug

SEQ ID NO: 422407 - RNA, 32 nt, Human
gagaccagccugaccaacauggagaaaugcca

SEQ ID NO: 422408 - RNA, 32 nt, Human
gagaccagccugaccaacauggagaagccccg

SEQ ID NO: 422409 - RNA, 32 nt, Human
gagaccagccugaccaacauggugaaacgcca

SEQ ID NO: 422410 - RNA, 32 nt, Human
gagaccagccugaccaacauggugaaagcccg

SEQ ID NO: 422411 - RNA, 32 nt, Human
gagaccagccugaccaacguggagaaacacua

SEQ ID NO: 422412 - RNA, 32 nt, Human
gagaccagccugaccaacguggagaaaccccg

SEQ ID NO: 422413 - RNA, 32 nt, Human
gagaccagccugaccaagaugaugaaacgcua

SEQ ID NO: 422414 - RNA, 32 nt, Human
gagaccagccuggacaacacagugagaccuca

SEQ ID NO: 422415 - RNA, 32 nt, Human
gagaccagccuggacaacauagugagaccccc

SEQ ID NO: 422416 - RNA, 32 nt, Human
gagaccagccuggacaacauagugagaccccg

SEQ ID NO: 422417 - RNA, 32 nt, Human
gagaccagccuggacaacauagugagaccucg

SEQ ID NO: 422418 - RNA, 32 nt, Human
gagaccagccuggauaacaaagggagacccag

SEQ ID NO: 422419 - RNA, 32 nt, Human
gagaccagccuggaugacauaaugagauucug

SEQ ID NO: 422420 - RNA, 32 nt, Human
gagaccagccuggcaacacagcaagacccuau

SEQ ID NO: 422421 - RNA, 32 nt, Human
gagaccagccuggcaacauggcaagacccugc

SEQ ID NO: 422422 - RNA, 32 nt, Human
gagaccagccuggccaacacggugagacccug

SEQ ID NO: 422423 - RNA, 32 nt, Human
gagaccagccuggccaacacuaucuguacuaa

SEQ ID NO: 422424 - RNA, 32 nt, Human
gagaccagccuggccaacagacgggagccacu

SEQ ID NO: 422425 - RNA, 32 nt, Human
gagaccagccuggccaacauagcgagagcagc

SEQ ID NO: 422426 - RNA, 32 nt, Human
gagaccagccuggccaacaugccuccagggca

SEQ ID NO: 422427 - RNA, 32 nt, Human
gagaccagccuggccaacauggcaagacccca

SEQ ID NO: 422428 - RNA, 32 nt, Human
gagaccagccuggccaacauggcgagacccca

SEQ ID NO: 422429 - RNA, 32 nt, Human
gagaccagccuggccaacauggcggaacccca

SEQ ID NO: 422430 - RNA, 32 nt, Human
gagaccagccuggccaacauggcggaacccug

SEQ ID NO: 422431 - RNA, 32 nt, Human
gagaccagccuggccaacauggugagacccca

SEQ ID NO: 422432 - RNA, 32 nt, Human
gagaccagccuggccaacauggugagacccug

SEQ ID NO: 422433 - RNA, 32 nt, Human
gagaccagccuggccaacaugguggaacccaa

SEQ ID NO: 422434 - RNA, 32 nt, Human
gagaccagccuggccaacauggugugagaccc

SEQ ID NO: 422435 - RNA, 32 nt, Human
gagaccagccuggccaccauggugagaccccg

SEQ ID NO: 422436 - RNA, 32 nt, Human
gagaccagccuggccagcauggugagaccccg

SEQ ID NO: 422437 - RNA, 32 nt, Human
gagaccagccugggcaaaacagugggaccccc

SEQ ID NO: 422438 - RNA, 32 nt, Human
gagaccagccugggcaacaaagugagaccccc

SEQ ID NO: 422439 - RNA, 32 nt, Human
gagaccagccugggcaacaaagugagacucca

SEQ ID NO: 422440 - RNA, 32 nt, Human
gagaccagccugggcaacacagcgagaacuug

SEQ ID NO: 422441 - RNA, 32 nt, Human
gagaccagccugggcaacacagcgagaucucu

SEQ ID NO: 422442 - RNA, 32 nt, Human
gagaccagccugggcaacacaggaagaccccg

SEQ ID NO: 422443 - RNA, 32 nt, Human
gagaccagccugggcaacacagggagaccccg

SEQ ID NO: 422444 - RNA, 32 nt, Human
gagaccagccugggcaacacagggagacgcuc

SEQ ID NO: 422445 - RNA, 32 nt, Human
gagaccagccugggcaacacagggagacucug

SEQ ID NO: 422446 - RNA, 32 nt, Human
gagaccagccugggcaacacagugagaacccu

SEQ ID NO: 422447 - RNA, 32 nt, Human
gagaccagccugggcaacagagugagacucug

SEQ ID NO: 422448 - RNA, 32 nt, Human
gagaccagccugggcaacaggguaagguccug

SEQ ID NO: 422449 - RNA, 32 nt, Human
gagaccagccugggcaacauagagagacccug

SEQ ID NO: 422450 - RNA, 32 nt, Human
gagaccagccugggcaacauagagagaccucu

SEQ ID NO: 422451 - RNA, 32 nt, Human
gagaccagccugggcaacauagcaagaccccc

SEQ ID NO: 422452 - RNA, 32 nt, Human
gagaccagccugggcaacauagcaagaccccg

SEQ ID NO: 422453 - RNA, 32 nt, Human
gagaccagccugggcaacauagcaagacccug

SEQ ID NO: 422454 - RNA, 32 nt, Human
gagaccagccugggcaacauagcaagacucug

SEQ ID NO: 422455 - RNA, 32 nt, Human
gagaccagccugggcaacauagcaagaucccu

SEQ ID NO: 422456 - RNA, 32 nt, Human
gagaccagccugggcaacauagcgagacccca

SEQ ID NO: 422457 - RNA, 32 nt, Human
gagaccagccugggcaacauagcgagaccuua

SEQ ID NO: 422458 - RNA, 32 nt, Human
gagaccagccugggcaacauagggaggccccg

SEQ ID NO: 422459 - RNA, 32 nt, Human
gagaccagccugggcaacauaguaagaccuca

SEQ ID NO: 422460 - RNA, 32 nt, Human
gagaccagccugggcaacauaguaagacgcug

SEQ ID NO: 422461 - RNA, 32 nt, Human
gagaccagccugggcaacauagugagacccca

SEQ ID NO: 422462 - RNA, 32 nt, Human
gagaccagccugggcaacauagugagaccccc

SEQ ID NO: 422463 - RNA, 32 nt, Human
gagaccagccugggcaacauagugagaccuca

SEQ ID NO: 422464 - RNA, 32 nt, Human
gagaccagccugggcaacauagugagacucug

SEQ ID NO: 422465 - RNA, 32 nt, Human
gagaccagccugggcaacauagugagacuguc

SEQ ID NO: 422466 - RNA, 32 nt, Human
gagaccagccugggcaacauagugagauccca

SEQ ID NO: 422467 - RNA, 32 nt, Human
gagaccagccugggcaacauagugaggccccu

SEQ ID NO: 422468 - RNA, 32 nt, Human
gagaccagccugggcaacauagugagugagac

SEQ ID NO: 422469 - RNA, 32 nt, Human
gagaccagccugggcaacauaugagaaacccg

SEQ ID NO: 422470 - RNA, 32 nt, Human
gagaccagccugggcaacauaugggacacccc

SEQ ID NO: 422471 - RNA, 32 nt, Human
gagaccagccugggcaacaucaggagauccuu

SEQ ID NO: 422472 - RNA, 32 nt, Human
gagaccagccugggcaacaucaugagacguca

SEQ ID NO: 422473 - RNA, 32 nt, Human
gagaccagccugggcaacaucgggagacccca

SEQ ID NO: 422474 - RNA, 32 nt, Human
gagaccagccugggcaacauggagaaaccccg

SEQ ID NO: 422475 - RNA, 32 nt, Human
gagaccagccugggcaacauggagagaccccu

SEQ ID NO: 422476 - RNA, 32 nt, Human
gagaccagccugggcaacauggcaagacccca

SEQ ID NO: 422477 - RNA, 32 nt, Human
gagaccagccugggcaacauggcgagacccug

SEQ ID NO: 422478 - RNA, 32 nt, Human
gagaccagccugggcaacauggcgagauccug

SEQ ID NO: 422479 - RNA, 32 nt, Human
gagaccagccugggcaacauggcgaggccucu

SEQ ID NO: 422480 - RNA, 32 nt, Human
gagaccagccugggcaacauggggagacccag

SEQ ID NO: 422481 - RNA, 32 nt, Human
gagaccagccugggcaacauggugagaccaau

SEQ ID NO: 422482 - RNA, 32 nt, Human
gagaccagccugggcaacauggugagaccccg

SEQ ID NO: 422483 - RNA, 32 nt, Human
gagaccagccugggcaaccuaaugagaguucc

SEQ ID NO: 422484 - RNA, 32 nt, Human
gagaccagccugggcaacgcagugagagaccc

SEQ ID NO: 422485 - RNA, 32 nt, Human
gagaccagccugggcaacguagucagacccca

SEQ ID NO: 422486 - RNA, 32 nt, Human
gagaccagccugggcaacguauugagaccaug

SEQ ID NO: 422487 - RNA, 32 nt, Human
gagaccagccugggcaagauggcaagaccuug

SEQ ID NO: 422488 - RNA, 32 nt, Human
gagaccagccugggcaauauagcaagaccccu

SEQ ID NO: 422489 - RNA, 32 nt, Human
gagaccagccugggcaauauagcgagacuuca

SEQ ID NO: 422490 - RNA, 32 nt, Human
gagaccagccugggcaauauagugagaccucu

SEQ ID NO: 422491 - RNA, 32 nt, Human
gagaccagccugggcaauaucgugagacccca

SEQ ID NO: 422492 - RNA, 32 nt, Human
gagaccagccugggcaauauggugagacucca

SEQ ID NO: 422493 - RNA, 32 nt, Human
gagaccagccugggcagcauagcaagacacau

SEQ ID NO: 422494 - RNA, 32 nt, Human
gagaccagccugggcagcauagcaagacccca

SEQ ID NO: 422495 - RNA, 32 nt, Human
gagaccagccugggcagcauagcaagaucccc

SEQ ID NO: 422496 - RNA, 32 nt, Human
gagaccagccugggcaucguagugagacucca

SEQ ID NO: 422497 - RNA, 32 nt, Human
gagaccagccugggcgauauagugaggcccca

SEQ ID NO: 422498 - RNA, 32 nt, Human
gagaccagccugggcuacauagugagaccaca

SEQ ID NO: 422499 - RNA, 32 nt, Human
gagaccagccuggggaacauagugagacccuu

SEQ ID NO: 422500 - RNA, 32 nt, Human
gagaccagccuggggaccauagcgagaccgcu

SEQ ID NO: 422501 - RNA, 32 nt, Human
gagaccagccuggguaacauagcaagacucug

SEQ ID NO: 422502 - RNA, 32 nt, Human
gagaccagccuggguaacauagcuagaccaca

SEQ ID NO: 422503 - RNA, 32 nt, Human
gagaccagccuggguaacauagugagacccua

SEQ ID NO: 422504 - RNA, 32 nt, Human
gagaccagccuggguaacauggggagauccua

SEQ ID NO: 422505 - RNA, 32 nt, Human
gagaccagccugggugacacagcaagacccca

SEQ ID NO: 422506 - RNA, 32 nt, Human
gagaccagccugguaaaauagugagaccucau

SEQ ID NO: 422507 - RNA, 20 nt, Human
gagaccagccugguaccagg

SEQ ID NO: 422508 - RNA, 23 nt, Human
gagaccagccuggugccuuggca

SEQ ID NO: 422509 - RNA, 32 nt, Human
gagaccagcuacccacagcaaccaaagagacu

SEQ ID NO: 422510 - RNA, 23 nt, Human
gagaccagcucuccagccuggca

SEQ ID NO: 422511 - RNA, 32 nt, Human
gagaccagcuuggugaaacccugucucuacua

SEQ ID NO: 422512 - RNA, 32 nt, Human
gagaccaggaaaggaagaaaggcagcuucacu

SEQ ID NO: 422513 - RNA, 32 nt, Human
gagaccaggaaguugaggcugcaaugagccgu

SEQ ID NO: 422514 - RNA, 32 nt, Human
gagaccaggagguugaggcugcagugagccgu

SEQ ID NO: 422515 - RNA, 32 nt, Human
gagaccaggagucagacuguaggacgaccucg

SEQ ID NO: 422516 - RNA, 32 nt, Human
gagaccaggaguucaagaccagccugggcaac

SEQ ID NO: 422517 - RNA, 32 nt, Human
gagaccaggaguucaagaccagccugggcaau

SEQ ID NO: 422518 - RNA, 23 nt, Human
gagaccaggaguuccaaaccagc

SEQ ID NO: 422519 - RNA, 32 nt, Human
gagaccaggaguucgagaccagccuggccaac

SEQ ID NO: 422520 - RNA, 32 nt, Human
gagaccaggaguucgagaccagccugggcagc

SEQ ID NO: 422521 - RNA, 32 nt, Human
gagaccaggauucaugcuggucuggaacaaug

SEQ ID NO: 422522 - RNA, 32 nt, Human
gagaccaggcagccauggccacugccuuccuc

SEQ ID NO: 422523 - RNA, 32 nt, Human
gagaccaggccaugggcccucacggagaggaa

SEQ ID NO: 422524 - RNA, 25 nt, Human
gagaccaggcuggcuggauccagca

SEQ ID NO: 422525 - RNA, 24 nt, Human
gagaccaggcuuggcugcgggaga

SEQ ID NO: 422526 - RNA, 32 nt, Human
gagaccaggucagacacuaccugcuggcugcc

SEQ ID NO: 422527 - RNA, 32 nt, Human
gagaccagugugaagacucacccuggaagaga

SEQ ID NO: 422528 - RNA, 32 nt, Human
gagaccagugugaggacucacccuggaagaga

SEQ ID NO: 422529 - RNA, 32 nt, Human
gagaccauaccacugcauuccagccuggguga

SEQ ID NO: 422530 - RNA, 29 nt, Human
gagaccaugaagagcugcggccgcccagg

SEQ ID NO: 422531 - RNA, 32 nt, Human
gagaccaugagaaggagaguucagggguccca

SEQ ID NO: 422532 - RNA, 32 nt, Human
gagaccaugccacugcacuccagccugggcaa

SEQ ID NO: 422533 - RNA, 32 nt, Human
gagaccaugccacugcacuccggccuggguga

SEQ ID NO: 422534 - RNA, 32 nt, Human
gagaccaugccauugcacuccagccugggcga

SEQ ID NO: 422535 - RNA, 32 nt, Human
gagaccaugccauuggacuccagccugggcaa

SEQ ID NO: 422536 - RNA, 32 nt, Human
gagaccauggucuguagaccccuucccgauuc

SEQ ID NO: 422537 - RNA, 19 nt, Human
gagaccauguugugccagg

SEQ ID NO: 422538 - RNA, 32 nt, Human
gagacccaaacagugggggcacauguacugca

SEQ ID NO: 422539 - RNA, 32 nt, Human
gagacccaaacccucuuagcagucuucagagu

SEQ ID NO: 422540 - RNA, 32 nt, Human
gagacccaagucaucaugaaaaaggcccaagu

SEQ ID NO: 422541 - RNA, 21 nt, Human
gagacccagaagucuucaaga

SEQ ID NO: 422542 - RNA, 32 nt, Human
gagacccagcacucugguucucucucugccug

SEQ ID NO: 422543 - RNA, 32 nt, Human
gagacccagcagagggaggcagaagggccuuc

SEQ ID NO: 422544 - RNA, 32 nt, Human
gagacccagccaagugccuuuuccucagcacu

SEQ ID NO: 422545 - RNA, 32 nt, Human
gagacccagccgcuggcucccagccuggcuga

SEQ ID NO: 422546 - RNA, 32 nt, Human
gagacccagcuuuugagagacagggugugggc

SEQ ID NO: 422547 - RNA, 32 nt, Human
gagacccaggaugaagggaugcagugagguca

SEQ ID NO: 422548 - RNA, 32 nt, Human
gagacccauccagccaagcugguggacaaccu

SEQ ID NO: 422549 - RNA, 32 nt, Human
gagaccccaaagacucuggaggucaucuggcg

SEQ ID NO: 422550 - RNA, 19 nt, Human
gagaccccagaagguggau

SEQ ID NO: 422551 - RNA, 32 nt, Human
gagaccccagcacccccuugcucacucucuug

SEQ ID NO: 422552 - RNA, 32 nt, Human
gagaccccagcaccuugagcacacaggagcca

SEQ ID NO: 422553 - RNA, 32 nt, Human
gagaccccagcagaggaggacaguggcucuga

SEQ ID NO: 422554 - RNA, 32 nt, Human
gagaccccaucucaaaaacaaaacaccaaaca

SEQ ID NO: 422555 - RNA, 32 nt, Human
gagaccccaucucuaagaaaaagaaaaagaaa

SEQ ID NO: 422556 - RNA, 20 nt, Human
gagaccccaucucuacaaaa

SEQ ID NO: 422557 - RNA, 18 nt, Human
gagaccccaucucuacua

SEQ ID NO: 422558 - RNA, 32 nt, Human
gagaccccaugccaccccaccauggugagugc

SEQ ID NO: 422559 - RNA, 32 nt, Human
gagacccccacaguucucaauccagggaaagg

SEQ ID NO: 422560 - RNA, 32 nt, Human
gagacccccacccucccuuucccggucugcua

SEQ ID NO: 422561 - RNA, 22 nt, Human
gagacccccagggcagugggug

SEQ ID NO: 422562 - RNA, 24 nt, Human
gagacccccgugggcacgugucca

SEQ ID NO: 422563 - RNA, 32 nt, Human
gagacccccucagaccagcacagagaccuguc

SEQ ID NO: 422564 - RNA, 32 nt, Human
gagaccccggagccucugcuucuccuacacug

SEQ ID NO: 422565 - RNA, 26 nt, Human
gagaccccuuggacaaacagauuuuu

SEQ ID NO: 422566 - RNA, 32 nt, Human
gagacccgcuuugcgcccagacugagccagag

SEQ ID NO: 422567 - RNA, 32 nt, Human
gagacccggaagcagauuacguggagugacgg

SEQ ID NO: 422568 - RNA, 26 nt, Human
gagacccggaccugguccgcugggga

SEQ ID NO: 422569 - RNA, 32 nt, Human
gagacccgggagccacccgccgggccccuuca

SEQ ID NO: 422570 - RNA, 32 nt, Human
gagacccuccccaacacagugagaccccagcc

SEQ ID NO: 422571 - RNA, 32 nt, Human
gagacccuccuccucagacugcuggagcaaca

SEQ ID NO: 422572 - RNA, 20 nt, Human
gagacccucgggccugggga

SEQ ID NO: 422573 - RNA, 32 nt, Human
gagacccugaagaugcuuuuggacaguggucu

SEQ ID NO: 422574 - RNA, 21 nt, Human
gagacccugagagcccuggga

SEQ ID NO: 422575 - RNA, 32 nt, Human
gagacccugaggccucccaccuccccaaggcc

SEQ ID NO: 422576 - RNA, 32 nt, Human
gagacccugcaauggccaccucuuuaaaaggg

SEQ ID NO: 422577 - RNA, 32 nt, Human
gagacccugcagcugagggagcaucauggcag

SEQ ID NO: 422578 - RNA, 32 nt, Human
gagacccugccacccauuccaucuccauccaa

SEQ ID NO: 422579 - RNA, 32 nt, Human
gagacccugcccagagguaaaggaggcagggu

SEQ ID NO: 422580 - RNA, 32 nt, Human
gagacccuggaaguggagguggcugugugcug

SEQ ID NO: 422581 - RNA, 32 nt, Human
gagacccuggcuuggaaagugaacuugcagcc

SEQ ID NO: 422582 - RNA, 32 nt, Human
gagacccugggagcuguggcugucuucugugg

SEQ ID NO: 422583 - RNA, 32 nt, Human
gagacccugugcucccccugcccuggguggag

SEQ ID NO: 422584 - RNA, 32 nt, Human
gagacccuguguauuucagagcuggauacugc

SEQ ID NO: 422585 - RNA, 32 nt, Human
gagaccgaaguccgcagaaccugccugugucc

SEQ ID NO: 422586 - RNA, 32 nt, Human
gagaccgacggccgcuggagugcacuggcaug

SEQ ID NO: 422587 - RNA, 32 nt, Human
gagaccgacucaggcuguccucaggccgcgug

SEQ ID NO: 422588 - RNA, 32 nt, Human
gagaccgacuucuuucucuuuacccucauugg

SEQ ID NO: 422589 - RNA, 32 nt, Human
gagaccgagccacuguacuccagccuagguga

SEQ ID NO: 422590 - RNA, 32 nt, Human
gagaccgaggagggagagucucccagggagca

SEQ ID NO: 422591 - RNA, 32 nt, Human
gagaccgaggcagguggaucaccugaggucag

SEQ ID NO: 422592 - RNA, 32 nt, Human
gagaccgaggcagguggaucaccugggucggg

SEQ ID NO: 422593 - RNA, 23 nt, Human
gagaccgaggcaugagagucacu

SEQ ID NO: 422594 - RNA, 32 nt, Human
gagaccgaggcggguggcucaccugaggucgg

SEQ ID NO: 422595 - RNA, 32 nt, Human
gagaccgcaccacugcacuccagccugggcga

SEQ ID NO: 422596 - RNA, 32 nt, Human
gagaccgcagggcuuuggccugggcagcuucc

SEQ ID NO: 422597 - RNA, 32 nt, Human
gagaccgcgccacugcacuccagccugggcaa

SEQ ID NO: 422598 - RNA, 32 nt, Human
gagaccgcggcgucuccagccucgguaccaug

SEQ ID NO: 422599 - RNA, 32 nt, Human
gagaccggagucuugcucuugucgccuccuga

SEQ ID NO: 422600 - RNA, 32 nt, Human
gagaccggccuugucugcugggcacgggucuu

SEQ ID NO: 422601 - RNA, 16 nt, Human
gagaccggcucuggga

SEQ ID NO: 422602 - RNA, 32 nt, Human
gagaccgggaggaucacagagccagcauguua

SEQ ID NO: 422603 - RNA, 22 nt, Human
gagaccgggcuucaccauguug

SEQ ID NO: 422604 - RNA, 32 nt, Human
gagaccggugcuggugcagguccuugguaugc

SEQ ID NO: 422605 - RNA, 22 nt, Human
gagaccgguuuucaccacguug

SEQ ID NO: 422606 - RNA, 32 nt, Human
gagaccguaagaaccucuuagcuuugugcguu

SEQ ID NO: 422607 - RNA, 32 nt, Human
gagaccgugccacugcacuccagccuggcaac

SEQ ID NO: 422608 - RNA, 32 nt, Human
gagaccgugccacugcacuccagccugggcaa

SEQ ID NO: 422609 - RNA, 32 nt, Human
gagaccgugggaugugggugggaucugggauu

SEQ ID NO: 422610 - RNA, 32 nt, Human
gagaccguguccauggggcgugcaguggaggc

SEQ ID NO: 422611 - RNA, 32 nt, Human
gagaccguguucaugcaacacagcauuauuuc

SEQ ID NO: 422612 - RNA, 32 nt, Human
gagaccguguucccaggagcacugacugcagu

SEQ ID NO: 422613 - RNA, 32 nt, Human
gagaccuacaaggacaaguuugucaucaucug

SEQ ID NO: 422614 - RNA, 32 nt, Human
gagaccuaccggcaagcaaaggagcgggagga

SEQ ID NO: 422615 - RNA, 32 nt, Human
gagaccuaccugcuggagaagucgcgggccau

SEQ ID NO: 422616 - RNA, 32 nt, Human
gagaccuacuaaaaaugggaaucaagucuugg

SEQ ID NO: 422617 - RNA, 32 nt, Human
gagaccuagcacaggaggaagagaugggcagg

SEQ ID NO: 422618 - RNA, 32 nt, Human
gagaccuaggagguggucuuguggugguacau

SEQ ID NO: 422619 - RNA, 32 nt, Human
gagaccuagucucacucuguugcccaggcugg

SEQ ID NO: 422620 - RNA, 32 nt, Human
gagaccucaguucugugugucucuagaggucc

SEQ ID NO: 422621 - RNA, 32 nt, Human
gagaccuccagcaaggaugaugucaccauaac

SEQ ID NO: 422622 - RNA, 32 nt, Human
gagaccuccgccucugcacuccagccugggug

SEQ ID NO: 422623 - RNA, 32 nt, Human
gagaccuccugccgggcaggucacugugcuga

SEQ ID NO: 422624 - RNA, 32 nt, Human
gagaccucuaauuuuucuuccucuccagccag

SEQ ID NO: 422625 - RNA, 32 nt, Human
gagaccucuugucucuguggccaaccucugcu

SEQ ID NO: 422626 - RNA, 32 nt, Human
gagaccugacagagucucagucaugcugcaac

SEQ ID NO: 422627 - RNA, 32 nt, Human
gagaccugagaggcaccaggcccagccguggc

SEQ ID NO: 422628 - RNA, 20 nt, Human
gagaccugaggaggaggcag

SEQ ID NO: 422629 - RNA, 32 nt, Human
gagaccugaggccagacggaacuacaacaugu

SEQ ID NO: 422630 - RNA, 32 nt, Human
gagaccugcagagucaaccaagcacagguuag

SEQ ID NO: 422631 - RNA, 32 nt, Human
gagaccugcaggaaaucggggagugagaccug

SEQ ID NO: 422632 - RNA, 32 nt, Human
gagaccugcaggaggcaagggcugcaacagac

SEQ ID NO: 422633 - RNA, 32 nt, Human
gagaccugcccucucugcgcugaggcccagcc

SEQ ID NO: 422634 - RNA, 24 nt, Human
gagaccugcgacaaagacagguua

SEQ ID NO: 422635 - RNA, 32 nt, Human
gagaccuggccuagugacagagccaggauuca

SEQ ID NO: 422636 - RNA, 29 nt, Human
gagaccuggcugcugugucccgcggcuug

SEQ ID NO: 422637 - RNA, 32 nt, Human
gagaccugggagcccucgggaaaccucccccg

SEQ ID NO: 422638 - RNA, 32 nt, Human
gagaccugggaggaagcuggagaaaagaugcc

SEQ ID NO: 422639 - RNA, 32 nt, Human
gagaccugggcaggaauggcugcucuaggguc

SEQ ID NO: 422640 - RNA, 32 nt, Human
gagaccuggggcugccucacccucucuccaga

SEQ ID NO: 422641 - RNA, 32 nt, Human
gagaccuggugggggcacacagcugcuauaua

SEQ ID NO: 422642 - RNA, 32 nt, Human
gagaccugucaucugcaucuggucccuccccc

SEQ ID NO: 422643 - RNA, 32 nt, Human
gagaccugugugaacuauugagaagaucggaa

SEQ ID NO: 422644 - RNA, 32 nt, Human
gagaccuugacagaugccuggaggucagaaau

SEQ ID NO: 422645 - RNA, 31 nt, Human
gagaccuugcuuucuguuucacugggaaaca

SEQ ID NO: 422646 - RNA, 32 nt, Human
gagaccuuuucccagcuggagcccugucauuc

SEQ ID NO: 422647 - RNA, 24 nt, Human
gagacgaaaagcaccaacaaauga

SEQ ID NO: 422648 - RNA, 32 nt, Human
gagacgaagcaguucuggagugccugaacggc

SEQ ID NO: 422649 - RNA, 31 nt, Human
gagacgaaggagagagagcugaggguggagg

SEQ ID NO: 422650 - RNA, 32 nt, Human
gagacgacaccacugcacuccagccuggguga

SEQ ID NO: 422651 - RNA, 18 nt, Human
gagacgagcccggggcgg

SEQ ID NO: 422652 - RNA, 32 nt, Human
gagacgaggcaggcacagcugccagagaccau

SEQ ID NO: 422653 - RNA, 22 nt, Human
gagacgaggcuucaccauguug

SEQ ID NO: 422654 - RNA, 22 nt, Human
gagacgaggucccaccauguug

SEQ ID NO: 422655 - RNA, 23 nt, Human
gagacgagguuucaccaucuugg

SEQ ID NO: 422656 - RNA, 22 nt, Human
gagacgagguuucaccauguug

SEQ ID NO: 422657 - RNA, 23 nt, Human
gagacgagguuucaccauguugg

SEQ ID NO: 422658 - RNA, 21 nt, Human
gagacgagguuucaccguguu

SEQ ID NO: 422659 - RNA, 23 nt, Human
gagacgagguuucacuguguugg

SEQ ID NO: 422660 - RNA, 22 nt, Human
gagacgagguuucgccauguug

SEQ ID NO: 422661 - RNA, 22 nt, Human
gagacgagguuuugccauguug

SEQ ID NO: 422662 - RNA, 32 nt, Human
gagacgcacacagcugagcacuuagcaggcac

SEQ ID NO: 422663 - RNA, 32 nt, Human
gagacgcagcacucccaugucugccgguuccc

SEQ ID NO: 422664 - RNA, 32 nt, Human
gagacgcagcagccuguguccuccagggccuc

SEQ ID NO: 422665 - RNA, 32 nt, Human
gagacgcaggagguggagccggccgggugcuc

SEQ ID NO: 422666 - RNA, 32 nt, Human
gagacgcaggguggcuggaggaagugagaggu

SEQ ID NO: 422667 - RNA, 22 nt, Human
gagacgcaguuucaccguguua

SEQ ID NO: 422668 - RNA, 32 nt, Human
gagacgccaaaagagaagauacagaggguggg

SEQ ID NO: 422669 - RNA, 32 nt, Human
gagacgccaggcugggauuuccgcucgaucug

SEQ ID NO: 422670 - RNA, 32 nt, Human
gagacgcccuggaacgucuguguagccucagu

SEQ ID NO: 422671 - RNA, 32 nt, Human
gagacgccgggcaggcagaagcagcagguacc

SEQ ID NO: 422672 - RNA, 32 nt, Human
gagacgcugcauuuccccgccugcugcagcuc

SEQ ID NO: 422673 - RNA, 32 nt, Human
gagacgcugcuccggcaggugcagccccggaa

SEQ ID NO: 422674 - RNA, 32 nt, Human
gagacgcuguuugugggagcacugggcucaug

SEQ ID NO: 422675 - RNA, 32 nt, Human
gagacggaagaggagacacagacacaaagcag

SEQ ID NO: 422676 - RNA, 32 nt, Human
gagacggacagagaggaggaugacuuccuuuu

SEQ ID NO: 422677 - RNA, 32 nt, Human
gagacggacagcacccuccucaucuggcaggu

SEQ ID NO: 422678 - RNA, 32 nt, Human
gagacggacuccuguucaccuaggugaggugu

SEQ ID NO: 422679 - RNA, 32 nt, Human
gagacggagacucacucuguugcccagacugg

SEQ ID NO: 422680 - RNA, 32 nt, Human
gagacggagauucacuuuuguugcccaggcug

SEQ ID NO: 422681 - RNA, 32 nt, Human
gagacggagcccuccaccccucucacacacuc

SEQ ID NO: 422682 - RNA, 20 nt, Human
gagacggagcuugcagugag

SEQ ID NO: 422683 - RNA, 32 nt, Human
gagacggaggaaagguggcagccagauuacuu

SEQ ID NO: 422684 - RNA, 32 nt, Human
gagacggaggaaggucugaggagcagcuucag

SEQ ID NO: 422685 - RNA, 32 nt, Human
gagacggagucucacucuugucacucaggcug

SEQ ID NO: 422686 - RNA, 20 nt, Human
gagacggagucucgcgcugu

SEQ ID NO: 422687 - RNA, 20 nt, Human
gagacggagucucgcucugu

SEQ ID NO: 422688 - RNA, 32 nt, Human
gagacggagucuggcucuguccgccaggcugg

SEQ ID NO: 422689 - RNA, 20 nt, Human
gagacggagucuuacucugu

SEQ ID NO: 422690 - RNA, 19 nt, Human
gagacggagucuugcucug

SEQ ID NO: 422691 - RNA, 20 nt, Human
gagacggagucuugcucugu

SEQ ID NO: 422692 - RNA, 32 nt, Human
gagacggaguugcccaggcuggagugcagcgc

SEQ ID NO: 422693 - RNA, 22 nt, Human
gagacggaguuucaccauguua

SEQ ID NO: 422694 - RNA, 22 nt, Human
gagacggaguuucaccauguug

SEQ ID NO: 422695 - RNA, 32 nt, Human
gagacggaguuucacucuuguugcccaggcug

SEQ ID NO: 422696 - RNA, 32 nt, Human
gagacggaguuucacuguuguugcccaggcug

SEQ ID NO: 422697 - RNA, 32 nt, Human
gagacggaguuucacuuuuguugcccaggcug

SEQ ID NO: 422698 - RNA, 32 nt, Human
gagacggaguuucccucuuguugcccaggcug

SEQ ID NO: 422699 - RNA, 32 nt, Human
gagacggaguuucccucuuguugcccgggcug

SEQ ID NO: 422700 - RNA, 32 nt, Human
gagacggaguuucgcucuuauugcccaggcug

SEQ ID NO: 422701 - RNA, 32 nt, Human
gagacggaguuucgcucuuguugcccaagcug

SEQ ID NO: 422702 - RNA, 32 nt, Human
gagacggaguuucgcucuuguugcccaggcug

SEQ ID NO: 422703 - RNA, 32 nt, Human
gagacggaguuucgcuguuguugcccaggcug

SEQ ID NO: 422704 - RNA, 32 nt, Human
gagacggaguuucucucuuguuacccaggcug

SEQ ID NO: 422705 - RNA, 32 nt, Human
gagacggaguuuugcucuuguugcccaggcug

SEQ ID NO: 422706 - RNA, 32 nt, Human
gagacggaguuuugcuuuuauugcccaggcug

SEQ ID NO: 422707 - RNA, 32 nt, Human
gagacggaguuuuguucuuguugcccaggcug

SEQ ID NO: 422708 - RNA, 22 nt, Human
gagacggcauuucaccauguug

SEQ ID NO: 422709 - RNA, 32 nt, Human
gagacggccacgaagagaggaggcagugagca

SEQ ID NO: 422710 - RNA, 22 nt, Human
gagacggcccuucucucuccuc

SEQ ID NO: 422711 - RNA, 32 nt, Human
gagacggccuccugcccugcgcagccaguccc

SEQ ID NO: 422712 - RNA, 22 nt, Human
gagacggcguuucaccauguug

SEQ ID NO: 422713 - RNA, 32 nt, Human
gagacggcuccucagaugcucagcuaagccua

SEQ ID NO: 422714 - RNA, 32 nt, Human
gagacgggacucaggucaucaaaaugaaagcc

SEQ ID NO: 422715 - RNA, 32 nt, Human
gagacgggagagagaagaagaguggguuugaa

SEQ ID NO: 422716 - RNA, 32 nt, Human
gagacgggagagaggagagagaaagagagaga

SEQ ID NO: 422717 - RNA, 32 nt, Human
gagacgggagucuuacuuuguugcccaggcug

SEQ ID NO: 422718 - RNA, 22 nt, Human
gagacgggauucuaccauguug

SEQ ID NO: 422719 - RNA, 22 nt, Human
gagacgggauuucaccauguug

SEQ ID NO: 422720 - RNA, 23 nt, Human
gagacgggauuucaccauguugg

SEQ ID NO: 422721 - RNA, 21 nt, Human
gagacgggauuucaccguguu

SEQ ID NO: 422722 - RNA, 22 nt, Human
gagacgggauuucaccguguua

SEQ ID NO: 422723 - RNA, 21 nt, Human
gagacgggauuucacuguguu

SEQ ID NO: 422724 - RNA, 23 nt, Human
gagacgggauuucacuguguugg

SEQ ID NO: 422725 - RNA, 23 nt, Human
gagacgggauuuuaucauguugg

SEQ ID NO: 422726 - RNA, 32 nt, Human
gagacgggcagaucaccugagaucaggaguuu

SEQ ID NO: 422727 - RNA, 22 nt, Human
gagacgggcagaucacgagguc

SEQ ID NO: 422728 - RNA, 32 nt, Human
gagacgggcaggacgcccugccccgcaccagc

SEQ ID NO: 422729 - RNA, 22 nt, Human
gagacgggcggaucacgagguc

SEQ ID NO: 422730 - RNA, 22 nt, Human
gagacggggccucacuauguug

SEQ ID NO: 422731 - RNA, 22 nt, Human
gagacggggcuucaccacguug

SEQ ID NO: 422732 - RNA, 23 nt, Human
gagacggggcuucaccacguugg

SEQ ID NO: 422733 - RNA, 23 nt, Human
gagacggggcuucaccaucuugg

SEQ ID NO: 422734 - RNA, 32 nt, Human
gagacggggcuucaccaucuuggccaggcugg

SEQ ID NO: 422735 - RNA, 23 nt, Human
gagacggggcuucacuauguugg

SEQ ID NO: 422736 - RNA, 23 nt, Human
gagacggggcuucuccauguugg

SEQ ID NO: 422737 - RNA, 22 nt, Human
gagacggggguuucaccauguu

SEQ ID NO: 422738 - RNA, 23 nt, Human
gagacggggguuucaccauguua

SEQ ID NO: 422739 - RNA, 32 nt, Human
gagacggggguuucaccauguuagccaggcug

SEQ ID NO: 422740 - RNA, 23 nt, Human
gagacggggguuucaccauguug

SEQ ID NO: 422741 - RNA, 24 nt, Human
gagacggggguuucaccauguugg

SEQ ID NO: 422742 - RNA, 32 nt, Human
gagacggggguuucaccauguuggccagguug

SEQ ID NO: 422743 - RNA, 32 nt, Human
gagacggggguuucaccauguuggcugggcug

SEQ ID NO: 422744 - RNA, 24 nt, Human
gagacggggguuucacuauguugg

SEQ ID NO: 422745 - RNA, 32 nt, Human
gagacggggguuucacuauguuggcuaggcug

SEQ ID NO: 422746 - RNA, 32 nt, Human
gagacggggguuucgccguguuggccaggaug

SEQ ID NO: 422747 - RNA, 23 nt, Human
gagacgggguaucacuauauugg

SEQ ID NO: 422748 - RNA, 21 nt, Human
gagacggggucucacucuguu

SEQ ID NO: 422749 - RNA, 23 nt, Human
gagacggggucuccccauauugg

SEQ ID NO: 422750 - RNA, 22 nt, Human
gagacggggucucgcaacauug

SEQ ID NO: 422751 - RNA, 23 nt, Human
gagacggggucucgccauguugg

SEQ ID NO: 422752 - RNA, 22 nt, Human
gagacggggucuggcuguguug

SEQ ID NO: 422753 - RNA, 22 nt, Human
gagacggggucuugcuauguug

SEQ ID NO: 422754 - RNA, 22 nt, Human
gagacggggucuugcucuguug

SEQ ID NO: 422755 - RNA, 22 nt, Human
gagacgggguucaccauguugg

SEQ ID NO: 422756 - RNA, 23 nt, Human
gagacgggguuuaaccauguugg

SEQ ID NO: 422757 - RNA, 23 nt, Human
gagacgggguuucaacguguugg

SEQ ID NO: 422758 - RNA, 21 nt, Human
gagacgggguuucacaguguu

SEQ ID NO: 422759 - RNA, 32 nt, Human
gagacgggguuucaccacauugcucaggcugg

SEQ ID NO: 422760 - RNA, 23 nt, Human
gagacgggguuucaccacauugg

SEQ ID NO: 422761 - RNA, 22 nt, Human
gagacgggguuucaccacguug

SEQ ID NO: 422762 - RNA, 23 nt, Human
gagacgggguuucaccacguugg

SEQ ID NO: 422763 - RNA, 21 nt, Human
gagacgggguuucaccagguu

SEQ ID NO: 422764 - RNA, 22 nt, Human
gagacgggguuucaccagguua

SEQ ID NO: 422765 - RNA, 24 nt, Human
gagacgggguuucaccaguguugg

SEQ ID NO: 422766 - RNA, 18 nt, Human
gagacgggguuucaccau

SEQ ID NO: 422767 - RNA, 23 nt, Human
gagacgggguuucaccauacugg

SEQ ID NO: 422768 - RNA, 23 nt, Human
gagacgggguuucaccauauugg

SEQ ID NO: 422769 - RNA, 23 nt, Human
gagacgggguuucaccaucuugg

SEQ ID NO: 422770 - RNA, 19 nt, Human
gagacgggguuucaccaug

SEQ ID NO: 422771 - RNA, 23 nt, Human
gagacgggguuucaccaugcugg

SEQ ID NO: 422772 - RNA, 21 nt, Human
gagacgggguuucaccauguu

SEQ ID NO: 422773 - RNA, 22 nt, Human
gagacgggguuucaccauguua

SEQ ID NO: 422774 - RNA, 22 nt, Human
gagacgggguuucaccauguug

SEQ ID NO: 422775 - RNA, 32 nt, Human
gagacgggguuucaccauguugcucaggcugg

SEQ ID NO: 422776 - RNA, 23 nt, Human
gagacgggguuucaccauguugg

SEQ ID NO: 422777 - RNA, 22 nt, Human
gagacgggguuucaccauuuug

SEQ ID NO: 422778 - RNA, 23 nt, Human
gagacgggguuucaccauuuugg

SEQ ID NO: 422779 - RNA, 21 nt, Human
gagacgggguuucaccguguu

SEQ ID NO: 422780 - RNA, 22 nt, Human
gagacgggguuucaccguguua

SEQ ID NO: 422781 - RNA, 22 nt, Human
gagacgggguuucaccguguug

SEQ ID NO: 422782 - RNA, 23 nt, Human
gagacgggguuucaccguguugg

SEQ ID NO: 422783 - RNA, 23 nt, Human
gagacgggguuucaccuuguugg

SEQ ID NO: 422784 - RNA, 23 nt, Human
gagacgggguuucacuauauugg

SEQ ID NO: 422785 - RNA, 23 nt, Human
gagacgggguuucacuauguugg

SEQ ID NO: 422786 - RNA, 20 nt, Human
gagacgggguuucacucugu

SEQ ID NO: 422787 - RNA, 19 nt, Human
gagacgggguuucacugug

SEQ ID NO: 422788 - RNA, 21 nt, Human
gagacgggguuucacuguguu

SEQ ID NO: 422789 - RNA, 23 nt, Human
gagacgggguuucacuguguugg

SEQ ID NO: 422790 - RNA, 21 nt, Human
gagacgggguuucacuuuguu

SEQ ID NO: 422791 - RNA, 22 nt, Human
gagacgggguuucagcauauug

SEQ ID NO: 422792 - RNA, 23 nt, Human
gagacgggguuucagcauguugg

SEQ ID NO: 422793 - RNA, 23 nt, Human
gagacgggguuucaucauguugg

SEQ ID NO: 422794 - RNA, 21 nt, Human
gagacgggguuucaucguguu

SEQ ID NO: 422795 - RNA, 23 nt, Human
gagacgggguuucauuauguugg

SEQ ID NO: 422796 - RNA, 23 nt, Human
gagacgggguuuccccauguugg

SEQ ID NO: 422797 - RNA, 21 nt, Human
gagacgggguuuccccguguu

SEQ ID NO: 422798 - RNA, 22 nt, Human
gagacgggguuucgccaaguug

SEQ ID NO: 422799 - RNA, 23 nt, Human
gagacgggguuucgccacauugg

SEQ ID NO: 422800 - RNA, 22 nt, Human
gagacgggguuucgccauauug

SEQ ID NO: 422801 - RNA, 22 nt, Human
gagacgggguuucgccauguug

SEQ ID NO: 422802 - RNA, 23 nt, Human
gagacgggguuucgccauguugg

SEQ ID NO: 422803 - RNA, 22 nt, Human
gagacgggguuucgccauuugg

SEQ ID NO: 422804 - RNA, 22 nt, Human
gagacgggguuucgccguguug

SEQ ID NO: 422805 - RNA, 23 nt, Human
gagacgggguuucgcuauuuugg

SEQ ID NO: 422806 - RNA, 23 nt, Human
gagacgggguuucgcucuuguug

SEQ ID NO: 422807 - RNA, 23 nt, Human
gagacgggguuucgcuguguugg

SEQ ID NO: 422808 - RNA, 23 nt, Human
gagacgggguuucggcauguugg

SEQ ID NO: 422809 - RNA, 23 nt, Human
gagacgggguuucuccaugucgg

SEQ ID NO: 422810 - RNA, 21 nt, Human
gagacgggguuucuccauguu

SEQ ID NO: 422811 - RNA, 22 nt, Human
gagacgggguuucuccauguua

SEQ ID NO: 422812 - RNA, 23 nt, Human
gagacgggguuucuccauguugg

SEQ ID NO: 422813 - RNA, 23 nt, Human
gagacgggguuucuccguguugg

SEQ ID NO: 422814 - RNA, 23 nt, Human
gagacgggguuucuccuuguugg

SEQ ID NO: 422815 - RNA, 21 nt, Human
gagacgggguuugaccguguu

SEQ ID NO: 422816 - RNA, 22 nt, Human
gagacgggguuugccaugcugg

SEQ ID NO: 422817 - RNA, 20 nt, Human
gagacgggguuugcuguguu

SEQ ID NO: 422818 - RNA, 21 nt, Human
gagacgggguuuuaccauguu

SEQ ID NO: 422819 - RNA, 22 nt, Human
gagacgggguuuuaccauguua

SEQ ID NO: 422820 - RNA, 23 nt, Human
gagacgggguuuuaccauguugg

SEQ ID NO: 422821 - RNA, 21 nt, Human
gagacgggguuuuaccguguu

SEQ ID NO: 422822 - RNA, 21 nt, Human
gagacgggguuuugccauguu

SEQ ID NO: 422823 - RNA, 22 nt, Human
gagacgggguuuugccauguug

SEQ ID NO: 422824 - RNA, 23 nt, Human
gagacgggguuuugccauguugg

SEQ ID NO: 422825 - RNA, 19 nt, Human
gagacgggucucacuaugu

SEQ ID NO: 422826 - RNA, 22 nt, Human
gagacggguggaucacgagguc

SEQ ID NO: 422827 - RNA, 32 nt, Human
gagacgggugggcggcuggagaccaugcagag

SEQ ID NO: 422828 - RNA, 21 nt, Human
gagacggguuucaccacguug

SEQ ID NO: 422829 - RNA, 22 nt, Human
gagacggguuucaccacguugg

SEQ ID NO: 422830 - RNA, 21 nt, Human
gagacggguuucaccauauug

SEQ ID NO: 422831 - RNA, 21 nt, Human
gagacggguuucaccauguug

SEQ ID NO: 422832 - RNA, 22 nt, Human
gagacggguuucaccauguugg

SEQ ID NO: 422833 - RNA, 21 nt, Human
gagacggguuucaucauguua

SEQ ID NO: 422834 - RNA, 22 nt, Human
gagacggguuuucaccauguug

SEQ ID NO: 422835 - RNA, 32 nt, Human
gagacgguaaagcuggaggugccugagaccag

SEQ ID NO: 422836 - RNA, 32 nt, Human
gagacggucccggaagaaugggacucuguucc

SEQ ID NO: 422837 - RNA, 32 nt, Human
gagacggugauggauaaauugacaacucugua

SEQ ID NO: 422838 - RNA, 32 nt, Human
gagacggugcaaaucugguggaagaugccugc

SEQ ID NO: 422839 - RNA, 32 nt, Human
gagacggugccauugcucuccagccugggcga

SEQ ID NO: 422840 - RNA, 23 nt, Human
gagacggugguuucaccauguug

SEQ ID NO: 422841 - RNA, 24 nt, Human
gagacggugguuucaccauguugg

SEQ ID NO: 422842 - RNA, 32 nt, Human
gagacggugucacugcacuccagccuggguga

SEQ ID NO: 422843 - RNA, 22 nt, Human
gagacgguguuucaccauguug

SEQ ID NO: 422844 - RNA, 32 nt, Human
gagacgguuuggcggugaguccugggccaggc

SEQ ID NO: 422845 - RNA, 32 nt, Human
gagacguccagcucuguccucucuuccucacu

SEQ ID NO: 422846 - RNA, 32 nt, Human
gagacguccaucuggcagccugcguggccguc

SEQ ID NO: 422847 - RNA, 32 nt, Human
gagacgucuucugcagccaccugcuuuccaga

SEQ ID NO: 422848 - RNA, 32 nt, Human
gagacgugaagaggaggaagagugggagaaug

SEQ ID NO: 422849 - RNA, 32 nt, Human
gagacguguccccacugaggugccccacagca

SEQ ID NO: 422850 - RNA, 32 nt, Human
gagacguguuccauuauucugcuggaacaugg

SEQ ID NO: 422851 - RNA, 32 nt, Human
gagacuaaagaaaauuuucaagaggaacauau

SEQ ID NO: 422852 - RNA, 32 nt, Human
gagacuaaaugacuugcccaggguaaaacagu

SEQ ID NO: 422853 - RNA, 27 nt, Human
gagacuaaggcaggagaaucgccugaa

SEQ ID NO: 422854 - RNA, 23 nt, Human
gagacuacaagugugugccacca

SEQ ID NO: 422855 - RNA, 32 nt, Human
gagacuacccuuuagguugaaguuugaccugg

SEQ ID NO: 422856 - RNA, 32 nt, Human
gagacuagaagaggggagcagaaagggaccuu

SEQ ID NO: 422857 - RNA, 32 nt, Human
gagacuagacauuuucugucuccucacuuguc

SEQ ID NO: 422858 - RNA, 32 nt, Human
gagacuagagcauccagggggccaggccccaa

SEQ ID NO: 422859 - RNA, 32 nt, Human
gagacuagagggagugggguugcaguggcugc

SEQ ID NO: 422860 - RNA, 23 nt, Human
gagacuagagguguuuaccacca

SEQ ID NO: 422861 - RNA, 32 nt, Human
gagacuagccugggcaacauaaugagacccca

SEQ ID NO: 422862 - RNA, 32 nt, Human
gagacuagccugggcaacauaccgagacccca

SEQ ID NO: 422863 - RNA, 32 nt, Human
gagacuagccugggcaacauagcgagaccucg

SEQ ID NO: 422864 - RNA, 32 nt, Human
gagacuagccugggcaacauggugagacccca

SEQ ID NO: 422865 - RNA, 32 nt, Human
gagacuagccugggcaacccagugagaccccg

SEQ ID NO: 422866 - RNA, 32 nt, Human
gagacuagccugggcaacgugaugagacuccg

SEQ ID NO: 422867 - RNA, 32 nt, Human
gagacuagccugggcaauaugaugagacccug

SEQ ID NO: 422868 - RNA, 32 nt, Human
gagacuagccuggggcggggcgcggggccaga

SEQ ID NO: 422869 - RNA, 32 nt, Human
gagacuagccugggucccauaguaagacccug

SEQ ID NO: 422870 - RNA, 21 nt, Human
gagacuagcuggaaccaggga

SEQ ID NO: 422871 - RNA, 32 nt, Human
gagacuagcuggaaccagggagguagagguug

SEQ ID NO: 422872 - RNA, 32 nt, Human
gagacuaggaguuugaggcugcagugaacuaa

SEQ ID NO: 422873 - RNA, 32 nt, Human
gagacuagggaguggugaugacugucaacgag

SEQ ID NO: 422874 - RNA, 32 nt, Human
gagacuaugccacugcacuccagccuagguga

SEQ ID NO: 422875 - RNA, 32 nt, Human
gagacuauguuauuuuaaacagucuucuguuu

SEQ ID NO: 422876 - RNA, 32 nt, Human
gagacucaacuccugggaggagagggucucaa

SEQ ID NO: 422877 - RNA, 32 nt, Human
gagacucagaagcagagagugggagguggaug

SEQ ID NO: 422878 - RNA, 32 nt, Human
gagacucagaggcagacccagaaaggggcuca

SEQ ID NO: 422879 - RNA, 32 nt, Human
gagacucagauugucugaauugagcuaucgca

SEQ ID NO: 422880 - RNA, 32 nt, Human
gagacucagcaacgacccauaccucagacccg

SEQ ID NO: 422881 - RNA, 32 nt, Human
gagacucagccucugcuggagaaagccacgcc

SEQ ID NO: 422882 - RNA, 32 nt, Human
gagacucagugcagugggcagggaagacauaa

SEQ ID NO: 422883 - RNA, 32 nt, Human
gagacucauagaggagaagaagaggcaaaagg

SEQ ID NO: 422884 - RNA, 32 nt, Human
gagacucauggacuuggggcucugccuguagg

SEQ ID NO: 422885 - RNA, 32 nt, Human
gagacuccaagaagaagcugcgggaaggacag

SEQ ID NO: 422886 - RNA, 32 nt, Human
gagacuccaagaagcugcgggaaggacagcag

SEQ ID NO: 422887 - RNA, 32 nt, Human
gagacuccaagcugggcugagccagagcagaa

SEQ ID NO: 422888 - RNA, 32 nt, Human
gagacuccagcagagcccugaaguguggacaa

SEQ ID NO: 422889 - RNA, 32 nt, Human
gagacuccaucccaaaaacaaaacaaaacaaa

SEQ ID NO: 422890 - RNA, 32 nt, Human
gagacuccaucucaaaaacaaaacaaauaaac

SEQ ID NO: 422891 - RNA, 32 nt, Human
gagacucccacuguuguuccaguuccaagcau

SEQ ID NO: 422892 - RNA, 32 nt, Human
gagacucccauccucucuucccccucaccaag

SEQ ID NO: 422893 - RNA, 32 nt, Human
gagacuccccaaggaccccauucugccuccuu

SEQ ID NO: 422894 - RNA, 32 nt, Human
gagacuccgucucaaaaacaaacaaacaaaaa

SEQ ID NO: 422895 - RNA, 32 nt, Human
gagacuccuacaggagccaaauuuguaauuua

SEQ ID NO: 422896 - RNA, 17 nt, Human
gagacuccuccugcagu

SEQ ID NO: 422897 - RNA, 32 nt, Human
gagacuccucucccggggaaggcuuucaucag

SEQ ID NO: 422898 - RNA, 32 nt, Human
gagacuccuguugccagaaucagacugcccua

SEQ ID NO: 422899 - RNA, 32 nt, Human
gagacuccuuucucucccgauucuacagucug

SEQ ID NO: 422900 - RNA, 32 nt, Human
gagacucgccuccagccucccaccuccgcccg

SEQ ID NO: 422901 - RNA, 32 nt, Human
gagacucggacaucuuuccaggaacagcguga

SEQ ID NO: 422902 - RNA, 32 nt, Human
gagacucggauggggacauggagaacaaccca

SEQ ID NO: 422903 - RNA, 32 nt, Human
gagacucggucucaaaaacaaaacaaaacaaa

SEQ ID NO: 422904 - RNA, 22 nt, Human
gagacucgguuucaccauguug

SEQ ID NO: 422905 - RNA, 23 nt, Human
gagacucgguuucaccauguugg

SEQ ID NO: 422906 - RNA, 32 nt, Human
gagacucuagggagcuauguaccuucuugcag

SEQ ID NO: 422907 - RNA, 32 nt, Human
gagacucucaugucacaggcgugccuugcugc

SEQ ID NO: 422908 - RNA, 32 nt, Human
gagacucucuaaaaauaaaaauguuagaguga

SEQ ID NO: 422909 - RNA, 32 nt, Human
gagacucucuugaacccaggaggcagagguug

SEQ ID NO: 422910 - RNA, 32 nt, Human
gagacucugaguuuaugaucugugccauaaaa

SEQ ID NO: 422911 - RNA, 32 nt, Human
gagacucugccuggccacugagaacagccaaa

SEQ ID NO: 422912 - RNA, 32 nt, Human
gagacucugggaacuuuuaggggucacucaau

SEQ ID NO: 422913 - RNA, 32 nt, Human
gagacucugggacccaggcagcugccaccuug

SEQ ID NO: 422914 - RNA, 32 nt, Human
gagacucugucucaaaaacaaaacaaaacaga

SEQ ID NO: 422915 - RNA, 32 nt, Human
gagacucugugagggggcuggagcagccuggu

SEQ ID NO: 422916 - RNA, 32 nt, Human
gagacucuugcucugcugaguccccauucccc

SEQ ID NO: 422917 - RNA, 32 nt, Human
gagacugaaaccagaaguuguuauguuuaaaa

SEQ ID NO: 422918 - RNA, 32 nt, Human
gagacugaagauuguuagggcaccuuagaaug

SEQ ID NO: 422919 - RNA, 16 nt, Human
gagacugaagcagaac

SEQ ID NO: 422920 - RNA, 32 nt, Human
gagacugaagucuuuguggaaaccacuguuac

SEQ ID NO: 422921 - RNA, 24 nt, Human
gagacugacucucagagccagaga

SEQ ID NO: 422922 - RNA, 32 nt, Human
gagacugagauacccgugcuccgcucgccucc

SEQ ID NO: 422923 - RNA, 32 nt, Human
gagacugagaugggagaggccugagacggaga

SEQ ID NO: 422924 - RNA, 32 nt, Human
gagacugagaugggaggaucgcuugagaccag

SEQ ID NO: 422925 - RNA, 32 nt, Human
gagacugagcaucuguuccuagcucccuccgg

SEQ ID NO: 422926 - RNA, 32 nt, Human
gagacugagccacugcacuccagccugggcaa

SEQ ID NO: 422927 - RNA, 32 nt, Human
gagacugaggagaaacuguagagaauaauacu

SEQ ID NO: 422928 - RNA, 32 nt, Human
gagacugaggcgaguggaucaccugaggucag

SEQ ID NO: 422929 - RNA, 32 nt, Human
gagacugaggcggaucaccugaggucaggagu

SEQ ID NO: 422930 - RNA, 32 nt, Human
gagacugaggcggguggaucaccugaggucag

SEQ ID NO: 422931 - RNA, 32 nt, Human
gagacugaggcugaggcuggggaacaucgggc

SEQ ID NO: 422932 - RNA, 32 nt, Human
gagacugagguggguggaucaccugaggucag

SEQ ID NO: 422933 - RNA, 32 nt, Human
gagacugagucccuuuuuauacuucaacagac

SEQ ID NO: 422934 - RNA, 32 nt, Human
gagacugcaacaaucugugucccuggaaugcu

SEQ ID NO: 422935 - RNA, 32 nt, Human
gagacugcaccacugcacuucagccuggguga

SEQ ID NO: 422936 - RNA, 32 nt, Human
gagacugcaccauugcauuccagccugggcaa

SEQ ID NO: 422937 - RNA, 32 nt, Human
gagacugcagagugccuucccugaugcugcag

SEQ ID NO: 422938 - RNA, 32 nt, Human
gagacugcagcucagagauuacuccagcaaag

SEQ ID NO: 422939 - RNA, 32 nt, Human
gagacugcaguaagccaagaucaugccacugc

SEQ ID NO: 422940 - RNA, 32 nt, Human
gagacugcagugagccaagauugugccacuac

SEQ ID NO: 422941 - RNA, 32 nt, Human
gagacugcagugagccaugauauugccagccu

SEQ ID NO: 422942 - RNA, 32 nt, Human
gagacugcagugagccgagaucacaccacugc

SEQ ID NO: 422943 - RNA, 32 nt, Human
gagacugcagugagccgagaucgcaccacugc

SEQ ID NO: 422944 - RNA, 32 nt, Human
gagacugcagugagccgagauugugccacugc

SEQ ID NO: 422945 - RNA, 32 nt, Human
gagacugcagugagcuaugaucaugccauugu

SEQ ID NO: 422946 - RNA, 32 nt, Human
gagacugcagugagcugagaucacacuacugc

SEQ ID NO: 422947 - RNA, 32 nt, Human
gagacugcagugagcugagaucgcaccauugc

SEQ ID NO: 422948 - RNA, 32 nt, Human
gagacugcaugcuggagagaaacuugaagaac

SEQ ID NO: 422949 - RNA, 32 nt, Human
gagacugccaugaaguugaucugccucccaga

SEQ ID NO: 422950 - RNA, 32 nt, Human
gagacugcccugcuugguguuuugcaggauga

SEQ ID NO: 422951 - RNA, 32 nt, Human
gagacugccguguccuccgagcacuuuguuuu

SEQ ID NO: 422952 - RNA, 32 nt, Human
gagacugccuuccucuggcacuggcagugacc

SEQ ID NO: 422953 - RNA, 32 nt, Human
gagacugccuugagacagugcuugccuugaga

SEQ ID NO: 422954 - RNA, 32 nt, Human
gagacugcgccaccgcgcuccagccuggguga

SEQ ID NO: 422955 - RNA, 32 nt, Human
gagacugcgccacggcacuccagccugggcga

SEQ ID NO: 422956 - RNA, 32 nt, Human
gagacugcgggaggcaggggaugcaugggugu

SEQ ID NO: 422957 - RNA, 32 nt, Human
gagacugcuauacauuucugugggugggggua

SEQ ID NO: 422958 - RNA, 25 nt, Human
gagacugcucuaccaauagaucuuu

SEQ ID NO: 422959 - RNA, 32 nt, Human
gagacugcuucauggugucuucagaggcagac

SEQ ID NO: 422960 - RNA, 32 nt, Human
gagacuggaacaguuuccauggugcuggagga

SEQ ID NO: 422961 - RNA, 32 nt, Human
gagacuggaagagacagagaucagagggagac

SEQ ID NO: 422962 - RNA, 32 nt, Human
gagacuggaaguuuaaaaauguacaaguccuu

SEQ ID NO: 422963 - RNA, 32 nt, Human
gagacuggacagcucuggaggaacaggccugc

SEQ ID NO: 422964 - RNA, 32 nt, Human
gagacuggagucaggagagagcaggaggcccu

SEQ ID NO: 422965 - RNA, 32 nt, Human
gagacuggagugggacacagugggugaaacug

SEQ ID NO: 422966 - RNA, 32 nt, Human
gagacuggcagcauuuugcuccugccuuagag

SEQ ID NO: 422967 - RNA, 32 nt, Human
gagacuggcgugaacccaggaggcggaccuug

SEQ ID NO: 422968 - RNA, 32 nt, Human
gagacuggcucaauaucgacuucugagaaaug

SEQ ID NO: 422969 - RNA, 32 nt, Human
gagacugggagcagucucuuaaacaaaagcaa

SEQ ID NO: 422970 - RNA, 32 nt, Human
gagacugggaggcagagguugcagugaaccga

SEQ ID NO: 422971 - RNA, 32 nt, Human
gagacugggcaccccugccuccugccucccgc

SEQ ID NO: 422972 - RNA, 32 nt, Human
gagacugggccacugcacuccagccuggauga

SEQ ID NO: 422973 - RNA, 32 nt, Human
gagacugggcuggggcugguaucacacccuca

SEQ ID NO: 422974 - RNA, 24 nt, Human
gagacuggggcugcaaugagcuau

SEQ ID NO: 422975 - RNA, 32 nt, Human
gagacuggggucugggcuguuccagacuucaa

SEQ ID NO: 422976 - RNA, 32 nt, Human
gagacuggggucugggcuguuccggacuucaa

SEQ ID NO: 422977 - RNA, 22 nt, Human
gagacuggguuucaccacguug

SEQ ID NO: 422978 - RNA, 23 nt, Human
gagacuggguuucaccacguugg

SEQ ID NO: 422979 - RNA, 20 nt, Human
gagacuggguuucaccaugu

SEQ ID NO: 422980 - RNA, 22 nt, Human
gagacuggguuucaccauguug

SEQ ID NO: 422981 - RNA, 23 nt, Human
gagacuggguuucaccauguugg

SEQ ID NO: 422982 - RNA, 22 nt, Human
gagacuggguuucaccguguua

SEQ ID NO: 422983 - RNA, 32 nt, Human
gagacuggugcccugcgagcuccaccccaccc

SEQ ID NO: 422984 - RNA, 32 nt, Human
gagacugguggagggugggcugggcaugggau

SEQ ID NO: 422985 - RNA, 32 nt, Human
gagacugguguuugauggauguuuuauacuaa

SEQ ID NO: 422986 - RNA, 32 nt, Human
gagacugguuuugccaagucgcccaggcuggu

SEQ ID NO: 422987 - RNA, 32 nt, Human
gagacuguagugcacuaugaucacgccuguga

SEQ ID NO: 422988 - RNA, 32 nt, Human
gagacugucuauacugagaaccacuguugcua

SEQ ID NO: 422989 - RNA, 32 nt, Human
gagacugucucucggcugcagcccuggugcga

SEQ ID NO: 422990 - RNA, 32 nt, Human
gagacugugcagggaccagugacaacuagggg

SEQ ID NO: 422991 - RNA, 32 nt, Human
gagacugugccacugcacuccagccuggguga

SEQ ID NO: 422992 - RNA, 32 nt, Human
gagacugugccacugcaguccagccuggguga

SEQ ID NO: 422993 - RNA, 32 nt, Human
gagacugugcuacugcacuccagccugggcaa

SEQ ID NO: 422994 - RNA, 32 nt, Human
gagacugugcuucugaacugggauugucuuac

SEQ ID NO: 422995 - RNA, 32 nt, Human
gagacuguggguggagcugccugcugcacuca

SEQ ID NO: 422996 - RNA, 32 nt, Human
gagacugugucauugcacuccagccugggcga

SEQ ID NO: 422997 - RNA, 32 nt, Human
gagacugugucugcuuucugccuccucuucca

SEQ ID NO: 422998 - RNA, 21 nt, Human
gagacuguuggaaccaugaga

SEQ ID NO: 422999 - RNA, 32 nt, Human
gagacuguuuggaaucccgccccacauucucc

SEQ ID NO: 423000 - RNA, 32 nt, Human
gagacuuaaaggacaggaggaggagauggcca

SEQ ID NO: 423001 - RNA, 32 nt, Human
gagacuuaauacugagcaauguuuugaaacaa

SEQ ID NO: 423002 - RNA, 32 nt, Human
gagacuuagcuccauggccaaagacgauggua

SEQ ID NO: 423003 - RNA, 32 nt, Human
gagacuuagggaggguagggggagagugugga

SEQ ID NO: 423004 - RNA, 19 nt, Human
gagacuuaucagaugggac

SEQ ID NO: 423005 - RNA, 32 nt, Human
gagacuuauucacuaucaggaguacagcgugg

SEQ ID NO: 423006 - RNA, 32 nt, Human
gagacuucacugcaccuugacuuguagauuug

SEQ ID NO: 423007 - RNA, 32 nt, Human
gagacuuccuugggguugcaaccuggggaagc

SEQ ID NO: 423008 - RNA, 32 nt, Human
gagacuuccuuuccuugcacuucucuccuauu

SEQ ID NO: 423009 - RNA, 32 nt, Human
gagacuucuacauccaaagcaccaagaggcgu

SEQ ID NO: 423010 - RNA, 32 nt, Human
gagacuucuccaagcugcuucacaagcaaacu

SEQ ID NO: 423011 - RNA, 32 nt, Human
gagacuucugccuccccuccuacccucuggcc

SEQ ID NO: 423012 - RNA, 32 nt, Human
gagacuucuucccauucccaccauuguuccuc

SEQ ID NO: 423013 - RNA, 32 nt, Human
gagacuucuugggccuuccugccugccacccc

SEQ ID NO: 423014 - RNA, 32 nt, Human
gagacuugagccaccaccagucagaggugcaa

SEQ ID NO: 423015 - RNA, 32 nt, Human
gagacuugccugaacccaggaggcagagguug

SEQ ID NO: 423016 - RNA, 32 nt, Human
gagacuuggagcagugggagaccccucucccg

SEQ ID NO: 423017 - RNA, 32 nt, Human
gagacuuggugcucgguauuuuuaauuaugga

SEQ ID NO: 423018 - RNA, 32 nt, Human
gagacuugugccuggaaggaaaaagagguagc

SEQ ID NO: 423019 - RNA, 32 nt, Human
gagacuuuagaggaagaacggaagagaaugca

SEQ ID NO: 423020 - RNA, 32 nt, Human
gagacuuuaggcaagcagcccaaagggguaaa

SEQ ID NO: 423021 - RNA, 32 nt, Human
gagacuuugaguccuugggaggagaaggcccu

SEQ ID NO: 423022 - RNA, 32 nt, Human
gagacuuugagugaaguagccuagaggauucu

SEQ ID NO: 423023 - RNA, 32 nt, Human
gagacuuuggagaccuggaggagcaggagaca

SEQ ID NO: 423024 - RNA, 32 nt, Human
gagacuuuguacaguggccucucuaaaaguac

SEQ ID NO: 423025 - RNA, 32 nt, Human
gagacuuuucgggagaugcagcagcagaugau

SEQ ID NO: 423026 - RNA, 19 nt, Human
gagacuuuuggaagaggau

SEQ ID NO: 423027 - RNA, 32 nt, Human
gagacuuuuggcaaccuguugcugcucuacug

SEQ ID NO: 423028 - RNA, 32 nt, Human
gagagaaaacucagacagggagggcgcagggc

SEQ ID NO: 423029 - RNA, 32 nt, Human
gagagaaaaggggcagcuggaggcagaugagc

SEQ ID NO: 423030 - RNA, 32 nt, Human
gagagaaaauuccuguuccaagagaaaauaag

SEQ ID NO: 423031 - RNA, 32 nt, Human
gagagaaacacacaccuucccuaggacccagc

SEQ ID NO: 423032 - RNA, 32 nt, Human
gagagaaacaccgaaauucagauagcucaggg

SEQ ID NO: 423033 - RNA, 32 nt, Human
gagagaaacagaggagacagagagggagagag

SEQ ID NO: 423034 - RNA, 32 nt, Human
gagagaaaccaugcucucuagcaacauugagc

SEQ ID NO: 423035 - RNA, 21 nt, Human
gagagaaacccaacacaugua

SEQ ID NO: 423036 - RNA, 21 nt, Human
gagagaaacccuacacaugua

SEQ ID NO: 423037 - RNA, 23 nt, Human
gagagaaacuaaacacauacgua

SEQ ID NO: 423038 - RNA, 32 nt, Human
gagagaaacugaggcccagcagagggaggcag

SEQ ID NO: 423039 - RNA, 20 nt, Human
gagagaaacuggacuggaac

SEQ ID NO: 423040 - RNA, 32 nt, Human
gagagaaagagaaagagaaggaaggaaggaga

SEQ ID NO: 423041 - RNA, 32 nt, Human
gagagaaagaggaaaagggaagggggaaaccc

SEQ ID NO: 423042 - RNA, 32 nt, Human
gagagaaagaguuggaccuccuccaguucucu

SEQ ID NO: 423043 - RNA, 32 nt, Human
gagagaaagcaguggcuuucagacacaccaaa

SEQ ID NO: 423044 - RNA, 19 nt, Human
gagagaaagccaggcaggu

SEQ ID NO: 423045 - RNA, 32 nt, Human
gagagaaaguagcacauggaguagcugagguu

SEQ ID NO: 423046 - RNA, 32 nt, Human
gagagaaauaaacauuuagaggauuuaauuag

SEQ ID NO: 423047 - RNA, 18 nt, Human
gagagaaaucuuaguaaa

SEQ ID NO: 423048 - RNA, 18 nt, Human
gagagaaaugacaggagc

SEQ ID NO: 423049 - RNA, 32 nt, Human
gagagaacaaauuuggggcaguaguugaaaac

SEQ ID NO: 423050 - RNA, 32 nt, Human
gagagaacaggaggugaaagaaaagggugagu

SEQ ID NO: 423051 - RNA, 32 nt, Human
gagagaacaguuaucuuaguaccuauggauuu

SEQ ID NO: 423052 - RNA, 32 nt, Human
gagagaacauggcccaggcccuuuccuucccc

SEQ ID NO: 423053 - RNA, 32 nt, Human
gagagaacccuccaggggacaagaugaagggg

SEQ ID NO: 423054 - RNA, 32 nt, Human
gagagaaccugcuuccuuccaucagccauacc

SEQ ID NO: 423055 - RNA, 22 nt, Human
gagagaacgaggaggaaggaga

SEQ ID NO: 423056 - RNA, 32 nt, Human
gagagaacuaugaccugcagcaacucuggaaa

SEQ ID NO: 423057 - RNA, 32 nt, Human
gagagaacugggugaugacaggggaaucugaa

SEQ ID NO: 423058 - RNA, 32 nt, Human
gagagaagaaaagggaaagaagcugaaaaugu

SEQ ID NO: 423059 - RNA, 32 nt, Human
gagagaagaagaggaagaagaggaggcggcgg

SEQ ID NO: 423060 - RNA, 32 nt, Human
gagagaagaccucuuccugaaucacuggacuc

SEQ ID NO: 423061 - RNA, 32 nt, Human
gagagaagacucagcauuugcuuuggaguaag

SEQ ID NO: 423062 - RNA, 19 nt, Human
gagagaagagaagagggag

SEQ ID NO: 423063 - RNA, 32 nt, Human
gagagaagaggaaaagaggaguggccagacuc

SEQ ID NO: 423064 - RNA, 32 nt, Human
gagagaagaggaagucuggguugggaggggcc

SEQ ID NO: 423065 - RNA, 32 nt, Human
gagagaagaggaggagaagggaggggguggcc

SEQ ID NO: 423066 - RNA, 32 nt, Human
gagagaagagggagaggcaggagccggcccaa

SEQ ID NO: 423067 - RNA, 32 nt, Human
gagagaagagggcagagccgugcauggggcug

SEQ ID NO: 423068 - RNA, 32 nt, Human
gagagaagaggggcuggagugcggcuggucug

SEQ ID NO: 423069 - RNA, 32 nt, Human
gagagaagauaacauuuacaaguaaacaguaa

SEQ ID NO: 423070 - RNA, 32 nt, Human
gagagaagauggaagggaagggccagugcaac

SEQ ID NO: 423071 - RNA, 31 nt, Human
gagagaagcacagaaccuggcauucacugga

SEQ ID NO: 423072 - RNA, 32 nt, Human
gagagaagcauggcgcccugcccacccacugc

SEQ ID NO: 423073 - RNA, 32 nt, Human
gagagaagcugcucuccccuccuugaagaagc

SEQ ID NO: 423074 - RNA, 32 nt, Human
gagagaaggaaagaaagccgggagguggaaga

SEQ ID NO: 423075 - RNA, 32 nt, Human
gagagaaggaaaggagagaaggcaggaagaag

SEQ ID NO: 423076 - RNA, 32 nt, Human
gagagaaggaagagucuaggcugagcaacaug

SEQ ID NO: 423077 - RNA, 32 nt, Human
gagagaaggaaggggauaggcagcuuugacag

SEQ ID NO: 423078 - RNA, 32 nt, Human
gagagaaggagaaggaagaaggagaggagaag

SEQ ID NO: 423079 - RNA, 32 nt, Human
gagagaaggagguggggauccgagugcaguga

SEQ ID NO: 423080 - RNA, 32 nt, Human
gagagaaggcgaggacgcugaagaaccagaca

SEQ ID NO: 423081 - RNA, 32 nt, Human
gagagaagggagagaauaaaaugcaauaacga

SEQ ID NO: 423082 - RNA, 20 nt, Human
gagagaagguaaagcuaccu

SEQ ID NO: 423083 - RNA, 32 nt, Human
gagagaaguaugugcagcccccaaugaucagc

SEQ ID NO: 423084 - RNA, 32 nt, Human
gagagaagucgaggaagagagagacgggguca

SEQ ID NO: 423085 - RNA, 32 nt, Human
gagagaaucaccaggauggaacacaggucuug

SEQ ID NO: 423086 - RNA, 32 nt, Human
gagagaauccuacaaaugugaaaaauguggca

SEQ ID NO: 423087 - RNA, 32 nt, Human
gagagaaugaacaccagaauuaggguaaugga

SEQ ID NO: 423088 - RNA, 31 nt, Human
gagagaauggaagagacaaaagaggcuaugu

SEQ ID NO: 423089 - RNA, 32 nt, Human
gagagaauucccauguacacuucaccaaacuu

SEQ ID NO: 423090 - RNA, 32 nt, Human
gagagacacaauauccgcagccuuacaccuua

SEQ ID NO: 423091 - RNA, 32 nt, Human
gagagacacagagagaaggagaaagagggagg

SEQ ID NO: 423092 - RNA, 19 nt, Human
gagagacagaggaggcaga

SEQ ID NO: 423093 - RNA, 32 nt, Human
gagagacagagggagagugugcauacagcagc

SEQ ID NO: 423094 - RNA, 32 nt, Human
gagagacagaggggaagagaggcagagaggga

SEQ ID NO: 423095 - RNA, 32 nt, Human
gagagacagcacaggcagccccacggacgacg

SEQ ID NO: 423096 - RNA, 32 nt, Human
gagagacagcgagaagaagccgcggcuggcua

SEQ ID NO: 423097 - RNA, 32 nt, Human
gagagacaggagagagagggagggagcgagag

SEQ ID NO: 423098 - RNA, 32 nt, Human
gagagacaggagaggaaggagggcaggggcgg

SEQ ID NO: 423099 - RNA, 32 nt, Human
gagagacagggagagucagccuccacauucag

SEQ ID NO: 423100 - RNA, 32 nt, Human
gagagacagggguacgccagaggaagcugggc

SEQ ID NO: 423101 - RNA, 32 nt, Human
gagagacagugagcugcaagacugccucccca

SEQ ID NO: 423102 - RNA, 32 nt, Human
gagagacagugggcugcacccacccaggagug

SEQ ID NO: 423103 - RNA, 32 nt, Human
gagagacauacucugcuacuauguccucaggu

SEQ ID NO: 423104 - RNA, 32 nt, Human
gagagacauugccuccaccucuccuuggaaau

SEQ ID NO: 423105 - RNA, 32 nt, Human
gagagacauuggagagaaaaugacugucuccu

SEQ ID NO: 423106 - RNA, 32 nt, Human
gagagaccagaccauuuuagaaaaagauaaaa

SEQ ID NO: 423107 - RNA, 32 nt, Human
gagagaccagccuggccagcauagugaaaccc

SEQ ID NO: 423108 - RNA, 32 nt, Human
gagagaccagccuucuggugcugcagucagga

SEQ ID NO: 423109 - RNA, 22 nt, Human
gagagaccagcuggcaucugca

SEQ ID NO: 423110 - RNA, 32 nt, Human
gagagacccaggaugaagggaugcagugaggu

SEQ ID NO: 423111 - RNA, 20 nt, Human
gagagaccccagcccuggag

SEQ ID NO: 423112 - RNA, 32 nt, Human
gagagacccuuguggguccaugcuaacaaaga

SEQ ID NO: 423113 - RNA, 32 nt, Human
gagagaccuagagggcccagcauguggcuggg

SEQ ID NO: 423114 - RNA, 32 nt, Human
gagagaccugacccuucucucacuucuaaauu

SEQ ID NO: 423115 - RNA, 32 nt, Human
gagagacgcaaucuccccucccucccaucccc

SEQ ID NO: 423116 - RNA, 32 nt, Human
gagagacgcagcccugggggccagcuggugcu

SEQ ID NO: 423117 - RNA, 32 nt, Human
gagagacgcauggcccgaagucaaagugcugg

SEQ ID NO: 423118 - RNA, 25 nt, Human
gagagacgcggaggaggagacauga

SEQ ID NO: 423119 - RNA, 32 nt, Human
gagagacgcugugauuggcaggaggcaggaua

SEQ ID NO: 423120 - RNA, 32 nt, Human
gagagacggcuccucagaugcucagcuaagcc

SEQ ID NO: 423121 - RNA, 31 nt, Human
gagagacgggagagagaagaagaguggguuu

SEQ ID NO: 423122 - RNA, 32 nt, Human
gagagacuaagcugaaacugcugcucagcucc

SEQ ID NO: 423123 - RNA, 32 nt, Human
gagagacuaguuuccacauccuucccuccuuu

SEQ ID NO: 423124 - RNA, 32 nt, Human
gagagacuaucuuguguugugccuguaugaau

SEQ ID NO: 423125 - RNA, 32 nt, Human
gagagacuccuugggggucgagcacuguggcu

SEQ ID NO: 423126 - RNA, 32 nt, Human
gagagacucggccccugcucuccucacugucc

SEQ ID NO: 423127 - RNA, 32 nt, Human
gagagacucuaaacagaugagcacagagccag

SEQ ID NO: 423128 - RNA, 32 nt, Human
gagagacugaagaagcagagccuguaucaugg

SEQ ID NO: 423129 - RNA, 32 nt, Human
gagagacugagacaggagucuuccggagucag

SEQ ID NO: 423130 - RNA, 32 nt, Human
gagagacuuaggaaagaaaaagacacagagac

SEQ ID NO: 423131 - RNA, 32 nt, Human
gagagacuucaaggaucaacucuaaagugcua

SEQ ID NO: 423132 - RNA, 32 nt, Human
gagagacuuccucuuggcucccaggaggaggg

SEQ ID NO: 423133 - RNA, 32 nt, Human
gagagacuuccucuugggucccaggaagaggg

SEQ ID NO: 423134 - RNA, 32 nt, Human
gagagacuugcaccuuggacaagccacacaau

SEQ ID NO: 423135 - RNA, 32 nt, Human
gagagacuugcagcuuggauacacagcagugu

SEQ ID NO: 423136 - RNA, 32 nt, Human
gagagacuuguagguacaaucuaggccuugaa

SEQ ID NO: 423137 - RNA, 22 nt, Human
gagagacuuguggccugggaga

SEQ ID NO: 423138 - RNA, 32 nt, Human
gagagagaaacaaauaugcagcuuucgaaacc

SEQ ID NO: 423139 - RNA, 32 nt, Human
gagagagaaagaaagaaagaaagaaagggaaa

SEQ ID NO: 423140 - RNA, 32 nt, Human
gagagagaacacagccuugccaagcagcaaug

SEQ ID NO: 423141 - RNA, 32 nt, Human
gagagagaagaaaagaaaaaugaagaaaagua

SEQ ID NO: 423142 - RNA, 32 nt, Human
gagagagaagaaaaugguggccggagauggga

SEQ ID NO: 423143 - RNA, 32 nt, Human
gagagagaaugagacagagacuuaaggaagag

SEQ ID NO: 423144 - RNA, 32 nt, Human
gagagagaaugucuuuucgaggcggaggucgu

SEQ ID NO: 423145 - RNA, 32 nt, Human
gagagagacagaagccccagccccagaaccug

SEQ ID NO: 423146 - RNA, 32 nt, Human
gagagagacagagagagaaaauaaacuacccc

SEQ ID NO: 423147 - RNA, 32 nt, Human
gagagagacauagagauagagacagagaggca

SEQ ID NO: 423148 - RNA, 32 nt, Human
gagagagacucaaagcccuggggcccggcccu

SEQ ID NO: 423149 - RNA, 32 nt, Human
gagagagagcacgcuagcucucaggaugggga

SEQ ID NO: 423150 - RNA, 32 nt, Human
gagagagagcugggccagggagcugcugcagg

SEQ ID NO: 423151 - RNA, 18 nt, Human
gagagagaggacgagaga

SEQ ID NO: 423152 - RNA, 32 nt, Human
gagagagaggacgagagagggggucagagaag

SEQ ID NO: 423153 - RNA, 32 nt, Human
gagagagaggagaagggagugaggggccgcug

SEQ ID NO: 423154 - RNA, 21 nt, Human
gagagagaggagagagagugu

SEQ ID NO: 423155 - RNA, 32 nt, Human
gagagagaggcaacccugggggccaguucagg

SEQ ID NO: 423156 - RNA, 32 nt, Human
gagagagaggcagagagcagggcagcggcuuc

SEQ ID NO: 423157 - RNA, 32 nt, Human
gagagagagggagagacaaaauaccuaccagg

SEQ ID NO: 423158 - RNA, 32 nt, Human
gagagagagggagagagagggagagaaaggga

SEQ ID NO: 423159 - RNA, 32 nt, Human
gagagagagggagaggaagaaaagagagagag

SEQ ID NO: 423160 - RNA, 32 nt, Human
gagagagagggagggagagggagugaagagcc

SEQ ID NO: 423161 - RNA, 32 nt, Human
gagagagagggcugggaggaaaaguaguucau

SEQ ID NO: 423162 - RNA, 32 nt, Human
gagagagaucaaaggcugggagauucuaagag

SEQ ID NO: 423163 - RNA, 32 nt, Human
gagagagauccucagaguggaaggagggggaa

SEQ ID NO: 423164 - RNA, 32 nt, Human
gagagagauuccacugaagccaagagagagcc

SEQ ID NO: 423165 - RNA, 32 nt, Human
gagagagcagaggggucaguucacaaccaucu

SEQ ID NO: 423166 - RNA, 32 nt, Human
gagagagcaggaacagggagagaguagggaca

SEQ ID NO: 423167 - RNA, 32 nt, Human
gagagagcaguuuuccaacuaugucaacaaag

SEQ ID NO: 423168 - RNA, 32 nt, Human
gagagagcauauccaucuccuccucacugccu

SEQ ID NO: 423169 - RNA, 32 nt, Human
gagagagcauggagcuggagaggaucgucagu

SEQ ID NO: 423170 - RNA, 32 nt, Human
gagagagccaccaaggaggagcaggggagcga

SEQ ID NO: 423171 - RNA, 32 nt, Human
gagagagccacuuaaccucucuggaccuuguu

SEQ ID NO: 423172 - RNA, 32 nt, Human
gagagagccagacagccccaagcuucugaguc

SEQ ID NO: 423173 - RNA, 32 nt, Human
gagagagcccguccaaguugggcuccaucgcu

SEQ ID NO: 423174 - RNA, 32 nt, Human
gagagagcccucuccaugcagggcagauggag

SEQ ID NO: 423175 - RNA, 32 nt, Human
gagagagccgggaggcagagggaguagugacc

SEQ ID NO: 423176 - RNA, 32 nt, Human
gagagagcuacaccuccccaggcccaggucuc

SEQ ID NO: 423177 - RNA, 32 nt, Human
gagagagcuagggcagacaugcagugaaaugg

SEQ ID NO: 423178 - RNA, 32 nt, Human
gagagagcucugggccuucuuccugccagucu

SEQ ID NO: 423179 - RNA, 32 nt, Human
gagagagcugcgauccauccaggccaagacca

SEQ ID NO: 423180 - RNA, 32 nt, Human
gagagagcugggaggggcacaggcagcaaggu

SEQ ID NO: 423181 - RNA, 32 nt, Human
gagagagcuuccuguuucuaaguggccugcag

SEQ ID NO: 423182 - RNA, 32 nt, Human
gagagaggaagagacccaagaggcccagggaa

SEQ ID NO: 423183 - RNA, 32 nt, Human
gagagaggaagaggagcagaagggggcagcag

SEQ ID NO: 423184 - RNA, 32 nt, Human
gagagaggaaggaggugacguucaggugcugu

SEQ ID NO: 423185 - RNA, 32 nt, Human
gagagaggaagggacagcaggagugaggugaa

SEQ ID NO: 423186 - RNA, 21 nt, Human
gagagaggacagcacaggcuc

SEQ ID NO: 423187 - RNA, 32 nt, Human
gagagaggaccagcggccagagccucagugac

SEQ ID NO: 423188 - RNA, 32 nt, Human
gagagaggagaagaggaggaggcagaggaaga

SEQ ID NO: 423189 - RNA, 32 nt, Human
gagagaggagccagccagggaggggcagcugc

SEQ ID NO: 423190 - RNA, 32 nt, Human
gagagaggaggaagagggagucuggcaugagu

SEQ ID NO: 423191 - RNA, 32 nt, Human
gagagaggaggcagaggcugggaaugggagca

SEQ ID NO: 423192 - RNA, 32 nt, Human
gagagaggaguccucacuugucuuccuuaauu

SEQ ID NO: 423193 - RNA, 32 nt, Human
gagagaggcacagaccugucuccugggugcau

SEQ ID NO: 423194 - RNA, 32 nt, Human
gagagaggcagagagacagagagggagagagg

SEQ ID NO: 423195 - RNA, 18 nt, Human
gagagaggcagcagcgug

SEQ ID NO: 423196 - RNA, 19 nt, Human
gagagaggcagcugggaga

SEQ ID NO: 423197 - RNA, 31 nt, Human
gagagaggcaggucucccagcucagaccccg

SEQ ID NO: 423198 - RNA, 32 nt, Human
gagagaggcgcgucugccccacccucaaaccc

SEQ ID NO: 423199 - RNA, 32 nt, Human
gagagaggcgggaggaagaaguaacaagagga

SEQ ID NO: 423200 - RNA, 32 nt, Human
gagagaggcugagucugauuguuuacacaaga

SEQ ID NO: 423201 - RNA, 32 nt, Human
gagagaggcugugaagccagaggggucgagga

SEQ ID NO: 423202 - RNA, 32 nt, Human
gagagaggcuuggaggcugggggugagucuca

SEQ ID NO: 423203 - RNA, 32 nt, Human
gagagagggaagaaaagaucuuuugcccugga

SEQ ID NO: 423204 - RNA, 20 nt, Human
gagagagggaaggagggaga

SEQ ID NO: 423205 - RNA, 32 nt, Human
gagagagggagaaagaaagaaaggagaaagag

SEQ ID NO: 423206 - RNA, 32 nt, Human
gagagagggagagagagugagagagacugacu

SEQ ID NO: 423207 - RNA, 23 nt, Human
gagagagggagaggaagaaaaga

SEQ ID NO: 423208 - RNA, 32 nt, Human
gagagagggagcgagagccaggcaggaccgca

SEQ ID NO: 423209 - RNA, 32 nt, Human
gagagagggaggcagaagaggaagucagagcg

SEQ ID NO: 423210 - RNA, 32 nt, Human
gagagagggagggagaagagagauagugggua

SEQ ID NO: 423211 - RNA, 32 nt, Human
gagagagggagggagagagagugaaagaagaa

SEQ ID NO: 423212 - RNA, 32 nt, Human
gagagagggagggagagggagugaagagccug

SEQ ID NO: 423213 - RNA, 32 nt, Human
gagagagggaggugaaagcuggugugagccca

SEQ ID NO: 423214 - RNA, 32 nt, Human
gagagagggcaggcccaggucaggaggaggua

SEQ ID NO: 423215 - RNA, 32 nt, Human
gagagaggggcagagcucaagaugggauuaug

SEQ ID NO: 423216 - RNA, 32 nt, Human
gagagaggggcucaggaacugggagccucgug

SEQ ID NO: 423217 - RNA, 32 nt, Human
gagagagggggugagagagggcaggcggggac

SEQ ID NO: 423218 - RNA, 32 nt, Human
gagagagggucucauucugucacccaggcuag

SEQ ID NO: 423219 - RNA, 32 nt, Human
gagagagguacccaaggucacauagcuaguua

SEQ ID NO: 423220 - RNA, 32 nt, Human
gagagaggugcagaauuccugguucugagcag

SEQ ID NO: 423221 - RNA, 32 nt, Human
gagagaggugugagccccuugucucacaccgg

SEQ ID NO: 423222 - RNA, 21 nt, Human
gagagagguuucaccauguua

SEQ ID NO: 423223 - RNA, 32 nt, Human
gagagaguagggagagagucucucucuaccac

SEQ ID NO: 423224 - RNA, 32 nt, Human
gagagagugaggacaggcugcgggaggagcug

SEQ ID NO: 423225 - RNA, 32 nt, Human
gagagagugcaggagaguagaaacaaaaggaa

SEQ ID NO: 423226 - RNA, 32 nt, Human
gagagagugcugggcagauggauggugagcac

SEQ ID NO: 423227 - RNA, 32 nt, Human
gagagaguuagaaaaauuuuugguagagagaa

SEQ ID NO: 423228 - RNA, 32 nt, Human
gagagaguuagauuugaauaagaagaauggug

SEQ ID NO: 423229 - RNA, 32 nt, Human
gagagauacagcaacagacccagaaacuaaag

SEQ ID NO: 423230 - RNA, 19 nt, Human
gagagauaggaagcugccu

SEQ ID NO: 423231 - RNA, 32 nt, Human
gagagauagggugggaggcagggcaaugcagg

SEQ ID NO: 423232 - RNA, 18 nt, Human
gagagauauccuggcuga

SEQ ID NO: 423233 - RNA, 32 nt, Human
gagagaucacggucaugaagaucagcccccaa

SEQ ID NO: 423234 - RNA, 32 nt, Human
gagagaucugaagaugcugcacugcuggcuuu

SEQ ID NO: 423235 - RNA, 22 nt, Human
gagagaugaaaggauggucucc

SEQ ID NO: 423236 - RNA, 30 nt, Human
gagagaugaaggggcagcagaaaacagcug

SEQ ID NO: 423237 - RNA, 30 nt, Human
gagagaugagagaggccuucacuguucacc

SEQ ID NO: 423238 - RNA, 32 nt, Human
gagagaugaguugcacaagauuauacacuguu

SEQ ID NO: 423239 - RNA, 20 nt, Human
gagagaugaugugaucccca

SEQ ID NO: 423240 - RNA, 32 nt, Human
gagagaugcccagguugcacaggagugggaug

SEQ ID NO: 423241 - RNA, 32 nt, Human
gagagaugcucaccaagcuucuauuuaucuaa

SEQ ID NO: 423242 - RNA, 32 nt, Human
gagagauggagcaaagugagggccgagugaga

SEQ ID NO: 423243 - RNA, 32 nt, Human
gagagauggagucagggucccuggagaaggag

SEQ ID NO: 423244 - RNA, 32 nt, Human
gagagauggcuggaccaauucucuccaugaca

SEQ ID NO: 423245 - RNA, 22 nt, Human
gagagaugggaccuggggcaaa

SEQ ID NO: 423246 - RNA, 32 nt, Human
gagagaugggcacgaaagagcuguaauacagu

SEQ ID NO: 423247 - RNA, 32 nt, Human
gagagaugugacguuggaacugcucuggcacu

SEQ ID NO: 423248 - RNA, 32 nt, Human
gagagaugugaugaugaaaacaggcucaggga

SEQ ID NO: 423249 - RNA, 32 nt, Human
gagagauguuauuugggagacuugagaugcuu

SEQ ID NO: 423250 - RNA, 32 nt, Human
gagagauugccuggcccugcuugaaugucaug

SEQ ID NO: 423251 - RNA, 32 nt, Human
gagagauuuucagaccccuggguacauggugg

SEQ ID NO: 423252 - RNA, 32 nt, Human
gagagcaaaggagucaggaauggcuuuuacuc

SEQ ID NO: 423253 - RNA, 32 nt, Human
gagagcaacauuuuacccacacacagauaaag

SEQ ID NO: 423254 - RNA, 32 nt, Human
gagagcaagagggagagugugugagagagagu

SEQ ID NO: 423255 - RNA, 32 nt, Human
gagagcaagauggagcccaagauggaacccaa

SEQ ID NO: 423256 - RNA, 32 nt, Human
gagagcaagccccagccuuggugcucauaaau

SEQ ID NO: 423257 - RNA, 32 nt, Human
gagagcaagucacucccggcugccuuuuucac

SEQ ID NO: 423258 - RNA, 32 nt, Human
gagagcaaugggcagggaaggaaggggucugc

SEQ ID NO: 423259 - RNA, 32 nt, Human
gagagcacaccacugcacuccagccugggcaa

SEQ ID NO: 423260 - RNA, 32 nt, Human
gagagcacagcagacccuuagcagaacagaaa

SEQ ID NO: 423261 - RNA, 32 nt, Human
gagagcacagcccuugccuggagcccaggaac

SEQ ID NO: 423262 - RNA, 32 nt, Human
gagagcacccacugaauugacaugacccucug

SEQ ID NO: 423263 - RNA, 22 nt, Human
gagagcacccugcauucugccu

SEQ ID NO: 423264 - RNA, 32 nt, Human
gagagcaccgcugcacucgcggccggcgaugc

SEQ ID NO: 423265 - RNA, 16 nt, Human
gagagcaccucagaga

SEQ ID NO: 423266 - RNA, 32 nt, Human
gagagcaccuccccaaacacacaagcucucag

SEQ ID NO: 423267 - RNA, 32 nt, Human
gagagcacgccacugcacuccagccuggguga

SEQ ID NO: 423268 - RNA, 32 nt, Human
gagagcacggaagcccagagugaacagaaaga

SEQ ID NO: 423269 - RNA, 22 nt, Human
gagagcacgggguagccggaga

SEQ ID NO: 423270 - RNA, 32 nt, Human
gagagcacugccucccugugugacugggugag

SEQ ID NO: 423271 - RNA, 32 nt, Human
gagagcacugugacuccagcccuggcucggag

SEQ ID NO: 423272 - RNA, 17 nt, Human
gagagcagaacuccaag

SEQ ID NO: 423273 - RNA, 18 nt, Human
gagagcagaaggauggga

SEQ ID NO: 423274 - RNA, 32 nt, Human
gagagcagacacagccccauggcccucccucu

SEQ ID NO: 423275 - RNA, 20 nt, Human
gagagcagagacucuuggga

SEQ ID NO: 423276 - RNA, 20 nt, Human
gagagcagagauacagugag

SEQ ID NO: 423277 - RNA, 32 nt, Human
gagagcagaggacgagccgggacgcggcgccg

SEQ ID NO: 423278 - RNA, 32 nt, Human
gagagcagagggggucaugcagugagugggug

SEQ ID NO: 423279 - RNA, 32 nt, Human
gagagcagagugagauuaaagagcgagaaagc

SEQ ID NO: 423280 - RNA, 32 nt, Human
gagagcagcagacaagcuggacuggggaagau

SEQ ID NO: 423281 - RNA, 32 nt, Human
gagagcagcaggacccuucacagcagguccuu

SEQ ID NO: 423282 - RNA, 32 nt, Human
gagagcagcaguucuuccagcacagcgcuuga

SEQ ID NO: 423283 - RNA, 32 nt, Human
gagagcagccagggcaacacagcgagacccug

SEQ ID NO: 423284 - RNA, 32 nt, Human
gagagcagccuggccaacaccgugaaccucgu

SEQ ID NO: 423285 - RNA, 32 nt, Human
gagagcagccuggccaacagaggugagcaccu

SEQ ID NO: 423286 - RNA, 32 nt, Human
gagagcagccugggcaacauagcaagaacuca

SEQ ID NO: 423287 - RNA, 32 nt, Human
gagagcagccugggcaacguagagauccccau

SEQ ID NO: 423288 - RNA, 23 nt, Human
gagagcagcugcagugguuggga

SEQ ID NO: 423289 - RNA, 32 nt, Human
gagagcagcugcagugguugggaggagcuuga

SEQ ID NO: 423290 - RNA, 32 nt, Human
gagagcaggcggggccgcccagugggucaggc

SEQ ID NO: 423291 - RNA, 23 nt, Human
gagagcagggaguggcucaggga

SEQ ID NO: 423292 - RNA, 21 nt, Human
gagagcagggaguggcuggga

SEQ ID NO: 423293 - RNA, 20 nt, Human
gagagcaggggagcuuggga

SEQ ID NO: 423294 - RNA, 32 nt, Human
gagagcagucauaucuuaccccuagauguuca

SEQ ID NO: 423295 - RNA, 31 nt, Human
gagagcaguccacuggauguuggagagccag

SEQ ID NO: 423296 - RNA, 32 nt, Human
gagagcauagcaucaugauguauuagcuguuc

SEQ ID NO: 423297 - RNA, 32 nt, Human
gagagcaucauggaugcagggccggucuuggu

SEQ ID NO: 423298 - RNA, 32 nt, Human
gagagcaucccagacuccccaaagaggaugga

SEQ ID NO: 423299 - RNA, 19 nt, Human
gagagcaucucccuggagg

SEQ ID NO: 423300 - RNA, 32 nt, Human
gagagcaucugcaaaaugcaaagagaacuacc

SEQ ID NO: 423301 - RNA, 32 nt, Human
gagagcaugccgcugcacuccagccugggaga

SEQ ID NO: 423302 - RNA, 32 nt, Human
gagagcauuggguucaaguuugcaucaaacau

SEQ ID NO: 423303 - RNA, 32 nt, Human
gagagcauuuguccuugacuguaaguacagag

SEQ ID NO: 423304 - RNA, 32 nt, Human
gagagccaaacagagcccaggagacuccacua

SEQ ID NO: 423305 - RNA, 32 nt, Human
gagagccaaacagagcccagggagacuccacu

SEQ ID NO: 423306 - RNA, 32 nt, Human
gagagccaagcccuguguccccaaggaguccc

SEQ ID NO: 423307 - RNA, 32 nt, Human
gagagccacucagcgggccucucccagccgcc

SEQ ID NO: 423308 - RNA, 32 nt, Human
gagagccacugccuccccugccuccccugccu

SEQ ID NO: 423309 - RNA, 31 nt, Human
gagagccagagagcgagcagagggggcgggc

SEQ ID NO: 423310 - RNA, 32 nt, Human
gagagccagagagguucacuauaccaugacuc

SEQ ID NO: 423311 - RNA, 32 nt, Human
gagagccagcagagaggggugaauggaagaag

SEQ ID NO: 423312 - RNA, 32 nt, Human
gagagccagcccggagagaugcaguucuugcc

SEQ ID NO: 423313 - RNA, 32 nt, Human
gagagccaggccugcccugcccugcuggcuuc

SEQ ID NO: 423314 - RNA, 32 nt, Human
gagagccaguggccacagcugcagagcacugc

SEQ ID NO: 423315 - RNA, 32 nt, Human
gagagccaucuucuuacccccuggccacaugg

SEQ ID NO: 423316 - RNA, 32 nt, Human
gagagccaugcagggcgucugcagcccaggcc

SEQ ID NO: 423317 - RNA, 32 nt, Human
gagagccaugcaguccaagcgggauugugagc

SEQ ID NO: 423318 - RNA, 32 nt, Human
gagagccaugcaguccacgcgggauugugagc

SEQ ID NO: 423319 - RNA, 21 nt, Human
gagagcccaagccccaaugcc

SEQ ID NO: 423320 - RNA, 32 nt, Human
gagagcccagaacaugcauauaaaggaaacau

SEQ ID NO: 423321 - RNA, 32 nt, Human
gagagcccagaaccccaguagcagcagaaggg

SEQ ID NO: 423322 - RNA, 32 nt, Human
gagagcccagaggaggaguuuggccaggugga

SEQ ID NO: 423323 - RNA, 32 nt, Human
gagagcccagcacuuggcagguguccaguacc

SEQ ID NO: 423324 - RNA, 32 nt, Human
gagagcccagucucccuccaggaaaggccuga

SEQ ID NO: 423325 - RNA, 32 nt, Human
gagagcccgaacaggaagaggguacagcuuug

SEQ ID NO: 423326 - RNA, 32 nt, Human
gagagcccgaggaggcagcggccgcaggcagc

SEQ ID NO: 423327 - RNA, 32 nt, Human
gagagcccgcagcugccgcagccggccccagu

SEQ ID NO: 423328 - RNA, 32 nt, Human
gagagcccgccaggcccugccccugcucggcu

SEQ ID NO: 423329 - RNA, 32 nt, Human
gagagcccucugcugcuuuccaacacacaauu

SEQ ID NO: 423330 - RNA, 32 nt, Human
gagagcccugcaccuggccagagugucacagg

SEQ ID NO: 423331 - RNA, 32 nt, Human
gagagcccugcagaagcugcagcugaccagga

SEQ ID NO: 423332 - RNA, 32 nt, Human
gagagcccugccuggggagcugugccagcuca

SEQ ID NO: 423333 - RNA, 32 nt, Human
gagagcccugggucagcauugcucuggcacug

SEQ ID NO: 423334 - RNA, 32 nt, Human
gagagcccuuucucccauccauuggagguccc

SEQ ID NO: 423335 - RNA, 32 nt, Human
gagagccgaggugggaggcaugggaaacagug

SEQ ID NO: 423336 - RNA, 32 nt, Human
gagagccgcaggagcagcaggcuguggcccag

SEQ ID NO: 423337 - RNA, 32 nt, Human
gagagccggcaggaggggacccugccgauugu

SEQ ID NO: 423338 - RNA, 32 nt, Human
gagagccggcgcccugccuggcccggcggccu

SEQ ID NO: 423339 - RNA, 32 nt, Human
gagagccggcggcccugaaggugagugaggcc

SEQ ID NO: 423340 - RNA, 32 nt, Human
gagagccggcuggagucugggaugcagaacag

SEQ ID NO: 423341 - RNA, 32 nt, Human
gagagccggcuggagucugggaugcagaacau

SEQ ID NO: 423342 - RNA, 32 nt, Human
gagagccgggaggcagagggaguagugaccgc

SEQ ID NO: 423343 - RNA, 32 nt, Human
gagagccggggugaugucuccagcggcagcgu

SEQ ID NO: 423344 - RNA, 32 nt, Human
gagagccuacuguaacccucauggccaccccc

SEQ ID NO: 423345 - RNA, 32 nt, Human
gagagccuccauccugucuucauccucaagug

SEQ ID NO: 423346 - RNA, 32 nt, Human
gagagccucccucugcugcaggagcucgucca

SEQ ID NO: 423347 - RNA, 32 nt, Human
gagagccugccuggcuuguccaagcucaaagg

SEQ ID NO: 423348 - RNA, 26 nt, Human
gagagccugcgaggucaagcugcaga

SEQ ID NO: 423349 - RNA, 32 nt, Human
gagagccugcuuccugcugccugccgaaauuu

SEQ ID NO: 423350 - RNA, 21 nt, Human
gagagccuggaggccugaaga

SEQ ID NO: 423351 - RNA, 22 nt, Human
gagagccuggauacgaagcagg

SEQ ID NO: 423352 - RNA, 22 nt, Human
gagagccuggauggaucacagg

SEQ ID NO: 423353 - RNA, 32 nt, Human
gagagccuggugcugcugcugcuguggcguga

SEQ ID NO: 423354 - RNA, 32 nt, Human
gagagccugguggaucucugucuuccagcccu

SEQ ID NO: 423355 - RNA, 19 nt, Human
gagagccugucacuccaga

SEQ ID NO: 423356 - RNA, 32 nt, Human
gagagccugugaguuugaggcugcaaugagcu

SEQ ID NO: 423357 - RNA, 32 nt, Human
gagagccuucccaugacccccaugaagagauc

SEQ ID NO: 423358 - RNA, 32 nt, Human
gagagccuuguucugucaccuaggcuggaaug

SEQ ID NO: 423359 - RNA, 19 nt, Human
gagagcgaaagugcuuuag

SEQ ID NO: 423360 - RNA, 32 nt, Human
gagagcgacucugugucccaggcacagcugug

SEQ ID NO: 423361 - RNA, 32 nt, Human
gagagcgagagcgagaacgagaucaggagcga

SEQ ID NO: 423362 - RNA, 21 nt, Human
gagagcgagcccccaaugccc

SEQ ID NO: 423363 - RNA, 32 nt, Human
gagagcgaugcugcgccucugccccucuccug

SEQ ID NO: 423364 - RNA, 32 nt, Human
gagagcgauuucugggauggaagccaucugcc

SEQ ID NO: 423365 - RNA, 32 nt, Human
gagagcgcagccgccuucacagcagucuggau

SEQ ID NO: 423366 - RNA, 32 nt, Human
gagagcgcagggcggggagaggcguggggagc

SEQ ID NO: 423367 - RNA, 21 nt, Human
gagagcgccgauggcugggga

SEQ ID NO: 423368 - RNA, 32 nt, Human
gagagcgcuacggcuacggccugggcacuggu

SEQ ID NO: 423369 - RNA, 32 nt, Human
gagagcgcuccgaagacugagaugagcuuggg

SEQ ID NO: 423370 - RNA, 32 nt, Human
gagagcggaauccugcuccgccgucgcagcag

SEQ ID NO: 423371 - RNA, 32 nt, Human
gagagcggacagaucucugggugcugggcggu

SEQ ID NO: 423372 - RNA, 24 nt, Human
gagagcggaggagagagaggcaga

SEQ ID NO: 423373 - RNA, 32 nt, Human
gagagcggccggucccagccauggcccgccuu

SEQ ID NO: 423374 - RNA, 32 nt, Human
gagagcggcuggagaaagaugcaguccucagg

SEQ ID NO: 423375 - RNA, 32 nt, Human
gagagcgggagugagagcaggaacgacgcaga

SEQ ID NO: 423376 - RNA, 32 nt, Human
gagagcgggcccugcgcgccugaugggucgag

SEQ ID NO: 423377 - RNA, 32 nt, Human
gagagcggucccaagcccuggggcccuaggcu

SEQ ID NO: 423378 - RNA, 32 nt, Human
gagagcgugugcacagcgaggccaucucaccg

SEQ ID NO: 423379 - RNA, 32 nt, Human
gagagcuaaaaaggaagcaaugagaacaacag

SEQ ID NO: 423380 - RNA, 32 nt, Human
gagagcuaaugaagguauguugccaaaauuua

SEQ ID NO: 423381 - RNA, 32 nt, Human
gagagcuacauugaagacgagcucuucauuca

SEQ ID NO: 423382 - RNA, 32 nt, Human
gagagcuagguagcuaucaaaacgcuuagaca

SEQ ID NO: 423383 - RNA, 32 nt, Human
gagagcuaucuauuucccuaaccuacuuaauu

SEQ ID NO: 423384 - RNA, 32 nt, Human
gagagcucaaguuucagagucagaauuaggca

SEQ ID NO: 423385 - RNA, 32 nt, Human
gagagcucacccaggcggggguguugugggua

SEQ ID NO: 423386 - RNA, 22 nt, Human
gagagcuccuccagccuggaga

SEQ ID NO: 423387 - RNA, 32 nt, Human
gagagcuccuucagcaucuucagcuucugcug

SEQ ID NO: 423388 - RNA, 32 nt, Human
gagagcucgucuccuaucaaucagagaacccc

SEQ ID NO: 423389 - RNA, 32 nt, Human
gagagcucgugcuggggagaaguccaccaaga

SEQ ID NO: 423390 - RNA, 22 nt, Human
gagagcucugagccucucagca

SEQ ID NO: 423391 - RNA, 19 nt, Human
gagagcucugagcucuggc

SEQ ID NO: 423392 - RNA, 20 nt, Human
gagagcucuggcugcagagc

SEQ ID NO: 423393 - RNA, 23 nt, Human
gagagcucuggcuggcaucuggu

SEQ ID NO: 423394 - RNA, 24 nt, Human
gagagcucuggcuggcauugacca

SEQ ID NO: 423395 - RNA, 20 nt, Human
gagagcucuggcuuaucagg

SEQ ID NO: 423396 - RNA, 32 nt, Human
gagagcucuuucuccugcuguucuggguuccu

SEQ ID NO: 423397 - RNA, 32 nt, Human
gagagcugaagugccccagccagcagcuagcc

SEQ ID NO: 423398 - RNA, 32 nt, Human
gagagcugaggaugccaaggccagucugcagc

SEQ ID NO: 423399 - RNA, 32 nt, Human
gagagcugaggauuuccaggacuuuguaaguu

SEQ ID NO: 423400 - RNA, 32 nt, Human
gagagcugcacucuggcuggggaaggcaugag

SEQ ID NO: 423401 - RNA, 32 nt, Human
gagagcugccacccucuucuuucuccccagcc

SEQ ID NO: 423402 - RNA, 32 nt, Human
gagagcugccacugagcagcccugccaggggu

SEQ ID NO: 423403 - RNA, 32 nt, Human
gagagcugcccucccacucucucuccaaauuu

SEQ ID NO: 423404 - RNA, 32 nt, Human
gagagcugccuuggacucuccaaugcagcugc

SEQ ID NO: 423405 - RNA, 32 nt, Human
gagagcugcgaggccgggguucccaggguuca

SEQ ID NO: 423406 - RNA, 32 nt, Human
gagagcugcucuggaaaaugugacccagaucc

SEQ ID NO: 423407 - RNA, 20 nt, Human
gagagcugcugauauaguca

SEQ ID NO: 423408 - RNA, 32 nt, Human
gagagcuggacucugguuuuuauccuuucugu

SEQ ID NO: 423409 - RNA, 32 nt, Human
gagagcuggagccguggcugagcucagcugga

SEQ ID NO: 423410 - RNA, 21 nt, Human
gagagcuggaggacaauaucc

SEQ ID NO: 423411 - RNA, 21 nt, Human
gagagcuggaguuggcuccau

SEQ ID NO: 423412 - RNA, 32 nt, Human
gagagcuggauaguccugggacacagaguuag

SEQ ID NO: 423413 - RNA, 21 nt, Human
gagagcuggaugugcaugccc

SEQ ID NO: 423414 - RNA, 32 nt, Human
gagagcuggcugcuucagcugcgagccugaca

SEQ ID NO: 423415 - RNA, 23 nt, Human
gagagcuggcuugagaguaguua

SEQ ID NO: 423416 - RNA, 32 nt, Human
gagagcugggaggcggcgaucgcagcugggcc

SEQ ID NO: 423417 - RNA, 32 nt, Human
gagagcugggagggaccaagguuguaagggug

SEQ ID NO: 423418 - RNA, 32 nt, Human
gagagcugguaaucccagcuacucaugaggcu

SEQ ID NO: 423419 - RNA, 22 nt, Human
gagagcuggucgcccaccaccc

SEQ ID NO: 423420 - RNA, 32 nt, Human
gagagcuguacccagagaguccugugcugaau

SEQ ID NO: 423421 - RNA, 32 nt, Human
gagagcugugagaaggagaugcggcugcugcu

SEQ ID NO: 423422 - RNA, 32 nt, Human
gagagcugugcaucagcuagaaugacagguuu

SEQ ID NO: 423423 - RNA, 21 nt, Human
gagagcuguuccccaccgccc

SEQ ID NO: 423424 - RNA, 32 nt, Human
gagagcuuacugugugcuaggcauuuucuuaa

SEQ ID NO: 423425 - RNA, 32 nt, Human
gagagcuuaucaaagugcuggaagaggccaau

SEQ ID NO: 423426 - RNA, 32 nt, Human
gagagcuucaccugucccuccuggcuugugcg

SEQ ID NO: 423427 - RNA, 31 nt, Human
gagagcuuccugaaggaccuguugaacucag

SEQ ID NO: 423428 - RNA, 32 nt, Human
gagagcuucucauguucuuccuuuguauaaag

SEQ ID NO: 423429 - RNA, 32 nt, Human
gagagcuucucuuccuccucuggacgcugucc

SEQ ID NO: 423430 - RNA, 16 nt, Human
gagagcuucugagaga

SEQ ID NO: 423431 - RNA, 32 nt, Human
gagagcuucugaucccagcuauuagggacaga

SEQ ID NO: 423432 - RNA, 32 nt, Human
gagagcuugcagcugccaucuuagaugugcuc

SEQ ID NO: 423433 - RNA, 32 nt, Human
gagagcuugccauccagcucacgaagacagag

SEQ ID NO: 423434 - RNA, 32 nt, Human
gagagcuugguacagcagcacacacugcuugc

SEQ ID NO: 423435 - RNA, 32 nt, Human
gagagcuuguucccucccucccugugcaugca

SEQ ID NO: 423436 - RNA, 32 nt, Human
gagagcuuuagcugagaccugcuuuuacagac

SEQ ID NO: 423437 - RNA, 32 nt, Human
gagagcuuuccuguucaugcugccucacaacc

SEQ ID NO: 423438 - RNA, 32 nt, Human
gagaggaaaagaugagauccacuuggauacca

SEQ ID NO: 423439 - RNA, 32 nt, Human
gagaggaaacaucuuaccaucuggucauucau

SEQ ID NO: 423440 - RNA, 32 nt, Human
gagaggaaaggaggaggcaauuuauaaaugca

SEQ ID NO: 423441 - RNA, 18 nt, Human
gagaggaaauccaaugac

SEQ ID NO: 423442 - RNA, 32 nt, Human
gagaggaaaugagaacgaggcuuuggagcaca

SEQ ID NO: 423443 - RNA, 32 nt, Human
gagaggaaauggcugcuucaucaucauccucc

SEQ ID NO: 423444 - RNA, 32 nt, Human
gagaggaacaagggccuccgaaaccccaaccc

SEQ ID NO: 423445 - RNA, 32 nt, Human
gagaggaacaugguggccacagcuggagugac

SEQ ID NO: 423446 - RNA, 32 nt, Human
gagaggaaccaccacacccagcagcuccugac

SEQ ID NO: 423447 - RNA, 32 nt, Human
gagaggaaccuaguuuaggaccucuuuuauua

SEQ ID NO: 423448 - RNA, 22 nt, Human
gagaggaacguggaacaggagc

SEQ ID NO: 423449 - RNA, 32 nt, Human
gagaggaagaggaaaggaaggaaagccagggg

SEQ ID NO: 423450 - RNA, 32 nt, Human
gagaggaagaggagucggaagggaggcggggu

SEQ ID NO: 423451 - RNA, 32 nt, Human
gagaggaagggaaggaaggagagggaggggga

SEQ ID NO: 423452 - RNA, 32 nt, Human
gagaggaagggauuccuagcagaggaacagcu

SEQ ID NO: 423453 - RNA, 32 nt, Human
gagaggaagggccgcugugcacugcccggccu

SEQ ID NO: 423454 - RNA, 32 nt, Human
gagaggaaggugugggguggaacaggugucca

SEQ ID NO: 423455 - RNA, 32 nt, Human
gagaggaagguuggcuccaggccagguguccu

SEQ ID NO: 423456 - RNA, 32 nt, Human
gagaggacaccccacccuccagcguggccuuu

SEQ ID NO: 423457 - RNA, 32 nt, Human
gagaggacagcugguugugggagaguuccccc

SEQ ID NO: 423458 - RNA, 32 nt, Human
gagaggacaggguggagaggaggagaacccug

SEQ ID NO: 423459 - RNA, 32 nt, Human
gagaggaccuaaaaggaaacacuucugugguu

SEQ ID NO: 423460 - RNA, 32 nt, Human
gagaggaccuccagaacaccagguaccguggc

SEQ ID NO: 423461 - RNA, 32 nt, Human
gagaggacucgaaguccaucuccgggauggcc

SEQ ID NO: 423462 - RNA, 32 nt, Human
gagaggacuggggucccaggaguaggaggagc

SEQ ID NO: 423463 - RNA, 32 nt, Human
gagaggacugggucagagagcagggaguggcu

SEQ ID NO: 423464 - RNA, 32 nt, Human
gagaggagaacaguaggauugcuguggccuag

SEQ ID NO: 423465 - RNA, 32 nt, Human
gagaggagaagaggaggaggcagaggaagaaa

SEQ ID NO: 423466 - RNA, 32 nt, Human
gagaggagaaggaggaagaagaggaggaggag

SEQ ID NO: 423467 - RNA, 32 nt, Human
gagaggagaagggaaauggaggugaggggugg

SEQ ID NO: 423468 - RNA, 32 nt, Human
gagaggagaagggagagagcuguucuuuuucu

SEQ ID NO: 423469 - RNA, 32 nt, Human
gagaggagaagugcgccaauguugucuuuucu

SEQ ID NO: 423470 - RNA, 32 nt, Human
gagaggagaauaggagugacugccagugagca

SEQ ID NO: 423471 - RNA, 32 nt, Human
gagaggagaauagggaauuaggguaaacaacg

SEQ ID NO: 423472 - RNA, 32 nt, Human
gagaggagacacacugcucauggucagggcuu

SEQ ID NO: 423473 - RNA, 32 nt, Human
gagaggagacauucugcgcugcagaggcacuc

SEQ ID NO: 423474 - RNA, 32 nt, Human
gagaggagaccaggaugaaggagccagucgaa

SEQ ID NO: 423475 - RNA, 32 nt, Human
gagaggagagaccugggagugggagcucaggu

SEQ ID NO: 423476 - RNA, 19 nt, Human
gagaggagagaguuuggga

SEQ ID NO: 423477 - RNA, 32 nt, Human
gagaggagaggaagaggguggagugggcucug

SEQ ID NO: 423478 - RNA, 32 nt, Human
gagaggagaggcugcugucacugguaccggau

SEQ ID NO: 423479 - RNA, 32 nt, Human
gagaggagagugaacagggagcggggcuuuug

SEQ ID NO: 423480 - RNA, 32 nt, Human
gagaggagaucugagaccuguggggaaaacaa

SEQ ID NO: 423481 - RNA, 32 nt, Human
gagaggagauggcaggacacagcaaacaggac

SEQ ID NO: 423482 - RNA, 32 nt, Human
gagaggagcaaagaagccaugacaacuucaua

SEQ ID NO: 423483 - RNA, 32 nt, Human
gagaggagcaggccauggaggcaggugccagg

SEQ ID NO: 423484 - RNA, 32 nt, Human
gagaggagcccccgaccgagagcccagugaca

SEQ ID NO: 423485 - RNA, 32 nt, Human
gagaggagcuaaaucagacuggaucucugcca

SEQ ID NO: 423486 - RNA, 32 nt, Human
gagaggagcuuaaagacacaaacggguagaau

SEQ ID NO: 423487 - RNA, 32 nt, Human
gagaggaggaagagggagucugagcaugagcu

SEQ ID NO: 423488 - RNA, 32 nt, Human
gagaggaggaagagggagucuggcaugaguug

SEQ ID NO: 423489 - RNA, 32 nt, Human
gagaggaggaagagggggccccuaguagcaag

SEQ ID NO: 423490 - RNA, 32 nt, Human
gagaggaggaagauugagcuggggcaacagcc

SEQ ID NO: 423491 - RNA, 21 nt, Human
gagaggaggaauuaguuggga

SEQ ID NO: 423492 - RNA, 32 nt, Human
gagaggaggagaacccugaaggagagacggaa

SEQ ID NO: 423493 - RNA, 32 nt, Human
gagaggaggagaaggagggugagaggagcaaa

SEQ ID NO: 423494 - RNA, 32 nt, Human
gagaggaggaggaggaggcugagagagggagg

SEQ ID NO: 423495 - RNA, 32 nt, Human
gagaggaggaggaggaugaagaagguuauaac

SEQ ID NO: 423496 - RNA, 19 nt, Human
gagaggaggaggagggaga

SEQ ID NO: 423497 - RNA, 32 nt, Human
gagaggaggaggaggugggcagaggaaggagg

SEQ ID NO: 423498 - RNA, 32 nt, Human
gagaggaggagguggucuuaggcagugaugga

SEQ ID NO: 423499 - RNA, 32 nt, Human
gagaggaggcggggugggggaggcggggagag

SEQ ID NO: 423500 - RNA, 32 nt, Human
gagaggaggcucgaggaaugaaccuuggucug

SEQ ID NO: 423501 - RNA, 32 nt, Human
gagaggagggagugagacuguuggcuuaggaa

SEQ ID NO: 423502 - RNA, 32 nt, Human
gagaggagggcggcgggagcugagccggaauc

SEQ ID NO: 423503 - RNA, 32 nt, Human
gagaggaggggcagaggagcugccaggggaag

SEQ ID NO: 423504 - RNA, 32 nt, Human
gagaggaggggcagaggcugugaacagggaga

SEQ ID NO: 423505 - RNA, 32 nt, Human
gagaggagggggagaaggaggggaagagagag

SEQ ID NO: 423506 - RNA, 32 nt, Human
gagaggagugugaagcaaggagcuuagauaag

SEQ ID NO: 423507 - RNA, 32 nt, Human
gagaggagugugugugcacguauucaucugug

SEQ ID NO: 423508 - RNA, 32 nt, Human
gagaggaguucuuuggcucuauuggauuuguc

SEQ ID NO: 423509 - RNA, 32 nt, Human
gagaggauccaguuagagacucaguaucagcg

SEQ ID NO: 423510 - RNA, 32 nt, Human
gagaggaugagguaggcggaucacugggguca

SEQ ID NO: 423511 - RNA, 32 nt, Human
gagaggaugagguuugaggagcagagggaaga

SEQ ID NO: 423512 - RNA, 32 nt, Human
gagaggaugcagagggaagggaagagaaggga

SEQ ID NO: 423513 - RNA, 32 nt, Human
gagaggaugcgaguagggagggcaggagggug

SEQ ID NO: 423514 - RNA, 32 nt, Human
gagaggauuuguggugcuuggaagagccggcc

SEQ ID NO: 423515 - RNA, 32 nt, Human
gagaggauuuucaggauuauuggaggauuagg

SEQ ID NO: 423516 - RNA, 23 nt, Human
gagaggcaacaggaggcauucug

SEQ ID NO: 423517 - RNA, 32 nt, Human
gagaggcaacuuucccugucgggcuugaguug

SEQ ID NO: 423518 - RNA, 32 nt, Human
gagaggcaagaaaauuaugcuguccauagaag

SEQ ID NO: 423519 - RNA, 21 nt, Human
gagaggcaagagaaagcucug

SEQ ID NO: 423520 - RNA, 32 nt, Human
gagaggcaagggaaagccgaagacugaaaauu

SEQ ID NO: 423521 - RNA, 32 nt, Human
gagaggcaagggguggacggagccaaaggccg

SEQ ID NO: 423522 - RNA, 32 nt, Human
gagaggcaaucaggggguuguauacugcacug

SEQ ID NO: 423523 - RNA, 24 nt, Human
gagaggcaaugaagacaggugcuc

SEQ ID NO: 423524 - RNA, 21 nt, Human
gagaggcaaugaugagugauc

SEQ ID NO: 423525 - RNA, 20 nt, Human
gagaggcaccuggcacucug

SEQ ID NO: 423526 - RNA, 19 nt, Human
gagccaccgugccuggccu

SEQ ID NO: 423527 - RNA, 20 nt, Human
gagccaccgugccuggccua

SEQ ID NO: 423528 - RNA, 21 nt, Human
gagccaccgugccuggccuaa

SEQ ID NO: 423529 - RNA, 21 nt, Human
gagccaccgugccuggccuag

SEQ ID NO: 423530 - RNA, 21 nt, Human
gagccaccgugcucagccuaa

SEQ ID NO: 423531 - RNA, 18 nt, Human
gagccaccgugcucggcc

SEQ ID NO: 423532 - RNA, 18 nt, Human
gagccaccgugcugggcc

SEQ ID NO: 423533 - RNA, 20 nt, Human
gagccaccgugggacaucaa

SEQ ID NO: 423534 - RNA, 18 nt, Human
gagccaccucacuuggcc

SEQ ID NO: 423535 - RNA, 32 nt, Human
gagccaccucagccacgugagccaugccagcc

SEQ ID NO: 423536 - RNA, 32 nt, Human
gagccaccucaucaaaugaaagucacugcuga

SEQ ID NO: 423537 - RNA, 28 nt, Human
gagccaccuccaccccuuuccggaauuc

SEQ ID NO: 423538 - RNA, 20 nt, Human
gagccaccucgcccagccua

SEQ ID NO: 423539 - RNA, 18 nt, Human
gagccaccugcaaccuag

SEQ ID NO: 423540 - RNA, 32 nt, Human
gagccaccugccagccucgcugggcagggcug

SEQ ID NO: 423541 - RNA, 32 nt, Human
gagccaccuucaggcuguaaggucaucguaua

SEQ ID NO: 423542 - RNA, 32 nt, Human
gagccaccuucuuuaccucugagcuuucugcc

SEQ ID NO: 423543 - RNA, 20 nt, Human
gagccaccuugggaaccuag

SEQ ID NO: 423544 - RNA, 24 nt, Human
gagccacgaucacaccauugcacu

SEQ ID NO: 423545 - RNA, 32 nt, Human
gagccacgcucccuccugucucucacaccuuu

SEQ ID NO: 423546 - RNA, 21 nt, Human
gagccacggcaccuggccuga

SEQ ID NO: 423547 - RNA, 32 nt, Human
gagccacggcacuccacccugggcaacagagc

SEQ ID NO: 423548 - RNA, 32 nt, Human
gagccacgucuucuccaccucggagccccacg

SEQ ID NO: 423549 - RNA, 19 nt, Human
gagccacuaccauucugcu

SEQ ID NO: 423550 - RNA, 32 nt, Human
gagccacucuccacuuucucucacaggcugcu

SEQ ID NO: 423551 - RNA, 21 nt, Human
gagccacucugcuuggccuga

SEQ ID NO: 423552 - RNA, 19 nt, Human
gagccacugacucuucuga

SEQ ID NO: 423553 - RNA, 32 nt, Human
gagccacugagggucacccugccuuccuccuu

SEQ ID NO: 423554 - RNA, 25 nt, Human
gagccacugaucauaccacugcacu

SEQ ID NO: 423555 - RNA, 21 nt, Human
gagccacugcacccagccuag

SEQ ID NO: 423556 - RNA, 32 nt, Human
gagccacugcacccagccugggagagggguuu

SEQ ID NO: 423557 - RNA, 32 nt, Human
gagccacugcacccagccugugauguuucugu

SEQ ID NO: 423558 - RNA, 21 nt, Human
gagccacugcacccggccuaa

SEQ ID NO: 423559 - RNA, 21 nt, Human
gagccacugcacccggccuga

SEQ ID NO: 423560 - RNA, 19 nt, Human
gagccacugcaccuggccu

SEQ ID NO: 423561 - RNA, 20 nt, Human
gagccacugcaccuggccua

SEQ ID NO: 423562 - RNA, 21 nt, Human
gagccacugcaccuggccuga

SEQ ID NO: 423563 - RNA, 32 nt, Human
gagccacugcaccuggccuggagcucaguucu

SEQ ID NO: 423564 - RNA, 32 nt, Human
gagccacugcacuccaaucugggugacagaau

SEQ ID NO: 423565 - RNA, 32 nt, Human
gagccacugcacuccagcccaggugacagagu

SEQ ID NO: 423566 - RNA, 32 nt, Human
gagccacugcacuccagccucggccacagugc

SEQ ID NO: 423567 - RNA, 32 nt, Human
gagccacugcacuccagccugaugacagagca

SEQ ID NO: 423568 - RNA, 32 nt, Human
gagccacugcacuccagccugggcaacagaug

SEQ ID NO: 423569 - RNA, 32 nt, Human
gagccacugcacuccagccugggcaauagagc

SEQ ID NO: 423570 - RNA, 32 nt, Human
gagccacugcacuccagccugggcagcugaac

SEQ ID NO: 423571 - RNA, 32 nt, Human
gagccacugcacuccagccugggcgacagagc

SEQ ID NO: 423572 - RNA, 32 nt, Human
gagccacugcacuccagccugggggaaagagc

SEQ ID NO: 423573 - RNA, 32 nt, Human
gagccacugcacuccagccugggugacagagc

SEQ ID NO: 423574 - RNA, 32 nt, Human
gagccacugcacuccagccugggugacagagu

SEQ ID NO: 423575 - RNA, 32 nt, Human
gagccacugcacuccagccugggugacagcgc

SEQ ID NO: 423576 - RNA, 32 nt, Human
gagccacugcacuccagccugggugacugagc

SEQ ID NO: 423577 - RNA, 32 nt, Human
gagccacugcacuccagccugggugaugaaga

SEQ ID NO: 423578 - RNA, 32 nt, Human
gagccacugcacuccugggcaacagagcaaga

SEQ ID NO: 423579 - RNA, 32 nt, Human
gagccacugcauuccagccugggcgaaagaga

SEQ ID NO: 423580 - RNA, 32 nt, Human
gagccacugccuccccugccuccccugccugc

SEQ ID NO: 423581 - RNA, 32 nt, Human
gagccacugccuggccuggccguagguuugua

SEQ ID NO: 423582 - RNA, 21 nt, Human
gagccacugcgcccagccuga

SEQ ID NO: 423583 - RNA, 20 nt, Human
gagccacugcgcccggccua

SEQ ID NO: 423584 - RNA, 21 nt, Human
gagccacugcgcccggccuaa

SEQ ID NO: 423585 - RNA, 21 nt, Human
gagccacugcgcccggccuag

SEQ ID NO: 423586 - RNA, 19 nt, Human
gagccacugcgccuggccu

SEQ ID NO: 423587 - RNA, 21 nt, Human
gagccacugcgccuggccuaa

SEQ ID NO: 423588 - RNA, 21 nt, Human
gagccacugcgccuggccuag

SEQ ID NO: 423589 - RNA, 21 nt, Human
gagccacugcguccugccuaa

SEQ ID NO: 423590 - RNA, 32 nt, Human
gagccacugcucagugcacuucucccuuccaa

SEQ ID NO: 423591 - RNA, 18 nt, Human
gagccacugcuccuggcc

SEQ ID NO: 423592 - RNA, 32 nt, Human
gagccacuggaggaagcuguuuugagccaggg

SEQ ID NO: 423593 - RNA, 21 nt, Human
gagccacugggcccagccuaa

SEQ ID NO: 423594 - RNA, 23 nt, Human
gagccacuggggccaaagugaga

SEQ ID NO: 423595 - RNA, 21 nt, Human
gagccacuguaccccgccuaa

SEQ ID NO: 423596 - RNA, 32 nt, Human
gagccacuguacuccagccuaggugacaaagc

SEQ ID NO: 423597 - RNA, 32 nt, Human
gagccacuguccccggccuccuggcuuccuuc

SEQ ID NO: 423598 - RNA, 32 nt, Human
gagccacugugccaggcacaauggucuuuugu

SEQ ID NO: 423599 - RNA, 18 nt, Human
gagccacugugccaggcc

SEQ ID NO: 423600 - RNA, 21 nt, Human
gagccacugugcccagccuaa

SEQ ID NO: 423601 - RNA, 32 nt, Human
gagccacugugcccagccuaguuucuuuucug

SEQ ID NO: 423602 - RNA, 18 nt, Human
gagccacugugcccggcc

SEQ ID NO: 423603 - RNA, 20 nt, Human
gagccacugugcccggccua

SEQ ID NO: 423604 - RNA, 21 nt, Human
gagccacugugcccggccuag

SEQ ID NO: 423605 - RNA, 32 nt, Human
gagccacugugcccggccuuuugaguuaauuu

SEQ ID NO: 423606 - RNA, 20 nt, Human
gagccacugugccuagccua

SEQ ID NO: 423607 - RNA, 18 nt, Human
gagccacugugccuggcc

SEQ ID NO: 423608 - RNA, 19 nt, Human
gagccacugugccuggccu

SEQ ID NO: 423609 - RNA, 21 nt, Human
gagccacugugccuggccuga

SEQ ID NO: 423610 - RNA, 22 nt, Human
gagccacugugccuggccugua

SEQ ID NO: 423611 - RNA, 32 nt, Human
gagccacugugccuggccuucuaguucuuuaa

SEQ ID NO: 423612 - RNA, 32 nt, Human
gagccacugugccuggcugaguuuucuuaaag

SEQ ID NO: 423613 - RNA, 32 nt, Human
gagccacugugccuggcuggcagagcuuuucc

SEQ ID NO: 423614 - RNA, 32 nt, Human
gagccacugugccuggcugguuauuuuguuug

SEQ ID NO: 423615 - RNA, 32 nt, Human
gagccacugugccuggcuucaggcugggauuu

SEQ ID NO: 423616 - RNA, 20 nt, Human
gagccacugugcucggccua

SEQ ID NO: 423617 - RNA, 22 nt, Human
gagccacuguggaagcagagca

SEQ ID NO: 423618 - RNA, 18 nt, Human
gagccacugugucuggcc

SEQ ID NO: 423619 - RNA, 32 nt, Human
gagccacuuacccggccucugccucuuguuaa

SEQ ID NO: 423620 - RNA, 21 nt, Human
gagccagaaaccacccagaga

SEQ ID NO: 423621 - RNA, 22 nt, Human
gagccagaagagcacggagcag

SEQ ID NO: 423622 - RNA, 32 nt, Human
gagccagaaguggccccucugccccuccaggc

SEQ ID NO: 423623 - RNA, 32 nt, Human
gagccagacagacccugaaaagaaggacgggu

SEQ ID NO: 423624 - RNA, 22 nt, Human
gagccagaccauuucuucccca

SEQ ID NO: 423625 - RNA, 32 nt, Human
gagccagacccauggggccaaggaagaggaag

SEQ ID NO: 423626 - RNA, 32 nt, Human
gagccagaccuggagaaauagccccagggccc

SEQ ID NO: 423627 - RNA, 32 nt, Human
gagccagagagguagaggcugcagugagcuau

SEQ ID NO: 423628 - RNA, 19 nt, Human
gagccagagcccacagagc

SEQ ID NO: 423629 - RNA, 32 nt, Human
gagccagagcuuccgcauuuucuuuacuauuc

SEQ ID NO: 423630 - RNA, 32 nt, Human
gagccagaggaagagauagccauggaggacag

SEQ ID NO: 423631 - RNA, 32 nt, Human
gagccagaggaauguuccaaagagccagaagc

SEQ ID NO: 423632 - RNA, 32 nt, Human
gagccagaggagcacaggcgggcaggucacug

SEQ ID NO: 423633 - RNA, 32 nt, Human
gagccagaggcagaggagcugcgcggacgccg

SEQ ID NO: 423634 - RNA, 32 nt, Human
gagccagagggaggaaguugaaaggauacuaa

SEQ ID NO: 423635 - RNA, 32 nt, Human
gagccagaguggcugggaugugggagcagcau

SEQ ID NO: 423636 - RNA, 32 nt, Human
gagccagaucaaaguauguauguuguuaauau

SEQ ID NO: 423637 - RNA, 32 nt, Human
gagccagaucagugcgagugugacugaaaaug

SEQ ID NO: 423638 - RNA, 32 nt, Human
gagccagaucccuggucaugccuggaagcuuu

SEQ ID NO: 423639 - RNA, 32 nt, Human
gagccagaugccagcaccugagguugcccacc

SEQ ID NO: 423640 - RNA, 32 nt, Human
gagccagaugcugaggaagagauuccgggagg

SEQ ID NO: 423641 - RNA, 23 nt, Human
gagccagauucauuccuucuuca

SEQ ID NO: 423642 - RNA, 24 nt, Human
gagccagauuuucucugugcucuu

SEQ ID NO: 423643 - RNA, 32 nt, Human
gagccagcacuugccuuuacgaccauguucaa

SEQ ID NO: 423644 - RNA, 32 nt, Human
gagccagcagaggccuccacccagugcuggga

SEQ ID NO: 423645 - RNA, 32 nt, Human
gagccagcaggccucccugaaacacugcuucu

SEQ ID NO: 423646 - RNA, 32 nt, Human
gagccagcagggcaucuuggaaaaggaacucu

SEQ ID NO: 423647 - RNA, 32 nt, Human
gagccagccagggaggggcagcugcagugacc

SEQ ID NO: 423648 - RNA, 32 nt, Human
gagccagcccaggguccccaguucucaacacu

SEQ ID NO: 423649 - RNA, 32 nt, Human
gagccagcccggcgcccuagcagaugcacgug

SEQ ID NO: 423650 - RNA, 32 nt, Human
gagccagccugaugccgacaggucuuguaacc

SEQ ID NO: 423651 - RNA, 32 nt, Human
gagccagccuucuaacagcuacccuuccauca

SEQ ID NO: 423652 - RNA, 32 nt, Human
gagccagcgacaacagcaccagagccaggcag

SEQ ID NO: 423653 - RNA, 32 nt, Human
gagccagcgagaccacgaacucaccagaagga

SEQ ID NO: 423654 - RNA, 23 nt, Human
gagccagcgaggcggcccagggg

SEQ ID NO: 423655 - RNA, 32 nt, Human
gagccagcgauccugaacuguguuccugccca

SEQ ID NO: 423656 - RNA, 24 nt, Human
gagccagcgcccucuccccucucc

SEQ ID NO: 423657 - RNA, 25 nt, Human
gagccagcgcugcugccagugugag

SEQ ID NO: 423658 - RNA, 25 nt, Human
gagccagcggagcaccgcgggcugg

SEQ ID NO: 423659 - RNA, 32 nt, Human
gagccagcggcugucuugcugccuguacuuac

SEQ ID NO: 423660 - RNA, 32 nt, Human
gagccagcuaaaccucuccucauaaaucaccg

SEQ ID NO: 423661 - RNA, 32 nt, Human
gagccagcucuaucagggucuucccauggugg

SEQ ID NO: 423662 - RNA, 32 nt, Human
gagccagcucuuccuauccuguagcguguaga

SEQ ID NO: 423663 - RNA, 32 nt, Human
gagccagcuggccugcugcucuccagucaagu

SEQ ID NO: 423664 - RNA, 26 nt, Human
gagccagcugugugaccauccagggg

SEQ ID NO: 423665 - RNA, 32 nt, Human
gagccagcuguuuccaguuguuacugaaguua

SEQ ID NO: 423666 - RNA, 32 nt, Human
gagccagcuucgccaggcgaagacagagcugg

SEQ ID NO: 423667 - RNA, 32 nt, Human
gagccagcuuuguuucagaaucugcuacuugg

SEQ ID NO: 423668 - RNA, 30 nt, Human
gagccaggaagccucaggcuucacgacuga

SEQ ID NO: 423669 - RNA, 32 nt, Human
gagccaggaagguugagguugcagugagcuau

SEQ ID NO: 423670 - RNA, 32 nt, Human
gagccaggaauccugcggucugggcccaacac

SEQ ID NO: 423671 - RNA, 32 nt, Human
gagccaggacucaaagccagucuaggagccau

SEQ ID NO: 423672 - RNA, 32 nt, Human
gagccaggacugugacacugcacuccagccug

SEQ ID NO: 423673 - RNA, 32 nt, Human
gagccaggagaaagcugauggagccaggacag

SEQ ID NO: 423674 - RNA, 32 nt, Human
gagccaggagagaaaggcagcucccuucaccu

SEQ ID NO: 423675 - RNA, 32 nt, Human
gagccaggagcagaagcaaagagcagacacac

SEQ ID NO: 423676 - RNA, 32 nt, Human
gagccaggagccaaggaaugcagcccuagaag

SEQ ID NO: 423677 - RNA, 22 nt, Human
gagccaggagcuacagagcggg

SEQ ID NO: 423678 - RNA, 32 nt, Human
gagccaggaggagcccaacagagcagcagggg

SEQ ID NO: 423679 - RNA, 32 nt, Human
gagccaggaggaggagguugcagugagccgag

SEQ ID NO: 423680 - RNA, 32 nt, Human
gagccaggaggcaguggggcugugggcucaga

SEQ ID NO: 423681 - RNA, 32 nt, Human
gagccaggagguugagguugcagugagcugag

SEQ ID NO: 423682 - RNA, 24 nt, Human
gagccaggaucaugccacugcacu

SEQ ID NO: 423683 - RNA, 24 nt, Human
gagccaggaucgcgccauugcacu

SEQ ID NO: 423684 - RNA, 24 nt, Human
gagccaggauggcaccacugcacu

SEQ ID NO: 423685 - RNA, 24 nt, Human
gagccaggauuccugauccagaga

SEQ ID NO: 423686 - RNA, 24 nt, Human
gagccaggauugcaccacugcacu

SEQ ID NO: 423687 - RNA, 24 nt, Human
gagccaggauugcgccaccacacu

SEQ ID NO: 423688 - RNA, 24 nt, Human
gagccaggauugugccacugcacu

SEQ ID NO: 423689 - RNA, 32 nt, Human
gagccaggauuuucacacccccuccucaagcu

SEQ ID NO: 423690 - RNA, 23 nt, Human
gagccaggcacccuccucuguca

SEQ ID NO: 423691 - RNA, 24 nt, Human
gagccaggcagcaaggaccagagg

SEQ ID NO: 423692 - RNA, 21 nt, Human
gagccaggcauggcauagagg

SEQ ID NO: 423693 - RNA, 32 nt, Human
gagccaggcaugguugaccugcuuuccauguc

SEQ ID NO: 423694 - RNA, 22 nt, Human
gagccaggccagggcccggaga

SEQ ID NO: 423695 - RNA, 23 nt, Human
gagccaggcccaagacacagcag

SEQ ID NO: 423696 - RNA, 32 nt, Human
gagccaggcccaggaacuucagaucaaguuca

SEQ ID NO: 423697 - RNA, 23 nt, Human
gagccaggccccagcagaugcgg

SEQ ID NO: 423698 - RNA, 23 nt, Human
gagccaggccccccaggaggcag

SEQ ID NO: 423699 - RNA, 21 nt, Human
gagccaggcccugaggaacag

SEQ ID NO: 423700 - RNA, 22 nt, Human
gagccaggccggaacucaggga

SEQ ID NO: 423701 - RNA, 32 nt, Human
gagccaggccuccucaaguuggccucucagac

SEQ ID NO: 423702 - RNA, 21 nt, Human
gagccaggcgucccucugccu

SEQ ID NO: 423703 - RNA, 22 nt, Human
gagccaggcguggagcgcgaga

SEQ ID NO: 423704 - RNA, 20 nt, Human
gagccaggcucucgcucugu

SEQ ID NO: 423705 - RNA, 22 nt, Human
gagccaggcugugcccgaggga

SEQ ID NO: 423706 - RNA, 32 nt, Human
gagccaggcuuuguagcgaggccaggucuucg

SEQ ID NO: 423707 - RNA, 32 nt, Human
gagccagggagagcucacaggcacaagaauaa

SEQ ID NO: 423708 - RNA, 32 nt, Human
gagccagggaggucaaggcugcagugagccgu

SEQ ID NO: 423709 - RNA, 32 nt, Human
gagccagggagguggaggcuacagugagccau

SEQ ID NO: 423710 - RNA, 20 nt, Human
gagccagggaucuuggccua

SEQ ID NO: 423711 - RNA, 22 nt, Human
gagccagggccuggcgagcugg

SEQ ID NO: 423712 - RNA, 24 nt, Human
gagccagggcgugucucccggagg

SEQ ID NO: 423713 - RNA, 32 nt, Human
gagccaggggagaaggguguggggaucagaca

SEQ ID NO: 423714 - RNA, 32 nt, Human
gagccagggguagguucuggaggcucaagcaa

SEQ ID NO: 423715 - RNA, 21 nt, Human
gagccaggguucccccaggga

SEQ ID NO: 423716 - RNA, 20 nt, Human
gagccaggguuucaccaugu

SEQ ID NO: 423717 - RNA, 23 nt, Human
gagccaggguuucaccaugucgg

SEQ ID NO: 423718 - RNA, 20 nt, Human
gagccaggguuuccucuuca

SEQ ID NO: 423719 - RNA, 21 nt, Human
gagccagguccauaccccuuc

SEQ ID NO: 423720 - RNA, 20 nt, Human
gagccaggucccucagccca

SEQ ID NO: 423721 - RNA, 22 nt, Human
gagccagguccuccuccuccuc

SEQ ID NO: 423722 - RNA, 32 nt, Human
gagccaggucuaaaguuugaagaaaaagaaaa

SEQ ID NO: 423723 - RNA, 22 nt, Human
gagccaggucuccaccucugca

SEQ ID NO: 423724 - RNA, 32 nt, Human
gagccaggugcaggccauuggagagaaggucu

SEQ ID NO: 423725 - RNA, 22 nt, Human
gagccaggugcugcucagcaga

SEQ ID NO: 423726 - RNA, 23 nt, Human
gagccagguggacaugccagaga

SEQ ID NO: 423727 - RNA, 32 nt, Human
gagccagguggagccacuugaggucagguguu

SEQ ID NO: 423728 - RNA, 32 nt, Human
gagccagguggguggagggagggagaucauga

SEQ ID NO: 423729 - RNA, 21 nt, Human
gagccagguugguaguuacaa

SEQ ID NO: 423730 - RNA, 21 nt, Human
gagccaguaccgccugcacuu

SEQ ID NO: 423731 - RNA, 21 nt, Human
gagccaguagugaucaguauc

SEQ ID NO: 423732 - RNA, 32 nt, Human
gagccagucaucuccauccauccacagccaug

SEQ ID NO: 423733 - RNA, 20 nt, Human
gagccaguccucccuuccca

SEQ ID NO: 423734 - RNA, 32 nt, Human
gagccagugagaggccagcuuagagaaugcuu

SEQ ID NO: 423735 - RNA, 22 nt, Human
gagccagugcuuccccucuccc

SEQ ID NO: 423736 - RNA, 32 nt, Human
gagccaguggagguggccuggagcagcagccc

SEQ ID NO: 423737 - RNA, 32 nt, Human
gagccaguggggacacagcaauaaugugggug

SEQ ID NO: 423738 - RNA, 32 nt, Human
gagccagugugggcauggucacgacgcggggc

SEQ ID NO: 423739 - RNA, 32 nt, Human
gagccauagagcacccuuccuccugggccaga

SEQ ID NO: 423740 - RNA, 22 nt, Human
gagccauaugagcccucagggg

SEQ ID NO: 423741 - RNA, 20 nt, Human
gagccauauuuugagacccc

SEQ ID NO: 423742 - RNA, 32 nt, Human
gagccaucaccuaggacugacucggcagugug

SEQ ID NO: 423743 - RNA, 32 nt, Human
gagccaucacuacggauacgggcugcuggacg

SEQ ID NO: 423744 - RNA, 24 nt, Human
gagccaucaucaugccacugcacu

SEQ ID NO: 423745 - RNA, 32 nt, Human
gagccaucauucaucccuuaacaggcacauua

SEQ ID NO: 423746 - RNA, 32 nt, Human
gagccaucccacucccuuuccccucuucccug

SEQ ID NO: 423747 - RNA, 32 nt, Human
gagccaucccaucaucugucauggguugaccc

SEQ ID NO: 423748 - RNA, 32 nt, Human
gagccauccuccugccugggccucccaaagug

SEQ ID NO: 423749 - RNA, 32 nt, Human
gagccauccugucuucugcuugagugucuuca

SEQ ID NO: 423750 - RNA, 18 nt, Human
gagccaucgugucuggcc

SEQ ID NO: 423751 - RNA, 32 nt, Human
gagccaucugcuggucaggaaguccuccagag

SEQ ID NO: 423752 - RNA, 19 nt, Human
gagccaucuguccuucuca

SEQ ID NO: 423753 - RNA, 32 nt, Human
gagccaucuuuuacagauuauuuuggaguuuu

SEQ ID NO: 423754 - RNA, 32 nt, Human
gagccaugaagagggaaggaaaagagggcaag

SEQ ID NO: 423755 - RNA, 32 nt, Human
gagccaugaaggugaaaggcagucuuucguua

SEQ ID NO: 423756 - RNA, 24 nt, Human
gagccaugaaugccccacugcacu

SEQ ID NO: 423757 - RNA, 32 nt, Human
gagccaugacggugccacugcacuccagcuug

SEQ ID NO: 423758 - RNA, 23 nt, Human
gagccaugacugugccacugcac

SEQ ID NO: 423759 - RNA, 32 nt, Human
gagccaugaggagccucaguuuugaaagaggu

SEQ ID NO: 423760 - RNA, 23 nt, Human
gagccaugaggcaccacugcacu

SEQ ID NO: 423761 - RNA, 32 nt, Human
gagccaugauauugccagccugggugacagag

SEQ ID NO: 423762 - RNA, 24 nt, Human
gagccaugaucacaccacugcacu

SEQ ID NO: 423763 - RNA, 24 nt, Human
gagccaugaucauaccacugcacu

SEQ ID NO: 423764 - RNA, 24 nt, Human
gagccaugaucaugccacugcacu

SEQ ID NO: 423765 - RNA, 24 nt, Human
gagccaugaucgagccacugcacu

SEQ ID NO: 423766 - RNA, 24 nt, Human
gagccaugaucgcaccacugcacu

SEQ ID NO: 423767 - RNA, 24 nt, Human
gagccaugaucgcaccauugcacu

SEQ ID NO: 423768 - RNA, 24 nt, Human
gagccaugaucgcgccacugcacu

SEQ ID NO: 423769 - RNA, 24 nt, Human
gagccaugaucgugccacuacacu

SEQ ID NO: 423770 - RNA, 32 nt, Human
gagccaugauggacacagaggggcaguagagg

SEQ ID NO: 423771 - RNA, 32 nt, Human
gagccaugaugguaccccugcacuccagccca

SEQ ID NO: 423772 - RNA, 24 nt, Human
gagccaugauggugccacugcacu

SEQ ID NO: 423773 - RNA, 32 nt, Human
gagccaugauggugccacugcacuccagccug

SEQ ID NO: 423774 - RNA, 24 nt, Human
gagccaugauuacuccacugcacu

SEQ ID NO: 423775 - RNA, 25 nt, Human
gagccaugauucacagcacugcacu

SEQ ID NO: 423776 - RNA, 24 nt, Human
gagccaugauugcaccacugcacu

SEQ ID NO: 423777 - RNA, 24 nt, Human
gagccaugauugcaccacuguacu

SEQ ID NO: 423778 - RNA, 24 nt, Human
gagccaugauugugccacugcacu

SEQ ID NO: 423779 - RNA, 32 nt, Human
gagccaugcagggcagccugguggcggcuagg

SEQ ID NO: 423780 - RNA, 32 nt, Human
gagccaugccaaugcacuccagucugggcaac

SEQ ID NO: 423781 - RNA, 24 nt, Human
gagccaugcucacaccacugcacu

SEQ ID NO: 423782 - RNA, 32 nt, Human
gagccaugcucacaccacugcacuccagccug

SEQ ID NO: 423783 - RNA, 30 nt, Human
gagccaugggcaacaucuccucuaacaucu

SEQ ID NO: 423784 - RNA, 32 nt, Human
gagccauggggccggagccgcagugagcacca

SEQ ID NO: 423785 - RNA, 32 nt, Human
gagccaugguauaaauuaacagguuaauguca

SEQ ID NO: 423786 - RNA, 30 nt, Human
gagccauggugaacgaagccagaggaaaca

SEQ ID NO: 423787 - RNA, 32 nt, Human
gagccaugguguuggccccugaggcagccugu

SEQ ID NO: 423788 - RNA, 32 nt, Human
gagccauguagggaggcuauucccaggcauac

SEQ ID NO: 423789 - RNA, 32 nt, Human
gagccauguauacaucugaacuccuccugggc

SEQ ID NO: 423790 - RNA, 24 nt, Human
gagccauguucacaccgcugcacu

SEQ ID NO: 423791 - RNA, 19 nt, Human
gagccauuacaacagcuua

SEQ ID NO: 423792 - RNA, 32 nt, Human
gagccauucccuguguguucacucuccuccca

SEQ ID NO: 423793 - RNA, 26 nt, Human
gagccauuccucacccccgugaccuc

SEQ ID NO: 423794 - RNA, 32 nt, Human
gagccauucucaauaaacauuugcugaagaaa

SEQ ID NO: 423795 - RNA, 32 nt, Human
gagccauucugugacaaacucaccucccaaag

SEQ ID NO: 423796 - RNA, 32 nt, Human
gagccauucugugugugacucuggguggaagu

SEQ ID NO: 423797 - RNA, 32 nt, Human
gagccauugcacuccagccuggacagcaggag

SEQ ID NO: 423798 - RNA, 32 nt, Human
gagccauugcacuccagccugggcaacaagag

SEQ ID NO: 423799 - RNA, 32 nt, Human
gagccauugcaggccucugccugcugcccccu

SEQ ID NO: 423800 - RNA, 32 nt, Human
gagccauugccaaaugguaaagaaaugaaaag

SEQ ID NO: 423801 - RNA, 32 nt, Human
gagccauugcucuccagccugggugacacagc

SEQ ID NO: 423802 - RNA, 22 nt, Human
gagccauuucaaucuugacuuc

SEQ ID NO: 423803 - RNA, 32 nt, Human
gagccauuucugggcacguggcagcagucgcu

SEQ ID NO: 423804 - RNA, 32 nt, Human
gagccauuugugagagagaauccggaagcguu

SEQ ID NO: 423805 - RNA, 32 nt, Human
gagcccaaauaaugccugcuggauugucuccu

SEQ ID NO: 423806 - RNA, 18 nt, Human
gagcccaacagagcagca

SEQ ID NO: 423807 - RNA, 20 nt, Human
gagcccaaccuggcacucaa

SEQ ID NO: 423808 - RNA, 21 nt, Human
gagcccaacugauggcccugg

SEQ ID NO: 423809 - RNA, 24 nt, Human
gagcccaagaggcagagguugcag

SEQ ID NO: 423810 - RNA, 32 nt, Human
gagcccaagaggcagagguugcagggucaaga

SEQ ID NO: 423811 - RNA, 24 nt, Human
gagcccaagagguagagguugcag

SEQ ID NO: 423812 - RNA, 32 nt, Human
gagcccaagagguagagguugcagugagccaa

SEQ ID NO: 423813 - RNA, 32 nt, Human
gagcccaagagguggagguuacagugagcaga

SEQ ID NO: 423814 - RNA, 32 nt, Human
gagcccaagagguugaggcugcagugagccau

SEQ ID NO: 423815 - RNA, 32 nt, Human
gagcccaagagucggagaccagccugggcaac

SEQ ID NO: 423816 - RNA, 32 nt, Human
gagcccaagaguucaagaccagccugggaaac

SEQ ID NO: 423817 - RNA, 32 nt, Human
gagcccaagaguucaagaucagccugggcagu

SEQ ID NO: 423818 - RNA, 32 nt, Human
gagcccaagaguuccagaccagccuggccacc

SEQ ID NO: 423819 - RNA, 32 nt, Human
gagcccaagaguucgacgcugcagugagcuau

SEQ ID NO: 423820 - RNA, 32 nt, Human
gagcccaagaguucgagaccagccugggcaac

SEQ ID NO: 423821 - RNA, 32 nt, Human
gagcccaagaguuggagaccagccugggcaac

SEQ ID NO: 423822 - RNA, 32 nt, Human
gagcccaagaguuuuagaccagccugggcaac

SEQ ID NO: 423823 - RNA, 32 nt, Human
gagcccaagauauccuuccugaggcagagauu

SEQ ID NO: 423824 - RNA, 20 nt, Human
gagcccaagcaaagccauca

SEQ ID NO: 423825 - RNA, 19 nt, Human
gagcccaagcagcacucag

SEQ ID NO: 423826 - RNA, 32 nt, Human
gagcccaagcagcacucaggagaggggagaaa

SEQ ID NO: 423827 - RNA, 21 nt, Human
gagcccaagccaagcaucgca

SEQ ID NO: 423828 - RNA, 22 nt, Human
gagcccaagccaagccaucgca

SEQ ID NO: 423829 - RNA, 22 nt, Human
gagcccaagccccuccccucca

SEQ ID NO: 423830 - RNA, 18 nt, Human
gagcccaagccgcagcaa

SEQ ID NO: 423831 - RNA, 32 nt, Human
gagcccaagccgcggucccgggccggcaccca

SEQ ID NO: 423832 - RNA, 19 nt, Human
gagcccaagcgucccucag

SEQ ID NO: 423833 - RNA, 32 nt, Human
gagcccaagguggguggaucaccugagguaag

SEQ ID NO: 423834 - RNA, 32 nt, Human
gagcccaagucccguuuccccaaaaauccccc

SEQ ID NO: 423835 - RNA, 16 nt, Human
gagcccaagugccauc

SEQ ID NO: 423836 - RNA, 32 nt, Human
gagcccaaugacacuucugccuaggcucgcgc

SEQ ID NO: 423837 - RNA, 32 nt, Human
gagcccacaccaucuggcccaggcuggccccc

SEQ ID NO: 423838 - RNA, 32 nt, Human
gagcccacagcugacuucauggugcuacaaua

SEQ ID NO: 423839 - RNA, 32 nt, Human
gagcccacagcugugggaggggcugcuacugc

SEQ ID NO: 423840 - RNA, 32 nt, Human
gagcccacagcuuccaagcaggaaaagggacc

SEQ ID NO: 423841 - RNA, 30 nt, Human
gagcccacagcuugccaagaaagaccccaa

SEQ ID NO: 423842 - RNA, 32 nt, Human
gagcccaccagccuggcauccauguugacauc

SEQ ID NO: 423843 - RNA, 32 nt, Human
gagcccaccagcugccagacauccuaugugga

SEQ ID NO: 423844 - RNA, 32 nt, Human
gagcccacgagauggaaguugcagugaacuga

SEQ ID NO: 423845 - RNA, 32 nt, Human
gagcccacgaggauggucacaugccaugugca

SEQ ID NO: 423846 - RNA, 32 nt, Human
gagcccacgaguucaaggcugcagugagucgu

SEQ ID NO: 423847 - RNA, 18 nt, Human
gagcccacggcuguccuc

SEQ ID NO: 423848 - RNA, 22 nt, Human
gagcccacgucgccugucaccc

SEQ ID NO: 423849 - RNA, 32 nt, Human
gagcccacucaaaggggagacagaggcagugc

SEQ ID NO: 423850 - RNA, 32 nt, Human
gagcccacugaggggccagggaggaaggaggc

SEQ ID NO: 423851 - RNA, 32 nt, Human
gagcccacuucuauguggagaggggagcaccc

SEQ ID NO: 423852 - RNA, 18 nt, Human
gagcccagaacauucccc

SEQ ID NO: 423853 - RNA, 32 nt, Human
gagcccagaagcucaaggcugcagugagccaa

SEQ ID NO: 423854 - RNA, 32 nt, Human
gagcccagaagcuggaaguugcaaugaacuau

SEQ ID NO: 423855 - RNA, 32 nt, Human
gagcccagaagcuugaagcugcagugagcuag

SEQ ID NO: 423856 - RNA, 32 nt, Human
gagcccagaagguugaagcugcagugaguugu

SEQ ID NO: 423857 - RNA, 32 nt, Human
gagcccagaaguucaagggugcagugagcuau

SEQ ID NO: 423858 - RNA, 32 nt, Human
gagcccagaaguucgaggccagccuggccaac

SEQ ID NO: 423859 - RNA, 32 nt, Human
gagcccagaaguucgagguugcagugagccau

SEQ ID NO: 423860 - RNA, 32 nt, Human
gagcccagaaguuugagaccagccuaggcaac

SEQ ID NO: 423861 - RNA, 32 nt, Human
gagcccagaaguuugagaccagccugugcaac

SEQ ID NO: 423862 - RNA, 32 nt, Human
gagcccagaaguuugagacugcagugagccau

SEQ ID NO: 423863 - RNA, 32 nt, Human
gagcccagaaguuugaggccagccugggaaau

SEQ ID NO: 423864 - RNA, 32 nt, Human
gagcccagaaguuugaggcugcaaugagccgu

SEQ ID NO: 423865 - RNA, 32 nt, Human
gagcccagacacaccuggguccccauucuggg

SEQ ID NO: 423866 - RNA, 19 nt, Human
gagcccagacacgucuccu

SEQ ID NO: 423867 - RNA, 21 nt, Human
gagcccagacccugcucuccu

SEQ ID NO: 423868 - RNA, 23 nt, Human
gagcccagaccuccccucuuccu

SEQ ID NO: 423869 - RNA, 19 nt, Human
gagcccagacgaccccucu

SEQ ID NO: 423870 - RNA, 32 nt, Human
gagcccagagccgagagcaggagucggcucug

SEQ ID NO: 423871 - RNA, 32 nt, Human
gagcccagagccuccugccacacacaugcaca

SEQ ID NO: 423872 - RNA, 32 nt, Human
gagcccagaggcggagguugcagugagccgag

SEQ ID NO: 423873 - RNA, 32 nt, Human
gagcccagagguagaggcugcagugagccaug

SEQ ID NO: 423874 - RNA, 32 nt, Human
gagcccagauagccccacugcacuccagccug

SEQ ID NO: 423875 - RNA, 20 nt, Human
gagcccagaucacccauucc

SEQ ID NO: 423876 - RNA, 24 nt, Human
gagcccagaucgcaccacugcacu

SEQ ID NO: 423877 - RNA, 32 nt, Human
gagcccagaucgcaccacugcacuccagucug

SEQ ID NO: 423878 - RNA, 24 nt, Human
gagcccagaucgcgacacugcacu

SEQ ID NO: 423879 - RNA, 24 nt, Human
gagcccagaucgcgccauugcacu

SEQ ID NO: 423880 - RNA, 18 nt, Human
gagcccagaucuauuccc

SEQ ID NO: 423881 - RNA, 18 nt, Human
gagcccagaucugccccc

SEQ ID NO: 423882 - RNA, 24 nt, Human
gagcccagauggcgccacugcacu

SEQ ID NO: 423883 - RNA, 32 nt, Human
gagcccagauggcgccacugcacuccagccug

SEQ ID NO: 423884 - RNA, 32 nt, Human
gagcccagauugcaccacuacacuccagccug

SEQ ID NO: 423885 - RNA, 24 nt, Human
gagcccagauugcaccacugcacu

SEQ ID NO: 423886 - RNA, 19 nt, Human
gagcccagauuucuucccc

SEQ ID NO: 423887 - RNA, 18 nt, Human
gagcccagcacugacccc

SEQ ID NO: 423888 - RNA, 20 nt, Human
gagcccagcacuuacucccc

SEQ ID NO: 423889 - RNA, 32 nt, Human
gagcccagcaggcagagguugcagugagcuga

SEQ ID NO: 423890 - RNA, 32 nt, Human
gagcccagcaguucaagaccagccugggcaac

SEQ ID NO: 423891 - RNA, 32 nt, Human
gagcccagcaguucgagaccagccuggacaac

SEQ ID NO: 423892 - RNA, 32 nt, Human
gagcccagcaguuggaggcugcagugagcuau

SEQ ID NO: 423893 - RNA, 19 nt, Human
gagcccagccacccucccc

SEQ ID NO: 423894 - RNA, 20 nt, Human
gagcccagcccccacccccc

SEQ ID NO: 423895 - RNA, 19 nt, Human
gagcccagccgcccgcccc

SEQ ID NO: 423896 - RNA, 21 nt, Human
gagcccagccgcccguccccu

SEQ ID NO: 423897 - RNA, 32 nt, Human
gagcccagccucucccugccaaagcccaacuc

SEQ ID NO: 423898 - RNA, 20 nt, Human
gagcccagccugggggccag

SEQ ID NO: 423899 - RNA, 16 nt, Human
gagcccagccugugcc

SEQ ID NO: 423900 - RNA, 25 nt, Human
gagcccagcgcccuccucuucuccu

SEQ ID NO: 423901 - RNA, 32 nt, Human
gagcccagcgcuggcccugccuccgccugccc

SEQ ID NO: 423902 - RNA, 32 nt, Human
gagcccagcggucccgaggaaaacuugggcaa

SEQ ID NO: 423903 - RNA, 32 nt, Human
gagcccagcugucgguccccagcccugcccgg

SEQ ID NO: 423904 - RNA, 32 nt, Human
gagcccagcugucugcaguggcugacagcagg

SEQ ID NO: 423905 - RNA, 21 nt, Human
gagcccagcuugaccuccccu

SEQ ID NO: 423906 - RNA, 21 nt, Human
gagcccagcuuggcucccccu

SEQ ID NO: 423907 - RNA, 32 nt, Human
gagcccagcuuuagaguccacagggaaagcua

SEQ ID NO: 423908 - RNA, 32 nt, Human
gagcccaggaaauugaggcugcagugagccau

SEQ ID NO: 423909 - RNA, 32 nt, Human
gagcccaggaagcagagauuccagugaguuga

SEQ ID NO: 423910 - RNA, 24 nt, Human
gagcccaggaagcagagguugcag

SEQ ID NO: 423911 - RNA, 32 nt, Human
gagcccaggaagcagagguugcagugagccuc

SEQ ID NO: 423912 - RNA, 32 nt, Human
gagcccaggaagcaucccauaaccaaccuuca

SEQ ID NO: 423913 - RNA, 18 nt, Human
gagcccaggaagccccuc

SEQ ID NO: 423914 - RNA, 32 nt, Human
gagcccaggaagcggagguuacagugagcuga

SEQ ID NO: 423915 - RNA, 23 nt, Human
gagcccaggaagcggagguugca

SEQ ID NO: 423916 - RNA, 32 nt, Human
gagcccaggaagcggagguugcaaugagccga

SEQ ID NO: 423917 - RNA, 22 nt, Human
gagcccaggaagcucagccccu

SEQ ID NO: 423918 - RNA, 32 nt, Human
gagcccaggaagucaaggcugcagugagcugu

SEQ ID NO: 423919 - RNA, 22 nt, Human
gagcccaggaagugcguccccu

SEQ ID NO: 423920 - RNA, 32 nt, Human
gagcccaggaaguggaggcugcagugaccuau

SEQ ID NO: 423921 - RNA, 24 nt, Human
gagcccaggaaguggagguugcag

SEQ ID NO: 423922 - RNA, 32 nt, Human
gagcccaggaaguggagguugcagugagcaga

SEQ ID NO: 423923 - RNA, 32 nt, Human
gagcccaggaaguugaggcugcagugagcugu

SEQ ID NO: 423924 - RNA, 32 nt, Human
gagcccaggaauucaaggcugcagugaacuau

SEQ ID NO: 423925 - RNA, 32 nt, Human
gagcccaggaauucgagaccagccugggcaac

SEQ ID NO: 423926 - RNA, 32 nt, Human
gagcccaggaauucgagaccagccugggccac

SEQ ID NO: 423927 - RNA, 32 nt, Human
gagcccaggaauuggaaagcagccuggccaac

SEQ ID NO: 423928 - RNA, 32 nt, Human
gagcccaggaauuggaggcugcagugagcuau

SEQ ID NO: 423929 - RNA, 32 nt, Human
gagcccaggaauuugagaccagccuggacaac

SEQ ID NO: 423930 - RNA, 32 nt, Human
gagcccaggaauuugagaccagccugggcaac

SEQ ID NO: 423931 - RNA, 32 nt, Human
gagcccaggaauuugaggcugcagugagcuau

SEQ ID NO: 423932 - RNA, 21 nt, Human
gagcccaggacacuugucccu

SEQ ID NO: 423933 - RNA, 25 nt, Human
gagcccaggaccccaccacugcacu

SEQ ID NO: 423934 - RNA, 32 nt, Human
gagcccaggacucuaaggcugcagugagcuau

SEQ ID NO: 423935 - RNA, 32 nt, Human
gagcccaggacugagggcuccucccgggcgcu

SEQ ID NO: 423936 - RNA, 32 nt, Human
gagcccaggagaugcaggcuugcagugagcca

SEQ ID NO: 423937 - RNA, 24 nt, Human
gagcccaggagauggagguugcag

SEQ ID NO: 423938 - RNA, 32 nt, Human
gagcccaggagauugaggcugcagugagcaug

SEQ ID NO: 423939 - RNA, 32 nt, Human
gagcccaggagauugaggcugcagugagccau

SEQ ID NO: 423940 - RNA, 32 nt, Human
gagcccaggagcucaagauugcagugagcuau

SEQ ID NO: 423941 - RNA, 22 nt, Human
gagcccaggagcugagucaccu

SEQ ID NO: 423942 - RNA, 32 nt, Human
gagcccaggagcuggagaucagccugggcaac

SEQ ID NO: 423943 - RNA, 32 nt, Human
gagcccaggagcuggaggcugcagugaacuau

SEQ ID NO: 423944 - RNA, 32 nt, Human
gagcccaggaggaggaggcugcagugagcuaa

SEQ ID NO: 423945 - RNA, 32 nt, Human
gagcccaggaggcacaggcugcagugagcaga

SEQ ID NO: 423946 - RNA, 32 nt, Human
gagcccaggaggcagaauuugcagugagcuga

SEQ ID NO: 423947 - RNA, 24 nt, Human
gagcccaggaggcagaggcugcag

SEQ ID NO: 423948 - RNA, 32 nt, Human
gagcccaggaggcagaggcugcagugagccau

SEQ ID NO: 423949 - RNA, 32 nt, Human
gagcccaggaggcagaggcugcagugagccga

SEQ ID NO: 423950 - RNA, 24 nt, Human
gagcccaggaggcagagguugcag

SEQ ID NO: 423951 - RNA, 32 nt, Human
gagcccaggaggcagagguugcaguaagccga

SEQ ID NO: 423952 - RNA, 32 nt, Human
gagcccaggaggcagagguugcagugagccaa

SEQ ID NO: 423953 - RNA, 32 nt, Human
gagcccaggaggccaagguugcagugggccca

SEQ ID NO: 423954 - RNA, 32 nt, Human
gagcccaggaggcggagauugcagugagccga

SEQ ID NO: 423955 - RNA, 32 nt, Human
gagcccaggaggcggagcuugcagugagucga

SEQ ID NO: 423956 - RNA, 32 nt, Human
gagcccaggaggcggaggcugcagugagcuga

SEQ ID NO: 423957 - RNA, 24 nt, Human
gagcccaggaggcggagguugcag

SEQ ID NO: 423958 - RNA, 32 nt, Human
gagcccaggaggcggagguugcagugagcuga

SEQ ID NO: 423959 - RNA, 32 nt, Human
gagcccaggaggcugaggcugcaaugacugau

SEQ ID NO: 423960 - RNA, 32 nt, Human
gagcccaggaggucaagacugcagugagcuau

SEQ ID NO: 423961 - RNA, 32 nt, Human
gagcccaggaggucaaggcuacagugagccgu

SEQ ID NO: 423962 - RNA, 32 nt, Human
gagcccaggaggucaaggcugaagugagcugu

SEQ ID NO: 423963 - RNA, 32 nt, Human
gagcccaggaggucaaggcugcagugagccgu

SEQ ID NO: 423964 - RNA, 32 nt, Human
gagcccaggaggucaaggcugcagugagcugc

SEQ ID NO: 423965 - RNA, 32 nt, Human
gagcccaggaggucaaggcugcagugagcugu

SEQ ID NO: 423966 - RNA, 32 nt, Human
gagcccaggaggucaaggcugcagugagcuuu

SEQ ID NO: 423967 - RNA, 32 nt, Human
gagcccaggaggucaaggguacagugagccga

SEQ ID NO: 423968 - RNA, 32 nt, Human
gagcccaggaggucagggcugcagugagccga

SEQ ID NO: 423969 - RNA, 32 nt, Human
gagcccaggaggucgaagcugcagugagguau

SEQ ID NO: 423970 - RNA, 18 nt, Human
gagcccaggaggucgagg

SEQ ID NO: 423971 - RNA, 32 nt, Human
gagcccaggaggucgaggcugcagugagccau

SEQ ID NO: 423972 - RNA, 32 nt, Human
gagcccaggaggucgaggcugcagugagcccu

SEQ ID NO: 423973 - RNA, 32 nt, Human
gagcccaggaggucgaggcugcagugagcuau

SEQ ID NO: 423974 - RNA, 32 nt, Human
gagcccaggaggucgaggcugcagugagcugu

SEQ ID NO: 423975 - RNA, 32 nt, Human
gagcccaggaggucgaggcugcagugggccau

SEQ ID NO: 423976 - RNA, 32 nt, Human
gagcccaggaggucgaggcugcagugugcugu

SEQ ID NO: 423977 - RNA, 32 nt, Human
gagcccaggaggucgagguugcagugagcagu

SEQ ID NO: 423978 - RNA, 32 nt, Human
gagcccaggaggucuaggcugcagugagcuua

SEQ ID NO: 423979 - RNA, 24 nt, Human
gagcccaggagguggaaacugcag

SEQ ID NO: 423980 - RNA, 32 nt, Human
gagcccaggagguggaaacugcagagagucau

SEQ ID NO: 423981 - RNA, 23 nt, Human
gagcccaggagguggaggcugca

SEQ ID NO: 423982 - RNA, 32 nt, Human
gagcccaggagguggaggcugcaaugagcuga

SEQ ID NO: 423983 - RNA, 24 nt, Human
gagcccaggagguggaggcugcag

SEQ ID NO: 423984 - RNA, 32 nt, Human
gagcccaggagguggaggcugcagugagccau

SEQ ID NO: 423985 - RNA, 32 nt, Human
gagcccaggagguggagguugcaaugagccga

SEQ ID NO: 423986 - RNA, 32 nt, Human
gagcccaggagguggagguugcacugagcgga

SEQ ID NO: 423987 - RNA, 24 nt, Human
gagcccaggagguggagguugcag

SEQ ID NO: 423988 - RNA, 32 nt, Human
gagcccaggagguggagguugcagugagcaga

SEQ ID NO: 423989 - RNA, 32 nt, Human
gagcccaggagguggagguugcagugagccaa

SEQ ID NO: 423990 - RNA, 32 nt, Human
gagcccaggagguggagguugcagugagccau

SEQ ID NO: 423991 - RNA, 32 nt, Human
gagcccaggagguggagguugcagugagccga

SEQ ID NO: 423992 - RNA, 32 nt, Human
gagcccaggagguggagguugcagugagcgga

SEQ ID NO: 423993 - RNA, 32 nt, Human
gagcccaggagguggagguugcagugagcuga

SEQ ID NO: 423994 - RNA, 32 nt, Human
gagcccaggagguggagguuucagcgagcuga

SEQ ID NO: 423995 - RNA, 32 nt, Human
gagcccaggagguugagaaugcagugagcuug

SEQ ID NO: 423996 - RNA, 18 nt, Human
gagcccaggagguugagg

SEQ ID NO: 423997 - RNA, 32 nt, Human
gagcccaggagguugaggcugcagugaacuaa

SEQ ID NO: 423998 - RNA, 32 nt, Human
gagcccaggagguugaggcugcagugagcaga

SEQ ID NO: 423999 - RNA, 32 nt, Human
gagcccaggagguugaggcugcagugagccau

SEQ ID NO: 424000 - RNA, 32 nt, Human
gagcccaggagguugaggcugcagugagcuau

SEQ ID NO: 424001 - RNA, 32 nt, Human
gagcccaggagguugaggcugcagugagguau

SEQ ID NO: 424002 - RNA, 32 nt, Human
gagcccaggagguugaggcugcagugaggugu

SEQ ID NO: 424003 - RNA, 32 nt, Human
gagcccaggagguugaggcugcagugaguucu

SEQ ID NO: 424004 - RNA, 32 nt, Human
gagcccaggagguugaggucacagugagcugu

SEQ ID NO: 424005 - RNA, 32 nt, Human
gagcccaggagguuguggcugcagugagcugu

SEQ ID NO: 424006 - RNA, 32 nt, Human
gagcccaggagucuaggaccagccuggacaac

SEQ ID NO: 424007 - RNA, 32 nt, Human
gagcccaggagucugagaccagccuggccaac

SEQ ID NO: 424008 - RNA, 32 nt, Human
gagcccaggagucugagaccagccugggcaac

SEQ ID NO: 424009 - RNA, 32 nt, Human
gagcccaggagugcaaggcugcaaugagccag

SEQ ID NO: 424010 - RNA, 32 nt, Human
gagcccaggaguuagagaccagccugggcaac

SEQ ID NO: 424011 - RNA, 32 nt, Human
gagcccaggaguucaaaaccagccugggcaau

SEQ ID NO: 424012 - RNA, 32 nt, Human
gagcccaggaguucaaagcugcagugagucau

SEQ ID NO: 424013 - RNA, 32 nt, Human
gagcccaggaguucaagaacagccuggguaac

SEQ ID NO: 424014 - RNA, 32 nt, Human
gagcccaggaguucaagaccagccuggacaac

SEQ ID NO: 424015 - RNA, 32 nt, Human
gagcccaggaguucaagaccagccuggacagc

SEQ ID NO: 424016 - RNA, 32 nt, Human
gagcccaggaguucaagaccagccugggaaca

SEQ ID NO: 424017 - RNA, 32 nt, Human
gagcccaggaguucaagaccagccugggcaac

SEQ ID NO: 424018 - RNA, 32 nt, Human
gagcccaggaguucaagaccagccugggcaau

SEQ ID NO: 424019 - RNA, 32 nt, Human
gagcccaggaguucaagaccagccugggcuac

SEQ ID NO: 424020 - RNA, 24 nt, Human
gagcccaggaguucaagaccagcu

SEQ ID NO: 424021 - RNA, 32 nt, Human
gagcccaggaguucaagagcagccugggcaau

SEQ ID NO: 424022 - RNA, 32 nt, Human
gagcccaggaguucaaggccagccugggcaac

SEQ ID NO: 424023 - RNA, 32 nt, Human
gagcccaggaguucaaggcugcaaugagcugu

SEQ ID NO: 424024 - RNA, 32 nt, Human
gagcccaggaguucagaaucagccugggcaac

SEQ ID NO: 424025 - RNA, 24 nt, Human
gagcccaggaguucagggccagcu

SEQ ID NO: 424026 - RNA, 32 nt, Human
gagcccaggaguucagggcugcagugagccuu

SEQ ID NO: 424027 - RNA, 32 nt, Human
gagcccaggaguucagggcugcagugagguac

SEQ ID NO: 424028 - RNA, 23 nt, Human
gagcccaggaguuccagaccagc

SEQ ID NO: 424029 - RNA, 32 nt, Human
gagcccaggaguuccagaccagccugggcaau

SEQ ID NO: 424030 - RNA, 23 nt, Human
gagcccaggaguuccagaccagu

SEQ ID NO: 424031 - RNA, 32 nt, Human
gagcccaggaguucgacaccagccuggccaac

SEQ ID NO: 424032 - RNA, 32 nt, Human
gagcccaggaguucgagaccagccuggacaac

SEQ ID NO: 424033 - RNA, 32 nt, Human
gagcccaggaguucgagaccagccugggcaac

SEQ ID NO: 424034 - RNA, 24 nt, Human
gagcccaggaguucgagaccagcu

SEQ ID NO: 424035 - RNA, 32 nt, Human
gagcccaggaguucgaggcugcaaugagcuag

SEQ ID NO: 424036 - RNA, 32 nt, Human
gagcccaggaguucgaggcugcagugagcuau

SEQ ID NO: 424037 - RNA, 32 nt, Human
gagcccaggaguucgauaccagccugggcaac

SEQ ID NO: 424038 - RNA, 32 nt, Human
gagcccaggaguucgggaccagccugggaaau

SEQ ID NO: 424039 - RNA, 32 nt, Human
gagcccaggaguugaagaccagccugggcaac

SEQ ID NO: 424040 - RNA, 32 nt, Human
gagcccaggaguuggagaccagccuggauaac

SEQ ID NO: 424041 - RNA, 32 nt, Human
gagcccaggaguuggaggccagccugggcaac

SEQ ID NO: 424042 - RNA, 32 nt, Human
gagcccaggaguuggaggcugaagagagcuau

SEQ ID NO: 424043 - RNA, 32 nt, Human
gagcccaggaguuuaagaccagccugggcaac

SEQ ID NO: 424044 - RNA, 32 nt, Human
gagcccaggaguuuaaggcugcagugagcuug

SEQ ID NO: 424045 - RNA, 32 nt, Human
gagcccaggaguuugaaaccagccugggcaac

SEQ ID NO: 424046 - RNA, 32 nt, Human
gagcccaggaguuugaaaccagccuggguaac

SEQ ID NO: 424047 - RNA, 32 nt, Human
gagcccaggaguuugaagcugcagugagcuau

SEQ ID NO: 424048 - RNA, 32 nt, Human
gagcccaggaguuugaauccauccugggcagc

SEQ ID NO: 424049 - RNA, 32 nt, Human
gagcccaggaguuugacaccagccugggcaac

SEQ ID NO: 424050 - RNA, 32 nt, Human
gagcccaggaguuugagaccagccuggacaac

SEQ ID NO: 424051 - RNA, 32 nt, Human
gagcccaggaguuugagaccagccuggccaac

SEQ ID NO: 424052 - RNA, 32 nt, Human
gagcccaggaguuugagaccagccugggcaaa

SEQ ID NO: 424053 - RNA, 32 nt, Human
gagcccaggaguuugagaccagccugggcaac

SEQ ID NO: 424054 - RNA, 32 nt, Human
gagcccaggaguuugagaccagccugggcaau

SEQ ID NO: 424055 - RNA, 32 nt, Human
gagcccaggaguuugagaccagccuggguaac

SEQ ID NO: 424056 - RNA, 24 nt, Human
gagcccaggaguuugagaccagcu

SEQ ID NO: 424057 - RNA, 32 nt, Human
gagcccaggaguuugagaucagccuggucaac

SEQ ID NO: 424058 - RNA, 32 nt, Human
gagcccaggaguuugaggaugcagugagcuau

SEQ ID NO: 424059 - RNA, 32 nt, Human
gagcccaggaguuugaggccagccugggcaac

SEQ ID NO: 424060 - RNA, 32 nt, Human
gagcccaggaguuugaggcugcagugaacuau

SEQ ID NO: 424061 - RNA, 32 nt, Human
gagcccaggaguuugaggcugcagugagccau

SEQ ID NO: 424062 - RNA, 32 nt, Human
gagcccaggaguuugaggcugcagugagcuau

SEQ ID NO: 424063 - RNA, 32 nt, Human
gagcccaggaguuugaggcugcagugagcugu

SEQ ID NO: 424064 - RNA, 32 nt, Human
gagcccaggaguuugaggcugcagugaguuau

SEQ ID NO: 424065 - RNA, 32 nt, Human
gagcccaggaguuugagggcagccugggaaac

SEQ ID NO: 424066 - RNA, 32 nt, Human
gagcccaggaguuugagguugcagugagcuga

SEQ ID NO: 424067 - RNA, 32 nt, Human
gagcccaggaguuugagguugcagugagcugu

SEQ ID NO: 424068 - RNA, 32 nt, Human
gagcccaggaguuugagguugcagugcacuau

SEQ ID NO: 424069 - RNA, 32 nt, Human
gagcccaggaguuugaguccagccuggacgau

SEQ ID NO: 424070 - RNA, 32 nt, Human
gagcccaggaguuugcgaccagccugggcaga

SEQ ID NO: 424071 - RNA, 23 nt, Human
gagcccaggaguuuuagacuagc

SEQ ID NO: 424072 - RNA, 32 nt, Human
gagcccaggaugcagagguugaagugagccaa

SEQ ID NO: 424073 - RNA, 32 nt, Human
gagcccaggcacuaguauuuuccucuugccau

SEQ ID NO: 424074 - RNA, 32 nt, Human
gagcccaggcagcuguguccagugagaggugc

SEQ ID NO: 424075 - RNA, 19 nt, Human
gagcccaggccaggacucu

SEQ ID NO: 424076 - RNA, 19 nt, Human
gagcccaggcccccucccu

SEQ ID NO: 424077 - RNA, 17 nt, Human
gagcccaggcccucccu

SEQ ID NO: 424078 - RNA, 19 nt, Human
gagcccaggcccuggcccu

SEQ ID NO: 424079 - RNA, 20 nt, Human
gagcccaggccgaguucccc

SEQ ID NO: 424080 - RNA, 18 nt, Human
gagcccaggccgggcccu

SEQ ID NO: 424081 - RNA, 20 nt, Human
gagcccaggccugagacccu

SEQ ID NO: 424082 - RNA, 32 nt, Human
gagcccaggccuggcaggcucccagaacuuga

SEQ ID NO: 424083 - RNA, 32 nt, Human
gagcccaggccuguuccuggcagcuguggcug

SEQ ID NO: 424084 - RNA, 19 nt, Human
gagcccaggccuguugccc

SEQ ID NO: 424085 - RNA, 32 nt, Human
gagcccaggcgguugaggcugcagugagccau

SEQ ID NO: 424086 - RNA, 24 nt, Human
gagcccaggcguucgcccuguccc

SEQ ID NO: 424087 - RNA, 32 nt, Human
gagcccaggcuccagcccugagugcuuccgag

SEQ ID NO: 424088 - RNA, 19 nt, Human
gagcccaggcuccgccccu

SEQ ID NO: 424089 - RNA, 32 nt, Human
gagcccaggcuguguggaaacagcugcucuca

SEQ ID NO: 424090 - RNA, 22 nt, Human
gagcccagggaacaccgccccu

SEQ ID NO: 424091 - RNA, 20 nt, Human
gagcccagggacaggucccu

SEQ ID NO: 424092 - RNA, 32 nt, Human
gagcccagggagacuccgcugugggaaaccuc

SEQ ID NO: 424093 - RNA, 32 nt, Human
gagcccagggaggcagagguugcuguaaguug

SEQ ID NO: 424094 - RNA, 23 nt, Human
gagcccagggagucccagaggca

SEQ ID NO: 424095 - RNA, 32 nt, Human
gagcccagggcagaggcagcucagaguggagg

SEQ ID NO: 424096 - RNA, 19 nt, Human
gagcccagggccaaccccu

SEQ ID NO: 424097 - RNA, 20 nt, Human
gagcccagggccacccggag

SEQ ID NO: 424098 - RNA, 18 nt, Human
gagcccagggccugcacc

SEQ ID NO: 424099 - RNA, 32 nt, Human
gagcccagggcgacagaggggcacugguuuac

SEQ ID NO: 424100 - RNA, 32 nt, Human
gagcccagggcuccacggucccuaccuagacc

SEQ ID NO: 424101 - RNA, 18 nt, Human
gagcccaggggguccccu

SEQ ID NO: 424102 - RNA, 32 nt, Human
gagcccagggguucacagcugcagugagcugc

SEQ ID NO: 424103 - RNA, 24 nt, Human
gagcccagggguucuagaccagcu

SEQ ID NO: 424104 - RNA, 32 nt, Human
gagcccagggguuugaggcugcagugagccac

SEQ ID NO: 424105 - RNA, 32 nt, Human
gagcccagggguuugcggcugcagugagcugu

SEQ ID NO: 424106 - RNA, 22 nt, Human
gagcccaggguacccgccuccu

SEQ ID NO: 424107 - RNA, 32 nt, Human
gagcccaggguaggggacagagcugcuggggc

SEQ ID NO: 424108 - RNA, 32 nt, Human
gagcccaggguggcagagcuguggugcagggu

SEQ ID NO: 424109 - RNA, 32 nt, Human
gagcccagguauuaucaugcaggagaccuggg

SEQ ID NO: 424110 - RNA, 32 nt, Human
gagcccagguauucaagaccagccugggaaac

SEQ ID NO: 424111 - RNA, 17 nt, Human
gagcccaggucaccucc

SEQ ID NO: 424112 - RNA, 21 nt, Human
gagcccagguccagcaccccu

SEQ ID NO: 424113 - RNA, 21 nt, Human
gagcccagguccagcguuccc

SEQ ID NO: 424114 - RNA, 23 nt, Human
gagcccaggucugccgacacccu

SEQ ID NO: 424115 - RNA, 18 nt, Human
gagcccaggugagcuccc

SEQ ID NO: 424116 - RNA, 18 nt, Human
gagcccaggugauccccu

SEQ ID NO: 424117 - RNA, 19 nt, Human
gagcccaggugauccuccu

SEQ ID NO: 424118 - RNA, 32 nt, Human
gagcccaguacaacaaaggugacggguggugu

SEQ ID NO: 424119 - RNA, 21 nt, Human
gagcccaguaccugacaucaa

SEQ ID NO: 424120 - RNA, 32 nt, Human
gagcccaguaggucgaggcugcagugagcugu

SEQ ID NO: 424121 - RNA, 20 nt, Human
gagcccagucccacccuccc

SEQ ID NO: 424122 - RNA, 32 nt, Human
gagcccaguccuggaccccaugccugugucag

SEQ ID NO: 424123 - RNA, 32 nt, Human
gagcccagugagcucagcuuuaaggauggagu

SEQ ID NO: 424124 - RNA, 20 nt, Human
gagcccagugucauccgccc

SEQ ID NO: 424125 - RNA, 26 nt, Human
gagcccagugucauccgcccgccacg

SEQ ID NO: 424126 - RNA, 19 nt, Human
gagcccagugugccaccaa

SEQ ID NO: 424127 - RNA, 32 nt, Human
gagcccaguuggggagggagugaggagugguc

SEQ ID NO: 424128 - RNA, 20 nt, Human
gagcccauacaccugucucc

SEQ ID NO: 424129 - RNA, 18 nt, Human
gagcccaucaaauccuga

SEQ ID NO: 424130 - RNA, 32 nt, Human
gagcccaucaccuguaaauccccacacugcag

SEQ ID NO: 424131 - RNA, 32 nt, Human
gagcccauccaggacacuccacacugccagga

SEQ ID NO: 424132 - RNA, 32 nt, Human
gagcccaucucaccugggaugccugcagccag

SEQ ID NO: 424133 - RNA, 22 nt, Human
gagcccaucuguccuuccugcc

SEQ ID NO: 424134 - RNA, 32 nt, Human
gagcccaucuuccauuguccucaacgaguuuc

SEQ ID NO: 424135 - RNA, 32 nt, Human
gagcccaucuuucugccuccauccaaagaggc

SEQ ID NO: 424136 - RNA, 32 nt, Human
gagcccaugagauugaggcugcagugagcugu

SEQ ID NO: 424137 - RNA, 32 nt, Human
gagcccaugaguucaaggcugcagugagucgu

SEQ ID NO: 424138 - RNA, 32 nt, Human
gagcccaugaguuugagaccagccuggguaac

SEQ ID NO: 424139 - RNA, 32 nt, Human
gagcccaugccugccuuccuccuuucaucgcc

SEQ ID NO: 424140 - RNA, 32 nt, Human
gagcccaugcugggacaugccuccuccaaagu

SEQ ID NO: 424141 - RNA, 32 nt, Human
gagcccauggagggggugggaggcucaggcau

SEQ ID NO: 424142 - RNA, 32 nt, Human
gagcccauggcuucaggagagggucucucucc

SEQ ID NO: 424143 - RNA, 32 nt, Human
gagcccauuaaaaagugaggcagccacauggc

SEQ ID NO: 424144 - RNA, 31 nt, Human
gagcccauugcuauggaaaccaaagcguuag

SEQ ID NO: 424145 - RNA, 31 nt, Human
gagcccauuggcagggguaccaaagugaucc

SEQ ID NO: 424146 - RNA, 32 nt, Human
gagccccacauucuagccaacuugagggaagg

SEQ ID NO: 424147 - RNA, 32 nt, Human
gagccccacccccgccagaccuggugaagagg

SEQ ID NO: 424148 - RNA, 32 nt, Human
gagccccaccuucugcuacuauuauguucuuc

SEQ ID NO: 424149 - RNA, 32 nt, Human
gagccccacggacaugcagggccccgcagccu

SEQ ID NO: 424150 - RNA, 32 nt, Human
gagccccacugcuuccagccucuggugccaac

SEQ ID NO: 424151 - RNA, 32 nt, Human
gagccccacuucuuccuugacagugggguccu

SEQ ID NO: 424152 - RNA, 32 nt, Human
gagccccagagaaucaugccacccucaaagcc

SEQ ID NO: 424153 - RNA, 32 nt, Human
gagccccagaggcagagguuguggugagccga

SEQ ID NO: 424154 - RNA, 24 nt, Human
gagccccagaggucaaggcugcag

SEQ ID NO: 424155 - RNA, 32 nt, Human
gagccccagaggucaaggcugcagugagcugu

SEQ ID NO: 424156 - RNA, 32 nt, Human
gagccccagaguucaagaccagccugggcaau

SEQ ID NO: 424157 - RNA, 22 nt, Human
gagccccagcgucuccugccca

SEQ ID NO: 424158 - RNA, 32 nt, Human
gagccccagcuggggguggaagcugagccaga

SEQ ID NO: 424159 - RNA, 32 nt, Human
gagccccagcuggggguggaagcugagccagg

SEQ ID NO: 424160 - RNA, 32 nt, Human
gagccccaggaaggcagcauucauaagccccu

SEQ ID NO: 424161 - RNA, 18 nt, Human
gagccccaggacuggcug

SEQ ID NO: 424162 - RNA, 32 nt, Human
gagccccaggagacaucggcuagagugaccau

SEQ ID NO: 424163 - RNA, 22 nt, Human
gagccccaggccagaacccccu

SEQ ID NO: 424164 - RNA, 32 nt, Human
gagccccaggccucgggauaccacagagaaac

SEQ ID NO: 424165 - RNA, 23 nt, Human
gagccccagggguggaggcugca

SEQ ID NO: 424166 - RNA, 32 nt, Human
gagccccagggguggaggcugcaaugaacugu

SEQ ID NO: 424167 - RNA, 32 nt, Human
gagccccaguucaaggcccaggaacaaagggg

SEQ ID NO: 424168 - RNA, 32 nt, Human
gagccccaucuaggcugacagagcagggcugu

SEQ ID NO: 424169 - RNA, 18 nt, Human
gagccccaugcuuggccu

SEQ ID NO: 424170 - RNA, 26 nt, Human
gagccccauucacccccaccugccca

SEQ ID NO: 424171 - RNA, 32 nt, Human
gagccccauucccagcucuucucccugcugac

SEQ ID NO: 424172 - RNA, 32 nt, Human
gagcccccaccaggaaccaaauuggcuggcac

SEQ ID NO: 424173 - RNA, 32 nt, Human
gagcccccaccaggcagggcaaggagacuccg

SEQ ID NO: 424174 - RNA, 32 nt, Human
gagcccccaccuucaagucucuccagugugug

SEQ ID NO: 424175 - RNA, 22 nt, Human
gagcccccaccuucccugccca

SEQ ID NO: 424176 - RNA, 32 nt, Human
gagcccccagaacuucagaacuguguggaggc

SEQ ID NO: 424177 - RNA, 32 nt, Human
gagcccccagcacuuguguguacagcccccgu

SEQ ID NO: 424178 - RNA, 32 nt, Human
gagcccccagcagggcccuccgagguggaaca

SEQ ID NO: 424179 - RNA, 32 nt, Human
gagcccccagcagggcccuccgagguggagca

SEQ ID NO: 424180 - RNA, 19 nt, Human
gagcccccagccccaugca

SEQ ID NO: 424181 - RNA, 17 nt, Human
gagcccccagcccccag

SEQ ID NO: 424182 - RNA, 18 nt, Human
gagcccccagcccuggga

SEQ ID NO: 424183 - RNA, 32 nt, Human
gagcccccaggccgcagguggagggugauaaa

SEQ ID NO: 424184 - RNA, 32 nt, Human
gagcccccaggccucauggcgcagaaaccucu

SEQ ID NO: 424185 - RNA, 32 nt, Human
gagcccccaguucucuguccccuagcacuaga

SEQ ID NO: 424186 - RNA, 24 nt, Human
gagcccccauccugccccugccca

SEQ ID NO: 424187 - RNA, 32 nt, Human
gagcccccaugcuggggcuacuaaugaggaac

SEQ ID NO: 424188 - RNA, 20 nt, Human
gagcccccauuccaccacag

SEQ ID NO: 424189 - RNA, 21 nt, Human
gagccccccaacccugucccc

SEQ ID NO: 424190 - RNA, 18 nt, Human
gagccccccgacccggca

SEQ ID NO: 424191 - RNA, 25 nt, Human
gagcccccgccccucccccuacaga

SEQ ID NO: 424192 - RNA, 32 nt, Human
gagcccccuagauggugggggaauggcaaacu

SEQ ID NO: 424193 - RNA, 32 nt, Human
gagcccccucgaggaaccuggucuccgcaucc

SEQ ID NO: 424194 - RNA, 32 nt, Human
gagcccccucucagccuuaccugggccccucc

SEQ ID NO: 424195 - RNA, 32 nt, Human
gagcccccugacugguccagaacacucgagga

SEQ ID NO: 424196 - RNA, 32 nt, Human
gagcccccugacugguccagaacacuggagga

SEQ ID NO: 424197 - RNA, 32 nt, Human
gagcccccugcuccagccacaucuggacccau

SEQ ID NO: 424198 - RNA, 32 nt, Human
gagcccccugcucugcugcucugccuguccgc

SEQ ID NO: 424199 - RNA, 32 nt, Human
gagcccccugcuuccuggccuaggcgaggguu

SEQ ID NO: 424200 - RNA, 32 nt, Human
gagcccccuggggcugcuggagcugcugccuc

SEQ ID NO: 424201 - RNA, 32 nt, Human
gagcccccuuaaccuggagguggaccccaaua

SEQ ID NO: 424202 - RNA, 32 nt, Human
gagcccccuuuucagggaccccagucgcugga

SEQ ID NO: 424203 - RNA, 32 nt, Human
gagccccgccccucaggcccagccucuggcaa

SEQ ID NO: 424204 - RNA, 23 nt, Human
gagccccgcccucccaggcacag

SEQ ID NO: 424205 - RNA, 21 nt, Human
gagccccgcucagcgcgggga

SEQ ID NO: 424206 - RNA, 20 nt, Human
gagccccgcucggccuuggg

SEQ ID NO: 424207 - RNA, 32 nt, Human
gagccccggagggucuggaggagccaggaggg

SEQ ID NO: 424208 - RNA, 32 nt, Human
gagccccggaggucgaggcugcagugggcuau

SEQ ID NO: 424209 - RNA, 32 nt, Human
gagccccggccuggcccggcccccgcgugccu

SEQ ID NO: 424210 - RNA, 32 nt, Human
gagccccgggccggcccugccaaccgccucgc

SEQ ID NO: 424211 - RNA, 32 nt, Human
gagccccgggcgcggcaagaggcggcgggagc

SEQ ID NO: 424212 - RNA, 32 nt, Human
gagccccgggggcugagguugcugugagccga

SEQ ID NO: 424213 - RNA, 32 nt, Human
gagccccggugugucccaggagucggagaagc

SEQ ID NO: 424214 - RNA, 21 nt, Human
gagccccgugcugugcgggaa

SEQ ID NO: 424215 - RNA, 19 nt, Human
gagccccuaaucuaugcua

SEQ ID NO: 424216 - RNA, 32 nt, Human
gagccccuagcucuucucuagccuggggccuu

SEQ ID NO: 424217 - RNA, 32 nt, Human
gagccccucagaccugcacucugggugucucc

SEQ ID NO: 424218 - RNA, 32 nt, Human
gagccccucauccuuccucugggaccagaugu

SEQ ID NO: 424219 - RNA, 32 nt, Human
gagccccucauuugugcccagcauuuugugug

SEQ ID NO: 424220 - RNA, 32 nt, Human
gagccccuccagccucuccaagucgcugugaa

SEQ ID NO: 424221 - RNA, 32 nt, Human
gagccccuccucccaguauucccauccccgca

SEQ ID NO: 424222 - RNA, 19 nt, Human
gagccccucgcccuuggca

SEQ ID NO: 424223 - RNA, 32 nt, Human
gagccccucggcggcgccaccauguacucggg

SEQ ID NO: 424224 - RNA, 32 nt, Human
gagccccucuccugccuggccuggggacauga

SEQ ID NO: 424225 - RNA, 24 nt, Human
gagccccugaccgucccccacagg

SEQ ID NO: 424226 - RNA, 32 nt, Human
gagccccugagcgcggaucugcagugacccac

SEQ ID NO: 424227 - RNA, 32 nt, Human
gagccccugcaaggagcgaaccggucagcacc

SEQ ID NO: 424228 - RNA, 32 nt, Human
gagccccugcacuccauccugcugaccaugug

SEQ ID NO: 424229 - RNA, 32 nt, Human
gagccccugcccacugcacucuuugguucucu

SEQ ID NO: 424230 - RNA, 32 nt, Human
gagccccugccugggggagcuggcggaaugcg

SEQ ID NO: 424231 - RNA, 32 nt, Human
gagccccugcggguuugaggccuuguuuuuag

SEQ ID NO: 424232 - RNA, 32 nt, Human
gagccccuggguguucaggaggcugccccggg

SEQ ID NO: 424233 - RNA, 32 nt, Human
gagccccugguguggaaagaggccccaaggua

SEQ ID NO: 424234 - RNA, 32 nt, Human
gagccccuguaaucccagcuacuugggaggcu

SEQ ID NO: 424235 - RNA, 23 nt, Human
gagccccuguccuccccucuguc

SEQ ID NO: 424236 - RNA, 27 nt, Human
gagccccugucucgggcuccccaccga

SEQ ID NO: 424237 - RNA, 32 nt, Human
gagccccuucacuuaccugucucuccacaagu

SEQ ID NO: 424238 - RNA, 32 nt, Human
gagccccuuccagggacagcacuggagcuaga

SEQ ID NO: 424239 - RNA, 32 nt, Human
gagccccuuugccccaacacacucuucgucug

SEQ ID NO: 424240 - RNA, 32 nt, Human
gagcccgaagggagagacugagacugacuccc

SEQ ID NO: 424241 - RNA, 32 nt, Human
gagcccgagagacagagguugcagugagccga

SEQ ID NO: 424242 - RNA, 32 nt, Human
gagcccgagagguggaggcuggagugaacaga

SEQ ID NO: 424243 - RNA, 32 nt, Human
gagcccgagagguggagguugcagugagccga

SEQ ID NO: 424244 - RNA, 32 nt, Human
gagcccgagccgcgggacaccgucgcuccugc

SEQ ID NO: 424245 - RNA, 32 nt, Human
gagcccgcaaguuugagaccacccugggcaac

SEQ ID NO: 424246 - RNA, 32 nt, Human
gagcccgcaccaggagaggccagggaggguuc

SEQ ID NO: 424247 - RNA, 23 nt, Human
gagcccgcccgcuccccuccccu

SEQ ID NO: 424248 - RNA, 32 nt, Human
gagcccgcccuuccuucgcccgcuacaccacu

SEQ ID NO: 424249 - RNA, 32 nt, Human
gagcccgcgagccuggccagcgaggguagccg

SEQ ID NO: 424250 - RNA, 32 nt, Human
gagcccgcgccagccggaugcccagcuccgcg

SEQ ID NO: 424251 - RNA, 32 nt, Human
gagcccgcgccgccccgaugcccagcuccgcg

SEQ ID NO: 424252 - RNA, 32 nt, Human
gagcccggaaggcagagguugcagugagcuga

SEQ ID NO: 424253 - RNA, 32 nt, Human
gagcccggaaggcggagguugcagugagcuga

SEQ ID NO: 424254 - RNA, 22 nt, Human
gagcccggaccuggcggggaga

SEQ ID NO: 424255 - RNA, 32 nt, Human
gagcccggagcccggcccugcgcucggcucga

SEQ ID NO: 424256 - RNA, 32 nt, Human
gagcccggcccaggccgcggaacggugaugcu

SEQ ID NO: 424257 - RNA, 20 nt, Human
gagcccggccccaccucccu

SEQ ID NO: 424258 - RNA, 18 nt, Human
gagcccggcccgcggcgg

SEQ ID NO: 424259 - RNA, 20 nt, Human
gagcccggccggcccagcca

SEQ ID NO: 424260 - RNA, 18 nt, Human
gagcccggcgcagcagca

SEQ ID NO: 424261 - RNA, 32 nt, Human
gagcccggcggaggcagcgguggguuugggac

SEQ ID NO: 424262 - RNA, 32 nt, Human
gagcccggcugccucugcugcaguucagagca

SEQ ID NO: 424263 - RNA, 32 nt, Human
gagcccgggaagcagagguugcagugaacuga

SEQ ID NO: 424264 - RNA, 32 nt, Human
gagcccgggaaguggagguugcacugagcuga

SEQ ID NO: 424265 - RNA, 22 nt, Human
gagcccgggagccccucacaga

SEQ ID NO: 424266 - RNA, 32 nt, Human
gagcccgggagccggagguguagcggcagaga

SEQ ID NO: 424267 - RNA, 24 nt, Human
gagcccgggaggcagaggcugcag

SEQ ID NO: 424268 - RNA, 32 nt, Human
gagcccgggaggcagaggcugcagugaaccaa

SEQ ID NO: 424269 - RNA, 24 nt, Human
gagcccgggaggcagagguugcag

SEQ ID NO: 424270 - RNA, 32 nt, Human
gagcccgggaggcagagguugcagugagccau

SEQ ID NO: 424271 - RNA, 32 nt, Human
gagcccgggaggcagagguugcagugagccgu

SEQ ID NO: 424272 - RNA, 32 nt, Human
gagcccgggaggcggagauugcggugagccaa

SEQ ID NO: 424273 - RNA, 32 nt, Human
gagcccgggaggcggagcuuacagugagcuga

SEQ ID NO: 424274 - RNA, 32 nt, Human
gagcccgggaggcggagcuugcagugagcuga

SEQ ID NO: 424275 - RNA, 32 nt, Human
gagcccgggaggcggagcuugcggugggccgg

SEQ ID NO: 424276 - RNA, 32 nt, Human
gagcccgggaggcggaggcgggaggcggcggc

SEQ ID NO: 424277 - RNA, 32 nt, Human
gagcccgggaggcggagguugcagugagcuga

SEQ ID NO: 424278 - RNA, 32 nt, Human
gagcccgggaggucaagguugcagugagucau

SEQ ID NO: 424279 - RNA, 19 nt, Human
gagcccgggccccgccccu

SEQ ID NO: 424280 - RNA, 19 nt, Human
gagcccggggaccaccccc

SEQ ID NO: 424281 - RNA, 20 nt, Human
gagcccgggucccugucccc

SEQ ID NO: 424282 - RNA, 19 nt, Human
gagcccggguuuccugccu

SEQ ID NO: 424283 - RNA, 32 nt, Human
gagcccggguuuuucugcaaaacucagaggac

SEQ ID NO: 424284 - RNA, 32 nt, Human
gagcccggucagcucuuagacaggagggcugu

SEQ ID NO: 424285 - RNA, 32 nt, Human
gagcccgucagccugcgccaugggcugcgacg

SEQ ID NO: 424286 - RNA, 32 nt, Human
gagcccguccauugccccaggagacugcuucg

SEQ ID NO: 424287 - RNA, 32 nt, Human
gagcccgucuuccaccaugagaugacacacag

SEQ ID NO: 424288 - RNA, 32 nt, Human
gagcccgucuuccgacgugcagccuggcagug

SEQ ID NO: 424289 - RNA, 32 nt, Human
gagcccgugaagucgaggcugcagugagccca

SEQ ID NO: 424290 - RNA, 21 nt, Human
gagcccgugagccuagccccu

SEQ ID NO: 424291 - RNA, 32 nt, Human
gagcccguggacugggcuggccuaagggccag

SEQ ID NO: 424292 - RNA, 32 nt, Human
gagcccguuggccgugguugguggggguggac

SEQ ID NO: 424293 - RNA, 32 nt, Human
gagcccuaccagggaagaucauuggguucaaa

SEQ ID NO: 424294 - RNA, 32 nt, Human
gagcccuagaggucgaggcugcagugagcuau

SEQ ID NO: 424295 - RNA, 32 nt, Human
gagcccuagagguugaggcugcagugagcuau

SEQ ID NO: 424296 - RNA, 32 nt, Human
gagcccuaggagagucuaagcuggggcauccc

SEQ ID NO: 424297 - RNA, 21 nt, Human
gagcccucagcauuccugccc

SEQ ID NO: 424298 - RNA, 28 nt, Human
gagcccucagugccagccucaucacugu

SEQ ID NO: 424299 - RNA, 32 nt, Human
gagcccucauccccucucccaggcugggcugg

SEQ ID NO: 424300 - RNA, 32 nt, Human
gagcccuccaaaccuggacucugggacuuagg

SEQ ID NO: 424301 - RNA, 32 nt, Human
gagcccuccaucucaagugacacucgaacaga

SEQ ID NO: 424302 - RNA, 22 nt, Human
gagcccucccugcgggcugcug

SEQ ID NO: 424303 - RNA, 32 nt, Human
gagcccucuccucuggagcacacaccaccccu

SEQ ID NO: 424304 - RNA, 32 nt, Human
gagcccucucugcaccugcucaagagaaaccc

SEQ ID NO: 424305 - RNA, 20 nt, Human
gagcccucugcccuguccuc

SEQ ID NO: 424306 - RNA, 32 nt, Human
gagcccucuggccccucguugccuuuucacuu

SEQ ID NO: 424307 - RNA, 32 nt, Human
gagcccucugggaggcaugcgggcuccagggu

SEQ ID NO: 424308 - RNA, 32 nt, Human
gagcccucugugaggaggcccucuuugcuggc

SEQ ID NO: 424309 - RNA, 32 nt, Human
gagcccugaaaccaagucggagccaggccagg

SEQ ID NO: 424310 - RNA, 32 nt, Human
gagcccugaaagucgagguugcagugagccuu

SEQ ID NO: 424311 - RNA, 18 nt, Human
gagcccugaagaagggac

SEQ ID NO: 424312 - RNA, 32 nt, Human
gagcccugacugccuuuguuuuggaaaucagc

SEQ ID NO: 424313 - RNA, 32 nt, Human
gagcccugagcccuucagcugccugcacaacc

SEQ ID NO: 424314 - RNA, 19 nt, Human
gagcccugagccuguccuc

SEQ ID NO: 424315 - RNA, 32 nt, Human
gagcccugagcucaggcugagcccagccaccu

SEQ ID NO: 424316 - RNA, 32 nt, Human
gagcccugagguaaacuuuuauuucuuagcug

SEQ ID NO: 424317 - RNA, 24 nt, Human
gagcccugauugcaccacuguacu

SEQ ID NO: 424318 - RNA, 32 nt, Human
gagcccugcaccugccuagcugccuuccuggg

SEQ ID NO: 424319 - RNA, 18 nt, Human
gagcccugcacuguccca

SEQ ID NO: 424320 - RNA, 32 nt, Human
gagcccugcagaaucucagagcaaaguggcug

SEQ ID NO: 424321 - RNA, 18 nt, Human
gagcccugcagcuggcug

SEQ ID NO: 424322 - RNA, 32 nt, Human
gagcccugcagggcuuggucagcugccuguuc

SEQ ID NO: 424323 - RNA, 23 nt, Human
gagcccugcccucccaggcacag

SEQ ID NO: 424324 - RNA, 32 nt, Human
gagcccugcccugagcccccuguggagagacu

SEQ ID NO: 424325 - RNA, 32 nt, Human
gagcccugcccugagugucugucccucuucag

SEQ ID NO: 424326 - RNA, 18 nt, Human
gagcccugccuggccuaa

SEQ ID NO: 424327 - RNA, 32 nt, Human
gagcccugcucccucugccacuguggacacau

SEQ ID NO: 424328 - RNA, 32 nt, Human
gagcccugcuuccaaggggcgcgcccgguuau

SEQ ID NO: 424329 - RNA, 32 nt, Human
gagcccugcuucccuucucugaccucacaaag

SEQ ID NO: 424330 - RNA, 32 nt, Human
gagcccugcuucugugcacagccacaccaccc

SEQ ID NO: 424331 - RNA, 32 nt, Human
gagcccuggaaauguagcuuguccaaauugag

SEQ ID NO: 424332 - RNA, 32 nt, Human
gagcccuggaauggggcuccauggagaggugc

SEQ ID NO: 424333 - RNA, 32 nt, Human
gagcccuggaggucaaagcugaggugagccau

SEQ ID NO: 424334 - RNA, 32 nt, Human
gagcccuggaggucaaggcugcagugagccau

SEQ ID NO: 424335 - RNA, 32 nt, Human
gagcccuggagguugaggcugcagugagcugg

SEQ ID NO: 424336 - RNA, 32 nt, Human
gagcccuggagugggcaagaccaggccaccug

SEQ ID NO: 424337 - RNA, 32 nt, Human
gagcccuggaguucaaggcugcagugagcugu

SEQ ID NO: 424338 - RNA, 32 nt, Human
gagcccuggaguuggagguugcagugagcaga

SEQ ID NO: 424339 - RNA, 32 nt, Human
gagcccuggaguuugaguccagccugggugac

SEQ ID NO: 424340 - RNA, 32 nt, Human
gagcccuggauaggaagccacugagucugccc

SEQ ID NO: 424341 - RNA, 24 nt, Human
gagcccuggaucccggcgcgggaa

SEQ ID NO: 424342 - RNA, 32 nt, Human
gagcccuggccagacauguccacaggguucuc

SEQ ID NO: 424343 - RNA, 32 nt, Human
gagcccuggcggcagagguugcagugagccaa

SEQ ID NO: 424344 - RNA, 29 nt, Human
gagcccuggcugcuuguccuccucgcaac

SEQ ID NO: 424345 - RNA, 32 nt, Human
gagcccuggcuguccccucucccucaguccuu

SEQ ID NO: 424346 - RNA, 32 nt, Human
gagcccugggaggcuggagccccaggugcagu

SEQ ID NO: 424347 - RNA, 32 nt, Human
gagcccugggagggcccaggagccagaccucg

SEQ ID NO: 424348 - RNA, 19 nt, Human
gagcccugggccugucccc

SEQ ID NO: 424349 - RNA, 21 nt, Human
gagcccugggcuggaggcuga

SEQ ID NO: 424350 - RNA, 32 nt, Human
gagcccugggcuggggcaggagccgcaauguc

SEQ ID NO: 424351 - RNA, 32 nt, Human
gagcccuggggaaauggucugaggcagguggu

SEQ ID NO: 424352 - RNA, 32 nt, Human
gagcccuggggacugcggaagguggagugugc

SEQ ID NO: 424353 - RNA, 32 nt, Human
gagcccugggggugggaggcugugggaggcug

SEQ ID NO: 424354 - RNA, 32 nt, Human
gagcccugggucagcauugcucuggcacuggc

SEQ ID NO: 424355 - RNA, 22 nt, Human
gagcccuggguguccccacagg

SEQ ID NO: 424356 - RNA, 32 nt, Human
gagcccuggguuaaagucagugugaagggcag

SEQ ID NO: 424357 - RNA, 31 nt, Human
gagcccugguuucagcccccucagucugaug

SEQ ID NO: 424358 - RNA, 32 nt, Human
gagcccuguaaggacugaggccccggccagcc

SEQ ID NO: 424359 - RNA, 32 nt, Human
gagcccugucauccacaguggagggagaagaa

SEQ ID NO: 424360 - RNA, 21 nt, Human
gagcccugugaaaugcaucaa

SEQ ID NO: 424361 - RNA, 32 nt, Human
gagcccuguggaggggaaggggaagcuugggg

SEQ ID NO: 424362 - RNA, 32 nt, Human
gagcccugugggugucuggggaaaggugggcc

SEQ ID NO: 424363 - RNA, 32 nt, Human
gagcccuuauuuuguggcagaugcuaugaaag

SEQ ID NO: 424364 - RNA, 32 nt, Human
gagcccuucaagaagguaccagaaggaacccu

SEQ ID NO: 424365 - RNA, 23 nt, Human
gagcccuucaaggucuccacaga

SEQ ID NO: 424366 - RNA, 32 nt, Human
gagcccuucagagcccacacugccagucgagg

SEQ ID NO: 424367 - RNA, 25 nt, Human
gagcccuucagcccgccacugcacu

SEQ ID NO: 424368 - RNA, 32 nt, Human
gagcccuucccuggaaacucuuacaggccagg

SEQ ID NO: 424369 - RNA, 32 nt, Human
gagcccuucucccuccugccugcccucuugca

SEQ ID NO: 424370 - RNA, 32 nt, Human
gagcccuucucccugacccugggcugcuuccu

SEQ ID NO: 424371 - RNA, 23 nt, Human
gagcccuucucucccucucugcc

SEQ ID NO: 424372 - RNA, 32 nt, Human
gagcccuugccagaucucccucccucucucug

SEQ ID NO: 424373 - RNA, 21 nt, Human
gagcccuugccccuguccaca

SEQ ID NO: 424374 - RNA, 32 nt, Human
gagcccuugccuugguuucuggaaguucuuuu

SEQ ID NO: 424375 - RNA, 26 nt, Human
gagcccuugcucacguuuccccacag

SEQ ID NO: 424376 - RNA, 32 nt, Human
gagcccuuggcauucauggggccagugacccg

SEQ ID NO: 424377 - RNA, 32 nt, Human
gagcccuuggcgggggcaugcgugcgacaugg

SEQ ID NO: 424378 - RNA, 32 nt, Human
gagcccuuucuguagugggggaaagguggcug

SEQ ID NO: 424379 - RNA, 32 nt, Human
gagcccuuuuccccacggcccuugccacuguc

SEQ ID NO: 424380 - RNA, 19 nt, Human
gagcccuuuugcuauucca

SEQ ID NO: 424381 - RNA, 32 nt, Human
gagccgaaaaugcaccacugcacuccagcaug

SEQ ID NO: 424382 - RNA, 24 nt, Human
gagccgaaaucacaccauugcacu

SEQ ID NO: 424383 - RNA, 24 nt, Human
gagccgaaaucgcaccacugcacu

SEQ ID NO: 424384 - RNA, 32 nt, Human
gagccgaaaucgcaccacugcacuccagccug

SEQ ID NO: 424385 - RNA, 24 nt, Human
gagccgaaaucgcgccacugcacu

SEQ ID NO: 424386 - RNA, 24 nt, Human
gagccgaaauugcaccauugcacu

SEQ ID NO: 424387 - RNA, 32 nt, Human
gagccgaagagaccgacacagagaaggaaacg

SEQ ID NO: 424388 - RNA, 32 nt, Human
gagccgaaggcagaccugcagcagguccuggu

SEQ ID NO: 424389 - RNA, 24 nt, Human
gagccgacaucaugccacugcacu

SEQ ID NO: 424390 - RNA, 24 nt, Human
gagccgacaucgcgccauugcacu

SEQ ID NO: 424391 - RNA, 21 nt, Human
gagccgaccccugggcugcug

SEQ ID NO: 424392 - RNA, 24 nt, Human
gagccgacugcccuucugccccca

SEQ ID NO: 424393 - RNA, 22 nt, Human
gagccgacugucuccucugccu

SEQ ID NO: 424394 - RNA, 24 nt, Human
gagccgagaccacgccacugcacu

SEQ ID NO: 424395 - RNA, 24 nt, Human
gagccgagaccgcaccacugcacu

SEQ ID NO: 424396 - RNA, 24 nt, Human
gagccgagaccgcgccacugcacu

SEQ ID NO: 424397 - RNA, 32 nt, Human
gagccgagaccgugccacugcacuccagccug

SEQ ID NO: 424398 - RNA, 24 nt, Human
gagccgagacgacaccacugcacu

SEQ ID NO: 424399 - RNA, 24 nt, Human
gagccgagacugcgccaccgcgcu

SEQ ID NO: 424400 - RNA, 32 nt, Human
gagccgagagaagagaccugggaaauuaaguu

SEQ ID NO: 424401 - RNA, 32 nt, Human
gagccgagauagcaccauugcacuccagccug

SEQ ID NO: 424402 - RNA, 24 nt, Human
gagccgagauagcgccacugcacu

SEQ ID NO: 424403 - RNA, 32 nt, Human
gagccgagauagcggcacugcacuccagccug

SEQ ID NO: 424404 - RNA, 32 nt, Human
gagccgagauagcggcauugcacuccagccug

SEQ ID NO: 424405 - RNA, 24 nt, Human
gagccgagauaucgccacugcacu

SEQ ID NO: 424406 - RNA, 24 nt, Human
gagccgagaucacaccaccgcacu

SEQ ID NO: 424407 - RNA, 24 nt, Human
gagccgagaucacaccacuacacu

SEQ ID NO: 424408 - RNA, 32 nt, Human
gagccgagaucacaccacuacacuccagccua

SEQ ID NO: 424409 - RNA, 24 nt, Human
gagccgagaucacaccacugcacu

SEQ ID NO: 424410 - RNA, 24 nt, Human
gagccgagaucacaccauugcacu

SEQ ID NO: 424411 - RNA, 24 nt, Human
gagccgagaucacacuacugcacu

SEQ ID NO: 424412 - RNA, 24 nt, Human
gagccgagaucacgccacugcacu

SEQ ID NO: 424413 - RNA, 24 nt, Human
gagccgagaucacgccauugcacu

SEQ ID NO: 424414 - RNA, 24 nt, Human
gagccgagaucacgcuacugcacu

SEQ ID NO: 424415 - RNA, 32 nt, Human
gagccgagaucaugcugaaggaaggaagggag

SEQ ID NO: 424416 - RNA, 23 nt, Human
gagccgagaucgcaccacugcac

SEQ ID NO: 424417 - RNA, 24 nt, Human
gagccgagaucgcaccacugcacu

SEQ ID NO: 424418 - RNA, 24 nt, Human
gagccgagaucgcaccagugcacu

SEQ ID NO: 424419 - RNA, 24 nt, Human
gagccgagaucgcaccauugcacu

SEQ ID NO: 424420 - RNA, 24 nt, Human
gagccgagaucgccccacugcacu

SEQ ID NO: 424421 - RNA, 24 nt, Human
gagccgagaucgcgccaccacacu

SEQ ID NO: 424422 - RNA, 32 nt, Human
gagccgagaucgcgccaccacacuccagccug

SEQ ID NO: 424423 - RNA, 23 nt, Human
gagccgagaucgcgccacccacu

SEQ ID NO: 424424 - RNA, 23 nt, Human
gagccgagaucgcgccacugcac

SEQ ID NO: 424425 - RNA, 24 nt, Human
gagccgagaucgcgccacugcacu

SEQ ID NO: 424426 - RNA, 24 nt, Human
gagccgagaucgcgccaucacacu

SEQ ID NO: 424427 - RNA, 32 nt, Human
gagccgagaucgcgccaucacacuccagccua

SEQ ID NO: 424428 - RNA, 24 nt, Human
gagccgagaucgcgccaucgcacu

SEQ ID NO: 424429 - RNA, 24 nt, Human
gagccgagaucgcgccauuacacu

SEQ ID NO: 424430 - RNA, 24 nt, Human
gagccgagaucgcgccauugcacu

SEQ ID NO: 424431 - RNA, 24 nt, Human
gagccgagaucgcgcuacugcacu

SEQ ID NO: 424432 - RNA, 32 nt, Human
gagccgagaucucaccauuacacuccagccug

SEQ ID NO: 424433 - RNA, 32 nt, Human
gagccgagauggagccacugcacuccagccca

SEQ ID NO: 424434 - RNA, 32 nt, Human
gagccgagauggagccacugcacuccagccug

SEQ ID NO: 424435 - RNA, 24 nt, Human
gagccgagauggcaccacugcacu

SEQ ID NO: 424436 - RNA, 24 nt, Human
gagccgagauggcgccacugcacu

SEQ ID NO: 424437 - RNA, 32 nt, Human
gagccgagauggugccacugcacuccagccua

SEQ ID NO: 424438 - RNA, 32 nt, Human
gagccgagauggugccacugcacuccagccug

SEQ ID NO: 424439 - RNA, 32 nt, Human
gagccgagauggugccguugcacuccagccgg

SEQ ID NO: 424440 - RNA, 24 nt, Human
gagccgagauuacaccacugcacu

SEQ ID NO: 424441 - RNA, 32 nt, Human
gagccgagauuacuccagccuaggcaacagag

SEQ ID NO: 424442 - RNA, 24 nt, Human
gagccgagauugcaccaccgcacu

SEQ ID NO: 424443 - RNA, 24 nt, Human
gagccgagauugcaccacugcacu

SEQ ID NO: 424444 - RNA, 24 nt, Human
gagccgagauugcaccauugcacu

SEQ ID NO: 424445 - RNA, 24 nt, Human
gagccgagauugccccacugcacu

SEQ ID NO: 424446 - RNA, 24 nt, Human
gagccgagauugcgccaccgcacu

SEQ ID NO: 424447 - RNA, 24 nt, Human
gagccgagauugcgccacuccacu

SEQ ID NO: 424448 - RNA, 24 nt, Human
gagccgagauugcgccacugcacu

SEQ ID NO: 424449 - RNA, 24 nt, Human
gagccgagauugcgccacugcgcu

SEQ ID NO: 424450 - RNA, 24 nt, Human
gagccgagauugcgccacuucacu

SEQ ID NO: 424451 - RNA, 24 nt, Human
gagccgagauugcgccauugcacu

SEQ ID NO: 424452 - RNA, 24 nt, Human
gagccgagauugcgcuacugcacu

SEQ ID NO: 424453 - RNA, 32 nt, Human
gagccgagauugugcacuccagccuggguaac

SEQ ID NO: 424454 - RNA, 32 nt, Human
gagccgagauugugccacuacacuccagccug

SEQ ID NO: 424455 - RNA, 32 nt, Human
gagccgagauugugccacugcacuccaaccug

SEQ ID NO: 424456 - RNA, 32 nt, Human
gagccgagauugugccacugcacuccagccua

SEQ ID NO: 424457 - RNA, 32 nt, Human
gagccgagauugugccacugcacuccagccug

SEQ ID NO: 424458 - RNA, 32 nt, Human
gagccgagauugugccacugcacuccagccuu

SEQ ID NO: 424459 - RNA, 32 nt, Human
gagccgagauugugccacugcacuccagcugg

SEQ ID NO: 424460 - RNA, 23 nt, Human
gagccgagcagccugcugggagg

SEQ ID NO: 424461 - RNA, 32 nt, Human
gagccgagcgacgcugccuccuuggggccggg

SEQ ID NO: 424462 - RNA, 32 nt, Human
gagccgaggaguucaagaccagccuggguauc

SEQ ID NO: 424463 - RNA, 32 nt, Human
gagccgaggaguucgagaccagccugggcaac

SEQ ID NO: 424464 - RNA, 32 nt, Human
gagccgaggaguuugagucugcagugagcuau

SEQ ID NO: 424465 - RNA, 32 nt, Human
gagccgaggcauuccagccugggcaacagagu

SEQ ID NO: 424466 - RNA, 24 nt, Human
gagccgaggccgcaccacugcacu

SEQ ID NO: 424467 - RNA, 22 nt, Human
gagccgagggggccacccgagg

SEQ ID NO: 424468 - RNA, 32 nt, Human
gagccgaggggguggggguugcagugagccaa

SEQ ID NO: 424469 - RNA, 24 nt, Human
gagccgaggucacgccacugcacu

SEQ ID NO: 424470 - RNA, 24 nt, Human
gagccgaggucaugccacugcacu

SEQ ID NO: 424471 - RNA, 24 nt, Human
gagccgaggucgcaccacugcacu

SEQ ID NO: 424472 - RNA, 24 nt, Human
gagccgaggucgugccacugcacu

SEQ ID NO: 424473 - RNA, 24 nt, Human
gagccgagguugugccacugcacu

SEQ ID NO: 424474 - RNA, 23 nt, Human
gagccgagucacgccacugcacu

SEQ ID NO: 424475 - RNA, 24 nt, Human
gagccgagucgggcuggccggggg

SEQ ID NO: 424476 - RNA, 22 nt, Human
gagccgagugccccaccagagg

SEQ ID NO: 424477 - RNA, 32 nt, Human
gagccgagugugaagaaagcuccagacuuggc

SEQ ID NO: 424478 - RNA, 24 nt, Human
gagccgaguuugggccacugcacu

SEQ ID NO: 424479 - RNA, 32 nt, Human
gagccgauggccccagcaucccccaggugccu

SEQ ID NO: 424480 - RNA, 32 nt, Human
gagccgaugggcccuggaggcagcccauuaaa

SEQ ID NO: 424481 - RNA, 22 nt, Human
gagccgauugcaccacugcacu

SEQ ID NO: 424482 - RNA, 32 nt, Human
gagccgcacaaaccagggcucgccaugaagcc

SEQ ID NO: 424483 - RNA, 32 nt, Human
gagccgcacacagccacaucuuccuagaccua

SEQ ID NO: 424484 - RNA, 32 nt, Human
gagccgcacagugauaauccauuuucuucauu

SEQ ID NO: 424485 - RNA, 32 nt, Human
gagccgcaccuugucauguaccaucaauaaag

SEQ ID NO: 424486 - RNA, 32 nt, Human
gagccgcagccccugugcacaccuaacacagg

SEQ ID NO: 424487 - RNA, 23 nt, Human
gagccgcagccgcggcccggaga

SEQ ID NO: 424488 - RNA, 32 nt, Human
gagccgcagccugcucugauucuauggcuugg

SEQ ID NO: 424489 - RNA, 32 nt, Human
gagccgcagcggcgccucucccagaaguauua

SEQ ID NO: 424490 - RNA, 18 nt, Human
gagccgcagcugcaucaa

SEQ ID NO: 424491 - RNA, 32 nt, Human
gagccgcaggccagggaccugcagugacucgc

SEQ ID NO: 424492 - RNA, 32 nt, Human
gagccgcaucuucuccaucuggcaggguggga

SEQ ID NO: 424493 - RNA, 32 nt, Human
gagccgcauggcacucuucccaccucagugcc

SEQ ID NO: 424494 - RNA, 32 nt, Human
gagccgcauucaaagccguccugggccuaagu

SEQ ID NO: 424495 - RNA, 32 nt, Human
gagccgccacuuccagcgaacacacacaggug

SEQ ID NO: 424496 - RNA, 32 nt, Human
gagccgcccagcccugucagcugcgccgggac

SEQ ID NO: 424497 - RNA, 32 nt, Human
gagccgccccacccacuccaucaucuccaggu

SEQ ID NO: 424498 - RNA, 32 nt, Human
gagccgccccgggcgggcccaagccuuuggau

SEQ ID NO: 424499 - RNA, 32 nt, Human
gagccgccgcaccccgacuccuggggccgcgg

SEQ ID NO: 424500 - RNA, 32 nt, Human
gagccgccgcgggccugcugagcuccggagcg

SEQ ID NO: 424501 - RNA, 32 nt, Human
gagccgccggccuccggccuccugggccccuc

SEQ ID NO: 424502 - RNA, 28 nt, Human
gagccgccgggcgcugccucgccagacc

SEQ ID NO: 424503 - RNA, 21 nt, Human
gagccgccucgcuccucuuca

SEQ ID NO: 424504 - RNA, 32 nt, Human
gagccgccucucacccccgacccuccacccag

SEQ ID NO: 424505 - RNA, 32 nt, Human
gagccgccucuccaaaauaccggccacacucc

SEQ ID NO: 424506 - RNA, 32 nt, Human
gagccgccugccgucagggcagugccaugcug

SEQ ID NO: 424507 - RNA, 32 nt, Human
gagccgccugccugaggcucccagacagacug

SEQ ID NO: 424508 - RNA, 23 nt, Human
gagccgccuggcuuucccuucca

SEQ ID NO: 424509 - RNA, 32 nt, Human
gagccgccugucucccugcuucaccucccuaa

SEQ ID NO: 424510 - RNA, 32 nt, Human
gagccgcgacugcgcucgccuagguggugggc

SEQ ID NO: 424511 - RNA, 19 nt, Human
gagccgcgagccgcggcgg

SEQ ID NO: 424512 - RNA, 32 nt, Human
gagccgcgagugagauauugagggagcgcaga

SEQ ID NO: 424513 - RNA, 32 nt, Human
gagccgcggaggaggacagugagggaggaaug

SEQ ID NO: 424514 - RNA, 23 nt, Human
gagccgcgggccggcggggccga

SEQ ID NO: 424515 - RNA, 18 nt, Human
gagccgcggggcgcagag

SEQ ID NO: 424516 - RNA, 32 nt, Human
gagccgcgucuucucccggcuccgccaccagc

SEQ ID NO: 424517 - RNA, 32 nt, Human
gagccgcucugggccuugaggcugccugaugg

SEQ ID NO: 424518 - RNA, 32 nt, Human
gagccgcugcgcacagaugucaggauuuccgu

SEQ ID NO: 424519 - RNA, 20 nt, Human
gagccgcugggccuuagaga

SEQ ID NO: 424520 - RNA, 32 nt, Human
gagccgcuggggcugcagccaccggaucugcu

SEQ ID NO: 424521 - RNA, 20 nt, Human
gagccgcuuccuuccugccc

SEQ ID NO: 424522 - RNA, 32 nt, Human
gagccggaacugcggcagucucucccugccag

SEQ ID NO: 424523 - RNA, 25 nt, Human
gagccggacacccagcacaggugug

SEQ ID NO: 424524 - RNA, 32 nt, Human
gagccggagagggaaugaguaauggacucagu

SEQ ID NO: 424525 - RNA, 32 nt, Human
gagccggagagggaaugaguauggacucaguu

SEQ ID NO: 424526 - RNA, 32 nt, Human
gagccggagagggagcgcgagccgcgccggcc

SEQ ID NO: 424527 - RNA, 32 nt, Human
gagccggagagggugaagcaggcaggaagcug

SEQ ID NO: 424528 - RNA, 32 nt, Human
gagccggagcagcccccgccccggagacaccc

SEQ ID NO: 424529 - RNA, 32 nt, Human
gagccggagcccgaacugcagcuccagcccca

SEQ ID NO: 424530 - RNA, 23 nt, Human
gagccggagccgccugggauguu

SEQ ID NO: 424531 - RNA, 32 nt, Human
gagccggagccugcuuguugcagcugugggug

SEQ ID NO: 424532 - RNA, 32 nt, Human
gagccggagcgagagcgcgcgggcgcggccga

SEQ ID NO: 424533 - RNA, 21 nt, Human
gagccggagcuggcgagccga

SEQ ID NO: 424534 - RNA, 32 nt, Human
gagccggaggaggaggaggaggaggaggcaaa

SEQ ID NO: 424535 - RNA, 32 nt, Human
gagccggcagggggaaggugggaaggaggucg

SEQ ID NO: 424536 - RNA, 32 nt, Human
gagccggcccccggucccagcacacaguauga

SEQ ID NO: 424537 - RNA, 19 nt, Human
gagccggccccugcugcug

SEQ ID NO: 424538 - RNA, 32 nt, Human
gagccggcccucccugcaggacugccuggccc

SEQ ID NO: 424539 - RNA, 32 nt, Human
gagccggcccuccugggcucucuccuuggguc

SEQ ID NO: 424540 - RNA, 32 nt, Human
gagccggccugccucucuccgcuuugcugcuc

SEQ ID NO: 424541 - RNA, 32 nt, Human
gagccggcgccccuggccagcaggcgaggcua

SEQ ID NO: 424542 - RNA, 32 nt, Human
gagccggcgcugggcgcugcagcugcucccgg

SEQ ID NO: 424543 - RNA, 32 nt, Human
gagccggcggggcugcggagggccaguggacu

SEQ ID NO: 424544 - RNA, 32 nt, Human
gagccggcuggcugagcuuagcguccgaggag

SEQ ID NO: 424545 - RNA, 32 nt, Human
gagccgggacgggagagcagcgcacgcgggug

SEQ ID NO: 424546 - RNA, 32 nt, Human
gagccgggagaagaguuugagaucguggaccg

SEQ ID NO: 424547 - RNA, 32 nt, Human
gagccgggagagaggugggcaaggacgagggc

SEQ ID NO: 424548 - RNA, 32 nt, Human
gagccgggaggcagagggaguagugaccgccu

SEQ ID NO: 424549 - RNA, 23 nt, Human
gagccgggaggccugcgggcuga

SEQ ID NO: 424550 - RNA, 24 nt, Human
gagccgggaucacaccacugcacu

SEQ ID NO: 424551 - RNA, 24 nt, Human
gagccgggaucacgccacugaacu

SEQ ID NO: 424552 - RNA, 24 nt, Human
gagccgggaucgcaccacugcacu

SEQ ID NO: 424553 - RNA, 24 nt, Human
gagccgggaucgcgccacuguacu

SEQ ID NO: 424554 - RNA, 24 nt, Human
gagccgggauugcaccacugcacu

SEQ ID NO: 424555 - RNA, 24 nt, Human
gagccgggauugcgccagugcacu

SEQ ID NO: 424556 - RNA, 32 nt, Human
gagccgggcaacagguggccccggcaccuugu

SEQ ID NO: 424557 - RNA, 32 nt, Human
gagccgggcaauucuuugcugcgugggcuucu

SEQ ID NO: 424558 - RNA, 26 nt, Human
gagccgggcagccaggccgcucaggg

SEQ ID NO: 424559 - RNA, 32 nt, Human
gagccgggcagggccccugccucugcuacggc

SEQ ID NO: 424560 - RNA, 22 nt, Human
gagccgggccaucacccaggga

SEQ ID NO: 424561 - RNA, 32 nt, Human
gagccgggccuggcacauggggcaggaggcug

SEQ ID NO: 424562 - RNA, 32 nt, Human
gagccgggcgcggggcccugcgcacucggagc

SEQ ID NO: 424563 - RNA, 25 nt, Human
gagccgggcggaucaccugugguca

SEQ ID NO: 424564 - RNA, 32 nt, Human
gagccgggcgggcggaggggcgguugggacgg

SEQ ID NO: 424565 - RNA, 18 nt, Human
gagccggggaccagcuug

SEQ ID NO: 424566 - RNA, 32 nt, Human
gagccggggaggaggggguugcagugagccga

SEQ ID NO: 424567 - RNA, 32 nt, Human
gagccggggaggcagagguugcagugagccga

SEQ ID NO: 424568 - RNA, 32 nt, Human
gagccggggagguggaggcugcagugaacuga

SEQ ID NO: 424569 - RNA, 32 nt, Human
gagccggggcugggaguucuccugagggaaga

SEQ ID NO: 424570 - RNA, 32 nt, Human
gagccgggggcaggcccaggauccucagagga

SEQ ID NO: 424571 - RNA, 32 nt, Human
gagccggggugagguggggaggaggacaugga

SEQ ID NO: 424572 - RNA, 32 nt, Human
gagccggggugcaguggcagcgggagaguacc

SEQ ID NO: 424573 - RNA, 22 nt, Human
gagccggguggaucgccugagg

SEQ ID NO: 424574 - RNA, 25 nt, Human
gagccggguggaucgccugagguca

SEQ ID NO: 424575 - RNA, 32 nt, Human
gagccggguugcuaggcgacaucgagagagga

SEQ ID NO: 424576 - RNA, 32 nt, Human
gagccgguagcgagguugggagagacggagcg

SEQ ID NO: 424577 - RNA, 32 nt, Human
gagccguagggaggacugggacaccuggaagc

SEQ ID NO: 424578 - RNA, 24 nt, Human
gagccguaguacauccacuacaga

SEQ ID NO: 424579 - RNA, 32 nt, Human
gagccgucaguguggcugaauaaaggcucucu

SEQ ID NO: 424580 - RNA, 32 nt, Human
gagccguccagccacaccagcuuuccucccac

SEQ ID NO: 424581 - RNA, 21 nt, Human
gagccgugaaaggccacugca

SEQ ID NO: 424582 - RNA, 23 nt, Human
gagccgugaaaggccacugcacu

SEQ ID NO: 424583 - RNA, 24 nt, Human
gagccgugaucaugccacugcacu

SEQ ID NO: 424584 - RNA, 24 nt, Human
gagccgugauugagccacugcacu

SEQ ID NO: 424585 - RNA, 32 nt, Human
gagccgugauugagccacugcacuccagccuc

SEQ ID NO: 424586 - RNA, 24 nt, Human
gagccgugauugcaccacugcacu

SEQ ID NO: 424587 - RNA, 32 nt, Human
gagccgugccucuugggcaggcucccauagug

SEQ ID NO: 424588 - RNA, 32 nt, Human
gagccgugggaagaaaagagggagcagcuagg

SEQ ID NO: 424589 - RNA, 22 nt, Human
gagccguguuuccccucucccu

SEQ ID NO: 424590 - RNA, 32 nt, Human
gagccguguuuccccucucccucccucuccac

SEQ ID NO: 424591 - RNA, 32 nt, Human
gagccguuccagccggugacugugguggcucc

SEQ ID NO: 424592 - RNA, 32 nt, Human
gagccguugugcuccagccugggcgacagaag

SEQ ID NO: 424593 - RNA, 32 nt, Human
gagccguuuacgcggcccuggagcgcaugggg

SEQ ID NO: 424594 - RNA, 32 nt, Human
gagccguuugugucuugggaguuuguggccca

SEQ ID NO: 424595 - RNA, 32 nt, Human
gagccuaaaaccucauuugauaagcacuccua

SEQ ID NO: 424596 - RNA, 32 nt, Human
gagccuaaaggaccagguacaggagcugcacc

SEQ ID NO: 424597 - RNA, 32 nt, Human
gagccuaagagaucaaggcugcagugagccau

SEQ ID NO: 424598 - RNA, 32 nt, Human
gagccuaagcagucgcggcugcagugaacaag

SEQ ID NO: 424599 - RNA, 23 nt, Human
gagccuaagcuggcuccugggga

SEQ ID NO: 424600 - RNA, 32 nt, Human
gagccuaaguaccuuucuuccuucccugcccc

SEQ ID NO: 424601 - RNA, 32 nt, Human
gagccuacacagaggaaggaaggcauucagcu

SEQ ID NO: 424602 - RNA, 32 nt, Human
gagccuacuccaagaauggaggcuguaggaau

SEQ ID NO: 424603 - RNA, 32 nt, Human
gagccuacuugaggugggcaucugggaauaca

SEQ ID NO: 424604 - RNA, 32 nt, Human
gagccuagaaguucaagaccagccugggcaaa

SEQ ID NO: 424605 - RNA, 32 nt, Human
gagccuagagacaucaguuugauuuucuuucu

SEQ ID NO: 424606 - RNA, 32 nt, Human
gagccuagagcaccaugucccuucccuguagc

SEQ ID NO: 424607 - RNA, 24 nt, Human
gagccuagaucacgccauugcacu

SEQ ID NO: 424608 - RNA, 24 nt, Human
gagccuagaucgcgccacugcacu

SEQ ID NO: 424609 - RNA, 24 nt, Human
gagccuagaucgcgccacuguacu

SEQ ID NO: 424610 - RNA, 24 nt, Human
gagccuagauugcgcuacugcacu

SEQ ID NO: 424611 - RNA, 32 nt, Human
gagccuagcaguucgagaccagccugggcaac

SEQ ID NO: 424612 - RNA, 32 nt, Human
gagccuagccaggagguguuuggggcucuauc

SEQ ID NO: 424613 - RNA, 19 nt, Human
gagccuagcccaggccuaa

SEQ ID NO: 424614 - RNA, 32 nt, Human
gagccuagccccggcgagagggucgaggacgc

SEQ ID NO: 424615 - RNA, 32 nt, Human
gagccuaggaagucgaggcugcagugagcuga

SEQ ID NO: 424616 - RNA, 32 nt, Human
gagccuaggacucaggcuggaggcaauuccuu

SEQ ID NO: 424617 - RNA, 32 nt, Human
gagccuaggaggucaaggcugcagugagccau

SEQ ID NO: 424618 - RNA, 18 nt, Human
gagccuaggaggucgagg

SEQ ID NO: 424619 - RNA, 32 nt, Human
gagccuaggaggucgaggcugcagugggaugu

SEQ ID NO: 424620 - RNA, 32 nt, Human
gagccuaggagguugaggcugcagugagcuau

SEQ ID NO: 424621 - RNA, 32 nt, Human
gagccuaggaguucaagaucagccugggcaac

SEQ ID NO: 424622 - RNA, 22 nt, Human
gagccuaggaguuccagaccgc

SEQ ID NO: 424623 - RNA, 32 nt, Human
gagccuaggaguucgagaccagccugggcaac

SEQ ID NO: 424624 - RNA, 24 nt, Human
gagccuaggaguucgagaccagcu

SEQ ID NO: 424625 - RNA, 32 nt, Human
gagccuaggaguugaaggccagccugggaaac

SEQ ID NO: 424626 - RNA, 32 nt, Human
gagccuaggaguuuaagaccagccugggcaac

SEQ ID NO: 424627 - RNA, 32 nt, Human
gagccuagggaagauuugugcagauggggcua

SEQ ID NO: 424628 - RNA, 32 nt, Human
gagccuagguggugccacugcacuccaaccug

SEQ ID NO: 424629 - RNA, 24 nt, Human
gagccuagugaugcccuguccuca

SEQ ID NO: 424630 - RNA, 32 nt, Human
gagccuauaaagccaagggugguguccauuuc

SEQ ID NO: 424631 - RNA, 32 nt, Human
gagccucaaugccaccuccccacaccacccaa

SEQ ID NO: 424632 - RNA, 32 nt, Human
gagccucaauuuccucaucugggucucccagg

SEQ ID NO: 424633 - RNA, 32 nt, Human
gagccucacaagaggacuacagcuggaaccau

SEQ ID NO: 424634 - RNA, 32 nt, Human
gagccucacaguuacaguuccaagaagaaaac

SEQ ID NO: 424635 - RNA, 21 nt, Human
gagccucacauucuucuucca

SEQ ID NO: 424636 - RNA, 32 nt, Human
gagccucacccagggucuguggcucugacuaa

SEQ ID NO: 424637 - RNA, 32 nt, Human
gagccucagaggacccagcccaugagagaacg

SEQ ID NO: 424638 - RNA, 32 nt, Human
gagccucagauucuccucacacagccacagcu

SEQ ID NO: 424639 - RNA, 32 nt, Human
gagccucagcauggcuggcagcgcggcugaca

SEQ ID NO: 424640 - RNA, 32 nt, Human
gagccucagccgggucaucucaucucagcugu

SEQ ID NO: 424641 - RNA, 32 nt, Human
gagccucaggagguugaggcugcagugagcug

SEQ ID NO: 424642 - RNA, 32 nt, Human
gagccucaggcucuccugcccugggccuccca

SEQ ID NO: 424643 - RNA, 32 nt, Human
gagccucaggugcucccccucucaccuggcag

SEQ ID NO: 424644 - RNA, 32 nt, Human
gagccucagucaggaggcucugugggaugcug

SEQ ID NO: 424645 - RNA, 32 nt, Human
gagccucagucugcccuugggcucaggccccu

SEQ ID NO: 424646 - RNA, 32 nt, Human
gagccucaguuuccucuauucuccaccagacu

SEQ ID NO: 424647 - RNA, 32 nt, Human
gagccucauccuggcggaaagggggcuguuug

SEQ ID NO: 424648 - RNA, 32 nt, Human
gagccucauguccugcugcccagaucuggcug

SEQ ID NO: 424649 - RNA, 32 nt, Human
gagccuccacagacuucucuucagccuccgcu

SEQ ID NO: 424650 - RNA, 32 nt, Human
gagccuccagaaggaaccuugguguuggugga

SEQ ID NO: 424651 - RNA, 32 nt, Human
gagccuccagcccucuccuacuuugaucacca

SEQ ID NO: 424652 - RNA, 32 nt, Human
gagccuccagccugcccuguggcacauaccac

SEQ ID NO: 424653 - RNA, 32 nt, Human
gagccuccagcuguuaaaagacaaugcuauua

SEQ ID NO: 424654 - RNA, 32 nt, Human
gagccuccaggcgugaguggagcccaguccag

SEQ ID NO: 424655 - RNA, 32 nt, Human
gagccuccaguagcuucucugggccuggcaga

SEQ ID NO: 424656 - RNA, 32 nt, Human
gagccuccccucgcagauaucucccggggcca

SEQ ID NO: 424657 - RNA, 32 nt, Human
gagccucccuuucuuugcgucucccuuucuuu

SEQ ID NO: 424658 - RNA, 32 nt, Human
gagccuccgacacccaucccacucccaaccac

SEQ ID NO: 424659 - RNA, 21 nt, Human
gagccuccgugaccuguccuc

SEQ ID NO: 424660 - RNA, 32 nt, Human
gagccuccucacccuauccuguuccucccacc

SEQ ID NO: 424661 - RNA, 32 nt, Human
gagccuccuccaggccaaacagccccaaaguc

SEQ ID NO: 424662 - RNA, 32 nt, Human
gagccuccugaagagccccgccuaggagugcu

SEQ ID NO: 424663 - RNA, 32 nt, Human
gagccuccugcccagcccuggccaguucaaag

SEQ ID NO: 424664 - RNA, 18 nt, Human
gagccuccugccucccca

SEQ ID NO: 424665 - RNA, 32 nt, Human
gagccuccugcucuccuggaccagcugcagac

SEQ ID NO: 424666 - RNA, 32 nt, Human
gagccuccuggaccaggagaacuguaacgcga

SEQ ID NO: 424667 - RNA, 32 nt, Human
gagccuccuggcugcuugggguuccaguaaau

SEQ ID NO: 424668 - RNA, 32 nt, Human
gagccuccugggacaagccucaggaugaaaag

SEQ ID NO: 424669 - RNA, 32 nt, Human
gagccuccuuucucugcugccugcccgggcug

SEQ ID NO: 424670 - RNA, 32 nt, Human
gagccucgaggaugacgguguugcaggaaccc

SEQ ID NO: 424671 - RNA, 24 nt, Human
gagccucgauuguaccacugcacu

SEQ ID NO: 424672 - RNA, 32 nt, Human
gagccucgauuguaccacugcacuccagccug

SEQ ID NO: 424673 - RNA, 32 nt, Human
gagccucgccuggaugcuggggcggggaaggc

SEQ ID NO: 424674 - RNA, 32 nt, Human
gagccucgcugugguuucuuccuuccccgaug

SEQ ID NO: 424675 - RNA, 32 nt, Human
gagccucggaggcggagguugcagugagcuga

SEQ ID NO: 424676 - RNA, 32 nt, Human
gagccucgucuggcaagucggggccugggaca

SEQ ID NO: 424677 - RNA, 32 nt, Human
gagccucuaguuccucacucuuccuuuucaga

SEQ ID NO: 424678 - RNA, 32 nt, Human
gagccucuauuucucauuccuaagccuuacca

SEQ ID NO: 424679 - RNA, 32 nt, Human
gagccucucaacauaagacagugaccagucug

SEQ ID NO: 424680 - RNA, 32 nt, Human
gagccucucaggaagcauugugaaucauucca

SEQ ID NO: 424681 - RNA, 32 nt, Human
gagccucucccuuaccccaccccacacacacg

SEQ ID NO: 424682 - RNA, 32 nt, Human
gagccucuccugccaucucuuuugcagcugag

SEQ ID NO: 424683 - RNA, 32 nt, Human
gagccucuccuggcagcuucucaggucucccu

SEQ ID NO: 424684 - RNA, 32 nt, Human
gagccucucuccccaccccaaucuaaauaugg

SEQ ID NO: 424685 - RNA, 32 nt, Human
gagccucucuguaucuucccauggcccagucu

SEQ ID NO: 424686 - RNA, 32 nt, Human
gagccucugacccucuggagaugauguccugc

SEQ ID NO: 424687 - RNA, 32 nt, Human
gagccucugauuuccaauucccugcuccuucc

SEQ ID NO: 424688 - RNA, 32 nt, Human
gagccucugcccuccuccagcccggauggcuc

SEQ ID NO: 424689 - RNA, 32 nt, Human
gagccucugccucuuccucugucuccuguggg

SEQ ID NO: 424690 - RNA, 32 nt, Human
gagccucugccuggccccugcugcuguccugu

SEQ ID NO: 424691 - RNA, 32 nt, Human
gagccucugcuggcuuccucauccccugucca

SEQ ID NO: 424692 - RNA, 19 nt, Human
gagccucugguccaucuca

SEQ ID NO: 424693 - RNA, 24 nt, Human
gagccucuucucgacacuauccca

SEQ ID NO: 424694 - RNA, 32 nt, Human
gagccucuucuguccccuucuuugcuaggacc

SEQ ID NO: 424695 - RNA, 32 nt, Human
gagccucuugagggagaugagaggccucuuug

SEQ ID NO: 424696 - RNA, 32 nt, Human
gagccugaacugguugugcagaacaaacaagg

SEQ ID NO: 424697 - RNA, 23 nt, Human
gagccugaagcaccuccugccca

SEQ ID NO: 424698 - RNA, 19 nt, Human
gagccugaccaacaugcua

SEQ ID NO: 424699 - RNA, 32 nt, Human
gagccugaccaacaugcuaaaauccccucucu

SEQ ID NO: 424700 - RNA, 32 nt, Human
gagccugacucugagggguuccgccuccuccg

SEQ ID NO: 424701 - RNA, 32 nt, Human
gagccugagaacuccuccuccugggacucuca

SEQ ID NO: 424702 - RNA, 32 nt, Human
gagccugagagaugaagguugcagugagccgu

SEQ ID NO: 424703 - RNA, 32 nt, Human
gagccugagagccacagguaaggacaacugca

SEQ ID NO: 424704 - RNA, 32 nt, Human
gagccugagaugggggacugggccccugccug

SEQ ID NO: 424705 - RNA, 21 nt, Human
gagccugagcggcuucaggga

SEQ ID NO: 424706 - RNA, 23 nt, Human
gagccugagcugguccccagaga

SEQ ID NO: 424707 - RNA, 32 nt, Human
gagccugaggacugccuuuaacugaauuugaa

SEQ ID NO: 424708 - RNA, 32 nt, Human
gagccugaggggcaccuuggcuuccgccugug

SEQ ID NO: 424709 - RNA, 32 nt, Human
gagccugaguacaguuuccuuccaaauggaca

SEQ ID NO: 424710 - RNA, 32 nt, Human
gagccugaucauaauacgaagaccagcuucug

SEQ ID NO: 424711 - RNA, 32 nt, Human
gagccugauccuggcggaccauggggagcacc

SEQ ID NO: 424712 - RNA, 32 nt, Human
gagccugauuccucagucucaccagaauucug

SEQ ID NO: 424713 - RNA, 32 nt, Human
gagccugauucugcugcugcuucuccagcuaa

SEQ ID NO: 424714 - RNA, 32 nt, Human
gagccugcaacaaacucugggcagccucagga

SEQ ID NO: 424715 - RNA, 32 nt, Human
gagccugcaagauggagguugcagugagcuca

SEQ ID NO: 424716 - RNA, 32 nt, Human
gagccugcaccauggagguggccacaucugcg

SEQ ID NO: 424717 - RNA, 32 nt, Human
gagccugcacccuuccgagggccauaggcgac

SEQ ID NO: 424718 - RNA, 32 nt, Human
gagccugcaccuaggcaaaacaugcucuuccu

SEQ ID NO: 424719 - RNA, 32 nt, Human
gagccugcacuuccuguucaggugcagacacu

SEQ ID NO: 424720 - RNA, 31 nt, Human
gagccugcacuuuacucugaauguugguggc

SEQ ID NO: 424721 - RNA, 32 nt, Human
gagccugcagaaccuguccaggcacaguggcu

SEQ ID NO: 424722 - RNA, 32 nt, Human
gagccugcagagccucuguuggucaggcaucc

SEQ ID NO: 424723 - RNA, 22 nt, Human
gagccugcagcagcugcaguaa

SEQ ID NO: 424724 - RNA, 16 nt, Human
gagccugcaggguggg

SEQ ID NO: 424725 - RNA, 32 nt, Human
gagccugcagugagaguuuggcccagccucag

SEQ ID NO: 424726 - RNA, 32 nt, Human
gagccugcagugagccgagaucgcgccacugc

SEQ ID NO: 424727 - RNA, 32 nt, Human
gagccugcagugagcuaugacgaugccacucg

SEQ ID NO: 424728 - RNA, 32 nt, Human
gagccugcauuuccucgcagccucucagugcc

SEQ ID NO: 424729 - RNA, 15 nt, Human
gagccugccagugga

SEQ ID NO: 424730 - RNA, 32 nt, Human
gagccugccggugggagcuggaagcaggcucc

SEQ ID NO: 424731 - RNA, 32 nt, Human
gagccugccugcucccccuggccagcaccugc

SEQ ID NO: 424732 - RNA, 32 nt, Human
gagccugccuggucucuggggguguugaguga

SEQ ID NO: 424733 - RNA, 32 nt, Human
gagccugccugucugggcaccugcugcaacca

SEQ ID NO: 424734 - RNA, 32 nt, Human
gagccugcuggaggcccugccuucacagagau

SEQ ID NO: 424735 - RNA, 32 nt, Human
gagccugcuggggcuggaggagcgagaagggu

SEQ ID NO: 424736 - RNA, 32 nt, Human
gagccugcuucgccaucuccgagccccaccgc

SEQ ID NO: 424737 - RNA, 32 nt, Human
gagccuggaagacauagguugcaguguaaugg

SEQ ID NO: 424738 - RNA, 32 nt, Human
gagccuggaagcuuccacagggcaggagggug

SEQ ID NO: 424739 - RNA, 32 nt, Human
gagccuggacucaggaugacuuggaacuaggg

SEQ ID NO: 424740 - RNA, 32 nt, Human
gagccuggagagaaggcgcugggcugcgaggg

SEQ ID NO: 424741 - RNA, 32 nt, Human
gagccuggagcaagguggagggugcagagggg

SEQ ID NO: 424742 - RNA, 32 nt, Human
gagccuggagccagaaccugugaagagcggaa

SEQ ID NO: 424743 - RNA, 32 nt, Human
gagccuggagcccaggcccaggaacugaagaa

SEQ ID NO: 424744 - RNA, 32 nt, Human
gagccuggagguagggagagcauugagaauuu

SEQ ID NO: 424745 - RNA, 24 nt, Human
gagccuggaucaugccacugcacu

SEQ ID NO: 424746 - RNA, 32 nt, Human
gagccuggcaagcuggaugugggagccacgga

SEQ ID NO: 424747 - RNA, 32 nt, Human
gagccuggcacacaguaggagcacagaaaggu

SEQ ID NO: 424748 - RNA, 22 nt, Human
gagccuggccaacauagcgaaa

SEQ ID NO: 424749 - RNA, 32 nt, Human
gagccuggccaacauagcgaaaccccgucucu

SEQ ID NO: 424750 - RNA, 32 nt, Human
gagccuggccaacauggugaaaccccaucucu

SEQ ID NO: 424751 - RNA, 32 nt, Human
gagccuggccaacauggugaaacccugucucu

SEQ ID NO: 424752 - RNA, 18 nt, Human
gagccuggccacccagug

SEQ ID NO: 424753 - RNA, 32 nt, Human
gagccuggcuguuucacaguauuucaugaauu

SEQ ID NO: 424754 - RNA, 32 nt, Human
gagccuggcuuagugcugggccuucucuuaaa

SEQ ID NO: 424755 - RNA, 32 nt, Human
gagccugggaagucaagccugcagugagccau

SEQ ID NO: 424756 - RNA, 32 nt, Human
gagccugggaaguggaaguugcagugagccaa

SEQ ID NO: 424757 - RNA, 32 nt, Human
gagccugggaaguggaggcugcagugagccua

SEQ ID NO: 424758 - RNA, 32 nt, Human
gagccugggaaguggagguugcaguaggcuga

SEQ ID NO: 424759 - RNA, 32 nt, Human
gagccugggaaguugaggcugcagugagccgu

SEQ ID NO: 424760 - RNA, 32 nt, Human
gagccugggaaugggggugaguggagggcucc

SEQ ID NO: 424761 - RNA, 32 nt, Human
gagccugggaauucgaagcugcagugagcuau

SEQ ID NO: 424762 - RNA, 32 nt, Human
gagccugggacauugaggcugcagugaacugu

SEQ ID NO: 424763 - RNA, 32 nt, Human
gagccugggagaucgaggcugcagugagccaa

SEQ ID NO: 424764 - RNA, 32 nt, Human
gagccugggagauggagguugcagugagcuga

SEQ ID NO: 424765 - RNA, 32 nt, Human
gagccugggagcaaggguugcagugagcugag

SEQ ID NO: 424766 - RNA, 32 nt, Human
gagccugggagcacgcagaggccuguguucac

SEQ ID NO: 424767 - RNA, 32 nt, Human
gagccugggagcgcagguugcaaugagccaag

SEQ ID NO: 424768 - RNA, 32 nt, Human
gagccugggaggaagagguugcagugagccga

SEQ ID NO: 424769 - RNA, 32 nt, Human
gagccugggaggcagagauugcacugagccga

SEQ ID NO: 424770 - RNA, 32 nt, Human
gagccugggaggcagaggcugcagugagccga

SEQ ID NO: 424771 - RNA, 32 nt, Human
gagccugggaggcagagguugcagugagccaa

SEQ ID NO: 424772 - RNA, 32 nt, Human
gagccugggaggcagagguugcagugagccga

SEQ ID NO: 424773 - RNA, 32 nt, Human
gagccugggaggcagagguugcagugagcuga

SEQ ID NO: 424774 - RNA, 32 nt, Human
gagccugggaggcagagguugcugugagccga

SEQ ID NO: 424775 - RNA, 32 nt, Human
gagccugggaggcggagguugcagugagccga

SEQ ID NO: 424776 - RNA, 32 nt, Human
gagccugggaggcggggguuguggugagccga

SEQ ID NO: 424777 - RNA, 32 nt, Human
gagccugggaggcugaggcgggagaaucaccu

SEQ ID NO: 424778 - RNA, 32 nt, Human
gagccugggaggucaaggcaucagugagcgau

SEQ ID NO: 424779 - RNA, 32 nt, Human
gagccugggaggucaaggcugcagugaaccau

SEQ ID NO: 424780 - RNA, 32 nt, Human
gagccugggaggucaaggcugcagugagccau

SEQ ID NO: 424781 - RNA, 32 nt, Human
gagccugggaggucaaggcugcagugagccga

SEQ ID NO: 424782 - RNA, 32 nt, Human
gagccugggaggucaaggcugcagugagccgu

SEQ ID NO: 424783 - RNA, 32 nt, Human
gagccugggaggucaaggcugcagugagcugu

SEQ ID NO: 424784 - RNA, 32 nt, Human
gagccugggaggucauggcugcagagagccau

SEQ ID NO: 424785 - RNA, 32 nt, Human
gagccugggaggucgaggcugcagugagcugu

SEQ ID NO: 424786 - RNA, 32 nt, Human
gagccugggagguggaggcuacugugagccau

SEQ ID NO: 424787 - RNA, 32 nt, Human
gagccugggagguggagguugcacugaguaga

SEQ ID NO: 424788 - RNA, 32 nt, Human
gagccugggagguggagguugcagugagcuaa

SEQ ID NO: 424789 - RNA, 32 nt, Human
gagccugggagguggagguugcagugagugga

SEQ ID NO: 424790 - RNA, 32 nt, Human
gagccugggagguggagguugccagugagucg

SEQ ID NO: 424791 - RNA, 32 nt, Human
gagccugggagguggagguuucagugagcugg

SEQ ID NO: 424792 - RNA, 32 nt, Human
gagccugggagguggaguuugcagugagcuaa

SEQ ID NO: 424793 - RNA, 32 nt, Human
gagccugggaggugguagggugucugaaaugc

SEQ ID NO: 424794 - RNA, 32 nt, Human
gagccugggagguugaggcugcagugagccau

SEQ ID NO: 424795 - RNA, 32 nt, Human
gagccugggagguugugguugcagugagcuau

SEQ ID NO: 424796 - RNA, 32 nt, Human
gagccugggaguucaagaccagccugggcaac

SEQ ID NO: 424797 - RNA, 32 nt, Human
gagccugggaguucgaggcugcagugagcaau

SEQ ID NO: 424798 - RNA, 18 nt, Human
gagccugggaguuggaga

SEQ ID NO: 424799 - RNA, 32 nt, Human
gagccugggaguuggagaccagccugggcaac

SEQ ID NO: 424800 - RNA, 32 nt, Human
gagccugggaguuugagaccagccugggcaac

SEQ ID NO: 424801 - RNA, 32 nt, Human
gagccugggaguuugaggcugcagugagcuau

SEQ ID NO: 424802 - RNA, 21 nt, Human
gagccugggaugggcagggag

SEQ ID NO: 424803 - RNA, 32 nt, Human
gagccugggaugucaaggcugcagugagcugu

SEQ ID NO: 424804 - RNA, 32 nt, Human
gagccugggcauccugacgcuggacuugggcg

SEQ ID NO: 424805 - RNA, 32 nt, Human
gagccugggccagcucaaggugggcacggggg

SEQ ID NO: 424806 - RNA, 32 nt, Human
gagccugggccaggagcccacagugccuguac

SEQ ID NO: 424807 - RNA, 32 nt, Human
gagccugggcugcuccuccugcucuggggagu

SEQ ID NO: 424808 - RNA, 32 nt, Human
gagccuggggaguucaaggccagcauggacaa

SEQ ID NO: 424809 - RNA, 32 nt, Human
gagccugggggacugaggcugcagugagccau

SEQ ID NO: 424810 - RNA, 32 nt, Human
gagccugggugagaaacaccauccaaagcugg

SEQ ID NO: 424811 - RNA, 32 nt, Human
gagccugguaggcugaggcugcagugagccaa

SEQ ID NO: 424812 - RNA, 32 nt, Human
gagccugguguuuaugccccacugcuguccua

SEQ ID NO: 424813 - RNA, 32 nt, Human
gagccugguuugucaucccugcccuagcccaa

SEQ ID NO: 424814 - RNA, 24 nt, Human
gagccuguacuucucugcugguuu

SEQ ID NO: 424815 - RNA, 32 nt, Human
gagccuguaugcagcccagugcagccuugcag

SEQ ID NO: 424816 - RNA, 32 nt, Human
gagccugucauccccagaucuaaauccugaag

SEQ ID NO: 424817 - RNA, 32 nt, Human
gagccugugaccaccugugcuguggagaugga

SEQ ID NO: 424818 - RNA, 32 nt, Human
gagccugugaggucgaggcugcagugagccga

SEQ ID NO: 424819 - RNA, 32 nt, Human
gagccugugcagcugcuggagcacggcccaac

SEQ ID NO: 424820 - RNA, 32 nt, Human
gagccugugccugcugcgugggagacuggucc

SEQ ID NO: 424821 - RNA, 32 nt, Human
gagccugugcucaugacagcugcucuguuacu

SEQ ID NO: 424822 - RNA, 32 nt, Human
gagccuguggcuguggugccgggcuccagaca

SEQ ID NO: 424823 - RNA, 32 nt, Human
gagccugugucaggaaagcaugucagagcaga

SEQ ID NO: 424824 - RNA, 32 nt, Human
gagccuguguggccaccaugccuguggccuca

SEQ ID NO: 424825 - RNA, 22 nt, Human
gagccuguguggcccucggagg

SEQ ID NO: 424826 - RNA, 32 nt, Human
gagccugugugugucgggcagcugcaggacau

SEQ ID NO: 424827 - RNA, 32 nt, Human
gagccuguuccccugaggguauuugaaguaua

SEQ ID NO: 424828 - RNA, 32 nt, Human
gagccuguucuucuacuuaccugggcccggag

SEQ ID NO: 424829 - RNA, 32 nt, Human
gagccuguugacuuuguaucucugccugugau

SEQ ID NO: 424830 - RNA, 32 nt, Human
gagccuguuucccuggccuccccaccccaucu

SEQ ID NO: 424831 - RNA, 32 nt, Human
gagccuguuuggaugauggaugccauuccuuu

SEQ ID NO: 424832 - RNA, 32 nt, Human
gagccuuagaaucaaugcucccaacccaccca

SEQ ID NO: 424833 - RNA, 32 nt, Human
gagccuuagagaggaggaggaaagggggagag

SEQ ID NO: 424834 - RNA, 32 nt, Human
gagccuuagcagcugcaccgccauccccaugc

SEQ ID NO: 424835 - RNA, 32 nt, Human
gagccuuaguguguccacaaagggacuccuga

SEQ ID NO: 424836 - RNA, 32 nt, Human
gagccuucagugagcuaugaucgcgccacugu

SEQ ID NO: 424837 - RNA, 32 nt, Human
gagccuucauauuuucuucuuugcugccuucu

SEQ ID NO: 424838 - RNA, 32 nt, Human
gagccuuccagccuucugguguguucuaagag

SEQ ID NO: 424839 - RNA, 32 nt, Human
gagccuuccauucaaaagugaacacacuuggu

SEQ ID NO: 424840 - RNA, 32 nt, Human
gagccuuccuccccaucuggaauucacagcug

SEQ ID NO: 424841 - RNA, 32 nt, Human
gagccuuccuuucuaaauguaaaugacugagu

SEQ ID NO: 424842 - RNA, 32 nt, Human
gagccuucuacuugcugacgacugccucaucu

SEQ ID NO: 424843 - RNA, 23 nt, Human
gagccuucugcaugccuguccuc

SEQ ID NO: 424844 - RNA, 32 nt, Human
gagccuugaaggucaaucugggugacacccga

SEQ ID NO: 424845 - RNA, 32 nt, Human
gagccuugacccuggccccagacggagcccag

SEQ ID NO: 424846 - RNA, 32 nt, Human
gagccuugagccccaaccccgugaaaagaucu

SEQ ID NO: 424847 - RNA, 24 nt, Human
gagccuugaucacgccacugcacu

SEQ ID NO: 424848 - RNA, 24 nt, Human
gagccuugaucgugccacugcacu

SEQ ID NO: 424849 - RNA, 24 nt, Human
gagccuugauuauaccacugcacu

SEQ ID NO: 424850 - RNA, 32 nt, Human
gagccuugcaggauggagcaccucugggacaa

SEQ ID NO: 424851 - RNA, 19 nt, Human
gagccuugcccaccuuccu

SEQ ID NO: 424852 - RNA, 24 nt, Human
gagccuugccuuuccccucugccu

SEQ ID NO: 424853 - RNA, 32 nt, Human
gagccuugcuucuguuuaccucagacaggagg

SEQ ID NO: 424854 - RNA, 32 nt, Human
gagccuuggaaccucagacugagcuagcaugu

SEQ ID NO: 424855 - RNA, 19 nt, Human
gagccuuggaaucuacugc

SEQ ID NO: 424856 - RNA, 32 nt, Human
gagccuuggaggcggagguugcagugagcuga

SEQ ID NO: 424857 - RNA, 32 nt, Human
gagccuuggagugcugaaggaggugcuguucc

SEQ ID NO: 424858 - RNA, 32 nt, Human
gagccuuggaugggguggggaccuggaauggg

SEQ ID NO: 424859 - RNA, 32 nt, Human
gagccuuggcuccccucucgucuccuccccuc

SEQ ID NO: 424860 - RNA, 32 nt, Human
gagccuugguaggguuaaagggaggugacagg

SEQ ID NO: 424861 - RNA, 23 nt, Human
gagccuugugcagaggcccagug

SEQ ID NO: 424862 - RNA, 32 nt, Human
gagccuugugcucuccacuuugccacaguacc

SEQ ID NO: 424863 - RNA, 32 nt, Human
gagccuuucccuagggcuagaccuaagaccag

SEQ ID NO: 424864 - RNA, 32 nt, Human
gagccuuucugccucacaucagcccuguguau

SEQ ID NO: 424865 - RNA, 32 nt, Human
gagccuuucuugcacuuuaaagugagauuaau

SEQ ID NO: 424866 - RNA, 32 nt, Human
gagccuuugaagcaggaggaggggaggagaga

SEQ ID NO: 424867 - RNA, 32 nt, Human
gagccuuugaaggaugcgauguugucauucuu

SEQ ID NO: 424868 - RNA, 32 nt, Human
gagccuuugacucagacauuuuugccaaggag

SEQ ID NO: 424869 - RNA, 32 nt, Human
gagccuuuggaacgugagccacugugggcugg

SEQ ID NO: 424870 - RNA, 18 nt, Human
gagccuuuuccuguccca

SEQ ID NO: 424871 - RNA, 32 nt, Human
gagccuuuuuagaagaaaucgugcugaauuau

SEQ ID NO: 424872 - RNA, 32 nt, Human
gagcgaaccgggcgccagaggcugcgaccccc

SEQ ID NO: 424873 - RNA, 23 nt, Human
gagcgaagaucgcaccacugcac

SEQ ID NO: 424874 - RNA, 32 nt, Human
gagcgaagcagugggagcaucgagcacuagag

SEQ ID NO: 424875 - RNA, 32 nt, Human
gagcgaagcuggauaacaggggaccgaugaug

SEQ ID NO: 424876 - RNA, 32 nt, Human
gagcgaagggauuuauacaacauuuuuaucau

SEQ ID NO: 424877 - RNA, 32 nt, Human
gagcgaagugccggcuacagcaggugucggau

SEQ ID NO: 424878 - RNA, 19 nt, Human
gagcgacagaggcagcucc

SEQ ID NO: 424879 - RNA, 32 nt, Human
gagcgaccaccacuugcacugugugaaaagau

SEQ ID NO: 424880 - RNA, 32 nt, Human
gagcgaccggagaaagaaaaaguggucaaggg

SEQ ID NO: 424881 - RNA, 32 nt, Human
gagcgacuagaagaaaaagagagggagaugca

SEQ ID NO: 424882 - RNA, 32 nt, Human
gagcgagaaaaauguggauguacuguuuguau

SEQ ID NO: 424883 - RNA, 32 nt, Human
gagcgagaagagagagagggcgagcugggccg

SEQ ID NO: 424884 - RNA, 32 nt, Human
gagcgagaccauccuggcuacauggugaaacc

SEQ ID NO: 424885 - RNA, 32 nt, Human
gagcgagacuccguaucagaaagaaaaagagg

SEQ ID NO: 424886 - RNA, 21 nt, Human
gagcgagagaaaagagaggac

SEQ ID NO: 424887 - RNA, 32 nt, Human
gagcgagagagccgggaggcagagggaguagu

SEQ ID NO: 424888 - RNA, 32 nt, Human
gagcgagagagggagaaacaggcgcggggucu

SEQ ID NO: 424889 - RNA, 32 nt, Human
gagcgagagcagagcaaacugcgcagcaggca

SEQ ID NO: 424890 - RNA, 23 nt, Human
gagcgagagcgagagagccggga

SEQ ID NO: 424891 - RNA, 32 nt, Human
gagcgagagguggaucggggcgguguguggcc

SEQ ID NO: 424892 - RNA, 20 nt, Human
gagcgagauccacgugcaca

SEQ ID NO: 424893 - RNA, 20 nt, Human
gagcgagcaagcugaggcca

SEQ ID NO: 424894 - RNA, 20 nt, Human
gagcgagcacggcgcccgca

SEQ ID NO: 424895 - RNA, 32 nt, Human
gagcgagcaggggagagcgagaccaguuuuaa

SEQ ID NO: 424896 - RNA, 32 nt, Human
gagcgagcccccagcccagccuggcgacuggg

SEQ ID NO: 424897 - RNA, 21 nt, Human
gagcgagccggcuagaggcca

SEQ ID NO: 424898 - RNA, 32 nt, Human
gagcgagcgagagagaaaggguucuggauugg

SEQ ID NO: 424899 - RNA, 32 nt, Human
gagcgagcgagagagaagcuaggugugaugau

SEQ ID NO: 424900 - RNA, 22 nt, Human
gagcgagcgccgagccggguca

SEQ ID NO: 424901 - RNA, 32 nt, Human
gagcgagcggcgccugaacacacggcggcugc

SEQ ID NO: 424902 - RNA, 32 nt, Human
gagcgagcugugcucucugaagccacugccug

SEQ ID NO: 424903 - RNA, 32 nt, Human
gagcgaggaacaggcucgaaggcuccggggua

SEQ ID NO: 424904 - RNA, 32 nt, Human
gagcgaggcguggccucaggagcggaggaccc

SEQ ID NO: 424905 - RNA, 32 nt, Human
gagcgagggaaguugaggcugcagugaacuau

SEQ ID NO: 424906 - RNA, 32 nt, Human
gagcgagguauucccagucuuccugcuaagcc

SEQ ID NO: 424907 - RNA, 32 nt, Human
gagcgagucgugaccgguugggccacacucaa

SEQ ID NO: 424908 - RNA, 32 nt, Human
gagcgagugagcgagcggaggagcagcgacac

SEQ ID NO: 424909 - RNA, 32 nt, Human
gagcgagugcagcugccuccgcggggccgcgc

SEQ ID NO: 424910 - RNA, 32 nt, Human
gagcgaguggacuuagggcugggcaggcagua

SEQ ID NO: 424911 - RNA, 32 nt, Human
gagcgaguucucucuuccucccagaccaaguu

SEQ ID NO: 424912 - RNA, 32 nt, Human
gagcgauccuccugccuccaccucccaaagug

SEQ ID NO: 424913 - RNA, 32 nt, Human
gagcgaugacaucagagauuccgaccuuccug

SEQ ID NO: 424914 - RNA, 30 nt, Human
gagcgauggaaagcaaaaugggugaauugc

SEQ ID NO: 424915 - RNA, 32 nt, Human
gagcgcaaaggauaguggacacacuggaauaa

SEQ ID NO: 424916 - RNA, 32 nt, Human
gagcgcaccauugcacuccagccuugggcgac

SEQ ID NO: 424917 - RNA, 32 nt, Human
gagcgcagaggacgcagggccgcuggaggcgc

SEQ ID NO: 424918 - RNA, 20 nt, Human
gagcgcagcccagcgcccgc

SEQ ID NO: 424919 - RNA, 32 nt, Human
gagcgcagccuccacaugcccauguaccucuu

SEQ ID NO: 424920 - RNA, 32 nt, Human
gagcgcagccugggcugcuggcagggaagagg

SEQ ID NO: 424921 - RNA, 32 nt, Human
gagcgcagcgccgaggaugaggaggugcaaca

SEQ ID NO: 424922 - RNA, 32 nt, Human
gagcgcagcuggguuccaggagacucucagcu

SEQ ID NO: 424923 - RNA, 32 nt, Human
gagcgcaggacagcgcaggagccccggcgcau

SEQ ID NO: 424924 - RNA, 32 nt, Human
gagcgcaggcagcccccgccccucggcccucc

SEQ ID NO: 424925 - RNA, 32 nt, Human
gagcgcaggcagcgcagggcuggcacgugaca

SEQ ID NO: 424926 - RNA, 32 nt, Human
gagcgcaggccgcggccggcgggccucagcuc

SEQ ID NO: 424927 - RNA, 32 nt, Human
gagcgcagggccagagcggagccccagccggc

SEQ ID NO: 424928 - RNA, 22 nt, Human
gagcgcaggucgcacacugcac

SEQ ID NO: 424929 - RNA, 32 nt, Human
gagcgcagugagccgggcccagcuucucuccu

SEQ ID NO: 424930 - RNA, 32 nt, Human
gagcgcaugucccagcccugguggccaggcuc

SEQ ID NO: 424931 - RNA, 32 nt, Human
gagcgccaaagccacaggcuggggcgcuaacg

SEQ ID NO: 424932 - RNA, 22 nt, Human
gagcgccacccacgcaggcaca

SEQ ID NO: 424933 - RNA, 32 nt, Human
gagcgccaggcagagcccaaucagggucucgu

SEQ ID NO: 424934 - RNA, 32 nt, Human
gagcgccagggacacacucaguucaccuucua

SEQ ID NO: 424935 - RNA, 32 nt, Human
gagcgcccaugcagcaaggcuuggaggaagcg

SEQ ID NO: 424936 - RNA, 32 nt, Human
gagcgccccacccuucccguggcgugggguga

SEQ ID NO: 424937 - RNA, 21 nt, Human
gagcgcccccuccccucaccu

SEQ ID NO: 424938 - RNA, 18 nt, Human
gagcgccccggagcagca

SEQ ID NO: 424939 - RNA, 32 nt, Human
gagcgcccuccagggacuaugcgugcggggac

SEQ ID NO: 424940 - RNA, 20 nt, Human
gagcgccgcccccugcucca

SEQ ID NO: 424941 - RNA, 23 nt, Human
gagcgccgccuuuguucccugca

SEQ ID NO: 424942 - RNA, 32 nt, Human
gagcgccgcugcuuaccugggugcaggagaca

SEQ ID NO: 424943 - RNA, 32 nt, Human
gagcgccgcuucugcaaccugcgagccugccc

SEQ ID NO: 424944 - RNA, 32 nt, Human
gagcgccgggcagagggggagggggacgaagc

SEQ ID NO: 424945 - RNA, 32 nt, Human
gagcgccggggagggggcgggacagagcuggg

SEQ ID NO: 424946 - RNA, 31 nt, Human
gagcgccgguccucugggcccaguguucuuu

SEQ ID NO: 424947 - RNA, 32 nt, Human
gagcgccguguucuucagccucagcuggaagg

SEQ ID NO: 424948 - RNA, 32 nt, Human
gagcgccguuuccaggcugccuucccuggggu

SEQ ID NO: 424949 - RNA, 32 nt, Human
gagcgccuacugggcauccggccugugcuggg

SEQ ID NO: 424950 - RNA, 32 nt, Human
gagcgccuccaggccagcaucucggccuuccg

SEQ ID NO: 424951 - RNA, 32 nt, Human
gagcgccucugccuggccacccugucugggag

SEQ ID NO: 424952 - RNA, 32 nt, Human
gagcgccugagauccuguucaccaggacucca

SEQ ID NO: 424953 - RNA, 32 nt, Human
gagcgccugcagucccagcuacuugggaggcu

SEQ ID NO: 424954 - RNA, 32 nt, Human
gagcgccugccugccugccgcugcugcgggcg

SEQ ID NO: 424955 - RNA, 32 nt, Human
gagcgccugccugguggcggcggcaacaaugc

SEQ ID NO: 424956 - RNA, 18 nt, Human
gagcgccuggcagcagca

SEQ ID NO: 424957 - RNA, 32 nt, Human
gagcgccuguaaucccagguauuccggaagcu

SEQ ID NO: 424958 - RNA, 32 nt, Human
gagcgccuguagucccagcuacucgagagccu

SEQ ID NO: 424959 - RNA, 32 nt, Human
gagcgccuguagucccagcuacucgggaggcu

SEQ ID NO: 424960 - RNA, 32 nt, Human
gagcgcgcccaggacaucggcaucugguucca

SEQ ID NO: 424961 - RNA, 32 nt, Human
gagcgcgcgucccuucgugccuaggcgagagc

SEQ ID NO: 424962 - RNA, 32 nt, Human
gagcgcgcucugcucccugccuuugccucacu

SEQ ID NO: 424963 - RNA, 32 nt, Human
gagcgcgggagagagugagagagagugagagc

SEQ ID NO: 424964 - RNA, 32 nt, Human
gagcgcgggaggcggcggcggcgcggagccca

SEQ ID NO: 424965 - RNA, 32 nt, Human
gagcgcggggcgccggaggcaggugugggaca

SEQ ID NO: 424966 - RNA, 32 nt, Human
gagcgcuaccggcugaggguggggaagcgcag

SEQ ID NO: 424967 - RNA, 32 nt, Human
gagcgcucgggucaugucugcccagggggacu

SEQ ID NO: 424968 - RNA, 32 nt, Human
gagcgcucucuugauucugggauuucucccuc

SEQ ID NO: 424969 - RNA, 26 nt, Human
gagcgcucuuaaucuccccucuacuu

SEQ ID NO: 424970 - RNA, 32 nt, Human
gagcgcugaaaaguuguuccugaccaggcucu

SEQ ID NO: 424971 - RNA, 32 nt, Human
gagcgcugaugggaaaggaacaaagagggaag

SEQ ID NO: 424972 - RNA, 32 nt, Human
gagcgcugggcgcugggcugugcaccgacggc

SEQ ID NO: 424973 - RNA, 32 nt, Human
gagcgcuggucccaccuccuuccuuccaaacu

SEQ ID NO: 424974 - RNA, 18 nt, Human
gagcgcugguggccccgg

SEQ ID NO: 424975 - RNA, 32 nt, Human
gagcgcuuggaaguuucucuucuaccugggca

SEQ ID NO: 424976 - RNA, 32 nt, Human
gagcggaaaccggccgggcgguuuccagggag

SEQ ID NO: 424977 - RNA, 32 nt, Human
gagcggaaagaaugucggagcgggccgcggau

SEQ ID NO: 424978 - RNA, 32 nt, Human
gagcggaaagagaagagagaagagugagcaga

SEQ ID NO: 424979 - RNA, 32 nt, Human
gagcggaaaugaggggccuggccuggcagccc

SEQ ID NO: 424980 - RNA, 24 nt, Human
gagcggacaucgcgccacugcacu

SEQ ID NO: 424981 - RNA, 21 nt, Human
gagcggagaccauggccccca

SEQ ID NO: 424982 - RNA, 32 nt, Human
gagcggagagagaaggaagaggcgaugugagc

SEQ ID NO: 424983 - RNA, 32 nt, Human
gagcggagagggaaggaggaggaggaggagca

SEQ ID NO: 424984 - RNA, 24 nt, Human
gagcggagaucgcaccacugcacu

SEQ ID NO: 424985 - RNA, 32 nt, Human
gagcggagaucgccccacuacacuccagccug

SEQ ID NO: 424986 - RNA, 24 nt, Human
gagcggagaucgcgccacugcacu

SEQ ID NO: 424987 - RNA, 19 nt, Human
gagcggagauugcagugag

SEQ ID NO: 424988 - RNA, 32 nt, Human
gagcggagcccugcacccuggagaccacaucc

SEQ ID NO: 424989 - RNA, 32 nt, Human
gagcggagcgccgcacguucccaaccgcgagg

SEQ ID NO: 424990 - RNA, 32 nt, Human
gagcggagcuuccuccucugagggccgugccg

SEQ ID NO: 424991 - RNA, 32 nt, Human
gagcggaggaggaggaggaggcgaggaggaga

SEQ ID NO: 424992 - RNA, 32 nt, Human
gagcggauaggggcggcccggagccagccagg

SEQ ID NO: 424993 - RNA, 32 nt, Human
gagcggaugaugaagcagacccccucccuguc

SEQ ID NO: 424994 - RNA, 32 nt, Human
gagcggaugccaccccguuuccagccuccggu

SEQ ID NO: 424995 - RNA, 32 nt, Human
gagcggcaauaugcaggcgccaggccuugcaa

SEQ ID NO: 424996 - RNA, 32 nt, Human
gagcggcacugcacccucacuagccagggugu

SEQ ID NO: 424997 - RNA, 32 nt, Human
gagcggcagagcaguggccuugauuugucuuu

SEQ ID NO: 424998 - RNA, 32 nt, Human
gagcggcagcuccggcgccugguagcgagagg

SEQ ID NO: 424999 - RNA, 32 nt, Human
gagcggcaggacuggauggagcuguucauuga

SEQ ID NO: 425000 - RNA, 19 nt, Human
gagcggcaggggcugcagg

SEQ ID NO: 425001 - RNA, 32 nt, Human
gagcggcaggguggcugcucuccaggagccca

SEQ ID NO: 425002 - RNA, 32 nt, Human
gagcggccaagcagguugggggcgccugcccc

SEQ ID NO: 425003 - RNA, 21 nt, Human
gagcggccaccgagccggcag

SEQ ID NO: 425004 - RNA, 32 nt, Human
gagcggcccauagagguggacggagggcgcga

SEQ ID NO: 425005 - RNA, 32 nt, Human
gagcggccccgccucugcucccaccgagcccu

SEQ ID NO: 425006 - RNA, 32 nt, Human
gagcggccccuggacaguugcagagaaacaca

SEQ ID NO: 425007 - RNA, 32 nt, Human
gagcggcccgggagcggaaagcggcagugucc

SEQ ID NO: 425008 - RNA, 32 nt, Human
gagcggcccugcagggggccagccugggggaa

SEQ ID NO: 425009 - RNA, 32 nt, Human
gagcggccgcaccuugcucucccucgggcugc

SEQ ID NO: 425010 - RNA, 24 nt, Human
gagcggccggcccaccuguccccu

SEQ ID NO: 425011 - RNA, 32 nt, Human
gagcggccgggcuugguaggggagccgagccc

SEQ ID NO: 425012 - RNA, 32 nt, Human
gagcggcgacagcaugagccugugcugaccuc

SEQ ID NO: 425013 - RNA, 32 nt, Human
gagcggcgagcgcagccaugccccaggccgcc

SEQ ID NO: 425014 - RNA, 32 nt, Human
gagcggcgaguggauggggagucuguguggca

SEQ ID NO: 425015 - RNA, 32 nt, Human
gagcggcgccacccagggcugaccucacggcc

SEQ ID NO: 425016 - RNA, 32 nt, Human
gagcggcgccgcgcacuccaacccggcgggca

SEQ ID NO: 425017 - RNA, 32 nt, Human
gagcggcgcgagaaagcuaaaggugauguggc

SEQ ID NO: 425018 - RNA, 32 nt, Human
gagcggcggcgacuugccaguaaggguuugga

SEQ ID NO: 425019 - RNA, 32 nt, Human
gagcggcggcggcggcaacauggcagagaccg

SEQ ID NO: 425020 - RNA, 20 nt, Human
gagcggcgggcccgcagcgg

SEQ ID NO: 425021 - RNA, 32 nt, Human
gagcggcggggguggcuccagcaacggcuggg

SEQ ID NO: 425022 - RNA, 15 nt, Human
gagcggcucucggug

SEQ ID NO: 425023 - RNA, 32 nt, Human
gagcggcugcaacgccggugccugaggagcga

SEQ ID NO: 425024 - RNA, 32 nt, Human
gagcggcugcgggccugcaggggugagcgggg

SEQ ID NO: 425025 - RNA, 22 nt, Human
gagcggcugguaccuguccccu

SEQ ID NO: 425026 - RNA, 32 nt, Human
gagcgggagagggaggagagcuccgaagcgag

SEQ ID NO: 425027 - RNA, 32 nt, Human
gagcgggaggacugcuugaggccaggaguuug

SEQ ID NO: 425028 - RNA, 32 nt, Human
gagcgggagggcagaggugaggagggggaaga

SEQ ID NO: 425029 - RNA, 21 nt, Human
gagcgggaucaagaauuucac

SEQ ID NO: 425030 - RNA, 22 nt, Human
gagcgggcagagcccgcggcgg

SEQ ID NO: 425031 - RNA, 32 nt, Human
gagcgggcagaguggcccagccccaggcagug

SEQ ID NO: 425032 - RNA, 32 nt, Human
gagcgggcccuggagcuugcagucggagggcc

SEQ ID NO: 425033 - RNA, 18 nt, Human
gagcgggccgagccagca

SEQ ID NO: 425034 - RNA, 32 nt, Human
gagcgggcgccucugaaguggagggcgggccg

SEQ ID NO: 425035 - RNA, 32 nt, Human
gagcgggcuccggggcucgggugcagcggcca

SEQ ID NO: 425036 - RNA, 32 nt, Human
gagcggggaccccggagagggagucagccgag

SEQ ID NO: 425037 - RNA, 32 nt, Human
gagcggggacuucgcgcccccaggggaacggg

SEQ ID NO: 425038 - RNA, 32 nt, Human
gagcggggaggcgaggagggggcugugagucc

SEQ ID NO: 425039 - RNA, 32 nt, Human
gagcggggagggaggaagaggggaaugcacau

SEQ ID NO: 425040 - RNA, 32 nt, Human
gagcggggcaggcagggaggcaaggacuggag

SEQ ID NO: 425041 - RNA, 32 nt, Human
gagcggggccugauggcccugaggcaguucgg

SEQ ID NO: 425042 - RNA, 32 nt, Human
gagcggggcugcagaguauccgaggugcugcc

SEQ ID NO: 425043 - RNA, 32 nt, Human
gagcgggggagggagaauccggccggacagau

SEQ ID NO: 425044 - RNA, 32 nt, Human
gagcgggggccgcggccgcgccgcagagaugu

SEQ ID NO: 425045 - RNA, 32 nt, Human
gagcgggggcgagggagcaggagcggccagug

SEQ ID NO: 425046 - RNA, 32 nt, Human
gagcgggggugaggagagucgagggaggugac

SEQ ID NO: 425047 - RNA, 32 nt, Human
gagcggguaggcagagcuucgggaggagauga

SEQ ID NO: 425048 - RNA, 32 nt, Human
gagcgggugggugggugugaagggaugagaau

SEQ ID NO: 425049 - RNA, 32 nt, Human
gagcgguacucgcuuccuccagcguggggagu

SEQ ID NO: 425050 - RNA, 17 nt, Human
gagcgguaggagcagca

SEQ ID NO: 425051 - RNA, 32 nt, Human
gagcgguccaguuucaccugaagaacuuugau

SEQ ID NO: 425052 - RNA, 24 nt, Human
gagcggugauugugccacugcacu

SEQ ID NO: 425053 - RNA, 32 nt, Human
gagcgguggacccaggcggccaugucccgccc

SEQ ID NO: 425054 - RNA, 32 nt, Human
gagcgguggccacagggcugaauggucgcuga

SEQ ID NO: 425055 - RNA, 32 nt, Human
gagcgguggccacagggcugaaugguugcuga

SEQ ID NO: 425056 - RNA, 32 nt, Human
gagcguagccauucgagagcagccugggcaac

SEQ ID NO: 425057 - RNA, 32 nt, Human
gagcguagccugggcaacacagcaagacccca

SEQ ID NO: 425058 - RNA, 32 nt, Human
gagcguaucaaauuugcacuucaugaggauuu

SEQ ID NO: 425059 - RNA, 32 nt, Human
gagcgucauugccaacaagcugggcaaagcug

SEQ ID NO: 425060 - RNA, 32 nt, Human
gagcguccaggaccaggcagagcugggccuua

SEQ ID NO: 425061 - RNA, 21 nt, Human
gagcguccaggcccagaagca

SEQ ID NO: 425062 - RNA, 17 nt, Human
gagcguccggagcagca

SEQ ID NO: 425063 - RNA, 32 nt, Human
gagcguccuggagcuuggggaugcagccagcu

SEQ ID NO: 425064 - RNA, 32 nt, Human
gagcgucgccgagguuugagggcgccggagac

SEQ ID NO: 425065 - RNA, 32 nt, Human
gagcgucucugccuggccacucauugucuggg

SEQ ID NO: 425066 - RNA, 32 nt, Human
gagcgucucugccuggcugcccauugucuggg

SEQ ID NO: 425067 - RNA, 32 nt, Human
gagcgucuggcgcgaucucugccugcuuacuc

SEQ ID NO: 425068 - RNA, 32 nt, Human
gagcgucuucacugacaguggccugagagacg

SEQ ID NO: 425069 - RNA, 32 nt, Human
gagcgugagggccuuccuaucccuccacccac

SEQ ID NO: 425070 - RNA, 32 nt, Human
gagcgugccauccugcccgcacugaagcagac

SEQ ID NO: 425071 - RNA, 32 nt, Human
gagcgugccugccugcucacagaagcugccua

SEQ ID NO: 425072 - RNA, 20 nt, Human
gagcgugcggacuggccucc

SEQ ID NO: 425073 - RNA, 32 nt, Human
gagcgugggaggcgggaguggaguggaagaag

SEQ ID NO: 425074 - RNA, 16 nt, Human
gagcgugggccucaga

SEQ ID NO: 425075 - RNA, 32 nt, Human
gagcguggggccgcuggaaugggugaauuuaa

SEQ ID NO: 425076 - RNA, 32 nt, Human
gagcguguccacagaguuugaguaaauauuau

SEQ ID NO: 425077 - RNA, 32 nt, Human
gagcguguggcaucuccaccucaagggugcag

SEQ ID NO: 425078 - RNA, 32 nt, Human
gagcguguggcugcaggagcuucugugggagu

SEQ ID NO: 425079 - RNA, 32 nt, Human
gagcguguugcggcagcggcugggcuugcaag

SEQ ID NO: 425080 - RNA, 32 nt, Human
gagcguuacauccugauauccuuccaggcugc

SEQ ID NO: 425081 - RNA, 21 nt, Human
gagcguucaccagugaccugg

SEQ ID NO: 425082 - RNA, 32 nt, Human
gagcguuucguuuggacuucucgacuugagug

SEQ ID NO: 425083 - RNA, 32 nt, Human
gagcuaaaagagaccugucucauggucugccc

SEQ ID NO: 425084 - RNA, 19 nt, Human
gagcuaaaccagcccccac

SEQ ID NO: 425085 - RNA, 32 nt, Human
gagcuaaccugggaggugcugaaggggcauug

SEQ ID NO: 425086 - RNA, 32 nt, Human
gagcuaaccuugcccagccucugggaacacuu

SEQ ID NO: 425087 - RNA, 32 nt, Human
gagcuaagauagagucccugccccacugccac

SEQ ID NO: 425088 - RNA, 24 nt, Human
gagcuaagaucacaccacuacacu

SEQ ID NO: 425089 - RNA, 32 nt, Human
gagcuaagaucacaccacuacacuccagccug

SEQ ID NO: 425090 - RNA, 24 nt, Human
gagcuaagaucacaccacugcacu

SEQ ID NO: 425091 - RNA, 24 nt, Human
gagcuaagaucacgccacugcacu

SEQ ID NO: 425092 - RNA, 24 nt, Human
gagcuaagaucacgccauugcacu

SEQ ID NO: 425093 - RNA, 24 nt, Human
gagcuaagaucgcaccacugcacu

SEQ ID NO: 425094 - RNA, 24 nt, Human
gagcuaagauugcaccacugcacu

SEQ ID NO: 425095 - RNA, 32 nt, Human
gagcuaaggaagcgcggcgcgcccccuggugg

SEQ ID NO: 425096 - RNA, 32 nt, Human
gagcuaauaacaccgaggugguggugaggguu

SEQ ID NO: 425097 - RNA, 32 nt, Human
gagcuacaacaacaggucgccuuuuugagacu

SEQ ID NO: 425098 - RNA, 32 nt, Human
gagcuacaaccaucuguuugguuugauguuuu

SEQ ID NO: 425099 - RNA, 32 nt, Human
gagcuacaaugcagaaaagccauggauuaaua

SEQ ID NO: 425100 - RNA, 32 nt, Human
gagcuacacggcaggggcagacacugugagua

SEQ ID NO: 425101 - RNA, 32 nt, Human
gagcuacacguccuuggcgcccagugugagcc

SEQ ID NO: 425102 - RNA, 32 nt, Human
gagcuacagugggacuuggaauccagaugugu

SEQ ID NO: 425103 - RNA, 32 nt, Human
gagcuacaucacacguuuauugugcauugauu

SEQ ID NO: 425104 - RNA, 32 nt, Human
gagcuacauuaaggcucuuucucuaaucgccu

SEQ ID NO: 425105 - RNA, 32 nt, Human
gagcuaccacuggcuacucagaggaggcucau

SEQ ID NO: 425106 - RNA, 32 nt, Human
gagcuaccagcccgggcagacacugaggaccc

SEQ ID NO: 425107 - RNA, 18 nt, Human
gagcuaccaugcccggcu

SEQ ID NO: 425108 - RNA, 32 nt, Human
gagcuaccgcgaggaggagcggcggaggcgac

SEQ ID NO: 425109 - RNA, 17 nt, Human
gagcuaccugagcagca

SEQ ID NO: 425110 - RNA, 19 nt, Human
gagcuacgagccgcggcgg

SEQ ID NO: 425111 - RNA, 24 nt, Human
gagcuacgaucaugccacugcacu

SEQ ID NO: 425112 - RNA, 24 nt, Human
gagcuacgaucgcaccacugcauu

SEQ ID NO: 425113 - RNA, 32 nt, Human
gagcuacgggcugcuguccuggggcgggcacu

SEQ ID NO: 425114 - RNA, 32 nt, Human
gagcuacucaggaaggugggagagagccaagc

SEQ ID NO: 425115 - RNA, 21 nt, Human
gagcuacugcacccggccuaa

SEQ ID NO: 425116 - RNA, 32 nt, Human
gagcuacugccuugcccuuccuucccucccug

SEQ ID NO: 425117 - RNA, 32 nt, Human
gagcuagaacuguucugaauuguuaaaccaca

SEQ ID NO: 425118 - RNA, 32 nt, Human
gagcuagaccacacugaggcgguggucgggac

SEQ ID NO: 425119 - RNA, 32 nt, Human
gagcuagagacaccaucugcaaugaucucuac

SEQ ID NO: 425120 - RNA, 32 nt, Human
gagcuagagcaagggucucuuuaaauguugaa

SEQ ID NO: 425121 - RNA, 32 nt, Human
gagcuagagccaagcccuaggcuugagagaca

SEQ ID NO: 425122 - RNA, 32 nt, Human
gagcuagagcuaagggcgccaggccccaggcu

SEQ ID NO: 425123 - RNA, 32 nt, Human
gagcuagaugaagaaggagcaggcggguucac

SEQ ID NO: 425124 - RNA, 32 nt, Human
gagcuagaugcagagcugaaacccaccuagga

SEQ ID NO: 425125 - RNA, 32 nt, Human
gagcuagccagccagcagagccaaaccuuggc

SEQ ID NO: 425126 - RNA, 32 nt, Human
gagcuagccagccugggcaauaccagaggcgg

SEQ ID NO: 425127 - RNA, 32 nt, Human
gagcuagccauaaagaaauucucugacuuauc

SEQ ID NO: 425128 - RNA, 24 nt, Human
gagcuaggaucacgccacugcacu

SEQ ID NO: 425129 - RNA, 24 nt, Human
gagcuaggaucaggccacugcacu

SEQ ID NO: 425130 - RNA, 24 nt, Human
gagcuaggaucgugccacugcacu

SEQ ID NO: 425131 - RNA, 32 nt, Human
gagcuaggcugaagcagcagaaccacagaggu

SEQ ID NO: 425132 - RNA, 26 nt, Human
gagcuaggcugaaugccucccaggga

SEQ ID NO: 425133 - RNA, 32 nt, Human
gagcuaggcugcagaagacuuaaaaaguugau

SEQ ID NO: 425134 - RNA, 32 nt, Human
gagcuaggcuguuuugcuagagauaauugcaa

SEQ ID NO: 425135 - RNA, 32 nt, Human
gagcuagggagaaaggagacucccccgcggag

SEQ ID NO: 425136 - RNA, 32 nt, Human
gagcuagggcuaagcaguuauuucuuucaagu

SEQ ID NO: 425137 - RNA, 32 nt, Human
gagcuagggcugcugccucagcuccaagacaa

SEQ ID NO: 425138 - RNA, 32 nt, Human
gagcuagggcugcugcuucugcuccagccccu

SEQ ID NO: 425139 - RNA, 31 nt, Human
gagcuagggcuggaaagaagggggagccagg

SEQ ID NO: 425140 - RNA, 32 nt, Human
gagcuagggcuggagggacagggagcagggca

SEQ ID NO: 425141 - RNA, 32 nt, Human
gagcuagggggaggggagggagaugucuuguu

SEQ ID NO: 425142 - RNA, 32 nt, Human
gagcuagugagaggaggaggaggugggcagag

SEQ ID NO: 425143 - RNA, 32 nt, Human
gagcuagugguguuuguccugcuccguccccg

SEQ ID NO: 425144 - RNA, 24 nt, Human
gagcuauaaucgugccacugcacu

SEQ ID NO: 425145 - RNA, 32 nt, Human
gagcuaucacaccuggccccagaaguguuuca

SEQ ID NO: 425146 - RNA, 32 nt, Human
gagcuaucauuaucgacuugggagaaaauuaa

SEQ ID NO: 425147 - RNA, 32 nt, Human
gagcuaucucucucauagcuuuuaugcccuua

SEQ ID NO: 425148 - RNA, 32 nt, Human
gagcuaucuuuugauuccuuuuucaaaccaca

SEQ ID NO: 425149 - RNA, 32 nt, Human
gagcuaugaaccugacaugucaguggccagga

SEQ ID NO: 425150 - RNA, 24 nt, Human
gagcuaugacugcaucacugcacu

SEQ ID NO: 425151 - RNA, 24 nt, Human
gagcuaugacugugccacugcacu

SEQ ID NO: 425152 - RNA, 24 nt, Human
gagcuaugaucacaccacuguacu

SEQ ID NO: 425153 - RNA, 24 nt, Human
gagcuaugaucacgccacugcacu

SEQ ID NO: 425154 - RNA, 24 nt, Human
gagcuaugaucaugccacugcacu

SEQ ID NO: 425155 - RNA, 24 nt, Human
gagcuaugaucgcaccacugcauu

SEQ ID NO: 425156 - RNA, 24 nt, Human
gagcuaugaucgcgccacuacacu

SEQ ID NO: 425157 - RNA, 24 nt, Human
gagcuaugaucgcgccacugcacu

SEQ ID NO: 425158 - RNA, 24 nt, Human
gagcuaugaucgcgccacuguacu

SEQ ID NO: 425159 - RNA, 24 nt, Human
gagcuaugauuacaccacugcacu

SEQ ID NO: 425160 - RNA, 24 nt, Human
gagcuaugauugcaccacugcacu

SEQ ID NO: 425161 - RNA, 24 nt, Human
gagcuaugauuguaccacugcacu

SEQ ID NO: 425162 - RNA, 24 nt, Human
gagcuaugauugugccacugcacu

SEQ ID NO: 425163 - RNA, 32 nt, Human
gagcuaugcuacagcuaugggacccuuucuua

SEQ ID NO: 425164 - RNA, 32 nt, Human
gagcuaugcucacaccacugcacuccauccug

SEQ ID NO: 425165 - RNA, 24 nt, Human
gagcuaugguaacaccacugcacu

SEQ ID NO: 425166 - RNA, 32 nt, Human
gagcuauuggguggaccaagcgggugaggcgc

SEQ ID NO: 425167 - RNA, 21 nt, Human
gagcucaaacacgccaaggca

SEQ ID NO: 425168 - RNA, 32 nt, Human
gagcucaacaguuccagaccagccugggcaau

SEQ ID NO: 425169 - RNA, 32 nt, Human
gagcucaaccaaaggcuggcaagcucugggcc

SEQ ID NO: 425170 - RNA, 32 nt, Human
gagcucaacuucgcacagcccuucccagcucc

SEQ ID NO: 425171 - RNA, 32 nt, Human
gagcucaagaggccgagguugcagugagccgu

SEQ ID NO: 425172 - RNA, 32 nt, Human
gagcucaagagguugaggcugcagugagcccu

SEQ ID NO: 425173 - RNA, 32 nt, Human
gagcucaagaguucaagaccagccugggaaac

SEQ ID NO: 425174 - RNA, 32 nt, Human
gagcucaagcacuccgggggcuccgagacagc

SEQ ID NO: 425175 - RNA, 24 nt, Human
gagcucaagccaagcccagaggca

SEQ ID NO: 425176 - RNA, 32 nt, Human
gagcucaagccuuucuccugugcucaaguccc

SEQ ID NO: 425177 - RNA, 17 nt, Human
gagcucacaaggcagca

SEQ ID NO: 425178 - RNA, 32 nt, Human
gagcucacacccucaaacuccucaauaaacgc

SEQ ID NO: 425179 - RNA, 32 nt, Human
gagcucacagaguucuuggaauaaaagcaacc

SEQ ID NO: 425180 - RNA, 32 nt, Human
gagcucaccacugagcuuccugggaugggcac

SEQ ID NO: 425181 - RNA, 32 nt, Human
gagcucacccacccuuccaacaugcgcuucau

SEQ ID NO: 425182 - RNA, 32 nt, Human
gagcucacuaaaaugcuaauuaggcaaaaaca

SEQ ID NO: 425183 - RNA, 32 nt, Human
gagcucacugaaaagcaaaugugaauuaaaau

SEQ ID NO: 425184 - RNA, 32 nt, Human
gagcucacugagccuccaccuggggucucugc

SEQ ID NO: 425185 - RNA, 32 nt, Human
gagcucacugagcuccuugccucccacaacaa

SEQ ID NO: 425186 - RNA, 32 nt, Human
gagcucacugcaaccucugacucccagacuca

SEQ ID NO: 425187 - RNA, 32 nt, Human
gagcucacugcaaccucugccucccaaguuca

SEQ ID NO: 425188 - RNA, 32 nt, Human
gagcucacugcacuccagcagucaugggaccc

SEQ ID NO: 425189 - RNA, 32 nt, Human
gagcucacugcagcuucaacaccccagggcuc

SEQ ID NO: 425190 - RNA, 32 nt, Human
gagcucacugcagcuucaaucuccuggcucaa

SEQ ID NO: 425191 - RNA, 32 nt, Human
gagcucacugcauccuugaccucccagacuca

SEQ ID NO: 425192 - RNA, 32 nt, Human
gagcucacugccuaccuggccuggggcugucu

SEQ ID NO: 425193 - RNA, 21 nt, Human
gagcucagaaaccuacuguua

SEQ ID NO: 425194 - RNA, 32 nt, Human
gagcucagaaucugacagccucucccccauuc

SEQ ID NO: 425195 - RNA, 20 nt, Human
gagcucagaggagucuggga

SEQ ID NO: 425196 - RNA, 32 nt, Human
gagcucagaguccugacagcagcuucagagga

SEQ ID NO: 425197 - RNA, 32 nt, Human
gagcucagauagugccacugcacuccagccug

SEQ ID NO: 425198 - RNA, 24 nt, Human
gagcucagaucacaccacugcacu

SEQ ID NO: 425199 - RNA, 32 nt, Human
gagcucagauggugccacugcacuccagccug

SEQ ID NO: 425200 - RNA, 24 nt, Human
gagcucagauugcgucacugcacu

SEQ ID NO: 425201 - RNA, 32 nt, Human
gagcucagcaggcagacgaaugaggaauaaag

SEQ ID NO: 425202 - RNA, 32 nt, Human
gagcucagcaguguuuaaugauccucuuccac

SEQ ID NO: 425203 - RNA, 32 nt, Human
gagcucagcauagacccagcucucugggggau

SEQ ID NO: 425204 - RNA, 32 nt, Human
gagcucagccaagaaauagccacagaagguac

SEQ ID NO: 425205 - RNA, 32 nt, Human
gagcucagccugugggcagggugccggacaaa

SEQ ID NO: 425206 - RNA, 32 nt, Human
gagcucagcgaggcagaggguggggcugcaca

SEQ ID NO: 425207 - RNA, 32 nt, Human
gagcucagcggccucagauccugggaccccug

SEQ ID NO: 425208 - RNA, 32 nt, Human
gagcucagcucaggccagggcugggcugugca

SEQ ID NO: 425209 - RNA, 32 nt, Human
gagcucagcugcaggaaggacaucccagaagc

SEQ ID NO: 425210 - RNA, 32 nt, Human
gagcucaggagaaggggagagacaggucgccc

SEQ ID NO: 425211 - RNA, 32 nt, Human
gagcucaggagcuugagaccagccugggcaac

SEQ ID NO: 425212 - RNA, 32 nt, Human
gagcucaggaggcagagguugcagugagccaa

SEQ ID NO: 425213 - RNA, 32 nt, Human
gagcucaggaggcagagguugcagugagcuga

SEQ ID NO: 425214 - RNA, 18 nt, Human
gagcucaggaggucgagg

SEQ ID NO: 425215 - RNA, 32 nt, Human
gagcucaggagguugaggcugcagagaguggu

SEQ ID NO: 425216 - RNA, 32 nt, Human
gagcucaggagguugggucugcagugagcuau

SEQ ID NO: 425217 - RNA, 32 nt, Human
gagcucaggaguucaagaccagccuggacaac

SEQ ID NO: 425218 - RNA, 32 nt, Human
gagcucaggaguucaagaccagccugggcaac

SEQ ID NO: 425219 - RNA, 32 nt, Human
gagcucaggaguucaagaccagccugggcagc

SEQ ID NO: 425220 - RNA, 23 nt, Human
gagcucaggaguuccagaccagc

SEQ ID NO: 425221 - RNA, 23 nt, Human
gagcucaggaguucgaaccaguu

SEQ ID NO: 425222 - RNA, 18 nt, Human
gagcucaggaguucgaga

SEQ ID NO: 425223 - RNA, 24 nt, Human
gagcucaggaguucgagaccagcu

SEQ ID NO: 425224 - RNA, 32 nt, Human
gagcucaggaguucgagagcagccugggcaac

SEQ ID NO: 425225 - RNA, 32 nt, Human
gagcucaggaguuugaaaccagucuggacaac

SEQ ID NO: 425226 - RNA, 32 nt, Human
gagcucaggaguuugagaccagccugggcaac

SEQ ID NO: 425227 - RNA, 32 nt, Human
gagcucaggaguuugagaccagccugggcaau

SEQ ID NO: 425228 - RNA, 24 nt, Human
gagcucaggaguuugagaccagcu

SEQ ID NO: 425229 - RNA, 32 nt, Human
gagcucaggaguuugagaccagcugggcaaca

SEQ ID NO: 425230 - RNA, 32 nt, Human
gagcucaggcagaucacuugaggucaggaguu

SEQ ID NO: 425231 - RNA, 32 nt, Human
gagcucaggcccaaguggaguuugcagacaua

SEQ ID NO: 425232 - RNA, 19 nt, Human
gagcucagggcacccagug

SEQ ID NO: 425233 - RNA, 32 nt, Human
gagcucagggccugucagaccuggugacaagu

SEQ ID NO: 425234 - RNA, 18 nt, Human
gagcucaggggccgcagg

SEQ ID NO: 425235 - RNA, 32 nt, Human
gagcucagggggccaaggcugcagugagucau

SEQ ID NO: 425236 - RNA, 23 nt, Human
gagcucagggguuucagaccagc

SEQ ID NO: 425237 - RNA, 32 nt, Human
gagcucagggguuugagaccagccugggcaac

SEQ ID NO: 425238 - RNA, 32 nt, Human
gagcucaguaguucaaaaucagccugggguau

SEQ ID NO: 425239 - RNA, 32 nt, Human
gagcucaucacugugggauggugaccugcaga

SEQ ID NO: 425240 - RNA, 25 nt, Human
gagcucaugaucauaccacugcacu

SEQ ID NO: 425241 - RNA, 32 nt, Human
gagcucaugcccuuccuuccucuuuauucgag

SEQ ID NO: 425242 - RNA, 32 nt, Human
gagcucaugcgacugcacuccagccuggguga

SEQ ID NO: 425243 - RNA, 18 nt, Human
gagcucauuccaccagug

SEQ ID NO: 425244 - RNA, 32 nt, Human
gagcuccaaagugcacaucugguuccaacuug

SEQ ID NO: 425245 - RNA, 32 nt, Human
gagcuccaaauuuuggauuaucgggccugugc

SEQ ID NO: 425246 - RNA, 32 nt, Human
gagcuccacucugcuucucugacuucugccug

SEQ ID NO: 425247 - RNA, 32 nt, Human
gagcuccacuuggacaugggccccagauacca

SEQ ID NO: 425248 - RNA, 32 nt, Human
gagcuccagagaaaaagagagcgagagagaac

SEQ ID NO: 425249 - RNA, 32 nt, Human
gagcuccagccgcgcucucucccggcaguggc

SEQ ID NO: 425250 - RNA, 32 nt, Human
gagcuccagccugucugcuccccagcucugua

SEQ ID NO: 425251 - RNA, 17 nt, Human
gagcuccaggcuggcug

SEQ ID NO: 425252 - RNA, 18 nt, Human
gagcuccagggcuggcug

SEQ ID NO: 425253 - RNA, 32 nt, Human
gagcuccagucugcaagagucaggagccgaaa

SEQ ID NO: 425254 - RNA, 32 nt, Human
gagcuccauaaauccuucuugggugaagccua

SEQ ID NO: 425255 - RNA, 32 nt, Human
gagcuccauccuguggcugcucaggggcugaa

SEQ ID NO: 425256 - RNA, 32 nt, Human
gagcuccauuaauguaaucaaaaugaaauaua

SEQ ID NO: 425257 - RNA, 32 nt, Human
gagcucccaagugccggccaccgcugucaggg

SEQ ID NO: 425258 - RNA, 22 nt, Human
gagcucccacaagccugaggga

SEQ ID NO: 425259 - RNA, 32 nt, Human
gagcucccaccacugcacuccagccugggcga

SEQ ID NO: 425260 - RNA, 21 nt, Human
gagcucccacugcuccuuggg

SEQ ID NO: 425261 - RNA, 24 nt, Human
gagcucccagagcagcuucaggga

SEQ ID NO: 425262 - RNA, 32 nt, Human
gagcucccagcacuggagacccacggacucaa

SEQ ID NO: 425263 - RNA, 19 nt, Human
gagcucccaggcgcccggg

SEQ ID NO: 425264 - RNA, 32 nt, Human
gagcucccauguccaaaccauccugaagggcu

SEQ ID NO: 425265 - RNA, 22 nt, Human
gagcucccccagccucagugga

SEQ ID NO: 425266 - RNA, 32 nt, Human
gagcucccccuuccucucggucucccucucgg

SEQ ID NO: 425267 - RNA, 32 nt, Human
gagcucccccuucggagcucuucccugggccu

SEQ ID NO: 425268 - RNA, 32 nt, Human
gagcuccccugcccucuggcuuccugcugagg

SEQ ID NO: 425269 - RNA, 22 nt, Human
gagcucccgagaggcccccggg

SEQ ID NO: 425270 - RNA, 32 nt, Human
gagcucccggcggcccagccccgaggcucugc

SEQ ID NO: 425271 - RNA, 32 nt, Human
gagcucccgggcuccggcagcgggcuggcggg

SEQ ID NO: 425272 - RNA, 20 nt, Human
gagcucccggggcgcccggg

SEQ ID NO: 425273 - RNA, 32 nt, Human
gagcucccucaaagaccucuggcugcagugug

SEQ ID NO: 425274 - RNA, 32 nt, Human
gagcucccugaaggcagaucugagggaggaga

SEQ ID NO: 425275 - RNA, 32 nt, Human
gagcuccgagaguucaacaccagccugggcca

SEQ ID NO: 425276 - RNA, 32 nt, Human
gagcuccgcccuagcccgcagcucuuccgccu

SEQ ID NO: 425277 - RNA, 18 nt, Human
gagcuccgccgaguagca

SEQ ID NO: 425278 - RNA, 32 nt, Human
gagcuccuaggaccaggcugaggcccagggac

SEQ ID NO: 425279 - RNA, 32 nt, Human
gagcuccuagucacagcagguggaccucgugc

SEQ ID NO: 425280 - RNA, 32 nt, Human
gagcuccuagucuguguucccugaagggacac

SEQ ID NO: 425281 - RNA, 32 nt, Human
gagcuccuccaccccugucauucacuuccaau

SEQ ID NO: 425282 - RNA, 32 nt, Human
gagcuccugaaggccacugaaggaggugcagc

SEQ ID NO: 425283 - RNA, 24 nt, Human
gagcuccugaccucaggugaucua

SEQ ID NO: 425284 - RNA, 24 nt, Human
gagcuccugagcucaaacaaucca

SEQ ID NO: 425285 - RNA, 20 nt, Human
gagcuccugaguguucucau

SEQ ID NO: 425286 - RNA, 32 nt, Human
gagcuccugcagccacagcugcagccgcaggc

SEQ ID NO: 425287 - RNA, 32 nt, Human
gagcuccugcagcucaccugagcccacagacu

SEQ ID NO: 425288 - RNA, 32 nt, Human
gagcuccugccugagcuggaccuuaugcaaac

SEQ ID NO: 425289 - RNA, 32 nt, Human
gagcuccugccuggauucccagcacuuuggga

SEQ ID NO: 425290 - RNA, 32 nt, Human
gagcuccugcgaccuggcugagcuccugccuc

SEQ ID NO: 425291 - RNA, 32 nt, Human
gagcuccuggaccaaugcaucuucccaccacc

SEQ ID NO: 425292 - RNA, 32 nt, Human
gagcuccuggagaagagaggagacaugucagg

SEQ ID NO: 425293 - RNA, 29 nt, Human
gagcuccuggcuuccgcaucccccaaggc

SEQ ID NO: 425294 - RNA, 32 nt, Human
gagcuccugggugagcagcugcucugagacaa

SEQ ID NO: 425295 - RNA, 32 nt, Human
gagcuccuuagccugccugccaccucacuggc

SEQ ID NO: 425296 - RNA, 32 nt, Human
gagcuccuuaucuguaggaugugcaguaaaca

SEQ ID NO: 425297 - RNA, 32 nt, Human
gagcuccuuuaaucuucccagcagguuuuugc

SEQ ID NO: 425298 - RNA, 20 nt, Human
gagcucgagaccagcuuggc

SEQ ID NO: 425299 - RNA, 32 nt, Human
gagcucgcagugagccgagaucacgccacugc

SEQ ID NO: 425300 - RNA, 23 nt, Human
gagcucgccccuccccucagccu

SEQ ID NO: 425301 - RNA, 20 nt, Human
gagcucgccggggcgccggg

SEQ ID NO: 425302 - RNA, 32 nt, Human
gagcucgcgccauugcacuccagccuuggaac

SEQ ID NO: 425303 - RNA, 32 nt, Human
gagcucgcgccgcggcagcccagccgcucggc

SEQ ID NO: 425304 - RNA, 32 nt, Human
gagcucggaagauggaggcugcagugagccau

SEQ ID NO: 425305 - RNA, 32 nt, Human
gagcucggagcacagccaucugcucguguccc

SEQ ID NO: 425306 - RNA, 32 nt, Human
gagcucggaucccaguguggaccuggacucga

SEQ ID NO: 425307 - RNA, 32 nt, Human
gagcucuagccaucucucggucacuggcaaua

SEQ ID NO: 425308 - RNA, 32 nt, Human
gagcucuagcugcaggcugccuggguggccuu

SEQ ID NO: 425309 - RNA, 32 nt, Human
gagcucuagggaggcugguggaagcggcuggg

SEQ ID NO: 425310 - RNA, 32 nt, Human
gagcucuauuaugcaauacucucuccauacug

SEQ ID NO: 425311 - RNA, 32 nt, Human
gagcucuauucuguaccugccacucuauuucu

SEQ ID NO: 425312 - RNA, 32 nt, Human
gagcucuauucuugccccuacucuccaacuca

SEQ ID NO: 425313 - RNA, 32 nt, Human
gagcucucaccaggaguaggcagguggauccu

SEQ ID NO: 425314 - RNA, 32 nt, Human
gagcucucacccagagcgucagugaguuggug

SEQ ID NO: 425315 - RNA, 32 nt, Human
gagcucuccaaggagcaggagcugggugaucu

SEQ ID NO: 425316 - RNA, 32 nt, Human
gagcucuccagcccugccuagugggcgcccug

SEQ ID NO: 425317 - RNA, 32 nt, Human
gagcucuccagccucggcgccuggggcagcgg

SEQ ID NO: 425318 - RNA, 32 nt, Human
gagcucucccacucucagacccucuuuugucu

SEQ ID NO: 425319 - RNA, 32 nt, Human
gagcucucccuaugcuaccagaaggccuugcu

SEQ ID NO: 425320 - RNA, 32 nt, Human
gagcucuccuauauuaucauacucagauaacc

SEQ ID NO: 425321 - RNA, 32 nt, Human
gagcucuccugcaguuucuuccuugcuccuuc

SEQ ID NO: 425322 - RNA, 32 nt, Human
gagcucucgccaggaccccaaggcuguugguc

SEQ ID NO: 425323 - RNA, 32 nt, Human
gagcucucuaaggagcuaagguccaugggaau

SEQ ID NO: 425324 - RNA, 32 nt, Human
gagcucucucaggaccaaacacugagcauguu

SEQ ID NO: 425325 - RNA, 32 nt, Human
gagcucucuguggugcuggcagcgacaugugg

SEQ ID NO: 425326 - RNA, 19 nt, Human
gagcucugagaaaagggac

SEQ ID NO: 425327 - RNA, 32 nt, Human
gagcucugagcagcagcaggcaacuucgagaa

SEQ ID NO: 425328 - RNA, 32 nt, Human
gagcucugagguggcacccugccugacuccaa

SEQ ID NO: 425329 - RNA, 32 nt, Human
gagcucugagucugucacucucccucugcuac

SEQ ID NO: 425330 - RNA, 31 nt, Human
gagcucugaguguccacgggugaagaaguga

SEQ ID NO: 425331 - RNA, 24 nt, Human
gagcucugaucacuccacugcacu

SEQ ID NO: 425332 - RNA, 24 nt, Human
gagcucugauugcgccacugcacu

SEQ ID NO: 425333 - RNA, 32 nt, Human
gagcucuggaaagaaggaugucaagaagguga

SEQ ID NO: 425334 - RNA, 32 nt, Human
gagcucuggacagagaaaaacaggcccuagaa

SEQ ID NO: 425335 - RNA, 32 nt, Human
gagcucuggaggcugggcuggccaagcgcccc

SEQ ID NO: 425336 - RNA, 32 nt, Human
gagcucuggagguggaggcugccaugagccau

SEQ ID NO: 425337 - RNA, 32 nt, Human
gagcucuggaguuugagaccagccugggcaac

SEQ ID NO: 425338 - RNA, 32 nt, Human
gagcucuggaucucagcugugguuccuuucua

SEQ ID NO: 425339 - RNA, 19 nt, Human
gagcucuggauucgucuug

SEQ ID NO: 425340 - RNA, 32 nt, Human
gagcucuggccaccagcugaccuuuagcaaga

SEQ ID NO: 425341 - RNA, 32 nt, Human
gagcucuggccacuucugcccacuucauuagg

SEQ ID NO: 425342 - RNA, 32 nt, Human
gagcucuggccaggcugugccagugugucccg

SEQ ID NO: 425343 - RNA, 29 nt, Human
gagcucuggcugcaggcaucuccauggcc

SEQ ID NO: 425344 - RNA, 32 nt, Human
gagcucugggagcaaggaccaccugguaacaa

SEQ ID NO: 425345 - RNA, 32 nt, Human
gagcucugggagguggaagcauggggugggau

SEQ ID NO: 425346 - RNA, 32 nt, Human
gagcucugggcaacaggaggaggcccggugcc

SEQ ID NO: 425347 - RNA, 32 nt, Human
gagcucugggcagaggcaggggagaggacaca

SEQ ID NO: 425348 - RNA, 19 nt, Human
gagcucuggugauaaggac

SEQ ID NO: 425349 - RNA, 32 nt, Human
gagcucuguagccagccucuucugcgcaccca

SEQ ID NO: 425350 - RNA, 32 nt, Human
gagcucuguagccuggucugugcauuguggcu

SEQ ID NO: 425351 - RNA, 20 nt, Human
gagcucuguaggccucagag

SEQ ID NO: 425352 - RNA, 32 nt, Human
gagcucugucucccucccaacccaggguugcc

SEQ ID NO: 425353 - RNA, 32 nt, Human
gagcucugugccaggcccaccuugcggcccug

SEQ ID NO: 425354 - RNA, 32 nt, Human
gagcucuguggugucugugggucccccugagg

SEQ ID NO: 425355 - RNA, 32 nt, Human
gagcucuuagccaauccuaugcagagagcauc

SEQ ID NO: 425356 - RNA, 32 nt, Human
gagcucuucaauucugaauugucugccacuua

SEQ ID NO: 425357 - RNA, 32 nt, Human
gagcucuucaucuuaccgguggagauucauua

SEQ ID NO: 425358 - RNA, 32 nt, Human
gagcucuuccaggagccaccuugccacccauu

SEQ ID NO: 425359 - RNA, 32 nt, Human
gagcucuuccccucaacuugucugggcccauc

SEQ ID NO: 425360 - RNA, 32 nt, Human
gagcucuuccugcuucucuccccaucaccaug

SEQ ID NO: 425361 - RNA, 25 nt, Human
gagcucuugaaaggccacccaggag

SEQ ID NO: 425362 - RNA, 32 nt, Human
gagcucuuggacccuccucuucacggacccaa

SEQ ID NO: 425363 - RNA, 32 nt, Human
gagcucuuggagagccaaggccagccaagagc

SEQ ID NO: 425364 - RNA, 32 nt, Human
gagcucuugugaauauuguggcucccuggggg

SEQ ID NO: 425365 - RNA, 32 nt, Human
gagcucuugugacgcggaccucagugccagga

SEQ ID NO: 425366 - RNA, 32 nt, Human
gagcucuuucccucagggucucagggagccag

SEQ ID NO: 425367 - RNA, 32 nt, Human
gagcucuuuuugaaagaacuaguuucuuuuua

SEQ ID NO: 425368 - RNA, 32 nt, Human
gagcugaaaaacacagcaugagaacuucguga

SEQ ID NO: 425369 - RNA, 32 nt, Human
gagcugaaaaucugaaucagaaagcuuucuca

SEQ ID NO: 425370 - RNA, 32 nt, Human
gagcugaaaaugcagauuuagcaucaagcaca

SEQ ID NO: 425371 - RNA, 32 nt, Human
gagcugaaaccaggggugcagcugucagguag

SEQ ID NO: 425372 - RNA, 24 nt, Human
gagcugaaaucacgccacugcacu

SEQ ID NO: 425373 - RNA, 24 nt, Human
gagcugaaaucgcgccauugcacu

SEQ ID NO: 425374 - RNA, 32 nt, Human
gagcugaaaucgcguaccacacuccagccugg

SEQ ID NO: 425375 - RNA, 32 nt, Human
gagcugaaauggugccacugcacuccagucug

SEQ ID NO: 425376 - RNA, 32 nt, Human
gagcugaaauuguaccaacuccucuggcccuc

SEQ ID NO: 425377 - RNA, 32 nt, Human
gagcugaacaccaagggaagcaaauucauguc

SEQ ID NO: 425378 - RNA, 32 nt, Human
gagcugaagagggaggaaggggcggcugcuca

SEQ ID NO: 425379 - RNA, 32 nt, Human
gagcugaagcccuaaggaaggcugggcccgua

SEQ ID NO: 425380 - RNA, 32 nt, Human
gagcugaaggcaggagccgccgccacgggcag

SEQ ID NO: 425381 - RNA, 32 nt, Human
gagcugaauccuucaaaggcacagcaggcaga

SEQ ID NO: 425382 - RNA, 32 nt, Human
gagcugaauuuacuuggcucccauuagaaacu

SEQ ID NO: 425383 - RNA, 32 nt, Human
gagcugaauuuuuccuuuuuguauuuucuuag

SEQ ID NO: 425384 - RNA, 18 nt, Human
gagcugacaaucaauuca

SEQ ID NO: 425385 - RNA, 24 nt, Human
gagcugacaccacgccacugcacu

SEQ ID NO: 425386 - RNA, 24 nt, Human
gagcugacauugcgccacugcacu

SEQ ID NO: 425387 - RNA, 32 nt, Human
gagcugacccagagguggaggccacggaggca

SEQ ID NO: 425388 - RNA, 32 nt, Human
gagcugaccccacuccaggaccuaggcccagc

SEQ ID NO: 425389 - RNA, 32 nt, Human
gagcugaccugaccaggcaaggcugcugucuc

SEQ ID NO: 425390 - RNA, 32 nt, Human
gagcugacgggaggggaaacggaggggcaggu

SEQ ID NO: 425391 - RNA, 32 nt, Human
gagcugacggucaagaaagaagagaagauaug

SEQ ID NO: 425392 - RNA, 32 nt, Human
gagcugacugagggaagaugcaccuugaucuc

SEQ ID NO: 425393 - RNA, 32 nt, Human
gagcugacugccuccagggcuggaauccugug

SEQ ID NO: 425394 - RNA, 19 nt, Human
gagcugagaagacagcuca

SEQ ID NO: 425395 - RNA, 32 nt, Human
gagcugagaagcagggucaaagcacaauacug

SEQ ID NO: 425396 - RNA, 23 nt, Human
gagcugagacagccacccagggg

SEQ ID NO: 425397 - RNA, 24 nt, Human
gagcugagaccacaccacugcacu

SEQ ID NO: 425398 - RNA, 32 nt, Human
gagcugagacggugucacugcacuccagccug

SEQ ID NO: 425399 - RNA, 32 nt, Human
gagcugagagagaagaaaaauuaccagauauc

SEQ ID NO: 425400 - RNA, 32 nt, Human
gagcugagauagugccucugcacuccagccug

SEQ ID NO: 425401 - RNA, 24 nt, Human
gagcugagaucacaccacugcacu

SEQ ID NO: 425402 - RNA, 32 nt, Human
gagcugagaucacaccacuguauuccagccug

SEQ ID NO: 425403 - RNA, 24 nt, Human
gagcugagaucacaccauugcacu

SEQ ID NO: 425404 - RNA, 24 nt, Human
gagcugagaucacacuacugcacu

SEQ ID NO: 425405 - RNA, 24 nt, Human
gagcugagaucacgccacuacacu

SEQ ID NO: 425406 - RNA, 32 nt, Human
gagcugagaucacgccacuacacuccaaccug

SEQ ID NO: 425407 - RNA, 24 nt, Human
gagcugagaucacgccacugcacu

SEQ ID NO: 425408 - RNA, 32 nt, Human
gagcugagaucacgccauuacacuccagccug

SEQ ID NO: 425409 - RNA, 24 nt, Human
gagcugagaucacgccauugcacu

SEQ ID NO: 425410 - RNA, 32 nt, Human
gagcugagaucaggcacuucagccugggcgac

SEQ ID NO: 425411 - RNA, 32 nt, Human
gagcugagaucaugccauuacacuccagccug

SEQ ID NO: 425412 - RNA, 32 nt, Human
gagcugagaucgcaccaccacacuccagccug

SEQ ID NO: 425413 - RNA, 24 nt, Human
gagcugagaucgcaccacugcacu

SEQ ID NO: 425414 - RNA, 24 nt, Human
gagcugagaucgcaccagugcacu

SEQ ID NO: 425415 - RNA, 24 nt, Human
gagcugagaucgcaccauuacacu

SEQ ID NO: 425416 - RNA, 32 nt, Human
gagcugagaucgcaccauuacacuccagccug

SEQ ID NO: 425417 - RNA, 24 nt, Human
gagcugagaucgcaccauugcacu

SEQ ID NO: 425418 - RNA, 32 nt, Human
gagcugagaucgccccacugcuuuucaaccug

SEQ ID NO: 425419 - RNA, 24 nt, Human
gagcugagaucgcgccacugcacu

SEQ ID NO: 425420 - RNA, 21 nt, Human
gagcugagaucgcgccaguac

SEQ ID NO: 425421 - RNA, 32 nt, Human
gagcugagaucgcgccaguacacuccagccug

SEQ ID NO: 425422 - RNA, 24 nt, Human
gagcugagaucgcgccauugcacu

SEQ ID NO: 425423 - RNA, 32 nt, Human
gagcugagaucgcgucaguacacuccagccug

SEQ ID NO: 425424 - RNA, 32 nt, Human
gagcugagaucgugccauuacacuccagccug

SEQ ID NO: 425425 - RNA, 32 nt, Human
gagcugagaucgugccguuacucuccaaccug

SEQ ID NO: 425426 - RNA, 32 nt, Human
gagcugagaucgugucacuacacuccaggcug

SEQ ID NO: 425427 - RNA, 32 nt, Human
gagcugagaugguaccacugcacuccagccug

SEQ ID NO: 425428 - RNA, 32 nt, Human
gagcugagauggugccacugcacuccagauga

SEQ ID NO: 425429 - RNA, 32 nt, Human
gagcugagauggugccacugcacuccagccug

SEQ ID NO: 425430 - RNA, 32 nt, Human
gagcugagauggugccacugcacuccagcuua

SEQ ID NO: 425431 - RNA, 19 nt, Human
gagcugagaugugacugca

SEQ ID NO: 425432 - RNA, 24 nt, Human
gagcugagauuacaccacugcacu

SEQ ID NO: 425433 - RNA, 24 nt, Human
gagcugagauugcaccacuacacu

SEQ ID NO: 425434 - RNA, 32 nt, Human
gagcugagauugcaccacuacacuccagccug

SEQ ID NO: 425435 - RNA, 24 nt, Human
gagcugagauugcaccacugcacu

SEQ ID NO: 425436 - RNA, 24 nt, Human
gagcugagauugcaccauugcacu

SEQ ID NO: 425437 - RNA, 24 nt, Human
gagcugagauugcgccaccgcacu

SEQ ID NO: 425438 - RNA, 23 nt, Human
gagcugagauugcgccacugcac

SEQ ID NO: 425439 - RNA, 24 nt, Human
gagcugagauugcgccacugcacu

SEQ ID NO: 425440 - RNA, 24 nt, Human
gagcugagauugcgccauugcacu

SEQ ID NO: 425441 - RNA, 32 nt, Human
gagcugagauugugccacuacacuccagccug

SEQ ID NO: 425442 - RNA, 21 nt, Human
gagcugagcaagaacauccca

SEQ ID NO: 425443 - RNA, 32 nt, Human
gagcugagcacugccuagccugggccagaggg

SEQ ID NO: 425444 - RNA, 32 nt, Human
gagcugagcagcgggggagaugaaucaccucc

SEQ ID NO: 425445 - RNA, 32 nt, Human
gagcugagccaaggaaaaucagcugagcccag

SEQ ID NO: 425446 - RNA, 32 nt, Human
gagcugagccaauguguggccuagcggaagcu

SEQ ID NO: 425447 - RNA, 32 nt, Human
gagcugagcccaggcugcguagugaccacaag

SEQ ID NO: 425448 - RNA, 32 nt, Human
gagcugagccgaagcuucaccaaccagaucau

SEQ ID NO: 425449 - RNA, 32 nt, Human
gagcugagccggacccuccaccuggaggaggu

SEQ ID NO: 425450 - RNA, 32 nt, Human
gagcugagccugauucaaaugguuuuucugcu

SEQ ID NO: 425451 - RNA, 32 nt, Human
gagcugaggaaggcagaucuggccucagcuau

SEQ ID NO: 425452 - RNA, 32 nt, Human
gagcugaggacuuggcccugccugcacuguau

SEQ ID NO: 425453 - RNA, 32 nt, Human
gagcugaggagaaauaugaaaucucccugcuc

SEQ ID NO: 425454 - RNA, 32 nt, Human
gagcugaggaggagcugaaaaugcagauuuag

SEQ ID NO: 425455 - RNA, 32 nt, Human
gagcugaggaguuugagaccagccugggcaac

SEQ ID NO: 425456 - RNA, 32 nt, Human
gagcugaggccaucuguguggugguggcugau

SEQ ID NO: 425457 - RNA, 32 nt, Human
gagcugagggagcagucuccacgaggacccag

SEQ ID NO: 425458 - RNA, 19 nt, Human
gagcugaguacucaggcca

SEQ ID NO: 425459 - RNA, 25 nt, Human
gagcugaguaguggggauccagaga

SEQ ID NO: 425460 - RNA, 32 nt, Human
gagcugaguauaaaggggucaccagagaaccc

SEQ ID NO: 425461 - RNA, 32 nt, Human
gagcugagucaggucugcaguccuggugaggg

SEQ ID NO: 425462 - RNA, 32 nt, Human
gagcugaguggagccaggcuggcccagagcug

SEQ ID NO: 425463 - RNA, 32 nt, Human
gagcugaguuccagggcuguguccugcagugg

SEQ ID NO: 425464 - RNA, 24 nt, Human
gagcugauauugugccacugcacu

SEQ ID NO: 425465 - RNA, 22 nt, Human
gagcugaucaugccacugcacu

SEQ ID NO: 425466 - RNA, 32 nt, Human
gagcugaugagccguccccugggcuugaaauc

SEQ ID NO: 425467 - RNA, 31 nt, Human
gagcugaugggcuccccucuggcuaccuggg

SEQ ID NO: 425468 - RNA, 20 nt, Human
gagcugcaagcccguggccu

SEQ ID NO: 425469 - RNA, 22 nt, Human
gagcugcacagccacucagagg

SEQ ID NO: 425470 - RNA, 32 nt, Human
gagcugcacagcugcucccagagccugagcau

SEQ ID NO: 425471 - RNA, 32 nt, Human
gagcugcacguuggaggggaagugaauucacc

SEQ ID NO: 425472 - RNA, 23 nt, Human
gagcugcacucucccuccugccu

SEQ ID NO: 425473 - RNA, 31 nt, Human
gagcugcacugcaccagccagggcugucaag

SEQ ID NO: 425474 - RNA, 32 nt, Human
gagcugcacugcauuccagccugggugacaga

SEQ ID NO: 425475 - RNA, 32 nt, Human
gagcugcacuuaacuguucucuuucuggcuau

SEQ ID NO: 425476 - RNA, 32 nt, Human
gagcugcagaagcagggggcugguggggugga

SEQ ID NO: 425477 - RNA, 32 nt, Human
gagcugcagaagcguagggaagaagcugaaga

SEQ ID NO: 425478 - RNA, 32 nt, Human
gagcugcagagagcuccuccagccuggagacg

SEQ ID NO: 425479 - RNA, 32 nt, Human
gagcugcagagggcuacaacuuccauauaagg

SEQ ID NO: 425480 - RNA, 32 nt, Human
gagcugcagcagagagggaugagggauuuagc

SEQ ID NO: 425481 - RNA, 32 nt, Human
gagcugcagcagcacguaaagucagugacaug

SEQ ID NO: 425482 - RNA, 32 nt, Human
gagcugcagcagcauguaaagucagugacagc

SEQ ID NO: 425483 - RNA, 20 nt, Human
gagcugcagcaggagcagca

SEQ ID NO: 425484 - RNA, 25 nt, Human
gagcugcaggaaucaccccucugcc

SEQ ID NO: 425485 - RNA, 32 nt, Human
gagcugcaggcgcgcgucauggcugcuuugag

SEQ ID NO: 425486 - RNA, 32 nt, Human
gagcugcagggcugugugugguccuucccugg

SEQ ID NO: 425487 - RNA, 32 nt, Human
gagcugcagggugaggcauagggaaugugggg

SEQ ID NO: 425488 - RNA, 31 nt, Human
gagcugcaguuucagccgcgacagcaagaac

SEQ ID NO: 425489 - RNA, 18 nt, Human
gagcugcauccacaugcu

SEQ ID NO: 425490 - RNA, 32 nt, Human
gagcugcaucuccuacccucagucucccuguc

SEQ ID NO: 425491 - RNA, 32 nt, Human
gagcugccacacagcaccuuugccaugccccg

SEQ ID NO: 425492 - RNA, 18 nt, Human
gagcugccaccagcagca

SEQ ID NO: 425493 - RNA, 32 nt, Human
gagcugccaggcuccuuuucugaucucccagc

SEQ ID NO: 425494 - RNA, 32 nt, Human
gagcugccagggacaaagggcucucagacauc

SEQ ID NO: 425495 - RNA, 32 nt, Human
gagcugccaucccggcuggccgcccggauggc

SEQ ID NO: 425496 - RNA, 32 nt, Human
gagcugccauuuuaugugucucuugcacuaca

SEQ ID NO: 425497 - RNA, 32 nt, Human
gagcugcccacagcaggccagguccagagaga

SEQ ID NO: 425498 - RNA, 32 nt, Human
gagcugcccacugugcccccagugcccacaga

SEQ ID NO: 425499 - RNA, 32 nt, Human
gagcugcccagaccuggaaagccaggcugagc

SEQ ID NO: 425500 - RNA, 32 nt, Human
gagcugcccaggcuucacggagcgguguuggu

SEQ ID NO: 425501 - RNA, 32 nt, Human
gagcugcccccagggguaugagggcaccagcu

SEQ ID NO: 425502 - RNA, 28 nt, Human
gagcugccccgugcugccuucuccaggc

SEQ ID NO: 425503 - RNA, 32 nt, Human
gagcugcccugacccccaaagugaggagaagc

SEQ ID NO: 425504 - RNA, 32 nt, Human
gagcugcccugagugaguccaaccuuggagga

SEQ ID NO: 425505 - RNA, 23 nt, Human
gagcugccgagccucccucugcc

SEQ ID NO: 425506 - RNA, 32 nt, Human
gagcugccuaggaucagagagccuucauggaa

SEQ ID NO: 425507 - RNA, 20 nt, Human
gagcugccugcagguucccu

SEQ ID NO: 425508 - RNA, 32 nt, Human
gagcugccuggaauaagaguuugagcuugugc

SEQ ID NO: 425509 - RNA, 32 nt, Human
gagcugccugucugcauguauccucuggcgcg

SEQ ID NO: 425510 - RNA, 32 nt, Human
gagcugcgcccucccugaccucccaggcugcg

SEQ ID NO: 425511 - RNA, 24 nt, Human
gagcugcggucaugccacugcacu

SEQ ID NO: 425512 - RNA, 32 nt, Human
gagcugcggucccucuggugucugccaucccc

SEQ ID NO: 425513 - RNA, 32 nt, Human
gagcugcggucugaggccccugcccagcugga

SEQ ID NO: 425514 - RNA, 31 nt, Human
gagcugcucaauaaauguuuguugaacgaau

SEQ ID NO: 425515 - RNA, 21 nt, Human
gagcugcucagcacgcccugg

SEQ ID NO: 425516 - RNA, 32 nt, Human
gagcugcucauggagaaagugccaggcgagau

SEQ ID NO: 425517 - RNA, 21 nt, Human
gagcugcucuccgcgggcuga

SEQ ID NO: 425518 - RNA, 32 nt, Human
gagcugcucuccuaucagaagcucccagcuga

SEQ ID NO: 425519 - RNA, 32 nt, Human
gagcugcucugcccugacccugccucaccccc

SEQ ID NO: 425520 - RNA, 32 nt, Human
gagcugcugaaugaagugucccuucccaucag

SEQ ID NO: 425521 - RNA, 32 nt, Human
gagcugcugagcaucaacaaggugacauuuuu

SEQ ID NO: 425522 - RNA, 32 nt, Human
gagcugcugcaagugccgccugugcuggggaa

SEQ ID NO: 425523 - RNA, 32 nt, Human
gagcugcugcacagagccugguguccacaagc

SEQ ID NO: 425524 - RNA, 32 nt, Human
gagcugcugccacuccagcaagggaaauaaug

SEQ ID NO: 425525 - RNA, 32 nt, Human
gagcugcugcccccuuucuuccuggccucggc

SEQ ID NO: 425526 - RNA, 32 nt, Human
gagcugcugccucuauccugggugccugccuc

SEQ ID NO: 425527 - RNA, 32 nt, Human
gagcugcugcuggcucuguccuggcucuuggc

SEQ ID NO: 425528 - RNA, 32 nt, Human
gagcugcuggcuuuguucucucaagucagguc

SEQ ID NO: 425529 - RNA, 32 nt, Human
gagcugcugggaacauccacaaagaaagagaa

SEQ ID NO: 425530 - RNA, 32 nt, Human
gagcugcugggucucugucacuguggacucca

SEQ ID NO: 425531 - RNA, 32 nt, Human
gagcugcugggugggaggaggagggugggauu

SEQ ID NO: 425532 - RNA, 32 nt, Human
gagcugcuggugcugcugcugcugcugcugcc

SEQ ID NO: 425533 - RNA, 32 nt, Human
gagcugcuguggagccucauccaccgcuucuc

SEQ ID NO: 425534 - RNA, 32 nt, Human
gagcugcuguggcucccuagccuaaggggccu

SEQ ID NO: 425535 - RNA, 32 nt, Human
gagcugcuguuuucugaaggugagaagccauu

SEQ ID NO: 425536 - RNA, 32 nt, Human
gagcugcuucaguccaucucccagaggcauuu

SEQ ID NO: 425537 - RNA, 32 nt, Human
gagcugcuucagugaauguacagugcccggca

SEQ ID NO: 425538 - RNA, 32 nt, Human
gagcugcuugccuuuccaccuccagggcauga

SEQ ID NO: 425539 - RNA, 32 nt, Human
gagcugcuuggcagugccagagcccaggcccc

SEQ ID NO: 425540 - RNA, 32 nt, Human
gagcugcuugggaggcacagguccugggacau

SEQ ID NO: 425541 - RNA, 32 nt, Human
gagcugcuuugugaugcugaaggauacugccg

SEQ ID NO: 425542 - RNA, 32 nt, Human
gagcuggaaaccugggguggguuggccaaagg

SEQ ID NO: 425543 - RNA, 32 nt, Human
gagcuggaaacugagcuuuaagaaauaacuau

SEQ ID NO: 425544 - RNA, 32 nt, Human
gagcuggaaagccggguugggguggggugggg

SEQ ID NO: 425545 - RNA, 32 nt, Human
gagcuggaacaugcccugucugugcugucccu

SEQ ID NO: 425546 - RNA, 32 nt, Human
gagcuggaagaggaggaggaggagaggcggcg

SEQ ID NO: 425547 - RNA, 32 nt, Human
gagcuggaagccggagagcaagcccuggaggu

SEQ ID NO: 425548 - RNA, 19 nt, Human
gagcuggaagcuguggggg

SEQ ID NO: 425549 - RNA, 25 nt, Human
gagcuggaauagguccucugggaug

SEQ ID NO: 425550 - RNA, 32 nt, Human
gagcuggaauccucuuucagguaccaaauguc

SEQ ID NO: 425551 - RNA, 32 nt, Human
gagcuggaaucgugccacuccacuccagccug

SEQ ID NO: 425552 - RNA, 32 nt, Human
gagcuggacacuccuggcuggacgccaggcca

SEQ ID NO: 425553 - RNA, 32 nt, Human
gagcuggacagauucugugaugccaugaucag

SEQ ID NO: 425554 - RNA, 32 nt, Human
gagcuggaccagccuggguuucaucucccaca

SEQ ID NO: 425555 - RNA, 17 nt, Human
gagcuggacgaggagca

SEQ ID NO: 425556 - RNA, 23 nt, Human
gagcuggacgcucuucaggacgu

SEQ ID NO: 425557 - RNA, 32 nt, Human
gagcuggacuuuggucagccuaggugagacuc

SEQ ID NO: 425558 - RNA, 21 nt, Human
gagcuggagaggacagaggcg

SEQ ID NO: 425559 - RNA, 32 nt, Human
gagcuggagagggugcguuucacuguggggug

SEQ ID NO: 425560 - RNA, 32 nt, Human
gagcuggaggagcaaugcuguuggugaauaaa

SEQ ID NO: 425561 - RNA, 32 nt, Human
gagcuggaggcugcagugaacuaugaucaaac

SEQ ID NO: 425562 - RNA, 32 nt, Human
gagcuggagggaggggcgggagagaggcaagg

SEQ ID NO: 425563 - RNA, 32 nt, Human
gagcuggaggggacacuggcccagggagagcu

SEQ ID NO: 425564 - RNA, 32 nt, Human
gagcuggaggggccgugcagagucuccauggg

SEQ ID NO: 425565 - RNA, 31 nt, Human
gagcuggagucaaaagauuuaucuucaaguu

SEQ ID NO: 425566 - RNA, 21 nt, Human
gagcuggaucacuugaguuca

SEQ ID NO: 425567 - RNA, 32 nt, Human
gagcuggaucacuugaguucaggaguuggaga

SEQ ID NO: 425568 - RNA, 32 nt, Human
gagcuggauggggacuguggccgccacccuuc

SEQ ID NO: 425569 - RNA, 32 nt, Human
gagcuggauuugaacccaggcagggcagcugc

SEQ ID NO: 425570 - RNA, 20 nt, Human
gagcuggcacaccagcagca

SEQ ID NO: 425571 - RNA, 32 nt, Human
gagcuggcacagacccgggcagagggacagca

SEQ ID NO: 425572 - RNA, 20 nt, Human
gagcuggcaccgcgagcugg

SEQ ID NO: 425573 - RNA, 32 nt, Human
gagcuggcaccgcgcaagggccccugccuccc

SEQ ID NO: 425574 - RNA, 32 nt, Human
gagcuggcaccugugccggugccuggagcugc

SEQ ID NO: 425575 - RNA, 21 nt, Human
gagcuggcaggcggagggcug

SEQ ID NO: 425576 - RNA, 22 nt, Human
gagcuggcaggggaggggcuga

SEQ ID NO: 425577 - RNA, 32 nt, Human
gagcuggcagugagcugagaucacaccacugc

SEQ ID NO: 425578 - RNA, 23 nt, Human
gagcuggcagugugcggagcuga

SEQ ID NO: 425579 - RNA, 23 nt, Human
gagcuggcauccuccgcugguuu

SEQ ID NO: 425580 - RNA, 32 nt, Human
gagcuggcauuugcacaaacacggcaacacug

SEQ ID NO: 425581 - RNA, 32 nt, Human
gagcuggccagcccacgggaaugcauugaguu

SEQ ID NO: 425582 - RNA, 22 nt, Human
gagcuggccagccccucggggc

SEQ ID NO: 425583 - RNA, 22 nt, Human
gagcuggccaguaauaggcuga

SEQ ID NO: 425584 - RNA, 26 nt, Human
gagcuggcccugcacauccauacaga

SEQ ID NO: 425585 - RNA, 31 nt, Human
gagcuggccgugucucccacucaggggcuga

SEQ ID NO: 425586 - RNA, 18 nt, Human
gagcuggccuuuaacuca

SEQ ID NO: 425587 - RNA, 23 nt, Human
gagcuggcgcccucucgcuccug

SEQ ID NO: 425588 - RNA, 19 nt, Human
gagcuggcggaaggggcug

SEQ ID NO: 425589 - RNA, 23 nt, Human
gagcuggcggccaccggaucuga

SEQ ID NO: 425590 - RNA, 18 nt, Human
gagcuggcgggcgcuggc

SEQ ID NO: 425591 - RNA, 21 nt, Human
gagcuggcgggcuggcaaggg

SEQ ID NO: 425592 - RNA, 23 nt, Human
gagcuggcgggcuggccuucugg

SEQ ID NO: 425593 - RNA, 21 nt, Human
gagcuggcgggucccgcgggc

SEQ ID NO: 425594 - RNA, 19 nt, Human
gagcuggcgguccgagcug

SEQ ID NO: 425595 - RNA, 21 nt, Human
gagcuggcugaggccggcuga

SEQ ID NO: 425596 - RNA, 22 nt, Human
gagcuggcugccuggcagauga

SEQ ID NO: 425597 - RNA, 32 nt, Human
gagcuggcuggagagaaaggucuggagguugg

SEQ ID NO: 425598 - RNA, 32 nt, Human
gagcuggcuuugcaaacaccugccucaugaca

SEQ ID NO: 425599 - RNA, 32 nt, Human
gagcugggaaggaaggaagggggcgcuagcca

SEQ ID NO: 425600 - RNA, 32 nt, Human
gagcugggaaguaaguucuuccccagccucca

SEQ ID NO: 425601 - RNA, 32 nt, Human
gagcugggaauaucagaucugcugcguguucu

SEQ ID NO: 425602 - RNA, 32 nt, Human
gagcugggaccccuccccuccaacacacauac

SEQ ID NO: 425603 - RNA, 19 nt, Human
gagcugggacuccagcuca

SEQ ID NO: 425604 - RNA, 32 nt, Human
gagcugggagaaccccagcccccaggaggccc

SEQ ID NO: 425605 - RNA, 32 nt, Human
gagcugggagagagcugccugcuuuucuuaau

SEQ ID NO: 425606 - RNA, 32 nt, Human
gagcugggagagaggccgggguuagggugauc

SEQ ID NO: 425607 - RNA, 23 nt, Human
gagcugggagcaagauggacaga

SEQ ID NO: 425608 - RNA, 32 nt, Human
gagcugggagccaccauaggugacccugguca

SEQ ID NO: 425609 - RNA, 32 nt, Human
gagcugggagcuagguccucggagugggccgg

SEQ ID NO: 425610 - RNA, 32 nt, Human
gagcugggaggcggcgaucgcagcugggccgg

SEQ ID NO: 425611 - RNA, 32 nt, Human
gagcugggagggugacagggagggcgggcgcu

SEQ ID NO: 425612 - RNA, 32 nt, Human
gagcugggaggguggaggugugggagcugaug

SEQ ID NO: 425613 - RNA, 24 nt, Human
gagcugggaucgcgccauugcacu

SEQ ID NO: 425614 - RNA, 24 nt, Human
gagcugggaucguaccacugcacu

SEQ ID NO: 425615 - RNA, 32 nt, Human
gagcugggauggagaagauggaagcacuggug

SEQ ID NO: 425616 - RNA, 24 nt, Human
gagcugggauugcaucacugcacu

SEQ ID NO: 425617 - RNA, 25 nt, Human
gagcugggcagaucaccugagguca

SEQ ID NO: 425618 - RNA, 22 nt, Human
gagcugggccgggcugggaugu

SEQ ID NO: 425619 - RNA, 32 nt, Human
gagcugggcgagcugggcuggggagagccugu

SEQ ID NO: 425620 - RNA, 32 nt, Human
gagcugggcuaacaggcugacacuucggcagg

SEQ ID NO: 425621 - RNA, 32 nt, Human
gagcugggcucaggcccugggcucugaaccug

SEQ ID NO: 425622 - RNA, 18 nt, Human
gagcugggcucuauccca

SEQ ID NO: 425623 - RNA, 32 nt, Human
gagcugggcuggggcucagggguccuaacccu

SEQ ID NO: 425624 - RNA, 32 nt, Human
gagcugggcuucuguccuccucugugucccgg

SEQ ID NO: 425625 - RNA, 32 nt, Human
gagcugggcuuggguccagcugcuccagguga

SEQ ID NO: 425626 - RNA, 32 nt, Human
gagcuggggagaggguaggggaaagguuuuuc

SEQ ID NO: 425627 - RNA, 32 nt, Human
gagcuggggagauggaggcugcagugagcuau

SEQ ID NO: 425628 - RNA, 21 nt, Human
gagcuggggagcccgcagcgg

SEQ ID NO: 425629 - RNA, 32 nt, Human
gagcuggggagggagagccaucaccuugauaa

SEQ ID NO: 425630 - RNA, 32 nt, Human
gagcuggggcagaagagggucucacuuuguca

SEQ ID NO: 425631 - RNA, 32 nt, Human
gagcuggggcagcagagcauggaggacucaga

SEQ ID NO: 425632 - RNA, 32 nt, Human
gagcuggggccucugucccugucaugugagga

SEQ ID NO: 425633 - RNA, 32 nt, Human
gagcuggggccuggccuuucugcccauucuca

SEQ ID NO: 425634 - RNA, 18 nt, Human
gagcuggggcucugggaa

SEQ ID NO: 425635 - RNA, 21 nt, Human
gagcuggggcugcuggacguu

SEQ ID NO: 425636 - RNA, 16 nt, Human
gagcuggggcugggag

SEQ ID NO: 425637 - RNA, 32 nt, Human
gagcugggggagaggacucuccccugugagac

SEQ ID NO: 425638 - RNA, 32 nt, Human
gagcugggggcaccagggagaaucagagaugc

SEQ ID NO: 425639 - RNA, 32 nt, Human
gagcugggggcagggcagcacagggaauauuu

SEQ ID NO: 425640 - RNA, 18 nt, Human
gagcugggggcucuggaa

SEQ ID NO: 425641 - RNA, 32 nt, Human
gagcuggggucuagccaggagccccagcacag

SEQ ID NO: 425642 - RNA, 32 nt, Human
gagcugggguguuccuggaagaggucggggag

SEQ ID NO: 425643 - RNA, 32 nt, Human
gagcuggguaauaccuggugucugagugauuc

SEQ ID NO: 425644 - RNA, 32 nt, Human
gagcugggucuagggugcgaagaacugcaaug

SEQ ID NO: 425645 - RNA, 21 nt, Human
gagcugggucuccagguacgu

SEQ ID NO: 425646 - RNA, 32 nt, Human
gagcugggugaauuccagccuggggagaggac

SEQ ID NO: 425647 - RNA, 21 nt, Human
gagcugggugagcggaaaugu

SEQ ID NO: 425648 - RNA, 32 nt, Human
gagcugggugcuggguucacagguguguucag

SEQ ID NO: 425649 - RNA, 32 nt, Human
gagcuggguggccuggcuucaggggaagacag

SEQ ID NO: 425650 - RNA, 32 nt, Human
gagcugggugggcugagaccagcaucccagcu

SEQ ID NO: 425651 - RNA, 20 nt, Human
gagcugguccaggggacuga

SEQ ID NO: 425652 - RNA, 32 nt, Human
gagcuggugagaagaagcgugaagggggaggu

SEQ ID NO: 425653 - RNA, 32 nt, Human
gagcuggugagagagagcaguuaaggcaagca

SEQ ID NO: 425654 - RNA, 32 nt, Human
gagcuggugcacaccuggaggagagugcuggu

SEQ ID NO: 425655 - RNA, 20 nt, Human
gagcuggugcgacggccuga

SEQ ID NO: 425656 - RNA, 32 nt, Human
gagcuggugcuaaaaacccagagcagaagcag

SEQ ID NO: 425657 - RNA, 32 nt, Human
gagcugguggccuucaaccucugccugcaucu

SEQ ID NO: 425658 - RNA, 32 nt, Human
gagcuggugguuugaucauuucugccaugaug

SEQ ID NO: 425659 - RNA, 21 nt, Human
gagcugguuuccuggaauguu

SEQ ID NO: 425660 - RNA, 32 nt, Human
gagcugguuucugcaugugcacaagucuguuu

SEQ ID NO: 425661 - RNA, 22 nt, Human
gagcugguuuuuugaaaagguc

SEQ ID NO: 425662 - RNA, 24 nt, Human
gagcuguaauugcaucacugcacu

SEQ ID NO: 425663 - RNA, 32 nt, Human
gagcuguagccugucgguugccuacucugcug

SEQ ID NO: 425664 - RNA, 32 nt, Human
gagcuguagggggcuggaguggaaguggagag

SEQ ID NO: 425665 - RNA, 32 nt, Human
gagcuguagucauacaaucacauaacuuuuac

SEQ ID NO: 425666 - RNA, 32 nt, Human
gagcuguaguugcccccuaccucucccaccuc

SEQ ID NO: 425667 - RNA, 32 nt, Human
gagcugucacaugacugcauccugccugccag

SEQ ID NO: 425668 - RNA, 32 nt, Human
gagcugucaucacgagugugggagagggagga

SEQ ID NO: 425669 - RNA, 32 nt, Human
gagcuguccaauaacugccuguaacuucaucu

SEQ ID NO: 425670 - RNA, 32 nt, Human
gagcuguccuacagcauucuggaaacuugagg

SEQ ID NO: 425671 - RNA, 32 nt, Human
gagcugucgacaaccgcaucucuucggaacuu

SEQ ID NO: 425672 - RNA, 32 nt, Human
gagcugucuccaggauggugcaggauggcuuu

SEQ ID NO: 425673 - RNA, 22 nt, Human
gagcugucucggucacucagga

SEQ ID NO: 425674 - RNA, 32 nt, Human
gagcugucucuucaucucuccucucucuccug

SEQ ID NO: 425675 - RNA, 32 nt, Human
gagcugucuggccugugauacuugggcuguga

SEQ ID NO: 425676 - RNA, 32 nt, Human
gagcugucugucucuuaccugccuguauuugu

SEQ ID NO: 425677 - RNA, 32 nt, Human
gagcugucuguucacccucccaucccagcuga

SEQ ID NO: 425678 - RNA, 32 nt, Human
gagcugucuuccuguguaccucuagaauccca

SEQ ID NO: 425679 - RNA, 32 nt, Human
gagcugucuugugccaucuguauguucugaca

SEQ ID NO: 425680 - RNA, 32 nt, Human
gagcugugaaguuugguggugucaaguuaugc

SEQ ID NO: 425681 - RNA, 23 nt, Human
gagcugugacugcaccacugcac

SEQ ID NO: 425682 - RNA, 24 nt, Human
gagcugugacugcgccacugcacu

SEQ ID NO: 425683 - RNA, 32 nt, Human
gagcugugagagaccagcacagcagcguccag

SEQ ID NO: 425684 - RNA, 32 nt, Human
gagcugugagauucgcuuuucccuaggcuguu

SEQ ID NO: 425685 - RNA, 32 nt, Human
gagcugugaggagaagucagugaagaacacca

SEQ ID NO: 425686 - RNA, 32 nt, Human
gagcugugaggguggcugcauccugcaaagcc

SEQ ID NO: 425687 - RNA, 24 nt, Human
gagcugugaucacaccacugcacu

SEQ ID NO: 425688 - RNA, 24 nt, Human
gagcugugaucauaccacugcacu

SEQ ID NO: 425689 - RNA, 24 nt, Human
gagcugugaucaugccacugcacu

SEQ ID NO: 425690 - RNA, 24 nt, Human
gagcugugaucgcaccacugcacu

SEQ ID NO: 425691 - RNA, 24 nt, Human
gagcugugaucgcaccacuguacu

SEQ ID NO: 425692 - RNA, 32 nt, Human
gagcugugaucgcaccacuguauuccagccug

SEQ ID NO: 425693 - RNA, 24 nt, Human
gagcugugaucgcgcuacugcacu

SEQ ID NO: 425694 - RNA, 24 nt, Human
gagcugugaucgugccacugcacu

SEQ ID NO: 425695 - RNA, 32 nt, Human
gagcugugaugaagaaaaauacauggccgacu

SEQ ID NO: 425696 - RNA, 24 nt, Human
gagcugugaugacaccacugcacu

SEQ ID NO: 425697 - RNA, 32 nt, Human
gagcugugauucagacccaguucugucagcuc

SEQ ID NO: 425698 - RNA, 24 nt, Human
gagcugugauugagccacugcacu

SEQ ID NO: 425699 - RNA, 24 nt, Human
gagcugugauugcaccacugcacu

SEQ ID NO: 425700 - RNA, 24 nt, Human
gagcugugauugcaccacuguacu

SEQ ID NO: 425701 - RNA, 24 nt, Human
gagcugugauugcacgacugcacu

SEQ ID NO: 425702 - RNA, 32 nt, Human
gagcugugauugccacagugcaagaccccauc

SEQ ID NO: 425703 - RNA, 24 nt, Human
gagcugugauuguaccacugcacu

SEQ ID NO: 425704 - RNA, 24 nt, Human
gagcugugauugugccacugcacu

SEQ ID NO: 425705 - RNA, 32 nt, Human
gagcugugcagacugacucucuucugaagagu

SEQ ID NO: 425706 - RNA, 32 nt, Human
gagcuguggagugcaggccagagcagggugug

SEQ ID NO: 425707 - RNA, 32 nt, Human
gagcuguggcagcggcgaaaggaagcggcuga

SEQ ID NO: 425708 - RNA, 32 nt, Human
gagcuguggcggaggauccaggaagcuacgga

SEQ ID NO: 425709 - RNA, 32 nt, Human
gagcuguggcuacugaaccacagccauccugg

SEQ ID NO: 425710 - RNA, 32 nt, Human
gagcugugguaugggcauaggaaagguggaug

SEQ ID NO: 425711 - RNA, 32 nt, Human
gagcuguggucacaccacuguauuccagccug

SEQ ID NO: 425712 - RNA, 23 nt, Human
gagcuguggugcccgacgguggc

SEQ ID NO: 425713 - RNA, 24 nt, Human
gagcuguguucaugccacugcacu

SEQ ID NO: 425714 - RNA, 32 nt, Human
gagcuguguuguaccacugcacuccagccugg

SEQ ID NO: 425715 - RNA, 24 nt, Human
gagcuguguuugcaucacugcacu

SEQ ID NO: 425716 - RNA, 32 nt, Human
gagcuguucccagggcuggagcagguguaccc

SEQ ID NO: 425717 - RNA, 32 nt, Human
gagcuguuccuauuugcccauccucucccugc

SEQ ID NO: 425718 - RNA, 32 nt, Human
gagcuguuccugcuuugaguuucccuagagcu

SEQ ID NO: 425719 - RNA, 32 nt, Human
gagcuguucuguagccgggaugacagcucucg

SEQ ID NO: 425720 - RNA, 25 nt, Human
gagcuguugauugcaccacugcacu

SEQ ID NO: 425721 - RNA, 23 nt, Human
gagcuguuggcuggaggccuccu

SEQ ID NO: 425722 - RNA, 32 nt, Human
gagcuguuguaggagagauugccugagcucaa

SEQ ID NO: 425723 - RNA, 32 nt, Human
gagcuguugucuauagagcaguuuacagacuu

SEQ ID NO: 425724 - RNA, 32 nt, Human
gagcuguuuauggccucagcugccucacuucc

SEQ ID NO: 425725 - RNA, 32 nt, Human
gagcuguuugaggcauuucugcucugagccuu

SEQ ID NO: 425726 - RNA, 18 nt, Human
gagcuguuuguucaauca

SEQ ID NO: 425727 - RNA, 32 nt, Human
gagcuguuuugaaauuguaauucuuuucagcu

SEQ ID NO: 425728 - RNA, 32 nt, Human
gagcuuacagugagcugagaucacacgccacu

SEQ ID NO: 425729 - RNA, 32 nt, Human
gagcuuagaaagcuucuccuccccaugucagu

SEQ ID NO: 425730 - RNA, 32 nt, Human
gagcuuagagagaggugcagaauuccugguuc

SEQ ID NO: 425731 - RNA, 32 nt, Human
gagcuuagccugagagggguucuuggccuccc

SEQ ID NO: 425732 - RNA, 32 nt, Human
gagcuuaggaaacauugaacuggagaacaacg

SEQ ID NO: 425733 - RNA, 32 nt, Human
gagcuuaggaagcaugagggcaacuauaguga

SEQ ID NO: 425734 - RNA, 32 nt, Human
gagcuuaggagguugaggcugcagugagcugu

SEQ ID NO: 425735 - RNA, 32 nt, Human
gagcuuaggaguuugagaccagccugggcaac

SEQ ID NO: 425736 - RNA, 32 nt, Human
gagcuuagggcuuugcauugugucuaauacau

SEQ ID NO: 425737 - RNA, 16 nt, Human
gagcuuaguaacuugu

SEQ ID NO: 425738 - RNA, 20 nt, Human
gagcuuaguaaguggugcua

SEQ ID NO: 425739 - RNA, 21 nt, Human
gagcuuaguauguauuuacug

SEQ ID NO: 425740 - RNA, 32 nt, Human
gagcuuauggguggaugggggugggauggaag

SEQ ID NO: 425741 - RNA, 31 nt, Human
gagcuucaaaaacaugugaggagggaagagu

SEQ ID NO: 425742 - RNA, 32 nt, Human
gagcuucaaagccccaaauuccugggcugggg

SEQ ID NO: 425743 - RNA, 32 nt, Human
gagcuucaacagccuggagacacugccggccu

SEQ ID NO: 425744 - RNA, 32 nt, Human
gagcuucaagacuuugcauuuccuaguauuuc

SEQ ID NO: 425745 - RNA, 32 nt, Human
gagcuucacaucucagguaacuggagaagucu

SEQ ID NO: 425746 - RNA, 32 nt, Human
gagcuucagagggcagcuccagugagugccaa

SEQ ID NO: 425747 - RNA, 20 nt, Human
gagcuucagagguugcccca

SEQ ID NO: 425748 - RNA, 32 nt, Human
gagcuucagcuguggcuccucuugccuacaau

SEQ ID NO: 425749 - RNA, 32 nt, Human
gagcuucagcuuccaggaugcuucucuggaac

SEQ ID NO: 425750 - RNA, 32 nt, Human
gagcuucaggcuugcagagaaauacucacauc

SEQ ID NO: 425751 - RNA, 32 nt, Human
gagcuucagggcaguccuucuggcacugcucc

SEQ ID NO: 425752 - RNA, 32 nt, Human
gagcuuccaacagcugcuuggccccgcagcug

SEQ ID NO: 425753 - RNA, 32 nt, Human
gagcuuccaagaagucagguugccaaaggaag

SEQ ID NO: 425754 - RNA, 32 nt, Human
gagcuuccagaacaaaggagaauggggagccc

SEQ ID NO: 425755 - RNA, 32 nt, Human
gagcuuccaucuuucucauauuuccuaagcaa

SEQ ID NO: 425756 - RNA, 32 nt, Human
gagcuuccccacugccugacccugcucucugg

SEQ ID NO: 425757 - RNA, 32 nt, Human
gagcuuccguccuuccuuccucccucucuccc

SEQ ID NO: 425758 - RNA, 32 nt, Human
gagcuuccuaaagcugacccugggucugguga

SEQ ID NO: 425759 - RNA, 32 nt, Human
gagcuuccuccaggaagucaggauugaacuca

SEQ ID NO: 425760 - RNA, 20 nt, Human
gagcuuccucuccuguccca

SEQ ID NO: 425761 - RNA, 32 nt, Human
gagcuuccugagcuuucuccugucgguuuggu

SEQ ID NO: 425762 - RNA, 32 nt, Human
gagcuuccugcagccuguggauguccugcagc

SEQ ID NO: 425763 - RNA, 32 nt, Human
gagcuuccuggcggcaucucccccucuugccu

SEQ ID NO: 425764 - RNA, 32 nt, Human
gagcuuccuuacugcuccucugggugauccaa

SEQ ID NO: 425765 - RNA, 32 nt, Human
gagcuucgcggugccagccucugcagguccuc

SEQ ID NO: 425766 - RNA, 32 nt, Human
gagcuucuaucuugcugaaauauugcuucaua

SEQ ID NO: 425767 - RNA, 32 nt, Human
gagcuucucacaccuaccccuaccguccagcc

SEQ ID NO: 425768 - RNA, 32 nt, Human
gagcuucuccagccacaugccuaccaugcaga

SEQ ID NO: 425769 - RNA, 32 nt, Human
gagcuucucccaggcacagguguugcaccagg

SEQ ID NO: 425770 - RNA, 32 nt, Human
gagcuucuccgccgauccuccuuuucuagcag

SEQ ID NO: 425771 - RNA, 32 nt, Human
gagcuucuccucagcuccucugagcagccacc

SEQ ID NO: 425772 - RNA, 32 nt, Human
gagcuucuccugcuccucucugccucaucucc

SEQ ID NO: 425773 - RNA, 32 nt, Human
gagcuucucugccuccugauccugucuugcag

SEQ ID NO: 425774 - RNA, 32 nt, Human
gagcuucucugggcugaauguaugucagugcu

SEQ ID NO: 425775 - RNA, 32 nt, Human
gagcuucugaagagcugaacauguggagggag

SEQ ID NO: 425776 - RNA, 32 nt, Human
gagcuucugagggcagcaagcccuguagaucc

SEQ ID NO: 425777 - RNA, 32 nt, Human
gagcuucuuagcaggccuggggcuuccaggga

SEQ ID NO: 425778 - RNA, 32 nt, Human
gagcuucuuuggacaugcccagcuccaaacug

SEQ ID NO: 425779 - RNA, 32 nt, Human
gagcuugaagagagggauucugagggagagcu

SEQ ID NO: 425780 - RNA, 32 nt, Human
gagcuugaagagugaaaacuguugugaaugag

SEQ ID NO: 425781 - RNA, 32 nt, Human
gagcuugaaguccuuuuccccaaaaagaggga

SEQ ID NO: 425782 - RNA, 32 nt, Human
gagcuugaccuccaucuagguuucuuuuaucu

SEQ ID NO: 425783 - RNA, 32 nt, Human
gagcuugagagcccuccucuucuaagcagcau

SEQ ID NO: 425784 - RNA, 32 nt, Human
gagcuugagagguugaagcugcagugagcugu

SEQ ID NO: 425785 - RNA, 32 nt, Human
gagcuugaugugguagaagaaucucacuauau

SEQ ID NO: 425786 - RNA, 32 nt, Human
gagcuugcaccauugcacuccagccugggcga

SEQ ID NO: 425787 - RNA, 32 nt, Human
gagcuugcacuacugcacuccagccuggguga

SEQ ID NO: 425788 - RNA, 32 nt, Human
gagcuugcaggacuggaaguugcucuggguga

SEQ ID NO: 425789 - RNA, 32 nt, Human
gagcuugcagucagccgagaucacgccacugc

SEQ ID NO: 425790 - RNA, 32 nt, Human
gagcuugcagugaaccgagaucgcuccacugc

SEQ ID NO: 425791 - RNA, 32 nt, Human
gagcuugcagugaaccgagaucugccacugca

SEQ ID NO: 425792 - RNA, 32 nt, Human
gagcuugcagugagcagagaucacgccacugc

SEQ ID NO: 425793 - RNA, 32 nt, Human
gagcuugcagugagcagagaucgcgccacugc

SEQ ID NO: 425794 - RNA, 32 nt, Human
gagcuugcagugagcagagauugagccacugc

SEQ ID NO: 425795 - RNA, 32 nt, Human
gagcuugcagugagccaagaccgcaccacugc

SEQ ID NO: 425796 - RNA, 32 nt, Human
gagcuugcagugagccaagauagugccacugc

SEQ ID NO: 425797 - RNA, 32 nt, Human
gagcuugcagugagccaagaucacacgacugc

SEQ ID NO: 425798 - RNA, 32 nt, Human
gagcuugcagugagccaagaucacgccacugc

SEQ ID NO: 425799 - RNA, 32 nt, Human
gagcuugcagugagccaagaucgcaccacugc

SEQ ID NO: 425800 - RNA, 32 nt, Human
gagcuugcagugagccaagaucgcgccacugc

SEQ ID NO: 425801 - RNA, 32 nt, Human
gagcuugcagugagccaagaucgcgccacugu

SEQ ID NO: 425802 - RNA, 32 nt, Human
gagcuugcagugagccaagaucgcgccauugc

SEQ ID NO: 425803 - RNA, 32 nt, Human
gagcuugcagugagccaagaucguaccacugc

SEQ ID NO: 425804 - RNA, 32 nt, Human
gagcuugcagugagccaagaucgugccacugc

SEQ ID NO: 425805 - RNA, 32 nt, Human
gagcuugcagugagccaagauuacgccacugc

SEQ ID NO: 425806 - RNA, 32 nt, Human
gagcuugcagugagccaaggucacaccacugc

SEQ ID NO: 425807 - RNA, 32 nt, Human
gagcuugcagugagccaugaucgcgccacugc

SEQ ID NO: 425808 - RNA, 32 nt, Human
gagcuugcagugagcccagaucaugccacugu

SEQ ID NO: 425809 - RNA, 32 nt, Human
gagcuugcagugagcccagauggcgccacugc

SEQ ID NO: 425810 - RNA, 32 nt, Human
gagcuugcagugagccgaaaucgcgccacugc

SEQ ID NO: 425811 - RNA, 32 nt, Human
gagcuugcagugagccgagaccgugccacugc

SEQ ID NO: 425812 - RNA, 32 nt, Human
gagcuugcagugagccgagauagcgccacugc

SEQ ID NO: 425813 - RNA, 32 nt, Human
gagcuugcagugagccgagauaucgccacugc

SEQ ID NO: 425814 - RNA, 32 nt, Human
gagcuugcagugagccgagaucacaccaccac

SEQ ID NO: 425815 - RNA, 32 nt, Human
gagcuugcagugagccgagaucacaccacugc

SEQ ID NO: 425816 - RNA, 32 nt, Human
gagcuugcagugagccgagaucacacuacugc

SEQ ID NO: 425817 - RNA, 32 nt, Human
gagcuugcagugagccgagaucacgccacugc

SEQ ID NO: 425818 - RNA, 32 nt, Human
gagcuugcagugagccgagaucaggccauugc

SEQ ID NO: 425819 - RNA, 32 nt, Human
gagcuugcagugagccgagaucaugccacacc

SEQ ID NO: 425820 - RNA, 32 nt, Human
gagcuugcagugagccgagaucaugccacugc

SEQ ID NO: 425821 - RNA, 32 nt, Human
gagcuugcagugagccgagaucccgccacugc

SEQ ID NO: 425822 - RNA, 32 nt, Human
gagcuugcagugagccgagaucgcaccacugc

SEQ ID NO: 425823 - RNA, 32 nt, Human
gagcuugcagugagccgagaucgcgccaaugc

SEQ ID NO: 425824 - RNA, 32 nt, Human
gagcuugcagugagccgagaucgcgccaccac

SEQ ID NO: 425825 - RNA, 32 nt, Human
gagcuugcagugagccgagaucgcgccaccgc

SEQ ID NO: 425826 - RNA, 32 nt, Human
gagcuugcagugagccgagaucgcgccacggc

SEQ ID NO: 425827 - RNA, 32 nt, Human
gagcuugcagugagccgagaucgcgccacugc

SEQ ID NO: 425828 - RNA, 32 nt, Human
gagcuugcagugagccgagaucgcgccaucac

SEQ ID NO: 425829 - RNA, 32 nt, Human
gagcuugcagugagccgagaucgugccacugc

SEQ ID NO: 425830 - RNA, 32 nt, Human
gagcuugcagugagccgagaucgugcugcugc

SEQ ID NO: 425831 - RNA, 32 nt, Human
gagcuugcagugagccgagaucgugucacugc

SEQ ID NO: 425832 - RNA, 32 nt, Human
gagcuugcagugagccgagauggagccacugc

SEQ ID NO: 425833 - RNA, 32 nt, Human
gagcuugcagugagccgagauggcgccacugc

SEQ ID NO: 425834 - RNA, 32 nt, Human
gagcuugcagugagccgagauggcgccauugc

SEQ ID NO: 425835 - RNA, 32 nt, Human
gagcuugcagugagccgagauggugccacugc

SEQ ID NO: 425836 - RNA, 32 nt, Human
gagcuugcagugagccgagauugcgccacugc

SEQ ID NO: 425837 - RNA, 32 nt, Human
gagcuugcagugagccgagauugugccacugc

SEQ ID NO: 425838 - RNA, 32 nt, Human
gagcuugcagugagccgaggucgugccacugc

SEQ ID NO: 425839 - RNA, 32 nt, Human
gagcuugcagugagccuagauagcgccacugc

SEQ ID NO: 425840 - RNA, 32 nt, Human
gagcuugcagugagccuagaucgcgucacugc

SEQ ID NO: 425841 - RNA, 32 nt, Human
gagcuugcagugagccuugaucacgccacugc

SEQ ID NO: 425842 - RNA, 32 nt, Human
gagcuugcagugagcggacaucgcgccacugc

SEQ ID NO: 425843 - RNA, 32 nt, Human
gagcuugcagugagcggagaucacgccacagc

SEQ ID NO: 425844 - RNA, 32 nt, Human
gagcuugcagugagcggagaucgcgccacugc

SEQ ID NO: 425845 - RNA, 32 nt, Human
gagcuugcagugagcugaaauggugccacugc

SEQ ID NO: 425846 - RNA, 32 nt, Human
gagcuugcagugagcugagauagcgccauugc

SEQ ID NO: 425847 - RNA, 32 nt, Human
gagcuugcagugagcugagaucacgccacuac

SEQ ID NO: 425848 - RNA, 32 nt, Human
gagcuugcagugagcugagaucacgccacugc

SEQ ID NO: 425849 - RNA, 32 nt, Human
gagcuugcagugagcugagaucacgccauugc

SEQ ID NO: 425850 - RNA, 32 nt, Human
gagcuugcagugagcugagaucaugccaccgc

SEQ ID NO: 425851 - RNA, 32 nt, Human
gagcuugcagugagcugagauccagccacagc

SEQ ID NO: 425852 - RNA, 32 nt, Human
gagcuugcagugagcugagaucccgccacugc

SEQ ID NO: 425853 - RNA, 32 nt, Human
gagcuugcagugagcugagaucgcaccacugc

SEQ ID NO: 425854 - RNA, 32 nt, Human
gagcuugcagugagcugagaucgcaccacugu

SEQ ID NO: 425855 - RNA, 32 nt, Human
gagcuugcagugagcugagaucgcgccacugc

SEQ ID NO: 425856 - RNA, 32 nt, Human
gagcuugcagugagcugagaucgggccacggc

SEQ ID NO: 425857 - RNA, 32 nt, Human
gagcuugcagugagcugagaucgugccacugc

SEQ ID NO: 425858 - RNA, 32 nt, Human
gagcuugcagugagcugagauggcaccacugc

SEQ ID NO: 425859 - RNA, 32 nt, Human
gagcuugcagugagcugagauggcaccacugg

SEQ ID NO: 425860 - RNA, 32 nt, Human
gagcuugcagugagcugagauggcgccacugc

SEQ ID NO: 425861 - RNA, 32 nt, Human
gagcuugcagugagcugagauggugccacugc

SEQ ID NO: 425862 - RNA, 32 nt, Human
gagcuugcagugagcugagauugcgccacugc

SEQ ID NO: 425863 - RNA, 32 nt, Human
gagcuugcagugagcugagauugugccauugc

SEQ ID NO: 425864 - RNA, 32 nt, Human
gagcuugcagugagcugagauuuugcaacugc

SEQ ID NO: 425865 - RNA, 32 nt, Human
gagcuugcagugagcugggauugcaucacugc

SEQ ID NO: 425866 - RNA, 32 nt, Human
gagcuugcagugagucgagaucgcgccacugc

SEQ ID NO: 425867 - RNA, 32 nt, Human
gagcuugcagugaguggagaugcgccacugca

SEQ ID NO: 425868 - RNA, 32 nt, Human
gagcuugcagugauuggagaucgcgccacugc

SEQ ID NO: 425869 - RNA, 17 nt, Human
gagcuugccgagcagca

SEQ ID NO: 425870 - RNA, 32 nt, Human
gagcuugccgcgagggcagcugccucagcggg

SEQ ID NO: 425871 - RNA, 32 nt, Human
gagcuugccugccuggccacagacaguguauc

SEQ ID NO: 425872 - RNA, 32 nt, Human
gagcuugcggugagccaagaucgugccacugc

SEQ ID NO: 425873 - RNA, 32 nt, Human
gagcuugcggugagccgagauugcgcuacugc

SEQ ID NO: 425874 - RNA, 32 nt, Human
gagcuugcucuccacuuccuccgugcaguggc

SEQ ID NO: 425875 - RNA, 32 nt, Human
gagcuugcugaggggugggagagccagcugug

SEQ ID NO: 425876 - RNA, 25 nt, Human
gagcuugcuuuuucucugcugguuu

SEQ ID NO: 425877 - RNA, 32 nt, Human
gagcuuggagcagcacggacagcagcauuguu

SEQ ID NO: 425878 - RNA, 32 nt, Human
gagcuuggcaaaacuguccagcaaaaugaaaa

SEQ ID NO: 425879 - RNA, 32 nt, Human
gagcuuggcagguucuuugucucacugaauuc

SEQ ID NO: 425880 - RNA, 32 nt, Human
gagcuuggcggggcagacucuggguuuccagc

SEQ ID NO: 425881 - RNA, 32 nt, Human
gagcuuggcugcuucuggggccuguguggccc

SEQ ID NO: 425882 - RNA, 32 nt, Human
gagcuugggaaaucaagguugcagugagcuau

SEQ ID NO: 425883 - RNA, 32 nt, Human
gagcuugggcagcaggggcaggagggucaagc

SEQ ID NO: 425884 - RNA, 32 nt, Human
gagcuugggcugggaacgcgccugaugucuaa

SEQ ID NO: 425885 - RNA, 32 nt, Human
gagcuuggugggagccaaggcugagucggaug

SEQ ID NO: 425886 - RNA, 32 nt, Human
gagcuugguguuuugucuuuuucagaaacuau

SEQ ID NO: 425887 - RNA, 32 nt, Human
gagcuuguacuauacaucucccaaagaaaccc

SEQ ID NO: 425888 - RNA, 19 nt, Human
gagcuugucaccuaucuca

SEQ ID NO: 425889 - RNA, 32 nt, Human
gagcuugucauccccagccuggugucccgcag

SEQ ID NO: 425890 - RNA, 32 nt, Human
gagcuuguccccagagaggaggauguggugag

SEQ ID NO: 425891 - RNA, 32 nt, Human
gagcuugucuucaggaaaccagagcguugcuu

SEQ ID NO: 425892 - RNA, 32 nt, Human
gagcuugugacuggacuccagccugggcaaca

SEQ ID NO: 425893 - RNA, 32 nt, Human
gagcuuguggugagccgagaucgcgccacugc

SEQ ID NO: 425894 - RNA, 32 nt, Human
gagcuugugugaaaaucagaccugagauggcu

SEQ ID NO: 425895 - RNA, 32 nt, Human
gagcuuguguguggugucguggucacaucucc

SEQ ID NO: 425896 - RNA, 32 nt, Human
gagcuuguuuucucucaguguguucucagagu

SEQ ID NO: 425897 - RNA, 32 nt, Human
gagcuuuaaaaauuaaaaggagagagauucga

SEQ ID NO: 425898 - RNA, 32 nt, Human
gagcuuuagaagcagccaggucuggugagaaa

SEQ ID NO: 425899 - RNA, 32 nt, Human
gagcuuucaccacuacugauauuugagaauca

SEQ ID NO: 425900 - RNA, 32 nt, Human
gagcuuucacucugcuggcuucucccaggccu

SEQ ID NO: 425901 - RNA, 32 nt, Human
gagcuuucaguuauaaauuugcauccuuuuca

SEQ ID NO: 425902 - RNA, 32 nt, Human
gagcuuucaucuccugaagaaaaaugaaaagc

SEQ ID NO: 425903 - RNA, 20 nt, Human
gagcuuucaugaguuuccca

SEQ ID NO: 425904 - RNA, 32 nt, Human
gagcuuuccagaacaggcagagcucuagagac

SEQ ID NO: 425905 - RNA, 32 nt, Human
gagcuuuccagaaccuucuccauuccagaauc

SEQ ID NO: 425906 - RNA, 32 nt, Human
gagcuuuccagccguguuguagcuaauuagga

SEQ ID NO: 425907 - RNA, 27 nt, Human
gagcuuuccgcgauggccgcucggagg

SEQ ID NO: 425908 - RNA, 19 nt, Human
gagcuuuccucauaucuca

SEQ ID NO: 425909 - RNA, 21 nt, Human
gagcuuuccuguccauuccca

SEQ ID NO: 425910 - RNA, 17 nt, Human
gagcuuucuaaaucuca

SEQ ID NO: 425911 - RNA, 19 nt, Human
gagcuuucuaccgaugcca

SEQ ID NO: 425912 - RNA, 32 nt, Human
gagcuuucuccgcccaccucacugcaucccaa

SEQ ID NO: 425913 - RNA, 32 nt, Human
gagcuuucuccucuggcugaguuugagaagcu

SEQ ID NO: 425914 - RNA, 32 nt, Human
gagcuuucugagcuuucuccugucgguuuggu

SEQ ID NO: 425915 - RNA, 18 nt, Human
gagcuuucugcaccccca

SEQ ID NO: 425916 - RNA, 19 nt, Human
gagcuuucugugcuaccca

SEQ ID NO: 425917 - RNA, 32 nt, Human
gagcuuucuuaguuggugaagacuuaaacauc

SEQ ID NO: 425918 - RNA, 32 nt, Human
gagcuuucuuccacugacauaaaaugccagcu

SEQ ID NO: 425919 - RNA, 18 nt, Human
gagcuuucuuuugaccca

SEQ ID NO: 425920 - RNA, 32 nt, Human
gagcuuugaagugcuggugguccagagggguu

SEQ ID NO: 425921 - RNA, 23 nt, Human
gagcuuugaucacgccacuguac

SEQ ID NO: 425922 - RNA, 32 nt, Human
gagcuuugcugcaugacuucagccuggccucu

SEQ ID NO: 425923 - RNA, 32 nt, Human
gagcuuugcuuuuucucuccugcagcacuuaa

SEQ ID NO: 425924 - RNA, 19 nt, Human
gagcuuuggaagccuguca

SEQ ID NO: 425925 - RNA, 32 nt, Human
gagcuuuggugaggacaagaucgagaugaaag

SEQ ID NO: 425926 - RNA, 32 nt, Human
gagcuuuggugaggacgagaucgagaugaaag

SEQ ID NO: 425927 - RNA, 32 nt, Human
gagcuuuuagugggucacagagcgggaacuac

SEQ ID NO: 425928 - RNA, 18 nt, Human
gagcuuuuaugccuccca

SEQ ID NO: 425929 - RNA, 26 nt, Human
gagcuuuuccacccacuucucuucca

SEQ ID NO: 425930 - RNA, 25 nt, Human
gagcuuuucuaguuggcauccggca

SEQ ID NO: 425931 - RNA, 32 nt, Human
gagcuuuucucuaucuuccgacuuuguuggag

SEQ ID NO: 425932 - RNA, 19 nt, Human
gagcuuuuguacuagccca

SEQ ID NO: 425933 - RNA, 32 nt, Human
gagcuuuuugacaauugaaauuucucagaaua

SEQ ID NO: 425934 - RNA, 32 nt, Human
gaggaaaaaccagcuuaccuggcuaaucaacc

SEQ ID NO: 425935 - RNA, 32 nt, Human
gaggaaaaaugacuugccuucuuggagccuca

SEQ ID NO: 425936 - RNA, 32 nt, Human
gaggaaaacuucuuccuggccugggcuccgug

SEQ ID NO: 425937 - RNA, 18 nt, Human
gaggaaaagaacauucca

SEQ ID NO: 425938 - RNA, 32 nt, Human
gaggaaaagaagagaaaagaagaagaaaggaa

SEQ ID NO: 425939 - RNA, 32 nt, Human
gaggaaaagaagagccuuugcugauaaagagu

SEQ ID NO: 425940 - RNA, 32 nt, Human
gaggaaaagacacaaggaauguuugcauacag

SEQ ID NO: 425941 - RNA, 32 nt, Human
gaggaaaagaggaggagacggaggagaacuga

SEQ ID NO: 425942 - RNA, 32 nt, Human
gaggaaaagcaggugccggugccuguccccgg

SEQ ID NO: 425943 - RNA, 32 nt, Human
gaggaaaagcuuucggacugcugaaggcccag

SEQ ID NO: 425944 - RNA, 32 nt, Human
gaggaaaaggaaaagggaagggagagaaaaag

SEQ ID NO: 425945 - RNA, 31 nt, Human
gaggaaaaggagagagagggggcucugguca

SEQ ID NO: 425946 - RNA, 32 nt, Human
gaggaaaaggagcuaauauaagaaagagcaag

SEQ ID NO: 425947 - RNA, 32 nt, Human
gaggaaaaggaguucuggagaggcgccgccau

SEQ ID NO: 425948 - RNA, 19 nt, Human
gaggaaaagggaaggggga

SEQ ID NO: 425949 - RNA, 32 nt, Human
gaggaaacaagccccugucccacgccgucugc

SEQ ID NO: 425950 - RNA, 21 nt, Human
gaggaaacacuaugauaggau

SEQ ID NO: 425951 - RNA, 32 nt, Human
gaggaaacaggcugagagaagaaaaaugacug

SEQ ID NO: 425952 - RNA, 32 nt, Human
gaggaaacaguacagggucugaguucugaaug

SEQ ID NO: 425953 - RNA, 32 nt, Human
gaggaaaccagcuccagauggguuuucucugg

SEQ ID NO: 425954 - RNA, 31 nt, Human
gaggaaacccccugccuucuggccccaucua

SEQ ID NO: 425955 - RNA, 32 nt, Human
gaggaaacccccuugggugccccacacagggc

SEQ ID NO: 425956 - RNA, 32 nt, Human
gaggaaacugagacccagaaagguggaagcac

SEQ ID NO: 425957 - RNA, 18 nt, Human
gaggaaacugagcauuuc

SEQ ID NO: 425958 - RNA, 32 nt, Human
gaggaaacugaggucuagagaggucaagauua

SEQ ID NO: 425959 - RNA, 32 nt, Human
gaggaaacugaggucuggaggggugagcggaa

SEQ ID NO: 425960 - RNA, 32 nt, Human
gaggaaacugaggugcaaagggguugaggaau

SEQ ID NO: 425961 - RNA, 19 nt, Human
gaggaaacuuugauaggau

SEQ ID NO: 425962 - RNA, 32 nt, Human
gaggaaagaaaccagaguuucucuccaacucc

SEQ ID NO: 425963 - RNA, 32 nt, Human
gaggaaagaggaaagacacagagagacgggag

SEQ ID NO: 425964 - RNA, 21 nt, Human
gaggaaagaggcgggggcggg

SEQ ID NO: 425965 - RNA, 32 nt, Human
gaggaaagcacugcaggagcaggcuggcacag

SEQ ID NO: 425966 - RNA, 32 nt, Human
gaggaaagcuccggaagaaggagaaacauugc

SEQ ID NO: 425967 - RNA, 32 nt, Human
gaggaaagcugcauuugaaccaaaacuugcca

SEQ ID NO: 425968 - RNA, 32 nt, Human
gaggaaagcuggaaguccuggagggacagggu

SEQ ID NO: 425969 - RNA, 32 nt, Human
gaggaaaggacaccugucaaugcuggaguuag

SEQ ID NO: 425970 - RNA, 19 nt, Human
gaggaaaggauaucacaga

SEQ ID NO: 425971 - RNA, 19 nt, Human
gaggaaagggaaggaggag

SEQ ID NO: 425972 - RNA, 32 nt, Human
gaggaaagggagcaggcgcagggggacuggaa

SEQ ID NO: 425973 - RNA, 32 nt, Human
gaggaaagggccugcgcaguccugguccuggc

SEQ ID NO: 425974 - RNA, 32 nt, Human
gaggaaaggggcaucuggucucaggcccgugc

SEQ ID NO: 425975 - RNA, 19 nt, Human
gaggaaaggggccuggagg

SEQ ID NO: 425976 - RNA, 32 nt, Human
gaggaaagguaucagggauuuuuaaguccguu

SEQ ID NO: 425977 - RNA, 22 nt, Human
gaggaaagugcaccuccucacu

SEQ ID NO: 425978 - RNA, 32 nt, Human
gaggaaaguguggccuggacugagggaggaaa

SEQ ID NO: 425979 - RNA, 32 nt, Human
gaggaaaucaccgaaaacguggcugcuucaag

SEQ ID NO: 425980 - RNA, 19 nt, Human
gaggaaaucacugaggcca

SEQ ID NO: 425981 - RNA, 32 nt, Human
gaggaaaucaguaacaaaaagacaauuaaauc

SEQ ID NO: 425982 - RNA, 19 nt, Human
gaggaaauccagaugagac

SEQ ID NO: 425983 - RNA, 32 nt, Human
gaggaaauccaggaggcagaagugaggacccu

SEQ ID NO: 425984 - RNA, 32 nt, Human
gaggaaaucucucauuuggggcauuugaagga

SEQ ID NO: 425985 - RNA, 32 nt, Human
gaggaaaugagagaggaaugcucuugaaaggu

SEQ ID NO: 425986 - RNA, 32 nt, Human
gaggaaauggcagaagaugagccagaaaaaga

SEQ ID NO: 425987 - RNA, 23 nt, Human
gaggaaaugucacaggggcuaug

SEQ ID NO: 425988 - RNA, 23 nt, Human
gaggaaaugugacgacagaagca

SEQ ID NO: 425989 - RNA, 32 nt, Human
gaggaaauguggcugauuuucuuaauuauaau

SEQ ID NO: 425990 - RNA, 32 nt, Human
gaggaacaaagagauugugguggugcuaaagg

SEQ ID NO: 425991 - RNA, 32 nt, Human
gaggaacaacuucaucuucaacuuuuuauuuc

SEQ ID NO: 425992 - RNA, 32 nt, Human
gaggaacaagaacccaggcugaucccagacau

SEQ ID NO: 425993 - RNA, 32 nt, Human
gaggaacaaucaguaaaucagauucuguccuc

SEQ ID NO: 425994 - RNA, 32 nt, Human
gaggaacacaaagaagcuuagaagagggucca

SEQ ID NO: 425995 - RNA, 32 nt, Human
gaggaacacagcaacggaaauccauccacaaa

SEQ ID NO: 425996 - RNA, 31 nt, Human
gaggaacacgcuuucuuuacaucacuagugu

SEQ ID NO: 425997 - RNA, 32 nt, Human
gaggaacacugcacucuuaagcuuccgccguc

SEQ ID NO: 425998 - RNA, 32 nt, Human
gaggaacagcagcagaggcagcaggagcagga

SEQ ID NO: 425999 - RNA, 32 nt, Human
gaggaacauucaacacccccaucucuaggaca

SEQ ID NO: 426000 - RNA, 21 nt, Human
gaggaacauuguagcauuuca

SEQ ID NO: 426001 - RNA, 32 nt, Human
gaggaaccaacugcuccaccuucuagggaccc

SEQ ID NO: 426002 - RNA, 32 nt, Human
gaggaaccacugcaccaccgagagaggcuggg

SEQ ID NO: 426003 - RNA, 32 nt, Human
gaggaaccagaagaaagagaaacucgcgacaa

SEQ ID NO: 426004 - RNA, 32 nt, Human
gaggaaccagaccucaucagcccaacaucaaa

SEQ ID NO: 426005 - RNA, 32 nt, Human
gaggaaccagaggcacuuccaccuuggcuggg

SEQ ID NO: 426006 - RNA, 32 nt, Human
gaggaaccagaggggagagacagagcagcaag

SEQ ID NO: 426007 - RNA, 32 nt, Human
gaggaacccuacccugaauccugcacuuuaga

SEQ ID NO: 426008 - RNA, 22 nt, Human
gaggaaccggcgcccccggcgg

SEQ ID NO: 426009 - RNA, 25 nt, Human
gaggaaccuccuuccaggccuggga

SEQ ID NO: 426010 - RNA, 32 nt, Human
gaggaaccugggucccuguccugcccugcucc

SEQ ID NO: 426011 - RNA, 19 nt, Human
gaggaacgagagcauucca

SEQ ID NO: 426012 - RNA, 32 nt, Human
gaggaacggaagaacggagggagcuacgaccu

SEQ ID NO: 426013 - RNA, 32 nt, Human
gaggaacggaagggagcccugcuggagcugcu

SEQ ID NO: 426014 - RNA, 32 nt, Human
gaggaacgggagcugcaggagguggagaggua

SEQ ID NO: 426015 - RNA, 25 nt, Human
gaggaacgggcagccugggccuggg

SEQ ID NO: 426016 - RNA, 32 nt, Human
gaggaacggggguuacgggcagaggagaaagc

SEQ ID NO: 426017 - RNA, 21 nt, Human
gaggaacguggaacaggagca

SEQ ID NO: 426018 - RNA, 32 nt, Human
gaggaacuaacaacuccagacgcaccaccuuu

SEQ ID NO: 426019 - RNA, 31 nt, Human
gaggaacucaauaaagugcuuugaaaaugcu

SEQ ID NO: 426020 - RNA, 32 nt, Human
gaggaacucugccucucugcuucuucaucuuc

SEQ ID NO: 426021 - RNA, 32 nt, Human
gaggaacucuucugcacucugagcuggccagc

SEQ ID NO: 426022 - RNA, 32 nt, Human
gaggaacugcucccaccucuccuucucuuucc

SEQ ID NO: 426023 - RNA, 32 nt, Human
gaggaacuucaaaacauacuccugcuugggcc

SEQ ID NO: 426024 - RNA, 32 nt, Human
gaggaacuugcugcugugccugcgucgcggcg

SEQ ID NO: 426025 - RNA, 32 nt, Human
gaggaagaaaaacaggccgagugaaggugcug

SEQ ID NO: 426026 - RNA, 32 nt, Human
gaggaagaaacacugaaccagauggaauggcc

SEQ ID NO: 426027 - RNA, 32 nt, Human
gaggaagaaaggagagaggggagccaggggag

SEQ ID NO: 426028 - RNA, 32 nt, Human
gaggaagaaagggagagagaagaaaagaaaaa

SEQ ID NO: 426029 - RNA, 32 nt, Human
gaggaagaaagggagagagggccaggcagucg

SEQ ID NO: 426030 - RNA, 32 nt, Human
gaggaagaagaaaaagaggaagaagaagaagg

SEQ ID NO: 426031 - RNA, 20 nt, Human
gaggaagaagaagagacaga

SEQ ID NO: 426032 - RNA, 32 nt, Human
gaggaagaagaggaggaggagaaagaagcagc

SEQ ID NO: 426033 - RNA, 32 nt, Human
gaggaagaagaggaggaggaggaagaggagga

SEQ ID NO: 426034 - RNA, 32 nt, Human
gaggaagaagaggaggaggaggagaugguggc

SEQ ID NO: 426035 - RNA, 32 nt, Human
gaggaagaagaggaggaggaggaggaggagga

SEQ ID NO: 426036 - RNA, 32 nt, Human
gaggaagaaggcagugucccuuuugcuagagc

SEQ ID NO: 426037 - RNA, 18 nt, Human
gaggaagaagggagcggg

SEQ ID NO: 426038 - RNA, 31 nt, Human
gaggaagacaacacaacacaggaggggauaa

SEQ ID NO: 426039 - RNA, 32 nt, Human
gaggaagacagagagaaacugaguuccugaca

SEQ ID NO: 426040 - RNA, 32 nt, Human
gaggaagacagauauugacauuucucagcacu

SEQ ID NO: 426041 - RNA, 32 nt, Human
gaggaagacagcuuuuaacacaguucccugcc

SEQ ID NO: 426042 - RNA, 32 nt, Human
gaggaagacagugggagucaucaggagaggag

SEQ ID NO: 426043 - RNA, 32 nt, Human
gaggaagacaguuguguuuucucuuuaaaccu

SEQ ID NO: 426044 - RNA, 32 nt, Human
gaggaagaccuccagcauuggucauaaccuuc

SEQ ID NO: 426045 - RNA, 32 nt, Human
gaggaagacgagacaggacgaggcagaaaagc

SEQ ID NO: 426046 - RNA, 17 nt, Human
gaggaagacucaguaaa

SEQ ID NO: 426047 - RNA, 32 nt, Human
gaggaagacugcgcagugccaccccgcagccc

SEQ ID NO: 426048 - RNA, 32 nt, Human
gaggaagacuucagaauugggaacuaaaccau

SEQ ID NO: 426049 - RNA, 32 nt, Human
gaggaagagaaaagguaccugaggaugcagaa

SEQ ID NO: 426050 - RNA, 32 nt, Human
gaggaagagaaagaggaggagaauuaagaaga

SEQ ID NO: 426051 - RNA, 32 nt, Human
gaggaagagaagcagcagcugaggagacaggu

SEQ ID NO: 426052 - RNA, 32 nt, Human
gaggaagagaagcaggagagagaaagccacag

SEQ ID NO: 426053 - RNA, 32 nt, Human
gaggaagagacccaagaggcccagggaauccu

SEQ ID NO: 426054 - RNA, 32 nt, Human
gaggaagagagggaggagggguaggacugcag

SEQ ID NO: 426055 - RNA, 32 nt, Human
gaggaagagagggaggcacguaggaacaagca

SEQ ID NO: 426056 - RNA, 32 nt, Human
gaggaagagagggagggaggcgggaggagcgc

SEQ ID NO: 426057 - RNA, 32 nt, Human
gaggaagagauagaggaggaggagggggagga

SEQ ID NO: 426058 - RNA, 32 nt, Human
gaggaagagcauccccuuccuccuuucccugg

SEQ ID NO: 426059 - RNA, 32 nt, Human
gaggaagaggaaaggaaggaaagccaggggca

SEQ ID NO: 426060 - RNA, 32 nt, Human
gaggaagaggaagaggaggaggaggagaccgg

SEQ ID NO: 426061 - RNA, 32 nt, Human
gaggaagaggagaaagccagagagucacucuu

SEQ ID NO: 426062 - RNA, 32 nt, Human
gaggaagaggagagagaagagauggacagacc

SEQ ID NO: 426063 - RNA, 32 nt, Human
gaggaagaggaggaggaggagaccggcagcaa

SEQ ID NO: 426064 - RNA, 32 nt, Human
gaggaagaggaggaggaggaggaggaagcuga

SEQ ID NO: 426065 - RNA, 32 nt, Human
gaggaagaggaggaggaggaggaggcuggguu

SEQ ID NO: 426066 - RNA, 19 nt, Human
gaggaagaggcaaggggag

SEQ ID NO: 426067 - RNA, 19 nt, Human
gaggaagaggccugcucca

SEQ ID NO: 426068 - RNA, 32 nt, Human
gaggaagaggcugcucugggagcuacugaugc

SEQ ID NO: 426069 - RNA, 32 nt, Human
gaggaagagggcaguggggaaggggccucggg

SEQ ID NO: 426070 - RNA, 19 nt, Human
gaggaagagggcauggcgg

SEQ ID NO: 426071 - RNA, 32 nt, Human
gaggaagagggcccugagcuggcuccagaagc

SEQ ID NO: 426072 - RNA, 32 nt, Human
gaggaagaggggaaggaggaggaagaagugua

SEQ ID NO: 426073 - RNA, 32 nt, Human
gaggaagagguggaggaggaggaggaagaggu

SEQ ID NO: 426074 - RNA, 32 nt, Human
gaggaagagguggaggaggaggaggaggaggu

SEQ ID NO: 426075 - RNA, 32 nt, Human
gaggaagaucaggaggaggaggaagaagagga

SEQ ID NO: 426076 - RNA, 32 nt, Human
gaggaagaugacgaguaacuccccucagggau

SEQ ID NO: 426077 - RNA, 32 nt, Human
gaggaagaugacgaguaacuccccucggggau

SEQ ID NO: 426078 - RNA, 32 nt, Human
gaggaagauucccaucucuacaaucuuugagu

SEQ ID NO: 426079 - RNA, 32 nt, Human
gaggaagauugcaggggcgggaagaaacuauu

SEQ ID NO: 426080 - RNA, 32 nt, Human
gaggaagcacacuggguaacaaugaacaguga

SEQ ID NO: 426081 - RNA, 32 nt, Human
gaggaagcacagagcugggcauaugcugcuug

SEQ ID NO: 426082 - RNA, 32 nt, Human
gaggaagcacagaucucuagagcuguccuguc

SEQ ID NO: 426083 - RNA, 22 nt, Human
gaggaagcacauuuugaaccug

SEQ ID NO: 426084 - RNA, 22 nt, Human
gaggaagcaccuuggacauucu

SEQ ID NO: 426085 - RNA, 32 nt, Human
gaggaagcagaagagcaguauguggaucuuuc

SEQ ID NO: 426086 - RNA, 32 nt, Human
gaggaagcaguuuaaauagcccuguucucauu

SEQ ID NO: 426087 - RNA, 24 nt, Human
gaggaagcauauguggaaggagca

SEQ ID NO: 426088 - RNA, 32 nt, Human
gaggcugcagugagcccagaucacgccacugc

SEQ ID NO: 426089 - RNA, 32 nt, Human
gaggcugcagugagcccagaucgaaccauugu

SEQ ID NO: 426090 - RNA, 32 nt, Human
gaggcugcagugagcccagaucgagccacugc

SEQ ID NO: 426091 - RNA, 32 nt, Human
gaggcugcagugagcccugauugcaccacugg

SEQ ID NO: 426092 - RNA, 32 nt, Human
gaggcugcagugagcccugauugugccagugc

SEQ ID NO: 426093 - RNA, 32 nt, Human
gaggcugcagugagccgagaucacaccacugc

SEQ ID NO: 426094 - RNA, 32 nt, Human
gaggcugcagugagccgagaucacaccacugu

SEQ ID NO: 426095 - RNA, 32 nt, Human
gaggcugcagugagccgagaucaugccacugc

SEQ ID NO: 426096 - RNA, 32 nt, Human
gaggcugcagugagccgagaucaugccauuac

SEQ ID NO: 426097 - RNA, 32 nt, Human
gaggcugcagugagccgagaucgcaccacugc

SEQ ID NO: 426098 - RNA, 32 nt, Human
gaggcugcagugagccgagaucgcgccacuac

SEQ ID NO: 426099 - RNA, 32 nt, Human
gaggcugcagugagccgagaucgcgccacugc

SEQ ID NO: 426100 - RNA, 32 nt, Human
gaggcugcagugagccgagaucgugccaccua

SEQ ID NO: 426101 - RNA, 32 nt, Human
gaggcugcagugagccgagaucgugccacugc

SEQ ID NO: 426102 - RNA, 32 nt, Human
gaggcugcagugagccgagauugcgccacugc

SEQ ID NO: 426103 - RNA, 32 nt, Human
gaggcugcagugagccgagauugugccacugc

SEQ ID NO: 426104 - RNA, 32 nt, Human
gaggcugcagugagccgggaucgcaccacugc

SEQ ID NO: 426105 - RNA, 32 nt, Human
gaggcugcagugagccgggauugcaccacugc

SEQ ID NO: 426106 - RNA, 32 nt, Human
gaggcugcagugagccgucaucacaccaguac

SEQ ID NO: 426107 - RNA, 32 nt, Human
gaggcugcagugagccgugaucaugccacugc

SEQ ID NO: 426108 - RNA, 32 nt, Human
gaggcugcagugagccgugauggugccacugc

SEQ ID NO: 426109 - RNA, 32 nt, Human
gaggcugcagugagccgugauuucaccaccac

SEQ ID NO: 426110 - RNA, 32 nt, Human
gaggcugcagugagccuagguggugccacugc

SEQ ID NO: 426111 - RNA, 32 nt, Human
gaggcugcagugagcuaagauugcaccacugc

SEQ ID NO: 426112 - RNA, 18 nt, Human
gaggcugcagugagcuau

SEQ ID NO: 426113 - RNA, 32 nt, Human
gaggcugcagugagcuauaaucacgccacugc

SEQ ID NO: 426114 - RNA, 32 nt, Human
gaggcugcagugagcuauaaucgcgccacuca

SEQ ID NO: 426115 - RNA, 32 nt, Human
gaggcugcagugagcuaugaccauaccagugc

SEQ ID NO: 426116 - RNA, 32 nt, Human
gaggcugcagugagcuaugacugugccacugc

SEQ ID NO: 426117 - RNA, 32 nt, Human
gaggcugcagugagcuaugaucacaccaccac

SEQ ID NO: 426118 - RNA, 32 nt, Human
gaggcugcagugagcuaugaucacaccacugu

SEQ ID NO: 426119 - RNA, 32 nt, Human
gaggcugcagugagcuaugaucacacugcugu

SEQ ID NO: 426120 - RNA, 32 nt, Human
gaggcugcagugagcuaugaucacgccacugc

SEQ ID NO: 426121 - RNA, 32 nt, Human
gaggcugcagugagcuaugaucgcaccacugc

SEQ ID NO: 426122 - RNA, 32 nt, Human
gaggcugcagugagcuaugaucgcaucagucc

SEQ ID NO: 426123 - RNA, 32 nt, Human
gaggcugcagugagcuaugaucucaccacuac

SEQ ID NO: 426124 - RNA, 32 nt, Human
gaggcugcagugagcuaugauuaugccaccgc

SEQ ID NO: 426125 - RNA, 32 nt, Human
gaggcugcagugagcuaugauuaugccccugc

SEQ ID NO: 426126 - RNA, 32 nt, Human
gaggcugcagugagcuaugauuccaccauugc

SEQ ID NO: 426127 - RNA, 32 nt, Human
gaggcugcagugagcuaugauugcacagcugc

SEQ ID NO: 426128 - RNA, 32 nt, Human
gaggcugcagugagcuaugauugcaccacugc

SEQ ID NO: 426129 - RNA, 32 nt, Human
gaggcugcagugagcuaugauugugccacugc

SEQ ID NO: 426130 - RNA, 32 nt, Human
gaggcugcagugagcuaugauugugccacugu

SEQ ID NO: 426131 - RNA, 32 nt, Human
gaggcugcagugagcuaugauugugccacuuc

SEQ ID NO: 426132 - RNA, 32 nt, Human
gaggcugcagugagcuauguucaugacacugc

SEQ ID NO: 426133 - RNA, 32 nt, Human
gaggcugcagugagcuauuaucacaccauugc

SEQ ID NO: 426134 - RNA, 32 nt, Human
gaggcugcagugagcugagaucacgccacugc

SEQ ID NO: 426135 - RNA, 32 nt, Human
gaggcugcagugagcugagaucacgccauugc

SEQ ID NO: 426136 - RNA, 32 nt, Human
gaggcugcagugagcugagaucgcaacacugc

SEQ ID NO: 426137 - RNA, 32 nt, Human
gaggcugcagugagcugagaucgcgccacugc

SEQ ID NO: 426138 - RNA, 32 nt, Human
gaggcugcagugagcugagaugguaccacugc

SEQ ID NO: 426139 - RNA, 32 nt, Human
gaggcugcagugagcugagauugugccacugc

SEQ ID NO: 426140 - RNA, 32 nt, Human
gaggcugcagugagcugagauugugccacuuc

SEQ ID NO: 426141 - RNA, 32 nt, Human
gaggcugcagugagcugggaucacaccacugc

SEQ ID NO: 426142 - RNA, 32 nt, Human
gaggcugcagugagcugggaucguaccacugc

SEQ ID NO: 426143 - RNA, 32 nt, Human
gaggcugcagugagcugggauuacaccauugc

SEQ ID NO: 426144 - RNA, 18 nt, Human
gaggcugcagugagcugu

SEQ ID NO: 426145 - RNA, 32 nt, Human
gaggcugcagugagcugugacugcgccacugc

SEQ ID NO: 426146 - RNA, 32 nt, Human
gaggcugcagugagcugugauagcaccacugc

SEQ ID NO: 426147 - RNA, 32 nt, Human
gaggcugcagugagcugugaucaugccaccgc

SEQ ID NO: 426148 - RNA, 32 nt, Human
gaggcugcagugagcugugauccgccauuaca

SEQ ID NO: 426149 - RNA, 32 nt, Human
gaggcugcagugagcugugaucgcaccacugu

SEQ ID NO: 426150 - RNA, 32 nt, Human
gaggcugcagugagcugugaucgugccacuga

SEQ ID NO: 426151 - RNA, 32 nt, Human
gaggcugcagugagcugugauuaccucacugc

SEQ ID NO: 426152 - RNA, 32 nt, Human
gaggcugcagugagcugugauuaugccauugc

SEQ ID NO: 426153 - RNA, 32 nt, Human
gaggcugcagugagcugugauugcaccacugc

SEQ ID NO: 426154 - RNA, 32 nt, Human
gaggcugcagugagcugugauugugccacugc

SEQ ID NO: 426155 - RNA, 32 nt, Human
gaggcugcagugagcugugauugugccacugu

SEQ ID NO: 426156 - RNA, 32 nt, Human
gaggcugcagugagcugugcucccaccacugc

SEQ ID NO: 426157 - RNA, 32 nt, Human
gaggcugcagugagcuguguucacaccacugc

SEQ ID NO: 426158 - RNA, 32 nt, Human
gaggcugcagugagcuguguuguaccacugca

SEQ ID NO: 426159 - RNA, 32 nt, Human
gaggcugcagugagcuguguuucgccacugca

SEQ ID NO: 426160 - RNA, 32 nt, Human
gaggcugcagugagguaugaucgcgccacugc

SEQ ID NO: 426161 - RNA, 32 nt, Human
gaggcugcagugaggugugauugcgccacugc

SEQ ID NO: 426162 - RNA, 32 nt, Human
gaggcugcagugagucaugauugcgccacugc

SEQ ID NO: 426163 - RNA, 32 nt, Human
gaggcugcagugagucaugauuguaugacugc

SEQ ID NO: 426164 - RNA, 32 nt, Human
gaggcugcagugagucgagaucgugccacugc

SEQ ID NO: 426165 - RNA, 32 nt, Human
gaggcugcagugaguuaagauugugccacugc

SEQ ID NO: 426166 - RNA, 18 nt, Human
gaggcugcagugaguuau

SEQ ID NO: 426167 - RNA, 32 nt, Human
gaggcugcagugaguuaugacagcaccacugc

SEQ ID NO: 426168 - RNA, 32 nt, Human
gaggcugcagugaguuaugauggcacugcugc

SEQ ID NO: 426169 - RNA, 32 nt, Human
gaggcugcagugaguuauggccucugcacucc

SEQ ID NO: 426170 - RNA, 32 nt, Human
gaggcugcagugaguucuaauugcgccacugc

SEQ ID NO: 426171 - RNA, 32 nt, Human
gaggcugcagugaguugugaucgugucagugc

SEQ ID NO: 426172 - RNA, 32 nt, Human
gaggcugcagugaguugugauugcaccacugc

SEQ ID NO: 426173 - RNA, 32 nt, Human
gaggcugcagugauugugauucucauccuggu

SEQ ID NO: 426174 - RNA, 32 nt, Human
gaggcugcaguggcuaugaucaugccacugca

SEQ ID NO: 426175 - RNA, 32 nt, Human
gaggcugcagugggccgggaucguacuacugc

SEQ ID NO: 426176 - RNA, 18 nt, Human
gaggcugcagugggcuau

SEQ ID NO: 426177 - RNA, 32 nt, Human
gaggcugcagugggcuaugauugcaccacugc

SEQ ID NO: 426178 - RNA, 32 nt, Human
gaggcugcaguggugucguggguguuacgugc

SEQ ID NO: 426179 - RNA, 32 nt, Human
gaggcugcauuuccagcuggacguaccucagu

SEQ ID NO: 426180 - RNA, 32 nt, Human
gaggcugccaugagccaugaucgugccacuac

SEQ ID NO: 426181 - RNA, 32 nt, Human
gaggcugcccagucucugcccugcugcccacc

SEQ ID NO: 426182 - RNA, 18 nt, Human
gaggcugcccuaguggcc

SEQ ID NO: 426183 - RNA, 32 nt, Human
gaggcugcccugacccuuccacagucauuucu

SEQ ID NO: 426184 - RNA, 32 nt, Human
gaggcugcccugcgauggccugggugggagag

SEQ ID NO: 426185 - RNA, 23 nt, Human
gaggcugccgacuuuggacucca

SEQ ID NO: 426186 - RNA, 19 nt, Human
gaggcugccgccuccgcca

SEQ ID NO: 426187 - RNA, 32 nt, Human
gaggcugccguccgucucuccugcugcgcucg

SEQ ID NO: 426188 - RNA, 22 nt, Human
gaggcugccguccucuccuccu

SEQ ID NO: 426189 - RNA, 32 nt, Human
gaggcugccucgaggaugaagugcaaacccaa

SEQ ID NO: 426190 - RNA, 32 nt, Human
gaggcugccucgaggucacugccuuccggagc

SEQ ID NO: 426191 - RNA, 32 nt, Human
gaggcugccugaucgagcuggcacaggagcuc

SEQ ID NO: 426192 - RNA, 32 nt, Human
gaggcugccugauggugccugugcuuggggga

SEQ ID NO: 426193 - RNA, 32 nt, Human
gaggcugcgcccaggauuugucgggagccacg

SEQ ID NO: 426194 - RNA, 22 nt, Human
gaggcugcgccccuccaguucu

SEQ ID NO: 426195 - RNA, 32 nt, Human
gaggcugcgcuggagcccgcugggcagcgccg

SEQ ID NO: 426196 - RNA, 32 nt, Human
gaggcugcggcggccucggagcgcggcggagc

SEQ ID NO: 426197 - RNA, 27 nt, Human
gaggcugcggcgggagaaucgcuugaa

SEQ ID NO: 426198 - RNA, 21 nt, Human
gaggcugcggcggguggauca

SEQ ID NO: 426199 - RNA, 32 nt, Human
gaggcugcggugagccaagaucaugccauugc

SEQ ID NO: 426200 - RNA, 32 nt, Human
gaggcugcggugagccauaagcaugccacuau

SEQ ID NO: 426201 - RNA, 32 nt, Human
gaggcugcggugagccgagaccacaccauugc

SEQ ID NO: 426202 - RNA, 32 nt, Human
gaggcugcggugagccgagauugcgccauugc

SEQ ID NO: 426203 - RNA, 18 nt, Human
gaggcugcggugagcuau

SEQ ID NO: 426204 - RNA, 32 nt, Human
gaggcugcggugagcuaugaucgcgccacugc

SEQ ID NO: 426205 - RNA, 32 nt, Human
gaggcugcgguggaaggaucaccugagcccag

SEQ ID NO: 426206 - RNA, 32 nt, Human
gaggcugcggugucugcugcuauucuccgagc

SEQ ID NO: 426207 - RNA, 32 nt, Human
gaggcugcgguucugcuuccuccuggggcuga

SEQ ID NO: 426208 - RNA, 22 nt, Human
gaggcugcguacaguguuucac

SEQ ID NO: 426209 - RNA, 24 nt, Human
gaggcugcuacagccuugaguucc

SEQ ID NO: 426210 - RNA, 20 nt, Human
gaggcugcucacucuuggca

SEQ ID NO: 426211 - RNA, 32 nt, Human
gaggcugcucugagaaguacacacaggaauac

SEQ ID NO: 426212 - RNA, 22 nt, Human
gaggcugcugccagggcugcug

SEQ ID NO: 426213 - RNA, 32 nt, Human
gaggcugcugccuccuuccugcccauggcacc

SEQ ID NO: 426214 - RNA, 21 nt, Human
gaggcugcugcugggccgcug

SEQ ID NO: 426215 - RNA, 32 nt, Human
gaggcugcuggcagagagagaggacucuggag

SEQ ID NO: 426216 - RNA, 32 nt, Human
gaggcugcugugggauacguccaggagacucu

SEQ ID NO: 426217 - RNA, 32 nt, Human
gaggcugcuguggguuuaacuccuggguuggc

SEQ ID NO: 426218 - RNA, 32 nt, Human
gaggcugcugugguggggauccccaggggcuu

SEQ ID NO: 426219 - RNA, 32 nt, Human
gaggcugcuuaaaccucugucucugacggucc

SEQ ID NO: 426220 - RNA, 19 nt, Human
gaggcugcuuccguuucca

SEQ ID NO: 426221 - RNA, 32 nt, Human
gaggcugcuugugcaaguuucaacuuguccuu

SEQ ID NO: 426222 - RNA, 24 nt, Human
gaggcuggaaaagcaccccaagag

SEQ ID NO: 426223 - RNA, 32 nt, Human
gaggcuggaagaggaagaugccuagcacagac

SEQ ID NO: 426224 - RNA, 21 nt, Human
gaggcuggaagaucacuugaa

SEQ ID NO: 426225 - RNA, 32 nt, Human
gaggcuggacaguaguuuucccuugugacuuc

SEQ ID NO: 426226 - RNA, 32 nt, Human
gaggcuggaccucuucaucacauugcuuacgc

SEQ ID NO: 426227 - RNA, 32 nt, Human
gaggcuggacucggggagagaccccucuccac

SEQ ID NO: 426228 - RNA, 32 nt, Human
gaggcuggagaaagggaaguggaaggcaguga

SEQ ID NO: 426229 - RNA, 32 nt, Human
gaggcuggagaccccaggcucgccaaggcacg

SEQ ID NO: 426230 - RNA, 32 nt, Human
gaggcuggagaccugggcuggggccuuccucc

SEQ ID NO: 426231 - RNA, 22 nt, Human
gaggcuggagcaugcccaggag

SEQ ID NO: 426232 - RNA, 32 nt, Human
gaggcuggagccaagauccugccugauaucca

SEQ ID NO: 426233 - RNA, 18 nt, Human
gaggcuggagcccuggga

SEQ ID NO: 426234 - RNA, 21 nt, Human
gaggcuggaggcagacaggcu

SEQ ID NO: 426235 - RNA, 32 nt, Human
gaggcuggaggcaggccuugcccagagaugcc

SEQ ID NO: 426236 - RNA, 21 nt, Human
gaggcuggaggccaagcagcu

SEQ ID NO: 426237 - RNA, 32 nt, Human
gaggcuggaggggacaggaugggguggcuggg

SEQ ID NO: 426238 - RNA, 32 nt, Human
gaggcuggagguggagauggggucaggaacau

SEQ ID NO: 426239 - RNA, 23 nt, Human
gaggcuggaguaaucagauuacu

SEQ ID NO: 426240 - RNA, 32 nt, Human
gaggcuggaguuggggcagaggagaacuugcu

SEQ ID NO: 426241 - RNA, 25 nt, Human
gaggcuggauaaagccaaaccugcu

SEQ ID NO: 426242 - RNA, 32 nt, Human
gaggcuggauccuagccuuauccucugaucuc

SEQ ID NO: 426243 - RNA, 24 nt, Human
gaggcuggaugcagugguggugag

SEQ ID NO: 426244 - RNA, 32 nt, Human
gaggcuggauucacuacacaagaugaacuuca

SEQ ID NO: 426245 - RNA, 31 nt, Human
gaggcuggcaaugcuguuucacuggaggaca

SEQ ID NO: 426246 - RNA, 22 nt, Human
gaggcuggcagaucacaagguc

SEQ ID NO: 426247 - RNA, 23 nt, Human
gaggcuggcagcccagccaggaa

SEQ ID NO: 426248 - RNA, 32 nt, Human
gaggcuggcaggaguuggcaagagaacccccu

SEQ ID NO: 426249 - RNA, 32 nt, Human
gaggcuggcagugcugauucagccuggccauc

SEQ ID NO: 426250 - RNA, 31 nt, Human
gaggcuggccucucuggcugggugcagugaa

SEQ ID NO: 426251 - RNA, 21 nt, Human
gaggcuggccugaguauucua

SEQ ID NO: 426252 - RNA, 32 nt, Human
gaggcuggccuuucaucucagcaccagggugc

SEQ ID NO: 426253 - RNA, 22 nt, Human
gaggcuggcggaucacgagguc

SEQ ID NO: 426254 - RNA, 21 nt, Human
gaggcuggcggccucgauucc

SEQ ID NO: 426255 - RNA, 20 nt, Human
gaggcuggcuuggcuguucc

SEQ ID NO: 426256 - RNA, 21 nt, Human
gaggcuggcuuguccccuccu

SEQ ID NO: 426257 - RNA, 27 nt, Human
gaggcuggcuuuugugcuuuggguuuc

SEQ ID NO: 426258 - RNA, 21 nt, Human
gaggcugggaaaucguuugaa

SEQ ID NO: 426259 - RNA, 23 nt, Human
gaggcugggacacuaaccaagaa

SEQ ID NO: 426260 - RNA, 24 nt, Human
gaggcugggaccuccgggccagcu

SEQ ID NO: 426261 - RNA, 23 nt, Human
gaggcugggagccuggccaggaa

SEQ ID NO: 426262 - RNA, 32 nt, Human
gaggcugggaggacacgcaaguucagcuccag

SEQ ID NO: 426263 - RNA, 32 nt, Human
gaggcugggaggaucacuugagcccaggaguc

SEQ ID NO: 426264 - RNA, 32 nt, Human
gaggcugggaggcagagguugcagugagcuga

SEQ ID NO: 426265 - RNA, 32 nt, Human
gaggcugggaggcggagguugcagugagcuga

SEQ ID NO: 426266 - RNA, 23 nt, Human
gaggcugggagucccuaccugcu

SEQ ID NO: 426267 - RNA, 23 nt, Human
gaggcugggaguucaaaaccagc

SEQ ID NO: 426268 - RNA, 32 nt, Human
gaggcugggcacagaggucaggaagcaggggu

SEQ ID NO: 426269 - RNA, 32 nt, Human
gaggcugggccaagcccuuaagucaggagcag

SEQ ID NO: 426270 - RNA, 32 nt, Human
gaggcugggccagccucagcucagccuccccc

SEQ ID NO: 426271 - RNA, 32 nt, Human
gaggcugggcuguucccuucugugcucccaca

SEQ ID NO: 426272 - RNA, 27 nt, Human
gaggcuggggcagcagaaucgcuugaa

SEQ ID NO: 426273 - RNA, 27 nt, Human
gaggcuggggcaggagaaucgcuugaa

SEQ ID NO: 426274 - RNA, 32 nt, Human
gaggcuggggcauuggcaagaucacagguuga

SEQ ID NO: 426275 - RNA, 23 nt, Human
gaggcuggggccagaugacagcu

SEQ ID NO: 426276 - RNA, 32 nt, Human
gaggcuggggcugagguccccaugggguuugg

SEQ ID NO: 426277 - RNA, 23 nt, Human
gaggcuggggcugcucccaggaa

SEQ ID NO: 426278 - RNA, 20 nt, Human
gaggcugggggaucaccagc

SEQ ID NO: 426279 - RNA, 32 nt, Human
gaggcugggggucuuguggggagccaggcccc

SEQ ID NO: 426280 - RNA, 32 nt, Human
gaggcugggguccugacacaacaggaguacau

SEQ ID NO: 426281 - RNA, 32 nt, Human
gaggcuggggugagaggugauagaggcagcac

SEQ ID NO: 426282 - RNA, 32 nt, Human
gaggcugggucugagccuugcucgagauuagc

SEQ ID NO: 426283 - RNA, 32 nt, Human
gaggcugggugagcuggggugggaucuucacc

SEQ ID NO: 426284 - RNA, 32 nt, Human
gaggcugggugguugcacaggccaggugcaca

SEQ ID NO: 426285 - RNA, 32 nt, Human
gaggcuggucccauggccuuccucuuccacca

SEQ ID NO: 426286 - RNA, 32 nt, Human
gaggcuggucucaaacuccuaggaucaagcca

SEQ ID NO: 426287 - RNA, 32 nt, Human
gaggcugguggagcagcacacugugugaaccu

SEQ ID NO: 426288 - RNA, 32 nt, Human
gaggcugguggagggugggcugggcaugggau

SEQ ID NO: 426289 - RNA, 22 nt, Human
gaggcugguggaucacaagguc

SEQ ID NO: 426290 - RNA, 22 nt, Human
gaggcugguggaucacgagguc

SEQ ID NO: 426291 - RNA, 21 nt, Human
gaggcugguggaucacuugaa

SEQ ID NO: 426292 - RNA, 22 nt, Human
gaggcugguuucuggaaaucca

SEQ ID NO: 426293 - RNA, 32 nt, Human
gaggcuguacggcuacagccugggcaacaucu

SEQ ID NO: 426294 - RNA, 32 nt, Human
gaggcuguagcccagaggacauauagugauga

SEQ ID NO: 426295 - RNA, 18 nt, Human
gaggcuguaggcugugcc

SEQ ID NO: 426296 - RNA, 32 nt, Human
gaggcuguagugagccaagauagcaccacugc

SEQ ID NO: 426297 - RNA, 32 nt, Human
gaggcuguagugagcuaugauugcagacagag

SEQ ID NO: 426298 - RNA, 32 nt, Human
gaggcuguagugagcugagauggugccacugc

SEQ ID NO: 426299 - RNA, 32 nt, Human
gaggcuguagugagcugugauugccacagugc

SEQ ID NO: 426300 - RNA, 32 nt, Human
gaggcugucacacugugguggaggguccccuc

SEQ ID NO: 426301 - RNA, 32 nt, Human
gaggcugucaccaugccggccugcugcagcug

SEQ ID NO: 426302 - RNA, 32 nt, Human
gaggcuguccuccucacagagagcucagagau

SEQ ID NO: 426303 - RNA, 32 nt, Human
gaggcugucgugagcuaugauuaugccacugc

SEQ ID NO: 426304 - RNA, 32 nt, Human
gaggcugucuccccacagcuuuauccaagccu

SEQ ID NO: 426305 - RNA, 32 nt, Human
gaggcugucugaggaggagcagcgccuggugc

SEQ ID NO: 426306 - RNA, 32 nt, Human
gaggcugugaagccagaggggucgaggaggcu

SEQ ID NO: 426307 - RNA, 32 nt, Human
gaggcugugagcaaaguggccgccggggaacg

SEQ ID NO: 426308 - RNA, 32 nt, Human
gaggcugugccgucccgcugcugcacaggucg

SEQ ID NO: 426309 - RNA, 28 nt, Human
gaggcuguggcaggcgaaaucgcuugaa

SEQ ID NO: 426310 - RNA, 32 nt, Human
gaggcuguggcagguggaucaccugaggucag

SEQ ID NO: 426311 - RNA, 21 nt, Human
gaggcuguggccaggccagcu

SEQ ID NO: 426312 - RNA, 32 nt, Human
gaggcuguggcggacuccuuccaacucacgau

SEQ ID NO: 426313 - RNA, 32 nt, Human
gaggcuguggggcucgcuugcccacaugaccu

SEQ ID NO: 426314 - RNA, 32 nt, Human
gaggcuguggugauuugugauugcgccaccac

SEQ ID NO: 426315 - RNA, 32 nt, Human
gaggcuguucccuguccugccucagugccucc

SEQ ID NO: 426316 - RNA, 32 nt, Human
gaggcuguuccuucaguucuucuccagacugu

SEQ ID NO: 426317 - RNA, 32 nt, Human
gaggcuuacaaaccaacacguuuucugccaug

SEQ ID NO: 426318 - RNA, 32 nt, Human
gaggcuuacaagacuagggucuggaccagaau

SEQ ID NO: 426319 - RNA, 32 nt, Human
gaggcuuaccaugcugcucccuaggagggcca

SEQ ID NO: 426320 - RNA, 32 nt, Human
gaggcuuagagaucuguaauuucucugugaga

SEQ ID NO: 426321 - RNA, 32 nt, Human
gaggcuuaggagagagguuauggguauucaug

SEQ ID NO: 426322 - RNA, 32 nt, Human
gaggcuuaggagagagguuauggguauuggug

SEQ ID NO: 426323 - RNA, 32 nt, Human
gaggcuucacacauuuucccacucuuacaguu

SEQ ID NO: 426324 - RNA, 32 nt, Human
gaggcuucacaguauuucagagaagccaaaga

SEQ ID NO: 426325 - RNA, 32 nt, Human
gaggcuucagaaccagccacacgaagaccaaa

SEQ ID NO: 426326 - RNA, 32 nt, Human
gaggcuucaggggcccccuccccaccaaaggg

SEQ ID NO: 426327 - RNA, 32 nt, Human
gaggcuucagugagcggugauugugccacugc

SEQ ID NO: 426328 - RNA, 32 nt, Human
gaggcuucaucaggcuguggugggcgggggug

SEQ ID NO: 426329 - RNA, 32 nt, Human
gaggcuuccagcugcccaguggcucuuaaaca

SEQ ID NO: 426330 - RNA, 32 nt, Human
gaggcuuccauggggugggggaggccagcuuc

SEQ ID NO: 426331 - RNA, 32 nt, Human
gaggcuuccuucauuuccuccgucaccucaga

SEQ ID NO: 426332 - RNA, 32 nt, Human
gaggcuucgcggaacgcucucggcgccaggac

SEQ ID NO: 426333 - RNA, 32 nt, Human
gaggcuucgugccauguucagccugccccuua

SEQ ID NO: 426334 - RNA, 32 nt, Human
gaggcuucguggacuguguccugguccaugug

SEQ ID NO: 426335 - RNA, 32 nt, Human
gaggcuucucagacuguaagaggccgggaggg

SEQ ID NO: 426336 - RNA, 32 nt, Human
gaggcuucuccaaggaaaaggcagagaccagg

SEQ ID NO: 426337 - RNA, 32 nt, Human
gaggcuugaacccagaccccagcacugugaug

SEQ ID NO: 426338 - RNA, 32 nt, Human
gaggcuugaauccauuuccucucaucucagcc

SEQ ID NO: 426339 - RNA, 32 nt, Human
gaggcuugagccacugcaccuggccucauguc

SEQ ID NO: 426340 - RNA, 32 nt, Human
gaggcuugagcccaggagguggagguugcaau

SEQ ID NO: 426341 - RNA, 32 nt, Human
gaggcuugcuuucucaaaaaguggccaaggau

SEQ ID NO: 426342 - RNA, 32 nt, Human
gaggcuuggaccugggcagcuccugccccuca

SEQ ID NO: 426343 - RNA, 32 nt, Human
gaggcuuggccacaucccucauggccccauuu

SEQ ID NO: 426344 - RNA, 20 nt, Human
gaggcuugggaacagcagca

SEQ ID NO: 426345 - RNA, 31 nt, Human
gaggcuugggaugaagggugggugaaguuga

SEQ ID NO: 426346 - RNA, 32 nt, Human
gaggcuugucaugggucgggggugcccacuca

SEQ ID NO: 426347 - RNA, 32 nt, Human
gaggcuuguggccuggcuguucauggccacug

SEQ ID NO: 426348 - RNA, 32 nt, Human
gaggcuuuaagcuccagcuuuaaggguuguga

SEQ ID NO: 426349 - RNA, 32 nt, Human
gaggcuuuagccccaagaagguucuggaaagc

SEQ ID NO: 426350 - RNA, 32 nt, Human
gaggcuuuaggagaaggaagauccucucucag

SEQ ID NO: 426351 - RNA, 32 nt, Human
gaggcuuuaugaaauaaguuugcauugcacau

SEQ ID NO: 426352 - RNA, 32 nt, Human
gaggcuuuccacccucuuccugaccccuaaag

SEQ ID NO: 426353 - RNA, 32 nt, Human
gaggcuuucucaucuuuuaguucucagaucau

SEQ ID NO: 426354 - RNA, 32 nt, Human
gaggcuuucucccaucaguugucucacacuua

SEQ ID NO: 426355 - RNA, 20 nt, Human
gaggcuuucucugggugcca

SEQ ID NO: 426356 - RNA, 32 nt, Human
gaggcuuugagaaaggaguaggagccuagcau

SEQ ID NO: 426357 - RNA, 32 nt, Human
gaggcuuuuggaacaggagggauaggaggugc

SEQ ID NO: 426358 - RNA, 22 nt, Human
gagggaaaaaacccacagggac

SEQ ID NO: 426359 - RNA, 32 nt, Human
gagggaaaacucagggaagcccaggaggaagu

SEQ ID NO: 426360 - RNA, 32 nt, Human
gagggaaaagagucaggcagagcuguggaucc

SEQ ID NO: 426361 - RNA, 32 nt, Human
gagggaaaaggaaccaagaaguagaaggaguc

SEQ ID NO: 426362 - RNA, 32 nt, Human
gagggaaagaggaggaaggaagaugcgagaag

SEQ ID NO: 426363 - RNA, 31 nt, Human
gagggaaaggagagagaaggaaaggagugag

SEQ ID NO: 426364 - RNA, 32 nt, Human
gagggaaaggaggagggagagagauggagagg

SEQ ID NO: 426365 - RNA, 32 nt, Human
gagggaaagggauaggagaaggauguggacug

SEQ ID NO: 426366 - RNA, 32 nt, Human
gagggaaaggggacaggcauccuagcuaaggg

SEQ ID NO: 426367 - RNA, 32 nt, Human
gagggaaaguauccuccaacaggaugaagcag

SEQ ID NO: 426368 - RNA, 32 nt, Human
gagggaaauggaacucauuuggaacuccccgu

SEQ ID NO: 426369 - RNA, 18 nt, Human
gagggaaauuuauagcac

SEQ ID NO: 426370 - RNA, 32 nt, Human
gagggaacagaaguuaggaggcaacuuuggga

SEQ ID NO: 426371 - RNA, 19 nt, Human
gagggaacagggcauucca

SEQ ID NO: 426372 - RNA, 32 nt, Human
gagggaaccagccugccucccagggcaagagc

SEQ ID NO: 426373 - RNA, 32 nt, Human
gagggaaccagcugggagguccuccgagcugg

SEQ ID NO: 426374 - RNA, 32 nt, Human
gagggaacugaggacuaggggagagggugugu

SEQ ID NO: 426375 - RNA, 32 nt, Human
gagggaacugcacuucggcagaguugaaugaa

SEQ ID NO: 426376 - RNA, 21 nt, Human
gagggaacuggggacaggaau

SEQ ID NO: 426377 - RNA, 22 nt, Human
gagggaagaaacucuucccaga

SEQ ID NO: 426378 - RNA, 32 nt, Human
gagggaagaagaggaagcgggaggagcuuggc

SEQ ID NO: 426379 - RNA, 32 nt, Human
gagggaagaagaggagaggggaggggaccugc

SEQ ID NO: 426380 - RNA, 32 nt, Human
gagggaagaagcaggaggucucagcaugaaac

SEQ ID NO: 426381 - RNA, 32 nt, Human
gagggaagaagcuuugcagcaaccucugugcc

SEQ ID NO: 426382 - RNA, 32 nt, Human
gagggaagaccacccuccugucacccggaccu

SEQ ID NO: 426383 - RNA, 32 nt, Human
gagggaagacuugauccucagccccgagguug

SEQ ID NO: 426384 - RNA, 32 nt, Human
gagggaagagagaagagguaggaagaaaggug

SEQ ID NO: 426385 - RNA, 32 nt, Human
gagggaagagaugggagccagggcacgauaga

SEQ ID NO: 426386 - RNA, 32 nt, Human
gagggaagaggaagcuggaacgaggguuaagg

SEQ ID NO: 426387 - RNA, 32 nt, Human
gagggaagaggaaggaagguggguggggcugg

SEQ ID NO: 426388 - RNA, 32 nt, Human
gagggaagaugagagggggaggugagagcuuc

SEQ ID NO: 426389 - RNA, 32 nt, Human
gagggaagauggcggacgaggagaagcugccg

SEQ ID NO: 426390 - RNA, 32 nt, Human
gagggaagcaggccuugugaguggacacugac

SEQ ID NO: 426391 - RNA, 17 nt, Human
gagggaagcgagccggg

SEQ ID NO: 426392 - RNA, 32 nt, Human
gagggaagcggcuagaggaucggggagaagga

SEQ ID NO: 426393 - RNA, 32 nt, Human
gagggaagcuggaggaggugggggagacagag

SEQ ID NO: 426394 - RNA, 32 nt, Human
gagggaagcugggaaguuaaggcugcaggcuc

SEQ ID NO: 426395 - RNA, 32 nt, Human
gagggaaggaaagagagaaggaaagagagaga

SEQ ID NO: 426396 - RNA, 32 nt, Human
gagggaaggaagcagauucggagggguggaga

SEQ ID NO: 426397 - RNA, 32 nt, Human
gagggaaggaaggaagagagggaggcgggcaa

SEQ ID NO: 426398 - RNA, 32 nt, Human
gagggaaggagaggagaggaacagguuuugau

SEQ ID NO: 426399 - RNA, 32 nt, Human
gagggaaggagagggaggguggguggguggga

SEQ ID NO: 426400 - RNA, 32 nt, Human
gagggaaggagcccggcccugccuugucagcg

SEQ ID NO: 426401 - RNA, 32 nt, Human
gagggaaggaggaggaggaggagcaaaggugu

SEQ ID NO: 426402 - RNA, 32 nt, Human
gagggaaggaggcaggggugcugagaaggcgg

SEQ ID NO: 426403 - RNA, 32 nt, Human
gagggaaggagggagaggaaggcaggggaguu

SEQ ID NO: 426404 - RNA, 24 nt, Human
gagggaaggagggaugccaccaga

SEQ ID NO: 426405 - RNA, 32 nt, Human
gagggaaggcaggaaggaggcagccgaaggcc

SEQ ID NO: 426406 - RNA, 32 nt, Human
gagggaaggcgagacagcagugaacagcuggu

SEQ ID NO: 426407 - RNA, 23 nt, Human
gagggaaggcgggggagggcugg

SEQ ID NO: 426408 - RNA, 32 nt, Human
gagggaaggcuaagcauaggguuccugcagcc

SEQ ID NO: 426409 - RNA, 32 nt, Human
gagggaagggagcaggguggcgguugaggaac

SEQ ID NO: 426410 - RNA, 17 nt, Human
gagggaagggcaccgga

SEQ ID NO: 426411 - RNA, 32 nt, Human
gagggaagggcugggagccaugacauggagaa

SEQ ID NO: 426412 - RNA, 17 nt, Human
gagggaaggucagcaga

SEQ ID NO: 426413 - RNA, 32 nt, Human
gagggaaggugaugacuuaaauggcagggggu

SEQ ID NO: 426414 - RNA, 32 nt, Human
gagggaaguuuccagaaagaagagaggacaca

SEQ ID NO: 426415 - RNA, 32 nt, Human
gagggaauccggggaggaaggaaagagaaaua

SEQ ID NO: 426416 - RNA, 32 nt, Human
gagggaauuucuuuucgcagaagccauuacuc

SEQ ID NO: 426417 - RNA, 17 nt, Human
gagggacaagauaggac

SEQ ID NO: 426418 - RNA, 32 nt, Human
gagggacaaguggugcccuguccccugcuccc

SEQ ID NO: 426419 - RNA, 31 nt, Human
gagggacaagugugcaugcagauguccucag

SEQ ID NO: 426420 - RNA, 32 nt, Human
gagggacacgcgagaggcaggccaggcugcac

SEQ ID NO: 426421 - RNA, 32 nt, Human
gagggacacuggagggguguguuugcaauuua

SEQ ID NO: 426422 - RNA, 32 nt, Human
gagggacagaguguuccaggaggagguuugag

SEQ ID NO: 426423 - RNA, 32 nt, Human
gagggacagcagauuacugggcccgagacgca

SEQ ID NO: 426424 - RNA, 32 nt, Human
gagggacaggcugaagagagggacaggcacuc

SEQ ID NO: 426425 - RNA, 32 nt, Human
gagggacauggcacuggcugggccucagggga

SEQ ID NO: 426426 - RNA, 32 nt, Human
gagggacauguacugccucucaucuagaauuu

SEQ ID NO: 426427 - RNA, 32 nt, Human
gagggaccagauggaggaggccagcagcuagc

SEQ ID NO: 426428 - RNA, 21 nt, Human
gagggaccagcuggggggcag

SEQ ID NO: 426429 - RNA, 32 nt, Human
gagggaccagggugggagagcugauugcagaa

SEQ ID NO: 426430 - RNA, 32 nt, Human
gagggaccauccagacccucccuucuugcugg

SEQ ID NO: 426431 - RNA, 32 nt, Human
gagggaccauuuauuucccuucgaaacuguau

SEQ ID NO: 426432 - RNA, 32 nt, Human
gagggacccagcucuguuucugcugcuuccau

SEQ ID NO: 426433 - RNA, 32 nt, Human
gagggacccaggagcugccgccggccucagcc

SEQ ID NO: 426434 - RNA, 32 nt, Human
gagggacccccagagcugaaccgucagagccc

SEQ ID NO: 426435 - RNA, 32 nt, Human
gagggacccccagugccaacagugcuuuauca

SEQ ID NO: 426436 - RNA, 32 nt, Human
gagggaccgagcugcuggggaggaccucaguu

SEQ ID NO: 426437 - RNA, 32 nt, Human
gagggaccuaacuggagccucagucugacauu

SEQ ID NO: 426438 - RNA, 32 nt, Human
gagggaccucugcuuuccaggcugccuuuuau

SEQ ID NO: 426439 - RNA, 32 nt, Human
gagggaccugaggagggaggagggagaccaac

SEQ ID NO: 426440 - RNA, 32 nt, Human
gagggaccuggcaggcagagcuccagaaggga

SEQ ID NO: 426441 - RNA, 32 nt, Human
gagggacgauggcuuuccucagccugggauga

SEQ ID NO: 426442 - RNA, 32 nt, Human
gagggacgcaggcaggcggcgggcagcgggag

SEQ ID NO: 426443 - RNA, 32 nt, Human
gagggacgggcccuggggcuaggccaucucug

SEQ ID NO: 426444 - RNA, 32 nt, Human
gagggacguccugugagaaggcagcggcaagu

SEQ ID NO: 426445 - RNA, 32 nt, Human
gagggacuacagcccugaggggcugcuccaug

SEQ ID NO: 426446 - RNA, 32 nt, Human
gagggacuagaauacaaugucacuuuaagauu

SEQ ID NO: 426447 - RNA, 32 nt, Human
gagggacuagcucccggauguggagaagcugg

SEQ ID NO: 426448 - RNA, 22 nt, Human
gagggacuauucaggggcuaug

SEQ ID NO: 426449 - RNA, 32 nt, Human
gagggacucggccggagagcugaggggagggg

SEQ ID NO: 426450 - RNA, 32 nt, Human
gagggacucuggggucaugucuugcucugaga

SEQ ID NO: 426451 - RNA, 32 nt, Human
gagggacugagcacagcaccaacuagagaggg

SEQ ID NO: 426452 - RNA, 32 nt, Human
gagggacugcacucuugucagggaagcccuaa

SEQ ID NO: 426453 - RNA, 32 nt, Human
gagggacugcugcagcuagagcugagaugaug

SEQ ID NO: 426454 - RNA, 32 nt, Human
gagggacuggaguuccaggcagagggaacagc

SEQ ID NO: 426455 - RNA, 32 nt, Human
gagggacuggccagggcacccugugcugcagg

SEQ ID NO: 426456 - RNA, 32 nt, Human
gagggacuggguuccucucuccccuggcauga

SEQ ID NO: 426457 - RNA, 32 nt, Human
gagggacuguucugccagccuaacaaagcaac

SEQ ID NO: 426458 - RNA, 32 nt, Human
gagggacuugacuuucuuucuggacuguuugu

SEQ ID NO: 426459 - RNA, 32 nt, Human
gagggagaaaagaagauugaccagcuugcuag

SEQ ID NO: 426460 - RNA, 32 nt, Human
gagggagaaagcuacuuccagccauuagacua

SEQ ID NO: 426461 - RNA, 32 nt, Human
gagggagaaauguucauugcacagagaauguc

SEQ ID NO: 426462 - RNA, 32 nt, Human
gagggagaacacaagaggacagagcuaaggug

SEQ ID NO: 426463 - RNA, 32 nt, Human
gagggagaacaggcacauuagccuugaagcug

SEQ ID NO: 426464 - RNA, 23 nt, Human
gagggagaagggaacacauuucc

SEQ ID NO: 426465 - RNA, 32 nt, Human
gagggagaagggagaguggcagagagaggagc

SEQ ID NO: 426466 - RNA, 32 nt, Human
gagggagaaguuggggaaaauggaauugacgg

SEQ ID NO: 426467 - RNA, 32 nt, Human
gagggagaaugggaagaucaggaagcucuaga

SEQ ID NO: 426468 - RNA, 32 nt, Human
gagggagacaacggcagagggagugagcaggg

SEQ ID NO: 426469 - RNA, 32 nt, Human
gagggagacgucauugcaggguuguuugucag

SEQ ID NO: 426470 - RNA, 32 nt, Human
gagggagacuccgucucagaaaaaggaaaaga

SEQ ID NO: 426471 - RNA, 32 nt, Human
gagggagagagaagaagaggaagaagaggagg

SEQ ID NO: 426472 - RNA, 32 nt, Human
gagggagagagaaggugacacggauggaagag

SEQ ID NO: 426473 - RNA, 32 nt, Human
gagggagagagacagagagagcagggaucagg

SEQ ID NO: 426474 - RNA, 32 nt, Human
gagggagagagaggacaccgaagccgggagcu

SEQ ID NO: 426475 - RNA, 32 nt, Human
gagggagagaggcagagagggagagaggcaga

SEQ ID NO: 426476 - RNA, 32 nt, Human
gagggagagagggagaaaacgaaggggagcuc

SEQ ID NO: 426477 - RNA, 32 nt, Human
gagggagagagggagagagccuauaccccuua

SEQ ID NO: 426478 - RNA, 32 nt, Human
gagggagagagggagagugacagcagcgcucg

SEQ ID NO: 426479 - RNA, 18 nt, Human
gagggagagcaguguucu

SEQ ID NO: 426480 - RNA, 32 nt, Human
gagggagagcuggggccugcucccggagagau

SEQ ID NO: 426481 - RNA, 32 nt, Human
gagggagaggagaagagacgcaaaagaccggg

SEQ ID NO: 426482 - RNA, 19 nt, Human
gagggagaggagacaggaa

SEQ ID NO: 426483 - RNA, 32 nt, Human
gagggagaggagagagagugcgagaccgagcg

SEQ ID NO: 426484 - RNA, 32 nt, Human
gagggagagggaggacagggagagaaaauacc

SEQ ID NO: 426485 - RNA, 32 nt, Human
gagggagagugcagccaggcucagggaucccc

SEQ ID NO: 426486 - RNA, 32 nt, Human
gagggagauaaagagagagggcaaagaggcag

SEQ ID NO: 426487 - RNA, 32 nt, Human
gagggagauggaaguugagcaagagcagcggc

SEQ ID NO: 426488 - RNA, 32 nt, Human
gagggagauggaccagcccacgccuggcaccu

SEQ ID NO: 426489 - RNA, 32 nt, Human
gagggagaugggcaaggcgcugagggaggaug

SEQ ID NO: 426490 - RNA, 32 nt, Human
gagggagcaagggagagcaggggaggugucag

SEQ ID NO: 426491 - RNA, 32 nt, Human
gagggagcaaugagggguggucccagcucugc

SEQ ID NO: 426492 - RNA, 32 nt, Human
gagggagcaaugcagacucguagggcccuuag

SEQ ID NO: 426493 - RNA, 32 nt, Human
gagggagcagcggggagcuugcagugaccaag

SEQ ID NO: 426494 - RNA, 32 nt, Human
gagggagcaggcggagcgagagagggagaaac

SEQ ID NO: 426495 - RNA, 32 nt, Human
gagggagcagggagcccucacucuccacgccc

SEQ ID NO: 426496 - RNA, 32 nt, Human
gagggagcagucuucguucuuccuccccucag

SEQ ID NO: 426497 - RNA, 18 nt, Human
gagggagcagugccggga

SEQ ID NO: 426498 - RNA, 32 nt, Human
gagggagcauggcaaagucgguuucucucugg

SEQ ID NO: 426499 - RNA, 32 nt, Human
gagggagccacauccugaccccagcagccuca

SEQ ID NO: 426500 - RNA, 32 nt, Human
gagggagccagaccucuggcccagaaagccag

SEQ ID NO: 426501 - RNA, 32 nt, Human
gagggagcccugaaacaggaggcuggcaucug

SEQ ID NO: 426502 - RNA, 32 nt, Human
gagggagccguggagguccaggugacugcuua

SEQ ID NO: 426503 - RNA, 32 nt, Human
gagggagccugaguacaggcuuggagaaaugg

SEQ ID NO: 426504 - RNA, 19 nt, Human
gagggagccugccggcaaa

SEQ ID NO: 426505 - RNA, 32 nt, Human
gagggagcgagggagagaggaccggucccagc

SEQ ID NO: 426506 - RNA, 32 nt, Human
gagggagcuauacaaugaugucuuuauuagug

SEQ ID NO: 426507 - RNA, 32 nt, Human
gagggagcuauacaauuuaaucuauugccauu

SEQ ID NO: 426508 - RNA, 32 nt, Human
gagggagcucacugccuaccuggccuggggcu

SEQ ID NO: 426509 - RNA, 17 nt, Human
gagggagcucgcucugu

SEQ ID NO: 426510 - RNA, 32 nt, Human
gagggagcugcuggcugaccugggcccacaga

SEQ ID NO: 426511 - RNA, 32 nt, Human
gagggagcugggaaggaaggaagggggcgcua

SEQ ID NO: 426512 - RNA, 32 nt, Human
gagggagcuggucuccagccaggugagcaaca

SEQ ID NO: 426513 - RNA, 32 nt, Human
gagggagcuucuccaggaucagcagagcucga

SEQ ID NO: 426514 - RNA, 32 nt, Human
gagggagcuuggagaacucacugugggcuagg

SEQ ID NO: 426515 - RNA, 32 nt, Human
gagggaggaaaagaggaggagacggaggagaa

SEQ ID NO: 426516 - RNA, 32 nt, Human
gagggaggaacggaagaacggagggagcuacg

SEQ ID NO: 426517 - RNA, 32 nt, Human
gagggaggaagaaggaagagaggcagaagacu

SEQ ID NO: 426518 - RNA, 32 nt, Human
gagggaggaaggcagagcaaguggagcagggc

SEQ ID NO: 426519 - RNA, 32 nt, Human
gagggaggaauagcuucuuguauguccacugg

SEQ ID NO: 426520 - RNA, 32 nt, Human
gagggaggaaucgaggaaccagagccauggac

SEQ ID NO: 426521 - RNA, 32 nt, Human
gagggaggacacaucuggaggaaauggccuuc

SEQ ID NO: 426522 - RNA, 32 nt, Human
gagggaggacacccuccccugcagaagucagg

SEQ ID NO: 426523 - RNA, 32 nt, Human
gagggaggacaggccaguagggggagggaaag

SEQ ID NO: 426524 - RNA, 19 nt, Human
gagggaggacaugucggga

SEQ ID NO: 426525 - RNA, 18 nt, Human
gagggaggacccuggggu

SEQ ID NO: 426526 - RNA, 32 nt, Human
gagggaggaccugcuggcugcagugaggagcg

SEQ ID NO: 426527 - RNA, 32 nt, Human
gagggaggaccuguuguguuccagccauucug

SEQ ID NO: 426528 - RNA, 32 nt, Human
gagggaggagaaggagcagccgccacagcugu

SEQ ID NO: 426529 - RNA, 32 nt, Human
gagggaggagagaagggcggcagugggagggg

SEQ ID NO: 426530 - RNA, 32 nt, Human
gagggaggagaggacccaggaacccggcuagg

SEQ ID NO: 426531 - RNA, 32 nt, Human
gagggaggagagggguuggaguaggugggaag

SEQ ID NO: 426532 - RNA, 32 nt, Human
gagggaggagaggucacuggggaguggugggg

SEQ ID NO: 426533 - RNA, 32 nt, Human
gagggaggaggaagaagacaaagguguggagg

SEQ ID NO: 426534 - RNA, 32 nt, Human
gagggaggaggaagaagcggaggaggcggcuc

SEQ ID NO: 426535 - RNA, 32 nt, Human
gagggaggaggaagaaggaaguaaggaggaaa

SEQ ID NO: 426536 - RNA, 32 nt, Human
gagggaggaggaagagagggagggaggcggga

SEQ ID NO: 426537 - RNA, 32 nt, Human
gagggaggaggaagagauagaggaggaggagg

SEQ ID NO: 426538 - RNA, 32 nt, Human
gagggaggaggccaggccagagccagaagacg

SEQ ID NO: 426539 - RNA, 32 nt, Human
gagggaggaggugagagugauuagugggagaa

SEQ ID NO: 426540 - RNA, 32 nt, Human
gagggaggagucaggcugucccagcgaggccc

SEQ ID NO: 426541 - RNA, 32 nt, Human
gagggaggaucuccagaggucaggaguucgag

SEQ ID NO: 426542 - RNA, 21 nt, Human
gagggaggauucaagucggga

SEQ ID NO: 426543 - RNA, 32 nt, Human
gagggaggcagaggagacuugaaacagaugga

SEQ ID NO: 426544 - RNA, 32 nt, Human
gagggaggcaggcaauaugcagugaaaaccuu

SEQ ID NO: 426545 - RNA, 32 nt, Human
gagggaggcaucaccauugcaaucacuucugg

SEQ ID NO: 426546 - RNA, 32 nt, Human
gagggaggccaagggugagggaagagagcccg

SEQ ID NO: 426547 - RNA, 32 nt, Human
gagggaggccagugucagggucggaguggccu

SEQ ID NO: 426548 - RNA, 32 nt, Human
gagggaggcccaggugcagggagcaggcgagg

SEQ ID NO: 426549 - RNA, 23 nt, Human
gagggaggcccggguggggggca

SEQ ID NO: 426550 - RNA, 32 nt, Human
gagggaggccggagcgggcagcgcggcggcgc

SEQ ID NO: 426551 - RNA, 22 nt, Human
gagggaggccugagcacacugc

SEQ ID NO: 426552 - RNA, 32 nt, Human
gagggaggcgaacccgcacuuccaggcuuggg

SEQ ID NO: 426553 - RNA, 32 nt, Human
gagggaggcgaacuucucauggggaagaagug

SEQ ID NO: 426554 - RNA, 24 nt, Human
gagggaggcggacagccagaugca

SEQ ID NO: 426555 - RNA, 32 nt, Human
gagggaggcuuccugacugacacaggccagcc

SEQ ID NO: 426556 - RNA, 32 nt, Human
gagggaggcuuccugacugacacaggcuagcc

SEQ ID NO: 426557 - RNA, 32 nt, Human
gagggagggaaagaggaggaaggaagaugcga

SEQ ID NO: 426558 - RNA, 32 nt, Human
gagggagggaagagaagaaagcgagcgguuag

SEQ ID NO: 426559 - RNA, 32 nt, Human
gagggagggagagagaaagacgaagggagaga

SEQ ID NO: 426560 - RNA, 32 nt, Human
gagggagggagagagagugaaagaagaaaaua

SEQ ID NO: 426561 - RNA, 32 nt, Human
gagggagggagaggagagagagugcgagaccg

SEQ ID NO: 426562 - RNA, 32 nt, Human
gagggagggagcgagcgagcagugaguaagcc

SEQ ID NO: 426563 - RNA, 32 nt, Human
gagggagggagggcuccagacacauguccaag

SEQ ID NO: 426564 - RNA, 32 nt, Human
gagggagggagguggagaaggacgggagaggc

SEQ ID NO: 426565 - RNA, 32 nt, Human
gagggagggauggggaaguguagccacaguuc

SEQ ID NO: 426566 - RNA, 22 nt, Human
gagggagggcagagccugagga

SEQ ID NO: 426567 - RNA, 22 nt, Human
gagggagggcaggcgggaggga

SEQ ID NO: 426568 - RNA, 32 nt, Human
gagggagggcaggcgggagggagggcauuggc

SEQ ID NO: 426569 - RNA, 23 nt, Human
gagggagggccgggaagccagga

SEQ ID NO: 426570 - RNA, 32 nt, Human
gagggagggccgggaagccaggaaagcuuggu

SEQ ID NO: 426571 - RNA, 20 nt, Human
gagggagggccgggccagga

SEQ ID NO: 426572 - RNA, 18 nt, Human
gagggagggcgccccggg

SEQ ID NO: 426573 - RNA, 19 nt, Human
gagggagggcggagggcgg

SEQ ID NO: 426574 - RNA, 32 nt, Human
gagggagggcgggagagagggaacggaggaug

SEQ ID NO: 426575 - RNA, 32 nt, Human
gagggagggcuggggccuccuuguccuggauu

SEQ ID NO: 426576 - RNA, 32 nt, Human
gagggaggggagugucagagugugagcggggu

SEQ ID NO: 426577 - RNA, 32 nt, Human
gagggaggggccgccggggaagaggaggagga

SEQ ID NO: 426578 - RNA, 32 nt, Human
gagggaggggcgggggcuggaggcagcagcgc

SEQ ID NO: 426579 - RNA, 32 nt, Human
gagggagggggcuuguuucccuucccucccgg

SEQ ID NO: 426580 - RNA, 32 nt, Human
gagggagggggugggagaauccaaauaguauu

SEQ ID NO: 426581 - RNA, 32 nt, Human
gagggaggggugggggacagugggugggcauu

SEQ ID NO: 426582 - RNA, 32 nt, Human
gagggaggguacuuugccccagaagggagggu

SEQ ID NO: 426583 - RNA, 32 nt, Human
gagggaggguugugucaggcuugggggauggg

SEQ ID NO: 426584 - RNA, 23 nt, Human
gagggaggugccggagccaggga

SEQ ID NO: 426585 - RNA, 32 nt, Human
gagggagguggagggaggaaggugggaauuau

SEQ ID NO: 426586 - RNA, 32 nt, Human
gagggaggugggccaccauguuuggacccggg

SEQ ID NO: 426587 - RNA, 17 nt, Human
gagggagguugcaguga

SEQ ID NO: 426588 - RNA, 32 nt, Human
gagggaguaugggagagagggacugccacaca

SEQ ID NO: 426589 - RNA, 32 nt, Human
gagggagucccagagcccuggaccuugggccu

SEQ ID NO: 426590 - RNA, 32 nt, Human
gagggagucggaggcgccagcccacuggggag

SEQ ID NO: 426591 - RNA, 32 nt, Human
gagggagugcccugaaacucuaaucucauugc

SEQ ID NO: 426592 - RNA, 32 nt, Human
gagggagugccuggccaggccggccugucugc

SEQ ID NO: 426593 - RNA, 32 nt, Human
gagggaguggagaaggaggugagggggcccag

SEQ ID NO: 426594 - RNA, 32 nt, Human
gagggagugggcacgugagcacauaauggcac

SEQ ID NO: 426595 - RNA, 32 nt, Human
gagggagugggcaugugagcacauaauggcac

SEQ ID NO: 426596 - RNA, 18 nt, Human
gagggagugggcauucca

SEQ ID NO: 426597 - RNA, 32 nt, Human
gagggaguuagggagagagaagcaggcagaua

SEQ ID NO: 426598 - RNA, 32 nt, Human
gagggaguuccugcuacccaucgugggaggcc

SEQ ID NO: 426599 - RNA, 32 nt, Human
gagggaguucucuucuggcccugggggccgca

SEQ ID NO: 426600 - RNA, 32 nt, Human
gagggaguuggacuucagaucugcaaucuggc

SEQ ID NO: 426601 - RNA, 30 nt, Human
gagggaguuggcucuagggcacagucccug

SEQ ID NO: 426602 - RNA, 32 nt, Human
gagggauaaucaguugaacccaggagguggag

SEQ ID NO: 426603 - RNA, 32 nt, Human
gagggauacugaggcccaggcauggagcugcc

SEQ ID NO: 426604 - RNA, 22 nt, Human
gagggaucuaaggagacauggc

SEQ ID NO: 426605 - RNA, 32 nt, Human
gagggaucuauacuugcuuuguguucuuugug

SEQ ID NO: 426606 - RNA, 32 nt, Human
gagggaugaggagguggagugcaggggauguu

SEQ ID NO: 426607 - RNA, 32 nt, Human
gagggaugcagugccuuuccccauucauuccu

SEQ ID NO: 426608 - RNA, 32 nt, Human
gagggaugccaguucugccuguucaucuggaa

SEQ ID NO: 426609 - RNA, 32 nt, Human
gagggaugccgcaaccucgacuucucagccuc

SEQ ID NO: 426610 - RNA, 32 nt, Human
gagggaugccuagggcggggugggcaguggcu

SEQ ID NO: 426611 - RNA, 32 nt, Human
gagggaugcucaucuuuaacagucucccucau

SEQ ID NO: 426612 - RNA, 32 nt, Human
gagggauggaaaugaccuccuggcaccaggcu

SEQ ID NO: 426613 - RNA, 32 nt, Human
gagggauggcacacugauguguuuaugcaccu

SEQ ID NO: 426614 - RNA, 32 nt, Human
gagggaugggguggcgaggacaggguacgucg

SEQ ID NO: 426615 - RNA, 19 nt, Human
gagggauguauacugcaga

SEQ ID NO: 426616 - RNA, 17 nt, Human
gagggaugucuuuggga

SEQ ID NO: 426617 - RNA, 32 nt, Human
gagggaugugccagugccuucucaccaccacg

SEQ ID NO: 426618 - RNA, 32 nt, Human
gagggaugugugugugcagcuuauuguagacc

SEQ ID NO: 426619 - RNA, 32 nt, Human
gagggauuauuuuucuacaaaguaauuuauga

SEQ ID NO: 426620 - RNA, 28 nt, Human
gagggauuccaugcugccuucuccggac

SEQ ID NO: 426621 - RNA, 32 nt, Human
gagggauugaugcugguuaucucucugaaucu

SEQ ID NO: 426622 - RNA, 19 nt, Human
gagggauuuagaauucccu

SEQ ID NO: 426623 - RNA, 19 nt, Human
gagggauuugcacaggaac

SEQ ID NO: 426624 - RNA, 24 nt, Human
gagggauuuuauugugaaauucua

SEQ ID NO: 426625 - RNA, 32 nt, Human
gagggcaaacuagacauuguaaugcauaagau

SEQ ID NO: 426626 - RNA, 32 nt, Human
gagggcaaaucacuugagcucaggaguuugag

SEQ ID NO: 426627 - RNA, 32 nt, Human
gagggcaaauucaccagcaggggcuaggaauu

SEQ ID NO: 426628 - RNA, 32 nt, Human
gagggcaacagagccagcaucuugccagggcc

SEQ ID NO: 426629 - RNA, 19 nt, Human
gagggcaagagugagcaag

SEQ ID NO: 426630 - RNA, 32 nt, Human
gagggcaagagugagcaagagauggaaguugc

SEQ ID NO: 426631 - RNA, 19 nt, Human
gagggcaaggacacuucca

SEQ ID NO: 426632 - RNA, 32 nt, Human
gagggcaaggcaagagcuugagcuugagccua

SEQ ID NO: 426633 - RNA, 22 nt, Human
gagggcaaggcaggcggaucac

SEQ ID NO: 426634 - RNA, 19 nt, Human
gagggcaauauauguuuca

SEQ ID NO: 426635 - RNA, 32 nt, Human
gagggcaaucgcuuccuggugcugagcuccuu

SEQ ID NO: 426636 - RNA, 32 nt, Human
gagggcacccagccuucuaaaacacaauguau

SEQ ID NO: 426637 - RNA, 32 nt, Human
gagggcacccaggagugucuggcugcauuacc

SEQ ID NO: 426638 - RNA, 32 nt, Human
gagggcaccccgaggaacauggcauggccucu

SEQ ID NO: 426639 - RNA, 32 nt, Human
gagggcaccucgcugcuccagccucuggggcg

SEQ ID NO: 426640 - RNA, 20 nt, Human
gagggcacgucuaugaucca

SEQ ID NO: 426641 - RNA, 18 nt, Human
gagggcacugaacuguca

SEQ ID NO: 426642 - RNA, 32 nt, Human
gagggcacugaccacaccccacacaaccucaa

SEQ ID NO: 426643 - RNA, 19 nt, Human
gagggcacugcaaauacca

SEQ ID NO: 426644 - RNA, 32 nt, Human
gagggcacugccaggcuguguucaguuagcac

SEQ ID NO: 426645 - RNA, 32 nt, Human
gagggcacugccucagggcuuacaguguucug

SEQ ID NO: 426646 - RNA, 32 nt, Human
gagggcacugcuguggugugggagcaguccug

SEQ ID NO: 426647 - RNA, 19 nt, Human
gagggcacuggacagaaac

SEQ ID NO: 426648 - RNA, 20 nt, Human
gagggcacugugaaggcucc

SEQ ID NO: 426649 - RNA, 32 nt, Human
gagggcagaaggcagaagugagcaugugagac

SEQ ID NO: 426650 - RNA, 32 nt, Human
gagggcagacagauuccugcuagcagcuuagu

SEQ ID NO: 426651 - RNA, 23 nt, Human
gagggcagacugugcacauuuca

SEQ ID NO: 426652 - RNA, 32 nt, Human
gagggcagagagaggggagcccccucuuccac

SEQ ID NO: 426653 - RNA, 32 nt, Human
gagggcagaggaggagagagccuggcagcgga

SEQ ID NO: 426654 - RNA, 32 nt, Human
gagggcagagggcagagcucuggccacuucug

SEQ ID NO: 426655 - RNA, 22 nt, Human
gagggcagaggggccagaagga

SEQ ID NO: 426656 - RNA, 32 nt, Human
gagggcagaguccucauagccuaaucaccucc

SEQ ID NO: 426657 - RNA, 32 nt, Human
gagggcagagucuuagcuguuuucuuuaagca

SEQ ID NO: 426658 - RNA, 32 nt, Human
gagggcagagugaggccaccuggcgggggugc

SEQ ID NO: 426659 - RNA, 18 nt, Human
gagggcagcaacguuuca

SEQ ID NO: 426660 - RNA, 32 nt, Human
gagggcagcacagaggccccugggacaccuac

SEQ ID NO: 426661 - RNA, 20 nt, Human
gagggcagcauccccuaacu

SEQ ID NO: 426662 - RNA, 32 nt, Human
gagggcagccaguagccucggaggcuuggaug

SEQ ID NO: 426663 - RNA, 30 nt, Human
gagggcagccucuccagcucucuuguuuau

SEQ ID NO: 426664 - RNA, 31 nt, Human
gagggcagccuucugccaccugugucgccuc

SEQ ID NO: 426665 - RNA, 32 nt, Human
gagggcagccuucugccaccugugucgccucc

SEQ ID NO: 426666 - RNA, 32 nt, Human
gagggcagcucuacaaagcauaccucagcagc

SEQ ID NO: 426667 - RNA, 32 nt, Human
gagggcagcugacagccgggagagugcacaga

SEQ ID NO: 426668 - RNA, 32 nt, Human
gagggcagcuguagaaacuuucccucuguggg

SEQ ID NO: 426669 - RNA, 18 nt, Human
gagggcagcuuacguguu

SEQ ID NO: 426670 - RNA, 32 nt, Human
gagggcaggaacacccuugguuuuauuuacuu

SEQ ID NO: 426671 - RNA, 19 nt, Human
gagggcaggaggacuacuu

SEQ ID NO: 426672 - RNA, 32 nt, Human
gagggcaggagugggagcagaugacaaccauu

SEQ ID NO: 426673 - RNA, 32 nt, Human
gagggcaggccaggauggagcccaggguagac

SEQ ID NO: 426674 - RNA, 32 nt, Human
gagggcaggcccccaagagcugugcugauccg

SEQ ID NO: 426675 - RNA, 32 nt, Human
gagggcaggcccugugcucauagcuuuacgau

SEQ ID NO: 426676 - RNA, 32 nt, Human
gagggcaggccuguaucuuuuacuucugugua

SEQ ID NO: 426677 - RNA, 32 nt, Human
gagggcaggcguugggacaggagggcaggggu

SEQ ID NO: 426678 - RNA, 32 nt, Human
gagggcaggcugggugagggacaggaggcccc

SEQ ID NO: 426679 - RNA, 32 nt, Human
gagggcagggaagacucacagcagagcaggag

SEQ ID NO: 426680 - RNA, 32 nt, Human
gagggcagggaccacacccuguacuguucugu

SEQ ID NO: 426681 - RNA, 32 nt, Human
gagggcagggagucaguacaacacagugcuca

SEQ ID NO: 426682 - RNA, 32 nt, Human
gagggcagggcuagguguagcggugucuccuc

SEQ ID NO: 426683 - RNA, 32 nt, Human
gagggcagggcugcggggaggccaggccgagc

SEQ ID NO: 426684 - RNA, 31 nt, Human
gagggcagggcuggaccaugggugagggcag

SEQ ID NO: 426685 - RNA, 32 nt, Human
gagggcaggggucgggugggagagggaugcau

SEQ ID NO: 426686 - RNA, 32 nt, Human
gagggcaggggugagagagcaagggggcaggg

SEQ ID NO: 426687 - RNA, 32 nt, Human
gagggcaggggugggaaggcaggagggaggug

SEQ ID NO: 426688 - RNA, 32 nt, Human
gagggcagggugagacauucagaggaaacgac

SEQ ID NO: 426689 - RNA, 18 nt, Human
gagggcagggugcaucca

SEQ ID NO: 426690 - RNA, 23 nt, Human
gagggcagguccagccuucagca

SEQ ID NO: 426691 - RNA, 32 nt, Human
gagggcagguugagaccuggaggcagggucca

SEQ ID NO: 426692 - RNA, 32 nt, Human
gagggcaguagcucaguguggaagaaaauccu

SEQ ID NO: 426693 - RNA, 19 nt, Human
gagggcaguaucuuuggga

SEQ ID NO: 426694 - RNA, 32 nt, Human
gagggcagucagugucacuucugggaugugcc

SEQ ID NO: 426695 - RNA, 32 nt, Human
gagggcaguggcagaaaagugaccacucugca

SEQ ID NO: 426696 - RNA, 32 nt, Human
gagggcauagggcagccuaccaccuccaaggg

SEQ ID NO: 426697 - RNA, 32 nt, Human
gagggcaucugcaauaggaggggacccgagcc

SEQ ID NO: 426698 - RNA, 32 nt, Human
gagggcaugaguucgagaccagccuggccaac

SEQ ID NO: 426699 - RNA, 32 nt, Human
gagggcauggggugaggcauggcgauggggga

SEQ ID NO: 426700 - RNA, 20 nt, Human
gagggcaugugauauuuuca

SEQ ID NO: 426701 - RNA, 21 nt, Human
gagggcauuagccccauuuca

SEQ ID NO: 426702 - RNA, 32 nt, Human
gagggcauuggcgagguagagcuuaaagguac

SEQ ID NO: 426703 - RNA, 20 nt, Human
gagggcauugugacauauca

SEQ ID NO: 426704 - RNA, 26 nt, Human
gagggccaaggggcgugggcgucuuc

SEQ ID NO: 426705 - RNA, 31 nt, Human
gagggccaaguguccauucagacucggguau

SEQ ID NO: 426706 - RNA, 32 nt, Human
gagggccaauccagacacacucacacucucau

SEQ ID NO: 426707 - RNA, 32 nt, Human
gagggccaaugccacuucacucagcacuuuaa

SEQ ID NO: 426708 - RNA, 32 nt, Human
gagggccacacaugcauacacaugcacacuca

SEQ ID NO: 426709 - RNA, 32 nt, Human
gagggccaccacugcaguucugcuaggucugc

SEQ ID NO: 426710 - RNA, 32 nt, Human
gagggccaccuugcuuuauagcauauuacuca

SEQ ID NO: 426711 - RNA, 32 nt, Human
gagggccacuacacuccagccugggugacaga

SEQ ID NO: 426712 - RNA, 23 nt, Human
gagggccagaagccacauccucu

SEQ ID NO: 426713 - RNA, 31 nt, Human
gagggccagagaggcaguuggaagauggcgg

SEQ ID NO: 426714 - RNA, 24 nt, Human
gagggccagagagugaauaucuuu

SEQ ID NO: 426715 - RNA, 32 nt, Human
gagggccagcacuggcgucugcggccgcagca

SEQ ID NO: 426716 - RNA, 32 nt, Human
gagggccagcucccagccucuugcuuccuggg

SEQ ID NO: 426717 - RNA, 22 nt, Human
gagggccaggcacccacauccc

SEQ ID NO: 426718 - RNA, 32 nt, Human
gagggccagggaggaggagaaaggaauugagc

SEQ ID NO: 426719 - RNA, 32 nt, Human
gagggccaggucgggggcaggcauggagggga

SEQ ID NO: 426720 - RNA, 32 nt, Human
gagggccaugauuucccucccggggccccugg

SEQ ID NO: 426721 - RNA, 32 nt, Human
gagggccaugcucuccuuggacccaguuaacu

SEQ ID NO: 426722 - RNA, 32 nt, Human
gagggccaugcuguggacagugaggggaggag

SEQ ID NO: 426723 - RNA, 21 nt, Human
gagggccauuugaacauuaca

SEQ ID NO: 426724 - RNA, 32 nt, Human
gagggcccaccuccugccuccugguggccugu

SEQ ID NO: 426725 - RNA, 32 nt, Human
gagggcccagagaggcgguggggugggcgacc

SEQ ID NO: 426726 - RNA, 32 nt, Human
gagggcccagcuggggcaaccacgcucgggac

SEQ ID NO: 426727 - RNA, 32 nt, Human
gagggcccaggaggucaaggcuucagugagcc

SEQ ID NO: 426728 - RNA, 32 nt, Human
gagggcccaggccacggaaacaagacugcaga

SEQ ID NO: 426729 - RNA, 32 nt, Human
gagggccccacgugguucccagccagacaguu

SEQ ID NO: 426730 - RNA, 18 nt, Human
gagggccccggccggggg

SEQ ID NO: 426731 - RNA, 32 nt, Human
gagggccccucagagccaggugcuggccagau

SEQ ID NO: 426732 - RNA, 32 nt, Human
gagggccccucaggcagagauggaccaggcgg

SEQ ID NO: 426733 - RNA, 32 nt, Human
gagggccccucggcaccugccuggcacaagug

SEQ ID NO: 426734 - RNA, 32 nt, Human
gagggccccucgggagccccuggccauguuag

SEQ ID NO: 426735 - RNA, 32 nt, Human
gagggcccggcgcagaggauugaggaggaggg

SEQ ID NO: 426736 - RNA, 32 nt, Human
gagggcccguguccccgcggaggucaaggccg

SEQ ID NO: 426737 - RNA, 32 nt, Human
gagggcccugggauccccuugacccuggucau

SEQ ID NO: 426738 - RNA, 21 nt, Human
gagggccgaggauaauguugc

SEQ ID NO: 426739 - RNA, 21 nt, Human
gagggccgagggcgggagcug

SEQ ID NO: 426740 - RNA, 32 nt, Human
gagggccgaucuguuacaggcaaguuuggcaa

SEQ ID NO: 426741 - RNA, 32 nt, Human
gagggccggaggcccaaggagggcgcgccuug

SEQ ID NO: 426742 - RNA, 32 nt, Human
gagggccgggcagaggggcagauggaaaggag

SEQ ID NO: 426743 - RNA, 18 nt, Human
gagggccgggcccuggga

SEQ ID NO: 426744 - RNA, 24 nt, Human
gagggccggggaguacacugaucc

SEQ ID NO: 426745 - RNA, 20 nt, Human
gagggccuaggguauugcca

SEQ ID NO: 426746 - RNA, 32 nt, Human
gagggccucaaggagcagaggaaggggcuggu

SEQ ID NO: 426747 - RNA, 32 nt, Human
gagggccuccugaaggaggagaugaguaaaua

SEQ ID NO: 426748 - RNA, 32 nt, Human
gagggccucugacugcugggacugaccaaaga

SEQ ID NO: 426749 - RNA, 24 nt, Human
gagggccugaggguacauuucucc

SEQ ID NO: 426750 - RNA, 32 nt, Human
gagggccugcagcccacacacugacugauaca

SEQ ID NO: 426751 - RNA, 32 nt, Human
gagggccugcuacaaacuccuccuggaaacgc

SEQ ID NO: 426752 - RNA, 32 nt, Human
gagggccuggacugagggggaccaggucuucu

SEQ ID NO: 426753 - RNA, 32 nt, Human
gagggccuggcccaauccuggagccucagaaa

SEQ ID NO: 426754 - RNA, 32 nt, Human
gagggccuggcucucccugggaggcuggggcc

SEQ ID NO: 426755 - RNA, 17 nt, Human
gagggccugggaucuga

SEQ ID NO: 426756 - RNA, 32 nt, Human
gagggccuggggacaguggagcauaugggugg

SEQ ID NO: 426757 - RNA, 28 nt, Human
gagggccuucuugcugccucaccucaug

SEQ ID NO: 426758 - RNA, 32 nt, Human
gagggccuugaacaagucauuuucuucacauu

SEQ ID NO: 426759 - RNA, 32 nt, Human
gagggccuugaggaagcagcccccaggccugg

SEQ ID NO: 426760 - RNA, 32 nt, Human
gagggccuugggcgucccuccugguccugcgc

SEQ ID NO: 426761 - RNA, 32 nt, Human
gagggccuuguccuugaacacuacugggguau

SEQ ID NO: 426762 - RNA, 32 nt, Human
gagggccuuucugggauucagugcuucagaga

SEQ ID NO: 426763 - RNA, 25 nt, Human
gagggcgaauugcuaugacauucca

SEQ ID NO: 426764 - RNA, 32 nt, Human
gagggcgagagguggaaggucagaggagaugg

SEQ ID NO: 426765 - RNA, 32 nt, Human
gagggcgagggccaccaccugcagcacaucag

SEQ ID NO: 426766 - RNA, 32 nt, Human
gagggcgauucugggccuuucugaccuacucc

SEQ ID NO: 426767 - RNA, 32 nt, Human
gagggcgcagaccuguggugaggacacccgag

SEQ ID NO: 426768 - RNA, 32 nt, Human
gagggcgcaggcggcgggugcgcgaggagaaa

SEQ ID NO: 426769 - RNA, 32 nt, Human
gagggcgccagaaguggcggcagcagcagccg

SEQ ID NO: 426770 - RNA, 32 nt, Human
gagggcgcccccugccccaccagccugagugc

SEQ ID NO: 426771 - RNA, 32 nt, Human
gagggcgcgcggguacugacagccauggugca

SEQ ID NO: 426772 - RNA, 32 nt, Human
gagggcgcggagccaugaagcuguacagccuc

SEQ ID NO: 426773 - RNA, 32 nt, Human
gagggcgcgggagccacacucucaggugccug

SEQ ID NO: 426774 - RNA, 32 nt, Human
gagggcgcggggcggggagcgagccccaggcg

SEQ ID NO: 426775 - RNA, 22 nt, Human
gagggcgcgucuccccuccgcc

SEQ ID NO: 426776 - RNA, 32 nt, Human
gagggcgcuacuggagccuggucagaggagga

SEQ ID NO: 426777 - RNA, 32 nt, Human
gagggcggaaggcugcuggggugcgcaggugg

SEQ ID NO: 426778 - RNA, 32 nt, Human
gagggcggagggcggaggggcggcgggaggag

SEQ ID NO: 426779 - RNA, 32 nt, Human
gagggcggcgagggcgcagggaagaagaggga

SEQ ID NO: 426780 - RNA, 22 nt, Human
gagggcggcgcaggagguggga

SEQ ID NO: 426781 - RNA, 32 nt, Human
gagggcggcggggacaagauggguggagaaug

SEQ ID NO: 426782 - RNA, 20 nt, Human
gagggcgggaggaggcgcgg

SEQ ID NO: 426783 - RNA, 32 nt, Human
gagggcgggagguagauauaggccuguucuuu

SEQ ID NO: 426784 - RNA, 32 nt, Human
gagggcgggccggccggcccggaugggcgcgg

SEQ ID NO: 426785 - RNA, 32 nt, Human
gagggcggggccugagggugggggcggggccu

SEQ ID NO: 426786 - RNA, 32 nt, Human
gagggcgggggagagcgcgccgcugcucccgg

SEQ ID NO: 426787 - RNA, 32 nt, Human
gagggcggucaccugccagaaggucuggggcg

SEQ ID NO: 426788 - RNA, 32 nt, Human
gagggcgguuuugagcuuucuauaagcuauag

SEQ ID NO: 426789 - RNA, 32 nt, Human
gagggcgucaggcagaggcaacugacuucauu

SEQ ID NO: 426790 - RNA, 23 nt, Human
gagggcuaaauauauuuauucuc

SEQ ID NO: 426791 - RNA, 23 nt, Human
gagggcuaaauggguccaucucu

SEQ ID NO: 426792 - RNA, 32 nt, Human
gagggcuacaucugguuccuggggaggaguca

SEQ ID NO: 426793 - RNA, 22 nt, Human
gagggcuagagaaagcaucuuc

SEQ ID NO: 426794 - RNA, 28 nt, Human
gagggcuaucuacaaggguaauauuucu

SEQ ID NO: 426795 - RNA, 32 nt, Human
gagggcucaaucuaaccagcagcuguccccug

SEQ ID NO: 426796 - RNA, 32 nt, Human
gagggcucaggccacaucacgaaaugugacag

SEQ ID NO: 426797 - RNA, 22 nt, Human
gagggcucccucagcccuggga

SEQ ID NO: 426798 - RNA, 22 nt, Human
gagggcucccuuucccuccccu

SEQ ID NO: 426799 - RNA, 32 nt, Human
gagggcuccuguggcugccaggagggcuugac

SEQ ID NO: 426800 - RNA, 32 nt, Human
gagggcucgagcuggacacuccuggcuggacg

SEQ ID NO: 426801 - RNA, 21 nt, Human
gagggcucucuuuugguucca

SEQ ID NO: 426802 - RNA, 32 nt, Human
gagggcucugcugcuucuuuccagaaagugau

SEQ ID NO: 426803 - RNA, 22 nt, Human
gagggcucuggggacacuucca

SEQ ID NO: 426804 - RNA, 32 nt, Human
gagggcugaacaaagcagggaggcccacgguu

SEQ ID NO: 426805 - RNA, 32 nt, Human
gagggcugaagcaggaggauugcuugaggccg

SEQ ID NO: 426806 - RNA, 32 nt, Human
gagggcugagagggucugguccuggcccaggc

SEQ ID NO: 426807 - RNA, 32 nt, Human
gagggcugaggccgaccaugcccagccugcug

SEQ ID NO: 426808 - RNA, 32 nt, Human
gagggcugcaagcuggaggguggugcaggccu

SEQ ID NO: 426809 - RNA, 32 nt, Human
gagggcugccaggggaacuuggaaaggaccac

SEQ ID NO: 426810 - RNA, 32 nt, Human
gagggcugccuaaaauauuuuauuucuagcau

SEQ ID NO: 426811 - RNA, 31 nt, Human
gagggcugccucucugccagucagccacaga

SEQ ID NO: 426812 - RNA, 32 nt, Human
gagggcugcgagcauuucccucccgggagagg

SEQ ID NO: 426813 - RNA, 32 nt, Human
gagggcugcugggugagggccuggagaugugg

SEQ ID NO: 426814 - RNA, 21 nt, Human
gagggcugcuugguguaguca

SEQ ID NO: 426815 - RNA, 32 nt, Human
gagggcuggaaccugaggauagagcgaaaaug

SEQ ID NO: 426816 - RNA, 32 nt, Human
gagggcuggaggcagagaguguaagugugcag

SEQ ID NO: 426817 - RNA, 32 nt, Human
gagggcuggagugcaguggcgugaucugggcu

SEQ ID NO: 426818 - RNA, 22 nt, Human
gagggcuggauccugggccaaa

SEQ ID NO: 426819 - RNA, 32 nt, Human
gagggcugggcccuaugacuguggucugggcu

SEQ ID NO: 426820 - RNA, 32 nt, Human
gagggcugguccagagagaugaugugaucccc

SEQ ID NO: 426821 - RNA, 32 nt, Human
gagggcuggucugcaugcuggaagagguugag

SEQ ID NO: 426822 - RNA, 19 nt, Human
gagggcugucaacaggaac

SEQ ID NO: 426823 - RNA, 32 nt, Human
gagggcugugaaggauccagagacaagacuua

SEQ ID NO: 426824 - RNA, 32 nt, Human
gagggcugugggcuccucugucucuggagagu

SEQ ID NO: 426825 - RNA, 32 nt, Human
gagggcuguggggaggauggaggcaggagcug

SEQ ID NO: 426826 - RNA, 32 nt, Human
gagggcuuagaauugcagggcgagccaggcau

SEQ ID NO: 426827 - RNA, 32 nt, Human
gagggcuuagcacaucgccuaucauuucuaug

SEQ ID NO: 426828 - RNA, 32 nt, Human
gagggcuucucagcaggaugaugaagguggcc

SEQ ID NO: 426829 - RNA, 18 nt, Human
gaggggaaaaauguuaca

SEQ ID NO: 426830 - RNA, 32 nt, Human
gaggggaaaaggacaggugaucuggggaaaac

SEQ ID NO: 426831 - RNA, 32 nt, Human
gaggggaaacugagucccagccccaggguccu

SEQ ID NO: 426832 - RNA, 32 nt, Human
gaggggaacaaaaaucacucacaagcaaucca

SEQ ID NO: 426833 - RNA, 17 nt, Human
gaggggaacaaguagca

SEQ ID NO: 426834 - RNA, 18 nt, Human
gaggggaacagaugggac

SEQ ID NO: 426835 - RNA, 21 nt, Human
gaggggaacagggaacggaac

SEQ ID NO: 426836 - RNA, 23 nt, Human
gaggggaacccugggacaggcac

SEQ ID NO: 426837 - RNA, 32 nt, Human
gaggggaagagaagagaaagagggggaaagga

SEQ ID NO: 426838 - RNA, 31 nt, Human
gaggggaagaggccuguuucgcugucggguc

SEQ ID NO: 426839 - RNA, 32 nt, Human
gaggggaagagggagaguggcauagcucugug

SEQ ID NO: 426840 - RNA, 32 nt, Human
gaggggaagcugggagaaaggaggucgaggag

SEQ ID NO: 426841 - RNA, 32 nt, Human
gaggggaaggaacuaaagguguuugcacuuca

SEQ ID NO: 426842 - RNA, 32 nt, Human
gaggggaaggaagcccuggggagcagcugcuc

SEQ ID NO: 426843 - RNA, 32 nt, Human
gaggggaaggagccccgaggaggcucugaguu

SEQ ID NO: 426844 - RNA, 32 nt, Human
gaggggaaggagccgcccucccuaucuugcug

SEQ ID NO: 426845 - RNA, 32 nt, Human
gaggggaaggagcugguagugacauuguuaau

SEQ ID NO: 426846 - RNA, 32 nt, Human
gaggggaaggcgacguaguuucccuggagcgg

SEQ ID NO: 426847 - RNA, 32 nt, Human
gaggggaagggagggggcgggcaggugcagcg

SEQ ID NO: 426848 - RNA, 32 nt, Human
gaggggaagggcccuguggugccgccgcccuu

SEQ ID NO: 426849 - RNA, 32 nt, Human
gaggggaagguggcuucccccaagcacugugu

SEQ ID NO: 426850 - RNA, 32 nt, Human
gaggggaagugaagcaacagcccagcuggaag

SEQ ID NO: 426851 - RNA, 32 nt, Human
gaggggacagggggcaggugugugacuggguu

SEQ ID NO: 426852 - RNA, 32 nt, Human
gaggggacaucugagggcuucacagggcugca

SEQ ID NO: 426853 - RNA, 32 nt, Human
gaggggacaucuggauuugcucugguugggag

SEQ ID NO: 426854 - RNA, 32 nt, Human
gaggggacaucuggcagcaucucucccaagca

SEQ ID NO: 426855 - RNA, 32 nt, Human
gaggggaccacaagcccaaaaaggacaaaaau

SEQ ID NO: 426856 - RNA, 17 nt, Human
gaggggaccagaagcca

SEQ ID NO: 426857 - RNA, 32 nt, Human
gaggggacccgggaacaguaguagaagagcug

SEQ ID NO: 426858 - RNA, 32 nt, Human
gaggggacggagagggugggaaagaccuugga

SEQ ID NO: 426859 - RNA, 32 nt, Human
gaggggagaaaacaccaggaaagaggaacccu

SEQ ID NO: 426860 - RNA, 32 nt, Human
gaggggagaaacaggagaggagaggccaggag

SEQ ID NO: 426861 - RNA, 32 nt, Human
gaggggagaagagaguaggaaaaaggagggaa

SEQ ID NO: 426862 - RNA, 32 nt, Human
gaggggagaaucaacucugaaugugauguagu

SEQ ID NO: 426863 - RNA, 21 nt, Human
gaggggagaauuuuaggcaaa

SEQ ID NO: 426864 - RNA, 32 nt, Human
gaggggagacacaccuacugcuuccucagaug

SEQ ID NO: 426865 - RNA, 23 nt, Human
gaggggagacagaggggauuaaa

SEQ ID NO: 426866 - RNA, 32 nt, Human
gaggggagaccuggccaagggagccagccagc

SEQ ID NO: 426867 - RNA, 32 nt, Human
gaggggagagaagggagagggugggccugcug

SEQ ID NO: 426868 - RNA, 32 nt, Human
gaggggagagcagagagcagaaccuggugugu

SEQ ID NO: 426869 - RNA, 32 nt, Human
gaggggagaggaggggaaggggaggcagagga

SEQ ID NO: 426870 - RNA, 32 nt, Human
gaggggagagugaggagaggaggagagaggcu

SEQ ID NO: 426871 - RNA, 32 nt, Human
gaggggagaugaagcccacagagcuggaaaga

SEQ ID NO: 426872 - RNA, 32 nt, Human
gaggggagcaaaccaagguggggaaacugcuc

SEQ ID NO: 426873 - RNA, 32 nt, Human
gaggggagcaggcagagaggggcgguugaagg

SEQ ID NO: 426874 - RNA, 32 nt, Human
gaggggagcaggcagcgguccuagccaguucc

SEQ ID NO: 426875 - RNA, 32 nt, Human
gaggggagcaggcccguggcaggaggagggcu

SEQ ID NO: 426876 - RNA, 32 nt, Human
gaggggagccaccugagggcuguggaacccag

SEQ ID NO: 426877 - RNA, 32 nt, Human
gaggggagccccaucuccccagaagagcagug

SEQ ID NO: 426878 - RNA, 18 nt, Human
gaggggagcccgccgcgg

SEQ ID NO: 426879 - RNA, 32 nt, Human
gaggggagcccuggaagcagggcuuuuccgga

SEQ ID NO: 426880 - RNA, 32 nt, Human
gaggggagcgcggacggcugggcugcugcugg

SEQ ID NO: 426881 - RNA, 32 nt, Human
gaggggagcucugacacacagagacacgcucc

SEQ ID NO: 426882 - RNA, 32 nt, Human
gaggggagcugcuggccauggcugcuuuguag

SEQ ID NO: 426883 - RNA, 32 nt, Human
gaggggagcuugaacuaggggaaaggccacuc

SEQ ID NO: 426884 - RNA, 32 nt, Human
gaggggaggaagcacacagagcucccugagca

SEQ ID NO: 426885 - RNA, 32 nt, Human
gaggggaggaagggcagggcagacugcaggug

SEQ ID NO: 426886 - RNA, 32 nt, Human
gaggggaggacccugagggcucagccagggag

SEQ ID NO: 426887 - RNA, 32 nt, Human
gaggggaggagaggagaggagaggaaccguca

SEQ ID NO: 426888 - RNA, 32 nt, Human
gaggggaggaggaggagcaggccgagcgcauu

SEQ ID NO: 426889 - RNA, 32 nt, Human
gaggggaggaggaggaggaggagaggagcagu

SEQ ID NO: 426890 - RNA, 32 nt, Human
gaggggaggaggaggaggaggaggaggucgug

SEQ ID NO: 426891 - RNA, 32 nt, Human
gaggggaggaggugguggccguggguuccuga

SEQ ID NO: 426892 - RNA, 15 nt, Human
gaggggaggauagga

SEQ ID NO: 426893 - RNA, 32 nt, Human
gaggggaggauggggcacauucuaguccccua

SEQ ID NO: 426894 - RNA, 32 nt, Human
gaggggaggcucugccccaggccgcggccuug

SEQ ID NO: 426895 - RNA, 32 nt, Human
gaggggagggagcagcugggcaaggaaguggc

SEQ ID NO: 426896 - RNA, 32 nt, Human
gaggggagggcagaggaggagagagccuggca

SEQ ID NO: 426897 - RNA, 32 nt, Human
gaggggagggcugcuuccaugguacuuagggc

SEQ ID NO: 426898 - RNA, 32 nt, Human
gaggggagggcuuucacgcccacccacccccu

SEQ ID NO: 426899 - RNA, 32 nt, Human
gaggggaggggaggggagcaggcacugggcgg

SEQ ID NO: 426900 - RNA, 32 nt, Human
gaggggaggggaggggaggggagcaggcacug

SEQ ID NO: 426901 - RNA, 32 nt, Human
gaggggaggggaugggaagcaccaccagccag

SEQ ID NO: 426902 - RNA, 20 nt, Human
gaggggaggugugcaggaac

SEQ ID NO: 426903 - RNA, 32 nt, Human
gaggggaguagagaaguuuacacagaaaugcu

SEQ ID NO: 426904 - RNA, 32 nt, Human
gaggggaguagagggcaccagggaaugcugug

SEQ ID NO: 426905 - RNA, 32 nt, Human
gaggggauaggccugguuuccuuuguacuaau

SEQ ID NO: 426906 - RNA, 32 nt, Human
gaggggaugaaucacccuuggcccagccuccc

SEQ ID NO: 426907 - RNA, 19 nt, Human
gaggggaugcccgcgcccg

SEQ ID NO: 426908 - RNA, 32 nt, Human
gaggggaugggggaggucucagguccucuugc

SEQ ID NO: 426909 - RNA, 32 nt, Human
gaggggauguaaugaguugacaugcaccagaa

SEQ ID NO: 426910 - RNA, 32 nt, Human
gaggggcaaaaacggcccacacugucuaagac

SEQ ID NO: 426911 - RNA, 32 nt, Human
gaggggcaacccagagguggggaacaacaaca

SEQ ID NO: 426912 - RNA, 21 nt, Human
gaggggcaacucaggauuuua

SEQ ID NO: 426913 - RNA, 31 nt, Human
gaggggcaaguguccagcaggagggagaaac

SEQ ID NO: 426914 - RNA, 32 nt, Human
gaggggcacacagagagcagcagccagcacag

SEQ ID NO: 426915 - RNA, 32 nt, Human
gaggggcacacagugaggcggccacuggcucu

SEQ ID NO: 426916 - RNA, 32 nt, Human
gaggggcaccacuacuccagcccagaaggaaa

SEQ ID NO: 426917 - RNA, 32 nt, Human
gaggggcacgagaagagaggagcagggaggag

SEQ ID NO: 426918 - RNA, 22 nt, Human
gaggggcacucagccagcucug

SEQ ID NO: 426919 - RNA, 32 nt, Human
gaggggcacucgccgguuaagacaggguggga

SEQ ID NO: 426920 - RNA, 21 nt, Human
gaggggcacuguggacaggaa

SEQ ID NO: 426921 - RNA, 32 nt, Human
gaggggcacuucagaugagaauggagagguag

SEQ ID NO: 426922 - RNA, 20 nt, Human
gaggggcacuuggcaggaac

SEQ ID NO: 426923 - RNA, 22 nt, Human
gaggggcagaccugguggccag

SEQ ID NO: 426924 - RNA, 22 nt, Human
gaggggcagagccaaaaugaga

SEQ ID NO: 426925 - RNA, 32 nt, Human
gaggggcagagccaggaggcaguggggcugug

SEQ ID NO: 426926 - RNA, 26 nt, Human
gaggggcagagcccuuuggggggcag

SEQ ID NO: 426927 - RNA, 32 nt, Human
gaggggcagagcugucggugacugaggacugg

SEQ ID NO: 426928 - RNA, 32 nt, Human
gaggggcagaggaggggaaggaggagggccug

SEQ ID NO: 426929 - RNA, 32 nt, Human
gaggggcagcagccgaguuaaagugggggcca

SEQ ID NO: 426930 - RNA, 32 nt, Human
gaggggcagcauggcguccgugacgcugagcg

SEQ ID NO: 426931 - RNA, 32 nt, Human
gaggggcagccugaucucaccuccaccuagua

SEQ ID NO: 426932 - RNA, 32 nt, Human
gaggggcagccugugccugccuuugugucaga

SEQ ID NO: 426933 - RNA, 21 nt, Human
gaggggcagcgcagggcgcag

SEQ ID NO: 426934 - RNA, 32 nt, Human
gaggggcaggagcgugaugcagacaaggacuu

SEQ ID NO: 426935 - RNA, 32 nt, Human
gaggggcaggauuccgggcaggagccuugccu

SEQ ID NO: 426936 - RNA, 32 nt, Human
gaggggcagggagaugccaccaugcuucucug

SEQ ID NO: 426937 - RNA, 24 nt, Human
gaggggcagggaggcaaaaugaga

SEQ ID NO: 426938 - RNA, 19 nt, Human
gaggggcaguguucccacc

SEQ ID NO: 426939 - RNA, 32 nt, Human
gaggggcaucccucccugccggccucagggag

SEQ ID NO: 426940 - RNA, 32 nt, Human
gaggggcaucugaauggcaucuucaucagguc

SEQ ID NO: 426941 - RNA, 26 nt, Human
gaggggcaugguuagggagggcucua

SEQ ID NO: 426942 - RNA, 32 nt, Human
gaggggccaaggggccuguggaagaggagugg

SEQ ID NO: 426943 - RNA, 32 nt, Human
gaggggccagccugggaccagcagaguggaaa

SEQ ID NO: 426944 - RNA, 32 nt, Human
gaggggccagggaggaaggaggccacggagcg

SEQ ID NO: 426945 - RNA, 32 nt, Human
gaggggccaggggaucccucucucccuagugc

SEQ ID NO: 426946 - RNA, 32 nt, Human
gaggggccaugcugugugagaccaggggacca

SEQ ID NO: 426947 - RNA, 32 nt, Human
gaggggcccagccuggacugacuguacuuccu

SEQ ID NO: 426948 - RNA, 32 nt, Human
gaggggcccaggcugcagccugccacaccucc

SEQ ID NO: 426949 - RNA, 32 nt, Human
gaggggcccagggaagccugggugucaagugc

SEQ ID NO: 426950 - RNA, 32 nt, Human
gaggggccccacccugucucuuucaucaaacc

SEQ ID NO: 426951 - RNA, 32 nt, Human
gaggggccccggguccucucagucuuuccccu

SEQ ID NO: 426952 - RNA, 19 nt, Human
gaggggccccugcaggcac

SEQ ID NO: 426953 - RNA, 32 nt, Human
gaggggccccugcuucuccagccuggaccccc

SEQ ID NO: 426954 - RNA, 32 nt, Human
gaggggccccuggcccaggaggaggauugugc

SEQ ID NO: 426955 - RNA, 32 nt, Human
gaggggcccugaccacugugagcaggagggug

SEQ ID NO: 426956 - RNA, 32 nt, Human
gaggggcccugcaggcaggucuguggguucug

SEQ ID NO: 426957 - RNA, 32 nt, Human
gaggggcccugccuuccucaguagggagucaa

SEQ ID NO: 426958 - RNA, 32 nt, Human
gaggggccggagaagcagaaccagcugcauag

SEQ ID NO: 426959 - RNA, 19 nt, Human
gaggggccgggucuuggca

SEQ ID NO: 426960 - RNA, 32 nt, Human
gaggggccuaaccuagagcagguuuccauagu

SEQ ID NO: 426961 - RNA, 32 nt, Human
gaggggccuagacaaggcuccaggccccaccu

SEQ ID NO: 426962 - RNA, 32 nt, Human
gaggggccuaucuuccaagccccacccuaagg

SEQ ID NO: 426963 - RNA, 17 nt, Human
gaggggccugccaggga

SEQ ID NO: 426964 - RNA, 32 nt, Human
gaggggccugggagggaggagcuuggugcagc

SEQ ID NO: 426965 - RNA, 32 nt, Human
gaggggccuugugucugugccugccugucuga

SEQ ID NO: 426966 - RNA, 32 nt, Human
gaggggccuuucucaccuggagagaaacuucc

SEQ ID NO: 426967 - RNA, 32 nt, Human
gaggggccuuucucaccuggagagaaauuucc

SEQ ID NO: 426968 - RNA, 32 nt, Human
gaggggcggagcuuguggaggaagauggcugc

SEQ ID NO: 426969 - RNA, 32 nt, Human
gaggggcggccuggcccgggaccugcugcugc

SEQ ID NO: 426970 - RNA, 23 nt, Human
gaggggcgggagaaagggccugg

SEQ ID NO: 426971 - RNA, 22 nt, Human
gaggggcgggcucagagcuuug

SEQ ID NO: 426972 - RNA, 32 nt, Human
gaggggcgugaggaggggaggggcuguggacu

SEQ ID NO: 426973 - RNA, 19 nt, Human
gaggggcgugugcauggga

SEQ ID NO: 426974 - RNA, 22 nt, Human
gaggggcucagcacucauuagg

SEQ ID NO: 426975 - RNA, 32 nt, Human
gaggggcucagggcucucgaauugugauagua

SEQ ID NO: 426976 - RNA, 20 nt, Human
gaggggcucaguuuuacgca

SEQ ID NO: 426977 - RNA, 32 nt, Human
gaggggcuccggcuuucucugaaaugaacacu

SEQ ID NO: 426978 - RNA, 32 nt, Human
gaggggcucguguggccgccuaccucccccac

SEQ ID NO: 426979 - RNA, 32 nt, Human
gaggggcucugccacucccagccugggaauga

SEQ ID NO: 426980 - RNA, 32 nt, Human
gaggggcugcagccacacacucuuccccaccu

SEQ ID NO: 426981 - RNA, 32 nt, Human
gaggggcugccuggucuggggccugacaggcg

SEQ ID NO: 426982 - RNA, 20 nt, Human
gaggggcugcgccccaccag

SEQ ID NO: 426983 - RNA, 21 nt, Human
gaggggcugcuccaugcggca

SEQ ID NO: 426984 - RNA, 32 nt, Human
gaggggcugcuguggccagggugcacggucac

SEQ ID NO: 426985 - RNA, 32 nt, Human
gaggggcuggaggacuuccgcacgcuuccacc

SEQ ID NO: 426986 - RNA, 23 nt, Human
gaggggcugggccucucuuugca

SEQ ID NO: 426987 - RNA, 32 nt, Human
gaggggcuggggaaagggaugggagccaggaa

SEQ ID NO: 426988 - RNA, 32 nt, Human
gaggggcuggggaccggccaggaaggaggggu

SEQ ID NO: 426989 - RNA, 18 nt, Human
gaggggcuguccauggca

SEQ ID NO: 426990 - RNA, 32 nt, Human
gaggggcugugggccaggcugcucagacuccu

SEQ ID NO: 426991 - RNA, 32 nt, Human
gaggggcuguuucuuuuuccgugugggugguu

SEQ ID NO: 426992 - RNA, 32 nt, Human
gaggggcuucauaccagcugaagagcgacaag

SEQ ID NO: 426993 - RNA, 32 nt, Human
gaggggcuucucuuccuggcuggggcuggggu

SEQ ID NO: 426994 - RNA, 22 nt, Human
gaggggcuugcccuucacggca

SEQ ID NO: 426995 - RNA, 32 nt, Human
gaggggcuuuucucccccagaggcucagaacu

SEQ ID NO: 426996 - RNA, 19 nt, Human
gagggggaaaccagaagga

SEQ ID NO: 426997 - RNA, 19 nt, Human
gagggggaaaccgggggaa

SEQ ID NO: 426998 - RNA, 32 nt, Human
gagggggaacaguauggaaaagacuggaaggg

SEQ ID NO: 426999 - RNA, 20 nt, Human
gagggggaagaaacaaaaac

SEQ ID NO: 427000 - RNA, 32 nt, Human
gagggggaagccccauccucugacugaagcgg

SEQ ID NO: 427001 - RNA, 20 nt, Human
gagggggaagugaaagaaac

SEQ ID NO: 427002 - RNA, 17 nt, Human
gagggggacagauagga

SEQ ID NO: 427003 - RNA, 32 nt, Human
gagggggacuccaggaaaagccguugagagga

SEQ ID NO: 427004 - RNA, 32 nt, Human
gagggggacugcugcugccuggccacugcucc

SEQ ID NO: 427005 - RNA, 32 nt, Human
gagggggagagaagcagagggagagagaaggu

SEQ ID NO: 427006 - RNA, 19 nt, Human
gagggggagcaaacaggaa

SEQ ID NO: 427007 - RNA, 32 nt, Human
gagggggagcagguuugcggggccaaguguug

SEQ ID NO: 427008 - RNA, 18 nt, Human
gagggggagccgcggcgg

SEQ ID NO: 427009 - RNA, 20 nt, Human
gagggggagcuugcaggaac

SEQ ID NO: 427010 - RNA, 32 nt, Human
gagggggaggaaaaggagagggaagagguaga

SEQ ID NO: 427011 - RNA, 32 nt, Human
gagggggaggagaagagagaagaaacuggagc

SEQ ID NO: 427012 - RNA, 32 nt, Human
gagggggaggagaaggaggaagagggggagga

SEQ ID NO: 427013 - RNA, 32 nt, Human
gagggggaggagagagguaggagcuggagaug

SEQ ID NO: 427014 - RNA, 32 nt, Human
gagggggaggcaggaggauugcugucagccua

SEQ ID NO: 427015 - RNA, 32 nt, Human
gagggggagggaggggagacagagccuuuaac

SEQ ID NO: 427016 - RNA, 32 nt, Human
gagggggaggggcaggagcuuggaccuuggua

SEQ ID NO: 427017 - RNA, 32 nt, Human
gagggggaucgcuugaguccaggaguuugaga

SEQ ID NO: 427018 - RNA, 32 nt, Human
gagggggaugcagaggugaugcagcugggguc

SEQ ID NO: 427019 - RNA, 32 nt, Human
gagggggaugcuggagggaacagugaagugca

SEQ ID NO: 427020 - RNA, 32 nt, Human
gagggggcaagcuuugcuccuucaguucugcu

SEQ ID NO: 427021 - RNA, 32 nt, Human
gagggggcaccaugcagagauggcaguugcuu

SEQ ID NO: 427022 - RNA, 21 nt, Human
gagggggcagcuccgcggcgg

SEQ ID NO: 427023 - RNA, 32 nt, Human
gagggggcagggccagggcagggaggcuucca

SEQ ID NO: 427024 - RNA, 32 nt, Human
gagggggcaggugggagaccagccuggggcuc

SEQ ID NO: 427025 - RNA, 32 nt, Human
gagggggcaguuugcugugcucuguucugucu

SEQ ID NO: 427026 - RNA, 32 nt, Human
gagggggcaugccuggaaugaauggccagaau

SEQ ID NO: 427027 - RNA, 23 nt, Human
gagggggccugaagcuacaugca

SEQ ID NO: 427028 - RNA, 32 nt, Human
gagggggccugagacuggaccugggucugccu

SEQ ID NO: 427029 - RNA, 32 nt, Human
gagggggcggcagggcugggccuugugacaau

SEQ ID NO: 427030 - RNA, 32 nt, Human
gagggggcgggcaggugcagcggccgggcuag

SEQ ID NO: 427031 - RNA, 17 nt, Human
gagggggcuagaaggac

SEQ ID NO: 427032 - RNA, 32 nt, Human
gagggggcucaguucuggacuguggguuugug

SEQ ID NO: 427033 - RNA, 20 nt, Human
gagggggcucccagaaggac

SEQ ID NO: 427034 - RNA, 19 nt, Human
gagggggcugggaaagaac

SEQ ID NO: 427035 - RNA, 32 nt, Human
gagggggcugguugggagaggaaaggcuggaa

SEQ ID NO: 427036 - RNA, 32 nt, Human
gagggggcuucuaacagucugcuuuaaguggu

SEQ ID NO: 427037 - RNA, 32 nt, Human
gagggggcuuggcuuguccgggcgagguggga

SEQ ID NO: 427038 - RNA, 32 nt, Human
gagggggcuugguucucaggcccagccacauu

SEQ ID NO: 427039 - RNA, 32 nt, Human
gagggggcuuugcuggucuuucuuggacuauu

SEQ ID NO: 427040 - RNA, 18 nt, Human
gaggggggacagaaggac

SEQ ID NO: 427041 - RNA, 20 nt, Human
gaggggggacggagaggaac

SEQ ID NO: 427042 - RNA, 23 nt, Human
gaggggggaguggaggccugaga

SEQ ID NO: 427043 - RNA, 32 nt, Human
gaggggguagagggagccaggagcacuggguu

SEQ ID NO: 427044 - RNA, 32 nt, Human
gaggggguagugacaguggcagcugcuacuca

SEQ ID NO: 427045 - RNA, 23 nt, Human
gagggggucaaccuuggaccaaa

SEQ ID NO: 427046 - RNA, 32 nt, Human
gaggggguccagucaccagagagaccagccag

SEQ ID NO: 427047 - RNA, 21 nt, Human
gagggggucgaggagagccgg

SEQ ID NO: 427048 - RNA, 32 nt, Human
gagggggugagaggcaggaaugggggucagaa

SEQ ID NO: 427049 - RNA, 32 nt, Human
gagggggugagguggaauggggugggggaaca

SEQ ID NO: 427050 - RNA, 32 nt, Human
gaggggguggaggauacucucaucccaccucc

SEQ ID NO: 427051 - RNA, 32 nt, Human
gaggggguggggugggggagaauauaagaugu

SEQ ID NO: 427052 - RNA, 32 nt, Human
gagggggugggguggggugagaguguguggag

SEQ ID NO: 427053 - RNA, 32 nt, Human
gaggggguggguugggcggggguggggccggg

SEQ ID NO: 427054 - RNA, 19 nt, Human
gaggggguuucaccauguu

SEQ ID NO: 427055 - RNA, 20 nt, Human
gaggggguuucaucauguua

SEQ ID NO: 427056 - RNA, 32 nt, Human
gagggguaaacaagccaacagaaauuaaucag

SEQ ID NO: 427057 - RNA, 32 nt, Human
gagggguaacuugcaccucugaccuaucacuu

SEQ ID NO: 427058 - RNA, 32 nt, Human
gagggguagggcaagggccuucucaaugccuc

SEQ ID NO: 427059 - RNA, 22 nt, Human
gagggguagucgaagagcucug

SEQ ID NO: 427060 - RNA, 32 nt, Human
gagggguaugucuggcuccugagucagccacg

SEQ ID NO: 427061 - RNA, 32 nt, Human
gaggggucaaagaaggaggaggagggugggga

SEQ ID NO: 427062 - RNA, 18 nt, Human
gaggggucaacaaugaga

SEQ ID NO: 427063 - RNA, 19 nt, Human
gaggggucaccugagguca

SEQ ID NO: 427064 - RNA, 22 nt, Human
gaggggucagcggcgaauucuu

SEQ ID NO: 427065 - RNA, 32 nt, Human
gagggguccagccuguuccagccagugccuga

SEQ ID NO: 427066 - RNA, 18 nt, Human
gagggguccgcugggagg

SEQ ID NO: 427067 - RNA, 20 nt, Human
gagggguccuaggguguuuc

SEQ ID NO: 427068 - RNA, 32 nt, Human
gaggggucucuggaggcagacagggugggcug

SEQ ID NO: 427069 - RNA, 32 nt, Human
gaggggucugcaccuccugggagcaggugggu

SEQ ID NO: 427070 - RNA, 32 nt, Human
gaggggucuguuggggacgcugggagagucuc

SEQ ID NO: 427071 - RNA, 32 nt, Human
gaggggucuuuagauucugggaaaugucugau

SEQ ID NO: 427072 - RNA, 32 nt, Human
gaggggugaaggagauugguggaggagaguaa

SEQ ID NO: 427073 - RNA, 32 nt, Human
gaggggugagcagcagggagagugggaaggag

SEQ ID NO: 427074 - RNA, 32 nt, Human
gaggggugaggaggcaucagcaguugagcccc

SEQ ID NO: 427075 - RNA, 32 nt, Human
gaggggugccuuucauggacagugaugcuuug

SEQ ID NO: 427076 - RNA, 32 nt, Human
gaggggugcgugcgcgugugcccagcucgccu

SEQ ID NO: 427077 - RNA, 32 nt, Human
gaggggugcugggccuuggaccuucucccuug

SEQ ID NO: 427078 - RNA, 32 nt, Human
gagggguggaagggaucucuggggucuggaau

SEQ ID NO: 427079 - RNA, 32 nt, Human
gagggguggagggaaaugcaucggcacucauu

SEQ ID NO: 427080 - RNA, 32 nt, Human
gagggguggauuugcccuugacaugcagauag

SEQ ID NO: 427081 - RNA, 32 nt, Human
gagggguggcaaaaucacagguugcugggccu

SEQ ID NO: 427082 - RNA, 19 nt, Human
gagggguggcagacaggaa

SEQ ID NO: 427083 - RNA, 32 nt, Human
gagggguggccucugcugcuggauuucauguc

SEQ ID NO: 427084 - RNA, 32 nt, Human
gagggguggcgcgcggccaggagcacgcaugg

SEQ ID NO: 427085 - RNA, 32 nt, Human
gaggggugggcugugcucagggcaacacagcg

SEQ ID NO: 427086 - RNA, 32 nt, Human
gagggguggggagggggagggggaagugucug

SEQ ID NO: 427087 - RNA, 32 nt, Human
gaggggugggggccucccccuccugggugcaa

SEQ ID NO: 427088 - RNA, 19 nt, Human
gaggggugguggggggcag

SEQ ID NO: 427089 - RNA, 32 nt, Human
gaggggugucggccauuacggaggcuugaaua

SEQ ID NO: 427090 - RNA, 24 nt, Human
gagggguuaaagaagaggugggga

SEQ ID NO: 427091 - RNA, 32 nt, Human
gagggguuagcugugcguggggagagggugaa

SEQ ID NO: 427092 - RNA, 32 nt, Human
gagggguucgcugccagcaauugccaagcugc

SEQ ID NO: 427093 - RNA, 32 nt, Human
gagggguucuuuagggagugcuucuggggaac

SEQ ID NO: 427094 - RNA, 32 nt, Human
gagggguuggacccagggcugaggcaggcccc

SEQ ID NO: 427095 - RNA, 32 nt, Human
gagggguuggucuuggugucucagggauggca

SEQ ID NO: 427096 - RNA, 32 nt, Human
gagggguuguuggcugggcacgguggcucaug

SEQ ID NO: 427097 - RNA, 20 nt, Human
gagggguuucacaguguugg

SEQ ID NO: 427098 - RNA, 20 nt, Human
gagggguuucacuuuccucu

SEQ ID NO: 427099 - RNA, 21 nt, Human
gagggguuuggggacagggac

SEQ ID NO: 427100 - RNA, 19 nt, Human
gagggguuuggucucgggg

SEQ ID NO: 427101 - RNA, 32 nt, Human
gaggguacaacaguggcaucacagugacagug

SEQ ID NO: 427102 - RNA, 32 nt, Human
gaggguagacguguggggaaaauaaaucauua

SEQ ID NO: 427103 - RNA, 32 nt, Human
gaggguaggcgggugggaaugggguacuuggg

SEQ ID NO: 427104 - RNA, 32 nt, Human
gagggucaaccagcagcagaccagucacaaaa

SEQ ID NO: 427105 - RNA, 26 nt, Human
gagggucaaguggaggugcauauucc

SEQ ID NO: 427106 - RNA, 32 nt, Human
gagggucaauugugcgggauccuggccauucc

SEQ ID NO: 427107 - RNA, 32 nt, Human
gagggucacacagcauggucucucuggcagcg

SEQ ID NO: 427108 - RNA, 32 nt, Human
gagggucacagagcaggcugacccagaggccu

SEQ ID NO: 427109 - RNA, 19 nt, Human
gagggucacagagcguucc

SEQ ID NO: 427110 - RNA, 32 nt, Human
gagggucacugaccaggcagggccucugggua

SEQ ID NO: 427111 - RNA, 23 nt, Human
gagggucacuugaugccuggaga

SEQ ID NO: 427112 - RNA, 32 nt, Human
gagggucagagcuggcucuggggagcugggcu

SEQ ID NO: 427113 - RNA, 21 nt, Human
gagggucagccucuguccccu

SEQ ID NO: 427114 - RNA, 32 nt, Human
gagggucagcggcggggaguccuggccuucaa

SEQ ID NO: 427115 - RNA, 32 nt, Human
gagggucaggagagaaugggggaggaggcggu

SEQ ID NO: 427116 - RNA, 32 nt, Human
gagggucagggaccugagcugaccccaggcuu

SEQ ID NO: 427117 - RNA, 32 nt, Human
gagggucagggcuggccuuccucugugcauca

SEQ ID NO: 427118 - RNA, 18 nt, Human
gagggucaucaccaggug

SEQ ID NO: 427119 - RNA, 32 nt, Human
gaggguccagaaggagggggugaccuccggcc

SEQ ID NO: 427120 - RNA, 32 nt, Human
gaggguccagagagaagggagugggugggcag

SEQ ID NO: 427121 - RNA, 32 nt, Human
gaggguccagagagccggcaggaggggacccu

SEQ ID NO: 427122 - RNA, 32 nt, Human
gaggguccagcagaaggaaacauggcugccaa

SEQ ID NO: 427123 - RNA, 32 nt, Human
gagggucccaaaggagcugccccagagcaccc

SEQ ID NO: 427124 - RNA, 32 nt, Human
gagggucccagaggaacgcuggagccaagaga

SEQ ID NO: 427125 - RNA, 32 nt, Human
gagggucccagaggggcugaguccucaaaucc

SEQ ID NO: 427126 - RNA, 32 nt, Human
gaggguccccagagaagacuggcggggaccug

SEQ ID NO: 427127 - RNA, 32 nt, Human
gagggucccugcaggcucccugggcagggaga

SEQ ID NO: 427128 - RNA, 22 nt, Human
gaggguccggcgcggccccggg

SEQ ID NO: 427129 - RNA, 32 nt, Human
gaggguccuccacacccucugccgacuaccac

SEQ ID NO: 427130 - RNA, 32 nt, Human
gaggguccuccaggguccugaagagcacugga

SEQ ID NO: 427131 - RNA, 32 nt, Human
gaggguccugguuccuccucccaccaacccca

SEQ ID NO: 427132 - RNA, 32 nt, Human
gaggguccuucccacaccuuuguuuaggaguc

SEQ ID NO: 427133 - RNA, 32 nt, Human
gagggucgagcagcaggggcccauucaguccc

SEQ ID NO: 427134 - RNA, 32 nt, Human
gagggucgagccgaagucuccggcgggccgca

SEQ ID NO: 427135 - RNA, 23 nt, Human
gagggucgggagaaacgcugcuc

SEQ ID NO: 427136 - RNA, 32 nt, Human
gagggucuccaucgccgucuccagcucagagc

SEQ ID NO: 427137 - RNA, 32 nt, Human
gagggucugagcuguaucugcugguggcuuau

SEQ ID NO: 427138 - RNA, 32 nt, Human
gagggucugaggacgcagggaggguggaggug

SEQ ID NO: 427139 - RNA, 32 nt, Human
gagggucugccuccccuuccucgcccuguguc

SEQ ID NO: 427140 - RNA, 32 nt, Human
gagggucugcucccacugcagcucccggugcu

SEQ ID NO: 427141 - RNA, 32 nt, Human
gagggucuggguccaguuagggacauggaggc

SEQ ID NO: 427142 - RNA, 32 nt, Human
gagggucuuauugccauugucuuuuccucugc

SEQ ID NO: 427143 - RNA, 32 nt, Human
gagggucuucgggugcuucccagcacaagcug

SEQ ID NO: 427144 - RNA, 32 nt, Human
gagggucuuuauacaucucuccuccaacccca

SEQ ID NO: 427145 - RNA, 32 nt, Human
gagggucuuuuucuccugccuucuccuggaga

SEQ ID NO: 427146 - RNA, 32 nt, Human
gagggugaacuggggacccugcacccuccggg

SEQ ID NO: 427147 - RNA, 32 nt, Human
gagggugaaggugggacgggaggcgggagggg

SEQ ID NO: 427148 - RNA, 32 nt, Human
gagggugaaugaagggcaugcaggcccucagc

SEQ ID NO: 427149 - RNA, 32 nt, Human
gagggugaaugccugcagaugagaaccagccg

SEQ ID NO: 427150 - RNA, 22 nt, Human
gagggugacauacagcguuucc

SEQ ID NO: 427151 - RNA, 20 nt, Human
gagggugacauagcuagaaa

SEQ ID NO: 427152 - RNA, 32 nt, Human
gagggugacaugucccugagggcacagaaacu

SEQ ID NO: 427153 - RNA, 32 nt, Human
gagggugaccacaccuuggccuucugggaacu

SEQ ID NO: 427154 - RNA, 32 nt, Human
gagggugacuccaaggcagcugagcugaucgc

SEQ ID NO: 427155 - RNA, 23 nt, Human
gagggugagagggugccguuucc

SEQ ID NO: 427156 - RNA, 32 nt, Human
gagggugaggcagguggaucaccugaggucgg

SEQ ID NO: 427157 - RNA, 32 nt, Human
gagggugagggagugaguguucaaggaggaag

SEQ ID NO: 427158 - RNA, 32 nt, Human
gagggugagggcaagaggacugaugguuacug

SEQ ID NO: 427159 - RNA, 32 nt, Human
gagggugagggguuuggggaaaggggaagcag

SEQ ID NO: 427160 - RNA, 32 nt, Human
gagggugaggugggaggaucaccugaggucga

SEQ ID NO: 427161 - RNA, 32 nt, Human
gagggugcacacacagccaugagcccaccugc

SEQ ID NO: 427162 - RNA, 32 nt, Human
gagggugcagaacgaaccacucgaaaacgagu

SEQ ID NO: 427163 - RNA, 32 nt, Human
gagggugcaggcaggagagggaaaggcagcag

SEQ ID NO: 427164 - RNA, 32 nt, Human
gagggugcccuccuagcuccacccucaccagg

SEQ ID NO: 427165 - RNA, 23 nt, Human
gagggugccgcgagcccaggcgg

SEQ ID NO: 427166 - RNA, 32 nt, Human
gagggugccguggcucacaccuguaaucccag

SEQ ID NO: 427167 - RNA, 32 nt, Human
gagggugccuguaaucccagcuccuugggagg

SEQ ID NO: 427168 - RNA, 32 nt, Human
gagggugcgccacuuucagagccucuggucac

SEQ ID NO: 427169 - RNA, 32 nt, Human
gagggugcucacugaggagcagccaggugcau

SEQ ID NO: 427170 - RNA, 32 nt, Human
gagggugcuccaccccuugcuggccccacucc

SEQ ID NO: 427171 - RNA, 32 nt, Human
gagggugcuggggcagccacuggugaggaggg

SEQ ID NO: 427172 - RNA, 32 nt, Human
gaggguggaagaggagaggguggaaggggaau

SEQ ID NO: 427173 - RNA, 32 nt, Human
gaggguggaccaaugagguugccguggugacg

SEQ ID NO: 427174 - RNA, 21 nt, Human
gaggguggagaaucgcuugaa

SEQ ID NO: 427175 - RNA, 32 nt, Human
gaggguggagaguccugcaucauagccaccaa

SEQ ID NO: 427176 - RNA, 32 nt, Human
gaggguggagcaggaggcucucacuggugagu

SEQ ID NO: 427177 - RNA, 32 nt, Human
gaggguggagccagguagaugcagcgguagca

SEQ ID NO: 427178 - RNA, 24 nt, Human
gaggguggagccgagcggugcgga

SEQ ID NO: 427179 - RNA, 32 nt, Human
gaggguggagccuccuggaagugaccagagcc

SEQ ID NO: 427180 - RNA, 32 nt, Human
gaggguggaggacagcagggaggaaggcuccu

SEQ ID NO: 427181 - RNA, 32 nt, Human
gaggguggaggagggagcaggaacagccccug

SEQ ID NO: 427182 - RNA, 32 nt, Human
gaggguggagugaggccccugcagagcugcug

SEQ ID NO: 427183 - RNA, 32 nt, Human
gaggguggauuucuugagcccagggguuugag

SEQ ID NO: 427184 - RNA, 32 nt, Human
gaggguggcaggcagugguuguggcaguggag

SEQ ID NO: 427185 - RNA, 32 nt, Human
gaggguggcagugagcuggcacuuuggucuca

SEQ ID NO: 427186 - RNA, 21 nt, Human
gaggguggccacagaggcgga

SEQ ID NO: 427187 - RNA, 31 nt, Human
gaggguggccucucuguggugguguguuggu

SEQ ID NO: 427188 - RNA, 32 nt, Human
gaggguggcugaggcuguugugcaguagggca

SEQ ID NO: 427189 - RNA, 20 nt, Human
gaggguggcugcugagcggg

SEQ ID NO: 427190 - RNA, 22 nt, Human
gaggguggcuggaaguucgaga

SEQ ID NO: 427191 - RNA, 32 nt, Human
gaggguggcuugagcccgggaggcagagguug

SEQ ID NO: 427192 - RNA, 32 nt, Human
gagggugggaaagaccuuggaaagugggaugg

SEQ ID NO: 427193 - RNA, 32 nt, Human
gagggugggaggcagaaaagaggcacaggugg

SEQ ID NO: 427194 - RNA, 32 nt, Human
gagggugggaggugggauuuagccaggaaagg

SEQ ID NO: 427195 - RNA, 32 nt, Human
gagggugggcaccagauggggaccagccuugc

SEQ ID NO: 427196 - RNA, 32 nt, Human
gagggugggcucuauauuuucauuccaaauaa

SEQ ID NO: 427197 - RNA, 32 nt, Human
gaggguggggcagagguugggaagauggcgug

SEQ ID NO: 427198 - RNA, 32 nt, Human
gagggugggucaccagcagaagaagccgaacc

SEQ ID NO: 427199 - RNA, 32 nt, Human
gaggguggguggagggguuugcagugugggaa

SEQ ID NO: 427200 - RNA, 32 nt, Human
gagggugguagaggagauaagacaguagggaa

SEQ ID NO: 427201 - RNA, 32 nt, Human
gagggugguagccccuccccagccuucuuucu

SEQ ID NO: 427202 - RNA, 32 nt, Human
gaggguggugggaggggaucaccuggguucca

SEQ ID NO: 427203 - RNA, 22 nt, Human
gagggugguuacugugggugga

SEQ ID NO: 427204 - RNA, 23 nt, Human
gagggugguugggauacaccgga

SEQ ID NO: 427205 - RNA, 32 nt, Human
gaggguguccuaaagauccugauguccaugac

SEQ ID NO: 427206 - RNA, 32 nt, Human
gagggugucugcacuaaggauuuagaaacacu

SEQ ID NO: 427207 - RNA, 32 nt, Human
gagggugucugggcuuaagcauguggaccccu

SEQ ID NO: 427208 - RNA, 32 nt, Human
gagggugugaugucuguagcuauguggaaggu

SEQ ID NO: 427209 - RNA, 24 nt, Human
gaggguguggacuggcauccagca

SEQ ID NO: 427210 - RNA, 32 nt, Human
gaggguguggugagccgggaucgcaccgcugc

SEQ ID NO: 427211 - RNA, 32 nt, Human
gaggguuaaaugggaugaggucauguaucugc

SEQ ID NO: 427212 - RNA, 32 nt, Human
gaggguuacaugcacaacaauuacaccgccuu

SEQ ID NO: 427213 - RNA, 32 nt, Human
gaggguucacucuucuuguuguacaugcugug

SEQ ID NO: 427214 - RNA, 32 nt, Human
gaggguucauauuuaauauauguguucaugug

SEQ ID NO: 427215 - RNA, 32 nt, Human
gaggguuccgggaaaagagcagaggaaagagg

SEQ ID NO: 427216 - RNA, 32 nt, Human
gaggguucugggugggaguggggagggcgagg

SEQ ID NO: 427217 - RNA, 32 nt, Human
gaggguugagccacccacuugccauuugcucc

SEQ ID NO: 427218 - RNA, 32 nt, Human
gaggguuggggaggggcggcaggagggagguu

SEQ ID NO: 427219 - RNA, 32 nt, Human
gaggguugugccaagguauugaugacaaaugg

SEQ ID NO: 427220 - RNA, 32 nt, Human
gaggguuuagaagaaacgcaggaacauucugg

SEQ ID NO: 427221 - RNA, 32 nt, Human
gaggguuucuucucacacaucaaacaagcaag

SEQ ID NO: 427222 - RNA, 32 nt, Human
gaggguuugccuggaaguuaagagaguggcau

SEQ ID NO: 427223 - RNA, 32 nt, Human
gaggguuuuagaaaccgguugccuuagagguu

SEQ ID NO: 427224 - RNA, 32 nt, Human
gagguaaaagagacaucugcagugugacagaa

SEQ ID NO: 427225 - RNA, 26 nt, Human
gagguaaaagugugagcagugaguua

SEQ ID NO: 427226 - RNA, 32 nt, Human
gagguaaagauggaccagugggauuugcugau

SEQ ID NO: 427227 - RNA, 32 nt, Human
gagguaaaggguggggcauugagaauggaggc

SEQ ID NO: 427228 - RNA, 32 nt, Human
gagguaacuccaauucuugcacaaacacaaag

SEQ ID NO: 427229 - RNA, 32 nt, Human
gagguaagaaguuugagacuagccuggguccc

SEQ ID NO: 427230 - RNA, 32 nt, Human
gagguaagauggcaccacuacacuccagcccg

SEQ ID NO: 427231 - RNA, 32 nt, Human
gagguaagcacagcuggugagcacacggggac

SEQ ID NO: 427232 - RNA, 25 nt, Human
gagguaagcuaauuaaugcagugaa

SEQ ID NO: 427233 - RNA, 32 nt, Human
gagguaaggaguuugagaccagccuggccaac

SEQ ID NO: 427234 - RNA, 32 nt, Human
gagguaagucaaggaauagggguggcuucuag

SEQ ID NO: 427235 - RNA, 32 nt, Human
gagguaaguguauuguuucucacuuugauuag

SEQ ID NO: 427236 - RNA, 32 nt, Human
gagguaaugauccugagaccacucccuaauaa

SEQ ID NO: 427237 - RNA, 32 nt, Human
gagguaauuauagggauuuuagcaauaacauu

SEQ ID NO: 427238 - RNA, 31 nt, Human
gagguaauucacuucuuauuccuuuccaaua

SEQ ID NO: 427239 - RNA, 32 nt, Human
gagguacacaguucaauccaucuggaaggugg

SEQ ID NO: 427240 - RNA, 32 nt, Human
gagguacagaggccaggggcccagggcaggac

SEQ ID NO: 427241 - RNA, 32 nt, Human
gagguacaggcaggggcaggcaggaccaccag

SEQ ID NO: 427242 - RNA, 32 nt, Human
gagguaccagugccaugggaagggcccaggaa

SEQ ID NO: 427243 - RNA, 32 nt, Human
gagguaccccaggagcacuguuacaaauccuu

SEQ ID NO: 427244 - RNA, 24 nt, Human
gagguacgaucaagccacugcacu

SEQ ID NO: 427245 - RNA, 32 nt, Human
gagguacggggccauccagccugugaaugacc

SEQ ID NO: 427246 - RNA, 32 nt, Human
gagguacuaaaugcgauucaguucaccgcuaa

SEQ ID NO: 427247 - RNA, 32 nt, Human
gagguacugcagcuuccuccacagccggcugu

SEQ ID NO: 427248 - RNA, 32 nt, Human
gagguacuggggacacaggaaggacgaggcag

SEQ ID NO: 427249 - RNA, 32 nt, Human
gagguacuucucagcccucuagcuccaacuga

SEQ ID NO: 427250 - RNA, 32 nt, Human
gagguagaagaggggaaggaagaugguuucua

SEQ ID NO: 427251 - RNA, 32 nt, Human
gagguagaagcagauagaagguaauuuuaaag

SEQ ID NO: 427252 - RNA, 21 nt, Human
gagguagaaguugcagugagc

SEQ ID NO: 427253 - RNA, 32 nt, Human
gagguagaauacuuucauuauucuugcagcua

SEQ ID NO: 427254 - RNA, 32 nt, Human
gagguagacaguguuuccuuaauauggcugca

SEQ ID NO: 427255 - RNA, 32 nt, Human
gagguagagaguuugagaccagccuggccaac

SEQ ID NO: 427256 - RNA, 21 nt, Human
gagguagagauugcaaugagc

SEQ ID NO: 427257 - RNA, 32 nt, Human
gagguagagcccacugaagaaggagcagaaua

SEQ ID NO: 427258 - RNA, 21 nt, Human
gagguagaggcugcaaugggc

SEQ ID NO: 427259 - RNA, 21 nt, Human
gagguagaggcugcagugagc

SEQ ID NO: 427260 - RNA, 32 nt, Human
gagguagaggcugcagugagcuaugaucacac

SEQ ID NO: 427261 - RNA, 23 nt, Human
gagguagaggcugcagugagcug

SEQ ID NO: 427262 - RNA, 21 nt, Human
gagguagaggcugcauugagc

SEQ ID NO: 427263 - RNA, 32 nt, Human
gagguagagggccaggaugguggugggggacc

SEQ ID NO: 427264 - RNA, 21 nt, Human
gagguagagguuacagcgagc

SEQ ID NO: 427265 - RNA, 21 nt, Human
gagguagagguugcagugagc

SEQ ID NO: 427266 - RNA, 32 nt, Human
gagguagagguugcagugagccaaggucacac

SEQ ID NO: 427267 - RNA, 32 nt, Human
gagguagagucagaguagggaaaacaacuaau

SEQ ID NO: 427268 - RNA, 32 nt, Human
gagguagauguggcugaggagggacagaugaa

SEQ ID NO: 427269 - RNA, 32 nt, Human
gagguagauguuugguacauuuuauggcuccc

SEQ ID NO: 427270 - RNA, 32 nt, Human
gagguagcaaggccacuggguugcuauccucu

SEQ ID NO: 427271 - RNA, 32 nt, Human
gagguagcagcccuggguucuccucagugagg

SEQ ID NO: 427272 - RNA, 32 nt, Human
gagguagcagucugggacucaagggugggucu

SEQ ID NO: 427273 - RNA, 32 nt, Human
gagguagcagugagccgagaucacuccacugc

SEQ ID NO: 427274 - RNA, 32 nt, Human
gagguagcagugagccgagaucgcgccacugc

SEQ ID NO: 427275 - RNA, 32 nt, Human
gagguagccgagccucucaagcagaccuacaa

SEQ ID NO: 427276 - RNA, 32 nt, Human
gagguagccgagccucucaaggcagaccuaca

SEQ ID NO: 427277 - RNA, 32 nt, Human
gagguagcugcucuccccacugagagcugagc

SEQ ID NO: 427278 - RNA, 32 nt, Human
gagguagcuuucucagagccccuuggugguuc

SEQ ID NO: 427279 - RNA, 32 nt, Human
gagguaggagaaucacuugaaccucagcggcg

SEQ ID NO: 427280 - RNA, 32 nt, Human
gagguaggaggcggagguggggguggggguag

SEQ ID NO: 427281 - RNA, 32 nt, Human
gagguaggagucagggaaccccagagacaugc

SEQ ID NO: 427282 - RNA, 22 nt, Human
gagguaggcagaucacgagguc

SEQ ID NO: 427283 - RNA, 32 nt, Human
gagguaggcagaucacuugagcucaagaguuc

SEQ ID NO: 427284 - RNA, 30 nt, Human
gagguaggcagccaaagggcacagaacccu

SEQ ID NO: 427285 - RNA, 32 nt, Human
gagguaggccggaagugguguugcggagggaa

SEQ ID NO: 427286 - RNA, 25 nt, Human
gagguagggcagugggcucugcagg

SEQ ID NO: 427287 - RNA, 32 nt, Human
gagguagggcucagagagguuuaguuacuuuc

SEQ ID NO: 427288 - RNA, 19 nt, Human
gagguaggugaacauucca

SEQ ID NO: 427289 - RNA, 32 nt, Human
gagguagguuuuagagcuagucuucuaacucg

SEQ ID NO: 427290 - RNA, 32 nt, Human
gagguaguagugagcugaagucccgccacugc

SEQ ID NO: 427291 - RNA, 32 nt, Human
gagguagugauacugucuucuagaauagcuac

SEQ ID NO: 427292 - RNA, 32 nt, Human
gagguaguggugagcaaagaucguaccgcugc

SEQ ID NO: 427293 - RNA, 32 nt, Human
gagguaguucugacacugucucaguuuugcag

SEQ ID NO: 427294 - RNA, 32 nt, Human
gagguauaacgaggaggagaagaaaugggagg

SEQ ID NO: 427295 - RNA, 22 nt, Human
gagguauaaguuucaaaccagu

SEQ ID NO: 427296 - RNA, 32 nt, Human
gagguauaguugggggacaggggucuggguuu

SEQ ID NO: 427297 - RNA, 21 nt, Human
gagguauaucgaugauggaaa

SEQ ID NO: 427298 - RNA, 32 nt, Human
gagguaucacugcagucaccucuucuacccuc

SEQ ID NO: 427299 - RNA, 32 nt, Human
gagguauccaacagggcagcacaugguccucc

SEQ ID NO: 427300 - RNA, 32 nt, Human
gagguauccugaagcaaaagacaggaguucuc

SEQ ID NO: 427301 - RNA, 20 nt, Human
gagguaucuuacuuuccucu

SEQ ID NO: 427302 - RNA, 32 nt, Human
gagguaugaacuguauuucucauugcaaauac

SEQ ID NO: 427303 - RNA, 24 nt, Human
gagguaugaucaugccacugcacu

SEQ ID NO: 427304 - RNA, 24 nt, Human
gagguaugaucgcgccacugcacu

SEQ ID NO: 427305 - RNA, 32 nt, Human
gagguauggaaagaaccaugcagaggaauauu

SEQ ID NO: 427306 - RNA, 32 nt, Human
gagguauggagccuccaucaucaugcucuuuu

SEQ ID NO: 427307 - RNA, 32 nt, Human
gagguauggugggucagugagaacaaagccag

SEQ ID NO: 427308 - RNA, 32 nt, Human
gagguauguggacaaguagaaggugagcaagg

SEQ ID NO: 427309 - RNA, 32 nt, Human
gagguauugaaggacaggagagaugucaggug

SEQ ID NO: 427310 - RNA, 23 nt, Human
gaggucaacccccacaaucagcu

SEQ ID NO: 427311 - RNA, 32 nt, Human
gaggucaacguaggaggaucacuugaguucaa

SEQ ID NO: 427312 - RNA, 32 nt, Human
gaggucaagacaauuuaauuuauuuacaugcu

SEQ ID NO: 427313 - RNA, 32 nt, Human
gaggucaagagaucgagaccagccuggccaac

SEQ ID NO: 427314 - RNA, 25 nt, Human
gaggucaagaguuccagaccaggcu

SEQ ID NO: 427315 - RNA, 23 nt, Human
gaggucaagaguuucagaccagc

SEQ ID NO: 427316 - RNA, 32 nt, Human
gaggucaagaguuugagaccagccuggccaac

SEQ ID NO: 427317 - RNA, 24 nt, Human
gaggucaagaguuugagaccagcu

SEQ ID NO: 427318 - RNA, 32 nt, Human
gaggucaagauaaaugcagaaaauguuuagag

SEQ ID NO: 427319 - RNA, 22 nt, Human
gaggucaaggcaggaagaucac

SEQ ID NO: 427320 - RNA, 21 nt, Human
gaggucaaggcugcagugagc

SEQ ID NO: 427321 - RNA, 32 nt, Human
gaggucaaggcugcagugagccauguucauga

SEQ ID NO: 427322 - RNA, 22 nt, Human
gaggucaagguagguggaucac

SEQ ID NO: 427323 - RNA, 32 nt, Human
gaggucaagucggguggaucaccugaggucaa

SEQ ID NO: 427324 - RNA, 32 nt, Human
gaggucaauaguucgagaccagccuggccaac

SEQ ID NO: 427325 - RNA, 32 nt, Human
gaggucacaaguucaagaccagccuggcaaac

SEQ ID NO: 427326 - RNA, 32 nt, Human
gaggucacaccgcugcacuccagccugggcaa

SEQ ID NO: 427327 - RNA, 32 nt, Human
gaggucacaggcaggcagucugcagaccagau

SEQ ID NO: 427328 - RNA, 32 nt, Human
gaggucacagugagcugugauugcaccacuug

SEQ ID NO: 427329 - RNA, 32 nt, Human
gaggucaccaggcggaggcgcggagaugcccc

SEQ ID NO: 427330 - RNA, 18 nt, Human
gaggucaccccgcgcccg

SEQ ID NO: 427331 - RNA, 32 nt, Human
gaggucaccgggaugggggaaguggccucugu

SEQ ID NO: 427332 - RNA, 32 nt, Human
gaggucacgaguuggagaccagccuggccaag

SEQ ID NO: 427333 - RNA, 32 nt, Human
gaggucacuccaccauccccaccccaccccac

SEQ ID NO: 427334 - RNA, 32 nt, Human
gaggucacugaagacugugauuacaugcaccu

SEQ ID NO: 427335 - RNA, 32 nt, Human
gaggucacugcaaccuccaccucccggguuca

SEQ ID NO: 427336 - RNA, 32 nt, Human
gaggucacugcugagcuucagugagcacccau

SEQ ID NO: 427337 - RNA, 20 nt, Human
gaggucacuguggaugucua

SEQ ID NO: 427338 - RNA, 32 nt, Human
gaggucagaaagagauagaauuuggaaccagu

SEQ ID NO: 427339 - RNA, 32 nt, Human
gaggucagaaguccaagaccagccuggccaac

SEQ ID NO: 427340 - RNA, 32 nt, Human
gaggucagaaguuugaaaccagccuggacuac

SEQ ID NO: 427341 - RNA, 32 nt, Human
gaggucagaaguuugagaccagccuggccaac

SEQ ID NO: 427342 - RNA, 32 nt, Human
gaggucagaaguuugagaccagccuggccaau

SEQ ID NO: 427343 - RNA, 32 nt, Human
gaggucagacguuugagaccagccuggccaac

SEQ ID NO: 427344 - RNA, 32 nt, Human
gaggucagacuggagugaauguuguaaaaguu

SEQ ID NO: 427345 - RNA, 32 nt, Human
gaggucagacuggcuaggcugcagggggaauu

SEQ ID NO: 427346 - RNA, 23 nt, Human
gaggucagagcugucuugugcca

SEQ ID NO: 427347 - RNA, 32 nt, Human
gaggucagaguuccgucauuuugcauuacuug

SEQ ID NO: 427348 - RNA, 32 nt, Human
gaggucagcagaauauacucagugauggaaga

SEQ ID NO: 427349 - RNA, 32 nt, Human
gaggucagcaguuugagaccagccuggccaac

SEQ ID NO: 427350 - RNA, 32 nt, Human
gaggucagccuccuccgaagcuucaucucuug

SEQ ID NO: 427351 - RNA, 25 nt, Human
gaggucaggaaaaacacuggcuggg

SEQ ID NO: 427352 - RNA, 32 nt, Human
gaggucaggaauucaaaaccagccuggccaac

SEQ ID NO: 427353 - RNA, 32 nt, Human
gaggucaggaauuugagaccagccuggccaau

SEQ ID NO: 427354 - RNA, 23 nt, Human
gaggucaggacuuccagaccagc

SEQ ID NO: 427355 - RNA, 32 nt, Human
gaggucaggacuuugagaccagccuggccaac

SEQ ID NO: 427356 - RNA, 24 nt, Human
gaggucaggagacugagaccagcu

SEQ ID NO: 427357 - RNA, 24 nt, Human
gaggucaggagaucaagaccaucu

SEQ ID NO: 427358 - RNA, 32 nt, Human
gaggucaggagaucgagaacagccuggcuaac

SEQ ID NO: 427359 - RNA, 21 nt, Human
gaggucaggagaucgagacca

SEQ ID NO: 427360 - RNA, 23 nt, Human
gaggucaggagaucgagaccagc

SEQ ID NO: 427361 - RNA, 24 nt, Human
gaggucaggagaucgagaccaucu

SEQ ID NO: 427362 - RNA, 23 nt, Human
gaggucaggagaucgagaucagc

SEQ ID NO: 427363 - RNA, 23 nt, Human
gaggucaggagauugagaccagc

SEQ ID NO: 427364 - RNA, 32 nt, Human
gaggucaggagauugagaccagccuggccaac

SEQ ID NO: 427365 - RNA, 22 nt, Human
gaggucaggagcacaucgggcu

SEQ ID NO: 427366 - RNA, 32 nt, Human
gaggucaggagccuggccaacauagcgaaacc

SEQ ID NO: 427367 - RNA, 23 nt, Human
gaggucaggagcucaagaccagc

SEQ ID NO: 427368 - RNA, 23 nt, Human
gaggucaggagcuccagaccagc

SEQ ID NO: 427369 - RNA, 23 nt, Human
gaggucaggagcucgagaccagc

SEQ ID NO: 427370 - RNA, 24 nt, Human
gaggucaggagcucgagaccagcu

SEQ ID NO: 427371 - RNA, 32 nt, Human
gaggucaggagcuugaaaccagccuggccaac

SEQ ID NO: 427372 - RNA, 23 nt, Human
gaggucaggagcuugagaccagc

SEQ ID NO: 427373 - RNA, 32 nt, Human
gaggucaggagcuugagaccagccuggccaaa

SEQ ID NO: 427374 - RNA, 22 nt, Human
gaggucaggagggcuggcagcu

SEQ ID NO: 427375 - RNA, 23 nt, Human
gaggucaggaggucaagaccagc

SEQ ID NO: 427376 - RNA, 32 nt, Human
gaggucaggagguggaagugagaggagauccc

SEQ ID NO: 427377 - RNA, 23 nt, Human
gaggucaggaguacgagaucagc

SEQ ID NO: 427378 - RNA, 23 nt, Human
gaggucaggagucaggagucgcu

SEQ ID NO: 427379 - RNA, 23 nt, Human
gaggucaggaguccaagaccagc

SEQ ID NO: 427380 - RNA, 23 nt, Human
gaggucaggaguuaaacaccagc

SEQ ID NO: 427381 - RNA, 23 nt, Human
gaggucaggaguuagaggccagc

SEQ ID NO: 427382 - RNA, 23 nt, Human
gaggucaggaguucaaaaccagc

SEQ ID NO: 427383 - RNA, 23 nt, Human
gaggucaggaguucaacaccagc

SEQ ID NO: 427384 - RNA, 23 nt, Human
gaggucaggaguucaacaucagc

SEQ ID NO: 427385 - RNA, 20 nt, Human
gaggucaggaguucaagacc

SEQ ID NO: 427386 - RNA, 23 nt, Human
gaggucaggaguucaagaccagc

SEQ ID NO: 427387 - RNA, 24 nt, Human
gaggucaggaguucaagaccagcu

SEQ ID NO: 427388 - RNA, 23 nt, Human
gaggucaggaguucaagaccagu

SEQ ID NO: 427389 - RNA, 23 nt, Human
gaggucaggaguucaagacuagc

SEQ ID NO: 427390 - RNA, 20 nt, Human
gaggucaggaguucaagagc

SEQ ID NO: 427391 - RNA, 23 nt, Human
gaggucaggaguucaagaucagc

SEQ ID NO: 427392 - RNA, 23 nt, Human
gaggucaggaguucaagauuagc

SEQ ID NO: 427393 - RNA, 23 nt, Human
gaggucaggaguucaaggccagc

SEQ ID NO: 427394 - RNA, 23 nt, Human
gaggucaggaguucaauaccagc

SEQ ID NO: 427395 - RNA, 23 nt, Human
gaggucaggaguucacgaccagc

SEQ ID NO: 427396 - RNA, 23 nt, Human
gaggucaggaguuccagaccagc

SEQ ID NO: 427397 - RNA, 23 nt, Human
gaggucaggaguuccuaaccagc

SEQ ID NO: 427398 - RNA, 23 nt, Human
gaggucaggaguucgaaaccagc

SEQ ID NO: 427399 - RNA, 24 nt, Human
gaggucaggaguucgaaacucguu

SEQ ID NO: 427400 - RNA, 23 nt, Human
gaggucaggaguucgaagucagc

SEQ ID NO: 427401 - RNA, 23 nt, Human
gaggucaggaguucgagaccagc

SEQ ID NO: 427402 - RNA, 24 nt, Human
gaggucaggaguucgagaccagcu

SEQ ID NO: 427403 - RNA, 32 nt, Human
gaggucaggaguucgagaccagcugggcaaca

SEQ ID NO: 427404 - RNA, 23 nt, Human
gaggucaggaguucgagaccagu

SEQ ID NO: 427405 - RNA, 23 nt, Human
gaggucaggaguucgagaccggc

SEQ ID NO: 427406 - RNA, 23 nt, Human
gaggucaggaguucgagacuagc

SEQ ID NO: 427407 - RNA, 24 nt, Human
gaggucaggaguucgagacuagcu

SEQ ID NO: 427408 - RNA, 32 nt, Human
gaggucaggaguucgagagcagccuggccaac

SEQ ID NO: 427409 - RNA, 32 nt, Human
gaggucaggaguucgagagcagccuggccaau

SEQ ID NO: 427410 - RNA, 23 nt, Human
gaggucaggaguucgagaucagc

SEQ ID NO: 427411 - RNA, 23 nt, Human
gaggucaggaguucgagcccagc

SEQ ID NO: 427412 - RNA, 23 nt, Human
gaggucaggaguucgaggccagc

SEQ ID NO: 427413 - RNA, 20 nt, Human
gaggucaggaguucgagggc

SEQ ID NO: 427414 - RNA, 23 nt, Human
gaggucaggaguucgaguccagc

SEQ ID NO: 427415 - RNA, 23 nt, Human
gaggucaggaguucgauaccagc

SEQ ID NO: 427416 - RNA, 23 nt, Human
gaggucaggaguucgcaaccagc

SEQ ID NO: 427417 - RNA, 23 nt, Human
gaggucaggaguucgcgaccagc

SEQ ID NO: 427418 - RNA, 23 nt, Human
gaggucaggaguucgggaccagc

SEQ ID NO: 427419 - RNA, 23 nt, Human
gaggucaggaguucuagaccagc

SEQ ID NO: 427420 - RNA, 23 nt, Human
gaggucaggaguugaagaccagc

SEQ ID NO: 427421 - RNA, 32 nt, Human
gaggucaggaguugaagaccagccuggccaac

SEQ ID NO: 427422 - RNA, 23 nt, Human
gaggucaggaguuggagaccagc

SEQ ID NO: 427423 - RNA, 32 nt, Human
gaggucaggaguuggagaccagccuggccaac

SEQ ID NO: 427424 - RNA, 23 nt, Human
gaggucaggaguuggagaccagu

SEQ ID NO: 427425 - RNA, 23 nt, Human
gaggucaggaguuuaagaccagc

SEQ ID NO: 427426 - RNA, 23 nt, Human
gaggucaggaguuuaagacuagc

SEQ ID NO: 427427 - RNA, 21 nt, Human
gaggucaggaguuucagacca

SEQ ID NO: 427428 - RNA, 23 nt, Human
gaggucaggaguuucagaccagc

SEQ ID NO: 427429 - RNA, 23 nt, Human
gaggucaggaguuucagacuagu

SEQ ID NO: 427430 - RNA, 23 nt, Human
gaggucaggaguuugaaaccagc

SEQ ID NO: 427431 - RNA, 32 nt, Human
gaggucaggaguuugaaaccagccuggccaac

SEQ ID NO: 427432 - RNA, 23 nt, Human
gaggucaggaguuugaaacuagc

SEQ ID NO: 427433 - RNA, 32 nt, Human
gaggucaggaguuugaaacuagccuggccaac

SEQ ID NO: 427434 - RNA, 32 nt, Human
gaggucaggaguuugagaacagccuggccaac

SEQ ID NO: 427435 - RNA, 24 nt, Human
gaggucaggaguuugagaccaccu

SEQ ID NO: 427436 - RNA, 25 nt, Human
gaggucaggaguuugagaccagacu

SEQ ID NO: 427437 - RNA, 23 nt, Human
gaggucaggaguuugagaccagc

SEQ ID NO: 427438 - RNA, 32 nt, Human
gaggucaggaguuugagaccagccuggacaac

SEQ ID NO: 427439 - RNA, 32 nt, Human
gaggucaggaguuugagaccagccuggccaaa

SEQ ID NO: 427440 - RNA, 32 nt, Human
gaggucaggaguuugagaccagccuggccaac

SEQ ID NO: 427441 - RNA, 32 nt, Human
gaggucaggaguuugagaccagccuggccaau

SEQ ID NO: 427442 - RNA, 32 nt, Human
gaggucaggaguuugagaccagccuggccacc

SEQ ID NO: 427443 - RNA, 32 nt, Human
gaggucaggaguuugagaccagccuggccagc

SEQ ID NO: 427444 - RNA, 32 nt, Human
gaggucaggaguuugagaccagccuggccgac

SEQ ID NO: 427445 - RNA, 32 nt, Human
gaggucaggaguuugagaccagccuggcuaac

SEQ ID NO: 427446 - RNA, 32 nt, Human
gaggucaggaguuugagaccagccugggcaau

SEQ ID NO: 427447 - RNA, 32 nt, Human
gaggucaggaguuugagaccagccuggguaau

SEQ ID NO: 427448 - RNA, 32 nt, Human
gaggucaggaguuugagaccagccuggucaac

SEQ ID NO: 427449 - RNA, 24 nt, Human
gaggucaggaguuugagaccagcu

SEQ ID NO: 427450 - RNA, 23 nt, Human
gaggucaggaguuugagaccagu

SEQ ID NO: 427451 - RNA, 23 nt, Human
gaggucaggaguuugagaccggc

SEQ ID NO: 427452 - RNA, 23 nt, Human
gaggucaggaguuugagacuagc

SEQ ID NO: 427453 - RNA, 23 nt, Human
gaggucaggaguuugagacuagu

SEQ ID NO: 427454 - RNA, 32 nt, Human
gaggucaggaguuugagagcagccuggcuaac

SEQ ID NO: 427455 - RNA, 23 nt, Human
gaggucaggaguuugagaucagc

SEQ ID NO: 427456 - RNA, 32 nt, Human
gaggucaggaguuugagaucagccuggacaac

SEQ ID NO: 427457 - RNA, 32 nt, Human
gaggucaggaguuugagaucagccuggcaaac

SEQ ID NO: 427458 - RNA, 32 nt, Human
gaggucaggaguuugagaucagccuggccaac

SEQ ID NO: 427459 - RNA, 23 nt, Human
gaggucaggaguuugagauuagc

SEQ ID NO: 427460 - RNA, 22 nt, Human
gaggucaggaguuugagccagc

SEQ ID NO: 427461 - RNA, 23 nt, Human
gaggucaggaguuugaggccagc

SEQ ID NO: 427462 - RNA, 32 nt, Human
gaggucaggaguuugaggccagccuggccaac

SEQ ID NO: 427463 - RNA, 23 nt, Human
gaggucaggaguuugauaccagc

SEQ ID NO: 427464 - RNA, 23 nt, Human
gaggucaggaguuugugaccagc

SEQ ID NO: 427465 - RNA, 23 nt, Human
gaggucaggaguuuuagaccagc

SEQ ID NO: 427466 - RNA, 24 nt, Human
gaggucaggaguuuugagaccagc

SEQ ID NO: 427467 - RNA, 21 nt, Human
gaggucaggauggaacuaccu

SEQ ID NO: 427468 - RNA, 25 nt, Human
gaggucaggaugucaagaucagacu

SEQ ID NO: 427469 - RNA, 22 nt, Human
gaggucaggauucaaaaccagc

SEQ ID NO: 427470 - RNA, 20 nt, Human
gaggucaggcacggaccagu

SEQ ID NO: 427471 - RNA, 32 nt, Human
gaggucaggcaggacaagcaggaagcacuggg

SEQ ID NO: 427472 - RNA, 23 nt, Human
gaggucaggcaggaggccuggcu

SEQ ID NO: 427473 - RNA, 24 nt, Human
gaggucaggcaggguaagccaguu

SEQ ID NO: 427474 - RNA, 24 nt, Human
gaggucaggcccagcugcucagga

SEQ ID NO: 427475 - RNA, 32 nt, Human
gaggucaggccccacuccuuccugauuguuua

SEQ ID NO: 427476 - RNA, 19 nt, Human
gaggucaggcccgcgcccg

SEQ ID NO: 427477 - RNA, 24 nt, Human
gaggucaggcguuuaagaccagcu

SEQ ID NO: 427478 - RNA, 32 nt, Human
gaggucaggcguuugagaccagccuggccaac

SEQ ID NO: 427479 - RNA, 22 nt, Human
gaggucaggcugcugaaccagc

SEQ ID NO: 427480 - RNA, 26 nt, Human
gaggucaggggaaugcuaagccaguu

SEQ ID NO: 427481 - RNA, 23 nt, Human
gaggucagggguucaagaccagc

SEQ ID NO: 427482 - RNA, 32 nt, Human
gaggucagggguucaagaccagccuggccaac

SEQ ID NO: 427483 - RNA, 23 nt, Human
gaggucagggguucaagacuagc

SEQ ID NO: 427484 - RNA, 23 nt, Human
gaggucagggguucgaaaccagc

SEQ ID NO: 427485 - RNA, 23 nt, Human
gaggucagggguucgacaccagc

SEQ ID NO: 427486 - RNA, 23 nt, Human
gaggucagggguucgagaccagc

SEQ ID NO: 427487 - RNA, 23 nt, Human
gaggucagggguuugagaccagc

SEQ ID NO: 427488 - RNA, 32 nt, Human
gaggucagggguuugagaccagccuggcuuga

SEQ ID NO: 427489 - RNA, 32 nt, Human
gaggucaguaguucaagaccagccuggccaac

SEQ ID NO: 427490 - RNA, 32 nt, Human
gaggucaguaguucgagaccagccuggccaau

SEQ ID NO: 427491 - RNA, 32 nt, Human
gaggucaguaguucgagaccagccuggucaau

SEQ ID NO: 427492 - RNA, 32 nt, Human
gaggucaguaguuugagaccagccuggccaau

SEQ ID NO: 427493 - RNA, 32 nt, Human
gaggucagugcugaagccagggaggcagcucu

SEQ ID NO: 427494 - RNA, 32 nt, Human
gaggucagugugccucacuacagagcuucaaa

SEQ ID NO: 427495 - RNA, 32 nt, Human
gaggucaguucagaugccaacagggaaaaugc

SEQ ID NO: 427496 - RNA, 32 nt, Human
gaggucaucuugaucucccagaagugcuggcc

SEQ ID NO: 427497 - RNA, 32 nt, Human
gaggucaugaaacucuggaugugcaaagcagg

SEQ ID NO: 427498 - RNA, 32 nt, Human
gaggucaugaauuugagaccagccuggccaac

SEQ ID NO: 427499 - RNA, 32 nt, Human
gaggucaugaguucgaaaccagccuggccaaa

SEQ ID NO: 427500 - RNA, 32 nt, Human
gaggucaugaguucgagaccagccuggccaac

SEQ ID NO: 427501 - RNA, 32 nt, Human
gaggucaugaguuugagaucagccuggccaac

SEQ ID NO: 427502 - RNA, 32 nt, Human
gaggucaugccacugcacuccagccuggccug

SEQ ID NO: 427503 - RNA, 32 nt, Human
gaggucaugccacugcacugcagccugggcga

SEQ ID NO: 427504 - RNA, 32 nt, Human
gaggucaugccauuguacuccagccugggcaa

SEQ ID NO: 427505 - RNA, 31 nt, Human
gaggucauggccacucagggcccggacaagg

SEQ ID NO: 427506 - RNA, 32 nt, Human
gaggucauguucaauaugaauaccucacagag

SEQ ID NO: 427507 - RNA, 32 nt, Human
gaggucauuccuucuuuucuucuccgaucuuu

SEQ ID NO: 427508 - RNA, 32 nt, Human
gagguccaagccccuugccaagggaguugggg

SEQ ID NO: 427509 - RNA, 22 nt, Human
gagguccaaggcugcagugagc

SEQ ID NO: 427510 - RNA, 32 nt, Human
gagguccaccugcguugugagcucucaccggg

SEQ ID NO: 427511 - RNA, 32 nt, Human
gagguccagaugagagcagagauacagugaga

SEQ ID NO: 427512 - RNA, 32 nt, Human
gagguccagccucugugggccugugaccugca

SEQ ID NO: 427513 - RNA, 21 nt, Human
gagguccaggcugcaaugagc

SEQ ID NO: 427514 - RNA, 32 nt, Human
gaggucccaccauguugcccaggcugguguca

SEQ ID NO: 427515 - RNA, 22 nt, Human
gaggucccacuguggcguuuca

SEQ ID NO: 427516 - RNA, 32 nt, Human
gaggucccagaaucuagggcaagagcuggccc

SEQ ID NO: 427517 - RNA, 23 nt, Human
gagguccccaagggcaguauuca

SEQ ID NO: 427518 - RNA, 32 nt, Human
gaggucccccuucuccagaccuccuucauuca

SEQ ID NO: 427519 - RNA, 32 nt, Human
gagguccccucagcaucaagcagcccaaccaa

SEQ ID NO: 427520 - RNA, 32 nt, Human
gaggucccgccacugcacuccagccuggguga

SEQ ID NO: 427521 - RNA, 23 nt, Human
gagguccgcgcagcugcugggga

SEQ ID NO: 427522 - RNA, 32 nt, Human
gagguccggagaccagccuggccaacauggug

SEQ ID NO: 427523 - RNA, 32 nt, Human
gagguccggaguucgagaccagccuggccaau

SEQ ID NO: 427524 - RNA, 32 nt, Human
gagguccggcucccggcucuccggacccgccu

SEQ ID NO: 427525 - RNA, 22 nt, Human
gagguccuaaaacgauugcaga

SEQ ID NO: 427526 - RNA, 32 nt, Human
gagguccuaaagaugcugacuggggagucuga

SEQ ID NO: 427527 - RNA, 32 nt, Human
gagguccucuacuggugauacccucaccuugg

SEQ ID NO: 427528 - RNA, 32 nt, Human
gagguccugagcgcgguggcucugcgucuccu

SEQ ID NO: 427529 - RNA, 22 nt, Human
gagguccugaggaacagugucc

SEQ ID NO: 427530 - RNA, 32 nt, Human
gagguccugaggaacaguguccccaggaacca

SEQ ID NO: 427531 - RNA, 32 nt, Human
gagguccugcugcgcacagugcuggaggucgg

SEQ ID NO: 427532 - RNA, 32 nt, Human
gagguccuggcuucugccgucccuggaggcuc

SEQ ID NO: 427533 - RNA, 32 nt, Human
gagguccuucagccuccaucuguucucccacc

SEQ ID NO: 427534 - RNA, 32 nt, Human
gagguccuuccugaacaugucacuccacagca

SEQ ID NO: 427535 - RNA, 32 nt, Human
gagguccuucggccuggcucagcugggcugca

SEQ ID NO: 427536 - RNA, 32 nt, Human
gagguccuuucacucagcacauggacaguagu

SEQ ID NO: 427537 - RNA, 32 nt, Human
gaggucgaaaguuugagaccagccuggcccac

SEQ ID NO: 427538 - RNA, 32 nt, Human
gaggucgaagucuucagaguccgcacccuccg

SEQ ID NO: 427539 - RNA, 22 nt, Human
gaggucgaggcaggcagaucac

SEQ ID NO: 427540 - RNA, 32 nt, Human
gaggucgaggcaggcagaucaccugaggucag

SEQ ID NO: 427541 - RNA, 22 nt, Human
gaggucgaggcaggcggaucac

SEQ ID NO: 427542 - RNA, 32 nt, Human
gaggucgaggcaggcggaucaccugaggucgg

SEQ ID NO: 427543 - RNA, 22 nt, Human
gaggucgaggcagguagaucac

SEQ ID NO: 427544 - RNA, 22 nt, Human
gaggucgaggcagguggaucac

SEQ ID NO: 427545 - RNA, 21 nt, Human
gaggucgaggcuacagugagc

SEQ ID NO: 427546 - RNA, 21 nt, Human
gaggucgaggcugcagugagc

SEQ ID NO: 427547 - RNA, 24 nt, Human
gaggucgaggcugcagugagcuau

SEQ ID NO: 427548 - RNA, 32 nt, Human
gaggucgaggcugcagugagcuaugaucacac

SEQ ID NO: 427549 - RNA, 32 nt, Human
gaggucgaggcugcagugagcuauguucauga

SEQ ID NO: 427550 - RNA, 32 nt, Human
gaggucgaggcugcagugggcuaugauugcac

SEQ ID NO: 427551 - RNA, 32 nt, Human
gaggucgaggcugcagugugcugugauuguga

SEQ ID NO: 427552 - RNA, 24 nt, Human
gaggucgaggcuguagugagcuau

SEQ ID NO: 427553 - RNA, 32 nt, Human
gaggucgagguagguggaucaccugaggucag

SEQ ID NO: 427554 - RNA, 32 nt, Human
gaggucgagguagguggaucaccugaggucgg

SEQ ID NO: 427555 - RNA, 32 nt, Human
gaggucgaggugggcagaucaccugagguuag

SEQ ID NO: 427556 - RNA, 32 nt, Human
gaggucgaggugggcggaucaccugaggucag

SEQ ID NO: 427557 - RNA, 32 nt, Human
gaggucgagguggguggaucaccugaggucug

SEQ ID NO: 427558 - RNA, 32 nt, Human
gaggucgcaccacugcacuccagccuggguga

SEQ ID NO: 427559 - RNA, 32 nt, Human
gaggucgcaccacugcacuccagucuggguaa

SEQ ID NO: 427560 - RNA, 32 nt, Human
gaggucgcaccacugcacugcagccuggguga

SEQ ID NO: 427561 - RNA, 32 nt, Human
gaggucgcaccguuguacuccagccuggugau

SEQ ID NO: 427562 - RNA, 32 nt, Human
gaggucgcagugagccgagaucgugccacugc

SEQ ID NO: 427563 - RNA, 32 nt, Human
gaggucgcgccacugcacuccagccugggaga

SEQ ID NO: 427564 - RNA, 32 nt, Human
gaggucgcgccacugcacuucagccuggguga

SEQ ID NO: 427565 - RNA, 32 nt, Human
gaggucgcgccauugcacuccagccugggcaa

SEQ ID NO: 427566 - RNA, 32 nt, Human
gaggucgcggugagccgagaucgagccauugc

SEQ ID NO: 427567 - RNA, 22 nt, Human
gaggucgcguuccccaguguua

SEQ ID NO: 427568 - RNA, 32 nt, Human
gaggucgcuccauugcacuccagccugggcaa

SEQ ID NO: 427569 - RNA, 23 nt, Human
gaggucgggagcgcgagaccagc

SEQ ID NO: 427570 - RNA, 23 nt, Human
gaggucgggaguucaagaccagc

SEQ ID NO: 427571 - RNA, 23 nt, Human
gaggucgggaguucacaaccagc

SEQ ID NO: 427572 - RNA, 23 nt, Human
gaggucgggaguuccagaccagc

SEQ ID NO: 427573 - RNA, 23 nt, Human
gaggucgggaguucgagaccagc

SEQ ID NO: 427574 - RNA, 23 nt, Human
gaggucgggaguucgagaccagu

SEQ ID NO: 427575 - RNA, 23 nt, Human
gaggucgggaguucuagaccagc

SEQ ID NO: 427576 - RNA, 23 nt, Human
gaggucgggaguuggaggccagc

SEQ ID NO: 427577 - RNA, 32 nt, Human
gaggucgggaguuggaggccagccuggccaaa

SEQ ID NO: 427578 - RNA, 23 nt, Human
gaggucgggaguuugaaaccagu

SEQ ID NO: 427579 - RNA, 32 nt, Human
gaggucgggaguuugagaacagccuggccaac

SEQ ID NO: 427580 - RNA, 23 nt, Human
gaggucgggaguuugagaccagc

SEQ ID NO: 427581 - RNA, 32 nt, Human
gaggucgggaguuugagaccagccuggccaac

SEQ ID NO: 427582 - RNA, 32 nt, Human
gaggucgggaguuugagaucagccuggccaau

SEQ ID NO: 427583 - RNA, 21 nt, Human
gaggucggggcugcagugagc

SEQ ID NO: 427584 - RNA, 23 nt, Human
gaggucggggguuugagaccggc

SEQ ID NO: 427585 - RNA, 23 nt, Human
gaggucggggguuugcgaccagc

SEQ ID NO: 427586 - RNA, 32 nt, Human
gaggucggugcagacucgggggccaguccugc

SEQ ID NO: 427587 - RNA, 21 nt, Human
gaggucguagcggaaccagcu

SEQ ID NO: 427588 - RNA, 30 nt, Human
gaggucguccucuccaucugcuguguuugg

SEQ ID NO: 427589 - RNA, 32 nt, Human
gaggucgugccacugcacuccagccugggcag

SEQ ID NO: 427590 - RNA, 32 nt, Human
gaggucgugccacugcacuccagccugggcga

SEQ ID NO: 427591 - RNA, 32 nt, Human
gaggucgugccacugcacuucagccuggguga

SEQ ID NO: 427592 - RNA, 32 nt, Human
gaggucgugccacugcaugccagccugggcaa

SEQ ID NO: 427593 - RNA, 32 nt, Human
gaggucgugccacugcgcuccagccuggguga

SEQ ID NO: 427594 - RNA, 32 nt, Human
gaggucgugccauugcacuccagccuggguga

SEQ ID NO: 427595 - RNA, 32 nt, Human
gaggucgugcuacugcacucccgccuggguga

SEQ ID NO: 427596 - RNA, 21 nt, Human
gaggucguguaauuggccuaa

SEQ ID NO: 427597 - RNA, 22 nt, Human
gaggucuaggcugcagugagcu

SEQ ID NO: 427598 - RNA, 32 nt, Human
gaggucuaggcugcagugagcuuauguucaug

SEQ ID NO: 427599 - RNA, 32 nt, Human
gaggucuagggauugagaccagccuggccaac

SEQ ID NO: 427600 - RNA, 32 nt, Human
gaggucucaauaccagcucagaccauguggac

SEQ ID NO: 427601 - RNA, 23 nt, Human
gaggucucacaggaggcagugcc

SEQ ID NO: 427602 - RNA, 32 nt, Human
gaggucucaccauguugcccaggcuggucuug

SEQ ID NO: 427603 - RNA, 32 nt, Human
gaggucucacuacacuuugaggaaggcagcuu

SEQ ID NO: 427604 - RNA, 32 nt, Human
gaggucucagagccaauaagcaaccaggagua

SEQ ID NO: 427605 - RNA, 20 nt, Human
gaggucucaggggcaaugcc

SEQ ID NO: 427606 - RNA, 32 nt, Human
gaggucucauaguaguacccuguggcuacuuu

SEQ ID NO: 427607 - RNA, 32 nt, Human
gaggucucccuauguggcccaggcuggccuug

SEQ ID NO: 427608 - RNA, 32 nt, Human
gaggucucccuauguugcccaggcuggucuag

SEQ ID NO: 427609 - RNA, 32 nt, Human
gaggucucccucaauccuccccuuuagggaag

SEQ ID NO: 427610 - RNA, 32 nt, Human
gaggucucccucugucaaccaggcuggagugc

SEQ ID NO: 427611 - RNA, 32 nt, Human
gaggucucccuguguugcccagccuggucuug

SEQ ID NO: 427612 - RNA, 32 nt, Human
gaggucuccucuuccggcuuucccacuuccca

SEQ ID NO: 427613 - RNA, 32 nt, Human
gaggucuccugggaacccugucugccccuucc

SEQ ID NO: 427614 - RNA, 32 nt, Human
gaggucucgaacugccgaccucaggcugucug

SEQ ID NO: 427615 - RNA, 32 nt, Human
gaggucucuuccuaugcugugaacccccugcc

SEQ ID NO: 427616 - RNA, 23 nt, Human
gaggucucuucugccauugugcu

SEQ ID NO: 427617 - RNA, 25 nt, Human
gaggucucuugcuguuuggauucca

SEQ ID NO: 427618 - RNA, 32 nt, Human
gaggucugacagccccucccucccagagcugg

SEQ ID NO: 427619 - RNA, 32 nt, Human
gaggucugagagacagaggcagcguguuugag

SEQ ID NO: 427620 - RNA, 32 nt, Human
gaggucugagagaucuggacuccaacccaagg

SEQ ID NO: 427621 - RNA, 32 nt, Human
gaggucugcccagggugggagcagugucacug

SEQ ID NO: 427622 - RNA, 32 nt, Human
gaggucugccuguuucguccccagaaacuuga

SEQ ID NO: 427623 - RNA, 32 nt, Human
gaggucugcugcuccaguuggcugcaaauaau

SEQ ID NO: 427624 - RNA, 32 nt, Human
gaggucuggaaggcgcagaaauggagcaagag

SEQ ID NO: 427625 - RNA, 32 nt, Human
gaggucuggagcuguggcugagccaccucugg

SEQ ID NO: 427626 - RNA, 32 nt, Human
gaggucuggaguuugagaccagccuggccaac

SEQ ID NO: 427627 - RNA, 32 nt, Human
gaggucugggagaaggguggugagaaugguaa

SEQ ID NO: 427628 - RNA, 32 nt, Human
gaggucugggagagagagcagagggcggcagg

SEQ ID NO: 427629 - RNA, 32 nt, Human
gaggucugggggccaggccacauggcuggaga

SEQ ID NO: 427630 - RNA, 32 nt, Human
gaggucugugaugugacccuuuuccucaccug

SEQ ID NO: 427631 - RNA, 32 nt, Human
gaggucuguguacagugacaggcuccacuuug

SEQ ID NO: 427632 - RNA, 32 nt, Human
gaggucugugugauuuacucaaguugaagaca

SEQ ID NO: 427633 - RNA, 32 nt, Human
gaggucuucccaacagacucucccucuuccaa

SEQ ID NO: 427634 - RNA, 32 nt, Human
gaggucuugccauguuacccaggcuggucuca

SEQ ID NO: 427635 - RNA, 32 nt, Human
gaggucuugguuccaggguuccuggccaggug

SEQ ID NO: 427636 - RNA, 32 nt, Human
gaggucuuugcuuaaguaugagauacuugaug

SEQ ID NO: 427637 - RNA, 32 nt, Human
gaggugaaagaaugggcugcagcgcaggcaaa

SEQ ID NO: 427638 - RNA, 32 nt, Human
gaggugaaagaauugcuugagcccaggacucu

SEQ ID NO: 427639 - RNA, 32 nt, Human
gaggugaagaauuuugcaggugggagauuugg

SEQ ID NO: 427640 - RNA, 18 nt, Human
gaggugaagaggcugcuu

SEQ ID NO: 427641 - RNA, 32 nt, Human
gaggugaaggcagagguggaggacauggacga

SEQ ID NO: 427642 - RNA, 32 nt, Human
gaggugaagggccccgcugcgcaggaccagcg

SEQ ID NO: 427643 - RNA, 32 nt, Human
gaggugaauaucugggagcagagaucaugaau

SEQ ID NO: 427644 - RNA, 24 nt, Human
gaggugaaugacaggaaugaugaa

SEQ ID NO: 427645 - RNA, 32 nt, Human
gaggugacagugagcugagaucacaccacugc

SEQ ID NO: 427646 - RNA, 32 nt, Human
gaggugacauguugggcugugggaucccagcg

SEQ ID NO: 427647 - RNA, 32 nt, Human
gaggugaccaagaggcagaagagcagagcagu

SEQ ID NO: 427648 - RNA, 32 nt, Human
gaggugaccccaggccccaggaaagggagcga

SEQ ID NO: 427649 - RNA, 32 nt, Human
gaggugaccuggagggacuauaagaucaacag

SEQ ID NO: 427650 - RNA, 32 nt, Human
gaggugacguggccuucuccuccagcacugug

SEQ ID NO: 427651 - RNA, 32 nt, Human
gaggugagaauccugcugaccccagucccauc

SEQ ID NO: 427652 - RNA, 32 nt, Human
gaggugagagacugaagaagcagagccuguau

SEQ ID NO: 427653 - RNA, 32 nt, Human
gaggugagaguaagccuuguguuagucagaac

SEQ ID NO: 427654 - RNA, 32 nt, Human
gaggugagagugauuagugggagaagaaaagc

SEQ ID NO: 427655 - RNA, 22 nt, Human
gaggugagcggaucacaagguc

SEQ ID NO: 427656 - RNA, 32 nt, Human
gaggugagcgugauccuagcuccuuguggcag

SEQ ID NO: 427657 - RNA, 32 nt, Human
gaggugaggaagagagcccugcagauacccag

SEQ ID NO: 427658 - RNA, 32 nt, Human
gaggugaggaaggaagggguugcuguccagug

SEQ ID NO: 427659 - RNA, 32 nt, Human
gaggugaggaguuugagaacagccuggccaac

SEQ ID NO: 427660 - RNA, 32 nt, Human
gaggugaggaguuugagaccagccuggccaac

SEQ ID NO: 427661 - RNA, 18 nt, Human
gaggugagguugcaguga

SEQ ID NO: 427662 - RNA, 20 nt, Human
gaggugaguagaggggccug

SEQ ID NO: 427663 - RNA, 32 nt, Human
gaggugaguggagacucagcccagcugcucuu

SEQ ID NO: 427664 - RNA, 22 nt, Human
gaggugaguggaucacgagguc

SEQ ID NO: 427665 - RNA, 32 nt, Human
gaggugauagcugaggaggagcggggauuugg

SEQ ID NO: 427666 - RNA, 32 nt, Human
gaggugaugcccaaggugcaccaccuuucaag

SEQ ID NO: 427667 - RNA, 32 nt, Human
gaggugauuaaaaccaacaaggaguuucaugu

SEQ ID NO: 427668 - RNA, 24 nt, Human
gaggugcaaagaaugcacuuuucc

SEQ ID NO: 427669 - RNA, 32 nt, Human
gaggugcacaggcuggaguuucaggcacugca

SEQ ID NO: 427670 - RNA, 32 nt, Human
gaggugcagcacaagcguggccccgcggggag

SEQ ID NO: 427671 - RNA, 32 nt, Human
gaggugcagcacacuccaccuggguggccuuc

SEQ ID NO: 427672 - RNA, 32 nt, Human
gaggugcagcugccgaaagugucagagauucg

SEQ ID NO: 427673 - RNA, 32 nt, Human
gaggugcaggccucgucaccugcagaggugcc

SEQ ID NO: 427674 - RNA, 32 nt, Human
gaggugcagggcagcggggcccagggaggggc

SEQ ID NO: 427675 - RNA, 32 nt, Human
gaggugcagggcuuggguaacagcugccuucc

SEQ ID NO: 427676 - RNA, 22 nt, Human
gaggugcagggggcaguacuca

SEQ ID NO: 427677 - RNA, 17 nt, Human
gaggugcaguggggaga

SEQ ID NO: 427678 - RNA, 32 nt, Human
gaggugcaucucaccaaccauccuccugcaga

SEQ ID NO: 427679 - RNA, 32 nt, Human
gaggugcauggugagaggugauuggaucaugg

SEQ ID NO: 427680 - RNA, 32 nt, Human
gaggugcauguguucccuaggagcucaacagg

SEQ ID NO: 427681 - RNA, 21 nt, Human
gaggugcauugaaauguucca

SEQ ID NO: 427682 - RNA, 32 nt, Human
gaggugccaaagcauguucaaccaacgcuguc

SEQ ID NO: 427683 - RNA, 32 nt, Human
gaggugccacccaguagcccagagugagcuuu

SEQ ID NO: 427684 - RNA, 32 nt, Human
gaggugccaccugggccccacgcaugcuuccu

SEQ ID NO: 427685 - RNA, 32 nt, Human
gaggugccagaggcggcggcugcucuggaccu

SEQ ID NO: 427686 - RNA, 23 nt, Human
gaggugccagcugccauuugcca

SEQ ID NO: 427687 - RNA, 32 nt, Human
gaggugccagcugccauuugccaaacucugca

SEQ ID NO: 427688 - RNA, 22 nt, Human
gaggugccagggguacauuuuu

SEQ ID NO: 427689 - RNA, 32 nt, Human
gaggugcccaaccuccuccacccccuuccccu

SEQ ID NO: 427690 - RNA, 32 nt, Human
gaggugcccgcucuucccuccugggcccacaa

SEQ ID NO: 427691 - RNA, 32 nt, Human
gaggugccggcugaggcagaggagaaacuaug

SEQ ID NO: 427692 - RNA, 32 nt, Human
gaggugccgucuggcccuucccugcaggccag

SEQ ID NO: 427693 - RNA, 32 nt, Human
gaggugccuacaccugccgagcguacagcauu

SEQ ID NO: 427694 - RNA, 32 nt, Human
gaggugccuccaggagcagcaggagcauggcc

SEQ ID NO: 427695 - RNA, 32 nt, Human
gaggugccugaaagcugggagcgugggcucag

SEQ ID NO: 427696 - RNA, 32 nt, Human
gaggugcggagacugcagaccagugcuucacu

SEQ ID NO: 427697 - RNA, 32 nt, Human
gaggugcggugacuugcccgggguuccaggua

SEQ ID NO: 427698 - RNA, 32 nt, Human
gaggugcggugccccgaagcgcucgcuucccg

SEQ ID NO: 427699 - RNA, 32 nt, Human
gaggugcucauccugacucgauuguucugcca

SEQ ID NO: 427700 - RNA, 32 nt, Human
gaggugcugcagcugcuccugcucucugaucu

SEQ ID NO: 427701 - RNA, 32 nt, Human
gaggugcugcugucucuccuccagcaaggaaa

SEQ ID NO: 427702 - RNA, 32 nt, Human
gaggugcuggaaggcacggguccacuucuuaa

SEQ ID NO: 427703 - RNA, 32 nt, Human
gaggugcugggcaagggcugcuucggccaggc

SEQ ID NO: 427704 - RNA, 32 nt, Human
gaggugcugucugcugccuccaccuguucccc

SEQ ID NO: 427705 - RNA, 32 nt, Human
gaggugcuuauccaggugugauuuauguguua

SEQ ID NO: 427706 - RNA, 32 nt, Human
gaggugcuuuacgcaucagcugccuuagacag

SEQ ID NO: 427707 - RNA, 32 nt, Human
gagguggaagcauggggugggaucgguggacc

SEQ ID NO: 427708 - RNA, 32 nt, Human
gagguggaaggccauacagaauggagccguga

SEQ ID NO: 427709 - RNA, 32 nt, Human
gagguggaaguuacagaagaggagguaccugg

SEQ ID NO: 427710 - RNA, 24 nt, Human
gagguggacagguccgagccagcu

SEQ ID NO: 427711 - RNA, 21 nt, Human
gagguggaccuguuugcuggg

SEQ ID NO: 427712 - RNA, 32 nt, Human
gagguggacgucugggcugggcgccggacaag

SEQ ID NO: 427713 - RNA, 32 nt, Human
gagguggagaaggacgggagaggcagagagag

SEQ ID NO: 427714 - RNA, 21 nt, Human
gagguggagacugcagugagc

SEQ ID NO: 427715 - RNA, 32 nt, Human
gagguggagagggagacaugacagcuuuuugu

SEQ ID NO: 427716 - RNA, 32 nt, Human
gagguggagauggggucaggaacaucuggcag

SEQ ID NO: 427717 - RNA, 32 nt, Human
gagguggagaugguggaggugguggugguggu

SEQ ID NO: 427718 - RNA, 19 nt, Human
gagguggagauugcaguga

SEQ ID NO: 427719 - RNA, 32 nt, Human
gagguggagcagcuacaagaugagaccaacca

SEQ ID NO: 427720 - RNA, 19 nt, Human
gagguggagcagguaggac

SEQ ID NO: 427721 - RNA, 32 nt, Human
gagguggagccaagugguccagcgucacucca

SEQ ID NO: 427722 - RNA, 19 nt, Human
gagguggagcuugcaguga

SEQ ID NO: 427723 - RNA, 32 nt, Human
gagguggaggaggaggaggaggaggaggaggu

SEQ ID NO: 427724 - RNA, 32 nt, Human
gagguggaggaggaggaggaggagguggugga

SEQ ID NO: 427725 - RNA, 32 nt, Human
gagguggaggaggaggggccagggcagucguu

SEQ ID NO: 427726 - RNA, 32 nt, Human
gagguggaggcagagauuacugugggccaagg

SEQ ID NO: 427727 - RNA, 32 nt, Human
gagguggaggcaggagaaucacuugacccagg

SEQ ID NO: 427728 - RNA, 32 nt, Human
gagguggaggcaguacccuggacucuauucug

SEQ ID NO: 427729 - RNA, 32 nt, Human
gagguggaggcagugagcugagaucgugccac

SEQ ID NO: 427730 - RNA, 32 nt, Human
gagguggaggcugcagcgagccaagaucacac

SEQ ID NO: 427731 - RNA, 32 nt, Human
gagguggaggcugcagcugaagguggcaggaa

SEQ ID NO: 427732 - RNA, 19 nt, Human
gagguggaggcugcaguga

SEQ ID NO: 427733 - RNA, 21 nt, Human
gagguggaggcugcagugagc

SEQ ID NO: 427734 - RNA, 24 nt, Human
gagguggaggcugcagugagcuau

SEQ ID NO: 427735 - RNA, 32 nt, Human
gagguggaggcugcagugagcuaugauugugc

SEQ ID NO: 427736 - RNA, 32 nt, Human
gagguggaggcuggagugaacagagaucgcgc

SEQ ID NO: 427737 - RNA, 32 nt, Human
gagguggaggggaggcugcagugagcugagau

SEQ ID NO: 427738 - RNA, 32 nt, Human
gagguggagguggaaaacgugauugaguggac

SEQ ID NO: 427739 - RNA, 32 nt, Human
gagguggagguggagguugcagugagccgaga

SEQ ID NO: 427740 - RNA, 32 nt, Human
gagguggagguggcagugagccgagauagcac

SEQ ID NO: 427741 - RNA, 32 nt, Human
gagguggagguggcagugagccgagaucacgc

SEQ ID NO: 427742 - RNA, 32 nt, Human
gagguggaggugggcggaucacgugaggucag

SEQ ID NO: 427743 - RNA, 19 nt, Human
gagguggagguugcaguga

SEQ ID NO: 427744 - RNA, 32 nt, Human
gagguggagguugcagugagccaagguugcgc

SEQ ID NO: 427745 - RNA, 19 nt, Human
gagguggagguugcagugg

SEQ ID NO: 427746 - RNA, 20 nt, Human
gagguggagucuugcucugu

SEQ ID NO: 427747 - RNA, 18 nt, Human
gagguggaguugcaguga

SEQ ID NO: 427748 - RNA, 32 nt, Human
gagguggaguuucacucuuguugcccaagcug

SEQ ID NO: 427749 - RNA, 32 nt, Human
gagguggaguuucgcucuuguugcccgggcug

SEQ ID NO: 427750 - RNA, 27 nt, Human
gagguggauaggucggugaugugugga

SEQ ID NO: 427751 - RNA, 32 nt, Human
gagguggaucgacgcccaggaggagaaacagg

SEQ ID NO: 427752 - RNA, 23 nt, Human
gagguggauugcgccacugcacu

SEQ ID NO: 427753 - RNA, 32 nt, Human
gagguggcaaaguggcaccgggcgccgaggcu

SEQ ID NO: 427754 - RNA, 32 nt, Human
gagguggcaaauaaaccugggcaauuuuguuu

SEQ ID NO: 427755 - RNA, 30 nt, Human
gagguggcaagccacaccccacggugcccg

SEQ ID NO: 427756 - RNA, 32 nt, Human
gagguggcacaucugcucagccaucucauuuu

SEQ ID NO: 427757 - RNA, 32 nt, Human
gagguggcaccugcaucaccuccuccucuugc

SEQ ID NO: 427758 - RNA, 32 nt, Human
gagguggcagagccaagaaucgacccaggcgg

SEQ ID NO: 427759 - RNA, 32 nt, Human
gagguggcagaggcagggccauaccaucaucu

SEQ ID NO: 427760 - RNA, 32 nt, Human
gagguggcaggcaccuguaaucccagccaccu

SEQ ID NO: 427761 - RNA, 32 nt, Human
gagguggcaggcagggguucuccucaggguuc

SEQ ID NO: 427762 - RNA, 32 nt, Human
gagguggcaggcgcguuugcaggaggggcgca

SEQ ID NO: 427763 - RNA, 32 nt, Human
gagguggcaggcggauggccagggagccauga

SEQ ID NO: 427764 - RNA, 32 nt, Human
gagguggcagugagccgagaucacaccauugc

SEQ ID NO: 427765 - RNA, 32 nt, Human
gagguggcagugagccgagaucacgccacugu

SEQ ID NO: 427766 - RNA, 32 nt, Human
gagguggcagugagccgagauugcgccauugc

SEQ ID NO: 427767 - RNA, 32 nt, Human
gagguggcauccagaggagacuggcuggcccc

SEQ ID NO: 427768 - RNA, 32 nt, Human
gagguggccauggagggggcacuggacugggc

SEQ ID NO: 427769 - RNA, 32 nt, Human
gagguggccccaaaugcagaccagcugugugc

SEQ ID NO: 427770 - RNA, 32 nt, Human
gagguggcccucagcugggacaguggggaccc

SEQ ID NO: 427771 - RNA, 32 nt, Human
gagguggcgcucugggcagcgccccuuuggac

SEQ ID NO: 427772 - RNA, 32 nt, Human
gagguggcgggaacaggggugugggaugaggu

SEQ ID NO: 427773 - RNA, 32 nt, Human
gagguggcggggaccagcugggcagaugagag

SEQ ID NO: 427774 - RNA, 32 nt, Human
gagguggcgucugagcaacuuucguccacaag

SEQ ID NO: 427775 - RNA, 32 nt, Human
gagguggcuacagggcaggcagaggaggcacc

SEQ ID NO: 427776 - RNA, 32 nt, Human
gagguggcuacucaacagguuugaggccccac

SEQ ID NO: 427777 - RNA, 32 nt, Human
gagguggcucaugccuguaaaucccagcacuu

SEQ ID NO: 427778 - RNA, 19 nt, Human
gagguggcuggagccccgg

SEQ ID NO: 427779 - RNA, 32 nt, Human
gaggugggaagaggaugaggagcaaaguuggg

SEQ ID NO: 427780 - RNA, 32 nt, Human
gaggugggaaggcagagcaucaggagggaaca

SEQ ID NO: 427781 - RNA, 22 nt, Human
gaggugggagaaucacaagguc

SEQ ID NO: 427782 - RNA, 32 nt, Human
gaggugggagagaaaggaggggaguucagggu

SEQ ID NO: 427783 - RNA, 32 nt, Human
gaggugggagagacuagagugaccagcaggag

SEQ ID NO: 427784 - RNA, 32 nt, Human
gaggugggagagagaagcagagcgagagagag

SEQ ID NO: 427785 - RNA, 32 nt, Human
gaggugggagcacgggcaggcucaggcgggaa

SEQ ID NO: 427786 - RNA, 32 nt, Human
gaggugggagcguguguggaagggggagagau

SEQ ID NO: 427787 - RNA, 32 nt, Human
gaggugggaggaucacuugaacucaggaguuu

SEQ ID NO: 427788 - RNA, 32 nt, Human
gaggugggaggaucacuugagcacaggaguuu

SEQ ID NO: 427789 - RNA, 32 nt, Human
gaggugggaggcaugggaaacagugcagugac

SEQ ID NO: 427790 - RNA, 32 nt, Human
gaggugggaggcgucucacugcucucaggguu

SEQ ID NO: 427791 - RNA, 32 nt, Human
gaggugggagggcuggaucuuuucccccacca

SEQ ID NO: 427792 - RNA, 32 nt, Human
gaggugggauagaggaagggagguuugagcca

SEQ ID NO: 427793 - RNA, 32 nt, Human
gaggugggcagagggguguggagcagccugga

SEQ ID NO: 427794 - RNA, 32 nt, Human
gaggugggcagaucaacugaguucaggaguuu

SEQ ID NO: 427795 - RNA, 22 nt, Human
gaggugggcagaucacaagguc

SEQ ID NO: 427796 - RNA, 32 nt, Human
gaggugggcagaucaccugagaucgggaguuu

SEQ ID NO: 427797 - RNA, 22 nt, Human
gaggugggcagaucacgagguc

SEQ ID NO: 427798 - RNA, 32 nt, Human
gaggugggcagaucacuugagaucaggaccag

SEQ ID NO: 427799 - RNA, 22 nt, Human
gaggugggcagaucauaagguc

SEQ ID NO: 427800 - RNA, 32 nt, Human
gaggugggcagaucauuugagaucaggaguuu

SEQ ID NO: 427801 - RNA, 32 nt, Human
gaggugggcagaucauuugagaucaggauuuu

SEQ ID NO: 427802 - RNA, 32 nt, Human
gaggugggcagccggccagggaagcacggucc

SEQ ID NO: 427803 - RNA, 32 nt, Human
gaggugggcaggcagaagagccuggauugcuc

SEQ ID NO: 427804 - RNA, 22 nt, Human
gaggugggcggaucacaagguc

SEQ ID NO: 427805 - RNA, 22 nt, Human
gaggugggcggaucacgagguc

SEQ ID NO: 427806 - RNA, 22 nt, Human
gaggugggcggaucgccugaga

SEQ ID NO: 427807 - RNA, 32 nt, Human
gaggugggcggaucgccugagaucaggaguuc

SEQ ID NO: 427808 - RNA, 32 nt, Human
gaggugggcuagcuauauagcagcgggggaga

SEQ ID NO: 427809 - RNA, 32 nt, Human
gaggugggcuaucugcauacuccagucuugga

SEQ ID NO: 427810 - RNA, 32 nt, Human
gaggugggcugacugcuugagcucaggaguuc

SEQ ID NO: 427811 - RNA, 32 nt, Human
gaggugggcugguagagcaggaagcucuguga

SEQ ID NO: 427812 - RNA, 32 nt, Human
gaggugggcuugcccaugaccaggaggggugu

SEQ ID NO: 427813 - RNA, 32 nt, Human
gagguggggaaagaugggcuaagaggcuucug

SEQ ID NO: 427814 - RNA, 32 nt, Human
gagguggggaagcaaggacaagaggcaaagag

SEQ ID NO: 427815 - RNA, 32 nt, Human
gagguggggagggagacagagacagaaacaga

SEQ ID NO: 427816 - RNA, 32 nt, Human
gagguggggagggggagcaggaacuuugagcc

SEQ ID NO: 427817 - RNA, 22 nt, Human
gagguggggauccugccuaagg

SEQ ID NO: 427818 - RNA, 32 nt, Human
gagguggggcaggcggagguugcaguaagcca

SEQ ID NO: 427819 - RNA, 19 nt, Human
gagguggggccccugcugg

SEQ ID NO: 427820 - RNA, 18 nt, Human
gagguggggcucagcagg

SEQ ID NO: 427821 - RNA, 18 nt, Human
gagguggggcugcccagg

SEQ ID NO: 427822 - RNA, 32 nt, Human
gaggugggggaacacaacacgcuuagcccugu

SEQ ID NO: 427823 - RNA, 32 nt, Human
gaggugggggagugggaagugggaagucacca

SEQ ID NO: 427824 - RNA, 23 nt, Human
gaggugggggcgguggugcugga

SEQ ID NO: 427825 - RNA, 22 nt, Human
gagguggggggagagccugagg

SEQ ID NO: 427826 - RNA, 32 nt, Human
gagguggggguuuugcuauguugccuaucugg

SEQ ID NO: 427827 - RNA, 32 nt, Human
gagguggggugagacagagugggagagauuac

SEQ ID NO: 427828 - RNA, 32 nt, Human
gaggugggguuccaugaccugcccugagguca

SEQ ID NO: 427829 - RNA, 19 nt, Human
gaggugggguuucaccaug

SEQ ID NO: 427830 - RNA, 23 nt, Human
gaggugggguuucaccaugcugg

SEQ ID NO: 427831 - RNA, 32 nt, Human
gagguggguaucucacuuuguugcccaggcug

SEQ ID NO: 427832 - RNA, 32 nt, Human
gagguggguccucuggccucagggggcucugc

SEQ ID NO: 427833 - RNA, 32 nt, Human
gaggugggucugggacauccuagaggcccuac

SEQ ID NO: 427834 - RNA, 22 nt, Human
gagguggguggaucacaagguc

SEQ ID NO: 427835 - RNA, 22 nt, Human
gagguggguggaucacaagguu

SEQ ID NO: 427836 - RNA, 32 nt, Human
gagguggguggaucaccugagaucaggaguuc

SEQ ID NO: 427837 - RNA, 22 nt, Human
gagguggguggaucacgaaguc

SEQ ID NO: 427838 - RNA, 22 nt, Human
gagguggguggaucacgagguc

SEQ ID NO: 427839 - RNA, 32 nt, Human
gagguggucaugcccgggcaaaggcccugcuu

SEQ ID NO: 427840 - RNA, 32 nt, Human
gagguggugaaaaagagggauuuggaaauaaa

SEQ ID NO: 427841 - RNA, 32 nt, Human
gaggugguggaggaggaggaggaggaggaagg

SEQ ID NO: 427842 - RNA, 32 nt, Human
gaggugguggccaugacacuggagaccaagcc

SEQ ID NO: 427843 - RNA, 32 nt, Human
gagguggugggagggagaaggaagggaagaaa

SEQ ID NO: 427844 - RNA, 32 nt, Human
gaggugguggugaaagagguucuggcgggaga

SEQ ID NO: 427845 - RNA, 32 nt, Human
gagguggugguguugauuggcuugucucguuc

SEQ ID NO: 427846 - RNA, 19 nt, Human
gagguggugguugcaguga

SEQ ID NO: 427847 - RNA, 32 nt, Human
gaggugguguguggauaccucugucucacgcc

SEQ ID NO: 427848 - RNA, 32 nt, Human
gagguguaagcccuuaaaagggccaagaauuu

SEQ ID NO: 427849 - RNA, 32 nt, Human
gagguguaguggucuaacauuuaggaagccuu

SEQ ID NO: 427850 - RNA, 32 nt, Human
gaggugucacccaaaccggcaggugcgauuuu

SEQ ID NO: 427851 - RNA, 32 nt, Human
gagguguccagccugcaaagcuauuccagcuc

SEQ ID NO: 427852 - RNA, 20 nt, Human
gaggugucgguccucuggga

SEQ ID NO: 427853 - RNA, 32 nt, Human
gaggugucuguggagcacccugcccucaccac

SEQ ID NO: 427854 - RNA, 32 nt, Human
gaggugugagccacugugcccagcccaucaau

SEQ ID NO: 427855 - RNA, 24 nt, Human
gaggugugauugcgccacugcauu

SEQ ID NO: 427856 - RNA, 22 nt, Human
gaggugugcagaucacaagguc

SEQ ID NO: 427857 - RNA, 32 nt, Human
gaggugugcaggaaccagcaaugagaaggcca

SEQ ID NO: 427858 - RNA, 32 nt, Human
gagguguggccaccccagcugcaggagcaggc

SEQ ID NO: 427859 - RNA, 32 nt, Human
gaggugugggaugucagaacauccaagucaga

SEQ ID NO: 427860 - RNA, 32 nt, Human
gaggugugggcagaggagggaggcaagugucc

SEQ ID NO: 427861 - RNA, 32 nt, Human
gaggugugggguaugcaccugagcuccugcuu

SEQ ID NO: 427862 - RNA, 32 nt, Human
gagguguguguaugucuuuaugaaauguuuga

SEQ ID NO: 427863 - RNA, 32 nt, Human
gagguguuagggaagaggaagagggugguaga

SEQ ID NO: 427864 - RNA, 32 nt, Human
gagguguucaaggagcaagagcuucagccuga

SEQ ID NO: 427865 - RNA, 32 nt, Human
gagguguucacacauccucuugugugcuaggu

SEQ ID NO: 427866 - RNA, 32 nt, Human
gagguguucuugaagacaggaggaggcucccg

SEQ ID NO: 427867 - RNA, 32 nt, Human
gagguguugcggcagagguuugagugaacccu

SEQ ID NO: 427868 - RNA, 32 nt, Human
gagguguuggagagcacaauggcugaacaagu

SEQ ID NO: 427869 - RNA, 32 nt, Human
gagguguuggggcaggaagugagucucuccau

SEQ ID NO: 427870 - RNA, 32 nt, Human
gagguguuuacaccagcaaaauacucauuuuu

SEQ ID NO: 427871 - RNA, 32 nt, Human
gagguguuuacuuaagaauaguaauuuaaaag

SEQ ID NO: 427872 - RNA, 18 nt, Human
gagguuaaaauauucaga

SEQ ID NO: 427873 - RNA, 32 nt, Human
gagguuaagaguuugagaacagccuggccaac

SEQ ID NO: 427874 - RNA, 22 nt, Human
gagguuaaggcaggcggaucac

SEQ ID NO: 427875 - RNA, 32 nt, Human
gagguuaaggcugaggaaaggccagcuggcag

SEQ ID NO: 427876 - RNA, 32 nt, Human
gagguuacaauuagaacuccugaccccagauu

SEQ ID NO: 427877 - RNA, 17 nt, Human
gagguuacacucuggga

SEQ ID NO: 427878 - RNA, 32 nt, Human
gagguuacagcgagccaagaucgcgccacugc

SEQ ID NO: 427879 - RNA, 32 nt, Human
gagguuacagggagccaagaucgcgcuacugc

SEQ ID NO: 427880 - RNA, 32 nt, Human
gagguuacagugagcagagaucaugccacugc

SEQ ID NO: 427881 - RNA, 32 nt, Human
gagguuacagugagccaagaucacaccacugu

SEQ ID NO: 427882 - RNA, 32 nt, Human
gagguuacagugagccaagaucgcgccaucgc

SEQ ID NO: 427883 - RNA, 32 nt, Human
gagguuacagugagccaagaucgugccacugc

SEQ ID NO: 427884 - RNA, 32 nt, Human
gagguuacagugagccaagaucgugccauugc

SEQ ID NO: 427885 - RNA, 32 nt, Human
gagguuacagugagccgagaucaugccauugc

SEQ ID NO: 427886 - RNA, 32 nt, Human
gagguuacagugagccgagaucgugccacugc

SEQ ID NO: 427887 - RNA, 32 nt, Human
gagguuacagugagcuaugauugcaccacugc

SEQ ID NO: 427888 - RNA, 32 nt, Human
gagguuacagugagcugagaucaugccacugc

SEQ ID NO: 427889 - RNA, 32 nt, Human
gagguuacagugagcugagaucgugccacugc

SEQ ID NO: 427890 - RNA, 32 nt, Human
gagguuacagugagcugagauugugccacugc

SEQ ID NO: 427891 - RNA, 32 nt, Human
gagguuacagugagcugauacugugccauugc

SEQ ID NO: 427892 - RNA, 21 nt, Human
gagguuacaugcagcugcuuu

SEQ ID NO: 427893 - RNA, 22 nt, Human
gagguuaccaccauugugauca

SEQ ID NO: 427894 - RNA, 32 nt, Human
gagguuacugcacugaggccaaguuaggaugg

SEQ ID NO: 427895 - RNA, 32 nt, Human
gagguuagaaguuugagaccagccuggccaac

SEQ ID NO: 427896 - RNA, 32 nt, Human
gagguuagagagaagagagucagcaacagcaa

SEQ ID NO: 427897 - RNA, 23 nt, Human
gagguuaggaguucaaaaccagc

SEQ ID NO: 427898 - RNA, 23 nt, Human
gagguuaggaguucaagaccagc

SEQ ID NO: 427899 - RNA, 23 nt, Human
gagguuaggaguucaagaucagc

SEQ ID NO: 427900 - RNA, 23 nt, Human
gagguuaggaguuccagaccagc

SEQ ID NO: 427901 - RNA, 23 nt, Human
gagguuaggaguucgagaccagc

SEQ ID NO: 427902 - RNA, 32 nt, Human
gagguuaggaguucgagagcagccuggccaac

SEQ ID NO: 427903 - RNA, 23 nt, Human
gagguuaggaguucgagaucagc

SEQ ID NO: 427904 - RNA, 23 nt, Human
gagguuaggaguucgaggccagc

SEQ ID NO: 427905 - RNA, 23 nt, Human
gagguuaggaguucgauaccagc

SEQ ID NO: 427906 - RNA, 32 nt, Human
gagguuaggaguugaaaagaagagucgacugu

SEQ ID NO: 427907 - RNA, 23 nt, Human
gagguuaggaguuugagaccagc

SEQ ID NO: 427908 - RNA, 32 nt, Human
gagguuaggaguuugagaccagccuggccaac

SEQ ID NO: 427909 - RNA, 23 nt, Human
gagguuaggaguuugagaucagc

SEQ ID NO: 427910 - RNA, 23 nt, Human
gagguuaggcguuccagaccagc

SEQ ID NO: 427911 - RNA, 23 nt, Human
gagguuagggguuucaccauguu

SEQ ID NO: 427912 - RNA, 32 nt, Human
gagguuauggagagccaagaucgcaccacugc

SEQ ID NO: 427913 - RNA, 32 nt, Human
gagguuauuuguguccuccugacacacacuuu

SEQ ID NO: 427914 - RNA, 32 nt, Human
gagguuauuuguuccuuagacccuggaauaac

SEQ ID NO: 427915 - RNA, 32 nt, Human
gagguucacagaggcccuugucuaggcagaag

SEQ ID NO: 427916 - RNA, 32 nt, Human
gagguucacugguaaucccagcacuuugggag

SEQ ID NO: 427917 - RNA, 32 nt, Human
gagguuccagacagccccucuucaccagcgau

SEQ ID NO: 427918 - RNA, 32 nt, Human
gagguuccagugagccaaaaucaugccaaugu

SEQ ID NO: 427919 - RNA, 32 nt, Human
gagguuccagugagcugagauggugccauuga

SEQ ID NO: 427920 - RNA, 21 nt, Human
gagguucccaaggccuacuga

SEQ ID NO: 427921 - RNA, 32 nt, Human
gagguucccagccgcugggaagccccuagacg

SEQ ID NO: 427922 - RNA, 32 nt, Human
gagguuccugggaguuagagggguaaugggag

SEQ ID NO: 427923 - RNA, 32 nt, Human
gagguuccuggguacacuccauuugaaaagcu

SEQ ID NO: 427924 - RNA, 32 nt, Human
gagguuccuguuugaacccaggagaguggaag

SEQ ID NO: 427925 - RNA, 24 nt, Human
gagguucuaaggccuaggauucua

SEQ ID NO: 427926 - RNA, 32 nt, Human
gagguucuccaggaccuuagguuugaugcgga

SEQ ID NO: 427927 - RNA, 32 nt, Human
gagguucucccagcccaucugaacacaaccag

SEQ ID NO: 427928 - RNA, 32 nt, Human
gagguucucucagcccuuccucccucucccug

SEQ ID NO: 427929 - RNA, 21 nt, Human
gagguucugcagcgucuccug

SEQ ID NO: 427930 - RNA, 19 nt, Human
gagguucugccacaugccc

SEQ ID NO: 427931 - RNA, 32 nt, Human
gagguucugcuugggauaaugaagagcugccu

SEQ ID NO: 427932 - RNA, 32 nt, Human
gagguucuggaagacuggggcagcaguugggg

SEQ ID NO: 427933 - RNA, 32 nt, Human
gagguucuuacagacaucuuuccucuuuguag

SEQ ID NO: 427934 - RNA, 23 nt, Human
gagguucuuaggggccgugccca

SEQ ID NO: 427935 - RNA, 24 nt, Human
gagguucuuccugccauccugcca

SEQ ID NO: 427936 - RNA, 32 nt, Human
gagguucuuccugccauccugccaucauuugu

SEQ ID NO: 427937 - RNA, 32 nt, Human
gagguucuugcagccaugcaggauccagaagu

SEQ ID NO: 427938 - RNA, 32 nt, Human
gagguugaacccuuuccccuggggguugguga

SEQ ID NO: 427939 - RNA, 32 nt, Human
gagguugaagaaaggaaccugggaugaggggu

SEQ ID NO: 427940 - RNA, 32 nt, Human
gagguugaagugagccaagaucgugccacugc

SEQ ID NO: 427941 - RNA, 32 nt, Human
gagguugaagugagccaagaucgugccauugc

SEQ ID NO: 427942 - RNA, 32 nt, Human
gagguugaaguggguggaucaccugaggucag

SEQ ID NO: 427943 - RNA, 17 nt, Human
gagguugacucuucuga

SEQ ID NO: 427944 - RNA, 32 nt, Human
gagguugagaauuccuuccuccucauccuugg

SEQ ID NO: 427945 - RNA, 22 nt, Human
gagguugaggcagguggaucac

SEQ ID NO: 427946 - RNA, 32 nt, Human
gagguugaggcccacaacacggugaccucugg

SEQ ID NO: 427947 - RNA, 32 nt, Human
gagguugaggcugaacugagccaggaucuugc

SEQ ID NO: 427948 - RNA, 23 nt, Human
gagguugaggcugcagugaacua

SEQ ID NO: 427949 - RNA, 32 nt, Human
gagguugaggcugcagugaauuaugauugugg

SEQ ID NO: 427950 - RNA, 21 nt, Human
gagguugaggcugcagugagc

SEQ ID NO: 427951 - RNA, 24 nt, Human
gagguugaggcugcagugagcuau

SEQ ID NO: 427952 - RNA, 32 nt, Human
gagguugaggcugcagugagcuaugaccauac

SEQ ID NO: 427953 - RNA, 32 nt, Human
gagguugaggcugcagugagcuaugaucacac

SEQ ID NO: 427954 - RNA, 32 nt, Human
gagguugaggcugcagugagcuaugaucgcau

SEQ ID NO: 427955 - RNA, 32 nt, Human
gagguugaggcugcagugagcuaugauuaugc

SEQ ID NO: 427956 - RNA, 32 nt, Human
gagguugaggcugcagugagcuauguucauga

SEQ ID NO: 427957 - RNA, 32 nt, Human
gagguugaggcugcagugagcuguguuucgcc

SEQ ID NO: 427958 - RNA, 32 nt, Human
gagguugaggcugcaguggcuaugaucaugcc

SEQ ID NO: 427959 - RNA, 32 nt, Human
gagguugaggugagagguuugccagaguuugu

SEQ ID NO: 427960 - RNA, 32 nt, Human
gagguugaggugggaggauuugcuugaaccca

SEQ ID NO: 427961 - RNA, 32 nt, Human
gagguugaggugggcggaucaccugaggucag

SEQ ID NO: 427962 - RNA, 19 nt, Human
gagguugagguugcaguga

SEQ ID NO: 427963 - RNA, 32 nt, Human
gagguugcaaugagccaagaucgcgccacugc

SEQ ID NO: 427964 - RNA, 25 nt, Human
gagguugcacagaccuggaauuuca

SEQ ID NO: 427965 - RNA, 32 nt, Human
gagguugcaccauuguacuccagccugggcaa

SEQ ID NO: 427966 - RNA, 32 nt, Human
gagguugcagagcaggccaggcagacaguggg

SEQ ID NO: 427967 - RNA, 32 nt, Human
gagguugcagcaagccaagaucacgccauugu

SEQ ID NO: 427968 - RNA, 32 nt, Human
gagguugcagcgagccaagaucaugccacugc

SEQ ID NO: 427969 - RNA, 32 nt, Human
gagguugcagcgagcugagaucacgccacugu

SEQ ID NO: 427970 - RNA, 32 nt, Human
gagguugcagggagccgagaucacgccacugc

SEQ ID NO: 427971 - RNA, 32 nt, Human
gagguugcagggagcugagaucacgccacugc

SEQ ID NO: 427972 - RNA, 32 nt, Human
gagguugcaguaagccaagaucgcgccauugc

SEQ ID NO: 427973 - RNA, 32 nt, Human
gagguugcaguaagccgagaucacgccacugc

SEQ ID NO: 427974 - RNA, 32 nt, Human
gagguugcaguaagccgagaucacgccacugu

SEQ ID NO: 427975 - RNA, 32 nt, Human
gagguugcaguaagcuaugauugugccacugu

SEQ ID NO: 427976 - RNA, 32 nt, Human
gagguugcagucagcuaugaucgugccacugc

SEQ ID NO: 427977 - RNA, 32 nt, Human
gagguugcagugaaccaagaucaugccacuga

SEQ ID NO: 427978 - RNA, 32 nt, Human
gagguugcagugaaccgagaucaugccaccgc

SEQ ID NO: 427979 - RNA, 32 nt, Human
gagguugcagugaaccgagauugugccacuac

SEQ ID NO: 427980 - RNA, 32 nt, Human
gagguugcagugaaccgagauugugccauugc

SEQ ID NO: 427981 - RNA, 32 nt, Human
gagguugcagugaacugagaucgugccauugu

SEQ ID NO: 427982 - RNA, 32 nt, Human
gagguugcagugaacugaggucgugcugccac

SEQ ID NO: 427983 - RNA, 32 nt, Human
gagguugcagugaacugauagugccgcugcac

SEQ ID NO: 427984 - RNA, 32 nt, Human
gagguugcagugacagagaucgugccacugca

SEQ ID NO: 427985 - RNA, 32 nt, Human
gagguugcagugacccaagaucgugccacuuc

SEQ ID NO: 427986 - RNA, 32 nt, Human
gagguugcagugagacaagaucacgucacugu

SEQ ID NO: 427987 - RNA, 32 nt, Human
gagguugcagugagacgagauugugccacugc

SEQ ID NO: 427988 - RNA, 32 nt, Human
gagguugcagugagcagagaccgagccacugu

SEQ ID NO: 427989 - RNA, 32 nt, Human
gagguugcagugagcagagaucacaccacugc

SEQ ID NO: 427990 - RNA, 32 nt, Human
gagguugcagugagcagagaucaugccacugc

SEQ ID NO: 427991 - RNA, 32 nt, Human
gagguugcagugagcagagaucgugccacugc

SEQ ID NO: 427992 - RNA, 32 nt, Human
gagguugcagugagcagagauugcccccgcua

SEQ ID NO: 427993 - RNA, 32 nt, Human
gagguugcagugagcagagauugcgccacugc

SEQ ID NO: 427994 - RNA, 32 nt, Human
gagguugcagugagcagagauugcgccacugu

SEQ ID NO: 427995 - RNA, 32 nt, Human
gagguugcagugagcagagauugcgccauugu

SEQ ID NO: 427996 - RNA, 32 nt, Human
gagguugcagugagcagagauugugccacugc

SEQ ID NO: 427997 - RNA, 32 nt, Human
gagguugcagugagcaguaaucccgccacugc

SEQ ID NO: 427998 - RNA, 32 nt, Human
gagguugcagugagcaguuaucacaccacugc

SEQ ID NO: 427999 - RNA, 32 nt, Human
gagguugcagugagccaaaaucccaccacugc

SEQ ID NO: 428000 - RNA, 32 nt, Human
gagguugcagugagccaaaauuacgccacugc

SEQ ID NO: 428001 - RNA, 32 nt, Human
gagguugcagugagccaagacagugccauugc

SEQ ID NO: 428002 - RNA, 32 nt, Human
gagguugcagugagccaagacuacgccacugc

SEQ ID NO: 428003 - RNA, 32 nt, Human
gagguugcagugagccaagacugugccacugc

SEQ ID NO: 428004 - RNA, 32 nt, Human
gagguugcagugagccaagauagugccacugc

SEQ ID NO: 428005 - RNA, 32 nt, Human
gagguugcagugagccaagaucaagccauugc

SEQ ID NO: 428006 - RNA, 32 nt, Human
gagguugcagugagccaagaucacaccacuga

SEQ ID NO: 428007 - RNA, 32 nt, Human
gagguugcagugagccaagaucacaccacugc

SEQ ID NO: 428008 - RNA, 32 nt, Human
gagguugcagugagccaagaucacaccagugc

SEQ ID NO: 428009 - RNA, 32 nt, Human
gagguugcagugagccaagaucacaccauugc

SEQ ID NO: 428010 - RNA, 32 nt, Human
gagguugcagugagccaagaucacacuacugc

SEQ ID NO: 428011 - RNA, 32 nt, Human
gagguugcagugagccaagaucacacuauugc

SEQ ID NO: 428012 - RNA, 32 nt, Human
gagguugcagugagccaagaucacaggagcca

SEQ ID NO: 428013 - RNA, 32 nt, Human
gagguugcagugagccaagaucacgccacugc

SEQ ID NO: 428014 - RNA, 32 nt, Human
gagguugcagugagccaagaucacgccauuac

SEQ ID NO: 428015 - RNA, 32 nt, Human
gagguugcagugagccaagaucacgccauugc

SEQ ID NO: 428016 - RNA, 32 nt, Human
gagguugcagugagccaagaucacgucauugc

SEQ ID NO: 428017 - RNA, 32 nt, Human
gagguugcagugagccaagaucagaccacugc

SEQ ID NO: 428018 - RNA, 32 nt, Human
gagguugcagugagccaagaucauaccacggc

SEQ ID NO: 428019 - RNA, 32 nt, Human
gagguugcagugagccaagaucauaccacugc

SEQ ID NO: 428020 - RNA, 32 nt, Human
gagguugcagugagccaagaucaugccacauc

SEQ ID NO: 428021 - RNA, 32 nt, Human
gagguugcagugagccaagaucaugccacugc

SEQ ID NO: 428022 - RNA, 32 nt, Human
gagguugcagugagccaagaucaugccacuuu

SEQ ID NO: 428023 - RNA, 32 nt, Human
gagguugcagugagccaagaucaugccauuau

SEQ ID NO: 428024 - RNA, 32 nt, Human
gagguugcagugagccaagaucaugccauugc

SEQ ID NO: 428025 - RNA, 32 nt, Human
gagguugcagugagccaagaucaugccuacug

SEQ ID NO: 428026 - RNA, 32 nt, Human
gagguugcagugagccaagaucaugucauugc

SEQ ID NO: 428027 - RNA, 32 nt, Human
gagguugcagugagccaagauccugccacugc

SEQ ID NO: 428028 - RNA, 32 nt, Human
gagguugcagugagccaagaucgcaccacuga

SEQ ID NO: 428029 - RNA, 32 nt, Human
gagguugcagugagccaagaucgcaccacugc

SEQ ID NO: 428030 - RNA, 32 nt, Human
gagguugcagugagccaagaucgcaccacugu

SEQ ID NO: 428031 - RNA, 32 nt, Human
gagguugcagugagccaagaucgcaccauugc

SEQ ID NO: 428032 - RNA, 32 nt, Human
gagguugcagugagccaagaucgcaccauugu

SEQ ID NO: 428033 - RNA, 32 nt, Human
gagguugcagugagccaagaucgcccacugca

SEQ ID NO: 428034 - RNA, 32 nt, Human
gagguugcagugagccaagaucgcgccacugc

SEQ ID NO: 428035 - RNA, 32 nt, Human
gagguugcagugagccaagaucgcgccauucu

SEQ ID NO: 428036 - RNA, 32 nt, Human
gagguugcagugagccaagaucgcgccauugc

SEQ ID NO: 428037 - RNA, 32 nt, Human
gagguugcagugagccaagaucgcgcuauugc

SEQ ID NO: 428038 - RNA, 32 nt, Human
gagguugcagugagccaagaucguaccacugc

SEQ ID NO: 428039 - RNA, 32 nt, Human
gagguugcagugagccaagaucgugccaaugc

SEQ ID NO: 428040 - RNA, 32 nt, Human
gagguugcagugagccaagaucgugccacgca

SEQ ID NO: 428041 - RNA, 32 nt, Human
gagguugcagugagccaagaucgugccacuac

SEQ ID NO: 428042 - RNA, 32 nt, Human
gagguugcagugagccaagaucgugccacugc

SEQ ID NO: 428043 - RNA, 32 nt, Human
gagguugcagugagccaagaucgugccauugc

SEQ ID NO: 428044 - RNA, 32 nt, Human
gagguugcagugagccaagaucgugucacugc

SEQ ID NO: 428045 - RNA, 32 nt, Human
gagguugcagugagccaagauggcgccacuac

SEQ ID NO: 428046 - RNA, 32 nt, Human
gagguugcagugagccaagauggcgccacugc

SEQ ID NO: 428047 - RNA, 32 nt, Human
gagguugcagugagccaagauggcgccauugc

SEQ ID NO: 428048 - RNA, 32 nt, Human
gagguugcagugagccaagauuacgccacugc

SEQ ID NO: 428049 - RNA, 32 nt, Human
gagguugcagugagccaagauuaugccacugc

SEQ ID NO: 428050 - RNA, 32 nt, Human
gagguugcagugagccaagauuaugccauugc

SEQ ID NO: 428051 - RNA, 32 nt, Human
gagguugcagugagccaagauuaugucacugc

SEQ ID NO: 428052 - RNA, 32 nt, Human
gagguugcagugagccaagauugcaccacugc

SEQ ID NO: 428053 - RNA, 32 nt, Human
gagguugcagugagccaagauugcacccugca

SEQ ID NO: 428054 - RNA, 32 nt, Human
gagguugcagugagccaagauugcaucacugc

SEQ ID NO: 428055 - RNA, 32 nt, Human
gagguugcagugagccaagauugccccacugc

SEQ ID NO: 428056 - RNA, 32 nt, Human
gagguugcagugagccaagauugcgccacugc

SEQ ID NO: 428057 - RNA, 32 nt, Human
gagguugcagugagccaagauugcgccacugu

SEQ ID NO: 428058 - RNA, 32 nt, Human
gagguugcagugagccaagauugcgccauugc

SEQ ID NO: 428059 - RNA, 32 nt, Human
gagguugcagugagccaagauugcgcccccug

SEQ ID NO: 428060 - RNA, 32 nt, Human
gagguugcagugagccaagauugcgccgcuac

SEQ ID NO: 428061 - RNA, 32 nt, Human
gagguugcagugagccaagauugcgccguugu

SEQ ID NO: 428062 - RNA, 32 nt, Human
gagguugcagugagccaagauugugccacugc

SEQ ID NO: 428063 - RNA, 32 nt, Human
gagguugcagugagccaagauugugccacugu

SEQ ID NO: 428064 - RNA, 32 nt, Human
gagguugcagugagccaagauugugccauugc

SEQ ID NO: 428065 - RNA, 32 nt, Human
gagguugcagugagccaaggucacaccauugc

SEQ ID NO: 428066 - RNA, 32 nt, Human
gagguugcagugagccaaggucacgucacugc

SEQ ID NO: 428067 - RNA, 32 nt, Human
gagguugcagugagccaaggucauaccagugc

SEQ ID NO: 428068 - RNA, 32 nt, Human
gagguugcagugagccaagguugcgccacugu

SEQ ID NO: 428069 - RNA, 32 nt, Human
gagguugcagugagccaaguucgaacuccugc

SEQ ID NO: 428070 - RNA, 32 nt, Human
gagguugcagugagccaauaucgugccacugc

SEQ ID NO: 428071 - RNA, 32 nt, Human
gagguugcagugagccacugcacuccagccug

SEQ ID NO: 428072 - RNA, 32 nt, Human
gagguugcagugagccaggaucacaccauugc

SEQ ID NO: 428073 - RNA, 32 nt, Human
gagguugcagugagccaggaucgcgccauugc

SEQ ID NO: 428074 - RNA, 32 nt, Human
gagguugcagugagccaggauugcgccaccac

SEQ ID NO: 428075 - RNA, 32 nt, Human
gagguugcagugagccaggauugugccacugc

SEQ ID NO: 428076 - RNA, 32 nt, Human
gagguugcagugagccaggauugugccauugc

SEQ ID NO: 428077 - RNA, 32 nt, Human
gagguugcagugagccaugaucaugccacugc

SEQ ID NO: 428078 - RNA, 32 nt, Human
gagguugcagugagccaugaucgagccacugc

SEQ ID NO: 428079 - RNA, 32 nt, Human
gagguugcagugagccaugaucgcaccacugc

SEQ ID NO: 428080 - RNA, 32 nt, Human
gagguugcagugagccaugauugcaccacugc

SEQ ID NO: 428081 - RNA, 32 nt, Human
gagguugcagugagcccagauaaagccacugc

SEQ ID NO: 428082 - RNA, 32 nt, Human
gagguugcagugagcccagaucacgccagugc

SEQ ID NO: 428083 - RNA, 32 nt, Human
gagguugcagugagcccagaucgcaccauugc

SEQ ID NO: 428084 - RNA, 32 nt, Human
gagguugcagugagcccagauggcgcugcugc

SEQ ID NO: 428085 - RNA, 32 nt, Human
gagguugcagugagcccagauugugccacugc

SEQ ID NO: 428086 - RNA, 32 nt, Human
gagguugcagugagccgaaauuaugccacugc

SEQ ID NO: 428087 - RNA, 32 nt, Human
gagguugcagugagccgacaucaugccacugc

SEQ ID NO: 428088 - RNA, 32 nt, Human
gagguugcagugagccgacaucaugccauugc

SEQ ID NO: 428089 - RNA, 32 nt, Human
gagguugcagugagccgacaucgcgccauugc

SEQ ID NO: 428090 - RNA, 32 nt, Human
gagguugcagugagccgagaaugccacugcac

SEQ ID NO: 428091 - RNA, 32 nt, Human
gagguugcagugagccgagaccacgccauugc

SEQ ID NO: 428092 - RNA, 32 nt, Human
gagguugcagugagccgagaccauaccacugc

SEQ ID NO: 428093 - RNA, 32 nt, Human
gagguugcagugagccgagaccaugccacugc

SEQ ID NO: 428094 - RNA, 32 nt, Human
gagguugcagugagccgagaccgcgccacugc

SEQ ID NO: 428095 - RNA, 32 nt, Human
gagguugcagugagccgagaccgugccacugc

SEQ ID NO: 428096 - RNA, 32 nt, Human
gagguugcagugagccgagagcaugccgcugc

SEQ ID NO: 428097 - RNA, 32 nt, Human
gagguugcagugagccgagauaaugccacugc

SEQ ID NO: 428098 - RNA, 32 nt, Human
gagguugcagugagccgagauagugccacagc

SEQ ID NO: 428099 - RNA, 32 nt, Human
gagguugcagugagccgagauagugccacugc

SEQ ID NO: 428100 - RNA, 32 nt, Human
gagguugcagugagccgagauagugccacugu

SEQ ID NO: 428101 - RNA, 32 nt, Human
gagguugcagugagccgagaucacaccaccgc

SEQ ID NO: 428102 - RNA, 32 nt, Human
gagguugcagugagccgagaucacaccacugc

SEQ ID NO: 428103 - RNA, 32 nt, Human
gagguugcagugagccgagaucacaccacugu

SEQ ID NO: 428104 - RNA, 32 nt, Human
gagguugcagugagccgagaucacaccauugc

SEQ ID NO: 428105 - RNA, 32 nt, Human
gagguugcagugagccgagaucaccccauuuc

SEQ ID NO: 428106 - RNA, 32 nt, Human
gagguugcagugagccgagaucacgccacugc

SEQ ID NO: 428107 - RNA, 32 nt, Human
gagguugcagugagccgagaucacgccauugc

SEQ ID NO: 428108 - RNA, 32 nt, Human
gagguugcagugagccgagaucacgccgcugc

SEQ ID NO: 428109 - RNA, 32 nt, Human
gagguugcagugagccgagaucacgccucugc

SEQ ID NO: 428110 - RNA, 32 nt, Human
gagguugcagugagccgagaucacgcuccugc

SEQ ID NO: 428111 - RNA, 32 nt, Human
gagguugcagugagccgagaucacgucacugc

SEQ ID NO: 428112 - RNA, 32 nt, Human
gagguugcagugagccgagaucacgucauugc

SEQ ID NO: 428113 - RNA, 32 nt, Human
gagguugcagugagccgagaucauaccauugc

SEQ ID NO: 428114 - RNA, 32 nt, Human
gagguugcagugagccgagaucaugccacugc

SEQ ID NO: 428115 - RNA, 32 nt, Human
gagguugcagugagccgagaucaugccauugc

SEQ ID NO: 428116 - RNA, 32 nt, Human
gagguugcagugagccgagaucaugcuacugc

SEQ ID NO: 428117 - RNA, 32 nt, Human
gagguugcagugagccgagaucaugcugaagg

SEQ ID NO: 428118 - RNA, 32 nt, Human
gagguugcagugagccgagaucaugucacugc

SEQ ID NO: 428119 - RNA, 32 nt, Human
gagguugcagugagccgagaucccccgaccgc

SEQ ID NO: 428120 - RNA, 32 nt, Human
gagguugcagugagccgagaucccgccacuca

SEQ ID NO: 428121 - RNA, 32 nt, Human
gagguugcagugagccgagaucgagccacugc

SEQ ID NO: 428122 - RNA, 32 nt, Human
gagguugcagugagccgagaucgagccauugc

SEQ ID NO: 428123 - RNA, 32 nt, Human
gagguugcagugagccgagaucgcaccacgcc

SEQ ID NO: 428124 - RNA, 32 nt, Human
gagguugcagugagccgagaucgcaccacugc

SEQ ID NO: 428125 - RNA, 32 nt, Human
gagguugcagugagccgagaucgcaccacugu

SEQ ID NO: 428126 - RNA, 32 nt, Human
gagguugcagugagccgagaucgcaccauugc

SEQ ID NO: 428127 - RNA, 32 nt, Human
gagguugcagugagccgagaucgcaucacugc

SEQ ID NO: 428128 - RNA, 32 nt, Human
gagguugcagugagccgagaucgcauuacugc

SEQ ID NO: 428129 - RNA, 32 nt, Human
gagguugcagugagccgagaucgccccacugc

SEQ ID NO: 428130 - RNA, 32 nt, Human
gagguugcagugagccgagaucgcccugcugc

SEQ ID NO: 428131 - RNA, 32 nt, Human
gagguugcagugagccgagaucgcgccaccca

SEQ ID NO: 428132 - RNA, 32 nt, Human
gagguugcagugagccgagaucgcgccacugc

SEQ ID NO: 428133 - RNA, 32 nt, Human
gagguugcagugagccgagaucgcgccauagc

SEQ ID NO: 428134 - RNA, 32 nt, Human
gagguugcagugagccgagaucgcgccauuac

SEQ ID NO: 428135 - RNA, 32 nt, Human
gagguugcagugagccgagaucgcgccauugc

SEQ ID NO: 428136 - RNA, 32 nt, Human
gagguugcagugagccgagaucgcgccuuugc

SEQ ID NO: 428137 - RNA, 32 nt, Human
gagguugcagugagccgagaucgcgucacugc

SEQ ID NO: 428138 - RNA, 32 nt, Human
gagguugcagugagccgagaucgcuccacugc

SEQ ID NO: 428139 - RNA, 32 nt, Human
gagguugcagugagccgagaucgucccacugc

SEQ ID NO: 428140 - RNA, 32 nt, Human
gagguugcagugagccgagaucgugccacugc

SEQ ID NO: 428141 - RNA, 32 nt, Human
gagguugcagugagccgagaucgugccauugc

SEQ ID NO: 428142 - RNA, 32 nt, Human
gagguugcagugagccgagaucgugccuuugc

SEQ ID NO: 428143 - RNA, 32 nt, Human
gagguugcagugagccgagaucgugcuacugc

SEQ ID NO: 428144 - RNA, 32 nt, Human
gagguugcagugagccgagaucucaccauuac

SEQ ID NO: 428145 - RNA, 32 nt, Human
gagguugcagugagccgagauggcgccacugc

SEQ ID NO: 428146 - RNA, 32 nt, Human
gagguugcagugagccgagaugguaccucugc

SEQ ID NO: 428147 - RNA, 32 nt, Human
gagguugcagugagccgagauggugccacugc

SEQ ID NO: 428148 - RNA, 32 nt, Human
gagguugcagugagccgagauuaugccacugc

SEQ ID NO: 428149 - RNA, 32 nt, Human
gagguugcagugagccgagauuaugccacugu

SEQ ID NO: 428150 - RNA, 32 nt, Human
gagguugcagugagccgagauuaugucacucc

SEQ ID NO: 428151 - RNA, 32 nt, Human
gagguugcagugagccgagauugcaccccugc

SEQ ID NO: 428152 - RNA, 32 nt, Human
gagguugcagugagccgagauugccacugcac

SEQ ID NO: 428153 - RNA, 32 nt, Human
gagguugcagugagccgagauugcgccacuac

SEQ ID NO: 428154 - RNA, 32 nt, Human
gagguugcagugagccgagauugcgccacugc

SEQ ID NO: 428155 - RNA, 32 nt, Human
gagguugcagugagccgagauugcgccacugg

SEQ ID NO: 428156 - RNA, 32 nt, Human
gagguugcagugagccgagauugcgccacugu

SEQ ID NO: 428157 - RNA, 32 nt, Human
gagguugcagugagccgagauugcgccauugc

SEQ ID NO: 428158 - RNA, 32 nt, Human
gagguugcagugagccgagauugcgccccugc

SEQ ID NO: 428159 - RNA, 32 nt, Human
gagguugcagugagccgagauugcuccauugc

SEQ ID NO: 428160 - RNA, 32 nt, Human
gagguugcagugagccgagauuggccauugca

SEQ ID NO: 428161 - RNA, 32 nt, Human
gagguugcagugagccgagauuggucccaccg

SEQ ID NO: 428162 - RNA, 32 nt, Human
gagguugcagugagccgagauugugccacuac

SEQ ID NO: 428163 - RNA, 32 nt, Human
gagguugcagugagccgagauugugccacugc

SEQ ID NO: 428164 - RNA, 32 nt, Human
gagguugcagugagccgagauugugccacugu

SEQ ID NO: 428165 - RNA, 32 nt, Human
gagguugcagugagccgagauugugccauugc

SEQ ID NO: 428166 - RNA, 32 nt, Human
gagguugcagugagccgagauugugccccugc

SEQ ID NO: 428167 - RNA, 32 nt, Human
gagguugcagugagccgagauugugcugcugc

SEQ ID NO: 428168 - RNA, 32 nt, Human
gagguugcagugagccgagcucgcgccauugc

SEQ ID NO: 428169 - RNA, 32 nt, Human
gagguugcagugagccgaggucccgccacugc

SEQ ID NO: 428170 - RNA, 32 nt, Human
gagguugcagugagccgaggucgcaccacugc

SEQ ID NO: 428171 - RNA, 32 nt, Human
gagguugcagugagccgaggucgcaccguugu

SEQ ID NO: 428172 - RNA, 32 nt, Human
gagguugcagugagccgaggucgcuccauugc

SEQ ID NO: 428173 - RNA, 32 nt, Human
gagguugcagugagccgaggucgugccauugc

SEQ ID NO: 428174 - RNA, 32 nt, Human
gagguugcagugagccgagucacgccacugca

SEQ ID NO: 428175 - RNA, 32 nt, Human
gagguugcagugagccgaguuugggccacugc

SEQ ID NO: 428176 - RNA, 32 nt, Human
gagguugcagugagccgauaucgugccacugc

SEQ ID NO: 428177 - RNA, 28 nt, Human
gagguugcagugagccgucaucgcgcca

SEQ ID NO: 428178 - RNA, 32 nt, Human
gagguugcagugagccgugauugugccauugu

SEQ ID NO: 428179 - RNA, 32 nt, Human
gagguugcagugagccgugauugugccgcaac

SEQ ID NO: 428180 - RNA, 32 nt, Human
gagguugcagugagccucgauuguaccacugc

SEQ ID NO: 428181 - RNA, 32 nt, Human
gagguugcagugagccuggaucaugccacugc

SEQ ID NO: 428182 - RNA, 32 nt, Human
gagguugcagugagccugucaucgcuccacug

SEQ ID NO: 428183 - RNA, 32 nt, Human
gagguugcagugagccuugaucgugccacugc

SEQ ID NO: 428184 - RNA, 32 nt, Human
gagguugcagugagcgagaucaugccauugca

SEQ ID NO: 428185 - RNA, 32 nt, Human
gagguugcagugagcggagaucaugccacugc

SEQ ID NO: 428186 - RNA, 32 nt, Human
gagguugcagugagcggagaucaugccagugc

SEQ ID NO: 428187 - RNA, 32 nt, Human
gagguugcagugagcggagaucgccccacuac

SEQ ID NO: 428188 - RNA, 32 nt, Human
gagguugcagugagcggagaucgugccauugc

SEQ ID NO: 428189 - RNA, 32 nt, Human
gagguugcagugagcggagaucuugccacugc

SEQ ID NO: 428190 - RNA, 32 nt, Human
gagguugcagugagcuaagacugacccacugc

SEQ ID NO: 428191 - RNA, 32 nt, Human
gagguugcagugagcuaagacugugccacugc

SEQ ID NO: 428192 - RNA, 32 nt, Human
gagguugcagugagcuaagaucacaccacuac

SEQ ID NO: 428193 - RNA, 32 nt, Human
gagguugcagugagcuaagaucacaccacugc

SEQ ID NO: 428194 - RNA, 32 nt, Human
gagguugcagugagcuaagaucacaucacugc

SEQ ID NO: 428195 - RNA, 32 nt, Human
gagguugcagugagcuaagaucacgccacugc

SEQ ID NO: 428196 - RNA, 32 nt, Human
gagguugcagugagcuaagaucgcaccacugc

SEQ ID NO: 428197 - RNA, 32 nt, Human
gagguugcagugagcuaagaucgcgccacugu

SEQ ID NO: 428198 - RNA, 32 nt, Human
gagguugcagugagcuaagaucgugccacugc

SEQ ID NO: 428199 - RNA, 32 nt, Human
gagguugcagugagcuaugauaacaccacugc

SEQ ID NO: 428200 - RNA, 32 nt, Human
gagguugcagugagcucagauagugccacugc

SEQ ID NO: 428201 - RNA, 32 nt, Human
gagguugcagugagcucagaucucaccauugc

SEQ ID NO: 428202 - RNA, 32 nt, Human
gagguugcagugagcucagauggugccacugc

SEQ ID NO: 428203 - RNA, 32 nt, Human
gagguugcagugagcucagauugcgucacugc

SEQ ID NO: 428204 - RNA, 32 nt, Human
gagguugcagugagcugaaauccugccacugc

SEQ ID NO: 428205 - RNA, 32 nt, Human
gagguugcagugagcugagaacucaccauugc

SEQ ID NO: 428206 - RNA, 32 nt, Human
gagguugcagugagcugagaccaugccacugc

SEQ ID NO: 428207 - RNA, 32 nt, Human
gagguugcagugagcugagacggugccauugc

SEQ ID NO: 428208 - RNA, 32 nt, Human
gagguugcagugagcugagacugugccacugc

SEQ ID NO: 428209 - RNA, 32 nt, Human
gagguugcagugagcugagacugugccauugc

SEQ ID NO: 428210 - RNA, 32 nt, Human
gagguugcagugagcugagagcacgccauugc

SEQ ID NO: 428211 - RNA, 32 nt, Human
gagguugcagugagcugagagugugccauugc

SEQ ID NO: 428212 - RNA, 32 nt, Human
gagguugcagugagcugagauaacgccacugc

SEQ ID NO: 428213 - RNA, 32 nt, Human
gagguugcagugagcugagauagcgccauugc

SEQ ID NO: 428214 - RNA, 32 nt, Human
gagguugcagugagcugagaucacaccacugc

SEQ ID NO: 428215 - RNA, 32 nt, Human
gagguugcagugagcugagaucacaccauugc

SEQ ID NO: 428216 - RNA, 32 nt, Human
gagguugcagugagcugagaucacacuacugu

SEQ ID NO: 428217 - RNA, 32 nt, Human
gagguugcagugagcugagaucacaucacugc

SEQ ID NO: 428218 - RNA, 32 nt, Human
gagguugcagugagcugagaucaccccacugu

SEQ ID NO: 428219 - RNA, 32 nt, Human
gagguugcagugagcugagaucacgccacugc

SEQ ID NO: 428220 - RNA, 32 nt, Human
gagguugcagugagcugagaucacgccauugc

SEQ ID NO: 428221 - RNA, 32 nt, Human
gagguugcagugagcugagaucacgccauugu

SEQ ID NO: 428222 - RNA, 32 nt, Human
gagguugcagugagcugagaucacgcuacugc

SEQ ID NO: 428223 - RNA, 32 nt, Human
gagguugcagugagcugagaucacgucauugc

SEQ ID NO: 428224 - RNA, 32 nt, Human
gagguugcagugagcugagaucaggccacugc

SEQ ID NO: 428225 - RNA, 32 nt, Human
gagguugcagugagcugagaucaugccacugc

SEQ ID NO: 428226 - RNA, 32 nt, Human
gagguugcagugagcugagaucaugccaucgc

SEQ ID NO: 428227 - RNA, 32 nt, Human
gagguugcagugagcugagaucaugccauugc

SEQ ID NO: 428228 - RNA, 32 nt, Human
gagguugcagugagcugagaucaugucacugu

SEQ ID NO: 428229 - RNA, 32 nt, Human
gagguugcagugagcugagaucauguuucugc

SEQ ID NO: 428230 - RNA, 32 nt, Human
gagguugcagugagcugagaucccaccacugc

SEQ ID NO: 428231 - RNA, 32 nt, Human
gagguugcagugagcugagaucgagccacugc

SEQ ID NO: 428232 - RNA, 32 nt, Human
gagguugcagugagcugagaucgcaccacugc

SEQ ID NO: 428233 - RNA, 32 nt, Human
gagguugcagugagcugagaucgcaccauuac

SEQ ID NO: 428234 - RNA, 32 nt, Human
gagguugcagugagcugagaucgcaccauugc

SEQ ID NO: 428235 - RNA, 32 nt, Human
gagguugcagugagcugagaucgcgccacugc

SEQ ID NO: 428236 - RNA, 32 nt, Human
gagguugcagugagcugagaucgcgccacugg

SEQ ID NO: 428237 - RNA, 32 nt, Human
gagguugcagugagcugagaucgcgccaguac

SEQ ID NO: 428238 - RNA, 32 nt, Human
gagguugcagugagcugagaucgcgccauugc

SEQ ID NO: 428239 - RNA, 32 nt, Human
gagguugcagugagcugagaucgcgcuacugc

SEQ ID NO: 428240 - RNA, 32 nt, Human
gagguugcagugagcugagaucguaccuauug

SEQ ID NO: 428241 - RNA, 32 nt, Human
gagguugcagugagcugagaucguagcacugc

SEQ ID NO: 428242 - RNA, 32 nt, Human
gagguugcagugagcugagaucgucccacugc

SEQ ID NO: 428243 - RNA, 32 nt, Human
gagguugcagugagcugagaucgugccacugc

SEQ ID NO: 428244 - RNA, 32 nt, Human
gagguugcagugagcugagaucgugccauuac

SEQ ID NO: 428245 - RNA, 32 nt, Human
gagguugcagugagcugagaucgugccauugu

SEQ ID NO: 428246 - RNA, 32 nt, Human
gagguugcagugagcugagaucgugccguuac

SEQ ID NO: 428247 - RNA, 32 nt, Human
gagguugcagugagcugagaucgugcuacugc

SEQ ID NO: 428248 - RNA, 32 nt, Human
gagguugcagugagcugagaucgugcuauugc

SEQ ID NO: 428249 - RNA, 32 nt, Human
gagguugcagugagcugagaucguggccacug

SEQ ID NO: 428250 - RNA, 32 nt, Human
gagguugcagugagcugagaucgugucacuac

SEQ ID NO: 428251 - RNA, 32 nt, Human
gagguugcagugagcugagaucucaccacugc

SEQ ID NO: 428252 - RNA, 32 nt, Human
gagguugcagugagcugagaucucgccauugc

SEQ ID NO: 428253 - RNA, 32 nt, Human
gagguugcagugagcugagaucuggccucugc

SEQ ID NO: 428254 - RNA, 32 nt, Human
gagguugcagugagcugagaucuucccacugc

SEQ ID NO: 428255 - RNA, 32 nt, Human
gagguugcagugagcugagaucuugccacugc

SEQ ID NO: 428256 - RNA, 32 nt, Human
gagguugcagugagcugagauggcaccacugc

SEQ ID NO: 428257 - RNA, 32 nt, Human
gagguugcagugagcugagauggcaccacuua

SEQ ID NO: 428258 - RNA, 32 nt, Human
gagguugcagugagcugagauggugccacugc

SEQ ID NO: 428259 - RNA, 32 nt, Human
gagguugcagugagcugagauggugccacugu

SEQ ID NO: 428260 - RNA, 32 nt, Human
gagguugcagugagcugagauuacaccccugg

SEQ ID NO: 428261 - RNA, 32 nt, Human
gagguugcagugagcugagauugcaccacggc

SEQ ID NO: 428262 - RNA, 32 nt, Human
gagguugcagugagcugagauugcaccacuac

SEQ ID NO: 428263 - RNA, 32 nt, Human
gagguugcagugagcugagauugcaccacugc

SEQ ID NO: 428264 - RNA, 32 nt, Human
gagguugcagugagcugagauugcaccacugu

SEQ ID NO: 428265 - RNA, 32 nt, Human
gagguugcagugagcugagauugcaccauugc

SEQ ID NO: 428266 - RNA, 32 nt, Human
gagguugcagugagcugagauugcgccacugc

SEQ ID NO: 428267 - RNA, 32 nt, Human
gagguugcagugagcugagauugcgccauugc

SEQ ID NO: 428268 - RNA, 32 nt, Human
gagguugcagugagcugagauugcgccauugu

SEQ ID NO: 428269 - RNA, 32 nt, Human
gagguugcagugagcugagauugggccacugc

SEQ ID NO: 428270 - RNA, 32 nt, Human
gagguugcagugagcugagauuguaccacugc

SEQ ID NO: 428271 - RNA, 32 nt, Human
gagguugcagugagcugagauuguaccaugca

SEQ ID NO: 428272 - RNA, 32 nt, Human
gagguugcagugagcugagauuguaccauugc

SEQ ID NO: 428273 - RNA, 32 nt, Human
gagguugcagugagcugagauugugccacuac

SEQ ID NO: 428274 - RNA, 32 nt, Human
gagguugcagugagcugagauugugccacugc

SEQ ID NO: 428275 - RNA, 32 nt, Human
gagguugcagugagcugagauugugccacugu

SEQ ID NO: 428276 - RNA, 32 nt, Human
gagguugcagugagcugagauugugccacuuc

SEQ ID NO: 428277 - RNA, 32 nt, Human
gagguugcagugagcugagauugugccauugc

SEQ ID NO: 428278 - RNA, 32 nt, Human
gagguugcagugagcugaggucgugccacugc

SEQ ID NO: 428279 - RNA, 32 nt, Human
gagguugcagugagcugagguugugccacugc

SEQ ID NO: 428280 - RNA, 32 nt, Human
gagguugcagugagcugaguuugcaucacugc

SEQ ID NO: 428281 - RNA, 32 nt, Human
gagguugcagugagcugauauugugccacugc

SEQ ID NO: 428282 - RNA, 32 nt, Human
gagguugcagugagcugaucaugccacugcac

SEQ ID NO: 428283 - RNA, 32 nt, Human
gagguugcagugagcugggaucgcgccauugc

SEQ ID NO: 428284 - RNA, 32 nt, Human
gagguugcagugagcugugaucacaccacugc

SEQ ID NO: 428285 - RNA, 32 nt, Human
gagguugcagugagcugugaucaccucacugc

SEQ ID NO: 428286 - RNA, 32 nt, Human
gagguugcagugagcugugaucacgccacugc

SEQ ID NO: 428287 - RNA, 32 nt, Human
gagguugcagugagcugugauugugccacugu

SEQ ID NO: 428288 - RNA, 32 nt, Human
gagguugcagugagcuuagaucaugccaccau

SEQ ID NO: 428289 - RNA, 32 nt, Human
gagguugcagugaggcgagauuaggccauugc

SEQ ID NO: 428290 - RNA, 32 nt, Human
gagguugcagugagguaugaucaugccauugc

SEQ ID NO: 428291 - RNA, 32 nt, Human
gagguugcagugaggugacaucgcgccacugc

SEQ ID NO: 428292 - RNA, 32 nt, Human
gagguugcagugaggugagauagcgccauugc

SEQ ID NO: 428293 - RNA, 32 nt, Human
gagguugcagugaggugagaucgugccauugc

SEQ ID NO: 428294 - RNA, 32 nt, Human
gagguugcagugagucaagaucacgccacugc

SEQ ID NO: 428295 - RNA, 32 nt, Human
gagguugcagugagucaagaucgcgccacugc

SEQ ID NO: 428296 - RNA, 32 nt, Human
gagguugcagugagucagaucgugccacugca

SEQ ID NO: 428297 - RNA, 32 nt, Human
gagguugcagugagucgagaucacgccauugc

SEQ ID NO: 428298 - RNA, 32 nt, Human
gagguugcagugagucgagaucaugccauugc

SEQ ID NO: 428299 - RNA, 32 nt, Human
gagguugcagugagucgagaucgcgccacugc

SEQ ID NO: 428300 - RNA, 32 nt, Human
gagguugcagugagucgagaucgcgccagugc

SEQ ID NO: 428301 - RNA, 32 nt, Human
gagguugcagugagugaagaucacgccacugc

SEQ ID NO: 428302 - RNA, 32 nt, Human
gagguugcagugaguggagaucacgccacugc

SEQ ID NO: 428303 - RNA, 32 nt, Human
gagguugcagugaguggagaucgcaccacugc

SEQ ID NO: 428304 - RNA, 32 nt, Human
gagguugcagugaguggagaucgcgccaacac

SEQ ID NO: 428305 - RNA, 32 nt, Human
gagguugcagugaguggagaucgcgccauugc

SEQ ID NO: 428306 - RNA, 32 nt, Human
gagguugcagugaguggagauggcgccacugc

SEQ ID NO: 428307 - RNA, 32 nt, Human
gagguugcagugaguugagaucacgccacugc

SEQ ID NO: 428308 - RNA, 32 nt, Human
gagguugcagugaguugagaucaugccacugc

SEQ ID NO: 428309 - RNA, 32 nt, Human
gagguugcagugaguugagaucgcacuccagc

SEQ ID NO: 428310 - RNA, 32 nt, Human
gagguugcagugaguugagaucgcgccacugc

SEQ ID NO: 428311 - RNA, 32 nt, Human
gagguugcagugaguugagaucgugccauugu

SEQ ID NO: 428312 - RNA, 32 nt, Human
gagguugcagugaguugagauugugccauugc

SEQ ID NO: 428313 - RNA, 32 nt, Human
gagguugcagugauccaagaucacgccacugc

SEQ ID NO: 428314 - RNA, 32 nt, Human
gagguugcagugauugaguaggauuggccugc

SEQ ID NO: 428315 - RNA, 32 nt, Human
gagguugcagugggccaagaucacgccacuac

SEQ ID NO: 428316 - RNA, 32 nt, Human
gagguugcagugggccaagaucgugcuacugc

SEQ ID NO: 428317 - RNA, 32 nt, Human
gagguugcaguuagcugagauccugccacugc

SEQ ID NO: 428318 - RNA, 32 nt, Human
gagguugcauugagccaagaucacgccacugc

SEQ ID NO: 428319 - RNA, 32 nt, Human
gagguugccgugagccaagaucacgccacugc

SEQ ID NO: 428320 - RNA, 32 nt, Human
gagguugccgugagccaagaucgcaccacugc

SEQ ID NO: 428321 - RNA, 32 nt, Human
gagguugcgccacuacacuccagccuggguga

SEQ ID NO: 428322 - RNA, 32 nt, Human
gagguugcgccacugcacucuagccugggcua

SEQ ID NO: 428323 - RNA, 32 nt, Human
gagguugcgcuacugcacuccagccuggacaa

SEQ ID NO: 428324 - RNA, 32 nt, Human
gagguugcggugagccaagagcgcaccauugc

SEQ ID NO: 428325 - RNA, 32 nt, Human
gagguugcggugagccaagaucacgccauagc

SEQ ID NO: 428326 - RNA, 32 nt, Human
gagguugcggugagccaagaucauaccauugc

SEQ ID NO: 428327 - RNA, 32 nt, Human
gagguugcggugagccaagaucaugccacugc

SEQ ID NO: 428328 - RNA, 32 nt, Human
gagguugcggugagccaagaucgcaccauugc

SEQ ID NO: 428329 - RNA, 32 nt, Human
gagguugcggugagccaagaucgugccacugc

SEQ ID NO: 428330 - RNA, 32 nt, Human
gagguugcggugagccaagauggcaccauugc

SEQ ID NO: 428331 - RNA, 32 nt, Human
gagguugcggugagccaagauugcgccacugc

SEQ ID NO: 428332 - RNA, 32 nt, Human
gagguugcggugagccaagauugcgccauugc

SEQ ID NO: 428333 - RNA, 32 nt, Human
gagguugcggugagccaaggucgcgccacugc

SEQ ID NO: 428334 - RNA, 32 nt, Human
gagguugcggugagcccagaucgcgccauugc

SEQ ID NO: 428335 - RNA, 32 nt, Human
gagguugcggugagccgagaucacgccacugc

SEQ ID NO: 428336 - RNA, 32 nt, Human
gagguugcggugagccgagaucaugccacugc

SEQ ID NO: 428337 - RNA, 32 nt, Human
gagguugcggugagccgagaucaugccauggc

SEQ ID NO: 428338 - RNA, 32 nt, Human
gagguugcggugagccgagaucgcaccacugc

SEQ ID NO: 428339 - RNA, 32 nt, Human
gagguugcggugagccgagaucgcgccauugc

SEQ ID NO: 428340 - RNA, 32 nt, Human
gagguugcggugagccgagaucgcgcuacugc

SEQ ID NO: 428341 - RNA, 32 nt, Human
gagguugcggugagccgagauggugccguugc

SEQ ID NO: 428342 - RNA, 32 nt, Human
gagguugcggugagccgagauugcaccacugc

SEQ ID NO: 428343 - RNA, 32 nt, Human
gagguugcggugagccgagauugugccauugc

SEQ ID NO: 428344 - RNA, 32 nt, Human
gagguugcggugagcugagaucacgccauugc

SEQ ID NO: 428345 - RNA, 32 nt, Human
gagguugcggugagucgagaucacgccauugc

SEQ ID NO: 428346 - RNA, 32 nt, Human
gagguugcguugagccaagaucgcgccacugc

SEQ ID NO: 428347 - RNA, 32 nt, Human
gagguugcugugagccaagaucgcaccauugc

SEQ ID NO: 428348 - RNA, 32 nt, Human
gagguuggaaacauugguaaacucuguugauu

SEQ ID NO: 428349 - RNA, 32 nt, Human
gagguuggaaagagaagagaggcugggagcgg

SEQ ID NO: 428350 - RNA, 32 nt, Human
gagguuggagagaaagaacagaccagcgcccu

SEQ ID NO: 428351 - RNA, 32 nt, Human
gagguuggaggaucacuugaguccaggagucc

SEQ ID NO: 428352 - RNA, 32 nt, Human
gagguuggauuuaaccacagaggcagaaaguu

SEQ ID NO: 428353 - RNA, 32 nt, Human
gagguuggcuuuaacccaggaggcagagguug

SEQ ID NO: 428354 - RNA, 23 nt, Human
gagguugggaguucaagaccagc

SEQ ID NO: 428355 - RNA, 23 nt, Human
gagguugggaguucaagaccagu

SEQ ID NO: 428356 - RNA, 23 nt, Human
gagguugggaguucgagaccagc

SEQ ID NO: 428357 - RNA, 23 nt, Human
gagguugggaguucgaggccagc

SEQ ID NO: 428358 - RNA, 23 nt, Human
gagguugggaguucgcgaccagc

SEQ ID NO: 428359 - RNA, 24 nt, Human
gagguuggggcagaauugcuugaa

SEQ ID NO: 428360 - RNA, 32 nt, Human
gagguugggggcccuggccagggacaucugcc

SEQ ID NO: 428361 - RNA, 32 nt, Human
gagguuggguacgggaugcggggucuuugacu

SEQ ID NO: 428362 - RNA, 32 nt, Human
gagguuggguuucagaccaagacacuggauuc

SEQ ID NO: 428363 - RNA, 32 nt, Human
gagguugguccacagcacuccauucugggugg

SEQ ID NO: 428364 - RNA, 32 nt, Human
gagguugguuccuugucugugaugauuugcaa

SEQ ID NO: 428365 - RNA, 32 nt, Human
gagguuguaccacugcacuccagccuggcuga

SEQ ID NO: 428366 - RNA, 32 nt, Human
gagguuguagcgagccaagaucacaccauugc

SEQ ID NO: 428367 - RNA, 32 nt, Human
gagguuguagggagcuaugaucuugccauugc

SEQ ID NO: 428368 - RNA, 32 nt, Human
gagguuguagugagccaagauccagccugggc

SEQ ID NO: 428369 - RNA, 32 nt, Human
gagguuguagugagccaagaucgcaccauugc

SEQ ID NO: 428370 - RNA, 32 nt, Human
gagguuguagugagccaagaucgugccacugc

SEQ ID NO: 428371 - RNA, 32 nt, Human
gagguuguagugagccaaggucgcgccacugc

SEQ ID NO: 428372 - RNA, 32 nt, Human
gagguuguagugagcuacgaucaugccacugc

SEQ ID NO: 428373 - RNA, 32 nt, Human
gagguuguagugagcugagaucgcaccacugc

SEQ ID NO: 428374 - RNA, 32 nt, Human
gagguuguagugagcugagaucgcgccacugc

SEQ ID NO: 428375 - RNA, 32 nt, Human
gagguuguagugagcugagaucgugccacugc

SEQ ID NO: 428376 - RNA, 32 nt, Human
gagguuguagugagcugagauggggccacugc

SEQ ID NO: 428377 - RNA, 32 nt, Human
gagguuguagugagcugagauugcaccacugc

SEQ ID NO: 428378 - RNA, 32 nt, Human
gagguuguagugagcugagauugugccauugc

SEQ ID NO: 428379 - RNA, 32 nt, Human
gagguuguauaagguguucuuggaaggaaggg

SEQ ID NO: 428380 - RNA, 32 nt, Human
gagguugucaccacucagacuucaccuauuca

SEQ ID NO: 428381 - RNA, 32 nt, Human
gagguugucucugaaccaggagagaagguacu

SEQ ID NO: 428382 - RNA, 32 nt, Human
gagguugugaugagccaagauugagccaaaaa

SEQ ID NO: 428383 - RNA, 32 nt, Human
gagguugugaugagccaaggucaugccacugc

SEQ ID NO: 428384 - RNA, 32 nt, Human
gagguugugccacugcacuccagccuggguga

SEQ ID NO: 428385 - RNA, 32 nt, Human
gagguugugccacugcacugcagccugggcua

SEQ ID NO: 428386 - RNA, 32 nt, Human
gagguuguggcggagguuguggugagcugaga

SEQ ID NO: 428387 - RNA, 24 nt, Human
gagguuguggcugcagugagcugu

SEQ ID NO: 428388 - RNA, 32 nt, Human
gagguuguggugagccaacaucacaccauugc

SEQ ID NO: 428389 - RNA, 32 nt, Human
gagguuguggugagccaagaucaugccacugc

SEQ ID NO: 428390 - RNA, 32 nt, Human
gagguuguggugagccaagaucgcgccguugc

SEQ ID NO: 428391 - RNA, 32 nt, Human
gagguuguggugagccaagaucgugccacugc

SEQ ID NO: 428392 - RNA, 32 nt, Human
gagguuguggugagccaagaucgugccauugc

SEQ ID NO: 428393 - RNA, 32 nt, Human
gagguuguggugagccaagguugcgccacugc

SEQ ID NO: 428394 - RNA, 32 nt, Human
gagguuguggugagccaauaucaugccacugc

SEQ ID NO: 428395 - RNA, 32 nt, Human
gagguuguggugagccaugaucgcaccacugc

SEQ ID NO: 428396 - RNA, 32 nt, Human
gagguuguggugagccgagaucacgccacugc

SEQ ID NO: 428397 - RNA, 32 nt, Human
gagguuguggugagccgagaucgcaccauugc

SEQ ID NO: 428398 - RNA, 32 nt, Human
gagguuguggugagccgagaucgcgccaguac

SEQ ID NO: 428399 - RNA, 32 nt, Human
gagguuguggugagccgagaucgcgccauugc

SEQ ID NO: 428400 - RNA, 32 nt, Human
gagguuguggugagccgagaucgugccacugu

SEQ ID NO: 428401 - RNA, 32 nt, Human
gagguuguggugagccgagaucgugccauugc

SEQ ID NO: 428402 - RNA, 32 nt, Human
gagguuguggugagccgagauugcaccacugc

SEQ ID NO: 428403 - RNA, 32 nt, Human
gagguuguggugagccgagauugcaccauugc

SEQ ID NO: 428404 - RNA, 32 nt, Human
gagguuguggugagccgagauugcaccuuugu

SEQ ID NO: 428405 - RNA, 32 nt, Human
gagguuguggugagccgagauugcuccauugc

SEQ ID NO: 428406 - RNA, 32 nt, Human
gagguuguggugagcuaagaucacgccauugc

SEQ ID NO: 428407 - RNA, 32 nt, Human
gagguuguggugagcugaaaugacgccauugc

SEQ ID NO: 428408 - RNA, 32 nt, Human
gagguuguggugagcugagaucacacuacugc

SEQ ID NO: 428409 - RNA, 32 nt, Human
gagguuguggugagcugagaucacgccauugc

SEQ ID NO: 428410 - RNA, 32 nt, Human
gagguuguggugagcugagaucaugccacugc

SEQ ID NO: 428411 - RNA, 32 nt, Human
gagguuguggugagcugagaucgcaccauugc

SEQ ID NO: 428412 - RNA, 32 nt, Human
gagguuguggugagcugagaucgcgccacugc

SEQ ID NO: 428413 - RNA, 32 nt, Human
gagguuguggugagcugagaucgugccauugc

SEQ ID NO: 428414 - RNA, 32 nt, Human
gagguuguggugagcugagauggugccauugc

SEQ ID NO: 428415 - RNA, 32 nt, Human
gagguuguggugagcugagauugcaccauugc

SEQ ID NO: 428416 - RNA, 32 nt, Human
gagguuguggugagcugagauugcgccauugc

SEQ ID NO: 428417 - RNA, 32 nt, Human
gagguuguggugaggcgagauagugccacugc

SEQ ID NO: 428418 - RNA, 32 nt, Human
gagguuguggugagucgagaucauugcacucc

SEQ ID NO: 428419 - RNA, 24 nt, Human
gagguugugguugcagugagcuau

SEQ ID NO: 428420 - RNA, 32 nt, Human
gagguugugucauugcacuccagccuggggaa

SEQ ID NO: 428421 - RNA, 32 nt, Human
gagguuguguugagccaagaucgugccauucc

SEQ ID NO: 428422 - RNA, 32 nt, Human
gagguuguuaagauuuacaguaagaaugaauc

SEQ ID NO: 428423 - RNA, 32 nt, Human
gagguuguuauuguucagagaugagggauguc

SEQ ID NO: 428424 - RNA, 32 nt, Human
gagguuuagaacuuacccaauauuggacagca

SEQ ID NO: 428425 - RNA, 32 nt, Human
gagguuucagugagccaagaucacaccacugc

SEQ ID NO: 428426 - RNA, 32 nt, Human
gagguuucagugagccaagaucgcaccacugc

SEQ ID NO: 428427 - RNA, 32 nt, Human
gagguuucagugagccgagaucaugccacugc

SEQ ID NO: 428428 - RNA, 32 nt, Human
gagguuucccuguguugcccaggcuggucuug

SEQ ID NO: 428429 - RNA, 32 nt, Human
gagguuuccucacuagacaacucucuuucgca

SEQ ID NO: 428430 - RNA, 32 nt, Human
gagguuuccugccuccuucccgaggcuacagc

SEQ ID NO: 428431 - RNA, 32 nt, Human
gagguuuccuucucccuguggccuuuucccag

SEQ ID NO: 428432 - RNA, 32 nt, Human
gagguuucucaaggagcuggagacuucaggga

SEQ ID NO: 428433 - RNA, 32 nt, Human
gagguuucuccauguuggucaggcuggucucg

SEQ ID NO: 428434 - RNA, 32 nt, Human
gagguuucuccauuuuggucaggcuggucuca

SEQ ID NO: 428435 - RNA, 32 nt, Human
gagguuucucugcuucggcugugcuugaagug

SEQ ID NO: 428436 - RNA, 32 nt, Human
gagguuugcugccugccuucuugccaugucua

SEQ ID NO: 428437 - RNA, 32 nt, Human
gagguuuggggccagacccccacuagcuggga

SEQ ID NO: 428438 - RNA, 32 nt, Human
gagguuugguucacaucauaaaagaaaaggga

SEQ ID NO: 428439 - RNA, 32 nt, Human
gagguuuucaaaugaugagggacccaagggcu

SEQ ID NO: 428440 - RNA, 32 nt, Human
gagguuuugaacaccacucaugugccaggugu

SEQ ID NO: 428441 - RNA, 32 nt, Human
gagguuuugccucauuccacacagcuuccaua

SEQ ID NO: 428442 - RNA, 32 nt, Human
gagguuuugcuggccagguaugguggcucacg

SEQ ID NO: 428443 - RNA, 32 nt, Human
gagguuuugguaauuuuuccuaugcauugggc

SEQ ID NO: 428444 - RNA, 32 nt, Human
gagguuuuucuucuugguccuuccugagaccu

SEQ ID NO: 428445 - RNA, 32 nt, Human
gaguaaaagagugcuuaugggaaagcaaauga

SEQ ID NO: 428446 - RNA, 32 nt, Human
gaguaaacaugagccucugguagauaagagaa

SEQ ID NO: 428447 - RNA, 32 nt, Human
gaguaaacccagaccuggucaccugucuggag

SEQ ID NO: 428448 - RNA, 19 nt, Human
gaguaaacccagcucccac

SEQ ID NO: 428449 - RNA, 32 nt, Human
gaguaaaguuagggagcuagaugaguaaacau

SEQ ID NO: 428450 - RNA, 32 nt, Human
gaguaaaguuugaagagauaaaaauagccaaa

SEQ ID NO: 428451 - RNA, 32 nt, Human
gaguaaaugcagccaguuuacaggcaugcugg

SEQ ID NO: 428452 - RNA, 32 nt, Human
gaguaaaugccacaacuguacuuuuccaaaga

SEQ ID NO: 428453 - RNA, 32 nt, Human
gaguaaauuuugcuugcaugugcuaauaugaa

SEQ ID NO: 428454 - RNA, 32 nt, Human
gaguaacaggaaaauuuuaaaaauacagauag

SEQ ID NO: 428455 - RNA, 32 nt, Human
gaguaacagggcagaaaugauuaaaauguuug

SEQ ID NO: 428456 - RNA, 32 nt, Human
gaguaacaugaugagacccccaucucuacaaa

SEQ ID NO: 428457 - RNA, 32 nt, Human
gaguaacauggugaaaccccaucucuacgaaa

SEQ ID NO: 428458 - RNA, 32 nt, Human
gaguaaccaaagagaguauggaccagagugaa

SEQ ID NO: 428459 - RNA, 32 nt, Human
gaguaaccaaggaggggguaguugaaaaaucc

SEQ ID NO: 428460 - RNA, 32 nt, Human
gaguaaccacugaccugugagcuggguccagg

SEQ ID NO: 428461 - RNA, 32 nt, Human
gaguaaccaggcgaaugugcccccaggagagu

SEQ ID NO: 428462 - RNA, 32 nt, Human
gaguaaccccucuuuccuguuaauccagaggg

SEQ ID NO: 428463 - RNA, 32 nt, Human
gaguaaccuugagauugggaggaauagaggag

SEQ ID NO: 428464 - RNA, 32 nt, Human
gaguaacgaugaagucaugagaggagguucaa

SEQ ID NO: 428465 - RNA, 32 nt, Human
gaguaacuacacaaagauaauguaauaagccu

SEQ ID NO: 428466 - RNA, 32 nt, Human
gaguaacugcaagaucuccuacggggaugggc

SEQ ID NO: 428467 - RNA, 32 nt, Human
gaguaacugcugguagugccuucuuugguugu

SEQ ID NO: 428468 - RNA, 32 nt, Human
gaguaacuggacauuucaccuucaccuuacac

SEQ ID NO: 428469 - RNA, 21 nt, Human
gaguaacugggacuacaggug

SEQ ID NO: 428470 - RNA, 19 nt, Human
gaguaacugggauuacagg

SEQ ID NO: 428471 - RNA, 23 nt, Human
gaguaagagagcagagcagaacc

SEQ ID NO: 428472 - RNA, 32 nt, Human
gaguaagcccuugcucaguaaauuuaauugaa

SEQ ID NO: 428473 - RNA, 19 nt, Human
gaguaagggggcugggaga

SEQ ID NO: 428474 - RNA, 32 nt, Human
gaguaaguccucugucuuggcacagcaauaua

SEQ ID NO: 428475 - RNA, 21 nt, Human
gaguaagucugcccuuugcca

SEQ ID NO: 428476 - RNA, 32 nt, Human
gaguaauaaagauacaaaauguuacugcugau

SEQ ID NO: 428477 - RNA, 32 nt, Human
gaguaauaaugucucuucaaagggagcuggag

SEQ ID NO: 428478 - RNA, 32 nt, Human
gaguaauaguuggaaucaaaagagucaacgca

SEQ ID NO: 428479 - RNA, 32 nt, Human
gaguaaugcuuuugagauaaaggaaccuugug

SEQ ID NO: 428480 - RNA, 32 nt, Human
gaguaauggaaagacuaauggaagaauugaua

SEQ ID NO: 428481 - RNA, 32 nt, Human
gaguaauggagacaaaucaaagagacauaaag

SEQ ID NO: 428482 - RNA, 25 nt, Human
gaguaauggucccccaagauaucca

SEQ ID NO: 428483 - RNA, 32 nt, Human
gaguaauucugugcuugacaaaggacgauuuc

SEQ ID NO: 428484 - RNA, 32 nt, Human
gaguacaaacugcaccaagcccuggagaccca

SEQ ID NO: 428485 - RNA, 32 nt, Human
gaguacaaaggccauguggugaaaggaaguau

SEQ ID NO: 428486 - RNA, 32 nt, Human
gaguacacaaguauaguggcccaggauguagu

SEQ ID NO: 428487 - RNA, 32 nt, Human
gaguacagcagugccaucauagcucacugaag

SEQ ID NO: 428488 - RNA, 32 nt, Human
gaguacagccuauuauauucccacauccugag

SEQ ID NO: 428489 - RNA, 32 nt, Human
gaguacagccucccuccuggcugcuuucucag

SEQ ID NO: 428490 - RNA, 21 nt, Human
gaguacaucaagaagaaacug

SEQ ID NO: 428491 - RNA, 32 nt, Human
gaguacauccagccuuaguucuuggggugcag

SEQ ID NO: 428492 - RNA, 32 nt, Human
gaguacauggcagaagugggcauauuucagag

SEQ ID NO: 428493 - RNA, 32 nt, Human
gaguacauguauuauauacaagcacaacaggg

SEQ ID NO: 428494 - RNA, 32 nt, Human
gaguaccacaaccaccaccagugcuaccaccg

SEQ ID NO: 428495 - RNA, 32 nt, Human
gaguaccacauccugaccccacuuguuugcaa

SEQ ID NO: 428496 - RNA, 32 nt, Human
gaguacccauaacuacccaucguuuagauaca

SEQ ID NO: 428497 - RNA, 32 nt, Human
gaguacccggaugggaauggcaauggccuagc

SEQ ID NO: 428498 - RNA, 32 nt, Human
gaguacccugcagugugaggugucagugugca

SEQ ID NO: 428499 - RNA, 18 nt, Human
gaguaccgaccuauccca

SEQ ID NO: 428500 - RNA, 32 nt, Human
gaguaccugcuguugcucucaugccucuugcc

SEQ ID NO: 428501 - RNA, 19 nt, Human
gaguaccugggauuacagg

SEQ ID NO: 428502 - RNA, 32 nt, Human
gaguaccuucuaaagcaccauaugaggaaaaa

SEQ ID NO: 428503 - RNA, 32 nt, Human
gaguaccuuuguuuucuugaucuguuacuuuu

SEQ ID NO: 428504 - RNA, 32 nt, Human
gaguaccuuuucucccuggccuucugcuccaa

SEQ ID NO: 428505 - RNA, 32 nt, Human
gaguacgaggggcacccugggggcucccaccc

SEQ ID NO: 428506 - RNA, 32 nt, Human
gaguacgcaccccagacccauggcagcagaac

SEQ ID NO: 428507 - RNA, 25 nt, Human
gaguacgucgggcaggaagggaagc

SEQ ID NO: 428508 - RNA, 32 nt, Human
gaguacguggaggaacuccuacauuuuaggcu

SEQ ID NO: 428509 - RNA, 32 nt, Human
gaguacguugaagaagaaagaagagaaaggua

SEQ ID NO: 428510 - RNA, 32 nt, Human
gaguacuaacagcuuccuucagaucuggaagc

SEQ ID NO: 428511 - RNA, 32 nt, Human
gaguacuaacagguuguccugucccauaccug

SEQ ID NO: 428512 - RNA, 32 nt, Human
gaguacuaauugauuccuccauccuugaauca

SEQ ID NO: 428513 - RNA, 32 nt, Human
gaguacuagaauuuguauuuugcuuaaaauuu

SEQ ID NO: 428514 - RNA, 32 nt, Human
gaguacuauggauaggccugaaugaagucaua

SEQ ID NO: 428515 - RNA, 32 nt, Human
gaguacuccacacugcacaauaacuccuccca

SEQ ID NO: 428516 - RNA, 32 nt, Human
gaguacucuccccagacagccagaaggcccuu

SEQ ID NO: 428517 - RNA, 32 nt, Human
gaguacucugcagcuggcgaggaguugguuga

SEQ ID NO: 428518 - RNA, 32 nt, Human
gaguacugacaccagacaaagacuccaaaguc

SEQ ID NO: 428519 - RNA, 32 nt, Human
gaguacugcagaacugacauuuugacggucua

SEQ ID NO: 428520 - RNA, 18 nt, Human
gaguacugggauuacagg

SEQ ID NO: 428521 - RNA, 32 nt, Human
gaguacugggauuacaggcgcccaccaccacg

SEQ ID NO: 428522 - RNA, 32 nt, Human
gaguacugucucaucucaucauauucacgggu

SEQ ID NO: 428523 - RNA, 22 nt, Human
gaguacuguuuuuuaaaagguc

SEQ ID NO: 428524 - RNA, 32 nt, Human
gaguacuuaacaccaucauccaucuguguggc

SEQ ID NO: 428525 - RNA, 32 nt, Human
gaguacuuagucuucucccccuucccuggggc

SEQ ID NO: 428526 - RNA, 32 nt, Human
gaguacuucauuaggacaagugagaaucagcu

SEQ ID NO: 428527 - RNA, 32 nt, Human
gaguacuucuucuguuggcagcuaugauuuaa

SEQ ID NO: 428528 - RNA, 32 nt, Human
gaguacuuguaacugucagaagaaggauggug

SEQ ID NO: 428529 - RNA, 32 nt, Human
gaguagaaaccaaaugugaauagccacaucuu

SEQ ID NO: 428530 - RNA, 32 nt, Human
gaguagaaagaugcucauagcacacgcaauau

SEQ ID NO: 428531 - RNA, 20 nt, Human
gaguagaaaucuggugaccu

SEQ ID NO: 428532 - RNA, 32 nt, Human
gaguagaaaugggguuucaccauguuagccag

SEQ ID NO: 428533 - RNA, 32 nt, Human
gaguagaacuucauggaggaacacggagugac

SEQ ID NO: 428534 - RNA, 32 nt, Human
gaguagaagcccagaguggagaugccugcuga

SEQ ID NO: 428535 - RNA, 32 nt, Human
gaguagaaggcagggagaaacuggguucuggu

SEQ ID NO: 428536 - RNA, 20 nt, Human
gaguagaagguggugaccuc

SEQ ID NO: 428537 - RNA, 32 nt, Human
gaguagagaaaaugguuucucaaggagauugg

SEQ ID NO: 428538 - RNA, 32 nt, Human
gaguagagaaugcacagguguuggugagggcg

SEQ ID NO: 428539 - RNA, 32 nt, Human
gaguagagacgggguuucaccauguuggccag

SEQ ID NO: 428540 - RNA, 32 nt, Human
gaguagagacgggguuucaccguguuagccag

SEQ ID NO: 428541 - RNA, 32 nt, Human
gaguagagaucugccaaguugccuuacagagc

SEQ ID NO: 428542 - RNA, 32 nt, Human
gaguagagaugcugggacugaggguggagcag

SEQ ID NO: 428543 - RNA, 32 nt, Human
gaguagagaugggaguuucaccauguuggcca

SEQ ID NO: 428544 - RNA, 32 nt, Human
gaguagagcgaaggcauuugguggaucgguca

SEQ ID NO: 428545 - RNA, 32 nt, Human
gaguagaggaagaggaaggacuaacgcagagg

SEQ ID NO: 428546 - RNA, 32 nt, Human
gaguagaggacacuggcaggagaguagcugga

SEQ ID NO: 428547 - RNA, 32 nt, Human
gaguagaucagaccucuugaaaaugcuuauuc

SEQ ID NO: 428548 - RNA, 32 nt, Human
gaguagaugaugaggcccaugccccucacccc

SEQ ID NO: 428549 - RNA, 19 nt, Human
gaguagaugggauuacagg

SEQ ID NO: 428550 - RNA, 32 nt, Human
gaguagauuccaccccugcugcccaccaaugg

SEQ ID NO: 428551 - RNA, 32 nt, Human
gaguagcacaugccaccaugccuggcuaauuu

SEQ ID NO: 428552 - RNA, 32 nt, Human
gaguagcacugcacugucaccugaugauuggc

SEQ ID NO: 428553 - RNA, 18 nt, Human
gaguagcaggagggucuu

SEQ ID NO: 428554 - RNA, 31 nt, Human
gaguagcaggggcagcaccucucacaggggc

SEQ ID NO: 428555 - RNA, 32 nt, Human
gaguagcaggguggggcgccugaguuggcagc

SEQ ID NO: 428556 - RNA, 31 nt, Human
gaguagcauaauaaauauuuucugugaaugu

SEQ ID NO: 428557 - RNA, 32 nt, Human
gaguagccaagcugcuuguccugggccugccc

SEQ ID NO: 428558 - RNA, 32 nt, Human
gaguagccacugcacuccagccugggcaacgu

SEQ ID NO: 428559 - RNA, 32 nt, Human
gaguagccccagaaaaaggcaggcagugggag

SEQ ID NO: 428560 - RNA, 19 nt, Human
gaguagcggggauuacagg

SEQ ID NO: 428561 - RNA, 31 nt, Human
gaguagcggguggaaagcuggacuggaguuc

SEQ ID NO: 428562 - RNA, 32 nt, Human
gaguagcgugugccaccaugccuggcuaauuu

SEQ ID NO: 428563 - RNA, 32 nt, Human
gaguagcuaaagcugagauuacaggcaugcgc

SEQ ID NO: 428564 - RNA, 32 nt, Human
gaguagcuaaugcaccuugagaaaaaucuggc

SEQ ID NO: 428565 - RNA, 21 nt, Human
gaguagcuaggacuacaggca

SEQ ID NO: 428566 - RNA, 21 nt, Human
gaguagcuaggacuacaggug

SEQ ID NO: 428567 - RNA, 21 nt, Human
gaguagcuaggacugcaggug

SEQ ID NO: 428568 - RNA, 19 nt, Human
gaguagcuaggauuacagg

SEQ ID NO: 428569 - RNA, 21 nt, Human
gaguagcuaggauuacaggug

SEQ ID NO: 428570 - RNA, 32 nt, Human
gaguagcucccagggguucaggugguggagca

SEQ ID NO: 428571 - RNA, 32 nt, Human
gaguagcucuucuguccaaaccaugauuugag

SEQ ID NO: 428572 - RNA, 21 nt, Human
gaguagcugagaccacaggug

SEQ ID NO: 428573 - RNA, 21 nt, Human
gaguagcugagacuacaggug

SEQ ID NO: 428574 - RNA, 19 nt, Human
gaguagcugagauuacagg

SEQ ID NO: 428575 - RNA, 20 nt, Human
gaguagcugagauuacaggu

SEQ ID NO: 428576 - RNA, 21 nt, Human
gaguagcugagauuacaggug

SEQ ID NO: 428577 - RNA, 21 nt, Human
gaguagcuggaaccacaggug

SEQ ID NO: 428578 - RNA, 21 nt, Human
gaguagcuggaacuacaggug

SEQ ID NO: 428579 - RNA, 19 nt, Human
gaguagcuggaauuacagg

SEQ ID NO: 428580 - RNA, 20 nt, Human
gaguagcuggaauuacaggu

SEQ ID NO: 428581 - RNA, 21 nt, Human
gaguagcuggaauuacaggug

SEQ ID NO: 428582 - RNA, 21 nt, Human
gaguagcuggaauuauaggug

SEQ ID NO: 428583 - RNA, 32 nt, Human
gaguagcuggauuacaggcaugugccacccac

SEQ ID NO: 428584 - RNA, 19 nt, Human
gaguagcuggcauuacagg

SEQ ID NO: 428585 - RNA, 20 nt, Human
gaguagcugggacaacaggu

SEQ ID NO: 428586 - RNA, 21 nt, Human
gaguagcugggaccacaggug

SEQ ID NO: 428587 - RNA, 21 nt, Human
gaguagcugggaccacaguug

SEQ ID NO: 428588 - RNA, 21 nt, Human
gaguagcugggaccacaugug

SEQ ID NO: 428589 - RNA, 21 nt, Human
gaguagcugggacuacaagug

SEQ ID NO: 428590 - RNA, 19 nt, Human
gaguagcugggacuacagg

SEQ ID NO: 428591 - RNA, 32 nt, Human
gaguagcugggacuacaggaauuaguaaccuu

SEQ ID NO: 428592 - RNA, 32 nt, Human
gaguagcugggacuacaggauuacaguuuaaa

SEQ ID NO: 428593 - RNA, 20 nt, Human
gaguagcugggacuacaggu

SEQ ID NO: 428594 - RNA, 21 nt, Human
gaguagcugggacuacaggug

SEQ ID NO: 428595 - RNA, 21 nt, Human
gaguagcugggacuacaguug

SEQ ID NO: 428596 - RNA, 21 nt, Human
gaguagcugggacuauaggug

SEQ ID NO: 428597 - RNA, 19 nt, Human
gaguagcugggacugcagg

SEQ ID NO: 428598 - RNA, 21 nt, Human
gaguagcugggacugcaggug

SEQ ID NO: 428599 - RNA, 19 nt, Human
gaguagcugggacugcggg

SEQ ID NO: 428600 - RNA, 21 nt, Human
gaguagcugggacuucaggug

SEQ ID NO: 428601 - RNA, 19 nt, Human
gaguagcugggaguacagg

SEQ ID NO: 428602 - RNA, 21 nt, Human
gaguagcugggaguacaggug

SEQ ID NO: 428603 - RNA, 21 nt, Human
gaguagcugggaucacaggug

SEQ ID NO: 428604 - RNA, 21 nt, Human
gaguagcugggauuacaagug

SEQ ID NO: 428605 - RNA, 18 nt, Human
gaguagcugggauuacag

SEQ ID NO: 428606 - RNA, 19 nt, Human
gaguagcugggauuacagg

SEQ ID NO: 428607 - RNA, 32 nt, Human
gaguagcugggauuacaggccuguauggugga

SEQ ID NO: 428608 - RNA, 20 nt, Human
gaguagcugggauuacaggu

SEQ ID NO: 428609 - RNA, 21 nt, Human
gaguagcugggauuacaggug

SEQ ID NO: 428610 - RNA, 19 nt, Human
gaguagcugggauuacggg

SEQ ID NO: 428611 - RNA, 21 nt, Human
gaguagcugggauuacgggug

SEQ ID NO: 428612 - RNA, 21 nt, Human
gaguagcugggauuacuggug

SEQ ID NO: 428613 - RNA, 19 nt, Human
gaguagcugggauuauagg

SEQ ID NO: 428614 - RNA, 21 nt, Human
gaguagcugggauuccaggug

SEQ ID NO: 428615 - RNA, 19 nt, Human
gaguagcugggauugcagg

SEQ ID NO: 428616 - RNA, 20 nt, Human
gaguagcugggauugcaggu

SEQ ID NO: 428617 - RNA, 21 nt, Human
gaguagcugggauugcaggug

SEQ ID NO: 428618 - RNA, 21 nt, Human
gaguagcugggauuuuaggug

SEQ ID NO: 428619 - RNA, 19 nt, Human
gaguagcugggguuacagg

SEQ ID NO: 428620 - RNA, 21 nt, Human
gaguagcugguacuacaggug

SEQ ID NO: 428621 - RNA, 19 nt, Human
gaguagcugguauuacagg

SEQ ID NO: 428622 - RNA, 19 nt, Human
gaguagcuuggauuacagg

SEQ ID NO: 428623 - RNA, 32 nt, Human
gaguaggaagcagcuucccagcugcagucugc

SEQ ID NO: 428624 - RNA, 32 nt, Human
gaucauaccacugcacuccagccugggcgaca

SEQ ID NO: 428625 - RNA, 32 nt, Human
gaucauaccacugcacuccagccugggugaca

SEQ ID NO: 428626 - RNA, 32 nt, Human
gaucauaccacugcacuccagucugggcaaca

SEQ ID NO: 428627 - RNA, 32 nt, Human
gaucauaccacugcacugcagccugagugaca

SEQ ID NO: 428628 - RNA, 32 nt, Human
gaucauaccacuucauuccagccugggugaca

SEQ ID NO: 428629 - RNA, 32 nt, Human
gaucauaccauugcacuccagccuaggcaaca

SEQ ID NO: 428630 - RNA, 32 nt, Human
gaucauaccauugcacuccagccugggcaaca

SEQ ID NO: 428631 - RNA, 32 nt, Human
gaucauacuacugcacuccagccugggcgaca

SEQ ID NO: 428632 - RNA, 32 nt, Human
gaucauagcacacugcagccuggaacuccugg

SEQ ID NO: 428633 - RNA, 32 nt, Human
gaucauagcucacaccuguaaucccagccugg

SEQ ID NO: 428634 - RNA, 32 nt, Human
gaucauagcucacuccagccugaagcaagccu

SEQ ID NO: 428635 - RNA, 21 nt, Human
gaucauagcucacugcagcuu

SEQ ID NO: 428636 - RNA, 27 nt, Human
gaucauagcuccccuucacuucugucu

SEQ ID NO: 428637 - RNA, 32 nt, Human
gaucauagcuuacugcagccucgaacuccuga

SEQ ID NO: 428638 - RNA, 31 nt, Human
gaucauaggaaacugccccugagcucacaca

SEQ ID NO: 428639 - RNA, 31 nt, Human
gaucauaggcacugauuuccuaugcuaaggu

SEQ ID NO: 428640 - RNA, 32 nt, Human
gaucauaggcagcaagggcugauucuaggaua

SEQ ID NO: 428641 - RNA, 32 nt, Human
gaucauaggcucuucagagaacugaauggcag

SEQ ID NO: 428642 - RNA, 32 nt, Human
gaucauaucacugcacuccagccuggcugaca

SEQ ID NO: 428643 - RNA, 32 nt, Human
gaucauauccucucucacccugcugcauccag

SEQ ID NO: 428644 - RNA, 32 nt, Human
gaucauauuuugcuuucuauggcuucuccuua

SEQ ID NO: 428645 - RNA, 21 nt, Human
gaucaucagaaggcgcggacc

SEQ ID NO: 428646 - RNA, 32 nt, Human
gaucaucagaggcugaaaucuagaacuucauc

SEQ ID NO: 428647 - RNA, 32 nt, Human
gaucaucagccacugaggccaguggaauuucc

SEQ ID NO: 428648 - RNA, 32 nt, Human
gaucaucauuagcugugaagauuugaguugua

SEQ ID NO: 428649 - RNA, 32 nt, Human
gaucaucauuuauuuuccauugucugucuucg

SEQ ID NO: 428650 - RNA, 32 nt, Human
gaucaucugccgugccuggauccugaaauaga

SEQ ID NO: 428651 - RNA, 23 nt, Human
gaucaucuggaggccggcuuugu

SEQ ID NO: 428652 - RNA, 32 nt, Human
gaucaucugggcaggacauggggacgaguguc

SEQ ID NO: 428653 - RNA, 32 nt, Human
gaucaucugugcuuggggcugccugaggcucc

SEQ ID NO: 428654 - RNA, 32 nt, Human
gaucaugaagucaggaguucgagaccagccug

SEQ ID NO: 428655 - RNA, 32 nt, Human
gaucaugacacugcacuccagccugggcaaca

SEQ ID NO: 428656 - RNA, 32 nt, Human
gaucaugaggaguuacuaugcccagccaacau

SEQ ID NO: 428657 - RNA, 32 nt, Human
gaucaugagguuaggagagcgagaccauccug

SEQ ID NO: 428658 - RNA, 32 nt, Human
gaucaugauauuccuucuauccaugugccaaa

SEQ ID NO: 428659 - RNA, 32 nt, Human
gaucaugcagagcgaagccaccaagacuuuau

SEQ ID NO: 428660 - RNA, 32 nt, Human
gaucaugccacaccguacuccagccugggcga

SEQ ID NO: 428661 - RNA, 32 nt, Human
gaucaugccacaucacuccagccugggcaaca

SEQ ID NO: 428662 - RNA, 32 nt, Human
gaucaugccaccgcacuccagccugggcaaca

SEQ ID NO: 428663 - RNA, 32 nt, Human
gaucaugccaccgcacuucagccugggugaca

SEQ ID NO: 428664 - RNA, 32 nt, Human
gaucaugccaccgcacuuccagccugggugac

SEQ ID NO: 428665 - RNA, 32 nt, Human
gaucaugccacuacacuccagccuggcgacag

SEQ ID NO: 428666 - RNA, 32 nt, Human
gaucaugccacuccacuccagucugggcgaca

SEQ ID NO: 428667 - RNA, 32 nt, Human
gaucaugccacugaacuccagccugggcaaca

SEQ ID NO: 428668 - RNA, 32 nt, Human
gaucaugccacugaacuccagccugggugaca

SEQ ID NO: 428669 - RNA, 32 nt, Human
gaucaugccacugcaaucuagccugggugaca

SEQ ID NO: 428670 - RNA, 32 nt, Human
gaucaugccacugcacccaucuugggcaacag

SEQ ID NO: 428671 - RNA, 32 nt, Human
gaucaugccacugcaccccagcaccuggcuac

SEQ ID NO: 428672 - RNA, 32 nt, Human
gaucaugccacugcaccccagccugggcaaca

SEQ ID NO: 428673 - RNA, 32 nt, Human
gaucaugccacugcacccuagcuuggguggca

SEQ ID NO: 428674 - RNA, 32 nt, Human
gaucaugccacugcacuagagccugggcaaca

SEQ ID NO: 428675 - RNA, 32 nt, Human
gaucaugccacugcacuccaaccugggcaaca

SEQ ID NO: 428676 - RNA, 32 nt, Human
gaucaugccacugcacuccaaccugggcagca

SEQ ID NO: 428677 - RNA, 32 nt, Human
gaucaugccacugcacuccaaccugggcgaca

SEQ ID NO: 428678 - RNA, 32 nt, Human
gaucaugccacugcacuccaaccugggugaca

SEQ ID NO: 428679 - RNA, 32 nt, Human
gaucaugccacugcacuccacucugggcaaca

SEQ ID NO: 428680 - RNA, 32 nt, Human
gaucaugccacugcacuccagcaugggugaug

SEQ ID NO: 428681 - RNA, 32 nt, Human
gaucaugccacugcacuccagcccaggugaca

SEQ ID NO: 428682 - RNA, 32 nt, Human
gaucaugccacugcacuccagccuaugugacu

SEQ ID NO: 428683 - RNA, 32 nt, Human
gaucaugccacugcacuccagccugagugaca

SEQ ID NO: 428684 - RNA, 32 nt, Human
gaucaugccacugcacuccagccuggacaaca

SEQ ID NO: 428685 - RNA, 32 nt, Human
gaucaugccacugcacuccagccuggaugaca

SEQ ID NO: 428686 - RNA, 32 nt, Human
gaucaugccacugcacuccagccugggcaaca

SEQ ID NO: 428687 - RNA, 32 nt, Human
gaucaugccacugcacuccagccugggcaacc

SEQ ID NO: 428688 - RNA, 32 nt, Human
gaucaugccacugcacuccagccugggcaaug

SEQ ID NO: 428689 - RNA, 32 nt, Human
gaucaugccacugcacuccagccugggcagca

SEQ ID NO: 428690 - RNA, 32 nt, Human
gaucaugccacugcacuccagccugggcauga

SEQ ID NO: 428691 - RNA, 32 nt, Human
gaucaugccacugcacuccagccugggccaga

SEQ ID NO: 428692 - RNA, 32 nt, Human
gaucaugccacugcacuccagccugggcgaca

SEQ ID NO: 428693 - RNA, 32 nt, Human
gaucaugccacugcacuccagccugggcgacg

SEQ ID NO: 428694 - RNA, 32 nt, Human
gaucaugccacugcacuccagccugggcgaug

SEQ ID NO: 428695 - RNA, 32 nt, Human
gaucaugccacugcacuccagccugggcggca

SEQ ID NO: 428696 - RNA, 32 nt, Human
gaucaugccacugcacuccagccugggugaca

SEQ ID NO: 428697 - RNA, 32 nt, Human
gaucaugccacugcacuccagcuugggcgaca

SEQ ID NO: 428698 - RNA, 32 nt, Human
gaucaugccacugcacuccagcuugggugaga

SEQ ID NO: 428699 - RNA, 32 nt, Human
gaucaugccacugcacuccagucuggaugaca

SEQ ID NO: 428700 - RNA, 32 nt, Human
gaucaugccacugcacuccagucugggugaca

SEQ ID NO: 428701 - RNA, 32 nt, Human
gaucaugccacugcacuccauccugggcaaca

SEQ ID NO: 428702 - RNA, 32 nt, Human
gaucaugccacugcacuccauccugggugaca

SEQ ID NO: 428703 - RNA, 32 nt, Human
gaucaugccacugcacuccggccuaggugaca

SEQ ID NO: 428704 - RNA, 32 nt, Human
gaucaugccacugcacuccuccgugggugaca

SEQ ID NO: 428705 - RNA, 32 nt, Human
gaucaugccacugcacuccugccugggugaca

SEQ ID NO: 428706 - RNA, 32 nt, Human
gaucaugccacugcacucuagccuaggcuaca

SEQ ID NO: 428707 - RNA, 32 nt, Human
gaucaugccacugcacucugggcuggguaaca

SEQ ID NO: 428708 - RNA, 32 nt, Human
gaucaugccacugcacugcacuccagccuggg

SEQ ID NO: 428709 - RNA, 32 nt, Human
gaucaugccacugcacugcagcccgggcgaca

SEQ ID NO: 428710 - RNA, 32 nt, Human
gaucaugccacugcacuuccagccugggugac

SEQ ID NO: 428711 - RNA, 24 nt, Human
gaucaugccacugcacuuuagccu

SEQ ID NO: 428712 - RNA, 32 nt, Human
gaucaugccacugcacuuuagccugggcaaca

SEQ ID NO: 428713 - RNA, 32 nt, Human
gaucaugccacugcacuuuagccugggugaca

SEQ ID NO: 428714 - RNA, 32 nt, Human
gaucaugccacugcaugccagccugggcaaca

SEQ ID NO: 428715 - RNA, 32 nt, Human
gaucaugccacugcauuccagccugggcaaca

SEQ ID NO: 428716 - RNA, 32 nt, Human
gaucaugccacugcauuccagccugggcgaca

SEQ ID NO: 428717 - RNA, 32 nt, Human
gaucaugccacugcauuccagccugugugaug

SEQ ID NO: 428718 - RNA, 32 nt, Human
gaucaugccacugcauucuagccugggcaaca

SEQ ID NO: 428719 - RNA, 32 nt, Human
gaucaugccacuggacuccagccugggugaaa

SEQ ID NO: 428720 - RNA, 32 nt, Human
gaucaugccacuguacuccagccuaggugaca

SEQ ID NO: 428721 - RNA, 32 nt, Human
gaucaugccacuguacuccagccugggcgaca

SEQ ID NO: 428722 - RNA, 32 nt, Human
gaucaugccagugcacuccagccugggcaaca

SEQ ID NO: 428723 - RNA, 32 nt, Human
gaucaugccauggcacuccauccugggugaca

SEQ ID NO: 428724 - RNA, 32 nt, Human
gaucaugccauggcagucuagccugggcaaca

SEQ ID NO: 428725 - RNA, 32 nt, Human
gaucaugccauuacacuccagccugggcgaca

SEQ ID NO: 428726 - RNA, 32 nt, Human
gaucaugccauuacuccagccugggugacaua

SEQ ID NO: 428727 - RNA, 32 nt, Human
gaucaugccauuauacuccagccugggugaca

SEQ ID NO: 428728 - RNA, 32 nt, Human
gaucaugccauugcacagcagccugggugaca

SEQ ID NO: 428729 - RNA, 32 nt, Human
gaucaugccauugcacuccaaccugggugaca

SEQ ID NO: 428730 - RNA, 32 nt, Human
gaucaugccauugcacuccagcccagguaaca

SEQ ID NO: 428731 - RNA, 32 nt, Human
gaucaugccauugcacuccagcccggguuaca

SEQ ID NO: 428732 - RNA, 32 nt, Human
gaucaugccauugcacuccagccuaggcaaca

SEQ ID NO: 428733 - RNA, 32 nt, Human
gaucaugccauugcacuccagccugagugaca

SEQ ID NO: 428734 - RNA, 32 nt, Human
gaucaugccauugcacuccagccuggacaaca

SEQ ID NO: 428735 - RNA, 32 nt, Human
gaucaugccauugcacuccagccugggcaaca

SEQ ID NO: 428736 - RNA, 32 nt, Human
gaucaugccauugcacuccagccugggcaacg

SEQ ID NO: 428737 - RNA, 32 nt, Human
gaucaugccauugcacuccagccugggcgaca

SEQ ID NO: 428738 - RNA, 32 nt, Human
gaucaugccauugcacuccagccugggugaca

SEQ ID NO: 428739 - RNA, 32 nt, Human
gaucaugccauugcacuccagccugggugaua

SEQ ID NO: 428740 - RNA, 32 nt, Human
gaucaugccauugcacuccagcuugggugaca

SEQ ID NO: 428741 - RNA, 32 nt, Human
gaucaugccauugcacuccagucugggcgaca

SEQ ID NO: 428742 - RNA, 32 nt, Human
gaucaugccauugcacuccgacucugggcaac

SEQ ID NO: 428743 - RNA, 32 nt, Human
gaucaugccauugcacucgagccugggcaaca

SEQ ID NO: 428744 - RNA, 32 nt, Human
gaucaugccauugcacucuagccuagcaacaa

SEQ ID NO: 428745 - RNA, 29 nt, Human
gaucaugccauugcacucuagccugggug

SEQ ID NO: 428746 - RNA, 32 nt, Human
gaucaugccauugcauuccagccuaggcaaca

SEQ ID NO: 428747 - RNA, 32 nt, Human
gaucaugccauugcauuccagccuuggcgaca

SEQ ID NO: 428748 - RNA, 32 nt, Human
gaucaugccccugcauuccagccuaggcgaca

SEQ ID NO: 428749 - RNA, 29 nt, Human
gaucaugccgcugcauuccagccugggug

SEQ ID NO: 428750 - RNA, 32 nt, Human
gaucaugccguuguacuccagcuugggcaaca

SEQ ID NO: 428751 - RNA, 32 nt, Human
gaucaugccuacugcacuccagccugggcaac

SEQ ID NO: 428752 - RNA, 32 nt, Human
gaucaugccucacugcagccucgaccucccug

SEQ ID NO: 428753 - RNA, 32 nt, Human
gaucaugccucucuacuccagccugggcaaua

SEQ ID NO: 428754 - RNA, 19 nt, Human
gaucaugccuguaauccca

SEQ ID NO: 428755 - RNA, 32 nt, Human
gaucaugccuguaaucccagcacuuugggaag

SEQ ID NO: 428756 - RNA, 32 nt, Human
gaucaugccuguaaucccaguacuuugggagg

SEQ ID NO: 428757 - RNA, 32 nt, Human
gaucaugccuucugugucuggaagaggcggca

SEQ ID NO: 428758 - RNA, 32 nt, Human
gaucaugcuacugcacuccagccuaggugaca

SEQ ID NO: 428759 - RNA, 32 nt, Human
gaucaugcuacugcacuccagccugggcgaca

SEQ ID NO: 428760 - RNA, 32 nt, Human
gaucaugcuacugcacuccagccugggugaca

SEQ ID NO: 428761 - RNA, 32 nt, Human
gaucaugcuacugcacuccagcuuagguggca

SEQ ID NO: 428762 - RNA, 32 nt, Human
gaucaugcuacugcacucuagccugagcgaca

SEQ ID NO: 428763 - RNA, 32 nt, Human
gaucaugcuacugcaugccagccugggugaca

SEQ ID NO: 428764 - RNA, 32 nt, Human
gaucaugcuagugcgcuccagccugggcaaca

SEQ ID NO: 428765 - RNA, 32 nt, Human
gaucauggacaaugaauaaaugcacacuucug

SEQ ID NO: 428766 - RNA, 32 nt, Human
gaucauggagcuuaguuuuaauuuagauagca

SEQ ID NO: 428767 - RNA, 32 nt, Human
gaucauggauuuucugggcauaaguggcuguu

SEQ ID NO: 428768 - RNA, 32 nt, Human
gaucauggcacugcacuccagccugggcaaca

SEQ ID NO: 428769 - RNA, 29 nt, Human
gaucauggcuaccucagagcugagcugcg

SEQ ID NO: 428770 - RNA, 27 nt, Human
gaucauggcucacugcaaccucugccu

SEQ ID NO: 428771 - RNA, 32 nt, Human
gaucauggcuuacugcagccuugaucucccag

SEQ ID NO: 428772 - RNA, 32 nt, Human
gaucaugggacugcacuccagccugggugaca

SEQ ID NO: 428773 - RNA, 32 nt, Human
gaucauggugcuguagggccaggcucccucug

SEQ ID NO: 428774 - RNA, 32 nt, Human
gaucaugucacugcacuccagccugggugaca

SEQ ID NO: 428775 - RNA, 32 nt, Human
gaucaugucacugcacucuagcuugggagaca

SEQ ID NO: 428776 - RNA, 32 nt, Human
gaucaugucacuguacuccagccugggcaaca

SEQ ID NO: 428777 - RNA, 32 nt, Human
gaucaugucauucauuuguucaaaaccuucaa

SEQ ID NO: 428778 - RNA, 32 nt, Human
gaucaugucuacuaggaggaacagugacucug

SEQ ID NO: 428779 - RNA, 32 nt, Human
gaucaugucuguaauccuagcacugugggagg

SEQ ID NO: 428780 - RNA, 32 nt, Human
gaucauguuuugcuacaguuugcaggugaaaa

SEQ ID NO: 428781 - RNA, 22 nt, Human
gaucauuaaccacuguauacuu

SEQ ID NO: 428782 - RNA, 24 nt, Human
gaucauuccacugcauuucagccu

SEQ ID NO: 428783 - RNA, 32 nt, Human
gaucauuccacugcauuucagccugggggaua

SEQ ID NO: 428784 - RNA, 32 nt, Human
gaucauuccagcccacagcaauggagccacau

SEQ ID NO: 428785 - RNA, 32 nt, Human
gaucauuccauuacacuccagccugggcacca

SEQ ID NO: 428786 - RNA, 32 nt, Human
gaucauucucacuucaaauuccuggggcugau

SEQ ID NO: 428787 - RNA, 32 nt, Human
gaucauugcacuccagccugggcaauaagagu

SEQ ID NO: 428788 - RNA, 32 nt, Human
gaucauugucucauuuuagugauuguuccuua

SEQ ID NO: 428789 - RNA, 32 nt, Human
gaucauuuacccaaggauagguguuugguaau

SEQ ID NO: 428790 - RNA, 32 nt, Human
gaucauuuagacucaacaacaaaacagaaaac

SEQ ID NO: 428791 - RNA, 32 nt, Human
gaucauuucaccucacuccagccugggugaca

SEQ ID NO: 428792 - RNA, 32 nt, Human
gaucauuuccacugcacauuucuccucaagaa

SEQ ID NO: 428793 - RNA, 32 nt, Human
gaucauuucccaagauacuuucccaaaaucag

SEQ ID NO: 428794 - RNA, 32 nt, Human
gaucauuuccuaaaaucuccagucccaaguau

SEQ ID NO: 428795 - RNA, 32 nt, Human
gaucauuucuacuugcugugcauuuuaaccaa

SEQ ID NO: 428796 - RNA, 32 nt, Human
gaucauuuucccuugccugaguuuugagcuga

SEQ ID NO: 428797 - RNA, 32 nt, Human
gaucauuuucuuaucuccuuuucuuaagcagu

SEQ ID NO: 428798 - RNA, 20 nt, Human
gauccaaacugauuaaguua

SEQ ID NO: 428799 - RNA, 32 nt, Human
gauccaacagacagaaauucacccucauacau

SEQ ID NO: 428800 - RNA, 32 nt, Human
gauccaacgugugccagccacugggauacaaa

SEQ ID NO: 428801 - RNA, 32 nt, Human
gauccaagaaccacagcucaucugccaacaau

SEQ ID NO: 428802 - RNA, 24 nt, Human
gauccaagaucgcaccacugcacu

SEQ ID NO: 428803 - RNA, 32 nt, Human
gauccaagguaacuggguaggaaaucuuuuga

SEQ ID NO: 428804 - RNA, 32 nt, Human
gauccacaaauaccaccagcugcuucauccac

SEQ ID NO: 428805 - RNA, 32 nt, Human
gauccacacccucccuucauccuucccuccca

SEQ ID NO: 428806 - RNA, 32 nt, Human
gauccacacucagcauuuuuccuugccucuau

SEQ ID NO: 428807 - RNA, 32 nt, Human
gauccacagaauguuucuucucugccuuaaag

SEQ ID NO: 428808 - RNA, 32 nt, Human
gauccacagaguuucauauuugaagucuccgg

SEQ ID NO: 428809 - RNA, 32 nt, Human
gauccacagcaggcacauaucucuccaaggga

SEQ ID NO: 428810 - RNA, 32 nt, Human
gauccacaggaccaaagggugcagugaugggc

SEQ ID NO: 428811 - RNA, 32 nt, Human
gauccaccccggaaaccggcaggaugaagggg

SEQ ID NO: 428812 - RNA, 32 nt, Human
gauccacccuccacaguacuccagaaaggacu

SEQ ID NO: 428813 - RNA, 32 nt, Human
gauccacccuccucagccucccaaagugcugg

SEQ ID NO: 428814 - RNA, 32 nt, Human
gauccacccuccucccuucucaugggacuuug

SEQ ID NO: 428815 - RNA, 32 nt, Human
gauccaccuaagaucuugccccuguuaagugg

SEQ ID NO: 428816 - RNA, 32 nt, Human
gauccaccuuggccuccugaagugcugggguu

SEQ ID NO: 428817 - RNA, 32 nt, Human
gauccacgugcucgccucugcccagccugccc

SEQ ID NO: 428818 - RNA, 32 nt, Human
gauccacugugagcaccaaccugcugcagucu

SEQ ID NO: 428819 - RNA, 19 nt, Human
gauccacuuucagccucca

SEQ ID NO: 428820 - RNA, 32 nt, Human
gauccagaaagcccaggacauaacagagccgc

SEQ ID NO: 428821 - RNA, 32 nt, Human
gauccagaccaucuuggcuaacagggugaaac

SEQ ID NO: 428822 - RNA, 32 nt, Human
gauccagaccuccugagcccacuuccccaucu

SEQ ID NO: 428823 - RNA, 32 nt, Human
gauccagaccuccugagcccacuuuccccauc

SEQ ID NO: 428824 - RNA, 32 nt, Human
gauccagagacauagaggaaguaggggguggu

SEQ ID NO: 428825 - RNA, 32 nt, Human
gauccagagagcuuccugaaggaccuguugaa

SEQ ID NO: 428826 - RNA, 32 nt, Human
gauccagagcugcugcugcucacugccagucc

SEQ ID NO: 428827 - RNA, 22 nt, Human
gauccagaggcggagguugcag

SEQ ID NO: 428828 - RNA, 32 nt, Human
gauccagaggcugauggcggagggcggcauga

SEQ ID NO: 428829 - RNA, 32 nt, Human
gauccagauccuggacucagagcuguuugagc

SEQ ID NO: 428830 - RNA, 32 nt, Human
gauccagauguuaaaagccaauggugugcuga

SEQ ID NO: 428831 - RNA, 32 nt, Human
gauccagcaccuauugaauuaccauagaguaa

SEQ ID NO: 428832 - RNA, 32 nt, Human
gauccagccacagcacuccagccugggugaca

SEQ ID NO: 428833 - RNA, 32 nt, Human
gauccagcucuccuacccucaggccaggaugc

SEQ ID NO: 428834 - RNA, 32 nt, Human
gauccagcuuucccuucucuuaccuguacagu

SEQ ID NO: 428835 - RNA, 32 nt, Human
gauccaggagaugcucacaggccacaggaccu

SEQ ID NO: 428836 - RNA, 32 nt, Human
gauccaggcaucaaugguuggccacagauggg

SEQ ID NO: 428837 - RNA, 32 nt, Human
gauccaggcugcacgcggcggacugggcaggc

SEQ ID NO: 428838 - RNA, 32 nt, Human
gauccaggugugagagcucuugagucaagagu

SEQ ID NO: 428839 - RNA, 32 nt, Human
gauccagguugauagaaguccagauccugagg

SEQ ID NO: 428840 - RNA, 32 nt, Human
gauccaguagcccuuuccacauacuguggcua

SEQ ID NO: 428841 - RNA, 32 nt, Human
gauccaguagccugggguggggcacaggaugu

SEQ ID NO: 428842 - RNA, 32 nt, Human
gauccagugucagcuccagccuauucaauuuc

SEQ ID NO: 428843 - RNA, 32 nt, Human
gauccauaaagaacccagccaacccgcagagg

SEQ ID NO: 428844 - RNA, 32 nt, Human
gauccauaaagaacccagccaacucgcagagg

SEQ ID NO: 428845 - RNA, 32 nt, Human
gauccauacaauagagcacagcagggagacug

SEQ ID NO: 428846 - RNA, 32 nt, Human
gauccauacauacuauaaggcacuuuuaacag

SEQ ID NO: 428847 - RNA, 32 nt, Human
gauccauagacuuagcaagucuugccuuaucu

SEQ ID NO: 428848 - RNA, 32 nt, Human
gauccaucauccaggcugcagugcagcagcgc

SEQ ID NO: 428849 - RNA, 32 nt, Human
gauccauccuuuugcuucaucuggagucccuc

SEQ ID NO: 428850 - RNA, 32 nt, Human
gauccaucucuagccaaaucacaccccagagc

SEQ ID NO: 428851 - RNA, 32 nt, Human
gauccaucuuaauccagauccaugaagaccuu

SEQ ID NO: 428852 - RNA, 32 nt, Human
gauccaugagcaggaccgccuccaugauuggg

SEQ ID NO: 428853 - RNA, 32 nt, Human
gauccaugaguuguuucuccaacucuucgagc

SEQ ID NO: 428854 - RNA, 30 nt, Human
gauccaugcugcugcugacucggagcccca

SEQ ID NO: 428855 - RNA, 23 nt, Human
gauccauggaauagaccuugaca

SEQ ID NO: 428856 - RNA, 32 nt, Human
gauccaugguuauuagagaaagagaaaggauu

SEQ ID NO: 428857 - RNA, 32 nt, Human
gauccaugguuauuccuuacucaugaacagug

SEQ ID NO: 428858 - RNA, 32 nt, Human
gauccaugucuggaauggagagagcgguauaa

SEQ ID NO: 428859 - RNA, 32 nt, Human
gauccauucucucuuucucugcauacucucca

SEQ ID NO: 428860 - RNA, 32 nt, Human
gauccauuguggucugccuuccaggcucauua

SEQ ID NO: 428861 - RNA, 32 nt, Human
gaucccaaaacgaaccaacagaccaggcauca

SEQ ID NO: 428862 - RNA, 32 nt, Human
gaucccaaaaggauuuugguggaaaacuaguu

SEQ ID NO: 428863 - RNA, 32 nt, Human
gaucccaacuacucgggaggccgaggcaggaa

SEQ ID NO: 428864 - RNA, 32 nt, Human
gaucccaaggccaacagaagcugcagugggca

SEQ ID NO: 428865 - RNA, 32 nt, Human
gaucccaagggagagaaggaaaauggcugaua

SEQ ID NO: 428866 - RNA, 32 nt, Human
gaucccaagggcccagauaacgcccccaacuu

SEQ ID NO: 428867 - RNA, 32 nt, Human
gaucccacaaagugcugggauuacagguguga

SEQ ID NO: 428868 - RNA, 32 nt, Human
gaucccacaccaugccucacaugguagacccc

SEQ ID NO: 428869 - RNA, 32 nt, Human
gaucccacacuggcagagauggggccaccccu

SEQ ID NO: 428870 - RNA, 32 nt, Human
gaucccaccacugcacuccagccugggcgaca

SEQ ID NO: 428871 - RNA, 32 nt, Human
gaucccaccauggucauaucuugaaguauggu

SEQ ID NO: 428872 - RNA, 32 nt, Human
gaucccaccauugcacuccagccugggcaaca

SEQ ID NO: 428873 - RNA, 19 nt, Human
gaucccaccgucgggccug

SEQ ID NO: 428874 - RNA, 32 nt, Human
gaucccaccuacucgggaggcuaaggcaagag

SEQ ID NO: 428875 - RNA, 32 nt, Human
gaucccaccugccgcuaggcacguggaggagg

SEQ ID NO: 428876 - RNA, 22 nt, Human
gaucccacugcccccgccucuc

SEQ ID NO: 428877 - RNA, 32 nt, Human
gaucccacugccuuucccuccuaggcaugugc

SEQ ID NO: 428878 - RNA, 32 nt, Human
gaucccacugcugcacuuuagccugggugaaa

SEQ ID NO: 428879 - RNA, 32 nt, Human
gaucccacuggcauuugagugugcaaaccuug

SEQ ID NO: 428880 - RNA, 32 nt, Human
gaucccacuugcagccuccccaggugucugcc

SEQ ID NO: 428881 - RNA, 32 nt, Human
gaucccagaggaggaaguccagagacagagca

SEQ ID NO: 428882 - RNA, 32 nt, Human
gaucccagagucaguaaaucugccugugaagu

SEQ ID NO: 428883 - RNA, 32 nt, Human
gaucccagauuuucucccuccugacucacuga

SEQ ID NO: 428884 - RNA, 32 nt, Human
gaucccagcaacagcaagccuuucaugaguua

SEQ ID NO: 428885 - RNA, 32 nt, Human
gaucccagcacuggcgugacugacggcugagg

SEQ ID NO: 428886 - RNA, 32 nt, Human
gaucccagcacuuugggagacugaggcggauc

SEQ ID NO: 428887 - RNA, 19 nt, Human
gaucccagcagcccucccu

SEQ ID NO: 428888 - RNA, 30 nt, Human
gaucccagccucuccccugcucccgugcuc

SEQ ID NO: 428889 - RNA, 32 nt, Human
gaucccagcgagacccagagaugccuguaaug

SEQ ID NO: 428890 - RNA, 32 nt, Human
gaucccagcuacucaggaagcugaggcagaaa

SEQ ID NO: 428891 - RNA, 32 nt, Human
gaucccagcuacucaggaggcugagacaggag

SEQ ID NO: 428892 - RNA, 32 nt, Human
gaucccagcuacucaggaggcugaggcaggag

SEQ ID NO: 428893 - RNA, 32 nt, Human
gaucccagcuacucgggaggcuaaggcaggag

SEQ ID NO: 428894 - RNA, 32 nt, Human
gaucccagcuacucgggaggcugaggcaggag

SEQ ID NO: 428895 - RNA, 32 nt, Human
gaucccagcuacugaggaggcugaggcaggag

SEQ ID NO: 428896 - RNA, 32 nt, Human
gaucccagcuacuggagaggcugaggcaggag

SEQ ID NO: 428897 - RNA, 32 nt, Human
gaucccagcuacuggggagacugaggugggag

SEQ ID NO: 428898 - RNA, 32 nt, Human
gaucccagcuacuggggaggcugaggcaggag

SEQ ID NO: 428899 - RNA, 32 nt, Human
gaucccagcuacuuaggagguugaggcuggga

SEQ ID NO: 428900 - RNA, 32 nt, Human
gaucccagcuacuugagaggcugaggugggaa

SEQ ID NO: 428901 - RNA, 32 nt, Human
gaucccagcuacuuggaaggcugaggugagag

SEQ ID NO: 428902 - RNA, 32 nt, Human
gaucccagcuacuuggaggcugaggcagaaga

SEQ ID NO: 428903 - RNA, 32 nt, Human
gaucccagcuacuugggaggcugaggcaggag

SEQ ID NO: 428904 - RNA, 32 nt, Human
gaucccagcuacuugggaggcugagguagaag

SEQ ID NO: 428905 - RNA, 32 nt, Human
gaucccagcuacuugggaggcugaggugggag

SEQ ID NO: 428906 - RNA, 32 nt, Human
gaucccagcucucugccagacugagagggcaa

SEQ ID NO: 428907 - RNA, 32 nt, Human
gaucccaggaaacaccaguagagugaggaagu

SEQ ID NO: 428908 - RNA, 32 nt, Human
gaucccaggaggcggagguugcagugaguugc

SEQ ID NO: 428909 - RNA, 32 nt, Human
gaucccaggaggucgagaccagccuggggaac

SEQ ID NO: 428910 - RNA, 32 nt, Human
gaucccaggaguuuaagaccagccugggcaac

SEQ ID NO: 428911 - RNA, 32 nt, Human
gaucccaggaguuugagaccagccugggcacc

SEQ ID NO: 428912 - RNA, 32 nt, Human
gaucccaggcuggauggaguggcuggaaggaa

SEQ ID NO: 428913 - RNA, 32 nt, Human
gaucccagggcugaggagccuccgggaccggg

SEQ ID NO: 428914 - RNA, 32 nt, Human
gaucccaggggaggggaaacgggaauagugag

SEQ ID NO: 428915 - RNA, 32 nt, Human
gaucccaguuuacucuguggccaggccccacc

SEQ ID NO: 428916 - RNA, 32 nt, Human
gaucccaguuugcagcaaaccccacaccccag

SEQ ID NO: 428917 - RNA, 32 nt, Human
gaucccaucagccuggccauagcagaacaccc

SEQ ID NO: 428918 - RNA, 32 nt, Human
gaucccaucugccuagauggaagaggauccua

SEQ ID NO: 428919 - RNA, 32 nt, Human
gaucccaugacagauucuguugucacgucucc

SEQ ID NO: 428920 - RNA, 32 nt, Human
gaucccaugagguuggggcagggcagggcuuc

SEQ ID NO: 428921 - RNA, 32 nt, Human
gaucccauuucagccugugcucugccucgauu

SEQ ID NO: 428922 - RNA, 32 nt, Human
gauccccaaguggugaaugacacgccuaaggu

SEQ ID NO: 428923 - RNA, 32 nt, Human
gauccccacagcuguguacuuguuugcauuug

SEQ ID NO: 428924 - RNA, 32 nt, Human
gauccccagccagacucuguacccacaggauu

SEQ ID NO: 428925 - RNA, 32 nt, Human
gauccccaggaagccgaggagccccaggaagg

SEQ ID NO: 428926 - RNA, 32 nt, Human
gauccccaguuccuauacccuaccccugaccu

SEQ ID NO: 428927 - RNA, 32 nt, Human
gauccccaucuauuaaguaaggggaaagauga

SEQ ID NO: 428928 - RNA, 32 nt, Human
gaucccccaaguguccuggacccuggccuaaa

SEQ ID NO: 428929 - RNA, 20 nt, Human
gaucccccacgggcuggcug

SEQ ID NO: 428930 - RNA, 32 nt, Human
gaucccccagagagcuacaggucugcucccga

SEQ ID NO: 428931 - RNA, 32 nt, Human
gaucccccgaccgcacuccagccugggcgaca

SEQ ID NO: 428932 - RNA, 32 nt, Human
gaucccccugaaccugcaccuccaucacgacc

SEQ ID NO: 428933 - RNA, 32 nt, Human
gaucccccuucucuccugcuuccuccagggaa

SEQ ID NO: 428934 - RNA, 32 nt, Human
gauccccgccuccugggcggaucugaguuauu

SEQ ID NO: 428935 - RNA, 32 nt, Human
gauccccggccuucccaugcaggaugacugcu

SEQ ID NO: 428936 - RNA, 32 nt, Human
gauccccggcgccgucgccaggcgcuggccgu

SEQ ID NO: 428937 - RNA, 32 nt, Human
gauccccucaacaaggauggaacugaaggccg

SEQ ID NO: 428938 - RNA, 32 nt, Human
gauccccucauuaaaagaacagugaugauggu

SEQ ID NO: 428939 - RNA, 32 nt, Human
gauccccuccuuggaccuggcaucugcuaaug

SEQ ID NO: 428940 - RNA, 32 nt, Human
gauccccucucuuccuacccuuccucaccacu

SEQ ID NO: 428941 - RNA, 32 nt, Human
gauccccucuucucagcuucccaaggagcugg

SEQ ID NO: 428942 - RNA, 32 nt, Human
gauccccugccuggugcccacacugccucgca

SEQ ID NO: 428943 - RNA, 32 nt, Human
gauccccuggcuuuucugaagugguggcaggu

SEQ ID NO: 428944 - RNA, 32 nt, Human
gauccccuuccagagccaccuccccauucagg

SEQ ID NO: 428945 - RNA, 32 nt, Human
gauccccuucccacccucuccguuggccucag

SEQ ID NO: 428946 - RNA, 32 nt, Human
gauccccuuccccauuccgcccccgccucaac

SEQ ID NO: 428947 - RNA, 24 nt, Human
gaucccgaguccccggaucccgga

SEQ ID NO: 428948 - RNA, 32 nt, Human
gaucccgccacucacuccagccuggauaaaag

SEQ ID NO: 428949 - RNA, 32 nt, Human
gaucccgccacugcacgccagccugggcgaca

SEQ ID NO: 428950 - RNA, 32 nt, Human
gaucccgccacugcacuccagacugggcgaca

SEQ ID NO: 428951 - RNA, 32 nt, Human
gaucccgccacugcacuccagcccaggugaca

SEQ ID NO: 428952 - RNA, 32 nt, Human
gaucccgccacugcacuccagccugggcgaca

SEQ ID NO: 428953 - RNA, 24 nt, Human
gaucccgcugacccgaauccugga

SEQ ID NO: 428954 - RNA, 32 nt, Human
gaucccggcagaagcuaugaaagggaauaaag

SEQ ID NO: 428955 - RNA, 32 nt, Human
gaucccggccccugccacccagccucaugcaa

SEQ ID NO: 428956 - RNA, 32 nt, Human
gaucccggcgcuguucaucggcuucagccagu

SEQ ID NO: 428957 - RNA, 32 nt, Human
gaucccgggcaggcagcguccacccagcgugg

SEQ ID NO: 428958 - RNA, 32 nt, Human
gaucccuaauauccccagccccagccagaagc

SEQ ID NO: 428959 - RNA, 32 nt, Human
gaucccuagcuccagccucuuccugggccagc

SEQ ID NO: 428960 - RNA, 32 nt, Human
gaucccuagguccugcccuccugguccguggg

SEQ ID NO: 428961 - RNA, 32 nt, Human
gaucccuccacuguccaggcugucucaggagg

SEQ ID NO: 428962 - RNA, 32 nt, Human
gaucccucccaucucacaguaccucacagguc

SEQ ID NO: 428963 - RNA, 32 nt, Human
gaucccucuccucgccugccuucuggaagacu

SEQ ID NO: 428964 - RNA, 32 nt, Human
gaucccucuggggaggacaggaaggggacucc

SEQ ID NO: 428965 - RNA, 32 nt, Human
gaucccucuuuuccaguucuccuuccucuagg

SEQ ID NO: 428966 - RNA, 32 nt, Human
gaucccugaaaccaaaaagcuccugcugcuuc

SEQ ID NO: 428967 - RNA, 32 nt, Human
gaucccugagcguguggcagcagugcggucgu

SEQ ID NO: 428968 - RNA, 32 nt, Human
gaucccugaggcgggagaaucgcuugaaccca

SEQ ID NO: 428969 - RNA, 32 nt, Human
gaucccugcagccugccacuaccccgagucuc

SEQ ID NO: 428970 - RNA, 32 nt, Human
gaucccugcugggcaccaacagcuccaccaug

SEQ ID NO: 428971 - RNA, 32 nt, Human
gaucccuggaaaauaaugauguccaaagcaaa

SEQ ID NO: 428972 - RNA, 32 nt, Human
gaucccuggaguucaggaaccaacacaagcac

SEQ ID NO: 428973 - RNA, 32 nt, Human
gaucccugggaaugugcucugggcggaagcag

SEQ ID NO: 428974 - RNA, 22 nt, Human
gaucccugggcccugcugcuca

SEQ ID NO: 428975 - RNA, 32 nt, Human
gaucccugguuuccuacccaugggaaacccca

SEQ ID NO: 428976 - RNA, 32 nt, Human
gaucccuguauuucaagaccucugugcacuua

SEQ ID NO: 428977 - RNA, 32 nt, Human
gaucccugucuucugaccuccaacauuaagag

SEQ ID NO: 428978 - RNA, 32 nt, Human
gaucccuguggaccccgaugccugcauccuuc

SEQ ID NO: 428979 - RNA, 32 nt, Human
gaucccuguguugucucuagagcagggauuaa

SEQ ID NO: 428980 - RNA, 32 nt, Human
gaucccuuagguucaggaagcuucuguguaag

SEQ ID NO: 428981 - RNA, 32 nt, Human
gaucccuucccaaccccuuugcaccgguccca

SEQ ID NO: 428982 - RNA, 32 nt, Human
gaucccuugacccugagagguagaggcugcau

SEQ ID NO: 428983 - RNA, 32 nt, Human
gaucccuuuccagauugcaaccuggccugcau

SEQ ID NO: 428984 - RNA, 32 nt, Human
gaucccuuucuaaggucccuuccagcccagcc

SEQ ID NO: 428985 - RNA, 32 nt, Human
gauccgaccucgcagucuccccagguccgcca

SEQ ID NO: 428986 - RNA, 32 nt, Human
gauccgagccuguagaagggaggcaugaaacu

SEQ ID NO: 428987 - RNA, 32 nt, Human
gauccgagggagcaaugguggggcgagugagg

SEQ ID NO: 428988 - RNA, 32 nt, Human
gauccgcacaugcugaccuuccugcagcaacu

SEQ ID NO: 428989 - RNA, 32 nt, Human
gauccgcagagcugccucugggcgccugaccc

SEQ ID NO: 428990 - RNA, 32 nt, Human
gauccgccaccauggcugaaggagagaaugaa

SEQ ID NO: 428991 - RNA, 32 nt, Human
gauccgccacugcacuccagccugggugacag

SEQ ID NO: 428992 - RNA, 32 nt, Human
gauccgccauuacacuccagccugggugacag

SEQ ID NO: 428993 - RNA, 32 nt, Human
gauccgcgguggacccagggaagcggaggagc

SEQ ID NO: 428994 - RNA, 32 nt, Human
gauccgcgucccgccucagcggccggaggaca

SEQ ID NO: 428995 - RNA, 32 nt, Human
gauccgcuccagcgucaagguggcauccgaag

SEQ ID NO: 428996 - RNA, 32 nt, Human
gauccgcucuacugucuucuccgaggcccacc

SEQ ID NO: 428997 - RNA, 32 nt, Human
gauccggaacucgccaacucaccccgggcauc

SEQ ID NO: 428998 - RNA, 32 nt, Human
gauccggaagcugaucaaagaugggcugauca

SEQ ID NO: 428999 - RNA, 32 nt, Human
gauccggaccagccaaggaaggguccaggugc

SEQ ID NO: 429000 - RNA, 32 nt, Human
gauccggagagggggcuccgggagcggcggga

SEQ ID NO: 429001 - RNA, 32 nt, Human
gauccggagcgggacccaggagccggcgcggg

SEQ ID NO: 429002 - RNA, 32 nt, Human
gauccggcagccucucuucacugcuacaugug

SEQ ID NO: 429003 - RNA, 32 nt, Human
gauccggcgaguagcuggcggucccgggugcu

SEQ ID NO: 429004 - RNA, 32 nt, Human
gauccgggccuugcgugcagccucccaaccau

SEQ ID NO: 429005 - RNA, 32 nt, Human
gauccggggagacaggaacacgggcaagacag

SEQ ID NO: 429006 - RNA, 32 nt, Human
gauccggggagguggaaguugcagugggccaa

SEQ ID NO: 429007 - RNA, 32 nt, Human
gauccgguguugcauccuuggagagagcugag

SEQ ID NO: 429008 - RNA, 32 nt, Human
gauccguaccuccaaggcucccaugggcccaa

SEQ ID NO: 429009 - RNA, 17 nt, Human
gauccguccuccuuggg

SEQ ID NO: 429010 - RNA, 32 nt, Human
gauccuaaaaaucccuuccuguucccuccugg

SEQ ID NO: 429011 - RNA, 32 nt, Human
gauccuaaaagugcccuuggcugccugcugga

SEQ ID NO: 429012 - RNA, 32 nt, Human
gauccuaacuaaaaacagacuugaguggauau

SEQ ID NO: 429013 - RNA, 32 nt, Human
gauccuaacuaagcaggagcugcggcugccgg

SEQ ID NO: 429014 - RNA, 32 nt, Human
gauccuaaggaaauauguguggguucuucuga

SEQ ID NO: 429015 - RNA, 32 nt, Human
gauccuaagucucuuacaaaagcuuugaauac

SEQ ID NO: 429016 - RNA, 32 nt, Human
gauccuaauacuuggccaucuccacacaaguu

SEQ ID NO: 429017 - RNA, 28 nt, Human
gauccuaauggugcugcccuauuuauac

SEQ ID NO: 429018 - RNA, 32 nt, Human
gauccuacagaagcccugcuaaauuuuacucc

SEQ ID NO: 429019 - RNA, 32 nt, Human
gauccuaccacugcacuucagccuaggugaca

SEQ ID NO: 429020 - RNA, 32 nt, Human
gauccuacggauugagguccucaggccacgcc

SEQ ID NO: 429021 - RNA, 32 nt, Human
gauccuacguguaugcacccuacagcagcagu

SEQ ID NO: 429022 - RNA, 32 nt, Human
gauccuacucaacaaaaggaaggguggucaga

SEQ ID NO: 429023 - RNA, 32 nt, Human
gauccuagagugagacgggagguaaagucacc

SEQ ID NO: 429024 - RNA, 32 nt, Human
gauccuagcgugagaggucauccugcccuugc

SEQ ID NO: 429025 - RNA, 32 nt, Human
gauccuagcuacucaggaggcugaagugggag

SEQ ID NO: 429026 - RNA, 32 nt, Human
gauccuagcugcagaucgcaucccacaaugcg

SEQ ID NO: 429027 - RNA, 23 nt, Human
gauccuaguuggggagcugcuca

SEQ ID NO: 429028 - RNA, 32 nt, Human
gauccuaucagcuucucucccacccaauuagg

SEQ ID NO: 429029 - RNA, 32 nt, Human
gauccuaucaggaugaggagcagcagcccagg

SEQ ID NO: 429030 - RNA, 32 nt, Human
gauccucaaaggacuguggccaaggccucugc

SEQ ID NO: 429031 - RNA, 32 nt, Human
gauccucaaguaccccaguuucacacauacca

SEQ ID NO: 429032 - RNA, 32 nt, Human
gauccucacaucugggggaaaucauagacaau

SEQ ID NO: 429033 - RNA, 32 nt, Human
gauccucacaugcugagaaacagccucuacuc

SEQ ID NO: 429034 - RNA, 32 nt, Human
gauccucaccucagugccccagagaugcccca

SEQ ID NO: 429035 - RNA, 32 nt, Human
gauccucacugcaacauuccuuauccaauccc

SEQ ID NO: 429036 - RNA, 32 nt, Human
gauccucagaacuucucugggacaauuucagu

SEQ ID NO: 429037 - RNA, 32 nt, Human
gauccucagccauguucaagugaaguaagccu

SEQ ID NO: 429038 - RNA, 32 nt, Human
gauccucauggaaacagugaaagagaaaaauc

SEQ ID NO: 429039 - RNA, 32 nt, Human
gauccuccaaugucuaauuuucuuuccgacac

SEQ ID NO: 429040 - RNA, 32 nt, Human
gauccuccacggucagcgccggggcccggaga

SEQ ID NO: 429041 - RNA, 32 nt, Human
gauccuccacucauggcuguaucugcagcuuc

SEQ ID NO: 429042 - RNA, 32 nt, Human
gauccucccaccucagcuucccaaguagcuag

SEQ ID NO: 429043 - RNA, 32 nt, Human
gauccucccaccucagcuuccugggaccaccc

SEQ ID NO: 429044 - RNA, 32 nt, Human
gauccucccaccucagcuucucaaaguucugg

SEQ ID NO: 429045 - RNA, 23 nt, Human
gauccucccacuucagccuuuca

SEQ ID NO: 429046 - RNA, 32 nt, Human
gauccucccacuucagcuuccugaguuccuga

SEQ ID NO: 429047 - RNA, 32 nt, Human
gauccucccaucucagcuuccugaggagcugg

SEQ ID NO: 429048 - RNA, 18 nt, Human
gauccucccccaccucuc

SEQ ID NO: 429049 - RNA, 32 nt, Human
gauccucccccuacuucuccccaagggccaag

SEQ ID NO: 429050 - RNA, 22 nt, Human
gauccucccgcuucagccuccc

SEQ ID NO: 429051 - RNA, 23 nt, Human
gauccucccgcuucggccuccca

SEQ ID NO: 429052 - RNA, 32 nt, Human
gauccucccuggggaccccuguggccugucuc

SEQ ID NO: 429053 - RNA, 32 nt, Human
gauccucccuuuccauugcuucuccuagugau

SEQ ID NO: 429054 - RNA, 32 nt, Human
gauccuccuaccucagccuccuggaagcucgg

SEQ ID NO: 429055 - RNA, 32 nt, Human
gauccuccucuuugggaguccagugucuuuga

SEQ ID NO: 429056 - RNA, 32 nt, Human
gauccuccuuaaaucccacagucccccagacc

SEQ ID NO: 429057 - RNA, 32 nt, Human
gauccuccuucuuuuuccuuuuucuucaccuu

SEQ ID NO: 429058 - RNA, 32 nt, Human
gauccuccuugcaaagcugugccuugcagaga

SEQ ID NO: 429059 - RNA, 32 nt, Human
gauccucgggaauacagggauuacaggaauga

SEQ ID NO: 429060 - RNA, 32 nt, Human
gauccucuaccucauaacaaaaggacaguggg

SEQ ID NO: 429061 - RNA, 32 nt, Human
gauccucucaccucagcucccgagcagcuagg

SEQ ID NO: 429062 - RNA, 32 nt, Human
gauccucuccacccuacccccaauccacucga

SEQ ID NO: 429063 - RNA, 32 nt, Human
gauccucuccacccuccucuagccaucccuug

SEQ ID NO: 429064 - RNA, 32 nt, Human
gauccucuccguagcaccuccauagauaguag

SEQ ID NO: 429065 - RNA, 32 nt, Human
gauccucucucccagggaauccgacacaggag

SEQ ID NO: 429066 - RNA, 32 nt, Human
gauccucucugccuuuguacuugaagagcgca

SEQ ID NO: 429067 - RNA, 32 nt, Human
gauccucugagaugauuguggacugggugcug

SEQ ID NO: 429068 - RNA, 32 nt, Human
gauccucugccgcccucucugccacgcgggac

SEQ ID NO: 429069 - RNA, 32 nt, Human
gauccucugcgugggagggcuugggggcagcc

SEQ ID NO: 429070 - RNA, 32 nt, Human
gauccucugcucccgucucugucucccacagu

SEQ ID NO: 429071 - RNA, 32 nt, Human
gauccucugcugcaaacagaugaauugaauca

SEQ ID NO: 429072 - RNA, 32 nt, Human
gauccucuggccaacacacaucugccaugucc

SEQ ID NO: 429073 - RNA, 32 nt, Human
gauccucuucccucagcuucccagaaugccga

SEQ ID NO: 429074 - RNA, 32 nt, Human
gauccucuucucaaagcugggauuacaggugu

SEQ ID NO: 429075 - RNA, 32 nt, Human
gauccugaaacugucucucacauuauauagua

SEQ ID NO: 429076 - RNA, 32 nt, Human
gauccugaaauggcaauugcacaugucugcau

SEQ ID NO: 429077 - RNA, 32 nt, Human
gauccugaagaaaaaggugacaagaaucagca

SEQ ID NO: 429078 - RNA, 32 nt, Human
gauccugaagagaccuucaccugggugccacg

SEQ ID NO: 429079 - RNA, 19 nt, Human
gauccugaagggccugcug

SEQ ID NO: 429080 - RNA, 32 nt, Human
gauccugaaugagacaaaagagagaaccaguc

SEQ ID NO: 429081 - RNA, 32 nt, Human
gauccugaccccugcagggcucaggggucagc

SEQ ID NO: 429082 - RNA, 32 nt, Human
gauccugagucauguguuccaguggcuugggu

SEQ ID NO: 429083 - RNA, 32 nt, Human
gauccugcacacacagacacagcgucugcccc

SEQ ID NO: 429084 - RNA, 32 nt, Human
gauccugcacacacccagacagcuggcgcuca

SEQ ID NO: 429085 - RNA, 32 nt, Human
gauccugccacugcacuccagccugggcaaca

SEQ ID NO: 429086 - RNA, 32 nt, Human
gauccugccacugcacuccagccugggcgaca

SEQ ID NO: 429087 - RNA, 32 nt, Human
gauccugccacugcacuccagccugugccaca

SEQ ID NO: 429088 - RNA, 32 nt, Human
gauccugccagggccaggugggguggacuggg

SEQ ID NO: 429089 - RNA, 32 nt, Human
gauccugccccuuccuucuugccuguagcucc

SEQ ID NO: 429090 - RNA, 32 nt, Human
gauccugccucuggucccagcauccagcugcc

SEQ ID NO: 429091 - RNA, 32 nt, Human
gauccugccuguuguaggccccuucaggaugc

SEQ ID NO: 429092 - RNA, 32 nt, Human
gauccugcggcagggcaagcugugcgacguga

SEQ ID NO: 429093 - RNA, 32 nt, Human
gauccugcuaagcagagaaucgcuguggccgg

SEQ ID NO: 429094 - RNA, 32 nt, Human
gauccugcuacccagagggugaauggguaucu

SEQ ID NO: 429095 - RNA, 32 nt, Human
gauccugcuaucuuugccuuuugagauaccau

SEQ ID NO: 429096 - RNA, 32 nt, Human
gauccugcucagccucugccucggcugcuucc

SEQ ID NO: 429097 - RNA, 32 nt, Human
gauccugcuguggccucacuucccugggaacu

SEQ ID NO: 429098 - RNA, 32 nt, Human
gauccuggaaagaaaaugcacaauaugacuau

SEQ ID NO: 429099 - RNA, 32 nt, Human
gauccuggaaaugagaccugguggaauauuau

SEQ ID NO: 429100 - RNA, 32 nt, Human
gauccuggaaccagggcugaggcucgcauccu

SEQ ID NO: 429101 - RNA, 32 nt, Human
gauccuggacuuggaccugggccugcaguucc

SEQ ID NO: 429102 - RNA, 32 nt, Human
gauccuggagugauaugauccagagcagaguu

SEQ ID NO: 429103 - RNA, 32 nt, Human
gauccuggccaacacggugaaacccccgucuc

SEQ ID NO: 429104 - RNA, 32 nt, Human
gauccuggcucacugcaacugcagccucccgg

SEQ ID NO: 429105 - RNA, 32 nt, Human
gauccugggacccccuacucuauccgccaccg

SEQ ID NO: 429106 - RNA, 32 nt, Human
gauccugggaggaugugacgucaggugagaag

SEQ ID NO: 429107 - RNA, 32 nt, Human
gauccugggaggcagagguuguagugagccga

SEQ ID NO: 429108 - RNA, 32 nt, Human
gauccugggaguucgagaccagccugggcaac

SEQ ID NO: 429109 - RNA, 32 nt, Human
gauccugggcuugcggcugccagaccugugag

SEQ ID NO: 429110 - RNA, 32 nt, Human
gauccuggggcaggcaggaggcagugggcuuc

SEQ ID NO: 429111 - RNA, 32 nt, Human
gauccuggggguaugugcuggcuuccaaccug

SEQ ID NO: 429112 - RNA, 32 nt, Human
gauccuggguuucuagucauccuuuuuaagcu

SEQ ID NO: 429113 - RNA, 32 nt, Human
gauccuggucuuucagguccaucaggguccca

SEQ ID NO: 429114 - RNA, 32 nt, Human
gauccugguggaagcgagauucaggggacuca

SEQ ID NO: 429115 - RNA, 32 nt, Human
gauccugguggacggaucaggagaaugggcag

SEQ ID NO: 429116 - RNA, 32 nt, Human
gauccugguuuguacugcuguguggucuuaau

SEQ ID NO: 429117 - RNA, 32 nt, Human
gauccuguacaacccuuuguggacccuuuugg

SEQ ID NO: 429118 - RNA, 18 nt, Human
gauccugucaggcuguug

SEQ ID NO: 429119 - RNA, 32 nt, Human
gauccugucggcugggggcggcuggucuccuu

SEQ ID NO: 429120 - RNA, 32 nt, Human
gauccugugaauaaaauggcgcagacgugcuu

SEQ ID NO: 429121 - RNA, 32 nt, Human
gauccuguggcucucccguugcagaggccaca

SEQ ID NO: 429122 - RNA, 32 nt, Human
gauccuguuaauuaaaccacagacaccauaua

SEQ ID NO: 429123 - RNA, 32 nt, Human
gauccuuauuaucucuauguaaauaaaguuug

SEQ ID NO: 429124 - RNA, 32 nt, Human
gauccuucagcacagggauucucaagaccuga

SEQ ID NO: 429125 - RNA, 32 nt, Human
gauccuucaguucuggccauuccagggacccu

SEQ ID NO: 429126 - RNA, 32 nt, Human
gauccuuccaaaccagcaccaacagagccaag

SEQ ID NO: 429127 - RNA, 32 nt, Human
gauccuucccagcuggcauccccacccuaagc

SEQ ID NO: 429128 - RNA, 32 nt, Human
gauccuuccccaccaucuucagaucuguuccu

SEQ ID NO: 429129 - RNA, 32 nt, Human
gauccuuccugccucuuccagcucccaggggc

SEQ ID NO: 429130 - RNA, 32 nt, Human
gauccuucugcccaggaagccugcugcauccc

SEQ ID NO: 429131 - RNA, 32 nt, Human
gauccuugagcccaggagguugaggcugcagu

SEQ ID NO: 429132 - RNA, 31 nt, Human
gauccuugccucucugcccugcuucucgaca

SEQ ID NO: 429133 - RNA, 32 nt, Human
gauccuugcuaccccucuaccugcugcuguuc

SEQ ID NO: 429134 - RNA, 32 nt, Human
gauccuuggaggaggaggaagaggaggccacu

SEQ ID NO: 429135 - RNA, 32 nt, Human
gauccuuggcagcaugacuguaccaaaugucc

SEQ ID NO: 429136 - RNA, 29 nt, Human
gauccuuggcugcuucauugucuuccccc

SEQ ID NO: 429137 - RNA, 32 nt, Human
gauccuugucugccuucacuucccuaggcugg

SEQ ID NO: 429138 - RNA, 32 nt, Human
gauccuuguguucagcucuuuccaaauuaaaa

SEQ ID NO: 429139 - RNA, 31 nt, Human
gauccuuucaauaaacaagacuuguagaaaa

SEQ ID NO: 429140 - RNA, 32 nt, Human
gauccuuugaagcaugaguucuuaccagcaga

SEQ ID NO: 429141 - RNA, 32 nt, Human
gaucgaaccauuguacuccagccugggugaca

SEQ ID NO: 429142 - RNA, 32 nt, Human
gaucgaagcgccgccuccgccgccgagagguc

SEQ ID NO: 429143 - RNA, 32 nt, Human
gaucgacgugcugagacauucuucugauaaag

SEQ ID NO: 429144 - RNA, 32 nt, Human
gaucgagaccagccugaccaacauggugaaac

SEQ ID NO: 429145 - RNA, 32 nt, Human
gaucgagaccagccuggccaacauaguaaaac

SEQ ID NO: 429146 - RNA, 32 nt, Human
gaucgagaccagccuggccaacauggugaaac

SEQ ID NO: 429147 - RNA, 32 nt, Human
gaucgagaccagccuggccaacguggugaaac

SEQ ID NO: 429148 - RNA, 32 nt, Human
gaucgagaccaucuuggccaacauggugaaac

SEQ ID NO: 429149 - RNA, 32 nt, Human
gaucgagaccaucuuggcuaacaaggugaaac

SEQ ID NO: 429150 - RNA, 32 nt, Human
gaucgagaccaucuuggcuaacauggugaaac

SEQ ID NO: 429151 - RNA, 32 nt, Human
gaucgagaccaucuuggcuaauauggugaaac

SEQ ID NO: 429152 - RNA, 32 nt, Human
gaucgagaucagccuggccaacauggugaaac

SEQ ID NO: 429153 - RNA, 32 nt, Human
gaucgagccacugcacuccagccugggcaaca

SEQ ID NO: 429154 - RNA, 32 nt, Human
gaucgagccacugcacuccagccugggcagcu

SEQ ID NO: 429155 - RNA, 32 nt, Human
gaucgagccacugcacuccagccugggcgaca

SEQ ID NO: 429156 - RNA, 32 nt, Human
gaucgagccacugcacuccagccugggugaca

SEQ ID NO: 429157 - RNA, 32 nt, Human
gaucgagccacugcacuccagccugggugaug

SEQ ID NO: 429158 - RNA, 32 nt, Human
gaucgagccacugcacuccugggcaacagagc

SEQ ID NO: 429159 - RNA, 32 nt, Human
gaucgagccacugcauuccagccugggcgaaa

SEQ ID NO: 429160 - RNA, 32 nt, Human
gaucgagccauugcacuccagccuggacagca

SEQ ID NO: 429161 - RNA, 32 nt, Human
gaucgagccauugcacuccagccugggcaaca

SEQ ID NO: 429162 - RNA, 18 nt, Human
gaucgaggacuuccgggg

SEQ ID NO: 429163 - RNA, 32 nt, Human
gaucgaggagcagaagagacagcuggaggagc

SEQ ID NO: 429164 - RNA, 32 nt, Human
gaucgaggccaguagugugagccaagcgcagc

SEQ ID NO: 429165 - RNA, 32 nt, Human
gaucgaguaguaacagccacuccaacucucca

SEQ ID NO: 429166 - RNA, 32 nt, Human
gaucgaguccuggcuugggaaggaaggucuga

SEQ ID NO: 429167 - RNA, 32 nt, Human
gaucgagugucuugccccagaccggcagccug

SEQ ID NO: 429168 - RNA, 32 nt, Human
gaucgaguguucacccuucaccucagcucaac

SEQ ID NO: 429169 - RNA, 32 nt, Human
gaucgaguuacugcacuccagccugggugaca

SEQ ID NO: 429170 - RNA, 32 nt, Human
gaucgaugacaccaccagaguuacucacuuaa

SEQ ID NO: 429171 - RNA, 32 nt, Human
gaucgaugugcugcuguuaacccgugaggagg

SEQ ID NO: 429172 - RNA, 32 nt, Human
gaucgcaacacuacacuccagccugggcgaca

SEQ ID NO: 429173 - RNA, 32 nt, Human
gaucgcaacacugcacuccagccugggcgaca

SEQ ID NO: 429174 - RNA, 32 nt, Human
gaucgcaacacugcacuccagccugggugaca

SEQ ID NO: 429175 - RNA, 32 nt, Human
gaucgcaacacugcccuccagccugggcaaca

SEQ ID NO: 429176 - RNA, 32 nt, Human
gaucgcaacauugcacuccaggcugggcagca

SEQ ID NO: 429177 - RNA, 32 nt, Human
gaucgcaccacagcacuccagcccaggcggca

SEQ ID NO: 429178 - RNA, 32 nt, Human
gaucgcaccaccacacuccagccugggugaca

SEQ ID NO: 429179 - RNA, 32 nt, Human
gaucgcaccacggcacuccagccuggcgacag

SEQ ID NO: 429180 - RNA, 32 nt, Human
gaucgcaccacugaacuccagccugggcgaca

SEQ ID NO: 429181 - RNA, 32 nt, Human
gaucgcaccacugcacccaaaccuggggagag

SEQ ID NO: 429182 - RNA, 32 nt, Human
gaucgcaccacugcaccccagccugggcaaca

SEQ ID NO: 429183 - RNA, 32 nt, Human
gaucgcaccacugcaccccagcgugggcaaca

SEQ ID NO: 429184 - RNA, 32 nt, Human
gaucgcaccacugcacgcacuccagccugggu

SEQ ID NO: 429185 - RNA, 32 nt, Human
gaucgcaccacugcacuacagccugggcgaca

SEQ ID NO: 429186 - RNA, 32 nt, Human
gaucgcaccacugcacucaagccugggcgaca

SEQ ID NO: 429187 - RNA, 32 nt, Human
gaucgcaccacugcacuccaaccugggcaaca

SEQ ID NO: 429188 - RNA, 32 nt, Human
gaucgcaccacugcacuccaaccugggugacg

SEQ ID NO: 429189 - RNA, 32 nt, Human
gaucgcaccacugcacuccaaucugggcaaga

SEQ ID NO: 429190 - RNA, 32 nt, Human
gaucgcaccacugcacuccagcaugagugaca

SEQ ID NO: 429191 - RNA, 32 nt, Human
gaucgcaccacugcacuccagccuaggcgacg

SEQ ID NO: 429192 - RNA, 32 nt, Human
gaucgcaccacugcacuccagccuggaagacc

SEQ ID NO: 429193 - RNA, 32 nt, Human
gaucgcaccacugcacuccagccuggacaaca

SEQ ID NO: 429194 - RNA, 32 nt, Human
gaucgcaccacugcacuccagccugggagaca

SEQ ID NO: 429195 - RNA, 32 nt, Human
gaucgcaccacugcacuccagccugggagaua

SEQ ID NO: 429196 - RNA, 32 nt, Human
gaucgcaccacugcacuccagccugggcaaca

SEQ ID NO: 429197 - RNA, 32 nt, Human
gaucgcaccacugcacuccagccugggcgaaa

SEQ ID NO: 429198 - RNA, 32 nt, Human
gaucgcaccacugcacuccagccugggcgaca

SEQ ID NO: 429199 - RNA, 32 nt, Human
gaucgcaccacugcacuccagccugggcggca

SEQ ID NO: 429200 - RNA, 32 nt, Human
gaucgcaccacugcacuccagccugggcuaca

SEQ ID NO: 429201 - RNA, 32 nt, Human
gaucgcaccacugcacuccagccugggugaca

SEQ ID NO: 429202 - RNA, 32 nt, Human
gaucgcaccacugcacuccagccugggugaug

SEQ ID NO: 429203 - RNA, 32 nt, Human
gaucgcaccacugcacuccagccuggguuaca

SEQ ID NO: 429204 - RNA, 32 nt, Human
gaucgcaccacugcacuccagccuggucgaca

SEQ ID NO: 429205 - RNA, 32 nt, Human
gaucgcaccacugcacuccagccuggugacag

SEQ ID NO: 429206 - RNA, 32 nt, Human
gaucgcaccacugcacuccagccugguuacag

SEQ ID NO: 429207 - RNA, 32 nt, Human
gaucgcaccacugcacuccagcucgggugaca

SEQ ID NO: 429208 - RNA, 32 nt, Human
gaucgcaccacugcacuccagcuuggaggaaa

SEQ ID NO: 429209 - RNA, 32 nt, Human
gaucgcaccacugcacuccagcuugguucaug

SEQ ID NO: 429210 - RNA, 32 nt, Human
gaucgcaccacugcacuccagucuggcaacag

SEQ ID NO: 429211 - RNA, 32 nt, Human
gaucgcaccacugcacucccgcuuggcaauag

SEQ ID NO: 429212 - RNA, 32 nt, Human
gaucgcaccacugcacucuagccugggugaaa

SEQ ID NO: 429213 - RNA, 32 nt, Human
gaucgcaccacugcacucuagccugggugacc

SEQ ID NO: 429214 - RNA, 32 nt, Human
gaucgcaccacugcacucuagcuugggcaaca

SEQ ID NO: 429215 - RNA, 32 nt, Human
gaucgcaccacugcacugcagccuggcaacaa

SEQ ID NO: 429216 - RNA, 24 nt, Human
gaucgcaccacugcacuucagccu

SEQ ID NO: 429217 - RNA, 32 nt, Human
gaucgcaccacugcacuucagccugggugaca

SEQ ID NO: 429218 - RNA, 32 nt, Human
gaucgcaccacugcauucagccugagcaacag

SEQ ID NO: 429219 - RNA, 32 nt, Human
gaucgcaccacugcauuccagccuaagcaaua

SEQ ID NO: 429220 - RNA, 32 nt, Human
gaucgcaccacugcauuccagccugggcaaca

SEQ ID NO: 429221 - RNA, 32 nt, Human
gaucgcaccacugcauuccagccugggugaca

SEQ ID NO: 429222 - RNA, 32 nt, Human
gaucgcaccacugcauucuagccuuagugaua

SEQ ID NO: 429223 - RNA, 32 nt, Human
gaucgcaccacugcauugcagccuggugacag

SEQ ID NO: 429224 - RNA, 32 nt, Human
gaucgcaccacugcccuccagccuaggugaca

SEQ ID NO: 429225 - RNA, 32 nt, Human
gaucgcaccacugcucuccagccuggcgacag

SEQ ID NO: 429226 - RNA, 32 nt, Human
gaucgcaccacuguacuccagccugggcaaca

SEQ ID NO: 429227 - RNA, 32 nt, Human
gaucgcaccacuguacuccagccugggcgacg

SEQ ID NO: 429228 - RNA, 32 nt, Human
gaucgcaccacuguacuccagccugggugaca

SEQ ID NO: 429229 - RNA, 32 nt, Human
gaucgcaccacuguacuccagccugggugacu

SEQ ID NO: 429230 - RNA, 32 nt, Human
gaucgcaccacuguauccagcucgggcaacaa

SEQ ID NO: 429231 - RNA, 32 nt, Human
gaucgcaccacuguauuccagccuggaugaca

SEQ ID NO: 429232 - RNA, 32 nt, Human
gaucgcaccauuacacuccagccugggcaaca

SEQ ID NO: 429233 - RNA, 32 nt, Human
gaucgcaccauugcacuccagcccgggcaaca

SEQ ID NO: 429234 - RNA, 32 nt, Human
gaucgcaccauugcacuccagccuaggcaaaa

SEQ ID NO: 429235 - RNA, 32 nt, Human
gaucgcaccauugcacuccagccugagugaca

SEQ ID NO: 429236 - RNA, 32 nt, Human
gaucgcaccauugcacuccagccuggaugaua

SEQ ID NO: 429237 - RNA, 32 nt, Human
gaucgcaccauugcacuccagccuggcgaccg

SEQ ID NO: 429238 - RNA, 32 nt, Human
gaucgcaccauugcacuccagccugggcaaca

SEQ ID NO: 429239 - RNA, 32 nt, Human
gaucgcaccauugcacuccagccugggcaacg

SEQ ID NO: 429240 - RNA, 32 nt, Human
gaucgcaccauugcacuccagccugugcaaca

SEQ ID NO: 429241 - RNA, 32 nt, Human
gaucgcaccauugcacuccagcugggagacac

SEQ ID NO: 429242 - RNA, 32 nt, Human
gaucgcaccauugcacuccugccugggcaaca

SEQ ID NO: 429243 - RNA, 32 nt, Human
gaucgcaccauugcacucuagccugggcaacg

SEQ ID NO: 429244 - RNA, 32 nt, Human
gaucgcaccauugcacuucagccugggcaaca

SEQ ID NO: 429245 - RNA, 32 nt, Human
gaucgcaccauugcauuccagccugggcaaca

SEQ ID NO: 429246 - RNA, 32 nt, Human
gaucgcaccauugcccuccagccugggcaaca

SEQ ID NO: 429247 - RNA, 32 nt, Human
gaucgcaccauuguacuccagccugggcaaca

SEQ ID NO: 429248 - RNA, 32 nt, Human
gaucgcaccccugcacuccagccugggcaaca

SEQ ID NO: 429249 - RNA, 32 nt, Human
gaucgcacccuuacacuucagccugggcgacc

SEQ ID NO: 429250 - RNA, 32 nt, Human
gaucgcacccuuacacuuuagccugggcgacc

SEQ ID NO: 429251 - RNA, 32 nt, Human
gaucgcaccgcugcacuccagccugggcaaca

SEQ ID NO: 429252 - RNA, 32 nt, Human
gaucgcaccgcugcacuccagccugggcaaga

SEQ ID NO: 429253 - RNA, 32 nt, Human
gaucgcaccgcugcacuccagccugggugaca

SEQ ID NO: 429254 - RNA, 32 nt, Human
gaucgcaccgcugcccuccagccugggcaaca

SEQ ID NO: 429255 - RNA, 32 nt, Human
gaucgcaccuguaaucccagucacugggaagc

SEQ ID NO: 429256 - RNA, 32 nt, Human
gaucgcacuacugcacuccagccugggugaca

SEQ ID NO: 429257 - RNA, 32 nt, Human
gaucgcacuauugcacucaagccugggcgaca

SEQ ID NO: 429258 - RNA, 32 nt, Human
gaucgcacuugaggcuggaggcaugaguccug

SEQ ID NO: 429259 - RNA, 32 nt, Human
gaucgcagcacuguacuccagccugggcgaug

SEQ ID NO: 429260 - RNA, 22 nt, Human
gaucgcagccagcccuucgccu

SEQ ID NO: 429261 - RNA, 32 nt, Human
gaucgcagcuacucgggagguggagguugcag

SEQ ID NO: 429262 - RNA, 27 nt, Human
gaucgcagcucacugcaaucucugccu

SEQ ID NO: 429263 - RNA, 32 nt, Human
gaucgcagcucacugcaaucucugccuccugg

SEQ ID NO: 429264 - RNA, 32 nt, Human
gaucgcaucacugcaguccagccuggaugaca

SEQ ID NO: 429265 - RNA, 32 nt, Human
gaucgcaucauugcacucuagccugggccaca

SEQ ID NO: 429266 - RNA, 32 nt, Human
gaucgcaugcuacugcacuccagccugggaga

SEQ ID NO: 429267 - RNA, 32 nt, Human
gaucgcauuacugcacuccagccuggguaaca

SEQ ID NO: 429268 - RNA, 32 nt, Human
gaucgccaccccgcacagccuggguagcgugu

SEQ ID NO: 429269 - RNA, 32 nt, Human
gaucgccacugcacuccagccugggaaauaga

SEQ ID NO: 429270 - RNA, 32 nt, Human
gaucgccagaacuuaggacacaugggauggag

SEQ ID NO: 429271 - RNA, 32 nt, Human
gaucgcccacugcacuccagguugggcuacag

SEQ ID NO: 429272 - RNA, 32 nt, Human
gaucgccccacuacacuccagccuggucaaca

SEQ ID NO: 429273 - RNA, 32 nt, Human
gaucgccccacugcacuccagccuggcaauag

SEQ ID NO: 429274 - RNA, 32 nt, Human
gaucgccccacugcacuccagccugggcgaca

SEQ ID NO: 429275 - RNA, 32 nt, Human
gaucgccccacugcacuccagccuggugacuc

SEQ ID NO: 429276 - RNA, 32 nt, Human
gaucgccccauuguacuccagccuggggaaca

SEQ ID NO: 429277 - RNA, 32 nt, Human
gaucgcccgccccagcccggggccgcucaggu

SEQ ID NO: 429278 - RNA, 32 nt, Human
gaucgcccugcugcacuccagccugggcaaca

SEQ ID NO: 429279 - RNA, 32 nt, Human
gaucgcccugcugcacuccagccugggugaca

SEQ ID NO: 429280 - RNA, 32 nt, Human
gaucgccggcuguuuggcauguucccaccggg

SEQ ID NO: 429281 - RNA, 32 nt, Human
gaucgccggggagggggaccagagagccgcgc

SEQ ID NO: 429282 - RNA, 32 nt, Human
gaucgcgacacugcacuccagccugggcaaca

SEQ ID NO: 429283 - RNA, 32 nt, Human
gaucgcgacacugcacuccagccugggugacg

SEQ ID NO: 429284 - RNA, 32 nt, Human
gaucgcgacacugcgcuccagccugggcaaca

SEQ ID NO: 429285 - RNA, 32 nt, Human
gaucgcgcaauugcgcuccagccugggcgaca

SEQ ID NO: 429286 - RNA, 32 nt, Human
gaucgcgcagcugcacuccagccugggcaaca

SEQ ID NO: 429287 - RNA, 32 nt, Human
gaucgcgccaaugcacuccagccugggcgaca

SEQ ID NO: 429288 - RNA, 32 nt, Human
gaucgcgccacccacuccagcccgggugacag

SEQ ID NO: 429289 - RNA, 32 nt, Human
gaucgcgccaccgcauuccagccugggcgaca

SEQ ID NO: 429290 - RNA, 32 nt, Human
gaucgcgccaccgcccuccagccugggcgaca

SEQ ID NO: 429291 - RNA, 32 nt, Human
gaucgcgccacggcacuccagccugggagaca

SEQ ID NO: 429292 - RNA, 32 nt, Human
gaucgcgccacuacacuccagccugagcaaca

SEQ ID NO: 429293 - RNA, 32 nt, Human
gaucgcgccacuacuccagccugggugacaaa

SEQ ID NO: 429294 - RNA, 32 nt, Human
gaucgcgccacuauacuccagccugggcaaca

SEQ ID NO: 429295 - RNA, 32 nt, Human
gaucgcgccacugcaacccagccugggugaca

SEQ ID NO: 429296 - RNA, 32 nt, Human
gaucgcgccacugcacagccagggcgacggug

SEQ ID NO: 429297 - RNA, 32 nt, Human
gaucgcgccacugcacucaagccugggcaaca

SEQ ID NO: 429298 - RNA, 32 nt, Human
gaucgcgccacugcacuccaaccugggugaca

SEQ ID NO: 429299 - RNA, 32 nt, Human
gaucgcgccacugcacuccacccuggguaacg

SEQ ID NO: 429300 - RNA, 32 nt, Human
gaucgcgccacugcacuccagcagucugggcg

SEQ ID NO: 429301 - RNA, 32 nt, Human
gaucgcgccacugcacuccagcccgggugaca

SEQ ID NO: 429302 - RNA, 32 nt, Human
gaucgcgccacugcacuccagccuagacgaca

SEQ ID NO: 429303 - RNA, 32 nt, Human
gaucgcgccacugcacuccagccuaggggaca

SEQ ID NO: 429304 - RNA, 32 nt, Human
gaucgcgccacugcacuccagccuaggugaca

SEQ ID NO: 429305 - RNA, 32 nt, Human
gaucgcgccacugcacuccagccucagcaaua

SEQ ID NO: 429306 - RNA, 32 nt, Human
gaucgcgccacugcacuccagccucggcaaca

SEQ ID NO: 429307 - RNA, 32 nt, Human
gaucgcgccacugcacuccagccucggugaca

SEQ ID NO: 429308 - RNA, 32 nt, Human
gaucgcgccacugcacuccagccuggacgaca

SEQ ID NO: 429309 - RNA, 32 nt, Human
gaucgcgccacugcacuccagccuggcaacag

SEQ ID NO: 429310 - RNA, 32 nt, Human
gaucgcgccacugcacuccagccuggcgacaa

SEQ ID NO: 429311 - RNA, 32 nt, Human
gaucgcgccacugcacuccagccuggcgacag

SEQ ID NO: 429312 - RNA, 32 nt, Human
gaucgcgccacugcacuccagccugggcaaca

SEQ ID NO: 429313 - RNA, 32 nt, Human
gaucgcgccacugcacuccagccugggcgaca

SEQ ID NO: 429314 - RNA, 32 nt, Human
gaucgcgccacugcacuccagccugggcgacg

SEQ ID NO: 429315 - RNA, 32 nt, Human
gaucgcgccacugcacuccagccugggcgaga

SEQ ID NO: 429316 - RNA, 32 nt, Human
gaucgcgccacugcacuccagccugggcgaua

SEQ ID NO: 429317 - RNA, 32 nt, Human
gaucgcgccacugcacuccagccuggguaaca

SEQ ID NO: 429318 - RNA, 32 nt, Human
gaucgcgccacugcacuccagccugggugaca

SEQ ID NO: 429319 - RNA, 32 nt, Human
gaucgcgccacugcacuccagccugggugaua

SEQ ID NO: 429320 - RNA, 32 nt, Human
gaucgcgccacugcacuccagccuggugacag

SEQ ID NO: 429321 - RNA, 32 nt, Human
gaucgcgccacugcacuccagcuugggcaaca

SEQ ID NO: 429322 - RNA, 32 nt, Human
gaucgcgccacugcacuccaggccugggugac

SEQ ID NO: 429323 - RNA, 32 nt, Human
gaucgcgccacugcacuccaggcugggcaacg

SEQ ID NO: 429324 - RNA, 32 nt, Human
gaucgcgccacugcacuccaggcugggcgaca

SEQ ID NO: 429325 - RNA, 32 nt, Human
gaucgcgccacugcacuccagucugggcaaca

SEQ ID NO: 429326 - RNA, 32 nt, Human
gaucgcgccacugcacuccaguuugggcaaca

SEQ ID NO: 429327 - RNA, 32 nt, Human
gaucgcgccacugcacuccggccugaugacag

SEQ ID NO: 429328 - RNA, 32 nt, Human
gaucgcgccacugcacuccugccugggacaca

SEQ ID NO: 429329 - RNA, 32 nt, Human
gaucgcgccacugcacuccugccugggcaacu

SEQ ID NO: 429330 - RNA, 32 nt, Human
gaucgcgccacugcacucuagccggagugaca

SEQ ID NO: 429331 - RNA, 32 nt, Human
gaucgcgccacugcacucuagccugagugaca

SEQ ID NO: 429332 - RNA, 32 nt, Human
gaucgcgccacugcacucuagccugggccaua

SEQ ID NO: 429333 - RNA, 32 nt, Human
gaucgcgccacugcacucuagccugggugaca

SEQ ID NO: 429334 - RNA, 24 nt, Human
gaucgcgccacugcacuuccgccu

SEQ ID NO: 429335 - RNA, 32 nt, Human
gaucgcgccacugcaguccagccugggcaaca

SEQ ID NO: 429336 - RNA, 32 nt, Human
gaucgcgccacugcauuccagccuggacgaca

SEQ ID NO: 429337 - RNA, 32 nt, Human
gaucgcgccacugcccuccagccugggcgaca

SEQ ID NO: 429338 - RNA, 32 nt, Human
gaucgcgccacugcgcuucagccugggagaca

SEQ ID NO: 429339 - RNA, 32 nt, Human
gaucgcgccacugcucuccagccuggguggca

SEQ ID NO: 429340 - RNA, 32 nt, Human
gaucgcgccacuggacuccagccuggacaaca

SEQ ID NO: 429341 - RNA, 32 nt, Human
gaucgcgccacugggcuccagccugggcgaca

SEQ ID NO: 429342 - RNA, 32 nt, Human
gaucgcgccacuguacuccagccuggacaaca

SEQ ID NO: 429343 - RNA, 32 nt, Human
gaucgcgccacuguacuccagccugggcaaca

SEQ ID NO: 429344 - RNA, 32 nt, Human
gaucgcgccacuguacuccagccugggugaca

SEQ ID NO: 429345 - RNA, 32 nt, Human
gaucgcgccacugugcuccagccugggcaaca

SEQ ID NO: 429346 - RNA, 32 nt, Human
gaucgcgccaguacacuccagccuggguaaca

SEQ ID NO: 429347 - RNA, 32 nt, Human
gaucgcgccagugcacuccagccugggcaaga

SEQ ID NO: 429348 - RNA, 32 nt, Human
gaucgcgccaucacacuccagccuaggcgaca

SEQ ID NO: 429349 - RNA, 32 nt, Human
gaucgcgccaucgcacuccagccugggcaaca

SEQ ID NO: 429350 - RNA, 32 nt, Human
gaucgcgccaucgcacuccagccugggugaca

SEQ ID NO: 429351 - RNA, 32 nt, Human
gaucgcgccauuacacuucagccugggcaaca

SEQ ID NO: 429352 - RNA, 32 nt, Human
gaucgcgccauucuacuccagccugggccaca

SEQ ID NO: 429353 - RNA, 32 nt, Human
gaucgcgccauugcacuccaaccuaggugaca

SEQ ID NO: 429354 - RNA, 32 nt, Human
gaucgcgccauugcacuccaaccuggacgaca

SEQ ID NO: 429355 - RNA, 32 nt, Human
gaucgcgccauugcacuccagccuggacaaca

SEQ ID NO: 429356 - RNA, 32 nt, Human
gaucgcgccauugcacuccagccuggccuaua

SEQ ID NO: 429357 - RNA, 32 nt, Human
gaucgcgccauugcacuccagccuggcugaca

SEQ ID NO: 429358 - RNA, 32 nt, Human
gaucgcgccauugcacuccagccugggcaaca

SEQ ID NO: 429359 - RNA, 32 nt, Human
gaucgcgccauugcacuccagccugggcaacg

SEQ ID NO: 429360 - RNA, 32 nt, Human
gaucgcgccauugcacuccagccugggcaacu

SEQ ID NO: 429361 - RNA, 32 nt, Human
gaucgcgccauugcacuccagccugggcgaca

SEQ ID NO: 429362 - RNA, 32 nt, Human
gaucgcgccauugcacuccagccugggcggca

SEQ ID NO: 429363 - RNA, 32 nt, Human
gaucgcgccauugcacuccagccugggggaca

SEQ ID NO: 429364 - RNA, 32 nt, Human
gaucgcgccauugcacuccagccuggguaaca

SEQ ID NO: 429365 - RNA, 32 nt, Human
gaucgcgccauugcacuccagccugggugaca

SEQ ID NO: 429366 - RNA, 32 nt, Human
gaucgcgccauugcacuccauccuggacaaca

SEQ ID NO: 429367 - RNA, 32 nt, Human
gaucgcgccauugcacucccgccugggcgacu

SEQ ID NO: 429368 - RNA, 32 nt, Human
gaucgcgccauugcacuccggccuggggacaa

SEQ ID NO: 429369 - RNA, 32 nt, Human
gaucgcgccauugcacucuagccugggcaaca

SEQ ID NO: 429370 - RNA, 32 nt, Human
gaucgcgccauuguacuccagccugggcgaug

SEQ ID NO: 429371 - RNA, 32 nt, Human
gaucgcgccccugcacuccagccugggugaca

SEQ ID NO: 429372 - RNA, 32 nt, Human
gaucgcgccgcugcacuccagccugggccaca

SEQ ID NO: 429373 - RNA, 32 nt, Human
gaucgcgccgcugcacuccagccugggcgaca

SEQ ID NO: 429374 - RNA, 32 nt, Human
gaucgcgccgcugcacuccagccugggcggca

SEQ ID NO: 429375 - RNA, 32 nt, Human
gaucgcgccgcugcacuccagccugggugaca

SEQ ID NO: 429376 - RNA, 32 nt, Human
gaucgcgccgcugcauuccagccugggugaca

SEQ ID NO: 429377 - RNA, 32 nt, Human
gaucgcgccguugcacuccagccugggcaaca

SEQ ID NO: 429378 - RNA, 32 nt, Human
gaucgcgccuuugcacuccagccuggaagaca

SEQ ID NO: 429379 - RNA, 32 nt, Human
gaucgcgcuacugcacuccagccugggcgaca

SEQ ID NO: 429380 - RNA, 32 nt, Human
gaucgcgcuacugcacuccagccugggugaca

SEQ ID NO: 429381 - RNA, 32 nt, Human
gaucgcgcuacugcauuccagccugggcgccg

SEQ ID NO: 429382 - RNA, 32 nt, Human
gaucgcgcuauugcacuccagccugggugaca

SEQ ID NO: 429383 - RNA, 32 nt, Human
gaucgcgcugcugcacuccagccugggugaca

SEQ ID NO: 429384 - RNA, 24 nt, Human
gaucgcggcauugcacuucagccu

SEQ ID NO: 429385 - RNA, 32 nt, Human
gaucgcggcauugcacuucagccugggcgaua

SEQ ID NO: 429386 - RNA, 32 nt, Human
gaucgcggcgcugcacucuagccugggugaca

SEQ ID NO: 429387 - RNA, 32 nt, Human
gaucgcggcggccccgggcucugggugcggag

SEQ ID NO: 429388 - RNA, 32 nt, Human
gaucgcggcucacugcagccuccauccucugg

SEQ ID NO: 429389 - RNA, 32 nt, Human
gaucgcgucacugcacuccagccuggacaaca

SEQ ID NO: 429390 - RNA, 32 nt, Human
gaucgcgucacugcacuccagccugggagaca

SEQ ID NO: 429391 - RNA, 32 nt, Human
gaucgcgucacugcacuccagccugggcgaca

SEQ ID NO: 429392 - RNA, 32 nt, Human
gaucgcgucacugcacuccagcgugggcgaca

SEQ ID NO: 429393 - RNA, 32 nt, Human
gaucgcgucaguacacuccagccugggcaaca

SEQ ID NO: 429394 - RNA, 32 nt, Human
gaucgcgucauugcacuccagccugggcaaca

SEQ ID NO: 429395 - RNA, 32 nt, Human
gaucgcgucgcuggacuccagcccgggcgaca

SEQ ID NO: 429396 - RNA, 32 nt, Human
gaucgcuacuauucaggacuaaucuauacuua

SEQ ID NO: 429397 - RNA, 32 nt, Human
gaucgcucauucuucuuuuaugauucauacgu

SEQ ID NO: 429398 - RNA, 32 nt, Human
gaucgcucauucuucuuuuauuauucauacgu

SEQ ID NO: 429399 - RNA, 32 nt, Human
gaucgcuccacugcacuccagcccaggugaca

SEQ ID NO: 429400 - RNA, 32 nt, Human
gaucgcuccacugcacuccagccugggugaca

SEQ ID NO: 429401 - RNA, 32 nt, Human
gaucgcuccauugcacuccagccugggugaca

SEQ ID NO: 429402 - RNA, 32 nt, Human
gaucgcucccacugcacuccagccugggcgac

SEQ ID NO: 429403 - RNA, 32 nt, Human
gaucgcugacucugcucuguuucauauuucag

SEQ ID NO: 429404 - RNA, 32 nt, Human
gaucgcugcacuccagccugggcgacaagagc

SEQ ID NO: 429405 - RNA, 32 nt, Human
gaucgcugcucaccgcaaccuccgccuuccag

SEQ ID NO: 429406 - RNA, 32 nt, Human
gaucgcugggcugggcuaacggcgacggagag

SEQ ID NO: 429407 - RNA, 31 nt, Human
gaucgcuguuccaaggaggcugagaacaagu

SEQ ID NO: 429408 - RNA, 32 nt, Human
gaucgcuugaacccgggaggcagcaguugcag

SEQ ID NO: 429409 - RNA, 32 nt, Human
gaucgcuugagaccagccuggggaacauagug

SEQ ID NO: 429410 - RNA, 31 nt, Human
gaucgcuugaggcaaggaguuggagacaugc

SEQ ID NO: 429411 - RNA, 32 nt, Human
gaucgcuugagugcaagaguucaagaucagac

SEQ ID NO: 429412 - RNA, 17 nt, Human
gaucggaagguggugaa

SEQ ID NO: 429413 - RNA, 32 nt, Human
gaucggaggugccaaguagcagagaaagcauc

SEQ ID NO: 429414 - RNA, 32 nt, Human
gaucggauuugcuuuucucuucugccucggau

SEQ ID NO: 429415 - RNA, 32 nt, Human
gaucggcauggugaaaccccguuucuacuaaa

SEQ ID NO: 429416 - RNA, 32 nt, Human
gaucggccacugcacuccgggcugggcgacag

SEQ ID NO: 429417 - RNA, 32 nt, Human
gaucggccaugcuccgccccagaggcagaauu

SEQ ID NO: 429418 - RNA, 32 nt, Human
gaucggcccuggcaaguaggugacccugacuu

SEQ ID NO: 429419 - RNA, 32 nt, Human
gaucgggaacuccugcuucuccuugccucgaa

SEQ ID NO: 429420 - RNA, 32 nt, Human
gaucgggagcuccagccuucaccagaagcuga

SEQ ID NO: 429421 - RNA, 32 nt, Human
gaucgggauuacaggcaagagccuccacgccc

SEQ ID NO: 429422 - RNA, 32 nt, Human
gaucgggccacggcacuccagccugggugaca

SEQ ID NO: 429423 - RNA, 32 nt, Human
gaucgggccacugcacuccagcuugggugaca

SEQ ID NO: 429424 - RNA, 32 nt, Human
gaucgggccgcugcacuccagccugggggaca

SEQ ID NO: 429425 - RNA, 32 nt, Human
gaucggggauucaggaaggagcccaggagcag

SEQ ID NO: 429426 - RNA, 32 nt, Human
gaucggggguuggagugcgggugggcuccugg

SEQ ID NO: 429427 - RNA, 32 nt, Human
gaucgggucucccuccugugcacccucagguc

SEQ ID NO: 429428 - RNA, 32 nt, Human
gaucggucauuggggugcugcagccccgccac

SEQ ID NO: 429429 - RNA, 32 nt, Human
gaucgguuccuucacuucuucaugccacaagu

SEQ ID NO: 429430 - RNA, 32 nt, Human
gaucguaccacuacacuccagccugggcaacg

SEQ ID NO: 429431 - RNA, 32 nt, Human
gaucguaccacugcacuccagccuaggugaca

SEQ ID NO: 429432 - RNA, 32 nt, Human
gaucguaccacugcacuccagccugggcgaca

SEQ ID NO: 429433 - RNA, 32 nt, Human
gaucguaccacugcacuccagccugggcuaca

SEQ ID NO: 429434 - RNA, 32 nt, Human
gaucguaccacugcacuccagccugggugaca

SEQ ID NO: 429435 - RNA, 32 nt, Human
gaucguaccacugcacuccagucugggcgaca

SEQ ID NO: 429436 - RNA, 32 nt, Human
gaucguaccacugcacucuggccugggcaaca

SEQ ID NO: 429437 - RNA, 32 nt, Human
gaucguaccauugcacuccagccugggcaaca

SEQ ID NO: 429438 - RNA, 32 nt, Human
gaucguaccgcugcacuccagccugggugaua

SEQ ID NO: 429439 - RNA, 32 nt, Human
gaucguaccuauugcacuccauccuggaugaa

SEQ ID NO: 429440 - RNA, 32 nt, Human
gaucguacuacugcacuccagcauggaagaca

SEQ ID NO: 429441 - RNA, 32 nt, Human
gaucguagaguggcacaugcuuacagggcauu

SEQ ID NO: 429442 - RNA, 32 nt, Human
gaucguagcacugcaguccagccugggcgaca

SEQ ID NO: 429443 - RNA, 32 nt, Human
gaucgucccacugcacuccagcccgggcaaca

SEQ ID NO: 429444 - RNA, 32 nt, Human
gaucgucccacugcacuccagccugggcaaca

SEQ ID NO: 429445 - RNA, 32 nt, Human
gaucguccuggcccccagcccuaagggauccg

SEQ ID NO: 429446 - RNA, 32 nt, Human
gaucgucugggagcccagugucaagucugcug

SEQ ID NO: 429447 - RNA, 32 nt, Human
gaucgugaagucaggagaucgagaccauccug

SEQ ID NO: 429448 - RNA, 32 nt, Human
gaucgugaauguuuaucuugggacugucuugc

SEQ ID NO: 429449 - RNA, 32 nt, Human
gaucgugacacugcacuccagccugggcgaca

SEQ ID NO: 429450 - RNA, 32 nt, Human
gaucgugacaggccccucccuaugugcaggag

SEQ ID NO: 429451 - RNA, 32 nt, Human
gaucgugacauggccuccagccugggugaccg

SEQ ID NO: 429452 - RNA, 25 nt, Human
gaucgugacccugcuauuuucuccu

SEQ ID NO: 429453 - RNA, 32 nt, Human
gaucgugaggcugcggcaggagaggggccgcc

SEQ ID NO: 429454 - RNA, 32 nt, Human
gaucgugcaacugcacuccaaccugggcaaca

SEQ ID NO: 429455 - RNA, 32 nt, Human
gaucgugcaacugcacuccagccugggcaaaa

SEQ ID NO: 429456 - RNA, 32 nt, Human
gaucgugcagcugcugggcacgcccagugaga

SEQ ID NO: 429457 - RNA, 32 nt, Human
gaucgugccaaugcacuccauccugggcaaaa

SEQ ID NO: 429458 - RNA, 32 nt, Human
gaucgugccaccuacacuccagccugggugac

SEQ ID NO: 429459 - RNA, 32 nt, Human
gaucgugccacuacacuccagccugggcaaaa

SEQ ID NO: 429460 - RNA, 32 nt, Human
gaucgugccacuacacuccagccugggggaca

SEQ ID NO: 429461 - RNA, 32 nt, Human
gaucgugccacuacacuccagccugggugaca

SEQ ID NO: 429462 - RNA, 32 nt, Human
gaucgugccacugaccuccagccugggggaca

SEQ ID NO: 429463 - RNA, 32 nt, Human
gaucgugccacugcaccacuccagccugggca

SEQ ID NO: 429464 - RNA, 32 nt, Human
gaucgugccacugcaccccagccugggcaaca

SEQ ID NO: 429465 - RNA, 32 nt, Human
gaucgugccacugcaccguagccugggugaua

SEQ ID NO: 429466 - RNA, 32 nt, Human
gaucgugccacugcacgccagccugggcaaca

SEQ ID NO: 429467 - RNA, 32 nt, Human
gaucgugccacugcacuacaaccugggugaua

SEQ ID NO: 429468 - RNA, 32 nt, Human
gaucgugccacugcacucaagccugggugaca

SEQ ID NO: 429469 - RNA, 32 nt, Human
gaucgugccacugcacucaagccuggugacag

SEQ ID NO: 429470 - RNA, 32 nt, Human
gaucgugccacugcacuccaaccugggugaga

SEQ ID NO: 429471 - RNA, 32 nt, Human
gaucgugccacugcacuccagacugggggaga

SEQ ID NO: 429472 - RNA, 32 nt, Human
gaucgugccacugcacuccagacuuggugaca

SEQ ID NO: 429473 - RNA, 32 nt, Human
gaucgugccacugcacuccagagccugggcga

SEQ ID NO: 429474 - RNA, 32 nt, Human
gaucgugccacugcacuccagcccaggcaaca

SEQ ID NO: 429475 - RNA, 32 nt, Human
gaucgugccacugcacuccagccugaagacag

SEQ ID NO: 429476 - RNA, 32 nt, Human
gaucgugccacugcacuccagccugagcaaca

SEQ ID NO: 429477 - RNA, 32 nt, Human
gaucgugccacugcacuccagccugcgggaca

SEQ ID NO: 429478 - RNA, 32 nt, Human
gaucgugccacugcacuccagccuggacaacg

SEQ ID NO: 429479 - RNA, 32 nt, Human
gaucgugccacugcacuccagccuggauuaca

SEQ ID NO: 429480 - RNA, 32 nt, Human
gaucgugccacugcacuccagccuggcgacac

SEQ ID NO: 429481 - RNA, 32 nt, Human
gaucgugccacugcacuccagccugggagaca

SEQ ID NO: 429482 - RNA, 32 nt, Human
gaucgugccacugcacuccagccugggcaaca

SEQ ID NO: 429483 - RNA, 32 nt, Human
gaucgugccacugcacuccagccugggcacca

SEQ ID NO: 429484 - RNA, 32 nt, Human
gaucgugccacugcacuccagccugggccaca

SEQ ID NO: 429485 - RNA, 32 nt, Human
gaucgugccacugcacuccagccugggcgaca

SEQ ID NO: 429486 - RNA, 32 nt, Human
gaucgugccacugcacuccagccugggcgacg

SEQ ID NO: 429487 - RNA, 32 nt, Human
gaucgugccacugcacuccagccugggcuaca

SEQ ID NO: 429488 - RNA, 32 nt, Human
gaucgugccacugcacuccagccuggggaaca

SEQ ID NO: 429489 - RNA, 32 nt, Human
gaucgugccacugcacuccagccugggggaca

SEQ ID NO: 429490 - RNA, 32 nt, Human
gaucgugccacugcacuccagccugggugaca

SEQ ID NO: 429491 - RNA, 32 nt, Human
gaucgugccacugcacuccagccugggugaua

SEQ ID NO: 429492 - RNA, 32 nt, Human
gaucgugccacugcacuccagccuggguggac

SEQ ID NO: 429493 - RNA, 32 nt, Human
gaucgugccacugcacuccagccuggucaaca

SEQ ID NO: 429494 - RNA, 32 nt, Human
gaucgugccacugcacuccagccuggugacag

SEQ ID NO: 429495 - RNA, 32 nt, Human
gaucgugccacugcacuccagccuggugagag

SEQ ID NO: 429496 - RNA, 32 nt, Human
gaucgugccacugcacuccagccugguugaca

SEQ ID NO: 429497 - RNA, 32 nt, Human
gaucgugccacugcacuccagcuugggcaaca

SEQ ID NO: 429498 - RNA, 32 nt, Human
gaucgugccacugcacuccaggcugggcgaca

SEQ ID NO: 429499 - RNA, 32 nt, Human
gaucgugccacugcacuccaggcugggugaca

SEQ ID NO: 429500 - RNA, 32 nt, Human
gaucgugccacugcacuccagucugggcaaca

SEQ ID NO: 429501 - RNA, 32 nt, Human
gaucgugccacugcacuccagucugggugaca

SEQ ID NO: 429502 - RNA, 32 nt, Human
gaucgugccacugcacuccauccuggacgaca

SEQ ID NO: 429503 - RNA, 32 nt, Human
gaucgugccacugcacucccagccugggcaac

SEQ ID NO: 429504 - RNA, 32 nt, Human
gaucgugccacugcacuccggccugggugaug

SEQ ID NO: 429505 - RNA, 32 nt, Human
gaucgugccacugcacucuagccggggcgaca

SEQ ID NO: 429506 - RNA, 32 nt, Human
gaucgugccacugcacucuagccugggcgaca

SEQ ID NO: 429507 - RNA, 32 nt, Human
gaucgugccacugcacucuagccugggugaca

SEQ ID NO: 429508 - RNA, 32 nt, Human
gaucgugccacugcacucuauccuggguaaca

SEQ ID NO: 429509 - RNA, 24 nt, Human
gaucgugccacugcacuucagccu

SEQ ID NO: 429510 - RNA, 32 nt, Human
gaucgugccacugcacuucagccugggugaca

SEQ ID NO: 429511 - RNA, 32 nt, Human
gaucgugccacugcauuccagccugggagaga

SEQ ID NO: 429512 - RNA, 32 nt, Human
gaucgugccacugcauuccagccugggcgaca

SEQ ID NO: 429513 - RNA, 32 nt, Human
gaucgugccacugcauuccagccugguugaca

SEQ ID NO: 429514 - RNA, 32 nt, Human
gaucgugccacugcgcuccagccugggugaca

SEQ ID NO: 429515 - RNA, 32 nt, Human
gaucgugccacugcgcuccagccuggguggca

SEQ ID NO: 429516 - RNA, 32 nt, Human
gaucgugccacugcucuccagccugggugaca

SEQ ID NO: 429517 - RNA, 32 nt, Human
gaucgugccacuucacuccagccugggcaaaa

SEQ ID NO: 429518 - RNA, 32 nt, Human
gaucgugccagcccgggggaaaaggcugaguc

SEQ ID NO: 429519 - RNA, 32 nt, Human
gaucgugccagugcacuccagccugggugaca

SEQ ID NO: 429520 - RNA, 32 nt, Human
gaucgugccauuacacuccagccugggcgaaa

SEQ ID NO: 429521 - RNA, 32 nt, Human
gaucgugccauuccacuccagccugggcaacg

SEQ ID NO: 429522 - RNA, 32 nt, Human
gaucgugccauugcacuacagccugggcaaca

SEQ ID NO: 429523 - RNA, 32 nt, Human
gaucgugccauugcacuccagcccaggcgaca

SEQ ID NO: 429524 - RNA, 32 nt, Human
gaucgugccauugcacuccagccuaggcaaca

SEQ ID NO: 429525 - RNA, 32 nt, Human
gaucgugccauugcacuccagccuaggcaaga

SEQ ID NO: 429526 - RNA, 32 nt, Human
gaucgugccauugcacuccagccuaggcaaua

SEQ ID NO: 429527 - RNA, 32 nt, Human
gaucgugccauugcacuccagccuggaugaca

SEQ ID NO: 429528 - RNA, 32 nt, Human
gaucgugccauugcacuccagccuggccacag

SEQ ID NO: 429529 - RNA, 32 nt, Human
gaucgugccauugcacuccagccuggcgacaa

SEQ ID NO: 429530 - RNA, 32 nt, Human
gaucgugccauugcacuccagccuggcgacag

SEQ ID NO: 429531 - RNA, 32 nt, Human
gaucgugccauugcacuccagccugggcaaca

SEQ ID NO: 429532 - RNA, 32 nt, Human
gaucgugccauugcacuccagccugggcaaua

SEQ ID NO: 429533 - RNA, 32 nt, Human
gaucgugccauugcacuccagccugggcgaca

SEQ ID NO: 429534 - RNA, 32 nt, Human
gaucgugccauugcacuccagccugggugaca

SEQ ID NO: 429535 - RNA, 32 nt, Human
gaucgugccauugcacuccagucugggagaca

SEQ ID NO: 429536 - RNA, 32 nt, Human
gaucgugccauugcacuccagucuggguaaga

SEQ ID NO: 429537 - RNA, 32 nt, Human
gaucgugccauugcacuccggccugggcaaca

SEQ ID NO: 429538 - RNA, 32 nt, Human
gaucgugccauugcacucuagccugggcaaca

SEQ ID NO: 429539 - RNA, 32 nt, Human
gaucgugccauugcauuccagccugggagacg

SEQ ID NO: 429540 - RNA, 32 nt, Human
gaucgugccauugcgcuccagccuaggugaca

SEQ ID NO: 429541 - RNA, 32 nt, Human
gaucgugccauugcgcuccagccugggcaaca

SEQ ID NO: 429542 - RNA, 32 nt, Human
gaucgugccauuguauuccagccucggcaaca

SEQ ID NO: 429543 - RNA, 32 nt, Human
gaucgugccauugugcuccagccugggcaaca

SEQ ID NO: 429544 - RNA, 32 nt, Human
gaucgugccgcuaaauucuagccugggcaaca

SEQ ID NO: 429545 - RNA, 32 nt, Human
gaucgugccguugcacuccagccugggcaaca

SEQ ID NO: 429546 - RNA, 32 nt, Human
gaucgugccguugcacuccagccugggcgaca

SEQ ID NO: 429547 - RNA, 32 nt, Human
gaucgugccucugcacuccaaccugggugaug

SEQ ID NO: 429548 - RNA, 32 nt, Human
gaucgugcuacugcacuccagccccagcuggg

SEQ ID NO: 429549 - RNA, 32 nt, Human
gaucgugcuacugcacuccagccugggcaaca

SEQ ID NO: 429550 - RNA, 32 nt, Human
gaucgugcuacugcacuccagccugggggaca

SEQ ID NO: 429551 - RNA, 32 nt, Human
gaucgugcuacugcacuccagucugggugaca

SEQ ID NO: 429552 - RNA, 32 nt, Human
gaucgugcuacugcaguccagccugggcuaca

SEQ ID NO: 429553 - RNA, 32 nt, Human
gaucgugcuauugcacuccagccugggcgaca

SEQ ID NO: 429554 - RNA, 32 nt, Human
gaucgugcugcugcacuccagccugggcaaua

SEQ ID NO: 429555 - RNA, 32 nt, Human
gaucguggcauugcacucuagccugggcaacc

SEQ ID NO: 429556 - RNA, 32 nt, Human
gaucguggccacugcaauccagccugggcgau

SEQ ID NO: 429557 - RNA, 19 nt, Human
gaucguggguuuuggugga

SEQ ID NO: 429558 - RNA, 32 nt, Human
gaucgugguacagaagaaggacggcugcgacu

SEQ ID NO: 429559 - RNA, 32 nt, Human
gaucgugucacuacacuccaggcugggugaca

SEQ ID NO: 429560 - RNA, 32 nt, Human
gaucgugucacugcacuccagccggggcaaca

SEQ ID NO: 429561 - RNA, 32 nt, Human
gaucgugucacugcacuccagccuggcgacag

SEQ ID NO: 429562 - RNA, 32 nt, Human
gaucgugucacugcacuccagccugggcgaca

SEQ ID NO: 429563 - RNA, 32 nt, Human
gaucgugucacugcacuccagccugggugaca

SEQ ID NO: 429564 - RNA, 32 nt, Human
gaucgugucacugcacuccagccuggugacag

SEQ ID NO: 429565 - RNA, 32 nt, Human
gaucguucucccgcugagcuguuuucaagggc

SEQ ID NO: 429566 - RNA, 32 nt, Human
gaucguuuucuuucccuuuucucugguggccu

SEQ ID NO: 429567 - RNA, 32 nt, Human
gaucuaaacacgaggaaacauuauucauugga

SEQ ID NO: 429568 - RNA, 32 nt, Human
gaucuaaacuggccccuuccuccucugccugg

SEQ ID NO: 429569 - RNA, 32 nt, Human
gaucuaaaucauuuuguugucuucccagcgua

SEQ ID NO: 429570 - RNA, 32 nt, Human
gaucuaacauggcaccucgucuccacagggua

SEQ ID NO: 429571 - RNA, 31 nt, Human
gaucuaaccaggaggccaucacuggaugguc

SEQ ID NO: 429572 - RNA, 32 nt, Human
gaucuaagcugcuuuccaucuuuucucccagc

SEQ ID NO: 429573 - RNA, 32 nt, Human
gaucuaauuaaacuaaauagcuucugcacagc

SEQ ID NO: 429574 - RNA, 32 nt, Human
gaucuacagagauccaggaaaccaaagcccug

SEQ ID NO: 429575 - RNA, 32 nt, Human
gaucuacaggcaggguaggcacaggugcagcc

SEQ ID NO: 429576 - RNA, 21 nt, Human
gaucuacccgccucggccucc

SEQ ID NO: 429577 - RNA, 32 nt, Human
gaucuacccugaguauccuccaaacuguggau

SEQ ID NO: 429578 - RNA, 32 nt, Human
gaucuaccucuaagccaggcugugaagaaaag

SEQ ID NO: 429579 - RNA, 32 nt, Human
gaucuaccuggcuucucaguucuuugguugga

SEQ ID NO: 429580 - RNA, 32 nt, Human
gaucuacuacagggaagggaagagggugcugg

SEQ ID NO: 429581 - RNA, 32 nt, Human
gaucuacuccacugucuaccacucauuccugc

SEQ ID NO: 429582 - RNA, 32 nt, Human
gaucuacuguuugcauguaagagaccaggaua

SEQ ID NO: 429583 - RNA, 32 nt, Human
gaucuagaaagccaaguauuugagcaacaucu

SEQ ID NO: 429584 - RNA, 32 nt, Human
gaucuagaacagccuggucaacauggugaaac

SEQ ID NO: 429585 - RNA, 32 nt, Human
gaucuagaacgagagaccagggguguggaggg

SEQ ID NO: 429586 - RNA, 32 nt, Human
gaucuagacaucaagaggaagaaaaaugaugg

SEQ ID NO: 429587 - RNA, 32 nt, Human
gaucuagagugcaaagaggugccugaggagca

SEQ ID NO: 429588 - RNA, 32 nt, Human
gaucuagauugaaacucagcuaccuuucuucc

SEQ ID NO: 429589 - RNA, 32 nt, Human
gaucuagcuccucagaguuggaggaaggcuga

SEQ ID NO: 429590 - RNA, 32 nt, Human
gaucuaggacaugccacugaauugaagaccac

SEQ ID NO: 429591 - RNA, 32 nt, Human
gaucuaggagagugacugggugugccaaaaua

SEQ ID NO: 429592 - RNA, 32 nt, Human
gaucuaggcaccugcugucugaagggaccgug

SEQ ID NO: 429593 - RNA, 32 nt, Human
gaucuaggcccucagcaaccagcucuguaggg

SEQ ID NO: 429594 - RNA, 32 nt, Human
gaucuagggaaaggaggagcuaucgaaguaca

SEQ ID NO: 429595 - RNA, 32 nt, Human
gaucuagggcaggagucagcagucugggcagg

SEQ ID NO: 429596 - RNA, 32 nt, Human
gaucuauccacacagaacuagagcaaggaggu

SEQ ID NO: 429597 - RNA, 32 nt, Human
gaucuauccagugacguggccuggugggcguu

SEQ ID NO: 429598 - RNA, 32 nt, Human
gaucuaucuauaugcacauacauacauauaua

SEQ ID NO: 429599 - RNA, 32 nt, Human
gaucuauggcauggugaaaaggucagucugag

SEQ ID NO: 429600 - RNA, 32 nt, Human
gaucuaugucgagacugaggcugcucagcagc

SEQ ID NO: 429601 - RNA, 32 nt, Human
gaucucaaacuccugggcucaaguauccaccu

SEQ ID NO: 429602 - RNA, 32 nt, Human
gaucucaagugucaaccuugaggucccagcuc

SEQ ID NO: 429603 - RNA, 32 nt, Human
gaucucaaugggcagagaugcuucuaugaucu

SEQ ID NO: 429604 - RNA, 32 nt, Human
gaucucacagugaaaaauguuugcugacccuu

SEQ ID NO: 429605 - RNA, 32 nt, Human
gaucucacaguuugccuuccagaagccagccu

SEQ ID NO: 429606 - RNA, 32 nt, Human
gaucucaccacuacacuccagccugggugaca

SEQ ID NO: 429607 - RNA, 32 nt, Human
gaucucaccacugaacuccagccugggcgaca

SEQ ID NO: 429608 - RNA, 32 nt, Human
gaucucaccacugcacuccagccugggcagca

SEQ ID NO: 429609 - RNA, 32 nt, Human
gaucucaccacuguacuccagccugggugaca

SEQ ID NO: 429610 - RNA, 32 nt, Human
gaucucaccaugcacuccagccuagacaacag

SEQ ID NO: 429611 - RNA, 32 nt, Human
gaucucaccauuacacuccagccugggcgaca

SEQ ID NO: 429612 - RNA, 32 nt, Human
gaucucaccauugcacuccagccugggcgacu

SEQ ID NO: 429613 - RNA, 32 nt, Human
gaucucaccccugcacuccagccugggcaaca

SEQ ID NO: 429614 - RNA, 32 nt, Human
gaucucacuauguugcccaggcuggucuccug

SEQ ID NO: 429615 - RNA, 19 nt, Human
gaucucacuauguugcuca

SEQ ID NO: 429616 - RNA, 32 nt, Human
gaucucacugcaaccuccaucuccugucucag

SEQ ID NO: 429617 - RNA, 32 nt, Human
gaucucacugcaaccucugccucccgggcuug

SEQ ID NO: 429618 - RNA, 32 nt, Human
gaucucacugcacacagccuagggccccaccc

SEQ ID NO: 429619 - RNA, 32 nt, Human
gaucucacuguguuggccaggcuggucucaaa

SEQ ID NO: 429620 - RNA, 32 nt, Human
gaucucagaaaaucacaucuaucacgguuggu

SEQ ID NO: 429621 - RNA, 32 nt, Human
gaucucagacuauccugauuaaucuggggaag

SEQ ID NO: 429622 - RNA, 32 nt, Human
gaucucagacuggcuggauucagaucagugug

SEQ ID NO: 429623 - RNA, 32 nt, Human
gaucucagaggacuggcauugucuggagacgg

SEQ ID NO: 429624 - RNA, 32 nt, Human
gaucucagaguuuagaaucagcagagcacaga

SEQ ID NO: 429625 - RNA, 32 nt, Human
gaucucagcucaccaaaucucugccucccagg

SEQ ID NO: 429626 - RNA, 32 nt, Human
gaucucagcucaccacaaccuccgccucccag

SEQ ID NO: 429627 - RNA, 32 nt, Human
gaucucagcucacuacaaccuccgccucccau

SEQ ID NO: 429628 - RNA, 32 nt, Human
gaucucagcucacugcaaccuccgccucccaa

SEQ ID NO: 429629 - RNA, 32 nt, Human
gaucucagcucacugcaaccuccgccucccag

SEQ ID NO: 429630 - RNA, 32 nt, Human
gaucucagcucacugcaaccuccgucuccagg

SEQ ID NO: 429631 - RNA, 32 nt, Human
gaucucagcucacugcaaucuccaccuccugg

SEQ ID NO: 429632 - RNA, 32 nt, Human
gaucucagcucacugcagccacugccucccag

SEQ ID NO: 429633 - RNA, 32 nt, Human
gaucucagcucacugcagccuccgucucccag

SEQ ID NO: 429634 - RNA, 32 nt, Human
gaucucagcucacuguacuccagcccggguuc

SEQ ID NO: 429635 - RNA, 32 nt, Human
gaucucagcugcugcaaccuccaccucccggg

SEQ ID NO: 429636 - RNA, 32 nt, Human
gaucucaggaaaaugaguuucucuucccucag

SEQ ID NO: 429637 - RNA, 32 nt, Human
gaucucaggaagcacaaagggaccuuccuagc

SEQ ID NO: 429638 - RNA, 32 nt, Human
gaucucaggagguugaggcugcagugaauuau

SEQ ID NO: 429639 - RNA, 32 nt, Human
gaucucaggaguuggagaucagcaugggccac

SEQ ID NO: 429640 - RNA, 32 nt, Human
gaucucaggcuggagugcaguggcacaaucac

SEQ ID NO: 429641 - RNA, 32 nt, Human
gaucucaggucgcuguaaccuccgucuccugg

SEQ ID NO: 429642 - RNA, 32 nt, Human
gaucucagguucugaggcggcugugguggcug

SEQ ID NO: 429643 - RNA, 32 nt, Human
gaucucaguucaacuccugucucuccauauac

SEQ ID NO: 429644 - RNA, 32 nt, Human
gaucucaguucaugcaaccuccgccuccuggg

SEQ ID NO: 429645 - RNA, 32 nt, Human
gaucucaguuuaugcaacuucugccuccccag

SEQ ID NO: 429646 - RNA, 31 nt, Human
gaucucaugcggcagacugaaggacgggugc

SEQ ID NO: 429647 - RNA, 31 nt, Human
gaucucauguccucuauaccuguguccgaug

SEQ ID NO: 429648 - RNA, 32 nt, Human
gaucuccacaggcuucuggaugaagaaccugu

SEQ ID NO: 429649 - RNA, 32 nt, Human
gaucuccacugcacugcugugggcugaacugu

SEQ ID NO: 429650 - RNA, 32 nt, Human
gaucuccacugcuggguaugaguaaaugugug

SEQ ID NO: 429651 - RNA, 32 nt, Human
gaucuccagaaaccuagcccagcagguuaauc

SEQ ID NO: 429652 - RNA, 32 nt, Human
gaucuccagauuugaagacacucugaagcauu

SEQ ID NO: 429653 - RNA, 32 nt, Human
gaucuccagcugguucugugggcugcugcagu

SEQ ID NO: 429654 - RNA, 32 nt, Human
gaucuccagguucuggagguuggagguuccgc

SEQ ID NO: 429655 - RNA, 32 nt, Human
gaucuccauaaauuacuuagucuucuauguau

SEQ ID NO: 429656 - RNA, 32 nt, Human
gaucuccaugaagacgcggucacgcagccucc

SEQ ID NO: 429657 - RNA, 32 nt, Human
gaucuccauggcagacaagcuaaagcaucugc

SEQ ID NO: 429658 - RNA, 32 nt, Human
gaucucccccugcccauugccugcuugagggg

SEQ ID NO: 429659 - RNA, 32 nt, Human
gaucucccuagggccccaccuggaccauuuuc

SEQ ID NO: 429660 - RNA, 16 nt, Human
gaucucccuccaggga

SEQ ID NO: 429661 - RNA, 32 nt, Human
gaucucccuccagggaauccgccugcagagga

SEQ ID NO: 429662 - RNA, 32 nt, Human
gaucucccuccugcuaagucugcgcugcugca

SEQ ID NO: 429663 - RNA, 32 nt, Human
gaucucccucugggcaucuggcuuugcugcgu

SEQ ID NO: 429664 - RNA, 32 nt, Human
gaucuccgacgaggcccuggacccccgggcgg

SEQ ID NO: 429665 - RNA, 32 nt, Human
gaucuccgcucacugccaccuccgccucucua

SEQ ID NO: 429666 - RNA, 32 nt, Human
gaucuccucccagaggccagcacugccaaaug

SEQ ID NO: 429667 - RNA, 32 nt, Human
gaucuccucucaccugcccccauuaaagcucu

SEQ ID NO: 429668 - RNA, 19 nt, Human
gaucuccucugcaguguag

SEQ ID NO: 429669 - RNA, 18 nt, Human
gaucuccugaccuuguga

SEQ ID NO: 429670 - RNA, 32 nt, Human
gaucuccugaguacacugaagccacaggcugg

SEQ ID NO: 429671 - RNA, 32 nt, Human
gaucuccugcccucucugagccuugucacuug

SEQ ID NO: 429672 - RNA, 32 nt, Human
gaucuccugcccugcaggaauaggugggaagu

SEQ ID NO: 429673 - RNA, 22 nt, Human
gaucuccugccucagccuugca

SEQ ID NO: 429674 - RNA, 31 nt, Human
gaucuccuguucucugggcuuccuggucagu

SEQ ID NO: 429675 - RNA, 32 nt, Human
gaucuccuguucucugggcuuccuggucagug

SEQ ID NO: 429676 - RNA, 32 nt, Human
gaucuccuugccugaccccuggaccuggaaau

SEQ ID NO: 429677 - RNA, 18 nt, Human
gaucucgacagcuguuca

SEQ ID NO: 429678 - RNA, 32 nt, Human
gaucucgaggagguggugaaaaagagggauuu

SEQ ID NO: 429679 - RNA, 26 nt, Human
gaucucgaucaccaaucuagaucuuu

SEQ ID NO: 429680 - RNA, 32 nt, Human
gaucucgccacugcacuccaggcugggcgaca

SEQ ID NO: 429681 - RNA, 32 nt, Human
gaucucgccacugcgcuccagccugggcaaca

SEQ ID NO: 429682 - RNA, 32 nt, Human
gaucucgccacugugcuccagccugggcaaca

SEQ ID NO: 429683 - RNA, 32 nt, Human
gaucucgccaugguuagcaccagggacaaguc

SEQ ID NO: 429684 - RNA, 32 nt, Human
gaucucgccauugcacuccauucugggcaaca

SEQ ID NO: 429685 - RNA, 32 nt, Human
gaucucgccgccaacugguagacauggagacc

SEQ ID NO: 429686 - RNA, 32 nt, Human
gaucucgccuccuggguucaagcgauucuccu

SEQ ID NO: 429687 - RNA, 32 nt, Human
gaucucgcucacugcaaccuccgccucccggg

SEQ ID NO: 429688 - RNA, 32 nt, Human
gaucucggcacaccuccgccuucuggguucaa

SEQ ID NO: 429689 - RNA, 32 nt, Human
gaucucggcucaccgcaaccuccgccucccag

SEQ ID NO: 429690 - RNA, 32 nt, Human
gaucucggcucacuacaaccuccgccucccag

SEQ ID NO: 429691 - RNA, 32 nt, Human
gaucucggcucacugcaaccuagguggagguc

SEQ ID NO: 429692 - RNA, 32 nt, Human
gaucucggcucacugcaaccuccagcucccag

SEQ ID NO: 429693 - RNA, 32 nt, Human
gaucucggcucacugcaaccuccgccucccaa

SEQ ID NO: 429694 - RNA, 32 nt, Human
gaucucggcucacugcaaccuccgccucccag

SEQ ID NO: 429695 - RNA, 32 nt, Human
gaucucggcucacugcaaccuccgccuccuga

SEQ ID NO: 429696 - RNA, 32 nt, Human
gaucucggcucacugcaaccuccgccuuccug

SEQ ID NO: 429697 - RNA, 32 nt, Human
gaucucggcucacugcaaccuccgccuuucca

SEQ ID NO: 429698 - RNA, 32 nt, Human
gaucucggcucacugcaaccuccgucucccag

SEQ ID NO: 429699 - RNA, 32 nt, Human
gaucucggcucacugcaacucugccucccggg

SEQ ID NO: 429700 - RNA, 32 nt, Human
gaucucggcucacugcaaucucugccucccag

SEQ ID NO: 429701 - RNA, 32 nt, Human
gaucucggcucacugcaaucucugccucccgg

SEQ ID NO: 429702 - RNA, 32 nt, Human
gaucucggcucacugcaccuccgccucccagg

SEQ ID NO: 429703 - RNA, 32 nt, Human
gaucucggcucacugcaccucugccuccugga

SEQ ID NO: 429704 - RNA, 32 nt, Human
gaucucggcucacugccaccucucccucaugg

SEQ ID NO: 429705 - RNA, 32 nt, Human
gaucucggcucacugcgaccuccgucucccgg

SEQ ID NO: 429706 - RNA, 32 nt, Human
gaucucggcucacuguaaccuccgccuccuga

SEQ ID NO: 429707 - RNA, 32 nt, Human
gaucucggcucacugugaccucugccuccugg

SEQ ID NO: 429708 - RNA, 32 nt, Human
gaucucggcuccuggguucaagcaauucuccu

SEQ ID NO: 429709 - RNA, 32 nt, Human
gaucucuaaaugcagcaaaacacugccugaaa

SEQ ID NO: 429710 - RNA, 32 nt, Human
gaucucuaggccuuguuccucuuccagggaaa

SEQ ID NO: 429711 - RNA, 32 nt, Human
gaucucucacugugauuccucuccuuccuccg

SEQ ID NO: 429712 - RNA, 32 nt, Human
gaucucucauacuuucucccugucuacacagu

SEQ ID NO: 429713 - RNA, 32 nt, Human
gaucucuccacucaccguggaaguugccuugu

SEQ ID NO: 429714 - RNA, 32 nt, Human
gaucucuccauucagaagugugcagucuuaaa

SEQ ID NO: 429715 - RNA, 32 nt, Human
gaucucucccagagaacuacuggauuuccuca

SEQ ID NO: 429716 - RNA, 32 nt, Human
gaucucucccaugaagugaccaggauagagaa

SEQ ID NO: 429717 - RNA, 32 nt, Human
gaucucuccuucagucugcucuguuuaauucu

SEQ ID NO: 429718 - RNA, 16 nt, Human
gaucucucuccaggaa

SEQ ID NO: 429719 - RNA, 32 nt, Human
gaucucucuugcauccuuaaagggccugaguc

SEQ ID NO: 429720 - RNA, 32 nt, Human
gaucucugacacaccaaccucucuccucuuac

SEQ ID NO: 429721 - RNA, 32 nt, Human
gaucucugaccucugcugagugcugggcacug

SEQ ID NO: 429722 - RNA, 32 nt, Human
gaucucugaggccucagagugcuuggcugcug

SEQ ID NO: 429723 - RNA, 31 nt, Human
gaucucugccucucuucucucugccucgucc

SEQ ID NO: 429724 - RNA, 32 nt, Human
gaucucugcucacugcaaccucugccuccugg

SEQ ID NO: 429725 - RNA, 32 nt, Human
gaucucugcuuagggugguuugaggugaguuc

SEQ ID NO: 429726 - RNA, 32 nt, Human
gaucucugcuuccuguaccuugacaugcaaaa

SEQ ID NO: 429727 - RNA, 32 nt, Human
gaucucuggaguguugcaguuagaggguuguu

SEQ ID NO: 429728 - RNA, 32 nt, Human
gaucucugggugucugagggcaagugaaagcc

SEQ ID NO: 429729 - RNA, 32 nt, Human
gaucucuguaucauccagagccugaguacagu

SEQ ID NO: 429730 - RNA, 32 nt, Human
gaucucuguuuuaagugcucagcuucaugauu

SEQ ID NO: 429731 - RNA, 32 nt, Human
gaucucuuaagauuaauguagcagaaauuucu

SEQ ID NO: 429732 - RNA, 24 nt, Human
gaucucuugaccucaggugaucca

SEQ ID NO: 429733 - RNA, 32 nt, Human
gaucucuugccucugcugaugggggcuggcaa

SEQ ID NO: 429734 - RNA, 32 nt, Human
gaucucuugcugucuucucugucaagauugca

SEQ ID NO: 429735 - RNA, 32 nt, Human
gaucucuuggccucaugaucagccugccucgg

SEQ ID NO: 429736 - RNA, 22 nt, Human
gaucucuuuugaggugauggug

SEQ ID NO: 429737 - RNA, 32 nt, Human
gaucugaaaacacacauacacaaaugcacaca

SEQ ID NO: 429738 - RNA, 32 nt, Human
gaucugaaaacacaugucccagacugcauacu

SEQ ID NO: 429739 - RNA, 32 nt, Human
gaucugaagaugcaaacauuucaacuaugaag

SEQ ID NO: 429740 - RNA, 23 nt, Human
gaucugaagauuuuggcguucaa

SEQ ID NO: 429741 - RNA, 32 nt, Human
gaucugaaggggcgggguuagagccaagcugc

SEQ ID NO: 429742 - RNA, 32 nt, Human
gaucugaauauuuacacacauagcacacuaua

SEQ ID NO: 429743 - RNA, 32 nt, Human
gaucugacaaccaggccuagccccagacagcc

SEQ ID NO: 429744 - RNA, 32 nt, Human
gaucugacacuuaucacuaucuuaccauguuu

SEQ ID NO: 429745 - RNA, 32 nt, Human
gaucugaccccgaggggcagagcugucgguga

SEQ ID NO: 429746 - RNA, 32 nt, Human
gaucugacgagcagcucuugaaacccagggag

SEQ ID NO: 429747 - RNA, 32 nt, Human
gaucugagacacaguaagccuccaucauccac

SEQ ID NO: 429748 - RNA, 32 nt, Human
gaucugagagcaccugcuaucgggugaguccu

SEQ ID NO: 429749 - RNA, 32 nt, Human
gaucugagccugaagagagggaacaagucagu

SEQ ID NO: 429750 - RNA, 32 nt, Human
gaucugaggagguucuggaagacuggggcagc

SEQ ID NO: 429751 - RNA, 32 nt, Human
gaucugaggcccaaauccuuccucacuaaggg

SEQ ID NO: 429752 - RNA, 31 nt, Human
gaucugaggccuuucccuugccauagaaaug

SEQ ID NO: 429753 - RNA, 32 nt, Human
gaucugcaacacagaaaugcucugccugaaau

SEQ ID NO: 429754 - RNA, 32 nt, Human
gaucugcaaugccaauaucaagggccauguau

SEQ ID NO: 429755 - RNA, 32 nt, Human
gaucugcaccaagcacucacacacaugcaaug

SEQ ID NO: 429756 - RNA, 32 nt, Human
gaucugcaccagaacccggaugacugucaccu

SEQ ID NO: 429757 - RNA, 32 nt, Human
gaucugcaggaaaacaccaaacacacuaugga

SEQ ID NO: 429758 - RNA, 32 nt, Human
gaucugcaugccacgcugccgucuguguuaca

SEQ ID NO: 429759 - RNA, 32 nt, Human
gaucugccacugcacuccagccuggcgacaga

SEQ ID NO: 429760 - RNA, 32 nt, Human
gaucugccagcccugccuguucucucaccccg

SEQ ID NO: 429761 - RNA, 32 nt, Human
gaucugccaggaggaggagcucaggcgguaau

SEQ ID NO: 429762 - RNA, 23 nt, Human
gaucugcccaccccagccuccca

SEQ ID NO: 429763 - RNA, 23 nt, Human
gaucugcccaccucagucuccca

SEQ ID NO: 429764 - RNA, 23 nt, Human
gaucugcccaccucggccuccca

SEQ ID NO: 429765 - RNA, 32 nt, Human
gaucugcccaggcugaaggcacacgcucaaug

SEQ ID NO: 429766 - RNA, 32 nt, Human
gaucugcccaucacuuuggccuagggacaggg

SEQ ID NO: 429767 - RNA, 32 nt, Human
gaucugcccccugccagccucccacagugcug

SEQ ID NO: 429768 - RNA, 32 nt, Human
gaucugccccugaacaucucccgagaaaugcu

SEQ ID NO: 429769 - RNA, 23 nt, Human
gaucugcccgccucggccuccca

SEQ ID NO: 429770 - RNA, 32 nt, Human
gaucugcccucccaggggucuccaauuuucuu

SEQ ID NO: 429771 - RNA, 19 nt, Human
gaucugccucuugcugcca

SEQ ID NO: 429772 - RNA, 32 nt, Human
gaucugccugccucagcuucucaggugugacc

SEQ ID NO: 429773 - RNA, 23 nt, Human
gaucugccugcuucagccuccca

SEQ ID NO: 429774 - RNA, 32 nt, Human
gaucugcgggaaugugggcuggagagguccug

SEQ ID NO: 429775 - RNA, 32 nt, Human
gaucugcucacugccaggcuccucuccccuuu

SEQ ID NO: 429776 - RNA, 32 nt, Human
gaucugcucagcccuggaggugccagcaaagc

SEQ ID NO: 429777 - RNA, 32 nt, Human
gaucugcucugaggcccucgaggcucagcaga

SEQ ID NO: 429778 - RNA, 32 nt, Human
gaucugcugcaccugcucacgcucucccugga

SEQ ID NO: 429779 - RNA, 32 nt, Human
gaucugcugcagccacagcuccuccagaaagg

SEQ ID NO: 429780 - RNA, 32 nt, Human
gaucugcugcagcuuggcguuucauccaacca

SEQ ID NO: 429781 - RNA, 32 nt, Human
gaucugcugcguccugcaggagcauugcgcuu

SEQ ID NO: 429782 - RNA, 19 nt, Human
gaucugcuggaguggggug

SEQ ID NO: 429783 - RNA, 32 nt, Human
gaucugcugggccaccuccuguuguuccguga

SEQ ID NO: 429784 - RNA, 32 nt, Human
gaucuggaaaauacuggaaaaugugauacuua

SEQ ID NO: 429785 - RNA, 32 nt, Human
gaucuggaaagaaaggaaggaaaacaaaggcg

SEQ ID NO: 429786 - RNA, 32 nt, Human
gaucuggaaggagagggauuauguuauagcuu

SEQ ID NO: 429787 - RNA, 32 nt, Human
gaucuggaauuggacauugcucugucagagca

SEQ ID NO: 429788 - RNA, 32 nt, Human
gaucuggacuccaacccaagggcccucucuug

SEQ ID NO: 429789 - RNA, 32 nt, Human
gaucuggagcccaccugcuuugaaagaaauga

SEQ ID NO: 429790 - RNA, 32 nt, Human
gaucuggagccccuguggagccacaucugagc

SEQ ID NO: 429791 - RNA, 32 nt, Human
gaucuggagcugcaucucuaaggggccaggcu

SEQ ID NO: 429792 - RNA, 32 nt, Human
gaucuggagguuuuuguugaaauguggcuuca

SEQ ID NO: 429793 - RNA, 32 nt, Human
gaucuggaugaagagagagggggugagagagg

SEQ ID NO: 429794 - RNA, 32 nt, Human
gaucuggaugcuuaagugucauggacaguaaa

SEQ ID NO: 429795 - RNA, 32 nt, Human
gaucuggccauugcacuccagcgugggcaaca

SEQ ID NO: 429796 - RNA, 32 nt, Human
gaucuggcccuagggagcuuccuguucccaga

SEQ ID NO: 429797 - RNA, 32 nt, Human
gaucuggccucagcuaugaggguggguagcac

SEQ ID NO: 429798 - RNA, 32 nt, Human
gaucuggccuugccccugaguccacgggaugu

SEQ ID NO: 429799 - RNA, 32 nt, Human
gaucuggcucucuuccccuuggacuuuagaac

SEQ ID NO: 429800 - RNA, 32 nt, Human
gaucuggcuuugccagagguugcaacauguug

SEQ ID NO: 429801 - RNA, 17 nt, Human
gaucugggacccagggg

SEQ ID NO: 429802 - RNA, 32 nt, Human
gaucugggacccuuuccuuccuucccuggcuu

SEQ ID NO: 429803 - RNA, 32 nt, Human
gaucugggaggcaauuaccuucggagaaaaac

SEQ ID NO: 429804 - RNA, 32 nt, Human
gaucugggcacuguacuuuagccugggcgaca

SEQ ID NO: 429805 - RNA, 32 nt, Human
gaucugggccagaagccaaaccccuacuucua

SEQ ID NO: 429806 - RNA, 32 nt, Human
gaucuggggagagaggaacaaaggaccgugaa

SEQ ID NO: 429807 - RNA, 32 nt, Human
gaucuggggaggcagaggugacagugagcuga

SEQ ID NO: 429808 - RNA, 32 nt, Human
gaucugggggaagaggaggaggagggccgauc

SEQ ID NO: 429809 - RNA, 32 nt, Human
gaucugggggagggaucacuguucuucuugcu

SEQ ID NO: 429810 - RNA, 21 nt, Human
gaucuggggguugcaccaggg

SEQ ID NO: 429811 - RNA, 31 nt, Human
gaucugggucucggugggccugugcaggucu

SEQ ID NO: 429812 - RNA, 32 nt, Human
gaucuggugcuggcaugggcaccccgcggcca

SEQ ID NO: 429813 - RNA, 32 nt, Human
gaucugguggaugacuguggugaucguacuga

SEQ ID NO: 429814 - RNA, 32 nt, Human
gaucugguggcuauuuccacauuuugaaaagg

SEQ ID NO: 429815 - RNA, 32 nt, Human
gaucuguaaauaaaacuuacauuuuucaauaa

SEQ ID NO: 429816 - RNA, 23 nt, Human
gaucuguaccucauugcugcuca

SEQ ID NO: 429817 - RNA, 32 nt, Human
gaucugucacccaggcuggagugcaguggcac

SEQ ID NO: 429818 - RNA, 32 nt, Human
gaucugucgcccaggcuggagugcaguagcgu

SEQ ID NO: 429819 - RNA, 32 nt, Human
gaucugucguggggugcugcaauguuccucca

SEQ ID NO: 429820 - RNA, 32 nt, Human
gaucugucguugccaucaccuccagggggcgc

SEQ ID NO: 429821 - RNA, 32 nt, Human
gaucugucucacuggcaucuuguugagggccu

SEQ ID NO: 429822 - RNA, 32 nt, Human
gaucugucucuaauuagaggugcaaugucaaa

SEQ ID NO: 429823 - RNA, 32 nt, Human
gaucugucucucccuuccccuccugggaccau

SEQ ID NO: 429824 - RNA, 32 nt, Human
gaucugucuguccuguaaacugugccaacuuc

SEQ ID NO: 429825 - RNA, 32 nt, Human
gaucugugaacaaaguacugugcagaaugcua

SEQ ID NO: 429826 - RNA, 32 nt, Human
gaucugugaaugggauuaagguggacaagauc

SEQ ID NO: 429827 - RNA, 32 nt, Human
gaucugugcgacugaaggugggaagaggagua

SEQ ID NO: 429828 - RNA, 32 nt, Human
gaucugugggacugucugggccuguuacucau

SEQ ID NO: 429829 - RNA, 32 nt, Human
gaucugugucaaaagagcuucucuccagagua

SEQ ID NO: 429830 - RNA, 32 nt, Human
gaucugugucaucugggaauuuccuugggcug

SEQ ID NO: 429831 - RNA, 32 nt, Human
gaucuguguguauguacauaguagacaugugu

SEQ ID NO: 429832 - RNA, 32 nt, Human
gaucuguguuaacucuuucaugccacugguga

SEQ ID NO: 429833 - RNA, 32 nt, Human
gaucuguuacccaggcuggagugcagugacac

SEQ ID NO: 429834 - RNA, 32 nt, Human
gaucuguuacccaggcuggagugcaguggcau

SEQ ID NO: 429835 - RNA, 32 nt, Human
gaucuguuccagggucaucuuuuccuuacagu

SEQ ID NO: 429836 - RNA, 32 nt, Human
gaucuguugcccaggcuggagugcaguggagc

SEQ ID NO: 429837 - RNA, 32 nt, Human
gaucuguugccuaaacuaaagcuuaaaaguuu

SEQ ID NO: 429838 - RNA, 32 nt, Human
gaucuguuuagugcuuauuauuuuccaguaaa

SEQ ID NO: 429839 - RNA, 32 nt, Human
gaucuguuucaaggagauuuacugcuauuuua

SEQ ID NO: 429840 - RNA, 32 nt, Human
gaucuguuuucauuuuuaggcaugucagaccc

SEQ ID NO: 429841 - RNA, 32 nt, Human
gaucuuaaagcacaguuaucaugacgagaaga

SEQ ID NO: 429842 - RNA, 32 nt, Human
gaucuuaaccaguuucuaucccuuaccugcuu

SEQ ID NO: 429843 - RNA, 32 nt, Human
gaucuuaacucacugcaaccuccgcuucccag

SEQ ID NO: 429844 - RNA, 32 nt, Human
gaucuuaauuuaaaagacagaggcuccaaaau

SEQ ID NO: 429845 - RNA, 32 nt, Human
gaucuuacccccucagccucuggaguagcugg

SEQ ID NO: 429846 - RNA, 32 nt, Human
gaucuuagcuuggcuaaaucaccaauauagca

SEQ ID NO: 429847 - RNA, 32 nt, Human
gaucuuaggccccuguaacaaaacaacacaaa

SEQ ID NO: 429848 - RNA, 32 nt, Human
gaucuuagggaugauuaaaggcagcauuugau

SEQ ID NO: 429849 - RNA, 20 nt, Human
gaucuuauggcccugcgaga

SEQ ID NO: 429850 - RNA, 32 nt, Human
gaucuucaaacaguaacuuuccaaaagccagg

SEQ ID NO: 429851 - RNA, 32 nt, Human
gaucuucacccaugcagaauagcaagaguggg

SEQ ID NO: 429852 - RNA, 32 nt, Human
gaucuucagagaacccaucacugugagggaua

SEQ ID NO: 429853 - RNA, 19 nt, Human
gaucuucagagugcuggaa

SEQ ID NO: 429854 - RNA, 19 nt, Human
gaucuucagaguguuggaa

SEQ ID NO: 429855 - RNA, 21 nt, Human
gaucuucagauggugcuggug

SEQ ID NO: 429856 - RNA, 32 nt, Human
gaucuucagcagcaggaugacgauggccgcca

SEQ ID NO: 429857 - RNA, 32 nt, Human
gaucuucagcagcauaaugacaauccagagga

SEQ ID NO: 429858 - RNA, 18 nt, Human
gaucuucagccuguuaaa

SEQ ID NO: 429859 - RNA, 32 nt, Human
gaucuucauguaccugcucuucuguuugcaca

SEQ ID NO: 429860 - RNA, 32 nt, Human
gaucuuccaacuuuuuagccccggcuguggaa

SEQ ID NO: 429861 - RNA, 32 nt, Human
gaucuuccagccucagccuccccaguagcuga

SEQ ID NO: 429862 - RNA, 32 nt, Human
gaucuucccacugcacuccagccuggccaaua

SEQ ID NO: 429863 - RNA, 32 nt, Human
gaucuucccugguggcugcuccaccuccagca

SEQ ID NO: 429864 - RNA, 32 nt, Human
gaucuuccuccacccugccccaccccuagguc

SEQ ID NO: 429865 - RNA, 32 nt, Human
gaucuucgggaccuggcuucauuuggaguuca

SEQ ID NO: 429866 - RNA, 32 nt, Human
gaucuucguuccaaccgcgcaggauggggccc

SEQ ID NO: 429867 - RNA, 32 nt, Human
gaucuucuccaccuagucugcccuaauaauga

SEQ ID NO: 429868 - RNA, 32 nt, Human
gaucuucucuguaacaugcacacuuuggccug

SEQ ID NO: 429869 - RNA, 32 nt, Human
gaucuucugagcuuguuucccugcuggguggg

SEQ ID NO: 429870 - RNA, 18 nt, Human
gaucuucugccuccgcca

SEQ ID NO: 429871 - RNA, 32 nt, Human
gaucuugaacagcuccuguacuugcucuuugu

SEQ ID NO: 429872 - RNA, 20 nt, Human
gaucuugaacaugcugcuua

SEQ ID NO: 429873 - RNA, 21 nt, Human
gaucuugaaccuugcugucca

SEQ ID NO: 429874 - RNA, 32 nt, Human
gaucuugacucacuacaaccuccgccucccag

SEQ ID NO: 429875 - RNA, 32 nt, Human
gaucuugacucacugcaaccuccgccucacag

SEQ ID NO: 429876 - RNA, 32 nt, Human
gaucuugacucacugcaaccuccgccucccag

SEQ ID NO: 429877 - RNA, 22 nt, Human
gaucuugaugcuucugcugcuc

SEQ ID NO: 429878 - RNA, 32 nt, Human
gaucuugauuuugccagccuugcucgagguuu

SEQ ID NO: 429879 - RNA, 32 nt, Human
gaucuugcagaaguccuugcugcuccucucag

SEQ ID NO: 429880 - RNA, 32 nt, Human
gaucuugcauugagccaagaucacgccacugc

SEQ ID NO: 429881 - RNA, 32 nt, Human
gaucuugccacauuucugaucagagguguaca

SEQ ID NO: 429882 - RNA, 32 nt, Human
gaucuugccacugcacaccagccugggcaaca

SEQ ID NO: 429883 - RNA, 32 nt, Human
gaucuugccacugcacuccagccugggcaaca

SEQ ID NO: 429884 - RNA, 18 nt, Human
gaucuugccucuuuccuc

SEQ ID NO: 429885 - RNA, 32 nt, Human
gaucuugccucuuuccuccucaugaaagcagc

SEQ ID NO: 429886 - RNA, 32 nt, Human
gaucuugcuauguuauccaggcuggucuugaa

SEQ ID NO: 429887 - RNA, 32 nt, Human
gaucuugcuuccugccagcaccaaacauuaca

SEQ ID NO: 429888 - RNA, 17 nt, Human
gaucuugcuuugcugcu

SEQ ID NO: 429889 - RNA, 19 nt, Human
gaucuuggacugacacuca

SEQ ID NO: 429890 - RNA, 21 nt, Human
gaucuuggcaguggacugcca

SEQ ID NO: 429891 - RNA, 32 nt, Human
gaucuuggccagggucucagaagugugugugg

SEQ ID NO: 429892 - RNA, 32 nt, Human
gaucuuggcuaacugcaaccuccagcuccugg

SEQ ID NO: 429893 - RNA, 32 nt, Human
gaucuuggcucacugcaaccuccgucucccag

SEQ ID NO: 429894 - RNA, 32 nt, Human
gaucuuggcucacugcaaccuccgucuccugg

SEQ ID NO: 429895 - RNA, 32 nt, Human
gaucuuggcucacugcaaccuccugcuuccug

SEQ ID NO: 429896 - RNA, 17 nt, Human
gaucuuggcucacugcu

SEQ ID NO: 429897 - RNA, 32 nt, Human
gaucuuggcucugcaaccuccacuucccaggu

SEQ ID NO: 429898 - RNA, 32 nt, Human
gaucuuggcucugcaaccuccgccucccgguu

SEQ ID NO: 429899 - RNA, 18 nt, Human
gaucuuggcugucuguca

SEQ ID NO: 429900 - RNA, 21 nt, Human
gaucuuggcuucuguuacuca

SEQ ID NO: 429901 - RNA, 32 nt, Human
gaucuuggcuuucugcaaccucugccucccag

SEQ ID NO: 429902 - RNA, 32 nt, Human
gaucuuggcuuucugcaacgucugccuuccag

SEQ ID NO: 429903 - RNA, 21 nt, Human
gaucuugggacccaccgcugc

SEQ ID NO: 429904 - RNA, 32 nt, Human
gaucuugggacccaccgcugcccucagcuccg

SEQ ID NO: 429905 - RNA, 19 nt, Human
gaucuugggacuuccucuc

SEQ ID NO: 429906 - RNA, 32 nt, Human
gaucuuggggagguggccgggugcaguggcuc

SEQ ID NO: 429907 - RNA, 20 nt, Human
gaucuuggggcuaccgccca

SEQ ID NO: 429908 - RNA, 32 nt, Human
gaucuugggggugggcgggcuguggggcuggg

SEQ ID NO: 429909 - RNA, 19 nt, Human
gaucuugggugacuucuca

SEQ ID NO: 429910 - RNA, 32 nt, Human
gaucuugggugacuucucaucacucuggaccu

SEQ ID NO: 429911 - RNA, 21 nt, Human
gaucuuggugcugagccgcca

SEQ ID NO: 429912 - RNA, 32 nt, Human
gaucuugucucucaggcuggguugcaauggca

SEQ ID NO: 429913 - RNA, 29 nt, Human
gaucuugugucuguugugccugaauuugg

SEQ ID NO: 429914 - RNA, 32 nt, Human
gaucuuguuggaugcacuuagauauggaaaau

SEQ ID NO: 429915 - RNA, 32 nt, Human
gaucuuuaacgggaaggcugcuuucuccuuuu

SEQ ID NO: 429916 - RNA, 19 nt, Human
gaucuuuagaacuguaaaa

SEQ ID NO: 429917 - RNA, 31 nt, Human
gaucuuuaguaucuuuaccuaccucaauuuc

SEQ ID NO: 429918 - RNA, 32 nt, Human
gaucuuuauggggcuuaagcuugggugggagc

SEQ ID NO: 429919 - RNA, 18 nt, Human
gaucuuuauugcugcuua

SEQ ID NO: 429920 - RNA, 32 nt, Human
gaucuuucaaaggacacccaugaugucuacuc

SEQ ID NO: 429921 - RNA, 32 nt, Human
gaucuuucagcuucccagaguguugugggaau

SEQ ID NO: 429922 - RNA, 31 nt, Human
gaucuuuccucuucugggccucugcuccccu

SEQ ID NO: 429923 - RNA, 32 nt, Human
gaucuuuccuuugacagaugugguacucugug

SEQ ID NO: 429924 - RNA, 32 nt, Human
gaucuuucucacuuacuccucucccauucagc

SEQ ID NO: 429925 - RNA, 32 nt, Human
gaucuuucucucugacuauacuuaguuugaaa

SEQ ID NO: 429926 - RNA, 32 nt, Human
gaucuuugcuucaguccuugaaucaccugugg

SEQ ID NO: 429927 - RNA, 32 nt, Human
gaucuuuggaaaugucaguccuggaggcugag

SEQ ID NO: 429928 - RNA, 32 nt, Human
gaucuuuggagagaaggagguggggauccgag

SEQ ID NO: 429929 - RNA, 32 nt, Human
gaucuuuggcaaagccagaggaagaaaggagc

SEQ ID NO: 429930 - RNA, 32 nt, Human
gaucuuugugggccaaggugggcugggagggc

SEQ ID NO: 429931 - RNA, 32 nt, Human
gaucuuuguguucugaaggcuucacucaggug

SEQ ID NO: 429932 - RNA, 32 nt, Human
gaucuuuguugugugggagggcagcagggaug

SEQ ID NO: 429933 - RNA, 32 nt, Human
gaucuuuuauuggcucugggcugugcucagug

SEQ ID NO: 429934 - RNA, 32 nt, Human
gaucuuuucaaaaucaccucaggagccacaga

SEQ ID NO: 429935 - RNA, 32 nt, Human
gaucuuuucaaggucacacaucaggugguuag

SEQ ID NO: 429936 - RNA, 32 nt, Human
gaucuuuuccuauauuuagaagagugauucuc

SEQ ID NO: 429937 - RNA, 32 nt, Human
gaucuuuucuauaccagaacugcggucacuau

SEQ ID NO: 429938 - RNA, 32 nt, Human
gaucuuuucucuuccaaucaaaugucuaggcu

SEQ ID NO: 429939 - RNA, 32 nt, Human
gaucuuuuuauuuugcaauccugggccagcua

SEQ ID NO: 429940 - RNA, 32 nt, Human
gaucuuuuuccauccagcaguggaguuuagua

SEQ ID NO: 429941 - RNA, 32 nt, Human
gaugaaaaagucacaucagagcacucaguuug

SEQ ID NO: 429942 - RNA, 32 nt, Human
gaugaaaacauagcaucucaggagauuucaug

SEQ ID NO: 429943 - RNA, 32 nt, Human
gaugaaaaccggcucccuugcuuacacuauau

SEQ ID NO: 429944 - RNA, 32 nt, Human
gaugaaaaccuacaggguggcccccugugcca

SEQ ID NO: 429945 - RNA, 32 nt, Human
gaugaaaacuaaggauuuuucaagagaucuuu

SEQ ID NO: 429946 - RNA, 32 nt, Human
gaugaaaacucaaaacaaaaagaaauaccuca

SEQ ID NO: 429947 - RNA, 32 nt, Human
gaugaaaacucauuaagcaguuccucugacag

SEQ ID NO: 429948 - RNA, 32 nt, Human
gaugaaaacucauuaagcaguuccucugacug

SEQ ID NO: 429949 - RNA, 32 nt, Human
gaugaaaagaaaacuuaaagaggaauggcccu

SEQ ID NO: 429950 - RNA, 32 nt, Human
gaugaaaagauccagacccgggaagggaaguc

SEQ ID NO: 429951 - RNA, 32 nt, Human
gaugaaaagauggcacaggcacuguugguacc

SEQ ID NO: 429952 - RNA, 32 nt, Human
gaugaaaagauggcacagucagugcugguacc

SEQ ID NO: 429953 - RNA, 32 nt, Human
gaugaaaauaauggaaggaauguggagcaaua

SEQ ID NO: 429954 - RNA, 32 nt, Human
gaugaaaauacuacugcugagcauuuuugaag

SEQ ID NO: 429955 - RNA, 32 nt, Human
gaugaaaauguucaguuuguacccauuuuucc

SEQ ID NO: 429956 - RNA, 32 nt, Human
gaugaaacaaauuuguccccacgggcuaguuu

SEQ ID NO: 429957 - RNA, 32 nt, Human
gaugaaacacgauggucagauucuuccgugac

SEQ ID NO: 429958 - RNA, 32 nt, Human
gaugaaacaucagucuaccagcuuugggcuga

SEQ ID NO: 429959 - RNA, 32 nt, Human
gaugaaacccagcaucagagagguuuucagca

SEQ ID NO: 429960 - RNA, 32 nt, Human
gaugaaagaaaagaucgggaucccagggucca

SEQ ID NO: 429961 - RNA, 32 nt, Human
gaugaaagacaaacacaucugcccaaugaucc

SEQ ID NO: 429962 - RNA, 32 nt, Human
gaugaaaggaagagaggggccaauugggcagg

SEQ ID NO: 429963 - RNA, 32 nt, Human
gaugaaauuaugguuugcacugucuauuaaau

SEQ ID NO: 429964 - RNA, 32 nt, Human
gaugaaauuuguuuccuggugagcacagaauc

SEQ ID NO: 429965 - RNA, 32 nt, Human
gaugaacagcuaccucccucagcuucagagau

SEQ ID NO: 429966 - RNA, 32 nt, Human
gaugaacaggaugacaagauucaugccaucag

SEQ ID NO: 429967 - RNA, 32 nt, Human
gaugaacauggagaaaccccgucucuacuaaa

SEQ ID NO: 429968 - RNA, 19 nt, Human
gaugaacccuggcauuugg

SEQ ID NO: 429969 - RNA, 32 nt, Human
gaugaaccuccacccccaccccacccccgcac

SEQ ID NO: 429970 - RNA, 32 nt, Human
gaugaacuaaggcugcuggugcccugagcaac

SEQ ID NO: 429971 - RNA, 32 nt, Human
gaugaacucacugagcagccagagccaaaugc

SEQ ID NO: 429972 - RNA, 32 nt, Human
gaugaacugccucuccuccucccugccugggg

SEQ ID NO: 429973 - RNA, 24 nt, Human
gaugaagaaacugaggcucuagga

SEQ ID NO: 429974 - RNA, 24 nt, Human
gaugaagaaacugagguucagaga

SEQ ID NO: 429975 - RNA, 32 nt, Human
gaugaagaacagcaagaaaucuccaagaagcu

SEQ ID NO: 429976 - RNA, 32 nt, Human
gaugaagaagugaaaaugacaauaaugacucu

SEQ ID NO: 429977 - RNA, 32 nt, Human
gaugaagacaagaaggaggaggggacggggag

SEQ ID NO: 429978 - RNA, 23 nt, Human
gaugaagacuuagaaucugugga

SEQ ID NO: 429979 - RNA, 32 nt, Human
gaugaagagaauauaauugcucugcuuuucca

SEQ ID NO: 429980 - RNA, 32 nt, Human
gaugaagagaggaggacaucaagacagguggc

SEQ ID NO: 429981 - RNA, 32 nt, Human
gaugaagaugaaugcaggaagaauugugucca

SEQ ID NO: 429982 - RNA, 32 nt, Human
gaugaagauggaaacacagauaccuacacugg

SEQ ID NO: 429983 - RNA, 32 nt, Human
gaugaagauguggcaggagaaagaaagaaaac

SEQ ID NO: 429984 - RNA, 32 nt, Human
gaugaagaugugggagaggagcagcccccagu

SEQ ID NO: 429985 - RNA, 25 nt, Human
gaugaagcaaacugaggcccagaga

SEQ ID NO: 429986 - RNA, 32 nt, Human
gaugaagcaaacugaggcccagagaagggaaa

SEQ ID NO: 429987 - RNA, 32 nt, Human
gaugaagcuaggggaggaaggaaggaaggaag

SEQ ID NO: 429988 - RNA, 32 nt, Human
gaugaagcucuaauuucuauuacauguaauuu

SEQ ID NO: 429989 - RNA, 32 nt, Human
gaugaagcucuggagaaauuuaaacacuggca

SEQ ID NO: 429990 - RNA, 32 nt, Human
gaugaagcuggggcugcaagacugccucuccu

SEQ ID NO: 429991 - RNA, 32 nt, Human
gaugaagcuuccaaaggugccugagaugaaac

SEQ ID NO: 429992 - RNA, 32 nt, Human
gaugaaggaauccguggcucuaccugcccagc

SEQ ID NO: 429993 - RNA, 32 nt, Human
gaugaaggcaaaaguuuuuaauaaaaggcauu

SEQ ID NO: 429994 - RNA, 32 nt, Human
gaugaaggcguuucugagggcuugccuacacu

SEQ ID NO: 429995 - RNA, 32 nt, Human
gaugaagggaauucacucuguuuugcagaaaa

SEQ ID NO: 429996 - RNA, 32 nt, Human
gaugaagggagcucaggagagccgucuucagc

SEQ ID NO: 429997 - RNA, 32 nt, Human
gaugaagguaauccggaguggcaauggagugg

SEQ ID NO: 429998 - RNA, 32 nt, Human
gaugaaguagacagcuuuacucaguaucucag

SEQ ID NO: 429999 - RNA, 32 nt, Human
gaugaaguagauaggggcuagagcagauugua

SEQ ID NO: 430000 - RNA, 32 nt, Human
gaugaagucacugcacccuccacuaccucuac

SEQ ID NO: 430001 - RNA, 32 nt, Human
gaugaagucucacugcacucaggcuggagugc

SEQ ID NO: 430002 - RNA, 32 nt, Human
gaugaagugaaaaaggaguaagacgacccaga

SEQ ID NO: 430003 - RNA, 32 nt, Human
gaugaagugcccuccagccucagagcuagcca

SEQ ID NO: 430004 - RNA, 32 nt, Human
gaugaaguuuucauccccaucugccuguuaau

SEQ ID NO: 430005 - RNA, 32 nt, Human
gaugaauaaccaguaccaguuccaguucaagu

SEQ ID NO: 430006 - RNA, 32 nt, Human
gaugaauaagaaagggagagcacaugaagcuu

SEQ ID NO: 430007 - RNA, 32 nt, Human
gaugaauacauggcuuggcauuuucuaugguu

SEQ ID NO: 430008 - RNA, 32 nt, Human
gaugaauacguugccagcuugcaucugccauc

SEQ ID NO: 430009 - RNA, 32 nt, Human
gaugaauagaaaaccuguaagcuuugauguuc

SEQ ID NO: 430010 - RNA, 32 nt, Human
gaugaauauuggucaccuaccucggcaguagg

SEQ ID NO: 430011 - RNA, 32 nt, Human
gaugaaucaaggaagcagggcccugucuuaug

SEQ ID NO: 430012 - RNA, 32 nt, Human
gaugaauccauaggauagagaaaaaucugcuu

SEQ ID NO: 430013 - RNA, 32 nt, Human
gaugaaucccaggugcucuggagcuggauggu

SEQ ID NO: 430014 - RNA, 32 nt, Human
gaugaaugagccccagcaguccaaggugugau

SEQ ID NO: 430015 - RNA, 32 nt, Human
gaugaaugcuuagugcccucacuucuucucuc

SEQ ID NO: 430016 - RNA, 32 nt, Human
gaugaaugggaaaguauuuuugaaagaauucu

SEQ ID NO: 430017 - RNA, 32 nt, Human
gaugaaugggggugccuggugaggccccaacc

SEQ ID NO: 430018 - RNA, 31 nt, Human
gaugaauguggagggggaaaagacugcugga

SEQ ID NO: 430019 - RNA, 32 nt, Human
gaugaauguguccugcuucuucccaggcucca

SEQ ID NO: 430020 - RNA, 32 nt, Human
gaugaauguuaucagcuauuuauccaaauuac

SEQ ID NO: 430021 - RNA, 32 nt, Human
gaugaauucuggauauaugaccaauaaaacug

SEQ ID NO: 430022 - RNA, 30 nt, Human
gaugaauuuggcauuaguaggcauuuuacu

SEQ ID NO: 430023 - RNA, 32 nt, Human
gaugacaaaaggaggcugggcgcggugucuca

SEQ ID NO: 430024 - RNA, 32 nt, Human
gaugacaaauaccugaaugucaucacauccuc

SEQ ID NO: 430025 - RNA, 32 nt, Human
gaugacaaguuagggagagaucagaggucaua

SEQ ID NO: 430026 - RNA, 32 nt, Human
gaugacaaguuccguggucuuccuaagaaaca

SEQ ID NO: 430027 - RNA, 32 nt, Human
gaugacacaacugcacuccagcuugggcaaca

SEQ ID NO: 430028 - RNA, 32 nt, Human
gaugacacagcaguugccaucuugaaaaaugc

SEQ ID NO: 430029 - RNA, 32 nt, Human
gaugacaccacugcacuccaaccuagguaaca

SEQ ID NO: 430030 - RNA, 32 nt, Human
gaugacacugugggugcuaucuuccauauuuu

SEQ ID NO: 430031 - RNA, 30 nt, Human
gaugacagaaagcaaucagagggauggagg

SEQ ID NO: 430032 - RNA, 32 nt, Human
gaugacagacagggacgaagcagagaccucua

SEQ ID NO: 430033 - RNA, 32 nt, Human
gaugacagagcugagacccagagaggggaaga

SEQ ID NO: 430034 - RNA, 32 nt, Human
gaugacagagugaggagggcccagagcagaau

SEQ ID NO: 430035 - RNA, 32 nt, Human
gaugacagcuagaggcuggagcagggccggcc

SEQ ID NO: 430036 - RNA, 32 nt, Human
gaugacagcuauggggcacacaggccauuugc

SEQ ID NO: 430037 - RNA, 32 nt, Human
gaugacaggagaaucuagauaccuuuggaccc

SEQ ID NO: 430038 - RNA, 32 nt, Human
gaugacaggcgcacaucaccacgcccagcuga

SEQ ID NO: 430039 - RNA, 32 nt, Human
gaugacagucaauguggagaaacuuuuggcca

SEQ ID NO: 430040 - RNA, 32 nt, Human
gaugacagugcugugugggucucugucagagu

SEQ ID NO: 430041 - RNA, 32 nt, Human
gaugacauccaccuucuccaucucuucgaagu

SEQ ID NO: 430042 - RNA, 32 nt, Human
gaugacauggagaucccuuaaagagaaccaga

SEQ ID NO: 430043 - RNA, 32 nt, Human
gaugacauggaugcagcacagacucagccuug

SEQ ID NO: 430044 - RNA, 32 nt, Human
gaugacauugcccgcccucccccuaggcccag

SEQ ID NO: 430045 - RNA, 32 nt, Human
gaugacauugguguguuccucagcaagucguc

SEQ ID NO: 430046 - RNA, 26 nt, Human
gaugaccacuucuccauugguguggg

SEQ ID NO: 430047 - RNA, 32 nt, Human
gaugaccagaugcccugcuccaucacaaccuc

SEQ ID NO: 430048 - RNA, 32 nt, Human
gaugaccagauggggaggggauguccaggcag

SEQ ID NO: 430049 - RNA, 32 nt, Human
gaugaccagguucugucucuauggaagucacu

SEQ ID NO: 430050 - RNA, 32 nt, Human
gaugacccaaaggauaagaaagaaaagagagc

SEQ ID NO: 430051 - RNA, 32 nt, Human
gaugaccccaacgagguauaacaugccacggc

SEQ ID NO: 430052 - RNA, 32 nt, Human
gaugaccccacccccgcacacgcacacgcaca

SEQ ID NO: 430053 - RNA, 32 nt, Human
gaugacccccaucccucauaccauggagucau

SEQ ID NO: 430054 - RNA, 32 nt, Human
gaugaccccuucucccccgucugugcccuucc

SEQ ID NO: 430055 - RNA, 32 nt, Human
gaugaccuccacccuccuuggacaugaauccu

SEQ ID NO: 430056 - RNA, 32 nt, Human
gaugaccucuacucggggucgggcucgggcug

SEQ ID NO: 430057 - RNA, 32 nt, Human
gaugaccugaccaugccugccugcugaucagu

SEQ ID NO: 430058 - RNA, 32 nt, Human
gaugaccugcugugucccucugagcacuaccc

SEQ ID NO: 430059 - RNA, 32 nt, Human
gaugaccuggagaucuaauacaggcuugaaag

SEQ ID NO: 430060 - RNA, 32 nt, Human
gaugaccuguacgcugugccacacagaaauca

SEQ ID NO: 430061 - RNA, 32 nt, Human
gaugaccuguguaauaaucuuuguuaguaguc

SEQ ID NO: 430062 - RNA, 32 nt, Human
gaugaccuuguagacaugcacacaacuauacc

SEQ ID NO: 430063 - RNA, 32 nt, Human
gaugacgccauugcacuccagccugggugaga

SEQ ID NO: 430064 - RNA, 32 nt, Human
gaugacggagcacgacugugucccaaacaaac

SEQ ID NO: 430065 - RNA, 32 nt, Human
gaugacggagcugccaagggcucuccuggccc

SEQ ID NO: 430066 - RNA, 32 nt, Human
gaugacgggaaggccagaugcagagaggagcu

SEQ ID NO: 430067 - RNA, 32 nt, Human
gaugacgguacuggucaagaugggucaagcaa

SEQ ID NO: 430068 - RNA, 32 nt, Human
gaugacucagccugcuuugaaauuagcuugua

SEQ ID NO: 430069 - RNA, 32 nt, Human
gaugacuccuacuccauuguuuaccccaaagc

SEQ ID NO: 430070 - RNA, 32 nt, Human
gaugacucgcaguaccacagcacugggacaga

SEQ ID NO: 430071 - RNA, 32 nt, Human
gaugacucugccccucagagcuugcagacggc

SEQ ID NO: 430072 - RNA, 32 nt, Human
gaugacucugggggcagaggugggcucuguuu

SEQ ID NO: 430073 - RNA, 32 nt, Human
gaugacugaaguauuugugagccacauauugg

SEQ ID NO: 430074 - RNA, 32 nt, Human
gaugacugcagcccuggcuggcaccuugauug

SEQ ID NO: 430075 - RNA, 32 nt, Human
gaugacuggaaaccauacaagcuuagaagacu

SEQ ID NO: 430076 - RNA, 32 nt, Human
gaugacugggcuggggaagcagaugcuugcug

SEQ ID NO: 430077 - RNA, 32 nt, Human
gaugacuggugcugugcuccagccuuaucagu

SEQ ID NO: 430078 - RNA, 32 nt, Human
gaugacuguacaacaggaagacuugaaaaauc

SEQ ID NO: 430079 - RNA, 32 nt, Human
gaugacuguagccuguggauuguacugcagua

SEQ ID NO: 430080 - RNA, 32 nt, Human
gaugacuguguuaagugcaucuguauuguaag

SEQ ID NO: 430081 - RNA, 32 nt, Human
gaugacuuagggcuucccaucuguguacaucc

SEQ ID NO: 430082 - RNA, 32 nt, Human
gaugacuucuaacauucugugaugccuaauuu

SEQ ID NO: 430083 - RNA, 32 nt, Human
gaugacuuggcaggacuugccccaccaggguc

SEQ ID NO: 430084 - RNA, 32 nt, Human
gaugacuugguugaaccuguggcuaggggaag

SEQ ID NO: 430085 - RNA, 32 nt, Human
gaugacuuuggugaaaccccgucucuacuaaa

SEQ ID NO: 430086 - RNA, 32 nt, Human
gaugacuuuugucccauguggcuuuugugaag

SEQ ID NO: 430087 - RNA, 32 nt, Human
gaugacuuuuguccuucuuucuuccaaucugu

SEQ ID NO: 430088 - RNA, 24 nt, Human
gaugagaaaacugaggcucaggga

SEQ ID NO: 430089 - RNA, 32 nt, Human
gaugagaaaggucuccucucuccuggcauaac

SEQ ID NO: 430090 - RNA, 32 nt, Human
gaugagaacuucuccuggaagcagggguaaau

SEQ ID NO: 430091 - RNA, 22 nt, Human
gaugagaagacaaccucaggga

SEQ ID NO: 430092 - RNA, 32 nt, Human
gaugagaagccauauaauggcgguuuggggga

SEQ ID NO: 430093 - RNA, 32 nt, Human
gaugagaagggagcagggagaguuccagaaag

SEQ ID NO: 430094 - RNA, 32 nt, Human
gaugagaagguggcaggagugcacuggggaua

SEQ ID NO: 430095 - RNA, 19 nt, Human
gaugagaaugccccaggac

SEQ ID NO: 430096 - RNA, 32 nt, Human
gaugagaauggagagguagggagccaggugca

SEQ ID NO: 430097 - RNA, 32 nt, Human
gaugagaaugugcuuugguguauugaggaguc

SEQ ID NO: 430098 - RNA, 32 nt, Human
gaugagaaugugcuuugguguauugagguguc

SEQ ID NO: 430099 - RNA, 32 nt, Human
gaugagaaugugcuuugguguauugagucuga

SEQ ID NO: 430100 - RNA, 32 nt, Human
gaugagaccagaggagguauggauggaaacaa

SEQ ID NO: 430101 - RNA, 32 nt, Human
gaugagacccuccccaacacagugagacccca

SEQ ID NO: 430102 - RNA, 32 nt, Human
gaugagaccuggagucuaaaauucagacugaa

SEQ ID NO: 430103 - RNA, 32 nt, Human
gaugagacgcugggcaucucuccucuguggcu

SEQ ID NO: 430104 - RNA, 32 nt, Human
gaugagacggaugcucugaugcucugaggcuu

SEQ ID NO: 430105 - RNA, 32 nt, Human
gaugagacuggggcccagggaggggcaggugu

SEQ ID NO: 430106 - RNA, 32 nt, Human
gaugagacuuccaaaccugacagaugucagcc

SEQ ID NO: 430107 - RNA, 32 nt, Human
gaugagagaccccagcccuggaggugcccucg

SEQ ID NO: 430108 - RNA, 32 nt, Human
gaugagaggaaggaaacccuuacauuaugcua

SEQ ID NO: 430109 - RNA, 32 nt, Human
gaugagaggagagagcaacuguucuuucuuuu

SEQ ID NO: 430110 - RNA, 32 nt, Human
gaugagaggcacccuucccuucuucccuccac

SEQ ID NO: 430111 - RNA, 32 nt, Human
gaugagaggccaaacuccguuuuucacgagau

SEQ ID NO: 430112 - RNA, 32 nt, Human
gaugagaggguaaaagaugcucagggaaacac

SEQ ID NO: 430113 - RNA, 32 nt, Human
gaugagaggucugaagccuuccuggccacagg

SEQ ID NO: 430114 - RNA, 31 nt, Human
gaugagagugagagaggaaugaaggugauag

SEQ ID NO: 430115 - RNA, 23 nt, Human
gaugagaguggguaaaucaggga

SEQ ID NO: 430116 - RNA, 32 nt, Human
gaugagagugucuaugggaaauggugguugga

SEQ ID NO: 430117 - RNA, 23 nt, Human
gaugagaguuugagauucaggga

SEQ ID NO: 430118 - RNA, 32 nt, Human
gaugagaugagauaugauuuccuagagaugua

SEQ ID NO: 430119 - RNA, 32 nt, Human
gaugagauggaagaggaggaggaggaggagcu

SEQ ID NO: 430120 - RNA, 32 nt, Human
gaugagauugcgaaggguggcagauggagguu

SEQ ID NO: 430121 - RNA, 32 nt, Human
gaugagauuucugcuuguuucuuuuuguuuuu

SEQ ID NO: 430122 - RNA, 32 nt, Human
gaugagcaaaacucagagccuguggaguugac

SEQ ID NO: 430123 - RNA, 32 nt, Human
gaugagcaaauucuacccuaaaaauguucuag

SEQ ID NO: 430124 - RNA, 32 nt, Human
gaugagcaacacauuuuucagcugccagucag

SEQ ID NO: 430125 - RNA, 32 nt, Human
gaugagcacacagaagagacccugccacagga

SEQ ID NO: 430126 - RNA, 24 nt, Human
gaugagcagaaugagacucaaggg

SEQ ID NO: 430127 - RNA, 32 nt, Human
gaugagcagccugaugcaucucagccccugca

SEQ ID NO: 430128 - RNA, 20 nt, Human
gaugagcauacgacugggga

SEQ ID NO: 430129 - RNA, 32 nt, Human
gaugagccaguggaaguaucccuuucccuggc

SEQ ID NO: 430130 - RNA, 32 nt, Human
gaugagcccagcccuguucugggugcagcuga

SEQ ID NO: 430131 - RNA, 32 nt, Human
gaugagcccaggaaaagggaauuccagaaugg

SEQ ID NO: 430132 - RNA, 32 nt, Human
gaugagccggcgaggccaggugcggggcgcgc

SEQ ID NO: 430133 - RNA, 32 nt, Human
gaugagccuggaaaacgcagacaggagaggaa

SEQ ID NO: 430134 - RNA, 32 nt, Human
gaugagcgcuuccaggcuucaggcucagaagg

SEQ ID NO: 430135 - RNA, 32 nt, Human
gaugagcgggucuguccucuucacggcgggag

SEQ ID NO: 430136 - RNA, 32 nt, Human
gaugagcucacaguccaggucucuugcugugu

SEQ ID NO: 430137 - RNA, 21 nt, Human
gaugagcucagccuuuacuca

SEQ ID NO: 430138 - RNA, 32 nt, Human
gaugagcugcaacaggcugagcuccagagagc

SEQ ID NO: 430139 - RNA, 32 nt, Human
gaugagcugcagcuggcucauggccuucuuag

SEQ ID NO: 430140 - RNA, 32 nt, Human
gaugagcugcuuagggagggaauauauucaaa

SEQ ID NO: 430141 - RNA, 32 nt, Human
gaugagcugggaacaagggaagagagagcagg

SEQ ID NO: 430142 - RNA, 32 nt, Human
gaugagcuucuuuccuccauuucaccuggugg

SEQ ID NO: 430143 - RNA, 32 nt, Human
gaugagcuugcagccucauaggaggucagcac

SEQ ID NO: 430144 - RNA, 32 nt, Human
gaugagcuuucagcugaggccugauggaaauu

SEQ ID NO: 430145 - RNA, 32 nt, Human
gaugagcuuuguagacacucaccagaauaugg

SEQ ID NO: 430146 - RNA, 32 nt, Human
gaugaggaaaauauaaaggaaaagagggagau

SEQ ID NO: 430147 - RNA, 32 nt, Human
gaugaggaaaaucaggccagaggacaacaggc

SEQ ID NO: 430148 - RNA, 22 nt, Human
gaugaggaaacaggcucagaga

SEQ ID NO: 430149 - RNA, 24 nt, Human
gaugaggaaacuaaggcuccuagg

SEQ ID NO: 430150 - RNA, 22 nt, Human
gaugaggaaacuaaggcuugga

SEQ ID NO: 430151 - RNA, 22 nt, Human
gaugaggaaacugaagcuugga

SEQ ID NO: 430152 - RNA, 23 nt, Human
gaugaggaaacugaaguugagga

SEQ ID NO: 430153 - RNA, 32 nt, Human
gaugaggaaacugagacucaagaaauauuuca

SEQ ID NO: 430154 - RNA, 24 nt, Human
gaugaggaaacugaggcccagaga

SEQ ID NO: 430155 - RNA, 24 nt, Human
gaugaggaaacugaggccuggaga

SEQ ID NO: 430156 - RNA, 24 nt, Human
gaugaggaaacugaggcgcagaga

SEQ ID NO: 430157 - RNA, 32 nt, Human
gaugaggaaacugaggcgcagagacuugcuua

SEQ ID NO: 430158 - RNA, 24 nt, Human
gaugaggaaacugaggcucagaga

SEQ ID NO: 430159 - RNA, 25 nt, Human
gaugaggaaacugaggcugagcggg

SEQ ID NO: 430160 - RNA, 21 nt, Human
gaugaggaaacugaguccgga

SEQ ID NO: 430161 - RNA, 24 nt, Human
gaugaggaaacuggaauuuuuuaa

SEQ ID NO: 430162 - RNA, 23 nt, Human
gaugaggaacugaggcucaagga

SEQ ID NO: 430163 - RNA, 32 nt, Human
gaugaggaagagaagaaaugaggagccugucu

SEQ ID NO: 430164 - RNA, 22 nt, Human
gaugaggaagaggacuuugggg

SEQ ID NO: 430165 - RNA, 32 nt, Human
gaugaggaaggcggccggucaccccgccuccg

SEQ ID NO: 430166 - RNA, 22 nt, Human
gaugaggaagugagcucaggga

SEQ ID NO: 430167 - RNA, 32 nt, Human
gaugaggaauauuaccgcauggaguugcuggc

SEQ ID NO: 430168 - RNA, 32 nt, Human
gaugaggaauccuccauuuucuguccgaagcu

SEQ ID NO: 430169 - RNA, 21 nt, Human
gaugaggacaagaucuguggg

SEQ ID NO: 430170 - RNA, 32 nt, Human
gaugaggacagaagcaucucuacagaugaaaa

SEQ ID NO: 430171 - RNA, 32 nt, Human
gaugaggacaggcauccuauccccagccucuu

SEQ ID NO: 430172 - RNA, 22 nt, Human
gaugaggacaugggcccagaga

SEQ ID NO: 430173 - RNA, 23 nt, Human
gaugaggagacaaggaaacagga

SEQ ID NO: 430174 - RNA, 24 nt, Human
gaugaggagacugaggcucagagg

SEQ ID NO: 430175 - RNA, 32 nt, Human
gaugaggaggcagaugaugcagaugcugcugg

SEQ ID NO: 430176 - RNA, 32 nt, Human
gaugaggaggcuggccccagagaugaucuugc

SEQ ID NO: 430177 - RNA, 23 nt, Human
gaugaggaggcuucuaucuugga

SEQ ID NO: 430178 - RNA, 32 nt, Human
gaugaggagguggagugcaggggauguuaggg

SEQ ID NO: 430179 - RNA, 32 nt, Human
gaugaggaucggaacaccauguucuuucccac

SEQ ID NO: 430180 - RNA, 26 nt, Human
gaugaggauggaggccggggaggcag

SEQ ID NO: 430181 - RNA, 32 nt, Human
gaugaggauguggcuguauuuguuuugaguuc

SEQ ID NO: 430182 - RNA, 24 nt, Human
gaugaggcaacugagguucaggga

SEQ ID NO: 430183 - RNA, 32 nt, Human
gaugaggcagaaguccaaguaaccgcuagcuu

SEQ ID NO: 430184 - RNA, 32 nt, Human
gaugaggcagaggcaugaugcuuccugcucac

SEQ ID NO: 430185 - RNA, 32 nt, Human
gaugaggcagguaaggguggaacaggaggggu

SEQ ID NO: 430186 - RNA, 31 nt, Human
gaugaggccacaauccuagccaacauuuuca

SEQ ID NO: 430187 - RNA, 32 nt, Human
gaugaggccagccucagccucuauggcaaggc

SEQ ID NO: 430188 - RNA, 32 nt, Human
gaugaggccgagguaaaagagacaucugcagu

SEQ ID NO: 430189 - RNA, 32 nt, Human
gaugaggccuuccuggacucagcugggagcaa

SEQ ID NO: 430190 - RNA, 32 nt, Human
gaugaggcgagaggaggaggaggaggaggaga

SEQ ID NO: 430191 - RNA, 26 nt, Human
gaugaggcgugcaggccugggugaag

SEQ ID NO: 430192 - RNA, 32 nt, Human
gaugaggcuacucuuaacgcacugccuuuagg

SEQ ID NO: 430193 - RNA, 32 nt, Human
gaugaggcugcuggcucagggugcguggguuc

SEQ ID NO: 430194 - RNA, 32 nt, Human
gaugaggcuggaaaucauccuucugaaagccc

SEQ ID NO: 430195 - RNA, 32 nt, Human
gaugagggaacagcaggugucaaggcuggcag

SEQ ID NO: 430196 - RNA, 32 nt, Human
gaugagggaacagcaguggcugcagcuccagg

SEQ ID NO: 430197 - RNA, 24 nt, Human
gaugagggaacugaggcucaguga

SEQ ID NO: 430198 - RNA, 22 nt, Human
gaugagggaaguuuccagcaga

SEQ ID NO: 430199 - RNA, 32 nt, Human
gaugagggagagagagccagagacaguguugc

SEQ ID NO: 430200 - RNA, 32 nt, Human
gaugagggagagaggagagaggagaggaaagg

SEQ ID NO: 430201 - RNA, 32 nt, Human
gaugagggaggucggggcugcagugagccaag

SEQ ID NO: 430202 - RNA, 32 nt, Human
gaugagggauggaggccaggcaugcuggcuua

SEQ ID NO: 430203 - RNA, 32 nt, Human
gaugagggcaauguccugccuccuggagaaga

SEQ ID NO: 430204 - RNA, 32 nt, Human
gaugagggcucacuccagcuucauauggugcc

SEQ ID NO: 430205 - RNA, 32 nt, Human
gaugaggggccgggacacugcccccuaccuuc

SEQ ID NO: 430206 - RNA, 23 nt, Human
gaugagggggcucccucugugga

SEQ ID NO: 430207 - RNA, 32 nt, Human
gaugaggggucugaaaggccaacccgaggcug

SEQ ID NO: 430208 - RNA, 32 nt, Human
gaugagggguggaaccgagggaagaagguaga

SEQ ID NO: 430209 - RNA, 32 nt, Human
gaugagggugacugucaaguacaagcaagacu

SEQ ID NO: 430210 - RNA, 32 nt, Human
gaugaggucagggaugggcauggugcauaacu

SEQ ID NO: 430211 - RNA, 32 nt, Human
gaugaggucaugcuguaauagggugggccccc

SEQ ID NO: 430212 - RNA, 32 nt, Human
gaugaggucugcacucgggccggggugggugc

SEQ ID NO: 430213 - RNA, 32 nt, Human
gaugaggugaagaucaccauaaucuaaaaggc

SEQ ID NO: 430214 - RNA, 32 nt, Human
gaugaggugaagaucacugucaucuaaaagca

SEQ ID NO: 430215 - RNA, 32 nt, Human
gaugaggugaagaucacugucaucuaaaagcu

SEQ ID NO: 430216 - RNA, 32 nt, Human
gaugaggugggauguggaggucagagcaucuc

SEQ ID NO: 430217 - RNA, 32 nt, Human
gaugagguggugagcccagagcccgagccccu

SEQ ID NO: 430218 - RNA, 24 nt, Human
gaugaguaaacugaggcacagaga

SEQ ID NO: 430219 - RNA, 32 nt, Human
gaugaguagaucaccuggcaucaggaguucaa

SEQ ID NO: 430220 - RNA, 32 nt, Human
gaugagucagugccaugacugagaaggaaccg

SEQ ID NO: 430221 - RNA, 32 nt, Human
gaugagucccaugugacuccugccuuccagga

SEQ ID NO: 430222 - RNA, 32 nt, Human
gaugagucucacuauguugcccaggcuggucu

SEQ ID NO: 430223 - RNA, 32 nt, Human
gaugagucucgcucugcacuccagccuggcga

SEQ ID NO: 430224 - RNA, 32 nt, Human
gaugagucucugcuugcugagcucaucacugu

SEQ ID NO: 430225 - RNA, 32 nt, Human
gaugagucuuccugccugaaacugagagagug

SEQ ID NO: 430226 - RNA, 32 nt, Human
gaugagugaaguuauagcaaaucaagcugcac

SEQ ID NO: 430227 - RNA, 32 nt, Human
gaugagugacuucagggacagagcagaggaaa

SEQ ID NO: 430228 - RNA, 32 nt, Human
gaugagugcagggcagaggugagggaacccaa

SEQ ID NO: 430229 - RNA, 32 nt, Human
gaugagugcccuuacacaaaagccuggaggga

SEQ ID NO: 430230 - RNA, 32 nt, Human
gaugagugccuguaguccaagcuacucaagag

SEQ ID NO: 430231 - RNA, 32 nt, Human
gaugaguggauugcuugagccuaggaguucga

SEQ ID NO: 430232 - RNA, 32 nt, Human
gaugagugguccaagacccuugcuggccucag

SEQ ID NO: 430233 - RNA, 32 nt, Human
gaugaguucuggcagucuguguuuucauuuga

SEQ ID NO: 430234 - RNA, 31 nt, Human
gaugaguuugagagagaaaaaguguaauuga

SEQ ID NO: 430235 - RNA, 32 nt, Human
gaugauaaacuugcacugauagaucuuaaugu

SEQ ID NO: 430236 - RNA, 32 nt, Human
gaugauaaagagacagugauauuggaacuugc

SEQ ID NO: 430237 - RNA, 32 nt, Human
gaugauaaauaguugcuucuagugcaguuuuu

SEQ ID NO: 430238 - RNA, 32 nt, Human
gaugauaaucucaagacuccucccuuagcuac

SEQ ID NO: 430239 - RNA, 32 nt, Human
gaugauaauguuccuggccuaucgcagcugau

SEQ ID NO: 430240 - RNA, 32 nt, Human
gaugauacagaagcuguaaacauacugaaaug

SEQ ID NO: 430241 - RNA, 32 nt, Human
gaugauacagguaagauuggaacucaugaaga

SEQ ID NO: 430242 - RNA, 32 nt, Human
gaugauaccacacaugguuauuggaaaauacu

SEQ ID NO: 430243 - RNA, 32 nt, Human
gaugauacuucaggagauuauauuucacucaa

SEQ ID NO: 430244 - RNA, 32 nt, Human
gaugauaggugagcucaccccugucagguucu

SEQ ID NO: 430245 - RNA, 32 nt, Human
gaugauaugguuauucucucuaauccauuaau

SEQ ID NO: 430246 - RNA, 32 nt, Human
gaugauauugaauuuaaaaacugcacaacugu

SEQ ID NO: 430247 - RNA, 31 nt, Human
gaugaucacagcugccaaggcuaccuaaaag

SEQ ID NO: 430248 - RNA, 32 nt, Human
gaugaucauauuuacagacacuacugugcuaa

SEQ ID NO: 430249 - RNA, 32 nt, Human
gaugaucaugccacugcacuccagcuugggug

SEQ ID NO: 430250 - RNA, 32 nt, Human
gaugaucccaagaagcauguguguacaaugga

SEQ ID NO: 430251 - RNA, 32 nt, Human
gaugaucccuuugcacagaacuaugcuuaucu

SEQ ID NO: 430252 - RNA, 32 nt, Human
gaugauccgcaccaucuucacugaugugcuuc

SEQ ID NO: 430253 - RNA, 32 nt, Human
gaugauccuaaccugcagcacggugguuuuac

SEQ ID NO: 430254 - RNA, 32 nt, Human
gaugauccucaaggaaauacaaccuagggugc

SEQ ID NO: 430255 - RNA, 32 nt, Human
gaugauccucuucaacccugaggucuuaauug

SEQ ID NO: 430256 - RNA, 32 nt, Human
gaugauccuggaguguggaggcagcagcggca

SEQ ID NO: 430257 - RNA, 32 nt, Human
gaugaucgucaccucugugccugaguucuccc

SEQ ID NO: 430258 - RNA, 32 nt, Human
gaugaucuaagagguauugauuucugaauauu

SEQ ID NO: 430259 - RNA, 22 nt, Human
gaugaucuagcucauaccaaag

SEQ ID NO: 430260 - RNA, 32 nt, Human
gaugaucucucuccgcccuggagcucagcgcu

SEQ ID NO: 430261 - RNA, 32 nt, Human
gaugaucugaggauuuaaauucacaaaaccug

SEQ ID NO: 430262 - RNA, 32 nt, Human
gaugaucuggaggaagagugugagccagaaga

SEQ ID NO: 430263 - RNA, 32 nt, Human
gaugaucugugcagcaaagcaccaugguacau

SEQ ID NO: 430264 - RNA, 32 nt, Human
gaugaucuguuuuaaaugugaggcgauuauuu

SEQ ID NO: 430265 - RNA, 32 nt, Human
gaugaucuuagaggagggaagaagagagagag

SEQ ID NO: 430266 - RNA, 32 nt, Human
gaugaugaaccagcuguaaaacuacaacuacu

SEQ ID NO: 430267 - RNA, 32 nt, Human
gaugaugaagaagaugggaauuaccuucaucc

SEQ ID NO: 430268 - RNA, 31 nt, Human
gaugaugaagcaucucccauggggaggugau

SEQ ID NO: 430269 - RNA, 32 nt, Human
gaugaugacuccagaggugcuggcagaggcau

SEQ ID NO: 430270 - RNA, 32 nt, Human
gaugaugacugcacugccaucgugggcagaug

SEQ ID NO: 430271 - RNA, 32 nt, Human
gaugaugagagcuuuccuaagguaauucuuuc

SEQ ID NO: 430272 - RNA, 32 nt, Human
gaugaugagagggagggcugcugccacagacu

SEQ ID NO: 430273 - RNA, 16 nt, Human
gaugaugauauguuga

SEQ ID NO: 430274 - RNA, 32 nt, Human
gaugaugaugaugacuguuaccagggcucugu

SEQ ID NO: 430275 - RNA, 32 nt, Human
gaugaugcaagagagaaugagaaggaauuugg

SEQ ID NO: 430276 - RNA, 32 nt, Human
gaugaugcaugcuggcguuuucuaaaguuuuc

SEQ ID NO: 430277 - RNA, 32 nt, Human
gaugaugccacugcacuccagccugggcuaca

SEQ ID NO: 430278 - RNA, 32 nt, Human
gaugaugccauugcacuccagccugggcaaca

SEQ ID NO: 430279 - RNA, 32 nt, Human
gaugaugcucauaccaauggcuucagugaugg

SEQ ID NO: 430280 - RNA, 32 nt, Human
gaugaugcugccucuccucucuguguugucug

SEQ ID NO: 430281 - RNA, 32 nt, Human
gaugauggaauuagagaggugggcucaaaucu

SEQ ID NO: 430282 - RNA, 32 nt, Human
gaugauggagccaaagaggggaugcuuugaga

SEQ ID NO: 430283 - RNA, 32 nt, Human
gaugauggagcucagcccuccaccuccacagc

SEQ ID NO: 430284 - RNA, 21 nt, Human
gaugauggccaggaguggccu

SEQ ID NO: 430285 - RNA, 32 nt, Human
gaugauggcgagaagucggauuacagggggcc

SEQ ID NO: 430286 - RNA, 32 nt, Human
gaugauggcgguggagguggugguuguagugu

SEQ ID NO: 430287 - RNA, 26 nt, Human
gaugauggcugcagacaucccgagag

SEQ ID NO: 430288 - RNA, 32 nt, Human
gaugauggcugcaguccaguuuuaugauucug

SEQ ID NO: 430289 - RNA, 32 nt, Human
gaugauggcuugagcccaggaguucgagacca

SEQ ID NO: 430290 - RNA, 32 nt, Human
gaugaugggaauugugugauguuuaacaggaa

SEQ ID NO: 430291 - RNA, 32 nt, Human
gaugaugggaggcagugagucuugaugauaag

SEQ ID NO: 430292 - RNA, 32 nt, Human
gaugaugggauuauagguguuugcuacuuauu

SEQ ID NO: 430293 - RNA, 32 nt, Human
gaugaugggggaggggcaggaagcugaauuca

SEQ ID NO: 430294 - RNA, 32 nt, Human
gaugauguaagcaaccaggacuucagagagug

SEQ ID NO: 430295 - RNA, 32 nt, Human
gaugauguacucugggucaagagaccagggau

SEQ ID NO: 430296 - RNA, 32 nt, Human
gaugaugucaccaacaggaugaugucaccagg

SEQ ID NO: 430297 - RNA, 32 nt, Human
gaugauguccauugcugugugauggcuuggaa

SEQ ID NO: 430298 - RNA, 32 nt, Human
gaugaugugcaauuucauguuuuaacuuggga

SEQ ID NO: 430299 - RNA, 32 nt, Human
gaugauguggcagaacugccaaacaagcucug

SEQ ID NO: 430300 - RNA, 32 nt, Human
gaugauguuggaagucauggguccucagagug

SEQ ID NO: 430301 - RNA, 32 nt, Human
gaugauguuuccaucuccaaccccuucaugcc

SEQ ID NO: 430302 - RNA, 32 nt, Human
gaugauuaagagugacagccugagggagcuga

SEQ ID NO: 430303 - RNA, 19 nt, Human
gaugauuacgcauuuugaa

SEQ ID NO: 430304 - RNA, 32 nt, Human
gaugauucagcaucagaagaagaaggaaccca

SEQ ID NO: 430305 - RNA, 32 nt, Human
gaugauucagggcauacucuucaaggucacga

SEQ ID NO: 430306 - RNA, 32 nt, Human
gaugauucagucuguaccagacaugacaacac

SEQ ID NO: 430307 - RNA, 32 nt, Human
gaugauuccauuucauauauacacucauuuuc

SEQ ID NO: 430308 - RNA, 32 nt, Human
gaugauucuaacuccugcuccuucucuugucc

SEQ ID NO: 430309 - RNA, 32 nt, Human
gaugauucucaccuuuacuucucuccagaaca

SEQ ID NO: 430310 - RNA, 32 nt, Human
gaugauucuuaagggcccuucuaggaccaaag

SEQ ID NO: 430311 - RNA, 32 nt, Human
gaugauucuucaaccuuuugggguugaugugg

SEQ ID NO: 430312 - RNA, 32 nt, Human
gaugauucuuccagauaauguccuugcuuuac

SEQ ID NO: 430313 - RNA, 32 nt, Human
gaugauugagaugaaaguuaacauagugugaa

SEQ ID NO: 430314 - RNA, 32 nt, Human
gaugauuggaagauggaaguggaggguuaaau

SEQ ID NO: 430315 - RNA, 32 nt, Human
gaugauuuaaaguauaggcauaccucaaagau

SEQ ID NO: 430316 - RNA, 22 nt, Human
gaugauuuccaaacauucaaag

SEQ ID NO: 430317 - RNA, 32 nt, Human
gaugauuucccuuaaggagcauuucuccugau

SEQ ID NO: 430318 - RNA, 32 nt, Human
gaugauuugcuguauucuccugaaaggucgua

SEQ ID NO: 430319 - RNA, 32 nt, Human
gaugauuuggaaaaucucuggagagacugaaa

SEQ ID NO: 430320 - RNA, 32 nt, Human
gaugauuuuauguuauguggauuucauuucaa

SEQ ID NO: 430321 - RNA, 32 nt, Human
gaugauuuucacccucucuagcugagguaacu

SEQ ID NO: 430322 - RNA, 32 nt, Human
gaugauuuucagggacuuguuggcaacucagc

SEQ ID NO: 430323 - RNA, 32 nt, Human
gaugauuuugcacuuugagauuaaaaugccau

SEQ ID NO: 430324 - RNA, 32 nt, Human
gaugauuuuguaaaaguacuauuuuaaauauc

SEQ ID NO: 430325 - RNA, 32 nt, Human
gaugcaaaccuugagaaaucaacuuggagaac

SEQ ID NO: 430326 - RNA, 32 nt, Human
gaugcaaagacuauagacuguaaaccugagga

SEQ ID NO: 430327 - RNA, 32 nt, Human
gaugcaaaucaauuucauaaaugcuaaaaugu

SEQ ID NO: 430328 - RNA, 32 nt, Human
gaugcaaccucacuaugguaugcuggccagca

SEQ ID NO: 430329 - RNA, 26 nt, Human
gaugcaagcagcugcccagacaugug

SEQ ID NO: 430330 - RNA, 32 nt, Human
gaugcaagccacucgggaccugaugucggcag

SEQ ID NO: 430331 - RNA, 32 nt, Human
gaugcaagggaagccgagaaguugccgaaagg

SEQ ID NO: 430332 - RNA, 32 nt, Human
gaugcaauccagggugggauuucuugaggaag

SEQ ID NO: 430333 - RNA, 32 nt, Human
gaugcacaaccaagggguuacaggcaucgccc

SEQ ID NO: 430334 - RNA, 26 nt, Human
gaugcacacacgugcacaccuacaca

SEQ ID NO: 430335 - RNA, 32 nt, Human
gaugcacaccaccacacccagccuagaaugaa

SEQ ID NO: 430336 - RNA, 32 nt, Human
gaugcacaccuguaaucccagcuacucgggag

SEQ ID NO: 430337 - RNA, 32 nt, Human
gaugcacacgcaugcacacacgcacacaugca

SEQ ID NO: 430338 - RNA, 32 nt, Human
gaugcacagaugccauggccugugcugggcca

SEQ ID NO: 430339 - RNA, 32 nt, Human
gaugcacagcuaccuggugagcugugccaccc

SEQ ID NO: 430340 - RNA, 24 nt, Human
gaugcacagcugccuugugugcga

SEQ ID NO: 430341 - RNA, 19 nt, Human
gaugcacagguggcuccug

SEQ ID NO: 430342 - RNA, 32 nt, Human
gaugcacagucucccugcucaugcccuucagu

SEQ ID NO: 430343 - RNA, 32 nt, Human
gaugcacagugcaguagguuuugguaagugca

SEQ ID NO: 430344 - RNA, 32 nt, Human
gaugcacauaauccauuugcacugcagacaau

SEQ ID NO: 430345 - RNA, 32 nt, Human
gaugcacaucucauucugucaugaauguccag

SEQ ID NO: 430346 - RNA, 21 nt, Human
gaugcacaugcuuuuguguga

SEQ ID NO: 430347 - RNA, 32 nt, Human
gaugcaccaaaccaagugccucauuucugugc

SEQ ID NO: 430348 - RNA, 32 nt, Human
gaugcaccaaggccaggcuuaccgauggucug

SEQ ID NO: 430349 - RNA, 32 nt, Human
gaugcaccacugcaccccagccugggcgacgg

SEQ ID NO: 430350 - RNA, 32 nt, Human
gaugcaccagugccugugccauaaaguuccga

SEQ ID NO: 430351 - RNA, 17 nt, Human
gaugcaccucuggccuc

SEQ ID NO: 430352 - RNA, 32 nt, Human
gaugcaccuugaucucacccucacuccaaggc

SEQ ID NO: 430353 - RNA, 32 nt, Human
gaugcacgaacuuugaacauucguuaugggga

SEQ ID NO: 430354 - RNA, 32 nt, Human
gaugcacgccuguaaacccagcuacucgggag

SEQ ID NO: 430355 - RNA, 32 nt, Human
gaugcacguccucagagggagcagccuaucuc

SEQ ID NO: 430356 - RNA, 32 nt, Human
gaugcacuaccugaacacuccccugccaaaac

SEQ ID NO: 430357 - RNA, 32 nt, Human
gaugcacuguuccugcuguggguccucaucau

SEQ ID NO: 430358 - RNA, 32 nt, Human
gaugcagagagcuguggggcgaucuuucuuag

SEQ ID NO: 430359 - RNA, 32 nt, Human
gaugcagagauggagacaugagacucagugca

SEQ ID NO: 430360 - RNA, 19 nt, Human
gaugcagaggcuggggagu

SEQ ID NO: 430361 - RNA, 32 nt, Human
gaugcagaggggaauccgaggccaucaaccuu

SEQ ID NO: 430362 - RNA, 32 nt, Human
gaugcagagguggagguugaggccgugacucc

SEQ ID NO: 430363 - RNA, 32 nt, Human
gaugcagauuccagcauccccuccucagagau

SEQ ID NO: 430364 - RNA, 32 nt, Human
gaugcagcaagccucagggcuggggauuuuca

SEQ ID NO: 430365 - RNA, 32 nt, Human
gaugcagcacagacucagccuuggccuggagc

SEQ ID NO: 430366 - RNA, 32 nt, Human
gaugcagcaguuauugcaagaaaaugaaacua

SEQ ID NO: 430367 - RNA, 32 nt, Human
gaugcagcauuuugcugcuaccuuacaagcuu

SEQ ID NO: 430368 - RNA, 32 nt, Human
gaugcagccauggaaaaugucuuauaagcacc

SEQ ID NO: 430369 - RNA, 32 nt, Human
gaugcagcuuuaagaugguggggaggaugggg

SEQ ID NO: 430370 - RNA, 32 nt, Human
gaugcagcuuucuccuccgucuggucuccugu

SEQ ID NO: 430371 - RNA, 32 nt, Human
gaugcaggaugggaggacaggaaggcagccug

SEQ ID NO: 430372 - RNA, 32 nt, Human
gaugcaggcugguucaugccacuuuuucagag

SEQ ID NO: 430373 - RNA, 32 nt, Human
gaugcagggacugccuucuccuuccugcuuca

SEQ ID NO: 430374 - RNA, 32 nt, Human
gaugcagggaggaggaaggcugaggaaugacu

SEQ ID NO: 430375 - RNA, 32 nt, Human
gaugcagggcaggaccacccagcuggucagac

SEQ ID NO: 430376 - RNA, 32 nt, Human
gaugcagggcuggaggccagaggugucagcaa

SEQ ID NO: 430377 - RNA, 32 nt, Human
gaugcagggucugagucaggccuucugguuau

SEQ ID NO: 430378 - RNA, 32 nt, Human
gaugcaggucauuuugggggagggaggaagau

SEQ ID NO: 430379 - RNA, 32 nt, Human
gaugcaggucuaaugacugucuuuggaagagg

SEQ ID NO: 430380 - RNA, 18 nt, Human
gaugcagucuggggagug

SEQ ID NO: 430381 - RNA, 32 nt, Human
gaugcauauagacacacauacauaaugguacu

SEQ ID NO: 430382 - RNA, 32 nt, Human
gaugcaucaagaaaacccaagcugugaugcug

SEQ ID NO: 430383 - RNA, 32 nt, Human
gaugcauccuccccuucucuuuucuccacaug

SEQ ID NO: 430384 - RNA, 32 nt, Human
gaugcaucuguuucagcccuaaccccagugug

SEQ ID NO: 430385 - RNA, 32 nt, Human
gaugcaugaugaaaaccugagugaagaggcug

SEQ ID NO: 430386 - RNA, 32 nt, Human
gaugcaugccuguaaucccagcuacucgggag

SEQ ID NO: 430387 - RNA, 32 nt, Human
gaugcaugccuguggucccaguuacuugggag

SEQ ID NO: 430388 - RNA, 32 nt, Human
gaugcauggggguggcacugagcuaggcagag

SEQ ID NO: 430389 - RNA, 32 nt, Human
gaugcauguaugcacacacaugcgcgcacacg

SEQ ID NO: 430390 - RNA, 32 nt, Human
gaugcauguucugauugccucuuuggagaagc

SEQ ID NO: 430391 - RNA, 32 nt, Human
gaugccaaaauuagggucuugguaagaaauuu

SEQ ID NO: 430392 - RNA, 32 nt, Human
gaugccaaaggauuuuuggaagguaaagaagg

SEQ ID NO: 430393 - RNA, 32 nt, Human
gaugccaaauagaaaagaagcaaauggaggaa

SEQ ID NO: 430394 - RNA, 32 nt, Human
gaugccaaauauuuuugccagcacuuuuucag

SEQ ID NO: 430395 - RNA, 22 nt, Human
gaugccaaggggcugagugagu

SEQ ID NO: 430396 - RNA, 32 nt, Human
gaugccacaaagaaauccgacauaucagauag

SEQ ID NO: 430397 - RNA, 23 nt, Human
gaugccacagcaugaaccagaug

SEQ ID NO: 430398 - RNA, 16 nt, Human
gaugccacaggaugcc

SEQ ID NO: 430399 - RNA, 32 nt, Human
gaugccacauuuuucaugcagaaaagaaccac

SEQ ID NO: 430400 - RNA, 32 nt, Human
gaugccaccuucagauccuuuuauucuccaga

SEQ ID NO: 430401 - RNA, 32 nt, Human
gaugccacuaccccuugauuuuccaucuaaaa

SEQ ID NO: 430402 - RNA, 32 nt, Human
gaugccacugcacuccagccugggcuacagag

SEQ ID NO: 430403 - RNA, 32 nt, Human
gaugccagacuugccucacacccaggagcugc

SEQ ID NO: 430404 - RNA, 32 nt, Human
gaugccagagaaggcuugggaaauuguacuuc

SEQ ID NO: 430405 - RNA, 32 nt, Human
gaugccagaguccuugagcugucaguucccac

SEQ ID NO: 430406 - RNA, 32 nt, Human
gaugccagaucccaaguccacccuccccuuca

SEQ ID NO: 430407 - RNA, 32 nt, Human
gaugccagcacucaguuauccaagcaagaaau

SEQ ID NO: 430408 - RNA, 30 nt, Human
gaugccagccucucacugucuccugugcuu

SEQ ID NO: 430409 - RNA, 32 nt, Human
gaugccaggagcuuagggcuuugcauuguguc

SEQ ID NO: 430410 - RNA, 32 nt, Human
gaugccaggaguucaagaccagccugggcaac

SEQ ID NO: 430411 - RNA, 32 nt, Human
gaugccaggaguucgagaccagccuggccaac

SEQ ID NO: 430412 - RNA, 32 nt, Human
gaugccaggggaguuugccaaugaaguaaagg

SEQ ID NO: 430413 - RNA, 32 nt, Human
gaugccaucaaauacuuccuccugccagucau

SEQ ID NO: 430414 - RNA, 32 nt, Human
gaugccauggcagacaguagacagaacaacac

SEQ ID NO: 430415 - RNA, 32 nt, Human
gaugccaugugcuugcuggaggucccaggugc

SEQ ID NO: 430416 - RNA, 32 nt, Human
gaugccauuacagaaccaaaucauggcaggua

SEQ ID NO: 430417 - RNA, 32 nt, Human
gaugccauuacagaaccaaaucguggcacgua

SEQ ID NO: 430418 - RNA, 32 nt, Human
gaugccauugcacuccagccugggcaacaaga

SEQ ID NO: 430419 - RNA, 32 nt, Human
gaugccauugcacuccagccugggcaacagag

SEQ ID NO: 430420 - RNA, 32 nt, Human
gaugcccacugaggaaucaugaagcuuccuuu

SEQ ID NO: 430421 - RNA, 32 nt, Human
gaugcccacuucccuccacccccacaccccag

SEQ ID NO: 430422 - RNA, 23 nt, Human
gaugcccagagcaaccgcccaca

SEQ ID NO: 430423 - RNA, 32 nt, Human
gaugcccagcagcguggggagcuggccguuaa

SEQ ID NO: 430424 - RNA, 32 nt, Human
gaugcccaggcagaacacaaacaggaccaccu

SEQ ID NO: 430425 - RNA, 32 nt, Human
gaugccccacuggccucugccuugccuagguc

SEQ ID NO: 430426 - RNA, 30 nt, Human
gaugccccagcacaaucagagagaucguuu

SEQ ID NO: 430427 - RNA, 32 nt, Human
gaugcccccugccuucucugcuccccaucaug

SEQ ID NO: 430428 - RNA, 32 nt, Human
gaugcccccuguccaagccaucccacagcugg

SEQ ID NO: 430429 - RNA, 26 nt, Human
gaugccccucucugucuugagauccc

SEQ ID NO: 430430 - RNA, 32 nt, Human
gaugccccucugucugcugaaggaccuguugc

SEQ ID NO: 430431 - RNA, 32 nt, Human
gaugccccugauggccgcacagaaggacuucu

SEQ ID NO: 430432 - RNA, 32 nt, Human
gaugccccugcucccucuggguuccagcagag

SEQ ID NO: 430433 - RNA, 32 nt, Human
gaugcccgccacccugagcuccaggcugaagc

SEQ ID NO: 430434 - RNA, 32 nt, Human
gaugcccucaaaaggauaagacaugaguauaa

SEQ ID NO: 430435 - RNA, 32 nt, Human
gaugcccucagggcugcuguguggguguguua

SEQ ID NO: 430436 - RNA, 32 nt, Human
gaugcccucccaggaguggaggggcuggagag

SEQ ID NO: 430437 - RNA, 32 nt, Human
gaugcccuccucauccauuaccagcuucacaa

SEQ ID NO: 430438 - RNA, 32 nt, Human
gaugcccugaaagcuuccggaauugacuguga

SEQ ID NO: 430439 - RNA, 32 nt, Human
gaugcccuggugucuuucuccugggcuucuau

SEQ ID NO: 430440 - RNA, 32 nt, Human
gaugccgaggcaggaagaauugcuugaaccug

SEQ ID NO: 430441 - RNA, 32 nt, Human
gaugccgcaaccucgacuucucagccuccugg

SEQ ID NO: 430442 - RNA, 32 nt, Human
gaugccggcaggcagagcagcuacugacuuug

SEQ ID NO: 430443 - RNA, 32 nt, Human
gaugccggcaguuuaggauccaaagcuucucu

SEQ ID NO: 430444 - RNA, 32 nt, Human
gaugccggcugcagcaggggagauauggccag

SEQ ID NO: 430445 - RNA, 32 nt, Human
gaugccggggaccugggccgcgcugccaggac

SEQ ID NO: 430446 - RNA, 32 nt, Human
gaugccgguuggugucaaagauagagggcuuc

SEQ ID NO: 430447 - RNA, 32 nt, Human
gaugccgucagcugauacaaauggguaaccuu

SEQ ID NO: 430448 - RNA, 32 nt, Human
gaugccgucuaaggaaccaauguauucaguau

SEQ ID NO: 430449 - RNA, 32 nt, Human
gaugccgugaucuccagcgccggccuccucag

SEQ ID NO: 430450 - RNA, 32 nt, Human
gaugccguuuggcugugucuccacccaaaucu

SEQ ID NO: 430451 - RNA, 32 nt, Human
gaugccuagaggcugaaggacagggaacucuc

SEQ ID NO: 430452 - RNA, 32 nt, Human
gaugccuaugucugugcuucauuggcgucauc

SEQ ID NO: 430453 - RNA, 32 nt, Human
gaugccucaacauuuugagcugcucugucgga

SEQ ID NO: 430454 - RNA, 32 nt, Human
gaugccuccguccuccccaaccccaugacccc

SEQ ID NO: 430455 - RNA, 32 nt, Human
gaugccucucccacccuuaccuccaucucaca

SEQ ID NO: 430456 - RNA, 32 nt, Human
gaugccucuccucuucuuguucugcuguugcu

SEQ ID NO: 430457 - RNA, 32 nt, Human
gaugccucugcagccacaauucugaccuaagu

SEQ ID NO: 430458 - RNA, 26 nt, Human
gaugccucuggagguggugguggagc

SEQ ID NO: 430459 - RNA, 32 nt, Human
gaugccucugguguguugcugugugacaucuc

SEQ ID NO: 430460 - RNA, 32 nt, Human
gaugccugaggccacaucugaacagaccuguc

SEQ ID NO: 430461 - RNA, 32 nt, Human
gaugccugcccuccaggauggcugguuuaguc

SEQ ID NO: 430462 - RNA, 32 nt, Human
gaugccugcugcugaagagcugcucacaggag

SEQ ID NO: 430463 - RNA, 32 nt, Human
gaugccugcuucugaacaauuuuaccuccuga

SEQ ID NO: 430464 - RNA, 26 nt, Human
gaugccuggacccagaguguggggga

SEQ ID NO: 430465 - RNA, 32 nt, Human
gaugccuggagccacagcagccacuuugcuac

SEQ ID NO: 430466 - RNA, 32 nt, Human
gaugccuggagcuguggccugagggccugcug

SEQ ID NO: 430467 - RNA, 32 nt, Human
gaugccugggcgucaccaugccacagcuaccc

SEQ ID NO: 430468 - RNA, 32 nt, Human
gaugccugggcgugagggagugcaaggcaccc

SEQ ID NO: 430469 - RNA, 32 nt, Human
gaugccugggcugacugggcagaggaaccucu

SEQ ID NO: 430470 - RNA, 32 nt, Human
gaugccuggggccugccagcugugcugcaaag

SEQ ID NO: 430471 - RNA, 32 nt, Human
gaugccuggggcugcaggauccuaguugguuc

SEQ ID NO: 430472 - RNA, 32 nt, Human
gaugccuguaaucccagcuacuugggaggcug

SEQ ID NO: 430473 - RNA, 32 nt, Human
gaugccuguagucccagcuacuugugaggcug

SEQ ID NO: 430474 - RNA, 26 nt, Human
gaugccugucucaaaaacaguguggg

SEQ ID NO: 430475 - RNA, 32 nt, Human
gaugccugugggcauggcuuucucuggggacc

SEQ ID NO: 430476 - RNA, 32 nt, Human
gaugccugugguuccagcuauucgggaggcug

SEQ ID NO: 430477 - RNA, 32 nt, Human
gaugccuguugcaaaguggaccauggucuagc

SEQ ID NO: 430478 - RNA, 32 nt, Human
gaugccuuccacaucagccucugagggcuggg

SEQ ID NO: 430479 - RNA, 32 nt, Human
gaugccuucccaaacuccccaucugaagcugg

SEQ ID NO: 430480 - RNA, 32 nt, Human
gaugccuuccuggaaguucagugagggaaagu

SEQ ID NO: 430481 - RNA, 21 nt, Human
gaugccuucuuuggggcucug

SEQ ID NO: 430482 - RNA, 32 nt, Human
gaugccuuugccagauaaaccccaggcucaug

SEQ ID NO: 430483 - RNA, 32 nt, Human
gaugccuuuggcaauucuucuucucaagcacu

SEQ ID NO: 430484 - RNA, 32 nt, Human
gaugcgaagaacccugcugcugugcugccccu

SEQ ID NO: 430485 - RNA, 32 nt, Human
gaugcgagaaggcagaggaggagggagggagg

SEQ ID NO: 430486 - RNA, 32 nt, Human
gaugcgccacugcacuccagccugggcgacag

SEQ ID NO: 430487 - RNA, 23 nt, Human
gaugcgccgcgggaccccugucc

SEQ ID NO: 430488 - RNA, 32 nt, Human
gaugcgcgcugcggcccagggugcgggucugg

SEQ ID NO: 430489 - RNA, 32 nt, Human
gaugcgcugggcggagggugcaggggagggca

SEQ ID NO: 430490 - RNA, 32 nt, Human
gaugcggaaagggucagagcagggcucggcgu

SEQ ID NO: 430491 - RNA, 32 nt, Human
gaugcggacuccugggucccuggccaagaagc

SEQ ID NO: 430492 - RNA, 32 nt, Human
gaugcggccguggcugucucaggcuccaggac

SEQ ID NO: 430493 - RNA, 32 nt, Human
gaugcgggaaccuggucccagcuugaguuccu

SEQ ID NO: 430494 - RNA, 20 nt, Human
gaugcgggacugcuggcaug

SEQ ID NO: 430495 - RNA, 32 nt, Human
gaugcgggagggugcaccugucccgggcgccg

SEQ ID NO: 430496 - RNA, 32 nt, Human
gaugcggggugaggcccgagcgcucacacuuc

SEQ ID NO: 430497 - RNA, 31 nt, Human
gaugcgggugagagacauggaggacugguca

SEQ ID NO: 430498 - RNA, 32 nt, Human
gaugcgugccuguaaucccagcuacccaggaa

SEQ ID NO: 430499 - RNA, 32 nt, Human
gaugcguucagcagacugguuugcagugaauu

SEQ ID NO: 430500 - RNA, 32 nt, Human
gaugcuacauaggauucugguauuccacaucc

SEQ ID NO: 430501 - RNA, 32 nt, Human
gaugcuaccaugccucuccaacaucuucaacc

SEQ ID NO: 430502 - RNA, 32 nt, Human
gaugcuacgugauuuccucuggcuuccaaccc

SEQ ID NO: 430503 - RNA, 32 nt, Human
gaugcuacuauuuccaaaaugucaacaacacu

SEQ ID NO: 430504 - RNA, 32 nt, Human
gaugcuagaagagcugaacaaacagaucgagg

SEQ ID NO: 430505 - RNA, 32 nt, Human
gaugcucaaauccuaaggugccaagcucuagg

SEQ ID NO: 430506 - RNA, 32 nt, Human
gaugcucaauccaagacaugcaucagggcggu

SEQ ID NO: 430507 - RNA, 20 nt, Human
gaugcucacagggcccccag

SEQ ID NO: 430508 - RNA, 32 nt, Human
gaugcucacgcugggcccucugccugggacgc

SEQ ID NO: 430509 - RNA, 32 nt, Human
gaugcucacuuggccuuucccugcaggaugag

SEQ ID NO: 430510 - RNA, 32 nt, Human
gaugcucagacucccugauaccaccuuuccug

SEQ ID NO: 430511 - RNA, 32 nt, Human
gaugcucagauagcugguaaaauauuauuucu

SEQ ID NO: 430512 - RNA, 32 nt, Human
gaugcucagcagcccugggguggcggccgcug

SEQ ID NO: 430513 - RNA, 32 nt, Human
gaugcucauagagaacaaguggcuggggccag

SEQ ID NO: 430514 - RNA, 32 nt, Human
gaugcucaucuucucaaccucuacccagggca

SEQ ID NO: 430515 - RNA, 32 nt, Human
gaugcucaugcaccugugcacacucacaucca

SEQ ID NO: 430516 - RNA, 24 nt, Human
gaugcuccagccaaccccugugga

SEQ ID NO: 430517 - RNA, 32 nt, Human
gaugcucccuuuucucuucucucuccuccugg

SEQ ID NO: 430518 - RNA, 32 nt, Human
gaugcuccuagaggugguucaugaggaaugga

SEQ ID NO: 430519 - RNA, 32 nt, Human
gaugcuccuuucucccaugcauugagcuccca

SEQ ID NO: 430520 - RNA, 32 nt, Human
gaugcucgauuuccucugccucucucuuugcu

SEQ ID NO: 430521 - RNA, 32 nt, Human
gaugcucggccugcugcugcucugcaccccca

SEQ ID NO: 430522 - RNA, 32 nt, Human
gaugcucucaguuucucugccuucccuaucag

SEQ ID NO: 430523 - RNA, 32 nt, Human
gaugcucucccucccuucaucauccgcccucc

SEQ ID NO: 430524 - RNA, 32 nt, Human
gaugcucuggcccuccccaauacgcugcuucg

SEQ ID NO: 430525 - RNA, 32 nt, Human
gaugcucuguuggggugggugagcagaguuca

SEQ ID NO: 430526 - RNA, 32 nt, Human
gaugcucuuccagagaccaccuucccagcucu

SEQ ID NO: 430527 - RNA, 32 nt, Human
gaugcucuucugcuuuguuuuauucuaaauug

SEQ ID NO: 430528 - RNA, 32 nt, Human
gaugcucuuguuuauucugggcucagacccuc

SEQ ID NO: 430529 - RNA, 32 nt, Human
gaugcugaaagcagauuucuucuugauuucac

SEQ ID NO: 430530 - RNA, 32 nt, Human
gaugcugaaagccauaguuucauggcaggcuu

SEQ ID NO: 430531 - RNA, 32 nt, Human
gaugcugaaggcagagcagcugagggaggggc

SEQ ID NO: 430532 - RNA, 32 nt, Human
gaugcugaaggugagaggaaauguugacuggc

SEQ ID NO: 430533 - RNA, 32 nt, Human
gaugcugacaugagccucagagaccccaaucc

SEQ ID NO: 430534 - RNA, 32 nt, Human
gaugcugagaguugguggaggggccaggcugg

SEQ ID NO: 430535 - RNA, 32 nt, Human
gaugcugagauucuucaggcuuccugcaauuu

SEQ ID NO: 430536 - RNA, 32 nt, Human
gaugcugagcacagccccacagagucagguga

SEQ ID NO: 430537 - RNA, 32 nt, Human
gaugcugagcagggguugggauaucaaagaau

SEQ ID NO: 430538 - RNA, 32 nt, Human
gaugcugaggccacagcuggugaacagcucag

SEQ ID NO: 430539 - RNA, 32 nt, Human
gaugcugagggcauggggccaggaccagggga

SEQ ID NO: 430540 - RNA, 32 nt, Human
gaugcugaggugggagaaucaccugagccugg

SEQ ID NO: 430541 - RNA, 32 nt, Human
gaugcugaguccaggaggugaugagcaagugu

SEQ ID NO: 430542 - RNA, 32 nt, Human
gaugcugaucacucaaauaaugcuuuuaagcu

SEQ ID NO: 430543 - RNA, 32 nt, Human
gaugcugauccaguugaauuauuugaaauucc

SEQ ID NO: 430544 - RNA, 20 nt, Human
gaugcugaucgggccaggga

SEQ ID NO: 430545 - RNA, 32 nt, Human
gaugcugaucgggccagggacaggcuugccca

SEQ ID NO: 430546 - RNA, 32 nt, Human
gaugcugaugcugcuggcccugggacugcacu

SEQ ID NO: 430547 - RNA, 32 nt, Human
gaugcugauggguuggagugccuaauggcuca

SEQ ID NO: 430548 - RNA, 32 nt, Human
gaugcugcagaacugccaccuccuggucaagu

SEQ ID NO: 430549 - RNA, 32 nt, Human
gaugcugcagauggaauagggcccugccuugc

SEQ ID NO: 430550 - RNA, 32 nt, Human
gaugcugcagggaaaauuguuuugaagcuggc

SEQ ID NO: 430551 - RNA, 32 nt, Human
gaugcugcaguccaggucugaggucccgcugg

SEQ ID NO: 430552 - RNA, 32 nt, Human
gaugcugcagugagcagugauugcaccacugc

SEQ ID NO: 430553 - RNA, 32 nt, Human
gaugcugcagugagcuaugguagcaccacugc

SEQ ID NO: 430554 - RNA, 32 nt, Human
gaugcugcaguuccaaaagagaaggacucuuc

SEQ ID NO: 430555 - RNA, 32 nt, Human
gaugcugccaaaacaagucuagcagggaaaac

SEQ ID NO: 430556 - RNA, 32 nt, Human
gaugcugccccugggaaaucccagaagaggaa

SEQ ID NO: 430557 - RNA, 32 nt, Human
gaugcugcccuaucaauuaauuuugguuuauu

SEQ ID NO: 430558 - RNA, 32 nt, Human
gaugcugccucaucuuccucaguuucaucccc

SEQ ID NO: 430559 - RNA, 32 nt, Human
gaugcugccuccacuuuccauccugucugggu

SEQ ID NO: 430560 - RNA, 30 nt, Human
gaugcugccuccuccaugcucuugagcagg

SEQ ID NO: 430561 - RNA, 23 nt, Human
gaugcugcuaucucaaccagaug

SEQ ID NO: 430562 - RNA, 32 nt, Human
gaugcugcuaucucaaccagaugcccaggaca

SEQ ID NO: 430563 - RNA, 32 nt, Human
gaugcugcuaugaacauauuucuacaagauuu

SEQ ID NO: 430564 - RNA, 26 nt, Human
gaugcugcugacggggaagcuguggg

SEQ ID NO: 430565 - RNA, 32 nt, Human
gaugcuggacuucuagcuuagugagaaugcag

SEQ ID NO: 430566 - RNA, 32 nt, Human
gaugcuggaguccagcccugccucucugcgga

SEQ ID NO: 430567 - RNA, 32 nt, Human
gaugcuggagugaaaggaagggagaaagggaa

SEQ ID NO: 430568 - RNA, 32 nt, Human
gaugcuggcaccgcaugugcucuguuuauucu

SEQ ID NO: 430569 - RNA, 32 nt, Human
gaugcuggcaguuuccagcagggaggcauucg

SEQ ID NO: 430570 - RNA, 32 nt, Human
gaugcuggcuuggaggccgggugcaguggcuc

SEQ ID NO: 430571 - RNA, 32 nt, Human
gaugcugggauuauaggugugagccaccgugc

SEQ ID NO: 430572 - RNA, 32 nt, Human
gaugcugggauuuacacuugaggcuuagcuuu

SEQ ID NO: 430573 - RNA, 32 nt, Human
gaugcugggcugggacauggcauccugcaugc

SEQ ID NO: 430574 - RNA, 32 nt, Human
gaugcugggcuucauaccugggugaugagaug

SEQ ID NO: 430575 - RNA, 32 nt, Human
gaugcuggggagccccucacugcccugaccga

SEQ ID NO: 430576 - RNA, 32 nt, Human
gaugcuggggagguguuugugauucuugacaa

SEQ ID NO: 430577 - RNA, 32 nt, Human
gaugcuggggaugccagagcaagacucaaaga

SEQ ID NO: 430578 - RNA, 32 nt, Human
gaugcugggggaggcagcugggaugggagcca

SEQ ID NO: 430579 - RNA, 32 nt, Human
gaugcuggggguguggggguuggaagcugucu

SEQ ID NO: 430580 - RNA, 32 nt, Human
gaugcugggugaggaccaaggaccuggcuggu

SEQ ID NO: 430581 - RNA, 32 nt, Human
gaugcuggguuaugagaaccagcgaaaucccc

SEQ ID NO: 430582 - RNA, 32 nt, Human
gaugcugguauucuccucuuuaccugguaggg

SEQ ID NO: 430583 - RNA, 32 nt, Human
gaugcuggucagacccagagguugucaggagg

SEQ ID NO: 430584 - RNA, 32 nt, Human
gaugcugguggaggaagggcugggccaccagg

SEQ ID NO: 430585 - RNA, 32 nt, Human
gaugcuggugggauggacaugguucuggaucu

SEQ ID NO: 430586 - RNA, 32 nt, Human
gaugcuggugggcauuugaacaugcuccucca

SEQ ID NO: 430587 - RNA, 32 nt, Human
gaugcuguacccaugacaaagacagagucuua

SEQ ID NO: 430588 - RNA, 32 nt, Human
gaugcuguccugagaauaacuugcugucccgg

SEQ ID NO: 430589 - RNA, 32 nt, Human
gaugcugugaugaauacccuccuucacguucu

SEQ ID NO: 430590 - RNA, 32 nt, Human
gaugcugugccauuguguaugucugcagauuu

SEQ ID NO: 430591 - RNA, 32 nt, Human
gaugcugugccucccaagcucagagcagccuc

SEQ ID NO: 430592 - RNA, 32 nt, Human
gaugcugugccuggccuccgaugccuggccug

SEQ ID NO: 430593 - RNA, 32 nt, Human
gaugcugugcugcgcccugccucggccuugcg

SEQ ID NO: 430594 - RNA, 32 nt, Human
gaugcuuaaaugcagaguuuggaaaagauggg

SEQ ID NO: 430595 - RNA, 32 nt, Human
gaugcuuagaggcuucucaccagagauuggug

SEQ ID NO: 430596 - RNA, 32 nt, Human
gaugcuuauaccaaauagggcaugugcgcugg

SEQ ID NO: 430597 - RNA, 32 nt, Human
gaugcuuaugguguuuugaggcaucccuccaa

SEQ ID NO: 430598 - RNA, 32 nt, Human
gaugcuucagggacauggugccugcucuggag

SEQ ID NO: 430599 - RNA, 32 nt, Human
gaugcuucauccaggucuccuacuaccacugc

SEQ ID NO: 430600 - RNA, 32 nt, Human
gaugcuuccaaaguucacacugggugcacuug

SEQ ID NO: 430601 - RNA, 20 nt, Human
gaugcuuccugcccuugaac

SEQ ID NO: 430602 - RNA, 32 nt, Human
gaugcuucugcucucccugcucuggcauccug

SEQ ID NO: 430603 - RNA, 32 nt, Human
gaugcuucugggagacaccaaagggugaagcu

SEQ ID NO: 430604 - RNA, 32 nt, Human
gaugcuugcaccauuagacccagaggcuuccu

SEQ ID NO: 430605 - RNA, 32 nt, Human
gaugcuugcuaccuccaggugagcuuccaggg

SEQ ID NO: 430606 - RNA, 32 nt, Human
gaugcuuggaugacagaugagaggggauggcu

SEQ ID NO: 430607 - RNA, 32 nt, Human
gaugcuuggcucccucugcugaucucagaguu

SEQ ID NO: 430608 - RNA, 32 nt, Human
gaugcuuggcucccucugcugaucucaguuuc

SEQ ID NO: 430609 - RNA, 32 nt, Human
gaugcuugggaaccuuggguucuuagguuugg

SEQ ID NO: 430610 - RNA, 32 nt, Human
gaugcuugguguggggaucugggugaaggggg

SEQ ID NO: 430611 - RNA, 24 nt, Human
gaugcuugugucucuaccagcugu

SEQ ID NO: 430612 - RNA, 28 nt, Human
gaugcuuuccccaaacucccugaagaug

SEQ ID NO: 430613 - RNA, 32 nt, Human
gaugcuuuccccucaaauaaaacaucugcauu

SEQ ID NO: 430614 - RNA, 32 nt, Human
gaugcuuucucucaucaagacuuugcagcauu

SEQ ID NO: 430615 - RNA, 32 nt, Human
gaugcuuucugauuuuccucucccaggucacu

SEQ ID NO: 430616 - RNA, 32 nt, Human
gaugcuuugcagcaacgcccuaggguuugcag

SEQ ID NO: 430617 - RNA, 32 nt, Human
gaugcuuuugaguuggcagcaggacagggauc

SEQ ID NO: 430618 - RNA, 32 nt, Human
gaugcuuuugcaccuuugacugaugccaagac

SEQ ID NO: 430619 - RNA, 26 nt, Human
gaugcuuuugcagucaugcagcaagg

SEQ ID NO: 430620 - RNA, 32 nt, Human
gaugcuuuugucgcauuuugcuucacugugag

SEQ ID NO: 430621 - RNA, 32 nt, Human
gaugcuuuuucccugcccaacccuguggccuu

SEQ ID NO: 430622 - RNA, 32 nt, Human
gauggaaaaacauguaagacaaacuaaagaca

SEQ ID NO: 430623 - RNA, 24 nt, Human
gauggaaaaacugaggcuuagaga

SEQ ID NO: 430624 - RNA, 32 nt, Human
gauggaaaagcugaggcauagagaggugacgg

SEQ ID NO: 430625 - RNA, 32 nt, Human
gauggaaagagcaagaaaauugugucagugcu

SEQ ID NO: 430626 - RNA, 32 nt, Human
gauggaaaggcugaggcauagagaggugacgg

SEQ ID NO: 430627 - RNA, 32 nt, Human
gauggaaauaagagggugccugauaaauggag

SEQ ID NO: 430628 - RNA, 22 nt, Human
gauggaaaucuggauccacaca

SEQ ID NO: 430629 - RNA, 24 nt, Human
gauggaaaucuuauuacuaccaca

SEQ ID NO: 430630 - RNA, 32 nt, Human
gauggaaaugggagaugggagcuguuuuguca

SEQ ID NO: 430631 - RNA, 32 nt, Human
gauggaacagaggaggugugagcagcugaagg

SEQ ID NO: 430632 - RNA, 32 nt, Human
gauggaacagcaucugaagauggccgggugag

SEQ ID NO: 430633 - RNA, 32 nt, Human
gauggaacgacaucuaaaucugugauaaagca

SEQ ID NO: 430634 - RNA, 32 nt, Human
gauggaacuaauucuucugugcccagauccua

SEQ ID NO: 430635 - RNA, 32 nt, Human
gauggaacuccacccuuucuuguuuuaaguau

SEQ ID NO: 430636 - RNA, 32 nt, Human
gauggaacucggccucauccccgaggccccag

SEQ ID NO: 430637 - RNA, 32 nt, Human
gauggaacugauuugaggcuaaacuggauuag

SEQ ID NO: 430638 - RNA, 32 nt, Human
gauggaacuucaggucuuaagugcaaaucaaa

SEQ ID NO: 430639 - RNA, 32 nt, Human
gauggaagaggaggaggaggaggagcuggagg

SEQ ID NO: 430640 - RNA, 32 nt, Human
gauggaagcaggcagagccuggugggugauuc

SEQ ID NO: 430641 - RNA, 32 nt, Human
gauggaagcagggggacacaacagaaaugaaa

SEQ ID NO: 430642 - RNA, 32 nt, Human
gauggaagccugagcaagucaccugguuauug

SEQ ID NO: 430643 - RNA, 32 nt, Human
gauggaaggaagacuggguugcagggacugug

SEQ ID NO: 430644 - RNA, 32 nt, Human
gauggaaggaagagaguagggccagugaaggc

SEQ ID NO: 430645 - RNA, 32 nt, Human
gauggaaggaaggcuauuacauuauuuccgaa

SEQ ID NO: 430646 - RNA, 32 nt, Human
gauggaaggaagggaggaaggaaaggaggaga

SEQ ID NO: 430647 - RNA, 32 nt, Human
gauggaaggauggagaaaaacagacuguggga

SEQ ID NO: 430648 - RNA, 18 nt, Human
gauggaaggcuggagaga

SEQ ID NO: 430649 - RNA, 32 nt, Human
gauggaagguggccuuucucccaagcuggugg

SEQ ID NO: 430650 - RNA, 31 nt, Human
gauggaagguuggauggauggguggauggcc

SEQ ID NO: 430651 - RNA, 32 nt, Human
gauggaauaaaacauaugaaguagaaggacug

SEQ ID NO: 430652 - RNA, 32 nt, Human
gauggaauauccaggggaagacgucuaaggag

SEQ ID NO: 430653 - RNA, 32 nt, Human
gauggaaucucuagcuauuuuaucagcuaaga

SEQ ID NO: 430654 - RNA, 32 nt, Human
gauggaaucucuuuggggcuaagagaaagguu

SEQ ID NO: 430655 - RNA, 32 nt, Human
gauggaaucugccagaacauuuucaucuuauu

SEQ ID NO: 430656 - RNA, 32 nt, Human
gauggaauuucacucuuguugccuagcuggag

SEQ ID NO: 430657 - RNA, 26 nt, Human
gauggacaacagcaacuggaccagug

SEQ ID NO: 430658 - RNA, 32 nt, Human
gauggacacuuuucagaagucacugcaguauu

SEQ ID NO: 430659 - RNA, 32 nt, Human
gauggacagacaccucccccuacccauauccc

SEQ ID NO: 430660 - RNA, 32 nt, Human
gauggacagacagacaccacagccuccccuuc

SEQ ID NO: 430661 - RNA, 32 nt, Human
gauggacagcaggcucugccuucuggaggcgg

SEQ ID NO: 430662 - RNA, 32 nt, Human
gauggacaggaaagggcaaaguagggcgugug

SEQ ID NO: 430663 - RNA, 32 nt, Human
gauggacaguaucagucuugaucuaaauugua

SEQ ID NO: 430664 - RNA, 32 nt, Human
gauggacagugaucauuagaaacugaauuuug

SEQ ID NO: 430665 - RNA, 32 nt, Human
gauggacaucucuccgaugaccagcuucuuuu

SEQ ID NO: 430666 - RNA, 32 nt, Human
gauggacauuaguugaaccccuucagugucua

SEQ ID NO: 430667 - RNA, 23 nt, Human
gauggaccaaguggggccgggga

SEQ ID NO: 430668 - RNA, 32 nt, Human
gauggaccaggauaauucaggcaagguuaccu

SEQ ID NO: 430669 - RNA, 17 nt, Human
gauggacccaggaggga

SEQ ID NO: 430670 - RNA, 32 nt, Human
gauggacccaggagggagggcagcugaguaac

SEQ ID NO: 430671 - RNA, 32 nt, Human
gauggaccccguggaaagauucagagacugcg

SEQ ID NO: 430672 - RNA, 26 nt, Human
gauggaccugagucagccgaauccua

SEQ ID NO: 430673 - RNA, 32 nt, Human
gauggacgcaaucuuaagccacccuggccuug

SEQ ID NO: 430674 - RNA, 32 nt, Human
gauggacgccuucagccccaggcacccagcug

SEQ ID NO: 430675 - RNA, 32 nt, Human
gauggacuagccccugcuccagcccaguucuc

SEQ ID NO: 430676 - RNA, 32 nt, Human
gauggacuccacccuuuacuaccuugaacuuc

SEQ ID NO: 430677 - RNA, 32 nt, Human
gauggacugcaaccuuaauuuacuugccggag

SEQ ID NO: 430678 - RNA, 32 nt, Human
gauggacugggacucauaaucccuggguuuug

SEQ ID NO: 430679 - RNA, 22 nt, Human
gauggacuugcccacaccucca

SEQ ID NO: 430680 - RNA, 32 nt, Human
gauggacuugcccacaccuccaccuccccuga

SEQ ID NO: 430681 - RNA, 32 nt, Human
gauggagaaaggcaaagucagauggaggauag

SEQ ID NO: 430682 - RNA, 32 nt, Human
gauggagaaaugaauuucuucccacugaagga

SEQ ID NO: 430683 - RNA, 26 nt, Human
gauggagaacgacccccaggaggcgg

SEQ ID NO: 430684 - RNA, 32 nt, Human
gauggagaaggggagagcaucuaggcaggcaa

SEQ ID NO: 430685 - RNA, 26 nt, Human
gauggagaaguuagaaguuuuagagg

SEQ ID NO: 430686 - RNA, 32 nt, Human
gauggagaauguuucuugcaugaguuauaccu

SEQ ID NO: 430687 - RNA, 32 nt, Human
gauggagaccaugucugugccaucucuguuuc

SEQ ID NO: 430688 - RNA, 32 nt, Human
gauggagacccagcagagggaggcagaagggc

SEQ ID NO: 430689 - RNA, 21 nt, Human
gauggagacucuuaagcaaag

SEQ ID NO: 430690 - RNA, 20 nt, Human
gauggagagaccaccuucac

SEQ ID NO: 430691 - RNA, 32 nt, Human
gauggagagccagccaguggggcugucagcag

SEQ ID NO: 430692 - RNA, 32 nt, Human
gauggagaggagaucagagagagugcugguuc

SEQ ID NO: 430693 - RNA, 32 nt, Human
gauggagaggggaggggagggugcaggcaucu

SEQ ID NO: 430694 - RNA, 32 nt, Human
gauggagagguggcucugagauuagcaucccc

SEQ ID NO: 430695 - RNA, 32 nt, Human
gauggagagguuaaagauuauggggaagaaga

SEQ ID NO: 430696 - RNA, 32 nt, Human
gauggagauccggcagcacgaguggcucucgg

SEQ ID NO: 430697 - RNA, 32 nt, Human
gauggagaugagagagggugagagauggaggg

SEQ ID NO: 430698 - RNA, 32 nt, Human
gauggagauggaggggaaggaggaugcccuuu

SEQ ID NO: 430699 - RNA, 32 nt, Human
gauggagaugggcuucccauugauuacaagcu

SEQ ID NO: 430700 - RNA, 32 nt, Human
gauggagcaaggcaugucugcacagggccuag

SEQ ID NO: 430701 - RNA, 32 nt, Human
gauggagcagaacauggagaggaagauuucau

SEQ ID NO: 430702 - RNA, 32 nt, Human
gauggagcagaggagcgccacacauggaggaa

SEQ ID NO: 430703 - RNA, 32 nt, Human
gauggagcagcccagugucuggggcaaagucc

SEQ ID NO: 430704 - RNA, 32 nt, Human
gauggagcagguggaggugcagaggggauuuc

SEQ ID NO: 430705 - RNA, 32 nt, Human
gauggagccacugcacuccagcccaggugaca

SEQ ID NO: 430706 - RNA, 32 nt, Human
gauggagccacugcacuccagccugggcgaca

SEQ ID NO: 430707 - RNA, 32 nt, Human
gauggagccacugcacuccagccugggggaaa

SEQ ID NO: 430708 - RNA, 32 nt, Human
gauggagccagcacagcacucauugcaguugu

SEQ ID NO: 430709 - RNA, 26 nt, Human
gauggagccagcacccucagagguuc

SEQ ID NO: 430710 - RNA, 32 nt, Human
gauggagcccuagggagccccugugcugcccc

SEQ ID NO: 430711 - RNA, 32 nt, Human
gauggagccuggggcugccuggccacugagca

SEQ ID NO: 430712 - RNA, 32 nt, Human
gauggaggaaaaagaacaaaauaaccuaguuc

SEQ ID NO: 430713 - RNA, 32 nt, Human
gauggaggacagacugcaggaacuuggcccau

SEQ ID NO: 430714 - RNA, 32 nt, Human
gauggaggacaggacaggauggcuggaggggc

SEQ ID NO: 430715 - RNA, 32 nt, Human
gauggaggagagaaaggcagccaggacagagc

SEQ ID NO: 430716 - RNA, 32 nt, Human
gauggaggaucucgugugccuauuggcugucc

SEQ ID NO: 430717 - RNA, 32 nt, Human
gauggaggcaguggcuggagugaaugaacggc

SEQ ID NO: 430718 - RNA, 32 nt, Human
gauggaggccugacgucccuggaguugaaagc

SEQ ID NO: 430719 - RNA, 22 nt, Human
gauggaggcugaggcucagaga

SEQ ID NO: 430720 - RNA, 32 nt, Human
gauggaggcugugcccagagccccaggaaaau

SEQ ID NO: 430721 - RNA, 32 nt, Human
gauggaggcuugguaggguggcugguuuguaa

SEQ ID NO: 430722 - RNA, 32 nt, Human
gauggagggaggcagaguaacagcgaagaggg

SEQ ID NO: 430723 - RNA, 32 nt, Human
gauggagggauggggcucucuccugggauggg

SEQ ID NO: 430724 - RNA, 21 nt, Human
gauggagggcccagcauggga

SEQ ID NO: 430725 - RNA, 32 nt, Human
gauggagguuacuggggaaacagcucagcaga

SEQ ID NO: 430726 - RNA, 32 nt, Human
gauggagguugcagagagccaagaucauauca

SEQ ID NO: 430727 - RNA, 32 nt, Human
gauggagucagguuugggguucguggaaaggg

SEQ ID NO: 430728 - RNA, 32 nt, Human
gauggagucccuucgcugguaggcccuucuuc

SEQ ID NO: 430729 - RNA, 18 nt, Human
gauggagucucacucugu

SEQ ID NO: 430730 - RNA, 18 nt, Human
gauggagucucgcucugu

SEQ ID NO: 430731 - RNA, 32 nt, Human
gauggagucucgcucugucucccaggcuggag

SEQ ID NO: 430732 - RNA, 32 nt, Human
gauggagucucucugcacuccagccuggguga

SEQ ID NO: 430733 - RNA, 32 nt, Human
gauggagucuggcucugucucccaggcuggag

SEQ ID NO: 430734 - RNA, 32 nt, Human
gauggagucuugcccugucacccaggcuggag

SEQ ID NO: 430735 - RNA, 32 nt, Human
gauggagucuugcucugucucccaggcuagag

SEQ ID NO: 430736 - RNA, 32 nt, Human
gauggagucuugcuguugucgccuaggcugga

SEQ ID NO: 430737 - RNA, 32 nt, Human
gauggagugaaauccccaggagaugcagaagg

SEQ ID NO: 430738 - RNA, 32 nt, Human
gauggagugagccacaggaaguuuggggcgug

SEQ ID NO: 430739 - RNA, 32 nt, Human
gauggagugcaguggugagaucacggcucauu

SEQ ID NO: 430740 - RNA, 32 nt, Human
gauggaguuccuucuggugucagccccacagg

SEQ ID NO: 430741 - RNA, 32 nt, Human
gauggaguuggucaaaugagggaacaucuggg

SEQ ID NO: 430742 - RNA, 32 nt, Human
gauggaguuguuuuccccagauaugggguucu

SEQ ID NO: 430743 - RNA, 32 nt, Human
gauggaguuuccucucauagugauuugccaca

SEQ ID NO: 430744 - RNA, 32 nt, Human
gauggauaagugagagagagucagguugcaug

SEQ ID NO: 430745 - RNA, 32 nt, Human
gauggauagaccauugggagggcggagcccgc

SEQ ID NO: 430746 - RNA, 32 nt, Human
gauggauaguuuccagaauuugcccauuucca

SEQ ID NO: 430747 - RNA, 22 nt, Human
gauggauauuggauuugucuaa

SEQ ID NO: 430748 - RNA, 28 nt, Human
gauggaucaagugcuguuacagcucaug

SEQ ID NO: 430749 - RNA, 32 nt, Human
gauggaucacaaggucaggagaucgagaccau

SEQ ID NO: 430750 - RNA, 32 nt, Human
gauggaucacacuagcuacucugacccaugga

SEQ ID NO: 430751 - RNA, 32 nt, Human
gauggaucacuugaggccaggaguucgagacc

SEQ ID NO: 430752 - RNA, 32 nt, Human
gauggaucaucugagccucaggagguugaggc

SEQ ID NO: 430753 - RNA, 26 nt, Human
gauggaucccaaggggcuccucuccu

SEQ ID NO: 430754 - RNA, 32 nt, Human
gauggaucuuucucaggacuggcaguuacccg

SEQ ID NO: 430755 - RNA, 17 nt, Human
gauggaugaucugugaa

SEQ ID NO: 430756 - RNA, 32 nt, Human
gauggaugcaucucucaugguugagaaguggu

SEQ ID NO: 430757 - RNA, 32 nt, Human
gauggauggaaagggagggaaagacaagaugc

SEQ ID NO: 430758 - RNA, 32 nt, Human
gauggauggauggauggauguuggugaaaauu

SEQ ID NO: 430759 - RNA, 29 nt, Human
gauggauggcugcuggaaaccccuugcca

SEQ ID NO: 430760 - RNA, 32 nt, Human
gauggaugggacggacauguggagaggguggg

SEQ ID NO: 430761 - RNA, 31 nt, Human
gauggauggguggauggaggguggcaggugg

SEQ ID NO: 430762 - RNA, 32 nt, Human
gauggauuacugaggcaaucaagucuaaggua

SEQ ID NO: 430763 - RNA, 23 nt, Human
gauggauucccagucauauucua

SEQ ID NO: 430764 - RNA, 32 nt, Human
gauggauugcagaaugaaaagguuauaguucc

SEQ ID NO: 430765 - RNA, 32 nt, Human
gauggcaaaaacaagccugcccaaccagacug

SEQ ID NO: 430766 - RNA, 32 nt, Human
gauggcaacagcuuggaagaugauugcaugca

SEQ ID NO: 430767 - RNA, 32 nt, Human
gauggcaaggcgugaagccacccuggaaggaa

SEQ ID NO: 430768 - RNA, 32 nt, Human
gauggcaagggcagugcguggaaaggccgggg

SEQ ID NO: 430769 - RNA, 32 nt, Human
gauggcaauugaguagcugauaagcugaaaau

SEQ ID NO: 430770 - RNA, 32 nt, Human
gauggcacaauccaggcuguugcaccccuucu

SEQ ID NO: 430771 - RNA, 32 nt, Human
gauggcacaugcugguaauagcagcuacugag

SEQ ID NO: 430772 - RNA, 32 nt, Human
gauggcaccacuacacuccagcccgggcgaca

SEQ ID NO: 430773 - RNA, 32 nt, Human
gauggcaccacuacauuucagccugggcgaaa

SEQ ID NO: 430774 - RNA, 32 nt, Human
gauggcaccacugcacuccagccuaggugaca

SEQ ID NO: 430775 - RNA, 26 nt, Human
gauggcaccacugcacuccagccugg

SEQ ID NO: 430776 - RNA, 32 nt, Human
gauggcaccacugcacuccagccuggacgaca

SEQ ID NO: 430777 - RNA, 32 nt, Human
gauggcaccacugcacuccagccugggagaca

SEQ ID NO: 430778 - RNA, 32 nt, Human
gauggcaccacugcacuccagccugggcaaca

SEQ ID NO: 430779 - RNA, 32 nt, Human
gauggcaccacugcacuccagccugggugaca

SEQ ID NO: 430780 - RNA, 32 nt, Human
gauggcaccacugcacuccagccugggugaga

SEQ ID NO: 430781 - RNA, 32 nt, Human
gauggcaccacugcacuccagcuugggugaca

SEQ ID NO: 430782 - RNA, 32 nt, Human
gauggcaccacugcacuccauccugggugaca

SEQ ID NO: 430783 - RNA, 32 nt, Human
gauggcaccacugcacuccggccuaggcaacg

SEQ ID NO: 430784 - RNA, 32 nt, Human
gauggcaccacugcacuucagccugggugaca

SEQ ID NO: 430785 - RNA, 32 nt, Human
gauggcaccacugcauuccagccugggugaca

SEQ ID NO: 430786 - RNA, 32 nt, Human
gauggcaccacuggacuccagccugggcgaca

SEQ ID NO: 430787 - RNA, 32 nt, Human
gauggcaccacuguacuccagccugggugaca

SEQ ID NO: 430788 - RNA, 32 nt, Human
gauggcaccagcugcuccggaugugccugccc

SEQ ID NO: 430789 - RNA, 32 nt, Human
gauggcaccauuacacuccagccugggcaaca

SEQ ID NO: 430790 - RNA, 32 nt, Human
gauggcaccauugcacccuagccugggcaaca

SEQ ID NO: 430791 - RNA, 32 nt, Human
gauggcaccauugcacuccagccugggugaca

SEQ ID NO: 430792 - RNA, 32 nt, Human
gauggcacccauggcccccacccacggaagga

SEQ ID NO: 430793 - RNA, 32 nt, Human
gauggcaccgcugcacuccaaccugggcaaca

SEQ ID NO: 430794 - RNA, 32 nt, Human
gauggcacugcugcacuccagccugcgggaca

SEQ ID NO: 430795 - RNA, 32 nt, Human
gauggcagagcugggagcaagauggacagagg

SEQ ID NO: 430796 - RNA, 32 nt, Human
gauggcagagggcagagcacauggcccccaga

SEQ ID NO: 430797 - RNA, 32 nt, Human
gauggcagcaaaccaccagcuucagccacuua

SEQ ID NO: 430798 - RNA, 32 nt, Human
gauggcagccacucuggggcagaagagacagu

SEQ ID NO: 430799 - RNA, 32 nt, Human
gauggcagcccagggucacaggcauaggauaa

SEQ ID NO: 430800 - RNA, 32 nt, Human
gauggcagcuuuauaucgagugccucagugcu

SEQ ID NO: 430801 - RNA, 32 nt, Human
gauggcaggaacaggcaugcagagccauauaa

SEQ ID NO: 430802 - RNA, 32 nt, Human
gauggcaggaaggagaacggaugcuugucugg

SEQ ID NO: 430803 - RNA, 32 nt, Human
gauggcaggacagccaguccacagguuugcau

SEQ ID NO: 430804 - RNA, 32 nt, Human
gauggcaggggagcaagagcaaguuaggauua

SEQ ID NO: 430805 - RNA, 32 nt, Human
gauggcaggggcagagugcagguggagagaac

SEQ ID NO: 430806 - RNA, 32 nt, Human
gauggcaggggcagagugcagguggagagaau

SEQ ID NO: 430807 - RNA, 32 nt, Human
gauggcauccccaucagcagcuugcgggaaau

SEQ ID NO: 430808 - RNA, 32 nt, Human
gauggcaucccucaucaggguugccagauggu

SEQ ID NO: 430809 - RNA, 32 nt, Human
gauggcauuucuuaggcuucagcucuugauac

SEQ ID NO: 430810 - RNA, 31 nt, Human
gauggccacagcuagcauggcauucuagcuc

SEQ ID NO: 430811 - RNA, 32 nt, Human
gauggccacaggucaguccucuuucugugccu

SEQ ID NO: 430812 - RNA, 32 nt, Human
gauggccagagugcccugaagcaccacuacca

SEQ ID NO: 430813 - RNA, 23 nt, Human
gauggccagccugugcaugagag

SEQ ID NO: 430814 - RNA, 32 nt, Human
gauggccaggccugugcacacaccagcccacc

SEQ ID NO: 430815 - RNA, 32 nt, Human
gauggccagugcacuccaaugaugggacaggc

SEQ ID NO: 430816 - RNA, 32 nt, Human
gauggcccaaaauggucaggacuuuaauggag

SEQ ID NO: 430817 - RNA, 32 nt, Human
gauggcccagcccagggaaaguccaccugacc

SEQ ID NO: 430818 - RNA, 32 nt, Human
gauggcccaggcaaugcugucgcugcuugaga

SEQ ID NO: 430819 - RNA, 23 nt, Human
gauggcccagggccacacaggga

SEQ ID NO: 430820 - RNA, 32 nt, Human
gauggcccauucuacuugcucuggaccugccc

SEQ ID NO: 430821 - RNA, 20 nt, Human
gauggcccccauugcccuca

SEQ ID NO: 430822 - RNA, 20 nt, Human
gauggcccugagcccacgga

SEQ ID NO: 430823 - RNA, 32 nt, Human
gauggcccuuagggaaagacuggaccucugug

SEQ ID NO: 430824 - RNA, 32 nt, Human
gauggccggcccaggagggaggaggacgacgu

SEQ ID NO: 430825 - RNA, 32 nt, Human
gauggccucagcccuggguggccaggcucugu

SEQ ID NO: 430826 - RNA, 32 nt, Human
gauggccuccagccaggcaccugggcgucccu

SEQ ID NO: 430827 - RNA, 32 nt, Human
gauggccucugguuguucuguugaacuccuug

SEQ ID NO: 430828 - RNA, 32 nt, Human
gauggccugaaccauagcugucacugucuucg

SEQ ID NO: 430829 - RNA, 32 nt, Human
gauggccugcacuccacacaaugcaacagagu

SEQ ID NO: 430830 - RNA, 32 nt, Human
gauggccugccugccuucccuguccguucacc

SEQ ID NO: 430831 - RNA, 32 nt, Human
gauggccuggaccacacacaucacugugugca

SEQ ID NO: 430832 - RNA, 32 nt, Human
gauggccuguaaucccagcacuuugggaggcc

SEQ ID NO: 430833 - RNA, 32 nt, Human
gauggccuucucuccccucagaacuaccggau

SEQ ID NO: 430834 - RNA, 32 nt, Human
gauggccuugcagcacucacacaggacccccu

SEQ ID NO: 430835 - RNA, 32 nt, Human
gauggccuuucaugaaggcagcucuugcggag

SEQ ID NO: 430836 - RNA, 32 nt, Human
gauggcgcacccaucccccaccaggauaaagc

SEQ ID NO: 430837 - RNA, 32 nt, Human
gauggcgccacuacacuccagccugggcaaca

SEQ ID NO: 430838 - RNA, 32 nt, Human
gauggcgccacuacacuccagccugggcgaca

SEQ ID NO: 430839 - RNA, 32 nt, Human
gauggcgccacugcacuccagcccgggcgaca

SEQ ID NO: 430840 - RNA, 32 nt, Human
gauggcgccacugcacuccagccuaggcaaca

SEQ ID NO: 430841 - RNA, 32 nt, Human
gauggcgccacugcacuccagccugagugaca

SEQ ID NO: 430842 - RNA, 32 nt, Human
gauggcgccacugcacuccagccugggcgaca

SEQ ID NO: 430843 - RNA, 32 nt, Human
gauggcgccacugcacuccagccugggcguca

SEQ ID NO: 430844 - RNA, 32 nt, Human
gauggcgccacugcacuccagccugggugaca

SEQ ID NO: 430845 - RNA, 32 nt, Human
gauggcgccacugcacuccagccugggugaga

SEQ ID NO: 430846 - RNA, 32 nt, Human
gauggcgccacugcacuccagucugggcaaca

SEQ ID NO: 430847 - RNA, 32 nt, Human
gauggcgccacugcacuccagucugggcgaua

SEQ ID NO: 430848 - RNA, 32 nt, Human
gauggcgccacugcacucccgucugggggaga

SEQ ID NO: 430849 - RNA, 32 nt, Human
gauggcgccacugcauuccagccugggcaaca

SEQ ID NO: 430850 - RNA, 32 nt, Human
gauggcgccacugcgcuccagccugggcaaca

SEQ ID NO: 430851 - RNA, 32 nt, Human
gauggcgccacuucacugcagccuggguggca

SEQ ID NO: 430852 - RNA, 32 nt, Human
gauggcgccauugcacuccagccugggcaaaa

SEQ ID NO: 430853 - RNA, 32 nt, Human
gauggcgccauugcacuccagccugggugaca

SEQ ID NO: 430854 - RNA, 32 nt, Human
gauggcgccauuucacuccagccugggcgaca

SEQ ID NO: 430855 - RNA, 32 nt, Human
gauggcgcgacugcacuccagccugggcgaga

SEQ ID NO: 430856 - RNA, 32 nt, Human
gauggcgcuauugcacuccagucuggguaaca

SEQ ID NO: 430857 - RNA, 26 nt, Human
gauggcggaagguggaggcugccgug

SEQ ID NO: 430858 - RNA, 32 nt, Human
gauggcggagucggugcacaccuggcaggacc

SEQ ID NO: 430859 - RNA, 32 nt, Human
gauggcggcgcacacguguaaucccagcuacu

SEQ ID NO: 430860 - RNA, 21 nt, Human
gauggcggcucccguccugcu

SEQ ID NO: 430861 - RNA, 32 nt, Human
gauggcgggaauucucgcuucuggccugggug

SEQ ID NO: 430862 - RNA, 32 nt, Human
gauggcgggagaagaggcgagugaagaugcaa

SEQ ID NO: 430863 - RNA, 32 nt, Human
gauggcggugggcacuggcacucuuguccaga

SEQ ID NO: 430864 - RNA, 32 nt, Human
gauggcguagggguagaugagaagcuaucuuu

SEQ ID NO: 430865 - RNA, 32 nt, Human
gauggcgucaguguucuccagccugggcaaca

SEQ ID NO: 430866 - RNA, 32 nt, Human
gauggcgugcuuguuggagaccccaauccgca

SEQ ID NO: 430867 - RNA, 31 nt, Human
gauggcuaagaguccaucaggcagaugaaau

SEQ ID NO: 430868 - RNA, 32 nt, Human
gauggcuaagauacugcugaugcugaaauaaa

SEQ ID NO: 430869 - RNA, 32 nt, Human
gauggcuaaguccuugaaacccuagagcugug

SEQ ID NO: 430870 - RNA, 32 nt, Human
gauggcuaaugggucugggcagcaucccuuca

SEQ ID NO: 430871 - RNA, 32 nt, Human
gauggcucacaucugucaucccugcacuuuga

SEQ ID NO: 430872 - RNA, 32 nt, Human
gauggcucagcagacaggccagcccagcucca

SEQ ID NO: 430873 - RNA, 32 nt, Human
gauggcucagcagugccugcucagguucauca

SEQ ID NO: 430874 - RNA, 32 nt, Human
gauggcucaggguggucauccagguugaaaac

SEQ ID NO: 430875 - RNA, 21 nt, Human
gauggcucaugccugucaucc

SEQ ID NO: 430876 - RNA, 32 nt, Human
gauggcucauuuccacccaaccccaggauuuc

SEQ ID NO: 430877 - RNA, 32 nt, Human
gauggcucauuuccacccagccccaggauuuc

SEQ ID NO: 430878 - RNA, 32 nt, Human
gauggcuccgaagccagaaaugccuuaaacug

SEQ ID NO: 430879 - RNA, 32 nt, Human
gauggcucuccuccauuuugguuuguuuccuc

SEQ ID NO: 430880 - RNA, 32 nt, Human
gauggcucuuccagaggauucccucagauggg

SEQ ID NO: 430881 - RNA, 32 nt, Human
gauggcucuuucuauccugcucuucuguugaa

SEQ ID NO: 430882 - RNA, 32 nt, Human
gauggcugaaccugcauguagagccaccagcu

SEQ ID NO: 430883 - RNA, 32 nt, Human
gauggcugaaguguaacaguacaucuucaggu

SEQ ID NO: 430884 - RNA, 32 nt, Human
gauggcugaauuggcaagucuguggugcugcu

SEQ ID NO: 430885 - RNA, 26 nt, Human
gauggcugagaagcagaagcacgacg

SEQ ID NO: 430886 - RNA, 32 nt, Human
gauggcugagaugggaggauuguuugagcccu

SEQ ID NO: 430887 - RNA, 32 nt, Human
gauggcugaggcaggagaaucgcuugaaccca

SEQ ID NO: 430888 - RNA, 32 nt, Human
gauggcugaggguggucacaccugagccuuca

SEQ ID NO: 430889 - RNA, 32 nt, Human
gauggcugaggugaacucauguucuuugggaa

SEQ ID NO: 430890 - RNA, 32 nt, Human
gauggcugaguugcacaaacguggcucagaug

SEQ ID NO: 430891 - RNA, 21 nt, Human
gauggcugauccugcaaagag

SEQ ID NO: 430892 - RNA, 32 nt, Human
gauggcugcagcccucgaccuccugggcucaa

SEQ ID NO: 430893 - RNA, 32 nt, Human
gauggcugccccuuccccagacagggcuggac

SEQ ID NO: 430894 - RNA, 32 nt, Human
gauggcugcuacucugaguacccccuccagug

SEQ ID NO: 430895 - RNA, 32 nt, Human
gauggcugcugacuucugacuggcugagcagu

SEQ ID NO: 430896 - RNA, 32 nt, Human
gauggcugcugagcaaggggaucagggaagac

SEQ ID NO: 430897 - RNA, 32 nt, Human
gauggcuggcccaggagggaggaggacgacgu

SEQ ID NO: 430898 - RNA, 32 nt, Human
gauggcugggcacugccaucucuagaauugcc

SEQ ID NO: 430899 - RNA, 32 nt, Human
gauggcugggcuguaguuuagccugggccuug

SEQ ID NO: 430900 - RNA, 32 nt, Human
gauggcuggggagagguggaggcugacagcug

SEQ ID NO: 430901 - RNA, 32 nt, Human
gauggcuguaaaucuauuggccaucugggcuu

SEQ ID NO: 430902 - RNA, 32 nt, Human
gauggcuguaucucccuucacugucucuuccu

SEQ ID NO: 430903 - RNA, 32 nt, Human
gauggcuguggagcugggcgugcugcucgucc

SEQ ID NO: 430904 - RNA, 32 nt, Human
gauggcuuagaaaagugauaccagcccaagaa

SEQ ID NO: 430905 - RNA, 32 nt, Human
gauggcuucccacuggccuccaccaccugacc

SEQ ID NO: 430906 - RNA, 32 nt, Human
gauggcuucuuucugucacaugggugcuaaac

SEQ ID NO: 430907 - RNA, 32 nt, Human
gauggcuugguagccccucgaggcagaugcac

SEQ ID NO: 430908 - RNA, 32 nt, Human
gauggcuuucugcuuuggaucacuguucccua

SEQ ID NO: 430909 - RNA, 32 nt, Human
gauggcuuugggccuaguaguucgaguccagc

SEQ ID NO: 430910 - RNA, 32 nt, Human
gauggcuuuucucuguccccugcugcucugag

SEQ ID NO: 430911 - RNA, 32 nt, Human
gaugggaaacacauugagcaucauaucugaca

SEQ ID NO: 430912 - RNA, 32 nt, Human
gaugggaaaccagcccaagaggcagugaagga

SEQ ID NO: 430913 - RNA, 23 nt, Human
gaugggaaacugaggcucagaga

SEQ ID NO: 430914 - RNA, 32 nt, Human
gaugggaacaguccuggcugccccugacagug

SEQ ID NO: 430915 - RNA, 26 nt, Human
gaugggaaccggauugguugcagugu

SEQ ID NO: 430916 - RNA, 32 nt, Human
gaugggaacugcccuuuucaccugccagggag

SEQ ID NO: 430917 - RNA, 32 nt, Human
gaugggaagagggagaggagcagaaaaaguac

SEQ ID NO: 430918 - RNA, 32 nt, Human
gaugggaaggagcagggugagggaggggcccc

SEQ ID NO: 430919 - RNA, 32 nt, Human
gaugggaagggcccagcgaaugccaauaggag

SEQ ID NO: 430920 - RNA, 32 nt, Human
gaugggaaguaaacgcuuccagaggaacucag

SEQ ID NO: 430921 - RNA, 32 nt, Human
gaugggaaguauguuuucaaguguggggagga

SEQ ID NO: 430922 - RNA, 32 nt, Human
gaugggaaguguauuuuacucugaucaaauaa

SEQ ID NO: 430923 - RNA, 32 nt, Human
gaugggaaugaggaaggagugaggggaagaac

SEQ ID NO: 430924 - RNA, 32 nt, Human
gaugggaaugauugcuaugcuugcuacugaac

SEQ ID NO: 430925 - RNA, 32 nt, Human
gaugggaccacguguucugauguggcaguaga

SEQ ID NO: 430926 - RNA, 32 nt, Human
gaugggaccagcuggaauuuccaagcugcuuc

SEQ ID NO: 430927 - RNA, 32 nt, Human
gaugggacccuugugccaccugggccagcaaa

SEQ ID NO: 430928 - RNA, 32 nt, Human
gaugggaccgagauuucagcgagcccuccugg

SEQ ID NO: 430929 - RNA, 32 nt, Human
gaugggaccugaggacacaaagaugagcucaa

SEQ ID NO: 430930 - RNA, 32 nt, Human
gaugggacguguggucaggagggaccucaccg

SEQ ID NO: 430931 - RNA, 32 nt, Human
gaugggacucagacccugugccccagagcucc

SEQ ID NO: 430932 - RNA, 32 nt, Human
gaugggagaaaccucuagagagaguaaaaaug

SEQ ID NO: 430933 - RNA, 26 nt, Human
gaugggagagucccguucacacccag

SEQ ID NO: 430934 - RNA, 32 nt, Human
gaugggagaguguuguuuuugucacuugcccc

SEQ ID NO: 430935 - RNA, 32 nt, Human
gaugggagcggggaccccggagagggagucag

SEQ ID NO: 430936 - RNA, 32 nt, Human
gaugggaggaaagagagcaggacucacagguu

SEQ ID NO: 430937 - RNA, 32 nt, Human
gaugggaggaaggcuggucauugccuauucca

SEQ ID NO: 430938 - RNA, 32 nt, Human
gaugggaggaucacuugaggccaagaguuuga

SEQ ID NO: 430939 - RNA, 32 nt, Human
gaugggagggaggugggaauacuccuugccua

SEQ ID NO: 430940 - RNA, 32 nt, Human
gaugggaggggagagacagaaguugagggcau

SEQ ID NO: 430941 - RNA, 32 nt, Human
gaugggagguguucaagcacagcaaucccauu

SEQ ID NO: 430942 - RNA, 32 nt, Human
gaugggagguugggggaggugagcauaaacgc

SEQ ID NO: 430943 - RNA, 32 nt, Human
gaugggauaucacccugaagaguugugucuuu

SEQ ID NO: 430944 - RNA, 32 nt, Human
gaugggaucgaggcugcaccaccaccaucccc

SEQ ID NO: 430945 - RNA, 32 nt, Human
gaugggaucuguauuagacuugagugcagguc

SEQ ID NO: 430946 - RNA, 32 nt, Human
gaugggaugaaugaccaucugggguauggugg

SEQ ID NO: 430947 - RNA, 32 nt, Human
gaugggaugaggagagggcaggaaggcauuuc

SEQ ID NO: 430948 - RNA, 32 nt, Human
gaugggaugcuugccuagggccugguccauga

SEQ ID NO: 430949 - RNA, 32 nt, Human
gaugggcaaagcaucuuucgagagcuugccug

SEQ ID NO: 430950 - RNA, 26 nt, Human
gaugggcaagguuucucgaaccugca

SEQ ID NO: 430951 - RNA, 32 nt, Human
gaugggcaccggagauacaucaccgagaauaa

SEQ ID NO: 430952 - RNA, 32 nt, Human
gaugggcaccuguaaucucagcuacucaggag

SEQ ID NO: 430953 - RNA, 26 nt, Human
gaugggcacugaggggucagagccag

SEQ ID NO: 430954 - RNA, 32 nt, Human
gaugggcagaugggccuggccuugagaaaggc

SEQ ID NO: 430955 - RNA, 32 nt, Human
gaugggcagccugcaguguggccggcgacugc

SEQ ID NO: 430956 - RNA, 32 nt, Human
gaugggcagcucccacucuugccuuagaauau

SEQ ID NO: 430957 - RNA, 32 nt, Human
gaugggcagcuugcacucaccaauagaccaaa

SEQ ID NO: 430958 - RNA, 32 nt, Human
gaugggcaggaaaaacaaaggccaccacaaag

SEQ ID NO: 430959 - RNA, 32 nt, Human
gaugggcaggaaaaacaaaggccaccacagag

SEQ ID NO: 430960 - RNA, 32 nt, Human
gaugggcaggaggaugggagacaggaauugag

SEQ ID NO: 430961 - RNA, 32 nt, Human
gaugggcaucacagcaaggcaggcuuuuugau

SEQ ID NO: 430962 - RNA, 32 nt, Human
gaugggcauuaugcaaaagcacaaagauuaua

SEQ ID NO: 430963 - RNA, 32 nt, Human
gaugggccaccgccuugcccagccuggaugcc

SEQ ID NO: 430964 - RNA, 32 nt, Human
gaugggccaccugacuuagacucucauuagua

SEQ ID NO: 430965 - RNA, 32 nt, Human
gaugggccagccugccccaaggcucuuuacug

SEQ ID NO: 430966 - RNA, 32 nt, Human
gaugggccagugacucacagggucaggcacuc

SEQ ID NO: 430967 - RNA, 32 nt, Human
gaugggcccaggagccagcaggagaccuuucu

SEQ ID NO: 430968 - RNA, 32 nt, Human
gaugggccccuguaaucccagcuacuugggag

SEQ ID NO: 430969 - RNA, 32 nt, Human
gaugggcccugagcucuucuguuugcuuuugg

SEQ ID NO: 430970 - RNA, 32 nt, Human
gaugggccgugggcccuugugggugaagcucg

SEQ ID NO: 430971 - RNA, 32 nt, Human
gaugggccucaaacuccuagcuucaagcaguc

SEQ ID NO: 430972 - RNA, 32 nt, Human
gaugggccugagaggccggggcucagggaagg

SEQ ID NO: 430973 - RNA, 32 nt, Human
gaugggcgaggacagagcagggcccgagcgcc

SEQ ID NO: 430974 - RNA, 32 nt, Human
gaugggcgcaaggggugcugggggaggccugc

SEQ ID NO: 430975 - RNA, 32 nt, Human
gaugggcggcagcugcucagcaucccccgggc

SEQ ID NO: 430976 - RNA, 32 nt, Human
gaugggcucaagcaucuacacaccucagccuc

SEQ ID NO: 430977 - RNA, 32 nt, Human
gaugggcuccacugucuucuggcucccaugug

SEQ ID NO: 430978 - RNA, 32 nt, Human
gaugggcuccugcccuugaaccccugcugggg

SEQ ID NO: 430979 - RNA, 32 nt, Human
gaugggcugggcugggcugugguggggugggg

SEQ ID NO: 430980 - RNA, 32 nt, Human
gaugggcugggcugggcuguuuuaccuaaucc

SEQ ID NO: 430981 - RNA, 32 nt, Human
gaugggcuggggcuuagcaccacccaccaaau

SEQ ID NO: 430982 - RNA, 24 nt, Human
gauggggaaacugaggcccagaga

SEQ ID NO: 430983 - RNA, 24 nt, Human
gauggggaaacugaggccuugaga

SEQ ID NO: 430984 - RNA, 24 nt, Human
gauggggaaacugaggcucaagga

SEQ ID NO: 430985 - RNA, 24 nt, Human
gauggggaaacugaggcucagaga

SEQ ID NO: 430986 - RNA, 22 nt, Human
gauggggaaacugaggcuuagg

SEQ ID NO: 430987 - RNA, 23 nt, Human
gauggggaaacugaggcuuagga

SEQ ID NO: 430988 - RNA, 32 nt, Human
gauggggaagaagggacaagauucccagagag

SEQ ID NO: 430989 - RNA, 32 nt, Human
gauggggaagcauugcaaggaaauugugcuuu

SEQ ID NO: 430990 - RNA, 31 nt, Human
gauggggaagcucuggagcauuuugugagca

SEQ ID NO: 430991 - RNA, 21 nt, Human
gauggggaagcugcuggagga

SEQ ID NO: 430992 - RNA, 32 nt, Human
gauggggaaugagggggagaagaagagcagcu

SEQ ID NO: 430993 - RNA, 32 nt, Human
gauggggacauggagaacaacccaagcuccuu

SEQ ID NO: 430994 - RNA, 22 nt, Human
gauggggaccccagcgaagcag

SEQ ID NO: 430995 - RNA, 32 nt, Human
gauggggagaaaggaaaaggagagacaaauau

SEQ ID NO: 430996 - RNA, 32 nt, Human
gauggggagacaacgugcucuuuguuuugugu

SEQ ID NO: 430997 - RNA, 32 nt, Human
gauggggagaucggggccagaggcagaacccu

SEQ ID NO: 430998 - RNA, 32 nt, Human
gauggggaggcagcccccgcaguggacagccc

SEQ ID NO: 430999 - RNA, 23 nt, Human
gauggggaggccuggcucuggga

SEQ ID NO: 431000 - RNA, 23 nt, Human
gauggggaggcuggggccugggg

SEQ ID NO: 431001 - RNA, 32 nt, Human
gauggggagggaagaagaggagaggggagggg

SEQ ID NO: 431002 - RNA, 32 nt, Human
gauggggagggaagaggaggagaggggagggg

SEQ ID NO: 431003 - RNA, 20 nt, Human
gauggggcacuggccagagg

SEQ ID NO: 431004 - RNA, 32 nt, Human
gauggggcacuguggagagaccccaggaaaac

SEQ ID NO: 431005 - RNA, 32 nt, Human
gauggggccacugcacugcagccugugugaca

SEQ ID NO: 431006 - RNA, 32 nt, Human
gauggggccugccugcaccccggggcggaauu

SEQ ID NO: 431007 - RNA, 32 nt, Human
gauggggcgagugcugggcgugcuguuggaga

SEQ ID NO: 431008 - RNA, 32 nt, Human
gauggggcucagauggacugggaggaggggga

SEQ ID NO: 431009 - RNA, 32 nt, Human
gauggggcuccaggauuccaggccuggcaaca

SEQ ID NO: 431010 - RNA, 32 nt, Human
gauggggcucuuacucccuccugaggccagcu

SEQ ID NO: 431011 - RNA, 32 nt, Human
gauggggcugacugcacuggugggccggcugg

SEQ ID NO: 431012 - RNA, 32 nt, Human
gauggggcugcugcuugagugcagagggcugc

SEQ ID NO: 431013 - RNA, 32 nt, Human
gauggggcugugucccccucagacuggggcug

SEQ ID NO: 431014 - RNA, 32 nt, Human
gauggggcuucaccaucuugaccaggcugguc

SEQ ID NO: 431015 - RNA, 19 nt, Human
gaugggggaaacugaggaa

SEQ ID NO: 431016 - RNA, 22 nt, Human
gaugggggacaagcugugugga

SEQ ID NO: 431017 - RNA, 32 nt, Human
gaugggggaggcaagagagggcaaagaguaaa

SEQ ID NO: 431018 - RNA, 32 nt, Human
gaugggggagggaaagugugcuuuuguguaca

SEQ ID NO: 431019 - RNA, 32 nt, Human
gaugggggaggggagggguagagcacacccag

SEQ ID NO: 431020 - RNA, 23 nt, Human
gaugggggagucugaagcagaug

SEQ ID NO: 431021 - RNA, 32 nt, Human
gaugggggagugaaauugugagguggaugggg

SEQ ID NO: 431022 - RNA, 32 nt, Human
gaugggggauggggcaggauggggcaggacac

SEQ ID NO: 431023 - RNA, 32 nt, Human
gaugggggcacauagcacuggggaaagcagaa

SEQ ID NO: 431024 - RNA, 32 nt, Human
gaugggggcagggggagcagcauccugccacg

SEQ ID NO: 431025 - RNA, 32 nt, Human
gaugggggcuguuccccaacaggccuggcaga

SEQ ID NO: 431026 - RNA, 32 nt, Human
gaugggggucaaagcaaagaagauucuuccug

SEQ ID NO: 431027 - RNA, 21 nt, Human
gaugggggucucaccauguug

SEQ ID NO: 431028 - RNA, 32 nt, Human
gauggggguggagaggaugacaaguagaauga

SEQ ID NO: 431029 - RNA, 32 nt, Human
gauggggucacaaugcugcagaaaagugaaga

SEQ ID NO: 431030 - RNA, 32 nt, Human
gauggggucccggcacccaucuguaucaucag

SEQ ID NO: 431031 - RNA, 32 nt, Human
gauggggucuugcuaugucucccaggcuggag

SEQ ID NO: 431032 - RNA, 32 nt, Human
gauggggugcaggaguggaggagaaacguggc

SEQ ID NO: 431033 - RNA, 32 nt, Human
gauggggugggauggagaguggguucaguuuu

SEQ ID NO: 431034 - RNA, 32 nt, Human
gauggggugggcaggggugguccuggcuggca

SEQ ID NO: 431035 - RNA, 19 nt, Human
gaugggguguccuggugga

SEQ ID NO: 431036 - RNA, 26 nt, Human
gauggggugugcugaaguugaagugu

SEQ ID NO: 431037 - RNA, 20 nt, Human
gaugggguuaaacauucuca

SEQ ID NO: 431038 - RNA, 32 nt, Human
gaugggguugacuucaugugggucugaguguu

SEQ ID NO: 431039 - RNA, 32 nt, Human
gaugggguuucaccauacuggcuaggcugguc

SEQ ID NO: 431040 - RNA, 21 nt, Human
gaugggguuucaccauauugg

SEQ ID NO: 431041 - RNA, 20 nt, Human
gaugggguuucaccauguug

SEQ ID NO: 431042 - RNA, 21 nt, Human
gaugggguuucaccauguugg

SEQ ID NO: 431043 - RNA, 21 nt, Human
gaugggguuucacuauguugg

SEQ ID NO: 431044 - RNA, 32 nt, Human
gaugggguuucaucauauuggucagggugguc

SEQ ID NO: 431045 - RNA, 32 nt, Human
gaugggguuucaucauguuggccaggcuaguc

SEQ ID NO: 431046 - RNA, 32 nt, Human
gaugggguuucaucauguuggccaggcugguc

SEQ ID NO: 431047 - RNA, 32 nt, Human
gaugggguuucaucauguuggccagguugguc

SEQ ID NO: 431048 - RNA, 32 nt, Human
gauggguagggagugagaucagagggaaggcc

SEQ ID NO: 431049 - RNA, 32 nt, Human
gaugggucaaagcuggugaccgacuggggccu

SEQ ID NO: 431050 - RNA, 32 nt, Human
gaugggucccacccucccuccagagccaccag

SEQ ID NO: 431051 - RNA, 32 nt, Human
gaugggucccaggaaagugaauacucaaccaa

SEQ ID NO: 431052 - RNA, 32 nt, Human
gaugggucggccucuaagcucaugugguugua

SEQ ID NO: 431053 - RNA, 32 nt, Human
gaugggucucugcucugcuucuaguucuccac

SEQ ID NO: 431054 - RNA, 32 nt, Human
gaugggucuuccaugauacugaagggagagcc

SEQ ID NO: 431055 - RNA, 32 nt, Human
gaugggugaaaagacgccagugagccuccugg

SEQ ID NO: 431056 - RNA, 32 nt, Human
gaugggugaggagcagcacagagcagcaggga

SEQ ID NO: 431057 - RNA, 32 nt, Human
gaugggugccuccccucugccucccauuucug

SEQ ID NO: 431058 - RNA, 32 nt, Human
gaugggugccuguaaucccagcuacgugggag

SEQ ID NO: 431059 - RNA, 32 nt, Human
gauggguggacagaagggcucaccaaggauug

SEQ ID NO: 431060 - RNA, 32 nt, Human
gauggguggaucaucugaggucaggaguuuga

SEQ ID NO: 431061 - RNA, 32 nt, Human
gauggguggcucagccucgaaucccaggcccc

SEQ ID NO: 431062 - RNA, 32 nt, Human
gauggguggcuuuccaaaaugcugugcaaaug

SEQ ID NO: 431063 - RNA, 32 nt, Human
gaugggugggagaaggaaccugagccuggcug

SEQ ID NO: 431064 - RNA, 32 nt, Human
gauggguggggccugcucuggagcugagcccg

SEQ ID NO: 431065 - RNA, 32 nt, Human
gaugggugggggagcagguuggagaggggacc

SEQ ID NO: 431066 - RNA, 32 nt, Human
gaugggugggguggggagggaaucacuggugc

SEQ ID NO: 431067 - RNA, 31 nt, Human
gauggguguguaaugcauaugccaaggaaau

SEQ ID NO: 431068 - RNA, 32 nt, Human
gauggguucaucuuuucuuccuuucccauuca

SEQ ID NO: 431069 - RNA, 32 nt, Human
gauggguucucuuaccuguaguagccuuaucc

SEQ ID NO: 431070 - RNA, 32 nt, Human
gauggguugcagccggccugcugcuuaaggug

SEQ ID NO: 431071 - RNA, 32 nt, Human
gaugguaaugccagucccaggggaggguguga

SEQ ID NO: 431072 - RNA, 32 nt, Human
gaugguaccacugcacuccagccugggugaca

SEQ ID NO: 431073 - RNA, 32 nt, Human
gaugguaccccugcacuccagcccagguuaca

SEQ ID NO: 431074 - RNA, 32 nt, Human
gaugguaccucugcacugcagccugggcaaca

SEQ ID NO: 431075 - RNA, 32 nt, Human
gaugguacugacuaugagcugaagccucugcc

SEQ ID NO: 431076 - RNA, 32 nt, Human
gaugguagaaaugcauaugauccauggcagga

SEQ ID NO: 431077 - RNA, 32 nt, Human
gaugguagacaguguuuauguagauguguugu

SEQ ID NO: 431078 - RNA, 31 nt, Human
gaugguagggagagagagccacuggaucggc

SEQ ID NO: 431079 - RNA, 32 nt, Human
gaugguauggugagccacagaguacaccuuuc

SEQ ID NO: 431080 - RNA, 32 nt, Human
gaugguauugcagcuucacugccugcguuccu

SEQ ID NO: 431081 - RNA, 32 nt, Human
gauggucaggguggggagcagggacggccaug

SEQ ID NO: 431082 - RNA, 32 nt, Human
gauggucaucacauuggugagcuggagucauc

SEQ ID NO: 431083 - RNA, 26 nt, Human
gauggucauccagaaagagaagaaga

SEQ ID NO: 431084 - RNA, 32 nt, Human
gauggucauugaaacucacuucuuuucaggug

SEQ ID NO: 431085 - RNA, 32 nt, Human
gaugguccaaguguccauccagagaugagacu

SEQ ID NO: 431086 - RNA, 32 nt, Human
gaugguccacucuguacacaggcauuccuccu

SEQ ID NO: 431087 - RNA, 32 nt, Human
gauggucccagaagucaaacagaagggaguga

SEQ ID NO: 431088 - RNA, 32 nt, Human
gauggucccaucugcagggccccgcaccaguu

SEQ ID NO: 431089 - RNA, 32 nt, Human
gauggucccuuccauuccccugaaaccugcau

SEQ ID NO: 431090 - RNA, 31 nt, Human
gcaagaaugaacuccuuccuggaauacccca

SEQ ID NO: 431091 - RNA, 32 nt, Human
gcaagaauucaucaaccagcugccuuuguuuc

SEQ ID NO: 431092 - RNA, 32 nt, Human
gcaagaauucuugggacacagguuuguuuucu

SEQ ID NO: 431093 - RNA, 32 nt, Human
gcaagacacuuuuccucuccccaggccucuga

SEQ ID NO: 431094 - RNA, 32 nt, Human
gcaagacagaaaagugccugagcuggggaagc

SEQ ID NO: 431095 - RNA, 32 nt, Human
gcaagacagcacuugagugcacuggcaggaag

SEQ ID NO: 431096 - RNA, 32 nt, Human
gcaagacagggucagugcuuacauuuuguggu

SEQ ID NO: 431097 - RNA, 32 nt, Human
gcaagacaguuguuucuccuccuccuugcaua

SEQ ID NO: 431098 - RNA, 32 nt, Human
gcaagaccaccagcuccuggaagcugaguuac

SEQ ID NO: 431099 - RNA, 32 nt, Human
gcaagaccagacugaagaacacgguugagucc

SEQ ID NO: 431100 - RNA, 32 nt, Human
gcaagaccauuuuucuccaagccaugggggac

SEQ ID NO: 431101 - RNA, 18 nt, Human
gcaagaccccagauucuc

SEQ ID NO: 431102 - RNA, 19 nt, Human
gcaagaccccuuccucacc

SEQ ID NO: 431103 - RNA, 32 nt, Human
gcaagacccuccccaaacagccaucuccccag

SEQ ID NO: 431104 - RNA, 32 nt, Human
gcaagacccugcugugauuacuauguuguaca

SEQ ID NO: 431105 - RNA, 32 nt, Human
gcaagacccuguaugaauaguaccaaagcauu

SEQ ID NO: 431106 - RNA, 32 nt, Human
gcaagaccuggcacuccuccaagcuuggcaca

SEQ ID NO: 431107 - RNA, 32 nt, Human
gcaagaccuguauuuauaagccgagggcucag

SEQ ID NO: 431108 - RNA, 31 nt, Human
gcaagacgccucucggggccugugccgcacu

SEQ ID NO: 431109 - RNA, 32 nt, Human
gcaagacggaaucgagggcaccucuggguguu

SEQ ID NO: 431110 - RNA, 32 nt, Human
gcaagacuaacucaagccccagccucuuucca

SEQ ID NO: 431111 - RNA, 32 nt, Human
gcaagacuccagcacaagaggugggauugcug

SEQ ID NO: 431112 - RNA, 20 nt, Human
gcaagacugacauccacuua

SEQ ID NO: 431113 - RNA, 32 nt, Human
gcaagagaacaguacuggccuucaguauaugc

SEQ ID NO: 431114 - RNA, 32 nt, Human
gcaagagaaguuacaguccaggugaacuugga

SEQ ID NO: 431115 - RNA, 32 nt, Human
gcaagagaaucucuugagcucaggaggcagag

SEQ ID NO: 431116 - RNA, 32 nt, Human
gcaagagagaaaaguguauuagugcaggagcu

SEQ ID NO: 431117 - RNA, 32 nt, Human
gcaagagagcuucccauugcuucugcucuccu

SEQ ID NO: 431118 - RNA, 32 nt, Human
gcaagagaggggcaagucuggggcuccaacug

SEQ ID NO: 431119 - RNA, 32 nt, Human
gcaagagaggguggaggaaauucugcaggaga

SEQ ID NO: 431120 - RNA, 32 nt, Human
gcaagagauccagcuagagagguauucaggga

SEQ ID NO: 431121 - RNA, 32 nt, Human
gcaagagaugaacuuaaguacucugaaguacu

SEQ ID NO: 431122 - RNA, 32 nt, Human
gcaagagcacaucaacgggaaagagaaagaga

SEQ ID NO: 431123 - RNA, 32 nt, Human
gcaagagccaagcacugaauaccuacauaggu

SEQ ID NO: 431124 - RNA, 32 nt, Human
gcaagagccaggggugucccagucccagccuc

SEQ ID NO: 431125 - RNA, 28 nt, Human
gcaagagccggugguugggggucugaga

SEQ ID NO: 431126 - RNA, 32 nt, Human
gcaagagccugagaaguuuccuugaggucugu

SEQ ID NO: 431127 - RNA, 32 nt, Human
gcaagagccuguaaucucagcuacucaggagg

SEQ ID NO: 431128 - RNA, 32 nt, Human
gcaagagcuuauaaaugauugaugcaaauuug

SEQ ID NO: 431129 - RNA, 32 nt, Human
gcaagaggacaagaugggggauaucugaggcc

SEQ ID NO: 431130 - RNA, 24 nt, Human
gcaagaggaucacuugaggccagg

SEQ ID NO: 431131 - RNA, 32 nt, Human
gcaagaggauuacuugagcucaggaguuuaac

SEQ ID NO: 431132 - RNA, 32 nt, Human
gcaagaggccaaggcuggagaggcgugccagc

SEQ ID NO: 431133 - RNA, 32 nt, Human
gcaagaggcgugggcuugcaggguggggcacg

SEQ ID NO: 431134 - RNA, 22 nt, Human
gcaagaggcuccagaagaaaug

SEQ ID NO: 431135 - RNA, 32 nt, Human
gcaagaggcugaggcaggagaaugacaugaac

SEQ ID NO: 431136 - RNA, 32 nt, Human
gcaagaggcugaugcaggagaauggccagcac

SEQ ID NO: 431137 - RNA, 32 nt, Human
gcaagagggagaaaggacgcugccgccuaaga

SEQ ID NO: 431138 - RNA, 32 nt, Human
gcaagagggagaagaaagagccauggagauag

SEQ ID NO: 431139 - RNA, 32 nt, Human
gcaagagggagggaaggaaggagagcaaaauc

SEQ ID NO: 431140 - RNA, 32 nt, Human
gcaagagggccagauaccuaacagguuuuucu

SEQ ID NO: 431141 - RNA, 32 nt, Human
gcaagaggggguggaggcgccaggcugaaacc

SEQ ID NO: 431142 - RNA, 32 nt, Human
gcaagaggguguauggaucagagcagagacgu

SEQ ID NO: 431143 - RNA, 22 nt, Human
gcaagaggugggaggagguagg

SEQ ID NO: 431144 - RNA, 21 nt, Human
gcaagagguggggcaggcaga

SEQ ID NO: 431145 - RNA, 32 nt, Human
gcaagagguugcuuuucugugaacgaaucucu

SEQ ID NO: 431146 - RNA, 32 nt, Human
gcaagaguaaaggaaauaagagcauucacaac

SEQ ID NO: 431147 - RNA, 20 nt, Human
gcaagaguagcaagaugcug

SEQ ID NO: 431148 - RNA, 32 nt, Human
gcaagaguauuugucucucaccaccaggguug

SEQ ID NO: 431149 - RNA, 32 nt, Human
gcaagagucuguuacaaagcuugcugugcaug

SEQ ID NO: 431150 - RNA, 32 nt, Human
gcaagagugugaggcaggaagacugagucagc

SEQ ID NO: 431151 - RNA, 23 nt, Human
gcaagaguucuguggagagagug

SEQ ID NO: 431152 - RNA, 32 nt, Human
gcaagaguugagcuuggaaaccuucaccuaga

SEQ ID NO: 431153 - RNA, 32 nt, Human
gcaagauacauacugcauuuuuaaaauagugu

SEQ ID NO: 431154 - RNA, 32 nt, Human
gcaagaucaccaggaaggaacacagggcuugc

SEQ ID NO: 431155 - RNA, 32 nt, Human
gcaagauccacuucugugauuaaguaaaugga

SEQ ID NO: 431156 - RNA, 32 nt, Human
gcaagauccucuuguuacaaagcuguccaaca

SEQ ID NO: 431157 - RNA, 32 nt, Human
gcaagaugaagaagaucuacauauaaugaaau

SEQ ID NO: 431158 - RNA, 32 nt, Human
gcaagaugaagaggaaaaacaaacaaacaaac

SEQ ID NO: 431159 - RNA, 30 nt, Human
gcaagaugcuguccuugcggcugcagacgg

SEQ ID NO: 431160 - RNA, 32 nt, Human
gcaagauggaggugggggcugggggaauaugc

SEQ ID NO: 431161 - RNA, 32 nt, Human
gcaagauggagguugcagugagcucagauggu

SEQ ID NO: 431162 - RNA, 30 nt, Human
gcaagauggccacggucauccccagccccc

SEQ ID NO: 431163 - RNA, 32 nt, Human
gcaagauggccuguaaucccagcacuuuggga

SEQ ID NO: 431164 - RNA, 24 nt, Human
gcaagauggcucacaccugugauc

SEQ ID NO: 431165 - RNA, 32 nt, Human
gcaagaugggagaguugagaagguucccagaa

SEQ ID NO: 431166 - RNA, 32 nt, Human
gcaagaugguaucagagagaaacccaucaauu

SEQ ID NO: 431167 - RNA, 32 nt, Human
gcaagaugguuugucacucugcaccugugucu

SEQ ID NO: 431168 - RNA, 32 nt, Human
gcaagaugucggcggucagucaggaugcuauu

SEQ ID NO: 431169 - RNA, 32 nt, Human
gcaagaugugggcagugaugucacuagggcag

SEQ ID NO: 431170 - RNA, 32 nt, Human
gcaagauuacuguuaucucugcucuuccaugu

SEQ ID NO: 431171 - RNA, 32 nt, Human
gcaagauugauguuuccuugaggggagccagg

SEQ ID NO: 431172 - RNA, 21 nt, Human
gcaagauuucggcucacugca

SEQ ID NO: 431173 - RNA, 24 nt, Human
gcaagcaaaucacuugagcucagg

SEQ ID NO: 431174 - RNA, 32 nt, Human
gcaagcaacaaggcaauagaaaagccaggguu

SEQ ID NO: 431175 - RNA, 32 nt, Human
gcaagcaagccuagccuuccagggagaaagag

SEQ ID NO: 431176 - RNA, 32 nt, Human
gcaagcaagccugagaggcauuacaugggcug

SEQ ID NO: 431177 - RNA, 32 nt, Human
gcaagcaauaaugccagcaccuucugcaagga

SEQ ID NO: 431178 - RNA, 32 nt, Human
gcaagcacaagaaagggacccuccaguucggg

SEQ ID NO: 431179 - RNA, 32 nt, Human
gcaagcacagcagucugaguugaccugggaug

SEQ ID NO: 431180 - RNA, 17 nt, Human
gcaagcaccugccacca

SEQ ID NO: 431181 - RNA, 32 nt, Human
gcaagcacucccccaccaacgggugcaucaca

SEQ ID NO: 431182 - RNA, 32 nt, Human
gcaagcacucucuccagcacucaggaagcccg

SEQ ID NO: 431183 - RNA, 32 nt, Human
gcaagcacugaggagguggauggaagggagca

SEQ ID NO: 431184 - RNA, 32 nt, Human
gcaagcacugccucccuccggggucuguaaga

SEQ ID NO: 431185 - RNA, 32 nt, Human
gcaagcacuggaaaagaggcccugccauacac

SEQ ID NO: 431186 - RNA, 32 nt, Human
gcaagcacuuugcacacuugcuucacugauuc

SEQ ID NO: 431187 - RNA, 32 nt, Human
gcaagcagagggcugagcagucaaauaacaga

SEQ ID NO: 431188 - RNA, 24 nt, Human
gcaagcagaucaccugaagucagg

SEQ ID NO: 431189 - RNA, 24 nt, Human
gcaagcagaucaccugagguuggg

SEQ ID NO: 431190 - RNA, 24 nt, Human
gcaagcagaucacuugaggucagg

SEQ ID NO: 431191 - RNA, 22 nt, Human
gcaagcagaucaugaggucagg

SEQ ID NO: 431192 - RNA, 32 nt, Human
gcaagcagaugaacuaauuucauuucaaggca

SEQ ID NO: 431193 - RNA, 32 nt, Human
gcaagcagaugggggugggcaccugaggccca

SEQ ID NO: 431194 - RNA, 32 nt, Human
gcaagcagcccaggcagcugugggcagugcug

SEQ ID NO: 431195 - RNA, 20 nt, Human
gcaagcagcgcucgcuccuc

SEQ ID NO: 431196 - RNA, 30 nt, Human
gcaagcagcuugcauuuccaaagacaaaua

SEQ ID NO: 431197 - RNA, 32 nt, Human
gcaagcaggacgccgggcugagugcuaacugc

SEQ ID NO: 431198 - RNA, 18 nt, Human
gcaagcagggcagggggu

SEQ ID NO: 431199 - RNA, 31 nt, Human
gcaagcaggugugagcaccuauuucacuacc

SEQ ID NO: 431200 - RNA, 32 nt, Human
gcaagcagugccugcuggcgcccccgaggcug

SEQ ID NO: 431201 - RNA, 28 nt, Human
gcaagcaucuaggcugccucuucacuuu

SEQ ID NO: 431202 - RNA, 32 nt, Human
gcaagcaucugcccgcaggccccagcccuucc

SEQ ID NO: 431203 - RNA, 32 nt, Human
gcaagcauugggaaggaugaaugccaacuaug

SEQ ID NO: 431204 - RNA, 32 nt, Human
gcaagcauuguuucacacacuccccucagcug

SEQ ID NO: 431205 - RNA, 32 nt, Human
gcaagccacagucaucauacugugaguguccc

SEQ ID NO: 431206 - RNA, 32 nt, Human
gcaagccagaaacacaucccugucuccaaauu

SEQ ID NO: 431207 - RNA, 26 nt, Human
gcaagccagaccacgaugauuguaga

SEQ ID NO: 431208 - RNA, 32 nt, Human
gcaagccaggagacccugggagcuguggcugu

SEQ ID NO: 431209 - RNA, 21 nt, Human
gcaagccagugcugcgugcuc

SEQ ID NO: 431210 - RNA, 21 nt, Human
gcaagccagugcugugugcuc

SEQ ID NO: 431211 - RNA, 21 nt, Human
gcaagcccauauccugcagcu

SEQ ID NO: 431212 - RNA, 32 nt, Human
gcaagcccauugucccuguccaacacaccccc

SEQ ID NO: 431213 - RNA, 32 nt, Human
gcaagccccaugacugugaguccucuacuguu

SEQ ID NO: 431214 - RNA, 32 nt, Human
gcaagcccccguccacccuugugggucucugc

SEQ ID NO: 431215 - RNA, 32 nt, Human
gcaagccccucagguugggccuugccacggug

SEQ ID NO: 431216 - RNA, 32 nt, Human
gcaagccccuuuccugccuucuuacccccaac

SEQ ID NO: 431217 - RNA, 32 nt, Human
gcaagcccucauucaccuucugggccacagcc

SEQ ID NO: 431218 - RNA, 32 nt, Human
gcaagcccuccugggccaccugcugaucugac

SEQ ID NO: 431219 - RNA, 32 nt, Human
gcaagcccucucucagagcugccaucaucacu

SEQ ID NO: 431220 - RNA, 32 nt, Human
gcaagcccucuuccuuucuucacaaagcugcg

SEQ ID NO: 431221 - RNA, 24 nt, Human
gcaagcccugacccaauaaaggcu

SEQ ID NO: 431222 - RNA, 22 nt, Human
gcaagcccugcccacagaaagc

SEQ ID NO: 431223 - RNA, 32 nt, Human
gcaagcccugcucuccacaggcaccucugggg

SEQ ID NO: 431224 - RNA, 22 nt, Human
gcaagcccugggaccaagagcu

SEQ ID NO: 431225 - RNA, 32 nt, Human
gcaagccgaaaccacuuggcucuggaaaucua

SEQ ID NO: 431226 - RNA, 32 nt, Human
gcaagccgccucggcgcugccugcguugcaaa

SEQ ID NO: 431227 - RNA, 32 nt, Human
gcaagccguggauuuugcacauggugacuuuc

SEQ ID NO: 431228 - RNA, 32 nt, Human
gcaagccuaagcugggcacauaggaacggaaa

SEQ ID NO: 431229 - RNA, 32 nt, Human
gcaagccucacugccacugugccuuuggggca

SEQ ID NO: 431230 - RNA, 32 nt, Human
gcaagccucccuggaagcagacucuucagcac

SEQ ID NO: 431231 - RNA, 32 nt, Human
gcaagccucuguauuacacugcagcuuaacaa

SEQ ID NO: 431232 - RNA, 32 nt, Human
gcaagccugacuccugaaacugugcauuguac

SEQ ID NO: 431233 - RNA, 32 nt, Human
gcaagccugacuccugagacugugcauuguac

SEQ ID NO: 431234 - RNA, 32 nt, Human
gcaagccugcagcagcaggugcccccacguca

SEQ ID NO: 431235 - RNA, 32 nt, Human
gcaagccugggagcgcggagcccggcuaggga

SEQ ID NO: 431236 - RNA, 32 nt, Human
gcaagccugguguugcuccuguccucagaguc

SEQ ID NO: 431237 - RNA, 32 nt, Human
gcaagccuguaaucccagcuacucaggaggcu

SEQ ID NO: 431238 - RNA, 32 nt, Human
gcaagccuguaaucccagcuauuugggaggcu

SEQ ID NO: 431239 - RNA, 32 nt, Human
gcaagccuguagucccagcuacucgggaggcu

SEQ ID NO: 431240 - RNA, 32 nt, Human
gcaagccuugagcugcucagcugcccucugcu

SEQ ID NO: 431241 - RNA, 32 nt, Human
gcaagccuugcugguccaagugcaauauguaa

SEQ ID NO: 431242 - RNA, 32 nt, Human
gcaagcgcuguggugugcagcucuuauugucu

SEQ ID NO: 431243 - RNA, 32 nt, Human
gcaagcgcuugggcgaacaucuucccaaggca

SEQ ID NO: 431244 - RNA, 32 nt, Human
gcaagcggcccuggugggucugcgggggcagg

SEQ ID NO: 431245 - RNA, 32 nt, Human
gcaagcgggagagagcggcgaggcggcggcgc

SEQ ID NO: 431246 - RNA, 21 nt, Human
gcaagcgugagcuggcaccca

SEQ ID NO: 431247 - RNA, 32 nt, Human
gcaagcgugggcaagaugugcguggugcagcg

SEQ ID NO: 431248 - RNA, 32 nt, Human
gcaagcuaaucagucagacauucuuuaaugac

SEQ ID NO: 431249 - RNA, 32 nt, Human
gcaagcuaauuuaaaaacaugaugggcuguuu

SEQ ID NO: 431250 - RNA, 32 nt, Human
gcaagcuaccugcgacagcuugaacuuuuccu

SEQ ID NO: 431251 - RNA, 20 nt, Human
gcaagcucacauugcucucc

SEQ ID NO: 431252 - RNA, 32 nt, Human
gcaagcucagagccgcugccacccugcaugug

SEQ ID NO: 431253 - RNA, 32 nt, Human
gcaagcucagagcgcacggacagagcgguagc

SEQ ID NO: 431254 - RNA, 32 nt, Human
gcaagcucuuaaguucacagggugccugggcu

SEQ ID NO: 431255 - RNA, 32 nt, Human
gcaagcucuucagaaaaguuauggaguaguac

SEQ ID NO: 431256 - RNA, 32 nt, Human
gcaagcugagagagccggcucuggccuuggcc

SEQ ID NO: 431257 - RNA, 32 nt, Human
gcaagcugagcgccuccgcccgccaggcgcgc

SEQ ID NO: 431258 - RNA, 32 nt, Human
gcaagcugcacugugagcuggcugugggauac

SEQ ID NO: 431259 - RNA, 32 nt, Human
gcaagcugccagucggcucuuuuucgcaagcc

SEQ ID NO: 431260 - RNA, 32 nt, Human
gcaagcuggaaaggcaaaaaugagaaagaaaa

SEQ ID NO: 431261 - RNA, 19 nt, Human
gcaagcugggacuggcagg

SEQ ID NO: 431262 - RNA, 32 nt, Human
gcaagcuggguagcaggcagauccaaaggaua

SEQ ID NO: 431263 - RNA, 32 nt, Human
gcaagcuguaccagcagcuccuggggacgugc

SEQ ID NO: 431264 - RNA, 32 nt, Human
gcaagcuugcccugcccagccccaccaacuaa

SEQ ID NO: 431265 - RNA, 32 nt, Human
gcaagcuuuuacucuugcacuuucuuaagcag

SEQ ID NO: 431266 - RNA, 32 nt, Human
gcaaggaaaccagcuugguuuggcaaacagcu

SEQ ID NO: 431267 - RNA, 31 nt, Human
gcaaggaaaguguuucuaucacuggaaggag

SEQ ID NO: 431268 - RNA, 20 nt, Human
gcaaggaagaacccaagcaa

SEQ ID NO: 431269 - RNA, 32 nt, Human
gcaaggaagagaguuugaguuguuuaugggac

SEQ ID NO: 431270 - RNA, 32 nt, Human
gcaaggaagcaguuccagggagagucagguuc

SEQ ID NO: 431271 - RNA, 32 nt, Human
gcaaggaagcuauuuaacauggugcugagcua

SEQ ID NO: 431272 - RNA, 32 nt, Human
gcaaggaagugauuaucaggguugugaaggag

SEQ ID NO: 431273 - RNA, 32 nt, Human
gcaaggaaugggaacauuuccccaucagcaac

SEQ ID NO: 431274 - RNA, 32 nt, Human
gcaaggacaauccaggguccuggcuucagcuu

SEQ ID NO: 431275 - RNA, 20 nt, Human
gcaaggacacgcucucccca

SEQ ID NO: 431276 - RNA, 32 nt, Human
gcaaggaccagguguaccuggacggcaucgug

SEQ ID NO: 431277 - RNA, 32 nt, Human
gcaaggacccacaugaaaucaacucgacagau

SEQ ID NO: 431278 - RNA, 32 nt, Human
gcaaggacccgaaaucacagacauuagcaaug

SEQ ID NO: 431279 - RNA, 32 nt, Human
gcaaggaccguguuugacuuucuuggagaggu

SEQ ID NO: 431280 - RNA, 32 nt, Human
gcaaggacguuucuuucaucugccuuucaucc

SEQ ID NO: 431281 - RNA, 32 nt, Human
gcaaggacugcacuaguccagggaguagggga

SEQ ID NO: 431282 - RNA, 32 nt, Human
gcaaggagaaggauuucuguguuuuacucauu

SEQ ID NO: 431283 - RNA, 23 nt, Human
gcaaggagacuaaggcacuggaa

SEQ ID NO: 431284 - RNA, 32 nt, Human
gcaaggagagaggccucuagcagaucaugcaa

SEQ ID NO: 431285 - RNA, 31 nt, Human
gcaaggagagugcaugacucacuggaaccgc

SEQ ID NO: 431286 - RNA, 32 nt, Human
gcaaggagcacaagccacaagucuuccagagg

SEQ ID NO: 431287 - RNA, 32 nt, Human
gcaaggagcacauaccaucaagccacacuauc

SEQ ID NO: 431288 - RNA, 24 nt, Human
gcaaggagcugaccaggagguguc

SEQ ID NO: 431289 - RNA, 32 nt, Human
gcaaggagcugcugagaaggagcacuccacug

SEQ ID NO: 431290 - RNA, 32 nt, Human
gcaaggagcuguagauggaaggugucaaguuc

SEQ ID NO: 431291 - RNA, 32 nt, Human
gcaaggaggaagaggacucaaaagucuggccu

SEQ ID NO: 431292 - RNA, 32 nt, Human
gcaaggaggcgagggaccuggcccagcaccuc

SEQ ID NO: 431293 - RNA, 32 nt, Human
gcaaggagggagcacaacccccagcucccgcu

SEQ ID NO: 431294 - RNA, 20 nt, Human
gcaaggagguggcagagcca

SEQ ID NO: 431295 - RNA, 32 nt, Human
gcaaggaguacgugggcaagacuagccuggug

SEQ ID NO: 431296 - RNA, 32 nt, Human
gcaaggauaugaugagauuuugcucacaguca

SEQ ID NO: 431297 - RNA, 32 nt, Human
gcaaggaucucuuggaaugacaaaugauaggu

SEQ ID NO: 431298 - RNA, 32 nt, Human
gcaaggaugacucagcagggaugauucagcag

SEQ ID NO: 431299 - RNA, 32 nt, Human
gcaaggauggagcugaaaacauaacccacucu

SEQ ID NO: 431300 - RNA, 32 nt, Human
gcaaggauggcagaggaaaauaaacuuuacuu

SEQ ID NO: 431301 - RNA, 32 nt, Human
gcaaggaugucacugcugcucuugccugauga

SEQ ID NO: 431302 - RNA, 32 nt, Human
gcaaggauugcacguccugccugaccaccauc

SEQ ID NO: 431303 - RNA, 32 nt, Human
gcaaggcaaggaaagcugcuucccuggaagug

SEQ ID NO: 431304 - RNA, 32 nt, Human
gcaaggcacacacugcucaucuccgcuuuuua

SEQ ID NO: 431305 - RNA, 32 nt, Human
gcaaggcacauacauaaugacuuucuuuuucc

SEQ ID NO: 431306 - RNA, 32 nt, Human
gcaaggcaccugcuggcaauggcaggaggcgg

SEQ ID NO: 431307 - RNA, 32 nt, Human
gcaaggcacucaaaacaugucauucauuaaau

SEQ ID NO: 431308 - RNA, 32 nt, Human
gcaaggcagagaggacacaggagagccagccc

SEQ ID NO: 431309 - RNA, 32 nt, Human
gcaaggcagccgugggccccacccucggggau

SEQ ID NO: 431310 - RNA, 32 nt, Human
gcaaggcagggguggaggggagggaccagccc

SEQ ID NO: 431311 - RNA, 32 nt, Human
gcaaggcauggagccugcacuuuacucugaau

SEQ ID NO: 431312 - RNA, 32 nt, Human
gcaaggccacaaccuccauucucccagaaaag

SEQ ID NO: 431313 - RNA, 26 nt, Human
gcaaggccacagcccucuuccugcca

SEQ ID NO: 431314 - RNA, 32 nt, Human
gcaaggccacggucagcacaggcacggucccg

SEQ ID NO: 431315 - RNA, 32 nt, Human
gcaaggccacuggguugcuauccucuugcugg

SEQ ID NO: 431316 - RNA, 32 nt, Human
gcaaggccagugcugugccaagcccgguaagg

SEQ ID NO: 431317 - RNA, 32 nt, Human
gcaaggcccagccgaaguuccacuaaaaaugc

SEQ ID NO: 431318 - RNA, 32 nt, Human
gcaaggcccagcugaggugguggagggagccc

SEQ ID NO: 431319 - RNA, 32 nt, Human
gcaaggcccaggaguuccagcccucagguucc

SEQ ID NO: 431320 - RNA, 18 nt, Human
gcaaggcccccgacagca

SEQ ID NO: 431321 - RNA, 32 nt, Human
gcaaggccccuggagcagcggagagacaagau

SEQ ID NO: 431322 - RNA, 32 nt, Human
gcaaggcccucugaagcaugggccgugccagc

SEQ ID NO: 431323 - RNA, 23 nt, Human
gcaaggcccugagggcaacagca

SEQ ID NO: 431324 - RNA, 32 nt, Human
gcaaggcccugcgugccugcugcuggccgggc

SEQ ID NO: 431325 - RNA, 32 nt, Human
gcaaggccgguggaugcagaggccaguccaua

SEQ ID NO: 431326 - RNA, 32 nt, Human
gcaaggccucugccccuggccuuugaggcaaa

SEQ ID NO: 431327 - RNA, 32 nt, Human
gcaaggccucuuuguucucaaaccgggccgug

SEQ ID NO: 431328 - RNA, 32 nt, Human
gcaaggccugggaagaguuucgaugucucuag

SEQ ID NO: 431329 - RNA, 19 nt, Human
gcaaggccugugggucuuc

SEQ ID NO: 431330 - RNA, 20 nt, Human
gcaaggccuuaguaacagca

SEQ ID NO: 431331 - RNA, 32 nt, Human
gcaaggccuucacugcagccccaucuccuccu

SEQ ID NO: 431332 - RNA, 32 nt, Human
gcaaggccuugcaaaugcauuuauaccuguaa

SEQ ID NO: 431333 - RNA, 24 nt, Human
gcaaggcgaagggguggagaguga

SEQ ID NO: 431334 - RNA, 32 nt, Human
gcaaggcgggcagaucauuugaggucagaaau

SEQ ID NO: 431335 - RNA, 32 nt, Human
gcaaggcucucgggggcaacgcucagcuuucu

SEQ ID NO: 431336 - RNA, 18 nt, Human
gcaaggcucugaccagug

SEQ ID NO: 431337 - RNA, 32 nt, Human
gcaaggcugagucuccagcccaggccuccuuc

SEQ ID NO: 431338 - RNA, 32 nt, Human
gcaaggcuggggcaucccagcccacacacccu

SEQ ID NO: 431339 - RNA, 21 nt, Human
gcaaggcugggggaggguguc

SEQ ID NO: 431340 - RNA, 19 nt, Human
gcaaggcugggugcagugg

SEQ ID NO: 431341 - RNA, 32 nt, Human
gcaaggcuucccaucccucccuuccucuucuc

SEQ ID NO: 431342 - RNA, 32 nt, Human
gcaaggcuugcuuuccccuugggugcuggccu

SEQ ID NO: 431343 - RNA, 32 nt, Human
gcaaggcuuggagagcugcucuuuaggaucca

SEQ ID NO: 431344 - RNA, 32 nt, Human
gcaaggcuugggaggcggggcccugcaggacg

SEQ ID NO: 431345 - RNA, 32 nt, Human
gcaagggaagagagcugaggagagggaaguga

SEQ ID NO: 431346 - RNA, 32 nt, Human
gcaagggacacagaauaugcagaggaaccugg

SEQ ID NO: 431347 - RNA, 32 nt, Human
gcaagggaccucaggcugccccucucuccucc

SEQ ID NO: 431348 - RNA, 32 nt, Human
gcaagggacguggacggggcagugagccaggc

SEQ ID NO: 431349 - RNA, 32 nt, Human
gcaagggagaggguuccagaagcauugccuuu

SEQ ID NO: 431350 - RNA, 32 nt, Human
gcaagggagauggucucaagucagagggaagc

SEQ ID NO: 431351 - RNA, 32 nt, Human
gcaagggaggcuuccuggaggaagcggcauug

SEQ ID NO: 431352 - RNA, 32 nt, Human
gcaagggagggggagagaagcagagggagaga

SEQ ID NO: 431353 - RNA, 32 nt, Human
gcaagggagguguuacagcugguucugagccg

SEQ ID NO: 431354 - RNA, 32 nt, Human
gcaagggaguccgcagccuccgggaggagggg

SEQ ID NO: 431355 - RNA, 32 nt, Human
gcaagggaugcagcuauuuggggaagaguguu

SEQ ID NO: 431356 - RNA, 32 nt, Human
gcaagggauucugcucauguguuugcagaccg

SEQ ID NO: 431357 - RNA, 32 nt, Human
gcaagggcaggcaaucuugguugugaauauuu

SEQ ID NO: 431358 - RNA, 20 nt, Human
gcaagggcaggcuggcugca

SEQ ID NO: 431359 - RNA, 32 nt, Human
gcaagggcaggggucccugagcuguucuucug

SEQ ID NO: 431360 - RNA, 32 nt, Human
gcaagggcaggguucagaaagacugaauguaa

SEQ ID NO: 431361 - RNA, 32 nt, Human
gcaagggcagugagaggaagggagggaugagg

SEQ ID NO: 431362 - RNA, 32 nt, Human
gcaagggcaguggccccaggaguguggagagu

SEQ ID NO: 431363 - RNA, 32 nt, Human
gcaagggcucggucggcccacccaggaccaaa

SEQ ID NO: 431364 - RNA, 32 nt, Human
gcaagggcugccucuaacaccuccagguucuc

SEQ ID NO: 431365 - RNA, 32 nt, Human
gcaagggcuuagggguuggagguggcagauaa

SEQ ID NO: 431366 - RNA, 32 nt, Human
gcaaggggaaaggucuccuugccccucucccu

SEQ ID NO: 431367 - RNA, 32 nt, Human
gcaaggggaccagggaccuggaacccucuugg

SEQ ID NO: 431368 - RNA, 32 nt, Human
gcaaggggaggcaggaggguggccuggaccuc

SEQ ID NO: 431369 - RNA, 32 nt, Human
gcaaggggagggaagagagagguguggggugg

SEQ ID NO: 431370 - RNA, 32 nt, Human
gcaaggggccguggcuucauucuugaagucag

SEQ ID NO: 431371 - RNA, 32 nt, Human
gcaagggggaacaaaucacaccucugggcuuc

SEQ ID NO: 431372 - RNA, 32 nt, Human
gcaagggggaguguagagcagagcagaagccu

SEQ ID NO: 431373 - RNA, 18 nt, Human
gcaaggggugcaugggaa

SEQ ID NO: 431374 - RNA, 32 nt, Human
gcaagggguuuguccagguggccccugaauuc

SEQ ID NO: 431375 - RNA, 32 nt, Human
gcaagggugguuuggaugaagucugacuacuu

SEQ ID NO: 431376 - RNA, 32 nt, Human
gcaaggguucccucaagaggaaguggcggugc

SEQ ID NO: 431377 - RNA, 18 nt, Human
gcaaggguugcggugcag

SEQ ID NO: 431378 - RNA, 32 nt, Human
gcaagguagagugccuaggagcccuggacuca

SEQ ID NO: 431379 - RNA, 24 nt, Human
gcaagguagcucaugucuguaauc

SEQ ID NO: 431380 - RNA, 32 nt, Human
gcaaggucaagaaaucccacaguuugauguau

SEQ ID NO: 431381 - RNA, 32 nt, Human
gcaaggucagcgagagacaguucuccaugcca

SEQ ID NO: 431382 - RNA, 32 nt, Human
gcaagguccuagcauggagaaacuccaagcuc

SEQ ID NO: 431383 - RNA, 32 nt, Human
gcaaggucuaccuggcacgguggggcauccaa

SEQ ID NO: 431384 - RNA, 32 nt, Human
gcaaggucuggaccaucucucugcaacugacc

SEQ ID NO: 431385 - RNA, 22 nt, Human
gcaaggucuuaccugaaucagg

SEQ ID NO: 431386 - RNA, 18 nt, Human
gcaaggugauggcugcag

SEQ ID NO: 431387 - RNA, 32 nt, Human
gcaaggugcccugagcuccccugggcagcacc

SEQ ID NO: 431388 - RNA, 32 nt, Human
gcaaggugcugccccagggaaaaggcccacag

SEQ ID NO: 431389 - RNA, 32 nt, Human
gcaagguggaaagauaagaagcagaggggucc

SEQ ID NO: 431390 - RNA, 32 nt, Human
gcaagguggcggcugaggaagagcagagcccc

SEQ ID NO: 431391 - RNA, 24 nt, Human
gcaagguggcucacaccuauaauc

SEQ ID NO: 431392 - RNA, 32 nt, Human
gcaaggugguggcgccgagaggcgugucugug

SEQ ID NO: 431393 - RNA, 32 nt, Human
gcaaggugucccacccuccccuccugacccuc

SEQ ID NO: 431394 - RNA, 32 nt, Human
gcaaggugucccugccuucacugugcuccaac

SEQ ID NO: 431395 - RNA, 32 nt, Human
gcaagguguggaauauuucuggcuucuagucc

SEQ ID NO: 431396 - RNA, 32 nt, Human
gcaagguugugccaauggcauggaaucaggac

SEQ ID NO: 431397 - RNA, 32 nt, Human
gcaagguugugucuugcgcaugguuaaaaaua

SEQ ID NO: 431398 - RNA, 32 nt, Human
gcaagguuucaaggaggggaaaaagaacgggu

SEQ ID NO: 431399 - RNA, 32 nt, Human
gcaaguacagcacuuucuagauugcuccugga

SEQ ID NO: 431400 - RNA, 32 nt, Human
gcaaguaccacuccauccagccuugggcaaga

SEQ ID NO: 431401 - RNA, 21 nt, Human
gcaaguagcuaugacugcaga

SEQ ID NO: 431402 - RNA, 32 nt, Human
gcaaguaggacagagagaugacuggggaaggu

SEQ ID NO: 431403 - RNA, 32 nt, Human
gcaaguaguagaaaagaauaggcaagaugggg

SEQ ID NO: 431404 - RNA, 32 nt, Human
gcaaguaucugugaauccuuagcacugacggg

SEQ ID NO: 431405 - RNA, 32 nt, Human
gcaaguauuugcccacuuguguucugugagca

SEQ ID NO: 431406 - RNA, 32 nt, Human
gcaagucacaaaggaauggaggcucuaauuga

SEQ ID NO: 431407 - RNA, 32 nt, Human
gcaagucacagaaauugcaccucauuccaguc

SEQ ID NO: 431408 - RNA, 32 nt, Human
gcaagucacaggaucacuggguggugaaagaa

SEQ ID NO: 431409 - RNA, 32 nt, Human
gcaagucaucccucagugaaagcaccagucuc

SEQ ID NO: 431410 - RNA, 32 nt, Human
gcaagucauucagcuaauacaaagcuguuuua

SEQ ID NO: 431411 - RNA, 32 nt, Human
gcaagucauuguccucugagcugcaguuuccu

SEQ ID NO: 431412 - RNA, 32 nt, Human
gcaaguccagccucgucuuggguuacucugac

SEQ ID NO: 431413 - RNA, 32 nt, Human
gcaaguccagggagagcuaaagagguuuuauc

SEQ ID NO: 431414 - RNA, 22 nt, Human
gcaagucccccgcugagggcca

SEQ ID NO: 431415 - RNA, 32 nt, Human
gcaaguccccuccuggggccccagacgccccc

SEQ ID NO: 431416 - RNA, 23 nt, Human
gcaagucccggagagcaacagca

SEQ ID NO: 431417 - RNA, 32 nt, Human
gcaaguccuccaggguugcaccagguuuaccu

SEQ ID NO: 431418 - RNA, 32 nt, Human
gcaaguccucccagccagagcuggcgggcugg

SEQ ID NO: 431419 - RNA, 32 nt, Human
gcaaguccugcacaccugagagcccagggagc

SEQ ID NO: 431420 - RNA, 32 nt, Human
gcaaguccuggacccggaggaggaggagcggc

SEQ ID NO: 431421 - RNA, 32 nt, Human
gcaaguccugucucacuugaucuuugggagca

SEQ ID NO: 431422 - RNA, 32 nt, Human
gcaaguccugugggagauggcagaggccuggu

SEQ ID NO: 431423 - RNA, 32 nt, Human
gcaagucggaccuauggcgccagccugcucca

SEQ ID NO: 431424 - RNA, 24 nt, Human
gcaagucuccuacggcuuccuggg

SEQ ID NO: 431425 - RNA, 24 nt, Human
gcaagucuucaugauucugucaua

SEQ ID NO: 431426 - RNA, 32 nt, Human
gcaagucuuucuguagagaugcagcauuugua

SEQ ID NO: 431427 - RNA, 32 nt, Human
gcaagugaaagcuuccugaggucuccccggaa

SEQ ID NO: 431428 - RNA, 32 nt, Human
gcaagugaaaggaggaggcuucuguguaaaug

SEQ ID NO: 431429 - RNA, 32 nt, Human
gcaagugaacucagcacucugcagugagaggg

SEQ ID NO: 431430 - RNA, 32 nt, Human
gcaagugaagccagaggagggucccccagcug

SEQ ID NO: 431431 - RNA, 32 nt, Human
gcaagugacagaccuuccccaggcucugcuuc

SEQ ID NO: 431432 - RNA, 18 nt, Human
gcaagugacaugccaucc

SEQ ID NO: 431433 - RNA, 32 nt, Human
gcaagugagacuccacccuccccaccuggcuc

SEQ ID NO: 431434 - RNA, 32 nt, Human
gcaagugagcaacuucaggcucucugggcaga

SEQ ID NO: 431435 - RNA, 32 nt, Human
gcaagugagccaagaaccuaggagcagggcca

SEQ ID NO: 431436 - RNA, 32 nt, Human
gcaagugagccccagcuggacucauggaugug

SEQ ID NO: 431437 - RNA, 21 nt, Human
gcaagugaggcaagagaaaug

SEQ ID NO: 431438 - RNA, 24 nt, Human
gcaagugagggaaaaagcugaggu

SEQ ID NO: 431439 - RNA, 32 nt, Human
gcaagugauagugagagaagaggcagaggaau

SEQ ID NO: 431440 - RNA, 32 nt, Human
gcaagugcaagccuggcugacacaggugugaa

SEQ ID NO: 431441 - RNA, 32 nt, Human
gcaagugccaagcagaacagaccuuaucaucu

SEQ ID NO: 431442 - RNA, 32 nt, Human
gcaagugccacauggcucguggagggugggua

SEQ ID NO: 431443 - RNA, 32 nt, Human
gcaagugccacauuuucccuggcagagaucuc

SEQ ID NO: 431444 - RNA, 32 nt, Human
gcaagugcccaucuuuccccagccucucauca

SEQ ID NO: 431445 - RNA, 31 nt, Human
gcaagugcgcagagagaagacuggcagugga

SEQ ID NO: 431446 - RNA, 32 nt, Human
gcaagugcgcgguuggggccacugcgaggccg

SEQ ID NO: 431447 - RNA, 32 nt, Human
gcaagugcuauuucagcaacaaccaucucauc

SEQ ID NO: 431448 - RNA, 32 nt, Human
gcaagugcugccuaugcugagaacaagucaga

SEQ ID NO: 431449 - RNA, 24 nt, Human
gcaaguggaucacuugaggucagg

SEQ ID NO: 431450 - RNA, 32 nt, Human
gcaaguggcaccugcaccuggccacgccgcgc

SEQ ID NO: 431451 - RNA, 32 nt, Human
gcaagugggagagggaaaaugacucgggacgc

SEQ ID NO: 431452 - RNA, 32 nt, Human
gcaagugggaggauuguuugagcccaggaauc

SEQ ID NO: 431453 - RNA, 32 nt, Human
gcaaguggguaugucauaaggagucagauuau

SEQ ID NO: 431454 - RNA, 32 nt, Human
gcaaguggucucaggauucucuggagauuuug

SEQ ID NO: 431455 - RNA, 32 nt, Human
gcaaguggugcuggugacaucccagcuccugu

SEQ ID NO: 431456 - RNA, 32 nt, Human
gcaagugucauugacucucuaaacuugaaguc

SEQ ID NO: 431457 - RNA, 32 nt, Human
gcaagugucuaacuucugugccuguuaaucau

SEQ ID NO: 431458 - RNA, 32 nt, Human
gcaagugugcacacccuccgccagaccucacu

SEQ ID NO: 431459 - RNA, 32 nt, Human
gcaagugugcgucuauuuccauggcgcccugg

SEQ ID NO: 431460 - RNA, 32 nt, Human
gcaaguucaacagucaaacuguuuucauucca

SEQ ID NO: 431461 - RNA, 32 nt, Human
gcaaguucccuaaccucucccaacacagccuc

SEQ ID NO: 431462 - RNA, 32 nt, Human
gcaaguucuacgugggagucugugcauuugug

SEQ ID NO: 431463 - RNA, 28 nt, Human
gcaaguugaaagaucuaguuuuaucuua

SEQ ID NO: 431464 - RNA, 32 nt, Human
gcaaguugacuucauccugucauuccagccug

SEQ ID NO: 431465 - RNA, 32 nt, Human
gcaaguugcaauuuagaagaugccauacgucg

SEQ ID NO: 431466 - RNA, 32 nt, Human
gcaaguugccuauguccauguucugugagaug

SEQ ID NO: 431467 - RNA, 32 nt, Human
gcaaguuggacacaccccuccucgcuggagag

SEQ ID NO: 431468 - RNA, 22 nt, Human
gcaaguuguccaucaguauccu

SEQ ID NO: 431469 - RNA, 32 nt, Human
gcaaguugugccuauuuccuccaagucagaua

SEQ ID NO: 431470 - RNA, 32 nt, Human
gcaaguuuaaaacaaaaauuaggagguuguau

SEQ ID NO: 431471 - RNA, 32 nt, Human
gcaaguuuacauguauucccugggcaacacug

SEQ ID NO: 431472 - RNA, 32 nt, Human
gcaaguuucaagauguuuugggugacaaugca

SEQ ID NO: 431473 - RNA, 32 nt, Human
gcaaguuucauuuuugucaugacaauguagga

SEQ ID NO: 431474 - RNA, 32 nt, Human
gcaaguuucuggcuugccugugaugggugaug

SEQ ID NO: 431475 - RNA, 32 nt, Human
gcaaguuuucccuucugcucuggugccaggga

SEQ ID NO: 431476 - RNA, 32 nt, Human
gcaauaaaaagcauacuuucagacaaacgggg

SEQ ID NO: 431477 - RNA, 23 nt, Human
gcaauaaaccagaaccaaagucg

SEQ ID NO: 431478 - RNA, 32 nt, Human
gcaauaaacugcauuugaaauucuccaugucu

SEQ ID NO: 431479 - RNA, 32 nt, Human
gcaauaaagucucccugaguggugaguucucc

SEQ ID NO: 431480 - RNA, 20 nt, Human
gcaauaacagaucugccaca

SEQ ID NO: 431481 - RNA, 32 nt, Human
gcaauaacaucaacaucaacaaaaaggaggac

SEQ ID NO: 431482 - RNA, 32 nt, Human
gcaauaacuccaugggcucugggacccuaccc

SEQ ID NO: 431483 - RNA, 32 nt, Human
gcaauaacuggaccagggggagcugcugucac

SEQ ID NO: 431484 - RNA, 24 nt, Human
gcaauaacuuguggccacuggaaa

SEQ ID NO: 431485 - RNA, 32 nt, Human
gcaauaaggcuggagaaggaaaagccggcgcg

SEQ ID NO: 431486 - RNA, 32 nt, Human
gcaauaaguauuagucuuuuuggacuauggua

SEQ ID NO: 431487 - RNA, 31 nt, Human
gcaauaagugagaguuagaaaggugucaaag

SEQ ID NO: 431488 - RNA, 21 nt, Human
gcaauaaguggaccuuuguua

SEQ ID NO: 431489 - RNA, 20 nt, Human
gcaauaauaggauucauuua

SEQ ID NO: 431490 - RNA, 32 nt, Human
gcaauaauuuuacaggcauuuugaggugucuc

SEQ ID NO: 431491 - RNA, 32 nt, Human
gcaauaccauucaggacacaggcaugggcaag

SEQ ID NO: 431492 - RNA, 32 nt, Human
gcaauaccccgaagcacaggcaaccaaagcaa

SEQ ID NO: 431493 - RNA, 32 nt, Human
gcaauacucccuucagcuucagcaggugaaaa

SEQ ID NO: 431494 - RNA, 32 nt, Human
gcaauacuguucugucaucuggagcuauuuuu

SEQ ID NO: 431495 - RNA, 32 nt, Human
gcaauagaagugauuaauucauuaagcauuua

SEQ ID NO: 431496 - RNA, 32 nt, Human
gcaauagacuaggaggucucugauuucuucuu

SEQ ID NO: 431497 - RNA, 32 nt, Human
gcaauagcaaucuucaugaugccuagaagggc

SEQ ID NO: 431498 - RNA, 32 nt, Human
gcaauaggugugaacagggaacucagaauaca

SEQ ID NO: 431499 - RNA, 32 nt, Human
gcaauaguccuuuccacuacaggccaggggau

SEQ ID NO: 431500 - RNA, 32 nt, Human
gcaauaguuucaucaauuccaaguuaugugga

SEQ ID NO: 431501 - RNA, 32 nt, Human
gcaauauaaugcugcauguucaagaugaacag

SEQ ID NO: 431502 - RNA, 32 nt, Human
gcaauaugccgccgcggcccucuggcucuagg

SEQ ID NO: 431503 - RNA, 32 nt, Human
gcaauauuguauauuuuuaagaacaaauuuaa

SEQ ID NO: 431504 - RNA, 32 nt, Human
gcaaucaaguccuggaaacacuuucaaccuag

SEQ ID NO: 431505 - RNA, 32 nt, Human
gcaaucaaguuucuucuuuuccacuuuuacuu

SEQ ID NO: 431506 - RNA, 32 nt, Human
gcaaucaauguucacgcaacuugaaauuauau

SEQ ID NO: 431507 - RNA, 32 nt, Human
gcaaucaccaugggacugcggaagagaaaucc

SEQ ID NO: 431508 - RNA, 32 nt, Human
gcaaucacuuuugcuccaaccuaguaauugca

SEQ ID NO: 431509 - RNA, 23 nt, Human
gcaaucagaccuuccagcugccu

SEQ ID NO: 431510 - RNA, 32 nt, Human
gcaaucagccccuaccaugagcauuaaugcca

SEQ ID NO: 431511 - RNA, 32 nt, Human
gcaaucaggaagggagagagcuggggaccaua

SEQ ID NO: 431512 - RNA, 32 nt, Human
gcaaucaggcaacccaggaauguggccaucaa

SEQ ID NO: 431513 - RNA, 32 nt, Human
gcaaucauugcagcuucuucuuucuucugcuc

SEQ ID NO: 431514 - RNA, 32 nt, Human
gcaaucauuggggaagagagccugaggcuggc

SEQ ID NO: 431515 - RNA, 32 nt, Human
gcaauccacagacgcaccuguguccaucagac

SEQ ID NO: 431516 - RNA, 32 nt, Human
gcaauccagcacuuugggaagcugaggcaggu

SEQ ID NO: 431517 - RNA, 32 nt, Human
gcaauccaugcacacucuguacaguuguuuuu

SEQ ID NO: 431518 - RNA, 32 nt, Human
gcaaucccagcaccaugggaggcugagcagga

SEQ ID NO: 431519 - RNA, 32 nt, Human
gcaaucccagcacuuugggagacugaggcggg

SEQ ID NO: 431520 - RNA, 32 nt, Human
gcaaucccccaugcccuuaggagcaagcaguu

SEQ ID NO: 431521 - RNA, 32 nt, Human
gcaauccucaagaggggagacagagcggcagc

SEQ ID NO: 431522 - RNA, 32 nt, Human
gcaauccuccacgaucucauggcuccaccugc

SEQ ID NO: 431523 - RNA, 32 nt, Human
gcaauccucccaccucagccucccaagaagcu

SEQ ID NO: 431524 - RNA, 32 nt, Human
gcaauccucccaucucagccuccugaguagcu

SEQ ID NO: 431525 - RNA, 32 nt, Human
gcaauccucccaucucagccucuuaaaguguu

SEQ ID NO: 431526 - RNA, 32 nt, Human
gcaauccuccugccucagccuccugaguagcu

SEQ ID NO: 431527 - RNA, 32 nt, Human
gcaauccuuccucuuuggccucccaaaauguu

SEQ ID NO: 431528 - RNA, 32 nt, Human
gcaauccuuccucuuuggccucccaacauguu

SEQ ID NO: 431529 - RNA, 32 nt, Human
gcaauccuuccucuuuggccucccaacuuguu

SEQ ID NO: 431530 - RNA, 32 nt, Human
gcaauccuugugccucagccuccugaguagcu

SEQ ID NO: 431531 - RNA, 32 nt, Human
gcaaucgggcagugaaacuugauauuguauua

SEQ ID NO: 431532 - RNA, 32 nt, Human
gcaaucuaccucuucuuugucuaguuaccccc

SEQ ID NO: 431533 - RNA, 32 nt, Human
gcaaucucacugcaaccuccgccuuccaguug

SEQ ID NO: 431534 - RNA, 32 nt, Human
gcaaucucacugcaagcuccacuuccuggguu

SEQ ID NO: 431535 - RNA, 32 nt, Human
gcaaucucacugcaagcucugccucccagguu

SEQ ID NO: 431536 - RNA, 32 nt, Human
gcaaucucacugcauccuccgccucccggguu

SEQ ID NO: 431537 - RNA, 32 nt, Human
gcaaucuccagccugcugcugcuggcugcaac

SEQ ID NO: 431538 - RNA, 19 nt, Human
gcaaucucuagcguccucu

SEQ ID NO: 431539 - RNA, 32 nt, Human
gcaaucucuuugaacagagguuuauucaauga

SEQ ID NO: 431540 - RNA, 32 nt, Human
gcaaucugcacuguccagccuagcaggccgcc

SEQ ID NO: 431541 - RNA, 32 nt, Human
gcaaucuggacucucuggacacugugcaugcu

SEQ ID NO: 431542 - RNA, 32 nt, Human
gcaaucugggagguggaaguugcagugagccg

SEQ ID NO: 431543 - RNA, 32 nt, Human
gcaaucugguggcugcugucaucuguccccag

SEQ ID NO: 431544 - RNA, 32 nt, Human
gcaaucuucaaaagcacuuucaguggauuggu

SEQ ID NO: 431545 - RNA, 32 nt, Human
gcaaucuuguaacuuugauaaugaacagugag

SEQ ID NO: 431546 - RNA, 32 nt, Human
gcaaucuuucugccuccaccucccgaguggcu

SEQ ID NO: 431547 - RNA, 32 nt, Human
gcaaucuuugccuuuaucucugaggcuaugga

SEQ ID NO: 431548 - RNA, 32 nt, Human
gcaaugaagcagaaauagaguaugugucccuu

SEQ ID NO: 431549 - RNA, 32 nt, Human
gcaaugaagcggagguugcagugagccgagag

SEQ ID NO: 431550 - RNA, 32 nt, Human
gcaaugaagugacaagaugagagcagaaucgu

SEQ ID NO: 431551 - RNA, 32 nt, Human
gcaaugacacaaauagguuuuggggaucuacc

SEQ ID NO: 431552 - RNA, 32 nt, Human
gcaaugacauaaaaacugcuauggagagaaag

SEQ ID NO: 431553 - RNA, 32 nt, Human
gcaaugacugcagcaccuccugggcuuacaca

SEQ ID NO: 431554 - RNA, 32 nt, Human
gcaaugacuugacuuuaaacagucuucuuuuu

SEQ ID NO: 431555 - RNA, 32 nt, Human
gcaaugagaccugaagacaggagccagccucc

SEQ ID NO: 431556 - RNA, 32 nt, Human
gcaaugagaucagcagcauggagugucugugu

SEQ ID NO: 431557 - RNA, 32 nt, Human
gcaaugagcuacucgggccagaugggggccug

SEQ ID NO: 431558 - RNA, 32 nt, Human
gcaaugaugcaaucucaguucacugcagucuc

SEQ ID NO: 431559 - RNA, 32 nt, Human
gcaaugauuccuaugggaucauugauuggucc

SEQ ID NO: 431560 - RNA, 32 nt, Human
gcaaugcagacacgagaaggagggcucagccu

SEQ ID NO: 431561 - RNA, 32 nt, Human
gcaaugcagacuggaauccuccccacaaggau

SEQ ID NO: 431562 - RNA, 32 nt, Human
gcaaugcaucuucucccccagaucaucacaga

SEQ ID NO: 431563 - RNA, 32 nt, Human
gcaaugccaagacagugaagaaugacaacucc

SEQ ID NO: 431564 - RNA, 32 nt, Human
gcaaugccagggcacagcuggggaagaucuug

SEQ ID NO: 431565 - RNA, 32 nt, Human
gcaaugccaguaaacuuaaauuacguaacuuc

SEQ ID NO: 431566 - RNA, 32 nt, Human
gcaaugccauccucgccauauaccaaauaauc

SEQ ID NO: 431567 - RNA, 32 nt, Human
gcaaugccgaguggaggaaggaggaaccggag

SEQ ID NO: 431568 - RNA, 28 nt, Human
gcaaugccuaaaggaggaagaaagggag

SEQ ID NO: 431569 - RNA, 21 nt, Human
gcaaugccuaagacuuuguua

SEQ ID NO: 431570 - RNA, 32 nt, Human
gcaaugccucaagggagugagcucucaaccac

SEQ ID NO: 431571 - RNA, 32 nt, Human
gcaaugcguguuguacauacagagguaacuau

SEQ ID NO: 431572 - RNA, 32 nt, Human
gcaaugcuccaaugcugagcuagaucuuucuu

SEQ ID NO: 431573 - RNA, 32 nt, Human
gcaaugcugaagaagcuauggaagcaagaagg

SEQ ID NO: 431574 - RNA, 32 nt, Human
gcaaugcuguaaccuggugccugcugcugugc

SEQ ID NO: 431575 - RNA, 32 nt, Human
gcaaugcuuugcaagucuuuacugcuuggagg

SEQ ID NO: 431576 - RNA, 32 nt, Human
gcaauggagaaggcaggaaggcaggggccuug

SEQ ID NO: 431577 - RNA, 32 nt, Human
gcaauggagguggucagaaauggauggauucu

SEQ ID NO: 431578 - RNA, 22 nt, Human
gcaauggagugggcagcugggg

SEQ ID NO: 431579 - RNA, 32 nt, Human
gcaauggauggcuucaauauccuugggcccag

SEQ ID NO: 431580 - RNA, 32 nt, Human
gcaauggcaaaaauauuuccaguugcacugua

SEQ ID NO: 431581 - RNA, 32 nt, Human
gcaauggcagcugcugugugaggaccaguguc

SEQ ID NO: 431582 - RNA, 32 nt, Human
gcaauggcaggaucucagaucacugcaaccuc

SEQ ID NO: 431583 - RNA, 19 nt, Human
gcaauggcagggccagcag

SEQ ID NO: 431584 - RNA, 32 nt, Human
gcaauggcaugaucucgccuccuggguucaag

SEQ ID NO: 431585 - RNA, 20 nt, Human
gcaauggccagcggcuccgg

SEQ ID NO: 431586 - RNA, 25 nt, Human
gcaauggccaucacaguaaagggaa

SEQ ID NO: 431587 - RNA, 32 nt, Human
gcaauggccuuagcugucccacacaacucagu

SEQ ID NO: 431588 - RNA, 22 nt, Human
gcaauggcucacaccuauaauc

SEQ ID NO: 431589 - RNA, 22 nt, Human
gcaauggcucacaccuguaauu

SEQ ID NO: 431590 - RNA, 32 nt, Human
gcaauggcucacaccuguuaaucccagcacuu

SEQ ID NO: 431591 - RNA, 22 nt, Human
gcaauggcucacaccuguuauc

SEQ ID NO: 431592 - RNA, 22 nt, Human
gcaauggcucacacuuguaauc

SEQ ID NO: 431593 - RNA, 22 nt, Human
gcaauggcucacgccuguaauc

SEQ ID NO: 431594 - RNA, 32 nt, Human
gcaauggcucacgccuguaauccuagcauuuu

SEQ ID NO: 431595 - RNA, 32 nt, Human
gcaauggcucacugcagccucaaccuccugag

SEQ ID NO: 431596 - RNA, 22 nt, Human
gcaauggcucaugccuauaauc

SEQ ID NO: 431597 - RNA, 22 nt, Human
gcaauggcucaugccuguaauc

SEQ ID NO: 431598 - RNA, 22 nt, Human
gcaauggcucgcaccuguaauc

SEQ ID NO: 431599 - RNA, 31 nt, Human
gcaaugggcaaaggggcugugccuugcagcc

SEQ ID NO: 431600 - RNA, 32 nt, Human
gcaaugggcagagagagcagagacagguggac

SEQ ID NO: 431601 - RNA, 28 nt, Human
gcaaugggcauccugaagcugcaaguau

SEQ ID NO: 431602 - RNA, 32 nt, Human
gcaaugggcucccuacccacacuggcuuccug

SEQ ID NO: 431603 - RNA, 32 nt, Human
gcaaugggggagaagagguuaguggaucgggg

SEQ ID NO: 431604 - RNA, 32 nt, Human
gcaauggguaacugaagcuuuugggcucgggg

SEQ ID NO: 431605 - RNA, 32 nt, Human
gcaaugggugagaugagauccuggagagagaa

SEQ ID NO: 431606 - RNA, 32 nt, Human
gcaauggguggguagugcagugggcggugccg

SEQ ID NO: 431607 - RNA, 32 nt, Human
gcaaugguaaauuaaguugucuuccaaaacug

SEQ ID NO: 431608 - RNA, 32 nt, Human
gcaaugguaauuccuuuccucuuuuccuucca

SEQ ID NO: 431609 - RNA, 32 nt, Human
gcaauggugcaaucucaguucacugcagucuc

SEQ ID NO: 431610 - RNA, 32 nt, Human
gcaauggugcaaucuuggcucacuauagccuu

SEQ ID NO: 431611 - RNA, 32 nt, Human
gcaauguauacauguaucaaaacaucacacug

SEQ ID NO: 431612 - RNA, 32 nt, Human
gcaaugucugagccccuagcugugcugguccg

SEQ ID NO: 431613 - RNA, 28 nt, Human
gcaauguggcugaggaagggagccaaaa

SEQ ID NO: 431614 - RNA, 32 nt, Human
gcaauguggcugcuuugacuguacuggacaua

SEQ ID NO: 431615 - RNA, 32 nt, Human
gcaaugugggacaaugaaaaaugcuuuacagg

SEQ ID NO: 431616 - RNA, 32 nt, Human
gcaaugugugaucccagcucucugccagacug

SEQ ID NO: 431617 - RNA, 32 nt, Human
gcaaugugugcaccuccacacacugcuaaaug

SEQ ID NO: 431618 - RNA, 32 nt, Human
gcaauguuacggugaauucucaggugaacuuu

SEQ ID NO: 431619 - RNA, 32 nt, Human
gcaauguuccaucauguuccaugcugcugacg

SEQ ID NO: 431620 - RNA, 32 nt, Human
gcaauguuccaucauguuccaugcugcugcug

SEQ ID NO: 431621 - RNA, 23 nt, Human
gcaauguuggguuggggaagaca

SEQ ID NO: 431622 - RNA, 32 nt, Human
gcaauguuuccauuaaguagagacucagcugu

SEQ ID NO: 431623 - RNA, 19 nt, Human
gcaauguuuucuucacuca

SEQ ID NO: 431624 - RNA, 32 nt, Human
gcaauuagcauccaguuccugcagccuggugc

SEQ ID NO: 431625 - RNA, 32 nt, Human
gcaauuauguguaucauaacaugcucauuuaa

SEQ ID NO: 431626 - RNA, 32 nt, Human
gcaauucacagaauugacauuuuggcagauga

SEQ ID NO: 431627 - RNA, 32 nt, Human
gcaauucacaugccucagccaccugaguagca

SEQ ID NO: 431628 - RNA, 32 nt, Human
gcaauucaccaacgacugaucucuccauucag

SEQ ID NO: 431629 - RNA, 32 nt, Human
gcaauucaccaccaacuaggugugugaccgug

SEQ ID NO: 431630 - RNA, 32 nt, Human
gcaauucagacuucagugaucuccagugguca

SEQ ID NO: 431631 - RNA, 32 nt, Human
gcaauucauguccucagucuccggacacaaug

SEQ ID NO: 431632 - RNA, 32 nt, Human
gcaauuccaacccucugggaggccaaggcagg

SEQ ID NO: 431633 - RNA, 32 nt, Human
gcaauuccucaaggaucuagaaccagaaauac

SEQ ID NO: 431634 - RNA, 32 nt, Human
gcaauucuaaauccgcccuugauauuagagaa

SEQ ID NO: 431635 - RNA, 32 nt, Human
gcaauucuagucuuccacaaaacaucuagcca

SEQ ID NO: 431636 - RNA, 32 nt, Human
gcaauucucaugccucagccuccugaguagcu

SEQ ID NO: 431637 - RNA, 32 nt, Human
gcaauucucccaucucagccuccugaguagcu

SEQ ID NO: 431638 - RNA, 32 nt, Human
gcaauucuccugccccagccuccugaguagcu

SEQ ID NO: 431639 - RNA, 32 nt, Human
gcaauucuccugccgcagccucccaagaagcu

SEQ ID NO: 431640 - RNA, 32 nt, Human
gcaauucuccugccucagccucccagauagcu

SEQ ID NO: 431641 - RNA, 32 nt, Human
gcaauucuccugccucagccucccagguggcu

SEQ ID NO: 431642 - RNA, 32 nt, Human
gcaauucuccugccucagccuccugagcagcu

SEQ ID NO: 431643 - RNA, 32 nt, Human
gcaauucuccugccucagccuccugaguagcu

SEQ ID NO: 431644 - RNA, 32 nt, Human
gcaauucuccugccucagcuacucaagaggcu

SEQ ID NO: 431645 - RNA, 32 nt, Human
gcaauucuccugccucaggcuccuggguggcu

SEQ ID NO: 431646 - RNA, 32 nt, Human
gcaauucuccugccucggcuucccaaguagcu

SEQ ID NO: 431647 - RNA, 32 nt, Human
gcaauucuccugcuucugccuccugaguagcu

SEQ ID NO: 431648 - RNA, 32 nt, Human
gcaauucuccuguaaucccagcuacucgggag

SEQ ID NO: 431649 - RNA, 32 nt, Human
gcaauucucgugccucagccuccugaguagcu

SEQ ID NO: 431650 - RNA, 32 nt, Human
gcaauucucuugccucagccuccugaguagcu

SEQ ID NO: 431651 - RNA, 32 nt, Human
gcaauucuguuuuucuccaaguacauuaugac

SEQ ID NO: 431652 - RNA, 32 nt, Human
gcaauucuuacgccucagccuccugaguagau

SEQ ID NO: 431653 - RNA, 32 nt, Human
gcaauucuuauuagagcuuacucaggacuuuu

SEQ ID NO: 431654 - RNA, 32 nt, Human
gcaauucuucugccucagccuccugaguagcu

SEQ ID NO: 431655 - RNA, 32 nt, Human
gcaauucuugugccucagccucccggguagcu

SEQ ID NO: 431656 - RNA, 32 nt, Human
gcaauugaagaaagggaggagccagauuaguu

SEQ ID NO: 431657 - RNA, 32 nt, Human
gcaauugaggugugcagagcacuguacagacc

SEQ ID NO: 431658 - RNA, 32 nt, Human
gcaauugauggggccauugcaggucacccuga

SEQ ID NO: 431659 - RNA, 32 nt, Human
gcaauugcaccacugcacuccagccuggguga

SEQ ID NO: 431660 - RNA, 32 nt, Human
gcaauugcacuccugggccucugacagagcuu

SEQ ID NO: 431661 - RNA, 32 nt, Human
gcaauugcagcagcagcagucacugcagcucc

SEQ ID NO: 431662 - RNA, 32 nt, Human
gcaauugccacuuugucaucaguggcuccuuu

SEQ ID NO: 431663 - RNA, 32 nt, Human
gcaauugcgaccuuaauuuaacuuuccagucu

SEQ ID NO: 431664 - RNA, 32 nt, Human
gcaauugguaauccccaaaauggguguaucug

SEQ ID NO: 431665 - RNA, 32 nt, Human
gcaauugguguuuucucuugaauuugggggcu

SEQ ID NO: 431666 - RNA, 32 nt, Human
gcaauuguaugaccaauuuccuuacuuuucuu

SEQ ID NO: 431667 - RNA, 19 nt, Human
gcaauuguugcaagaugaa

SEQ ID NO: 431668 - RNA, 32 nt, Human
gcaauuuaacuagacacagauaauaauggguu

SEQ ID NO: 431669 - RNA, 32 nt, Human
gcaauuucauguuuuaacuugggaaacugaaa

SEQ ID NO: 431670 - RNA, 32 nt, Human
gcaauuuccaacacaagggggaagggaugcag

SEQ ID NO: 431671 - RNA, 32 nt, Human
gcaauuucuauucuaccagcacucugccacag

SEQ ID NO: 431672 - RNA, 32 nt, Human
gcaauuugaaauauauucugguuguuuuucua

SEQ ID NO: 431673 - RNA, 32 nt, Human
gcaauuugauacauuuuuaaagcugcuuccug

SEQ ID NO: 431674 - RNA, 32 nt, Human
gcaauuuuaaccuuuuucugguacaguccaga

SEQ ID NO: 431675 - RNA, 32 nt, Human
gcaauuuuagaaagcagguggugcuaggaagg

SEQ ID NO: 431676 - RNA, 32 nt, Human
gcaauuuucaaaacuucuccccaaacuacaac

SEQ ID NO: 431677 - RNA, 32 nt, Human
gcaauuuuccugccuugggccucccagugcug

SEQ ID NO: 431678 - RNA, 32 nt, Human
gcaauuuugucauuuauaugggagaaauagcu

SEQ ID NO: 431679 - RNA, 32 nt, Human
gcaauuuuucuuucuccaccccaaaccugugc

SEQ ID NO: 431680 - RNA, 23 nt, Human
gcacaaaaagaaacuuucaggca

SEQ ID NO: 431681 - RNA, 21 nt, Human
gcacaaaaauaaacuauggua

SEQ ID NO: 431682 - RNA, 32 nt, Human
gcacaaaaauggaaacaaauauauaaaauuuu

SEQ ID NO: 431683 - RNA, 32 nt, Human
gcacaaaacugaucaguuuugagagaucguua

SEQ ID NO: 431684 - RNA, 32 nt, Human
gcacaaaagcagauacuugaggaaaacacuau

SEQ ID NO: 431685 - RNA, 32 nt, Human
gcacaaaauacugguuucuaagugguuuugcu

SEQ ID NO: 431686 - RNA, 32 nt, Human
gcacaaaaucuuagggaagucauaaaauagua

SEQ ID NO: 431687 - RNA, 32 nt, Human
gcacaaacaaaguagggggaaaagaauaagca

SEQ ID NO: 431688 - RNA, 32 nt, Human
gcacaaacaucacauggugugugggauacaag

SEQ ID NO: 431689 - RNA, 22 nt, Human
gcacaaacuccuccugcuucau

SEQ ID NO: 431690 - RNA, 24 nt, Human
gcacaaacugccaucucgcuucau

SEQ ID NO: 431691 - RNA, 19 nt, Human
gcacaaagaaguccacuua

SEQ ID NO: 431692 - RNA, 32 nt, Human
gcacaaagauggauguaaugcacuuugggagg

SEQ ID NO: 431693 - RNA, 32 nt, Human
gcacaaagcaauacuaggcugaaggagagacc

SEQ ID NO: 431694 - RNA, 32 nt, Human
gcacaaagcacuggccuugccuccaggaccuu

SEQ ID NO: 431695 - RNA, 32 nt, Human
gcacaaagggagcacaguugaccugugaacag

SEQ ID NO: 431696 - RNA, 32 nt, Human
gcacaaaguacugggaaaugggagcacagagu

SEQ ID NO: 431697 - RNA, 32 nt, Human
gcacaaaguggggaaggcuguacugggucgaa

SEQ ID NO: 431698 - RNA, 32 nt, Human
gcacaaaguguuguccuccagguccaagugga

SEQ ID NO: 431699 - RNA, 28 nt, Human
gcacaaaguuuaugcauuuuuucaugca

SEQ ID NO: 431700 - RNA, 32 nt, Human
gcacaaauugcccagaccuaacaaaagcggca

SEQ ID NO: 431701 - RNA, 32 nt, Human
gcacaacaaaaacagugaaagaaaugcuuauc

SEQ ID NO: 431702 - RNA, 32 nt, Human
gcacaacaaggaacaaaacaaagcuuugaaaa

SEQ ID NO: 431703 - RNA, 32 nt, Human
gcacaacacagcccuuggugggaggggaaggc

SEQ ID NO: 431704 - RNA, 32 nt, Human
gcacaacagaauagagcugaacagggcaccuu

SEQ ID NO: 431705 - RNA, 32 nt, Human
gcacaacagccccacugcaagccugggauauc

SEQ ID NO: 431706 - RNA, 20 nt, Human
gcacaacaggcccuugggug

SEQ ID NO: 431707 - RNA, 32 nt, Human
gcacaacagguggcagugguggugacugauag

SEQ ID NO: 431708 - RNA, 32 nt, Human
gcacaacaucccucaccacucucccccagcac

SEQ ID NO: 431709 - RNA, 27 nt, Human
gcacaacauuauucgacuuuucccuca

SEQ ID NO: 431710 - RNA, 32 nt, Human
gcacaaccccucucucacuuugcuccuauuuc

SEQ ID NO: 431711 - RNA, 32 nt, Human
gcacaacccuagguccuggugccucgagcucc

SEQ ID NO: 431712 - RNA, 32 nt, Human
gcacaacccuggcaaauggccacagacuccuu

SEQ ID NO: 431713 - RNA, 32 nt, Human
gcacaacccugggguuugcugcagagcuauuu

SEQ ID NO: 431714 - RNA, 32 nt, Human
gcacaaccucaacccagccagaaaguacuucc

SEQ ID NO: 431715 - RNA, 17 nt, Human
gcacaaccuguguaauc

SEQ ID NO: 431716 - RNA, 32 nt, Human
gcacaacuaagcucacaaccaaaacugcacuu

SEQ ID NO: 431717 - RNA, 32 nt, Human
gcacaacuaccucggccugaccacagagcucu

SEQ ID NO: 431718 - RNA, 32 nt, Human
gcacaacuccaggaacuccaugguaugcucac

SEQ ID NO: 431719 - RNA, 32 nt, Human
gcacaacugugugagaguguagaagggaaggc

SEQ ID NO: 431720 - RNA, 32 nt, Human
gcacaacuuguccugguccaaguccuuauucu

SEQ ID NO: 431721 - RNA, 32 nt, Human
gcacaagaaucaauagaacccaggagguggag

SEQ ID NO: 431722 - RNA, 32 nt, Human
gcacaagaggaucugugacacugacauggcug

SEQ ID NO: 431723 - RNA, 32 nt, Human
gcacaagauaaauugagcuaguuaaggcaaau

SEQ ID NO: 431724 - RNA, 32 nt, Human
gcacaagauacagaucacaaagaccuugcuga

SEQ ID NO: 431725 - RNA, 32 nt, Human
gcacaagcacacacaugcaaggcauauacaug

SEQ ID NO: 431726 - RNA, 25 nt, Human
gcacaagcacugagcugacuguuga

SEQ ID NO: 431727 - RNA, 32 nt, Human
gcacaagccagccagcgcaccugcaguccucg

SEQ ID NO: 431728 - RNA, 32 nt, Human
gcacaagccuguaaucucugcacuuugggaug

SEQ ID NO: 431729 - RNA, 32 nt, Human
gcacaaggaacaguuugauacacuuuuaaaag

SEQ ID NO: 431730 - RNA, 30 nt, Human
gcacaaggaagcccagaggccacacuccgc

SEQ ID NO: 431731 - RNA, 32 nt, Human
gcacaaggacugacucaagcugugucuuucag

SEQ ID NO: 431732 - RNA, 32 nt, Human
gcacaaggaggaacccugucccagugcuucca

SEQ ID NO: 431733 - RNA, 25 nt, Human
gcacaaggccaagaacuccuggcca

SEQ ID NO: 431734 - RNA, 20 nt, Human
gcacaaggcgcccauggcgu

SEQ ID NO: 431735 - RNA, 32 nt, Human
gcacaaggcuggcagagauuuauguaugacuu

SEQ ID NO: 431736 - RNA, 24 nt, Human
gcacaagggcucacgccuguaauc

SEQ ID NO: 431737 - RNA, 32 nt, Human
gcacaagggcuggagcccagagaugagagugc

SEQ ID NO: 431738 - RNA, 20 nt, Human
gcacaaggggacuggaggca

SEQ ID NO: 431739 - RNA, 32 nt, Human
gcacaaguaaagccuugcacagaaaagccugc

SEQ ID NO: 431740 - RNA, 32 nt, Human
gcacaaguacagauugaccaggaaaagacaag

SEQ ID NO: 431741 - RNA, 23 nt, Human
gcacaaguaccacucuuggucag

SEQ ID NO: 431742 - RNA, 32 nt, Human
gcacaagugaacgagggugaggacuggagagc

SEQ ID NO: 431743 - RNA, 32 nt, Human
gcacaagugcccucuagggcagccaggggaau

SEQ ID NO: 431744 - RNA, 32 nt, Human
gcacaaguuuaauccugagucuuuauuuggaa

SEQ ID NO: 431745 - RNA, 32 nt, Human
gcacaauacauggccuaaguucccucuguucc

SEQ ID NO: 431746 - RNA, 32 nt, Human
gcacaaucaacuuuucugagcugguguaagcc

SEQ ID NO: 431747 - RNA, 32 nt, Human
gcacaaucacagcucacugcagccuggaccuc

SEQ ID NO: 431748 - RNA, 21 nt, Human
gcacaaucacggcucacugca

SEQ ID NO: 431749 - RNA, 32 nt, Human
gcacaaucagccagggagaacugggcggguuu

SEQ ID NO: 431750 - RNA, 32 nt, Human
gcacaaucauggcucacugcagucucugccuc

SEQ ID NO: 431751 - RNA, 24 nt, Human
gcacaaucgcucaugccuguaauc

SEQ ID NO: 431752 - RNA, 17 nt, Human
gcacaaucuagucggua

SEQ ID NO: 431753 - RNA, 32 nt, Human
gcacaaucucagcucacagcaaccucugccuc

SEQ ID NO: 431754 - RNA, 32 nt, Human
gcacaaucucagcucacugcaaccuccguuuc

SEQ ID NO: 431755 - RNA, 32 nt, Human
gcacaaucucagcucagugcaaccuccgccuc

SEQ ID NO: 431756 - RNA, 21 nt, Human
gcacaaucucggcucacugca

SEQ ID NO: 431757 - RNA, 32 nt, Human
gcacaaugacauuccaaccaccaccagccaga

SEQ ID NO: 431758 - RNA, 32 nt, Human
gcacaaugaccagcaggaggggagaagagagu

SEQ ID NO: 431759 - RNA, 32 nt, Human
gcacaaugaccggaggaggggccgcugugguc

SEQ ID NO: 431760 - RNA, 24 nt, Human
gcacaaugacucacgccuguaauc

SEQ ID NO: 431761 - RNA, 23 nt, Human
gcacaaugagcguguaugugcuu

SEQ ID NO: 431762 - RNA, 18 nt, Human
gcacaaugcuugccacca

SEQ ID NO: 431763 - RNA, 19 nt, Human
gcacaauggcaggguccug

SEQ ID NO: 431764 - RNA, 23 nt, Human
gcacaauggcucacaccuguaau

SEQ ID NO: 431765 - RNA, 24 nt, Human
gcacaauggcucaugccuauaauc

SEQ ID NO: 431766 - RNA, 24 nt, Human
gcacaauggcucaugccuguaauc

SEQ ID NO: 431767 - RNA, 24 nt, Human
gcacaauggcucgugcuuguaauc

SEQ ID NO: 431768 - RNA, 32 nt, Human
gcacaaugguuucaaagaaagacuguaagcuc

SEQ ID NO: 431769 - RNA, 32 nt, Human
gcacaaugucaugucugugauugccuucuuac

SEQ ID NO: 431770 - RNA, 32 nt, Human
gcacaauuauagcucacugcagccuggaacuc

SEQ ID NO: 431771 - RNA, 32 nt, Human
gcacaauucucccaguuaaggggcuggaagac

SEQ ID NO: 431772 - RNA, 32 nt, Human
gcacaauugcacuccagcccgagugacagaau

SEQ ID NO: 431773 - RNA, 32 nt, Human
gcacaauugcacuccagccuggcgacagagcg

SEQ ID NO: 431774 - RNA, 24 nt, Human
gcacacaaacuaugagcagaccac

SEQ ID NO: 431775 - RNA, 32 nt, Human
gcacacaaaguauauguauaauauugcaauau

SEQ ID NO: 431776 - RNA, 32 nt, Human
gcacacaaauggacuucucugaagcuguguuu

SEQ ID NO: 431777 - RNA, 32 nt, Human
gcacacaaauggccaggaggcccagugguggc

SEQ ID NO: 431778 - RNA, 32 nt, Human
gcacacaacugcacugaagccuuguuccucuc

SEQ ID NO: 431779 - RNA, 32 nt, Human
gcacacaacuugaaccuggcuuauuuucugca

SEQ ID NO: 431780 - RNA, 32 nt, Human
gcacacaauggguuuggagcugacugggaaca

SEQ ID NO: 431781 - RNA, 32 nt, Human
gcacacacaagaccgccaagcauuagauucuc

SEQ ID NO: 431782 - RNA, 32 nt, Human
gcacacacacaaagaugaccugggacaugauu

SEQ ID NO: 431783 - RNA, 32 nt, Human
gcacacacaggcccagccucugugcugucucc

SEQ ID NO: 431784 - RNA, 32 nt, Human
gcacacacaucucuggcucuccaggcuucgug

SEQ ID NO: 431785 - RNA, 32 nt, Human
gcacacacaucuucccuuccaaagggcuuuuu

SEQ ID NO: 431786 - RNA, 32 nt, Human
gcacacacauguaugcacacacacaugcaccg

SEQ ID NO: 431787 - RNA, 32 nt, Human
gcacacaccacacacauacacacacgcauuau

SEQ ID NO: 431788 - RNA, 32 nt, Human
gcacacacccccaucacauggaaugggcuggu

SEQ ID NO: 431789 - RNA, 32 nt, Human
gcacacacccugcaguggggcaauggccaauu

SEQ ID NO: 431790 - RNA, 32 nt, Human
gcacacaccuauaaucucagcacuuugggagg

SEQ ID NO: 431791 - RNA, 32 nt, Human
gcacacaccuguaaucccagcuacucuggagg

SEQ ID NO: 431792 - RNA, 32 nt, Human
gcacacaccuguaaucccagcuauuugggagg

SEQ ID NO: 431793 - RNA, 32 nt, Human
gcacacacgaugcacacgcaugcacacacgca

SEQ ID NO: 431794 - RNA, 32 nt, Human
gcacacacgcaugcacacacacaaagccuuaa

SEQ ID NO: 431795 - RNA, 32 nt, Human
gcacacacucaugcucacacacacagagauau

SEQ ID NO: 431796 - RNA, 22 nt, Human
gcacacacuuguagccccagcu

SEQ ID NO: 431797 - RNA, 22 nt, Human
gcacacacuuguaguccgagcu

SEQ ID NO: 431798 - RNA, 32 nt, Human
gcacacacuuguaguccgagcuacucgggagg

SEQ ID NO: 431799 - RNA, 32 nt, Human
gcacacagaaaacaggcucugccuucacaugu

SEQ ID NO: 431800 - RNA, 32 nt, Human
gcacacagacaggcagcauggcuagcaaacga

SEQ ID NO: 431801 - RNA, 31 nt, Human
gcacacagacagugcccuaggagggaaacag

SEQ ID NO: 431802 - RNA, 32 nt, Human
gcacacagagaagggaagaaggggccaucaca

SEQ ID NO: 431803 - RNA, 20 nt, Human
gcacacagaguugacccagc

SEQ ID NO: 431804 - RNA, 32 nt, Human
gcacacagaugccacccuacaagugccauugc

SEQ ID NO: 431805 - RNA, 20 nt, Human
gcacacagcaaugaagguag

SEQ ID NO: 431806 - RNA, 23 nt, Human
gcacacagcacgagcaaagccac

SEQ ID NO: 431807 - RNA, 32 nt, Human
gcacacagcagaauggguggucacaguguucu

SEQ ID NO: 431808 - RNA, 32 nt, Human
gcacacagcaugcacacacacgcacccuaccc

SEQ ID NO: 431809 - RNA, 32 nt, Human
gcacacagccaagggccuggaccauagaaaau

SEQ ID NO: 431810 - RNA, 32 nt, Human
gcacacagcucaccacgagggguuuccccaga

SEQ ID NO: 431811 - RNA, 32 nt, Human
gcacacagcugcagagacagagaggacguggg

SEQ ID NO: 431812 - RNA, 32 nt, Human
gcacacagcugcucagcaccauuucauucugg

SEQ ID NO: 431813 - RNA, 32 nt, Human
gcacacagcuggcacuggcacacaccuguccc

SEQ ID NO: 431814 - RNA, 32 nt, Human
gcacacaggagccaggaggagcccaacagagc

SEQ ID NO: 431815 - RNA, 29 nt, Human
gcacacaggcagcccggcccagugaaaaa

SEQ ID NO: 431816 - RNA, 32 nt, Human
gcacacagggcacgucuucgauucagagcugg

SEQ ID NO: 431817 - RNA, 32 nt, Human
gcacacagguguuggugauggggcuguugaga

SEQ ID NO: 431818 - RNA, 32 nt, Human
gcacacauacacaugcacacacacaugcacac

SEQ ID NO: 431819 - RNA, 32 nt, Human
gcacacauaccuguaaucccagcuacuuuggu

SEQ ID NO: 431820 - RNA, 32 nt, Human
gcacacaucucuagucccaauuacucaggagg

SEQ ID NO: 431821 - RNA, 32 nt, Human
gcacacaugcacacacgcacacacaugcacac

SEQ ID NO: 431822 - RNA, 32 nt, Human
gcacacaugggugggagggaagaggggcacau

SEQ ID NO: 431823 - RNA, 32 nt, Human
gcacaccaacugccaaguuauuaguuccuaaa

SEQ ID NO: 431824 - RNA, 32 nt, Human
gcacaccacagcugugguagagcuugguaaaa

SEQ ID NO: 431825 - RNA, 32 nt, Human
gcacaccaccaugcccggcaaauguuuguauu

SEQ ID NO: 431826 - RNA, 32 nt, Human
gcacaccacugcacuccagccugggcaacaaa

SEQ ID NO: 431827 - RNA, 19 nt, Human
gcacaccacuguccauuua

SEQ ID NO: 431828 - RNA, 32 nt, Human
gcacaccagccaagaugcucugcucacaguca

SEQ ID NO: 431829 - RNA, 32 nt, Human
gcacaccaggauagacaaggcaggggauacug

SEQ ID NO: 431830 - RNA, 32 nt, Human
gcacaccagggcccuaggaaagcagcaucagg

SEQ ID NO: 431831 - RNA, 20 nt, Human
gcacaccaguagucccagcu

SEQ ID NO: 431832 - RNA, 32 nt, Human
gcacaccaguagucccagcuacucaggaggcu

SEQ ID NO: 431833 - RNA, 32 nt, Human
gcacaccaguauucccagcuacucuggaggcu

SEQ ID NO: 431834 - RNA, 23 nt, Human
gcacaccaguguguuaggcacug

SEQ ID NO: 431835 - RNA, 32 nt, Human
gcacaccauccuggaugacagagcaagacucc

SEQ ID NO: 431836 - RNA, 32 nt, Human
gcacacccagaagucuuuggacccauuugguu

SEQ ID NO: 431837 - RNA, 32 nt, Human
gcacacccagcccagccccaaagagaaagaag

SEQ ID NO: 431838 - RNA, 22 nt, Human
gcacacccagcucccauggcgu

SEQ ID NO: 431839 - RNA, 32 nt, Human
gcacaccccaagagacaagaauguguaguuua

SEQ ID NO: 431840 - RNA, 32 nt, Human
gcacaccccaggagggugaguggccugaggua

SEQ ID NO: 431841 - RNA, 18 nt, Human
gcacacccuccagcacgc

SEQ ID NO: 431842 - RNA, 32 nt, Human
gcacacccucugccagcaccuacuggggaaag

SEQ ID NO: 431843 - RNA, 32 nt, Human
gcacacccugcagccaagggccaggaagugga

SEQ ID NO: 431844 - RNA, 32 nt, Human
gcacacccugcuuccaaaauggcccauguggu

SEQ ID NO: 431845 - RNA, 28 nt, Human
gcacaccgagcggcuccgucuucugcuc

SEQ ID NO: 431846 - RNA, 22 nt, Human
gcacaccguugagcacagcagc

SEQ ID NO: 431847 - RNA, 32 nt, Human
gcacaccuauaaucucagcuacucaggaggcu

SEQ ID NO: 431848 - RNA, 32 nt, Human
gcacaccuauagucgcagcuacuugggaggcu

SEQ ID NO: 431849 - RNA, 32 nt, Human
gcacaccuauagucucagcuacucagaggcug

SEQ ID NO: 431850 - RNA, 32 nt, Human
gcacaccuauguuccugccuuuauacuaccuc

SEQ ID NO: 431851 - RNA, 32 nt, Human
gcacaccucacaccaguuccuccugcugagca

SEQ ID NO: 431852 - RNA, 32 nt, Human
gcacaccucauuuuauugaaccuugcuuuaca

SEQ ID NO: 431853 - RNA, 21 nt, Human
gcacaccuccccaacagaagc

SEQ ID NO: 431854 - RNA, 22 nt, Human
gcacaccucccccagaggcugc

SEQ ID NO: 431855 - RNA, 32 nt, Human
gcacaccuccgcucuagggcauaguacaugcc

SEQ ID NO: 431856 - RNA, 32 nt, Human
gcacaccucuaagugcagcugugugucugguu

SEQ ID NO: 431857 - RNA, 32 nt, Human
gcacaccugaaaucccagcuacugaagaggcu

SEQ ID NO: 431858 - RNA, 32 nt, Human
gcacaccugaguacgugcacuuccuggugggu

SEQ ID NO: 431859 - RNA, 32 nt, Human
gcacaccugcauucccagcuacuugggagguu

SEQ ID NO: 431860 - RNA, 32 nt, Human
gcacaccugccgucuucacuuccccacaggcu

SEQ ID NO: 431861 - RNA, 32 nt, Human
gcacaccugccugccaucgcuguuccuucaac

SEQ ID NO: 431862 - RNA, 17 nt, Human
gcacaccuguaauccca

SEQ ID NO: 431863 - RNA, 32 nt, Human
gcacaccuguaaucccaaagugcugggauuac

SEQ ID NO: 431864 - RNA, 32 nt, Human
gcacaccuguaaucccagcuaccugggaggcu

SEQ ID NO: 431865 - RNA, 32 nt, Human
gcacaccuguaaucccagcuacuagggaggau

SEQ ID NO: 431866 - RNA, 32 nt, Human
gcacaccuguaaucccagcuacucaggaagcu

SEQ ID NO: 431867 - RNA, 32 nt, Human
gcacaccuguaaucccagcuacucaggaggcu

SEQ ID NO: 431868 - RNA, 32 nt, Human
gcacaccuguaaucccagcuacucgggaggcg

SEQ ID NO: 431869 - RNA, 32 nt, Human
gcacaccuguaaucccagcuacucgggaggcu

SEQ ID NO: 431870 - RNA, 32 nt, Human
gcacaccuguaaucccagcuacucugaagccu

SEQ ID NO: 431871 - RNA, 32 nt, Human
gcacaccuguaaucccagcuacucuggaggcu

SEQ ID NO: 431872 - RNA, 32 nt, Human
gcacaccuguaaucccagcuacuugggagacu

SEQ ID NO: 431873 - RNA, 32 nt, Human
gcacaccuguaaucccagcuacuugggaggcc

SEQ ID NO: 431874 - RNA, 32 nt, Human
gcacaccuguaaucccagcuacuugggaggcu

SEQ ID NO: 431875 - RNA, 32 nt, Human
gcacaccuguaaucccagcuauucaggagguu

SEQ ID NO: 431876 - RNA, 32 nt, Human
gcacaccuguaaucccagcuauucggcugagg

SEQ ID NO: 431877 - RNA, 32 nt, Human
gcacaccuguaaucccagguacucgggaggcu

SEQ ID NO: 431878 - RNA, 32 nt, Human
gcacaccuguaaucccaguuacucaggaggcu

SEQ ID NO: 431879 - RNA, 32 nt, Human
gcacaccuguaauccuagcuacucgggaggcu

SEQ ID NO: 431880 - RNA, 32 nt, Human
gcacaccuguaaucucagcuacucgggaggcu

SEQ ID NO: 431881 - RNA, 32 nt, Human
gcacaccuguaaucucagguacucaggaggcu

SEQ ID NO: 431882 - RNA, 20 nt, Human
gcacaccuguaauuccagcu

SEQ ID NO: 431883 - RNA, 32 nt, Human
gcacaccuguaauuccagcuacucgggaggcu

SEQ ID NO: 431884 - RNA, 32 nt, Human
gcacaccuguacccucugcccaccuugacugc

SEQ ID NO: 431885 - RNA, 32 nt, Human
gcacaccuguacucccagcuacucgggugguu

SEQ ID NO: 431886 - RNA, 22 nt, Human
gcacaccuguaguagucccagc

SEQ ID NO: 431887 - RNA, 20 nt, Human
gcacaccuguagucacagcu

SEQ ID NO: 431888 - RNA, 32 nt, Human
gcacaccuguagucacagcuacuccagaggcu

SEQ ID NO: 431889 - RNA, 17 nt, Human
gcacaccuguaguccca

SEQ ID NO: 431890 - RNA, 20 nt, Human
gcacaccuguagucccagcu

SEQ ID NO: 431891 - RNA, 32 nt, Human
gcacaccuguagucccagcuacuccggaggcu

SEQ ID NO: 431892 - RNA, 32 nt, Human
gcacaccuguagucccagcuacucggcaggcu

SEQ ID NO: 431893 - RNA, 32 nt, Human
gcacaccuguagucccagcuacucgggaggcu

SEQ ID NO: 431894 - RNA, 32 nt, Human
gcacaccuguagucccagcuacucuggaggcu

SEQ ID NO: 431895 - RNA, 32 nt, Human
gcacaccuguagucccagcuacugggaaagcu

SEQ ID NO: 431896 - RNA, 32 nt, Human
gcacaccuguagucccagcuacuggggaggcu

SEQ ID NO: 431897 - RNA, 32 nt, Human
gcacaccuguagucccagcuacuugggaggcu

SEQ ID NO: 431898 - RNA, 32 nt, Human
gcacaccuguagucccagcugcucaggaggcu

SEQ ID NO: 431899 - RNA, 20 nt, Human
gcacaccuguaguccuagcu

SEQ ID NO: 431900 - RNA, 32 nt, Human
gcacaccuguagucucagcuacucggaaggcu

SEQ ID NO: 431901 - RNA, 20 nt, Human
gcacaccuguagugccagcu

SEQ ID NO: 431902 - RNA, 20 nt, Human
gcacaccuguaguuccagcu

SEQ ID NO: 431903 - RNA, 20 nt, Human
gcacaccugugaucccagcu

SEQ ID NO: 431904 - RNA, 32 nt, Human
gcacaccugugaucccagcuacuugggaggcu

SEQ ID NO: 431905 - RNA, 20 nt, Human
gcacaccuguggccccagcu

SEQ ID NO: 431906 - RNA, 32 nt, Human
gcacaccuguguccaagaacucuaaccagugu

SEQ ID NO: 431907 - RNA, 32 nt, Human
gcacaccuguuauccuagcuacucaggaggcu

SEQ ID NO: 431908 - RNA, 20 nt, Human
gcacaccuguugucccagcu

SEQ ID NO: 431909 - RNA, 32 nt, Human
gcacaccuguugucccagcuauucaggaggcu

SEQ ID NO: 431910 - RNA, 32 nt, Human
gcacaccuuccuccacccuccacccugggcug

SEQ ID NO: 431911 - RNA, 32 nt, Human
gcacaccuucgcuucucucaccaggaacauuc

SEQ ID NO: 431912 - RNA, 32 nt, Human
gcacaccuucucccgggcacugaggcccaggg

SEQ ID NO: 431913 - RNA, 32 nt, Human
gcacaccuugccaaaugcauaugucuguugag

SEQ ID NO: 431914 - RNA, 32 nt, Human
gcacacgaagccgccugacggcacccagcgcu

SEQ ID NO: 431915 - RNA, 32 nt, Human
gcacacgaccaccacacgagcacgugccacgc

SEQ ID NO: 431916 - RNA, 32 nt, Human
gcacacgcacacacacgcacacuuacaauaag

SEQ ID NO: 431917 - RNA, 32 nt, Human
gcacacgcacacugaugcacacggaccuggac

SEQ ID NO: 431918 - RNA, 32 nt, Human
gcacacgccuguaaucacagcuacuugggagg

SEQ ID NO: 431919 - RNA, 19 nt, Human
gcacacgccuguaauccca

SEQ ID NO: 431920 - RNA, 22 nt, Human
gcacacgccuguaaucccagcu

SEQ ID NO: 431921 - RNA, 32 nt, Human
gcacacgccuguaaucccagcuacucgggaag

SEQ ID NO: 431922 - RNA, 32 nt, Human
gcacacgccuguaaucccagcuacucuggagg

SEQ ID NO: 431923 - RNA, 32 nt, Human
gcacacgccuguaaucccagcuacuugggagg

SEQ ID NO: 431924 - RNA, 32 nt, Human
gcacacgccuguaaucucagcuacucaggagg

SEQ ID NO: 431925 - RNA, 19 nt, Human
gcacacgccuguaauucca

SEQ ID NO: 431926 - RNA, 22 nt, Human
gcacacgccuguaauuccagcu

SEQ ID NO: 431927 - RNA, 22 nt, Human
gcacacgcucauaguucuagcu

SEQ ID NO: 431928 - RNA, 32 nt, Human
gcacacgcuccgcuccgggccugggugccuac

SEQ ID NO: 431929 - RNA, 32 nt, Human
gcacacgcuuguaaucuuagcuacuugggagg

SEQ ID NO: 431930 - RNA, 32 nt, Human
gcacacggcagggcccggcacccaugguugcg

SEQ ID NO: 431931 - RNA, 32 nt, Human
gcacacggcccugccccauccugggccauacc

SEQ ID NO: 431932 - RNA, 32 nt, Human
gcacacggcccugccccauccugggccuuacc

SEQ ID NO: 431933 - RNA, 32 nt, Human
gcacacggcccuucggagccugggcagccugg

SEQ ID NO: 431934 - RNA, 32 nt, Human
gcacacggcuguaaucccagcacuuugggagg

SEQ ID NO: 431935 - RNA, 18 nt, Human
gcacacgggaccaggcug

SEQ ID NO: 431936 - RNA, 32 nt, Human
gcacacgggagguggguucuugccuuguggca

SEQ ID NO: 431937 - RNA, 32 nt, Human
gcacacgggcuggggcucagcuccuuggagag

SEQ ID NO: 431938 - RNA, 32 nt, Human
gcacacguauaaucccagcuacuugagagaug

SEQ ID NO: 431939 - RNA, 32 nt, Human
gcacacgucuauaauuccagcuacucaggagg

SEQ ID NO: 431940 - RNA, 32 nt, Human
gcacacgugcucacucaggcccagcaaugacc

SEQ ID NO: 431941 - RNA, 32 nt, Human
gcacacguguaaucccagcuacucaggaggcu

SEQ ID NO: 431942 - RNA, 32 nt, Human
gcacacguucaucaagggugaagcauggucaa

SEQ ID NO: 431943 - RNA, 22 nt, Human
gcacacguugaaauuuucccca

SEQ ID NO: 431944 - RNA, 32 nt, Human
gcacacuaacacagccuucuguccucaauaac

SEQ ID NO: 431945 - RNA, 32 nt, Human
gcacacuagggagcaucucuguaaacacagug

SEQ ID NO: 431946 - RNA, 32 nt, Human
gcacacucagaagccuuugggaaggggugcua

SEQ ID NO: 431947 - RNA, 32 nt, Human
gcacacucagcccugucaguggggucuggcuu

SEQ ID NO: 431948 - RNA, 32 nt, Human
gcacacucagucaggaggcugcagucucccgu

SEQ ID NO: 431949 - RNA, 32 nt, Human
gcacacucauacacucacgcacucaacuugca

SEQ ID NO: 431950 - RNA, 32 nt, Human
gcacacuccccugcacuggaguccagucucuu

SEQ ID NO: 431951 - RNA, 32 nt, Human
gcacacuccuaaauugcuggaugacugaacuu

SEQ ID NO: 431952 - RNA, 32 nt, Human
gcacacuccucgcacuuccagccuuggagccc

SEQ ID NO: 431953 - RNA, 19 nt, Human
gcacacuccucguccacuu

SEQ ID NO: 431954 - RNA, 32 nt, Human
gcacacuccugcugcccccggacugcuucaga

SEQ ID NO: 431955 - RNA, 32 nt, Human
gcacacucuggucuuggaauuccauuugagga

SEQ ID NO: 431956 - RNA, 24 nt, Human
gcacacucuuguguuuuuugcuca

SEQ ID NO: 431957 - RNA, 32 nt, Human
gcacacucuuugacagcaugcuguuuugugga

SEQ ID NO: 431958 - RNA, 32 nt, Human
gcacacugaucaaccacugaacugccuucuuc

SEQ ID NO: 431959 - RNA, 32 nt, Human
gcacacugaugcacacggaccuggacacagac

SEQ ID NO: 431960 - RNA, 32 nt, Human
gcacacugcacuccagccugggugacuagcaa

SEQ ID NO: 431961 - RNA, 32 nt, Human
gcacacugcacuccauccugggcgacagucug

SEQ ID NO: 431962 - RNA, 32 nt, Human
gcacacugcagccuggaacuccugggaucagg

SEQ ID NO: 431963 - RNA, 32 nt, Human
gcacacugcaucucuccugugaguuggagacu

SEQ ID NO: 431964 - RNA, 23 nt, Human
gcacacugcccaggcccugggug

SEQ ID NO: 431965 - RNA, 32 nt, Human
gcacacugccccucucacacauguggggccgg

SEQ ID NO: 431966 - RNA, 32 nt, Human
gcacacugcucuggcccuuccccaggcccagg

SEQ ID NO: 431967 - RNA, 19 nt, Human
gcacacugcuuaucacuug

SEQ ID NO: 431968 - RNA, 21 nt, Human
gcacacugcuuggcuugggug

SEQ ID NO: 431969 - RNA, 16 nt, Human
gcacacuggaguccac

SEQ ID NO: 431970 - RNA, 32 nt, Human
gcacacuggggucugcacaaggcuuugucaac

SEQ ID NO: 431971 - RNA, 19 nt, Human
gcacacugucuggaacuua

SEQ ID NO: 431972 - RNA, 32 nt, Human
gcacacugugccccugaugaugugggagagga

SEQ ID NO: 431973 - RNA, 20 nt, Human
gcacacugugcucauggcgu

SEQ ID NO: 431974 - RNA, 19 nt, Human
gcacacuguggucccagcu

SEQ ID NO: 431975 - RNA, 32 nt, Human
gcacacuguggucccagcuacucgggaggcug

SEQ ID NO: 431976 - RNA, 19 nt, Human
gcacacuguugaguuuucu

SEQ ID NO: 431977 - RNA, 20 nt, Human
gcacacuguuuuugaacuug

SEQ ID NO: 431978 - RNA, 32 nt, Human
gcacacuuagggaagcuguucucuccagacag

SEQ ID NO: 431979 - RNA, 32 nt, Human
gcacacuucacaguaagacguugcagaggucu

SEQ ID NO: 431980 - RNA, 32 nt, Human
gcacacuucaguguuucucuccuguucaauaa

SEQ ID NO: 431981 - RNA, 32 nt, Human
gcacacuuggggccuugagcuccagggaguuc

SEQ ID NO: 431982 - RNA, 32 nt, Human
gcacacuuuccaggugucagcaggugugauca

SEQ ID NO: 431983 - RNA, 22 nt, Human
gcacacuuugugagaaccaaug

SEQ ID NO: 431984 - RNA, 32 nt, Human
gcacagaaagagccagauggaccugagugucg

SEQ ID NO: 431985 - RNA, 20 nt, Human
gcacagaaaggcacagggca

SEQ ID NO: 431986 - RNA, 19 nt, Human
gcacagaaaugcaaggucu

SEQ ID NO: 431987 - RNA, 22 nt, Human
gcacagaaccagcagagucucc

SEQ ID NO: 431988 - RNA, 32 nt, Human
gcacagaacucagcucaaggguucuggggaug

SEQ ID NO: 431989 - RNA, 32 nt, Human
gcacagaacucccuggaggguggagauggagc

SEQ ID NO: 431990 - RNA, 32 nt, Human
gcacagaacuuagcaacagcaugugaauugug

SEQ ID NO: 431991 - RNA, 20 nt, Human
gcacagaagaaaaguacaga

SEQ ID NO: 431992 - RNA, 20 nt, Human
gcacagaagacagugucuug

SEQ ID NO: 431993 - RNA, 32 nt, Human
gcacagaagaggagucaaguaauggagguccc

SEQ ID NO: 431994 - RNA, 32 nt, Human
gcacagaagaggccccugccacccuagggacg

SEQ ID NO: 431995 - RNA, 32 nt, Human
gcacagaagccgcgcccaccgccugccaguuc

SEQ ID NO: 431996 - RNA, 20 nt, Human
gcacagaagcgaauugaaga

SEQ ID NO: 431997 - RNA, 21 nt, Human
gcacagaagggaaaggucuca

SEQ ID NO: 431998 - RNA, 32 nt, Human
gcacagaaguuugcugcaucacuggugagcug

SEQ ID NO: 431999 - RNA, 22 nt, Human
gcacagaauaucaccauugcag

SEQ ID NO: 432000 - RNA, 32 nt, Human
gcacagaaugcuggagagaugcguccugguga

SEQ ID NO: 432001 - RNA, 19 nt, Human
gcacagaauuuggagucuu

SEQ ID NO: 432002 - RNA, 20 nt, Human
gcacagaauuuugcagaucu

SEQ ID NO: 432003 - RNA, 32 nt, Human
gcacagacaacucccucccugccuugcacaag

SEQ ID NO: 432004 - RNA, 32 nt, Human
gcacagacacuacagaccacagcauucagccc

SEQ ID NO: 432005 - RNA, 32 nt, Human
gcacagacagacccuguaaacaugucaggguu

SEQ ID NO: 432006 - RNA, 32 nt, Human
gcacagacaggaaccucagcagugacagaaga

SEQ ID NO: 432007 - RNA, 32 nt, Human
gcacagacgguggaucucugcccaguguggug

SEQ ID NO: 432008 - RNA, 32 nt, Human
gcacagacucaucgccucccacacgccugggc

SEQ ID NO: 432009 - RNA, 32 nt, Human
gcacagacugcuaaucuacaucuugcugcguu

SEQ ID NO: 432010 - RNA, 32 nt, Human
gcacagacugggagguuuaguggugcauuucu

SEQ ID NO: 432011 - RNA, 32 nt, Human
gcacagagaaaauuccccaguauuccaagccg

SEQ ID NO: 432012 - RNA, 32 nt, Human
gcacagagaaucaagagguggccuuugggcag

SEQ ID NO: 432013 - RNA, 23 nt, Human
gcacagagaccccccacuguguc

SEQ ID NO: 432014 - RNA, 32 nt, Human
gcacagagagagcugggaugaagaaugccuac

SEQ ID NO: 432015 - RNA, 32 nt, Human
gcacagagcaacauugggguaacaggaugggu

SEQ ID NO: 432016 - RNA, 32 nt, Human
gcacagagcaggaggggccugucuccugggag

SEQ ID NO: 432017 - RNA, 32 nt, Human
gcacagagcagggaaaggcagccccagaggau

SEQ ID NO: 432018 - RNA, 32 nt, Human
gcacagagcagggaaaggcagccccagaggga

SEQ ID NO: 432019 - RNA, 32 nt, Human
gcacagagccaagaggaggggcucuguguugg

SEQ ID NO: 432020 - RNA, 32 nt, Human
gcacagagcuauuucagccacaugaaaagcau

SEQ ID NO: 432021 - RNA, 32 nt, Human
gcacagagcucugcggagaccacgccgacauc

SEQ ID NO: 432022 - RNA, 21 nt, Human
gcacagagcugggaaggccuu

SEQ ID NO: 432023 - RNA, 32 nt, Human
gcacagagcugucagugguggagagugucuuc

SEQ ID NO: 432024 - RNA, 18 nt, Human
gcacagaggacccuguac

SEQ ID NO: 432025 - RNA, 32 nt, Human
gcacagaggagagagaucggggugagucgcca

SEQ ID NO: 432026 - RNA, 32 nt, Human
gcacagaggagaugggagccugccuggugagg

SEQ ID NO: 432027 - RNA, 32 nt, Human
gcacagaggauggcuuccccauugccuucugg

SEQ ID NO: 432028 - RNA, 32 nt, Human
gcacagaggauugccccuucucuuuucagagc

SEQ ID NO: 432029 - RNA, 18 nt, Human
gcacagaggcacagggca

SEQ ID NO: 432030 - RNA, 32 nt, Human
gcacagaggcagccuggcuuucccuggaggcc

SEQ ID NO: 432031 - RNA, 32 nt, Human
gcacagaggcuguagcccagaggacauauagu

SEQ ID NO: 432032 - RNA, 32 nt, Human
gcacagagggacccaaacccaaaaggcccaga

SEQ ID NO: 432033 - RNA, 32 nt, Human
gcacagagggcccaggaggagccucaggagcc

SEQ ID NO: 432034 - RNA, 32 nt, Human
gcacagagggcugcucacaagauggcuuuaga

SEQ ID NO: 432035 - RNA, 32 nt, Human
gcacagagggcuguggggaggaggcaggaauc

SEQ ID NO: 432036 - RNA, 20 nt, Human
gcacagagggucagguccug

SEQ ID NO: 432037 - RNA, 32 nt, Human
gcacagagggucagguccugucaagaggagcu

SEQ ID NO: 432038 - RNA, 19 nt, Human
gcacagagucaggaucuca

SEQ ID NO: 432039 - RNA, 32 nt, Human
gcacagauaugcugucuggacaugcacacacg

SEQ ID NO: 432040 - RNA, 32 nt, Human
gcacagauauuuccauuucuuccucacuauga

SEQ ID NO: 432041 - RNA, 32 nt, Human
gcacagaucuucucucagcaccacauggcagc

SEQ ID NO: 432042 - RNA, 32 nt, Human
gcacagaugaaacugagcugggacuggaaagg

SEQ ID NO: 432043 - RNA, 32 nt, Human
gcacagaugaacaccaugagcuugcuggaagg

SEQ ID NO: 432044 - RNA, 32 nt, Human
gcacagaugacaccucacugaccauucccacu

SEQ ID NO: 432045 - RNA, 18 nt, Human
gcacagaugaccaaaguc

SEQ ID NO: 432046 - RNA, 32 nt, Human
gcacagaugaucaacagaaaauccaagcagcu

SEQ ID NO: 432047 - RNA, 32 nt, Human
gcacagaugcaugcuacaacacgaaugaacuu

SEQ ID NO: 432048 - RNA, 32 nt, Human
gcacagaugccuauacauacauauacaaauaa

SEQ ID NO: 432049 - RNA, 18 nt, Human
gcacagaugcugccacca

SEQ ID NO: 432050 - RNA, 32 nt, Human
gcacagcaaugccauugcugccaugaccagca

SEQ ID NO: 432051 - RNA, 32 nt, Human
gcacagcaccuccagaacagugccccggauga

SEQ ID NO: 432052 - RNA, 32 nt, Human
gcacagcagaagccucacugggcugcuauguc

SEQ ID NO: 432053 - RNA, 32 nt, Human
gcacagcagaguucaggcagggcacagccagg

SEQ ID NO: 432054 - RNA, 21 nt, Human
gcacagcagcauccuuggcca

SEQ ID NO: 432055 - RNA, 32 nt, Human
gcacagcagccacuccaacaccagcuguaggu

SEQ ID NO: 432056 - RNA, 32 nt, Human
gcacagcagccacugcucguuguaaaugccaa

SEQ ID NO: 432057 - RNA, 24 nt, Human
gcacagcagcucacgccuguaauc

SEQ ID NO: 432058 - RNA, 24 nt, Human
gcacagcagcucaugccuguaauc

SEQ ID NO: 432059 - RNA, 32 nt, Human
gcacagcaggcagaaugagggccacaggcagg

SEQ ID NO: 432060 - RNA, 20 nt, Human
gcacagcaguaaacuauggg

SEQ ID NO: 432061 - RNA, 32 nt, Human
gcacagccaccagcaucucuccccucagcccu

SEQ ID NO: 432062 - RNA, 32 nt, Human
gcacagccacuuccugccuccugggacuccuc

SEQ ID NO: 432063 - RNA, 32 nt, Human
gcacagccagcccuucuuggguccccagucag

SEQ ID NO: 432064 - RNA, 18 nt, Human
gcacagccagcggccgcg

SEQ ID NO: 432065 - RNA, 32 nt, Human
gcacagccaggaaggcgagcgagcccagccag

SEQ ID NO: 432066 - RNA, 17 nt, Human
gcacagccaggacucca

SEQ ID NO: 432067 - RNA, 32 nt, Human
gcacagccagucccuggugaaggcuuaaagau

SEQ ID NO: 432068 - RNA, 32 nt, Human
gcacagccagugccaucagggagcugaagggg

SEQ ID NO: 432069 - RNA, 32 nt, Human
gcacagccccacugcuuccaaacucugccugu

SEQ ID NO: 432070 - RNA, 32 nt, Human
gcacagccccagcuaauuuucauauuuuuagu

SEQ ID NO: 432071 - RNA, 32 nt, Human
gcacagccccggggcuccacauugcuguacgc

SEQ ID NO: 432072 - RNA, 32 nt, Human
gcacagccccuggaagcaggcagaggaagaca

SEQ ID NO: 432073 - RNA, 32 nt, Human
gcacagcccugacuugaacucugggugacccu

SEQ ID NO: 432074 - RNA, 32 nt, Human
gcacagcccuugccuggagcccaggaacccca

SEQ ID NO: 432075 - RNA, 32 nt, Human
gcacagccuccccuccuauccauaucccccag

SEQ ID NO: 432076 - RNA, 20 nt, Human
gcacagccuccugccuccca

SEQ ID NO: 432077 - RNA, 32 nt, Human
gcacagccucuuucacucagaagcucaggucg

SEQ ID NO: 432078 - RNA, 32 nt, Human
gcacagccugcucucggggaccggggcgcugc

SEQ ID NO: 432079 - RNA, 17 nt, Human
gcacagccuggccacca

SEQ ID NO: 432080 - RNA, 32 nt, Human
gcacagccuggcccugaucuccgggcagccac

SEQ ID NO: 432081 - RNA, 32 nt, Human
gcacagcgaaccugggcuccugcccaggacag

SEQ ID NO: 432082 - RNA, 32 nt, Human
gcacagcggcuucuccuaacaucccccuggca

SEQ ID NO: 432083 - RNA, 32 nt, Human
gcacagcgguuccgccuguaaucccagcacuu

SEQ ID NO: 432084 - RNA, 32 nt, Human
gcacagcguuugcucuuagacucugaucugcu

SEQ ID NO: 432085 - RNA, 32 nt, Human
gcacagcuaaaggacacuaucucuacauagaa

SEQ ID NO: 432086 - RNA, 32 nt, Human
gcacagcuaagacugcaggcacgcgccauccu

SEQ ID NO: 432087 - RNA, 32 nt, Human
gcacagcuacacccugccuggccacauggggu

SEQ ID NO: 432088 - RNA, 19 nt, Human
gcacagcuacagccuggac

SEQ ID NO: 432089 - RNA, 32 nt, Human
gcacagcucccucucugggggcugagggaccc

SEQ ID NO: 432090 - RNA, 32 nt, Human
gcacagcuccuagucugcuuucaguuccaaaa

SEQ ID NO: 432091 - RNA, 26 nt, Human
gcacagcugaacaugccgcuguccga

SEQ ID NO: 432092 - RNA, 32 nt, Human
gcacagcugaggacccucagccccaggagaag

SEQ ID NO: 432093 - RNA, 32 nt, Human
gcacagcugagggagaggaagugagcgccacu

SEQ ID NO: 432094 - RNA, 19 nt, Human
gcacagcugcucugugacc

SEQ ID NO: 432095 - RNA, 32 nt, Human
gcacagcugcugcugacaggucuaccugaagu

SEQ ID NO: 432096 - RNA, 32 nt, Human
gcacagcuggacuguguggcuggggccugaca

SEQ ID NO: 432097 - RNA, 32 nt, Human
gcacagcuggccaaugaaaagcagaaguguau

SEQ ID NO: 432098 - RNA, 25 nt, Human
gcacagcugucugccaggcacucuc

SEQ ID NO: 432099 - RNA, 32 nt, Human
gcacagcugugaggacagacagaaggcaaagu

SEQ ID NO: 432100 - RNA, 32 nt, Human
gcacagcuguggguugcaggggagacagccag

SEQ ID NO: 432101 - RNA, 32 nt, Human
gcacagcuucagcuccgugcaggauggaugca

SEQ ID NO: 432102 - RNA, 18 nt, Human
gcacaggaaagaagggga

SEQ ID NO: 432103 - RNA, 17 nt, Human
gcacaggaagcaggucu

SEQ ID NO: 432104 - RNA, 32 nt, Human
gcacaggaagucugagugugaggggcucuuuu

SEQ ID NO: 432105 - RNA, 32 nt, Human
gcacaggacucuggguuccugcucuguucugg

SEQ ID NO: 432106 - RNA, 32 nt, Human
gcacaggacuggauaaauaauuaagaacagag

SEQ ID NO: 432107 - RNA, 32 nt, Human
gcacaggagacagcaguggcccagaggaagcc

SEQ ID NO: 432108 - RNA, 32 nt, Human
gcacaggagacggagguugcugugagcugaga

SEQ ID NO: 432109 - RNA, 32 nt, Human
gcacaggagagaaagaagaaguuguccacggg

SEQ ID NO: 432110 - RNA, 32 nt, Human
gcacaggagaucugcuggcucgggggaagggg

SEQ ID NO: 432111 - RNA, 32 nt, Human
gcacaggagccaggcugaguuuaauuaaagaa

SEQ ID NO: 432112 - RNA, 32 nt, Human
gcacaggaggauaccgcaucaccaccagcagc

SEQ ID NO: 432113 - RNA, 32 nt, Human
gcacaggaggcaggcauggcccugggcggggc

SEQ ID NO: 432114 - RNA, 32 nt, Human
gcacaggagggguggaggggaaaugagaguug

SEQ ID NO: 432115 - RNA, 22 nt, Human
gcacaggagguggcagcccuug

SEQ ID NO: 432116 - RNA, 32 nt, Human
gcacaggaguucaaggcuucagugagcuaugg

SEQ ID NO: 432117 - RNA, 21 nt, Human
gcacaggaguuccagaccagc

SEQ ID NO: 432118 - RNA, 32 nt, Human
gcacaggaguucgagaccagccuggacaacau

SEQ ID NO: 432119 - RNA, 32 nt, Human
gcacaggaguuggaggauacagugagccauga

SEQ ID NO: 432120 - RNA, 32 nt, Human
gcacaggauacagugggaaucuugagacucuu

SEQ ID NO: 432121 - RNA, 32 nt, Human
gcacaggauagaggcagagccacccacgccgc

SEQ ID NO: 432122 - RNA, 18 nt, Human
gcacaggaucacagagca

SEQ ID NO: 432123 - RNA, 32 nt, Human
gcacaggauccuucccuggaacaucagcaucc

SEQ ID NO: 432124 - RNA, 32 nt, Human
gcacaggauggaaacuucuauucccucucugg

SEQ ID NO: 432125 - RNA, 21 nt, Human
gcacaggauggggcaggcucu

SEQ ID NO: 432126 - RNA, 32 nt, Human
gcacaggcacacagcagagccguccacagacc

SEQ ID NO: 432127 - RNA, 32 nt, Human
gcacaggcacacagggcccggccacacccagc

SEQ ID NO: 432128 - RNA, 32 nt, Human
gcacaggcaggaaaacaugagccagcaacuga

SEQ ID NO: 432129 - RNA, 21 nt, Human
gcacaggcaggcccuugggug

SEQ ID NO: 432130 - RNA, 32 nt, Human
gcacaggcaguagggccacucacuuuggccau

SEQ ID NO: 432131 - RNA, 32 nt, Human
gcacaggccacaucugccccaagagcaugagc

SEQ ID NO: 432132 - RNA, 25 nt, Human
gcacaggccaggaggccacagugua

SEQ ID NO: 432133 - RNA, 32 nt, Human
gcacaggccccggaguggagggggcaggggag

SEQ ID NO: 432134 - RNA, 32 nt, Human
gcacaggccuggcccugcuccaggugcaggaa

SEQ ID NO: 432135 - RNA, 20 nt, Human
gcacaggcggagugcagcgg

SEQ ID NO: 432136 - RNA, 32 nt, Human
gcacaggcuccuggagggcugccugggggagg

SEQ ID NO: 432137 - RNA, 32 nt, Human
gcacaggcugugagccagggugcugggaaacu

SEQ ID NO: 432138 - RNA, 32 nt, Human
gcacaggcugugcacagccuugcagaugauaa

SEQ ID NO: 432139 - RNA, 22 nt, Human
gcacaggcuuggagugcagugg

SEQ ID NO: 432140 - RNA, 21 nt, Human
gcacagggaaggcuugaggug

SEQ ID NO: 432141 - RNA, 32 nt, Human
gcacagggacagcaugucuccagccagcgcca

SEQ ID NO: 432142 - RNA, 32 nt, Human
gcacagggaggaacuuguccauuaguuuggaa

SEQ ID NO: 432143 - RNA, 21 nt, Human
gcacagggcacagcucuuagg

SEQ ID NO: 432144 - RNA, 32 nt, Human
gcacagggcacuguucacagacugccuuugcu

SEQ ID NO: 432145 - RNA, 32 nt, Human
gcacagggccacuguccuccaggcaggcuuuu

SEQ ID NO: 432146 - RNA, 32 nt, Human
gcacagggcccuccccuccagcccccaguggg

SEQ ID NO: 432147 - RNA, 23 nt, Human
gcacagggccuggcaggguccug

SEQ ID NO: 432148 - RNA, 32 nt, Human
gcacagggcugcacagagugacuuugggacag

SEQ ID NO: 432149 - RNA, 32 nt, Human
gcacagggcugcagaaaauaaaccuccagauu

SEQ ID NO: 432150 - RNA, 32 nt, Human
gcacagggcuuuguuagcagagagaagccccu

SEQ ID NO: 432151 - RNA, 21 nt, Human
gcacaggggacugcaguggug

SEQ ID NO: 432152 - RNA, 22 nt, Human
gcacaggggaggcagguccuug

SEQ ID NO: 432153 - RNA, 32 nt, Human
gcacaggggcagccgcagggaggcagggaugg

SEQ ID NO: 432154 - RNA, 32 nt, Human
gcacaggggcccugaauuuaugugguuuuuau

SEQ ID NO: 432155 - RNA, 32 nt, Human
gcacaggggcucugagcuccugaccugaguca

SEQ ID NO: 432156 - RNA, 32 nt, Human
gcacaggggcuuguuucauugguacaagaaua

SEQ ID NO: 432157 - RNA, 18 nt, Human
gcacagggggccuccagg

SEQ ID NO: 432158 - RNA, 32 nt, Human
gcacagggguaaucccagcacuuggggaggcu

SEQ ID NO: 432159 - RNA, 23 nt, Human
gcacaggggucacaccuguaauc

SEQ ID NO: 432160 - RNA, 32 nt, Human
gcacaggggucacaccuguaaucccagcacuu

SEQ ID NO: 432161 - RNA, 32 nt, Human
gcacaggggugugcacaaagaaaaugacauga

SEQ ID NO: 432162 - RNA, 32 nt, Human
gcacaggguccccgagugccuagguuuuggag

SEQ ID NO: 432163 - RNA, 19 nt, Human
gcacagggugcaggcauug

SEQ ID NO: 432164 - RNA, 32 nt, Human
gcacagguacagcuuggcuucucagcuuugcu

SEQ ID NO: 432165 - RNA, 32 nt, Human
gcacagguauagaacauuuccaucaacacgga

SEQ ID NO: 432166 - RNA, 32 nt, Human
gcacaggucccaccuccagcccggggagccua

SEQ ID NO: 432167 - RNA, 32 nt, Human
gcacaggugagggagagcaggcuggcuuagag

SEQ ID NO: 432168 - RNA, 32 nt, Human
gcacagguggcugaggggacccgccugggacg

SEQ ID NO: 432169 - RNA, 32 nt, Human
gcacaggugugcauugaggaaggggccccagg

SEQ ID NO: 432170 - RNA, 32 nt, Human
gcacagguuaggcaagcgauuagaagauuugc

SEQ ID NO: 432171 - RNA, 32 nt, Human
gcacagguuccagugggccaagguugugccac

SEQ ID NO: 432172 - RNA, 21 nt, Human
gcacaguaaucccagcaccca

SEQ ID NO: 432173 - RNA, 24 nt, Human
gcacaguagcucacaccuauaauc

SEQ ID NO: 432174 - RNA, 24 nt, Human
gcacaguagcucacaccugaaauc

SEQ ID NO: 432175 - RNA, 24 nt, Human
gcacaguagcucacgccuguauuc

SEQ ID NO: 432176 - RNA, 24 nt, Human
gcacaguagcucaugccuguaauc

SEQ ID NO: 432177 - RNA, 24 nt, Human
gcacaguagcuuauaccuguaauc

SEQ ID NO: 432178 - RNA, 21 nt, Human
gcacaguaggggcacaaggca

SEQ ID NO: 432179 - RNA, 32 nt, Human
gcacaguagugcgggccugggcccugcuccac

SEQ ID NO: 432180 - RNA, 25 nt, Human
gcacaguagugcugaauuuuccuca

SEQ ID NO: 432181 - RNA, 23 nt, Human
gcacaguaguuuacccuguuauc

SEQ ID NO: 432182 - RNA, 32 nt, Human
gcacagucacucuggugacugccugcgggcag

SEQ ID NO: 432183 - RNA, 32 nt, Human
gcacagucagggccaagagagcagugaccacu

SEQ ID NO: 432184 - RNA, 31 nt, Human
gcacagucaggggcugagguuggaggaggaa

SEQ ID NO: 432185 - RNA, 18 nt, Human
gcacagucauacaaguca

SEQ ID NO: 432186 - RNA, 32 nt, Human
gcacaguccagaaauggagacaucccaccccc

SEQ ID NO: 432187 - RNA, 21 nt, Human
gcacaguccagacccaaguca

SEQ ID NO: 432188 - RNA, 20 nt, Human
gcacaguccaugcagaggca

SEQ ID NO: 432189 - RNA, 19 nt, Human
gcacaguccugggaaaggc

SEQ ID NO: 432190 - RNA, 24 nt, Human
gcacagucgcucacaccuguaauc

SEQ ID NO: 432191 - RNA, 32 nt, Human
gcacagucggagacaaagggaggcgagggcca

SEQ ID NO: 432192 - RNA, 17 nt, Human
gcacagucuaguuuaag

SEQ ID NO: 432193 - RNA, 21 nt, Human
gcacagucucaccucauugca

SEQ ID NO: 432194 - RNA, 32 nt, Human
gcacagucucuacucaggaggcugaggcagua

SEQ ID NO: 432195 - RNA, 32 nt, Human
gcacagucucuccugcugggggcuuucugucg

SEQ ID NO: 432196 - RNA, 18 nt, Human
gcacagucugagcugcuc

SEQ ID NO: 432197 - RNA, 32 nt, Human
gcacagucugcagcuuccugaguccuguucug

SEQ ID NO: 432198 - RNA, 16 nt, Human
gcacagucugggaagg

SEQ ID NO: 432199 - RNA, 32 nt, Human
gcacagucugugcacacauacucucaggucac

SEQ ID NO: 432200 - RNA, 24 nt, Human
gcacagugaccaaaucugacaauc

SEQ ID NO: 432201 - RNA, 24 nt, Human
gcacagugacucacaccuguaauc

SEQ ID NO: 432202 - RNA, 22 nt, Human
gcacagugacucacgccuguaa

SEQ ID NO: 432203 - RNA, 24 nt, Human
gcacagugacucacgccuguaauc

SEQ ID NO: 432204 - RNA, 24 nt, Human
gcacagugacucacuccuguaguc

SEQ ID NO: 432205 - RNA, 24 nt, Human
gcacagugacucaugccuguaauc

SEQ ID NO: 432206 - RNA, 32 nt, Human
gcacagugccagcggaggcugcacugagccuu

SEQ ID NO: 432207 - RNA, 24 nt, Human
gcacaguggcacacaccuguaguc

SEQ ID NO: 432208 - RNA, 24 nt, Human
gcacaguggcacaugccuguaauc

SEQ ID NO: 432209 - RNA, 24 nt, Human
gcacaguggcaugcgccugugauc

SEQ ID NO: 432210 - RNA, 24 nt, Human
gcacaguggcccaugccuauaauc

SEQ ID NO: 432211 - RNA, 24 nt, Human
gcacaguggcgcaugccuguaauc

SEQ ID NO: 432212 - RNA, 32 nt, Human
gcacaguggcuacgccuguaaucccagcacuu

SEQ ID NO: 432213 - RNA, 24 nt, Human
gcacaguggcucacacccauaauc

SEQ ID NO: 432214 - RNA, 22 nt, Human
gcacaguggcucacaccuaauc

SEQ ID NO: 432215 - RNA, 24 nt, Human
gcacaguggcucacaccuacgauc

SEQ ID NO: 432216 - RNA, 24 nt, Human
gcacaguggcucacaccugcaauc

SEQ ID NO: 432217 - RNA, 22 nt, Human
gcacaguggcucacaccuguaa

SEQ ID NO: 432218 - RNA, 24 nt, Human
gcacaguggcucacaccuguaauc

SEQ ID NO: 432219 - RNA, 32 nt, Human
gcacaguggcucacacuguaauccccacugga

SEQ ID NO: 432220 - RNA, 24 nt, Human
gcacaguggcucacgacuguaauu

SEQ ID NO: 432221 - RNA, 24 nt, Human
gcacaguggcucacgccaguaauc

SEQ ID NO: 432222 - RNA, 23 nt, Human
gcacaguggcucacgccuguaau

SEQ ID NO: 432223 - RNA, 24 nt, Human
gcacaguggcucacgccuguaauc

SEQ ID NO: 432224 - RNA, 24 nt, Human
gcacaguggcucacgccuguaguc

SEQ ID NO: 432225 - RNA, 24 nt, Human
gcacaguggcucacgcuuacaguc

SEQ ID NO: 432226 - RNA, 32 nt, Human
gcacaguggcucacgcuuacagucccagcacu

SEQ ID NO: 432227 - RNA, 24 nt, Human
gcacaguggcucacgcuuguaauc

SEQ ID NO: 432228 - RNA, 23 nt, Human
gcacaguggcucauaccuguaau

SEQ ID NO: 432229 - RNA, 24 nt, Human
gcacaguggcucauaccuguaauc

SEQ ID NO: 432230 - RNA, 24 nt, Human
gcacaguggcucaucccuguaauu

SEQ ID NO: 432231 - RNA, 24 nt, Human
gcacaguggcucaugcccguaauu

SEQ ID NO: 432232 - RNA, 24 nt, Human
gcacaguggcucaugccgauaauc

SEQ ID NO: 432233 - RNA, 24 nt, Human
gcacaguggcucaugccuauaauc

SEQ ID NO: 432234 - RNA, 24 nt, Human
gcacaguggcucaugccuauaauu

SEQ ID NO: 432235 - RNA, 24 nt, Human
gcacaguggcucaugccugaaauc

SEQ ID NO: 432236 - RNA, 24 nt, Human
gcacaguggcucaugccuguaauc

SEQ ID NO: 432237 - RNA, 24 nt, Human
gcacaguggcucaugccuguaauu

SEQ ID NO: 432238 - RNA, 24 nt, Human
gcacaguggcucaugucugcaauc

SEQ ID NO: 432239 - RNA, 24 nt, Human
gcacaguggcucccaccuauaauc

SEQ ID NO: 432240 - RNA, 24 nt, Human
gcacaguggcucccgccuguaauc

SEQ ID NO: 432241 - RNA, 24 nt, Human
gcacaguggcucuugucuguaauc

SEQ ID NO: 432242 - RNA, 24 nt, Human
gcacaguggcuuacaccuguaauc

SEQ ID NO: 432243 - RNA, 24 nt, Human
gcacaguggcuuacgccuguaauc

SEQ ID NO: 432244 - RNA, 23 nt, Human
gcacaguggcuuaugcccauaau

SEQ ID NO: 432245 - RNA, 24 nt, Human
gcacaguggcuuauuccuguaauc

SEQ ID NO: 432246 - RNA, 24 nt, Human
gcacaguggcuugcaccuguaauc

SEQ ID NO: 432247 - RNA, 24 nt, Human
gcacaguggcuugugccuguaauc

SEQ ID NO: 432248 - RNA, 24 nt, Human
gcacaguggcuuuugccuguaauc

SEQ ID NO: 432249 - RNA, 24 nt, Human
gcacagugguucacaccuguaauc

SEQ ID NO: 432250 - RNA, 24 nt, Human
gcacagugguucacgccuguaauc

SEQ ID NO: 432251 - RNA, 24 nt, Human
gcacagugguucauaccuauaguc

SEQ ID NO: 432252 - RNA, 24 nt, Human
gcacagugguuuauagcuguaauc

SEQ ID NO: 432253 - RNA, 32 nt, Human
gcacagugugagcccgcccccacgucgugggg

SEQ ID NO: 432254 - RNA, 32 nt, Human
gcacagugugggcaaccggacaggauggauuu

SEQ ID NO: 432255 - RNA, 32 nt, Human
gcacaguguuagugggaccugggggcaagucc

SEQ ID NO: 432256 - RNA, 32 nt, Human
gcacaguguuugacaggaguggaaaagcgguu

SEQ ID NO: 432257 - RNA, 32 nt, Human
gcacaguuauggggaggacucccacugcugug

SEQ ID NO: 432258 - RNA, 32 nt, Human
gcacaguugauuuucgguguguuccuguauaa

SEQ ID NO: 432259 - RNA, 20 nt, Human
gcacaguugcaaccaaggca

SEQ ID NO: 432260 - RNA, 32 nt, Human
gcacaguuuaacuccacccucauuuaaacuuc

SEQ ID NO: 432261 - RNA, 18 nt, Human
gcacaguuuccacaagca

SEQ ID NO: 432262 - RNA, 32 nt, Human
gcacaguuugguuuuugcacaaaagucauuua

SEQ ID NO: 432263 - RNA, 32 nt, Human
gcacauaacauguuggaagaugagcaccugcu

SEQ ID NO: 432264 - RNA, 32 nt, Human
gcacauacaagaaacauacaguguaccucaaa

SEQ ID NO: 432265 - RNA, 24 nt, Human
gcacauacacacaugcacauaugu

SEQ ID NO: 432266 - RNA, 32 nt, Human
gcacauacacauauacauacauacacacauac

SEQ ID NO: 432267 - RNA, 32 nt, Human
gcacauacagaccucagaucuuacuugguagu

SEQ ID NO: 432268 - RNA, 32 nt, Human
gcacauacagccgcuuccuggaagccgccugg

SEQ ID NO: 432269 - RNA, 23 nt, Human
gcacauacauacaaacacaugca

SEQ ID NO: 432270 - RNA, 24 nt, Human
gcacauacauacacagaaugcagu

SEQ ID NO: 432271 - RNA, 18 nt, Human
gcacauacccaguccuua

SEQ ID NO: 432272 - RNA, 19 nt, Human
gcacauaccuguaauccca

SEQ ID NO: 432273 - RNA, 22 nt, Human
gcacauaccuguaaucccagcu

SEQ ID NO: 432274 - RNA, 26 nt, Human
gcacauagauucacugaaccauguuc

SEQ ID NO: 432275 - RNA, 32 nt, Human
gcacauagcuaaaucacaaaacauccaauuuc

SEQ ID NO: 432276 - RNA, 32 nt, Human
gcacauauauaagaaugcuucauuaauaagua

SEQ ID NO: 432277 - RNA, 32 nt, Human
gcacauaugaccaugauguucagggcuuuaua

SEQ ID NO: 432278 - RNA, 32 nt, Human
gcacauauuuucuguuuggaaacacacuguug

SEQ ID NO: 432279 - RNA, 32 nt, Human
gcacaucacaccauuuccuguuucuuuauaac

SEQ ID NO: 432280 - RNA, 32 nt, Human
gcacaucacagaaaauccucaaaccacaggga

SEQ ID NO: 432281 - RNA, 32 nt, Human
gcacaucacaugacaaaagcaggaacaagacu

SEQ ID NO: 432282 - RNA, 32 nt, Human
gcacaucaggcagagcaggccacgggcaggga

SEQ ID NO: 432283 - RNA, 23 nt, Human
gcacaucagggaggccacugcgg

SEQ ID NO: 432284 - RNA, 23 nt, Human
gcacaucagucauaugcccagug

SEQ ID NO: 432285 - RNA, 23 nt, Human
gcacaucaucagauuccacauca

SEQ ID NO: 432286 - RNA, 32 nt, Human
gcacauccagaaucaccugaggaacuucaaaa

SEQ ID NO: 432287 - RNA, 32 nt, Human
gcacauccaggauuuccgccacccugaauuua

SEQ ID NO: 432288 - RNA, 32 nt, Human
gcacaucccaucucaggcagcaagacaaucuu

SEQ ID NO: 432289 - RNA, 32 nt, Human
gcacaucccauucaggcagaggccaguacaga

SEQ ID NO: 432290 - RNA, 22 nt, Human
gcacaucccuguaauuccagcu

SEQ ID NO: 432291 - RNA, 32 nt, Human
gcacaucccuuuccuuacuuugcccugugcua

SEQ ID NO: 432292 - RNA, 32 nt, Human
gcacaucuacacacaaacaaacaaugcauagg

SEQ ID NO: 432293 - RNA, 32 nt, Human
gcacaucuauaaucccaguuacccgggagccu

SEQ ID NO: 432294 - RNA, 32 nt, Human
gcacaucuccagaaaaaugaaaagcaauacaa

SEQ ID NO: 432295 - RNA, 32 nt, Human
gcacaucuccaucucuuccaccucaggcagug

SEQ ID NO: 432296 - RNA, 19 nt, Human
gcacaucucccuugcccuu

SEQ ID NO: 432297 - RNA, 32 nt, Human
gcacaucuguaagggggaaaaacaguauauca

SEQ ID NO: 432298 - RNA, 32 nt, Human
gcacaucuguaaucccagcuacucaggaggcu

SEQ ID NO: 432299 - RNA, 32 nt, Human
gcacaucuguaaucccagcuacucgggaggcu

SEQ ID NO: 432300 - RNA, 32 nt, Human
gcacaucuguaaucccaguuacuugggaggcc

SEQ ID NO: 432301 - RNA, 20 nt, Human
gcacaucuguggucccagcu

SEQ ID NO: 432302 - RNA, 32 nt, Human
gcacaucuguggucccagcuacuggggaggcu

SEQ ID NO: 432303 - RNA, 32 nt, Human
gcacaucuguggucccagcuacuugagaggcu

SEQ ID NO: 432304 - RNA, 32 nt, Human
gcacaucuguggucccagcugcuggggaggcu

SEQ ID NO: 432305 - RNA, 32 nt, Human
gcacaugaacagcuugccagggaugggcagcc

SEQ ID NO: 432306 - RNA, 32 nt, Human
gcacaugaagccaccaguuucauuccaaagug

SEQ ID NO: 432307 - RNA, 32 nt, Human
gcacaugacagcaacuccccgaagccuucccu

SEQ ID NO: 432308 - RNA, 32 nt, Human
gcacaugacauauacaugguggcagguccuag

SEQ ID NO: 432309 - RNA, 19 nt, Human
gcacaugaggcagguccug

SEQ ID NO: 432310 - RNA, 32 nt, Human
gcacaugaggcugaggcugaggggcagucacc

SEQ ID NO: 432311 - RNA, 32 nt, Human
gcacaugcacacagcaugcacacacacgcacc

SEQ ID NO: 432312 - RNA, 32 nt, Human
gcacaugcacacauacacaugcaugcacacau

SEQ ID NO: 432313 - RNA, 32 nt, Human
gcacaugcaccuguaaucccagcuacucagga

SEQ ID NO: 432314 - RNA, 32 nt, Human
gcacaugcacgugugugcacguacacacacau

SEQ ID NO: 432315 - RNA, 32 nt, Human
gcacaugcagugagccugugucucugaggccg

SEQ ID NO: 432316 - RNA, 32 nt, Human
gcacaugccaggcuaauuuuuguauuuuuagu

SEQ ID NO: 432317 - RNA, 32 nt, Human
gcacaugccuauaaucccagcacuuugggagg

SEQ ID NO: 432318 - RNA, 32 nt, Human
gcacaugccucgcguucuucccagaaagucag

SEQ ID NO: 432319 - RNA, 32 nt, Human
gcacaugccuguaacccagcuacucgggaggc

SEQ ID NO: 432320 - RNA, 32 nt, Human
gcacaugccuguaacuccagcuacuugggagg

SEQ ID NO: 432321 - RNA, 32 nt, Human
gcacaugccuguaaucccagcacuuugggaag

SEQ ID NO: 432322 - RNA, 32 nt, Human
gcacaugccuguaaucccagcacuuugggagg

SEQ ID NO: 432323 - RNA, 32 nt, Human
gcacaugccuguaaucccagcacuuugggggu

SEQ ID NO: 432324 - RNA, 27 nt, Human
gcacaugccuguaaucccagcuacuca

SEQ ID NO: 432325 - RNA, 32 nt, Human
gcacaugccuguaaucccagcuacucggaggc

SEQ ID NO: 432326 - RNA, 32 nt, Human
gcacaugccuguaaucccagcuacucgggagg

SEQ ID NO: 432327 - RNA, 32 nt, Human
gcacaugccuguaaucccagcuacuuggcagg

SEQ ID NO: 432328 - RNA, 32 nt, Human
gcacaugccuguaaucccagcuacuugggagg

SEQ ID NO: 432329 - RNA, 32 nt, Human
gcacaugccuguaauccgagugcuuugggagg

SEQ ID NO: 432330 - RNA, 32 nt, Human
gcacaugccuguaauccuagcacuuugggagg

SEQ ID NO: 432331 - RNA, 32 nt, Human
gcacaugccuguaauccuagcuacucgggagg

SEQ ID NO: 432332 - RNA, 32 nt, Human
gcacaugccuguaaucucagcgacuugggagg

SEQ ID NO: 432333 - RNA, 32 nt, Human
gcacaugccuguaaucucagcuacuagagagg

SEQ ID NO: 432334 - RNA, 32 nt, Human
gcacaugccuguaaucucagcuacucaggagg

SEQ ID NO: 432335 - RNA, 32 nt, Human
gcacaugccuguaaucucagcuacuugggagg

SEQ ID NO: 432336 - RNA, 32 nt, Human
gcacaugccuguaaugccagcuacucgggagg

SEQ ID NO: 432337 - RNA, 32 nt, Human
gcacaugccuguagucccaccuuugagcggcu

SEQ ID NO: 432338 - RNA, 32 nt, Human
gcacaugccuguagucccagcuacucgggagg

SEQ ID NO: 432339 - RNA, 32 nt, Human
gcacaugccuguagucccagcuacuggggagg

SEQ ID NO: 432340 - RNA, 32 nt, Human
gcacaugccuguagucccagcuacuugagagg

SEQ ID NO: 432341 - RNA, 32 nt, Human
gcacaugccugugaucccagcacuuugggaug

SEQ ID NO: 432342 - RNA, 32 nt, Human
gcacaugcucuuucugcuuucucuguacugua

SEQ ID NO: 432343 - RNA, 32 nt, Human
gcacaugcugcccagcuguccaugccuucaga

SEQ ID NO: 432344 - RNA, 32 nt, Human
gcacaugcugguaaucucagcuauugaggagg

SEQ ID NO: 432345 - RNA, 32 nt, Human
gcacaugcuucaauaguucaaggaacuugaaa

SEQ ID NO: 432346 - RNA, 23 nt, Human
gcacaugcuucugucuccuccuc

SEQ ID NO: 432347 - RNA, 32 nt, Human
gcacaugcuuguaaucccagcuacucgggagc

SEQ ID NO: 432348 - RNA, 32 nt, Human
gcacaugcuuguaaucccagcuacucgggagg

SEQ ID NO: 432349 - RNA, 32 nt, Human
gcacauggagguggacuggcuacaggagaaag

SEQ ID NO: 432350 - RNA, 32 nt, Human
gcacauggagugagcugggggacggggacuaa

SEQ ID NO: 432351 - RNA, 32 nt, Human
gcacauggagugccuguacaagcugauguuuu

SEQ ID NO: 432352 - RNA, 32 nt, Human
gcacauggauuuucccuuuuguuuucaguguu

SEQ ID NO: 432353 - RNA, 32 nt, Human
gcacauggccacucuuggccuaauaaaggagg

SEQ ID NO: 432354 - RNA, 32 nt, Human
gcacauggcccuuagacugagauucagagaua

SEQ ID NO: 432355 - RNA, 32 nt, Human
gcacaugggacuguguagagcuugguuaucgg

SEQ ID NO: 432356 - RNA, 32 nt, Human
gcacaugggauaagccaaggcuugccuucagg

SEQ ID NO: 432357 - RNA, 32 nt, Human
gcacauggggagcuggcagucaguaaaggaga

SEQ ID NO: 432358 - RNA, 32 nt, Human
gcacaugggugagcuccgugaguccagacaug

SEQ ID NO: 432359 - RNA, 26 nt, Human
gcacauguagucugugugccugguca

SEQ ID NO: 432360 - RNA, 32 nt, Human
gcacaugucaccccugcacuccugccuucccg

SEQ ID NO: 432361 - RNA, 32 nt, Human
gcacaugucuauaauuccagcuacucaggagg

SEQ ID NO: 432362 - RNA, 32 nt, Human
gcacaugucuguaaucccagcuacucgggagg

SEQ ID NO: 432363 - RNA, 32 nt, Human
gcacaugucuguaauccuagcacuuugggagg

SEQ ID NO: 432364 - RNA, 32 nt, Human
gcacauguggcucugugggugucuccuagaga

SEQ ID NO: 432365 - RNA, 32 nt, Human
gcacauguguguguuuuccaugaggcacugcu

SEQ ID NO: 432366 - RNA, 32 nt, Human
gcacauguuccaaggcuacgcgcuccccuuuc

SEQ ID NO: 432367 - RNA, 26 nt, Human
gcacauguuggcgcacaccugcaauc

SEQ ID NO: 432368 - RNA, 32 nt, Human
gcacauuaacuggaaaagauguuaacaguaaa

SEQ ID NO: 432369 - RNA, 32 nt, Human
gcacauucaaucugaaggugacccuggccugg

SEQ ID NO: 432370 - RNA, 32 nt, Human
gcacauucaguguggcuaugaagagcgaaucc

SEQ ID NO: 432371 - RNA, 32 nt, Human
gcacauuccaaacuuuagcaacaguuaucaca

SEQ ID NO: 432372 - RNA, 32 nt, Human
gcacauuccacccuagaaaugguucagaaacu

SEQ ID NO: 432373 - RNA, 32 nt, Human
gcacauuccauggaggaaggaguccugcuuug

SEQ ID NO: 432374 - RNA, 32 nt, Human
gcacauucucaagcuaguaucauuucaagaag

SEQ ID NO: 432375 - RNA, 18 nt, Human
gcacauucugauguggug

SEQ ID NO: 432376 - RNA, 32 nt, Human
gcacauucuuaucuaccaacauauacagcagu

SEQ ID NO: 432377 - RNA, 22 nt, Human
gcacauugcagccccaacggug

SEQ ID NO: 432378 - RNA, 32 nt, Human
gcacauuguggguggagagcgggaaagagagg

SEQ ID NO: 432379 - RNA, 32 nt, Human
gcacauuguuccccucacccacgccuccccag

SEQ ID NO: 432380 - RNA, 32 nt, Human
gcacauuuauuuccucccucuaccccaauuuc

SEQ ID NO: 432381 - RNA, 31 nt, Human
gcacauuucaauaaaauuguuuggaaaauaa

SEQ ID NO: 432382 - RNA, 32 nt, Human
gcacauuugagaccaaggauagagauugggaa

SEQ ID NO: 432383 - RNA, 32 nt, Human
gcacauuugaguacauuugaaaaguagaaaaa

SEQ ID NO: 432384 - RNA, 18 nt, Human
gcacauuugccuaccacc

SEQ ID NO: 432385 - RNA, 24 nt, Human
gcacauuugcucaugccuguaauc

SEQ ID NO: 432386 - RNA, 32 nt, Human
gcaccaaaacuuggcagcugugccagaaacca

SEQ ID NO: 432387 - RNA, 32 nt, Human
gcaccaaacagcccugugacaucugcauucac

SEQ ID NO: 432388 - RNA, 32 nt, Human
gcaccaaaccacugccccucggagccugguag

SEQ ID NO: 432389 - RNA, 17 nt, Human
gcaccaaacugucacca

SEQ ID NO: 432390 - RNA, 32 nt, Human
gcaccaaagcuccccaccccagccugguggca

SEQ ID NO: 432391 - RNA, 32 nt, Human
gcaccaaagcuucacucauacccaguuuuguu

SEQ ID NO: 432392 - RNA, 32 nt, Human
gcaccaaauucaaccaucaucugucaagaaau

SEQ ID NO: 432393 - RNA, 32 nt, Human
gcaccaacagcguuccuccuccccaaggagca

SEQ ID NO: 432394 - RNA, 32 nt, Human
gcaccaacaucuacagcuggacugccuggagg

SEQ ID NO: 432395 - RNA, 32 nt, Human
gcaccaacauggagaaaccccgucucuacuaa

SEQ ID NO: 432396 - RNA, 19 nt, Human
gcaccaaccacugccucca

SEQ ID NO: 432397 - RNA, 32 nt, Human
gcaccaaccucacugcccucccucggccccac

SEQ ID NO: 432398 - RNA, 32 nt, Human
gcaccaacuaaugacacuuuaauuguuuuucu

SEQ ID NO: 432399 - RNA, 32 nt, Human
gcaccaacucaaccuuugcuuuuuggaugagu

SEQ ID NO: 432400 - RNA, 21 nt, Human
gcaccaagaaaaccuggcaua

SEQ ID NO: 432401 - RNA, 32 nt, Human
gcaccaagaacaaugcuggagugcaguggcgu

SEQ ID NO: 432402 - RNA, 32 nt, Human
gcaccaagcagacaaagucaauaaaagagcug

SEQ ID NO: 432403 - RNA, 22 nt, Human
gcaccaaggagaagaucugccu

SEQ ID NO: 432404 - RNA, 18 nt, Human
gcaccaaggccuaccacc

SEQ ID NO: 432405 - RNA, 18 nt, Human
gcaccaaggcugucacca

SEQ ID NO: 432406 - RNA, 32 nt, Human
gcaccaagggagcgagggggaauaagagcagg

SEQ ID NO: 432407 - RNA, 32 nt, Human
gcaccaagggugaacccgggggaaagauggca

SEQ ID NO: 432408 - RNA, 32 nt, Human
gcaccaagugcugaggcuggaagaaaaacgca

SEQ ID NO: 432409 - RNA, 32 nt, Human
gcaccaagugugaaagugacuuucacgguucc

SEQ ID NO: 432410 - RNA, 32 nt, Human
gcaccaaguugguuuggaauucugucaaguac

SEQ ID NO: 432411 - RNA, 32 nt, Human
gcaccaauaaaggcgucuuuugugcuugaaaa

SEQ ID NO: 432412 - RNA, 32 nt, Human
gcaccacaacaacccugugggcacugaauggc

SEQ ID NO: 432413 - RNA, 32 nt, Human
gcaccacaauggcuuuucucccaacuuuuugu

SEQ ID NO: 432414 - RNA, 19 nt, Human
gcaccacacauuugcccca

SEQ ID NO: 432415 - RNA, 32 nt, Human
gcaccacacccaggcgguggccccagacccuc

SEQ ID NO: 432416 - RNA, 32 nt, Human
gcaccacacgggggaggaaggaaggagcuccc

SEQ ID NO: 432417 - RNA, 32 nt, Human
gcaccacagagugcuugggcugagggacugac

SEQ ID NO: 432418 - RNA, 32 nt, Human
gcaccacagcacuccagcccaggcggcaguga

SEQ ID NO: 432419 - RNA, 32 nt, Human
gcaccacagcacugcagccuagacaacagagc

SEQ ID NO: 432420 - RNA, 32 nt, Human
gcaccacagcgcuccagccuggucgacagagu

SEQ ID NO: 432421 - RNA, 18 nt, Human
gcaccacagcucaagaaa

SEQ ID NO: 432422 - RNA, 32 nt, Human
gcaccacaggaaauagaacgaguacuguuaau

SEQ ID NO: 432423 - RNA, 32 nt, Human
gcaccacagucugaagucucucugccaauucc

SEQ ID NO: 432424 - RNA, 18 nt, Human
gcaccaccaaucacccca

SEQ ID NO: 432425 - RNA, 18 nt, Human
gcaccaccacacggccac

SEQ ID NO: 432426 - RNA, 19 nt, Human
gcaccaccacacggccaca

SEQ ID NO: 432427 - RNA, 17 nt, Human
gcaccaccaccaccacc

SEQ ID NO: 432428 - RNA, 18 nt, Human
gcaccaccaccaccacca

SEQ ID NO: 432429 - RNA, 21 nt, Human
gcaccaccaccaccaccacca

SEQ ID NO: 432430 - RNA, 18 nt, Human
gcaccaccaccaucacca

SEQ ID NO: 432431 - RNA, 32 nt, Human
gcaccaccaccauuuaaccacccugccgcugg

SEQ ID NO: 432432 - RNA, 25 nt, Human
gcaccaccacccucaaguacuucca

SEQ ID NO: 432433 - RNA, 21 nt, Human
gcaccaccaccgacacgucca

SEQ ID NO: 432434 - RNA, 18 nt, Human
gcaccaccacgcccagca

SEQ ID NO: 432435 - RNA, 32 nt, Human
gcaccaccacugaccugggacagugaaucgac

SEQ ID NO: 432436 - RNA, 19 nt, Human
gcaccaccagaggcugcgg

SEQ ID NO: 432437 - RNA, 20 nt, Human
gcaccaccagauggcuacca

SEQ ID NO: 432438 - RNA, 18 nt, Human
gcaccaccagcaccacca

SEQ ID NO: 432439 - RNA, 17 nt, Human
gcaccaccaugcccacc

SEQ ID NO: 432440 - RNA, 18 nt, Human
gcaccaccauggccucca

SEQ ID NO: 432441 - RNA, 18 nt, Human
gcaccaccauugccgcca

SEQ ID NO: 432442 - RNA, 18 nt, Human
gcaccacccacaccccca

SEQ ID NO: 432443 - RNA, 20 nt, Human
gcaccacccacauggcauca

SEQ ID NO: 432444 - RNA, 23 nt, Human
gcaccacccacuugcaaccacca

SEQ ID NO: 432445 - RNA, 32 nt, Human
gcaccacccagccugaccuguguuuuggcaag

SEQ ID NO: 432446 - RNA, 32 nt, Human
gcaccacccaggcccccugggcaccaagggag

SEQ ID NO: 432447 - RNA, 32 nt, Human
gcaccacccaggggcucccuugcuuuggcuag

SEQ ID NO: 432448 - RNA, 18 nt, Human
gcaccaccccacccucca

SEQ ID NO: 432449 - RNA, 18 nt, Human
gcaccacccccacccacc

SEQ ID NO: 432450 - RNA, 16 nt, Human
gcaccacccccgcacc

SEQ ID NO: 432451 - RNA, 17 nt, Human
gcaccacccccuccacc

SEQ ID NO: 432452 - RNA, 18 nt, Human
gcaccaccccucacccca

SEQ ID NO: 432453 - RNA, 32 nt, Human
gcaccaccccucucacucuuggguuggaugcu

SEQ ID NO: 432454 - RNA, 19 nt, Human
gcaccaccccugggcagca

SEQ ID NO: 432455 - RNA, 19 nt, Human
gcaccacccucccaccacc

SEQ ID NO: 432456 - RNA, 17 nt, Human
gcaccacccucucccca

SEQ ID NO: 432457 - RNA, 32 nt, Human
gcaccacccugcaacaccucaggccagggaaa

SEQ ID NO: 432458 - RNA, 32 nt, Human
gcaccacccugccuucacuucaucuacauaaa

SEQ ID NO: 432459 - RNA, 32 nt, Human
gcaccacccuggcaguuccagccuguagggga

SEQ ID NO: 432460 - RNA, 32 nt, Human
gcaccaccgcacuccagccugggugacagagc

SEQ ID NO: 432461 - RNA, 32 nt, Human
gcaccaccgcguggacaggaacaccguggcgc

SEQ ID NO: 432462 - RNA, 18 nt, Human
gcaccaccgcucacccca

SEQ ID NO: 432463 - RNA, 20 nt, Human
gcaccaccuaacgcaccacc

SEQ ID NO: 432464 - RNA, 19 nt, Human
gcaccaccuacccugaucc

SEQ ID NO: 432465 - RNA, 20 nt, Human
gcaccaccuaccuggcuucc

SEQ ID NO: 432466 - RNA, 17 nt, Human
gcaccaccucucccacc

SEQ ID NO: 432467 - RNA, 17 nt, Human
gcaccaccucugcgcac

SEQ ID NO: 432468 - RNA, 32 nt, Human
gcaccaccuggauguugagguagaucacagcc

SEQ ID NO: 432469 - RNA, 18 nt, Human
gcaccaccuugucuccac

SEQ ID NO: 432470 - RNA, 32 nt, Human
gcaccacgccacugcacuccagcgugggcaac

SEQ ID NO: 432471 - RNA, 32 nt, Human
gcaccacgcccgggaccccacccagcggcccg

SEQ ID NO: 432472 - RNA, 20 nt, Human
gcaccacggaagcugccacc

SEQ ID NO: 432473 - RNA, 32 nt, Human
gcaccacggcacacaccuccagccucgagccc

SEQ ID NO: 432474 - RNA, 32 nt, Human
gcaccacggcacuccagccuggcgacagagca

SEQ ID NO: 432475 - RNA, 32 nt, Human
gcaccacggcacuccagccugggugacagagu

SEQ ID NO: 432476 - RNA, 32 nt, Human
gcaccacggcagcaggagguuucggcuaaguu

SEQ ID NO: 432477 - RNA, 24 nt, Human
gcaccacggcucacaccuauaauc

SEQ ID NO: 432478 - RNA, 32 nt, Human
gcaccacuacacuccagcccgggcgacagagc

SEQ ID NO: 432479 - RNA, 32 nt, Human
gcaccacuacacuccagccuggaugacagagu

SEQ ID NO: 432480 - RNA, 32 nt, Human
gcaccacuacacuccagccugggcaacagaga

SEQ ID NO: 432481 - RNA, 32 nt, Human
gcaccacuacacuccagccugggcaacagagc

SEQ ID NO: 432482 - RNA, 32 nt, Human
gcaccacuacacuccagccugggugacaaagc

SEQ ID NO: 432483 - RNA, 32 nt, Human
gcaccacucagccugcacugggagcacagcca

SEQ ID NO: 432484 - RNA, 32 nt, Human
gcaccacucagugaagcccagccuggcgccug

SEQ ID NO: 432485 - RNA, 18 nt, Human
gcaccacuccacccacca

SEQ ID NO: 432486 - RNA, 22 nt, Human
gcaccacuccgggagaggcggc

SEQ ID NO: 432487 - RNA, 32 nt, Human
gcaccacucuagacuggcaagggccuccacag

SEQ ID NO: 432488 - RNA, 19 nt, Human
gcaccacucugcugcccca

SEQ ID NO: 432489 - RNA, 32 nt, Human
gcaccacugaacuccagccugggccacauagc

SEQ ID NO: 432490 - RNA, 32 nt, Human
gcaccacugaacuccagccugggcgacaagag

SEQ ID NO: 432491 - RNA, 32 nt, Human
gcaccacugcacgcacuccagccugggugaca

SEQ ID NO: 432492 - RNA, 32 nt, Human
gcaccacugcacuacagccugggcgacagaac

SEQ ID NO: 432493 - RNA, 32 nt, Human
gcaccacugcacuacagcuugggugacagcgc

SEQ ID NO: 432494 - RNA, 32 nt, Human
gcaccacugcacucaagccugggcaacagagu

SEQ ID NO: 432495 - RNA, 32 nt, Human
gcaccacugcacucaagccugggcgacagagc

SEQ ID NO: 432496 - RNA, 32 nt, Human
gcaccacugcacucaagccugggcgacagagg

SEQ ID NO: 432497 - RNA, 32 nt, Human
gcaccacugcacuccaaccugggcaacagagc

SEQ ID NO: 432498 - RNA, 32 nt, Human
gcaccacugcacuccaaccugggugacaagag

SEQ ID NO: 432499 - RNA, 32 nt, Human
gcaccacugcacuccaaccugggugacagagu

SEQ ID NO: 432500 - RNA, 32 nt, Human
gcaccacugcacuccaaccugggugacgagug

SEQ ID NO: 432501 - RNA, 32 nt, Human
gcaccacugcacuccaaucugggcaagagaac

SEQ ID NO: 432502 - RNA, 32 nt, Human
gcaccacugcacuccacccugggcagaggugg

SEQ ID NO: 432503 - RNA, 32 nt, Human
gcaccacugcacuccagcaugagugacagaga

SEQ ID NO: 432504 - RNA, 32 nt, Human
gcaccacugcacuccagcaugggcaacacagu

SEQ ID NO: 432505 - RNA, 20 nt, Human
gcaccacugcacuccagcca

SEQ ID NO: 432506 - RNA, 32 nt, Human
gcaccacugcacuccagccaggaaugaggcag

SEQ ID NO: 432507 - RNA, 32 nt, Human
gcaccacugcacuccagcccaggcaacagagu

SEQ ID NO: 432508 - RNA, 32 nt, Human
gcaccacugcacuccagccggggugacagagu

SEQ ID NO: 432509 - RNA, 32 nt, Human
gcaccacugcacuccagccuaggcgacagagc

SEQ ID NO: 432510 - RNA, 32 nt, Human
gcaccacugcacuccagccuaggcgacggggc

SEQ ID NO: 432511 - RNA, 32 nt, Human
gcaccacugcacuccagccuaggugacagagu

SEQ ID NO: 432512 - RNA, 32 nt, Human
gcaccacugcacuccagccugagugacagagc

SEQ ID NO: 432513 - RNA, 32 nt, Human
gcaccacugcacuccagccuggaaaacggagu

SEQ ID NO: 432514 - RNA, 32 nt, Human
gcaccacugcacuccagccuggaagaccaaac

SEQ ID NO: 432515 - RNA, 32 nt, Human
gcaccacugcacuccagccuggacaacagagu

SEQ ID NO: 432516 - RNA, 32 nt, Human
gcaccacugcacuccagccuggacgacagagc

SEQ ID NO: 432517 - RNA, 32 nt, Human
gcaccacugcacuccagccuggcgacaaagug

SEQ ID NO: 432518 - RNA, 32 nt, Human
gcaccacugcacuccagccugggaaacagagu

SEQ ID NO: 432519 - RNA, 32 nt, Human
gcaccacugcacuccagccugggagacacagc

SEQ ID NO: 432520 - RNA, 32 nt, Human
gcaccacugcacuccagccugggagacagagc

SEQ ID NO: 432521 - RNA, 32 nt, Human
gcaccacugcacuccagccugggagacagagu

SEQ ID NO: 432522 - RNA, 32 nt, Human
gcaccacugcacuccagccugggagauacagc

SEQ ID NO: 432523 - RNA, 32 nt, Human
gcaccacugcacuccagccugggcaacaaagc

SEQ ID NO: 432524 - RNA, 32 nt, Human
gcaccacugcacuccagccugggcaacaaagu

SEQ ID NO: 432525 - RNA, 32 nt, Human
gcaccacugcacuccagccugggcaacaagag

SEQ ID NO: 432526 - RNA, 32 nt, Human
gcaccacugcacuccagccugggcaacacagu

SEQ ID NO: 432527 - RNA, 32 nt, Human
gcaccacugcacuccagccugggcaacagagc

SEQ ID NO: 432528 - RNA, 32 nt, Human
gcaccacugcacuccagccugggcaacagagg

SEQ ID NO: 432529 - RNA, 32 nt, Human
gcaccacugcacuccagccugggcaacagagu

SEQ ID NO: 432530 - RNA, 32 nt, Human
gcaccacugcacuccagccugggcaacauagc

SEQ ID NO: 432531 - RNA, 32 nt, Human
gcaccacugcacuccagccugggcaauagagu

SEQ ID NO: 432532 - RNA, 32 nt, Human
gcaccacugcacuccagccugggcgaaagggc

SEQ ID NO: 432533 - RNA, 32 nt, Human
gcaccacugcacuccagccugggcgacaaagu

SEQ ID NO: 432534 - RNA, 32 nt, Human
gcaccacugcacuccagccugggcgacagacc

SEQ ID NO: 432535 - RNA, 32 nt, Human
gcaccacugcacuccagccugggcgacagagc

SEQ ID NO: 432536 - RNA, 32 nt, Human
gcaccacugcacuccagccugggcgacagagg

SEQ ID NO: 432537 - RNA, 32 nt, Human
gcaccacugcacuccagccugggcgacagagu

SEQ ID NO: 432538 - RNA, 32 nt, Human
gcaccacugcacuccagccugggcgacuguga

SEQ ID NO: 432539 - RNA, 32 nt, Human
gcaccacugcacuccagccugggcggcagagc

SEQ ID NO: 432540 - RNA, 32 nt, Human
gcaccacugcacuccagccugggcuacagauc

SEQ ID NO: 432541 - RNA, 32 nt, Human
gcaccacugcacuccagccuggggacagagca

SEQ ID NO: 432542 - RNA, 32 nt, Human
gcaccacugcacuccagccuggguaacaagag

SEQ ID NO: 432543 - RNA, 32 nt, Human
gcaccacugcacuccagccugggugacaagag

SEQ ID NO: 432544 - RNA, 32 nt, Human
gcaccacugcacuccagccugggugacagaga

SEQ ID NO: 432545 - RNA, 32 nt, Human
gcaccacugcacuccagccugggugacagagc

SEQ ID NO: 432546 - RNA, 32 nt, Human
gcaccacugcacuccagccugggugacagagu

SEQ ID NO: 432547 - RNA, 32 nt, Human
gcaccacugcacuccagccugggugagagagc

SEQ ID NO: 432548 - RNA, 32 nt, Human
gcaccacugcacuccagccugggugauagagc

SEQ ID NO: 432549 - RNA, 32 nt, Human
gcaccacugcacuccagccugggugauagagu

SEQ ID NO: 432550 - RNA, 32 nt, Human
gcaccacugcacuccagccugggugauggagc

SEQ ID NO: 432551 - RNA, 32 nt, Human
gcaccacugcacuccagccuggguggcagagu

SEQ ID NO: 432552 - RNA, 32 nt, Human
gcaccacugcacuccagccugggugucagagc

SEQ ID NO: 432553 - RNA, 32 nt, Human
gcaccacugcacuccagccuggguuacagauc

SEQ ID NO: 432554 - RNA, 32 nt, Human
gcaccacugcacuccagccuggucgacagcga

SEQ ID NO: 432555 - RNA, 31 nt, Human
gcaccacugcacuccagccuggugacagagc

SEQ ID NO: 432556 - RNA, 32 nt, Human
gcaccacugcacuccagccuggugacagagcu

SEQ ID NO: 432557 - RNA, 32 nt, Human
gcaccacugcacuccagccuggugacagggcg

SEQ ID NO: 432558 - RNA, 32 nt, Human
gcaccacugcacuccagccugguuacagagca

SEQ ID NO: 432559 - RNA, 32 nt, Human
gcaccacugcacuccagcucgggugacaagag

SEQ ID NO: 432560 - RNA, 32 nt, Human
gcaccacugcacuccagcuugggugacagagu

SEQ ID NO: 432561 - RNA, 32 nt, Human
gcaccacugcacuccaggcuggguaacagaau

SEQ ID NO: 432562 - RNA, 32 nt, Human
gcaccacugcacuccaggcugggugacagagc

SEQ ID NO: 432563 - RNA, 32 nt, Human
gcaccacugcacuccagucuggcaacagagca

SEQ ID NO: 432564 - RNA, 32 nt, Human
gcaccacugcacuccagucugggcaacagagc

SEQ ID NO: 432565 - RNA, 32 nt, Human
gcaccacugcacuccagucuggguaacagagc

SEQ ID NO: 432566 - RNA, 32 nt, Human
gcaccacugcacuccagucugggugagaguga

SEQ ID NO: 432567 - RNA, 32 nt, Human
gcaccacugcacuccauccugggcaacagagu

SEQ ID NO: 432568 - RNA, 32 nt, Human
gcaccacugcacuccauccugggugacagagc

SEQ ID NO: 432569 - RNA, 32 nt, Human
gcaccacugcacucccgcuuggcaauagagug

SEQ ID NO: 432570 - RNA, 32 nt, Human
gcaccacugcacuccggccuaggcaacgagag

SEQ ID NO: 432571 - RNA, 32 nt, Human
gcaccacugcacucuaacuugggcaacaaagc

SEQ ID NO: 432572 - RNA, 32 nt, Human
gcaccacugcacucuacucugggugacagaau

SEQ ID NO: 432573 - RNA, 32 nt, Human
gcaccacugcacucuagccugcgugacacaac

SEQ ID NO: 432574 - RNA, 32 nt, Human
gcaccacugcacucuagccugggcaagagaac

SEQ ID NO: 432575 - RNA, 32 nt, Human
gcaccacugcacucuagccuggggaacagagu

SEQ ID NO: 432576 - RNA, 32 nt, Human
gcaccacugcacucuagccuggguaacaagca

SEQ ID NO: 432577 - RNA, 32 nt, Human
gcaccacugcacucuagccugggugaaagagc

SEQ ID NO: 432578 - RNA, 32 nt, Human
gcaccacugcacucuagccugggugaccgagg

SEQ ID NO: 432579 - RNA, 32 nt, Human
gcaccacugcacucuagccuuggcaacagugc

SEQ ID NO: 432580 - RNA, 32 nt, Human
gcaccacugcacucuagcuugggcaacagagc

SEQ ID NO: 432581 - RNA, 32 nt, Human
gcaccacugcacugcagccuggcaacaagagc

SEQ ID NO: 432582 - RNA, 32 nt, Human
gcaccacugcacugcagccugggaaacagagu

SEQ ID NO: 432583 - RNA, 32 nt, Human
gcaccacugcacugcagccugggugacagagu

SEQ ID NO: 432584 - RNA, 32 nt, Human
gcaccacugcacuucagccuggacaacagagu

SEQ ID NO: 432585 - RNA, 32 nt, Human
gcaccacugcacuucagccugggugacagagg

SEQ ID NO: 432586 - RNA, 32 nt, Human
gcaccacugcacuucagccugggugacagagu

SEQ ID NO: 432587 - RNA, 32 nt, Human
gcaccacugcacuucagccuggugacagagcg

SEQ ID NO: 432588 - RNA, 32 nt, Human
gcaccacugcacuucagcuugggcaacagagc

SEQ ID NO: 432589 - RNA, 32 nt, Human
gcaccacugcacuuuagccugggcgacaagag

SEQ ID NO: 432590 - RNA, 32 nt, Human
gcaccacugcacuuuagucugggugacagagc

SEQ ID NO: 432591 - RNA, 17 nt, Human
gcaccacugcagccacc

SEQ ID NO: 432592 - RNA, 32 nt, Human
gcaccacugcaguccagccuaggcaacaguga

SEQ ID NO: 432593 - RNA, 32 nt, Human
gcaccacugcaguccagccugggcgacagagu

SEQ ID NO: 432594 - RNA, 32 nt, Human
gcaccacugcauuccagcauggccacaaagca

SEQ ID NO: 432595 - RNA, 32 nt, Human
gcaccacugcauuccagccuaagcaauagagc

SEQ ID NO: 432596 - RNA, 32 nt, Human
gcaccacugcauuccagccuggaugacagagc

SEQ ID NO: 432597 - RNA, 32 nt, Human
gcaccacugcauuccagccuggcgacagagug

SEQ ID NO: 432598 - RNA, 32 nt, Human
gcaccacugcauuccagccugggcaacagagc

SEQ ID NO: 432599 - RNA, 32 nt, Human
gcaccacugcauuccagccugggugacagagc

SEQ ID NO: 432600 - RNA, 32 nt, Human
gcaccacugcccuccagccuaggugacagaau

SEQ ID NO: 432601 - RNA, 32 nt, Human
gcaccacugcccuccagccuggaugacagagu

SEQ ID NO: 432602 - RNA, 32 nt, Human
gcaccacugcgcuccagccugggugaggagac

SEQ ID NO: 432603 - RNA, 32 nt, Human
gcaccacugcucuccagccuggcgacagaggg

SEQ ID NO: 432604 - RNA, 32 nt, Human
gcaccacugcucuccagccuggggaacagagc

SEQ ID NO: 432605 - RNA, 32 nt, Human
gcaccacuggacgccagccuaggcaacacuau

SEQ ID NO: 432606 - RNA, 32 nt, Human
gcaccacuggacuccagccugggcgacagagu

SEQ ID NO: 432607 - RNA, 32 nt, Human
gcaccacuguacgacagagcaagacuccgucu

SEQ ID NO: 432608 - RNA, 32 nt, Human
gcaccacuguacuccaaccuggaugacagagu

SEQ ID NO: 432609 - RNA, 32 nt, Human
gcaccacuguacuccagccugggcaacagaag

SEQ ID NO: 432610 - RNA, 32 nt, Human
gcaccacuguacuccagccugggcaacagagg

SEQ ID NO: 432611 - RNA, 32 nt, Human
gcaccacuguacuccagccugggcaacagagu

SEQ ID NO: 432612 - RNA, 32 nt, Human
gcaccacuguacuccagccugggcgacggagu

SEQ ID NO: 432613 - RNA, 32 nt, Human
gcaccacuguacuccagccugggcgauacaac

SEQ ID NO: 432614 - RNA, 32 nt, Human
gcaccacuguacuccagccugggugacaaagu

SEQ ID NO: 432615 - RNA, 32 nt, Human
gcaccacuguacuccagccugggugacagagc

SEQ ID NO: 432616 - RNA, 32 nt, Human
gcaccacuguacuccagccugggugacagggc

SEQ ID NO: 432617 - RNA, 32 nt, Human
gcaccacuguacuccagccugggugacugagc

SEQ ID NO: 432618 - RNA, 25 nt, Human
gcaccacuguagucccagcuacuca

SEQ ID NO: 432619 - RNA, 32 nt, Human
gcaccacuguagucccagcuacucaggcugag

SEQ ID NO: 432620 - RNA, 32 nt, Human
gcaccacuguauuccagccuggaugacaaagc

SEQ ID NO: 432621 - RNA, 32 nt, Human
gcaccacuguguauuuaacugccuuguguaca

SEQ ID NO: 432622 - RNA, 32 nt, Human
gcaccacuuacuccagccugggcaacagagca

SEQ ID NO: 432623 - RNA, 32 nt, Human
gcaccacuuauugcacuccagcccgggcgaca

SEQ ID NO: 432624 - RNA, 32 nt, Human
gcaccacuucacuccagccugggugacggagu

SEQ ID NO: 432625 - RNA, 19 nt, Human
gcaccacuucccgccucca

SEQ ID NO: 432626 - RNA, 19 nt, Human
gcaccacuuccugccccca

SEQ ID NO: 432627 - RNA, 32 nt, Human
gcaccacuugaaggagcucuaucaccagccug

SEQ ID NO: 432628 - RNA, 32 nt, Human
gcaccacuuguaacuccagccugggcaacaga

SEQ ID NO: 432629 - RNA, 32 nt, Human
gcaccacuuuacuuagccugggugacagagug

SEQ ID NO: 432630 - RNA, 22 nt, Human
gcaccacuuuuaccuucugcuc

SEQ ID NO: 432631 - RNA, 32 nt, Human
gcaccacuuuuacuguugccuacuucugacca

SEQ ID NO: 432632 - RNA, 32 nt, Human
gcaccagaaucccuguaaccauucauccaggu

SEQ ID NO: 432633 - RNA, 32 nt, Human
gcaccagaaucucuugaacccaggaggccgag

SEQ ID NO: 432634 - RNA, 32 nt, Human
gcaccagaauugcuugaacccaggagguggag

SEQ ID NO: 432635 - RNA, 32 nt, Human
gcaccagacaaacaccagacgucaaggucauu

SEQ ID NO: 432636 - RNA, 32 nt, Human
gcaccagacuaaaucuguauuaugugauauug

SEQ ID NO: 432637 - RNA, 25 nt, Human
gcaccagacucaccaggccgugcuc

SEQ ID NO: 432638 - RNA, 32 nt, Human
gcaccagagagggaggccacugcaacauuuua

SEQ ID NO: 432639 - RNA, 32 nt, Human
gcaccagagcaaaaccaacagagccacugggu

SEQ ID NO: 432640 - RNA, 32 nt, Human
gcaccagagcacccccuccacccccaccuugg

SEQ ID NO: 432641 - RNA, 32 nt, Human
gcaccagagccacugagcccagucccauaaac

SEQ ID NO: 432642 - RNA, 21 nt, Human
gcaccagaggcacucagggca

SEQ ID NO: 432643 - RNA, 32 nt, Human
gcaccagaggggcaagagaauguuccggaacu

SEQ ID NO: 432644 - RNA, 32 nt, Human
gcaccagaguccauuuucaaggcaccauucuc

SEQ ID NO: 432645 - RNA, 32 nt, Human
gcaccagcaaacucuggacugguggaagaauu

SEQ ID NO: 432646 - RNA, 32 nt, Human
gcaccagcaacuacacuccagacccgugcuga

SEQ ID NO: 432647 - RNA, 19 nt, Human
gcaccagcaacugcaguga

SEQ ID NO: 432648 - RNA, 20 nt, Human
gcaccagcaccuuccuacaa

SEQ ID NO: 432649 - RNA, 32 nt, Human
gcaccagcacuggcacuggcacuggcacacgc

SEQ ID NO: 432650 - RNA, 32 nt, Human
gcaccagcacuuccgguacggaaaacucgcug

SEQ ID NO: 432651 - RNA, 32 nt, Human
gcaccagcagccgccuccaugcccuagguugg

SEQ ID NO: 432652 - RNA, 21 nt, Human
gcaccagcagcuaccaaccac

SEQ ID NO: 432653 - RNA, 17 nt, Human
gcaccagcaucgcccca

SEQ ID NO: 432654 - RNA, 20 nt, Human
gcaccagccaggaggacccu

SEQ ID NO: 432655 - RNA, 32 nt, Human
gcaccagccccaggggucuaauuacuugagaa

SEQ ID NO: 432656 - RNA, 18 nt, Human
gcaccagcccugccccca

SEQ ID NO: 432657 - RNA, 18 nt, Human
gcaccagccgccauggcc

SEQ ID NO: 432658 - RNA, 32 nt, Human
gcaccagccuccacgaagucguggaaaaggag

SEQ ID NO: 432659 - RNA, 22 nt, Human
gcaccagccuggaccuaccacc

SEQ ID NO: 432660 - RNA, 22 nt, Human
gcaccagccugggcaacaagag

SEQ ID NO: 432661 - RNA, 23 nt, Human
gcaccagcgcgcaagggacccuu

SEQ ID NO: 432662 - RNA, 21 nt, Human
gcaccagcggcggcggacccu

SEQ ID NO: 432663 - RNA, 19 nt, Human
gcaccagcuaccacuacca

SEQ ID NO: 432664 - RNA, 32 nt, Human
gcaccagcucccugcaggaagaguggagaggu

SEQ ID NO: 432665 - RNA, 32 nt, Human
gcaccagcucccugccccacccuccagugccu

SEQ ID NO: 432666 - RNA, 32 nt, Human
gcaccagcugccucuuugcugcuuuguuuucc

SEQ ID NO: 432667 - RNA, 17 nt, Human
gcaccagcugcggcugc

SEQ ID NO: 432668 - RNA, 21 nt, Human
gcaccagcuggaaagacccuu

SEQ ID NO: 432669 - RNA, 18 nt, Human
gcaccagcuucccugacc

SEQ ID NO: 432670 - RNA, 22 nt, Human
gcaccagcuucuccaggcucuu

SEQ ID NO: 432671 - RNA, 32 nt, Human
gcaccagcuuuccagucccuuccaaguuucca

SEQ ID NO: 432672 - RNA, 32 nt, Human
gcaccagcuuuuccuuucaguauugguagagc

SEQ ID NO: 432673 - RNA, 32 nt, Human
gcaccaggaaaccaaaugaugucccugcccgc

SEQ ID NO: 432674 - RNA, 32 nt, Human
gcaccaggagaaaugaauaugcugggcugugc

SEQ ID NO: 432675 - RNA, 32 nt, Human
gcaccaggaggaggcuaacaaaagagggcagg

SEQ ID NO: 432676 - RNA, 32 nt, Human
gcaccaggaggcggcccccagcgcggccacaa

SEQ ID NO: 432677 - RNA, 18 nt, Human
gcaccaggcaaagaaaug

SEQ ID NO: 432678 - RNA, 20 nt, Human
gcaccaggcagaugaugcag

SEQ ID NO: 432679 - RNA, 32 nt, Human
gcaccaggccagagauagucuucuuuuugucc

SEQ ID NO: 432680 - RNA, 32 nt, Human
gcaccaggccagggguugauuugaaacgugaa

SEQ ID NO: 432681 - RNA, 32 nt, Human
gcaccaggcgcugagcugaacccuggaagcag

SEQ ID NO: 432682 - RNA, 32 nt, Human
gcaccaggcucugccuucacucccccaagucu

SEQ ID NO: 432683 - RNA, 19 nt, Human
gcaccagggacucggccca

SEQ ID NO: 432684 - RNA, 32 nt, Human
gcaccagggaggacagcugcuggcagggacua

SEQ ID NO: 432685 - RNA, 32 nt, Human
gcaccagggaggugggaagccagcauugagca

SEQ ID NO: 432686 - RNA, 18 nt, Human
gcaccagggcacagugga

SEQ ID NO: 432687 - RNA, 32 nt, Human
gcaccagggcagacacucgcccccaggggagg

SEQ ID NO: 432688 - RNA, 31 nt, Human
gcaccagggcauagucuacucacuuauaucu

SEQ ID NO: 432689 - RNA, 32 nt, Human
gcaccagggcucggugugugugguguuggagu

SEQ ID NO: 432690 - RNA, 32 nt, Human
gcaccaggggucuaaagugugagccacugaga

SEQ ID NO: 432691 - RNA, 32 nt, Human
gcaccagguguccucagguggccagccuggau

SEQ ID NO: 432692 - RNA, 32 nt, Human
gcaccagguugcucuggaagagcuugaggaug

SEQ ID NO: 432693 - RNA, 32 nt, Human
gcaccagugcacuccagccuuggugacaaugg

SEQ ID NO: 432694 - RNA, 32 nt, Human
gcaccagugcacuccagcugggcgacagagcg

SEQ ID NO: 432695 - RNA, 32 nt, Human
gcaccagugccacccagggcccugcacaaagg

SEQ ID NO: 432696 - RNA, 32 nt, Human
gcaccagugcccccuucucugccuucacuucu

SEQ ID NO: 432697 - RNA, 18 nt, Human
gcaccauaaccaagaaau

SEQ ID NO: 432698 - RNA, 32 nt, Human
gcaccauaccaaaguguugcagccuggaacuc

SEQ ID NO: 432699 - RNA, 17 nt, Human
gcaccauacuuaaaguc

SEQ ID NO: 432700 - RNA, 32 nt, Human
gcaccaucaacuggcagcaacagagcaggcgc

SEQ ID NO: 432701 - RNA, 17 nt, Human
gcaccaucaccaaggca

SEQ ID NO: 432702 - RNA, 18 nt, Human
gcaccaucaccaucacca

SEQ ID NO: 432703 - RNA, 21 nt, Human
gcaccaucaccccgcucacca

SEQ ID NO: 432704 - RNA, 32 nt, Human
gcaccaucagagccaggagagugacaacaggu

SEQ ID NO: 432705 - RNA, 32 nt, Human
gcaccaucaggcagcacccaugggcuccacca

SEQ ID NO: 432706 - RNA, 18 nt, Human
gcaccaucaucaccauca

SEQ ID NO: 432707 - RNA, 32 nt, Human
gcaccaucauucaucuuucucacugcagggcc

SEQ ID NO: 432708 - RNA, 21 nt, Human
gcaccauccccaccugccacc

SEQ ID NO: 432709 - RNA, 32 nt, Human
gcaccaucccgcaggcuucucccaccugaugg

SEQ ID NO: 432710 - RNA, 32 nt, Human
gcaccauccgcaucuggagcaccaaggacuuc

SEQ ID NO: 432711 - RNA, 32 nt, Human
gcaccauccuugguugcccuccuggagaaggc

SEQ ID NO: 432712 - RNA, 32 nt, Human
gcaccaucucagcucacugcaaccucugucuc

SEQ ID NO: 432713 - RNA, 18 nt, Human
gcaccaucugcaccccca

SEQ ID NO: 432714 - RNA, 32 nt, Human
gcaccaucuguccggucccagcaugccuucug

SEQ ID NO: 432715 - RNA, 32 nt, Human
gcaccaucuguucuccccagggaccugcugac

SEQ ID NO: 432716 - RNA, 30 nt, Human
gcaccaugaacccagagagcaguaucuuua

SEQ ID NO: 432717 - RNA, 32 nt, Human
gcaccaugccuggcuaauuuuguauuuguagu

SEQ ID NO: 432718 - RNA, 32 nt, Human
gcaccaugcucacuguugcugcgugggagagu

SEQ ID NO: 432719 - RNA, 30 nt, Human
gcaccauggacaaccccaccaccacccagu

SEQ ID NO: 432720 - RNA, 32 nt, Human
gcaccauggaggaaccagcagcccagaaacac

SEQ ID NO: 432721 - RNA, 32 nt, Human
gcaccauggccgcugggcucugccuuccacac

SEQ ID NO: 432722 - RNA, 32 nt, Human
gcaccaugggccacuccaggaugggacacggc

SEQ ID NO: 432723 - RNA, 32 nt, Human
gcaccaugucccaucacccagcggccagccau

SEQ ID NO: 432724 - RNA, 32 nt, Human
gcaccauguuagguauuggggaagagagacug

SEQ ID NO: 432725 - RNA, 32 nt, Human
gcaccauuaauuuagcaaaggccaucuacaag

SEQ ID NO: 432726 - RNA, 32 nt, Human
gcaccauuacacuccagccugggcaacagagc

SEQ ID NO: 432727 - RNA, 32 nt, Human
gcaccauuacacuccagccugggcaacaguga

SEQ ID NO: 432728 - RNA, 32 nt, Human
gcaccauucacucauuuauaccagcucccuuu

SEQ ID NO: 432729 - RNA, 19 nt, Human
gcaccauucauaauagcca

SEQ ID NO: 432730 - RNA, 32 nt, Human
gcaccauucggaguaaggaugacagcaggccc

SEQ ID NO: 432731 - RNA, 19 nt, Human
gcaccauucuugaugucca

SEQ ID NO: 432732 - RNA, 32 nt, Human
gcaccauugaacuccagccugggcaacaagag

SEQ ID NO: 432733 - RNA, 32 nt, Human
gcaccauugcacccgagccuaggcaacaagag

SEQ ID NO: 432734 - RNA, 32 nt, Human
gcaccauugcaccuccagccugggcaacagag

SEQ ID NO: 432735 - RNA, 32 nt, Human
gcaccauugcacuccacccugggcgacagagc

SEQ ID NO: 432736 - RNA, 32 nt, Human
gcaccauugcacuccagcccgggcaacaacag

SEQ ID NO: 432737 - RNA, 32 nt, Human
gcaccauugcacuccagccuaggcaaaaagag

SEQ ID NO: 432738 - RNA, 32 nt, Human
gcaccauugcacuccagccugagugacagagu

SEQ ID NO: 432739 - RNA, 32 nt, Human
gcaccauugcacuccagccugcgcaacaagag

SEQ ID NO: 432740 - RNA, 32 nt, Human
gcaccauugcacuccagccuggaugauagagu

SEQ ID NO: 432741 - RNA, 32 nt, Human
gcaccauugcacuccagccuggcgacagagca

SEQ ID NO: 432742 - RNA, 32 nt, Human
gcaccauugcacuccagccuggcgaccgagcg

SEQ ID NO: 432743 - RNA, 32 nt, Human
gcaccauugcacuccagccugggcaaaaagag

SEQ ID NO: 432744 - RNA, 32 nt, Human
gcaccauugcacuccagccugggcaacaagag

SEQ ID NO: 432745 - RNA, 32 nt, Human
gcaccauugcacuccagccugggcaacaagug

SEQ ID NO: 432746 - RNA, 32 nt, Human
gcaccauugcacuccagccugggcaacagagu

SEQ ID NO: 432747 - RNA, 32 nt, Human
gcaccauugcacuccagccugggcaacagcag

SEQ ID NO: 432748 - RNA, 32 nt, Human
gcaccauugcacuccagccugggcaacgagug

SEQ ID NO: 432749 - RNA, 32 nt, Human
gcaccauugcacuccagccugggcaauaagag

SEQ ID NO: 432750 - RNA, 32 nt, Human
gcaccauugcacuccagccugggcgacaagag

SEQ ID NO: 432751 - RNA, 32 nt, Human
gcaccauugcacuccagccugggcgacagagc

SEQ ID NO: 432752 - RNA, 32 nt, Human
gcaccauugcacuccagccugggcgacuccau

SEQ ID NO: 432753 - RNA, 32 nt, Human
gcaccauugcacuccagccugggugacaagag

SEQ ID NO: 432754 - RNA, 32 nt, Human
gcaccauugcacuccagccugggugacagagc

SEQ ID NO: 432755 - RNA, 32 nt, Human
gcaccauugcacuccagccugugcaacaagag

SEQ ID NO: 432756 - RNA, 32 nt, Human
gcaccauugcacuccagccugugcaacaagcg

SEQ ID NO: 432757 - RNA, 32 nt, Human
gcaccauugcacuccagccuugggcgacaaaa

SEQ ID NO: 432758 - RNA, 32 nt, Human
gcaccauugcacuccagcugggagacacagca

SEQ ID NO: 432759 - RNA, 32 nt, Human
gcaccauugcacuccagcuugggugacagagc

SEQ ID NO: 432760 - RNA, 32 nt, Human
gcaccauugcacuccugccugggcaacaagag

SEQ ID NO: 432761 - RNA, 32 nt, Human
gcaccauugcauuccagccugggcaacaagag

SEQ ID NO: 432762 - RNA, 32 nt, Human
gcaccauugcauuccagccugggugacagagc

SEQ ID NO: 432763 - RNA, 32 nt, Human
gcaccauugcccuccagccugagcaacagaac

SEQ ID NO: 432764 - RNA, 32 nt, Human
gcaccauugcccuccagccugggcaacaagag

SEQ ID NO: 432765 - RNA, 32 nt, Human
gcaccauuguacuccagccugggcaacaagag

SEQ ID NO: 432766 - RNA, 32 nt, Human
gcaccauuguacuccagccugggcaauaagag

SEQ ID NO: 432767 - RNA, 32 nt, Human
gcaccauuguacuccagccugugugacagagc

SEQ ID NO: 432768 - RNA, 32 nt, Human
gcaccauuucauuccagccugggcaacaugag

SEQ ID NO: 432769 - RNA, 21 nt, Human
gcaccauuuguugaaaaggcg

SEQ ID NO: 432770 - RNA, 18 nt, Human
gcaccauuuucuacacca

SEQ ID NO: 432771 - RNA, 16 nt, Human
gcaccauuuugaccca

SEQ ID NO: 432772 - RNA, 32 nt, Human
gcacccaaaccgcaggcccugcucuggcaggc

SEQ ID NO: 432773 - RNA, 32 nt, Human
gcacccaaaccucccuucccuuucgugucgaa

SEQ ID NO: 432774 - RNA, 32 nt, Human
gcacccaacacccucccucuuucugggguuug

SEQ ID NO: 432775 - RNA, 32 nt, Human
gcacccaacauacaugacucccgccauuagcu

SEQ ID NO: 432776 - RNA, 32 nt, Human
gcacccaagccucuucucaguuggagggaacu

SEQ ID NO: 432777 - RNA, 32 nt, Human
gcacccaagggcccugaacccauuuuccuccc

SEQ ID NO: 432778 - RNA, 32 nt, Human
gcacccaauguguuauuucuccaucaucggag

SEQ ID NO: 432779 - RNA, 32 nt, Human
gcacccaauuuccaaaagacauuucaugaaac

SEQ ID NO: 432780 - RNA, 32 nt, Human
gcacccacacaaaaugcacacucugcgauaug

SEQ ID NO: 432781 - RNA, 32 nt, Human
gcacccacagagagacacacacaggacacaaa

SEQ ID NO: 432782 - RNA, 32 nt, Human
gcacccacaggcaggucagaagagcacccggg

SEQ ID NO: 432783 - RNA, 32 nt, Human
gcacccacaucugaaaauggucagcaggcagg

SEQ ID NO: 432784 - RNA, 21 nt, Human
gcacccaccacagaauacagu

SEQ ID NO: 432785 - RNA, 32 nt, Human
gcacccaccagcugccaagagaaucccuggac

SEQ ID NO: 432786 - RNA, 32 nt, Human
gcacccacccacccccucacccccuucuuuuu

SEQ ID NO: 432787 - RNA, 32 nt, Human
gcacccaccccucccaucuccaccccacaugg

SEQ ID NO: 432788 - RNA, 32 nt, Human
gcacccaccuaucaccagggugaauggugaac

SEQ ID NO: 432789 - RNA, 32 nt, Human
gcacccacuaacucugugcucccuucccucuc

SEQ ID NO: 432790 - RNA, 32 nt, Human
gcacccacugacuccagccucauggaaccacc

SEQ ID NO: 432791 - RNA, 16 nt, Human
gcacccagaacuccuc

SEQ ID NO: 432792 - RNA, 32 nt, Human
gcacccagacauaagggucaacaggguuagcu

SEQ ID NO: 432793 - RNA, 23 nt, Human
gcacccagacccagccuaggggc

SEQ ID NO: 432794 - RNA, 32 nt, Human
gcacccagagagcucccuaaaggggcucugag

SEQ ID NO: 432795 - RNA, 32 nt, Human
gcacccagaggagcuccuuuccccagcaggcc

SEQ ID NO: 432796 - RNA, 32 nt, Human
gcacccagagggccagccuccagccugacccc

SEQ ID NO: 432797 - RNA, 32 nt, Human
gcacccagagugagcuggaguggguccccaug

SEQ ID NO: 432798 - RNA, 32 nt, Human
gcacccagaucuuccagccauauguggagucg

SEQ ID NO: 432799 - RNA, 21 nt, Human
gcacccagcagcaggcugcgg

SEQ ID NO: 432800 - RNA, 32 nt, Human
gcacccagcaugcuccgacacagcagggaagc

SEQ ID NO: 432801 - RNA, 20 nt, Human
gcacccagcccaccugccac

SEQ ID NO: 432802 - RNA, 20 nt, Human
gcacccagcccgccucggcc

SEQ ID NO: 432803 - RNA, 32 nt, Human
gcacccagcccucaacaccacccucacacacu

SEQ ID NO: 432804 - RNA, 32 nt, Human
gcacccagcccuguccccuugcugccucuacc

SEQ ID NO: 432805 - RNA, 32 nt, Human
gcacccagccucccuucuccuuccacucccuu

SEQ ID NO: 432806 - RNA, 32 nt, Human
gcacccagcuacuggggacgggggcucuccca

SEQ ID NO: 432807 - RNA, 32 nt, Human
gcacccaggagguggagguugcagugagccga

SEQ ID NO: 432808 - RNA, 32 nt, Human
gcacccaggcagcagcaccaggcacugcugac

SEQ ID NO: 432809 - RNA, 32 nt, Human
gcacccaggccugucuuuggcucggaaacggu

SEQ ID NO: 432810 - RNA, 32 nt, Human
gcacccaggcuuuagagaaguauagggggcuu

SEQ ID NO: 432811 - RNA, 32 nt, Human
gcacccagggcccugcaugccaggucguugga

SEQ ID NO: 432812 - RNA, 23 nt, Human
gcacccagggugcugggcugagg

SEQ ID NO: 432813 - RNA, 32 nt, Human
gcacccagguauagaccuuccacgugcagcac

SEQ ID NO: 432814 - RNA, 32 nt, Human
gcacccaggucgggcggugggggcgagcggag

SEQ ID NO: 432815 - RNA, 19 nt, Human
gcacccaggugggccccuc

SEQ ID NO: 432816 - RNA, 32 nt, Human
gcacccaguccccagagugaagcuguugccaa

SEQ ID NO: 432817 - RNA, 32 nt, Human
gcacccaguggauuuguggcagaugaggaaac

SEQ ID NO: 432818 - RNA, 20 nt, Human
gcacccagugggacucacuc

SEQ ID NO: 432819 - RNA, 18 nt, Human
gcacccaucagcacucug

SEQ ID NO: 432820 - RNA, 21 nt, Human
gcacccaucaugcguggacug

SEQ ID NO: 432821 - RNA, 32 nt, Human
gcacccaucuguacuccagcaaagucauagcu

SEQ ID NO: 432822 - RNA, 22 nt, Human
gcacccaucuugggcaacagaa

SEQ ID NO: 432823 - RNA, 18 nt, Human
gcacccaugccugcgcag

SEQ ID NO: 432824 - RNA, 32 nt, Human
gcaccccaaauacgcacuuuuccuggaaggga

SEQ ID NO: 432825 - RNA, 32 nt, Human
gcaccccaacuugggauucuccagagcuagca

SEQ ID NO: 432826 - RNA, 32 nt, Human
gcaccccaccacuguacucugaaauuggcgag

SEQ ID NO: 432827 - RNA, 32 nt, Human
gcaccccacccaggccaggucagagcagccca

SEQ ID NO: 432828 - RNA, 17 nt, Human
gcaccccacccccagcg

SEQ ID NO: 432829 - RNA, 26 nt, Human
gcaccccacggggaaauguucuggca

SEQ ID NO: 432830 - RNA, 32 nt, Human
gcaccccacugcaauccugucuuucugagcac

SEQ ID NO: 432831 - RNA, 32 nt, Human
gcaccccacuggcugcagcuagcccaccauag

SEQ ID NO: 432832 - RNA, 32 nt, Human
gcaccccagccacuccagaaacccaaugggag

SEQ ID NO: 432833 - RNA, 23 nt, Human
gcaccccagcccgggugacagag

SEQ ID NO: 432834 - RNA, 32 nt, Human
gcaccccagccuagcgacagagcaagacucca

SEQ ID NO: 432835 - RNA, 24 nt, Human
gcaccccagccugagcaacaagag

SEQ ID NO: 432836 - RNA, 24 nt, Human
gcaccccagccugggcaacaagag

SEQ ID NO: 432837 - RNA, 23 nt, Human
gcaccccagccugggcaacagag

SEQ ID NO: 432838 - RNA, 22 nt, Human
gcaccccagccugggcaaugag

SEQ ID NO: 432839 - RNA, 23 nt, Human
gcaccccagccugggcgacagag

SEQ ID NO: 432840 - RNA, 23 nt, Human
gcaccccagccugggugacagag

SEQ ID NO: 432841 - RNA, 32 nt, Human
gcaccccaggguggggcagcaagcaggcagga

SEQ ID NO: 432842 - RNA, 32 nt, Human
gcacccccaaagcaaccaacaaauccaaguaa

SEQ ID NO: 432843 - RNA, 32 nt, Human
gcacccccaccacucgcugccucccaggucag

SEQ ID NO: 432844 - RNA, 32 nt, Human
gcacccccacugcaggcuguggcuccaggggc

SEQ ID NO: 432845 - RNA, 32 nt, Human
gcacccccagaggcgcagagguggccgcugug

SEQ ID NO: 432846 - RNA, 23 nt, Human
gcacccccauggugcuguuggag

SEQ ID NO: 432847 - RNA, 21 nt, Human
gcacccccggcaaccaggagu

SEQ ID NO: 432848 - RNA, 32 nt, Human
gcacccccuaccucuguucugccuguccucgc

SEQ ID NO: 432849 - RNA, 32 nt, Human
gcacccccucauuccccucgugugacucucuu

SEQ ID NO: 432850 - RNA, 32 nt, Human
gcacccccuccccaaagaccgggcaguuccug

SEQ ID NO: 432851 - RNA, 32 nt, Human
gcacccccuccccauggguucucuccuuccuc

SEQ ID NO: 432852 - RNA, 32 nt, Human
gcacccccuucacagacacugaccucagaggc

SEQ ID NO: 432853 - RNA, 32 nt, Human
gcaccccggcaggauggacgugguguaccccc

SEQ ID NO: 432854 - RNA, 32 nt, Human
gcaccccuaaaaucccagcuacuugagagacu

SEQ ID NO: 432855 - RNA, 32 nt, Human
gcaccccuagcaccugccguccucacuguaaa

SEQ ID NO: 432856 - RNA, 31 nt, Human
gcaccccuccaccacauuugcuugcaauauc

SEQ ID NO: 432857 - RNA, 32 nt, Human
gcaccccuccacccccacccugcccacgugac

SEQ ID NO: 432858 - RNA, 21 nt, Human
gcaccccucccuuccuggagg

SEQ ID NO: 432859 - RNA, 32 nt, Human
gcaccccucugccuccucucgaugccuuacag

SEQ ID NO: 432860 - RNA, 32 nt, Human
gcaccccucuggcugcucaguccugccucagu

SEQ ID NO: 432861 - RNA, 32 nt, Human
gcaccccugaaaucaauccauaucauguuuga

SEQ ID NO: 432862 - RNA, 18 nt, Human
gcaccccugaccuacggg

SEQ ID NO: 432863 - RNA, 32 nt, Human
gcaccccugcacuccagccugggcaacagagc

SEQ ID NO: 432864 - RNA, 32 nt, Human
gcaccccugcacuccagccugggugacagagu

SEQ ID NO: 432865 - RNA, 32 nt, Human
gcaccccugcacuccaggcugggcaacaguac

SEQ ID NO: 432866 - RNA, 32 nt, Human
gcaccccugcccccugguucaccagagggagc

SEQ ID NO: 432867 - RNA, 17 nt, Human
gcaccccuggcccggca

SEQ ID NO: 432868 - RNA, 18 nt, Human
gcaccccuggcuggagug

SEQ ID NO: 432869 - RNA, 32 nt, Human
gcaccccugggcagagccccuuaaagcugcug

SEQ ID NO: 432870 - RNA, 32 nt, Human
gcaccccugggcucuccaugcccaccgcccug

SEQ ID NO: 432871 - RNA, 32 nt, Human
gcaccccuggggagcacagggaggcagaggcu

SEQ ID NO: 432872 - RNA, 25 nt, Human
gcaccccuguaaucccagcuacuca

SEQ ID NO: 432873 - RNA, 32 nt, Human
gcaccccuguaaucccagcuacucaggaggcu

SEQ ID NO: 432874 - RNA, 32 nt, Human
gcaccccuuagagugaaaguuuggucagucuc

SEQ ID NO: 432875 - RNA, 32 nt, Human
gcaccccuuccaggaacaaggcggcugcuccu

SEQ ID NO: 432876 - RNA, 32 nt, Human
gcaccccuucugucuguccccuuucauggcug

SEQ ID NO: 432877 - RNA, 22 nt, Human
gcaccccuugggcccugcccag

SEQ ID NO: 432878 - RNA, 24 nt, Human
gcacccgagccuaggcaacaagag

SEQ ID NO: 432879 - RNA, 26 nt, Human
gcacccgccuguaaucccagcuacuc

SEQ ID NO: 432880 - RNA, 32 nt, Human
gcacccgccuguaaucccagcuacucgggagg

SEQ ID NO: 432881 - RNA, 32 nt, Human
gcacccgcuaugccugcacugcagcccagccc

SEQ ID NO: 432882 - RNA, 32 nt, Human
gcacccgcugaacaucagccugggagacgcgg

SEQ ID NO: 432883 - RNA, 32 nt, Human
gcacccgcuggccaacagaccccacauccacc

SEQ ID NO: 432884 - RNA, 32 nt, Human
gcacccggaccacuuuguacacauuaacacua

SEQ ID NO: 432885 - RNA, 23 nt, Human
gcacccggagccacagcuggcgg

SEQ ID NO: 432886 - RNA, 22 nt, Human
gcacccggccgggccggcgcgg

SEQ ID NO: 432887 - RNA, 32 nt, Human
gcacccggcugugggcagaggcugcggggccu

SEQ ID NO: 432888 - RNA, 30 nt, Human
gcacccggcuugcaauuuagaaagggcacu

SEQ ID NO: 432889 - RNA, 32 nt, Human
gcacccgggcaggggugccagauacaguauug

SEQ ID NO: 432890 - RNA, 32 nt, Human
gcacccgguuuacagggaggugauugaggacg

SEQ ID NO: 432891 - RNA, 23 nt, Human
gcacccguaaucccagcuacuca

SEQ ID NO: 432892 - RNA, 23 nt, Human
gcacccguauucccagcuacuca

SEQ ID NO: 432893 - RNA, 32 nt, Human
gcacccgugaagccccacgggucaaggcuggu

SEQ ID NO: 432894 - RNA, 32 nt, Human
gcacccguuccagggcuaacagaugaagcaug

SEQ ID NO: 432895 - RNA, 32 nt, Human
gcacccguuucuguccccuccuuuccugcucc

SEQ ID NO: 432896 - RNA, 32 nt, Human
gcacccuaagucuuguuagccuccuuuuuaaa

SEQ ID NO: 432897 - RNA, 32 nt, Human
gcacccuauaugcugcugccucaggcagagcc

SEQ ID NO: 432898 - RNA, 17 nt, Human
gcacccucaccccacca

SEQ ID NO: 432899 - RNA, 32 nt, Human
gcacccucauuccccucucccacccaccccac

SEQ ID NO: 432900 - RNA, 32 nt, Human
gcacccuccacuucucuccuaggcaaugagac

SEQ ID NO: 432901 - RNA, 32 nt, Human
gcacccuccccagggauuggaaacggaugacg

SEQ ID NO: 432902 - RNA, 32 nt, Human
gcacccuccuccaccuccaccucucuucccag

SEQ ID NO: 432903 - RNA, 32 nt, Human
gcacccucgcccagggcuggggcgcagugcgc

SEQ ID NO: 432904 - RNA, 21 nt, Human
gcacccucuccaggugcacuc

SEQ ID NO: 432905 - RNA, 32 nt, Human
gcacccucucugagaggcaacagaagcagcaa

SEQ ID NO: 432906 - RNA, 32 nt, Human
gcacccucucuuccucugcucuuccacccuuu

SEQ ID NO: 432907 - RNA, 32 nt, Human
gcacccucugaccucagcagagcuccugggcc

SEQ ID NO: 432908 - RNA, 32 nt, Human
gcacccucugcagccccacuccugggccuucu

SEQ ID NO: 432909 - RNA, 32 nt, Human
gcacccucugcagccuuggugccuguagcucu

SEQ ID NO: 432910 - RNA, 18 nt, Human
gcacccucuuguacuuca

SEQ ID NO: 432911 - RNA, 32 nt, Human
gcacccugaaauggacuaaggccagcuuucau

SEQ ID NO: 432912 - RNA, 32 nt, Human
gcacccugagccuguaccuuggguggcacuug

SEQ ID NO: 432913 - RNA, 32 nt, Human
gcacccugcaagccagccuggccagcugcuca

SEQ ID NO: 432914 - RNA, 32 nt, Human
gcacccugcacucccucccuugccuguagaug

SEQ ID NO: 432915 - RNA, 32 nt, Human
gcacccugcacucuagccugggcaacaagagc

SEQ ID NO: 432916 - RNA, 21 nt, Human
gcacccugccaggccccuggg

SEQ ID NO: 432917 - RNA, 32 nt, Human
gcacccugcccagaaugcccagaagagaacca

SEQ ID NO: 432918 - RNA, 32 nt, Human
gcacccugccccacccccgccaugucccacua

SEQ ID NO: 432919 - RNA, 32 nt, Human
gcacccuggagaccacauccuguccaucgaug

SEQ ID NO: 432920 - RNA, 32 nt, Human
gcacccuggccuggccccugguccuucacugg

SEQ ID NO: 432921 - RNA, 32 nt, Human
gcacccugggaggccagcuggucagucccuug

SEQ ID NO: 432922 - RNA, 32 nt, Human
gcacccugggauggcgaggagggaacuuggcg

SEQ ID NO: 432923 - RNA, 32 nt, Human
gcacccuggggagauugauuguccuuaaaccu

SEQ ID NO: 432924 - RNA, 32 nt, Human
gcacccuggggaggggacccagugcagugaug

SEQ ID NO: 432925 - RNA, 32 nt, Human
gcacccugggggcacagcuggaagagaggccu

SEQ ID NO: 432926 - RNA, 32 nt, Human
gcacccuggggucuacacggguuaaaaacgcg

SEQ ID NO: 432927 - RNA, 31 nt, Human
gcacccugguuggaaagaggggugaggauuc

SEQ ID NO: 432928 - RNA, 32 nt, Human
gcacccuguagcuccugcucccugugacccca

SEQ ID NO: 432929 - RNA, 32 nt, Human
gcacccuguagucccagcuacucaggaggcug

SEQ ID NO: 432930 - RNA, 32 nt, Human
gcacccugugcacuuuaaucuccugucgguac

SEQ ID NO: 432931 - RNA, 32 nt, Human
gcacccuguucugagacuucugaggcugcccc

SEQ ID NO: 432932 - RNA, 32 nt, Human
gcacccuucuuuccucuuccccuugcccuugc

SEQ ID NO: 432933 - RNA, 32 nt, Human
gcacccuugaagcaugucauugucagugauac

SEQ ID NO: 432934 - RNA, 32 nt, Human
gcacccuugaugagcugagauaaggccaacau

SEQ ID NO: 432935 - RNA, 32 nt, Human
gcacccuuguacagugucugugccauggauuu

SEQ ID NO: 432936 - RNA, 32 nt, Human
gcacccuuucugggucccuccugguucccugu

SEQ ID NO: 432937 - RNA, 20 nt, Human
gcaccgaagggacccugggc

SEQ ID NO: 432938 - RNA, 32 nt, Human
gcaccgacaaaucugauuugccauaaagcauu

SEQ ID NO: 432939 - RNA, 32 nt, Human
gcaccgacaccccgacagagacagagacacag

SEQ ID NO: 432940 - RNA, 17 nt, Human
gcaccgaccccaccacc

SEQ ID NO: 432941 - RNA, 32 nt, Human
gcaccgagaacaagagccauacucugaugaaa

SEQ ID NO: 432942 - RNA, 32 nt, Human
gcaccgagagggcuggagugcaguggcgugau

SEQ ID NO: 432943 - RNA, 32 nt, Human
gcaccgagagugagcagcaggaguuccuggaa

SEQ ID NO: 432944 - RNA, 32 nt, Human
gcaccgagagugagcgagggcugugaggacug

SEQ ID NO: 432945 - RNA, 32 nt, Human
gcaccgaggcaggggugggggaauguguacug

SEQ ID NO: 432946 - RNA, 32 nt, Human
gcaccgaggcggggcuccccaggaucccacgg

SEQ ID NO: 432947 - RNA, 32 nt, Human
gcaccgaggucuucaccugcaagugggccagg

SEQ ID NO: 432948 - RNA, 32 nt, Human
gcaccgauccacucagcggagccccaggcccc

SEQ ID NO: 432949 - RNA, 32 nt, Human
gcaccgauccuuaccagagaacucucuggaac

SEQ ID NO: 432950 - RNA, 32 nt, Human
gcaccgauugagcccucagagccugacacgua

SEQ ID NO: 432951 - RNA, 32 nt, Human
gcaccgauuggcuucucuagaaacccgacacc

SEQ ID NO: 432952 - RNA, 32 nt, Human
gcaccgcacacauauccaugcacacaaacaca

SEQ ID NO: 432953 - RNA, 32 nt, Human
gcaccgcagccugucagccaacauugccuugc

SEQ ID NO: 432954 - RNA, 32 nt, Human
gcaccgccagccgccucuuccccacgcacagg

SEQ ID NO: 432955 - RNA, 32 nt, Human
gcaccgccaggcgcggagcccagaucgccccc

SEQ ID NO: 432956 - RNA, 32 nt, Human
gcaccgcccccacuccuggaguccagcccggc

SEQ ID NO: 432957 - RNA, 19 nt, Human
gcaccgcccgcccugccag

SEQ ID NO: 432958 - RNA, 32 nt, Human
gcaccgcccuccugcugccagagacgaggcag

SEQ ID NO: 432959 - RNA, 32 nt, Human
gcaccgccgaguuaaagaggagaaggaaaaca

SEQ ID NO: 432960 - RNA, 32 nt, Human
gcaccgccgcagaagcagccccucgaggccua

SEQ ID NO: 432961 - RNA, 32 nt, Human
gcaccgccuauccugagaacacagucagugag

SEQ ID NO: 432962 - RNA, 32 nt, Human
gcaccgccuccccaccuccaggcuuucccacu

SEQ ID NO: 432963 - RNA, 19 nt, Human
gcaccgcgauaaaaggggc

SEQ ID NO: 432964 - RNA, 18 nt, Human
gcaccgcgcaccugccac

SEQ ID NO: 432965 - RNA, 32 nt, Human
gcaccgcgcccggccccuccucccuuucaauc

SEQ ID NO: 432966 - RNA, 32 nt, Human
gcaccgcgcccggccucguccucugccccagg

SEQ ID NO: 432967 - RNA, 32 nt, Human
gcaccgcgcguccugcacucaaccccgccugg

SEQ ID NO: 432968 - RNA, 32 nt, Human
gcaccgcggaggcuggagccgcaauggugcug

SEQ ID NO: 432969 - RNA, 32 nt, Human
gcaccgcggcccgggacgacagccugggcuca

SEQ ID NO: 432970 - RNA, 32 nt, Human
gcaccgcuacacuccagccugggugacagagu

SEQ ID NO: 432971 - RNA, 32 nt, Human
gcaccgcuauacucccagcuguuggggaggcu

SEQ ID NO: 432972 - RNA, 32 nt, Human
gcaccgcucaccgacaccgaggcggacuggca

SEQ ID NO: 432973 - RNA, 18 nt, Human
gcaccgcuccccacccca

SEQ ID NO: 432974 - RNA, 19 nt, Human
gcaccgcuccugcgugcgc

SEQ ID NO: 432975 - RNA, 32 nt, Human
gcaccgcucguuuguagcgucaccucaggucu

SEQ ID NO: 432976 - RNA, 20 nt, Human
gcaccgcucugcagcgcggc

SEQ ID NO: 432977 - RNA, 32 nt, Human
gcaccgcugcacuccaaccugggcaacagagu

SEQ ID NO: 432978 - RNA, 32 nt, Human
gcaccgcugcacuccagccuggcaacagagca

SEQ ID NO: 432979 - RNA, 32 nt, Human
gcaccgcugcacuccagccuggcgacagagcg

SEQ ID NO: 432980 - RNA, 32 nt, Human
gcaccgcugcacuccagccugggcaacagagu

SEQ ID NO: 432981 - RNA, 32 nt, Human
gcaccgcugcacuccagccugggcaagagaau

SEQ ID NO: 432982 - RNA, 32 nt, Human
gcaccgcugcacuccagccugggugacagaau

SEQ ID NO: 432983 - RNA, 32 nt, Human
gcaccgcugcacuccagccugggugacagagc

SEQ ID NO: 432984 - RNA, 32 nt, Human
gcaccgcugcacucgcggccggcgaugcggga

SEQ ID NO: 432985 - RNA, 32 nt, Human
gcaccgcugcagcugccgauguagccucggua

SEQ ID NO: 432986 - RNA, 32 nt, Human
gcaccgcugcccuccagccugggcaacaagag

SEQ ID NO: 432987 - RNA, 19 nt, Human
gcaccgcugcuacggcggc

SEQ ID NO: 432988 - RNA, 32 nt, Human
gcaccgcuggccacagaugaacagccuccuca

SEQ ID NO: 432989 - RNA, 32 nt, Human
gcaccgcuggguucugacucuggaccaugcug

SEQ ID NO: 432990 - RNA, 32 nt, Human
gcaccgcuguacuccagccugggcaacagagg

SEQ ID NO: 432991 - RNA, 32 nt, Human
gcaccgcuucagggacggagacaggaccggcg

SEQ ID NO: 432992 - RNA, 22 nt, Human
gcaccgcuucuguugaagcagg

SEQ ID NO: 432993 - RNA, 32 nt, Human
gcaccgcuuguccuagggaaguccugcgugga

SEQ ID NO: 432994 - RNA, 32 nt, Human
gcaccggaccauugagacauuugccaaggagg

SEQ ID NO: 432995 - RNA, 20 nt, Human
gcaccggagccuugccacca

SEQ ID NO: 432996 - RNA, 19 nt, Human
gcaccggcagaggcugcgg

SEQ ID NO: 432997 - RNA, 32 nt, Human
gcaccggcagcucuuggcaagguguuuaauaa

SEQ ID NO: 432998 - RNA, 32 nt, Human
gcaccggccagcugcgagacgugacuugggga

SEQ ID NO: 432999 - RNA, 32 nt, Human
gcaccggcgaaccugccugggcaggcagcucg

SEQ ID NO: 433000 - RNA, 32 nt, Human
gcaccggcggagaugccugggaagaaggcgcg

SEQ ID NO: 433001 - RNA, 21 nt, Human
gcaccggcggcggcagggcga

SEQ ID NO: 433002 - RNA, 22 nt, Human
gcaccggcucccaccuggcugg

SEQ ID NO: 433003 - RNA, 32 nt, Human
gcaccggcucccaccuggcugggaacauggga

SEQ ID NO: 433004 - RNA, 32 nt, Human
gcaccgggaccugcugaugguggagaaugagc

SEQ ID NO: 433005 - RNA, 32 nt, Human
gcaccgggaggcgggcccugcguggggccgcg

SEQ ID NO: 433006 - RNA, 32 nt, Human
gcaccgggcauggugcaugccuguaaucccag

SEQ ID NO: 433007 - RNA, 32 nt, Human
gcaccgguccaaccccuucauccccagcugcu

SEQ ID NO: 433008 - RNA, 32 nt, Human
gcaccgguuccaguggaucagaaaccugguuc

SEQ ID NO: 433009 - RNA, 32 nt, Human
gcaccguaaccagcgccgcggacaccggcacc

SEQ ID NO: 433010 - RNA, 31 nt, Human
gcaccguagugccuugggccuguguguuaaa

SEQ ID NO: 433011 - RNA, 32 nt, Human
gcaccgucccaccucugccacccuccgauggg

SEQ ID NO: 433012 - RNA, 24 nt, Human
gcaccguccucagcaguccacaaa

SEQ ID NO: 433013 - RNA, 32 nt, Human
gcaccgugacacuccagccugggcaacagaag

SEQ ID NO: 433014 - RNA, 32 nt, Human
gcaccgugagcguccuuccuccuuccucuccg

SEQ ID NO: 433015 - RNA, 32 nt, Human
gcaccgugauggagaggacagagcaggggcuc

SEQ ID NO: 433016 - RNA, 32 nt, Human
gcaccgugccaaccccacccagcuccaggccc

SEQ ID NO: 433017 - RNA, 32 nt, Human
gcaccgugccaucccugcucccagcugaggcu

SEQ ID NO: 433018 - RNA, 17 nt, Human
gcaccgugccuaccacc

SEQ ID NO: 433019 - RNA, 32 nt, Human
gcaccgugcuagaggaacuguaaugcuucaga

SEQ ID NO: 433020 - RNA, 24 nt, Human
gcaccguggcucacgccuguaauc

SEQ ID NO: 433021 - RNA, 24 nt, Human
gcaccguggcucacgucuguaauc

SEQ ID NO: 433022 - RNA, 29 nt, Human
gcaccguggcugcuauuaucugcucuccg

SEQ ID NO: 433023 - RNA, 32 nt, Human
gcaccguggcugcuauuaucugcucuccgcgc

SEQ ID NO: 433024 - RNA, 32 nt, Human
gcaccguguaccuggaaaaguugcagucacuc

SEQ ID NO: 433025 - RNA, 32 nt, Human
gcaccguguggcuccgccuccuggcccccagc

SEQ ID NO: 433026 - RNA, 32 nt, Human
gcaccguucugugcacaaaacccagaccuguu

SEQ ID NO: 433027 - RNA, 32 nt, Human
gcaccguuguacuccagccuggugauagaacg

SEQ ID NO: 433028 - RNA, 32 nt, Human
gcaccuaagccugucucugccucccugucuac

SEQ ID NO: 433029 - RNA, 32 nt, Human
gcaccuaaggaaccucugcugccagcccuucc

SEQ ID NO: 433030 - RNA, 32 nt, Human
gcaccuaaggguucugaggaaauaaauguaua

SEQ ID NO: 433031 - RNA, 32 nt, Human
gcaccuacgugcuugauucucuuaauucugug

SEQ ID NO: 433032 - RNA, 32 nt, Human
gcaccuacguuuccaccuccucccccuccuuc

SEQ ID NO: 433033 - RNA, 19 nt, Human
gcaccuacucaccauggca

SEQ ID NO: 433034 - RNA, 32 nt, Human
gcaccuacugaggaugucggcggucggggacu

SEQ ID NO: 433035 - RNA, 32 nt, Human
gcaccuagagcccuccucccagccucccguca

SEQ ID NO: 433036 - RNA, 32 nt, Human
gcaccuagccuugagcaccuuccacauagcaa

SEQ ID NO: 433037 - RNA, 32 nt, Human
gcaccuagcucaggaagccuuccuuucuaguc

SEQ ID NO: 433038 - RNA, 32 nt, Human
gcaccuaggacagugcccagcacacagugggc

SEQ ID NO: 433039 - RNA, 32 nt, Human
gcaccuagggcgcaauggaauauuccauugcc

SEQ ID NO: 433040 - RNA, 23 nt, Human
gcaccuauaauuccagcuacuca

SEQ ID NO: 433041 - RNA, 23 nt, Human
gcaccuauagucccagcuacuca

SEQ ID NO: 433042 - RNA, 32 nt, Human
gcaccuaucacccaggcuggaguggaguggca

SEQ ID NO: 433043 - RNA, 23 nt, Human
gcaccuaugguuccagcuacuca

SEQ ID NO: 433044 - RNA, 22 nt, Human
gcaccuauuaucccagcuacuc

SEQ ID NO: 433045 - RNA, 32 nt, Human
gcaccuauuugggaucauuugaggucaagaau

SEQ ID NO: 433046 - RNA, 32 nt, Human
gcaccucacagaacaaauuagcccauaaauuc

SEQ ID NO: 433047 - RNA, 32 nt, Human
gcaccucagccccuucacacauuuacacauac

SEQ ID NO: 433048 - RNA, 22 nt, Human
gcaccucagccuuuagggcuua

SEQ ID NO: 433049 - RNA, 32 nt, Human
gcaccucagcucccagcaucugggccuccucc

SEQ ID NO: 433050 - RNA, 17 nt, Human
gcaccucagcuccugcc

SEQ ID NO: 433051 - RNA, 32 nt, Human
gcaccucaugaagcuuuccuggagcacugucu

SEQ ID NO: 433052 - RNA, 32 nt, Human
gcaccucauggacucaggauccuccuggagca

SEQ ID NO: 433053 - RNA, 32 nt, Human
gcaccuccacacucccaaccacugacccuucc

SEQ ID NO: 433054 - RNA, 18 nt, Human
gcaccuccaccugcccca

SEQ ID NO: 433055 - RNA, 32 nt, Human
gcaccuccagccugggcaacagagugagacuc

SEQ ID NO: 433056 - RNA, 32 nt, Human
gcaccucccacacuccuauggucacagacuuc

SEQ ID NO: 433057 - RNA, 20 nt, Human
gcaccucccagcccucggcc

SEQ ID NO: 433058 - RNA, 32 nt, Human
gcaccucccgacaauggcgccucccagugaug

SEQ ID NO: 433059 - RNA, 32 nt, Human
gcaccucccugcagucaucucuuugcacuuug

SEQ ID NO: 433060 - RNA, 25 nt, Human
gcaccucccugccuguccuugggga

SEQ ID NO: 433061 - RNA, 32 nt, Human
gcaccucccuguggcccaaggcucucuucaca

SEQ ID NO: 433062 - RNA, 32 nt, Human
gcaccuccggaugcaguuuugauguccaucuu

SEQ ID NO: 433063 - RNA, 32 nt, Human
gcaccuccuccuggccccgcccugcccagccc

SEQ ID NO: 433064 - RNA, 32 nt, Human
gcaccuccucuccuccccagcccuguaggccu

SEQ ID NO: 433065 - RNA, 32 nt, Human
gcaccuccucucuucuccuuuugcccaaacuc

SEQ ID NO: 433066 - RNA, 19 nt, Human
gcaccuccugaaagcccca

SEQ ID NO: 433067 - RNA, 32 nt, Human
gcaccuccuucucaccugcuccucuaccugcu

SEQ ID NO: 433068 - RNA, 32 nt, Human
gcaccucgcccugccacugccucccaggaccu

SEQ ID NO: 433069 - RNA, 32 nt, Human
gcaccucggcuucggagcacccugccaggccc

SEQ ID NO: 433070 - RNA, 20 nt, Human
gcaccucguggagcggcugc

SEQ ID NO: 433071 - RNA, 20 nt, Human
gcaccucuagcagccuggac

SEQ ID NO: 433072 - RNA, 32 nt, Human
gcaccucuagggccucuccagacugugcccug

SEQ ID NO: 433073 - RNA, 32 nt, Human
gcaccucucaucacagucuaguuccaaggaaa

SEQ ID NO: 433074 - RNA, 32 nt, Human
gcaccucucccaggaagugguggggcaccggu

SEQ ID NO: 433075 - RNA, 32 nt, Human
gcaccucuccuccccucagccaccuuuuaggg

SEQ ID NO: 433076 - RNA, 32 nt, Human
gcaccucuccuccccucuuacaccuacucaga

SEQ ID NO: 433077 - RNA, 19 nt, Human
gcaccucuccuuugcccuu

SEQ ID NO: 433078 - RNA, 32 nt, Human
gcaccucucuccccaugguguuuuccacauuu

SEQ ID NO: 433079 - RNA, 32 nt, Human
gcaccucugcucccuucuccucacuacccacc

SEQ ID NO: 433080 - RNA, 23 nt, Human
gcaccucugucccaaaaccucau

SEQ ID NO: 433081 - RNA, 21 nt, Human
gcaccugaacgccaccuggcc

SEQ ID NO: 433082 - RNA, 21 nt, Human
gcaccugaagggguccacagc

SEQ ID NO: 433083 - RNA, 19 nt, Human
gcaccugacacugccauca

SEQ ID NO: 433084 - RNA, 20 nt, Human
gcaccugaccaaaggcuuca

SEQ ID NO: 433085 - RNA, 24 nt, Human
gcaccugagaaucccagcuacuca

SEQ ID NO: 433086 - RNA, 19 nt, Human
gcaccugagaccaccagcc

SEQ ID NO: 433087 - RNA, 32 nt, Human
gcaccugagcacggccccugcccgagccuggc

SEQ ID NO: 433088 - RNA, 32 nt, Human
gcaccugagguaggaggcaugggagagagugg

SEQ ID NO: 433089 - RNA, 19 nt, Human
gcaccugagguggcugagg

SEQ ID NO: 433090 - RNA, 22 nt, Human
gcaccugcaaucccagcuacuc

SEQ ID NO: 433091 - RNA, 32 nt, Human
gcaccugcaauggcuugugcuccugcuccugu

SEQ ID NO: 433092 - RNA, 32 nt, Human
gcaccugcacaaggaagacggcugggcacagg

SEQ ID NO: 433093 - RNA, 32 nt, Human
gcaccugcagcuuccgcaccuccugguccgcg

SEQ ID NO: 433094 - RNA, 32 nt, Human
gcaccugcaggaccagcaucaucuggaggcug

SEQ ID NO: 433095 - RNA, 32 nt, Human
gcaccugcagucucuuuccacuggcacuuccc

SEQ ID NO: 433096 - RNA, 32 nt, Human
gcaccugcaugcuucccgccucccacucccca

SEQ ID NO: 433097 - RNA, 20 nt, Human
gcaccugccaugugcagacu

SEQ ID NO: 433098 - RNA, 17 nt, Human
gcaccugcccaagguca

SEQ ID NO: 433099 - RNA, 19 nt, Human
gcaccugccccccauggca

SEQ ID NO: 433100 - RNA, 32 nt, Human
gcaccugcccugggcugaggccaggcugcucc

SEQ ID NO: 433101 - RNA, 21 nt, Human
gcaccugccuccagccgccgg

SEQ ID NO: 433102 - RNA, 32 nt, Human
gcaccugccuguaaucccagcuacuugggagg

SEQ ID NO: 433103 - RNA, 32 nt, Human
gcaccugccuguaaucucagcuacucaggagg

SEQ ID NO: 433104 - RNA, 32 nt, Human
gcaccugcgaauagccacugcacuccagccug

SEQ ID NO: 433105 - RNA, 25 nt, Human
gcaccugcgacaagacgcagcugaa

SEQ ID NO: 433106 - RNA, 23 nt, Human
gcaccugcgaucagcggcugggg

SEQ ID NO: 433107 - RNA, 32 nt, Human
gcaccugcgugcagccuccuguucucggcagc

SEQ ID NO: 433108 - RNA, 32 nt, Human
gcaccugcguguccagccucuccugcaugcca

SEQ ID NO: 433109 - RNA, 32 nt, Human
gcaccugcuggcugcuggaagcauaccccaag

SEQ ID NO: 433110 - RNA, 20 nt, Human
gcaccuggaacgggagccgg

SEQ ID NO: 433111 - RNA, 32 nt, Human
gcaccuggaauuggggcgcacagggaggggcg

SEQ ID NO: 433112 - RNA, 21 nt, Human
gcaccuggacaccuggcacgg

SEQ ID NO: 433113 - RNA, 20 nt, Human
gcaccuggaccagcagcugc

SEQ ID NO: 433114 - RNA, 20 nt, Human
gcaccuggaccagcuauggg

SEQ ID NO: 433115 - RNA, 20 nt, Human
gcaccuggacgcuggcgcgg

SEQ ID NO: 433116 - RNA, 32 nt, Human
gcaccuggagagaauuaacucgggaggaggug

SEQ ID NO: 433117 - RNA, 20 nt, Human
gcaccuggagccacagccgg

SEQ ID NO: 433118 - RNA, 18 nt, Human
gcaccuggaggccagcag

SEQ ID NO: 433119 - RNA, 20 nt, Human
gcaccuggaggcggccccgg

SEQ ID NO: 433120 - RNA, 32 nt, Human
gcaccuggauuccccagcuacuuggaaggcug

SEQ ID NO: 433121 - RNA, 32 nt, Human
gcaccuggcacaacaguugccccuggaaguuu

SEQ ID NO: 433122 - RNA, 22 nt, Human
gcaccuggcaucccagcuacuc

SEQ ID NO: 433123 - RNA, 32 nt, Human
gcaccuggcccugcgauggugcacugacguca

SEQ ID NO: 433124 - RNA, 23 nt, Human
gcaccuggccugaauuuuccuca

SEQ ID NO: 433125 - RNA, 32 nt, Human
gcaccuggccuggagcucaguucugaaauaag

SEQ ID NO: 433126 - RNA, 32 nt, Human
gcaccuggccuuucuguacugagcaccugguc

SEQ ID NO: 433127 - RNA, 19 nt, Human
gcaccuggcucagcuccgg

SEQ ID NO: 433128 - RNA, 32 nt, Human
gcaccuggcuccagggccaguguuacaguguu

SEQ ID NO: 433129 - RNA, 21 nt, Human
gcaccuggcucucggcugagg

SEQ ID NO: 433130 - RNA, 19 nt, Human
gcaccugggaacgcuaugg

SEQ ID NO: 433131 - RNA, 32 nt, Human
gcaccugggacccugcuccggguuagcuucac

SEQ ID NO: 433132 - RNA, 32 nt, Human
gcaccugggaggcaggcaggcaugcauguggg

SEQ ID NO: 433133 - RNA, 19 nt, Human
gcaccugggagggagcugc

SEQ ID NO: 433134 - RNA, 18 nt, Human
gcaccugggaggggcugc

SEQ ID NO: 433135 - RNA, 32 nt, Human
gcaccugggauuacaagcaugagucacuacgc

SEQ ID NO: 433136 - RNA, 21 nt, Human
gcaccugggcagccgccgcgg

SEQ ID NO: 433137 - RNA, 21 nt, Human
gcaccugggccaaagggugug

SEQ ID NO: 433138 - RNA, 18 nt, Human
gcaccugggccaccaugc

SEQ ID NO: 433139 - RNA, 20 nt, Human
gcaccugggccagcagcugc

SEQ ID NO: 433140 - RNA, 19 nt, Human
gcaccugggccagcggcug

SEQ ID NO: 433141 - RNA, 16 nt, Human
gcaccugggccccugc

SEQ ID NO: 433142 - RNA, 20 nt, Human
gcaccugggccuggaaccgg

SEQ ID NO: 433143 - RNA, 20 nt, Human
gcaccugggccuggaacugg

SEQ ID NO: 433144 - RNA, 19 nt, Human
gcaccugggcuccggccgc

SEQ ID NO: 433145 - RNA, 16 nt, Human
gcaccugggcuccugc

SEQ ID NO: 433146 - RNA, 32 nt, Human
gcaccugggcuggccucaguugaaggaucaug

SEQ ID NO: 433147 - RNA, 21 nt, Human
gcaccugggcuggcugcgcgg

SEQ ID NO: 433148 - RNA, 32 nt, Human
gcaccuggggacccagagcgagauggguuugu

SEQ ID NO: 433149 - RNA, 22 nt, Human
gcaccuggggcgccagcugcug

SEQ ID NO: 433150 - RNA, 22 nt, Human
gcaccuggggcuccagcugcug

SEQ ID NO: 433151 - RNA, 19 nt, Human
gcaccugggggccaaggca

SEQ ID NO: 433152 - RNA, 21 nt, Human
gcaccugggggcgggcugggg

SEQ ID NO: 433153 - RNA, 32 nt, Human
gcaccuggguugagagggagcagcagguaacu

SEQ ID NO: 433154 - RNA, 21 nt, Human
gcaccugguccugacgcccuu

SEQ ID NO: 433155 - RNA, 32 nt, Human
gcaccugguucacauguggcacugaccgcguc

SEQ ID NO: 433156 - RNA, 22 nt, Human
gcaccuguaaccccagcuacuc

SEQ ID NO: 433157 - RNA, 23 nt, Human
gcaccuguaaccccagcuacuca

SEQ ID NO: 433158 - RNA, 23 nt, Human
gcaccuguaaucccaacuacgca

SEQ ID NO: 433159 - RNA, 22 nt, Human
gcaccuguaaucccaacuacuc

SEQ ID NO: 433160 - RNA, 23 nt, Human
gcaccuguaaucccaacuacuca

SEQ ID NO: 433161 - RNA, 23 nt, Human
gcaccuguaaucccaccuacuca

SEQ ID NO: 433162 - RNA, 19 nt, Human
gcaccuguaaucccagcua

SEQ ID NO: 433163 - RNA, 23 nt, Human
gcaccuguaaucccagcuacccg

SEQ ID NO: 433164 - RNA, 22 nt, Human
gcaccuguaaucccagcuacuc

SEQ ID NO: 433165 - RNA, 23 nt, Human
gcaccuguaaucccagcuacuca

SEQ ID NO: 433166 - RNA, 23 nt, Human
gcaccuguaaucccagcuacucg

SEQ ID NO: 433167 - RNA, 23 nt, Human
gcaccuguaaucccagcuacuua

SEQ ID NO: 433168 - RNA, 23 nt, Human
gcaccuguaaucccagcugccca

SEQ ID NO: 433169 - RNA, 32 nt, Human
gcaccuguacacaagccccaucuccaguccug

SEQ ID NO: 433170 - RNA, 23 nt, Human
gcaccuguagucccagcuacuca

SEQ ID NO: 433171 - RNA, 19 nt, Human
gcaccuguaguccccgcua

SEQ ID NO: 433172 - RNA, 23 nt, Human
gcaccugucaccccagcuccuca

SEQ ID NO: 433173 - RNA, 22 nt, Human
gcaccugucaucccagcuacuc

SEQ ID NO: 433174 - RNA, 32 nt, Human
gcaccuguccaggcuuccuuagguacaucuuc

SEQ ID NO: 433175 - RNA, 23 nt, Human
gcaccugucgucccagcaaccca

SEQ ID NO: 433176 - RNA, 21 nt, Human
gcaccugucgucccagcuacu

SEQ ID NO: 433177 - RNA, 19 nt, Human
gcaccugugaucccagcua

SEQ ID NO: 433178 - RNA, 23 nt, Human
gcaccugugaucccagcuacuua

SEQ ID NO: 433179 - RNA, 32 nt, Human
gcaccugugccuguagucccagauacuuggga

SEQ ID NO: 433180 - RNA, 32 nt, Human
gcaccuguggccaggccuccuccugggagcuc

SEQ ID NO: 433181 - RNA, 23 nt, Human
gcaccuguggucacagcuacuca

SEQ ID NO: 433182 - RNA, 23 nt, Human
gcaccuguggucccagcuacccg

SEQ ID NO: 433183 - RNA, 22 nt, Human
gcaccuguggucccagcuacuc

SEQ ID NO: 433184 - RNA, 23 nt, Human
gcaccuguggucccagguacuca

SEQ ID NO: 433185 - RNA, 32 nt, Human
gcaccugugugugcucagcuuccagaagcugu

SEQ ID NO: 433186 - RNA, 22 nt, Human
gcaccuguugucccagcuacuc

SEQ ID NO: 433187 - RNA, 23 nt, Human
gcaccuguugucccagcuacuca

SEQ ID NO: 433188 - RNA, 32 nt, Human
gcaccuuaagccaccacccucagccacaauuu

SEQ ID NO: 433189 - RNA, 19 nt, Human
gcaccuuacgaaaggcggc

SEQ ID NO: 433190 - RNA, 32 nt, Human
gcaccuuaggaguauagggaggccccauauag

SEQ ID NO: 433191 - RNA, 32 nt, Human
gcaccuuagugccaaccugaaccaaagagacc

SEQ ID NO: 433192 - RNA, 19 nt, Human
gcaccuuccacccccagca

SEQ ID NO: 433193 - RNA, 32 nt, Human
gcaccuuccucgggggcgggccccacgcaccc

SEQ ID NO: 433194 - RNA, 20 nt, Human
gcaccuucucagccagcagc

SEQ ID NO: 433195 - RNA, 32 nt, Human
gcaccuucugggguaaugcacacaccaguaaa

SEQ ID NO: 433196 - RNA, 21 nt, Human
gcaccuucuugaaaaggaagc

SEQ ID NO: 433197 - RNA, 32 nt, Human
gcaccuucuuggaagaaaucaugucugagggu

SEQ ID NO: 433198 - RNA, 32 nt, Human
gcaccuugacuuguagauuugccuucagacag

SEQ ID NO: 433199 - RNA, 32 nt, Human
gcaccuugaggcacagaugagaagcuuggccu

SEQ ID NO: 433200 - RNA, 19 nt, Human
gcaccuugaggggcugcgg

SEQ ID NO: 433201 - RNA, 32 nt, Human
gcaccuugaguugagaggacuacauguagaaa

SEQ ID NO: 433202 - RNA, 32 nt, Human
gcaccuugcacacagucacugcagccuccuug

SEQ ID NO: 433203 - RNA, 32 nt, Human
gcaccuugcuaccugcuugcggcuuucagugg

SEQ ID NO: 433204 - RNA, 32 nt, Human
gcaccuugcugggucuguggcauuuuccaagg

SEQ ID NO: 433205 - RNA, 32 nt, Human
gcaccuuggaaagaaaaaugaagaacaacuuu

SEQ ID NO: 433206 - RNA, 32 nt, Human
gcaccuugggcacuguugaagugccuuacauu

SEQ ID NO: 433207 - RNA, 32 nt, Human
gcaccuuguccaaggagacaccacuuucaccc

SEQ ID NO: 433208 - RNA, 32 nt, Human
gcaccuuguuauuugggagacuuugagaguca

SEQ ID NO: 433209 - RNA, 32 nt, Human
gcaccuuuaaggcuuuugacaagcauaugaau

SEQ ID NO: 433210 - RNA, 32 nt, Human
gcaccuuucaugagucagguugcuuagcagau

SEQ ID NO: 433211 - RNA, 32 nt, Human
gcaccuuuccauccuccagguuucaaaauagc

SEQ ID NO: 433212 - RNA, 32 nt, Human
gcaccuuugaaucccaaguucaguacgcccgg

SEQ ID NO: 433213 - RNA, 32 nt, Human
gcaccuuugcucccccuuauccuccuuccucu

SEQ ID NO: 433214 - RNA, 32 nt, Human
gcaccuuuguacuccagccugggcaacgagca

SEQ ID NO: 433215 - RNA, 32 nt, Human
gcaccuuuguugaauugugguagcuuaggagg

SEQ ID NO: 433216 - RNA, 32 nt, Human
gcaccuuuucuccuccccagacuguccugggc

SEQ ID NO: 433217 - RNA, 20 nt, Human
gcaccuuuuucugccaucca

SEQ ID NO: 433218 - RNA, 32 nt, Human
gcacgaaauguccuccaugagcuggcuucguc

SEQ ID NO: 433219 - RNA, 32 nt, Human
gcacgaagggagcaccguggagaagacggugg

SEQ ID NO: 433220 - RNA, 18 nt, Human
gcacgaagucacaaugca

SEQ ID NO: 433221 - RNA, 32 nt, Human
gcacgaaucacugcacccagccuauggaacau

SEQ ID NO: 433222 - RNA, 21 nt, Human
gcacgaaucaugauucugcuu

SEQ ID NO: 433223 - RNA, 17 nt, Human
gcacgaaucccccacca

SEQ ID NO: 433224 - RNA, 32 nt, Human
gcacgacagggcugauggugaggaucagagca

SEQ ID NO: 433225 - RNA, 32 nt, Human
gcacgacccagccuggccacacacuguggugc

SEQ ID NO: 433226 - RNA, 32 nt, Human
gcacgacccaguucagcugucuguaaagugga

SEQ ID NO: 433227 - RNA, 21 nt, Human
gcacgacucgcguagccgugc

SEQ ID NO: 433228 - RNA, 32 nt, Human
gcacgacugcacuccagccugggcaauggagu

SEQ ID NO: 433229 - RNA, 32 nt, Human
gcacgacugugggcauaugcaaagcugaaccu

SEQ ID NO: 433230 - RNA, 32 nt, Human
gcacgagaaucacuugaacccaggaagcgggg

SEQ ID NO: 433231 - RNA, 32 nt, Human
gcacgagaaucacuugaacccaggaaguggag

SEQ ID NO: 433232 - RNA, 19 nt, Human
gcacgagaaucgcuugaac

SEQ ID NO: 433233 - RNA, 32 nt, Human
gcacgagaaugucccugagacccagaagggcc

SEQ ID NO: 433234 - RNA, 32 nt, Human
gcacgagagucccagccccauuuucuuuccua

SEQ ID NO: 433235 - RNA, 32 nt, Human
gcacgagauucacuugaaccugggagguggag

SEQ ID NO: 433236 - RNA, 20 nt, Human
gcacgagcagcggccggcgg

SEQ ID NO: 433237 - RNA, 32 nt, Human
gcacgagcaguaggaagcagucacccggaagc

SEQ ID NO: 433238 - RNA, 32 nt, Human
gcacgagcuggugggaguggugcuccagaggg

SEQ ID NO: 433239 - RNA, 32 nt, Human
gcacgaggaagagauggcagcagaggcugggg

SEQ ID NO: 433240 - RNA, 32 nt, Human
gcacgaggagagugcggcugcugagagccgag

SEQ ID NO: 433241 - RNA, 32 nt, Human
gcacgaggauuuccagcucagcgaugccccca

SEQ ID NO: 433242 - RNA, 32 nt, Human
gcacgaggcagcggcugcaggucuccaaguug

SEQ ID NO: 433243 - RNA, 32 nt, Human
gcacgaggcccagcuccuggcggagcgagcua

SEQ ID NO: 433244 - RNA, 22 nt, Human
gcacgaggcccuggguuuauua

SEQ ID NO: 433245 - RNA, 32 nt, Human
gcacgaggccgccauugacacgcacagauaga

SEQ ID NO: 433246 - RNA, 32 nt, Human
gcacgaggcugcuuaaaccucugucucugacg

SEQ ID NO: 433247 - RNA, 32 nt, Human
gcacgagggaaaugcuguuugcucgaagacgu

SEQ ID NO: 433248 - RNA, 32 nt, Human
gcacgagggagagagcgagaccugggagggag

SEQ ID NO: 433249 - RNA, 32 nt, Human
gcacgagggcacgggcggucagcugggccgca

SEQ ID NO: 433250 - RNA, 22 nt, Human
gcacgagggcccaaaggucuug

SEQ ID NO: 433251 - RNA, 19 nt, Human
gcacgagggccccaggaga

SEQ ID NO: 433252 - RNA, 32 nt, Human
gcacgagggcuacggcccuggaacggggccau

SEQ ID NO: 433253 - RNA, 32 nt, Human
gcacgagggcuggcaucucuccuuccagccca

SEQ ID NO: 433254 - RNA, 32 nt, Human
gcacgaggggaggaggaggaggaggagaggag

SEQ ID NO: 433255 - RNA, 32 nt, Human
gcacgaguccaguacuccuacuucgccaaguc

SEQ ID NO: 433256 - RNA, 21 nt, Human
gcacgagucuugccagugcuu

SEQ ID NO: 433257 - RNA, 21 nt, Human
gcacgaucucagcucacugca

SEQ ID NO: 433258 - RNA, 32 nt, Human
gcacgaucucagcucacugcaaccuccgccuc

SEQ ID NO: 433259 - RNA, 32 nt, Human
gcacgaucucagcucacugcaaccuccgucuc

SEQ ID NO: 433260 - RNA, 32 nt, Human
gcacgaucucagcucacugcaaccuuugucuc

SEQ ID NO: 433261 - RNA, 32 nt, Human
gcacgaucucagcucauugcaaccucugucuc

SEQ ID NO: 433262 - RNA, 21 nt, Human
gcacgaucucggcucacugca

SEQ ID NO: 433263 - RNA, 21 nt, Human
gcacgaucuuggcucaccgca

SEQ ID NO: 433264 - RNA, 21 nt, Human
gcacgaucuuggcucacugca

SEQ ID NO: 433265 - RNA, 30 nt, Human
gcacgauggcggcaggccuggccacguggc

SEQ ID NO: 433266 - RNA, 24 nt, Human
gcacgauggcucaaaccuguaauc

SEQ ID NO: 433267 - RNA, 24 nt, Human
gcacgauggcucacgccuguaauc

SEQ ID NO: 433268 - RNA, 30 nt, Human
gcacgauguccagcaaagcugagaagaagc

SEQ ID NO: 433269 - RNA, 32 nt, Human
gcacgcaaagcugcaggcuacaguauuggucc

SEQ ID NO: 433270 - RNA, 32 nt, Human
gcacgcaacgcagcauguggcuucauugaggc

SEQ ID NO: 433271 - RNA, 32 nt, Human
gcacgcacacacacauacagagcucucugagg

SEQ ID NO: 433272 - RNA, 32 nt, Human
gcacgcacacacuggucagucuggacccgggc

SEQ ID NO: 433273 - RNA, 32 nt, Human
gcacgcacagcgcccggagccucggcaagggg

SEQ ID NO: 433274 - RNA, 32 nt, Human
gcacgcaccacugcuucccacuggggccggcg

SEQ ID NO: 433275 - RNA, 32 nt, Human
gcacgcaccuguaaucccagcugcucuggagg

SEQ ID NO: 433276 - RNA, 32 nt, Human
gcacgcagagcaccccuucuccagcgguggga

SEQ ID NO: 433277 - RNA, 32 nt, Human
gcacgcaggcggggcaguaugugauggacugg

SEQ ID NO: 433278 - RNA, 32 nt, Human
gcacgcagggccugagaucuggccgcccauuc

SEQ ID NO: 433279 - RNA, 32 nt, Human
gcacgcagggcguggagggggaccacugcgug

SEQ ID NO: 433280 - RNA, 22 nt, Human
gcacgcauaucaaacuaugcuc

SEQ ID NO: 433281 - RNA, 22 nt, Human
gcacgcaucuguaguuccagcu

SEQ ID NO: 433282 - RNA, 32 nt, Human
gcacgcauggcugagcaugugugggugggagu

SEQ ID NO: 433283 - RNA, 32 nt, Human
gcacgcaugugcacaaacacauugcaggcagg

SEQ ID NO: 433284 - RNA, 32 nt, Human
gcacgccacugcacuccagccugggugacaga

SEQ ID NO: 433285 - RNA, 32 nt, Human
gcacgccagguggggaagggugggggugggcc

SEQ ID NO: 433286 - RNA, 32 nt, Human
gcacgccauugcacuccacacuccagccugag

SEQ ID NO: 433287 - RNA, 32 nt, Human
gcacgcccuccccagccaugucguccauccug

SEQ ID NO: 433288 - RNA, 18 nt, Human
gcacgcccuggcccggca

SEQ ID NO: 433289 - RNA, 32 nt, Human
gcacgccuauagucccagcuacacaggaggcu

SEQ ID NO: 433290 - RNA, 32 nt, Human
gcacgccuauagucccagcuacucgggaggcu

SEQ ID NO: 433291 - RNA, 32 nt, Human
gcacgccucucccugcacucccuccuggagcu

SEQ ID NO: 433292 - RNA, 32 nt, Human
gcacgccucuggucccagcugcucgggaggcc

SEQ ID NO: 433293 - RNA, 32 nt, Human
gcacgccugcagucccagcuacucaggagguu

SEQ ID NO: 433294 - RNA, 32 nt, Human
gcacgccugccugccagggccucucuggggca

SEQ ID NO: 433295 - RNA, 32 nt, Human
gcacgccuggaaucccagcacugugggaggcc

SEQ ID NO: 433296 - RNA, 32 nt, Human
gcacgccuguaaacccagcuacucgggagguu

SEQ ID NO: 433297 - RNA, 32 nt, Human
gcacgccuguaacccagcuacucaggaggcug

SEQ ID NO: 433298 - RNA, 32 nt, Human
gcacgccuguaaucccagcacuuggggaggcc

SEQ ID NO: 433299 - RNA, 32 nt, Human
gcacgccuguaaucccagcacuuugggaggcc

SEQ ID NO: 433300 - RNA, 32 nt, Human
gcacgccuguaaucccagcuacucaagagguu

SEQ ID NO: 433301 - RNA, 32 nt, Human
gcacgccuguaaucccagcuacucaggaggcu

SEQ ID NO: 433302 - RNA, 32 nt, Human
gcacgccuguaaucccagcuacucgggaggcu

SEQ ID NO: 433303 - RNA, 32 nt, Human
gcacgccuguaaucccagcuccuugggaggcu

SEQ ID NO: 433304 - RNA, 32 nt, Human
gcacgccuguaaucccagcuucuugggaggcu

SEQ ID NO: 433305 - RNA, 32 nt, Human
gcacgccuguaauccccagauacucgggaggc

SEQ ID NO: 433306 - RNA, 32 nt, Human
gcacgccuguaaucccugcuacucgggaggcu

SEQ ID NO: 433307 - RNA, 32 nt, Human
gcacgccuguaaucucagcuacuagggacgcu

SEQ ID NO: 433308 - RNA, 32 nt, Human
gcacgccuguaaucucagcuacuugggaggcu

SEQ ID NO: 433309 - RNA, 32 nt, Human
gcacgccuguaaugccagcuacuugggaggcu

SEQ ID NO: 433310 - RNA, 20 nt, Human
gcacgccuguagucccagcu

SEQ ID NO: 433311 - RNA, 32 nt, Human
gcacgccuguagucccagcuacucaggaggcu

SEQ ID NO: 433312 - RNA, 32 nt, Human
gcacgccuguagucccagcuacucgggaggcu

SEQ ID NO: 433313 - RNA, 32 nt, Human
gcacgccuguagucccagcuacuugggaggcu

SEQ ID NO: 433314 - RNA, 32 nt, Human
gcacgccuguagucucagcuacucaggaggcu

SEQ ID NO: 433315 - RNA, 20 nt, Human
gcacgccuguaguuccagcu

SEQ ID NO: 433316 - RNA, 32 nt, Human
gcacgccuguaguuccagcuacucaggaggcu

SEQ ID NO: 433317 - RNA, 32 nt, Human
gcacgccuguauucccagcuacuugggaggcu

SEQ ID NO: 433318 - RNA, 32 nt, Human
gcacgccugugacucaaggggacuucuguuuu

SEQ ID NO: 433319 - RNA, 32 nt, Human
gcacgccugugaucacagcuacucgggaggcu

SEQ ID NO: 433320 - RNA, 32 nt, Human
gcacgccugugaucccagcuacucgggaggcu

SEQ ID NO: 433321 - RNA, 32 nt, Human
gcacgccugugaucccagcuacuggggagacu

SEQ ID NO: 433322 - RNA, 32 nt, Human
gcacgccuguggucccagcuacacaggaggcu

SEQ ID NO: 433323 - RNA, 32 nt, Human
gcacgccuguggucccagcuauucaggaggcu

SEQ ID NO: 433324 - RNA, 32 nt, Human
gcacgccuguggucccagcugcuggggaggcu

SEQ ID NO: 433325 - RNA, 32 nt, Human
gcacgccuguuaucacagcuacuugggaggca

SEQ ID NO: 433326 - RNA, 32 nt, Human
gcacgccuuagucccagcuacuugggaggcug

SEQ ID NO: 433327 - RNA, 32 nt, Human
gcacgccuuuaaucccagcuacucgggaggcu

SEQ ID NO: 433328 - RNA, 32 nt, Human
gcacgcgcacacacucacgcacacacaagcag

SEQ ID NO: 433329 - RNA, 15 nt, Human
gcacgcgcagcuggg

SEQ ID NO: 433330 - RNA, 32 nt, Human
gcacgcgcagggagagauccaucucugcuguc

SEQ ID NO: 433331 - RNA, 32 nt, Human
gcacgcgccaccuguauuuuuguauuuuuagu

SEQ ID NO: 433332 - RNA, 32 nt, Human
gcacgcgccuguaaucccagcuacucgggagg

SEQ ID NO: 433333 - RNA, 32 nt, Human
gcacgcgccuguaaucccagcuacuugggagg

SEQ ID NO: 433334 - RNA, 22 nt, Human
gcacgcggcucugcacccgcgc

SEQ ID NO: 433335 - RNA, 32 nt, Human
gcacgcgggucacucauucccacugaggcccg

SEQ ID NO: 433336 - RNA, 32 nt, Human
gcacgcuccgcagcccagcccagccgggagac

SEQ ID NO: 433337 - RNA, 32 nt, Human
gcacgcucuggccccaggcuugugccccaccc

SEQ ID NO: 433338 - RNA, 32 nt, Human
gcacgcucuguucccucaggugccauucuccc

SEQ ID NO: 433339 - RNA, 32 nt, Human
gcacgcugcagcccggaguccccguucacacu

SEQ ID NO: 433340 - RNA, 32 nt, Human
gcacgcugcugccaagcugcaggauggugcac

SEQ ID NO: 433341 - RNA, 32 nt, Human
gcacgcuggcuggcucguagccccagaauggc

SEQ ID NO: 433342 - RNA, 32 nt, Human
gcacgcugguccugggggcuggagaggaaccg

SEQ ID NO: 433343 - RNA, 32 nt, Human
gcacgcugugccccugaugaugugggagagga

SEQ ID NO: 433344 - RNA, 32 nt, Human
gcacgcuuguaaucccagcuacucaggagucu

SEQ ID NO: 433345 - RNA, 32 nt, Human
gcacgcuuguaaucccagcuacucuggaggcu

SEQ ID NO: 433346 - RNA, 32 nt, Human
gcacggaagaguuugucuugcuuuaagauuag

SEQ ID NO: 433347 - RNA, 32 nt, Human
gcacggacgaggcagaggaguggccgguccca

SEQ ID NO: 433348 - RNA, 32 nt, Human
gcacggacgaucccuaaacugccuuguaaaca

SEQ ID NO: 433349 - RNA, 32 nt, Human
gcacggagagaagggcagaugugcagggagac

SEQ ID NO: 433350 - RNA, 32 nt, Human
gcacggagauugaagagcagaggcagaaacuu

SEQ ID NO: 433351 - RNA, 32 nt, Human
gcacggagcaggguuucuacagcugcucccca

SEQ ID NO: 433352 - RNA, 32 nt, Human
gcacggagccgucaguccacuguuacgggaga

SEQ ID NO: 433353 - RNA, 32 nt, Human
gcacggagcggaagggagagcaggggagagaa

SEQ ID NO: 433354 - RNA, 32 nt, Human
gcacggaggaaagacaugcccaagaggaagga

SEQ ID NO: 433355 - RNA, 32 nt, Human
gcacggaggacccccuacccacccuggaauga

SEQ ID NO: 433356 - RNA, 24 nt, Human
gcacggaggcucacgccuguaauc

SEQ ID NO: 433357 - RNA, 32 nt, Human
gcacggaugagcacaacccuggagcugcacag

SEQ ID NO: 433358 - RNA, 32 nt, Human
gcacggcaccuguuccaacaccuacugugccu

SEQ ID NO: 433359 - RNA, 31 nt, Human
gcacggcagagagucuggugggguggagggg

SEQ ID NO: 433360 - RNA, 32 nt, Human
gcacggcagccacacaccgguauuccaaaccu

SEQ ID NO: 433361 - RNA, 32 nt, Human
gcacggcagcuguucuuggaacagggcgacaa

SEQ ID NO: 433362 - RNA, 27 nt, Human
gcacggccaacccucaaugaacuacca

SEQ ID NO: 433363 - RNA, 23 nt, Human
gcacggccacccugcccuggcua

SEQ ID NO: 433364 - RNA, 24 nt, Human
gcacggccacugcggccgccggcc

SEQ ID NO: 433365 - RNA, 32 nt, Human
gcacggcccgaccuguacccagccuggcagga

SEQ ID NO: 433366 - RNA, 32 nt, Human
gcacggcccgggaagugcagcaggcagcuuuu

SEQ ID NO: 433367 - RNA, 32 nt, Human
gcacggcccuaaaaccauggaggagggcggca

SEQ ID NO: 433368 - RNA, 32 nt, Human
gcacggcccuggaagagacgucgccuccccuu

SEQ ID NO: 433369 - RNA, 32 nt, Human
gcacggcccuggaagagacgucgccucgccuu

SEQ ID NO: 433370 - RNA, 32 nt, Human
gcacggccggcccugggcaggcgguagccaug

SEQ ID NO: 433371 - RNA, 23 nt, Human
gcacggccgggccccuccugcca

SEQ ID NO: 433372 - RNA, 32 nt, Human
gcacggccucaagguagugaggcuaggagguu

SEQ ID NO: 433373 - RNA, 32 nt, Human
gcacggccuguccgcugcacaccagcuuguug

SEQ ID NO: 433374 - RNA, 21 nt, Human
gcacggccugugcuccugaca

SEQ ID NO: 433375 - RNA, 32 nt, Human
gcacggcgccagccccuccagcccaccagggc

SEQ ID NO: 433376 - RNA, 32 nt, Human
gcacggcggcggcagaggcggcggcggccggg

SEQ ID NO: 433377 - RNA, 24 nt, Human
gcacggcggcucacgccuguaauc

SEQ ID NO: 433378 - RNA, 32 nt, Human
gcacggcgucccugagggcccuucccaaccuc

SEQ ID NO: 433379 - RNA, 32 nt, Human
gcacggcuauaaaccacuagcugcuucaacug

SEQ ID NO: 433380 - RNA, 24 nt, Human
gcacggcucucucaugaccagcuc

SEQ ID NO: 433381 - RNA, 18 nt, Human
gcacggcucuguccccag

SEQ ID NO: 433382 - RNA, 32 nt, Human
gcacggcugcugcgcggguaaggaaccucgcu

SEQ ID NO: 433383 - RNA, 32 nt, Human
gcacggcugggaugugagggaggacucagauc

SEQ ID NO: 433384 - RNA, 32 nt, Human
gcacggcuucccuuuuugaaaccagggaggcu

SEQ ID NO: 433385 - RNA, 32 nt, Human
gcacgggagagggaggggcaacagagguccag

SEQ ID NO: 433386 - RNA, 21 nt, Human
gcacgggaggcgaccgugcuc

SEQ ID NO: 433387 - RNA, 32 nt, Human
gcacgggaggggaggugacggcuggugacuga

SEQ ID NO: 433388 - RNA, 22 nt, Human
gcacgggcaaggcggagaguga

SEQ ID NO: 433389 - RNA, 32 nt, Human
gcacgggcggagccgcacagggcggggaagag

SEQ ID NO: 433390 - RNA, 22 nt, Human
gcacgggcggcggcggcgugga

SEQ ID NO: 433391 - RNA, 32 nt, Human
gcacggggcauuccugcuucucucucaggcca

SEQ ID NO: 433392 - RNA, 32 nt, Human
gcacggggcccaggcuagagugcaguggcgug

SEQ ID NO: 433393 - RNA, 17 nt, Human
gcacggggccuuuccca

SEQ ID NO: 433394 - RNA, 32 nt, Human
gcacggggccuuucccacccacccucagccag

SEQ ID NO: 433395 - RNA, 32 nt, Human
gcacgggggaggaggagguagggggcaguaaa

SEQ ID NO: 433396 - RNA, 24 nt, Human
gcacggguauacacauaaugcagu

SEQ ID NO: 433397 - RNA, 31 nt, Human
gcacggguccacuucuuaaccuuccuuuuaa

SEQ ID NO: 433398 - RNA, 32 nt, Human
gcacgggucggccgcaauccagccugggcgga

SEQ ID NO: 433399 - RNA, 24 nt, Human
gcacgguaccucacaccuguaauc

SEQ ID NO: 433400 - RNA, 18 nt, Human
gcacgguaccugccacca

SEQ ID NO: 433401 - RNA, 24 nt, Human
gcacgguagcucacaccuguaauc

SEQ ID NO: 433402 - RNA, 32 nt, Human
gcacggucgguacaaaugcauggcagguguga

SEQ ID NO: 433403 - RNA, 24 nt, Human
gcacggugacucacacuuguaauc

SEQ ID NO: 433404 - RNA, 32 nt, Human
gcacggugcaaagugggccuucccugggcugu

SEQ ID NO: 433405 - RNA, 32 nt, Human
gcacggugccaccuccacacucaccucaccuc

SEQ ID NO: 433406 - RNA, 32 nt, Human
gcacggugcccagguuggccuccugcugggug

SEQ ID NO: 433407 - RNA, 32 nt, Human
gcacggugccucagcacuccccaaaacauccc

SEQ ID NO: 433408 - RNA, 32 nt, Human
gcacgguggcagggaggcggcguugcgguggc

SEQ ID NO: 433409 - RNA, 24 nt, Human
gcacgguggcucacaccuauaauc

SEQ ID NO: 433410 - RNA, 22 nt, Human
gcacgguggcucacaccuguaa

SEQ ID NO: 433411 - RNA, 24 nt, Human
gcacgguggcucacaccuguaauc

SEQ ID NO: 433412 - RNA, 24 nt, Human
gcacgguggcucacaccugugauc

SEQ ID NO: 433413 - RNA, 24 nt, Human
gcacgguggcucacagcuauaauc

SEQ ID NO: 433414 - RNA, 24 nt, Human
gcacgguggcucacgccuauaauc

SEQ ID NO: 433415 - RNA, 22 nt, Human
gcacgguggcucacgccuguaa

SEQ ID NO: 433416 - RNA, 24 nt, Human
gcacgguggcucacgccuguaauc

SEQ ID NO: 433417 - RNA, 24 nt, Human
gcacgguggcucacuccuguaauc

SEQ ID NO: 433418 - RNA, 24 nt, Human
gcacgguggcucauaccuguaauc

SEQ ID NO: 433419 - RNA, 32 nt, Human
gcacgguggcugcuggccacaccacggcaagu

SEQ ID NO: 433420 - RNA, 22 nt, Human
gcacgguggcuuacaccuguaa

SEQ ID NO: 433421 - RNA, 32 nt, Human
gcacgguggugaggcaguugagaaaauuugaa

SEQ ID NO: 433422 - RNA, 24 nt, Human
gcacggugucucacaucuguaauc

SEQ ID NO: 433423 - RNA, 32 nt, Human
gcacgguuccuccucuccccagccugggaaga

SEQ ID NO: 433424 - RNA, 18 nt, Human
gcacgguugccugagguc

SEQ ID NO: 433425 - RNA, 32 nt, Human
gcacguacggccgccucuuccagaagcucugc

SEQ ID NO: 433426 - RNA, 32 nt, Human
gcacguagaagguaggaguaagaaaagcuaag

SEQ ID NO: 433427 - RNA, 32 nt, Human
gcacguaggugucuaacacagaggagaguagg

SEQ ID NO: 433428 - RNA, 23 nt, Human
gcacgucaaagaggcuccagaaa

SEQ ID NO: 433429 - RNA, 32 nt, Human
gcacgucaggaggaaaaagugaggaaaaagga

SEQ ID NO: 433430 - RNA, 21 nt, Human
gcacgucccggaccugugggg

SEQ ID NO: 433431 - RNA, 32 nt, Human
gcacguccggccagggcaggcggugcggcauc

SEQ ID NO: 433432 - RNA, 32 nt, Human
gcacguccgggcaguggagggagggacacagc

SEQ ID NO: 433433 - RNA, 32 nt, Human
gcacgucggccccagcccugaggagccggacc

SEQ ID NO: 433434 - RNA, 32 nt, Human
gcacgucuaggaagaagggaagagguggaaac

SEQ ID NO: 433435 - RNA, 32 nt, Human
gcacgucuccccagguccugggaguggcuacc

SEQ ID NO: 433436 - RNA, 32 nt, Human
gcacgucucuagucucagcuacucaggaggcu

SEQ ID NO: 433437 - RNA, 32 nt, Human
gcacgucuguaaucccagcuacuccagaggcu

SEQ ID NO: 433438 - RNA, 32 nt, Human
gcacgucuguaaucccagcugcucgggaggcu

SEQ ID NO: 433439 - RNA, 25 nt, Human
gcacgucuguagucccagcuacuca

SEQ ID NO: 433440 - RNA, 32 nt, Human
gcacgucuguagucccagcuacucaggaggcu

SEQ ID NO: 433441 - RNA, 32 nt, Human
gcacgucuucauugaucuccccacgcugcaga

SEQ ID NO: 433442 - RNA, 32 nt, Human
gcacgucuucccuucucucccugcugcggcac

SEQ ID NO: 433443 - RNA, 32 nt, Human
gcacgugaagucacggguaggggccaggcccc

SEQ ID NO: 433444 - RNA, 32 nt, Human
gcacgugaagucauugaggcccugcugcgaaa

SEQ ID NO: 433445 - RNA, 32 nt, Human
gcacgugcacacacauacacacacauccauua

SEQ ID NO: 433446 - RNA, 32 nt, Human
gcacgugcacacacgcacgcacgcgugcacac

SEQ ID NO: 433447 - RNA, 32 nt, Human
gcacgugcccggcccugcuccacacgagcuuc

SEQ ID NO: 433448 - RNA, 32 nt, Human
gcacgugccucucugaauccagccugccauuc

SEQ ID NO: 433449 - RNA, 32 nt, Human
gcacgugccuguaaucccagcuacucgggagg

SEQ ID NO: 433450 - RNA, 32 nt, Human
gcacgugccuguaaucucagcuacucaggagg

SEQ ID NO: 433451 - RNA, 32 nt, Human
gcacgugccuguaauuccagcuacuugggagg

SEQ ID NO: 433452 - RNA, 32 nt, Human
gcacgugccuguagucccagcuacucgggaag

SEQ ID NO: 433453 - RNA, 32 nt, Human
gcacgugccuguagucccagcuacucgggagg

SEQ ID NO: 433454 - RNA, 32 nt, Human
gcacgugccuguagucccagcuccuugggagg

SEQ ID NO: 433455 - RNA, 32 nt, Human
gcacgugccuguuaucucagcuacuugggaag

SEQ ID NO: 433456 - RNA, 32 nt, Human
gcacgugcuggaccccggcgucuccggcugca

SEQ ID NO: 433457 - RNA, 32 nt, Human
gcacgugcugggccugcuggagcugcugcagc

SEQ ID NO: 433458 - RNA, 32 nt, Human
gcacgugcuguaagauuuccugagcauuacag

SEQ ID NO: 433459 - RNA, 25 nt, Human
gcacgugcuuggcauuaccugguca

SEQ ID NO: 433460 - RNA, 32 nt, Human
gcacguggagccacggcgugggaguagggggc

SEQ ID NO: 433461 - RNA, 32 nt, Human
gcacguggagcuucuugaaaugacagggugaa

SEQ ID NO: 433462 - RNA, 32 nt, Human
gcacguggccauguaugcuuuaaccuuaaacu

SEQ ID NO: 433463 - RNA, 32 nt, Human
gcacguggcccaggcgucuccugucaauccgu

SEQ ID NO: 433464 - RNA, 16 nt, Human
gcacguggcucacugc

SEQ ID NO: 433465 - RNA, 32 nt, Human
gcacgugggacccucuggacagccaccaagau

SEQ ID NO: 433466 - RNA, 32 nt, Human
gcacgugggugcucucucgggguggggugacu

SEQ ID NO: 433467 - RNA, 32 nt, Human
gcacgugguggguggggugcagcuggucugga

SEQ ID NO: 433468 - RNA, 32 nt, Human
gcacgugucuguaaucccagcuacucuggaga

SEQ ID NO: 433469 - RNA, 32 nt, Human
gcacguuaaagaagacagaaagcggacuaugc

SEQ ID NO: 433470 - RNA, 32 nt, Human
gcacguuacuagcugcuacauacugucugaac

SEQ ID NO: 433471 - RNA, 32 nt, Human
gcacguuauaaauaugagaaugcagcacacaa

SEQ ID NO: 433472 - RNA, 32 nt, Human
gcacguuccuuuaaucccagcuacucgggagg

SEQ ID NO: 433473 - RNA, 32 nt, Human
gcacguucgagaccagccugaccaacauggag

SEQ ID NO: 433474 - RNA, 32 nt, Human
gcacguucucaccccugucaucucagcccccu

SEQ ID NO: 433475 - RNA, 32 nt, Human
gcacguucucagcucacugcaaccuccgccuc

SEQ ID NO: 433476 - RNA, 32 nt, Human
gcacguucucugccccguuucuugccccagug

SEQ ID NO: 433477 - RNA, 32 nt, Human
gcacguugcccaagguugcacagcaagaaaag

SEQ ID NO: 433478 - RNA, 18 nt, Human
gcacguugccucccacca

SEQ ID NO: 433479 - RNA, 32 nt, Human
gcacguuggucuuugauuguucuguccucaca

SEQ ID NO: 433480 - RNA, 32 nt, Human
gcacguuuccccucauucauguggcuguacuu

SEQ ID NO: 433481 - RNA, 21 nt, Human
gcacguuugugagaagaaaug

SEQ ID NO: 433482 - RNA, 24 nt, Human
gcacguuuucucaaguaucuucuu

SEQ ID NO: 433483 - RNA, 32 nt, Human
gcacuaaacaguugccccagaaagacaugucu

SEQ ID NO: 433484 - RNA, 32 nt, Human
gcacuaaacugccucugcucucuugucuucag

SEQ ID NO: 433485 - RNA, 32 nt, Human
gcacuaacauggcacacacauacacuccugcg

SEQ ID NO: 433486 - RNA, 31 nt, Human
gcacuaacccagccucucccugugucccaca

SEQ ID NO: 433487 - RNA, 32 nt, Human
gcacuaaccccagcugccggcagugcugguuc

SEQ ID NO: 433488 - RNA, 32 nt, Human
gcacuaacucaggccagguagcccuggcagca

SEQ ID NO: 433489 - RNA, 32 nt, Human
gcacuaagcacuuuccaggcaggccuggccau

SEQ ID NO: 433490 - RNA, 32 nt, Human
gcacuaagccguagcggcagcagcagccacag

SEQ ID NO: 433491 - RNA, 32 nt, Human
gcacuaagcugguuauuucuccauuuugcaua

SEQ ID NO: 433492 - RNA, 32 nt, Human
gcacuaaugucuggugacagaguuggacucug

SEQ ID NO: 433493 - RNA, 32 nt, Human
gcacuacagacacgcgccaccaugcccggcua

SEQ ID NO: 433494 - RNA, 32 nt, Human
gcacuacagccuggacgacagagcaagacucu

SEQ ID NO: 433495 - RNA, 24 nt, Human
gcacuacagccugggcaacaagag

SEQ ID NO: 433496 - RNA, 32 nt, Human
gcacuacaggaggcaacuguggcauugcuucc

SEQ ID NO: 433497 - RNA, 32 nt, Human
gcacuacaggcacccgccaccaugcccggcua

SEQ ID NO: 433498 - RNA, 32 nt, Human
gcacuaccuucuuccucuuccuccuccuccgg

SEQ ID NO: 433499 - RNA, 32 nt, Human
gcacuacuacacuccagccuggugacagagug

SEQ ID NO: 433500 - RNA, 32 nt, Human
gcacuacuauaaucccagcugcuggggcggcu

SEQ ID NO: 433501 - RNA, 32 nt, Human
gcacuacugcacuccagacuggugacggagcg

SEQ ID NO: 433502 - RNA, 32 nt, Human
gcacuacugcacuccagccugggugacagagu

SEQ ID NO: 433503 - RNA, 32 nt, Human
gcacuacugcauuccagccugggugacauauc

SEQ ID NO: 433504 - RNA, 32 nt, Human
gcacuacuguacuccagccagggcaagagagc

SEQ ID NO: 433505 - RNA, 19 nt, Human
gcacuagacagaguggcug

SEQ ID NO: 433506 - RNA, 32 nt, Human
gcacuagagagggagggggaagagcagaaguu

SEQ ID NO: 433507 - RNA, 17 nt, Human
gcacuagagcuaaauca

SEQ ID NO: 433508 - RNA, 22 nt, Human
gcacuagcaacauuuggcuaua

SEQ ID NO: 433509 - RNA, 28 nt, Human
gcacuagcaagugcugccuaugcugaga

SEQ ID NO: 433510 - RNA, 32 nt, Human
gcacuagccaaaccucaccaacuccuaguucu

SEQ ID NO: 433511 - RNA, 32 nt, Human
gcacuaggacagggauagccugggccauggag

SEQ ID NO: 433512 - RNA, 32 nt, Human
gcacuaggaucucuggucuacaguggagggag

SEQ ID NO: 433513 - RNA, 32 nt, Human
gcacuagggauaguaacaguaccaccucguag

SEQ ID NO: 433514 - RNA, 32 nt, Human
gcacuagucaccgacagcggccuugaagacag

SEQ ID NO: 433515 - RNA, 18 nt, Human
gcacuaguuuuaaaguca

SEQ ID NO: 433516 - RNA, 18 nt, Human
gcacuauaagaaaaguua

SEQ ID NO: 433517 - RNA, 16 nt, Human
gcacuauacccuguca

SEQ ID NO: 433518 - RNA, 18 nt, Human
gcacuauacugggaguca

SEQ ID NO: 433519 - RNA, 19 nt, Human
gcacuauagagucaaguca

SEQ ID NO: 433520 - RNA, 19 nt, Human
gcacuauagcacucaagca

SEQ ID NO: 433521 - RNA, 18 nt, Human
gcacuauauauaaaguua

SEQ ID NO: 433522 - RNA, 16 nt, Human
gcacuauaucauaguc

SEQ ID NO: 433523 - RNA, 17 nt, Human
gcacuauauucuaguca

SEQ ID NO: 433524 - RNA, 32 nt, Human
gcacuauauugguaauucuuacaauggcauua

SEQ ID NO: 433525 - RNA, 32 nt, Human
gcacuaucacccaggcuggagugcaguggcau

SEQ ID NO: 433526 - RNA, 32 nt, Human
gcacuaucacugcaaccuccgccuccuggguu

SEQ ID NO: 433527 - RNA, 32 nt, Human
gcacuaucauacacacuggcugagaacuggaa

SEQ ID NO: 433528 - RNA, 32 nt, Human
gcacuaucucagcucacugcaaccuccgccuc

SEQ ID NO: 433529 - RNA, 24 nt, Human
gcacuauggcucacaccuauaauc

SEQ ID NO: 433530 - RNA, 32 nt, Human
gcacuaugggaccugcaucuccauuccuacua

SEQ ID NO: 433531 - RNA, 32 nt, Human
gcacuaugggaggccgcugcugcguggagcac

SEQ ID NO: 433532 - RNA, 32 nt, Human
gcacuauguaaauacuaguggggauucuucug

SEQ ID NO: 433533 - RNA, 32 nt, Human
gcacuauuacugcuaacguuugagugccagcu

SEQ ID NO: 433534 - RNA, 32 nt, Human
gcacuauucaaaucuacagaaaaugcucucuc

SEQ ID NO: 433535 - RNA, 25 nt, Human
gcacuauugcaaaacggguguauua

SEQ ID NO: 433536 - RNA, 32 nt, Human
gcacuauugcacuccagccugggcaacaggag

SEQ ID NO: 433537 - RNA, 32 nt, Human
gcacuauugcagcuccaguuuccugcagugau

SEQ ID NO: 433538 - RNA, 22 nt, Human
gcacucaaacauaacugugcuu

SEQ ID NO: 433539 - RNA, 32 nt, Human
gcacucaaagcccacugcggaagagggcagcc

SEQ ID NO: 433540 - RNA, 32 nt, Human
gcacucaacaugagucaagagcauccugcuuc

SEQ ID NO: 433541 - RNA, 24 nt, Human
gcacucaagccugagcaauaagaa

SEQ ID NO: 433542 - RNA, 32 nt, Human
gcacucaagccuggcgacagagcgagacuccg

SEQ ID NO: 433543 - RNA, 24 nt, Human
gcacucaagccugggcaauaagaa

SEQ ID NO: 433544 - RNA, 32 nt, Human
gcacucaagccuggugacagagcgaaacuccg

SEQ ID NO: 433545 - RNA, 32 nt, Human
gcacucaagccuugccaccgccgagccgggcu

SEQ ID NO: 433546 - RNA, 32 nt, Human
gcacucaaugcuggaaucaaauccaaagcuuu

SEQ ID NO: 433547 - RNA, 32 nt, Human
gcacucaccccucgcgcaccagucccggcccg

SEQ ID NO: 433548 - RNA, 32 nt, Human
gcacucacugcacauugcccaugugggcagcg

SEQ ID NO: 433549 - RNA, 32 nt, Human
gcacucacuucugcuucuggccaggccguagu

SEQ ID NO: 433550 - RNA, 31 nt, Human
gcacucagacaaugccuucuccauuacuuga

SEQ ID NO: 433551 - RNA, 32 nt, Human
gcacucagcacagugccuuguguauaauaggc

SEQ ID NO: 433552 - RNA, 32 nt, Human
gcacucagcaucaccccuuccuggguggcaug

SEQ ID NO: 433553 - RNA, 23 nt, Human
gcacucagcccugcccugugcag

SEQ ID NO: 433554 - RNA, 32 nt, Human
gcacucagccgcccugcccuguccucguggug

SEQ ID NO: 433555 - RNA, 32 nt, Human
gcacucagccugggugacagagcaagacuccg

SEQ ID NO: 433556 - RNA, 32 nt, Human
gcacucagcgccgaaauguccucugcaccaau

SEQ ID NO: 433557 - RNA, 20 nt, Human
gcacucaggaccacagggca

SEQ ID NO: 433558 - RNA, 32 nt, Human
gcacucaggcuggagugcagugguacgaucuu

SEQ ID NO: 433559 - RNA, 32 nt, Human
gcacucagggugggggacagcaggaucaagac

SEQ ID NO: 433560 - RNA, 32 nt, Human
gcacucaggguugaguggaguggagggaggag

SEQ ID NO: 433561 - RNA, 32 nt, Human
gcacucagguggccucgcuucccugcggguca

SEQ ID NO: 433562 - RNA, 32 nt, Human
gcacucaguguucugccucuggcagcugugcu

SEQ ID NO: 433563 - RNA, 32 nt, Human
gcacucaguucucagccuccuuccucaugccu

SEQ ID NO: 433564 - RNA, 32 nt, Human
gcacucaucaaaauguacuaauggguacucug

SEQ ID NO: 433565 - RNA, 32 nt, Human
gcacucaucugacagaaucccugaguuacagu

SEQ ID NO: 433566 - RNA, 32 nt, Human
gcacucauggccagugcuuuccaguaucuuga

SEQ ID NO: 433567 - RNA, 32 nt, Human
gcacucauggcccucucugcucugcuucuccu

SEQ ID NO: 433568 - RNA, 32 nt, Human
gcacucauuaaagugcaucacagccagagccu

SEQ ID NO: 433569 - RNA, 32 nt, Human
gcacucauuuccuccagggaacagugaaaugu

SEQ ID NO: 433570 - RNA, 23 nt, Human
gcacuccaaccuagguaacagag

SEQ ID NO: 433571 - RNA, 23 nt, Human
gcacuccaaccuggacaacagag

SEQ ID NO: 433572 - RNA, 23 nt, Human
gcacuccaaccuggacgacagag

SEQ ID NO: 433573 - RNA, 24 nt, Human
gcacuccaaccugggcaacaagag

SEQ ID NO: 433574 - RNA, 23 nt, Human
gcacuccaaccugggcaacagaa

SEQ ID NO: 433575 - RNA, 23 nt, Human
gcacuccaaccugggcaacagag

SEQ ID NO: 433576 - RNA, 32 nt, Human
gcacuccaaccugggcaacagagcaagacucg

SEQ ID NO: 433577 - RNA, 24 nt, Human
gcacuccaaccugggcaauaagag

SEQ ID NO: 433578 - RNA, 23 nt, Human
gcacuccaaccugggcagcagag

SEQ ID NO: 433579 - RNA, 20 nt, Human
gcacuccaaccugggcgaca

SEQ ID NO: 433580 - RNA, 23 nt, Human
gcacuccaaccugggcgacagag

SEQ ID NO: 433581 - RNA, 24 nt, Human
gcacuccaaccugggugacaagag

SEQ ID NO: 433582 - RNA, 23 nt, Human
gcacuccaaccugggugacagag

SEQ ID NO: 433583 - RNA, 22 nt, Human
gcacuccaaccugggugacgag

SEQ ID NO: 433584 - RNA, 23 nt, Human
gcacuccaaccugggugagagag

SEQ ID NO: 433585 - RNA, 32 nt, Human
gcacuccaaucuggcaacagagcgagaccuug

SEQ ID NO: 433586 - RNA, 32 nt, Human
gcacuccacacuccagccugagcaacaagagc

SEQ ID NO: 433587 - RNA, 32 nt, Human
gcacuccacccugggcaacagagcaagacccc

SEQ ID NO: 433588 - RNA, 32 nt, Human
gcacuccacccugggcaacagagcaagacucc

SEQ ID NO: 433589 - RNA, 32 nt, Human
gcacuccacccugggcgacagagcaagauucu

SEQ ID NO: 433590 - RNA, 23 nt, Human
gcacuccacucugggcaacagaa

SEQ ID NO: 433591 - RNA, 32 nt, Human
gcacuccacugcagcaggagggacuuaagcua

SEQ ID NO: 433592 - RNA, 32 nt, Human
gcacuccagacugggggagagagcaagacucu

SEQ ID NO: 433593 - RNA, 32 nt, Human
gcacuccagacuggugacggagcgagacgcug

SEQ ID NO: 433594 - RNA, 32 nt, Human
gcacuccagcacuccagccugggugacagagc

SEQ ID NO: 433595 - RNA, 32 nt, Human
gcacuccagccagagugacagagcaagacucc

SEQ ID NO: 433596 - RNA, 23 nt, Human
gcacuccagcccaggcaacagag

SEQ ID NO: 433597 - RNA, 23 nt, Human
gcacuccagcccaggcaauagag

SEQ ID NO: 433598 - RNA, 21 nt, Human
gcacuccagcccaggggacaa

SEQ ID NO: 433599 - RNA, 23 nt, Human
gcacuccagcccagguaacagag

SEQ ID NO: 433600 - RNA, 23 nt, Human
gcacuccagcccaggugacagag

SEQ ID NO: 433601 - RNA, 32 nt, Human
gcacuccagcccaggugacagagcaagacucc

SEQ ID NO: 433602 - RNA, 32 nt, Human
gcacuccagcccagguuacagagcaagggccu

SEQ ID NO: 433603 - RNA, 23 nt, Human
gcacuccagcccgagugacagaa

SEQ ID NO: 433604 - RNA, 32 nt, Human
gcacuccagcccggaugacagagcaagacucu

SEQ ID NO: 433605 - RNA, 20 nt, Human
gcacuccagcccgggcgaca

SEQ ID NO: 433606 - RNA, 23 nt, Human
gcacuccagcccgggcgacagag

SEQ ID NO: 433607 - RNA, 32 nt, Human
gcacuccagcccggggacagagcaagacacug

SEQ ID NO: 433608 - RNA, 21 nt, Human
gcacuccagcccgggugacaa

SEQ ID NO: 433609 - RNA, 23 nt, Human
gcacuccagcccgggugacagag

SEQ ID NO: 433610 - RNA, 32 nt, Human
gcacuccagcccgggugacagagcaagacucc

SEQ ID NO: 433611 - RNA, 32 nt, Human
gcacuccagccggggcaacagagcaagacucu

SEQ ID NO: 433612 - RNA, 27 nt, Human
gcacuccagccuaagcaaauagcaaga

SEQ ID NO: 433613 - RNA, 23 nt, Human
gcacuccagccuaagcaacagag

SEQ ID NO: 433614 - RNA, 23 nt, Human
gcacuccagccuagacaacaggg

SEQ ID NO: 433615 - RNA, 32 nt, Human
gcacuccagccuagacgacagagcaagacuau

SEQ ID NO: 433616 - RNA, 24 nt, Human
gcacuccagccuaggcaacaagag

SEQ ID NO: 433617 - RNA, 23 nt, Human
gcacuccagccuaggcaacagag

SEQ ID NO: 433618 - RNA, 24 nt, Human
gcacuccagccuaggcaauaagag

SEQ ID NO: 433619 - RNA, 25 nt, Human
gcacuccagccuaggcauggugaga

SEQ ID NO: 433620 - RNA, 23 nt, Human
gcacuccagccuaggcgacagag

SEQ ID NO: 433621 - RNA, 23 nt, Human
gcacuccagccuaggugacagag

SEQ ID NO: 433622 - RNA, 32 nt, Human
gcacuccagccuaggugacagagcaagacucu

SEQ ID NO: 433623 - RNA, 23 nt, Human
gcacuccagccuaggugauagag

SEQ ID NO: 433624 - RNA, 24 nt, Human
gcacuccagccucagcaacaagag

SEQ ID NO: 433625 - RNA, 32 nt, Human
gcacuccagccugaagacagagcaaggcucca

SEQ ID NO: 433626 - RNA, 20 nt, Human
gcacuccagccugacgacaa

SEQ ID NO: 433627 - RNA, 21 nt, Human
gcacuccagccugagcaacaa

SEQ ID NO: 433628 - RNA, 23 nt, Human
gcacuccagccugagcaacagag

SEQ ID NO: 433629 - RNA, 32 nt, Human
gcacuccagccugagcaacagagcaagacucu

SEQ ID NO: 433630 - RNA, 23 nt, Human
gcacuccagccugagcgacagag

SEQ ID NO: 433631 - RNA, 23 nt, Human
gcacuccagccugagugacagaa

SEQ ID NO: 433632 - RNA, 23 nt, Human
gcacuccagccugagugacagag

SEQ ID NO: 433633 - RNA, 22 nt, Human
gcacuccagccugaugacagag

SEQ ID NO: 433634 - RNA, 32 nt, Human
gcacuccagccugaugacagagcaagacucag

SEQ ID NO: 433635 - RNA, 24 nt, Human
gcacuccagccugcacaacaagag

SEQ ID NO: 433636 - RNA, 21 nt, Human
gcacuccagccugcgugacaa

SEQ ID NO: 433637 - RNA, 21 nt, Human
gcacuccagccuggaaaacaa

SEQ ID NO: 433638 - RNA, 23 nt, Human
gcacuccagccuggaaggcagag

SEQ ID NO: 433639 - RNA, 24 nt, Human
gcacuccagccuggacaacaagag

SEQ ID NO: 433640 - RNA, 23 nt, Human
gcacuccagccuggacaacagag

SEQ ID NO: 433641 - RNA, 32 nt, Human
gcacuccagccuggacaacagagcaagaccuu

SEQ ID NO: 433642 - RNA, 32 nt, Human
gcacuccagccuggacaacagagcaagacucc

SEQ ID NO: 433643 - RNA, 23 nt, Human
gcacuccagccuggacaacggag

SEQ ID NO: 433644 - RNA, 24 nt, Human
gcacuccagccuggacagcaggag

SEQ ID NO: 433645 - RNA, 23 nt, Human
gcacuccagccuggacgacagag

SEQ ID NO: 433646 - RNA, 32 nt, Human
gcacuccagccuggacgacagagcaagacuca

SEQ ID NO: 433647 - RNA, 23 nt, Human
gcacuccagccuggaggccagag

SEQ ID NO: 433648 - RNA, 24 nt, Human
gcacuccagccuggaugacaagag

SEQ ID NO: 433649 - RNA, 23 nt, Human
gcacuccagccuggaugacagag

SEQ ID NO: 433650 - RNA, 32 nt, Human
gcacuccagccuggaugacagagcaagacucu

SEQ ID NO: 433651 - RNA, 23 nt, Human
gcacuccagccuggaugacggga

SEQ ID NO: 433652 - RNA, 23 nt, Human
gcacuccagccuggaugauagag

SEQ ID NO: 433653 - RNA, 32 nt, Human
gcacuccagccuggcaacagagcgagacucca

SEQ ID NO: 433654 - RNA, 21 nt, Human
gcacuccagccuggcagucag

SEQ ID NO: 433655 - RNA, 21 nt, Human
gcacuccagccuggccaauaa

SEQ ID NO: 433656 - RNA, 32 nt, Human
gcacuccagccuggccacagagcgagacucca

SEQ ID NO: 433657 - RNA, 32 nt, Human
gcaggacuccggcacuaugagcggcuucagca

SEQ ID NO: 433658 - RNA, 32 nt, Human
gcaggacucggguggcucugaggucgccuggg

SEQ ID NO: 433659 - RNA, 21 nt, Human
gcaggacugaccccgggcugc

SEQ ID NO: 433660 - RNA, 32 nt, Human
gcaggacugcaacuggcgucuccaucuacugg

SEQ ID NO: 433661 - RNA, 32 nt, Human
gcaggacugccuggcccacccaugguugcagg

SEQ ID NO: 433662 - RNA, 32 nt, Human
gcaggacugccugggcccugcuaggccugcuc

SEQ ID NO: 433663 - RNA, 32 nt, Human
gcaggacugcgccguccgccucgaauucgggg

SEQ ID NO: 433664 - RNA, 32 nt, Human
gcaggacuggaagcuggcucugggugagucag

SEQ ID NO: 433665 - RNA, 25 nt, Human
gcaggacuggaggccuguggcgguc

SEQ ID NO: 433666 - RNA, 32 nt, Human
gcaggacugggcagaucccaggcugggcaugg

SEQ ID NO: 433667 - RNA, 22 nt, Human
gcaggacuguaaacuggauucc

SEQ ID NO: 433668 - RNA, 21 nt, Human
gcaggacuucugcaguccuca

SEQ ID NO: 433669 - RNA, 22 nt, Human
gcaggacuugacaagggcaagc

SEQ ID NO: 433670 - RNA, 18 nt, Human
gcaggacuugaguucuca

SEQ ID NO: 433671 - RNA, 32 nt, Human
gcaggacuugcagacuggccaggggcugcagg

SEQ ID NO: 433672 - RNA, 32 nt, Human
gcaggagaaaagugugaacccaggaggcggag

SEQ ID NO: 433673 - RNA, 19 nt, Human
gcaggagaaccgcuugaac

SEQ ID NO: 433674 - RNA, 32 nt, Human
gcaggagaagacagacugcugcuuuggaccug

SEQ ID NO: 433675 - RNA, 32 nt, Human
gcaggagaaggagacuugggaggcagcgaugg

SEQ ID NO: 433676 - RNA, 32 nt, Human
gcaggagaaggguggagaggaggcaggggccg

SEQ ID NO: 433677 - RNA, 32 nt, Human
gcaggagaauagugugaacccaggaggcggag

SEQ ID NO: 433678 - RNA, 24 nt, Human
gcaggagaaucaccugaacccagg

SEQ ID NO: 433679 - RNA, 32 nt, Human
gcaggagaaucaccugaacccaggaggcagag

SEQ ID NO: 433680 - RNA, 19 nt, Human
gcaggagaaucacuugaac

SEQ ID NO: 433681 - RNA, 32 nt, Human
gcaggagaaucacuugaacccaggaagcggag

SEQ ID NO: 433682 - RNA, 32 nt, Human
gcaggagaaucacuugaacccaggaaguggag

SEQ ID NO: 433683 - RNA, 32 nt, Human
gcaggagaaucacuugaacccaggaggcagag

SEQ ID NO: 433684 - RNA, 32 nt, Human
gcaggagaaucacuugaacccaggaggcagcu

SEQ ID NO: 433685 - RNA, 32 nt, Human
gcaggagaaucacuugaacccaggaggcggag

SEQ ID NO: 433686 - RNA, 32 nt, Human
gcaggagaaucacuugaacccaggagguagag

SEQ ID NO: 433687 - RNA, 32 nt, Human
gcaggagaaucacuugaacccaggagguggag

SEQ ID NO: 433688 - RNA, 32 nt, Human
gcaggagaaucacuugaacccaggaggugggc

SEQ ID NO: 433689 - RNA, 32 nt, Human
gcaggagaaucacuugaacccaggagguggug

SEQ ID NO: 433690 - RNA, 32 nt, Human
gcaggagaaucacuugaacccaggagguguug

SEQ ID NO: 433691 - RNA, 24 nt, Human
gcaggagaaucacuugagaccagg

SEQ ID NO: 433692 - RNA, 32 nt, Human
gcaggagaaucacuugagcccaggaaguggag

SEQ ID NO: 433693 - RNA, 32 nt, Human
gcaggagaaucagagguugcagugaaccgaga

SEQ ID NO: 433694 - RNA, 19 nt, Human
gcaggagaaucccuugaac

SEQ ID NO: 433695 - RNA, 32 nt, Human
gcaggagaaucgcaugaacccgggaggugcag

SEQ ID NO: 433696 - RNA, 32 nt, Human
gcaggagaaucgccugaacccaggaagcagau

SEQ ID NO: 433697 - RNA, 19 nt, Human
gcaggagaaucgcgugaac

SEQ ID NO: 433698 - RNA, 32 nt, Human
gcaggagaaucgcgugaacccaggaggcggag

SEQ ID NO: 433699 - RNA, 32 nt, Human
gcaggagaaucgcgugaacccaggaggcggcg

SEQ ID NO: 433700 - RNA, 19 nt, Human
gcaggagaaucgcuucaac

SEQ ID NO: 433701 - RNA, 18 nt, Human
gcaggagaaucgcuugaa

SEQ ID NO: 433702 - RNA, 19 nt, Human
gcaggagaaucgcuugaac

SEQ ID NO: 433703 - RNA, 32 nt, Human
gcaggagaaucgcuugaacccaggaagcagug

SEQ ID NO: 433704 - RNA, 19 nt, Human
gcaggagaaucgcuugagc

SEQ ID NO: 433705 - RNA, 32 nt, Human
gcaggagaaucguuugaacccaggaggcggag

SEQ ID NO: 433706 - RNA, 32 nt, Human
gcaggagaaucguuugaacccaggaggcugag

SEQ ID NO: 433707 - RNA, 19 nt, Human
gcaggagaaucucuugaac

SEQ ID NO: 433708 - RNA, 32 nt, Human
gcaggagaaugacaugaacccaggaggcggag

SEQ ID NO: 433709 - RNA, 32 nt, Human
gcaggagaaugagacuccagcacagucauucc

SEQ ID NO: 433710 - RNA, 32 nt, Human
gcaggagaauggcauaaacccaggaggccgag

SEQ ID NO: 433711 - RNA, 32 nt, Human
gcaggagaauggcaugaacccaggaggcagag

SEQ ID NO: 433712 - RNA, 32 nt, Human
gcaggagaauggcaugaacccggaaggcagag

SEQ ID NO: 433713 - RNA, 32 nt, Human
gcaggagaauggcaugaacccgggaggcagag

SEQ ID NO: 433714 - RNA, 32 nt, Human
gcaggagaauggcaugaacccgggaggcggaa

SEQ ID NO: 433715 - RNA, 32 nt, Human
gcaggagaauggcaugaacccgggaggcggag

SEQ ID NO: 433716 - RNA, 32 nt, Human
gcaggagaauggcaugaacccgggaggcggau

SEQ ID NO: 433717 - RNA, 32 nt, Human
gcaggagaauggcaugaacccgggagguagag

SEQ ID NO: 433718 - RNA, 32 nt, Human
gcaggagaauggcaugaacccgggagguggag

SEQ ID NO: 433719 - RNA, 32 nt, Human
gcaggagaauggcgugaacccaggaggaggag

SEQ ID NO: 433720 - RNA, 32 nt, Human
gcaggagaauggcgugaacccaggaggcagag

SEQ ID NO: 433721 - RNA, 32 nt, Human
gcaggagaauggcgugaacccaggaggcggag

SEQ ID NO: 433722 - RNA, 32 nt, Human
gcaggagaauggcgugaacccaggaggcguag

SEQ ID NO: 433723 - RNA, 32 nt, Human
gcaggagaauggcgugaacccaggagguggag

SEQ ID NO: 433724 - RNA, 32 nt, Human
gcaggagaauggcuugaacccaggagguggag

SEQ ID NO: 433725 - RNA, 32 nt, Human
gcaggagaauggugugaacccaggaggcacag

SEQ ID NO: 433726 - RNA, 32 nt, Human
gcaggagaauggugugaacccaggaggcagag

SEQ ID NO: 433727 - RNA, 32 nt, Human
gcaggagaaugguguggacccaggaggcagag

SEQ ID NO: 433728 - RNA, 32 nt, Human
gcaggagaauucuuugaacccaggaggcagag

SEQ ID NO: 433729 - RNA, 32 nt, Human
gcaggagaauugcaugaacccgggaggaggag

SEQ ID NO: 433730 - RNA, 32 nt, Human
gcaggagaauugcaugaacccgggaggcggag

SEQ ID NO: 433731 - RNA, 32 nt, Human
gcaggagaauugccugaacccaggaagaggag

SEQ ID NO: 433732 - RNA, 19 nt, Human
gcaggagaauugcuugaac

SEQ ID NO: 433733 - RNA, 32 nt, Human
gcaggagaauugcuugaacccaggaagcagag

SEQ ID NO: 433734 - RNA, 32 nt, Human
gcaggagaauugcuugaacccaggaagcggag

SEQ ID NO: 433735 - RNA, 32 nt, Human
gcaggagaauugcuugaacccaggaaguggca

SEQ ID NO: 433736 - RNA, 32 nt, Human
gcaggagaauugcuugagccugggagauggag

SEQ ID NO: 433737 - RNA, 32 nt, Human
gcaggagaauuguuugaacccaggaggcacag

SEQ ID NO: 433738 - RNA, 32 nt, Human
gcaggagaauuguuugaacccaggagguggac

SEQ ID NO: 433739 - RNA, 18 nt, Human
gcaggagacagcauguca

SEQ ID NO: 433740 - RNA, 32 nt, Human
gcaggagacccagaaagcagugcagugcagcu

SEQ ID NO: 433741 - RNA, 32 nt, Human
gcaggagaccccaggcccuggaggcugcaaca

SEQ ID NO: 433742 - RNA, 32 nt, Human
gcaggagacucgcuugaaccugggaggcagag

SEQ ID NO: 433743 - RNA, 32 nt, Human
gcaggagagaaaacucccucaaagucauaaau

SEQ ID NO: 433744 - RNA, 21 nt, Human
gcaggagagaaucgcuugaac

SEQ ID NO: 433745 - RNA, 18 nt, Human
gcaggagagacugagcag

SEQ ID NO: 433746 - RNA, 32 nt, Human
gcaggagagagggagggaaggucuguccaucc

SEQ ID NO: 433747 - RNA, 32 nt, Human
gcaggagagcagugaggagcugcugugugacc

SEQ ID NO: 433748 - RNA, 32 nt, Human
gcaggagagccuguccugccuccaguccaccu

SEQ ID NO: 433749 - RNA, 32 nt, Human
gcaggagaggaaagaccugcagcucuucuagu

SEQ ID NO: 433750 - RNA, 22 nt, Human
gcaggagaggaaugcagaccug

SEQ ID NO: 433751 - RNA, 32 nt, Human
gcaggagaggauccccgaccacccuagggaaa

SEQ ID NO: 433752 - RNA, 32 nt, Human
gcaggagaggaugugggggcuccacccgauca

SEQ ID NO: 433753 - RNA, 20 nt, Human
gcaggagaggccccccagca

SEQ ID NO: 433754 - RNA, 16 nt, Human
gcaggagaggcugcug

SEQ ID NO: 433755 - RNA, 19 nt, Human
gcaggagagggaaaggcag

SEQ ID NO: 433756 - RNA, 32 nt, Human
gcaggagaggggcauuuggaggcucccucccu

SEQ ID NO: 433757 - RNA, 32 nt, Human
gcaggagaguagcuggagaugaggcaggagag

SEQ ID NO: 433758 - RNA, 19 nt, Human
gcaggagagucgcuugaac

SEQ ID NO: 433759 - RNA, 32 nt, Human
gcaggagaguugcuugaacugaggagaugaag

SEQ ID NO: 433760 - RNA, 32 nt, Human
gcaggagaugcugcaggauaagggccuguccg

SEQ ID NO: 433761 - RNA, 32 nt, Human
gcaggagauguggugugcuguugcaaaguuuu

SEQ ID NO: 433762 - RNA, 32 nt, Human
gcaggagauucaccuuccccagucccagggga

SEQ ID NO: 433763 - RNA, 32 nt, Human
gcaggagauucgcuugaaccugggaggcugaa

SEQ ID NO: 433764 - RNA, 32 nt, Human
gcaggagcacguggagaggccggguagccaca

SEQ ID NO: 433765 - RNA, 32 nt, Human
gcaggagcagagccaggugggcccuggacauu

SEQ ID NO: 433766 - RNA, 32 nt, Human
gcaggagcagaggaaggcagacacccacaaga

SEQ ID NO: 433767 - RNA, 32 nt, Human
gcaggagcagcuguugugcacugugagguuga

SEQ ID NO: 433768 - RNA, 32 nt, Human
gcaggagcaggagaacuaaggaagggaaaagg

SEQ ID NO: 433769 - RNA, 32 nt, Human
gcaggagcaggaggccagaggagagugugagu

SEQ ID NO: 433770 - RNA, 32 nt, Human
gcaggagcagucgccuuucccacccacagcgc

SEQ ID NO: 433771 - RNA, 32 nt, Human
gcaggagcagugacuuucuucccacugugugu

SEQ ID NO: 433772 - RNA, 32 nt, Human
gcaggagcaguggaugaaugucuguguuggug

SEQ ID NO: 433773 - RNA, 24 nt, Human
gcaggagcaucacccagagagcag

SEQ ID NO: 433774 - RNA, 32 nt, Human
gcaggagccagagggcagcccagcuccaggua

SEQ ID NO: 433775 - RNA, 32 nt, Human
gcaggagccccacugcuuccagccucuggugc

SEQ ID NO: 433776 - RNA, 21 nt, Human
gcaggagcccggcguggagga

SEQ ID NO: 433777 - RNA, 32 nt, Human
gcaggagcccucucauggugaacagcaacuau

SEQ ID NO: 433778 - RNA, 18 nt, Human
gcaggagccugcaggaga

SEQ ID NO: 433779 - RNA, 32 nt, Human
gcaggagccugggaaagaggcccucgccaggu

SEQ ID NO: 433780 - RNA, 32 nt, Human
gcaggagcggagccccgagggagcgcgggccc

SEQ ID NO: 433781 - RNA, 22 nt, Human
gcaggagcggcggcagcagcga

SEQ ID NO: 433782 - RNA, 17 nt, Human
gcaggagcgucauggcc

SEQ ID NO: 433783 - RNA, 32 nt, Human
gcaggagcuauccugacuuaauauccaguugu

SEQ ID NO: 433784 - RNA, 21 nt, Human
gcaggagcucacgcugggagg

SEQ ID NO: 433785 - RNA, 23 nt, Human
gcaggagcuccgcgcggcugcag

SEQ ID NO: 433786 - RNA, 32 nt, Human
gcaggagcuccuggugccacaggugggguggg

SEQ ID NO: 433787 - RNA, 32 nt, Human
gcaggagcugaaaaccagaaguugaggcguga

SEQ ID NO: 433788 - RNA, 32 nt, Human
gcaggagcugcagcucugccagcuugggccga

SEQ ID NO: 433789 - RNA, 32 nt, Human
gcaggagcugcggcgccaagaugaguggagag

SEQ ID NO: 433790 - RNA, 21 nt, Human
gcaggagcuggcgcugggagg

SEQ ID NO: 433791 - RNA, 32 nt, Human
gcaggagcuguucugggcagccuucaucccgc

SEQ ID NO: 433792 - RNA, 18 nt, Human
gcaggagcuucuguggga

SEQ ID NO: 433793 - RNA, 32 nt, Human
gcaggaggaaagcacagcugagcccagcugcu

SEQ ID NO: 433794 - RNA, 32 nt, Human
gcaggaggaagacagccaccagcggcugcuca

SEQ ID NO: 433795 - RNA, 32 nt, Human
gcaggaggaccucacccacacccauggcaaag

SEQ ID NO: 433796 - RNA, 32 nt, Human
gcaggaggacgaggcagggcgggcgggcgcuc

SEQ ID NO: 433797 - RNA, 27 nt, Human
gcaggaggacuauguccuuugaugcua

SEQ ID NO: 433798 - RNA, 19 nt, Human
gcaggaggaggaagagcgg

SEQ ID NO: 433799 - RNA, 32 nt, Human
gcaggaggaggcggaggcggggguacgacggg

SEQ ID NO: 433800 - RNA, 24 nt, Human
gcaggaggaucaccugaggucagg

SEQ ID NO: 433801 - RNA, 24 nt, Human
gcaggaggaucaccuuaggucagg

SEQ ID NO: 433802 - RNA, 32 nt, Human
gcaggaggaucaccuuaggucaggaguucgag

SEQ ID NO: 433803 - RNA, 32 nt, Human
gcaggaggaucacgaggucagaagaucgagac

SEQ ID NO: 433804 - RNA, 24 nt, Human
gcaggaggaucacucaaggccagg

SEQ ID NO: 433805 - RNA, 24 nt, Human
gcaggaggaucacuuaaggccagg

SEQ ID NO: 433806 - RNA, 24 nt, Human
gcaggaggaucacuugagaccagg

SEQ ID NO: 433807 - RNA, 32 nt, Human
gcaggaggaucacuugagcuuaggaguuugag

SEQ ID NO: 433808 - RNA, 32 nt, Human
gcaggaggaucacuugagcuugggaguucaag

SEQ ID NO: 433809 - RNA, 24 nt, Human
gcaggaggaucacuugaggccagg

SEQ ID NO: 433810 - RNA, 22 nt, Human
gcaggaggaucacuugagguca

SEQ ID NO: 433811 - RNA, 24 nt, Human
gcaggaggaucacuugaggucagg

SEQ ID NO: 433812 - RNA, 32 nt, Human
gcaggaggaucauuugagcucaugagggccca

SEQ ID NO: 433813 - RNA, 19 nt, Human
gcaggaggaucgcuugaac

SEQ ID NO: 433814 - RNA, 32 nt, Human
gcaggaggaucgcuugaacccaggaagcagag

SEQ ID NO: 433815 - RNA, 32 nt, Human
gcaggaggaucgcuugaacccaggaaguggag

SEQ ID NO: 433816 - RNA, 32 nt, Human
gcaggaggaucguuugagcucaggagguuggg

SEQ ID NO: 433817 - RNA, 32 nt, Human
gcaggaggaucucuugagcccaggaggucaag

SEQ ID NO: 433818 - RNA, 32 nt, Human
gcaggaggaucucuugagcccaggaguuugag

SEQ ID NO: 433819 - RNA, 32 nt, Human
gcaggaggaucucuugagcccaggauuuugaa

SEQ ID NO: 433820 - RNA, 32 nt, Human
gcaggaggaucucuugaggccaggaguugcag

SEQ ID NO: 433821 - RNA, 32 nt, Human
gcaggaggaugggguagcacucacagggacga

SEQ ID NO: 433822 - RNA, 32 nt, Human
gcaggaggauggugccuggacaacccuccacc

SEQ ID NO: 433823 - RNA, 32 nt, Human
gcaggaggauugcuugagcucaggaguucaag

SEQ ID NO: 433824 - RNA, 32 nt, Human
gcaggaggcacagaaaacuccugcugaugguc

SEQ ID NO: 433825 - RNA, 21 nt, Human
gcaggaggcauccaaaggcuc

SEQ ID NO: 433826 - RNA, 32 nt, Human
gcaggaggccaagaagagcuagggagggugca

SEQ ID NO: 433827 - RNA, 32 nt, Human
gcaggaggccaaggcaggagaaucacuugaac

SEQ ID NO: 433828 - RNA, 32 nt, Human
gcaggaggcccaggccaaguaccaagggcaaa

SEQ ID NO: 433829 - RNA, 32 nt, Human
gcaggaggccucagcagagaucaccaagaccc

SEQ ID NO: 433830 - RNA, 32 nt, Human
gcaggaggcuaaucccacaagaaggguagcau

SEQ ID NO: 433831 - RNA, 32 nt, Human
gcaggaggcuacaguucucccuaaggauggug

SEQ ID NO: 433832 - RNA, 32 nt, Human
gcaggaggcucagcauacaucaggaggucugc

SEQ ID NO: 433833 - RNA, 20 nt, Human
gcaggaggcugaggcugcag

SEQ ID NO: 433834 - RNA, 32 nt, Human
gcaggaggcuggauccuagccccugggaucug

SEQ ID NO: 433835 - RNA, 32 nt, Human
gcaggaggcuuucugggcucuggacuccacgg

SEQ ID NO: 433836 - RNA, 32 nt, Human
gcaggagggaaacacacuucacacaacaggcu

SEQ ID NO: 433837 - RNA, 32 nt, Human
gcaggagggaagggcaucuggggaagggcagg

SEQ ID NO: 433838 - RNA, 32 nt, Human
gcaggagggaccaaggcugggcccagaacaca

SEQ ID NO: 433839 - RNA, 32 nt, Human
gcaggagggacugaggcccucuaggaggaaag

SEQ ID NO: 433840 - RNA, 20 nt, Human
gcaggagggauggcuggggc

SEQ ID NO: 433841 - RNA, 32 nt, Human
gcaggagggcaggaguugggggagcaggaggg

SEQ ID NO: 433842 - RNA, 32 nt, Human
gcaggagggcaggcgagacaaggagggugucc

SEQ ID NO: 433843 - RNA, 23 nt, Human
gcaggagggcaugugcagacacu

SEQ ID NO: 433844 - RNA, 32 nt, Human
gcaggagggcccuaccugauuggugcaacccu

SEQ ID NO: 433845 - RNA, 32 nt, Human
gcaggagggcccucagcuccuagggcugucga

SEQ ID NO: 433846 - RNA, 22 nt, Human
gcaggagggcccucagcuguga

SEQ ID NO: 433847 - RNA, 32 nt, Human
gcaggaggggagaagagaguaggaaaaaggag

SEQ ID NO: 433848 - RNA, 21 nt, Human
gcaggagggggcccugaggca

SEQ ID NO: 433849 - RNA, 32 nt, Human
gcaggagggucucuugagcccaggaguuugag

SEQ ID NO: 433850 - RNA, 32 nt, Human
gcaggaggguuacuugagcccaggaagucaag

SEQ ID NO: 433851 - RNA, 32 nt, Human
gcaggaggguuagagugaguaguaagagaugc

SEQ ID NO: 433852 - RNA, 32 nt, Human
gcaggagguccaggcuauagagucaggcacug

SEQ ID NO: 433853 - RNA, 32 nt, Human
gcaggagguccucagaaggugucaggagguuc

SEQ ID NO: 433854 - RNA, 20 nt, Human
gcaggagguggagcggcaga

SEQ ID NO: 433855 - RNA, 23 nt, Human
gcaggagguggcagcggcagcag

SEQ ID NO: 433856 - RNA, 32 nt, Human
gcaggagguggccccugcccucccucuggacc

SEQ ID NO: 433857 - RNA, 21 nt, Human
gcaggaggugggagugaggag

SEQ ID NO: 433858 - RNA, 23 nt, Human
gcaggaggugggggaagagcuga

SEQ ID NO: 433859 - RNA, 21 nt, Human
gcaggaggugggggagacaca

SEQ ID NO: 433860 - RNA, 32 nt, Human
gcaggaggugguggaaacggggugaacuccgu

SEQ ID NO: 433861 - RNA, 32 nt, Human
gcaggaguaaagggagugaugggccaguacaa

SEQ ID NO: 433862 - RNA, 32 nt, Human
gcaggaguaccaggggaggaguguggaggaag

SEQ ID NO: 433863 - RNA, 32 nt, Human
gcaggaguaggccuccugcuuuucaaaagcag

SEQ ID NO: 433864 - RNA, 32 nt, Human
gcaggaguauugugaggccaggaguuccagau

SEQ ID NO: 433865 - RNA, 32 nt, Human
gcaggaguccacaggggaaccugcccugccuc

SEQ ID NO: 433866 - RNA, 32 nt, Human
gcaggagucggagaggauggcaggggccggag

SEQ ID NO: 433867 - RNA, 29 nt, Human
gcaggagucuacuucuugguccccaggga

SEQ ID NO: 433868 - RNA, 32 nt, Human
gcaggagucuguccuucaggccccacagugca

SEQ ID NO: 433869 - RNA, 32 nt, Human
gcaggagugccacccccagggcccugucaacc

SEQ ID NO: 433870 - RNA, 32 nt, Human
gcaggagugcuuuugcucugccagucggccuu

SEQ ID NO: 433871 - RNA, 32 nt, Human
gcaggagugggagaaggaggagagaaaagcug

SEQ ID NO: 433872 - RNA, 32 nt, Human
gcaggagugggccacuccacacccagcccugu

SEQ ID NO: 433873 - RNA, 32 nt, Human
gcaggaguggggagggaagggagccaagggau

SEQ ID NO: 433874 - RNA, 32 nt, Human
gcaggaguuugagaccagccugggcaacaugg

SEQ ID NO: 433875 - RNA, 32 nt, Human
gcaggauaucuucucccccagggaucuucuau

SEQ ID NO: 433876 - RNA, 32 nt, Human
gcaggauauugcugaagucuccuggcauaugu

SEQ ID NO: 433877 - RNA, 32 nt, Human
gcaggaucacaggccaguggaaaaagggcagg

SEQ ID NO: 433878 - RNA, 32 nt, Human
gcaggaucaggccacccagggacaaagggugc

SEQ ID NO: 433879 - RNA, 32 nt, Human
gcaggaucauggcugccaucaagccuuuucug

SEQ ID NO: 433880 - RNA, 32 nt, Human
gcaggaucauuccagcccaggaguucaagacc

SEQ ID NO: 433881 - RNA, 32 nt, Human
gcaggauccaaaggagaccuauagugacuccc

SEQ ID NO: 433882 - RNA, 19 nt, Human
gcaggauccccgcguccuc

SEQ ID NO: 433883 - RNA, 32 nt, Human
gcaggaucuccccaagguggcagaaggaggcc

SEQ ID NO: 433884 - RNA, 32 nt, Human
gcaggaugacugcucaggcccaggacaguggg

SEQ ID NO: 433885 - RNA, 25 nt, Human
gcaggaugagaauggggcagaggcu

SEQ ID NO: 433886 - RNA, 32 nt, Human
gcaggaugagagaaggggaaccagaagcuccg

SEQ ID NO: 433887 - RNA, 32 nt, Human
gcaggaugagccugaacugguugugcagaaca

SEQ ID NO: 433888 - RNA, 32 nt, Human
gcaggaugcccagggcucggaagcaguaagga

SEQ ID NO: 433889 - RNA, 32 nt, Human
gcaggauggagcuggagugagguggaggggcc

SEQ ID NO: 433890 - RNA, 30 nt, Human
gcaggauggaggaaagcauggaagaggagg

SEQ ID NO: 433891 - RNA, 20 nt, Human
gcaggauggagggcugagcc

SEQ ID NO: 433892 - RNA, 20 nt, Human
gcaggauggcgcuggcccug

SEQ ID NO: 433893 - RNA, 32 nt, Human
gcaggauggguagggagugagaucagagggaa

SEQ ID NO: 433894 - RNA, 32 nt, Human
gcaggaugguauaguuauguugccuggacugg

SEQ ID NO: 433895 - RNA, 32 nt, Human
gcaggaugucaccauguuuuccaggcuggucu

SEQ ID NO: 433896 - RNA, 30 nt, Human
gcaggauguccuuccagggcaagaaaagca

SEQ ID NO: 433897 - RNA, 32 nt, Human
gcaggaugugugagccaggaucccucuuugca

SEQ ID NO: 433898 - RNA, 32 nt, Human
gcaggaugugugcuucaguugcucuguguauu

SEQ ID NO: 433899 - RNA, 30 nt, Human
gcaggauguuagggcagcagcagcagcaac

SEQ ID NO: 433900 - RNA, 32 nt, Human
gcaggauucagagcugcucuccccaguugcac

SEQ ID NO: 433901 - RNA, 32 nt, Human
gcaggauucucagcaggcauggccgugggugc

SEQ ID NO: 433902 - RNA, 32 nt, Human
gcaggauugagggagccaggggaggggcagga

SEQ ID NO: 433903 - RNA, 32 nt, Human
gcaggauugccugagcccuggaguucgauacu

SEQ ID NO: 433904 - RNA, 32 nt, Human
gcaggauuucaccauguuuuccaggcuggucu

SEQ ID NO: 433905 - RNA, 32 nt, Human
gcaggauuuucagcagagcgucgguggggcug

SEQ ID NO: 433906 - RNA, 32 nt, Human
gcaggcaaagagagaggccucccuggcuucga

SEQ ID NO: 433907 - RNA, 32 nt, Human
gcaggcaaaucucuugagcccaggaguuugag

SEQ ID NO: 433908 - RNA, 32 nt, Human
gcaggcaaccuuuccauugcuggcuuugcaga

SEQ ID NO: 433909 - RNA, 32 nt, Human
gcaggcaagaagcggaggcagugaguacagca

SEQ ID NO: 433910 - RNA, 32 nt, Human
gcaggcaagagugcuggagggcggcagcggcg

SEQ ID NO: 433911 - RNA, 32 nt, Human
gcaggcaagccuggccacuguuggcugcagca

SEQ ID NO: 433912 - RNA, 32 nt, Human
gcaggcaaggagaccaaagauugaugagaaga

SEQ ID NO: 433913 - RNA, 32 nt, Human
gcaggcaauggguggaaaucaggggaacguuu

SEQ ID NO: 433914 - RNA, 32 nt, Human
gcaggcaauucuagucuuccacaaaacaucua

SEQ ID NO: 433915 - RNA, 32 nt, Human
gcaggcacagacugcaacccugcucagugcuc

SEQ ID NO: 433916 - RNA, 32 nt, Human
gcaggcacagccagggagaggggaggaguggg

SEQ ID NO: 433917 - RNA, 32 nt, Human
gcaggcacccagcagauagcgaaugcacgacu

SEQ ID NO: 433918 - RNA, 32 nt, Human
gcaggcacccaggguggggaggccacccuucc

SEQ ID NO: 433919 - RNA, 32 nt, Human
gcaggcaccccagcccuccaccucucucuaca

SEQ ID NO: 433920 - RNA, 28 nt, Human
gcaggcaccccaguggccucauccuagu

SEQ ID NO: 433921 - RNA, 32 nt, Human
gcaggcacccuuggccuuccaggcagcaggcu

SEQ ID NO: 433922 - RNA, 19 nt, Human
gcaggcaccuguaguccca

SEQ ID NO: 433923 - RNA, 32 nt, Human
gcaggcacucaguacuuauguaaagaaugaaa

SEQ ID NO: 433924 - RNA, 19 nt, Human
gcaggcacugcuccaggug

SEQ ID NO: 433925 - RNA, 32 nt, Human
gcaggcacuggcagugggaagaggcagacgac

SEQ ID NO: 433926 - RNA, 32 nt, Human
gcaggcacugugcuggcugucuucccagacac

SEQ ID NO: 433927 - RNA, 17 nt, Human
gcaggcacuugccacca

SEQ ID NO: 433928 - RNA, 22 nt, Human
gcaggcagacaucagaggccag

SEQ ID NO: 433929 - RNA, 22 nt, Human
gcaggcagaccacgaggucagg

SEQ ID NO: 433930 - RNA, 32 nt, Human
gcaggcagaccuggacucacagccuggcugug

SEQ ID NO: 433931 - RNA, 24 nt, Human
gcaggcagacuugacaggcccagg

SEQ ID NO: 433932 - RNA, 32 nt, Human
gcaggcagagacaauggaagaaaaugaaagcc

SEQ ID NO: 433933 - RNA, 32 nt, Human
gcaggcagagaggggcgguugaaggaagcacg

SEQ ID NO: 433934 - RNA, 20 nt, Human
gcaggcagagcugcagucag

SEQ ID NO: 433935 - RNA, 22 nt, Human
gcaggcagauaacaaagucagg

SEQ ID NO: 433936 - RNA, 24 nt, Human
gcaggcagauaacuugagaucagg

SEQ ID NO: 433937 - RNA, 20 nt, Human
gcaggcagaucacaagguca

SEQ ID NO: 433938 - RNA, 22 nt, Human
gcaggcagaucacaaggucagg

SEQ ID NO: 433939 - RNA, 24 nt, Human
gcaggcagaucaccugaaaucagg

SEQ ID NO: 433940 - RNA, 24 nt, Human
gcaggcagaucaccugaggccagg

SEQ ID NO: 433941 - RNA, 24 nt, Human
gcaggcagaucaccugaggcuagg

SEQ ID NO: 433942 - RNA, 22 nt, Human
gcaggcagaucaccugagguca

SEQ ID NO: 433943 - RNA, 23 nt, Human
gcaggcagaucaccugaggucag

SEQ ID NO: 433944 - RNA, 24 nt, Human
gcaggcagaucaccugaggucagg

SEQ ID NO: 433945 - RNA, 24 nt, Human
gcaggcagaucaccugaggucggg

SEQ ID NO: 433946 - RNA, 22 nt, Human
gcaggcagaucaccugagguua

SEQ ID NO: 433947 - RNA, 24 nt, Human
gcaggcagaucaccugagguuggg

SEQ ID NO: 433948 - RNA, 24 nt, Human
gcaggcagaucaccuggggucagg

SEQ ID NO: 433949 - RNA, 24 nt, Human
gcaggcagaucaccuuaggucagg

SEQ ID NO: 433950 - RNA, 32 nt, Human
gcaggcagaucacgaggucaagagauagagac

SEQ ID NO: 433951 - RNA, 22 nt, Human
gcaggcagaucacgaggucagg

SEQ ID NO: 433952 - RNA, 22 nt, Human
gcaggcagaucacggggucagg

SEQ ID NO: 433953 - RNA, 24 nt, Human
gcaggcagaucacgugaggucagg

SEQ ID NO: 433954 - RNA, 24 nt, Human
gcaggcagaucacuuaaggccagg

SEQ ID NO: 433955 - RNA, 23 nt, Human
gcaggcagaucacuuaggcuagg

SEQ ID NO: 433956 - RNA, 24 nt, Human
gcaggcagaucacuugaacucagg

SEQ ID NO: 433957 - RNA, 23 nt, Human
gcaggcagaucacuugagaccag

SEQ ID NO: 433958 - RNA, 24 nt, Human
gcaggcagaucacuugaggccagg

SEQ ID NO: 433959 - RNA, 24 nt, Human
gcaggcagaucacuugaggucagg

SEQ ID NO: 433960 - RNA, 24 nt, Human
gcaggcagaucacuugaggucggg

SEQ ID NO: 433961 - RNA, 24 nt, Human
gcaggcagaucagcugaggucagg

SEQ ID NO: 433962 - RNA, 22 nt, Human
gcaggcagaucaucugagguca

SEQ ID NO: 433963 - RNA, 24 nt, Human
gcaggcagaucaucugaggucagg

SEQ ID NO: 433964 - RNA, 20 nt, Human
gcaggcagaucaugagguca

SEQ ID NO: 433965 - RNA, 22 nt, Human
gcaggcagaucaugaggucagg

SEQ ID NO: 433966 - RNA, 24 nt, Human
gcaggcagaucauuugagaucagg

SEQ ID NO: 433967 - RNA, 24 nt, Human
gcaggcagaucauuugaggucagg

SEQ ID NO: 433968 - RNA, 23 nt, Human
gcaggcagaucccugaaggucag

SEQ ID NO: 433969 - RNA, 24 nt, Human
gcaggcagaucgcaugaaaucagg

SEQ ID NO: 433970 - RNA, 24 nt, Human
gcaggcagaucgccugaggucagg

SEQ ID NO: 433971 - RNA, 24 nt, Human
gcaggcagaucgcuugagcccagg

SEQ ID NO: 433972 - RNA, 24 nt, Human
gcaggcagaucgcuugagcucagg

SEQ ID NO: 433973 - RNA, 32 nt, Human
gcaggcagaucgcuugagcucaggaguucaag

SEQ ID NO: 433974 - RNA, 24 nt, Human
gcaggcagaucgcuugaggucagg

SEQ ID NO: 433975 - RNA, 24 nt, Human
gcaggcagauuauuugagcucagg

SEQ ID NO: 433976 - RNA, 23 nt, Human
gcaggcagauucauggagaccag

SEQ ID NO: 433977 - RNA, 24 nt, Human
gcaggcagauugcuugagcucagg

SEQ ID NO: 433978 - RNA, 24 nt, Human
gcaggcagauugcuugaggccagg

SEQ ID NO: 433979 - RNA, 22 nt, Human
gcaggcagcaacgcaagucagg

SEQ ID NO: 433980 - RNA, 32 nt, Human
gcaggcagcaacugaggcagcggcaggcucag

SEQ ID NO: 433981 - RNA, 19 nt, Human
gcaggcagccaacguccuc

SEQ ID NO: 433982 - RNA, 22 nt, Human
gcaggcagccacgaaguacagg

SEQ ID NO: 433983 - RNA, 24 nt, Human
gcaggcagccgaccugaggccugg

SEQ ID NO: 433984 - RNA, 32 nt, Human
gcaggcagccuccguuccucccgcucucuugc

SEQ ID NO: 433985 - RNA, 22 nt, Human
gcaggcagcgccuggaggccag

SEQ ID NO: 433986 - RNA, 32 nt, Human
gcaggcagcucagcccagccugggcacagcca

SEQ ID NO: 433987 - RNA, 19 nt, Human
gcaggcaggaagaaugggg

SEQ ID NO: 433988 - RNA, 32 nt, Human
gcaggcaggaaggggaggggcagugagguugg

SEQ ID NO: 433989 - RNA, 32 nt, Human
gcaggcaggagagagcaugugcaggggaacuc

SEQ ID NO: 433990 - RNA, 32 nt, Human
gcaggcaggagcaucucugccucccaaagcau

SEQ ID NO: 433991 - RNA, 32 nt, Human
gcaggcaggaggagcaggaggauuauuaaaua

SEQ ID NO: 433992 - RNA, 32 nt, Human
gcaggcaggagguggaguugcagcuguuggcc

SEQ ID NO: 433993 - RNA, 32 nt, Human
gcaggcaggaguggggacagagggagagcuug

SEQ ID NO: 433994 - RNA, 32 nt, Human
gcaggcaggauguuuugaaauggugcagccaa

SEQ ID NO: 433995 - RNA, 32 nt, Human
gcaggcaggauugggcuuuucuggcuucuacc

SEQ ID NO: 433996 - RNA, 32 nt, Human
gcaggcaggccccagccucugaacucagcugg

SEQ ID NO: 433997 - RNA, 32 nt, Human
gcaggcaggcggccugugcagcgcggcccccg

SEQ ID NO: 433998 - RNA, 32 nt, Human
gcaggcagggaaaguguacaguauuuauuuug

SEQ ID NO: 433999 - RNA, 16 nt, Human
gcaggcagggcaguuu

SEQ ID NO: 434000 - RNA, 17 nt, Human
gcaggcagggcccgggg

SEQ ID NO: 434001 - RNA, 18 nt, Human
gcaggcagggcucugggg

SEQ ID NO: 434002 - RNA, 32 nt, Human
gcaggcaggggaaggagaagagacugaggggc

SEQ ID NO: 434003 - RNA, 32 nt, Human
gcaggcaggggcauuuaaaaauguaggaccua

SEQ ID NO: 434004 - RNA, 18 nt, Human
gcaggcagggggcugggg

SEQ ID NO: 434005 - RNA, 32 nt, Human
gcaggcaggguucauucuggugacacagcaac

SEQ ID NO: 434006 - RNA, 24 nt, Human
gcaggcaggucacuugaggucagg

SEQ ID NO: 434007 - RNA, 32 nt, Human
gcaggcaggucagcuuacugcccaggguaaca

SEQ ID NO: 434008 - RNA, 23 nt, Human
gcaggcagguggacgaguccagg

SEQ ID NO: 434009 - RNA, 32 nt, Human
gcaggcagucaguggcuggugccaugggguga

SEQ ID NO: 434010 - RNA, 32 nt, Human
gcaggcagucugcagaccagaucugacccaga

SEQ ID NO: 434011 - RNA, 25 nt, Human
gcaggcauaucaacuugaggccagg

SEQ ID NO: 434012 - RNA, 23 nt, Human
gcaggcaucagagacacuggugg

SEQ ID NO: 434013 - RNA, 32 nt, Human
gcaggcaucaggacaggaguaggaggagaaag

SEQ ID NO: 434014 - RNA, 32 nt, Human
gcaggcaugagccacuucgccuagccaagccu

SEQ ID NO: 434015 - RNA, 32 nt, Human
gcaggcauggaucagacugcaagcuaggggca

SEQ ID NO: 434016 - RNA, 32 nt, Human
gcaggcauggcucucugccucugaucaccauc

SEQ ID NO: 434017 - RNA, 32 nt, Human
gcaggcaugguggcucaugccuguagucccag

SEQ ID NO: 434018 - RNA, 32 nt, Human
gcaggcauguguuucaucaucauccagagccu

SEQ ID NO: 434019 - RNA, 32 nt, Human
gcaggcauguugaagaguugagugaucacgcu

SEQ ID NO: 434020 - RNA, 32 nt, Human
gcaggccaaggaccuggcagggccagacgcug

SEQ ID NO: 434021 - RNA, 32 nt, Human
gcaggccaaggcugugcucaagcauuucaacg

SEQ ID NO: 434022 - RNA, 24 nt, Human
gcaggccaaucaccugaggucggg

SEQ ID NO: 434023 - RNA, 32 nt, Human
gcaggccacccagguccugcaggaaaugagag

SEQ ID NO: 434024 - RNA, 19 nt, Human
gcaggccacucagaggcuc

SEQ ID NO: 434025 - RNA, 32 nt, Human
gcaggccagacacagucugaugccagcuggga

SEQ ID NO: 434026 - RNA, 32 nt, Human
gcaggccagcagcagagggcggcggaggaagg

SEQ ID NO: 434027 - RNA, 30 nt, Human
gcaggccagcagccgucagagcguccggcu

SEQ ID NO: 434028 - RNA, 21 nt, Human
gcaggccagccaagcaggaag

SEQ ID NO: 434029 - RNA, 17 nt, Human
gcaggccaggccuccca

SEQ ID NO: 434030 - RNA, 26 nt, Human
gcaggccaguggcagggccggcccca

SEQ ID NO: 434031 - RNA, 21 nt, Human
gcaggccaucagcgugcacug

SEQ ID NO: 434032 - RNA, 32 nt, Human
gcaggccauugcugagggcacaggugcuuuau

SEQ ID NO: 434033 - RNA, 32 nt, Human
gcaggcccagaacuugccuccagucagccucu

SEQ ID NO: 434034 - RNA, 32 nt, Human
gcaggcccaguucuggaaaggccaggaugugg

SEQ ID NO: 434035 - RNA, 32 nt, Human
gcaggccccagccucugaacucagcuggcuug

SEQ ID NO: 434036 - RNA, 24 nt, Human
gcaggcccccagggaggcaguggg

SEQ ID NO: 434037 - RNA, 32 nt, Human
gcaggccccucgggcgcaggcagcucacacca

SEQ ID NO: 434038 - RNA, 32 nt, Human
gcaggcccgggagccgggaggcugcgggcggc

SEQ ID NO: 434039 - RNA, 32 nt, Human
gcaggcccuaccaagaggaaggaugguacagc

SEQ ID NO: 434040 - RNA, 18 nt, Human
gcaggcccucaagggcuc

SEQ ID NO: 434041 - RNA, 32 nt, Human
gcaggcccuccugcccagcugcucuugucagc

SEQ ID NO: 434042 - RNA, 32 nt, Human
gcaggcccugcucuugccucccaggggcuuuu

SEQ ID NO: 434043 - RNA, 32 nt, Human
gcaggcccugggccuccaccucugugcagggc

SEQ ID NO: 434044 - RNA, 26 nt, Human
gcaggcccuguccgaggaguuggggg

SEQ ID NO: 434045 - RNA, 25 nt, Human
gcaggcccugucuggacacugggga

SEQ ID NO: 434046 - RNA, 32 nt, Human
gcaggcccuuagaaguccagcagcagcaacuc

SEQ ID NO: 434047 - RNA, 32 nt, Human
gcaggcccuucccucuccgccugccucauucc

SEQ ID NO: 434048 - RNA, 32 nt, Human
gcaggcccuucugaauuuccuggaccuacgca

SEQ ID NO: 434049 - RNA, 32 nt, Human
gcaggcccuucugaauuuccuggaccuacucu

SEQ ID NO: 434050 - RNA, 22 nt, Human
gcaggcccuuguugcagcugaa

SEQ ID NO: 434051 - RNA, 32 nt, Human
gcaggcccuuucucuuucaggagccucgacca

SEQ ID NO: 434052 - RNA, 32 nt, Human
gcaggccgagugggccgccaggaccaagcgag

SEQ ID NO: 434053 - RNA, 32 nt, Human
gcaggccgcaggagugcugguggaggggcuuc

SEQ ID NO: 434054 - RNA, 21 nt, Human
gcaggccgcccacacugugga

SEQ ID NO: 434055 - RNA, 22 nt, Human
gcaggccgcgcucggccagcag

SEQ ID NO: 434056 - RNA, 25 nt, Human
gcaggccgggcccgggcacuggugg

SEQ ID NO: 434057 - RNA, 22 nt, Human
gcaggccggggcgggacgagga

SEQ ID NO: 434058 - RNA, 32 nt, Human
gcaggccguggucagggauggcaccaacaucu

SEQ ID NO: 434059 - RNA, 32 nt, Human
gcaggccuagcauggugccugccaccauggug

SEQ ID NO: 434060 - RNA, 32 nt, Human
gcaggccucagaacggugaggggccagggcaa

SEQ ID NO: 434061 - RNA, 32 nt, Human
gcaggccuccacccuagcacaucugggcucua

SEQ ID NO: 434062 - RNA, 22 nt, Human
gcaggccuccggggggccgggg

SEQ ID NO: 434063 - RNA, 32 nt, Human
gcaggccuccuggaggaggaaguggaggccgc

SEQ ID NO: 434064 - RNA, 32 nt, Human
gcaggccucugaggcaguggacaggaagacuu

SEQ ID NO: 434065 - RNA, 32 nt, Human
gcaggccucugggguccagccugggagcccag

SEQ ID NO: 434066 - RNA, 23 nt, Human
gcaggccugaagccuaggucagg

SEQ ID NO: 434067 - RNA, 32 nt, Human
gcaggccugaugcucagggguucgugccggga

SEQ ID NO: 434068 - RNA, 32 nt, Human
gcaggccugauggcuucccacuggccuccacc

SEQ ID NO: 434069 - RNA, 32 nt, Human
gcaggccugcaagcugccuuuuggacaggcug

SEQ ID NO: 434070 - RNA, 32 nt, Human
gcaggccugcaucuuaccuguacaguauuugc

SEQ ID NO: 434071 - RNA, 20 nt, Human
gcaggccugcguggcugcag

SEQ ID NO: 434072 - RNA, 32 nt, Human
gcaggccugcuggucgugcuguguggccgcgg

SEQ ID NO: 434073 - RNA, 32 nt, Human
gcaggccuggagggcucccuguuccagcugcu

SEQ ID NO: 434074 - RNA, 32 nt, Human
gcaggccuggcugggugcaguggcucacgccu

SEQ ID NO: 434075 - RNA, 32 nt, Human
gcaggccuggguuuggauuucagaauccuagc

SEQ ID NO: 434076 - RNA, 32 nt, Human
gcaggccuguaaucccagcuacucgggaggcu

SEQ ID NO: 434077 - RNA, 32 nt, Human
gcaggccugucccagccugugccuucugcugg

SEQ ID NO: 434078 - RNA, 32 nt, Human
gcaggccuguuacacucuccccaaccuccuug

SEQ ID NO: 434079 - RNA, 32 nt, Human
gcaggccuuauuccaacacacccggcccagcc

SEQ ID NO: 434080 - RNA, 32 nt, Human
gcaggccuucacugcagcacugagccucaaau

SEQ ID NO: 434081 - RNA, 21 nt, Human
gcaggccuuuccaccugggga

SEQ ID NO: 434082 - RNA, 32 nt, Human
gcaggccuuucccaugcuguucuggugauagu

SEQ ID NO: 434083 - RNA, 32 nt, Human
gcaggccuuuguuuuccaauggugcuauauuc

SEQ ID NO: 434084 - RNA, 32 nt, Human
gcaggcgaacauccuggcugauggacuggaug

SEQ ID NO: 434085 - RNA, 22 nt, Human
gcaggcgaaucacgaggucagg

SEQ ID NO: 434086 - RNA, 32 nt, Human
gcaggcgagaccccuccagaaucugcaggcgc

SEQ ID NO: 434087 - RNA, 32 nt, Human
gcaggcgaugaagaagaagcagcagcaucccg

SEQ ID NO: 434088 - RNA, 32 nt, Human
gcaggcgcacgguacccgugcugcagucgggc

SEQ ID NO: 434089 - RNA, 24 nt, Human
gcaggcgcagaggucccagcccca

SEQ ID NO: 434090 - RNA, 32 nt, Human
gcaggcgcagcucgcuccucaggccugcgaga

SEQ ID NO: 434091 - RNA, 18 nt, Human
gcaggcgcccccauggcc

SEQ ID NO: 434092 - RNA, 32 nt, Human
gcaggcgcccgccaccacacccggcuaauuuu

SEQ ID NO: 434093 - RNA, 32 nt, Human
gcaggcgcccgccaccacgcccggcuaauuuu

SEQ ID NO: 434094 - RNA, 32 nt, Human
gcaggcgccuauaaucccagcuacucaggagg

SEQ ID NO: 434095 - RNA, 32 nt, Human
gcaggcgccuauaaucccagcuacucaggagu

SEQ ID NO: 434096 - RNA, 32 nt, Human
gcaggcgccuguaauccagcuacucgggaggc

SEQ ID NO: 434097 - RNA, 32 nt, Human
gcaggcgccuguaaucccagcuacucgggagg

SEQ ID NO: 434098 - RNA, 32 nt, Human
gcaggcgccuguaaucccagcuacuggggagg

SEQ ID NO: 434099 - RNA, 32 nt, Human
gcaggcgccuguaaucccagcuacuuggaagg

SEQ ID NO: 434100 - RNA, 32 nt, Human
gcaggcgccuguaaucccagcuacuugggagg

SEQ ID NO: 434101 - RNA, 32 nt, Human
gcaggcgccuguaaucccagcuauuugggagg

SEQ ID NO: 434102 - RNA, 32 nt, Human
gcaggcgccuguagucccagcacuuugggagg

SEQ ID NO: 434103 - RNA, 22 nt, Human
gcaggcgcguccccgcuccuca

SEQ ID NO: 434104 - RNA, 32 nt, Human
gcaggcgcugggaugggggcuuaugggguggc

SEQ ID NO: 434105 - RNA, 24 nt, Human
gcaggcggaccaccugaagucggg

SEQ ID NO: 434106 - RNA, 32 nt, Human
gcaggcggaggcggaggcggcgggggcaggag

SEQ ID NO: 434107 - RNA, 32 nt, Human
gcaggcggagggcugucuccugcgcccgccug

SEQ ID NO: 434108 - RNA, 20 nt, Human
gcaggcggaucacaagguca

SEQ ID NO: 434109 - RNA, 32 nt, Human
gcaggcggaucacaaggucaagagauagagac

SEQ ID NO: 434110 - RNA, 22 nt, Human
gcaggcggaucacaaggucagg

SEQ ID NO: 434111 - RNA, 24 nt, Human
gcaggcggaucacaugaggccagg

SEQ ID NO: 434112 - RNA, 24 nt, Human
gcaggcggaucaccugaaaucagg

SEQ ID NO: 434113 - RNA, 23 nt, Human
gcaggcggaucaccugaagucag

SEQ ID NO: 434114 - RNA, 22 nt, Human
gcaggcggaucaccugagauca

SEQ ID NO: 434115 - RNA, 24 nt, Human
gcaggcggaucaccugagaucggg

SEQ ID NO: 434116 - RNA, 24 nt, Human
gcaggcggaucaccugaggucagg

SEQ ID NO: 434117 - RNA, 24 nt, Human
gcaggcggaucaccugaggucggg

SEQ ID NO: 434118 - RNA, 24 nt, Human
gcaggcggaucaccugaggugagg

SEQ ID NO: 434119 - RNA, 24 nt, Human
gcaggcggaucaccugagguuagg

SEQ ID NO: 434120 - RNA, 24 nt, Human
gcaggcggaucaccuuaggucagg

SEQ ID NO: 434121 - RNA, 22 nt, Human
gcaggcggaucacgaagucagg

SEQ ID NO: 434122 - RNA, 24 nt, Human
gcaggcggaucacuuaagaucagg

SEQ ID NO: 434123 - RNA, 24 nt, Human
gcaggcggaucacuugaagccagg

SEQ ID NO: 434124 - RNA, 32 nt, Human
gcaggcggaucacuugagcucaggaguccuaa

SEQ ID NO: 434125 - RNA, 24 nt, Human
gcaggcggaucacuugaggccagg

SEQ ID NO: 434126 - RNA, 24 nt, Human
gcaggcggaucacuugaggucagg

SEQ ID NO: 434127 - RNA, 24 nt, Human
gcaggcggaucaucugaggucagg

SEQ ID NO: 434128 - RNA, 22 nt, Human
gcaggcggaucaugagaucagg

SEQ ID NO: 434129 - RNA, 32 nt, Human
gcaggcggaucgcuugagcucaggaguuugag

SEQ ID NO: 434130 - RNA, 24 nt, Human
gcaggcggaucuccugaggucagg

SEQ ID NO: 434131 - RNA, 24 nt, Human
gcaggcggauuaccugaggucagg

SEQ ID NO: 434132 - RNA, 24 nt, Human
gcaggcggauuaccuuaggucagg

SEQ ID NO: 434133 - RNA, 32 nt, Human
gcaggcggcaggcacgguccgugcggagaggc

SEQ ID NO: 434134 - RNA, 32 nt, Human
gcaggcggcaggcagcaggcuguggaggaggc

SEQ ID NO: 434135 - RNA, 32 nt, Human
gcaggcggcccaggcacauagcaugguuggcu

SEQ ID NO: 434136 - RNA, 32 nt, Human
gcaggcggccuauccugauccuuggaggagga

SEQ ID NO: 434137 - RNA, 20 nt, Human
gcaggcggcggcgguggcgg

SEQ ID NO: 434138 - RNA, 32 nt, Human
gcaggcggcugcaggcuaggggcggcucggag

SEQ ID NO: 434139 - RNA, 24 nt, Human
gcaggcggcugcuugacagcugag

SEQ ID NO: 434140 - RNA, 32 nt, Human
gcaggcgggaggaucucuugagcccaggaguu

SEQ ID NO: 434141 - RNA, 32 nt, Human
gcaggcgggcaggccggcaggcgggugcgcgg

SEQ ID NO: 434142 - RNA, 32 nt, Human
gcaggcggggacugcaaccucaguccacagac

SEQ ID NO: 434143 - RNA, 32 nt, Human
gcaggcgggggaccucuacaccucugcugugg

SEQ ID NO: 434144 - RNA, 24 nt, Human
gcaggcgggucaccugaggucagg

SEQ ID NO: 434145 - RNA, 32 nt, Human
gcaggcgguuccugggcugcuccgguagguuu

SEQ ID NO: 434146 - RNA, 32 nt, Human
gcaggcgugagcauggggccaggugugcacgu

SEQ ID NO: 434147 - RNA, 32 nt, Human
gcaggcguggggacccagguguguucaggggu

SEQ ID NO: 434148 - RNA, 24 nt, Human
gcaggcgugucacuugaggccagg

SEQ ID NO: 434149 - RNA, 32 nt, Human
gcaggcgugugcauggggccaggugugcacgu

SEQ ID NO: 434150 - RNA, 32 nt, Human
gcaggcguuccucagagucacagggaauggcg

SEQ ID NO: 434151 - RNA, 32 nt, Human
gcaggcuacugugcuggagcaucccccagcug

SEQ ID NO: 434152 - RNA, 32 nt, Human
gcaggcucaaaucuaguggaacagucaguuua

SEQ ID NO: 434153 - RNA, 32 nt, Human
gcaggcucacugcccgcuucuuuuccuucuuu

SEQ ID NO: 434154 - RNA, 32 nt, Human
gcaggcucauagggaagaccugcugagggacc

SEQ ID NO: 434155 - RNA, 28 nt, Human
gcaggcuccaguggggccucaucauaca

SEQ ID NO: 434156 - RNA, 23 nt, Human
gcaggcucccagggacaccuggg

SEQ ID NO: 434157 - RNA, 32 nt, Human
gcaggcuccuuuagcugcaccaugaaguuuac

SEQ ID NO: 434158 - RNA, 32 nt, Human
gcaggcucuaagccuuucauguguagagaaga

SEQ ID NO: 434159 - RNA, 32 nt, Human
gcaggcucucagaaccgcuaccggcgaugcua

SEQ ID NO: 434160 - RNA, 32 nt, Human
gcaggcucuccucucguuagugcccccugugu

SEQ ID NO: 434161 - RNA, 32 nt, Human
gcaggcucucuccccuccccuccccuccccuc

SEQ ID NO: 434162 - RNA, 32 nt, Human
gcaggcucugcugcccugaggugccaugccgg

SEQ ID NO: 434163 - RNA, 32 nt, Human
gcaggcucuguggagcucaccaagagagcugg

SEQ ID NO: 434164 - RNA, 21 nt, Human
gcaggcucuguucagaugcug

SEQ ID NO: 434165 - RNA, 32 nt, Human
gcaggcugaagcaggagaauggcgugaaccug

SEQ ID NO: 434166 - RNA, 32 nt, Human
gcaggcugaggcaggagaauugcuugaacccg

SEQ ID NO: 434167 - RNA, 32 nt, Human
gcaggcugaggcaguagaaucgcuugaaccug

SEQ ID NO: 434168 - RNA, 32 nt, Human
gcaggcugaggcaugagaaucgcuugaaccca

SEQ ID NO: 434169 - RNA, 32 nt, Human
gcaggcugaggugagaagaucauuggaguuua

SEQ ID NO: 434170 - RNA, 32 nt, Human
gcaggcugaggugggagaaucgcuugagcuca

SEQ ID NO: 434171 - RNA, 32 nt, Human
gcaggcugaggugggaggaucacuugaacccc

SEQ ID NO: 434172 - RNA, 32 nt, Human
gcaggcugcacccaccuccuccccuuccuacc

SEQ ID NO: 434173 - RNA, 32 nt, Human
gcaggcugcauggcuucaccuuucuuugcuuu

SEQ ID NO: 434174 - RNA, 32 nt, Human
gcaggcugcauggucuagagguugugggcagc

SEQ ID NO: 434175 - RNA, 32 nt, Human
gcaggcugccagcuggugccucuuguuuggga

SEQ ID NO: 434176 - RNA, 32 nt, Human
gcaggcugccugucugugguccaggcuucagg

SEQ ID NO: 434177 - RNA, 32 nt, Human
gcaggcugccuuguccccacucugccuacaug

SEQ ID NO: 434178 - RNA, 32 nt, Human
gcaggcugccuuucugccccuuuggugaucug

SEQ ID NO: 434179 - RNA, 32 nt, Human
gcaggcugcugcaggcccaggugaauggagua

SEQ ID NO: 434180 - RNA, 32 nt, Human
gcaggcugcugggcaguucugcucuguggagg

SEQ ID NO: 434181 - RNA, 32 nt, Human
gcaggcugcugucucacagagcgagaaggugu

SEQ ID NO: 434182 - RNA, 30 nt, Human
gcaggcugcuugcaaugcagaagaucacag

SEQ ID NO: 434183 - RNA, 32 nt, Human
gcaggcuggaaccugggcugccccagaacaca

SEQ ID NO: 434184 - RNA, 32 nt, Human
gcaggcuggaagggagggugcccagggaccac

SEQ ID NO: 434185 - RNA, 32 nt, Human
gcaggcuggagugcagugggacagcgcuggug

SEQ ID NO: 434186 - RNA, 25 nt, Human
gcaggcuggaucaccugaggacagg

SEQ ID NO: 434187 - RNA, 25 nt, Human
gcaggcuggaucaccugagggcagg

SEQ ID NO: 434188 - RNA, 32 nt, Human
gcaggcuggaucuuugccuugagagcuccgug

SEQ ID NO: 434189 - RNA, 19 nt, Human
gcaggcuggccgggccucc

SEQ ID NO: 434190 - RNA, 21 nt, Human
gcaggcuggccuggggucagg

SEQ ID NO: 434191 - RNA, 31 nt, Human
gcaggcuggcuucucccucccuccugccgag

SEQ ID NO: 434192 - RNA, 32 nt, Human
gcaggcuguccaggcugggcuugguggucagg

SEQ ID NO: 434193 - RNA, 32 nt, Human
gcaggcuguggcccaggccuccugggugacag

SEQ ID NO: 434194 - RNA, 32 nt, Human
gcaggcugugggaggcagcggagcaggcgaug

SEQ ID NO: 434195 - RNA, 18 nt, Human
gcaggcuguggggcagcu

SEQ ID NO: 434196 - RNA, 32 nt, Human
gcaggcuucaaacuaggggacaaagcaaaaag

SEQ ID NO: 434197 - RNA, 32 nt, Human
gcaggcuucucccuucuuucugggacucagag

SEQ ID NO: 434198 - RNA, 32 nt, Human
gcaggcuugauuugccuggugaccgaauuacu

SEQ ID NO: 434199 - RNA, 32 nt, Human
gcaggcuugcaaucccagcuacuugggacgcu

SEQ ID NO: 434200 - RNA, 32 nt, Human
gcaggcuugccuggcagagaaccuguucagau

SEQ ID NO: 434201 - RNA, 32 nt, Human
gcaggcuuggagggaggccucaguguggcuug

SEQ ID NO: 434202 - RNA, 32 nt, Human
gcaggcuuggggagcuuuaagccucaguuaua

SEQ ID NO: 434203 - RNA, 32 nt, Human
gcaggcuugugcagacacucagggauggagcu

SEQ ID NO: 434204 - RNA, 32 nt, Human
gcaggcuuguuuccaccaauagugccaaaaag

SEQ ID NO: 434205 - RNA, 32 nt, Human
gcaggcuuuccucuuguguuggcaagauggcu

SEQ ID NO: 434206 - RNA, 32 nt, Human
gcaggcuuugccuggcugcuaucucuagaggc

SEQ ID NO: 434207 - RNA, 32 nt, Human
gcaggcuuugggaacacuggccugggucuccc

SEQ ID NO: 434208 - RNA, 32 nt, Human
gcagggaaaaugucagaaaauucauccaaauc

SEQ ID NO: 434209 - RNA, 32 nt, Human
gcagggaaagacuggcaaggaggcucaggugc

SEQ ID NO: 434210 - RNA, 32 nt, Human
gcagggaaagagacccgguaauuggaggguga

SEQ ID NO: 434211 - RNA, 32 nt, Human
gcagggaacugaggccagaccacccaggaaga

SEQ ID NO: 434212 - RNA, 20 nt, Human
gcagggaacuuuggcagcuu

SEQ ID NO: 434213 - RNA, 32 nt, Human
gcagggaagaaaauguguuccaggcagaggaa

SEQ ID NO: 434214 - RNA, 32 nt, Human
gcagggaagaagcuuuugagggugauccaggc

SEQ ID NO: 434215 - RNA, 32 nt, Human
gcagggaagagcaguuccucaaccucguggga

SEQ ID NO: 434216 - RNA, 32 nt, Human
gcagggaagaucugggggacagaggaaggccu

SEQ ID NO: 434217 - RNA, 32 nt, Human
gcagggaagccgccgcaacagcugcagugagg

SEQ ID NO: 434218 - RNA, 32 nt, Human
gcagggaagcuuucaccagccacacaaggguc

SEQ ID NO: 434219 - RNA, 32 nt, Human
gcagggaaggcgagaagagggaggagacacug

SEQ ID NO: 434220 - RNA, 32 nt, Human
gcagggaagggccugagugccagcccuggcag

SEQ ID NO: 434221 - RNA, 32 nt, Human
gcagggaaguggagcaaggauggugccguccg

SEQ ID NO: 434222 - RNA, 32 nt, Human
gcagggaaucccauccagcgucccucuacucu

SEQ ID NO: 434223 - RNA, 32 nt, Human
gcagggacacacaaccaacagcucugucggga

SEQ ID NO: 434224 - RNA, 32 nt, Human
gcagggacacuggagagcaauggucccugcca

SEQ ID NO: 434225 - RNA, 32 nt, Human
gcagggacagaccagaccagacccaggagucu

SEQ ID NO: 434226 - RNA, 21 nt, Human
gcagggacagagcauuggggu

SEQ ID NO: 434227 - RNA, 32 nt, Human
gcagggacagcaggcccaggaggaaggauaca

SEQ ID NO: 434228 - RNA, 32 nt, Human
gcagggacagcccacaccugaagagcacgccc

SEQ ID NO: 434229 - RNA, 32 nt, Human
gcagggacagcggggaggcaggaaaagccccg

SEQ ID NO: 434230 - RNA, 20 nt, Human
gcagggacaggcaggcccgg

SEQ ID NO: 434231 - RNA, 32 nt, Human
gcagggacauaguggggcugggcagggauggg

SEQ ID NO: 434232 - RNA, 32 nt, Human
gcagggacaucagcuccugaaggggugaaaga

SEQ ID NO: 434233 - RNA, 32 nt, Human
gcagggacccacugccccaucucccucucccc

SEQ ID NO: 434234 - RNA, 32 nt, Human
gcagggacccacugcugccucuuccaggagcc

SEQ ID NO: 434235 - RNA, 32 nt, Human
gcagggacccccagaagaggagcggggcaccc

SEQ ID NO: 434236 - RNA, 32 nt, Human
gcagggacccuccgaggauguagagagaacug

SEQ ID NO: 434237 - RNA, 19 nt, Human
gcagggacgcugcaugcag

SEQ ID NO: 434238 - RNA, 19 nt, Human
gcagggacucaagauccuc

SEQ ID NO: 434239 - RNA, 23 nt, Human
gcagggacucaccugagcccagg

SEQ ID NO: 434240 - RNA, 32 nt, Human
gcagggacucacucagcugcuggccccaaguc

SEQ ID NO: 434241 - RNA, 32 nt, Human
gcagggacucacugugcuuuucugagcuucuu

SEQ ID NO: 434242 - RNA, 21 nt, Human
gcagggacugcuggcguccuc

SEQ ID NO: 434243 - RNA, 20 nt, Human
gcagggagaaucgcuugaac

SEQ ID NO: 434244 - RNA, 20 nt, Human
gcagggagaauugcuugaac

SEQ ID NO: 434245 - RNA, 32 nt, Human
gcagggagacuggugcugaauuacuggggccu

SEQ ID NO: 434246 - RNA, 32 nt, Human
gcagggagagagaacuggccaggguauaaaaa

SEQ ID NO: 434247 - RNA, 32 nt, Human
gcagggagagagggucucucuccuagcugcua

SEQ ID NO: 434248 - RNA, 32 nt, Human
gcagggagaggaagaucgggagagcuggcuac

SEQ ID NO: 434249 - RNA, 32 nt, Human
gcagggagaggaaggaggugggggagagggcu

SEQ ID NO: 434250 - RNA, 32 nt, Human
gcagggagaggaaggcgcgggagggggacgca

SEQ ID NO: 434251 - RNA, 32 nt, Human
gcagggagcagaggggucccugccugcagcac

SEQ ID NO: 434252 - RNA, 20 nt, Human
gcagggagccagggcugcgg

SEQ ID NO: 434253 - RNA, 21 nt, Human
gcagggagcccugcuguaccc

SEQ ID NO: 434254 - RNA, 32 nt, Human
gcagggagcuagggcagggaccaaaugaacag

SEQ ID NO: 434255 - RNA, 18 nt, Human
gcagggagcuccucaaag

SEQ ID NO: 434256 - RNA, 32 nt, Human
gcagggagcuccucaaagagcucaggaacgga

SEQ ID NO: 434257 - RNA, 20 nt, Human
gcagggagcugaggcugcgg

SEQ ID NO: 434258 - RNA, 32 nt, Human
gcagggaggaagggagaccacugugucaccug

SEQ ID NO: 434259 - RNA, 32 nt, Human
gcagggaggacagcagggcgggcagggggcgg

SEQ ID NO: 434260 - RNA, 32 nt, Human
gcagggaggagaggaagccaauaaaaaguguu

SEQ ID NO: 434261 - RNA, 32 nt, Human
gcagggaggagcugccuguucacugggaucag

SEQ ID NO: 434262 - RNA, 32 nt, Human
gcagggaggcaccauucaggaaccuggaccaa

SEQ ID NO: 434263 - RNA, 32 nt, Human
gcagggaggcagcucuggagggagccgcugcc

SEQ ID NO: 434264 - RNA, 32 nt, Human
gcagggaggcauucgaaagucugcucugccuu

SEQ ID NO: 434265 - RNA, 21 nt, Human
gcagggaggcggagguugcag

SEQ ID NO: 434266 - RNA, 23 nt, Human
gcagggaggcggagguugcagug

SEQ ID NO: 434267 - RNA, 32 nt, Human
gcagggaggcggagguugcagugagccgagau

SEQ ID NO: 434268 - RNA, 31 nt, Human
gcagggagggccagggagguuggggguggga

SEQ ID NO: 434269 - RNA, 32 nt, Human
gcagggagggccugggccccaguuguauuuau

SEQ ID NO: 434270 - RNA, 32 nt, Human
gcagggaggggaggauaagugggaucuaccaa

SEQ ID NO: 434271 - RNA, 32 nt, Human
gcagggaggguguggagaaggccaaaaaccuc

SEQ ID NO: 434272 - RNA, 32 nt, Human
gcagggaggugaggcccagccucaugauaaca

SEQ ID NO: 434273 - RNA, 20 nt, Human
gcagggagguggaaaugcug

SEQ ID NO: 434274 - RNA, 32 nt, Human
gcagggaguacaguucuuuucauucauacaua

SEQ ID NO: 434275 - RNA, 32 nt, Human
gcagggagucaguacaacacagugcucacccg

SEQ ID NO: 434276 - RNA, 32 nt, Human
gcagggagugcuccggagggaggcagagggga

SEQ ID NO: 434277 - RNA, 32 nt, Human
gcagggaguuagcacugaacugcuuuuaaaag

SEQ ID NO: 434278 - RNA, 32 nt, Human
gcagggaguuaggaggguuuucgaggauuuca

SEQ ID NO: 434279 - RNA, 32 nt, Human
gcagggaguugccccaacccuuuccggaacuc

SEQ ID NO: 434280 - RNA, 32 nt, Human
gcagggaguugcccuuccccucccucgggaag

SEQ ID NO: 434281 - RNA, 32 nt, Human
gcagggauagauauggcacuccuucacucccu

SEQ ID NO: 434282 - RNA, 32 nt, Human
gcagggauagccucugugucuccaggcucugc

SEQ ID NO: 434283 - RNA, 32 nt, Human
gcagggaucacacugccagucugguuaauacc

SEQ ID NO: 434284 - RNA, 32 nt, Human
gcagggaucagugguucucccauaucaccauc

SEQ ID NO: 434285 - RNA, 32 nt, Human
gcagggaucugccuggccagcagugagccuga

SEQ ID NO: 434286 - RNA, 32 nt, Human
gcagggaugagugaggcccugcagagagcauc

SEQ ID NO: 434287 - RNA, 32 nt, Human
gcagggaugcuuuccagccugcagcaacagaa

SEQ ID NO: 434288 - RNA, 32 nt, Human
gcagggauggccggcccaggagggaggaggac

SEQ ID NO: 434289 - RNA, 32 nt, Human
gcagggaugguguguccacugguacaaugucc

SEQ ID NO: 434290 - RNA, 32 nt, Human
gcagggaugguucugaggaaggcgcuguuagg

SEQ ID NO: 434291 - RNA, 32 nt, Human
gcagggauguacaaaauaauuuuaauguauua

SEQ ID NO: 434292 - RNA, 32 nt, Human
gcagggauuuacuggaaucuauuggugcugcu

SEQ ID NO: 434293 - RNA, 32 nt, Human
gcagggcaagaggagacagcaccuuguugcca

SEQ ID NO: 434294 - RNA, 31 nt, Human
gcagggcaagggagaucuggcauuuucugcu

SEQ ID NO: 434295 - RNA, 32 nt, Human
gcagggcacagaacuugugccuauuucaccuu

SEQ ID NO: 434296 - RNA, 32 nt, Human
gcagggcaccugcugcgacccagauucuucug

SEQ ID NO: 434297 - RNA, 32 nt, Human
gcagggcaccuugcagggccccuaccagucca

SEQ ID NO: 434298 - RNA, 32 nt, Human
gcagggcagaaugcaucccaggaaaaggaaac

SEQ ID NO: 434299 - RNA, 32 nt, Human
gcagggcagcagcugcugccacagccuccagc

SEQ ID NO: 434300 - RNA, 32 nt, Human
gcagggcagccauccuggaugauggaagccac

SEQ ID NO: 434301 - RNA, 19 nt, Human
gcagggcagcccagaggug

SEQ ID NO: 434302 - RNA, 32 nt, Human
gcagggcagcccagagguggcagcggcaggca

SEQ ID NO: 434303 - RNA, 32 nt, Human
gcagggcagcuggcugccugcccuuggcccgu

SEQ ID NO: 434304 - RNA, 32 nt, Human
gcagggcaggaggugguggaaacggggugaac

SEQ ID NO: 434305 - RNA, 32 nt, Human
gcagggcaggcuuccuggaggaggggcugagg

SEQ ID NO: 434306 - RNA, 32 nt, Human
gcagggcagggagccucagaugggaagaaguc

SEQ ID NO: 434307 - RNA, 32 nt, Human
gcagggcaggggcagucagggagcagcggcgg

SEQ ID NO: 434308 - RNA, 32 nt, Human
gcagggcaggguggccaaacaggucaggugcu

SEQ ID NO: 434309 - RNA, 32 nt, Human
gcagggcagggugggggcagggugggggcacg

SEQ ID NO: 434310 - RNA, 32 nt, Human
gcagggcauguuuggaaaauguuaauacgcca

SEQ ID NO: 434311 - RNA, 32 nt, Human
gcagggccaaccuccucacugugcuucaaggu

SEQ ID NO: 434312 - RNA, 32 nt, Human
gcagggccaagugcccaugagcacagccccag

SEQ ID NO: 434313 - RNA, 18 nt, Human
gcagggccacagcagcuc

SEQ ID NO: 434314 - RNA, 32 nt, Human
gcagggccagaggugacccugccuggccuccc

SEQ ID NO: 434315 - RNA, 21 nt, Human
gcagggccaggccagaagcug

SEQ ID NO: 434316 - RNA, 32 nt, Human
gcagggccagggcaaugccaucagccccuggg

SEQ ID NO: 434317 - RNA, 32 nt, Human
gcagggcccaagaaaucacuggugaugagauc

SEQ ID NO: 434318 - RNA, 20 nt, Human
gcagggcccagccucaaugg

SEQ ID NO: 434319 - RNA, 19 nt, Human
gcagggcccaggcaucuuc

SEQ ID NO: 434320 - RNA, 19 nt, Human
gcagggcccaggcgcccuu

SEQ ID NO: 434321 - RNA, 32 nt, Human
gcagggcccaggggaguggaccagcccccagc

SEQ ID NO: 434322 - RNA, 21 nt, Human
gcagggcccaucuuacauccu

SEQ ID NO: 434323 - RNA, 21 nt, Human
gcagggccccaaaacagccuc

SEQ ID NO: 434324 - RNA, 18 nt, Human
gcagggccccagccccuc

SEQ ID NO: 434325 - RNA, 20 nt, Human
gcagggccccagccugcccu

SEQ ID NO: 434326 - RNA, 18 nt, Human
gcagggccccagguccuc

SEQ ID NO: 434327 - RNA, 18 nt, Human
gcagggccccaucugucc

SEQ ID NO: 434328 - RNA, 31 nt, Human
gcagggcccccacuggagcguguacuacccc

SEQ ID NO: 434329 - RNA, 19 nt, Human
gcagggcccccagccccuc

SEQ ID NO: 434330 - RNA, 19 nt, Human
gcagggccccccugugucc

SEQ ID NO: 434331 - RNA, 20 nt, Human
gcagggccccgggcacccuc

SEQ ID NO: 434332 - RNA, 19 nt, Human
gcagggccccuccacgccc

SEQ ID NO: 434333 - RNA, 18 nt, Human
gcagggccccugacccuc

SEQ ID NO: 434334 - RNA, 21 nt, Human
gcagggccccugggccaucuc

SEQ ID NO: 434335 - RNA, 19 nt, Human
gcagggccccugggcuccc

SEQ ID NO: 434336 - RNA, 20 nt, Human
gcagggccccuggggcgucc

SEQ ID NO: 434337 - RNA, 19 nt, Human
gcagggcccgucuguccuc

SEQ ID NO: 434338 - RNA, 32 nt, Human
gcagggcccucauggagauccucugccagggc

SEQ ID NO: 434339 - RNA, 32 nt, Human
gcagggcccugagguggucgugucccugcccu

SEQ ID NO: 434340 - RNA, 19 nt, Human
gcagggcccugccccccuc

SEQ ID NO: 434341 - RNA, 32 nt, Human
gcagggcccuggagacaggcggaggcggggcc

SEQ ID NO: 434342 - RNA, 32 nt, Human
gcagggccgagccagcauuccaccccaccuuu

SEQ ID NO: 434343 - RNA, 32 nt, Human
gcagggccggaggagguguaggggcgagaggg

SEQ ID NO: 434344 - RNA, 22 nt, Human
gcagggccggccccacguccuc

SEQ ID NO: 434345 - RNA, 20 nt, Human
gcagggccgguggccuccuc

SEQ ID NO: 434346 - RNA, 19 nt, Human
gcagggccguaugcauccu

SEQ ID NO: 434347 - RNA, 18 nt, Human
gcagggccuagagcccuu

SEQ ID NO: 434348 - RNA, 32 nt, Human
gcagggccuaggugccuggacccagggugugc

SEQ ID NO: 434349 - RNA, 18 nt, Human
gcagggccucaaggcccu

SEQ ID NO: 434350 - RNA, 19 nt, Human
gcagggccuccacauccuc

SEQ ID NO: 434351 - RNA, 32 nt, Human
gcagggccuccaggccugggucuggaguuagg

SEQ ID NO: 434352 - RNA, 19 nt, Human
gcagggccuccuaggcccc

SEQ ID NO: 434353 - RNA, 18 nt, Human
gcagggccuccuaguacc

SEQ ID NO: 434354 - RNA, 32 nt, Human
gcagggccuccucuuccuccugguguuugaac

SEQ ID NO: 434355 - RNA, 19 nt, Human
gcagggccucggacucccc

SEQ ID NO: 434356 - RNA, 20 nt, Human
gcagggccucuacgguuccu

SEQ ID NO: 434357 - RNA, 20 nt, Human
gcagggccucuccugucgcc

SEQ ID NO: 434358 - RNA, 29 nt, Human
gcagggccucuguguggcuggauccuccg

SEQ ID NO: 434359 - RNA, 20 nt, Human
gcagggccucuugcucgcuc

SEQ ID NO: 434360 - RNA, 21 nt, Human
gcagggccugaggcccuccuc

SEQ ID NO: 434361 - RNA, 21 nt, Human
gcagggccugcccacgcccuu

SEQ ID NO: 434362 - RNA, 22 nt, Human
gcagggccugccuccugcgucc

SEQ ID NO: 434363 - RNA, 32 nt, Human
gcagggccuggaccagaggcagcugccaccgu

SEQ ID NO: 434364 - RNA, 18 nt, Human
gcagggccuggccaccuc

SEQ ID NO: 434365 - RNA, 20 nt, Human
gcagggccuggccucgccuc

SEQ ID NO: 434366 - RNA, 32 nt, Human
gcagggccuggcucccuguuggucugagugaa

SEQ ID NO: 434367 - RNA, 18 nt, Human
gcagggccugggcauccu

SEQ ID NO: 434368 - RNA, 32 nt, Human
gcagggccuggguuugcagccuggcucugccc

SEQ ID NO: 434369 - RNA, 32 nt, Human
gcagggccuguaaucccagcauuuugggaggc

SEQ ID NO: 434370 - RNA, 22 nt, Human
gcagggccuucuccagcucccu

SEQ ID NO: 434371 - RNA, 32 nt, Human
gcagggccuucugcuugccugcugccauacug

SEQ ID NO: 434372 - RNA, 18 nt, Human
gcagggccuugaaaccuc

SEQ ID NO: 434373 - RNA, 19 nt, Human
gcagggccuugagcgccuc

SEQ ID NO: 434374 - RNA, 19 nt, Human
gcagggccuugcaccccuc

SEQ ID NO: 434375 - RNA, 19 nt, Human
gcagggccuuggaggccuc

SEQ ID NO: 434376 - RNA, 18 nt, Human
gcagggccuuggaguccu

SEQ ID NO: 434377 - RNA, 20 nt, Human
gcagggccuuuccaguccuc

SEQ ID NO: 434378 - RNA, 32 nt, Human
gcagggcgcacacucucgcgcacccgcacgcu

SEQ ID NO: 434379 - RNA, 32 nt, Human
gcagggcgcugggcagucuccggcgagggcaa

SEQ ID NO: 434380 - RNA, 32 nt, Human
gcagggcggcacaugaguguuuuugguuagag

SEQ ID NO: 434381 - RNA, 32 nt, Human
gcagggcggcagccuccuccuggcuguccggg

SEQ ID NO: 434382 - RNA, 32 nt, Human
gcagggcuaaccuccacgggagcccaggagcu

SEQ ID NO: 434383 - RNA, 23 nt, Human
gcagggcuagguguagcgguguc

SEQ ID NO: 434384 - RNA, 21 nt, Human
gcagggcucacaccuguaauc

SEQ ID NO: 434385 - RNA, 32 nt, Human
gcagggcucagcuuccugccuuccauagcugu

SEQ ID NO: 434386 - RNA, 32 nt, Human
gcagggcucagggagcaggaggcugcauccgu

SEQ ID NO: 434387 - RNA, 16 nt, Human
gcagggcuccauggcc

SEQ ID NO: 434388 - RNA, 32 nt, Human
gcagggcucuccguugcucucccuggaucagg

SEQ ID NO: 434389 - RNA, 32 nt, Human
gcagggcucugccacaucccugucuuccuuca

SEQ ID NO: 434390 - RNA, 32 nt, Human
gcagggcucuggugggagagggagacagaugg

SEQ ID NO: 434391 - RNA, 19 nt, Human
gcagggcugaaagaggugu

SEQ ID NO: 434392 - RNA, 18 nt, Human
gcagggcugaacgucuuc

SEQ ID NO: 434393 - RNA, 18 nt, Human
gcagggcugagcauccuc

SEQ ID NO: 434394 - RNA, 32 nt, Human
gcagggcugaggaugggcucugcaucccccaa

SEQ ID NO: 434395 - RNA, 32 nt, Human
gcagggcugaggccucucauuccagaggaagg

SEQ ID NO: 434396 - RNA, 18 nt, Human
gcagggcugcauccgcag

SEQ ID NO: 434397 - RNA, 19 nt, Human
gcagggcugcccagaaguc

SEQ ID NO: 434398 - RNA, 32 nt, Human
gcagggcugccuccagccugcacgcuggcugg

SEQ ID NO: 434399 - RNA, 32 nt, Human
gcagggcugcuggcguugcugcuguugagagg

SEQ ID NO: 434400 - RNA, 20 nt, Human
gcagggcuggaaccagcagg

SEQ ID NO: 434401 - RNA, 23 nt, Human
gcagggcuggagaguauuuggug

SEQ ID NO: 434402 - RNA, 24 nt, Human
gcagggcuggagaucucugcaguc

SEQ ID NO: 434403 - RNA, 32 nt, Human
gcagggcuggagcugggcugggaucccgagcu

SEQ ID NO: 434404 - RNA, 18 nt, Human
gcagggcuggaggcccuc

SEQ ID NO: 434405 - RNA, 23 nt, Human
gcagggcuggaggccugggaguc

SEQ ID NO: 434406 - RNA, 18 nt, Human
gcagggcuggcaaaccuc

SEQ ID NO: 434407 - RNA, 32 nt, Human
gcagggcuggcacuauuuccuuggccagggua

SEQ ID NO: 434408 - RNA, 24 nt, Human
gcagggcuggccacaaggggcguc

SEQ ID NO: 434409 - RNA, 32 nt, Human
gcagggcuggccagggggaagaggguaguauc

SEQ ID NO: 434410 - RNA, 32 nt, Human
gcagggcuggcugggggcuucuccccacuccc

SEQ ID NO: 434411 - RNA, 32 nt, Human
gcagggcugggcauguugggggcaguuguugg

SEQ ID NO: 434412 - RNA, 26 nt, Human
gcagggcugggggcuccggagagcag

SEQ ID NO: 434413 - RNA, 20 nt, Human
gcagggcugguagggaggug

SEQ ID NO: 434414 - RNA, 20 nt, Human
gcagggcugugcauggugca

SEQ ID NO: 434415 - RNA, 21 nt, Human
gcagggcuguggagacacguc

SEQ ID NO: 434416 - RNA, 32 nt, Human
gcagggcugugucccagaugggccacggcuga

SEQ ID NO: 434417 - RNA, 32 nt, Human
gcagggcuuaauaucuaggugauggguugaca

SEQ ID NO: 434418 - RNA, 32 nt, Human
gcagggcuuagaaaaagcccuuuuguccguag

SEQ ID NO: 434419 - RNA, 19 nt, Human
gcagggcuuaucuggggga

SEQ ID NO: 434420 - RNA, 32 nt, Human
gcagggcuucaguucuccagaagaaggagaau

SEQ ID NO: 434421 - RNA, 32 nt, Human
gcagggcuucuccuccucugucuuuuggagaa

SEQ ID NO: 434422 - RNA, 22 nt, Human
gcagggcuugaugcugguggug

SEQ ID NO: 434423 - RNA, 32 nt, Human
gcaggggaaaucaagguguacuuauuucucca

SEQ ID NO: 434424 - RNA, 32 nt, Human
gcaggggaaauugcuuaacauuuucagauauc

SEQ ID NO: 434425 - RNA, 21 nt, Human
gcaggggaacacaaggucagg

SEQ ID NO: 434426 - RNA, 19 nt, Human
gcaggggaaucgcuugaac

SEQ ID NO: 434427 - RNA, 32 nt, Human
gcaggggaauggcuugaacccaggaggcagag

SEQ ID NO: 434428 - RNA, 32 nt, Human
gcaggggacagaaugugcauggaguggagcau

SEQ ID NO: 434429 - RNA, 28 nt, Human
gcaggggacgguugcugagcgggccugg

SEQ ID NO: 434430 - RNA, 32 nt, Human
gcaggggacucaggaagcaggggguccccauc

SEQ ID NO: 434431 - RNA, 32 nt, Human
gcaggggagaggaaugaggggagcagcuggac

SEQ ID NO: 434432 - RNA, 32 nt, Human
gcaggggagagggaaaggaaggccccacuuuu

SEQ ID NO: 434433 - RNA, 32 nt, Human
gcaggggagagggaagcagccgugcugucaac

SEQ ID NO: 434434 - RNA, 32 nt, Human
gcaggggagagggagcgggccagccuuacaga

SEQ ID NO: 434435 - RNA, 32 nt, Human
gcaggggagagggggccaagggggaaaggggc

SEQ ID NO: 434436 - RNA, 32 nt, Human
gcaggggagaggguggggcuggaaggaaggcu

SEQ ID NO: 434437 - RNA, 24 nt, Human
gcaggggagcgccagcggcugcag

SEQ ID NO: 434438 - RNA, 23 nt, Human
gcaggggaggaagccgcagccca

SEQ ID NO: 434439 - RNA, 32 nt, Human
gcaggggaggaggcggcgggaggcggaggagg

SEQ ID NO: 434440 - RNA, 32 nt, Human
gcaggggaggcaggggauggucagccccuaac

SEQ ID NO: 434441 - RNA, 32 nt, Human
gcaggggagggaacccagaggcuggggaugag

SEQ ID NO: 434442 - RNA, 32 nt, Human
gcaggggaggggaagaccuggggaaggaagaa

SEQ ID NO: 434443 - RNA, 32 nt, Human
gcaggggaggugagacagagaugaggagggac

SEQ ID NO: 434444 - RNA, 32 nt, Human
gcaggggagguggaggccagaggacagggaga

SEQ ID NO: 434445 - RNA, 32 nt, Human
gcaggggcaagugaacucagcacucugcagug

SEQ ID NO: 434446 - RNA, 21 nt, Human
gcaggggcagcaacggcugca

SEQ ID NO: 434447 - RNA, 32 nt, Human
gcaggggcagcacagcuggggugcaggccagg

SEQ ID NO: 434448 - RNA, 32 nt, Human
gcaggggcagcagggggcagggugcagggucc

SEQ ID NO: 434449 - RNA, 32 nt, Human
gcaggggcagcaucugucuugcaugcugcucu

SEQ ID NO: 434450 - RNA, 32 nt, Human
gcaggggcaggaggcagggcggggagggcaga

SEQ ID NO: 434451 - RNA, 32 nt, Human
gcaggggcagggcaagcuugaccucucacugu

SEQ ID NO: 434452 - RNA, 32 nt, Human
gcaggggcaguggcuggauggugccuacugua

SEQ ID NO: 434453 - RNA, 22 nt, Human
gcaggggccaccgcguggcugc

SEQ ID NO: 434454 - RNA, 32 nt, Human
gcaggggccaucuccccacuccgcugcccugg

SEQ ID NO: 434455 - RNA, 16 nt, Human
gcaggggccauggcug

SEQ ID NO: 434456 - RNA, 32 nt, Human
gcaggggccauggcugaggcacuugggcuugg

SEQ ID NO: 434457 - RNA, 23 nt, Human
gcaggggcccucacuggcugcag

SEQ ID NO: 434458 - RNA, 18 nt, Human
gcaggggcgcuggcugca

SEQ ID NO: 434459 - RNA, 32 nt, Human
gcaggggcgggcggagggaggggaggggugaa

SEQ ID NO: 434460 - RNA, 32 nt, Human
gcaggggcucagauugggacagaauucuuuug

SEQ ID NO: 434461 - RNA, 32 nt, Human
gcaggggcuccaggugaggagccagcaggcag

SEQ ID NO: 434462 - RNA, 32 nt, Human
gcaggggcugaggaggaggagcagggggugcu

SEQ ID NO: 434463 - RNA, 18 nt, Human
gcaggggcugcaggagca

SEQ ID NO: 434464 - RNA, 19 nt, Human
gcaggggcugcaggcucag

SEQ ID NO: 434465 - RNA, 21 nt, Human
gcaggggcugcagguccccag

SEQ ID NO: 434466 - RNA, 19 nt, Human
gcaggggcugcauccucag

SEQ ID NO: 434467 - RNA, 16 nt, Human
gcaggggcugcgcgca

SEQ ID NO: 434468 - RNA, 20 nt, Human
gcaggggcugcuccuggcug

SEQ ID NO: 434469 - RNA, 21 nt, Human
gcaggggcugcugcagcugca

SEQ ID NO: 434470 - RNA, 17 nt, Human
gcaggggcugcuggugc

SEQ ID NO: 434471 - RNA, 23 nt, Human
gcaggggcugggccagaggugcc

SEQ ID NO: 434472 - RNA, 17 nt, Human
gcaggggcugugcacag

SEQ ID NO: 434473 - RNA, 19 nt, Human
gcaggggcugugccugcgg

SEQ ID NO: 434474 - RNA, 18 nt, Human
gcaggggcuguucugcag

SEQ ID NO: 434475 - RNA, 19 nt, Human
gcaggggcuguugcagcag

SEQ ID NO: 434476 - RNA, 23 nt, Human
gcaggggcuugggauauggcugc

SEQ ID NO: 434477 - RNA, 18 nt, Human
gcaggggcuuggggcagc

SEQ ID NO: 434478 - RNA, 32 nt, Human
gcaggggcuuugugccuuucaucuuuaacugg

SEQ ID NO: 434479 - RNA, 32 nt, Human
gcagggggacugaaggcuggagcggagggacu

SEQ ID NO: 434480 - RNA, 32 nt, Human
gcagggggacugcuugagcucaggaguucgag

SEQ ID NO: 434481 - RNA, 32 nt, Human
gcagggggagcacuugaacccgggagguggag

SEQ ID NO: 434482 - RNA, 32 nt, Human
gcagggggagggcacccuggggugaaggccac

SEQ ID NO: 434483 - RNA, 25 nt, Human
gcagggggaugaaaaacucagcaga

SEQ ID NO: 434484 - RNA, 32 nt, Human
gcagggggauugcuugagcucaggaguucgag

SEQ ID NO: 434485 - RNA, 32 nt, Human
gcagggggcagggagaggagggcggcgggagc

SEQ ID NO: 434486 - RNA, 32 nt, Human
gcagggggccuuccagcccaagagcacgaacc

SEQ ID NO: 434487 - RNA, 32 nt, Human
gcagggggcgcggggcggaggcugcgagggcg

SEQ ID NO: 434488 - RNA, 32 nt, Human
gcagggggcggucggcccuguggaugcaggaa

SEQ ID NO: 434489 - RNA, 32 nt, Human
gcagggggcuacugccauccagaaguuacagu

SEQ ID NO: 434490 - RNA, 32 nt, Human
gcagggggcugagcucugaggggugggugcuc

SEQ ID NO: 434491 - RNA, 19 nt, Human
gcagggggcuggacuucag

SEQ ID NO: 434492 - RNA, 19 nt, Human
gcagggggcugggcuucag

SEQ ID NO: 434493 - RNA, 21 nt, Human
gcagggggcuggggacugcag

SEQ ID NO: 434494 - RNA, 32 nt, Human
gcagggggcuugguacugugaaaugguaacuu

SEQ ID NO: 434495 - RNA, 20 nt, Human
gcaggggggccaggccagca

SEQ ID NO: 434496 - RNA, 32 nt, Human
gcagggggugaaggcaggaguugggggcaggu

SEQ ID NO: 434497 - RNA, 32 nt, Human
gcagggggugggaugugugauuugaauugagg

SEQ ID NO: 434498 - RNA, 32 nt, Human
gcagggggugggggugcugggagccagccacc

SEQ ID NO: 434499 - RNA, 32 nt, Human
gcagggguaguggaggaagugugggcccacuu

SEQ ID NO: 434500 - RNA, 32 nt, Human
gcaggggucccgcuuuccucagccuggaugug

SEQ ID NO: 434501 - RNA, 32 nt, Human
gcaggggucgcggccggcuggagcugggagug

SEQ ID NO: 434502 - RNA, 32 nt, Human
gcaggggucuccugccugugccauccacuggg

SEQ ID NO: 434503 - RNA, 32 nt, Human
gcaggggucugcuucaggaaauggaagcuguc

SEQ ID NO: 434504 - RNA, 32 nt, Human
gcaggggucugguauaaaaacacuccuggaaa

SEQ ID NO: 434505 - RNA, 32 nt, Human
gcaggggugaggagggagcaggagaacgggua

SEQ ID NO: 434506 - RNA, 32 nt, Human
gcaggggugagggggagcaggagggcaggggu

SEQ ID NO: 434507 - RNA, 23 nt, Human
gcaggggugccggcgggcugcag

SEQ ID NO: 434508 - RNA, 32 nt, Human
gcagggguggaggggagggaccagcccgggcu

SEQ ID NO: 434509 - RNA, 32 nt, Human
gcagggguuggaggagcgaggagcaguauagg

SEQ ID NO: 434510 - RNA, 32 nt, Human
gcagggguuggagugagccaggacugugacac

SEQ ID NO: 434511 - RNA, 20 nt, Human
gcagggguugugagcugcag

SEQ ID NO: 434512 - RNA, 32 nt, Human
gcaggguagccauuucucccugacuggggugu

SEQ ID NO: 434513 - RNA, 32 nt, Human
gcaggguagggagguggauaugcagguugccc

SEQ ID NO: 434514 - RNA, 32 nt, Human
gcaggguagggcgccugagccuaggcgguucc

SEQ ID NO: 434515 - RNA, 32 nt, Human
gcagggucaaagcauuucuuuuucuccacaac

SEQ ID NO: 434516 - RNA, 31 nt, Human
gcagggucacucauggaggccuaggggaaca

SEQ ID NO: 434517 - RNA, 32 nt, Human
gcagggucacugcaccucggcccagggccucu

SEQ ID NO: 434518 - RNA, 32 nt, Human
gcagggucaggccacccagggacaaagggugc

SEQ ID NO: 434519 - RNA, 32 nt, Human
gcagggucaggcuccugauaggaggauuucau

SEQ ID NO: 434520 - RNA, 32 nt, Human
gcagggucaggcucuuaccuccaccuccaggg

SEQ ID NO: 434521 - RNA, 20 nt, Human
gcagggucauuaacauccuc

SEQ ID NO: 434522 - RNA, 32 nt, Human
gcagggucauuuccccaugccauccacagugu

SEQ ID NO: 434523 - RNA, 18 nt, Human
gcaggguccacugggagg

SEQ ID NO: 434524 - RNA, 32 nt, Human
gcaggguccaugguuccggaggccgugagacc

SEQ ID NO: 434525 - RNA, 32 nt, Human
gcaggguccccacucccucucuggggucgaug

SEQ ID NO: 434526 - RNA, 32 nt, Human
gcagggucuaggagguaagaccagcugggaug

SEQ ID NO: 434527 - RNA, 32 nt, Human
gcagggucuauggaagcaggaggacuuccaau

SEQ ID NO: 434528 - RNA, 32 nt, Human
gcagggucugauagugggcaagguguguagcc

SEQ ID NO: 434529 - RNA, 22 nt, Human
gcagggucugcucaccccaaca

SEQ ID NO: 434530 - RNA, 32 nt, Human
gcagggucugggugggucucccaggagaggaa

SEQ ID NO: 434531 - RNA, 32 nt, Human
gcagggucuuccuauuuuccccaggcugaucu

SEQ ID NO: 434532 - RNA, 32 nt, Human
gcagggugagcaucuccucuccacaccugccu

SEQ ID NO: 434533 - RNA, 32 nt, Human
gcagggugaggugagaggaucacuugaggcca

SEQ ID NO: 434534 - RNA, 32 nt, Human
gcagggugaugcacagcagucugccuccccua

SEQ ID NO: 434535 - RNA, 32 nt, Human
gcagggugcacucgcuccuggccgcgggccca

SEQ ID NO: 434536 - RNA, 32 nt, Human
gcagggugcccaggggcggaggccgucaagga

SEQ ID NO: 434537 - RNA, 32 nt, Human
gcagggugcuuugguagccaucagagaggaac

SEQ ID NO: 434538 - RNA, 32 nt, Human
gcaggguggaagggacugucaaguuuguaagg

SEQ ID NO: 434539 - RNA, 32 nt, Human
gcaggguggaggcugggcugaggauuaccaua

SEQ ID NO: 434540 - RNA, 18 nt, Human
gcaggguggccccagguc

SEQ ID NO: 434541 - RNA, 24 nt, Human
gcaggguggcucacaccuguaauc

SEQ ID NO: 434542 - RNA, 24 nt, Human
gcaggguggcucacaccuguacuc

SEQ ID NO: 434543 - RNA, 32 nt, Human
gcaggguggggcaggaugcagugagccagccc

SEQ ID NO: 434544 - RNA, 32 nt, Human
gcagggugggggcaauugaaggcccaagcugc

SEQ ID NO: 434545 - RNA, 32 nt, Human
gcagggugggggcacgaagugggcccugggug

SEQ ID NO: 434546 - RNA, 22 nt, Human
gcaggguguccggagagcggug

SEQ ID NO: 434547 - RNA, 32 nt, Human
gcagggugucuguacacguucuucugaaagcu

SEQ ID NO: 434548 - RNA, 32 nt, Human
gcaggguguggaggagauggauaaaaaguugu

SEQ ID NO: 434549 - RNA, 21 nt, Human
gcaggguuccugcuggauccc

SEQ ID NO: 434550 - RNA, 32 nt, Human
gcaggguucuuuuaacucuucucuccacaccc

SEQ ID NO: 434551 - RNA, 32 nt, Human
gcaggguugcccaccccugcuguccaccugcu

SEQ ID NO: 434552 - RNA, 21 nt, Human
gcaggguuggggcgggggcug

SEQ ID NO: 434553 - RNA, 32 nt, Human
gcaggguuguaaaccugcuuuaucuuuuagga

SEQ ID NO: 434554 - RNA, 32 nt, Human
gcagguaacgcguuccuuguauucagcaaggg

SEQ ID NO: 434555 - RNA, 32 nt, Human
gcagguaaugacucaguucccacugaggagcc

SEQ ID NO: 434556 - RNA, 22 nt, Human
gcagguaccacgguccucggcc

SEQ ID NO: 434557 - RNA, 32 nt, Human
gcagguacugcacugggcacuggggagaccaa

SEQ ID NO: 434558 - RNA, 32 nt, Human
gcagguacuuccaaguucccaggucugucugc

SEQ ID NO: 434559 - RNA, 32 nt, Human
gcagguagagcacagcuuuacuggcuguuugu

SEQ ID NO: 434560 - RNA, 32 nt, Human
gcagguagcagggggagugcuggucacacccc

SEQ ID NO: 434561 - RNA, 32 nt, Human
gcagguagcugauguggccaggauuugaaccc

SEQ ID NO: 434562 - RNA, 32 nt, Human
gcagguagguuagauguggguggugcauguua

SEQ ID NO: 434563 - RNA, 32 nt, Human
gcagguaucagaaauuccaaagggcauuuaug

SEQ ID NO: 434564 - RNA, 32 nt, Human
gcagguaucauccucagggaaccagcauggca

SEQ ID NO: 434565 - RNA, 32 nt, Human
gcagguauucaagugauucucccaucucgguc

SEQ ID NO: 434566 - RNA, 32 nt, Human
gcagguauuccugucauuccugacugaggcug

SEQ ID NO: 434567 - RNA, 19 nt, Human
gcaggucacacacagugaa

SEQ ID NO: 434568 - RNA, 32 nt, Human
gcaggucacagaaaggcagguuucauuucuua

SEQ ID NO: 434569 - RNA, 32 nt, Human
gcaggucagagcagagcauggccaugggaaca

SEQ ID NO: 434570 - RNA, 32 nt, Human
gcaggucaggcaggggaugcugguggcuggga

SEQ ID NO: 434571 - RNA, 32 nt, Human
gcaggucaggugagaggggcuagccggcaaaa

SEQ ID NO: 434572 - RNA, 32 nt, Human
gcaggucagugugcagagcccaaaugagggga

SEQ ID NO: 434573 - RNA, 32 nt, Human
gcaggucauucuagguuucuugaaugacuuua

SEQ ID NO: 434574 - RNA, 32 nt, Human
gcagguccacagcaccugggcagaggucagag

SEQ ID NO: 434575 - RNA, 32 nt, Human
gcagguccagcaguccuggcgggcugaggaga

SEQ ID NO: 434576 - RNA, 23 nt, Human
gcagguccagcuccugccuccca

SEQ ID NO: 434577 - RNA, 21 nt, Human
gcaggucccaggagcuggggg

SEQ ID NO: 434578 - RNA, 32 nt, Human
gcagguccccacccuccaacacgugcucaccu

SEQ ID NO: 434579 - RNA, 32 nt, Human
gcaggucccccuuagcgggaacagugaaagca

SEQ ID NO: 434580 - RNA, 32 nt, Human
gcaggucccgagagcugggcgugggaacagcg

SEQ ID NO: 434581 - RNA, 32 nt, Human
gcaggucccuuucuccaugcaggcccugacug

SEQ ID NO: 434582 - RNA, 32 nt, Human
gcagguccuccccuucuguguccugcagaugg

SEQ ID NO: 434583 - RNA, 18 nt, Human
gcagguccugaacacccu

SEQ ID NO: 434584 - RNA, 32 nt, Human
gcagguccugagcggcucggccccagaucccg

SEQ ID NO: 434585 - RNA, 32 nt, Human
gcagguccuggacuuggcaguuucuugcuccc

SEQ ID NO: 434586 - RNA, 20 nt, Human
gcagguccuggugcuggcgg

SEQ ID NO: 434587 - RNA, 32 nt, Human
gcagguccugugagcccugccuucauguuugg

SEQ ID NO: 434588 - RNA, 32 nt, Human
gcagguccuguguucucucccucucucuccug

SEQ ID NO: 434589 - RNA, 32 nt, Human
gcagguccuugcccugucuguaugguguccuc

SEQ ID NO: 434590 - RNA, 32 nt, Human
gcaggucgcacacugcaccaguuugcacauca

SEQ ID NO: 434591 - RNA, 23 nt, Human
gcaggucgggagaguagaguaca

SEQ ID NO: 434592 - RNA, 32 nt, Human
gcaggucgggaggaagaagagguggaggugug

SEQ ID NO: 434593 - RNA, 22 nt, Human
gcaggucgggagugagaaggac

SEQ ID NO: 434594 - RNA, 20 nt, Human
gcaggucggggaggaaggac

SEQ ID NO: 434595 - RNA, 32 nt, Human
gcaggucgugagauagagccugagauggggga

SEQ ID NO: 434596 - RNA, 32 nt, Human
gcaggucgugucuccuccugaccccaguggcu

SEQ ID NO: 434597 - RNA, 32 nt, Human
gcaggucucaaggcggcugagaggguggucuu

SEQ ID NO: 434598 - RNA, 32 nt, Human
gcaggucuccagcugaaucugugccuacaaau

SEQ ID NO: 434599 - RNA, 32 nt, Human
gcaggucuccagcugaaucugugccuacgaau

SEQ ID NO: 434600 - RNA, 32 nt, Human
gcaggucucucaccucucugaccucagcuucc

SEQ ID NO: 434601 - RNA, 32 nt, Human
gcaggucugaagacuaacauuuugugaaguug

SEQ ID NO: 434602 - RNA, 32 nt, Human
gcaggucugaggagcugagaagggaggcuuac

SEQ ID NO: 434603 - RNA, 20 nt, Human
gcaggucugcaggccaccag

SEQ ID NO: 434604 - RNA, 32 nt, Human
gcaggucugcuccccaccccugccucggaaga

SEQ ID NO: 434605 - RNA, 32 nt, Human
gcaggucuggccccagcggcgcgaagucacga

SEQ ID NO: 434606 - RNA, 32 nt, Human
gcaggucugggagccagagccucuguacgcgc

SEQ ID NO: 434607 - RNA, 21 nt, Human
gcaggucugggccagaugcug

SEQ ID NO: 434608 - RNA, 32 nt, Human
gcaggucugugucuccaccuugagccagggga

SEQ ID NO: 434609 - RNA, 32 nt, Human
gcaggucugugugcccaucagcagguucccau

SEQ ID NO: 434610 - RNA, 32 nt, Human
gcaggucuuccagacccugcgauccuuucugu

SEQ ID NO: 434611 - RNA, 32 nt, Human
gcaggucuugacucuaggucucagcuggaacc

SEQ ID NO: 434612 - RNA, 32 nt, Human
gcaggugaaagccaucaaagaauugggugacc

SEQ ID NO: 434613 - RNA, 32 nt, Human
gcaggugaaagccaucaaagaauugggugauc

SEQ ID NO: 434614 - RNA, 32 nt, Human
gcaggugaaccugaagaaagcaaaaggccugu

SEQ ID NO: 434615 - RNA, 32 nt, Human
gcaggugaagggcaacuauaguuuaaaccaag

SEQ ID NO: 434616 - RNA, 32 nt, Human
gcaggugaaugaaaggugaggccaggcugggg

SEQ ID NO: 434617 - RNA, 32 nt, Human
gcaggugacaaucucuguggauggcauucuua

SEQ ID NO: 434618 - RNA, 32 nt, Human
gcaggugacagggcguggcggagcugccacag

SEQ ID NO: 434619 - RNA, 32 nt, Human
gcaggugagagggagguggcuaagcuggcuau

SEQ ID NO: 434620 - RNA, 32 nt, Human
gcaggugagcacugcccugggcucuggcuggu

SEQ ID NO: 434621 - RNA, 31 nt, Human
gcaggugaggagagagauugagaacuaugag

SEQ ID NO: 434622 - RNA, 32 nt, Human
gcaggugagggugggaggcagaaaagaggcac

SEQ ID NO: 434623 - RNA, 32 nt, Human
gcaggugauucagagaccucacuugaaaauau

SEQ ID NO: 434624 - RNA, 17 nt, Human
gcaggugcacaaaguca

SEQ ID NO: 434625 - RNA, 32 nt, Human
gcaggugcacaauccagggcucagagaaauca

SEQ ID NO: 434626 - RNA, 32 nt, Human
gcaggugcaccacugggcuccuggguagugug

SEQ ID NO: 434627 - RNA, 32 nt, Human
gcaggugcagacaucuggaggagagagucgga

SEQ ID NO: 434628 - RNA, 19 nt, Human
gcaggugcaucacauacuu

SEQ ID NO: 434629 - RNA, 32 nt, Human
gcaggugcaugcugggaggucagacccuguga

SEQ ID NO: 434630 - RNA, 32 nt, Human
gcaggugcccugugcucaucucugccugggaa

SEQ ID NO: 434631 - RNA, 32 nt, Human
gcaggugccggaggggaggacagggaacagua

SEQ ID NO: 434632 - RNA, 32 nt, Human
gcaggugccggcugcugcagugcaguagcugc

SEQ ID NO: 434633 - RNA, 32 nt, Human
gcaggugccucaggaacccugaagcugggcug

SEQ ID NO: 434634 - RNA, 32 nt, Human
gcaggugccuguaaucacagcuacucgggagg

SEQ ID NO: 434635 - RNA, 32 nt, Human
gcaggugccuguaaucccagcacuuugggaag

SEQ ID NO: 434636 - RNA, 32 nt, Human
gcaggugccuguaaucccagcuacucgggagg

SEQ ID NO: 434637 - RNA, 32 nt, Human
gcaggugccuguaaucccagcuacucugucuc

SEQ ID NO: 434638 - RNA, 32 nt, Human
gcaggugccuguaaucccagcuacuggggaaa

SEQ ID NO: 434639 - RNA, 32 nt, Human
gcaggugccuguaaucccagcuacuugagagu

SEQ ID NO: 434640 - RNA, 32 nt, Human
gcaggugccuguaaucccagcuacuugggagg

SEQ ID NO: 434641 - RNA, 32 nt, Human
gcaggugccuguaaucccauguacucuggagg

SEQ ID NO: 434642 - RNA, 32 nt, Human
gcaggugccuguagucccagcuacucgggaag

SEQ ID NO: 434643 - RNA, 32 nt, Human
gcaggugccuguagucccagcuacucgggagg

SEQ ID NO: 434644 - RNA, 32 nt, Human
gcaggugccuguagucccagcuacucuggagg

SEQ ID NO: 434645 - RNA, 32 nt, Human
gcaggugccuguagucccagcuacuugggaca

SEQ ID NO: 434646 - RNA, 32 nt, Human
gcaggugccuguagucccagcuacuugggagg

SEQ ID NO: 434647 - RNA, 32 nt, Human
gcaggugccuguagucucagcuacucaggagg

SEQ ID NO: 434648 - RNA, 32 nt, Human
gcaggugcggggccaugaaugggaccgcaaac

SEQ ID NO: 434649 - RNA, 32 nt, Human
gcaggugcggggccgcuaggaucaauaaacgg

SEQ ID NO: 434650 - RNA, 32 nt, Human
gcaggugcucaguaaauacuugcugggugguu

SEQ ID NO: 434651 - RNA, 32 nt, Human
gcaggugcugagcaaagggaacagugaggugc

SEQ ID NO: 434652 - RNA, 32 nt, Human
gcaggugcuggcacaagagcagcggcuugggg

SEQ ID NO: 434653 - RNA, 32 nt, Human
gcaggugcugugguggguggggaccccacugc

SEQ ID NO: 434654 - RNA, 24 nt, Human
gcagguggaacacuugagaucagg

SEQ ID NO: 434655 - RNA, 32 nt, Human
gcagguggaaguggaaagaagccuguggagcu

SEQ ID NO: 434656 - RNA, 22 nt, Human
gcagguggaccaugaggucagg

SEQ ID NO: 434657 - RNA, 32 nt, Human
gcagguggagaacugcacccagcugggggagc

SEQ ID NO: 434658 - RNA, 32 nt, Human
gcagguggagagaacagaaggugggcagggcg

SEQ ID NO: 434659 - RNA, 32 nt, Human
gcagguggagagaauagaaggugggcagggcg

SEQ ID NO: 434660 - RNA, 32 nt, Human
gcagguggaggcagagauuagagaggggcugu

SEQ ID NO: 434661 - RNA, 24 nt, Human
gcagguggaucaacugaggucagg

SEQ ID NO: 434662 - RNA, 24 nt, Human
gcagguggaucaccuaaggucagg

SEQ ID NO: 434663 - RNA, 24 nt, Human
gcagguggaucaccucaagucagg

SEQ ID NO: 434664 - RNA, 24 nt, Human
gcagguggaucaccucaggucagg

SEQ ID NO: 434665 - RNA, 24 nt, Human
gcagguggaucaccugagaucagg

SEQ ID NO: 434666 - RNA, 22 nt, Human
gcagguggaucaccugagguca

SEQ ID NO: 434667 - RNA, 23 nt, Human
gcagguggaucaccugaggucag

SEQ ID NO: 434668 - RNA, 24 nt, Human
gcagguggaucaccugaggucagg

SEQ ID NO: 434669 - RNA, 24 nt, Human
gcagguggaucaccugagguccgg

SEQ ID NO: 434670 - RNA, 24 nt, Human
gcagguggaucaccugaggucggg

SEQ ID NO: 434671 - RNA, 24 nt, Human
gcagguggaucaccugagguuagg

SEQ ID NO: 434672 - RNA, 24 nt, Human
gcagguggaucaccuuaggucagg

SEQ ID NO: 434673 - RNA, 24 nt, Human
gcagguggaucacgugaggucagg

SEQ ID NO: 434674 - RNA, 25 nt, Human
gcagguggaucacucugaggucagg

SEQ ID NO: 434675 - RNA, 23 nt, Human
gcagguggaucacugaggucagg

SEQ ID NO: 434676 - RNA, 24 nt, Human
gcagguggaucacuuaagaucagg

SEQ ID NO: 434677 - RNA, 24 nt, Human
gcagguggaucacuugagaucagg

SEQ ID NO: 434678 - RNA, 32 nt, Human
gcagguggaucacuugagcucaggagcuugag

SEQ ID NO: 434679 - RNA, 32 nt, Human
gcagguggaucacuugagcucaggaguucaag

SEQ ID NO: 434680 - RNA, 32 nt, Human
gcagguggaucacuugagcucaggaguuugag

SEQ ID NO: 434681 - RNA, 24 nt, Human
gcagguggaucacuugaggccagg

SEQ ID NO: 434682 - RNA, 24 nt, Human
gcagguggaucacuugaggucagg

SEQ ID NO: 434683 - RNA, 24 nt, Human
gcagguggaucaucugaggucagg

SEQ ID NO: 434684 - RNA, 32 nt, Human
gcagguggaucccuugagcucaggaguucaag

SEQ ID NO: 434685 - RNA, 24 nt, Human
gcagguggaucgccugaggucagg

SEQ ID NO: 434686 - RNA, 32 nt, Human
gcagguggaucgcuugagcucaggaguuagag

SEQ ID NO: 434687 - RNA, 32 nt, Human
gcagguggaucgcuugagcucaggaguucgag

SEQ ID NO: 434688 - RNA, 32 nt, Human
gcagguggaucucuugagaccaggaggucaag

SEQ ID NO: 434689 - RNA, 32 nt, Human
gcagguggaugacuugagcucaggaguuugag

SEQ ID NO: 434690 - RNA, 24 nt, Human
gcagguggauuacccaaggccagg

SEQ ID NO: 434691 - RNA, 32 nt, Human
gcagguggauucuugcucugucacccaggcug

SEQ ID NO: 434692 - RNA, 32 nt, Human
gcagguggauugcuugagcucgggaguuugag

SEQ ID NO: 434693 - RNA, 21 nt, Human
gcagguggcagcgcggccgaa

SEQ ID NO: 434694 - RNA, 32 nt, Human
gcagguggcccagggaggcagauacagcacac

SEQ ID NO: 434695 - RNA, 19 nt, Human
gcagguggcccggcugcag

SEQ ID NO: 434696 - RNA, 32 nt, Human
gcagguggcgcugccuuccacccauggugaug

SEQ ID NO: 434697 - RNA, 24 nt, Human
gcagguggcucacuugaggucagg

SEQ ID NO: 434698 - RNA, 32 nt, Human
gcagguggcucugaggugagagacugaagaag

SEQ ID NO: 434699 - RNA, 32 nt, Human
gcagguggcugaagcagaagaaucacuugaac

SEQ ID NO: 434700 - RNA, 32 nt, Human
gcaggugggaggcacagauuguccgugggagg

SEQ ID NO: 434701 - RNA, 32 nt, Human
gcaggugggaggcacgggguugcggaucccgc

SEQ ID NO: 434702 - RNA, 32 nt, Human
gcaggugggaggugggacaggggcaagaggcc

SEQ ID NO: 434703 - RNA, 32 nt, Human
gcaggugggaggugugguugcaggugcgggcu

SEQ ID NO: 434704 - RNA, 32 nt, Human
gcaggugggcacaguggcgcagcucuggaucu

SEQ ID NO: 434705 - RNA, 32 nt, Human
gcaggugggcauaggugcagugagugcaggug

SEQ ID NO: 434706 - RNA, 32 nt, Human
gcagguggggcugaggggacucccagccucgc

SEQ ID NO: 434707 - RNA, 32 nt, Human
gcaggugggggcagcaggagggcagagggcag

SEQ ID NO: 434708 - RNA, 32 nt, Human
gcagguggguaggagagggaaagccagagugu

SEQ ID NO: 434709 - RNA, 32 nt, Human
gcaggugguacagagccagcaccaccaucuga

SEQ ID NO: 434710 - RNA, 32 nt, Human
gcagguggucagcuucagcuuucuccaucgaa

SEQ ID NO: 434711 - RNA, 23 nt, Human
gcagguggucccugcugaaaccc

SEQ ID NO: 434712 - RNA, 32 nt, Human
gcagguggugaggaagagugggguagagccag

SEQ ID NO: 434713 - RNA, 17 nt, Human
gcagguggugccugcag

SEQ ID NO: 434714 - RNA, 32 nt, Human
gcaggugguguccucagagcagccucgccugc

SEQ ID NO: 434715 - RNA, 32 nt, Human
gcagguguagccucugugccucguuguccccu

SEQ ID NO: 434716 - RNA, 32 nt, Human
gcagguguaucagaagauucuggguuugcagu

SEQ ID NO: 434717 - RNA, 32 nt, Human
gcaggugucauccugaguucaggcucugcacg

SEQ ID NO: 434718 - RNA, 18 nt, Human
gcagguguccccccagga

SEQ ID NO: 434719 - RNA, 32 nt, Human
gcagguguccuuuccccucucugccccugauc

SEQ ID NO: 434720 - RNA, 32 nt, Human
gcaggugucucugguguucagugaggaggaca

SEQ ID NO: 434721 - RNA, 32 nt, Human
gcaggugugaucaggggcucagagccaggguc

SEQ ID NO: 434722 - RNA, 31 nt, Human
gcaggugugcauguuccagccaacacuccac

SEQ ID NO: 434723 - RNA, 32 nt, Human
gcaggugugggaucuggggagagcggcuggag

SEQ ID NO: 434724 - RNA, 32 nt, Human
gcagguguguguggguccuccaccacucaccu

SEQ ID NO: 434725 - RNA, 32 nt, Human
gcagguguucucagccucacaugcccugccgu

SEQ ID NO: 434726 - RNA, 32 nt, Human
gcagguguugcagacaggagggccacagcgug

SEQ ID NO: 434727 - RNA, 32 nt, Human
gcagguguuguucugaccccagcuccacugug

SEQ ID NO: 434728 - RNA, 32 nt, Human
gcagguuaagacgacagccugcgcccccaacu

SEQ ID NO: 434729 - RNA, 32 nt, Human
gcagguuagcuagcccacccugugcuaguuuu

SEQ ID NO: 434730 - RNA, 32 nt, Human
gcagguucaagaaagcauaugucgaugguuga

SEQ ID NO: 434731 - RNA, 32 nt, Human
gcagguucaagcaauccucccacuucagccuc

SEQ ID NO: 434732 - RNA, 32 nt, Human
gcagguucauucugccacccaucugcauuaag

SEQ ID NO: 434733 - RNA, 32 nt, Human
gcagguuccaugggugacagccugagaucugu

SEQ ID NO: 434734 - RNA, 32 nt, Human
gcagguucccucuggccccaccaggagaagaa

SEQ ID NO: 434735 - RNA, 32 nt, Human
gcagguuccuuuccugggcaugguggcccagc

SEQ ID NO: 434736 - RNA, 24 nt, Human
gcagguucuccuccugagguccuc

SEQ ID NO: 434737 - RNA, 32 nt, Human
gcagguucucucucacugccaucaaacuguaa

SEQ ID NO: 434738 - RNA, 32 nt, Human
gcagguucugcagcauccugccuugcugcucu

SEQ ID NO: 434739 - RNA, 32 nt, Human
gcagguucugcucaccuucggguccuccucgc

SEQ ID NO: 434740 - RNA, 32 nt, Human
gcagguucugguggugggaagggaggcguuuc

SEQ ID NO: 434741 - RNA, 32 nt, Human
gcagguucuucagaugacgcugggugauguua

SEQ ID NO: 434742 - RNA, 32 nt, Human
gcagguugaaggauucacaggguaagaucggg

SEQ ID NO: 434743 - RNA, 32 nt, Human
gcagguugaauccuugcucucuucuccaaauu

SEQ ID NO: 434744 - RNA, 32 nt, Human
gcagguugacucugauauucauucccaaauga

SEQ ID NO: 434745 - RNA, 24 nt, Human
gcagguugaucaccugaggucagg

SEQ ID NO: 434746 - RNA, 19 nt, Human
gcagguugcagauacggug

SEQ ID NO: 434747 - RNA, 32 nt, Human
gcagguugcccaggaggagcugcagcgccagc

SEQ ID NO: 434748 - RNA, 32 nt, Human
gcagguugccccggauggaucucagagaugag

SEQ ID NO: 434749 - RNA, 32 nt, Human
gcagguuggaaggggccuugcugaguggcgca

SEQ ID NO: 434750 - RNA, 32 nt, Human
gcagguuggauggaacacagugccccacuuuu

SEQ ID NO: 434751 - RNA, 32 nt, Human
gcagguugggagggaaagucgggggaggacgc

SEQ ID NO: 434752 - RNA, 32 nt, Human
gcagguuuauacuuagaaauauuugaagaaaa

SEQ ID NO: 434753 - RNA, 32 nt, Human
gcagguuuccaaauccgguacuuaguuugugu

SEQ ID NO: 434754 - RNA, 32 nt, Human
gcagguuucugcccugacauucucuugucugc

SEQ ID NO: 434755 - RNA, 32 nt, Human
gcagguuucuuggcugacauaguggauugagc

SEQ ID NO: 434756 - RNA, 32 nt, Human
gcagguuugaucuggugggucuuugggguggg

SEQ ID NO: 434757 - RNA, 24 nt, Human
gcagguuuggggacggcgaggaca

SEQ ID NO: 434758 - RNA, 32 nt, Human
gcaguaaaaaccagguuugcuacuggaaaaag

SEQ ID NO: 434759 - RNA, 32 nt, Human
gcaguaaacaaagacauuccugccuggcaguc

SEQ ID NO: 434760 - RNA, 32 nt, Human
gcaguaaacuccaccuaaccagauucaggggc

SEQ ID NO: 434761 - RNA, 22 nt, Human
gcaguaacucacgccuguaauc

SEQ ID NO: 434762 - RNA, 20 nt, Human
gcaguaagaagcugcuggca

SEQ ID NO: 434763 - RNA, 32 nt, Human
gcaguaagagggaggggaggaggcaggagggc

SEQ ID NO: 434764 - RNA, 32 nt, Human
gcaguaagaugguaacaaaaccucauauuguc

SEQ ID NO: 434765 - RNA, 32 nt, Human
gcaguaagccaagaucaugcugugccucaagg

SEQ ID NO: 434766 - RNA, 32 nt, Human
gcaguaagcugagaucgcugcacuccagccug

SEQ ID NO: 434767 - RNA, 32 nt, Human
gcaguaagcuggacacagagguguagugugcg

SEQ ID NO: 434768 - RNA, 32 nt, Human
gcaguaaggaagaggaauauauagcaacucag

SEQ ID NO: 434769 - RNA, 32 nt, Human
gcaguaaggccacccuggcaccucuuuaucua

SEQ ID NO: 434770 - RNA, 18 nt, Human
gcaguaagucacacagua

SEQ ID NO: 434771 - RNA, 32 nt, Human
gcaguaaguccccagcagugagcuguguaagc

SEQ ID NO: 434772 - RNA, 32 nt, Human
gcaguaauauaccaccagcccaaggagaaaac

SEQ ID NO: 434773 - RNA, 32 nt, Human
gcaguaaucugucaguguuuguauuuguauuc

SEQ ID NO: 434774 - RNA, 32 nt, Human
gcaguaaucugucaguguuuguauuuguauuu

SEQ ID NO: 434775 - RNA, 31 nt, Human
gcaguacaauuucagcauaucucuggcucag

SEQ ID NO: 434776 - RNA, 32 nt, Human
gcaguacagaggaaaacaggaaccugauuuuu

SEQ ID NO: 434777 - RNA, 32 nt, Human
gcaguaccaguauaagaugacauuccaaagac

SEQ ID NO: 434778 - RNA, 32 nt, Human
gcaguaccagugccaugucccagacaggcucg

SEQ ID NO: 434779 - RNA, 32 nt, Human
gcaguaccauucaggacauaggcacaggcaaa

SEQ ID NO: 434780 - RNA, 32 nt, Human
gcaguacccauguugauuugacaucucucuag

SEQ ID NO: 434781 - RNA, 32 nt, Human
gcaguaccggggcuggagcggagugaagcugu

SEQ ID NO: 434782 - RNA, 32 nt, Human
gcaguaccugcaacugaggauucuucccgggg

SEQ ID NO: 434783 - RNA, 32 nt, Human
gcaguaccugggauuuucccaccaauacaaac

SEQ ID NO: 434784 - RNA, 32 nt, Human
gcaguacucaacccucuccauucaaagccccu

SEQ ID NO: 434785 - RNA, 32 nt, Human
gcaguacugcuccacuucaccuuccuagugac

SEQ ID NO: 434786 - RNA, 32 nt, Human
gcaguacuugcacacauuuuggagauuguauu

SEQ ID NO: 434787 - RNA, 32 nt, Human
gcaguagaaaggaggaaggagggagagggaag

SEQ ID NO: 434788 - RNA, 32 nt, Human
gcaguagaagauggugaaagaaacaacuuacu

SEQ ID NO: 434789 - RNA, 19 nt, Human
gcaguagaaucgcuugaac

SEQ ID NO: 434790 - RNA, 32 nt, Human
gcaguagacuggggcgucaccuccaggccguu

SEQ ID NO: 434791 - RNA, 32 nt, Human
gcaguagagaugcaguuucaucaaagaacaaa

SEQ ID NO: 434792 - RNA, 32 nt, Human
gcaguagaggacugcagcugccuaggucugcg

SEQ ID NO: 434793 - RNA, 32 nt, Human
gcaguagaggacugcagcugucuaggucugcg

SEQ ID NO: 434794 - RNA, 32 nt, Human
gcaguagagugaucucagcucacugcaaccuc

SEQ ID NO: 434795 - RNA, 32 nt, Human
gcaguagagugcuuccagggaggagaaaggac

SEQ ID NO: 434796 - RNA, 32 nt, Human
gcaguagcagaggcuucuacaaauaccaacac

SEQ ID NO: 434797 - RNA, 22 nt, Human
gcaguagcaguugccuguaauc

SEQ ID NO: 434798 - RNA, 32 nt, Human
gcaguagcaugaccacugcuuccugucuaccc

SEQ ID NO: 434799 - RNA, 21 nt, Human
gcaguagccacauggugcugg

SEQ ID NO: 434800 - RNA, 32 nt, Human
gcaguagccaguggauaaacuaaccuguugau

SEQ ID NO: 434801 - RNA, 23 nt, Human
gcaguagcucacacccuguaauc

SEQ ID NO: 434802 - RNA, 32 nt, Human
gcaguagcucacacccuguaaucccagcacuu

SEQ ID NO: 434803 - RNA, 22 nt, Human
gcaguagcucacaccuguaauc

SEQ ID NO: 434804 - RNA, 22 nt, Human
gcaguagcucacaccuguaguc

SEQ ID NO: 434805 - RNA, 21 nt, Human
gcaguagcucacacuguaauc

SEQ ID NO: 434806 - RNA, 22 nt, Human
gcaguagcucacgccuguaauc

SEQ ID NO: 434807 - RNA, 32 nt, Human
gcaguagcugcacucagcugcccgcgcggcaa

SEQ ID NO: 434808 - RNA, 32 nt, Human
gcaguagcugggugggcagcauggcugggauc

SEQ ID NO: 434809 - RNA, 18 nt, Human
gcaguagcuucugggcca

SEQ ID NO: 434810 - RNA, 32 nt, Human
gcaguaggacagagccauacaugugaaaucug

SEQ ID NO: 434811 - RNA, 32 nt, Human
gcaguaggagggagaggaaggggugccaccgu

SEQ ID NO: 434812 - RNA, 24 nt, Human
gcaguaggaucucagccacaaggg

SEQ ID NO: 434813 - RNA, 23 nt, Human
gcaguaggcauuacuacaguaca

SEQ ID NO: 434814 - RNA, 32 nt, Human
gcaguaggcuuaguucuggccuguccccucca

SEQ ID NO: 434815 - RNA, 32 nt, Human
gcaguagggacuggaagauaugucaucugcug

SEQ ID NO: 434816 - RNA, 32 nt, Human
gcaguagggaggcagaguaucuugguggggag

SEQ ID NO: 434817 - RNA, 32 nt, Human
gcaguagggagucucucaccgucgcauggucc

SEQ ID NO: 434818 - RNA, 32 nt, Human
gcaguaggggagagagcagagaaguacagguc

SEQ ID NO: 434819 - RNA, 32 nt, Human
gcaguagugaaaagcuuagaugaguacggaua

SEQ ID NO: 434820 - RNA, 32 nt, Human
gcaguaguucaguucucuucaugguuaugucu

SEQ ID NO: 434821 - RNA, 32 nt, Human
gcaguaguucaugcccuguaauccuagaacuu

SEQ ID NO: 434822 - RNA, 32 nt, Human
gcaguaguuccagugaccagaaaaauuaaacc

SEQ ID NO: 434823 - RNA, 32 nt, Human
gcaguauaccacccggccuggccgccaccacc

SEQ ID NO: 434824 - RNA, 31 nt, Human
gcaguauaggagagagagcaaggauugaguc

SEQ ID NO: 434825 - RNA, 21 nt, Human
gcaguauaugugcacacagua

SEQ ID NO: 434826 - RNA, 32 nt, Human
gcaguauaugugcacacaguaaguacacaaau

SEQ ID NO: 434827 - RNA, 32 nt, Human
gcaguaucuccucugggaccugccaugcugag

SEQ ID NO: 434828 - RNA, 32 nt, Human
gcaguaucugugagaaaaaccugaaaauuaau

SEQ ID NO: 434829 - RNA, 32 nt, Human
gcaguaucuguuucucuuccuaggcucaaguu

SEQ ID NO: 434830 - RNA, 32 nt, Human
gcaguaugaacucugguugcaaucccuccccc

SEQ ID NO: 434831 - RNA, 30 nt, Human
gcaguaugaguguggggaauagugugaaca

SEQ ID NO: 434832 - RNA, 32 nt, Human
gcaguauggaaaccccacaagguggcuguuau

SEQ ID NO: 434833 - RNA, 19 nt, Human
gcaguauguuuacauguca

SEQ ID NO: 434834 - RNA, 32 nt, Human
gcaguauuauuugcaaaagccaagagguguaa

SEQ ID NO: 434835 - RNA, 32 nt, Human
gcaguauuugcuuaggaaacuaauuuagucau

SEQ ID NO: 434836 - RNA, 32 nt, Human
gcagucaagugccucccagccucggcucagca

SEQ ID NO: 434837 - RNA, 32 nt, Human
gcagucacaccccugcacuccagccuggguga

SEQ ID NO: 434838 - RNA, 32 nt, Human
gcagucacaggcccaggaaggcggcaggcaga

SEQ ID NO: 434839 - RNA, 32 nt, Human
gcagucacaggugagggugguauuagcaucuu

SEQ ID NO: 434840 - RNA, 18 nt, Human
gcagucaccaugcucucc

SEQ ID NO: 434841 - RNA, 32 nt, Human
gcagucacccacacucugggccuguggcacca

SEQ ID NO: 434842 - RNA, 18 nt, Human
gcagucaccccucccucc

SEQ ID NO: 434843 - RNA, 32 nt, Human
gcagucaccgcugccucugccaguucgugugu

SEQ ID NO: 434844 - RNA, 32 nt, Human
gcagucacggagugagugaacaugcaugauuc

SEQ ID NO: 434845 - RNA, 32 nt, Human
gcagucacucaaugccagcccaugaaagcagc

SEQ ID NO: 434846 - RNA, 32 nt, Human
gcagucacucugcuaagagucccucccugcca

SEQ ID NO: 434847 - RNA, 17 nt, Human
gcagucagcacauagcc

SEQ ID NO: 434848 - RNA, 32 nt, Human
gcagucagcacuuauuuaccaucaagcaaucc

SEQ ID NO: 434849 - RNA, 32 nt, Human
gcagucagcaucuuaaaguaaauguucaugga

SEQ ID NO: 434850 - RNA, 32 nt, Human
gcagucagcauuaaugaaacucauguuuaaac

SEQ ID NO: 434851 - RNA, 32 nt, Human
gcagucagccaagaucuugccacuguacucca

SEQ ID NO: 434852 - RNA, 32 nt, Human
gcagucagcgcuuauuuaccaucaagcaaucc

SEQ ID NO: 434853 - RNA, 32 nt, Human
gcagucagcucacuccacuccugggcucaagc

SEQ ID NO: 434854 - RNA, 32 nt, Human
gcagucagcucccugccugcagggccgccgcc

SEQ ID NO: 434855 - RNA, 32 nt, Human
gcagucagcuccugagacacagcuggccggca

SEQ ID NO: 434856 - RNA, 32 nt, Human
gcagucaggcagacccagugauaugguaagaa

SEQ ID NO: 434857 - RNA, 32 nt, Human
gcagucaggcuggcaguggcgcgguacaggga

SEQ ID NO: 434858 - RNA, 32 nt, Human
gcagucagggagcagcggcggcagagacaggg

SEQ ID NO: 434859 - RNA, 31 nt, Human
gcagucaguaaaauccucccacugccuccgg

SEQ ID NO: 434860 - RNA, 32 nt, Human
gcagucagucuguucuggaggguggagagaga

SEQ ID NO: 434861 - RNA, 32 nt, Human
gcagucauaagcucuguuucccccucucccca

SEQ ID NO: 434862 - RNA, 32 nt, Human
gcagucauacuagugguuaagauauuugggaa

SEQ ID NO: 434863 - RNA, 32 nt, Human
gcagucaucaacaaaagggagaacauggccaa

SEQ ID NO: 434864 - RNA, 32 nt, Human
gcagucaucaucuucaggauguuucuucagga

SEQ ID NO: 434865 - RNA, 19 nt, Human
gcagucaucccugccacca

SEQ ID NO: 434866 - RNA, 31 nt, Human
gcagucaugaggaaacaggucagggcgaagc

SEQ ID NO: 434867 - RNA, 31 nt, Human
gcagucauggcucagggacacucugaaguag

SEQ ID NO: 434868 - RNA, 32 nt, Human
gcagucauuccucaauuacugccugcagcaau

SEQ ID NO: 434869 - RNA, 32 nt, Human
gcagucauuucagggggcuccugcugaccccg

SEQ ID NO: 434870 - RNA, 32 nt, Human
gcaguccaacagcaccagcacggcuaugacag

SEQ ID NO: 434871 - RNA, 32 nt, Human
gcaguccaacccagauuagugcagcccggagg

SEQ ID NO: 434872 - RNA, 32 nt, Human
gcaguccacucccauguaaccaugaaagagag

SEQ ID NO: 434873 - RNA, 32 nt, Human
gcaguccacugcauagucauucagcucugcaa

SEQ ID NO: 434874 - RNA, 32 nt, Human
gcaguccagaucaaaaauggcgguaguuggug

SEQ ID NO: 434875 - RNA, 32 nt, Human
gcaguccagccucuccccauuugaggccauau

SEQ ID NO: 434876 - RNA, 24 nt, Human
gcaguccagccugggcaacaagag

SEQ ID NO: 434877 - RNA, 18 nt, Human
gcaguccagcgugcaucc

SEQ ID NO: 434878 - RNA, 32 nt, Human
gcaguccaggagauuauuaaggggucgccaug

SEQ ID NO: 434879 - RNA, 32 nt, Human
gcaguccaggucucccuucucccacuugccua

SEQ ID NO: 434880 - RNA, 32 nt, Human
gcaguccagugcaaagccgcccccagagccca

SEQ ID NO: 434881 - RNA, 32 nt, Human
gcaguccauaaauaccucugucagaaucaaag

SEQ ID NO: 434882 - RNA, 19 nt, Human
gcaguccauguggcugcca

SEQ ID NO: 434883 - RNA, 32 nt, Human
gcagucccagagccagcccugcccucagcccu

SEQ ID NO: 434884 - RNA, 32 nt, Human
gcagucccagcaggacccauggaguguccuuc

SEQ ID NO: 434885 - RNA, 32 nt, Human
gcagucccagccucagaacccaggauaggaaa

SEQ ID NO: 434886 - RNA, 32 nt, Human
gcagucccaguuacuugggugccugaggcagg

SEQ ID NO: 434887 - RNA, 32 nt, Human
gcagucccauuuccuacccguaauacuuucuu

SEQ ID NO: 434888 - RNA, 32 nt, Human
gcaguccccagccagggagaccagguguuguc

SEQ ID NO: 434889 - RNA, 19 nt, Human
gcagucccccaacuacccc

SEQ ID NO: 434890 - RNA, 32 nt, Human
gcagucccccucaguucgugcugcaauaaagg

SEQ ID NO: 434891 - RNA, 32 nt, Human
gcagucccccuccacauguauccacaucugag

SEQ ID NO: 434892 - RNA, 32 nt, Human
gcaguccccuucuugcaggucucagcuugcgg

SEQ ID NO: 434893 - RNA, 32 nt, Human
gcagucccuccagguggggcuggagccugcug

SEQ ID NO: 434894 - RNA, 32 nt, Human
gcagucccuccucuccccaguguccacaguca

SEQ ID NO: 434895 - RNA, 32 nt, Human
gcagucccucuucagagacuguuccagccuca

SEQ ID NO: 434896 - RNA, 32 nt, Human
gcagucccugcagauggcccauuuggagaucu

SEQ ID NO: 434897 - RNA, 32 nt, Human
gcagucccugcagcucucuuuccucuggggca

SEQ ID NO: 434898 - RNA, 32 nt, Human
gcaguccgaggcaggggaauugcuugaacuca

SEQ ID NO: 434899 - RNA, 32 nt, Human
gcaguccgcaguccagccugggcgacagagcg

SEQ ID NO: 434900 - RNA, 32 nt, Human
gcaguccgcccaucugagcacagggucugucc

SEQ ID NO: 434901 - RNA, 32 nt, Human
gcaguccggcgccuggcccaggaaaagagugg

SEQ ID NO: 434902 - RNA, 32 nt, Human
gcaguccuacuacagucuggagugggguccua

SEQ ID NO: 434903 - RNA, 32 nt, Human
gcaguccuagccccaaaccagcccagagcagg

SEQ ID NO: 434904 - RNA, 32 nt, Human
gcaguccucaauuaaucucuggugcacuuaac

SEQ ID NO: 434905 - RNA, 32 nt, Human
gcaguccucagagcuucucugccuauggagua

SEQ ID NO: 434906 - RNA, 32 nt, Human
gcaguccuccacuggcccagcacuccaguuuc

SEQ ID NO: 434907 - RNA, 32 nt, Human
gcaguccucccaccucagccuccuggguagcu

SEQ ID NO: 434908 - RNA, 32 nt, Human
gcaguccucccaccucagucuccugaguagcu

SEQ ID NO: 434909 - RNA, 32 nt, Human
gcaguccucccaccuuggccucccagaaugcu

SEQ ID NO: 434910 - RNA, 32 nt, Human
gcaguccugaggacccaggagcaguggcccca

SEQ ID NO: 434911 - RNA, 32 nt, Human
gcaguccugauagcuucucuagccucggucuu

SEQ ID NO: 434912 - RNA, 32 nt, Human
gcaguccugcagcagcaaacacaucaucagcc

SEQ ID NO: 434913 - RNA, 32 nt, Human
gcaguccugggauguggcugcagcagcggugg

SEQ ID NO: 434914 - RNA, 32 nt, Human
gcaguccugugccagggcguuggggcugcucc

SEQ ID NO: 434915 - RNA, 32 nt, Human
gcaguccugugugaggaugaagggacgggggu

SEQ ID NO: 434916 - RNA, 32 nt, Human
gcaguccuucacugcuacccagucagacccuc

SEQ ID NO: 434917 - RNA, 32 nt, Human
gcagucgauucacccagcaucuugccagaagu

SEQ ID NO: 434918 - RNA, 32 nt, Human
gcagucgccgcuccagucuauccggcacuagg

SEQ ID NO: 434919 - RNA, 21 nt, Human
gcagucgccugccugcagcag

SEQ ID NO: 434920 - RNA, 32 nt, Human
gcagucgcuugccaaagcagauuuuccuaagg

SEQ ID NO: 434921 - RNA, 17 nt, Human
gcagucggcccaugucc

SEQ ID NO: 434922 - RNA, 18 nt, Human
gcagucggcugcguccuc

SEQ ID NO: 434923 - RNA, 32 nt, Human
gcagucgggagguggaggcaccggcugcauug

SEQ ID NO: 434924 - RNA, 22 nt, Human
gcagucgggcuggagcuggagu

SEQ ID NO: 434925 - RNA, 21 nt, Human
gcagucgucacgccuguaauc

SEQ ID NO: 434926 - RNA, 21 nt, Human
gcagucgugcccaggagcaga

SEQ ID NO: 434927 - RNA, 31 nt, Human
gcagucguugcuggccagcacuuguguagaa

SEQ ID NO: 434928 - RNA, 32 nt, Human
gcagucuagguggcauagugaugaagaaaggg

SEQ ID NO: 434929 - RNA, 32 nt, Human
gcagucucaagaaauguacucgggcgacaccu

SEQ ID NO: 434930 - RNA, 32 nt, Human
gcagucucaccaagcccuaucacuaauaccac

SEQ ID NO: 434931 - RNA, 32 nt, Human
gcagucucauuucucauaauuuugcaaauuau

SEQ ID NO: 434932 - RNA, 32 nt, Human
gcagucuccacggaggccucaggccucggugu

SEQ ID NO: 434933 - RNA, 32 nt, Human
gcagucuccagccugagccaugggccgccgag

SEQ ID NO: 434934 - RNA, 32 nt, Human
gcagucucccacacggacaccuucuggaggaa

SEQ ID NO: 434935 - RNA, 32 nt, Human
gcagucucccgaagugcugggauuacugacau

SEQ ID NO: 434936 - RNA, 32 nt, Human
gcagucuccucuuuaaaacaaaacaaaacaaa

SEQ ID NO: 434937 - RNA, 32 nt, Human
gcagucuccugcccucuccccuguccugaugg

SEQ ID NO: 434938 - RNA, 32 nt, Human
gcagucuccuggcccgcggcugcuccgggccu

SEQ ID NO: 434939 - RNA, 32 nt, Human
gcagucucuccucucagcuggugucuccagug

SEQ ID NO: 434940 - RNA, 32 nt, Human
gcagucucugcuccagaaucucuggacggagc

SEQ ID NO: 434941 - RNA, 32 nt, Human
gcagucucuuuaccaccuccccaauuacacug

SEQ ID NO: 434942 - RNA, 32 nt, Human
gcagucucuuuagguaggcagggccuuugcug

SEQ ID NO: 434943 - RNA, 32 nt, Human
gcagucugagguauuggguauacuuauacucu

SEQ ID NO: 434944 - RNA, 32 nt, Human
gcagucugcacccugcacucccucccuugccu

SEQ ID NO: 434945 - RNA, 32 nt, Human
gcagucugcugggacaugcacauaucaggggu

SEQ ID NO: 434946 - RNA, 32 nt, Human
gcagucuggaaagaagggaaggcaggaguuuc

SEQ ID NO: 434947 - RNA, 23 nt, Human
gcagucuggaacuccugggccca

SEQ ID NO: 434948 - RNA, 32 nt, Human
gcagucuggccccagccucugugggcuuaacc

SEQ ID NO: 434949 - RNA, 32 nt, Human
gcagucuggcuuccccaaagaccucaagcuca

SEQ ID NO: 434950 - RNA, 32 nt, Human
gcagucugggcaacauggugagaccccaucuc

SEQ ID NO: 434951 - RNA, 32 nt, Human
gcagucugggcaauauagugaggcucccaucu

SEQ ID NO: 434952 - RNA, 32 nt, Human
gcagucuguuucuccccuagacucugggccug

SEQ ID NO: 434953 - RNA, 32 nt, Human
gcagucuucccaggccccgcuuuugcuuuugg

SEQ ID NO: 434954 - RNA, 32 nt, Human
gcagucuucccuagucccccaaauaaguaaua

SEQ ID NO: 434955 - RNA, 32 nt, Human
gcagucuucggcccucuccugucgccgccaug

SEQ ID NO: 434956 - RNA, 32 nt, Human
gcagucuucuaagccaccuuguggaucccaag

SEQ ID NO: 434957 - RNA, 32 nt, Human
gcagucuuugagcuucgccucuugccccgaga

SEQ ID NO: 434958 - RNA, 32 nt, Human
gcagucuuuucccaucucaggccucagcacca

SEQ ID NO: 434959 - RNA, 32 nt, Human
gcagugaacagcccuggcugggggugcagcca

SEQ ID NO: 434960 - RNA, 32 nt, Human
gcagugaagaaagggacggagauacugggaca

SEQ ID NO: 434961 - RNA, 18 nt, Human
gcagugaaguacucagua

SEQ ID NO: 434962 - RNA, 32 nt, Human
gcagugaaguccugccuuguuucaggugggaa

SEQ ID NO: 434963 - RNA, 32 nt, Human
gcagugacaacucugacaccacugacagucau

SEQ ID NO: 434964 - RNA, 32 nt, Human
gcagugacaugaucauagcucacugcagccug

SEQ ID NO: 434965 - RNA, 32 nt, Human
gcagugacaugaucuuagcucacugcaaccuc

SEQ ID NO: 434966 - RNA, 32 nt, Human
gcagugacccacccaccuaccuuugcaucacc

SEQ ID NO: 434967 - RNA, 32 nt, Human
gcagugacccagcccaggacgaaguuuacaaa

SEQ ID NO: 434968 - RNA, 32 nt, Human
gcagugacccuggaaaaccaggaacaauugac

SEQ ID NO: 434969 - RNA, 20 nt, Human
gcagugacgcgcucuccuca

SEQ ID NO: 434970 - RNA, 22 nt, Human
gcagugacucacaucuguaauc

SEQ ID NO: 434971 - RNA, 22 nt, Human
gcagugacucacgccuguaauc

SEQ ID NO: 434972 - RNA, 32 nt, Human
gcagugacucagcuuccuaaauagcuggaauu

SEQ ID NO: 434973 - RNA, 32 nt, Human
gcagugacucugggaaauccuucauuaaucau

SEQ ID NO: 434974 - RNA, 22 nt, Human
gcagugacuuacgccuguaauc

SEQ ID NO: 434975 - RNA, 32 nt, Human
gcagugagaaguugcucuucagccuggaaaau

SEQ ID NO: 434976 - RNA, 32 nt, Human
gcagugagagacauuuacagccuccucucuau

SEQ ID NO: 434977 - RNA, 32 nt, Human
gcagugagagcagacaucugugccucauuccu

SEQ ID NO: 434978 - RNA, 32 nt, Human
gcagugagaggaagggagggaugaggaggugg

SEQ ID NO: 434979 - RNA, 32 nt, Human
gcagugagauaggaaaucaagauggaagcaga

SEQ ID NO: 434980 - RNA, 32 nt, Human
gcagugagcagcugcccaggccccuugcacug

SEQ ID NO: 434981 - RNA, 32 nt, Human
gcagugagccaagaucgugcaacugcacucca

SEQ ID NO: 434982 - RNA, 32 nt, Human
gcagugagccaagaucucgccacugcacucca

SEQ ID NO: 434983 - RNA, 32 nt, Human
gcagugagccacggcacuccacccugggcaac

SEQ ID NO: 434984 - RNA, 32 nt, Human
gcagugagccacugcacuccagccugaugaca

SEQ ID NO: 434985 - RNA, 32 nt, Human
gcagugagccaggcuagccacagaggguuccc

SEQ ID NO: 434986 - RNA, 32 nt, Human
gcagugagccgagaucauugcauugcacucca

SEQ ID NO: 434987 - RNA, 32 nt, Human
gcagugagccgagaucgcgccacccacuccag

SEQ ID NO: 434988 - RNA, 32 nt, Human
gcagugagccuagaucgcgucacugcacucca

SEQ ID NO: 434989 - RNA, 32 nt, Human
gcagugagcuaugguagcaccacugcacuuca

SEQ ID NO: 434990 - RNA, 32 nt, Human
gcagugagcuggaaucgugccacuccacucca

SEQ ID NO: 434991 - RNA, 32 nt, Human
gcagugagcuggagcugggauccugcucugcu

SEQ ID NO: 434992 - RNA, 32 nt, Human
gcagugaggaagagaaaagcagagauaagcaa

SEQ ID NO: 434993 - RNA, 32 nt, Human
gcagugaggcagcaaugcugaguagguaggau

SEQ ID NO: 434994 - RNA, 32 nt, Human
gcagugaggcgccggagaaggccaaggcagac

SEQ ID NO: 434995 - RNA, 32 nt, Human
gcagugagggaaugggagcagcugugggcgcc

SEQ ID NO: 434996 - RNA, 32 nt, Human
gcagugagggccugcagccggccggccagggc

SEQ ID NO: 434997 - RNA, 32 nt, Human
gcagugaggggagaugcugggauagccauuuc

SEQ ID NO: 434998 - RNA, 32 nt, Human
gcagugaggggugggagaaggugaaugauuca

SEQ ID NO: 434999 - RNA, 32 nt, Human
gcagugaggucaagagcccaaccuucuuucac

SEQ ID NO: 435000 - RNA, 32 nt, Human
gcagugaggugggggcgggugggcagggaaug

SEQ ID NO: 435001 - RNA, 32 nt, Human
gcagugagguuuucuucaugucuucuguuccc

SEQ ID NO: 435002 - RNA, 32 nt, Human
gcagugagucuucccagagaaaggacaggguu

SEQ ID NO: 435003 - RNA, 32 nt, Human
gcagugauacagauuggcagccacugcagaga

SEQ ID NO: 435004 - RNA, 32 nt, Human
gcagugauacgaucaugacucacugcagccuc

SEQ ID NO: 435005 - RNA, 32 nt, Human
gcagugauagagcugagagcuccacccccaca

SEQ ID NO: 435006 - RNA, 19 nt, Human
gcagugauaucacauagua

SEQ ID NO: 435007 - RNA, 32 nt, Human
gcagugaucacaucuaaacaaaguuuagguaa

SEQ ID NO: 435008 - RNA, 18 nt, Human
gcagugaucuaugcugua

SEQ ID NO: 435009 - RNA, 32 nt, Human
gcagugaugaagaugaccucccuccagaccug

SEQ ID NO: 435010 - RNA, 32 nt, Human
gcagugaugaugaaaacuuaggaagaagguau

SEQ ID NO: 435011 - RNA, 32 nt, Human
gcagugaugccaugcaugagauccgcugugcc

SEQ ID NO: 435012 - RNA, 32 nt, Human
gcagugaugggaaugaaagaugaguuagaucu

SEQ ID NO: 435013 - RNA, 32 nt, Human
gcagugauguuugccauuugcuggacaaccaa

SEQ ID NO: 435014 - RNA, 19 nt, Human
gcagugauuaguugaacag

SEQ ID NO: 435015 - RNA, 19 nt, Human
gcagugauuugccaaagug

SEQ ID NO: 435016 - RNA, 18 nt, Human
gcagugauuuguuuugua

SEQ ID NO: 435017 - RNA, 21 nt, Human
gcagugcaccugccacagagg

SEQ ID NO: 435018 - RNA, 19 nt, Human
gcagugcacgccuguaauc

SEQ ID NO: 435019 - RNA, 32 nt, Human
gcagugcacucuggaagcaagugcuggcccug

SEQ ID NO: 435020 - RNA, 32 nt, Human
gcagugcacuugccccuccucaugccccuucu

SEQ ID NO: 435021 - RNA, 32 nt, Human
gcagugcagaacuacaagucccagggauccua

SEQ ID NO: 435022 - RNA, 32 nt, Human
gcagugcagaaugggccagcagggcugcaggu

SEQ ID NO: 435023 - RNA, 20 nt, Human
gcagugcagacggccgugag

SEQ ID NO: 435024 - RNA, 21 nt, Human
gcagugcagacgggccugggg

SEQ ID NO: 435025 - RNA, 20 nt, Human
gcagugcagcauggaaaagg

SEQ ID NO: 435026 - RNA, 32 nt, Human
gcagugcagccaaucagaaauggcucuuguga

SEQ ID NO: 435027 - RNA, 21 nt, Human
gcagugcagcuggagaggaag

SEQ ID NO: 435028 - RNA, 32 nt, Human
gcagugcaggggugaucucugcuuccuguacc

SEQ ID NO: 435029 - RNA, 32 nt, Human
gcagugcaguaaguuuguuuacaccaguauca

SEQ ID NO: 435030 - RNA, 32 nt, Human
gcagugccaacggccucugcccgcccacccgc

SEQ ID NO: 435031 - RNA, 32 nt, Human
gcagugccagcccagcucuccccuccacacug

SEQ ID NO: 435032 - RNA, 32 nt, Human
gcagugccagccuggggcagcagguacugccu

SEQ ID NO: 435033 - RNA, 32 nt, Human
gcagugccaggaccacccuugccugcagccuu

SEQ ID NO: 435034 - RNA, 32 nt, Human
gcagugccauggguguggggccagcagcuggu

SEQ ID NO: 435035 - RNA, 20 nt, Human
gcagugcccagcaggcagcg

SEQ ID NO: 435036 - RNA, 32 nt, Human
gcagugcccagccacuaaccugcacaagaucg

SEQ ID NO: 435037 - RNA, 32 nt, Human
gcagugcccgggcugccuccgggccucccgcc

SEQ ID NO: 435038 - RNA, 32 nt, Human
gcagugcccuuuccucccacuuuuccuccccc

SEQ ID NO: 435039 - RNA, 31 nt, Human
gcagugccuccuccugggccugggucuggaa

SEQ ID NO: 435040 - RNA, 32 nt, Human
gcagugccucugcgcaaucuccgggcaaguuc

SEQ ID NO: 435041 - RNA, 32 nt, Human
gcagugccugcucugcugugagccgccaggaa

SEQ ID NO: 435042 - RNA, 32 nt, Human
gcagugccugcugcccgugugcaugaagguac

SEQ ID NO: 435043 - RNA, 32 nt, Human
gcagugccugcuucugcuccaucaggugcagg

SEQ ID NO: 435044 - RNA, 32 nt, Human
gcagugccugggauaaaggcucuuguucaggc

SEQ ID NO: 435045 - RNA, 32 nt, Human
gcagugcgcaacacccucagccucaugcauuc

SEQ ID NO: 435046 - RNA, 32 nt, Human
gcagugcggcagccucggccugggcaggccca

SEQ ID NO: 435047 - RNA, 32 nt, Human
gcagugcgguggaggugagggggugagccugg

SEQ ID NO: 435048 - RNA, 32 nt, Human
gcagugcguuuaccaugugaacccagcaaucc

SEQ ID NO: 435049 - RNA, 31 nt, Human
gcagugcucaauaaaugcuucgaggcugaug

SEQ ID NO: 435050 - RNA, 32 nt, Human
gcagugcuccaaccucagccuccugaguagcu

SEQ ID NO: 435051 - RNA, 32 nt, Human
gcagugcucccaucccccaccagguggcagca

SEQ ID NO: 435052 - RNA, 25 nt, Human
gcagugcucgcagcagcgccagcag

SEQ ID NO: 435053 - RNA, 32 nt, Human
gcagugcucuagggcugccauuacacggucuu

SEQ ID NO: 435054 - RNA, 32 nt, Human
gcagugcugccaggcucugcuccagggcacag

SEQ ID NO: 435055 - RNA, 32 nt, Human
gcagugcuggacugcacagccccggggcucca

SEQ ID NO: 435056 - RNA, 32 nt, Human
gcagugcuggaggaacugggaggcagguuugg

SEQ ID NO: 435057 - RNA, 32 nt, Human
gcagugcuggcccagccccugcggcuuaggcu

SEQ ID NO: 435058 - RNA, 31 nt, Human
gcagugcuggccucugggcgggugccgagga

SEQ ID NO: 435059 - RNA, 31 nt, Human
gcagugcugguuccucugccuguguccccac

SEQ ID NO: 435060 - RNA, 25 nt, Human
gcagugcuguuuggagacugugaga

SEQ ID NO: 435061 - RNA, 32 nt, Human
gcagugcuucagagccucgggcucagguggca

SEQ ID NO: 435062 - RNA, 32 nt, Human
gcagugcuugggaacauacuguauccucgaaa

SEQ ID NO: 435063 - RNA, 32 nt, Human
gcaguggaagucaugagguugcuugauaccca

SEQ ID NO: 435064 - RNA, 32 nt, Human
gcaguggaccuucuuuucuuuuggacaagaua

SEQ ID NO: 435065 - RNA, 21 nt, Human
gcaguggacugaugccuucga

SEQ ID NO: 435066 - RNA, 32 nt, Human
gcaguggagauggggacaaagggcuaagaaaa

SEQ ID NO: 435067 - RNA, 21 nt, Human
gcaguggagccagcacagcgg

SEQ ID NO: 435068 - RNA, 32 nt, Human
gcaguggagcggcccucugccuucaggacccu

SEQ ID NO: 435069 - RNA, 32 nt, Human
gcaguggaggcuggcugcugaaggaugaacgg

SEQ ID NO: 435070 - RNA, 32 nt, Human
gcaguggaggggcccagugggggccccgcagc

SEQ ID NO: 435071 - RNA, 32 nt, Human
gcaguggagguggggguugcuguugauugaag

SEQ ID NO: 435072 - RNA, 32 nt, Human
gcaguggagucucccugucgacaguaaaguug

SEQ ID NO: 435073 - RNA, 22 nt, Human
gcaguggaucgcaccuguaauc

SEQ ID NO: 435074 - RNA, 32 nt, Human
gcaguggaugacugaauaggcaucauauuucu

SEQ ID NO: 435075 - RNA, 32 nt, Human
gcaguggaugguguugaagggcagccagagga

SEQ ID NO: 435076 - RNA, 32 nt, Human
gcaguggcacaaucacaguucacugcagccuc

SEQ ID NO: 435077 - RNA, 32 nt, Human
gcaguggcacaaucucaguucacugcaaccuc

SEQ ID NO: 435078 - RNA, 22 nt, Human
gcaguggcacgcgccuguaauc

SEQ ID NO: 435079 - RNA, 32 nt, Human
gcaguggcaggcaguagugaagucggcucuau

SEQ ID NO: 435080 - RNA, 32 nt, Human
gcaguggcagggcccagcuagcaggcucuucu

SEQ ID NO: 435081 - RNA, 32 nt, Human
gcaguggcaguggcaugauaucagcucacuau

SEQ ID NO: 435082 - RNA, 32 nt, Human
gcaguggcaucggcugccccaggcagaggcuu

SEQ ID NO: 435083 - RNA, 32 nt, Human
gcaguggccacuucugaaucucuguaagguuu

SEQ ID NO: 435084 - RNA, 32 nt, Human
gcaguggccagacaacacucacugcaggccuu

SEQ ID NO: 435085 - RNA, 22 nt, Human
gcaguggcccacagcuguaauc

SEQ ID NO: 435086 - RNA, 22 nt, Human
gcaguggcccacgccuguaauc

SEQ ID NO: 435087 - RNA, 32 nt, Human
gcaguggccccauccuggaacuugaccagauu

SEQ ID NO: 435088 - RNA, 32 nt, Human
gcaguggccgcccgcgccuuucccaggcucaa

SEQ ID NO: 435089 - RNA, 32 nt, Human
gcaguggccgccgccucuuccgccgccgggcu

SEQ ID NO: 435090 - RNA, 23 nt, Human
gcaguggccucacgccuguaauc

SEQ ID NO: 435091 - RNA, 32 nt, Human
gcaguggccucacgccuguaaucccagcacuu

SEQ ID NO: 435092 - RNA, 23 nt, Human
gcaguggccucaugccuauaauc

SEQ ID NO: 435093 - RNA, 32 nt, Human
gcaguggccucaugccuauaaucccagcacuu

SEQ ID NO: 435094 - RNA, 32 nt, Human
gcaguggccuccauccucccugcucagccaca

SEQ ID NO: 435095 - RNA, 32 nt, Human
gcaguggcgagaggagccccuuguggcagcag

SEQ ID NO: 435096 - RNA, 32 nt, Human
gcaguggcgcugaggcccugagggcuccuugg

SEQ ID NO: 435097 - RNA, 22 nt, Human
gcaguggcgggcgccuguaguc

SEQ ID NO: 435098 - RNA, 22 nt, Human
gcaguggcgugcgccuguaguc

SEQ ID NO: 435099 - RNA, 32 nt, Human
gcaguggcucaacaccuguagucccagcacuc

SEQ ID NO: 435100 - RNA, 22 nt, Human
gcaguggcucaagccuguaauc

SEQ ID NO: 435101 - RNA, 32 nt, Human
gcaguggcucaaucuugggcucacugcagccu

SEQ ID NO: 435102 - RNA, 22 nt, Human
gcaguggcucacacauguaauc

SEQ ID NO: 435103 - RNA, 22 nt, Human
gcaguggcucacaccgguaauc

SEQ ID NO: 435104 - RNA, 22 nt, Human
gcaguggcucacaccuauaauc

SEQ ID NO: 435105 - RNA, 22 nt, Human
gcaguggcucacaccuauaguc

SEQ ID NO: 435106 - RNA, 22 nt, Human
gcaguggcucacaccucuaauc

SEQ ID NO: 435107 - RNA, 22 nt, Human
gcaguggcucacaccuggaauc

SEQ ID NO: 435108 - RNA, 21 nt, Human
gcaguggcucacaccuguaau

SEQ ID NO: 435109 - RNA, 22 nt, Human
gcaguggcucacaccuguaauc

SEQ ID NO: 435110 - RNA, 32 nt, Human
gcaguggcucacaccuguaauuccagcacuug

SEQ ID NO: 435111 - RNA, 22 nt, Human
gcaguggcucacaccuguaguc

SEQ ID NO: 435112 - RNA, 22 nt, Human
gcaguggcucacaccuguauuc

SEQ ID NO: 435113 - RNA, 32 nt, Human
gcaguggcucacaccuguauucccagcacuuu

SEQ ID NO: 435114 - RNA, 32 nt, Human
gcaguggcucacaccugucauuccagcacuuu

SEQ ID NO: 435115 - RNA, 32 nt, Human
gcaguggcucacaccugugagcacuuugggag

SEQ ID NO: 435116 - RNA, 22 nt, Human
gcaguggcucacaccugugauc

SEQ ID NO: 435117 - RNA, 23 nt, Human
gcaguggcucacaccuuguaauc

SEQ ID NO: 435118 - RNA, 22 nt, Human
gcaguggcucacaccuuuaauc

SEQ ID NO: 435119 - RNA, 20 nt, Human
gcaguggcucacacuuguaa

SEQ ID NO: 435120 - RNA, 22 nt, Human
gcaguggcucacacuuguaauc

SEQ ID NO: 435121 - RNA, 20 nt, Human
gcaguggcucacaucuguaa

SEQ ID NO: 435122 - RNA, 22 nt, Human
gcaguggcucacaucuguaauc

SEQ ID NO: 435123 - RNA, 22 nt, Human
gcaguggcucaccccuguaauc

SEQ ID NO: 435124 - RNA, 22 nt, Human
gcaguggcucaccucuguaauc

SEQ ID NO: 435125 - RNA, 20 nt, Human
gcaguggcucaccuguaauc

SEQ ID NO: 435126 - RNA, 22 nt, Human
gcaguggcucacgccacuaauc

SEQ ID NO: 435127 - RNA, 22 nt, Human
gcaguggcucacgccuauaauc

SEQ ID NO: 435128 - RNA, 20 nt, Human
gcaguggcucacgccuguaa

SEQ ID NO: 435129 - RNA, 22 nt, Human
gcaguggcucacgccuguaauc

SEQ ID NO: 435130 - RNA, 22 nt, Human
gcaguggcucacgccuguaauu

SEQ ID NO: 435131 - RNA, 22 nt, Human
gcaguggcucacgccuguuauc

SEQ ID NO: 435132 - RNA, 22 nt, Human
gcaguggcucacgcuuguaauc

SEQ ID NO: 435133 - RNA, 22 nt, Human
gcaguggcucacuccuguaauc

SEQ ID NO: 435134 - RNA, 22 nt, Human
gcaguggcucaugcccauaauc

SEQ ID NO: 435135 - RNA, 22 nt, Human
gcaguggcucaugcccguaauc

SEQ ID NO: 435136 - RNA, 22 nt, Human
gcaguggcucaugccuauaauc

SEQ ID NO: 435137 - RNA, 22 nt, Human
gcaguggcucaugccuggaauc

SEQ ID NO: 435138 - RNA, 20 nt, Human
gcaguggcucaugccuguaa

SEQ ID NO: 435139 - RNA, 22 nt, Human
gcaguggcucaugccuguaauc

SEQ ID NO: 435140 - RNA, 32 nt, Human
gcaguggcucaugccuguaauccaagcauuuu

SEQ ID NO: 435141 - RNA, 32 nt, Human
gcaguggcucaugccuguaaucccagcauuuu

SEQ ID NO: 435142 - RNA, 22 nt, Human
gcaguggcucaugccuguauuc

SEQ ID NO: 435143 - RNA, 22 nt, Human
gcaguggcucaugcuuguaauc

SEQ ID NO: 435144 - RNA, 22 nt, Human
gcaguggcucauguguguaauc

SEQ ID NO: 435145 - RNA, 22 nt, Human
gcaguggcucccaccuguaauc

SEQ ID NO: 435146 - RNA, 32 nt, Human
gcaguggcucucugcugacuuugcucaggagc

SEQ ID NO: 435147 - RNA, 22 nt, Human
gcaguggcucuugccuguaauc

SEQ ID NO: 435148 - RNA, 22 nt, Human
gcaguggcugaugccuguaauc

SEQ ID NO: 435149 - RNA, 32 nt, Human
gcaguggcuggcagugccaggccugggggaag

SEQ ID NO: 435150 - RNA, 32 nt, Human
gcaguggcugggaggcagcggcccaauuagug

SEQ ID NO: 435151 - RNA, 32 nt, Human
gcaguggcuggugggccacucucuccaggugc

SEQ ID NO: 435152 - RNA, 32 nt, Human
gcaguggcuguaaucccagcacuuugggaggc

SEQ ID NO: 435153 - RNA, 20 nt, Human
gcaguggcuuacaccuguaa

SEQ ID NO: 435154 - RNA, 32 nt, Human
gcaguggcuuacaccuguaaccccagcacuuu

SEQ ID NO: 435155 - RNA, 22 nt, Human
gcaguggcuuacaccuguaauc

SEQ ID NO: 435156 - RNA, 22 nt, Human
gcaguggcuuacgccuguaauc

SEQ ID NO: 435157 - RNA, 17 nt, Human
gcaguggcuuccuggcc

SEQ ID NO: 435158 - RNA, 32 nt, Human
gcagugggaagacagauucuacggcacugcuu

SEQ ID NO: 435159 - RNA, 32 nt, Human
gcagugggagagaggaugaggagaaacggaau

SEQ ID NO: 435160 - RNA, 19 nt, Human
gcagugggagauggagcug

SEQ ID NO: 435161 - RNA, 32 nt, Human
gcagugggaggaggagaaggaggaggaggaga

SEQ ID NO: 435162 - RNA, 32 nt, Human
gcagugggaggcaucugggggccaaaggucag

SEQ ID NO: 435163 - RNA, 32 nt, Human
gcagugggaggcgacgguggaggagggugguc

SEQ ID NO: 435164 - RNA, 32 nt, Human
gcagugggaucugguguguggcagaaaggucu

SEQ ID NO: 435165 - RNA, 32 nt, Human
gcagugggcggggcgggguggggaaggccgug

SEQ ID NO: 435166 - RNA, 32 nt, Human
gcagugggcucuggcggaggucgggagaacug

SEQ ID NO: 435167 - RNA, 32 nt, Human
gcaguggggacacccuuugugguuacaguuug

SEQ ID NO: 435168 - RNA, 32 nt, Human
gcaguggggcagcugccagagcucaggcgagc

SEQ ID NO: 435169 - RNA, 32 nt, Human
gcaguggggccaacagcccugccucuguuccc

SEQ ID NO: 435170 - RNA, 32 nt, Human
gcaguggggccaggaacacguggccugagagc

SEQ ID NO: 435171 - RNA, 20 nt, Human
gcaguggggcgaagcggggc

SEQ ID NO: 435172 - RNA, 32 nt, Human
gcaguggggucugaggagggcuggggaugagu

SEQ ID NO: 435173 - RNA, 32 nt, Human
gcaguggggucuucccgcugcccagcagccua

SEQ ID NO: 435174 - RNA, 32 nt, Human
gcagugggugccuguagugugaugugucugaa

SEQ ID NO: 435175 - RNA, 32 nt, Human
gcaguggguguguggggaagucacugucccac

SEQ ID NO: 435176 - RNA, 32 nt, Human
gcagugguacaaucauggcucacugcagccuc

SEQ ID NO: 435177 - RNA, 32 nt, Human
gcagugguacagucuuagcucacugcagccuc

SEQ ID NO: 435178 - RNA, 32 nt, Human
gcagugguaccgucugcagagcuugcugcccu

SEQ ID NO: 435179 - RNA, 32 nt, Human
gcagugguacgaucauagcucacugcagacuc

SEQ ID NO: 435180 - RNA, 32 nt, Human
gcagugguacgcucucagcucacugcaaccuc

SEQ ID NO: 435181 - RNA, 32 nt, Human
gcagugguagccugaggaaggccaagcugccc

SEQ ID NO: 435182 - RNA, 32 nt, Human
gcagugguagcggccuuugagcuguggggagg

SEQ ID NO: 435183 - RNA, 23 nt, Human
gcagugguagucccagcuacuca

SEQ ID NO: 435184 - RNA, 32 nt, Human
gcagugguaucuucugguaaaccaucagucug

SEQ ID NO: 435185 - RNA, 32 nt, Human
gcagugguaugaucucagcucacugcaagcuc

SEQ ID NO: 435186 - RNA, 32 nt, Human
gcagugguaugaucucagcucacugcagccuc

SEQ ID NO: 435187 - RNA, 32 nt, Human
gcaguggucccaaagugacgugagaggcugua

SEQ ID NO: 435188 - RNA, 32 nt, Human
gcaguggugagaucucagcucacugcaaccuc

SEQ ID NO: 435189 - RNA, 32 nt, Human
gcaguggugagauuuuggcucacuauaaccuc

SEQ ID NO: 435190 - RNA, 32 nt, Human
gcaguggugcaaucacaggucacugcagcccu

SEQ ID NO: 435191 - RNA, 32 nt, Human
gcaguggugcaaucauagcucacugcagccuu

SEQ ID NO: 435192 - RNA, 32 nt, Human
gcaguggugcaaucucaguucacugcaaccuc

SEQ ID NO: 435193 - RNA, 32 nt, Human
gcaguggugcaaucucgguucacugcaaccuc

SEQ ID NO: 435194 - RNA, 32 nt, Human
gcaguggugcagaauggcugaccucagucuug

SEQ ID NO: 435195 - RNA, 32 nt, Human
gcaguggugcagucuuggcucacuacagccuc

SEQ ID NO: 435196 - RNA, 32 nt, Human
gcaguggugccuguaaucccagcaguuuggga

SEQ ID NO: 435197 - RNA, 32 nt, Human
gcaguggugcgagcucagcucacugcaaccuc

SEQ ID NO: 435198 - RNA, 32 nt, Human
gcaguggugcgaucucaguucacugcaaccuc

SEQ ID NO: 435199 - RNA, 32 nt, Human
gcaguggugcuggcccaagugaaggccagagu

SEQ ID NO: 435200 - RNA, 32 nt, Human
gcagugguggcagcugagcacagcaucacuua

SEQ ID NO: 435201 - RNA, 20 nt, Human
gcagugguggucggggcagc

SEQ ID NO: 435202 - RNA, 32 nt, Human
gcaguggugugaucauagcucacuacagccuu

SEQ ID NO: 435203 - RNA, 32 nt, Human
gcaguggugugaucauagcucacugcacccuc

SEQ ID NO: 435204 - RNA, 32 nt, Human
gcaguggugugaucauagcucacugcagcuuu

SEQ ID NO: 435205 - RNA, 32 nt, Human
gcaguggugugaucucagcucacugcaaccuc

SEQ ID NO: 435206 - RNA, 32 nt, Human
gcaguggugugaucucagcucacugcagccuc

SEQ ID NO: 435207 - RNA, 32 nt, Human
gcaguggugugaucuuggcucacuacaaccuc

SEQ ID NO: 435208 - RNA, 32 nt, Human
gcaguggugugauuucagcucacugcaaccuu

SEQ ID NO: 435209 - RNA, 32 nt, Human
gcagugguguggucugcaggcccuggacccgc

SEQ ID NO: 435210 - RNA, 22 nt, Human
gcagugguucaugccaguaauc

SEQ ID NO: 435211 - RNA, 22 nt, Human
gcagugguucaugccuauaauc

SEQ ID NO: 435212 - RNA, 21 nt, Human
gcagugguucaugcuguaauc

SEQ ID NO: 435213 - RNA, 22 nt, Human
gcagugguucaugucuguaauc

SEQ ID NO: 435214 - RNA, 32 nt, Human
gcaguguaaaggaagccuagagagaaagaguu

SEQ ID NO: 435215 - RNA, 32 nt, Human
gcaguguagacagcaggaggagcaccgggcuu

SEQ ID NO: 435216 - RNA, 32 nt, Human
gcaguguagggaguuguggguaguggggaaga

SEQ ID NO: 435217 - RNA, 32 nt, Human
gcaguguaucucacguauuaauuuuuaaaaau

SEQ ID NO: 435218 - RNA, 32 nt, Human
gcagugucaacaaccacuucugcucuucagag

SEQ ID NO: 435219 - RNA, 32 nt, Human
gcaguguccagugcaguaccuggaccggagcc

SEQ ID NO: 435220 - RNA, 22 nt, Human
gcaguguccccagccuagcccu

SEQ ID NO: 435221 - RNA, 32 nt, Human
gcaguguccuuggcuuccuccuggcuuuaaug

SEQ ID NO: 435222 - RNA, 32 nt, Human
gcaguguccuuuuggaaagggagcugccccag

SEQ ID NO: 435223 - RNA, 22 nt, Human
gcagugucucaugccuguaauc

SEQ ID NO: 435224 - RNA, 32 nt, Human
gcagugucuccucuggcuguccuguuuguuug

SEQ ID NO: 435225 - RNA, 22 nt, Human
gcagugucugaggccuguggga

SEQ ID NO: 435226 - RNA, 32 nt, Human
gcagugucuucugcaccauccugugggacaca

SEQ ID NO: 435227 - RNA, 32 nt, Human
gcagugucuuuuuggaaagggagcugccccag

SEQ ID NO: 435228 - RNA, 32 nt, Human
gcagugugacaugcagaaguaaagcuggugag

SEQ ID NO: 435229 - RNA, 32 nt, Human
gcagugugaccuccugugacccaugaaugugc

SEQ ID NO: 435230 - RNA, 32 nt, Human
gcagugugagcacacgcuggagugcagcguuc

SEQ ID NO: 435231 - RNA, 32 nt, Human
gcagugugagcagaagcugaugccagcauguc

SEQ ID NO: 435232 - RNA, 32 nt, Human
gcagugugaguguggagaggccaugcgcaaug

SEQ ID NO: 435233 - RNA, 23 nt, Human
gcagugugauccagagagcagug

SEQ ID NO: 435234 - RNA, 32 nt, Human
gcagugugcaugcaggcaggaggcagggaaau

SEQ ID NO: 435235 - RNA, 32 nt, Human
gcagugugcccaggauugaagguguaaauggg

SEQ ID NO: 435236 - RNA, 19 nt, Human
gcagugugccuccauggcc

SEQ ID NO: 435237 - RNA, 32 nt, Human
gcagugugcucuggcgggaagggcccaucccg

SEQ ID NO: 435238 - RNA, 32 nt, Human
gcagugugcugugauugugacacugcccucca

SEQ ID NO: 435239 - RNA, 32 nt, Human
gcaguguggaggaagaugagggccaggaaaga

SEQ ID NO: 435240 - RNA, 32 nt, Human
gcaguguggaugcaccagcacccuccaaggga

SEQ ID NO: 435241 - RNA, 21 nt, Human
gcaguguggcccagccugguc

SEQ ID NO: 435242 - RNA, 32 nt, Human
gcaguguggcugcuucuugauucauccaugga

SEQ ID NO: 435243 - RNA, 32 nt, Human
gcaguguggggaggggauggggugcgucaggg

SEQ ID NO: 435244 - RNA, 31 nt, Human
gcagugugggugggggcgcucuggguggagg

SEQ ID NO: 435245 - RNA, 32 nt, Human
gcaguguggguucugugucugucuguucaucc

SEQ ID NO: 435246 - RNA, 22 nt, Human
gcagugugguggccacugguga

SEQ ID NO: 435247 - RNA, 32 nt, Human
gcaguguguggagaacugguaucaggaaaggg

SEQ ID NO: 435248 - RNA, 32 nt, Human
gcaguguguggaggugauggccaguuaaucug

SEQ ID NO: 435249 - RNA, 20 nt, Human
gcaguguguuuggaauccug

SEQ ID NO: 435250 - RNA, 32 nt, Human
gcaguguuaccuguuagcucccuguggggcag

SEQ ID NO: 435251 - RNA, 32 nt, Human
gcaguguucuacugccugaugugaaagagagc

SEQ ID NO: 435252 - RNA, 32 nt, Human
gcaguguugaacuguguguuuaaaaaugugaa

SEQ ID NO: 435253 - RNA, 32 nt, Human
gcaguguugagacucuucauugcugacuggcu

SEQ ID NO: 435254 - RNA, 32 nt, Human
gcaguguugcuguucauagauuuuguuccauu

SEQ ID NO: 435255 - RNA, 32 nt, Human
gcaguguuggccaugguguuggugcuggcucu

SEQ ID NO: 435256 - RNA, 32 nt, Human
gcaguguuucugcaguggcugcagggagaugg

SEQ ID NO: 435257 - RNA, 32 nt, Human
gcaguguuugugucccugauuacuugagauca

SEQ ID NO: 435258 - RNA, 32 nt, Human
gcaguguuugugucccugauuacuugagauua

SEQ ID NO: 435259 - RNA, 32 nt, Human
gcaguguuuuucaaagugugguccucacaccg

SEQ ID NO: 435260 - RNA, 32 nt, Human
gcaguuaaagauggcuaccaucagggaagaga

SEQ ID NO: 435261 - RNA, 32 nt, Human
gcaguuaaagucagaggagacaagcugguucu

SEQ ID NO: 435262 - RNA, 32 nt, Human
gcaguuaacaccuuugacagauuccuggaaaa

SEQ ID NO: 435263 - RNA, 32 nt, Human
gcaguuaaccucuaggauaauguggcuugaac

SEQ ID NO: 435264 - RNA, 20 nt, Human
gcaguuaccagccggcugcg

SEQ ID NO: 435265 - RNA, 21 nt, Human
gcaguuacugccuuugugugg

SEQ ID NO: 435266 - RNA, 32 nt, Human
gcaguuagagcugagcacuuuugaaaagcuug

SEQ ID NO: 435267 - RNA, 32 nt, Human
gcaguuagcagugugcauucccgaccuguggg

SEQ ID NO: 435268 - RNA, 16 nt, Human
gcaguuauccauggcc

SEQ ID NO: 435269 - RNA, 32 nt, Human
gcaguuaucugcaagcaaagagagaggcuuca

SEQ ID NO: 435270 - RNA, 32 nt, Human
gcaguuaugugcagggagacagcugguuacgg

SEQ ID NO: 435271 - RNA, 23 nt, Human
gcaguuauuaacacaauauuccu

SEQ ID NO: 435272 - RNA, 32 nt, Human
gcaguucaaaccuguguuguuugggucaacug

SEQ ID NO: 435273 - RNA, 32 nt, Human
gcaguucaaggcccuuucauuuaaccuuccaa

SEQ ID NO: 435274 - RNA, 32 nt, Human
gcaguucaauuccaaaggcaggaaaaggcuga

SEQ ID NO: 435275 - RNA, 32 nt, Human
gcaguucacagcccugacugucacaguguucc

SEQ ID NO: 435276 - RNA, 32 nt, Human
gcaguucacucugucucccaggcuggagugca

SEQ ID NO: 435277 - RNA, 32 nt, Human
gcaguucagcaacucuuaagugacacaguuca

SEQ ID NO: 435278 - RNA, 23 nt, Human
gcaguucagugccuuuguuggua

SEQ ID NO: 435279 - RNA, 32 nt, Human
gcaguucaugcagcaccucuacccacagaacu

SEQ ID NO: 435280 - RNA, 32 nt, Human
gcaguuccaccagggccagcacugggaccaga

SEQ ID NO: 435281 - RNA, 32 nt, Human
gcaguuccaguuucucuuccauucugugucac

SEQ ID NO: 435282 - RNA, 32 nt, Human
gcaguuccauuuuagagauuuauaaucacauc

SEQ ID NO: 435283 - RNA, 32 nt, Human
gcaguucccaaggacagucagcauuucuagac

SEQ ID NO: 435284 - RNA, 32 nt, Human
gcaguucccagagucgaaucuaguucucaucu

SEQ ID NO: 435285 - RNA, 32 nt, Human
gcaguucccagggacuguuuucaccucugcug

SEQ ID NO: 435286 - RNA, 18 nt, Human
gcaguuccccugccucaa

SEQ ID NO: 435287 - RNA, 32 nt, Human
gcaguuccuccuggggaaacaggcuagguuag

SEQ ID NO: 435288 - RNA, 32 nt, Human
gcaguuccugugagacaggagaggcugagcca

SEQ ID NO: 435289 - RNA, 32 nt, Human
gcaguucuagggcuggagggcaggggugacau

SEQ ID NO: 435290 - RNA, 32 nt, Human
gcaguucucccgccucagccuccugaguagcu

SEQ ID NO: 435291 - RNA, 32 nt, Human
gcaguucuccugccucaaccuccugaguagcu

SEQ ID NO: 435292 - RNA, 32 nt, Human
gcaguucuccugccucagccuccugaguagcu

SEQ ID NO: 435293 - RNA, 32 nt, Human
gcaguucucugugggcaaggccagcuugcuuc

SEQ ID NO: 435294 - RNA, 32 nt, Human
gcaguucucuugccucagccuccuggguagcu

SEQ ID NO: 435295 - RNA, 32 nt, Human
gcaguucucuuuccucagccuccugaguagcu

SEQ ID NO: 435296 - RNA, 21 nt, Human
gcaguucugaagaagauggua

SEQ ID NO: 435297 - RNA, 32 nt, Human
gcaguucugcagcuggccuuguuccuucauca

SEQ ID NO: 435298 - RNA, 18 nt, Human
gcaguucugcucucccca

SEQ ID NO: 435299 - RNA, 32 nt, Human
gcaguucuuaauuuccucuccuccuggggaau

SEQ ID NO: 435300 - RNA, 32 nt, Human
gcaguucuuuccaacuuggagugcucugguca

SEQ ID NO: 435301 - RNA, 32 nt, Human
gcaguugaauuguuuugacaccagaggcugaa

SEQ ID NO: 435302 - RNA, 32 nt, Human
gcaguugacaagacacauccucagugaaucaa

SEQ ID NO: 435303 - RNA, 32 nt, Human
gcaguugaggcggaacacagacaacuugggga

SEQ ID NO: 435304 - RNA, 32 nt, Human
gcaguugaggggugaaaaagaaaacaaacaaa

SEQ ID NO: 435305 - RNA, 32 nt, Human
gcaguugcagugagcugagauggugccacugc

SEQ ID NO: 435306 - RNA, 32 nt, Human
gcaguugcagugagcugagauugcgccacugu

SEQ ID NO: 435307 - RNA, 32 nt, Human
gcaguugcagugaguggagaucgcgccacugc

SEQ ID NO: 435308 - RNA, 22 nt, Human
gcaguugccaacaccuguaauc

SEQ ID NO: 435309 - RNA, 32 nt, Human
gcaguugccuguaaucucaacuacuugggagg

SEQ ID NO: 435310 - RNA, 22 nt, Human
gcaguugcucacaccgguaauc

SEQ ID NO: 435311 - RNA, 22 nt, Human
gcaguugcucaugccuguaauc

SEQ ID NO: 435312 - RNA, 32 nt, Human
gcaguugcuccugaccuauuugcccaccagcu

SEQ ID NO: 435313 - RNA, 32 nt, Human
gcaguugcuucugcccccuugauccaaaugac

SEQ ID NO: 435314 - RNA, 32 nt, Human
gcaguuggacaguucuggaggcuggaaggucc

SEQ ID NO: 435315 - RNA, 24 nt, Human
gcaguuggaucaccugagguuagg

SEQ ID NO: 435316 - RNA, 24 nt, Human
gcaguuggaucacuugaggccagg

SEQ ID NO: 435317 - RNA, 32 nt, Human
gcaguuggcugcagggccaggucuaggggcca

SEQ ID NO: 435318 - RNA, 32 nt, Human
gcaguuggcuguaguagcugaguucuuuucca

SEQ ID NO: 435319 - RNA, 32 nt, Human
gcaguugggacuacaggcgugagccaccaugc

SEQ ID NO: 435320 - RNA, 32 nt, Human
gcaguuggggcagugggcucucugcccacacu

SEQ ID NO: 435321 - RNA, 32 nt, Human
gcaguugggggaggcaguagacacgggacagg

SEQ ID NO: 435322 - RNA, 32 nt, Human
gcaguugggugaggagcaccagaaauucaaug

SEQ ID NO: 435323 - RNA, 32 nt, Human
gcaguugguacuugaaaugaagaucaaaucau

SEQ ID NO: 435324 - RNA, 32 nt, Human
gcaguuggugggggcugggggaagaggcuggc

SEQ ID NO: 435325 - RNA, 32 nt, Human
gcaguugucauugucuucuccaccgggcuguu

SEQ ID NO: 435326 - RNA, 32 nt, Human
gcaguugugcugcugcauauaacacuaccaag

SEQ ID NO: 435327 - RNA, 32 nt, Human
gcaguuuaaucuuuuucuuuaccuccaugguu

SEQ ID NO: 435328 - RNA, 32 nt, Human
gcaguuuaggaagccgaagugugcagaucacc

SEQ ID NO: 435329 - RNA, 32 nt, Human
gcaguuucacaguccaguugggucaccacuua

SEQ ID NO: 435330 - RNA, 32 nt, Human
gcaguuucagcccaggggaagacccagggaga

SEQ ID NO: 435331 - RNA, 32 nt, Human
gcaguuucuaacaaggugaagaacagcuauag

SEQ ID NO: 435332 - RNA, 32 nt, Human
gcaguuucucgaggggucaccgagccucuggu

SEQ ID NO: 435333 - RNA, 22 nt, Human
gcaguuucucuaccugccccca

SEQ ID NO: 435334 - RNA, 32 nt, Human
gcaguuucugguacuccuaugcaauauuacuc

SEQ ID NO: 435335 - RNA, 32 nt, Human
gcaguuucuuuucuaaaacccauuugggugac

SEQ ID NO: 435336 - RNA, 32 nt, Human
gcaguuugggaggcugaggcuaguggaucaug

SEQ ID NO: 435337 - RNA, 22 nt, Human
gcaguuuguauaauuucuguca

SEQ ID NO: 435338 - RNA, 32 nt, Human
gcaguuuuaguucuguguaacacaagcacuca

SEQ ID NO: 435339 - RNA, 32 nt, Human
gcaguuuuccgugggaguagacaggaaggccg

SEQ ID NO: 435340 - RNA, 32 nt, Human
gcaguuuugauuaccacugaccugcuggccag

SEQ ID NO: 435341 - RNA, 32 nt, Human
gcaguuuuguagugaagauugggcuuuggagu

SEQ ID NO: 435342 - RNA, 32 nt, Human
gcaguuuuuaauccucuaccuauugcacuguu

SEQ ID NO: 435343 - RNA, 32 nt, Human
gcaguuuuucaguguucagccaugucaguuga

SEQ ID NO: 435344 - RNA, 32 nt, Human
gcaguuuuugaaaauguuucaagucuaguuuu

SEQ ID NO: 435345 - RNA, 32 nt, Human
gcaguuuuuguuguuguuuauagacacucuug

SEQ ID NO: 435346 - RNA, 32 nt, Human
gcauaaaaagcaugucagcuggcuaaaagauu

SEQ ID NO: 435347 - RNA, 32 nt, Human
gcauaaaaagugccuguagaugacauggugaa

SEQ ID NO: 435348 - RNA, 32 nt, Human
gcauaaaagaugacuaguccucacuucaggcu

SEQ ID NO: 435349 - RNA, 32 nt, Human
gcauaaaauguuccuggucggggcuuggaaga

SEQ ID NO: 435350 - RNA, 32 nt, Human
gcauaaaccucuuuacuccuccagcaggcuuu

SEQ ID NO: 435351 - RNA, 32 nt, Human
gcauaaaccugggggcccucaggacuaggaca

SEQ ID NO: 435352 - RNA, 32 nt, Human
gcauaaagaaaaauggccgggccaggucauug

SEQ ID NO: 435353 - RNA, 32 nt, Human
gcauaaagcugcauacuuuuugucuagcuguu

SEQ ID NO: 435354 - RNA, 32 nt, Human
gcauaaaggacugcaggaggugcuguggguug

SEQ ID NO: 435355 - RNA, 32 nt, Human
gcauaaaggagggcagaaagaaacagcagugu

SEQ ID NO: 435356 - RNA, 32 nt, Human
gcauaaagugcuugcaauuucucuccacaauu

SEQ ID NO: 435357 - RNA, 31 nt, Human
gcauaaauaauaaaaaguaggagggguggag

SEQ ID NO: 435358 - RNA, 32 nt, Human
gcauaaaucugaagugguucagucuagaagaa

SEQ ID NO: 435359 - RNA, 32 nt, Human
gcauaacaaguagcugucuccagacaguggga

SEQ ID NO: 435360 - RNA, 32 nt, Human
gcauaacauacugcuauuggucuuuuuauaua

SEQ ID NO: 435361 - RNA, 32 nt, Human
gcauaaccaguauuagcauuagaaauuagcca

SEQ ID NO: 435362 - RNA, 32 nt, Human
gcauaacgggcuucccuuccagaagcucuccu

SEQ ID NO: 435363 - RNA, 32 nt, Human
gcauaacuauaaucccagcuacuugggaggcu

SEQ ID NO: 435364 - RNA, 32 nt, Human
gcauaacuggggcagaaaguguguaagugaag

SEQ ID NO: 435365 - RNA, 32 nt, Human
gcauaacuuggggguuaaagacaggaauaugg

SEQ ID NO: 435366 - RNA, 32 nt, Human
gcauaagaaaggcuuuucucuccagucauucu

SEQ ID NO: 435367 - RNA, 32 nt, Human
gcauaagaagcagaaagcuaaggaggcagacc

SEQ ID NO: 435368 - RNA, 32 nt, Human
gcauaagacaccaugccuggacuugcaugcug

SEQ ID NO: 435369 - RNA, 32 nt, Human
gcauaagaccuccaccucuagacuagcucuuc

SEQ ID NO: 435370 - RNA, 32 nt, Human
gcauaagaugcaggaaaaagugcagagcauua

SEQ ID NO: 435371 - RNA, 23 nt, Human
gcauaagcaauccucccacuuca

SEQ ID NO: 435372 - RNA, 32 nt, Human
gcauaagcacauccaaugggagaagaugucuu

SEQ ID NO: 435373 - RNA, 32 nt, Human
gcauaagcauuacaaaguccuucucuaguuaa

SEQ ID NO: 435374 - RNA, 32 nt, Human
gcauaagcugaugguauguaaggaaccgaugg

SEQ ID NO: 435375 - RNA, 32 nt, Human
gcauaaggaaauucagugaacuuucaacugga

SEQ ID NO: 435376 - RNA, 32 nt, Human
gcauaaggaagagauaaugagguaguuugugg

SEQ ID NO: 435377 - RNA, 32 nt, Human
gcauaagggcagcagagguggaguagggagga

SEQ ID NO: 435378 - RNA, 32 nt, Human
gcauaaggguuauuugagcaaguaacauuaac

SEQ ID NO: 435379 - RNA, 32 nt, Human
gcauaaggucauucauacuggagagaaauguu

SEQ ID NO: 435380 - RNA, 32 nt, Human
gcauaagguccauggugguggaaaauggaugc

SEQ ID NO: 435381 - RNA, 32 nt, Human
gcauaauaaagugacugauguuuacagaaccc

SEQ ID NO: 435382 - RNA, 32 nt, Human
gcauaauacuguaaaugucuuuuggucaagag

SEQ ID NO: 435383 - RNA, 32 nt, Human
gcauaauauaaauguugaugagacuagacucu

SEQ ID NO: 435384 - RNA, 32 nt, Human
gcauaauaucuacuuagaaagauagugggccc

SEQ ID NO: 435385 - RNA, 32 nt, Human
gcauaaucuaaacaugucaaacguucaguggg

SEQ ID NO: 435386 - RNA, 21 nt, Human
gcauaaugagcuugucaccua

SEQ ID NO: 435387 - RNA, 32 nt, Human
gcauacaaugcaaggcacuggccacaccaggc

SEQ ID NO: 435388 - RNA, 32 nt, Human
gcauacacaguccccaauagugaguaggagcc

SEQ ID NO: 435389 - RNA, 32 nt, Human
gcauacaccgagagagugaggagccagacgac

SEQ ID NO: 435390 - RNA, 32 nt, Human
gcauacacugagagagugaggagccagacgac

SEQ ID NO: 435391 - RNA, 32 nt, Human
gcauacagaggcccuccagagagacugcccug

SEQ ID NO: 435392 - RNA, 20 nt, Human
gcauacagcauggugacugg

SEQ ID NO: 435393 - RNA, 32 nt, Human
gcauacaucugaagaacaaaaacaucaacguc

SEQ ID NO: 435394 - RNA, 31 nt, Human
gcauacauuuggcagaauaaaugaaccaggu

SEQ ID NO: 435395 - RNA, 32 nt, Human
gcauacccagaagaaagaccuauaugaugcgg

SEQ ID NO: 435396 - RNA, 32 nt, Human
gcauaccccaggaguaauuccacuucugggga

SEQ ID NO: 435397 - RNA, 32 nt, Human
gcauaccccggccucucaguucuugagggccu

SEQ ID NO: 435398 - RNA, 32 nt, Human
gcauaccccucuccaccagcccuacuccugcg

SEQ ID NO: 435399 - RNA, 32 nt, Human
gcauaccggacccccauucgcaucuaacaagg

SEQ ID NO: 435400 - RNA, 32 nt, Human
gcauaccuauaaucccagcacuuggggaggcc

SEQ ID NO: 435401 - RNA, 17 nt, Human
gcauaccuguaauccca

SEQ ID NO: 435402 - RNA, 32 nt, Human
gcauaccuguaaucccagcuacucgggaaccu

SEQ ID NO: 435403 - RNA, 32 nt, Human
gcauaccuguaaucccagcuacuugggaggcu

SEQ ID NO: 435404 - RNA, 32 nt, Human
gcauaccuguaaucucugcuauuugggagacu

SEQ ID NO: 435405 - RNA, 17 nt, Human
gcauaccuguaguccca

SEQ ID NO: 435406 - RNA, 32 nt, Human
gcauaccuguagucccagcuacgugagaggcu

SEQ ID NO: 435407 - RNA, 32 nt, Human
gcauaccuguagucccagcuacucaggaggcu

SEQ ID NO: 435408 - RNA, 32 nt, Human
gcauaccuguagucccagcuacuugggaggcu

SEQ ID NO: 435409 - RNA, 32 nt, Human
gcauaccuguagucccagcuauucaggagcug

SEQ ID NO: 435410 - RNA, 32 nt, Human
gcauaccugugguuccagcuacuugggaggcu

SEQ ID NO: 435411 - RNA, 32 nt, Human
gcauaccuuuaagagaagcccuuugaauaauc

SEQ ID NO: 435412 - RNA, 32 nt, Human
gcauacgccuguaaucccagcuacucgggagg

SEQ ID NO: 435413 - RNA, 32 nt, Human
gcauacgggagccuaucucagugaaagagcag

SEQ ID NO: 435414 - RNA, 32 nt, Human
gcauacgucagaggaggcucguaggaauacuc

SEQ ID NO: 435415 - RNA, 19 nt, Human
gcauacugauaaucagcuu

SEQ ID NO: 435416 - RNA, 32 nt, Human
gcauacugaugaagaguuccuuaaacaagcuu

SEQ ID NO: 435417 - RNA, 32 nt, Human
gcauacuucugccucuauccugaacucuaggu

SEQ ID NO: 435418 - RNA, 32 nt, Human
gcauacuuguaaucccagcuacucaggaggcu

SEQ ID NO: 435419 - RNA, 32 nt, Human
gcauacuuguguuccacaguuauggccauaua

SEQ ID NO: 435420 - RNA, 32 nt, Human
gcauacuuugugaaccuggcuccuucuucacu

SEQ ID NO: 435421 - RNA, 32 nt, Human
gcauagaaaaggauucuggugcuuccccuguu

SEQ ID NO: 435422 - RNA, 32 nt, Human
gcauagaaaccucaaaugaaaaaccuaaaauc

SEQ ID NO: 435423 - RNA, 32 nt, Human
gcauagaacagcccuggcagggccaggacuac

SEQ ID NO: 435424 - RNA, 32 nt, Human
gcauagaacaggacuauauuucaugaauaauu

SEQ ID NO: 435425 - RNA, 32 nt, Human
gcauagaauugccucaaguccuggugagagag

SEQ ID NO: 435426 - RNA, 32 nt, Human
gcauagacacacacccccugacccuuaccauc

SEQ ID NO: 435427 - RNA, 32 nt, Human
gcauagacagagcugcagucugugcuaacauu

SEQ ID NO: 435428 - RNA, 32 nt, Human
gcauagaggcuuguuuuacaccuaucugcuca

SEQ ID NO: 435429 - RNA, 32 nt, Human
gcauagaguacuccagcaacuacagcagggag

SEQ ID NO: 435430 - RNA, 32 nt, Human
gcauagagugaguggaugugaugggcugugac

SEQ ID NO: 435431 - RNA, 32 nt, Human
gcauagaguucagagacuggaaacugaauuuu

SEQ ID NO: 435432 - RNA, 32 nt, Human
gcauagaucaccauugacuccuaccuggagag

SEQ ID NO: 435433 - RNA, 32 nt, Human
gcauagauuauuuccauccuuccagagaaguc

SEQ ID NO: 435434 - RNA, 32 nt, Human
gcauagauuuccucuuccacaagcugccgcuu

SEQ ID NO: 435435 - RNA, 32 nt, Human
gcauagauuuccucuuugagaacaucaaccug

SEQ ID NO: 435436 - RNA, 32 nt, Human
gcauagauuucucaagaaggaagacuccccug

SEQ ID NO: 435437 - RNA, 32 nt, Human
gcauagcaaggcagagagaaaccaggagucua

SEQ ID NO: 435438 - RNA, 32 nt, Human
gcauagcaccaugaggaagaccagccaccagu

SEQ ID NO: 435439 - RNA, 32 nt, Human
gcauagccaaaugcuauggaaccaaagaauaa

SEQ ID NO: 435440 - RNA, 32 nt, Human
gcauagccaacacuugaauugcgguguacuaa

SEQ ID NO: 435441 - RNA, 32 nt, Human
gcauagccacacugcccggcacgccacaucca

SEQ ID NO: 435442 - RNA, 32 nt, Human
gcauagccaccuaggggaggaggccgugugaa

SEQ ID NO: 435443 - RNA, 25 nt, Human
gcauagccuaugcugccugcugcca

SEQ ID NO: 435444 - RNA, 32 nt, Human
gcauagccuuucuguauuuaagaaacuuaagc

SEQ ID NO: 435445 - RNA, 32 nt, Human
gcauagcggucaggcccagcaggagcuuggca

SEQ ID NO: 435446 - RNA, 32 nt, Human
gcauagcuaauaacaaccacacauugggccag

SEQ ID NO: 435447 - RNA, 32 nt, Human
gcauagcuacccuucacaggugcuuuggaaac

SEQ ID NO: 435448 - RNA, 32 nt, Human
gcauagcucacuguaggcuagccucugcuuac

SEQ ID NO: 435449 - RNA, 32 nt, Human
gcauagcuguuuuucucccaugaguaugcaaa

SEQ ID NO: 435450 - RNA, 32 nt, Human
gcauaggaccucaaaauacaaaauuagcaggg

SEQ ID NO: 435451 - RNA, 32 nt, Human
gcauaggagcaucucagccuccagguccucuc

SEQ ID NO: 435452 - RNA, 32 nt, Human
gcauaggaggcugcacguucauuuguuguugu

SEQ ID NO: 435453 - RNA, 32 nt, Human
gcauaggaggggucuggacaugugguuacuag

SEQ ID NO: 435454 - RNA, 32 nt, Human
gcauaggcacagaaguuuagguguuuggacca

SEQ ID NO: 435455 - RNA, 32 nt, Human
gcauaggccacuuuuagccauguaaaaauaag

SEQ ID NO: 435456 - RNA, 32 nt, Human
gcauaggccccagaccaaacuagaccaccagc

SEQ ID NO: 435457 - RNA, 32 nt, Human
gcauaggccuguaaucguagcgcuuugagagg

SEQ ID NO: 435458 - RNA, 32 nt, Human
gcauaggccuguaauuccagcuacucuggcug

SEQ ID NO: 435459 - RNA, 32 nt, Human
gcauaggcucuagugcugaaaggauccagguu

SEQ ID NO: 435460 - RNA, 32 nt, Human
gcauaggcuuggcaaauggacaacuugguugu

SEQ ID NO: 435461 - RNA, 32 nt, Human
gcauagggaccuaaggcccacuggagggcgcu

SEQ ID NO: 435462 - RNA, 32 nt, Human
gcauagggcagccuaccaccuccaagggggca

SEQ ID NO: 435463 - RNA, 32 nt, Human
gcauaggggaagagcaugagcuucagagucaa

SEQ ID NO: 435464 - RNA, 32 nt, Human
gcauaggugggacuacaggcaccugccaccac

SEQ ID NO: 435465 - RNA, 32 nt, Human
gcauaguauaaaauuauacccugcaugcugac

SEQ ID NO: 435466 - RNA, 32 nt, Human
gcauagucagugucguuuauauuguagcaguu

SEQ ID NO: 435467 - RNA, 31 nt, Human
gcauagugacuuccuugcagaguauaauaug

SEQ ID NO: 435468 - RNA, 24 nt, Human
gcauaguggcucacgccuguaauc

SEQ ID NO: 435469 - RNA, 32 nt, Human
gcauauaacaaguguacacauauacacauaac

SEQ ID NO: 435470 - RNA, 32 nt, Human
gcauauaaugugaaccaucacagugggagaca

SEQ ID NO: 435471 - RNA, 32 nt, Human
gcauauaggugaauauuugugugcccaugagc

SEQ ID NO: 435472 - RNA, 32 nt, Human
gcauauagugagacaguggcagggaacccaau

SEQ ID NO: 435473 - RNA, 22 nt, Human
gcauauauaaucccagcuacuc

SEQ ID NO: 435474 - RNA, 21 nt, Human
gcauauauccagcugccacca

SEQ ID NO: 435475 - RNA, 32 nt, Human
gcauaucagcagaguaggagagcaaggauuug

SEQ ID NO: 435476 - RNA, 32 nt, Human
gcauaucagcuuucacacuuuccccaugcacu

SEQ ID NO: 435477 - RNA, 32 nt, Human
gcauaucauauuuuuaaaggcuuuuuaaaaau

SEQ ID NO: 435478 - RNA, 22 nt, Human
gcauaucauuagcccucacugu

SEQ ID NO: 435479 - RNA, 32 nt, Human
gcauauccaaaugccagcaucacuguuguauu

SEQ ID NO: 435480 - RNA, 32 nt, Human
gcauauccucaccguuuucaucagucacucac

SEQ ID NO: 435481 - RNA, 32 nt, Human
gcauaucggucaccaggcacccagggccaugc

SEQ ID NO: 435482 - RNA, 32 nt, Human
gcauaucguguggcauggcaagaaacugccug

SEQ ID NO: 435483 - RNA, 32 nt, Human
gcauaucuacugcaugccaagcacuuucugca

SEQ ID NO: 435484 - RNA, 32 nt, Human
gcauaucuccccucugaggcuggaucccucau

SEQ ID NO: 435485 - RNA, 32 nt, Human
gcauaucuguagucccagcuaugugggaggcu

SEQ ID NO: 435486 - RNA, 32 nt, Human
gcauaucuuggguccagguaaaggaggugggu

SEQ ID NO: 435487 - RNA, 32 nt, Human
gcauaugaaaaccgaagguguggggagaggcc

SEQ ID NO: 435488 - RNA, 32 nt, Human
gcauaugcagagccccaaggccaccccaccag

SEQ ID NO: 435489 - RNA, 32 nt, Human
gcauaugccacauauacauacauauaugugua

SEQ ID NO: 435490 - RNA, 32 nt, Human
gcauaugccuguaaaucccagcuauuugggag

SEQ ID NO: 435491 - RNA, 31 nt, Human
gcauaugcugaguuccaccuguugaagggcu

SEQ ID NO: 435492 - RNA, 32 nt, Human
gcauaugcugccucgaauugggauuaugcaug

SEQ ID NO: 435493 - RNA, 32 nt, Human
gcauaugcuuugacuuuccuuugcuguggagg

SEQ ID NO: 435494 - RNA, 32 nt, Human
gcauauggaguagaugcucaccagaggcuggu

SEQ ID NO: 435495 - RNA, 32 nt, Human
gcauauggcucagagcagagccggaucuccca

SEQ ID NO: 435496 - RNA, 32 nt, Human
gcauauggcuuucauacagccagcuccuguuu

SEQ ID NO: 435497 - RNA, 32 nt, Human
gcauaugguucacgccuguaauuccagcacuu

SEQ ID NO: 435498 - RNA, 32 nt, Human
gcauauguauaugcugggugaccuugggcagu

SEQ ID NO: 435499 - RNA, 32 nt, Human
gcauaugucaaggagcacuugcaggcagaaug

SEQ ID NO: 435500 - RNA, 32 nt, Human
gcauaugugguagaaagaaauggagggggaau

SEQ ID NO: 435501 - RNA, 32 nt, Human
gcauauuaaaggcuuuuggcagcaaaguguca

SEQ ID NO: 435502 - RNA, 32 nt, Human
gcauauuagggugggaggggcauggacauuga

SEQ ID NO: 435503 - RNA, 32 nt, Human
gcauauuauuauauacagguugaguaucccuu

SEQ ID NO: 435504 - RNA, 32 nt, Human
gcauauuccaggugcauccaggccuguggcca

SEQ ID NO: 435505 - RNA, 32 nt, Human
gcauauucccugcacacacaugcauacuuaca

SEQ ID NO: 435506 - RNA, 32 nt, Human
gcauauuggauuuaggggaauuuucauuguua

SEQ ID NO: 435507 - RNA, 32 nt, Human
gcauauuggccgucugggguccaucucccucc

SEQ ID NO: 435508 - RNA, 21 nt, Human
gcauauuucacagaaugcagu

SEQ ID NO: 435509 - RNA, 32 nt, Human
gcauauuucugugcuguggaugacauggccuu

SEQ ID NO: 435510 - RNA, 32 nt, Human
gcauauuuguuucucucuaccugauuucucca

SEQ ID NO: 435511 - RNA, 32 nt, Human
gcauauuuuaacuccacugcuuaccuacuuuc

SEQ ID NO: 435512 - RNA, 32 nt, Human
gcauauuuucauuguuuuagagggagacagag

SEQ ID NO: 435513 - RNA, 32 nt, Human
gcaucaaaagacucacucacaaaacuucugaa

SEQ ID NO: 435514 - RNA, 32 nt, Human
gcaucaaaaucaggucagaaaaaugcugcuuu

SEQ ID NO: 435515 - RNA, 32 nt, Human
gcaucaaaggagacugaggaagagugaucagg

SEQ ID NO: 435516 - RNA, 32 nt, Human
gcaucaacaggcuguccagaucaauuggcacc

SEQ ID NO: 435517 - RNA, 32 nt, Human
gcaucaagagaaaaccaaucagcuucaucaaa

SEQ ID NO: 435518 - RNA, 32 nt, Human
gcaucaagaggaagaagaagagggaggacuca

SEQ ID NO: 435519 - RNA, 32 nt, Human
gcaucaagcaguggggcucucaguaggaacuu

SEQ ID NO: 435520 - RNA, 32 nt, Human
gcaucaagccagccugaccaacauggugaaac

SEQ ID NO: 435521 - RNA, 32 nt, Human
gcaucaagguugcuuuuggcuuuuggcuggga

SEQ ID NO: 435522 - RNA, 32 nt, Human
gcaucaauacaaccagcccaaccaucggucca

SEQ ID NO: 435523 - RNA, 32 nt, Human
gcaucaaucccacaaagggagcuguauggugg

SEQ ID NO: 435524 - RNA, 32 nt, Human
gcaucacaccuguaaucccagcacuuugggag

SEQ ID NO: 435525 - RNA, 32 nt, Human
gcaucacagaagcacaggaggccaguucugaa

SEQ ID NO: 435526 - RNA, 20 nt, Human
gcaucacaggcugcaccccc

SEQ ID NO: 435527 - RNA, 32 nt, Human
gcaucacaguuuugcaaccucugcuccaaaga

SEQ ID NO: 435528 - RNA, 26 nt, Human
gcaucaccaccacuccugaaccccca

SEQ ID NO: 435529 - RNA, 32 nt, Human
gcaucaccagaagggaguaagcagggagagaa

SEQ ID NO: 435530 - RNA, 22 nt, Human
gcaucacccaccaaaguuagcu

SEQ ID NO: 435531 - RNA, 32 nt, Human
gcaucacccaggcuggcagaucaugguagcag

SEQ ID NO: 435532 - RNA, 32 nt, Human
gcaucaccccuuacauacucacacugggagcc

SEQ ID NO: 435533 - RNA, 21 nt, Human
gcaucaccgcgggccucgacc

SEQ ID NO: 435534 - RNA, 32 nt, Human
gcaucaccuaccucagagggcuuuucugagga

SEQ ID NO: 435535 - RNA, 18 nt, Human
gcaucaccugaggucagg

SEQ ID NO: 435536 - RNA, 19 nt, Human
gcaucaccugggugcaaaa

SEQ ID NO: 435537 - RNA, 32 nt, Human
gcaucacgagccacuuccacuccuggguggcc

SEQ ID NO: 435538 - RNA, 20 nt, Human
gcaucacuaacgaggucgcc

SEQ ID NO: 435539 - RNA, 32 nt, Human
gcaucacugagaugcucaguccugaauucugc

SEQ ID NO: 435540 - RNA, 32 nt, Human
gcaucacugcacuccaaccugggcaacagagu

SEQ ID NO: 435541 - RNA, 32 nt, Human
gcaucacugcacuccagccugggcaacacagc

SEQ ID NO: 435542 - RNA, 32 nt, Human
gcaucacugcacuccagccugggcaacagagc

SEQ ID NO: 435543 - RNA, 32 nt, Human
gcaucacugcacuccagccugggcagcagagu

SEQ ID NO: 435544 - RNA, 32 nt, Human
gcaucacugcacuccagccugggcgauggagc

SEQ ID NO: 435545 - RNA, 32 nt, Human
gcaucacugcacuccagccugggugacagagc

SEQ ID NO: 435546 - RNA, 32 nt, Human
gcaucacugcacuccagcuugggugacagagc

SEQ ID NO: 435547 - RNA, 32 nt, Human
gcaucacugcacugcagccugggcaacauagc

SEQ ID NO: 435548 - RNA, 32 nt, Human
gcaucacugcaguccagccuggaugacagagu

SEQ ID NO: 435549 - RNA, 32 nt, Human
gcaucacuggcagaggauucguguagguggca

SEQ ID NO: 435550 - RNA, 32 nt, Human
gcaucagaagcacauuuacugugcuauuuaua

SEQ ID NO: 435551 - RNA, 32 nt, Human
gcaucagaaugagaaagccugagaagaaagaa

SEQ ID NO: 435552 - RNA, 32 nt, Human
gcaucagacaaugccauuucuccccaccacgg

SEQ ID NO: 435553 - RNA, 32 nt, Human
gcaucagagaaggccaggaagaaugguguguu

SEQ ID NO: 435554 - RNA, 32 nt, Human
gcaucagagacagagacgcaggugcuuccgaa

SEQ ID NO: 435555 - RNA, 32 nt, Human
gcaucagaggaaaugugacgacagaagcaggg

SEQ ID NO: 435556 - RNA, 21 nt, Human
gcaucagauacugaucugagc

SEQ ID NO: 435557 - RNA, 32 nt, Human
gcaucagauacugaucugagcuguaagcuggu

SEQ ID NO: 435558 - RNA, 32 nt, Human
gcaucagauggaagcuuacucucugcuuccgu

SEQ ID NO: 435559 - RNA, 32 nt, Human
gcaucagauggacaauccccucugaguguccu

SEQ ID NO: 435560 - RNA, 32 nt, Human
gcaucagcacagagucccacuaucugaaauag

SEQ ID NO: 435561 - RNA, 20 nt, Human
gcaucagcaggggcagugag

SEQ ID NO: 435562 - RNA, 20 nt, Human
gcaucagcagucacagagca

SEQ ID NO: 435563 - RNA, 32 nt, Human
gcaucagccauagucuggccucaggcccuggc

SEQ ID NO: 435564 - RNA, 17 nt, Human
gcaucagccggcuggca

SEQ ID NO: 435565 - RNA, 32 nt, Human
gcaucagcuauugugggcacacugccuauggg

SEQ ID NO: 435566 - RNA, 20 nt, Human
gcaucagcucagucagugaa

SEQ ID NO: 435567 - RNA, 32 nt, Human
gcaucagcugccauccuuuccucucuccucag

SEQ ID NO: 435568 - RNA, 32 nt, Human
gcaucagcugccgaggcgcguuccauggcccu

SEQ ID NO: 435569 - RNA, 32 nt, Human
gcaucagcugcugaaacaacaaauaggaauug

SEQ ID NO: 435570 - RNA, 31 nt, Human
gcaucaggaagaaguaaccuguugaaucuau

SEQ ID NO: 435571 - RNA, 32 nt, Human
gcaucaggcccagacagagccuggcaggcauc

SEQ ID NO: 435572 - RNA, 32 nt, Human
gcaucaggccuccgaccuuucuugccucgguu

SEQ ID NO: 435573 - RNA, 32 nt, Human
gcaucaggccugggacacugcucuccuucccc

SEQ ID NO: 435574 - RNA, 22 nt, Human
gcaucaggcgcuguuguuggag

SEQ ID NO: 435575 - RNA, 32 nt, Human
gcaucaggcucugccaaggccccucugacucu

SEQ ID NO: 435576 - RNA, 32 nt, Human
gcaucaggcugcagggugaaggggaggucugg

SEQ ID NO: 435577 - RNA, 32 nt, Human
gcaucagggacccccacccccaccccggcucu

SEQ ID NO: 435578 - RNA, 32 nt, Human
gcaucagggugaccucuggaaggucugaaaau

SEQ ID NO: 435579 - RNA, 32 nt, Human
gcaucagguggcugggacaagcgggugaugcu

SEQ ID NO: 435580 - RNA, 32 nt, Human
gcaucaguacugggauugggaacugcaagaau

SEQ ID NO: 435581 - RNA, 32 nt, Human
gcaucaguccacuccagccugagcaacagagc

SEQ ID NO: 435582 - RNA, 32 nt, Human
gcaucagugccucccuucccaggucaccagcu

SEQ ID NO: 435583 - RNA, 32 nt, Human
gcaucagugguuugguuuaagcuccagagggu

SEQ ID NO: 435584 - RNA, 18 nt, Human
gcaucagugucccgugaa

SEQ ID NO: 435585 - RNA, 31 nt, Human
gcaucaguguucucuggguccugugcccucg

SEQ ID NO: 435586 - RNA, 32 nt, Human
gcaucaguuucaucagcugaucggccacugcc

SEQ ID NO: 435587 - RNA, 21 nt, Human
gcaucaguuugcuacagugag

SEQ ID NO: 435588 - RNA, 21 nt, Human
gcaucaguuuuaacauaugaa

SEQ ID NO: 435589 - RNA, 32 nt, Human
gcaucauaaggaguugguguaaucauuuuaaa

SEQ ID NO: 435590 - RNA, 32 nt, Human
gcaucauacaucuucucuuuccuuguuuuccu

SEQ ID NO: 435591 - RNA, 32 nt, Human
gcaucauacuucucuaguuugccugcauucag

SEQ ID NO: 435592 - RNA, 32 nt, Human
gcaucaucacacugacuguggcgcacugggga

SEQ ID NO: 435593 - RNA, 32 nt, Human
gcaucaucagcccuucuggggcguguaccucu

SEQ ID NO: 435594 - RNA, 32 nt, Human
gcaucaucaguguaaucucugauuggauuccu

SEQ ID NO: 435595 - RNA, 32 nt, Human
gcaucaucccagggacauccucaaauacaugg

SEQ ID NO: 435596 - RNA, 32 nt, Human
gcaucauccucgggagcugacaacagccaggc

SEQ ID NO: 435597 - RNA, 32 nt, Human
gcaucauccucucagcagucuuccugucaccc

SEQ ID NO: 435598 - RNA, 32 nt, Human
gcaucaucucauuuaauccucccuuccucccu

SEQ ID NO: 435599 - RNA, 19 nt, Human
gcaucaucugcaccgggac

SEQ ID NO: 435600 - RNA, 32 nt, Human
gcaucaucuguacuugaagaggccagugggag

SEQ ID NO: 435601 - RNA, 32 nt, Human
gcaucaugauccagagguucagcccgugugca

SEQ ID NO: 435602 - RNA, 32 nt, Human
gcaucaugaugauucucuaacacugucuguca

SEQ ID NO: 435603 - RNA, 30 nt, Human
gcaucauggacaccucgucagagaugcugg

SEQ ID NO: 435604 - RNA, 24 nt, Human
gcaucauggcucacaccuguaauc

SEQ ID NO: 435605 - RNA, 32 nt, Human
gcaucauggcugugcaggaggcugugguuuga

SEQ ID NO: 435606 - RNA, 32 nt, Human
gcaucaugggcaacucgugacagccucugacu

SEQ ID NO: 435607 - RNA, 32 nt, Human
gcaucaugggucuugcuugccugcugcccuga

SEQ ID NO: 435608 - RNA, 32 nt, Human
gcaucauguccaccccugcagauccuuggaaa

SEQ ID NO: 435609 - RNA, 32 nt, Human
gcaucaugucugcauuuuaccauagauuggag

SEQ ID NO: 435610 - RNA, 32 nt, Human
gcaucaugugaggagggcguggggaaggacau

SEQ ID NO: 435611 - RNA, 32 nt, Human
gcaucauugcacuccagccugggcaacaagag

SEQ ID NO: 435612 - RNA, 32 nt, Human
gcaucauugcacuccagccugggcaacagaga

SEQ ID NO: 435613 - RNA, 32 nt, Human
gcaucauugcacuccagccugggugacagagu

SEQ ID NO: 435614 - RNA, 32 nt, Human
gcaucauugcauuccagccugggcaacagagc

SEQ ID NO: 435615 - RNA, 32 nt, Human
gcaucauuucaugccaaagugcugcuaugggc

SEQ ID NO: 435616 - RNA, 32 nt, Human
gcaucauuuccuccucuucacagugugcuggg

SEQ ID NO: 435617 - RNA, 21 nt, Human
gcauccaaaggugcucagaga

SEQ ID NO: 435618 - RNA, 32 nt, Human
gcauccaaauggcugcuuuugucucccuuacc

SEQ ID NO: 435619 - RNA, 32 nt, Human
gcauccaacauggugaagccccgucucuacua

SEQ ID NO: 435620 - RNA, 21 nt, Human
gcauccaagggugcacaggga

SEQ ID NO: 435621 - RNA, 32 nt, Human
gcauccaagucaacucaccaucuugggguccc

SEQ ID NO: 435622 - RNA, 32 nt, Human
gcauccacacgguuagccgugcaugcacuuug

SEQ ID NO: 435623 - RNA, 32 nt, Human
gcauccaccugccucucacugaacacgagcca

SEQ ID NO: 435624 - RNA, 32 nt, Human
gcauccacucucccuuguccuccugggggcau

SEQ ID NO: 435625 - RNA, 32 nt, Human
gcauccacugacuguccaagggccacucccaa

SEQ ID NO: 435626 - RNA, 32 nt, Human
gcauccagaaaucgcugugcauguuugagggg

SEQ ID NO: 435627 - RNA, 32 nt, Human
gcauccagaagcguuuauauucugagcgccag

SEQ ID NO: 435628 - RNA, 32 nt, Human
gcauccagacuuucacaugagcuugcccagau

SEQ ID NO: 435629 - RNA, 32 nt, Human
gcauccagagcaugacccgccugguggugaag

SEQ ID NO: 435630 - RNA, 16 nt, Human
gcauccagagcaugug

SEQ ID NO: 435631 - RNA, 32 nt, Human
gcauccagaggaagagccaggagugugggaag

SEQ ID NO: 435632 - RNA, 32 nt, Human
gcauccagagguggggacacuguggagacaag

SEQ ID NO: 435633 - RNA, 32 nt, Human
gcauccagcagugaccagcagaacagcagcgc

SEQ ID NO: 435634 - RNA, 32 nt, Human
gcauccagccucaucuuucuuuuaaccaauaa

SEQ ID NO: 435635 - RNA, 32 nt, Human
gcauccagccuccugcuaacuccuagcugacu

SEQ ID NO: 435636 - RNA, 32 nt, Human
gcauccagccuggggcugaggcugaggcacug

SEQ ID NO: 435637 - RNA, 32 nt, Human
gcauccaggaacaggcuccagggcaggaaccu

SEQ ID NO: 435638 - RNA, 32 nt, Human
gcauccaggagauagaaguugcagugagcuga

SEQ ID NO: 435639 - RNA, 32 nt, Human
gcauccaggggccuggugagcccccaggcugg

SEQ ID NO: 435640 - RNA, 32 nt, Human
gcauccagguaccacaggacagccuggggcag

SEQ ID NO: 435641 - RNA, 32 nt, Human
gcauccaguccacuuuaccaucaguguuuaag

SEQ ID NO: 435642 - RNA, 32 nt, Human
gcauccagugugcuuagugcugagcaggguuu

SEQ ID NO: 435643 - RNA, 32 nt, Human
gcauccaguuaccaccuccugccucagaggcc

SEQ ID NO: 435644 - RNA, 32 nt, Human
gcauccaugcugcuagaauccaaaaagaauca

SEQ ID NO: 435645 - RNA, 32 nt, Human
gcauccauggauuacaguaccuauagccaagc

SEQ ID NO: 435646 - RNA, 32 nt, Human
gcauccauucucuaucacaccuuucauaugac

SEQ ID NO: 435647 - RNA, 18 nt, Human
gcaucccaaaccugcucc

SEQ ID NO: 435648 - RNA, 23 nt, Human
gcaucccaaagugcugggauuac

SEQ ID NO: 435649 - RNA, 32 nt, Human
gcaucccacacaugcaggcacacacagccugu

SEQ ID NO: 435650 - RNA, 32 nt, Human
gcaucccacaugcauucuuaccaugcugcaga

SEQ ID NO: 435651 - RNA, 32 nt, Human
gcaucccaccuugccaaagcacuuacaccagu

SEQ ID NO: 435652 - RNA, 32 nt, Human
gcaucccagccagugccauguccucugcaggu

SEQ ID NO: 435653 - RNA, 32 nt, Human
gcaucccagcuacuccaggggcugaggugaca

SEQ ID NO: 435654 - RNA, 32 nt, Human
gcaucccagcugggccagagagagccgagugu

SEQ ID NO: 435655 - RNA, 32 nt, Human
gcaucccagugggccucagacacugcccugcc

SEQ ID NO: 435656 - RNA, 32 nt, Human
gcaucccauccagccucagagggcccagagaa

SEQ ID NO: 435657 - RNA, 32 nt, Human
gcaucccauggaaacuuaauucccuccuagca

SEQ ID NO: 435658 - RNA, 32 nt, Human
gcauccccaccuuuugggguaaggggagugcu

SEQ ID NO: 435659 - RNA, 32 nt, Human
gcauccccagcugcucucccaccccaccccag

SEQ ID NO: 435660 - RNA, 32 nt, Human
gcauccccaggauagggcagucggggaagggg

SEQ ID NO: 435661 - RNA, 32 nt, Human
gcauccccaggguguguccuuucuugaucacu

SEQ ID NO: 435662 - RNA, 32 nt, Human
gcaucccccacacagggcucugguuuucacuc

SEQ ID NO: 435663 - RNA, 23 nt, Human
gcaucccccacuacccccuccca

SEQ ID NO: 435664 - RNA, 32 nt, Human
gcaucccccagcugcucccaucuugcuggaau

SEQ ID NO: 435665 - RNA, 32 nt, Human
gcaucccccauguucgucaucucaucucaguc

SEQ ID NO: 435666 - RNA, 32 nt, Human
gcaucccccuggcagagccgcagggcuccauc

SEQ ID NO: 435667 - RNA, 32 nt, Human
gcauccccggcagccaaucagggacaggcugg

SEQ ID NO: 435668 - RNA, 32 nt, Human
gcauccccuaagacagaguccucuguuccucc

SEQ ID NO: 435669 - RNA, 32 nt, Human
gcauccccuccacuccagaguuggguggcacg

SEQ ID NO: 435670 - RNA, 32 nt, Human
gcauccccuccacuccagaguugggugguacg

SEQ ID NO: 435671 - RNA, 32 nt, Human
gcauccccuccagacugcguucuggaagcccu

SEQ ID NO: 435672 - RNA, 32 nt, Human
gcauccccuccccagacugccugcugucaaac

SEQ ID NO: 435673 - RNA, 32 nt, Human
gcauccccuccccaucuccccuuugucuuccu

SEQ ID NO: 435674 - RNA, 32 nt, Human
gcauccccugcuccugccccugcucggcuaca

SEQ ID NO: 435675 - RNA, 32 nt, Human
gcaucccgcaguguacaggacagcccccaaac

SEQ ID NO: 435676 - RNA, 32 nt, Human
gcaucccuccuggaggccugggaugggguagg

SEQ ID NO: 435677 - RNA, 32 nt, Human
gcaucccuccuucuccccuaaagggacucugc

SEQ ID NO: 435678 - RNA, 32 nt, Human
gcaucccucuaacccaggaggagcguggggaa

SEQ ID NO: 435679 - RNA, 32 nt, Human
gcaucccugcaccaggacucaccaagacgccc

SEQ ID NO: 435680 - RNA, 32 nt, Human
gcaucccugcagcaggcacagagccagcagca

SEQ ID NO: 435681 - RNA, 32 nt, Human
gcaucccugcagcugaacccagcacuuuuuau

SEQ ID NO: 435682 - RNA, 32 nt, Human
gcaucccugcccugccuccagccuugguggcu

SEQ ID NO: 435683 - RNA, 32 nt, Human
gcaucccugcuguggcucaccugcugcugucu

SEQ ID NO: 435684 - RNA, 32 nt, Human
gcaucccugcuuguuuuggagccaugggcacu

SEQ ID NO: 435685 - RNA, 32 nt, Human
gcaucccuggccacugccucccagucuugcug

SEQ ID NO: 435686 - RNA, 32 nt, Human
gcaucccuggguucuuggaagcagcucuuaug

SEQ ID NO: 435687 - RNA, 32 nt, Human
gcaucccuggugcuggggacugugccaggcca

SEQ ID NO: 435688 - RNA, 32 nt, Human
gcaucccuguaaucccagcuacuuuacuuggg

SEQ ID NO: 435689 - RNA, 32 nt, Human
gcaucccuuaaccuuaagcaauccaguuccac

SEQ ID NO: 435690 - RNA, 32 nt, Human
gcauccgagccgagggcucugcucggaaaucg

SEQ ID NO: 435691 - RNA, 32 nt, Human
gcauccgaggagcugugguccagccugcgcgg

SEQ ID NO: 435692 - RNA, 32 nt, Human
gcauccgccuucccauccacacugccuuuagu

SEQ ID NO: 435693 - RNA, 19 nt, Human
gcauccggagcugcagcca

SEQ ID NO: 435694 - RNA, 32 nt, Human
gcauccggaguuguucauuccuccugucuggc

SEQ ID NO: 435695 - RNA, 32 nt, Human
gcauccggcuaccugcccucccugccuucccc

SEQ ID NO: 435696 - RNA, 32 nt, Human
gcauccgugaggcuggacagcgauaaaccccu

SEQ ID NO: 435697 - RNA, 32 nt, Human
gcauccguggaguggggcuuugggagaccuug

SEQ ID NO: 435698 - RNA, 32 nt, Human
gcauccguggggaccgaaagagguuuuugcac

SEQ ID NO: 435699 - RNA, 32 nt, Human
gcauccguguggaauugcgugcagccugugug

SEQ ID NO: 435700 - RNA, 28 nt, Human
gcauccuaacuugcugccuuaucgucug

SEQ ID NO: 435701 - RNA, 18 nt, Human
gcauccuaggaauggaga

SEQ ID NO: 435702 - RNA, 32 nt, Human
gcauccuauggggaaguccaggagaacuauaa

SEQ ID NO: 435703 - RNA, 32 nt, Human
gcauccucacggcauggccucugccuucccca

SEQ ID NO: 435704 - RNA, 32 nt, Human
gcauccucagcacaggaaguacccacauggac

SEQ ID NO: 435705 - RNA, 32 nt, Human
gcauccucauugcagugcggcggcccuaccuc

SEQ ID NO: 435706 - RNA, 32 nt, Human
gcauccucauuucccaauggcccuccuguucc

SEQ ID NO: 435707 - RNA, 32 nt, Human
gcauccucauuucucagcccagucucauguuc

SEQ ID NO: 435708 - RNA, 23 nt, Human
gcauccuccaccucccagguuca

SEQ ID NO: 435709 - RNA, 32 nt, Human
gcauccuccacucagccacccuucccacuccc

SEQ ID NO: 435710 - RNA, 32 nt, Human
gcauccuccaggagaccucccuguguguugac

SEQ ID NO: 435711 - RNA, 32 nt, Human
gcauccuccccuccucggacucaaggugcuga

SEQ ID NO: 435712 - RNA, 32 nt, Human
gcauccucuaugggaaagacaacacgcaccua

SEQ ID NO: 435713 - RNA, 32 nt, Human
gcauccucuccucaggccuccuucccacauca

SEQ ID NO: 435714 - RNA, 32 nt, Human
gcauccucugaugaacucacacaugccucagu

SEQ ID NO: 435715 - RNA, 32 nt, Human
gcauccucuguucauccgggggaggccccaau

SEQ ID NO: 435716 - RNA, 32 nt, Human
gcauccugaacaaauacauggagauccauggc

SEQ ID NO: 435717 - RNA, 32 nt, Human
gcauccugagcuccucuucugccgcuuccaac

SEQ ID NO: 435718 - RNA, 32 nt, Human
gcauccugaguggcaccugagguucuuugagc

SEQ ID NO: 435719 - RNA, 32 nt, Human
gcauccugccacccacacagcagccuccagga

SEQ ID NO: 435720 - RNA, 32 nt, Human
gcauccugccagaggugcacaggcuggaguuu

SEQ ID NO: 435721 - RNA, 21 nt, Human
gcauccugccugcguggacug

SEQ ID NO: 435722 - RNA, 32 nt, Human
gcauccuggaaggcuucucugugacugcacuu

SEQ ID NO: 435723 - RNA, 32 nt, Human
gcauccuggaccuuggcguugccgcuccgcgg

SEQ ID NO: 435724 - RNA, 32 nt, Human
gcauccuggaggugaagguugcagugagccaa

SEQ ID NO: 435725 - RNA, 32 nt, Human
gcauccuggaugugugcaccgugcgcugagug

SEQ ID NO: 435726 - RNA, 32 nt, Human
gcauccuggcugcuggggcuacuucauucccc

SEQ ID NO: 435727 - RNA, 32 nt, Human
gcauccugggcugugcugaggcagugcugucu

SEQ ID NO: 435728 - RNA, 32 nt, Human
gcauccugguugccucuacuguggucaccuuu

SEQ ID NO: 435729 - RNA, 32 nt, Human
gcauccugugaauucaugcgcugcgaguggcg

SEQ ID NO: 435730 - RNA, 32 nt, Human
gcauccugugagagaccagagagagaguuugg

SEQ ID NO: 435731 - RNA, 20 nt, Human
gcauccugugcuccgcaggc

SEQ ID NO: 435732 - RNA, 32 nt, Human
gcauccugugugugugaagcacccgccgucag

SEQ ID NO: 435733 - RNA, 32 nt, Human
gcauccugugugugugacgcacccgccgucag

SEQ ID NO: 435734 - RNA, 32 nt, Human
gcauccuucagcuguaccagcgcugccccaau

SEQ ID NO: 435735 - RNA, 32 nt, Human
gcauccuucuacugcucccuccaggucugggg

SEQ ID NO: 435736 - RNA, 32 nt, Human
gcauccuugaaauccugggcucaggugauccu

SEQ ID NO: 435737 - RNA, 32 nt, Human
gcauccuugccaagccuccaccacuaggucag

SEQ ID NO: 435738 - RNA, 32 nt, Human
gcauccuugccccauucagcccggccuuucau

SEQ ID NO: 435739 - RNA, 32 nt, Human
gcauccuugccucagcuaccugcucacagccc

SEQ ID NO: 435740 - RNA, 32 nt, Human
gcauccuugcugcuuuauccuccuggaccuuc

SEQ ID NO: 435741 - RNA, 32 nt, Human
gcauccuugguggccuaagagggaucuuuucu

SEQ ID NO: 435742 - RNA, 32 nt, Human
gcauccuuguucuccccuggguccguaacauu

SEQ ID NO: 435743 - RNA, 32 nt, Human
gcauccuuuacaccauacuuuacuucugguau

SEQ ID NO: 435744 - RNA, 32 nt, Human
gcaucgagacccagaguaaagccaugacaaug

SEQ ID NO: 435745 - RNA, 22 nt, Human
gcaucgagccaaaggggagaug

SEQ ID NO: 435746 - RNA, 23 nt, Human
gcaucgagccccagcgcccggcc

SEQ ID NO: 435747 - RNA, 32 nt, Human
gcaucgaugggagagaaaacagaaucuuaggc

SEQ ID NO: 435748 - RNA, 32 nt, Human
gcaucgcacgaucuagucugugguguagacug

SEQ ID NO: 435749 - RNA, 23 nt, Human
gcaucgcccgcuuaccuucagcc

SEQ ID NO: 435750 - RNA, 32 nt, Human
gcaucgccugcugaagcccacggccgugccau

SEQ ID NO: 435751 - RNA, 32 nt, Human
gcaucgcuccacugucucuccugccucccucu

SEQ ID NO: 435752 - RNA, 32 nt, Human
gcaucgcuccucuccagcccugcagcuauuca

SEQ ID NO: 435753 - RNA, 32 nt, Human
gcaucgcugucucuaguccucugugauaguuc

SEQ ID NO: 435754 - RNA, 32 nt, Human
gcaucgcuuguuuccaccuccugggccggggc

SEQ ID NO: 435755 - RNA, 32 nt, Human
gcaucggaggugggcgggguugcagugacugg

SEQ ID NO: 435756 - RNA, 32 nt, Human
gcaucggaucuaaaacuacuagaucucauccc

SEQ ID NO: 435757 - RNA, 32 nt, Human
gcaucggcuuugacugcagacuguucacccac

SEQ ID NO: 435758 - RNA, 32 nt, Human
gcaucgggaagcaggagcaucuucuuggcagc

SEQ ID NO: 435759 - RNA, 32 nt, Human
gcaucggggaugugagcugagcugcacccaga

SEQ ID NO: 435760 - RNA, 32 nt, Human
gcaucgggguggccccacugagucucggcaua

SEQ ID NO: 435761 - RNA, 32 nt, Human
gcaucggguagccaugccuuucuuggacaucc

SEQ ID NO: 435762 - RNA, 32 nt, Human
gcaucgguaccuuuugccugggugauaccgaa

SEQ ID NO: 435763 - RNA, 32 nt, Human
gcaucgugccuggagccugccuucccaacauc

SEQ ID NO: 435764 - RNA, 32 nt, Human
gcaucgugcuuugcaugagagcaggccaaggu

SEQ ID NO: 435765 - RNA, 32 nt, Human
gcaucguggccccucaccucucccucuccccc

SEQ ID NO: 435766 - RNA, 19 nt, Human
gcaucgugucacaaaguca

SEQ ID NO: 435767 - RNA, 32 nt, Human
gcaucuaagagagguuaaucacacuauagagg

SEQ ID NO: 435768 - RNA, 23 nt, Human
gcaucuacacaccucagccuccu

SEQ ID NO: 435769 - RNA, 32 nt, Human
gcaucuacacacuguacacauaugcacacuuu

SEQ ID NO: 435770 - RNA, 32 nt, Human
gcaucuacagaaaaauuuuaaaauuagcuggg

SEQ ID NO: 435771 - RNA, 32 nt, Human
gcaucuacccucccguccccugcugccagaag

SEQ ID NO: 435772 - RNA, 32 nt, Human
gcaucuacuguuguguaaggaacuucugauuc

SEQ ID NO: 435773 - RNA, 32 nt, Human
gcaucuacuucuagacucccaaaggagcccag

SEQ ID NO: 435774 - RNA, 21 nt, Human
gcaucuagaccccugcacagc

SEQ ID NO: 435775 - RNA, 21 nt, Human
gcaucuagagcagagccuggc

SEQ ID NO: 435776 - RNA, 32 nt, Human
gcaucuagcacauuuaaacugugcaaauauga

SEQ ID NO: 435777 - RNA, 32 nt, Human
gcaucuagcccaaacuuguggucuucccugag

SEQ ID NO: 435778 - RNA, 32 nt, Human
gcaucuaguccagaugggucagccuggaaugg

SEQ ID NO: 435779 - RNA, 32 nt, Human
gcaucuauacccaaggaguccugugauuugag

SEQ ID NO: 435780 - RNA, 23 nt, Human
gcaucucaaagugcugggauuac

SEQ ID NO: 435781 - RNA, 32 nt, Human
gcaucucaagccccaaaugguugggggagggg

SEQ ID NO: 435782 - RNA, 32 nt, Human
gcaucucaagccccaguagcaggagaaagaaa

SEQ ID NO: 435783 - RNA, 32 nt, Human
gcaucucacaaaggaauaacugcucugagcag

SEQ ID NO: 435784 - RNA, 31 nt, Human
gcaucucacagcuaugcaaaaagcuagucaa

SEQ ID NO: 435785 - RNA, 32 nt, Human
gcaucucaccacgacuucuccuggaguccuca

SEQ ID NO: 435786 - RNA, 32 nt, Human
gcaucucauguuugaacccgggugguauccca

SEQ ID NO: 435787 - RNA, 32 nt, Human
gcaucuccaacaucucuccccaccucaugauu

SEQ ID NO: 435788 - RNA, 32 nt, Human
gcaucuccauggagaacugcuaaggcaauuau

SEQ ID NO: 435789 - RNA, 32 nt, Human
gcaucucccaguggacgcgagcagggacacac

SEQ ID NO: 435790 - RNA, 32 nt, Human
gcaucucccugucacugugacacaccuagaug

SEQ ID NO: 435791 - RNA, 32 nt, Human
gcaucucccuguuucagggccagaacuggcug

SEQ ID NO: 435792 - RNA, 32 nt, Human
gcaucucccuuuccucuguccuccauccuucu

SEQ ID NO: 435793 - RNA, 22 nt, Human
gcaucuccgcggccuccugcuc

SEQ ID NO: 435794 - RNA, 32 nt, Human
gcaucuccucauuccccgccgggagcaacauc

SEQ ID NO: 435795 - RNA, 32 nt, Human
gcaucuccuccccuuucugccugaccuuagga

SEQ ID NO: 435796 - RNA, 32 nt, Human
gcaucuccugggcgucaccaggaaggcucuga

SEQ ID NO: 435797 - RNA, 32 nt, Human
gcaucucgaccagccucugccuuaaaggaaau

SEQ ID NO: 435798 - RNA, 32 nt, Human
gcaucucuaaggcccacuugaaugcaaaggaa

SEQ ID NO: 435799 - RNA, 32 nt, Human
gcaucucuacucuuagagacucaggccaagaa

SEQ ID NO: 435800 - RNA, 32 nt, Human
gcaucucucagagaugugaagccagauccuca

SEQ ID NO: 435801 - RNA, 32 nt, Human
gcaucucucagccucacaucuccuggucaacc

SEQ ID NO: 435802 - RNA, 32 nt, Human
gcaucucuccaggguccaaggccacgcuuggu

SEQ ID NO: 435803 - RNA, 32 nt, Human
gcaucucuccccucagcccugucuccucuucu

SEQ ID NO: 435804 - RNA, 32 nt, Human
gcaucucuccuuccagcccaaacugcacagcc

SEQ ID NO: 435805 - RNA, 32 nt, Human
gcaucucugagaaaguggccccagggagagaa

SEQ ID NO: 435806 - RNA, 32 nt, Human
gcaucucugccuuccuguucacggugaccuuc

SEQ ID NO: 435807 - RNA, 32 nt, Human
gcaucucugccuuucaaaaugaaggaacauug

SEQ ID NO: 435808 - RNA, 32 nt, Human
gcaucucugggaaaugauaggaguauugcaaa

SEQ ID NO: 435809 - RNA, 32 nt, Human
gcaucucugggcagcccuuuggugguuugucc

SEQ ID NO: 435810 - RNA, 32 nt, Human
gcaucucuggucuuaucagccaugcuaaauca

SEQ ID NO: 435811 - RNA, 32 nt, Human
gcaucugaaacuugcuucaucucugacgcucg

SEQ ID NO: 435812 - RNA, 32 nt, Human
gcaucugaacagcauucuccuggagaaaacug

SEQ ID NO: 435813 - RNA, 32 nt, Human
gcaucugaagacucaggcagagcagcuccaca

SEQ ID NO: 435814 - RNA, 32 nt, Human
gcaucugaaggccagugcugugcuggcaggaa

SEQ ID NO: 435815 - RNA, 32 nt, Human
gcaucugacagagagaccaaaacuugguugua

SEQ ID NO: 435816 - RNA, 32 nt, Human
gcaucugacauuccaccgauucacaaacuucc

SEQ ID NO: 435817 - RNA, 32 nt, Human
gcaucugaccuuggaaggaagcagaagcagag

SEQ ID NO: 435818 - RNA, 32 nt, Human
gcaucugagauguguguauaugaaaagauuau

SEQ ID NO: 435819 - RNA, 32 nt, Human
gcaucugaucaagcuccggaagaugguggagg

SEQ ID NO: 435820 - RNA, 32 nt, Human
gcaucugcaaaaggcccugcucucuggagugu

SEQ ID NO: 435821 - RNA, 32 nt, Human
gcaucugcaacaaaaagucauuuuucuggagu

SEQ ID NO: 435822 - RNA, 32 nt, Human
gcaucugcaacaacagcaggcucuccaggcag

SEQ ID NO: 435823 - RNA, 32 nt, Human
gcaucugcaagcugagcaacaucaggaauugc

SEQ ID NO: 435824 - RNA, 32 nt, Human
gcaucugcacccagggucccagccuggccacc

SEQ ID NO: 435825 - RNA, 23 nt, Human
gcaucugcaggcccugaccccca

SEQ ID NO: 435826 - RNA, 32 nt, Human
gcaucugcagggaacuuuggcagcuuggggca

SEQ ID NO: 435827 - RNA, 32 nt, Human
gcaucugcaggguggagggggccaccauccag

SEQ ID NO: 435828 - RNA, 32 nt, Human
gcaucugcauauugaaagaacgcuuuccccac

SEQ ID NO: 435829 - RNA, 32 nt, Human
gcaucugcauggcggugguggggaggaggggu

SEQ ID NO: 435830 - RNA, 32 nt, Human
gcaucugccaggacacugccuuggguggacca

SEQ ID NO: 435831 - RNA, 19 nt, Human
gcaucugccaggcagcccc

SEQ ID NO: 435832 - RNA, 32 nt, Human
gcaucugcccacgauggcagugcagucaucau

SEQ ID NO: 435833 - RNA, 32 nt, Human
gcaucugccccaacccauccagccugcauguu

SEQ ID NO: 435834 - RNA, 32 nt, Human
gcaucugccccugcuauauguggggaaaacuc

SEQ ID NO: 435835 - RNA, 32 nt, Human
gcaucugcccucuggagaacacugccucccgc

SEQ ID NO: 435836 - RNA, 32 nt, Human
gcaucugccugggaucaucaagcccuagaagc

SEQ ID NO: 435837 - RNA, 32 nt, Human
gcaucugccuguagucccagcuacucgggagg

SEQ ID NO: 435838 - RNA, 20 nt, Human
gcaucugcuaccugauuuua

SEQ ID NO: 435839 - RNA, 22 nt, Human
gcaucugcucaucugauauuca

SEQ ID NO: 435840 - RNA, 32 nt, Human
gcaucugcucccacucagccuagcccagggaa

SEQ ID NO: 435841 - RNA, 32 nt, Human
gcaucugcuccuaguagaggccagucugggcc

SEQ ID NO: 435842 - RNA, 32 nt, Human
gcaucugcuccuggcauggcgcugcggcaccu

SEQ ID NO: 435843 - RNA, 32 nt, Human
gcaucuggaaauuccccgcacuuucaggcuga

SEQ ID NO: 435844 - RNA, 32 nt, Human
gcaucuggaagaggaagaagagaggaaugaga

SEQ ID NO: 435845 - RNA, 32 nt, Human
gcaucuggagggcagagguccccuucucagug

SEQ ID NO: 435846 - RNA, 21 nt, Human
gcaucuggccccuuccuggca

SEQ ID NO: 435847 - RNA, 32 nt, Human
gcaucuggcggauccaggugucugagggcuuc

SEQ ID NO: 435848 - RNA, 32 nt, Human
gcaucuggcuaccugcccucccugccuucccc

SEQ ID NO: 435849 - RNA, 32 nt, Human
gcaucugggcauuguaggggugcagugguaug

SEQ ID NO: 435850 - RNA, 32 nt, Human
gcaucugggccauggugaccaguguggacggg

SEQ ID NO: 435851 - RNA, 32 nt, Human
gcaucuggggagccugcuggagcuggcagagc

SEQ ID NO: 435852 - RNA, 32 nt, Human
gcaucugguguuucagcauacauaacugaagc

SEQ ID NO: 435853 - RNA, 32 nt, Human
gcaucugguugaccccagccuggggaggaggg

SEQ ID NO: 435854 - RNA, 31 nt, Human
gcaucuguaguguccaucagcaggugaaugg

SEQ ID NO: 435855 - RNA, 32 nt, Human
gcaucuguauauuuuccugcucugccuucugg

SEQ ID NO: 435856 - RNA, 32 nt, Human
gcaucuguauccaccccucaucccacaccugg

SEQ ID NO: 435857 - RNA, 32 nt, Human
gcaucugucuucaagcuuagagucucccacgg

SEQ ID NO: 435858 - RNA, 32 nt, Human
gcaucuguggagauguguagagacagggagag

SEQ ID NO: 435859 - RNA, 32 nt, Human
gcaucuguggggccgggagaccccagcaaagg

SEQ ID NO: 435860 - RNA, 32 nt, Human
gcaucuguucauuuaccuuuguggacuguagc

SEQ ID NO: 435861 - RNA, 32 nt, Human
gcaucuguugcagcagaaggcgcuuguguggg

SEQ ID NO: 435862 - RNA, 32 nt, Human
gcaucuguugggccucacaaggaccagggccu

SEQ ID NO: 435863 - RNA, 20 nt, Human
gcaucuguuuaccugccacc

SEQ ID NO: 435864 - RNA, 32 nt, Human
gcaucuguuuuauuuuccauuuuccacucauu

SEQ ID NO: 435865 - RNA, 32 nt, Human
gcaucuuaauggaagaaaaaugaggggaacuu

SEQ ID NO: 435866 - RNA, 32 nt, Human
gcaucuuacccucccuuucucuuuccucauug

SEQ ID NO: 435867 - RNA, 32 nt, Human
gcaucuuacuggaugagguugcugugauugag

SEQ ID NO: 435868 - RNA, 32 nt, Human
gcaucuuagaacucuuucugaagagaccuuau

SEQ ID NO: 435869 - RNA, 32 nt, Human
gcaucuuauguggcgccacccuccccauccuc

SEQ ID NO: 435870 - RNA, 32 nt, Human
gcaucuucaccugaauucuucaaugccagggu

SEQ ID NO: 435871 - RNA, 31 nt, Human
gcaucuucagcaucucccauguucaagccca

SEQ ID NO: 435872 - RNA, 32 nt, Human
gcaucuucaguuaauacauguuuugagcacau

SEQ ID NO: 435873 - RNA, 32 nt, Human
gcaucuucauuuugacaggccgucccgguggc

SEQ ID NO: 435874 - RNA, 32 nt, Human
gcaucuucccuggauggcuggaggaacuccag

SEQ ID NO: 435875 - RNA, 32 nt, Human
gcaucuucucacuaguaaaacugccuucccuu

SEQ ID NO: 435876 - RNA, 19 nt, Human
gcaucuucucuaccuucaa

SEQ ID NO: 435877 - RNA, 32 nt, Human
gcaucuucucucccacugcaccccuucuccuc

SEQ ID NO: 435878 - RNA, 32 nt, Human
gcaucuucuggagaagcuugugguguuccuga

SEQ ID NO: 435879 - RNA, 32 nt, Human
gcaucuucuggcucacuuucuucuuguuggcu

SEQ ID NO: 435880 - RNA, 32 nt, Human
gcaucuucuguaaugaugccucuuucuuuucu

SEQ ID NO: 435881 - RNA, 31 nt, Human
gcaucuucuguuagucuacaugcagaaagaa

SEQ ID NO: 435882 - RNA, 21 nt, Human
gcaucuugacugaaaauucca

SEQ ID NO: 435883 - RNA, 32 nt, Human
gcaucuugcccagccauaaagcaauaaacuuc

SEQ ID NO: 435884 - RNA, 32 nt, Human
gcaucuugcucaccgcccugauucuguuccuc

SEQ ID NO: 435885 - RNA, 32 nt, Human
gcaucuuggaaaaggaacucuugguucgauac

SEQ ID NO: 435886 - RNA, 32 nt, Human
gcaucuuggcaagggcugggccuggagugaag

SEQ ID NO: 435887 - RNA, 32 nt, Human
gcaucuuggcccuguugccugggcugacagga

SEQ ID NO: 435888 - RNA, 20 nt, Human
gcaucuuggggcaccuggac

SEQ ID NO: 435889 - RNA, 32 nt, Human
gcaucuuucccuccuugggcaggaugaaacag

SEQ ID NO: 435890 - RNA, 32 nt, Human
gcaucuuucucuucccaugcaacacccucuuc

SEQ ID NO: 435891 - RNA, 32 nt, Human
gcaucuuugccugcccugccuugcuuggccca

SEQ ID NO: 435892 - RNA, 32 nt, Human
gcaucuuuuauuuuuguuuaugggcuuuugcc

SEQ ID NO: 435893 - RNA, 32 nt, Human
gcaugaaacccccacccccacucucugcgacg

SEQ ID NO: 435894 - RNA, 32 nt, Human
gcaugaaagguuaaaaaggagauacugcacaa

SEQ ID NO: 435895 - RNA, 32 nt, Human
gcaugaaauugucuagcagagcaggggcaggg

SEQ ID NO: 435896 - RNA, 32 nt, Human
gcaugaacagucuucagccacaguugugaugg

SEQ ID NO: 435897 - RNA, 32 nt, Human
gcaugaaccaaggaaagaguccauuaaaaaga

SEQ ID NO: 435898 - RNA, 32 nt, Human
gcaugaaccaugggaugaugauucuguggagg

SEQ ID NO: 435899 - RNA, 32 nt, Human
gcaugaacccaggaggcagagcuuguagugag

SEQ ID NO: 435900 - RNA, 32 nt, Human
gcaugaacccaggaguuggagcuugcagugag

SEQ ID NO: 435901 - RNA, 32 nt, Human
gcaugaaccccaggcuggagugcaguggcuca

SEQ ID NO: 435902 - RNA, 19 nt, Human
gcaugaacgccaaggaaug

SEQ ID NO: 435903 - RNA, 32 nt, Human
gcaugaacuaacccagcuuccaccuccauaaa

SEQ ID NO: 435904 - RNA, 32 nt, Human
gcaugaacucagcucacugcaaccucugccuc

SEQ ID NO: 435905 - RNA, 32 nt, Human
gcaugaacugaacaggcuuucauuuccacaga

SEQ ID NO: 435906 - RNA, 32 nt, Human
gcaugaagaauuugcuuucuucuuucuuccua

SEQ ID NO: 435907 - RNA, 32 nt, Human
gcaugaagagcuugcuucacacacaacaggau

SEQ ID NO: 435908 - RNA, 32 nt, Human
gcaugaagauaaugccugugguuaugcugaau

SEQ ID NO: 435909 - RNA, 32 nt, Human
gcaugaagcaaaggauuccaggcuccagaaaa

SEQ ID NO: 435910 - RNA, 32 nt, Human
gcaugaagcaccuugcccaaggucucaccagg

SEQ ID NO: 435911 - RNA, 32 nt, Human
gcaugaagccagcagcacccagagccacuccu

SEQ ID NO: 435912 - RNA, 32 nt, Human
gcaugaagccuccucagcucuuggaauugcug

SEQ ID NO: 435913 - RNA, 32 nt, Human
gcaugaaggauuccaggaagaucauggagacc

SEQ ID NO: 435914 - RNA, 32 nt, Human
gcaugaaguucagaauaauagaaaguagagag

SEQ ID NO: 435915 - RNA, 32 nt, Human
gcaugaauaagcauuuucccacacaaugaaca

SEQ ID NO: 435916 - RNA, 21 nt, Human
gcaugaaucaccaugccuagc

SEQ ID NO: 435917 - RNA, 22 nt, Human
gcaugaaucauucugaaugcuu

SEQ ID NO: 435918 - RNA, 32 nt, Human
gcaugaaugaaugagucaugggcaguggcuca

SEQ ID NO: 435919 - RNA, 19 nt, Human
gcaugaaugugacacagua

SEQ ID NO: 435920 - RNA, 20 nt, Human
gcaugaauugcauuauguuc

SEQ ID NO: 435921 - RNA, 32 nt, Human
gcaugacaaauagguugcccaagugggacgga

SEQ ID NO: 435922 - RNA, 17 nt, Human
gcaugacaccaaagcca

SEQ ID NO: 435923 - RNA, 32 nt, Human
gcaugacaggcagaaacgagggcugcuccagg

SEQ ID NO: 435924 - RNA, 32 nt, Human
gcaugacaguggguucaagguagucucugagg

SEQ ID NO: 435925 - RNA, 32 nt, Human
gcaugaccagcuguaucugaaagagaaaagac

SEQ ID NO: 435926 - RNA, 32 nt, Human
gcaugaccaggcugcccccugccccgcacacc

SEQ ID NO: 435927 - RNA, 32 nt, Human
gcaugaccucagcuccacuuuugaggcugcag

SEQ ID NO: 435928 - RNA, 32 nt, Human
gcaugaccugaccugcagcccaugaaucgggc

SEQ ID NO: 435929 - RNA, 32 nt, Human
gcaugaccuuuccuuguggauuuucuuauucu

SEQ ID NO: 435930 - RNA, 32 nt, Human
gcaugacgagggccuccuccuggccgagagcg

SEQ ID NO: 435931 - RNA, 32 nt, Human
gcaugacugcagccuugaacuccugggcuuaa

SEQ ID NO: 435932 - RNA, 32 nt, Human
gcaugacugguucugggagaaggugagagaca

SEQ ID NO: 435933 - RNA, 27 nt, Human
gcaugacuguaaucccagcuacucggg

SEQ ID NO: 435934 - RNA, 32 nt, Human
gcaugacuuugucacguacuugagugcuggcu

SEQ ID NO: 435935 - RNA, 19 nt, Human
gcaugagaaucgcuugaac

SEQ ID NO: 435936 - RNA, 32 nt, Human
gcaugagagaaaagccaccuccggguggggcu

SEQ ID NO: 435937 - RNA, 32 nt, Human
gcaugagagacacgugcaugcagaagacucca

SEQ ID NO: 435938 - RNA, 32 nt, Human
gcaugagagacagcaggguugucacaauauug

SEQ ID NO: 435939 - RNA, 32 nt, Human
gcaugagaggagagguagaaaaauacccuuuu

SEQ ID NO: 435940 - RNA, 32 nt, Human
gcaugagaggcagagugcacaguggucaaggg

SEQ ID NO: 435941 - RNA, 32 nt, Human
gcaugagaugcucagucggcuuggggaaggac

SEQ ID NO: 435942 - RNA, 32 nt, Human
gcaugagcagccguccagcaggcaggcuccgg

SEQ ID NO: 435943 - RNA, 32 nt, Human
gcaugagcaugcaggccuaguguccagggugg

SEQ ID NO: 435944 - RNA, 32 nt, Human
gcaugagcauuuugauuuuaccuguccucaaa

SEQ ID NO: 435945 - RNA, 23 nt, Human
gcaugagccaccacuccuggcca

SEQ ID NO: 435946 - RNA, 32 nt, Human
gcaugagccacugcacccaaccccuggaaaac

SEQ ID NO: 435947 - RNA, 32 nt, Human
gcaugagccacugcacccagcccuguauucuu

SEQ ID NO: 435948 - RNA, 32 nt, Human
gcaugagccacugcacccagccgauaggaagu

SEQ ID NO: 435949 - RNA, 32 nt, Human
gcaugagccacugcacccagccuuggcgggca

SEQ ID NO: 435950 - RNA, 32 nt, Human
gcaugagccacugcacccggccgguggaaagc

SEQ ID NO: 435951 - RNA, 32 nt, Human
gcaugagccacugcaccuggccuaggacuggu

SEQ ID NO: 435952 - RNA, 32 nt, Human
gcaugagccacugcauccggccuguuaaggau

SEQ ID NO: 435953 - RNA, 32 nt, Human
gcaugagccagccagcucagccaggcucccug

SEQ ID NO: 435954 - RNA, 23 nt, Human
gcaugagcugauucacauucuga

SEQ ID NO: 435955 - RNA, 32 nt, Human
gcaugagcugccgauguggugcuuagugauug

SEQ ID NO: 435956 - RNA, 32 nt, Human
gcaugagcuguugcccuccaggggccuggcac

SEQ ID NO: 435957 - RNA, 32 nt, Human
gcaugagcuuccucucgcacaagaccagcugg

SEQ ID NO: 435958 - RNA, 32 nt, Human
gcaugaggaagcuccagggcaggaugguuuac

SEQ ID NO: 435959 - RNA, 27 nt, Human
gcaugaggagaguguguaggggccggg

SEQ ID NO: 435960 - RNA, 32 nt, Human
gcaugaggaguucuagggguccuggcaccugu

SEQ ID NO: 435961 - RNA, 32 nt, Human
gcaugaggaucaguuugcagcagcaaguacaa

SEQ ID NO: 435962 - RNA, 32 nt, Human
gcaugaggccauguuuauaugugugacuaaua

SEQ ID NO: 435963 - RNA, 22 nt, Human
gcaugaggcccacgccacccaa

SEQ ID NO: 435964 - RNA, 32 nt, Human
gcaugaggccuuuccucaguccuguggccucu

SEQ ID NO: 435965 - RNA, 21 nt, Human
gcaugaggcuggaugcagugg

SEQ ID NO: 435966 - RNA, 27 nt, Human
gcaugaggcuggccuucuccagaagcu

SEQ ID NO: 435967 - RNA, 32 nt, Human
gcaugagggaacacuucuuaugagaaaacauu

SEQ ID NO: 435968 - RNA, 32 nt, Human
gcaugagggaggauauuuuaaagggaaguaua

SEQ ID NO: 435969 - RNA, 32 nt, Human
gcaugagggcucuugcgagacugaagugcuau

SEQ ID NO: 435970 - RNA, 24 nt, Human
gcaugagggggagcuggcauagga

SEQ ID NO: 435971 - RNA, 31 nt, Human
gcaugagguggaccuguuugcugggaacccc

SEQ ID NO: 435972 - RNA, 32 nt, Human
gcaugaguagcagguagagcacagcuuuacug

SEQ ID NO: 435973 - RNA, 32 nt, Human
gcaugaguauuugugcaacacaagcacaacua

SEQ ID NO: 435974 - RNA, 21 nt, Human
gcaugagucaccauauccagc

SEQ ID NO: 435975 - RNA, 32 nt, Human
gcaugaguugagugcugcugcagagggaagcu

SEQ ID NO: 435976 - RNA, 32 nt, Human
gcaugauaacaugcaguuucuucaagacaaaa

SEQ ID NO: 435977 - RNA, 32 nt, Human
gcaugauaagcaaagaaaaggcaaacacaagg

SEQ ID NO: 435978 - RNA, 32 nt, Human
gcaugauaggaaaauugagaaagaauacauau

SEQ ID NO: 435979 - RNA, 32 nt, Human
gcaugauaggaaaauugagaaagaauacguau

SEQ ID NO: 435980 - RNA, 32 nt, Human
gcaugaucucacugcaaccuccaucuccuguc

SEQ ID NO: 435981 - RNA, 32 nt, Human
gcaugaucucagcucacugcaaccuccgccuc

SEQ ID NO: 435982 - RNA, 32 nt, Human
gcaugaucucagcucacugcagccuccgucuc

SEQ ID NO: 435983 - RNA, 32 nt, Human
gcaugaucucagcuccgccuccuggguucacg

SEQ ID NO: 435984 - RNA, 27 nt, Human
gcaugaucuccuucuguccagacugug

SEQ ID NO: 435985 - RNA, 21 nt, Human
gcaugaucucggcucacugca

SEQ ID NO: 435986 - RNA, 32 nt, Human
gcaugaucugcaaucucugccucccagguuca

SEQ ID NO: 435987 - RNA, 32 nt, Human
gcaugaugacuucagcagaugccuaaguccug

SEQ ID NO: 435988 - RNA, 32 nt, Human
gcaugaugagcuaugaccacuggagcagccca

SEQ ID NO: 435989 - RNA, 24 nt, Human
gcaugauggcacacaccuguaauc

SEQ ID NO: 435990 - RNA, 24 nt, Human
gcaugauggcucacacguauaauc

SEQ ID NO: 435991 - RNA, 32 nt, Human
gcaugauguggacauccauggagcacaugccg

SEQ ID NO: 435992 - RNA, 32 nt, Human
gcaugauguucuugucuuuggagcuuagccuu

SEQ ID NO: 435993 - RNA, 21 nt, Human
gcaugauucgcaggucagcua

SEQ ID NO: 435994 - RNA, 32 nt, Human
gcaugauuuuggcucacugcagccucugccuc

SEQ ID NO: 435995 - RNA, 32 nt, Human
gcaugcacacacacauucaguauuuuaaaaga

SEQ ID NO: 435996 - RNA, 32 nt, Human
gcaugcacacacauacaccacagccacacacu

SEQ ID NO: 435997 - RNA, 32 nt, Human
gcaugcacacgugcccagcaggaaaagcuucg

SEQ ID NO: 435998 - RNA, 32 nt, Human
gcaugcacaguaaaguuugggaagcacugcuc

SEQ ID NO: 435999 - RNA, 16 nt, Human
gcaugcacccugcucc

SEQ ID NO: 436000 - RNA, 32 nt, Human
gcaugcaccguugucugugcugugacuuccgu

SEQ ID NO: 436001 - RNA, 32 nt, Human
gcaugcacugcacuucuucguuuucuucuugc

SEQ ID NO: 436002 - RNA, 32 nt, Human
gcaugcacuuguagucccagcuacucaagagg

SEQ ID NO: 436003 - RNA, 32 nt, Human
gcaugcacuuuguguugaccucaucccuggcu

SEQ ID NO: 436004 - RNA, 32 nt, Human
gcaugcagaauucuaugacacucuaauuauga

SEQ ID NO: 436005 - RNA, 32 nt, Human
gcaugcagccaucuuggugugugcaugaguau

SEQ ID NO: 436006 - RNA, 32 nt, Human
gcaugcagccuucagucacuuacucccugcuu

SEQ ID NO: 436007 - RNA, 32 nt, Human
gcaugcagcuaacuccucuuuaguuuugucuu

SEQ ID NO: 436008 - RNA, 32 nt, Human
gcaugcaggaagagaagaaggaagaggaggug

SEQ ID NO: 436009 - RNA, 32 nt, Human
gcaugcaggagagugaccucacccugccccuc

SEQ ID NO: 436010 - RNA, 32 nt, Human
gcaugcaggagguggaggaauuaagugaaaca

SEQ ID NO: 436011 - RNA, 32 nt, Human
gcaugcaggccuugggccuggccacucguguc

SEQ ID NO: 436012 - RNA, 27 nt, Human
gcaugcaggugagaggaugcaggaguc

SEQ ID NO: 436013 - RNA, 32 nt, Human
gcaugcagguggccucgcuuugccggguccga

SEQ ID NO: 436014 - RNA, 19 nt, Human
gcaugcaguccuggcccag

SEQ ID NO: 436015 - RNA, 32 nt, Human
gcaugcaucacuucugcauuuauuguaauuuu

SEQ ID NO: 436016 - RNA, 24 nt, Human
gcaugcauguacagaaagacugua

SEQ ID NO: 436017 - RNA, 21 nt, Human
gcaugcauguagaaaauugua

SEQ ID NO: 436018 - RNA, 20 nt, Human
gcaugcauguaguuccagcu

SEQ ID NO: 436019 - RNA, 32 nt, Human
gcaugcauguaguuccagcuacucaggaggcu

SEQ ID NO: 436020 - RNA, 32 nt, Human
gcaugcaugugugguuaaaaucuuucacuaca

SEQ ID NO: 436021 - RNA, 32 nt, Human
gcaugcauugagcugccuccagccugguggcc

SEQ ID NO: 436022 - RNA, 32 nt, Human
gcaugccaccacaguaacacacauuagagaaa

SEQ ID NO: 436023 - RNA, 32 nt, Human
gcaugccacuauacuccagccugggcaacaaa

SEQ ID NO: 436024 - RNA, 32 nt, Human
gcaugccacugcacuccagccugggcgacaga

SEQ ID NO: 436025 - RNA, 32 nt, Human
gcaugccacuguacuccagccugagcuacaga

SEQ ID NO: 436026 - RNA, 32 nt, Human
gcaugccagcuaccgaagucacccagccauuc

SEQ ID NO: 436027 - RNA, 21 nt, Human
gcaugccagggacccaaucaa

SEQ ID NO: 436028 - RNA, 32 nt, Human
gcaugccaguaaucccagcuacuugggaggcc

SEQ ID NO: 436029 - RNA, 32 nt, Human
gcaugccaguaauuccagcuacuugggagguu

SEQ ID NO: 436030 - RNA, 32 nt, Human
gcaugccagucaucccagcaauuugggaggcc

SEQ ID NO: 436031 - RNA, 32 nt, Human
gcaugccagucaucccagcaauuugggaggcu

SEQ ID NO: 436032 - RNA, 32 nt, Human
gcaugccaguguucaaaagauuguguaaaagu

SEQ ID NO: 436033 - RNA, 32 nt, Human
gcaugccaugccauagguacucuuuugugucu

SEQ ID NO: 436034 - RNA, 32 nt, Human
gcaugcccacugcaugugcugggaggcucucc

SEQ ID NO: 436035 - RNA, 32 nt, Human
gcaugcccaggcagaagguggggaggauucug

SEQ ID NO: 436036 - RNA, 32 nt, Human
gcaugcccauaaucccagcuacugaggagacu

SEQ ID NO: 436037 - RNA, 32 nt, Human
gcaugcccauagucccagcuacucaggaggcu

SEQ ID NO: 436038 - RNA, 19 nt, Human
gcaugccccacccaccccu

SEQ ID NO: 436039 - RNA, 20 nt, Human
gcaugccccacccaccccuc

SEQ ID NO: 436040 - RNA, 32 nt, Human
gcaugccccagccuccugggccugcccuuccc

SEQ ID NO: 436041 - RNA, 32 nt, Human
gcaugccccaggccauuucucccaccuuuacu

SEQ ID NO: 436042 - RNA, 32 nt, Human
gcaugccccauucacagcugaagugggugcug

SEQ ID NO: 436043 - RNA, 32 nt, Human
gcaugcccguaaucccagcuacucaggaggcu

SEQ ID NO: 436044 - RNA, 32 nt, Human
gcaugcccguaaucccagcuacucgggaggcu

SEQ ID NO: 436045 - RNA, 32 nt, Human
gcaugcccucaaucccagcuacucaagaggcu

SEQ ID NO: 436046 - RNA, 32 nt, Human
gcaugcccugcaaaccccgccugggccucccu

SEQ ID NO: 436047 - RNA, 32 nt, Human
gcaugcccugcucucugaccuggagacuacca

SEQ ID NO: 436048 - RNA, 32 nt, Human
gcaugccgcugcacuccagccugggagacugc

SEQ ID NO: 436049 - RNA, 32 nt, Human
gcaugccuauaaucccaauacuuuaggaggcc

SEQ ID NO: 436050 - RNA, 32 nt, Human
gcaugccuauaaucccagcuacucaggaggcu

SEQ ID NO: 436051 - RNA, 32 nt, Human
gcaugccuauaaucccagcuacucgagugccu

SEQ ID NO: 436052 - RNA, 32 nt, Human
gcaugccuauaaucccagcuacuugggaggcu

SEQ ID NO: 436053 - RNA, 32 nt, Human
gcaugccuauaaucccagguacucaggaggcu

SEQ ID NO: 436054 - RNA, 32 nt, Human
gcaugccuauaaucccagguacuugggaggcu

SEQ ID NO: 436055 - RNA, 32 nt, Human
gcaugccuauagucccagcuacucgggaggcu

SEQ ID NO: 436056 - RNA, 25 nt, Human
gcaugccuauagucccagcuacuug

SEQ ID NO: 436057 - RNA, 32 nt, Human
gcaugccuauagucccagcuacuugggagguu

SEQ ID NO: 436058 - RNA, 32 nt, Human
gcaugccuauagucccagcuacuugggggccu

SEQ ID NO: 436059 - RNA, 32 nt, Human
gcaugccucccaggccaccucagucucaccug

SEQ ID NO: 436060 - RNA, 32 nt, Human
gcaugccucuaaucccagcuacucaggaggcu

SEQ ID NO: 436061 - RNA, 32 nt, Human
gcaugccucuaguccuagcuacucgggaggcu

SEQ ID NO: 436062 - RNA, 32 nt, Human
gcaugccucuuccuccuucccgucuuccuguc

SEQ ID NO: 436063 - RNA, 32 nt, Human
gcaugccugaaaucccagcuacuugggaggcu

SEQ ID NO: 436064 - RNA, 32 nt, Human
gcaugccugaugcuuaauagaauacuuagugg

SEQ ID NO: 436065 - RNA, 32 nt, Human
gcaugccugcaaucccagcuacucagaggcua

SEQ ID NO: 436066 - RNA, 32 nt, Human
gcaugccugcaaucccagcuacuuggaaggcu

SEQ ID NO: 436067 - RNA, 32 nt, Human
gcaugccugcagucccagcuauucaggaggcu

SEQ ID NO: 436068 - RNA, 27 nt, Human
gcaugccugccccagcaccugcagccu

SEQ ID NO: 436069 - RNA, 32 nt, Human
gcaugccugccugacccaccucagagccugcu

SEQ ID NO: 436070 - RNA, 32 nt, Human
gcaugccugcugcaacggagacugggcccaac

SEQ ID NO: 436071 - RNA, 32 nt, Human
gcaugccuggaaucccagcuacuugagaggcu

SEQ ID NO: 436072 - RNA, 32 nt, Human
gcaugccuggccaauuguuggauuguaugaag

SEQ ID NO: 436073 - RNA, 32 nt, Human
gcaugccuggguauuacaguuguuuaugccau

SEQ ID NO: 436074 - RNA, 32 nt, Human
gcaugccugggugugguuaaggcguggcccag

SEQ ID NO: 436075 - RNA, 32 nt, Human
gcaugccuguaaccccagcuacucgggaagcu

SEQ ID NO: 436076 - RNA, 32 nt, Human
gcaugccuguaagcccagcuauucgggaggcu

SEQ ID NO: 436077 - RNA, 32 nt, Human
gcaugccuguaauccaagauacucaggaggcu

SEQ ID NO: 436078 - RNA, 32 nt, Human
gcaugccuguaauccagcuacuugggaggcug

SEQ ID NO: 436079 - RNA, 32 nt, Human
gcaugccuguaaucccaacuacucaggaggcu

SEQ ID NO: 436080 - RNA, 32 nt, Human
gcaugccuguaaucccacuacuggggugggug

SEQ ID NO: 436081 - RNA, 32 nt, Human
gcaugccuguaaucccagaacuuugggaggcc

SEQ ID NO: 436082 - RNA, 32 nt, Human
gcaugccuguaaucccagaauuuugggaggcc

SEQ ID NO: 436083 - RNA, 32 nt, Human
gcaugccuguaaucccagcacuuugggaggcc

SEQ ID NO: 436084 - RNA, 32 nt, Human
gcaugccuguaaucccagcauuuugggaggcc

SEQ ID NO: 436085 - RNA, 32 nt, Human
gcaugccuguaaucccagccacucaggaggcu

SEQ ID NO: 436086 - RNA, 32 nt, Human
  misc_feature (20)..(20): n is a, c, g, or u
  misc_feature (28)..(28): n is a, c, g, or u
gcaugccuguaaucccagcnacucgccnggcu

SEQ ID NO: 436087 - RNA, 32 nt, Human
gcaugccuguaaucccagcuacuagagaggcu

SEQ ID NO: 436088 - RNA, 32 nt, Human
gcaugccuguaaucccagcuacuagggaggcu

SEQ ID NO: 436089 - RNA, 32 nt, Human
gcaugccuguaaucccagcuacucaggaaggc

SEQ ID NO: 436090 - RNA, 32 nt, Human
gcaugccuguaaucccagcuacucaggaggcu

SEQ ID NO: 436091 - RNA, 32 nt, Human
gcaugccuguaaucccagcuacucggaaguuu

SEQ ID NO: 436092 - RNA, 32 nt, Human
gcaugccuguaaucccagcuacucgggagacc

SEQ ID NO: 436093 - RNA, 32 nt, Human
gcaugccuguaaucccagcuacucgggaggcu

SEQ ID NO: 436094 - RNA, 32 nt, Human
gcaugccuguaaucccagcuacucgggagguu

SEQ ID NO: 436095 - RNA, 32 nt, Human
gcaugccuguaaucccagcuacucuggaggcu

SEQ ID NO: 436096 - RNA, 32 nt, Human
gcaugccuguaaucccagcuacugggaaggcu

SEQ ID NO: 436097 - RNA, 32 nt, Human
gcaugccuguaaucccagcuacuuaggaggcu

SEQ ID NO: 436098 - RNA, 32 nt, Human
gcaugccuguaaucccagcuacuuggaaggcu

SEQ ID NO: 436099 - RNA, 32 nt, Human
gcaugccuguaaucccagcuacuugggagacu

SEQ ID NO: 436100 - RNA, 32 nt, Human
gcaugccuguaaucccagcuacuugggagccu

SEQ ID NO: 436101 - RNA, 32 nt, Human
gcaugccuguaaucccagcuacuugggaggcc

SEQ ID NO: 436102 - RNA, 32 nt, Human
gcaugccuguaaucccagcuacuugggaggcu

SEQ ID NO: 436103 - RNA, 32 nt, Human
gcaugccuguaaucccagcuacuuggguggcu

SEQ ID NO: 436104 - RNA, 32 nt, Human
gcaugccuguaaucccagcuauuagggaggcu

SEQ ID NO: 436105 - RNA, 32 nt, Human
gcaugccuguaaucccagcuauucggaaggcu

SEQ ID NO: 436106 - RNA, 32 nt, Human
gcaugccuguaaucccagcuauucgggaggcu

SEQ ID NO: 436107 - RNA, 32 nt, Human
gcaugccuguaaucccagcugcucaggagccu

SEQ ID NO: 436108 - RNA, 32 nt, Human
gcaugccuguaaucccagcugcuggggaggcu

SEQ ID NO: 436109 - RNA, 32 nt, Human
gcaugccuguaaucccagcugcuugggaggcu

SEQ ID NO: 436110 - RNA, 32 nt, Human
gcaugccuguaaucccagcuucuugggaggcc

SEQ ID NO: 436111 - RNA, 32 nt, Human
gcaugccuguaaucccaguuacucaggaggcu

SEQ ID NO: 436112 - RNA, 32 nt, Human
gcaugccuguaaucccaguuacuccagaggcu

SEQ ID NO: 436113 - RNA, 32 nt, Human
gcaugccuguaaucccaguuacucgagaggcu

SEQ ID NO: 436114 - RNA, 32 nt, Human
gcaugccuguaaucccaucaucuacucaggag

SEQ ID NO: 436115 - RNA, 32 nt, Human
gcaugccuguaaucccugcuacuugggagacu

SEQ ID NO: 436116 - RNA, 32 nt, Human
gcaugccuguaauccuagcuacucaggagccu

SEQ ID NO: 436117 - RNA, 32 nt, Human
gcaugccuguaauccuagcuacucaggaggcu

SEQ ID NO: 436118 - RNA, 32 nt, Human
gcaugccuguaauccuagcuacucgggaggcu

SEQ ID NO: 436119 - RNA, 32 nt, Human
gcaugccuguaauccuagcuauucgggaggcu

SEQ ID NO: 436120 - RNA, 32 nt, Human
gcaugccuguaauccuagcugcuugggugcug

SEQ ID NO: 436121 - RNA, 32 nt, Human
gcaugccuguaaucucagcuacucaggaggcu

SEQ ID NO: 436122 - RNA, 32 nt, Human
gcaugccuguaaucucagcuacucgggaggcu

SEQ ID NO: 436123 - RNA, 32 nt, Human
gcaugccuguaaucucagcuacuugggaggcu

SEQ ID NO: 436124 - RNA, 32 nt, Human
gcaugccuguaaucucagcugcuccggaggcu

SEQ ID NO: 436125 - RNA, 32 nt, Human
gcaugccuguaaucucggaaggcugaggcagg

SEQ ID NO: 436126 - RNA, 32 nt, Human
gcaugccuguaauuccagcggcuuggaaggcu

SEQ ID NO: 436127 - RNA, 32 nt, Human
gcaugccuguagucacagcuacuugggagacu

SEQ ID NO: 436128 - RNA, 20 nt, Human
gcaugccuguagucccagcu

SEQ ID NO: 436129 - RNA, 32 nt, Human
gcaugccuguagucccagcuaacugggaggcu

SEQ ID NO: 436130 - RNA, 32 nt, Human
gcaugccuguagucccagcuaccugggaggcu

SEQ ID NO: 436131 - RNA, 32 nt, Human
gcaugccuguagucccagcuacucagaagggu

SEQ ID NO: 436132 - RNA, 32 nt, Human
gcaugccuguagucccagcuacucaggaggcu

SEQ ID NO: 436133 - RNA, 32 nt, Human
gcaugccuguagucccagcuacucgggaggcc

SEQ ID NO: 436134 - RNA, 32 nt, Human
gcaugccuguagucccagcuacucgggaggcu

SEQ ID NO: 436135 - RNA, 32 nt, Human
gcaugccuguagucccagcuacucuggaggcu

SEQ ID NO: 436136 - RNA, 32 nt, Human
gcaugccuguagucccagcuacuugaguggcc

SEQ ID NO: 436137 - RNA, 32 nt, Human
gcaugccuguagucccagcuacuugggaggaa

SEQ ID NO: 436138 - RNA, 32 nt, Human
gcaugccuguagucccagcuacuugggaggcu

SEQ ID NO: 436139 - RNA, 32 nt, Human
gcaugccuguagucccagcuacuugggaugcc

SEQ ID NO: 436140 - RNA, 32 nt, Human
gcaugccuguagucccagcuauucgggaggcu

SEQ ID NO: 436141 - RNA, 32 nt, Human
gcaugccuguagucccagcuauucuggaggcu

SEQ ID NO: 436142 - RNA, 32 nt, Human
gcaugccuguagucccagcugaggcacgauaa

SEQ ID NO: 436143 - RNA, 32 nt, Human
gcaugccuguagucccagcugcucaggaggcu

SEQ ID NO: 436144 - RNA, 32 nt, Human
gcaugccuguaguccuagcuacucaggaggcu

SEQ ID NO: 436145 - RNA, 32 nt, Human
gcaugccuguagucgcagcuacucgcgagguu

SEQ ID NO: 436146 - RNA, 32 nt, Human
gcaugccuguagucucagcuacucaggaggcu

SEQ ID NO: 436147 - RNA, 20 nt, Human
gcaugccuguaguuccagcu

SEQ ID NO: 436148 - RNA, 32 nt, Human
gcaugccuguaguuccagcuacucaggacacu

SEQ ID NO: 436149 - RNA, 32 nt, Human
gcaugccuguaguuccagcuacucaggaggca

SEQ ID NO: 436150 - RNA, 32 nt, Human
gcaugccuguaguuccagcuacucaggaggcu

SEQ ID NO: 436151 - RNA, 32 nt, Human
gcaugccuguaguuccagcuacuugggaggcu

SEQ ID NO: 436152 - RNA, 32 nt, Human
gcaugccuguaguuccagcuacuugugaggcu

SEQ ID NO: 436153 - RNA, 32 nt, Human
gcaugccuguaguugcagcuacucauggggcu

SEQ ID NO: 436154 - RNA, 32 nt, Human
gcaugccuguaucccagcuacuugggaggcug

SEQ ID NO: 436155 - RNA, 32 nt, Human
gcaugccuguauucccagcuacucaggagguu

SEQ ID NO: 436156 - RNA, 32 nt, Human
gcaugccuguauucucagcuacucgggaggcu

SEQ ID NO: 436157 - RNA, 32 nt, Human
gcaugccugucauccaagcuacucaagagacu

SEQ ID NO: 436158 - RNA, 32 nt, Human
gcaugccugucaucccagcuacuccagaggcu

SEQ ID NO: 436159 - RNA, 32 nt, Human
gcaugccugucaucccagcuacuugggaggcu

SEQ ID NO: 436160 - RNA, 32 nt, Human
gcaugccugugaucccagcuacucaggaggcu

SEQ ID NO: 436161 - RNA, 32 nt, Human
gcaugccugugaucccagcuacuugagaggcu

SEQ ID NO: 436162 - RNA, 32 nt, Human
gcaugccugugauuccagcuacuugggagguu

SEQ ID NO: 436163 - RNA, 32 nt, Human
gcaugccuguggucccagcuacucaggaggcu

SEQ ID NO: 436164 - RNA, 32 nt, Human
gcaugccuguggucccagcuacuugggaggcu

SEQ ID NO: 436165 - RNA, 32 nt, Human
gcaugccuguggucucagcuacuugggaggcu

SEQ ID NO: 436166 - RNA, 32 nt, Human
gcaugccuguguucccagcuacucaggaggcu

SEQ ID NO: 436167 - RNA, 32 nt, Human
gcaugccuguguucccagcuacuugggaggcu

SEQ ID NO: 436168 - RNA, 32 nt, Human
gcaugccuguucugucugggccacauucacag

SEQ ID NO: 436169 - RNA, 32 nt, Human
gcaugccuguugucccagcuacucaggaggcu

SEQ ID NO: 436170 - RNA, 32 nt, Human
gcaugcgcauguuuaaccacaggccagagaac

SEQ ID NO: 436171 - RNA, 32 nt, Human
gcaugcgccuauaaucucagcuacuugggagg

SEQ ID NO: 436172 - RNA, 32 nt, Human
gcaugcgccuguaaucccagcuacucgggagg

SEQ ID NO: 436173 - RNA, 32 nt, Human
gcaugcgccuguaaucccagcuacucgggagu

SEQ ID NO: 436174 - RNA, 32 nt, Human
gcaugcgccuguaaucccagcuacuucggagg

SEQ ID NO: 436175 - RNA, 32 nt, Human
gcaugcgccuguaaucccggcuacucgggagg

SEQ ID NO: 436176 - RNA, 32 nt, Human
gcaugcgccuguaauccuagcuauucuggagg

SEQ ID NO: 436177 - RNA, 19 nt, Human
gcaugcgccuguaguccca

SEQ ID NO: 436178 - RNA, 32 nt, Human
gcaugcggccccuggcauuucgccaaggguuu

SEQ ID NO: 436179 - RNA, 32 nt, Human
gcaugcgggaggcggaggggugggaccgggug

SEQ ID NO: 436180 - RNA, 27 nt, Human
gcaugcgucuuucugcccugcuggccu

SEQ ID NO: 436181 - RNA, 32 nt, Human
gcaugcguguauaguccaagcuacucaggagg

SEQ ID NO: 436182 - RNA, 32 nt, Human
gcaugcgugugcgugguggccccacccaggca

SEQ ID NO: 436183 - RNA, 32 nt, Human
gcaugcguguucccugggcauggccggcuccg

SEQ ID NO: 436184 - RNA, 32 nt, Human
gcaugcuaagauuuaaaggagccccagauaaa

SEQ ID NO: 436185 - RNA, 32 nt, Human
gcaugcuacagccuuggacuccugggcucaag

SEQ ID NO: 436186 - RNA, 32 nt, Human
gcaugcuacugcacuccagccugggagacaga

SEQ ID NO: 436187 - RNA, 28 nt, Human
gcaugcuaguguugauguuuuuugguca

SEQ ID NO: 436188 - RNA, 32 nt, Human
gcaugcuaugaggaaaguuguauagggaaggc

SEQ ID NO: 436189 - RNA, 27 nt, Human
gcaugcucaaaaggaagcagaguucca

SEQ ID NO: 436190 - RNA, 32 nt, Human
gcaugcucagugccaggcugguagcugggccu

SEQ ID NO: 436191 - RNA, 32 nt, Human
gcaugcucaguuggugcugcuuucuuguugcu

SEQ ID NO: 436192 - RNA, 32 nt, Human
gcaugcucaucucuauuugcagccaggaaugg

SEQ ID NO: 436193 - RNA, 32 nt, Human
gcaugcucuccaggagcaccaacugggaaauc

SEQ ID NO: 436194 - RNA, 32 nt, Human
gcaugcugagauuaaggugguugccaagggaa

SEQ ID NO: 436195 - RNA, 32 nt, Human
gcaugcugcagcccucugccggcugugguguc

SEQ ID NO: 436196 - RNA, 32 nt, Human
gcaugcuggagaaugagagaccacaugaagca

SEQ ID NO: 436197 - RNA, 29 nt, Human
gcaugcuggcugcuaccucgcucacucuu

SEQ ID NO: 436198 - RNA, 32 nt, Human
gcaugcugguuucugccaccuccuuggacucc

SEQ ID NO: 436199 - RNA, 32 nt, Human
gcaugcugugaugcccagcuucccuuuccaca

SEQ ID NO: 436200 - RNA, 32 nt, Human
gcaugcuguggauaucuuugcaagugagugca

SEQ ID NO: 436201 - RNA, 32 nt, Human
gccagcuuccaagaacuggaaugcguacgucu

SEQ ID NO: 436202 - RNA, 32 nt, Human
gccagcuuccacuccuaccugaauagagaacu

SEQ ID NO: 436203 - RNA, 32 nt, Human
gccagcuuccagggcucuuuguguucugugac

SEQ ID NO: 436204 - RNA, 32 nt, Human
gccagcuucccacugcagcagcaccagucugg

SEQ ID NO: 436205 - RNA, 17 nt, Human
gccagcuucccagcaag

SEQ ID NO: 436206 - RNA, 19 nt, Human
gccagcuuccccccugagg

SEQ ID NO: 436207 - RNA, 32 nt, Human
gccagcuuccugcuguguucccugcacccacc

SEQ ID NO: 436208 - RNA, 32 nt, Human
gccagcuugcccacccuccaccuuugcccaau

SEQ ID NO: 436209 - RNA, 22 nt, Human
gccagcuugccccaccccgccc

SEQ ID NO: 436210 - RNA, 32 nt, Human
gccagcuuggcgcgcaccgccgccuccgccac

SEQ ID NO: 436211 - RNA, 32 nt, Human
gccagcuuugugcaaccagggcccacggcgcc

SEQ ID NO: 436212 - RNA, 21 nt, Human
gccaggaaaaagcaaauucug

SEQ ID NO: 436213 - RNA, 32 nt, Human
gccaggaaaggagccagucaugccggaaacac

SEQ ID NO: 436214 - RNA, 32 nt, Human
gccaggaaaggucaguggaggaaagugcucca

SEQ ID NO: 436215 - RNA, 32 nt, Human
gccaggaacagcuugagguaccugagcccugc

SEQ ID NO: 436216 - RNA, 32 nt, Human
gccaggaacuaccccaugaucuucuauucuca

SEQ ID NO: 436217 - RNA, 32 nt, Human
gccaggaagagaagaaagggggugcagucuga

SEQ ID NO: 436218 - RNA, 32 nt, Human
gccaggaagaggaggggaggaggaggaggagg

SEQ ID NO: 436219 - RNA, 32 nt, Human
gccaggaagcagcacagacacagcauagcagg

SEQ ID NO: 436220 - RNA, 32 nt, Human
gccaggaagcaugccaacaaagccacacgggu

SEQ ID NO: 436221 - RNA, 32 nt, Human
gccaggaagccagcaggcucucaggccagcug

SEQ ID NO: 436222 - RNA, 25 nt, Human
gccaggaagcggagguuguggugag

SEQ ID NO: 436223 - RNA, 32 nt, Human
gccaggaaggcccaggguccucagggaccaag

SEQ ID NO: 436224 - RNA, 32 nt, Human
gccaggaagguugagguugcagugagcuauga

SEQ ID NO: 436225 - RNA, 32 nt, Human
gccaggaauucaagaccagccugggcaacaca

SEQ ID NO: 436226 - RNA, 32 nt, Human
gccaggaauucaaggccagccugggcaacaua

SEQ ID NO: 436227 - RNA, 32 nt, Human
gccaggacaaggcagcuccuggaagcuccacc

SEQ ID NO: 436228 - RNA, 32 nt, Human
gccaggacacagauuuugagagcuguguguau

SEQ ID NO: 436229 - RNA, 32 nt, Human
gccaggacacauauaagaaaguugcacuagau

SEQ ID NO: 436230 - RNA, 16 nt, Human
gccaggacacccggga

SEQ ID NO: 436231 - RNA, 18 nt, Human
gccaggacacucccagca

SEQ ID NO: 436232 - RNA, 20 nt, Human
gccaggacagcuggcugcug

SEQ ID NO: 436233 - RNA, 20 nt, Human
gccaggacauucuuccagca

SEQ ID NO: 436234 - RNA, 32 nt, Human
gccaggaccacauucggauucauagugugggc

SEQ ID NO: 436235 - RNA, 32 nt, Human
gccaggaccagcccggcccauggucccccagc

SEQ ID NO: 436236 - RNA, 17 nt, Human
gccaggaccaggccccg

SEQ ID NO: 436237 - RNA, 32 nt, Human
gccaggaccaugaggaagggguaggggucuau

SEQ ID NO: 436238 - RNA, 20 nt, Human
gccaggacccacagcccucc

SEQ ID NO: 436239 - RNA, 32 nt, Human
gccaggacccaccacauugcuuccuaauaccc

SEQ ID NO: 436240 - RNA, 32 nt, Human
gccaggacccaggagcugcauggcuguaagag

SEQ ID NO: 436241 - RNA, 32 nt, Human
gccaggaccccuccucugagacaggguugccu

SEQ ID NO: 436242 - RNA, 32 nt, Human
gccaggacccuaggcuuggagcuggagcuggg

SEQ ID NO: 436243 - RNA, 32 nt, Human
gccaggacccuggaaggaagcaggauggcagc

SEQ ID NO: 436244 - RNA, 32 nt, Human
gccaggaccugcuugaacuaccagggccacag

SEQ ID NO: 436245 - RNA, 32 nt, Human
gccaggaccuggcaaggcuuguuuacuauggc

SEQ ID NO: 436246 - RNA, 20 nt, Human
gccaggacggucuccaucuc

SEQ ID NO: 436247 - RNA, 32 nt, Human
gccaggacuagcucuccuuucucaucuccugu

SEQ ID NO: 436248 - RNA, 32 nt, Human
gccaggacucagaccaccagcacgcagcaccc

SEQ ID NO: 436249 - RNA, 24 nt, Human
gccaggacuccccaggccaggcca

SEQ ID NO: 436250 - RNA, 19 nt, Human
gccaggacucuggcuacug

SEQ ID NO: 436251 - RNA, 32 nt, Human
gccaggacugccggcccugcagcugccuucug

SEQ ID NO: 436252 - RNA, 32 nt, Human
gccaggacuguuuucaugcugccugugccucg

SEQ ID NO: 436253 - RNA, 32 nt, Human
gccaggacuuccuucacuucagcugcggaccc

SEQ ID NO: 436254 - RNA, 32 nt, Human
gccaggacuugugggguggccccaggagcauu

SEQ ID NO: 436255 - RNA, 32 nt, Human
gccaggagaacaggaacagaacugagcagggg

SEQ ID NO: 436256 - RNA, 32 nt, Human
gccaggagagaagaauccaaaaagcaauauuu

SEQ ID NO: 436257 - RNA, 18 nt, Human
gccaggagagcccugagg

SEQ ID NO: 436258 - RNA, 32 nt, Human
gccaggagaggaaggagcggcgggcagguggc

SEQ ID NO: 436259 - RNA, 32 nt, Human
gccaggagaggaaggaggaacuguggcgccca

SEQ ID NO: 436260 - RNA, 32 nt, Human
gccaggagagucaggccaccagggggcgccag

SEQ ID NO: 436261 - RNA, 19 nt, Human
gccaggagcaccgccgcgg

SEQ ID NO: 436262 - RNA, 22 nt, Human
gccaggagcagcagccgcgccu

SEQ ID NO: 436263 - RNA, 32 nt, Human
gccaggagcccgcagcccuggcgcccgccgcc

SEQ ID NO: 436264 - RNA, 18 nt, Human
gccaggagcccucaggug

SEQ ID NO: 436265 - RNA, 32 nt, Human
gccaggagcccugacuucacuuccuuuggucc

SEQ ID NO: 436266 - RNA, 32 nt, Human
gccaggagccgggagagccgagugggaggggc

SEQ ID NO: 436267 - RNA, 32 nt, Human
gccaggagccucuccccuccagaagacuugcc

SEQ ID NO: 436268 - RNA, 32 nt, Human
gccaggagcuaagugccuuuuugugugcaacc

SEQ ID NO: 436269 - RNA, 21 nt, Human
gccaggagcugagacuagcca

SEQ ID NO: 436270 - RNA, 32 nt, Human
gccaggagcugccucccccagcccccgucccg

SEQ ID NO: 436271 - RNA, 32 nt, Human
gccaggaggaaaggaagugacaaguacagaag

SEQ ID NO: 436272 - RNA, 32 nt, Human
gccaggaggaggagguugcagugagccgagau

SEQ ID NO: 436273 - RNA, 25 nt, Human
gccaggaggcagagguugcagugag

SEQ ID NO: 436274 - RNA, 32 nt, Human
gccaggaggcagagguugcagugagccaagcg

SEQ ID NO: 436275 - RNA, 32 nt, Human
gccaggaggcccaggcugggagagggagcagg

SEQ ID NO: 436276 - RNA, 32 nt, Human
gccaggaggccgaagugcauccugaguguccg

SEQ ID NO: 436277 - RNA, 32 nt, Human
gccaggaggccuucccaggucuucccaguuac

SEQ ID NO: 436278 - RNA, 32 nt, Human
gccaggaggcggagcuugcagugagccgagau

SEQ ID NO: 436279 - RNA, 25 nt, Human
gccaggaggcggagguugcagugag

SEQ ID NO: 436280 - RNA, 32 nt, Human
gccaggaggcggagguugcagugagccgagau

SEQ ID NO: 436281 - RNA, 23 nt, Human
gccaggaggcuagucccaccucu

SEQ ID NO: 436282 - RNA, 18 nt, Human
gccaggagggaggccccg

SEQ ID NO: 436283 - RNA, 32 nt, Human
gccaggagggauucuaagugccaaggcucuga

SEQ ID NO: 436284 - RNA, 32 nt, Human
gccaggagggauugaaaggcaucccaguucua

SEQ ID NO: 436285 - RNA, 32 nt, Human
gccaggagggccugggauuguuugugugcugu

SEQ ID NO: 436286 - RNA, 32 nt, Human
gccaggaggggcccugcccaugcccacacuac

SEQ ID NO: 436287 - RNA, 30 nt, Human
gccaggaggucaggucaaggcugcagugag

SEQ ID NO: 436288 - RNA, 21 nt, Human
gccaggaggugaagggccccg

SEQ ID NO: 436289 - RNA, 32 nt, Human
gccaggagguugaggcugcagugagcugugau

SEQ ID NO: 436290 - RNA, 32 nt, Human
gccaggagguugagguugcagugagcugagau

SEQ ID NO: 436291 - RNA, 32 nt, Human
gccaggaguacugcauucaguugacuuucagg

SEQ ID NO: 436292 - RNA, 32 nt, Human
gccaggaguccacccaccuccgcauccacccc

SEQ ID NO: 436293 - RNA, 32 nt, Human
gccaggagucugggaggcagguuuccaagagc

SEQ ID NO: 436294 - RNA, 32 nt, Human
gccaggagugcaagucugaagaaugcugugcc

SEQ ID NO: 436295 - RNA, 21 nt, Human
gccaggagugugggaaggccc

SEQ ID NO: 436296 - RNA, 32 nt, Human
gccaggaguugcagaccagccuggguaacaua

SEQ ID NO: 436297 - RNA, 32 nt, Human
gccaggaguuggagaccagccuaggcaacaca

SEQ ID NO: 436298 - RNA, 32 nt, Human
gccaggaguuugacaccagccugggcaacaua

SEQ ID NO: 436299 - RNA, 32 nt, Human
gccaggaguuugauugcuuacaacagcucuuu

SEQ ID NO: 436300 - RNA, 32 nt, Human
gccaggaguuuggggaaggaaggggugggaag

SEQ ID NO: 436301 - RNA, 32 nt, Human
gccaggaguuugggggcccaccuuccugggcu

SEQ ID NO: 436302 - RNA, 21 nt, Human
gccaggauagucuccaucucu

SEQ ID NO: 436303 - RNA, 32 nt, Human
gccaggauauuaaacagaaacucucaguugua

SEQ ID NO: 436304 - RNA, 18 nt, Human
gccaggaucaacugccca

SEQ ID NO: 436305 - RNA, 19 nt, Human
gccaggauccuucugcucc

SEQ ID NO: 436306 - RNA, 32 nt, Human
gccaggaucuaagcccaugagcacagggacug

SEQ ID NO: 436307 - RNA, 32 nt, Human
gccaggaucugcaguagggagggaaggccccc

SEQ ID NO: 436308 - RNA, 32 nt, Human
gccaggaugcaaccugcuuucaccagacugca

SEQ ID NO: 436309 - RNA, 32 nt, Human
gccaggaugcccaccccgcccucuacacggcc

SEQ ID NO: 436310 - RNA, 22 nt, Human
gccaggauggaacacggccaca

SEQ ID NO: 436311 - RNA, 32 nt, Human
gccaggauggccagggcuguuuuugcuacuga

SEQ ID NO: 436312 - RNA, 23 nt, Human
gccaggauggcuggcugggcccc

SEQ ID NO: 436313 - RNA, 23 nt, Human
gccaggaugggaccaaagucaag

SEQ ID NO: 436314 - RNA, 31 nt, Human
gccaggaugggggacuccagggaccuuugcc

SEQ ID NO: 436315 - RNA, 21 nt, Human
gccaggauggucuccaucucu

SEQ ID NO: 436316 - RNA, 32 nt, Human
gccaggauggucucgauaucugaucucgugau

SEQ ID NO: 436317 - RNA, 32 nt, Human
gccaggauggucucgcccuccugaccuuguga

SEQ ID NO: 436318 - RNA, 32 nt, Human
gccaggauuacagccuaggcugcuccaacuau

SEQ ID NO: 436319 - RNA, 32 nt, Human
gccaggauucaggccucugaggagcccacggg

SEQ ID NO: 436320 - RNA, 19 nt, Human
gccaggauuccacagccca

SEQ ID NO: 436321 - RNA, 32 nt, Human
gccaggauuccuuuuccaucuccucucuuucu

SEQ ID NO: 436322 - RNA, 32 nt, Human
gccaggauugagcugcagaagugggagcuugu

SEQ ID NO: 436323 - RNA, 21 nt, Human
gccaggauugucuccaucucu

SEQ ID NO: 436324 - RNA, 32 nt, Human
gccaggauugugccacuacacuccagccuggc

SEQ ID NO: 436325 - RNA, 32 nt, Human
gccaggauugugccacugcacucaagccuggg

SEQ ID NO: 436326 - RNA, 32 nt, Human
gccaggauugugccacuguacuccagccuggg

SEQ ID NO: 436327 - RNA, 32 nt, Human
gccaggauuugaaagcaggcagccuggcucca

SEQ ID NO: 436328 - RNA, 32 nt, Human
gccaggauuugaggaggagaagggaggaggug

SEQ ID NO: 436329 - RNA, 22 nt, Human
gccaggcaaccagcugcugccu

SEQ ID NO: 436330 - RNA, 17 nt, Human
gccaggcaaccuggcca

SEQ ID NO: 436331 - RNA, 22 nt, Human
gccaggcaagcccagggcacag

SEQ ID NO: 436332 - RNA, 19 nt, Human
gccaggcaagugggaccag

SEQ ID NO: 436333 - RNA, 19 nt, Human
gccaggcacacugagccag

SEQ ID NO: 436334 - RNA, 32 nt, Human
gccaggcacaucuggccuugggaaacucaucc

SEQ ID NO: 436335 - RNA, 19 nt, Human
gccaggcaccaaggcacag

SEQ ID NO: 436336 - RNA, 32 nt, Human
gccaggcaccaccacaccuggcuuuagaguuc

SEQ ID NO: 436337 - RNA, 17 nt, Human
gccaggcacccuccucu

SEQ ID NO: 436338 - RNA, 32 nt, Human
gccaggcaccucagugcugggcaggggcauca

SEQ ID NO: 436339 - RNA, 32 nt, Human
gccaggcaccucucuccccaugguguuuucca

SEQ ID NO: 436340 - RNA, 18 nt, Human
gccaggcacgauggcuca

SEQ ID NO: 436341 - RNA, 19 nt, Human
gccaggcacgcuggaucag

SEQ ID NO: 436342 - RNA, 32 nt, Human
gccaggcacugaggcccuggagacagcuguuc

SEQ ID NO: 436343 - RNA, 20 nt, Human
gccaggcacugauaagccag

SEQ ID NO: 436344 - RNA, 32 nt, Human
gccaggcacuggagggcgcaucaaagaagagu

SEQ ID NO: 436345 - RNA, 22 nt, Human
gccaggcagaaagagugcucag

SEQ ID NO: 436346 - RNA, 32 nt, Human
gccaggcagacacuguuugggaaaguguucca

SEQ ID NO: 436347 - RNA, 32 nt, Human
gccaggcagagcugggauugaaggaccccuau

SEQ ID NO: 436348 - RNA, 19 nt, Human
gccaggcagcaaggaccag

SEQ ID NO: 436349 - RNA, 32 nt, Human
gccaggcagcagcgaggauggugaccgagaag

SEQ ID NO: 436350 - RNA, 19 nt, Human
gccaggcagcagcucucag

SEQ ID NO: 436351 - RNA, 18 nt, Human
gccaggcagcagucucag

SEQ ID NO: 436352 - RNA, 19 nt, Human
gccaggcagccccuggcuc

SEQ ID NO: 436353 - RNA, 21 nt, Human
gccaggcagccgugaccccag

SEQ ID NO: 436354 - RNA, 18 nt, Human
gccaggcagccuccaccu

SEQ ID NO: 436355 - RNA, 22 nt, Human
gccaggcagcgggcaccacuca

SEQ ID NO: 436356 - RNA, 19 nt, Human
gccaggcagcuccacucuc

SEQ ID NO: 436357 - RNA, 23 nt, Human
gccaggcagcugccacaggccua

SEQ ID NO: 436358 - RNA, 19 nt, Human
gccaggcagcuggaaucag

SEQ ID NO: 436359 - RNA, 19 nt, Human
gccaggcagcugggauuca

SEQ ID NO: 436360 - RNA, 21 nt, Human
gccaggcaggaguggucucag

SEQ ID NO: 436361 - RNA, 19 nt, Human
gccaggcaggcaccagcuc

SEQ ID NO: 436362 - RNA, 32 nt, Human
gccaggcaggcagaggauccgauuaugcgccc

SEQ ID NO: 436363 - RNA, 19 nt, Human
gccaggcaggccagcccag

SEQ ID NO: 436364 - RNA, 17 nt, Human
gccaggcaggccagugg

SEQ ID NO: 436365 - RNA, 32 nt, Human
gccaggcaggcugucugucugcuucacauguc

SEQ ID NO: 436366 - RNA, 32 nt, Human
gccaggcagggcggaggccugcugugcaguug

SEQ ID NO: 436367 - RNA, 32 nt, Human
gccaggcaggguggccaaagaggacuggacuc

SEQ ID NO: 436368 - RNA, 18 nt, Human
gccaggcaggguggcuca

SEQ ID NO: 436369 - RNA, 20 nt, Human
gccaggcaggugggccucag

SEQ ID NO: 436370 - RNA, 32 nt, Human
gccaggcagucccuccugccucaguuucucag

SEQ ID NO: 436371 - RNA, 21 nt, Human
gccaggcaguggacucuucag

SEQ ID NO: 436372 - RNA, 20 nt, Human
gccaggcagugggaagucag

SEQ ID NO: 436373 - RNA, 17 nt, Human
gccaggcagugggacuc

SEQ ID NO: 436374 - RNA, 21 nt, Human
gccaggcagugucaggcugag

SEQ ID NO: 436375 - RNA, 32 nt, Human
gccaggcaguuggggcacuuucugagugcugc

SEQ ID NO: 436376 - RNA, 32 nt, Human
gccaggcauccagcuggggccaguggagguca

SEQ ID NO: 436377 - RNA, 32 nt, Human
gccaggcaucuccuccuggccugagauggaag

SEQ ID NO: 436378 - RNA, 21 nt, Human
gccaggcauggcgaggcugag

SEQ ID NO: 436379 - RNA, 32 nt, Human
gccaggcaugguacucaugccuguaaucccag

SEQ ID NO: 436380 - RNA, 19 nt, Human
gccaggcauggugacucag

SEQ ID NO: 436381 - RNA, 31 nt, Human
gccaggcauggugcugcacacuuguaaucac

SEQ ID NO: 436382 - RNA, 18 nt, Human
gccaggcaugguggcuca

SEQ ID NO: 436383 - RNA, 32 nt, Human
gccaggcaugugggugugggugcaaugugggu

SEQ ID NO: 436384 - RNA, 32 nt, Human
gccaggcauucaauccucaggucuccaccaag

SEQ ID NO: 436385 - RNA, 32 nt, Human
gccaggcauucucucccugcccucucuggccu

SEQ ID NO: 436386 - RNA, 20 nt, Human
gccaggcauugcaggcuuag

SEQ ID NO: 436387 - RNA, 23 nt, Human
gccaggccaagcuggacugcaua

SEQ ID NO: 436388 - RNA, 32 nt, Human
gccaggccaaguacucagcugucuuaauagga

SEQ ID NO: 436389 - RNA, 21 nt, Human
gccaggccacacuccaggagc

SEQ ID NO: 436390 - RNA, 21 nt, Human
gccaggccacagggaggaggc

SEQ ID NO: 436391 - RNA, 25 nt, Human
gccaggccagacacagcugcugccu

SEQ ID NO: 436392 - RNA, 22 nt, Human
gccaggccagcugggcucgggg

SEQ ID NO: 436393 - RNA, 32 nt, Human
gccaggccaggaccacacaguccccagacuca

SEQ ID NO: 436394 - RNA, 32 nt, Human
gccaggccaggccagguggggaaagggacacc

SEQ ID NO: 436395 - RNA, 32 nt, Human
gccaggccaguaaaaguauaacagcaaauaac

SEQ ID NO: 436396 - RNA, 32 nt, Human
gccaggccaguccugcuuaaacuccugcuguu

SEQ ID NO: 436397 - RNA, 32 nt, Human
gccaggccaguguguagaacagcugguccaac

SEQ ID NO: 436398 - RNA, 32 nt, Human
gccaggccaucuccaaccauguccgacgaggc

SEQ ID NO: 436399 - RNA, 20 nt, Human
gccaggccaugacccagggg

SEQ ID NO: 436400 - RNA, 21 nt, Human
gccaggccauggccaaggggc

SEQ ID NO: 436401 - RNA, 18 nt, Human
gccaggcccaccaccucu

SEQ ID NO: 436402 - RNA, 17 nt, Human
gccaggcccagccugca

SEQ ID NO: 436403 - RNA, 32 nt, Human
gccaggcccagccugcaccuccacaccggccc

SEQ ID NO: 436404 - RNA, 32 nt, Human
gccaggcccagccugcgcccccacaccggccc

SEQ ID NO: 436405 - RNA, 19 nt, Human
gccaggcccagcugccaca

SEQ ID NO: 436406 - RNA, 32 nt, Human
gccaggcccaggcugggugcccuguggccuga

SEQ ID NO: 436407 - RNA, 22 nt, Human
gccaggcccaugccuggugucu

SEQ ID NO: 436408 - RNA, 32 nt, Human
gccaggcccauggcuggaaggccgggcuggag

SEQ ID NO: 436409 - RNA, 21 nt, Human
gccaggccccaggcagggcca

SEQ ID NO: 436410 - RNA, 20 nt, Human
gccaggcccccagcgcgggc

SEQ ID NO: 436411 - RNA, 19 nt, Human
gccaggccccgccccgcau

SEQ ID NO: 436412 - RNA, 16 nt, Human
gccaggccccggcagc

SEQ ID NO: 436413 - RNA, 21 nt, Human
gccaggcccgcagccgcuacu

SEQ ID NO: 436414 - RNA, 32 nt, Human
gccaggcccgccucuggcuccugggccugggc

SEQ ID NO: 436415 - RNA, 32 nt, Human
gccaggcccuccugccaugucggacccagacg

SEQ ID NO: 436416 - RNA, 32 nt, Human
gccaggcccucgggcaccgcagccaaacaccc

SEQ ID NO: 436417 - RNA, 32 nt, Human
gccaggcccugagagucuggucugcgccuugg

SEQ ID NO: 436418 - RNA, 32 nt, Human
gccaggcccugaggccauguaccaggcccgga

SEQ ID NO: 436419 - RNA, 32 nt, Human
gccaggcccugagguucagacccuggacccca

SEQ ID NO: 436420 - RNA, 21 nt, Human
gccaggcccugccggacccgg

SEQ ID NO: 436421 - RNA, 32 nt, Human
gccaggcccuggagggugauccugccagcagc

SEQ ID NO: 436422 - RNA, 21 nt, Human
gccaggcccuggcccauaggg

SEQ ID NO: 436423 - RNA, 32 nt, Human
gccaggcccuggggccccuugagugcggcagc

SEQ ID NO: 436424 - RNA, 32 nt, Human
gccaggccgagaggcaggccgggcaggggugu

SEQ ID NO: 436425 - RNA, 21 nt, Human
gccaggccgcagcccaggagc

SEQ ID NO: 436426 - RNA, 21 nt, Human
gccaggccgccagcccagagc

SEQ ID NO: 436427 - RNA, 19 nt, Human
gccaggccgccccgcuguc

SEQ ID NO: 436428 - RNA, 24 nt, Human
gccaggccgcgguggcugaugccu

SEQ ID NO: 436429 - RNA, 23 nt, Human
gccaggccggccgggccgagcca

SEQ ID NO: 436430 - RNA, 22 nt, Human
gccaggccggcugccuggugcc

SEQ ID NO: 436431 - RNA, 23 nt, Human
gccaggccgggcaacccuggggc

SEQ ID NO: 436432 - RNA, 24 nt, Human
gccaggccgggcugacccaagggg

SEQ ID NO: 436433 - RNA, 32 nt, Human
gccaggccggguagcuuccuccccagcccuca

SEQ ID NO: 436434 - RNA, 21 nt, Human
gccaggccggucauggugccu

SEQ ID NO: 436435 - RNA, 15 nt, Human
gccaggccucacaga

SEQ ID NO: 436436 - RNA, 32 nt, Human
gccaggccucauucuccucuggccucuaauag

SEQ ID NO: 436437 - RNA, 32 nt, Human
gccaggccuccaggaggcaccaggcaggcccu

SEQ ID NO: 436438 - RNA, 20 nt, Human
gccaggccucucucaccucu

SEQ ID NO: 436439 - RNA, 32 nt, Human
gccaggccucugcgccuggccuagggugcagc

SEQ ID NO: 436440 - RNA, 22 nt, Human
gccaggccugacggccacuccu

SEQ ID NO: 436441 - RNA, 32 nt, Human
gccaggccugagccucugccaccauggccauu

SEQ ID NO: 436442 - RNA, 21 nt, Human
gccaggccugcagccgcugcc

SEQ ID NO: 436443 - RNA, 19 nt, Human
gccaggccugggcccaggg

SEQ ID NO: 436444 - RNA, 22 nt, Human
gccaggccuggggaaggcuccu

SEQ ID NO: 436445 - RNA, 32 nt, Human
gccaggccugggggcagccucuccccagccuc

SEQ ID NO: 436446 - RNA, 32 nt, Human
gccaggccuguagcuccuaccuggggccuauu

SEQ ID NO: 436447 - RNA, 32 nt, Human
gccaggccuugcaagcccagcaucuuggaacu

SEQ ID NO: 436448 - RNA, 22 nt, Human
gccaggcgagcccagggcacag

SEQ ID NO: 436449 - RNA, 32 nt, Human
gccaggcgaggaugacagggaaagggaggcag

SEQ ID NO: 436450 - RNA, 27 nt, Human
gccaggcgaggcugacuccgcgugaga

SEQ ID NO: 436451 - RNA, 20 nt, Human
gccaggcgaguggggcccag

SEQ ID NO: 436452 - RNA, 25 nt, Human
gccaggcgcacaaaugccccuuccc

SEQ ID NO: 436453 - RNA, 32 nt, Human
gccaggcgcaccacuguagucccagcuacuca

SEQ ID NO: 436454 - RNA, 18 nt, Human
gccaggcgcaguggcuca

SEQ ID NO: 436455 - RNA, 19 nt, Human
gccaggcgccggccggcug

SEQ ID NO: 436456 - RNA, 32 nt, Human
gccaggcgccggggcaggaagggaggcggccg

SEQ ID NO: 436457 - RNA, 32 nt, Human
gccaggcgcgcaaccucgggcgccggggcaag

SEQ ID NO: 436458 - RNA, 17 nt, Human
gccaggcgcgggggcuc

SEQ ID NO: 436459 - RNA, 18 nt, Human
gccaggcgcgguggcuca

SEQ ID NO: 436460 - RNA, 19 nt, Human
gccaggcgcgguggcucag

SEQ ID NO: 436461 - RNA, 17 nt, Human
gccaggcgcucaccccu

SEQ ID NO: 436462 - RNA, 20 nt, Human
gccaggcggacaaaguucag

SEQ ID NO: 436463 - RNA, 19 nt, Human
gccaggcggccauccagaa

SEQ ID NO: 436464 - RNA, 17 nt, Human
gccaggcggccgaccuc

SEQ ID NO: 436465 - RNA, 20 nt, Human
gccaggcggccggcuaccug

SEQ ID NO: 436466 - RNA, 32 nt, Human
gccaggcggcgccgucggcugggcccggauuc

SEQ ID NO: 436467 - RNA, 32 nt, Human
gccaggcggggagggggcgagaggccccaggc

SEQ ID NO: 436468 - RNA, 20 nt, Human
gccaggcgggggaggcgcag

SEQ ID NO: 436469 - RNA, 18 nt, Human
gccaggcgugguggcuca

SEQ ID NO: 436470 - RNA, 20 nt, Human
gccaggcguguaagccucag

SEQ ID NO: 436471 - RNA, 19 nt, Human
gccaggcguucccaccucu

SEQ ID NO: 436472 - RNA, 32 nt, Human
gccaggcuagaauggaaaacugccuguuccuu

SEQ ID NO: 436473 - RNA, 32 nt, Human
gccaggcuagcuccaggccaguucucgguguc

SEQ ID NO: 436474 - RNA, 32 nt, Human
gccaggcuagcuggagccugggauuucuaugc

SEQ ID NO: 436475 - RNA, 20 nt, Human
gccaggcucacagggacucc

SEQ ID NO: 436476 - RNA, 19 nt, Human
gccaggcucagccacugcc

SEQ ID NO: 436477 - RNA, 23 nt, Human
gccaggcucaggccauggcuccc

SEQ ID NO: 436478 - RNA, 21 nt, Human
gccaggcucagguggccuccu

SEQ ID NO: 436479 - RNA, 19 nt, Human
gccaggcucaguucuuacc

SEQ ID NO: 436480 - RNA, 18 nt, Human
gccaggcuccaagacacu

SEQ ID NO: 436481 - RNA, 23 nt, Human
gccaggcuccggccaggaucccu

SEQ ID NO: 436482 - RNA, 32 nt, Human
gccaggcuccuggcaaccucucuugcuagagc

SEQ ID NO: 436483 - RNA, 20 nt, Human
gccaggcucgccaggagccc

SEQ ID NO: 436484 - RNA, 22 nt, Human
gccaggcucgcccaugggccuu

SEQ ID NO: 436485 - RNA, 22 nt, Human
gccaggcucgggggagccuccu

SEQ ID NO: 436486 - RNA, 20 nt, Human
gccaggcucuaccucaggga

SEQ ID NO: 436487 - RNA, 24 nt, Human
gccaggcucuaggccaggcucucu

SEQ ID NO: 436488 - RNA, 32 nt, Human
gccaggcucugcccuggccuuccucugugaac

SEQ ID NO: 436489 - RNA, 32 nt, Human
gccaggcucugccuggaggaucccuccauccg

SEQ ID NO: 436490 - RNA, 32 nt, Human
gccaggcucuuugcuuggcuucucuuuccucu

SEQ ID NO: 436491 - RNA, 32 nt, Human
gccaggcugaccaccucugccugacucagaug

SEQ ID NO: 436492 - RNA, 32 nt, Human
gccaggcugagggcaucuggagugccuggcca

SEQ ID NO: 436493 - RNA, 25 nt, Human
gccaggcugauggccagggccgcag

SEQ ID NO: 436494 - RNA, 32 nt, Human
gccaggcugcagccucaggcacuggcaggggc

SEQ ID NO: 436495 - RNA, 32 nt, Human
gccaggcugcagccugcugcuccagggagcac

SEQ ID NO: 436496 - RNA, 32 nt, Human
gccaggcugcccaucagggcccagggagcccc

SEQ ID NO: 436497 - RNA, 32 nt, Human
gccaggcugccuggcaucccuggggcaugagc

SEQ ID NO: 436498 - RNA, 32 nt, Human
gccaggcugccuggccuuguccucagccaguu

SEQ ID NO: 436499 - RNA, 20 nt, Human
gccaggcugcuaggagccag

SEQ ID NO: 436500 - RNA, 19 nt, Human
gccaggcugcuggcugcug

SEQ ID NO: 436501 - RNA, 19 nt, Human
gccaggcuggagugcaaug

SEQ ID NO: 436502 - RNA, 32 nt, Human
gccaggcuggagugcacuggggcuuggcucac

SEQ ID NO: 436503 - RNA, 20 nt, Human
gccaggcuggagugcaguaa

SEQ ID NO: 436504 - RNA, 19 nt, Human
gccaggcuggagugcagug

SEQ ID NO: 436505 - RNA, 20 nt, Human
gccaggcuggagugcagugg

SEQ ID NO: 436506 - RNA, 32 nt, Human
gccaggcuggagugcaguggugccaucucggc

SEQ ID NO: 436507 - RNA, 22 nt, Human
gccaggcuggauccccacucga

SEQ ID NO: 436508 - RNA, 20 nt, Human
gccaggcuggcaggggccag

SEQ ID NO: 436509 - RNA, 32 nt, Human
gccaggcuggccagggcgugggcagguggugu

SEQ ID NO: 436510 - RNA, 32 nt, Human
gccaggcuggcuccuggggauggccagguaca

SEQ ID NO: 436511 - RNA, 32 nt, Human
gccaggcugggagcuggagcuugcugagucuu

SEQ ID NO: 436512 - RNA, 19 nt, Human
gccaggcugggaggcucgg

SEQ ID NO: 436513 - RNA, 24 nt, Human
gccaggcuggguuggggacccagg

SEQ ID NO: 436514 - RNA, 32 nt, Human
gccaggcuggucucaaacuccugggcucaagc

SEQ ID NO: 436515 - RNA, 32 nt, Human
gccaggcuggucucaaacuccuggguucaagc

SEQ ID NO: 436516 - RNA, 32 nt, Human
gccaggcuggucucacacugaccucaggugau

SEQ ID NO: 436517 - RNA, 32 nt, Human
gccaggcuggucucgaacucauggccucaaau

SEQ ID NO: 436518 - RNA, 32 nt, Human
gccaggcuggucucgaucugaccucaugaucc

SEQ ID NO: 436519 - RNA, 32 nt, Human
gccaggcuggucucuaacuccugggcucagug

SEQ ID NO: 436520 - RNA, 32 nt, Human
gccaggcuggucuugaacugaccucaugaucc

SEQ ID NO: 436521 - RNA, 23 nt, Human
gccaggcuguccgcgccgccgcu

SEQ ID NO: 436522 - RNA, 32 nt, Human
gccaggcuuccgggagugguucuuggaugcug

SEQ ID NO: 436523 - RNA, 32 nt, Human
gccaggcuucuguguguccucucacuuaaucc

SEQ ID NO: 436524 - RNA, 21 nt, Human
gccagggaaaaccgccggcga

SEQ ID NO: 436525 - RNA, 21 nt, Human
gccagggaaaggcagaaccac

SEQ ID NO: 436526 - RNA, 32 nt, Human
gccagggaagcagaggaugugagaggcagagg

SEQ ID NO: 436527 - RNA, 32 nt, Human
gccagggaagguagguuucucuggcugacuga

SEQ ID NO: 436528 - RNA, 32 nt, Human
gccagggaagguggaggaaggaagccaggaag

SEQ ID NO: 436529 - RNA, 32 nt, Human
gccagggaaggugggagccacauggacccaca

SEQ ID NO: 436530 - RNA, 32 nt, Human
gccagggaagugggacacgacccccucuugua

SEQ ID NO: 436531 - RNA, 24 nt, Human
gccagggacacucuccuucaggga

SEQ ID NO: 436532 - RNA, 32 nt, Human
gccagggacaguuccaggcacuggagauaaaa

SEQ ID NO: 436533 - RNA, 22 nt, Human
gccagggaccaggaccaggcca

SEQ ID NO: 436534 - RNA, 32 nt, Human
gccagggaccuggccaagacaccugcucaaaa

SEQ ID NO: 436535 - RNA, 32 nt, Human
gccagggacucugccgaggcccugagaacccc

SEQ ID NO: 436536 - RNA, 21 nt, Human
gccagggacuggcuggacccc

SEQ ID NO: 436537 - RNA, 32 nt, Human
gccagggagaagaagagaaagaaaaagagaca

SEQ ID NO: 436538 - RNA, 19 nt, Human
gccagggagaaggcagcac

SEQ ID NO: 436539 - RNA, 32 nt, Human
gccagggagacucagcucuccuugggggcugg

SEQ ID NO: 436540 - RNA, 32 nt, Human
gccagggagaggggagccagagccggugggaa

SEQ ID NO: 436541 - RNA, 32 nt, Human
gccagggagaggggaggagugggcagugaaga

SEQ ID NO: 436542 - RNA, 32 nt, Human
gccagggagagggugaagcagguaucagaguc

SEQ ID NO: 436543 - RNA, 32 nt, Human
gccagggagaugccugaccaacagguguguug

SEQ ID NO: 436544 - RNA, 32 nt, Human
gccagggagcaccuggugagucugccggcggu

SEQ ID NO: 436545 - RNA, 32 nt, Human
gccagggagcacuggaggccacccagucaugg

SEQ ID NO: 436546 - RNA, 32 nt, Human
gccagggagcaguggcugaguagcucugccuu

SEQ ID NO: 436547 - RNA, 32 nt, Human
gccagggagccaaguggucuagcucagcagau

SEQ ID NO: 436548 - RNA, 32 nt, Human
gccagggagccaaguggucuugcucaauggau

SEQ ID NO: 436549 - RNA, 32 nt, Human
gccagggagcggggagcuuccuggaggcuucc

SEQ ID NO: 436550 - RNA, 32 nt, Human
gccagggaggacaugagaagggccaguggggg

SEQ ID NO: 436551 - RNA, 32 nt, Human
gccagggaggaccugguggccuccucauucuc

SEQ ID NO: 436552 - RNA, 32 nt, Human
gccagggaggcagagcgggagggagucucagg

SEQ ID NO: 436553 - RNA, 32 nt, Human
gccagggaggcaggggaggcaggagaggcugg

SEQ ID NO: 436554 - RNA, 32 nt, Human
gccagggagggaggagaaagccgaagcgaaag

SEQ ID NO: 436555 - RNA, 32 nt, Human
gccagggaggggcagcugcagugaccaggccc

SEQ ID NO: 436556 - RNA, 32 nt, Human
gccagggaggucaaggcugcagugagccguga

SEQ ID NO: 436557 - RNA, 32 nt, Human
gccagggagguggaggcuacagugagccauga

SEQ ID NO: 436558 - RNA, 32 nt, Human
gccagggagguggcggccagggccaggaugcc

SEQ ID NO: 436559 - RNA, 32 nt, Human
gccagggagguugaggcugcagugagcuauga

SEQ ID NO: 436560 - RNA, 23 nt, Human
gccagggaguuggggacucagag

SEQ ID NO: 436561 - RNA, 32 nt, Human
gccagggauucccuuucccacucugaggcucu

SEQ ID NO: 436562 - RNA, 32 nt, Human
gccagggcaaaaaggcaagcgaaggaaacccu

SEQ ID NO: 436563 - RNA, 32 nt, Human
gccagggcacagaagugcuguaagucugaagc

SEQ ID NO: 436564 - RNA, 29 nt, Human
gccagggcacauuuuaugacaaccucaga

SEQ ID NO: 436565 - RNA, 32 nt, Human
gccagggcaccgugagccuggugguuggcagc

SEQ ID NO: 436566 - RNA, 32 nt, Human
gccagggcacugaccagagcugggaaauuugu

SEQ ID NO: 436567 - RNA, 32 nt, Human
gccagggcagaggccaugccacuuuauggaaa

SEQ ID NO: 436568 - RNA, 19 nt, Human
gccagggcagcuccuuccc

SEQ ID NO: 436569 - RNA, 16 nt, Human
gccagggcaggccccg

SEQ ID NO: 436570 - RNA, 32 nt, Human
gccagggcagggggcagcuaggacggccccgg

SEQ ID NO: 436571 - RNA, 26 nt, Human
gccagggcaucaccuuccuccgcaca

SEQ ID NO: 436572 - RNA, 32 nt, Human
gccagggcaugaucaucaccacugccagccuc

SEQ ID NO: 436573 - RNA, 21 nt, Human
gccagggccacuagcagcacc

SEQ ID NO: 436574 - RNA, 32 nt, Human
gccagggccaucucccuuuaauguguucaugu

SEQ ID NO: 436575 - RNA, 32 nt, Human
gccagggccaugggcggaccucaacccgugag

SEQ ID NO: 436576 - RNA, 20 nt, Human
gccagggcccaggccaggcc

SEQ ID NO: 436577 - RNA, 32 nt, Human
gccagggcccuggguggggagguguggguucc

SEQ ID NO: 436578 - RNA, 32 nt, Human
gccagggccggcggaggcgcgaggagccgggc

SEQ ID NO: 436579 - RNA, 19 nt, Human
gccagggccgggggcucag

SEQ ID NO: 436580 - RNA, 32 nt, Human
gccagggcgagagggccuuucccuugagcuac

SEQ ID NO: 436581 - RNA, 32 nt, Human
gccagggcggaaggggaagccaggaaggcagg

SEQ ID NO: 436582 - RNA, 32 nt, Human
gccagggcuauuaaauaauaacaggaggggcu

SEQ ID NO: 436583 - RNA, 32 nt, Human
gccagggcucagacccagcaauugagguguga

SEQ ID NO: 436584 - RNA, 19 nt, Human
gccagggcuccagggccug

SEQ ID NO: 436585 - RNA, 32 nt, Human
gccagggcugcugccugccagccugggguccc

SEQ ID NO: 436586 - RNA, 15 nt, Human
gccagggcugugaug

SEQ ID NO: 436587 - RNA, 24 nt, Human
gccagggcuguguccagggcucag

SEQ ID NO: 436588 - RNA, 23 nt, Human
gccagggcuuccucucuuccucu

SEQ ID NO: 436589 - RNA, 32 nt, Human
gccagggcuuccucuuccgggcagaaacaaua

SEQ ID NO: 436590 - RNA, 24 nt, Human
gccaggggaaaggaccacaaggca

SEQ ID NO: 436591 - RNA, 32 nt, Human
gccaggggacuggggugggcugagggaacagg

SEQ ID NO: 436592 - RNA, 32 nt, Human
gccaggggaggcauagcagaaagacuggcccc

SEQ ID NO: 436593 - RNA, 32 nt, Human
gccaggggauggggucccacuuugucacccag

SEQ ID NO: 436594 - RNA, 32 nt, Human
gccaggggcaccucccucccacccuucaggcu

SEQ ID NO: 436595 - RNA, 32 nt, Human
gccaggggcagaacacuggggagccagguaua

SEQ ID NO: 436596 - RNA, 32 nt, Human
gccaggggcaggcagcuaggcagggagggggc

SEQ ID NO: 436597 - RNA, 32 nt, Human
gccaggggcagggugggauggggaagaccagg

SEQ ID NO: 436598 - RNA, 32 nt, Human
gccaggggcaguuuuagcagcacuuuugauag

SEQ ID NO: 436599 - RNA, 19 nt, Human
gccaggggccagggcucgg

SEQ ID NO: 436600 - RNA, 32 nt, Human
gccaggggccugcagggugauggcaggcuuug

SEQ ID NO: 436601 - RNA, 32 nt, Human
gccaggggcggacccgggaguccuccgaaggc

SEQ ID NO: 436602 - RNA, 32 nt, Human
gccaggggcuacaggcauauaccaccaugccc

SEQ ID NO: 436603 - RNA, 21 nt, Human
gccaggggcucagccggacca

SEQ ID NO: 436604 - RNA, 32 nt, Human
gccaggggcucccucugcaugggaugugaccc

SEQ ID NO: 436605 - RNA, 32 nt, Human
gccaggggcuggaggaagaggggaaugggaag

SEQ ID NO: 436606 - RNA, 32 nt, Human
gccaggggcuggugggacaguggugacauagu

SEQ ID NO: 436607 - RNA, 32 nt, Human
gccaggggcuucugaccugugcaggugagagu

SEQ ID NO: 436608 - RNA, 32 nt, Human
gccaggggcuuggaaaucaaauucagcucuuc

SEQ ID NO: 436609 - RNA, 32 nt, Human
gccagggggagguggauguggggguauggcac

SEQ ID NO: 436610 - RNA, 18 nt, Human
gccagggggcccucuuca

SEQ ID NO: 436611 - RNA, 32 nt, Human
gccagggggugacuggcacagagcgggccgua

SEQ ID NO: 436612 - RNA, 32 nt, Human
gccagggggugaggaauuagugcuggauuuga

SEQ ID NO: 436613 - RNA, 24 nt, Human
gccaggggucccagcuacucagga

SEQ ID NO: 436614 - RNA, 19 nt, Human
gccaggggugauggaggaa

SEQ ID NO: 436615 - RNA, 22 nt, Human
gccaggggugauucucaccucu

SEQ ID NO: 436616 - RNA, 32 nt, Human
gccagggguuacaccugcccuccguggucccu

SEQ ID NO: 436617 - RNA, 32 nt, Human
gccagggguuacagauccagagccuagggcag

SEQ ID NO: 436618 - RNA, 32 nt, Human
gccaggguccccagggugggagagcggcuccg

SEQ ID NO: 436619 - RNA, 22 nt, Human
gccagggucucucccucaggug

SEQ ID NO: 436620 - RNA, 32 nt, Human
gccagggucugagcucuccagccuguggcauc

SEQ ID NO: 436621 - RNA, 21 nt, Human
gccagggucuguucuugugga

SEQ ID NO: 436622 - RNA, 32 nt, Human
gccagggucuuccuccccaucuuuccauccuu

SEQ ID NO: 436623 - RNA, 20 nt, Human
gccagggugacuucuaccuc

SEQ ID NO: 436624 - RNA, 20 nt, Human
gccagggugccgggaggaag

SEQ ID NO: 436625 - RNA, 32 nt, Human
gccagggugccgggaggaagggacaucucaug

SEQ ID NO: 436626 - RNA, 32 nt, Human
gccagggugcuagauagagggagacucaagga

SEQ ID NO: 436627 - RNA, 20 nt, Human
gccaggguggccgccccagc

SEQ ID NO: 436628 - RNA, 21 nt, Human
gccagggugucaggggcucag

SEQ ID NO: 436629 - RNA, 32 nt, Human
gccagggugugagggauggggagcagcugggc

SEQ ID NO: 436630 - RNA, 20 nt, Human
gccaggguguggcccugcca

SEQ ID NO: 436631 - RNA, 32 nt, Human
gccaggguuccccagccaugaaucucuuccga

SEQ ID NO: 436632 - RNA, 18 nt, Human
gccaggguuuccucuuca

SEQ ID NO: 436633 - RNA, 32 nt, Human
gccagguaaagaggauagguacaggaguauau

SEQ ID NO: 436634 - RNA, 32 nt, Human
gccagguaaccccaggcugaaggggcccugcu

SEQ ID NO: 436635 - RNA, 21 nt, Human
gccagguaaggccuggugagg

SEQ ID NO: 436636 - RNA, 19 nt, Human
gccagguaccaaagcucag

SEQ ID NO: 436637 - RNA, 32 nt, Human
gccagguaccucuaugaggucauggagcagcc

SEQ ID NO: 436638 - RNA, 32 nt, Human
gccagguacuucagaaccucagagcuccccag

SEQ ID NO: 436639 - RNA, 25 nt, Human
gccagguaggcaacacagagccaag

SEQ ID NO: 436640 - RNA, 32 nt, Human
gccaggucaaugcacagacccaggaagagacu

SEQ ID NO: 436641 - RNA, 32 nt, Human
gccaggucacaccaggagggguggggcagggc

SEQ ID NO: 436642 - RNA, 24 nt, Human
gccagguccagagcgccgaggagc

SEQ ID NO: 436643 - RNA, 21 nt, Human
gccagguccaggcccugguga

SEQ ID NO: 436644 - RNA, 32 nt, Human
gccagguccucaaacaccagcugcugcgcguc

SEQ ID NO: 436645 - RNA, 32 nt, Human
gccagguccucaccuguguguacaccagcagg

SEQ ID NO: 436646 - RNA, 32 nt, Human
gccagguccuuauguugucaccauagagcaac

SEQ ID NO: 436647 - RNA, 17 nt, Human
gccaggucuccaccucu

SEQ ID NO: 436648 - RNA, 18 nt, Human
gccaggucucuccucuca

SEQ ID NO: 436649 - RNA, 21 nt, Human
gccaggucuggcgccaggggc

SEQ ID NO: 436650 - RNA, 32 nt, Human
gccaggugaaguuucacacaaucgaagacugc

SEQ ID NO: 436651 - RNA, 31 nt, Human
gccaggugacuuccuccuugcgugagugagg

SEQ ID NO: 436652 - RNA, 31 nt, Human
gccaggugaggaccauuuucacugggaccca

SEQ ID NO: 436653 - RNA, 32 nt, Human
gccaggugaggacccgcuggccccugggccca

SEQ ID NO: 436654 - RNA, 32 nt, Human
gccaggugaggugggagguuggagagccaggu

SEQ ID NO: 436655 - RNA, 32 nt, Human
gccaggugcacagguuggaaaugcacugaacu

SEQ ID NO: 436656 - RNA, 32 nt, Human
gccaggugcagccuggacaacaugaugagauc

SEQ ID NO: 436657 - RNA, 17 nt, Human
gccaggugcagggcuca

SEQ ID NO: 436658 - RNA, 18 nt, Human
gccaggugcaguggcuca

SEQ ID NO: 436659 - RNA, 19 nt, Human
gccaggugcaguggcucag

SEQ ID NO: 436660 - RNA, 20 nt, Human
gccaggugccaaggcuucag

SEQ ID NO: 436661 - RNA, 24 nt, Human
gccaggugccacccucgccucaca

SEQ ID NO: 436662 - RNA, 32 nt, Human
gccaggugccagggacacucuccuucagggaa

SEQ ID NO: 436663 - RNA, 32 nt, Human
gccaggugcccucaccaccaauggcaucaacc

SEQ ID NO: 436664 - RNA, 32 nt, Human
gccaggugcuggaggagguauaugagaaccag

SEQ ID NO: 436665 - RNA, 22 nt, Human
gccaggugcuggcgccgcugcc

SEQ ID NO: 436666 - RNA, 22 nt, Human
gccaggugcuucuggggcucag

SEQ ID NO: 436667 - RNA, 21 nt, Human
gccagguggagagaccuggag

SEQ ID NO: 436668 - RNA, 32 nt, Human
gccagguggaguuuugcucuugucgcccaggc

SEQ ID NO: 436669 - RNA, 32 nt, Human
gccagguggggaggggcuggggaccggccagg

SEQ ID NO: 436670 - RNA, 32 nt, Human
gccaggugggguggacugggcguggugguccu

SEQ ID NO: 436671 - RNA, 31 nt, Human
gccagguggguggagggagggagaucaugag

SEQ ID NO: 436672 - RNA, 32 nt, Human
gccagguguacucugcgccccacgcuggaaaa

SEQ ID NO: 436673 - RNA, 18 nt, Human
gccagguguccucuugca

SEQ ID NO: 436674 - RNA, 18 nt, Human
gccaggugugcagggcca

SEQ ID NO: 436675 - RNA, 21 nt, Human
gccagguguugccggacccag

SEQ ID NO: 436676 - RNA, 32 nt, Human
gccagguuaaugacauucaauucuaaaugaua

SEQ ID NO: 436677 - RNA, 21 nt, Human
gccagguucaugccuguaauc

SEQ ID NO: 436678 - RNA, 32 nt, Human
gccagguuccuggaccagcccagcugccccca

SEQ ID NO: 436679 - RNA, 32 nt, Human
gccagguuccuugcccuccccaccccauccca

SEQ ID NO: 436680 - RNA, 32 nt, Human
gccagguugcagcugcucuugcaucugggcca

SEQ ID NO: 436681 - RNA, 24 nt, Human
gccagguugcuaagaaaccaggag

SEQ ID NO: 436682 - RNA, 22 nt, Human
gccagguuggcggccggggcuc

SEQ ID NO: 436683 - RNA, 32 nt, Human
gccagguugguggcgcaugccuguaaucccag

SEQ ID NO: 436684 - RNA, 32 nt, Human
gccagguuucacugcagccugcccgaggcuaa

SEQ ID NO: 436685 - RNA, 20 nt, Human
gccagguuugcuuccaccuu

SEQ ID NO: 436686 - RNA, 32 nt, Human
gccagguuuucuggguguccaaaggaagacgu

SEQ ID NO: 436687 - RNA, 23 nt, Human
gccagguuuugcaggccgggcca

SEQ ID NO: 436688 - RNA, 32 nt, Human
gccaguaagaaagugacagaagcaaugaaugu

SEQ ID NO: 436689 - RNA, 32 nt, Human
gccaguacacagagaagcugaggaaauaauac

SEQ ID NO: 436690 - RNA, 32 nt, Human
gccaguacacgcaggaaacuauggcugagcac

SEQ ID NO: 436691 - RNA, 32 nt, Human
gccaguaccccacagagacagccggaaggacu

SEQ ID NO: 436692 - RNA, 32 nt, Human
gccaguaccuaccuggcugcaggaugaagcug

SEQ ID NO: 436693 - RNA, 32 nt, Human
gccaguacuccugcucugcuaacccugcgugc

SEQ ID NO: 436694 - RNA, 24 nt, Human
gccaguagccccagcuacuuggga

SEQ ID NO: 436695 - RNA, 32 nt, Human
gccaguagcugagacgccaccucugccacagg

SEQ ID NO: 436696 - RNA, 32 nt, Human
gccaguaggaguuuccggaaggaguuugaauu

SEQ ID NO: 436697 - RNA, 24 nt, Human
gccaguagggggccaggccuccca

SEQ ID NO: 436698 - RNA, 32 nt, Human
gccaguagguagucccagcuacucgagguugc

SEQ ID NO: 436699 - RNA, 24 nt, Human
gccaguagucccagcuacuuggga

SEQ ID NO: 436700 - RNA, 21 nt, Human
gccaguaucuuccucaccucu

SEQ ID NO: 436701 - RNA, 32 nt, Human
gccaguaucuugauuuuggauuucucaaccuc

SEQ ID NO: 436702 - RNA, 32 nt, Human
gccaguaugccaguuugaauucucagucuccu

SEQ ID NO: 436703 - RNA, 18 nt, Human
gccagucaaccacaaggc

SEQ ID NO: 436704 - RNA, 19 nt, Human
gccagucaacccacuguuc

SEQ ID NO: 436705 - RNA, 25 nt, Human
gccagucaacuuccuggaauccaag

SEQ ID NO: 436706 - RNA, 21 nt, Human
gccagucaaggccacccagga

SEQ ID NO: 436707 - RNA, 32 nt, Human
gccagucaagggcagugggaucucgauggagc

SEQ ID NO: 436708 - RNA, 21 nt, Human
gccagucacagacccauucua

SEQ ID NO: 436709 - RNA, 32 nt, Human
gccagucacaugcaucacagccugcauuaauu

SEQ ID NO: 436710 - RNA, 22 nt, Human
gccagucaccaccaccauccua

SEQ ID NO: 436711 - RNA, 32 nt, Human
gccagucaccagcccucugccugcagccaugg

SEQ ID NO: 436712 - RNA, 32 nt, Human
gccagucaccucuuugucucucucuucuuucu

SEQ ID NO: 436713 - RNA, 32 nt, Human
gccagucaccuuggcuacccacuguggacagc

SEQ ID NO: 436714 - RNA, 32 nt, Human
gccagucagcaaccuguaacucacauucucuu

SEQ ID NO: 436715 - RNA, 32 nt, Human
gccagucaggacuuuugcuauugcaaauagaa

SEQ ID NO: 436716 - RNA, 32 nt, Human
gccagucaggguccaagagcccaucagucucc

SEQ ID NO: 436717 - RNA, 21 nt, Human
gccagucaggugcccagaggg

SEQ ID NO: 436718 - RNA, 17 nt, Human
gccagucauagcaguuc

SEQ ID NO: 436719 - RNA, 19 nt, Human
gccagucaugacagcucug

SEQ ID NO: 436720 - RNA, 32 nt, Human
gccagucaugggaggcagagcugggggagcga

SEQ ID NO: 436721 - RNA, 32 nt, Human
gccaguccagcccaggcggggagagaugugua

SEQ ID NO: 436722 - RNA, 32 nt, Human
gccaguccagccgccccucgcccggugccuag

SEQ ID NO: 436723 - RNA, 32 nt, Human
gccaguccauuucucaaccuuaaauuucagac

SEQ ID NO: 436724 - RNA, 32 nt, Human
gccagucccaaguacagcugucccuuuguauc

SEQ ID NO: 436725 - RNA, 23 nt, Human
gccagucccaccgccgccgccgc

SEQ ID NO: 436726 - RNA, 32 nt, Human
gccaguccccauuggcugacagugccaccugg

SEQ ID NO: 436727 - RNA, 19 nt, Human
gccaguccccgccccgacu

SEQ ID NO: 436728 - RNA, 26 nt, Human
gccagucccgaaccauggccgggcca

SEQ ID NO: 436729 - RNA, 32 nt, Human
gccagucccucguugcaggacagggucaucau

SEQ ID NO: 436730 - RNA, 17 nt, Human
gccagucccuguccccu

SEQ ID NO: 436731 - RNA, 32 nt, Human
gccaguccggucccaggucccuugucccuucc

SEQ ID NO: 436732 - RNA, 32 nt, Human
gccaguccgugucccuccgccuccaggagggg

SEQ ID NO: 436733 - RNA, 32 nt, Human
gccaguccuccccuuuuugugugcuaccucau

SEQ ID NO: 436734 - RNA, 32 nt, Human
gccaguccucugcauguucugcucuugugccc

SEQ ID NO: 436735 - RNA, 21 nt, Human
gccaguccugcacccaccucu

SEQ ID NO: 436736 - RNA, 32 nt, Human
gccaguccugccggaagauggucaacgaccgg

SEQ ID NO: 436737 - RNA, 32 nt, Human
gccagucgcuccuggcaccauggacgaugcca

SEQ ID NO: 436738 - RNA, 32 nt, Human
gccagucggcgccgcgcggagcuggccgcugg

SEQ ID NO: 436739 - RNA, 32 nt, Human
gccagucgugcacccacccccacguccacccg

SEQ ID NO: 436740 - RNA, 32 nt, Human
gccagucguuuuucggaaagcuggcagcggcu

SEQ ID NO: 436741 - RNA, 24 nt, Human
gccagucucaaacuccuggacuca

SEQ ID NO: 436742 - RNA, 32 nt, Human
gccagucucacugcgcccucuccuccaaccuc

SEQ ID NO: 436743 - RNA, 32 nt, Human
gccagucucauggguagauaguggugcagugc

SEQ ID NO: 436744 - RNA, 32 nt, Human
gccagucucccaggcccccugcaucuaucgag

SEQ ID NO: 436745 - RNA, 32 nt, Human
gccagucucuccccacugcuccuaagauccug

SEQ ID NO: 436746 - RNA, 32 nt, Human
gccagucugcauucccacgccaucccaaagcc

SEQ ID NO: 436747 - RNA, 18 nt, Human
gccagucugccaccaccc

SEQ ID NO: 436748 - RNA, 32 nt, Human
gccagucugccuucccccaaccccguguccug

SEQ ID NO: 436749 - RNA, 32 nt, Human
gccagucuuauccugaauuccucagagcaguc

SEQ ID NO: 436750 - RNA, 32 nt, Human
gccagucuuccucuuagccucuggaucuagaa

SEQ ID NO: 436751 - RNA, 32 nt, Human
gccagucuuccugaucuccaucuuucugcccu

SEQ ID NO: 436752 - RNA, 24 nt, Human
gccagucuugaacuccugagcuca

SEQ ID NO: 436753 - RNA, 32 nt, Human
gccagucuugaccccaauacaggggcuggaua

SEQ ID NO: 436754 - RNA, 20 nt, Human
gccagugaaauccucaggug

SEQ ID NO: 436755 - RNA, 16 nt, Human
gccagugaaccuugga

SEQ ID NO: 436756 - RNA, 32 nt, Human
gccagugaacgucuuggugugugcacacauuu

SEQ ID NO: 436757 - RNA, 32 nt, Human
gccagugaacugucaccuucucuucaucacag

SEQ ID NO: 436758 - RNA, 32 nt, Human
gccagugaaugacaggcuuugaggagcuucuc

SEQ ID NO: 436759 - RNA, 32 nt, Human
gccagugaaugugaaggaaacuccccuccuuc

SEQ ID NO: 436760 - RNA, 32 nt, Human
gccagugaccuccuuuugaaggggacauugga

SEQ ID NO: 436761 - RNA, 32 nt, Human
gccagugacucuguccucuguacagcaggcuc

SEQ ID NO: 436762 - RNA, 32 nt, Human
gccagugacuuauuccagagugccucaguuag

SEQ ID NO: 436763 - RNA, 32 nt, Human
gccagugagcccagugugcuugagugucucug

SEQ ID NO: 436764 - RNA, 32 nt, Human
gccagugagccugcggggaggcugguccaagg

SEQ ID NO: 436765 - RNA, 32 nt, Human
gccagugagcuaggguggaggggcuguguuua

SEQ ID NO: 436766 - RNA, 32 nt, Human
gccagugagcuucuaccaucauggaccuauug

SEQ ID NO: 436767 - RNA, 32 nt, Human
gccagugagcuucucguacuuucuuucuuuuu

SEQ ID NO: 436768 - RNA, 32 nt, Human
gccagugagguggcaucuugggaagacauggc

SEQ ID NO: 436769 - RNA, 19 nt, Human
gccagugauggccucgccc

SEQ ID NO: 436770 - RNA, 32 nt, Human
gccagugauuucauaugaaagaugcaugccuc

SEQ ID NO: 436771 - RNA, 32 nt, Human
gccagugcaagaccgagacugagggaaagcau

SEQ ID NO: 436772 - RNA, 32 nt, Human
gccagugcaagaccgagauugagggaaagcau

SEQ ID NO: 436773 - RNA, 32 nt, Human
gccagugcacccccacucccacccucaaccgc

SEQ ID NO: 436774 - RNA, 32 nt, Human
gccagugcacuccagccugggugacagcgaga

SEQ ID NO: 436775 - RNA, 32 nt, Human
gccagugcacuccggccugggugacagaguga

SEQ ID NO: 436776 - RNA, 32 nt, Human
gccagugcaguggcucacaccuguaaucucag

SEQ ID NO: 436777 - RNA, 32 nt, Human
gccagugccacuccuagccagcgccagugcgu

SEQ ID NO: 436778 - RNA, 32 nt, Human
gccagugccagccuggccaaccucacuuguga

SEQ ID NO: 436779 - RNA, 32 nt, Human
gccagugccauuuugauaucaaucucaacuuu

SEQ ID NO: 436780 - RNA, 32 nt, Human
gccagugccuggcaugugucccagggacaagc

SEQ ID NO: 436781 - RNA, 18 nt, Human
gccagugccuguguacuc

SEQ ID NO: 436782 - RNA, 32 nt, Human
gccagugcgcacuacugggccugguggccacc

SEQ ID NO: 436783 - RNA, 22 nt, Human
gccagugcuaguucugacccaa

SEQ ID NO: 436784 - RNA, 32 nt, Human
gccagugcuccuggugucuccaccugccuggg

SEQ ID NO: 436785 - RNA, 32 nt, Human
gccagugcugaggagguuggagagagaaaggg

SEQ ID NO: 436786 - RNA, 32 nt, Human
gccagugcugugcagagcucauuuaaauguau

SEQ ID NO: 436787 - RNA, 32 nt, Human
gccagugcuuuagagcaacuucccgcaaauca

SEQ ID NO: 436788 - RNA, 32 nt, Human
gccaguggacucaggguuguugagaggaguca

SEQ ID NO: 436789 - RNA, 32 nt, Human
gccaguggcccagggugugugcagggcagcuc

SEQ ID NO: 436790 - RNA, 32 nt, Human
gccaguggcgacaucaaagacaggaagggguc

SEQ ID NO: 436791 - RNA, 32 nt, Human
gccaguggcgccugccaggagugaguccaugc

SEQ ID NO: 436792 - RNA, 32 nt, Human
gccaguggcgucgcggccacccugccgggcuc

SEQ ID NO: 436793 - RNA, 21 nt, Human
gccaguggcuccauggacuca

SEQ ID NO: 436794 - RNA, 32 nt, Human
gccaguggcuguggaacaguccugggcccugg

SEQ ID NO: 436795 - RNA, 32 nt, Human
gccaguggcuuccugaacgugccucugcgaag

SEQ ID NO: 436796 - RNA, 32 nt, Human
gccaguggcuuggaaauggucacccacaaauc

SEQ ID NO: 436797 - RNA, 21 nt, Human
gccagugggaaggggcaccgg

SEQ ID NO: 436798 - RNA, 32 nt, Human
gccagugggaggagggaggggccaggcagcug

SEQ ID NO: 436799 - RNA, 32 nt, Human
gccagugggaggaggggcagggcagggcugua

SEQ ID NO: 436800 - RNA, 32 nt, Human
gccagugggaguagccugucuguucuggcaca

SEQ ID NO: 436801 - RNA, 32 nt, Human
gccagugggcagguggacgcucugcugagaca

SEQ ID NO: 436802 - RNA, 32 nt, Human
gccagugggccagccacagagcaaaagagggu

SEQ ID NO: 436803 - RNA, 32 nt, Human
gccaguggucucagaccugccaccccacagcc

SEQ ID NO: 436804 - RNA, 32 nt, Human
gccagugguggagguggguguuugggaaaggc

SEQ ID NO: 436805 - RNA, 32 nt, Human
gccagugguggggcacacggacggcacgcugu

SEQ ID NO: 436806 - RNA, 32 nt, Human
gccaguguacgugccauuucucuuccacuaug

SEQ ID NO: 436807 - RNA, 32 nt, Human
gccagugucaggccucugccucugggccuuug

SEQ ID NO: 436808 - RNA, 32 nt, Human
gccagugucauccucuuuggaaccaacaauau

SEQ ID NO: 436809 - RNA, 32 nt, Human
gccaguguccaccacagcucugccugcccuuc

SEQ ID NO: 436810 - RNA, 32 nt, Human
gccaguguccagccccaccaaggggccuccag

SEQ ID NO: 436811 - RNA, 32 nt, Human
gccaguguccccagcacuuuuaggucauuugg

SEQ ID NO: 436812 - RNA, 32 nt, Human
gccagugucuguucauugccucugccuugccc

SEQ ID NO: 436813 - RNA, 22 nt, Human
gccagugugggcaagggcucag

SEQ ID NO: 436814 - RNA, 32 nt, Human
gccaguguggugucuugcgccuguacucccag

SEQ ID NO: 436815 - RNA, 32 nt, Human
gccagugugugaggacagcuucagccaggagg

SEQ ID NO: 436816 - RNA, 32 nt, Human
gccagugugugcucaccaugcccacccucagu

SEQ ID NO: 436817 - RNA, 32 nt, Human
gccaguguucuaacaaacuaaacucuucaaau

SEQ ID NO: 436818 - RNA, 32 nt, Human
gccaguguugugggcuuccugcugggacugag

SEQ ID NO: 436819 - RNA, 32 nt, Human
gccaguguuguuuccagccucaggccacgggc

SEQ ID NO: 436820 - RNA, 32 nt, Human
gccaguguuucccagcccagaguuuacugacu

SEQ ID NO: 436821 - RNA, 32 nt, Human
gccaguguuuuuaagacagaauacuacuugca

SEQ ID NO: 436822 - RNA, 32 nt, Human
gccaguuaaagaaggucacagaggaggaauga

SEQ ID NO: 436823 - RNA, 21 nt, Human
gccaguuaguucucagcugag

SEQ ID NO: 436824 - RNA, 18 nt, Human
gccaguucauuccacccu

SEQ ID NO: 436825 - RNA, 31 nt, Human
gccaguucauuucagcaugcucuuucaacca

SEQ ID NO: 436826 - RNA, 32 nt, Human
gccaguucauuucagcaugcucuuucaaccag

SEQ ID NO: 436827 - RNA, 32 nt, Human
gccaguucccuacagccauccccagucaaggg

SEQ ID NO: 436828 - RNA, 18 nt, Human
gccaguuccucuuugaua

SEQ ID NO: 436829 - RNA, 32 nt, Human
gccaguuccugccuguugccucuugugagcuc

SEQ ID NO: 436830 - RNA, 32 nt, Human
gccaguuccuggaagguccugguugacagcga

SEQ ID NO: 436831 - RNA, 32 nt, Human
gccaguucuagccccuguccucuuagauauau

SEQ ID NO: 436832 - RNA, 32 nt, Human
gccaguucuccagcacugagguggggcagaua

SEQ ID NO: 436833 - RNA, 32 nt, Human
gccaguucuccucuucucucuaauccauccgu

SEQ ID NO: 436834 - RNA, 32 nt, Human
gccaguugaaacaccacucugaucaggaugug

SEQ ID NO: 436835 - RNA, 32 nt, Human
gccaguugccagggcaagucacugcgcuggga

SEQ ID NO: 436836 - RNA, 32 nt, Human
gccaguugcccaacucuuccagaagagagacu

SEQ ID NO: 436837 - RNA, 18 nt, Human
gccaguugccuccaccuc

SEQ ID NO: 436838 - RNA, 32 nt, Human
gccaguuggcccaggccccuggcagugcuccc

SEQ ID NO: 436839 - RNA, 32 nt, Human
gccaguuggcuucugugccugacucugugcug

SEQ ID NO: 436840 - RNA, 32 nt, Human
gccaguugggagaggagcagagccaggccggu

SEQ ID NO: 436841 - RNA, 32 nt, Human
gccaguugggcuguguuaaaggaagcaguguu

SEQ ID NO: 436842 - RNA, 32 nt, Human
gccaguugguccggguacaaggagaacacuau

SEQ ID NO: 436843 - RNA, 32 nt, Human
gccaguugugagcuugcauuugagugcaugug

SEQ ID NO: 436844 - RNA, 32 nt, Human
gccaguuucacccucuggagugguuggcaagg

SEQ ID NO: 436845 - RNA, 22 nt, Human
gccaguuucagauuuacucuga

SEQ ID NO: 436846 - RNA, 32 nt, Human
gccaguuucuucagauaaguacccccaccucu

SEQ ID NO: 436847 - RNA, 32 nt, Human
gccaguuugaaguagaucuguaccaaaaugaa

SEQ ID NO: 436848 - RNA, 32 nt, Human
gccaguuuggaggcaggcguugagcugugcac

SEQ ID NO: 436849 - RNA, 26 nt, Human
gccaguuuguucucucagaacccaga

SEQ ID NO: 436850 - RNA, 32 nt, Human
gccaguuuucuucccuccuugcuauuaaagcc

SEQ ID NO: 436851 - RNA, 32 nt, Human
gccaguuuuggccugugagcucacuggccuca

SEQ ID NO: 436852 - RNA, 32 nt, Human
gccauaaaaagaauccucugaccuaccuuguc

SEQ ID NO: 436853 - RNA, 32 nt, Human
gccauaaaaccacucaucacacuacugaaaga

SEQ ID NO: 436854 - RNA, 32 nt, Human
gccauaaaagagacacuuuccugcugguggua

SEQ ID NO: 436855 - RNA, 32 nt, Human
gccauaaaguuaaaauagaggccaggcgcggu

SEQ ID NO: 436856 - RNA, 32 nt, Human
gccauaaaugggcuccagggcucuggaucuca

SEQ ID NO: 436857 - RNA, 21 nt, Human
gccauaacaaaauaccaucaa

SEQ ID NO: 436858 - RNA, 32 nt, Human
gccauaaccauucuguuccuuuacagaacuaa

SEQ ID NO: 436859 - RNA, 32 nt, Human
gccauaaccugacaauagugcccacaccuuaa

SEQ ID NO: 436860 - RNA, 32 nt, Human
gccauaacucagacccacugaccaacagggcc

SEQ ID NO: 436861 - RNA, 22 nt, Human
gccauaacuuuucucuugcaga

SEQ ID NO: 436862 - RNA, 32 nt, Human
gccauaaggggaaacuuaauucugcuaaauua

SEQ ID NO: 436863 - RNA, 19 nt, Human
gccauaagugguccaggga

SEQ ID NO: 436864 - RNA, 32 nt, Human
gccauaaucccccuaggaauauaacucaacug

SEQ ID NO: 436865 - RNA, 32 nt, Human
gccauaaugaacuguaguacauggacaauaag

SEQ ID NO: 436866 - RNA, 32 nt, Human
gccauacacacagcaggauuagacggggagag

SEQ ID NO: 436867 - RNA, 21 nt, Human
gccauacauuuuauccucaug

SEQ ID NO: 436868 - RNA, 32 nt, Human
gccauaccauuuuaaaaguaguaagaguuugc

SEQ ID NO: 436869 - RNA, 32 nt, Human
gccauacccacugccccagaccagugcagcca

SEQ ID NO: 436870 - RNA, 32 nt, Human
gccauacccauguccaggugggcacaggccug

SEQ ID NO: 436871 - RNA, 32 nt, Human
gccauaccguguacccuagguaugguggcuac

SEQ ID NO: 436872 - RNA, 32 nt, Human
gccauaccuggaccccgaggagccugcuugcu

SEQ ID NO: 436873 - RNA, 19 nt, Human
gccauacguauuccccucu

SEQ ID NO: 436874 - RNA, 32 nt, Human
gccauacuagucuuugccgccugcgaagcagc

SEQ ID NO: 436875 - RNA, 20 nt, Human
gccauacuccuacaaacuua

SEQ ID NO: 436876 - RNA, 18 nt, Human
gccauacucuggcugccu

SEQ ID NO: 436877 - RNA, 19 nt, Human
gccauacucuguuccagcu

SEQ ID NO: 436878 - RNA, 19 nt, Human
gccauacugccacccagaa

SEQ ID NO: 436879 - RNA, 19 nt, Human
gccauacugcuaguuaacc

SEQ ID NO: 436880 - RNA, 32 nt, Human
gccauacuucuguuuccaucugcugggccacc

SEQ ID NO: 436881 - RNA, 32 nt, Human
gccauagaaauguagguccucagaaaguguau

SEQ ID NO: 436882 - RNA, 32 nt, Human
gccauagaccuuccugggcuucucccuggggc

SEQ ID NO: 436883 - RNA, 32 nt, Human
gccauagagccuggccuggccccuggccuugg

SEQ ID NO: 436884 - RNA, 32 nt, Human
gccauagaggaagugaaaugccuccacggcug

SEQ ID NO: 436885 - RNA, 32 nt, Human
gccauagaggagagaggucuugagggguggga

SEQ ID NO: 436886 - RNA, 32 nt, Human
gccauagcaauugcacuccggccugggcaaca

SEQ ID NO: 436887 - RNA, 21 nt, Human
gccauagcacccagcccagaa

SEQ ID NO: 436888 - RNA, 21 nt, Human
gccauagccagaaaggacaga

SEQ ID NO: 436889 - RNA, 32 nt, Human
gccauagccuucucuucucaggcguggacugc

SEQ ID NO: 436890 - RNA, 32 nt, Human
gccauagggcugggagagaagcauugcacucu

SEQ ID NO: 436891 - RNA, 32 nt, Human
gccauagggggaccagcuucugccagaaguug

SEQ ID NO: 436892 - RNA, 32 nt, Human
gccauagucaagcccagcagguuuccucagga

SEQ ID NO: 436893 - RNA, 22 nt, Human
gccauaguggaagcugugguca

SEQ ID NO: 436894 - RNA, 32 nt, Human
gccauaguggcugucaucccagcacuuuagga

SEQ ID NO: 436895 - RNA, 32 nt, Human
gccauaguuaauaacauuaacacuucaauagc

SEQ ID NO: 436896 - RNA, 32 nt, Human
gccauaguuucucaagugacuaaaguaguuau

SEQ ID NO: 436897 - RNA, 32 nt, Human
gccauauaaugguguguuuucuuaauuuuguu

SEQ ID NO: 436898 - RNA, 32 nt, Human
gccauauacaucuuuucuugucuccauaaucc

SEQ ID NO: 436899 - RNA, 26 nt, Human
gccauauauuuuaaugugcuugcaug

SEQ ID NO: 436900 - RNA, 32 nt, Human
gccauaucaccugucaggauuucagcuucccu

SEQ ID NO: 436901 - RNA, 32 nt, Human
gccauaucagaagacauuggaaagagggauuc

SEQ ID NO: 436902 - RNA, 32 nt, Human
gccauaucagaagacauuggaaagagggauuu

SEQ ID NO: 436903 - RNA, 32 nt, Human
gccauaucccaauacguguagggcgagggucc

SEQ ID NO: 436904 - RNA, 32 nt, Human
gccauauccuacagauccucccauuucuaggg

SEQ ID NO: 436905 - RNA, 32 nt, Human
gccauauuccuuuaagaugauguaauagucau

SEQ ID NO: 436906 - RNA, 24 nt, Human
gccauauugacugggcuggucuca

SEQ ID NO: 436907 - RNA, 24 nt, Human
gccauauuggccuggcugaucuca

SEQ ID NO: 436908 - RNA, 32 nt, Human
gccauauuuaaaccacaguucuccacgccacc

SEQ ID NO: 436909 - RNA, 18 nt, Human
gccauauuucagcuacug

SEQ ID NO: 436910 - RNA, 18 nt, Human
gccaucaaaugcccagga

SEQ ID NO: 436911 - RNA, 19 nt, Human
gccaucaaccuggcugcug

SEQ ID NO: 436912 - RNA, 32 nt, Human
gccaucaaggagggcaaggcagcccagacuga

SEQ ID NO: 436913 - RNA, 32 nt, Human
gccaucaauuuugccuuugaaauuucuuuugu

SEQ ID NO: 436914 - RNA, 32 nt, Human
gccaucacacugcagccuaggugacagagcga

SEQ ID NO: 436915 - RNA, 32 nt, Human
gccaucacaggcucugcauacacaugcacuca

SEQ ID NO: 436916 - RNA, 18 nt, Human
gccaucacauucaccucu

SEQ ID NO: 436917 - RNA, 21 nt, Human
gccaucacauugucacccaga

SEQ ID NO: 436918 - RNA, 18 nt, Human
gccaucaccaccucggaa

SEQ ID NO: 436919 - RNA, 20 nt, Human
gccaucaccagccacagaga

SEQ ID NO: 436920 - RNA, 32 nt, Human
gccaucaccagcuggccagggcauggccuauu

SEQ ID NO: 436921 - RNA, 32 nt, Human
gccaucaccaucagccccaggagcucaggugg

SEQ ID NO: 436922 - RNA, 18 nt, Human
gccaucaccaugugagaa

SEQ ID NO: 436923 - RNA, 18 nt, Human
gccaucaccauuccagag

SEQ ID NO: 436924 - RNA, 17 nt, Human
gccaucacccccuccag

SEQ ID NO: 436925 - RNA, 20 nt, Human
gccaucacccggcaucagag

SEQ ID NO: 436926 - RNA, 18 nt, Human
gccaucacccugucagga

SEQ ID NO: 436927 - RNA, 19 nt, Human
gccaucaccuaauccaaga

SEQ ID NO: 436928 - RNA, 21 nt, Human
gccaucaccuagcugccugaa

SEQ ID NO: 436929 - RNA, 32 nt, Human
gccaucaccugugccagcacugugcagcugau

SEQ ID NO: 436930 - RNA, 19 nt, Human
gccaucacguaucccugaa

SEQ ID NO: 436931 - RNA, 32 nt, Human
gccaucacuaacggauccccagcgucugucua

SEQ ID NO: 436932 - RNA, 18 nt, Human
gccaucacuaccaaccag

SEQ ID NO: 436933 - RNA, 32 nt, Human
gccaucacucaaggacuucucuccaggccccg

SEQ ID NO: 436934 - RNA, 32 nt, Human
gccaucacucacugccaccugggccaucaacu

SEQ ID NO: 436935 - RNA, 18 nt, Human
gccaucacugccagucag

SEQ ID NO: 436936 - RNA, 16 nt, Human
gccaucacugcccagg

SEQ ID NO: 436937 - RNA, 20 nt, Human
gccaucacugcuggacagga

SEQ ID NO: 436938 - RNA, 20 nt, Human
gccaucacugcuuggaagag

SEQ ID NO: 436939 - RNA, 19 nt, Human
gccaucacugucacaagaa

SEQ ID NO: 436940 - RNA, 32 nt, Human
gccaucacuguuuucuccuaugaaggacacaa

SEQ ID NO: 436941 - RNA, 18 nt, Human
gccaucacuuuuucagga

SEQ ID NO: 436942 - RNA, 32 nt, Human
gccaucagagagaguguauguucacccuaucu

SEQ ID NO: 436943 - RNA, 24 nt, Human
gccaucagcagaaagagacccuga

SEQ ID NO: 436944 - RNA, 20 nt, Human
gccaucagcaucacaaggca

SEQ ID NO: 436945 - RNA, 23 nt, Human
gccaucagcugcacagcccucca

SEQ ID NO: 436946 - RNA, 21 nt, Human
gccaucaggccccacccagga

SEQ ID NO: 436947 - RNA, 17 nt, Human
gccaucaggcucccaga

SEQ ID NO: 436948 - RNA, 32 nt, Human
gccaucaggguguauuggaggcugacacuuaa

SEQ ID NO: 436949 - RNA, 32 nt, Human
gccaucaguuccauccugacugcuuguuaaga

SEQ ID NO: 436950 - RNA, 32 nt, Human
gccaucauauccaccuauuugcagccuaacuu

SEQ ID NO: 436951 - RNA, 18 nt, Human
gccaucaucaaccaagaa

SEQ ID NO: 436952 - RNA, 32 nt, Human
gccaucaucacuuuuugaauuucuuugggggu

SEQ ID NO: 436953 - RNA, 32 nt, Human
gccaucaucccucccagccuauuucugcuccu

SEQ ID NO: 436954 - RNA, 20 nt, Human
gccaucaucuccccaccucu

SEQ ID NO: 436955 - RNA, 32 nt, Human
gccaucaucugcaaaagggaggaaagaaugcc

SEQ ID NO: 436956 - RNA, 32 nt, Human
gccaucaugaggaaucaaugagagaucuguga

SEQ ID NO: 436957 - RNA, 32 nt, Human
gccaucaugcacaucugacugcagccccagcg

SEQ ID NO: 436958 - RNA, 31 nt, Human
gccaucaugcaugcuuuugaaaacuuagaga

SEQ ID NO: 436959 - RNA, 32 nt, Human
gccaucaugccugacuaauuuuguauuuuuag

SEQ ID NO: 436960 - RNA, 32 nt, Human
gccaucaugccugacuaauuuuuguauuuuua

SEQ ID NO: 436961 - RNA, 32 nt, Human
gccaucaugccuggcuaauuuuuguauuuuua

SEQ ID NO: 436962 - RNA, 32 nt, Human
gccauccaacuggguccaguucugauggcauu

SEQ ID NO: 436963 - RNA, 32 nt, Human
gccauccaagacaucugcauccuaaucccugg

SEQ ID NO: 436964 - RNA, 32 nt, Human
gccauccaaguugccccuacuuaguggcuugc

SEQ ID NO: 436965 - RNA, 22 nt, Human
gccauccacagcccacccauca

SEQ ID NO: 436966 - RNA, 26 nt, Human
gccauccaccccuucucuucauccuu

SEQ ID NO: 436967 - RNA, 32 nt, Human
gccauccacccuacugguuaucugauagaaca

SEQ ID NO: 436968 - RNA, 32 nt, Human
gccauccacugcagacgccuggagagggacag

SEQ ID NO: 436969 - RNA, 32 nt, Human
gccauccagacccuggaugagaaugacaaugc

SEQ ID NO: 436970 - RNA, 32 nt, Human
gccauccagagggagugcagggcgcacagucu

SEQ ID NO: 436971 - RNA, 17 nt, Human
gccauccagcacccaga

SEQ ID NO: 436972 - RNA, 32 nt, Human
gccauccagccgugccccagccuggaccccug

SEQ ID NO: 436973 - RNA, 19 nt, Human
gccauccaggccggcugcu

SEQ ID NO: 436974 - RNA, 19 nt, Human
gccauccauccauccaucc

SEQ ID NO: 436975 - RNA, 32 nt, Human
gccauccauccauuugauagguuuugcaaaga

SEQ ID NO: 436976 - RNA, 32 nt, Human
gccauccaugccaucccugccugugccuagau

SEQ ID NO: 436977 - RNA, 26 nt, Human
gccauccauuaccuccauccauccuu

SEQ ID NO: 436978 - RNA, 19 nt, Human
gccauccauuccuccaucc

SEQ ID NO: 436979 - RNA, 32 nt, Human
gccaucccagccacagucguccagggaaacgg

SEQ ID NO: 436980 - RNA, 32 nt, Human
gccaucccauagcuccuccucuucuggcugcc

SEQ ID NO: 436981 - RNA, 32 nt, Human
gccaucccauguuguaaacagcuguuccaaag

SEQ ID NO: 436982 - RNA, 32 nt, Human
gccauccccacuuccuccucuaccccaacaca

SEQ ID NO: 436983 - RNA, 32 nt, Human
gccaucccccuucgacuguuuucccaccauaa

SEQ ID NO: 436984 - RNA, 32 nt, Human
gccaucccccuucugugugucccucuccccca

SEQ ID NO: 436985 - RNA, 32 nt, Human
gccauccccucagaacuggaggagccaauuaa

SEQ ID NO: 436986 - RNA, 32 nt, Human
gccauccccugcccccucccaggcugaagauc

SEQ ID NO: 436987 - RNA, 32 nt, Human
gccauccccugccugccaccugccccucggcu

SEQ ID NO: 436988 - RNA, 19 nt, Human
gccaucccgccuuuccucc

SEQ ID NO: 436989 - RNA, 32 nt, Human
gccaucccugcacuugagcucaggggcucagg

SEQ ID NO: 436990 - RNA, 32 nt, Human
gccaucccugcuccuuuggggccucauuagug

SEQ ID NO: 436991 - RNA, 32 nt, Human
gccaucccugggcugcucacaggaaguagcug

SEQ ID NO: 436992 - RNA, 32 nt, Human
gccaucccuucauuuaaccaagcuauucaagu

SEQ ID NO: 436993 - RNA, 32 nt, Human
gccauccgcugcggcuacucuccagggccaca

SEQ ID NO: 436994 - RNA, 20 nt, Human
gccauccgcuggcuuggcca

SEQ ID NO: 436995 - RNA, 32 nt, Human
gccauccgcuugguggaggucgagugggugca

SEQ ID NO: 436996 - RNA, 32 nt, Human
gccauccgggcauguggccacacugcucacca

SEQ ID NO: 436997 - RNA, 32 nt, Human
gccauccgucacugcacucaugccucccucug

SEQ ID NO: 436998 - RNA, 19 nt, Human
gccauccuaggugccaucc

SEQ ID NO: 436999 - RNA, 21 nt, Human
gccauccuccccgccuugggg

SEQ ID NO: 437000 - RNA, 32 nt, Human
gccauccucccgcuuccggaggagcgcagauc

SEQ ID NO: 437001 - RNA, 32 nt, Human
gccauccuccugccucagcuacucaggagaau

SEQ ID NO: 437002 - RNA, 32 nt, Human
gccauccucucaccccagaauauccuaauaaa

SEQ ID NO: 437003 - RNA, 32 nt, Human
gccauccugaggacacagccaggacggcagag

SEQ ID NO: 437004 - RNA, 32 nt, Human
gccauccugcaagcuccacagccucgggcugc

SEQ ID NO: 437005 - RNA, 32 nt, Human
gccauccugcagcagguccgcauccaggagau

SEQ ID NO: 437006 - RNA, 22 nt, Human
gccauccugcccagcugcccca

SEQ ID NO: 437007 - RNA, 32 nt, Human
gccauccugccugcccugagccgcugcuuuga

SEQ ID NO: 437008 - RNA, 32 nt, Human
gccauccugccuggcacuggcugaugggcacc

SEQ ID NO: 437009 - RNA, 32 nt, Human
gccauccuggaacccaggugagggcaagauga

SEQ ID NO: 437010 - RNA, 32 nt, Human
gccauccuggacuucccugaaugaggccgucu

SEQ ID NO: 437011 - RNA, 32 nt, Human
gccauccuggccagacacccuagcaggaaggg

SEQ ID NO: 437012 - RNA, 32 nt, Human
gccauccuggccugguggagguuggggagcug

SEQ ID NO: 437013 - RNA, 32 nt, Human
gccauccugggugcccagggcagagcaggcuu

SEQ ID NO: 437014 - RNA, 16 nt, Human
gccauccuguccaggu

SEQ ID NO: 437015 - RNA, 32 nt, Human
gccauccugugcugugcucaagcgggcagcca

SEQ ID NO: 437016 - RNA, 17 nt, Human
gccauccuuaaagggaa

SEQ ID NO: 437017 - RNA, 21 nt, Human
gccauccuuaaagggaacuga

SEQ ID NO: 437018 - RNA, 32 nt, Human
gccauccuuaagucugcucccacccucaguag

SEQ ID NO: 437019 - RNA, 32 nt, Human
gccauccuuaccccacacuuuuauuguugucg

SEQ ID NO: 437020 - RNA, 32 nt, Human
gccauccuucuuucuaauuccucuaaagcaag

SEQ ID NO: 437021 - RNA, 26 nt, Human
gccauccuuguuuucccuccauccuu

SEQ ID NO: 437022 - RNA, 32 nt, Human
gccaucgacuccugccugaguuuccagccugc

SEQ ID NO: 437023 - RNA, 32 nt, Human
gccaucgcacuccagacuacagccugggugac

SEQ ID NO: 437024 - RNA, 18 nt, Human
gccaucgcaucuggcugc

SEQ ID NO: 437025 - RNA, 19 nt, Human
gccaucgcccagcccagaa

SEQ ID NO: 437026 - RNA, 32 nt, Human
gccaucgccugcucccuccacacggcccuugg

SEQ ID NO: 437027 - RNA, 18 nt, Human
gccaucgccuugggccag

SEQ ID NO: 437028 - RNA, 32 nt, Human
gccaucgcgccacugcacucuagccuggguga

SEQ ID NO: 437029 - RNA, 32 nt, Human
gccaucggaagagagggcugagccaugggggu

SEQ ID NO: 437030 - RNA, 18 nt, Human
gccaucggcccucaggug

SEQ ID NO: 437031 - RNA, 32 nt, Human
gccaucggcuuuguggucaucauguuccaccc

SEQ ID NO: 437032 - RNA, 32 nt, Human
gccaucgggcaggggugacgaggugcugcuuc

SEQ ID NO: 437033 - RNA, 32 nt, Human
gccaucgggccagccaaggcugcucagagagg

SEQ ID NO: 437034 - RNA, 32 nt, Human
gccaucggucuagaaccacuaaccccgcauug

SEQ ID NO: 437035 - RNA, 22 nt, Human
gccaucggugcgccggggccag

SEQ ID NO: 437036 - RNA, 32 nt, Human
gccaucguccccaccuccaccugggccgcccg

SEQ ID NO: 437037 - RNA, 32 nt, Human
gccaucguggguucccugagcccagccagccu

SEQ ID NO: 437038 - RNA, 32 nt, Human
gccaucguguggccgccaccuccgggaagccu

SEQ ID NO: 437039 - RNA, 32 nt, Human
gccaucguuuccaugacaacagacacaacaca

SEQ ID NO: 437040 - RNA, 32 nt, Human
gccaucuaugccaguuacccuggagaggacuc

SEQ ID NO: 437041 - RNA, 32 nt, Human
gccaucucacagucccggcgcuccagagcccc

SEQ ID NO: 437042 - RNA, 32 nt, Human
gccaucucaguuaccagugacauggaagaucg

SEQ ID NO: 437043 - RNA, 32 nt, Human
gccaucucaguugcugcagugcagugaauuac

SEQ ID NO: 437044 - RNA, 20 nt, Human
gccaucuccaccugccccca

SEQ ID NO: 437045 - RNA, 32 nt, Human
gccaucuccagccggccaccucaggccccugu

SEQ ID NO: 437046 - RNA, 18 nt, Human
gccaucuccugucaggua

SEQ ID NO: 437047 - RNA, 32 nt, Human
gccaucucgccacugcagcucggguccagaaa

SEQ ID NO: 437048 - RNA, 32 nt, Human
gccaucucuccucuuuaugcucguguuucugg

SEQ ID NO: 437049 - RNA, 32 nt, Human
gccaucucugcucucacuggggacccuccucc

SEQ ID NO: 437050 - RNA, 32 nt, Human
gccaucucuguucugcaggugagaggauuuaa

SEQ ID NO: 437051 - RNA, 32 nt, Human
gccaucugaagcagcagguugcaggacaaaug

SEQ ID NO: 437052 - RNA, 32 nt, Human
gccaucugaagccaccucucugccuguuccuc

SEQ ID NO: 437053 - RNA, 19 nt, Human
gccaucugacuucuaccuc

SEQ ID NO: 437054 - RNA, 32 nt, Human
gccaucugagcacaccugucauaugcaaacaa

SEQ ID NO: 437055 - RNA, 32 nt, Human
gccaucugcagccagguggcccugccacacug

SEQ ID NO: 437056 - RNA, 17 nt, Human
gccaucugcucgugucc

SEQ ID NO: 437057 - RNA, 32 nt, Human
gccaucugcugcucccuuuuccacuuuucuau

SEQ ID NO: 437058 - RNA, 32 nt, Human
gccaucugggccauucagagacuggagugaga

SEQ ID NO: 437059 - RNA, 32 nt, Human
gccaucugggucugauguucuguuccauugua

SEQ ID NO: 437060 - RNA, 32 nt, Human
gccaucugucacccucuauaucauucagccau

SEQ ID NO: 437061 - RNA, 32 nt, Human
gccaucugucacccucuauauuauucagccau

SEQ ID NO: 437062 - RNA, 32 nt, Human
gccaucugucugcuucagaccaccucaggcuc

SEQ ID NO: 437063 - RNA, 19 nt, Human
gccaucugugcagagccag

SEQ ID NO: 437064 - RNA, 32 nt, Human
gccaucugugcccagcucugcaggccaggcac

SEQ ID NO: 437065 - RNA, 32 nt, Human
gccaucugugugacuccggugcgaguggaguc

SEQ ID NO: 437066 - RNA, 19 nt, Human
gccaucuuagcggcugcug

SEQ ID NO: 437067 - RNA, 32 nt, Human
gccaucuuagcuacauuaaauggcuacacagu

SEQ ID NO: 437068 - RNA, 32 nt, Human
gccaucuuaucacagaccucaggggcuccaac

SEQ ID NO: 437069 - RNA, 32 nt, Human
gccaucuucaaaccagaagaucuuaauuagua

SEQ ID NO: 437070 - RNA, 17 nt, Human
gccaucuucacccagaa

SEQ ID NO: 437071 - RNA, 32 nt, Human
gccaucuucauaauuucuuugucucacagaag

SEQ ID NO: 437072 - RNA, 32 nt, Human
gccaucuucgcugcuagucaggguuccauccu

SEQ ID NO: 437073 - RNA, 32 nt, Human
gccaucuucucccccauccccuucucuggggg

SEQ ID NO: 437074 - RNA, 32 nt, Human
gccaucuuuuccuauguuucuucacaugguuu

SEQ ID NO: 437075 - RNA, 32 nt, Human
gccaucuuuuucacuuuauguaaaggaguguu

SEQ ID NO: 437076 - RNA, 28 nt, Human
gccaugaacagcccugagguucuugagg

SEQ ID NO: 437077 - RNA, 32 nt, Human
gccaugaagaaguaggggcugaagaggaaggu

SEQ ID NO: 437078 - RNA, 20 nt, Human
gccaugaagacaccaaggca

SEQ ID NO: 437079 - RNA, 32 nt, Human
gccaugaagcaauaggagccacgaggaacaga

SEQ ID NO: 437080 - RNA, 32 nt, Human
gccaugaagcagagagggaugcuggggaaaca

SEQ ID NO: 437081 - RNA, 28 nt, Human
gccaugaagggcaaggaggagaaggagg

SEQ ID NO: 437082 - RNA, 32 nt, Human
gccaugaauggugcccuuauuaacaacagugu

SEQ ID NO: 437083 - RNA, 32 nt, Human
gccaugacagcagccacagccuccagggaccc

SEQ ID NO: 437084 - RNA, 20 nt, Human
gccaugacaucagcaugcug

SEQ ID NO: 437085 - RNA, 32 nt, Human
gccaugacccaacugcccuucuugucaguugc

SEQ ID NO: 437086 - RNA, 28 nt, Human
gccaugacccagccggugccccggcucu

SEQ ID NO: 437087 - RNA, 18 nt, Human
gccaugaccuucaccucu

SEQ ID NO: 437088 - RNA, 32 nt, Human
gccaugacuguagcaaggcuugauagcagagg

SEQ ID NO: 437089 - RNA, 32 nt, Human
gccaugacuguugcugcacuccagccugagug

SEQ ID NO: 437090 - RNA, 32 nt, Human
gccaugacuucuacaagcagauuucuuuucuu

SEQ ID NO: 437091 - RNA, 28 nt, Human
gccaugagaacuuccuaccuucugcugu

SEQ ID NO: 437092 - RNA, 32 nt, Human
gccaugagaagacucuuccugggcacggcgug

SEQ ID NO: 437093 - RNA, 28 nt, Human
gccaugagaaugaagagaggaugggaag

SEQ ID NO: 437094 - RNA, 32 nt, Human
gccaugagaaugagcaaagccuagccaaugga

SEQ ID NO: 437095 - RNA, 32 nt, Human
gccaugagagagagcggaaggagcagcugaug

SEQ ID NO: 437096 - RNA, 32 nt, Human
gccaugagagccaagaucgagcagaaccgcaa

SEQ ID NO: 437097 - RNA, 19 nt, Human
gccaugagauggccaggua

SEQ ID NO: 437098 - RNA, 28 nt, Human
gccaugagccggagucucuugcucuggu

SEQ ID NO: 437099 - RNA, 30 nt, Human
gccaugagccucucugagcuuguuuguugc

SEQ ID NO: 437100 - RNA, 31 nt, Human
gccaugagccucucugagcuuguuuguugcu

SEQ ID NO: 437101 - RNA, 18 nt, Human
gccaugagcgcgcugcug

SEQ ID NO: 437102 - RNA, 32 nt, Human
gccaugagcuacaauccgucuguccaugggag

SEQ ID NO: 437103 - RNA, 32 nt, Human
gccaugaggagccaugaggagccucaguuuug

SEQ ID NO: 437104 - RNA, 32 nt, Human
gccaugaggccugcuuggccggggaucgagac

SEQ ID NO: 437105 - RNA, 32 nt, Human
gccaugaggguggaucacuugaggucagaagu

SEQ ID NO: 437106 - RNA, 32 nt, Human
gccaugagugagacaggcuguacugggacaac

SEQ ID NO: 437107 - RNA, 32 nt, Human
gccaugaguggggaagagcaacaggcgagaug

SEQ ID NO: 437108 - RNA, 32 nt, Human
gccaugaguguccaucccaaagcugcccugca

SEQ ID NO: 437109 - RNA, 32 nt, Human
gccaugaguuacucgggaggcugaggcaggag

SEQ ID NO: 437110 - RNA, 32 nt, Human
gccaugauauugccagccugggugacagagca

SEQ ID NO: 437111 - RNA, 28 nt, Human
gccaugaucaagcguuuccuggaggaca

SEQ ID NO: 437112 - RNA, 32 nt, Human
gccaugaucccuuugagagguggcucaaaagc

SEQ ID NO: 437113 - RNA, 32 nt, Human
gccaugauggacugggcgaggggugggacugg

SEQ ID NO: 437114 - RNA, 32 nt, Human
gccaugaugguaccccugcacuccagcccagg

SEQ ID NO: 437115 - RNA, 22 nt, Human
gccaugcaauggugucugugua

SEQ ID NO: 437116 - RNA, 32 nt, Human
gccaugcaauuggcaugacaccugccaugcca

SEQ ID NO: 437117 - RNA, 32 nt, Human
gccaugcacaggcccgucccacccugcaugug

SEQ ID NO: 437118 - RNA, 19 nt, Human
gccaugcaccggggcucag

SEQ ID NO: 437119 - RNA, 32 nt, Human
gccaugcagacaccucauggcacuucaaacua

SEQ ID NO: 437120 - RNA, 28 nt, Human
gccaugcagagcacugaccuaggcaaca

SEQ ID NO: 437121 - RNA, 32 nt, Human
gccaugcagcacuuaaacuugugauaaggaag

SEQ ID NO: 437122 - RNA, 32 nt, Human
gccaugcagcugcacuccccucccaggaaagg

SEQ ID NO: 437123 - RNA, 32 nt, Human
gccaugcagcuggcguagguggcaguugggcc

SEQ ID NO: 437124 - RNA, 32 nt, Human
gccaugcauaguggacccagcacuacagcaag

SEQ ID NO: 437125 - RNA, 32 nt, Human
gccaugcauugucacucugccuccgggacccc

SEQ ID NO: 437126 - RNA, 20 nt, Human
gccaugccaaugcacuccag

SEQ ID NO: 437127 - RNA, 32 nt, Human
gccaugccaaugcacuccagucugggcaacag

SEQ ID NO: 437128 - RNA, 28 nt, Human
gccaugccagcucugugccuggugcugu

SEQ ID NO: 437129 - RNA, 22 nt, Human
gccaugcccaccccagccccag

SEQ ID NO: 437130 - RNA, 32 nt, Human
gccaugcccagaggucugguccugaugcuggc

SEQ ID NO: 437131 - RNA, 32 nt, Human
gccaugcccagccuguuuuucuguucacuaua

SEQ ID NO: 437132 - RNA, 32 nt, Human
gccaugcccaggaggagcacuaaagcaaaggu

SEQ ID NO: 437133 - RNA, 32 nt, Human
gccaugccccacagagcuuacccaggagaaaa

SEQ ID NO: 437134 - RNA, 32 nt, Human
gccaugcccugagccacgucccucccccugca

SEQ ID NO: 437135 - RNA, 32 nt, Human
gccaugccugcuccucugccuggaccaggagg

SEQ ID NO: 437136 - RNA, 32 nt, Human
gccaugcgacgcggagaccacccggccgcggu

SEQ ID NO: 437137 - RNA, 32 nt, Human
gccaugcgagcccagcccuggugccucauggg

SEQ ID NO: 437138 - RNA, 32 nt, Human
gccaugcgagggauuccaugcccaccugcccu

SEQ ID NO: 437139 - RNA, 32 nt, Human
gccaugcgcacucuccagcagaaugucugcuu

SEQ ID NO: 437140 - RNA, 24 nt, Human
gccaugcgcuuguggaccucuaug

SEQ ID NO: 437141 - RNA, 32 nt, Human
gccaugcggcaccauucccggcuaauuuuugu

SEQ ID NO: 437142 - RNA, 32 nt, Human
gccaugcguggaacaucgaagccucagagagu

SEQ ID NO: 437143 - RNA, 23 nt, Human
gccaugcuccccccgaccuccag

SEQ ID NO: 437144 - RNA, 32 nt, Human
gccaugcuccucuuccccagacgccuggcugc

SEQ ID NO: 437145 - RNA, 18 nt, Human
gccaugcucuccccaggg

SEQ ID NO: 437146 - RNA, 28 nt, Human
gccaugcucuggcaaaaacccacagcuc

SEQ ID NO: 437147 - RNA, 32 nt, Human
gccaugcugaccugacaggcuccggccugccc

SEQ ID NO: 437148 - RNA, 22 nt, Human
gccaugcugacugcuugaaccu

SEQ ID NO: 437149 - RNA, 24 nt, Human
gccaugcugcccaggccagucuca

SEQ ID NO: 437150 - RNA, 32 nt, Human
gccaugcugccuccuuacauccuuuuuggaac

SEQ ID NO: 437151 - RNA, 28 nt, Human
gccaugcugcugcugcucacgcuugccc

SEQ ID NO: 437152 - RNA, 18 nt, Human
gccaugcuggcacccaga

SEQ ID NO: 437153 - RNA, 32 nt, Human
gccaugcuggccacccugcagccugaccaccu

SEQ ID NO: 437154 - RNA, 32 nt, Human
gccaugcuggcugcugucacugagcgggacuc

SEQ ID NO: 437155 - RNA, 32 nt, Human
gccaugcugggguccuacccagccuggaucug

SEQ ID NO: 437156 - RNA, 32 nt, Human
gccaugcuugagaagggaggauaaaaacuuuc

SEQ ID NO: 437157 - RNA, 32 nt, Human
gccaugcuugguggucaugccuguaaucccag

SEQ ID NO: 437158 - RNA, 21 nt, Human
gccauggacaggcugggcccc

SEQ ID NO: 437159 - RNA, 32 nt, Human
gccauggacccagcugagcagagcagacgcuu

SEQ ID NO: 437160 - RNA, 32 nt, Human
gccauggacucugcccagagccuucuuguuua

SEQ ID NO: 437161 - RNA, 32 nt, Human
gccauggagcacuguuucucccuuuuuacuau

SEQ ID NO: 437162 - RNA, 32 nt, Human
gccauggagcagaggagccucucaccuccugu

SEQ ID NO: 437163 - RNA, 28 nt, Human
gccauggagcagcuucgcgccgccgccc

SEQ ID NO: 437164 - RNA, 28 nt, Human
gccauggagcugcuaaagcugaaccgga

SEQ ID NO: 437165 - RNA, 28 nt, Human
gccauggagguggugggugacuucgagu

SEQ ID NO: 437166 - RNA, 32 nt, Human
gccauggaguccucuuaagagggacgagggcc

SEQ ID NO: 437167 - RNA, 32 nt, Human
gccauggagugagacccaggagccggacacuu

SEQ ID NO: 437168 - RNA, 28 nt, Human
gccauggaugaggagcgcgcccucuaca

SEQ ID NO: 437169 - RNA, 32 nt, Human
gccauggauggaaaacgcucucugcucugcuu

SEQ ID NO: 437170 - RNA, 32 nt, Human
gccauggauggaggaggaagagauaaggacgu

SEQ ID NO: 437171 - RNA, 23 nt, Human
gccauggcaaagaccacagggaa

SEQ ID NO: 437172 - RNA, 28 nt, Human
gccauggcaaagcaguacgacucggugg

SEQ ID NO: 437173 - RNA, 32 nt, Human
gccauggcacucacuccagccugggcaacaag

SEQ ID NO: 437174 - RNA, 32 nt, Human
gccauggcagagcugacgcuccaccucccacc

SEQ ID NO: 437175 - RNA, 32 nt, Human
gccauggcagauuuccagccuggugaugcugu

SEQ ID NO: 437176 - RNA, 32 nt, Human
gccauggcaggacuuagaguugcgaguuaaga

SEQ ID NO: 437177 - RNA, 17 nt, Human
gccauggccacacagca

SEQ ID NO: 437178 - RNA, 32 nt, Human
gccauggccacagccagauggaggagcccauc

SEQ ID NO: 437179 - RNA, 24 nt, Human
gccauggccacuggcuccagcugg

SEQ ID NO: 437180 - RNA, 22 nt, Human
gccauggccaugggcagaggcg

SEQ ID NO: 437181 - RNA, 21 nt, Human
gccauggccaugguccccagc

SEQ ID NO: 437182 - RNA, 28 nt, Human
gccauggcccaggucagcaucaacaaug

SEQ ID NO: 437183 - RNA, 32 nt, Human
gccauggccccucugccaagccugugugcgau

SEQ ID NO: 437184 - RNA, 28 nt, Human
gccauggccgacuccgagcugcagcugg

SEQ ID NO: 437185 - RNA, 21 nt, Human
gccauggccggggacccgggg

SEQ ID NO: 437186 - RNA, 22 nt, Human
gccauggccugcaggggcucca

SEQ ID NO: 437187 - RNA, 32 nt, Human
gccauggccugggaugcgggcccuucuuccuc

SEQ ID NO: 437188 - RNA, 28 nt, Human
gccauggcgaaggcgaagaaggucgggg

SEQ ID NO: 437189 - RNA, 28 nt, Human
gccauggcgcagcugggaaagcugcuca

SEQ ID NO: 437190 - RNA, 22 nt, Human
gccauggcucacgucuguaauc

SEQ ID NO: 437191 - RNA, 32 nt, Human
gccauggcuggcagagguuucuagggugggcc

SEQ ID NO: 437192 - RNA, 32 nt, Human
gccauggcuucucauuuacaccaacagguuuc

SEQ ID NO: 437193 - RNA, 21 nt, Human
gccaugggaaggagcccaggg

SEQ ID NO: 437194 - RNA, 32 nt, Human
gccaugggaaguguuuacacuugggggacaag

SEQ ID NO: 437195 - RNA, 32 nt, Human
gccaugggaauuccuccaucugcagcggucac

SEQ ID NO: 437196 - RNA, 32 nt, Human
gccaugggagagcacaacagggcacuguguaa

SEQ ID NO: 437197 - RNA, 19 nt, Human
gccaugggagcccaccucu

SEQ ID NO: 437198 - RNA, 32 nt, Human
gccaugggagucccugcugagcucggggcagg

SEQ ID NO: 437199 - RNA, 20 nt, Human
gccaugggcacagggcucag

SEQ ID NO: 437200 - RNA, 32 nt, Human
gccaugggccaggagaagacugugcuggguug

SEQ ID NO: 437201 - RNA, 32 nt, Human
gccaugggcuuguccuggaacugcuucaacuc

SEQ ID NO: 437202 - RNA, 32 nt, Human
gccauggggaacugucugcacagggugaguau

SEQ ID NO: 437203 - RNA, 22 nt, Human
gccauggggaucccaccuccag

SEQ ID NO: 437204 - RNA, 28 nt, Human
gccauggggcaggcgggcugcaaggggc

SEQ ID NO: 437205 - RNA, 32 nt, Human
gccauggggccggagccgcagugagcaccaug

SEQ ID NO: 437206 - RNA, 28 nt, Human
gccauggggcuggggcugcugcucccgc

SEQ ID NO: 437207 - RNA, 32 nt, Human
gccaugggggucuuugaacacaccucucuccu

SEQ ID NO: 437208 - RNA, 32 nt, Human
gccauggguggaggccagcagggcagcguguc

SEQ ID NO: 437209 - RNA, 32 nt, Human
gccauggguucugugcuggagggugcacggcc

SEQ ID NO: 437210 - RNA, 32 nt, Human
gccaugguaagggcuggugagguuggggagaa

SEQ ID NO: 437211 - RNA, 21 nt, Human
gccaugguaccgagggacuca

SEQ ID NO: 437212 - RNA, 28 nt, Human
gccauggucacccacagcaaguuucccg

SEQ ID NO: 437213 - RNA, 28 nt, Human
gccauggucggcagaagagcacugaucg

SEQ ID NO: 437214 - RNA, 18 nt, Human
gccauggugaaaacuuug

SEQ ID NO: 437215 - RNA, 32 nt, Human
gccauggugcuuuucaggggccuguguguaca

SEQ ID NO: 437216 - RNA, 32 nt, Human
gccauggugugugguuucugggaaccaccaac

SEQ ID NO: 437217 - RNA, 27 nt, Human
gccaugguuccaagcauggaacuacca

SEQ ID NO: 437218 - RNA, 32 nt, Human
gccaugguucggagaccaugugcguugugugc

SEQ ID NO: 437219 - RNA, 32 nt, Human
gccaugguuuggagaccaugugcguugugugc

SEQ ID NO: 437220 - RNA, 32 nt, Human
gccauguaacccgcucggcuccaggcugcgag

SEQ ID NO: 437221 - RNA, 32 nt, Human
gccauguacacgugggagguuggggcugagug

SEQ ID NO: 437222 - RNA, 32 nt, Human
gccauguacauacaguacucuuuuauuuuucu

SEQ ID NO: 437223 - RNA, 32 nt, Human
gccauguacucagaucagucaguugacugaaa

SEQ ID NO: 437224 - RNA, 32 nt, Human
gccauguacugcacugcccuggucgaaugcuc

SEQ ID NO: 437225 - RNA, 24 nt, Human
gccauguaggccaggcugguccca

SEQ ID NO: 437226 - RNA, 32 nt, Human
gccauguagggaggaccagggcagggccaggg

SEQ ID NO: 437227 - RNA, 19 nt, Human
gccaugucaccuggcugcu

SEQ ID NO: 437228 - RNA, 32 nt, Human
gccaugucacugaagagcuggagaccuauaga

SEQ ID NO: 437229 - RNA, 32 nt, Human
gccaugucagugccaggggcacuaggcuggca

SEQ ID NO: 437230 - RNA, 32 nt, Human
gccaugucauaaggaugcucaagcaguccuac

SEQ ID NO: 437231 - RNA, 32 nt, Human
gccauguccacaguuccuugggcugcugaggg

SEQ ID NO: 437232 - RNA, 21 nt, Human
gccaugucccccagccuggca

SEQ ID NO: 437233 - RNA, 32 nt, Human
gccaugucccccagccuggcauggcugcacug

SEQ ID NO: 437234 - RNA, 32 nt, Human
gccauguccguuaucucaucugaucuuuugcu

SEQ ID NO: 437235 - RNA, 28 nt, Human
gccaugucguccauccugccuuucacuc

SEQ ID NO: 437236 - RNA, 32 nt, Human
gccaugucuuggcugggauuacaggcaugagc

SEQ ID NO: 437237 - RNA, 32 nt, Human
gccaugugaaaguggucacucuccugguuaac

SEQ ID NO: 437238 - RNA, 32 nt, Human
gccaugugagccaccgcugccagcacagagcg

SEQ ID NO: 437239 - RNA, 22 nt, Human
gccaugugcugcagacccggag

SEQ ID NO: 437240 - RNA, 32 nt, Human
gccauguggaacugcuggagugcaguggcaug

SEQ ID NO: 437241 - RNA, 32 nt, Human
gccauguggaacugugugugaguuaaaccucu

SEQ ID NO: 437242 - RNA, 22 nt, Human
gccauguggccccaggugccac

SEQ ID NO: 437243 - RNA, 28 nt, Human
gccauguggcuagaaauccuccucacuu

SEQ ID NO: 437244 - RNA, 32 nt, Human
gccauguggcuuugcccagccugcugcaaucc

SEQ ID NO: 437245 - RNA, 25 nt, Human
gccauguggucccaggcuggucuca

SEQ ID NO: 437246 - RNA, 21 nt, Human
gccauguguccugucugugaa

SEQ ID NO: 437247 - RNA, 32 nt, Human
gccauguuaaguggccagcauuucaugaagga

SEQ ID NO: 437248 - RNA, 24 nt, Human
gccauguuacccaggcuggucuca

SEQ ID NO: 437249 - RNA, 32 nt, Human
gccauguuccuggagaagaggagccagccagg

SEQ ID NO: 437250 - RNA, 24 nt, Human
gccauguucgcuaggcuggucuca

SEQ ID NO: 437251 - RNA, 24 nt, Human
gccauguugaccaggcuggucuca

SEQ ID NO: 437252 - RNA, 23 nt, Human
gccauguugacgagacuggucuc

SEQ ID NO: 437253 - RNA, 23 nt, Human
gccauguugcccagacuggucuu

SEQ ID NO: 437254 - RNA, 23 nt, Human
gccauguugcccagacugguuuu

SEQ ID NO: 437255 - RNA, 22 nt, Human
gccauguugcccaggcgaucca

SEQ ID NO: 437256 - RNA, 24 nt, Human
gccauguugcccaggcuaaucuca

SEQ ID NO: 437257 - RNA, 32 nt, Human
gccauguugcccaggcuggaagugucuauguu

SEQ ID NO: 437258 - RNA, 22 nt, Human
gccauguugcccaggcuggucu

SEQ ID NO: 437259 - RNA, 23 nt, Human
gccauguugcccaggcuggucuc

SEQ ID NO: 437260 - RNA, 32 nt, Human
gccauguugcccaggcuggucugaagcugcug

SEQ ID NO: 437261 - RNA, 32 nt, Human
gccauguugcccaggcuggucuugagaacucc

SEQ ID NO: 437262 - RNA, 24 nt, Human
gccauguugcucaggcugaucuca

SEQ ID NO: 437263 - RNA, 24 nt, Human
gccauguugcucaggcuggucuca

SEQ ID NO: 437264 - RNA, 24 nt, Human
gccauguuggccaagcugaucuca

SEQ ID NO: 437265 - RNA, 23 nt, Human
gccauguuggccagacuggucuc

SEQ ID NO: 437266 - RNA, 24 nt, Human
gccauguuggccaggcuggucuca

SEQ ID NO: 437267 - RNA, 24 nt, Human
gccauguuggccggacuggucuua

SEQ ID NO: 437268 - RNA, 32 nt, Human
gccauguuuacaugauuugaugugcaauaggg

SEQ ID NO: 437269 - RNA, 22 nt, Human
gccauguuugcaaacugauuca

SEQ ID NO: 437270 - RNA, 32 nt, Human
gccauuaagaacacuugugagcugagcacggu

SEQ ID NO: 437271 - RNA, 32 nt, Human
gccauuaaggguucacaagaaaaugaagggaa

SEQ ID NO: 437272 - RNA, 18 nt, Human
gccauuacaauccaccuc

SEQ ID NO: 437273 - RNA, 32 nt, Human
gccauuacacuccagccugggugacagagcaa

SEQ ID NO: 437274 - RNA, 32 nt, Human
gccauuacacuccagccugggugacagaguga

SEQ ID NO: 437275 - RNA, 32 nt, Human
gccauuacagccgccucuaccuagaaaaguag

SEQ ID NO: 437276 - RNA, 32 nt, Human
gccauuacuucugcuuucguaucuccucaggc

SEQ ID NO: 437277 - RNA, 30 nt, Human
gccauuagccucucccuucucucugugagg

SEQ ID NO: 437278 - RNA, 31 nt, Human
gccauuaggaaacugucgguuugcuuugauu

SEQ ID NO: 437279 - RNA, 32 nt, Human
gccauuauccuuucucccuccuguauccucag

SEQ ID NO: 437280 - RNA, 32 nt, Human
gccauuaucugggguguggccucugccagcaa

SEQ ID NO: 437281 - RNA, 32 nt, Human
gccauucacagaagcucucaauuucagaugau

SEQ ID NO: 437282 - RNA, 32 nt, Human
gccauucacauauuuucuugggugaaaugucu

SEQ ID NO: 437283 - RNA, 32 nt, Human
gccauucagaccccauuaagaagguuggcuug

SEQ ID NO: 437284 - RNA, 20 nt, Human
gccauucagcccccaagguc

SEQ ID NO: 437285 - RNA, 32 nt, Human
gccauucaggaggccagcugggaagacaaaau

SEQ ID NO: 437286 - RNA, 32 nt, Human
gccauucagugcccuccacauggccuugccac

SEQ ID NO: 437287 - RNA, 32 nt, Human
gccauucaucucuccauugguuucccaaaugu

SEQ ID NO: 437288 - RNA, 22 nt, Human
gccauucauuauuccucaagug

SEQ ID NO: 437289 - RNA, 32 nt, Human
gccauucauucauaaagaucuggauuugcuuu

SEQ ID NO: 437290 - RNA, 32 nt, Human
gccauuccaagucccagaugucccucuucccc

SEQ ID NO: 437291 - RNA, 32 nt, Human
gccauuccacagugcuccccugccucaccgcu

SEQ ID NO: 437292 - RNA, 32 nt, Human
gccauuccauagugcuccccugccucaccacc

SEQ ID NO: 437293 - RNA, 32 nt, Human
gccauuccccacccaucuccucccagaacguc

SEQ ID NO: 437294 - RNA, 32 nt, Human
gccauucccuggaagagacaaguggaucugau

SEQ ID NO: 437295 - RNA, 32 nt, Human
gccauucccuguccuggcccccuucagcaacc

SEQ ID NO: 437296 - RNA, 32 nt, Human
gccauuccuagaaaauguccuacugcccugca

SEQ ID NO: 437297 - RNA, 18 nt, Human
gccauuccugcagcauca

SEQ ID NO: 437298 - RNA, 17 nt, Human
gccauucgcacccagga

SEQ ID NO: 437299 - RNA, 31 nt, Human
gccauucucaauaaacauuugcugaagaaau

SEQ ID NO: 437300 - RNA, 32 nt, Human
gccauucucacacccaccccucugcccaguuu

SEQ ID NO: 437301 - RNA, 32 nt, Human
gccauucuccaccucaguaucugcuuucgggg

SEQ ID NO: 437302 - RNA, 32 nt, Human
gccauucuccugccucagcuacucaggaggcu

SEQ ID NO: 437303 - RNA, 32 nt, Human
gccauucucucacaucccgugcggucaggaag

SEQ ID NO: 437304 - RNA, 32 nt, Human
gccauucugaggaacaucuccaaggaacggga

SEQ ID NO: 437305 - RNA, 32 nt, Human
gccauucugccuuucugacauuuccuugggaa

SEQ ID NO: 437306 - RNA, 32 nt, Human
gccauucugcugccucagccuccugaguagcu

SEQ ID NO: 437307 - RNA, 32 nt, Human
gccauucugggagcuggggaaccuggucucaa

SEQ ID NO: 437308 - RNA, 32 nt, Human
gccauucuuaaucugauggagauuuguuuaua

SEQ ID NO: 437309 - RNA, 32 nt, Human
gccauucuucaucugcucuggacaucucaguc

SEQ ID NO: 437310 - RNA, 32 nt, Human
gccauucuugaagaaagacaaggauaaagaag

SEQ ID NO: 437311 - RNA, 32 nt, Human
gccauucuuucauuccuuuacuuucauaauaa

SEQ ID NO: 437312 - RNA, 16 nt, Human
gccauugaagacuuug

SEQ ID NO: 437313 - RNA, 20 nt, Human
gccauugaauguaaagggga

SEQ ID NO: 437314 - RNA, 32 nt, Human
gccauugagacaccugcaugucugguguuugu

SEQ ID NO: 437315 - RNA, 32 nt, Human
gccauugaggaaguggggccaacagagagguc

SEQ ID NO: 437316 - RNA, 32 nt, Human
gccauugaggguuucagagagccuuuuucuag

SEQ ID NO: 437317 - RNA, 32 nt, Human
gccauugaguagcugggaugacaggcacaugc

SEQ ID NO: 437318 - RNA, 32 nt, Human
gccauugauuauuauuauuccuaaagaaaaug

SEQ ID NO: 437319 - RNA, 32 nt, Human
gccauugauucugccagcggcuccuaaaccgc

SEQ ID NO: 437320 - RNA, 32 nt, Human
gccauugauuguuccaugcacugugcauaccc

SEQ ID NO: 437321 - RNA, 32 nt, Human
gccauugcacaccagucugggugacagagaaa

SEQ ID NO: 437322 - RNA, 32 nt, Human
gccauugcacagcagccugggugacagagcga

SEQ ID NO: 437323 - RNA, 32 nt, Human
gccauugcacuacagccugggugacagagcaa

SEQ ID NO: 437324 - RNA, 32 nt, Human
gccauugcacuccaaccugggugacagaguga

SEQ ID NO: 437325 - RNA, 32 nt, Human
gccauugcacuccacacuccagccugagcaac

SEQ ID NO: 437326 - RNA, 32 nt, Human
gccauugcacuccagccugggugacagaacga

SEQ ID NO: 437327 - RNA, 32 nt, Human
gccauugcacuccagccugggugacagagcaa

SEQ ID NO: 437328 - RNA, 32 nt, Human
gccauugcacuccagccugggugacagagcga

SEQ ID NO: 437329 - RNA, 32 nt, Human
gccauugcacuccagccugggugacagaguaa

SEQ ID NO: 437330 - RNA, 32 nt, Human
gccauugcacuccagccugggugacagaguga

SEQ ID NO: 437331 - RNA, 32 nt, Human
gccauugcacuccagccugggugacagugaga

SEQ ID NO: 437332 - RNA, 32 nt, Human
gccauugcacuccagcuugggugacagaguga

SEQ ID NO: 437333 - RNA, 32 nt, Human
gccauugcacuccagucugggugacagagcaa

SEQ ID NO: 437334 - RNA, 32 nt, Human
gccauugcacucuagccuaggugacagaguga

SEQ ID NO: 437335 - RNA, 32 nt, Human
gccauugcacuucagccugggugacagaguga

SEQ ID NO: 437336 - RNA, 32 nt, Human
gccauugcauuccagccuaggcaacacgagca

SEQ ID NO: 437337 - RNA, 32 nt, Human
gccauugcauuccagccugggcaacaagagcg

SEQ ID NO: 437338 - RNA, 32 nt, Human
gccauugcauuccagccugggugacagagcga

SEQ ID NO: 437339 - RNA, 32 nt, Human
gccauugcgcuccagccuaggugacagagcaa

SEQ ID NO: 437340 - RNA, 15 nt, Human
gccauugcuagggag

SEQ ID NO: 437341 - RNA, 32 nt, Human
gccauugcugcugccucugccucggagaagcc

SEQ ID NO: 437342 - RNA, 32 nt, Human
gccauugcugcugugcagaaggucaguccuac

SEQ ID NO: 437343 - RNA, 21 nt, Human
gccauuggacagccggucuca

SEQ ID NO: 437344 - RNA, 32 nt, Human
gccauuggagagacagcgcagagcagggggcg

SEQ ID NO: 437345 - RNA, 21 nt, Human
gccauuggccagagcccggag

SEQ ID NO: 437346 - RNA, 32 nt, Human
gccauuggcuccuaaaagagcuacuuaugagu

SEQ ID NO: 437347 - RNA, 32 nt, Human
gccauugguucagcacuguccugcugcucccc

SEQ ID NO: 437348 - RNA, 32 nt, Human
gccauuguacuccugccuaggugacagagcaa

SEQ ID NO: 437349 - RNA, 32 nt, Human
gccauuguaugaagccacaaagugggggagaa

SEQ ID NO: 437350 - RNA, 32 nt, Human
gccauugucacagccucauuuguaagcagcac

SEQ ID NO: 437351 - RNA, 32 nt, Human
gccauuguccccagcugaggaccaggugucuc

SEQ ID NO: 437352 - RNA, 32 nt, Human
gccauugucccuugccuagccugggccuaaaa

SEQ ID NO: 437353 - RNA, 32 nt, Human
gccauugucucagccucugccacuucccagac

SEQ ID NO: 437354 - RNA, 32 nt, Human
gccauugugauugucccaucauggcccaccug

SEQ ID NO: 437355 - RNA, 16 nt, Human
gccauuguugagggaa

SEQ ID NO: 437356 - RNA, 32 nt, Human
gccauuguuugauguccugugacugagaaacc

SEQ ID NO: 437357 - RNA, 32 nt, Human
gccauuuaaaguaagcuuugugcuccagauau

SEQ ID NO: 437358 - RNA, 32 nt, Human
gccauuuacagaauagaagaugagaccacuag

SEQ ID NO: 437359 - RNA, 32 nt, Human
gccauuuacuccaaguccucuccccagcuacc

SEQ ID NO: 437360 - RNA, 18 nt, Human
gccauuuacuucaccucu

SEQ ID NO: 437361 - RNA, 21 nt, Human
gccauuuagauuaggaagguu

SEQ ID NO: 437362 - RNA, 32 nt, Human
gccauuucacacucacccuccacccuccccac

SEQ ID NO: 437363 - RNA, 21 nt, Human
gccauuucacauuucaccccu

SEQ ID NO: 437364 - RNA, 32 nt, Human
gccauuucauggcagauauguaagaaaggaaa

SEQ ID NO: 437365 - RNA, 32 nt, Human
gccauuuccacucagcucuuuccagagaauuc

SEQ ID NO: 437366 - RNA, 17 nt, Human
gccauuuccagagggaa

SEQ ID NO: 437367 - RNA, 32 nt, Human
gccauuuccccaccaucuucuccaccaacccc

SEQ ID NO: 437368 - RNA, 32 nt, Human
gccauuuccccagucccuaucucccccauccc

SEQ ID NO: 437369 - RNA, 32 nt, Human
gccauuuccuccucuuguuuucacuccggauu

SEQ ID NO: 437370 - RNA, 32 nt, Human
gccauuuccuucuggggauuccugggcacuga

SEQ ID NO: 437371 - RNA, 32 nt, Human
gccauuucuacugcuacuaccuucucaggcua

SEQ ID NO: 437372 - RNA, 32 nt, Human
gccauuucucaaaugacuacagcugugacacu

SEQ ID NO: 437373 - RNA, 32 nt, Human
gccauuucucacucuggagccuuaauaaacug

SEQ ID NO: 437374 - RNA, 32 nt, Human
gccauuucuccccucucuuccuucaucuccac

SEQ ID NO: 437375 - RNA, 32 nt, Human
gccauuucucugcuuacccuucaccuuuggug

SEQ ID NO: 437376 - RNA, 20 nt, Human
gccauuucugccagagggaa

SEQ ID NO: 437377 - RNA, 21 nt, Human
gccauuucuguguuugaccua

SEQ ID NO: 437378 - RNA, 32 nt, Human
gccauuugaagaaggaggaauuuuagaagagg

SEQ ID NO: 437379 - RNA, 32 nt, Human
gccauuugcugcugccgccaggaccagagcag

SEQ ID NO: 437380 - RNA, 32 nt, Human
gccauuuggacagcaugccaggccacccagga

SEQ ID NO: 437381 - RNA, 32 nt, Human
gccauuugggaggggagcagagccaggccggu

SEQ ID NO: 437382 - RNA, 32 nt, Human
gccauuuggggaggcaggcugggccaaagggu

SEQ ID NO: 437383 - RNA, 32 nt, Human
gccauuuggucaaaguuugcaaaggagucagc

SEQ ID NO: 437384 - RNA, 32 nt, Human
gccauuugucaucugacugucauuagcauagc

SEQ ID NO: 437385 - RNA, 32 nt, Human
gccauuuguggugagaguggaggaggaagagg

SEQ ID NO: 437386 - RNA, 32 nt, Human
gccauuuuaguuguaucacagcagaaugaaua

SEQ ID NO: 437387 - RNA, 32 nt, Human
gccauuuucaauagauuggccauuuuaauguu

SEQ ID NO: 437388 - RNA, 20 nt, Human
gccauuuucccucugcugcc

SEQ ID NO: 437389 - RNA, 32 nt, Human
gccauuuucccugauuuguuugccucaucaac

SEQ ID NO: 437390 - RNA, 32 nt, Human
gccauuuugccuuucugacauuuccuugggaa

SEQ ID NO: 437391 - RNA, 32 nt, Human
gccauuuugucuggcuguggccccuccuucuc

SEQ ID NO: 437392 - RNA, 32 nt, Human
gccauuuuucauuuuaacuuuguuuuuacaug

SEQ ID NO: 437393 - RNA, 32 nt, Human
gccauuuuuccuuucugaaggcaggucucacc

SEQ ID NO: 437394 - RNA, 20 nt, Human
gcccaaaaaauguuugugca

SEQ ID NO: 437395 - RNA, 32 nt, Human
gcccaaaaaggugaaaccccgucucuacugaa

SEQ ID NO: 437396 - RNA, 32 nt, Human
gcccaaaaucuccucaaguugaccucucccgg

SEQ ID NO: 437397 - RNA, 32 nt, Human
gcccaaaaucuccucaaguugaccuguccagg

SEQ ID NO: 437398 - RNA, 32 nt, Human
gcccaaacaucucagccaggaaccugggacuu

SEQ ID NO: 437399 - RNA, 32 nt, Human
gcccaaaccagggggaagcaccagccucagug

SEQ ID NO: 437400 - RNA, 32 nt, Human
gcccaaacccaggaggcagaaguugcaagguu

SEQ ID NO: 437401 - RNA, 20 nt, Human
gcccaaacuggagugcagug

SEQ ID NO: 437402 - RNA, 21 nt, Human
gcccaaacuggagugcagugg

SEQ ID NO: 437403 - RNA, 22 nt, Human
gcccaaacuggagugcaguggc

SEQ ID NO: 437404 - RNA, 32 nt, Human
gcccaaacuucgcauuuuccaagaccacccug

SEQ ID NO: 437405 - RNA, 32 nt, Human
gcccaaacuuggcuuccuagccccagacccau

SEQ ID NO: 437406 - RNA, 22 nt, Human
gcccaaagacaaucuacuuacc

SEQ ID NO: 437407 - RNA, 32 nt, Human
gcccaaagacauccacccagaccucauuauuu

SEQ ID NO: 437408 - RNA, 22 nt, Human
gcccaaagaggugaggagccgg

SEQ ID NO: 437409 - RNA, 32 nt, Human
gcccaaaggcuguccugaaaacccuguggaag

SEQ ID NO: 437410 - RNA, 18 nt, Human
gcccaaagggcagggcca

SEQ ID NO: 437411 - RNA, 21 nt, Human
gcccaaaggugcaggagucag

SEQ ID NO: 437412 - RNA, 23 nt, Human
gcccaaagucagcaagccuccuu

SEQ ID NO: 437413 - RNA, 23 nt, Human
gcccaaaucaugcagccuaucca

SEQ ID NO: 437414 - RNA, 32 nt, Human
gcccaaaucuagagcauugagcacuuuaucuc

SEQ ID NO: 437415 - RNA, 32 nt, Human
gcccaaaugcuggcuggccuugugguccaaau

SEQ ID NO: 437416 - RNA, 32 nt, Human
gcccaaauucuccaaaagauggccucuccuaa

SEQ ID NO: 437417 - RNA, 32 nt, Human
gcccaacaacuuugaacuggccuggggauuuc

SEQ ID NO: 437418 - RNA, 32 nt, Human
gcccaacacagcaacaacagcaagaccauggg

SEQ ID NO: 437419 - RNA, 32 nt, Human
gcccaacacgagguauuauuuuaaagugcaag

SEQ ID NO: 437420 - RNA, 32 nt, Human
gcccaacagcccccuucuccuccuuucccuuc

SEQ ID NO: 437421 - RNA, 32 nt, Human
gcccaacaggcaggugccggaggggaggacag

SEQ ID NO: 437422 - RNA, 19 nt, Human
gcccaacaggcccuuggua

SEQ ID NO: 437423 - RNA, 32 nt, Human
gcccaacaucacaacaucugcucuucggguuc

SEQ ID NO: 437424 - RNA, 32 nt, Human
gcccaacauggcuggagcgcggcggaggugag

SEQ ID NO: 437425 - RNA, 32 nt, Human
gcccaacauggugaaaccccaucuggacuaaa

SEQ ID NO: 437426 - RNA, 32 nt, Human
gcccaacauggugaaaccccguuucuacuaaa

SEQ ID NO: 437427 - RNA, 32 nt, Human
gcccaacauggugaaacccugucucuacgaaa

SEQ ID NO: 437428 - RNA, 32 nt, Human
gcccaacauggugaaaccucgucucuacuaaa

SEQ ID NO: 437429 - RNA, 32 nt, Human
gcccaacauggugaaaccugucucuacuaaaa

SEQ ID NO: 437430 - RNA, 32 nt, Human
gcccaacauguggcaugcaaugaagagaaaau

SEQ ID NO: 437431 - RNA, 20 nt, Human
gcccaaccacaaacaccucc

SEQ ID NO: 437432 - RNA, 32 nt, Human
gcccaaccacaauuuucccuuccuccgccuuc

SEQ ID NO: 437433 - RNA, 32 nt, Human
gcccaaccacuugugucuucugccccuuccca

SEQ ID NO: 437434 - RNA, 22 nt, Human
gcccaaccagcaaagcgccccu

SEQ ID NO: 437435 - RNA, 32 nt, Human
gcccaaccaugccucuguccagccaccugcug

SEQ ID NO: 437436 - RNA, 32 nt, Human
gcccaaccccugcucuugccagcuggccccug

SEQ ID NO: 437437 - RNA, 32 nt, Human
gcccaacccgacugcccuaccagccugcacau

SEQ ID NO: 437438 - RNA, 32 nt, Human
gcccaaccuccccucguuuuugaccuuugucc

SEQ ID NO: 437439 - RNA, 32 nt, Human
gcccaaccugcucuccucuugccacugccucu

SEQ ID NO: 437440 - RNA, 21 nt, Human
gcccaaccuggagugcaaugg

SEQ ID NO: 437441 - RNA, 21 nt, Human
gcccaaccuggagugcagugg

SEQ ID NO: 437442 - RNA, 23 nt, Human
gcccaaccuggagugcaguggug

SEQ ID NO: 437443 - RNA, 22 nt, Human
gcccaacuacucaggaggcuga

SEQ ID NO: 437444 - RNA, 22 nt, Human
gcccaacuacucgggaggcuga

SEQ ID NO: 437445 - RNA, 20 nt, Human
gcccaacuagaguguagugg

SEQ ID NO: 437446 - RNA, 32 nt, Human
gcccaacucaacaacagauugcagccuucuuc

SEQ ID NO: 437447 - RNA, 32 nt, Human
gcccaacuccaggacgccccagcuggcccagc

SEQ ID NO: 437448 - RNA, 32 nt, Human
gcccaacucccagggcucuggaaauggugagg

SEQ ID NO: 437449 - RNA, 32 nt, Human
gcccaacuccucccucuccuugcuccuccucc

SEQ ID NO: 437450 - RNA, 18 nt, Human
gcccaacucuguccggua

SEQ ID NO: 437451 - RNA, 32 nt, Human
gcccaacucuguccgguaucccuuuuccuccc

SEQ ID NO: 437452 - RNA, 32 nt, Human
gcccaagaaugagaagaaugacuaugcaaccu

SEQ ID NO: 437453 - RNA, 32 nt, Human
gcccaagacagaugccccagagcuguuuaugg

SEQ ID NO: 437454 - RNA, 32 nt, Human
gcccaagacagccucagagccugggucuuccc

SEQ ID NO: 437455 - RNA, 28 nt, Human
gcccaagacccggcugccuccuccucuu

SEQ ID NO: 437456 - RNA, 32 nt, Human
gcccaagacuccuguuuuucuauagcccuggc

SEQ ID NO: 437457 - RNA, 32 nt, Human
gcccaagagccaguggcugagcucugagaagg

SEQ ID NO: 437458 - RNA, 32 nt, Human
gcccaagaggagaggaaugggaagagugcccc

SEQ ID NO: 437459 - RNA, 32 nt, Human
gcccaagaggcagagguugcagggucaagauc

SEQ ID NO: 437460 - RNA, 32 nt, Human
gcccaagagguagagguugcagugagccaaga

SEQ ID NO: 437461 - RNA, 32 nt, Human
gcccaagaggucaaggcuucagugagccauga

SEQ ID NO: 437462 - RNA, 32 nt, Human
gcccaagagguggagguuacagugagcagaga

SEQ ID NO: 437463 - RNA, 32 nt, Human
gcccaagagguugaggcugcagugagccauga

SEQ ID NO: 437464 - RNA, 32 nt, Human
gcccaagaguucaagacaauccuggccaacgg

SEQ ID NO: 437465 - RNA, 32 nt, Human
gcccaagaguucgacgcugcagugagcuauga

SEQ ID NO: 437466 - RNA, 32 nt, Human
gcccaagaguuugagaccagccuggacaacau

SEQ ID NO: 437467 - RNA, 32 nt, Human
gcccaagauaaagaaacagaaaagcugacacu

SEQ ID NO: 437468 - RNA, 32 nt, Human
gcccaagauuuggugccugcagccucuugucu

SEQ ID NO: 437469 - RNA, 32 nt, Human
gcccaagcaagggagauaccagccugguuccc

SEQ ID NO: 437470 - RNA, 32 nt, Human
gcccaagcaauggcacgggcagcgggcucuuu

SEQ ID NO: 437471 - RNA, 23 nt, Human
gcccaagcaauucucccaccuca

SEQ ID NO: 437472 - RNA, 32 nt, Human
gcccaagcagagggagcccccuugcccuguuu

SEQ ID NO: 437473 - RNA, 32 nt, Human
gcccaagcaggugggagcuaaggggaaaccga

SEQ ID NO: 437474 - RNA, 32 nt, Human
gcccaagccaagcaucgcauccccugugauuu

SEQ ID NO: 437475 - RNA, 32 nt, Human
gcccaagccaugagcuucuuccaggcucaugu

SEQ ID NO: 437476 - RNA, 32 nt, Human
gcccaagcccaggaguccuagcugaggcugca

SEQ ID NO: 437477 - RNA, 32 nt, Human
gcccaagccccuccccuccacuccccuuccug

SEQ ID NO: 437478 - RNA, 32 nt, Human
gcccaagccugugguaugaugugcacacuugc

SEQ ID NO: 437479 - RNA, 23 nt, Human
gcccaagcuacucagaaggcuga

SEQ ID NO: 437480 - RNA, 32 nt, Human
gcccaagcuagagcuuguggauuccagaccca

SEQ ID NO: 437481 - RNA, 21 nt, Human
gcccaagcuagagugcagugg

SEQ ID NO: 437482 - RNA, 22 nt, Human
gcccaagcuagagugcaguggu

SEQ ID NO: 437483 - RNA, 24 nt, Human
gcccaagcuagagugcaguggugu

SEQ ID NO: 437484 - RNA, 32 nt, Human
gcccaagcuaguuucaaacuccugggcucaag

SEQ ID NO: 437485 - RNA, 22 nt, Human
gcccaagcugccccugacagca

SEQ ID NO: 437486 - RNA, 32 nt, Human
gcccaagcugcccgggagggugggugcagaca

SEQ ID NO: 437487 - RNA, 25 nt, Human
gcccaagcugcuacaaccuuggcca

SEQ ID NO: 437488 - RNA, 21 nt, Human
gcccaagcuggaaugcagugg

SEQ ID NO: 437489 - RNA, 21 nt, Human
gcccaagcuggaaugcggugg

SEQ ID NO: 437490 - RNA, 20 nt, Human
gcccaagcuggagcgcaaug

SEQ ID NO: 437491 - RNA, 21 nt, Human
gcccaagcuggagcgcaaugg

SEQ ID NO: 437492 - RNA, 23 nt, Human
gcccaagcuggaguacaguagug

SEQ ID NO: 437493 - RNA, 32 nt, Human
gcccaagcuggaguacaguagugcaaucucag

SEQ ID NO: 437494 - RNA, 21 nt, Human
gcccaagcuggaguacagugg

SEQ ID NO: 437495 - RNA, 22 nt, Human
gcccaagcuggaguacaguggu

SEQ ID NO: 437496 - RNA, 23 nt, Human
gcccaagcuggaguacaguggug

SEQ ID NO: 437497 - RNA, 22 nt, Human
gcccaagcuggagugaaguggu

SEQ ID NO: 437498 - RNA, 21 nt, Human
gcccaagcuggagugcaaugg

SEQ ID NO: 437499 - RNA, 20 nt, Human
gcccaagcuggagugcagug

SEQ ID NO: 437500 - RNA, 21 nt, Human
gcccaagcuggagugcagugg

SEQ ID NO: 437501 - RNA, 22 nt, Human
gcccaagcuggagugcaguggc

SEQ ID NO: 437502 - RNA, 22 nt, Human
gcccaagcuggaguggcagugg

SEQ ID NO: 437503 - RNA, 32 nt, Human
gcccaagcuggucuggaacuccugggcucaag

SEQ ID NO: 437504 - RNA, 23 nt, Human
gcccaagcuugagggcaguggug

SEQ ID NO: 437505 - RNA, 32 nt, Human
gcccaaggaagacaguuuuuggaaggggcaag

SEQ ID NO: 437506 - RNA, 32 nt, Human
gcccaaggacagcuccuggaggaggccagccc

SEQ ID NO: 437507 - RNA, 32 nt, Human
gcccaaggaccugggagcucugcuccccacuc

SEQ ID NO: 437508 - RNA, 32 nt, Human
gcccaaggagaggacccaggagaggagucugg

SEQ ID NO: 437509 - RNA, 32 nt, Human
gcccaaggagaguucuggaggguucaaaggau

SEQ ID NO: 437510 - RNA, 32 nt, Human
gcccaaggagcagcagcggagcgugcuucgcc

SEQ ID NO: 437511 - RNA, 32 nt, Human
gcccaaggaggaggaagaggaaaacaagacaa

SEQ ID NO: 437512 - RNA, 32 nt, Human
gcccaaggagguggaguggagagugggcucgg

SEQ ID NO: 437513 - RNA, 32 nt, Human
gcccaaggauccuucuuaaggucuuaucucaa

SEQ ID NO: 437514 - RNA, 32 nt, Human
gcccaaggcacugagaccuccacccacugugg

SEQ ID NO: 437515 - RNA, 23 nt, Human
gcccaaggcagcaacaagcucuu

SEQ ID NO: 437516 - RNA, 18 nt, Human
gcccaaggccugcugcug

SEQ ID NO: 437517 - RNA, 21 nt, Human
gcccaagggagcuaagaccag

SEQ ID NO: 437518 - RNA, 32 nt, Human
gcccaagggauuuaaauauaacaaaaugugua

SEQ ID NO: 437519 - RNA, 20 nt, Human
gcccaagggccuggacaccc

SEQ ID NO: 437520 - RNA, 32 nt, Human
gcccaagggcuguuucugccacuugcucuccu

SEQ ID NO: 437521 - RNA, 32 nt, Human
gcccaagggguucaccuugccugcugccuaga

SEQ ID NO: 437522 - RNA, 20 nt, Human
gcccaaggguccagccuccu

SEQ ID NO: 437523 - RNA, 21 nt, Human
gcccaagguagagugcagugg

SEQ ID NO: 437524 - RNA, 24 nt, Human
gcccaagguagagugcaguggcgu

SEQ ID NO: 437525 - RNA, 32 nt, Human
gcccaagguagugggccuacaacuugguuuua

SEQ ID NO: 437526 - RNA, 32 nt, Human
gcccaagguauccaagccuggggaagggcagg

SEQ ID NO: 437527 - RNA, 32 nt, Human
gcccaaggucacaccuaacugggaaaugggac

SEQ ID NO: 437528 - RNA, 32 nt, Human
gcccaaggucccgggaccuggugcaggaagag

SEQ ID NO: 437529 - RNA, 21 nt, Human
gcccaaggucuccagcagagc

SEQ ID NO: 437530 - RNA, 32 nt, Human
gcccaaggugccugugcucccagcagguccaa

SEQ ID NO: 437531 - RNA, 22 nt, Human
gcccaaguaauccgccacccca

SEQ ID NO: 437532 - RNA, 32 nt, Human
gcccaaguauaggcucugcccagaugccauca

SEQ ID NO: 437533 - RNA, 32 nt, Human
gcccaagucaacacccgcagugauucaggguc

SEQ ID NO: 437534 - RNA, 32 nt, Human
gcccaagucagccucauauucugggcggacag

SEQ ID NO: 437535 - RNA, 32 nt, Human
gcccaagucccccacacucagugcagugauga

SEQ ID NO: 437536 - RNA, 32 nt, Human
gcccaagucguccucaagucggccuccccagg

SEQ ID NO: 437537 - RNA, 32 nt, Human
gcccaagucguccucaagucggccuggaagug

SEQ ID NO: 437538 - RNA, 32 nt, Human
gcccaagucguccucaagucggccuggaauua

SEQ ID NO: 437539 - RNA, 32 nt, Human
gcccaagucguccucaaguuggccuccccggg

SEQ ID NO: 437540 - RNA, 32 nt, Human
gcccaagugauacucccaccucugccuuacaa

SEQ ID NO: 437541 - RNA, 32 nt, Human
gcccaagugauacuuucuuuaccgucccguga

SEQ ID NO: 437542 - RNA, 32 nt, Human
gcccaaguggcuguucugggaccauggaagcc

SEQ ID NO: 437543 - RNA, 32 nt, Human
gcccaaguguuucccucucucccucaccaaaa

SEQ ID NO: 437544 - RNA, 32 nt, Human
gcccaaguuccagcguucagacugccugggag

SEQ ID NO: 437545 - RNA, 32 nt, Human
gcccaaguuccaguucaaaccuggucagguug

SEQ ID NO: 437546 - RNA, 32 nt, Human
gcccaaguucuccuggcacugugggcccugga

SEQ ID NO: 437547 - RNA, 21 nt, Human
gcccaaguuggagugcagugg

SEQ ID NO: 437548 - RNA, 32 nt, Human
gcccaauagcccaggcuggagugcaguggcag

SEQ ID NO: 437549 - RNA, 32 nt, Human
gcccaauauggugaaaccccgucucuccugaa

SEQ ID NO: 437550 - RNA, 32 nt, Human
gcccaauauggugaaacccugucucuacuaaa

SEQ ID NO: 437551 - RNA, 32 nt, Human
gcccaaucacuacaaccacuaaccacaacaua

SEQ ID NO: 437552 - RNA, 18 nt, Human
gcccaaucacucugucca

SEQ ID NO: 437553 - RNA, 32 nt, Human
gcccaaucccaggcuccacuccugggcuccau

SEQ ID NO: 437554 - RNA, 32 nt, Human
gcccaaucccagguccaggcucaauccuaggc

SEQ ID NO: 437555 - RNA, 32 nt, Human
gcccaauccuaaaaguuugggcagagggaacc

SEQ ID NO: 437556 - RNA, 32 nt, Human
gcccaaucucgacucugcucuuugccaguuca

SEQ ID NO: 437557 - RNA, 32 nt, Human
gcccaaucucugccuaguuucuggguguggcc

SEQ ID NO: 437558 - RNA, 32 nt, Human
gcccaaucugccaggcuggacugugcuguucc

SEQ ID NO: 437559 - RNA, 20 nt, Human
gcccaaucuucuggguccag

SEQ ID NO: 437560 - RNA, 30 nt, Human
gcccaaugacacuucugccuaggcucgcgc

SEQ ID NO: 437561 - RNA, 32 nt, Human
gcccaaugagccuucuuucugcccuccagauc

SEQ ID NO: 437562 - RNA, 32 nt, Human
gcccaaugccuggucuggagcuggagcuugcc

SEQ ID NO: 437563 - RNA, 32 nt, Human
gcccaaugccuguucucugcagcaaccuuugu

SEQ ID NO: 437564 - RNA, 22 nt, Human
gcccaauggagucucaccaggu

SEQ ID NO: 437565 - RNA, 32 nt, Human
gcccaaugucacggagguaggaaggggcagac

SEQ ID NO: 437566 - RNA, 32 nt, Human
gcccaauuccaggacuuccucacauggcuccu

SEQ ID NO: 437567 - RNA, 32 nt, Human
gcccaauugagagaccuugagaaagaaugaug

SEQ ID NO: 437568 - RNA, 20 nt, Human
gcccacaaacuggagcacag

SEQ ID NO: 437569 - RNA, 32 nt, Human
gcccacaaagucaaggcugcagugagcuguga

SEQ ID NO: 437570 - RNA, 32 nt, Human
gcccacaaccauucuguaccccuuccccagcc

SEQ ID NO: 437571 - RNA, 32 nt, Human
gcccacaauccucgucugaaucauccgaggca

SEQ ID NO: 437572 - RNA, 32 nt, Human
gcccacacacacuccuuccccuugucccuggg

SEQ ID NO: 437573 - RNA, 32 nt, Human
gcccacacacagaaaaacagacacauaaacac

SEQ ID NO: 437574 - RNA, 32 nt, Human
gcccacacaccccacuccagcuccggagcacc

SEQ ID NO: 437575 - RNA, 31 nt, Human
gcccacacacugcauagcaggagggaagcau

SEQ ID NO: 437576 - RNA, 24 nt, Human
gcccacacagagcccaugugcuug

SEQ ID NO: 437577 - RNA, 32 nt, Human
gcccacacagcccacuuguuuggguggggccg

SEQ ID NO: 437578 - RNA, 20 nt, Human
gcccacacagcccaggcagc

SEQ ID NO: 437579 - RNA, 22 nt, Human
gcccacacagcccaggcagcau

SEQ ID NO: 437580 - RNA, 32 nt, Human
gcccacacagcccgagccccuuggggagcagu

SEQ ID NO: 437581 - RNA, 32 nt, Human
gcccacacaucugcuuuggcuuugccggcaau

SEQ ID NO: 437582 - RNA, 32 nt, Human
gcccacaccccgaauccucugcauucaugucc

SEQ ID NO: 437583 - RNA, 24 nt, Human
gcccacacccugcaggacaaggag

SEQ ID NO: 437584 - RNA, 32 nt, Human
gcccacacccuucuagcaccuccugcagcagu

SEQ ID NO: 437585 - RNA, 17 nt, Human
gcccacaccucaccucu

SEQ ID NO: 437586 - RNA, 17 nt, Human
gcccacaccuccaccuc

SEQ ID NO: 437587 - RNA, 27 nt, Human
gcccacaccucccuaccagccuggcca

SEQ ID NO: 437588 - RNA, 32 nt, Human
gcccacaccugagcuccugucugccugaggag

SEQ ID NO: 437589 - RNA, 32 nt, Human
gcccacaccugcaggcaggaugcugucgucaa

SEQ ID NO: 437590 - RNA, 32 nt, Human
gcccacaccuggaaaucacucccucccugcuc

SEQ ID NO: 437591 - RNA, 32 nt, Human
gcccacaccuguaaucccagcacuuugggagg

SEQ ID NO: 437592 - RNA, 32 nt, Human
gcccacaccuguggccuuccucuccuuccugu

SEQ ID NO: 437593 - RNA, 20 nt, Human
gcccacaccuucaccagggc

SEQ ID NO: 437594 - RNA, 32 nt, Human
gcccacaccuucagcagugaaggauucuaaca

SEQ ID NO: 437595 - RNA, 32 nt, Human
gcccacacgagagucggcgaccagccucggcg

SEQ ID NO: 437596 - RNA, 32 nt, Human
gcccacacucaaaggccucucucucagcagag

SEQ ID NO: 437597 - RNA, 32 nt, Human
gcccacacugagugaggaagggaauggaccag

SEQ ID NO: 437598 - RNA, 32 nt, Human
gcccacacugccgcuccagccuuccuggcagg

SEQ ID NO: 437599 - RNA, 32 nt, Human
gcccacacugggacugguagaggaagccggcc

SEQ ID NO: 437600 - RNA, 32 nt, Human
gcccacacuuguaaucccagcacuuugggagg

SEQ ID NO: 437601 - RNA, 32 nt, Human
gcccacagacaggaacagaagagcacagugga

SEQ ID NO: 437602 - RNA, 32 nt, Human
gcccacagagacugagcuuucagucccccuuu

SEQ ID NO: 437603 - RNA, 32 nt, Human
gcccacagagaugagaauagaucauguggaac

SEQ ID NO: 437604 - RNA, 32 nt, Human
gcccacagagggcaggcacucccauccaucca

SEQ ID NO: 437605 - RNA, 32 nt, Human
gcccacagagggcccaggccccugcccagcug

SEQ ID NO: 437606 - RNA, 32 nt, Human
gcccacagagugagcuggaugcugaaacugug

SEQ ID NO: 437607 - RNA, 32 nt, Human
gcccacagaguuuuccugagaugacuguaacu

SEQ ID NO: 437608 - RNA, 32 nt, Human
gcccacagcaggcaaccaaggcugcccccacc

SEQ ID NO: 437609 - RNA, 32 nt, Human
gcccacagccaagguagggucacuaaccaagc

SEQ ID NO: 437610 - RNA, 32 nt, Human
gcccacagccagguacugcucccuucauacuc

SEQ ID NO: 437611 - RNA, 32 nt, Human
gcccacagccccuggucaucugauaucagagc

SEQ ID NO: 437612 - RNA, 32 nt, Human
gcccacagcggcgcccggcacugagcuggaca

SEQ ID NO: 437613 - RNA, 32 nt, Human
gcccacagcgguuuguuccccuucucgggagu

SEQ ID NO: 437614 - RNA, 19 nt, Human
gcccacagcugccgcggug

SEQ ID NO: 437615 - RNA, 32 nt, Human
gcccacagcugccucuggaaagugggccuggg

SEQ ID NO: 437616 - RNA, 32 nt, Human
gcccacagcugugccucacagaugccccgaga

SEQ ID NO: 437617 - RNA, 30 nt, Human
gcccacagcuugccaagaaagaccccaacg

SEQ ID NO: 437618 - RNA, 32 nt, Human
gcccacaggcucagccagaaccucuuggugua

SEQ ID NO: 437619 - RNA, 32 nt, Human
gcccacagggccugguggugauggaccucccc

SEQ ID NO: 437620 - RNA, 21 nt, Human
gcccacagggcgcccuaugga

SEQ ID NO: 437621 - RNA, 32 nt, Human
gcccacagucuucugaguugugcuacaccaau

SEQ ID NO: 437622 - RNA, 18 nt, Human
gcccacagucuugcggug

SEQ ID NO: 437623 - RNA, 32 nt, Human
gcccacaguuuuccuuugcuucucccagagcu

SEQ ID NO: 437624 - RNA, 32 nt, Human
gcccacauacagcaacuuagcgaagcugccgg

SEQ ID NO: 437625 - RNA, 32 nt, Human
gcccacaucccaagagacaggcccagagccua

SEQ ID NO: 437626 - RNA, 32 nt, Human
gcccacaucucgucagcuggugccucagagaa

SEQ ID NO: 437627 - RNA, 32 nt, Human
gcccacaucuguaaucccagcacuuugggagg

SEQ ID NO: 437628 - RNA, 32 nt, Human
gcccacaugcccucugugaugaguggcgucuu

SEQ ID NO: 437629 - RNA, 24 nt, Human
gcccacauugcccugcagggacca

SEQ ID NO: 437630 - RNA, 21 nt, Human
gcccacauuggagugcagugg

SEQ ID NO: 437631 - RNA, 32 nt, Human
gcccacauuggcuggcaguagacauggccgaa

SEQ ID NO: 437632 - RNA, 32 nt, Human
gcccaccaagcccaccuuccagaaacuuggag

SEQ ID NO: 437633 - RNA, 32 nt, Human
gcccaccaaggcagcagacuguuaaucagaca

SEQ ID NO: 437634 - RNA, 32 nt, Human
gcccaccacagcucucucccuguucucugggc

SEQ ID NO: 437635 - RNA, 32 nt, Human
gcccaccacugccaccacccgccgcacgacca

SEQ ID NO: 437636 - RNA, 32 nt, Human
gcccaccacuggccaugcucaccgcccugcuu

SEQ ID NO: 437637 - RNA, 19 nt, Human
gcccaccagaacacacggg

SEQ ID NO: 437638 - RNA, 32 nt, Human
gcccaccagagcuguggagaggggacccuaag

SEQ ID NO: 437639 - RNA, 32 nt, Human
gcccaccagcuggcucugcagcacauugcccu

SEQ ID NO: 437640 - RNA, 32 nt, Human
gcccaccagcuuccaggucucccugaccugcc

SEQ ID NO: 437641 - RNA, 21 nt, Human
gcccaccagcuucuguuccca

SEQ ID NO: 437642 - RNA, 32 nt, Human
gcccaccaggaggaugaaggucuccguggcug

SEQ ID NO: 437643 - RNA, 32 nt, Human
gcccaccaggccacggccgccugcuguacaua

SEQ ID NO: 437644 - RNA, 32 nt, Human
gcccaccaggcggacgcccaggagaaccccug

SEQ ID NO: 437645 - RNA, 18 nt, Human
gcccaccagguccugccu

SEQ ID NO: 437646 - RNA, 21 nt, Human
gcccaccaguccugggcacag

SEQ ID NO: 437647 - RNA, 32 nt, Human
gcccaccaugcuccugagccucccaagagcug

SEQ ID NO: 437648 - RNA, 32 nt, Human
gcccacccagaacagcagggaaauuccaaguc

SEQ ID NO: 437649 - RNA, 32 nt, Human
gcccacccagcagucaguacacaugccugggc

SEQ ID NO: 437650 - RNA, 32 nt, Human
gcccacccagcugccaguaggugcugggcucu

SEQ ID NO: 437651 - RNA, 32 nt, Human
gcccaccccacccucccugggcagggucuuga

SEQ ID NO: 437652 - RNA, 18 nt, Human
gcccaccccacgccgagg

SEQ ID NO: 437653 - RNA, 32 nt, Human
gcccaccccagccaccacugaguccacucgga

SEQ ID NO: 437654 - RNA, 32 nt, Human
gcccaccccagccuggggagaggucgcggcgg

SEQ ID NO: 437655 - RNA, 25 nt, Human
gcccacccccacccugccacuauga

SEQ ID NO: 437656 - RNA, 32 nt, Human
gcccacccccucccugccguaucgaucaccag

SEQ ID NO: 437657 - RNA, 32 nt, Human
gcccacccccucccugccguaucgaucaccau

SEQ ID NO: 437658 - RNA, 32 nt, Human
gcccacccccugcucuugccagcuggccccug

SEQ ID NO: 437659 - RNA, 21 nt, Human
gcccacccccuuuuuuguaua

SEQ ID NO: 437660 - RNA, 32 nt, Human
gcccaccccggcuguaucucaggucugggucc

SEQ ID NO: 437661 - RNA, 32 nt, Human
gcccaccccgggacacagaacuagugagcgcc

SEQ ID NO: 437662 - RNA, 32 nt, Human
gcccaccccucaggguguauagugacauauug

SEQ ID NO: 437663 - RNA, 32 nt, Human
gcccaccccugagucccuugacuuuuguauuc

SEQ ID NO: 437664 - RNA, 18 nt, Human
gcccacccgagccuggag

SEQ ID NO: 437665 - RNA, 32 nt, Human
gcccacccggccaccguucucuucccacuccc

SEQ ID NO: 437666 - RNA, 32 nt, Human
gcccacccguuggaggccgguggagaagcccc

SEQ ID NO: 437667 - RNA, 32 nt, Human
gcccacccuaccugcccugccugccugcugcc

SEQ ID NO: 437668 - RNA, 32 nt, Human
gcccacccucacagggggucucugugugaucu

SEQ ID NO: 437669 - RNA, 32 nt, Human
gcccacccucaggggcgucaggagacacagcc

SEQ ID NO: 437670 - RNA, 32 nt, Human
gcccacccuccaccuuugcccaauuucagaua

SEQ ID NO: 437671 - RNA, 32 nt, Human
gcccacccuccagcuuuuccucaggguguccu

SEQ ID NO: 437672 - RNA, 32 nt, Human
gcccacccugaacuccagcuggcccgcaagcg

SEQ ID NO: 437673 - RNA, 31 nt, Human
gcccacccugcgcgcugucaugcagaggcca

SEQ ID NO: 437674 - RNA, 32 nt, Human
gcccacccugcucuucccucgcccugcaaauu

SEQ ID NO: 437675 - RNA, 22 nt, Human
gcccaccgcaaccucggccucc

SEQ ID NO: 437676 - RNA, 32 nt, Human
gcccaccgcagaggaggggcgauggggguggc

SEQ ID NO: 437677 - RNA, 32 nt, Human
gcccaccgcagcagccucccucccucucagca

SEQ ID NO: 437678 - RNA, 32 nt, Human
gcccaccggacacacccucacuucgggaacag

SEQ ID NO: 437679 - RNA, 32 nt, Human
gcccaccucaagcagucuccccaccccuugag

SEQ ID NO: 437680 - RNA, 32 nt, Human
gcccaccucaccccagcacuuccuaugggacu

SEQ ID NO: 437681 - RNA, 18 nt, Human
gcccaccucacugccaca

SEQ ID NO: 437682 - RNA, 32 nt, Human
gcccaccucaucccuccagccugggaucucac

SEQ ID NO: 437683 - RNA, 32 nt, Human
gcccaccuccacccauucuguuugccccauuu

SEQ ID NO: 437684 - RNA, 32 nt, Human
gcccaccuccaggccucucccaccucaggccc

SEQ ID NO: 437685 - RNA, 32 nt, Human
gcccaccuccccuuuuguuucucaguaacauu

SEQ ID NO: 437686 - RNA, 19 nt, Human
gcccaccuccuccaugccu

SEQ ID NO: 437687 - RNA, 32 nt, Human
gcccaccuccucuuccuucuucucuacaaaag

SEQ ID NO: 437688 - RNA, 19 nt, Human
gcccaccucgcugggcccu

SEQ ID NO: 437689 - RNA, 32 nt, Human
gcccaccucgcugggcccucccuggcgccccg

SEQ ID NO: 437690 - RNA, 21 nt, Human
gcccaccucggccccggaggc

SEQ ID NO: 437691 - RNA, 32 nt, Human
gcccaccucucgggggcgggcucccggcgcua

SEQ ID NO: 437692 - RNA, 32 nt, Human
gcccaccucugccuccacccucacuguguaac

SEQ ID NO: 437693 - RNA, 32 nt, Human
gcccaccucuucucccccaccucccggguccc

SEQ ID NO: 437694 - RNA, 32 nt, Human
gcccaccucuuucucaccguggccuccugggg

SEQ ID NO: 437695 - RNA, 32 nt, Human
gcccaccugcagcccggacgccugccggccag

SEQ ID NO: 437696 - RNA, 32 nt, Human
gcccaccugcccaccugaccacugaccgcccc

SEQ ID NO: 437697 - RNA, 32 nt, Human
gcccaccugccugacccuccacugccccugga

SEQ ID NO: 437698 - RNA, 32 nt, Human
gcccaccugccuggccggccagccagccacuc

SEQ ID NO: 437699 - RNA, 32 nt, Human
gcccaccuggggaucccccaaagucagacaca

SEQ ID NO: 437700 - RNA, 32 nt, Human
gcccaccuggguggcgcguggcuuacgcaacg

SEQ ID NO: 437701 - RNA, 32 nt, Human
gcccaccuguaauccuagcugcucagggggcu

SEQ ID NO: 437702 - RNA, 32 nt, Human
gcccaccuguuuucccagcuacuccggaggcu

SEQ ID NO: 437703 - RNA, 32 nt, Human
gcccaccuucuaggaagccugagguuuauuuc

SEQ ID NO: 437704 - RNA, 32 nt, Human
gcccaccuugcggcccuggcucugagucgcuc

SEQ ID NO: 437705 - RNA, 32 nt, Human
gcccaccuugcguggaaugaaaacgccaaagg

SEQ ID NO: 437706 - RNA, 32 nt, Human
gcccaccuugcuggaaacucaaggaagauucu

SEQ ID NO: 437707 - RNA, 32 nt, Human
gcccaccuuugcagaauaaacucucuccuggg

SEQ ID NO: 437708 - RNA, 25 nt, Human
gcccacgacgcacuggugucugaga

SEQ ID NO: 437709 - RNA, 32 nt, Human
gcccacgagaggccaauggggagcagccagga

SEQ ID NO: 437710 - RNA, 22 nt, Human
gcccacgagcccaggggaccag

SEQ ID NO: 437711 - RNA, 24 nt, Human
gcccacgagugcgccauguuucag

SEQ ID NO: 437712 - RNA, 32 nt, Human
gcccacgaguucaaggcugcagugagucguga

SEQ ID NO: 437713 - RNA, 32 nt, Human
gcccacgcacuuccggccucggacccgcccca

SEQ ID NO: 437714 - RNA, 21 nt, Human
gcccacgcaggagugcagugg

SEQ ID NO: 437715 - RNA, 32 nt, Human
gcccacgcccgcuucuguaucucccucaauaa

SEQ ID NO: 437716 - RNA, 32 nt, Human
gcccacgccucuaaucccagcacuuugggagg

SEQ ID NO: 437717 - RNA, 32 nt, Human
gcccacgccuguaaucccagcacuuugggaga

SEQ ID NO: 437718 - RNA, 32 nt, Human
gcccacgccuguaaucccagcacuuugggagg

SEQ ID NO: 437719 - RNA, 32 nt, Human
gcccacgccuguaaucccagcuacucgggagg

SEQ ID NO: 437720 - RNA, 32 nt, Human
gcccacgccuguaaucccagcuacuuggaagg

SEQ ID NO: 437721 - RNA, 21 nt, Human
gcccacgcucucacugcugcc

SEQ ID NO: 437722 - RNA, 21 nt, Human
gcccacgcuggagugcaaugg

SEQ ID NO: 437723 - RNA, 23 nt, Human
gcccacgcuggagugcaauggug

SEQ ID NO: 437724 - RNA, 20 nt, Human
gcccacgcuggagugcagug

SEQ ID NO: 437725 - RNA, 32 nt, Human
gcccacggagagaaaagaaagggcugagacuu

SEQ ID NO: 437726 - RNA, 32 nt, Human
gcccacggcucagugggcuucacauaccucug

SEQ ID NO: 437727 - RNA, 32 nt, Human
gcccacgggcccccagccccagccccucuccu

SEQ ID NO: 437728 - RNA, 22 nt, Human
gcccacggucaccuggagacag

SEQ ID NO: 437729 - RNA, 32 nt, Human
gcccacggucuuccacuaccagccugggccuc

SEQ ID NO: 437730 - RNA, 32 nt, Human
gcccacgguguggcugggcaugcgugccaagg

SEQ ID NO: 437731 - RNA, 32 nt, Human
gcccacgucuguaaucccugcacuuugggagg

SEQ ID NO: 437732 - RNA, 32 nt, Human
gcccacgugaggcuggagugauguggccacaa

SEQ ID NO: 437733 - RNA, 32 nt, Human
gcccacgugugcccgccaugcccgcgccccac

SEQ ID NO: 437734 - RNA, 32 nt, Human
gcccacuacaaccuccaccuccuggguuugag

SEQ ID NO: 437735 - RNA, 32 nt, Human
gcccacuacuucccagggacucucacaucucg

SEQ ID NO: 437736 - RNA, 32 nt, Human
gcccacuaggcugggguuucugguuuuguuuc

SEQ ID NO: 437737 - RNA, 17 nt, Human
gcccacuauuccacucu

SEQ ID NO: 437738 - RNA, 32 nt, Human
gcccacucaaccugggcagaccgagaggcccg

SEQ ID NO: 437739 - RNA, 32 nt, Human
gcccacucaccccucagacuccugcugcccau

SEQ ID NO: 437740 - RNA, 32 nt, Human
gcccacucaccugguccuguuguuuuacccca

SEQ ID NO: 437741 - RNA, 32 nt, Human
gcccacucacgccuucacuccugggcccggga

SEQ ID NO: 437742 - RNA, 32 nt, Human
gcccacucaggaugcaggcucuccccaggggg

SEQ ID NO: 437743 - RNA, 21 nt, Human
gcccacucaucuauggacuca

SEQ ID NO: 437744 - RNA, 32 nt, Human
gcccacucccacuccauccuguccccaaggac

SEQ ID NO: 437745 - RNA, 32 nt, Human
gcccacucccagccguccucaccagagaugga

SEQ ID NO: 437746 - RNA, 32 nt, Human
gcccacuccccagccagagagggcuugaccaa

SEQ ID NO: 437747 - RNA, 32 nt, Human
gcccacucccccaggagcagcuggcacugaca

SEQ ID NO: 437748 - RNA, 32 nt, Human
gcccacucccccugccuccagcaggccaggaa

SEQ ID NO: 437749 - RNA, 32 nt, Human
gcccacucccugccuaugccucccucuugggg

SEQ ID NO: 437750 - RNA, 32 nt, Human
gcccacuccucauucauaaggugguggugagg

SEQ ID NO: 437751 - RNA, 32 nt, Human
gcccacuccucuccagacuccaccuccccagu

SEQ ID NO: 437752 - RNA, 32 nt, Human
gcccacuccugccucccucaucugugucccga

SEQ ID NO: 437753 - RNA, 32 nt, Human
gcccacucgaugccauggagaaggucaguugc

SEQ ID NO: 437754 - RNA, 21 nt, Human
gcccacucuccauccucccca

SEQ ID NO: 437755 - RNA, 32 nt, Human
gcccacucugcccaccauggacggcguggcug

SEQ ID NO: 437756 - RNA, 32 nt, Human
gcccacucuggucucaaacuccugggcucaac

SEQ ID NO: 437757 - RNA, 32 nt, Human
gcccacucuuucuggguuuuccaagggaaugg

SEQ ID NO: 437758 - RNA, 32 nt, Human
gcccacugaaaccuccaccucccggguucaag

SEQ ID NO: 437759 - RNA, 18 nt, Human
gcccacugaacgcugcag

SEQ ID NO: 437760 - RNA, 25 nt, Human
gcccacugaccauaccucagccccu

SEQ ID NO: 437761 - RNA, 32 nt, Human
gcccacugaccucuccgugccuggugcaggcc

SEQ ID NO: 437762 - RNA, 32 nt, Human
gcccacugcaaccucugccuccuggguucaag

SEQ ID NO: 437763 - RNA, 32 nt, Human
gcccacugcagcccgaguucucuggcucccgg

SEQ ID NO: 437764 - RNA, 32 nt, Human
gcccacugcagcccuccagccucuggucccca

SEQ ID NO: 437765 - RNA, 32 nt, Human
gcccacugcagccuccaacuccugggcucaag

SEQ ID NO: 437766 - RNA, 22 nt, Human
gcccacugcagccuccaccucc

SEQ ID NO: 437767 - RNA, 32 nt, Human
gcccacugccucccuccuuccuggguggagca

SEQ ID NO: 437768 - RNA, 31 nt, Human
gcccacugccucucgguguugccuucauaau

SEQ ID NO: 437769 - RNA, 20 nt, Human
gcccacugccugcccagagc

SEQ ID NO: 437770 - RNA, 32 nt, Human
gcccacugccuugccagucuugccaggugguc

SEQ ID NO: 437771 - RNA, 32 nt, Human
gcccacuggcugcaacaaguaccacugacagg

SEQ ID NO: 437772 - RNA, 32 nt, Human
gcccacugggcccugacugggaguccccugcc

SEQ ID NO: 437773 - RNA, 32 nt, Human
gcccacugggguguguggcagagccaggaccc

SEQ ID NO: 437774 - RNA, 32 nt, Human
gcccacugugaaaccacuagguucuagguccu

SEQ ID NO: 437775 - RNA, 32 nt, Human
gcccacugugguucuggcaccuccagggcuga

SEQ ID NO: 437776 - RNA, 32 nt, Human
gcccacuguguccugaauguuuuuguuauuuu

SEQ ID NO: 437777 - RNA, 16 nt, Human
gcccacugugucuagg

SEQ ID NO: 437778 - RNA, 32 nt, Human
gcccacuuaccaccagguggguguuuaggaca

SEQ ID NO: 437779 - RNA, 32 nt, Human
gcccacuuaguuucuugggagcaacagcacgu

SEQ ID NO: 437780 - RNA, 32 nt, Human
gcccacuucccaagaaucucacuucucagggc

SEQ ID NO: 437781 - RNA, 32 nt, Human
gcccacuucccacucaccuccaccucauugcc

SEQ ID NO: 437782 - RNA, 32 nt, Human
gcccacuucuccuucgcuuuccugagcccuaa

SEQ ID NO: 437783 - RNA, 23 nt, Human
gcccacuucucugcagcccaggc

SEQ ID NO: 437784 - RNA, 32 nt, Human
gcccacuugggacucaagcuggguccugugau

SEQ ID NO: 437785 - RNA, 32 nt, Human
gcccacuuguccccugcugccugcccaaacac

SEQ ID NO: 437786 - RNA, 32 nt, Human
gcccacuugucuuccuggauauuuggggguga

SEQ ID NO: 437787 - RNA, 32 nt, Human
gcccacuuuccagggcugugcuaaggagggaa

SEQ ID NO: 437788 - RNA, 32 nt, Human
gcccacuuuccaguuuggccuuaugcuucaug

SEQ ID NO: 437789 - RNA, 32 nt, Human
gcccacuuuccaguuuggccuuaugcuuuaug

SEQ ID NO: 437790 - RNA, 19 nt, Human
gcccagaaacucuaccuca

SEQ ID NO: 437791 - RNA, 24 nt, Human
gcccagaaaguuccugaagcauca

SEQ ID NO: 437792 - RNA, 22 nt, Human
gcccagaacaacucugaugcca

SEQ ID NO: 437793 - RNA, 32 nt, Human
gcccagaacuucccccagucagccucuccagg

SEQ ID NO: 437794 - RNA, 32 nt, Human
gcccagaacuugccuccagucagccucuccag

SEQ ID NO: 437795 - RNA, 32 nt, Human
gcccagaacuuucuccagucagccucuacaga

SEQ ID NO: 437796 - RNA, 19 nt, Human
gcccagaagacgugcgagu

SEQ ID NO: 437797 - RNA, 32 nt, Human
gcccagaagcucaaggcugcagugagccaagu

SEQ ID NO: 437798 - RNA, 23 nt, Human
gcccagaagcuggugcggccgau

SEQ ID NO: 437799 - RNA, 22 nt, Human
gcccagaagcuguuguggccga

SEQ ID NO: 437800 - RNA, 32 nt, Human
gcccagaagcuugaagcugcagugagcuagga

SEQ ID NO: 437801 - RNA, 32 nt, Human
gcccagaaggcagagguuguagugagcugaga

SEQ ID NO: 437802 - RNA, 32 nt, Human
gcccagaaggucgaggcugcagugagcugaga

SEQ ID NO: 437803 - RNA, 21 nt, Human
gcccagaagguggcaguccca

SEQ ID NO: 437804 - RNA, 32 nt, Human
gcccagaagguugaagcugcagugaguuguga

SEQ ID NO: 437805 - RNA, 32 nt, Human
gcccagaagguugagacugcagugagccacca

SEQ ID NO: 437806 - RNA, 32 nt, Human
gcccagaagucaaaguccagcaggggcaaagg

SEQ ID NO: 437807 - RNA, 32 nt, Human
gcccagaaguucaagacuagccugggcaacau

SEQ ID NO: 437808 - RNA, 32 nt, Human
gcccagaaguucaagggugcagugagcuauga

SEQ ID NO: 437809 - RNA, 32 nt, Human
gcccagaaguucgagguugcagugagccauga

SEQ ID NO: 437810 - RNA, 24 nt, Human
gcccagaaguugcugcagugguuc

SEQ ID NO: 437811 - RNA, 32 nt, Human
gcccagaaguuugagacugcagugagccauga

SEQ ID NO: 437812 - RNA, 32 nt, Human
gcccagaaguuugaggcugcagugagccguca

SEQ ID NO: 437813 - RNA, 32 nt, Human
gcccagaaugaagaaagcaagcaggaguguug

SEQ ID NO: 437814 - RNA, 21 nt, Human
gcccagaaugggaaccucaga

SEQ ID NO: 437815 - RNA, 21 nt, Human
gcccagacacaccuggguccc

SEQ ID NO: 437816 - RNA, 32 nt, Human
gcccagacauacaucccuccucugguaccaca

SEQ ID NO: 437817 - RNA, 17 nt, Human
gcccagaccacccagga

SEQ ID NO: 437818 - RNA, 32 nt, Human
gcccagaccaugggacaaguuccuagggcucc

SEQ ID NO: 437819 - RNA, 18 nt, Human
gcccagacccaagggccc

SEQ ID NO: 437820 - RNA, 20 nt, Human
gcccagacccagggacccuu

SEQ ID NO: 437821 - RNA, 19 nt, Human
gcccagaccccuaugccuu

SEQ ID NO: 437822 - RNA, 32 nt, Human
gcccagacccucccccaggccuaagaggagag

SEQ ID NO: 437823 - RNA, 20 nt, Human
gcccagacccugacaucccu

SEQ ID NO: 437824 - RNA, 20 nt, Human
gcccagacccuguggucccu

SEQ ID NO: 437825 - RNA, 32 nt, Human
gcccagaccgccucucuggaagguguuguagg

SEQ ID NO: 437826 - RNA, 22 nt, Human
gcccagaccgugggagagccag

SEQ ID NO: 437827 - RNA, 21 nt, Human
gcccagaccugggagcuccuu

SEQ ID NO: 437828 - RNA, 18 nt, Human
gcccagacgcccggcgca

SEQ ID NO: 437829 - RNA, 21 nt, Human
gcccagacuagaaugcagugg

SEQ ID NO: 437830 - RNA, 22 nt, Human
gcccagacuagaaugcaguggu

SEQ ID NO: 437831 - RNA, 23 nt, Human
gcccagacuagaaugcaguggug

SEQ ID NO: 437832 - RNA, 20 nt, Human
gcccagacuagagugcaaug

SEQ ID NO: 437833 - RNA, 22 nt, Human
gcccagacuagagugcaauggc

SEQ ID NO: 437834 - RNA, 23 nt, Human
gcccagacuagagugcaguggug

SEQ ID NO: 437835 - RNA, 32 nt, Human
gcccagacucacacaucuuccuccaggucagg

SEQ ID NO: 437836 - RNA, 20 nt, Human
gcccagacugaagugcagug

SEQ ID NO: 437837 - RNA, 21 nt, Human
gcccagacugaagugcagugg

SEQ ID NO: 437838 - RNA, 32 nt, Human
gcccagacugaucuugagcuucugagcuccag

SEQ ID NO: 437839 - RNA, 24 nt, Human
gcccagacuggaagugagaggcau

SEQ ID NO: 437840 - RNA, 24 nt, Human
gcccagacuggaauacaguggugu

SEQ ID NO: 437841 - RNA, 23 nt, Human
gcccagacuggagggcaguggcg

SEQ ID NO: 437842 - RNA, 21 nt, Human
gcccagacuggagugcaaugg

SEQ ID NO: 437843 - RNA, 19 nt, Human
gcccagacuggagugcagu

SEQ ID NO: 437844 - RNA, 21 nt, Human
gcccagacuggagugcaguag

SEQ ID NO: 437845 - RNA, 22 nt, Human
gcccagacuggagugcaguagc

SEQ ID NO: 437846 - RNA, 20 nt, Human
gcccagacuggagugcagug

SEQ ID NO: 437847 - RNA, 21 nt, Human
gcccagacuggagugcagugg

SEQ ID NO: 437848 - RNA, 23 nt, Human
gcccagacuggagugcaguggug

SEQ ID NO: 437849 - RNA, 24 nt, Human
gcccagacuggagugcaguggugu

SEQ ID NO: 437850 - RNA, 21 nt, Human
gcccagacuggagugcugugg

SEQ ID NO: 437851 - RNA, 18 nt, Human
gcccagacuggccagccc

SEQ ID NO: 437852 - RNA, 19 nt, Human
gcccagacuggcucagccc

SEQ ID NO: 437853 - RNA, 32 nt, Human
gcccagacuggucucaaacuccuggguucaag

SEQ ID NO: 437854 - RNA, 32 nt, Human
gcccagacuggucucgaacuccugggcucaaa

SEQ ID NO: 437855 - RNA, 22 nt, Human
gcccagacuguaguacaguggc

SEQ ID NO: 437856 - RNA, 32 nt, Human
gcccagacuguugucaagucggccuguccagg

SEQ ID NO: 437857 - RNA, 22 nt, Human
gcccagagaacagcagagucag

SEQ ID NO: 437858 - RNA, 32 nt, Human
gcccagagacaggggaaggcagccuguccauc

SEQ ID NO: 437859 - RNA, 32 nt, Human
gcccagagaccggagcgcggagaccucagcca

SEQ ID NO: 437860 - RNA, 32 nt, Human
gcccagagaggagcaugucuuccuuuaccucc

SEQ ID NO: 437861 - RNA, 32 nt, Human
gcccagagcagccuggccauauaagggaagga

SEQ ID NO: 437862 - RNA, 22 nt, Human
gcccagagcaggaggcagagcc

SEQ ID NO: 437863 - RNA, 32 nt, Human
gcccagagcagugcacuccagucugcagguac

SEQ ID NO: 437864 - RNA, 18 nt, Human
gcccagagcauccugccu

SEQ ID NO: 437865 - RNA, 20 nt, Human
gcccagagccagaaccaaga

SEQ ID NO: 437866 - RNA, 32 nt, Human
gcccagagcccaaacucagcaguuaugaguug

SEQ ID NO: 437867 - RNA, 21 nt, Human
gcccagagcccagcgcucagg

SEQ ID NO: 437868 - RNA, 21 nt, Human
gcccagagcccagcuccaagg

SEQ ID NO: 437869 - RNA, 26 nt, Human
gcccagagcccuggggugcucaggcg

SEQ ID NO: 437870 - RNA, 32 nt, Human
gcccagagcugacuccugauuuaaccgcuggc

SEQ ID NO: 437871 - RNA, 19 nt, Human
gcccagagcugcugggccc

SEQ ID NO: 437872 - RNA, 21 nt, Human
gcccagagcugcugggucccu

SEQ ID NO: 437873 - RNA, 25 nt, Human
gcccagagcugggaccuggagcacg

SEQ ID NO: 437874 - RNA, 32 nt, Human
gcccagagcugggugaguggggagacaccuca

SEQ ID NO: 437875 - RNA, 32 nt, Human
gcccagagcugguauagccaccagcagagcca

SEQ ID NO: 437876 - RNA, 23 nt, Human
gcccagaggaaucccuguuccca

SEQ ID NO: 437877 - RNA, 22 nt, Human
gcccagaggagcugggagccgg

SEQ ID NO: 437878 - RNA, 19 nt, Human
gcccagaggagggcagcag

SEQ ID NO: 437879 - RNA, 32 nt, Human
gcccagaggcaguggcuggggucccugcaggu

SEQ ID NO: 437880 - RNA, 19 nt, Human
gcccagaggccggggccag

SEQ ID NO: 437881 - RNA, 32 nt, Human
gcccagaggcggagguugcagugagccgagau

SEQ ID NO: 437882 - RNA, 21 nt, Human
gcccagagggcgccaggcuag

SEQ ID NO: 437883 - RNA, 22 nt, Human
gcccagaggguggcaagaacag

SEQ ID NO: 437884 - RNA, 19 nt, Human
gcccagagggugggcgcgg

SEQ ID NO: 437885 - RNA, 32 nt, Human
gcccagagguccaagcuauacugugcaggaca

SEQ ID NO: 437886 - RNA, 32 nt, Human
gcccagaggucccuggcuucaacucgaguccu

SEQ ID NO: 437887 - RNA, 32 nt, Human
gcccagagugaaccguccuuucacacaucugg

SEQ ID NO: 437888 - RNA, 18 nt, Human
gcccagaguguggguccc

SEQ ID NO: 437889 - RNA, 20 nt, Human
gcccagaguuucugccucca

SEQ ID NO: 437890 - RNA, 32 nt, Human
gcccagauagccccacugcacuccagccuggg

SEQ ID NO: 437891 - RNA, 23 nt, Human
gcccagaucacagaucccaugug

SEQ ID NO: 437892 - RNA, 19 nt, Human
gcccagaucauggccgcca

SEQ ID NO: 437893 - RNA, 20 nt, Human
gcccagaucccagccuugag

SEQ ID NO: 437894 - RNA, 32 nt, Human
gcccagaucucuccacaagagcugaggguuuc

SEQ ID NO: 437895 - RNA, 32 nt, Human
gcccagaucucugcacuucucagucccagauc

SEQ ID NO: 437896 - RNA, 32 nt, Human
gcccagaucuguccugcaggauggagccagca

SEQ ID NO: 437897 - RNA, 32 nt, Human
gcccagaugacugucuaaccagaccucagaau

SEQ ID NO: 437898 - RNA, 20 nt, Human
gcccagaugccaagcucccu

SEQ ID NO: 437899 - RNA, 32 nt, Human
gcccagauggagccgaugaggggccgggacac

SEQ ID NO: 437900 - RNA, 32 nt, Human
gcccagauugugccacugcacuccagccuggg

SEQ ID NO: 437901 - RNA, 32 nt, Human
gcccagauugugccacugcauucuagccuggg

SEQ ID NO: 437902 - RNA, 32 nt, Human
gcccagauugugccacugcucuccagccuggg

SEQ ID NO: 437903 - RNA, 32 nt, Human
gcccagauuuguuuguaaagcacuuugacucu

SEQ ID NO: 437904 - RNA, 32 nt, Human
gcccagauuuugguggguuugugccccagcac

SEQ ID NO: 437905 - RNA, 32 nt, Human
gcccagcaaccauggcugaagacuacugggac

SEQ ID NO: 437906 - RNA, 20 nt, Human
gcccagcaagccaggcccuu

SEQ ID NO: 437907 - RNA, 21 nt, Human
gcccagcaaggccagaccaag

SEQ ID NO: 437908 - RNA, 22 nt, Human
gcccagcaaucuucccacccca

SEQ ID NO: 437909 - RNA, 32 nt, Human
gcccagcacacagcaccccucaugcagcuggc

SEQ ID NO: 437910 - RNA, 32 nt, Human
gcccagcacacagugggcaucggguaagaaaa

SEQ ID NO: 437911 - RNA, 32 nt, Human
gcccagcacagggagcagggaguuuucucuag

SEQ ID NO: 437912 - RNA, 32 nt, Human
gcccagcacagugcccugcacacaguagucgc

SEQ ID NO: 437913 - RNA, 32 nt, Human
gcccagcaccacagccuuuccccagccaggag

SEQ ID NO: 437914 - RNA, 32 nt, Human
gcccagcaccacugcccaccuagcuguccugg

SEQ ID NO: 437915 - RNA, 32 nt, Human
gcccagcacccagcaauaacucuaauaauguu

SEQ ID NO: 437916 - RNA, 32 nt, Human
gcccagcaccccaaaucucugccaucacacgg

SEQ ID NO: 437917 - RNA, 18 nt, Human
gcccagcaccgugcacug

SEQ ID NO: 437918 - RNA, 32 nt, Human
gcccagcaccuccucaggccagccuggugcca

SEQ ID NO: 437919 - RNA, 22 nt, Human
gcccagcaccugguguuugcca

SEQ ID NO: 437920 - RNA, 32 nt, Human
gcccagcacuccucugggcugcucucaaacca

SEQ ID NO: 437921 - RNA, 17 nt, Human
gcccagcacuguccagg

SEQ ID NO: 437922 - RNA, 20 nt, Human
gcccagcagacgagacagca

SEQ ID NO: 437923 - RNA, 32 nt, Human
gcccagcagagccaccacccagcaucccaggc

SEQ ID NO: 437924 - RNA, 19 nt, Human
gcccagcagagccuaagca

SEQ ID NO: 437925 - RNA, 32 nt, Human
gcccagcagagggaggcagggcacugccuggc

SEQ ID NO: 437926 - RNA, 32 nt, Human
gcccagcagauggagggccaggaggaggaaga

SEQ ID NO: 437927 - RNA, 32 nt, Human
gcccagcagcacauuccagucacugcccccgc

SEQ ID NO: 437928 - RNA, 32 nt, Human
gcccagcagcagcuggaggaggaggaggagga

SEQ ID NO: 437929 - RNA, 32 nt, Human
gcccagcagcccagccacagaggagccagcga

SEQ ID NO: 437930 - RNA, 32 nt, Human
gcccagcagccucugcucccuccuggggaccc

SEQ ID NO: 437931 - RNA, 32 nt, Human
gcccagcagccugauaggacucuccuagucca

SEQ ID NO: 437932 - RNA, 32 nt, Human
gcccagcagcucaaagaagaaaaagaaggacu

SEQ ID NO: 437933 - RNA, 32 nt, Human
gcccagcagcuuucucuuucagucccauaagg

SEQ ID NO: 437934 - RNA, 32 nt, Human
gcccagcaggaggcagggguagagugauggaa

SEQ ID NO: 437935 - RNA, 32 nt, Human
gcccagcaggcagagguugcagugagcugaga

SEQ ID NO: 437936 - RNA, 32 nt, Human
gcccagcaguagcuggagaggcaggcagaggg

SEQ ID NO: 437937 - RNA, 32 nt, Human
gcccagcagucugccuucauucccucaaggaa

SEQ ID NO: 437938 - RNA, 32 nt, Human
gcccagcagugccucugcucagcuaccugggc

SEQ ID NO: 437939 - RNA, 32 nt, Human
gcccagcaguuggaggcugcagugagcuauga

SEQ ID NO: 437940 - RNA, 32 nt, Human
gcccagcauagcugcagugucacaaagccaug

SEQ ID NO: 437941 - RNA, 32 nt, Human
gcccagcauccagcuggcccgccagggcuucc

SEQ ID NO: 437942 - RNA, 32 nt, Human
gcccagcauccaggcugucuagggccguggga

SEQ ID NO: 437943 - RNA, 18 nt, Human
gcccagcauccgaccgca

SEQ ID NO: 437944 - RNA, 32 nt, Human
gcccagcauccuggggauccagcggauggaca

SEQ ID NO: 437945 - RNA, 32 nt, Human
gcccagccacaaguucucaauucuuaagagac

SEQ ID NO: 437946 - RNA, 32 nt, Human
gcccagccacaucaucuuuaucuccugggauu

SEQ ID NO: 437947 - RNA, 32 nt, Human
gcccagccacauuccugccacccuucuucuuc

SEQ ID NO: 437948 - RNA, 32 nt, Human
gcccagccaccacugccucucagcuuaaacag

SEQ ID NO: 437949 - RNA, 22 nt, Human
gcccagccacucagaaggcuga

SEQ ID NO: 437950 - RNA, 22 nt, Human
gcccagccacucaggaggcuga

SEQ ID NO: 437951 - RNA, 22 nt, Human
gcccagccacucgggaggcuga

SEQ ID NO: 437952 - RNA, 32 nt, Human
gcccagccacucucccuggggccuggugggua

SEQ ID NO: 437953 - RNA, 32 nt, Human
gcccagccacugcacuucaccggaugccgucu

SEQ ID NO: 437954 - RNA, 32 nt, Human
gcccagccagagagcaggugcaggugucaucc

SEQ ID NO: 437955 - RNA, 20 nt, Human
gcccagccagagcucugcug

SEQ ID NO: 437956 - RNA, 19 nt, Human
gcccagccagcagggccag

SEQ ID NO: 437957 - RNA, 32 nt, Human
gcccagccagccagggccgcgaggccgaggcc

SEQ ID NO: 437958 - RNA, 19 nt, Human
gcccagccagcuccagcaa

SEQ ID NO: 437959 - RNA, 32 nt, Human
gcccagccagcugugccggcguuuguuggcua

SEQ ID NO: 437960 - RNA, 32 nt, Human
gcccagccagcugugccggcguuuguuggcug

SEQ ID NO: 437961 - RNA, 20 nt, Human
gcccagccaggccccaggca

SEQ ID NO: 437962 - RNA, 32 nt, Human
gcccagcccacagcuucucccagccugaaacc

SEQ ID NO: 437963 - RNA, 32 nt, Human
gcccagcccagaacaaacacccuucagagccu

SEQ ID NO: 437964 - RNA, 18 nt, Human
gcccagcccagagcacag

SEQ ID NO: 437965 - RNA, 20 nt, Human
gcccagcccagccccaccgg

SEQ ID NO: 437966 - RNA, 25 nt, Human
gcccagcccagcccuacucccuccc

SEQ ID NO: 437967 - RNA, 32 nt, Human
gcccagcccagccugagaaauacccucagcag

SEQ ID NO: 437968 - RNA, 22 nt, Human
gcccagcccagccuggcgacug

SEQ ID NO: 437969 - RNA, 23 nt, Human
gcccagcccagcucaugccuccc

SEQ ID NO: 437970 - RNA, 23 nt, Human
gcccagcccagcugcucugccca

SEQ ID NO: 437971 - RNA, 32 nt, Human
gcccagcccaggaguuugaggcugcaaugagc

SEQ ID NO: 437972 - RNA, 32 nt, Human
gcccagccccaaaccuagacccucuccugaag

SEQ ID NO: 437973 - RNA, 32 nt, Human
gcccagccccaaggaugagcaagacauguggg

SEQ ID NO: 437974 - RNA, 27 nt, Human
gcccagccccaggcccagcagcagcag

SEQ ID NO: 437975 - RNA, 17 nt, Human
gcccagcccccaucggg

SEQ ID NO: 437976 - RNA, 24 nt, Human
gcccagccccgagccccgacagug

SEQ ID NO: 437977 - RNA, 20 nt, Human
gcccagccccgcccucccca

SEQ ID NO: 437978 - RNA, 20 nt, Human
gcccagccccgccucaggga

SEQ ID NO: 437979 - RNA, 18 nt, Human
gcccagccccuacugcug

SEQ ID NO: 437980 - RNA, 20 nt, Human
gcccagccccugcugcucug

SEQ ID NO: 437981 - RNA, 26 nt, Human
gcccagccccugcuuggccccuccca

SEQ ID NO: 437982 - RNA, 18 nt, Human
gcccagccccuguccccu

SEQ ID NO: 437983 - RNA, 22 nt, Human
gcccagcccgcagcccccuccc

SEQ ID NO: 437984 - RNA, 32 nt, Human
gcccagcccucagaaacccuucagugcuacau

SEQ ID NO: 437985 - RNA, 23 nt, Human
gcccagcccucccccugcugcug

SEQ ID NO: 437986 - RNA, 20 nt, Human
gcccagcccugcagggcuga

SEQ ID NO: 437987 - RNA, 32 nt, Human
gcccagcccugccccuugcccccguggcuucc

SEQ ID NO: 437988 - RNA, 32 nt, Human
gcccagcccugccuugcgccacccugcgcugu

SEQ ID NO: 437989 - RNA, 17 nt, Human
gcccagcccugcugcug

SEQ ID NO: 437990 - RNA, 32 nt, Human
gcccagcccuggaagguggaaaaagaaaaguu

SEQ ID NO: 437991 - RNA, 32 nt, Human
gcccagcccuggagggcaggcggccacucccc

SEQ ID NO: 437992 - RNA, 22 nt, Human
gcccagcccugggaaccugcug

SEQ ID NO: 437993 - RNA, 17 nt, Human
gcccagccgcagccgca

SEQ ID NO: 437994 - RNA, 32 nt, Human
gcccagccgcucucccuguccuccuccccuua

SEQ ID NO: 437995 - RNA, 32 nt, Human
gcccagccuauuugucuugccugcuguaucuu

SEQ ID NO: 437996 - RNA, 32 nt, Human
gcccagccuccagguccacggaguggugugga

SEQ ID NO: 437997 - RNA, 32 nt, Human
gcccagccucggccaccaugucccgccagacc

SEQ ID NO: 437998 - RNA, 20 nt, Human
gcccagccucugggccuccc

SEQ ID NO: 437999 - RNA, 32 nt, Human
gcccagccugacugaucccccgugugugacca

SEQ ID NO: 438000 - RNA, 32 nt, Human
gcccagccugcacgucugucccucucugcuuu

SEQ ID NO: 438001 - RNA, 32 nt, Human
gcccagccugccacaccgccuccaggaagcag

SEQ ID NO: 438002 - RNA, 25 nt, Human
gcccagccugccagccgcgcugcug

SEQ ID NO: 438003 - RNA, 32 nt, Human
gcccagccugcccugagcccugaggccagcug

SEQ ID NO: 438004 - RNA, 20 nt, Human
gcccagccuggaguacagug

SEQ ID NO: 438005 - RNA, 20 nt, Human
gcccagccuggagugcagug

SEQ ID NO: 438006 - RNA, 21 nt, Human
gcccagccuggagugcagugg

SEQ ID NO: 438007 - RNA, 22 nt, Human
gcccagccuggagugcaguggc

SEQ ID NO: 438008 - RNA, 32 nt, Human
gcccagccugggagcccagaggguggcaagaa

SEQ ID NO: 438009 - RNA, 20 nt, Human
gcccagccugggcacagcca

SEQ ID NO: 438010 - RNA, 18 nt, Human
gcccagccuguccuggua

SEQ ID NO: 438011 - RNA, 23 nt, Human
gcccagccuucacagcgcuccag

SEQ ID NO: 438012 - RNA, 32 nt, Human
gcccagccuucuguucuauuuaagaacuuuga

SEQ ID NO: 438013 - RNA, 17 nt, Human
gcccagccuugcugcug

SEQ ID NO: 438014 - RNA, 18 nt, Human
gcccagcgacacuggaua

SEQ ID NO: 438015 - RNA, 32 nt, Human
gcccagcgacuuccaaguccucucacagaaga

SEQ ID NO: 438016 - RNA, 21 nt, Human
gcccagcgagaguaccgagga

SEQ ID NO: 438017 - RNA, 32 nt, Human
gcccagcgagaugccagccuuccugucccggg

SEQ ID NO: 438018 - RNA, 32 nt, Human
gcccagcgaggagucccugcaauaagccccug

SEQ ID NO: 438019 - RNA, 32 nt, Human
gcccagcgccccgccuggaguggaugagccuc

SEQ ID NO: 438020 - RNA, 16 nt, Human
gcccagcgccugaggc

SEQ ID NO: 438021 - RNA, 19 nt, Human
gcccagcgcgaguccuccc

SEQ ID NO: 438022 - RNA, 32 nt, Human
gcccagcgcugaggccugacgggccgggcgga

SEQ ID NO: 438023 - RNA, 23 nt, Human
gcccagcgcuggagugcagcgug

SEQ ID NO: 438024 - RNA, 32 nt, Human
gcccagcggagugcccuucugagcagcgggcg

SEQ ID NO: 438025 - RNA, 32 nt, Human
gcccagcggggaagcuagcaccagccugggcc

SEQ ID NO: 438026 - RNA, 20 nt, Human
gcccagcggggcagagccag

SEQ ID NO: 438027 - RNA, 32 nt, Human
gcccagcgugggguuuucagagacaggggcuc

SEQ ID NO: 438028 - RNA, 32 nt, Human
gcccagcguuuaccacugcugucaagccacag

SEQ ID NO: 438029 - RNA, 32 nt, Human
gcccagcuacauuccucagcugccaagcacuc

SEQ ID NO: 438030 - RNA, 22 nt, Human
gcccagcuacccaggaggcuga

SEQ ID NO: 438031 - RNA, 22 nt, Human
gcccagcuacccgggaggcuga

SEQ ID NO: 438032 - RNA, 22 nt, Human
gcccagcuacucaacaggcuga

SEQ ID NO: 438033 - RNA, 22 nt, Human
gcccagcuacucaagaggcuga

SEQ ID NO: 438034 - RNA, 22 nt, Human
gcccagcuacucagcaggcuga

SEQ ID NO: 438035 - RNA, 22 nt, Human
gcccagcuacucaggaagcuga

SEQ ID NO: 438036 - RNA, 19 nt, Human
gcccagcuacucaggaggc

SEQ ID NO: 438037 - RNA, 20 nt, Human
gcccagcuacucaggaggcu

SEQ ID NO: 438038 - RNA, 22 nt, Human
gcccagcuacucaggaggcuga

SEQ ID NO: 438039 - RNA, 22 nt, Human
gcccagcuacucgaaaggcuga

SEQ ID NO: 438040 - RNA, 20 nt, Human
gcccagcuacucgagaggcu

SEQ ID NO: 438041 - RNA, 22 nt, Human
gcccagcuacucgagaggcuga

SEQ ID NO: 438042 - RNA, 20 nt, Human
gcccagcuacucggaaggcu

SEQ ID NO: 438043 - RNA, 22 nt, Human
gcccagcuacucggaaggcuga

SEQ ID NO: 438044 - RNA, 20 nt, Human
gcccagcuacucgggaagcu

SEQ ID NO: 438045 - RNA, 22 nt, Human
gcccagcuacucgggaagcuga

SEQ ID NO: 438046 - RNA, 20 nt, Human
gcccagcuacucgggaggcu

SEQ ID NO: 438047 - RNA, 22 nt, Human
gcccagcuacucgggaggcuga

SEQ ID NO: 438048 - RNA, 32 nt, Human
gcccagcucauuccucacaacggccuucccag

SEQ ID NO: 438049 - RNA, 32 nt, Human
gcccagcucauuuucuccuuucauuuuacaaa

SEQ ID NO: 438050 - RNA, 32 nt, Human
gcccagcuccagggccagcuuggaggagccaa

SEQ ID NO: 438051 - RNA, 32 nt, Human
gcccagcuccgcugcuaucuuugccucacuua

SEQ ID NO: 438052 - RNA, 27 nt, Human
gcccagcuccucaauacuaccuggaaa

SEQ ID NO: 438053 - RNA, 21 nt, Human
gcccagcuccugacacugcug

SEQ ID NO: 438054 - RNA, 32 nt, Human
gcccagcucgucccggccuccaccaagccagc

SEQ ID NO: 438055 - RNA, 24 nt, Human
gcccagcucucucaggauucagca

SEQ ID NO: 438056 - RNA, 32 nt, Human
gcccagcucugcccuucaucccuucagcaccu

SEQ ID NO: 438057 - RNA, 32 nt, Human
gcccagcucuucuucccugcugugucuccagg

SEQ ID NO: 438058 - RNA, 32 nt, Human
gcccagcugaaucuuggcuucuggaccuugac

SEQ ID NO: 438059 - RNA, 22 nt, Human
gcccagcugaccaccccuccca

SEQ ID NO: 438060 - RNA, 32 nt, Human
gcccagcugcagggagcuucuggccugggacc

SEQ ID NO: 438061 - RNA, 19 nt, Human
gcccagcugcccuacccca

SEQ ID NO: 438062 - RNA, 19 nt, Human
gcccagcugccucagagca

SEQ ID NO: 438063 - RNA, 21 nt, Human
gcccagcugcucccaucagca

SEQ ID NO: 438064 - RNA, 32 nt, Human
gcccagcuggagggcccgaggcugcagggugu

SEQ ID NO: 438065 - RNA, 20 nt, Human
gcccagcuggagugcagugg

SEQ ID NO: 438066 - RNA, 23 nt, Human
gcccagcuggagugcaguggcgu

SEQ ID NO: 438067 - RNA, 23 nt, Human
gcccagcuggagugcaguggugu

SEQ ID NO: 438068 - RNA, 20 nt, Human
gcccagcuggccaccuagaa

SEQ ID NO: 438069 - RNA, 32 nt, Human
gcccagcuggccuggcccccagcuucaccucu

SEQ ID NO: 438070 - RNA, 32 nt, Human
gcccagcuggcuuaguggaaguuguccaaccc

SEQ ID NO: 438071 - RNA, 22 nt, Human
gcccagcugggagggcccaggc

SEQ ID NO: 438072 - RNA, 32 nt, Human
gcccagcugggcugccucaggugucaggaagg

SEQ ID NO: 438073 - RNA, 32 nt, Human
gcccagcuggguaaccugcucaaguucaacug

SEQ ID NO: 438074 - RNA, 32 nt, Human
gcccagcuggguuggaucuucucuccauuccc

SEQ ID NO: 438075 - RNA, 21 nt, Human
gcccagcuguccaugcugcug

SEQ ID NO: 438076 - RNA, 18 nt, Human
gcccagcuguccauggcc

SEQ ID NO: 438077 - RNA, 32 nt, Human
gcccagcuucaugugcuagggggcaugauaau

SEQ ID NO: 438078 - RNA, 18 nt, Human
gcccagcuuccugaagca

SEQ ID NO: 438079 - RNA, 23 nt, Human
gcccagcuucuucaagaccuuca

SEQ ID NO: 438080 - RNA, 32 nt, Human
gcccagcuugccaaggugaggggcuggggcau

SEQ ID NO: 438081 - RNA, 32 nt, Human
gcccagcuugccaggcacugagcuagaagccc

SEQ ID NO: 438082 - RNA, 32 nt, Human
gcccagcuugcuggcugucagugcuugaugug

SEQ ID NO: 438083 - RNA, 32 nt, Human
gcccagcuuggcucccccuccuggcuggccuc

SEQ ID NO: 438084 - RNA, 32 nt, Human
gcccagcuuggggcucacgccuguaaucccag

SEQ ID NO: 438085 - RNA, 22 nt, Human
gcccagcuuucccaggggcaca

SEQ ID NO: 438086 - RNA, 19 nt, Human
gcccagcuuugagggcuga

SEQ ID NO: 438087 - RNA, 32 nt, Human
gcccagcuuuugccugcacucuugccugcugc

SEQ ID NO: 438088 - RNA, 32 nt, Human
gcccaggaaacaaguugaaaucccaggaaucu

SEQ ID NO: 438089 - RNA, 32 nt, Human
gcccaggaaauugaggcugcagugagccauga

SEQ ID NO: 438090 - RNA, 24 nt, Human
gcccaggaacaugcccagagccag

SEQ ID NO: 438091 - RNA, 32 nt, Human
gcccaggaacccagacuggacuucagucuccc

SEQ ID NO: 438092 - RNA, 21 nt, Human
gcccaggaaccccagacccag

SEQ ID NO: 438093 - RNA, 32 nt, Human
gcccaggaaccccagacccagggggaggaagg

SEQ ID NO: 438094 - RNA, 32 nt, Human
gcccaggaacuggagccacagagcuggugcug

SEQ ID NO: 438095 - RNA, 32 nt, Human
gcccaggaacugucaucagagcagaaaucaag

SEQ ID NO: 438096 - RNA, 32 nt, Human
gcccaggaagcagagauuccagugaguugaga

SEQ ID NO: 438097 - RNA, 32 nt, Human
gcccaggaagcagagguugcagugagccucga

SEQ ID NO: 438098 - RNA, 19 nt, Human
gcccaggaagccggucagu

SEQ ID NO: 438099 - RNA, 19 nt, Human
gcccaggaagcggaggcug

SEQ ID NO: 438100 - RNA, 32 nt, Human
gcccaggaagcggagguuacagugagcugaua

SEQ ID NO: 438101 - RNA, 32 nt, Human
gcccaggaagcggagguugcaaugagccgaga

SEQ ID NO: 438102 - RNA, 25 nt, Human
gcccaggaagcggagguugugguga

SEQ ID NO: 438103 - RNA, 22 nt, Human
gcccaggaaggacaggagccag

SEQ ID NO: 438104 - RNA, 32 nt, Human
gcccaggaagucaaggcugcagugagcuguga

SEQ ID NO: 438105 - RNA, 32 nt, Human
gcccaggaaguggagguugcagugagcagaga

SEQ ID NO: 438106 - RNA, 32 nt, Human
gcccaggaaguugaggcugcagugagcuguga

SEQ ID NO: 438107 - RNA, 32 nt, Human
gcccaggaaguuugugagccagccuggcccug

SEQ ID NO: 438108 - RNA, 32 nt, Human
gcccaggaauaagaaguauggcuggagacucu

SEQ ID NO: 438109 - RNA, 32 nt, Human
gcccaggaaugcagcugggggccaggccguga

SEQ ID NO: 438110 - RNA, 32 nt, Human
gcccaggaauuggaggcugcagugagcuauga

SEQ ID NO: 438111 - RNA, 32 nt, Human
gcccaggaauuugaggcugcagugagcuauua

SEQ ID NO: 438112 - RNA, 32 nt, Human
gcccaggacacugccuuugcugccuucugucu

SEQ ID NO: 438113 - RNA, 32 nt, Human
gcccaggacagaagccauggcauaugacaaag

SEQ ID NO: 438114 - RNA, 32 nt, Human
gcccaggacagccguuucugcccacacacaca

SEQ ID NO: 438115 - RNA, 23 nt, Human
gcccaggacauggacuggucucu

SEQ ID NO: 438116 - RNA, 22 nt, Human
gcccaggacccccacaguggug

SEQ ID NO: 438117 - RNA, 22 nt, Human
gcccaggaccuccggagcagag

SEQ ID NO: 438118 - RNA, 23 nt, Human
gcccaggaccuuuggccaauccc

SEQ ID NO: 438119 - RNA, 32 nt, Human
gcccaggacgcaugggcucugaugggaagagg

SEQ ID NO: 438120 - RNA, 32 nt, Human
gcccaggacggaggaggagguggugaaacagg

SEQ ID NO: 438121 - RNA, 15 nt, Human
gcccaggacugcagc

SEQ ID NO: 438122 - RNA, 32 nt, Human
gcccaggagacagagguugcagugagccaaga

SEQ ID NO: 438123 - RNA, 20 nt, Human
gcccaggagaccccaccucu

SEQ ID NO: 438124 - RNA, 32 nt, Human
gcccaggagacccuggcccugcccugugcccu

SEQ ID NO: 438125 - RNA, 32 nt, Human
gcccaggagagccagcccucccuguccuccuc

SEQ ID NO: 438126 - RNA, 32 nt, Human
gcccaggagagggaccaggggugcgcccacag

SEQ ID NO: 438127 - RNA, 32 nt, Human
gcccaggagagguggauguuugucugagaaaa

SEQ ID NO: 438128 - RNA, 32 nt, Human
gcccaggagaugcaggcuugcagugagccaug

SEQ ID NO: 438129 - RNA, 25 nt, Human
gcccaggagauggagguugcgguga

SEQ ID NO: 438130 - RNA, 32 nt, Human
gcccaggagauggagguugcggugagugggga

SEQ ID NO: 438131 - RNA, 32 nt, Human
gcccaggagauugaggcugaggcugcacugaa

SEQ ID NO: 438132 - RNA, 32 nt, Human
gcccaggagauugaggcugcagugagcaugau

SEQ ID NO: 438133 - RNA, 32 nt, Human
gcccaggagauugaggcugcagugagccauga

SEQ ID NO: 438134 - RNA, 16 nt, Human
gcccaggagccugggc

SEQ ID NO: 438135 - RNA, 32 nt, Human
gcccaggagcucaagauugcagugagcuauga

SEQ ID NO: 438136 - RNA, 17 nt, Human
gcccaggagcugagggg

SEQ ID NO: 438137 - RNA, 32 nt, Human
gcccaggaggaagggagggcagagggggcugu

SEQ ID NO: 438138 - RNA, 19 nt, Human
gcccaggaggaggaggcug

SEQ ID NO: 438139 - RNA, 32 nt, Human
gcccaggaggaggaggcugcagugagcuaaga

SEQ ID NO: 438140 - RNA, 31 nt, Human
gcccaggaggaggagguggagguugcaguga

SEQ ID NO: 438141 - RNA, 32 nt, Human
gcccaggaggcacaggcugcagugagcagaga

SEQ ID NO: 438142 - RNA, 32 nt, Human
gcccaggaggcagaauuugcagugagcugaga

SEQ ID NO: 438143 - RNA, 32 nt, Human
gcccaggaggcagaggcugcagugagccaugc

SEQ ID NO: 438144 - RNA, 32 nt, Human
gcccaggaggcagaggcugcagugagccgaga

SEQ ID NO: 438145 - RNA, 22 nt, Human
gcccaggaggcagaggucgcag

SEQ ID NO: 438146 - RNA, 22 nt, Human
gcccaggaggcagagguugcag

SEQ ID NO: 438147 - RNA, 32 nt, Human
gcccaggaggcagagguugcaguaagccgaga

SEQ ID NO: 438148 - RNA, 25 nt, Human
gcccaggaggcagagguugcaguga

SEQ ID NO: 438149 - RNA, 32 nt, Human
gcccaggaggcagagguugcagugagccaagg

SEQ ID NO: 438150 - RNA, 32 nt, Human
gcccaggaggcagagguugcagugagcugaga

SEQ ID NO: 438151 - RNA, 32 nt, Human
gcccaggaggcagcuggguugcauggagaggu

SEQ ID NO: 438152 - RNA, 32 nt, Human
gcccaggaggccaagguugcagugggcccaga

SEQ ID NO: 438153 - RNA, 32 nt, Human
gcccaggaggccaagucugcagugagcuaugg

SEQ ID NO: 438154 - RNA, 23 nt, Human
gcccaggaggccuuggauaccag

SEQ ID NO: 438155 - RNA, 24 nt, Human
gcccaggaggcggagauugcagug

SEQ ID NO: 438156 - RNA, 32 nt, Human
gcccaggaggcggagauugcagugagccgaga

SEQ ID NO: 438157 - RNA, 32 nt, Human
gcccaggaggcggagcuugcagugagucgaga

SEQ ID NO: 438158 - RNA, 31 nt, Human
gcccaggaggcggaggcagaggcugcaguga

SEQ ID NO: 438159 - RNA, 24 nt, Human
gcccaggaggcggaggcugcagug

SEQ ID NO: 438160 - RNA, 25 nt, Human
gcccaggaggcggaggcugcaguga

SEQ ID NO: 438161 - RNA, 32 nt, Human
gcccaggaggcggaggcugcagugagcugaga

SEQ ID NO: 438162 - RNA, 24 nt, Human
gcccaggaggcggagguugcagug

SEQ ID NO: 438163 - RNA, 25 nt, Human
gcccaggaggcggagguugcaguga

SEQ ID NO: 438164 - RNA, 32 nt, Human
gcccaggaggcggagguugcagugagcugaga

SEQ ID NO: 438165 - RNA, 24 nt, Human
gcccaggaggcggagguugcggug

SEQ ID NO: 438166 - RNA, 23 nt, Human
gcccaggaggcugaagacaggug

SEQ ID NO: 438167 - RNA, 32 nt, Human
gcccaggaggcugaggcaggagaaucgcuuga

SEQ ID NO: 438168 - RNA, 32 nt, Human
gcccaggaggcugaggcaugagaaucgcuuga

SEQ ID NO: 438169 - RNA, 32 nt, Human
gcccaggaggcuuugagaaagccuucucugug

SEQ ID NO: 438170 - RNA, 32 nt, Human
gcccaggagggaacaggagccugagccagggc

SEQ ID NO: 438171 - RNA, 23 nt, Human
gcccaggagggagugcaguggug

SEQ ID NO: 438172 - RNA, 32 nt, Human
gcccaggaggggccagugggggcuccacucgu

SEQ ID NO: 438173 - RNA, 32 nt, Human
gcccaggaggucaagacugcagugagcuauga

SEQ ID NO: 438174 - RNA, 32 nt, Human
gcccaggaggucaaggcuacagugagccguga

SEQ ID NO: 438175 - RNA, 32 nt, Human
gcccaggaggucaaggcugcagugagccguga

SEQ ID NO: 438176 - RNA, 32 nt, Human
gcccaggaggucaaggcugcagugagcugcac

SEQ ID NO: 438177 - RNA, 32 nt, Human
gcccaggaggucaaggcugcagugagcuguga

SEQ ID NO: 438178 - RNA, 32 nt, Human
gcccaggaggucaaggcugcagugagcuuuga

SEQ ID NO: 438179 - RNA, 32 nt, Human
gcccaggaggucaaggcuucagugagccauga

SEQ ID NO: 438180 - RNA, 32 nt, Human
gcccaggaggucaaggguacagugagccgagg

SEQ ID NO: 438181 - RNA, 32 nt, Human
gcccaggaggucagggcugcagugagccgaga

SEQ ID NO: 438182 - RNA, 30 nt, Human
gcccaggaggucaggucaaggcugcaguga

SEQ ID NO: 438183 - RNA, 32 nt, Human
gcccaggaggucgaggcugcagugagccauga

SEQ ID NO: 438184 - RNA, 32 nt, Human
gcccaggaggucgaggcugcagugagcccuga

SEQ ID NO: 438185 - RNA, 32 nt, Human
gcccaggaggucgaggcugcagugagcuauga

SEQ ID NO: 438186 - RNA, 32 nt, Human
gcccaggaggucgaggcugcagugagcuguga

SEQ ID NO: 438187 - RNA, 32 nt, Human
gcccaggaggucgagguugcagugagcaguaa

SEQ ID NO: 438188 - RNA, 32 nt, Human
gcccaggaggucuaggcugcagugagcuuaug

SEQ ID NO: 438189 - RNA, 22 nt, Human
gcccaggaggugcuggagcuag

SEQ ID NO: 438190 - RNA, 32 nt, Human
gcccaggagguggaaacugcagagagucauga

SEQ ID NO: 438191 - RNA, 32 nt, Human
gcccaggagguggaggcugcaaugagcugaga

SEQ ID NO: 438192 - RNA, 24 nt, Human
gcccaggagguggaggcugcagug

SEQ ID NO: 438193 - RNA, 32 nt, Human
gcccaggagguggaggcugcagugagccaugc

SEQ ID NO: 438194 - RNA, 32 nt, Human
gcccaggagguggagguugcaaugagccgaga

SEQ ID NO: 438195 - RNA, 32 nt, Human
gcccaggagguggagguugcacugagcggaga

SEQ ID NO: 438196 - RNA, 22 nt, Human
gcccaggagguggagguugcag

SEQ ID NO: 438197 - RNA, 24 nt, Human
gcccaggagguggagguugcagug

SEQ ID NO: 438198 - RNA, 32 nt, Human
gcccaggagguggagguugcagugagcagaga

SEQ ID NO: 438199 - RNA, 32 nt, Human
gcccaggagguggagguugcagugagccaaga

SEQ ID NO: 438200 - RNA, 32 nt, Human
gcccaggagguggagguugcagugagccauga

SEQ ID NO: 438201 - RNA, 32 nt, Human
gcccaggagguggagguugcagugagccgaga

SEQ ID NO: 438202 - RNA, 32 nt, Human
gcccaggagguggagguugcagugagcggaga

SEQ ID NO: 438203 - RNA, 32 nt, Human
gcccaggagguggagguugcagugagcugaga

SEQ ID NO: 438204 - RNA, 32 nt, Human
gcccaggagguggagguuucagcgagcugaga

SEQ ID NO: 438205 - RNA, 32 nt, Human
gcccaggaggugguguuggcugcaggguacac

SEQ ID NO: 438206 - RNA, 32 nt, Human
gcccaggagguugagaaugcagugagcuugua

SEQ ID NO: 438207 - RNA, 32 nt, Human
gcccaggagguugaggcugcagugagcagagc

SEQ ID NO: 438208 - RNA, 32 nt, Human
gcccaggagguugaggcugcagugagccauga

SEQ ID NO: 438209 - RNA, 32 nt, Human
gcccaggagguugaggcugcagugagcuauga

SEQ ID NO: 438210 - RNA, 32 nt, Human
gcccaggagguugaggcugcagugagguauga

SEQ ID NO: 438211 - RNA, 32 nt, Human
gcccaggagguugaggcugcagugagguguga

SEQ ID NO: 438212 - RNA, 32 nt, Human
gcccaggagguugaggcugcagugaguucuaa

SEQ ID NO: 438213 - RNA, 32 nt, Human
gcccaggagguugaggucacagugagcuguga

SEQ ID NO: 438214 - RNA, 32 nt, Human
gcccaggagguuguggauacagugaguuauga

SEQ ID NO: 438215 - RNA, 32 nt, Human
gcccaggagguuguggcugcagugagcuguga

SEQ ID NO: 438216 - RNA, 32 nt, Human
gcccaggaguccaggcccccagccccuccucc

SEQ ID NO: 438217 - RNA, 32 nt, Human
gcccaggagucugaggcuucagugaguuauga

SEQ ID NO: 438218 - RNA, 20 nt, Human
gcccaggagugauuugugca

SEQ ID NO: 438219 - RNA, 32 nt, Human
gcccaggaguuagagaccagcccagccugguc

SEQ ID NO: 438220 - RNA, 32 nt, Human
gcccaggaguucaaagcugcagugagucauga

SEQ ID NO: 438221 - RNA, 32 nt, Human
gcccaggaguucaagaccagccuggacaacac

SEQ ID NO: 438222 - RNA, 32 nt, Human
gcccaggaguucaagaccagccuggacaacau

SEQ ID NO: 438223 - RNA, 32 nt, Human
gcccaggaguucaagaccagccuggacagcuu

SEQ ID NO: 438224 - RNA, 32 nt, Human
gcccaggaguucaaggcugcagugagcuauga

SEQ ID NO: 438225 - RNA, 32 nt, Human
gcccaggaguucaaggcuucagugagccauga

SEQ ID NO: 438226 - RNA, 20 nt, Human
gcccaggaguucagggccag

SEQ ID NO: 438227 - RNA, 32 nt, Human
gcccaggaguucagggcugcagugagccuuga

SEQ ID NO: 438228 - RNA, 32 nt, Human
gcccaggaguucagggcugcagugagguacga

SEQ ID NO: 438229 - RNA, 32 nt, Human
gcccaggaguucgagaccagccuggacaacau

SEQ ID NO: 438230 - RNA, 32 nt, Human
gcccaggaguucgagaucagccuggacaauac

SEQ ID NO: 438231 - RNA, 32 nt, Human
gcccaggaguucgaggcugcagugagcuauga

SEQ ID NO: 438232 - RNA, 32 nt, Human
gcccaggaguucgggguuacagugagcugugg

SEQ ID NO: 438233 - RNA, 32 nt, Human
gcccaggaguuggagaccagccuggauaacaa

SEQ ID NO: 438234 - RNA, 32 nt, Human
gcccaggaguuggagaccugccugggcaacau

SEQ ID NO: 438235 - RNA, 32 nt, Human
gcccaggaguuggaggccacagugagcuauga

SEQ ID NO: 438236 - RNA, 32 nt, Human
gcccaggaguuggaggccgcagugagcuguga

SEQ ID NO: 438237 - RNA, 32 nt, Human
gcccaggaguuuaaggcugcagugagcuauga

SEQ ID NO: 438238 - RNA, 32 nt, Human
gcccaggaguuuaaggcugcagugagcuugga

SEQ ID NO: 438239 - RNA, 32 nt, Human
gcccaggaguuugaagcugcagugagcuauga

SEQ ID NO: 438240 - RNA, 32 nt, Human
gcccaggaguuugacaccagcaugggcaauau

SEQ ID NO: 438241 - RNA, 32 nt, Human
gcccaggaguuugagaccagccuggacaacaa

SEQ ID NO: 438242 - RNA, 29 nt, Human
gcccaggaguuugagaguuugagcaguga

SEQ ID NO: 438243 - RNA, 32 nt, Human
gcccaggaguuugaggaugcagugagcuaugg

SEQ ID NO: 438244 - RNA, 32 nt, Human
gcccaggaguuugaggcuacagugagcuguga

SEQ ID NO: 438245 - RNA, 32 nt, Human
gcccaggaguuugaggcuccagugagcuguga

SEQ ID NO: 438246 - RNA, 32 nt, Human
gcccaggaguuugaggcugcagugagccauca

SEQ ID NO: 438247 - RNA, 32 nt, Human
gcccaggaguuugaggcugcagugagccauga

SEQ ID NO: 438248 - RNA, 32 nt, Human
gcccaggaguuugaggcugcagugagcuauga

SEQ ID NO: 438249 - RNA, 32 nt, Human
gcccaggaguuugaggcugcagugagcuauua

SEQ ID NO: 438250 - RNA, 32 nt, Human
gcccaggaguuugaggcugcagugagcuguga

SEQ ID NO: 438251 - RNA, 32 nt, Human
gcccaggaguuugaggcugcagugaguuauga

SEQ ID NO: 438252 - RNA, 32 nt, Human
gcccaggaguuugaggcugcagugaguuaugg

SEQ ID NO: 438253 - RNA, 32 nt, Human
gcccaggaguuugagguugcagugagcugauc

SEQ ID NO: 438254 - RNA, 32 nt, Human
gcccaggaguuugagguugcagugagcuguga

SEQ ID NO: 438255 - RNA, 32 nt, Human
gcccaggaguuugagguuggccuggacaacau

SEQ ID NO: 438256 - RNA, 32 nt, Human
gcccaggaguuugaguccagccuggacgauau

SEQ ID NO: 438257 - RNA, 32 nt, Human
gcccaggaguuuuagacuagccuggacaacua

SEQ ID NO: 438258 - RNA, 22 nt, Human
gcccaggaucaagggugcggug

SEQ ID NO: 438259 - RNA, 32 nt, Human
gcccaggaucccgggaaaggcaggggaggggg

SEQ ID NO: 438260 - RNA, 32 nt, Human
gcccaggauccucagaggaagauggagaggag

SEQ ID NO: 438261 - RNA, 32 nt, Human
gcccaggaugauaggaggcaaugaagucaagg

SEQ ID NO: 438262 - RNA, 32 nt, Human
gcccaggaugcagagguugaagugagccaaga

SEQ ID NO: 438263 - RNA, 32 nt, Human
gcccaggaugcugaaagcagauuucuucuuga

SEQ ID NO: 438264 - RNA, 19 nt, Human
gcccaggauggagugcagu

SEQ ID NO: 438265 - RNA, 20 nt, Human
gcccaggauggagugcagug

SEQ ID NO: 438266 - RNA, 21 nt, Human
gcccaggauggagugcagugg

SEQ ID NO: 438267 - RNA, 22 nt, Human
gcccaggauggagugcaguggc

SEQ ID NO: 438268 - RNA, 23 nt, Human
gcccaggauggagugcaguggug

SEQ ID NO: 438269 - RNA, 21 nt, Human
gcccaggauggccuggugccc

SEQ ID NO: 438270 - RNA, 32 nt, Human
gcccaggauggccuugaacuccugggcucaag

SEQ ID NO: 438271 - RNA, 32 nt, Human
gcccaggauggucggcugccuggggacauugc

SEQ ID NO: 438272 - RNA, 32 nt, Human
gcccaggauggucggcugccuggggacauugu

SEQ ID NO: 438273 - RNA, 32 nt, Human
gcccaggcaaagcguccgggcagcguaggcgg

SEQ ID NO: 438274 - RNA, 21 nt, Human
gcccaggcaagagugcagugg

SEQ ID NO: 438275 - RNA, 22 nt, Human
gcccaggcaagagugcaguggu

SEQ ID NO: 438276 - RNA, 32 nt, Human
gcccaggcacacugcccaccaccccacccccg

SEQ ID NO: 438277 - RNA, 20 nt, Human
gcccaggcaccacccaagcc

SEQ ID NO: 438278 - RNA, 32 nt, Human
gcccaggcacugauuguggcagaggggccacu

SEQ ID NO: 438279 - RNA, 21 nt, Human
gcccaggcacugcaaaccgcc

SEQ ID NO: 438280 - RNA, 32 nt, Human
gcccaggcacugcaaaccgccaccucccuaua

SEQ ID NO: 438281 - RNA, 19 nt, Human
gcccaggcagaagcagcag

SEQ ID NO: 438282 - RNA, 32 nt, Human
gcccaggcagaucucagacuccugggcucaag

SEQ ID NO: 438283 - RNA, 32 nt, Human
gcccaggcagcaaugggguuccugcagcugcu

SEQ ID NO: 438284 - RNA, 32 nt, Human
gcccaggcagcggaauagagugcagugcuugg

SEQ ID NO: 438285 - RNA, 32 nt, Human
gcccaggcagcguggaggggaaggguagggca

SEQ ID NO: 438286 - RNA, 23 nt, Human
gcccaggcaggaguacaguagug

SEQ ID NO: 438287 - RNA, 21 nt, Human
gcccaggcaggaguacagugg

SEQ ID NO: 438288 - RNA, 32 nt, Human
gcccaggcaggcggaggauacccagggugagg

SEQ ID NO: 438289 - RNA, 32 nt, Human
gcccaggcaggcgggucaugaggucaggagau

SEQ ID NO: 438290 - RNA, 18 nt, Human
gcccaggcagggagacag

SEQ ID NO: 438291 - RNA, 21 nt, Human
gcccaggcaguagugcagugg

SEQ ID NO: 438292 - RNA, 21 nt, Human
gcccaggcaugggagaaacag

SEQ ID NO: 438293 - RNA, 20 nt, Human
gcccaggccaagcaaaagca

SEQ ID NO: 438294 - RNA, 22 nt, Human
gcccaggccagaggguagagca

SEQ ID NO: 438295 - RNA, 21 nt, Human
gcccaggccagagugcagugg

SEQ ID NO: 438296 - RNA, 22 nt, Human
gcccaggccaggccugugguca

SEQ ID NO: 438297 - RNA, 32 nt, Human
gcccaggccagucucaaacuccuggccucaug

SEQ ID NO: 438298 - RNA, 18 nt, Human
gcccaggccccaacacag

SEQ ID NO: 438299 - RNA, 17 nt, Human
gcccaggccccacccca

SEQ ID NO: 438300 - RNA, 20 nt, Human
gcccaggccccaggagccag

SEQ ID NO: 438301 - RNA, 32 nt, Human
gcccaggccccguggcccuggagccucaauaa

SEQ ID NO: 438302 - RNA, 32 nt, Human
gcccaggcccgguggaccugccgccaugcagg

SEQ ID NO: 438303 - RNA, 32 nt, Human
gcccaggcccuuggccuuccucuccccugccu

SEQ ID NO: 438304 - RNA, 32 nt, Human
gcccaggccgcagaggaagcugggcacugggu

SEQ ID NO: 438305 - RNA, 32 nt, Human
gcccaggccggaguacaguggcaugucucagc

SEQ ID NO: 438306 - RNA, 21 nt, Human
gcccaggccggagugcaaugg

SEQ ID NO: 438307 - RNA, 23 nt, Human
gcccaggccggagugcaauggca

SEQ ID NO: 438308 - RNA, 20 nt, Human
gcccaggccggcaguggcug

SEQ ID NO: 438309 - RNA, 20 nt, Human
gcccaggccggggaggggug

SEQ ID NO: 438310 - RNA, 20 nt, Human
gcccaggccgggggcggugg

SEQ ID NO: 438311 - RNA, 21 nt, Human
gcccaggccucuaccccagua

SEQ ID NO: 438312 - RNA, 21 nt, Human
gcccaggccugccuguuccca

SEQ ID NO: 438313 - RNA, 25 nt, Human
gcccaggccuggaagacaaaggcgu

SEQ ID NO: 438314 - RNA, 21 nt, Human
gcccaggccugggaugcagug

SEQ ID NO: 438315 - RNA, 24 nt, Human
gcccaggccugggaugcagugaug

SEQ ID NO: 438316 - RNA, 32 nt, Human
gcccaggccuguaaucccaucacuuugggagg

SEQ ID NO: 438317 - RNA, 32 nt, Human
gcccaggccuucacagacccccaaaccggaac

SEQ ID NO: 438318 - RNA, 24 nt, Human
gcccaggcgccaccacugaugcca

SEQ ID NO: 438319 - RNA, 22 nt, Human
gcccaggcgcccgccugacaca

SEQ ID NO: 438320 - RNA, 20 nt, Human
gcccaggcggaguacaaugg

SEQ ID NO: 438321 - RNA, 22 nt, Human
gcccaggcggaguacaauggug

SEQ ID NO: 438322 - RNA, 18 nt, Human
gcccaggcggcagagccg

SEQ ID NO: 438323 - RNA, 20 nt, Human
gcccaggcgggagugcagug

SEQ ID NO: 438324 - RNA, 21 nt, Human
gcccaggcgggagugcagugg

SEQ ID NO: 438325 - RNA, 22 nt, Human
gcccaggcgggagugcaguggc

SEQ ID NO: 438326 - RNA, 21 nt, Human
gcccaggcggggugcgagugg

SEQ ID NO: 438327 - RNA, 32 nt, Human
gcccaggcgguugaggcugcagugagccauga

SEQ ID NO: 438328 - RNA, 22 nt, Human
gcccaggcguuggcagcagggu

SEQ ID NO: 438329 - RNA, 21 nt, Human
gcccaggcuacagugcagugg

SEQ ID NO: 438330 - RNA, 20 nt, Human
gcccaggcuagagcgcaggg

SEQ ID NO: 438331 - RNA, 21 nt, Human
gcccaggcuagaguauagugg

SEQ ID NO: 438332 - RNA, 22 nt, Human
gcccaggcuagaguauaguggu

SEQ ID NO: 438333 - RNA, 24 nt, Human
gcccaggcuagaguauaguggugu

SEQ ID NO: 438334 - RNA, 19 nt, Human
gcccaggcuagagugcaau

SEQ ID NO: 438335 - RNA, 20 nt, Human
gcccaggcuagagugcaaug

SEQ ID NO: 438336 - RNA, 21 nt, Human
gcccaggcuagagugcaaugg

SEQ ID NO: 438337 - RNA, 23 nt, Human
gcccaggcuagagugcaauggca

SEQ ID NO: 438338 - RNA, 23 nt, Human
gcccaggcuagagugcaauggug

SEQ ID NO: 438339 - RNA, 23 nt, Human
gcccaggcuagagugcacuggug

SEQ ID NO: 438340 - RNA, 20 nt, Human
gcccaggcuagagugcagca

SEQ ID NO: 438341 - RNA, 23 nt, Human
gcccaggcuagagugcagcagug

SEQ ID NO: 438342 - RNA, 19 nt, Human
gcccaggcuagagugcagu

SEQ ID NO: 438343 - RNA, 20 nt, Human
gcccaggcuagagugcagug

SEQ ID NO: 438344 - RNA, 21 nt, Human
gcccaggcuagagugcagugg

SEQ ID NO: 438345 - RNA, 22 nt, Human
gcccaggcuagagugcaguggc

SEQ ID NO: 438346 - RNA, 24 nt, Human
gcccaggcuagagugcaguggcgu

SEQ ID NO: 438347 - RNA, 22 nt, Human
gcccaggcuagagugcaguggu

SEQ ID NO: 438348 - RNA, 23 nt, Human
gcccaggcuagagugcaguggug

SEQ ID NO: 438349 - RNA, 22 nt, Human
gcccaggcuagaguggauuggc

SEQ ID NO: 438350 - RNA, 24 nt, Human
gcccaggcuagaguggauuggcgu

SEQ ID NO: 438351 - RNA, 24 nt, Human
gcccaggcuagcaugcaauggugu

SEQ ID NO: 438352 - RNA, 32 nt, Human
gcccaggcuagccucaaacuccugggcuccag

SEQ ID NO: 438353 - RNA, 32 nt, Human
gcccaggcuagucucaaacuccugggcucaag

SEQ ID NO: 438354 - RNA, 32 nt, Human
gcccaggcuagucuccaacuccugggcucaga

SEQ ID NO: 438355 - RNA, 32 nt, Human
gcccaggcuagucuugaacuccugggcucaag

SEQ ID NO: 438356 - RNA, 32 nt, Human
gcccaggcuagucuugaacuccugggcucgaa

SEQ ID NO: 438357 - RNA, 32 nt, Human
gcccaggcuagucuugaacuccuggguucaag

SEQ ID NO: 438358 - RNA, 32 nt, Human
gcccaggcuaguuuugaauuccugggcucaag

SEQ ID NO: 438359 - RNA, 23 nt, Human
gcccaggcuauggggacaaaggc

SEQ ID NO: 438360 - RNA, 32 nt, Human
gcccaggcucaagugauucuccugccugaacc

SEQ ID NO: 438361 - RNA, 32 nt, Human
gcccaggcuccaggaagugccuugggcagugg

SEQ ID NO: 438362 - RNA, 32 nt, Human
gcccaggcuccuacucuccuugcucagucugc

SEQ ID NO: 438363 - RNA, 32 nt, Human
gcccaggcuccuggugugucugcagugcaggu

SEQ ID NO: 438364 - RNA, 32 nt, Human
gcccaggcucugagagccagcccaggggcggc

SEQ ID NO: 438365 - RNA, 18 nt, Human
gcccaggcugaagcucag

SEQ ID NO: 438366 - RNA, 32 nt, Human
gcccaggcugaagugaucucggcucaccacaa

SEQ ID NO: 438367 - RNA, 23 nt, Human
gcccaggcugaagugcaauguug

SEQ ID NO: 438368 - RNA, 24 nt, Human
gcccaggcugaagugcaauguugu

SEQ ID NO: 438369 - RNA, 20 nt, Human
gcccaggcugaagugcagug

SEQ ID NO: 438370 - RNA, 21 nt, Human
gcccaggcugaagugcagugg

SEQ ID NO: 438371 - RNA, 24 nt, Human
gcccaggcugaagugcaguggugu

SEQ ID NO: 438372 - RNA, 24 nt, Human
gcccaggcugaagugcaguguugu

SEQ ID NO: 438373 - RNA, 21 nt, Human
gcccaggcugaagugccaugg

SEQ ID NO: 438374 - RNA, 23 nt, Human
gcccaggcugaagugccauggug

SEQ ID NO: 438375 - RNA, 32 nt, Human
gcccaggcugaaguguagagugcaguggcaug

SEQ ID NO: 438376 - RNA, 21 nt, Human
gcccaggcugaaguguagugg

SEQ ID NO: 438377 - RNA, 32 nt, Human
gcccaggcugaauucagacuccugggcuuaag

SEQ ID NO: 438378 - RNA, 23 nt, Human
gcccaggcugagagcagcagggu

SEQ ID NO: 438379 - RNA, 32 nt, Human
gcccaggcugaggagcuuggcggcgagguauu

SEQ ID NO: 438380 - RNA, 19 nt, Human
gcccaggcugaguacagug

SEQ ID NO: 438381 - RNA, 20 nt, Human
gcccaggcugaguacagugg

SEQ ID NO: 438382 - RNA, 21 nt, Human
gcccaggcugaguacaguggu

SEQ ID NO: 438383 - RNA, 22 nt, Human
gcccaggcugaguacaguggug

SEQ ID NO: 438384 - RNA, 20 nt, Human
gcccaggcugagugugagug

SEQ ID NO: 438385 - RNA, 32 nt, Human
gcccaggcugaucucagauuccugggcugaag

SEQ ID NO: 438386 - RNA, 32 nt, Human
gcccaggcugaucuugaacuccugggcucaag

SEQ ID NO: 438387 - RNA, 32 nt, Human
gcccaggcugcaacccucuguucccaagggca

SEQ ID NO: 438388 - RNA, 32 nt, Human
gcccaggcugcaaccucgaccucccgggcuca

SEQ ID NO: 438389 - RNA, 20 nt, Human
gcccaggcugcaggagccag

SEQ ID NO: 438390 - RNA, 19 nt, Human
gcccaggcugcagugcagu

SEQ ID NO: 438391 - RNA, 20 nt, Human
gcccaggcugcagugcagug

SEQ ID NO: 438392 - RNA, 21 nt, Human
gcccaggcugcagugcagugg

SEQ ID NO: 438393 - RNA, 22 nt, Human
gcccaggcugcagugcaguggc

SEQ ID NO: 438394 - RNA, 23 nt, Human
gcccaggcugcagugcaguggug

SEQ ID NO: 438395 - RNA, 24 nt, Human
gcccaggcugcagugcaguggugu

SEQ ID NO: 438396 - RNA, 32 nt, Human
gcccaggcugcccugcacuccugccucccagc

SEQ ID NO: 438397 - RNA, 32 nt, Human
gcccaggcugccucucaucuccacccacugac

SEQ ID NO: 438398 - RNA, 20 nt, Human
gcccaggcugcuggagccag

SEQ ID NO: 438399 - RNA, 24 nt, Human
gcccaggcugcuggagugccgugg

SEQ ID NO: 438400 - RNA, 21 nt, Human
gcccaggcuggaauacagugg

SEQ ID NO: 438401 - RNA, 24 nt, Human
gcccaggcuggaaugcaauggcgu

SEQ ID NO: 438402 - RNA, 19 nt, Human
gcccaggcuggaaugcagu

SEQ ID NO: 438403 - RNA, 21 nt, Human
gcccaggcuggaaugcaguag

SEQ ID NO: 438404 - RNA, 22 nt, Human
gcccaggcuggaaugcaguagc

SEQ ID NO: 438405 - RNA, 20 nt, Human
gcccaggcuggaaugcagug

SEQ ID NO: 438406 - RNA, 21 nt, Human
gcccaggcuggaaugcagugg

SEQ ID NO: 438407 - RNA, 22 nt, Human
gcccaggcuggaaugcaguggc

SEQ ID NO: 438408 - RNA, 24 nt, Human
gcccaggcuggaaugcaguggcgu

SEQ ID NO: 438409 - RNA, 23 nt, Human
gcccaggcuggaaugcaguggug

SEQ ID NO: 438410 - RNA, 24 nt, Human
gcccaggcuggaaugcaguggugu

SEQ ID NO: 438411 - RNA, 21 nt, Human
gcccaggcuggaaugcuguag

SEQ ID NO: 438412 - RNA, 32 nt, Human
gcccaggcuggaccugaacuccugggcuugag

SEQ ID NO: 438413 - RNA, 32 nt, Human
gcccaggcuggacucaaauuccugggcucaag

SEQ ID NO: 438414 - RNA, 20 nt, Human
gcccaggcuggacuccagca

SEQ ID NO: 438415 - RNA, 32 nt, Human
gcccaggcuggacuccagcacaguggcaugau

SEQ ID NO: 438416 - RNA, 32 nt, Human
gcccaggcuggacugcagcagcgugaucucag

SEQ ID NO: 438417 - RNA, 20 nt, Human
gcccaggcuggacugcagug

SEQ ID NO: 438418 - RNA, 21 nt, Human
gcccaggcuggacugcagugg

SEQ ID NO: 438419 - RNA, 24 nt, Human
gcccaggcuggacugcaguggcgu

SEQ ID NO: 438420 - RNA, 23 nt, Human
gcccaggcuggacugcaguggug

SEQ ID NO: 438421 - RNA, 21 nt, Human
gcccaggcuggagagcagugg

SEQ ID NO: 438422 - RNA, 22 nt, Human
gcccaggcuggagagcaguggc

SEQ ID NO: 438423 - RNA, 23 nt, Human
gcccaggcuggagagcaguggcg

SEQ ID NO: 438424 - RNA, 21 nt, Human
gcccaggcuggagcauagugg

SEQ ID NO: 438425 - RNA, 20 nt, Human
gcccaggcuggagcgaagug

SEQ ID NO: 438426 - RNA, 20 nt, Human
gcccaggcuggagcgcaaug

SEQ ID NO: 438427 - RNA, 21 nt, Human
gcccaggcuggagcgcaaugg

SEQ ID NO: 438428 - RNA, 22 nt, Human
gcccaggcuggagcgcaauggc

SEQ ID NO: 438429 - RNA, 24 nt, Human
gcccaggcuggagcgcaauggcau

SEQ ID NO: 438430 - RNA, 19 nt, Human
gcccaggcuggagcgcagu

SEQ ID NO: 438431 - RNA, 21 nt, Human
gcccaggcuggagcgcagucc

SEQ ID NO: 438432 - RNA, 20 nt, Human
gcccaggcuggagcgcagug

SEQ ID NO: 438433 - RNA, 21 nt, Human
gcccaggcuggagcgcagugg

SEQ ID NO: 438434 - RNA, 23 nt, Human
gcccaggcuggagcgcaguggug

SEQ ID NO: 438435 - RNA, 21 nt, Human
gcccaggcuggagggcaaugg

SEQ ID NO: 438436 - RNA, 23 nt, Human
gcccaggcuggagggcaauggcg

SEQ ID NO: 438437 - RNA, 24 nt, Human
gcccaggcuggagggcaauggcgu

SEQ ID NO: 438438 - RNA, 22 nt, Human
gcccaggcuggagggcaauggu

SEQ ID NO: 438439 - RNA, 23 nt, Human
gcccaggcuggagggcaauggug

SEQ ID NO: 438440 - RNA, 20 nt, Human
gcccaggcuggagggcagug

SEQ ID NO: 438441 - RNA, 24 nt, Human
gcccaggcuggagggcagugacgu

SEQ ID NO: 438442 - RNA, 21 nt, Human
gcccaggcuggagggcagugg

SEQ ID NO: 438443 - RNA, 22 nt, Human
gcccaggcuggagggcaguggc

SEQ ID NO: 438444 - RNA, 23 nt, Human
gcccaggcuggagggcaguggca

SEQ ID NO: 438445 - RNA, 24 nt, Human
gcccaggcuggagggcaguggcgu

SEQ ID NO: 438446 - RNA, 24 nt, Human
gcccaggcuggagguuaauggcau

SEQ ID NO: 438447 - RNA, 19 nt, Human
gcccaggcuggaguacaau

SEQ ID NO: 438448 - RNA, 20 nt, Human
gcccaggcuggaguacaaug

SEQ ID NO: 438449 - RNA, 21 nt, Human
gcccaggcuggaguacaaugg

SEQ ID NO: 438450 - RNA, 24 nt, Human
gcccaggcuggaguacaauggcau

SEQ ID NO: 438451 - RNA, 24 nt, Human
gcccaggcuggaguacaauggcgu

SEQ ID NO: 438452 - RNA, 22 nt, Human
gcccaggcuggaguacaauggu

SEQ ID NO: 438453 - RNA, 23 nt, Human
gcccaggcuggaguacaauggug

SEQ ID NO: 438454 - RNA, 19 nt, Human
gcccaggcuggaguacagu

SEQ ID NO: 438455 - RNA, 20 nt, Human
gcccaggcuggaguacagug

SEQ ID NO: 438456 - RNA, 23 nt, Human
gcccaggcuggaguacagugaug

SEQ ID NO: 438457 - RNA, 24 nt, Human
gcccaggcuggaguacagugaugu

SEQ ID NO: 438458 - RNA, 21 nt, Human
gcccaggcuggaguacagugg

SEQ ID NO: 438459 - RNA, 22 nt, Human
gcccaggcuggaguacaguggc

SEQ ID NO: 438460 - RNA, 22 nt, Human
gcccaggcuggaguacaguggu

SEQ ID NO: 438461 - RNA, 24 nt, Human
gcccaggcuggaguacagugguca

SEQ ID NO: 438462 - RNA, 24 nt, Human
gcccaggcuggaguacaguggugu

SEQ ID NO: 438463 - RNA, 24 nt, Human
gcccaggcuggaguacauuggugu

SEQ ID NO: 438464 - RNA, 32 nt, Human
gcccaggcuggaguauaauggcaugucucgac

SEQ ID NO: 438465 - RNA, 23 nt, Human
gcccaggcuggaguauaguagug

SEQ ID NO: 438466 - RNA, 32 nt, Human
gcccaggcuggaguauaguagugcaguggugu

SEQ ID NO: 438467 - RNA, 24 nt, Human
gcccaggcuggagugaaguggcgu

SEQ ID NO: 438468 - RNA, 21 nt, Human
gcccaggcuggagugaggugg

SEQ ID NO: 438469 - RNA, 25 nt, Human
gcccaggcuggagugagugcagugg

SEQ ID NO: 438470 - RNA, 26 nt, Human
gcccaggcuggagugagugcaguggc

SEQ ID NO: 438471 - RNA, 18 nt, Human
gcccaggcuggagugcaa

SEQ ID NO: 438472 - RNA, 21 nt, Human
gcccaggcuggagugcaacgg

SEQ ID NO: 438473 - RNA, 23 nt, Human
gcccaggcuggagugcaacggca

SEQ ID NO: 438474 - RNA, 22 nt, Human
gcccaggcuggagugcaacggu

SEQ ID NO: 438475 - RNA, 19 nt, Human
gcccaggcuggagugcaau

SEQ ID NO: 438476 - RNA, 21 nt, Human
gcccaggcuggagugcaauag

SEQ ID NO: 438477 - RNA, 23 nt, Human
gcccaggcuggagugcaauagca

SEQ ID NO: 438478 - RNA, 24 nt, Human
gcccaggcuggagugcaauagcau

SEQ ID NO: 438479 - RNA, 20 nt, Human
gcccaggcuggagugcaaug

SEQ ID NO: 438480 - RNA, 22 nt, Human
gcccaggcuggagugcaaugca

SEQ ID NO: 438481 - RNA, 24 nt, Human
gcccaggcuggagugcaaugcugu

SEQ ID NO: 438482 - RNA, 21 nt, Human
gcccaggcuggagugcaaugg

SEQ ID NO: 438483 - RNA, 22 nt, Human
gcccaggcuggagugcaauggc

SEQ ID NO: 438484 - RNA, 23 nt, Human
gcccaggcuggagugcaauggca

SEQ ID NO: 438485 - RNA, 24 nt, Human
gcccaggcuggagugcaauggcau

SEQ ID NO: 438486 - RNA, 24 nt, Human
gcccaggcuggagugcaauggcgu

SEQ ID NO: 438487 - RNA, 22 nt, Human
gcccaggcuggagugcaauggu

SEQ ID NO: 438488 - RNA, 23 nt, Human
gcccaggcuggagugcaauggug

SEQ ID NO: 438489 - RNA, 24 nt, Human
gcccaggcuggagugcaauggugu

SEQ ID NO: 438490 - RNA, 20 nt, Human
gcccaggcuggagugcacug

SEQ ID NO: 438491 - RNA, 21 nt, Human
gcccaggcuggagugcacugg

SEQ ID NO: 438492 - RNA, 24 nt, Human
gcccaggcuggagugcacuggcgu

SEQ ID NO: 438493 - RNA, 18 nt, Human
gcccaggcuggagugcag

SEQ ID NO: 438494 - RNA, 21 nt, Human
gcccaggcuggagugcagagg

SEQ ID NO: 438495 - RNA, 23 nt, Human
gcccaggcuggagugcagaggug

SEQ ID NO: 438496 - RNA, 20 nt, Human
gcccaggcuggagugcagca

SEQ ID NO: 438497 - RNA, 21 nt, Human
gcccaggcuggagugcagcag

SEQ ID NO: 438498 - RNA, 22 nt, Human
gcccaggcuggagugcagcagc

SEQ ID NO: 438499 - RNA, 23 nt, Human
gcccaggcuggagugcagcagca

SEQ ID NO: 438500 - RNA, 23 nt, Human
gcccaggcuggagugcagcgcau

SEQ ID NO: 438501 - RNA, 20 nt, Human
gcccaggcuggagugcaggg

SEQ ID NO: 438502 - RNA, 19 nt, Human
gcccaggcuggagugcagu

SEQ ID NO: 438503 - RNA, 21 nt, Human
gcccaggcuggagugcaguag

SEQ ID NO: 438504 - RNA, 22 nt, Human
gcccaggcuggagugcaguagc

SEQ ID NO: 438505 - RNA, 23 nt, Human
gcccaggcuggagugcaguagca

SEQ ID NO: 438506 - RNA, 22 nt, Human
gcccaggcuggagugcaguagg

SEQ ID NO: 438507 - RNA, 24 nt, Human
gcccaggcuggagugcaguaggca

SEQ ID NO: 438508 - RNA, 32 nt, Human
gcccaggcuggagugcaguagugcagucgugg

SEQ ID NO: 438509 - RNA, 23 nt, Human
gcccaggcuggagugcagucgug

SEQ ID NO: 438510 - RNA, 20 nt, Human
gcccaggcuggagugcagug

SEQ ID NO: 438511 - RNA, 23 nt, Human
gcccaggcuggagugcagugaug

SEQ ID NO: 438512 - RNA, 24 nt, Human
gcccaggcuggagugcagugaugu

SEQ ID NO: 438513 - RNA, 21 nt, Human
gcccaggcuggagugcagugg

SEQ ID NO: 438514 - RNA, 22 nt, Human
gcccaggcuggagugcaguggc

SEQ ID NO: 438515 - RNA, 24 nt, Human
gcccaggcuggagugcaguggcgu

SEQ ID NO: 438516 - RNA, 22 nt, Human
gcccaggcuggagugcaguggu

SEQ ID NO: 438517 - RNA, 23 nt, Human
gcccaggcuggagugcaguggug

SEQ ID NO: 438518 - RNA, 24 nt, Human
gcccaggcuggagugcaguggugu

SEQ ID NO: 438519 - RNA, 20 nt, Human
gcccaggcuggagugcauug

SEQ ID NO: 438520 - RNA, 24 nt, Human
gcccaggcuggagugcauugaugu

SEQ ID NO: 438521 - RNA, 21 nt, Human
gcccaggcuggagugcauugg

SEQ ID NO: 438522 - RNA, 21 nt, Human
gcccaggcuggagugccuugg

SEQ ID NO: 438523 - RNA, 20 nt, Human
gcccaggcuggagugcgaug

SEQ ID NO: 438524 - RNA, 21 nt, Human
gcccaggcuggagugcgaugg

SEQ ID NO: 438525 - RNA, 23 nt, Human
gcccaggcuggagugcgauggca

SEQ ID NO: 438526 - RNA, 23 nt, Human
gcccaggcuggagugcgauggug

SEQ ID NO: 438527 - RNA, 21 nt, Human
gcccaggcuggagugcggugg

SEQ ID NO: 438528 - RNA, 22 nt, Human
gcccaggcuggagugcgguggu

SEQ ID NO: 438529 - RNA, 23 nt, Human
gcccaggcuggagugcgguggug

SEQ ID NO: 438530 - RNA, 19 nt, Human
gcccaggcuggagugcugu

SEQ ID NO: 438531 - RNA, 21 nt, Human
gcccaggcuggagugcugugg

SEQ ID NO: 438532 - RNA, 24 nt, Human
gcccaggcuggagugcuguggcgu

SEQ ID NO: 438533 - RNA, 24 nt, Human
gcccaggcuggaguggaguggcgu

SEQ ID NO: 438534 - RNA, 18 nt, Human
gcccaggcuggaguguag

SEQ ID NO: 438535 - RNA, 23 nt, Human
gcccaggcuggaguguagagaca

SEQ ID NO: 438536 - RNA, 21 nt, Human
gcccaggcuggaguguagugg

SEQ ID NO: 438537 - RNA, 24 nt, Human
gcccaggcuggaguguaguggcgu

SEQ ID NO: 438538 - RNA, 22 nt, Human
gcccaggcuggaguguaguggu

SEQ ID NO: 438539 - RNA, 23 nt, Human
gcccaggcuggaguguaguggug

SEQ ID NO: 438540 - RNA, 24 nt, Human
gcccaggcuggaguguaguggugu

SEQ ID NO: 438541 - RNA, 24 nt, Human
gcccaggcuggagugucguggcgu

SEQ ID NO: 438542 - RNA, 21 nt, Human
gcccaggcuggagugugaugg

SEQ ID NO: 438543 - RNA, 21 nt, Human
gcccaggcuggaguguggugg

SEQ ID NO: 438544 - RNA, 24 nt, Human
gcccaggcuggagugugguggcgu

SEQ ID NO: 438545 - RNA, 21 nt, Human
gcccaggcuggauuacagugg

SEQ ID NO: 438546 - RNA, 21 nt, Human
gcccaggcuggauugcggugg

SEQ ID NO: 438547 - RNA, 32 nt, Human
gcccaggcuggccucaaauuccugggcucaag

SEQ ID NO: 438548 - RNA, 21 nt, Human
gcccaggcuggcgugaagugg

SEQ ID NO: 438549 - RNA, 22 nt, Human
gcccaggcuggcgugaaguggc

SEQ ID NO: 438550 - RNA, 20 nt, Human
gcccaggcuggcgugcagug

SEQ ID NO: 438551 - RNA, 21 nt, Human
gcccaggcuggcgugcagugg

SEQ ID NO: 438552 - RNA, 23 nt, Human
gcccaggcuggcgugcaguggug

SEQ ID NO: 438553 - RNA, 22 nt, Human
gcccaggcugggagggcaaugg

SEQ ID NO: 438554 - RNA, 24 nt, Human
gcccaggcugggagggcaauggca

SEQ ID NO: 438555 - RNA, 21 nt, Human
gcccaggcugggaugcaaugg

SEQ ID NO: 438556 - RNA, 24 nt, Human
gcccaggcugggaugcaauggcau

SEQ ID NO: 438557 - RNA, 32 nt, Human
gcccaggcugggaugcaauggcauggucucag

SEQ ID NO: 438558 - RNA, 20 nt, Human
gcccaggcuggggugcagug

SEQ ID NO: 438559 - RNA, 21 nt, Human
gcccaggcuggggugcagugg

SEQ ID NO: 438560 - RNA, 22 nt, Human
gcccaggcuggggugcaguggc

SEQ ID NO: 438561 - RNA, 32 nt, Human
gcccaggcugggugcaggcucucaucuggucc

SEQ ID NO: 438562 - RNA, 21 nt, Human
gcccaggcuggguugcagugg

SEQ ID NO: 438563 - RNA, 22 nt, Human
gcccaggcuggguugcaguggc

SEQ ID NO: 438564 - RNA, 24 nt, Human
gcccaggcugguaugcagucaugu

SEQ ID NO: 438565 - RNA, 32 nt, Human
gcccaggcuggucgugaacuccugggcucaag

SEQ ID NO: 438566 - RNA, 32 nt, Human
gcccaggcuggucucaaacuccugggcucaag

SEQ ID NO: 438567 - RNA, 32 nt, Human
gcccaggcuggucucaaacuccugggcucagg

SEQ ID NO: 438568 - RNA, 32 nt, Human
gcccaggcuggucucaaauuccugggcccaaa

SEQ ID NO: 438569 - RNA, 32 nt, Human
gcccaggcuggucucaaccuccugggcucaag

SEQ ID NO: 438570 - RNA, 32 nt, Human
gcccaggcuggucucaggcuccugggcucaga

SEQ ID NO: 438571 - RNA, 32 nt, Human
gcccaggcuggucuccaacuccugggcucaag

SEQ ID NO: 438572 - RNA, 32 nt, Human
gcccaggcuggucucgaacuccugggcucaag

SEQ ID NO: 438573 - RNA, 32 nt, Human
gcccaggcuggucucgaacuucugagcucaag

SEQ ID NO: 438574 - RNA, 32 nt, Human
gcccaggcuggucucgaacuucugagcucgag

SEQ ID NO: 438575 - RNA, 32 nt, Human
gcccaggcuggucuuaaacuccugggcucaag

SEQ ID NO: 438576 - RNA, 32 nt, Human
gcccaggcuggucuuaagcuucugagcucaag

SEQ ID NO: 438577 - RNA, 32 nt, Human
gcccaggcuggucuugaacuucugagcucaag

SEQ ID NO: 438578 - RNA, 32 nt, Human
gcccaggcuggucuugacuccugggcucaaac

SEQ ID NO: 438579 - RNA, 24 nt, Human
gcccaggcuggugugcaauggcgu

SEQ ID NO: 438580 - RNA, 22 nt, Human
gcccaggcugguuuugaacucc

SEQ ID NO: 438581 - RNA, 24 nt, Human
gcccaggcuguaguacaauggcau

SEQ ID NO: 438582 - RNA, 20 nt, Human
gcccaggcuguagugcaaug

SEQ ID NO: 438583 - RNA, 21 nt, Human
gcccaggcuguagugcaaugg

SEQ ID NO: 438584 - RNA, 22 nt, Human
gcccaggcuguagugcaauggc

SEQ ID NO: 438585 - RNA, 19 nt, Human
gcccaggcuguagugcagu

SEQ ID NO: 438586 - RNA, 20 nt, Human
gcccaggcuguagugcagug

SEQ ID NO: 438587 - RNA, 21 nt, Human
gcccaggcuguagugcagugg

SEQ ID NO: 438588 - RNA, 22 nt, Human
gcccaggcuguagugcaguggu

SEQ ID NO: 438589 - RNA, 23 nt, Human
gcccaggcuguagugcaguggug

SEQ ID NO: 438590 - RNA, 21 nt, Human
gcccaggcuguguggaaacag

SEQ ID NO: 438591 - RNA, 32 nt, Human
gcccaggcuguucucaaacuccugggcugaag

SEQ ID NO: 438592 - RNA, 32 nt, Human
gcccaggcuguucuucaacuccugggcucaag

SEQ ID NO: 438593 - RNA, 21 nt, Human
gcccaggcuuaacucaugcca

SEQ ID NO: 438594 - RNA, 18 nt, Human
gcccaggcuuccaacucc

SEQ ID NO: 438595 - RNA, 32 nt, Human
gcccaggcuuccucucucucccuuccucucuc

SEQ ID NO: 438596 - RNA, 23 nt, Human
gcccaggcuucucaccacggugu

SEQ ID NO: 438597 - RNA, 20 nt, Human
gcccaggcuugagugcaaug

SEQ ID NO: 438598 - RNA, 23 nt, Human
gcccaggcuugagugcagugaug

SEQ ID NO: 438599 - RNA, 32 nt, Human
gcccagggacacccacacagguggccaucaca

SEQ ID NO: 438600 - RNA, 23 nt, Human
gcccagggaccccugccuucccc

SEQ ID NO: 438601 - RNA, 16 nt, Human
gcccagggacugcagc

SEQ ID NO: 438602 - RNA, 32 nt, Human
gcccagggagaagggacaaggcuuuuaaaaga

SEQ ID NO: 438603 - RNA, 32 nt, Human
gcccagggagagagagggaguggagcccaggg

SEQ ID NO: 438604 - RNA, 20 nt, Human
gcccagggagcaggcagcag

SEQ ID NO: 438605 - RNA, 32 nt, Human
gcccagggagccucaggagcaggaugagucga

SEQ ID NO: 438606 - RNA, 21 nt, Human
gcccagggagccuggcgcuag

SEQ ID NO: 438607 - RNA, 32 nt, Human
gcccagggaggaaaugccuuuaaccggcgugg

SEQ ID NO: 438608 - RNA, 21 nt, Human
gcccagggaggaggaagccag

SEQ ID NO: 438609 - RNA, 32 nt, Human
gcccagggaggcagagguugcuguaaguugag

SEQ ID NO: 438610 - RNA, 21 nt, Human
gcccagggaggccagaaucag

SEQ ID NO: 438611 - RNA, 20 nt, Human
gcccagggaggccgaagcua

SEQ ID NO: 438612 - RNA, 32 nt, Human
gcccagggaggucaaggcugcagugagcaaug

SEQ ID NO: 438613 - RNA, 20 nt, Human
gcccagggaguagcagccag

SEQ ID NO: 438614 - RNA, 21 nt, Human
gcccagggagucccagaggca

SEQ ID NO: 438615 - RNA, 20 nt, Human
gcccagggaguucugcucag

SEQ ID NO: 438616 - RNA, 32 nt, Human
gcccagggauaggaggaggcagaggggugccu

SEQ ID NO: 438617 - RNA, 32 nt, Human
gcccagggaugcaaagguugcagugaguugag

SEQ ID NO: 438618 - RNA, 32 nt, Human
gcccagggcaagcagaggcagcaaugguuggu

SEQ ID NO: 438619 - RNA, 20 nt, Human
gcccagggcacagaugccag

SEQ ID NO: 438620 - RNA, 18 nt, Human
gcccagggcagcucucug

SEQ ID NO: 438621 - RNA, 18 nt, Human
gcccagggccacccagag

SEQ ID NO: 438622 - RNA, 21 nt, Human
gcccagggccacugcacacca

SEQ ID NO: 438623 - RNA, 19 nt, Human
gcccagggccaggagccag

SEQ ID NO: 438624 - RNA, 17 nt, Human
gcccagggcccagagcc

SEQ ID NO: 438625 - RNA, 32 nt, Human
gcccagggcccagcagggggcaguggcaccug

SEQ ID NO: 438626 - RNA, 31 nt, Human
gcccagggccccggugcggccgagcugggaa

SEQ ID NO: 438627 - RNA, 18 nt, Human
gcccagggcccucugccg

SEQ ID NO: 438628 - RNA, 19 nt, Human
gcccagggccggguucccu

SEQ ID NO: 438629 - RNA, 17 nt, Human
gcccagggccuaggggc

SEQ ID NO: 438630 - RNA, 30 nt, Human
gcccagggccucucccuuccugucguucaa

SEQ ID NO: 438631 - RNA, 32 nt, Human
gcccagggccugcccgccagagccgcacaugc

SEQ ID NO: 438632 - RNA, 32 nt, Human
gcccagggccuggcagacuguggcuagaacgg

SEQ ID NO: 438633 - RNA, 21 nt, Human
gcccagggccuugagagccag

SEQ ID NO: 438634 - RNA, 17 nt, Human
gcccagggcgccgggcg

SEQ ID NO: 438635 - RNA, 32 nt, Human
gcccagggcuagaaguugaaacucacuaguaa

SEQ ID NO: 438636 - RNA, 32 nt, Human
gcccagggcucacuguggcucccuucagcggg

SEQ ID NO: 438637 - RNA, 32 nt, Human
gcccagggcucugccaugcccaucuugccuac

SEQ ID NO: 438638 - RNA, 21 nt, Human
gcccagggcuggagugcagug

SEQ ID NO: 438639 - RNA, 22 nt, Human
gcccagggcuggagugcagugg

SEQ ID NO: 438640 - RNA, 23 nt, Human
gcccagggcuggagugcaguggc

SEQ ID NO: 438641 - RNA, 20 nt, Human
gcccagggcugggacagugg

SEQ ID NO: 438642 - RNA, 20 nt, Human
gcccaggggaacggaaacag

SEQ ID NO: 438643 - RNA, 22 nt, Human
gcccaggggaauuaaaagccag

SEQ ID NO: 438644 - RNA, 23 nt, Human
gcccaggggaccagguggaccag

SEQ ID NO: 438645 - RNA, 32 nt, Human
gcccaggggaccccgccccgacccaggggcug

SEQ ID NO: 438646 - RNA, 19 nt, Human
gcccaggggacgagcucag

SEQ ID NO: 438647 - RNA, 20 nt, Human
gcccaggggacuggaggcag

SEQ ID NO: 438648 - RNA, 20 nt, Human
gcccaggggaggugagucag

SEQ ID NO: 438649 - RNA, 19 nt, Human
gcccaggggaguggaccag

SEQ ID NO: 438650 - RNA, 32 nt, Human
gcccaggggcagggagggaggaagggguaacu

SEQ ID NO: 438651 - RNA, 32 nt, Human
gcccaggggccaggccugcuccagguuaaacu

SEQ ID NO: 438652 - RNA, 21 nt, Human
gcccaggggcccuggggucau

SEQ ID NO: 438653 - RNA, 18 nt, Human
gcccagggggaaaggcca

SEQ ID NO: 438654 - RNA, 32 nt, Human
gcccagggggaaccgcgccccgcugaagggcu

SEQ ID NO: 438655 - RNA, 19 nt, Human
gcccagggggaagaugcca

SEQ ID NO: 438656 - RNA, 21 nt, Human
gcccagggggcaaggacacag

SEQ ID NO: 438657 - RNA, 22 nt, Human
gcccagggggcagcagugcuua

SEQ ID NO: 438658 - RNA, 22 nt, Human
gcccagggggccggagggccag

SEQ ID NO: 438659 - RNA, 22 nt, Human
gcccagggggcgugcuguccag

SEQ ID NO: 438660 - RNA, 32 nt, Human
gcccagggggcuuccugaggggagacagagca

SEQ ID NO: 438661 - RNA, 21 nt, Human
gcccagggguguugaggccag

SEQ ID NO: 438662 - RNA, 20 nt, Human
gcccagggguucuagaccag

SEQ ID NO: 438663 - RNA, 32 nt, Human
gcccagggguugcaggcugcagugagcuguga

SEQ ID NO: 438664 - RNA, 20 nt, Human
gcccagggguuugagaccag

SEQ ID NO: 438665 - RNA, 32 nt, Human
gcccagggguuugaggcugcagugagccacag

SEQ ID NO: 438666 - RNA, 32 nt, Human
gcccagggguuugcggcugcagugagcuguga

SEQ ID NO: 438667 - RNA, 23 nt, Human
gcccaggguaggggagggugggg

SEQ ID NO: 438668 - RNA, 32 nt, Human
gcccaggguccugaggccugaccacauggcuc

SEQ ID NO: 438669 - RNA, 19 nt, Human
gcccagggugagcugcagu

SEQ ID NO: 438670 - RNA, 32 nt, Human
gcccagggugcuguugguguccucagaagugc

SEQ ID NO: 438671 - RNA, 20 nt, Human
gcccaggguggagugcagug

SEQ ID NO: 438672 - RNA, 21 nt, Human
gcccaggguggagugcagugg

SEQ ID NO: 438673 - RNA, 22 nt, Human
gcccaggguggagugcaguggc

SEQ ID NO: 438674 - RNA, 24 nt, Human
gcccaggguggagugcaguggcgu

SEQ ID NO: 438675 - RNA, 21 nt, Human
gcccaggguggagugcggugg

SEQ ID NO: 438676 - RNA, 21 nt, Human
gcccaggguggguggccagug

SEQ ID NO: 438677 - RNA, 18 nt, Human
gcccagguaauuugagca

SEQ ID NO: 438678 - RNA, 17 nt, Human
gcccagguacugcagcg

SEQ ID NO: 438679 - RNA, 20 nt, Human
gcccagguacugcuugugca

SEQ ID NO: 438680 - RNA, 32 nt, Human
gcccagguaguuuuauccugugacucaaaggc

SEQ ID NO: 438681 - RNA, 32 nt, Human
gcccaggucaccugccaagaccaagaccagcc

SEQ ID NO: 438682 - RNA, 32 nt, Human
gcccaggucagccucagucugcugugccucca

SEQ ID NO: 438683 - RNA, 32 nt, Human
gcccagguccaaaucacagagcuggggcgaga

SEQ ID NO: 438684 - RNA, 20 nt, Human
gcccagguccagcaccccuu

SEQ ID NO: 438685 - RNA, 17 nt, Human
gcccagguccugcugcc

SEQ ID NO: 438686 - RNA, 20 nt, Human
gcccaggucuguuucaggca

SEQ ID NO: 438687 - RNA, 19 nt, Human
gcccaggugaagaugugca

SEQ ID NO: 438688 - RNA, 32 nt, Human
gcccaggugacagagggagacucucucaaaga

SEQ ID NO: 438689 - RNA, 21 nt, Human
gcccaggugaccuguucagca

SEQ ID NO: 438690 - RNA, 32 nt, Human
gcccaggugagaggaggaagaggggucuggaa

SEQ ID NO: 438691 - RNA, 32 nt, Human
gcccaggugagguucucuaguagguggaaagg

SEQ ID NO: 438692 - RNA, 32 nt, Human
gcccaggugcaacccccagcccaggaggagac

SEQ ID NO: 438693 - RNA, 16 nt, Human
gcccaggugcagagcg

SEQ ID NO: 438694 - RNA, 21 nt, Human
gcccaggugcucacaugcgca

SEQ ID NO: 438695 - RNA, 32 nt, Human
gcccaggugcugacccugccucggguuguguc

SEQ ID NO: 438696 - RNA, 21 nt, Human
gcccaggugcugaccuugcca

SEQ ID NO: 438697 - RNA, 19 nt, Human
gcccaggugcuggcugcca

SEQ ID NO: 438698 - RNA, 18 nt, Human
gcccagguggaaggcgcg

SEQ ID NO: 438699 - RNA, 21 nt, Human
gcccagguggaggugcagugg

SEQ ID NO: 438700 - RNA, 20 nt, Human
gcccagguggcucugcagca

SEQ ID NO: 438701 - RNA, 19 nt, Human
gcccagguggggcuuggca

SEQ ID NO: 438702 - RNA, 21 nt, Human
gcccagguggucccauugcca

SEQ ID NO: 438703 - RNA, 20 nt, Human
gcccagguggugcccgcgca

SEQ ID NO: 438704 - RNA, 17 nt, Human
gcccaggugguggcugc

SEQ ID NO: 438705 - RNA, 21 nt, Human
gcccagguguaaucagagcca

SEQ ID NO: 438706 - RNA, 21 nt, Human
gcccaggugugagucgcugca

SEQ ID NO: 438707 - RNA, 32 nt, Human
gcccagguguucugcaccuugcagccugcaca

SEQ ID NO: 438708 - RNA, 21 nt, Human
gcccagguuagagugcagugg

SEQ ID NO: 438709 - RNA, 20 nt, Human
gcccagguuagguuugggca

SEQ ID NO: 438710 - RNA, 32 nt, Human
gcccagguucaagcgauucucuugccucauuc

SEQ ID NO: 438711 - RNA, 25 nt, Human
gcccagguucuagagugcaguggug

SEQ ID NO: 438712 - RNA, 20 nt, Human
gcccagguuggagugcagug

SEQ ID NO: 438713 - RNA, 21 nt, Human
gcccagguuggagugcagugg

SEQ ID NO: 438714 - RNA, 22 nt, Human
gcccagguuggagugcaguggc

SEQ ID NO: 438715 - RNA, 20 nt, Human
gcccagguuggagugccaug

SEQ ID NO: 438716 - RNA, 21 nt, Human
gcccagguuggagugccaugg

SEQ ID NO: 438717 - RNA, 21 nt, Human
gcccagguuguaaugcagugg

SEQ ID NO: 438718 - RNA, 22 nt, Human
gcccagguuguaaugcaguggc

SEQ ID NO: 438719 - RNA, 18 nt, Human
gcccagguuuacggcggc

SEQ ID NO: 438720 - RNA, 22 nt, Human
gcccaguaaaaucuugauuuca

SEQ ID NO: 438721 - RNA, 32 nt, Human
gcccaguacugagaauggaugggagaggagag

SEQ ID NO: 438722 - RNA, 32 nt, Human
gcccaguacuuugcaugugagcacagacccag

SEQ ID NO: 438723 - RNA, 32 nt, Human
gcccaguagcccuccuggaaucugcugcagug

SEQ ID NO: 438724 - RNA, 32 nt, Human
gcccaguaggucgaggcugcagugagcuguga

SEQ ID NO: 438725 - RNA, 32 nt, Human
gcccaguauaaaugccaccuccuccaugaagc

SEQ ID NO: 438726 - RNA, 32 nt, Human
gcccagucaagccaacccgcagcuucacucac

SEQ ID NO: 438727 - RNA, 32 nt, Human
gcccagucacaguccagcaauuccacaaccac

SEQ ID NO: 438728 - RNA, 32 nt, Human
gcccagucacuacaggacccugagauguccag

SEQ ID NO: 438729 - RNA, 19 nt, Human
gcccaguccacagagccag

SEQ ID NO: 438730 - RNA, 18 nt, Human
gcccaguccaggcugcug

SEQ ID NO: 438731 - RNA, 32 nt, Human
gcccaguccaucagcagugauggaauuugcug

SEQ ID NO: 438732 - RNA, 32 nt, Human
gcccagucccacccucccgcacauaccuggcc

SEQ ID NO: 438733 - RNA, 21 nt, Human
gcccaguccccagcucgccag

SEQ ID NO: 438734 - RNA, 32 nt, Human
gcccaguccccugcgucauucccaccagaggc

SEQ ID NO: 438735 - RNA, 32 nt, Human
gcccagucccgcaguacauccccuguccccuc

SEQ ID NO: 438736 - RNA, 32 nt, Human
gcccagucccguccugcagcagucugccuccu

SEQ ID NO: 438737 - RNA, 32 nt, Human
gcccagucccuucacugcuuuccugccccaag

SEQ ID NO: 438738 - RNA, 18 nt, Human
gcccaguccuuugcugcu

SEQ ID NO: 438739 - RNA, 32 nt, Human
gcccagucuaacucgauucuucccaggggcuc

SEQ ID NO: 438740 - RNA, 32 nt, Human
gcccagucuagucuugaacuccugggcuacag

SEQ ID NO: 438741 - RNA, 32 nt, Human
gcccagucucaaaccaugcagcugaguaacug

SEQ ID NO: 438742 - RNA, 21 nt, Human
gcccagucuccggccccggcc

SEQ ID NO: 438743 - RNA, 32 nt, Human
gcccagucugagcagcagggugaggcagcccu

SEQ ID NO: 438744 - RNA, 21 nt, Human
gcccagucuggagugcagugg

SEQ ID NO: 438745 - RNA, 22 nt, Human
gcccagucuggagugcaguggu

SEQ ID NO: 438746 - RNA, 32 nt, Human
gcccagucuggccuagaacuccuggccucaac

SEQ ID NO: 438747 - RNA, 32 nt, Human
gcccagucugggccgugacucugggugagucg

SEQ ID NO: 438748 - RNA, 32 nt, Human
gcccagucuucagucuccugacuuagagauac

SEQ ID NO: 438749 - RNA, 32 nt, Human
gcccagucuugaguucuugucuuguuaccauu

SEQ ID NO: 438750 - RNA, 32 nt, Human
gcccagucuugucucaaacuccugggcucaag

SEQ ID NO: 438751 - RNA, 20 nt, Human
gcccagugagcagccccagc

SEQ ID NO: 438752 - RNA, 32 nt, Human
gcccagugagccaucccguccccaccacccuc

SEQ ID NO: 438753 - RNA, 32 nt, Human
gcccagugccucucccugacaagccuguaccc

SEQ ID NO: 438754 - RNA, 32 nt, Human
gcccagugccugugcccgucauguaucucacc

SEQ ID NO: 438755 - RNA, 31 nt, Human
gcccagugcgucagugggccugggguuccag

SEQ ID NO: 438756 - RNA, 18 nt, Human
gcccaguggcucuacccc

SEQ ID NO: 438757 - RNA, 32 nt, Human
gcccaguggcucuuuaguuuggcacuugauga

SEQ ID NO: 438758 - RNA, 32 nt, Human
gcccaguggcuggggugggggcugaggggcag

SEQ ID NO: 438759 - RNA, 24 nt, Human
gcccagugggaccccgcacaacau

SEQ ID NO: 438760 - RNA, 32 nt, Human
gcccagugggcagaggccagggagugccucac

SEQ ID NO: 438761 - RNA, 32 nt, Human
gcccagugggucugaaagcucgcuugagaaua

SEQ ID NO: 438762 - RNA, 31 nt, Human
gcccagugggugggaggaaggaugagggccc

SEQ ID NO: 438763 - RNA, 32 nt, Human
gcccagugucacccagggugagugcaaaauaa

SEQ ID NO: 438764 - RNA, 32 nt, Human
gcccagugucuguggccuggcaaguggccacg

SEQ ID NO: 438765 - RNA, 32 nt, Human
gcccagugugugguggcucacaccuguaaccc

SEQ ID NO: 438766 - RNA, 22 nt, Human
gcccaguuacucggaaggcuga

SEQ ID NO: 438767 - RNA, 32 nt, Human
gcccaguucauucuauuagaugacuaaggaaa

SEQ ID NO: 438768 - RNA, 32 nt, Human
gcccaguuccagagguggaaguuacagaagag

SEQ ID NO: 438769 - RNA, 32 nt, Human
gcccaguuccuacccaccuggcuaaggccagu

SEQ ID NO: 438770 - RNA, 19 nt, Human
gcccaguucugaaagcuuu

SEQ ID NO: 438771 - RNA, 23 nt, Human
gcccaguucugggagaggacaga

SEQ ID NO: 438772 - RNA, 32 nt, Human
gcccaguuucaaacuccugaccucaggugauc

SEQ ID NO: 438773 - RNA, 32 nt, Human
gcccaguuucuaccugcaacagacucuucacc

SEQ ID NO: 438774 - RNA, 32 nt, Human
gcccaguuucuucaggcgguggcuccagccag

SEQ ID NO: 438775 - RNA, 32 nt, Human
gcccaguuugagauuuuggagucuccugugau

SEQ ID NO: 438776 - RNA, 32 nt, Human
gcccauagcggaugccuccucaggaauauucu

SEQ ID NO: 438777 - RNA, 32 nt, Human
gcccauagcugguggucaagaugagggagagg

SEQ ID NO: 438778 - RNA, 32 nt, Human
gcccauaggaaagaguagguagguuaugccag

SEQ ID NO: 438779 - RNA, 32 nt, Human
gcccauagggcugaguggggucgggugaggca

SEQ ID NO: 438780 - RNA, 32 nt, Human
gcccauaguacugggaaaugggagcacaguac

SEQ ID NO: 438781 - RNA, 24 nt, Human
gcccauagucccagcuacucagga

SEQ ID NO: 438782 - RNA, 32 nt, Human
gcccauaucuuacucugcuuccaucucucucc

SEQ ID NO: 438783 - RNA, 32 nt, Human
gcccauaugcagggaggagcugcagggagcug

SEQ ID NO: 438784 - RNA, 32 nt, Human
gcccaucaaccagcauuggucccauagggaag

SEQ ID NO: 438785 - RNA, 18 nt, Human
gcccaucaagcuccugcc

SEQ ID NO: 438786 - RNA, 19 nt, Human
gcccaucacacacaauuca

SEQ ID NO: 438787 - RNA, 32 nt, Human
gcccaucagacugcccccagcacacggaaugg

SEQ ID NO: 438788 - RNA, 32 nt, Human
gcccaucaugacauuggguagcauuaacugua

SEQ ID NO: 438789 - RNA, 32 nt, Human
gcccauccagaagaacgggaagcauuuucuuc

SEQ ID NO: 438790 - RNA, 32 nt, Human
gcccauccagcccaggucccaggaucccugca

SEQ ID NO: 438791 - RNA, 32 nt, Human
gcccauccaggagaccaaaggcugcagguguc

SEQ ID NO: 438792 - RNA, 32 nt, Human
gcccaucccacccagggaucgccaccucugcc

SEQ ID NO: 438793 - RNA, 32 nt, Human
gcccaucccagcugcacccuagcucccugcuc

SEQ ID NO: 438794 - RNA, 32 nt, Human
gcccaucccaguccucccuucagcuaacagca

SEQ ID NO: 438795 - RNA, 16 nt, Human
gcccauccccacccca

SEQ ID NO: 438796 - RNA, 32 nt, Human
gcccaucccuggaaggugcuguuauccauggg

SEQ ID NO: 438797 - RNA, 23 nt, Human
gcccauccucaccacugaggcca

SEQ ID NO: 438798 - RNA, 32 nt, Human
gcccauccucugcagaaacagaaaaaucuauc

SEQ ID NO: 438799 - RNA, 32 nt, Human
gcccauccugcucuccuccagccgagggaccc

SEQ ID NO: 438800 - RNA, 32 nt, Human
gcccauccuuucucacccggagggguccaaag

SEQ ID NO: 438801 - RNA, 24 nt, Human
gcccaucgccaccaccuuuuccca

SEQ ID NO: 438802 - RNA, 19 nt, Human
gcccaucuagaggacuuug

SEQ ID NO: 438803 - RNA, 32 nt, Human
gcccaucucacugcauucccuggcugcccgac

SEQ ID NO: 438804 - RNA, 32 nt, Human
gcccaucuccacccuccaaccuggacugcccg

SEQ ID NO: 438805 - RNA, 32 nt, Human
gcccaucuccaccucccgcagugcugggauua

SEQ ID NO: 438806 - RNA, 32 nt, Human
gcccaucucccccugccaggccugugugauca

SEQ ID NO: 438807 - RNA, 32 nt, Human
gcccaucucccugcuuuggucuugccccauca

SEQ ID NO: 438808 - RNA, 32 nt, Human
gcccaucucccuucaagaacccuacggagagu

SEQ ID NO: 438809 - RNA, 32 nt, Human
gcccaucucuaauuauaaaacaugguuuuguu

SEQ ID NO: 438810 - RNA, 32 nt, Human
gcccaucucuccuuuuccaggcugcugaguaa

SEQ ID NO: 438811 - RNA, 32 nt, Human
gcccaucucugcugaccuggguguggcggagg

SEQ ID NO: 438812 - RNA, 32 nt, Human
gcccaucucuucuccaccuucucuccacagaa

SEQ ID NO: 438813 - RNA, 32 nt, Human
gcccaucugagagaugauuuccucuggcccau

SEQ ID NO: 438814 - RNA, 32 nt, Human
gcccaucugccucaacuccucucccuuuuagg

SEQ ID NO: 438815 - RNA, 32 nt, Human
gcccaugaagccagcccugcugccauuugauc

SEQ ID NO: 438816 - RNA, 32 nt, Human
gcccaugacaucaccgucacucugccuaaaag

SEQ ID NO: 438817 - RNA, 32 nt, Human
gcccaugaccucaccugguuccaguaccacuc

SEQ ID NO: 438818 - RNA, 32 nt, Human
gcccaugagagggagaagcggcagcgucuacc

SEQ ID NO: 438819 - RNA, 32 nt, Human
gcccaugagaucaggcugggcccauggugaaa

SEQ ID NO: 438820 - RNA, 32 nt, Human
gcccaugagauugaggcugcagugagcuguga

SEQ ID NO: 438821 - RNA, 32 nt, Human
gcccaugagccccugcuccucagccaggcccg

SEQ ID NO: 438822 - RNA, 32 nt, Human
gcccaugaggcccagguuacagugagccaaga

SEQ ID NO: 438823 - RNA, 32 nt, Human
gcccaugaggggaaagaggaucuuccagcucu

SEQ ID NO: 438824 - RNA, 32 nt, Human
gcccaugagguauuuaaaacagauauuuauga

SEQ ID NO: 438825 - RNA, 32 nt, Human
gcccaugaguucaaggcugcagugagucguga

SEQ ID NO: 438826 - RNA, 23 nt, Human
gcccaugaugauccccgacagca

SEQ ID NO: 438827 - RNA, 32 nt, Human
gcccaugcaacccagauugggguggagcagga

SEQ ID NO: 438828 - RNA, 32 nt, Human
gcccaugcacacacucacaggaggcccgugga

SEQ ID NO: 438829 - RNA, 32 nt, Human
gcccaugcauccauguugguucuuuuaucccc

SEQ ID NO: 438830 - RNA, 32 nt, Human
gcccaugcauccguguugguucuuuuaucccc

SEQ ID NO: 438831 - RNA, 32 nt, Human
gcccaugccagcuccuggguccugggccacag

SEQ ID NO: 438832 - RNA, 32 nt, Human
gcccaugccagucccggaggaaaaagagccag

SEQ ID NO: 438833 - RNA, 32 nt, Human
gcccaugcccagcuaauuuuguauuuuuagua

SEQ ID NO: 438834 - RNA, 32 nt, Human
gcccaugcccuccguccuggcagggcaggcag

SEQ ID NO: 438835 - RNA, 32 nt, Human
gcccaugcccugccgugguggcagcuggggcu

SEQ ID NO: 438836 - RNA, 32 nt, Human
gcccaugccuauaaucccagcacuuugggagg

SEQ ID NO: 438837 - RNA, 32 nt, Human
gcccaugccucucucacucuucauacuccucc

SEQ ID NO: 438838 - RNA, 32 nt, Human
gcccaugccuguaaucccagcacuuugggagg

SEQ ID NO: 438839 - RNA, 32 nt, Human
gcccaugccuguaaucucagcacucugggaga

SEQ ID NO: 438840 - RNA, 32 nt, Human
gcccaugccuguagugccagcauuuugggagg

SEQ ID NO: 438841 - RNA, 19 nt, Human
gcccaugcuacucucugcc

SEQ ID NO: 438842 - RNA, 21 nt, Human
gcccaugcugaggggugggug

SEQ ID NO: 438843 - RNA, 21 nt, Human
gcccaugcuggagggcagugg

SEQ ID NO: 438844 - RNA, 22 nt, Human
gcccaugcuggagggcaguggu

SEQ ID NO: 438845 - RNA, 21 nt, Human
gcccaugcuggagugcaaugg

SEQ ID NO: 438846 - RNA, 20 nt, Human
gcccaugcuggagugcagug

SEQ ID NO: 438847 - RNA, 21 nt, Human
gcccaugcuggagugcagugg

SEQ ID NO: 438848 - RNA, 22 nt, Human
gcccaugcuggagugcaguggc

SEQ ID NO: 438849 - RNA, 21 nt, Human
gcccaugcuggagugcauugg

SEQ ID NO: 438850 - RNA, 32 nt, Human
gcccaugcuggcacugauggaggcugaacugc

SEQ ID NO: 438851 - RNA, 32 nt, Human
gcccaugcuggccucaaacuccugggcucuag

SEQ ID NO: 438852 - RNA, 32 nt, Human
gcccaugcuggucucgaacuccugggcucaag

SEQ ID NO: 438853 - RNA, 32 nt, Human
gcccuugccucuggaagagauccacaggacug

SEQ ID NO: 438854 - RNA, 32 nt, Human
gcccuugccuguagucucagcacuuugggagg

SEQ ID NO: 438855 - RNA, 20 nt, Human
gcccuugccuugccuguagu

SEQ ID NO: 438856 - RNA, 32 nt, Human
gcccuugccuuugagcccccaggaggggaagg

SEQ ID NO: 438857 - RNA, 32 nt, Human
gcccuugccuuuggcccugugagaugcugacc

SEQ ID NO: 438858 - RNA, 32 nt, Human
gcccuugcguaguucacugucuucccacuugu

SEQ ID NO: 438859 - RNA, 32 nt, Human
gcccuugcucucauucagcuguugugugaccc

SEQ ID NO: 438860 - RNA, 32 nt, Human
gcccuugcugggggcuccuuuucugacuacug

SEQ ID NO: 438861 - RNA, 32 nt, Human
gcccuuggaguugccagauggcuggucaaugc

SEQ ID NO: 438862 - RNA, 32 nt, Human
gcccuuggcagggucuaagccaggaaguaaaa

SEQ ID NO: 438863 - RNA, 32 nt, Human
gcccuuggccacagaguauggaaguagcuccg

SEQ ID NO: 438864 - RNA, 32 nt, Human
gcccuuggccugccacccagagccaagagggu

SEQ ID NO: 438865 - RNA, 32 nt, Human
gcccuugggaggaacaacaugagcucaggaag

SEQ ID NO: 438866 - RNA, 18 nt, Human
gcccuugggaggcacuca

SEQ ID NO: 438867 - RNA, 32 nt, Human
gcccuugggaguagcugggugaauggacgaug

SEQ ID NO: 438868 - RNA, 32 nt, Human
gcccuugggccccagccuccugcucaucccuc

SEQ ID NO: 438869 - RNA, 32 nt, Human
gcccuuggggcagaugcagaagcagaagaggg

SEQ ID NO: 438870 - RNA, 17 nt, Human
gcccuuggucugcugcu

SEQ ID NO: 438871 - RNA, 32 nt, Human
gcccuugguucacacuccauuucccaguuucu

SEQ ID NO: 438872 - RNA, 32 nt, Human
gcccuugguugccagcagaauggaauuugcca

SEQ ID NO: 438873 - RNA, 32 nt, Human
gcccuugguuuauuucacuccaguccugaagc

SEQ ID NO: 438874 - RNA, 17 nt, Human
gcccuuguacucaggua

SEQ ID NO: 438875 - RNA, 32 nt, Human
gcccuugucacccaggcuguagugcgguggcg

SEQ ID NO: 438876 - RNA, 32 nt, Human
gcccuuguccugaugccucaaggcuuagagag

SEQ ID NO: 438877 - RNA, 32 nt, Human
gcccuugucuacguuccucaaaugcccacaag

SEQ ID NO: 438878 - RNA, 32 nt, Human
gcccuugucuaggcagaaguggucagaccagg

SEQ ID NO: 438879 - RNA, 17 nt, Human
gcccuugugccagggag

SEQ ID NO: 438880 - RNA, 32 nt, Human
gcccuugugcccugccuccaccgagccagcuu

SEQ ID NO: 438881 - RNA, 32 nt, Human
gcccuuguggucagaggggccucugaagccug

SEQ ID NO: 438882 - RNA, 23 nt, Human
gcccuugugugacccuccccaua

SEQ ID NO: 438883 - RNA, 32 nt, Human
gcccuuguuaugugcuauuuuaaucaguguaa

SEQ ID NO: 438884 - RNA, 32 nt, Human
gcccuuguucugacagcauucuggcugaggcu

SEQ ID NO: 438885 - RNA, 16 nt, Human
gcccuuguugcccagg

SEQ ID NO: 438886 - RNA, 32 nt, Human
gcccuuguugcccaggcuggagugcaauggcg

SEQ ID NO: 438887 - RNA, 32 nt, Human
gcccuuuaacucaacccgcuucccagcacagc

SEQ ID NO: 438888 - RNA, 32 nt, Human
gcccuuuaagacgacaucuccgcgaacgccgg

SEQ ID NO: 438889 - RNA, 32 nt, Human
gcccuuuaagugcaucccgcugugcugacuuu

SEQ ID NO: 438890 - RNA, 32 nt, Human
gcccuuuacagaauggaguguguugaacagga

SEQ ID NO: 438891 - RNA, 21 nt, Human
gcccuuuaccuugggcaccuu

SEQ ID NO: 438892 - RNA, 32 nt, Human
gcccuuuacuacaggacagaaaccacuuaguu

SEQ ID NO: 438893 - RNA, 32 nt, Human
gcccuuuagccauauugaaaacaaauaucuuu

SEQ ID NO: 438894 - RNA, 32 nt, Human
gcccuuuagcccaggagaaugcaguggcauga

SEQ ID NO: 438895 - RNA, 32 nt, Human
gcccuuuauccaguacugaggacccagguggg

SEQ ID NO: 438896 - RNA, 32 nt, Human
gcccuuuaucucuguguuauagugucuguguu

SEQ ID NO: 438897 - RNA, 32 nt, Human
gcccuuuauuuaugcaaaaccaccucagaauc

SEQ ID NO: 438898 - RNA, 32 nt, Human
gcccuuucaaagcaggaggaagaaaaggaaga

SEQ ID NO: 438899 - RNA, 32 nt, Human
gcccuuucaacaguuuugccacugaccggaua

SEQ ID NO: 438900 - RNA, 32 nt, Human
gcccuuucaagccaucagcuccugccucucug

SEQ ID NO: 438901 - RNA, 32 nt, Human
gcccuuucaauccuagcacccacuagauauuu

SEQ ID NO: 438902 - RNA, 32 nt, Human
gcccuuucaccuuuucuuugaauguaguuccc

SEQ ID NO: 438903 - RNA, 32 nt, Human
gcccuuucagccccgcugguguucgcccaccc

SEQ ID NO: 438904 - RNA, 32 nt, Human
gcccuuucagggacuguuaucugcagcuuaag

SEQ ID NO: 438905 - RNA, 32 nt, Human
gcccuuucauaugcuuuucccucuuuuaccau

SEQ ID NO: 438906 - RNA, 32 nt, Human
gcccuuucauucuccaaaccccagccugcaag

SEQ ID NO: 438907 - RNA, 32 nt, Human
gcccuuucauuuccuccccaccccacucccca

SEQ ID NO: 438908 - RNA, 32 nt, Human
gcccuuuccaggggaagagagcaggauggaga

SEQ ID NO: 438909 - RNA, 32 nt, Human
gcccuuucccagagacccagagccccugaccc

SEQ ID NO: 438910 - RNA, 32 nt, Human
gcccuuuccccagccaccuccccagcaagcaa

SEQ ID NO: 438911 - RNA, 32 nt, Human
gcccuuuccucccacggugccaaccaaggcuu

SEQ ID NO: 438912 - RNA, 32 nt, Human
gcccuuuccucccagggcagaccaccuccagg

SEQ ID NO: 438913 - RNA, 32 nt, Human
gcccuuuccugccucagauuucagcuuaaauu

SEQ ID NO: 438914 - RNA, 32 nt, Human
gcccuuucuaaaguggcaucucagcuugaguc

SEQ ID NO: 438915 - RNA, 32 nt, Human
gcccuuucuccccacaagccucuggguuuucc

SEQ ID NO: 438916 - RNA, 32 nt, Human
gcccuuucuccccuccacucauguucccucua

SEQ ID NO: 438917 - RNA, 21 nt, Human
gcccuuucucugugccuucag

SEQ ID NO: 438918 - RNA, 32 nt, Human
gcccuuucugaaccucuggccgucuggaugcu

SEQ ID NO: 438919 - RNA, 32 nt, Human
gcccuuucugccugugucagggccaggaagua

SEQ ID NO: 438920 - RNA, 32 nt, Human
gcccuuugacagcaguuaguugcugacucgga

SEQ ID NO: 438921 - RNA, 24 nt, Human
gcccuuugauucugaaagugggug

SEQ ID NO: 438922 - RNA, 32 nt, Human
gcccuuugcacccacaccucagggacucggug

SEQ ID NO: 438923 - RNA, 32 nt, Human
gcccuuugcaggagaaggagacuugggaggca

SEQ ID NO: 438924 - RNA, 32 nt, Human
gcccuuugccuuucaugcccaugcuugauucu

SEQ ID NO: 438925 - RNA, 32 nt, Human
gcccuuugcuaucugcgcgcaggaugggggug

SEQ ID NO: 438926 - RNA, 21 nt, Human
gcccuuugcuugagggcuccc

SEQ ID NO: 438927 - RNA, 32 nt, Human
gcccuuugggaggccgaaugggcagaucacuu

SEQ ID NO: 438928 - RNA, 32 nt, Human
gcccuuuggguucugcauguguuccuggcagc

SEQ ID NO: 438929 - RNA, 21 nt, Human
gcccuuuguccacuggagcug

SEQ ID NO: 438930 - RNA, 32 nt, Human
gcccuuuguggggagguuagggggaugguaau

SEQ ID NO: 438931 - RNA, 32 nt, Human
gcccuuuguuccuaucuucuaaaggaaaguau

SEQ ID NO: 438932 - RNA, 32 nt, Human
gcccuuuuaagcugcggcuugacaggggccgc

SEQ ID NO: 438933 - RNA, 32 nt, Human
gcccuuuuauaccuccccagacuccuucaaca

SEQ ID NO: 438934 - RNA, 21 nt, Human
gcccuuuuccucuccaccuca

SEQ ID NO: 438935 - RNA, 32 nt, Human
gcccuuuucgcccaggcugaguacaguggugc

SEQ ID NO: 438936 - RNA, 32 nt, Human
gcccuuuucucaaaucauauuucugagagaaa

SEQ ID NO: 438937 - RNA, 32 nt, Human
gcccuuuucucucccuggaaagaaggaagucc

SEQ ID NO: 438938 - RNA, 19 nt, Human
gcccuuuucuucugcugcc

SEQ ID NO: 438939 - RNA, 32 nt, Human
gcccuuuugccuggaaacuauacagagcaggg

SEQ ID NO: 438940 - RNA, 32 nt, Human
gcccuuuugucucugcaaacugccuucuucgg

SEQ ID NO: 438941 - RNA, 32 nt, Human
gcccuuuuuaccccacgggugucugucccccu

SEQ ID NO: 438942 - RNA, 32 nt, Human
gcccuuuuuacucaaaacacaugggcuaguac

SEQ ID NO: 438943 - RNA, 32 nt, Human
gcccuuuuugcaccccagggagcugcugcuga

SEQ ID NO: 438944 - RNA, 32 nt, Human
gccgaaaauacaaggaaaauauacaaaugcaa

SEQ ID NO: 438945 - RNA, 32 nt, Human
gccgaaaccgaugugucuauggugcugcaccu

SEQ ID NO: 438946 - RNA, 32 nt, Human
gccgaaaccgaugugucuauggugcugcaucu

SEQ ID NO: 438947 - RNA, 32 nt, Human
gccgaaagagggguguugggaacucgcggcgc

SEQ ID NO: 438948 - RNA, 32 nt, Human
gccgaaaggaagcacgaaagcggucagagucu

SEQ ID NO: 438949 - RNA, 32 nt, Human
gccgaaagggagcagcggggaaggaggauggc

SEQ ID NO: 438950 - RNA, 32 nt, Human
gccgaaagggccugagagcugcuucuccuucu

SEQ ID NO: 438951 - RNA, 32 nt, Human
gccgaaccaaaguggauuaauuacacgcuuuc

SEQ ID NO: 438952 - RNA, 32 nt, Human
gccgaacgggagcugccgcuuccuucccggcc

SEQ ID NO: 438953 - RNA, 32 nt, Human
gccgaagaaagaggagugaggcaggggagcga

SEQ ID NO: 438954 - RNA, 32 nt, Human
gccgaagaagaaggacagggagcugcagaagc

SEQ ID NO: 438955 - RNA, 32 nt, Human
gccgaagauggcugagaagcagaagcacgacg

SEQ ID NO: 438956 - RNA, 32 nt, Human
gccgaagcaagaacagcacccaaaacaaacga

SEQ ID NO: 438957 - RNA, 24 nt, Human
gccgaagcaggaggaucacuggag

SEQ ID NO: 438958 - RNA, 32 nt, Human
gccgaagccacaccucccgcauggccccuccg

SEQ ID NO: 438959 - RNA, 32 nt, Human
gccgaagccagcugccugcugccucagcaggg

SEQ ID NO: 438960 - RNA, 32 nt, Human
gccgaagcccuugagccgcucgcugccgcugc

SEQ ID NO: 438961 - RNA, 32 nt, Human
gccgaagccgcaccucccgcauggccccuccg

SEQ ID NO: 438962 - RNA, 32 nt, Human
gccgaagccugaggaagcucaucaugagauuc

SEQ ID NO: 438963 - RNA, 21 nt, Human
gccgaagcgccgcgcgugaga

SEQ ID NO: 438964 - RNA, 20 nt, Human
gccgaagcucuuucccgccg

SEQ ID NO: 438965 - RNA, 32 nt, Human
gccgaagcugggggcagcuggggagggugggg

SEQ ID NO: 438966 - RNA, 32 nt, Human
gccgaaggacccugugcugccugugacuuugc

SEQ ID NO: 438967 - RNA, 32 nt, Human
gccgaaggacccugugcugccugugacuuugu

SEQ ID NO: 438968 - RNA, 32 nt, Human
gccgaaggagaaggaggaagaggagaaggcgg

SEQ ID NO: 438969 - RNA, 32 nt, Human
gccgaaggcccaggcuccgggauucacgcaga

SEQ ID NO: 438970 - RNA, 20 nt, Human
gccgaaggcggcagagucag

SEQ ID NO: 438971 - RNA, 24 nt, Human
gccgaagugggaggacugcuugag

SEQ ID NO: 438972 - RNA, 24 nt, Human
gccgaaguggguggaucgcuugag

SEQ ID NO: 438973 - RNA, 32 nt, Human
gccgaauagggaggaggugagaggcuggggug

SEQ ID NO: 438974 - RNA, 32 nt, Human
gccgaaucgcuccugcagcagagccaacaugc

SEQ ID NO: 438975 - RNA, 32 nt, Human
gccgaaucugucagggcccaggguucccagag

SEQ ID NO: 438976 - RNA, 32 nt, Human
gccgaaugaaaguaagcaaagauacugcuaga

SEQ ID NO: 438977 - RNA, 32 nt, Human
gccgaaugggcagaucacuugaggucaggagu

SEQ ID NO: 438978 - RNA, 32 nt, Human
gccgaauuguauccuuuaaagggagcaggggu

SEQ ID NO: 438979 - RNA, 32 nt, Human
gccgacaaccacugcccagcagccucugggac

SEQ ID NO: 438980 - RNA, 32 nt, Human
gccgacaacugcaaguuccuaggcagagggga

SEQ ID NO: 438981 - RNA, 32 nt, Human
gccgacacccgccucuccccacccuuaggcuc

SEQ ID NO: 438982 - RNA, 31 nt, Human
gccgacagaagucacugccuaccucaggguc

SEQ ID NO: 438983 - RNA, 32 nt, Human
gccgacagaccggagcgacagggaguugccau

SEQ ID NO: 438984 - RNA, 32 nt, Human
gccgacagccugaagccagagcaggccgcugu

SEQ ID NO: 438985 - RNA, 32 nt, Human
gccgacagccuugcaggcugggcucagggaca

SEQ ID NO: 438986 - RNA, 32 nt, Human
gccgacagcucuccaauacucagguuaaugcu

SEQ ID NO: 438987 - RNA, 32 nt, Human
gccgacaucacugacuccagggaccagggaca

SEQ ID NO: 438988 - RNA, 20 nt, Human
gccgacaucaugccauugca

SEQ ID NO: 438989 - RNA, 20 nt, Human
gccgacaucgcgccauugca

SEQ ID NO: 438990 - RNA, 32 nt, Human
gccgacauguuuucuuuggccugggugguuua

SEQ ID NO: 438991 - RNA, 32 nt, Human
gccgaccaauggcugcuucauccccgacguug

SEQ ID NO: 438992 - RNA, 32 nt, Human
gccgaccacagcccuccccacugugagccuuc

SEQ ID NO: 438993 - RNA, 32 nt, Human
gccgaccagcacuugggaucugaugggacacg

SEQ ID NO: 438994 - RNA, 32 nt, Human
gccgaccagcuccagucccagguccaauccug

SEQ ID NO: 438995 - RNA, 32 nt, Human
gccgaccccagacagacccaggaauggagagc

SEQ ID NO: 438996 - RNA, 32 nt, Human
gccgacccccucucccugcauggcauccucca

SEQ ID NO: 438997 - RNA, 32 nt, Human
gccgaccccuuggcgggaaccagcacaaagug

SEQ ID NO: 438998 - RNA, 32 nt, Human
gccgacccuccccuccccaccucccccacugc

SEQ ID NO: 438999 - RNA, 32 nt, Human
gccgacccugcggccuccaccaaccccgcggc

SEQ ID NO: 439000 - RNA, 32 nt, Human
gccgaccgugagagcgcacgagcugagucagu

SEQ ID NO: 439001 - RNA, 32 nt, Human
gccgaccucacaccucagcccuugcacccggc

SEQ ID NO: 439002 - RNA, 23 nt, Human
gccgaccuccccgcugcauuugc

SEQ ID NO: 439003 - RNA, 32 nt, Human
gccgaccugcugcagcccguccuggacauccu

SEQ ID NO: 439004 - RNA, 32 nt, Human
gccgaccuugccuaccagcuccuggguguccu

SEQ ID NO: 439005 - RNA, 24 nt, Human
gccgacgcaggaggauugcuugag

SEQ ID NO: 439006 - RNA, 32 nt, Human
gccgacgcagucauugucucagccaggcuggu

SEQ ID NO: 439007 - RNA, 32 nt, Human
gccgacgccagcacgccgucauggcccccgca

SEQ ID NO: 439008 - RNA, 22 nt, Human
gccgacgcgcggcccucggugg

SEQ ID NO: 439009 - RNA, 32 nt, Human
gccgacggcagcgccuugcccagaccuccccu

SEQ ID NO: 439010 - RNA, 32 nt, Human
gccgacgugccacccacccggagccggugagu

SEQ ID NO: 439011 - RNA, 24 nt, Human
gccgacgugggaggguagcuugag

SEQ ID NO: 439012 - RNA, 32 nt, Human
gccgacguggugagugggggcaugcuugggag

SEQ ID NO: 439013 - RNA, 32 nt, Human
gccgacuauguggcgggcaccuguaaucccac

SEQ ID NO: 439014 - RNA, 32 nt, Human
gccgacuccuggcaggaccucagucaaauccg

SEQ ID NO: 439015 - RNA, 32 nt, Human
gccgacuccuucuccccuccuggcagucaggc

SEQ ID NO: 439016 - RNA, 32 nt, Human
gccgacucguucuccccuccuggcagucaggc

SEQ ID NO: 439017 - RNA, 32 nt, Human
gccgacucugcacucuccacccuggcugggau

SEQ ID NO: 439018 - RNA, 32 nt, Human
gccgacuggucggcugugaugaugacauuggu

SEQ ID NO: 439019 - RNA, 32 nt, Human
gccgacuguauacagagguucaucucaaccuc

SEQ ID NO: 439020 - RNA, 21 nt, Human
gccgacuguauuuccugguua

SEQ ID NO: 439021 - RNA, 32 nt, Human
gccgacugugaggaaaagcagagggaauguga

SEQ ID NO: 439022 - RNA, 32 nt, Human
gccgacugugccagucccagccgcccuaccgc

SEQ ID NO: 439023 - RNA, 32 nt, Human
gccgacuuccccuccucuucccucucuccuuc

SEQ ID NO: 439024 - RNA, 32 nt, Human
gccgacuucuccccuuuccccagccucgugcc

SEQ ID NO: 439025 - RNA, 23 nt, Human
gccgagaaacaaaguucccgggg

SEQ ID NO: 439026 - RNA, 21 nt, Human
gccgagaaacggccagugggg

SEQ ID NO: 439027 - RNA, 32 nt, Human
gccgagaacacugcugggcucccagguagcug

SEQ ID NO: 439028 - RNA, 32 nt, Human
gccgagaaccaccacccgccaggcgucuugcg

SEQ ID NO: 439029 - RNA, 32 nt, Human
gccgagaacugcgggugcacugccucagggaa

SEQ ID NO: 439030 - RNA, 32 nt, Human
gccgagaaggaggaggaggagagaggaaagag

SEQ ID NO: 439031 - RNA, 32 nt, Human
gccgagaaugccacugcacuacagccugggcg

SEQ ID NO: 439032 - RNA, 32 nt, Human
gccgagaccaagaggcccucacucugacacca

SEQ ID NO: 439033 - RNA, 32 nt, Human
gccgagacugugcuccagccugggcgacagag

SEQ ID NO: 439034 - RNA, 32 nt, Human
gccgagacuuguuggccgcggagacugcgacc

SEQ ID NO: 439035 - RNA, 32 nt, Human
gccgagagaggcaggcggaucacaaagucagg

SEQ ID NO: 439036 - RNA, 32 nt, Human
gccgagagcaucucccuggaggggcccacggu

SEQ ID NO: 439037 - RNA, 32 nt, Human
gccgagagccacacuuucaaguaaccaggugg

SEQ ID NO: 439038 - RNA, 32 nt, Human
gccgagagccagaccuguuuguccugagaaaa

SEQ ID NO: 439039 - RNA, 32 nt, Human
gccgagagccccgggagagugaagggccgggg

SEQ ID NO: 439040 - RNA, 32 nt, Human
gccgagagcgagaagcagcaggccuugucucu

SEQ ID NO: 439041 - RNA, 32 nt, Human
gccgagaggaagggagggcagcucgggccgaa

SEQ ID NO: 439042 - RNA, 32 nt, Human
gccgagaggagcugggcugaaucuccaggcgu

SEQ ID NO: 439043 - RNA, 32 nt, Human
gccgagaggcaggccgggcaggggugucggac

SEQ ID NO: 439044 - RNA, 18 nt, Human
gccgagaucgcccugcug

SEQ ID NO: 439045 - RNA, 20 nt, Human
gccgagauggcgccauuuca

SEQ ID NO: 439046 - RNA, 32 nt, Human
gccgagaugggacagcaaagaugaugggcucu

SEQ ID NO: 439047 - RNA, 32 nt, Human
gccgagauuaugucacuccagccugggcaaca

SEQ ID NO: 439048 - RNA, 32 nt, Human
gccgagauugcaccccugcacuccaggcuggg

SEQ ID NO: 439049 - RNA, 32 nt, Human
gccgagauugccacugcacuccagccugggca

SEQ ID NO: 439050 - RNA, 32 nt, Human
gccgagauugugcacuccagccuggguaacag

SEQ ID NO: 439051 - RNA, 32 nt, Human
gccgagauugugccacuacacuccagccuggg

SEQ ID NO: 439052 - RNA, 32 nt, Human
gccgagauugugccacugcacaccggccuggg

SEQ ID NO: 439053 - RNA, 32 nt, Human
gccgagauugugccacugcacacuccaaucug

SEQ ID NO: 439054 - RNA, 32 nt, Human
gccgagauugugccacugcacuccaaccuggg

SEQ ID NO: 439055 - RNA, 32 nt, Human
gccgagauugugccacugcacuccagccugga

SEQ ID NO: 439056 - RNA, 32 nt, Human
gccgagauugugccacugcacuccagccuggc

SEQ ID NO: 439057 - RNA, 32 nt, Human
gccgagauugugccacugcacuccagccuggg

SEQ ID NO: 439058 - RNA, 32 nt, Human
gccgagauugugccacugcacuccagcugggu

SEQ ID NO: 439059 - RNA, 32 nt, Human
gccgagauugugccacugcgcuccagccuggg

SEQ ID NO: 439060 - RNA, 32 nt, Human
gccgagauugugccacuguacaccagccuggg

SEQ ID NO: 439061 - RNA, 32 nt, Human
gccgagauugugccacuguacuccagccugga

SEQ ID NO: 439062 - RNA, 32 nt, Human
gccgagauugugccacuguacuccagccuggu

SEQ ID NO: 439063 - RNA, 32 nt, Human
gccgagcacaguggcccaugccuauaauccca

SEQ ID NO: 439064 - RNA, 32 nt, Human
gccgagcacugaggggucgccccgagagaaga

SEQ ID NO: 439065 - RNA, 32 nt, Human
gccgagcagccccugcucccuccuggagaccc

SEQ ID NO: 439066 - RNA, 32 nt, Human
gccgagcagggugcggcggcggcggggcgcuc

SEQ ID NO: 439067 - RNA, 32 nt, Human
gccgagcauggugacucacaucuguaauccca

SEQ ID NO: 439068 - RNA, 32 nt, Human
gccgagccaccugagcccgagccgcgggacac

SEQ ID NO: 439069 - RNA, 20 nt, Human
gccgagcccagcaaaggugg

SEQ ID NO: 439070 - RNA, 18 nt, Human
gccgagccccugcugcug

SEQ ID NO: 439071 - RNA, 20 nt, Human
gccgagcccgagccgccgcc

SEQ ID NO: 439072 - RNA, 20 nt, Human
gccgagcccgagccgcugcc

SEQ ID NO: 439073 - RNA, 32 nt, Human
gccgagcccgcugggagucuagaaagagaaaa

SEQ ID NO: 439074 - RNA, 32 nt, Human
gccgagccgcucacgcccugcccacauugucc

SEQ ID NO: 439075 - RNA, 32 nt, Human
gccgagccggagccauggagggccagagcgug

SEQ ID NO: 439076 - RNA, 32 nt, Human
gccgagccgggagcgggcgucuugccgaggcc

SEQ ID NO: 439077 - RNA, 21 nt, Human
gccgagccgucgccgcagccu

SEQ ID NO: 439078 - RNA, 18 nt, Human
gccgagccucaagaugaa

SEQ ID NO: 439079 - RNA, 32 nt, Human
gccgagccucagcugcuggcauuuccuucugc

SEQ ID NO: 439080 - RNA, 32 nt, Human
gccgagccugacacgcuguccucuccccucgc

SEQ ID NO: 439081 - RNA, 21 nt, Human
gccgagcgccgccgccgccgc

SEQ ID NO: 439082 - RNA, 32 nt, Human
gccgagcggagaggguagagacgggguuucac

SEQ ID NO: 439083 - RNA, 32 nt, Human
gccgagcggagcccaggagagcagagagcgag

SEQ ID NO: 439084 - RNA, 18 nt, Human
gccgagcggagcccaggg

SEQ ID NO: 439085 - RNA, 32 nt, Human
gccgagcggccgcggcggcggcggcgagugcg

SEQ ID NO: 439086 - RNA, 25 nt, Human
gccgagcggccggcgcagcgugaga

SEQ ID NO: 439087 - RNA, 32 nt, Human
gccgagcgggcguccgucgccggagcugcaau

SEQ ID NO: 439088 - RNA, 32 nt, Human
gccgagcggggccggaggcaagagugacuuca

SEQ ID NO: 439089 - RNA, 20 nt, Human
gccgagcguccgccgcugcc

SEQ ID NO: 439090 - RNA, 32 nt, Human
gccgagcucccuccauuccucucccuccgccg

SEQ ID NO: 439091 - RNA, 32 nt, Human
gccgagcucuuccucccugcugugucuacagg

SEQ ID NO: 439092 - RNA, 32 nt, Human
gccgagcugcugccguuucuuccugcacaacg

SEQ ID NO: 439093 - RNA, 20 nt, Human
gccgagcugucgcccgcgcc

SEQ ID NO: 439094 - RNA, 32 nt, Human
gccgagcuuccucugggagggaggaaacaguu

SEQ ID NO: 439095 - RNA, 24 nt, Human
gccgaggaacaugccagggcccag

SEQ ID NO: 439096 - RNA, 32 nt, Human
gccgaggacaucuuacuccugcugcugggccu

SEQ ID NO: 439097 - RNA, 21 nt, Human
gccgaggaccuucugggcccc

SEQ ID NO: 439098 - RNA, 32 nt, Human
gccgaggagacaacuacaaacagacuuugggc

SEQ ID NO: 439099 - RNA, 32 nt, Human
gccgaggaggaagagguugauggcggcggcgg

SEQ ID NO: 439100 - RNA, 32 nt, Human
gccgaggaggaggaggaggaggaggaggaggc

SEQ ID NO: 439101 - RNA, 32 nt, Human
gccgaggaggagggcgcgggaggcggaggaug

SEQ ID NO: 439102 - RNA, 32 nt, Human
gccgaggaggcgccaagagggagcgagggcug

SEQ ID NO: 439103 - RNA, 32 nt, Human
gccgaggaggggcggggaaggucagccagguu

SEQ ID NO: 439104 - RNA, 32 nt, Human
gccgaggaguuugagucugcagugagcuauga

SEQ ID NO: 439105 - RNA, 32 nt, Human
gccgaggauggggaaauccaacagcaaguuga

SEQ ID NO: 439106 - RNA, 23 nt, Human
gccgaggcacgagaaucgcuuga

SEQ ID NO: 439107 - RNA, 32 nt, Human
gccgaggcacuuccaggcuucacucaacucau

SEQ ID NO: 439108 - RNA, 32 nt, Human
gccgaggcagcccagagcagcgggaugagcug

SEQ ID NO: 439109 - RNA, 23 nt, Human
gccgaggcaggaaaaucgcuuga

SEQ ID NO: 439110 - RNA, 24 nt, Human
gccgaggcaggaagaauugcuuga

SEQ ID NO: 439111 - RNA, 24 nt, Human
gccgaggcaggaagacugcuugag

SEQ ID NO: 439112 - RNA, 24 nt, Human
gccgaggcaggaagaucacuugag

SEQ ID NO: 439113 - RNA, 23 nt, Human
gccgaggcaggaagauugcuuga

SEQ ID NO: 439114 - RNA, 23 nt, Human
gccgaggcaggagaaucacuuga

SEQ ID NO: 439115 - RNA, 24 nt, Human
gccgaggcaggagaaucgcuugag

SEQ ID NO: 439116 - RNA, 23 nt, Human
gccgaggcaggagaaucucuuga

SEQ ID NO: 439117 - RNA, 23 nt, Human
gccgaggcaggagaauugcuuga

SEQ ID NO: 439118 - RNA, 24 nt, Human
gccgaggcaggagcaucgcuugag

SEQ ID NO: 439119 - RNA, 24 nt, Human
gccgaggcaggaggaucacuugag

SEQ ID NO: 439120 - RNA, 24 nt, Human
gccgaggcaggcagaucgcuugag

SEQ ID NO: 439121 - RNA, 24 nt, Human
gccgaggcaggcaggucacuugag

SEQ ID NO: 439122 - RNA, 32 nt, Human
gccgaggcaggcggaucacgaggucaggagau

SEQ ID NO: 439123 - RNA, 32 nt, Human
gccgaggcaggcggaucacgaggucaggaguu

SEQ ID NO: 439124 - RNA, 24 nt, Human
gccgaggcaggcggaucacuugag

SEQ ID NO: 439125 - RNA, 32 nt, Human
gccgaggcaggcggaucaugaggucaggagau

SEQ ID NO: 439126 - RNA, 32 nt, Human
gccgaggcaggcggaucaugaggucaggaguu

SEQ ID NO: 439127 - RNA, 32 nt, Human
gccgaggcaggcggaucauguggucaggagau

SEQ ID NO: 439128 - RNA, 32 nt, Human
gccgaggcaggcggaucccgaggucaggagau

SEQ ID NO: 439129 - RNA, 32 nt, Human
gccgaggcaggcggauugccugaggucaggag

SEQ ID NO: 439130 - RNA, 24 nt, Human
gccgaggcagguggaucacuugag

SEQ ID NO: 439131 - RNA, 24 nt, Human
gccgaggcagguggaucgcuugag

SEQ ID NO: 439132 - RNA, 32 nt, Human
gccgaggccaggccgcagcccaggagccgccc

SEQ ID NO: 439133 - RNA, 20 nt, Human
gccgaggccccuccccggcc

SEQ ID NO: 439134 - RNA, 32 nt, Human
gccgaggcccgggggaccagagcgagaagcgg

SEQ ID NO: 439135 - RNA, 32 nt, Human
gccgaggccgcaccacugcacuccagccuggg

SEQ ID NO: 439136 - RNA, 32 nt, Human
gccgaggccgcgguuucccccugggccucccc

SEQ ID NO: 439137 - RNA, 24 nt, Human
gccgaggcgggaagaucacuugag

SEQ ID NO: 439138 - RNA, 24 nt, Human
gccgaggcgggaggaucacuugag

SEQ ID NO: 439139 - RNA, 24 nt, Human
gccgaggcgggcagaucacuugag

SEQ ID NO: 439140 - RNA, 24 nt, Human
gccgaggcgggcggaucacuugag

SEQ ID NO: 439141 - RNA, 24 nt, Human
gccgaggcgggcggaucgcuugag

SEQ ID NO: 439142 - RNA, 32 nt, Human
gccgaggcgggugaucacuugaggucaguagu

SEQ ID NO: 439143 - RNA, 19 nt, Human
gccgaggcggguggaucac

SEQ ID NO: 439144 - RNA, 24 nt, Human
gccgaggcggguggaucacuugag

SEQ ID NO: 439145 - RNA, 24 nt, Human
gccgaggcggguggaucgcuugag

SEQ ID NO: 439146 - RNA, 24 nt, Human
gccgaggcgggugggucaccugag

SEQ ID NO: 439147 - RNA, 21 nt, Human
gccgaggcuggagcacaggga

SEQ ID NO: 439148 - RNA, 20 nt, Human
gccgaggcuggagugcaaug

SEQ ID NO: 439149 - RNA, 21 nt, Human
gccgaggcuggagugcaaugg

SEQ ID NO: 439150 - RNA, 32 nt, Human
gccgaggcuggcccaggcagccgcgcuucgaa

SEQ ID NO: 439151 - RNA, 19 nt, Human
gccgaggcugugcuccaag

SEQ ID NO: 439152 - RNA, 32 nt, Human
gccgagggaaccuggggguggggaggaggggg

SEQ ID NO: 439153 - RNA, 32 nt, Human
gccgagggagugaaccauggacaaguugaaau

SEQ ID NO: 439154 - RNA, 32 nt, Human
gccgagggcccaggcccugugugcggugccca

SEQ ID NO: 439155 - RNA, 32 nt, Human
gccgagggccggagaguggcagauggagagag

SEQ ID NO: 439156 - RNA, 18 nt, Human
gccgagggccucccagca

SEQ ID NO: 439157 - RNA, 32 nt, Human
gccgagggccuuguguaggccauguuccucgg

SEQ ID NO: 439158 - RNA, 32 nt, Human
gccgaggggagagggugaccauggggaaugug

SEQ ID NO: 439159 - RNA, 32 nt, Human
gccgagggggcugugguuagaaggagcaguag

SEQ ID NO: 439160 - RNA, 32 nt, Human
gccgaggggguggggguugcagugagccaaga

SEQ ID NO: 439161 - RNA, 32 nt, Human
gccgaggggugcuucgucucuguuccugagag

SEQ ID NO: 439162 - RNA, 32 nt, Human
gccgagggugcuuuagagaggugguuuuccau

SEQ ID NO: 439163 - RNA, 24 nt, Human
gccgagguagaagaaucgcuugag

SEQ ID NO: 439164 - RNA, 24 nt, Human
gccgagguagguggaucgccugag

SEQ ID NO: 439165 - RNA, 32 nt, Human
gccgagguccaaggcaggaggccauuuacuug

SEQ ID NO: 439166 - RNA, 24 nt, Human
gccgaggugggaggagcgcuugag

SEQ ID NO: 439167 - RNA, 24 nt, Human
gccgaggugggaggaucacuugag

SEQ ID NO: 439168 - RNA, 24 nt, Human
gccgaggugggaggaucgcuugag

SEQ ID NO: 439169 - RNA, 24 nt, Human
gccgaggugggaggauugcuugag

SEQ ID NO: 439170 - RNA, 32 nt, Human
gccgagguggggaccgauaggagaagccggug

SEQ ID NO: 439171 - RNA, 24 nt, Human
gccgagguggguagaucgcuugag

SEQ ID NO: 439172 - RNA, 24 nt, Human
gccgagguggguggaccgcuugag

SEQ ID NO: 439173 - RNA, 32 nt, Human
gccgagguggguggaucacaagguugggagau

SEQ ID NO: 439174 - RNA, 19 nt, Human
gccgagguuugcgcugccg

SEQ ID NO: 439175 - RNA, 32 nt, Human
gccgagguuuuuaaugagauucuuucuauggg

SEQ ID NO: 439176 - RNA, 25 nt, Human
gccgaguaucuuccagccgcugccu

SEQ ID NO: 439177 - RNA, 32 nt, Human
gccgagucacuacugccugccugccugccugc

SEQ ID NO: 439178 - RNA, 32 nt, Human
gccgaguccuugucccuaccuccagcuuccuc

SEQ ID NO: 439179 - RNA, 32 nt, Human
gccgagucggaggggguggcagugagcggcgg

SEQ ID NO: 439180 - RNA, 26 nt, Human
gccgagucucccaugacgcccgagcc

SEQ ID NO: 439181 - RNA, 20 nt, Human
gccgagucuccgacugucug

SEQ ID NO: 439182 - RNA, 32 nt, Human
gccgagucucuuucauacagcacagcaaauga

SEQ ID NO: 439183 - RNA, 32 nt, Human
gccgagucugucucugucaugguagagaccga

SEQ ID NO: 439184 - RNA, 32 nt, Human
gccgagugcaccacugcacuccagccugggca

SEQ ID NO: 439185 - RNA, 32 nt, Human
gccgaguguugcaggcacuccagccuggcgac

SEQ ID NO: 439186 - RNA, 32 nt, Human
gccgaguuuaggagaagagagugagaggagca

SEQ ID NO: 439187 - RNA, 21 nt, Human
gccgaguuucacucuggcugc

SEQ ID NO: 439188 - RNA, 32 nt, Human
gccgaguuuccucugccccuucuugcuggucc

SEQ ID NO: 439189 - RNA, 32 nt, Human
gccgauaaugcauauguccaguucucacuuaa

SEQ ID NO: 439190 - RNA, 22 nt, Human
gccgauaauuuaaacagucucc

SEQ ID NO: 439191 - RNA, 22 nt, Human
gccgauacuggcagccauugca

SEQ ID NO: 439192 - RNA, 20 nt, Human
gccgauaugcagcugggagg

SEQ ID NO: 439193 - RNA, 20 nt, Human
gccgaucacuugaggucagg

SEQ ID NO: 439194 - RNA, 32 nt, Human
gccgauccagccucccuuugcugcagaggagg

SEQ ID NO: 439195 - RNA, 32 nt, Human
gccgaucccaaagccccguggcccugcucuuu

SEQ ID NO: 439196 - RNA, 32 nt, Human
gccgaucguccugggcccgaggaaaagagaga

SEQ ID NO: 439197 - RNA, 32 nt, Human
gccgaucuccccucggaggcuucuuggccaac

SEQ ID NO: 439198 - RNA, 32 nt, Human
gccgaugagacccagacacaggcagaccuggc

SEQ ID NO: 439199 - RNA, 32 nt, Human
gccgauggagcgugguguagcagaacagcuca

SEQ ID NO: 439200 - RNA, 32 nt, Human
gccgauggggcccugagcaggacgugccucuu

SEQ ID NO: 439201 - RNA, 32 nt, Human
gccgauggucaguggaggaagcugacuagccc

SEQ ID NO: 439202 - RNA, 32 nt, Human
gccgaugguuauacagugaagaagacuucacc

SEQ ID NO: 439203 - RNA, 32 nt, Human
gccgauuagggagagagaccaggaaugagugg

SEQ ID NO: 439204 - RNA, 32 nt, Human
gccgauucauuccacgcagcaguauugggggu

SEQ ID NO: 439205 - RNA, 18 nt, Human
gccgauuccuucaugcua

SEQ ID NO: 439206 - RNA, 32 nt, Human
gccgauugcaccacugcacuccagccugggca

SEQ ID NO: 439207 - RNA, 32 nt, Human
gccgauuucaagaacacaucuccuuuucaacc

SEQ ID NO: 439208 - RNA, 32 nt, Human
gccgcaaaaaccagcaaguuuuuauuagggau

SEQ ID NO: 439209 - RNA, 21 nt, Human
gccgcaaccggacggcuacca

SEQ ID NO: 439210 - RNA, 32 nt, Human
gccgcaacucaggucugcagcuggguccugcc

SEQ ID NO: 439211 - RNA, 26 nt, Human
gccgcaacucgcuuguccuuggguca

SEQ ID NO: 439212 - RNA, 21 nt, Human
gccgcaagacgccccagggca

SEQ ID NO: 439213 - RNA, 32 nt, Human
gccgcaagcaacaguuugugguggugaggccg

SEQ ID NO: 439214 - RNA, 32 nt, Human
gccgcaaggaggaggagugccaggcaggggcu

SEQ ID NO: 439215 - RNA, 32 nt, Human
gccgcaagucugcugcagaugaccucaugaac

SEQ ID NO: 439216 - RNA, 17 nt, Human
gccgcaaucucaccucu

SEQ ID NO: 439217 - RNA, 32 nt, Human
gccgcacacacguucgcacgcggcggccggcg

SEQ ID NO: 439218 - RNA, 32 nt, Human
gccgcacacccgccugccuggccgcagguggu

SEQ ID NO: 439219 - RNA, 32 nt, Human
gccgcacagaccucacuaguugugcacaaaua

SEQ ID NO: 439220 - RNA, 17 nt, Human
gccgcacagccaccacc

SEQ ID NO: 439221 - RNA, 32 nt, Human
gccgcacaugcagcacacaggucugcagagug

SEQ ID NO: 439222 - RNA, 32 nt, Human
gccgcaccacugcacuccagccugggugacag

SEQ ID NO: 439223 - RNA, 32 nt, Human
gccgcaccagccgccgcgccccgggccggcgg

SEQ ID NO: 439224 - RNA, 32 nt, Human
gccgcaccaggaugucggacaccgaggagcag

SEQ ID NO: 439225 - RNA, 32 nt, Human
gccgcaccaugagccacgggcccagcccccgg

SEQ ID NO: 439226 - RNA, 32 nt, Human
gccgcaccauuucugucacucacauggaccca

SEQ ID NO: 439227 - RNA, 32 nt, Human
gccgcacccaccgcugccccaggagcagcacg

SEQ ID NO: 439228 - RNA, 20 nt, Human
gccgcaccccggaggagcca

SEQ ID NO: 439229 - RNA, 32 nt, Human
gccgcaccccuucacucuuuccccgccuucuu

SEQ ID NO: 439230 - RNA, 32 nt, Human
gccgcacccgagagcagggacaggugcccgaa

SEQ ID NO: 439231 - RNA, 23 nt, Human
gccgcaccgcccagacuggcuca

SEQ ID NO: 439232 - RNA, 32 nt, Human
gccgcaccgccuauuccagccuuuggagaucc

SEQ ID NO: 439233 - RNA, 16 nt, Human
gccgcaccugccacca

SEQ ID NO: 439234 - RNA, 32 nt, Human
gccgcaccuggugggcccucuucuccacaaag

SEQ ID NO: 439235 - RNA, 32 nt, Human
gccgcacuccagccugcccuucgugaguuucc

SEQ ID NO: 439236 - RNA, 32 nt, Human
gccgcacuggggaccaggaacagggaugaguc

SEQ ID NO: 439237 - RNA, 32 nt, Human
gccgcacugucccaccuggcuuacaggugcug

SEQ ID NO: 439238 - RNA, 26 nt, Human
gccgcagaauccugagccaggugccu

SEQ ID NO: 439239 - RNA, 32 nt, Human
gccgcagacagcaguccuucagaauuaaaaua

SEQ ID NO: 439240 - RNA, 32 nt, Human
gccgcagacccaaagccagcuguggagcugug

SEQ ID NO: 439241 - RNA, 32 nt, Human
gccgcagagcccaggagaugugggcaggagcu

SEQ ID NO: 439242 - RNA, 20 nt, Human
gccgcagagccggggcccag

SEQ ID NO: 439243 - RNA, 32 nt, Human
gccgcagagccugcgaaccccuccugugcuac

SEQ ID NO: 439244 - RNA, 32 nt, Human
gccgcagcacagugcuaaucuauccacaaaac

SEQ ID NO: 439245 - RNA, 32 nt, Human
gccgcagcagccgccaccaguggccgagugag

SEQ ID NO: 439246 - RNA, 32 nt, Human
gccgcagcagucagggucacugugggagcccu

SEQ ID NO: 439247 - RNA, 32 nt, Human
gccgcagcaguggcugaucaucacugaaaaua

SEQ ID NO: 439248 - RNA, 22 nt, Human
gccgcagccaccaccgccgcca

SEQ ID NO: 439249 - RNA, 22 nt, Human
gccgcagccagccccucccgca

SEQ ID NO: 439250 - RNA, 24 nt, Human
gccgcagccaggcggcggccggca

SEQ ID NO: 439251 - RNA, 32 nt, Human
gccgcagccaugagcaugcucgggccucagaa

SEQ ID NO: 439252 - RNA, 17 nt, Human
gccgcagccccauggcc

SEQ ID NO: 439253 - RNA, 32 nt, Human
gccgcagcccugaccuggaaugucuccaccuc

SEQ ID NO: 439254 - RNA, 21 nt, Human
gccgcagccgcagccgccgcc

SEQ ID NO: 439255 - RNA, 32 nt, Human
gccgcagccgcagcuacugugacuucuccgau

SEQ ID NO: 439256 - RNA, 23 nt, Human
gccgcagccgccgccgccgccgc

SEQ ID NO: 439257 - RNA, 32 nt, Human
gccgcagccgccgcgagccuccggacagacgc

SEQ ID NO: 439258 - RNA, 20 nt, Human
gccgcagccgccuccgccac

SEQ ID NO: 439259 - RNA, 29 nt, Human
gccgcagccgcugccgccggagcccggga

SEQ ID NO: 439260 - RNA, 21 nt, Human
gccgcagccugcugggcuacc

SEQ ID NO: 439261 - RNA, 21 nt, Human
gccgcagcgagcgcccggcgg

SEQ ID NO: 439262 - RNA, 32 nt, Human
gccgcagcgaggaggcggcggggaagaagcgc

SEQ ID NO: 439263 - RNA, 22 nt, Human
gccgcagcgcccggcccgggcc

SEQ ID NO: 439264 - RNA, 23 nt, Human
gccgcagcgcccucaggccgcca

SEQ ID NO: 439265 - RNA, 17 nt, Human
gccgcagcggcgcgagg

SEQ ID NO: 439266 - RNA, 25 nt, Human
gccgcagcgugcugcgccucgggcu

SEQ ID NO: 439267 - RNA, 32 nt, Human
gccgcagcucucuccccuucuuaccuccccac

SEQ ID NO: 439268 - RNA, 32 nt, Human
gccgcagcugcaucaaccuccuuuuaccuuua

SEQ ID NO: 439269 - RNA, 32 nt, Human
gccgcagcugccgccucgccgcggccgggccg

SEQ ID NO: 439270 - RNA, 32 nt, Human
gccgcaggaaggcuagccagaggguaauuaca

SEQ ID NO: 439271 - RNA, 32 nt, Human
gccgcaggaccacggcccgcuccccgccgccg

SEQ ID NO: 439272 - RNA, 20 nt, Human
gccgcaggaccccaccaccc

SEQ ID NO: 439273 - RNA, 32 nt, Human
gccgcaggaccugaacgccgcuccagccucca

SEQ ID NO: 439274 - RNA, 32 nt, Human
gccgcaggaggaggaggaggucgucgggggcg

SEQ ID NO: 439275 - RNA, 32 nt, Human
gccgcaggagggcccugugggaugcucugugc

SEQ ID NO: 439276 - RNA, 32 nt, Human
gccgcagggaaugacaccggugcuccuacagc

SEQ ID NO: 439277 - RNA, 32 nt, Human
gccgcagggaggcagggauggcaaggcgugaa

SEQ ID NO: 439278 - RNA, 32 nt, Human
gccgcagggggcccugcacacugaugucagcu

SEQ ID NO: 439279 - RNA, 23 nt, Human
gccgcagucgccgccgccgccgc

SEQ ID NO: 439280 - RNA, 32 nt, Human
gccgcauccaucucaguguggaggacagugac

SEQ ID NO: 439281 - RNA, 32 nt, Human
gccgcaucccucucuaccugccaacauccugu

SEQ ID NO: 439282 - RNA, 32 nt, Human
gccgcaucgcuuguuuccaccuccugggccgg

SEQ ID NO: 439283 - RNA, 26 nt, Human
gccgcaucuagcucugcccugggcua

SEQ ID NO: 439284 - RNA, 32 nt, Human
gccgcaucuccaggacuccuggccuggacuuc

SEQ ID NO: 439285 - RNA, 32 nt, Human
gccgcaugacaacugaaggcaaccuggaaggu

SEQ ID NO: 439286 - RNA, 32 nt, Human
gccgcaugccuguaaucccagcuacuugggug

SEQ ID NO: 439287 - RNA, 32 nt, Human
gccgcaugccuguagucccagcuacucgggag

SEQ ID NO: 439288 - RNA, 30 nt, Human
gccgcaugcucccggagcccagccucuuca

SEQ ID NO: 439289 - RNA, 18 nt, Human
gccgcauuccugcacuca

SEQ ID NO: 439290 - RNA, 32 nt, Human
gccgcauuucuucugcacuuccugucucaucc

SEQ ID NO: 439291 - RNA, 32 nt, Human
gccgccaaagcccagcagcuccgagcggcucc

SEQ ID NO: 439292 - RNA, 32 nt, Human
gccgccacacaguuccagcagagccaggccag

SEQ ID NO: 439293 - RNA, 32 nt, Human
gccgccacacucagugccauggggaagcgggc

SEQ ID NO: 439294 - RNA, 28 nt, Human
gccgccacagccacacagccgccgccac

SEQ ID NO: 439295 - RNA, 23 nt, Human
gccgccacagccgccgccuccac

SEQ ID NO: 439296 - RNA, 32 nt, Human
gccgccacagccgccgccuccaccaccaccac

SEQ ID NO: 439297 - RNA, 23 nt, Human
gccgccacauccuagccaugcuc

SEQ ID NO: 439298 - RNA, 32 nt, Human
gccgccaccagccugcugagccugugcuuccu

SEQ ID NO: 439299 - RNA, 32 nt, Human
gccgccaccaggaaggcggaggacgcaggagc

SEQ ID NO: 439300 - RNA, 32 nt, Human
gccgccaccaugaccaccuccauccgccaguu

SEQ ID NO: 439301 - RNA, 32 nt, Human
gccgccaccaugucucaggaagguguggagcu

SEQ ID NO: 439302 - RNA, 27 nt, Human
gccgccacccagcgccgccgccgccgc

SEQ ID NO: 439303 - RNA, 19 nt, Human
gccgccaccgagccgccgc

SEQ ID NO: 439304 - RNA, 20 nt, Human
gccgccaccgccgccgccgc

SEQ ID NO: 439305 - RNA, 23 nt, Human
gccgccaccgccgccgccgccac

SEQ ID NO: 439306 - RNA, 23 nt, Human
gccgccaccgccgccgccgccgc

SEQ ID NO: 439307 - RNA, 32 nt, Human
gccgccaccgccgccuccgccgcugccucagg

SEQ ID NO: 439308 - RNA, 32 nt, Human
gccgccaccgccgccucugcuuagucgccgcc

SEQ ID NO: 439309 - RNA, 22 nt, Human
gccgccaccgccgcuccgccac

SEQ ID NO: 439310 - RNA, 32 nt, Human
gccgccaccgcgggugugggaaagcgcggacg

SEQ ID NO: 439311 - RNA, 20 nt, Human
gccgccaccgcugccgccgc

SEQ ID NO: 439312 - RNA, 22 nt, Human
gccgccaccggcccaugagccc

SEQ ID NO: 439313 - RNA, 23 nt, Human
gccgccaccggcccgccaugccc

SEQ ID NO: 439314 - RNA, 32 nt, Human
gccgccaccucccuuuccccaagaccagaugu

SEQ ID NO: 439315 - RNA, 20 nt, Human
gccgccaccugcgcccagca

SEQ ID NO: 439316 - RNA, 20 nt, Human
gccgccacggccacaagccc

SEQ ID NO: 439317 - RNA, 32 nt, Human
gccgccacugccugugcuucaugaggaagaug

SEQ ID NO: 439318 - RNA, 32 nt, Human
gccgccacuugcgccucuccagccuccgcagg

SEQ ID NO: 439319 - RNA, 32 nt, Human
gccgccagaccucagagaucucaccagcgggg

SEQ ID NO: 439320 - RNA, 32 nt, Human
gccgccagccccaggagcccagccucuugaga

SEQ ID NO: 439321 - RNA, 32 nt, Human
gccgccagccccuuucucccucugccugacca

SEQ ID NO: 439322 - RNA, 32 nt, Human
gccgccagccucccccggccgugccccucccc

SEQ ID NO: 439323 - RNA, 23 nt, Human
gccgccagcugacaccgccugca

SEQ ID NO: 439324 - RNA, 32 nt, Human
gccgccagcugaccucaccguccaggcggaca

SEQ ID NO: 439325 - RNA, 32 nt, Human
gccgccagcugggugagcauggggcagcccca

SEQ ID NO: 439326 - RNA, 32 nt, Human
gccgccaggcacuccggagcuguccgcuucag

SEQ ID NO: 439327 - RNA, 32 nt, Human
gccgccaggggaaaggaggaacaucccuccca

SEQ ID NO: 439328 - RNA, 32 nt, Human
gccgccaguucugccucaggccgcgcccccuu

SEQ ID NO: 439329 - RNA, 19 nt, Human
gccgccaucaaccgccaca

SEQ ID NO: 439330 - RNA, 32 nt, Human
gccgccauccccaccaucccugaccgcgccug

SEQ ID NO: 439331 - RNA, 32 nt, Human
gccgccaucucucccuuccugccucauuucau

SEQ ID NO: 439332 - RNA, 31 nt, Human
gccgccaugagcugccccgugcccgccugcu

SEQ ID NO: 439333 - RNA, 31 nt, Human
gccgccaugauccugcuggaggugaacaacc

SEQ ID NO: 439334 - RNA, 32 nt, Human
gccgccaugcccaagagaaagacugaagggga

SEQ ID NO: 439335 - RNA, 31 nt, Human
gccgccauggggcugaaggccgcccagaaga

SEQ ID NO: 439336 - RNA, 32 nt, Human
gccgccauugcagcuuguuuucacuugcuuuu

SEQ ID NO: 439337 - RNA, 32 nt, Human
gccgcccacaaacugcugcaugaguggcugcc

SEQ ID NO: 439338 - RNA, 32 nt, Human
gccgcccacccacucccaaaauccgucaguau

SEQ ID NO: 439339 - RNA, 32 nt, Human
gccgcccacgucccacucugcccagccuacac

SEQ ID NO: 439340 - RNA, 19 nt, Human
gccgcccacucccacccca

SEQ ID NO: 439341 - RNA, 32 nt, Human
gccgcccagcaagcugugccuuuugcgccucu

SEQ ID NO: 439342 - RNA, 32 nt, Human
gccgcccagccgcggcucgccagugcgccagu

SEQ ID NO: 439343 - RNA, 32 nt, Human
gccgcccagcuguugugcugggcacagucugg

SEQ ID NO: 439344 - RNA, 20 nt, Human
gccgcccaggccccgcgcuc

SEQ ID NO: 439345 - RNA, 32 nt, Human
gccgcccaggguggguggccagugaggacugg

SEQ ID NO: 439346 - RNA, 32 nt, Human
gccgcccagggugguaucgcccggagcgcggg

SEQ ID NO: 439347 - RNA, 32 nt, Human
gccgcccagugggucaggcacagggagccccg

SEQ ID NO: 439348 - RNA, 19 nt, Human
gccgcccccaagcccagag

SEQ ID NO: 439349 - RNA, 23 nt, Human
gccgcccccgccgccgccgccgc

SEQ ID NO: 439350 - RNA, 32 nt, Human
gccgcccccgggaucaugggcaauggcaugac

SEQ ID NO: 439351 - RNA, 23 nt, Human
gccgcccccgucccgaaggggac

SEQ ID NO: 439352 - RNA, 32 nt, Human
gccgcccccuaaggagccgcacagaccuaggg

SEQ ID NO: 439353 - RNA, 32 nt, Human
gccgcccccugcccccggccuccgacccgagc

SEQ ID NO: 439354 - RNA, 32 nt, Human
gccgcccccugccucucggcucugcucccugc

SEQ ID NO: 439355 - RNA, 21 nt, Human
gccgccccgccaccgccgcca

SEQ ID NO: 439356 - RNA, 19 nt, Human
gccgccccgccgccgccgc

SEQ ID NO: 439357 - RNA, 32 nt, Human
gccgccccgcugcgcccaccuccccggcugcu

SEQ ID NO: 439358 - RNA, 16 nt, Human
gccgccccguccggga

SEQ ID NO: 439359 - RNA, 32 nt, Human
gccgccccucccccaccgccgcucucgcgcca

SEQ ID NO: 439360 - RNA, 32 nt, Human
gccgccccuccccucccacucucgucuccuuc

SEQ ID NO: 439361 - RNA, 20 nt, Human
gccgccccucccgcuugcuc

SEQ ID NO: 439362 - RNA, 32 nt, Human
gccgccccugcagcugcucccuggguggcccc

SEQ ID NO: 439363 - RNA, 32 nt, Human
gccgccccugugcaccuggccaggggaagccc

SEQ ID NO: 439364 - RNA, 32 nt, Human
gccgccccuuucucagccuugcucggcucuuc

SEQ ID NO: 439365 - RNA, 32 nt, Human
gccgcccgaacagccucccagccugggccccc

SEQ ID NO: 439366 - RNA, 22 nt, Human
gccgcccgaccgcgccgagcuc

SEQ ID NO: 439367 - RNA, 22 nt, Human
gccgcccgacuggcucgcgcuc

SEQ ID NO: 439368 - RNA, 21 nt, Human
gccgcccgagccacccugcuc

SEQ ID NO: 439369 - RNA, 22 nt, Human
gccgcccgaggcccgcgcgcuc

SEQ ID NO: 439370 - RNA, 32 nt, Human
gccgcccgcaccuccugaucccuucaagagcc

SEQ ID NO: 439371 - RNA, 20 nt, Human
gccgcccgcaggcucggcuc

SEQ ID NO: 439372 - RNA, 23 nt, Human
gccgcccgccacaccccgcgcuc

SEQ ID NO: 439373 - RNA, 27 nt, Human
gccgcccgcccgcccggcgccgcgcuc

SEQ ID NO: 439374 - RNA, 20 nt, Human
gccgcccgcccgccgggcuc

SEQ ID NO: 439375 - RNA, 22 nt, Human
gccgcccgccgcccgccgccuc

SEQ ID NO: 439376 - RNA, 21 nt, Human
gccgcccgccgccgccgccgc

SEQ ID NO: 439377 - RNA, 18 nt, Human
gccgcccgccgccuggag

SEQ ID NO: 439378 - RNA, 18 nt, Human
gccgcccgccgcucugug

SEQ ID NO: 439379 - RNA, 23 nt, Human
gccgcccgccggcccgccagcuc

SEQ ID NO: 439380 - RNA, 32 nt, Human
gccgcccgccucagcccaacauggcgaugcac

SEQ ID NO: 439381 - RNA, 20 nt, Human
gccgcccgccugccaggcuc

SEQ ID NO: 439382 - RNA, 21 nt, Human
gccgcccgccuuggccuccca

SEQ ID NO: 439383 - RNA, 21 nt, Human
gccgcccgcgagcggcgugcc

SEQ ID NO: 439384 - RNA, 20 nt, Human
gccgcccgcgcccgcuccuc

SEQ ID NO: 439385 - RNA, 21 nt, Human
gccgcccgcgcccgcucguuc

SEQ ID NO: 439386 - RNA, 24 nt, Human
gccgcccgcgccgcccgcgcccuc

SEQ ID NO: 439387 - RNA, 20 nt, Human
gccgcccgcgccgcgucugc

SEQ ID NO: 439388 - RNA, 19 nt, Human
gccgcccgcgcgccgcugu

SEQ ID NO: 439389 - RNA, 20 nt, Human
gccgcccgcgcgcgacucgc

SEQ ID NO: 439390 - RNA, 21 nt, Human
gccgcccgcggcccccggcuc

SEQ ID NO: 439391 - RNA, 21 nt, Human
gccgcccgcggcgccccgagc

SEQ ID NO: 439392 - RNA, 21 nt, Human
gccgcccggagcgccccgcuc

SEQ ID NO: 439393 - RNA, 21 nt, Human
gccgcccggcagcugcugggc

SEQ ID NO: 439394 - RNA, 20 nt, Human
gccgcccggcgcccccagca

SEQ ID NO: 439395 - RNA, 23 nt, Human
gccgcccggcuccacuacagcuc

SEQ ID NO: 439396 - RNA, 21 nt, Human
gccgcccgggaccgccagcuc

SEQ ID NO: 439397 - RNA, 32 nt, Human
gccgcccgggugggacacgccaagcucuucag

SEQ ID NO: 439398 - RNA, 23 nt, Human
gccgcccggugcucggcgcgcuc

SEQ ID NO: 439399 - RNA, 32 nt, Human
gccgcccuacccaccuucaggcagccuauggg

SEQ ID NO: 439400 - RNA, 32 nt, Human
gccgcccucagccugcauuccugugcgcaauc

SEQ ID NO: 439401 - RNA, 32 nt, Human
gccgcccucagcugcaacuccaauggcuacac

SEQ ID NO: 439402 - RNA, 32 nt, Human
gccgcccucaucacaggcugggcauggcuucc

SEQ ID NO: 439403 - RNA, 21 nt, Human
gccgcccuccacauggcgcca

SEQ ID NO: 439404 - RNA, 32 nt, Human
gccgcccuccaucaccugguacaaggacgcag

SEQ ID NO: 439405 - RNA, 32 nt, Human
gccgcccucccaggaccccgagcugcugucgg

SEQ ID NO: 439406 - RNA, 18 nt, Human
gccgcccuccccacggcg

SEQ ID NO: 439407 - RNA, 32 nt, Human
gccgcccuccgcccuccgcuggcuccgaggug

SEQ ID NO: 439408 - RNA, 32 nt, Human
gccgcccuccucccucuccuuccccuccuccc

SEQ ID NO: 439409 - RNA, 32 nt, Human
gccgcccuccuccgcccccacccuccagaagc

SEQ ID NO: 439410 - RNA, 21 nt, Human
gccgcccucgcaccuguacuc

SEQ ID NO: 439411 - RNA, 18 nt, Human
gccgcccucgcccugcac

SEQ ID NO: 439412 - RNA, 32 nt, Human
gccgcccucgcgucuccgcugcagagaagccc

SEQ ID NO: 439413 - RNA, 19 nt, Human
gccgcccucgcuccacgca

SEQ ID NO: 439414 - RNA, 32 nt, Human
gccgcccucuacccucaauccccacuggagau

SEQ ID NO: 439415 - RNA, 32 nt, Human
gccgcccucucagcagcgggcacggguggggc

SEQ ID NO: 439416 - RNA, 32 nt, Human
gccgcccugaccugcuccucuggccauaggcg

SEQ ID NO: 439417 - RNA, 18 nt, Human
gccgcccugaggagcgcc

SEQ ID NO: 439418 - RNA, 32 nt, Human
gccgcccugcagcauguacaccgagugucugc

SEQ ID NO: 439419 - RNA, 23 nt, Human
gccgcccugcagcccccaugccc

SEQ ID NO: 439420 - RNA, 32 nt, Human
gccgcccugcagcgggccaagcaggacauguu

SEQ ID NO: 439421 - RNA, 18 nt, Human
gccgcccugcccgccaga

SEQ ID NO: 439422 - RNA, 32 nt, Human
gccgcccugcccuguccucguggugagucgcu

SEQ ID NO: 439423 - RNA, 32 nt, Human
gccgcccugccuucugcaccuccccggaggcu

SEQ ID NO: 439424 - RNA, 18 nt, Human
gccgcccugcgugcgcug

SEQ ID NO: 439425 - RNA, 22 nt, Human
gccgcccuggacagauggccca

SEQ ID NO: 439426 - RNA, 32 nt, Human
gccgcccugggagcuccccggccgucgccgcg

SEQ ID NO: 439427 - RNA, 32 nt, Human
gccgcccuucuuccccaucucucccccgggcc

SEQ ID NO: 439428 - RNA, 32 nt, Human
gccgcccuugaccuccugcaggccaugugugu

SEQ ID NO: 439429 - RNA, 32 nt, Human
gccgcccuuggcuccugucccugcugcuccuc

SEQ ID NO: 439430 - RNA, 32 nt, Human
gccgcccuuuucuccuuauccuugccagcacu

SEQ ID NO: 439431 - RNA, 20 nt, Human
gccgccgaccgcacgcccgc

SEQ ID NO: 439432 - RNA, 25 nt, Human
gccgccgacgccauccccccgagcc

SEQ ID NO: 439433 - RNA, 32 nt, Human
gccgccgacugcagcccuagcgcccggggcuc

SEQ ID NO: 439434 - RNA, 21 nt, Human
gccgccgaggagaccccgggc

SEQ ID NO: 439435 - RNA, 32 nt, Human
gccgccgcaagcaacaguuugugguggugagg

SEQ ID NO: 439436 - RNA, 32 nt, Human
gccgccgcaccagccucaguggcagaugacac

SEQ ID NO: 439437 - RNA, 32 nt, Human
gccgccgcacccaggacggaggcugcaugccc

SEQ ID NO: 439438 - RNA, 16 nt, Human
gccgccgcacccugca

SEQ ID NO: 439439 - RNA, 26 nt, Human
gccgccgcagccaccaccgccgccac

SEQ ID NO: 439440 - RNA, 20 nt, Human
gccgccgcagcccucggccu

SEQ ID NO: 439441 - RNA, 20 nt, Human
gccgccgcagccgccgccac

SEQ ID NO: 439442 - RNA, 32 nt, Human
gccgccgcagccgccgccgcugggcagaggag

SEQ ID NO: 439443 - RNA, 20 nt, Human
gccgccgcagccgccgcuac

SEQ ID NO: 439444 - RNA, 32 nt, Human
gccgccgcaguccccaggcacuaccuaugaag

SEQ ID NO: 439445 - RNA, 25 nt, Human
gccgccgcagucucagcugcagcug

SEQ ID NO: 439446 - RNA, 19 nt, Human
gccgccgccaacaccccgc

SEQ ID NO: 439447 - RNA, 19 nt, Human
gccgccgccaccaccgcca

SEQ ID NO: 439448 - RNA, 23 nt, Human
gccgccgccaccaccgcugccac

SEQ ID NO: 439449 - RNA, 19 nt, Human
gccgccgccaccacugcca

SEQ ID NO: 439450 - RNA, 27 nt, Human
gccgccgccacccagcgccgccgccgc

SEQ ID NO: 439451 - RNA, 32 nt, Human
gccgccgccaccgccaccaccaccuccaccgc

SEQ ID NO: 439452 - RNA, 23 nt, Human
gccgccgccaccgcccccgccgc

SEQ ID NO: 439453 - RNA, 19 nt, Human
gccgccgccaccgcccgca

SEQ ID NO: 439454 - RNA, 23 nt, Human
gccgccgccaccgccgccgccgc

SEQ ID NO: 439455 - RNA, 25 nt, Human
gccgccgccaccucgcgcccgagcc

SEQ ID NO: 439456 - RNA, 22 nt, Human
gccgccgccacggccaccgccu

SEQ ID NO: 439457 - RNA, 23 nt, Human
gccgccgccagacagccgcccgc

SEQ ID NO: 439458 - RNA, 22 nt, Human
gccgccgccagcccggagccug

SEQ ID NO: 439459 - RNA, 32 nt, Human
gccgccgccagcucccccagacccccuccacc

SEQ ID NO: 439460 - RNA, 22 nt, Human
gccgccgccaggccuccgccug

SEQ ID NO: 439461 - RNA, 18 nt, Human
gccgccgccagggucgcc

SEQ ID NO: 439462 - RNA, 21 nt, Human
gccgccgccauccgccgccgc

SEQ ID NO: 439463 - RNA, 22 nt, Human
gccgccgccauccgccgccgca

SEQ ID NO: 439464 - RNA, 32 nt, Human
gccgccgccaugagcugccccgugcccgccug

SEQ ID NO: 439465 - RNA, 32 nt, Human
gccgccgccaugcagcccuccagccuucugcc

SEQ ID NO: 439466 - RNA, 19 nt, Human
gccgccgcccaccgcccgc

SEQ ID NO: 439467 - RNA, 22 nt, Human
gccgccgccccccagcccugca

SEQ ID NO: 439468 - RNA, 20 nt, Human
gccgccgccccccgcccgga

SEQ ID NO: 439469 - RNA, 21 nt, Human
gccgccgcccccuccccugca

SEQ ID NO: 439470 - RNA, 22 nt, Human
gccgccgccccgagcacccgca

SEQ ID NO: 439471 - RNA, 19 nt, Human
gccgccgccccgccgccgc

SEQ ID NO: 439472 - RNA, 24 nt, Human
gccgccgccccgccgccgcccgca

SEQ ID NO: 439473 - RNA, 20 nt, Human
gccgccgccccggcacccgc

SEQ ID NO: 439474 - RNA, 24 nt, Human
gccgccgccccggcucgccgccgc

SEQ ID NO: 439475 - RNA, 21 nt, Human
gccgccgccccuaccgccgca

SEQ ID NO: 439476 - RNA, 22 nt, Human
gccgccgccccugcacgcccgc

SEQ ID NO: 439477 - RNA, 19 nt, Human
gccgccgcccgccgcccgc

SEQ ID NO: 439478 - RNA, 24 nt, Human
gccgccgcccgccgccgccgccgc

SEQ ID NO: 439479 - RNA, 20 nt, Human
gccgccgcccgccgcgggcc

SEQ ID NO: 439480 - RNA, 25 nt, Human
gccgccgcccgccggcucucgggcu

SEQ ID NO: 439481 - RNA, 22 nt, Human
gccgccgcccgcggagccagca

SEQ ID NO: 439482 - RNA, 25 nt, Human
gccgccgcccgcuccuucucgggcc

SEQ ID NO: 439483 - RNA, 20 nt, Human
gccgccgcccgcugccugca

SEQ ID NO: 439484 - RNA, 21 nt, Human
gccgccgcccggggaccggca

SEQ ID NO: 439485 - RNA, 20 nt, Human
gccgccgcccuccgccccca

SEQ ID NO: 439486 - RNA, 32 nt, Human
gccgccgccgacgcaaccuccagcaccgccgc

SEQ ID NO: 439487 - RNA, 22 nt, Human
gccgccgccgagacagcugcgc

SEQ ID NO: 439488 - RNA, 21 nt, Human
gccgccgccgagcuccgccgc

SEQ ID NO: 439489 - RNA, 19 nt, Human
gccgccgccgagggccugc

SEQ ID NO: 439490 - RNA, 32 nt, Human
gccgccgccgagggcuggaggaagauggaggc

SEQ ID NO: 439491 - RNA, 20 nt, Human
gccgccgccgaggucccgca

SEQ ID NO: 439492 - RNA, 23 nt, Human
gccgccgccgcaccgcgccccac

SEQ ID NO: 439493 - RNA, 20 nt, Human
gccgccgccgcagccgccgc

SEQ ID NO: 439494 - RNA, 21 nt, Human
gccgccgccgcagcgcccuca

SEQ ID NO: 439495 - RNA, 23 nt, Human
gccgccgccgccaccaccgccac

SEQ ID NO: 439496 - RNA, 26 nt, Human
gccgccgccgccaccaccgcugccac

SEQ ID NO: 439497 - RNA, 27 nt, Human
gccgccgccgccacccagcgccgccgc

SEQ ID NO: 439498 - RNA, 20 nt, Human
gccgccgccgccaccgagcc

SEQ ID NO: 439499 - RNA, 19 nt, Human
gccgccgccgccaccgcca

SEQ ID NO: 439500 - RNA, 20 nt, Human
gccgccgccgccaccgccac

SEQ ID NO: 439501 - RNA, 23 nt, Human
gccgccgccgccaccgccgccgc

SEQ ID NO: 439502 - RNA, 26 nt, Human
gccgccgccgccacugccgucgccgc

SEQ ID NO: 439503 - RNA, 18 nt, Human
gccgccgccgccaugccc

SEQ ID NO: 439504 - RNA, 23 nt, Human
gccgccgccgcccaaccgccugc

SEQ ID NO: 439505 - RNA, 22 nt, Human
gccgccgccgcccaccgcccgc

SEQ ID NO: 439506 - RNA, 19 nt, Human
gccgccgccgcccccacca

SEQ ID NO: 439507 - RNA, 19 nt, Human
gccgccgccgcccccgcca

SEQ ID NO: 439508 - RNA, 20 nt, Human
gccgccgccgcccccgccac

SEQ ID NO: 439509 - RNA, 23 nt, Human
gccgccgccgcccccgccgccgc

SEQ ID NO: 439510 - RNA, 27 nt, Human
gccgccgccgccccggcucgccgccgc

SEQ ID NO: 439511 - RNA, 24 nt, Human
gccgccgccgcccgcagcaccgca

SEQ ID NO: 439512 - RNA, 21 nt, Human
gccgccgccgcccgccccgca

SEQ ID NO: 439513 - RNA, 19 nt, Human
gccgccgccgcccgcccgc

SEQ ID NO: 439514 - RNA, 19 nt, Human
gccgccgccgcccgcgaag

SEQ ID NO: 439515 - RNA, 26 nt, Human
gccgccgccgcccgcuccgccgccgc

SEQ ID NO: 439516 - RNA, 19 nt, Human
gccgccgccgcccugccgc

SEQ ID NO: 439517 - RNA, 32 nt, Human
gccgccgccgccgcaaccuccagcaccgccgc

SEQ ID NO: 439518 - RNA, 20 nt, Human
gccgccgccgccgccaccac

SEQ ID NO: 439519 - RNA, 20 nt, Human
gccgccgccgccgccaccgc

SEQ ID NO: 439520 - RNA, 22 nt, Human
gccgccgccgccgccaccgcca

SEQ ID NO: 439521 - RNA, 23 nt, Human
gccgccgccgccgccaccgccgc

SEQ ID NO: 439522 - RNA, 22 nt, Human
gccgccgccgccgccccggcac

SEQ ID NO: 439523 - RNA, 21 nt, Human
gccgccgccgccgcccgccgc

SEQ ID NO: 439524 - RNA, 24 nt, Human
gccgccgccgccgcccgccgccgc

SEQ ID NO: 439525 - RNA, 21 nt, Human
gccgccgccgccgcccgcggc

SEQ ID NO: 439526 - RNA, 29 nt, Human
gccgccgccgccgcccgcuccgccgccgc

SEQ ID NO: 439527 - RNA, 21 nt, Human
gccgccgccgccgcccggcau

SEQ ID NO: 439528 - RNA, 23 nt, Human
gccgccgccgccgccgcagccgc

SEQ ID NO: 439529 - RNA, 18 nt, Human
gccgccgccgccgccgcc

SEQ ID NO: 439530 - RNA, 19 nt, Human
gccgccgccgccgccgcca

SEQ ID NO: 439531 - RNA, 20 nt, Human
gccgccgccgccgccgccac

SEQ ID NO: 439532 - RNA, 20 nt, Human
gccgccgccgccgccgccau

SEQ ID NO: 439533 - RNA, 26 nt, Human
gccgccgccgccgccgcccccgccgc

SEQ ID NO: 439534 - RNA, 20 nt, Human
gccgccgccgccgccgccgc

SEQ ID NO: 439535 - RNA, 22 nt, Human
gccgccgccgccgccgccgcca

SEQ ID NO: 439536 - RNA, 23 nt, Human
gccgccgccgccgccgccgccac

SEQ ID NO: 439537 - RNA, 22 nt, Human
gccgccgccgccgccgccgccg

SEQ ID NO: 439538 - RNA, 23 nt, Human
gccgccgccgccgccgccgccgc

SEQ ID NO: 439539 - RNA, 23 nt, Human
gccgccgccgccgccgccgcugc

SEQ ID NO: 439540 - RNA, 24 nt, Human
gccgccgccgccgccgccggccgc

SEQ ID NO: 439541 - RNA, 22 nt, Human
gccgccgccgccgccgccgucg

SEQ ID NO: 439542 - RNA, 23 nt, Human
gccgccgccgccgccgccguggc

SEQ ID NO: 439543 - RNA, 20 nt, Human
gccgccgccgccgccgcgac

SEQ ID NO: 439544 - RNA, 20 nt, Human
gccgccgccgccgccgcggc

SEQ ID NO: 439545 - RNA, 20 nt, Human
gccgccgccgccgccgcugc

SEQ ID NO: 439546 - RNA, 23 nt, Human
gccgccgccgccgccgcugccgc

SEQ ID NO: 439547 - RNA, 20 nt, Human
gccgccgccgccgccgggcc

SEQ ID NO: 439548 - RNA, 32 nt, Human
gccgccgccgccgccucagccuucgccucagc

SEQ ID NO: 439549 - RNA, 32 nt, Human
gccgccgccgccgccuccgagccgggcagcaa

SEQ ID NO: 439550 - RNA, 20 nt, Human
gccgccgccgccgccuccgc

SEQ ID NO: 439551 - RNA, 23 nt, Human
gccgccgccgccgccuccgccgc

SEQ ID NO: 439552 - RNA, 32 nt, Human
gccgccgccgccgccucgcaacagguccgggc

SEQ ID NO: 439553 - RNA, 32 nt, Human
gccgccgccgccgccucggccgaccagggacc

SEQ ID NO: 439554 - RNA, 23 nt, Human
gccgccgccgccgccucugccgc

SEQ ID NO: 439555 - RNA, 21 nt, Human
gccgccgccgccgccugucac

SEQ ID NO: 439556 - RNA, 19 nt, Human
gccgccgccgccgcgccgc

SEQ ID NO: 439557 - RNA, 21 nt, Human
gccgccgccgccgcuccgcca

SEQ ID NO: 439558 - RNA, 25 nt, Human
gccgccgccgccgcuccucugccac

SEQ ID NO: 439559 - RNA, 20 nt, Human
gccgccgccgccgcugccac

SEQ ID NO: 439560 - RNA, 20 nt, Human
gccgccgccgccuccgagcc

SEQ ID NO: 439561 - RNA, 21 nt, Human
gccgccgccgcgagccgccgc

SEQ ID NO: 439562 - RNA, 17 nt, Human
gccgccgccgcgcagcc

SEQ ID NO: 439563 - RNA, 19 nt, Human
gccgccgccgcgcagcccc

SEQ ID NO: 439564 - RNA, 21 nt, Human
gccgccgccgcgcccgccuca

SEQ ID NO: 439565 - RNA, 20 nt, Human
gccgccgccgcggagccuca

SEQ ID NO: 439566 - RNA, 20 nt, Human
gccgccgccgcggcgcccgc

SEQ ID NO: 439567 - RNA, 20 nt, Human
gccgccgccgcgggaccugc

SEQ ID NO: 439568 - RNA, 25 nt, Human
gccgccgccgcugccaccgccuaca

SEQ ID NO: 439569 - RNA, 23 nt, Human
gccgccgccgcugucgccgccac

SEQ ID NO: 439570 - RNA, 32 nt, Human
gccgccgccgcugucgccgccaccuccucuga

SEQ ID NO: 439571 - RNA, 22 nt, Human
gccgccgccggagccgcgcgca

SEQ ID NO: 439572 - RNA, 21 nt, Human
gccgccgccggagccugucgc

SEQ ID NO: 439573 - RNA, 20 nt, Human
gccgccgccggagcucugua

SEQ ID NO: 439574 - RNA, 21 nt, Human
gccgccgccggcagaccccgc

SEQ ID NO: 439575 - RNA, 22 nt, Human
gccgccgccggcccccggcgcc

SEQ ID NO: 439576 - RNA, 20 nt, Human
gccgccgccggcccgcagcc

SEQ ID NO: 439577 - RNA, 23 nt, Human
gccgccgccggcccgcggagccc

SEQ ID NO: 439578 - RNA, 22 nt, Human
gccgccgccggccgcggcugca

SEQ ID NO: 439579 - RNA, 24 nt, Human
gccgccgccggcucggggagccca

SEQ ID NO: 439580 - RNA, 19 nt, Human
gccgccgccgggccgccgc

SEQ ID NO: 439581 - RNA, 22 nt, Human
gccgccgccggggcccaaugcc

SEQ ID NO: 439582 - RNA, 22 nt, Human
gccgccgccggggcucuuggca

SEQ ID NO: 439583 - RNA, 21 nt, Human
gccgccgccggggcuguaggc

SEQ ID NO: 439584 - RNA, 21 nt, Human
gccgccgccgggggaguccgc

SEQ ID NO: 439585 - RNA, 22 nt, Human
gccgccgccggguugugccuca

SEQ ID NO: 439586 - RNA, 22 nt, Human
gccgccgccguuuucgccugca

SEQ ID NO: 439587 - RNA, 22 nt, Human
gccgccgccuccaccaccacca

SEQ ID NO: 439588 - RNA, 24 nt, Human
gccgccgccucccgcacgcuugca

SEQ ID NO: 439589 - RNA, 31 nt, Human
gccgccgccuccucugggccucgucuccccu

SEQ ID NO: 439590 - RNA, 20 nt, Human
gccgccgccucgcacccgca

SEQ ID NO: 439591 - RNA, 32 nt, Human
gccgccgccucuccagcucacccucacucagc

SEQ ID NO: 439592 - RNA, 18 nt, Human
gccgccgcgaguccagcu

SEQ ID NO: 439593 - RNA, 20 nt, Human
gccgccgcgcagccccucca

SEQ ID NO: 439594 - RNA, 25 nt, Human
gccgccgcgcucgucccuccgggcc

SEQ ID NO: 439595 - RNA, 32 nt, Human
gccgccgcgcugcugggggcugggcaggggca

SEQ ID NO: 439596 - RNA, 32 nt, Human
gccgccgcggacuccggcagcuuuaucgccag

SEQ ID NO: 439597 - RNA, 26 nt, Human
gccgccgcggacuucgcuuugggcca

SEQ ID NO: 439598 - RNA, 18 nt, Human
gccgccgcggccaggccc

SEQ ID NO: 439599 - RNA, 32 nt, Human
gccgccgcggccgccucggggucugggcccag

SEQ ID NO: 439600 - RNA, 32 nt, Human
gccgccgcggcuucagcaccagcgcccggaca

SEQ ID NO: 439601 - RNA, 32 nt, Human
gccgccgcgggaggaggaggagccggagccuc

SEQ ID NO: 439602 - RNA, 23 nt, Human
gccgccgcuaccgccaccgccac

SEQ ID NO: 439603 - RNA, 24 nt, Human
gccgccgcuccgccggcccugggc

SEQ ID NO: 439604 - RNA, 25 nt, Human
gccgccgcucgcucgcucgccggcc

SEQ ID NO: 439605 - RNA, 23 nt, Human
gccgccgcucgggcgccgggcuc

SEQ ID NO: 439606 - RNA, 20 nt, Human
gccgccgcugccgacgccac

SEQ ID NO: 439607 - RNA, 20 nt, Human
gccgccgcugccgccgccac

SEQ ID NO: 439608 - RNA, 20 nt, Human
gccgccgcugccgccgccgc

SEQ ID NO: 439609 - RNA, 26 nt, Human
gccgccgcugccgucgccgccgagcc

SEQ ID NO: 439610 - RNA, 32 nt, Human
gccgccgcugccucugggcccucccagcacac

SEQ ID NO: 439611 - RNA, 32 nt, Human
gccgccgcugcgguggaacagcgcagccgcuu

SEQ ID NO: 439612 - RNA, 20 nt, Human
gccgccgcugcuaccgccac

SEQ ID NO: 439613 - RNA, 32 nt, Human
gccgccgcugcuccuccgccuggccugggccg

SEQ ID NO: 439614 - RNA, 32 nt, Human
gccgccgcugcuggcgccgcaggcuggccccc

SEQ ID NO: 439615 - RNA, 25 nt, Human
gccgccgcugugcucacugauccgc

SEQ ID NO: 439616 - RNA, 32 nt, Human
gccgccggcaugagccacauccagaucccgcc

SEQ ID NO: 439617 - RNA, 22 nt, Human
gccgccggccucccgcacccgc

SEQ ID NO: 439618 - RNA, 21 nt, Human
gccgccggcgcccuuccccgu

SEQ ID NO: 439619 - RNA, 21 nt, Human
gccgccggcgcucaaccacgc

SEQ ID NO: 439620 - RNA, 21 nt, Human
gccgccggcggcccaacccgu

SEQ ID NO: 439621 - RNA, 32 nt, Human
gccgccggcuagcagauucagaccaugccgcu

SEQ ID NO: 439622 - RNA, 19 nt, Human
gccgccgggaccccggccu

SEQ ID NO: 439623 - RNA, 32 nt, Human
gccgccgggauuacaggcgugagccaccaugc

SEQ ID NO: 439624 - RNA, 20 nt, Human
gccgccgggccagccgccac

SEQ ID NO: 439625 - RNA, 32 nt, Human
gccgccggggaagaggaggaggaaggaaagaa

SEQ ID NO: 439626 - RNA, 32 nt, Human
gccgccggucaccgccggccaggcccccugca

SEQ ID NO: 439627 - RNA, 24 nt, Human
gccgccgguccacacccgccccgc

SEQ ID NO: 439628 - RNA, 32 nt, Human
gccgccgguggaggugcccgggcaggugcaga

SEQ ID NO: 439629 - RNA, 20 nt, Human
gccgccgucgccaccgccac

SEQ ID NO: 439630 - RNA, 20 nt, Human
gccgccgucgccgccgccgc

SEQ ID NO: 439631 - RNA, 23 nt, Human
gccgccgucggugucgccgccac

SEQ ID NO: 439632 - RNA, 32 nt, Human
gccgccgucuucuucaccuguucucgggaagg

SEQ ID NO: 439633 - RNA, 31 nt, Human
gccgccgugcccucugggcgguugugaggcu

SEQ ID NO: 439634 - RNA, 32 nt, Human
gccgccguggaguaacacagccagcaguuucc

SEQ ID NO: 439635 - RNA, 32 nt, Human
gccgccgugggugaccugcagagacuuccugc

SEQ ID NO: 439636 - RNA, 32 nt, Human
gccgccguuacccgcucaccagcuacgcggcg

SEQ ID NO: 439637 - RNA, 25 nt, Human
gccgccguucuccuguccucgggcu

SEQ ID NO: 439638 - RNA, 32 nt, Human
gccgccuaagacauugugccacccucaauccg

SEQ ID NO: 439639 - RNA, 32 nt, Human
gccgccuacuccugcaaaugcuugugacagau

SEQ ID NO: 439640 - RNA, 32 nt, Human
gccgccuagaagcagaagcgcaggccagcgag

SEQ ID NO: 439641 - RNA, 32 nt, Human
gccgccucaaccucuccuggguucaggugauc

SEQ ID NO: 439642 - RNA, 23 nt, Human
gccgccucagccgccgccgccgc

SEQ ID NO: 439643 - RNA, 32 nt, Human
gccgccucagccgccucagucgccucaaucuc

SEQ ID NO: 439644 - RNA, 32 nt, Human
gccgccuccaagccccugagguuuccggggac

SEQ ID NO: 439645 - RNA, 20 nt, Human
gccgccuccacgcugugcuc

SEQ ID NO: 439646 - RNA, 32 nt, Human
gccgccuccagccucuccccucuggcaggcgc

SEQ ID NO: 439647 - RNA, 32 nt, Human
gccgccuccagguacagccacagccaggagca

SEQ ID NO: 439648 - RNA, 32 nt, Human
gccgccuccccgaacccagcugccgucaacac

SEQ ID NO: 439649 - RNA, 32 nt, Human
gccgccucccgcccccaaaccccauccccgcg

SEQ ID NO: 439650 - RNA, 23 nt, Human
gccgccucccugcagggccccug

SEQ ID NO: 439651 - RNA, 23 nt, Human
gccgccucccugccaagaaucug

SEQ ID NO: 439652 - RNA, 32 nt, Human
gccgccucccuggagcucugcccagcugucag

SEQ ID NO: 439653 - RNA, 32 nt, Human
gccgccuccgccuucggcgccugcugccuccc

SEQ ID NO: 439654 - RNA, 32 nt, Human
gccgccuccuacggccgacucuggguucccuu

SEQ ID NO: 439655 - RNA, 32 nt, Human
gccgccucgaaucaaccucucuccccaggcau

SEQ ID NO: 439656 - RNA, 24 nt, Human
gccgccucgccugccgccgcgcuc

SEQ ID NO: 439657 - RNA, 32 nt, Human
gccgccucucccggggacaaugugggacugag

SEQ ID NO: 439658 - RNA, 32 nt, Human
gccgccucuccuccucucccgcccgccgccug

SEQ ID NO: 439659 - RNA, 32 nt, Human
gccgccucugacgaggaggagguggaggagga

SEQ ID NO: 439660 - RNA, 32 nt, Human
gccgccucuggacuaucuccccagaccagcag

SEQ ID NO: 439661 - RNA, 32 nt, Human
gccgccucuguggaacccaggcaucaccaagg

SEQ ID NO: 439662 - RNA, 32 nt, Human
gccgccugacgaaauggaaacacacacagaca

SEQ ID NO: 439663 - RNA, 32 nt, Human
gccgccugauuaaauaaugugcugcuaaauau

SEQ ID NO: 439664 - RNA, 32 nt, Human
gccgccugcagucuccucucugggugauugcg

SEQ ID NO: 439665 - RNA, 32 nt, Human
gccgccugcccgggcauccugcucuggcaagc

SEQ ID NO: 439666 - RNA, 21 nt, Human
gccgccugccgccgccgccgc

SEQ ID NO: 439667 - RNA, 21 nt, Human
gccgccugccuuggccuccca

SEQ ID NO: 439668 - RNA, 32 nt, Human
gccgccugcgcgggggagcccagcacagaccg

SEQ ID NO: 439669 - RNA, 29 nt, Human
gccgccuggcugcugccgcugccuccucc

SEQ ID NO: 439670 - RNA, 32 nt, Human
gccgccuggcugcugccgcugccuccuccugg

SEQ ID NO: 439671 - RNA, 21 nt, Human
gccgccugguugccugggcca

SEQ ID NO: 439672 - RNA, 32 nt, Human
gccgccuguagucccagcuacucaggaggcuu

SEQ ID NO: 439673 - RNA, 32 nt, Human
gccgccuguagucccagcuacucgggaggcug

SEQ ID NO: 439674 - RNA, 32 nt, Human
gccgccugugggaacagcuauucucugcacau

SEQ ID NO: 439675 - RNA, 32 nt, Human
gccgccuucagccacguguccucgcuuauaga

SEQ ID NO: 439676 - RNA, 32 nt, Human
gccgccuuccagcucugagucuugggaauguu

SEQ ID NO: 439677 - RNA, 32 nt, Human
gccgccuuccccaucacggaggguccagacug

SEQ ID NO: 439678 - RNA, 32 nt, Human
gccgccuucccccaucucuuccucguccuccu

SEQ ID NO: 439679 - RNA, 16 nt, Human
gccgccuucugcuguc

SEQ ID NO: 439680 - RNA, 32 nt, Human
gccgccuugcugcugcucaaagcugcugccgc

SEQ ID NO: 439681 - RNA, 32 nt, Human
gccgccuuggguaguugaccugccuuuucuga

SEQ ID NO: 439682 - RNA, 32 nt, Human
gccgccuugucgccugcgccccggcugggcuc

SEQ ID NO: 439683 - RNA, 32 nt, Human
gccgcgaagccaugggcagacaggaaguggag

SEQ ID NO: 439684 - RNA, 32 nt, Human
gccgcgaaucucuccagggaaucccgggcagc

SEQ ID NO: 439685 - RNA, 32 nt, Human
gccgcgacucucugcuucucuccagcucucaa

SEQ ID NO: 439686 - RNA, 32 nt, Human
gccgcgacuucuggaucugccuccgagcucag

SEQ ID NO: 439687 - RNA, 25 nt, Human
gccgcgagacccaggccgcccacgg

SEQ ID NO: 439688 - RNA, 32 nt, Human
gccgcgagagucaggaaguuccagaaaguucc

SEQ ID NO: 439689 - RNA, 17 nt, Human
gccgcgaguuccaccuc

SEQ ID NO: 439690 - RNA, 32 nt, Human
gccgcgaucgccgccuccccgccucaggcucc

SEQ ID NO: 439691 - RNA, 32 nt, Human
gccgcgcaaauuuaugguuagauuugucucaa

SEQ ID NO: 439692 - RNA, 19 nt, Human
gccgcgcaccggggcucgg

SEQ ID NO: 439693 - RNA, 32 nt, Human
gccgcgcagagcccgggacaauggggccgcgg

SEQ ID NO: 439694 - RNA, 32 nt, Human
gccgcgcagcagcagcggaagccagaccucgg

SEQ ID NO: 439695 - RNA, 21 nt, Human
gccgcgcagccccggccgcca

SEQ ID NO: 439696 - RNA, 32 nt, Human
gccgcgcaggguggagcguuggaaaaugagaa

SEQ ID NO: 439697 - RNA, 32 nt, Human
gccgcgccaccugcgccucgcccgccgccgcc

SEQ ID NO: 439698 - RNA, 32 nt, Human
gccgcgcccaggaguuggggauguccuacaaa

SEQ ID NO: 439699 - RNA, 32 nt, Human
gccgcgcccccucccccuccagccggguaccc

SEQ ID NO: 439700 - RNA, 21 nt, Human
gccgcgcccgcuccgcuccga

SEQ ID NO: 439701 - RNA, 32 nt, Human
gccgcgcccguggaagugcugcauggggcagg

SEQ ID NO: 439702 - RNA, 19 nt, Human
gccgcgcccuccccgggga

SEQ ID NO: 439703 - RNA, 32 nt, Human
gccgcgcccugagaccguuuaucugcagucaa

SEQ ID NO: 439704 - RNA, 32 nt, Human
gccgcgcccugagcgccuuugucugccgcccg

SEQ ID NO: 439705 - RNA, 20 nt, Human
gccgcgccgcccgcagcccc

SEQ ID NO: 439706 - RNA, 19 nt, Human
gccgcgccgccgccgccac

SEQ ID NO: 439707 - RNA, 32 nt, Human
gccgcgccgcgcccgagccucuugccuucgcg

SEQ ID NO: 439708 - RNA, 20 nt, Human
gccgcgccgcgcugcgcucc

SEQ ID NO: 439709 - RNA, 32 nt, Human
gccgcgccgcugccucugccccggccgccccc

SEQ ID NO: 439710 - RNA, 32 nt, Human
gccgcgccuccuccuccuccugcuccccgccg

SEQ ID NO: 439711 - RNA, 23 nt, Human
gccgcgccuccugcaagccggga

SEQ ID NO: 439712 - RNA, 32 nt, Human
gccgcgcgaccaaugguggaggcugcagccug

SEQ ID NO: 439713 - RNA, 32 nt, Human
gccgcgcgaggguggugggcaucgagguccca

SEQ ID NO: 439714 - RNA, 24 nt, Human
gccgcgcggacuccugccccgagg

SEQ ID NO: 439715 - RNA, 32 nt, Human
gccgcgcgggagagaggccgagauggcagaug

SEQ ID NO: 439716 - RNA, 32 nt, Human
gccgcgcgucccagagagccagccccggccgc

SEQ ID NO: 439717 - RNA, 32 nt, Human
gccgcgcguuccucccagaggggcgucccggc

SEQ ID NO: 439718 - RNA, 20 nt, Human
gccgcgcucccgcccaggga

SEQ ID NO: 439719 - RNA, 25 nt, Human
gccgcgcucccgcucgccccgaccc

SEQ ID NO: 439720 - RNA, 32 nt, Human
gccgcgcuccucggacggcuccggacgcugcu

SEQ ID NO: 439721 - RNA, 23 nt, Human
gccgcgcugccugcagugcgcuc

SEQ ID NO: 439722 - RNA, 17 nt, Human
gccgcgcuguccaggug

SEQ ID NO: 439723 - RNA, 32 nt, Human
gccgcgcuugggaggccaagcuuuaaacaucu

SEQ ID NO: 439724 - RNA, 32 nt, Human
gccgcggaaagaaugcgcgccgcccgugcgcu

SEQ ID NO: 439725 - RNA, 32 nt, Human
gccgcggaacaguugcgucuccaucuggcuac

SEQ ID NO: 439726 - RNA, 32 nt, Human
gccgcggacgagaagaaaagacaggaggccaa

SEQ ID NO: 439727 - RNA, 32 nt, Human
gccgcggacgcaccugggacccugcacagccc

SEQ ID NO: 439728 - RNA, 32 nt, Human
gccgcggacggggcccggagcuugccugccuc

SEQ ID NO: 439729 - RNA, 32 nt, Human
gccgcggaggaagacagcgccgcccgcgcacc

SEQ ID NO: 439730 - RNA, 32 nt, Human
gccgcggaggcagcggcggcagcggcucuccu

SEQ ID NO: 439731 - RNA, 32 nt, Human
gccgcggaucccggccaaggcggaggcugcgg

SEQ ID NO: 439732 - RNA, 32 nt, Human
gccgcggcaaggauggagcuggguugcuggac

SEQ ID NO: 439733 - RNA, 32 nt, Human
gccgcggcagagccagcacagccagcgcgcca

SEQ ID NO: 439734 - RNA, 32 nt, Human
gccgcggccaaagagcuggcuguaaucccgcc

SEQ ID NO: 439735 - RNA, 23 nt, Human
gccgcggccaacagcggcagcaa

SEQ ID NO: 439736 - RNA, 28 nt, Human
gccgcggccacaggucugcauccagcgg

SEQ ID NO: 439737 - RNA, 32 nt, Human
gccgcggccauggagaagcuuagcuccaucaa

SEQ ID NO: 439738 - RNA, 20 nt, Human
gccgcggccgagcagccagc

SEQ ID NO: 439739 - RNA, 32 nt, Human
gccgcggcucgggacguguccagugaucauaa

SEQ ID NO: 439740 - RNA, 32 nt, Human
gccgcggcucugcggagaaaccacgaccaccg

SEQ ID NO: 439741 - RNA, 32 nt, Human
gccgcggcugcacucccaagauggcggcuccu

SEQ ID NO: 439742 - RNA, 32 nt, Human
gccgcgggacccugggcugagcaccgacccag

SEQ ID NO: 439743 - RNA, 32 nt, Human
gccgcgggaggaggaggagccggagccucugc

SEQ ID NO: 439744 - RNA, 32 nt, Human
gccgcgggagggaggccaggaggcccggacca

SEQ ID NO: 439745 - RNA, 19 nt, Human
gccgcgggcacggcugcug

SEQ ID NO: 439746 - RNA, 32 nt, Human
gccgcggggcaggggugcaguggguguuacca

SEQ ID NO: 439747 - RNA, 32 nt, Human
gccgcggggcguccgggucugagccgcagcaa

SEQ ID NO: 439748 - RNA, 32 nt, Human
gccgcggguggaggucggggaugaggcagcag

SEQ ID NO: 439749 - RNA, 32 nt, Human
gccgcggucagcugcccccgagacugugccug

SEQ ID NO: 439750 - RNA, 32 nt, Human
gccgcguaucccccggcuaccugggccgcccc

SEQ ID NO: 439751 - RNA, 27 nt, Human
gccgcguccggcgcugcugcugcgcuc

SEQ ID NO: 439752 - RNA, 32 nt, Human
gccgcgucuccgcuucugcugccugccgggcg

SEQ ID NO: 439753 - RNA, 32 nt, Human
gccgcgugagccugcggggccauggagcgcgc

SEQ ID NO: 439754 - RNA, 32 nt, Human
gccgcgugccuguaaucccagcuacuugggag

SEQ ID NO: 439755 - RNA, 32 nt, Human
gccgcguggcuccgcccugccggcgucugggg

SEQ ID NO: 439756 - RNA, 32 nt, Human
gccgcguuguccaucacuaggacuuuacugcc

SEQ ID NO: 439757 - RNA, 32 nt, Human
gccgcuaacgcccagacgcauggaugcacccc

SEQ ID NO: 439758 - RNA, 32 nt, Human
gccgcuacagaaguccuuacugcggaccaaaa

SEQ ID NO: 439759 - RNA, 32 nt, Human
gccgcuacuagacugcccccggacccugcgau

SEQ ID NO: 439760 - RNA, 32 nt, Human
gccgcuacuuccccaccaaccacaugguacag

SEQ ID NO: 439761 - RNA, 32 nt, Human
gccgcuagaggccugaggaugagcuggaagga

SEQ ID NO: 439762 - RNA, 32 nt, Human
gccgcuauugcucuuuuuaacuucauuugaug

SEQ ID NO: 439763 - RNA, 17 nt, Human
gccgcucaacauccugc

SEQ ID NO: 439764 - RNA, 32 nt, Human
gccgcucagcgccccggcugggcggaggagga

SEQ ID NO: 439765 - RNA, 32 nt, Human
gccgcucaggugucccgagacuccgggcaagg

SEQ ID NO: 439766 - RNA, 27 nt, Human
gccgcucauagagcuugcccuggguca

SEQ ID NO: 439767 - RNA, 16 nt, Human
gccgcucccccggagc

SEQ ID NO: 439768 - RNA, 19 nt, Human
gccgcuccgccgccgccgc

SEQ ID NO: 439769 - RNA, 32 nt, Human
gccgcuccgcuccccugcuccugucugucucg

SEQ ID NO: 439770 - RNA, 32 nt, Human
gccgcuccuccccucuccccacccuccuccuc

SEQ ID NO: 439771 - RNA, 32 nt, Human
gccgcuccucccuugcccucaggccagguccc

SEQ ID NO: 439772 - RNA, 32 nt, Human
gccgcuccugccggcagcuccaaccaugggag

SEQ ID NO: 439773 - RNA, 32 nt, Human
gccgcucgcccaggauggagaggcggguccca

SEQ ID NO: 439774 - RNA, 32 nt, Human
gccgcucgcugccucucgcucgcagcagcggc

SEQ ID NO: 439775 - RNA, 22 nt, Human
gccgcucggccccgccgcgcuc

SEQ ID NO: 439776 - RNA, 32 nt, Human
gccgcucgggacgacuuccucggcugcgcggc

SEQ ID NO: 439777 - RNA, 17 nt, Human
gccgcucggggccgcag

SEQ ID NO: 439778 - RNA, 32 nt, Human
gccgcucucucucacuuuuucuggaacucaug

SEQ ID NO: 439779 - RNA, 18 nt, Human
gccgcucugucuucucuc

SEQ ID NO: 439780 - RNA, 32 nt, Human
gccgcugacgauggaagaacuggagcaaggcc

SEQ ID NO: 439781 - RNA, 32 nt, Human
gccgcugacugccagcuccagccuggccccgg

SEQ ID NO: 439782 - RNA, 32 nt, Human
gccgcugcacacacgcacacggagccaugggg

SEQ ID NO: 439783 - RNA, 32 nt, Human
gccgcugcaccaccacccgagccugggagcca

SEQ ID NO: 439784 - RNA, 32 nt, Human
gccgcugcacgucagcccgcaggccaaggguc

SEQ ID NO: 439785 - RNA, 32 nt, Human
gccgcugcacuccagccugggugacagaguga

SEQ ID NO: 439786 - RNA, 32 nt, Human
gccgcugcagccgccuccuccuccaggcaaac

SEQ ID NO: 439787 - RNA, 32 nt, Human
gccgcugcagccgccuccuccuccaggugcug

SEQ ID NO: 439788 - RNA, 22 nt, Human
gccgcugcagguccccgcuccc

SEQ ID NO: 439789 - RNA, 32 nt, Human
gccgcugcauuccagccugggugacagagcga

SEQ ID NO: 439790 - RNA, 32 nt, Human
gccgcugccaccaucuccucugugccaacucc

SEQ ID NO: 439791 - RNA, 18 nt, Human
gccgcugccagcugccca

SEQ ID NO: 439792 - RNA, 32 nt, Human
gccgcugcccaaccgccagccccagccccgcg

SEQ ID NO: 439793 - RNA, 20 nt, Human
gccgcugccgccgccgccac

SEQ ID NO: 439794 - RNA, 32 nt, Human
gccgcugccgccucagcugcuuuggcccagcc

SEQ ID NO: 439795 - RNA, 32 nt, Human
gccgcugccuccgcgccauggccggccucagc

SEQ ID NO: 439796 - RNA, 32 nt, Human
gccgcugccuucacugaaggcugcagugcugu

SEQ ID NO: 439797 - RNA, 32 nt, Human
gccgcugcgaagggagccgccgccaugucugc

SEQ ID NO: 439798 - RNA, 20 nt, Human
gccgcugcgcugucccggcc

SEQ ID NO: 439799 - RNA, 32 nt, Human
gccgcugcucuucccuucuccucaggaggggg

SEQ ID NO: 439800 - RNA, 32 nt, Human
gccgcugcugcagcagcagcugcucugcagag

SEQ ID NO: 439801 - RNA, 23 nt, Human
gccgcugcugccccgccuugcag

SEQ ID NO: 439802 - RNA, 19 nt, Human
gccgcugcugccggggcuc

SEQ ID NO: 439803 - RNA, 21 nt, Human
gccgcugcugcucuguggcca

SEQ ID NO: 439804 - RNA, 32 nt, Human
gccgcugcugggauggggcucggggccuggga

SEQ ID NO: 439805 - RNA, 30 nt, Human
gccgcuggaagccaccgggccaagggagcu

SEQ ID NO: 439806 - RNA, 32 nt, Human
gccgcuggcgcgccaugaggaaggcgccacgc

SEQ ID NO: 439807 - RNA, 32 nt, Human
gccgcuggcugcagacuggagcugcgcggguc

SEQ ID NO: 439808 - RNA, 21 nt, Human
gccgcugggcgcuccgcgcuc

SEQ ID NO: 439809 - RNA, 22 nt, Human
gccgcuggggccaguugguccc

SEQ ID NO: 439810 - RNA, 22 nt, Human
gccgcugggguccgucuucaca

SEQ ID NO: 439811 - RNA, 32 nt, Human
gccgcugguacccgcccgguaccgcgcgagcc

SEQ ID NO: 439812 - RNA, 32 nt, Human
gccgcuggucccccaccaggcuugggagcccu

SEQ ID NO: 439813 - RNA, 32 nt, Human
gccgcuguacucccugagcuuccccaccccaa

SEQ ID NO: 439814 - RNA, 32 nt, Human
gccgcuguccccaccacugcagccaugaucuc

SEQ ID NO: 439815 - RNA, 32 nt, Human
gccgcuguccuccgggagcggcagcaguagcc

SEQ ID NO: 439816 - RNA, 32 nt, Human
gccgcugugauugccucuaaggaacagcauuc

SEQ ID NO: 439817 - RNA, 32 nt, Human
gccgcuguucaugucuggacuccugggggcgc

SEQ ID NO: 439818 - RNA, 32 nt, Human
gccgcuguuggggauaugguuucuugaagcau

SEQ ID NO: 439819 - RNA, 32 nt, Human
gccgcuuagcagagaagaaagggccugggagg

SEQ ID NO: 439820 - RNA, 32 nt, Human
gccgcuucaucccagacucucuucuagggcuu

SEQ ID NO: 439821 - RNA, 32 nt, Human
gccgcuucccgcaggcaucugagcucugugcc

SEQ ID NO: 439822 - RNA, 32 nt, Human
gccgcuuccugccuccuuccucugugggagca

SEQ ID NO: 439823 - RNA, 32 nt, Human
gccgcuuccugggcuagagacaagcaccagcc

SEQ ID NO: 439824 - RNA, 22 nt, Human
gccgcuucgcgcuguuugcugc

SEQ ID NO: 439825 - RNA, 32 nt, Human
gccgcuucgcgcuguuugcugcgcgggcuuuu

SEQ ID NO: 439826 - RNA, 32 nt, Human
gccgcuucucaaacugggucucagaaaauuuc

SEQ ID NO: 439827 - RNA, 18 nt, Human
gccgcuucuccccacaga

SEQ ID NO: 439828 - RNA, 32 nt, Human
gccgcuucuccccagggucucucaguuuucca

SEQ ID NO: 439829 - RNA, 32 nt, Human
gccgcuucugaccucgcucuggcuccggugcg

SEQ ID NO: 439830 - RNA, 32 nt, Human
gccgcuucugacugcugauucucccguucacg

SEQ ID NO: 439831 - RNA, 32 nt, Human
gccgcuugaacuuggagccacuuugaguuggg

SEQ ID NO: 439832 - RNA, 32 nt, Human
gccgcuugaaugcagcaugcacauucauguaa

SEQ ID NO: 439833 - RNA, 21 nt, Human
gccgcuugcccagccuugagg

SEQ ID NO: 439834 - RNA, 20 nt, Human
gccgcuugcggguuugucgc

SEQ ID NO: 439835 - RNA, 32 nt, Human
gccgcuugcugcagaggauccaguccagaucc

SEQ ID NO: 439836 - RNA, 32 nt, Human
gccgcuuucccccuucaagaugccauuuggag

SEQ ID NO: 439837 - RNA, 32 nt, Human
gccgcuuucucaucagugcccagugcuggguc

SEQ ID NO: 439838 - RNA, 32 nt, Human
gccgcuuugccucugcuucgcccugugcugug

SEQ ID NO: 439839 - RNA, 32 nt, Human
gccgcuuuguucuucgcuucucggcucgaggc

SEQ ID NO: 439840 - RNA, 32 nt, Human
gccggaaagaaaaugcugaccauuggaggugc

SEQ ID NO: 439841 - RNA, 32 nt, Human
gccggaaagaagagaagccugcagaagaacau

SEQ ID NO: 439842 - RNA, 21 nt, Human
gccggaaagacuccccagcaa

SEQ ID NO: 439843 - RNA, 32 nt, Human
gccggaaagaggagcggcaggagggggcgugg

SEQ ID NO: 439844 - RNA, 32 nt, Human
gccggaaagcauuugucucccaccucaucaua

SEQ ID NO: 439845 - RNA, 32 nt, Human
gccggaaccccaguuacccggugaggacgugg

SEQ ID NO: 439846 - RNA, 32 nt, Human
gccggaacgggaggggacuggagggcugcggg

SEQ ID NO: 439847 - RNA, 32 nt, Human
gccggaagcaacucccagccccauaaagaucu

SEQ ID NO: 439848 - RNA, 32 nt, Human
gccggaagccauggcacacuaccccacaaggc

SEQ ID NO: 439849 - RNA, 21 nt, Human
gccggaagcgacuuuccgccg

SEQ ID NO: 439850 - RNA, 22 nt, Human
gccggaagugauccuucccucc

SEQ ID NO: 439851 - RNA, 25 nt, Human
gccggaaucagagccgcgggugaga

SEQ ID NO: 439852 - RNA, 32 nt, Human
gccggacacucucaucagggcccagcagcaac

SEQ ID NO: 439853 - RNA, 32 nt, Human
gccggacaggcgcgcaccgagcgcacucucua

SEQ ID NO: 439854 - RNA, 22 nt, Human
gccggaccaccggccgcagccu

SEQ ID NO: 439855 - RNA, 32 nt, Human
gccggaccccgcccaggcagggagcugcugug

SEQ ID NO: 439856 - RNA, 32 nt, Human
gccggacccucagggcccugaaccgucgcucu

SEQ ID NO: 439857 - RNA, 32 nt, Human
gccggacccuggggccucccaccccagccucc

SEQ ID NO: 439858 - RNA, 32 nt, Human
gccggaccgagugcccugcaguugguaggagu

SEQ ID NO: 439859 - RNA, 20 nt, Human
gccggaccucuuccuuucca

SEQ ID NO: 439860 - RNA, 32 nt, Human
gccggacgcagcagcccucuggcuccagcaug

SEQ ID NO: 439861 - RNA, 32 nt, Human
gccggacgccccuccccuaucuugccgcccgc

SEQ ID NO: 439862 - RNA, 19 nt, Human
gccggacggaguccuuucc

SEQ ID NO: 439863 - RNA, 32 nt, Human
gccggacgggagguggcggagguggcggcgga

SEQ ID NO: 439864 - RNA, 32 nt, Human
gccggacguagcuuucuccuccuggugucauu

SEQ ID NO: 439865 - RNA, 32 nt, Human
gccggacucauuuuccuaaucuuagccacuua

SEQ ID NO: 439866 - RNA, 32 nt, Human
gccggacucuauggggcgggacccugggggag

SEQ ID NO: 439867 - RNA, 21 nt, Human
gccggacugcugccauugccu

SEQ ID NO: 439868 - RNA, 19 nt, Human
gccggacuggcagagccag

SEQ ID NO: 439869 - RNA, 32 nt, Human
gccggacuuacccuuuaaauuauucagaagga

SEQ ID NO: 439870 - RNA, 26 nt, Human
gccggagaaaagggugucggggccac

SEQ ID NO: 439871 - RNA, 32 nt, Human
gccggagaaggcccgugaccagccagaagcac

SEQ ID NO: 439872 - RNA, 19 nt, Human
gccggagaaucgcuugaac

SEQ ID NO: 439873 - RNA, 32 nt, Human
gccggagacagugauugaaaacauuugaaaag

SEQ ID NO: 439874 - RNA, 18 nt, Human
gccggagagacaauggag

SEQ ID NO: 439875 - RNA, 32 nt, Human
gccggagagagcugggugccugccugggaugc

SEQ ID NO: 439876 - RNA, 32 nt, Human
gccggagagauggugggggcagcuccucuucu

SEQ ID NO: 439877 - RNA, 32 nt, Human
gccggagagccccaggcccgagccacgcgguc

SEQ ID NO: 439878 - RNA, 32 nt, Human
gccggagaguugggcucagugcggagcucggc

SEQ ID NO: 439879 - RNA, 32 nt, Human
gccggagcaggccgcaggggaggcaggggaug

SEQ ID NO: 439880 - RNA, 32 nt, Human
gccggagcccaguucuggagagggacaaggag

SEQ ID NO: 439881 - RNA, 32 nt, Human
gccggagccccagcugcagcagcugagaccgc

SEQ ID NO: 439882 - RNA, 32 nt, Human
gccggagcccgggauggggcgagaggcugcgg

SEQ ID NO: 439883 - RNA, 32 nt, Human
gccggagcccuugccagaucucccucccucuc

SEQ ID NO: 439884 - RNA, 32 nt, Human
gccggagcccuugggugaaauuguuaggcgug

SEQ ID NO: 439885 - RNA, 32 nt, Human
gccggagcgggcugggcugggcccgggauggc

SEQ ID NO: 439886 - RNA, 21 nt, Human
gccggagcgucgcggcggaga

SEQ ID NO: 439887 - RNA, 32 nt, Human
gccggaggaaaaagcucgccacccugaagggu

SEQ ID NO: 439888 - RNA, 22 nt, Human
gccggaggacccccacuugaga

SEQ ID NO: 439889 - RNA, 32 nt, Human
gccggaggaggaggaggaggaggaggcaaagu

SEQ ID NO: 439890 - RNA, 32 nt, Human
gccggaggaggcggagguggcgcggcaggagg

SEQ ID NO: 439891 - RNA, 32 nt, Human
gccggaggcaggcaaagaaacaagugaagaaa

SEQ ID NO: 439892 - RNA, 32 nt, Human
gccggaggcuaguggguggcugacccccagca

SEQ ID NO: 439893 - RNA, 32 nt, Human
gccggaggcuuaggggcucuggcagccccagc

SEQ ID NO: 439894 - RNA, 32 nt, Human
gccggagggaggcggaggaaccgguguucgcc

SEQ ID NO: 439895 - RNA, 22 nt, Human
gccggagggcagggcucaggga

SEQ ID NO: 439896 - RNA, 32 nt, Human
gccggagggccgcggcgggcggcggccgaggc

SEQ ID NO: 439897 - RNA, 32 nt, Human
gccggagggggagacccauuccccuaccggag

SEQ ID NO: 439898 - RNA, 19 nt, Human
gccggagguagcagagcca

SEQ ID NO: 439899 - RNA, 32 nt, Human
gccggagguggagcugggcagcuguggagccc

SEQ ID NO: 439900 - RNA, 18 nt, Human
gccggaguagcagagcca

SEQ ID NO: 439901 - RNA, 32 nt, Human
gccggagugcuuccagccaaaacaacaagggc

SEQ ID NO: 439902 - RNA, 32 nt, Human
gccggaguggggcucccagaggagcucucggc

SEQ ID NO: 439903 - RNA, 23 nt, Human
gccggaguugcgagccgcugccu

SEQ ID NO: 439904 - RNA, 32 nt, Human
gccggauacaaacugguauucuguucuggagg

SEQ ID NO: 439905 - RNA, 32 nt, Human
gccggaugagugugggugugauacagccuaca

SEQ ID NO: 439906 - RNA, 32 nt, Human
gccggauggggcagugccgugugcugugacgg

SEQ ID NO: 439907 - RNA, 32 nt, Human
gccggauuugcugauccgucugcuccagcaua

SEQ ID NO: 439908 - RNA, 32 nt, Human
gccggcaaccaccuaguggcccagggaaggcc

SEQ ID NO: 439909 - RNA, 20 nt, Human
gccggcaacucgagauuggg

SEQ ID NO: 439910 - RNA, 21 nt, Human
gccggcaacuucuaccgagag

SEQ ID NO: 439911 - RNA, 20 nt, Human
gccggcaacuuugcugaugg

SEQ ID NO: 439912 - RNA, 32 nt, Human
gccggcacaagagggucgaggagccaggaacc

SEQ ID NO: 439913 - RNA, 32 nt, Human
gccggcaccaccuggacccagcuccaggcggg

SEQ ID NO: 439914 - RNA, 32 nt, Human
gccggcacccaggaugggcgagguggaggccc

SEQ ID NO: 439915 - RNA, 32 nt, Human
gccggcaccccuggcgccugacaugagcccuu

SEQ ID NO: 439916 - RNA, 32 nt, Human
gccggcaccuggugagauuccgucucuagagc

SEQ ID NO: 439917 - RNA, 32 nt, Human
gccggcacuccccggaugcaccaggaaccacc

SEQ ID NO: 439918 - RNA, 17 nt, Human
gccggcagaacugcagc

SEQ ID NO: 439919 - RNA, 17 nt, Human
gccggcagagcaggggg

SEQ ID NO: 439920 - RNA, 18 nt, Human
gccggcagagccgccgag

SEQ ID NO: 439921 - RNA, 21 nt, Human
gccggcagcagcgccucaugg

SEQ ID NO: 439922 - RNA, 21 nt, Human
gccggcagcccccgcccuagg

SEQ ID NO: 439923 - RNA, 32 nt, Human
gccggcagcccccugagggcagcguggagaca

SEQ ID NO: 439924 - RNA, 19 nt, Human
gccggcagcccuuggggac

SEQ ID NO: 439925 - RNA, 32 nt, Human
gccggcagccuggcugaccgugagggccagag

SEQ ID NO: 439926 - RNA, 22 nt, Human
gccggcagcgggccgccucagg

SEQ ID NO: 439927 - RNA, 32 nt, Human
gccggcaggagguggccccugcccucccucug

SEQ ID NO: 439928 - RNA, 32 nt, Human
gccggcaggccucgacccccacccuagggaau

SEQ ID NO: 439929 - RNA, 19 nt, Human
gccggcagggaccgcgagg

SEQ ID NO: 439930 - RNA, 32 nt, Human
gccggcagggagccuggagagccuccuugaug

SEQ ID NO: 439931 - RNA, 32 nt, Human
gccggcaggggcccagcccugccuuccacugu

SEQ ID NO: 439932 - RNA, 20 nt, Human
gccggcaguaagcccagagg

SEQ ID NO: 439933 - RNA, 32 nt, Human
gccggcaguuuccgugggucugugaagagguc

SEQ ID NO: 439934 - RNA, 32 nt, Human
gccggcaucccugcuugcagcugugaaggggg

SEQ ID NO: 439935 - RNA, 25 nt, Human
gccggcauccucgggggccugggga

SEQ ID NO: 439936 - RNA, 32 nt, Human
gccggcauccugagccuccucaugcccuggac

SEQ ID NO: 439937 - RNA, 32 nt, Human
gccggcaucuuucuuucaagagacaccucugg

SEQ ID NO: 439938 - RNA, 22 nt, Human
gccggcauuuggccugcugcug

SEQ ID NO: 439939 - RNA, 32 nt, Human
gccggccacgcgguggacagagcgagggugcc

SEQ ID NO: 439940 - RNA, 19 nt, Human
gccggccacugcucugcuc

SEQ ID NO: 439941 - RNA, 32 nt, Human
gccggccagcagagaagcagagagccagcgcc

SEQ ID NO: 439942 - RNA, 32 nt, Human
gccggccagccuguggaguccucccugagaag

SEQ ID NO: 439943 - RNA, 32 nt, Human
gccggccagcucccaaauggcccauuccaggg

SEQ ID NO: 439944 - RNA, 32 nt, Human
gccggccaggacagcacccacacacggcugcu

SEQ ID NO: 439945 - RNA, 19 nt, Human
gccggccaggcaggggguu

SEQ ID NO: 439946 - RNA, 21 nt, Human
gccggccagggcagcggcagg

SEQ ID NO: 439947 - RNA, 32 nt, Human
gccggccaucaccgcauuuccgcguggacgcc

SEQ ID NO: 439948 - RNA, 32 nt, Human
gccggccaucacugugcacccacacaccacca

SEQ ID NO: 439949 - RNA, 32 nt, Human
gccggccaugcucuccuccucugccagucucc

SEQ ID NO: 439950 - RNA, 32 nt, Human
gccggcccagauaggucugccucugccuucca

SEQ ID NO: 439951 - RNA, 32 nt, Human
gccggcccagccgccgccgcguccggacccuc

SEQ ID NO: 439952 - RNA, 19 nt, Human
gccggcccagccuguccag

SEQ ID NO: 439953 - RNA, 21 nt, Human
gccggccccaccccugcucgc

SEQ ID NO: 439954 - RNA, 30 nt, Human
gccggcccccaccucucccugggggucuca

SEQ ID NO: 439955 - RNA, 18 nt, Human
gccggcccccgccccagg

SEQ ID NO: 439956 - RNA, 32 nt, Human
gccggccccggagucucccacagggaggccau

SEQ ID NO: 439957 - RNA, 32 nt, Human
gccggccccgucuccccauccgucuaguccgc

SEQ ID NO: 439958 - RNA, 22 nt, Human
gccggcccgcucgcuagcucgc

SEQ ID NO: 439959 - RNA, 18 nt, Human
gccggcccggccgcccag

SEQ ID NO: 439960 - RNA, 32 nt, Human
gccggcccucccccugcucugcuucugcgccu

SEQ ID NO: 439961 - RNA, 32 nt, Human
gccggcccucuucccgccucacugaccauccc

SEQ ID NO: 439962 - RNA, 32 nt, Human
gccggcccugcagcugccuucugccccagguu

SEQ ID NO: 439963 - RNA, 32 nt, Human
gccggcccugcucugggcccgugaccugcgug

SEQ ID NO: 439964 - RNA, 21 nt, Human
gccggcccuugauuggggccu

SEQ ID NO: 439965 - RNA, 32 nt, Human
gccggccgccuccccucgcccuccuacucucc

SEQ ID NO: 439966 - RNA, 32 nt, Human
gccggccgcgaagaugccaguggcggugaugg

SEQ ID NO: 439967 - RNA, 21 nt, Human
gccggccgcgcgucccggcca

SEQ ID NO: 439968 - RNA, 32 nt, Human
gccggccgcguccuccgggcauggaaggaggc

SEQ ID NO: 439969 - RNA, 29 nt, Human
gccggccggccgcucucaucccccguaag

SEQ ID NO: 439970 - RNA, 32 nt, Human
gccggccggcgccgcggaaagcagccucgggg

SEQ ID NO: 439971 - RNA, 32 nt, Human
gccggccggcgcucacuugucuucaggaagcu

SEQ ID NO: 439972 - RNA, 32 nt, Human
gccggccgggcugugcggggcgagcggcggcg

SEQ ID NO: 439973 - RNA, 32 nt, Human
gccggccucacacucauucagcagacuggaaa

SEQ ID NO: 439974 - RNA, 32 nt, Human
gccggccucacacucauucagcggacuggaaa

SEQ ID NO: 439975 - RNA, 32 nt, Human
gccggccucaucugcugcacacgcccagggcu

SEQ ID NO: 439976 - RNA, 32 nt, Human
gccggccuccagcccacccacagcuguugcug

SEQ ID NO: 439977 - RNA, 32 nt, Human
gccggccuccagggcgcgcaggcuguuguugu

SEQ ID NO: 439978 - RNA, 20 nt, Human
gccggccucccccgcgccgc

SEQ ID NO: 439979 - RNA, 21 nt, Human
gccggccucccgccagccagc

SEQ ID NO: 439980 - RNA, 32 nt, Human
gccggccucccggcagccuccaccagcccggc

SEQ ID NO: 439981 - RNA, 19 nt, Human
gccggccucccgggccagc

SEQ ID NO: 439982 - RNA, 21 nt, Human
gccggccuccucggccuccca

SEQ ID NO: 439983 - RNA, 20 nt, Human
gccggccucuggccuggcuc

SEQ ID NO: 439984 - RNA, 32 nt, Human
gccggccugccugccugccugccugccugccu

SEQ ID NO: 439985 - RNA, 32 nt, Human
gccggccuggagggggagagggggaggaagaa

SEQ ID NO: 439986 - RNA, 19 nt, Human
gccggccugggcagggggu

SEQ ID NO: 439987 - RNA, 32 nt, Human
gccggccuucuacagaacacagcugguuuccu

SEQ ID NO: 439988 - RNA, 32 nt, Human
gccggcgagcgcgucgccaccaugaagcagcu

SEQ ID NO: 439989 - RNA, 21 nt, Human
gccggcgagucucgccucgag

SEQ ID NO: 439990 - RNA, 32 nt, Human
gccggcgcauucuaccagucucagggaaggac

SEQ ID NO: 439991 - RNA, 32 nt, Human
gccggcgccccuggcucuccagucccacuggg

SEQ ID NO: 439992 - RNA, 22 nt, Human
gccggcgcccgccgccuugagg

SEQ ID NO: 439993 - RNA, 32 nt, Human
gccggcgcccgggagacccaggaggagcccgc

SEQ ID NO: 439994 - RNA, 32 nt, Human
gccggcgccugagugccucugccugaacacug

SEQ ID NO: 439995 - RNA, 32 nt, Human
gccggcgccugcggucccuccuggccccacgg

SEQ ID NO: 439996 - RNA, 32 nt, Human
gccggcgccugcgguuccuccuggccccaagg

SEQ ID NO: 439997 - RNA, 32 nt, Human
gccggcgccuguaaucccagcuacucgggaga

SEQ ID NO: 439998 - RNA, 32 nt, Human
gccggcgccuucaccauggccucggcagagcu

SEQ ID NO: 439999 - RNA, 32 nt, Human
gccggcgccuuguucagggcugguggggcugg

SEQ ID NO: 440000 - RNA, 32 nt, Human
gccggcgcguggacuuccgccuggugaacgag

SEQ ID NO: 440001 - RNA, 32 nt, Human
gccggcgcucggcaaguucucccaggagaaag

SEQ ID NO: 440002 - RNA, 32 nt, Human
gccggcgcucggcaaguucucccaggagaagg

SEQ ID NO: 440003 - RNA, 32 nt, Human
gccggcgcuugagauccaggcaagugaaucca

SEQ ID NO: 440004 - RNA, 19 nt, Human
gccggcggccggccggcug

SEQ ID NO: 440005 - RNA, 32 nt, Human
gccggcgggaacugcuucuccugggccgccca

SEQ ID NO: 440006 - RNA, 32 nt, Human
gccggcggggaggcgggggagguguuuuccag

SEQ ID NO: 440007 - RNA, 32 nt, Human
gccggcggguggccgcucaccaugcccggcaa

SEQ ID NO: 440008 - RNA, 32 nt, Human
gccggcgguggauggggccaggaagcaugcag

SEQ ID NO: 440009 - RNA, 19 nt, Human
gccggcgguggcgcugguu

SEQ ID NO: 440010 - RNA, 32 nt, Human
gccggcguuggaggcccuggggccaagagcgu

SEQ ID NO: 440011 - RNA, 32 nt, Human
gccggcuacucuccucuccacgugcuccccuc

SEQ ID NO: 440012 - RNA, 32 nt, Human
gccggcuagcagccccgggcccugagcucccg

SEQ ID NO: 440013 - RNA, 32 nt, Human
gccggcuagccccgccagccugggcagugagg

SEQ ID NO: 440014 - RNA, 32 nt, Human
gccggcucaagcagccgagacagagcagagug

SEQ ID NO: 440015 - RNA, 20 nt, Human
gccggcucacggaggggcca

SEQ ID NO: 440016 - RNA, 32 nt, Human
gccggcucacugcaaccucugucuucuggguu

SEQ ID NO: 440017 - RNA, 32 nt, Human
gccggcuccaucucagcuucugguuucuaagu

SEQ ID NO: 440018 - RNA, 32 nt, Human
gccggcucccaaaaaccccauguguguacgau

SEQ ID NO: 440019 - RNA, 19 nt, Human
gccggcucccaccccggcc

SEQ ID NO: 440020 - RNA, 32 nt, Human
gccggcucccccacgaggugugaaugacagag

SEQ ID NO: 440021 - RNA, 20 nt, Human
gccggcuccccgaggaccca

SEQ ID NO: 440022 - RNA, 32 nt, Human
gccggcuccucagcuccagccuccaggaaccc

SEQ ID NO: 440023 - RNA, 32 nt, Human
gccggcuccuugcuggcggccaugaagaggca

SEQ ID NO: 440024 - RNA, 32 nt, Human
gccggcucuaccuaucgccaucauggcagccu

SEQ ID NO: 440025 - RNA, 32 nt, Human
gccggcucuccucgcccucuagcagcuuccug

SEQ ID NO: 440026 - RNA, 32 nt, Human
gccggcucugucacggcuucaugagagcgggg

SEQ ID NO: 440027 - RNA, 32 nt, Human
gccggcugcacccagagggagcagugaggcag

SEQ ID NO: 440028 - RNA, 32 nt, Human
gccggcugcauggggugcuguguguuuuucag

SEQ ID NO: 440029 - RNA, 19 nt, Human
gccggcugccacucaggug

SEQ ID NO: 440030 - RNA, 32 nt, Human
gccggcugccagcacuagguccugggcagcuu

SEQ ID NO: 440031 - RNA, 20 nt, Human
gccggcugcccucugcugcc

SEQ ID NO: 440032 - RNA, 32 nt, Human
gccggcugccucucccccuccgagcccguccg

SEQ ID NO: 440033 - RNA, 32 nt, Human
gccggcugcggaccccaucggcagggagagga

SEQ ID NO: 440034 - RNA, 29 nt, Human
gccggcuggcugcuacccgcccgcgccag

SEQ ID NO: 440035 - RNA, 18 nt, Human
gccggcugggcgcagugg

SEQ ID NO: 440036 - RNA, 32 nt, Human
gccggcugggcgguggggguuggugacgcggg

SEQ ID NO: 440037 - RNA, 16 nt, Human
gccggcugggcuccca

SEQ ID NO: 440038 - RNA, 23 nt, Human
gccggcugguuccucucccuuuu

SEQ ID NO: 440039 - RNA, 32 nt, Human
gccggcugugggaccuuccuggcugacuggca

SEQ ID NO: 440040 - RNA, 32 nt, Human
gccggcuguggugacccugccuggugcuggag

SEQ ID NO: 440041 - RNA, 32 nt, Human
gccggcuguguguguucaucagauacaguucu

SEQ ID NO: 440042 - RNA, 32 nt, Human
gccggcuugcugccuguccugccuguccggau

SEQ ID NO: 440043 - RNA, 32 nt, Human
gccgggaaaggcugccccaggccccgcgccua

SEQ ID NO: 440044 - RNA, 32 nt, Human
gccgggaacagagaaguguggggaagagauag

SEQ ID NO: 440045 - RNA, 32 nt, Human
gccgggaacucacgccuccaaucccagacgcu

SEQ ID NO: 440046 - RNA, 32 nt, Human
gccgggaagagagguugagucacccauccccg

SEQ ID NO: 440047 - RNA, 32 nt, Human
gccgggaagagggagacgggcagggcggcgcc

SEQ ID NO: 440048 - RNA, 32 nt, Human
gccgggaagggguuugcagcugcuccgucauc

SEQ ID NO: 440049 - RNA, 32 nt, Human
gccgggaaguuccugggcuuugcuccaaagcu

SEQ ID NO: 440050 - RNA, 32 nt, Human
gccgggacaucaagauauuuuccuucaaauua

SEQ ID NO: 440051 - RNA, 25 nt, Human
gccgggaccacccugguggggccac

SEQ ID NO: 440052 - RNA, 32 nt, Human
gccgggaccagccaggagcugggagccacagg

SEQ ID NO: 440053 - RNA, 17 nt, Human
gccgggaccccaccucu

SEQ ID NO: 440054 - RNA, 32 nt, Human
gccgggacgcgugcaccaugcccuaccugcuc

SEQ ID NO: 440055 - RNA, 32 nt, Human
gccgggacucuugcccacccucagccauggcu

SEQ ID NO: 440056 - RNA, 23 nt, Human
gccgggacugcgugcgggccccg

SEQ ID NO: 440057 - RNA, 32 nt, Human
gccgggacugcucucccugaagaccccuccag

SEQ ID NO: 440058 - RNA, 24 nt, Human
gccgggacuggcgcgcggggacac

SEQ ID NO: 440059 - RNA, 22 nt, Human
gccgggagcccgccccgcuucc

SEQ ID NO: 440060 - RNA, 32 nt, Human
gccgggagcccguucagggccgcgggagugcg

SEQ ID NO: 440061 - RNA, 32 nt, Human
gccgggagccgggaaggagggagcagggcucg

SEQ ID NO: 440062 - RNA, 20 nt, Human
gccgggagcgcggggcucag

SEQ ID NO: 440063 - RNA, 32 nt, Human
gccgggagcggggaacagggagucggggagcc

SEQ ID NO: 440064 - RNA, 32 nt, Human
gccgggagcgggggugacagccugggauuccg

SEQ ID NO: 440065 - RNA, 32 nt, Human
gccgggagcucaccaccucuuauggcagccca

SEQ ID NO: 440066 - RNA, 32 nt, Human
gccgggagcuggguuucucuucccuuuuuauc

SEQ ID NO: 440067 - RNA, 31 nt, Human
gccgggaggaggaggaggagguugcagugag

SEQ ID NO: 440068 - RNA, 25 nt, Human
gccgggaggcagagguugcagugug

SEQ ID NO: 440069 - RNA, 23 nt, Human
gccgggaggccgaggacucggag

SEQ ID NO: 440070 - RNA, 32 nt, Human
gccgggaggcggaaguuguggugagccgagau

SEQ ID NO: 440071 - RNA, 21 nt, Human
gccgggaggcggccgcugccu

SEQ ID NO: 440072 - RNA, 32 nt, Human
gccgggagguggggguugcagugagccgagau

SEQ ID NO: 440073 - RNA, 32 nt, Human
gccgggaguccuuccuguaccgcucagacagc

SEQ ID NO: 440074 - RNA, 21 nt, Human
gccgggcagaccccccucccc

SEQ ID NO: 440075 - RNA, 32 nt, Human
gccgggcagcccccgaaggccgcaucgcaccc

SEQ ID NO: 440076 - RNA, 32 nt, Human
gccgggcagcugagcugguaggaggaccagac

SEQ ID NO: 440077 - RNA, 32 nt, Human
gccgggcaggagcgcccucucccggagcgaga

SEQ ID NO: 440078 - RNA, 32 nt, Human
gccgggcagggcccugcagaagcacaacuccg

SEQ ID NO: 440079 - RNA, 22 nt, Human
gccgggcaggguguggggccau

SEQ ID NO: 440080 - RNA, 32 nt, Human
gccgggccaagagaggauggagggaugggagu

SEQ ID NO: 440081 - RNA, 32 nt, Human
gccgggccaaggacaggcagggagggaggcca

SEQ ID NO: 440082 - RNA, 21 nt, Human
gccgggccacaccucagugcc

SEQ ID NO: 440083 - RNA, 32 nt, Human
gccgggccaccccgcaaccucgcgccucccgu

SEQ ID NO: 440084 - RNA, 23 nt, Human
gccgggccacguugguggggccu

SEQ ID NO: 440085 - RNA, 22 nt, Human
gccgggccagcagccggaugcc

SEQ ID NO: 440086 - RNA, 22 nt, Human
gccgggccaucaccuggccccu

SEQ ID NO: 440087 - RNA, 20 nt, Human
gccgggccaucgggcugggc

SEQ ID NO: 440088 - RNA, 32 nt, Human
gccgggcccacacccuccagucgugcccugca

SEQ ID NO: 440089 - RNA, 18 nt, Human
gccgggcccaucccgccg

SEQ ID NO: 440090 - RNA, 19 nt, Human
gccgggccccagggcucag

SEQ ID NO: 440091 - RNA, 22 nt, Human
gccgggccccugccuugugccu

SEQ ID NO: 440092 - RNA, 32 nt, Human
gccgggccccuggcuggugcuuugggagagag

SEQ ID NO: 440093 - RNA, 25 nt, Human
gccgggcccgaacagacugggccuc

SEQ ID NO: 440094 - RNA, 23 nt, Human
gccgggcccggcuccccgggccu

SEQ ID NO: 440095 - RNA, 32 nt, Human
gccgggcccgggaggagguguagcgcggcgag

SEQ ID NO: 440096 - RNA, 21 nt, Human
gccgggcccugcccuagugcc

SEQ ID NO: 440097 - RNA, 23 nt, Human
gccgggccgaggauucgggugcc

SEQ ID NO: 440098 - RNA, 20 nt, Human
gccgggccgcacuuguggcc

SEQ ID NO: 440099 - RNA, 22 nt, Human
gccgggccgcagagcaugugcu

SEQ ID NO: 440100 - RNA, 22 nt, Human
gccgggccgcgccgccgcugcc

SEQ ID NO: 440101 - RNA, 23 nt, Human
gccgggccgcggacacugucgcc

SEQ ID NO: 440102 - RNA, 20 nt, Human
gccgggccgcggcgggcgcc

SEQ ID NO: 440103 - RNA, 23 nt, Human
gccgggccggggccgcgcugccu

SEQ ID NO: 440104 - RNA, 32 nt, Human
gccgggccggggcugcagccgcagcggccaug

SEQ ID NO: 440105 - RNA, 32 nt, Human
gccgggccgguggcaucuuccuuacuuugucc

SEQ ID NO: 440106 - RNA, 22 nt, Human
gccgggccgguugcuggcaucu

SEQ ID NO: 440107 - RNA, 21 nt, Human
gccgggccuagaccuggugcu

SEQ ID NO: 440108 - RNA, 17 nt, Human
gccgggccugcauccca

SEQ ID NO: 440109 - RNA, 32 nt, Human
gccgggccugccauuugaggcagcgagccucc

SEQ ID NO: 440110 - RNA, 32 nt, Human
gccgggcgcacacacucgcacccgcgcacgca

SEQ ID NO: 440111 - RNA, 21 nt, Human
gccgggcgcggcuggggcccg

SEQ ID NO: 440112 - RNA, 32 nt, Human
gccgggcgcguggcucacgccuguaaucccag

SEQ ID NO: 440113 - RNA, 32 nt, Human
gccgggcgcuccgcgaagaugcagcucaagcc

SEQ ID NO: 440114 - RNA, 32 nt, Human
gccgggcgcugaggacaagggccgcugguagg

SEQ ID NO: 440115 - RNA, 32 nt, Human
gccgggcgcugugccugucacgccggggucug

SEQ ID NO: 440116 - RNA, 32 nt, Human
gccgggcggcaaccuuugcagucgcguuggcu

SEQ ID NO: 440117 - RNA, 32 nt, Human
gccgggcggcagagaaggagggagcggguacg

SEQ ID NO: 440118 - RNA, 32 nt, Human
gccgggcggccauggacuuguacagcaccccg

SEQ ID NO: 440119 - RNA, 22 nt, Human
gccgggcggcgcagccgcuccu

SEQ ID NO: 440120 - RNA, 32 nt, Human
gccgggcguccccacacugaagguccggaaag

SEQ ID NO: 440121 - RNA, 23 nt, Human
gccgggcgucucccgccuccagg

SEQ ID NO: 440122 - RNA, 30 nt, Human
gccgggcguggcugcgugcuccuguagucc

SEQ ID NO: 440123 - RNA, 32 nt, Human
gccgggcguguggcucaugccugugaucccag

SEQ ID NO: 440124 - RNA, 22 nt, Human
gccgggcuaccgucuugugccu

SEQ ID NO: 440125 - RNA, 20 nt, Human
gccgggcucaggccacugcc

SEQ ID NO: 440126 - RNA, 32 nt, Human
gccgggcuccaaggacguguccuuagcggcuc

SEQ ID NO: 440127 - RNA, 32 nt, Human
gccgggcuccgaggcgagaggcugcauggagu

SEQ ID NO: 440128 - RNA, 21 nt, Human
gccgggcuccgcggcgccaga

SEQ ID NO: 440129 - RNA, 32 nt, Human
gccgggcucgggaaguggguuggauggcggca

SEQ ID NO: 440130 - RNA, 32 nt, Human
gccgggcucuacgucccagggagggaggggcg

SEQ ID NO: 440131 - RNA, 32 nt, Human
gccgggcucucggggcaccacagccaugugcu

SEQ ID NO: 440132 - RNA, 32 nt, Human
gccgggcucugaggaccccuggggcccccauc

SEQ ID NO: 440133 - RNA, 21 nt, Human
gccgggcugcccuucgcugcc

SEQ ID NO: 440134 - RNA, 18 nt, Human
gccgggcugcggcuccau

SEQ ID NO: 440135 - RNA, 32 nt, Human
gccgggcugcugauccgccaggcacgguguaa

SEQ ID NO: 440136 - RNA, 32 nt, Human
gccgggcugcugcugcugcugcuccaggugcu

SEQ ID NO: 440137 - RNA, 32 nt, Human
gccgggcuggaagggcggcggcggcuggggga

SEQ ID NO: 440138 - RNA, 32 nt, Human
gccgggcugggcucagccaagcucccacucac

SEQ ID NO: 440139 - RNA, 32 nt, Human
gccgggcuggggguggggaagggaggccgcca

SEQ ID NO: 440140 - RNA, 32 nt, Human
gccgggcuguaaccgucgucuguccgggagcg

SEQ ID NO: 440141 - RNA, 32 nt, Human
gccggggaacaagccacaggagagcgacucag

SEQ ID NO: 440142 - RNA, 22 nt, Human
gccggggaccccgggggccgcg

SEQ ID NO: 440143 - RNA, 32 nt, Human
gccggggagcagaugcgucagauggaggagaa

SEQ ID NO: 440144 - RNA, 32 nt, Human
gccggggaggaagaguagcucgccgaggcgcc

SEQ ID NO: 440145 - RNA, 32 nt, Human
gccggggaggaggaggaggaggaagaggagga

SEQ ID NO: 440146 - RNA, 32 nt, Human
gccggggaggaggggguugcagugagccgaga

SEQ ID NO: 440147 - RNA, 32 nt, Human
gccggggaggcagagguugcagugagccgaga

SEQ ID NO: 440148 - RNA, 32 nt, Human
gccggggaggcucaaguucgccacuuuacuca

SEQ ID NO: 440149 - RNA, 32 nt, Human
gccggggaggcugggagccggcggcaggauua

SEQ ID NO: 440150 - RNA, 32 nt, Human
gccggggagguggaggcugcagugaacugaga

SEQ ID NO: 440151 - RNA, 32 nt, Human
gccggggaggugggcgugugugugcgugccag

SEQ ID NO: 440152 - RNA, 32 nt, Human
gccggggaguuucuuuccugccuucuucuuuu

SEQ ID NO: 440153 - RNA, 32 nt, Human
gccggggauaagagagcaagaaaaugaagcuc

SEQ ID NO: 440154 - RNA, 32 nt, Human
gccggggaucuccaggucccaggcugggcggc

SEQ ID NO: 440155 - RNA, 23 nt, Human
gccggggcaggagaaucgcuuga

SEQ ID NO: 440156 - RNA, 32 nt, Human
gccggggcagggcagaggugaacuugaaguuc

SEQ ID NO: 440157 - RNA, 32 nt, Human
gccggggccauggcgaagcugcugagcugcgu

SEQ ID NO: 440158 - RNA, 22 nt, Human
gccggggcccacuccgauccgc

SEQ ID NO: 440159 - RNA, 32 nt, Human
gccggggcccaggaaggggagggggcgaacgc

SEQ ID NO: 440160 - RNA, 21 nt, Human
gccggggccgcagucuggcca

SEQ ID NO: 440161 - RNA, 20 nt, Human
gccggggccggcggcugcgg

SEQ ID NO: 440162 - RNA, 23 nt, Human
gccggggccggggccgggcgccg

SEQ ID NO: 440163 - RNA, 20 nt, Human
gccggggcgcgccucccccg

SEQ ID NO: 440164 - RNA, 32 nt, Human
gccggggcgcggggcuaugauggugcacugcg

SEQ ID NO: 440165 - RNA, 22 nt, Human
gccggggcuacccgcccugggg

SEQ ID NO: 440166 - RNA, 32 nt, Human
gccggggcuagaggcagauggaagggaggcau

SEQ ID NO: 440167 - RNA, 32 nt, Human
gccggggcucccgagcggcagaaaguuccggc

SEQ ID NO: 440168 - RNA, 32 nt, Human
gccgggggacgcugggcugagcggccggcggc

SEQ ID NO: 440169 - RNA, 32 nt, Human
gccgggggcagggcugccuccagccugcacgc

SEQ ID NO: 440170 - RNA, 32 nt, Human
gccgggggccgcgggagccagcagguggcggg

SEQ ID NO: 440171 - RNA, 32 nt, Human
gccgggggcucaagaccuaccuguugacaguu

SEQ ID NO: 440172 - RNA, 24 nt, Human
gccgggggcuccuugcucggccgg

SEQ ID NO: 440173 - RNA, 32 nt, Human
gccgggggcugcaggucccagggcgggggcug

SEQ ID NO: 440174 - RNA, 32 nt, Human
gccgggggcuggagagugaccguggucugagu

SEQ ID NO: 440175 - RNA, 23 nt, Human
gccgggggcugucagccgcaccu

SEQ ID NO: 440176 - RNA, 32 nt, Human
gccggggguagggggcaggaaaaguggguugu

SEQ ID NO: 440177 - RNA, 32 nt, Human
gccgggguaggcagggggaggagaacgcucac

SEQ ID NO: 440178 - RNA, 19 nt, Human
gccggggucuagcaggggg

SEQ ID NO: 440179 - RNA, 32 nt, Human
gccggggugaaucaucaguccuggggaagaac

SEQ ID NO: 440180 - RNA, 32 nt, Human
gccggggugagguggggaggaggacauggauc

SEQ ID NO: 440181 - RNA, 32 nt, Human
gccggggugauggcgguggagacucugucccc

SEQ ID NO: 440182 - RNA, 18 nt, Human
gccggggugcggagggag

SEQ ID NO: 440183 - RNA, 23 nt, Human
gccgggguugagcuggcaccccg

SEQ ID NO: 440184 - RNA, 32 nt, Human
gccgggguuggaccagucucccgggcauggca

SEQ ID NO: 440185 - RNA, 19 nt, Human
gccggguaccuggacucag

SEQ ID NO: 440186 - RNA, 32 nt, Human
gccggguagagggagacagagucgcacggcug

SEQ ID NO: 440187 - RNA, 32 nt, Human
gccggguaucggguugaaggguccagguagug

SEQ ID NO: 440188 - RNA, 32 nt, Human
gccgggucacaacucacugcagccuggaccuc

SEQ ID NO: 440189 - RNA, 21 nt, Human
gccgggucagggagcgugaga

SEQ ID NO: 440190 - RNA, 21 nt, Human
gccggguccaauuaggggacu

SEQ ID NO: 440191 - RNA, 22 nt, Human
gccggguccccgggacggggug

SEQ ID NO: 440192 - RNA, 18 nt, Human
gccggguccccucgggug

SEQ ID NO: 440193 - RNA, 32 nt, Human
gccgggucccgagccuacagagccgggagcag

SEQ ID NO: 440194 - RNA, 32 nt, Human
gccggguccucccagcccuugccacacagccu

SEQ ID NO: 440195 - RNA, 32 nt, Human
gccgggucuccucuuuucgaaagaaucucauu

SEQ ID NO: 440196 - RNA, 32 nt, Human
gccgggucuggaggggacagcagagacagccc

SEQ ID NO: 440197 - RNA, 32 nt, Human
gccggguggaauagcacuggcuucagcaggcg

SEQ ID NO: 440198 - RNA, 32 nt, Human
gccgggugggaccugggcuguuugcucuugga

SEQ ID NO: 440199 - RNA, 32 nt, Human
gccggguggugacaaggagaaaagccuucuag

SEQ ID NO: 440200 - RNA, 32 nt, Human
gccgggugucagcgaaccccuuucccaaaccu

SEQ ID NO: 440201 - RNA, 23 nt, Human
gccggguuaggaagccacugccu

SEQ ID NO: 440202 - RNA, 32 nt, Human
gccggguucuagucuccuuugcacugagggcc

SEQ ID NO: 440203 - RNA, 32 nt, Human
gccgguacccuuugggaccgcagcuguggcca

SEQ ID NO: 440204 - RNA, 32 nt, Human
gccgguagaauaaggaaggaagggaggcaggg

SEQ ID NO: 440205 - RNA, 24 nt, Human
gccgguagccccagcuacucggga

SEQ ID NO: 440206 - RNA, 32 nt, Human
gccgguagugaagcugaaggaggcagaggacg

SEQ ID NO: 440207 - RNA, 32 nt, Human
gccggucaccagaagccagcaggcguggggug

SEQ ID NO: 440208 - RNA, 25 nt, Human
gccgguccaagcacauggccuccca

SEQ ID NO: 440209 - RNA, 32 nt, Human
gccggucccacuguguucccagcuuccagagu

SEQ ID NO: 440210 - RNA, 32 nt, Human
gccgguccccugggcccacugucguuucucua

SEQ ID NO: 440211 - RNA, 32 nt, Human
gccgguccccugggcccacuguuguuucucua

SEQ ID NO: 440212 - RNA, 24 nt, Human
gccggucggggccaggccaggcca

SEQ ID NO: 440213 - RNA, 24 nt, Human
gccggucucaaacuccugagcuca

SEQ ID NO: 440214 - RNA, 18 nt, Human
gccggucucaggcugcug

SEQ ID NO: 440215 - RNA, 32 nt, Human
gccggucucccagaaggcggagucgaucuccc

SEQ ID NO: 440216 - RNA, 24 nt, Human
gccggucuugaacuccuggacuca

SEQ ID NO: 440217 - RNA, 24 nt, Human
gccggucuugaacuccugggcuca

SEQ ID NO: 440218 - RNA, 32 nt, Human
gccggugcauguuggaaaugggccacagggcu

SEQ ID NO: 440219 - RNA, 32 nt, Human
gccggugccuggggugccuuucccccagccag

SEQ ID NO: 440220 - RNA, 32 nt, Human
gccggugcgguggcucaugccuguaaucccag

SEQ ID NO: 440221 - RNA, 32 nt, Human
gccggugcuaaggggauggggaagaagggaca

SEQ ID NO: 440222 - RNA, 32 nt, Human
gccggugcucaccaagaucaguucaggaucaa

SEQ ID NO: 440223 - RNA, 32 nt, Human
gccggugcugggagagcauuuauuugggagaa

SEQ ID NO: 440224 - RNA, 24 nt, Human
gccggugcuuguugaacuggcagg

SEQ ID NO: 440225 - RNA, 32 nt, Human
gccgguggacagugggcagguggauuugggga

SEQ ID NO: 440226 - RNA, 32 nt, Human
gccgguggcucaccccuguaaucucagcauuu

SEQ ID NO: 440227 - RNA, 32 nt, Human
gccgguggcucaugccuguaaucucagaacuu

SEQ ID NO: 440228 - RNA, 32 nt, Human
gccgguggcugugcgugggggcugagggcuag

SEQ ID NO: 440229 - RNA, 19 nt, Human
gccgguggugcagagccag

SEQ ID NO: 440230 - RNA, 18 nt, Human
gccgguguuuuuccuuga

SEQ ID NO: 440231 - RNA, 32 nt, Human
gccgguucugcuagagcagacaggccuggccc

SEQ ID NO: 440232 - RNA, 32 nt, Human
gccgguucuugaccugguggauguggcugcag

SEQ ID NO: 440233 - RNA, 19 nt, Human
gccgguugagcagggcguu

SEQ ID NO: 440234 - RNA, 21 nt, Human
gccguaacgcacuuucuccca

SEQ ID NO: 440235 - RNA, 18 nt, Human
gccguaagugccacccag

SEQ ID NO: 440236 - RNA, 23 nt, Human
gccguaaucccagcuacucggga

SEQ ID NO: 440237 - RNA, 32 nt, Human
gccguaaucccagcuacucgggaggcuaaggu

SEQ ID NO: 440238 - RNA, 25 nt, Human
gccguacagcuguuugguuugcaua

SEQ ID NO: 440239 - RNA, 32 nt, Human
gccguaccaagugucaccgcagcaagaggggg

SEQ ID NO: 440240 - RNA, 32 nt, Human
gccguacccagccagagaagaaaaagaacagu

SEQ ID NO: 440241 - RNA, 32 nt, Human
gccguacccucacccuuuucagcaaagaauag

SEQ ID NO: 440242 - RNA, 32 nt, Human
gccguaccugcaaguauccagaccuugaaagu

SEQ ID NO: 440243 - RNA, 32 nt, Human
gccguacuaaguugguuucuguuagucuuaac

SEQ ID NO: 440244 - RNA, 32 nt, Human
gccguacucgcacuccagagcccugggaugug

SEQ ID NO: 440245 - RNA, 32 nt, Human
gccguacucugcugguugcgcagccaccucgg

SEQ ID NO: 440246 - RNA, 23 nt, Human
gccguacuuugcuaacugugcuc

SEQ ID NO: 440247 - RNA, 32 nt, Human
gccguagaaaaauauuguguuacuuguuuguu

SEQ ID NO: 440248 - RNA, 32 nt, Human
gccguagagacaaacccccacccugagcccgc

SEQ ID NO: 440249 - RNA, 32 nt, Human
gccguagcauguuacaguucaaacaugucucc

SEQ ID NO: 440250 - RNA, 32 nt, Human
gccguagccagcaggcuucagugcucaccgaa

SEQ ID NO: 440251 - RNA, 32 nt, Human
gccguagccaugaguuucugccggggcuagcc

SEQ ID NO: 440252 - RNA, 32 nt, Human
gccguagcgaaaaggcccaagagggaagucag

SEQ ID NO: 440253 - RNA, 32 nt, Human
gccguagggacccccucacacaccaccgagau

SEQ ID NO: 440254 - RNA, 32 nt, Human
gccguagggucaggggacagcucggcuucagu

SEQ ID NO: 440255 - RNA, 21 nt, Human
gccguagucccagcuacuugg

SEQ ID NO: 440256 - RNA, 22 nt, Human
gccguagucccagcuacuugga

SEQ ID NO: 440257 - RNA, 32 nt, Human
gccguaucucaguucucgcgagguuucgucuu

SEQ ID NO: 440258 - RNA, 32 nt, Human
gccguauggccgaucccucuccucacuguaag

SEQ ID NO: 440259 - RNA, 20 nt, Human
gccguauuuggcacccagaa

SEQ ID NO: 440260 - RNA, 32 nt, Human
gccgucaccaccaucacaaaagcugacgggac

SEQ ID NO: 440261 - RNA, 32 nt, Human
gccgucacccaccagcuuccucaccaggcaag

SEQ ID NO: 440262 - RNA, 32 nt, Human
gccgucagcccggaggaggaggaggaggagga

SEQ ID NO: 440263 - RNA, 32 nt, Human
gccgucagccugaugcauagcgaauuugccca

SEQ ID NO: 440264 - RNA, 24 nt, Human
gccgucaucacagcccacccccag

SEQ ID NO: 440265 - RNA, 32 nt, Human
gccguccacagcccugccucaguggcccagug

SEQ ID NO: 440266 - RNA, 24 nt, Human
gccguccacuggacuccugcgcca

SEQ ID NO: 440267 - RNA, 32 nt, Human
gccguccagccuguccuugguguggggugcuu

SEQ ID NO: 440268 - RNA, 32 nt, Human
gccgucccacccggcacccaccaguccgaugg

SEQ ID NO: 440269 - RNA, 32 nt, Human
gccgucccauuuucaacacaugucucauucua

SEQ ID NO: 440270 - RNA, 32 nt, Human
gccguccccacccugccuccucccugcugcuu

SEQ ID NO: 440271 - RNA, 19 nt, Human
gccguccgccccagccccg

SEQ ID NO: 440272 - RNA, 19 nt, Human
gccguccgccgcugugcca

SEQ ID NO: 440273 - RNA, 19 nt, Human
gccguccgcugcacugcca

SEQ ID NO: 440274 - RNA, 32 nt, Human
gccguccggcgcagcaguuucuagguccccac

SEQ ID NO: 440275 - RNA, 32 nt, Human
gccguccucacaccugugcgcagcccgacccu

SEQ ID NO: 440276 - RNA, 32 nt, Human
gccguccugcagccgccacuccugcgccugcc

SEQ ID NO: 440277 - RNA, 19 nt, Human
gccgucgccaccgccgcca

SEQ ID NO: 440278 - RNA, 21 nt, Human
gccgucgccgccaccgggcca

SEQ ID NO: 440279 - RNA, 20 nt, Human
gccgucgccgccgccgccgc

SEQ ID NO: 440280 - RNA, 32 nt, Human
gccgucgccgcugcaaccuccacuacugcuug

SEQ ID NO: 440281 - RNA, 21 nt, Human
gccgucgcgcgcccgcuuccu

SEQ ID NO: 440282 - RNA, 32 nt, Human
gccgucgcuuaccagagccagaaguuccugcu

SEQ ID NO: 440283 - RNA, 32 nt, Human
gccgucggagcagccccuccucacuucagggg

SEQ ID NO: 440284 - RNA, 19 nt, Human
gccgucgggggcaagggug

SEQ ID NO: 440285 - RNA, 32 nt, Human
gccgucgggggcaaggguggcucggggguggc

SEQ ID NO: 440286 - RNA, 32 nt, Human
gccgucguggccgccucccgcacgccaggccc

SEQ ID NO: 440287 - RNA, 32 nt, Human
gccgucuaugaccaaaggccccugccaggugu

SEQ ID NO: 440288 - RNA, 22 nt, Human
gccgucuaugcaaaugcaugca

SEQ ID NO: 440289 - RNA, 32 nt, Human
gccgucucaaaaacugcaagcuaaucagucag

SEQ ID NO: 440290 - RNA, 32 nt, Human
gccgucucaacaacaggcaucaccugaauauc

SEQ ID NO: 440291 - RNA, 32 nt, Human
gccgucuccaccucagcuccugcucccucugc

SEQ ID NO: 440292 - RNA, 21 nt, Human
gccgucugagagcaucaggga

SEQ ID NO: 440293 - RNA, 19 nt, Human
gccgucugccaccccgcca

SEQ ID NO: 440294 - RNA, 32 nt, Human
gccgucugcgcuccagccuucgccuggcagag

SEQ ID NO: 440295 - RNA, 20 nt, Human
gccgucugugccacccagag

SEQ ID NO: 440296 - RNA, 32 nt, Human
gccgucuuccccuccucccguccucccucgcc

SEQ ID NO: 440297 - RNA, 32 nt, Human
gccgucuuccgcucccccucccggccuuuacu

SEQ ID NO: 440298 - RNA, 32 nt, Human
gccgucuugccucacuuccccuccugucacau

SEQ ID NO: 440299 - RNA, 32 nt, Human
gccgucuuggggccuagcggcgaggcggaccc

SEQ ID NO: 440300 - RNA, 32 nt, Human
gccgugaaaauuacucagcagugcaguuggcu

SEQ ID NO: 440301 - RNA, 32 nt, Human
gccgugaaccacugcacccagccaaugggugu

SEQ ID NO: 440302 - RNA, 21 nt, Human
gccgugacaacaggccaccac

SEQ ID NO: 440303 - RNA, 32 nt, Human
gccgugacagguuuccacaaacuucguggauc

SEQ ID NO: 440304 - RNA, 32 nt, Human
gccgugacuuaggcagaggagugcagaggagg

SEQ ID NO: 440305 - RNA, 32 nt, Human
gccgugacuuucuccuccuggacacuggagcc

SEQ ID NO: 440306 - RNA, 32 nt, Human
gccgugagagugccauccgaaagaagcuaaac

SEQ ID NO: 440307 - RNA, 19 nt, Human
gccgugagcaccgcccagc

SEQ ID NO: 440308 - RNA, 32 nt, Human
gccgugagccaagagcuugugacuggacucca

SEQ ID NO: 440309 - RNA, 32 nt, Human
gccgugagcucucacaggcucagacuaaauca

SEQ ID NO: 440310 - RNA, 32 nt, Human
gccgugaggaggacgugggggcugcaagugga

SEQ ID NO: 440311 - RNA, 32 nt, Human
gccgugaggaugaggacaacuccacccuccuu

SEQ ID NO: 440312 - RNA, 32 nt, Human
gccgugaucucuaugcccgagucucaacccuc

SEQ ID NO: 440313 - RNA, 31 nt, Human
gccgugaugcugucccgaucccgcugugugu

SEQ ID NO: 440314 - RNA, 32 nt, Human
gccgugauguuugacaguagagcugugugaga

SEQ ID NO: 440315 - RNA, 18 nt, Human
gccgugcaccuccaccuc

SEQ ID NO: 440316 - RNA, 32 nt, Human
gccgugcagggugggaggagaagaccaaacga

SEQ ID NO: 440317 - RNA, 32 nt, Human
gccgugcaugguggugcauccuguaaucauag

SEQ ID NO: 440318 - RNA, 32 nt, Human
gccgugcccagccuggcaugcauaugcggugg

SEQ ID NO: 440319 - RNA, 32 nt, Human
gccgugcccgggaauaggaggaggcagcaugc

SEQ ID NO: 440320 - RNA, 19 nt, Human
gccgugccgccgccgccgc

SEQ ID NO: 440321 - RNA, 22 nt, Human
gccgugccggagccgcccaagg

SEQ ID NO: 440322 - RNA, 32 nt, Human
gccgugccugccugcccugccuacugagaaga

SEQ ID NO: 440323 - RNA, 21 nt, Human
gccgugccuggagcacugcag

SEQ ID NO: 440324 - RNA, 32 nt, Human
gccgugccuggggcgacauuucaggcuuuaug

SEQ ID NO: 440325 - RNA, 32 nt, Human
gccgugccugugccuggagggcuggucugcga

SEQ ID NO: 440326 - RNA, 32 nt, Human
gccgugcguucuugcgagccggccugcaggag

SEQ ID NO: 440327 - RNA, 32 nt, Human
gccgugcuagaguccucagggagggagugacc

SEQ ID NO: 440328 - RNA, 32 nt, Human
gccgugcucgaagcguuccuggagcccaagcu

SEQ ID NO: 440329 - RNA, 32 nt, Human
gccgugcucgcgcccuccuccuggccuucuga

SEQ ID NO: 440330 - RNA, 32 nt, Human
gccgugcucucuacccuccacagucacggugc

SEQ ID NO: 440331 - RNA, 32 nt, Human
gccgugcugcuggcgucacuuucuuugauaug

SEQ ID NO: 440332 - RNA, 32 nt, Human
gccguggacacacacccccuuuccaggagggg

SEQ ID NO: 440333 - RNA, 32 nt, Human
gccguggagcuggccucggccucggcaucggg

SEQ ID NO: 440334 - RNA, 32 nt, Human
gccguggaggaugucccgaaaggggccgcgag

SEQ ID NO: 440335 - RNA, 32 nt, Human
gccguggaguaacacagccagcaguuucccuc

SEQ ID NO: 440336 - RNA, 21 nt, Human
gccguggagucagaccggcca

SEQ ID NO: 440337 - RNA, 23 nt, Human
gccguggaguggcggucccuccu

SEQ ID NO: 440338 - RNA, 24 nt, Human
gccguggaguucguaccgcuuccu

SEQ ID NO: 440339 - RNA, 32 nt, Human
gccguggauccugauuccagcugugugagggc

SEQ ID NO: 440340 - RNA, 32 nt, Human
gccguggcagccaccuuccaggagcaggggcu

SEQ ID NO: 440341 - RNA, 32 nt, Human
gccguggccaugggaagauguuccacgcugcc

SEQ ID NO: 440342 - RNA, 32 nt, Human
gccguggcccauaugagucuggcuccggucac

SEQ ID NO: 440343 - RNA, 19 nt, Human
gccguggccccaccuacca

SEQ ID NO: 440344 - RNA, 21 nt, Human
gccguggccggagccgagcgg

SEQ ID NO: 440345 - RNA, 22 nt, Human
gccguggcucacaccuguaauc

SEQ ID NO: 440346 - RNA, 22 nt, Human
gccguggcucacgccuguaauc

SEQ ID NO: 440347 - RNA, 32 nt, Human
gccguggcugccucgugagccucccagagccc

SEQ ID NO: 440348 - RNA, 32 nt, Human
gccgugggaaagcacacuggggaggggucagu

SEQ ID NO: 440349 - RNA, 32 nt, Human
gccgugggaagagaagcacgcccagggggcca

SEQ ID NO: 440350 - RNA, 32 nt, Human
gccgugggagaaacucugggcgggauuacggu

SEQ ID NO: 440351 - RNA, 32 nt, Human
gccgugggcugcagcacugggucugguguccu

SEQ ID NO: 440352 - RNA, 32 nt, Human
gccguggggcaggccaggcccugggagcacuu

SEQ ID NO: 440353 - RNA, 24 nt, Human
gccgugggggccacagccacaccu

SEQ ID NO: 440354 - RNA, 32 nt, Human
gccguggggugaggacggugaggacagggugg

SEQ ID NO: 440355 - RNA, 32 nt, Human
gccguggucucaaggagucagagcagggcugg

SEQ ID NO: 440356 - RNA, 22 nt, Human
gccguggucucaggcacuggag

SEQ ID NO: 440357 - RNA, 32 nt, Human
gccguggugcgaucuuagcucacugcaacccc

SEQ ID NO: 440358 - RNA, 32 nt, Human
gccguggugcugcugguguuuggaguugcagc

SEQ ID NO: 440359 - RNA, 32 nt, Human
gccguguaacacccuuccucugaucgcaccgc

SEQ ID NO: 440360 - RNA, 21 nt, Human
gccguguaccggggcccggag

SEQ ID NO: 440361 - RNA, 21 nt, Human
gccguguaguuuguuuguuga

SEQ ID NO: 440362 - RNA, 32 nt, Human
gccguguauaauguuuucuuuagcaagugugg

SEQ ID NO: 440363 - RNA, 32 nt, Human
gccgugucauccaggcuggagugcgguggugg

SEQ ID NO: 440364 - RNA, 32 nt, Human
gccguguccucucugugucccugcugcugcca

SEQ ID NO: 440365 - RNA, 19 nt, Human
gccguguccuuccgcugcc

SEQ ID NO: 440366 - RNA, 32 nt, Human
gccgugucucaccacauccuggcuccagugug

SEQ ID NO: 440367 - RNA, 32 nt, Human
gccgugucuccaggaccucauggaggcaacag

SEQ ID NO: 440368 - RNA, 20 nt, Human
gccgugucucccucaaagug

SEQ ID NO: 440369 - RNA, 32 nt, Human
gccgugucugggaggcgaggccacgacaggcc

SEQ ID NO: 440370 - RNA, 32 nt, Human
gccgugugaaggagucggagaucagagugagg

SEQ ID NO: 440371 - RNA, 32 nt, Human
gccgugugcucugggcagugguuccuugggca

SEQ ID NO: 440372 - RNA, 32 nt, Human
gccguguggccauccggcucuaccuucagccg

SEQ ID NO: 440373 - RNA, 32 nt, Human
gccgugugugagaggagcaggagugagugugu

SEQ ID NO: 440374 - RNA, 32 nt, Human
gccguguguguucuucucugagcagcuccucc

SEQ ID NO: 440375 - RNA, 32 nt, Human
gccguguuacccaggcuagucacgaacuccug

SEQ ID NO: 440376 - RNA, 32 nt, Human
gccguguugagugaagcucuuggggccagcgu

SEQ ID NO: 440377 - RNA, 24 nt, Human
gccguguuggccagacuggucuca

SEQ ID NO: 440378 - RNA, 32 nt, Human
gccguguugugacuugccggcucugagauugg

SEQ ID NO: 440379 - RNA, 32 nt, Human
gccguguuucagcccugaugggccaagggaag

SEQ ID NO: 440380 - RNA, 32 nt, Human
gccguguuugugacccccuccugcccagcaac

SEQ ID NO: 440381 - RNA, 32 nt, Human
gccguguuugugucccugauuacuugagauua

SEQ ID NO: 440382 - RNA, 32 nt, Human
gccguuagcugcaggugugucuuuccaauaua

SEQ ID NO: 440383 - RNA, 18 nt, Human
gccguuagucacaaggca

SEQ ID NO: 440384 - RNA, 32 nt, Human
gccguuccuccacccgcuccucuuguggccag

SEQ ID NO: 440385 - RNA, 32 nt, Human
gccguuccuccaccucucagccauaucuuuca

SEQ ID NO: 440386 - RNA, 32 nt, Human
gccguugcacagacuguguuuaugacucaacc

SEQ ID NO: 440387 - RNA, 32 nt, Human
gccguugccagccugucucugcgcucgccauu

SEQ ID NO: 440388 - RNA, 32 nt, Human
gccguugcccaggcuggagugcgguggcauga

SEQ ID NO: 440389 - RNA, 32 nt, Human
gccguugcccccagacuuccuccuuuccgugu

SEQ ID NO: 440390 - RNA, 32 nt, Human
gccguugcucaucugcucaugucuguggcugc

SEQ ID NO: 440391 - RNA, 32 nt, Human
gccguugcuuccuauccugggcuuggaagaau

SEQ ID NO: 440392 - RNA, 32 nt, Human
gccguuggcaggcagggaagcaggaaccccac

SEQ ID NO: 440393 - RNA, 32 nt, Human
gccguuggcuuaugccuguaaucccagcacuu

SEQ ID NO: 440394 - RNA, 32 nt, Human
gccguugggacuuugauacccaggaagacuac

SEQ ID NO: 440395 - RNA, 32 nt, Human
gccguuuccgggaggcggagcucagaccccau

SEQ ID NO: 440396 - RNA, 19 nt, Human
gccguuuccugcgagccag

SEQ ID NO: 440397 - RNA, 32 nt, Human
gccguuuccugcuccagcuccagaccuugucu

SEQ ID NO: 440398 - RNA, 17 nt, Human
gccguuuccuucaggug

SEQ ID NO: 440399 - RNA, 32 nt, Human
gccguuuccuugggaacuggagugcaguauga

SEQ ID NO: 440400 - RNA, 17 nt, Human
gccguuucuccuuggua

SEQ ID NO: 440401 - RNA, 18 nt, Human
gccguuugaucuuugaua

SEQ ID NO: 440402 - RNA, 32 nt, Human
gccguuugcuuugccaaaccgacaaaagagag

SEQ ID NO: 440403 - RNA, 32 nt, Human
gccguuuggauggggaagggaaagacugggga

SEQ ID NO: 440404 - RNA, 32 nt, Human
gccguuuuccucauccuuucccucucccaguc

SEQ ID NO: 440405 - RNA, 32 nt, Human
gccguuuuccugcuuugucugccugcacauug

SEQ ID NO: 440406 - RNA, 32 nt, Human
gccuaaaaaguucagaugauggguccuugaac

SEQ ID NO: 440407 - RNA, 24 nt, Human
gccuaaaaucccagcuacucggga

SEQ ID NO: 440408 - RNA, 32 nt, Human
gccuaaagcuuaggcugguguccauguggaac

SEQ ID NO: 440409 - RNA, 32 nt, Human
gccuaaauauagaaaguauuugcucauuggcc

SEQ ID NO: 440410 - RNA, 32 nt, Human
gccuaacaacaguugaaguaaauaugagggaa

SEQ ID NO: 440411 - RNA, 32 nt, Human
gccuaacauggugaaaccccgucuccacuaaa

SEQ ID NO: 440412 - RNA, 32 nt, Human
gccuaaccagagagaggggcgugggagggaga

SEQ ID NO: 440413 - RNA, 32 nt, Human
gccuaaccugccgagaguccaucagccuccau

SEQ ID NO: 440414 - RNA, 25 nt, Human
gccuaaccuuucgccgaauggggca

SEQ ID NO: 440415 - RNA, 32 nt, Human
gccuaacgauuuugaugaaaaguuucccaagc

SEQ ID NO: 440416 - RNA, 18 nt, Human
gccuaacguuugaaccug

SEQ ID NO: 440417 - RNA, 32 nt, Human
gccuaacucaaccccacagacaagcacgcaca

SEQ ID NO: 440418 - RNA, 32 nt, Human
gccuaagagaucaaggcugcagugagccauga

SEQ ID NO: 440419 - RNA, 32 nt, Human
gccuaagagggcagccgccugaaggaacgcga

SEQ ID NO: 440420 - RNA, 32 nt, Human
gccuaagaugaagaggaucggaggcuugucag

SEQ ID NO: 440421 - RNA, 32 nt, Human
gccuaagcaacagcagcccucgcagcccgcca

SEQ ID NO: 440422 - RNA, 32 nt, Human
gccuaagcacagcuuguccugggugaaauguc

SEQ ID NO: 440423 - RNA, 32 nt, Human
gccuaagcacucaggccucccacucaucaacc

SEQ ID NO: 440424 - RNA, 32 nt, Human
gccuaagcccaggaggccaagucugcagugag

SEQ ID NO: 440425 - RNA, 32 nt, Human
gccuaagcuggucucaaacuccugggcucaag

SEQ ID NO: 440426 - RNA, 32 nt, Human
gccuaaggacagugaagucuggagcccaaagu

SEQ ID NO: 440427 - RNA, 32 nt, Human
gccuaaggacuuccaggucagccacccaccgc

SEQ ID NO: 440428 - RNA, 18 nt, Human
gccuaaggccucccagca

SEQ ID NO: 440429 - RNA, 32 nt, Human
gccuaagggaaacuguuggccgcugggcccgc

SEQ ID NO: 440430 - RNA, 32 nt, Human
gccuaagggagugggaaggaaaugggguguuu

SEQ ID NO: 440431 - RNA, 32 nt, Human
gccuaaggugaggcugagcugaaggaaugugg

SEQ ID NO: 440432 - RNA, 22 nt, Human
gccuaagguggagcagauccca

SEQ ID NO: 440433 - RNA, 32 nt, Human
gccuaaguccugcauuaacucaguccaaccau

SEQ ID NO: 440434 - RNA, 32 nt, Human
gccuaagugccacccuccucccuccaagccug

SEQ ID NO: 440435 - RNA, 25 nt, Human
gccuaauaaaggaggucucacaguc

SEQ ID NO: 440436 - RNA, 32 nt, Human
gccuaauaaauacauuucugcuuuauuaaaaa

SEQ ID NO: 440437 - RNA, 32 nt, Human
gccuaauccuugcccgccauguccgggggcuu

SEQ ID NO: 440438 - RNA, 32 nt, Human
gccuaaucuaggacugauggcagaaggguuug

SEQ ID NO: 440439 - RNA, 32 nt, Human
gccuaaugaucugcccaccucugccucccaaa

SEQ ID NO: 440440 - RNA, 32 nt, Human
gccuaaugcccagugggacugaucagacccgg

SEQ ID NO: 440441 - RNA, 32 nt, Human
gccuaauggaggaugagagaccacguggagga

SEQ ID NO: 440442 - RNA, 23 nt, Human
gccuaauuccaguauccuggaaa

SEQ ID NO: 440443 - RNA, 32 nt, Human
gccuaauucuaugccugucuuaauuuucuuuc

SEQ ID NO: 440444 - RNA, 32 nt, Human
gccuaauuuaccaaggaugaauucuuucaauu

SEQ ID NO: 440445 - RNA, 32 nt, Human
gccuaauuuuguaggacuuaaucuguugaaaa

SEQ ID NO: 440446 - RNA, 32 nt, Human
gccuacaagaccuggggcguccuggccagauc

SEQ ID NO: 440447 - RNA, 32 nt, Human
gccuacaaggcccugagggagacugcggaggg

SEQ ID NO: 440448 - RNA, 23 nt, Human
gccuacaaucccagcauuuggga

SEQ ID NO: 440449 - RNA, 19 nt, Human
gccuacaccguucaucagc

SEQ ID NO: 440450 - RNA, 17 nt, Human
gccuacaccuccaccuc

SEQ ID NO: 440451 - RNA, 32 nt, Human
gccuacacugcacccuggcuggcaggggugcu

SEQ ID NO: 440452 - RNA, 32 nt, Human
gccuacagacaguaccugcaggacagccaccu

SEQ ID NO: 440453 - RNA, 32 nt, Human
gccuacagcucccugcaggcugguggccgcuu

SEQ ID NO: 440454 - RNA, 30 nt, Human
gccuacagcuugcagggaguaaagcaggcc

SEQ ID NO: 440455 - RNA, 32 nt, Human
gccuacaggaugaugaaaccccaaggccuugg

SEQ ID NO: 440456 - RNA, 32 nt, Human
gccuacagugauguuuggaaucgaucaugcuu

SEQ ID NO: 440457 - RNA, 32 nt, Human
gccuacaguuauguucagucacacacacauac

SEQ ID NO: 440458 - RNA, 21 nt, Human
gccuacauagaagagugacag

SEQ ID NO: 440459 - RNA, 32 nt, Human
gccuacauauuuuaucuucugaucucacugaa

SEQ ID NO: 440460 - RNA, 32 nt, Human
gccuacaucaagacccaagugaacaaagagcu

SEQ ID NO: 440461 - RNA, 32 nt, Human
gccuacauccguggcagggcucuggacuggug

SEQ ID NO: 440462 - RNA, 21 nt, Human
gccuacaucugccacucagcc

SEQ ID NO: 440463 - RNA, 32 nt, Human
gccuacaugguugaaaccccaucucuacuaaa

SEQ ID NO: 440464 - RNA, 32 nt, Human
gccuacauguucucaugcaugucuaaccugau

SEQ ID NO: 440465 - RNA, 32 nt, Human
gccuacauuaaauaggagcagaucuuguggua

SEQ ID NO: 440466 - RNA, 32 nt, Human
gccuaccaagagaacuguggggaugugggaug

SEQ ID NO: 440467 - RNA, 32 nt, Human
gccuaccacaccuuccugccacugacucccac

SEQ ID NO: 440468 - RNA, 32 nt, Human
gccuaccagaccauugucagaaacacagcugg

SEQ ID NO: 440469 - RNA, 32 nt, Human
gccuaccaggagaaagcaguaggcuuccuuuc

SEQ ID NO: 440470 - RNA, 32 nt, Human
gccuaccauccaggaaaacuugugcuggaauu

SEQ ID NO: 440471 - RNA, 32 nt, Human
gccuacccagaaacagcaggagagagaagaaa

SEQ ID NO: 440472 - RNA, 32 nt, Human
gccuacccagacggcuuguuugcccagggcac

SEQ ID NO: 440473 - RNA, 32 nt, Human
gccuacccaugcagggacugggauucgaggac

SEQ ID NO: 440474 - RNA, 32 nt, Human
gccuacccccacuuuaccgaggccaacagccg

SEQ ID NO: 440475 - RNA, 32 nt, Human
gccuacccccgggagcccagagcccagcucuu

SEQ ID NO: 440476 - RNA, 18 nt, Human
gccuaccccugaacuuug

SEQ ID NO: 440477 - RNA, 32 nt, Human
gccuaccccugccccaugugucccccguuacc

SEQ ID NO: 440478 - RNA, 32 nt, Human
gccuaccccuggcaucagcaucaccugggugu

SEQ ID NO: 440479 - RNA, 32 nt, Human
gccuaccccuuguguuaccucccgccacacac

SEQ ID NO: 440480 - RNA, 32 nt, Human
gccuacccuuucucccgucucagggccuugau

SEQ ID NO: 440481 - RNA, 32 nt, Human
gccuaccuaagaauuugaguagugucuaaaca

SEQ ID NO: 440482 - RNA, 32 nt, Human
gccuaccuccaaguaauuuuaugaggaugaaa

SEQ ID NO: 440483 - RNA, 32 nt, Human
gccuaccucuuccuccacucauuuggguucag

SEQ ID NO: 440484 - RNA, 18 nt, Human
gccuaccugaggagcuuu

SEQ ID NO: 440485 - RNA, 32 nt, Human
gccuaccugcagcuguggcggcugcuccugua

SEQ ID NO: 440486 - RNA, 32 nt, Human
gccuaccugcauaaagaaaauaaaaucuuuua

SEQ ID NO: 440487 - RNA, 32 nt, Human
gccuaccugccauccccaccgcucagcgccuc

SEQ ID NO: 440488 - RNA, 32 nt, Human
gccuaccugccugagccauguucaccugccca

SEQ ID NO: 440489 - RNA, 32 nt, Human
gccuaccugccugccccaggccaugccugccu

SEQ ID NO: 440490 - RNA, 32 nt, Human
gccuaccugcgugaggauuggggccugagcac

SEQ ID NO: 440491 - RNA, 32 nt, Human
gccuaccugcuccaucuaaagcagaaaacucc

SEQ ID NO: 440492 - RNA, 32 nt, Human
gccuaccugcuccccacuccuucuccaagaag

SEQ ID NO: 440493 - RNA, 32 nt, Human
gccuaccugcugucgcccuuguacucgccgaa

SEQ ID NO: 440494 - RNA, 32 nt, Human
gccuacgagccaagaugcucagcuuuauaggu

SEQ ID NO: 440495 - RNA, 23 nt, Human
gccuacgagucaugccaccagcc

SEQ ID NO: 440496 - RNA, 22 nt, Human
gccuacgcaagagggcgggaca

SEQ ID NO: 440497 - RNA, 32 nt, Human
gccuacgcccaccuauggccagucccagagcc

SEQ ID NO: 440498 - RNA, 32 nt, Human
gccuacgcugccucugggcuggcuggccagug

SEQ ID NO: 440499 - RNA, 20 nt, Human
gccuacgcuggagugcagug

SEQ ID NO: 440500 - RNA, 21 nt, Human
gccuacgcuggagugcagugg

SEQ ID NO: 440501 - RNA, 32 nt, Human
gccuacgucugcuccucuccaaucccacacca

SEQ ID NO: 440502 - RNA, 19 nt, Human
gccuacguucccucaggug

SEQ ID NO: 440503 - RNA, 24 nt, Human
gccuacucaaucucucccaccuca

SEQ ID NO: 440504 - RNA, 32 nt, Human
gccuacuccaagaauggaggcuguaggaauau

SEQ ID NO: 440505 - RNA, 18 nt, Human
gccuacucugaaagcuca

SEQ ID NO: 440506 - RNA, 32 nt, Human
gccuacucugcaacucggcuucugagccaggc

SEQ ID NO: 440507 - RNA, 32 nt, Human
gccuacugcacuccagccugggcaacaaagug

SEQ ID NO: 440508 - RNA, 19 nt, Human
gccuacugccucggaucuc

SEQ ID NO: 440509 - RNA, 32 nt, Human
gccuacugggcagagcagcagagcaggcugcc

SEQ ID NO: 440510 - RNA, 32 nt, Human
gccuacuguaaaccccaagaugacauggucca

SEQ ID NO: 440511 - RNA, 17 nt, Human
gccuacuguagacucug

SEQ ID NO: 440512 - RNA, 32 nt, Human
gccuacugucaugagaguggggagacaggcag

SEQ ID NO: 440513 - RNA, 32 nt, Human
gccuacugugugucagugccugagauacaccu

SEQ ID NO: 440514 - RNA, 21 nt, Human
gccuacuguuagguuccuggg

SEQ ID NO: 440515 - RNA, 32 nt, Human
gccuacuucacagaaugauguggaaaucagug

SEQ ID NO: 440516 - RNA, 32 nt, Human
gccuacuuccuuccuguuggauaucauacuuc

SEQ ID NO: 440517 - RNA, 32 nt, Human
gccuacuugucugcucugagggagagugcgug

SEQ ID NO: 440518 - RNA, 32 nt, Human
gccuacuuucugcccggaucucuggcuccuca

SEQ ID NO: 440519 - RNA, 32 nt, Human
gccuacuuucuucuuuguaucucccuccuucc

SEQ ID NO: 440520 - RNA, 32 nt, Human
gccuacuuugagguggaaugccuccgaguuag

SEQ ID NO: 440521 - RNA, 32 nt, Human
gccuacuuugaugguagguuugaaugacgugu

SEQ ID NO: 440522 - RNA, 18 nt, Human
gccuacuuuucuucgaua

SEQ ID NO: 440523 - RNA, 32 nt, Human
gccuagaaaacaaagauucuguguuuuaccaa

SEQ ID NO: 440524 - RNA, 32 nt, Human
gccuagaaacuggaaugugcagauguugcaua

SEQ ID NO: 440525 - RNA, 32 nt, Human
gccuagaaagcccuugccuuccuuccucccac

SEQ ID NO: 440526 - RNA, 32 nt, Human
gccuagaacagggccuggugugcaguaggugc

SEQ ID NO: 440527 - RNA, 32 nt, Human
gccuagaacgcaccuccucugcaugacuaaua

SEQ ID NO: 440528 - RNA, 32 nt, Human
gccuagaagggaagggagagacuuacuuugga

SEQ ID NO: 440529 - RNA, 32 nt, Human
gccuagaagggccugacaugggacccaucugc

SEQ ID NO: 440530 - RNA, 32 nt, Human
gccuagaagguguggaggacucaccacgggca

SEQ ID NO: 440531 - RNA, 32 nt, Human
gccuagaaguuuucccucaucuguaaauguga

SEQ ID NO: 440532 - RNA, 20 nt, Human
gccuagaaucccagcuacuc

SEQ ID NO: 440533 - RNA, 23 nt, Human
gccuagaaucccagcuacucgga

SEQ ID NO: 440534 - RNA, 17 nt, Human
gccuagacauccaccuc

SEQ ID NO: 440535 - RNA, 32 nt, Human
gccuagaccagcagacagagccaggagaggcu

SEQ ID NO: 440536 - RNA, 32 nt, Human
gccuagaccccacaucucccacccucagccaa

SEQ ID NO: 440537 - RNA, 32 nt, Human
gccuagacuagaucccuuacccucucuccagu

SEQ ID NO: 440538 - RNA, 32 nt, Human
gccuagagacacaccucccugcucccuccccc

SEQ ID NO: 440539 - RNA, 32 nt, Human
gccuagagagaagagagggcccucaaauccca

SEQ ID NO: 440540 - RNA, 32 nt, Human
gccuagagauacugccugguguuuugcuuuuu

SEQ ID NO: 440541 - RNA, 32 nt, Human
gccuagagcaguuguaauaugugcaaagucau

SEQ ID NO: 440542 - RNA, 32 nt, Human
gccuagagcugaggagugaggggucagggcuc

SEQ ID NO: 440543 - RNA, 32 nt, Human
gccuagaggagaaaaggcgguccccgccgagu

SEQ ID NO: 440544 - RNA, 32 nt, Human
gccuagaggagcaccaucuacaguugugccau

SEQ ID NO: 440545 - RNA, 32 nt, Human
gccuagaggauguuucaugggaucccagccac

SEQ ID NO: 440546 - RNA, 32 nt, Human
gccuagaucccccaucuccuccuuccagccag

SEQ ID NO: 440547 - RNA, 32 nt, Human
gccuagaugagagagauagagagugaguacau

SEQ ID NO: 440548 - RNA, 32 nt, Human
gccuagauuugaccucuguccugggcuccugg

SEQ ID NO: 440549 - RNA, 32 nt, Human
gccuagcaacuguuuggcagucagagucccac

SEQ ID NO: 440550 - RNA, 32 nt, Human
gccuagcaagcacacccgugguugugaaaaua

SEQ ID NO: 440551 - RNA, 32 nt, Human
gccuagcaagcuccagccccagccgcugaccc

SEQ ID NO: 440552 - RNA, 19 nt, Human
gccuagcaccaguuuuuca

SEQ ID NO: 440553 - RNA, 32 nt, Human
gccuagcaccugcucuuggccuggugagcccc

SEQ ID NO: 440554 - RNA, 32 nt, Human
gccuagccacacugcacuguggccccuuggga

SEQ ID NO: 440555 - RNA, 21 nt, Human
gccuagccaccucccacccca

SEQ ID NO: 440556 - RNA, 32 nt, Human
gccuagcccaaagcaggccucuuugguugcuu

SEQ ID NO: 440557 - RNA, 18 nt, Human
gccuagcccacccugcug

SEQ ID NO: 440558 - RNA, 32 nt, Human
gccuagcccaccugcaggaagagauuuggcug

SEQ ID NO: 440559 - RNA, 16 nt, Human
gccuagccccuuggua

SEQ ID NO: 440560 - RNA, 21 nt, Human
gccuagcccgggagggaccug

SEQ ID NO: 440561 - RNA, 32 nt, Human
gccuagcccuggccuugaccucccaggagcgc

SEQ ID NO: 440562 - RNA, 18 nt, Human
gccuagcccuggggaccu

SEQ ID NO: 440563 - RNA, 32 nt, Human
gccuagccucucccucucccccagcuaguccc

SEQ ID NO: 440564 - RNA, 21 nt, Human
gccuagcgcugugcuaugcuc

SEQ ID NO: 440565 - RNA, 32 nt, Human
gccuagcucacugcuguuccucugcuugcacu

SEQ ID NO: 440566 - RNA, 17 nt, Human
gccuagcucaguucucc

SEQ ID NO: 440567 - RNA, 32 nt, Human
gccuagcucccagggcuuugugcagacggccu

SEQ ID NO: 440568 - RNA, 19 nt, Human
gccuagcugcccccaggga

SEQ ID NO: 440569 - RNA, 32 nt, Human
gccuagcugcugucacauuuuucuuguuuugu

SEQ ID NO: 440570 - RNA, 32 nt, Human
gccuagcuuuuccucccuuugugaaugagggg

SEQ ID NO: 440571 - RNA, 32 nt, Human
gccuaggaaaguuguccccuugaaugucagug

SEQ ID NO: 440572 - RNA, 23 nt, Human
gccuaggaaccagcugccugaga

SEQ ID NO: 440573 - RNA, 32 nt, Human
gccuaggaaccagcugccugagaccagggugc

SEQ ID NO: 440574 - RNA, 32 nt, Human
gccuaggaagaggaauggaacaaguagcaaag

SEQ ID NO: 440575 - RNA, 32 nt, Human
gccuaggaagucgaggcugcagugagcugaga

SEQ ID NO: 440576 - RNA, 23 nt, Human
gccuaggacaguggccugguccc

SEQ ID NO: 440577 - RNA, 32 nt, Human
gccuaggaccuuugugguagcagagucacugc

SEQ ID NO: 440578 - RNA, 32 nt, Human
gccuaggacguugaggcugcagugagcugugu

SEQ ID NO: 440579 - RNA, 32 nt, Human
gccuaggaggcuguaugccagagcucaucucu

SEQ ID NO: 440580 - RNA, 32 nt, Human
gccuaggaggucaaggcugcagugagccauga

SEQ ID NO: 440581 - RNA, 32 nt, Human
gccuaggagguugaggcugcagugagcuauga

SEQ ID NO: 440582 - RNA, 32 nt, Human
gccuaggagguugaggcugcagugagcuguga

SEQ ID NO: 440583 - RNA, 21 nt, Human
gccuaggaugacacuggcccc

SEQ ID NO: 440584 - RNA, 18 nt, Human
gccuaggauggccgcccc

SEQ ID NO: 440585 - RNA, 32 nt, Human
gccuaggcaaaaagagcaagacuccgucucaa

SEQ ID NO: 440586 - RNA, 32 nt, Human
gccuaggcaacagagugagacuuugucucaaa

SEQ ID NO: 440587 - RNA, 32 nt, Human
gccuaggcaacagugagacucuuuguuuuggg

SEQ ID NO: 440588 - RNA, 32 nt, Human
gccuaggcagggcugggaugaggcuuguacaa

SEQ ID NO: 440589 - RNA, 21 nt, Human
gccuaggccagagugcagugg

SEQ ID NO: 440590 - RNA, 31 nt, Human
gccuaggccaugucuccugguucaggaacac

SEQ ID NO: 440591 - RNA, 32 nt, Human
gccuaggccgaacuuccggcucucacugcuag

SEQ ID NO: 440592 - RNA, 32 nt, Human
gccuaggccggucuugaacuccugggcucaag

SEQ ID NO: 440593 - RNA, 32 nt, Human
gccuaggccucauccuccucuuugccagucac

SEQ ID NO: 440594 - RNA, 32 nt, Human
gccuaggcgcggcccgcggagccagacguguu

SEQ ID NO: 440595 - RNA, 20 nt, Human
gccuaggcggaguacagugg

SEQ ID NO: 440596 - RNA, 32 nt, Human
gccuaggcucaagugaucugcccaccucaguc

SEQ ID NO: 440597 - RNA, 21 nt, Human
gccuaggcugaagcacagugg

SEQ ID NO: 440598 - RNA, 23 nt, Human
gccuaggcugaagcacaguggug

SEQ ID NO: 440599 - RNA, 32 nt, Human
gccuaggcugaccuugaacuccugggcucaag

SEQ ID NO: 440600 - RNA, 20 nt, Human
gccuaggcugagugcagugg

SEQ ID NO: 440601 - RNA, 23 nt, Human
gccuaggcugagugcaguggugu

SEQ ID NO: 440602 - RNA, 21 nt, Human
gccuaggcuggaaugcagugg

SEQ ID NO: 440603 - RNA, 21 nt, Human
gccuaggcuggaguacagugg

SEQ ID NO: 440604 - RNA, 23 nt, Human
gccuaggcuggaguacaguggug

SEQ ID NO: 440605 - RNA, 21 nt, Human
gccuaggcuggagugaagugg

SEQ ID NO: 440606 - RNA, 18 nt, Human
gccuaggcuggagugcaa

SEQ ID NO: 440607 - RNA, 24 nt, Human
gccuaggcuggagugcaacagugu

SEQ ID NO: 440608 - RNA, 21 nt, Human
gccuaggcuggagugcaaugg

SEQ ID NO: 440609 - RNA, 23 nt, Human
gccuaggcuggagugcaauggug

SEQ ID NO: 440610 - RNA, 19 nt, Human
gccuaggcuggagugcagu

SEQ ID NO: 440611 - RNA, 20 nt, Human
gccuaggcuggagugcagug

SEQ ID NO: 440612 - RNA, 21 nt, Human
gccuaggcuggagugcagugg

SEQ ID NO: 440613 - RNA, 24 nt, Human
gccuaggcuggagugcaguggcgu

SEQ ID NO: 440614 - RNA, 23 nt, Human
gccuaggcuggagugcaguggug

SEQ ID NO: 440615 - RNA, 24 nt, Human
gccuaggcuggagugcaguggugu

SEQ ID NO: 440616 - RNA, 32 nt, Human
gccuaggcuggucucuaaccacucaagcaaac

SEQ ID NO: 440617 - RNA, 32 nt, Human
gccuagggaccccugcucccagccugcugaga

SEQ ID NO: 440618 - RNA, 32 nt, Human
gccuagggcagaaaggaagugggaauggcgaa

SEQ ID NO: 440619 - RNA, 32 nt, Human
gccuaggggcccugaucgcccaccugccugga

SEQ ID NO: 440620 - RNA, 32 nt, Human
gccuaggggcugggagcugccugcugccauag

SEQ ID NO: 440621 - RNA, 24 nt, Human
gccuagggggcagagggugcagug

SEQ ID NO: 440622 - RNA, 32 nt, Human
gccuagggggcagagggugcaguggcagugug

SEQ ID NO: 440623 - RNA, 32 nt, Human
gccuaggggguggcagcgggcagugcggggcg

SEQ ID NO: 440624 - RNA, 32 nt, Human
gccuaggguggcaggagccagggaggaguggg

SEQ ID NO: 440625 - RNA, 32 nt, Human
gccuagguaacauagugagacccccuaucucu

SEQ ID NO: 440626 - RNA, 32 nt, Human
gccuaggugaagaccuggaaaaggaaggguua

SEQ ID NO: 440627 - RNA, 32 nt, Human
gccuaggugaagccuacuacaagaaugccaag

SEQ ID NO: 440628 - RNA, 22 nt, Human
gccuaggugccuggacccaggg

SEQ ID NO: 440629 - RNA, 32 nt, Human
gccuaggugguucaccuuuccccaauuuguuc

SEQ ID NO: 440630 - RNA, 32 nt, Human
gccuaggugugggcugggcauugccuacacgu

SEQ ID NO: 440631 - RNA, 32 nt, Human
gccuagguuuuaagcaggagaauagcugagaa

SEQ ID NO: 440632 - RNA, 32 nt, Human
gccuaguauuaaaacugauaaaagcaaagcca

SEQ ID NO: 440633 - RNA, 32 nt, Human
gccuagucacuagcccagcaugucaacuuugg

SEQ ID NO: 440634 - RNA, 32 nt, Human
gccuagucaggcuuaugcaaugcaguggauag

SEQ ID NO: 440635 - RNA, 32 nt, Human
gccuagucauuauuugcugucggguuuccagu

SEQ ID NO: 440636 - RNA, 32 nt, Human
gccuagucucaaacuccuggguucaagcaauc

SEQ ID NO: 440637 - RNA, 32 nt, Human
gccuagucuuccucuguugcuguacauauauu

SEQ ID NO: 440638 - RNA, 32 nt, Human
gccuagugacuuuuacacaguugugaagaucc

SEQ ID NO: 440639 - RNA, 32 nt, Human
gccuagugagggcugcaagaccauccugcccg

SEQ ID NO: 440640 - RNA, 32 nt, Human
gccuagugucaucaaccgggagaggaaaaaga

SEQ ID NO: 440641 - RNA, 22 nt, Human
gccuaguucccacaucuggaaa

SEQ ID NO: 440642 - RNA, 32 nt, Human
gccuaguuuugcucugggcaguguugcugaaa

SEQ ID NO: 440643 - RNA, 23 nt, Human
gccuauaaccccagcuauuuggg

SEQ ID NO: 440644 - RNA, 24 nt, Human
gccuauaaccccagcuauuuggga

SEQ ID NO: 440645 - RNA, 32 nt, Human
gccuauaaggaagagagaagcugucuguacuu

SEQ ID NO: 440646 - RNA, 24 nt, Human
gccuauaaucccagcaauuuggga

SEQ ID NO: 440647 - RNA, 20 nt, Human
gccuauaaucccagcacuuu

SEQ ID NO: 440648 - RNA, 23 nt, Human
gccuauaaucccagccacgcggg

SEQ ID NO: 440649 - RNA, 21 nt, Human
gccuauaaucccagcuacuca

SEQ ID NO: 440650 - RNA, 23 nt, Human
gccuauaaucccagcuacucaga

SEQ ID NO: 440651 - RNA, 23 nt, Human
gccuauaaucccagcuacucagg

SEQ ID NO: 440652 - RNA, 24 nt, Human
gccuauaaucccagcuacucagga

SEQ ID NO: 440653 - RNA, 23 nt, Human
gccuauaaucccagcuacucgag

SEQ ID NO: 440654 - RNA, 23 nt, Human
gccuauaaucccagcuacucggg

SEQ ID NO: 440655 - RNA, 24 nt, Human
gccuauaaucccagcuacucggga

SEQ ID NO: 440656 - RNA, 22 nt, Human
gccuauaaucccagcuacuggg

SEQ ID NO: 440657 - RNA, 24 nt, Human
gccuauaaucccagcuacugggga

SEQ ID NO: 440658 - RNA, 23 nt, Human
gccuauaaucccagcuacuuagg

SEQ ID NO: 440659 - RNA, 24 nt, Human
gccuauaaucccagcuacuuagga

SEQ ID NO: 440660 - RNA, 21 nt, Human
gccuauaaucccagcuacuug

SEQ ID NO: 440661 - RNA, 24 nt, Human
gccuauaaucccagcuacuugaga

SEQ ID NO: 440662 - RNA, 23 nt, Human
gccuauaaucccagcuacuuggg

SEQ ID NO: 440663 - RNA, 24 nt, Human
gccuauaaucccagcuacuuggga

SEQ ID NO: 440664 - RNA, 24 nt, Human
gccuauaaucccagcuauucugga

SEQ ID NO: 440665 - RNA, 24 nt, Human
gccuauaaucccagcuauuuggga

SEQ ID NO: 440666 - RNA, 23 nt, Human
gccuauaaucccagcuucuuggg

SEQ ID NO: 440667 - RNA, 24 nt, Human
gccuauaaucccagcuucuuggga

SEQ ID NO: 440668 - RNA, 23 nt, Human
gccuauaaucccagguacucagg

SEQ ID NO: 440669 - RNA, 23 nt, Human
gccuauaaucccagguacuuggg

SEQ ID NO: 440670 - RNA, 24 nt, Human
gccuauaaucccagguacuuggga

SEQ ID NO: 440671 - RNA, 20 nt, Human
gccuauaaucccaguacuuu

SEQ ID NO: 440672 - RNA, 23 nt, Human
gccuauaaucccggcuacucggg

SEQ ID NO: 440673 - RNA, 24 nt, Human
gccuauaaucccggcuacucggga

SEQ ID NO: 440674 - RNA, 23 nt, Human
gccuauaaucucagcuacuuggg

SEQ ID NO: 440675 - RNA, 24 nt, Human
gccuauaaucucagcuacuuggga

SEQ ID NO: 440676 - RNA, 32 nt, Human
gccuauacaagacagugaagugaccucucugu

SEQ ID NO: 440677 - RNA, 21 nt, Human
gccuauaccuucuucacccca

SEQ ID NO: 440678 - RNA, 24 nt, Human
gccuauagccccagcuacuuggga

SEQ ID NO: 440679 - RNA, 24 nt, Human
gccuauagucccaacuacuaggga

SEQ ID NO: 440680 - RNA, 24 nt, Human
gccuauagucccaacuacuuagag

SEQ ID NO: 440681 - RNA, 24 nt, Human
gccuauagucccagcaacuuggga

SEQ ID NO: 440682 - RNA, 24 nt, Human
gccuauagucccagcacuuuggga

SEQ ID NO: 440683 - RNA, 23 nt, Human
gccuauagucccagccacuagga

SEQ ID NO: 440684 - RNA, 24 nt, Human
gccuauagucccagccacucaaga

SEQ ID NO: 440685 - RNA, 23 nt, Human
gccuauagucccagccacuuggg

SEQ ID NO: 440686 - RNA, 24 nt, Human
gccuauagucccagccacuuggga

SEQ ID NO: 440687 - RNA, 23 nt, Human
gccuauagucccagcuacucagg

SEQ ID NO: 440688 - RNA, 24 nt, Human
gccuauagucccagcuacucagga

SEQ ID NO: 440689 - RNA, 24 nt, Human
gccuauagucccagcuacuccaga

SEQ ID NO: 440690 - RNA, 23 nt, Human
gccuauagucccagcuacucggg

SEQ ID NO: 440691 - RNA, 24 nt, Human
gccuauagucccagcuacucggga

SEQ ID NO: 440692 - RNA, 21 nt, Human
gccuauagucccagcuacuug

SEQ ID NO: 440693 - RNA, 24 nt, Human
gccuauagucccagcuacuuggga

SEQ ID NO: 440694 - RNA, 24 nt, Human
gccuauagucccagcuacuugggg

SEQ ID NO: 440695 - RNA, 23 nt, Human
gccuauagucccagcugcucagg

SEQ ID NO: 440696 - RNA, 24 nt, Human
gccuauagucccagcugcucagga

SEQ ID NO: 440697 - RNA, 24 nt, Human
gccuauagucccagcugcugggga

SEQ ID NO: 440698 - RNA, 24 nt, Human
gccuauaguuuuagcuacuuggga

SEQ ID NO: 440699 - RNA, 32 nt, Human
gccuauauccaggacgcacagaagcgccucac

SEQ ID NO: 440700 - RNA, 32 nt, Human
gccuauaucccagcuacugggagguugaagca

SEQ ID NO: 440701 - RNA, 23 nt, Human
gccuauauucuagcuacucagga

SEQ ID NO: 440702 - RNA, 32 nt, Human
gccuauauucuagcuacucaggaggcugagau

SEQ ID NO: 440703 - RNA, 32 nt, Human
gccuauauuuuucauagagcucaugagcauuu

SEQ ID NO: 440704 - RNA, 32 nt, Human
gccuaucacacucuucucacuggcagagugug

SEQ ID NO: 440705 - RNA, 32 nt, Human
gccuaucagaagcagaaggagcagcugcggca

SEQ ID NO: 440706 - RNA, 32 nt, Human
gccuaucaggaagccucuaaaaugggguguag

SEQ ID NO: 440707 - RNA, 32 nt, Human
gccuaucaggagaacccccagaugaucacagu

SEQ ID NO: 440708 - RNA, 32 nt, Human
gccuauccaagugccaggaagggaagcacuac

SEQ ID NO: 440709 - RNA, 17 nt, Human
gccuauccugaauuuug

SEQ ID NO: 440710 - RNA, 32 nt, Human
gccuauccugggaccuccacacuccugguucu

SEQ ID NO: 440711 - RNA, 17 nt, Human
gccuaucuaaaauucug

SEQ ID NO: 440712 - RNA, 32 nt, Human
gccuaucuccauccuccagugugacucaggca

SEQ ID NO: 440713 - RNA, 32 nt, Human
gccuaucugcugaccacaaccuugccacaccu

SEQ ID NO: 440714 - RNA, 32 nt, Human
gccuaucuggaagcuccuggaucugaguucuc

SEQ ID NO: 440715 - RNA, 17 nt, Human
gccuaucuugaacuuug

SEQ ID NO: 440716 - RNA, 32 nt, Human
gccuaugaccauugcaacaaccucucaccauc

SEQ ID NO: 440717 - RNA, 32 nt, Human
gccuaugagaaaagggccaggauagaagagcc

SEQ ID NO: 440718 - RNA, 32 nt, Human
gccuaugagaaaagggccaggauagaagaggu

SEQ ID NO: 440719 - RNA, 32 nt, Human
gccuaugauuuagcuggcaggccagguuuucu

SEQ ID NO: 440720 - RNA, 32 nt, Human
gccuaugcaaguucauuuaagccucagggcug

SEQ ID NO: 440721 - RNA, 16 nt, Human
gccuaugcagcaggug

SEQ ID NO: 440722 - RNA, 22 nt, Human
gccuaugccaagucccuggaaa

SEQ ID NO: 440723 - RNA, 17 nt, Human
gccuaugccaccaggua

SEQ ID NO: 440724 - RNA, 32 nt, Human
gccuaugccacuccaucuggacauuuaaugaa

SEQ ID NO: 440725 - RNA, 27 nt, Human
gccuaugcccugagccauggcugcuga

SEQ ID NO: 440726 - RNA, 32 nt, Human
gccuauggcugaaggcggaggugcagggcagc

SEQ ID NO: 440727 - RNA, 32 nt, Human
gccuaugggaaccaaaagaaucaagcugaacc

SEQ ID NO: 440728 - RNA, 30 nt, Human
gccuaugggggccacagggucccagcagag

SEQ ID NO: 440729 - RNA, 32 nt, Human
gccuaugggucaaaauaaugaaauccaccccu

SEQ ID NO: 440730 - RNA, 24 nt, Human
gccuauggucccagcuacucagga

SEQ ID NO: 440731 - RNA, 32 nt, Human
gccuaugugguguuuggcaaaacaugccccug

SEQ ID NO: 440732 - RNA, 32 nt, Human
gccuauguucucuccuaggcagaccuaucaac

SEQ ID NO: 440733 - RNA, 32 nt, Human
gccuauuaaggagguccaaggggugaguccca

SEQ ID NO: 440734 - RNA, 32 nt, Human
gccuauuaguccaugaagaagcuguauuuauu

SEQ ID NO: 440735 - RNA, 23 nt, Human
gccuauucaguuccuuuguuugg

SEQ ID NO: 440736 - RNA, 20 nt, Human
gccuauucuuucacccucug

SEQ ID NO: 440737 - RNA, 32 nt, Human
gccuauucuuucucccaccauuuugggcugac

SEQ ID NO: 440738 - RNA, 32 nt, Human
gccuauugaaucuuccuugcucuuucauuugc

SEQ ID NO: 440739 - RNA, 32 nt, Human
gccuauuuaauauguacacauauauucacuac

SEQ ID NO: 440740 - RNA, 32 nt, Human
gccuauuucugcuccucucuucucucuuggac

SEQ ID NO: 440741 - RNA, 32 nt, Human
gccuauuugcccacaggcuuugcuucucuccc

SEQ ID NO: 440742 - RNA, 21 nt, Human
gccuauuugucuugccugcug

SEQ ID NO: 440743 - RNA, 20 nt, Human
gccuauuuuagagaacuuug

SEQ ID NO: 440744 - RNA, 32 nt, Human
gccuauuuuggagcuuccccuguuaggaagga

SEQ ID NO: 440745 - RNA, 19 nt, Human
gccuauuuuguuccugcug

SEQ ID NO: 440746 - RNA, 32 nt, Human
gccuauuuuuauaccagcaccaugcaguuuug

SEQ ID NO: 440747 - RNA, 23 nt, Human
gccucaaaaagaguagcuccuug

SEQ ID NO: 440748 - RNA, 32 nt, Human
gccucaaaccgcuccaaauauccacuugcaaa

SEQ ID NO: 440749 - RNA, 32 nt, Human
gccucaaacgaaagaaccagcccagggagcac

SEQ ID NO: 440750 - RNA, 22 nt, Human
gccucaaacucccgaccucagg

SEQ ID NO: 440751 - RNA, 21 nt, Human
gccucaaacuccugggcucaa

SEQ ID NO: 440752 - RNA, 32 nt, Human
gccucaaacuccugggcucaagcaauccuccc

SEQ ID NO: 440753 - RNA, 32 nt, Human
gccucaaacuccugggcucaagcaauccuccu

SEQ ID NO: 440754 - RNA, 32 nt, Human
gccucaaacuccuggguucaaguaacccuccc

SEQ ID NO: 440755 - RNA, 21 nt, Human
gccucaaaggccgccaucuug

SEQ ID NO: 440756 - RNA, 32 nt, Human
gccucaaaguauugagauuacaggcaugagcc

SEQ ID NO: 440757 - RNA, 22 nt, Human
gccucaaaguuguaguaccuca

SEQ ID NO: 440758 - RNA, 21 nt, Human
gccucaaauuccugggcucaa

SEQ ID NO: 440759 - RNA, 32 nt, Human
gccucaacauggagaaaccccaucucuacuaa

SEQ ID NO: 440760 - RNA, 32 nt, Human
gccucaacauggagaaaccccgucucuacuaa

SEQ ID NO: 440761 - RNA, 32 nt, Human
gccucaaccaaggagcagaggggugcggguaa

SEQ ID NO: 440762 - RNA, 32 nt, Human
gccucaaccccuccccugcacugagauuauuu

SEQ ID NO: 440763 - RNA, 32 nt, Human
gccucaaccguagcugcuacagucuccaggca

SEQ ID NO: 440764 - RNA, 32 nt, Human
gccucaaccucccagguucaagcgauucuccu

SEQ ID NO: 440765 - RNA, 32 nt, Human
gccucaaccuccuggguucaagugauucuccc

SEQ ID NO: 440766 - RNA, 32 nt, Human
gccucaaccuggaccugacaccaacuucgccg

SEQ ID NO: 440767 - RNA, 32 nt, Human
gccucaaccuucuggguucaagcgauccuccc

SEQ ID NO: 440768 - RNA, 24 nt, Human
gccucaacguccucaucugucaaa

SEQ ID NO: 440769 - RNA, 22 nt, Human
gccucaacugcugccccaggca

SEQ ID NO: 440770 - RNA, 32 nt, Human
gccucaacuuaggaugggcaacugugucaagu

SEQ ID NO: 440771 - RNA, 32 nt, Human
gccucaacuuccucaucugcaaaaucagagca

SEQ ID NO: 440772 - RNA, 21 nt, Human
gccucaacuuccuggacucaa

SEQ ID NO: 440773 - RNA, 21 nt, Human
gccucaacuuccugggcucaa

SEQ ID NO: 440774 - RNA, 24 nt, Human
gccucaagagauccucucaccuca

SEQ ID NO: 440775 - RNA, 32 nt, Human
gccucaagaggaagauagacaggaggaggagg

SEQ ID NO: 440776 - RNA, 32 nt, Human
gccucaagaggugcacugcggugaccagugga

SEQ ID NO: 440777 - RNA, 24 nt, Human
gccucaagcaacccuccugccuca

SEQ ID NO: 440778 - RNA, 24 nt, Human
gccucaagcaauccacccaccuca

SEQ ID NO: 440779 - RNA, 24 nt, Human
gccucaagcaauccgccuaccuca

SEQ ID NO: 440780 - RNA, 24 nt, Human
gccucaagcaauccucccaccuca

SEQ ID NO: 440781 - RNA, 24 nt, Human
gccucaagcaauccucccaccuua

SEQ ID NO: 440782 - RNA, 24 nt, Human
gccucaagcaauccuccugccuca

SEQ ID NO: 440783 - RNA, 24 nt, Human
gccucaagcaauccuuccaccuca

SEQ ID NO: 440784 - RNA, 21 nt, Human
gccucaagcaguccccaccuc

SEQ ID NO: 440785 - RNA, 24 nt, Human
gccucaagcaguccucccaccuca

SEQ ID NO: 440786 - RNA, 24 nt, Human
gccucaagcaguccucccaccuua

SEQ ID NO: 440787 - RNA, 23 nt, Human
gccucaagcaguccucccacuuc

SEQ ID NO: 440788 - RNA, 22 nt, Human
gccucaagcaguccuccugucu

SEQ ID NO: 440789 - RNA, 32 nt, Human
gccucaagccaagauagugaauuuauaugaag

SEQ ID NO: 440790 - RNA, 24 nt, Human
gccucaagccauccucccaccuca

SEQ ID NO: 440791 - RNA, 23 nt, Human
gccucaagcgauccucccaccuc

SEQ ID NO: 440792 - RNA, 24 nt, Human
gccucaagcgauccucccaccuca

SEQ ID NO: 440793 - RNA, 31 nt, Human
gccucaagcuagagagaaaagagagugcgcu

SEQ ID NO: 440794 - RNA, 23 nt, Human
gccucaagcuggcagccuggcca

SEQ ID NO: 440795 - RNA, 24 nt, Human
gccucaagcuguccucccaucuca

SEQ ID NO: 440796 - RNA, 32 nt, Human
gccucaaggagcagaggaaggggcuggugacc

SEQ ID NO: 440797 - RNA, 31 nt, Human
gccucaaggcacuucuaggaccugccucuuc

SEQ ID NO: 440798 - RNA, 32 nt, Human
gccucaaggcuuuggcaagaucaaaggguugc

SEQ ID NO: 440799 - RNA, 32 nt, Human
gccucaagggagcgaggcgggagggugugugu

SEQ ID NO: 440800 - RNA, 21 nt, Human
gccucaagggcucccagggca

SEQ ID NO: 440801 - RNA, 32 nt, Human
gccucaaguaauccuccugccucagccuccca

SEQ ID NO: 440802 - RNA, 23 nt, Human
gccucaagucauuccccaccuua

SEQ ID NO: 440803 - RNA, 24 nt, Human
gccucaagugauccacccaccuca

SEQ ID NO: 440804 - RNA, 24 nt, Human
gccucaagugauccucccaccuua

SEQ ID NO: 440805 - RNA, 23 nt, Human
gccucaagugauccuccugccuc

SEQ ID NO: 440806 - RNA, 24 nt, Human
gccucaagugauccuccugccuca

SEQ ID NO: 440807 - RNA, 24 nt, Human
gccucaagugauccuccugccuua

SEQ ID NO: 440808 - RNA, 32 nt, Human
gccucaagugaucugccgccucagcuucucaa

SEQ ID NO: 440809 - RNA, 24 nt, Human
gccucaagugauucuccugccuca

SEQ ID NO: 440810 - RNA, 24 nt, Human
gccucaagugguccuccugccuca

SEQ ID NO: 440811 - RNA, 24 nt, Human
gccucaaguguucugcccaccuca

SEQ ID NO: 440812 - RNA, 32 nt, Human
gccucaaucgcuaaguuccacucuccauccuc

SEQ ID NO: 440813 - RNA, 19 nt, Human
gccucaaucucccacccca

SEQ ID NO: 440814 - RNA, 23 nt, Human
gccucaaucucccaucugugaaa

SEQ ID NO: 440815 - RNA, 32 nt, Human
gccucaaugccaccuccccacaccacccaagc

SEQ ID NO: 440816 - RNA, 32 nt, Human
gccucaaugucacuuggcggcgggguggggug

SEQ ID NO: 440817 - RNA, 32 nt, Human
gccucaauguuuacugugccuuuguuuuugcu

SEQ ID NO: 440818 - RNA, 23 nt, Human
gccucaauuuccucaucuugaaa

SEQ ID NO: 440819 - RNA, 24 nt, Human
gccucaauuucuucaucugucaaa

SEQ ID NO: 440820 - RNA, 32 nt, Human
gccucacaacagccuccacaggcacagcucca

SEQ ID NO: 440821 - RNA, 32 nt, Human
gccucacaagaggcuucuuccacggggcuuga

SEQ ID NO: 440822 - RNA, 32 nt, Human
gccucacacagccgaggcgggcucggcgcaca

SEQ ID NO: 440823 - RNA, 32 nt, Human
gccucacacccugucuggcaugccugacuguu

SEQ ID NO: 440824 - RNA, 32 nt, Human
gccucacaccuguaaucccagcacuuuggggg

SEQ ID NO: 440825 - RNA, 32 nt, Human
gccucacaccuguaaucucagcacuuugggug

SEQ ID NO: 440826 - RNA, 32 nt, Human
gccucacaccuguaauuccagcacuuugggag

SEQ ID NO: 440827 - RNA, 32 nt, Human
gccucacacgcagccacuucuucaagagcugc

SEQ ID NO: 440828 - RNA, 32 nt, Human
gccucacagaaaacauuguuccucccuccaca

SEQ ID NO: 440829 - RNA, 22 nt, Human
gccucacagaagagguggggac

SEQ ID NO: 440830 - RNA, 32 nt, Human
gccucacagaguuuagacaugacuagccagcu

SEQ ID NO: 440831 - RNA, 32 nt, Human
gccucacagauguccacaaaaugccuuauuuu

SEQ ID NO: 440832 - RNA, 32 nt, Human
gccucacagcagacucuccacgcccagcuagc

SEQ ID NO: 440833 - RNA, 32 nt, Human
gccucacagcagauucuucacgcccagccucu

SEQ ID NO: 440834 - RNA, 32 nt, Human
gccucacagcagauucuucacgcccagcuucu

SEQ ID NO: 440835 - RNA, 32 nt, Human
gccucacagcggacucuccacgcccagcuagc

SEQ ID NO: 440836 - RNA, 32 nt, Human
gccucacagcugacagcgccagucccaggucc

SEQ ID NO: 440837 - RNA, 32 nt, Human
gccucacaggaaaaaugauccgaagacgaaca

SEQ ID NO: 440838 - RNA, 32 nt, Human
gccucacaggcagacucgcagacggggcagug

SEQ ID NO: 440839 - RNA, 32 nt, Human
gccucacaggcagaguuccagggucagagagc

SEQ ID NO: 440840 - RNA, 32 nt, Human
gccucacaggcgcccgcaaguguucaccacga

SEQ ID NO: 440841 - RNA, 16 nt, Human
gccucacagggaggca

SEQ ID NO: 440842 - RNA, 32 nt, Human
gccucacagucugcaagccugcucacccacug

SEQ ID NO: 440843 - RNA, 32 nt, Human
gccucacagugaccucuccaggcacagcuccu

SEQ ID NO: 440844 - RNA, 32 nt, Human
gccucacaguggacucuccacgcccagcuagc

SEQ ID NO: 440845 - RNA, 32 nt, Human
gccucacaucuguaaucccaacacuuugggag

SEQ ID NO: 440846 - RNA, 32 nt, Human
gccucacaucuguaaucccagcacuuugggag

SEQ ID NO: 440847 - RNA, 32 nt, Human
gccucaccaaaguguugggauuacugguguga

SEQ ID NO: 440848 - RNA, 32 nt, Human
gccucacccaagaagacuggaaagagacauau

SEQ ID NO: 440849 - RNA, 32 nt, Human
gccucacccacugcagggccaggcucucaguc

SEQ ID NO: 440850 - RNA, 32 nt, Human
gccucacccaguagcugggaaauuaggugggg

SEQ ID NO: 440851 - RNA, 32 nt, Human
gccucaccccggcuggagucaugugggccgcu

SEQ ID NO: 440852 - RNA, 32 nt, Human
gccucacccuggggacaugccuguugauaaca

SEQ ID NO: 440853 - RNA, 32 nt, Human
gccucaccgcgaccuggcugagcuucagucau

SEQ ID NO: 440854 - RNA, 32 nt, Human
gccucaccgugccuucagaggcuucuuccugc

SEQ ID NO: 440855 - RNA, 32 nt, Human
gccucaccuaggaagugguaucugagcggaga

SEQ ID NO: 440856 - RNA, 32 nt, Human
gccucaccugcagggcguccccagcuaacacc

SEQ ID NO: 440857 - RNA, 32 nt, Human
gccucaccuguaauccaaguacuuugggaggc

SEQ ID NO: 440858 - RNA, 32 nt, Human
gccucacgcacucuccccuugggacaguagug

SEQ ID NO: 440859 - RNA, 32 nt, Human
gccucacgccuguaaucccagcacuuugggag

SEQ ID NO: 440860 - RNA, 32 nt, Human
gccucacgccugucaucccagcacuuugggag

SEQ ID NO: 440861 - RNA, 32 nt, Human
gccucacgugcagacccugccaugcagaccca

SEQ ID NO: 440862 - RNA, 32 nt, Human
gccucacuacaaccccugccuccuggguuuua

SEQ ID NO: 440863 - RNA, 32 nt, Human
gccucacucauggccuuccuauguuugggaaa

SEQ ID NO: 440864 - RNA, 22 nt, Human
gccucacuccaccuuccuucca

SEQ ID NO: 440865 - RNA, 32 nt, Human
gccucacuccccucagccccugccgaccuuag

SEQ ID NO: 440866 - RNA, 32 nt, Human
gccucacugcaaccuccgccucccagguucaa

SEQ ID NO: 440867 - RNA, 32 nt, Human
gccucacugcaaccuucaccuaccgaguucaa

SEQ ID NO: 440868 - RNA, 32 nt, Human
gccucacugcaacgccugccucucaggcucaa

SEQ ID NO: 440869 - RNA, 32 nt, Human
gccucacugcaacuugcgccucccggguucaa

SEQ ID NO: 440870 - RNA, 32 nt, Human
gccucacugcaagcacugcaugggcaagcuug

SEQ ID NO: 440871 - RNA, 32 nt, Human
gccucacugcauaagggaugggaucagagaac

SEQ ID NO: 440872 - RNA, 32 nt, Human
gccucacuugaccuagucauggcaggacaacu

SEQ ID NO: 440873 - RNA, 32 nt, Human
gccucacuuucuucuagcugagcuuuaaauca

SEQ ID NO: 440874 - RNA, 32 nt, Human
gccucagaaaacagcaggcuguuucucagauc

SEQ ID NO: 440875 - RNA, 19 nt, Human
gccucagaacagaugcaug

SEQ ID NO: 440876 - RNA, 32 nt, Human
gccucagaacccacccucccugggggacccuc

SEQ ID NO: 440877 - RNA, 24 nt, Human
gccucagaagccugcgaccuuggg

SEQ ID NO: 440878 - RNA, 32 nt, Human
gccucagaaguuguugugcaauaaaagguuga

SEQ ID NO: 440879 - RNA, 21 nt, Human
gccucagacaagaacucuggg

SEQ ID NO: 440880 - RNA, 21 nt, Human
gccucagacacaggccccugg

SEQ ID NO: 440881 - RNA, 22 nt, Human
gccucagacacccugccugugg

SEQ ID NO: 440882 - RNA, 23 nt, Human
gccucagaccacacagggugcag

SEQ ID NO: 440883 - RNA, 21 nt, Human
gccucagacgagacccaaggg

SEQ ID NO: 440884 - RNA, 32 nt, Human
gccucagacuccaagcuaggcugaggcucagg

SEQ ID NO: 440885 - RNA, 32 nt, Human
gccucagacuccugaguaucugggaccacagg

SEQ ID NO: 440886 - RNA, 32 nt, Human
gccucagacuccuggguucaagcaauccuccu

SEQ ID NO: 440887 - RNA, 32 nt, Human
gccucagacugucaccccuaccaguucccaag

SEQ ID NO: 440888 - RNA, 32 nt, Human
gccucagagaagauggagucuugcucugucac

SEQ ID NO: 440889 - RNA, 32 nt, Human
gccucagagauguggaggagaagccaggcaga

SEQ ID NO: 440890 - RNA, 23 nt, Human
gccucagagccaacacccgcucg

SEQ ID NO: 440891 - RNA, 32 nt, Human
gccucagagccuguccugccuccgcucccugg

SEQ ID NO: 440892 - RNA, 21 nt, Human
gccucagaggcccgcacaaug

SEQ ID NO: 440893 - RNA, 32 nt, Human
gccucagaguccagauaaagcaguuaacaugu

SEQ ID NO: 440894 - RNA, 32 nt, Human
gccucagauccaggcaggagcacgaggucugg

SEQ ID NO: 440895 - RNA, 32 nt, Human
gccucagauccugucuuuagcaaccagcuaau

SEQ ID NO: 440896 - RNA, 32 nt, Human
gccucagaugacaaaugaggcuaauggacaua

SEQ ID NO: 440897 - RNA, 21 nt, Human
gccucagaugcuggggcccag

SEQ ID NO: 440898 - RNA, 32 nt, Human
gccucagaugggaagaagucagaggaaccaga

SEQ ID NO: 440899 - RNA, 25 nt, Human
gccucagauuuccucaccugugaaa

SEQ ID NO: 440900 - RNA, 32 nt, Human
gccucagcaccacccuccaucccugcccaacc

SEQ ID NO: 440901 - RNA, 32 nt, Human
gccucagcacuccccaaaacaucccauuuugc

SEQ ID NO: 440902 - RNA, 32 nt, Human
gccucagcagaaagguggccuuggacaaaacu

SEQ ID NO: 440903 - RNA, 32 nt, Human
gccucagccaaagccuccagccuuucuccuuu

SEQ ID NO: 440904 - RNA, 32 nt, Human
gccucagccacuuugugcaaaggacugcagag

SEQ ID NO: 440905 - RNA, 32 nt, Human
gccucagccagcccaggauccguccucauuuu

SEQ ID NO: 440906 - RNA, 19 nt, Human
gccucagccaggcccacag

SEQ ID NO: 440907 - RNA, 30 nt, Human
gccucagccccaucucugcuccuguuugaa

SEQ ID NO: 440908 - RNA, 32 nt, Human
gccucagcccggccaaggagguggucagcucc

SEQ ID NO: 440909 - RNA, 18 nt, Human
gccucagcccuucccuga

SEQ ID NO: 440910 - RNA, 21 nt, Human
gccucagccucacccacagca

SEQ ID NO: 440911 - RNA, 32 nt, Human
gccucagccucucuuccuguguggaagcgggg

SEQ ID NO: 440912 - RNA, 19 nt, Human
gccucagccuggcccaggg

SEQ ID NO: 440913 - RNA, 18 nt, Human
gccucagccugugugcug

SEQ ID NO: 440914 - RNA, 22 nt, Human
gccucagccuuacacccaagca

SEQ ID NO: 440915 - RNA, 32 nt, Human
gccucagccuuuaggagcuuuccuuuuuaaaa

SEQ ID NO: 440916 - RNA, 32 nt, Human
gccucagcgaguagcugagacuaccggcgcac

SEQ ID NO: 440917 - RNA, 32 nt, Human
gccucagcggaccacucuucucuccaaggaaa

SEQ ID NO: 440918 - RNA, 23 nt, Human
gccucagcuacucaagaggcuga

SEQ ID NO: 440919 - RNA, 23 nt, Human
gccucagcuacucaggaggcuga

SEQ ID NO: 440920 - RNA, 23 nt, Human
gccucagcuacucgggaggcuga

SEQ ID NO: 440921 - RNA, 32 nt, Human
gccucagcucacuugaggcacccuuuggaucu

SEQ ID NO: 440922 - RNA, 24 nt, Human
gccucagcuccaccaccucccuca

SEQ ID NO: 440923 - RNA, 32 nt, Human
gccucagcuccaccaccucccucacccucccc

SEQ ID NO: 440924 - RNA, 32 nt, Human
gccucagcucuuggugggcccagggacaccca

SEQ ID NO: 440925 - RNA, 32 nt, Human
gccucagcugaaugccuccuguggggaaaggg

SEQ ID NO: 440926 - RNA, 32 nt, Human
gccucagcugggggaaaggcaguucuggugcu

SEQ ID NO: 440927 - RNA, 32 nt, Human
gccucagcugucaccagcacuuuugaccaagu

SEQ ID NO: 440928 - RNA, 32 nt, Human
gccucagcugugggggccucaggcaggucccu

SEQ ID NO: 440929 - RNA, 23 nt, Human
gccucagcuucaccacccuggcu

SEQ ID NO: 440930 - RNA, 32 nt, Human
gccucaggaaagaacuuccccuucccugucuc

SEQ ID NO: 440931 - RNA, 32 nt, Human
gccucaggacccaacucccacaggucagagaa

SEQ ID NO: 440932 - RNA, 32 nt, Human
gccucaggagacaggaggauggcuugagcccu

SEQ ID NO: 440933 - RNA, 32 nt, Human
gccucaggagcaguguggaggaagaugagggc

SEQ ID NO: 440934 - RNA, 32 nt, Human
gccucaggaggcaguggcuuggagcagaggug

SEQ ID NO: 440935 - RNA, 32 nt, Human
gccucaggagggcucugcuccacccacuuggc

SEQ ID NO: 440936 - RNA, 32 nt, Human
gccucaggagguugaggcugcagugagcugug

SEQ ID NO: 440937 - RNA, 32 nt, Human
gccucaggaguggaugcgaucugucucuccug

SEQ ID NO: 440938 - RNA, 32 nt, Human
gccucaggaugaggcagaaggaaggguaaggg

SEQ ID NO: 440939 - RNA, 32 nt, Human
gccucaggcauuuucuacucagcugugaccuu

SEQ ID NO: 440940 - RNA, 32 nt, Human
gccucaggccagggcucaccagcugggguccu

SEQ ID NO: 440941 - RNA, 32 nt, Human
gccucaggcccagacuuggguguuacaggaac

SEQ ID NO: 440942 - RNA, 32 nt, Human
gccucaggcccaggcacugauuguggcagagg

SEQ ID NO: 440943 - RNA, 32 nt, Human
gccucaggcccccagcccuguggcuuccaccu

SEQ ID NO: 440944 - RNA, 32 nt, Human
gccucaggccugaaaccaacaaaagccucaag

SEQ ID NO: 440945 - RNA, 32 nt, Human
gccucaggccuggcaggcagaagcagcugugg

SEQ ID NO: 440946 - RNA, 32 nt, Human
gccucaggcgccuucuacacacugcugcagac

SEQ ID NO: 440947 - RNA, 32 nt, Human
gccucaggcuauacuccagcuggccaaggcug

SEQ ID NO: 440948 - RNA, 23 nt, Human
gccucaggcuccagccccagugg

SEQ ID NO: 440949 - RNA, 24 nt, Human
gccucaggcuucugcagcccaggg

SEQ ID NO: 440950 - RNA, 26 nt, Human
gccucaggcuucugcagcccagggca

SEQ ID NO: 440951 - RNA, 17 nt, Human
gccucagggacugcagc

SEQ ID NO: 440952 - RNA, 32 nt, Human
gccucagggagcuugcauacaugugggccagc

SEQ ID NO: 440953 - RNA, 32 nt, Human
gccucagggauggccuguucagcugcugggug

SEQ ID NO: 440954 - RNA, 32 nt, Human
gccucagggcagcucaccugaccugcacccag

SEQ ID NO: 440955 - RNA, 23 nt, Human
gccucagggccaggaaggacaga

SEQ ID NO: 440956 - RNA, 32 nt, Human
gccucagggccuggcccuccugcaugcuaugc

SEQ ID NO: 440957 - RNA, 32 nt, Human
gccucagggggcuucucacugcauuauccacu

SEQ ID NO: 440958 - RNA, 32 nt, Human
gccucagguagaagaagaaaggugccacuccg

SEQ ID NO: 440959 - RNA, 20 nt, Human
gccucaggucaggccagggc

SEQ ID NO: 440960 - RNA, 19 nt, Human
gccucaggucuggcugcug

SEQ ID NO: 440961 - RNA, 24 nt, Human
gccucaggugauccacccaccuca

SEQ ID NO: 440962 - RNA, 32 nt, Human
gccucaggugugauccgcccgccuccgccucc

SEQ ID NO: 440963 - RNA, 18 nt, Human
gccucaguaccaccagcc

SEQ ID NO: 440964 - RNA, 32 nt, Human
gccucaguaggaaugccaccuuccauaucauc

SEQ ID NO: 440965 - RNA, 32 nt, Human
gccucaguauucucaucugucauggcggccaa

SEQ ID NO: 440966 - RNA, 25 nt, Human
gccucagucccccuuaucugugaaa

SEQ ID NO: 440967 - RNA, 32 nt, Human
gccucaguccucagcacccagcacccagugcu

SEQ ID NO: 440968 - RNA, 32 nt, Human
gccucagucucccaagcagcugggauuguagg

SEQ ID NO: 440969 - RNA, 32 nt, Human
gccucagucucccaaguagcugggguuacagg

SEQ ID NO: 440970 - RNA, 32 nt, Human
gccucagucugcccuugggcucaggccccuag

SEQ ID NO: 440971 - RNA, 32 nt, Human
gccucagucugccgaguagcugggauuacagg

SEQ ID NO: 440972 - RNA, 32 nt, Human
gccucagugaaauaugcauauguauaucauga

SEQ ID NO: 440973 - RNA, 23 nt, Human
gccucaguguucucaucuaugaa

SEQ ID NO: 440974 - RNA, 24 nt, Human
gccucaguguucucaucuaugaaa

SEQ ID NO: 440975 - RNA, 24 nt, Human
gccucaguucgcucaccugugaaa

SEQ ID NO: 440976 - RNA, 32 nt, Human
gccucaguugagccacugugcccagccuuagg

SEQ ID NO: 440977 - RNA, 24 nt, Human
gccucaguuuacucaucugugaag

SEQ ID NO: 440978 - RNA, 18 nt, Human
gccucaguuucaagguaa

SEQ ID NO: 440979 - RNA, 19 nt, Human
gccucaguuuccccaggga

SEQ ID NO: 440980 - RNA, 23 nt, Human
gccucaguuuccccaucuggaaa

SEQ ID NO: 440981 - RNA, 24 nt, Human
gccucaguuucccucuccaugaag

SEQ ID NO: 440982 - RNA, 22 nt, Human
gccucaguuucccucugugaag

SEQ ID NO: 440983 - RNA, 24 nt, Human
gccucaguuuccuaaagugugaaa

SEQ ID NO: 440984 - RNA, 19 nt, Human
gccucaguuuccucaucug

SEQ ID NO: 440985 - RNA, 24 nt, Human
gccucaguuuccucaucugcagaa

SEQ ID NO: 440986 - RNA, 20 nt, Human
gccucaguuuccucaucugu

SEQ ID NO: 440987 - RNA, 24 nt, Human
gccucaguuuccucaucugucaaa

SEQ ID NO: 440988 - RNA, 21 nt, Human
gccucaguuuccucauuuuga

SEQ ID NO: 440989 - RNA, 24 nt, Human
gccucaguuuccugaccuaugaaa

SEQ ID NO: 440990 - RNA, 20 nt, Human
gccucaguuuccuuaucugu

SEQ ID NO: 440991 - RNA, 22 nt, Human
gccucaguuuccuuaugugaaa

SEQ ID NO: 440992 - RNA, 23 nt, Human
gccucaguuucuccccuguggaa

SEQ ID NO: 440993 - RNA, 32 nt, Human
gccucaguuucugcgacuaugaaaauuacuag

SEQ ID NO: 440994 - RNA, 24 nt, Human
gccucaguuugcccaccugugaaa

SEQ ID NO: 440995 - RNA, 24 nt, Human
gccucaguuuucccagcuaugaaa

SEQ ID NO: 440996 - RNA, 20 nt, Human
gccucaguuuucucaucugu

SEQ ID NO: 440997 - RNA, 23 nt, Human
gccucaguuuuuucauccugaaa

SEQ ID NO: 440998 - RNA, 32 nt, Human
gccucauaagggcuggagugcuguggugccau

SEQ ID NO: 440999 - RNA, 32 nt, Human
gccucauacuccugggcucaagcaauccuccu

SEQ ID NO: 441000 - RNA, 19 nt, Human
gccucauauuucuuugaua

SEQ ID NO: 441001 - RNA, 32 nt, Human
gccucaucagacccuucuccaugcacauccuu

SEQ ID NO: 441002 - RNA, 32 nt, Human
gccucaucauuucauuccuuggcuccaaaccu

SEQ ID NO: 441003 - RNA, 32 nt, Human
gccucauccucauugcuucugccuccacguaa

SEQ ID NO: 441004 - RNA, 32 nt, Human
gccucauccuccccaggaccccuguccaggau

SEQ ID NO: 441005 - RNA, 17 nt, Human
gccucauccuguccagg

SEQ ID NO: 441006 - RNA, 32 nt, Human
gccucaucucagcagccugggcucggcauucc

SEQ ID NO: 441007 - RNA, 23 nt, Human
gccucaucuggaaaacggggaca

SEQ ID NO: 441008 - RNA, 32 nt, Human
gccucaucuggcugggaucuccaaggggccuc

SEQ ID NO: 441009 - RNA, 32 nt, Human
gccucaucugugcagaaguggcagcagagagg

SEQ ID NO: 441010 - RNA, 20 nt, Human
gccucaucuuccuacaugaa

SEQ ID NO: 441011 - RNA, 32 nt, Human
gccucaugagccacuucagaccagccaggugu

SEQ ID NO: 441012 - RNA, 20 nt, Human
gccucaugccuauaauccca

SEQ ID NO: 441013 - RNA, 32 nt, Human
gccucaugccuauaaucccagcacuuuggaag

SEQ ID NO: 441014 - RNA, 32 nt, Human
gccucaugccuauaaucccagcacuuugggag

SEQ ID NO: 441015 - RNA, 32 nt, Human
gccucaugccugcaauccuagcacuuugggag

SEQ ID NO: 441016 - RNA, 20 nt, Human
gccucaugccuguaauccca

SEQ ID NO: 441017 - RNA, 32 nt, Human
gccucaugccuguaaucccagcacuuucggag

SEQ ID NO: 441018 - RNA, 32 nt, Human
gccucaugccuguaaucccagcacuuugggag

SEQ ID NO: 441019 - RNA, 32 nt, Human
gccucaugccuguaauccuagcaccuugggag

SEQ ID NO: 441020 - RNA, 32 nt, Human
gccucaugccuguaauuccagcacuuugggag

SEQ ID NO: 441021 - RNA, 32 nt, Human
gccucaugccuguagucccagcacuuuggggg

SEQ ID NO: 441022 - RNA, 30 nt, Human
gccucauggaguguacaaucugcaacgaga

SEQ ID NO: 441023 - RNA, 32 nt, Human
gccucauguggguggucacgggagggugugag

SEQ ID NO: 441024 - RNA, 32 nt, Human
gccucauucaugagcuggucagcguuucgucu

SEQ ID NO: 441025 - RNA, 22 nt, Human
gccucauuccagcgccccaagg

SEQ ID NO: 441026 - RNA, 32 nt, Human
gccucauucccccucugggcccugggcuccau

SEQ ID NO: 441027 - RNA, 32 nt, Human
gccucauuccuugaguuucacucuuccauuac

SEQ ID NO: 441028 - RNA, 32 nt, Human
gccucauucuaauaccuguucuuuggacaguc

SEQ ID NO: 441029 - RNA, 32 nt, Human
gccucauugccaccuccaccugcaggaaggcc

SEQ ID NO: 441030 - RNA, 32 nt, Human
gccucauuuccuccucuccugccugugaaagc

SEQ ID NO: 441031 - RNA, 18 nt, Human
gccuccaaaagcuccagu

SEQ ID NO: 441032 - RNA, 32 nt, Human
gccuccaaagcccauccuugggguucccccuc

SEQ ID NO: 441033 - RNA, 22 nt, Human
gccuccaaagccucccacccca

SEQ ID NO: 441034 - RNA, 32 nt, Human
gccuccaaagccucccaccccaccccacgcac

SEQ ID NO: 441035 - RNA, 32 nt, Human
gccuccaaaguacuaggguuacaggcaugagc

SEQ ID NO: 441036 - RNA, 32 nt, Human
gccuccaaagugcuggauuacaggcugagcua

SEQ ID NO: 441037 - RNA, 32 nt, Human
gccuccaaagugcugggauuacaggcccgagc

SEQ ID NO: 441038 - RNA, 32 nt, Human
gccuccaaagugcugggauuacaggugugagc

SEQ ID NO: 441039 - RNA, 32 nt, Human
gccuccaaagugcugggauugcaggcaugagc

SEQ ID NO: 441040 - RNA, 32 nt, Human
gccuccaaauagcccacauggucuccaugcca

SEQ ID NO: 441041 - RNA, 32 nt, Human
gccuccaaauccuugucucaggccugcaugug

SEQ ID NO: 441042 - RNA, 25 nt, Human
gccuccaaccaggacuuucuucuua

SEQ ID NO: 441043 - RNA, 32 nt, Human
gccuccaaccuucugcccuccugccaaaagau

SEQ ID NO: 441044 - RNA, 32 nt, Human
gccuccaacuagcugggauuacaggcacaagc

SEQ ID NO: 441045 - RNA, 21 nt, Human
gccuccaacuccugggcucaa

SEQ ID NO: 441046 - RNA, 32 nt, Human
gccuccaacuccugggcucaagcaauccaccu

SEQ ID NO: 441047 - RNA, 32 nt, Human
gccuccaacuccugggcucaagcaauccucuc

SEQ ID NO: 441048 - RNA, 32 nt, Human
gccuccaacuccuggguucaagggauccuccc

SEQ ID NO: 441049 - RNA, 32 nt, Human
gccuccaacucucugguucaagcgauucuccu

SEQ ID NO: 441050 - RNA, 32 nt, Human
gccuccaacucuuggguucaagcaacccugcc

SEQ ID NO: 441051 - RNA, 21 nt, Human
gccuccaagcccaagaggcca

SEQ ID NO: 441052 - RNA, 32 nt, Human
gccuccaagggugggccaggccgaagaaccua

SEQ ID NO: 441053 - RNA, 23 nt, Human
gccuccaagguuucacggcuucc

SEQ ID NO: 441054 - RNA, 32 nt, Human
gccuccaaguagcugggacuacaggcgcgugc

SEQ ID NO: 441055 - RNA, 32 nt, Human
gccuccaaguagcugggacuacaggcgugcgc

SEQ ID NO: 441056 - RNA, 32 nt, Human
gccuccaaguagcugggacuauaggcacgcac

SEQ ID NO: 441057 - RNA, 22 nt, Human
gccuccaauccugcuggcuuca

SEQ ID NO: 441058 - RNA, 32 nt, Human
gccuccaaucugauggggaagacauggccccu

SEQ ID NO: 441059 - RNA, 32 nt, Human
gccuccacacggggagcaaccagucagcuaac

SEQ ID NO: 441060 - RNA, 32 nt, Human
gccuccacagagaaaaacagggaagguaacaa

SEQ ID NO: 441061 - RNA, 32 nt, Human
gccuccacagcccagguggccccagaaaaugu

SEQ ID NO: 441062 - RNA, 32 nt, Human
gccuccacaguggauguaggaucccugcuccc

SEQ ID NO: 441063 - RNA, 32 nt, Human
gccuccaccaccacuggccaccaggcuggcgc

SEQ ID NO: 441064 - RNA, 32 nt, Human
gccuccaccagcccggcuccugccucacgcug

SEQ ID NO: 441065 - RNA, 32 nt, Human
gccuccacccacccuccugccucaccccugcg

SEQ ID NO: 441066 - RNA, 32 nt, Human
gccuccacccaccuauucccuuuccuggucac

SEQ ID NO: 441067 - RNA, 22 nt, Human
gccuccacccccaccagcccca

SEQ ID NO: 441068 - RNA, 32 nt, Human
gccuccacccccacuccagccucagcggggcc

SEQ ID NO: 441069 - RNA, 32 nt, Human
gccuccaccuccaggguucaagcgauucuccu

SEQ ID NO: 441070 - RNA, 32 nt, Human
gccuccaccucccagguucaagcaauucuccu

SEQ ID NO: 441071 - RNA, 32 nt, Human
gccuccaccucccagguucaagcaauucucgu

SEQ ID NO: 441072 - RNA, 32 nt, Human
gccuccaccucccagguucaagcgauucuccu

SEQ ID NO: 441073 - RNA, 32 nt, Human
gccuccaccucccaguuucaagcaauucucau

SEQ ID NO: 441074 - RNA, 32 nt, Human
gccuccaccuccccgguucaagugauucuccu

SEQ ID NO: 441075 - RNA, 32 nt, Human
gccuccaccucccggguucaaucaauucuccu

SEQ ID NO: 441076 - RNA, 32 nt, Human
gccuccaccuccuggguucaagcgauucuccu

SEQ ID NO: 441077 - RNA, 18 nt, Human
gccuccaccugcagcccc

SEQ ID NO: 441078 - RNA, 32 nt, Human
gccuccaccugccauggagaaguuuccgcuac

SEQ ID NO: 441079 - RNA, 32 nt, Human
gccuccacgugagagccagcuccgccgugacc

SEQ ID NO: 441080 - RNA, 32 nt, Human
gccuccacgugagagccggcuccgccgugacc

SEQ ID NO: 441081 - RNA, 32 nt, Human
gccuccacguucccucuccucucacccacacc

SEQ ID NO: 441082 - RNA, 32 nt, Human
gccuccacucagcucaauuccaguuuucuggc

SEQ ID NO: 441083 - RNA, 32 nt, Human
gccuccacucagcugcuucucagucaugaacg

SEQ ID NO: 441084 - RNA, 32 nt, Human
gccuccacucagcugcuucucagucaugaaug

SEQ ID NO: 441085 - RNA, 32 nt, Human
gccuccacugaucugaggagauccugugacug

SEQ ID NO: 441086 - RNA, 32 nt, Human
gccuccacugcaacaucuucuccuacgacuac

SEQ ID NO: 441087 - RNA, 32 nt, Human
gccuccacugcaccuucuuagggaagggcaug

SEQ ID NO: 441088 - RNA, 32 nt, Human
gccuccacuggguggagaaaggagacuugccc

SEQ ID NO: 441089 - RNA, 32 nt, Human
gccuccacuucccagguucaagugauucuccu

SEQ ID NO: 441090 - RNA, 32 nt, Human
gccuccacuuccugggcucaagcgauucuccu

SEQ ID NO: 441091 - RNA, 32 nt, Human
gccuccacuuccuggguucacaugauucuccu

SEQ ID NO: 441092 - RNA, 32 nt, Human
gccuccagaaaaggaagcuuuggagagauggg

SEQ ID NO: 441093 - RNA, 32 nt, Human
gccuccagaaccaugcccaggucuccugccuc

SEQ ID NO: 441094 - RNA, 32 nt, Human
gccuccagaagcaggggccuugagaugggagc

SEQ ID NO: 441095 - RNA, 32 nt, Human
gccuccagacacaaucgggccccacucgcaga

SEQ ID NO: 441096 - RNA, 22 nt, Human
gccuccagagcagcccacacca

SEQ ID NO: 441097 - RNA, 32 nt, Human
gccuccagaguacugggauuacaagagcccac

SEQ ID NO: 441098 - RNA, 32 nt, Human
gccuccagauucacacacacaaaagauaccau

SEQ ID NO: 441099 - RNA, 32 nt, Human
gccuccagcacgcugaggaugagcugcuguca

SEQ ID NO: 441100 - RNA, 19 nt, Human
gccuccagcagccguuccc

SEQ ID NO: 441101 - RNA, 21 nt, Human
gccuccagcaugagccugcag

SEQ ID NO: 441102 - RNA, 18 nt, Human
gccuccagccccacccca

SEQ ID NO: 441103 - RNA, 22 nt, Human
gccuccagccccucucuugucu

SEQ ID NO: 441104 - RNA, 32 nt, Human
gccuccagccugaccccagagcagaaccggaa

SEQ ID NO: 441105 - RNA, 32 nt, Human
gccuccagccugagacaucaggggagagccug

SEQ ID NO: 441106 - RNA, 32 nt, Human
gccuccagccugggugaccgagugagacuguu

SEQ ID NO: 441107 - RNA, 22 nt, Human
gccuccagcuccccugccgcag

SEQ ID NO: 441108 - RNA, 32 nt, Human
gccuccagcucccucucggccuggaggccuuc

SEQ ID NO: 441109 - RNA, 32 nt, Human
gccuccagcuccucagaccuccuggguggggu

SEQ ID NO: 441110 - RNA, 32 nt, Human
gccuccagcucucagccaggagguccccaacc

SEQ ID NO: 441111 - RNA, 32 nt, Human
gccuccagcuuggagaugaccugcugcagcuc

SEQ ID NO: 441112 - RNA, 23 nt, Human
gccuccagcuuggucugucuccc

SEQ ID NO: 441113 - RNA, 32 nt, Human
gccuccaggaaaucuugagagccugucuuggc

SEQ ID NO: 441114 - RNA, 32 nt, Human
gccuccaggaaaugcaaucccagagacaccgc

SEQ ID NO: 441115 - RNA, 32 nt, Human
gccuccaggagaauggagagaaagggcuucca

SEQ ID NO: 441116 - RNA, 32 nt, Human
gccuccaggagcagcaauccuaagagugggag

SEQ ID NO: 441117 - RNA, 32 nt, Human
gccuccaggccacauggggcugggcagcuacc

SEQ ID NO: 441118 - RNA, 32 nt, Human
gccuccaggcccauagaaggaggaggcaaccc

SEQ ID NO: 441119 - RNA, 21 nt, Human
gccuccaggcuccacucacca

SEQ ID NO: 441120 - RNA, 23 nt, Human
gccuccaggcucgcccgcccuga

SEQ ID NO: 441121 - RNA, 32 nt, Human
gccuccaggcuucuccuugacgucauuccucu

SEQ ID NO: 441122 - RNA, 21 nt, Human
gccuccaggggcagggccuug

SEQ ID NO: 441123 - RNA, 20 nt, Human
gccuccagguacgccgcagc

SEQ ID NO: 441124 - RNA, 32 nt, Human
gccuccagguauacuaccucagagaucaguga

SEQ ID NO: 441125 - RNA, 21 nt, Human
gccuccagucccccagccccu

SEQ ID NO: 441126 - RNA, 21 nt, Human
gccuccaguccgucucccccu

SEQ ID NO: 441127 - RNA, 21 nt, Human
gccuccaguccuucccuagcc

SEQ ID NO: 441128 - RNA, 32 nt, Human
gccuccagucugggaaagucaccaacccgcag

SEQ ID NO: 441129 - RNA, 21 nt, Human
gccuccagugagaacaggcag

SEQ ID NO: 441130 - RNA, 32 nt, Human
gccuccaguggagaacugggcuugcucagacg

SEQ ID NO: 441131 - RNA, 18 nt, Human
gccuccagugugugcacc

SEQ ID NO: 441132 - RNA, 32 nt, Human
gccuccauagcauugaaggccagccugcaucu

SEQ ID NO: 441133 - RNA, 17 nt, Human
gccuccauccauccaga

SEQ ID NO: 441134 - RNA, 32 nt, Human
gccuccauccccagaagaaacagcccccucug

SEQ ID NO: 441135 - RNA, 32 nt, Human
gccuccauccucuggguucaagcaauucuccu

SEQ ID NO: 441136 - RNA, 32 nt, Human
gccuccaucuggaaaugggaggaugaagaggc

SEQ ID NO: 441137 - RNA, 32 nt, Human
gccuccaugccuggcuaauuuuguauuuuuag

SEQ ID NO: 441138 - RNA, 32 nt, Human
gccuccauggugccucuggaggccucugggcc

SEQ ID NO: 441139 - RNA, 32 nt, Human
gccuccaugucaccacguggugaauggcugcc

SEQ ID NO: 441140 - RNA, 31 nt, Human
gccuccauguuucagcaucuaugucaugggc

SEQ ID NO: 441141 - RNA, 32 nt, Human
gccuccauuuugguguacuuucuuggaagaaa

SEQ ID NO: 441142 - RNA, 32 nt, Human
gccucccaaaauugcugggauuacagguguga

SEQ ID NO: 441143 - RNA, 32 nt, Human
gccucccaaagugccgccgggauuacaggcgu

SEQ ID NO: 441144 - RNA, 32 nt, Human
gccucccaaagugcugagauuauaggcaugag

SEQ ID NO: 441145 - RNA, 32 nt, Human
gccucccaaagugcugcugggauuacaggcgu

SEQ ID NO: 441146 - RNA, 32 nt, Human
gccucccaaagugcuggauuacaggcauaggc

SEQ ID NO: 441147 - RNA, 28 nt, Human
gccucccaaagugcuguauuuucuuauc

SEQ ID NO: 441148 - RNA, 32 nt, Human
gccucccaaauuugcugggauuccaggguuuu

SEQ ID NO: 441149 - RNA, 32 nt, Human
gccucccaacuucuccccaggccaaguauggg

SEQ ID NO: 441150 - RNA, 32 nt, Human
gccucccaacuuggucucacacaacaaaccuc

SEQ ID NO: 441151 - RNA, 26 nt, Human
gccucccaagcaauccucccaccuca

SEQ ID NO: 441152 - RNA, 32 nt, Human
gccucccaagcaauccucccaccucagccucu

SEQ ID NO: 441153 - RNA, 32 nt, Human
gccucccaagccccgcccucagaaagccaagu

SEQ ID NO: 441154 - RNA, 32 nt, Human
gccucccaaggagccaggacuacaggugcaug

SEQ ID NO: 441155 - RNA, 32 nt, Human
gccucccaaggcugggauuacagguaugcacc

SEQ ID NO: 441156 - RNA, 32 nt, Human
gccucccaaguacugggauuacaggugcccac

SEQ ID NO: 441157 - RNA, 32 nt, Human
gccucccaaguagcuggauuacaggugcaugc

SEQ ID NO: 441158 - RNA, 32 nt, Human
gccucccaagugcuaggauuacaggcaucagc

SEQ ID NO: 441159 - RNA, 32 nt, Human
gccucccaagugcugggauuacaggcgcgagc

SEQ ID NO: 441160 - RNA, 32 nt, Human
gccucccaagugcugggauuacaggcgugagc

SEQ ID NO: 441161 - RNA, 32 nt, Human
gccucccaauacucccuucuuccugcccccac

SEQ ID NO: 441162 - RNA, 32 nt, Human
gccucccaauugcuguuucagcagguuuuaaa

SEQ ID NO: 441163 - RNA, 20 nt, Human
gccucccaccaccaccauca

SEQ ID NO: 441164 - RNA, 32 nt, Human
gccucccacccacucuggggguccacaucaag

SEQ ID NO: 441165 - RNA, 32 nt, Human
gccucccacccauguagaacugugaguccauu

SEQ ID NO: 441166 - RNA, 18 nt, Human
gccucccaccccacccca

SEQ ID NO: 441167 - RNA, 32 nt, Human
gccucccacccucccugcaacaacagcccucu

SEQ ID NO: 441168 - RNA, 19 nt, Human
gccucccacuagaccaggc

SEQ ID NO: 441169 - RNA, 32 nt, Human
gccucccacugcaacuuuucagcucagggguu

SEQ ID NO: 441170 - RNA, 32 nt, Human
gccucccacuggcugcugcuuggccccaucuc

SEQ ID NO: 441171 - RNA, 32 nt, Human
gccucccagacccugagcuccagucugcacag

SEQ ID NO: 441172 - RNA, 32 nt, Human
gccucccagauguggaggagugaagccaccau

SEQ ID NO: 441173 - RNA, 32 nt, Human
gccucccagccauguggaacugcuggagugca

SEQ ID NO: 441174 - RNA, 32 nt, Human
gccucccagccauguggaacugugagucaauu

SEQ ID NO: 441175 - RNA, 24 nt, Human
gccucccagcccaacaucuccagc

SEQ ID NO: 441176 - RNA, 22 nt, Human
gccucccagcccagagcccagc

SEQ ID NO: 441177 - RNA, 20 nt, Human
gccucccagcccagcccagc

SEQ ID NO: 441178 - RNA, 22 nt, Human
gccucccagccccggcgcacgc

SEQ ID NO: 441179 - RNA, 23 nt, Human
gccucccagcccgcggcccgagc

SEQ ID NO: 441180 - RNA, 32 nt, Human
gccucccagccucuuucugagggaaaggacaa

SEQ ID NO: 441181 - RNA, 21 nt, Human
gccucccagccuggcugaagc

SEQ ID NO: 441182 - RNA, 19 nt, Human
gccucccagcgccccaacc

SEQ ID NO: 441183 - RNA, 32 nt, Human
gccucccagcuacuuaggaggcugaggcagga

SEQ ID NO: 441184 - RNA, 20 nt, Human
gccucccaggacauguucga

SEQ ID NO: 441185 - RNA, 32 nt, Human
gccucccaggagcagcggggcaguguggggcu

SEQ ID NO: 441186 - RNA, 28 nt, Human
gccucccaggagggagacgcuggggugc

SEQ ID NO: 441187 - RNA, 32 nt, Human
gccucccaggagggagacgcuggggugcaaaa

SEQ ID NO: 441188 - RNA, 19 nt, Human
gccucccaggcccaugccc

SEQ ID NO: 441189 - RNA, 20 nt, Human
gccucccagggcaccaggga

SEQ ID NO: 441190 - RNA, 31 nt, Human
gccucccagguccugggacacuuguaaaucu

SEQ ID NO: 441191 - RNA, 32 nt, Human
gccucccagguggcccgggagcugcagguggg

SEQ ID NO: 441192 - RNA, 32 nt, Human
gccucccaguagcugggauuagaggcaugugc

SEQ ID NO: 441193 - RNA, 32 nt, Human
gccucccaguccgcacaccucucccauccagg

SEQ ID NO: 441194 - RNA, 32 nt, Human
gccucccagugcugggauuauaggugugagcc

SEQ ID NO: 441195 - RNA, 32 nt, Human
gccucccaguuuggugggcaagugggggugau

SEQ ID NO: 441196 - RNA, 32 nt, Human
gccucccauagcugggacuacaggcgcccgcc

SEQ ID NO: 441197 - RNA, 32 nt, Human
gccuccccaaaccaauccuaaugucuuucuuc

SEQ ID NO: 441198 - RNA, 32 nt, Human
gccuccccaaagugcugagauuaggcguuagc

SEQ ID NO: 441199 - RNA, 32 nt, Human
gccuccccaaagugcugggaugacaggcauga

SEQ ID NO: 441200 - RNA, 32 nt, Human
gccuccccaaagugcugggauuacaggcauga

SEQ ID NO: 441201 - RNA, 32 nt, Human
gccuccccaaagugcugggauuacaggcguga

SEQ ID NO: 441202 - RNA, 32 nt, Human
gccuccccaaagugcugggauuacagguacaa

SEQ ID NO: 441203 - RNA, 32 nt, Human
gccuccccaagaggguaguuagggguggggaa

SEQ ID NO: 441204 - RNA, 20 nt, Human
gccuccccaccaccaccagc

SEQ ID NO: 441205 - RNA, 32 nt, Human
gccuccccacugaagaaaaagaugaaaaugau

SEQ ID NO: 441206 - RNA, 32 nt, Human
gccuccccacuuccacucacacccacuauggc

SEQ ID NO: 441207 - RNA, 32 nt, Human
gccuccccagcaccuagguggggccuggggua

SEQ ID NO: 441208 - RNA, 32 nt, Human
gccuccccagccacguggaacugaggcagcug

SEQ ID NO: 441209 - RNA, 32 nt, Human
gccuccccagcccugauauucuugaugucacc

SEQ ID NO: 441210 - RNA, 32 nt, Human
gccuccccagccugugggacugugagucaauu

SEQ ID NO: 441211 - RNA, 32 nt, Human
gccuccccagcugcuccuuaaauucuaagagu

SEQ ID NO: 441212 - RNA, 32 nt, Human
gccuccccagggacucugcccauguucccagg

SEQ ID NO: 441213 - RNA, 25 nt, Human
gccuccccaguuucugggacaccuu

SEQ ID NO: 441214 - RNA, 20 nt, Human
gccucccccacaagccccca

SEQ ID NO: 441215 - RNA, 32 nt, Human
gccucccccacuccacugugcacgguugaguu

SEQ ID NO: 441216 - RNA, 32 nt, Human
gccucccccaguagcugggacuacaggcgcgu

SEQ ID NO: 441217 - RNA, 32 nt, Human
gccucccccgucuccuaaaaggccagcagguc

SEQ ID NO: 441218 - RNA, 32 nt, Human
gccucccccugccucuucggcuguguuuucuc

SEQ ID NO: 441219 - RNA, 32 nt, Human
gccucccccuggaacugggacuggucucgguc

SEQ ID NO: 441220 - RNA, 32 nt, Human
gccucccccuggccagggccaucuccugucac

SEQ ID NO: 441221 - RNA, 32 nt, Human
gccucccccuguauucccccucccagggcagc

SEQ ID NO: 441222 - RNA, 32 nt, Human
gccuccccgcaaaaaguugugccugaggaaca

SEQ ID NO: 441223 - RNA, 32 nt, Human
gccuccccgcgcugccuaccucaggccugggg

SEQ ID NO: 441224 - RNA, 23 nt, Human
gccuccccgguggccagagccag

SEQ ID NO: 441225 - RNA, 32 nt, Human
gccuccccuccaccacuuccuucccugucccu

SEQ ID NO: 441226 - RNA, 32 nt, Human
gccuccccuccaccccugccucuccuccaccc

SEQ ID NO: 441227 - RNA, 32 nt, Human
gccuccccuccacuuccagucuguaccccucc

SEQ ID NO: 441228 - RNA, 32 nt, Human
gccuccccuccagggccuggcaaggcuggcuc

SEQ ID NO: 441229 - RNA, 19 nt, Human
gccuccccuccccacccca

SEQ ID NO: 441230 - RNA, 32 nt, Human
gccuccccuccccucuuugucacuuugguuuc

SEQ ID NO: 441231 - RNA, 32 nt, Human
gccuccccuccucugcuugccaucccucccuc

SEQ ID NO: 441232 - RNA, 32 nt, Human
gccuccccucgaaccgccaagcagaaaccgga

SEQ ID NO: 441233 - RNA, 32 nt, Human
gccuccccucgagguccuggucuuacuuagga

SEQ ID NO: 441234 - RNA, 32 nt, Human
gccuccccucugucucccuccugcucuggcca

SEQ ID NO: 441235 - RNA, 16 nt, Human
gccuccccugccacca

SEQ ID NO: 441236 - RNA, 23 nt, Human
gccuccccugccaccgccgccac

SEQ ID NO: 441237 - RNA, 32 nt, Human
gccuccccugccccugcuccagcuccaucccc

SEQ ID NO: 441238 - RNA, 32 nt, Human
gccuccccugccuccccugccugccuccugcc

SEQ ID NO: 441239 - RNA, 32 nt, Human
gccuccccuggggcuccugaugccaaggggcc

SEQ ID NO: 441240 - RNA, 32 nt, Human
gccuccccuucccaucccaccucccgagccuu

SEQ ID NO: 441241 - RNA, 32 nt, Human
gccuccccuuccccuccucuccccuccuuuuc

SEQ ID NO: 441242 - RNA, 32 nt, Human
gccuccccuugacggacggcuuggggagcggc

SEQ ID NO: 441243 - RNA, 32 nt, Human
gccucccgaaagugcugggauuacagucauga

SEQ ID NO: 441244 - RNA, 32 nt, Human
gccucccgagccaugcugacugugaguuaaua

SEQ ID NO: 441245 - RNA, 32 nt, Human
gccucccgagccuagauccuggcucggaccac

SEQ ID NO: 441246 - RNA, 32 nt, Human
gccucccgaguagcuggaacuauaggucaucu

SEQ ID NO: 441247 - RNA, 18 nt, Human
gccucccgcccgccgcgc

SEQ ID NO: 441248 - RNA, 19 nt, Human
gccucccgcuccgccgcgc

SEQ ID NO: 441249 - RNA, 21 nt, Human
gccucccgcucugggcgagcc

SEQ ID NO: 441250 - RNA, 32 nt, Human
gccucccgcugaaucuuggcucuugucuucuc

SEQ ID NO: 441251 - RNA, 23 nt, Human
gccucccggagugcagaccagag

SEQ ID NO: 441252 - RNA, 32 nt, Human
gccucccgggcacuucuccccaccucggcccc

SEQ ID NO: 441253 - RNA, 22 nt, Human
gccucccggguccaccgcaggu

SEQ ID NO: 441254 - RNA, 21 nt, Human
gccucccgguggacaccagcc

SEQ ID NO: 441255 - RNA, 19 nt, Human
gccucccgugccucugcca

SEQ ID NO: 441256 - RNA, 32 nt, Human
gccucccuaaaauacauaaaaccaagcugugc

SEQ ID NO: 441257 - RNA, 32 nt, Human
gccucccuaaaaugcgcguggaggcagcuggg

SEQ ID NO: 441258 - RNA, 32 nt, Human
gccucccuaaguugcugggauuacagguguga

SEQ ID NO: 441259 - RNA, 32 nt, Human
gccucccuaccauguggaacugugaguccaau

SEQ ID NO: 441260 - RNA, 32 nt, Human
gccucccuagccauggggacugugaguccauu

SEQ ID NO: 441261 - RNA, 15 nt, Human
gccucccuccacccc

SEQ ID NO: 441262 - RNA, 32 nt, Human
gccucccucccuucagcuuccugcugcacaga

SEQ ID NO: 441263 - RNA, 32 nt, Human
gccucccuccuccccuccuacucccuuuucuc

SEQ ID NO: 441264 - RNA, 32 nt, Human
gccucccuccucgccggccucaguuuaccacg

SEQ ID NO: 441265 - RNA, 32 nt, Human
gccucccuccugucuggcuccuggggcccaug

SEQ ID NO: 441266 - RNA, 32 nt, Human
gccucccucgcacacugggaggaggaagccgc

SEQ ID NO: 441267 - RNA, 32 nt, Human
gccucccucuacugcagacccucuaggacugg

SEQ ID NO: 441268 - RNA, 32 nt, Human
gccucccucugacuucugggcgccagauccug

SEQ ID NO: 441269 - RNA, 19 nt, Human
gccucccucugaggcuggu

SEQ ID NO: 441270 - RNA, 16 nt, Human
gccucccucugcugcc

SEQ ID NO: 441271 - RNA, 20 nt, Human
gccucccucuucucuccagg

SEQ ID NO: 441272 - RNA, 20 nt, Human
gccucccugacccuccacac

SEQ ID NO: 441273 - RNA, 32 nt, Human
gccucccugaguagcugggacuacaggcacac

SEQ ID NO: 441274 - RNA, 32 nt, Human
gccucccugagucucgcucuuuugcccaggcu

SEQ ID NO: 441275 - RNA, 32 nt, Human
gccucccugaguggcagggauuacaggaaccc

SEQ ID NO: 441276 - RNA, 19 nt, Human
gccucccugcagccaccag

SEQ ID NO: 441277 - RNA, 32 nt, Human
gccucccugcagccccaucuccuugggcgcca

SEQ ID NO: 441278 - RNA, 32 nt, Human
gccucccugcagcucagcgcagcccagggcuc

SEQ ID NO: 441279 - RNA, 32 nt, Human
gccucccugcagggcugcuccccagcccaaac

SEQ ID NO: 441280 - RNA, 32 nt, Human
gccucccugccccucugcuggcacagccuggg

SEQ ID NO: 441281 - RNA, 32 nt, Human
gccucccugccucacccagcagcgcccacagc

SEQ ID NO: 441282 - RNA, 32 nt, Human
gccucccugccucaucucuauucucauuccac

SEQ ID NO: 441283 - RNA, 32 nt, Human
gccucccugccuccagcccuggcugcaauguc

SEQ ID NO: 441284 - RNA, 32 nt, Human
gccucccugccucuggccauggccugccggug

SEQ ID NO: 441285 - RNA, 32 nt, Human
gccucccugccugcuucgcccuggacucguga

SEQ ID NO: 441286 - RNA, 32 nt, Human
gccucccugccugcuucuggccgccuugaaug

SEQ ID NO: 441287 - RNA, 32 nt, Human
gccucccugcgguccccacccugucuccaagc

SEQ ID NO: 441288 - RNA, 32 nt, Human
gccucccugcugagaauauucucccuuuagca

SEQ ID NO: 441289 - RNA, 21 nt, Human
gccucccuggccggggcucag

SEQ ID NO: 441290 - RNA, 32 nt, Human
gccucccugggccaccuccuaccccuuccugu

SEQ ID NO: 441291 - RNA, 19 nt, Human
gccucccugggccgcuggu

SEQ ID NO: 441292 - RNA, 32 nt, Human
gccucccugucuccagcugccugggcccggaa

SEQ ID NO: 441293 - RNA, 32 nt, Human
gccucccugugccggacuccagccggggcgac

SEQ ID NO: 441294 - RNA, 32 nt, Human
gccucccuucaagccuucaagucuguguagag

SEQ ID NO: 441295 - RNA, 22 nt, Human
gccucccuuccagcucugcagc

SEQ ID NO: 441296 - RNA, 17 nt, Human
gccucccuuccaugccc

SEQ ID NO: 441297 - RNA, 32 nt, Human
gccucccuuccccauucccaugcagcuccuuu

SEQ ID NO: 441298 - RNA, 32 nt, Human
gccucccuucccucagaccucucccucauaau

SEQ ID NO: 441299 - RNA, 32 nt, Human
gccucccuucgcucagcuucuccgcgccccug

SEQ ID NO: 441300 - RNA, 32 nt, Human
gccucccuucuguuuccugggcugcaggggag

SEQ ID NO: 441301 - RNA, 32 nt, Human
gccucccuugcagcucagguuuccuggcuucu

SEQ ID NO: 441302 - RNA, 32 nt, Human
gccucccuugcucucccugaggguggccugcc

SEQ ID NO: 441303 - RNA, 24 nt, Human
gccucccuugggcaucuucaugca

SEQ ID NO: 441304 - RNA, 21 nt, Human
gccucccuugucaccuucccu

SEQ ID NO: 441305 - RNA, 32 nt, Human
gccucccuuuucagagcacagcauuaaaguuu

SEQ ID NO: 441306 - RNA, 32 nt, Human
gccucccuuuucuccucuccccaauccaugcu

SEQ ID NO: 441307 - RNA, 17 nt, Human
gccuccgaaccaugccc

SEQ ID NO: 441308 - RNA, 32 nt, Human
gccuccgaaguagcugggaauuacaggcaccc

SEQ ID NO: 441309 - RNA, 32 nt, Human
gccuccgacuccugcuggcuccaggaaccggc

SEQ ID NO: 441310 - RNA, 32 nt, Human
gccuccgacuggcuggagcugcccccuccagg

SEQ ID NO: 441311 - RNA, 32 nt, Human
gccuccgagauagcugagggaaguucuuugcc

SEQ ID NO: 441312 - RNA, 19 nt, Human
gccuccgagcagcccgcca

SEQ ID NO: 441313 - RNA, 32 nt, Human
gccuccgaguagcugggaccacaggggcccgg

SEQ ID NO: 441314 - RNA, 32 nt, Human
gccuccgaguagcugggacuacaggugcacgc

SEQ ID NO: 441315 - RNA, 32 nt, Human
gccuccgaguagcugggacuacaggugugagu

SEQ ID NO: 441316 - RNA, 32 nt, Human
gccuccgcagaugaggcuacugccucacaaca

SEQ ID NO: 441317 - RNA, 18 nt, Human
gccuccgcauccacaccc

SEQ ID NO: 441318 - RNA, 22 nt, Human
gccuccgccacagccgccgccu

SEQ ID NO: 441319 - RNA, 32 nt, Human
gccuccgccaccuggguucaagcaauucuccu

SEQ ID NO: 441320 - RNA, 19 nt, Human
gccuccgccagcccucccu

SEQ ID NO: 441321 - RNA, 20 nt, Human
gccuccgccccgccaggccc

SEQ ID NO: 441322 - RNA, 18 nt, Human
gccuccgccccgcgcuca

SEQ ID NO: 441323 - RNA, 32 nt, Human
gccuccgcccuccgcccucggacuaucucuug

SEQ ID NO: 441324 - RNA, 20 nt, Human
gccuccgcccuuggggcccu

SEQ ID NO: 441325 - RNA, 16 nt, Human
gccuccgccgccgccc

SEQ ID NO: 441326 - RNA, 18 nt, Human
gccuccgccgccucgccc

SEQ ID NO: 441327 - RNA, 32 nt, Human
gccuccgccgccugcuccaccucgagggacgc

SEQ ID NO: 441328 - RNA, 32 nt, Human
gccuccgccgcucccagucccgccagacccga

SEQ ID NO: 441329 - RNA, 32 nt, Human
gccuccgccucccagguucaagcgauucuccu

SEQ ID NO: 441330 - RNA, 32 nt, Human
gccuccgccucccggguucaagcaauucucau

SEQ ID NO: 441331 - RNA, 32 nt, Human
gccuccgccucccggguucaagcgauucuccc

SEQ ID NO: 441332 - RNA, 32 nt, Human
gccuccgccuccugggcucaagcaauucuccc

SEQ ID NO: 441333 - RNA, 32 nt, Human
gccuccgccuccuggguucaagcaauucuacc

SEQ ID NO: 441334 - RNA, 32 nt, Human
gccuccgccuccuggguucaagugauucuccu

SEQ ID NO: 441335 - RNA, 32 nt, Human
gccuccgccuccuggguucaagugguucuccu

SEQ ID NO: 441336 - RNA, 32 nt, Human
gccuccgccugccucgacuuccccacagcgcu

SEQ ID NO: 441337 - RNA, 32 nt, Human
gccuccgccuucuccccucccgcgagccuccu

SEQ ID NO: 441338 - RNA, 32 nt, Human
gccuccgccuucuggguucaagcaauucuccu

SEQ ID NO: 441339 - RNA, 32 nt, Human
gccuccgccuugcccaaggccacggagggcgu

SEQ ID NO: 441340 - RNA, 17 nt, Human
gccuccgcgccaggccc

SEQ ID NO: 441341 - RNA, 22 nt, Human
gccuccgcgcggccucccgccc

SEQ ID NO: 441342 - RNA, 32 nt, Human
gccuccgcguccacccagcccaggaggaagac

SEQ ID NO: 441343 - RNA, 32 nt, Human
gccuccgcucacugcgugcaccuggcgcugcc

SEQ ID NO: 441344 - RNA, 18 nt, Human
gccuccgcuccagcgccc

SEQ ID NO: 441345 - RNA, 19 nt, Human
gccuccgcucccaacgccc

SEQ ID NO: 441346 - RNA, 17 nt, Human
gccuccgcuccccgccc

SEQ ID NO: 441347 - RNA, 22 nt, Human
gccuccgcucucucggggcacc

SEQ ID NO: 441348 - RNA, 32 nt, Human
gccuccgcuucccugguucaagcgauucucuu

SEQ ID NO: 441349 - RNA, 32 nt, Human
gccuccgcuuccgggguucaagcgauucuccu

SEQ ID NO: 441350 - RNA, 32 nt, Human
gccuccgcuuccuggguucaagcaauucuccc

SEQ ID NO: 441351 - RNA, 32 nt, Human
gccuccgcuuccuggguucaagcgauucuccu

SEQ ID NO: 441352 - RNA, 24 nt, Human
gccuccggaagcagcccuacaaca

SEQ ID NO: 441353 - RNA, 18 nt, Human
gccuccggacagcggcgu

SEQ ID NO: 441354 - RNA, 22 nt, Human
gccuccggaccucgcugcagcg

SEQ ID NO: 441355 - RNA, 20 nt, Human
gccuccggacugucuuccaa

SEQ ID NO: 441356 - RNA, 32 nt, Human
gccuccggagaacugggauuacaggcaugcac

SEQ ID NO: 441357 - RNA, 32 nt, Human
gccuccggagagagcuuggcccugcucacacc

SEQ ID NO: 441358 - RNA, 21 nt, Human
gccuccggcccgcccccggcc

SEQ ID NO: 441359 - RNA, 22 nt, Human
gccuccggcccugccccacaca

SEQ ID NO: 441360 - RNA, 25 nt, Human
gccuccggccgggaggcaccagcuc

SEQ ID NO: 441361 - RNA, 32 nt, Human
gccuccggcucugcgcucaccugcugccuagu

SEQ ID NO: 441362 - RNA, 32 nt, Human
gccuccgggccagacgcgcugcagccuccagc

SEQ ID NO: 441363 - RNA, 22 nt, Human
gccuccggggcaccuucaggca

SEQ ID NO: 441364 - RNA, 32 nt, Human
gccuccggggcuggugcguggccggcagcucg

SEQ ID NO: 441365 - RNA, 19 nt, Human
gccuccguagccgccccgg

SEQ ID NO: 441366 - RNA, 32 nt, Human
gccuccguauuucagacugaaugggggugggg

SEQ ID NO: 441367 - RNA, 19 nt, Human
gccuccgucauccaugccc

SEQ ID NO: 441368 - RNA, 32 nt, Human
gccuccgucucccagguucaagcaguucuccu

SEQ ID NO: 441369 - RNA, 20 nt, Human
gccuccgucuggguaccagc

SEQ ID NO: 441370 - RNA, 32 nt, Human
gccuccgugagcuggugcugccccaggcucca

SEQ ID NO: 441371 - RNA, 32 nt, Human
gccuccguggcuggcccugugcccucugucuu

SEQ ID NO: 441372 - RNA, 24 nt, Human
gccuccguuuccucaacugugaaa

SEQ ID NO: 441373 - RNA, 32 nt, Human
gccuccuaaagugcuggagauuacaggcauga

SEQ ID NO: 441374 - RNA, 32 nt, Human
gccuccuaagugcugggauuacaggcgugaac

SEQ ID NO: 441375 - RNA, 18 nt, Human
gccuccuaccugccccca

SEQ ID NO: 441376 - RNA, 32 nt, Human
gccuccuacuuuuaccuguccaugucuuauac

SEQ ID NO: 441377 - RNA, 32 nt, Human
gccuccuagaggcugagggggcaacgguguga

SEQ ID NO: 441378 - RNA, 32 nt, Human
gccuccuagggagggcggggguuguggugaga

SEQ ID NO: 441379 - RNA, 32 nt, Human
gccuccuaguaccaaaccuacaguggcuuccc

SEQ ID NO: 441380 - RNA, 32 nt, Human
gccuccuaguuucccccuaugaagguucccuu

SEQ ID NO: 441381 - RNA, 32 nt, Human
gccuccucagcccucggcgccgccgccugacc

SEQ ID NO: 441382 - RNA, 32 nt, Human
gccuccucagggcugaagaugccuccauucgc

SEQ ID NO: 441383 - RNA, 20 nt, Human
gccuccuccaagagggcuca

SEQ ID NO: 441384 - RNA, 32 nt, Human
gccuccuccaccuccaccuccaccccgccugg

SEQ ID NO: 441385 - RNA, 32 nt, Human
gccuccuccagccucagggaacuguggaacua

SEQ ID NO: 441386 - RNA, 32 nt, Human
gccuccuccauaccucauugccaucuggcucu

SEQ ID NO: 441387 - RNA, 32 nt, Human
gccuccucccugccaaccuccuccucccugcc

SEQ ID NO: 441388 - RNA, 32 nt, Human
gccuccucccuucccuuccacucuuuaaaguu

SEQ ID NO: 441389 - RNA, 32 nt, Human
gccuccuccuagcuggagugccauggcugggg

SEQ ID NO: 441390 - RNA, 32 nt, Human
gccuccuccuccugccauucucucuccaccua

SEQ ID NO: 441391 - RNA, 32 nt, Human
gccuccuccucuuccuccuccuccugggccgg

SEQ ID NO: 441392 - RNA, 32 nt, Human
gccuccuccucuuccuccuuaucuucuccaac

SEQ ID NO: 441393 - RNA, 32 nt, Human
gccuccuccucuucucucauccuuccuccgac

SEQ ID NO: 441394 - RNA, 32 nt, Human
gccuccuccuuggagcucuguagccaucgugg

SEQ ID NO: 441395 - RNA, 32 nt, Human
gccuccucgcuccugagaccuggcccugccac

SEQ ID NO: 441396 - RNA, 32 nt, Human
gccuccucggccuuggagagcagcggcggcgg

SEQ ID NO: 441397 - RNA, 25 nt, Human
gccuccucuagccaucccuugggga

SEQ ID NO: 441398 - RNA, 32 nt, Human
gccuccucucaccauucucugccauccuccau

SEQ ID NO: 441399 - RNA, 32 nt, Human
gccuccucucaccccugcuccagcccaccaca

SEQ ID NO: 441400 - RNA, 32 nt, Human
gccuccucucggugcgggaccaugaagcugcu

SEQ ID NO: 441401 - RNA, 32 nt, Human
gccuccucucugcuucucccuccuccucagua

SEQ ID NO: 441402 - RNA, 32 nt, Human
gccuccucucugugugugccucugcguucccu

SEQ ID NO: 441403 - RNA, 32 nt, Human
gccuccucugcaccuggacaacucaacuccug

SEQ ID NO: 441404 - RNA, 32 nt, Human
gccuccucugccaccucugccaccuccccuga

SEQ ID NO: 441405 - RNA, 32 nt, Human
gccuccucugcccugcccaccagccugugauu

SEQ ID NO: 441406 - RNA, 32 nt, Human
gccuccucugcgucuccgccuucccugggccg

SEQ ID NO: 441407 - RNA, 32 nt, Human
gccuccucugguguugcaaggaagaggcugaa

SEQ ID NO: 441408 - RNA, 32 nt, Human
gccuccucuucacucuccucugauuagaugaa

SEQ ID NO: 441409 - RNA, 32 nt, Human
gccuccucuuccacugucguccuuccucagag

SEQ ID NO: 441410 - RNA, 32 nt, Human
gccuccucuucccaggggcugccaaguccugg

SEQ ID NO: 441411 - RNA, 32 nt, Human
gccuccucuugcugcuaaucucugcugugaac

SEQ ID NO: 441412 - RNA, 32 nt, Human
gccuccugaaccacuggccccaaccaacccac

SEQ ID NO: 441413 - RNA, 19 nt, Human
gccuccugaaggaaggaag

SEQ ID NO: 441414 - RNA, 32 nt, Human
gccuccugaaguagcuggaacuacagacaugc

SEQ ID NO: 441415 - RNA, 22 nt, Human
gccuccugacaagcgggaggga

SEQ ID NO: 441416 - RNA, 32 nt, Human
gccuccugagagcugggacuacaggcgccugc

SEQ ID NO: 441417 - RNA, 20 nt, Human
gccuccugagcuccaugccc

SEQ ID NO: 441418 - RNA, 32 nt, Human
gccuccugagcuccaugcccaucaggacucua

SEQ ID NO: 441419 - RNA, 32 nt, Human
gccuccugaguagcuggauuacaggcaugugc

SEQ ID NO: 441420 - RNA, 32 nt, Human
gccuccugaguagcuggauuacagggccuggc

SEQ ID NO: 441421 - RNA, 32 nt, Human
gccuccugaguagcugggacuacaagugugua

SEQ ID NO: 441422 - RNA, 32 nt, Human
gccuccugcaccuccucaccucccagccugcc

SEQ ID NO: 441423 - RNA, 18 nt, Human
gccuccugcagaacuuug

SEQ ID NO: 441424 - RNA, 32 nt, Human
gccuccugcagaccuccgccaucugggggcac

SEQ ID NO: 441425 - RNA, 32 nt, Human
gccuccugcagagguaccgccugcugcccccg

SEQ ID NO: 441426 - RNA, 21 nt, Human
gccuccugcaguuucuucucu

SEQ ID NO: 441427 - RNA, 32 nt, Human
gccuccugccacugaggcccugggcagaugcu

SEQ ID NO: 441428 - RNA, 32 nt, Human
gccuccugcccacaauggccucugcugacaag

SEQ ID NO: 441429 - RNA, 32 nt, Human
gccuccugcccagcacaggaaucgguggucuc

SEQ ID NO: 441430 - RNA, 32 nt, Human
gccuccugcccuggcccggcgcugcggcucug

SEQ ID NO: 441431 - RNA, 32 nt, Human
gccuccugcccuugucacuaaucaccaaggag

SEQ ID NO: 441432 - RNA, 32 nt, Human
gccuccugccuccccaucuucucucugcccag

SEQ ID NO: 441433 - RNA, 32 nt, Human
gccuccugccuccccugccugccugggaccca

SEQ ID NO: 441434 - RNA, 21 nt, Human
gccuccugcggacaccagcuc

SEQ ID NO: 441435 - RNA, 32 nt, Human
gccuccugcugggaacagugucccccagagcc

SEQ ID NO: 441436 - RNA, 32 nt, Human
gccuccugcuuggaucucuccugggucucccu

SEQ ID NO: 441437 - RNA, 21 nt, Human
gccuccuggaaacaccagcuc

SEQ ID NO: 441438 - RNA, 32 nt, Human
gccuccuggaggaggaaguggaggccgcugcg

SEQ ID NO: 441439 - RNA, 32 nt, Human
gccuccuggaguuuuauuuuguuuuucugcuu

SEQ ID NO: 441440 - RNA, 19 nt, Human
gccuccuggccccacccca

SEQ ID NO: 441441 - RNA, 32 nt, Human
gccuccuggccuggcccccaccggugcauccg

SEQ ID NO: 441442 - RNA, 32 nt, Human
gccuccuggcugcuucagcagguggauccauu

SEQ ID NO: 441443 - RNA, 29 nt, Human
gccuccuggcugcuuucuccccuuccccc

SEQ ID NO: 441444 - RNA, 32 nt, Human
gccuccuggcugggugcucagugcuuguuucu

SEQ ID NO: 441445 - RNA, 32 nt, Human
gccuccugggaccucagcagggccgaggauca

SEQ ID NO: 441446 - RNA, 32 nt, Human
gccuccugggccaccaguaucaguuccuuccu

SEQ ID NO: 441447 - RNA, 32 nt, Human
gccuccugggcuauuccucuccacccagaagg

SEQ ID NO: 441448 - RNA, 32 nt, Human
gccuccuggggaggggcucgaggagcccacgc

SEQ ID NO: 441449 - RNA, 32 nt, Human
gccuccugguccccucagcucugccucugcag

SEQ ID NO: 441450 - RNA, 32 nt, Human
gccuccuggucuuccugagccugggccuggua

SEQ ID NO: 441451 - RNA, 32 nt, Human
gccuccuguaaucccagcuacuugggaggcug

SEQ ID NO: 441452 - RNA, 32 nt, Human
gccuccuguagcaguagggcccccagccagcg

SEQ ID NO: 441453 - RNA, 32 nt, Human
gccuccuguagggcagugccaggccuugauug

SEQ ID NO: 441454 - RNA, 32 nt, Human
gccuccugucccugccugcucugggugcucau

SEQ ID NO: 441455 - RNA, 32 nt, Human
gccuccugucucucgaaucuuccagagauauc

SEQ ID NO: 441456 - RNA, 32 nt, Human
gccuccugucugcaguggccauccugaggaua

SEQ ID NO: 441457 - RNA, 32 nt, Human
gccuccugugggaggcugaggacugcaagagg

SEQ ID NO: 441458 - RNA, 32 nt, Human
gccuccuguggucucaggcuugcgcuggaccu

SEQ ID NO: 441459 - RNA, 32 nt, Human
gccuccuuaaggaaggugcaagagguuggcag

SEQ ID NO: 441460 - RNA, 32 nt, Human
gccuccuuaguagugggauuacaggugcccgc

SEQ ID NO: 441461 - RNA, 32 nt, Human
gccuccuuaguggugcuugcagucacaggaag

SEQ ID NO: 441462 - RNA, 21 nt, Human
gccuccuucacccuuccugcc

SEQ ID NO: 441463 - RNA, 18 nt, Human
gccuccuucaggcugcug

SEQ ID NO: 441464 - RNA, 32 nt, Human
gccuccuucccaggacccaggucugcugccca

SEQ ID NO: 441465 - RNA, 32 nt, Human
gccuccuucccauggauugcaaaggaacggug

SEQ ID NO: 441466 - RNA, 32 nt, Human
gccuccuucccgcuuuuugaguuacagggagu

SEQ ID NO: 441467 - RNA, 32 nt, Human
gccuccuuccuugaaugcuuucuaagaggggc

SEQ ID NO: 441468 - RNA, 32 nt, Human
gccuccuucgacucggcuccugcccagcuccc

SEQ ID NO: 441469 - RNA, 19 nt, Human
gccuccuucuccccugcca

SEQ ID NO: 441470 - RNA, 32 nt, Human
gccuuuggccuaaaccauuucuagcuauggac

SEQ ID NO: 441471 - RNA, 32 nt, Human
gccuuuggccuuucuccucccaggccuccaca

SEQ ID NO: 441472 - RNA, 32 nt, Human
gccuuugggaaagaucagagaggcagaggugg

SEQ ID NO: 441473 - RNA, 32 nt, Human
gccuuugggaggugaugggguuaugagggugg

SEQ ID NO: 441474 - RNA, 32 nt, Human
gccuuugggaggugguuaggccgugagggugg

SEQ ID NO: 441475 - RNA, 32 nt, Human
gccuuugggcugggggccucucuccuggguca

SEQ ID NO: 441476 - RNA, 32 nt, Human
gccuuuggggcagacuccagacaaggaugucu

SEQ ID NO: 441477 - RNA, 32 nt, Human
gccuuugggugagggacacugguagggaucaa

SEQ ID NO: 441478 - RNA, 32 nt, Human
gccuuuggucccacccccauccccucuauauc

SEQ ID NO: 441479 - RNA, 32 nt, Human
gccuuuggucuccuggaugggccuuugagccu

SEQ ID NO: 441480 - RNA, 32 nt, Human
gccuuugguggagccggggagaggaagggugg

SEQ ID NO: 441481 - RNA, 32 nt, Human
gccuuugguggggaacagaaccuccgcaucgu

SEQ ID NO: 441482 - RNA, 18 nt, Human
gccuuuguaccucaggug

SEQ ID NO: 441483 - RNA, 32 nt, Human
gccuuugucaccgggaccucagccugacccca

SEQ ID NO: 441484 - RNA, 32 nt, Human
gccuuugucaugaguugagaaaaguaguccua

SEQ ID NO: 441485 - RNA, 32 nt, Human
gccuuugucgcccaggcuggagugcaauggcg

SEQ ID NO: 441486 - RNA, 32 nt, Human
gccuuugucucaggagcaaaccagccuuggcu

SEQ ID NO: 441487 - RNA, 32 nt, Human
gccuuugucuccaccugaaacuccugaaaauc

SEQ ID NO: 441488 - RNA, 32 nt, Human
gccuuugucugugguuccuggcaagguggcuu

SEQ ID NO: 441489 - RNA, 32 nt, Human
gccuuugucuugucccucaguggggguucucu

SEQ ID NO: 441490 - RNA, 32 nt, Human
gccuuugugaagccagcagaggcugagaaccu

SEQ ID NO: 441491 - RNA, 23 nt, Human
gccuuugugcucccaccucuucu

SEQ ID NO: 441492 - RNA, 32 nt, Human
gccuuuguggaaaacucgugggugacagugag

SEQ ID NO: 441493 - RNA, 32 nt, Human
gccuuuguggugaauggaggaccacgucuauu

SEQ ID NO: 441494 - RNA, 32 nt, Human
gccuuuguuucugcauuaaaccaauauugauc

SEQ ID NO: 441495 - RNA, 32 nt, Human
gccuuuuagaaaacauggaguugcuccuuugg

SEQ ID NO: 441496 - RNA, 32 nt, Human
gccuuuuagggcaugaggauguugggagaaua

SEQ ID NO: 441497 - RNA, 32 nt, Human
gccuuuuauacugaagaugccaccccaagcag

SEQ ID NO: 441498 - RNA, 32 nt, Human
gccuuuuauuuacuaucccccaccccaucaau

SEQ ID NO: 441499 - RNA, 32 nt, Human
gccuuuuauuuauaaagacacuaagaaaaccc

SEQ ID NO: 441500 - RNA, 25 nt, Human
gccuuuucauugcccgaaaccagag

SEQ ID NO: 441501 - RNA, 32 nt, Human
gccuuuuccagcuggcugcagagaaggggcca

SEQ ID NO: 441502 - RNA, 32 nt, Human
gccuuuuccuccuccucacagaggagaugugu

SEQ ID NO: 441503 - RNA, 32 nt, Human
gccuuuuccuggaggccuuccugggccuucuu

SEQ ID NO: 441504 - RNA, 32 nt, Human
gccuuuucuaggauugcauuucccaagugcua

SEQ ID NO: 441505 - RNA, 32 nt, Human
gccuuuucuucccagggacucuggucauugcu

SEQ ID NO: 441506 - RNA, 32 nt, Human
gccuuuucuuguagguguguccuuuucaaauu

SEQ ID NO: 441507 - RNA, 32 nt, Human
gccuuuugaaaagagaaaaagaaugaaguaac

SEQ ID NO: 441508 - RNA, 32 nt, Human
gccuuuugaacuguacaucucacauguuggga

SEQ ID NO: 441509 - RNA, 32 nt, Human
gccuuuugccccacccccagcauacaaugaug

SEQ ID NO: 441510 - RNA, 19 nt, Human
gccuuuugcuguccuggua

SEQ ID NO: 441511 - RNA, 32 nt, Human
gccuuuuggauggauugucucuaguuacuccc

SEQ ID NO: 441512 - RNA, 32 nt, Human
gccuuuugguacaguguuuucaucucuugguc

SEQ ID NO: 441513 - RNA, 32 nt, Human
gccuuuuguagucuuccaggagacaggugauu

SEQ ID NO: 441514 - RNA, 32 nt, Human
gccuuuugucaaggagucugcaggaauuggcu

SEQ ID NO: 441515 - RNA, 32 nt, Human
gccuuuugucugcuucuacuacuccaucaagg

SEQ ID NO: 441516 - RNA, 32 nt, Human
gccuuuuguugcugccugucaugcucucacuc

SEQ ID NO: 441517 - RNA, 17 nt, Human
gccuuuuuaaagcuuug

SEQ ID NO: 441518 - RNA, 32 nt, Human
gccuuuuuacagccaacuuuucuagaccuguu

SEQ ID NO: 441519 - RNA, 32 nt, Human
gccuuuuuccaaaagaccggcaauaacacuug

SEQ ID NO: 441520 - RNA, 32 nt, Human
gccuuuuucuccuuugcuuucugccaugauua

SEQ ID NO: 441521 - RNA, 32 nt, Human
gccuuuuugacgucccuggcuguugugggcaa

SEQ ID NO: 441522 - RNA, 32 nt, Human
gccuuuuugcagugggaggcgacgguggagga

SEQ ID NO: 441523 - RNA, 32 nt, Human
gcgaaaaagaaaaagaaagaaggggagagggc

SEQ ID NO: 441524 - RNA, 32 nt, Human
gcgaaaacugguuuuucauguguuuuugugcc

SEQ ID NO: 441525 - RNA, 32 nt, Human
gcgaaaagacggaaagaaagaaagaaaacgag

SEQ ID NO: 441526 - RNA, 32 nt, Human
gcgaaaaucuccugugcuuguggaagcaacau

SEQ ID NO: 441527 - RNA, 23 nt, Human
gcgaaacagagugaauggucaac

SEQ ID NO: 441528 - RNA, 32 nt, Human
gcgaaacauugcccucaacagccaccuggcug

SEQ ID NO: 441529 - RNA, 32 nt, Human
gcgaaagaaaucaaacccccaacuucuucggc

SEQ ID NO: 441530 - RNA, 21 nt, Human
gcgaaagccgcagccgagucc

SEQ ID NO: 441531 - RNA, 24 nt, Human
gcgaaagcuggagaagcagcagca

SEQ ID NO: 441532 - RNA, 32 nt, Human
gcgaaaggaaaggccuucacacccucacagag

SEQ ID NO: 441533 - RNA, 22 nt, Human
gcgaaaggagcaggguugcgga

SEQ ID NO: 441534 - RNA, 32 nt, Human
gcgaaaucucagcucacugcaaccuccgccuc

SEQ ID NO: 441535 - RNA, 32 nt, Human
gcgaaaucuuuguacuucugaguucuugcugu

SEQ ID NO: 441536 - RNA, 32 nt, Human
gcgaacaaaugcugggguccuuggggaccagc

SEQ ID NO: 441537 - RNA, 32 nt, Human
gcgaacagccauugcacuccagccugggcaac

SEQ ID NO: 441538 - RNA, 32 nt, Human
gcgaacauggugagacccaucucuacuaaaaa

SEQ ID NO: 441539 - RNA, 32 nt, Human
gcgaaccuauaguagcagcuacuccagaggcu

SEQ ID NO: 441540 - RNA, 32 nt, Human
gcgaaccugaggaggaagaaacggggcuagcg

SEQ ID NO: 441541 - RNA, 32 nt, Human
gcgaaccugccugggcaggcagcucgcgcagg

SEQ ID NO: 441542 - RNA, 32 nt, Human
gcgaaccugccuguaucucacccaugaugcgu

SEQ ID NO: 441543 - RNA, 32 nt, Human
gcgaaccuguucccucuccccacaucccccgc

SEQ ID NO: 441544 - RNA, 32 nt, Human
gcgaacgcagccgccacgccggggccgccgag

SEQ ID NO: 441545 - RNA, 32 nt, Human
gcgaacggcuccaguucaaagccacaugcacc

SEQ ID NO: 441546 - RNA, 32 nt, Human
gcgaacgucuugcuguuguguuuuuauguccc

SEQ ID NO: 441547 - RNA, 32 nt, Human
gcgaacucccagaaggugguggugggcacugu

SEQ ID NO: 441548 - RNA, 32 nt, Human
gcgaacuccccagaggaggagguagugcgagg

SEQ ID NO: 441549 - RNA, 19 nt, Human
gcgaacuccgcggccucgg

SEQ ID NO: 441550 - RNA, 32 nt, Human
gcgaacucucagaaauaaaucacagaugcaua

SEQ ID NO: 441551 - RNA, 32 nt, Human
gcgaacugaguauuuaaugacacuucuagagc

SEQ ID NO: 441552 - RNA, 32 nt, Human
gcgaacugucagccucagccucccagugugcu

SEQ ID NO: 441553 - RNA, 32 nt, Human
gcgaagaagacaugauaaggacaucagggagc

SEQ ID NO: 441554 - RNA, 32 nt, Human
gcgaagaccacgaugaagcccccaacagccac

SEQ ID NO: 441555 - RNA, 24 nt, Human
gcgaagaccccgccugcgcccccg

SEQ ID NO: 441556 - RNA, 32 nt, Human
gcgaagacugcuccugguggccugugcauagg

SEQ ID NO: 441557 - RNA, 32 nt, Human
gcgaagagagaagagacuaucaagaucuccac

SEQ ID NO: 441558 - RNA, 32 nt, Human
gcgaagagagagagcuguaggccagcugccgg

SEQ ID NO: 441559 - RNA, 32 nt, Human
gcgaagagagggcugaacccguccgcugcccg

SEQ ID NO: 441560 - RNA, 32 nt, Human
gcgaagaggaggaggaaggggaggacgauggg

SEQ ID NO: 441561 - RNA, 22 nt, Human
gcgaagcagcgagcugaggcgg

SEQ ID NO: 441562 - RNA, 32 nt, Human
gcgaagcccagaggaggcggcuugggauccuc

SEQ ID NO: 441563 - RNA, 23 nt, Human
gcgaagccgaaaaaggcagcagc

SEQ ID NO: 441564 - RNA, 20 nt, Human
gcgaagccggggguggcggc

SEQ ID NO: 441565 - RNA, 21 nt, Human
gcgaagcggcugcagcggcgg

SEQ ID NO: 441566 - RNA, 22 nt, Human
gcgaagcggcuggagggcggcg

SEQ ID NO: 441567 - RNA, 22 nt, Human
gcgaagcgggaaagcgcggcgg

SEQ ID NO: 441568 - RNA, 32 nt, Human
gcgaagcuuccuccuccucuccagcugguagu

SEQ ID NO: 441569 - RNA, 32 nt, Human
gcgaaggagcgcguagccgagaucaggcguac

SEQ ID NO: 441570 - RNA, 23 nt, Human
gcgaaggagcuggaaaccgagcc

SEQ ID NO: 441571 - RNA, 32 nt, Human
gcgaaggaggaagaggaggaggaggaagaggg

SEQ ID NO: 441572 - RNA, 32 nt, Human
gcgaaggaggcagcgggccgggggcugaggcg

SEQ ID NO: 441573 - RNA, 22 nt, Human
gcgaaggagucgacuccagcga

SEQ ID NO: 441574 - RNA, 24 nt, Human
gcgaaggccagggucccacacucg

SEQ ID NO: 441575 - RNA, 21 nt, Human
gcgaagggcagcggaggagcg

SEQ ID NO: 441576 - RNA, 32 nt, Human
gcgaaggggccgggccccagacugagccugug

SEQ ID NO: 441577 - RNA, 22 nt, Human
gcgaaggggguugcaguagggg

SEQ ID NO: 441578 - RNA, 20 nt, Human
gcgaaggugacggaggagug

SEQ ID NO: 441579 - RNA, 32 nt, Human
gcgaagucuuccagcucagcagugucucguuc

SEQ ID NO: 441580 - RNA, 32 nt, Human
gcgaagugaaggguggcccagguggggccagg

SEQ ID NO: 441581 - RNA, 24 nt, Human
gcgaagugacucacaccugcaauc

SEQ ID NO: 441582 - RNA, 23 nt, Human
gcgaagugcgagagaccccggac

SEQ ID NO: 441583 - RNA, 24 nt, Human
gcgaaguggcccaugccuguaauc

SEQ ID NO: 441584 - RNA, 32 nt, Human
gcgaauagccacugcacuccagccugggcaau

SEQ ID NO: 441585 - RNA, 20 nt, Human
gcgaaucaccugaggucagg

SEQ ID NO: 441586 - RNA, 32 nt, Human
gcgaaucgaguugccaggugucacugaugcua

SEQ ID NO: 441587 - RNA, 32 nt, Human
gcgaaugauguggacaacaagcgcugcuaccu

SEQ ID NO: 441588 - RNA, 32 nt, Human
gcgaaugcccaaccucauaaacuaucugaaac

SEQ ID NO: 441589 - RNA, 32 nt, Human
gcgaaugcccaggacuucaacgcaugcacuuu

SEQ ID NO: 441590 - RNA, 32 nt, Human
gcgaaugcucuaucuccagucugucucugugu

SEQ ID NO: 441591 - RNA, 32 nt, Human
gcgaauggcgugaacccgggaggcggagcuug

SEQ ID NO: 441592 - RNA, 29 nt, Human
gcgaaugggaccggaggcgaggaggacga

SEQ ID NO: 441593 - RNA, 26 nt, Human
gcgaaugggucagagccagaccccgg

SEQ ID NO: 441594 - RNA, 32 nt, Human
gcgaauguccguuuucucucccuucccaccuc

SEQ ID NO: 441595 - RNA, 32 nt, Human
gcgaauuggaaaugcugagcuuccauaaguca

SEQ ID NO: 441596 - RNA, 32 nt, Human
gcgacaaccucagugggcucugcuucugccag

SEQ ID NO: 441597 - RNA, 32 nt, Human
gcgacaaucacugacgccgaagccugcagcca

SEQ ID NO: 441598 - RNA, 32 nt, Human
gcgacacacacguguaacacugcaucggaugc

SEQ ID NO: 441599 - RNA, 32 nt, Human
gcgacaccuugauuuugaccuugugagaccua

SEQ ID NO: 441600 - RNA, 32 nt, Human
gcgacacgagacuggcaccucuacaucugauu

SEQ ID NO: 441601 - RNA, 32 nt, Human
gcgacacugcacuccagccugggcaacagagu

SEQ ID NO: 441602 - RNA, 32 nt, Human
gcgacacugcacuccagccugggugacgguga

SEQ ID NO: 441603 - RNA, 32 nt, Human
gcgacacugcacugcaggcugggcuacaaagc

SEQ ID NO: 441604 - RNA, 32 nt, Human
gcgacacugcgcuccagccugggcaacaagag

SEQ ID NO: 441605 - RNA, 32 nt, Human
gcgacacuggcggccuccgaccucucagaccu

SEQ ID NO: 441606 - RNA, 32 nt, Human
gcgacacuuuacucacagccuggcuugaguca

SEQ ID NO: 441607 - RNA, 32 nt, Human
gcgacacuuugguggggguggguuguuugucg

SEQ ID NO: 441608 - RNA, 32 nt, Human
gcgacagagcccggggaaggaggcagggcaag

SEQ ID NO: 441609 - RNA, 28 nt, Human
gcgacagcacugggaaugacaacuggaa

SEQ ID NO: 441610 - RNA, 18 nt, Human
gcgacagcagcaacagca

SEQ ID NO: 441611 - RNA, 32 nt, Human
gcgacagcuagaugaguguuugaauaacuggg

SEQ ID NO: 441612 - RNA, 32 nt, Human
gcgacaggaaaucucuagguuggugagugcug

SEQ ID NO: 441613 - RNA, 32 nt, Human
gcgacaggaauagaugugguccuuaggagacg

SEQ ID NO: 441614 - RNA, 32 nt, Human
gcgacaggacauggagaaagagcgagagacuc

SEQ ID NO: 441615 - RNA, 32 nt, Human
gcgacaggaggcagggcagacuguggaggaca

SEQ ID NO: 441616 - RNA, 32 nt, Human
gcgacagggaaagcgcgggcgagcgcaggaga

SEQ ID NO: 441617 - RNA, 32 nt, Human
gcgacagggagggucagagggaggccggcugc

SEQ ID NO: 441618 - RNA, 32 nt, Human
gcgacagguggugcagcagagcuggauugcgc

SEQ ID NO: 441619 - RNA, 32 nt, Human
gcgacauaggaaaauaaccaagcacaaaguua

SEQ ID NO: 441620 - RNA, 23 nt, Human
gcgacaucugcccugagcugcuc

SEQ ID NO: 441621 - RNA, 32 nt, Human
gcgacauggcuagggcugguucugccaucuga

SEQ ID NO: 441622 - RNA, 32 nt, Human
gcgacaugggauuuaauuuggcuaaagcaccc

SEQ ID NO: 441623 - RNA, 30 nt, Human
gcgacauguccaccccggcucggcggcgcc

SEQ ID NO: 441624 - RNA, 32 nt, Human
gcgaccaacacagaggagagaaaacaaaaaua

SEQ ID NO: 441625 - RNA, 22 nt, Human
gcgaccaccuggcaggggagcg

SEQ ID NO: 441626 - RNA, 32 nt, Human
gcgaccagccugggcagaauagcaagacccag

SEQ ID NO: 441627 - RNA, 32 nt, Human
gcgaccagccuggucaacauaguggaccccag

SEQ ID NO: 441628 - RNA, 32 nt, Human
gcgaccaggacgucagccagcacugcacagac

SEQ ID NO: 441629 - RNA, 32 nt, Human
gcgaccaggcuggacucgggcugugcaggggc

SEQ ID NO: 441630 - RNA, 32 nt, Human
gcgaccccaauauuuggaaccaggaagcugca

SEQ ID NO: 441631 - RNA, 32 nt, Human
gcgaccccgggaacccugcucaguccugccgg

SEQ ID NO: 441632 - RNA, 32 nt, Human
gcgacccgacauagugagacccugucucuacu

SEQ ID NO: 441633 - RNA, 32 nt, Human
gcgacccguggggcaugcaagccucagugagc

SEQ ID NO: 441634 - RNA, 32 nt, Human
gcgacccucacuggccuggccuugugggggcu

SEQ ID NO: 441635 - RNA, 19 nt, Human
gcgacccugcagcugcucg

SEQ ID NO: 441636 - RNA, 32 nt, Human
gcgacccugcagcugcucgcucugauguaccc

SEQ ID NO: 441637 - RNA, 32 nt, Human
gcgaccgagcccagagagacggagcaaguugc

SEQ ID NO: 441638 - RNA, 32 nt, Human
gcgaccgaggagagaagagagcagagcaauac

SEQ ID NO: 441639 - RNA, 24 nt, Human
gcgaccgcagaccuccccagggug

SEQ ID NO: 441640 - RNA, 24 nt, Human
gcgaccgcagccauucuccagggu

SEQ ID NO: 441641 - RNA, 19 nt, Human
gcgaccgccgcggcugcag

SEQ ID NO: 441642 - RNA, 32 nt, Human
gcgaccgcugcucggccugcugugccacauac

SEQ ID NO: 441643 - RNA, 32 nt, Human
gcgaccggacgcugcgggcggggaagaggaug

SEQ ID NO: 441644 - RNA, 32 nt, Human
gcgaccgggcggacgagguggagccagagucu

SEQ ID NO: 441645 - RNA, 32 nt, Human
gcgaccuaaccccacagguggggaaggacuau

SEQ ID NO: 441646 - RNA, 32 nt, Human
gcgaccuagggcacuaucucccuaccccacgc

SEQ ID NO: 441647 - RNA, 32 nt, Human
gcgaccucaccuucauucuuaggucaauacag

SEQ ID NO: 441648 - RNA, 32 nt, Human
gcgaccucuccaucuucagcuucuucaucuuc

SEQ ID NO: 441649 - RNA, 19 nt, Human
gcgaccuggagcccgggug

SEQ ID NO: 441650 - RNA, 32 nt, Human
gcgaccugggaggcacagggaggggagagaug

SEQ ID NO: 441651 - RNA, 32 nt, Human
gcgaccugggcugggagcagagcugacugaca

SEQ ID NO: 441652 - RNA, 32 nt, Human
gcgaccugggcuguggcugagacaauaaugag

SEQ ID NO: 441653 - RNA, 32 nt, Human
gcgaccuugcaaccucaccuuccugugggugu

SEQ ID NO: 441654 - RNA, 23 nt, Human
gcgaccuuggccggacccagccc

SEQ ID NO: 441655 - RNA, 31 nt, Human
gcgacgacuacgaccacuaggagagcggacg

SEQ ID NO: 441656 - RNA, 32 nt, Human
gcgacgagaaggcugggcucuuccgcuacugc

SEQ ID NO: 441657 - RNA, 32 nt, Human
gcgacgcaggcagaccauggcagaguucuccc

SEQ ID NO: 441658 - RNA, 32 nt, Human
gcgacgccuauuuuguauaaaguuuccgacuc

SEQ ID NO: 441659 - RNA, 32 nt, Human
gcgacgcggcccagaggccaggaacauuccgc

SEQ ID NO: 441660 - RNA, 32 nt, Human
gcgacggagggcagggcccacccugcgguguc

SEQ ID NO: 441661 - RNA, 32 nt, Human
gcgacggauccuccuccucccuuauucccuug

SEQ ID NO: 441662 - RNA, 32 nt, Human
gcgacggggaagcaggaggugugggguugguc

SEQ ID NO: 441663 - RNA, 32 nt, Human
gcgacgucaccgccauggcaggcaucaaagcu

SEQ ID NO: 441664 - RNA, 32 nt, Human
gcgacguccugcuggucucugccaucaucacc

SEQ ID NO: 441665 - RNA, 32 nt, Human
gcgacgugccccagaagugcagccgugaaggc

SEQ ID NO: 441666 - RNA, 32 nt, Human
gcgacguguauuaagcagcgguugugacucau

SEQ ID NO: 441667 - RNA, 32 nt, Human
gcgacgugucccacuguccuggcuccgugggu

SEQ ID NO: 441668 - RNA, 32 nt, Human
gcgacuaccucccuucugacccugcugcuggc

SEQ ID NO: 441669 - RNA, 32 nt, Human
gcgacuagccgggagaccagagaucuagcgac

SEQ ID NO: 441670 - RNA, 32 nt, Human
gcgacuaggagcugagccuucuaccucgacgg

SEQ ID NO: 441671 - RNA, 32 nt, Human
gcgacuagggcuuugagcugggcaguuuuccc

SEQ ID NO: 441672 - RNA, 32 nt, Human
gcgacuccaggugggagugagggagcccagcc

SEQ ID NO: 441673 - RNA, 22 nt, Human
gcgacucccagaagagauagcc

SEQ ID NO: 441674 - RNA, 32 nt, Human
gcgacuccggagcccagcagagcugcgcuuuu

SEQ ID NO: 441675 - RNA, 20 nt, Human
gcgacuccuauggcccagcc

SEQ ID NO: 441676 - RNA, 32 nt, Human
gcgacuccucugagcugaguuugaggccgucc

SEQ ID NO: 441677 - RNA, 32 nt, Human
gcgacuccugcucuugcuucuggaucugcagg

SEQ ID NO: 441678 - RNA, 21 nt, Human
gcgacuccugguacccagacc

SEQ ID NO: 441679 - RNA, 32 nt, Human
gcgacugagaacaccaggaucagauccgugcg

SEQ ID NO: 441680 - RNA, 32 nt, Human
gcgacugcaugguggagagggagcuggggcgc

SEQ ID NO: 441681 - RNA, 32 nt, Human
gcgacugccugggguccuauuuuccacccugc

SEQ ID NO: 441682 - RNA, 32 nt, Human
gcgacugcgccccagacuucugucuuuucagc

SEQ ID NO: 441683 - RNA, 32 nt, Human
gcgacugcgcucaguucucuccucucggaagc

SEQ ID NO: 441684 - RNA, 32 nt, Human
gcgacugcucccggccggaggugcagggagcu

SEQ ID NO: 441685 - RNA, 32 nt, Human
gcgacuggagccagaugugagcugagcccaag

SEQ ID NO: 441686 - RNA, 32 nt, Human
gcgacuggcgccgccucaccgccucccaccgc

SEQ ID NO: 441687 - RNA, 32 nt, Human
gcgacuggggccugagcuggcaaggccaagga

SEQ ID NO: 441688 - RNA, 32 nt, Human
gcgacugggggcccuggcccggcacuguccuc

SEQ ID NO: 441689 - RNA, 32 nt, Human
gcgacugucucagacugggcagggaggcuuug

SEQ ID NO: 441690 - RNA, 32 nt, Human
gcgacugugucaccuaccagacugaguaccgc

SEQ ID NO: 441691 - RNA, 32 nt, Human
gcgacuuacccaggccuuuuugcagugggagg

SEQ ID NO: 441692 - RNA, 32 nt, Human
gcgacuucucaagcuuuugaaugggugagugg

SEQ ID NO: 441693 - RNA, 21 nt, Human
gcgacuucuccagcccagucc

SEQ ID NO: 441694 - RNA, 32 nt, Human
gcgacuugaagaggacgcaggcuuccagagga

SEQ ID NO: 441695 - RNA, 32 nt, Human
gcgagaaaauucaagaaaauaaauguagcugg

SEQ ID NO: 441696 - RNA, 32 nt, Human
gcgagaaacagagaucauaaagagcacguuuu

SEQ ID NO: 441697 - RNA, 32 nt, Human
gcgagaaacuauacacucaguuuuaaagaagc

SEQ ID NO: 441698 - RNA, 23 nt, Human
gcgagaaaggugagcuauuggga

SEQ ID NO: 441699 - RNA, 32 nt, Human
gcgagaagaccggccgagggagagccgaucgc

SEQ ID NO: 441700 - RNA, 18 nt, Human
gcgagaagggcaccagca

SEQ ID NO: 441701 - RNA, 32 nt, Human
gcgagaagggcugcuucccugaagcucccaca

SEQ ID NO: 441702 - RNA, 32 nt, Human
gcgagaagucugggguucagugacacacuucu

SEQ ID NO: 441703 - RNA, 18 nt, Human
gcgagacagcgguggugg

SEQ ID NO: 441704 - RNA, 18 nt, Human
gcgagaccacaggucacc

SEQ ID NO: 441705 - RNA, 32 nt, Human
gcgagaccagagcagucugaaggauuccccac

SEQ ID NO: 441706 - RNA, 32 nt, Human
gcgagaccagccugaccaacauggagaaaccc

SEQ ID NO: 441707 - RNA, 32 nt, Human
gcgagaccauccuggcuaacacggugaaaccc

SEQ ID NO: 441708 - RNA, 32 nt, Human
gcgagacccaggcugggcaaggcgcaguuuca

SEQ ID NO: 441709 - RNA, 20 nt, Human
gcgagacccggggcugggcc

SEQ ID NO: 441710 - RNA, 32 nt, Human
gcgagacccuguaugaauaguaccaaagcauu

SEQ ID NO: 441711 - RNA, 32 nt, Human
gcgagaccugggagggagggguccuccagcag

SEQ ID NO: 441712 - RNA, 32 nt, Human
gcgagacggaguuucgucauguuggccaggcc

SEQ ID NO: 441713 - RNA, 32 nt, Human
gcgagacggcccugaguggaagugucuggcuc

SEQ ID NO: 441714 - RNA, 32 nt, Human
gcgagacucacugcagugucaagaucaccuuu

SEQ ID NO: 441715 - RNA, 18 nt, Human
gcgagacucuugucucaa

SEQ ID NO: 441716 - RNA, 32 nt, Human
gcgagacuucaaggacucaguuugguuccacc

SEQ ID NO: 441717 - RNA, 32 nt, Human
gcgagagaacaucuuccuucucuaccaucacu

SEQ ID NO: 441718 - RNA, 32 nt, Human
gcgagagaggagaagggaaagguggagggcua

SEQ ID NO: 441719 - RNA, 32 nt, Human
gcgagagagggugugagagugaguggcgugcu

SEQ ID NO: 441720 - RNA, 32 nt, Human
gcgagagauggucaggucuggagcucgaccgg

SEQ ID NO: 441721 - RNA, 22 nt, Human
gcgagagcacgcggaggagcgu

SEQ ID NO: 441722 - RNA, 32 nt, Human
gcgagagccagccaacuaccccuucuucccag

SEQ ID NO: 441723 - RNA, 32 nt, Human
gcgagagcccaggagugggcguuucacuuuuc

SEQ ID NO: 441724 - RNA, 32 nt, Human
gcgagagcgagagagccgggaggcagagggag

SEQ ID NO: 441725 - RNA, 32 nt, Human
gcgagagcugccugauggccucuugucaggag

SEQ ID NO: 441726 - RNA, 32 nt, Human
gcgagaggaggcagagggggcgucaggccgcg

SEQ ID NO: 441727 - RNA, 32 nt, Human
gcgagaggagucgggaucugcgcugcagccac

SEQ ID NO: 441728 - RNA, 32 nt, Human
gcgagaggccgagcuugcugcauugcagccgc

SEQ ID NO: 441729 - RNA, 32 nt, Human
gcgagaggcugaggcaggagaauggcgugaac

SEQ ID NO: 441730 - RNA, 21 nt, Human
gcgagagggcgaggccgagcc

SEQ ID NO: 441731 - RNA, 22 nt, Human
gcgagagggggaagaggagcgu

SEQ ID NO: 441732 - RNA, 23 nt, Human
gcgagaggugggaggucagagga

SEQ ID NO: 441733 - RNA, 32 nt, Human
gcgagaguucuaggagagaagcugguccaccc

SEQ ID NO: 441734 - RNA, 32 nt, Human
gcgagauaaccagcccgagucaugcagucuuu

SEQ ID NO: 441735 - RNA, 18 nt, Human
gcgagauccgccccggcc

SEQ ID NO: 441736 - RNA, 32 nt, Human
gcgagaucucagcucacggcaaccuccgccuc

SEQ ID NO: 441737 - RNA, 32 nt, Human
gcgagaucugugcaagucugguuuugguuagg

SEQ ID NO: 441738 - RNA, 23 nt, Human
gcgagaucuuggcauccugugag

SEQ ID NO: 441739 - RNA, 32 nt, Human
gcgagauggagaaggggaaggaaggggcuuug

SEQ ID NO: 441740 - RNA, 30 nt, Human
gcgagauggagacagcccccaagccgggca

SEQ ID NO: 441741 - RNA, 32 nt, Human
gcgagauggagcaggcccaucugccucugccc

SEQ ID NO: 441742 - RNA, 32 nt, Human
gcgagauggaguccccaagaggguggacccug

SEQ ID NO: 441743 - RNA, 32 nt, Human
gcgagaugggaagagaaaacuggccagaggcc

SEQ ID NO: 441744 - RNA, 32 nt, Human
gcgagauguuggguuaggggaggcagauccgg

SEQ ID NO: 441745 - RNA, 22 nt, Human
gcgagcaagccggcaagcgagc

SEQ ID NO: 441746 - RNA, 21 nt, Human
gcgagcaagcugaggccacgu

SEQ ID NO: 441747 - RNA, 32 nt, Human
gcgagcaaggggagagccaguugcgcagagcc

SEQ ID NO: 441748 - RNA, 32 nt, Human
gcgagcacaguggcuccguggaagaugacauc

SEQ ID NO: 441749 - RNA, 32 nt, Human
gcgagcaccagcugacccccaguggaacccug

SEQ ID NO: 441750 - RNA, 32 nt, Human
gcgagcaccuguaaucucagcacuuugggagg

SEQ ID NO: 441751 - RNA, 23 nt, Human
gcgagcaccuguaaugucagcua

SEQ ID NO: 441752 - RNA, 32 nt, Human
gcgagcacugcacaguucgcuucccugaaucg

SEQ ID NO: 441753 - RNA, 17 nt, Human
gcgagcagagggggcgg

SEQ ID NO: 441754 - RNA, 24 nt, Human
gcgagcagaucaccugagguccgg

SEQ ID NO: 441755 - RNA, 32 nt, Human
gcgagcagcaggaagcggaggaggaaaggagc

SEQ ID NO: 441756 - RNA, 32 nt, Human
gcgagcagccuggaacagacccaggcggagga

SEQ ID NO: 441757 - RNA, 32 nt, Human
gcgagcagcguggagcucagugacagcagcag

SEQ ID NO: 441758 - RNA, 32 nt, Human
gcgagcaggugugaaugagcccagggaaggac

SEQ ID NO: 441759 - RNA, 32 nt, Human
gcgagcaugccacuguacuccagccugagcua

SEQ ID NO: 441760 - RNA, 31 nt, Human
gcgagcauggggcgccuggccucgaggccgc

SEQ ID NO: 441761 - RNA, 22 nt, Human
gcgagccaauacgggccgagcc

SEQ ID NO: 441762 - RNA, 32 nt, Human
gcgagccagugccccuggaucuugccucugcu

SEQ ID NO: 441763 - RNA, 32 nt, Human
gcgagccaucuugccagaauucugacagugau

SEQ ID NO: 441764 - RNA, 21 nt, Human
gcgagccccagcgcccuggca

SEQ ID NO: 441765 - RNA, 20 nt, Human
gcgagccccgcgccccggcc

SEQ ID NO: 441766 - RNA, 32 nt, Human
gcgagccccugcacuccauccugcugaccaug

SEQ ID NO: 441767 - RNA, 32 nt, Human
gcgagcccgagcccccgcccccggcuagcccc

SEQ ID NO: 441768 - RNA, 18 nt, Human
gcgagcccuccuacuggg

SEQ ID NO: 441769 - RNA, 32 nt, Human
gcgagcccugcugcccuccagccgggcuucuc

SEQ ID NO: 441770 - RNA, 32 nt, Human
gcgagcccuucggccccucacccuccaggcug

SEQ ID NO: 441771 - RNA, 25 nt, Human
gcgagccgcgggagccgaccccggg

SEQ ID NO: 441772 - RNA, 32 nt, Human
gcgagccggugcugcugcaggcugaggcugcg

SEQ ID NO: 441773 - RNA, 32 nt, Human
gcgagccguccaggucucagugcugugccccc

SEQ ID NO: 441774 - RNA, 23 nt, Human
gcgagccuccaggcccagcaaug

SEQ ID NO: 441775 - RNA, 32 nt, Human
gcgagccuccaggcccagcaaugagggacuug

SEQ ID NO: 441776 - RNA, 32 nt, Human
gcgagccucccguccaggugcuucuggcuuuc

SEQ ID NO: 441777 - RNA, 32 nt, Human
gcgagccuguaauuccagcuacuuggaggcug

SEQ ID NO: 441778 - RNA, 32 nt, Human
gcgagcgaaaagcggggguggggaggaaaggg

SEQ ID NO: 441779 - RNA, 22 nt, Human
gcgagcgagagagcggcgcggg

SEQ ID NO: 441780 - RNA, 32 nt, Human
gcgagcgagaugcccaaccccaaaaacagcaa

SEQ ID NO: 441781 - RNA, 31 nt, Human
gcgagcgaggaagacggaaaagacugccugc

SEQ ID NO: 441782 - RNA, 32 nt, Human
gcgagcgagggagaggagggagagggggaggg

SEQ ID NO: 441783 - RNA, 32 nt, Human
gcgagcgcacacacaugcacaagugcgaagga

SEQ ID NO: 441784 - RNA, 32 nt, Human
gcgagcgccagcuccggccagccugggacagc

SEQ ID NO: 441785 - RNA, 18 nt, Human
gcgagcgcgaggcugcag

SEQ ID NO: 441786 - RNA, 32 nt, Human
gcgagcgcggcgcagcccagcccagcccaguc

SEQ ID NO: 441787 - RNA, 32 nt, Human
gcgagcgcgggggaaggcgaaaaagaaaaaga

SEQ ID NO: 441788 - RNA, 20 nt, Human
gcgagcgcggggggcgagcc

SEQ ID NO: 441789 - RNA, 32 nt, Human
gcgagcgcggucgagaucgccaugccuacccg

SEQ ID NO: 441790 - RNA, 19 nt, Human
gcgagcggcagcgacagca

SEQ ID NO: 441791 - RNA, 21 nt, Human
gcgagcggccagcagagggcg

SEQ ID NO: 441792 - RNA, 32 nt, Human
gcgagcggccuccccucacuuccuccuggugg

SEQ ID NO: 441793 - RNA, 32 nt, Human
gcgagcggcgcuggagggaggaaagcuuccgc

SEQ ID NO: 441794 - RNA, 22 nt, Human
gcgagcggcgggcggaggagcg

SEQ ID NO: 441795 - RNA, 32 nt, Human
gcgagcggcugaggccgccagggcccaaagga

SEQ ID NO: 441796 - RNA, 32 nt, Human
gcgagcgggagcgcggcguccgggaggcggcg

SEQ ID NO: 441797 - RNA, 32 nt, Human
gcgagcgggcggcggaggcggcggcggcggcg

SEQ ID NO: 441798 - RNA, 32 nt, Human
gcgagcggggagguggaggaagcugugcggug

SEQ ID NO: 441799 - RNA, 32 nt, Human
gcgagcguugccgggccagggucaagcggagg

SEQ ID NO: 441800 - RNA, 32 nt, Human
gcgagcuaccgcuucacuuucucccuccugcc

SEQ ID NO: 441801 - RNA, 32 nt, Human
gcgagcuagagaaaucaccaccguuuagacca

SEQ ID NO: 441802 - RNA, 32 nt, Human
gcgagcucugcagaucaggaggcugcggaaga

SEQ ID NO: 441803 - RNA, 32 nt, Human
gcgagcugcagccucuggggccugugaagccc

SEQ ID NO: 441804 - RNA, 19 nt, Human
gcgagcuggagggcugcag

SEQ ID NO: 441805 - RNA, 32 nt, Human
gcgagcuggccacaccugugaggcugcaguga

SEQ ID NO: 441806 - RNA, 32 nt, Human
gcgagcuggccaccuggccacccucuacacgg

SEQ ID NO: 441807 - RNA, 32 nt, Human
gcgagcugggcaccugggagcaccagcugcgg

SEQ ID NO: 441808 - RNA, 32 nt, Human
gcgagcugggccguguguaugugagugccgau

SEQ ID NO: 441809 - RNA, 32 nt, Human
gcgagcuggggcugcacugugcccaugcugcc

SEQ ID NO: 441810 - RNA, 32 nt, Human
gcgagcuucuacuucuaaguguggaccguacu

SEQ ID NO: 441811 - RNA, 32 nt, Human
gcgagcuugguugugauguggggcagccuagc

SEQ ID NO: 441812 - RNA, 32 nt, Human
gcgagcuuuguggagcuccaggaagcaauaua

SEQ ID NO: 441813 - RNA, 32 nt, Human
gcgaggaagauguggcuggaacccugcaccaa

SEQ ID NO: 441814 - RNA, 18 nt, Human
gcgaggaagggccgagcc

SEQ ID NO: 441815 - RNA, 32 nt, Human
gcgaggaaugcaauuccugggcccgcugcugu

SEQ ID NO: 441816 - RNA, 32 nt, Human
gcgaggacagaagucccgccguguggcccuca

SEQ ID NO: 441817 - RNA, 32 nt, Human
gcgaggacaggagcccgucacccaugagcucu

SEQ ID NO: 441818 - RNA, 32 nt, Human
gcgaggaccagaaacaccugcaagaggcacgg

SEQ ID NO: 441819 - RNA, 32 nt, Human
gcgaggacccugcaccuggaugggggucccug

SEQ ID NO: 441820 - RNA, 32 nt, Human
gcgaggaccggccaccccagacuuccuguccc

SEQ ID NO: 441821 - RNA, 20 nt, Human
gcgaggaccggcggaggagc

SEQ ID NO: 441822 - RNA, 32 nt, Human
gcgaggacgugauccgcuucugcuccggcuug

SEQ ID NO: 441823 - RNA, 25 nt, Human
gcgaggacucgagcgcuggcugcag

SEQ ID NO: 441824 - RNA, 32 nt, Human
gcgaggagcaagaaaagaguaacaugggagau

SEQ ID NO: 441825 - RNA, 18 nt, Human
gcgaggagcaggcugcag

SEQ ID NO: 441826 - RNA, 32 nt, Human
gcgaggaggaggcggagguggagcuggcggag

SEQ ID NO: 441827 - RNA, 32 nt, Human
gcgaggaggccgcggcgggcgcagcgggcacc

SEQ ID NO: 441828 - RNA, 19 nt, Human
gcgaggaggccucuugaag

SEQ ID NO: 441829 - RNA, 32 nt, Human
gcgaggaggcuauuuccagacacuuccacccc

SEQ ID NO: 441830 - RNA, 32 nt, Human
gcgaggaggcuucugcacguucugcgugggcc

SEQ ID NO: 441831 - RNA, 20 nt, Human
gcgaggagggagcagcagca

SEQ ID NO: 441832 - RNA, 19 nt, Human
gcgaggaguccccggggag

SEQ ID NO: 441833 - RNA, 31 nt, Human
gcgaggauggccagaccaucucugugcaccc

SEQ ID NO: 441834 - RNA, 32 nt, Human
gcgaggauuuggacuggcagugagaauaagag

SEQ ID NO: 441835 - RNA, 32 nt, Human
gcgaggcaaugcucuagguccuguaggggcug

SEQ ID NO: 441836 - RNA, 32 nt, Human
gcgaggcaggagagaggaggaggagugcggcg

SEQ ID NO: 441837 - RNA, 22 nt, Human
gcgaggcaggcaccggcggcgg

SEQ ID NO: 441838 - RNA, 18 nt, Human
gcgaggcaggcggccggc

SEQ ID NO: 441839 - RNA, 32 nt, Human
gcgaggcagggcccagcccugaaggagaucuc

SEQ ID NO: 441840 - RNA, 32 nt, Human
gcgaggcaugcaugaggccuccagccgguggu

SEQ ID NO: 441841 - RNA, 18 nt, Human
gcgaggccaagaccacca

SEQ ID NO: 441842 - RNA, 18 nt, Human
gcgaggccaaggcugcag

SEQ ID NO: 441843 - RNA, 20 nt, Human
gcgaggccaaggcugcagca

SEQ ID NO: 441844 - RNA, 32 nt, Human
gcgaggccaggagaucaagaccauccugacua

SEQ ID NO: 441845 - RNA, 20 nt, Human
gcgaggccagggagcgaggc

SEQ ID NO: 441846 - RNA, 21 nt, Human
gcgaggccauggcccgagucc

SEQ ID NO: 441847 - RNA, 32 nt, Human
gcgaggcccauguugcugcuguucccuggcgc

SEQ ID NO: 441848 - RNA, 32 nt, Human
gcgaggcccgagagucagaaccugggggagag

SEQ ID NO: 441849 - RNA, 24 nt, Human
gcgaggcccggaggccugagcacc

SEQ ID NO: 441850 - RNA, 32 nt, Human
gcgaggcccgggagcuguguugcggcuccggc

SEQ ID NO: 441851 - RNA, 22 nt, Human
gcgaggcccuggacggcggcgg

SEQ ID NO: 441852 - RNA, 24 nt, Human
gcgaggccgaagccgacggcgcgg

SEQ ID NO: 441853 - RNA, 21 nt, Human
gcgaggccgagacccagcagc

SEQ ID NO: 441854 - RNA, 19 nt, Human
gcgaggccgagcccaggca

SEQ ID NO: 441855 - RNA, 19 nt, Human
gcgaggccgagggcagcgg

SEQ ID NO: 441856 - RNA, 18 nt, Human
gcgaggccgcccgacgca

SEQ ID NO: 441857 - RNA, 32 nt, Human
gcgaggccgcgaccucugccacguggaccgcg

SEQ ID NO: 441858 - RNA, 32 nt, Human
gcgaggccgcgggucccaccucccgggggcgg

SEQ ID NO: 441859 - RNA, 21 nt, Human
gcgaggccggaaaggagacgc

SEQ ID NO: 441860 - RNA, 23 nt, Human
gcgaggccggagggccgcggcgg

SEQ ID NO: 441861 - RNA, 20 nt, Human
gcgaggccggagggggacgc

SEQ ID NO: 441862 - RNA, 21 nt, Human
gcgaggccggcccagcacagc

SEQ ID NO: 441863 - RNA, 19 nt, Human
gcgaggccggcgccgcaca

SEQ ID NO: 441864 - RNA, 32 nt, Human
gcgaggccggcgccgcacacacacauuaacac

SEQ ID NO: 441865 - RNA, 19 nt, Human
gcgaggccgggcccccagc

SEQ ID NO: 441866 - RNA, 20 nt, Human
gcgaggccgggcccgagcag

SEQ ID NO: 441867 - RNA, 20 nt, Human
gcgaggccgggcgccgcagc

SEQ ID NO: 441868 - RNA, 32 nt, Human
gcgaggccggggaggugcuggagcggggccaa

SEQ ID NO: 441869 - RNA, 19 nt, Human
gcgaggccggggcccaggc

SEQ ID NO: 441870 - RNA, 20 nt, Human
gcgaggccgggggccgagag

SEQ ID NO: 441871 - RNA, 32 nt, Human
gcgaggccgucggagaaaacuuaagcguggag

SEQ ID NO: 441872 - RNA, 17 nt, Human
gcgaggccgugaacagc

SEQ ID NO: 441873 - RNA, 32 nt, Human
gcgaggccucaaguagugagggccagucgagc

SEQ ID NO: 441874 - RNA, 32 nt, Human
gcgaggccucauccacaugcaggggacggcgc

SEQ ID NO: 441875 - RNA, 32 nt, Human
gcgaggccucuuccugcugggcucccagacuc

SEQ ID NO: 441876 - RNA, 23 nt, Human
gcgaggccugagaagggugguuc

SEQ ID NO: 441877 - RNA, 20 nt, Human
gcgaggccugcggccagucc

SEQ ID NO: 441878 - RNA, 22 nt, Human
gcgaggccugggggcgcccgcc

SEQ ID NO: 441879 - RNA, 23 nt, Human
gcgaggccuggugguggcggcgg

SEQ ID NO: 441880 - RNA, 18 nt, Human
gcgaggcgaggccgagcc

SEQ ID NO: 441881 - RNA, 32 nt, Human
gcgaggcgcuguccuuucagcaccacaagcuc

SEQ ID NO: 441882 - RNA, 19 nt, Human
gcgaggcggccggcggcgg

SEQ ID NO: 441883 - RNA, 18 nt, Human
gcgaggcggcggcggcgg

SEQ ID NO: 441884 - RNA, 32 nt, Human
gcgaggcggggcacugcagcacacaacgcagg

SEQ ID NO: 441885 - RNA, 32 nt, Human
gcgaggcugccuggcucccuuucucagcagcu

SEQ ID NO: 441886 - RNA, 23 nt, Human
gcgaggcugggggcggccggcgg

SEQ ID NO: 441887 - RNA, 32 nt, Human
gcgaggcuuacuuaauuaagcacuuuguaaug

SEQ ID NO: 441888 - RNA, 22 nt, Human
gcgagggaaguugaggcugcag

SEQ ID NO: 441889 - RNA, 32 nt, Human
gcgagggacacggaguagaagaggcuguccug

SEQ ID NO: 441890 - RNA, 32 nt, Human
gcgagggacaguucaacugaacuucgaaagca

SEQ ID NO: 441891 - RNA, 21 nt, Human
gcgagggaccugacagcagca

SEQ ID NO: 441892 - RNA, 32 nt, Human
gcgagggagaggagggagagggggaggggagg

SEQ ID NO: 441893 - RNA, 32 nt, Human
gcgagggagaggggcggccgcgcggaucacug

SEQ ID NO: 441894 - RNA, 32 nt, Human
gcgagggaggggagggaagggaagggaaggga

SEQ ID NO: 441895 - RNA, 32 nt, Human
gcgagggccacuacacuccagccugggugaca

SEQ ID NO: 441896 - RNA, 25 nt, Human
gcgagggcggcgggggcccgaaccc

SEQ ID NO: 441897 - RNA, 21 nt, Human
gcgagggcucaggacccggag

SEQ ID NO: 441898 - RNA, 19 nt, Human
gcgagggcugcgaggccag

SEQ ID NO: 441899 - RNA, 16 nt, Human
gcgagggcugcggcgc

SEQ ID NO: 441900 - RNA, 21 nt, Human
gcgagggcugugccggugcag

SEQ ID NO: 441901 - RNA, 21 nt, Human
gcgagggcugugcuggugcag

SEQ ID NO: 441902 - RNA, 32 nt, Human
gcgaggggagagagguguggugggcacacaga

SEQ ID NO: 441903 - RNA, 32 nt, Human
gcgaggggagcgcgcuccggugaccucuagcg

SEQ ID NO: 441904 - RNA, 21 nt, Human
gcgaggggauaggccgaguuc

SEQ ID NO: 441905 - RNA, 24 nt, Human
gcgaggggcagauucuagucggga

SEQ ID NO: 441906 - RNA, 32 nt, Human
gcgaggggcugggcucagagggccagggcauc

SEQ ID NO: 441907 - RNA, 32 nt, Human
gcgagggggaauaagagcagggcagcccccug

SEQ ID NO: 441908 - RNA, 22 nt, Human
gcgagggggcccccagcugccu

SEQ ID NO: 441909 - RNA, 32 nt, Human
gcgaggguagccuuggaaauucuuaaaucagg

SEQ ID NO: 441910 - RNA, 32 nt, Human
gcgagggucagccugcugugcccacacacacc

SEQ ID NO: 441911 - RNA, 32 nt, Human
gcgagggucaucuucaucacagaguacguguc

SEQ ID NO: 441912 - RNA, 32 nt, Human
gcgaggguccaauccugcccugcgcuaguccu

SEQ ID NO: 441913 - RNA, 18 nt, Human
gcgagguacuggcugcag

SEQ ID NO: 441914 - RNA, 32 nt, Human
gcgagguaguuucuuugguauucuugcccagg

SEQ ID NO: 441915 - RNA, 23 nt, Human
gcgaggucaccaugccagcuucc

SEQ ID NO: 441916 - RNA, 32 nt, Human
gcgaggucagaaaucacaagccugggcauggc

SEQ ID NO: 441917 - RNA, 32 nt, Human
gcgagguccagaucacugaauucauguuuaca

SEQ ID NO: 441918 - RNA, 20 nt, Human
gcgaggugcagcggcugcgg

SEQ ID NO: 441919 - RNA, 22 nt, Human
gcgaggugcgcgagccgagucc

SEQ ID NO: 441920 - RNA, 32 nt, Human
gcgagguggcgcugcacugggggcugggugcu

SEQ ID NO: 441921 - RNA, 24 nt, Human
gcgagguggcucacaccuguaauc

SEQ ID NO: 441922 - RNA, 24 nt, Human
gcgagguggcucacgccuguaauc

SEQ ID NO: 441923 - RNA, 24 nt, Human
gcgagguggcucaugccugaaauc

SEQ ID NO: 441924 - RNA, 24 nt, Human
gcgagguggcucaugccuguaauc

SEQ ID NO: 441925 - RNA, 23 nt, Human
gcgagguggucaugccuguaauc

SEQ ID NO: 441926 - RNA, 32 nt, Human
gcgaggugucugcccuuuauguuuccacaucu

SEQ ID NO: 441927 - RNA, 32 nt, Human
gcgagguuggggcugccgugagcccagauugc

SEQ ID NO: 441928 - RNA, 32 nt, Human
gcgagguuucuucucaucaccagcucagcuag

SEQ ID NO: 441929 - RNA, 18 nt, Human
gcgaguacaccugcacca

SEQ ID NO: 441930 - RNA, 32 nt, Human
gcgaguaggccucuuccaccagaagcuguucg

SEQ ID NO: 441931 - RNA, 32 nt, Human
gcgaguagggggcggcucuggggaaguggcag

SEQ ID NO: 441932 - RNA, 32 nt, Human
gcgaguaucugucccaggagcccacacagagg

SEQ ID NO: 441933 - RNA, 32 nt, Human
gcgagucaacaucgucuuuaacuacgacaugc

SEQ ID NO: 441934 - RNA, 32 nt, Human
gcgagucacggggagagcagaaagcuuugggc

SEQ ID NO: 441935 - RNA, 32 nt, Human
gcgagucauccaguauagacuauggucgaaga

SEQ ID NO: 441936 - RNA, 32 nt, Human
gcgagucauugcuucucuuaauuuauuuaccu

SEQ ID NO: 441937 - RNA, 32 nt, Human
gcgaguccaccgagcggccucugaggagcagc

SEQ ID NO: 441938 - RNA, 25 nt, Human
gcgaguccauagcugaagaggagcg

SEQ ID NO: 441939 - RNA, 32 nt, Human
gcgagucgccucccccgcccagcuucagcccu

SEQ ID NO: 441940 - RNA, 32 nt, Human
gcgagucggcgguguccaggagggaaggaacg

SEQ ID NO: 441941 - RNA, 22 nt, Human
gcgagucggugagcagcuggga

SEQ ID NO: 441942 - RNA, 32 nt, Human
gcgagucuccuccuucagucuccugguagcug

SEQ ID NO: 441943 - RNA, 32 nt, Human
gcgagucuccugcaguguagggcuacuuuguc

SEQ ID NO: 441944 - RNA, 32 nt, Human
gcgagugacugcaccgagcccgagaagucgcc

SEQ ID NO: 441945 - RNA, 32 nt, Human
gcgagugagcaccagcgauugguucggaagcg

SEQ ID NO: 441946 - RNA, 22 nt, Human
gcgagugaggagcagacccagg

SEQ ID NO: 441947 - RNA, 32 nt, Human
gcgagugaggcagcagcucccagccuuuucag

SEQ ID NO: 441948 - RNA, 32 nt, Human
gcgagugcaugggcuaauuaucaucaaucuuu

SEQ ID NO: 441949 - RNA, 19 nt, Human
gcgagugcuguugguccca

SEQ ID NO: 441950 - RNA, 32 nt, Human
gcgaguggagcgagggagagacggugggaugg

SEQ ID NO: 441951 - RNA, 32 nt, Human
gcgaguggcagucugcccacgcagaggacgca

SEQ ID NO: 441952 - RNA, 31 nt, Human
gcgaguggcuucucugggccggguucguacu

SEQ ID NO: 441953 - RNA, 32 nt, Human
gcgagugggcaggcagcugcgagacagaaccg

SEQ ID NO: 441954 - RNA, 32 nt, Human
gcgagugggugagugaguucaagucagaggag

SEQ ID NO: 441955 - RNA, 32 nt, Human
gcgaguguggaggacccgagacauccuguaaa

SEQ ID NO: 441956 - RNA, 32 nt, Human
gcgagugugugcaagugucugugugcaagugu

SEQ ID NO: 441957 - RNA, 32 nt, Human
gcgagugugugggguuccuccuucccuccuuu

SEQ ID NO: 441958 - RNA, 32 nt, Human
gcgaguucacgccagucuccugccucagccuu

SEQ ID NO: 441959 - RNA, 32 nt, Human
gcgaguuccuccugcauaugaaccgaggggag

SEQ ID NO: 441960 - RNA, 32 nt, Human
gcgaguuggaaaccagucugaccaacguggag

SEQ ID NO: 441961 - RNA, 22 nt, Human
gcgaguuggucggucccggggu

SEQ ID NO: 441962 - RNA, 32 nt, Human
gcgauagauuuagaggaaaggaagcaccgucg

SEQ ID NO: 441963 - RNA, 32 nt, Human
gcgauauacagaugaaaauuugagacuauuua

SEQ ID NO: 441964 - RNA, 32 nt, Human
gcgauaucagggacugugcucaugagggcgga

SEQ ID NO: 441965 - RNA, 32 nt, Human
gcgauauuaaaugccaacuacauggccaagcg

SEQ ID NO: 441966 - RNA, 32 nt, Human
gcgaucacggaucagucagagcagggucagga

SEQ ID NO: 441967 - RNA, 32 nt, Human
gcgaucagcggcuggggcagguuaugguagug

SEQ ID NO: 441968 - RNA, 32 nt, Human
gcgauccaccugucucagccucccagagugcu

SEQ ID NO: 441969 - RNA, 32 nt, Human
gcgauccagacuccuagcuucccaccgaggca

SEQ ID NO: 441970 - RNA, 32 nt, Human
gcgauccagcagagagggcuggagacgggacg

SEQ ID NO: 441971 - RNA, 32 nt, Human
gcgaucccagccgccaccgccgccgcaccagc

SEQ ID NO: 441972 - RNA, 32 nt, Human
gcgaucccuugcugcgggcccggagaucaaac

SEQ ID NO: 441973 - RNA, 32 nt, Human
gcgauccucccaucucagccucccagagugcu

SEQ ID NO: 441974 - RNA, 32 nt, Human
gcgauccucccgccucagccuccagagcaccu

SEQ ID NO: 441975 - RNA, 32 nt, Human
gcgauccuccugccuuagccucccagaguacu

SEQ ID NO: 441976 - RNA, 32 nt, Human
gcgaucgaaggagccuucacguaaaugggucc

SEQ ID NO: 441977 - RNA, 32 nt, Human
gcgaucgccuugaguccagccucugcauaaac

SEQ ID NO: 441978 - RNA, 32 nt, Human
gcgaucucacugcaaccucugccucccgggcu

SEQ ID NO: 441979 - RNA, 32 nt, Human
gcgaucuccacagcagccucugaggccgcccc

SEQ ID NO: 441980 - RNA, 32 nt, Human
gcgaucuccacugcacugcugugggcugaacu

SEQ ID NO: 441981 - RNA, 32 nt, Human
gcgaucugagcacucaggcugaucuagaggaa

SEQ ID NO: 441982 - RNA, 32 nt, Human
gcgaucugccugcuucagccucccagagugcu

SEQ ID NO: 441983 - RNA, 32 nt, Human
gcgaucuggggagcuuguaggcucacuuugcu

SEQ ID NO: 441984 - RNA, 32 nt, Human
gcgaucuucccauguuggcugcccaaagugcu

SEQ ID NO: 441985 - RNA, 32 nt, Human
gcgaugaaaccaggaacucacuuucccgggau

SEQ ID NO: 441986 - RNA, 32 nt, Human
gcgaugaaaguuacagcuaucauguuuauguc

SEQ ID NO: 441987 - RNA, 32 nt, Human
gcgaugaacacccgaaggugggagggaggacu

SEQ ID NO: 441988 - RNA, 31 nt, Human
gcgaugacauuugcucucacagcagaugaca

SEQ ID NO: 441989 - RNA, 28 nt, Human
gcgaugacccugucgccacuucugcugu

SEQ ID NO: 441990 - RNA, 32 nt, Human
gcgaugacucacugcagcacccccucccacuu

SEQ ID NO: 441991 - RNA, 32 nt, Human
gcgaugagaccaguaugaaacggagggccacg

SEQ ID NO: 441992 - RNA, 28 nt, Human
gcgaugauggcagaagagcacacagauc

SEQ ID NO: 441993 - RNA, 32 nt, Human
gcgaugcauuaggaagauccuggaccuagaga

SEQ ID NO: 441994 - RNA, 28 nt, Human
gcgaugccggagcuggcagugcagaagg

SEQ ID NO: 441995 - RNA, 32 nt, Human
gcgaugcuaaguuucucccauagaaagagccg

SEQ ID NO: 441996 - RNA, 32 nt, Human
gcgaugcuaucuccucaacucucccucuucuc

SEQ ID NO: 441997 - RNA, 32 nt, Human
gcgaugcucauaccucagccuccugaguagcu

SEQ ID NO: 441998 - RNA, 32 nt, Human
gcgaugcucggagcugcguccucuguccuggg

SEQ ID NO: 441999 - RNA, 32 nt, Human
gcgaugcugagccaccuccuccgagccuuccu

SEQ ID NO: 442000 - RNA, 28 nt, Human
gcgaugcugccucugcugcgcugcgugc

SEQ ID NO: 442001 - RNA, 32 nt, Human
gcgaugcuugccuugcguucucuccccugaac

SEQ ID NO: 442002 - RNA, 32 nt, Human
gcgauggcaaaguggauaaagccuggucccug

SEQ ID NO: 442003 - RNA, 22 nt, Human
gcgauggcucacgccuguaauc

SEQ ID NO: 442004 - RNA, 32 nt, Human
gcgaugggcugaaggggcuccaggcaacugag

SEQ ID NO: 442005 - RNA, 28 nt, Human
gcgaugggcugcagggcugcgucagggc

SEQ ID NO: 442006 - RNA, 32 nt, Human
gcgauggggaagcucuggagcauuuugugagc

SEQ ID NO: 442007 - RNA, 32 nt, Human
gcgauggggcuauauugaaucucuguaugcac

SEQ ID NO: 442008 - RNA, 32 nt, Human
gcgauggggcugggcccuggccuccuaacggg

SEQ ID NO: 442009 - RNA, 32 nt, Human
gcgauggggguugggugguggagggugggucc

SEQ ID NO: 442010 - RNA, 28 nt, Human
gcgaugguccaucagcucucugccaucc

SEQ ID NO: 442011 - RNA, 31 nt, Human
gcgauggugacuugaccuugccaagaccugu

SEQ ID NO: 442012 - RNA, 32 nt, Human
gcgauggugggaugugucgcaagcaauucacu

SEQ ID NO: 442013 - RNA, 32 nt, Human
gcgauguacagaaucagaaggugguuugacag

SEQ ID NO: 442014 - RNA, 32 nt, Human
gcgauguacuagcugcucacaagccuguuccu

SEQ ID NO: 442015 - RNA, 32 nt, Human
gcgaugucacccucuucgucucccucuucggu

SEQ ID NO: 442016 - RNA, 32 nt, Human
gcgaugugcacuccacccaagccaggcuccca

SEQ ID NO: 442017 - RNA, 32 nt, Human
gcgauuagcuuagugagcuuaccccgccggag

SEQ ID NO: 442018 - RNA, 32 nt, Human
gcgauuauugugaauaaagcgccuacaagugc

SEQ ID NO: 442019 - RNA, 32 nt, Human
gcgauuauugugccucagccuccugaguagcu

SEQ ID NO: 442020 - RNA, 32 nt, Human
gcgauuccagugggguugggcccccuggcgcc

SEQ ID NO: 442021 - RNA, 26 nt, Human
gcgauuccuucgggcgaugcuggggg

SEQ ID NO: 442022 - RNA, 32 nt, Human
gcgauucucaguaggacucacacccacccuac

SEQ ID NO: 442023 - RNA, 32 nt, Human
gcgauucuccacccuuuccccuucuuucgucc

SEQ ID NO: 442024 - RNA, 32 nt, Human
gcgauucuccagccucagccuccugaguagcu

SEQ ID NO: 442025 - RNA, 32 nt, Human
gcgauucuccugccucagccuccugagugggg

SEQ ID NO: 442026 - RNA, 32 nt, Human
gcgauucuccugccucagcuacucgggaggcu

SEQ ID NO: 442027 - RNA, 32 nt, Human
gcgauucuccugucucagccuccuggguagcu

SEQ ID NO: 442028 - RNA, 32 nt, Human
gcgauucugcagccacaaaguugagacuucug

SEQ ID NO: 442029 - RNA, 32 nt, Human
gcgauucugcgcucccggcccugcugcaggcu

SEQ ID NO: 442030 - RNA, 32 nt, Human
gcgauucugucugaccagagccucagggaaau

SEQ ID NO: 442031 - RNA, 32 nt, Human
gcgauucugucuuauaaccuccugggucccau

SEQ ID NO: 442032 - RNA, 32 nt, Human
gcgauucuucugccucagccuccugguagcug

SEQ ID NO: 442033 - RNA, 32 nt, Human
gcgauucuugugcuucagccuccugaguagcu

SEQ ID NO: 442034 - RNA, 31 nt, Human
gcgauugagaucauccuggccaacacgguga

SEQ ID NO: 442035 - RNA, 32 nt, Human
gcgauugcaccaccacacuccagccugcgcga

SEQ ID NO: 442036 - RNA, 32 nt, Human
gcgauugcuuauugucccuccagccugugcug

SEQ ID NO: 442037 - RNA, 32 nt, Human
gcgauuggcugggaacuguauccacccaaaug

SEQ ID NO: 442038 - RNA, 32 nt, Human
gcgauuguagcgggaccgucacacacaacugg

SEQ ID NO: 442039 - RNA, 32 nt, Human
gcgauugugcaggaguaggagacaaaauguac

SEQ ID NO: 442040 - RNA, 32 nt, Human
gcgauuucacagucuacugccuguuuccacug

SEQ ID NO: 442041 - RNA, 32 nt, Human
gcgauuuucauaccugcauacucugaucacua

SEQ ID NO: 442042 - RNA, 32 nt, Human
gcgauuuuccugcuucaucuucccagguagcu

SEQ ID NO: 442043 - RNA, 32 nt, Human
gcgauuuucuugccucugccuccugaguagcu

SEQ ID NO: 442044 - RNA, 32 nt, Human
gcgcaaaaugcagccucuaagagcuggagggg

SEQ ID NO: 442045 - RNA, 32 nt, Human
gcgcaaaggcagcaagguuggugacuuuggag

SEQ ID NO: 442046 - RNA, 32 nt, Human
gcgcaaaugcacaugaagaaacagguuuccag

SEQ ID NO: 442047 - RNA, 32 nt, Human
gcgcaacaccuuggugcuccagucccggguug

SEQ ID NO: 442048 - RNA, 32 nt, Human
gcgcaacauggcgaaaccccgucucuacaaua

SEQ ID NO: 442049 - RNA, 19 nt, Human
gcgcaaccucugccuccca

SEQ ID NO: 442050 - RNA, 32 nt, Human
gcgcaacguucgauuucuaccucagcagcagu

SEQ ID NO: 442051 - RNA, 32 nt, Human
gcgcaacuccagagaguaauaaaacucuggug

SEQ ID NO: 442052 - RNA, 32 nt, Human
gcgcaacuccuccauuuuccucccgcagguga

SEQ ID NO: 442053 - RNA, 32 nt, Human
gcgcaacugccuggcucugcucgcuccggcgc

SEQ ID NO: 442054 - RNA, 32 nt, Human
gcgcaacuguagucccagcuacucgggaggcu

SEQ ID NO: 442055 - RNA, 32 nt, Human
gcgcaagagaggagggccgacuggaggguguc

SEQ ID NO: 442056 - RNA, 32 nt, Human
gcgcaagagguugaggcuccagugagccacga

SEQ ID NO: 442057 - RNA, 21 nt, Human
gcgcaagaugauuguuugaga

SEQ ID NO: 442058 - RNA, 32 nt, Human
gcgcaagccuguaaucccagcuauuugggagg

SEQ ID NO: 442059 - RNA, 32 nt, Human
gcgcaaggaacagaaggagaccaccuucuaca

SEQ ID NO: 442060 - RNA, 32 nt, Human
gcgcaaggagcagaaggagaccaccuucuaua

SEQ ID NO: 442061 - RNA, 32 nt, Human
gcgcaaggaggacugggcgccgcccguccugg

SEQ ID NO: 442062 - RNA, 32 nt, Human
gcgcaagggcuccggcgaccagaggauucuuc

SEQ ID NO: 442063 - RNA, 32 nt, Human
gcgcaagguggcggagggcaguguggguucug

SEQ ID NO: 442064 - RNA, 32 nt, Human
gcgcaauauuuaugggagugggagggaugggg

SEQ ID NO: 442065 - RNA, 32 nt, Human
gcgcaaucucacugcaagcuccacuuccuggg

SEQ ID NO: 442066 - RNA, 32 nt, Human
gcgcaaucucacugcauccuccgccucccggg

SEQ ID NO: 442067 - RNA, 32 nt, Human
gcgcaaucucagcucacugcaaccuccgccuc

SEQ ID NO: 442068 - RNA, 32 nt, Human
gcgcaaucugaaacuucucuucuguuuucuuu

SEQ ID NO: 442069 - RNA, 32 nt, Human
gcgcaaucuggacacugggagauucggagcgc

SEQ ID NO: 442070 - RNA, 21 nt, Human
gcgcaaucuuggcucacugca

SEQ ID NO: 442071 - RNA, 30 nt, Human
gcgcaauggaggaggaggaugaggaagcgc

SEQ ID NO: 442072 - RNA, 32 nt, Human
gcgcaauuauaaugcaaugucuuuuugaugca

SEQ ID NO: 442073 - RNA, 32 nt, Human
gcgcaauugcgcuccagccugggcgacaagag

SEQ ID NO: 442074 - RNA, 32 nt, Human
gcgcaauuucagcucacugaaccucugccucc

SEQ ID NO: 442075 - RNA, 32 nt, Human
gcgcaauuucauggcauggagaugccuuucac

SEQ ID NO: 442076 - RNA, 32 nt, Human
gcgcacaacaugggcaaccaccugccgcuccu

SEQ ID NO: 442077 - RNA, 32 nt, Human
gcgcacacagaucuagcccaggaacaagccca

SEQ ID NO: 442078 - RNA, 17 nt, Human
gcgcacacccaggcagc

SEQ ID NO: 442079 - RNA, 32 nt, Human
gcgcacaccuguaaucccagcuacucugaagc

SEQ ID NO: 442080 - RNA, 32 nt, Human
gcgcacaccuguaaucucagcuacucgggagg

SEQ ID NO: 442081 - RNA, 22 nt, Human
gcgcacaccuguaauuccagcu

SEQ ID NO: 442082 - RNA, 32 nt, Human
gcgcacagauacaaugaggcaugaaguucaga

SEQ ID NO: 442083 - RNA, 32 nt, Human
gcgcacagcacggaccugcgugccucagcuuu

SEQ ID NO: 442084 - RNA, 19 nt, Human
gcgcacagccagcggccgc

SEQ ID NO: 442085 - RNA, 19 nt, Human
gcgcacagcccucaugccc

SEQ ID NO: 442086 - RNA, 32 nt, Human
gcgcacaggcaggagguugcaguugggcgcuc

SEQ ID NO: 442087 - RNA, 32 nt, Human
gcgcaccagagaacccagccagagggguugug

SEQ ID NO: 442088 - RNA, 32 nt, Human
gcgcaccaggagacccuagagugguuuccauc

SEQ ID NO: 442089 - RNA, 22 nt, Human
gcgcaccagucccggcccggca

SEQ ID NO: 442090 - RNA, 32 nt, Human
gcgcaccaugucugcccucggagugaccgugg

SEQ ID NO: 442091 - RNA, 32 nt, Human
gcgcaccauugcacuccagccuugggcgacaa

SEQ ID NO: 442092 - RNA, 32 nt, Human
gcgcacccaggagaaggagcagaucaagaccc

SEQ ID NO: 442093 - RNA, 32 nt, Human
gcgcacccccuucgagaucucccucuggaucc

SEQ ID NO: 442094 - RNA, 32 nt, Human
gcgcaccgcccaacccccaccucccgguguau

SEQ ID NO: 442095 - RNA, 19 nt, Human
gcgcaccggggcucgggca

SEQ ID NO: 442096 - RNA, 32 nt, Human
gcgcaccuagguggcuucugacuuugauuuuc

SEQ ID NO: 442097 - RNA, 23 nt, Human
gcgcaccucggaggagccaggag

SEQ ID NO: 442098 - RNA, 32 nt, Human
gcgcaccucugcucccuucuccucacuaccca

SEQ ID NO: 442099 - RNA, 32 nt, Human
gcgcaccugcagucccagcuacucgggaggcu

SEQ ID NO: 442100 - RNA, 32 nt, Human
gcgcaccugcuuccuccacuucaccuucggag

SEQ ID NO: 442101 - RNA, 32 nt, Human
gcgcaccuguaaucccagccacucagaaggcu

SEQ ID NO: 442102 - RNA, 32 nt, Human
gcgcaccuguaaucccagcuacucgggaggcu

SEQ ID NO: 442103 - RNA, 32 nt, Human
gcgcaccuguaaucccagcuacuuggaaggcu

SEQ ID NO: 442104 - RNA, 32 nt, Human
gcgcaccuguaaucccagcuacuugggaggcu

SEQ ID NO: 442105 - RNA, 32 nt, Human
gcgcaccuguaaucccagcugcucgggaggcu

SEQ ID NO: 442106 - RNA, 17 nt, Human
gcgcaccuguaaucuca

SEQ ID NO: 442107 - RNA, 32 nt, Human
gcgcaccuguaaucucagcuacuggagaggcu

SEQ ID NO: 442108 - RNA, 17 nt, Human
gcgcaccuguaauucca

SEQ ID NO: 442109 - RNA, 32 nt, Human
gcgcaccuguaauuccagcuacucgggaggcu

SEQ ID NO: 442110 - RNA, 17 nt, Human
gcgcaccuguaguccca

SEQ ID NO: 442111 - RNA, 32 nt, Human
gcgcaccuguagucccagcuacuugggaggcu

SEQ ID NO: 442112 - RNA, 32 nt, Human
gcgcaccuguaguuccagcuacucgggaggcu

SEQ ID NO: 442113 - RNA, 32 nt, Human
gcgcaccugucaucccagcuacucgggaggcu

SEQ ID NO: 442114 - RNA, 32 nt, Human
gcgcaccuguggucccagcuacucgggaggcu

SEQ ID NO: 442115 - RNA, 32 nt, Human
gcgcaccuguggucccagcuacuugggaggcu

SEQ ID NO: 442116 - RNA, 32 nt, Human
gcgcaccuugaaaggggaaggcagacauccug

SEQ ID NO: 442117 - RNA, 19 nt, Human
gcgcacgccuguaauccca

SEQ ID NO: 442118 - RNA, 22 nt, Human
gcgcacgccuguaaucccagcu

SEQ ID NO: 442119 - RNA, 32 nt, Human
gcgcacgccuguaaucccagcuacucgggagg

SEQ ID NO: 442120 - RNA, 32 nt, Human
gcgcacgccuguaaucucagcuacuagggacg

SEQ ID NO: 442121 - RNA, 32 nt, Human
gcgcacgcugggcaguggccugggcaacccca

SEQ ID NO: 442122 - RNA, 32 nt, Human
gcgcacggacuggccaggccccgcgggccggg

SEQ ID NO: 442123 - RNA, 32 nt, Human
gcgcacgggaggacggagaggcggaaaggaug

SEQ ID NO: 442124 - RNA, 32 nt, Human
gcgcacggucacccaaaggaggucgacucgcc

SEQ ID NO: 442125 - RNA, 32 nt, Human
gcgcacgugucggcgcucacacacacaugcua

SEQ ID NO: 442126 - RNA, 21 nt, Human
gcgcacguugguuucuugguc

SEQ ID NO: 442127 - RNA, 32 nt, Human
gcgcacugcaaccuggaccuccugggcucaag

SEQ ID NO: 442128 - RNA, 32 nt, Human
gcgcacugcagccuugaacuccugggcucaag

SEQ ID NO: 442129 - RNA, 32 nt, Human
gcgcacugcaguuaaugaauucugccuucaac

SEQ ID NO: 442130 - RNA, 32 nt, Human
gcgcacugggacggcagccaggaaacgugugg

SEQ ID NO: 442131 - RNA, 32 nt, Human
gcgcacugggauccugcuggaaccucagcugc

SEQ ID NO: 442132 - RNA, 32 nt, Human
gcgcacuuauggucccagcuaauugggagccu

SEQ ID NO: 442133 - RNA, 32 nt, Human
gcgcagaagaucaagaccagccugggaaauau

SEQ ID NO: 442134 - RNA, 32 nt, Human
gcgcagaccgggccgcagcccaugccccgagc

SEQ ID NO: 442135 - RNA, 32 nt, Human
gcgcagaccucuuggccuucucucacaggucg

SEQ ID NO: 442136 - RNA, 32 nt, Human
gcgcagagaacucccagagaagaaggagauca

SEQ ID NO: 442137 - RNA, 32 nt, Human
gcgcagagccccguccugauugaucgcaucgc

SEQ ID NO: 442138 - RNA, 32 nt, Human
gcgcagaggcggagcugugcucagcacaggcc

SEQ ID NO: 442139 - RNA, 32 nt, Human
gcgcagaggcgucacgcacuccaugguaacga

SEQ ID NO: 442140 - RNA, 32 nt, Human
gcgcagaggugacagacagccacugaggccca

SEQ ID NO: 442141 - RNA, 32 nt, Human
gcgcagauggccugggcgagccaggucugagg

SEQ ID NO: 442142 - RNA, 32 nt, Human
gcgcagauuccuuccaggugggaagaaagcuu

SEQ ID NO: 442143 - RNA, 27 nt, Human
gcgcagcacaacggccgccgccgccac

SEQ ID NO: 442144 - RNA, 32 nt, Human
gcgcagcacagcccggccauggagcacgcggu

SEQ ID NO: 442145 - RNA, 18 nt, Human
gcgcagcagagccagggg

SEQ ID NO: 442146 - RNA, 22 nt, Human
gcgcagcagccgccgccgccgc

SEQ ID NO: 442147 - RNA, 20 nt, Human
gcgcagcagccucugugggg

SEQ ID NO: 442148 - RNA, 27 nt, Human
gcgcagcagcggcggcggcaguggcgg

SEQ ID NO: 442149 - RNA, 22 nt, Human
gcgcagcagcgggagcuagggg

SEQ ID NO: 442150 - RNA, 32 nt, Human
gcgcagcagucggcguccgccucccaguacca

SEQ ID NO: 442151 - RNA, 23 nt, Human
gcgcagcagugcaccacugggaa

SEQ ID NO: 442152 - RNA, 32 nt, Human
gcgcagcauccugagcgcgccucugccgaggc

SEQ ID NO: 442153 - RNA, 22 nt, Human
gcgcagccaccgccgccgccgc

SEQ ID NO: 442154 - RNA, 32 nt, Human
gcgcagccauuuucucccgggagagguuggag

SEQ ID NO: 442155 - RNA, 18 nt, Human
gcgcagcccaaggagggg

SEQ ID NO: 442156 - RNA, 32 nt, Human
gcgcagcccaggaggcgggagccccugcacac

SEQ ID NO: 442157 - RNA, 32 nt, Human
gcgcagccccucuccucuucaggcuacagggu

SEQ ID NO: 442158 - RNA, 32 nt, Human
gcgcagcccgcucccgccgccaccuccucccc

SEQ ID NO: 442159 - RNA, 19 nt, Human
gcgcagcccggcacccgca

SEQ ID NO: 442160 - RNA, 32 nt, Human
gcgcagcccuagugggagcccagcacacugcu

SEQ ID NO: 442161 - RNA, 32 nt, Human
gcgcagcccugucccguguccuguccucuacu

SEQ ID NO: 442162 - RNA, 32 nt, Human
gcgcagccgacaucagcacccuagaccagaag

SEQ ID NO: 442163 - RNA, 32 nt, Human
gcgcagccgagcggagcccaggagagcagaga

SEQ ID NO: 442164 - RNA, 32 nt, Human
gcgcagccugggcccagcccaccccgcgccgg

SEQ ID NO: 442165 - RNA, 19 nt, Human
gcgcagcgcggacccggcc

SEQ ID NO: 442166 - RNA, 32 nt, Human
gcgcagcgcgggggcugggauucacgcccaga

SEQ ID NO: 442167 - RNA, 32 nt, Human
gcgcagcggccgaugguacagcccgcuccccc

SEQ ID NO: 442168 - RNA, 32 nt, Human
gcgcagcggcucaugccuguaaccucagcacu

SEQ ID NO: 442169 - RNA, 32 nt, Human
gcgcagcuccacccauugugccccaggccagc

SEQ ID NO: 442170 - RNA, 28 nt, Human
gcgcagcugacugcugccucucacggcc

SEQ ID NO: 442171 - RNA, 32 nt, Human
gcgcagcugcacuccagccugggcaacagagc

SEQ ID NO: 442172 - RNA, 32 nt, Human
gcgcagcuuauuaagagagaaggcuuuacuag

SEQ ID NO: 442173 - RNA, 32 nt, Human
gcgcaggaagacgcagaacaacagaaauagcc

SEQ ID NO: 442174 - RNA, 32 nt, Human
gcgcaggaauaagcaaagagacccuggaccca

SEQ ID NO: 442175 - RNA, 32 nt, Human
gcgcaggacccuuggaaauguugcaaguguua

SEQ ID NO: 442176 - RNA, 19 nt, Human
gcgcaggacugggcggccu

SEQ ID NO: 442177 - RNA, 32 nt, Human
gcgcaggagaaaaggagggggaagagaguccg

SEQ ID NO: 442178 - RNA, 32 nt, Human
gcgcaggaggaaacaguaccggcuggaggccg

SEQ ID NO: 442179 - RNA, 32 nt, Human
gcgcaggaggccugaggaguggcuacuggagc

SEQ ID NO: 442180 - RNA, 19 nt, Human
gcgcaggcagcccccgccc

SEQ ID NO: 442181 - RNA, 19 nt, Human
gcgcaggccaggaucagcg

SEQ ID NO: 442182 - RNA, 32 nt, Human
gcgcaggccguuccaucugccucccaggucug

SEQ ID NO: 442183 - RNA, 32 nt, Human
gcgcagggagcugccaaggccaugucuguucc

SEQ ID NO: 442184 - RNA, 32 nt, Human
gcgcagggcccccagcccaaguucuuccaucu

SEQ ID NO: 442185 - RNA, 32 nt, Human
gcgcaggggaggcagaagucaugacaggcgag

SEQ ID NO: 442186 - RNA, 32 nt, Human
gcgcaggggaggcaggcggaggccaugggcag

SEQ ID NO: 442187 - RNA, 32 nt, Human
gcgcaggggcaucucuccccugcuccagcgca

SEQ ID NO: 442188 - RNA, 19 nt, Human
gcgcaggggcugggcagcu

SEQ ID NO: 442189 - RNA, 18 nt, Human
gcgcaggggcugggggcc

SEQ ID NO: 442190 - RNA, 22 nt, Human
gcgcaggggugggagggcggcc

SEQ ID NO: 442191 - RNA, 32 nt, Human
gcgcagggugccggggaagcucgggaauggag

SEQ ID NO: 442192 - RNA, 32 nt, Human
gcgcaggguggagggaguggccagcggcccug

SEQ ID NO: 442193 - RNA, 32 nt, Human
gcgcagguggagccagcgagaggcucugaggc

SEQ ID NO: 442194 - RNA, 32 nt, Human
gcgcagucaugcaggaaaaccucagauuugcu

SEQ ID NO: 442195 - RNA, 32 nt, Human
gcgcagucauucucauaaucgcccacgggcuu

SEQ ID NO: 442196 - RNA, 32 nt, Human
gcgcagucgucacgccuguaaucccagcacuu

SEQ ID NO: 442197 - RNA, 32 nt, Human
gcgcagucuccacggaggccucaggccucggu

SEQ ID NO: 442198 - RNA, 19 nt, Human
gcgcagugccccccuccca

SEQ ID NO: 442199 - RNA, 32 nt, Human
gcgcaguggcucacaacuguaaccucaagcac

SEQ ID NO: 442200 - RNA, 32 nt, Human
gcgcaguggcuguaaucccagcacuuugggag

SEQ ID NO: 442201 - RNA, 32 nt, Human
gcgcagugguucaugcuguaaucccaucacuu

SEQ ID NO: 442202 - RNA, 32 nt, Human
gcgcaguguaaaugagcaaagauggaucagga

SEQ ID NO: 442203 - RNA, 32 nt, Human
gcgcaguuugcucgcuuuccuccccugccggc

SEQ ID NO: 442204 - RNA, 32 nt, Human
gcgcauaccuguaaucucugcuauuugggaga

SEQ ID NO: 442205 - RNA, 32 nt, Human
gcgcauagaggagagaaggaaaccugaggagu

SEQ ID NO: 442206 - RNA, 32 nt, Human
gcgcauagggguucuccaggcugcaguuggcg

SEQ ID NO: 442207 - RNA, 32 nt, Human
gcgcaucaguguucucuggguccugugcccuc

SEQ ID NO: 442208 - RNA, 32 nt, Human
gcgcauccaaucucaaggaaucuuuaagcaga

SEQ ID NO: 442209 - RNA, 32 nt, Human
gcgcauccggaggcggccgggccccgccaugg

SEQ ID NO: 442210 - RNA, 32 nt, Human
gcgcaugauuacuuguuuuauauuucauguug

SEQ ID NO: 442211 - RNA, 32 nt, Human
gcgcaugcacacacagacggacagagacagaa

SEQ ID NO: 442212 - RNA, 32 nt, Human
gcgcaugcaccacgugcugaaagaggcucuca

SEQ ID NO: 442213 - RNA, 32 nt, Human
gcgcaugcaccacgugcugaaggaggcgcuca

SEQ ID NO: 442214 - RNA, 32 nt, Human
gcgcaugccuguaaucccagaacuuugggagg

SEQ ID NO: 442215 - RNA, 32 nt, Human
gcgcaugccuguaaucccagcacuuugggagg

SEQ ID NO: 442216 - RNA, 32 nt, Human
gcgcaugccuguaaucccagcuacucgggagg

SEQ ID NO: 442217 - RNA, 32 nt, Human
gcgcaugccuguaaucccagcuacugggaagg

SEQ ID NO: 442218 - RNA, 32 nt, Human
gcgcaugccuguaaucccagcuacuuaggagg

SEQ ID NO: 442219 - RNA, 32 nt, Human
gcgcaugccuguaaucccagcuacuugggaga

SEQ ID NO: 442220 - RNA, 32 nt, Human
gcgcaugccuguaaucccagcuacuugggagc

SEQ ID NO: 442221 - RNA, 32 nt, Human
gcgcaugccuguaaucccagcuacuugggagg

SEQ ID NO: 442222 - RNA, 32 nt, Human
gcgcaugccuguaaucccagcugcuugggagg

SEQ ID NO: 442223 - RNA, 32 nt, Human
gcgcaugccuguaauccuagcuacucgggagg

SEQ ID NO: 442224 - RNA, 32 nt, Human
gcgcaugccuguaaucucagcuacucaggagg

SEQ ID NO: 442225 - RNA, 32 nt, Human
gcgcaugccuguagucccagcuaacugggagg

SEQ ID NO: 442226 - RNA, 32 nt, Human
gcgcaugccuguagucccagcuacuugggagg

SEQ ID NO: 442227 - RNA, 32 nt, Human
gcgcaugccuuuaaucucagcuauucuggagg

SEQ ID NO: 442228 - RNA, 32 nt, Human
gcgcaugcuuguaaucccagcuacucgggagg

SEQ ID NO: 442229 - RNA, 32 nt, Human
gcgcauggaagaggcgguccagccaucugaug

SEQ ID NO: 442230 - RNA, 29 nt, Human
gcgcauggagccagaggaggaggaugaac

SEQ ID NO: 442231 - RNA, 32 nt, Human
gcgcauggucucagcucacugcaaccucugcc

SEQ ID NO: 442232 - RNA, 32 nt, Human
gcgcaugucuguaaucccagcuacuggggaag

SEQ ID NO: 442233 - RNA, 32 nt, Human
gcgcaugucuguaaucccagcuacuggggagg

SEQ ID NO: 442234 - RNA, 29 nt, Human
gcgcauguggggcucccugggcuggggcc

SEQ ID NO: 442235 - RNA, 32 nt, Human
gcgcauguguguuugcauguaggagaacgugc

SEQ ID NO: 442236 - RNA, 32 nt, Human
gcgcauucaaaacagucucaguaacaaagaca

SEQ ID NO: 442237 - RNA, 32 nt, Human
gcgcauucaguuuggaaaagacagcuuuucau

SEQ ID NO: 442238 - RNA, 32 nt, Human
gcgcauucccacacuccagucuggauccaggu

SEQ ID NO: 442239 - RNA, 32 nt, Human
gcgcauugccuguaaucccagcuacuagggag

SEQ ID NO: 442240 - RNA, 32 nt, Human
gcgcauuggugagcccgacuccccagccucgg

SEQ ID NO: 442241 - RNA, 32 nt, Human
gcgccaaccagaaacuuugccccucgaagucc

SEQ ID NO: 442242 - RNA, 32 nt, Human
gcgccaaggccuucacccaggugucgcaccug

SEQ ID NO: 442243 - RNA, 32 nt, Human
gcgccaagggauccagccuagagcagaccuua

SEQ ID NO: 442244 - RNA, 32 nt, Human
gcgccaaugcacuccagccugggcgacagaga

SEQ ID NO: 442245 - RNA, 32 nt, Human
gcgccacagcauuccagccugggcgauggagu

SEQ ID NO: 442246 - RNA, 19 nt, Human
gcgccacaucccaccggcc

SEQ ID NO: 442247 - RNA, 32 nt, Human
gcgccaccaaccccacccacacugcugccugg

SEQ ID NO: 442248 - RNA, 32 nt, Human
gcgccaccacacuccagccugggcaacagaga

SEQ ID NO: 442249 - RNA, 20 nt, Human
gcgccaccacgcugcacccc

SEQ ID NO: 442250 - RNA, 21 nt, Human
gcgccaccacgcugcaccccc

SEQ ID NO: 442251 - RNA, 22 nt, Human
gcgccaccacugaugccaccca

SEQ ID NO: 442252 - RNA, 32 nt, Human
gcgccaccacugcacuccagccugggcaacag

SEQ ID NO: 442253 - RNA, 32 nt, Human
gcgccaccauggugcuggagucgguggucgcg

SEQ ID NO: 442254 - RNA, 32 nt, Human
gcgccacccacccucgcuuucuccggcuuccu

SEQ ID NO: 442255 - RNA, 32 nt, Human
gcgccacccaggccgccacacgccgaggcuuc

SEQ ID NO: 442256 - RNA, 24 nt, Human
gcgccaccccgcggucaucgguca

SEQ ID NO: 442257 - RNA, 32 nt, Human
gcgccacccucggggcgccgacggucacggag

SEQ ID NO: 442258 - RNA, 32 nt, Human
gcgccaccgcacuccagccucgccgacaaagc

SEQ ID NO: 442259 - RNA, 32 nt, Human
gcgccaccgcacuccagccugggcaacagagc

SEQ ID NO: 442260 - RNA, 32 nt, Human
gcgccaccgcacuccagccugggcgacagagc

SEQ ID NO: 442261 - RNA, 32 nt, Human
gcgccaccgcauuccagccugggcgacagagc

SEQ ID NO: 442262 - RNA, 32 nt, Human
gcgccaccgcccuccagccugggcgacagagc

SEQ ID NO: 442263 - RNA, 32 nt, Human
gcgccaccgcgcuccagccugggugacagagc

SEQ ID NO: 442264 - RNA, 32 nt, Human
gcgccaccgggggaggaggaggaggagaaggu

SEQ ID NO: 442265 - RNA, 18 nt, Human
gcgccaccguccccggcg

SEQ ID NO: 442266 - RNA, 32 nt, Human
gcgccaccgugccuggcuaacuuuucauuuuu

SEQ ID NO: 442267 - RNA, 21 nt, Human
gcgccaccugagggucagcca

SEQ ID NO: 442268 - RNA, 17 nt, Human
gcgccaccuugggccag

SEQ ID NO: 442269 - RNA, 32 nt, Human
gcgccacgagcccggccgagugcagcuggagc

SEQ ID NO: 442270 - RNA, 32 nt, Human
gcgccacgcucgccccugcacacucacauaug

SEQ ID NO: 442271 - RNA, 32 nt, Human
gcgccacggcacuccagccugggagacagagc

SEQ ID NO: 442272 - RNA, 32 nt, Human
gcgccacggcacuccagccugggcgacagagc

SEQ ID NO: 442273 - RNA, 32 nt, Human
gcgccacuacacuccagccugagcaacagagu

SEQ ID NO: 442274 - RNA, 32 nt, Human
gcgccacuacacuccagccugggcaacagagg

SEQ ID NO: 442275 - RNA, 32 nt, Human
gcgccacuacacuccagccugggcgacagagc

SEQ ID NO: 442276 - RNA, 32 nt, Human
gcgccacuacacuccagccugggugacagagu

SEQ ID NO: 442277 - RNA, 32 nt, Human
gcgccacuauacuccagccugggcaacagaca

SEQ ID NO: 442278 - RNA, 32 nt, Human
gcgccacucugcuggcugaggcugcggagagu

SEQ ID NO: 442279 - RNA, 32 nt, Human
gcgccacugcacucaagccugggcaacaccug

SEQ ID NO: 442280 - RNA, 32 nt, Human
gcgccacugcacucaagucugggcgacagggu

SEQ ID NO: 442281 - RNA, 32 nt, Human
gcgccacugcacuccaaccugggcaauagagg

SEQ ID NO: 442282 - RNA, 32 nt, Human
gcgccacugcacuccaaccugggugacagacu

SEQ ID NO: 442283 - RNA, 32 nt, Human
gcgccacugcacuccacccuggguaacggaac

SEQ ID NO: 442284 - RNA, 32 nt, Human
gcgccacugcacuccacccugggugacagagu

SEQ ID NO: 442285 - RNA, 32 nt, Human
gcgccacugcacuccagcagucugggcgacag

SEQ ID NO: 442286 - RNA, 32 nt, Human
gcgccacugcacuccagccagggcgaaggagu

SEQ ID NO: 442287 - RNA, 32 nt, Human
gcgccacugcacuccagcccgggcgacagagc

SEQ ID NO: 442288 - RNA, 32 nt, Human
gcgccacugcacuccagcccgggugacagagc

SEQ ID NO: 442289 - RNA, 32 nt, Human
gcgccacugcacuccagcccuggcgacagagu

SEQ ID NO: 442290 - RNA, 32 nt, Human
gcgccacugcacuccagccuagacgacagagc

SEQ ID NO: 442291 - RNA, 32 nt, Human
gcgccacugcacuccagccuaggcaacagagc

SEQ ID NO: 442292 - RNA, 32 nt, Human
gcgccacugcacuccagccuaggggacaguua

SEQ ID NO: 442293 - RNA, 32 nt, Human
gcgccacugcacuccagccuaggugacagagg

SEQ ID NO: 442294 - RNA, 32 nt, Human
gcgccacugcacuccagccuaggugauagagc

SEQ ID NO: 442295 - RNA, 32 nt, Human
gcgccacugcacuccagccucagcaauagagu

SEQ ID NO: 442296 - RNA, 32 nt, Human
gcgccacugcacuccagccucggcaacagagc

SEQ ID NO: 442297 - RNA, 32 nt, Human
gcgccacugcacuccagccucggugacagagc

SEQ ID NO: 442298 - RNA, 32 nt, Human
gcgccacugcacuccagccugacgacaaagcg

SEQ ID NO: 442299 - RNA, 32 nt, Human
gcgccacugcacuccagccugagcgacagagu

SEQ ID NO: 442300 - RNA, 32 nt, Human
gcgccacugcacuccagccugagugacagagc

SEQ ID NO: 442301 - RNA, 32 nt, Human
gcgccacugcacuccagccuggacgacagagc

SEQ ID NO: 442302 - RNA, 32 nt, Human
gcgccacugcacuccagccuggacgacagagu

SEQ ID NO: 442303 - RNA, 32 nt, Human
gcgccacugcacuccagccuggcaacagagug

SEQ ID NO: 442304 - RNA, 32 nt, Human
gcgccacugcacuccagccuggcgacaaagcg

SEQ ID NO: 442305 - RNA, 32 nt, Human
gcgccacugcacuccagccuggcgacagagca

SEQ ID NO: 442306 - RNA, 32 nt, Human
gcgccacugcacuccagccuggcgacagagcg

SEQ ID NO: 442307 - RNA, 32 nt, Human
gcgccacugcacuccagccugggagacagagu

SEQ ID NO: 442308 - RNA, 32 nt, Human
gcgccacugcacuccagccugggcaacaagaa

SEQ ID NO: 442309 - RNA, 32 nt, Human
gcgccacugcacuccagccugggcaacaagag

SEQ ID NO: 442310 - RNA, 32 nt, Human
gcgccacugcacuccagccugggcaacagaac

SEQ ID NO: 442311 - RNA, 32 nt, Human
gcgccacugcacuccagccugggcaacagagc

SEQ ID NO: 442312 - RNA, 32 nt, Human
gcgccacugcacuccagccugggcaacagagg

SEQ ID NO: 442313 - RNA, 32 nt, Human
gcgccacugcacuccagccugggcaacagagu

SEQ ID NO: 442314 - RNA, 32 nt, Human
gcgccacugcacuccagccugggcaacaggcu

SEQ ID NO: 442315 - RNA, 32 nt, Human
gcgccacugcacuccagccugggcaauagagu

SEQ ID NO: 442316 - RNA, 32 nt, Human
gcgccacugcacuccagccugggcagcaagag

SEQ ID NO: 442317 - RNA, 32 nt, Human
gcgccacugcacuccagccugggcagcagagc

SEQ ID NO: 442318 - RNA, 32 nt, Human
gcgccacugcacuccagccugggcagcagagg

SEQ ID NO: 442319 - RNA, 32 nt, Human
gcgccacugcacuccagccugggcgacacagc

SEQ ID NO: 442320 - RNA, 30 nt, Human
gcgccacugcacuccagccugggcgacaga

SEQ ID NO: 442321 - RNA, 32 nt, Human
gcgccacugcacuccagccugggcgacagagc

SEQ ID NO: 442322 - RNA, 32 nt, Human
gcgccacugcacuccagccugggcgacagagu

SEQ ID NO: 442323 - RNA, 32 nt, Human
gcgccacugcacuccagccugggcgacagcaa

SEQ ID NO: 442324 - RNA, 32 nt, Human
gcgccacugcacuccagccugggcgacagcga

SEQ ID NO: 442325 - RNA, 32 nt, Human
gcgccacugcacuccagccugggcgacagggc

SEQ ID NO: 442326 - RNA, 32 nt, Human
gcgccacugcacuccagccugggcgacggagc

SEQ ID NO: 442327 - RNA, 32 nt, Human
gcgccacugcacuccagccugggcgagagaau

SEQ ID NO: 442328 - RNA, 32 nt, Human
gcgccacugcacuccagccugggcgauagagc

SEQ ID NO: 442329 - RNA, 32 nt, Human
gcgccacugcacuccagccugggcgucagagu

SEQ ID NO: 442330 - RNA, 32 nt, Human
gcgccacugcacuccagccugggcuacagagc

SEQ ID NO: 442331 - RNA, 32 nt, Human
gcgccacugcacuccagccugggggacagagc

SEQ ID NO: 442332 - RNA, 32 nt, Human
gcgccacugcacuccagccuggguaacagagc

SEQ ID NO: 442333 - RNA, 32 nt, Human
gcgccacugcacuccagccugggugacacagc

SEQ ID NO: 442334 - RNA, 32 nt, Human
gcgccacugcacuccagccugggugacagaac

SEQ ID NO: 442335 - RNA, 32 nt, Human
gcgccacugcacuccagccugggugacagaau

SEQ ID NO: 442336 - RNA, 32 nt, Human
gcgccacugcacuccagccugggugacagaga

SEQ ID NO: 442337 - RNA, 32 nt, Human
gcgccacugcacuccagccugggugacagagc

SEQ ID NO: 442338 - RNA, 32 nt, Human
gcgccacugcacuccagccugggugacagagg

SEQ ID NO: 442339 - RNA, 32 nt, Human
gcgccacugcacuccagccugggugacagagu

SEQ ID NO: 442340 - RNA, 32 nt, Human
gcgccacugcacuccagccugggugacugagg

SEQ ID NO: 442341 - RNA, 32 nt, Human
gcgccacugcacuccagccugggugagagagu

SEQ ID NO: 442342 - RNA, 32 nt, Human
gcgccacugcacuccagccugggugauagagc

SEQ ID NO: 442343 - RNA, 32 nt, Human
gcgccacugcacuccagccugggugauagagu

SEQ ID NO: 442344 - RNA, 32 nt, Human
gcgccacugcacuccagccuggugacagagca

SEQ ID NO: 442345 - RNA, 32 nt, Human
gcgccacugcacuccagccuggugacagagcg

SEQ ID NO: 442346 - RNA, 32 nt, Human
gcgccacugcacuccagccugguugacagagc

SEQ ID NO: 442347 - RNA, 32 nt, Human
gcgccacugcacuccagcgcggaagacagagu

SEQ ID NO: 442348 - RNA, 32 nt, Human
gcgccacugcacuccagcgugggcuacagagu

SEQ ID NO: 442349 - RNA, 32 nt, Human
gcgccacugcacuccagcuugggcaacagagc

SEQ ID NO: 442350 - RNA, 32 nt, Human
gcgccacugcacuccaggccugggugacagug

SEQ ID NO: 442351 - RNA, 32 nt, Human
gcgccacugcacuccaggcugggcaacggagu

SEQ ID NO: 442352 - RNA, 32 nt, Human
gcgccacugcacuccaggcugggcgacagagc

SEQ ID NO: 442353 - RNA, 32 nt, Human
gcgccacugcacuccagucugggacaacagag

SEQ ID NO: 442354 - RNA, 32 nt, Human
gcgccacugcacuccagucugggcaacagagc

SEQ ID NO: 442355 - RNA, 32 nt, Human
gcgccacugcacuccagucugggcaacagagu

SEQ ID NO: 442356 - RNA, 32 nt, Human
gcgccacugcacuccagucugggcgacagagc

SEQ ID NO: 442357 - RNA, 32 nt, Human
gcgccacugcacuccagucugggcgauagagc

SEQ ID NO: 442358 - RNA, 32 nt, Human
gcgccacugcacuccagucuggucggcaagag

SEQ ID NO: 442359 - RNA, 32 nt, Human
gcgccacugcacuccaguuugggcaacagaau

SEQ ID NO: 442360 - RNA, 32 nt, Human
gcgccacugcacuccggccugaugacagagcg

SEQ ID NO: 442361 - RNA, 32 nt, Human
gcgccacugcacuccugccugggacacaaugc

SEQ ID NO: 442362 - RNA, 32 nt, Human
gcgccacugcacuccugccugggcaacugagc

SEQ ID NO: 442363 - RNA, 32 nt, Human
gcgccacugcacucuagccggagugacagagu

SEQ ID NO: 442364 - RNA, 32 nt, Human
gcgccacugcacucuagccuaagcaauggagc

SEQ ID NO: 442365 - RNA, 32 nt, Human
gcgccacugcacucuagccugagugacagagc

SEQ ID NO: 442366 - RNA, 32 nt, Human
gcgccacugcacucuagccugggccauagagc

SEQ ID NO: 442367 - RNA, 32 nt, Human
gcgccacugcacucuagccugggcuacagagc

SEQ ID NO: 442368 - RNA, 32 nt, Human
gcgccacugcacucuagccugggugacagagc

SEQ ID NO: 442369 - RNA, 32 nt, Human
gcgccacugcacucuagccugggugacagagu

SEQ ID NO: 442370 - RNA, 32 nt, Human
gcgccacugcacugcacgccagccuaggcgac

SEQ ID NO: 442371 - RNA, 32 nt, Human
gcgccacugcacuucagccuggacaacagagu

SEQ ID NO: 442372 - RNA, 32 nt, Human
gcgccacugcacuucagccuggaugacagagc

SEQ ID NO: 442373 - RNA, 32 nt, Human
gcgccacugcacuucagccugggcaacagagc

SEQ ID NO: 442374 - RNA, 32 nt, Human
gcgccacugcacuucagccugggugacagagc

SEQ ID NO: 442375 - RNA, 32 nt, Human
gcgccacugcacuucagccuuggagacagggg

SEQ ID NO: 442376 - RNA, 32 nt, Human
gcgccacugcaguccagccugggcaacaagag

SEQ ID NO: 442377 - RNA, 32 nt, Human
gcgccacugcauuccagccuggacgacagagc

SEQ ID NO: 442378 - RNA, 32 nt, Human
gcgccacugcauuccagccugggcaacagagc

SEQ ID NO: 442379 - RNA, 32 nt, Human
gcgccacugcauuccagccugggugacugagc

SEQ ID NO: 442380 - RNA, 32 nt, Human
gcgccacugcauucuagccuggaugacagagc

SEQ ID NO: 442381 - RNA, 32 nt, Human
gcgccacugcccuccagccugggcgacagaau

SEQ ID NO: 442382 - RNA, 32 nt, Human
gcgccacugcgcuccagccuggacaacacagu

SEQ ID NO: 442383 - RNA, 32 nt, Human
gcgccacugcgcuccagccugggcaacagagc

SEQ ID NO: 442384 - RNA, 32 nt, Human
gcgccacugcucuccagccuggguggcagagc

SEQ ID NO: 442385 - RNA, 18 nt, Human
gcgccacugcuucugcca

SEQ ID NO: 442386 - RNA, 32 nt, Human
gcgccacuggacuccagccugcgugacagaga

SEQ ID NO: 442387 - RNA, 32 nt, Human
gcgccacuggacuccagccuggacaacagagc

SEQ ID NO: 442388 - RNA, 32 nt, Human
gcgccacugggcuccagccugggcgacagagu

SEQ ID NO: 442389 - RNA, 32 nt, Human
gcgccacuguacuccagccuggacaacagcga

SEQ ID NO: 442390 - RNA, 32 nt, Human
gcgccacuguacuccagccuggcaacagagug

SEQ ID NO: 442391 - RNA, 32 nt, Human
gcgccacuguacuccagccugggcaacagagc

SEQ ID NO: 442392 - RNA, 32 nt, Human
gcgccacuguacuccagccugggugacagagc

SEQ ID NO: 442393 - RNA, 32 nt, Human
gcgccacuguacuccagccugggugacgagcg

SEQ ID NO: 442394 - RNA, 32 nt, Human
gcgccacuguacuccagccugggugaggagag

SEQ ID NO: 442395 - RNA, 32 nt, Human
gcgccacuguacuccagcuugggcaacagagc

SEQ ID NO: 442396 - RNA, 32 nt, Human
gcgccacugugcuccagccugggcaacagagc

SEQ ID NO: 442397 - RNA, 32 nt, Human
gcgccacuucacuccagccugggcaacagagu

SEQ ID NO: 442398 - RNA, 32 nt, Human
gcgccacuucacuccagccugggugacagaga

SEQ ID NO: 442399 - RNA, 32 nt, Human
gcgccacuucucagaaacacacagagcuuuag

SEQ ID NO: 442400 - RNA, 20 nt, Human
gcgccagagcccagcacucc

SEQ ID NO: 442401 - RNA, 32 nt, Human
gcgccagagccgaagaaggagacugaaaguga

SEQ ID NO: 442402 - RNA, 21 nt, Human
gcgccagcagcagcagcagca

SEQ ID NO: 442403 - RNA, 19 nt, Human
gcgccagcagccucugcca

SEQ ID NO: 442404 - RNA, 32 nt, Human
gcgccagcagcucuggugcugugcuucccgug

SEQ ID NO: 442405 - RNA, 32 nt, Human
gcgccagcaugggagagcgagggaccugcccg

SEQ ID NO: 442406 - RNA, 32 nt, Human
gcgccagccaccacggcccuccggacauuccu

SEQ ID NO: 442407 - RNA, 21 nt, Human
gcgccagcccguggcccggca

SEQ ID NO: 442408 - RNA, 19 nt, Human
gcgccagccgccccgagcc

SEQ ID NO: 442409 - RNA, 19 nt, Human
gcgccagccggucggcagg

SEQ ID NO: 442410 - RNA, 32 nt, Human
gcgccagcgggaaccacuaucucugcacuccu

SEQ ID NO: 442411 - RNA, 17 nt, Human
gcgccaggaagagagca

SEQ ID NO: 442412 - RNA, 32 nt, Human
gcgccaggagccgccugcgaccgcccgggcgu

SEQ ID NO: 442413 - RNA, 32 nt, Human
gcgccaggccgggaagaguacaaggacaagga

SEQ ID NO: 442414 - RNA, 32 nt, Human
gcgccaggccuggagauggcuggaaacugcuc

SEQ ID NO: 442415 - RNA, 22 nt, Human
gcgccagggacgcugccagcau

SEQ ID NO: 442416 - RNA, 18 nt, Human
gcgccagggacgggggca

SEQ ID NO: 442417 - RNA, 32 nt, Human
gcgccagggaggaggcaggcucaaccuucaga

SEQ ID NO: 442418 - RNA, 21 nt, Human
gcgccagggccugagcugccg

SEQ ID NO: 442419 - RNA, 18 nt, Human
gcgccaggggacccagca

SEQ ID NO: 442420 - RNA, 18 nt, Human
gcgccaggggagccgcca

SEQ ID NO: 442421 - RNA, 32 nt, Human
gcgccaggggcaggcagcuaggcagggagggg

SEQ ID NO: 442422 - RNA, 31 nt, Human
gcgccaggugacccuguuuccccgggcuggg

SEQ ID NO: 442423 - RNA, 32 nt, Human
gcgccaguacacuccagccuggguaacagagc

SEQ ID NO: 442424 - RNA, 32 nt, Human
gcgccagugaggaggaagggaaggcgguucag

SEQ ID NO: 442425 - RNA, 32 nt, Human
gcgccagugcacuccagccugggcaagaagag

SEQ ID NO: 442426 - RNA, 32 nt, Human
gcgccagugcacuccagcugggcgacagagcg

SEQ ID NO: 442427 - RNA, 32 nt, Human
gcgccaguuuuucuuguuaugacuguguauuu

SEQ ID NO: 442428 - RNA, 32 nt, Human
gcgccauauauguauguauguguaugugugug

SEQ ID NO: 442429 - RNA, 32 nt, Human
gcgccaucacacuccagccuaggcgacagagu

SEQ ID NO: 442430 - RNA, 32 nt, Human
gcgccaucaugggcugauuuuuauuaccaggu

SEQ ID NO: 442431 - RNA, 21 nt, Human
gcgccaucccaagcccagccc

SEQ ID NO: 442432 - RNA, 32 nt, Human
gcgccauccccaccuucgccuccugaggcaca

SEQ ID NO: 442433 - RNA, 32 nt, Human
gcgccaucccugagagagcagcagucuggaga

SEQ ID NO: 442434 - RNA, 23 nt, Human
gcgccauccuaaccauccagcca

SEQ ID NO: 442435 - RNA, 32 nt, Human
gcgccaucgcacuccagccugggcaacaagag

SEQ ID NO: 442436 - RNA, 32 nt, Human
gcgccaucgcacuccagccugggugacaagag

SEQ ID NO: 442437 - RNA, 32 nt, Human
gcgccaucugcaggagcuggcgggcuggccuu

SEQ ID NO: 442438 - RNA, 32 nt, Human
gcgccaugaauccugccacacagggaucaagg

SEQ ID NO: 442439 - RNA, 30 nt, Human
gcgccaugagucugacuuccaguuccagcg

SEQ ID NO: 442440 - RNA, 32 nt, Human
gcgccauggcacucacuccagccugggcaaca

SEQ ID NO: 442441 - RNA, 30 nt, Human
gcgccaugggcaagaacaagcagccacgcg

SEQ ID NO: 442442 - RNA, 30 nt, Human
gcgccauguccaccccuccguuggccgcgu

SEQ ID NO: 442443 - RNA, 30 nt, Human
gcgccauguccucugagucauccaccaugg

SEQ ID NO: 442444 - RNA, 30 nt, Human
gcgccauguccugcuuggccggcuggaggg

SEQ ID NO: 442445 - RNA, 21 nt, Human
gcgccaugugggcaucagcca

SEQ ID NO: 442446 - RNA, 32 nt, Human
gcgccauugcacuccaaccuaggugacaaagc

SEQ ID NO: 442447 - RNA, 32 nt, Human
gcgccauugcacuccaaccuggacgacagagc

SEQ ID NO: 442448 - RNA, 32 nt, Human
gcgccauugcacuccagcccgggcaacaagag

SEQ ID NO: 442449 - RNA, 32 nt, Human
gcgccauugcacuccagccuagguaacaagag

SEQ ID NO: 442450 - RNA, 32 nt, Human
gcgccauugcacuccagccugagcgacagagc

SEQ ID NO: 442451 - RNA, 32 nt, Human
gcgccauugcacuccagccuggacaacaagag

SEQ ID NO: 442452 - RNA, 32 nt, Human
gcgccauugcacuccagccuggcugacagagc

SEQ ID NO: 442453 - RNA, 32 nt, Human
gcgccauugcacuccagccugggcaaaaagag

SEQ ID NO: 442454 - RNA, 32 nt, Human
gcgccauugcacuccagccugggcaacaacag

SEQ ID NO: 442455 - RNA, 32 nt, Human
gcgccauugcacuccagccugggcaacaagag

SEQ ID NO: 442456 - RNA, 32 nt, Human
gcgccauugcacuccagccugggcaacacagc

SEQ ID NO: 442457 - RNA, 32 nt, Human
gcgccauugcacuccagccugggcaacagagu

SEQ ID NO: 442458 - RNA, 32 nt, Human
gcgccauugcacuccagccugggcaacgaaaa

SEQ ID NO: 442459 - RNA, 32 nt, Human
gcgccauugcacuccagccugggcaacgagug

SEQ ID NO: 442460 - RNA, 32 nt, Human
gcgccauugcacuccagccugggcaacuccgu

SEQ ID NO: 442461 - RNA, 32 nt, Human
gcgccauugcacuccagccugggcgacaagag

SEQ ID NO: 442462 - RNA, 32 nt, Human
gcgccauugcacuccagccugggcgacagagc

SEQ ID NO: 442463 - RNA, 32 nt, Human
gcgccauugcacuccagccugggcgacagagu

SEQ ID NO: 442464 - RNA, 32 nt, Human
gcgccauugcacuccagccugggcgacugaau

SEQ ID NO: 442465 - RNA, 32 nt, Human
gcgccauugcacuccagccugggcggcagagc

SEQ ID NO: 442466 - RNA, 32 nt, Human
gcgccauugcacuccagccuggggacaaagca

SEQ ID NO: 442467 - RNA, 32 nt, Human
gcgccauugcacuccagccugggggacaagag

SEQ ID NO: 442468 - RNA, 32 nt, Human
gcgccauugcacuccagccuggguaacaagag

SEQ ID NO: 442469 - RNA, 32 nt, Human
gcgccauugcacuccagccugggugacaagag

SEQ ID NO: 442470 - RNA, 32 nt, Human
gcgccauugcacuccagccugggugacagagc

SEQ ID NO: 442471 - RNA, 32 nt, Human
gcgccauugcacuccagccugggugacgagug

SEQ ID NO: 442472 - RNA, 32 nt, Human
gcgccauugcacuccagccuuggaacaagagu

SEQ ID NO: 442473 - RNA, 32 nt, Human
gcgccauugcacuccagucugggugacagagc

SEQ ID NO: 442474 - RNA, 32 nt, Human
gcgccauugcacuccauccuggacaacaggag

SEQ ID NO: 442475 - RNA, 32 nt, Human
gcgccauugcacucccgccugggcgacuccau

SEQ ID NO: 442476 - RNA, 32 nt, Human
gcgccauugcacuccggccuggggacaagagc

SEQ ID NO: 442477 - RNA, 32 nt, Human
gcgccauugcacucuagccuaggugacagagu

SEQ ID NO: 442478 - RNA, 32 nt, Human
gcgccauugcauuccagccugggcaacaagag

SEQ ID NO: 442479 - RNA, 32 nt, Human
gcgccauugcauuccagccugggugacagagc

SEQ ID NO: 442480 - RNA, 32 nt, Human
gcgccauuguacuccagccugggcaacaagag

SEQ ID NO: 442481 - RNA, 32 nt, Human
gcgccauuguacuccagccugggcgaugagca

SEQ ID NO: 442482 - RNA, 32 nt, Human
gcgccauuguacuccagccugggggacaggag

SEQ ID NO: 442483 - RNA, 32 nt, Human
gcgccauugugcuccagccugggugacaaagc

SEQ ID NO: 442484 - RNA, 32 nt, Human
gcgccauuucacuccagccugggcgacagagc

SEQ ID NO: 442485 - RNA, 32 nt, Human
gcgcccacagccgcccgacggcgcccagagag

SEQ ID NO: 442486 - RNA, 32 nt, Human
gcgcccacagccgcccugaggcuguaggcaug

SEQ ID NO: 442487 - RNA, 32 nt, Human
gcgcccaccaccacagccugcuaauuuuugua

SEQ ID NO: 442488 - RNA, 32 nt, Human
gcgcccaccccggaguugguggcgcagaggcg

SEQ ID NO: 442489 - RNA, 17 nt, Human
gcgcccacgucuggcug

SEQ ID NO: 442490 - RNA, 32 nt, Human
gcgcccagacaggccuggagcacggaugaaua

SEQ ID NO: 442491 - RNA, 32 nt, Human
gcgcccagacucugaacucagcagaaaguggc

SEQ ID NO: 442492 - RNA, 32 nt, Human
gcgcccagcauugcgacugagaucagcauuuu

SEQ ID NO: 442493 - RNA, 32 nt, Human
gcgcccagccccaaguggcuuuuucaauuaca

SEQ ID NO: 442494 - RNA, 32 nt, Human
gcgcccagccccugcugcucugggcagacgau

SEQ ID NO: 442495 - RNA, 20 nt, Human
gcgcccagcccgcccagccc

SEQ ID NO: 442496 - RNA, 22 nt, Human
gcgcccagcccggcccgccgca

SEQ ID NO: 442497 - RNA, 32 nt, Human
gcgcccagccuccuuccccacagggucucgcc

SEQ ID NO: 442498 - RNA, 20 nt, Human
gcgcccagccugccagccgc

SEQ ID NO: 442499 - RNA, 31 nt, Human
gcgcccagcuggcugcagcacuuguagcaug

SEQ ID NO: 442500 - RNA, 21 nt, Human
gcgcccaggacccuggccugc

SEQ ID NO: 442501 - RNA, 32 nt, Human
gcgcccaggccgacagggccuaccucccgcuc

SEQ ID NO: 442502 - RNA, 32 nt, Human
gcgcccagggccgcggaggugggacgcgaugc

SEQ ID NO: 442503 - RNA, 32 nt, Human
gcgcccagguccugggcuggccgccgggaugu

SEQ ID NO: 442504 - RNA, 32 nt, Human
gcgcccaucacugacccgugagaacucgacug

SEQ ID NO: 442505 - RNA, 32 nt, Human
gcgcccauucgucugucccagagcuuauuggc

SEQ ID NO: 442506 - RNA, 21 nt, Human
gcgccccacacuacccccugg

SEQ ID NO: 442507 - RNA, 25 nt, Human
gcgccccaccccgcgcgcccgagca

SEQ ID NO: 442508 - RNA, 32 nt, Human
gcgccccacgccauugcagucugccauccucu

SEQ ID NO: 442509 - RNA, 32 nt, Human
gcgccccagcagagccacggguacgggaggua

SEQ ID NO: 442510 - RNA, 17 nt, Human
gcgccccagcggcgggu

SEQ ID NO: 442511 - RNA, 23 nt, Human
gcgccccaguuucugcccuggca

SEQ ID NO: 442512 - RNA, 32 nt, Human
gcgccccauaucacugcaacaccuacaaguuu

SEQ ID NO: 442513 - RNA, 32 nt, Human
gcgcccccacacacaguagggccagaacacca

SEQ ID NO: 442514 - RNA, 32 nt, Human
gcgcccccacccuacgcugcugccuucuccuc

SEQ ID NO: 442515 - RNA, 31 nt, Human
gcgcccccacucaagacuaccaaagccagga

SEQ ID NO: 442516 - RNA, 32 nt, Human
gcgcccccagaacauacacugugaacucaauc

SEQ ID NO: 442517 - RNA, 32 nt, Human
gcgcccccaucuuaugguggaagcagucgcua

SEQ ID NO: 442518 - RNA, 18 nt, Human
gcgcccccgcacagcggg

SEQ ID NO: 442519 - RNA, 32 nt, Human
gcgcccccgcagcugccgccgccgccagggcc

SEQ ID NO: 442520 - RNA, 18 nt, Human
gcgcccccgcgagggggc

SEQ ID NO: 442521 - RNA, 32 nt, Human
gcgcccccgcggcuggaggguggucgccacug

SEQ ID NO: 442522 - RNA, 32 nt, Human
gcgcccccuccccaugaucucccuuuccagau

SEQ ID NO: 442523 - RNA, 32 nt, Human
gcgcccccuccccgcgccucccuccccgcccu

SEQ ID NO: 442524 - RNA, 32 nt, Human
gcgcccccugcacuccagccugggcuucagag

SEQ ID NO: 442525 - RNA, 32 nt, Human
gcgcccccugccccaccagccugagugccccg

SEQ ID NO: 442526 - RNA, 32 nt, Human
gcgcccccugcuggcccugaggcugcagaguu

SEQ ID NO: 442527 - RNA, 32 nt, Human
gcgcccccuggaggcagagcacugagcuggac

SEQ ID NO: 442528 - RNA, 18 nt, Human
gcgcccccuggcggcggg

SEQ ID NO: 442529 - RNA, 25 nt, Human
gcgccccgccucgcccaggugccuc

SEQ ID NO: 442530 - RNA, 32 nt, Human
gcgccccgcuccgccucaccugccaccaggga

SEQ ID NO: 442531 - RNA, 32 nt, Human
gcgccccgcugccagcccauuuuccggacgcc

SEQ ID NO: 442532 - RNA, 32 nt, Human
gcgccccggccuccgggagacuggcgcaugcc

SEQ ID NO: 442533 - RNA, 32 nt, Human
gcgccccgggcaggccagucauguguuaaguu

SEQ ID NO: 442534 - RNA, 32 nt, Human
gcgccccguccaccccgcggcagcuccucgcc

SEQ ID NO: 442535 - RNA, 16 nt, Human
gcgccccuagcuggug

SEQ ID NO: 442536 - RNA, 32 nt, Human
gcgccccucagccucugccacugugaaccggc

SEQ ID NO: 442537 - RNA, 32 nt, Human
gcgccccucccaggcccucagggcagcgggac

SEQ ID NO: 442538 - RNA, 32 nt, Human
gcgccccuccccaccccugccuguguucugug

SEQ ID NO: 442539 - RNA, 23 nt, Human
gcgccccucgccccagcgcccca

SEQ ID NO: 442540 - RNA, 32 nt, Human
gcgccccugagccccauuccauucauacagac

SEQ ID NO: 442541 - RNA, 32 nt, Human
gcgccccugcacuccaaccuggacaacacagc

SEQ ID NO: 442542 - RNA, 32 nt, Human
gcgccccugcacuccagccugggugacagagc

SEQ ID NO: 442543 - RNA, 32 nt, Human
gcgccccugcauucccagcuacuugggaggcu

SEQ ID NO: 442544 - RNA, 21 nt, Human
gcgccccuggccccccagccu

SEQ ID NO: 442545 - RNA, 18 nt, Human
gcgccccuggcucccggg

SEQ ID NO: 442546 - RNA, 21 nt, Human
gcgccccuggcuucccagccu

SEQ ID NO: 442547 - RNA, 32 nt, Human
gcgccccuggggaaaugggaccagccuaaucu

SEQ ID NO: 442548 - RNA, 16 nt, Human
gcgccccuggggggug

SEQ ID NO: 442549 - RNA, 17 nt, Human
gcgccccuggggugggu

SEQ ID NO: 442550 - RNA, 20 nt, Human
gcgccccugguaaccagccc

SEQ ID NO: 442551 - RNA, 17 nt, Human
gcgccccugugcgagug

SEQ ID NO: 442552 - RNA, 18 nt, Human
gcgcccgagagaccggca

SEQ ID NO: 442553 - RNA, 21 nt, Human
gcgcccgagcgccuggcccug

SEQ ID NO: 442554 - RNA, 32 nt, Human
gcgcccgaggcagacggugcaggggccuccgg

SEQ ID NO: 442555 - RNA, 32 nt, Human
gcgcccgagggugcaggaggcucugaagcggc

SEQ ID NO: 442556 - RNA, 32 nt, Human
gcgcccgagucuguccagcugcagggagggcg

SEQ ID NO: 442557 - RNA, 23 nt, Human
gcgcccgcagcccgacgccccag

SEQ ID NO: 442558 - RNA, 32 nt, Human
gcgcccgcagcccucagggggucggccccgcg

SEQ ID NO: 442559 - RNA, 32 nt, Human
gcgcccgccacuucaguggaucccgcgccggg

SEQ ID NO: 442560 - RNA, 32 nt, Human
gcgcccgccagccuucccggccggaccggcug

SEQ ID NO: 442561 - RNA, 32 nt, Human
gcgcccgccauggagaagacugagcugaucca

SEQ ID NO: 442562 - RNA, 32 nt, Human
gcgcccgcccaccucuaugcugcguucuccug

SEQ ID NO: 442563 - RNA, 32 nt, Human
gcgcccgccgcgguccccaccuccauggacgc

SEQ ID NO: 442564 - RNA, 32 nt, Human
gcgcccgccgcugaagcgcaggacgcgccgcc

SEQ ID NO: 442565 - RNA, 22 nt, Human
gcgcccgcgcccccgccgggcc

SEQ ID NO: 442566 - RNA, 32 nt, Human
gcgcccgcggcagcgccucccagccugccgcc

SEQ ID NO: 442567 - RNA, 32 nt, Human
gcgcccgcugcucucuccaggucccgccgcgc

SEQ ID NO: 442568 - RNA, 32 nt, Human
gcgcccgcugggaaugaugaagaagaacaauu

SEQ ID NO: 442569 - RNA, 32 nt, Human
gcgcccggaaggccccugcuguggagaagccg

SEQ ID NO: 442570 - RNA, 18 nt, Human
gcgcccggagaccugcgg

SEQ ID NO: 442571 - RNA, 32 nt, Human
gcgcccggcaguuauguauucuccgcucuguc

SEQ ID NO: 442572 - RNA, 32 nt, Human
gcgcccggccagguuguggguuuuaaugggac

SEQ ID NO: 442573 - RNA, 32 nt, Human
gcgcccggccgaagaucacauucuuuaacaag

SEQ ID NO: 442574 - RNA, 32 nt, Human
gcgcccggccgugaacgcuauuuucuaagcag

SEQ ID NO: 442575 - RNA, 32 nt, Human
gcgcccggcuccgagcccgccugcuguccgcu

SEQ ID NO: 442576 - RNA, 32 nt, Human
gcgcccggcugggacagucucuccauacccca

SEQ ID NO: 442577 - RNA, 16 nt, Human
gcgcccggcugggccc

SEQ ID NO: 442578 - RNA, 32 nt, Human
gcgcccgggccgcggcggcgcggcggcgcgag

SEQ ID NO: 442579 - RNA, 22 nt, Human
gcgcccggggcccgcgaaggag

SEQ ID NO: 442580 - RNA, 32 nt, Human
gcgcccgucgggagguugcagaguuccuggag

SEQ ID NO: 442581 - RNA, 32 nt, Human
gcgcccgugccuccucucacacaggcuccaca

SEQ ID NO: 442582 - RNA, 21 nt, Human
gcgcccuacucggcucagccc

SEQ ID NO: 442583 - RNA, 32 nt, Human
gcgcccuauguaaggccagccgcggcaggacc

SEQ ID NO: 442584 - RNA, 16 nt, Human
gcgcccuccacgggua

SEQ ID NO: 442585 - RNA, 32 nt, Human
gcgcccucccagcucccugccucuguuucccc

SEQ ID NO: 442586 - RNA, 32 nt, Human
gcgcccuccgcuccgcccgcagugccaaccau

SEQ ID NO: 442587 - RNA, 32 nt, Human
gcgcccucgccccagcugguuuggaguucaac

SEQ ID NO: 442588 - RNA, 32 nt, Human
gcgcccucuccuccaaccuccccuuucauaga

SEQ ID NO: 442589 - RNA, 32 nt, Human
gcgcccucuccucucuuccugccaagguuuau

SEQ ID NO: 442590 - RNA, 32 nt, Human
gcgcccugaaccccagccuguccgucaccccg

SEQ ID NO: 442591 - RNA, 32 nt, Human
gcgcccugcaccugacagcuuuaucuccccag

SEQ ID NO: 442592 - RNA, 32 nt, Human
gcgcccugcagggacggugcaggcugguuggg

SEQ ID NO: 442593 - RNA, 24 nt, Human
gcgcccugccacucccuggccugc

SEQ ID NO: 442594 - RNA, 20 nt, Human
gcgcccugccagcccagccc

SEQ ID NO: 442595 - RNA, 32 nt, Human
gcgcccugcccgaucggcucucuccuuuuuaa

SEQ ID NO: 442596 - RNA, 32 nt, Human
gcgcccugccgcgcuaccgccugcugcgcgac

SEQ ID NO: 442597 - RNA, 31 nt, Human
gcgcccugccucuguggcucugccuguggau

SEQ ID NO: 442598 - RNA, 32 nt, Human
gcgcccugcuccugaacuucagcuccugcaca

SEQ ID NO: 442599 - RNA, 32 nt, Human
gcgcccuggccugggccuugcccagccgcccc

SEQ ID NO: 442600 - RNA, 31 nt, Human
gcgcccuggcuucuccccaaggagaugagga

SEQ ID NO: 442601 - RNA, 32 nt, Human
gcgcccuggggcccuggccucccuggaggggc

SEQ ID NO: 442602 - RNA, 32 nt, Human
gcgcccuguccaccguggcuggcuggccacuc

SEQ ID NO: 442603 - RNA, 32 nt, Human
gcgcccuguucugaaggcaccuccucaccuca

SEQ ID NO: 442604 - RNA, 32 nt, Human
gcgcccuuaacugcauccagccuggggcugag

SEQ ID NO: 442605 - RNA, 32 nt, Human
gcgcccuucuaccggccucuggcuccggagcu

SEQ ID NO: 442606 - RNA, 32 nt, Human
gcgccgacggggcugugccggagcagcugugc

SEQ ID NO: 442607 - RNA, 32 nt, Human
gcgccgagauugugccacugcacuccagccug

SEQ ID NO: 442608 - RNA, 32 nt, Human
gcgccgagccccgggauagcggcagacgagcc

SEQ ID NO: 442609 - RNA, 32 nt, Human
gcgccgagcggaggaggaggaggaggcgagga

SEQ ID NO: 442610 - RNA, 32 nt, Human
gcgccgaggaaaagaauggggagggucagcag

SEQ ID NO: 442611 - RNA, 32 nt, Human
gcgccgaggaggaagagguugauggcggcggc

SEQ ID NO: 442612 - RNA, 32 nt, Human
gcgccgaggcaggacacagagcacagcugugc

SEQ ID NO: 442613 - RNA, 32 nt, Human
gcgccgaguacuccagccgggacgcacugugu

SEQ ID NO: 442614 - RNA, 32 nt, Human
gcgccgauugccucucggccugggcaaugguc

SEQ ID NO: 442615 - RNA, 32 nt, Human
gcgccgcacacgcacccacccacccacccagc

SEQ ID NO: 442616 - RNA, 32 nt, Human
gcgccgcaccugcccgccucggcguucgugac

SEQ ID NO: 442617 - RNA, 32 nt, Human
gcgccgcacuccauccccacaggcuggggacg

SEQ ID NO: 442618 - RNA, 32 nt, Human
gcgccgcagccugcugacguuuucuucagaug

SEQ ID NO: 442619 - RNA, 32 nt, Human
gcgccgccacugccgcagccaggagaugguuc

SEQ ID NO: 442620 - RNA, 32 nt, Human
gcgccgccgagggcuggcugggaacgccgcag

SEQ ID NO: 442621 - RNA, 32 nt, Human
gcgccgccgcagcugcagugacauguccagca

SEQ ID NO: 442622 - RNA, 32 nt, Human
gcgccgccgcagggacccgccacccaccuccc

SEQ ID NO: 442623 - RNA, 32 nt, Human
gcgccgccgcccucccuuccucuuccccaucu

SEQ ID NO: 442624 - RNA, 20 nt, Human
gcgccgccgccgccgccgcc

SEQ ID NO: 442625 - RNA, 21 nt, Human
gcgccgccgccgccgccgccg

SEQ ID NO: 442626 - RNA, 32 nt, Human
gcgccgccggcggcggagggagcgugacugcg

SEQ ID NO: 442627 - RNA, 32 nt, Human
gcgccgccugggagcuggagcccgcgcagcgc

SEQ ID NO: 442628 - RNA, 32 nt, Human
gcgccgccuguugcucgcuccuccgggcgguc

SEQ ID NO: 442629 - RNA, 22 nt, Human
gcgccgccuucgccgccaacca

SEQ ID NO: 442630 - RNA, 32 nt, Human
gcgccgcgcacuccaacccggcgggcaccucg

SEQ ID NO: 442631 - RNA, 17 nt, Human
gcgccgcgccucgagcu

SEQ ID NO: 442632 - RNA, 23 nt, Human
gcgccgcgcgcccaggcggggcc

SEQ ID NO: 442633 - RNA, 32 nt, Human
gcgccgcgcucgggggccaugcagcgccuggc

SEQ ID NO: 442634 - RNA, 32 nt, Human
gcgccgcgcugaggccgagguccgcagggccg

SEQ ID NO: 442635 - RNA, 17 nt, Human
gcgccgcgcuuugagcc

SEQ ID NO: 442636 - RNA, 32 nt, Human
gcgccgcggcagcugcuccggcugccggccgg

SEQ ID NO: 442637 - RNA, 23 nt, Human
gcgccgcggcccgccuggccugc

SEQ ID NO: 442638 - RNA, 32 nt, Human
gcgccgcggcugcugcugcgcaggcccagugc

SEQ ID NO: 442639 - RNA, 32 nt, Human
gcgccgcgggacugaagcucgagaagggccug

SEQ ID NO: 442640 - RNA, 32 nt, Human
gcgccgcgucgacaaacccccauccugggaaa

SEQ ID NO: 442641 - RNA, 32 nt, Human
gcgccgcuacauuccagccugggcaacacgag

SEQ ID NO: 442642 - RNA, 22 nt, Human
gcgccgcuccagccaugucagc

SEQ ID NO: 442643 - RNA, 32 nt, Human
gcgccgcucccaggaacccuguacuccggggu

SEQ ID NO: 442644 - RNA, 20 nt, Human
gcgccgcuccccucccugcc

SEQ ID NO: 442645 - RNA, 32 nt, Human
gcgccgcucccuccgcugcacgcccaggccug

SEQ ID NO: 442646 - RNA, 32 nt, Human
gcgccgcugcacuccagccugggcaacagagu

SEQ ID NO: 442647 - RNA, 32 nt, Human
gcgccgcugcacuccagccugggccacacagu

SEQ ID NO: 442648 - RNA, 32 nt, Human
gcgccgcugcacuccagccugggcgacagagc

SEQ ID NO: 442649 - RNA, 32 nt, Human
gcgccgcugcacuccagccugggcgacagagu

SEQ ID NO: 442650 - RNA, 32 nt, Human
gcgccgcugcacuccagccugggcggcagagc

SEQ ID NO: 442651 - RNA, 32 nt, Human
gcgccgcugcacuccagccugggugacagagu

SEQ ID NO: 442652 - RNA, 32 nt, Human
gcgccgcugcauuccagccugggugacagagc

SEQ ID NO: 442653 - RNA, 32 nt, Human
gcgccgcugccaggaccuugcagguggagagc

SEQ ID NO: 442654 - RNA, 24 nt, Human
gcgccgcugcugccccgccuugca

SEQ ID NO: 442655 - RNA, 24 nt, Human
gcgccgcugcugccggggcucgca

SEQ ID NO: 442656 - RNA, 32 nt, Human
gcgccgcuggcgccagcacugggaggaggcgg

SEQ ID NO: 442657 - RNA, 32 nt, Human
gcgccggaaguggucccgcagaggcggggugg

SEQ ID NO: 442658 - RNA, 32 nt, Human
gcgccggacccgggaagaacuggugagccaag

SEQ ID NO: 442659 - RNA, 32 nt, Human
gcgccggacccuggcccugcccugggugcugc

SEQ ID NO: 442660 - RNA, 32 nt, Human
gcgccggacgcugguugcgcgcucccaggcgc

SEQ ID NO: 442661 - RNA, 32 nt, Human
gcgccggagaggggcuggaggcggggcgaggg

SEQ ID NO: 442662 - RNA, 32 nt, Human
gcgccggagcagcgugggaaagaagggaagag

SEQ ID NO: 442663 - RNA, 32 nt, Human
gcgccggagucaaacgguucccggcccagucc

SEQ ID NO: 442664 - RNA, 19 nt, Human
gcgccggagucccgagcua

SEQ ID NO: 442665 - RNA, 32 nt, Human
gcgccggaguggcaugaagcuguaggacucau

SEQ ID NO: 442666 - RNA, 32 nt, Human
gcgccggcccgcccgccugccugcucagcgca

SEQ ID NO: 442667 - RNA, 32 nt, Human
gcgccggcccugccugcugcucugcccagggc

SEQ ID NO: 442668 - RNA, 32 nt, Human
gcgccggccuccugcugggcaagugccgccag

SEQ ID NO: 442669 - RNA, 32 nt, Human
gcgccggcgccauggaccuggucaucacguag

SEQ ID NO: 442670 - RNA, 23 nt, Human
gcgccggcgccgcagaucagcca

SEQ ID NO: 442671 - RNA, 19 nt, Human
gcgccggcguucucugcca

SEQ ID NO: 442672 - RNA, 32 nt, Human
gcgccgggccccacuucugagcacagagcaga

SEQ ID NO: 442673 - RNA, 19 nt, Human
gcgccgggcgcggcugcag

SEQ ID NO: 442674 - RNA, 32 nt, Human
gcgccgggcucccuccggggugcagccgccgu

SEQ ID NO: 442675 - RNA, 32 nt, Human
gcgccggggagggagagcucaggccgccaugc

SEQ ID NO: 442676 - RNA, 32 nt, Human
gcgccggggaggugcgggaacacgugaccggc

SEQ ID NO: 442677 - RNA, 32 nt, Human
gcgccggggaucccugaacacagacagcgcgg

SEQ ID NO: 442678 - RNA, 32 nt, Human
gcgccgggggucgcuccugcugugucuuccgc

SEQ ID NO: 442679 - RNA, 32 nt, Human
gcgccggggugaggccuggcucggucccugcg

SEQ ID NO: 442680 - RNA, 32 nt, Human
gcgccgggugaaggcgagagccucggcgagcc

SEQ ID NO: 442681 - RNA, 32 nt, Human
gcgccgguggcguuccgcuccaugacugucgc

SEQ ID NO: 442682 - RNA, 32 nt, Human
gcgccgguugccgcugcggagcgcggcggguc

SEQ ID NO: 442683 - RNA, 32 nt, Human
gcgccguccaaccuuacauggguucagggcgc

SEQ ID NO: 442684 - RNA, 32 nt, Human
gcgccguccagggcuagagcaagcgcggcccc

SEQ ID NO: 442685 - RNA, 32 nt, Human
gcgccguugcacuccagccugggcaacaagag

SEQ ID NO: 442686 - RNA, 32 nt, Human
gcgccguuguacuccagccugggcaacagagc

SEQ ID NO: 442687 - RNA, 32 nt, Human
gcgccuacccucauaccuaucucccuccuccc

SEQ ID NO: 442688 - RNA, 32 nt, Human
gcgccuacuccuccuccuccucucccggcggc

SEQ ID NO: 442689 - RNA, 32 nt, Human
gcgccuagucccauuuucacuuccuuugacgc

SEQ ID NO: 442690 - RNA, 32 nt, Human
gcgccuagucuccuccaaaaugcuaacuuuaa

SEQ ID NO: 442691 - RNA, 32 nt, Human
gcgccuagugacugcagaaacagacacccagu

SEQ ID NO: 442692 - RNA, 32 nt, Human
gcgccuauagccacugcgcccugggggccugg

SEQ ID NO: 442693 - RNA, 32 nt, Human
gcgccucacccuccaguggagacagagggcag

SEQ ID NO: 442694 - RNA, 32 nt, Human
gcgccucagaucuucguuggcggccauggcuu

SEQ ID NO: 442695 - RNA, 32 nt, Human
gcgccucagccaccucacuccugggccugcug

SEQ ID NO: 442696 - RNA, 32 nt, Human
gcgccucagccgccucacuccugggccugcug

SEQ ID NO: 442697 - RNA, 32 nt, Human
gcgccuccaggugcuguguccugagcacucuu

SEQ ID NO: 442698 - RNA, 32 nt, Human
gcgccucccagccugugccccuuccuaguacc

SEQ ID NO: 442699 - RNA, 21 nt, Human
gcgccuccccaaucccagccc

SEQ ID NO: 442700 - RNA, 32 nt, Human
gcgccuccccgccccgccgccccacaccucuc

SEQ ID NO: 442701 - RNA, 32 nt, Human
gcgccuccgccaagccggcccagcugcacccc

SEQ ID NO: 442702 - RNA, 32 nt, Human
gcgccuccggcagaggggcgaggaccgagcgc

SEQ ID NO: 442703 - RNA, 32 nt, Human
gcgccuccuccagguccuccuggguccccucc

SEQ ID NO: 442704 - RNA, 32 nt, Human
gcgccuccuccuccuccugcuccccgccgcuu

SEQ ID NO: 442705 - RNA, 32 nt, Human
gcgccuccuccugccagcacccccagcaccug

SEQ ID NO: 442706 - RNA, 19 nt, Human
gcgccuccugcacagcggc

SEQ ID NO: 442707 - RNA, 32 nt, Human
gcgccuccugcaggcggcccaucucuaagcgu

SEQ ID NO: 442708 - RNA, 32 nt, Human
gcgccucgcccacucuggccccaaaccaaucg

SEQ ID NO: 442709 - RNA, 32 nt, Human
gcgccucggcuucgcgcucguguagaucguuc

SEQ ID NO: 442710 - RNA, 32 nt, Human
gcgccucgggcggaaccuggagauaaugggca

SEQ ID NO: 442711 - RNA, 32 nt, Human
gcgccucggucacccugcacagcaggccacag

SEQ ID NO: 442712 - RNA, 18 nt, Human
gcgccucucacacaggua

SEQ ID NO: 442713 - RNA, 32 nt, Human
gcgccucucaccauggggccucaggccccugu

SEQ ID NO: 442714 - RNA, 32 nt, Human
gcgccucuccacuguuucaugagcccaaacac

SEQ ID NO: 442715 - RNA, 32 nt, Human
gcgccucugccuggccacccugucugggaggu

SEQ ID NO: 442716 - RNA, 32 nt, Human
gcgccucugcggucgucgcuccugggccucgg

SEQ ID NO: 442717 - RNA, 32 nt, Human
gcgccucugggaacuggaugaguccuucggcg

SEQ ID NO: 442718 - RNA, 32 nt, Human
gcgccucuuccuaggugcugggauucaguccc

SEQ ID NO: 442719 - RNA, 32 nt, Human
gcgccugaagcacaaagcagauagcuaggaau

SEQ ID NO: 442720 - RNA, 32 nt, Human
gcgccugagccaugcccagcagcccuguguaa

SEQ ID NO: 442721 - RNA, 32 nt, Human
gcgccugaggaggaggaggaggcgggggcggc

SEQ ID NO: 442722 - RNA, 32 nt, Human
gcgccugagguccgacugucucugccugcagc

SEQ ID NO: 442723 - RNA, 32 nt, Human
gcgccugauuuagggcccuucucuaggaugcc

SEQ ID NO: 442724 - RNA, 32 nt, Human
gcgccugcagaggcgagcagagcccgcagccc

SEQ ID NO: 442725 - RNA, 32 nt, Human
gcgccugcagccuuaaccuccacggccuucga

SEQ ID NO: 442726 - RNA, 32 nt, Human
gcgccugccaagaacagcaucuccccagcccu

SEQ ID NO: 442727 - RNA, 32 nt, Human
gcgccugcccacuuggccucagucuccccacc

SEQ ID NO: 442728 - RNA, 32 nt, Human
gcgccugccgccccggaggcaggaugagcauc

SEQ ID NO: 442729 - RNA, 32 nt, Human
gcgccugccuccaaccugcgggcgggaggugg

SEQ ID NO: 442730 - RNA, 32 nt, Human
gcgccugccugcccaucucugcccucgguugg

SEQ ID NO: 442731 - RNA, 32 nt, Human
gcgccugccuggggucagcccucgucacacug

SEQ ID NO: 442732 - RNA, 32 nt, Human
gcgccugcgaacagccauugcacuccagccug

SEQ ID NO: 442733 - RNA, 32 nt, Human
gcgccugcgcggagcuggaguccggcugggcc

SEQ ID NO: 442734 - RNA, 32 nt, Human
gcgccugcuccacguucucuucugucuguugc

SEQ ID NO: 442735 - RNA, 32 nt, Human
gcgccuggagcggagagcagaggcggcccggc

SEQ ID NO: 442736 - RNA, 32 nt, Human
gcgccuggaggaggcaggggcaggaagcggcc

SEQ ID NO: 442737 - RNA, 32 nt, Human
gcgccuggcaggcaguggugagcccugcagga

SEQ ID NO: 442738 - RNA, 32 nt, Human
gcgccuggcugauuccuaggcaguuggcggca

SEQ ID NO: 442739 - RNA, 32 nt, Human
gcgccuggcuguaauuacuauacccaguuuuu

SEQ ID NO: 442740 - RNA, 32 nt, Human
gcgccugggaccugagacggcguuggccuuuc

SEQ ID NO: 442741 - RNA, 30 nt, Human
gcgccugggaggagcgccuggacucgcggg

SEQ ID NO: 442742 - RNA, 32 nt, Human
gcgccugggcccugcccucuagcucccgcgcu

SEQ ID NO: 442743 - RNA, 18 nt, Human
gcgccugggggacgggua

SEQ ID NO: 442744 - RNA, 32 nt, Human
gcgccugggggagggggacuggagaggcgaga

SEQ ID NO: 442745 - RNA, 32 nt, Human
gcgccuggugcaggaagcgacucacguuuguc

SEQ ID NO: 442746 - RNA, 32 nt, Human
gcgccuguagaaucccagcugcucgggaggcu

SEQ ID NO: 442747 - RNA, 32 nt, Human
gcgccuguagccccagcuacucgggaggcuga

SEQ ID NO: 442748 - RNA, 32 nt, Human
gcgccuguagccccagcuacuugggaggcuga

SEQ ID NO: 442749 - RNA, 18 nt, Human
gcgccuguaguuccagcu

SEQ ID NO: 442750 - RNA, 32 nt, Human
gcgccuguccaggaugcagggagcucgggcuc

SEQ ID NO: 442751 - RNA, 32 nt, Human
gcgccugugcagaaugaacgaagucacauagg

SEQ ID NO: 442752 - RNA, 32 nt, Human
gcgccuucaaacccagacaugcugcugcugcu

SEQ ID NO: 442753 - RNA, 32 nt, Human
gcgccuuccgauuccauucauggcauuuugug

SEQ ID NO: 442754 - RNA, 32 nt, Human
gcgccuuccuaagugcucgccgcgguagccgg

SEQ ID NO: 442755 - RNA, 32 nt, Human
gcgccuucugcaaggcccuggccuagacaggc

SEQ ID NO: 442756 - RNA, 32 nt, Human
gcgccuugccacccucaucuccaauaugccug

SEQ ID NO: 442757 - RNA, 32 nt, Human
gcgccuuuccacgcccuccagccccgggggag

SEQ ID NO: 442758 - RNA, 32 nt, Human
gcgccuuucucccugcggccccggcucgcugc

SEQ ID NO: 442759 - RNA, 32 nt, Human
gcgccuuugcacuccagccuggaagacaaaac

SEQ ID NO: 442760 - RNA, 32 nt, Human
gcgccuuugguaacagaagagaagacugugga

SEQ ID NO: 442761 - RNA, 32 nt, Human
gcgccuuuuuccucagcugucuuccaaguauu

SEQ ID NO: 442762 - RNA, 32 nt, Human
gcgcgaaccugaggaggaagaaacggggcuag

SEQ ID NO: 442763 - RNA, 32 nt, Human
gcgcgaacugcggccccgccucuccuuugggg

SEQ ID NO: 442764 - RNA, 32 nt, Human
gcgcgaauccuagugcauuccuuugugagaaa

SEQ ID NO: 442765 - RNA, 32 nt, Human
gcgcgacagccaccuggugccaacucacugag

SEQ ID NO: 442766 - RNA, 32 nt, Human
gcgcgacccccaggaacguucggaaagcuggu

SEQ ID NO: 442767 - RNA, 32 nt, Human
gcgcgaccugcuccgacuucugcagggaaggg

SEQ ID NO: 442768 - RNA, 32 nt, Human
gcgcgacucccagaagagauagccaggcgucc

SEQ ID NO: 442769 - RNA, 32 nt, Human
gcgcgacugcacuccagccugggcgagagagc

SEQ ID NO: 442770 - RNA, 32 nt, Human
gcgcgagaaagagcggacagaggcagacgccg

SEQ ID NO: 442771 - RNA, 32 nt, Human
gcgcgagagagggagggaggaggggacggugc

SEQ ID NO: 442772 - RNA, 32 nt, Human
gcgcgagagcaugcuugguuuucugugguuug

SEQ ID NO: 442773 - RNA, 23 nt, Human
gcgcgagaggccuucggcggccu

SEQ ID NO: 442774 - RNA, 32 nt, Human
gcgcgagcaccucgagcucagcagagcagccg

SEQ ID NO: 442775 - RNA, 32 nt, Human
gcgcgagccccuccuccacacccgagucccag

SEQ ID NO: 442776 - RNA, 32 nt, Human
gcgcgaggaggagcgaccuggccucaccgcug

SEQ ID NO: 442777 - RNA, 32 nt, Human
gcgcgaggcccagcaggugcaggcagagcagc

SEQ ID NO: 442778 - RNA, 21 nt, Human
gcgcgaggcccgggcccugag

SEQ ID NO: 442779 - RNA, 20 nt, Human
gcgcgaggccgggcuaggcc

SEQ ID NO: 442780 - RNA, 32 nt, Human
gcgcgagggaggagcugcgccgccgggaaggg

SEQ ID NO: 442781 - RNA, 32 nt, Human
gcgcgagggucuccgcccucugcuccgggcug

SEQ ID NO: 442782 - RNA, 21 nt, Human
gcgcgaggugucagggcggcc

SEQ ID NO: 442783 - RNA, 32 nt, Human
gcgcgaguccaguacuccuacuucgccaaguc

SEQ ID NO: 442784 - RNA, 21 nt, Human
gcgcgaucauggcucacugca

SEQ ID NO: 442785 - RNA, 32 nt, Human
gcgcgaucucagcucaccgcaaccuccgccuc

SEQ ID NO: 442786 - RNA, 32 nt, Human
gcgcgaucucagcucaccucaaccuccgccuc

SEQ ID NO: 442787 - RNA, 32 nt, Human
gcgcgaucucagcucacuacaaccuccgccuc

SEQ ID NO: 442788 - RNA, 21 nt, Human
gcgcgaucucagcucacugca

SEQ ID NO: 442789 - RNA, 32 nt, Human
gcgcgaucucagcucacugcaaccuccgccuc

SEQ ID NO: 442790 - RNA, 21 nt, Human
gcgcgaucugggcucacugca

SEQ ID NO: 442791 - RNA, 21 nt, Human
gcgcgaucuuggcucaccgca

SEQ ID NO: 442792 - RNA, 30 nt, Human
gcgcgaugggcggagagcaggaggaggagc

SEQ ID NO: 442793 - RNA, 21 nt, Human
gcgcgcaaagaggcagggcag

SEQ ID NO: 442794 - RNA, 32 nt, Human
gcgcgcaaggccgccucuacuccgccucaucu

SEQ ID NO: 442795 - RNA, 32 nt, Human
gcgcgcacacacacauacaagcgggcacgacg

SEQ ID NO: 442796 - RNA, 32 nt, Human
gcgcgcacacacacaugcuuuacaaguuuuau

SEQ ID NO: 442797 - RNA, 32 nt, Human
gcgcgcacaggcaggagguugcaguugggcgc

SEQ ID NO: 442798 - RNA, 32 nt, Human
gcgcgcagccccggggaggccggaggacgcgc

SEQ ID NO: 442799 - RNA, 32 nt, Human
gcgcgcagcccgcggggccugaagggauguuc

SEQ ID NO: 442800 - RNA, 32 nt, Human
gcgcgcaggcccugcguuggaaaauggcgggg

SEQ ID NO: 442801 - RNA, 32 nt, Human
gcgcgcaggugagugagccagggcggagcgca

SEQ ID NO: 442802 - RNA, 32 nt, Human
gcgcgcaggugccgggacguggaugcccagga

SEQ ID NO: 442803 - RNA, 32 nt, Human
gcgcgcaucccuccaccuuccacauccugcuc

SEQ ID NO: 442804 - RNA, 31 nt, Human
gcgcgcauggccugggcgggcucgcggcggg

SEQ ID NO: 442805 - RNA, 32 nt, Human
gcgcgcauguaaucccagcuacucgggaggcu

SEQ ID NO: 442806 - RNA, 32 nt, Human
gcgcgccaguuucaggaugcagggucuaggag

SEQ ID NO: 442807 - RNA, 32 nt, Human
gcgcgccauggagcaugugacagagggcuccu

SEQ ID NO: 442808 - RNA, 32 nt, Human
gcgcgcccaccugagcccccgcgcuggcgcca

SEQ ID NO: 442809 - RNA, 16 nt, Human
gcgcgcccacgcgccu

SEQ ID NO: 442810 - RNA, 32 nt, Human
gcgcgcccagccgccucgguucccggcgacca

SEQ ID NO: 442811 - RNA, 19 nt, Human
gcgcgccccaagcugcgca

SEQ ID NO: 442812 - RNA, 32 nt, Human
gcgcgccccaggagccaaagccgggcuccaag

SEQ ID NO: 442813 - RNA, 19 nt, Human
gcgcgcccccuggcccggc

SEQ ID NO: 442814 - RNA, 32 nt, Human
gcgcgccccggggcggaggacggugccagccg

SEQ ID NO: 442815 - RNA, 32 nt, Human
gcgcgccccucgggcugcaccggcacuggccg

SEQ ID NO: 442816 - RNA, 32 nt, Human
gcgcgccccugccuacggggucccgcugcucu

SEQ ID NO: 442817 - RNA, 32 nt, Human
gcgcgcccucacugcagccccugcgucgccgg

SEQ ID NO: 442818 - RNA, 32 nt, Human
gcgcgcccucuggccucaagggagcauuggca

SEQ ID NO: 442819 - RNA, 32 nt, Human
gcgcgcccugccucuguggcucugccugugga

SEQ ID NO: 442820 - RNA, 32 nt, Human
gcgcgccgccuccccgcccucucucacucccc

SEQ ID NO: 442821 - RNA, 17 nt, Human
gcgcgccgcggcccgca

SEQ ID NO: 442822 - RNA, 32 nt, Human
gcgcgccgcgggucagggcgcaauggcggcgc

SEQ ID NO: 442823 - RNA, 32 nt, Human
gcgcgccuauaaucccagcuacucgggaggcu

SEQ ID NO: 442824 - RNA, 32 nt, Human
gcgcgccucccuccuuccuucuccccuggcug

SEQ ID NO: 442825 - RNA, 32 nt, Human
gcgcgccuguaaucccagcuacucaaggcuga

SEQ ID NO: 442826 - RNA, 32 nt, Human
gcgcgccuguaaucccagcuacucaggaggcu

SEQ ID NO: 442827 - RNA, 32 nt, Human
gcgcgccuguaaucccagcuacucgggaagcu

SEQ ID NO: 442828 - RNA, 32 nt, Human
gcgcgccuguaaucccagcuacuugggaagcu

SEQ ID NO: 442829 - RNA, 32 nt, Human
gcgcgccuguaaucccaguuacuuaggaggcu

SEQ ID NO: 442830 - RNA, 32 nt, Human
gcgcgccuguagucccagcuacucgggaggcu

SEQ ID NO: 442831 - RNA, 32 nt, Human
gcgcgccuguagucccagcuacuugggaggcu

SEQ ID NO: 442832 - RNA, 32 nt, Human
gcgcgccuguagucccagcuccucaggaggcu

SEQ ID NO: 442833 - RNA, 32 nt, Human
gcgcgccugugaucccagcuacccgggaggca

SEQ ID NO: 442834 - RNA, 32 nt, Human
gcgcgccuguggucccagcuacucgggaggcu

SEQ ID NO: 442835 - RNA, 32 nt, Human
gcgcgccuguuaguuuguuaaaccagaucuag

SEQ ID NO: 442836 - RNA, 32 nt, Human
gcgcgccuguugucuuagcuacucaggaggcu

SEQ ID NO: 442837 - RNA, 19 nt, Human
gcgcgccuuagcagcagca

SEQ ID NO: 442838 - RNA, 32 nt, Human
gcgcgcgagagggaccgggcgguggcggcggc

SEQ ID NO: 442839 - RNA, 32 nt, Human
gcgcgcgauccuucgaccacacgcgccgcucg

SEQ ID NO: 442840 - RNA, 19 nt, Human
gcgcgcgcgucaccagagu

SEQ ID NO: 442841 - RNA, 32 nt, Human
gcgcgcggaggaacgcuggguccccggcgccg

SEQ ID NO: 442842 - RNA, 31 nt, Human
gcgcgcggccgcucugggccugguuccagcg

SEQ ID NO: 442843 - RNA, 23 nt, Human
gcgcgcgggaagguggcagagcg

SEQ ID NO: 442844 - RNA, 24 nt, Human
gcgcgcgggaccaacgcaaggagc

SEQ ID NO: 442845 - RNA, 32 nt, Human
gcgcgcgggaugcgcggggagccuucucugca

SEQ ID NO: 442846 - RNA, 19 nt, Human
gcgcgcgggcgggcggaca

SEQ ID NO: 442847 - RNA, 32 nt, Human
gcgcgcggggcccggcccuggcggcgcggcgc

SEQ ID NO: 442848 - RNA, 32 nt, Human
gcgcgcgggggugagauaagcggccaugugau

SEQ ID NO: 442849 - RNA, 32 nt, Human
gcgcgcggugccggcugggucuguaccaaagg

SEQ ID NO: 442850 - RNA, 32 nt, Human
gcgcgcgugggcaggucauugcaguugggcgc

SEQ ID NO: 442851 - RNA, 32 nt, Human
gcgcgcuacugcccauccccgguugucccacu

SEQ ID NO: 442852 - RNA, 32 nt, Human
gcgcgcuccuagcgccccagacccgccugcgg

SEQ ID NO: 442853 - RNA, 32 nt, Human
gcgcgcuccucaugacaaucuaaugccugaug

SEQ ID NO: 442854 - RNA, 32 nt, Human
gcgcgcucgcagucuucgccggcgcagucacc

SEQ ID NO: 442855 - RNA, 32 nt, Human
gcgcgcucgccccgccgcuccugcugcagccc

SEQ ID NO: 442856 - RNA, 32 nt, Human
gcgcgcugagacggcgggugagcuccacgaga

SEQ ID NO: 442857 - RNA, 32 nt, Human
gcgcgcugccggcgcuccuuccuccucggcuc

SEQ ID NO: 442858 - RNA, 32 nt, Human
gcgcgcuuugcaccuccuauucccaggguccg

SEQ ID NO: 442859 - RNA, 18 nt, Human
gcgcggaaccgggcggcu

SEQ ID NO: 442860 - RNA, 21 nt, Human
gcgcggaagucgcgcgggacc

SEQ ID NO: 442861 - RNA, 32 nt, Human
gcgcggacacugaagggagggagcacaggcgg

SEQ ID NO: 442862 - RNA, 32 nt, Human
gcgcggagacgggguuuugccauguugaccug

SEQ ID NO: 442863 - RNA, 32 nt, Human
gcgcggagaugggggugcacgaauguccugcc

SEQ ID NO: 442864 - RNA, 18 nt, Human
gcgcggagccgggcggcu

SEQ ID NO: 442865 - RNA, 32 nt, Human
gcgcggaggaggaggaucugggggaagaggag

SEQ ID NO: 442866 - RNA, 32 nt, Human
gcgcggaggcggggcgcgggggcaguggucgg

SEQ ID NO: 442867 - RNA, 32 nt, Human
gcgcggagguuggagagaggaggcaggugucu

SEQ ID NO: 442868 - RNA, 32 nt, Human
gcgcggagucggaggaagaggagggaggaggg

SEQ ID NO: 442869 - RNA, 32 nt, Human
gcgcggaucacugaggcuguggcggcacugcg

SEQ ID NO: 442870 - RNA, 32 nt, Human
gcgcggaucucagaacagucuuugucagaugg

SEQ ID NO: 442871 - RNA, 32 nt, Human
gcgcggauuuuaaggaaacagagcaacagcua

SEQ ID NO: 442872 - RNA, 32 nt, Human
gcgcggcaggcaggccccugagccggugcacc

SEQ ID NO: 442873 - RNA, 24 nt, Human
gcgcggccacccccuccccagggg

SEQ ID NO: 442874 - RNA, 24 nt, Human
gcgcggccaccccguccccagggg

SEQ ID NO: 442875 - RNA, 32 nt, Human
gcgcggccaccugcaccugccgccacuagcac

SEQ ID NO: 442876 - RNA, 32 nt, Human
gcgcggcccagccaccuccggagucgccgccu

SEQ ID NO: 442877 - RNA, 20 nt, Human
gcgcggcccagccccgggca

SEQ ID NO: 442878 - RNA, 32 nt, Human
gcgcggcccagccucacuucccgggcacguuc

SEQ ID NO: 442879 - RNA, 15 nt, Human
gcgcggccccgggca

SEQ ID NO: 442880 - RNA, 32 nt, Human
gcgcggcccugccucccucucgcccggcggca

SEQ ID NO: 442881 - RNA, 32 nt, Human
gcgcggccgaggccgcacuaccugucugcggg

SEQ ID NO: 442882 - RNA, 17 nt, Human
gcgcggccgcgcggacc

SEQ ID NO: 442883 - RNA, 21 nt, Human
gcgcggccgcgcuuggcccca

SEQ ID NO: 442884 - RNA, 32 nt, Human
gcgcggccggggcucgccagcaccagcccugg

SEQ ID NO: 442885 - RNA, 32 nt, Human
gcgcggccuggccuggccuggguggcgggcgu

SEQ ID NO: 442886 - RNA, 32 nt, Human
gcgcggcgacaugccggagcugguggugaccg

SEQ ID NO: 442887 - RNA, 32 nt, Human
gcgcggcgccgcucggugcagaccaugaauua

SEQ ID NO: 442888 - RNA, 32 nt, Human
gcgcggcgcgggccaccaugggggcccagcuc

SEQ ID NO: 442889 - RNA, 32 nt, Human
gcgcggcggcggcuggagcagcgcgguagggu

SEQ ID NO: 442890 - RNA, 32 nt, Human
gcgcggcuccacccugggcugcgucuccuggu

SEQ ID NO: 442891 - RNA, 32 nt, Human
gcgcggcucgcgccuccugcuucaagagccca

SEQ ID NO: 442892 - RNA, 32 nt, Human
gcgcggcugcagcagggcgaggcuccaggugg

SEQ ID NO: 442893 - RNA, 32 nt, Human
gcgcggcuuccucucggucgcucccuggcgcc

SEQ ID NO: 442894 - RNA, 32 nt, Human
gcgcgggaagaaaaggagaggaggaagcugag

SEQ ID NO: 442895 - RNA, 32 nt, Human
gcgcgggaagccccaugcuccaaucaaaggga

SEQ ID NO: 442896 - RNA, 32 nt, Human
gcgcgggacaggcagaugcagugagugagggg

SEQ ID NO: 442897 - RNA, 32 nt, Human
gcgcgggacuuuguacagcagugucuuaucca

SEQ ID NO: 442898 - RNA, 32 nt, Human
gcgcgggagagggaggagaaggagcagccgcc

SEQ ID NO: 442899 - RNA, 19 nt, Human
gcgcgggagccaggggccu

SEQ ID NO: 442900 - RNA, 32 nt, Human
gcgcgggaggaagaggaggaggaggaggaggc

SEQ ID NO: 442901 - RNA, 32 nt, Human
gcgcgggaggcugcagcauggcagaggcggca

SEQ ID NO: 442902 - RNA, 32 nt, Human
gcgcgggagggcugugugauggccucggagcg

SEQ ID NO: 442903 - RNA, 32 nt, Human
gcgcgggccggguggaggcuugagcggggacc

SEQ ID NO: 442904 - RNA, 32 nt, Human
gcgcgggcgagcgggccuuuuccggccucugc

SEQ ID NO: 442905 - RNA, 32 nt, Human
gcgcgggcgauuuguagguaauggcaggcguu

SEQ ID NO: 442906 - RNA, 19 nt, Human
gcgcgggcgcugggcggcu

SEQ ID NO: 442907 - RNA, 32 nt, Human
gcgcgggcugccgggaguggucucugaggcgg

SEQ ID NO: 442908 - RNA, 32 nt, Human
gcgcggggaacauggagagcgagcgcgacaug

SEQ ID NO: 442909 - RNA, 19 nt, Human
gcgcggggaaggcgcaccu

SEQ ID NO: 442910 - RNA, 32 nt, Human
gcgcggggaggcgggcgcgccgcccgggccgc

SEQ ID NO: 442911 - RNA, 32 nt, Human
gcgcggggauuccaggagucgugguuucuugc

SEQ ID NO: 442912 - RNA, 21 nt, Human
gcgcggggcacccgggggccu

SEQ ID NO: 442913 - RNA, 20 nt, Human
gcgcggggcaguagcggccu

SEQ ID NO: 442914 - RNA, 32 nt, Human
gcgcggggccccggucuacaccgcgcuggacc

SEQ ID NO: 442915 - RNA, 20 nt, Human
gcgcggggccggagcggccu

SEQ ID NO: 442916 - RNA, 32 nt, Human
gcgcggggcgcacggcccuaggagcgcggggc

SEQ ID NO: 442917 - RNA, 18 nt, Human
gcgcggggcgcggcggcc

SEQ ID NO: 442918 - RNA, 32 nt, Human
gcgcggggcggcguugguggucuucgcggcgu

SEQ ID NO: 442919 - RNA, 32 nt, Human
gcgcggggcgggcuguuuugcauuaugugcgg

SEQ ID NO: 442920 - RNA, 32 nt, Human
gcgcggggcucccuccuuaccgcaggagcucc

SEQ ID NO: 442921 - RNA, 32 nt, Human
gcgcgggggaaagaaaggcagcgggaauuuga

SEQ ID NO: 442922 - RNA, 32 nt, Human
gcgcgggggaaagaagcguggcggggcuguag

SEQ ID NO: 442923 - RNA, 32 nt, Human
gcgcgggggagccauuaggaggcgaggagaga

SEQ ID NO: 442924 - RNA, 21 nt, Human
gcgcgggggcgcaaccgccac

SEQ ID NO: 442925 - RNA, 22 nt, Human
gcgcggggucuccgggcgcccu

SEQ ID NO: 442926 - RNA, 32 nt, Human
gcgcgggucuccugguccuucugccaucaugc

SEQ ID NO: 442927 - RNA, 32 nt, Human
gcgcgggugccgggcccugccuugccggccau

SEQ ID NO: 442928 - RNA, 32 nt, Human
gcgcggucgucacgccuguaaucccagcacuu

SEQ ID NO: 442929 - RNA, 32 nt, Human
gcgcggugcucacgccuguaaucccagcacuu

SEQ ID NO: 442930 - RNA, 32 nt, Human
gcgcgguggacugucuucucugugcaaugauc

SEQ ID NO: 442931 - RNA, 32 nt, Human
gcgcgguggcucacaccuuaaucccagcacuu

SEQ ID NO: 442932 - RNA, 32 nt, Human
gcgcgguggcucacgccugcagucccagcacu

SEQ ID NO: 442933 - RNA, 32 nt, Human
gcgcgguggcucacgccuguaaccucagcacu

SEQ ID NO: 442934 - RNA, 31 nt, Human
gcgcgguggcugcucccuugcuggggcucag

SEQ ID NO: 442935 - RNA, 32 nt, Human
gcgcgguucaugacuguguccccugaccgcag

SEQ ID NO: 442936 - RNA, 32 nt, Human
gcgcguccagccccagacccgccggggucccu

SEQ ID NO: 442937 - RNA, 32 nt, Human
gcgcgucccucacgugacuguguuaaaggaga

SEQ ID NO: 442938 - RNA, 32 nt, Human
gcgcguccugcccgcuucccucggugaccugc

SEQ ID NO: 442939 - RNA, 32 nt, Human
gcgcgucgggcacagcgcgugcagccucgugc

SEQ ID NO: 442940 - RNA, 32 nt, Human
gcgcgucguccuccucgcccuccaggccgccc

SEQ ID NO: 442941 - RNA, 32 nt, Human
gcgcgucuagccccagcgccagggcacgcgag

SEQ ID NO: 442942 - RNA, 32 nt, Human
gcgcgucucauuuucagccuugcccggacucu

SEQ ID NO: 442943 - RNA, 32 nt, Human
gcgcgucuccagccucugcacacacauuggcg

SEQ ID NO: 442944 - RNA, 32 nt, Human
gcgcgucuucaggccuuuguaaguugucaaau

SEQ ID NO: 442945 - RNA, 32 nt, Human
gcgcgucuuccuuacagccauuuaguugggag

SEQ ID NO: 442946 - RNA, 32 nt, Human
gcgcgugagagggagcgcgcgggcagccgagc

SEQ ID NO: 442947 - RNA, 32 nt, Human
gcgcgugccuguaaucccagcuacucgggaag

SEQ ID NO: 442948 - RNA, 32 nt, Human
gcgcgugccuguaaucccagcuacuugggagu

SEQ ID NO: 442949 - RNA, 32 nt, Human
gcgcgugcucaggaguugguguccugccugcg

SEQ ID NO: 442950 - RNA, 32 nt, Human
gcgcgugcuucuaguccuagcuacucagaaga

SEQ ID NO: 442951 - RNA, 32 nt, Human
gcgcgugcuuguaaucccagcuacucaggagg

SEQ ID NO: 442952 - RNA, 32 nt, Human
gcgcguggaggaggaggaaaaggagggaaagg

SEQ ID NO: 442953 - RNA, 23 nt, Human
gcgcguggcucacgccuauaauc

SEQ ID NO: 442954 - RNA, 32 nt, Human
gcgcguggcucacgccuauaaucccagcacuu

SEQ ID NO: 442955 - RNA, 23 nt, Human
gcgcguggcucacgccuguaauc

SEQ ID NO: 442956 - RNA, 32 nt, Human
gcgcguggcucacgccuguaaucccagcacuu

SEQ ID NO: 442957 - RNA, 32 nt, Human
gcgcgugggugaggaaggucaggucuaggaac

SEQ ID NO: 442958 - RNA, 32 nt, Human
gcgcgugguuggcagaggcagagacauaagac

SEQ ID NO: 442959 - RNA, 32 nt, Human
gcgcguguguaaucccagcuacuugggaggcu

SEQ ID NO: 442960 - RNA, 32 nt, Human
gcgcguucugcuguaacgagcgggcucggagg

SEQ ID NO: 442961 - RNA, 32 nt, Human
gcgcguuugucugagccugggacuaacauaau

SEQ ID NO: 442962 - RNA, 32 nt, Human
gcgcuaagggccgccgccaccaugccaggggg

SEQ ID NO: 442963 - RNA, 32 nt, Human
gcgcuacagcccagagguuauacauuucaaca

SEQ ID NO: 442964 - RNA, 32 nt, Human
gcgcuaccaaccacagccuggcagccuggucu

SEQ ID NO: 442965 - RNA, 32 nt, Human
gcgcuaccagcagacucuggaggccugugccu

SEQ ID NO: 442966 - RNA, 32 nt, Human
gcgcuaccaggaggggcaggucucagccagcu

SEQ ID NO: 442967 - RNA, 32 nt, Human
gcgcuacccuuuuccgcuccacggugaccucc

SEQ ID NO: 442968 - RNA, 32 nt, Human
gcgcuaccugcucuaccaguggcccugugaua

SEQ ID NO: 442969 - RNA, 24 nt, Human
gcgcuacuccuggcauguggauca

SEQ ID NO: 442970 - RNA, 32 nt, Human
gcgcuacugaacuccagccuggguuacagagc

SEQ ID NO: 442971 - RNA, 32 nt, Human
gcgcuacugcacuccagccuaggcaacagagg

SEQ ID NO: 442972 - RNA, 32 nt, Human
gcgcuacugcacuccagccuggacaacagagg

SEQ ID NO: 442973 - RNA, 32 nt, Human
gcgcuacugcacuccagccugggcgacagagu

SEQ ID NO: 442974 - RNA, 32 nt, Human
gcgcuacugcacuccagccugggcgacaguac

SEQ ID NO: 442975 - RNA, 32 nt, Human
gcgcuacugcacuccagccugggugacagagu

SEQ ID NO: 442976 - RNA, 32 nt, Human
gcgcuacugcacuccagccugggugacagugu

SEQ ID NO: 442977 - RNA, 32 nt, Human
gcgcuacugcauuccagccugggcgccgagau

SEQ ID NO: 442978 - RNA, 32 nt, Human
gcgcuacuuccacuccagcgccaacuacacug

SEQ ID NO: 442979 - RNA, 22 nt, Human
gcgcuagagccauccagaagug

SEQ ID NO: 442980 - RNA, 32 nt, Human
gcgcuagagcccgggcgacagagcaagacuug

SEQ ID NO: 442981 - RNA, 32 nt, Human
gcgcuagaggcaagaggaagggggucugcgag

SEQ ID NO: 442982 - RNA, 18 nt, Human
gcgcuagcccaccuccca

SEQ ID NO: 442983 - RNA, 32 nt, Human
gcgcuagccugaggagcucagagccuaaggaa

SEQ ID NO: 442984 - RNA, 32 nt, Human
gcgcuagggcuccgaggagcuggggcgggcua

SEQ ID NO: 442985 - RNA, 32 nt, Human
gcgcuagucccaggagcucggaauguucgugg

SEQ ID NO: 442986 - RNA, 32 nt, Human
gcgcuagucccuugguuuaauuugugccuuau

SEQ ID NO: 442987 - RNA, 32 nt, Human
gcgcuauuacugggauauagaccuggauaauu

SEQ ID NO: 442988 - RNA, 32 nt, Human
gcgcuauuaucuagauucaguguuacauuuuc

SEQ ID NO: 442989 - RNA, 32 nt, Human
gcgcuauugcacuccagccugggugacagagc

SEQ ID NO: 442990 - RNA, 32 nt, Human
gcgcuauugcacuccagucuggguaacaggga

SEQ ID NO: 442991 - RNA, 32 nt, Human
gcgcucaacacuggggaaaggaaggaggcggg

SEQ ID NO: 442992 - RNA, 27 nt, Human
gcgcucaauaaaucuaagcuucccuuu

SEQ ID NO: 442993 - RNA, 27 nt, Human
gcgcucacacauucaccguuggccugc

SEQ ID NO: 442994 - RNA, 32 nt, Human
gcgcucaccuguaaucccaccauuuugggagg

SEQ ID NO: 442995 - RNA, 32 nt, Human
gcgcucaccuguuuuccaugugaggauacaau

SEQ ID NO: 442996 - RNA, 21 nt, Human
gcgcucagacccccuggcugc

SEQ ID NO: 442997 - RNA, 23 nt, Human
gcgcucagacgccccagcuccgc

SEQ ID NO: 442998 - RNA, 32 nt, Human
gcgcucagagcugugagagaagacaggaaggu

SEQ ID NO: 442999 - RNA, 22 nt, Human
gcgcucagcacaggcagcucgc

SEQ ID NO: 443000 - RNA, 32 nt, Human
gcgcucagcccaaacccagggcucuuaaccac

SEQ ID NO: 443001 - RNA, 32 nt, Human
gcgcucagcuuccgacgggagaggguagaccg

SEQ ID NO: 443002 - RNA, 32 nt, Human
gcgcucaggaagggugagguggagcccugcac

SEQ ID NO: 443003 - RNA, 32 nt, Human
gcgcucaugccccacgcggggucuccaaguga

SEQ ID NO: 443004 - RNA, 32 nt, Human
gcgcucaugcccguaaucccagcacuuuggua

SEQ ID NO: 443005 - RNA, 32 nt, Human
gcgcucauggccuccugcuucuugccuaccac

SEQ ID NO: 443006 - RNA, 32 nt, Human
gcgcuccaaagaagaggugggauaguuggaga

SEQ ID NO: 443007 - RNA, 32 nt, Human
gcgcuccaaagaagaggugggauaguuggagg

SEQ ID NO: 443008 - RNA, 32 nt, Human
gcgcuccagcagcugcugccgcccagcccggc

SEQ ID NO: 443009 - RNA, 32 nt, Human
gcgcuccagccuaggugacagagcaagacucc

SEQ ID NO: 443010 - RNA, 28 nt, Human
gcgcuccagcuagcugccucaucaaaaa

SEQ ID NO: 443011 - RNA, 32 nt, Human
gcgcuccagucccucagacgugggcugagcuu

SEQ ID NO: 443012 - RNA, 32 nt, Human
gcgcucccaagcucugaguccuuguuuuucgu

SEQ ID NO: 443013 - RNA, 32 nt, Human
gcgcucccaggagaguggaggcugcaggaaga

SEQ ID NO: 443014 - RNA, 19 nt, Human
gcgcucccagugcccagcc

SEQ ID NO: 443015 - RNA, 32 nt, Human
gcgcuccccagaggugagcugauccccagcca

SEQ ID NO: 443016 - RNA, 20 nt, Human
gcgcuccccucagcuccugc

SEQ ID NO: 443017 - RNA, 32 nt, Human
gcgcuccccucagcuccugcagugcuaauuaa

SEQ ID NO: 443018 - RNA, 32 nt, Human
gcgcucccgaaggcguuccuggagggcccugg

SEQ ID NO: 443019 - RNA, 32 nt, Human
gcgcucccucccucccccuucucugucccccg

SEQ ID NO: 443020 - RNA, 18 nt, Human
gcgcucccugcgaguggc

SEQ ID NO: 443021 - RNA, 21 nt, Human
gcgcuccgcccccgcugagcc

SEQ ID NO: 443022 - RNA, 32 nt, Human
gcgcuccgcuugccucuccaccccgcccgacu

SEQ ID NO: 443023 - RNA, 20 nt, Human
gcgcuccggagagaccgaca

SEQ ID NO: 443024 - RNA, 32 nt, Human
gcgcuccucccucaggcuuucucccucagucu

SEQ ID NO: 443025 - RNA, 32 nt, Human
gcgcuccucgcucgccuccuguacccauccag

SEQ ID NO: 443026 - RNA, 32 nt, Human
gcgcuccucuaggcugcaaagggggccuccga

SEQ ID NO: 443027 - RNA, 32 nt, Human
gcgcuccucucuggcugagguggaaacagaga

SEQ ID NO: 443028 - RNA, 32 nt, Human
gcgcuccugcugcugcucacccuuaugaaccu

SEQ ID NO: 443029 - RNA, 22 nt, Human
gcgcucgagcagcggcucggug

SEQ ID NO: 443030 - RNA, 32 nt, Human
gcgcucgcacacacacgcacgcacgcacacac

SEQ ID NO: 443031 - RNA, 32 nt, Human
gcgcucgccagcggcucccccuucuccucggc

SEQ ID NO: 443032 - RNA, 32 nt, Human
gcgcucgcccuuggcccugcugccucugucua

SEQ ID NO: 443033 - RNA, 32 nt, Human
gcgcucgccugccccacagccugggccuuggg

SEQ ID NO: 443034 - RNA, 25 nt, Human
gcgcucgcgcaggagaccccgggug

SEQ ID NO: 443035 - RNA, 32 nt, Human
gcgcucgcggcugagcuagauccugccgagcc

SEQ ID NO: 443036 - RNA, 21 nt, Human
gcgcucggcccucgccaggcc

SEQ ID NO: 443037 - RNA, 32 nt, Human
gcgcucggccuccagcagucggcuuucugcug

SEQ ID NO: 443038 - RNA, 32 nt, Human
gcgcucggcggcuccuuccagcaggggcuugc

SEQ ID NO: 443039 - RNA, 32 nt, Human
gcgcucggcucgcaggauggaucccguacccg

SEQ ID NO: 443040 - RNA, 32 nt, Human
gcgcucggcucgggggcggcggcgcgggagga

SEQ ID NO: 443041 - RNA, 18 nt, Human
gcgcucggcuggcugcag

SEQ ID NO: 443042 - RNA, 32 nt, Human
gcgcucggcuucuuccucugugcuggucauga

SEQ ID NO: 443043 - RNA, 32 nt, Human
gcgcucgggcaggcgggcugaggaggcugccg

SEQ ID NO: 443044 - RNA, 32 nt, Human
gcgcucucgacucuccugccugcccagcugcg

SEQ ID NO: 443045 - RNA, 32 nt, Human
gcgcucucuaaauuaugucucuggcauauuuu

SEQ ID NO: 443046 - RNA, 32 nt, Human
gcgcucucuaacucuccuuuacacugcaauga

SEQ ID NO: 443047 - RNA, 32 nt, Human
gcgcucugacaugcagaaggugacccugggcc

SEQ ID NO: 443048 - RNA, 32 nt, Human
gcgcucugcaauucgcccugcccagccauccu

SEQ ID NO: 443049 - RNA, 32 nt, Human
gcgcucugcccggcuuccucagucuccucgcc

SEQ ID NO: 443050 - RNA, 32 nt, Human
gcgcucugcccucccuccuuccuucuugcuuc

SEQ ID NO: 443051 - RNA, 32 nt, Human
gcgcucugccugccgccugccugccugccacu

SEQ ID NO: 443052 - RNA, 32 nt, Human
gcgcucuggaaaagacagggagccaggcccuc

SEQ ID NO: 443053 - RNA, 32 nt, Human
gcgcucugggacugacaccagcgguuugggcu

SEQ ID NO: 443054 - RNA, 32 nt, Human
gcgcucugucaguccgcaaacuccuugccgcc

SEQ ID NO: 443055 - RNA, 22 nt, Human
gcgcucugugggcgacuaagug

SEQ ID NO: 443056 - RNA, 32 nt, Human
gcgcucuuaaucuccccucuacuugacucugc

SEQ ID NO: 443057 - RNA, 32 nt, Human
gcgcucuuacccugcacaaucucccccuccag

SEQ ID NO: 443058 - RNA, 22 nt, Human
gcgcugaaaguuuuggugcccc

SEQ ID NO: 443059 - RNA, 32 nt, Human
gcgcugacgaggagcccggcugagggaggaug

SEQ ID NO: 443060 - RNA, 32 nt, Human
gcgcugacgcugcagcccuggaccugcugggg

SEQ ID NO: 443061 - RNA, 32 nt, Human
gcgcugacucacucccugccccaucuccaccc

SEQ ID NO: 443062 - RNA, 24 nt, Human
gcgcugagaaaggcaccagcuccu

SEQ ID NO: 443063 - RNA, 32 nt, Human
gcgcugagaucgaguugcugggggaggccucu

SEQ ID NO: 443064 - RNA, 19 nt, Human
gcgcugagauugucuaaag

SEQ ID NO: 443065 - RNA, 20 nt, Human
gcgcugaggagcggcgaccc

SEQ ID NO: 443066 - RNA, 22 nt, Human
gcgcugaggccugacgccgccu

SEQ ID NO: 443067 - RNA, 20 nt, Human
gcgcugaggcggggcuugca

SEQ ID NO: 443068 - RNA, 32 nt, Human
gcgcugaggcggggcuugcaggugagggggcu

SEQ ID NO: 443069 - RNA, 24 nt, Human
gcgcugagggacccggcgcucgcc

SEQ ID NO: 443070 - RNA, 22 nt, Human
gcgcugagggcccuccucccca

SEQ ID NO: 443071 - RNA, 23 nt, Human
gcgcugaggggcgcggagcuccc

SEQ ID NO: 443072 - RNA, 32 nt, Human
gcgcugaggugcugggacagccaugguuucag

SEQ ID NO: 443073 - RNA, 21 nt, Human
gcgcugaucccgcuggcccug

SEQ ID NO: 443074 - RNA, 21 nt, Human
gcgcugcagcccaaggagcag

SEQ ID NO: 443075 - RNA, 32 nt, Human
gcgcugcagggaacagcggggcaaacagugag

SEQ ID NO: 443076 - RNA, 32 nt, Human
gcgcugcauuuucuccccucucccucccuccu

SEQ ID NO: 443077 - RNA, 32 nt, Human
gcgcugccacagucucaucccauuuccagcuc

SEQ ID NO: 443078 - RNA, 32 nt, Human
gcgcugccagaggcggggccugacuggagagc

SEQ ID NO: 443079 - RNA, 17 nt, Human
gcgcugccagccccgcc

SEQ ID NO: 443080 - RNA, 32 nt, Human
gcgcugccauuuccuaccccugccauuuccca

SEQ ID NO: 443081 - RNA, 32 nt, Human
gcgcugcccagaggcguccuggccugaacagc

SEQ ID NO: 443082 - RNA, 32 nt, Human
gcgcugcccaggaagggcagggcuggggugau

SEQ ID NO: 443083 - RNA, 32 nt, Human
gcgcugccccugcuuugugcuggucuccugug

SEQ ID NO: 443084 - RNA, 32 nt, Human
gcgcugccgccgcccucgaggcucccucugac

SEQ ID NO: 443085 - RNA, 21 nt, Human
gcgcugccgccgccgccgccg

SEQ ID NO: 443086 - RNA, 32 nt, Human
gcgcugccggggcgagguugcgaggggcggug

SEQ ID NO: 443087 - RNA, 32 nt, Human
gcgcugccgguuacguaaagaugaggggcuga

SEQ ID NO: 443088 - RNA, 32 nt, Human
gcgcugccgugagacuggugcuccaggaacca

SEQ ID NO: 443089 - RNA, 32 nt, Human
gcgcugccucgcaauccugggcuagguccuuu

SEQ ID NO: 443090 - RNA, 32 nt, Human
gcgcugccuggaggcaggaaggagaggcaggg

SEQ ID NO: 443091 - RNA, 32 nt, Human
gcgcugccuucacuccuggagugaguuuccau

SEQ ID NO: 443092 - RNA, 32 nt, Human
gcgcugcggccugggagccucggggagaugcg

SEQ ID NO: 443093 - RNA, 32 nt, Human
gcgcugcggcgacgccuggauccugccuccgc

SEQ ID NO: 443094 - RNA, 32 nt, Human
gcgcugcgucggugaggugcucaaauugcaug

SEQ ID NO: 443095 - RNA, 32 nt, Human
gcgcugcgugagcugccauguaucgccagccg

SEQ ID NO: 443096 - RNA, 21 nt, Human
gcgcugcgugcccuggcucug

SEQ ID NO: 443097 - RNA, 32 nt, Human
gcgcugcuacgagcggugucuccuggggcucc

SEQ ID NO: 443098 - RNA, 20 nt, Human
gcgcugcucgccccgggcca

SEQ ID NO: 443099 - RNA, 32 nt, Human
gcgcugcugaaaccaggaauccaggucaggcc

SEQ ID NO: 443100 - RNA, 32 nt, Human
gcgcugcugcacucaagcuuggaugacagagc

SEQ ID NO: 443101 - RNA, 32 nt, Human
gcgcugcugcacuccaaccugggcgacagagc

SEQ ID NO: 443102 - RNA, 32 nt, Human
gcgcugcugcacuccagccugggugacagagu

SEQ ID NO: 443103 - RNA, 20 nt, Human
gcgcugcugccgcccagccc

SEQ ID NO: 443104 - RNA, 32 nt, Human
gcgcugcugccuaggugccauuuccuuuccuc

SEQ ID NO: 443105 - RNA, 21 nt, Human
gcgcugcugcuccagccugac

SEQ ID NO: 443106 - RNA, 32 nt, Human
gcgcuggaagagcugagaggccaggcugugga

SEQ ID NO: 443107 - RNA, 22 nt, Human
gcgcuggacacucucugcccug

SEQ ID NO: 443108 - RNA, 32 nt, Human
gcgcuggaccugcucaccugagccugcagaag

SEQ ID NO: 443109 - RNA, 20 nt, Human
gcgcuggagacgccaggccc

SEQ ID NO: 443110 - RNA, 32 nt, Human
gcgcuggagagggggcgcugagcuguugggua

SEQ ID NO: 443111 - RNA, 21 nt, Human
gcgcuggaggaaaccagcccu

SEQ ID NO: 443112 - RNA, 32 nt, Human
gcgcuggaggcgugggucagggagacaggcau

SEQ ID NO: 443113 - RNA, 19 nt, Human
gcgcuggaggcucuuggcc

SEQ ID NO: 443114 - RNA, 32 nt, Human
gcgcuggaucaguccacggcuuggggaaaggc

SEQ ID NO: 443115 - RNA, 19 nt, Human
gcgcuggauuacaggcaug

SEQ ID NO: 443116 - RNA, 32 nt, Human
gcgcuggauuacaggcaugagccacuacaccc

SEQ ID NO: 443117 - RNA, 32 nt, Human
gcgcuggcagaggcugugcucccuccucaggu

SEQ ID NO: 443118 - RNA, 32 nt, Human
gcgcuggcccugccacuccagccuggccucac

SEQ ID NO: 443119 - RNA, 32 nt, Human
gcgcuggcccugggccugggccuguggcucgg

SEQ ID NO: 443120 - RNA, 32 nt, Human
gcgcuggccucccgccgcugugcauugcagca

SEQ ID NO: 443121 - RNA, 32 nt, Human
gcgcuggcgagauaccauggugccauccuccu

SEQ ID NO: 443122 - RNA, 32 nt, Human
gcgcugggaaaucaccccacaggguggagguc

SEQ ID NO: 443123 - RNA, 32 nt, Human
gcgcugggagacagcggcugcccacgcaguuc

SEQ ID NO: 443124 - RNA, 32 nt, Human
gcgcugggagcccagagcaggaggcagagccc

SEQ ID NO: 443125 - RNA, 32 nt, Human
gcgcugggagcugcggucuccggccauggccc

SEQ ID NO: 443126 - RNA, 32 nt, Human
gcgcugggcacuucccugcugccuguaaauau

SEQ ID NO: 443127 - RNA, 32 nt, Human
gcgcugggcaugcucaguagccgcggcgcugc

SEQ ID NO: 443128 - RNA, 32 nt, Human
gcgcugggcccaggcaggggcuucugauuagg

SEQ ID NO: 443129 - RNA, 32 nt, Human
gcgcugggcccccguccugccugagcgguuac

SEQ ID NO: 443130 - RNA, 25 nt, Human
gcgcugggcggcugcggggccugac

SEQ ID NO: 443131 - RNA, 32 nt, Human
gcgcugggcucucagggcaggguugggacagc

SEQ ID NO: 443132 - RNA, 32 nt, Human
gcgcuggggagggcgaggcggaggcggcaaaa

SEQ ID NO: 443133 - RNA, 18 nt, Human
gcgcugggggccgagucc

SEQ ID NO: 443134 - RNA, 32 nt, Human
gcgcugggggccgguuuggugccugaggagcu

SEQ ID NO: 443135 - RNA, 32 nt, Human
gcgcugggucggaagugagcaggcugaggcca

SEQ ID NO: 443136 - RNA, 32 nt, Human
gcgcuggguggugguucugccugcuugcugcu

SEQ ID NO: 443137 - RNA, 32 nt, Human
gcgcuggguucugcagcagggcucagccucag

SEQ ID NO: 443138 - RNA, 32 nt, Human
gcgcugguaagccuguguuuugguucgcuaug

SEQ ID NO: 443139 - RNA, 32 nt, Human
gcgcugguagugagcuuccacuucugcccuga

SEQ ID NO: 443140 - RNA, 24 nt, Human
gcgcuggugcuggcguuggcccug

SEQ ID NO: 443141 - RNA, 32 nt, Human
gcgcugguggcugcagcuggggugaggcgcga

SEQ ID NO: 443142 - RNA, 32 nt, Human
gcgcuggugggugggaucguggcggagcgcca

SEQ ID NO: 443143 - RNA, 32 nt, Human
gcgcuggugucuguuggggacagccccauccc

SEQ ID NO: 443144 - RNA, 32 nt, Human
gcgcugucacccaggcuggagugcagugcugc

SEQ ID NO: 443145 - RNA, 19 nt, Human
gcgcugucacccugggcca

SEQ ID NO: 443146 - RNA, 32 nt, Human
gcgcugucagacuccggcugauccuggcucga

SEQ ID NO: 443147 - RNA, 32 nt, Human
gcgcugucccuaggaggaauuucuccuucagg

SEQ ID NO: 443148 - RNA, 24 nt, Human
gcgcuguccucgggggccugggga

SEQ ID NO: 443149 - RNA, 32 nt, Human
gcgcuguccucgggggccuggggaaccgcgcg

SEQ ID NO: 443150 - RNA, 32 nt, Human
gcgcuguccuugccgggaagucacuguugaag

SEQ ID NO: 443151 - RNA, 32 nt, Human
gcgcugucgcccaggcuggagcgcaauggcgc

SEQ ID NO: 443152 - RNA, 32 nt, Human
gcgcugucggggcagcagcccaggcauccgcu

SEQ ID NO: 443153 - RNA, 32 nt, Human
gcgcugucucagcucacugcaaccuccgccuc

SEQ ID NO: 443154 - RNA, 32 nt, Human
gcgcuguggcucacaguguaaucccaacacuu

SEQ ID NO: 443155 - RNA, 32 nt, Human
gcgcuguguagggcuauuuccacccacccggc

SEQ ID NO: 443156 - RNA, 32 nt, Human
gcgcuguguccgucgccaugacagaucagacc

SEQ ID NO: 443157 - RNA, 32 nt, Human
gcgcugugugagcuggcccugccccuccucau

SEQ ID NO: 443158 - RNA, 32 nt, Human
gcgcuguugcccaggcucuagugcaauggcac

SEQ ID NO: 443159 - RNA, 32 nt, Human
gcgcuguugcccaggcuggagugcaguggcgu

SEQ ID NO: 443160 - RNA, 32 nt, Human
gcgcuguugcccgcccuccacccacuagguga

SEQ ID NO: 443161 - RNA, 32 nt, Human
gcgcuguugccuuuguaugucuucccaccuca

SEQ ID NO: 443162 - RNA, 32 nt, Human
gcgcuguuucuugagccaggucuucuguccau

SEQ ID NO: 443163 - RNA, 32 nt, Human
gcgcuucagcaaccgcucccaccuccuccagc

SEQ ID NO: 443164 - RNA, 32 nt, Human
gcgcuucauggagaacuuccaaaagguggaaa

SEQ ID NO: 443165 - RNA, 32 nt, Human
gcgcuuccccaaacucaccuccugggcggcug

SEQ ID NO: 443166 - RNA, 32 nt, Human
gcgcuucuaccuuuuggucuuuaaagugugau

SEQ ID NO: 443167 - RNA, 32 nt, Human
gcgcuucuagguugcuggggcucugcugguua

SEQ ID NO: 443168 - RNA, 32 nt, Human
gcgcuucuccagccucagccuccugaguagcu

SEQ ID NO: 443169 - RNA, 32 nt, Human
gcgcuucugagugcccgggaggucaucaugaa

SEQ ID NO: 443170 - RNA, 32 nt, Human
gcgcuucuucucccccgccaucaugucgccca

SEQ ID NO: 443171 - RNA, 32 nt, Human
gcgcuucuucucuccauccuuggaccuucaca

SEQ ID NO: 443172 - RNA, 32 nt, Human
gcgcuucuucuuucuugguuugauccugacug

SEQ ID NO: 443173 - RNA, 32 nt, Human
gcgcuugacccagagccagauccagcauggcc

SEQ ID NO: 443174 - RNA, 22 nt, Human
gcgcuugaggaccagcccagcc

SEQ ID NO: 443175 - RNA, 32 nt, Human
gcgcuugaggggauuauaauuucuuuaaaaag

SEQ ID NO: 443176 - RNA, 32 nt, Human
gcgcuugcagugagccgagauugccccacugc

SEQ ID NO: 443177 - RNA, 32 nt, Human
gcgcuugcagugagcugagcucccaccacugc

SEQ ID NO: 443178 - RNA, 32 nt, Human
gcgcuugccuguagucuagcuacuuggggugg

SEQ ID NO: 443179 - RNA, 20 nt, Human
gcgcuugcgcaggcgcucgg

SEQ ID NO: 443180 - RNA, 32 nt, Human
gcgcuugcgcucccccuacucguucuaauucc

SEQ ID NO: 443181 - RNA, 32 nt, Human
gcgcuugggaaaggcaggagcgccagcggucg

SEQ ID NO: 443182 - RNA, 32 nt, Human
gcgcuuguccugcuucacccuaccccgccuaa

SEQ ID NO: 443183 - RNA, 32 nt, Human
gcgcuuguugcccaggcuggaaugcaauggcg

SEQ ID NO: 443184 - RNA, 32 nt, Human
gcgcuuguuuuucuccugcucucccccaccgc

SEQ ID NO: 443185 - RNA, 32 nt, Human
gcgcuuuaugcccaugaugucauuucaggcuc

SEQ ID NO: 443186 - RNA, 32 nt, Human
gcgcuuuccauucauuugguuuagcacagcca

SEQ ID NO: 443187 - RNA, 31 nt, Human
gcgcuuugccucucuccugucuuugucugcu

SEQ ID NO: 443188 - RNA, 32 nt, Human
gcgcuuugcuuuggucuaucuuugagcgccca

SEQ ID NO: 443189 - RNA, 32 nt, Human
gcgcuuuggcaggccaaggcgggcagaucgcu

SEQ ID NO: 443190 - RNA, 32 nt, Human
gcgcuuugggaggcagaggcagguggaucacc

SEQ ID NO: 443191 - RNA, 32 nt, Human
gcgcuuuuggcuccucuucuggcuccugcugg

SEQ ID NO: 443192 - RNA, 32 nt, Human
gcggaaaaagccagagaggcuggugagggagc

SEQ ID NO: 443193 - RNA, 32 nt, Human
gcggaaagcaucuaggcugaagggugcaggug

SEQ ID NO: 443194 - RNA, 32 nt, Human
gcggaaagggaagccgggcggggccagggggu

SEQ ID NO: 443195 - RNA, 21 nt, Human
gcggaaagugagagccagcag

SEQ ID NO: 443196 - RNA, 32 nt, Human
gcggaaauuaaccccaagguguauuuuugucu

SEQ ID NO: 443197 - RNA, 32 nt, Human
gcggaacaaggcacugacaagccucaacgagg

SEQ ID NO: 443198 - RNA, 20 nt, Human
gcggaacaccugaggucagg

SEQ ID NO: 443199 - RNA, 32 nt, Human
gcggaacagcccauccagcagagugaguccau

SEQ ID NO: 443200 - RNA, 32 nt, Human
gcggaaccugcggggcagaggcggcggccgca

SEQ ID NO: 443201 - RNA, 32 nt, Human
gcggaaccuuucacaccucuuucucagggacg

SEQ ID NO: 443202 - RNA, 25 nt, Human
gcggaacuaccaaucauggcugcag

SEQ ID NO: 443203 - RNA, 32 nt, Human
gcggaagaaagcccaggcggucuguggcccag

SEQ ID NO: 443204 - RNA, 32 nt, Human
gcggaagaagaaaaagaaggacaaagacaaag

SEQ ID NO: 443205 - RNA, 32 nt, Human
gcggaagaggaagcagggcggaagggaagccc

SEQ ID NO: 443206 - RNA, 32 nt, Human
gcggaagaggaggaggaggaggaggaaggggc

SEQ ID NO: 443207 - RNA, 32 nt, Human
gcggaagagggcggaggguagugggauggggg

SEQ ID NO: 443208 - RNA, 17 nt, Human
gcggaagcgcggcgcug

SEQ ID NO: 443209 - RNA, 32 nt, Human
gcggaaggagggcaaugagcuguucaaaugug

SEQ ID NO: 443210 - RNA, 32 nt, Human
gcggaaggaguuuccuggacugcgcugucgcu

SEQ ID NO: 443211 - RNA, 23 nt, Human
gcggaaggcaguuuugcuuggga

SEQ ID NO: 443212 - RNA, 32 nt, Human
gcggaaggcgaguuuucuuuuguuuucuguag

SEQ ID NO: 443213 - RNA, 22 nt, Human
gcggaaggcggagacagcgaga

SEQ ID NO: 443214 - RNA, 32 nt, Human
gcggaaggggcuggcuaaugugcaguggagcg

SEQ ID NO: 443215 - RNA, 32 nt, Human
gcggaagguggagguggguagcccagguucag

SEQ ID NO: 443216 - RNA, 22 nt, Human
gcggaaggugggaggaggcaga

SEQ ID NO: 443217 - RNA, 22 nt, Human
gcggaaggugggaggagggaga

SEQ ID NO: 443218 - RNA, 32 nt, Human
gcggaagugggagauggagcagggcaccuguu

SEQ ID NO: 443219 - RNA, 32 nt, Human
gcggaaucuuuuugaaauaaaaagccacuuug

SEQ ID NO: 443220 - RNA, 32 nt, Human
gcggaauggggcuguguggcugcuagauuagg

SEQ ID NO: 443221 - RNA, 19 nt, Human
gcggaaugugcccagcaga

SEQ ID NO: 443222 - RNA, 32 nt, Human
gcggaauuacgagggcuggcuguuuuacaccg

SEQ ID NO: 443223 - RNA, 32 nt, Human
gcggacaaaacucaggccagagccacagcugg

SEQ ID NO: 443224 - RNA, 32 nt, Human
gcggacaaaaucuggagcaaagaaggauuuua

SEQ ID NO: 443225 - RNA, 32 nt, Human
gcggacaaccaccaccaccacccccacaccca

SEQ ID NO: 443226 - RNA, 32 nt, Human
gcggacaagcacuccagggcaucaguccgggc

SEQ ID NO: 443227 - RNA, 32 nt, Human
gcggacaccggagcgggcaggagcagcggccg

SEQ ID NO: 443228 - RNA, 32 nt, Human
gcggacagacaggcgagauggcggcggaggug

SEQ ID NO: 443229 - RNA, 24 nt, Human
gcggacagaccaccugaggucagg

SEQ ID NO: 443230 - RNA, 32 nt, Human
gcggacagaggcuaguggugguggugguggua

SEQ ID NO: 443231 - RNA, 32 nt, Human
gcggacagagggcuggaaacaagacgcuccag

SEQ ID NO: 443232 - RNA, 32 nt, Human
gcggacagaucacuugagcucaggaguucgag

SEQ ID NO: 443233 - RNA, 32 nt, Human
gcggacaggaagaacaccagcacgaggguccg

SEQ ID NO: 443234 - RNA, 32 nt, Human
gcggacaggaagaggcucugggcuggcacaug

SEQ ID NO: 443235 - RNA, 32 nt, Human
gcggacagugcgggccagggaggaaaaccaga

SEQ ID NO: 443236 - RNA, 32 nt, Human
gcggacagugugggccagggaggaaaaccaga

SEQ ID NO: 443237 - RNA, 32 nt, Human
gcggacauccuagcuccuucucaggccuccaa

SEQ ID NO: 443238 - RNA, 19 nt, Human
gcggacaucuguaauccca

SEQ ID NO: 443239 - RNA, 32 nt, Human
gcggaccacccaggcuugaggcagcggcggga

SEQ ID NO: 443240 - RNA, 32 nt, Human
gcggaccacugcagacugagcgguggaccgaa

SEQ ID NO: 443241 - RNA, 32 nt, Human
gcggaccagagguggaaggcgcggcgggcgua

SEQ ID NO: 443242 - RNA, 20 nt, Human
gcggaccaucggcuggcaga

SEQ ID NO: 443243 - RNA, 21 nt, Human
gcggacccccuccgcggggga

SEQ ID NO: 443244 - RNA, 24 nt, Human
gcggaccccgaccuccaguugccu

SEQ ID NO: 443245 - RNA, 32 nt, Human
gcggacccucgcugcccuaccucucucgcggg

SEQ ID NO: 443246 - RNA, 32 nt, Human
gcggacccugagcaacccccuccugggcuccu

SEQ ID NO: 443247 - RNA, 32 nt, Human
gcggacccugcucuccccgggcugcgggccau

SEQ ID NO: 443248 - RNA, 32 nt, Human
gcggaccggaaggggccgaggcugcacgggcc

SEQ ID NO: 443249 - RNA, 32 nt, Human
gcggaccucugguggacauggcugcuucccgc

SEQ ID NO: 443250 - RNA, 32 nt, Human
gcggacgccuguaaucccagcuacuuggaagg

SEQ ID NO: 443251 - RNA, 19 nt, Human
gcggacgccuguaguccca

SEQ ID NO: 443252 - RNA, 18 nt, Human
gcggacgcgugggucgac

SEQ ID NO: 443253 - RNA, 32 nt, Human
gcggacggcacagagggagggagcgagcgagc

SEQ ID NO: 443254 - RNA, 32 nt, Human
gcggacggcggcggaggagacccuaggcucgc

SEQ ID NO: 443255 - RNA, 32 nt, Human
gcggacguaugcagaggcucucaaggccaggc

SEQ ID NO: 443256 - RNA, 19 nt, Human
gcggacugacagcaccagg

SEQ ID NO: 443257 - RNA, 32 nt, Human
gcggacugagugcugggauccaaggcauucua

SEQ ID NO: 443258 - RNA, 32 nt, Human
gcggacugcccugagggcgggaaagggugguc

SEQ ID NO: 443259 - RNA, 32 nt, Human
gcggacuggcuggggagugaugacagaauaca

SEQ ID NO: 443260 - RNA, 32 nt, Human
gcggacugggaguaucaugaaggacgccgccg

SEQ ID NO: 443261 - RNA, 32 nt, Human
gcggacugucacucagaucugcagagaugaau

SEQ ID NO: 443262 - RNA, 32 nt, Human
gcggacuuaccuggcccagcccugccucccuc

SEQ ID NO: 443263 - RNA, 18 nt, Human
gcggacuugcugcugcug

SEQ ID NO: 443264 - RNA, 32 nt, Human
gcggacuuuucaggggacauucagaggcauca

SEQ ID NO: 443265 - RNA, 32 nt, Human
gcggagaauugcuuucugccauuguuauuguc

SEQ ID NO: 443266 - RNA, 32 nt, Human
gcggagacacuggccuaccucugacagcgcgg

SEQ ID NO: 443267 - RNA, 29 nt, Human
gcggagaccacguggagaaaggggccgcu

SEQ ID NO: 443268 - RNA, 19 nt, Human
gcggagaccauggccccca

SEQ ID NO: 443269 - RNA, 32 nt, Human
gcggagagagccaagacggaggaggggaaggg

SEQ ID NO: 443270 - RNA, 32 nt, Human
gcggagagccagagaagugacagggaagcuac

SEQ ID NO: 443271 - RNA, 32 nt, Human
gcggagaggggcccugcuucccacacaaaucc

SEQ ID NO: 443272 - RNA, 32 nt, Human
gcggagaucccaggauccugggugcugucugg

SEQ ID NO: 443273 - RNA, 19 nt, Human
gcggagaugggaggggaga

SEQ ID NO: 443274 - RNA, 32 nt, Human
gcggagcagagucccgggcaggagaaccaagg

SEQ ID NO: 443275 - RNA, 32 nt, Human
gcggagcagcgccuagggcuggaaggcggcug

SEQ ID NO: 443276 - RNA, 32 nt, Human
gcggagcaggaggcagaggagcagauggagca

SEQ ID NO: 443277 - RNA, 15 nt, Human
gcggagcaggcucug

SEQ ID NO: 443278 - RNA, 32 nt, Human
gcggagcaugugcugagggaagucugccuggu

SEQ ID NO: 443279 - RNA, 19 nt, Human
gcggagccagaggcugcag

SEQ ID NO: 443280 - RNA, 32 nt, Human
gcggagccccggccgcugccucccgggacagu

SEQ ID NO: 443281 - RNA, 32 nt, Human
gcggagcccgagcggcggcugcgcagucccgc

SEQ ID NO: 443282 - RNA, 20 nt, Human
gcggagcccggagcuggggc

SEQ ID NO: 443283 - RNA, 32 nt, Human
gcggagccgcacuccggcggcggcggcggcgc

SEQ ID NO: 443284 - RNA, 32 nt, Human
gcggagccggcgggcgaggaggaggacugcac

SEQ ID NO: 443285 - RNA, 32 nt, Human
gcggagccggggcuggagagcggcgaccacug

SEQ ID NO: 443286 - RNA, 32 nt, Human
gcggagccuccccucgcagauaucucccgggg

SEQ ID NO: 443287 - RNA, 32 nt, Human
gcggagccuugaagccgugucugugaucagga

SEQ ID NO: 443288 - RNA, 32 nt, Human
gcggagcggagcgggggugaggagagucgagg

SEQ ID NO: 443289 - RNA, 32 nt, Human
gcggagcuaggaggcgcgagcagagaacgugu

SEQ ID NO: 443290 - RNA, 24 nt, Human
gcggagcucccgccgccgcucccc

SEQ ID NO: 443291 - RNA, 32 nt, Human
gcggagcuccggcuggaggcaagagccgcgcg

SEQ ID NO: 443292 - RNA, 32 nt, Human
gcggagcuccuggaccggcccuucccagaggc

SEQ ID NO: 443293 - RNA, 20 nt, Human
gcggagcuccugggcugcag

SEQ ID NO: 443294 - RNA, 32 nt, Human
gcggagcucucgguuccucucagucggacuuc

SEQ ID NO: 443295 - RNA, 32 nt, Human
gcggagcugggaaaagggaggcagaggaggca

SEQ ID NO: 443296 - RNA, 32 nt, Human
gcggagcugggccgguucuccacagccugugu

SEQ ID NO: 443297 - RNA, 18 nt, Human
gcggagcuggguggcugc

SEQ ID NO: 443298 - RNA, 32 nt, Human
gcggagcuuaaguugugagaagaaagggggaa

SEQ ID NO: 443299 - RNA, 32 nt, Human
gcggaggagaagcaggaggagggaggaggaag

SEQ ID NO: 443300 - RNA, 32 nt, Human
gcggaggagaaggaggaggaggcgaacccaga

SEQ ID NO: 443301 - RNA, 32 nt, Human
gcggaggagagggagcagcgucacgggcgccc

SEQ ID NO: 443302 - RNA, 32 nt, Human
gcggaggagagggcaggggaacggcggugcag

SEQ ID NO: 443303 - RNA, 32 nt, Human
gcggaggagagggcgcagggguccuucuggcc

SEQ ID NO: 443304 - RNA, 32 nt, Human
gcggaggaggagaaaaaggaauaagaaggaga

SEQ ID NO: 443305 - RNA, 32 nt, Human
gcggaggaggagaaggaaggggccgggccggg

SEQ ID NO: 443306 - RNA, 32 nt, Human
gcggaggaggagacgcccaugccccucagggg

SEQ ID NO: 443307 - RNA, 32 nt, Human
gcggaggaggagcagcgcgggagccaggcgcu

SEQ ID NO: 443308 - RNA, 32 nt, Human
gcggaggaggaggcggcggcgucgguggcggc

SEQ ID NO: 443309 - RNA, 32 nt, Human
gcggaggaggcggaggaggagggaaggaagau

SEQ ID NO: 443310 - RNA, 22 nt, Human
gcggaggagggaacagcuggga

SEQ ID NO: 443311 - RNA, 32 nt, Human
gcggaggagguggguccugggaagcgggaugu

SEQ ID NO: 443312 - RNA, 32 nt, Human
gcggaggauacccagggugaggcggagccccu

SEQ ID NO: 443313 - RNA, 32 nt, Human
gcggaggauggaaacacccuucuacggcgaug

SEQ ID NO: 443314 - RNA, 32 nt, Human
gcggaggauggaaacacuugcccggcaauguc

SEQ ID NO: 443315 - RNA, 19 nt, Human
gcggaggcagaggcugcag

SEQ ID NO: 443316 - RNA, 19 nt, Human
gcggaggcagcggcuguag

SEQ ID NO: 443317 - RNA, 25 nt, Human
gcggaggcaggagguggaaacccca

SEQ ID NO: 443318 - RNA, 32 nt, Human
gcggaggcaggcggaucgccugaggugaggag

SEQ ID NO: 443319 - RNA, 32 nt, Human
gcggaggcaggugagaggaggaaggaagcggc

SEQ ID NO: 443320 - RNA, 32 nt, Human
gcggaggcccgcagagcacagagcaggagaag

SEQ ID NO: 443321 - RNA, 32 nt, Human
gcggaggccgcacuccagcacugcgcagggac

SEQ ID NO: 443322 - RNA, 32 nt, Human
gcggaggcggaacugcggaguugcugggucca

SEQ ID NO: 443323 - RNA, 32 nt, Human
gcggaggcggaggcggagguugcagugagcca

SEQ ID NO: 443324 - RNA, 19 nt, Human
gcggaggcggagguugcag

SEQ ID NO: 443325 - RNA, 32 nt, Human
gcggaggcggccgcugcucgaggaucaaacag

SEQ ID NO: 443326 - RNA, 32 nt, Human
gcggaggcggcggcucgggagggaaggaggcg

SEQ ID NO: 443327 - RNA, 20 nt, Human
gcggaggcggggauugcgga

SEQ ID NO: 443328 - RNA, 32 nt, Human
gcggaggcgugcguuugcuuuuacagauaucu

SEQ ID NO: 443329 - RNA, 32 nt, Human
gcggaggcuaugggcagccaggaggugcuggg

SEQ ID NO: 443330 - RNA, 22 nt, Human
gcggaggcucacgccuguaauc

SEQ ID NO: 443331 - RNA, 22 nt, Human
gcggaggcuccuucagcugccu

SEQ ID NO: 443332 - RNA, 23 nt, Human
gcggaggcugcagugagcuggga

SEQ ID NO: 443333 - RNA, 32 nt, Human
gcggaggcuguaaaaccuggcacucugcuugg

SEQ ID NO: 443334 - RNA, 32 nt, Human
gcggagggagagagaaaggaaaagggcuuaag

SEQ ID NO: 443335 - RNA, 19 nt, Human
gcggagggagaggcugcag

SEQ ID NO: 443336 - RNA, 32 nt, Human
gcggagggagcagccgcugccacagucggagc

SEQ ID NO: 443337 - RNA, 22 nt, Human
gcggagggagccggggcuggga

SEQ ID NO: 443338 - RNA, 32 nt, Human
gcggagggaggagagggcgccgccgcaaucuc

SEQ ID NO: 443339 - RNA, 32 nt, Human
gcggagggaggcggaggcugugagggacuccg

SEQ ID NO: 443340 - RNA, 32 nt, Human
gcggagggcagucugcucaaggucacgcagcu

SEQ ID NO: 443341 - RNA, 32 nt, Human
gcggagggcccaagucaucuuuauggcagcaa

SEQ ID NO: 443342 - RNA, 24 nt, Human
gcggagggcggaaggcugcugggg

SEQ ID NO: 443343 - RNA, 32 nt, Human
gcggaggggcaggccagagggaagcgcuuugu

SEQ ID NO: 443344 - RNA, 21 nt, Human
gcggaggggccgcagcuggga

SEQ ID NO: 443345 - RNA, 32 nt, Human
gcggaggggcugggacuaccguaccugggggu

SEQ ID NO: 443346 - RNA, 32 nt, Human
gcggagggggugauaugacuacauacauggca

SEQ ID NO: 443347 - RNA, 32 nt, Human
gcggagggucuugccaaaggcuuuucauccua

SEQ ID NO: 443348 - RNA, 32 nt, Human
gcggaggucacuuuggagaagggugggccuua

SEQ ID NO: 443349 - RNA, 32 nt, Human
gcggaggucuccugccccuucauugcaacacc

SEQ ID NO: 443350 - RNA, 32 nt, Human
gcggaggugagaggagaggaggagaaaacugc

SEQ ID NO: 443351 - RNA, 32 nt, Human
gcggaggugcggcggggagugggagccggccc

SEQ ID NO: 443352 - RNA, 18 nt, Human
gcggaggugcggcugcag

SEQ ID NO: 443353 - RNA, 32 nt, Human
gcggagguguccggcggccaggaggauggcca

SEQ ID NO: 443354 - RNA, 32 nt, Human
gcggagguuagguuugggaguggagcuagcgu

SEQ ID NO: 443355 - RNA, 32 nt, Human
gcggagguugcagugaguugcagucacacccc

SEQ ID NO: 443356 - RNA, 32 nt, Human
gcggaguccacacccaggcauucucgcagccc

SEQ ID NO: 443357 - RNA, 32 nt, Human
gcggaguccgcgcgucacgcucggagaagcac

SEQ ID NO: 443358 - RNA, 32 nt, Human
gcggagucgcuguuccuggugcugaaacgcuc

SEQ ID NO: 443359 - RNA, 32 nt, Human
gcggagucuccucucuuggcaucgaccacacc

SEQ ID NO: 443360 - RNA, 32 nt, Human
gcggagucugcggcgcgggugaagagcggcgc

SEQ ID NO: 443361 - RNA, 32 nt, Human
gcggagugcaguggaacaaccuuggcucacgg

SEQ ID NO: 443362 - RNA, 21 nt, Human
gcggagugcuuccugcagccg

SEQ ID NO: 443363 - RNA, 28 nt, Human
gcggagugggagggcagugaaaucuaga

SEQ ID NO: 443364 - RNA, 32 nt, Human
gcggagugugagggauuuuggaagcacuugcc

SEQ ID NO: 443365 - RNA, 32 nt, Human
gcggaguucuuuaucuucagugagaaugugcc

SEQ ID NO: 443366 - RNA, 20 nt, Human
gcggaguuuggcucaccgca

SEQ ID NO: 443367 - RNA, 20 nt, Human
gcggauaaccugaggucagg

SEQ ID NO: 443368 - RNA, 32 nt, Human
gcggaucaccaggucaggagaucaagaccauc

SEQ ID NO: 443369 - RNA, 20 nt, Human
gcggaucaccuaaggucagg

SEQ ID NO: 443370 - RNA, 20 nt, Human
gcggaucaccugaagucagg

SEQ ID NO: 443371 - RNA, 20 nt, Human
gcggaucaccugagaucagg

SEQ ID NO: 443372 - RNA, 20 nt, Human
gcggaucaccugagcucagg

SEQ ID NO: 443373 - RNA, 20 nt, Human
gcggaucaccugaggccagg

SEQ ID NO: 443374 - RNA, 19 nt, Human
gcggaucaccugaggucag

SEQ ID NO: 443375 - RNA, 20 nt, Human
gcggaucaccugaggucagg

SEQ ID NO: 443376 - RNA, 19 nt, Human
gcggaucaccugaggucgg

SEQ ID NO: 443377 - RNA, 20 nt, Human
gcggaucaccugaggucggg

SEQ ID NO: 443378 - RNA, 20 nt, Human
gcggaucaccugaggugagg

SEQ ID NO: 443379 - RNA, 20 nt, Human
gcggaucaccugagguuagg

SEQ ID NO: 443380 - RNA, 19 nt, Human
gcggaucaccugagucagg

SEQ ID NO: 443381 - RNA, 20 nt, Human
gcggaucaccugaguucagg

SEQ ID NO: 443382 - RNA, 20 nt, Human
gcggaucaccugaugucagg

SEQ ID NO: 443383 - RNA, 20 nt, Human
gcggaucaccuguggucagg

SEQ ID NO: 443384 - RNA, 20 nt, Human
gcggaucacgugaggucagg

SEQ ID NO: 443385 - RNA, 20 nt, Human
gcggaucacucgaggucagg

SEQ ID NO: 443386 - RNA, 32 nt, Human
gcggaucacuugagcccaggaguuugagacca

SEQ ID NO: 443387 - RNA, 20 nt, Human
gcggaucacuugaggccagg

SEQ ID NO: 443388 - RNA, 18 nt, Human
gcggaucacuugagguca

SEQ ID NO: 443389 - RNA, 19 nt, Human
gcggaucacuugaggucag

SEQ ID NO: 443390 - RNA, 20 nt, Human
gcggaucacuugaggucagg

SEQ ID NO: 443391 - RNA, 18 nt, Human
gcggaucacuugagguua

SEQ ID NO: 443392 - RNA, 20 nt, Human
gcggaucaucugagaucagg

SEQ ID NO: 443393 - RNA, 20 nt, Human
gcggaucaucugaggccagg

SEQ ID NO: 443394 - RNA, 20 nt, Human
gcggaucaucugaggucagg

SEQ ID NO: 443395 - RNA, 18 nt, Human
gcggaucauuugagguca

SEQ ID NO: 443396 - RNA, 24 nt, Human
gcggaucccgcaaccgacacuggg

SEQ ID NO: 443397 - RNA, 32 nt, Human
gcggaucccggagagccccggagugagcggag

SEQ ID NO: 443398 - RNA, 24 nt, Human
gcggaucccggucucgccgcagca

SEQ ID NO: 443399 - RNA, 23 nt, Human
gcggauccgccgggcauugagga

SEQ ID NO: 443400 - RNA, 20 nt, Human
gcggaucgccugagaucagg

SEQ ID NO: 443401 - RNA, 20 nt, Human
gcggaucgccugaggucagg

SEQ ID NO: 443402 - RNA, 32 nt, Human
gcggaucgcuugagcccaggagaccagguugg

SEQ ID NO: 443403 - RNA, 18 nt, Human
gcggaucgcuugagguca

SEQ ID NO: 443404 - RNA, 20 nt, Human
gcggaugaccugaggucagg

SEQ ID NO: 443405 - RNA, 32 nt, Human
gcggaugcacuuccugcaccuccagucuucug

SEQ ID NO: 443406 - RNA, 32 nt, Human
gcggaugccuguaaucccagcuacuugggagg

SEQ ID NO: 443407 - RNA, 32 nt, Human
gcggauggguacccgggcacaccagcccucag

SEQ ID NO: 443408 - RNA, 32 nt, Human
gcggaugugguggugcuggaggugagcagcuc

SEQ ID NO: 443409 - RNA, 32 nt, Human
gcggauguugcuugcacuccagccugggugac

SEQ ID NO: 443410 - RNA, 32 nt, Human
gcggauguuggggcugaggggaaggaggagaa

SEQ ID NO: 443411 - RNA, 32 nt, Human
gcggauguuucugccacugcugggcuccacuu

SEQ ID NO: 443412 - RNA, 32 nt, Human
gcggauuacuugagcccaggaguucgggacca

SEQ ID NO: 443413 - RNA, 32 nt, Human
gcggauucucccggcggggaggacgggcgggg

SEQ ID NO: 443414 - RNA, 32 nt, Human
gcggauucuccuuccuccugcuacugauacca

SEQ ID NO: 443415 - RNA, 32 nt, Human
gcggauucucuuucucuuucucuuucucuucu

SEQ ID NO: 443416 - RNA, 21 nt, Human
gcggauucugacaucgaggga

SEQ ID NO: 443417 - RNA, 32 nt, Human
gcggauugcuugagcccaggaguuugagggca

SEQ ID NO: 443418 - RNA, 32 nt, Human
gcggauuucaggagucaagaauccuuaaacgg

SEQ ID NO: 443419 - RNA, 32 nt, Human
gcggauuuucagguuguggcagcuggugccgg

SEQ ID NO: 443420 - RNA, 32 nt, Human
gcggauuuucuuucuuuccucucccggcguug

SEQ ID NO: 443421 - RNA, 32 nt, Human
gcggcaaaagcccauugaagaagaaccagccc

SEQ ID NO: 443422 - RNA, 32 nt, Human
gcggcaaaccgcaugcucuuacccacacuacg

SEQ ID NO: 443423 - RNA, 20 nt, Human
gcggcaacggccccggccca

SEQ ID NO: 443424 - RNA, 32 nt, Human
gcggcaaggccuucgccuggagcuccaaccuc

SEQ ID NO: 443425 - RNA, 32 nt, Human
gcggcaaguacccaggugagaugugcaagagg

SEQ ID NO: 443426 - RNA, 20 nt, Human
gcggcaauggccucagccca

SEQ ID NO: 443427 - RNA, 32 nt, Human
gcggcaauuucagggucccuuuguucgccagg

SEQ ID NO: 443428 - RNA, 32 nt, Human
gcggcacacuucacuacagacacucuauuaag

SEQ ID NO: 443429 - RNA, 32 nt, Human
gcggcacagaagcagccgggggcgcugacucc

SEQ ID NO: 443430 - RNA, 19 nt, Human
gcggcacaugccuguaauc

SEQ ID NO: 443431 - RNA, 32 nt, Human
gcggcaccaacaucaucauuggcuccaucgcu

SEQ ID NO: 443432 - RNA, 32 nt, Human
gcggcaccacugccgucauuucagcuucuggc

SEQ ID NO: 443433 - RNA, 32 nt, Human
gcggcaccacugggaacucuggacuugagugu

SEQ ID NO: 443434 - RNA, 32 nt, Human
gcggcaccagcucggagagaaaggagguucca

SEQ ID NO: 443435 - RNA, 32 nt, Human
gcggcaccaggccacaguuguaagggaucuug

SEQ ID NO: 443436 - RNA, 32 nt, Human
gcggcaccaucccaccacagugaaaacuuaug

SEQ ID NO: 443437 - RNA, 32 nt, Human
gcggcaccauguccaccauccagucggagacu

SEQ ID NO: 443438 - RNA, 32 nt, Human
gcggcacccacuggggcugcaucccccucccc

SEQ ID NO: 443439 - RNA, 32 nt, Human
gcggcaccccuccugaaguaccacagauuuag

SEQ ID NO: 443440 - RNA, 32 nt, Human
gcggcaccuccuuacugaccuccaggaucacc

SEQ ID NO: 443441 - RNA, 22 nt, Human
gcggcaccugccaucuucugaa

SEQ ID NO: 443442 - RNA, 32 nt, Human
gcggcaccugcggcgccugagccuggggaagc

SEQ ID NO: 443443 - RNA, 32 nt, Human
gcggcaccuggcccucagcugcagggaaaccg

SEQ ID NO: 443444 - RNA, 32 nt, Human
gcggcacucagccugcacgcccuccgcgcccc

SEQ ID NO: 443445 - RNA, 32 nt, Human
gcggcacugcacuccagccugggugacaaagu

SEQ ID NO: 443446 - RNA, 32 nt, Human
gcggcacugcagcugcguggccgcccuggagg

SEQ ID NO: 443447 - RNA, 32 nt, Human
gcggcagaaacauagcuccuggagcgcgggac

SEQ ID NO: 443448 - RNA, 32 nt, Human
gcggcagaaauucucccccuacugggccagcu

SEQ ID NO: 443449 - RNA, 32 nt, Human
gcggcagaggcagagaugggagugaugcggac

SEQ ID NO: 443450 - RNA, 32 nt, Human
gcggcagaggcgguguccaggcuuccgggcgg

SEQ ID NO: 443451 - RNA, 31 nt, Human
gcggcagcaacuuucugacaggugccgggga

SEQ ID NO: 443452 - RNA, 32 nt, Human
gcggcagcagccgccgccgagaugucccggcg

SEQ ID NO: 443453 - RNA, 32 nt, Human
gcggcagcagcggaggaguaggaggagacgga

SEQ ID NO: 443454 - RNA, 32 nt, Human
gcggcagcaggaucacagaaccucuggaugga

SEQ ID NO: 443455 - RNA, 32 nt, Human
gcggcagcaguuucagcgugcaguucccaaac

SEQ ID NO: 443456 - RNA, 32 nt, Human
gcggcagccaccgaggagggagcagugccggg

SEQ ID NO: 443457 - RNA, 32 nt, Human
gcggcagcccaggcgcggagggagcgaguccg

SEQ ID NO: 443458 - RNA, 32 nt, Human
gcggcagccgcgggagccccugggcaggcguc

SEQ ID NO: 443459 - RNA, 17 nt, Human
gcggcagccggcugcug

SEQ ID NO: 443460 - RNA, 32 nt, Human
gcggcagccuggggcucguuugggugauuucc

SEQ ID NO: 443461 - RNA, 19 nt, Human
gcggcagcgagccgggucc

SEQ ID NO: 443462 - RNA, 19 nt, Human
gcggcagcgaugccugccc

SEQ ID NO: 443463 - RNA, 22 nt, Human
gcggcagcggcagcggcagcgc

SEQ ID NO: 443464 - RNA, 21 nt, Human
gcggcagcggcggagacacua

SEQ ID NO: 443465 - RNA, 32 nt, Human
gcggcagcgggaccccagcgcgggcggcggcg

SEQ ID NO: 443466 - RNA, 23 nt, Human
gcggcagcggguucgguugcgcg

SEQ ID NO: 443467 - RNA, 32 nt, Human
gcggcagcgguuggagguuguaggaccggcga

SEQ ID NO: 443468 - RNA, 32 nt, Human
gcggcagcuagccuggccaguggcugucccgu

SEQ ID NO: 443469 - RNA, 32 nt, Human
gcggcagcuccaggaccucggcccuugggcuu

SEQ ID NO: 443470 - RNA, 18 nt, Human
gcggcagcuccugucccu

SEQ ID NO: 443471 - RNA, 32 nt, Human
gcggcaggaagaggagcgggagcaggagcgcg

SEQ ID NO: 443472 - RNA, 32 nt, Human
gcggcaggaaugcugcgcgccgcccugucccu

SEQ ID NO: 443473 - RNA, 32 nt, Human
gcggcaggagcuaucccacuggaagccaccuu

SEQ ID NO: 443474 - RNA, 32 nt, Human
gcggcaggagcugaggggaguuguagggaacu

SEQ ID NO: 443475 - RNA, 32 nt, Human
gcggcaggcccaggaauggcuggguaggacag

SEQ ID NO: 443476 - RNA, 32 nt, Human
gcggcaggcgcgcggagccagcggagccagcu

SEQ ID NO: 443477 - RNA, 32 nt, Human
gcggcaggcggcaucccagggugauaggcuga

SEQ ID NO: 443478 - RNA, 32 nt, Human
gcggcaggcugaagcuguucuuuugccucuuc

SEQ ID NO: 443479 - RNA, 32 nt, Human
gcggcagggccuggccugccucuccugugcug

SEQ ID NO: 443480 - RNA, 32 nt, Human
gcggcagggggaggaggaccgggagaacacca

SEQ ID NO: 443481 - RNA, 32 nt, Human
gcggcagggucuggaagcaugggggaggggga

SEQ ID NO: 443482 - RNA, 32 nt, Human
gcggcagggucuggggccggcgccugggaggg

SEQ ID NO: 443483 - RNA, 32 nt, Human
gcggcagguucucuuugagucaaaagcuuguc

SEQ ID NO: 443484 - RNA, 32 nt, Human
gcggcagucaucaagaugucauggcaccccca

SEQ ID NO: 443485 - RNA, 32 nt, Human
gcggcauauucagauucagaccucuuugggcu

SEQ ID NO: 443486 - RNA, 32 nt, Human
gcggcauccuucugccuguuucuguaagcaaa

SEQ ID NO: 443487 - RNA, 32 nt, Human
gcggcaucuggcccggccgcuccucgcugcgc

SEQ ID NO: 443488 - RNA, 32 nt, Human
gcggcaugaucacaccucacugcagccucaau

SEQ ID NO: 443489 - RNA, 32 nt, Human
gcggcauugcacuccagccugggcaacaagag

SEQ ID NO: 443490 - RNA, 22 nt, Human
gcggccaacgugggugaucaac

SEQ ID NO: 443491 - RNA, 32 nt, Human
gcggccaaucuccaagcucccugggccgcaac

SEQ ID NO: 443492 - RNA, 32 nt, Human
gcggccaccaccuccuccuccuccuggcccug

SEQ ID NO: 443493 - RNA, 32 nt, Human
gcggccacccgcucuccaggaaaggcacagcu

SEQ ID NO: 443494 - RNA, 20 nt, Human
gcggccaccgccucccggcc

SEQ ID NO: 443495 - RNA, 32 nt, Human
gcggccaccuccaagccaaggagguccuggag

SEQ ID NO: 443496 - RNA, 32 nt, Human
gcggccacgcacuccgccagaaggucgccagg

SEQ ID NO: 443497 - RNA, 32 nt, Human
gcggccagccccggcccugggcucggaggcug

SEQ ID NO: 443498 - RNA, 32 nt, Human
gcggccaggacagcagaggcugaggggccggg

SEQ ID NO: 443499 - RNA, 32 nt, Human
gcggccaggaggugagauggcagcugggcaaa

SEQ ID NO: 443500 - RNA, 32 nt, Human
gcggccaggcagagaaggugcccggagcucag

SEQ ID NO: 443501 - RNA, 32 nt, Human
gcggccaggccugccggucaggaaggccacaa

SEQ ID NO: 443502 - RNA, 32 nt, Human
gcggccaggcggaggcgagggagcagguuaga

SEQ ID NO: 443503 - RNA, 32 nt, Human
gcggccagggcagaaagcggcggcaggagaag

SEQ ID NO: 443504 - RNA, 32 nt, Human
gcggccaggucccugcugaaucacacgccgcc

SEQ ID NO: 443505 - RNA, 32 nt, Human
gcggccagugcuggaugcggggacccagcgca

SEQ ID NO: 443506 - RNA, 32 nt, Human
gcggccagugggcaggaugacgagccagaccc

SEQ ID NO: 443507 - RNA, 32 nt, Human
gcggccaucacugaagcaggagcggccaaaau

SEQ ID NO: 443508 - RNA, 31 nt, Human
gcggccauggcgacgggcggccagcagaagg

SEQ ID NO: 443509 - RNA, 22 nt, Human
gcggcccacuacagggcugcag

SEQ ID NO: 443510 - RNA, 32 nt, Human
gcggcccacugcaauccguggaggaaugugcc

SEQ ID NO: 443511 - RNA, 32 nt, Human
gcggcccagaaguaagccauccauccaugcca
